United States Patent Application Publication US 2018/0305689 A1 - sequence listing, part 143

SEQ ID NO: 1988387 - RNA, 19 nt, Artificial Sequence
  Description of Artificial Sequence: Synthetic oligonucleotide
  Antisense strand to SEQ ID NO: 1988386
uuaagccacauaauuugac

SEQ ID NO: 1988388 - RNA, 19 nt, Artificial Sequence
  Description of Artificial Sequence: Synthetic oligonucleotide
  Sense strand starting at position 180 of SEQ ID NO: 1880716
caaauuauguggcuuaaga

SEQ ID NO: 1988389 - RNA, 19 nt, Artificial Sequence
  Description of Artificial Sequence: Synthetic oligonucleotide
  Antisense strand to SEQ ID NO: 1988388
ucuuaagccacauaauuug

SEQ ID NO: 1988390 - RNA, 19 nt, Artificial Sequence
  Description of Artificial Sequence: Synthetic oligonucleotide
  Sense strand starting at position 182 of SEQ ID NO: 1880716
aauuauguggcuuaagaca

SEQ ID NO: 1988391 - RNA, 19 nt, Artificial Sequence
  Description of Artificial Sequence: Synthetic oligonucleotide
  Antisense strand to SEQ ID NO: 1988390
ugucuuaagccacauaauu

SEQ ID NO: 1988392 - RNA, 19 nt, Artificial Sequence
  Description of Artificial Sequence: Synthetic oligonucleotide
  Sense strand starting at position 246 of SEQ ID NO: 1880716
cuuuccuguuugucugaaa

SEQ ID NO: 1988393 - RNA, 19 nt, Artificial Sequence
  Description of Artificial Sequence: Synthetic oligonucleotide
  Antisense strand to SEQ ID NO: 1988392
uuucagacaaacaggaaag

SEQ ID NO: 1988394 - RNA, 19 nt, Artificial Sequence
  Description of Artificial Sequence: Synthetic oligonucleotide
  Sense strand starting at position 279 of SEQ ID NO: 1880716
uuguucuaauucuacgcua

SEQ ID NO: 1988395 - RNA, 19 nt, Artificial Sequence
  Description of Artificial Sequence: Synthetic oligonucleotide
  Antisense strand to SEQ ID NO: 1988394
uagcguagaauuagaacaa

SEQ ID NO: 1988396 - RNA, 19 nt, Artificial Sequence
  Description of Artificial Sequence: Synthetic oligonucleotide
  Sense strand starting at position 281 of SEQ ID NO: 1880716
guucuaauucuacgcuauu

SEQ ID NO: 1988397 - RNA, 19 nt, Artificial Sequence
  Description of Artificial Sequence: Synthetic oligonucleotide
  Antisense strand to SEQ ID NO: 1988396
aauagcguagaauuagaac

SEQ ID NO: 1988398 - RNA, 19 nt, Artificial Sequence
  Description of Artificial Sequence: Synthetic oligonucleotide
  Sense strand starting at position 401 of SEQ ID NO: 1880716
gcacuaugccauuaaguau

SEQ ID NO: 1988399 - RNA, 19 nt, Artificial Sequence
  Description of Artificial Sequence: Synthetic oligonucleotide
  Antisense strand to SEQ ID NO: 1988398
auacuuaauggcauagugc

SEQ ID NO: 1988400 - RNA, 19 nt, Artificial Sequence
  Description of Artificial Sequence: Synthetic oligonucleotide
  Sense strand starting at position 413 of SEQ ID NO: 1880716
uaaguauuguggucaguga

SEQ ID NO: 1988401 - RNA, 19 nt, Artificial Sequence
  Description of Artificial Sequence: Synthetic oligonucleotide
  Antisense strand to SEQ ID NO: 1988400
ucacugaccacaauacuua

SEQ ID NO: 1988402 - RNA, 19 nt, Artificial Sequence
  Description of Artificial Sequence: Synthetic oligonucleotide
  Sense strand starting at position 414 of SEQ ID NO: 1880716
aaguauuguggucagugau

SEQ ID NO: 1988403 - RNA, 19 nt, Artificial Sequence
  Description of Artificial Sequence: Synthetic oligonucleotide
  Antisense strand to SEQ ID NO: 1988402
aucacugaccacaauacuu

SEQ ID NO: 1988404 - RNA, 19 nt, Artificial Sequence
  Description of Artificial Sequence: Synthetic oligonucleotide
  Sense strand starting at position 521 of SEQ ID NO: 1880716
caacuuaugguugguuuga

SEQ ID NO: 1988405 - RNA, 19 nt, Artificial Sequence
  Description of Artificial Sequence: Synthetic oligonucleotide
  Antisense strand to SEQ ID NO: 1988404
ucaaaccaaccauaaguug

SEQ ID NO: 1988406 - RNA, 19 nt, Artificial Sequence
  Description of Artificial Sequence: Synthetic oligonucleotide
  Sense strand starting at position 522 of SEQ ID NO: 1880716
aacuuaugguugguuugaa

SEQ ID NO: 1988407 - RNA, 19 nt, Artificial Sequence
  Description of Artificial Sequence: Synthetic oligonucleotide
  Antisense strand to SEQ ID NO: 1988406
uucaaaccaaccauaaguu

SEQ ID NO: 1988408 - RNA, 19 nt, Artificial Sequence
  Description of Artificial Sequence: Synthetic oligonucleotide
  Sense strand starting at position 523 of SEQ ID NO: 1880716
acuuaugguugguuugaaa

SEQ ID NO: 1988409 - RNA, 19 nt, Artificial Sequence
  Description of Artificial Sequence: Synthetic oligonucleotide
  Antisense strand to SEQ ID NO: 1988408
uuucaaaccaaccauaagu

SEQ ID NO: 1988410 - RNA, 19 nt, Artificial Sequence
  Description of Artificial Sequence: Synthetic oligonucleotide
  Sense strand starting at position 588 of SEQ ID NO: 1880716
gauguaacacuauguggau

SEQ ID NO: 1988411 - RNA, 19 nt, Artificial Sequence
  Description of Artificial Sequence: Synthetic oligonucleotide
  Antisense strand to SEQ ID NO: 1988410
auccacauaguguuacauc

SEQ ID NO: 1988412 - RNA, 19 nt, Artificial Sequence
  Description of Artificial Sequence: Synthetic oligonucleotide
  Sense strand starting at position 589 of SEQ ID NO: 1880716
auguaacacuauguggaua

SEQ ID NO: 1988413 - RNA, 19 nt, Artificial Sequence
  Description of Artificial Sequence: Synthetic oligonucleotide
  Antisense strand to SEQ ID NO: 1988412
uauccacauaguguuacau

SEQ ID NO: 1988414 - RNA, 19 nt, Artificial Sequence
  Description of Artificial Sequence: Synthetic oligonucleotide
  Sense strand starting at position 591 of SEQ ID NO: 1880716
guaacacuauguggauaga

SEQ ID NO: 1988415 - RNA, 19 nt, Artificial Sequence
  Description of Artificial Sequence: Synthetic oligonucleotide
  Antisense strand to SEQ ID NO: 1988414
ucuauccacauaguguuac

SEQ ID NO: 1988416 - RNA, 19 nt, Artificial Sequence
  Description of Artificial Sequence: Synthetic oligonucleotide
  Sense strand starting at position 600 of SEQ ID NO: 1880716
uguggauagaaguguuaca

SEQ ID NO: 1988417 - RNA, 19 nt, Artificial Sequence
  Description of Artificial Sequence: Synthetic oligonucleotide
  Antisense strand to SEQ ID NO: 1988416
uguaacacuucuauccaca

SEQ ID NO: 1988418 - RNA, 19 nt, Artificial Sequence
  Description of Artificial Sequence: Synthetic oligonucleotide
  Sense strand starting at position 3212 of SEQ ID NO: 1880716
agaaauagccuaggaaagu

SEQ ID NO: 1988419 - RNA, 19 nt, Artificial Sequence
  Description of Artificial Sequence: Synthetic oligonucleotide
  Antisense strand to SEQ ID NO: 1988418
acuuuccuaggcuauuucu

SEQ ID NO: 1988420 - RNA, 19 nt, Artificial Sequence
  Description of Artificial Sequence: Synthetic oligonucleotide
  Sense strand starting at position 3265 of SEQ ID NO: 1880716
gguucccgccuuugaaaga

SEQ ID NO: 1988421 - RNA, 19 nt, Artificial Sequence
  Description of Artificial Sequence: Synthetic oligonucleotide
  Antisense strand to SEQ ID NO: 1988420
ucuuucaaaggcgggaacc

SEQ ID NO: 1988422 - RNA, 19 nt, Artificial Sequence
  Description of Artificial Sequence: Synthetic oligonucleotide
  Sense strand starting at position 3308 of SEQ ID NO: 1880716
uggacuccuuuagauaguu

SEQ ID NO: 1988423 - RNA, 19 nt, Artificial Sequence
  Description of Artificial Sequence: Synthetic oligonucleotide
  Antisense strand to SEQ ID NO: 1988422
aacuaucuaaaggagucca

SEQ ID NO: 1988424 - RNA, 19 nt, Artificial Sequence
  Description of Artificial Sequence: Synthetic oligonucleotide
  Sense strand starting at position 3336 of SEQ ID NO: 1880716
agcuacuuuggcugaguuu

SEQ ID NO: 1988425 - RNA, 19 nt, Artificial Sequence
  Description of Artificial Sequence: Synthetic oligonucleotide
  Antisense strand to SEQ ID NO: 1988424
aaacucagccaaaguagcu

SEQ ID NO: 1988426 - RNA, 19 nt, Artificial Sequence
  Description of Artificial Sequence: Synthetic oligonucleotide
  Sense strand starting at position 3375 of SEQ ID NO: 1880716
acacuacuuccugacaguu

SEQ ID NO: 1988427 - RNA, 19 nt, Artificial Sequence
  Description of Artificial Sequence: Synthetic oligonucleotide
  Antisense strand to SEQ ID NO: 1988426
aacugucaggaaguagugu

SEQ ID NO: 1988428 - RNA, 19 nt, Artificial Sequence
  Description of Artificial Sequence: Synthetic oligonucleotide
  Sense strand starting at position 3421 of SEQ ID NO: 1880716
ugguuagauucccagagaa

SEQ ID NO: 1988429 - RNA, 19 nt, Artificial Sequence
  Description of Artificial Sequence: Synthetic oligonucleotide
  Antisense strand to SEQ ID NO: 1988428
uucucugggaaucuaacca

SEQ ID NO: 1988430 - RNA, 19 nt, Artificial Sequence
  Description of Artificial Sequence: Synthetic oligonucleotide
  Sense strand starting at position 3485 of SEQ ID NO: 1880716
uaucaaagguauugugaua

SEQ ID NO: 1988431 - RNA, 19 nt, Artificial Sequence
  Description of Artificial Sequence: Synthetic oligonucleotide
  Antisense strand to SEQ ID NO: 1988430
uaucacaauaccuuugaua

SEQ ID NO: 1988432 - RNA, 19 nt, Artificial Sequence
  Description of Artificial Sequence: Synthetic oligonucleotide
  Sense strand starting at position 3490 of SEQ ID NO: 1880716
aagguauugugauagggcu

SEQ ID NO: 1988433 - RNA, 19 nt, Artificial Sequence
  Description of Artificial Sequence: Synthetic oligonucleotide
  Antisense strand to SEQ ID NO: 1988432
agcccuaucacaauaccuu

SEQ ID NO: 1988434 - RNA, 19 nt, Artificial Sequence
  Description of Artificial Sequence: Synthetic oligonucleotide
  Sense strand starting at position 3516 of SEQ ID NO: 1880716
gcaauagcaucuguuaucu

SEQ ID NO: 1988435 - RNA, 19 nt, Artificial Sequence
  Description of Artificial Sequence: Synthetic oligonucleotide
  Antisense strand to SEQ ID NO: 1988434
agauaacagaugcuauugc

SEQ ID NO: 1988436 - RNA, 19 nt, Artificial Sequence
  Description of Artificial Sequence: Synthetic oligonucleotide
  Sense strand starting at position 3521 of SEQ ID NO: 1880716
agcaucuguuaucuguuaa

SEQ ID NO: 1988437 - RNA, 19 nt, Artificial Sequence
  Description of Artificial Sequence: Synthetic oligonucleotide
  Antisense strand to SEQ ID NO: 1988436
uuaacagauaacagaugcu

SEQ ID NO: 1988438 - RNA, 19 nt, Artificial Sequence
  Description of Artificial Sequence: Synthetic oligonucleotide
  Sense strand starting at position 3525 of SEQ ID NO: 1880716
ucuguuaucuguuaacuua

SEQ ID NO: 1988439 - RNA, 19 nt, Artificial Sequence
  Description of Artificial Sequence: Synthetic oligonucleotide
  Antisense strand to SEQ ID NO: 1988438
uaaguuaacagauaacaga

SEQ ID NO: 1988440 - RNA, 19 nt, Artificial Sequence
  Description of Artificial Sequence: Synthetic oligonucleotide
  Sense strand starting at position 3653 of SEQ ID NO: 1880716
gcaggugugugcuggacua

SEQ ID NO: 1988441 - RNA, 19 nt, Artificial Sequence
  Description of Artificial Sequence: Synthetic oligonucleotide
  Antisense strand to SEQ ID NO: 1988440
uaguccagcacacaccugc

SEQ ID NO: 1988442 - RNA, 19 nt, Artificial Sequence
  Description of Artificial Sequence: Synthetic oligonucleotide
  Sense strand starting at position 3655 of SEQ ID NO: 1880716
aggugugugcuggacuaua

SEQ ID NO: 1988443 - RNA, 19 nt, Artificial Sequence
  Description of Artificial Sequence: Synthetic oligonucleotide
  Antisense strand to SEQ ID NO: 1988442
uauaguccagcacacaccu

SEQ ID NO: 1988444 - RNA, 19 nt, Artificial Sequence
  Description of Artificial Sequence: Synthetic oligonucleotide
  Sense strand starting at position 3677 of SEQ ID NO: 1880716
gaacauaugagcggucuga

SEQ ID NO: 1988445 - RNA, 19 nt, Artificial Sequence
  Description of Artificial Sequence: Synthetic oligonucleotide
  Antisense strand to SEQ ID NO: 1988444
ucagaccgcucauauguuc

SEQ ID NO: 1988446 - RNA, 19 nt, Artificial Sequence
  Description of Artificial Sequence: Synthetic oligonucleotide
  Sense strand starting at position 3722 of SEQ ID NO: 1880716
ucacaugcacguuaauuau

SEQ ID NO: 1988447 - RNA, 19 nt, Artificial Sequence
  Description of Artificial Sequence: Synthetic oligonucleotide
  Antisense strand to SEQ ID NO: 1988446
auaauuaacgugcauguga

SEQ ID NO: 1988448 - RNA, 19 nt, Artificial Sequence
  Description of Artificial Sequence: Synthetic oligonucleotide
  Sense strand starting at position 3728 of SEQ ID NO: 1880716
gcacguuaauuaugguaga

SEQ ID NO: 1988449 - RNA, 19 nt, Artificial Sequence
  Description of Artificial Sequence: Synthetic oligonucleotide
  Antisense strand to SEQ ID NO: 1988448
ucuaccauaauuaacgugc

SEQ ID NO: 1988450 - RNA, 19 nt, Artificial Sequence
  Description of Artificial Sequence: Synthetic oligonucleotide
  Sense strand starting at position 3729 of SEQ ID NO: 1880716
cacguuaauuaugguagaa

SEQ ID NO: 1988451 - RNA, 19 nt, Artificial Sequence
  Description of Artificial Sequence: Synthetic oligonucleotide
  Antisense strand to SEQ ID NO: 1988450
uucuaccauaauuaacgug

SEQ ID NO: 1988452 - RNA, 19 nt, Artificial Sequence
  Description of Artificial Sequence: Synthetic oligonucleotide
  Sense strand starting at position 3731 of SEQ ID NO: 1880716
cguuaauuaugguagaaau

SEQ ID NO: 1988453 - RNA, 19 nt, Artificial Sequence
  Description of Artificial Sequence: Synthetic oligonucleotide
  Antisense strand to SEQ ID NO: 1988452
auuucuaccauaauuaacg

SEQ ID NO: 1988454 - RNA, 19 nt, Artificial Sequence
  Description of Artificial Sequence: Synthetic oligonucleotide
  Sense strand starting at position 3783 of SEQ ID NO: 1880716
ggcagaguuucgcucguug

SEQ ID NO: 1988455 - RNA, 19 nt, Artificial Sequence
  Description of Artificial Sequence: Synthetic oligonucleotide
  Antisense strand to SEQ ID NO: 1988454
caacgagcgaaacucugcc

SEQ ID NO: 1988456 - RNA, 19 nt, Artificial Sequence
  Description of Artificial Sequence: Synthetic oligonucleotide
  Sense strand starting at position 20 of SEQ ID NO: 1880717
cuaaguuugcagggaaaua

SEQ ID NO: 1988457 - RNA, 19 nt, Artificial Sequence
  Description of Artificial Sequence: Synthetic oligonucleotide
  Antisense strand to SEQ ID NO: 1988456
uauuucccugcaaacuuag

SEQ ID NO: 1988458 - RNA, 19 nt, Artificial Sequence
  Description of Artificial Sequence: Synthetic oligonucleotide
  Sense strand starting at position 75 of SEQ ID NO: 1880717
uuacauauaucaguuguca

SEQ ID NO: 1988459 - RNA, 19 nt, Artificial Sequence
  Description of Artificial Sequence: Synthetic oligonucleotide
  Antisense strand to SEQ ID NO: 1988458
ugacaacugauauauguaa

SEQ ID NO: 1988460 - RNA, 19 nt, Artificial Sequence
  Description of Artificial Sequence: Synthetic oligonucleotide
  Sense strand starting at position 79 of SEQ ID NO: 1880717
auauaucaguugucacaac

SEQ ID NO: 1988461 - RNA, 19 nt, Artificial Sequence
  Description of Artificial Sequence: Synthetic oligonucleotide
  Antisense strand to SEQ ID NO: 1988460
guugugacaacugauauau

SEQ ID NO: 1988462 - RNA, 19 nt, Artificial Sequence
  Description of Artificial Sequence: Synthetic oligonucleotide
  Sense strand starting at position 594 of SEQ ID NO: 1880717
guuccuauaccuuauuaga

SEQ ID NO: 1988463 - RNA, 19 nt, Artificial Sequence
  Description of Artificial Sequence: Synthetic oligonucleotide
  Antisense strand to SEQ ID NO: 1988462
ucuaauaagguauaggaac

SEQ ID NO: 1988464 - RNA, 19 nt, Artificial Sequence
  Description of Artificial Sequence: Synthetic oligonucleotide
  Sense strand starting at position 693 of SEQ ID NO: 1880717
aacuaagauuuagagagua

SEQ ID NO: 1988465 - RNA, 19 nt, Artificial Sequence
  Description of Artificial Sequence: Synthetic oligonucleotide
  Antisense strand to SEQ ID NO: 1988464
uacucucuaaaucuuaguu

SEQ ID NO: 1988466 - RNA, 19 nt, Artificial Sequence
  Description of Artificial Sequence: Synthetic oligonucleotide
  Sense strand starting at position 703 of SEQ ID NO: 1880717
uagagaguauaggucacuu

SEQ ID NO: 1988467 - RNA, 19 nt, Artificial Sequence
  Description of Artificial Sequence: Synthetic oligonucleotide
  Antisense strand to SEQ ID NO: 1988466
aagugaccuauacucucua

SEQ ID NO: 1988468 - RNA, 19 nt, Artificial Sequence
  Description of Artificial Sequence: Synthetic oligonucleotide
  Sense strand starting at position 878 of SEQ ID NO: 1880717
acuaauuauguuugugaag

SEQ ID NO: 1988469 - RNA, 19 nt, Artificial Sequence
  Description of Artificial Sequence: Synthetic oligonucleotide
  Antisense strand to SEQ ID NO: 1988468
cuucacaaacauaauuagu

SEQ ID NO: 1988470 - RNA, 19 nt, Artificial Sequence
  Description of Artificial Sequence: Synthetic oligonucleotide
  Sense strand starting at position 1142 of SEQ ID NO: 1880717
cgguucucaacggagaacu

SEQ ID NO: 1988471 - RNA, 19 nt, Artificial Sequence
  Description of Artificial Sequence: Synthetic oligonucleotide
  Antisense strand to SEQ ID NO: 1988470
aguucuccguugagaaccg

SEQ ID NO: 1988472 - RNA, 19 nt, Artificial Sequence
  Description of Artificial Sequence: Synthetic oligonucleotide
  Sense strand starting at position 1586 of SEQ ID NO: 1880717
ucugaauauucggcauaaa

SEQ ID NO: 1988473 - RNA, 19 nt, Artificial Sequence
  Description of Artificial Sequence: Synthetic oligonucleotide
  Antisense strand to SEQ ID NO: 1988472
uuuaugccgaauauucaga

SEQ ID NO: 1988474 - RNA, 19 nt, Artificial Sequence
  Description of Artificial Sequence: Synthetic oligonucleotide
  Sense strand starting at position 1587 of SEQ ID NO: 1880717
cugaauauucggcauaaau

SEQ ID NO: 1988475 - RNA, 19 nt, Artificial Sequence
  Description of Artificial Sequence: Synthetic oligonucleotide
  Antisense strand to SEQ ID NO: 1988474
auuuaugccgaauauucag

SEQ ID NO: 1988476 - RNA, 19 nt, Artificial Sequence
  Description of Artificial Sequence: Synthetic oligonucleotide
  Sense strand starting at position 1607 of SEQ ID NO: 1880717
guugcuuggguagaauaaa

SEQ ID NO: 1988477 - RNA, 19 nt, Artificial Sequence
  Description of Artificial Sequence: Synthetic oligonucleotide
  Antisense strand to SEQ ID NO: 1988476
uuuauucuacccaagcaac

SEQ ID NO: 1988478 - RNA, 19 nt, Artificial Sequence
  Description of Artificial Sequence: Synthetic oligonucleotide
  Sense strand starting at position 1655 of SEQ ID NO: 1880717
uguauaucccaaggguaua

SEQ ID NO: 1988479 - RNA, 19 nt, Artificial Sequence
  Description of Artificial Sequence: Synthetic oligonucleotide
  Antisense strand to SEQ ID NO: 1988478
uauacccuugggauauaca

SEQ ID NO: 1988480 - RNA, 19 nt, Artificial Sequence
  Description of Artificial Sequence: Synthetic oligonucleotide
  Sense strand starting at position 1724 of SEQ ID NO: 1880717
uuugcugaggcagaaauaa

SEQ ID NO: 1988481 - RNA, 19 nt, Artificial Sequence
  Description of Artificial Sequence: Synthetic oligonucleotide
  Antisense strand to SEQ ID NO: 1988480
uuauuucugccucagcaaa

SEQ ID NO: 1988482 - RNA, 19 nt, Artificial Sequence
  Description of Artificial Sequence: Synthetic oligonucleotide
  Sense strand starting at position 1735 of SEQ ID NO: 1880717
agaaauaaugcaugcagca

SEQ ID NO: 1988483 - RNA, 19 nt, Artificial Sequence
  Description of Artificial Sequence: Synthetic oligonucleotide
  Antisense strand to SEQ ID NO: 1988482
ugcugcaugcauuauuucu

SEQ ID NO: 1988484 - RNA, 19 nt, Artificial Sequence
  Description of Artificial Sequence: Synthetic oligonucleotide
  Sense strand starting at position 1810 of SEQ ID NO: 1880717
agacuauacuucccagucu

SEQ ID NO: 1988485 - RNA, 19 nt, Artificial Sequence
  Description of Artificial Sequence: Synthetic oligonucleotide
  Antisense strand to SEQ ID NO: 1988484
agacugggaaguauagucu

SEQ ID NO: 1988486 - RNA, 19 nt, Artificial Sequence
  Description of Artificial Sequence: Synthetic oligonucleotide
  Sense strand starting at position 2048 of SEQ ID NO: 1880717
aagagagauagauguguuu

SEQ ID NO: 1988487 - RNA, 19 nt, Artificial Sequence
  Description of Artificial Sequence: Synthetic oligonucleotide
  Antisense strand to SEQ ID NO: 1988486
aaacacaucuaucucucuu

SEQ ID NO: 1988488 - RNA, 19 nt, Artificial Sequence
  Description of Artificial Sequence: Synthetic oligonucleotide
  Sense strand starting at position 2085 of SEQ ID NO: 1880717
gcugaauuuggcggucuau

SEQ ID NO: 1988489 - RNA, 19 nt, Artificial Sequence
  Description of Artificial Sequence: Synthetic oligonucleotide
  Antisense strand to SEQ ID NO: 1988488
auagaccgccaaauucagc

SEQ ID NO: 1988490 - RNA, 19 nt, Artificial Sequence
  Description of Artificial Sequence: Synthetic oligonucleotide
  Sense strand starting at position 2222 of SEQ ID NO: 1880717
gagguuuccuacucaugga

SEQ ID NO: 1988491 - RNA, 19 nt, Artificial Sequence
  Description of Artificial Sequence: Synthetic oligonucleotide
  Antisense strand to SEQ ID NO: 1988490
uccaugaguaggaaaccuc

SEQ ID NO: 1988492 - RNA, 19 nt, Artificial Sequence
  Description of Artificial Sequence: Synthetic oligonucleotide
  Sense strand starting at position 2235 of SEQ ID NO: 1880717
cauggagugucaucaguaa

SEQ ID NO: 1988493 - RNA, 19 nt, Artificial Sequence
  Description of Artificial Sequence: Synthetic oligonucleotide
  Antisense strand to SEQ ID NO: 1988492
uuacugaugacacuccaug

SEQ ID NO: 1988494 - RNA, 19 nt, Artificial Sequence
  Description of Artificial Sequence: Synthetic oligonucleotide
  Sense strand starting at position 2239 of SEQ ID NO: 1880717
gagugucaucaguaacucu

SEQ ID NO: 1988495 - RNA, 19 nt, Artificial Sequence
  Description of Artificial Sequence: Synthetic oligonucleotide
  Antisense strand to SEQ ID NO: 1988494
agaguuacugaugacacuc

SEQ ID NO: 1988496 - RNA, 19 nt, Artificial Sequence
  Description of Artificial Sequence: Synthetic oligonucleotide
  Sense strand starting at position 2276 of SEQ ID NO: 1880717
uugaauauugguggaauau

SEQ ID NO: 1988497 - RNA, 19 nt, Artificial Sequence
  Description of Artificial Sequence: Synthetic oligonucleotide
  Antisense strand to SEQ ID NO: 1988496
auauuccaccaauauucaa

SEQ ID NO: 1988498 - RNA, 19 nt, Artificial Sequence
  Description of Artificial Sequence: Synthetic oligonucleotide
  Sense strand starting at position 2288 of SEQ ID NO: 1880717
ggaauaugauaacacaaag

SEQ ID NO: 1988499 - RNA, 19 nt, Artificial Sequence
  Description of Artificial Sequence: Synthetic oligonucleotide
  Antisense strand to SEQ ID NO: 1988498
cuuuguguuaucauauucc

SEQ ID NO: 1988500 - RNA, 19 nt, Artificial Sequence
  Description of Artificial Sequence: Synthetic oligonucleotide
  Sense strand starting at position 2346 of SEQ ID NO: 1880717
aauugagugugucuuagag

SEQ ID NO: 1988501 - RNA, 19 nt, Artificial Sequence
  Description of Artificial Sequence: Synthetic oligonucleotide
  Antisense strand to SEQ ID NO: 1988500
cucuaagacacacucaauu

SEQ ID NO: 1988502 - RNA, 19 nt, Artificial Sequence
  Description of Artificial Sequence: Synthetic oligonucleotide
  Sense strand starting at position 2922 of SEQ ID NO: 1880717
agguccuaauccuuagaau

SEQ ID NO: 1988503 - RNA, 19 nt, Artificial Sequence
  Description of Artificial Sequence: Synthetic oligonucleotide
  Antisense strand to SEQ ID NO: 1988502
auucuaaggauuaggaccu

SEQ ID NO: 1988504 - RNA, 19 nt, Artificial Sequence
  Description of Artificial Sequence: Synthetic oligonucleotide
  Sense strand starting at position 2923 of SEQ ID NO: 1880717
gguccuaauccuuagaauc

SEQ ID NO: 1988505 - RNA, 19 nt, Artificial Sequence
  Description of Artificial Sequence: Synthetic oligonucleotide
  Antisense strand to SEQ ID NO: 1988504
gauucuaaggauuaggacc

SEQ ID NO: 1988506 - RNA, 19 nt, Artificial Sequence
  Description of Artificial Sequence: Synthetic oligonucleotide
  Sense strand starting at position 2969 of SEQ ID NO: 1880717
gguuucugucuguaggaac

SEQ ID NO: 1988507 - RNA, 19 nt, Artificial Sequence
  Description of Artificial Sequence: Synthetic oligonucleotide
  Antisense strand to SEQ ID NO: 1988506
guuccuacagacagaaacc

SEQ ID NO: 1988508 - RNA, 19 nt, Artificial Sequence
  Description of Artificial Sequence: Synthetic oligonucleotide
  Sense strand starting at position 3038 of SEQ ID NO: 1880717
aggucuuuauagguaugau

SEQ ID NO: 1988509 - RNA, 19 nt, Artificial Sequence
  Description of Artificial Sequence: Synthetic oligonucleotide
  Antisense strand to SEQ ID NO: 1988508
aucauaccuauaaagaccu

SEQ ID NO: 1988510 - RNA, 19 nt, Artificial Sequence
  Description of Artificial Sequence: Synthetic oligonucleotide
  Sense strand starting at position 3039 of SEQ ID NO: 1880717
ggucuuuauagguaugauu

SEQ ID NO: 1988511 - RNA, 19 nt, Artificial Sequence
  Description of Artificial Sequence: Synthetic oligonucleotide
  Antisense strand to SEQ ID NO: 1988510
aaucauaccuauaaagacc

SEQ ID NO: 1988512 - RNA, 19 nt, Artificial Sequence
  Description of Artificial Sequence: Synthetic oligonucleotide
  Sense strand starting at position 3070 of SEQ ID NO: 1880717
uugugaugaagagguuauc

SEQ ID NO: 1988513 - RNA, 19 nt, Artificial Sequence
  Description of Artificial Sequence: Synthetic oligonucleotide
  Antisense strand to SEQ ID NO: 1988512
gauaaccucuucaucacaa

SEQ ID NO: 1988514 - RNA, 19 nt, Artificial Sequence
  Description of Artificial Sequence: Synthetic oligonucleotide
  Sense strand starting at position 3083 of SEQ ID NO: 1880717
guuaucacagcuuauuaga

SEQ ID NO: 1988515 - RNA, 19 nt, Artificial Sequence
  Description of Artificial Sequence: Synthetic oligonucleotide
  Antisense strand to SEQ ID NO: 1988514
ucuaauaagcugugauaac

SEQ ID NO: 1988516 - RNA, 19 nt, Artificial Sequence
  Description of Artificial Sequence: Synthetic oligonucleotide
  Sense strand starting at position 3119 of SEQ ID NO: 1880717
ucacguauauccuuaugag

SEQ ID NO: 1988517 - RNA, 19 nt, Artificial Sequence
  Description of Artificial Sequence: Synthetic oligonucleotide
  Antisense strand to SEQ ID NO: 1988516
cucauaaggauauacguga

SEQ ID NO: 1988518 - RNA, 19 nt, Artificial Sequence
  Description of Artificial Sequence: Synthetic oligonucleotide
  Sense strand starting at position 3120 of SEQ ID NO: 1880717
cacguauauccuuaugaga

SEQ ID NO: 1988519 - RNA, 19 nt, Artificial Sequence
  Description of Artificial Sequence: Synthetic oligonucleotide
  Antisense strand to SEQ ID NO: 1988518
ucucauaaggauauacgug

SEQ ID NO: 1988520 - RNA, 19 nt, Artificial Sequence
  Description of Artificial Sequence: Synthetic oligonucleotide
  Sense strand starting at position 3170 of SEQ ID NO: 1880717
aaggcaaugugaucaggga

SEQ ID NO: 1988521 - RNA, 19 nt, Artificial Sequence
  Description of Artificial Sequence: Synthetic oligonucleotide
  Antisense strand to SEQ ID NO: 1988520
ucccugaucacauugccuu

SEQ ID NO: 1988522 - RNA, 19 nt, Artificial Sequence
  Description of Artificial Sequence: Synthetic oligonucleotide
  Sense strand starting at position 3256 of SEQ ID NO: 1880717
gccagauucucucuuagag

SEQ ID NO: 1988523 - RNA, 19 nt, Artificial Sequence
  Description of Artificial Sequence: Synthetic oligonucleotide
  Antisense strand to SEQ ID NO: 1988522
cucuaagagagaaucuggc

SEQ ID NO: 1988524 - RNA, 19 nt, Artificial Sequence
  Description of Artificial Sequence: Synthetic oligonucleotide
  Sense strand starting at position 3296 of SEQ ID NO: 1880717
ggcuaacuccuggauguag

SEQ ID NO: 1988525 - RNA, 19 nt, Artificial Sequence
  Description of Artificial Sequence: Synthetic oligonucleotide
  Antisense strand to SEQ ID NO: 1988524
cuacauccaggaguuagcc

SEQ ID NO: 1988526 - RNA, 19 nt, Artificial Sequence
  Description of Artificial Sequence: Synthetic oligonucleotide
  Sense strand starting at position 3465 of SEQ ID NO: 1880717
cuaaguuuauaucugugau

SEQ ID NO: 1988527 - RNA, 19 nt, Artificial Sequence
  Description of Artificial Sequence: Synthetic oligonucleotide
  Antisense strand to SEQ ID NO: 1988526
aucacagauauaaacuuag

SEQ ID NO: 1988528 - RNA, 19 nt, Artificial Sequence
  Description of Artificial Sequence: Synthetic oligonucleotide
  Sense strand starting at position 3573 of SEQ ID NO: 1880717
guugaaugucuuuagugag

SEQ ID NO: 1988529 - RNA, 19 nt, Artificial Sequence
  Description of Artificial Sequence: Synthetic oligonucleotide
  Antisense strand to SEQ ID NO: 1988528
cucacuaaagacauucaac

SEQ ID NO: 1988530 - RNA, 19 nt, Artificial Sequence
  Description of Artificial Sequence: Synthetic oligonucleotide
  Sense strand starting at position 3622 of SEQ ID NO: 1880717
cugagucugagucauugaa

SEQ ID NO: 1988531 - RNA, 19 nt, Artificial Sequence
  Description of Artificial Sequence: Synthetic oligonucleotide
  Antisense strand to SEQ ID NO: 1988530
uucaaugacucagacucag

SEQ ID NO: 1988532 - RNA, 19 nt, Artificial Sequence
  Description of Artificial Sequence: Synthetic oligonucleotide
  Sense strand starting at position 3701 of SEQ ID NO: 1880717
ggaggaucgccuuacuauc

SEQ ID NO: 1988533 - RNA, 19 nt, Artificial Sequence
  Description of Artificial Sequence: Synthetic oligonucleotide
  Antisense strand to SEQ ID NO: 1988532
gauaguaaggcgauccucc

SEQ ID NO: 1988534 - RNA, 19 nt, Artificial Sequence
  Description of Artificial Sequence: Synthetic oligonucleotide
  Sense strand starting at position 3782 of SEQ ID NO: 1880717
aaauguagggucugaaaua

SEQ ID NO: 1988535 - RNA, 19 nt, Artificial Sequence
  Description of Artificial Sequence: Synthetic oligonucleotide
  Antisense strand to SEQ ID NO: 1988534
uauuucagacccuacauuu

SEQ ID NO: 1988536 - RNA, 19 nt, Artificial Sequence
  Description of Artificial Sequence: Synthetic oligonucleotide
  Sense strand starting at position 70 of SEQ ID NO: 1880718
ccucauucucuugagagcu

SEQ ID NO: 1988537 - RNA, 19 nt, Artificial Sequence
  Description of Artificial Sequence: Synthetic oligonucleotide
  Antisense strand to SEQ ID NO: 1988536
agcucucaagagaaugagg

SEQ ID NO: 1988538 - RNA, 19 nt, Artificial Sequence
  Description of Artificial Sequence: Synthetic oligonucleotide
  Sense strand starting at position 84 of SEQ ID NO: 1880718
gagcuaugugcauagagaa

SEQ ID NO: 1988539 - RNA, 19 nt, Artificial Sequence
  Description of Artificial Sequence: Synthetic oligonucleotide
  Antisense strand to SEQ ID NO: 1988538
uucucuaugcacauagcuc

SEQ ID NO: 1988540 - RNA, 19 nt, Artificial Sequence
  Description of Artificial Sequence: Synthetic oligonucleotide
  Sense strand starting at position 139 of SEQ ID NO: 1880718
uuuagaguacauugucuaa

SEQ ID NO: 1988541 - RNA, 19 nt, Artificial Sequence
  Description of Artificial Sequence: Synthetic oligonucleotide
  Antisense strand to SEQ ID NO: 1988540
uuagacaauguacucuaaa

SEQ ID NO: 1988542 - RNA, 19 nt, Artificial Sequence
  Description of Artificial Sequence: Synthetic oligonucleotide
  Sense strand starting at position 141 of SEQ ID NO: 1880718
uagaguacauugucuaaug

SEQ ID NO: 1988543 - RNA, 19 nt, Artificial Sequence
  Description of Artificial Sequence: Synthetic oligonucleotide
  Antisense strand to SEQ ID NO: 1988542
cauuagacaauguacucua

SEQ ID NO: 1988544 - RNA, 19 nt, Artificial Sequence
  Description of Artificial Sequence: Synthetic oligonucleotide
  Sense strand starting at position 142 of SEQ ID NO: 1880718
agaguacauugucuaaugu

SEQ ID NO: 1988545 - RNA, 19 nt, Artificial Sequence
  Description of Artificial Sequence: Synthetic oligonucleotide
  Antisense strand to SEQ ID NO: 1988544
acauuagacaauguacucu

SEQ ID NO: 1988546 - RNA, 19 nt, Artificial Sequence
  Description of Artificial Sequence: Synthetic oligonucleotide
  Sense strand starting at position 143 of SEQ ID NO: 1880718
gaguacauugucuaauguu

SEQ ID NO: 1988547 - RNA, 19 nt, Artificial Sequence
  Description of Artificial Sequence: Synthetic oligonucleotide
  Antisense strand to SEQ ID NO: 1988546
aacauuagacaauguacuc

SEQ ID NO: 1988548 - RNA, 19 nt, Artificial Sequence
  Description of Artificial Sequence: Synthetic oligonucleotide
  Sense strand starting at position 150 of SEQ ID NO: 1880718
uugucuaauguuggaaaua

SEQ ID NO: 1988549 - RNA, 19 nt, Artificial Sequence
  Description of Artificial Sequence: Synthetic oligonucleotide
  Antisense strand to SEQ ID NO: 1988548
uauuuccaacauuagacaa

SEQ ID NO: 1988550 - RNA, 19 nt, Artificial Sequence
  Description of Artificial Sequence: Synthetic oligonucleotide
  Sense strand starting at position 162 of SEQ ID NO: 1880718
ggaaauaagguagguaagu

SEQ ID NO: 1988551 - RNA, 19 nt, Artificial Sequence
  Description of Artificial Sequence: Synthetic oligonucleotide
  Antisense strand to SEQ ID NO: 1988550
acuuaccuaccuuauuucc

SEQ ID NO: 1988552 - RNA, 19 nt, Artificial Sequence
  Description of Artificial Sequence: Synthetic oligonucleotide
  Sense strand starting at position 171 of SEQ ID NO: 1880718
guagguaagucucucuaaa

SEQ ID NO: 1988553 - RNA, 19 nt, Artificial Sequence
  Description of Artificial Sequence: Synthetic oligonucleotide
  Antisense strand to SEQ ID NO: 1988552
uuuagagagacuuaccuac

SEQ ID NO: 1988554 - RNA, 19 nt, Artificial Sequence
  Description of Artificial Sequence: Synthetic oligonucleotide
  Sense strand starting at position 173 of SEQ ID NO: 1880718
agguaagucucucuaaauc

SEQ ID NO: 1988555 - RNA, 19 nt, Artificial Sequence
  Description of Artificial Sequence: Synthetic oligonucleotide
  Antisense strand to SEQ ID NO: 1988554
gauuuagagagacuuaccu

SEQ ID NO: 1988556 - RNA, 19 nt, Artificial Sequence
  Description of Artificial Sequence: Synthetic oligonucleotide
  Sense strand starting at position 290 of SEQ ID NO: 1880718
cucagacucagcuggagaa

SEQ ID NO: 1988557 - RNA, 19 nt, Artificial Sequence
  Description of Artificial Sequence: Synthetic oligonucleotide
  Antisense strand to SEQ ID NO: 1988556
uucuccagcugagucugag

SEQ ID NO: 1988558 - RNA, 19 nt, Artificial Sequence
  Description of Artificial Sequence: Synthetic oligonucleotide
  Sense strand starting at position 309 of SEQ ID NO: 1880718
gagagauguucccucucuu

SEQ ID NO: 1988559 - RNA, 19 nt, Artificial Sequence
  Description of Artificial Sequence: Synthetic oligonucleotide
  Antisense strand to SEQ ID NO: 1988558
aagagagggaacaucucuc

SEQ ID NO: 1988560 - RNA, 19 nt, Artificial Sequence
  Description of Artificial Sequence: Synthetic oligonucleotide
  Sense strand starting at position 605 of SEQ ID NO: 1880718
ggccuacauccaggaguua

SEQ ID NO: 1988561 - RNA, 19 nt, Artificial Sequence
  Description of Artificial Sequence: Synthetic oligonucleotide
  Antisense strand to SEQ ID NO: 1988560
uaacuccuggauguaggcc

SEQ ID NO: 1988562 - RNA, 19 nt, Artificial Sequence
  Description of Artificial Sequence: Synthetic oligonucleotide
  Sense strand starting at position 821 of SEQ ID NO: 1880718
ucuaauaagcugugauaac

SEQ ID NO: 1988563 - RNA, 19 nt, Artificial Sequence
  Description of Artificial Sequence: Synthetic oligonucleotide
  Antisense strand to SEQ ID NO: 1988562
guuaucacagcuuauuaga

SEQ ID NO: 1988564 - RNA, 19 nt, Artificial Sequence
  Description of Artificial Sequence: Synthetic oligonucleotide
  Sense strand starting at position 927 of SEQ ID NO: 1880718
uuucuuagguuccuacaga

SEQ ID NO: 1988565 - RNA, 19 nt, Artificial Sequence
  Description of Artificial Sequence: Synthetic oligonucleotide
  Antisense strand to SEQ ID NO: 1988564
ucuguaggaaccuaagaaa

SEQ ID NO: 1988566 - RNA, 19 nt, Artificial Sequence
  Description of Artificial Sequence: Synthetic oligonucleotide
  Sense strand starting at position 958 of SEQ ID NO: 1880718
uucuguaucagguaguauu

SEQ ID NO: 1988567 - RNA, 19 nt, Artificial Sequence
  Description of Artificial Sequence: Synthetic oligonucleotide
  Antisense strand to SEQ ID NO: 1988566
aauacuaccugauacagaa

SEQ ID NO: 1988568 - RNA, 19 nt, Artificial Sequence
  Description of Artificial Sequence: Synthetic oligonucleotide
  Sense strand starting at position 1162 of SEQ ID NO: 1880718
cauccuagaguuuggauca

SEQ ID NO: 1988569 - RNA, 19 nt, Artificial Sequence
  Description of Artificial Sequence: Synthetic oligonucleotide
  Antisense strand to SEQ ID NO: 1988568
ugauccaaacucuaggaug

SEQ ID NO: 1988570 - RNA, 19 nt, Artificial Sequence
  Description of Artificial Sequence: Synthetic oligonucleotide
  Sense strand starting at position 1450 of SEQ ID NO: 1880718
uuucuauauguggagcaua

SEQ ID NO: 1988571 - RNA, 19 nt, Artificial Sequence
  Description of Artificial Sequence: Synthetic oligonucleotide
  Antisense strand to SEQ ID NO: 1988570
uaugcuccacauauagaaa

SEQ ID NO: 1988572 - RNA, 19 nt, Artificial Sequence
  Description of Artificial Sequence: Synthetic oligonucleotide
  Sense strand starting at position 1486 of SEQ ID NO: 1880718
uuucuaauaugaguuuggu

SEQ ID NO: 1988573 - RNA, 19 nt, Artificial Sequence
  Description of Artificial Sequence: Synthetic oligonucleotide
  Antisense strand to SEQ ID NO: 1988572
accaaacucauauuagaaa

SEQ ID NO: 1988574 - RNA, 19 nt, Artificial Sequence
  Description of Artificial Sequence: Synthetic oligonucleotide
  Sense strand starting at position 1489 of SEQ ID NO: 1880718
cuaauaugaguuugguauu

SEQ ID NO: 1988575 - RNA, 19 nt, Artificial Sequence
  Description of Artificial Sequence: Synthetic oligonucleotide
  Antisense strand to SEQ ID NO: 1988574
aauaccaaacucauauuag

SEQ ID NO: 1988576 - RNA, 19 nt, Artificial Sequence
  Description of Artificial Sequence: Synthetic oligonucleotide
  Sense strand starting at position 1620 of SEQ ID NO: 1880718
guguuaucauauuccacca

SEQ ID NO: 1988577 - RNA, 19 nt, Artificial Sequence
  Description of Artificial Sequence: Synthetic oligonucleotide
  Antisense strand to SEQ ID NO: 1988576
ugguggaauaugauaacac

SEQ ID NO: 1988578 - RNA, 19 nt, Artificial Sequence
  Description of Artificial Sequence: Synthetic oligonucleotide
  Sense strand starting at position 1658 of SEQ ID NO: 1880718
cuuggcaagaguuacugau

SEQ ID NO: 1988579 - RNA, 19 nt, Artificial Sequence
  Description of Artificial Sequence: Synthetic oligonucleotide
  Antisense strand to SEQ ID NO: 1988578
aucaguaacucuugccaag

SEQ ID NO: 1988580 - RNA, 19 nt, Artificial Sequence
  Description of Artificial Sequence: Synthetic oligonucleotide
  Sense strand starting at position 1660 of SEQ ID NO: 1880718
uggcaagaguuacugauga

SEQ ID NO: 1988581 - RNA, 19 nt, Artificial Sequence
  Description of Artificial Sequence: Synthetic oligonucleotide
  Antisense strand to SEQ ID NO: 1988580
ucaucaguaacucuugcca

SEQ ID NO: 1988582 - RNA, 19 nt, Artificial Sequence
  Description of Artificial Sequence: Synthetic oligonucleotide
  Sense strand starting at position 1696 of SEQ ID NO: 1880718
accucaaaucuuggugaag

SEQ ID NO: 1988583 - RNA, 19 nt, Artificial Sequence
  Description of Artificial Sequence: Synthetic oligonucleotide
  Antisense strand to SEQ ID NO: 1988582
cuucaccaagauuugaggu

SEQ ID NO: 1988584 - RNA, 19 nt, Artificial Sequence
  Description of Artificial Sequence: Synthetic oligonucleotide
  Sense strand starting at position 2100 of SEQ ID NO: 1880718
ggaaguauagucuagcugu

SEQ ID NO: 1988585 - RNA, 19 nt, Artificial Sequence
  Description of Artificial Sequence: Synthetic oligonucleotide
  Antisense strand to SEQ ID NO: 1988584
acagcuagacuauacuucc

SEQ ID NO: 1988586 - RNA, 19 nt, Artificial Sequence
  Description of Artificial Sequence: Synthetic oligonucleotide
  Sense strand starting at position 2115 of SEQ ID NO: 1880718
cugugugcucaggaagaag

SEQ ID NO: 1988587 - RNA, 19 nt, Artificial Sequence
  Description of Artificial Sequence: Synthetic oligonucleotide
  Antisense strand to SEQ ID NO: 1988586
cuucuuccugagcacacag

SEQ ID NO: 1988588 - RNA, 19 nt, Artificial Sequence
  Description of Artificial Sequence: Synthetic oligonucleotide
  Sense strand starting at position 2245 of SEQ ID NO: 1880718
uguguauacccuugggaua

SEQ ID NO: 1988589 - RNA, 19 nt, Artificial Sequence
  Description of Artificial Sequence: Synthetic oligonucleotide
  Antisense strand to SEQ ID NO: 1988588
uaucccaaggguauacaca

SEQ ID NO: 1988590 - RNA, 19 nt, Artificial Sequence
  Description of Artificial Sequence: Synthetic oligonucleotide
  Sense strand starting at position 2246 of SEQ ID NO: 1880718
guguauacccuugggauau

SEQ ID NO: 1988591 - RNA, 19 nt, Artificial Sequence
  Description of Artificial Sequence: Synthetic oligonucleotide
  Antisense strand to SEQ ID NO: 1988590
auaucccaaggguauacac

SEQ ID NO: 1988592 - RNA, 19 nt, Artificial Sequence
  Description of Artificial Sequence: Synthetic oligonucleotide
  Sense strand starting at position 2311 of SEQ ID NO: 1880718
gcaacuauuuaugccgaau

SEQ ID NO: 1988593 - RNA, 19 nt, Artificial Sequence
  Description of Artificial Sequence: Synthetic oligonucleotide
  Antisense strand to SEQ ID NO: 1988592
auucggcauaaauaguugc

SEQ ID NO: 1988594 - RNA, 19 nt, Artificial Sequence
  Description of Artificial Sequence: Synthetic oligonucleotide
  Sense strand starting at position 2526 of SEQ ID NO: 1880718
ggacuaggcaaaugaaguu

SEQ ID NO: 1988595 - RNA, 19 nt, Artificial Sequence
  Description of Artificial Sequence: Synthetic oligonucleotide
  Antisense strand to SEQ ID NO: 1988594
aacuucauuugccuagucc

SEQ ID NO: 1988596 - RNA, 19 nt, Artificial Sequence
  Description of Artificial Sequence: Synthetic oligonucleotide
  Sense strand starting at position 2940 of SEQ ID NO: 1880718
gcagaagaguaauccgaag

SEQ ID NO: 1988597 - RNA, 19 nt, Artificial Sequence
  Description of Artificial Sequence: Synthetic oligonucleotide
  Antisense strand to SEQ ID NO: 1988596
cuucggauuacucuucugc

SEQ ID NO: 1988598 - RNA, 19 nt, Artificial Sequence
  Description of Artificial Sequence: Synthetic oligonucleotide
  Sense strand starting at position 2942 of SEQ ID NO: 1880718
agaagaguaauccgaagcu

SEQ ID NO: 1988599 - RNA, 19 nt, Artificial Sequence
  Description of Artificial Sequence: Synthetic oligonucleotide
  Antisense strand to SEQ ID NO: 1988598
agcuucggauuacucuucu

SEQ ID NO: 1988600 - RNA, 19 nt, Artificial Sequence
  Description of Artificial Sequence: Synthetic oligonucleotide
  Sense strand starting at position 2970 of SEQ ID NO: 1880718
auaacaugagaaugcugau

SEQ ID NO: 1988601 - RNA, 19 nt, Artificial Sequence
  Description of Artificial Sequence: Synthetic oligonucleotide
  Antisense strand to SEQ ID NO: 1988600
aucagcauucucauguuau

SEQ ID NO: 1988602 - RNA, 19 nt, Artificial Sequence
  Description of Artificial Sequence: Synthetic oligonucleotide
  Sense strand starting at position 3197 of SEQ ID NO: 1880718
gggcaagugaccuauacuc

SEQ ID NO: 1988603 - RNA, 19 nt, Artificial Sequence
  Description of Artificial Sequence: Synthetic oligonucleotide
  Antisense strand to SEQ ID NO: 1988602
gaguauaggucacuugccc

SEQ ID NO: 1988604 - RNA, 19 nt, Artificial Sequence
  Description of Artificial Sequence: Synthetic oligonucleotide
  Sense strand starting at position 3796 of SEQ ID NO: 1880718
agcacuauugaguaaaggu

SEQ ID NO: 1988605 - RNA, 19 nt, Artificial Sequence
  Description of Artificial Sequence: Synthetic oligonucleotide
  Antisense strand to SEQ ID NO: 1988604
accuuuacucaauagugcu

SEQ ID NO: 1988606 - RNA, 19 nt, Artificial Sequence
  Description of Artificial Sequence: Synthetic oligonucleotide
  Sense strand starting at position 3804 of SEQ ID NO: 1880718
ugaguaaaggugggaucuu

SEQ ID NO: 1988607 - RNA, 19 nt, Artificial Sequence
  Description of Artificial Sequence: Synthetic oligonucleotide
  Antisense strand to SEQ ID NO: 1988606
aagaucccaccuuuacuca

SEQ ID NO: 1988608 - RNA, 19 nt, Artificial Sequence
  Description of Artificial Sequence: Synthetic oligonucleotide
  Sense strand starting at position 3813 of SEQ ID NO: 1880718
gugggaucuuaaguuguga

SEQ ID NO: 1988609 - RNA, 19 nt, Artificial Sequence
  Description of Artificial Sequence: Synthetic oligonucleotide
  Antisense strand to SEQ ID NO: 1988608
ucacaacuuaagaucccac

SEQ ID NO: 1988610 - RNA, 19 nt, Artificial Sequence
  Description of Artificial Sequence: Synthetic oligonucleotide
  Sense strand starting at position 3815 of SEQ ID NO: 1880718
gggaucuuaaguugugaca

SEQ ID NO: 1988611 - RNA, 19 nt, Artificial Sequence
  Description of Artificial Sequence: Synthetic oligonucleotide
  Antisense strand to SEQ ID NO: 1988610
ugucacaacuuaagauccc

SEQ ID NO: 1988612 - RNA, 19 nt, Artificial Sequence
  Description of Artificial Sequence: Synthetic oligonucleotide
  Sense strand starting at position 3899 of SEQ ID NO: 1880718
uuagguuuaugucuaagau

SEQ ID NO: 1988613 - RNA, 19 nt, Artificial Sequence
  Description of Artificial Sequence: Synthetic oligonucleotide
  Antisense strand to SEQ ID NO: 1988612
aucuuagacauaaaccuaa

SEQ ID NO: 1988614 - RNA, 19 nt, Artificial Sequence
  Description of Artificial Sequence: Synthetic oligonucleotide
  Sense strand starting at position 3900 of SEQ ID NO: 1880718
uagguuuaugucuaagauc

SEQ ID NO: 1988615 - RNA, 19 nt, Artificial Sequence
  Description of Artificial Sequence: Synthetic oligonucleotide
  Antisense strand to SEQ ID NO: 1988614
gaucuuagacauaaaccua

SEQ ID NO: 1988616 - RNA, 19 nt, Artificial Sequence
  Description of Artificial Sequence: Synthetic oligonucleotide
  Sense strand starting at position 164 of SEQ ID NO: 1880719
ggauuccaggcaugagcau

SEQ ID NO: 1988617 - RNA, 19 nt, Artificial Sequence
  Description of Artificial Sequence: Synthetic oligonucleotide
  Antisense strand to SEQ ID NO: 1988616
augcucaugccuggaaucc

SEQ ID NO: 1988618 - RNA, 19 nt, Artificial Sequence
  Description of Artificial Sequence: Synthetic oligonucleotide
  Sense strand starting at position 177 of SEQ ID NO: 1880719
gagcauguguuguuucuuu

SEQ ID NO: 1988619 - RNA, 19 nt, Artificial Sequence
  Description of Artificial Sequence: Synthetic oligonucleotide
  Antisense strand to SEQ ID NO: 1988618
aaagaaacaacacaugcuc

SEQ ID NO: 1988620 - RNA, 19 nt, Artificial Sequence
  Description of Artificial Sequence: Synthetic oligonucleotide
  Sense strand starting at position 181 of SEQ ID NO: 1880719
auguguuguuucuuuagcu

SEQ ID NO: 1988621 - RNA, 19 nt, Artificial Sequence
  Description of Artificial Sequence: Synthetic oligonucleotide
  Antisense strand to SEQ ID NO: 1988620
agcuaaagaaacaacacau

SEQ ID NO: 1988622 - RNA, 19 nt, Artificial Sequence
  Description of Artificial Sequence: Synthetic oligonucleotide
  Sense strand starting at position 188 of SEQ ID NO: 1880719
guuucuuuagcuggaugca

SEQ ID NO: 1988623 - RNA, 19 nt, Artificial Sequence
  Description of Artificial Sequence: Synthetic oligonucleotide
  Antisense strand to SEQ ID NO: 1988622
ugcauccagcuaaagaaac

SEQ ID NO: 1988624 - RNA, 19 nt, Artificial Sequence
  Description of Artificial Sequence: Synthetic oligonucleotide
  Sense strand starting at position 189 of SEQ ID NO: 1880719
uuucuuuagcuggaugcau

SEQ ID NO: 1988625 - RNA, 19 nt, Artificial Sequence
  Description of Artificial Sequence: Synthetic oligonucleotide
  Antisense strand to SEQ ID NO: 1988624
augcauccagcuaaagaaa

SEQ ID NO: 1988626 - RNA, 19 nt, Artificial Sequence
  Description of Artificial Sequence: Synthetic oligonucleotide
  Sense strand starting at position 230 of SEQ ID NO: 1880719
guccauccucagggacaaa

SEQ ID NO: 1988627 - RNA, 19 nt, Artificial Sequence
  Description of Artificial Sequence: Synthetic oligonucleotide
  Antisense strand to SEQ ID NO: 1988626
uuugucccugaggauggac

SEQ ID NO: 1988628 - RNA, 19 nt, Artificial Sequence
  Description of Artificial Sequence: Synthetic oligonucleotide
  Sense strand starting at position 261 of SEQ ID NO: 1880719
ggcauacauguagacauau

SEQ ID NO: 1988629 - RNA, 19 nt, Artificial Sequence
  Description of Artificial Sequence: Synthetic oligonucleotide
  Antisense strand to SEQ ID NO: 1988628
auaugucuacauguaugcc

SEQ ID NO: 1988630 - RNA, 19 nt, Artificial Sequence
  Description of Artificial Sequence: Synthetic oligonucleotide
  Sense strand starting at position 448 of SEQ ID NO: 1880719
ggugaacuuccaggcacaa

SEQ ID NO: 1988631 - RNA, 19 nt, Artificial Sequence
  Description of Artificial Sequence: Synthetic oligonucleotide
  Antisense strand to SEQ ID NO: 1988630
uugugccuggaaguucacc

SEQ ID NO: 1988632 - RNA, 19 nt, Artificial Sequence
  Description of Artificial Sequence: Synthetic oligonucleotide
  Sense strand starting at position 593 of SEQ ID NO: 1880719
uguggucuggacugacaua

SEQ ID NO: 1988633 - RNA, 19 nt, Artificial Sequence
  Description of Artificial Sequence: Synthetic oligonucleotide
  Antisense strand to SEQ ID NO: 1988632
uaugucaguccagaccaca

SEQ ID NO: 1988634 - RNA, 19 nt, Artificial Sequence
  Description of Artificial Sequence: Synthetic oligonucleotide
  Sense strand starting at position 604 of SEQ ID NO: 1880719
cugacauacuucuugggau

SEQ ID NO: 1988635 - RNA, 19 nt, Artificial Sequence
  Description of Artificial Sequence: Synthetic oligonucleotide
  Antisense strand to SEQ ID NO: 1988634
aucccaagaaguaugucag

SEQ ID NO: 1988636 - RNA, 19 nt, Artificial Sequence
  Description of Artificial Sequence: Synthetic oligonucleotide
  Sense strand starting at position 629 of SEQ ID NO: 1880719
uggcucuucgcaggauaaa

SEQ ID NO: 1988637 - RNA, 19 nt, Artificial Sequence
  Description of Artificial Sequence: Synthetic oligonucleotide
  Antisense strand to SEQ ID NO: 1988636
uuuauccugcgaagagcca

SEQ ID NO: 1988638 - RNA, 19 nt, Artificial Sequence
  Description of Artificial Sequence: Synthetic oligonucleotide
  Sense strand starting at position 630 of SEQ ID NO: 1880719
ggcucuucgcaggauaaau

SEQ ID NO: 1988639 - RNA, 19 nt, Artificial Sequence
  Description of Artificial Sequence: Synthetic oligonucleotide
  Antisense strand to SEQ ID NO: 1988638
auuuauccugcgaagagcc

SEQ ID NO: 1988640 - RNA, 19 nt, Artificial Sequence
  Description of Artificial Sequence: Synthetic oligonucleotide
  Sense strand starting at position 673 of SEQ ID NO: 1880719
cuuuaaagcuggucaacau

SEQ ID NO: 1988641 - RNA, 19 nt, Artificial Sequence
  Description of Artificial Sequence: Synthetic oligonucleotide
  Antisense strand to SEQ ID NO: 1988640
auguugaccagcuuuaaag

SEQ ID NO: 1988642 - RNA, 19 nt, Artificial Sequence
  Description of Artificial Sequence: Synthetic oligonucleotide
  Sense strand starting at position 674 of SEQ ID NO: 1880719
uuuaaagcuggucaacauu

SEQ ID NO: 1988643 - RNA, 19 nt, Artificial Sequence
  Description of Artificial Sequence: Synthetic oligonucleotide
  Antisense strand to SEQ ID NO: 1988642
aauguugaccagcuuuaaa

SEQ ID NO: 1988644 - RNA, 19 nt, Artificial Sequence
  Description of Artificial Sequence: Synthetic oligonucleotide
  Sense strand starting at position 1119 of SEQ ID NO: 1880719
uucucuagccuccgagaaa

SEQ ID NO: 1988645 - RNA, 19 nt, Artificial Sequence
  Description of Artificial Sequence: Synthetic oligonucleotide
  Antisense strand to SEQ ID NO: 1988644
uuucucggaggcuagagaa

SEQ ID NO: 1988646 - RNA, 19 nt, Artificial Sequence
  Description of Artificial Sequence: Synthetic oligonucleotide
  Sense strand starting at position 1122 of SEQ ID NO: 1880719
ucuagccuccgagaaagua

SEQ ID NO: 1988647 - RNA, 19 nt, Artificial Sequence
  Description of Artificial Sequence: Synthetic oligonucleotide
  Antisense strand to SEQ ID NO: 1988646
uacuuucucggaggcuaga

SEQ ID NO: 1988648 - RNA, 19 nt, Artificial Sequence
  Description of Artificial Sequence: Synthetic oligonucleotide
  Sense strand starting at position 1179 of SEQ ID NO: 1880719
gagcuugaguggccauuau

SEQ ID NO: 1988649 - RNA, 19 nt, Artificial Sequence
  Description of Artificial Sequence: Synthetic oligonucleotide
  Antisense strand to SEQ ID NO: 1988648
auaauggccacucaagcuc

SEQ ID NO: 1988650 - RNA, 19 nt, Artificial Sequence
  Description of Artificial Sequence: Synthetic oligonucleotide
  Sense strand starting at position 1276 of SEQ ID NO: 1880719
ggcuuccugggcuaaguaa

SEQ ID NO: 1988651 - RNA, 19 nt, Artificial Sequence
  Description of Artificial Sequence: Synthetic oligonucleotide
  Antisense strand to SEQ ID NO: 1988650
uuacuuagcccaggaagcc

SEQ ID NO: 1988652 - RNA, 19 nt, Artificial Sequence
  Description of Artificial Sequence: Synthetic oligonucleotide
  Sense strand starting at position 1362 of SEQ ID NO: 1880719
auucuucuucuggguauga

SEQ ID NO: 1988653 - RNA, 19 nt, Artificial Sequence
  Description of Artificial Sequence: Synthetic oligonucleotide
  Antisense strand to SEQ ID NO: 1988652
ucauacccagaagaagaau

SEQ ID NO: 1988654 - RNA, 19 nt, Artificial Sequence
  Description of Artificial Sequence: Synthetic oligonucleotide
  Sense strand starting at position 1795 of SEQ ID NO: 1880719
uucugugagccuggcagaa

SEQ ID NO: 1988655 - RNA, 19 nt, Artificial Sequence
  Description of Artificial Sequence: Synthetic oligonucleotide
  Antisense strand to SEQ ID NO: 1988654
uucugccaggcucacagaa

SEQ ID NO: 1988656 - RNA, 19 nt, Artificial Sequence
  Description of Artificial Sequence: Synthetic oligonucleotide
  Sense strand starting at position 1849 of SEQ ID NO: 1880719
agggaugcuucagugagac

SEQ ID NO: 1988657 - RNA, 19 nt, Artificial Sequence
  Description of Artificial Sequence: Synthetic oligonucleotide
  Antisense strand to SEQ ID NO: 1988656
gucucacugaagcaucccu

SEQ ID NO: 1988658 - RNA, 19 nt, Artificial Sequence
  Description of Artificial Sequence: Synthetic oligonucleotide
  Sense strand starting at position 1899 of SEQ ID NO: 1880719
gauggccacuugugauuua

SEQ ID NO: 1988659 - RNA, 19 nt, Artificial Sequence
  Description of Artificial Sequence: Synthetic oligonucleotide
  Antisense strand to SEQ ID NO: 1988658
uaaaucacaaguggccauc

SEQ ID NO: 1988660 - RNA, 19 nt, Artificial Sequence
  Description of Artificial Sequence: Synthetic oligonucleotide
  Sense strand starting at position 1988 of SEQ ID NO: 1880719
gccgaaauauucuagauga

SEQ ID NO: 1988661 - RNA, 19 nt, Artificial Sequence
  Description of Artificial Sequence: Synthetic oligonucleotide
  Antisense strand to SEQ ID NO: 1988660
ucaucuagaauauuucggc

SEQ ID NO: 1988662 - RNA, 19 nt, Artificial Sequence
  Description of Artificial Sequence: Synthetic oligonucleotide
  Sense strand starting at position 1998 of SEQ ID NO: 1880719
ucuagaugacguugccagu

SEQ ID NO: 1988663 - RNA, 19 nt, Artificial Sequence
  Description of Artificial Sequence: Synthetic oligonucleotide
  Antisense strand to SEQ ID NO: 1988662
acuggcaacgucaucuaga

SEQ ID NO: 1988664 - RNA, 19 nt, Artificial Sequence
  Description of Artificial Sequence: Synthetic oligonucleotide
  Sense strand starting at position 2004 of SEQ ID NO: 1880719
ugacguugccagugaggga

SEQ ID NO: 1988665 - RNA, 19 nt, Artificial Sequence
  Description of Artificial Sequence: Synthetic oligonucleotide
  Antisense strand to SEQ ID NO: 1988664
ucccucacuggcaacguca

SEQ ID NO: 1988666 - RNA, 19 nt, Artificial Sequence
  Description of Artificial Sequence: Synthetic oligonucleotide
  Sense strand starting at position 2081 of SEQ ID NO: 1880719
acugaacucccaggcuuaa

SEQ ID NO: 1988667 - RNA, 19 nt, Artificial Sequence
  Description of Artificial Sequence: Synthetic oligonucleotide
  Antisense strand to SEQ ID NO: 1988666
uuaagccugggaguucagu

SEQ ID NO: 1988668 - RNA, 19 nt, Artificial Sequence
  Description of Artificial Sequence: Synthetic oligonucleotide
  Sense strand starting at position 2161 of SEQ ID NO: 1880719
gggucuuugugcucaguag

SEQ ID NO: 1988669 - RNA, 19 nt, Artificial Sequence
  Description of Artificial Sequence: Synthetic oligonucleotide
  Antisense strand to SEQ ID NO: 1988668
cuacugagcacaaagaccc

SEQ ID NO: 1988670 - RNA, 19 nt, Artificial Sequence
  Description of Artificial Sequence: Synthetic oligonucleotide
  Sense strand starting at position 2162 of SEQ ID NO: 1880719
ggucuuugugcucaguaga

SEQ ID NO: 1988671 - RNA, 19 nt, Artificial Sequence
  Description of Artificial Sequence: Synthetic oligonucleotide
  Antisense strand to SEQ ID NO: 1988670
ucuacugagcacaaagacc

SEQ ID NO: 1988672 - RNA, 19 nt, Artificial Sequence
  Description of Artificial Sequence: Synthetic oligonucleotide
  Sense strand starting at position 2165 of SEQ ID NO: 1880719
cuuugugcucaguagaauc

SEQ ID NO: 1988673 - RNA, 19 nt, Artificial Sequence
  Description of Artificial Sequence: Synthetic oligonucleotide
  Antisense strand to SEQ ID NO: 1988672
gauucuacugagcacaaag

SEQ ID NO: 1988674 - RNA, 19 nt, Artificial Sequence
  Description of Artificial Sequence: Synthetic oligonucleotide
  Sense strand starting at position 2356 of SEQ ID NO: 1880719
guagguuuggccuggcuga

SEQ ID NO: 1988675 - RNA, 19 nt, Artificial Sequence
  Description of Artificial Sequence: Synthetic oligonucleotide
  Antisense strand to SEQ ID NO: 1988674
ucagccaggccaaaccuac

SEQ ID NO: 1988676 - RNA, 19 nt, Artificial Sequence
  Description of Artificial Sequence: Synthetic oligonucleotide
  Sense strand starting at position 2357 of SEQ ID NO: 1880719
uagguuuggccuggcugaa

SEQ ID NO: 1988677 - RNA, 19 nt, Artificial Sequence
  Description of Artificial Sequence: Synthetic oligonucleotide
  Antisense strand to SEQ ID NO: 1988676
uucagccaggccaaaccua

SEQ ID NO: 1988678 - RNA, 19 nt, Artificial Sequence
  Description of Artificial Sequence: Synthetic oligonucleotide
  Sense strand starting at position 2408 of SEQ ID NO: 1880719
augagauagcucuagccca

SEQ ID NO: 1988679 - RNA, 19 nt, Artificial Sequence
  Description of Artificial Sequence: Synthetic oligonucleotide
  Antisense strand to SEQ ID NO: 1988678
ugggcuagagcuaucucau

SEQ ID NO: 1988680 - RNA, 19 nt, Artificial Sequence
  Description of Artificial Sequence: Synthetic oligonucleotide
  Sense strand starting at position 2872 of SEQ ID NO: 1880719
gcagguucugcucagucuu

SEQ ID NO: 1988681 - RNA, 19 nt, Artificial Sequence
  Description of Artificial Sequence: Synthetic oligonucleotide
  Antisense strand to SEQ ID NO: 1988680
aagacugagcagaaccugc

SEQ ID NO: 1988682 - RNA, 19 nt, Artificial Sequence
  Description of Artificial Sequence: Synthetic oligonucleotide
  Sense strand starting at position 3063 of SEQ ID NO: 1880719
ugagcagguuucuccagau

SEQ ID NO: 1988683 - RNA, 19 nt, Artificial Sequence
  Description of Artificial Sequence: Synthetic oligonucleotide
  Antisense strand to SEQ ID NO: 1988682
aucuggagaaaccugcuca

SEQ ID NO: 1988684 - RNA, 19 nt, Artificial Sequence
  Description of Artificial Sequence: Synthetic oligonucleotide
  Sense strand starting at position 3104 of SEQ ID NO: 1880719
uuggaaagguccuuucuag

SEQ ID NO: 1988685 - RNA, 19 nt, Artificial Sequence
  Description of Artificial Sequence: Synthetic oligonucleotide
  Antisense strand to SEQ ID NO: 1988684
cuagaaaggaccuuuccaa

SEQ ID NO: 1988686 - RNA, 19 nt, Artificial Sequence
  Description of Artificial Sequence: Synthetic oligonucleotide
  Sense strand starting at position 3414 of SEQ ID NO: 1880719
ggaagugaccucugagcca

SEQ ID NO: 1988687 - RNA, 19 nt, Artificial Sequence
  Description of Artificial Sequence: Synthetic oligonucleotide
  Antisense strand to SEQ ID NO: 1988686
uggcucagaggucacuucc

SEQ ID NO: 1988688 - RNA, 19 nt, Artificial Sequence
  Description of Artificial Sequence: Synthetic oligonucleotide
  Sense strand starting at position 3504 of SEQ ID NO: 1880719
ggacacugucccuaaguca

SEQ ID NO: 1988689 - RNA, 19 nt, Artificial Sequence
  Description of Artificial Sequence: Synthetic oligonucleotide
  Antisense strand to SEQ ID NO: 1988688
ugacuuagggacagugucc

SEQ ID NO: 1988690 - RNA, 19 nt, Artificial Sequence
  Description of Artificial Sequence: Synthetic oligonucleotide
  Sense strand starting at position 3565 of SEQ ID NO: 1880719
aaacuagucccaugggcau

SEQ ID NO: 1988691 - RNA, 19 nt, Artificial Sequence
  Description of Artificial Sequence: Synthetic oligonucleotide
  Antisense strand to SEQ ID NO: 1988690
augcccaugggacuaguuu

SEQ ID NO: 1988692 - RNA, 19 nt, Artificial Sequence
  Description of Artificial Sequence: Synthetic oligonucleotide
  Sense strand starting at position 3597 of SEQ ID NO: 1880719
guguccuucccgucugacu

SEQ ID NO: 1988693 - RNA, 19 nt, Artificial Sequence
  Description of Artificial Sequence: Synthetic oligonucleotide
  Antisense strand to SEQ ID NO: 1988692
agucagacgggaaggacac

SEQ ID NO: 1988694 - RNA, 19 nt, Artificial Sequence
  Description of Artificial Sequence: Synthetic oligonucleotide
  Sense strand starting at position 3662 of SEQ ID NO: 1880719
gcugcacuccgcugggaau

SEQ ID NO: 1988695 - RNA, 19 nt, Artificial Sequence
  Description of Artificial Sequence: Synthetic oligonucleotide
  Antisense strand to SEQ ID NO: 1988694
auucccagcggagugcagc

SEQ ID NO: 1988696 - RNA, 19 nt, Artificial Sequence
  Description of Artificial Sequence: Synthetic oligonucleotide
  Sense strand starting at position 305 of SEQ ID NO: 1880720
auugcaaggguaugagaaa

SEQ ID NO: 1988697 - RNA, 19 nt, Artificial Sequence
  Description of Artificial Sequence: Synthetic oligonucleotide
  Antisense strand to SEQ ID NO: 1988696
uuucucauacccuugcaau

SEQ ID NO: 1988698 - RNA, 19 nt, Artificial Sequence
  Description of Artificial Sequence: Synthetic oligonucleotide
  Sense strand starting at position 777 of SEQ ID NO: 1880720
acuuccauacugggaaauu

SEQ ID NO: 1988699 - RNA, 19 nt, Artificial Sequence
  Description of Artificial Sequence: Synthetic oligonucleotide
  Antisense strand to SEQ ID NO: 1988698
aauuucccaguauggaagu

SEQ ID NO: 1988700 - RNA, 19 nt, Artificial Sequence
  Description of Artificial Sequence: Synthetic oligonucleotide
  Sense strand starting at position 925 of SEQ ID NO: 1880720
uggcgugaggauuaaauag

SEQ ID NO: 1988701 - RNA, 19 nt, Artificial Sequence
  Description of Artificial Sequence: Synthetic oligonucleotide
  Antisense strand to SEQ ID NO: 1988700
cuauuuaauccucacgcca

SEQ ID NO: 1988702 - RNA, 19 nt, Artificial Sequence
  Description of Artificial Sequence: Synthetic oligonucleotide
  Sense strand starting at position 951 of SEQ ID NO: 1880720
uagauagagugucuaggaa

SEQ ID NO: 1988703 - RNA, 19 nt, Artificial Sequence
  Description of Artificial Sequence: Synthetic oligonucleotide
  Antisense strand to SEQ ID NO: 1988702
uuccuagacacucuaucua

SEQ ID NO: 1988704 - RNA, 19 nt, Artificial Sequence
  Description of Artificial Sequence: Synthetic oligonucleotide
  Sense strand starting at position 1052 of SEQ ID NO: 1880720
cuguaauaccuauagcuga

SEQ ID NO: 1988705 - RNA, 19 nt, Artificial Sequence
  Description of Artificial Sequence: Synthetic oligonucleotide
  Antisense strand to SEQ ID NO: 1988704
ucagcuauagguauuacag

SEQ ID NO: 1988706 - RNA, 19 nt, Artificial Sequence
  Description of Artificial Sequence: Synthetic oligonucleotide
  Sense strand starting at position 1216 of SEQ ID NO: 1880720
agauuaguugcagaauuac

SEQ ID NO: 1988707 - RNA, 19 nt, Artificial Sequence
  Description of Artificial Sequence: Synthetic oligonucleotide
  Antisense strand to SEQ ID NO: 1988706
guaauucugcaacuaaucu

SEQ ID NO: 1988708 - RNA, 19 nt, Artificial Sequence
  Description of Artificial Sequence: Synthetic oligonucleotide
  Sense strand starting at position 1232 of SEQ ID NO: 1880720
uacugacuccugugaagga

SEQ ID NO: 1988709 - RNA, 19 nt, Artificial Sequence
  Description of Artificial Sequence: Synthetic oligonucleotide
  Antisense strand to SEQ ID NO: 1988708
uccuucacaggagucagua

SEQ ID NO: 1988710 - RNA, 19 nt, Artificial Sequence
  Description of Artificial Sequence: Synthetic oligonucleotide
  Sense strand starting at position 1671 of SEQ ID NO: 1880720
cucccagaguauucccauu

SEQ ID NO: 1988711 - RNA, 19 nt, Artificial Sequence
  Description of Artificial Sequence: Synthetic oligonucleotide
  Antisense strand to SEQ ID NO: 1988710
aaugggaauacucugggag

SEQ ID NO: 1988712 - RNA, 19 nt, Artificial Sequence
  Description of Artificial Sequence: Synthetic oligonucleotide
  Sense strand starting at position 1693 of SEQ ID NO: 1880720
cucauuugugcuuagcuga

SEQ ID NO: 1988713 - RNA, 19 nt, Artificial Sequence
  Description of Artificial Sequence: Synthetic oligonucleotide
  Antisense strand to SEQ ID NO: 1988712
ucagcuaagcacaaaugag

SEQ ID NO: 1988714 - RNA, 19 nt, Artificial Sequence
  Description of Artificial Sequence: Synthetic oligonucleotide
  Sense strand starting at position 1729 of SEQ ID NO: 1880720
agaacuguagugcaaacau

SEQ ID NO: 1988715 - RNA, 19 nt, Artificial Sequence
  Description of Artificial Sequence: Synthetic oligonucleotide
  Antisense strand to SEQ ID NO: 1988714
auguuugcacuacaguucu

SEQ ID NO: 1988716 - RNA, 19 nt, Artificial Sequence
  Description of Artificial Sequence: Synthetic oligonucleotide
  Sense strand starting at position 1829 of SEQ ID NO: 1880720
ggacaagaauugcuugucu

SEQ ID NO: 1988717 - RNA, 19 nt, Artificial Sequence
  Description of Artificial Sequence: Synthetic oligonucleotide
  Antisense strand to SEQ ID NO: 1988716
agacaagcaauucuugucc

SEQ ID NO: 1988718 - RNA, 19 nt, Artificial Sequence
  Description of Artificial Sequence: Synthetic oligonucleotide
  Sense strand starting at position 1831 of SEQ ID NO: 1880720
acaagaauugcuugucuau

SEQ ID NO: 1988719 - RNA, 19 nt, Artificial Sequence
  Description of Artificial Sequence: Synthetic oligonucleotide
  Antisense strand to SEQ ID NO: 1988718
auagacaagcaauucuugu

SEQ ID NO: 1988720 - RNA, 19 nt, Artificial Sequence
  Description of Artificial Sequence: Synthetic oligonucleotide
  Sense strand starting at position 1891 of SEQ ID NO: 1880720
ucuccauguugacucuaga

SEQ ID NO: 1988721 - RNA, 19 nt, Artificial Sequence
  Description of Artificial Sequence: Synthetic oligonucleotide
  Antisense strand to SEQ ID NO: 1988720
ucuagagucaacauggaga

SEQ ID NO: 1988722 - RNA, 19 nt, Artificial Sequence
  Description of Artificial Sequence: Synthetic oligonucleotide
  Sense strand starting at position 2041 of SEQ ID NO: 1880720
cugugauuaguccagagag

SEQ ID NO: 1988723 - RNA, 19 nt, Artificial Sequence
  Description of Artificial Sequence: Synthetic oligonucleotide
  Antisense strand to SEQ ID NO: 1988722
cucucuggacuaaucacag

SEQ ID NO: 1988724 - RNA, 19 nt, Artificial Sequence
  Description of Artificial Sequence: Synthetic oligonucleotide
  Sense strand starting at position 2087 of SEQ ID NO: 1880720
caaacacugcuuuggaguu

SEQ ID NO: 1988725 - RNA, 19 nt, Artificial Sequence
  Description of Artificial Sequence: Synthetic oligonucleotide
  Antisense strand to SEQ ID NO: 1988724
aacuccaaagcaguguuug

SEQ ID NO: 1988726 - RNA, 19 nt, Artificial Sequence
  Description of Artificial Sequence: Synthetic oligonucleotide
  Sense strand starting at position 2100 of SEQ ID NO: 1880720
ggaguuugauuguugggau

SEQ ID NO: 1988727 - RNA, 19 nt, Artificial Sequence
  Description of Artificial Sequence: Synthetic oligonucleotide
  Antisense strand to SEQ ID NO: 1988726
aucccaacaaucaaacucc

SEQ ID NO: 1988728 - RNA, 19 nt, Artificial Sequence
  Description of Artificial Sequence: Synthetic oligonucleotide
  Sense strand starting at position 2114 of SEQ ID NO: 1880720
gggauaaagucucucuuga

SEQ ID NO: 1988729 - RNA, 19 nt, Artificial Sequence
  Description of Artificial Sequence: Synthetic oligonucleotide
  Antisense strand to SEQ ID NO: 1988728
ucaagagagacuuuauccc

SEQ ID NO: 1988730 - RNA, 19 nt, Artificial Sequence
  Description of Artificial Sequence: Synthetic oligonucleotide
  Sense strand starting at position 2116 of SEQ ID NO: 1880720
gauaaagucucucuugagu

SEQ ID NO: 1988731 - RNA, 19 nt, Artificial Sequence
  Description of Artificial Sequence: Synthetic oligonucleotide
  Antisense strand to SEQ ID NO: 1988730
acucaagagagacuuuauc

SEQ ID NO: 1988732 - RNA, 19 nt, Artificial Sequence
  Description of Artificial Sequence: Synthetic oligonucleotide
  Sense strand starting at position 2225 of SEQ ID NO: 1880720
gcaaauggagcucaacaua

SEQ ID NO: 1988733 - RNA, 19 nt, Artificial Sequence
  Description of Artificial Sequence: Synthetic oligonucleotide
  Antisense strand to SEQ ID NO: 1988732
uauguugagcuccauuugc

SEQ ID NO: 1988734 - RNA, 19 nt, Artificial Sequence
  Description of Artificial Sequence: Synthetic oligonucleotide
  Sense strand starting at position 2248 of SEQ ID NO: 1880720
ugaacaaucugagccaaca

SEQ ID NO: 1988735 - RNA, 19 nt, Artificial Sequence
  Description of Artificial Sequence: Synthetic oligonucleotide
  Antisense strand to SEQ ID NO: 1988734
uguuggcucagauuguuca

SEQ ID NO: 1988736 - RNA, 19 nt, Artificial Sequence
  Description of Artificial Sequence: Synthetic oligonucleotide
  Sense strand starting at position 2306 of SEQ ID NO: 1880720
uauuacuugguguauuagu

SEQ ID NO: 1988737 - RNA, 19 nt, Artificial Sequence
  Description of Artificial Sequence: Synthetic oligonucleotide
  Antisense strand to SEQ ID NO: 1988736
acuaauacaccaaguaaua

SEQ ID NO: 1988738 - RNA, 19 nt, Artificial Sequence
  Description of Artificial Sequence: Synthetic oligonucleotide
  Sense strand starting at position 2355 of SEQ ID NO: 1880720
gaguauggguaguuuauaa

SEQ ID NO: 1988739 - RNA, 19 nt, Artificial Sequence
  Description of Artificial Sequence: Synthetic oligonucleotide
  Antisense strand to SEQ ID NO: 1988738
uuauaaacuacccauacuc

SEQ ID NO: 1988740 - RNA, 19 nt, Artificial Sequence
  Description of Artificial Sequence: Synthetic oligonucleotide
  Sense strand starting at position 2683 of SEQ ID NO: 1880720
aucauaucacuuggaaguu

SEQ ID NO: 1988741 - RNA, 19 nt, Artificial Sequence
  Description of Artificial Sequence: Synthetic oligonucleotide
  Antisense strand to SEQ ID NO: 1988740
aacuuccaagugauaugau

SEQ ID NO: 1988742 - RNA, 19 nt, Artificial Sequence
  Description of Artificial Sequence: Synthetic oligonucleotide
  Sense strand starting at position 2689 of SEQ ID NO: 1880720
ucacuuggaaguugagaau

SEQ ID NO: 1988743 - RNA, 19 nt, Artificial Sequence
  Description of Artificial Sequence: Synthetic oligonucleotide
  Antisense strand to SEQ ID NO: 1988742
auucucaacuuccaaguga

SEQ ID NO: 1988744 - RNA, 19 nt, Artificial Sequence
  Description of Artificial Sequence: Synthetic oligonucleotide
  Sense strand starting at position 2755 of SEQ ID NO: 1880720
cccuuagugauaugaguug

SEQ ID NO: 1988745 - RNA, 19 nt, Artificial Sequence
  Description of Artificial Sequence: Synthetic oligonucleotide
  Antisense strand to SEQ ID NO: 1988744
caacucauaucacuaaggg

SEQ ID NO: 1988746 - RNA, 19 nt, Artificial Sequence
  Description of Artificial Sequence: Synthetic oligonucleotide
  Sense strand starting at position 2760 of SEQ ID NO: 1880720
agugauaugaguugaacuu

SEQ ID NO: 1988747 - RNA, 19 nt, Artificial Sequence
  Description of Artificial Sequence: Synthetic oligonucleotide
  Antisense strand to SEQ ID NO: 1988746
aaguucaacucauaucacu

SEQ ID NO: 1988748 - RNA, 19 nt, Artificial Sequence
  Description of Artificial Sequence: Synthetic oligonucleotide
  Sense strand starting at position 2761 of SEQ ID NO: 1880720
gugauaugaguugaacuuu

SEQ ID NO: 1988749 - RNA, 19 nt, Artificial Sequence
  Description of Artificial Sequence: Synthetic oligonucleotide
  Antisense strand to SEQ ID NO: 1988748
aaaguucaacucauaucac

SEQ ID NO: 1988750 - RNA, 19 nt, Artificial Sequence
  Description of Artificial Sequence: Synthetic oligonucleotide
  Sense strand starting at position 2858 of SEQ ID NO: 1880720
ucuagagaaugcuugcaca

SEQ ID NO: 1988751 - RNA, 19 nt, Artificial Sequence
  Description of Artificial Sequence: Synthetic oligonucleotide
  Antisense strand to SEQ ID NO: 1988750
ugugcaagcauucucuaga

SEQ ID NO: 1988752 - RNA, 19 nt, Artificial Sequence
  Description of Artificial Sequence: Synthetic oligonucleotide
  Sense strand starting at position 3157 of SEQ ID NO: 1880720
accuaugagccaugaaagu

SEQ ID NO: 1988753 - RNA, 19 nt, Artificial Sequence
  Description of Artificial Sequence: Synthetic oligonucleotide
  Antisense strand to SEQ ID NO: 1988752
acuuucauggcucauaggu

SEQ ID NO: 1988754 - RNA, 19 nt, Artificial Sequence
  Description of Artificial Sequence: Synthetic oligonucleotide
  Sense strand starting at position 3176 of SEQ ID NO: 1880720
uuggaaacuugccugggaa

SEQ ID NO: 1988755 - RNA, 19 nt, Artificial Sequence
  Description of Artificial Sequence: Synthetic oligonucleotide
  Antisense strand to SEQ ID NO: 1988754
uucccaggcaaguuuccaa

SEQ ID NO: 1988756 - RNA, 19 nt, Artificial Sequence
  Description of Artificial Sequence: Synthetic oligonucleotide
  Sense strand starting at position 3177 of SEQ ID NO: 1880720
uggaaacuugccugggaag

SEQ ID NO: 1988757 - RNA, 19 nt, Artificial Sequence
  Description of Artificial Sequence: Synthetic oligonucleotide
  Antisense strand to SEQ ID NO: 1988756
cuucccaggcaaguuucca

SEQ ID NO: 1988758 - RNA, 19 nt, Artificial Sequence
  Description of Artificial Sequence: Synthetic oligonucleotide
  Sense strand starting at position 3178 of SEQ ID NO: 1880720
ggaaacuugccugggaagu

SEQ ID NO: 1988759 - RNA, 19 nt, Artificial Sequence
  Description of Artificial Sequence: Synthetic oligonucleotide
  Antisense strand to SEQ ID NO: 1988758
acuucccaggcaaguuucc

SEQ ID NO: 1988760 - RNA, 19 nt, Artificial Sequence
  Description of Artificial Sequence: Synthetic oligonucleotide
  Sense strand starting at position 3179 of SEQ ID NO: 1880720
gaaacuugccugggaaguu

SEQ ID NO: 1988761 - RNA, 19 nt, Artificial Sequence
  Description of Artificial Sequence: Synthetic oligonucleotide
  Antisense strand to SEQ ID NO: 1988760
aacuucccaggcaaguuuc

SEQ ID NO: 1988762 - RNA, 19 nt, Artificial Sequence
  Description of Artificial Sequence: Synthetic oligonucleotide
  Sense strand starting at position 3188 of SEQ ID NO: 1880720
cugggaaguucaucagggu

SEQ ID NO: 1988763 - RNA, 19 nt, Artificial Sequence
  Description of Artificial Sequence: Synthetic oligonucleotide
  Antisense strand to SEQ ID NO: 1988762
acccugaugaacuucccag

SEQ ID NO: 1988764 - RNA, 19 nt, Artificial Sequence
  Description of Artificial Sequence: Synthetic oligonucleotide
  Sense strand starting at position 3472 of SEQ ID NO: 1880720
agcugacuggauuguauua

SEQ ID NO: 1988765 - RNA, 19 nt, Artificial Sequence
  Description of Artificial Sequence: Synthetic oligonucleotide
  Antisense strand to SEQ ID NO: 1988764
uaauacaauccagucagcu

SEQ ID NO: 1988766 - RNA, 19 nt, Artificial Sequence
  Description of Artificial Sequence: Synthetic oligonucleotide
  Sense strand starting at position 3649 of SEQ ID NO: 1880720
ugaugucaggaauggguuu

SEQ ID NO: 1988767 - RNA, 19 nt, Artificial Sequence
  Description of Artificial Sequence: Synthetic oligonucleotide
  Antisense strand to SEQ ID NO: 1988766
aaacccauuccugacauca

SEQ ID NO: 1988768 - RNA, 19 nt, Artificial Sequence
  Description of Artificial Sequence: Synthetic oligonucleotide
  Sense strand starting at position 3655 of SEQ ID NO: 1880720
caggaauggguuuguuaua

SEQ ID NO: 1988769 - RNA, 19 nt, Artificial Sequence
  Description of Artificial Sequence: Synthetic oligonucleotide
  Antisense strand to SEQ ID NO: 1988768
uauaacaaacccauuccug

SEQ ID NO: 1988770 - RNA, 19 nt, Artificial Sequence
  Description of Artificial Sequence: Synthetic oligonucleotide
  Sense strand starting at position 3656 of SEQ ID NO: 1880720
aggaauggguuuguuauaa

SEQ ID NO: 1988771 - RNA, 19 nt, Artificial Sequence
  Description of Artificial Sequence: Synthetic oligonucleotide
  Antisense strand to SEQ ID NO: 1988770
uuauaacaaacccauuccu

SEQ ID NO: 1988772 - RNA, 19 nt, Artificial Sequence
  Description of Artificial Sequence: Synthetic oligonucleotide
  Sense strand starting at position 3743 of SEQ ID NO: 1880720
gguuaugacucagcaagaa

SEQ ID NO: 1988773 - RNA, 19 nt, Artificial Sequence
  Description of Artificial Sequence: Synthetic oligonucleotide
  Antisense strand to SEQ ID NO: 1988772
uucuugcugagucauaacc

SEQ ID NO: 1988774 - RNA, 19 nt, Artificial Sequence
  Description of Artificial Sequence: Synthetic oligonucleotide
  Sense strand starting at position 3904 of SEQ ID NO: 1880720
acaugaauaugcucauuag

SEQ ID NO: 1988775 - RNA, 19 nt, Artificial Sequence
  Description of Artificial Sequence: Synthetic oligonucleotide
  Antisense strand to SEQ ID NO: 1988774
cuaaugagcauauucaugu

SEQ ID NO: 1988776 - RNA, 19 nt, Artificial Sequence
  Description of Artificial Sequence: Synthetic oligonucleotide
  Sense strand starting at position 54 of SEQ ID NO: 1880721
auagccugucucuacagaa

SEQ ID NO: 1988777 - RNA, 19 nt, Artificial Sequence
  Description of Artificial Sequence: Synthetic oligonucleotide
  Antisense strand to SEQ ID NO: 1988776
uucuguagagacaggcuau

SEQ ID NO: 1988778 - RNA, 19 nt, Artificial Sequence
  Description of Artificial Sequence: Synthetic oligonucleotide
  Sense strand starting at position 320 of SEQ ID NO: 1880721
gaggcaauucucuagcaga

SEQ ID NO: 1988779 - RNA, 19 nt, Artificial Sequence
  Description of Artificial Sequence: Synthetic oligonucleotide
  Antisense strand to SEQ ID NO: 1988778
ucugcuagagaauugccuc

SEQ ID NO: 1988780 - RNA, 19 nt, Artificial Sequence
  Description of Artificial Sequence: Synthetic oligonucleotide
  Sense strand starting at position 474 of SEQ ID NO: 1880721
uccauaacugugugaguag

SEQ ID NO: 1988781 - RNA, 19 nt, Artificial Sequence
  Description of Artificial Sequence: Synthetic oligonucleotide
  Antisense strand to SEQ ID NO: 1988780
cuacucacacaguuaugga

SEQ ID NO: 1988782 - RNA, 19 nt, Artificial Sequence
  Description of Artificial Sequence: Synthetic oligonucleotide
  Sense strand starting at position 477 of SEQ ID NO: 1880721
auaacugugugaguagagu

SEQ ID NO: 1988783 - RNA, 19 nt, Artificial Sequence
  Description of Artificial Sequence: Synthetic oligonucleotide
  Antisense strand to SEQ ID NO: 1988782
acucuacucacacaguuau

SEQ ID NO: 1988784 - RNA, 19 nt, Artificial Sequence
  Description of Artificial Sequence: Synthetic oligonucleotide
  Sense strand starting at position 486 of SEQ ID NO: 1880721
ugaguagaguccuuacaau

SEQ ID NO: 1988785 - RNA, 19 nt, Artificial Sequence
  Description of Artificial Sequence: Synthetic oligonucleotide
  Antisense strand to SEQ ID NO: 1988784
auuguaaggacucuacuca

SEQ ID NO: 1988786 - RNA, 19 nt, Artificial Sequence
  Description of Artificial Sequence: Synthetic oligonucleotide
  Sense strand starting at position 899 of SEQ ID NO: 1880721
gauauugcuugagcccaga

SEQ ID NO: 1988787 - RNA, 19 nt, Artificial Sequence
  Description of Artificial Sequence: Synthetic oligonucleotide
  Antisense strand to SEQ ID NO: 1988786
ucugggcucaagcaauauc

SEQ ID NO: 1988788 - RNA, 19 nt, Artificial Sequence
  Description of Artificial Sequence: Synthetic oligonucleotide
  Sense strand starting at position 936 of SEQ ID NO: 1880721
acaacauugcgagauccca

SEQ ID NO: 1988789 - RNA, 19 nt, Artificial Sequence
  Description of Artificial Sequence: Synthetic oligonucleotide
  Antisense strand to SEQ ID NO: 1988788
ugggaucucgcaauguugu

SEQ ID NO: 1988790 - RNA, 19 nt, Artificial Sequence
  Description of Artificial Sequence: Synthetic oligonucleotide
  Sense strand starting at position 1194 of SEQ ID NO: 1880721
aaaucuaugggauguuuaa

SEQ ID NO: 1988791 - RNA, 19 nt, Artificial Sequence
  Description of Artificial Sequence: Synthetic oligonucleotide
  Antisense strand to SEQ ID NO: 1988790
uuaaacaucccauagauuu

SEQ ID NO: 1988792 - RNA, 19 nt, Artificial Sequence
  Description of Artificial Sequence: Synthetic oligonucleotide
  Sense strand starting at position 1428 of SEQ ID NO: 1880721
cagggacuauuguuaauac

SEQ ID NO: 1988793 - RNA, 19 nt, Artificial Sequence
  Description of Artificial Sequence: Synthetic oligonucleotide
  Antisense strand to SEQ ID NO: 1988792
guauuaacaauagucccug

SEQ ID NO: 1988794 - RNA, 19 nt, Artificial Sequence
  Description of Artificial Sequence: Synthetic oligonucleotide
  Sense strand starting at position 1499 of SEQ ID NO: 1880721
aaagguggaaacuguguaa

SEQ ID NO: 1988795 - RNA, 19 nt, Artificial Sequence
  Description of Artificial Sequence: Synthetic oligonucleotide
  Antisense strand to SEQ ID NO: 1988794
uuacacaguuuccaccuuu

SEQ ID NO: 1988796 - RNA, 19 nt, Artificial Sequence
  Description of Artificial Sequence: Synthetic oligonucleotide
  Sense strand starting at position 1502 of SEQ ID NO: 1880721
gguggaaacuguguaauaa

SEQ ID NO: 1988797 - RNA, 19 nt, Artificial Sequence
  Description of Artificial Sequence: Synthetic oligonucleotide
  Antisense strand to SEQ ID NO: 1988796
uuauuacacaguuuccacc

SEQ ID NO: 1988798 - RNA, 19 nt, Artificial Sequence
  Description of Artificial Sequence: Synthetic oligonucleotide
  Sense strand starting at position 1603 of SEQ ID NO: 1880721
aggcaagaguagucagaau

SEQ ID NO: 1988799 - RNA, 19 nt, Artificial Sequence
  Description of Artificial Sequence: Synthetic oligonucleotide
  Antisense strand to SEQ ID NO: 1988798
auucugacuacucuugccu

SEQ ID NO: 1988800 - RNA, 19 nt, Artificial Sequence
  Description of Artificial Sequence: Synthetic oligonucleotide
  Sense strand starting at position 1657 of SEQ ID NO: 1880721
ggugacauuugagaaauua

SEQ ID NO: 1988801 - RNA, 19 nt, Artificial Sequence
  Description of Artificial Sequence: Synthetic oligonucleotide
  Antisense strand to SEQ ID NO: 1988800
uaauuucucaaaugucacc

SEQ ID NO: 1988802 - RNA, 19 nt, Artificial Sequence
  Description of Artificial Sequence: Synthetic oligonucleotide
  Sense strand starting at position 1692 of SEQ ID NO: 1880721
uaagcaaaccugugagaag

SEQ ID NO: 1988803 - RNA, 19 nt, Artificial Sequence
  Description of Artificial Sequence: Synthetic oligonucleotide
  Antisense strand to SEQ ID NO: 1988802
cuucucacagguuugcuua

SEQ ID NO: 1988804 - RNA, 19 nt, Artificial Sequence
  Description of Artificial Sequence: Synthetic oligonucleotide
  Sense strand starting at position 1748 of SEQ ID NO: 1880721
gaggcacaugcuggagauu

SEQ ID NO: 1988805 - RNA, 19 nt, Artificial Sequence
  Description of Artificial Sequence: Synthetic oligonucleotide
  Antisense strand to SEQ ID NO: 1988804
aaucuccagcaugugccuc

SEQ ID NO: 1988806 - RNA, 19 nt, Artificial Sequence
  Description of Artificial Sequence: Synthetic oligonucleotide
  Sense strand starting at position 1749 of SEQ ID NO: 1880721
aggcacaugcuggagauua

SEQ ID NO: 1988807 - RNA, 19 nt, Artificial Sequence
  Description of Artificial Sequence: Synthetic oligonucleotide
  Antisense strand to SEQ ID NO: 1988806
uaaucuccagcaugugccu

SEQ ID NO: 1988808 - RNA, 19 nt, Artificial Sequence
  Description of Artificial Sequence: Synthetic oligonucleotide
  Sense strand starting at position 1771 of SEQ ID NO: 1880721
ggagaaucugagugaggca

SEQ ID NO: 1988809 - RNA, 19 nt, Artificial Sequence
  Description of Artificial Sequence: Synthetic oligonucleotide
  Antisense strand to SEQ ID NO: 1988808
ugccucacucagauucucc

SEQ ID NO: 1988810 - RNA, 19 nt, Artificial Sequence
  Description of Artificial Sequence: Synthetic oligonucleotide
  Sense strand starting at position 1863 of SEQ ID NO: 1880721
augcgaugucuccaaagag

SEQ ID NO: 1988811 - RNA, 19 nt, Artificial Sequence
  Description of Artificial Sequence: Synthetic oligonucleotide
  Antisense strand to SEQ ID NO: 1988810
cucuuuggagacaucgcau

SEQ ID NO: 1988812 - RNA, 19 nt, Artificial Sequence
  Description of Artificial Sequence: Synthetic oligonucleotide
  Sense strand starting at position 1878 of SEQ ID NO: 1880721
agagcaugaccucauguuu

SEQ ID NO: 1988813 - RNA, 19 nt, Artificial Sequence
  Description of Artificial Sequence: Synthetic oligonucleotide
  Antisense strand to SEQ ID NO: 1988812
aaacaugaggucaugcucu

SEQ ID NO: 1988814 - RNA, 19 nt, Artificial Sequence
  Description of Artificial Sequence: Synthetic oligonucleotide
  Sense strand starting at position 2353 of SEQ ID NO: 1880721
ugagauauucuggauacgu

SEQ ID NO: 1988815 - RNA, 19 nt, Artificial Sequence
  Description of Artificial Sequence: Synthetic oligonucleotide
  Antisense strand to SEQ ID NO: 1988814
acguauccagaauaucuca

SEQ ID NO: 1988816 - RNA, 19 nt, Artificial Sequence
  Description of Artificial Sequence: Synthetic oligonucleotide
  Sense strand starting at position 2358 of SEQ ID NO: 1880721
uauucuggauacguugaua

SEQ ID NO: 1988817 - RNA, 19 nt, Artificial Sequence
  Description of Artificial Sequence: Synthetic oligonucleotide
  Antisense strand to SEQ ID NO: 1988816
uaucaacguauccagaaua

SEQ ID NO: 1988818 - RNA, 19 nt, Artificial Sequence
  Description of Artificial Sequence: Synthetic oligonucleotide
  Sense strand starting at position 2361 of SEQ ID NO: 1880721
ucuggauacguugauacaa

SEQ ID NO: 1988819 - RNA, 19 nt, Artificial Sequence
  Description of Artificial Sequence: Synthetic oligonucleotide
  Antisense strand to SEQ ID NO: 1988818
uuguaucaacguauccaga

SEQ ID NO: 1988820 - RNA, 19 nt, Artificial Sequence
  Description of Artificial Sequence: Synthetic oligonucleotide
  Sense strand starting at position 2422 of SEQ ID NO: 1880721
aguucugagaguugaugua

SEQ ID NO: 1988821 - RNA, 19 nt, Artificial Sequence
  Description of Artificial Sequence: Synthetic oligonucleotide
  Antisense strand to SEQ ID NO: 1988820
uacaucaacucucagaacu

SEQ ID NO: 1988822 - RNA, 19 nt, Artificial Sequence
  Description of Artificial Sequence: Synthetic oligonucleotide
  Sense strand starting at position 2602 of SEQ ID NO: 1880721
ugucaaaugcuacagaauu

SEQ ID NO: 1988823 - RNA, 19 nt, Artificial Sequence
  Description of Artificial Sequence: Synthetic oligonucleotide
  Antisense strand to SEQ ID NO: 1988822
aauucuguagcauuugaca

SEQ ID NO: 1988824 - RNA, 19 nt, Artificial Sequence
  Description of Artificial Sequence: Synthetic oligonucleotide
  Sense strand starting at position 2622 of SEQ ID NO: 1880721
aggagauggugagaauaaa

SEQ ID NO: 1988825 - RNA, 19 nt, Artificial Sequence
  Description of Artificial Sequence: Synthetic oligonucleotide
  Antisense strand to SEQ ID NO: 1988824
uuuauucucaccaucuccu

SEQ ID NO: 1988826 - RNA, 19 nt, Artificial Sequence
  Description of Artificial Sequence: Synthetic oligonucleotide
  Sense strand starting at position 2913 of SEQ ID NO: 1880721
agcaaacaucaauguuaug

SEQ ID NO: 1988827 - RNA, 19 nt, Artificial Sequence
  Description of Artificial Sequence: Synthetic oligonucleotide
  Antisense strand to SEQ ID NO: 1988826
cauaacauugauguuugcu

SEQ ID NO: 1988828 - RNA, 19 nt, Artificial Sequence
  Description of Artificial Sequence: Synthetic oligonucleotide
  Sense strand starting at position 3223 of SEQ ID NO: 1880721
gcugcuaaauuugugguau

SEQ ID NO: 1988829 - RNA, 19 nt, Artificial Sequence
  Description of Artificial Sequence: Synthetic oligonucleotide
  Antisense strand to SEQ ID NO: 1988828
auaccacaaauuuagcagc

SEQ ID NO: 1988830 - RNA, 19 nt, Artificial Sequence
  Description of Artificial Sequence: Synthetic oligonucleotide
  Sense strand starting at position 3227 of SEQ ID NO: 1880721
cuaaauuugugguauuugu

SEQ ID NO: 1988831 - RNA, 19 nt, Artificial Sequence
  Description of Artificial Sequence: Synthetic oligonucleotide
  Antisense strand to SEQ ID NO: 1988830
acaaauaccacaaauuuag

SEQ ID NO: 1988832 - RNA, 19 nt, Artificial Sequence
  Description of Artificial Sequence: Synthetic oligonucleotide
  Sense strand starting at position 3237 of SEQ ID NO: 1880721
gguauuuguuacgcagcaa

SEQ ID NO: 1988833 - RNA, 19 nt, Artificial Sequence
  Description of Artificial Sequence: Synthetic oligonucleotide
  Antisense strand to SEQ ID NO: 1988832
uugcugcguaacaaauacc

SEQ ID NO: 1988834 - RNA, 19 nt, Artificial Sequence
  Description of Artificial Sequence: Synthetic oligonucleotide
  Sense strand starting at position 3238 of SEQ ID NO: 1880721
guauuuguuacgcagcaau

SEQ ID NO: 1988835 - RNA, 19 nt, Artificial Sequence
  Description of Artificial Sequence: Synthetic oligonucleotide
  Antisense strand to SEQ ID NO: 1988834
auugcugcguaacaaauac

SEQ ID NO: 1988836 - RNA, 19 nt, Artificial Sequence
  Description of Artificial Sequence: Synthetic oligonucleotide
  Sense strand starting at position 3376 of SEQ ID NO: 1880721
ucacuauuccuagggauuc

SEQ ID NO: 1988837 - RNA, 19 nt, Artificial Sequence
  Description of Artificial Sequence: Synthetic oligonucleotide
  Antisense strand to SEQ ID NO: 1988836
gaaucccuaggaauaguga

SEQ ID NO: 1988838 - RNA, 19 nt, Artificial Sequence
  Description of Artificial Sequence: Synthetic oligonucleotide
  Sense strand starting at position 3398 of SEQ ID NO: 1880721
ucaauuacugcuugaguca

SEQ ID NO: 1988839 - RNA, 19 nt, Artificial Sequence
  Description of Artificial Sequence: Synthetic oligonucleotide
  Antisense strand to SEQ ID NO: 1988838
ugacucaagcaguaauuga

SEQ ID NO: 1988840 - RNA, 19 nt, Artificial Sequence
  Description of Artificial Sequence: Synthetic oligonucleotide
  Sense strand starting at position 3534 of SEQ ID NO: 1880721
acuagaaguaacuggguau

SEQ ID NO: 1988841 - RNA, 19 nt, Artificial Sequence
  Description of Artificial Sequence: Synthetic oligonucleotide
  Antisense strand to SEQ ID NO: 1988840
auacccaguuacuucuagu

SEQ ID NO: 1988842 - RNA, 19 nt, Artificial Sequence
  Description of Artificial Sequence: Synthetic oligonucleotide
  Sense strand starting at position 3535 of SEQ ID NO: 1880721
cuagaaguaacuggguauu

SEQ ID NO: 1988843 - RNA, 19 nt, Artificial Sequence
  Description of Artificial Sequence: Synthetic oligonucleotide
  Antisense strand to SEQ ID NO: 1988842
aauacccaguuacuucuag

SEQ ID NO: 1988844 - RNA, 19 nt, Artificial Sequence
  Description of Artificial Sequence: Synthetic oligonucleotide
  Sense strand starting at position 3555 of SEQ ID NO: 1880721
aggcuccuugaaugucaaa

SEQ ID NO: 1988845 - RNA, 19 nt, Artificial Sequence
  Description of Artificial Sequence: Synthetic oligonucleotide
  Antisense strand to SEQ ID NO: 1988844
uuugacauucaaggagccu

SEQ ID NO: 1988846 - RNA, 19 nt, Artificial Sequence
  Description of Artificial Sequence: Synthetic oligonucleotide
  Sense strand starting at position 3640 of SEQ ID NO: 1880721
uccugucuuuccuugaaga

SEQ ID NO: 1988847 - RNA, 19 nt, Artificial Sequence
  Description of Artificial Sequence: Synthetic oligonucleotide
  Antisense strand to SEQ ID NO: 1988846
ucuucaaggaaagacagga

SEQ ID NO: 1988848 - RNA, 19 nt, Artificial Sequence
  Description of Artificial Sequence: Synthetic oligonucleotide
  Sense strand starting at position 3641 of SEQ ID NO: 1880721
ccugucuuuccuugaagac

SEQ ID NO: 1988849 - RNA, 19 nt, Artificial Sequence
  Description of Artificial Sequence: Synthetic oligonucleotide
  Antisense strand to SEQ ID NO: 1988848
gucuucaaggaaagacagg

SEQ ID NO: 1988850 - RNA, 19 nt, Artificial Sequence
  Description of Artificial Sequence: Synthetic oligonucleotide
  Sense strand starting at position 3650 of SEQ ID NO: 1880721
ccuugaagaccaggaguuu

SEQ ID NO: 1988851 - RNA, 19 nt, Artificial Sequence
  Description of Artificial Sequence: Synthetic oligonucleotide
  Antisense strand to SEQ ID NO: 1988850
aaacuccuggucuucaagg

SEQ ID NO: 1988852 - RNA, 19 nt, Artificial Sequence
  Description of Artificial Sequence: Synthetic oligonucleotide
  Sense strand starting at position 3809 of SEQ ID NO: 1880721
ggcaccuccuuauuaagga

SEQ ID NO: 1988853 - RNA, 19 nt, Artificial Sequence
  Description of Artificial Sequence: Synthetic oligonucleotide
  Antisense strand to SEQ ID NO: 1988852
uccuuaauaaggaggugcc

SEQ ID NO: 1988854 - RNA, 19 nt, Artificial Sequence
  Description of Artificial Sequence: Synthetic oligonucleotide
  Sense strand starting at position 3816 of SEQ ID NO: 1880721
ccuuauuaaggaugcaaca

SEQ ID NO: 1988855 - RNA, 19 nt, Artificial Sequence
  Description of Artificial Sequence: Synthetic oligonucleotide
  Antisense strand to SEQ ID NO: 1988854
uguugcauccuuaauaagg

SEQ ID NO: 1988856 - RNA, 19 nt, Artificial Sequence
  Description of Artificial Sequence: Synthetic oligonucleotide
  Sense strand starting at position 132 of SEQ ID NO: 1880722
ugacucagagguuagcaua

SEQ ID NO: 1988857 - RNA, 19 nt, Artificial Sequence
  Description of Artificial Sequence: Synthetic oligonucleotide
  Antisense strand to SEQ ID NO: 1988856
uaugcuaaccucugaguca

SEQ ID NO: 1988858 - RNA, 19 nt, Artificial Sequence
  Description of Artificial Sequence: Synthetic oligonucleotide
  Sense strand starting at position 197 of SEQ ID NO: 1880722
uuggaaugcuaccuugaaa

SEQ ID NO: 1988859 - RNA, 19 nt, Artificial Sequence
  Description of Artificial Sequence: Synthetic oligonucleotide
  Antisense strand to SEQ ID NO: 1988858
uuucaagguagcauuccaa

SEQ ID NO: 1988860 - RNA, 19 nt, Artificial Sequence
  Description of Artificial Sequence: Synthetic oligonucleotide
  Sense strand starting at position 642 of SEQ ID NO: 1880722
uggguagaugcauauguca

SEQ ID NO: 1988861 - RNA, 19 nt, Artificial Sequence
  Description of Artificial Sequence: Synthetic oligonucleotide
  Antisense strand to SEQ ID NO: 1988860
ugacauaugcaucuaccca

SEQ ID NO: 1988862 - RNA, 19 nt, Artificial Sequence
  Description of Artificial Sequence: Synthetic oligonucleotide
  Sense strand starting at position 732 of SEQ ID NO: 1880722
ugcaauucugucuagacaa

SEQ ID NO: 1988863 - RNA, 19 nt, Artificial Sequence
  Description of Artificial Sequence: Synthetic oligonucleotide
  Antisense strand to SEQ ID NO: 1988862
uugucuagacagaauugca

SEQ ID NO: 1988864 - RNA, 19 nt, Artificial Sequence
  Description of Artificial Sequence: Synthetic oligonucleotide
  Sense strand starting at position 755 of SEQ ID NO: 1880722
aguggaaacucugucuuga

SEQ ID NO: 1988865 - RNA, 19 nt, Artificial Sequence
  Description of Artificial Sequence: Synthetic oligonucleotide
  Antisense strand to SEQ ID NO: 1988864
ucaagacagaguuuccacu

SEQ ID NO: 1988866 - RNA, 19 nt, Artificial Sequence
  Description of Artificial Sequence: Synthetic oligonucleotide
  Sense strand starting at position 757 of SEQ ID NO: 1880722
uggaaacucugucuugacu

SEQ ID NO: 1988867 - RNA, 19 nt, Artificial Sequence
  Description of Artificial Sequence: Synthetic oligonucleotide
  Antisense strand to SEQ ID NO: 1988866
agucaagacagaguuucca

SEQ ID NO: 1988868 - RNA, 19 nt, Artificial Sequence
  Description of Artificial Sequence: Synthetic oligonucleotide
  Sense strand starting at position 789 of SEQ ID NO: 1880722
gaaagcuugggagguucua

SEQ ID NO: 1988869 - RNA, 19 nt, Artificial Sequence
  Description of Artificial Sequence: Synthetic oligonucleotide
  Antisense strand to SEQ ID NO: 1988868
uagaaccucccaagcuuuc

SEQ ID NO: 1988870 - RNA, 19 nt, Artificial Sequence
  Description of Artificial Sequence: Synthetic oligonucleotide
  Sense strand starting at position 800 of SEQ ID NO: 1880722
agguucuacugacuauauu

SEQ ID NO: 1988871 - RNA, 19 nt, Artificial Sequence
  Description of Artificial Sequence: Synthetic oligonucleotide
  Antisense strand to SEQ ID NO: 1988870
aauauagucaguagaaccu

SEQ ID NO: 1988872 - RNA, 19 nt, Artificial Sequence
  Description of Artificial Sequence: Synthetic oligonucleotide
  Sense strand starting at position 1181 of SEQ ID NO: 1880722
ggaagcauaauguggagau

SEQ ID NO: 1988873 - RNA, 19 nt, Artificial Sequence
  Description of Artificial Sequence: Synthetic oligonucleotide
  Antisense strand to SEQ ID NO: 1988872
aucuccacauuaugcuucc

SEQ ID NO: 1988874 - RNA, 19 nt, Artificial Sequence
  Description of Artificial Sequence: Synthetic oligonucleotide
  Sense strand starting at position 1240 of SEQ ID NO: 1880722
uguucugggcaccauaauu

SEQ ID NO: 1988875 - RNA, 19 nt, Artificial Sequence
  Description of Artificial Sequence: Synthetic oligonucleotide
  Antisense strand to SEQ ID NO: 1988874
aauuauggugcccagaaca

SEQ ID NO: 1988876 - RNA, 19 nt, Artificial Sequence
  Description of Artificial Sequence: Synthetic oligonucleotide
  Sense strand starting at position 1403 of SEQ ID NO: 1880722
acuugaggcagauguaaga

SEQ ID NO: 1988877 - RNA, 19 nt, Artificial Sequence
  Description of Artificial Sequence: Synthetic oligonucleotide
  Antisense strand to SEQ ID NO: 1988876
ucuuacaucugccucaagu

SEQ ID NO: 1988878 - RNA, 19 nt, Artificial Sequence
  Description of Artificial Sequence: Synthetic oligonucleotide
  Sense strand starting at position 1612 of SEQ ID NO: 1880722
acuccuugcucacuaggaa

SEQ ID NO: 1988879 - RNA, 19 nt, Artificial Sequence
  Description of Artificial Sequence: Synthetic oligonucleotide
  Antisense strand to SEQ ID NO: 1988878
uuccuagugagcaaggagu

SEQ ID NO: 1988880 - RNA, 19 nt, Artificial Sequence
  Description of Artificial Sequence: Synthetic oligonucleotide
  Sense strand starting at position 1613 of SEQ ID NO: 1880722
cuccuugcucacuaggaaa

SEQ ID NO: 1988881 - RNA, 19 nt, Artificial Sequence
  Description of Artificial Sequence: Synthetic oligonucleotide
  Antisense strand to SEQ ID NO: 1988880
uuuccuagugagcaaggag

SEQ ID NO: 1988882 - RNA, 19 nt, Artificial Sequence
  Description of Artificial Sequence: Synthetic oligonucleotide
  Sense strand starting at position 1678 of SEQ ID NO: 1880722
cuugaaucugcuuauuaga

SEQ ID NO: 1988883 - RNA, 19 nt, Artificial Sequence
  Description of Artificial Sequence: Synthetic oligonucleotide
  Antisense strand to SEQ ID NO: 1988882
ucuaauaagcagauucaag

SEQ ID NO: 1988884 - RNA, 19 nt, Artificial Sequence
  Description of Artificial Sequence: Synthetic oligonucleotide
  Sense strand starting at position 1680 of SEQ ID NO: 1880722
ugaaucugcuuauuagaaa

SEQ ID NO: 1988885 - RNA, 19 nt, Artificial Sequence
  Description of Artificial Sequence: Synthetic oligonucleotide
  Antisense strand to SEQ ID NO: 1988884
uuucuaauaagcagauuca

SEQ ID NO: 1988886 - RNA, 19 nt, Artificial Sequence
  Description of Artificial Sequence: Synthetic oligonucleotide
  Sense strand starting at position 1921 of SEQ ID NO: 1880722
ggaucagugcuagggauca

SEQ ID NO: 1988887 - RNA, 19 nt, Artificial Sequence
  Description of Artificial Sequence: Synthetic oligonucleotide
  Antisense strand to SEQ ID NO: 1988886
ugaucccuagcacugaucc

SEQ ID NO: 1988888 - RNA, 19 nt, Artificial Sequence
  Description of Artificial Sequence: Synthetic oligonucleotide
  Sense strand starting at position 2009 of SEQ ID NO: 1880722
uugcuugauuucucagcua

SEQ ID NO: 1988889 - RNA, 19 nt, Artificial Sequence
  Description of Artificial Sequence: Synthetic oligonucleotide
  Antisense strand to SEQ ID NO: 1988888
uagcugagaaaucaagcaa

SEQ ID NO: 1988890 - RNA, 19 nt, Artificial Sequence
  Description of Artificial Sequence: Synthetic oligonucleotide
  Sense strand starting at position 2051 of SEQ ID NO: 1880722
ggauuucuguagguguauc

SEQ ID NO: 1988891 - RNA, 19 nt, Artificial Sequence
  Description of Artificial Sequence: Synthetic oligonucleotide
  Antisense strand to SEQ ID NO: 1988890
gauacaccuacagaaaucc

SEQ ID NO: 1988892 - RNA, 19 nt, Artificial Sequence
  Description of Artificial Sequence: Synthetic oligonucleotide
  Sense strand starting at position 2121 of SEQ ID NO: 1880722
uuuaaagaucugggaguau

SEQ ID NO: 1988893 - RNA, 19 nt, Artificial Sequence
  Description of Artificial Sequence: Synthetic oligonucleotide
  Antisense strand to SEQ ID NO: 1988892
auacucccagaucuuuaaa

SEQ ID NO: 1988894 - RNA, 19 nt, Artificial Sequence
  Description of Artificial Sequence: Synthetic oligonucleotide
  Sense strand starting at position 2136 of SEQ ID NO: 1880722
guauuuaacuuggaggaga

SEQ ID NO: 1988895 - RNA, 19 nt, Artificial Sequence
  Description of Artificial Sequence: Synthetic oligonucleotide
  Antisense strand to SEQ ID NO: 1988894
ucuccuccaaguuaaauac

SEQ ID NO: 1988896 - RNA, 19 nt, Artificial Sequence
  Description of Artificial Sequence: Synthetic oligonucleotide
  Sense strand starting at position 2334 of SEQ ID NO: 1880722
ugaacugacuguucucaga

SEQ ID NO: 1988897 - RNA, 19 nt, Artificial Sequence
  Description of Artificial Sequence: Synthetic oligonucleotide
  Antisense strand to SEQ ID NO: 1988896
ucugagaacagucaguuca

SEQ ID NO: 1988898 - RNA, 19 nt, Artificial Sequence
  Description of Artificial Sequence: Synthetic oligonucleotide
  Sense strand starting at position 2414 of SEQ ID NO: 1880722
gauuucugugccugaaugu

SEQ ID NO: 1988899 - RNA, 19 nt, Artificial Sequence
  Description of Artificial Sequence: Synthetic oligonucleotide
  Antisense strand to SEQ ID NO: 1988898
acauucaggcacagaaauc

SEQ ID NO: 1988900 - RNA, 19 nt, Artificial Sequence
  Description of Artificial Sequence: Synthetic oligonucleotide
  Sense strand starting at position 2424 of SEQ ID NO: 1880722
ccugaauguucuguggaag

SEQ ID NO: 1988901 - RNA, 19 nt, Artificial Sequence
  Description of Artificial Sequence: Synthetic oligonucleotide
  Antisense strand to SEQ ID NO: 1988900
cuuccacagaacauucagg

SEQ ID NO: 1988902 - RNA, 19 nt, Artificial Sequence
  Description of Artificial Sequence: Synthetic oligonucleotide
  Sense strand starting at position 2461 of SEQ ID NO: 1880722
ggaauucugugauucuaaa

SEQ ID NO: 1988903 - RNA, 19 nt, Artificial Sequence
  Description of Artificial Sequence: Synthetic oligonucleotide
  Antisense strand to SEQ ID NO: 1988902
uuuagaaucacagaauucc

SEQ ID NO: 1988904 - RNA, 19 nt, Artificial Sequence
  Description of Artificial Sequence: Synthetic oligonucleotide
  Sense strand starting at position 2489 of SEQ ID NO: 1880722
guucuuauacuuuggagau

SEQ ID NO: 1988905 - RNA, 19 nt, Artificial Sequence
  Description of Artificial Sequence: Synthetic oligonucleotide
  Antisense strand to SEQ ID NO: 1988904
aucuccaaaguauaagaac

SEQ ID NO: 1988906 - RNA, 19 nt, Artificial Sequence
  Description of Artificial Sequence: Synthetic oligonucleotide
  Sense strand starting at position 2499 of SEQ ID NO: 1880722
uuuggagaucccuguuuag

SEQ ID NO: 1988907 - RNA, 19 nt, Artificial Sequence
  Description of Artificial Sequence: Synthetic oligonucleotide
  Antisense strand to SEQ ID NO: 1988906
cuaaacagggaucuccaaa

SEQ ID NO: 1988908 - RNA, 19 nt, Artificial Sequence
  Description of Artificial Sequence: Synthetic oligonucleotide
  Sense strand starting at position 2502 of SEQ ID NO: 1880722
ggagaucccuguuuagacu

SEQ ID NO: 1988909 - RNA, 19 nt, Artificial Sequence
  Description of Artificial Sequence: Synthetic oligonucleotide
  Antisense strand to SEQ ID NO: 1988908
agucuaaacagggaucucc

SEQ ID NO: 1988910 - RNA, 19 nt, Artificial Sequence
  Description of Artificial Sequence: Synthetic oligonucleotide
  Sense strand starting at position 2523 of SEQ ID NO: 1880722
ggacaucugcuugaguuua

SEQ ID NO: 1988911 - RNA, 19 nt, Artificial Sequence
  Description of Artificial Sequence: Synthetic oligonucleotide
  Antisense strand to SEQ ID NO: 1988910
uaaacucaagcagaugucc

SEQ ID NO: 1988912 - RNA, 19 nt, Artificial Sequence
  Description of Artificial Sequence: Synthetic oligonucleotide
  Sense strand starting at position 2657 of SEQ ID NO: 1880722
gguugagguccagagauuc

SEQ ID NO: 1988913 - RNA, 19 nt, Artificial Sequence
  Description of Artificial Sequence: Synthetic oligonucleotide
  Antisense strand to SEQ ID NO: 1988912
gaaucucuggaccucaacc

SEQ ID NO: 1988914 - RNA, 19 nt, Artificial Sequence
  Description of Artificial Sequence: Synthetic oligonucleotide
  Sense strand starting at position 2665 of SEQ ID NO: 1880722
uccagagauucuguacauc

SEQ ID NO: 1988915 - RNA, 19 nt, Artificial Sequence
  Description of Artificial Sequence: Synthetic oligonucleotide
  Antisense strand to SEQ ID NO: 1988914
gauguacagaaucucugga

SEQ ID NO: 1988916 - RNA, 19 nt, Artificial Sequence
  Description of Artificial Sequence: Synthetic oligonucleotide
  Sense strand starting at position 2791 of SEQ ID NO: 1880722
gggcucucuaaugggaaca

SEQ ID NO: 1988917 - RNA, 19 nt, Artificial Sequence
  Description of Artificial Sequence: Synthetic oligonucleotide
  Antisense strand to SEQ ID NO: 1988916
uguucccauuagagagccc

SEQ ID NO: 1988918 - RNA, 19 nt, Artificial Sequence
  Description of Artificial Sequence: Synthetic oligonucleotide
  Sense strand starting at position 2870 of SEQ ID NO: 1880722
aucgaaugggcaugcauuu

SEQ ID NO: 1988919 - RNA, 19 nt, Artificial Sequence
  Description of Artificial Sequence: Synthetic oligonucleotide
  Antisense strand to SEQ ID NO: 1988918
aaaugcaugcccauucgau

SEQ ID NO: 1988920 - RNA, 19 nt, Artificial Sequence
  Description of Artificial Sequence: Synthetic oligonucleotide
  Sense strand starting at position 2925 of SEQ ID NO: 1880722
agaauaugucaaugacagu

SEQ ID NO: 1988921 - RNA, 19 nt, Artificial Sequence
  Description of Artificial Sequence: Synthetic oligonucleotide
  Antisense strand to SEQ ID NO: 1988920
acugucauugacauauucu

SEQ ID NO: 1988922 - RNA, 19 nt, Artificial Sequence
  Description of Artificial Sequence: Synthetic oligonucleotide
  Sense strand starting at position 2931 of SEQ ID NO: 1880722
ugucaaugacagugaaauc

SEQ ID NO: 1988923 - RNA, 19 nt, Artificial Sequence
  Description of Artificial Sequence: Synthetic oligonucleotide
  Antisense strand to SEQ ID NO: 1988922
gauuucacugucauugaca

SEQ ID NO: 1988924 - RNA, 19 nt, Artificial Sequence
  Description of Artificial Sequence: Synthetic oligonucleotide
  Sense strand starting at position 2998 of SEQ ID NO: 1880722
uaucauaguguguagauau

SEQ ID NO: 1988925 - RNA, 19 nt, Artificial Sequence
  Description of Artificial Sequence: Synthetic oligonucleotide
  Antisense strand to SEQ ID NO: 1988924
auaucuacacacuaugaua

SEQ ID NO: 1988926 - RNA, 19 nt, Artificial Sequence
  Description of Artificial Sequence: Synthetic oligonucleotide
  Sense strand starting at position 3033 of SEQ ID NO: 1880722
cuguguucugaauaacacu

SEQ ID NO: 1988927 - RNA, 19 nt, Artificial Sequence
  Description of Artificial Sequence: Synthetic oligonucleotide
  Antisense strand to SEQ ID NO: 1988926
aguguuauucagaacacag

SEQ ID NO: 1988928 - RNA, 19 nt, Artificial Sequence
  Description of Artificial Sequence: Synthetic oligonucleotide
  Sense strand starting at position 3080 of SEQ ID NO: 1880722
ucucuaguaauuuguggua

SEQ ID NO: 1988929 - RNA, 19 nt, Artificial Sequence
  Description of Artificial Sequence: Synthetic oligonucleotide
  Antisense strand to SEQ ID NO: 1988928
uaccacaaauuacuagaga

SEQ ID NO: 1988930 - RNA, 19 nt, Artificial Sequence
  Description of Artificial Sequence: Synthetic oligonucleotide
  Sense strand starting at position 3143 of SEQ ID NO: 1880722
aauugaauugaagggcuua

SEQ ID NO: 1988931 - RNA, 19 nt, Artificial Sequence
  Description of Artificial Sequence: Synthetic oligonucleotide
  Antisense strand to SEQ ID NO: 1988930
uaagcccuucaauucaauu

SEQ ID NO: 1988932 - RNA, 19 nt, Artificial Sequence
  Description of Artificial Sequence: Synthetic oligonucleotide
  Sense strand starting at position 3156 of SEQ ID NO: 1880722
ggcuuauaugcagagggua

SEQ ID NO: 1988933 - RNA, 19 nt, Artificial Sequence
  Description of Artificial Sequence: Synthetic oligonucleotide
  Antisense strand to SEQ ID NO: 1988932
uacccucugcauauaagcc

SEQ ID NO: 1988934 - RNA, 19 nt, Artificial Sequence
  Description of Artificial Sequence: Synthetic oligonucleotide
  Sense strand starting at position 3694 of SEQ ID NO: 1880722
gugucuucuuucuccauuu

SEQ ID NO: 1988935 - RNA, 19 nt, Artificial Sequence
  Description of Artificial Sequence: Synthetic oligonucleotide
  Antisense strand to SEQ ID NO: 1988934
aaauggagaaagaagacac

SEQ ID NO: 1988936 - RNA, 19 nt, Artificial Sequence
  Description of Artificial Sequence: Synthetic oligonucleotide
  Sense strand starting at position 151 of SEQ ID NO: 1880723
aauaguucuugcuuggaaa

SEQ ID NO: 1988937 - RNA, 19 nt, Artificial Sequence
  Description of Artificial Sequence: Synthetic oligonucleotide
  Antisense strand to SEQ ID NO: 1988936
uuuccaagcaagaacuauu

SEQ ID NO: 1988938 - RNA, 19 nt, Artificial Sequence
  Description of Artificial Sequence: Synthetic oligonucleotide
  Sense strand starting at position 374 of SEQ ID NO: 1880723
aguuguaguaugcugugua

SEQ ID NO: 1988939 - RNA, 19 nt, Artificial Sequence
  Description of Artificial Sequence: Synthetic oligonucleotide
  Antisense strand to SEQ ID NO: 1988938
uacacagcauacuacaacu

SEQ ID NO: 1988940 - RNA, 19 nt, Artificial Sequence
  Description of Artificial Sequence: Synthetic oligonucleotide
  Sense strand starting at position 430 of SEQ ID NO: 1880723
gugcaaauuugacacucaa

SEQ ID NO: 1988941 - RNA, 19 nt, Artificial Sequence
  Description of Artificial Sequence: Synthetic oligonucleotide
  Antisense strand to SEQ ID NO: 1988940
uugagugucaaauuugcac

SEQ ID NO: 1988942 - RNA, 19 nt, Artificial Sequence
  Description of Artificial Sequence: Synthetic oligonucleotide
  Sense strand starting at position 538 of SEQ ID NO: 1880723
aaggaauguuagccagaga

SEQ ID NO: 1988943 - RNA, 19 nt, Artificial Sequence
  Description of Artificial Sequence: Synthetic oligonucleotide
  Antisense strand to SEQ ID NO: 1988942
ucucuggcuaacauuccuu

SEQ ID NO: 1988944 - RNA, 19 nt, Artificial Sequence
  Description of Artificial Sequence: Synthetic oligonucleotide
  Sense strand starting at position 569 of SEQ ID NO: 1880723
agacaagccucaucaguga

SEQ ID NO: 1988945 - RNA, 19 nt, Artificial Sequence
  Description of Artificial Sequence: Synthetic oligonucleotide
  Antisense strand to SEQ ID NO: 1988944
ucacugaugaggcuugucu

SEQ ID NO: 1988946 - RNA, 19 nt, Artificial Sequence
  Description of Artificial Sequence: Synthetic oligonucleotide
  Sense strand starting at position 582 of SEQ ID NO: 1880723
cagugaugucaacaagucu

SEQ ID NO: 1988947 - RNA, 19 nt, Artificial Sequence
  Description of Artificial Sequence: Synthetic oligonucleotide
  Antisense strand to SEQ ID NO: 1988946
agacuuguugacaucacug

SEQ ID NO: 1988948 - RNA, 19 nt, Artificial Sequence
  Description of Artificial Sequence: Synthetic oligonucleotide
  Sense strand starting at position 619 of SEQ ID NO: 1880723
uuaucagaguugucaagaa

SEQ ID NO: 1988949 - RNA, 19 nt, Artificial Sequence
  Description of Artificial Sequence: Synthetic oligonucleotide
  Antisense strand to SEQ ID NO: 1988948
uucuugacaacucugauaa

SEQ ID NO: 1988950 - RNA, 19 nt, Artificial Sequence
  Description of Artificial Sequence: Synthetic oligonucleotide
  Sense strand starting at position 808 of SEQ ID NO: 1880723
aucagaaacgauugucaaa

SEQ ID NO: 1988951 - RNA, 19 nt, Artificial Sequence
  Description of Artificial Sequence: Synthetic oligonucleotide
  Antisense strand to SEQ ID NO: 1988950
uuugacaaucguuucugau

SEQ ID NO: 1988952 - RNA, 19 nt, Artificial Sequence
  Description of Artificial Sequence: Synthetic oligonucleotide
  Sense strand starting at position 837 of SEQ ID NO: 1880723
cugaucaaccacugagacu

SEQ ID NO: 1988953 - RNA, 19 nt, Artificial Sequence
  Description of Artificial Sequence: Synthetic oligonucleotide
  Antisense strand to SEQ ID NO: 1988952
agucucagugguugaucag

SEQ ID NO: 1988954 - RNA, 19 nt, Artificial Sequence
  Description of Artificial Sequence: Synthetic oligonucleotide
  Sense strand starting at position 868 of SEQ ID NO: 1880723
acaggagguuugcuuuaaa

SEQ ID NO: 1988955 - RNA, 19 nt, Artificial Sequence
  Description of Artificial Sequence: Synthetic oligonucleotide
  Antisense strand to SEQ ID NO: 1988954
uuuaaagcaaaccuccugu

SEQ ID NO: 1988956 - RNA, 19 nt, Artificial Sequence
  Description of Artificial Sequence: Synthetic oligonucleotide
  Sense strand starting at position 1085 of SEQ ID NO: 1880723
gggaacucacaaugcauaa

SEQ ID NO: 1988957 - RNA, 19 nt, Artificial Sequence
  Description of Artificial Sequence: Synthetic oligonucleotide
  Antisense strand to SEQ ID NO: 1988956
uuaugcauugugaguuccc

SEQ ID NO: 1988958 - RNA, 19 nt, Artificial Sequence
  Description of Artificial Sequence: Synthetic oligonucleotide
  Sense strand starting at position 1139 of SEQ ID NO: 1880723
gcccuauuucuaugguauu

SEQ ID NO: 1988959 - RNA, 19 nt, Artificial Sequence
  Description of Artificial Sequence: Synthetic oligonucleotide
  Antisense strand to SEQ ID NO: 1988958
aauaccauagaaauagggc

SEQ ID NO: 1988960 - RNA, 19 nt, Artificial Sequence
  Description of Artificial Sequence: Synthetic oligonucleotide
  Sense strand starting at position 1264 of SEQ ID NO: 1880723
uggaauauuugccagaaug

SEQ ID NO: 1988961 - RNA, 19 nt, Artificial Sequence
  Description of Artificial Sequence: Synthetic oligonucleotide
  Antisense strand to SEQ ID NO: 1988960
cauucuggcaaauauucca

SEQ ID NO: 1988962 - RNA, 19 nt, Artificial Sequence
  Description of Artificial Sequence: Synthetic oligonucleotide
  Sense strand starting at position 1272 of SEQ ID NO: 1880723
uugccagaaugacuaauaa

SEQ ID NO: 1988963 - RNA, 19 nt, Artificial Sequence
  Description of Artificial Sequence: Synthetic oligonucleotide
  Antisense strand to SEQ ID NO: 1988962
uuauuagucauucuggcaa

SEQ ID NO: 1988964 - RNA, 19 nt, Artificial Sequence
  Description of Artificial Sequence: Synthetic oligonucleotide
  Sense strand starting at position 1369 of SEQ ID NO: 1880723
uguagauauaguugauaga

SEQ ID NO: 1988965 - RNA, 19 nt, Artificial Sequence
  Description of Artificial Sequence: Synthetic oligonucleotide
  Antisense strand to SEQ ID NO: 1988964
ucuaucaacuauaucuaca

SEQ ID NO: 1988966 - RNA, 19 nt, Artificial Sequence
  Description of Artificial Sequence: Synthetic oligonucleotide
  Sense strand starting at position 1658 of SEQ ID NO: 1880723
gaauaugaucaaggaugcu

SEQ ID NO: 1988967 - RNA, 19 nt, Artificial Sequence
  Description of Artificial Sequence: Synthetic oligonucleotide
  Antisense strand to SEQ ID NO: 1988966
agcauccuugaucauauuc

SEQ ID NO: 1988968 - RNA, 19 nt, Artificial Sequence
  Description of Artificial Sequence: Synthetic oligonucleotide
  Sense strand starting at position 1993 of SEQ ID NO: 1880723
ugggcaaucaguuaaaguu

SEQ ID NO: 1988969 - RNA, 19 nt, Artificial Sequence
  Description of Artificial Sequence: Synthetic oligonucleotide
  Antisense strand to SEQ ID NO: 1988968
aacuuuaacugauugccca

SEQ ID NO: 1988970 - RNA, 19 nt, Artificial Sequence
  Description of Artificial Sequence: Synthetic oligonucleotide
  Sense strand starting at position 2000 of SEQ ID NO: 1880723
ucaguuaaaguuugguuau

SEQ ID NO: 1988971 - RNA, 19 nt, Artificial Sequence
  Description of Artificial Sequence: Synthetic oligonucleotide
  Antisense strand to SEQ ID NO: 1988970
auaaccaaacuuuaacuga

SEQ ID NO: 1988972 - RNA, 19 nt, Artificial Sequence
  Description of Artificial Sequence: Synthetic oligonucleotide
  Sense strand starting at position 2096 of SEQ ID NO: 1880723
accauuauuguuuguaaug

SEQ ID NO: 1988973 - RNA, 19 nt, Artificial Sequence
  Description of Artificial Sequence: Synthetic oligonucleotide
  Antisense strand to SEQ ID NO: 1988972
cauuacaaacaauaauggu

SEQ ID NO: 1988974 - RNA, 19 nt, Artificial Sequence
  Description of Artificial Sequence: Synthetic oligonucleotide
  Sense strand starting at position 2097 of SEQ ID NO: 1880723
ccauuauuguuuguaauga

SEQ ID NO: 1988975 - RNA, 19 nt, Artificial Sequence
  Description of Artificial Sequence: Synthetic oligonucleotide
  Antisense strand to SEQ ID NO: 1988974
ucauuacaaacaauaaugg

SEQ ID NO: 1988976 - RNA, 19 nt, Artificial Sequence
  Description of Artificial Sequence: Synthetic oligonucleotide
  Sense strand starting at position 2389 of SEQ ID NO: 1880723
uguaauaaugugcaauguu

SEQ ID NO: 1988977 - RNA, 19 nt, Artificial Sequence
  Description of Artificial Sequence: Synthetic oligonucleotide
  Antisense strand to SEQ ID NO: 1988976
aacauugcacauuauuaca

SEQ ID NO: 1988978 - RNA, 19 nt, Artificial Sequence
  Description of Artificial Sequence: Synthetic oligonucleotide
  Sense strand starting at position 2405 of SEQ ID NO: 1880723
guuaguguuauauggaaua

SEQ ID NO: 1988979 - RNA, 19 nt, Artificial Sequence
  Description of Artificial Sequence: Synthetic oligonucleotide
  Antisense strand to SEQ ID NO: 1988978
uauuccauauaacacuaac

SEQ ID NO: 1988980 - RNA, 19 nt, Artificial Sequence
  Description of Artificial Sequence: Synthetic oligonucleotide
  Sense strand starting at position 2439 of SEQ ID NO: 1880723
aaugcaaguuauguaagau

SEQ ID NO: 1988981 - RNA, 19 nt, Artificial Sequence
  Description of Artificial Sequence: Synthetic oligonucleotide
  Antisense strand to SEQ ID NO: 1988980
aucuuacauaacuugcauu

SEQ ID NO: 1988982 - RNA, 19 nt, Artificial Sequence
  Description of Artificial Sequence: Synthetic oligonucleotide
  Sense strand starting at position 3035 of SEQ ID NO: 1880723
acacauacuucugugacuu

SEQ ID NO: 1988983 - RNA, 19 nt, Artificial Sequence
  Description of Artificial Sequence: Synthetic oligonucleotide
  Antisense strand to SEQ ID NO: 1988982
aagucacagaaguaugugu

SEQ ID NO: 1988984 - RNA, 19 nt, Artificial Sequence
  Description of Artificial Sequence: Synthetic oligonucleotide
  Sense strand starting at position 3039 of SEQ ID NO: 1880723
auacuucugugacuuagua

SEQ ID NO: 1988985 - RNA, 19 nt, Artificial Sequence
  Description of Artificial Sequence: Synthetic oligonucleotide
  Antisense strand to SEQ ID NO: 1988984
uacuaagucacagaaguau

SEQ ID NO: 1988986 - RNA, 19 nt, Artificial Sequence
  Description of Artificial Sequence: Synthetic oligonucleotide
  Sense strand starting at position 3041 of SEQ ID NO: 1880723
acuucugugacuuaguagu

SEQ ID NO: 1988987 - RNA, 19 nt, Artificial Sequence
  Description of Artificial Sequence: Synthetic oligonucleotide
  Antisense strand to SEQ ID NO: 1988986
acuacuaagucacagaagu

SEQ ID NO: 1988988 - RNA, 19 nt, Artificial Sequence
  Description of Artificial Sequence: Synthetic oligonucleotide
  Sense strand starting at position 3085 of SEQ ID NO: 1880723
uauacugaacugugugaua

SEQ ID NO: 1988989 - RNA, 19 nt, Artificial Sequence
  Description of Artificial Sequence: Synthetic oligonucleotide
  Antisense strand to SEQ ID NO: 1988988
uaucacacaguucaguaua

SEQ ID NO: 1988990 - RNA, 19 nt, Artificial Sequence
  Description of Artificial Sequence: Synthetic oligonucleotide
  Sense strand starting at position 3087 of SEQ ID NO: 1880723
uacugaacugugugauaaa

SEQ ID NO: 1988991 - RNA, 19 nt, Artificial Sequence
  Description of Artificial Sequence: Synthetic oligonucleotide
  Antisense strand to SEQ ID NO: 1988990
uuuaucacacaguucagua

SEQ ID NO: 1988992 - RNA, 19 nt, Artificial Sequence
  Description of Artificial Sequence: Synthetic oligonucleotide
  Sense strand starting at position 3094 of SEQ ID NO: 1880723
cugugugauaaauggcuau

SEQ ID NO: 1988993 - RNA, 19 nt, Artificial Sequence
  Description of Artificial Sequence: Synthetic oligonucleotide
  Antisense strand to SEQ ID NO: 1988992
auagccauuuaucacacag

SEQ ID NO: 1988994 - RNA, 19 nt, Artificial Sequence
  Description of Artificial Sequence: Synthetic oligonucleotide
  Sense strand starting at position 3098 of SEQ ID NO: 1880723
gugauaaauggcuaugcuc

SEQ ID NO: 1988995 - RNA, 19 nt, Artificial Sequence
  Description of Artificial Sequence: Synthetic oligonucleotide
  Antisense strand to SEQ ID NO: 1988994
gagcauagccauuuaucac

SEQ ID NO: 1988996 - RNA, 19 nt, Artificial Sequence
  Description of Artificial Sequence: Synthetic oligonucleotide
  Sense strand starting at position 3387 of SEQ ID NO: 1880723
uguuaaggagccugugaua

SEQ ID NO: 1988997 - RNA, 19 nt, Artificial Sequence
  Description of Artificial Sequence: Synthetic oligonucleotide
  Antisense strand to SEQ ID NO: 1988996
uaucacaggcuccuuaaca

SEQ ID NO: 1988998 - RNA, 19 nt, Artificial Sequence
  Description of Artificial Sequence: Synthetic oligonucleotide
  Sense strand starting at position 3394 of SEQ ID NO: 1880723
gagccugugauaggguuua

SEQ ID NO: 1988999 - RNA, 19 nt, Artificial Sequence
  Description of Artificial Sequence: Synthetic oligonucleotide
  Antisense strand to SEQ ID NO: 1988998
uaaacccuaucacaggcuc

SEQ ID NO: 1989000 - RNA, 19 nt, Artificial Sequence
  Description of Artificial Sequence: Synthetic oligonucleotide
  Sense strand starting at position 3399 of SEQ ID NO: 1880723
ugugauaggguuuaucgca

SEQ ID NO: 1989001 - RNA, 19 nt, Artificial Sequence
  Description of Artificial Sequence: Synthetic oligonucleotide
  Antisense strand to SEQ ID NO: 1989000
ugcgauaaacccuaucaca

SEQ ID NO: 1989002 - RNA, 19 nt, Artificial Sequence
  Description of Artificial Sequence: Synthetic oligonucleotide
  Sense strand starting at position 3406 of SEQ ID NO: 1880723
ggguuuaucgcagaaacua

SEQ ID NO: 1989003 - RNA, 19 nt, Artificial Sequence
  Description of Artificial Sequence: Synthetic oligonucleotide
  Antisense strand to SEQ ID NO: 1989002
uaguuucugcgauaaaccc

SEQ ID NO: 1989004 - RNA, 19 nt, Artificial Sequence
  Description of Artificial Sequence: Synthetic oligonucleotide
  Sense strand starting at position 3505 of SEQ ID NO: 1880723
agaugaugcccuuaacuua

SEQ ID NO: 1989005 - RNA, 19 nt, Artificial Sequence
  Description of Artificial Sequence: Synthetic oligonucleotide
  Antisense strand to SEQ ID NO: 1989004
uaaguuaagggcaucaucu

SEQ ID NO: 1989006 - RNA, 19 nt, Artificial Sequence
  Description of Artificial Sequence: Synthetic oligonucleotide
  Sense strand starting at position 3566 of SEQ ID NO: 1880723
ucuauuucuucgguacuuu

SEQ ID NO: 1989007 - RNA, 19 nt, Artificial Sequence
  Description of Artificial Sequence: Synthetic oligonucleotide
  Antisense strand to SEQ ID NO: 1989006
aaaguaccgaagaaauaga

SEQ ID NO: 1989008 - RNA, 19 nt, Artificial Sequence
  Description of Artificial Sequence: Synthetic oligonucleotide
  Sense strand starting at position 3743 of SEQ ID NO: 1880723
auacacaugucagcuauua

SEQ ID NO: 1989009 - RNA, 19 nt, Artificial Sequence
  Description of Artificial Sequence: Synthetic oligonucleotide
  Antisense strand to SEQ ID NO: 1989008
uaauagcugacauguguau

SEQ ID NO: 1989010 - RNA, 19 nt, Artificial Sequence
  Description of Artificial Sequence: Synthetic oligonucleotide
  Sense strand starting at position 3905 of SEQ ID NO: 1880723
auaauauaggccugugaga

SEQ ID NO: 1989011 - RNA, 19 nt, Artificial Sequence
  Description of Artificial Sequence: Synthetic oligonucleotide
  Antisense strand to SEQ ID NO: 1989010
ucucacaggccuauauuau

SEQ ID NO: 1989012 - RNA, 19 nt, Artificial Sequence
  Description of Artificial Sequence: Synthetic oligonucleotide
  Sense strand starting at position 3907 of SEQ ID NO: 1880723
aauauaggccugugagauc

SEQ ID NO: 1989013 - RNA, 19 nt, Artificial Sequence
  Description of Artificial Sequence: Synthetic oligonucleotide
  Antisense strand to SEQ ID NO: 1989012
gaucucacaggccuauauu

SEQ ID NO: 1989014 - RNA, 19 nt, Artificial Sequence
  Description of Artificial Sequence: Synthetic oligonucleotide
  Sense strand starting at position 3980 of SEQ ID NO: 1880723
uuaagaugauucucaguuu

SEQ ID NO: 1989015 - RNA, 19 nt, Artificial Sequence
  Description of Artificial Sequence: Synthetic oligonucleotide
  Antisense strand to SEQ ID NO: 1989014
aaacugagaaucaucuuaa

SEQ ID NO: 1989016 - RNA, 19 nt, Artificial Sequence
  Description of Artificial Sequence: Synthetic oligonucleotide
  Sense strand starting at position 296 of SEQ ID NO: 1880724
cagggucuguguccuauuu

SEQ ID NO: 1989017 - RNA, 19 nt, Artificial Sequence
  Description of Artificial Sequence: Synthetic oligonucleotide
  Antisense strand to SEQ ID NO: 1989016
aaauaggacacagacccug

SEQ ID NO: 1989018 - RNA, 19 nt, Artificial Sequence
  Description of Artificial Sequence: Synthetic oligonucleotide
  Sense strand starting at position 298 of SEQ ID NO: 1880724
gggucuguguccuauuugu

SEQ ID NO: 1989019 - RNA, 19 nt, Artificial Sequence
  Description of Artificial Sequence: Synthetic oligonucleotide
  Antisense strand to SEQ ID NO: 1989018
acaaauaggacacagaccc

SEQ ID NO: 1989020 - RNA, 19 nt, Artificial Sequence
  Description of Artificial Sequence: Synthetic oligonucleotide
  Sense strand starting at position 321 of SEQ ID NO: 1880724
gggucagaguccuuuggag

SEQ ID NO: 1989021 - RNA, 19 nt, Artificial Sequence
  Description of Artificial Sequence: Synthetic oligonucleotide
  Antisense strand to SEQ ID NO: 1989020
cuccaaaggacucugaccc

SEQ ID NO: 1989022 - RNA, 19 nt, Artificial Sequence
  Description of Artificial Sequence: Synthetic oligonucleotide
  Sense strand starting at position 651 of SEQ ID NO: 1880724
ugacuuucugcaggcacau

SEQ ID NO: 1989023 - RNA, 19 nt, Artificial Sequence
  Description of Artificial Sequence: Synthetic oligonucleotide
  Antisense strand to SEQ ID NO: 1989022
augugccugcagaaaguca

SEQ ID NO: 1989024 - RNA, 19 nt, Artificial Sequence
  Description of Artificial Sequence: Synthetic oligonucleotide
  Sense strand starting at position 662 of SEQ ID NO: 1880724
aggcacauaucugaucaca

SEQ ID NO: 1989025 - RNA, 19 nt, Artificial Sequence
  Description of Artificial Sequence: Synthetic oligonucleotide
  Antisense strand to SEQ ID NO: 1989024
ugugaucagauaugugccu

SEQ ID NO: 1989026 - RNA, 19 nt, Artificial Sequence
  Description of Artificial Sequence: Synthetic oligonucleotide
  Sense strand starting at position 834 of SEQ ID NO: 1880724
ccugguaccugguuaggaa

SEQ ID NO: 1989027 - RNA, 19 nt, Artificial Sequence
  Description of Artificial Sequence: Synthetic oligonucleotide
  Antisense strand to SEQ ID NO: 1989026
uuccuaaccagguaccagg

SEQ ID NO: 1989028 - RNA, 19 nt, Artificial Sequence
  Description of Artificial Sequence: Synthetic oligonucleotide
  Sense strand starting at position 1177 of SEQ ID NO: 1880724
gaucccuguuugucuggaa

SEQ ID NO: 1989029 - RNA, 19 nt, Artificial Sequence
  Description of Artificial Sequence: Synthetic oligonucleotide
  Antisense strand to SEQ ID NO: 1989028
uuccagacaaacagggauc

SEQ ID NO: 1989030 - RNA, 19 nt, Artificial Sequence
  Description of Artificial Sequence: Synthetic oligonucleotide
  Sense strand starting at position 1321 of SEQ ID NO: 1880724
ucggugagugcguucuaga

SEQ ID NO: 1989031 - RNA, 19 nt, Artificial Sequence
  Description of Artificial Sequence: Synthetic oligonucleotide
  Antisense strand to SEQ ID NO: 1989030
ucuagaacgcacucaccga

SEQ ID NO: 1989032 - RNA, 19 nt, Artificial Sequence
  Description of Artificial Sequence: Synthetic oligonucleotide
  Sense strand starting at position 1322 of SEQ ID NO: 1880724
cggugagugcguucuagau

SEQ ID NO: 1989033 - RNA, 19 nt, Artificial Sequence
  Description of Artificial Sequence: Synthetic oligonucleotide
  Antisense strand to SEQ ID NO: 1989032
aucuagaacgcacucaccg

SEQ ID NO: 1989034 - RNA, 19 nt, Artificial Sequence
  Description of Artificial Sequence: Synthetic oligonucleotide
  Sense strand starting at position 1878 of SEQ ID NO: 1880724
gaggguuucuagggaggga

SEQ ID NO: 1989035 - RNA, 19 nt, Artificial Sequence
  Description of Artificial Sequence: Synthetic oligonucleotide
  Antisense strand to SEQ ID NO: 1989034
ucccucccuagaaacccuc

SEQ ID NO: 1989036 - RNA, 19 nt, Artificial Sequence
  Description of Artificial Sequence: Synthetic oligonucleotide
  Sense strand starting at position 1950 of SEQ ID NO: 1880724
gccacuguuagcgcaauca

SEQ ID NO: 1989037 - RNA, 19 nt, Artificial Sequence
  Description of Artificial Sequence: Synthetic oligonucleotide
  Antisense strand to SEQ ID NO: 1989036
ugauugcgcuaacaguggc

SEQ ID NO: 1989038 - RNA, 19 nt, Artificial Sequence
  Description of Artificial Sequence: Synthetic oligonucleotide
  Sense strand starting at position 2205 of SEQ ID NO: 1880724
ccuugcuuccuugaggaga

SEQ ID NO: 1989039 - RNA, 19 nt, Artificial Sequence
  Description of Artificial Sequence: Synthetic oligonucleotide
  Antisense strand to SEQ ID NO: 1989038
ucuccucaaggaagcaagg

SEQ ID NO: 1989040 - RNA, 19 nt, Artificial Sequence
  Description of Artificial Sequence: Synthetic oligonucleotide
  Sense strand starting at position 2207 of SEQ ID NO: 1880724
uugcuuccuugaggagaga

SEQ ID NO: 1989041 - RNA, 19 nt, Artificial Sequence
  Description of Artificial Sequence: Synthetic oligonucleotide
  Antisense strand to SEQ ID NO: 1989040
ucucuccucaaggaagcaa

SEQ ID NO: 1989042 - RNA, 19 nt, Artificial Sequence
  Description of Artificial Sequence: Synthetic oligonucleotide
  Sense strand starting at position 2399 of SEQ ID NO: 1880724
uguggaaauuccuaucuuc

SEQ ID NO: 1989043 - RNA, 19 nt, Artificial Sequence
  Description of Artificial Sequence: Synthetic oligonucleotide
  Antisense strand to SEQ ID NO: 1989042
gaagauaggaauuuccaca

SEQ ID NO: 1989044 - RNA, 19 nt, Artificial Sequence
  Description of Artificial Sequence: Synthetic oligonucleotide
  Sense strand starting at position 2425 of SEQ ID NO: 1880724
agggacauuuaucacuuau

SEQ ID NO: 1989045 - RNA, 19 nt, Artificial Sequence
  Description of Artificial Sequence: Synthetic oligonucleotide
  Antisense strand to SEQ ID NO: 1989044
auaagugauaaaugucccu

SEQ ID NO: 1989046 - RNA, 19 nt, Artificial Sequence
  Description of Artificial Sequence: Synthetic oligonucleotide
  Sense strand starting at position 2503 of SEQ ID NO: 1880724
agaccucuuuccucuaguu

SEQ ID NO: 1989047 - RNA, 19 nt, Artificial Sequence
  Description of Artificial Sequence: Synthetic oligonucleotide
  Antisense strand to SEQ ID NO: 1989046
aacuagaggaaagaggucu

SEQ ID NO: 1989048 - RNA, 19 nt, Artificial Sequence
  Description of Artificial Sequence: Synthetic oligonucleotide
  Sense strand starting at position 2544 of SEQ ID NO: 1880724
ucucuuugacuuuguguuu

SEQ ID NO: 1989049 - RNA, 19 nt, Artificial Sequence
  Description of Artificial Sequence: Synthetic oligonucleotide
  Antisense strand to SEQ ID NO: 1989048
aaacacaaagucaaagaga

SEQ ID NO: 1989050 - RNA, 19 nt, Artificial Sequence
  Description of Artificial Sequence: Synthetic oligonucleotide
  Sense strand starting at position 2946 of SEQ ID NO: 1880724
cucaguagcucagaccaau

SEQ ID NO: 1989051 - RNA, 19 nt, Artificial Sequence
  Description of Artificial Sequence: Synthetic oligonucleotide
  Antisense strand to SEQ ID NO: 1989050
auuggucugagcuacugag

SEQ ID NO: 1989052 - RNA, 19 nt, Artificial Sequence
  Description of Artificial Sequence: Synthetic oligonucleotide
  Sense strand starting at position 2949 of SEQ ID NO: 1880724
aguagcucagaccaauaau

SEQ ID NO: 1989053 - RNA, 19 nt, Artificial Sequence
  Description of Artificial Sequence: Synthetic oligonucleotide
  Antisense strand to SEQ ID NO: 1989052
auuauuggucugagcuacu

SEQ ID NO: 1989054 - RNA, 19 nt, Artificial Sequence
  Description of Artificial Sequence: Synthetic oligonucleotide
  Sense strand starting at position 3110 of SEQ ID NO: 1880724
auuagauauuuccaggaag

SEQ ID NO: 1989055 - RNA, 19 nt, Artificial Sequence
  Description of Artificial Sequence: Synthetic oligonucleotide
  Antisense strand to SEQ ID NO: 1989054
cuuccuggaaauaucuaau

SEQ ID NO: 1989056 - RNA, 19 nt, Artificial Sequence
  Description of Artificial Sequence: Synthetic oligonucleotide
  Sense strand starting at position 3181 of SEQ ID NO: 1880724
uugggaaggcccugucauu

SEQ ID NO: 1989057 - RNA, 19 nt, Artificial Sequence
  Description of Artificial Sequence: Synthetic oligonucleotide
  Antisense strand to SEQ ID NO: 1989056
aaugacagggccuucccaa

SEQ ID NO: 1989058 - RNA, 19 nt, Artificial Sequence
  Description of Artificial Sequence: Synthetic oligonucleotide
  Sense strand starting at position 3188 of SEQ ID NO: 1880724
ggcccugucauuggcagaa

SEQ ID NO: 1989059 - RNA, 19 nt, Artificial Sequence
  Description of Artificial Sequence: Synthetic oligonucleotide
  Antisense strand to SEQ ID NO: 1989058
uucugccaaugacagggcc

SEQ ID NO: 1989060 - RNA, 19 nt, Artificial Sequence
  Description of Artificial Sequence: Synthetic oligonucleotide
  Sense strand starting at position 3235 of SEQ ID NO: 1880724
gcugcuuucuaagaggacu

SEQ ID NO: 1989061 - RNA, 19 nt, Artificial Sequence
  Description of Artificial Sequence: Synthetic oligonucleotide
  Antisense strand to SEQ ID NO: 1989060
aguccucuuagaaagcagc

SEQ ID NO: 1989062 - RNA, 19 nt, Artificial Sequence
  Description of Artificial Sequence: Synthetic oligonucleotide
  Sense strand starting at position 3482 of SEQ ID NO: 1880724
uucgcaguuucucuuacaa

SEQ ID NO: 1989063 - RNA, 19 nt, Artificial Sequence
  Description of Artificial Sequence: Synthetic oligonucleotide
  Antisense strand to SEQ ID NO: 1989062
uuguaagagaaacugcgaa

SEQ ID NO: 1989064 - RNA, 19 nt, Artificial Sequence
  Description of Artificial Sequence: Synthetic oligonucleotide
  Sense strand starting at position 3484 of SEQ ID NO: 1880724
cgcaguuucucuuacaaac

SEQ ID NO: 1989065 - RNA, 19 nt, Artificial Sequence
  Description of Artificial Sequence: Synthetic oligonucleotide
  Antisense strand to SEQ ID NO: 1989064
guuuguaagagaaacugcg

SEQ ID NO: 1989066 - RNA, 19 nt, Artificial Sequence
  Description of Artificial Sequence: Synthetic oligonucleotide
  Sense strand starting at position 3593 of SEQ ID NO: 1880724
cccaucacgggcugagauu

SEQ ID NO: 1989067 - RNA, 19 nt, Artificial Sequence
  Description of Artificial Sequence: Synthetic oligonucleotide
  Antisense strand to SEQ ID NO: 1989066
aaucucagcccgugauggg

SEQ ID NO: 1989068 - RNA, 19 nt, Artificial Sequence
  Description of Artificial Sequence: Synthetic oligonucleotide
  Sense strand starting at position 3656 of SEQ ID NO: 1880724
gcugucagcuucuggaauu

SEQ ID NO: 1989069 - RNA, 19 nt, Artificial Sequence
  Description of Artificial Sequence: Synthetic oligonucleotide
  Antisense strand to SEQ ID NO: 1989068
aauuccagaagcugacagc

SEQ ID NO: 1989070 - RNA, 19 nt, Artificial Sequence
  Description of Artificial Sequence: Synthetic oligonucleotide
  Sense strand starting at position 3678 of SEQ ID NO: 1880724
gcuguugugcccuuuccau

SEQ ID NO: 1989071 - RNA, 19 nt, Artificial Sequence
  Description of Artificial Sequence: Synthetic oligonucleotide
  Antisense strand to SEQ ID NO: 1989070
auggaaagggcacaacagc

SEQ ID NO: 1989072 - RNA, 19 nt, Artificial Sequence
  Description of Artificial Sequence: Synthetic oligonucleotide
  Sense strand starting at position 3813 of SEQ ID NO: 1880724
cucaguucuccauggagua

SEQ ID NO: 1989073 - RNA, 19 nt, Artificial Sequence
  Description of Artificial Sequence: Synthetic oligonucleotide
  Antisense strand to SEQ ID NO: 1989072
uacuccauggagaacugag

SEQ ID NO: 1989074 - RNA, 19 nt, Artificial Sequence
  Description of Artificial Sequence: Synthetic oligonucleotide
  Sense strand starting at position 3814 of SEQ ID NO: 1880724
ucaguucuccauggaguau

SEQ ID NO: 1989075 - RNA, 19 nt, Artificial Sequence
  Description of Artificial Sequence: Synthetic oligonucleotide
  Antisense strand to SEQ ID NO: 1989074
auacuccauggagaacuga

SEQ ID NO: 1989076 - RNA, 19 nt, Artificial Sequence
  Description of Artificial Sequence: Synthetic oligonucleotide
  Sense strand starting at position 3826 of SEQ ID NO: 1880724
ggaguaugcgcucucuucu

SEQ ID NO: 1989077 - RNA, 19 nt, Artificial Sequence
  Description of Artificial Sequence: Synthetic oligonucleotide
  Antisense strand to SEQ ID NO: 1989076
agaagagagcgcauacucc

SEQ ID NO: 1989078 - RNA, 19 nt, Artificial Sequence
  Description of Artificial Sequence: Synthetic oligonucleotide
  Sense strand starting at position 3827 of SEQ ID NO: 1880724
gaguaugcgcucucuucuu

SEQ ID NO: 1989079 - RNA, 19 nt, Artificial Sequence
  Description of Artificial Sequence: Synthetic oligonucleotide
  Antisense strand to SEQ ID NO: 1989078
aagaagagagcgcauacuc

SEQ ID NO: 1989080 - RNA, 19 nt, Artificial Sequence
  Description of Artificial Sequence: Synthetic oligonucleotide
  Sense strand starting at position 3880 of SEQ ID NO: 1880724
guaggagcucuccaagaau

SEQ ID NO: 1989081 - RNA, 19 nt, Artificial Sequence
  Description of Artificial Sequence: Synthetic oligonucleotide
  Antisense strand to SEQ ID NO: 1989080
auucuuggagagcuccuac

SEQ ID NO: 1989082 - RNA, 19 nt, Artificial Sequence
  Description of Artificial Sequence: Synthetic oligonucleotide
  Sense strand starting at position 3883 of SEQ ID NO: 1880724
ggagcucuccaagaaugcu

SEQ ID NO: 1989083 - RNA, 19 nt, Artificial Sequence
  Description of Artificial Sequence: Synthetic oligonucleotide
  Antisense strand to SEQ ID NO: 1989082
agcauucuuggagagcucc

SEQ ID NO: 1989084 - RNA, 19 nt, Artificial Sequence
  Description of Artificial Sequence: Synthetic oligonucleotide
  Sense strand starting at position 3945 of SEQ ID NO: 1880724
gcagcaucccauuaugaga

SEQ ID NO: 1989085 - RNA, 19 nt, Artificial Sequence
  Description of Artificial Sequence: Synthetic oligonucleotide
  Antisense strand to SEQ ID NO: 1989084
ucucauaaugggaugcugc

SEQ ID NO: 1989086 - RNA, 19 nt, Artificial Sequence
  Description of Artificial Sequence: Synthetic oligonucleotide
  Sense strand starting at position 3964 of SEQ ID NO: 1880724
ccuuacuaaucccagggau

SEQ ID NO: 1989087 - RNA, 19 nt, Artificial Sequence
  Description of Artificial Sequence: Synthetic oligonucleotide
  Antisense strand to SEQ ID NO: 1989086
aucccugggauuaguaagg

SEQ ID NO: 1989088 - RNA, 19 nt, Artificial Sequence
  Description of Artificial Sequence: Synthetic oligonucleotide
  Sense strand starting at position 3966 of SEQ ID NO: 1880724
uuacuaaucccagggauca

SEQ ID NO: 1989089 - RNA, 19 nt, Artificial Sequence
  Description of Artificial Sequence: Synthetic oligonucleotide
  Antisense strand to SEQ ID NO: 1989088
ugaucccugggauuaguaa

SEQ ID NO: 1989090 - RNA, 19 nt, Artificial Sequence
  Description of Artificial Sequence: Synthetic oligonucleotide
  Sense strand starting at position 605 of SEQ ID NO: 1880725
cuggacugagugugaucau

SEQ ID NO: 1989091 - RNA, 19 nt, Artificial Sequence
  Description of Artificial Sequence: Synthetic oligonucleotide
  Antisense strand to SEQ ID NO: 1989090
augaucacacucaguccag

SEQ ID NO: 1989092 - RNA, 19 nt, Artificial Sequence
  Description of Artificial Sequence: Synthetic oligonucleotide
  Sense strand starting at position 608 of SEQ ID NO: 1880725
gacugagugugaucaucuc

SEQ ID NO: 1989093 - RNA, 19 nt, Artificial Sequence
  Description of Artificial Sequence: Synthetic oligonucleotide
  Antisense strand to SEQ ID NO: 1989092
gagaugaucacacucaguc

SEQ ID NO: 1989094 - RNA, 19 nt, Artificial Sequence
  Description of Artificial Sequence: Synthetic oligonucleotide
  Sense strand starting at position 678 of SEQ ID NO: 1880725
cugagugagugcuaaguga

SEQ ID NO: 1989095 - RNA, 19 nt, Artificial Sequence
  Description of Artificial Sequence: Synthetic oligonucleotide
  Antisense strand to SEQ ID NO: 1989094
ucacuuagcacucacucag

SEQ ID NO: 1989096 - RNA, 19 nt, Artificial Sequence
  Description of Artificial Sequence: Synthetic oligonucleotide
  Sense strand starting at position 700 of SEQ ID NO: 1880725
gcaacaucuccuggaguga

SEQ ID NO: 1989097 - RNA, 19 nt, Artificial Sequence
  Description of Artificial Sequence: Synthetic oligonucleotide
  Antisense strand to SEQ ID NO: 1989096
ucacuccaggagauguugc

SEQ ID NO: 1989098 - RNA, 19 nt, Artificial Sequence
  Description of Artificial Sequence: Synthetic oligonucleotide
  Sense strand starting at position 950 of SEQ ID NO: 1880725
ccuggaaagugucccaacu

SEQ ID NO: 1989099 - RNA, 19 nt, Artificial Sequence
  Description of Artificial Sequence: Synthetic oligonucleotide
  Antisense strand to SEQ ID NO: 1989098
aguugggacacuuuccagg

SEQ ID NO: 1989100 - RNA, 19 nt, Artificial Sequence
  Description of Artificial Sequence: Synthetic oligonucleotide
  Sense strand starting at position 952 of SEQ ID NO: 1880725
uggaaagugucccaacuca

SEQ ID NO: 1989101 - RNA, 19 nt, Artificial Sequence
  Description of Artificial Sequence: Synthetic oligonucleotide
  Antisense strand to SEQ ID NO: 1989100
ugaguugggacacuuucca

SEQ ID NO: 1989102 - RNA, 19 nt, Artificial Sequence
  Description of Artificial Sequence: Synthetic oligonucleotide
  Sense strand starting at position 1064 of SEQ ID NO: 1880725
gugggagucucuguuucag

SEQ ID NO: 1989103 - RNA, 19 nt, Artificial Sequence
  Description of Artificial Sequence: Synthetic oligonucleotide
  Antisense strand to SEQ ID NO: 1989102
cugaaacagagacucccac

SEQ ID NO: 1989104 - RNA, 19 nt, Artificial Sequence
  Description of Artificial Sequence: Synthetic oligonucleotide
  Sense strand starting at position 1087 of SEQ ID NO: 1880725
cagacuuccuguccaggua

SEQ ID NO: 1989105 - RNA, 19 nt, Artificial Sequence
  Description of Artificial Sequence: Synthetic oligonucleotide
  Antisense strand to SEQ ID NO: 1989104
uaccuggacaggaagucug

SEQ ID NO: 1989106 - RNA, 19 nt, Artificial Sequence
  Description of Artificial Sequence: Synthetic oligonucleotide
  Sense strand starting at position 1325 of SEQ ID NO: 1880725
gaaauagugcccuguggcu

SEQ ID NO: 1989107 - RNA, 19 nt, Artificial Sequence
  Description of Artificial Sequence: Synthetic oligonucleotide
  Antisense strand to SEQ ID NO: 1989106
agccacagggcacuauuuc

SEQ ID NO: 1989108 - RNA, 19 nt, Artificial Sequence
  Description of Artificial Sequence: Synthetic oligonucleotide
  Sense strand starting at position 1367 of SEQ ID NO: 1880725
gcaugauccugcccuugca

SEQ ID NO: 1989109 - RNA, 19 nt, Artificial Sequence
  Description of Artificial Sequence: Synthetic oligonucleotide
  Antisense strand to SEQ ID NO: 1989108
ugcaagggcaggaucaugc

SEQ ID NO: 1989110 - RNA, 19 nt, Artificial Sequence
  Description of Artificial Sequence: Synthetic oligonucleotide
  Sense strand starting at position 1413 of SEQ ID NO: 1880725
ccaugcaguuuccaugaaa

SEQ ID NO: 1989111 - RNA, 19 nt, Artificial Sequence
  Description of Artificial Sequence: Synthetic oligonucleotide
  Antisense strand to SEQ ID NO: 1989110
uuucauggaaacugcaugg

SEQ ID NO: 1989112 - RNA, 19 nt, Artificial Sequence
  Description of Artificial Sequence: Synthetic oligonucleotide
  Sense strand starting at position 1624 of SEQ ID NO: 1880725
ggcuacuguuccuggcaga

SEQ ID NO: 1989113 - RNA, 19 nt, Artificial Sequence
  Description of Artificial Sequence: Synthetic oligonucleotide
  Antisense strand to SEQ ID NO: 1989112
ucugccaggaacaguagcc

SEQ ID NO: 1989114 - RNA, 19 nt, Artificial Sequence
  Description of Artificial Sequence: Synthetic oligonucleotide
  Sense strand starting at position 1809 of SEQ ID NO: 1880725
ucaugaugccugugagggu

SEQ ID NO: 1989115 - RNA, 19 nt, Artificial Sequence
  Description of Artificial Sequence: Synthetic oligonucleotide
  Antisense strand to SEQ ID NO: 1989114
acccucacaggcaucauga

SEQ ID NO: 1989116 - RNA, 19 nt, Artificial Sequence
  Description of Artificial Sequence: Synthetic oligonucleotide
  Sense strand starting at position 2050 of SEQ ID NO: 1880725
cugggaguuccgcgucuaa

SEQ ID NO: 1989117 - RNA, 19 nt, Artificial Sequence
  Description of Artificial Sequence: Synthetic oligonucleotide
  Antisense strand to SEQ ID NO: 1989116
uuagacgcggaacucccag

SEQ ID NO: 1989118 - RNA, 19 nt, Artificial Sequence
  Description of Artificial Sequence: Synthetic oligonucleotide
  Sense strand starting at position 2183 of SEQ ID NO: 1880725
agagaucgagacugucuuu

SEQ ID NO: 1989119 - RNA, 19 nt, Artificial Sequence
  Description of Artificial Sequence: Synthetic oligonucleotide
  Antisense strand to SEQ ID NO: 1989118
aaagacagucucgaucucu

SEQ ID NO: 1989120 - RNA, 19 nt, Artificial Sequence
  Description of Artificial Sequence: Synthetic oligonucleotide
  Sense strand starting at position 2330 of SEQ ID NO: 1880725
cgucuugauucccgacuuu

SEQ ID NO: 1989121 - RNA, 19 nt, Artificial Sequence
  Description of Artificial Sequence: Synthetic oligonucleotide
  Antisense strand to SEQ ID NO: 1989120
aaagucgggaaucaagacg

SEQ ID NO: 1989122 - RNA, 19 nt, Artificial Sequence
  Description of Artificial Sequence: Synthetic oligonucleotide
  Sense strand starting at position 2340 of SEQ ID NO: 1880725
cccgacuuuguaggaugaa

SEQ ID NO: 1989123 - RNA, 19 nt, Artificial Sequence
  Description of Artificial Sequence: Synthetic oligonucleotide
  Antisense strand to SEQ ID NO: 1989122
uucauccuacaaagucggg

SEQ ID NO: 1989124 - RNA, 19 nt, Artificial Sequence
  Description of Artificial Sequence: Synthetic oligonucleotide
  Sense strand starting at position 3393 of SEQ ID NO: 1880725
gggcgucccugauagacuu

SEQ ID NO: 1989125 - RNA, 19 nt, Artificial Sequence
  Description of Artificial Sequence: Synthetic oligonucleotide
  Antisense strand to SEQ ID NO: 1989124
aagucuaucagggacgccc

SEQ ID NO: 1989126 - RNA, 19 nt, Artificial Sequence
  Description of Artificial Sequence: Synthetic oligonucleotide
  Sense strand starting at position 91 of SEQ ID NO: 1880726
guaaguguacuggauccga

SEQ ID NO: 1989127 - RNA, 19 nt, Artificial Sequence
  Description of Artificial Sequence: Synthetic oligonucleotide
  Antisense strand to SEQ ID NO: 1989126
ucggauccaguacacuuac

SEQ ID NO: 1989128 - RNA, 19 nt, Artificial Sequence
  Description of Artificial Sequence: Synthetic oligonucleotide
  Sense strand starting at position 138 of SEQ ID NO: 1880726
aaaugacuucgagaugccu

SEQ ID NO: 1989129 - RNA, 19 nt, Artificial Sequence
  Description of Artificial Sequence: Synthetic oligonucleotide
  Antisense strand to SEQ ID NO: 1989128
aggcaucucgaagucauuu

SEQ ID NO: 1989130 - RNA, 19 nt, Artificial Sequence
  Description of Artificial Sequence: Synthetic oligonucleotide
  Sense strand starting at position 193 of SEQ ID NO: 1880726
ccgagucauaaaugcagau

SEQ ID NO: 1989131 - RNA, 19 nt, Artificial Sequence
  Description of Artificial Sequence: Synthetic oligonucleotide
  Antisense strand to SEQ ID NO: 1989130
aucugcauuuaugacucgg

SEQ ID NO: 1989132 - RNA, 19 nt, Artificial Sequence
  Description of Artificial Sequence: Synthetic oligonucleotide
  Sense strand starting at position 301 of SEQ ID NO: 1880726
guguguuuacugccucuuu

SEQ ID NO: 1989133 - RNA, 19 nt, Artificial Sequence
  Description of Artificial Sequence: Synthetic oligonucleotide
  Antisense strand to SEQ ID NO: 1989132
aaagaggcaguaaacacac

SEQ ID NO: 1989134 - RNA, 19 nt, Artificial Sequence
  Description of Artificial Sequence: Synthetic oligonucleotide
  Sense strand starting at position 402 of SEQ ID NO: 1880726
acacuuacgcuaggacaua

SEQ ID NO: 1989135 - RNA, 19 nt, Artificial Sequence
  Description of Artificial Sequence: Synthetic oligonucleotide
  Antisense strand to SEQ ID NO: 1989134
uauguccuagcguaagugu

SEQ ID NO: 1989136 - RNA, 19 nt, Artificial Sequence
  Description of Artificial Sequence: Synthetic oligonucleotide
  Sense strand starting at position 595 of SEQ ID NO: 1880726
ugauuugucucaguggcua

SEQ ID NO: 1989137 - RNA, 19 nt, Artificial Sequence
  Description of Artificial Sequence: Synthetic oligonucleotide
  Antisense strand to SEQ ID NO: 1989136
uagccacugagacaaauca

SEQ ID NO: 1989138 - RNA, 19 nt, Artificial Sequence
  Description of Artificial Sequence: Synthetic oligonucleotide
  Sense strand starting at position 626 of SEQ ID NO: 1880726
agagauuuauuauggagga

SEQ ID NO: 1989139 - RNA, 19 nt, Artificial Sequence
  Description of Artificial Sequence: Synthetic oligonucleotide
  Antisense strand to SEQ ID NO: 1989138
uccuccauaauaaaucucu

SEQ ID NO: 1989140 - RNA, 19 nt, Artificial Sequence
  Description of Artificial Sequence: Synthetic oligonucleotide
  Sense strand starting at position 627 of SEQ ID NO: 1880726
gagauuuauuauggaggaa

SEQ ID NO: 1989141 - RNA, 19 nt, Artificial Sequence
  Description of Artificial Sequence: Synthetic oligonucleotide
  Antisense strand to SEQ ID NO: 1989140
uuccuccauaauaaaucuc

SEQ ID NO: 1989142 - RNA, 19 nt, Artificial Sequence
  Description of Artificial Sequence: Synthetic oligonucleotide
  Sense strand starting at position 777 of SEQ ID NO: 1880726
cugaaaggcucugugagau

SEQ ID NO: 1989143 - RNA, 19 nt, Artificial Sequence
  Description of Artificial Sequence: Synthetic oligonucleotide
  Antisense strand to SEQ ID NO: 1989142
aucucacagagccuuucag

SEQ ID NO: 1989144 - RNA, 19 nt, Artificial Sequence
  Description of Artificial Sequence: Synthetic oligonucleotide
  Sense strand starting at position 966 of SEQ ID NO: 1880726
uaggaaagagcauguguau

SEQ ID NO: 1989145 - RNA, 19 nt, Artificial Sequence
  Description of Artificial Sequence: Synthetic oligonucleotide
  Antisense strand to SEQ ID NO: 1989144
auacacaugcucuuuccua

SEQ ID NO: 1989146 - RNA, 19 nt, Artificial Sequence
  Description of Artificial Sequence: Synthetic oligonucleotide
  Sense strand starting at position 972 of SEQ ID NO: 1880726
agagcauguguaugacuca

SEQ ID NO: 1989147 - RNA, 19 nt, Artificial Sequence
  Description of Artificial Sequence: Synthetic oligonucleotide
  Antisense strand to SEQ ID NO: 1989146
ugagucauacacaugcucu

SEQ ID NO: 1989148 - RNA, 19 nt, Artificial Sequence
  Description of Artificial Sequence: Synthetic oligonucleotide
  Sense strand starting at position 977 of SEQ ID NO: 1880726
auguguaugacucaggcau

SEQ ID NO: 1989149 - RNA, 19 nt, Artificial Sequence
  Description of Artificial Sequence: Synthetic oligonucleotide
  Antisense strand to SEQ ID NO: 1989148
augccugagucauacacau

SEQ ID NO: 1989150 - RNA, 19 nt, Artificial Sequence
  Description of Artificial Sequence: Synthetic oligonucleotide
  Sense strand starting at position 1027 of SEQ ID NO: 1880726
aggauuucccugugcuacu

SEQ ID NO: 1989151 - RNA, 19 nt, Artificial Sequence
  Description of Artificial Sequence: Synthetic oligonucleotide
  Antisense strand to SEQ ID NO: 1989150
aguagcacagggaaauccu

SEQ ID NO: 1989152 - RNA, 19 nt, Artificial Sequence
  Description of Artificial Sequence: Synthetic oligonucleotide
  Sense strand starting at position 1206 of SEQ ID NO: 1880726
gagguuccuagcgaagacu

SEQ ID NO: 1989153 - RNA, 19 nt, Artificial Sequence
  Description of Artificial Sequence: Synthetic oligonucleotide
  Antisense strand to SEQ ID NO: 1989152
agucuucgcuaggaaccuc

SEQ ID NO: 1989154 - RNA, 19 nt, Artificial Sequence
  Description of Artificial Sequence: Synthetic oligonucleotide
  Sense strand starting at position 2578 of SEQ ID NO: 1880726
cccaaauacgaucgguaaa

SEQ ID NO: 1989155 - RNA, 19 nt, Artificial Sequence
  Description of Artificial Sequence: Synthetic oligonucleotide
  Antisense strand to SEQ ID NO: 1989154
uuuaccgaucguauuuggg

SEQ ID NO: 1989156 - RNA, 19 nt, Artificial Sequence
  Description of Artificial Sequence: Synthetic oligonucleotide
  Sense strand starting at position 2579 of SEQ ID NO: 1880726
ccaaauacgaucgguaaag

SEQ ID NO: 1989157 - RNA, 19 nt, Artificial Sequence
  Description of Artificial Sequence: Synthetic oligonucleotide
  Antisense strand to SEQ ID NO: 1989156
cuuuaccgaucguauuugg

SEQ ID NO: 1989158 - RNA, 19 nt, Artificial Sequence
  Description of Artificial Sequence: Synthetic oligonucleotide
  Sense strand starting at position 2580 of SEQ ID NO: 1880726
caaauacgaucgguaaagu

SEQ ID NO: 1989159 - RNA, 19 nt, Artificial Sequence
  Description of Artificial Sequence: Synthetic oligonucleotide
  Antisense strand to SEQ ID NO: 1989158
acuuuaccgaucguauuug

SEQ ID NO: 1989160 - RNA, 19 nt, Artificial Sequence
  Description of Artificial Sequence: Synthetic oligonucleotide
  Sense strand starting at position 2581 of SEQ ID NO: 1880726
aaauacgaucgguaaaguu

SEQ ID NO: 1989161 - RNA, 19 nt, Artificial Sequence
  Description of Artificial Sequence: Synthetic oligonucleotide
  Antisense strand to SEQ ID NO: 1989160
aacuuuaccgaucguauuu

SEQ ID NO: 1989162 - RNA, 19 nt, Artificial Sequence
  Description of Artificial Sequence: Synthetic oligonucleotide
  Sense strand starting at position 2607 of SEQ ID NO: 1880726
aucccuaagccagaguuua

SEQ ID NO: 1989163 - RNA, 19 nt, Artificial Sequence
  Description of Artificial Sequence: Synthetic oligonucleotide
  Antisense strand to SEQ ID NO: 1989162
uaaacucuggcuuagggau

SEQ ID NO: 1989164 - RNA, 19 nt, Artificial Sequence
  Description of Artificial Sequence: Synthetic oligonucleotide
  Sense strand starting at position 2643 of SEQ ID NO: 1880726
ugauaauaucaaggagcga

SEQ ID NO: 1989165 - RNA, 19 nt, Artificial Sequence
  Description of Artificial Sequence: Synthetic oligonucleotide
  Antisense strand to SEQ ID NO: 1989164
ucgcuccuugauauuauca

SEQ ID NO: 1989166 - RNA, 19 nt, Artificial Sequence
  Description of Artificial Sequence: Synthetic oligonucleotide
  Sense strand starting at position 2717 of SEQ ID NO: 1880726
guaauccuuccuuauguua

SEQ ID NO: 1989167 - RNA, 19 nt, Artificial Sequence
  Description of Artificial Sequence: Synthetic oligonucleotide
  Antisense strand to SEQ ID NO: 1989166
uaacauaaggaaggauuac

SEQ ID NO: 1989168 - RNA, 19 nt, Artificial Sequence
  Description of Artificial Sequence: Synthetic oligonucleotide
  Sense strand starting at position 2818 of SEQ ID NO: 1880726
uguuucccgauguaaauga

SEQ ID NO: 1989169 - RNA, 19 nt, Artificial Sequence
  Description of Artificial Sequence: Synthetic oligonucleotide
  Antisense strand to SEQ ID NO: 1989168
ucauuuacaucgggaaaca

SEQ ID NO: 1989170 - RNA, 19 nt, Artificial Sequence
  Description of Artificial Sequence: Synthetic oligonucleotide
  Sense strand starting at position 3022 of SEQ ID NO: 1880726
auacuaucgcugcaguaaa

SEQ ID NO: 1989171 - RNA, 19 nt, Artificial Sequence
  Description of Artificial Sequence: Synthetic oligonucleotide
  Antisense strand to SEQ ID NO: 1989170
uuuacugcagcgauaguau

SEQ ID NO: 1989172 - RNA, 19 nt, Artificial Sequence
  Description of Artificial Sequence: Synthetic oligonucleotide
  Sense strand starting at position 3093 of SEQ ID NO: 1880726
cucaucugccaugauaaug

SEQ ID NO: 1989173 - RNA, 19 nt, Artificial Sequence
  Description of Artificial Sequence: Synthetic oligonucleotide
  Antisense strand to SEQ ID NO: 1989172
cauuaucauggcagaugag

SEQ ID NO: 1989174 - RNA, 19 nt, Artificial Sequence
  Description of Artificial Sequence: Synthetic oligonucleotide
  Sense strand starting at position 3263 of SEQ ID NO: 1880726
agauauccugcuggugacu

SEQ ID NO: 1989175 - RNA, 19 nt, Artificial Sequence
  Description of Artificial Sequence: Synthetic oligonucleotide
  Antisense strand to SEQ ID NO: 1989174
agucaccagcaggauaucu

SEQ ID NO: 1989176 - RNA, 19 nt, Artificial Sequence
  Description of Artificial Sequence: Synthetic oligonucleotide
  Sense strand starting at position 3332 of SEQ ID NO: 1880726
acuggaaagccucaccuau

SEQ ID NO: 1989177 - RNA, 19 nt, Artificial Sequence
  Description of Artificial Sequence: Synthetic oligonucleotide
  Antisense strand to SEQ ID NO: 1989176
auaggugaggcuuuccagu

SEQ ID NO: 1989178 - RNA, 19 nt, Artificial Sequence
  Description of Artificial Sequence: Synthetic oligonucleotide
  Sense strand starting at position 3420 of SEQ ID NO: 1880726
aacuuauucugggcacagu

SEQ ID NO: 1989179 - RNA, 19 nt, Artificial Sequence
  Description of Artificial Sequence: Synthetic oligonucleotide
  Antisense strand to SEQ ID NO: 1989178
acugugcccagaauaaguu

SEQ ID NO: 1989180 - RNA, 19 nt, Artificial Sequence
  Description of Artificial Sequence: Synthetic oligonucleotide
  Sense strand starting at position 3456 of SEQ ID NO: 1880726
cgaguaagaacuugccaga

SEQ ID NO: 1989181 - RNA, 19 nt, Artificial Sequence
  Description of Artificial Sequence: Synthetic oligonucleotide
  Antisense strand to SEQ ID NO: 1989180
ucuggcaaguucuuacucg

SEQ ID NO: 1989182 - RNA, 19 nt, Artificial Sequence
  Description of Artificial Sequence: Synthetic oligonucleotide
  Sense strand starting at position 3497 of SEQ ID NO: 1880726
ccuuuaaagugauuaagua

SEQ ID NO: 1989183 - RNA, 19 nt, Artificial Sequence
  Description of Artificial Sequence: Synthetic oligonucleotide
  Antisense strand to SEQ ID NO: 1989182
uacuuaaucacuuuaaagg

SEQ ID NO: 1989184 - RNA, 19 nt, Artificial Sequence
  Description of Artificial Sequence: Synthetic oligonucleotide
  Sense strand starting at position 3550 of SEQ ID NO: 1880726
gguguaucugguggaacua

SEQ ID NO: 1989185 - RNA, 19 nt, Artificial Sequence
  Description of Artificial Sequence: Synthetic oligonucleotide
  Antisense strand to SEQ ID NO: 1989184
uaguuccaccagauacacc

SEQ ID NO: 1989186 - RNA, 19 nt, Artificial Sequence
  Description of Artificial Sequence: Synthetic oligonucleotide
  Sense strand starting at position 3551 of SEQ ID NO: 1880726
guguaucugguggaacuau

SEQ ID NO: 1989187 - RNA, 19 nt, Artificial Sequence
  Description of Artificial Sequence: Synthetic oligonucleotide
  Antisense strand to SEQ ID NO: 1989186
auaguuccaccagauacac

SEQ ID NO: 1989188 - RNA, 19 nt, Artificial Sequence
  Description of Artificial Sequence: Synthetic oligonucleotide
  Sense strand starting at position 3647 of SEQ ID NO: 1880726
aguuaucaagcacaaguau

SEQ ID NO: 1989189 - RNA, 19 nt, Artificial Sequence
  Description of Artificial Sequence: Synthetic oligonucleotide
  Antisense strand to SEQ ID NO: 1989188
auacuugugcuugauaacu

SEQ ID NO: 1989190 - RNA, 19 nt, Artificial Sequence
  Description of Artificial Sequence: Synthetic oligonucleotide
  Sense strand starting at position 3701 of SEQ ID NO: 1880726
aggugccuuucucugagaa

SEQ ID NO: 1989191 - RNA, 19 nt, Artificial Sequence
  Description of Artificial Sequence: Synthetic oligonucleotide
  Antisense strand to SEQ ID NO: 1989190
uucucagagaaaggcaccu

SEQ ID NO: 1989192 - RNA, 19 nt, Artificial Sequence
  Description of Artificial Sequence: Synthetic oligonucleotide
  Sense strand starting at position 3790 of SEQ ID NO: 1880726
cucaguugucaagaguggu

SEQ ID NO: 1989193 - RNA, 19 nt, Artificial Sequence
  Description of Artificial Sequence: Synthetic oligonucleotide
  Antisense strand to SEQ ID NO: 1989192
accacucuugacaacugag

SEQ ID NO: 1989194 - RNA, 19 nt, Artificial Sequence
  Description of Artificial Sequence: Synthetic oligonucleotide
  Sense strand starting at position 3858 of SEQ ID NO: 1880726
uuucuauggcuguacucua

SEQ ID NO: 1989195 - RNA, 19 nt, Artificial Sequence
  Description of Artificial Sequence: Synthetic oligonucleotide
  Antisense strand to SEQ ID NO: 1989194
uagaguacagccauagaaa

SEQ ID NO: 1989196 - RNA, 19 nt, Artificial Sequence
  Description of Artificial Sequence: Synthetic oligonucleotide
  Sense strand starting at position 3869 of SEQ ID NO: 1880726
guacucuaaggucaugaua

SEQ ID NO: 1989197 - RNA, 19 nt, Artificial Sequence
  Description of Artificial Sequence: Synthetic oligonucleotide
  Antisense strand to SEQ ID NO: 1989196
uaucaugaccuuagaguac

SEQ ID NO: 1989198 - RNA, 19 nt, Artificial Sequence
  Description of Artificial Sequence: Synthetic oligonucleotide
  Sense strand starting at position 3897 of SEQ ID NO: 1880726
cugugcaauccagaaugcu

SEQ ID NO: 1989199 - RNA, 19 nt, Artificial Sequence
  Description of Artificial Sequence: Synthetic oligonucleotide
  Antisense strand to SEQ ID NO: 1989198
agcauucuggauugcacag

SEQ ID NO: 1989200 - RNA, 19 nt, Artificial Sequence
  Description of Artificial Sequence: Synthetic oligonucleotide
  Sense strand starting at position 3900 of SEQ ID NO: 1880726
ugcaauccagaaugcuaaa

SEQ ID NO: 1989201 - RNA, 19 nt, Artificial Sequence
  Description of Artificial Sequence: Synthetic oligonucleotide
  Antisense strand to SEQ ID NO: 1989200
uuuagcauucuggauugca

SEQ ID NO: 1989202 - RNA, 19 nt, Artificial Sequence
  Description of Artificial Sequence: Synthetic oligonucleotide
  Sense strand starting at position 3925 of SEQ ID NO: 1880726
uuggauacacucugcaaua

SEQ ID NO: 1989203 - RNA, 19 nt, Artificial Sequence
  Description of Artificial Sequence: Synthetic oligonucleotide
  Antisense strand to SEQ ID NO: 1989202
uauugcagaguguauccaa

SEQ ID NO: 1989204 - RNA, 19 nt, Artificial Sequence
  Description of Artificial Sequence: Synthetic oligonucleotide
  Sense strand starting at position 3927 of SEQ ID NO: 1880726
ggauacacucugcaauagu

SEQ ID NO: 1989205 - RNA, 19 nt, Artificial Sequence
  Description of Artificial Sequence: Synthetic oligonucleotide
  Antisense strand to SEQ ID NO: 1989204
acuauugcagaguguaucc

SEQ ID NO: 1989206 - RNA, 19 nt, Artificial Sequence
  Description of Artificial Sequence: Synthetic oligonucleotide
  Sense strand starting at position 74 of SEQ ID NO: 1880727
acguaugacccauaaccau

SEQ ID NO: 1989207 - RNA, 19 nt, Artificial Sequence
  Description of Artificial Sequence: Synthetic oligonucleotide
  Antisense strand to SEQ ID NO: 1989206
augguuaugggucauacgu

SEQ ID NO: 1989208 - RNA, 19 nt, Artificial Sequence
  Description of Artificial Sequence: Synthetic oligonucleotide
  Sense strand starting at position 135 of SEQ ID NO: 1880727
gucagaacauaugcaaaca

SEQ ID NO: 1989209 - RNA, 19 nt, Artificial Sequence
  Description of Artificial Sequence: Synthetic oligonucleotide
  Antisense strand to SEQ ID NO: 1989208
uguuugcauauguucugac

SEQ ID NO: 1989210 - RNA, 19 nt, Artificial Sequence
  Description of Artificial Sequence: Synthetic oligonucleotide
  Sense strand starting at position 316 of SEQ ID NO: 1880727
agagguuccuuccucgaca

SEQ ID NO: 1989211 - RNA, 19 nt, Artificial Sequence
  Description of Artificial Sequence: Synthetic oligonucleotide
  Antisense strand to SEQ ID NO: 1989210
ugucgaggaaggaaccucu

SEQ ID NO: 1989212 - RNA, 19 nt, Artificial Sequence
  Description of Artificial Sequence: Synthetic oligonucleotide
  Sense strand starting at position 317 of SEQ ID NO: 1880727
gagguuccuuccucgacau

SEQ ID NO: 1989213 - RNA, 19 nt, Artificial Sequence
  Description of Artificial Sequence: Synthetic oligonucleotide
  Antisense strand to SEQ ID NO: 1989212
augucgaggaaggaaccuc

SEQ ID NO: 1989214 - RNA, 19 nt, Artificial Sequence
  Description of Artificial Sequence: Synthetic oligonucleotide
  Sense strand starting at position 319 of SEQ ID NO: 1880727
gguuccuuccucgacauca

SEQ ID NO: 1989215 - RNA, 19 nt, Artificial Sequence
  Description of Artificial Sequence: Synthetic oligonucleotide
  Antisense strand to SEQ ID NO: 1989214
ugaugucgaggaaggaacc

SEQ ID NO: 1989216 - RNA, 19 nt, Artificial Sequence
  Description of Artificial Sequence: Synthetic oligonucleotide
  Sense strand starting at position 980 of SEQ ID NO: 1880727
ggaaucacuuuggucugaa

SEQ ID NO: 1989217 - RNA, 19 nt, Artificial Sequence
  Description of Artificial Sequence: Synthetic oligonucleotide
  Antisense strand to SEQ ID NO: 1989216
uucagaccaaagugauucc

SEQ ID NO: 1989218 - RNA, 19 nt, Artificial Sequence
  Description of Artificial Sequence: Synthetic oligonucleotide
  Sense strand starting at position 981 of SEQ ID NO: 1880727
gaaucacuuuggucugaac

SEQ ID NO: 1989219 - RNA, 19 nt, Artificial Sequence
  Description of Artificial Sequence: Synthetic oligonucleotide
  Antisense strand to SEQ ID NO: 1989218
guucagaccaaagugauuc

SEQ ID NO: 1989220 - RNA, 19 nt, Artificial Sequence
  Description of Artificial Sequence: Synthetic oligonucleotide
  Sense strand starting at position 993 of SEQ ID NO: 1880727
ucugaacaccagugauucu

SEQ ID NO: 1989221 - RNA, 19 nt, Artificial Sequence
  Description of Artificial Sequence: Synthetic oligonucleotide
  Antisense strand to SEQ ID NO: 1989220
agaaucacugguguucaga

SEQ ID NO: 1989222 - RNA, 19 nt, Artificial Sequence
  Description of Artificial Sequence: Synthetic oligonucleotide
  Sense strand starting at position 1153 of SEQ ID NO: 1880727
cgguagugugcgcugcaau

SEQ ID NO: 1989223 - RNA, 19 nt, Artificial Sequence
  Description of Artificial Sequence: Synthetic oligonucleotide
  Antisense strand to SEQ ID NO: 1989222
auugcagcgcacacuaccg

SEQ ID NO: 1989224 - RNA, 19 nt, Artificial Sequence
  Description of Artificial Sequence: Synthetic oligonucleotide
  Sense strand starting at position 1301 of SEQ ID NO: 1880727
gccacacuuggagaacgau

SEQ ID NO: 1989225 - RNA, 19 nt, Artificial Sequence
  Description of Artificial Sequence: Synthetic oligonucleotide
  Antisense strand to SEQ ID NO: 1989224
aucguucuccaaguguggc

SEQ ID NO: 1989226 - RNA, 19 nt, Artificial Sequence
  Description of Artificial Sequence: Synthetic oligonucleotide
  Sense strand starting at position 1318 of SEQ ID NO: 1880727
auggauuucugucaauagc

SEQ ID NO: 1989227 - RNA, 19 nt, Artificial Sequence
  Description of Artificial Sequence: Synthetic oligonucleotide
  Antisense strand to SEQ ID NO: 1989226
gcuauugacagaaauccau

SEQ ID NO: 1989228 - RNA, 19 nt, Artificial Sequence
  Description of Artificial Sequence: Synthetic oligonucleotide
  Sense strand starting at position 1355 of SEQ ID NO: 1880727
ucguuuguugcuguuugaa

SEQ ID NO: 1989229 - RNA, 19 nt, Artificial Sequence
  Description of Artificial Sequence: Synthetic oligonucleotide
  Antisense strand to SEQ ID NO: 1989228
uucaaacagcaacaaacga

SEQ ID NO: 1989230 - RNA, 19 nt, Artificial Sequence
  Description of Artificial Sequence: Synthetic oligonucleotide
  Sense strand starting at position 1358 of SEQ ID NO: 1880727
uuuguugcuguuugaaaug

SEQ ID NO: 1989231 - RNA, 19 nt, Artificial Sequence
  Description of Artificial Sequence: Synthetic oligonucleotide
  Antisense strand to SEQ ID NO: 1989230
cauuucaaacagcaacaaa

SEQ ID NO: 1989232 - RNA, 19 nt, Artificial Sequence
  Description of Artificial Sequence: Synthetic oligonucleotide
  Sense strand starting at position 1363 of SEQ ID NO: 1880727
ugcuguuugaaauguauug

SEQ ID NO: 1989233 - RNA, 19 nt, Artificial Sequence
  Description of Artificial Sequence: Synthetic oligonucleotide
  Antisense strand to SEQ ID NO: 1989232
caauacauuucaaacagca

SEQ ID NO: 1989234 - RNA, 19 nt, Artificial Sequence
  Description of Artificial Sequence: Synthetic oligonucleotide
  Sense strand starting at position 1375 of SEQ ID NO: 1880727
uguauugguuugguucuga

SEQ ID NO: 1989235 - RNA, 19 nt, Artificial Sequence
  Description of Artificial Sequence: Synthetic oligonucleotide
  Antisense strand to SEQ ID NO: 1989234
ucagaaccaaaccaauaca

SEQ ID NO: 1989236 - RNA, 19 nt, Artificial Sequence
  Description of Artificial Sequence: Synthetic oligonucleotide
  Sense strand starting at position 1448 of SEQ ID NO: 1880727
agucuuauacguuguugac

SEQ ID NO: 1989237 - RNA, 19 nt, Artificial Sequence
  Description of Artificial Sequence: Synthetic oligonucleotide
  Antisense strand to SEQ ID NO: 1989236
gucaacaacguauaagacu

SEQ ID NO: 1989238 - RNA, 19 nt, Artificial Sequence
  Description of Artificial Sequence: Synthetic oligonucleotide
  Sense strand starting at position 1450 of SEQ ID NO: 1880727
ucuuauacguuguugacau

SEQ ID NO: 1989239 - RNA, 19 nt, Artificial Sequence
  Description of Artificial Sequence: Synthetic oligonucleotide
  Antisense strand to SEQ ID NO: 1989238
augucaacaacguauaaga

SEQ ID NO: 1989240 - RNA, 19 nt, Artificial Sequence
  Description of Artificial Sequence: Synthetic oligonucleotide
  Sense strand starting at position 1870 of SEQ ID NO: 1880727
ggaagaagguucguucaaa

SEQ ID NO: 1989241 - RNA, 19 nt, Artificial Sequence
  Description of Artificial Sequence: Synthetic oligonucleotide
  Antisense strand to SEQ ID NO: 1989240
uuugaacgaaccuucuucc

SEQ ID NO: 1989242 - RNA, 19 nt, Artificial Sequence
  Description of Artificial Sequence: Synthetic oligonucleotide
  Sense strand starting at position 1910 of SEQ ID NO: 1880727
ucuggaauccugugaaaug

SEQ ID NO: 1989243 - RNA, 19 nt, Artificial Sequence
  Description of Artificial Sequence: Synthetic oligonucleotide
  Antisense strand to SEQ ID NO: 1989242
cauuucacaggauuccaga

SEQ ID NO: 1989244 - RNA, 19 nt, Artificial Sequence
  Description of Artificial Sequence: Synthetic oligonucleotide
  Sense strand starting at position 1950 of SEQ ID NO: 1880727
accucaucacagggagagu

SEQ ID NO: 1989245 - RNA, 19 nt, Artificial Sequence
  Description of Artificial Sequence: Synthetic oligonucleotide
  Antisense strand to SEQ ID NO: 1989244
acucucccugugaugaggu

SEQ ID NO: 1989246 - RNA, 19 nt, Artificial Sequence
  Description of Artificial Sequence: Synthetic oligonucleotide
  Sense strand starting at position 2026 of SEQ ID NO: 1880727
ccacuucuuacggagaguu

SEQ ID NO: 1989247 - RNA, 19 nt, Artificial Sequence
  Description of Artificial Sequence: Synthetic oligonucleotide
  Antisense strand to SEQ ID NO: 1989246
aacucuccguaagaagugg

SEQ ID NO: 1989248 - RNA, 19 nt, Artificial Sequence
  Description of Artificial Sequence: Synthetic oligonucleotide
  Sense strand starting at position 2064 of SEQ ID NO: 1880727
ccaugucugccagaggcau

SEQ ID NO: 1989249 - RNA, 19 nt, Artificial Sequence
  Description of Artificial Sequence: Synthetic oligonucleotide
  Antisense strand to SEQ ID NO: 1989248
augccucuggcagacaugg

SEQ ID NO: 1989250 - RNA, 19 nt, Artificial Sequence
  Description of Artificial Sequence: Synthetic oligonucleotide
  Sense strand starting at position 2399 of SEQ ID NO: 1880727
ccuggucuuuggcuacaaa

SEQ ID NO: 1989251 - RNA, 19 nt, Artificial Sequence
  Description of Artificial Sequence: Synthetic oligonucleotide
  Antisense strand to SEQ ID NO: 1989250
uuuguagccaaagaccagg

SEQ ID NO: 1989252 - RNA, 19 nt, Artificial Sequence
  Description of Artificial Sequence: Synthetic oligonucleotide
  Sense strand starting at position 2400 of SEQ ID NO: 1880727
cuggucuuuggcuacaaau

SEQ ID NO: 1989253 - RNA, 19 nt, Artificial Sequence
  Description of Artificial Sequence: Synthetic oligonucleotide
  Antisense strand to SEQ ID NO: 1989252
auuuguagccaaagaccag

SEQ ID NO: 1989254 - RNA, 19 nt, Artificial Sequence
  Description of Artificial Sequence: Synthetic oligonucleotide
  Sense strand starting at position 2505 of SEQ ID NO: 1880727
cacugugauuccgcuuaau

SEQ ID NO: 1989255 - RNA, 19 nt, Artificial Sequence
  Description of Artificial Sequence: Synthetic oligonucleotide
  Antisense strand to SEQ ID NO: 1989254
auuaagcggaaucacagug

SEQ ID NO: 1989256 - RNA, 19 nt, Artificial Sequence
  Description of Artificial Sequence: Synthetic oligonucleotide
  Sense strand starting at position 2508 of SEQ ID NO: 1880727
ugugauuccgcuuaauccu

SEQ ID NO: 1989257 - RNA, 19 nt, Artificial Sequence
  Description of Artificial Sequence: Synthetic oligonucleotide
  Antisense strand to SEQ ID NO: 1989256
aggauuaagcggaaucaca

SEQ ID NO: 1989258 - RNA, 19 nt, Artificial Sequence
  Description of Artificial Sequence: Synthetic oligonucleotide
  Sense strand starting at position 2515 of SEQ ID NO: 1880727
ccgcuuaauccugcugucu

SEQ ID NO: 1989259 - RNA, 19 nt, Artificial Sequence
  Description of Artificial Sequence: Synthetic oligonucleotide
  Antisense strand to SEQ ID NO: 1989258
agacagcaggauuaagcgg

SEQ ID NO: 1989260 - RNA, 19 nt, Artificial Sequence
  Description of Artificial Sequence: Synthetic oligonucleotide
  Sense strand starting at position 2516 of SEQ ID NO: 1880727
cgcuuaauccugcugucuu

SEQ ID NO: 1989261 - RNA, 19 nt, Artificial Sequence
  Description of Artificial Sequence: Synthetic oligonucleotide
  Antisense strand to SEQ ID NO: 1989260
aagacagcaggauuaagcg

SEQ ID NO: 1989262 - RNA, 19 nt, Artificial Sequence
  Description of Artificial Sequence: Synthetic oligonucleotide
  Sense strand starting at position 2523 of SEQ ID NO: 1880727
uccugcugucuuugacauu

SEQ ID NO: 1989263 - RNA, 19 nt, Artificial Sequence
  Description of Artificial Sequence: Synthetic oligonucleotide
  Antisense strand to SEQ ID NO: 1989262
aaugucaaagacagcagga

SEQ ID NO: 1989264 - RNA, 19 nt, Artificial Sequence
  Description of Artificial Sequence: Synthetic oligonucleotide
  Sense strand starting at position 2562 of SEQ ID NO: 1880727
ggacaaaucuuagucucau

SEQ ID NO: 1989265 - RNA, 19 nt, Artificial Sequence
  Description of Artificial Sequence: Synthetic oligonucleotide
  Antisense strand to SEQ ID NO: 1989264
augagacuaagauuugucc

SEQ ID NO: 1989266 - RNA, 19 nt, Artificial Sequence
  Description of Artificial Sequence: Synthetic oligonucleotide
  Sense strand starting at position 2577 of SEQ ID NO: 1880727
ucauaagaaugugccugau

SEQ ID NO: 1989267 - RNA, 19 nt, Artificial Sequence
  Description of Artificial Sequence: Synthetic oligonucleotide
  Antisense strand to SEQ ID NO: 1989266
aucaggcacauucuuauga

SEQ ID NO: 1989268 - RNA, 19 nt, Artificial Sequence
  Description of Artificial Sequence: Synthetic oligonucleotide
  Sense strand starting at position 2653 of SEQ ID NO: 1880727
ccugguguuccauaaacac

SEQ ID NO: 1989269 - RNA, 19 nt, Artificial Sequence
  Description of Artificial Sequence: Synthetic oligonucleotide
  Antisense strand to SEQ ID NO: 1989268
guguuuauggaacaccagg

SEQ ID NO: 1989270 - RNA, 19 nt, Artificial Sequence
  Description of Artificial Sequence: Synthetic oligonucleotide
  Sense strand starting at position 3387 of SEQ ID NO: 1880727
agcucauggcgggaaauga

SEQ ID NO: 1989271 - RNA, 19 nt, Artificial Sequence
  Description of Artificial Sequence: Synthetic oligonucleotide
  Antisense strand to SEQ ID NO: 1989270
ucauuucccgccaugagcu

SEQ ID NO: 1989272 - RNA, 19 nt, Artificial Sequence
  Description of Artificial Sequence: Synthetic oligonucleotide
  Sense strand starting at position 3395 of SEQ ID NO: 1880727
gcgggaaaugauuaccuuu

SEQ ID NO: 1989273 - RNA, 19 nt, Artificial Sequence
  Description of Artificial Sequence: Synthetic oligonucleotide
  Antisense strand to SEQ ID NO: 1989272
aaagguaaucauuucccgc

SEQ ID NO: 1989274 - RNA, 19 nt, Artificial Sequence
  Description of Artificial Sequence: Synthetic oligonucleotide
  Sense strand starting at position 3450 of SEQ ID NO: 1880727
ggugcacuuuccuccacau

SEQ ID NO: 1989275 - RNA, 19 nt, Artificial Sequence
  Description of Artificial Sequence: Synthetic oligonucleotide
  Antisense strand to SEQ ID NO: 1989274
auguggaggaaagugcacc

SEQ ID NO: 1989276 - RNA, 19 nt, Artificial Sequence
  Description of Artificial Sequence: Synthetic oligonucleotide
  Sense strand starting at position 3461 of SEQ ID NO: 1880727
cuccacaucuguuugaaag

SEQ ID NO: 1989277 - RNA, 19 nt, Artificial Sequence
  Description of Artificial Sequence: Synthetic oligonucleotide
  Antisense strand to SEQ ID NO: 1989276
cuuucaaacagauguggag

SEQ ID NO: 1989278 - RNA, 19 nt, Artificial Sequence
  Description of Artificial Sequence: Synthetic oligonucleotide
  Sense strand starting at position 3462 of SEQ ID NO: 1880727
uccacaucuguuugaaagu

SEQ ID NO: 1989279 - RNA, 19 nt, Artificial Sequence
  Description of Artificial Sequence: Synthetic oligonucleotide
  Antisense strand to SEQ ID NO: 1989278
acuuucaaacagaugugga

SEQ ID NO: 1989280 - RNA, 19 nt, Artificial Sequence
  Description of Artificial Sequence: Synthetic oligonucleotide
  Sense strand starting at position 3543 of SEQ ID NO: 1880727
caggucuuccaaggaaaca

SEQ ID NO: 1989281 - RNA, 19 nt, Artificial Sequence
  Description of Artificial Sequence: Synthetic oligonucleotide
  Antisense strand to SEQ ID NO: 1989280
uguuuccuuggaagaccug

SEQ ID NO: 1989282 - RNA, 19 nt, Artificial Sequence
  Description of Artificial Sequence: Synthetic oligonucleotide
  Sense strand starting at position 3735 of SEQ ID NO: 1880727
auaguaacuuuggaggaaa

SEQ ID NO: 1989283 - RNA, 19 nt, Artificial Sequence
  Description of Artificial Sequence: Synthetic oligonucleotide
  Antisense strand to SEQ ID NO: 1989282
uuuccuccaaaguuacuau

SEQ ID NO: 1989284 - RNA, 19 nt, Artificial Sequence
  Description of Artificial Sequence: Synthetic oligonucleotide
  Sense strand starting at position 3947 of SEQ ID NO: 1880727
gagacagaauuccaugguu

SEQ ID NO: 1989285 - RNA, 19 nt, Artificial Sequence
  Description of Artificial Sequence: Synthetic oligonucleotide
  Antisense strand to SEQ ID NO: 1989284
aaccauggaauucugucuc

SEQ ID NO: 1989286 - RNA, 19 nt, Artificial Sequence
  Description of Artificial Sequence: Synthetic oligonucleotide
  Sense strand starting at position 8 of SEQ ID NO: 1880728
gaucuucugggugaggcaa

SEQ ID NO: 1989287 - RNA, 19 nt, Artificial Sequence
  Description of Artificial Sequence: Synthetic oligonucleotide
  Antisense strand to SEQ ID NO: 1989286
uugccucacccagaagauc

SEQ ID NO: 1989288 - RNA, 19 nt, Artificial Sequence
  Description of Artificial Sequence: Synthetic oligonucleotide
  Sense strand starting at position 179 of SEQ ID NO: 1880728
caguuauucugaccauagg

SEQ ID NO: 1989289 - RNA, 19 nt, Artificial Sequence
  Description of Artificial Sequence: Synthetic oligonucleotide
  Antisense strand to SEQ ID NO: 1989288
ccuauggucagaauaacug

SEQ ID NO: 1989290 - RNA, 19 nt, Artificial Sequence
  Description of Artificial Sequence: Synthetic oligonucleotide
  Sense strand starting at position 193 of SEQ ID NO: 1880728
auaggaggcucauuccaga

SEQ ID NO: 1989291 - RNA, 19 nt, Artificial Sequence
  Description of Artificial Sequence: Synthetic oligonucleotide
  Antisense strand to SEQ ID NO: 1989290
ucuggaaugagccuccuau

SEQ ID NO: 1989292 - RNA, 19 nt, Artificial Sequence
  Description of Artificial Sequence: Synthetic oligonucleotide
  Sense strand starting at position 409 of SEQ ID NO: 1880728
caaagagaguaaguccuau

SEQ ID NO: 1989293 - RNA, 19 nt, Artificial Sequence
  Description of Artificial Sequence: Synthetic oligonucleotide
  Antisense strand to SEQ ID NO: 1989292
auaggacuuacucucuuug

SEQ ID NO: 1989294 - RNA, 19 nt, Artificial Sequence
  Description of Artificial Sequence: Synthetic oligonucleotide
  Sense strand starting at position 463 of SEQ ID NO: 1880728
ugcauuaagggucaugagu

SEQ ID NO: 1989295 - RNA, 19 nt, Artificial Sequence
  Description of Artificial Sequence: Synthetic oligonucleotide
  Antisense strand to SEQ ID NO: 1989294
acucaugacccuuaaugca

SEQ ID NO: 1989296 - RNA, 19 nt, Artificial Sequence
  Description of Artificial Sequence: Synthetic oligonucleotide
  Sense strand starting at position 471 of SEQ ID NO: 1880728
gggucaugaguuuggaaau

SEQ ID NO: 1989297 - RNA, 19 nt, Artificial Sequence
  Description of Artificial Sequence: Synthetic oligonucleotide
  Antisense strand to SEQ ID NO: 1989296
auuuccaaacucaugaccc

SEQ ID NO: 1989298 - RNA, 19 nt, Artificial Sequence
  Description of Artificial Sequence: Synthetic oligonucleotide
  Sense strand starting at position 497 of SEQ ID NO: 1880728
ggugguguugcauucugca

SEQ ID NO: 1989299 - RNA, 19 nt, Artificial Sequence
  Description of Artificial Sequence: Synthetic oligonucleotide
  Antisense strand to SEQ ID NO: 1989298
ugcagaaugcaacaccacc

SEQ ID NO: 1989300 - RNA, 19 nt, Artificial Sequence
  Description of Artificial Sequence: Synthetic oligonucleotide
  Sense strand starting at position 595 of SEQ ID NO: 1880728
ggcaacucagaaugugaau

SEQ ID NO: 1989301 - RNA, 19 nt, Artificial Sequence
  Description of Artificial Sequence: Synthetic oligonucleotide
  Antisense strand to SEQ ID NO: 1989300
auucacauucugaguugcc

SEQ ID NO: 1989302 - RNA, 19 nt, Artificial Sequence
  Description of Artificial Sequence: Synthetic oligonucleotide
  Sense strand starting at position 728 of SEQ ID NO: 1880728
gcaugcugaguucugcauu

SEQ ID NO: 1989303 - RNA, 19 nt, Artificial Sequence
  Description of Artificial Sequence: Synthetic oligonucleotide
  Antisense strand to SEQ ID NO: 1989302
aaugcagaacucagcaugc

SEQ ID NO: 1989304 - RNA, 19 nt, Artificial Sequence
  Description of Artificial Sequence: Synthetic oligonucleotide
  Sense strand starting at position 814 of SEQ ID NO: 1880728
uccucacaaucuuuggaga

SEQ ID NO: 1989305 - RNA, 19 nt, Artificial Sequence
  Description of Artificial Sequence: Synthetic oligonucleotide
  Antisense strand to SEQ ID NO: 1989304
ucuccaaagauugugagga

SEQ ID NO: 1989306 - RNA, 19 nt, Artificial Sequence
  Description of Artificial Sequence: Synthetic oligonucleotide
  Sense strand starting at position 815 of SEQ ID NO: 1880728
ccucacaaucuuuggagau

SEQ ID NO: 1989307 - RNA, 19 nt, Artificial Sequence
  Description of Artificial Sequence: Synthetic oligonucleotide
  Antisense strand to SEQ ID NO: 1989306
aucuccaaagauugugagg

SEQ ID NO: 1989308 - RNA, 19 nt, Artificial Sequence
  Description of Artificial Sequence: Synthetic oligonucleotide
  Sense strand starting at position 825 of SEQ ID NO: 1880728
uuuggagauagauaucguu

SEQ ID NO: 1989309 - RNA, 19 nt, Artificial Sequence
  Description of Artificial Sequence: Synthetic oligonucleotide
  Antisense strand to SEQ ID NO: 1989308
aacgauaucuaucuccaaa

SEQ ID NO: 1989310 - RNA, 19 nt, Artificial Sequence
  Description of Artificial Sequence: Synthetic oligonucleotide
  Sense strand starting at position 840 of SEQ ID NO: 1880728
cguuguccuuauuuaauag

SEQ ID NO: 1989311 - RNA, 19 nt, Artificial Sequence
  Description of Artificial Sequence: Synthetic oligonucleotide
  Antisense strand to SEQ ID NO: 1989310
cuauuaaauaaggacaacg

SEQ ID NO: 1989312 - RNA, 19 nt, Artificial Sequence
  Description of Artificial Sequence: Synthetic oligonucleotide
  Sense strand starting at position 858 of SEQ ID NO: 1880728
gaugaagacuguuuguaaa

SEQ ID NO: 1989313 - RNA, 19 nt, Artificial Sequence
  Description of Artificial Sequence: Synthetic oligonucleotide
  Antisense strand to SEQ ID NO: 1989312
uuuacaaacagucuucauc

SEQ ID NO: 1989314 - RNA, 19 nt, Artificial Sequence
  Description of Artificial Sequence: Synthetic oligonucleotide
  Sense strand starting at position 1369 of SEQ ID NO: 1880728
ggcccuugugaaugagaaa

SEQ ID NO: 1989315 - RNA, 19 nt, Artificial Sequence
  Description of Artificial Sequence: Synthetic oligonucleotide
  Antisense strand to SEQ ID NO: 1989314
uuucucauucacaagggcc

SEQ ID NO: 1989316 - RNA, 19 nt, Artificial Sequence
  Description of Artificial Sequence: Synthetic oligonucleotide
  Sense strand starting at position 1370 of SEQ ID NO: 1880728
gcccuugugaaugagaaau

SEQ ID NO: 1989317 - RNA, 19 nt, Artificial Sequence
  Description of Artificial Sequence: Synthetic oligonucleotide
  Antisense strand to SEQ ID NO: 1989316
auuucucauucacaagggc

SEQ ID NO: 1989318 - RNA, 19 nt, Artificial Sequence
  Description of Artificial Sequence: Synthetic oligonucleotide
  Sense strand starting at position 1376 of SEQ ID NO: 1880728
gugaaugagaaaugucaug

SEQ ID NO: 1989319 - RNA, 19 nt, Artificial Sequence
  Description of Artificial Sequence: Synthetic oligonucleotide
  Antisense strand to SEQ ID NO: 1989318
caugacauuucucauucac

SEQ ID NO: 1989320 - RNA, 19 nt, Artificial Sequence
  Description of Artificial Sequence: Synthetic oligonucleotide
  Sense strand starting at position 1394 of SEQ ID NO: 1880728
guuauuauuggucaugaac

SEQ ID NO: 1989321 - RNA, 19 nt, Artificial Sequence
  Description of Artificial Sequence: Synthetic oligonucleotide
  Antisense strand to SEQ ID NO: 1989320
guucaugaccaauaauaac

SEQ ID NO: 1989322 - RNA, 19 nt, Artificial Sequence
  Description of Artificial Sequence: Synthetic oligonucleotide
  Sense strand starting at position 1430 of SEQ ID NO: 1880728
uguaaucuccuagaaugug

SEQ ID NO: 1989323 - RNA, 19 nt, Artificial Sequence
  Description of Artificial Sequence: Synthetic oligonucleotide
  Antisense strand to SEQ ID NO: 1989322
cacauucuaggagauuaca

SEQ ID NO: 1989324 - RNA, 19 nt, Artificial Sequence
  Description of Artificial Sequence: Synthetic oligonucleotide
  Sense strand starting at position 1512 of SEQ ID NO: 1880728
gauccagaaugguugagua

SEQ ID NO: 1989325 - RNA, 19 nt, Artificial Sequence
  Description of Artificial Sequence: Synthetic oligonucleotide
  Antisense strand to SEQ ID NO: 1989324
uacucaaccauucuggauc

SEQ ID NO: 1989326 - RNA, 19 nt, Artificial Sequence
  Description of Artificial Sequence: Synthetic oligonucleotide
  Sense strand starting at position 1524 of SEQ ID NO: 1880728
uugaguaauuucccgaguu

SEQ ID NO: 1989327 - RNA, 19 nt, Artificial Sequence
  Description of Artificial Sequence: Synthetic oligonucleotide
  Antisense strand to SEQ ID NO: 1989326
aacucgggaaauuacucaa

SEQ ID NO: 1989328 - RNA, 19 nt, Artificial Sequence
  Description of Artificial Sequence: Synthetic oligonucleotide
  Sense strand starting at position 1548 of SEQ ID NO: 1880728
ugaguuaugguagaguuag

SEQ ID NO: 1989329 - RNA, 19 nt, Artificial Sequence
  Description of Artificial Sequence: Synthetic oligonucleotide
  Antisense strand to SEQ ID NO: 1989328
cuaacucuaccauaacuca

SEQ ID NO: 1989330 - RNA, 19 nt, Artificial Sequence
  Description of Artificial Sequence: Synthetic oligonucleotide
  Sense strand starting at position 1664 of SEQ ID NO: 1880728
cacuauaaugugugagaua

SEQ ID NO: 1989331 - RNA, 19 nt, Artificial Sequence
  Description of Artificial Sequence: Synthetic oligonucleotide
  Antisense strand to SEQ ID NO: 1989330
uaucucacacauuauagug

SEQ ID NO: 1989332 - RNA, 19 nt, Artificial Sequence
  Description of Artificial Sequence: Synthetic oligonucleotide
  Sense strand starting at position 1747 of SEQ ID NO: 1880728
guuauaucuugauuagaac

SEQ ID NO: 1989333 - RNA, 19 nt, Artificial Sequence
  Description of Artificial Sequence: Synthetic oligonucleotide
  Antisense strand to SEQ ID NO: 1989332
guucuaaucaagauauaac

SEQ ID NO: 1989334 - RNA, 19 nt, Artificial Sequence
  Description of Artificial Sequence: Synthetic oligonucleotide
  Sense strand starting at position 1771 of SEQ ID NO: 1880728
ggaagaguagaaugcuaau

SEQ ID NO: 1989335 - RNA, 19 nt, Artificial Sequence
  Description of Artificial Sequence: Synthetic oligonucleotide
  Antisense strand to SEQ ID NO: 1989334
auuagcauucuacucuucc

SEQ ID NO: 1989336 - RNA, 19 nt, Artificial Sequence
  Description of Artificial Sequence: Synthetic oligonucleotide
  Sense strand starting at position 1857 of SEQ ID NO: 1880728
uccacagugugacuaagaa

SEQ ID NO: 1989337 - RNA, 19 nt, Artificial Sequence
  Description of Artificial Sequence: Synthetic oligonucleotide
  Antisense strand to SEQ ID NO: 1989336
uucuuagucacacugugga

SEQ ID NO: 1989338 - RNA, 19 nt, Artificial Sequence
  Description of Artificial Sequence: Synthetic oligonucleotide
  Sense strand starting at position 2024 of SEQ ID NO: 1880728
agggauacauucuugguga

SEQ ID NO: 1989339 - RNA, 19 nt, Artificial Sequence
  Description of Artificial Sequence: Synthetic oligonucleotide
  Antisense strand to SEQ ID NO: 1989338
ucaccaagaauguaucccu

SEQ ID NO: 1989340 - RNA, 19 nt, Artificial Sequence
  Description of Artificial Sequence: Synthetic oligonucleotide
  Sense strand starting at position 2026 of SEQ ID NO: 1880728
ggauacauucuuggugaca

SEQ ID NO: 1989341 - RNA, 19 nt, Artificial Sequence
  Description of Artificial Sequence: Synthetic oligonucleotide
  Antisense strand to SEQ ID NO: 1989340
ugucaccaagaauguaucc

SEQ ID NO: 1989342 - RNA, 19 nt, Artificial Sequence
  Description of Artificial Sequence: Synthetic oligonucleotide
  Sense strand starting at position 2027 of SEQ ID NO: 1880728
gauacauucuuggugacac

SEQ ID NO: 1989343 - RNA, 19 nt, Artificial Sequence
  Description of Artificial Sequence: Synthetic oligonucleotide
  Antisense strand to SEQ ID NO: 1989342
gugucaccaagaauguauc

SEQ ID NO: 1989344 - RNA, 19 nt, Artificial Sequence
  Description of Artificial Sequence: Synthetic oligonucleotide
  Sense strand starting at position 2170 of SEQ ID NO: 1880728
ugacauuuguugcucauua

SEQ ID NO: 1989345 - RNA, 19 nt, Artificial Sequence
  Description of Artificial Sequence: Synthetic oligonucleotide
  Antisense strand to SEQ ID NO: 1989344
uaaugagcaacaaauguca

SEQ ID NO: 1989346 - RNA, 19 nt, Artificial Sequence
  Description of Artificial Sequence: Synthetic oligonucleotide
  Sense strand starting at position 2304 of SEQ ID NO: 1880728
gaauguuuggugcaauaag

SEQ ID NO: 1989347 - RNA, 19 nt, Artificial Sequence
  Description of Artificial Sequence: Synthetic oligonucleotide
  Antisense strand to SEQ ID NO: 1989346
cuuauugcaccaaacauuc

SEQ ID NO: 1989348 - RNA, 19 nt, Artificial Sequence
  Description of Artificial Sequence: Synthetic oligonucleotide
  Sense strand starting at position 2391 of SEQ ID NO: 1880728
cugugaaauguuuaaaguc

SEQ ID NO: 1989349 - RNA, 19 nt, Artificial Sequence
  Description of Artificial Sequence: Synthetic oligonucleotide
  Antisense strand to SEQ ID NO: 1989348
gacuuuaaacauuucacag

SEQ ID NO: 1989350 - RNA, 19 nt, Artificial Sequence
  Description of Artificial Sequence: Synthetic oligonucleotide
  Sense strand starting at position 2694 of SEQ ID NO: 1880728
auggucaugucauugagaa

SEQ ID NO: 1989351 - RNA, 19 nt, Artificial Sequence
  Description of Artificial Sequence: Synthetic oligonucleotide
  Antisense strand to SEQ ID NO: 1989350
uucucaaugacaugaccau

SEQ ID NO: 1989352 - RNA, 19 nt, Artificial Sequence
  Description of Artificial Sequence: Synthetic oligonucleotide
  Sense strand starting at position 2695 of SEQ ID NO: 1880728
uggucaugucauugagaag

SEQ ID NO: 1989353 - RNA, 19 nt, Artificial Sequence
  Description of Artificial Sequence: Synthetic oligonucleotide
  Antisense strand to SEQ ID NO: 1989352
cuucucaaugacaugacca

SEQ ID NO: 1989354 - RNA, 19 nt, Artificial Sequence
  Description of Artificial Sequence: Synthetic oligonucleotide
  Sense strand starting at position 2696 of SEQ ID NO: 1880728
ggucaugucauugagaagu

SEQ ID NO: 1989355 - RNA, 19 nt, Artificial Sequence
  Description of Artificial Sequence: Synthetic oligonucleotide
  Antisense strand to SEQ ID NO: 1989354
acuucucaaugacaugacc

SEQ ID NO: 1989356 - RNA, 19 nt, Artificial Sequence
  Description of Artificial Sequence: Synthetic oligonucleotide
  Sense strand starting at position 2713 of SEQ ID NO: 1880728
gugaccuuugagcagacuu

SEQ ID NO: 1989357 - RNA, 19 nt, Artificial Sequence
  Description of Artificial Sequence: Synthetic oligonucleotide
  Antisense strand to SEQ ID NO: 1989356
aagucugcucaaaggucac

SEQ ID NO: 1989358 - RNA, 19 nt, Artificial Sequence
  Description of Artificial Sequence: Synthetic oligonucleotide
  Sense strand starting at position 2818 of SEQ ID NO: 1880728
caauuaguugaauggugau

SEQ ID NO: 1989359 - RNA, 19 nt, Artificial Sequence
  Description of Artificial Sequence: Synthetic oligonucleotide
  Antisense strand to SEQ ID NO: 1989358
aucaccauucaacuaauug

SEQ ID NO: 1989360 - RNA, 19 nt, Artificial Sequence
  Description of Artificial Sequence: Synthetic oligonucleotide
  Sense strand starting at position 3618 of SEQ ID NO: 1880728
ggucaugacagcuaugauc

SEQ ID NO: 1989361 - RNA, 19 nt, Artificial Sequence
  Description of Artificial Sequence: Synthetic oligonucleotide
  Antisense strand to SEQ ID NO: 1989360
gaucauagcugucaugacc

SEQ ID NO: 1989362 - RNA, 19 nt, Artificial Sequence
  Description of Artificial Sequence: Synthetic oligonucleotide
  Sense strand starting at position 3721 of SEQ ID NO: 1880728
agcacauauggugaaguua

SEQ ID NO: 1989363 - RNA, 19 nt, Artificial Sequence
  Description of Artificial Sequence: Synthetic oligonucleotide
  Antisense strand to SEQ ID NO: 1989362
uaacuucaccauaugugcu

SEQ ID NO: 1989364 - RNA, 19 nt, Artificial Sequence
  Description of Artificial Sequence: Synthetic oligonucleotide
  Sense strand starting at position 3730 of SEQ ID NO: 1880728
ggugaaguuaauugaaccu

SEQ ID NO: 1989365 - RNA, 19 nt, Artificial Sequence
  Description of Artificial Sequence: Synthetic oligonucleotide
  Antisense strand to SEQ ID NO: 1989364
agguucaauuaacuucacc

SEQ ID NO: 1989366 - RNA, 19 nt, Artificial Sequence
  Description of Artificial Sequence: Synthetic oligonucleotide
  Sense strand starting at position 67 of SEQ ID NO: 1880729
cauagucaucaaugagggu

SEQ ID NO: 1989367 - RNA, 19 nt, Artificial Sequence
  Description of Artificial Sequence: Synthetic oligonucleotide
  Antisense strand to SEQ ID NO: 1989366
acccucauugaugacuaug

SEQ ID NO: 1989368 - RNA, 19 nt, Artificial Sequence
  Description of Artificial Sequence: Synthetic oligonucleotide
  Sense strand starting at position 210 of SEQ ID NO: 1880729
ccagauccaucagagacau

SEQ ID NO: 1989369 - RNA, 19 nt, Artificial Sequence
  Description of Artificial Sequence: Synthetic oligonucleotide
  Antisense strand to SEQ ID NO: 1989368
augucucugauggaucugg

SEQ ID NO: 1989370 - RNA, 19 nt, Artificial Sequence
  Description of Artificial Sequence: Synthetic oligonucleotide
  Sense strand starting at position 278 of SEQ ID NO: 1880729
agacuugaaggucgaaauu

SEQ ID NO: 1989371 - RNA, 19 nt, Artificial Sequence
  Description of Artificial Sequence: Synthetic oligonucleotide
  Antisense strand to SEQ ID NO: 1989370
aauuucgaccuucaagucu

SEQ ID NO: 1989372 - RNA, 19 nt, Artificial Sequence
  Description of Artificial Sequence: Synthetic oligonucleotide
  Sense strand starting at position 513 of SEQ ID NO: 1880729
cgggcuuugcuguuccauu

SEQ ID NO: 1989373 - RNA, 19 nt, Artificial Sequence
  Description of Artificial Sequence: Synthetic oligonucleotide
  Antisense strand to SEQ ID NO: 1989372
aauggaacagcaaagcccg

SEQ ID NO: 1989374 - RNA, 19 nt, Artificial Sequence
  Description of Artificial Sequence: Synthetic oligonucleotide
  Sense strand starting at position 530 of SEQ ID NO: 1880729
uuuauauagcacggguaga

SEQ ID NO: 1989375 - RNA, 19 nt, Artificial Sequence
  Description of Artificial Sequence: Synthetic oligonucleotide
  Antisense strand to SEQ ID NO: 1989374
ucuacccgugcuauauaaa

SEQ ID NO: 1989376 - RNA, 19 nt, Artificial Sequence
  Description of Artificial Sequence: Synthetic oligonucleotide
  Sense strand starting at position 1308 of SEQ ID NO: 1880729
auugcagagucauuaauuc

SEQ ID NO: 1989377 - RNA, 19 nt, Artificial Sequence
  Description of Artificial Sequence: Synthetic oligonucleotide
  Antisense strand to SEQ ID NO: 1989376
gaauuaaugacucugcaau

SEQ ID NO: 1989378 - RNA, 19 nt, Artificial Sequence
  Description of Artificial Sequence: Synthetic oligonucleotide
  Sense strand starting at position 1315 of SEQ ID NO: 1880729
agucauuaauucgccuaau

SEQ ID NO: 1989379 - RNA, 19 nt, Artificial Sequence
  Description of Artificial Sequence: Synthetic oligonucleotide
  Antisense strand to SEQ ID NO: 1989378
auuaggcgaauuaaugacu

SEQ ID NO: 1989380 - RNA, 19 nt, Artificial Sequence
  Description of Artificial Sequence: Synthetic oligonucleotide
  Sense strand starting at position 1677 of SEQ ID NO: 1880729
ccuaucugcgaagcguaau

SEQ ID NO: 1989381 - RNA, 19 nt, Artificial Sequence
  Description of Artificial Sequence: Synthetic oligonucleotide
  Antisense strand to SEQ ID NO: 1989380
auuacgcuucgcagauagg

SEQ ID NO: 1989382 - RNA, 19 nt, Artificial Sequence
  Description of Artificial Sequence: Synthetic oligonucleotide
  Sense strand starting at position 1680 of SEQ ID NO: 1880729
aucugcgaagcguaauaaa

SEQ ID NO: 1989383 - RNA, 19 nt, Artificial Sequence
  Description of Artificial Sequence: Synthetic oligonucleotide
  Antisense strand to SEQ ID NO: 1989382
uuuauuacgcuucgcagau

SEQ ID NO: 1989384 - RNA, 19 nt, Artificial Sequence
  Description of Artificial Sequence: Synthetic oligonucleotide
  Sense strand starting at position 1700 of SEQ ID NO: 1880729
cgagguaugccauaguaca

SEQ ID NO: 1989385 - RNA, 19 nt, Artificial Sequence
  Description of Artificial Sequence: Synthetic oligonucleotide
  Antisense strand to SEQ ID NO: 1989384
uguacuauggcauaccucg

SEQ ID NO: 1989386 - RNA, 19 nt, Artificial Sequence
  Description of Artificial Sequence: Synthetic oligonucleotide
  Sense strand starting at position 2618 of SEQ ID NO: 1880729
ugucguagaguuuggagga

SEQ ID NO: 1989387 - RNA, 19 nt, Artificial Sequence
  Description of Artificial Sequence: Synthetic oligonucleotide
  Antisense strand to SEQ ID NO: 1989386
uccuccaaacucuacgaca

SEQ ID NO: 1989388 - RNA, 19 nt, Artificial Sequence
  Description of Artificial Sequence: Synthetic oligonucleotide
  Sense strand starting at position 2688 of SEQ ID NO: 1880729
ggaauuaucuuccugagac

SEQ ID NO: 1989389 - RNA, 19 nt, Artificial Sequence
  Description of Artificial Sequence: Synthetic oligonucleotide
  Antisense strand to SEQ ID NO: 1989388
gucucaggaagauaauucc

SEQ ID NO: 1989390 - RNA, 19 nt, Artificial Sequence
  Description of Artificial Sequence: Synthetic oligonucleotide
  Sense strand starting at position 2848 of SEQ ID NO: 1880729
gcagaaguaucuuuacuua

SEQ ID NO: 1989391 - RNA, 19 nt, Artificial Sequence
  Description of Artificial Sequence: Synthetic oligonucleotide
  Antisense strand to SEQ ID NO: 1989390
uaaguaaagauacuucugc

SEQ ID NO: 1989392 - RNA, 19 nt, Artificial Sequence
  Description of Artificial Sequence: Synthetic oligonucleotide
  Sense strand starting at position 2890 of SEQ ID NO: 1880729
gagguagaauauguuccuu

SEQ ID NO: 1989393 - RNA, 19 nt, Artificial Sequence
  Description of Artificial Sequence: Synthetic oligonucleotide
  Antisense strand to SEQ ID NO: 1989392
aaggaacauauucuaccuc

SEQ ID NO: 1989394 - RNA, 19 nt, Artificial Sequence
  Description of Artificial Sequence: Synthetic oligonucleotide
  Sense strand starting at position 2912 of SEQ ID NO: 1880729
cucuucuaguagucuagua

SEQ ID NO: 1989395 - RNA, 19 nt, Artificial Sequence
  Description of Artificial Sequence: Synthetic oligonucleotide
  Antisense strand to SEQ ID NO: 1989394
uacuagacuacuagaagag

SEQ ID NO: 1989396 - RNA, 19 nt, Artificial Sequence
  Description of Artificial Sequence: Synthetic oligonucleotide
  Sense strand starting at position 2914 of SEQ ID NO: 1880729
cuucuaguagucuaguaaa

SEQ ID NO: 1989397 - RNA, 19 nt, Artificial Sequence
  Description of Artificial Sequence: Synthetic oligonucleotide
  Antisense strand to SEQ ID NO: 1989396
uuuacuagacuacuagaag

SEQ ID NO: 1989398 - RNA, 19 nt, Artificial Sequence
  Description of Artificial Sequence: Synthetic oligonucleotide
  Sense strand starting at position 2987 of SEQ ID NO: 1880729
ccaucuguuugacuguaga

SEQ ID NO: 1989399 - RNA, 19 nt, Artificial Sequence
  Description of Artificial Sequence: Synthetic oligonucleotide
  Antisense strand to SEQ ID NO: 1989398
ucuacagucaaacagaugg

SEQ ID NO: 1989400 - RNA, 19 nt, Artificial Sequence
  Description of Artificial Sequence: Synthetic oligonucleotide
  Sense strand starting at position 3025 of SEQ ID NO: 1880729
gccauuguugcucaaacca

SEQ ID NO: 1989401 - RNA, 19 nt, Artificial Sequence
  Description of Artificial Sequence: Synthetic oligonucleotide
  Antisense strand to SEQ ID NO: 1989400
ugguuugagcaacaauggc

SEQ ID NO: 1989402 - RNA, 19 nt, Artificial Sequence
  Description of Artificial Sequence: Synthetic oligonucleotide
  Sense strand starting at position 3075 of SEQ ID NO: 1880729
gggugugauaagggucaga

SEQ ID NO: 1989403 - RNA, 19 nt, Artificial Sequence
  Description of Artificial Sequence: Synthetic oligonucleotide
  Antisense strand to SEQ ID NO: 1989402
ucugacccuuaucacaccc

SEQ ID NO: 1989404 - RNA, 19 nt, Artificial Sequence
  Description of Artificial Sequence: Synthetic oligonucleotide
  Sense strand starting at position 3099 of SEQ ID NO: 1880729
cucagcgaugcuuaaagau

SEQ ID NO: 1989405 - RNA, 19 nt, Artificial Sequence
  Description of Artificial Sequence: Synthetic oligonucleotide
  Antisense strand to SEQ ID NO: 1989404
aucuuuaagcaucgcugag

SEQ ID NO: 1989406 - RNA, 19 nt, Artificial Sequence
  Description of Artificial Sequence: Synthetic oligonucleotide
  Sense strand starting at position 3108 of SEQ ID NO: 1880729
gcuuaaagaugcuugugaa

SEQ ID NO: 1989407 - RNA, 19 nt, Artificial Sequence
  Description of Artificial Sequence: Synthetic oligonucleotide
  Antisense strand to SEQ ID NO: 1989406
uucacaagcaucuuuaagc

SEQ ID NO: 1989408 - RNA, 19 nt, Artificial Sequence
  Description of Artificial Sequence: Synthetic oligonucleotide
  Sense strand starting at position 3109 of SEQ ID NO: 1880729
cuuaaagaugcuugugaac

SEQ ID NO: 1989409 - RNA, 19 nt, Artificial Sequence
  Description of Artificial Sequence: Synthetic oligonucleotide
  Antisense strand to SEQ ID NO: 1989408
guucacaagcaucuuuaag

SEQ ID NO: 1989410 - RNA, 19 nt, Artificial Sequence
  Description of Artificial Sequence: Synthetic oligonucleotide
  Sense strand starting at position 3118 of SEQ ID NO: 1880729
gcuugugaacauugcuaac

SEQ ID NO: 1989411 - RNA, 19 nt, Artificial Sequence
  Description of Artificial Sequence: Synthetic oligonucleotide
  Antisense strand to SEQ ID NO: 1989410
guuagcaauguucacaagc

SEQ ID NO: 1989412 - RNA, 19 nt, Artificial Sequence
  Description of Artificial Sequence: Synthetic oligonucleotide
  Sense strand starting at position 3120 of SEQ ID NO: 1880729
uugugaacauugcuaacua

SEQ ID NO: 1989413 - RNA, 19 nt, Artificial Sequence
  Description of Artificial Sequence: Synthetic oligonucleotide
  Antisense strand to SEQ ID NO: 1989412
uaguuagcaauguucacaa

SEQ ID NO: 1989414 - RNA, 19 nt, Artificial Sequence
  Description of Artificial Sequence: Synthetic oligonucleotide
  Sense strand starting at position 3135 of SEQ ID NO: 1880729
acuauugcgauauaaacgu

SEQ ID NO: 1989415 - RNA, 19 nt, Artificial Sequence
  Description of Artificial Sequence: Synthetic oligonucleotide
  Antisense strand to SEQ ID NO: 1989414
acguuuauaucgcaauagu

SEQ ID NO: 1989416 - RNA, 19 nt, Artificial Sequence
  Description of Artificial Sequence: Synthetic oligonucleotide
  Sense strand starting at position 3139 of SEQ ID NO: 1880729
uugcgauauaaacguaaag

SEQ ID NO: 1989417 - RNA, 19 nt, Artificial Sequence
  Description of Artificial Sequence: Synthetic oligonucleotide
  Antisense strand to SEQ ID NO: 1989416
cuuuacguuuauaucgcaa

SEQ ID NO: 1989418 - RNA, 19 nt, Artificial Sequence
  Description of Artificial Sequence: Synthetic oligonucleotide
  Sense strand starting at position 3141 of SEQ ID NO: 1880729
gcgauauaaacguaaagug

SEQ ID NO: 1989419 - RNA, 19 nt, Artificial Sequence
  Description of Artificial Sequence: Synthetic oligonucleotide
  Antisense strand to SEQ ID NO: 1989418
cacuuuacguuuauaucgc

SEQ ID NO: 1989420 - RNA, 19 nt, Artificial Sequence
  Description of Artificial Sequence: Synthetic oligonucleotide
  Sense strand starting at position 3166 of SEQ ID NO: 1880729
cuauuaguuuagguuguga

SEQ ID NO: 1989421 - RNA, 19 nt, Artificial Sequence
  Description of Artificial Sequence: Synthetic oligonucleotide
  Antisense strand to SEQ ID NO: 1989420
ucacaaccuaaacuaauag

SEQ ID NO: 1989422 - RNA, 19 nt, Artificial Sequence
  Description of Artificial Sequence: Synthetic oligonucleotide
  Sense strand starting at position 3209 of SEQ ID NO: 1880729
ggguguuuccaauacagag

SEQ ID NO: 1989423 - RNA, 19 nt, Artificial Sequence
  Description of Artificial Sequence: Synthetic oligonucleotide
  Antisense strand to SEQ ID NO: 1989422
cucuguauuggaaacaccc

SEQ ID NO: 1989424 - RNA, 19 nt, Artificial Sequence
  Description of Artificial Sequence: Synthetic oligonucleotide
  Sense strand starting at position 3223 of SEQ ID NO: 1880729
cagagaguacugugcaaau

SEQ ID NO: 1989425 - RNA, 19 nt, Artificial Sequence
  Description of Artificial Sequence: Synthetic oligonucleotide
  Antisense strand to SEQ ID NO: 1989424
auuugcacaguacucucug

SEQ ID NO: 1989426 - RNA, 19 nt, Artificial Sequence
  Description of Artificial Sequence: Synthetic oligonucleotide
  Sense strand starting at position 3225 of SEQ ID NO: 1880729
gagaguacugugcaaauuc

SEQ ID NO: 1989427 - RNA, 19 nt, Artificial Sequence
  Description of Artificial Sequence: Synthetic oligonucleotide
  Antisense strand to SEQ ID NO: 1989426
gaauuugcacaguacucuc

SEQ ID NO: 1989428 - RNA, 19 nt, Artificial Sequence
  Description of Artificial Sequence: Synthetic oligonucleotide
  Sense strand starting at position 3272 of SEQ ID NO: 1880729
gcagguagguccucaggaa

SEQ ID NO: 1989429 - RNA, 19 nt, Artificial Sequence
  Description of Artificial Sequence: Synthetic oligonucleotide
  Antisense strand to SEQ ID NO: 1989428
uuccugaggaccuaccugc

SEQ ID NO: 1989430 - RNA, 19 nt, Artificial Sequence
  Description of Artificial Sequence: Synthetic oligonucleotide
  Sense strand starting at position 3273 of SEQ ID NO: 1880729
cagguagguccucaggaau

SEQ ID NO: 1989431 - RNA, 19 nt, Artificial Sequence
  Description of Artificial Sequence: Synthetic oligonucleotide
  Antisense strand to SEQ ID NO: 1989430
auuccugaggaccuaccug

SEQ ID NO: 1989432 - RNA, 19 nt, Artificial Sequence
  Description of Artificial Sequence: Synthetic oligonucleotide
  Sense strand starting at position 3304 of SEQ ID NO: 1880729
cugagaggucucugcuacu

SEQ ID NO: 1989433 - RNA, 19 nt, Artificial Sequence
  Description of Artificial Sequence: Synthetic oligonucleotide
  Antisense strand to SEQ ID NO: 1989432
aguagcagagaccucucag

SEQ ID NO: 1989434 - RNA, 19 nt, Artificial Sequence
  Description of Artificial Sequence: Synthetic oligonucleotide
  Sense strand starting at position 3310 of SEQ ID NO: 1880729
ggucucugcuacuugagaa

SEQ ID NO: 1989435 - RNA, 19 nt, Artificial Sequence
  Description of Artificial Sequence: Synthetic oligonucleotide
  Antisense strand to SEQ ID NO: 1989434
uucucaaguagcagagacc

SEQ ID NO: 1989436 - RNA, 19 nt, Artificial Sequence
  Description of Artificial Sequence: Synthetic oligonucleotide
  Sense strand starting at position 3323 of SEQ ID NO: 1880729
ugagaaagucuuugcccga

SEQ ID NO: 1989437 - RNA, 19 nt, Artificial Sequence
  Description of Artificial Sequence: Synthetic oligonucleotide
  Antisense strand to SEQ ID NO: 1989436
ucgggcaaagacuuucuca

SEQ ID NO: 1989438 - RNA, 19 nt, Artificial Sequence
  Description of Artificial Sequence: Synthetic oligonucleotide
  Sense strand starting at position 3577 of SEQ ID NO: 1880729
gggagucugcaguaagaau

SEQ ID NO: 1989439 - RNA, 19 nt, Artificial Sequence
  Description of Artificial Sequence: Synthetic oligonucleotide
  Antisense strand to SEQ ID NO: 1989438
auucuuacugcagacuccc

SEQ ID NO: 1989440 - RNA, 19 nt, Artificial Sequence
  Description of Artificial Sequence: Synthetic oligonucleotide
  Sense strand starting at position 3584 of SEQ ID NO: 1880729
ugcaguaagaaugguaaua

SEQ ID NO: 1989441 - RNA, 19 nt, Artificial Sequence
  Description of Artificial Sequence: Synthetic oligonucleotide
  Antisense strand to SEQ ID NO: 1989440
uauuaccauucuuacugca

SEQ ID NO: 1989442 - RNA, 19 nt, Artificial Sequence
  Description of Artificial Sequence: Synthetic oligonucleotide
  Sense strand starting at position 3589 of SEQ ID NO: 1880729
uaagaaugguaauaaugga

SEQ ID NO: 1989443 - RNA, 19 nt, Artificial Sequence
  Description of Artificial Sequence: Synthetic oligonucleotide
  Antisense strand to SEQ ID NO: 1989442
uccauuauuaccauucuua

SEQ ID NO: 1989444 - RNA, 19 nt, Artificial Sequence
  Description of Artificial Sequence: Synthetic oligonucleotide
  Sense strand starting at position 3605 of SEQ ID NO: 1880729
ggacuuccacagggaucuu

SEQ ID NO: 1989445 - RNA, 19 nt, Artificial Sequence
  Description of Artificial Sequence: Synthetic oligonucleotide
  Antisense strand to SEQ ID NO: 1989444
aagaucccuguggaagucc

SEQ ID NO: 1989446 - RNA, 19 nt, Artificial Sequence
  Description of Artificial Sequence: Synthetic oligonucleotide
  Sense strand starting at position 97 of SEQ ID NO: 1880730
ucagaucagcuugacauua

SEQ ID NO: 1989447 - RNA, 19 nt, Artificial Sequence
  Description of Artificial Sequence: Synthetic oligonucleotide
  Antisense strand to SEQ ID NO: 1989446
uaaugucaagcugaucuga

SEQ ID NO: 1989448 - RNA, 19 nt, Artificial Sequence
  Description of Artificial Sequence: Synthetic oligonucleotide
  Sense strand starting at position 318 of SEQ ID NO: 1880730
ggauguaccucacuuccau

SEQ ID NO: 1989449 - RNA, 19 nt, Artificial Sequence
  Description of Artificial Sequence: Synthetic oligonucleotide
  Antisense strand to SEQ ID NO: 1989448
auggaagugagguacaucc

SEQ ID NO: 1989450 - RNA, 19 nt, Artificial Sequence
  Description of Artificial Sequence: Synthetic oligonucleotide
  Sense strand starting at position 425 of SEQ ID NO: 1880730
ccguaagucuaaccaaaug

SEQ ID NO: 1989451 - RNA, 19 nt, Artificial Sequence
  Description of Artificial Sequence: Synthetic oligonucleotide
  Antisense strand to SEQ ID NO: 1989450
cauuugguuagacuuacgg

SEQ ID NO: 1989452 - RNA, 19 nt, Artificial Sequence
  Description of Artificial Sequence: Synthetic oligonucleotide
  Sense strand starting at position 851 of SEQ ID NO: 1880730
uuaauaaauugcuuuggga

SEQ ID NO: 1989453 - RNA, 19 nt, Artificial Sequence
  Description of Artificial Sequence: Synthetic oligonucleotide
  Antisense strand to SEQ ID NO: 1989452
ucccaaagcaauuuauuaa

SEQ ID NO: 1989454 - RNA, 19 nt, Artificial Sequence
  Description of Artificial Sequence: Synthetic oligonucleotide
  Sense strand starting at position 853 of SEQ ID NO: 1880730
aauaaauugcuuugggaag

SEQ ID NO: 1989455 - RNA, 19 nt, Artificial Sequence
  Description of Artificial Sequence: Synthetic oligonucleotide
  Antisense strand to SEQ ID NO: 1989454
cuucccaaagcaauuuauu

SEQ ID NO: 1989456 - RNA, 19 nt, Artificial Sequence
  Description of Artificial Sequence: Synthetic oligonucleotide
  Sense strand starting at position 884 of SEQ ID NO: 1880730
gguaguuaggaugaagguu

SEQ ID NO: 1989457 - RNA, 19 nt, Artificial Sequence
  Description of Artificial Sequence: Synthetic oligonucleotide
  Antisense strand to SEQ ID NO: 1989456
aaccuucauccuaacuacc

SEQ ID NO: 1989458 - RNA, 19 nt, Artificial Sequence
  Description of Artificial Sequence: Synthetic oligonucleotide
  Sense strand starting at position 892 of SEQ ID NO: 1880730
ggaugaagguuuccaguga

SEQ ID NO: 1989459 - RNA, 19 nt, Artificial Sequence
  Description of Artificial Sequence: Synthetic oligonucleotide
  Antisense strand to SEQ ID NO: 1989458
ucacuggaaaccuucaucc

SEQ ID NO: 1989460 - RNA, 19 nt, Artificial Sequence
  Description of Artificial Sequence: Synthetic oligonucleotide
  Sense strand starting at position 896 of SEQ ID NO: 1880730
gaagguuuccagugacaca

SEQ ID NO: 1989461 - RNA, 19 nt, Artificial Sequence
  Description of Artificial Sequence: Synthetic oligonucleotide
  Antisense strand to SEQ ID NO: 1989460
ugugucacuggaaaccuuc

SEQ ID NO: 1989462 - RNA, 19 nt, Artificial Sequence
  Description of Artificial Sequence: Synthetic oligonucleotide
  Sense strand starting at position 924 of SEQ ID NO: 1880730
aagagaauaugcucuuggu

SEQ ID NO: 1989463 - RNA, 19 nt, Artificial Sequence
  Description of Artificial Sequence: Synthetic oligonucleotide
  Antisense strand to SEQ ID NO: 1989462
accaagagcauauucucuu

SEQ ID NO: 1989464 - RNA, 19 nt, Artificial Sequence
  Description of Artificial Sequence: Synthetic oligonucleotide
  Sense strand starting at position 1084 of SEQ ID NO: 1880730
cagaaaguucugcagagua

SEQ ID NO: 1989465 - RNA, 19 nt, Artificial Sequence
  Description of Artificial Sequence: Synthetic oligonucleotide
  Antisense strand to SEQ ID NO: 1989464
uacucugcagaacuuucug

SEQ ID NO: 1989466 - RNA, 19 nt, Artificial Sequence
  Description of Artificial Sequence: Synthetic oligonucleotide
  Sense strand starting at position 1086 of SEQ ID NO: 1880730
gaaaguucugcagaguaga

SEQ ID NO: 1989467 - RNA, 19 nt, Artificial Sequence
  Description of Artificial Sequence: Synthetic oligonucleotide
  Antisense strand to SEQ ID NO: 1989466
ucuacucugcagaacuuuc

SEQ ID NO: 1989468 - RNA, 19 nt, Artificial Sequence
  Description of Artificial Sequence: Synthetic oligonucleotide
  Sense strand starting at position 1097 of SEQ ID NO: 1880730
agaguagacauguguagag

SEQ ID NO: 1989469 - RNA, 19 nt, Artificial Sequence
  Description of Artificial Sequence: Synthetic oligonucleotide
  Antisense strand to SEQ ID NO: 1989468
cucuacacaugucuacucu

SEQ ID NO: 1989470 - RNA, 19 nt, Artificial Sequence
  Description of Artificial Sequence: Synthetic oligonucleotide
  Sense strand starting at position 1099 of SEQ ID NO: 1880730
aguagacauguguagagau

SEQ ID NO: 1989471 - RNA, 19 nt, Artificial Sequence
  Description of Artificial Sequence: Synthetic oligonucleotide
  Antisense strand to SEQ ID NO: 1989470
aucucuacacaugucuacu

SEQ ID NO: 1989472 - RNA, 19 nt, Artificial Sequence
  Description of Artificial Sequence: Synthetic oligonucleotide
  Sense strand starting at position 1276 of SEQ ID NO: 1880730
uaaagugcauggucuaaca

SEQ ID NO: 1989473 - RNA, 19 nt, Artificial Sequence
  Description of Artificial Sequence: Synthetic oligonucleotide
  Antisense strand to SEQ ID NO: 1989472
uguuagaccaugcacuuua

SEQ ID NO: 1989474 - RNA, 19 nt, Artificial Sequence
  Description of Artificial Sequence: Synthetic oligonucleotide
  Sense strand starting at position 1278 of SEQ ID NO: 1880730
aagugcauggucuaacacu

SEQ ID NO: 1989475 - RNA, 19 nt, Artificial Sequence
  Description of Artificial Sequence: Synthetic oligonucleotide
  Antisense strand to SEQ ID NO: 1989474
aguguuagaccaugcacuu

SEQ ID NO: 1989476 - RNA, 19 nt, Artificial Sequence
  Description of Artificial Sequence: Synthetic oligonucleotide
  Sense strand starting at position 1497 of SEQ ID NO: 1880730
ggaucagaaaguugucuga

SEQ ID NO: 1989477 - RNA, 19 nt, Artificial Sequence
  Description of Artificial Sequence: Synthetic oligonucleotide
  Antisense strand to SEQ ID NO: 1989476
ucagacaacuuucugaucc

SEQ ID NO: 1989478 - RNA, 19 nt, Artificial Sequence
  Description of Artificial Sequence: Synthetic oligonucleotide
  Sense strand starting at position 1499 of SEQ ID NO: 1880730
aucagaaaguugucugaug

SEQ ID NO: 1989479 - RNA, 19 nt, Artificial Sequence
  Description of Artificial Sequence: Synthetic oligonucleotide
  Antisense strand to SEQ ID NO: 1989478
caucagacaacuuucugau

SEQ ID NO: 1989480 - RNA, 19 nt, Artificial Sequence
  Description of Artificial Sequence: Synthetic oligonucleotide
  Sense strand starting at position 2286 of SEQ ID NO: 1880730
cucaaaggcugguuaaauc

SEQ ID NO: 1989481 - RNA, 19 nt, Artificial Sequence
  Description of Artificial Sequence: Synthetic oligonucleotide
  Antisense strand to SEQ ID NO: 1989480
gauuuaaccagccuuugag

SEQ ID NO: 1989482 - RNA, 19 nt, Artificial Sequence
  Description of Artificial Sequence: Synthetic oligonucleotide
  Sense strand starting at position 2476 of SEQ ID NO: 1880730
agacuugcuuccguauuua

SEQ ID NO: 1989483 - RNA, 19 nt, Artificial Sequence
  Description of Artificial Sequence: Synthetic oligonucleotide
  Antisense strand to SEQ ID NO: 1989482
uaaauacggaagcaagucu

SEQ ID NO: 1989484 - RNA, 19 nt, Artificial Sequence
  Description of Artificial Sequence: Synthetic oligonucleotide
  Sense strand starting at position 2480 of SEQ ID NO: 1880730
uugcuuccguauuuaaaga

SEQ ID NO: 1989485 - RNA, 19 nt, Artificial Sequence
  Description of Artificial Sequence: Synthetic oligonucleotide
  Antisense strand to SEQ ID NO: 1989484
ucuuuaaauacggaagcaa

SEQ ID NO: 1989486 - RNA, 19 nt, Artificial Sequence
  Description of Artificial Sequence: Synthetic oligonucleotide
  Sense strand starting at position 2491 of SEQ ID NO: 1880730
uuuaaagaagugcaauagu

SEQ ID NO: 1989487 - RNA, 19 nt, Artificial Sequence
  Description of Artificial Sequence: Synthetic oligonucleotide
  Antisense strand to SEQ ID NO: 1989486
acuauugcacuucuuuaaa

SEQ ID NO: 1989488 - RNA, 19 nt, Artificial Sequence
  Description of Artificial Sequence: Synthetic oligonucleotide
  Sense strand starting at position 2564 of SEQ ID NO: 1880730
agagaacauguuugcucaa

SEQ ID NO: 1989489 - RNA, 19 nt, Artificial Sequence
  Description of Artificial Sequence: Synthetic oligonucleotide
  Antisense strand to SEQ ID NO: 1989488
uugagcaaacauguucucu

SEQ ID NO: 1989490 - RNA, 19 nt, Artificial Sequence
  Description of Artificial Sequence: Synthetic oligonucleotide
  Sense strand starting at position 2565 of SEQ ID NO: 1880730
gagaacauguuugcucaau

SEQ ID NO: 1989491 - RNA, 19 nt, Artificial Sequence
  Description of Artificial Sequence: Synthetic oligonucleotide
  Antisense strand to SEQ ID NO: 1989490
auugagcaaacauguucuc

SEQ ID NO: 1989492 - RNA, 19 nt, Artificial Sequence
  Description of Artificial Sequence: Synthetic oligonucleotide
  Sense strand starting at position 2566 of SEQ ID NO: 1880730
agaacauguuugcucaaua

SEQ ID NO: 1989493 - RNA, 19 nt, Artificial Sequence
  Description of Artificial Sequence: Synthetic oligonucleotide
  Antisense strand to SEQ ID NO: 1989492
uauugagcaaacauguucu

SEQ ID NO: 1989494 - RNA, 19 nt, Artificial Sequence
  Description of Artificial Sequence: Synthetic oligonucleotide
  Sense strand starting at position 2579 of SEQ ID NO: 1880730
ucaauaugugggcacuauu

SEQ ID NO: 1989495 - RNA, 19 nt, Artificial Sequence
  Description of Artificial Sequence: Synthetic oligonucleotide
  Antisense strand to SEQ ID NO: 1989494
aauagugcccacauauuga

SEQ ID NO: 1989496 - RNA, 19 nt, Artificial Sequence
  Description of Artificial Sequence: Synthetic oligonucleotide
  Sense strand starting at position 2582 of SEQ ID NO: 1880730
auaugugggcacuauugaa

SEQ ID NO: 1989497 - RNA, 19 nt, Artificial Sequence
  Description of Artificial Sequence: Synthetic oligonucleotide
  Antisense strand to SEQ ID NO: 1989496
uucaauagugcccacauau

SEQ ID NO: 1989498 - RNA, 19 nt, Artificial Sequence
  Description of Artificial Sequence: Synthetic oligonucleotide
  Sense strand starting at position 3124 of SEQ ID NO: 1880730
aggaaauaauuccuuaugu

SEQ ID NO: 1989499 - RNA, 19 nt, Artificial Sequence
  Description of Artificial Sequence: Synthetic oligonucleotide
  Antisense strand to SEQ ID NO: 1989498
acauaaggaauuauuuccu

SEQ ID NO: 1989500 - RNA, 19 nt, Artificial Sequence
  Description of Artificial Sequence: Synthetic oligonucleotide
  Sense strand starting at position 3125 of SEQ ID NO: 1880730
ggaaauaauuccuuaugug

SEQ ID NO: 1989501 - RNA, 19 nt, Artificial Sequence
  Description of Artificial Sequence: Synthetic oligonucleotide
  Antisense strand to SEQ ID NO: 1989500
cacauaaggaauuauuucc

SEQ ID NO: 1989502 - RNA, 19 nt, Artificial Sequence
  Description of Artificial Sequence: Synthetic oligonucleotide
  Sense strand starting at position 3129 of SEQ ID NO: 1880730
auaauuccuuaugugguaa

SEQ ID NO: 1989503 - RNA, 19 nt, Artificial Sequence
  Description of Artificial Sequence: Synthetic oligonucleotide
  Antisense strand to SEQ ID NO: 1989502
uuaccacauaaggaauuau

SEQ ID NO: 1989504 - RNA, 19 nt, Artificial Sequence
  Description of Artificial Sequence: Synthetic oligonucleotide
  Sense strand starting at position 3171 of SEQ ID NO: 1880730
gcugcaucucaagaauaaa

SEQ ID NO: 1989505 - RNA, 19 nt, Artificial Sequence
  Description of Artificial Sequence: Synthetic oligonucleotide
  Antisense strand to SEQ ID NO: 1989504
uuuauucuugagaugcagc

SEQ ID NO: 1989506 - RNA, 19 nt, Artificial Sequence
  Description of Artificial Sequence: Synthetic oligonucleotide
  Sense strand starting at position 3174 of SEQ ID NO: 1880730
gcaucucaagaauaaaguu

SEQ ID NO: 1989507 - RNA, 19 nt, Artificial Sequence
  Description of Artificial Sequence: Synthetic oligonucleotide
  Antisense strand to SEQ ID NO: 1989506
aacuuuauucuugagaugc

SEQ ID NO: 1989508 - RNA, 19 nt, Artificial Sequence
  Description of Artificial Sequence: Synthetic oligonucleotide
  Sense strand starting at position 3264 of SEQ ID NO: 1880730
guuccaaauguugacuauu

SEQ ID NO: 1989509 - RNA, 19 nt, Artificial Sequence
  Description of Artificial Sequence: Synthetic oligonucleotide
  Antisense strand to SEQ ID NO: 1989508
aauagucaacauuuggaac

SEQ ID NO: 1989510 - RNA, 19 nt, Artificial Sequence
  Description of Artificial Sequence: Synthetic oligonucleotide
  Sense strand starting at position 3273 of SEQ ID NO: 1880730
guugacuauuuagaaagga

SEQ ID NO: 1989511 - RNA, 19 nt, Artificial Sequence
  Description of Artificial Sequence: Synthetic oligonucleotide
  Antisense strand to SEQ ID NO: 1989510
uccuuucuaaauagucaac

SEQ ID NO: 1989512 - RNA, 19 nt, Artificial Sequence
  Description of Artificial Sequence: Synthetic oligonucleotide
  Sense strand starting at position 3357 of SEQ ID NO: 1880730
cggcuucccagugaacaau

SEQ ID NO: 1989513 - RNA, 19 nt, Artificial Sequence
  Description of Artificial Sequence: Synthetic oligonucleotide
  Antisense strand to SEQ ID NO: 1989512
auuguucacugggaagccg

SEQ ID NO: 1989514 - RNA, 19 nt, Artificial Sequence
  Description of Artificial Sequence: Synthetic oligonucleotide
  Sense strand starting at position 3434 of SEQ ID NO: 1880730
guuauucccugaucaagac

SEQ ID NO: 1989515 - RNA, 19 nt, Artificial Sequence
  Description of Artificial Sequence: Synthetic oligonucleotide
  Antisense strand to SEQ ID NO: 1989514
gucuugaucagggaauaac

SEQ ID NO: 1989516 - RNA, 19 nt, Artificial Sequence
  Description of Artificial Sequence: Synthetic oligonucleotide
  Sense strand starting at position 3470 of SEQ ID NO: 1880730
uggagaaccaguuggaugu

SEQ ID NO: 1989517 - RNA, 19 nt, Artificial Sequence
  Description of Artificial Sequence: Synthetic oligonucleotide
  Antisense strand to SEQ ID NO: 1989516
acauccaacugguucucca

SEQ ID NO: 1989518 - RNA, 19 nt, Artificial Sequence
  Description of Artificial Sequence: Synthetic oligonucleotide
  Sense strand starting at position 3471 of SEQ ID NO: 1880730
ggagaaccaguuggauguu

SEQ ID NO: 1989519 - RNA, 19 nt, Artificial Sequence
  Description of Artificial Sequence: Synthetic oligonucleotide
  Antisense strand to SEQ ID NO: 1989518
aacauccaacugguucucc

SEQ ID NO: 1989520 - RNA, 19 nt, Artificial Sequence
  Description of Artificial Sequence: Synthetic oligonucleotide
  Sense strand starting at position 3474 of SEQ ID NO: 1880730
gaaccaguuggauguuaag

SEQ ID NO: 1989521 - RNA, 19 nt, Artificial Sequence
  Description of Artificial Sequence: Synthetic oligonucleotide
  Antisense strand to SEQ ID NO: 1989520
cuuaacauccaacugguuc

SEQ ID NO: 1989522 - RNA, 19 nt, Artificial Sequence
  Description of Artificial Sequence: Synthetic oligonucleotide
  Sense strand starting at position 3819 of SEQ ID NO: 1880730
guuuaugguccauagaaau

SEQ ID NO: 1989523 - RNA, 19 nt, Artificial Sequence
  Description of Artificial Sequence: Synthetic oligonucleotide
  Antisense strand to SEQ ID NO: 1989522
auuucuauggaccauaaac

SEQ ID NO: 1989524 - RNA, 19 nt, Artificial Sequence
  Description of Artificial Sequence: Synthetic oligonucleotide
  Sense strand starting at position 3832 of SEQ ID NO: 1880730
agaaauaucuucccagagc

SEQ ID NO: 1989525 - RNA, 19 nt, Artificial Sequence
  Description of Artificial Sequence: Synthetic oligonucleotide
  Antisense strand to SEQ ID NO: 1989524
gcucugggaagauauuucu

SEQ ID NO: 1989526 - RNA, 19 nt, Artificial Sequence
  Description of Artificial Sequence: Synthetic oligonucleotide
  Sense strand starting at position 100 of SEQ ID NO: 1880731
guuuacauuuccuauuuga

SEQ ID NO: 1989527 - RNA, 19 nt, Artificial Sequence
  Description of Artificial Sequence: Synthetic oligonucleotide
  Antisense strand to SEQ ID NO: 1989526
ucaaauaggaaauguaaac

SEQ ID NO: 1989528 - RNA, 19 nt, Artificial Sequence
  Description of Artificial Sequence: Synthetic oligonucleotide
  Sense strand starting at position 358 of SEQ ID NO: 1880731
agccucucaccugggaaua

SEQ ID NO: 1989529 - RNA, 19 nt, Artificial Sequence
  Description of Artificial Sequence: Synthetic oligonucleotide
  Antisense strand to SEQ ID NO: 1989528
uauucccaggugagaggcu

SEQ ID NO: 1989530 - RNA, 19 nt, Artificial Sequence
  Description of Artificial Sequence: Synthetic oligonucleotide
  Sense strand starting at position 369 of SEQ ID NO: 1880731
ugggaauagguguguaaau

SEQ ID NO: 1989531 - RNA, 19 nt, Artificial Sequence
  Description of Artificial Sequence: Synthetic oligonucleotide
  Antisense strand to SEQ ID NO: 1989530
auuuacacaccuauuccca

SEQ ID NO: 1989532 - RNA, 19 nt, Artificial Sequence
  Description of Artificial Sequence: Synthetic oligonucleotide
  Sense strand starting at position 370 of SEQ ID NO: 1880731
gggaauagguguguaaaua

SEQ ID NO: 1989533 - RNA, 19 nt, Artificial Sequence
  Description of Artificial Sequence: Synthetic oligonucleotide
  Antisense strand to SEQ ID NO: 1989532
uauuuacacaccuauuccc

SEQ ID NO: 1989534 - RNA, 19 nt, Artificial Sequence
  Description of Artificial Sequence: Synthetic oligonucleotide
  Sense strand starting at position 371 of SEQ ID NO: 1880731
ggaauagguguguaaauau

SEQ ID NO: 1989535 - RNA, 19 nt, Artificial Sequence
  Description of Artificial Sequence: Synthetic oligonucleotide
  Antisense strand to SEQ ID NO: 1989534
auauuuacacaccuauucc

SEQ ID NO: 1989536 - RNA, 19 nt, Artificial Sequence
  Description of Artificial Sequence: Synthetic oligonucleotide
  Sense strand starting at position 408 of SEQ ID NO: 1880731
cuuaaugaguuaucaugga

SEQ ID NO: 1989537 - RNA, 19 nt, Artificial Sequence
  Description of Artificial Sequence: Synthetic oligonucleotide
  Antisense strand to SEQ ID NO: 1989536
uccaugauaacucauuaag

SEQ ID NO: 1989538 - RNA, 19 nt, Artificial Sequence
  Description of Artificial Sequence: Synthetic oligonucleotide
  Sense strand starting at position 591 of SEQ ID NO: 1880731
uaauguacgguuuaaugga

SEQ ID NO: 1989539 - RNA, 19 nt, Artificial Sequence
  Description of Artificial Sequence: Synthetic oligonucleotide
  Antisense strand to SEQ ID NO: 1989538
uccauuaaaccguacauua

SEQ ID NO: 1989540 - RNA, 19 nt, Artificial Sequence
  Description of Artificial Sequence: Synthetic oligonucleotide
  Sense strand starting at position 598 of SEQ ID NO: 1880731
cgguuuaauggacacuaau

SEQ ID NO: 1989541 - RNA, 19 nt, Artificial Sequence
  Description of Artificial Sequence: Synthetic oligonucleotide
  Antisense strand to SEQ ID NO: 1989540
auuaguguccauuaaaccg

SEQ ID NO: 1989542 - RNA, 19 nt, Artificial Sequence
  Description of Artificial Sequence: Synthetic oligonucleotide
  Sense strand starting at position 696 of SEQ ID NO: 1880731
ugcaucagugaccauaauu

SEQ ID NO: 1989543 - RNA, 19 nt, Artificial Sequence
  Description of Artificial Sequence: Synthetic oligonucleotide
  Antisense strand to SEQ ID NO: 1989542
aauuauggucacugaugca

SEQ ID NO: 1989544 - RNA, 19 nt, Artificial Sequence
  Description of Artificial Sequence: Synthetic oligonucleotide
  Sense strand starting at position 705 of SEQ ID NO: 1880731
gaccauaauuugucguguu

SEQ ID NO: 1989545 - RNA, 19 nt, Artificial Sequence
  Description of Artificial Sequence: Synthetic oligonucleotide
  Antisense strand to SEQ ID NO: 1989544
aacacgacaaauuaugguc

SEQ ID NO: 1989546 - RNA, 19 nt, Artificial Sequence
  Description of Artificial Sequence: Synthetic oligonucleotide
  Sense strand starting at position 712 of SEQ ID NO: 1880731
auuugucguguucauguga

SEQ ID NO: 1989547 - RNA, 19 nt, Artificial Sequence
  Description of Artificial Sequence: Synthetic oligonucleotide
  Antisense strand to SEQ ID NO: 1989546
ucacaugaacacgacaaau

SEQ ID NO: 1989548 - RNA, 19 nt, Artificial Sequence
  Description of Artificial Sequence: Synthetic oligonucleotide
  Sense strand starting at position 727 of SEQ ID NO: 1880731
gugauauauuuagcgaucu

SEQ ID NO: 1989549 - RNA, 19 nt, Artificial Sequence
  Description of Artificial Sequence: Synthetic oligonucleotide
  Antisense strand to SEQ ID NO: 1989548
agaucgcuaaauauaucac

SEQ ID NO: 1989550 - RNA, 19 nt, Artificial Sequence
  Description of Artificial Sequence: Synthetic oligonucleotide
  Sense strand starting at position 764 of SEQ ID NO: 1880731
ggaaauacuaccggcauua

SEQ ID NO: 1989551 - RNA, 19 nt, Artificial Sequence
  Description of Artificial Sequence: Synthetic oligonucleotide
  Antisense strand to SEQ ID NO: 1989550
uaaugccgguaguauuucc

SEQ ID NO: 1989552 - RNA, 19 nt, Artificial Sequence
  Description of Artificial Sequence: Synthetic oligonucleotide
  Sense strand starting at position 853 of SEQ ID NO: 1880731
gauauuaagcagcaauguu

SEQ ID NO: 1989553 - RNA, 19 nt, Artificial Sequence
  Description of Artificial Sequence: Synthetic oligonucleotide
  Antisense strand to SEQ ID NO: 1989552
aacauugcugcuuaauauc

SEQ ID NO: 1989554 - RNA, 19 nt, Artificial Sequence
  Description of Artificial Sequence: Synthetic oligonucleotide
  Sense strand starting at position 963 of SEQ ID NO: 1880731
cacauagaauggguacauu

SEQ ID NO: 1989555 - RNA, 19 nt, Artificial Sequence
  Description of Artificial Sequence: Synthetic oligonucleotide
  Antisense strand to SEQ ID NO: 1989554
aauguacccauucuaugug

SEQ ID NO: 1989556 - RNA, 19 nt, Artificial Sequence
  Description of Artificial Sequence: Synthetic oligonucleotide
  Sense strand starting at position 971 of SEQ ID NO: 1880731
auggguacauuguugaaca

SEQ ID NO: 1989557 - RNA, 19 nt, Artificial Sequence
  Description of Artificial Sequence: Synthetic oligonucleotide
  Antisense strand to SEQ ID NO: 1989556
uguucaacaauguacccau

SEQ ID NO: 1989558 - RNA, 19 nt, Artificial Sequence
  Description of Artificial Sequence: Synthetic oligonucleotide
  Sense strand starting at position 1223 of SEQ ID NO: 1880731
gugaguuauccuuaauaac

SEQ ID NO: 1989559 - RNA, 19 nt, Artificial Sequence
  Description of Artificial Sequence: Synthetic oligonucleotide
  Antisense strand to SEQ ID NO: 1989558
guuauuaaggauaacucac

SEQ ID NO: 1989560 - RNA, 19 nt, Artificial Sequence
  Description of Artificial Sequence: Synthetic oligonucleotide
  Sense strand starting at position 1904 of SEQ ID NO: 1880731
cccacaacuguugauugua

SEQ ID NO: 1989561 - RNA, 19 nt, Artificial Sequence
  Description of Artificial Sequence: Synthetic oligonucleotide
  Antisense strand to SEQ ID NO: 1989560
uacaaucaacaguuguggg

SEQ ID NO: 1989562 - RNA, 19 nt, Artificial Sequence
  Description of Artificial Sequence: Synthetic oligonucleotide
  Sense strand starting at position 2032 of SEQ ID NO: 1880731
gauccuggauccuuauaga

SEQ ID NO: 1989563 - RNA, 19 nt, Artificial Sequence
  Description of Artificial Sequence: Synthetic oligonucleotide
  Antisense strand to SEQ ID NO: 1989562
ucuauaaggauccaggauc

SEQ ID NO: 1989564 - RNA, 19 nt, Artificial Sequence
  Description of Artificial Sequence: Synthetic oligonucleotide
  Sense strand starting at position 2160 of SEQ ID NO: 1880731
ccuuucgauuuauuguauu

SEQ ID NO: 1989565 - RNA, 19 nt, Artificial Sequence
  Description of Artificial Sequence: Synthetic oligonucleotide
  Antisense strand to SEQ ID NO: 1989564
aauacaauaaaucgaaagg

SEQ ID NO: 1989566 - RNA, 19 nt, Artificial Sequence
  Description of Artificial Sequence: Synthetic oligonucleotide
  Sense strand starting at position 2190 of SEQ ID NO: 1880731
gaagaugaugcuggguaga

SEQ ID NO: 1989567 - RNA, 19 nt, Artificial Sequence
  Description of Artificial Sequence: Synthetic oligonucleotide
  Antisense strand to SEQ ID NO: 1989566
ucuacccagcaucaucuuc

SEQ ID NO: 1989568 - RNA, 19 nt, Artificial Sequence
  Description of Artificial Sequence: Synthetic oligonucleotide
  Sense strand starting at position 2192 of SEQ ID NO: 1880731
agaugaugcuggguagaca

SEQ ID NO: 1989569 - RNA, 19 nt, Artificial Sequence
  Description of Artificial Sequence: Synthetic oligonucleotide
  Antisense strand to SEQ ID NO: 1989568
ugucuacccagcaucaucu

SEQ ID NO: 1989570 - RNA, 19 nt, Artificial Sequence
  Description of Artificial Sequence: Synthetic oligonucleotide
  Sense strand starting at position 2200 of SEQ ID NO: 1880731
cuggguagacacugugaaa

SEQ ID NO: 1989571 - RNA, 19 nt, Artificial Sequence
  Description of Artificial Sequence: Synthetic oligonucleotide
  Antisense strand to SEQ ID NO: 1989570
uuucacagugucuacccag

SEQ ID NO: 1989572 - RNA, 19 nt, Artificial Sequence
  Description of Artificial Sequence: Synthetic oligonucleotide
  Sense strand starting at position 2414 of SEQ ID NO: 1880731
aaggaaaucuuguuccuga

SEQ ID NO: 1989573 - RNA, 19 nt, Artificial Sequence
  Description of Artificial Sequence: Synthetic oligonucleotide
  Antisense strand to SEQ ID NO: 1989572
ucaggaacaagauuuccuu

SEQ ID NO: 1989574 - RNA, 19 nt, Artificial Sequence
  Description of Artificial Sequence: Synthetic oligonucleotide
  Sense strand starting at position 2415 of SEQ ID NO: 1880731
aggaaaucuuguuccugau

SEQ ID NO: 1989575 - RNA, 19 nt, Artificial Sequence
  Description of Artificial Sequence: Synthetic oligonucleotide
  Antisense strand to SEQ ID NO: 1989574
aucaggaacaagauuuccu

SEQ ID NO: 1989576 - RNA, 19 nt, Artificial Sequence
  Description of Artificial Sequence: Synthetic oligonucleotide
  Sense strand starting at position 2417 of SEQ ID NO: 1880731
gaaaucuuguuccugauga

SEQ ID NO: 1989577 - RNA, 19 nt, Artificial Sequence
  Description of Artificial Sequence: Synthetic oligonucleotide
  Antisense strand to SEQ ID NO: 1989576
ucaucaggaacaagauuuc

SEQ ID NO: 1989578 - RNA, 19 nt, Artificial Sequence
  Description of Artificial Sequence: Synthetic oligonucleotide
  Sense strand starting at position 2743 of SEQ ID NO: 1880731
gagguaauguauguauaaa

SEQ ID NO: 1989579 - RNA, 19 nt, Artificial Sequence
  Description of Artificial Sequence: Synthetic oligonucleotide
  Antisense strand to SEQ ID NO: 1989578
uuuauacauacauuaccuc

SEQ ID NO: 1989580 - RNA, 19 nt, Artificial Sequence
  Description of Artificial Sequence: Synthetic oligonucleotide
  Sense strand starting at position 2781 of SEQ ID NO: 1880731
ucacaaugauuugacagau

SEQ ID NO: 1989581 - RNA, 19 nt, Artificial Sequence
  Description of Artificial Sequence: Synthetic oligonucleotide
  Antisense strand to SEQ ID NO: 1989580
aucugucaaaucauuguga

SEQ ID NO: 1989582 - RNA, 19 nt, Artificial Sequence
  Description of Artificial Sequence: Synthetic oligonucleotide
  Sense strand starting at position 2927 of SEQ ID NO: 1880731
guagaagugcauuagggaa

SEQ ID NO: 1989583 - RNA, 19 nt, Artificial Sequence
  Description of Artificial Sequence: Synthetic oligonucleotide
  Antisense strand to SEQ ID NO: 1989582
uucccuaaugcacuucuac

SEQ ID NO: 1989584 - RNA, 19 nt, Artificial Sequence
  Description of Artificial Sequence: Synthetic oligonucleotide
  Sense strand starting at position 2982 of SEQ ID NO: 1880731
gguugauagaguugaauua

SEQ ID NO: 1989585 - RNA, 19 nt, Artificial Sequence
  Description of Artificial Sequence: Synthetic oligonucleotide
  Antisense strand to SEQ ID NO: 1989584
uaauucaacucuaucaacc

SEQ ID NO: 1989586 - RNA, 19 nt, Artificial Sequence
  Description of Artificial Sequence: Synthetic oligonucleotide
  Sense strand starting at position 2992 of SEQ ID NO: 1880731
guugaauuacaguaacauu

SEQ ID NO: 1989587 - RNA, 19 nt, Artificial Sequence
  Description of Artificial Sequence: Synthetic oligonucleotide
  Antisense strand to SEQ ID NO: 1989586
aauguuacuguaauucaac

SEQ ID NO: 1989588 - RNA, 19 nt, Artificial Sequence
  Description of Artificial Sequence: Synthetic oligonucleotide
  Sense strand starting at position 3448 of SEQ ID NO: 1880731
gacuuuaaaguugguuaga

SEQ ID NO: 1989589 - RNA, 19 nt, Artificial Sequence
  Description of Artificial Sequence: Synthetic oligonucleotide
  Antisense strand to SEQ ID NO: 1989588
ucuaaccaacuuuaaaguc

SEQ ID NO: 1989590 - RNA, 19 nt, Artificial Sequence
  Description of Artificial Sequence: Synthetic oligonucleotide
  Sense strand starting at position 3449 of SEQ ID NO: 1880731
acuuuaaaguugguuagaa

SEQ ID NO: 1989591 - RNA, 19 nt, Artificial Sequence
  Description of Artificial Sequence: Synthetic oligonucleotide
  Antisense strand to SEQ ID NO: 1989590
uucuaaccaacuuuaaagu

SEQ ID NO: 1989592 - RNA, 19 nt, Artificial Sequence
  Description of Artificial Sequence: Synthetic oligonucleotide
  Sense strand starting at position 3711 of SEQ ID NO: 1880731
auauauagaugaguguaca

SEQ ID NO: 1989593 - RNA, 19 nt, Artificial Sequence
  Description of Artificial Sequence: Synthetic oligonucleotide
  Antisense strand to SEQ ID NO: 1989592
uguacacucaucuauauau

SEQ ID NO: 1989594 - RNA, 19 nt, Artificial Sequence
  Description of Artificial Sequence: Synthetic oligonucleotide
  Sense strand starting at position 3781 of SEQ ID NO: 1880731
ggaauaaauauggguuguu

SEQ ID NO: 1989595 - RNA, 19 nt, Artificial Sequence
  Description of Artificial Sequence: Synthetic oligonucleotide
  Antisense strand to SEQ ID NO: 1989594
aacaacccauauuuauucc

SEQ ID NO: 1989596 - RNA, 19 nt, Artificial Sequence
  Description of Artificial Sequence: Synthetic oligonucleotide
  Sense strand starting at position 3782 of SEQ ID NO: 1880731
gaauaaauauggguuguuu

SEQ ID NO: 1989597 - RNA, 19 nt, Artificial Sequence
  Description of Artificial Sequence: Synthetic oligonucleotide
  Antisense strand to SEQ ID NO: 1989596
aaacaacccauauuuauuc

SEQ ID NO: 1989598 - RNA, 19 nt, Artificial Sequence
  Description of Artificial Sequence: Synthetic oligonucleotide
  Sense strand starting at position 3831 of SEQ ID NO: 1880731
auauuaagccaauauacgu

SEQ ID NO: 1989599 - RNA, 19 nt, Artificial Sequence
  Description of Artificial Sequence: Synthetic oligonucleotide
  Antisense strand to SEQ ID NO: 1989598
acguauauuggcuuaauau

SEQ ID NO: 1989600 - RNA, 19 nt, Artificial Sequence
  Description of Artificial Sequence: Synthetic oligonucleotide
  Sense strand starting at position 3839 of SEQ ID NO: 1880731
ccaauauacguguaugaua

SEQ ID NO: 1989601 - RNA, 19 nt, Artificial Sequence
  Description of Artificial Sequence: Synthetic oligonucleotide
  Antisense strand to SEQ ID NO: 1989600
uaucauacacguauauugg

SEQ ID NO: 1989602 - RNA, 19 nt, Artificial Sequence
  Description of Artificial Sequence: Synthetic oligonucleotide
  Sense strand starting at position 3924 of SEQ ID NO: 1880731
ucucauuguaaagaguagu

SEQ ID NO: 1989603 - RNA, 19 nt, Artificial Sequence
  Description of Artificial Sequence: Synthetic oligonucleotide
  Antisense strand to SEQ ID NO: 1989602
acuacucuuuacaaugaga

SEQ ID NO: 1989604 - RNA, 19 nt, Artificial Sequence
  Description of Artificial Sequence: Synthetic oligonucleotide
  Sense strand starting at position 3927 of SEQ ID NO: 1880731
cauuguaaagaguaguuua

SEQ ID NO: 1989605 - RNA, 19 nt, Artificial Sequence
  Description of Artificial Sequence: Synthetic oligonucleotide
  Antisense strand to SEQ ID NO: 1989604
uaaacuacucuuuacaaug

SEQ ID NO: 1989606 - RNA, 19 nt, Artificial Sequence
  Description of Artificial Sequence: Synthetic oligonucleotide
  Sense strand starting at position 36 of SEQ ID NO: 1880732
auaauaaugccugguacau

SEQ ID NO: 1989607 - RNA, 19 nt, Artificial Sequence
  Description of Artificial Sequence: Synthetic oligonucleotide
  Antisense strand to SEQ ID NO: 1989606
auguaccaggcauuauuau

SEQ ID NO: 1989608 - RNA, 19 nt, Artificial Sequence
  Description of Artificial Sequence: Synthetic oligonucleotide
  Sense strand starting at position 292 of SEQ ID NO: 1880732
uuaugacaucaaugaguuu

SEQ ID NO: 1989609 - RNA, 19 nt, Artificial Sequence
  Description of Artificial Sequence: Synthetic oligonucleotide
  Antisense strand to SEQ ID NO: 1989608
aaacucauugaugucauaa

SEQ ID NO: 1989610 - RNA, 19 nt, Artificial Sequence
  Description of Artificial Sequence: Synthetic oligonucleotide
  Sense strand starting at position 336 of SEQ ID NO: 1880732
auaguuauagcugaucuca

SEQ ID NO: 1989611 - RNA, 19 nt, Artificial Sequence
  Description of Artificial Sequence: Synthetic oligonucleotide
  Antisense strand to SEQ ID NO: 1989610
ugagaucagcuauaacuau

SEQ ID NO: 1989612 - RNA, 19 nt, Artificial Sequence
  Description of Artificial Sequence: Synthetic oligonucleotide
  Sense strand starting at position 364 of SEQ ID NO: 1880732
gguucugcuuacccaaaga

SEQ ID NO: 1989613 - RNA, 19 nt, Artificial Sequence
  Description of Artificial Sequence: Synthetic oligonucleotide
  Antisense strand to SEQ ID NO: 1989612
ucuuuggguaagcagaacc

SEQ ID NO: 1989614 - RNA, 19 nt, Artificial Sequence
  Description of Artificial Sequence: Synthetic oligonucleotide
  Sense strand starting at position 380 of SEQ ID NO: 1880732
agaaauaggcuguguaaac

SEQ ID NO: 1989615 - RNA, 19 nt, Artificial Sequence
  Description of Artificial Sequence: Synthetic oligonucleotide
  Antisense strand to SEQ ID NO: 1989614
guuuacacagccuauuucu

SEQ ID NO: 1989616 - RNA, 19 nt, Artificial Sequence
  Description of Artificial Sequence: Synthetic oligonucleotide
  Sense strand starting at position 381 of SEQ ID NO: 1880732
gaaauaggcuguguaaacu

SEQ ID NO: 1989617 - RNA, 19 nt, Artificial Sequence
  Description of Artificial Sequence: Synthetic oligonucleotide
  Antisense strand to SEQ ID NO: 1989616
aguuuacacagccuauuuc

SEQ ID NO: 1989618 - RNA, 19 nt, Artificial Sequence
  Description of Artificial Sequence: Synthetic oligonucleotide
  Sense strand starting at position 461 of SEQ ID NO: 1880732
uguugauacauguaguuau

SEQ ID NO: 1989619 - RNA, 19 nt, Artificial Sequence
  Description of Artificial Sequence: Synthetic oligonucleotide
  Antisense strand to SEQ ID NO: 1989618
auaacuacauguaucaaca

SEQ ID NO: 1989620 - RNA, 19 nt, Artificial Sequence
  Description of Artificial Sequence: Synthetic oligonucleotide
  Sense strand starting at position 922 of SEQ ID NO: 1880732
gcaggauaaacugagcuuu

SEQ ID NO: 1989621 - RNA, 19 nt, Artificial Sequence
  Description of Artificial Sequence: Synthetic oligonucleotide
  Antisense strand to SEQ ID NO: 1989620
aaagcucaguuuauccugc

SEQ ID NO: 1989622 - RNA, 19 nt, Artificial Sequence
  Description of Artificial Sequence: Synthetic oligonucleotide
  Sense strand starting at position 924 of SEQ ID NO: 1880732
aggauaaacugagcuuuau

SEQ ID NO: 1989623 - RNA, 19 nt, Artificial Sequence
  Description of Artificial Sequence: Synthetic oligonucleotide
  Antisense strand to SEQ ID NO: 1989622
auaaagcucaguuuauccu

SEQ ID NO: 1989624 - RNA, 19 nt, Artificial Sequence
  Description of Artificial Sequence: Synthetic oligonucleotide
  Sense strand starting at position 1006 of SEQ ID NO: 1880732
uggguuggucaugggaauu

SEQ ID NO: 1989625 - RNA, 19 nt, Artificial Sequence
  Description of Artificial Sequence: Synthetic oligonucleotide
  Antisense strand to SEQ ID NO: 1989624
aauucccaugaccaaccca

SEQ ID NO: 1989626 - RNA, 19 nt, Artificial Sequence
  Description of Artificial Sequence: Synthetic oligonucleotide
  Sense strand starting at position 1045 of SEQ ID NO: 1880732
uuguaauauucuucuaagg

SEQ ID NO: 1989627 - RNA, 19 nt, Artificial Sequence
  Description of Artificial Sequence: Synthetic oligonucleotide
  Antisense strand to SEQ ID NO: 1989626
ccuuagaagaauauuacaa

SEQ ID NO: 1989628 - RNA, 19 nt, Artificial Sequence
  Description of Artificial Sequence: Synthetic oligonucleotide
  Sense strand starting at position 1148 of SEQ ID NO: 1880732
ccaaguuagguuuauggca

SEQ ID NO: 1989629 - RNA, 19 nt, Artificial Sequence
  Description of Artificial Sequence: Synthetic oligonucleotide
  Antisense strand to SEQ ID NO: 1989628
ugccauaaaccuaacuugg

SEQ ID NO: 1989630 - RNA, 19 nt, Artificial Sequence
  Description of Artificial Sequence: Synthetic oligonucleotide
  Sense strand starting at position 1192 of SEQ ID NO: 1880732
uuuggaauucucuagagca

SEQ ID NO: 1989631 - RNA, 19 nt, Artificial Sequence
  Description of Artificial Sequence: Synthetic oligonucleotide
  Antisense strand to SEQ ID NO: 1989630
ugcucuagagaauuccaaa

SEQ ID NO: 1989632 - RNA, 19 nt, Artificial Sequence
  Description of Artificial Sequence: Synthetic oligonucleotide
  Sense strand starting at position 1194 of SEQ ID NO: 1880732
uggaauucucuagagcagu

SEQ ID NO: 1989633 - RNA, 19 nt, Artificial Sequence
  Description of Artificial Sequence: Synthetic oligonucleotide
  Antisense strand to SEQ ID NO: 1989632
acugcucuagagaauucca

SEQ ID NO: 1989634 - RNA, 19 nt, Artificial Sequence
  Description of Artificial Sequence: Synthetic oligonucleotide
  Sense strand starting at position 1383 of SEQ ID NO: 1880732
uaaagcugaugaguagaau

SEQ ID NO: 1989635 - RNA, 19 nt, Artificial Sequence
  Description of Artificial Sequence: Synthetic oligonucleotide
  Antisense strand to SEQ ID NO: 1989634
auucuacucaucagcuuua

SEQ ID NO: 1989636 - RNA, 19 nt, Artificial Sequence
  Description of Artificial Sequence: Synthetic oligonucleotide
  Sense strand starting at position 1527 of SEQ ID NO: 1880732
ugcguaaguuauuuauucu

SEQ ID NO: 1989637 - RNA, 19 nt, Artificial Sequence
  Description of Artificial Sequence: Synthetic oligonucleotide
  Antisense strand to SEQ ID NO: 1989636
agaauaaauaacuuacgca

SEQ ID NO: 1989638 - RNA, 19 nt, Artificial Sequence
  Description of Artificial Sequence: Synthetic oligonucleotide
  Sense strand starting at position 1764 of SEQ ID NO: 1880732
accaaauucugagugcuag

SEQ ID NO: 1989639 - RNA, 19 nt, Artificial Sequence
  Description of Artificial Sequence: Synthetic oligonucleotide
  Antisense strand to SEQ ID NO: 1989638
cuagcacucagaauuuggu

SEQ ID NO: 1989640 - RNA, 19 nt, Artificial Sequence
  Description of Artificial Sequence: Synthetic oligonucleotide
  Sense strand starting at position 1782 of SEQ ID NO: 1880732
gggacacuguuauuggagu

SEQ ID NO: 1989641 - RNA, 19 nt, Artificial Sequence
  Description of Artificial Sequence: Synthetic oligonucleotide
  Antisense strand to SEQ ID NO: 1989640
acuccaauaacaguguccc

SEQ ID NO: 1989642 - RNA, 19 nt, Artificial Sequence
  Description of Artificial Sequence: Synthetic oligonucleotide
  Sense strand starting at position 1795 of SEQ ID NO: 1880732
uggaguguccuugauucuu

SEQ ID NO: 1989643 - RNA, 19 nt, Artificial Sequence
  Description of Artificial Sequence: Synthetic oligonucleotide
  Antisense strand to SEQ ID NO: 1989642
aagaaucaaggacacucca

SEQ ID NO: 1989644 - RNA, 19 nt, Artificial Sequence
  Description of Artificial Sequence: Synthetic oligonucleotide
  Sense strand starting at position 1812 of SEQ ID NO: 1880732
uugacucucuuaguuuaga

SEQ ID NO: 1989645 - RNA, 19 nt, Artificial Sequence
  Description of Artificial Sequence: Synthetic oligonucleotide
  Antisense strand to SEQ ID NO: 1989644
ucuaaacuaagagagucaa

SEQ ID NO: 1989646 - RNA, 19 nt, Artificial Sequence
  Description of Artificial Sequence: Synthetic oligonucleotide
  Sense strand starting at position 1840 of SEQ ID NO: 1880732
aauacagguguaugugaua

SEQ ID NO: 1989647 - RNA, 19 nt, Artificial Sequence
  Description of Artificial Sequence: Synthetic oligonucleotide
  Antisense strand to SEQ ID NO: 1989646
uaucacauacaccuguauu

SEQ ID NO: 1989648 - RNA, 19 nt, Artificial Sequence
  Description of Artificial Sequence: Synthetic oligonucleotide
  Sense strand starting at position 1925 of SEQ ID NO: 1880732
cuauuaagcaggugugaaa

SEQ ID NO: 1989649 - RNA, 19 nt, Artificial Sequence
  Description of Artificial Sequence: Synthetic oligonucleotide
  Antisense strand to SEQ ID NO: 1989648
uuucacaccugcuuaauag

SEQ ID NO: 1989650 - RNA, 19 nt, Artificial Sequence
  Description of Artificial Sequence: Synthetic oligonucleotide
  Sense strand starting at position 2258 of SEQ ID NO: 1880732
gauuaugggacuuguguau

SEQ ID NO: 1989651 - RNA, 19 nt, Artificial Sequence
  Description of Artificial Sequence: Synthetic oligonucleotide
  Antisense strand to SEQ ID NO: 1989650
auacacaagucccauaauc

SEQ ID NO: 1989652 - RNA, 19 nt, Artificial Sequence
  Description of Artificial Sequence: Synthetic oligonucleotide
  Sense strand starting at position 2262 of SEQ ID NO: 1880732
augggacuuguguauaguu

SEQ ID NO: 1989653 - RNA, 19 nt, Artificial Sequence
  Description of Artificial Sequence: Synthetic oligonucleotide
  Antisense strand to SEQ ID NO: 1989652
aacuauacacaagucccau

SEQ ID NO: 1989654 - RNA, 19 nt, Artificial Sequence
  Description of Artificial Sequence: Synthetic oligonucleotide
  Sense strand starting at position 2405 of SEQ ID NO: 1880732
ugacuugcauuaguacaau

SEQ ID NO: 1989655 - RNA, 19 nt, Artificial Sequence
  Description of Artificial Sequence: Synthetic oligonucleotide
  Antisense strand to SEQ ID NO: 1989654
auuguacuaaugcaaguca

SEQ ID NO: 1989656 - RNA, 19 nt, Artificial Sequence
  Description of Artificial Sequence: Synthetic oligonucleotide
  Sense strand starting at position 2427 of SEQ ID NO: 1880732
gcuguuauacuugaugaac

SEQ ID NO: 1989657 - RNA, 19 nt, Artificial Sequence
  Description of Artificial Sequence: Synthetic oligonucleotide
  Antisense strand to SEQ ID NO: 1989656
guucaucaaguauaacagc

SEQ ID NO: 1989658 - RNA, 19 nt, Artificial Sequence
  Description of Artificial Sequence: Synthetic oligonucleotide
  Sense strand starting at position 2498 of SEQ ID NO: 1880732
acucuuggugcugaacauu

SEQ ID NO: 1989659 - RNA, 19 nt, Artificial Sequence
  Description of Artificial Sequence: Synthetic oligonucleotide
  Antisense strand to SEQ ID NO: 1989658
aauguucagcaccaagagu

SEQ ID NO: 1989660 - RNA, 19 nt, Artificial Sequence
  Description of Artificial Sequence: Synthetic oligonucleotide
  Sense strand starting at position 2508 of SEQ ID NO: 1880732
cugaacauucuaugaguuu

SEQ ID NO: 1989661 - RNA, 19 nt, Artificial Sequence
  Description of Artificial Sequence: Synthetic oligonucleotide
  Antisense strand to SEQ ID NO: 1989660
aaacucauagaauguucag

SEQ ID NO: 1989662 - RNA, 19 nt, Artificial Sequence
  Description of Artificial Sequence: Synthetic oligonucleotide
  Sense strand starting at position 2535 of SEQ ID NO: 1880732
ugaugacaucaauguacca

SEQ ID NO: 1989663 - RNA, 19 nt, Artificial Sequence
  Description of Artificial Sequence: Synthetic oligonucleotide
  Antisense strand to SEQ ID NO: 1989662
ugguacauugaugucauca

SEQ ID NO: 1989664 - RNA, 19 nt, Artificial Sequence
  Description of Artificial Sequence: Synthetic oligonucleotide
  Sense strand starting at position 2850 of SEQ ID NO: 1880732
ccacuuauccacugaagga

SEQ ID NO: 1989665 - RNA, 19 nt, Artificial Sequence
  Description of Artificial Sequence: Synthetic oligonucleotide
  Antisense strand to SEQ ID NO: 1989664
uccuucaguggauaagugg

SEQ ID NO: 1989666 - RNA, 19 nt, Artificial Sequence
  Description of Artificial Sequence: Synthetic oligonucleotide
  Sense strand starting at position 2980 of SEQ ID NO: 1880732
gugugauugcuggauuugu

SEQ ID NO: 1989667 - RNA, 19 nt, Artificial Sequence
  Description of Artificial Sequence: Synthetic oligonucleotide
  Antisense strand to SEQ ID NO: 1989666
acaaauccagcaaucacac

SEQ ID NO: 1989668 - RNA, 19 nt, Artificial Sequence
  Description of Artificial Sequence: Synthetic oligonucleotide
  Sense strand starting at position 3065 of SEQ ID NO: 1880732
gcaguuccagcagaaauga

SEQ ID NO: 1989669 - RNA, 19 nt, Artificial Sequence
  Description of Artificial Sequence: Synthetic oligonucleotide
  Antisense strand to SEQ ID NO: 1989668
ucauuucugcuggaacugc

SEQ ID NO: 1989670 - RNA, 19 nt, Artificial Sequence
  Description of Artificial Sequence: Synthetic oligonucleotide
  Sense strand starting at position 3110 of SEQ ID NO: 1880732
cagcauuugucgucaucac

SEQ ID NO: 1989671 - RNA, 19 nt, Artificial Sequence
  Description of Artificial Sequence: Synthetic oligonucleotide
  Antisense strand to SEQ ID NO: 1989670
gugaugacgacaaaugcug

SEQ ID NO: 1989672 - RNA, 19 nt, Artificial Sequence
  Description of Artificial Sequence: Synthetic oligonucleotide
  Sense strand starting at position 3111 of SEQ ID NO: 1880732
agcauuugucgucaucacu

SEQ ID NO: 1989673 - RNA, 19 nt, Artificial Sequence
  Description of Artificial Sequence: Synthetic oligonucleotide
  Antisense strand to SEQ ID NO: 1989672
agugaugacgacaaaugcu

SEQ ID NO: 1989674 - RNA, 19 nt, Artificial Sequence
  Description of Artificial Sequence: Synthetic oligonucleotide
  Sense strand starting at position 3114 of SEQ ID NO: 1880732
auuugucgucaucacugua

SEQ ID NO: 1989675 - RNA, 19 nt, Artificial Sequence
  Description of Artificial Sequence: Synthetic oligonucleotide
  Antisense strand to SEQ ID NO: 1989674
uacagugaugacgacaaau

SEQ ID NO: 1989676 - RNA, 19 nt, Artificial Sequence
  Description of Artificial Sequence: Synthetic oligonucleotide
  Sense strand starting at position 3119 of SEQ ID NO: 1880732
ucgucaucacuguaucaaa

SEQ ID NO: 1989677 - RNA, 19 nt, Artificial Sequence
  Description of Artificial Sequence: Synthetic oligonucleotide
  Antisense strand to SEQ ID NO: 1989676
uuugauacagugaugacga

SEQ ID NO: 1989678 - RNA, 19 nt, Artificial Sequence
  Description of Artificial Sequence: Synthetic oligonucleotide
  Sense strand starting at position 3168 of SEQ ID NO: 1880732
aucucacaguuguuugaau

SEQ ID NO: 1989679 - RNA, 19 nt, Artificial Sequence
  Description of Artificial Sequence: Synthetic oligonucleotide
  Antisense strand to SEQ ID NO: 1989678
auucaaacaacugugagau

SEQ ID NO: 1989680 - RNA, 19 nt, Artificial Sequence
  Description of Artificial Sequence: Synthetic oligonucleotide
  Sense strand starting at position 3254 of SEQ ID NO: 1880732
uuguuugucccucaugaau

SEQ ID NO: 1989681 - RNA, 19 nt, Artificial Sequence
  Description of Artificial Sequence: Synthetic oligonucleotide
  Antisense strand to SEQ ID NO: 1989680
auucaugagggacaaacaa

SEQ ID NO: 1989682 - RNA, 19 nt, Artificial Sequence
  Description of Artificial Sequence: Synthetic oligonucleotide
  Sense strand starting at position 3722 of SEQ ID NO: 1880732
ucaucagaauucuuguuga

SEQ ID NO: 1989683 - RNA, 19 nt, Artificial Sequence
  Description of Artificial Sequence: Synthetic oligonucleotide
  Antisense strand to SEQ ID NO: 1989682
ucaacaagaauucugauga

SEQ ID NO: 1989684 - RNA, 19 nt, Artificial Sequence
  Description of Artificial Sequence: Synthetic oligonucleotide
  Sense strand starting at position 3725 of SEQ ID NO: 1880732
ucagaauucuuguugaguu

SEQ ID NO: 1989685 - RNA, 19 nt, Artificial Sequence
  Description of Artificial Sequence: Synthetic oligonucleotide
  Antisense strand to SEQ ID NO: 1989684
aacucaacaagaauucuga

SEQ ID NO: 1989686 - RNA, 19 nt, Artificial Sequence
  Description of Artificial Sequence: Synthetic oligonucleotide
  Sense strand starting at position 349 of SEQ ID NO: 1880733
agcacauggccugaaacaa

SEQ ID NO: 1989687 - RNA, 19 nt, Artificial Sequence
  Description of Artificial Sequence: Synthetic oligonucleotide
  Antisense strand to SEQ ID NO: 1989686
uuguuucaggccaugugcu

SEQ ID NO: 1989688 - RNA, 19 nt, Artificial Sequence
  Description of Artificial Sequence: Synthetic oligonucleotide
  Sense strand starting at position 473 of SEQ ID NO: 1880733
gagaguaacuuaucugaug

SEQ ID NO: 1989689 - RNA, 19 nt, Artificial Sequence
  Description of Artificial Sequence: Synthetic oligonucleotide
  Antisense strand to SEQ ID NO: 1989688
caucagauaaguuacucuc

SEQ ID NO: 1989690 - RNA, 19 nt, Artificial Sequence
  Description of Artificial Sequence: Synthetic oligonucleotide
  Sense strand starting at position 474 of SEQ ID NO: 1880733
agaguaacuuaucugaugu

SEQ ID NO: 1989691 - RNA, 19 nt, Artificial Sequence
  Description of Artificial Sequence: Synthetic oligonucleotide
  Antisense strand to SEQ ID NO: 1989690
acaucagauaaguuacucu

SEQ ID NO: 1989692 - RNA, 19 nt, Artificial Sequence
  Description of Artificial Sequence: Synthetic oligonucleotide
  Sense strand starting at position 532 of SEQ ID NO: 1880733
aguuaauucugauccagaa

SEQ ID NO: 1989693 - RNA, 19 nt, Artificial Sequence
  Description of Artificial Sequence: Synthetic oligonucleotide
  Antisense strand to SEQ ID NO: 1989692
uucuggaucagaauuaacu

SEQ ID NO: 1989694 - RNA, 19 nt, Artificial Sequence
  Description of Artificial Sequence: Synthetic oligonucleotide
  Sense strand starting at position 620 of SEQ ID NO: 1880733
caggacuauuuaugagaag

SEQ ID NO: 1989695 - RNA, 19 nt, Artificial Sequence
  Description of Artificial Sequence: Synthetic oligonucleotide
  Antisense strand to SEQ ID NO: 1989694
cuucucauaaauaguccug

SEQ ID NO: 1989696 - RNA, 19 nt, Artificial Sequence
  Description of Artificial Sequence: Synthetic oligonucleotide
  Sense strand starting at position 707 of SEQ ID NO: 1880733
uagauaguucccugaggga

SEQ ID NO: 1989697 - RNA, 19 nt, Artificial Sequence
  Description of Artificial Sequence: Synthetic oligonucleotide
  Antisense strand to SEQ ID NO: 1989696
ucccucagggaacuaucua

SEQ ID NO: 1989698 - RNA, 19 nt, Artificial Sequence
  Description of Artificial Sequence: Synthetic oligonucleotide
  Sense strand starting at position 771 of SEQ ID NO: 1880733
acacaugauccuggguaau

SEQ ID NO: 1989699 - RNA, 19 nt, Artificial Sequence
  Description of Artificial Sequence: Synthetic oligonucleotide
  Antisense strand to SEQ ID NO: 1989698
auuacccaggaucaugugu

SEQ ID NO: 1989700 - RNA, 19 nt, Artificial Sequence
  Description of Artificial Sequence: Synthetic oligonucleotide
  Sense strand starting at position 916 of SEQ ID NO: 1880733
aggugucucacauggaaag

SEQ ID NO: 1989701 - RNA, 19 nt, Artificial Sequence
  Description of Artificial Sequence: Synthetic oligonucleotide
  Antisense strand to SEQ ID NO: 1989700
cuuuccaugugagacaccu

SEQ ID NO: 1989702 - RNA, 19 nt, Artificial Sequence
  Description of Artificial Sequence: Synthetic oligonucleotide
  Sense strand starting at position 917 of SEQ ID NO: 1880733
ggugucucacauggaaaga

SEQ ID NO: 1989703 - RNA, 19 nt, Artificial Sequence
  Description of Artificial Sequence: Synthetic oligonucleotide
  Antisense strand to SEQ ID NO: 1989702
ucuuuccaugugagacacc

SEQ ID NO: 1989704 - RNA, 19 nt, Artificial Sequence
  Description of Artificial Sequence: Synthetic oligonucleotide
  Sense strand starting at position 1205 of SEQ ID NO: 1880733
cuccaauaugagcgacaga

SEQ ID NO: 1989705 - RNA, 19 nt, Artificial Sequence
  Description of Artificial Sequence: Synthetic oligonucleotide
  Antisense strand to SEQ ID NO: 1989704
ucugucgcucauauuggag

SEQ ID NO: 1989706 - RNA, 19 nt, Artificial Sequence
  Description of Artificial Sequence: Synthetic oligonucleotide
  Sense strand starting at position 1421 of SEQ ID NO: 1880733
agaguugacuaguuacaca

SEQ ID NO: 1989707 - RNA, 19 nt, Artificial Sequence
  Description of Artificial Sequence: Synthetic oligonucleotide
  Antisense strand to SEQ ID NO: 1989706
uguguaacuagucaacucu

SEQ ID NO: 1989708 - RNA, 19 nt, Artificial Sequence
  Description of Artificial Sequence: Synthetic oligonucleotide
  Sense strand starting at position 1469 of SEQ ID NO: 1880733
ggagucucuuaauuagaug

SEQ ID NO: 1989709 - RNA, 19 nt, Artificial Sequence
  Description of Artificial Sequence: Synthetic oligonucleotide
  Antisense strand to SEQ ID NO: 1989708
caucuaauuaagagacucc

SEQ ID NO: 1989710 - RNA, 19 nt, Artificial Sequence
  Description of Artificial Sequence: Synthetic oligonucleotide
  Sense strand starting at position 1646 of SEQ ID NO: 1880733
uuugguauccuagagaugu

SEQ ID NO: 1989711 - RNA, 19 nt, Artificial Sequence
  Description of Artificial Sequence: Synthetic oligonucleotide
  Antisense strand to SEQ ID NO: 1989710
acaucucuaggauaccaaa

SEQ ID NO: 1989712 - RNA, 19 nt, Artificial Sequence
  Description of Artificial Sequence: Synthetic oligonucleotide
  Sense strand starting at position 1648 of SEQ ID NO: 1880733
ugguauccuagagauguuc

SEQ ID NO: 1989713 - RNA, 19 nt, Artificial Sequence
  Description of Artificial Sequence: Synthetic oligonucleotide
  Antisense strand to SEQ ID NO: 1989712
gaacaucucuaggauacca

SEQ ID NO: 1989714 - RNA, 19 nt, Artificial Sequence
  Description of Artificial Sequence: Synthetic oligonucleotide
  Sense strand starting at position 1663 of SEQ ID NO: 1880733
guucucauccuagagucua

SEQ ID NO: 1989715 - RNA, 19 nt, Artificial Sequence
  Description of Artificial Sequence: Synthetic oligonucleotide
  Antisense strand to SEQ ID NO: 1989714
uagacucuaggaugagaac

SEQ ID NO: 1989716 - RNA, 19 nt, Artificial Sequence
  Description of Artificial Sequence: Synthetic oligonucleotide
  Sense strand starting at position 1755 of SEQ ID NO: 1880733
augggauggucagcugaau

SEQ ID NO: 1989717 - RNA, 19 nt, Artificial Sequence
  Description of Artificial Sequence: Synthetic oligonucleotide
  Antisense strand to SEQ ID NO: 1989716
auucagcugaccaucccau

SEQ ID NO: 1989718 - RNA, 19 nt, Artificial Sequence
  Description of Artificial Sequence: Synthetic oligonucleotide
  Sense strand starting at position 1779 of SEQ ID NO: 1880733
ucuaccucuuguguauuua

SEQ ID NO: 1989719 - RNA, 19 nt, Artificial Sequence
  Description of Artificial Sequence: Synthetic oligonucleotide
  Antisense strand to SEQ ID NO: 1989718
uaaauacacaagagguaga

SEQ ID NO: 1989720 - RNA, 19 nt, Artificial Sequence
  Description of Artificial Sequence: Synthetic oligonucleotide
  Sense strand starting at position 1903 of SEQ ID NO: 1880733
cugggcuaucuacagacua

SEQ ID NO: 1989721 - RNA, 19 nt, Artificial Sequence
  Description of Artificial Sequence: Synthetic oligonucleotide
  Antisense strand to SEQ ID NO: 1989720
uagucuguagauagcccag

SEQ ID NO: 1989722 - RNA, 19 nt, Artificial Sequence
  Description of Artificial Sequence: Synthetic oligonucleotide
  Sense strand starting at position 2085 of SEQ ID NO: 1880733
cuucucuggguuuauggaa

SEQ ID NO: 1989723 - RNA, 19 nt, Artificial Sequence
  Description of Artificial Sequence: Synthetic oligonucleotide
  Antisense strand to SEQ ID NO: 1989722
uuccauaaacccagagaag

SEQ ID NO: 1989724 - RNA, 19 nt, Artificial Sequence
  Description of Artificial Sequence: Synthetic oligonucleotide
  Sense strand starting at position 2144 of SEQ ID NO: 1880733
ugaagaggugauggucuua

SEQ ID NO: 1989725 - RNA, 19 nt, Artificial Sequence
  Description of Artificial Sequence: Synthetic oligonucleotide
  Antisense strand to SEQ ID NO: 1989724
uaagaccaucaccucuuca

SEQ ID NO: 1989726 - RNA, 19 nt, Artificial Sequence
  Description of Artificial Sequence: Synthetic oligonucleotide
  Sense strand starting at position 2308 of SEQ ID NO: 1880733
guugaaguucuugggagag

SEQ ID NO: 1989727 - RNA, 19 nt, Artificial Sequence
  Description of Artificial Sequence: Synthetic oligonucleotide
  Antisense strand to SEQ ID NO: 1989726
cucucccaagaacuucaac

SEQ ID NO: 1989728 - RNA, 19 nt, Artificial Sequence
  Description of Artificial Sequence: Synthetic oligonucleotide
  Sense strand starting at position 2314 of SEQ ID NO: 1880733
guucuugggagagguaaug

SEQ ID NO: 1989729 - RNA, 19 nt, Artificial Sequence
  Description of Artificial Sequence: Synthetic oligonucleotide
  Antisense strand to SEQ ID NO: 1989728
cauuaccucucccaagaac

SEQ ID NO: 1989730 - RNA, 19 nt, Artificial Sequence
  Description of Artificial Sequence: Synthetic oligonucleotide
  Sense strand starting at position 2411 of SEQ ID NO: 1880733
caagguuuaggucaaaucu

SEQ ID NO: 1989731 - RNA, 19 nt, Artificial Sequence
  Description of Artificial Sequence: Synthetic oligonucleotide
  Antisense strand to SEQ ID NO: 1989730
agauuugaccuaaaccuug

SEQ ID NO: 1989732 - RNA, 19 nt, Artificial Sequence
  Description of Artificial Sequence: Synthetic oligonucleotide
  Sense strand starting at position 2489 of SEQ ID NO: 1880733
uccucagauggucagagua

SEQ ID NO: 1989733 - RNA, 19 nt, Artificial Sequence
  Description of Artificial Sequence: Synthetic oligonucleotide
  Antisense strand to SEQ ID NO: 1989732
uacucugaccaucugagga

SEQ ID NO: 1989734 - RNA, 19 nt, Artificial Sequence
  Description of Artificial Sequence: Synthetic oligonucleotide
  Sense strand starting at position 2573 of SEQ ID NO: 1880733
gcuggaucugauggaauca

SEQ ID NO: 1989735 - RNA, 19 nt, Artificial Sequence
  Description of Artificial Sequence: Synthetic oligonucleotide
  Antisense strand to SEQ ID NO: 1989734
ugauuccaucagauccagc

SEQ ID NO: 1989736 - RNA, 19 nt, Artificial Sequence
  Description of Artificial Sequence: Synthetic oligonucleotide
  Sense strand starting at position 2656 of SEQ ID NO: 1880733
ucuguaaguccagaugaau

SEQ ID NO: 1989737 - RNA, 19 nt, Artificial Sequence
  Description of Artificial Sequence: Synthetic oligonucleotide
  Antisense strand to SEQ ID NO: 1989736
auucaucuggacuuacaga

SEQ ID NO: 1989738 - RNA, 19 nt, Artificial Sequence
  Description of Artificial Sequence: Synthetic oligonucleotide
  Sense strand starting at position 2688 of SEQ ID NO: 1880733
ugggcugucuggagauuug

SEQ ID NO: 1989739 - RNA, 19 nt, Artificial Sequence
  Description of Artificial Sequence: Synthetic oligonucleotide
  Antisense strand to SEQ ID NO: 1989738
caaaucuccagacagccca

SEQ ID NO: 1989740 - RNA, 19 nt, Artificial Sequence
  Description of Artificial Sequence: Synthetic oligonucleotide
  Sense strand starting at position 2706 of SEQ ID NO: 1880733
gggugaaagguuggucaag

SEQ ID NO: 1989741 - RNA, 19 nt, Artificial Sequence
  Description of Artificial Sequence: Synthetic oligonucleotide
  Antisense strand to SEQ ID NO: 1989740
cuugaccaaccuuucaccc

SEQ ID NO: 1989742 - RNA, 19 nt, Artificial Sequence
  Description of Artificial Sequence: Synthetic oligonucleotide
  Sense strand starting at position 2707 of SEQ ID NO: 1880733
ggugaaagguuggucaaga

SEQ ID NO: 1989743 - RNA, 19 nt, Artificial Sequence
  Description of Artificial Sequence: Synthetic oligonucleotide
  Antisense strand to SEQ ID NO: 1989742
ucuugaccaaccuuucacc

SEQ ID NO: 1989744 - RNA, 19 nt, Artificial Sequence
  Description of Artificial Sequence: Synthetic oligonucleotide
  Sense strand starting at position 2708 of SEQ ID NO: 1880733
gugaaagguuggucaagaa

SEQ ID NO: 1989745 - RNA, 19 nt, Artificial Sequence
  Description of Artificial Sequence: Synthetic oligonucleotide
  Antisense strand to SEQ ID NO: 1989744
uucuugaccaaccuuucac

SEQ ID NO: 1989746 - RNA, 19 nt, Artificial Sequence
  Description of Artificial Sequence: Synthetic oligonucleotide
  Sense strand starting at position 2758 of SEQ ID NO: 1880733
auguguuaaguagaaaccu

SEQ ID NO: 1989747 - RNA, 19 nt, Artificial Sequence
  Description of Artificial Sequence: Synthetic oligonucleotide
  Antisense strand to SEQ ID NO: 1989746
agguuucuacuuaacacau

SEQ ID NO: 1989748 - RNA, 19 nt, Artificial Sequence
  Description of Artificial Sequence: Synthetic oligonucleotide
  Sense strand starting at position 3054 of SEQ ID NO: 1880733
accuuaguccuauaguaua

SEQ ID NO: 1989749 - RNA, 19 nt, Artificial Sequence
  Description of Artificial Sequence: Synthetic oligonucleotide
  Antisense strand to SEQ ID NO: 1989748
uauacuauaggacuaaggu

SEQ ID NO: 1989750 - RNA, 19 nt, Artificial Sequence
  Description of Artificial Sequence: Synthetic oligonucleotide
  Sense strand starting at position 3301 of SEQ ID NO: 1880733
ggcaguauggccguauguu

SEQ ID NO: 1989751 - RNA, 19 nt, Artificial Sequence
  Description of Artificial Sequence: Synthetic oligonucleotide
  Antisense strand to SEQ ID NO: 1989750
aacauacggccauacugcc

SEQ ID NO: 1989752 - RNA, 19 nt, Artificial Sequence
  Description of Artificial Sequence: Synthetic oligonucleotide
  Sense strand starting at position 3443 of SEQ ID NO: 1880733
guuaauuguauuuguaggu

SEQ ID NO: 1989753 - RNA, 19 nt, Artificial Sequence
  Description of Artificial Sequence: Synthetic oligonucleotide
  Antisense strand to SEQ ID NO: 1989752
accuacaaauacaauuaac

SEQ ID NO: 1989754 - RNA, 19 nt, Artificial Sequence
  Description of Artificial Sequence: Synthetic oligonucleotide
  Sense strand starting at position 3447 of SEQ ID NO: 1880733
auuguauuuguagguaucu

SEQ ID NO: 1989755 - RNA, 19 nt, Artificial Sequence
  Description of Artificial Sequence: Synthetic oligonucleotide
  Antisense strand to SEQ ID NO: 1989754
agauaccuacaaauacaau

SEQ ID NO: 1989756 - RNA, 19 nt, Artificial Sequence
  Description of Artificial Sequence: Synthetic oligonucleotide
  Sense strand starting at position 3448 of SEQ ID NO: 1880733
uuguauuuguagguaucuu

SEQ ID NO: 1989757 - RNA, 19 nt, Artificial Sequence
  Description of Artificial Sequence: Synthetic oligonucleotide
  Antisense strand to SEQ ID NO: 1989756
aagauaccuacaaauacaa

SEQ ID NO: 1989758 - RNA, 19 nt, Artificial Sequence
  Description of Artificial Sequence: Synthetic oligonucleotide
  Sense strand starting at position 3684 of SEQ ID NO: 1880733
uucucuuccugauugaaug

SEQ ID NO: 1989759 - RNA, 19 nt, Artificial Sequence
  Description of Artificial Sequence: Synthetic oligonucleotide
  Antisense strand to SEQ ID NO: 1989758
cauucaaucaggaagagaa

SEQ ID NO: 1989760 - RNA, 19 nt, Artificial Sequence
  Description of Artificial Sequence: Synthetic oligonucleotide
  Sense strand starting at position 3836 of SEQ ID NO: 1880733
augaguuuggcccauugag

SEQ ID NO: 1989761 - RNA, 19 nt, Artificial Sequence
  Description of Artificial Sequence: Synthetic oligonucleotide
  Antisense strand to SEQ ID NO: 1989760
cucaaugggccaaacucau

SEQ ID NO: 1989762 - RNA, 19 nt, Artificial Sequence
  Description of Artificial Sequence: Synthetic oligonucleotide
  Sense strand starting at position 3857 of SEQ ID NO: 1880733
guggguuugacauagauug

SEQ ID NO: 1989763 - RNA, 19 nt, Artificial Sequence
  Description of Artificial Sequence: Synthetic oligonucleotide
  Antisense strand to SEQ ID NO: 1989762
caaucuaugucaaacccac

SEQ ID NO: 1989764 - RNA, 19 nt, Artificial Sequence
  Description of Artificial Sequence: Synthetic oligonucleotide
  Sense strand starting at position 3859 of SEQ ID NO: 1880733
ggguuugacauagauuguu

SEQ ID NO: 1989765 - RNA, 19 nt, Artificial Sequence
  Description of Artificial Sequence: Synthetic oligonucleotide
  Antisense strand to SEQ ID NO: 1989764
aacaaucuaugucaaaccc

SEQ ID NO: 1989766 - RNA, 19 nt, Artificial Sequence
  Description of Artificial Sequence: Synthetic oligonucleotide
  Sense strand starting at position 186 of SEQ ID NO: 1880734
ugauguaaucaugauagcu

SEQ ID NO: 1989767 - RNA, 19 nt, Artificial Sequence
  Description of Artificial Sequence: Synthetic oligonucleotide
  Antisense strand to SEQ ID NO: 1989766
agcuaucaugauuacauca

SEQ ID NO: 1989768 - RNA, 19 nt, Artificial Sequence
  Description of Artificial Sequence: Synthetic oligonucleotide
  Sense strand starting at position 411 of SEQ ID NO: 1880734
ucuccuuggcaggauuaga

SEQ ID NO: 1989769 - RNA, 19 nt, Artificial Sequence
  Description of Artificial Sequence: Synthetic oligonucleotide
  Antisense strand to SEQ ID NO: 1989768
ucuaauccugccaaggaga

SEQ ID NO: 1989770 - RNA, 19 nt, Artificial Sequence
  Description of Artificial Sequence: Synthetic oligonucleotide
  Sense strand starting at position 420 of SEQ ID NO: 1880734
caggauuagauguagguuu

SEQ ID NO: 1989771 - RNA, 19 nt, Artificial Sequence
  Description of Artificial Sequence: Synthetic oligonucleotide
  Antisense strand to SEQ ID NO: 1989770
aaaccuacaucuaauccug

SEQ ID NO: 1989772 - RNA, 19 nt, Artificial Sequence
  Description of Artificial Sequence: Synthetic oligonucleotide
  Sense strand starting at position 427 of SEQ ID NO: 1880734
agauguagguuucccauga

SEQ ID NO: 1989773 - RNA, 19 nt, Artificial Sequence
  Description of Artificial Sequence: Synthetic oligonucleotide
  Antisense strand to SEQ ID NO: 1989772
ucaugggaaaccuacaucu

SEQ ID NO: 1989774 - RNA, 19 nt, Artificial Sequence
  Description of Artificial Sequence: Synthetic oligonucleotide
  Sense strand starting at position 428 of SEQ ID NO: 1880734
gauguagguuucccaugaa

SEQ ID NO: 1989775 - RNA, 19 nt, Artificial Sequence
  Description of Artificial Sequence: Synthetic oligonucleotide
  Antisense strand to SEQ ID NO: 1989774
uucaugggaaaccuacauc

SEQ ID NO: 1989776 - RNA, 19 nt, Artificial Sequence
  Description of Artificial Sequence: Synthetic oligonucleotide
  Sense strand starting at position 611 of SEQ ID NO: 1880734
uugagaaccugagccaaau

SEQ ID NO: 1989777 - RNA, 19 nt, Artificial Sequence
  Description of Artificial Sequence: Synthetic oligonucleotide
  Antisense strand to SEQ ID NO: 1989776
auuuggcucagguucucaa

SEQ ID NO: 1989778 - RNA, 19 nt, Artificial Sequence
  Description of Artificial Sequence: Synthetic oligonucleotide
  Sense strand starting at position 638 of SEQ ID NO: 1880734
uggcaucucccaggagaug

SEQ ID NO: 1989779 - RNA, 19 nt, Artificial Sequence
  Description of Artificial Sequence: Synthetic oligonucleotide
  Antisense strand to SEQ ID NO: 1989778
caucuccugggagaugcca

SEQ ID NO: 1989780 - RNA, 19 nt, Artificial Sequence
  Description of Artificial Sequence: Synthetic oligonucleotide
  Sense strand starting at position 883 of SEQ ID NO: 1880734
agagguauuuggcauauag

SEQ ID NO: 1989781 - RNA, 19 nt, Artificial Sequence
  Description of Artificial Sequence: Synthetic oligonucleotide
  Antisense strand to SEQ ID NO: 1989780
cuauaugccaaauaccucu

SEQ ID NO: 1989782 - RNA, 19 nt, Artificial Sequence
  Description of Artificial Sequence: Synthetic oligonucleotide
  Sense strand starting at position 893 of SEQ ID NO: 1880734
ggcauauaggguggaguau

SEQ ID NO: 1989783 - RNA, 19 nt, Artificial Sequence
  Description of Artificial Sequence: Synthetic oligonucleotide
  Antisense strand to SEQ ID NO: 1989782
auacuccacccuauaugcc

SEQ ID NO: 1989784 - RNA, 19 nt, Artificial Sequence
  Description of Artificial Sequence: Synthetic oligonucleotide
  Sense strand starting at position 894 of SEQ ID NO: 1880734
gcauauaggguggaguauu

SEQ ID NO: 1989785 - RNA, 19 nt, Artificial Sequence
  Description of Artificial Sequence: Synthetic oligonucleotide
  Antisense strand to SEQ ID NO: 1989784
aauacuccacccuauaugc

SEQ ID NO: 1989786 - RNA, 19 nt, Artificial Sequence
  Description of Artificial Sequence: Synthetic oligonucleotide
  Sense strand starting at position 957 of SEQ ID NO: 1880734
acagcucagccuuggaaua

SEQ ID NO: 1989787 - RNA, 19 nt, Artificial Sequence
  Description of Artificial Sequence: Synthetic oligonucleotide
  Antisense strand to SEQ ID NO: 1989786
uauuccaaggcugagcugu

SEQ ID NO: 1989788 - RNA, 19 nt, Artificial Sequence
  Description of Artificial Sequence: Synthetic oligonucleotide
  Sense strand starting at position 1193 of SEQ ID NO: 1880734
aggcaugacuucucugagu

SEQ ID NO: 1989789 - RNA, 19 nt, Artificial Sequence
  Description of Artificial Sequence: Synthetic oligonucleotide
  Antisense strand to SEQ ID NO: 1989788
acucagagaagucaugccu

SEQ ID NO: 1989790 - RNA, 19 nt, Artificial Sequence
  Description of Artificial Sequence: Synthetic oligonucleotide
  Sense strand starting at position 1198 of SEQ ID NO: 1880734
ugacuucucugagugguca

SEQ ID NO: 1989791 - RNA, 19 nt, Artificial Sequence
  Description of Artificial Sequence: Synthetic oligonucleotide
  Antisense strand to SEQ ID NO: 1989790
ugaccacucagagaaguca

SEQ ID NO: 1989792 - RNA, 19 nt, Artificial Sequence
  Description of Artificial Sequence: Synthetic oligonucleotide
  Sense strand starting at position 1206 of SEQ ID NO: 1880734
cugaguggucaagguaaug

SEQ ID NO: 1989793 - RNA, 19 nt, Artificial Sequence
  Description of Artificial Sequence: Synthetic oligonucleotide
  Antisense strand to SEQ ID NO: 1989792
cauuaccuugaccacucag

SEQ ID NO: 1989794 - RNA, 19 nt, Artificial Sequence
  Description of Artificial Sequence: Synthetic oligonucleotide
  Sense strand starting at position 1356 of SEQ ID NO: 1880734
uuuauagucccacgaacaa

SEQ ID NO: 1989795 - RNA, 19 nt, Artificial Sequence
  Description of Artificial Sequence: Synthetic oligonucleotide
  Antisense strand to SEQ ID NO: 1989794
uuguucgugggacuauaaa

SEQ ID NO: 1989796 - RNA, 19 nt, Artificial Sequence
  Description of Artificial Sequence: Synthetic oligonucleotide
  Sense strand starting at position 1433 of SEQ ID NO: 1880734
ucccaaauggugugagaug

SEQ ID NO: 1989797 - RNA, 19 nt, Artificial Sequence
  Description of Artificial Sequence: Synthetic oligonucleotide
  Antisense strand to SEQ ID NO: 1989796
caucucacaccauuuggga

SEQ ID NO: 1989798 - RNA, 19 nt, Artificial Sequence
  Description of Artificial Sequence: Synthetic oligonucleotide
  Sense strand starting at position 1454 of SEQ ID NO: 1880734
accucauuaugguuugauu

SEQ ID NO: 1989799 - RNA, 19 nt, Artificial Sequence
  Description of Artificial Sequence: Synthetic oligonucleotide
  Antisense strand to SEQ ID NO: 1989798
aaucaaaccauaaugaggu

SEQ ID NO: 1989800 - RNA, 19 nt, Artificial Sequence
  Description of Artificial Sequence: Synthetic oligonucleotide
  Sense strand starting at position 1627 of SEQ ID NO: 1880734
ggauauuaaugcccuguca

SEQ ID NO: 1989801 - RNA, 19 nt, Artificial Sequence
  Description of Artificial Sequence: Synthetic oligonucleotide
  Antisense strand to SEQ ID NO: 1989800
ugacagggcauuaauaucc

SEQ ID NO: 1989802 - RNA, 19 nt, Artificial Sequence
  Description of Artificial Sequence: Synthetic oligonucleotide
  Sense strand starting at position 1645 of SEQ ID NO: 1880734
aaaugaguacuuggcaaac

SEQ ID NO: 1989803 - RNA, 19 nt, Artificial Sequence
  Description of Artificial Sequence: Synthetic oligonucleotide
  Antisense strand to SEQ ID NO: 1989802
guuugccaaguacucauuu

SEQ ID NO: 1989804 - RNA, 19 nt, Artificial Sequence
  Description of Artificial Sequence: Synthetic oligonucleotide
  Sense strand starting at position 1861 of SEQ ID NO: 1880734
gacguauauuuaggaauuu

SEQ ID NO: 1989805 - RNA, 19 nt, Artificial Sequence
  Description of Artificial Sequence: Synthetic oligonucleotide
  Antisense strand to SEQ ID NO: 1989804
aaauuccuaaauauacguc

SEQ ID NO: 1989806 - RNA, 19 nt, Artificial Sequence
  Description of Artificial Sequence: Synthetic oligonucleotide
  Sense strand starting at position 1928 of SEQ ID NO: 1880734
aucuguuagguugauauaa

SEQ ID NO: 1989807 - RNA, 19 nt, Artificial Sequence
  Description of Artificial Sequence: Synthetic oligonucleotide
  Antisense strand to SEQ ID NO: 1989806
uuauaucaaccuaacagau

SEQ ID NO: 1989808 - RNA, 19 nt, Artificial Sequence
  Description of Artificial Sequence: Synthetic oligonucleotide
  Sense strand starting at position 2120 of SEQ ID NO: 1880734
uauagauacgugcauuaau

SEQ ID NO: 1989809 - RNA, 19 nt, Artificial Sequence
  Description of Artificial Sequence: Synthetic oligonucleotide
  Antisense strand to SEQ ID NO: 1989808
auuaaugcacguaucuaua

SEQ ID NO: 1989810 - RNA, 19 nt, Artificial Sequence
  Description of Artificial Sequence: Synthetic oligonucleotide
  Sense strand starting at position 2337 of SEQ ID NO: 1880734
uuucuacuucugugaauga

SEQ ID NO: 1989811 - RNA, 19 nt, Artificial Sequence
  Description of Artificial Sequence: Synthetic oligonucleotide
  Antisense strand to SEQ ID NO: 1989810
ucauucacagaaguagaaa

SEQ ID NO: 1989812 - RNA, 19 nt, Artificial Sequence
  Description of Artificial Sequence: Synthetic oligonucleotide
  Sense strand starting at position 2413 of SEQ ID NO: 1880734
gucuuagucaggcaggagu

SEQ ID NO: 1989813 - RNA, 19 nt, Artificial Sequence
  Description of Artificial Sequence: Synthetic oligonucleotide
  Antisense strand to SEQ ID NO: 1989812
acuccugccugacuaagac

SEQ ID NO: 1989814 - RNA, 19 nt, Artificial Sequence
  Description of Artificial Sequence: Synthetic oligonucleotide
  Sense strand starting at position 2421 of SEQ ID NO: 1880734
caggcaggagugugaucau

SEQ ID NO: 1989815 - RNA, 19 nt, Artificial Sequence
  Description of Artificial Sequence: Synthetic oligonucleotide
  Antisense strand to SEQ ID NO: 1989814
augaucacacuccugccug

SEQ ID NO: 1989816 - RNA, 19 nt, Artificial Sequence
  Description of Artificial Sequence: Synthetic oligonucleotide
  Sense strand starting at position 2432 of SEQ ID NO: 1880734
gugaucauggcucaguuau

SEQ ID NO: 1989817 - RNA, 19 nt, Artificial Sequence
  Description of Artificial Sequence: Synthetic oligonucleotide
  Antisense strand to SEQ ID NO: 1989816
auaacugagccaugaucac

SEQ ID NO: 1989818 - RNA, 19 nt, Artificial Sequence
  Description of Artificial Sequence: Synthetic oligonucleotide
  Sense strand starting at position 2672 of SEQ ID NO: 1880734
cuagaacugcauugguauu

SEQ ID NO: 1989819 - RNA, 19 nt, Artificial Sequence
  Description of Artificial Sequence: Synthetic oligonucleotide
  Antisense strand to SEQ ID NO: 1989818
aauaccaaugcaguucuag

SEQ ID NO: 1989820 - RNA, 19 nt, Artificial Sequence
  Description of Artificial Sequence: Synthetic oligonucleotide
  Sense strand starting at position 2713 of SEQ ID NO: 1880734
uuuagauugcuuuaguuag

SEQ ID NO: 1989821 - RNA, 19 nt, Artificial Sequence
  Description of Artificial Sequence: Synthetic oligonucleotide
  Antisense strand to SEQ ID NO: 1989820
cuaacuaaagcaaucuaaa

SEQ ID NO: 1989822 - RNA, 19 nt, Artificial Sequence
  Description of Artificial Sequence: Synthetic oligonucleotide
  Sense strand starting at position 2942 of SEQ ID NO: 1880734
uuuauugcuaguggauaga

SEQ ID NO: 1989823 - RNA, 19 nt, Artificial Sequence
  Description of Artificial Sequence: Synthetic oligonucleotide
  Antisense strand to SEQ ID NO: 1989822
ucuauccacuagcaauaaa

SEQ ID NO: 1989824 - RNA, 19 nt, Artificial Sequence
  Description of Artificial Sequence: Synthetic oligonucleotide
  Sense strand starting at position 3054 of SEQ ID NO: 1880734
gguguugaaacagagucuu

SEQ ID NO: 1989825 - RNA, 19 nt, Artificial Sequence
  Description of Artificial Sequence: Synthetic oligonucleotide
  Antisense strand to SEQ ID NO: 1989824
aagacucuguuucaacacc

SEQ ID NO: 1989826 - RNA, 19 nt, Artificial Sequence
  Description of Artificial Sequence: Synthetic oligonucleotide
  Sense strand starting at position 3460 of SEQ ID NO: 1880734
guuacauaagaguggugau

SEQ ID NO: 1989827 - RNA, 19 nt, Artificial Sequence
  Description of Artificial Sequence: Synthetic oligonucleotide
  Antisense strand to SEQ ID NO: 1989826
aucaccacucuuauguaac

SEQ ID NO: 1989828 - RNA, 19 nt, Artificial Sequence
  Description of Artificial Sequence: Synthetic oligonucleotide
  Sense strand starting at position 3470 of SEQ ID NO: 1880734
aguggugauggugggaauu

SEQ ID NO: 1989829 - RNA, 19 nt, Artificial Sequence
  Description of Artificial Sequence: Synthetic oligonucleotide
  Antisense strand to SEQ ID NO: 1989828
aauucccaccaucaccacu

SEQ ID NO: 1989830 - RNA, 19 nt, Artificial Sequence
  Description of Artificial Sequence: Synthetic oligonucleotide
  Sense strand starting at position 3471 of SEQ ID NO: 1880734
guggugauggugggaauua

SEQ ID NO: 1989831 - RNA, 19 nt, Artificial Sequence
  Description of Artificial Sequence: Synthetic oligonucleotide
  Antisense strand to SEQ ID NO: 1989830
uaauucccaccaucaccac

SEQ ID NO: 1989832 - RNA, 19 nt, Artificial Sequence
  Description of Artificial Sequence: Synthetic oligonucleotide
  Sense strand starting at position 3495 of SEQ ID NO: 1880734
acauuccaguuguuagaga

SEQ ID NO: 1989833 - RNA, 19 nt, Artificial Sequence
  Description of Artificial Sequence: Synthetic oligonucleotide
  Antisense strand to SEQ ID NO: 1989832
ucucuaacaacuggaaugu

SEQ ID NO: 1989834 - RNA, 19 nt, Artificial Sequence
  Description of Artificial Sequence: Synthetic oligonucleotide
  Sense strand starting at position 3550 of SEQ ID NO: 1880734
agcugaagguaugucauau

SEQ ID NO: 1989835 - RNA, 19 nt, Artificial Sequence
  Description of Artificial Sequence: Synthetic oligonucleotide
  Antisense strand to SEQ ID NO: 1989834
auaugacauaccuucagcu

SEQ ID NO: 1989836 - RNA, 19 nt, Artificial Sequence
  Description of Artificial Sequence: Synthetic oligonucleotide
  Sense strand starting at position 3663 of SEQ ID NO: 1880734
cuauauugacauggucaua

SEQ ID NO: 1989837 - RNA, 19 nt, Artificial Sequence
  Description of Artificial Sequence: Synthetic oligonucleotide
  Antisense strand to SEQ ID NO: 1989836
uaugaccaugucaauauag

SEQ ID NO: 1989838 - RNA, 19 nt, Artificial Sequence
  Description of Artificial Sequence: Synthetic oligonucleotide
  Sense strand starting at position 3859 of SEQ ID NO: 1880734
gggauauuggccuacguuu

SEQ ID NO: 1989839 - RNA, 19 nt, Artificial Sequence
  Description of Artificial Sequence: Synthetic oligonucleotide
  Antisense strand to SEQ ID NO: 1989838
aaacguaggccaauauccc

SEQ ID NO: 1989840 - RNA, 19 nt, Artificial Sequence
  Description of Artificial Sequence: Synthetic oligonucleotide
  Sense strand starting at position 3901 of SEQ ID NO: 1880734
cugguaucugagcaaugcu

SEQ ID NO: 1989841 - RNA, 19 nt, Artificial Sequence
  Description of Artificial Sequence: Synthetic oligonucleotide
  Antisense strand to SEQ ID NO: 1989840
agcauugcucagauaccag

SEQ ID NO: 1989842 - RNA, 19 nt, Artificial Sequence
  Description of Artificial Sequence: Synthetic oligonucleotide
  Sense strand starting at position 3914 of SEQ ID NO: 1880734
aaugcuggccuaugagaau

SEQ ID NO: 1989843 - RNA, 19 nt, Artificial Sequence
  Description of Artificial Sequence: Synthetic oligonucleotide
  Antisense strand to SEQ ID NO: 1989842
auucucauaggccagcauu

SEQ ID NO: 1989844 - RNA, 19 nt, Artificial Sequence
  Description of Artificial Sequence: Synthetic oligonucleotide
  Sense strand starting at position 3920 of SEQ ID NO: 1880734
ggccuaugagaaugaguua

SEQ ID NO: 1989845 - RNA, 19 nt, Artificial Sequence
  Description of Artificial Sequence: Synthetic oligonucleotide
  Antisense strand to SEQ ID NO: 1989844
uaacucauucucauaggcc

SEQ ID NO: 1989846 - RNA, 19 nt, Artificial Sequence
  Description of Artificial Sequence: Synthetic oligonucleotide
  Sense strand starting at position 78 of SEQ ID NO: 1880735
acagguaaaguccaucuau

SEQ ID NO: 1989847 - RNA, 19 nt, Artificial Sequence
  Description of Artificial Sequence: Synthetic oligonucleotide
  Antisense strand to SEQ ID NO: 1989846
auagauggacuuuaccugu

SEQ ID NO: 1989848 - RNA, 19 nt, Artificial Sequence
  Description of Artificial Sequence: Synthetic oligonucleotide
  Sense strand starting at position 250 of SEQ ID NO: 1880735
ugaugucuuacuggagcaa

SEQ ID NO: 1989849 - RNA, 19 nt, Artificial Sequence
  Description of Artificial Sequence: Synthetic oligonucleotide
  Antisense strand to SEQ ID NO: 1989848
uugcuccaguaagacauca

SEQ ID NO: 1989850 - RNA, 19 nt, Artificial Sequence
  Description of Artificial Sequence: Synthetic oligonucleotide
  Sense strand starting at position 251 of SEQ ID NO: 1880735
gaugucuuacuggagcaau

SEQ ID NO: 1989851 - RNA, 19 nt, Artificial Sequence
  Description of Artificial Sequence: Synthetic oligonucleotide
  Antisense strand to SEQ ID NO: 1989850
auugcuccaguaagacauc

SEQ ID NO: 1989852 - RNA, 19 nt, Artificial Sequence
  Description of Artificial Sequence: Synthetic oligonucleotide
  Sense strand starting at position 254 of SEQ ID NO: 1880735
gucuuacuggagcaaugaa

SEQ ID NO: 1989853 - RNA, 19 nt, Artificial Sequence
  Description of Artificial Sequence: Synthetic oligonucleotide
  Antisense strand to SEQ ID NO: 1989852
uucauugcuccaguaagac

SEQ ID NO: 1989854 - RNA, 19 nt, Artificial Sequence
  Description of Artificial Sequence: Synthetic oligonucleotide
  Sense strand starting at position 319 of SEQ ID NO: 1880735
acuagauuacccuggauua

SEQ ID NO: 1989855 - RNA, 19 nt, Artificial Sequence
  Description of Artificial Sequence: Synthetic oligonucleotide
  Antisense strand to SEQ ID NO: 1989854
uaauccaggguaaucuagu

SEQ ID NO: 1989856 - RNA, 19 nt, Artificial Sequence
  Description of Artificial Sequence: Synthetic oligonucleotide
  Sense strand starting at position 320 of SEQ ID NO: 1880735
cuagauuacccuggauuaa

SEQ ID NO: 1989857 - RNA, 19 nt, Artificial Sequence
  Description of Artificial Sequence: Synthetic oligonucleotide
  Antisense strand to SEQ ID NO: 1989856
uuaauccaggguaaucuag

SEQ ID NO: 1989858 - RNA, 19 nt, Artificial Sequence
  Description of Artificial Sequence: Synthetic oligonucleotide
  Sense strand starting at position 543 of SEQ ID NO: 1880735
uggucuucuacuggagacu

SEQ ID NO: 1989859 - RNA, 19 nt, Artificial Sequence
  Description of Artificial Sequence: Synthetic oligonucleotide
  Antisense strand to SEQ ID NO: 1989858
agucuccaguagaagacca

SEQ ID NO: 1989860 - RNA, 19 nt, Artificial Sequence
  Description of Artificial Sequence: Synthetic oligonucleotide
  Sense strand starting at position 605 of SEQ ID NO: 1880735
guaggugauaccuaauguu

SEQ ID NO: 1989861 - RNA, 19 nt, Artificial Sequence
  Description of Artificial Sequence: Synthetic oligonucleotide
  Antisense strand to SEQ ID NO: 1989860
aacauuagguaucaccuac

SEQ ID NO: 1989862 - RNA, 19 nt, Artificial Sequence
  Description of Artificial Sequence: Synthetic oligonucleotide
  Sense strand starting at position 614 of SEQ ID NO: 1880735
accuaauguuauccaugua

SEQ ID NO: 1989863 - RNA, 19 nt, Artificial Sequence
  Description of Artificial Sequence: Synthetic oligonucleotide
  Antisense strand to SEQ ID NO: 1989862
uacauggauaacauuaggu

SEQ ID NO: 1989864 - RNA, 19 nt, Artificial Sequence
  Description of Artificial Sequence: Synthetic oligonucleotide
  Sense strand starting at position 626 of SEQ ID NO: 1880735
ccauguauccgugaagaaa

SEQ ID NO: 1989865 - RNA, 19 nt, Artificial Sequence
  Description of Artificial Sequence: Synthetic oligonucleotide
  Antisense strand to SEQ ID NO: 1989864
uuucuucacggauacaugg

SEQ ID NO: 1989866 - RNA, 19 nt, Artificial Sequence
  Description of Artificial Sequence: Synthetic oligonucleotide
  Sense strand starting at position 891 of SEQ ID NO: 1880735
acuuuaacaugugugauau

SEQ ID NO: 1989867 - RNA, 19 nt, Artificial Sequence
  Description of Artificial Sequence: Synthetic oligonucleotide
  Antisense strand to SEQ ID NO: 1989866
auaucacacauguuaaagu

SEQ ID NO: 1989868 - RNA, 19 nt, Artificial Sequence
  Description of Artificial Sequence: Synthetic oligonucleotide
  Sense strand starting at position 892 of SEQ ID NO: 1880735
cuuuaacaugugugauaua

SEQ ID NO: 1989869 - RNA, 19 nt, Artificial Sequence
  Description of Artificial Sequence: Synthetic oligonucleotide
  Antisense strand to SEQ ID NO: 1989868
uauaucacacauguuaaag

SEQ ID NO: 1989870 - RNA, 19 nt, Artificial Sequence
  Description of Artificial Sequence: Synthetic oligonucleotide
  Sense strand starting at position 1218 of SEQ ID NO: 1880735
ggucauauugguuauagua

SEQ ID NO: 1989871 - RNA, 19 nt, Artificial Sequence
  Description of Artificial Sequence: Synthetic oligonucleotide
  Antisense strand to SEQ ID NO: 1989870
uacuauaaccaauaugacc

SEQ ID NO: 1989872 - RNA, 19 nt, Artificial Sequence
  Description of Artificial Sequence: Synthetic oligonucleotide
  Sense strand starting at position 1447 of SEQ ID NO: 1880735
guugguauccaucauucuu

SEQ ID NO: 1989873 - RNA, 19 nt, Artificial Sequence
  Description of Artificial Sequence: Synthetic oligonucleotide
  Antisense strand to SEQ ID NO: 1989872
aagaaugauggauaccaac

SEQ ID NO: 1989874 - RNA, 19 nt, Artificial Sequence
  Description of Artificial Sequence: Synthetic oligonucleotide
  Sense strand starting at position 1573 of SEQ ID NO: 1880735
ucaugagaauuagcagcuu

SEQ ID NO: 1989875 - RNA, 19 nt, Artificial Sequence
  Description of Artificial Sequence: Synthetic oligonucleotide
  Antisense strand to SEQ ID NO: 1989874
aagcugcuaauucucauga

SEQ ID NO: 1989876 - RNA, 19 nt, Artificial Sequence
  Description of Artificial Sequence: Synthetic oligonucleotide
  Sense strand starting at position 1999 of SEQ ID NO: 1880735
uagaaagauggugguuaua

SEQ ID NO: 1989877 - RNA, 19 nt, Artificial Sequence
  Description of Artificial Sequence: Synthetic oligonucleotide
  Antisense strand to SEQ ID NO: 1989876
uauaaccaccaucuuucua

SEQ ID NO: 1989878 - RNA, 19 nt, Artificial Sequence
  Description of Artificial Sequence: Synthetic oligonucleotide
  Sense strand starting at position 2001 of SEQ ID NO: 1880735
gaaagauggugguuauaca

SEQ ID NO: 1989879 - RNA, 19 nt, Artificial Sequence
  Description of Artificial Sequence: Synthetic oligonucleotide
  Antisense strand to SEQ ID NO: 1989878
uguauaaccaccaucuuuc

SEQ ID NO: 1989880 - RNA, 19 nt, Artificial Sequence
  Description of Artificial Sequence: Synthetic oligonucleotide
  Sense strand starting at position 2064 of SEQ ID NO: 1880735
ucaagugucuuaguaauuu

SEQ ID NO: 1989881 - RNA, 19 nt, Artificial Sequence
  Description of Artificial Sequence: Synthetic oligonucleotide
  Antisense strand to SEQ ID NO: 1989880
aaauuacuaagacacuuga

SEQ ID NO: 1989882 - RNA, 19 nt, Artificial Sequence
  Description of Artificial Sequence: Synthetic oligonucleotide
  Sense strand starting at position 2218 of SEQ ID NO: 1880735
uaugaaaguuccucaaggu

SEQ ID NO: 1989883 - RNA, 19 nt, Artificial Sequence
  Description of Artificial Sequence: Synthetic oligonucleotide
  Antisense strand to SEQ ID NO: 1989882
accuugaggaacuuucaua

SEQ ID NO: 1989884 - RNA, 19 nt, Artificial Sequence
  Description of Artificial Sequence: Synthetic oligonucleotide
  Sense strand starting at position 2219 of SEQ ID NO: 1880735
augaaaguuccucaagguu

SEQ ID NO: 1989885 - RNA, 19 nt, Artificial Sequence
  Description of Artificial Sequence: Synthetic oligonucleotide
  Antisense strand to SEQ ID NO: 1989884
aaccuugaggaacuuucau

SEQ ID NO: 1989886 - RNA, 19 nt, Artificial Sequence
  Description of Artificial Sequence: Synthetic oligonucleotide
  Sense strand starting at position 2233 of SEQ ID NO: 1880735
agguuccugcguguuuaua

SEQ ID NO: 1989887 - RNA, 19 nt, Artificial Sequence
  Description of Artificial Sequence: Synthetic oligonucleotide
  Antisense strand to SEQ ID NO: 1989886
uauaaacacgcaggaaccu

SEQ ID NO: 1989888 - RNA, 19 nt, Artificial Sequence
  Description of Artificial Sequence: Synthetic oligonucleotide
  Sense strand starting at position 2234 of SEQ ID NO: 1880735
gguuccugcguguuuauau

SEQ ID NO: 1989889 - RNA, 19 nt, Artificial Sequence
  Description of Artificial Sequence: Synthetic oligonucleotide
  Antisense strand to SEQ ID NO: 1989888
auauaaacacgcaggaacc

SEQ ID NO: 1989890 - RNA, 19 nt, Artificial Sequence
  Description of Artificial Sequence: Synthetic oligonucleotide
  Sense strand starting at position 2386 of SEQ ID NO: 1880735
accauuacagauugugagu

SEQ ID NO: 1989891 - RNA, 19 nt, Artificial Sequence
  Description of Artificial Sequence: Synthetic oligonucleotide
  Antisense strand to SEQ ID NO: 1989890
acucacaaucuguaauggu

SEQ ID NO: 1989892 - RNA, 19 nt, Artificial Sequence
  Description of Artificial Sequence: Synthetic oligonucleotide
  Sense strand starting at position 2548 of SEQ ID NO: 1880735
guuugcaaacgggauaaau

SEQ ID NO: 1989893 - RNA, 19 nt, Artificial Sequence
  Description of Artificial Sequence: Synthetic oligonucleotide
  Antisense strand to SEQ ID NO: 1989892
auuuaucccguuugcaaac

SEQ ID NO: 1989894 - RNA, 19 nt, Artificial Sequence
  Description of Artificial Sequence: Synthetic oligonucleotide
  Sense strand starting at position 2749 of SEQ ID NO: 1880735
cccagaaugcauuauugau

SEQ ID NO: 1989895 - RNA, 19 nt, Artificial Sequence
  Description of Artificial Sequence: Synthetic oligonucleotide
  Antisense strand to SEQ ID NO: 1989894
aucaauaaugcauucuggg

SEQ ID NO: 1989896 - RNA, 19 nt, Artificial Sequence
  Description of Artificial Sequence: Synthetic oligonucleotide
  Sense strand starting at position 2767 of SEQ ID NO: 1880735
uauggaaaugaguguaauu

SEQ ID NO: 1989897 - RNA, 19 nt, Artificial Sequence
  Description of Artificial Sequence: Synthetic oligonucleotide
  Antisense strand to SEQ ID NO: 1989896
aauuacacucauuuccaua

SEQ ID NO: 1989898 - RNA, 19 nt, Artificial Sequence
  Description of Artificial Sequence: Synthetic oligonucleotide
  Sense strand starting at position 2781 of SEQ ID NO: 1880735
uaauuagcagcguaaauga

SEQ ID NO: 1989899 - RNA, 19 nt, Artificial Sequence
  Description of Artificial Sequence: Synthetic oligonucleotide
  Antisense strand to SEQ ID NO: 1989898
ucauuuacgcugcuaauua

SEQ ID NO: 1989900 - RNA, 19 nt, Artificial Sequence
  Description of Artificial Sequence: Synthetic oligonucleotide
  Sense strand starting at position 2791 of SEQ ID NO: 1880735
cguaaaugaucuguuauuu

SEQ ID NO: 1989901 - RNA, 19 nt, Artificial Sequence
  Description of Artificial Sequence: Synthetic oligonucleotide
  Antisense strand to SEQ ID NO: 1989900
aaauaacagaucauuuacg

SEQ ID NO: 1989902 - RNA, 19 nt, Artificial Sequence
  Description of Artificial Sequence: Synthetic oligonucleotide
  Sense strand starting at position 2817 of SEQ ID NO: 1880735
aagucagagcaguaaauca

SEQ ID NO: 1989903 - RNA, 19 nt, Artificial Sequence
  Description of Artificial Sequence: Synthetic oligonucleotide
  Antisense strand to SEQ ID NO: 1989902
ugauuuacugcucugacuu

SEQ ID NO: 1989904 - RNA, 19 nt, Artificial Sequence
  Description of Artificial Sequence: Synthetic oligonucleotide
  Sense strand starting at position 3060 of SEQ ID NO: 1880735
auauucugccucgaaccua

SEQ ID NO: 1989905 - RNA, 19 nt, Artificial Sequence
  Description of Artificial Sequence: Synthetic oligonucleotide
  Antisense strand to SEQ ID NO: 1989904
uagguucgaggcagaauau

SEQ ID NO: 1989906 - RNA, 19 nt, Artificial Sequence
  Description of Artificial Sequence: Synthetic oligonucleotide
  Sense strand starting at position 3104 of SEQ ID NO: 1880735
uuggguucccugugauuug

SEQ ID NO: 1989907 - RNA, 19 nt, Artificial Sequence
  Description of Artificial Sequence: Synthetic oligonucleotide
  Antisense strand to SEQ ID NO: 1989906
caaaucacagggaacccaa

SEQ ID NO: 1989908 - RNA, 19 nt, Artificial Sequence
  Description of Artificial Sequence: Synthetic oligonucleotide
  Sense strand starting at position 3122 of SEQ ID NO: 1880735
gcacauuggaaguggaaau

SEQ ID NO: 1989909 - RNA, 19 nt, Artificial Sequence
  Description of Artificial Sequence: Synthetic oligonucleotide
  Antisense strand to SEQ ID NO: 1989908
auuuccacuuccaaugugc

SEQ ID NO: 1989910 - RNA, 19 nt, Artificial Sequence
  Description of Artificial Sequence: Synthetic oligonucleotide
  Sense strand starting at position 3154 of SEQ ID NO: 1880735
cuuguaaguguuucgcacu

SEQ ID NO: 1989911 - RNA, 19 nt, Artificial Sequence
  Description of Artificial Sequence: Synthetic oligonucleotide
  Antisense strand to SEQ ID NO: 1989910
agugcgaaacacuuacaag

SEQ ID NO: 1989912 - RNA, 19 nt, Artificial Sequence
  Description of Artificial Sequence: Synthetic oligonucleotide
  Sense strand starting at position 3238 of SEQ ID NO: 1880735
agcaucacuggucauauaa

SEQ ID NO: 1989913 - RNA, 19 nt, Artificial Sequence
  Description of Artificial Sequence: Synthetic oligonucleotide
  Antisense strand to SEQ ID NO: 1989912
uuauaugaccagugaugcu

SEQ ID NO: 1989914 - RNA, 19 nt, Artificial Sequence
  Description of Artificial Sequence: Synthetic oligonucleotide
  Sense strand starting at position 3380 of SEQ ID NO: 1880735
gaaagaaauuggucugccu

SEQ ID NO: 1989915 - RNA, 19 nt, Artificial Sequence
  Description of Artificial Sequence: Synthetic oligonucleotide
  Antisense strand to SEQ ID NO: 1989914
aggcagaccaauuucuuuc

SEQ ID NO: 1989916 - RNA, 19 nt, Artificial Sequence
  Description of Artificial Sequence: Synthetic oligonucleotide
  Sense strand starting at position 3421 of SEQ ID NO: 1880735
uuaauauuccagggaaugu

SEQ ID NO: 1989917 - RNA, 19 nt, Artificial Sequence
  Description of Artificial Sequence: Synthetic oligonucleotide
  Antisense strand to SEQ ID NO: 1989916
acauucccuggaauauuaa

SEQ ID NO: 1989918 - RNA, 19 nt, Artificial Sequence
  Description of Artificial Sequence: Synthetic oligonucleotide
  Sense strand starting at position 3486 of SEQ ID NO: 1880735
ugcuuagugaaaugggaac

SEQ ID NO: 1989919 - RNA, 19 nt, Artificial Sequence
  Description of Artificial Sequence: Synthetic oligonucleotide
  Antisense strand to SEQ ID NO: 1989918
guucccauuucacuaagca

SEQ ID NO: 1989920 - RNA, 19 nt, Artificial Sequence
  Description of Artificial Sequence: Synthetic oligonucleotide
  Sense strand starting at position 3774 of SEQ ID NO: 1880735
uuuauuaagcuauggauuc

SEQ ID NO: 1989921 - RNA, 19 nt, Artificial Sequence
  Description of Artificial Sequence: Synthetic oligonucleotide
  Antisense strand to SEQ ID NO: 1989920
gaauccauagcuuaauaaa

SEQ ID NO: 1989922 - RNA, 19 nt, Artificial Sequence
  Description of Artificial Sequence: Synthetic oligonucleotide
  Sense strand starting at position 3902 of SEQ ID NO: 1880735
uacagagugguuggaacaa

SEQ ID NO: 1989923 - RNA, 19 nt, Artificial Sequence
  Description of Artificial Sequence: Synthetic oligonucleotide
  Antisense strand to SEQ ID NO: 1989922
uuguuccaaccacucugua

SEQ ID NO: 1989924 - RNA, 19 nt, Artificial Sequence
  Description of Artificial Sequence: Synthetic oligonucleotide
  Sense strand starting at position 3912 of SEQ ID NO: 1880735
uuggaacaaugcuuuaauu

SEQ ID NO: 1989925 - RNA, 19 nt, Artificial Sequence
  Description of Artificial Sequence: Synthetic oligonucleotide
  Antisense strand to SEQ ID NO: 1989924
aauuaaagcauuguuccaa

SEQ ID NO: 1989926 - RNA, 19 nt, Artificial Sequence
  Description of Artificial Sequence: Synthetic oligonucleotide
  Sense strand starting at position 119 of SEQ ID NO: 1880736
ucagauaccgcugguuauu

SEQ ID NO: 1989927 - RNA, 19 nt, Artificial Sequence
  Description of Artificial Sequence: Synthetic oligonucleotide
  Antisense strand to SEQ ID NO: 1989926
aauaaccagcgguaucuga

SEQ ID NO: 1989928 - RNA, 19 nt, Artificial Sequence
  Description of Artificial Sequence: Synthetic oligonucleotide
  Sense strand starting at position 275 of SEQ ID NO: 1880736
uggaacagcugcuuuguaa

SEQ ID NO: 1989929 - RNA, 19 nt, Artificial Sequence
  Description of Artificial Sequence: Synthetic oligonucleotide
  Antisense strand to SEQ ID NO: 1989928
uuacaaagcagcuguucca

SEQ ID NO: 1989930 - RNA, 19 nt, Artificial Sequence
  Description of Artificial Sequence: Synthetic oligonucleotide
  Sense strand starting at position 300 of SEQ ID NO: 1880736
cuggcaguuccucaaaugu

SEQ ID NO: 1989931 - RNA, 19 nt, Artificial Sequence
  Description of Artificial Sequence: Synthetic oligonucleotide
  Antisense strand to SEQ ID NO: 1989930
acauuugaggaacugccag

SEQ ID NO: 1989932 - RNA, 19 nt, Artificial Sequence
  Description of Artificial Sequence: Synthetic oligonucleotide
  Sense strand starting at position 348 of SEQ ID NO: 1880736
augccauuccuagguaugu

SEQ ID NO: 1989933 - RNA, 19 nt, Artificial Sequence
  Description of Artificial Sequence: Synthetic oligonucleotide
  Antisense strand to SEQ ID NO: 1989932
acauaccuaggaauggcau

SEQ ID NO: 1989934 - RNA, 19 nt, Artificial Sequence
  Description of Artificial Sequence: Synthetic oligonucleotide
  Sense strand starting at position 349 of SEQ ID NO: 1880736
ugccauuccuagguaugua

SEQ ID NO: 1989935 - RNA, 19 nt, Artificial Sequence
  Description of Artificial Sequence: Synthetic oligonucleotide
  Antisense strand to SEQ ID NO: 1989934
uacauaccuaggaauggca

SEQ ID NO: 1989936 - RNA, 19 nt, Artificial Sequence
  Description of Artificial Sequence: Synthetic oligonucleotide
  Sense strand starting at position 357 of SEQ ID NO: 1880736
cuagguauguaaccaagaa

SEQ ID NO: 1989937 - RNA, 19 nt, Artificial Sequence
  Description of Artificial Sequence: Synthetic oligonucleotide
  Antisense strand to SEQ ID NO: 1989936
uucuugguuacauaccuag

SEQ ID NO: 1989938 - RNA, 19 nt, Artificial Sequence
  Description of Artificial Sequence: Synthetic oligonucleotide
  Sense strand starting at position 421 of SEQ ID NO: 1880736
acagccauguuguuuacaa

SEQ ID NO: 1989939 - RNA, 19 nt, Artificial Sequence
  Description of Artificial Sequence: Synthetic oligonucleotide
  Antisense strand to SEQ ID NO: 1989938
uuguaaacaacauggcugu

SEQ ID NO: 1989940 - RNA, 19 nt, Artificial Sequence
  Description of Artificial Sequence: Synthetic oligonucleotide
  Sense strand starting at position 795 of SEQ ID NO: 1880736
guuguuuguaaugaugaau

SEQ ID NO: 1989941 - RNA, 19 nt, Artificial Sequence
  Description of Artificial Sequence: Synthetic oligonucleotide
  Antisense strand to SEQ ID NO: 1989940
auucaucauuacaaacaac

SEQ ID NO: 1989942 - RNA, 19 nt, Artificial Sequence
  Description of Artificial Sequence: Synthetic oligonucleotide
  Sense strand starting at position 992 of SEQ ID NO: 1880736
uagagauaggaagguuagu

SEQ ID NO: 1989943 - RNA, 19 nt, Artificial Sequence
  Description of Artificial Sequence: Synthetic oligonucleotide
  Antisense strand to SEQ ID NO: 1989942
acuaaccuuccuaucucua

SEQ ID NO: 1989944 - RNA, 19 nt, Artificial Sequence
  Description of Artificial Sequence: Synthetic oligonucleotide
  Sense strand starting at position 997 of SEQ ID NO: 1880736
auaggaagguuagugguaa

SEQ ID NO: 1989945 - RNA, 19 nt, Artificial Sequence
  Description of Artificial Sequence: Synthetic oligonucleotide
  Antisense strand to SEQ ID NO: 1989944
uuaccacuaaccuuccuau

SEQ ID NO: 1989946 - RNA, 19 nt, Artificial Sequence
  Description of Artificial Sequence: Synthetic oligonucleotide
  Sense strand starting at position 1104 of SEQ ID NO: 1880736
aaauuugacuguggugaua

SEQ ID NO: 1989947 - RNA, 19 nt, Artificial Sequence
  Description of Artificial Sequence: Synthetic oligonucleotide
  Antisense strand to SEQ ID NO: 1989946
uaucaccacagucaaauuu

SEQ ID NO: 1989948 - RNA, 19 nt, Artificial Sequence
  Description of Artificial Sequence: Synthetic oligonucleotide
  Sense strand starting at position 1122 of SEQ ID NO: 1880736
aguugcaccuaucuguaaa

SEQ ID NO: 1989949 - RNA, 19 nt, Artificial Sequence
  Description of Artificial Sequence: Synthetic oligonucleotide
  Antisense strand to SEQ ID NO: 1989948
uuuacagauaggugcaacu

SEQ ID NO: 1989950 - RNA, 19 nt, Artificial Sequence
  Description of Artificial Sequence: Synthetic oligonucleotide
  Sense strand starting at position 1172 of SEQ ID NO: 1880736
uggguaaauuguguauaug

SEQ ID NO: 1989951 - RNA, 19 nt, Artificial Sequence
  Description of Artificial Sequence: Synthetic oligonucleotide
  Antisense strand to SEQ ID NO: 1989950
cauauacacaauuuaccca

SEQ ID NO: 1989952 - RNA, 19 nt, Artificial Sequence
  Description of Artificial Sequence: Synthetic oligonucleotide
  Sense strand starting at position 1173 of SEQ ID NO: 1880736
ggguaaauuguguauaugu

SEQ ID NO: 1989953 - RNA, 19 nt, Artificial Sequence
  Description of Artificial Sequence: Synthetic oligonucleotide
  Antisense strand to SEQ ID NO: 1989952
acauauacacaauuuaccc

SEQ ID NO: 1989954 - RNA, 19 nt, Artificial Sequence
  Description of Artificial Sequence: Synthetic oligonucleotide
  Sense strand starting at position 1175 of SEQ ID NO: 1880736
guaaauuguguauauguga

SEQ ID NO: 1989955 - RNA, 19 nt, Artificial Sequence
  Description of Artificial Sequence: Synthetic oligonucleotide
  Antisense strand to SEQ ID NO: 1989954
ucacauauacacaauuuac

SEQ ID NO: 1989956 - RNA, 19 nt, Artificial Sequence
  Description of Artificial Sequence: Synthetic oligonucleotide
  Sense strand starting at position 1184 of SEQ ID NO: 1880736
guauaugugauguauaucu

SEQ ID NO: 1989957 - RNA, 19 nt, Artificial Sequence
  Description of Artificial Sequence: Synthetic oligonucleotide
  Antisense strand to SEQ ID NO: 1989956
agauauacaucacauauac

SEQ ID NO: 1989958 - RNA, 19 nt, Artificial Sequence
  Description of Artificial Sequence: Synthetic oligonucleotide
  Sense strand starting at position 1186 of SEQ ID NO: 1880736
auaugugauguauaucuca

SEQ ID NO: 1989959 - RNA, 19 nt, Artificial Sequence
  Description of Artificial Sequence: Synthetic oligonucleotide
  Antisense strand to SEQ ID NO: 1989958
ugagauauacaucacauau

SEQ ID NO: 1989960 - RNA, 19 nt, Artificial Sequence
  Description of Artificial Sequence: Synthetic oligonucleotide
  Sense strand starting at position 1189 of SEQ ID NO: 1880736
ugugauguauaucucaaua

SEQ ID NO: 1989961 - RNA, 19 nt, Artificial Sequence
  Description of Artificial Sequence: Synthetic oligonucleotide
  Antisense strand to SEQ ID NO: 1989960
uauugagauauacaucaca

SEQ ID NO: 1989962 - RNA, 19 nt, Artificial Sequence
  Description of Artificial Sequence: Synthetic oligonucleotide
  Sense strand starting at position 1277 of SEQ ID NO: 1880736
uugacacaccgauguaauc

SEQ ID NO: 1989963 - RNA, 19 nt, Artificial Sequence
  Description of Artificial Sequence: Synthetic oligonucleotide
  Antisense strand to SEQ ID NO: 1989962
gauuacaucggugugucaa

SEQ ID NO: 1989964 - RNA, 19 nt, Artificial Sequence
  Description of Artificial Sequence: Synthetic oligonucleotide
  Sense strand starting at position 1286 of SEQ ID NO: 1880736
cgauguaaucuauacaccu

SEQ ID NO: 1989965 - RNA, 19 nt, Artificial Sequence
  Description of Artificial Sequence: Synthetic oligonucleotide
  Antisense strand to SEQ ID NO: 1989964
agguguauagauuacaucg

SEQ ID NO: 1989966 - RNA, 19 nt, Artificial Sequence
  Description of Artificial Sequence: Synthetic oligonucleotide
  Sense strand starting at position 1294 of SEQ ID NO: 1880736
ucuauacaccucugacagu

SEQ ID NO: 1989967 - RNA, 19 nt, Artificial Sequence
  Description of Artificial Sequence: Synthetic oligonucleotide
  Antisense strand to SEQ ID NO: 1989966
acugucagagguguauaga

SEQ ID NO: 1989968 - RNA, 19 nt, Artificial Sequence
  Description of Artificial Sequence: Synthetic oligonucleotide
  Sense strand starting at position 1350 of SEQ ID NO: 1880736
cugggaagcagucagcaaa

SEQ ID NO: 1989969 - RNA, 19 nt, Artificial Sequence
  Description of Artificial Sequence: Synthetic oligonucleotide
  Antisense strand to SEQ ID NO: 1989968
uuugcugacugcuucccag

SEQ ID NO: 1989970 - RNA, 19 nt, Artificial Sequence
  Description of Artificial Sequence: Synthetic oligonucleotide
  Sense strand starting at position 1490 of SEQ ID NO: 1880736
ccgguauuacuuugcacaa

SEQ ID NO: 1989971 - RNA, 19 nt, Artificial Sequence
  Description of Artificial Sequence: Synthetic oligonucleotide
  Antisense strand to SEQ ID NO: 1989970
uugugcaaaguaauaccgg

SEQ ID NO: 1989972 - RNA, 19 nt, Artificial Sequence
  Description of Artificial Sequence: Synthetic oligonucleotide
  Sense strand starting at position 1491 of SEQ ID NO: 1880736
cgguauuacuuugcacaaa

SEQ ID NO: 1989973 - RNA, 19 nt, Artificial Sequence
  Description of Artificial Sequence: Synthetic oligonucleotide
  Antisense strand to SEQ ID NO: 1989972
uuugugcaaaguaauaccg

SEQ ID NO: 1989974 - RNA, 19 nt, Artificial Sequence
  Description of Artificial Sequence: Synthetic oligonucleotide
  Sense strand starting at position 1749 of SEQ ID NO: 1880736
cggccaagucuccacagau

SEQ ID NO: 1989975 - RNA, 19 nt, Artificial Sequence
  Description of Artificial Sequence: Synthetic oligonucleotide
  Antisense strand to SEQ ID NO: 1989974
aucuguggagacuuggccg

SEQ ID NO: 1989976 - RNA, 19 nt, Artificial Sequence
  Description of Artificial Sequence: Synthetic oligonucleotide
  Sense strand starting at position 1836 of SEQ ID NO: 1880736
ggaacugucacuugaggac

SEQ ID NO: 1989977 - RNA, 19 nt, Artificial Sequence
  Description of Artificial Sequence: Synthetic oligonucleotide
  Antisense strand to SEQ ID NO: 1989976
guccucaagugacaguucc

SEQ ID NO: 1989978 - RNA, 19 nt, Artificial Sequence
  Description of Artificial Sequence: Synthetic oligonucleotide
  Sense strand starting at position 2007 of SEQ ID NO: 1880736
uagaaagauuccuccgaga

SEQ ID NO: 1989979 - RNA, 19 nt, Artificial Sequence
  Description of Artificial Sequence: Synthetic oligonucleotide
  Antisense strand to SEQ ID NO: 1989978
ucucggaggaaucuuucua

SEQ ID NO: 1989980 - RNA, 19 nt, Artificial Sequence
  Description of Artificial Sequence: Synthetic oligonucleotide
  Sense strand starting at position 2009 of SEQ ID NO: 1880736
gaaagauuccuccgagacc

SEQ ID NO: 1989981 - RNA, 19 nt, Artificial Sequence
  Description of Artificial Sequence: Synthetic oligonucleotide
  Antisense strand to SEQ ID NO: 1989980
ggucucggaggaaucuuuc

SEQ ID NO: 1989982 - RNA, 19 nt, Artificial Sequence
  Description of Artificial Sequence: Synthetic oligonucleotide
  Sense strand starting at position 2211 of SEQ ID NO: 1880736
ggaagaguuuccucuugaa

SEQ ID NO: 1989983 - RNA, 19 nt, Artificial Sequence
  Description of Artificial Sequence: Synthetic oligonucleotide
  Antisense strand to SEQ ID NO: 1989982
uucaagaggaaacucuucc

SEQ ID NO: 1989984 - RNA, 19 nt, Artificial Sequence
  Description of Artificial Sequence: Synthetic oligonucleotide
  Sense strand starting at position 2291 of SEQ ID NO: 1880736
aaugucuauuugcaaggau

SEQ ID NO: 1989985 - RNA, 19 nt, Artificial Sequence
  Description of Artificial Sequence: Synthetic oligonucleotide
  Antisense strand to SEQ ID NO: 1989984
auccuugcaaauagacauu

SEQ ID NO: 1989986 - RNA, 19 nt, Artificial Sequence
  Description of Artificial Sequence: Synthetic oligonucleotide
  Sense strand starting at position 2328 of SEQ ID NO: 1880736
guggcagauugucuucuaa

SEQ ID NO: 1989987 - RNA, 19 nt, Artificial Sequence
  Description of Artificial Sequence: Synthetic oligonucleotide
  Antisense strand to SEQ ID NO: 1989986
uuagaagacaaucugccac

SEQ ID NO: 1989988 - RNA, 19 nt, Artificial Sequence
  Description of Artificial Sequence: Synthetic oligonucleotide
  Sense strand starting at position 2728 of SEQ ID NO: 1880736
gagaaugugcccugagggu

SEQ ID NO: 1989989 - RNA, 19 nt, Artificial Sequence
  Description of Artificial Sequence: Synthetic oligonucleotide
  Antisense strand to SEQ ID NO: 1989988
acccucagggcacauucuc

SEQ ID NO: 1989990 - RNA, 19 nt, Artificial Sequence
  Description of Artificial Sequence: Synthetic oligonucleotide
  Sense strand starting at position 2806 of SEQ ID NO: 1880736
gugcuagugccaucacguu

SEQ ID NO: 1989991 - RNA, 19 nt, Artificial Sequence
  Description of Artificial Sequence: Synthetic oligonucleotide
  Antisense strand to SEQ ID NO: 1989990
aacgugauggcacuagcac

SEQ ID NO: 1989992 - RNA, 19 nt, Artificial Sequence
  Description of Artificial Sequence: Synthetic oligonucleotide
  Sense strand starting at position 2901 of SEQ ID NO: 1880736
ucuccuguggcuuauuaaa

SEQ ID NO: 1989993 - RNA, 19 nt, Artificial Sequence
  Description of Artificial Sequence: Synthetic oligonucleotide
  Antisense strand to SEQ ID NO: 1989992
uuuaauaagccacaggaga

SEQ ID NO: 1989994 - RNA, 19 nt, Artificial Sequence
  Description of Artificial Sequence: Synthetic oligonucleotide
  Sense strand starting at position 2903 of SEQ ID NO: 1880736
uccuguggcuuauuaaaua

SEQ ID NO: 1989995 - RNA, 19 nt, Artificial Sequence
  Description of Artificial Sequence: Synthetic oligonucleotide
  Antisense strand to SEQ ID NO: 1989994
uauuuaauaagccacagga

SEQ ID NO: 1989996 - RNA, 19 nt, Artificial Sequence
  Description of Artificial Sequence: Synthetic oligonucleotide
  Sense strand starting at position 2945 of SEQ ID NO: 1880736
gcacaaaucccuggucucu

SEQ ID NO: 1989997 - RNA, 19 nt, Artificial Sequence
  Description of Artificial Sequence: Synthetic oligonucleotide
  Antisense strand to SEQ ID NO: 1989996
agagaccagggauuugugc

SEQ ID NO: 1989998 - RNA, 19 nt, Artificial Sequence
  Description of Artificial Sequence: Synthetic oligonucleotide
  Sense strand starting at position 3376 of SEQ ID NO: 1880736
gaacgugaguguucagaug

SEQ ID NO: 1989999 - RNA, 19 nt, Artificial Sequence
  Description of Artificial Sequence: Synthetic oligonucleotide
  Antisense strand to SEQ ID NO: 1989998
caucugaacacucacguuc

SEQ ID NO: 1990000 - RNA, 19 nt, Artificial Sequence
  Description of Artificial Sequence: Synthetic oligonucleotide
  Sense strand starting at position 3562 of SEQ ID NO: 1880736
ucaauuagucacugucagu

SEQ ID NO: 1990001 - RNA, 19 nt, Artificial Sequence
  Description of Artificial Sequence: Synthetic oligonucleotide
  Antisense strand to SEQ ID NO: 1990000
acugacagugacuaauuga

SEQ ID NO: 1990002 - RNA, 19 nt, Artificial Sequence
  Description of Artificial Sequence: Synthetic oligonucleotide
  Sense strand starting at position 3612 of SEQ ID NO: 1880736
aaacucugggucugagagu

SEQ ID NO: 1990003 - RNA, 19 nt, Artificial Sequence
  Description of Artificial Sequence: Synthetic oligonucleotide
  Antisense strand to SEQ ID NO: 1990002
acucucagacccagaguuu

SEQ ID NO: 1990004 - RNA, 19 nt, Artificial Sequence
  Description of Artificial Sequence: Synthetic oligonucleotide
  Sense strand starting at position 3640 of SEQ ID NO: 1880736
guggcaucaccagaguaca

SEQ ID NO: 1990005 - RNA, 19 nt, Artificial Sequence
  Description of Artificial Sequence: Synthetic oligonucleotide
  Antisense strand to SEQ ID NO: 1990004
uguacucuggugaugccac

SEQ ID NO: 1990006 - RNA, 19 nt, Artificial Sequence
  Description of Artificial Sequence: Synthetic oligonucleotide
  Sense strand starting at position 32 of SEQ ID NO: 1880737
ggauuacaagugugauuac

SEQ ID NO: 1990007 - RNA, 19 nt, Artificial Sequence
  Description of Artificial Sequence: Synthetic oligonucleotide
  Antisense strand to SEQ ID NO: 1990006
guaaucacacuuguaaucc

SEQ ID NO: 1990008 - RNA, 19 nt, Artificial Sequence
  Description of Artificial Sequence: Synthetic oligonucleotide
  Sense strand starting at position 205 of SEQ ID NO: 1880737
agaccaaacucuguauuag

SEQ ID NO: 1990009 - RNA, 19 nt, Artificial Sequence
  Description of Artificial Sequence: Synthetic oligonucleotide
  Antisense strand to SEQ ID NO: 1990008
cuaauacagaguuuggucu

SEQ ID NO: 1990010 - RNA, 19 nt, Artificial Sequence
  Description of Artificial Sequence: Synthetic oligonucleotide
  Sense strand starting at position 317 of SEQ ID NO: 1880737
acaggucuuaugggacuaa

SEQ ID NO: 1990011 - RNA, 19 nt, Artificial Sequence
  Description of Artificial Sequence: Synthetic oligonucleotide
  Antisense strand to SEQ ID NO: 1990010
uuagucccauaagaccugu

SEQ ID NO: 1990012 - RNA, 19 nt, Artificial Sequence
  Description of Artificial Sequence: Synthetic oligonucleotide
  Sense strand starting at position 486 of SEQ ID NO: 1880737
ggagauccaugaguuacau

SEQ ID NO: 1990013 - RNA, 19 nt, Artificial Sequence
  Description of Artificial Sequence: Synthetic oligonucleotide
  Antisense strand to SEQ ID NO: 1990012
auguaacucauggaucucc

SEQ ID NO: 1990014 - RNA, 19 nt, Artificial Sequence
  Description of Artificial Sequence: Synthetic oligonucleotide
  Sense strand starting at position 517 of SEQ ID NO: 1880737
caaagagcccucuauguga

SEQ ID NO: 1990015 - RNA, 19 nt, Artificial Sequence
  Description of Artificial Sequence: Synthetic oligonucleotide
  Antisense strand to SEQ ID NO: 1990014
ucacauagagggcucuuug

SEQ ID NO: 1990016 - RNA, 19 nt, Artificial Sequence
  Description of Artificial Sequence: Synthetic oligonucleotide
  Sense strand starting at position 524 of SEQ ID NO: 1880737
cccucuaugugacugaaua

SEQ ID NO: 1990017 - RNA, 19 nt, Artificial Sequence
  Description of Artificial Sequence: Synthetic oligonucleotide
  Antisense strand to SEQ ID NO: 1990016
uauucagucacauagaggg

SEQ ID NO: 1990018 - RNA, 19 nt, Artificial Sequence
  Description of Artificial Sequence: Synthetic oligonucleotide
  Sense strand starting at position 525 of SEQ ID NO: 1880737
ccucuaugugacugaauac

SEQ ID NO: 1990019 - RNA, 19 nt, Artificial Sequence
  Description of Artificial Sequence: Synthetic oligonucleotide
  Antisense strand to SEQ ID NO: 1990018
guauucagucacauagagg

SEQ ID NO: 1990020 - RNA, 19 nt, Artificial Sequence
  Description of Artificial Sequence: Synthetic oligonucleotide
  Sense strand starting at position 648 of SEQ ID NO: 1880737
caccuucugugaucuggau

SEQ ID NO: 1990021 - RNA, 19 nt, Artificial Sequence
  Description of Artificial Sequence: Synthetic oligonucleotide
  Antisense strand to SEQ ID NO: 1990020
auccagaucacagaaggug

SEQ ID NO: 1990022 - RNA, 19 nt, Artificial Sequence
  Description of Artificial Sequence: Synthetic oligonucleotide
  Sense strand starting at position 650 of SEQ ID NO: 1880737
ccuucugugaucuggauag

SEQ ID NO: 1990023 - RNA, 19 nt, Artificial Sequence
  Description of Artificial Sequence: Synthetic oligonucleotide
  Antisense strand to SEQ ID NO: 1990022
cuauccagaucacagaagg

SEQ ID NO: 1990024 - RNA, 19 nt, Artificial Sequence
  Description of Artificial Sequence: Synthetic oligonucleotide
  Sense strand starting at position 652 of SEQ ID NO: 1880737
uucugugaucuggauaggu

SEQ ID NO: 1990025 - RNA, 19 nt, Artificial Sequence
  Description of Artificial Sequence: Synthetic oligonucleotide
  Antisense strand to SEQ ID NO: 1990024
accuauccagaucacagaa

SEQ ID NO: 1990026 - RNA, 19 nt, Artificial Sequence
  Description of Artificial Sequence: Synthetic oligonucleotide
  Sense strand starting at position 654 of SEQ ID NO: 1880737
cugugaucuggauagguaa

SEQ ID NO: 1990027 - RNA, 19 nt, Artificial Sequence
  Description of Artificial Sequence: Synthetic oligonucleotide
  Antisense strand to SEQ ID NO: 1990026
uuaccuauccagaucacag

SEQ ID NO: 1990028 - RNA, 19 nt, Artificial Sequence
  Description of Artificial Sequence: Synthetic oligonucleotide
  Sense strand starting at position 656 of SEQ ID NO: 1880737
gugaucuggauagguaauu

SEQ ID NO: 1990029 - RNA, 19 nt, Artificial Sequence
  Description of Artificial Sequence: Synthetic oligonucleotide
  Antisense strand to SEQ ID NO: 1990028
aauuaccuauccagaucac

SEQ ID NO: 1990030 - RNA, 19 nt, Artificial Sequence
  Description of Artificial Sequence: Synthetic oligonucleotide
  Sense strand starting at position 784 of SEQ ID NO: 1880737
ucaccacuuuguguggaaa

SEQ ID NO: 1990031 - RNA, 19 nt, Artificial Sequence
  Description of Artificial Sequence: Synthetic oligonucleotide
  Antisense strand to SEQ ID NO: 1990030
uuuccacacaaagugguga

SEQ ID NO: 1990032 - RNA, 19 nt, Artificial Sequence
  Description of Artificial Sequence: Synthetic oligonucleotide
  Sense strand starting at position 787 of SEQ ID NO: 1880737
ccacuuuguguggaaaucu

SEQ ID NO: 1990033 - RNA, 19 nt, Artificial Sequence
  Description of Artificial Sequence: Synthetic oligonucleotide
  Antisense strand to SEQ ID NO: 1990032
agauuuccacacaaagugg

SEQ ID NO: 1990034 - RNA, 19 nt, Artificial Sequence
  Description of Artificial Sequence: Synthetic oligonucleotide
  Sense strand starting at position 796 of SEQ ID NO: 1880737
guggaaaucucagcuaaac

SEQ ID NO: 1990035 - RNA, 19 nt, Artificial Sequence
  Description of Artificial Sequence: Synthetic oligonucleotide
  Antisense strand to SEQ ID NO: 1990034
guuuagcugagauuuccac

SEQ ID NO: 1990036 - RNA, 19 nt, Artificial Sequence
  Description of Artificial Sequence: Synthetic oligonucleotide
  Sense strand starting at position 1272 of SEQ ID NO: 1880737
guuacuaaucaauauagug

SEQ ID NO: 1990037 - RNA, 19 nt, Artificial Sequence
  Description of Artificial Sequence: Synthetic oligonucleotide
  Antisense strand to SEQ ID NO: 1990036
cacuauauugauuaguaac

SEQ ID NO: 1990038 - RNA, 19 nt, Artificial Sequence
  Description of Artificial Sequence: Synthetic oligonucleotide
  Sense strand starting at position 1379 of SEQ ID NO: 1880737
uugaguaauuaugucauug

SEQ ID NO: 1990039 - RNA, 19 nt, Artificial Sequence
  Description of Artificial Sequence: Synthetic oligonucleotide
  Antisense strand to SEQ ID NO: 1990038
caaugacauaauuacucaa

SEQ ID NO: 1990040 - RNA, 19 nt, Artificial Sequence
  Description of Artificial Sequence: Synthetic oligonucleotide
  Sense strand starting at position 1388 of SEQ ID NO: 1880737
uaugucauugucuaguaag

SEQ ID NO: 1990041 - RNA, 19 nt, Artificial Sequence
  Description of Artificial Sequence: Synthetic oligonucleotide
  Antisense strand to SEQ ID NO: 1990040
cuuacuagacaaugacaua

SEQ ID NO: 1990042 - RNA, 19 nt, Artificial Sequence
  Description of Artificial Sequence: Synthetic oligonucleotide
  Sense strand starting at position 1516 of SEQ ID NO: 1880737
uuguccucccaagauaugu

SEQ ID NO: 1990043 - RNA, 19 nt, Artificial Sequence
  Description of Artificial Sequence: Synthetic oligonucleotide
  Antisense strand to SEQ ID NO: 1990042
acauaucuugggaggacaa

SEQ ID NO: 1990044 - RNA, 19 nt, Artificial Sequence
  Description of Artificial Sequence: Synthetic oligonucleotide
  Sense strand starting at position 1616 of SEQ ID NO: 1880737
gagauaaugguuugcagga

SEQ ID NO: 1990045 - RNA, 19 nt, Artificial Sequence
  Description of Artificial Sequence: Synthetic oligonucleotide
  Antisense strand to SEQ ID NO: 1990044
uccugcaaaccauuaucuc

SEQ ID NO: 1990046 - RNA, 19 nt, Artificial Sequence
  Description of Artificial Sequence: Synthetic oligonucleotide
  Sense strand starting at position 1705 of SEQ ID NO: 1880737
ugacgacguaggcagaaau

SEQ ID NO: 1990047 - RNA, 19 nt, Artificial Sequence
  Description of Artificial Sequence: Synthetic oligonucleotide
  Antisense strand to SEQ ID NO: 1990046
auuucugccuacgucguca

SEQ ID NO: 1990048 - RNA, 19 nt, Artificial Sequence
  Description of Artificial Sequence: Synthetic oligonucleotide
  Sense strand starting at position 1796 of SEQ ID NO: 1880737
gaaggagucuucccuacag

SEQ ID NO: 1990049 - RNA, 19 nt, Artificial Sequence
  Description of Artificial Sequence: Synthetic oligonucleotide
  Antisense strand to SEQ ID NO: 1990048
cuguagggaagacuccuuc

SEQ ID NO: 1990050 - RNA, 19 nt, Artificial Sequence
  Description of Artificial Sequence: Synthetic oligonucleotide
  Sense strand starting at position 2151 of SEQ ID NO: 1880737
cguaaaugaacacgggaau

SEQ ID NO: 1990051 - RNA, 19 nt, Artificial Sequence
  Description of Artificial Sequence: Synthetic oligonucleotide
  Antisense strand to SEQ ID NO: 1990050
auucccguguucauuuacg

SEQ ID NO: 1990052 - RNA, 19 nt, Artificial Sequence
  Description of Artificial Sequence: Synthetic oligonucleotide
  Sense strand starting at position 2162 of SEQ ID NO: 1880737
acgggaauaggucauguuu

SEQ ID NO: 1990053 - RNA, 19 nt, Artificial Sequence
  Description of Artificial Sequence: Synthetic oligonucleotide
  Antisense strand to SEQ ID NO: 1990052
aaacaugaccuauucccgu

SEQ ID NO: 1990054 - RNA, 19 nt, Artificial Sequence
  Description of Artificial Sequence: Synthetic oligonucleotide
  Sense strand starting at position 2340 of SEQ ID NO: 1880737
guguuacaaccaugaaauc

SEQ ID NO: 1990055 - RNA, 19 nt, Artificial Sequence
  Description of Artificial Sequence: Synthetic oligonucleotide
  Antisense strand to SEQ ID NO: 1990054
gauuucaugguuguaacac

SEQ ID NO: 1990056 - RNA, 19 nt, Artificial Sequence
  Description of Artificial Sequence: Synthetic oligonucleotide
  Sense strand starting at position 2360 of SEQ ID NO: 1880737
agauaaaugcaacagugua

SEQ ID NO: 1990057 - RNA, 19 nt, Artificial Sequence
  Description of Artificial Sequence: Synthetic oligonucleotide
  Antisense strand to SEQ ID NO: 1990056
uacacuguugcauuuaucu

SEQ ID NO: 1990058 - RNA, 19 nt, Artificial Sequence
  Description of Artificial Sequence: Synthetic oligonucleotide
  Sense strand starting at position 2433 of SEQ ID NO: 1880737
ucaugaagcucuguacaga

SEQ ID NO: 1990059 - RNA, 19 nt, Artificial Sequence
  Description of Artificial Sequence: Synthetic oligonucleotide
  Antisense strand to SEQ ID NO: 1990058
ucuguacagagcuucauga

SEQ ID NO: 1990060 - RNA, 19 nt, Artificial Sequence
  Description of Artificial Sequence: Synthetic oligonucleotide
  Sense strand starting at position 2549 of SEQ ID NO: 1880737
gaaugaagggcuuagcuau

SEQ ID NO: 1990061 - RNA, 19 nt, Artificial Sequence
  Description of Artificial Sequence: Synthetic oligonucleotide
  Antisense strand to SEQ ID NO: 1990060
auagcuaagcccuucauuc

SEQ ID NO: 1990062 - RNA, 19 nt, Artificial Sequence
  Description of Artificial Sequence: Synthetic oligonucleotide
  Sense strand starting at position 2555 of SEQ ID NO: 1880737
agggcuuagcuauggaaug

SEQ ID NO: 1990063 - RNA, 19 nt, Artificial Sequence
  Description of Artificial Sequence: Synthetic oligonucleotide
  Antisense strand to SEQ ID NO: 1990062
cauuccauagcuaagcccu

SEQ ID NO: 1990064 - RNA, 19 nt, Artificial Sequence
  Description of Artificial Sequence: Synthetic oligonucleotide
  Sense strand starting at position 2557 of SEQ ID NO: 1880737
ggcuuagcuauggaaugau

SEQ ID NO: 1990065 - RNA, 19 nt, Artificial Sequence
  Description of Artificial Sequence: Synthetic oligonucleotide
  Antisense strand to SEQ ID NO: 1990064
aucauuccauagcuaagcc

SEQ ID NO: 1990066 - RNA, 19 nt, Artificial Sequence
  Description of Artificial Sequence: Synthetic oligonucleotide
  Sense strand starting at position 2560 of SEQ ID NO: 1880737
uuagcuauggaaugauaua

SEQ ID NO: 1990067 - RNA, 19 nt, Artificial Sequence
  Description of Artificial Sequence: Synthetic oligonucleotide
  Antisense strand to SEQ ID NO: 1990066
uauaucauuccauagcuaa

SEQ ID NO: 1990068 - RNA, 19 nt, Artificial Sequence
  Description of Artificial Sequence: Synthetic oligonucleotide
  Sense strand starting at position 2785 of SEQ ID NO: 1880737
guaagucuccaugaucuag

SEQ ID NO: 1990069 - RNA, 19 nt, Artificial Sequence
  Description of Artificial Sequence: Synthetic oligonucleotide
  Antisense strand to SEQ ID NO: 1990068
cuagaucauggagacuuac

SEQ ID NO: 1990070 - RNA, 19 nt, Artificial Sequence
  Description of Artificial Sequence: Synthetic oligonucleotide
  Sense strand starting at position 2927 of SEQ ID NO: 1880737
uagauauagcuguauuaug

SEQ ID NO: 1990071 - RNA, 19 nt, Artificial Sequence
  Description of Artificial Sequence: Synthetic oligonucleotide
  Antisense strand to SEQ ID NO: 1990070
cauaauacagcuauaucua

SEQ ID NO: 1990072 - RNA, 19 nt, Artificial Sequence
  Description of Artificial Sequence: Synthetic oligonucleotide
  Sense strand starting at position 2994 of SEQ ID NO: 1880737
agucuuguuauuggaagaa

SEQ ID NO: 1990073 - RNA, 19 nt, Artificial Sequence
  Description of Artificial Sequence: Synthetic oligonucleotide
  Antisense strand to SEQ ID NO: 1990072
uucuuccaauaacaagacu

SEQ ID NO: 1990074 - RNA, 19 nt, Artificial Sequence
  Description of Artificial Sequence: Synthetic oligonucleotide
  Sense strand starting at position 2998 of SEQ ID NO: 1880737
uuguuauuggaagaauggu

SEQ ID NO: 1990075 - RNA, 19 nt, Artificial Sequence
  Description of Artificial Sequence: Synthetic oligonucleotide
  Antisense strand to SEQ ID NO: 1990074
accauucuuccaauaacaa

SEQ ID NO: 1990076 - RNA, 19 nt, Artificial Sequence
  Description of Artificial Sequence: Synthetic oligonucleotide
  Sense strand starting at position 3049 of SEQ ID NO: 1880737
gcuaguuugaaaugaagaa

SEQ ID NO: 1990077 - RNA, 19 nt, Artificial Sequence
  Description of Artificial Sequence: Synthetic oligonucleotide
  Antisense strand to SEQ ID NO: 1990076
uucuucauuucaaacuagc

SEQ ID NO: 1990078 - RNA, 19 nt, Artificial Sequence
  Description of Artificial Sequence: Synthetic oligonucleotide
  Sense strand starting at position 3082 of SEQ ID NO: 1880737
guaugaugcuggucauuug

SEQ ID NO: 1990079 - RNA, 19 nt, Artificial Sequence
  Description of Artificial Sequence: Synthetic oligonucleotide
  Antisense strand to SEQ ID NO: 1990078
caaaugaccagcaucauac

SEQ ID NO: 1990080 - RNA, 19 nt, Artificial Sequence
  Description of Artificial Sequence: Synthetic oligonucleotide
  Sense strand starting at position 3085 of SEQ ID NO: 1880737
ugaugcuggucauuuguaa

SEQ ID NO: 1990081 - RNA, 19 nt, Artificial Sequence
  Description of Artificial Sequence: Synthetic oligonucleotide
  Antisense strand to SEQ ID NO: 1990080
uuacaaaugaccagcauca

SEQ ID NO: 1990082 - RNA, 19 nt, Artificial Sequence
  Description of Artificial Sequence: Synthetic oligonucleotide
  Sense strand starting at position 3129 of SEQ ID NO: 1880737
uccuuuagggcauacuuua

SEQ ID NO: 1990083 - RNA, 19 nt, Artificial Sequence
  Description of Artificial Sequence: Synthetic oligonucleotide
  Antisense strand to SEQ ID NO: 1990082
uaaaguaugcccuaaagga

SEQ ID NO: 1990084 - RNA, 19 nt, Artificial Sequence
  Description of Artificial Sequence: Synthetic oligonucleotide
  Sense strand starting at position 3458 of SEQ ID NO: 1880737
uggaaaguuuaaguaaguu

SEQ ID NO: 1990085 - RNA, 19 nt, Artificial Sequence
  Description of Artificial Sequence: Synthetic oligonucleotide
  Antisense strand to SEQ ID NO: 1990084
aacuuacuuaaacuuucca

SEQ ID NO: 1990086 - RNA, 19 nt, Artificial Sequence
  Description of Artificial Sequence: Synthetic oligonucleotide
  Sense strand starting at position 2 of SEQ ID NO: 1880738
ugccaagaaucuuuauggu

SEQ ID NO: 1990087 - RNA, 19 nt, Artificial Sequence
  Description of Artificial Sequence: Synthetic oligonucleotide
  Antisense strand to SEQ ID NO: 1990086
accauaaagauucuuggca

SEQ ID NO: 1990088 - RNA, 19 nt, Artificial Sequence
  Description of Artificial Sequence: Synthetic oligonucleotide
  Sense strand starting at position 61 of SEQ ID NO: 1880738
uguuuauuacaggaaccuu

SEQ ID NO: 1990089 - RNA, 19 nt, Artificial Sequence
  Description of Artificial Sequence: Synthetic oligonucleotide
  Antisense strand to SEQ ID NO: 1990088
aagguuccuguaauaaaca

SEQ ID NO: 1990090 - RNA, 19 nt, Artificial Sequence
  Description of Artificial Sequence: Synthetic oligonucleotide
  Sense strand starting at position 347 of SEQ ID NO: 1880738
gggagcauauaugcacaaa

SEQ ID NO: 1990091 - RNA, 19 nt, Artificial Sequence
  Description of Artificial Sequence: Synthetic oligonucleotide
  Antisense strand to SEQ ID NO: 1990090
uuugugcauauaugcuccc

SEQ ID NO: 1990092 - RNA, 19 nt, Artificial Sequence
  Description of Artificial Sequence: Synthetic oligonucleotide
  Sense strand starting at position 426 of SEQ ID NO: 1880738
gcagaacaauuugauaaga

SEQ ID NO: 1990093 - RNA, 19 nt, Artificial Sequence
  Description of Artificial Sequence: Synthetic oligonucleotide
  Antisense strand to SEQ ID NO: 1990092
ucuuaucaaauuguucugc

SEQ ID NO: 1990094 - RNA, 19 nt, Artificial Sequence
  Description of Artificial Sequence: Synthetic oligonucleotide
  Sense strand starting at position 431 of SEQ ID NO: 1880738
acaauuugauaagaggcau

SEQ ID NO: 1990095 - RNA, 19 nt, Artificial Sequence
  Description of Artificial Sequence: Synthetic oligonucleotide
  Antisense strand to SEQ ID NO: 1990094
augccucuuaucaaauugu

SEQ ID NO: 1990096 - RNA, 19 nt, Artificial Sequence
  Description of Artificial Sequence: Synthetic oligonucleotide
  Sense strand starting at position 462 of SEQ ID NO: 1880738
aagcaagaugcaugugagu

SEQ ID NO: 1990097 - RNA, 19 nt, Artificial Sequence
  Description of Artificial Sequence: Synthetic oligonucleotide
  Antisense strand to SEQ ID NO: 1990096
acucacaugcaucuugcuu

SEQ ID NO: 1990098 - RNA, 19 nt, Artificial Sequence
  Description of Artificial Sequence: Synthetic oligonucleotide
  Sense strand starting at position 521 of SEQ ID NO: 1880738
guugaucuguaaguggaua

SEQ ID NO: 1990099 - RNA, 19 nt, Artificial Sequence
  Description of Artificial Sequence: Synthetic oligonucleotide
  Antisense strand to SEQ ID NO: 1990098
uauccacuuacagaucaac

SEQ ID NO: 1990100 - RNA, 19 nt, Artificial Sequence
  Description of Artificial Sequence: Synthetic oligonucleotide
  Sense strand starting at position 523 of SEQ ID NO: 1880738
ugaucuguaaguggauaaa

SEQ ID NO: 1990101 - RNA, 19 nt, Artificial Sequence
  Description of Artificial Sequence: Synthetic oligonucleotide
  Antisense strand to SEQ ID NO: 1990100
uuuauccacuuacagauca

SEQ ID NO: 1990102 - RNA, 19 nt, Artificial Sequence
  Description of Artificial Sequence: Synthetic oligonucleotide
  Sense strand starting at position 844 of SEQ ID NO: 1880738
guuccuuuccauuagugga

SEQ ID NO: 1990103 - RNA, 19 nt, Artificial Sequence
  Description of Artificial Sequence: Synthetic oligonucleotide
  Antisense strand to SEQ ID NO: 1990102
uccacuaauggaaaggaac

SEQ ID NO: 1990104 - RNA, 19 nt, Artificial Sequence
  Description of Artificial Sequence: Synthetic oligonucleotide
  Sense strand starting at position 846 of SEQ ID NO: 1880738
uccuuuccauuaguggaua

SEQ ID NO: 1990105 - RNA, 19 nt, Artificial Sequence
  Description of Artificial Sequence: Synthetic oligonucleotide
  Antisense strand to SEQ ID NO: 1990104
uauccacuaauggaaagga

SEQ ID NO: 1990106 - RNA, 19 nt, Artificial Sequence
  Description of Artificial Sequence: Synthetic oligonucleotide
  Sense strand starting at position 849 of SEQ ID NO: 1880738
uuuccauuaguggauaacu

SEQ ID NO: 1990107 - RNA, 19 nt, Artificial Sequence
  Description of Artificial Sequence: Synthetic oligonucleotide
  Antisense strand to SEQ ID NO: 1990106
aguuauccacuaauggaaa

SEQ ID NO: 1990108 - RNA, 19 nt, Artificial Sequence
  Description of Artificial Sequence: Synthetic oligonucleotide
  Sense strand starting at position 858 of SEQ ID NO: 1880738
guggauaacuaaguuuauc

SEQ ID NO: 1990109 - RNA, 19 nt, Artificial Sequence
  Description of Artificial Sequence: Synthetic oligonucleotide
  Antisense strand to SEQ ID NO: 1990108
gauaaacuuaguuauccac

SEQ ID NO: 1990110 - RNA, 19 nt, Artificial Sequence
  Description of Artificial Sequence: Synthetic oligonucleotide
  Sense strand starting at position 1219 of SEQ ID NO: 1880738
ggugacacauugccuguaa

SEQ ID NO: 1990111 - RNA, 19 nt, Artificial Sequence
  Description of Artificial Sequence: Synthetic oligonucleotide
  Antisense strand to SEQ ID NO: 1990110
uuacaggcaaugugucacc

SEQ ID NO: 1990112 - RNA, 19 nt, Artificial Sequence
  Description of Artificial Sequence: Synthetic oligonucleotide
  Sense strand starting at position 1221 of SEQ ID NO: 1880738
ugacacauugccuguaauc

SEQ ID NO: 1990113 - RNA, 19 nt, Artificial Sequence
  Description of Artificial Sequence: Synthetic oligonucleotide
  Antisense strand to SEQ ID NO: 1990112
gauuacaggcaauguguca

SEQ ID NO: 1990114 - RNA, 19 nt, Artificial Sequence
  Description of Artificial Sequence: Synthetic oligonucleotide
  Sense strand starting at position 1864 of SEQ ID NO: 1880738
agggcuaacuaguuaagga

SEQ ID NO: 1990115 - RNA, 19 nt, Artificial Sequence
  Description of Artificial Sequence: Synthetic oligonucleotide
  Antisense strand to SEQ ID NO: 1990114
uccuuaacuaguuagcccu

SEQ ID NO: 1990116 - RNA, 19 nt, Artificial Sequence
  Description of Artificial Sequence: Synthetic oligonucleotide
  Sense strand starting at position 1878 of SEQ ID NO: 1880738
aaggacuaguuccuuaaag

SEQ ID NO: 1990117 - RNA, 19 nt, Artificial Sequence
  Description of Artificial Sequence: Synthetic oligonucleotide
  Antisense strand to SEQ ID NO: 1990116
cuuuaaggaacuaguccuu

SEQ ID NO: 1990118 - RNA, 19 nt, Artificial Sequence
  Description of Artificial Sequence: Synthetic oligonucleotide
  Sense strand starting at position 1880 of SEQ ID NO: 1880738
ggacuaguuccuuaaagca

SEQ ID NO: 1990119 - RNA, 19 nt, Artificial Sequence
  Description of Artificial Sequence: Synthetic oligonucleotide
  Antisense strand to SEQ ID NO: 1990118
ugcuuuaaggaacuagucc

SEQ ID NO: 1990120 - RNA, 19 nt, Artificial Sequence
  Description of Artificial Sequence: Synthetic oligonucleotide
  Sense strand starting at position 2011 of SEQ ID NO: 1880738
gggacagguucuccaggau

SEQ ID NO: 1990121 - RNA, 19 nt, Artificial Sequence
  Description of Artificial Sequence: Synthetic oligonucleotide
  Antisense strand to SEQ ID NO: 1990120
auccuggagaaccuguccc

SEQ ID NO: 1990122 - RNA, 19 nt, Artificial Sequence
  Description of Artificial Sequence: Synthetic oligonucleotide
  Sense strand starting at position 2014 of SEQ ID NO: 1880738
acagguucuccaggauaag

SEQ ID NO: 1990123 - RNA, 19 nt, Artificial Sequence
  Description of Artificial Sequence: Synthetic oligonucleotide
  Antisense strand to SEQ ID NO: 1990122
cuuauccuggagaaccugu

SEQ ID NO: 1990124 - RNA, 19 nt, Artificial Sequence
  Description of Artificial Sequence: Synthetic oligonucleotide
  Sense strand starting at position 2359 of SEQ ID NO: 1880738
uuacauugagccgagaucu

SEQ ID NO: 1990125 - RNA, 19 nt, Artificial Sequence
  Description of Artificial Sequence: Synthetic oligonucleotide
  Antisense strand to SEQ ID NO: 1990124
agaucucggcucaauguaa

SEQ ID NO: 1990126 - RNA, 19 nt, Artificial Sequence
  Description of Artificial Sequence: Synthetic oligonucleotide
  Sense strand starting at position 2371 of SEQ ID NO: 1880738
gagaucuugccaugacacu

SEQ ID NO: 1990127 - RNA, 19 nt, Artificial Sequence
  Description of Artificial Sequence: Synthetic oligonucleotide
  Antisense strand to SEQ ID NO: 1990126
agugucauggcaagaucuc

SEQ ID NO: 1990128 - RNA, 19 nt, Artificial Sequence
  Description of Artificial Sequence: Synthetic oligonucleotide
  Sense strand starting at position 2404 of SEQ ID NO: 1880738
agagcaauagucugucuua

SEQ ID NO: 1990129 - RNA, 19 nt, Artificial Sequence
  Description of Artificial Sequence: Synthetic oligonucleotide
  Antisense strand to SEQ ID NO: 1990128
uaagacagacuauugcucu

SEQ ID NO: 1990130 - RNA, 19 nt, Artificial Sequence
  Description of Artificial Sequence: Synthetic oligonucleotide
  Sense strand starting at position 2405 of SEQ ID NO: 1880738
gagcaauagucugucuuaa

SEQ ID NO: 1990131 - RNA, 19 nt, Artificial Sequence
  Description of Artificial Sequence: Synthetic oligonucleotide
  Antisense strand to SEQ ID NO: 1990130
uuaagacagacuauugcuc

SEQ ID NO: 1990132 - RNA, 19 nt, Artificial Sequence
  Description of Artificial Sequence: Synthetic oligonucleotide
  Sense strand starting at position 2407 of SEQ ID NO: 1880738
gcaauagucugucuuaaag

SEQ ID NO: 1990133 - RNA, 19 nt, Artificial Sequence
  Description of Artificial Sequence: Synthetic oligonucleotide
  Antisense strand to SEQ ID NO: 1990132
cuuuaagacagacuauugc

SEQ ID NO: 1990134 - RNA, 19 nt, Artificial Sequence
  Description of Artificial Sequence: Synthetic oligonucleotide
  Sense strand starting at position 2522 of SEQ ID NO: 1880738
aucacuggcuguccuuaua

SEQ ID NO: 1990135 - RNA, 19 nt, Artificial Sequence
  Description of Artificial Sequence: Synthetic oligonucleotide
  Antisense strand to SEQ ID NO: 1990134
uauaaggacagccagugau

SEQ ID NO: 1990136 - RNA, 19 nt, Artificial Sequence
  Description of Artificial Sequence: Synthetic oligonucleotide
  Sense strand starting at position 2654 of SEQ ID NO: 1880738
ugaagugcacuguaaagaa

SEQ ID NO: 1990137 - RNA, 19 nt, Artificial Sequence
  Description of Artificial Sequence: Synthetic oligonucleotide
  Antisense strand to SEQ ID NO: 1990136
uucuuuacagugcacuuca

SEQ ID NO: 1990138 - RNA, 19 nt, Artificial Sequence
  Description of Artificial Sequence: Synthetic oligonucleotide
  Sense strand starting at position 2696 of SEQ ID NO: 1880738
auguuuguaccacacaaca

SEQ ID NO: 1990139 - RNA, 19 nt, Artificial Sequence
  Description of Artificial Sequence: Synthetic oligonucleotide
  Antisense strand to SEQ ID NO: 1990138
uguugugugguacaaacau

SEQ ID NO: 1990140 - RNA, 19 nt, Artificial Sequence
  Description of Artificial Sequence: Synthetic oligonucleotide
  Sense strand starting at position 2822 of SEQ ID NO: 1880738
ggaaucauccauugauauu

SEQ ID NO: 1990141 - RNA, 19 nt, Artificial Sequence
  Description of Artificial Sequence: Synthetic oligonucleotide
  Antisense strand to SEQ ID NO: 1990140
aauaucaauggaugauucc

SEQ ID NO: 1990142 - RNA, 19 nt, Artificial Sequence
  Description of Artificial Sequence: Synthetic oligonucleotide
  Sense strand starting at position 2852 of SEQ ID NO: 1880738
guaccaguuuaauuagaaa

SEQ ID NO: 1990143 - RNA, 19 nt, Artificial Sequence
  Description of Artificial Sequence: Synthetic oligonucleotide
  Antisense strand to SEQ ID NO: 1990142
uuucuaauuaaacugguac

SEQ ID NO: 1990144 - RNA, 19 nt, Artificial Sequence
  Description of Artificial Sequence: Synthetic oligonucleotide
  Sense strand starting at position 2878 of SEQ ID NO: 1880738
uuuacuuaguauccaagua

SEQ ID NO: 1990145 - RNA, 19 nt, Artificial Sequence
  Description of Artificial Sequence: Synthetic oligonucleotide
  Antisense strand to SEQ ID NO: 1990144
uacuuggauacuaaguaaa

SEQ ID NO: 1990146 - RNA, 19 nt, Artificial Sequence
  Description of Artificial Sequence: Synthetic oligonucleotide
  Sense strand starting at position 2890 of SEQ ID NO: 1880738
ccaaguaucugcccauaga

SEQ ID NO: 1990147 - RNA, 19 nt, Artificial Sequence
  Description of Artificial Sequence: Synthetic oligonucleotide
  Antisense strand to SEQ ID NO: 1990146
ucuaugggcagauacuugg

SEQ ID NO: 1990148 - RNA, 19 nt, Artificial Sequence
  Description of Artificial Sequence: Synthetic oligonucleotide
  Sense strand starting at position 2893 of SEQ ID NO: 1880738
aguaucugcccauagauua

SEQ ID NO: 1990149 - RNA, 19 nt, Artificial Sequence
  Description of Artificial Sequence: Synthetic oligonucleotide
  Antisense strand to SEQ ID NO: 1990148
uaaucuaugggcagauacu

SEQ ID NO: 1990150 - RNA, 19 nt, Artificial Sequence
  Description of Artificial Sequence: Synthetic oligonucleotide
  Sense strand starting at position 3045 of SEQ ID NO: 1880738
gacacaagaucgcuuaagu

SEQ ID NO: 1990151 - RNA, 19 nt, Artificial Sequence
  Description of Artificial Sequence: Synthetic oligonucleotide
  Antisense strand to SEQ ID NO: 1990150
acuuaagcgaucuuguguc

SEQ ID NO: 1990152 - RNA, 19 nt, Artificial Sequence
  Description of Artificial Sequence: Synthetic oligonucleotide
  Sense strand starting at position 3520 of SEQ ID NO: 1880738
ccaagaaacuguucgauau

SEQ ID NO: 1990153 - RNA, 19 nt, Artificial Sequence
  Description of Artificial Sequence: Synthetic oligonucleotide
  Antisense strand to SEQ ID NO: 1990152
auaucgaacaguuucuugg

SEQ ID NO: 1990154 - RNA, 19 nt, Artificial Sequence
  Description of Artificial Sequence: Synthetic oligonucleotide
  Sense strand starting at position 3521 of SEQ ID NO: 1880738
caagaaacuguucgauauu

SEQ ID NO: 1990155 - RNA, 19 nt, Artificial Sequence
  Description of Artificial Sequence: Synthetic oligonucleotide
  Antisense strand to SEQ ID NO: 1990154
aauaucgaacaguuucuug

SEQ ID NO: 1990156 - RNA, 19 nt, Artificial Sequence
  Description of Artificial Sequence: Synthetic oligonucleotide
  Sense strand starting at position 3621 of SEQ ID NO: 1880738
aaaggacaauauugggaaa

SEQ ID NO: 1990157 - RNA, 19 nt, Artificial Sequence
  Description of Artificial Sequence: Synthetic oligonucleotide
  Antisense strand to SEQ ID NO: 1990156
uuucccaauauuguccuuu

SEQ ID NO: 1990158 - RNA, 19 nt, Artificial Sequence
  Description of Artificial Sequence: Synthetic oligonucleotide
  Sense strand starting at position 3640 of SEQ ID NO: 1880738
augggcacaacgugauaua

SEQ ID NO: 1990159 - RNA, 19 nt, Artificial Sequence
  Description of Artificial Sequence: Synthetic oligonucleotide
  Antisense strand to SEQ ID NO: 1990158
uauaucacguugugcccau

SEQ ID NO: 1990160 - RNA, 19 nt, Artificial Sequence
  Description of Artificial Sequence: Synthetic oligonucleotide
  Sense strand starting at position 3641 of SEQ ID NO: 1880738
ugggcacaacgugauauaa

SEQ ID NO: 1990161 - RNA, 19 nt, Artificial Sequence
  Description of Artificial Sequence: Synthetic oligonucleotide
  Antisense strand to SEQ ID NO: 1990160
uuauaucacguugugccca

SEQ ID NO: 1990162 - RNA, 19 nt, Artificial Sequence
  Description of Artificial Sequence: Synthetic oligonucleotide
  Sense strand starting at position 3973 of SEQ ID NO: 1880738
uccuaaauuugaucguugu

SEQ ID NO: 1990163 - RNA, 19 nt, Artificial Sequence
  Description of Artificial Sequence: Synthetic oligonucleotide
  Antisense strand to SEQ ID NO: 1990162
acaacgaucaaauuuagga

SEQ ID NO: 1990164 - RNA, 19 nt, Artificial Sequence
  Description of Artificial Sequence: Synthetic oligonucleotide
  Sense strand starting at position 3974 of SEQ ID NO: 1880738
ccuaaauuugaucguugua

SEQ ID NO: 1990165 - RNA, 19 nt, Artificial Sequence
  Description of Artificial Sequence: Synthetic oligonucleotide
  Antisense strand to SEQ ID NO: 1990164
uacaacgaucaaauuuagg

SEQ ID NO: 1990166 - RNA, 19 nt, Artificial Sequence
  Description of Artificial Sequence: Synthetic oligonucleotide
  Sense strand starting at position 22 of SEQ ID NO: 1880739
ccugaugugucagugggaa

SEQ ID NO: 1990167 - RNA, 19 nt, Artificial Sequence
  Description of Artificial Sequence: Synthetic oligonucleotide
  Antisense strand to SEQ ID NO: 1990166
uucccacugacacaucagg

SEQ ID NO: 1990168 - RNA, 19 nt, Artificial Sequence
  Description of Artificial Sequence: Synthetic oligonucleotide
  Sense strand starting at position 24 of SEQ ID NO: 1880739
ugaugugucagugggaaug

SEQ ID NO: 1990169 - RNA, 19 nt, Artificial Sequence
  Description of Artificial Sequence: Synthetic oligonucleotide
  Antisense strand to SEQ ID NO: 1990168
cauucccacugacacauca

SEQ ID NO: 1990170 - RNA, 19 nt, Artificial Sequence
  Description of Artificial Sequence: Synthetic oligonucleotide
  Sense strand starting at position 35 of SEQ ID NO: 1880739
ugggaauguucuguguaug

SEQ ID NO: 1990171 - RNA, 19 nt, Artificial Sequence
  Description of Artificial Sequence: Synthetic oligonucleotide
  Antisense strand to SEQ ID NO: 1990170
cauacacagaacauuccca

SEQ ID NO: 1990172 - RNA, 19 nt, Artificial Sequence
  Description of Artificial Sequence: Synthetic oligonucleotide
  Sense strand starting at position 36 of SEQ ID NO: 1880739
gggaauguucuguguauga

SEQ ID NO: 1990173 - RNA, 19 nt, Artificial Sequence
  Description of Artificial Sequence: Synthetic oligonucleotide
  Antisense strand to SEQ ID NO: 1990172
ucauacacagaacauuccc

SEQ ID NO: 1990174 - RNA, 19 nt, Artificial Sequence
  Description of Artificial Sequence: Synthetic oligonucleotide
  Sense strand starting at position 38 of SEQ ID NO: 1880739
gaauguucuguguaugaug

SEQ ID NO: 1990175 - RNA, 19 nt, Artificial Sequence
  Description of Artificial Sequence: Synthetic oligonucleotide
  Antisense strand to SEQ ID NO: 1990174
caucauacacagaacauuc

SEQ ID NO: 1990176 - RNA, 19 nt, Artificial Sequence
  Description of Artificial Sequence: Synthetic oligonucleotide
  Sense strand starting at position 49 of SEQ ID NO: 1880739
guaugaugcaccgagacaa

SEQ ID NO: 1990177 - RNA, 19 nt, Artificial Sequence
  Description of Artificial Sequence: Synthetic oligonucleotide
  Antisense strand to SEQ ID NO: 1990176
uugucucggugcaucauac

SEQ ID NO: 1990178 - RNA, 19 nt, Artificial Sequence
  Description of Artificial Sequence: Synthetic oligonucleotide
  Sense strand starting at position 81 of SEQ ID NO: 1880739
auuggaucuuaaguguuau

SEQ ID NO: 1990179 - RNA, 19 nt, Artificial Sequence
  Description of Artificial Sequence: Synthetic oligonucleotide
  Antisense strand to SEQ ID NO: 1990178
auaacacuuaagauccaau

SEQ ID NO: 1990180 - RNA, 19 nt, Artificial Sequence
  Description of Artificial Sequence: Synthetic oligonucleotide
  Sense strand starting at position 92 of SEQ ID NO: 1880739
aguguuauuaagcaggcaa

SEQ ID NO: 1990181 - RNA, 19 nt, Artificial Sequence
  Description of Artificial Sequence: Synthetic oligonucleotide
  Antisense strand to SEQ ID NO: 1990180
uugccugcuuaauaacacu

SEQ ID NO: 1990182 - RNA, 19 nt, Artificial Sequence
  Description of Artificial Sequence: Synthetic oligonucleotide
  Sense strand starting at position 105 of SEQ ID NO: 1880739
aggcaauugucauucuuag

SEQ ID NO: 1990183 - RNA, 19 nt, Artificial Sequence
  Description of Artificial Sequence: Synthetic oligonucleotide
  Antisense strand to SEQ ID NO: 1990182
cuaagaaugacaauugccu

SEQ ID NO: 1990184 - RNA, 19 nt, Artificial Sequence
  Description of Artificial Sequence: Synthetic oligonucleotide
  Sense strand starting at position 607 of SEQ ID NO: 1880739
ggacuaaucuuuccucaug

SEQ ID NO: 1990185 - RNA, 19 nt, Artificial Sequence
  Description of Artificial Sequence: Synthetic oligonucleotide
  Antisense strand to SEQ ID NO: 1990184
caugaggaaagauuagucc

SEQ ID NO: 1990186 - RNA, 19 nt, Artificial Sequence
  Description of Artificial Sequence: Synthetic oligonucleotide
  Sense strand starting at position 624 of SEQ ID NO: 1880739
ugugcuuuagaacguauuu

SEQ ID NO: 1990187 - RNA, 19 nt, Artificial Sequence
  Description of Artificial Sequence: Synthetic oligonucleotide
  Antisense strand to SEQ ID NO: 1990186
aaauacguucuaaagcaca

SEQ ID NO: 1990188 - RNA, 19 nt, Artificial Sequence
  Description of Artificial Sequence: Synthetic oligonucleotide
  Sense strand starting at position 666 of SEQ ID NO: 1880739
uuuacuuaauccuugugga

SEQ ID NO: 1990189 - RNA, 19 nt, Artificial Sequence
  Description of Artificial Sequence: Synthetic oligonucleotide
  Antisense strand to SEQ ID NO: 1990188
uccacaaggauuaaguaaa

SEQ ID NO: 1990190 - RNA, 19 nt, Artificial Sequence
  Description of Artificial Sequence: Synthetic oligonucleotide
  Sense strand starting at position 667 of SEQ ID NO: 1880739
uuacuuaauccuuguggaa

SEQ ID NO: 1990191 - RNA, 19 nt, Artificial Sequence
  Description of Artificial Sequence: Synthetic oligonucleotide
  Antisense strand to SEQ ID NO: 1990190
uuccacaaggauuaaguaa

SEQ ID NO: 1990192 - RNA, 19 nt, Artificial Sequence
  Description of Artificial Sequence: Synthetic oligonucleotide
  Sense strand starting at position 733 of SEQ ID NO: 1880739
uucuuuggccuagaguuga

SEQ ID NO: 1990193 - RNA, 19 nt, Artificial Sequence
  Description of Artificial Sequence: Synthetic oligonucleotide
  Antisense strand to SEQ ID NO: 1990192
ucaacucuaggccaaagaa

SEQ ID NO: 1990194 - RNA, 19 nt, Artificial Sequence
  Description of Artificial Sequence: Synthetic oligonucleotide
  Sense strand starting at position 795 of SEQ ID NO: 1880739
caagguugagguuauguuu

SEQ ID NO: 1990195 - RNA, 19 nt, Artificial Sequence
  Description of Artificial Sequence: Synthetic oligonucleotide
  Antisense strand to SEQ ID NO: 1990194
aaacauaaccucaaccuug

SEQ ID NO: 1990196 - RNA, 19 nt, Artificial Sequence
  Description of Artificial Sequence: Synthetic oligonucleotide
  Sense strand starting at position 831 of SEQ ID NO: 1880739
gagaauggcugaucaccuu

SEQ ID NO: 1990197 - RNA, 19 nt, Artificial Sequence
  Description of Artificial Sequence: Synthetic oligonucleotide
  Antisense strand to SEQ ID NO: 1990196
aaggugaucagccauucuc

SEQ ID NO: 1990198 - RNA, 19 nt, Artificial Sequence
  Description of Artificial Sequence: Synthetic oligonucleotide
  Sense strand starting at position 993 of SEQ ID NO: 1880739
ggauaauggcaguguauga

SEQ ID NO: 1990199 - RNA, 19 nt, Artificial Sequence
  Description of Artificial Sequence: Synthetic oligonucleotide
  Antisense strand to SEQ ID NO: 1990198
ucauacacugccauuaucc

SEQ ID NO: 1990200 - RNA, 19 nt, Artificial Sequence
  Description of Artificial Sequence: Synthetic oligonucleotide
  Sense strand starting at position 1000 of SEQ ID NO: 1880739
ggcaguguaugauuuguca

SEQ ID NO: 1990201 - RNA, 19 nt, Artificial Sequence
  Description of Artificial Sequence: Synthetic oligonucleotide
  Antisense strand to SEQ ID NO: 1990200
ugacaaaucauacacugcc

SEQ ID NO: 1990202 - RNA, 19 nt, Artificial Sequence
  Description of Artificial Sequence: Synthetic oligonucleotide
  Sense strand starting at position 1037 of SEQ ID NO: 1880739
agugucaauaccuguggga

SEQ ID NO: 1990203 - RNA, 19 nt, Artificial Sequence
  Description of Artificial Sequence: Synthetic oligonucleotide
  Antisense strand to SEQ ID NO: 1990202
ucccacagguauugacacu

SEQ ID NO: 1990204 - RNA, 19 nt, Artificial Sequence
  Description of Artificial Sequence: Synthetic oligonucleotide
  Sense strand starting at position 1137 of SEQ ID NO: 1880739
cuggguacacagcaauaau

SEQ ID NO: 1990205 - RNA, 19 nt, Artificial Sequence
  Description of Artificial Sequence: Synthetic oligonucleotide
  Antisense strand to SEQ ID NO: 1990204
auuauugcuguguacccag

SEQ ID NO: 1990206 - RNA, 19 nt, Artificial Sequence
  Description of Artificial Sequence: Synthetic oligonucleotide
  Sense strand starting at position 1484 of SEQ ID NO: 1880739
gcuucugugaguuagacuu

SEQ ID NO: 1990207 - RNA, 19 nt, Artificial Sequence
  Description of Artificial Sequence: Synthetic oligonucleotide
  Antisense strand to SEQ ID NO: 1990206
aagucuaacucacagaagc

SEQ ID NO: 1990208 - RNA, 19 nt, Artificial Sequence
  Description of Artificial Sequence: Synthetic oligonucleotide
  Sense strand starting at position 1931 of SEQ ID NO: 1880739
ggaauaaagcugugggauu

SEQ ID NO: 1990209 - RNA, 19 nt, Artificial Sequence
  Description of Artificial Sequence: Synthetic oligonucleotide
  Antisense strand to SEQ ID NO: 1990208
aaucccacagcuuuauucc

SEQ ID NO: 1990210 - RNA, 19 nt, Artificial Sequence
  Description of Artificial Sequence: Synthetic oligonucleotide
  Sense strand starting at position 1942 of SEQ ID NO: 1880739
gugggauugccauacauga

SEQ ID NO: 1990211 - RNA, 19 nt, Artificial Sequence
  Description of Artificial Sequence: Synthetic oligonucleotide
  Antisense strand to SEQ ID NO: 1990210
ucauguauggcaaucccac

SEQ ID NO: 1990212 - RNA, 19 nt, Artificial Sequence
  Description of Artificial Sequence: Synthetic oligonucleotide
  Sense strand starting at position 1984 of SEQ ID NO: 1880739
aaagucuauguauggcaau

SEQ ID NO: 1990213 - RNA, 19 nt, Artificial Sequence
  Description of Artificial Sequence: Synthetic oligonucleotide
  Antisense strand to SEQ ID NO: 1990212
auugccauacauagacuuu

SEQ ID NO: 1990214 - RNA, 19 nt, Artificial Sequence
  Description of Artificial Sequence: Synthetic oligonucleotide
  Sense strand starting at position 2259 of SEQ ID NO: 1880739
cuaauaaauuggguaacgu

SEQ ID NO: 1990215 - RNA, 19 nt, Artificial Sequence
  Description of Artificial Sequence: Synthetic oligonucleotide
  Antisense strand to SEQ ID NO: 1990214
acguuacccaauuuauuag

SEQ ID NO: 1990216 - RNA, 19 nt, Artificial Sequence
  Description of Artificial Sequence: Synthetic oligonucleotide
  Sense strand starting at position 2260 of SEQ ID NO: 1880739
uaauaaauuggguaacguu

SEQ ID NO: 1990217 - RNA, 19 nt, Artificial Sequence
  Description of Artificial Sequence: Synthetic oligonucleotide
  Antisense strand to SEQ ID NO: 1990216
aacguuacccaauuuauua

SEQ ID NO: 1990218 - RNA, 19 nt, Artificial Sequence
  Description of Artificial Sequence: Synthetic oligonucleotide
  Sense strand starting at position 2270 of SEQ ID NO: 1880739
gguaacguugcagaauaca

SEQ ID NO: 1990219 - RNA, 19 nt, Artificial Sequence
  Description of Artificial Sequence: Synthetic oligonucleotide
  Antisense strand to SEQ ID NO: 1990218
uguauucugcaacguuacc

SEQ ID NO: 1990220 - RNA, 19 nt, Artificial Sequence
  Description of Artificial Sequence: Synthetic oligonucleotide
  Sense strand starting at position 3179 of SEQ ID NO: 1880739
agacauuucucagaauaga

SEQ ID NO: 1990221 - RNA, 19 nt, Artificial Sequence
  Description of Artificial Sequence: Synthetic oligonucleotide
  Antisense strand to SEQ ID NO: 1990220
ucuauucugagaaaugucu

SEQ ID NO: 1990222 - RNA, 19 nt, Artificial Sequence
  Description of Artificial Sequence: Synthetic oligonucleotide
  Sense strand starting at position 3240 of SEQ ID NO: 1880739
acuaaucauugagaaauga

SEQ ID NO: 1990223 - RNA, 19 nt, Artificial Sequence
  Description of Artificial Sequence: Synthetic oligonucleotide
  Antisense strand to SEQ ID NO: 1990222
ucauuucucaaugauuagu

SEQ ID NO: 1990224 - RNA, 19 nt, Artificial Sequence
  Description of Artificial Sequence: Synthetic oligonucleotide
  Sense strand starting at position 3346 of SEQ ID NO: 1880739
guaugcucuuauuugguaa

SEQ ID NO: 1990225 - RNA, 19 nt, Artificial Sequence
  Description of Artificial Sequence: Synthetic oligonucleotide
  Antisense strand to SEQ ID NO: 1990224
uuaccaaauaagagcauac

SEQ ID NO: 1990226 - RNA, 19 nt, Artificial Sequence
  Description of Artificial Sequence: Synthetic oligonucleotide
  Sense strand starting at position 3465 of SEQ ID NO: 1880739
uccaguuugugauuccuaa

SEQ ID NO: 1990227 - RNA, 19 nt, Artificial Sequence
  Description of Artificial Sequence: Synthetic oligonucleotide
  Antisense strand to SEQ ID NO: 1990226
uuaggaaucacaaacugga

SEQ ID NO: 1990228 - RNA, 19 nt, Artificial Sequence
  Description of Artificial Sequence: Synthetic oligonucleotide
  Sense strand starting at position 3500 of SEQ ID NO: 1880739
uaggguaggcccuggaaau

SEQ ID NO: 1990229 - RNA, 19 nt, Artificial Sequence
  Description of Artificial Sequence: Synthetic oligonucleotide
  Antisense strand to SEQ ID NO: 1990228
auuuccagggccuacccua

SEQ ID NO: 1990230 - RNA, 19 nt, Artificial Sequence
  Description of Artificial Sequence: Synthetic oligonucleotide
  Sense strand starting at position 3501 of SEQ ID NO: 1880739
aggguaggcccuggaaaua

SEQ ID NO: 1990231 - RNA, 19 nt, Artificial Sequence
  Description of Artificial Sequence: Synthetic oligonucleotide
  Antisense strand to SEQ ID NO: 1990230
uauuuccagggccuacccu

SEQ ID NO: 1990232 - RNA, 19 nt, Artificial Sequence
  Description of Artificial Sequence: Synthetic oligonucleotide
  Sense strand starting at position 3665 of SEQ ID NO: 1880739
gggaucaugucagcaugaa

SEQ ID NO: 1990233 - RNA, 19 nt, Artificial Sequence
  Description of Artificial Sequence: Synthetic oligonucleotide
  Antisense strand to SEQ ID NO: 1990232
uucaugcugacaugauccc

SEQ ID NO: 1990234 - RNA, 19 nt, Artificial Sequence
  Description of Artificial Sequence: Synthetic oligonucleotide
  Sense strand starting at position 3669 of SEQ ID NO: 1880739
ucaugucagcaugaaauaa

SEQ ID NO: 1990235 - RNA, 19 nt, Artificial Sequence
  Description of Artificial Sequence: Synthetic oligonucleotide
  Antisense strand to SEQ ID NO: 1990234
uuauuucaugcugacauga

SEQ ID NO: 1990236 - RNA, 19 nt, Artificial Sequence
  Description of Artificial Sequence: Synthetic oligonucleotide
  Sense strand starting at position 3696 of SEQ ID NO: 1880739
auauaaagcgcuuagugga

SEQ ID NO: 1990237 - RNA, 19 nt, Artificial Sequence
  Description of Artificial Sequence: Synthetic oligonucleotide
  Antisense strand to SEQ ID NO: 1990236
uccacuaagcgcuuuauau

SEQ ID NO: 1990238 - RNA, 19 nt, Artificial Sequence
  Description of Artificial Sequence: Synthetic oligonucleotide
  Sense strand starting at position 3704 of SEQ ID NO: 1880739
cgcuuaguggaguaucuga

SEQ ID NO: 1990239 - RNA, 19 nt, Artificial Sequence
  Description of Artificial Sequence: Synthetic oligonucleotide
  Antisense strand to SEQ ID NO: 1990238
ucagauacuccacuaagcg

SEQ ID NO: 1990240 - RNA, 19 nt, Artificial Sequence
  Description of Artificial Sequence: Synthetic oligonucleotide
  Sense strand starting at position 3715 of SEQ ID NO: 1880739
guaucugacacauaagugu

SEQ ID NO: 1990241 - RNA, 19 nt, Artificial Sequence
  Description of Artificial Sequence: Synthetic oligonucleotide
  Antisense strand to SEQ ID NO: 1990240
acacuuaugugucagauac

SEQ ID NO: 1990242 - RNA, 19 nt, Artificial Sequence
  Description of Artificial Sequence: Synthetic oligonucleotide
  Sense strand starting at position 3724 of SEQ ID NO: 1880739
acauaaguguuauuauggu

SEQ ID NO: 1990243 - RNA, 19 nt, Artificial Sequence
  Description of Artificial Sequence: Synthetic oligonucleotide
  Antisense strand to SEQ ID NO: 1990242
accauaauaacacuuaugu

SEQ ID NO: 1990244 - RNA, 19 nt, Artificial Sequence
  Description of Artificial Sequence: Synthetic oligonucleotide
  Sense strand starting at position 3730 of SEQ ID NO: 1880739
guguuauuaugguuauuug

SEQ ID NO: 1990245 - RNA, 19 nt, Artificial Sequence
  Description of Artificial Sequence: Synthetic oligonucleotide
  Antisense strand to SEQ ID NO: 1990244
caaauaaccauaauaacac

SEQ ID NO: 1990246 - RNA, 19 nt, Artificial Sequence
  Description of Artificial Sequence: Synthetic oligonucleotide
  Sense strand starting at position 186 of SEQ ID NO: 1880740
ugucccuagcuuuaguaaa

SEQ ID NO: 1990247 - RNA, 19 nt, Artificial Sequence
  Description of Artificial Sequence: Synthetic oligonucleotide
  Antisense strand to SEQ ID NO: 1990246
uuuacuaaagcuagggaca

SEQ ID NO: 1990248 - RNA, 19 nt, Artificial Sequence
  Description of Artificial Sequence: Synthetic oligonucleotide
  Sense strand starting at position 493 of SEQ ID NO: 1880740
agggacuagcugcauuaau

SEQ ID NO: 1990249 - RNA, 19 nt, Artificial Sequence
  Description of Artificial Sequence: Synthetic oligonucleotide
  Antisense strand to SEQ ID NO: 1990248
auuaaugcagcuagucccu

SEQ ID NO: 1990250 - RNA, 19 nt, Artificial Sequence
  Description of Artificial Sequence: Synthetic oligonucleotide
  Sense strand starting at position 740 of SEQ ID NO: 1880740
ugaauuuccuagucugcuu

SEQ ID NO: 1990251 - RNA, 19 nt, Artificial Sequence
  Description of Artificial Sequence: Synthetic oligonucleotide
  Antisense strand to SEQ ID NO: 1990250
aagcagacuaggaaauuca

SEQ ID NO: 1990252 - RNA, 19 nt, Artificial Sequence
  Description of Artificial Sequence: Synthetic oligonucleotide
  Sense strand starting at position 855 of SEQ ID NO: 1880740
cugauuuacugcuaagaag

SEQ ID NO: 1990253 - RNA, 19 nt, Artificial Sequence
  Description of Artificial Sequence: Synthetic oligonucleotide
  Antisense strand to SEQ ID NO: 1990252
cuucuuagcaguaaaucag

SEQ ID NO: 1990254 - RNA, 19 nt, Artificial Sequence
  Description of Artificial Sequence: Synthetic oligonucleotide
  Sense strand starting at position 864 of SEQ ID NO: 1880740
ugcuaagaagcuuaaaggu

SEQ ID NO: 1990255 - RNA, 19 nt, Artificial Sequence
  Description of Artificial Sequence: Synthetic oligonucleotide
  Antisense strand to SEQ ID NO: 1990254
accuuuaagcuucuuagca

SEQ ID NO: 1990256 - RNA, 19 nt, Artificial Sequence
  Description of Artificial Sequence: Synthetic oligonucleotide
  Sense strand starting at position 897 of SEQ ID NO: 1880740
uccagucauggugaugcau

SEQ ID NO: 1990257 - RNA, 19 nt, Artificial Sequence
  Description of Artificial Sequence: Synthetic oligonucleotide
  Antisense strand to SEQ ID NO: 1990256
augcaucaccaugacugga

SEQ ID NO: 1990258 - RNA, 19 nt, Artificial Sequence
  Description of Artificial Sequence: Synthetic oligonucleotide
  Sense strand starting at position 1312 of SEQ ID NO: 1880740
agaguuugaucaucaacca

SEQ ID NO: 1990259 - RNA, 19 nt, Artificial Sequence
  Description of Artificial Sequence: Synthetic oligonucleotide
  Antisense strand to SEQ ID NO: 1990258
ugguugaugaucaaacucu

SEQ ID NO: 1990260 - RNA, 19 nt, Artificial Sequence
  Description of Artificial Sequence: Synthetic oligonucleotide
  Sense strand starting at position 1483 of SEQ ID NO: 1880740
gguugaaaucuggguaaau

SEQ ID NO: 1990261 - RNA, 19 nt, Artificial Sequence
  Description of Artificial Sequence: Synthetic oligonucleotide
  Antisense strand to SEQ ID NO: 1990260
auuuacccagauuucaacc

SEQ ID NO: 1990262 - RNA, 19 nt, Artificial Sequence
  Description of Artificial Sequence: Synthetic oligonucleotide
  Sense strand starting at position 1484 of SEQ ID NO: 1880740
guugaaaucuggguaaaug

SEQ ID NO: 1990263 - RNA, 19 nt, Artificial Sequence
  Description of Artificial Sequence: Synthetic oligonucleotide
  Antisense strand to SEQ ID NO: 1990262
cauuuacccagauuucaac

SEQ ID NO: 1990264 - RNA, 19 nt, Artificial Sequence
  Description of Artificial Sequence: Synthetic oligonucleotide
  Sense strand starting at position 1538 of SEQ ID NO: 1880740
guaucucuugaugguuaua

SEQ ID NO: 1990265 - RNA, 19 nt, Artificial Sequence
  Description of Artificial Sequence: Synthetic oligonucleotide
  Antisense strand to SEQ ID NO: 1990264
uauaaccaucaagagauac

SEQ ID NO: 1990266 - RNA, 19 nt, Artificial Sequence
  Description of Artificial Sequence: Synthetic oligonucleotide
  Sense strand starting at position 1540 of SEQ ID NO: 1880740
aucucuugaugguuauaaa

SEQ ID NO: 1990267 - RNA, 19 nt, Artificial Sequence
  Description of Artificial Sequence: Synthetic oligonucleotide
  Antisense strand to SEQ ID NO: 1990266
uuuauaaccaucaagagau

SEQ ID NO: 1990268 - RNA, 19 nt, Artificial Sequence
  Description of Artificial Sequence: Synthetic oligonucleotide
  Sense strand starting at position 1541 of SEQ ID NO: 1880740
ucucuugaugguuauaaau

SEQ ID NO: 1990269 - RNA, 19 nt, Artificial Sequence
  Description of Artificial Sequence: Synthetic oligonucleotide
  Antisense strand to SEQ ID NO: 1990268
auuuauaaccaucaagaga

SEQ ID NO: 1990270 - RNA, 19 nt, Artificial Sequence
  Description of Artificial Sequence: Synthetic oligonucleotide
  Sense strand starting at position 1788 of SEQ ID NO: 1880740
cagucaguagauuauguau

SEQ ID NO: 1990271 - RNA, 19 nt, Artificial Sequence
  Description of Artificial Sequence: Synthetic oligonucleotide
  Antisense strand to SEQ ID NO: 1990270
auacauaaucuacugacug

SEQ ID NO: 1990272 - RNA, 19 nt, Artificial Sequence
  Description of Artificial Sequence: Synthetic oligonucleotide
  Sense strand starting at position 1795 of SEQ ID NO: 1880740
uagauuauguaugcucuga

SEQ ID NO: 1990273 - RNA, 19 nt, Artificial Sequence
  Description of Artificial Sequence: Synthetic oligonucleotide
  Antisense strand to SEQ ID NO: 1990272
ucagagcauacauaaucua

SEQ ID NO: 1990274 - RNA, 19 nt, Artificial Sequence
  Description of Artificial Sequence: Synthetic oligonucleotide
  Sense strand starting at position 1797 of SEQ ID NO: 1880740
gauuauguaugcucugaaa

SEQ ID NO: 1990275 - RNA, 19 nt, Artificial Sequence
  Description of Artificial Sequence: Synthetic oligonucleotide
  Antisense strand to SEQ ID NO: 1990274
uuucagagcauacauaauc

SEQ ID NO: 1990276 - RNA, 19 nt, Artificial Sequence
  Description of Artificial Sequence: Synthetic oligonucleotide
  Sense strand starting at position 1799 of SEQ ID NO: 1880740
uuauguaugcucugaaaug

SEQ ID NO: 1990277 - RNA, 19 nt, Artificial Sequence
  Description of Artificial Sequence: Synthetic oligonucleotide
  Antisense strand to SEQ ID NO: 1990276
cauuucagagcauacauaa

SEQ ID NO: 1990278 - RNA, 19 nt, Artificial Sequence
  Description of Artificial Sequence: Synthetic oligonucleotide
  Sense strand starting at position 1808 of SEQ ID NO: 1880740
cucugaaaugauugucuuu

SEQ ID NO: 1990279 - RNA, 19 nt, Artificial Sequence
  Description of Artificial Sequence: Synthetic oligonucleotide
  Antisense strand to SEQ ID NO: 1990278
aaagacaaucauuucagag

SEQ ID NO: 1990280 - RNA, 19 nt, Artificial Sequence
  Description of Artificial Sequence: Synthetic oligonucleotide
  Sense strand starting at position 1825 of SEQ ID NO: 1880740
uuauuucuauaagagggua

SEQ ID NO: 1990281 - RNA, 19 nt, Artificial Sequence
  Description of Artificial Sequence: Synthetic oligonucleotide
  Antisense strand to SEQ ID NO: 1990280
uacccucuuauagaaauaa

SEQ ID NO: 1990282 - RNA, 19 nt, Artificial Sequence
  Description of Artificial Sequence: Synthetic oligonucleotide
  Sense strand starting at position 1892 of SEQ ID NO: 1880740
aggauagccauccaugguu

SEQ ID NO: 1990283 - RNA, 19 nt, Artificial Sequence
  Description of Artificial Sequence: Synthetic oligonucleotide
  Antisense strand to SEQ ID NO: 1990282
aaccauggauggcuauccu

SEQ ID NO: 1990284 - RNA, 19 nt, Artificial Sequence
  Description of Artificial Sequence: Synthetic oligonucleotide
  Sense strand starting at position 2100 of SEQ ID NO: 1880740
cugauaaacuuaucaguag

SEQ ID NO: 1990285 - RNA, 19 nt, Artificial Sequence
  Description of Artificial Sequence: Synthetic oligonucleotide
  Antisense strand to SEQ ID NO: 1990284
cuacugauaaguuuaucag

SEQ ID NO: 1990286 - RNA, 19 nt, Artificial Sequence
  Description of Artificial Sequence: Synthetic oligonucleotide
  Sense strand starting at position 2114 of SEQ ID NO: 1880740
aguaguaucuaacuucuaa

SEQ ID NO: 1990287 - RNA, 19 nt, Artificial Sequence
  Description of Artificial Sequence: Synthetic oligonucleotide
  Antisense strand to SEQ ID NO: 1990286
uuagaaguuagauacuacu

SEQ ID NO: 1990288 - RNA, 19 nt, Artificial Sequence
  Description of Artificial Sequence: Synthetic oligonucleotide
  Sense strand starting at position 2121 of SEQ ID NO: 1880740
ucuaacuucuaaguaguga

SEQ ID NO: 1990289 - RNA, 19 nt, Artificial Sequence
  Description of Artificial Sequence: Synthetic oligonucleotide
  Antisense strand to SEQ ID NO: 1990288
ucacuacuuagaaguuaga

SEQ ID NO: 1990290 - RNA, 19 nt, Artificial Sequence
  Description of Artificial Sequence: Synthetic oligonucleotide
  Sense strand starting at position 2144 of SEQ ID NO: 1880740
accuucuuacaguaguuaa

SEQ ID NO: 1990291 - RNA, 19 nt, Artificial Sequence
  Description of Artificial Sequence: Synthetic oligonucleotide
  Antisense strand to SEQ ID NO: 1990290
uuaacuacuguaagaaggu

SEQ ID NO: 1990292 - RNA, 19 nt, Artificial Sequence
  Description of Artificial Sequence: Synthetic oligonucleotide
  Sense strand starting at position 2154 of SEQ ID NO: 1880740
aguaguuaacuguacaugu

SEQ ID NO: 1990293 - RNA, 19 nt, Artificial Sequence
  Description of Artificial Sequence: Synthetic oligonucleotide
  Antisense strand to SEQ ID NO: 1990292
acauguacaguuaacuacu

SEQ ID NO: 1990294 - RNA, 19 nt, Artificial Sequence
  Description of Artificial Sequence: Synthetic oligonucleotide
  Sense strand starting at position 2170 of SEQ ID NO: 1880740
ugugcuuguguucuacuua

SEQ ID NO: 1990295 - RNA, 19 nt, Artificial Sequence
  Description of Artificial Sequence: Synthetic oligonucleotide
  Antisense strand to SEQ ID NO: 1990294
uaaguagaacacaagcaca

SEQ ID NO: 1990296 - RNA, 19 nt, Artificial Sequence
  Description of Artificial Sequence: Synthetic oligonucleotide
  Sense strand starting at position 2211 of SEQ ID NO: 1880740
ugaguaugccaucauuaga

SEQ ID NO: 1990297 - RNA, 19 nt, Artificial Sequence
  Description of Artificial Sequence: Synthetic oligonucleotide
  Antisense strand to SEQ ID NO: 1990296
ucuaaugauggcauacuca

SEQ ID NO: 1990298 - RNA, 19 nt, Artificial Sequence
  Description of Artificial Sequence: Synthetic oligonucleotide
  Sense strand starting at position 2276 of SEQ ID NO: 1880740
ucuucuuucggagguauaa

SEQ ID NO: 1990299 - RNA, 19 nt, Artificial Sequence
  Description of Artificial Sequence: Synthetic oligonucleotide
  Antisense strand to SEQ ID NO: 1990298
uuauaccuccgaaagaaga

SEQ ID NO: 1990300 - RNA, 19 nt, Artificial Sequence
  Description of Artificial Sequence: Synthetic oligonucleotide
  Sense strand starting at position 2278 of SEQ ID NO: 1880740
uucuuucggagguauaaau

SEQ ID NO: 1990301 - RNA, 19 nt, Artificial Sequence
  Description of Artificial Sequence: Synthetic oligonucleotide
  Antisense strand to SEQ ID NO: 1990300
auuuauaccuccgaaagaa

SEQ ID NO: 1990302 - RNA, 19 nt, Artificial Sequence
  Description of Artificial Sequence: Synthetic oligonucleotide
  Sense strand starting at position 2360 of SEQ ID NO: 1880740
agcaauacuuaucugggaa

SEQ ID NO: 1990303 - RNA, 19 nt, Artificial Sequence
  Description of Artificial Sequence: Synthetic oligonucleotide
  Antisense strand to SEQ ID NO: 1990302
uucccagauaaguauugcu

SEQ ID NO: 1990304 - RNA, 19 nt, Artificial Sequence
  Description of Artificial Sequence: Synthetic oligonucleotide
  Sense strand starting at position 2651 of SEQ ID NO: 1880740
uaugauacagcugauguau

SEQ ID NO: 1990305 - RNA, 19 nt, Artificial Sequence
  Description of Artificial Sequence: Synthetic oligonucleotide
  Antisense strand to SEQ ID NO: 1990304
auacaucagcuguaucaua

SEQ ID NO: 1990306 - RNA, 19 nt, Artificial Sequence
  Description of Artificial Sequence: Synthetic oligonucleotide
  Sense strand starting at position 2720 of SEQ ID NO: 1880740
agguauugauaucuagaug

SEQ ID NO: 1990307 - RNA, 19 nt, Artificial Sequence
  Description of Artificial Sequence: Synthetic oligonucleotide
  Antisense strand to SEQ ID NO: 1990306
caucuagauaucaauaccu

SEQ ID NO: 1990308 - RNA, 19 nt, Artificial Sequence
  Description of Artificial Sequence: Synthetic oligonucleotide
  Sense strand starting at position 3026 of SEQ ID NO: 1880740
uuaacuguccucugaugac

SEQ ID NO: 1990309 - RNA, 19 nt, Artificial Sequence
  Description of Artificial Sequence: Synthetic oligonucleotide
  Antisense strand to SEQ ID NO: 1990308
gucaucagaggacaguuaa

SEQ ID NO: 1990310 - RNA, 19 nt, Artificial Sequence
  Description of Artificial Sequence: Synthetic oligonucleotide
  Sense strand starting at position 3042 of SEQ ID NO: 1880740
gacaaucaugcaugguaag

SEQ ID NO: 1990311 - RNA, 19 nt, Artificial Sequence
  Description of Artificial Sequence: Synthetic oligonucleotide
  Antisense strand to SEQ ID NO: 1990310
cuuaccaugcaugauuguc

SEQ ID NO: 1990312 - RNA, 19 nt, Artificial Sequence
  Description of Artificial Sequence: Synthetic oligonucleotide
  Sense strand starting at position 3052 of SEQ ID NO: 1880740
caugguaagcaucauuaga

SEQ ID NO: 1990313 - RNA, 19 nt, Artificial Sequence
  Description of Artificial Sequence: Synthetic oligonucleotide
  Antisense strand to SEQ ID NO: 1990312
ucuaaugaugcuuaccaug

SEQ ID NO: 1990314 - RNA, 19 nt, Artificial Sequence
  Description of Artificial Sequence: Synthetic oligonucleotide
  Sense strand starting at position 3054 of SEQ ID NO: 1880740
ugguaagcaucauuagagu

SEQ ID NO: 1990315 - RNA, 19 nt, Artificial Sequence
  Description of Artificial Sequence: Synthetic oligonucleotide
  Antisense strand to SEQ ID NO: 1990314
acucuaaugaugcuuacca

SEQ ID NO: 1990316 - RNA, 19 nt, Artificial Sequence
  Description of Artificial Sequence: Synthetic oligonucleotide
  Sense strand starting at position 3327 of SEQ ID NO: 1880740
guuuccugaucucuaaaug

SEQ ID NO: 1990317 - RNA, 19 nt, Artificial Sequence
  Description of Artificial Sequence: Synthetic oligonucleotide
  Antisense strand to SEQ ID NO: 1990316
cauuuagagaucaggaaac

SEQ ID NO: 1990318 - RNA, 19 nt, Artificial Sequence
  Description of Artificial Sequence: Synthetic oligonucleotide
  Sense strand starting at position 3406 of SEQ ID NO: 1880740
ggcaguuaugcaguuagcu

SEQ ID NO: 1990319 - RNA, 19 nt, Artificial Sequence
  Description of Artificial Sequence: Synthetic oligonucleotide
  Antisense strand to SEQ ID NO: 1990318
agcuaacugcauaacugcc

SEQ ID NO: 1990320 - RNA, 19 nt, Artificial Sequence
  Description of Artificial Sequence: Synthetic oligonucleotide
  Sense strand starting at position 3407 of SEQ ID NO: 1880740
gcaguuaugcaguuagcuu

SEQ ID NO: 1990321 - RNA, 19 nt, Artificial Sequence
  Description of Artificial Sequence: Synthetic oligonucleotide
  Antisense strand to SEQ ID NO: 1990320
aagcuaacugcauaacugc

SEQ ID NO: 1990322 - RNA, 19 nt, Artificial Sequence
  Description of Artificial Sequence: Synthetic oligonucleotide
  Sense strand starting at position 3687 of SEQ ID NO: 1880740
auacccauaguguaaguuu

SEQ ID NO: 1990323 - RNA, 19 nt, Artificial Sequence
  Description of Artificial Sequence: Synthetic oligonucleotide
  Antisense strand to SEQ ID NO: 1990322
aaacuuacacuauggguau

SEQ ID NO: 1990324 - RNA, 19 nt, Artificial Sequence
  Description of Artificial Sequence: Synthetic oligonucleotide
  Sense strand starting at position 3890 of SEQ ID NO: 1880740
guuaaacauccaugacugu

SEQ ID NO: 1990325 - RNA, 19 nt, Artificial Sequence
  Description of Artificial Sequence: Synthetic oligonucleotide
  Antisense strand to SEQ ID NO: 1990324
acagucauggauguuuaac

SEQ ID NO: 1990326 - RNA, 19 nt, Artificial Sequence
  Description of Artificial Sequence: Synthetic oligonucleotide
  Sense strand starting at position 5 of SEQ ID NO: 1880741
caggaaauuccaugguauc

SEQ ID NO: 1990327 - RNA, 19 nt, Artificial Sequence
  Description of Artificial Sequence: Synthetic oligonucleotide
  Antisense strand to SEQ ID NO: 1990326
gauaccauggaauuuccug

SEQ ID NO: 1990328 - RNA, 19 nt, Artificial Sequence
  Description of Artificial Sequence: Synthetic oligonucleotide
  Sense strand starting at position 511 of SEQ ID NO: 1880741
agaagccuuguauacugaa

SEQ ID NO: 1990329 - RNA, 19 nt, Artificial Sequence
  Description of Artificial Sequence: Synthetic oligonucleotide
  Antisense strand to SEQ ID NO: 1990328
uucaguauacaaggcuucu

SEQ ID NO: 1990330 - RNA, 19 nt, Artificial Sequence
  Description of Artificial Sequence: Synthetic oligonucleotide
  Sense strand starting at position 600 of SEQ ID NO: 1880741
aagacuuaacaguguuaag

SEQ ID NO: 1990331 - RNA, 19 nt, Artificial Sequence
  Description of Artificial Sequence: Synthetic oligonucleotide
  Antisense strand to SEQ ID NO: 1990330
cuuaacacuguuaagucuu

SEQ ID NO: 1990332 - RNA, 19 nt, Artificial Sequence
  Description of Artificial Sequence: Synthetic oligonucleotide
  Sense strand starting at position 609 of SEQ ID NO: 1880741
caguguuaagauggaaaug

SEQ ID NO: 1990333 - RNA, 19 nt, Artificial Sequence
  Description of Artificial Sequence: Synthetic oligonucleotide
  Antisense strand to SEQ ID NO: 1990332
cauuuccaucuuaacacug

SEQ ID NO: 1990334 - RNA, 19 nt, Artificial Sequence
  Description of Artificial Sequence: Synthetic oligonucleotide
  Sense strand starting at position 959 of SEQ ID NO: 1880741
ucaucuugucaacaaguuu

SEQ ID NO: 1990335 - RNA, 19 nt, Artificial Sequence
  Description of Artificial Sequence: Synthetic oligonucleotide
  Antisense strand to SEQ ID NO: 1990334
aaacuuguugacaagauga

SEQ ID NO: 1990336 - RNA, 19 nt, Artificial Sequence
  Description of Artificial Sequence: Synthetic oligonucleotide
  Sense strand starting at position 979 of SEQ ID NO: 1880741
ucuuauggugcugaaacaa

SEQ ID NO: 1990337 - RNA, 19 nt, Artificial Sequence
  Description of Artificial Sequence: Synthetic oligonucleotide
  Antisense strand to SEQ ID NO: 1990336
uuguuucagcaccauaaga

SEQ ID NO: 1990338 - RNA, 19 nt, Artificial Sequence
  Description of Artificial Sequence: Synthetic oligonucleotide
  Sense strand starting at position 1424 of SEQ ID NO: 1880741
augucuaacucuuugugau

SEQ ID NO: 1990339 - RNA, 19 nt, Artificial Sequence
  Description of Artificial Sequence: Synthetic oligonucleotide
  Antisense strand to SEQ ID NO: 1990338
aucacaaagaguuagacau

SEQ ID NO: 1990340 - RNA, 19 nt, Artificial Sequence
  Description of Artificial Sequence: Synthetic oligonucleotide
  Sense strand starting at position 1425 of SEQ ID NO: 1880741
ugucuaacucuuugugauc

SEQ ID NO: 1990341 - RNA, 19 nt, Artificial Sequence
  Description of Artificial Sequence: Synthetic oligonucleotide
  Antisense strand to SEQ ID NO: 1990340
gaucacaaagaguuagaca

SEQ ID NO: 1990342 - RNA, 19 nt, Artificial Sequence
  Description of Artificial Sequence: Synthetic oligonucleotide
  Sense strand starting at position 1426 of SEQ ID NO: 1880741
gucuaacucuuugugaucu

SEQ ID NO: 1990343 - RNA, 19 nt, Artificial Sequence
  Description of Artificial Sequence: Synthetic oligonucleotide
  Antisense strand to SEQ ID NO: 1990342
agaucacaaagaguuagac

SEQ ID NO: 1990344 - RNA, 19 nt, Artificial Sequence
  Description of Artificial Sequence: Synthetic oligonucleotide
  Sense strand starting at position 1437 of SEQ ID NO: 1880741
ugugaucuucgccaauggu

SEQ ID NO: 1990345 - RNA, 19 nt, Artificial Sequence
  Description of Artificial Sequence: Synthetic oligonucleotide
  Antisense strand to SEQ ID NO: 1990344
accauuggcgaagaucaca

SEQ ID NO: 1990346 - RNA, 19 nt, Artificial Sequence
  Description of Artificial Sequence: Synthetic oligonucleotide
  Sense strand starting at position 1526 of SEQ ID NO: 1880741
uugaaacuuugugcuucua

SEQ ID NO: 1990347 - RNA, 19 nt, Artificial Sequence
  Description of Artificial Sequence: Synthetic oligonucleotide
  Antisense strand to SEQ ID NO: 1990346
uagaagcacaaaguuucaa

SEQ ID NO: 1990348 - RNA, 19 nt, Artificial Sequence
  Description of Artificial Sequence: Synthetic oligonucleotide
  Sense strand starting at position 1528 of SEQ ID NO: 1880741
gaaacuuugugcuucuaag

SEQ ID NO: 1990349 - RNA, 19 nt, Artificial Sequence
  Description of Artificial Sequence: Synthetic oligonucleotide
  Antisense strand to SEQ ID NO: 1990348
cuuagaagcacaaaguuuc

SEQ ID NO: 1990350 - RNA, 19 nt, Artificial Sequence
  Description of Artificial Sequence: Synthetic oligonucleotide
  Sense strand starting at position 1613 of SEQ ID NO: 1880741
cugauaaaugaccaguguu

SEQ ID NO: 1990351 - RNA, 19 nt, Artificial Sequence
  Description of Artificial Sequence: Synthetic oligonucleotide
  Antisense strand to SEQ ID NO: 1990350
aacacuggucauuuaucag

SEQ ID NO: 1990352 - RNA, 19 nt, Artificial Sequence
  Description of Artificial Sequence: Synthetic oligonucleotide
  Sense strand starting at position 1619 of SEQ ID NO: 1880741
aaugaccaguguuuggaau

SEQ ID NO: 1990353 - RNA, 19 nt, Artificial Sequence
  Description of Artificial Sequence: Synthetic oligonucleotide
  Antisense strand to SEQ ID NO: 1990352
auuccaaacacuggucauu

SEQ ID NO: 1990354 - RNA, 19 nt, Artificial Sequence
  Description of Artificial Sequence: Synthetic oligonucleotide
  Sense strand starting at position 1620 of SEQ ID NO: 1880741
augaccaguguuuggaaua

SEQ ID NO: 1990355 - RNA, 19 nt, Artificial Sequence
  Description of Artificial Sequence: Synthetic oligonucleotide
  Antisense strand to SEQ ID NO: 1990354
uauuccaaacacuggucau

SEQ ID NO: 1990356 - RNA, 19 nt, Artificial Sequence
  Description of Artificial Sequence: Synthetic oligonucleotide
  Sense strand starting at position 1700 of SEQ ID NO: 1880741
cugaauagauacuaucuga

SEQ ID NO: 1990357 - RNA, 19 nt, Artificial Sequence
  Description of Artificial Sequence: Synthetic oligonucleotide
  Antisense strand to SEQ ID NO: 1990356
ucagauaguaucuauucag

SEQ ID NO: 1990358 - RNA, 19 nt, Artificial Sequence
  Description of Artificial Sequence: Synthetic oligonucleotide
  Sense strand starting at position 1707 of SEQ ID NO: 1880741
gauacuaucugaguagauu

SEQ ID NO: 1990359 - RNA, 19 nt, Artificial Sequence
  Description of Artificial Sequence: Synthetic oligonucleotide
  Antisense strand to SEQ ID NO: 1990358
aaucuacucagauaguauc

SEQ ID NO: 1990360 - RNA, 19 nt, Artificial Sequence
  Description of Artificial Sequence: Synthetic oligonucleotide
  Sense strand starting at position 1836 of SEQ ID NO: 1880741
cuacaaugauggcuauaau

SEQ ID NO: 1990361 - RNA, 19 nt, Artificial Sequence
  Description of Artificial Sequence: Synthetic oligonucleotide
  Antisense strand to SEQ ID NO: 1990360
auuauagccaucauuguag

SEQ ID NO: 1990362 - RNA, 19 nt, Artificial Sequence
  Description of Artificial Sequence: Synthetic oligonucleotide
  Sense strand starting at position 2253 of SEQ ID NO: 1880741
ggcaacuugcuguaugacu

SEQ ID NO: 1990363 - RNA, 19 nt, Artificial Sequence
  Description of Artificial Sequence: Synthetic oligonucleotide
  Antisense strand to SEQ ID NO: 1990362
agucauacagcaaguugcc

SEQ ID NO: 1990364 - RNA, 19 nt, Artificial Sequence
  Description of Artificial Sequence: Synthetic oligonucleotide
  Sense strand starting at position 2762 of SEQ ID NO: 1880741
aucuauugaucuuugagua

SEQ ID NO: 1990365 - RNA, 19 nt, Artificial Sequence
  Description of Artificial Sequence: Synthetic oligonucleotide
  Antisense strand to SEQ ID NO: 1990364
uacucaaagaucaauagau

SEQ ID NO: 1990366 - RNA, 19 nt, Artificial Sequence
  Description of Artificial Sequence: Synthetic oligonucleotide
  Sense strand starting at position 2763 of SEQ ID NO: 1880741
ucuauugaucuuugaguau

SEQ ID NO: 1990367 - RNA, 19 nt, Artificial Sequence
  Description of Artificial Sequence: Synthetic oligonucleotide
  Antisense strand to SEQ ID NO: 1990366
auacucaaagaucaauaga

SEQ ID NO: 1990368 - RNA, 19 nt, Artificial Sequence
  Description of Artificial Sequence: Synthetic oligonucleotide
  Sense strand starting at position 2770 of SEQ ID NO: 1880741
aucuuugaguauuugucuu

SEQ ID NO: 1990369 - RNA, 19 nt, Artificial Sequence
  Description of Artificial Sequence: Synthetic oligonucleotide
  Antisense strand to SEQ ID NO: 1990368
aagacaaauacucaaagau

SEQ ID NO: 1990370 - RNA, 19 nt, Artificial Sequence
  Description of Artificial Sequence: Synthetic oligonucleotide
  Sense strand starting at position 2799 of SEQ ID NO: 1880741
ggugcuauuuaucaacaug

SEQ ID NO: 1990371 - RNA, 19 nt, Artificial Sequence
  Description of Artificial Sequence: Synthetic oligonucleotide
  Antisense strand to SEQ ID NO: 1990370
cauguugauaaauagcacc

SEQ ID NO: 1990372 - RNA, 19 nt, Artificial Sequence
  Description of Artificial Sequence: Synthetic oligonucleotide
  Sense strand starting at position 2860 of SEQ ID NO: 1880741
agguccaguuguguaucua

SEQ ID NO: 1990373 - RNA, 19 nt, Artificial Sequence
  Description of Artificial Sequence: Synthetic oligonucleotide
  Antisense strand to SEQ ID NO: 1990372
uagauacacaacuggaccu

SEQ ID NO: 1990374 - RNA, 19 nt, Artificial Sequence
  Description of Artificial Sequence: Synthetic oligonucleotide
  Sense strand starting at position 2861 of SEQ ID NO: 1880741
gguccaguuguguaucuac

SEQ ID NO: 1990375 - RNA, 19 nt, Artificial Sequence
  Description of Artificial Sequence: Synthetic oligonucleotide
  Antisense strand to SEQ ID NO: 1990374
guagauacacaacuggacc

SEQ ID NO: 1990376 - RNA, 19 nt, Artificial Sequence
  Description of Artificial Sequence: Synthetic oligonucleotide
  Sense strand starting at position 2896 of SEQ ID NO: 1880741
ccugguuacuaucuaugca

SEQ ID NO: 1990377 - RNA, 19 nt, Artificial Sequence
  Description of Artificial Sequence: Synthetic oligonucleotide
  Antisense strand to SEQ ID NO: 1990376
ugcauagauaguaaccagg

SEQ ID NO: 1990378 - RNA, 19 nt, Artificial Sequence
  Description of Artificial Sequence: Synthetic oligonucleotide
  Sense strand starting at position 2899 of SEQ ID NO: 1880741
gguuacuaucuaugcauuu

SEQ ID NO: 1990379 - RNA, 19 nt, Artificial Sequence
  Description of Artificial Sequence: Synthetic oligonucleotide
  Antisense strand to SEQ ID NO: 1990378
aaaugcauagauaguaacc

SEQ ID NO: 1990380 - RNA, 19 nt, Artificial Sequence
  Description of Artificial Sequence: Synthetic oligonucleotide
  Sense strand starting at position 2928 of SEQ ID NO: 1880741
cacagugaguugggauuua

SEQ ID NO: 1990381 - RNA, 19 nt, Artificial Sequence
  Description of Artificial Sequence: Synthetic oligonucleotide
  Antisense strand to SEQ ID NO: 1990380
uaaaucccaacucacugug

SEQ ID NO: 1990382 - RNA, 19 nt, Artificial Sequence
  Description of Artificial Sequence: Synthetic oligonucleotide
  Sense strand starting at position 2957 of SEQ ID NO: 1880741
auacuacugccaggaguuu

SEQ ID NO: 1990383 - RNA, 19 nt, Artificial Sequence
  Description of Artificial Sequence: Synthetic oligonucleotide
  Antisense strand to SEQ ID NO: 1990382
aaacuccuggcaguaguau

SEQ ID NO: 1990384 - RNA, 19 nt, Artificial Sequence
  Description of Artificial Sequence: Synthetic oligonucleotide
  Sense strand starting at position 3053 of SEQ ID NO: 1880741
ucccuuggccaucgaagaa

SEQ ID NO: 1990385 - RNA, 19 nt, Artificial Sequence
  Description of Artificial Sequence: Synthetic oligonucleotide
  Antisense strand to SEQ ID NO: 1990384
uucuucgauggccaaggga

SEQ ID NO: 1990386 - RNA, 19 nt, Artificial Sequence
  Description of Artificial Sequence: Synthetic oligonucleotide
  Sense strand starting at position 3093 of SEQ ID NO: 1880741
uugaauuuccugcguaauu

SEQ ID NO: 1990387 - RNA, 19 nt, Artificial Sequence
  Description of Artificial Sequence: Synthetic oligonucleotide
  Antisense strand to SEQ ID NO: 1990386
aauuacgcaggaaauucaa

SEQ ID NO: 1990388 - RNA, 19 nt, Artificial Sequence
  Description of Artificial Sequence: Synthetic oligonucleotide
  Sense strand starting at position 3094 of SEQ ID NO: 1880741
ugaauuuccugcguaauua

SEQ ID NO: 1990389 - RNA, 19 nt, Artificial Sequence
  Description of Artificial Sequence: Synthetic oligonucleotide
  Antisense strand to SEQ ID NO: 1990388
uaauuacgcaggaaauuca

SEQ ID NO: 1990390 - RNA, 19 nt, Artificial Sequence
  Description of Artificial Sequence: Synthetic oligonucleotide
  Sense strand starting at position 3157 of SEQ ID NO: 1880741
gucagauaaaugcggcaga

SEQ ID NO: 1990391 - RNA, 19 nt, Artificial Sequence
  Description of Artificial Sequence: Synthetic oligonucleotide
  Antisense strand to SEQ ID NO: 1990390
ucugccgcauuuaucugac

SEQ ID NO: 1990392 - RNA, 19 nt, Artificial Sequence
  Description of Artificial Sequence: Synthetic oligonucleotide
  Sense strand starting at position 3160 of SEQ ID NO: 1880741
agauaaaugcggcagacaa

SEQ ID NO: 1990393 - RNA, 19 nt, Artificial Sequence
  Description of Artificial Sequence: Synthetic oligonucleotide
  Antisense strand to SEQ ID NO: 1990392
uugucugccgcauuuaucu

SEQ ID NO: 1990394 - RNA, 19 nt, Artificial Sequence
  Description of Artificial Sequence: Synthetic oligonucleotide
  Sense strand starting at position 3257 of SEQ ID NO: 1880741
agagucaugcucuguuaga

SEQ ID NO: 1990395 - RNA, 19 nt, Artificial Sequence
  Description of Artificial Sequence: Synthetic oligonucleotide
  Antisense strand to SEQ ID NO: 1990394
ucuaacagagcaugacucu

SEQ ID NO: 1990396 - RNA, 19 nt, Artificial Sequence
  Description of Artificial Sequence: Synthetic oligonucleotide
  Sense strand starting at position 3258 of SEQ ID NO: 1880741
gagucaugcucuguuagag

SEQ ID NO: 1990397 - RNA, 19 nt, Artificial Sequence
  Description of Artificial Sequence: Synthetic oligonucleotide
  Antisense strand to SEQ ID NO: 1990396
cucuaacagagcaugacuc

SEQ ID NO: 1990398 - RNA, 19 nt, Artificial Sequence
  Description of Artificial Sequence: Synthetic oligonucleotide
  Sense strand starting at position 3674 of SEQ ID NO: 1880741
acagcaagaucauuaguca

SEQ ID NO: 1990399 - RNA, 19 nt, Artificial Sequence
  Description of Artificial Sequence: Synthetic oligonucleotide
  Antisense strand to SEQ ID NO: 1990398
ugacuaaugaucuugcugu

SEQ ID NO: 1990400 - RNA, 19 nt, Artificial Sequence
  Description of Artificial Sequence: Synthetic oligonucleotide
  Sense strand starting at position 3699 of SEQ ID NO: 1880741
guuaguuauguuugaaagc

SEQ ID NO: 1990401 - RNA, 19 nt, Artificial Sequence
  Description of Artificial Sequence: Synthetic oligonucleotide
  Antisense strand to SEQ ID NO: 1990400
gcuuucaaacauaacuaac

SEQ ID NO: 1990402 - RNA, 19 nt, Artificial Sequence
  Description of Artificial Sequence: Synthetic oligonucleotide
  Sense strand starting at position 3807 of SEQ ID NO: 1880741
acaggaaauuucugucucu

SEQ ID NO: 1990403 - RNA, 19 nt, Artificial Sequence
  Description of Artificial Sequence: Synthetic oligonucleotide
  Antisense strand to SEQ ID NO: 1990402
agagacagaaauuuccugu

SEQ ID NO: 1990404 - RNA, 19 nt, Artificial Sequence
  Description of Artificial Sequence: Synthetic oligonucleotide
  Sense strand starting at position 3875 of SEQ ID NO: 1880741
ccuuucugugcuuaguauu

SEQ ID NO: 1990405 - RNA, 19 nt, Artificial Sequence
  Description of Artificial Sequence: Synthetic oligonucleotide
  Antisense strand to SEQ ID NO: 1990404
aauacuaagcacagaaagg

SEQ ID NO: 1990406 - RNA, 19 nt, Artificial Sequence
  Description of Artificial Sequence: Synthetic oligonucleotide
  Sense strand starting at position 294 of SEQ ID NO: 1880742
gaccuauuaugguuacaga

SEQ ID NO: 1990407 - RNA, 19 nt, Artificial Sequence
  Description of Artificial Sequence: Synthetic oligonucleotide
  Antisense strand to SEQ ID NO: 1990406
ucuguaaccauaauagguc

SEQ ID NO: 1990408 - RNA, 19 nt, Artificial Sequence
  Description of Artificial Sequence: Synthetic oligonucleotide
  Sense strand starting at position 302 of SEQ ID NO: 1880742
augguuacagaucauuguu

SEQ ID NO: 1990409 - RNA, 19 nt, Artificial Sequence
  Description of Artificial Sequence: Synthetic oligonucleotide
  Antisense strand to SEQ ID NO: 1990408
aacaaugaucuguaaccau

SEQ ID NO: 1990410 - RNA, 19 nt, Artificial Sequence
  Description of Artificial Sequence: Synthetic oligonucleotide
  Sense strand starting at position 304 of SEQ ID NO: 1880742
gguuacagaucauuguuga

SEQ ID NO: 1990411 - RNA, 19 nt, Artificial Sequence
  Description of Artificial Sequence: Synthetic oligonucleotide
  Antisense strand to SEQ ID NO: 1990410
ucaacaaugaucuguaacc

SEQ ID NO: 1990412 - RNA, 19 nt, Artificial Sequence
  Description of Artificial Sequence: Synthetic oligonucleotide
  Sense strand starting at position 305 of SEQ ID NO: 1880742
guuacagaucauuguugaa

SEQ ID NO: 1990413 - RNA, 19 nt, Artificial Sequence
  Description of Artificial Sequence: Synthetic oligonucleotide
  Antisense strand to SEQ ID NO: 1990412
uucaacaaugaucuguaac

SEQ ID NO: 1990414 - RNA, 19 nt, Artificial Sequence
  Description of Artificial Sequence: Synthetic oligonucleotide
  Sense strand starting at position 317 of SEQ ID NO: 1880742
uguugaaucuaaguuacaa

SEQ ID NO: 1990415 - RNA, 19 nt, Artificial Sequence
  Description of Artificial Sequence: Synthetic oligonucleotide
  Antisense strand to SEQ ID NO: 1990414
uuguaacuuagauucaaca

SEQ ID NO: 1990416 - RNA, 19 nt, Artificial Sequence
  Description of Artificial Sequence: Synthetic oligonucleotide
  Sense strand starting at position 558 of SEQ ID NO: 1880742
aaagaagguccuggaaguu

SEQ ID NO: 1990417 - RNA, 19 nt, Artificial Sequence
  Description of Artificial Sequence: Synthetic oligonucleotide
  Antisense strand to SEQ ID NO: 1990416
aacuuccaggaccuucuuu

SEQ ID NO: 1990418 - RNA, 19 nt, Artificial Sequence
  Description of Artificial Sequence: Synthetic oligonucleotide
  Sense strand starting at position 570 of SEQ ID NO: 1880742
ggaaguuugagguaguggu

SEQ ID NO: 1990419 - RNA, 19 nt, Artificial Sequence
  Description of Artificial Sequence: Synthetic oligonucleotide
  Antisense strand to SEQ ID NO: 1990418
accacuaccucaaacuucc

SEQ ID NO: 1990420 - RNA, 19 nt, Artificial Sequence
  Description of Artificial Sequence: Synthetic oligonucleotide
  Sense strand starting at position 617 of SEQ ID NO: 1880742
gaggccuggagcuaguaau

SEQ ID NO: 1990421 - RNA, 19 nt, Artificial Sequence
  Description of Artificial Sequence: Synthetic oligonucleotide
  Antisense strand to SEQ ID NO: 1990420
auuacuagcuccaggccuc

SEQ ID NO: 1990422 - RNA, 19 nt, Artificial Sequence
  Description of Artificial Sequence: Synthetic oligonucleotide
  Sense strand starting at position 730 of SEQ ID NO: 1880742
guaaccaauccugaguacu

SEQ ID NO: 1990423 - RNA, 19 nt, Artificial Sequence
  Description of Artificial Sequence: Synthetic oligonucleotide
  Antisense strand to SEQ ID NO: 1990422
aguacucaggauugguuac

SEQ ID NO: 1990424 - RNA, 19 nt, Artificial Sequence
  Description of Artificial Sequence: Synthetic oligonucleotide
  Sense strand starting at position 748 of SEQ ID NO: 1880742
ucaacucuggcacaguaaa

SEQ ID NO: 1990425 - RNA, 19 nt, Artificial Sequence
  Description of Artificial Sequence: Synthetic oligonucleotide
  Antisense strand to SEQ ID NO: 1990424
uuuacugugccagaguuga

SEQ ID NO: 1990426 - RNA, 19 nt, Artificial Sequence
  Description of Artificial Sequence: Synthetic oligonucleotide
  Sense strand starting at position 1065 of SEQ ID NO: 1880742
aacuuaguguuugcuggaa

SEQ ID NO: 1990427 - RNA, 19 nt, Artificial Sequence
  Description of Artificial Sequence: Synthetic oligonucleotide
  Antisense strand to SEQ ID NO: 1990426
uuccagcaaacacuaaguu

SEQ ID NO: 1990428 - RNA, 19 nt, Artificial Sequence
  Description of Artificial Sequence: Synthetic oligonucleotide
  Sense strand starting at position 1069 of SEQ ID NO: 1880742
uaguguuugcuggaacaag

SEQ ID NO: 1990429 - RNA, 19 nt, Artificial Sequence
  Description of Artificial Sequence: Synthetic oligonucleotide
  Antisense strand to SEQ ID NO: 1990428
cuuguuccagcaaacacua

SEQ ID NO: 1990430 - RNA, 19 nt, Artificial Sequence
  Description of Artificial Sequence: Synthetic oligonucleotide
  Sense strand starting at position 1236 of SEQ ID NO: 1880742
cugcauagaccacgauaau

SEQ ID NO: 1990431 - RNA, 19 nt, Artificial Sequence
  Description of Artificial Sequence: Synthetic oligonucleotide
  Antisense strand to SEQ ID NO: 1990430
auuaucguggucuaugcag

SEQ ID NO: 1990432 - RNA, 19 nt, Artificial Sequence
  Description of Artificial Sequence: Synthetic oligonucleotide
  Sense strand starting at position 1237 of SEQ ID NO: 1880742
ugcauagaccacgauaauu

SEQ ID NO: 1990433 - RNA, 19 nt, Artificial Sequence
  Description of Artificial Sequence: Synthetic oligonucleotide
  Antisense strand to SEQ ID NO: 1990432
aauuaucguggucuaugca

SEQ ID NO: 1990434 - RNA, 19 nt, Artificial Sequence
  Description of Artificial Sequence: Synthetic oligonucleotide
  Sense strand starting at position 1288 of SEQ ID NO: 1880742
caguuuccugaugggaaag

SEQ ID NO: 1990435 - RNA, 19 nt, Artificial Sequence
  Description of Artificial Sequence: Synthetic oligonucleotide
  Antisense strand to SEQ ID NO: 1990434
cuuucccaucaggaaacug

SEQ ID NO: 1990436 - RNA, 19 nt, Artificial Sequence
  Description of Artificial Sequence: Synthetic oligonucleotide
  Sense strand starting at position 1743 of SEQ ID NO: 1880742
guuauagacccuuaacgca

SEQ ID NO: 1990437 - RNA, 19 nt, Artificial Sequence
  Description of Artificial Sequence: Synthetic oligonucleotide
  Antisense strand to SEQ ID NO: 1990436
ugcguuaagggucuauaac

SEQ ID NO: 1990438 - RNA, 19 nt, Artificial Sequence
  Description of Artificial Sequence: Synthetic oligonucleotide
  Sense strand starting at position 1750 of SEQ ID NO: 1880742
acccuuaacgcaggaagau

SEQ ID NO: 1990439 - RNA, 19 nt, Artificial Sequence
  Description of Artificial Sequence: Synthetic oligonucleotide
  Antisense strand to SEQ ID NO: 1990438
aucuuccugcguuaagggu

SEQ ID NO: 1990440 - RNA, 19 nt, Artificial Sequence
  Description of Artificial Sequence: Synthetic oligonucleotide
  Sense strand starting at position 1846 of SEQ ID NO: 1880742
gauucucuaucacugggua

SEQ ID NO: 1990441 - RNA, 19 nt, Artificial Sequence
  Description of Artificial Sequence: Synthetic oligonucleotide
  Antisense strand to SEQ ID NO: 1990440
uacccagugauagagaauc

SEQ ID NO: 1990442 - RNA, 19 nt, Artificial Sequence
  Description of Artificial Sequence: Synthetic oligonucleotide
  Sense strand starting at position 1847 of SEQ ID NO: 1880742
auucucuaucacuggguau

SEQ ID NO: 1990443 - RNA, 19 nt, Artificial Sequence
  Description of Artificial Sequence: Synthetic oligonucleotide
  Antisense strand to SEQ ID NO: 1990442
auacccagugauagagaau

SEQ ID NO: 1990444 - RNA, 19 nt, Artificial Sequence
  Description of Artificial Sequence: Synthetic oligonucleotide
  Sense strand starting at position 1850 of SEQ ID NO: 1880742
cucuaucacuggguauuga

SEQ ID NO: 1990445 - RNA, 19 nt, Artificial Sequence
  Description of Artificial Sequence: Synthetic oligonucleotide
  Antisense strand to SEQ ID NO: 1990444
ucaauacccagugauagag

SEQ ID NO: 1990446 - RNA, 19 nt, Artificial Sequence
  Description of Artificial Sequence: Synthetic oligonucleotide
  Sense strand starting at position 1851 of SEQ ID NO: 1880742
ucuaucacuggguauugau

SEQ ID NO: 1990447 - RNA, 19 nt, Artificial Sequence
  Description of Artificial Sequence: Synthetic oligonucleotide
  Antisense strand to SEQ ID NO: 1990446
aucaauacccagugauaga

SEQ ID NO: 1990448 - RNA, 19 nt, Artificial Sequence
  Description of Artificial Sequence: Synthetic oligonucleotide
  Sense strand starting at position 1860 of SEQ ID NO: 1880742
ggguauugauguccaaaca

SEQ ID NO: 1990449 - RNA, 19 nt, Artificial Sequence
  Description of Artificial Sequence: Synthetic oligonucleotide
  Antisense strand to SEQ ID NO: 1990448
uguuuggacaucaauaccc

SEQ ID NO: 1990450 - RNA, 19 nt, Artificial Sequence
  Description of Artificial Sequence: Synthetic oligonucleotide
  Sense strand starting at position 1909 of SEQ ID NO: 1880742
aaacguaagugcucauuua

SEQ ID NO: 1990451 - RNA, 19 nt, Artificial Sequence
  Description of Artificial Sequence: Synthetic oligonucleotide
  Antisense strand to SEQ ID NO: 1990450
uaaaugagcacuuacguuu

SEQ ID NO: 1990452 - RNA, 19 nt, Artificial Sequence
  Description of Artificial Sequence: Synthetic oligonucleotide
  Sense strand starting at position 2142 of SEQ ID NO: 1880742
gugugcguagcuuuggauu

SEQ ID NO: 1990453 - RNA, 19 nt, Artificial Sequence
  Description of Artificial Sequence: Synthetic oligonucleotide
  Antisense strand to SEQ ID NO: 1990452
aauccaaagcuacgcacac

SEQ ID NO: 1990454 - RNA, 19 nt, Artificial Sequence
  Description of Artificial Sequence: Synthetic oligonucleotide
  Sense strand starting at position 2342 of SEQ ID NO: 1880742
aggcuuggcuaauuaacuu

SEQ ID NO: 1990455 - RNA, 19 nt, Artificial Sequence
  Description of Artificial Sequence: Synthetic oligonucleotide
  Antisense strand to SEQ ID NO: 1990454
aaguuaauuagccaagccu

SEQ ID NO: 1990456 - RNA, 19 nt, Artificial Sequence
  Description of Artificial Sequence: Synthetic oligonucleotide
  Sense strand starting at position 2349 of SEQ ID NO: 1880742
gcuaauuaacuuugaaacg

SEQ ID NO: 1990457 - RNA, 19 nt, Artificial Sequence
  Description of Artificial Sequence: Synthetic oligonucleotide
  Antisense strand to SEQ ID NO: 1990456
cguuucaaaguuaauuagc

SEQ ID NO: 1990458 - RNA, 19 nt, Artificial Sequence
  Description of Artificial Sequence: Synthetic oligonucleotide
  Sense strand starting at position 2388 of SEQ ID NO: 1880742
augugccuugcacaauaaa

SEQ ID NO: 1990459 - RNA, 19 nt, Artificial Sequence
  Description of Artificial Sequence: Synthetic oligonucleotide
  Antisense strand to SEQ ID NO: 1990458
uuuauugugcaaggcacau

SEQ ID NO: 1990460 - RNA, 19 nt, Artificial Sequence
  Description of Artificial Sequence: Synthetic oligonucleotide
  Sense strand starting at position 2611 of SEQ ID NO: 1880742
cugagaucccgggacggau

SEQ ID NO: 1990461 - RNA, 19 nt, Artificial Sequence
  Description of Artificial Sequence: Synthetic oligonucleotide
  Antisense strand to SEQ ID NO: 1990460
auccgucccgggaucucag

SEQ ID NO: 1990462 - RNA, 19 nt, Artificial Sequence
  Description of Artificial Sequence: Synthetic oligonucleotide
  Sense strand starting at position 3261 of SEQ ID NO: 1880742
ggccgucguccucuacaau

SEQ ID NO: 1990463 - RNA, 19 nt, Artificial Sequence
  Description of Artificial Sequence: Synthetic oligonucleotide
  Antisense strand to SEQ ID NO: 1990462
auuguagaggacgacggcc

SEQ ID NO: 1990464 - RNA, 19 nt, Artificial Sequence
  Description of Artificial Sequence: Synthetic oligonucleotide
  Sense strand starting at position 3506 of SEQ ID NO: 1880742
ggagguaagucugcggaca

SEQ ID NO: 1990465 - RNA, 19 nt, Artificial Sequence
  Description of Artificial Sequence: Synthetic oligonucleotide
  Antisense strand to SEQ ID NO: 1990464
uguccgcagacuuaccucc

SEQ ID NO: 1990466 - RNA, 19 nt, Artificial Sequence
  Description of Artificial Sequence: Synthetic oligonucleotide
  Sense strand starting at position 3507 of SEQ ID NO: 1880742
gagguaagucugcggacaa

SEQ ID NO: 1990467 - RNA, 19 nt, Artificial Sequence
  Description of Artificial Sequence: Synthetic oligonucleotide
  Antisense strand to SEQ ID NO: 1990466
uuguccgcagacuuaccuc

SEQ ID NO: 1990468 - RNA, 19 nt, Artificial Sequence
  Description of Artificial Sequence: Synthetic oligonucleotide
  Sense strand starting at position 3518 of SEQ ID NO: 1880742
gcggacaagaugugaucuu

SEQ ID NO: 1990469 - RNA, 19 nt, Artificial Sequence
  Description of Artificial Sequence: Synthetic oligonucleotide
  Antisense strand to SEQ ID NO: 1990468
aagaucacaucuuguccgc

SEQ ID NO: 1990470 - RNA, 19 nt, Artificial Sequence
  Description of Artificial Sequence: Synthetic oligonucleotide
  Sense strand starting at position 3537 of SEQ ID NO: 1880742
cgccuuugaucgaugaggu

SEQ ID NO: 1990471 - RNA, 19 nt, Artificial Sequence
  Description of Artificial Sequence: Synthetic oligonucleotide
  Antisense strand to SEQ ID NO: 1990470
accucaucgaucaaaggcg

SEQ ID NO: 1990472 - RNA, 19 nt, Artificial Sequence
  Description of Artificial Sequence: Synthetic oligonucleotide
  Sense strand starting at position 3559 of SEQ ID NO: 1880742
gggaguacuaaagacguua

SEQ ID NO: 1990473 - RNA, 19 nt, Artificial Sequence
  Description of Artificial Sequence: Synthetic oligonucleotide
  Antisense strand to SEQ ID NO: 1990472
uaacgucuuuaguacuccc

SEQ ID NO: 1990474 - RNA, 19 nt, Artificial Sequence
  Description of Artificial Sequence: Synthetic oligonucleotide
  Sense strand starting at position 3600 of SEQ ID NO: 1880742
gguucuaacaggugaggaa

SEQ ID NO: 1990475 - RNA, 19 nt, Artificial Sequence
  Description of Artificial Sequence: Synthetic oligonucleotide
  Antisense strand to SEQ ID NO: 1990474
uuccucaccuguuagaacc

SEQ ID NO: 1990476 - RNA, 19 nt, Artificial Sequence
  Description of Artificial Sequence: Synthetic oligonucleotide
  Sense strand starting at position 3779 of SEQ ID NO: 1880742
cuugaaucaugucugaaua

SEQ ID NO: 1990477 - RNA, 19 nt, Artificial Sequence
  Description of Artificial Sequence: Synthetic oligonucleotide
  Antisense strand to SEQ ID NO: 1990476
uauucagacaugauucaag

SEQ ID NO: 1990478 - RNA, 19 nt, Artificial Sequence
  Description of Artificial Sequence: Synthetic oligonucleotide
  Sense strand starting at position 3780 of SEQ ID NO: 1880742
uugaaucaugucugaauau

SEQ ID NO: 1990479 - RNA, 19 nt, Artificial Sequence
  Description of Artificial Sequence: Synthetic oligonucleotide
  Antisense strand to SEQ ID NO: 1990478
auauucagacaugauucaa

SEQ ID NO: 1990480 - RNA, 19 nt, Artificial Sequence
  Description of Artificial Sequence: Synthetic oligonucleotide
  Sense strand starting at position 3818 of SEQ ID NO: 1880742
ccugcaucugacugaguca

SEQ ID NO: 1990481 - RNA, 19 nt, Artificial Sequence
  Description of Artificial Sequence: Synthetic oligonucleotide
  Antisense strand to SEQ ID NO: 1990480
ugacucagucagaugcagg

SEQ ID NO: 1990482 - RNA, 19 nt, Artificial Sequence
  Description of Artificial Sequence: Synthetic oligonucleotide
  Sense strand starting at position 3821 of SEQ ID NO: 1880742
gcaucugacugagucagua

SEQ ID NO: 1990483 - RNA, 19 nt, Artificial Sequence
  Description of Artificial Sequence: Synthetic oligonucleotide
  Antisense strand to SEQ ID NO: 1990482
uacugacucagucagaugc

SEQ ID NO: 1990484 - RNA, 19 nt, Artificial Sequence
  Description of Artificial Sequence: Synthetic oligonucleotide
  Sense strand starting at position 3912 of SEQ ID NO: 1880742
ugagucuugaguuacgauc

SEQ ID NO: 1990485 - RNA, 19 nt, Artificial Sequence
  Description of Artificial Sequence: Synthetic oligonucleotide
  Antisense strand to SEQ ID NO: 1990484
gaucguaacucaagacuca

SEQ ID NO: 1990486 - RNA, 19 nt, Artificial Sequence
  Description of Artificial Sequence: Synthetic oligonucleotide
  Sense strand starting at position 56 of SEQ ID NO: 1880743
auuauuaugcuuggcauuu

SEQ ID NO: 1990487 - RNA, 19 nt, Artificial Sequence
  Description of Artificial Sequence: Synthetic oligonucleotide
  Antisense strand to SEQ ID NO: 1990486
aaaugccaagcauaauaau

SEQ ID NO: 1990488 - RNA, 19 nt, Artificial Sequence
  Description of Artificial Sequence: Synthetic oligonucleotide
  Sense strand starting at position 155 of SEQ ID NO: 1880743
ggacucacauagcuauuaa

SEQ ID NO: 1990489 - RNA, 19 nt, Artificial Sequence
  Description of Artificial Sequence: Synthetic oligonucleotide
  Antisense strand to SEQ ID NO: 1990488
uuaauagcuaugugagucc

SEQ ID NO: 1990490 - RNA, 19 nt, Artificial Sequence
  Description of Artificial Sequence: Synthetic oligonucleotide
  Sense strand starting at position 314 of SEQ ID NO: 1880743
cuguguuaaccuuacaacu

SEQ ID NO: 1990491 - RNA, 19 nt, Artificial Sequence
  Description of Artificial Sequence: Synthetic oligonucleotide
  Antisense strand to SEQ ID NO: 1990490
aguuguaagguuaacacag

SEQ ID NO: 1990492 - RNA, 19 nt, Artificial Sequence
  Description of Artificial Sequence: Synthetic oligonucleotide
  Sense strand starting at position 583 of SEQ ID NO: 1880743
gcucaauaauuauugguga

SEQ ID NO: 1990493 - RNA, 19 nt, Artificial Sequence
  Description of Artificial Sequence: Synthetic oligonucleotide
  Antisense strand to SEQ ID NO: 1990492
ucaccaauaauuauugagc

SEQ ID NO: 1990494 - RNA, 19 nt, Artificial Sequence
  Description of Artificial Sequence: Synthetic oligonucleotide
  Sense strand starting at position 597 of SEQ ID NO: 1880743
ggugaaugaaugcaaucuu

SEQ ID NO: 1990495 - RNA, 19 nt, Artificial Sequence
  Description of Artificial Sequence: Synthetic oligonucleotide
  Antisense strand to SEQ ID NO: 1990494
aagauugcauucauucacc

SEQ ID NO: 1990496 - RNA, 19 nt, Artificial Sequence
  Description of Artificial Sequence: Synthetic oligonucleotide
  Sense strand starting at position 655 of SEQ ID NO: 1880743
cucauuauugauugugacu

SEQ ID NO: 1990497 - RNA, 19 nt, Artificial Sequence
  Description of Artificial Sequence: Synthetic oligonucleotide
  Antisense strand to SEQ ID NO: 1990496
agucacaaucaauaaugag

SEQ ID NO: 1990498 - RNA, 19 nt, Artificial Sequence
  Description of Artificial Sequence: Synthetic oligonucleotide
  Sense strand starting at position 660 of SEQ ID NO: 1880743
uauugauugugacuacgac

SEQ ID NO: 1990499 - RNA, 19 nt, Artificial Sequence
  Description of Artificial Sequence: Synthetic oligonucleotide
  Antisense strand to SEQ ID NO: 1990498
gucguagucacaaucaaua

SEQ ID NO: 1990500 - RNA, 19 nt, Artificial Sequence
  Description of Artificial Sequence: Synthetic oligonucleotide
  Sense strand starting at position 661 of SEQ ID NO: 1880743
auugauugugacuacgaca

SEQ ID NO: 1990501 - RNA, 19 nt, Artificial Sequence
  Description of Artificial Sequence: Synthetic oligonucleotide
  Antisense strand to SEQ ID NO: 1990500
ugucguagucacaaucaau

SEQ ID NO: 1990502 - RNA, 19 nt, Artificial Sequence
  Description of Artificial Sequence: Synthetic oligonucleotide
  Sense strand starting at position 677 of SEQ ID NO: 1880743
acaagaaggcuguguauga

SEQ ID NO: 1990503 - RNA, 19 nt, Artificial Sequence
  Description of Artificial Sequence: Synthetic oligonucleotide
  Antisense strand to SEQ ID NO: 1990502
ucauacacagccuucuugu

SEQ ID NO: 1990504 - RNA, 19 nt, Artificial Sequence
  Description of Artificial Sequence: Synthetic oligonucleotide
  Sense strand starting at position 690 of SEQ ID NO: 1880743
guaugaguuagugacaauc

SEQ ID NO: 1990505 - RNA, 19 nt, Artificial Sequence
  Description of Artificial Sequence: Synthetic oligonucleotide
  Antisense strand to SEQ ID NO: 1990504
gauugucacuaacucauac

SEQ ID NO: 1990506 - RNA, 19 nt, Artificial Sequence
  Description of Artificial Sequence: Synthetic oligonucleotide
  Sense strand starting at position 696 of SEQ ID NO: 1880743
guuagugacaaucauuguu

SEQ ID NO: 1990507 - RNA, 19 nt, Artificial Sequence
  Description of Artificial Sequence: Synthetic oligonucleotide
  Antisense strand to SEQ ID NO: 1990506
aacaaugauugucacuaac

SEQ ID NO: 1990508 - RNA, 19 nt, Artificial Sequence
  Description of Artificial Sequence: Synthetic oligonucleotide
  Sense strand starting at position 698 of SEQ ID NO: 1880743
uagugacaaucauuguuag

SEQ ID NO: 1990509 - RNA, 19 nt, Artificial Sequence
  Description of Artificial Sequence: Synthetic oligonucleotide
  Antisense strand to SEQ ID NO: 1990508
cuaacaaugauugucacua

SEQ ID NO: 1990510 - RNA, 19 nt, Artificial Sequence
  Description of Artificial Sequence: Synthetic oligonucleotide
  Sense strand starting at position 713 of SEQ ID NO: 1880743
uuagcaucacuuuagagau

SEQ ID NO: 1990511 - RNA, 19 nt, Artificial Sequence
  Description of Artificial Sequence: Synthetic oligonucleotide
  Antisense strand to SEQ ID NO: 1990510
aucucuaaagugaugcuaa

SEQ ID NO: 1990512 - RNA, 19 nt, Artificial Sequence
  Description of Artificial Sequence: Synthetic oligonucleotide
  Sense strand starting at position 745 of SEQ ID NO: 1880743
uguagaauaaguugaguaa

SEQ ID NO: 1990513 - RNA, 19 nt, Artificial Sequence
  Description of Artificial Sequence: Synthetic oligonucleotide
  Antisense strand to SEQ ID NO: 1990512
uuacucaacuuauucuaca

SEQ ID NO: 1990514 - RNA, 19 nt, Artificial Sequence
  Description of Artificial Sequence: Synthetic oligonucleotide
  Sense strand starting at position 748 of SEQ ID NO: 1880743
agaauaaguugaguaaccu

SEQ ID NO: 1990515 - RNA, 19 nt, Artificial Sequence
  Description of Artificial Sequence: Synthetic oligonucleotide
  Antisense strand to SEQ ID NO: 1990514
agguuacucaacuuauucu

SEQ ID NO: 1990516 - RNA, 19 nt, Artificial Sequence
  Description of Artificial Sequence: Synthetic oligonucleotide
  Sense strand starting at position 793 of SEQ ID NO: 1880743
aaaucaaggucucuugagu

SEQ ID NO: 1990517 - RNA, 19 nt, Artificial Sequence
  Description of Artificial Sequence: Synthetic oligonucleotide
  Antisense strand to SEQ ID NO: 1990516
acucaagagaccuugauuu

SEQ ID NO: 1990518 - RNA, 19 nt, Artificial Sequence
  Description of Artificial Sequence: Synthetic oligonucleotide
  Sense strand starting at position 798 of SEQ ID NO: 1880743
aaggucucuugaguacaaa

SEQ ID NO: 1990519 - RNA, 19 nt, Artificial Sequence
  Description of Artificial Sequence: Synthetic oligonucleotide
  Antisense strand to SEQ ID NO: 1990518
uuuguacucaagagaccuu

SEQ ID NO: 1990520 - RNA, 19 nt, Artificial Sequence
  Description of Artificial Sequence: Synthetic oligonucleotide
  Sense strand starting at position 920 of SEQ ID NO: 1880743
ugaacagacccgcaugaua

SEQ ID NO: 1990521 - RNA, 19 nt, Artificial Sequence
  Description of Artificial Sequence: Synthetic oligonucleotide
  Antisense strand to SEQ ID NO: 1990520
uaucaugcgggucuguuca

SEQ ID NO: 1990522 - RNA, 19 nt, Artificial Sequence
  Description of Artificial Sequence: Synthetic oligonucleotide
  Sense strand starting at position 953 of SEQ ID NO: 1880743
agaguuugaggucaccagu

SEQ ID NO: 1990523 - RNA, 19 nt, Artificial Sequence
  Description of Artificial Sequence: Synthetic oligonucleotide
  Antisense strand to SEQ ID NO: 1990522
acuggugaccucaaacucu

SEQ ID NO: 1990524 - RNA, 19 nt, Artificial Sequence
  Description of Artificial Sequence: Synthetic oligonucleotide
  Sense strand starting at position 956 of SEQ ID NO: 1880743
guuugaggucaccaguuua

SEQ ID NO: 1990525 - RNA, 19 nt, Artificial Sequence
  Description of Artificial Sequence: Synthetic oligonucleotide
  Antisense strand to SEQ ID NO: 1990524
uaaacuggugaccucaaac

SEQ ID NO: 1990526 - RNA, 19 nt, Artificial Sequence
  Description of Artificial Sequence: Synthetic oligonucleotide
  Sense strand starting at position 1008 of SEQ ID NO: 1880743
accaucuuacaagguagau

SEQ ID NO: 1990527 - RNA, 19 nt, Artificial Sequence
  Description of Artificial Sequence: Synthetic oligonucleotide
  Antisense strand to SEQ ID NO: 1990526
aucuaccuuguaagauggu

SEQ ID NO: 1990528 - RNA, 19 nt, Artificial Sequence
  Description of Artificial Sequence: Synthetic oligonucleotide
  Sense strand starting at position 1050 of SEQ ID NO: 1880743
gggucagcagaguauugau

SEQ ID NO: 1990529 - RNA, 19 nt, Artificial Sequence
  Description of Artificial Sequence: Synthetic oligonucleotide
  Antisense strand to SEQ ID NO: 1990528
aucaauacucugcugaccc

SEQ ID NO: 1990530 - RNA, 19 nt, Artificial Sequence
  Description of Artificial Sequence: Synthetic oligonucleotide
  Sense strand starting at position 1058 of SEQ ID NO: 1880743
agaguauugaugcaucuga

SEQ ID NO: 1990531 - RNA, 19 nt, Artificial Sequence
  Description of Artificial Sequence: Synthetic oligonucleotide
  Antisense strand to SEQ ID NO: 1990530
ucagaugcaucaauacucu

SEQ ID NO: 1990532 - RNA, 19 nt, Artificial Sequence
  Description of Artificial Sequence: Synthetic oligonucleotide
  Sense strand starting at position 1413 of SEQ ID NO: 1880743
aggcccaaacagugagaau

SEQ ID NO: 1990533 - RNA, 19 nt, Artificial Sequence
  Description of Artificial Sequence: Synthetic oligonucleotide
  Antisense strand to SEQ ID NO: 1990532
auucucacuguuugggccu

SEQ ID NO: 1990534 - RNA, 19 nt, Artificial Sequence
  Description of Artificial Sequence: Synthetic oligonucleotide
  Sense strand starting at position 1431 of SEQ ID NO: 1880743
uugcauuuacuugguuaac

SEQ ID NO: 1990535 - RNA, 19 nt, Artificial Sequence
  Description of Artificial Sequence: Synthetic oligonucleotide
  Antisense strand to SEQ ID NO: 1990534
guuaaccaaguaaaugcaa

SEQ ID NO: 1990536 - RNA, 19 nt, Artificial Sequence
  Description of Artificial Sequence: Synthetic oligonucleotide
  Sense strand starting at position 1432 of SEQ ID NO: 1880743
ugcauuuacuugguuaacu

SEQ ID NO: 1990537 - RNA, 19 nt, Artificial Sequence
  Description of Artificial Sequence: Synthetic oligonucleotide
  Antisense strand to SEQ ID NO: 1990536
aguuaaccaaguaaaugca

SEQ ID NO: 1990538 - RNA, 19 nt, Artificial Sequence
  Description of Artificial Sequence: Synthetic oligonucleotide
  Sense strand starting at position 1591 of SEQ ID NO: 1880743
aaacuaaauguaugagugu

SEQ ID NO: 1990539 - RNA, 19 nt, Artificial Sequence
  Description of Artificial Sequence: Synthetic oligonucleotide
  Antisense strand to SEQ ID NO: 1990538
acacucauacauuuaguuu

SEQ ID NO: 1990540 - RNA, 19 nt, Artificial Sequence
  Description of Artificial Sequence: Synthetic oligonucleotide
  Sense strand starting at position 1609 of SEQ ID NO: 1880743
uguguaugugcagcucuua

SEQ ID NO: 1990541 - RNA, 19 nt, Artificial Sequence
  Description of Artificial Sequence: Synthetic oligonucleotide
  Antisense strand to SEQ ID NO: 1990540
uaagagcugcacauacaca

SEQ ID NO: 1990542 - RNA, 19 nt, Artificial Sequence
  Description of Artificial Sequence: Synthetic oligonucleotide
  Sense strand starting at position 1610 of SEQ ID NO: 1880743
guguaugugcagcucuuau

SEQ ID NO: 1990543 - RNA, 19 nt, Artificial Sequence
  Description of Artificial Sequence: Synthetic oligonucleotide
  Antisense strand to SEQ ID NO: 1990542
auaagagcugcacauacac

SEQ ID NO: 1990544 - RNA, 19 nt, Artificial Sequence
  Description of Artificial Sequence: Synthetic oligonucleotide
  Sense strand starting at position 1631 of SEQ ID NO: 1880743
uauggaguacauugaaauu

SEQ ID NO: 1990545 - RNA, 19 nt, Artificial Sequence
  Description of Artificial Sequence: Synthetic oligonucleotide
  Antisense strand to SEQ ID NO: 1990544
aauuucaauguacuccaua

SEQ ID NO: 1990546 - RNA, 19 nt, Artificial Sequence
  Description of Artificial Sequence: Synthetic oligonucleotide
  Sense strand starting at position 1752 of SEQ ID NO: 1880743
acuugaagagcuugacuaa

SEQ ID NO: 1990547 - RNA, 19 nt, Artificial Sequence
  Description of Artificial Sequence: Synthetic oligonucleotide
  Antisense strand to SEQ ID NO: 1990546
uuagucaagcucuucaagu

SEQ ID NO: 1990548 - RNA, 19 nt, Artificial Sequence
  Description of Artificial Sequence: Synthetic oligonucleotide
  Sense strand starting at position 1841 of SEQ ID NO: 1880743
ggucauagccucugggaaa

SEQ ID NO: 1990549 - RNA, 19 nt, Artificial Sequence
  Description of Artificial Sequence: Synthetic oligonucleotide
  Antisense strand to SEQ ID NO: 1990548
uuucccagaggcuaugacc

SEQ ID NO: 1990550 - RNA, 19 nt, Artificial Sequence
  Description of Artificial Sequence: Synthetic oligonucleotide
  Sense strand starting at position 1931 of SEQ ID NO: 1880743
ggauauguugcugacucaa

SEQ ID NO: 1990551 - RNA, 19 nt, Artificial Sequence
  Description of Artificial Sequence: Synthetic oligonucleotide
  Antisense strand to SEQ ID NO: 1990550
uugagucagcaacauaucc

SEQ ID NO: 1990552 - RNA, 19 nt, Artificial Sequence
  Description of Artificial Sequence: Synthetic oligonucleotide
  Sense strand starting at position 1978 of SEQ ID NO: 1880743
caacauaucccaggaguug

SEQ ID NO: 1990553 - RNA, 19 nt, Artificial Sequence
  Description of Artificial Sequence: Synthetic oligonucleotide
  Antisense strand to SEQ ID NO: 1990552
caacuccugggauauguug

SEQ ID NO: 1990554 - RNA, 19 nt, Artificial Sequence
  Description of Artificial Sequence: Synthetic oligonucleotide
  Sense strand starting at position 2907 of SEQ ID NO: 1880743
gaagaauagugacuguagu

SEQ ID NO: 1990555 - RNA, 19 nt, Artificial Sequence
  Description of Artificial Sequence: Synthetic oligonucleotide
  Antisense strand to SEQ ID NO: 1990554
acuacagucacuauucuuc

SEQ ID NO: 1990556 - RNA, 19 nt, Artificial Sequence
  Description of Artificial Sequence: Synthetic oligonucleotide
  Sense strand starting at position 2908 of SEQ ID NO: 1880743
aagaauagugacuguagua

SEQ ID NO: 1990557 - RNA, 19 nt, Artificial Sequence
  Description of Artificial Sequence: Synthetic oligonucleotide
  Antisense strand to SEQ ID NO: 1990556
uacuacagucacuauucuu

SEQ ID NO: 1990558 - RNA, 19 nt, Artificial Sequence
  Description of Artificial Sequence: Synthetic oligonucleotide
  Sense strand starting at position 2978 of SEQ ID NO: 1880743
agaugagaaaugugugagu

SEQ ID NO: 1990559 - RNA, 19 nt, Artificial Sequence
  Description of Artificial Sequence: Synthetic oligonucleotide
  Antisense strand to SEQ ID NO: 1990558
acucacacauuucucaucu

SEQ ID NO: 1990560 - RNA, 19 nt, Artificial Sequence
  Description of Artificial Sequence: Synthetic oligonucleotide
  Sense strand starting at position 3409 of SEQ ID NO: 1880743
ugcagaguucggaggcagu

SEQ ID NO: 1990561 - RNA, 19 nt, Artificial Sequence
  Description of Artificial Sequence: Synthetic oligonucleotide
  Antisense strand to SEQ ID NO: 1990560
acugccuccgaacucugca

SEQ ID NO: 1990562 - RNA, 19 nt, Artificial Sequence
  Description of Artificial Sequence: Synthetic oligonucleotide
  Sense strand starting at position 3425 of SEQ ID NO: 1880743
agucuauuggcagaauucu

SEQ ID NO: 1990563 - RNA, 19 nt, Artificial Sequence
  Description of Artificial Sequence: Synthetic oligonucleotide
  Antisense strand to SEQ ID NO: 1990562
agaauucugccaauagacu

SEQ ID NO: 1990564 - RNA, 19 nt, Artificial Sequence
  Description of Artificial Sequence: Synthetic oligonucleotide
  Sense strand starting at position 3509 of SEQ ID NO: 1880743
cauauuauggagggcaauu

SEQ ID NO: 1990565 - RNA, 19 nt, Artificial Sequence
  Description of Artificial Sequence: Synthetic oligonucleotide
  Antisense strand to SEQ ID NO: 1990564
aauugcccuccauaauaug

SEQ ID NO: 1990566 - RNA, 19 nt, Artificial Sequence
  Description of Artificial Sequence: Synthetic oligonucleotide
  Sense strand starting at position 27 of SEQ ID NO: 1880744
ucuguaguaauucgagaau

SEQ ID NO: 1990567 - RNA, 19 nt, Artificial Sequence
  Description of Artificial Sequence: Synthetic oligonucleotide
  Antisense strand to SEQ ID NO: 1990566
auucucgaauuacuacaga

SEQ ID NO: 1990568 - RNA, 19 nt, Artificial Sequence
  Description of Artificial Sequence: Synthetic oligonucleotide
  Sense strand starting at position 30 of SEQ ID NO: 1880744
guaguaauucgagaauauu

SEQ ID NO: 1990569 - RNA, 19 nt, Artificial Sequence
  Description of Artificial Sequence: Synthetic oligonucleotide
  Antisense strand to SEQ ID NO: 1990568
aauauucucgaauuacuac

SEQ ID NO: 1990570 - RNA, 19 nt, Artificial Sequence
  Description of Artificial Sequence: Synthetic oligonucleotide
  Sense strand starting at position 38 of SEQ ID NO: 1880744
ucgagaauauuauuaacug

SEQ ID NO: 1990571 - RNA, 19 nt, Artificial Sequence
  Description of Artificial Sequence: Synthetic oligonucleotide
  Antisense strand to SEQ ID NO: 1990570
caguuaauaauauucucga

SEQ ID NO: 1990572 - RNA, 19 nt, Artificial Sequence
  Description of Artificial Sequence: Synthetic oligonucleotide
  Sense strand starting at position 53 of SEQ ID NO: 1880744
acuggcaacuucucagagu

SEQ ID NO: 1990573 - RNA, 19 nt, Artificial Sequence
  Description of Artificial Sequence: Synthetic oligonucleotide
  Antisense strand to SEQ ID NO: 1990572
acucugagaaguugccagu

SEQ ID NO: 1990574 - RNA, 19 nt, Artificial Sequence
  Description of Artificial Sequence: Synthetic oligonucleotide
  Sense strand starting at position 140 of SEQ ID NO: 1880744
auaguacuugcccaagaca

SEQ ID NO: 1990575 - RNA, 19 nt, Artificial Sequence
  Description of Artificial Sequence: Synthetic oligonucleotide
  Antisense strand to SEQ ID NO: 1990574
ugucuugggcaaguacuau

SEQ ID NO: 1990576 - RNA, 19 nt, Artificial Sequence
  Description of Artificial Sequence: Synthetic oligonucleotide
  Sense strand starting at position 201 of SEQ ID NO: 1880744
agaacaagacuuugcuaua

SEQ ID NO: 1990577 - RNA, 19 nt, Artificial Sequence
  Description of Artificial Sequence: Synthetic oligonucleotide
  Antisense strand to SEQ ID NO: 1990576
uauagcaaagucuuguucu

SEQ ID NO: 1990578 - RNA, 19 nt, Artificial Sequence
  Description of Artificial Sequence: Synthetic oligonucleotide
  Sense strand starting at position 538 of SEQ ID NO: 1880744
aaugaaauugcacggcaau

SEQ ID NO: 1990579 - RNA, 19 nt, Artificial Sequence
  Description of Artificial Sequence: Synthetic oligonucleotide
  Antisense strand to SEQ ID NO: 1990578
auugccgugcaauuucauu

SEQ ID NO: 1990580 - RNA, 19 nt, Artificial Sequence
  Description of Artificial Sequence: Synthetic oligonucleotide
  Sense strand starting at position 539 of SEQ ID NO: 1880744
augaaauugcacggcaaua

SEQ ID NO: 1990581 - RNA, 19 nt, Artificial Sequence
  Description of Artificial Sequence: Synthetic oligonucleotide
  Antisense strand to SEQ ID NO: 1990580
uauugccgugcaauuucau

SEQ ID NO: 1990582 - RNA, 19 nt, Artificial Sequence
  Description of Artificial Sequence: Synthetic oligonucleotide
  Sense strand starting at position 541 of SEQ ID NO: 1880744
gaaauugcacggcaauaaa

SEQ ID NO: 1990583 - RNA, 19 nt, Artificial Sequence
  Description of Artificial Sequence: Synthetic oligonucleotide
  Antisense strand to SEQ ID NO: 1990582
uuuauugccgugcaauuuc

SEQ ID NO: 1990584 - RNA, 19 nt, Artificial Sequence
  Description of Artificial Sequence: Synthetic oligonucleotide
  Sense strand starting at position 629 of SEQ ID NO: 1880744
gguagugucuuucugaaau

SEQ ID NO: 1990585 - RNA, 19 nt, Artificial Sequence
  Description of Artificial Sequence: Synthetic oligonucleotide
  Antisense strand to SEQ ID NO: 1990584
auuucagaaagacacuacc

SEQ ID NO: 1990586 - RNA, 19 nt, Artificial Sequence
  Description of Artificial Sequence: Synthetic oligonucleotide
  Sense strand starting at position 639 of SEQ ID NO: 1880744
uucugaaaucauggugacu

SEQ ID NO: 1990587 - RNA, 19 nt, Artificial Sequence
  Description of Artificial Sequence: Synthetic oligonucleotide
  Antisense strand to SEQ ID NO: 1990586
agucaccaugauuucagaa

SEQ ID NO: 1990588 - RNA, 19 nt, Artificial Sequence
  Description of Artificial Sequence: Synthetic oligonucleotide
  Sense strand starting at position 666 of SEQ ID NO: 1880744
cuccucauuucuguguaca

SEQ ID NO: 1990589 - RNA, 19 nt, Artificial Sequence
  Description of Artificial Sequence: Synthetic oligonucleotide
  Antisense strand to SEQ ID NO: 1990588
uguacacagaaaugaggag

SEQ ID NO: 1990590 - RNA, 19 nt, Artificial Sequence
  Description of Artificial Sequence: Synthetic oligonucleotide
  Sense strand starting at position 667 of SEQ ID NO: 1880744
uccucauuucuguguacag

SEQ ID NO: 1990591 - RNA, 19 nt, Artificial Sequence
  Description of Artificial Sequence: Synthetic oligonucleotide
  Antisense strand to SEQ ID NO: 1990590
cuguacacagaaaugagga

SEQ ID NO: 1990592 - RNA, 19 nt, Artificial Sequence
  Description of Artificial Sequence: Synthetic oligonucleotide
  Sense strand starting at position 688 of SEQ ID NO: 1880744
agggcacucggguauugau

SEQ ID NO: 1990593 - RNA, 19 nt, Artificial Sequence
  Description of Artificial Sequence: Synthetic oligonucleotide
  Antisense strand to SEQ ID NO: 1990592
aucaauacccgagugcccu

SEQ ID NO: 1990594 - RNA, 19 nt, Artificial Sequence
  Description of Artificial Sequence: Synthetic oligonucleotide
  Sense strand starting at position 698 of SEQ ID NO: 1880744
gguauugauagcgagauac

SEQ ID NO: 1990595 - RNA, 19 nt, Artificial Sequence
  Description of Artificial Sequence: Synthetic oligonucleotide
  Antisense strand to SEQ ID NO: 1990594
guaucucgcuaucaauacc

SEQ ID NO: 1990596 - RNA, 19 nt, Artificial Sequence
  Description of Artificial Sequence: Synthetic oligonucleotide
  Sense strand starting at position 770 of SEQ ID NO: 1880744
gguaccuuauugccauuaa

SEQ ID NO: 1990597 - RNA, 19 nt, Artificial Sequence
  Description of Artificial Sequence: Synthetic oligonucleotide
  Antisense strand to SEQ ID NO: 1990596
uuaauggcaauaagguacc

SEQ ID NO: 1990598 - RNA, 19 nt, Artificial Sequence
  Description of Artificial Sequence: Synthetic oligonucleotide
  Sense strand starting at position 2114 of SEQ ID NO: 1880744
gguagacacaauggugaua

SEQ ID NO: 1990599 - RNA, 19 nt, Artificial Sequence
  Description of Artificial Sequence: Synthetic oligonucleotide
  Antisense strand to SEQ ID NO: 1990598
uaucaccauugugucuacc

SEQ ID NO: 1990600 - RNA, 19 nt, Artificial Sequence
  Description of Artificial Sequence: Synthetic oligonucleotide
  Sense strand starting at position 2152 of SEQ ID NO: 1880744
guauuuauugagcgcuuau

SEQ ID NO: 1990601 - RNA, 19 nt, Artificial Sequence
  Description of Artificial Sequence: Synthetic oligonucleotide
  Antisense strand to SEQ ID NO: 1990600
auaagcgcucaauaaauac

SEQ ID NO: 1990602 - RNA, 19 nt, Artificial Sequence
  Description of Artificial Sequence: Synthetic oligonucleotide
  Sense strand starting at position 2356 of SEQ ID NO: 1880744
acagcaagcuccuuucuga

SEQ ID NO: 1990603 - RNA, 19 nt, Artificial Sequence
  Description of Artificial Sequence: Synthetic oligonucleotide
  Antisense strand to SEQ ID NO: 1990602
ucagaaaggagcuugcugu

SEQ ID NO: 1990604 - RNA, 19 nt, Artificial Sequence
  Description of Artificial Sequence: Synthetic oligonucleotide
  Sense strand starting at position 2409 of SEQ ID NO: 1880744
uuaucuuugggccagcuaa

SEQ ID NO: 1990605 - RNA, 19 nt, Artificial Sequence
  Description of Artificial Sequence: Synthetic oligonucleotide
  Antisense strand to SEQ ID NO: 1990604
uuagcuggcccaaagauaa

SEQ ID NO: 1990606 - RNA, 19 nt, Artificial Sequence
  Description of Artificial Sequence: Synthetic oligonucleotide
  Sense strand starting at position 2619 of SEQ ID NO: 1880744
ccggaucauccauagcuga

SEQ ID NO: 1990607 - RNA, 19 nt, Artificial Sequence
  Description of Artificial Sequence: Synthetic oligonucleotide
  Antisense strand to SEQ ID NO: 1990606
ucagcuauggaugauccgg

SEQ ID NO: 1990608 - RNA, 19 nt, Artificial Sequence
  Description of Artificial Sequence: Synthetic oligonucleotide
  Sense strand starting at position 2633 of SEQ ID NO: 1880744
gcugacauccucuaaguca

SEQ ID NO: 1990609 - RNA, 19 nt, Artificial Sequence
  Description of Artificial Sequence: Synthetic oligonucleotide
  Antisense strand to SEQ ID NO: 1990608
ugacuuagaggaugucagc

SEQ ID NO: 1990610 - RNA, 19 nt, Artificial Sequence
  Description of Artificial Sequence: Synthetic oligonucleotide
  Sense strand starting at position 2688 of SEQ ID NO: 1880744
cccagaucagccgaguuaa

SEQ ID NO: 1990611 - RNA, 19 nt, Artificial Sequence
  Description of Artificial Sequence: Synthetic oligonucleotide
  Antisense strand to SEQ ID NO: 1990610
uuaacucggcugaucuggg

SEQ ID NO: 1990612 - RNA, 19 nt, Artificial Sequence
  Description of Artificial Sequence: Synthetic oligonucleotide
  Sense strand starting at position 2742 of SEQ ID NO: 1880744
caaauugcugcguuguauu

SEQ ID NO: 1990613 - RNA, 19 nt, Artificial Sequence
  Description of Artificial Sequence: Synthetic oligonucleotide
  Antisense strand to SEQ ID NO: 1990612
aauacaacgcagcaauuug

SEQ ID NO: 1990614 - RNA, 19 nt, Artificial Sequence
  Description of Artificial Sequence: Synthetic oligonucleotide
  Sense strand starting at position 2791 of SEQ ID NO: 1880744
gcaucuuauuucguguuua

SEQ ID NO: 1990615 - RNA, 19 nt, Artificial Sequence
  Description of Artificial Sequence: Synthetic oligonucleotide
  Antisense strand to SEQ ID NO: 1990614
uaaacacgaaauaagaugc

SEQ ID NO: 1990616 - RNA, 19 nt, Artificial Sequence
  Description of Artificial Sequence: Synthetic oligonucleotide
  Sense strand starting at position 2795 of SEQ ID NO: 1880744
cuuauuucguguuuaccau

SEQ ID NO: 1990617 - RNA, 19 nt, Artificial Sequence
  Description of Artificial Sequence: Synthetic oligonucleotide
  Antisense strand to SEQ ID NO: 1990616
augguaaacacgaaauaag

SEQ ID NO: 1990618 - RNA, 19 nt, Artificial Sequence
  Description of Artificial Sequence: Synthetic oligonucleotide
  Sense strand starting at position 2909 of SEQ ID NO: 1880744
guguucaauguugacggaa

SEQ ID NO: 1990619 - RNA, 19 nt, Artificial Sequence
  Description of Artificial Sequence: Synthetic oligonucleotide
  Antisense strand to SEQ ID NO: 1990618
uuccgucaacauugaacac

SEQ ID NO: 1990620 - RNA, 19 nt, Artificial Sequence
  Description of Artificial Sequence: Synthetic oligonucleotide
  Sense strand starting at position 2969 of SEQ ID NO: 1880744
ucgaggugagcguuauugu

SEQ ID NO: 1990621 - RNA, 19 nt, Artificial Sequence
  Description of Artificial Sequence: Synthetic oligonucleotide
  Antisense strand to SEQ ID NO: 1990620
acaauaacgcucaccucga

SEQ ID NO: 1990622 - RNA, 19 nt, Artificial Sequence
  Description of Artificial Sequence: Synthetic oligonucleotide
  Sense strand starting at position 2978 of SEQ ID NO: 1880744
gcguuauuguuauuuacau

SEQ ID NO: 1990623 - RNA, 19 nt, Artificial Sequence
  Description of Artificial Sequence: Synthetic oligonucleotide
  Antisense strand to SEQ ID NO: 1990622
auguaaauaacaauaacgc

SEQ ID NO: 1990624 - RNA, 19 nt, Artificial Sequence
  Description of Artificial Sequence: Synthetic oligonucleotide
  Sense strand starting at position 3177 of SEQ ID NO: 1880744
aaaucacugggcuguugaa

SEQ ID NO: 1990625 - RNA, 19 nt, Artificial Sequence
  Description of Artificial Sequence: Synthetic oligonucleotide
  Antisense strand to SEQ ID NO: 1990624
uucaacagcccagugauuu

SEQ ID NO: 1990626 - RNA, 19 nt, Artificial Sequence
  Description of Artificial Sequence: Synthetic oligonucleotide
  Sense strand starting at position 3184 of SEQ ID NO: 1880744
ugggcuguugaauggauua

SEQ ID NO: 1990627 - RNA, 19 nt, Artificial Sequence
  Description of Artificial Sequence: Synthetic oligonucleotide
  Antisense strand to SEQ ID NO: 1990626
uaauccauucaacagccca

SEQ ID NO: 1990628 - RNA, 19 nt, Artificial Sequence
  Description of Artificial Sequence: Synthetic oligonucleotide
  Sense strand starting at position 3186 of SEQ ID NO: 1880744
ggcuguugaauggauuaga

SEQ ID NO: 1990629 - RNA, 19 nt, Artificial Sequence
  Description of Artificial Sequence: Synthetic oligonucleotide
  Antisense strand to SEQ ID NO: 1990628
ucuaauccauucaacagcc

SEQ ID NO: 1990630 - RNA, 19 nt, Artificial Sequence
  Description of Artificial Sequence: Synthetic oligonucleotide
  Sense strand starting at position 3196 of SEQ ID NO: 1880744
uggauuagaaucuacguuu

SEQ ID NO: 1990631 - RNA, 19 nt, Artificial Sequence
  Description of Artificial Sequence: Synthetic oligonucleotide
  Antisense strand to SEQ ID NO: 1990630
aaacguagauucuaaucca

SEQ ID NO: 1990632 - RNA, 19 nt, Artificial Sequence
  Description of Artificial Sequence: Synthetic oligonucleotide
  Sense strand starting at position 3199 of SEQ ID NO: 1880744
auuagaaucuacguuuccu

SEQ ID NO: 1990633 - RNA, 19 nt, Artificial Sequence
  Description of Artificial Sequence: Synthetic oligonucleotide
  Antisense strand to SEQ ID NO: 1990632
aggaaacguagauucuaau

SEQ ID NO: 1990634 - RNA, 19 nt, Artificial Sequence
  Description of Artificial Sequence: Synthetic oligonucleotide
  Sense strand starting at position 3340 of SEQ ID NO: 1880744
cagauagauuggccaauga

SEQ ID NO: 1990635 - RNA, 19 nt, Artificial Sequence
  Description of Artificial Sequence: Synthetic oligonucleotide
  Antisense strand to SEQ ID NO: 1990634
ucauuggccaaucuaucug

SEQ ID NO: 1990636 - RNA, 19 nt, Artificial Sequence
  Description of Artificial Sequence: Synthetic oligonucleotide
  Sense strand starting at position 3344 of SEQ ID NO: 1880744
uagauuggccaaugaaugu

SEQ ID NO: 1990637 - RNA, 19 nt, Artificial Sequence
  Description of Artificial Sequence: Synthetic oligonucleotide
  Antisense strand to SEQ ID NO: 1990636
acauucauuggccaaucua

SEQ ID NO: 1990638 - RNA, 19 nt, Artificial Sequence
  Description of Artificial Sequence: Synthetic oligonucleotide
  Sense strand starting at position 3426 of SEQ ID NO: 1880744
ugauuaagcccauggcuaa

SEQ ID NO: 1990639 - RNA, 19 nt, Artificial Sequence
  Description of Artificial Sequence: Synthetic oligonucleotide
  Antisense strand to SEQ ID NO: 1990638
uuagccaugggcuuaauca

SEQ ID NO: 1990640 - RNA, 19 nt, Artificial Sequence
  Description of Artificial Sequence: Synthetic oligonucleotide
  Sense strand starting at position 3439 of SEQ ID NO: 1880744
ggcuaaucuugcuuuauaa

SEQ ID NO: 1990641 - RNA, 19 nt, Artificial Sequence
  Description of Artificial Sequence: Synthetic oligonucleotide
  Antisense strand to SEQ ID NO: 1990640
uuauaaagcaagauuagcc

SEQ ID NO: 1990642 - RNA, 19 nt, Artificial Sequence
  Description of Artificial Sequence: Synthetic oligonucleotide
  Sense strand starting at position 3587 of SEQ ID NO: 1880744
ccaugauaccguuagcaua

SEQ ID NO: 1990643 - RNA, 19 nt, Artificial Sequence
  Description of Artificial Sequence: Synthetic oligonucleotide
  Antisense strand to SEQ ID NO: 1990642
uaugcuaacgguaucaugg

SEQ ID NO: 1990644 - RNA, 19 nt, Artificial Sequence
  Description of Artificial Sequence: Synthetic oligonucleotide
  Sense strand starting at position 3940 of SEQ ID NO: 1880744
caaauaucgcacuaguguu

SEQ ID NO: 1990645 - RNA, 19 nt, Artificial Sequence
  Description of Artificial Sequence: Synthetic oligonucleotide
  Antisense strand to SEQ ID NO: 1990644
aacacuagugcgauauuug

SEQ ID NO: 1990646 - RNA, 19 nt, Artificial Sequence
  Description of Artificial Sequence: Synthetic oligonucleotide
  Sense strand starting at position 137 of SEQ ID NO: 1880745
guggcagugagccuuguuu

SEQ ID NO: 1990647 - RNA, 19 nt, Artificial Sequence
  Description of Artificial Sequence: Synthetic oligonucleotide
  Antisense strand to SEQ ID NO: 1990646
aaacaaggcucacugccac

SEQ ID NO: 1990648 - RNA, 19 nt, Artificial Sequence
  Description of Artificial Sequence: Synthetic oligonucleotide
  Sense strand starting at position 565 of SEQ ID NO: 1880745
uguagaaggcuguaucaaa

SEQ ID NO: 1990649 - RNA, 19 nt, Artificial Sequence
  Description of Artificial Sequence: Synthetic oligonucleotide
  Antisense strand to SEQ ID NO: 1990648
uuugauacagccuucuaca

SEQ ID NO: 1990650 - RNA, 19 nt, Artificial Sequence
  Description of Artificial Sequence: Synthetic oligonucleotide
  Sense strand starting at position 636 of SEQ ID NO: 1880745
agguaaagugggcaucaua

SEQ ID NO: 1990651 - RNA, 19 nt, Artificial Sequence
  Description of Artificial Sequence: Synthetic oligonucleotide
  Antisense strand to SEQ ID NO: 1990650
uaugaugcccacuuuaccu

SEQ ID NO: 1990652 - RNA, 19 nt, Artificial Sequence
  Description of Artificial Sequence: Synthetic oligonucleotide
  Sense strand starting at position 646 of SEQ ID NO: 1880745
ggcaucauagacugacaau

SEQ ID NO: 1990653 - RNA, 19 nt, Artificial Sequence
  Description of Artificial Sequence: Synthetic oligonucleotide
  Antisense strand to SEQ ID NO: 1990652
auugucagucuaugaugcc

SEQ ID NO: 1990654 - RNA, 19 nt, Artificial Sequence
  Description of Artificial Sequence: Synthetic oligonucleotide
  Sense strand starting at position 811 of SEQ ID NO: 1880745
gcauaaagguugcuaaauu

SEQ ID NO: 1990655 - RNA, 19 nt, Artificial Sequence
  Description of Artificial Sequence: Synthetic oligonucleotide
  Antisense strand to SEQ ID NO: 1990654
aauuuagcaaccuuuaugc

SEQ ID NO: 1990656 - RNA, 19 nt, Artificial Sequence
  Description of Artificial Sequence: Synthetic oligonucleotide
  Sense strand starting at position 972 of SEQ ID NO: 1880745
aguagcuaugauugaguca

SEQ ID NO: 1990657 - RNA, 19 nt, Artificial Sequence
  Description of Artificial Sequence: Synthetic oligonucleotide
  Antisense strand to SEQ ID NO: 1990656
ugacucaaucauagcuacu

SEQ ID NO: 1990658 - RNA, 19 nt, Artificial Sequence
  Description of Artificial Sequence: Synthetic oligonucleotide
  Sense strand starting at position 973 of SEQ ID NO: 1880745
guagcuaugauugagucaa

SEQ ID NO: 1990659 - RNA, 19 nt, Artificial Sequence
  Description of Artificial Sequence: Synthetic oligonucleotide
  Antisense strand to SEQ ID NO: 1990658
uugacucaaucauagcuac

SEQ ID NO: 1990660 - RNA, 19 nt, Artificial Sequence
  Description of Artificial Sequence: Synthetic oligonucleotide
  Sense strand starting at position 1313 of SEQ ID NO: 1880745
agcauuuacugagauacug

SEQ ID NO: 1990661 - RNA, 19 nt, Artificial Sequence
  Description of Artificial Sequence: Synthetic oligonucleotide
  Antisense strand to SEQ ID NO: 1990660
caguaucucaguaaaugcu

SEQ ID NO: 1990662 - RNA, 19 nt, Artificial Sequence
  Description of Artificial Sequence: Synthetic oligonucleotide
  Sense strand starting at position 1353 of SEQ ID NO: 1880745
gggcauuggagcuacaaca

SEQ ID NO: 1990663 - RNA, 19 nt, Artificial Sequence
  Description of Artificial Sequence: Synthetic oligonucleotide
  Antisense strand to SEQ ID NO: 1990662
uguuguagcuccaaugccc

SEQ ID NO: 1990664 - RNA, 19 nt, Artificial Sequence
  Description of Artificial Sequence: Synthetic oligonucleotide
  Sense strand starting at position 1408 of SEQ ID NO: 1880745
cuggcauucugacuauaaa

SEQ ID NO: 1990665 - RNA, 19 nt, Artificial Sequence
  Description of Artificial Sequence: Synthetic oligonucleotide
  Antisense strand to SEQ ID NO: 1990664
uuuauagucagaaugccag

SEQ ID NO: 1990666 - RNA, 19 nt, Artificial Sequence
  Description of Artificial Sequence: Synthetic oligonucleotide
  Sense strand starting at position 1409 of SEQ ID NO: 1880745
uggcauucugacuauaaac

SEQ ID NO: 1990667 - RNA, 19 nt, Artificial Sequence
  Description of Artificial Sequence: Synthetic oligonucleotide
  Antisense strand to SEQ ID NO: 1990666
guuuauagucagaaugcca

SEQ ID NO: 1990668 - RNA, 19 nt, Artificial Sequence
  Description of Artificial Sequence: Synthetic oligonucleotide
  Sense strand starting at position 1458 of SEQ ID NO: 1880745
ugugauaaaugcucccacu

SEQ ID NO: 1990669 - RNA, 19 nt, Artificial Sequence
  Description of Artificial Sequence: Synthetic oligonucleotide
  Antisense strand to SEQ ID NO: 1990668
agugggagcauuuaucaca

SEQ ID NO: 1990670 - RNA, 19 nt, Artificial Sequence
  Description of Artificial Sequence: Synthetic oligonucleotide
  Sense strand starting at position 1556 of SEQ ID NO: 1880745
agucauucucaagguuaau

SEQ ID NO: 1990671 - RNA, 19 nt, Artificial Sequence
  Description of Artificial Sequence: Synthetic oligonucleotide
  Antisense strand to SEQ ID NO: 1990670
auuaaccuugagaaugacu

SEQ ID NO: 1990672 - RNA, 19 nt, Artificial Sequence
  Description of Artificial Sequence: Synthetic oligonucleotide
  Sense strand starting at position 1948 of SEQ ID NO: 1880745
gacaguaagcuagggagua

SEQ ID NO: 1990673 - RNA, 19 nt, Artificial Sequence
  Description of Artificial Sequence: Synthetic oligonucleotide
  Antisense strand to SEQ ID NO: 1990672
uacucccuagcuuacuguc

SEQ ID NO: 1990674 - RNA, 19 nt, Artificial Sequence
  Description of Artificial Sequence: Synthetic oligonucleotide
  Sense strand starting at position 2078 of SEQ ID NO: 1880745
uugccaggcuuuccaugaa

SEQ ID NO: 1990675 - RNA, 19 nt, Artificial Sequence
  Description of Artificial Sequence: Synthetic oligonucleotide
  Antisense strand to SEQ ID NO: 1990674
uucauggaaagccuggcaa

SEQ ID NO: 1990676 - RNA, 19 nt, Artificial Sequence
  Description of Artificial Sequence: Synthetic oligonucleotide
  Sense strand starting at position 2081 of SEQ ID NO: 1880745
ccaggcuuuccaugaaagg

SEQ ID NO: 1990677 - RNA, 19 nt, Artificial Sequence
  Description of Artificial Sequence: Synthetic oligonucleotide
  Antisense strand to SEQ ID NO: 1990676
ccuuucauggaaagccugg

SEQ ID NO: 1990678 - RNA, 19 nt, Artificial Sequence
  Description of Artificial Sequence: Synthetic oligonucleotide
  Sense strand starting at position 2194 of SEQ ID NO: 1880745
gccacuuaugaagagguau

SEQ ID NO: 1990679 - RNA, 19 nt, Artificial Sequence
  Description of Artificial Sequence: Synthetic oligonucleotide
  Antisense strand to SEQ ID NO: 1990678
auaccucuucauaaguggc

SEQ ID NO: 1990680 - RNA, 19 nt, Artificial Sequence
  Description of Artificial Sequence: Synthetic oligonucleotide
  Sense strand starting at position 2205 of SEQ ID NO: 1880745
agagguaucauuggcaucu

SEQ ID NO: 1990681 - RNA, 19 nt, Artificial Sequence
  Description of Artificial Sequence: Synthetic oligonucleotide
  Antisense strand to SEQ ID NO: 1990680
agaugccaaugauaccucu

SEQ ID NO: 1990682 - RNA, 19 nt, Artificial Sequence
  Description of Artificial Sequence: Synthetic oligonucleotide
  Sense strand starting at position 2206 of SEQ ID NO: 1880745
gagguaucauuggcaucuu

SEQ ID NO: 1990683 - RNA, 19 nt, Artificial Sequence
  Description of Artificial Sequence: Synthetic oligonucleotide
  Antisense strand to SEQ ID NO: 1990682
aagaugccaaugauaccuc

SEQ ID NO: 1990684 - RNA, 19 nt, Artificial Sequence
  Description of Artificial Sequence: Synthetic oligonucleotide
  Sense strand starting at position 2341 of SEQ ID NO: 1880745
gucaguagucagggaggaa

SEQ ID NO: 1990685 - RNA, 19 nt, Artificial Sequence
  Description of Artificial Sequence: Synthetic oligonucleotide
  Antisense strand to SEQ ID NO: 1990684
uuccucccugacuacugac

SEQ ID NO: 1990686 - RNA, 19 nt, Artificial Sequence
  Description of Artificial Sequence: Synthetic oligonucleotide
  Sense strand starting at position 2380 of SEQ ID NO: 1880745
uguuauuagcaggcgucua

SEQ ID NO: 1990687 - RNA, 19 nt, Artificial Sequence
  Description of Artificial Sequence: Synthetic oligonucleotide
  Antisense strand to SEQ ID NO: 1990686
uagacgccugcuaauaaca

SEQ ID NO: 1990688 - RNA, 19 nt, Artificial Sequence
  Description of Artificial Sequence: Synthetic oligonucleotide
  Sense strand starting at position 2442 of SEQ ID NO: 1880745
uuugcuaccuauccugaga

SEQ ID NO: 1990689 - RNA, 19 nt, Artificial Sequence
  Description of Artificial Sequence: Synthetic oligonucleotide
  Antisense strand to SEQ ID NO: 1990688
ucucaggauagguagcaaa

SEQ ID NO: 1990690 - RNA, 19 nt, Artificial Sequence
  Description of Artificial Sequence: Synthetic oligonucleotide
  Sense strand starting at position 2557 of SEQ ID NO: 1880745
uagcaauuacacggucaaa

SEQ ID NO: 1990691 - RNA, 19 nt, Artificial Sequence
  Description of Artificial Sequence: Synthetic oligonucleotide
  Antisense strand to SEQ ID NO: 1990690
uuugaccguguaauugcua

SEQ ID NO: 1990692 - RNA, 19 nt, Artificial Sequence
  Description of Artificial Sequence: Synthetic oligonucleotide
  Sense strand starting at position 2569 of SEQ ID NO: 1880745
ggucaaaucaguugggaag

SEQ ID NO: 1990693 - RNA, 19 nt, Artificial Sequence
  Description of Artificial Sequence: Synthetic oligonucleotide
  Antisense strand to SEQ ID NO: 1990692
cuucccaacugauuugacc

SEQ ID NO: 1990694 - RNA, 19 nt, Artificial Sequence
  Description of Artificial Sequence: Synthetic oligonucleotide
  Sense strand starting at position 2682 of SEQ ID NO: 1880745
gaggccuugucucuauaaa

SEQ ID NO: 1990695 - RNA, 19 nt, Artificial Sequence
  Description of Artificial Sequence: Synthetic oligonucleotide
  Antisense strand to SEQ ID NO: 1990694
uuuauagagacaaggccuc

SEQ ID NO: 1990696 - RNA, 19 nt, Artificial Sequence
  Description of Artificial Sequence: Synthetic oligonucleotide
  Sense strand starting at position 2881 of SEQ ID NO: 1880745
uugggaaacugggucauua

SEQ ID NO: 1990697 - RNA, 19 nt, Artificial Sequence
  Description of Artificial Sequence: Synthetic oligonucleotide
  Antisense strand to SEQ ID NO: 1990696
uaaugacccaguuucccaa

SEQ ID NO: 1990698 - RNA, 19 nt, Artificial Sequence
  Description of Artificial Sequence: Synthetic oligonucleotide
  Sense strand starting at position 2977 of SEQ ID NO: 1880745
gaccaagguaugugguauu

SEQ ID NO: 1990699 - RNA, 19 nt, Artificial Sequence
  Description of Artificial Sequence: Synthetic oligonucleotide
  Antisense strand to SEQ ID NO: 1990698
aauaccacauaccuugguc

SEQ ID NO: 1990700 - RNA, 19 nt, Artificial Sequence
  Description of Artificial Sequence: Synthetic oligonucleotide
  Sense strand starting at position 3113 of SEQ ID NO: 1880745
gagugaguuacccaagguc

SEQ ID NO: 1990701 - RNA, 19 nt, Artificial Sequence
  Description of Artificial Sequence: Synthetic oligonucleotide
  Antisense strand to SEQ ID NO: 1990700
gaccuuggguaacucacuc

SEQ ID NO: 1990702 - RNA, 19 nt, Artificial Sequence
  Description of Artificial Sequence: Synthetic oligonucleotide
  Sense strand starting at position 3206 of SEQ ID NO: 1880745
ucauaagacuuccuuggau

SEQ ID NO: 1990703 - RNA, 19 nt, Artificial Sequence
  Description of Artificial Sequence: Synthetic oligonucleotide
  Antisense strand to SEQ ID NO: 1990702
auccaaggaagucuuauga

SEQ ID NO: 1990704 - RNA, 19 nt, Artificial Sequence
  Description of Artificial Sequence: Synthetic oligonucleotide
  Sense strand starting at position 3225 of SEQ ID NO: 1880745
ggaugauguaugugcugag

SEQ ID NO: 1990705 - RNA, 19 nt, Artificial Sequence
  Description of Artificial Sequence: Synthetic oligonucleotide
  Antisense strand to SEQ ID NO: 1990704
cucagcacauacaucaucc

SEQ ID NO: 1990706 - RNA, 19 nt, Artificial Sequence
  Description of Artificial Sequence: Synthetic oligonucleotide
  Sense strand starting at position 3226 of SEQ ID NO: 1880745
gaugauguaugugcugaga

SEQ ID NO: 1990707 - RNA, 19 nt, Artificial Sequence
  Description of Artificial Sequence: Synthetic oligonucleotide
  Antisense strand to SEQ ID NO: 1990706
ucucagcacauacaucauc

SEQ ID NO: 1990708 - RNA, 19 nt, Artificial Sequence
  Description of Artificial Sequence: Synthetic oligonucleotide
  Sense strand starting at position 3229 of SEQ ID NO: 1880745
gauguaugugcugagauuc

SEQ ID NO: 1990709 - RNA, 19 nt, Artificial Sequence
  Description of Artificial Sequence: Synthetic oligonucleotide
  Antisense strand to SEQ ID NO: 1990708
gaaucucagcacauacauc

SEQ ID NO: 1990710 - RNA, 19 nt, Artificial Sequence
  Description of Artificial Sequence: Synthetic oligonucleotide
  Sense strand starting at position 3290 of SEQ ID NO: 1880745
gggugaggucgagaauuga

SEQ ID NO: 1990711 - RNA, 19 nt, Artificial Sequence
  Description of Artificial Sequence: Synthetic oligonucleotide
  Antisense strand to SEQ ID NO: 1990710
ucaauucucgaccucaccc

SEQ ID NO: 1990712 - RNA, 19 nt, Artificial Sequence
  Description of Artificial Sequence: Synthetic oligonucleotide
  Sense strand starting at position 3296 of SEQ ID NO: 1880745
ggucgagaauugaagguca

SEQ ID NO: 1990713 - RNA, 19 nt, Artificial Sequence
  Description of Artificial Sequence: Synthetic oligonucleotide
  Antisense strand to SEQ ID NO: 1990712
ugaccuucaauucucgacc

SEQ ID NO: 1990714 - RNA, 19 nt, Artificial Sequence
  Description of Artificial Sequence: Synthetic oligonucleotide
  Sense strand starting at position 3340 of SEQ ID NO: 1880745
uccuuuaauccuggauggu

SEQ ID NO: 1990715 - RNA, 19 nt, Artificial Sequence
  Description of Artificial Sequence: Synthetic oligonucleotide
  Antisense strand to SEQ ID NO: 1990714
accauccaggauuaaagga

SEQ ID NO: 1990716 - RNA, 19 nt, Artificial Sequence
  Description of Artificial Sequence: Synthetic oligonucleotide
  Sense strand starting at position 3341 of SEQ ID NO: 1880745
ccuuuaauccuggauggua

SEQ ID NO: 1990717 - RNA, 19 nt, Artificial Sequence
  Description of Artificial Sequence: Synthetic oligonucleotide
  Antisense strand to SEQ ID NO: 1990716
uaccauccaggauuaaagg

SEQ ID NO: 1990718 - RNA, 19 nt, Artificial Sequence
  Description of Artificial Sequence: Synthetic oligonucleotide
  Sense strand starting at position 3555 of SEQ ID NO: 1880745
cgggaugacgcgagcugua

SEQ ID NO: 1990719 - RNA, 19 nt, Artificial Sequence
  Description of Artificial Sequence: Synthetic oligonucleotide
  Antisense strand to SEQ ID NO: 1990718
uacagcucgcgucaucccg

SEQ ID NO: 1990720 - RNA, 19 nt, Artificial Sequence
  Description of Artificial Sequence: Synthetic oligonucleotide
  Sense strand starting at position 3614 of SEQ ID NO: 1880745
guuuccuuuccgcuucuua

SEQ ID NO: 1990721 - RNA, 19 nt, Artificial Sequence
  Description of Artificial Sequence: Synthetic oligonucleotide
  Antisense strand to SEQ ID NO: 1990720
uaagaagcggaaaggaaac

SEQ ID NO: 1990722 - RNA, 19 nt, Artificial Sequence
  Description of Artificial Sequence: Synthetic oligonucleotide
  Sense strand starting at position 3773 of SEQ ID NO: 1880745
cacuauuagcuggagagca

SEQ ID NO: 1990723 - RNA, 19 nt, Artificial Sequence
  Description of Artificial Sequence: Synthetic oligonucleotide
  Antisense strand to SEQ ID NO: 1990722
ugcucuccagcuaauagug

SEQ ID NO: 1990724 - RNA, 19 nt, Artificial Sequence
  Description of Artificial Sequence: Synthetic oligonucleotide
  Sense strand starting at position 3974 of SEQ ID NO: 1880745
cucugugugguagaaugaa

SEQ ID NO: 1990725 - RNA, 19 nt, Artificial Sequence
  Description of Artificial Sequence: Synthetic oligonucleotide
  Antisense strand to SEQ ID NO: 1990724
uucauucuaccacacagag

SEQ ID NO: 1990726 - RNA, 19 nt, Artificial Sequence
  Description of Artificial Sequence: Synthetic oligonucleotide
  Sense strand starting at position 600 of SEQ ID NO: 1880746
cuuugaagagaauggcuaa

SEQ ID NO: 1990727 - RNA, 19 nt, Artificial Sequence
  Description of Artificial Sequence: Synthetic oligonucleotide
  Antisense strand to SEQ ID NO: 1990726
uuagccauucucuucaaag

SEQ ID NO: 1990728 - RNA, 19 nt, Artificial Sequence
  Description of Artificial Sequence: Synthetic oligonucleotide
  Sense strand starting at position 815 of SEQ ID NO: 1880746
ccaucuuugguagaacgua

SEQ ID NO: 1990729 - RNA, 19 nt, Artificial Sequence
  Description of Artificial Sequence: Synthetic oligonucleotide
  Antisense strand to SEQ ID NO: 1990728
uacguucuaccaaagaugg

SEQ ID NO: 1990730 - RNA, 19 nt, Artificial Sequence
  Description of Artificial Sequence: Synthetic oligonucleotide
  Sense strand starting at position 820 of SEQ ID NO: 1880746
uuugguagaacguauaaau

SEQ ID NO: 1990731 - RNA, 19 nt, Artificial Sequence
  Description of Artificial Sequence: Synthetic oligonucleotide
  Antisense strand to SEQ ID NO: 1990730
auuuauacguucuaccaaa

SEQ ID NO: 1990732 - RNA, 19 nt, Artificial Sequence
  Description of Artificial Sequence: Synthetic oligonucleotide
  Sense strand starting at position 998 of SEQ ID NO: 1880746
gccaaauuggucuagggua

SEQ ID NO: 1990733 - RNA, 19 nt, Artificial Sequence
  Description of Artificial Sequence: Synthetic oligonucleotide
  Antisense strand to SEQ ID NO: 1990732
uacccuagaccaauuuggc

SEQ ID NO: 1990734 - RNA, 19 nt, Artificial Sequence
  Description of Artificial Sequence: Synthetic oligonucleotide
  Sense strand starting at position 1000 of SEQ ID NO: 1880746
caaauuggucuaggguauu

SEQ ID NO: 1990735 - RNA, 19 nt, Artificial Sequence
  Description of Artificial Sequence: Synthetic oligonucleotide
  Antisense strand to SEQ ID NO: 1990734
aauacccuagaccaauuug

SEQ ID NO: 1990736 - RNA, 19 nt, Artificial Sequence
  Description of Artificial Sequence: Synthetic oligonucleotide
  Sense strand starting at position 1003 of SEQ ID NO: 1880746
auuggucuaggguauuaga

SEQ ID NO: 1990737 - RNA, 19 nt, Artificial Sequence
  Description of Artificial Sequence: Synthetic oligonucleotide
  Antisense strand to SEQ ID NO: 1990736
ucuaauacccuagaccaau

SEQ ID NO: 1990738 - RNA, 19 nt, Artificial Sequence
  Description of Artificial Sequence: Synthetic oligonucleotide
  Sense strand starting at position 1134 of SEQ ID NO: 1880746
guguguuuacuuuaugaaa

SEQ ID NO: 1990739 - RNA, 19 nt, Artificial Sequence
  Description of Artificial Sequence: Synthetic oligonucleotide
  Antisense strand to SEQ ID NO: 1990738
uuucauaaaguaaacacac

SEQ ID NO: 1990740 - RNA, 19 nt, Artificial Sequence
  Description of Artificial Sequence: Synthetic oligonucleotide
  Sense strand starting at position 1303 of SEQ ID NO: 1880746
gugccagucagauauaaug

SEQ ID NO: 1990741 - RNA, 19 nt, Artificial Sequence
  Description of Artificial Sequence: Synthetic oligonucleotide
  Antisense strand to SEQ ID NO: 1990740
cauuauaucugacuggcac

SEQ ID NO: 1990742 - RNA, 19 nt, Artificial Sequence
  Description of Artificial Sequence: Synthetic oligonucleotide
  Sense strand starting at position 1309 of SEQ ID NO: 1880746
gucagauauaaugaugcga

SEQ ID NO: 1990743 - RNA, 19 nt, Artificial Sequence
  Description of Artificial Sequence: Synthetic oligonucleotide
  Antisense strand to SEQ ID NO: 1990742
ucgcaucauuauaucugac

SEQ ID NO: 1990744 - RNA, 19 nt, Artificial Sequence
  Description of Artificial Sequence: Synthetic oligonucleotide
  Sense strand starting at position 1578 of SEQ ID NO: 1880746
ugagaaagauucuuguucu

SEQ ID NO: 1990745 - RNA, 19 nt, Artificial Sequence
  Description of Artificial Sequence: Synthetic oligonucleotide
  Antisense strand to SEQ ID NO: 1990744
agaacaagaaucuuucuca

SEQ ID NO: 1990746 - RNA, 19 nt, Artificial Sequence
  Description of Artificial Sequence: Synthetic oligonucleotide
  Sense strand starting at position 1824 of SEQ ID NO: 1880746
gugagaaaugacugugaug

SEQ ID NO: 1990747 - RNA, 19 nt, Artificial Sequence
  Description of Artificial Sequence: Synthetic oligonucleotide
  Antisense strand to SEQ ID NO: 1990746
caucacagucauuucucac

SEQ ID NO: 1990748 - RNA, 19 nt, Artificial Sequence
  Description of Artificial Sequence: Synthetic oligonucleotide
  Sense strand starting at position 1864 of SEQ ID NO: 1880746
uccugaccucuagauugua

SEQ ID NO: 1990749 - RNA, 19 nt, Artificial Sequence
  Description of Artificial Sequence: Synthetic oligonucleotide
  Antisense strand to SEQ ID NO: 1990748
uacaaucuagaggucagga

SEQ ID NO: 1990750 - RNA, 19 nt, Artificial Sequence
  Description of Artificial Sequence: Synthetic oligonucleotide
  Sense strand starting at position 2087 of SEQ ID NO: 1880746
acugauagguuaucuagua

SEQ ID NO: 1990751 - RNA, 19 nt, Artificial Sequence
  Description of Artificial Sequence: Synthetic oligonucleotide
  Antisense strand to SEQ ID NO: 1990750
uacuagauaaccuaucagu

SEQ ID NO: 1990752 - RNA, 19 nt, Artificial Sequence
  Description of Artificial Sequence: Synthetic oligonucleotide
  Sense strand starting at position 2088 of SEQ ID NO: 1880746
cugauagguuaucuaguag

SEQ ID NO: 1990753 - RNA, 19 nt, Artificial Sequence
  Description of Artificial Sequence: Synthetic oligonucleotide
  Antisense strand to SEQ ID NO: 1990752
cuacuagauaaccuaucag

SEQ ID NO: 1990754 - RNA, 19 nt, Artificial Sequence
  Description of Artificial Sequence: Synthetic oligonucleotide
  Sense strand starting at position 2119 of SEQ ID NO: 1880746
uuguaagaaucuuugggaa

SEQ ID NO: 1990755 - RNA, 19 nt, Artificial Sequence
  Description of Artificial Sequence: Synthetic oligonucleotide
  Antisense strand to SEQ ID NO: 1990754
uucccaaagauucuuacaa

SEQ ID NO: 1990756 - RNA, 19 nt, Artificial Sequence
  Description of Artificial Sequence: Synthetic oligonucleotide
  Sense strand starting at position 2493 of SEQ ID NO: 1880746
cugacucaaguuuaguuua

SEQ ID NO: 1990757 - RNA, 19 nt, Artificial Sequence
  Description of Artificial Sequence: Synthetic oligonucleotide
  Antisense strand to SEQ ID NO: 1990756
uaaacuaaacuugagucag

SEQ ID NO: 1990758 - RNA, 19 nt, Artificial Sequence
  Description of Artificial Sequence: Synthetic oligonucleotide
  Sense strand starting at position 2593 of SEQ ID NO: 1880746
acuuacuggccauaaguaa

SEQ ID NO: 1990759 - RNA, 19 nt, Artificial Sequence
  Description of Artificial Sequence: Synthetic oligonucleotide
  Antisense strand to SEQ ID NO: 1990758
uuacuuauggccaguaagu

SEQ ID NO: 1990760 - RNA, 19 nt, Artificial Sequence
  Description of Artificial Sequence: Synthetic oligonucleotide
  Sense strand starting at position 2622 of SEQ ID NO: 1880746
cuggccuuccaguacagaa

SEQ ID NO: 1990761 - RNA, 19 nt, Artificial Sequence
  Description of Artificial Sequence: Synthetic oligonucleotide
  Antisense strand to SEQ ID NO: 1990760
uucuguacuggaaggccag

SEQ ID NO: 1990762 - RNA, 19 nt, Artificial Sequence
  Description of Artificial Sequence: Synthetic oligonucleotide
  Sense strand starting at position 2748 of SEQ ID NO: 1880746
uuagaagcagucuauauaa

SEQ ID NO: 1990763 - RNA, 19 nt, Artificial Sequence
  Description of Artificial Sequence: Synthetic oligonucleotide
  Antisense strand to SEQ ID NO: 1990762
uuauauagacugcuucuaa

SEQ ID NO: 1990764 - RNA, 19 nt, Artificial Sequence
  Description of Artificial Sequence: Synthetic oligonucleotide
  Sense strand starting at position 2759 of SEQ ID NO: 1880746
cuauauaagccagguauag

SEQ ID NO: 1990765 - RNA, 19 nt, Artificial Sequence
  Description of Artificial Sequence: Synthetic oligonucleotide
  Antisense strand to SEQ ID NO: 1990764
cuauaccuggcuuauauag

SEQ ID NO: 1990766 - RNA, 19 nt, Artificial Sequence
  Description of Artificial Sequence: Synthetic oligonucleotide
  Sense strand starting at position 2926 of SEQ ID NO: 1880746
cucagauauguaugcagga

SEQ ID NO: 1990767 - RNA, 19 nt, Artificial Sequence
  Description of Artificial Sequence: Synthetic oligonucleotide
  Antisense strand to SEQ ID NO: 1990766
uccugcauacauaucugag

SEQ ID NO: 1990768 - RNA, 19 nt, Artificial Sequence
  Description of Artificial Sequence: Synthetic oligonucleotide
  Sense strand starting at position 2927 of SEQ ID NO: 1880746
ucagauauguaugcaggau

SEQ ID NO: 1990769 - RNA, 19 nt, Artificial Sequence
  Description of Artificial Sequence: Synthetic oligonucleotide
  Antisense strand to SEQ ID NO: 1990768
auccugcauacauaucuga

SEQ ID NO: 1990770 - RNA, 19 nt, Artificial Sequence
  Description of Artificial Sequence: Synthetic oligonucleotide
  Sense strand starting at position 2931 of SEQ ID NO: 1880746
auauguaugcaggauucca

SEQ ID NO: 1990771 - RNA, 19 nt, Artificial Sequence
  Description of Artificial Sequence: Synthetic oligonucleotide
  Antisense strand to SEQ ID NO: 1990770
uggaauccugcauacauau

SEQ ID NO: 1990772 - RNA, 19 nt, Artificial Sequence
  Description of Artificial Sequence: Synthetic oligonucleotide
  Sense strand starting at position 2961 of SEQ ID NO: 1880746
auacucuuccaguaugagu

SEQ ID NO: 1990773 - RNA, 19 nt, Artificial Sequence
  Description of Artificial Sequence: Synthetic oligonucleotide
  Antisense strand to SEQ ID NO: 1990772
acucauacuggaagaguau

SEQ ID NO: 1990774 - RNA, 19 nt, Artificial Sequence
  Description of Artificial Sequence: Synthetic oligonucleotide
  Sense strand starting at position 3111 of SEQ ID NO: 1880746
ccuucuugauuuguaugca

SEQ ID NO: 1990775 - RNA, 19 nt, Artificial Sequence
  Description of Artificial Sequence: Synthetic oligonucleotide
  Antisense strand to SEQ ID NO: 1990774
ugcauacaaaucaagaagg

SEQ ID NO: 1990776 - RNA, 19 nt, Artificial Sequence
  Description of Artificial Sequence: Synthetic oligonucleotide
  Sense strand starting at position 3114 of SEQ ID NO: 1880746
ucuugauuuguaugcaugu

SEQ ID NO: 1990777 - RNA, 19 nt, Artificial Sequence
  Description of Artificial Sequence: Synthetic oligonucleotide
  Antisense strand to SEQ ID NO: 1990776
acaugcauacaaaucaaga

SEQ ID NO: 1990778 - RNA, 19 nt, Artificial Sequence
  Description of Artificial Sequence: Synthetic oligonucleotide
  Sense strand starting at position 3115 of SEQ ID NO: 1880746
cuugauuuguaugcauguu

SEQ ID NO: 1990779 - RNA, 19 nt, Artificial Sequence
  Description of Artificial Sequence: Synthetic oligonucleotide
  Antisense strand to SEQ ID NO: 1990778
aacaugcauacaaaucaag

SEQ ID NO: 1990780 - RNA, 19 nt, Artificial Sequence
  Description of Artificial Sequence: Synthetic oligonucleotide
  Sense strand starting at position 3168 of SEQ ID NO: 1880746
gugcaugucuuacuauuua

SEQ ID NO: 1990781 - RNA, 19 nt, Artificial Sequence
  Description of Artificial Sequence: Synthetic oligonucleotide
  Antisense strand to SEQ ID NO: 1990780
uaaauaguaagacaugcac

SEQ ID NO: 1990782 - RNA, 19 nt, Artificial Sequence
  Description of Artificial Sequence: Synthetic oligonucleotide
  Sense strand starting at position 3229 of SEQ ID NO: 1880746
ggacaaggccuguauuauu

SEQ ID NO: 1990783 - RNA, 19 nt, Artificial Sequence
  Description of Artificial Sequence: Synthetic oligonucleotide
  Antisense strand to SEQ ID NO: 1990782
aauaauacaggccuugucc

SEQ ID NO: 1990784 - RNA, 19 nt, Artificial Sequence
  Description of Artificial Sequence: Synthetic oligonucleotide
  Sense strand starting at position 3249 of SEQ ID NO: 1880746
cagguccuggucuaauaga

SEQ ID NO: 1990785 - RNA, 19 nt, Artificial Sequence
  Description of Artificial Sequence: Synthetic oligonucleotide
  Antisense strand to SEQ ID NO: 1990784
ucuauuagaccaggaccug

SEQ ID NO: 1990786 - RNA, 19 nt, Artificial Sequence
  Description of Artificial Sequence: Synthetic oligonucleotide
  Sense strand starting at position 3271 of SEQ ID NO: 1880746
uuugaauagcuggguuaaa

SEQ ID NO: 1990787 - RNA, 19 nt, Artificial Sequence
  Description of Artificial Sequence: Synthetic oligonucleotide
  Antisense strand to SEQ ID NO: 1990786
uuuaacccagcuauucaaa

SEQ ID NO: 1990788 - RNA, 19 nt, Artificial Sequence
  Description of Artificial Sequence: Synthetic oligonucleotide
  Sense strand starting at position 3272 of SEQ ID NO: 1880746
uugaauagcuggguuaaag

SEQ ID NO: 1990789 - RNA, 19 nt, Artificial Sequence
  Description of Artificial Sequence: Synthetic oligonucleotide
  Antisense strand to SEQ ID NO: 1990788
cuuuaacccagcuauucaa

SEQ ID NO: 1990790 - RNA, 19 nt, Artificial Sequence
  Description of Artificial Sequence: Synthetic oligonucleotide
  Sense strand starting at position 3334 of SEQ ID NO: 1880746
uuauuugagcuaugcuagu

SEQ ID NO: 1990791 - RNA, 19 nt, Artificial Sequence
  Description of Artificial Sequence: Synthetic oligonucleotide
  Antisense strand to SEQ ID NO: 1990790
acuagcauagcucaaauaa

SEQ ID NO: 1990792 - RNA, 19 nt, Artificial Sequence
  Description of Artificial Sequence: Synthetic oligonucleotide
  Sense strand starting at position 3472 of SEQ ID NO: 1880746
ugcagccaucggugauuua

SEQ ID NO: 1990793 - RNA, 19 nt, Artificial Sequence
  Description of Artificial Sequence: Synthetic oligonucleotide
  Antisense strand to SEQ ID NO: 1990792
uaaaucaccgauggcugca

SEQ ID NO: 1990794 - RNA, 19 nt, Artificial Sequence
  Description of Artificial Sequence: Synthetic oligonucleotide
  Sense strand starting at position 3475 of SEQ ID NO: 1880746
agccaucggugauuuaguu

SEQ ID NO: 1990795 - RNA, 19 nt, Artificial Sequence
  Description of Artificial Sequence: Synthetic oligonucleotide
  Antisense strand to SEQ ID NO: 1990794
aacuaaaucaccgauggcu

SEQ ID NO: 1990796 - RNA, 19 nt, Artificial Sequence
  Description of Artificial Sequence: Synthetic oligonucleotide
  Sense strand starting at position 3705 of SEQ ID NO: 1880746
gaaguugcaucacuaugaa

SEQ ID NO: 1990797 - RNA, 19 nt, Artificial Sequence
  Description of Artificial Sequence: Synthetic oligonucleotide
  Antisense strand to SEQ ID NO: 1990796
uucauagugaugcaacuuc

SEQ ID NO: 1990798 - RNA, 19 nt, Artificial Sequence
  Description of Artificial Sequence: Synthetic oligonucleotide
  Sense strand starting at position 3717 of SEQ ID NO: 1880746
cuaugaaggguguauguga

SEQ ID NO: 1990799 - RNA, 19 nt, Artificial Sequence
  Description of Artificial Sequence: Synthetic oligonucleotide
  Antisense strand to SEQ ID NO: 1990798
ucacauacacccuucauag

SEQ ID NO: 1990800 - RNA, 19 nt, Artificial Sequence
  Description of Artificial Sequence: Synthetic oligonucleotide
  Sense strand starting at position 3748 of SEQ ID NO: 1880746
agccucucagauugggaau

SEQ ID NO: 1990801 - RNA, 19 nt, Artificial Sequence
  Description of Artificial Sequence: Synthetic oligonucleotide
  Antisense strand to SEQ ID NO: 1990800
auucccaaucugagaggcu

SEQ ID NO: 1990802 - RNA, 19 nt, Artificial Sequence
  Description of Artificial Sequence: Synthetic oligonucleotide
  Sense strand starting at position 3749 of SEQ ID NO: 1880746
gccucucagauugggaaua

SEQ ID NO: 1990803 - RNA, 19 nt, Artificial Sequence
  Description of Artificial Sequence: Synthetic oligonucleotide
  Antisense strand to SEQ ID NO: 1990802
uauucccaaucugagaggc

SEQ ID NO: 1990804 - RNA, 19 nt, Artificial Sequence
  Description of Artificial Sequence: Synthetic oligonucleotide
  Sense strand starting at position 3837 of SEQ ID NO: 1880746
gggcucuuccuagaccagu

SEQ ID NO: 1990805 - RNA, 19 nt, Artificial Sequence
  Description of Artificial Sequence: Synthetic oligonucleotide
  Antisense strand to SEQ ID NO: 1990804
acuggucuaggaagagccc

SEQ ID NO: 1990806 - RNA, 19 nt, Artificial Sequence
  Description of Artificial Sequence: Synthetic oligonucleotide
  Sense strand starting at position 72 of SEQ ID NO: 1880747
ucggguucuuccuauuugu

SEQ ID NO: 1990807 - RNA, 19 nt, Artificial Sequence
  Description of Artificial Sequence: Synthetic oligonucleotide
  Antisense strand to SEQ ID NO: 1990806
acaaauaggaagaacccga

SEQ ID NO: 1990808 - RNA, 19 nt, Artificial Sequence
  Description of Artificial Sequence: Synthetic oligonucleotide
  Sense strand starting at position 75 of SEQ ID NO: 1880747
gguucuuccuauuuguuaa

SEQ ID NO: 1990809 - RNA, 19 nt, Artificial Sequence
  Description of Artificial Sequence: Synthetic oligonucleotide
  Antisense strand to SEQ ID NO: 1990808
uuaacaaauaggaagaacc

SEQ ID NO: 1990810 - RNA, 19 nt, Artificial Sequence
  Description of Artificial Sequence: Synthetic oligonucleotide
  Sense strand starting at position 82 of SEQ ID NO: 1880747
ccuauuuguuaacuggcua

SEQ ID NO: 1990811 - RNA, 19 nt, Artificial Sequence
  Description of Artificial Sequence: Synthetic oligonucleotide
  Antisense strand to SEQ ID NO: 1990810
uagccaguuaacaaauagg

SEQ ID NO: 1990812 - RNA, 19 nt, Artificial Sequence
  Description of Artificial Sequence: Synthetic oligonucleotide
  Sense strand starting at position 170 of SEQ ID NO: 1880747
uuguauacaccugaacagu

SEQ ID NO: 1990813 - RNA, 19 nt, Artificial Sequence
  Description of Artificial Sequence: Synthetic oligonucleotide
  Antisense strand to SEQ ID NO: 1990812
acuguucagguguauacaa

SEQ ID NO: 1990814 - RNA, 19 nt, Artificial Sequence
  Description of Artificial Sequence: Synthetic oligonucleotide
  Sense strand starting at position 208 of SEQ ID NO: 1880747
cuccucauuucuuguaagu

SEQ ID NO: 1990815 - RNA, 19 nt, Artificial Sequence
  Description of Artificial Sequence: Synthetic oligonucleotide
  Antisense strand to SEQ ID NO: 1990814
acuuacaagaaaugaggag

SEQ ID NO: 1990816 - RNA, 19 nt, Artificial Sequence
  Description of Artificial Sequence: Synthetic oligonucleotide
  Sense strand starting at position 210 of SEQ ID NO: 1880747
ccucauuucuuguaaguuu

SEQ ID NO: 1990817 - RNA, 19 nt, Artificial Sequence
  Description of Artificial Sequence: Synthetic oligonucleotide
  Antisense strand to SEQ ID NO: 1990816
aaacuuacaagaaaugagg

SEQ ID NO: 1990818 - RNA, 19 nt, Artificial Sequence
  Description of Artificial Sequence: Synthetic oligonucleotide
  Sense strand starting at position 295 of SEQ ID NO: 1880747
cccucucacuguguuaagu

SEQ ID NO: 1990819 - RNA, 19 nt, Artificial Sequence
  Description of Artificial Sequence: Synthetic oligonucleotide
  Antisense strand to SEQ ID NO: 1990818
acuuaacacagugagaggg

SEQ ID NO: 1990820 - RNA, 19 nt, Artificial Sequence
  Description of Artificial Sequence: Synthetic oligonucleotide
  Sense strand starting at position 305 of SEQ ID NO: 1880747
guguuaagucucugggacu

SEQ ID NO: 1990821 - RNA, 19 nt, Artificial Sequence
  Description of Artificial Sequence: Synthetic oligonucleotide
  Antisense strand to SEQ ID NO: 1990820
agucccagagacuuaacac

SEQ ID NO: 1990822 - RNA, 19 nt, Artificial Sequence
  Description of Artificial Sequence: Synthetic oligonucleotide
  Sense strand starting at position 460 of SEQ ID NO: 1880747
caaauagccguuuggaagu

SEQ ID NO: 1990823 - RNA, 19 nt, Artificial Sequence
  Description of Artificial Sequence: Synthetic oligonucleotide
  Antisense strand to SEQ ID NO: 1990822
acuuccaaacggcuauuug

SEQ ID NO: 1990824 - RNA, 19 nt, Artificial Sequence
  Description of Artificial Sequence: Synthetic oligonucleotide
  Sense strand starting at position 762 of SEQ ID NO: 1880747
ugauccugcccugagcaaa

SEQ ID NO: 1990825 - RNA, 19 nt, Artificial Sequence
  Description of Artificial Sequence: Synthetic oligonucleotide
  Antisense strand to SEQ ID NO: 1990824
uuugcucagggcaggauca

SEQ ID NO: 1990826 - RNA, 19 nt, Artificial Sequence
  Description of Artificial Sequence: Synthetic oligonucleotide
  Sense strand starting at position 774 of SEQ ID NO: 1880747
gagcaaagcuggucaccua

SEQ ID NO: 1990827 - RNA, 19 nt, Artificial Sequence
  Description of Artificial Sequence: Synthetic oligonucleotide
  Antisense strand to SEQ ID NO: 1990826
uaggugaccagcuuugcuc

SEQ ID NO: 1990828 - RNA, 19 nt, Artificial Sequence
  Description of Artificial Sequence: Synthetic oligonucleotide
  Sense strand starting at position 777 of SEQ ID NO: 1880747
caaagcuggucaccuagaa

SEQ ID NO: 1990829 - RNA, 19 nt, Artificial Sequence
  Description of Artificial Sequence: Synthetic oligonucleotide
  Antisense strand to SEQ ID NO: 1990828
uucuaggugaccagcuuug

SEQ ID NO: 1990830 - RNA, 19 nt, Artificial Sequence
  Description of Artificial Sequence: Synthetic oligonucleotide
  Sense strand starting at position 926 of SEQ ID NO: 1880747
aguagucacccugaggcuu

SEQ ID NO: 1990831 - RNA, 19 nt, Artificial Sequence
  Description of Artificial Sequence: Synthetic oligonucleotide
  Antisense strand to SEQ ID NO: 1990830
aagccucagggugacuacu

SEQ ID NO: 1990832 - RNA, 19 nt, Artificial Sequence
  Description of Artificial Sequence: Synthetic oligonucleotide
  Sense strand starting at position 1080 of SEQ ID NO: 1880747
uggcaaagccuagagacuu

SEQ ID NO: 1990833 - RNA, 19 nt, Artificial Sequence
  Description of Artificial Sequence: Synthetic oligonucleotide
  Antisense strand to SEQ ID NO: 1990832
aagucucuaggcuuugcca

SEQ ID NO: 1990834 - RNA, 19 nt, Artificial Sequence
  Description of Artificial Sequence: Synthetic oligonucleotide
  Sense strand starting at position 1105 of SEQ ID NO: 1880747
aggugaagauagcaaugau

SEQ ID NO: 1990835 - RNA, 19 nt, Artificial Sequence
  Description of Artificial Sequence: Synthetic oligonucleotide
  Antisense strand to SEQ ID NO: 1990834
aucauugcuaucuucaccu

SEQ ID NO: 1990836 - RNA, 19 nt, Artificial Sequence
  Description of Artificial Sequence: Synthetic oligonucleotide
  Sense strand starting at position 1117 of SEQ ID NO: 1880747
caaugauggccacagugau

SEQ ID NO: 1990837 - RNA, 19 nt, Artificial Sequence
  Description of Artificial Sequence: Synthetic oligonucleotide
  Antisense strand to SEQ ID NO: 1990836
aucacuguggccaucauug

SEQ ID NO: 1990838 - RNA, 19 nt, Artificial Sequence
  Description of Artificial Sequence: Synthetic oligonucleotide
  Sense strand starting at position 1147 of SEQ ID NO: 1880747
cggagaugauggaguaaac

SEQ ID NO: 1990839 - RNA, 19 nt, Artificial Sequence
  Description of Artificial Sequence: Synthetic oligonucleotide
  Antisense strand to SEQ ID NO: 1990838
guuuacuccaucaucuccg

SEQ ID NO: 1990840 - RNA, 19 nt, Artificial Sequence
  Description of Artificial Sequence: Synthetic oligonucleotide
  Sense strand starting at position 1295 of SEQ ID NO: 1880747
cagugagaugccuggcuca

SEQ ID NO: 1990841 - RNA, 19 nt, Artificial Sequence
  Description of Artificial Sequence: Synthetic oligonucleotide
  Antisense strand to SEQ ID NO: 1990840
ugagccaggcaucucacug

SEQ ID NO: 1990842 - RNA, 19 nt, Artificial Sequence
  Description of Artificial Sequence: Synthetic oligonucleotide
  Sense strand starting at position 1467 of SEQ ID NO: 1880747
gcucuaugcagcugugaga

SEQ ID NO: 1990843 - RNA, 19 nt, Artificial Sequence
  Description of Artificial Sequence: Synthetic oligonucleotide
  Antisense strand to SEQ ID NO: 1990842
ucucacagcugcauagagc

SEQ ID NO: 1990844 - RNA, 19 nt, Artificial Sequence
  Description of Artificial Sequence: Synthetic oligonucleotide
  Sense strand starting at position 1595 of SEQ ID NO: 1880747
aggagauucucccagacug

SEQ ID NO: 1990845 - RNA, 19 nt, Artificial Sequence
  Description of Artificial Sequence: Synthetic oligonucleotide
  Antisense strand to SEQ ID NO: 1990844
cagucugggagaaucuccu

SEQ ID NO: 1990846 - RNA, 19 nt, Artificial Sequence
  Description of Artificial Sequence: Synthetic oligonucleotide
  Sense strand starting at position 1831 of SEQ ID NO: 1880747
aucuuaccuuucggauaaa

SEQ ID NO: 1990847 - RNA, 19 nt, Artificial Sequence
  Description of Artificial Sequence: Synthetic oligonucleotide
  Antisense strand to SEQ ID NO: 1990846
uuuauccgaaagguaagau

SEQ ID NO: 1990848 - RNA, 19 nt, Artificial Sequence
  Description of Artificial Sequence: Synthetic oligonucleotide
  Sense strand starting at position 1974 of SEQ ID NO: 1880747
ugagacauguggcgucaau

SEQ ID NO: 1990849 - RNA, 19 nt, Artificial Sequence
  Description of Artificial Sequence: Synthetic oligonucleotide
  Antisense strand to SEQ ID NO: 1990848
auugacgccacaugucuca

SEQ ID NO: 1990850 - RNA, 19 nt, Artificial Sequence
  Description of Artificial Sequence: Synthetic oligonucleotide
  Sense strand starting at position 2011 of SEQ ID NO: 1880747
aucucaaagucucagggau

SEQ ID NO: 1990851 - RNA, 19 nt, Artificial Sequence
  Description of Artificial Sequence: Synthetic oligonucleotide
  Antisense strand to SEQ ID NO: 1990850
aucccugagacuuugagau

SEQ ID NO: 1990852 - RNA, 19 nt, Artificial Sequence
  Description of Artificial Sequence: Synthetic oligonucleotide
  Sense strand starting at position 2047 of SEQ ID NO: 1880747
guguuauaacaggaacucu

SEQ ID NO: 1990853 - RNA, 19 nt, Artificial Sequence
  Description of Artificial Sequence: Synthetic oligonucleotide
  Antisense strand to SEQ ID NO: 1990852
agaguuccuguuauaacac

SEQ ID NO: 1990854 - RNA, 19 nt, Artificial Sequence
  Description of Artificial Sequence: Synthetic oligonucleotide
  Sense strand starting at position 2444 of SEQ ID NO: 1880747
cgcacauguccaggugaga

SEQ ID NO: 1990855 - RNA, 19 nt, Artificial Sequence
  Description of Artificial Sequence: Synthetic oligonucleotide
  Antisense strand to SEQ ID NO: 1990854
ucucaccuggacaugugcg

SEQ ID NO: 1990856 - RNA, 19 nt, Artificial Sequence
  Description of Artificial Sequence: Synthetic oligonucleotide
  Sense strand starting at position 2504 of SEQ ID NO: 1880747
ugcaaacauucccugaaug

SEQ ID NO: 1990857 - RNA, 19 nt, Artificial Sequence
  Description of Artificial Sequence: Synthetic oligonucleotide
  Antisense strand to SEQ ID NO: 1990856
cauucagggaauguuugca

SEQ ID NO: 1990858 - RNA, 19 nt, Artificial Sequence
  Description of Artificial Sequence: Synthetic oligonucleotide
  Sense strand starting at position 2532 of SEQ ID NO: 1880747
cugaaugccucuuugggaa

SEQ ID NO: 1990859 - RNA, 19 nt, Artificial Sequence
  Description of Artificial Sequence: Synthetic oligonucleotide
  Antisense strand to SEQ ID NO: 1990858
uucccaaagaggcauucag

SEQ ID NO: 1990860 - RNA, 19 nt, Artificial Sequence
  Description of Artificial Sequence: Synthetic oligonucleotide
  Sense strand starting at position 3282 of SEQ ID NO: 1880747
cugccaugauguuuaccaa

SEQ ID NO: 1990861 - RNA, 19 nt, Artificial Sequence
  Description of Artificial Sequence: Synthetic oligonucleotide
  Antisense strand to SEQ ID NO: 1990860
uugguaaacaucauggcag

SEQ ID NO: 1990862 - RNA, 19 nt, Artificial Sequence
  Description of Artificial Sequence: Synthetic oligonucleotide
  Sense strand starting at position 3283 of SEQ ID NO: 1880747
ugccaugauguuuaccaaa

SEQ ID NO: 1990863 - RNA, 19 nt, Artificial Sequence
  Description of Artificial Sequence: Synthetic oligonucleotide
  Antisense strand to SEQ ID NO: 1990862
uuugguaaacaucauggca

SEQ ID NO: 1990864 - RNA, 19 nt, Artificial Sequence
  Description of Artificial Sequence: Synthetic oligonucleotide
  Sense strand starting at position 3349 of SEQ ID NO: 1880747
ugaggaaagugguucaggu

SEQ ID NO: 1990865 - RNA, 19 nt, Artificial Sequence
  Description of Artificial Sequence: Synthetic oligonucleotide
  Antisense strand to SEQ ID NO: 1990864
accugaaccacuuuccuca

SEQ ID NO: 1990866 - RNA, 19 nt, Artificial Sequence
  Description of Artificial Sequence: Synthetic oligonucleotide
  Sense strand starting at position 3359 of SEQ ID NO: 1880747
gguucagguucccaaagga

SEQ ID NO: 1990867 - RNA, 19 nt, Artificial Sequence
  Description of Artificial Sequence: Synthetic oligonucleotide
  Antisense strand to SEQ ID NO: 1990866
uccuuugggaaccugaacc

SEQ ID NO: 1990868 - RNA, 19 nt, Artificial Sequence
  Description of Artificial Sequence: Synthetic oligonucleotide
  Sense strand starting at position 3469 of SEQ ID NO: 1880747
ggagucauuacuuggccca

SEQ ID NO: 1990869 - RNA, 19 nt, Artificial Sequence
  Description of Artificial Sequence: Synthetic oligonucleotide
  Antisense strand to SEQ ID NO: 1990868
ugggccaaguaaugacucc

SEQ ID NO: 1990870 - RNA, 19 nt, Artificial Sequence
  Description of Artificial Sequence: Synthetic oligonucleotide
  Sense strand starting at position 3504 of SEQ ID NO: 1880747
guguguacguucugggaca

SEQ ID NO: 1990871 - RNA, 19 nt, Artificial Sequence
  Description of Artificial Sequence: Synthetic oligonucleotide
  Antisense strand to SEQ ID NO: 1990870
ugucccagaacguacacac

SEQ ID NO: 1990872 - RNA, 19 nt, Artificial Sequence
  Description of Artificial Sequence: Synthetic oligonucleotide
  Sense strand starting at position 3505 of SEQ ID NO: 1880747
uguguacguucugggacau

SEQ ID NO: 1990873 - RNA, 19 nt, Artificial Sequence
  Description of Artificial Sequence: Synthetic oligonucleotide
  Antisense strand to SEQ ID NO: 1990872
augucccagaacguacaca

SEQ ID NO: 1990874 - RNA, 19 nt, Artificial Sequence
  Description of Artificial Sequence: Synthetic oligonucleotide
  Sense strand starting at position 3516 of SEQ ID NO: 1880747
ugggacaugccucauggau

SEQ ID NO: 1990875 - RNA, 19 nt, Artificial Sequence
  Description of Artificial Sequence: Synthetic oligonucleotide
  Antisense strand to SEQ ID NO: 1990874
auccaugaggcauguccca

SEQ ID NO: 1990876 - RNA, 19 nt, Artificial Sequence
  Description of Artificial Sequence: Synthetic oligonucleotide
  Sense strand starting at position 3518 of SEQ ID NO: 1880747
ggacaugccucauggaucu

SEQ ID NO: 1990877 - RNA, 19 nt, Artificial Sequence
  Description of Artificial Sequence: Synthetic oligonucleotide
  Antisense strand to SEQ ID NO: 1990876
agauccaugaggcaugucc

SEQ ID NO: 1990878 - RNA, 19 nt, Artificial Sequence
  Description of Artificial Sequence: Synthetic oligonucleotide
  Sense strand starting at position 3525 of SEQ ID NO: 1880747
ccucauggaucuccuugaa

SEQ ID NO: 1990879 - RNA, 19 nt, Artificial Sequence
  Description of Artificial Sequence: Synthetic oligonucleotide
  Antisense strand to SEQ ID NO: 1990878
uucaaggagauccaugagg

SEQ ID NO: 1990880 - RNA, 19 nt, Artificial Sequence
  Description of Artificial Sequence: Synthetic oligonucleotide
  Sense strand starting at position 32 of SEQ ID NO: 1880748
gccaguuggcaucguuuau

SEQ ID NO: 1990881 - RNA, 19 nt, Artificial Sequence
  Description of Artificial Sequence: Synthetic oligonucleotide
  Antisense strand to SEQ ID NO: 1990880
auaaacgaugccaacuggc

SEQ ID NO: 1990882 - RNA, 19 nt, Artificial Sequence
  Description of Artificial Sequence: Synthetic oligonucleotide
  Sense strand starting at position 41 of SEQ ID NO: 1880748
caucguuuauggucggaau

SEQ ID NO: 1990883 - RNA, 19 nt, Artificial Sequence
  Description of Artificial Sequence: Synthetic oligonucleotide
  Antisense strand to SEQ ID NO: 1990882
auuccgaccauaaacgaug

SEQ ID NO: 1990884 - RNA, 19 nt, Artificial Sequence
  Description of Artificial Sequence: Synthetic oligonucleotide
  Sense strand starting at position 42 of SEQ ID NO: 1880748
aucguuuauggucggaauu

SEQ ID NO: 1990885 - RNA, 19 nt, Artificial Sequence
  Description of Artificial Sequence: Synthetic oligonucleotide
  Antisense strand to SEQ ID NO: 1990884
aauuccgaccauaaacgau

SEQ ID NO: 1990886 - RNA, 19 nt, Artificial Sequence
  Description of Artificial Sequence: Synthetic oligonucleotide
  Sense strand starting at position 43 of SEQ ID NO: 1880748
ucguuuauggucggaauua

SEQ ID NO: 1990887 - RNA, 19 nt, Artificial Sequence
  Description of Artificial Sequence: Synthetic oligonucleotide
  Antisense strand to SEQ ID NO: 1990886
uaauuccgaccauaaacga

SEQ ID NO: 1990888 - RNA, 19 nt, Artificial Sequence
  Description of Artificial Sequence: Synthetic oligonucleotide
  Sense strand starting at position 44 of SEQ ID NO: 1880748
cguuuauggucggaauuac

SEQ ID NO: 1990889 - RNA, 19 nt, Artificial Sequence
  Description of Artificial Sequence: Synthetic oligonucleotide
  Antisense strand to SEQ ID NO: 1990888
guaauuccgaccauaaacg

SEQ ID NO: 1990890 - RNA, 19 nt, Artificial Sequence
  Description of Artificial Sequence: Synthetic oligonucleotide
  Sense strand starting at position 54 of SEQ ID NO: 1880748
cggaauuacaacgguaucu

SEQ ID NO: 1990891 - RNA, 19 nt, Artificial Sequence
  Description of Artificial Sequence: Synthetic oligonucleotide
  Antisense strand to SEQ ID NO: 1990890
agauaccguuguaauuccg

SEQ ID NO: 1990892 - RNA, 19 nt, Artificial Sequence
  Description of Artificial Sequence: Synthetic oligonucleotide
  Sense strand starting at position 87 of SEQ ID NO: 1880748
cuccgacuuucguucuuga

SEQ ID NO: 1990893 - RNA, 19 nt, Artificial Sequence
  Description of Artificial Sequence: Synthetic oligonucleotide
  Antisense strand to SEQ ID NO: 1990892
ucaagaacgaaagucggag

SEQ ID NO: 1990894 - RNA, 19 nt, Artificial Sequence
  Description of Artificial Sequence: Synthetic oligonucleotide
  Sense strand starting at position 90 of SEQ ID NO: 1880748
cgacuuucguucuugauua

SEQ ID NO: 1990895 - RNA, 19 nt, Artificial Sequence
  Description of Artificial Sequence: Synthetic oligonucleotide
  Antisense strand to SEQ ID NO: 1990894
uaaucaagaacgaaagucg

SEQ ID NO: 1990896 - RNA, 19 nt, Artificial Sequence
  Description of Artificial Sequence: Synthetic oligonucleotide
  Sense strand starting at position 128 of SEQ ID NO: 1880748
augcuuucgcucuggucua

SEQ ID NO: 1990897 - RNA, 19 nt, Artificial Sequence
  Description of Artificial Sequence: Synthetic oligonucleotide
  Antisense strand to SEQ ID NO: 1990896
uagaccagagcgaaagcau

SEQ ID NO: 1990898 - RNA, 19 nt, Artificial Sequence
  Description of Artificial Sequence: Synthetic oligonucleotide
  Sense strand starting at position 129 of SEQ ID NO: 1880748
ugcuuucgcucuggucuaa

SEQ ID NO: 1990899 - RNA, 19 nt, Artificial Sequence
  Description of Artificial Sequence: Synthetic oligonucleotide
  Antisense strand to SEQ ID NO: 1990898
uuagaccagagcgaaagca

SEQ ID NO: 1990900 - RNA, 19 nt, Artificial Sequence
  Description of Artificial Sequence: Synthetic oligonucleotide
  Sense strand starting at position 130 of SEQ ID NO: 1880748
gcuuucgcucuggucuaaa

SEQ ID NO: 1990901 - RNA, 19 nt, Artificial Sequence
  Description of Artificial Sequence: Synthetic oligonucleotide
  Antisense strand to SEQ ID NO: 1990900
uuuagaccagagcgaaagc

SEQ ID NO: 1990902 - RNA, 19 nt, Artificial Sequence
  Description of Artificial Sequence: Synthetic oligonucleotide
  Sense strand starting at position 197 of SEQ ID NO: 1880748
ggccgucccucuuaaucau

SEQ ID NO: 1990903 - RNA, 19 nt, Artificial Sequence
  Description of Artificial Sequence: Synthetic oligonucleotide
  Antisense strand to SEQ ID NO: 1990902
augauuaagagggacggcc

SEQ ID NO: 1990904 - RNA, 19 nt, Artificial Sequence
  Description of Artificial Sequence: Synthetic oligonucleotide
  Sense strand starting at position 241 of SEQ ID NO: 1880748
auagaacugugguccuauu

SEQ ID NO: 1990905 - RNA, 19 nt, Artificial Sequence
  Description of Artificial Sequence: Synthetic oligonucleotide
  Antisense strand to SEQ ID NO: 1990904
aauaggaccacaguucuau

SEQ ID NO: 1990906 - RNA, 19 nt, Artificial Sequence
  Description of Artificial Sequence: Synthetic oligonucleotide
  Sense strand starting at position 325 of SEQ ID NO: 1880748
guaagugcuucgggccaca

SEQ ID NO: 1990907 - RNA, 19 nt, Artificial Sequence
  Description of Artificial Sequence: Synthetic oligonucleotide
  Antisense strand to SEQ ID NO: 1990906
uguggcccgaagcacuuac

SEQ ID NO: 1990908 - RNA, 19 nt, Artificial Sequence
  Description of Artificial Sequence: Synthetic oligonucleotide
  Sense strand starting at position 506 of SEQ ID NO: 1880748
agacuugcccuccaauuga

SEQ ID NO: 1990909 - RNA, 19 nt, Artificial Sequence
  Description of Artificial Sequence: Synthetic oligonucleotide
  Antisense strand to SEQ ID NO: 1990908
ucaauuggagggcaagucu

SEQ ID NO: 1990910 - RNA, 19 nt, Artificial Sequence
  Description of Artificial Sequence: Synthetic oligonucleotide
  Sense strand starting at position 570 of SEQ ID NO: 1880748
uagaaagaguccuguauug

SEQ ID NO: 1990911 - RNA, 19 nt, Artificial Sequence
  Description of Artificial Sequence: Synthetic oligonucleotide
  Antisense strand to SEQ ID NO: 1990910
caauacaggacucuuucua

SEQ ID NO: 1990912 - RNA, 19 nt, Artificial Sequence
  Description of Artificial Sequence: Synthetic oligonucleotide
  Sense strand starting at position 672 of SEQ ID NO: 1880748
aggcuccuucuccagaauu

SEQ ID NO: 1990913 - RNA, 19 nt, Artificial Sequence
  Description of Artificial Sequence: Synthetic oligonucleotide
  Antisense strand to SEQ ID NO: 1990912
aauucuggagaaggagccu

SEQ ID NO: 1990914 - RNA, 19 nt, Artificial Sequence
  Description of Artificial Sequence: Synthetic oligonucleotide
  Sense strand starting at position 674 of SEQ ID NO: 1880748
gcuccuucuccagaauuga

SEQ ID NO: 1990915 - RNA, 19 nt, Artificial Sequence
  Description of Artificial Sequence: Synthetic oligonucleotide
  Antisense strand to SEQ ID NO: 1990914
ucaauucuggagaaggagc

SEQ ID NO: 1990916 - RNA, 19 nt, Artificial Sequence
  Description of Artificial Sequence: Synthetic oligonucleotide
  Sense strand starting at position 709 of SEQ ID NO: 1880748
acccguggucaccaugaua

SEQ ID NO: 1990917 - RNA, 19 nt, Artificial Sequence
  Description of Artificial Sequence: Synthetic oligonucleotide
  Antisense strand to SEQ ID NO: 1990916
uaucauggugaccacgggu

SEQ ID NO: 1990918 - RNA, 19 nt, Artificial Sequence
  Description of Artificial Sequence: Synthetic oligonucleotide
  Sense strand starting at position 758 of SEQ ID NO: 1880748
ggcagacauucgaaugggu

SEQ ID NO: 1990919 - RNA, 19 nt, Artificial Sequence
  Description of Artificial Sequence: Synthetic oligonucleotide
  Antisense strand to SEQ ID NO: 1990918
acccauucgaaugucugcc

SEQ ID NO: 1990920 - RNA, 19 nt, Artificial Sequence
  Description of Artificial Sequence: Synthetic oligonucleotide
  Sense strand starting at position 760 of SEQ ID NO: 1880748
cagacauucgaauggguca

SEQ ID NO: 1990921 - RNA, 19 nt, Artificial Sequence
  Description of Artificial Sequence: Synthetic oligonucleotide
  Antisense strand to SEQ ID NO: 1990920
ugacccauucgaaugucug

SEQ ID NO: 1990922 - RNA, 19 nt, Artificial Sequence
  Description of Artificial Sequence: Synthetic oligonucleotide
  Sense strand starting at position 761 of SEQ ID NO: 1880748
agacauucgaaugggucau

SEQ ID NO: 1990923 - RNA, 19 nt, Artificial Sequence
  Description of Artificial Sequence: Synthetic oligonucleotide
  Antisense strand to SEQ ID NO: 1990922
augacccauucgaaugucu

SEQ ID NO: 1990924 - RNA, 19 nt, Artificial Sequence
  Description of Artificial Sequence: Synthetic oligonucleotide
  Sense strand starting at position 901 of SEQ ID NO: 1880748
cacgcaucuucccugugaa

SEQ ID NO: 1990925 - RNA, 19 nt, Artificial Sequence
  Description of Artificial Sequence: Synthetic oligonucleotide
  Antisense strand to SEQ ID NO: 1990924
uucacagggaagaugcgug

SEQ ID NO: 1990926 - RNA, 19 nt, Artificial Sequence
  Description of Artificial Sequence: Synthetic oligonucleotide
  Sense strand starting at position 902 of SEQ ID NO: 1880748
acgcaucuucccugugaag

SEQ ID NO: 1990927 - RNA, 19 nt, Artificial Sequence
  Description of Artificial Sequence: Synthetic oligonucleotide
  Antisense strand to SEQ ID NO: 1990926
cuucacagggaagaugcgu

SEQ ID NO: 1990928 - RNA, 19 nt, Artificial Sequence
  Description of Artificial Sequence: Synthetic oligonucleotide
  Sense strand starting at position 3664 of SEQ ID NO: 1880748
gcgggucucaaaugcucau

SEQ ID NO: 1990929 - RNA, 19 nt, Artificial Sequence
  Description of Artificial Sequence: Synthetic oligonucleotide
  Antisense strand to SEQ ID NO: 1990928
augagcauuugagacccgc

SEQ ID NO: 1990930 - RNA, 19 nt, Artificial Sequence
  Description of Artificial Sequence: Synthetic oligonucleotide
  Sense strand starting at position 3968 of SEQ ID NO: 1880748
agcacuguauucuguuauu

SEQ ID NO: 1990931 - RNA, 19 nt, Artificial Sequence
  Description of Artificial Sequence: Synthetic oligonucleotide
  Antisense strand to SEQ ID NO: 1990930
aauaacagaauacagugcu

SEQ ID NO: 1990932 - RNA, 19 nt, Artificial Sequence
  Description of Artificial Sequence: Synthetic oligonucleotide
  Sense strand starting at position 24 of SEQ ID NO: 1880749
gcagcagccucccugauuu

SEQ ID NO: 1990933 - RNA, 19 nt, Artificial Sequence
  Description of Artificial Sequence: Synthetic oligonucleotide
  Antisense strand to SEQ ID NO: 1990932
aaaucagggaggcugcugc

SEQ ID NO: 1990934 - RNA, 19 nt, Artificial Sequence
  Description of Artificial Sequence: Synthetic oligonucleotide
  Sense strand starting at position 110 of SEQ ID NO: 1880749
augcguuucccggagaggu

SEQ ID NO: 1990935 - RNA, 19 nt, Artificial Sequence
  Description of Artificial Sequence: Synthetic oligonucleotide
  Antisense strand to SEQ ID NO: 1990934
accucuccgggaaacgcau

SEQ ID NO: 1990936 - RNA, 19 nt, Artificial Sequence
  Description of Artificial Sequence: Synthetic oligonucleotide
  Sense strand starting at position 111 of SEQ ID NO: 1880749
ugcguuucccggagaggug

SEQ ID NO: 1990937 - RNA, 19 nt, Artificial Sequence
  Description of Artificial Sequence: Synthetic oligonucleotide
  Antisense strand to SEQ ID NO: 1990936
caccucuccgggaaacgca

SEQ ID NO: 1990938 - RNA, 19 nt, Artificial Sequence
  Description of Artificial Sequence: Synthetic oligonucleotide
  Sense strand starting at position 583 of SEQ ID NO: 1880749
gaccucucuguugggauga

SEQ ID NO: 1990939 - RNA, 19 nt, Artificial Sequence
  Description of Artificial Sequence: Synthetic oligonucleotide
  Antisense strand to SEQ ID NO: 1990938
ucaucccaacagagagguc

SEQ ID NO: 1990940 - RNA, 19 nt, Artificial Sequence
  Description of Artificial Sequence: Synthetic oligonucleotide
  Sense strand starting at position 585 of SEQ ID NO: 1880749
ccucucuguugggaugaca

SEQ ID NO: 1990941 - RNA, 19 nt, Artificial Sequence
  Description of Artificial Sequence: Synthetic oligonucleotide
  Antisense strand to SEQ ID NO: 1990940
ugucaucccaacagagagg

SEQ ID NO: 1990942 - RNA, 19 nt, Artificial Sequence
  Description of Artificial Sequence: Synthetic oligonucleotide
  Sense strand starting at position 678 of SEQ ID NO: 1880749
acuucuugucccuauggaa

SEQ ID NO: 1990943 - RNA, 19 nt, Artificial Sequence
  Description of Artificial Sequence: Synthetic oligonucleotide
  Antisense strand to SEQ ID NO: 1990942
uuccauagggacaagaagu

SEQ ID NO: 1990944 - RNA, 19 nt, Artificial Sequence
  Description of Artificial Sequence: Synthetic oligonucleotide
  Sense strand starting at position 692 of SEQ ID NO: 1880749
uggaaagcuucucauugca

SEQ ID NO: 1990945 - RNA, 19 nt, Artificial Sequence
  Description of Artificial Sequence: Synthetic oligonucleotide
  Antisense strand to SEQ ID NO: 1990944
ugcaaugagaagcuuucca

SEQ ID NO: 1990946 - RNA, 19 nt, Artificial Sequence
  Description of Artificial Sequence: Synthetic oligonucleotide
  Sense strand starting at position 718 of SEQ ID NO: 1880749
gggagaaguuucuaucuca

SEQ ID NO: 1990947 - RNA, 19 nt, Artificial Sequence
  Description of Artificial Sequence: Synthetic oligonucleotide
  Antisense strand to SEQ ID NO: 1990946
ugagauagaaacuucuccc

SEQ ID NO: 1990948 - RNA, 19 nt, Artificial Sequence
  Description of Artificial Sequence: Synthetic oligonucleotide
  Sense strand starting at position 753 of SEQ ID NO: 1880749
aaggacaguucuuguaggu

SEQ ID NO: 1990949 - RNA, 19 nt, Artificial Sequence
  Description of Artificial Sequence: Synthetic oligonucleotide
  Antisense strand to SEQ ID NO: 1990948
accuacaagaacuguccuu

SEQ ID NO: 1990950 - RNA, 19 nt, Artificial Sequence
  Description of Artificial Sequence: Synthetic oligonucleotide
  Sense strand starting at position 774 of SEQ ID NO: 1880749
ugaccagucugggacaaga

SEQ ID NO: 1990951 - RNA, 19 nt, Artificial Sequence
  Description of Artificial Sequence: Synthetic oligonucleotide
  Antisense strand to SEQ ID NO: 1990950
ucuugucccagacugguca

SEQ ID NO: 1990952 - RNA, 19 nt, Artificial Sequence
  Description of Artificial Sequence: Synthetic oligonucleotide
  Sense strand starting at position 891 of SEQ ID NO: 1880749
cuguucuggcuccaaggaa

SEQ ID NO: 1990953 - RNA, 19 nt, Artificial Sequence
  Description of Artificial Sequence: Synthetic oligonucleotide
  Antisense strand to SEQ ID NO: 1990952
uuccuuggagccagaacag

SEQ ID NO: 1990954 - RNA, 19 nt, Artificial Sequence
  Description of Artificial Sequence: Synthetic oligonucleotide
  Sense strand starting at position 936 of SEQ ID NO: 1880749
aagacaagcuccugugauu

SEQ ID NO: 1990955 - RNA, 19 nt, Artificial Sequence
  Description of Artificial Sequence: Synthetic oligonucleotide
  Antisense strand to SEQ ID NO: 1990954
aaucacaggagcuugucuu

SEQ ID NO: 1990956 - RNA, 19 nt, Artificial Sequence
  Description of Artificial Sequence: Synthetic oligonucleotide
  Sense strand starting at position 1413 of SEQ ID NO: 1880749
ucagaauccugucugcaga

SEQ ID NO: 1990957 - RNA, 19 nt, Artificial Sequence
  Description of Artificial Sequence: Synthetic oligonucleotide
  Antisense strand to SEQ ID NO: 1990956
ucugcagacaggauucuga

SEQ ID NO: 1990958 - RNA, 19 nt, Artificial Sequence
  Description of Artificial Sequence: Synthetic oligonucleotide
  Sense strand starting at position 1415 of SEQ ID NO: 1880749
agaauccugucugcagaga

SEQ ID NO: 1990959 - RNA, 19 nt, Artificial Sequence
  Description of Artificial Sequence: Synthetic oligonucleotide
  Antisense strand to SEQ ID NO: 1990958
ucucugcagacaggauucu

SEQ ID NO: 1990960 - RNA, 19 nt, Artificial Sequence
  Description of Artificial Sequence: Synthetic oligonucleotide
  Sense strand starting at position 1506 of SEQ ID NO: 1880749
gugugaccuuuacaaguca

SEQ ID NO: 1990961 - RNA, 19 nt, Artificial Sequence
  Description of Artificial Sequence: Synthetic oligonucleotide
  Antisense strand to SEQ ID NO: 1990960
ugacuuguaaaggucacac

SEQ ID NO: 1990962 - RNA, 19 nt, Artificial Sequence
  Description of Artificial Sequence: Synthetic oligonucleotide
  Sense strand starting at position 1535 of SEQ ID NO: 1880749
cugaaaugcugcucuacca

SEQ ID NO: 1990963 - RNA, 19 nt, Artificial Sequence
  Description of Artificial Sequence: Synthetic oligonucleotide
  Antisense strand to SEQ ID NO: 1990962
ugguagagcagcauuucag

SEQ ID NO: 1990964 - RNA, 19 nt, Artificial Sequence
  Description of Artificial Sequence: Synthetic oligonucleotide
  Sense strand starting at position 2061 of SEQ ID NO: 1880749
acugauuccacgugagugu

SEQ ID NO: 1990965 - RNA, 19 nt, Artificial Sequence
  Description of Artificial Sequence: Synthetic oligonucleotide
  Antisense strand to SEQ ID NO: 1990964
acacucacguggaaucagu

SEQ ID NO: 1990966 - RNA, 19 nt, Artificial Sequence
  Description of Artificial Sequence: Synthetic oligonucleotide
  Sense strand starting at position 2321 of SEQ ID NO: 1880749
acacuucucugcuugaaag

SEQ ID NO: 1990967 - RNA, 19 nt, Artificial Sequence
  Description of Artificial Sequence: Synthetic oligonucleotide
  Antisense strand to SEQ ID NO: 1990966
cuuucaagcagagaagugu

SEQ ID NO: 1990968 - RNA, 19 nt, Artificial Sequence
  Description of Artificial Sequence: Synthetic oligonucleotide
  Sense strand starting at position 2323 of SEQ ID NO: 1880749
acuucucugcuugaaagcu

SEQ ID NO: 1990969 - RNA, 19 nt, Artificial Sequence
  Description of Artificial Sequence: Synthetic oligonucleotide
  Antisense strand to SEQ ID NO: 1990968
agcuuucaagcagagaagu

SEQ ID NO: 1990970 - RNA, 19 nt, Artificial Sequence
  Description of Artificial Sequence: Synthetic oligonucleotide
  Sense strand starting at position 2331 of SEQ ID NO: 1880749
gcuugaaagcuguaacauc

SEQ ID NO: 1990971 - RNA, 19 nt, Artificial Sequence
  Description of Artificial Sequence: Synthetic oligonucleotide
  Antisense strand to SEQ ID NO: 1990970
gauguuacagcuuucaagc

SEQ ID NO: 1990972 - RNA, 19 nt, Artificial Sequence
  Description of Artificial Sequence: Synthetic oligonucleotide
  Sense strand starting at position 2497 of SEQ ID NO: 1880749
acagcugucgagugguaca

SEQ ID NO: 1990973 - RNA, 19 nt, Artificial Sequence
  Description of Artificial Sequence: Synthetic oligonucleotide
  Antisense strand to SEQ ID NO: 1990972
uguaccacucgacagcugu

SEQ ID NO: 1990974 - RNA, 19 nt, Artificial Sequence
  Description of Artificial Sequence: Synthetic oligonucleotide
  Sense strand starting at position 2502 of SEQ ID NO: 1880749
ugucgagugguacaaacuu

SEQ ID NO: 1990975 - RNA, 19 nt, Artificial Sequence
  Description of Artificial Sequence: Synthetic oligonucleotide
  Antisense strand to SEQ ID NO: 1990974
aaguuuguaccacucgaca

SEQ ID NO: 1990976 - RNA, 19 nt, Artificial Sequence
  Description of Artificial Sequence: Synthetic oligonucleotide
  Sense strand starting at position 2557 of SEQ ID NO: 1880749
uggcauggcgggugugaaa

SEQ ID NO: 1990977 - RNA, 19 nt, Artificial Sequence
  Description of Artificial Sequence: Synthetic oligonucleotide
  Antisense strand to SEQ ID NO: 1990976
uuucacacccgccaugcca

SEQ ID NO: 1990978 - RNA, 19 nt, Artificial Sequence
  Description of Artificial Sequence: Synthetic oligonucleotide
  Sense strand starting at position 2654 of SEQ ID NO: 1880749
cucugagccucuuguaaug

SEQ ID NO: 1990979 - RNA, 19 nt, Artificial Sequence
  Description of Artificial Sequence: Synthetic oligonucleotide
  Antisense strand to SEQ ID NO: 1990978
cauuacaagaggcucagag

SEQ ID NO: 1990980 - RNA, 19 nt, Artificial Sequence
  Description of Artificial Sequence: Synthetic oligonucleotide
  Sense strand starting at position 2659 of SEQ ID NO: 1880749
agccucuuguaaugucaca

SEQ ID NO: 1990981 - RNA, 19 nt, Artificial Sequence
  Description of Artificial Sequence: Synthetic oligonucleotide
  Antisense strand to SEQ ID NO: 1990980
ugugacauuacaagaggcu

SEQ ID NO: 1990982 - RNA, 19 nt, Artificial Sequence
  Description of Artificial Sequence: Synthetic oligonucleotide
  Sense strand starting at position 2664 of SEQ ID NO: 1880749
cuuguaaugucacauguaa

SEQ ID NO: 1990983 - RNA, 19 nt, Artificial Sequence
  Description of Artificial Sequence: Synthetic oligonucleotide
  Antisense strand to SEQ ID NO: 1990982
uuacaugugacauuacaag

SEQ ID NO: 1990984 - RNA, 19 nt, Artificial Sequence
  Description of Artificial Sequence: Synthetic oligonucleotide
  Sense strand starting at position 2742 of SEQ ID NO: 1880749
ucgcaucaugccugguauu

SEQ ID NO: 1990985 - RNA, 19 nt, Artificial Sequence
  Description of Artificial Sequence: Synthetic oligonucleotide
  Antisense strand to SEQ ID NO: 1990984
aauaccaggcaugaugcga

SEQ ID NO: 1990986 - RNA, 19 nt, Artificial Sequence
  Description of Artificial Sequence: Synthetic oligonucleotide
  Sense strand starting at position 2743 of SEQ ID NO: 1880749
cgcaucaugccugguauuu

SEQ ID NO: 1990987 - RNA, 19 nt, Artificial Sequence
  Description of Artificial Sequence: Synthetic oligonucleotide
  Antisense strand to SEQ ID NO: 1990986
aaauaccaggcaugaugcg

SEQ ID NO: 1990988 - RNA, 19 nt, Artificial Sequence
  Description of Artificial Sequence: Synthetic oligonucleotide
  Sense strand starting at position 2752 of SEQ ID NO: 1880749
ccugguauuuaccagauga

SEQ ID NO: 1990989 - RNA, 19 nt, Artificial Sequence
  Description of Artificial Sequence: Synthetic oligonucleotide
  Antisense strand to SEQ ID NO: 1990988
ucaucugguaaauaccagg

SEQ ID NO: 1990990 - RNA, 19 nt, Artificial Sequence
  Description of Artificial Sequence: Synthetic oligonucleotide
  Sense strand starting at position 2911 of SEQ ID NO: 1880749
gaaggccaguuucuagauu

SEQ ID NO: 1990991 - RNA, 19 nt, Artificial Sequence
  Description of Artificial Sequence: Synthetic oligonucleotide
  Antisense strand to SEQ ID NO: 1990990
aaucuagaaacuggccuuc

SEQ ID NO: 1990992 - RNA, 19 nt, Artificial Sequence
  Description of Artificial Sequence: Synthetic oligonucleotide
  Sense strand starting at position 3006 of SEQ ID NO: 1880749
guugcagccucuucuuuaa

SEQ ID NO: 1990993 - RNA, 19 nt, Artificial Sequence
  Description of Artificial Sequence: Synthetic oligonucleotide
  Antisense strand to SEQ ID NO: 1990992
uuaaagaagaggcugcaac

SEQ ID NO: 1990994 - RNA, 19 nt, Artificial Sequence
  Description of Artificial Sequence: Synthetic oligonucleotide
  Sense strand starting at position 3009 of SEQ ID NO: 1880749
gcagccucuucuuuaaaga

SEQ ID NO: 1990995 - RNA, 19 nt, Artificial Sequence
  Description of Artificial Sequence: Synthetic oligonucleotide
  Antisense strand to SEQ ID NO: 1990994
ucuuuaaagaagaggcugc

SEQ ID NO: 1990996 - RNA, 19 nt, Artificial Sequence
  Description of Artificial Sequence: Synthetic oligonucleotide
  Sense strand starting at position 3082 of SEQ ID NO: 1880749
ccucaagucccugggaagu

SEQ ID NO: 1990997 - RNA, 19 nt, Artificial Sequence
  Description of Artificial Sequence: Synthetic oligonucleotide
  Antisense strand to SEQ ID NO: 1990996
acuucccagggacuugagg

SEQ ID NO: 1990998 - RNA, 19 nt, Artificial Sequence
  Description of Artificial Sequence: Synthetic oligonucleotide
  Sense strand starting at position 3250 of SEQ ID NO: 1880749
uagagcagcucugcuaaga

SEQ ID NO: 1990999 - RNA, 19 nt, Artificial Sequence
  Description of Artificial Sequence: Synthetic oligonucleotide
  Antisense strand to SEQ ID NO: 1990998
ucuuagcagagcugcucua

SEQ ID NO: 1991000 - RNA, 19 nt, Artificial Sequence
  Description of Artificial Sequence: Synthetic oligonucleotide
  Sense strand starting at position 3340 of SEQ ID NO: 1880749
gcuccucagcagugaagga

SEQ ID NO: 1991001 - RNA, 19 nt, Artificial Sequence
  Description of Artificial Sequence: Synthetic oligonucleotide
  Antisense strand to SEQ ID NO: 1991000
uccuucacugcugaggagc

SEQ ID NO: 1991002 - RNA, 19 nt, Artificial Sequence
  Description of Artificial Sequence: Synthetic oligonucleotide
  Sense strand starting at position 3386 of SEQ ID NO: 1880749
ggaaguuucuaagucucac

SEQ ID NO: 1991003 - RNA, 19 nt, Artificial Sequence
  Description of Artificial Sequence: Synthetic oligonucleotide
  Antisense strand to SEQ ID NO: 1991002
gugagacuuagaaacuucc

SEQ ID NO: 1991004 - RNA, 19 nt, Artificial Sequence
  Description of Artificial Sequence: Synthetic oligonucleotide
  Sense strand starting at position 3430 of SEQ ID NO: 1880749
guuugcaugagucaagcuu

SEQ ID NO: 1991005 - RNA, 19 nt, Artificial Sequence
  Description of Artificial Sequence: Synthetic oligonucleotide
  Antisense strand to SEQ ID NO: 1991004
aagcuugacucaugcaaac

SEQ ID NO: 1991006 - RNA, 19 nt, Artificial Sequence
  Description of Artificial Sequence: Synthetic oligonucleotide
  Sense strand starting at position 3490 of SEQ ID NO: 1880749
gagugacuguguuugguuu

SEQ ID NO: 1991007 - RNA, 19 nt, Artificial Sequence
  Description of Artificial Sequence: Synthetic oligonucleotide
  Antisense strand to SEQ ID NO: 1991006
aaaccaaacacagucacuc

SEQ ID NO: 1991008 - RNA, 19 nt, Artificial Sequence
  Description of Artificial Sequence: Synthetic oligonucleotide
  Sense strand starting at position 3649 of SEQ ID NO: 1880749
gggccacccugcuauaaau

SEQ ID NO: 1991009 - RNA, 19 nt, Artificial Sequence
  Description of Artificial Sequence: Synthetic oligonucleotide
  Antisense strand to SEQ ID NO: 1991008
auuuauagcaggguggccc

SEQ ID NO: 1991010 - RNA, 19 nt, Artificial Sequence
  Description of Artificial Sequence: Synthetic oligonucleotide
  Sense strand starting at position 3822 of SEQ ID NO: 1880749
gccauauugauaugggcuu

SEQ ID NO: 1991011 - RNA, 19 nt, Artificial Sequence
  Description of Artificial Sequence: Synthetic oligonucleotide
  Antisense strand to SEQ ID NO: 1991010
aagcccauaucaauauggc

SEQ ID NO: 1991012 - RNA, 19 nt, Artificial Sequence
  Description of Artificial Sequence: Synthetic oligonucleotide
  Sense strand starting at position 26 of SEQ ID NO: 1880750
gggcuaaggcuaugaacaa

SEQ ID NO: 1991013 - RNA, 19 nt, Artificial Sequence
  Description of Artificial Sequence: Synthetic oligonucleotide
  Antisense strand to SEQ ID NO: 1991012
uuguucauagccuuagccc

SEQ ID NO: 1991014 - RNA, 19 nt, Artificial Sequence
  Description of Artificial Sequence: Synthetic oligonucleotide
  Sense strand starting at position 27 of SEQ ID NO: 1880750
ggcuaaggcuaugaacaau

SEQ ID NO: 1991015 - RNA, 19 nt, Artificial Sequence
  Description of Artificial Sequence: Synthetic oligonucleotide
  Antisense strand to SEQ ID NO: 1991014
auuguucauagccuuagcc

SEQ ID NO: 1991016 - RNA, 19 nt, Artificial Sequence
  Description of Artificial Sequence: Synthetic oligonucleotide
  Sense strand starting at position 45 of SEQ ID NO: 1880750
uuagacaucucucuggaau

SEQ ID NO: 1991017 - RNA, 19 nt, Artificial Sequence
  Description of Artificial Sequence: Synthetic oligonucleotide
  Antisense strand to SEQ ID NO: 1991016
auuccagagagaugucuaa

SEQ ID NO: 1991018 - RNA, 19 nt, Artificial Sequence
  Description of Artificial Sequence: Synthetic oligonucleotide
  Sense strand starting at position 486 of SEQ ID NO: 1880750
ugggaaccagcuuguaaug

SEQ ID NO: 1991019 - RNA, 19 nt, Artificial Sequence
  Description of Artificial Sequence: Synthetic oligonucleotide
  Antisense strand to SEQ ID NO: 1991018
cauuacaagcugguuccca

SEQ ID NO: 1991020 - RNA, 19 nt, Artificial Sequence
  Description of Artificial Sequence: Synthetic oligonucleotide
  Sense strand starting at position 657 of SEQ ID NO: 1880750
guggaaucuucgggcugca

SEQ ID NO: 1991021 - RNA, 19 nt, Artificial Sequence
  Description of Artificial Sequence: Synthetic oligonucleotide
  Antisense strand to SEQ ID NO: 1991020
ugcagcccgaagauuccac

SEQ ID NO: 1991022 - RNA, 19 nt, Artificial Sequence
  Description of Artificial Sequence: Synthetic oligonucleotide
  Sense strand starting at position 700 of SEQ ID NO: 1880750
gcugcucuuucccacggaa

SEQ ID NO: 1991023 - RNA, 19 nt, Artificial Sequence
  Description of Artificial Sequence: Synthetic oligonucleotide
  Antisense strand to SEQ ID NO: 1991022
uuccgugggaaagagcagc

SEQ ID NO: 1991024 - RNA, 19 nt, Artificial Sequence
  Description of Artificial Sequence: Synthetic oligonucleotide
  Sense strand starting at position 702 of SEQ ID NO: 1880750
ugcucuuucccacggaaca

SEQ ID NO: 1991025 - RNA, 19 nt, Artificial Sequence
  Description of Artificial Sequence: Synthetic oligonucleotide
  Antisense strand to SEQ ID NO: 1991024
uguuccgugggaaagagca

SEQ ID NO: 1991026 - RNA, 19 nt, Artificial Sequence
  Description of Artificial Sequence: Synthetic oligonucleotide
  Sense strand starting at position 826 of SEQ ID NO: 1880750
cagucacuguaucagagaa

SEQ ID NO: 1991027 - RNA, 19 nt, Artificial Sequence
  Description of Artificial Sequence: Synthetic oligonucleotide
  Antisense strand to SEQ ID NO: 1991026
uucucugauacagugacug

SEQ ID NO: 1991028 - RNA, 19 nt, Artificial Sequence
  Description of Artificial Sequence: Synthetic oligonucleotide
  Sense strand starting at position 1163 of SEQ ID NO: 1880750
cugcuccuggccuauauua

SEQ ID NO: 1991029 - RNA, 19 nt, Artificial Sequence
  Description of Artificial Sequence: Synthetic oligonucleotide
  Antisense strand to SEQ ID NO: 1991028
uaauauaggccaggagcag

SEQ ID NO: 1991030 - RNA, 19 nt, Artificial Sequence
  Description of Artificial Sequence: Synthetic oligonucleotide
  Sense strand starting at position 1165 of SEQ ID NO: 1880750
gcuccuggccuauauuauu

SEQ ID NO: 1991031 - RNA, 19 nt, Artificial Sequence
  Description of Artificial Sequence: Synthetic oligonucleotide
  Antisense strand to SEQ ID NO: 1991030
aauaauauaggccaggagc

SEQ ID NO: 1991032 - RNA, 19 nt, Artificial Sequence
  Description of Artificial Sequence: Synthetic oligonucleotide
  Sense strand starting at position 1655 of SEQ ID NO: 1880750
acggcaacaucugugcuaa

SEQ ID NO: 1991033 - RNA, 19 nt, Artificial Sequence
  Description of Artificial Sequence: Synthetic oligonucleotide
  Antisense strand to SEQ ID NO: 1991032
uuagcacagauguugccgu

SEQ ID NO: 1991034 - RNA, 19 nt, Artificial Sequence
  Description of Artificial Sequence: Synthetic oligonucleotide
  Sense strand starting at position 1656 of SEQ ID NO: 1880750
cggcaacaucugugcuaaa

SEQ ID NO: 1991035 - RNA, 19 nt, Artificial Sequence
  Description of Artificial Sequence: Synthetic oligonucleotide
  Antisense strand to SEQ ID NO: 1991034
uuuagcacagauguugccg

SEQ ID NO: 1991036 - RNA, 19 nt, Artificial Sequence
  Description of Artificial Sequence: Synthetic oligonucleotide
  Sense strand starting at position 1685 of SEQ ID NO: 1880750
cagugcucuccaugggacu

SEQ ID NO: 1991037 - RNA, 19 nt, Artificial Sequence
  Description of Artificial Sequence: Synthetic oligonucleotide
  Antisense strand to SEQ ID NO: 1991036
agucccauggagagcacug

SEQ ID NO: 1991038 - RNA, 19 nt, Artificial Sequence
  Description of Artificial Sequence: Synthetic oligonucleotide
  Sense strand starting at position 2012 of SEQ ID NO: 1880750
cugggugauucacaagaga

SEQ ID NO: 1991039 - RNA, 19 nt, Artificial Sequence
  Description of Artificial Sequence: Synthetic oligonucleotide
  Antisense strand to SEQ ID NO: 1991038
ucucuugugaaucacccag

SEQ ID NO: 1991040 - RNA, 19 nt, Artificial Sequence
  Description of Artificial Sequence: Synthetic oligonucleotide
  Sense strand starting at position 2106 of SEQ ID NO: 1880750
ggacuauggcuggaucagu

SEQ ID NO: 1991041 - RNA, 19 nt, Artificial Sequence
  Description of Artificial Sequence: Synthetic oligonucleotide
  Antisense strand to SEQ ID NO: 1991040
acugauccagccauagucc

SEQ ID NO: 1991042 - RNA, 19 nt, Artificial Sequence
  Description of Artificial Sequence: Synthetic oligonucleotide
  Sense strand starting at position 2473 of SEQ ID NO: 1880750
ggcuguggcuucuggacua

SEQ ID NO: 1991043 - RNA, 19 nt, Artificial Sequence
  Description of Artificial Sequence: Synthetic oligonucleotide
  Antisense strand to SEQ ID NO: 1991042
uaguccagaagccacagcc

SEQ ID NO: 1991044 - RNA, 19 nt, Artificial Sequence
  Description of Artificial Sequence: Synthetic oligonucleotide
  Sense strand starting at position 2626 of SEQ ID NO: 1880750
ccaaguggaucugaucaca

SEQ ID NO: 1991045 - RNA, 19 nt, Artificial Sequence
  Description of Artificial Sequence: Synthetic oligonucleotide
  Antisense strand to SEQ ID NO: 1991044
ugugaucagauccacuugg

SEQ ID NO: 1991046 - RNA, 19 nt, Artificial Sequence
  Description of Artificial Sequence: Synthetic oligonucleotide
  Sense strand starting at position 2763 of SEQ ID NO: 1880750
ucuugccuccgcuguuaua

SEQ ID NO: 1991047 - RNA, 19 nt, Artificial Sequence
  Description of Artificial Sequence: Synthetic oligonucleotide
  Antisense strand to SEQ ID NO: 1991046
uauaacagcggaggcaaga

SEQ ID NO: 1991048 - RNA, 19 nt, Artificial Sequence
  Description of Artificial Sequence: Synthetic oligonucleotide
  Sense strand starting at position 2764 of SEQ ID NO: 1880750
cuugccuccgcuguuauau

SEQ ID NO: 1991049 - RNA, 19 nt, Artificial Sequence
  Description of Artificial Sequence: Synthetic oligonucleotide
  Antisense strand to SEQ ID NO: 1991048
auauaacagcggaggcaag

SEQ ID NO: 1991050 - RNA, 19 nt, Artificial Sequence
  Description of Artificial Sequence: Synthetic oligonucleotide
  Sense strand starting at position 2765 of SEQ ID NO: 1880750
uugccuccgcuguuauaua

SEQ ID NO: 1991051 - RNA, 19 nt, Artificial Sequence
  Description of Artificial Sequence: Synthetic oligonucleotide
  Antisense strand to SEQ ID NO: 1991050
uauauaacagcggaggcaa

SEQ ID NO: 1991052 - RNA, 19 nt, Artificial Sequence
  Description of Artificial Sequence: Synthetic oligonucleotide
  Sense strand starting at position 2773 of SEQ ID NO: 1880750
gcuguuauauacuuugaua

SEQ ID NO: 1991053 - RNA, 19 nt, Artificial Sequence
  Description of Artificial Sequence: Synthetic oligonucleotide
  Antisense strand to SEQ ID NO: 1991052
uaucaaaguauauaacagc

SEQ ID NO: 1991054 - RNA, 19 nt, Artificial Sequence
  Description of Artificial Sequence: Synthetic oligonucleotide
  Sense strand starting at position 2776 of SEQ ID NO: 1880750
guuauauacuuugauacag

SEQ ID NO: 1991055 - RNA, 19 nt, Artificial Sequence
  Description of Artificial Sequence: Synthetic oligonucleotide
  Antisense strand to SEQ ID NO: 1991054
cuguaucaaaguauauaac

SEQ ID NO: 1991056 - RNA, 19 nt, Artificial Sequence
  Description of Artificial Sequence: Synthetic oligonucleotide
  Sense strand starting at position 2804 of SEQ ID NO: 1880750
cccuauuggucuuagaauu

SEQ ID NO: 1991057 - RNA, 19 nt, Artificial Sequence
  Description of Artificial Sequence: Synthetic oligonucleotide
  Antisense strand to SEQ ID NO: 1991056
aauucuaagaccaauaggg

SEQ ID NO: 1991058 - RNA, 19 nt, Artificial Sequence
  Description of Artificial Sequence: Synthetic oligonucleotide
  Sense strand starting at position 2818 of SEQ ID NO: 1880750
gaauuuccuugauggaaga

SEQ ID NO: 1991059 - RNA, 19 nt, Artificial Sequence
  Description of Artificial Sequence: Synthetic oligonucleotide
  Antisense strand to SEQ ID NO: 1991058
ucuuccaucaaggaaauuc

SEQ ID NO: 1991060 - RNA, 19 nt, Artificial Sequence
  Description of Artificial Sequence: Synthetic oligonucleotide
  Sense strand starting at position 2829 of SEQ ID NO: 1880750
auggaagagucauaacuuu

SEQ ID NO: 1991061 - RNA, 19 nt, Artificial Sequence
  Description of Artificial Sequence: Synthetic oligonucleotide
  Antisense strand to SEQ ID NO: 1991060
aaaguuaugacucuuccau

SEQ ID NO: 1991062 - RNA, 19 nt, Artificial Sequence
  Description of Artificial Sequence: Synthetic oligonucleotide
  Sense strand starting at position 2856 of SEQ ID NO: 1880750
cccagugugcaguagguau

SEQ ID NO: 1991063 - RNA, 19 nt, Artificial Sequence
  Description of Artificial Sequence: Synthetic oligonucleotide
  Antisense strand to SEQ ID NO: 1991062
auaccuacugcacacuggg

SEQ ID NO: 1991064 - RNA, 19 nt, Artificial Sequence
  Description of Artificial Sequence: Synthetic oligonucleotide
  Sense strand starting at position 2860 of SEQ ID NO: 1880750
gugugcaguagguaucuaa

SEQ ID NO: 1991065 - RNA, 19 nt, Artificial Sequence
  Description of Artificial Sequence: Synthetic oligonucleotide
  Antisense strand to SEQ ID NO: 1991064
uuagauaccuacugcacac

SEQ ID NO: 1991066 - RNA, 19 nt, Artificial Sequence
  Description of Artificial Sequence: Synthetic oligonucleotide
  Sense strand starting at position 2932 of SEQ ID NO: 1880750
aagcuugaucaauggagug

SEQ ID NO: 1991067 - RNA, 19 nt, Artificial Sequence
  Description of Artificial Sequence: Synthetic oligonucleotide
  Antisense strand to SEQ ID NO: 1991066
cacuccauugaucaagcuu

SEQ ID NO: 1991068 - RNA, 19 nt, Artificial Sequence
  Description of Artificial Sequence: Synthetic oligonucleotide
  Sense strand starting at position 3023 of SEQ ID NO: 1880750
cguacugacuucuugaucu

SEQ ID NO: 1991069 - RNA, 19 nt, Artificial Sequence
  Description of Artificial Sequence: Synthetic oligonucleotide
  Antisense strand to SEQ ID NO: 1991068
agaucaagaagucaguacg

SEQ ID NO: 1991070 - RNA, 19 nt, Artificial Sequence
  Description of Artificial Sequence: Synthetic oligonucleotide
  Sense strand starting at position 3121 of SEQ ID NO: 1880750
cuuaccagugcuugugagu

SEQ ID NO: 1991071 - RNA, 19 nt, Artificial Sequence
  Description of Artificial Sequence: Synthetic oligonucleotide
  Antisense strand to SEQ ID NO: 1991070
acucacaagcacugguaag

SEQ ID NO: 1991072 - RNA, 19 nt, Artificial Sequence
  Description of Artificial Sequence: Synthetic oligonucleotide
  Sense strand starting at position 3633 of SEQ ID NO: 1880750
gcaugugcacgugugaaca

SEQ ID NO: 1991073 - RNA, 19 nt, Artificial Sequence
  Description of Artificial Sequence: Synthetic oligonucleotide
  Antisense strand to SEQ ID NO: 1991072
uguucacacgugcacaugc

SEQ ID NO: 1991074 - RNA, 19 nt, Artificial Sequence
  Description of Artificial Sequence: Synthetic oligonucleotide
  Sense strand starting at position 89 of SEQ ID NO: 1880751
aacacugcguccuuugaaa

SEQ ID NO: 1991075 - RNA, 19 nt, Artificial Sequence
  Description of Artificial Sequence: Synthetic oligonucleotide
  Antisense strand to SEQ ID NO: 1991074
uuucaaaggacgcaguguu

SEQ ID NO: 1991076 - RNA, 19 nt, Artificial Sequence
  Description of Artificial Sequence: Synthetic oligonucleotide
  Sense strand starting at position 195 of SEQ ID NO: 1880751
guguuaugugucguuucua

SEQ ID NO: 1991077 - RNA, 19 nt, Artificial Sequence
  Description of Artificial Sequence: Synthetic oligonucleotide
  Antisense strand to SEQ ID NO: 1991076
uagaaacgacacauaacac

SEQ ID NO: 1991078 - RNA, 19 nt, Artificial Sequence
  Description of Artificial Sequence: Synthetic oligonucleotide
  Sense strand starting at position 335 of SEQ ID NO: 1880751
ucaugaucacugugaagaa

SEQ ID NO: 1991079 - RNA, 19 nt, Artificial Sequence
  Description of Artificial Sequence: Synthetic oligonucleotide
  Antisense strand to SEQ ID NO: 1991078
uucuucacagugaucauga

SEQ ID NO: 1991080 - RNA, 19 nt, Artificial Sequence
  Description of Artificial Sequence: Synthetic oligonucleotide
  Sense strand starting at position 465 of SEQ ID NO: 1880751
ccugguuuggaugauugau

SEQ ID NO: 1991081 - RNA, 19 nt, Artificial Sequence
  Description of Artificial Sequence: Synthetic oligonucleotide
  Antisense strand to SEQ ID NO: 1991080
aucaaucauccaaaccagg

SEQ ID NO: 1991082 - RNA, 19 nt, Artificial Sequence
  Description of Artificial Sequence: Synthetic oligonucleotide
  Sense strand starting at position 467 of SEQ ID NO: 1880751
ugguuuggaugauugauca

SEQ ID NO: 1991083 - RNA, 19 nt, Artificial Sequence
  Description of Artificial Sequence: Synthetic oligonucleotide
  Antisense strand to SEQ ID NO: 1991082
ugaucaaucauccaaacca

SEQ ID NO: 1991084 - RNA, 19 nt, Artificial Sequence
  Description of Artificial Sequence: Synthetic oligonucleotide
  Sense strand starting at position 582 of SEQ ID NO: 1880751
uaaauuaaacgaugggcua

SEQ ID NO: 1991085 - RNA, 19 nt, Artificial Sequence
  Description of Artificial Sequence: Synthetic oligonucleotide
  Antisense strand to SEQ ID NO: 1991084
uagcccaucguuuaauuua

SEQ ID NO: 1991086 - RNA, 19 nt, Artificial Sequence
  Description of Artificial Sequence: Synthetic oligonucleotide
  Sense strand starting at position 583 of SEQ ID NO: 1880751
aaauuaaacgaugggcuaa

SEQ ID NO: 1991087 - RNA, 19 nt, Artificial Sequence
  Description of Artificial Sequence: Synthetic oligonucleotide
  Antisense strand to SEQ ID NO: 1991086
uuagcccaucguuuaauuu

SEQ ID NO: 1991088 - RNA, 19 nt, Artificial Sequence
  Description of Artificial Sequence: Synthetic oligonucleotide
  Sense strand starting at position 595 of SEQ ID NO: 1880751
gggcuaagaugccuugaaa

SEQ ID NO: 1991089 - RNA, 19 nt, Artificial Sequence
  Description of Artificial Sequence: Synthetic oligonucleotide
  Antisense strand to SEQ ID NO: 1991088
uuucaaggcaucuuagccc

SEQ ID NO: 1991090 - RNA, 19 nt, Artificial Sequence
  Description of Artificial Sequence: Synthetic oligonucleotide
  Sense strand starting at position 709 of SEQ ID NO: 1880751
cgaauaaggugucucucca

SEQ ID NO: 1991091 - RNA, 19 nt, Artificial Sequence
  Description of Artificial Sequence: Synthetic oligonucleotide
  Antisense strand to SEQ ID NO: 1991090
uggagagacaccuuauucg

SEQ ID NO: 1991092 - RNA, 19 nt, Artificial Sequence
  Description of Artificial Sequence: Synthetic oligonucleotide
  Sense strand starting at position 713 of SEQ ID NO: 1880751
uaaggugucucuccagaag

SEQ ID NO: 1991093 - RNA, 19 nt, Artificial Sequence
  Description of Artificial Sequence: Synthetic oligonucleotide
  Antisense strand to SEQ ID NO: 1991092
cuucuggagagacaccuua

SEQ ID NO: 1991094 - RNA, 19 nt, Artificial Sequence
  Description of Artificial Sequence: Synthetic oligonucleotide
  Sense strand starting at position 716 of SEQ ID NO: 1880751
ggugucucuccagaaggaa

SEQ ID NO: 1991095 - RNA, 19 nt, Artificial Sequence
  Description of Artificial Sequence: Synthetic oligonucleotide
  Antisense strand to SEQ ID NO: 1991094
uuccuucuggagagacacc

SEQ ID NO: 1991096 - RNA, 19 nt, Artificial Sequence
  Description of Artificial Sequence: Synthetic oligonucleotide
  Sense strand starting at position 835 of SEQ ID NO: 1880751
ccucguggcccuggagaaa

SEQ ID NO: 1991097 - RNA, 19 nt, Artificial Sequence
  Description of Artificial Sequence: Synthetic oligonucleotide
  Antisense strand to SEQ ID NO: 1991096
uuucuccagggccacgagg

SEQ ID NO: 1991098 - RNA, 19 nt, Artificial Sequence
  Description of Artificial Sequence: Synthetic oligonucleotide
  Sense strand starting at position 873 of SEQ ID NO: 1880751
uggagucauccaggacacu

SEQ ID NO: 1991099 - RNA, 19 nt, Artificial Sequence
  Description of Artificial Sequence: Synthetic oligonucleotide
  Antisense strand to SEQ ID NO: 1991098
aguguccuggaugacucca

SEQ ID NO: 1991100 - RNA, 19 nt, Artificial Sequence
  Description of Artificial Sequence: Synthetic oligonucleotide
  Sense strand starting at position 1114 of SEQ ID NO: 1880751
cgaacacauuguuuaguuu

SEQ ID NO: 1991101 - RNA, 19 nt, Artificial Sequence
  Description of Artificial Sequence: Synthetic oligonucleotide
  Antisense strand to SEQ ID NO: 1991100
aaacuaaacaauguguucg

SEQ ID NO: 1991102 - RNA, 19 nt, Artificial Sequence
  Description of Artificial Sequence: Synthetic oligonucleotide
  Sense strand starting at position 1243 of SEQ ID NO: 1880751
augugaaauguuuguugaa

SEQ ID NO: 1991103 - RNA, 19 nt, Artificial Sequence
  Description of Artificial Sequence: Synthetic oligonucleotide
  Antisense strand to SEQ ID NO: 1991102
uucaacaaacauuucacau

SEQ ID NO: 1991104 - RNA, 19 nt, Artificial Sequence
  Description of Artificial Sequence: Synthetic oligonucleotide
  Sense strand starting at position 1366 of SEQ ID NO: 1880751
gaaacuuggcuuugaguuc

SEQ ID NO: 1991105 - RNA, 19 nt, Artificial Sequence
  Description of Artificial Sequence: Synthetic oligonucleotide
  Antisense strand to SEQ ID NO: 1991104
gaacucaaagccaaguuuc

SEQ ID NO: 1991106 - RNA, 19 nt, Artificial Sequence
  Description of Artificial Sequence: Synthetic oligonucleotide
  Sense strand starting at position 1373 of SEQ ID NO: 1880751
ggcuuugaguucucaacuu

SEQ ID NO: 1991107 - RNA, 19 nt, Artificial Sequence
  Description of Artificial Sequence: Synthetic oligonucleotide
  Antisense strand to SEQ ID NO: 1991106
aaguugagaacucaaagcc

SEQ ID NO: 1991108 - RNA, 19 nt, Artificial Sequence
  Description of Artificial Sequence: Synthetic oligonucleotide
  Sense strand starting at position 1488 of SEQ ID NO: 1880751
agguuugcaccucacauaa

SEQ ID NO: 1991109 - RNA, 19 nt, Artificial Sequence
  Description of Artificial Sequence: Synthetic oligonucleotide
  Antisense strand to SEQ ID NO: 1991108
uuaugugaggugcaaaccu

SEQ ID NO: 1991110 - RNA, 19 nt, Artificial Sequence
  Description of Artificial Sequence: Synthetic oligonucleotide
  Sense strand starting at position 1764 of SEQ ID NO: 1880751
aggaaccugcuuuaauauu

SEQ ID NO: 1991111 - RNA, 19 nt, Artificial Sequence
  Description of Artificial Sequence: Synthetic oligonucleotide
  Antisense strand to SEQ ID NO: 1991110
aauauuaaagcagguuccu

SEQ ID NO: 1991112 - RNA, 19 nt, Artificial Sequence
  Description of Artificial Sequence: Synthetic oligonucleotide
  Sense strand starting at position 2085 of SEQ ID NO: 1880751
acgccagauccagaaacua

SEQ ID NO: 1991113 - RNA, 19 nt, Artificial Sequence
  Description of Artificial Sequence: Synthetic oligonucleotide
  Antisense strand to SEQ ID NO: 1991112
uaguuucuggaucuggcgu

SEQ ID NO: 1991114 - RNA, 19 nt, Artificial Sequence
  Description of Artificial Sequence: Synthetic oligonucleotide
  Sense strand starting at position 2476 of SEQ ID NO: 1880751
acugucuccuaugcagaaa

SEQ ID NO: 1991115 - RNA, 19 nt, Artificial Sequence
  Description of Artificial Sequence: Synthetic oligonucleotide
  Antisense strand to SEQ ID NO: 1991114
uuucugcauaggagacagu

SEQ ID NO: 1991116 - RNA, 19 nt, Artificial Sequence
  Description of Artificial Sequence: Synthetic oligonucleotide
  Sense strand starting at position 2720 of SEQ ID NO: 1880751
guguuuccugaucaagcau

SEQ ID NO: 1991117 - RNA, 19 nt, Artificial Sequence
  Description of Artificial Sequence: Synthetic oligonucleotide
  Antisense strand to SEQ ID NO: 1991116
augcuugaucaggaaacac

SEQ ID NO: 1991118 - RNA, 19 nt, Artificial Sequence
  Description of Artificial Sequence: Synthetic oligonucleotide
  Sense strand starting at position 2785 of SEQ ID NO: 1880751
cagguuugcuccucuagag

SEQ ID NO: 1991119 - RNA, 19 nt, Artificial Sequence
  Description of Artificial Sequence: Synthetic oligonucleotide
  Antisense strand to SEQ ID NO: 1991118
cucuagaggagcaaaccug

SEQ ID NO: 1991120 - RNA, 19 nt, Artificial Sequence
  Description of Artificial Sequence: Synthetic oligonucleotide
  Sense strand starting at position 2858 of SEQ ID NO: 1880751
agucuacaguucuccuaga

SEQ ID NO: 1991121 - RNA, 19 nt, Artificial Sequence
  Description of Artificial Sequence: Synthetic oligonucleotide
  Antisense strand to SEQ ID NO: 1991120
ucuaggagaacuguagacu

SEQ ID NO: 1991122 - RNA, 19 nt, Artificial Sequence
  Description of Artificial Sequence: Synthetic oligonucleotide
  Sense strand starting at position 2920 of SEQ ID NO: 1880751
guugaacugauuggaaagu

SEQ ID NO: 1991123 - RNA, 19 nt, Artificial Sequence
  Description of Artificial Sequence: Synthetic oligonucleotide
  Antisense strand to SEQ ID NO: 1991122
acuuuccaaucaguucaac

SEQ ID NO: 1991124 - RNA, 19 nt, Artificial Sequence
  Description of Artificial Sequence: Synthetic oligonucleotide
  Sense strand starting at position 2931 of SEQ ID NO: 1880751
uggaaaguguauccuuaga

SEQ ID NO: 1991125 - RNA, 19 nt, Artificial Sequence
  Description of Artificial Sequence: Synthetic oligonucleotide
  Antisense strand to SEQ ID NO: 1991124
ucuaaggauacacuuucca

SEQ ID NO: 1991126 - RNA, 19 nt, Artificial Sequence
  Description of Artificial Sequence: Synthetic oligonucleotide
  Sense strand starting at position 2933 of SEQ ID NO: 1880751
gaaaguguauccuuagaug

SEQ ID NO: 1991127 - RNA, 19 nt, Artificial Sequence
  Description of Artificial Sequence: Synthetic oligonucleotide
  Antisense strand to SEQ ID NO: 1991126
caucuaaggauacacuuuc

SEQ ID NO: 1991128 - RNA, 19 nt, Artificial Sequence
  Description of Artificial Sequence: Synthetic oligonucleotide
  Sense strand starting at position 2941 of SEQ ID NO: 1880751
auccuuagaugauaaugaa

SEQ ID NO: 1991129 - RNA, 19 nt, Artificial Sequence
  Description of Artificial Sequence: Synthetic oligonucleotide
  Antisense strand to SEQ ID NO: 1991128
uucauuaucaucuaaggau

SEQ ID NO: 1991130 - RNA, 19 nt, Artificial Sequence
  Description of Artificial Sequence: Synthetic oligonucleotide
  Sense strand starting at position 2983 of SEQ ID NO: 1880751
cagagaaugucugccaaac

SEQ ID NO: 1991131 - RNA, 19 nt, Artificial Sequence
  Description of Artificial Sequence: Synthetic oligonucleotide
  Antisense strand to SEQ ID NO: 1991130
guuuggcagacauucucug

SEQ ID NO: 1991132 - RNA, 19 nt, Artificial Sequence
  Description of Artificial Sequence: Synthetic oligonucleotide
  Sense strand starting at position 3082 of SEQ ID NO: 1880751
uucugagaacucugaagca

SEQ ID NO: 1991133 - RNA, 19 nt, Artificial Sequence
  Description of Artificial Sequence: Synthetic oligonucleotide
  Antisense strand to SEQ ID NO: 1991132
ugcuucagaguucucagaa

SEQ ID NO: 1991134 - RNA, 19 nt, Artificial Sequence
  Description of Artificial Sequence: Synthetic oligonucleotide
  Sense strand starting at position 3303 of SEQ ID NO: 1880751
gggucaagcaguuguagga

SEQ ID NO: 1991135 - RNA, 19 nt, Artificial Sequence
  Description of Artificial Sequence: Synthetic oligonucleotide
  Antisense strand to SEQ ID NO: 1991134
uccuacaacugcuugaccc

SEQ ID NO: 1991136 - RNA, 19 nt, Artificial Sequence
  Description of Artificial Sequence: Synthetic oligonucleotide
  Sense strand starting at position 3377 of SEQ ID NO: 1880751
agguaaagucuuuguccca

SEQ ID NO: 1991137 - RNA, 19 nt, Artificial Sequence
  Description of Artificial Sequence: Synthetic oligonucleotide
  Antisense strand to SEQ ID NO: 1991136
ugggacaaagacuuuaccu

SEQ ID NO: 1991138 - RNA, 19 nt, Artificial Sequence
  Description of Artificial Sequence: Synthetic oligonucleotide
  Sense strand starting at position 3378 of SEQ ID NO: 1880751
gguaaagucuuugucccaa

SEQ ID NO: 1991139 - RNA, 19 nt, Artificial Sequence
  Description of Artificial Sequence: Synthetic oligonucleotide
  Antisense strand to SEQ ID NO: 1991138
uugggacaaagacuuuacc

SEQ ID NO: 1991140 - RNA, 19 nt, Artificial Sequence
  Description of Artificial Sequence: Synthetic oligonucleotide
  Sense strand starting at position 3520 of SEQ ID NO: 1880751
gccucugucccagggagaa

SEQ ID NO: 1991141 - RNA, 19 nt, Artificial Sequence
  Description of Artificial Sequence: Synthetic oligonucleotide
  Antisense strand to SEQ ID NO: 1991140
uucucccugggacagaggc

SEQ ID NO: 1991142 - RNA, 19 nt, Artificial Sequence
  Description of Artificial Sequence: Synthetic oligonucleotide
  Sense strand starting at position 3532 of SEQ ID NO: 1880751
gggagaaccucuucuucug

SEQ ID NO: 1991143 - RNA, 19 nt, Artificial Sequence
  Description of Artificial Sequence: Synthetic oligonucleotide
  Antisense strand to SEQ ID NO: 1991142
cagaagaagagguucuccc

SEQ ID NO: 1991144 - RNA, 19 nt, Artificial Sequence
  Description of Artificial Sequence: Synthetic oligonucleotide
  Sense strand starting at position 3675 of SEQ ID NO: 1880751
gcagcuggaggcugauaua

SEQ ID NO: 1991145 - RNA, 19 nt, Artificial Sequence
  Description of Artificial Sequence: Synthetic oligonucleotide
  Antisense strand to SEQ ID NO: 1991144
uauaucagccuccagcugc

SEQ ID NO: 1991146 - RNA, 19 nt, Artificial Sequence
  Description of Artificial Sequence: Synthetic oligonucleotide
  Sense strand starting at position 3726 of SEQ ID NO: 1880751
uguacugugcuuuagauuc

SEQ ID NO: 1991147 - RNA, 19 nt, Artificial Sequence
  Description of Artificial Sequence: Synthetic oligonucleotide
  Antisense strand to SEQ ID NO: 1991146
gaaucuaaagcacaguaca

SEQ ID NO: 1991148 - RNA, 19 nt, Artificial Sequence
  Description of Artificial Sequence: Synthetic oligonucleotide
  Sense strand starting at position 3866 of SEQ ID NO: 1880751
gcuuccgauccugaggagu

SEQ ID NO: 1991149 - RNA, 19 nt, Artificial Sequence
  Description of Artificial Sequence: Synthetic oligonucleotide
  Antisense strand to SEQ ID NO: 1991148
acuccucaggaucggaagc

SEQ ID NO: 1991150 - RNA, 19 nt, Artificial Sequence
  Description of Artificial Sequence: Synthetic oligonucleotide
  Sense strand starting at position 3914 of SEQ ID NO: 1880751
gcuaauuggguugaccaga

SEQ ID NO: 1991151 - RNA, 19 nt, Artificial Sequence
  Description of Artificial Sequence: Synthetic oligonucleotide
  Antisense strand to SEQ ID NO: 1991150
ucuggucaacccaauuagc

SEQ ID NO: 1991152 - RNA, 19 nt, Artificial Sequence
  Description of Artificial Sequence: Synthetic oligonucleotide
  Sense strand starting at position 3919 of SEQ ID NO: 1880751
uuggguugaccagaaguca

SEQ ID NO: 1991153 - RNA, 19 nt, Artificial Sequence
  Description of Artificial Sequence: Synthetic oligonucleotide
  Antisense strand to SEQ ID NO: 1991152
ugacuucuggucaacccaa

SEQ ID NO: 1991154 - RNA, 19 nt, Artificial Sequence
  Description of Artificial Sequence: Synthetic oligonucleotide
  Sense strand starting at position 173 of SEQ ID NO: 1880752
ccuuccugacuaugaugua

SEQ ID NO: 1991155 - RNA, 19 nt, Artificial Sequence
  Description of Artificial Sequence: Synthetic oligonucleotide
  Antisense strand to SEQ ID NO: 1991154
uacaucauagucaggaagg

SEQ ID NO: 1991156 - RNA, 19 nt, Artificial Sequence
  Description of Artificial Sequence: Synthetic oligonucleotide
  Sense strand starting at position 189 of SEQ ID NO: 1880752
guaggauaugacuggaucu

SEQ ID NO: 1991157 - RNA, 19 nt, Artificial Sequence
  Description of Artificial Sequence: Synthetic oligonucleotide
  Antisense strand to SEQ ID NO: 1991156
agauccagucauauccuac

SEQ ID NO: 1991158 - RNA, 19 nt, Artificial Sequence
  Description of Artificial Sequence: Synthetic oligonucleotide
  Sense strand starting at position 327 of SEQ ID NO: 1880752
ccaccaguccuaugagaug

SEQ ID NO: 1991159 - RNA, 19 nt, Artificial Sequence
  Description of Artificial Sequence: Synthetic oligonucleotide
  Antisense strand to SEQ ID NO: 1991158
caucucauaggacuggugg

SEQ ID NO: 1991160 - RNA, 19 nt, Artificial Sequence
  Description of Artificial Sequence: Synthetic oligonucleotide
  Sense strand starting at position 332 of SEQ ID NO: 1880752
aguccuaugagaugguaca

SEQ ID NO: 1991161 - RNA, 19 nt, Artificial Sequence
  Description of Artificial Sequence: Synthetic oligonucleotide
  Antisense strand to SEQ ID NO: 1991160
uguaccaucucauaggacu

SEQ ID NO: 1991162 - RNA, 19 nt, Artificial Sequence
  Description of Artificial Sequence: Synthetic oligonucleotide
  Sense strand starting at position 333 of SEQ ID NO: 1880752
guccuaugagaugguacaa

SEQ ID NO: 1991163 - RNA, 19 nt, Artificial Sequence
  Description of Artificial Sequence: Synthetic oligonucleotide
  Antisense strand to SEQ ID NO: 1991162
uuguaccaucucauaggac

SEQ ID NO: 1991164 - RNA, 19 nt, Artificial Sequence
  Description of Artificial Sequence: Synthetic oligonucleotide
  Sense strand starting at position 482 of SEQ ID NO: 1880752
guaaucaucccagagcaag

SEQ ID NO: 1991165 - RNA, 19 nt, Artificial Sequence
  Description of Artificial Sequence: Synthetic oligonucleotide
  Antisense strand to SEQ ID NO: 1991164
cuugcucugggaugauuac

SEQ ID NO: 1991166 - RNA, 19 nt, Artificial Sequence
  Description of Artificial Sequence: Synthetic oligonucleotide
  Sense strand starting at position 723 of SEQ ID NO: 1880752
agaaauaauuucggagaug

SEQ ID NO: 1991167 - RNA, 19 nt, Artificial Sequence
  Description of Artificial Sequence: Synthetic oligonucleotide
  Antisense strand to SEQ ID NO: 1991166
caucuccgaaauuauuucu

SEQ ID NO: 1991168 - RNA, 19 nt, Artificial Sequence
  Description of Artificial Sequence: Synthetic oligonucleotide
  Sense strand starting at position 724 of SEQ ID NO: 1880752
gaaauaauuucggagaugg

SEQ ID NO: 1991169 - RNA, 19 nt, Artificial Sequence
  Description of Artificial Sequence: Synthetic oligonucleotide
  Antisense strand to SEQ ID NO: 1991168
ccaucuccgaaauuauuuc

SEQ ID NO: 1991170 - RNA, 19 nt, Artificial Sequence
  Description of Artificial Sequence: Synthetic oligonucleotide
  Sense strand starting at position 843 of SEQ ID NO: 1880752
ggccaugcucauuacacua

SEQ ID NO: 1991171 - RNA, 19 nt, Artificial Sequence
  Description of Artificial Sequence: Synthetic oligonucleotide
  Antisense strand to SEQ ID NO: 1991170
uaguguaaugagcauggcc

SEQ ID NO: 1991172 - RNA, 19 nt, Artificial Sequence
  Description of Artificial Sequence: Synthetic oligonucleotide
  Sense strand starting at position 895 of SEQ ID NO: 1880752
acuuguacucaacagaugu

SEQ ID NO: 1991173 - RNA, 19 nt, Artificial Sequence
  Description of Artificial Sequence: Synthetic oligonucleotide
  Antisense strand to SEQ ID NO: 1991172
acaucuguugaguacaagu

SEQ ID NO: 1991174 - RNA, 19 nt, Artificial Sequence
  Description of Artificial Sequence: Synthetic oligonucleotide
  Sense strand starting at position 1318 of SEQ ID NO: 1880752
agcucuuggcuccacagaa

SEQ ID NO: 1991175 - RNA, 19 nt, Artificial Sequence
  Description of Artificial Sequence: Synthetic oligonucleotide
  Antisense strand to SEQ ID NO: 1991174
uucuguggagccaagagcu

SEQ ID NO: 1991176 - RNA, 19 nt, Artificial Sequence
  Description of Artificial Sequence: Synthetic oligonucleotide
  Sense strand starting at position 1376 of SEQ ID NO: 1880752
acaugaaaccucgauguuu

SEQ ID NO: 1991177 - RNA, 19 nt, Artificial Sequence
  Description of Artificial Sequence: Synthetic oligonucleotide
  Antisense strand to SEQ ID NO: 1991176
aaacaucgagguuucaugu

SEQ ID NO: 1991178 - RNA, 19 nt, Artificial Sequence
  Description of Artificial Sequence: Synthetic oligonucleotide
  Sense strand starting at position 1468 of SEQ ID NO: 1880752
agauuaguaacgcaggaca

SEQ ID NO: 1991179 - RNA, 19 nt, Artificial Sequence
  Description of Artificial Sequence: Synthetic oligonucleotide
  Antisense strand to SEQ ID NO: 1991178
uguccugcguuacuaaucu

SEQ ID NO: 1991180 - RNA, 19 nt, Artificial Sequence
  Description of Artificial Sequence: Synthetic oligonucleotide
  Sense strand starting at position 1646 of SEQ ID NO: 1880752
cgaguaauacagcacccaa

SEQ ID NO: 1991181 - RNA, 19 nt, Artificial Sequence
  Description of Artificial Sequence: Synthetic oligonucleotide
  Antisense strand to SEQ ID NO: 1991180
uugggugcuguauuacucg

SEQ ID NO: 1991182 - RNA, 19 nt, Artificial Sequence
  Description of Artificial Sequence: Synthetic oligonucleotide
  Sense strand starting at position 1679 of SEQ ID NO: 1880752
ggaagcacaucuuuagaag

SEQ ID NO: 1991183 - RNA, 19 nt, Artificial Sequence
  Description of Artificial Sequence: Synthetic oligonucleotide
  Antisense strand to SEQ ID NO: 1991182
cuucuaaagaugugcuucc

SEQ ID NO: 1991184 - RNA, 19 nt, Artificial Sequence
  Description of Artificial Sequence: Synthetic oligonucleotide
  Sense strand starting at position 2073 of SEQ ID NO: 1880752
caaagaaugccuggacaug

SEQ ID NO: 1991185 - RNA, 19 nt, Artificial Sequence
  Description of Artificial Sequence: Synthetic oligonucleotide
  Antisense strand to SEQ ID NO: 1991184
cauguccaggcauucuuug

SEQ ID NO: 1991186 - RNA, 19 nt, Artificial Sequence
  Description of Artificial Sequence: Synthetic oligonucleotide
  Sense strand starting at position 2166 of SEQ ID NO: 1880752
agagauggcagaugagagu

SEQ ID NO: 1991187 - RNA, 19 nt, Artificial Sequence
  Description of Artificial Sequence: Synthetic oligonucleotide
  Antisense strand to SEQ ID NO: 1991186
acucucaucugccaucucu

SEQ ID NO: 1991188 - RNA, 19 nt, Artificial Sequence
  Description of Artificial Sequence: Synthetic oligonucleotide
  Sense strand starting at position 2175 of SEQ ID NO: 1880752
agaugagaguuucucuuug

SEQ ID NO: 1991189 - RNA, 19 nt, Artificial Sequence
  Description of Artificial Sequence: Synthetic oligonucleotide
  Antisense strand to SEQ ID NO: 1991188
caaagagaaacucucaucu

SEQ ID NO: 1991190 - RNA, 19 nt, Artificial Sequence
  Description of Artificial Sequence: Synthetic oligonucleotide
  Sense strand starting at position 2177 of SEQ ID NO: 1880752
augagaguuucucuuugag

SEQ ID NO: 1991191 - RNA, 19 nt, Artificial Sequence
  Description of Artificial Sequence: Synthetic oligonucleotide
  Antisense strand to SEQ ID NO: 1991190
cucaaagagaaacucucau

SEQ ID NO: 1991192 - RNA, 19 nt, Artificial Sequence
  Description of Artificial Sequence: Synthetic oligonucleotide
  Sense strand starting at position 2550 of SEQ ID NO: 1880752
ucagaaaguccagguggua

SEQ ID NO: 1991193 - RNA, 19 nt, Artificial Sequence
  Description of Artificial Sequence: Synthetic oligonucleotide
  Antisense strand to SEQ ID NO: 1991192
uaccaccuggacuuucuga

SEQ ID NO: 1991194 - RNA, 19 nt, Artificial Sequence
  Description of Artificial Sequence: Synthetic oligonucleotide
  Sense strand starting at position 2593 of SEQ ID NO: 1880752
cagguucucgaacaaauca

SEQ ID NO: 1991195 - RNA, 19 nt, Artificial Sequence
  Description of Artificial Sequence: Synthetic oligonucleotide
  Antisense strand to SEQ ID NO: 1991194
ugauuuguucgagaaccug

SEQ ID NO: 1991196 - RNA, 19 nt, Artificial Sequence
  Description of Artificial Sequence: Synthetic oligonucleotide
  Sense strand starting at position 2661 of SEQ ID NO: 1880752
agaaacuuaucagagauuu

SEQ ID NO: 1991197 - RNA, 19 nt, Artificial Sequence
  Description of Artificial Sequence: Synthetic oligonucleotide
  Antisense strand to SEQ ID NO: 1991196
aaaucucugauaaguuucu

SEQ ID NO: 1991198 - RNA, 19 nt, Artificial Sequence
  Description of Artificial Sequence: Synthetic oligonucleotide
  Sense strand starting at position 3125 of SEQ ID NO: 1880752
uugccuuagucacugauuu

SEQ ID NO: 1991199 - RNA, 19 nt, Artificial Sequence
  Description of Artificial Sequence: Synthetic oligonucleotide
  Antisense strand to SEQ ID NO: 1991198
aaaucagugacuaaggcaa

SEQ ID NO: 1991200 - RNA, 19 nt, Artificial Sequence
  Description of Artificial Sequence: Synthetic oligonucleotide
  Sense strand starting at position 3126 of SEQ ID NO: 1880752
ugccuuagucacugauuua

SEQ ID NO: 1991201 - RNA, 19 nt, Artificial Sequence
  Description of Artificial Sequence: Synthetic oligonucleotide
  Antisense strand to SEQ ID NO: 1991200
uaaaucagugacuaaggca

SEQ ID NO: 1991202 - RNA, 19 nt, Artificial Sequence
  Description of Artificial Sequence: Synthetic oligonucleotide
  Sense strand starting at position 3137 of SEQ ID NO: 1880752
cugauuuaugcccgugaca

SEQ ID NO: 1991203 - RNA, 19 nt, Artificial Sequence
  Description of Artificial Sequence: Synthetic oligonucleotide
  Antisense strand to SEQ ID NO: 1991202
ugucacgggcauaaaucag

SEQ ID NO: 1991204 - RNA, 19 nt, Artificial Sequence
  Description of Artificial Sequence: Synthetic oligonucleotide
  Sense strand starting at position 3146 of SEQ ID NO: 1880752
gcccgugacaaagauguaa

SEQ ID NO: 1991205 - RNA, 19 nt, Artificial Sequence
  Description of Artificial Sequence: Synthetic oligonucleotide
  Antisense strand to SEQ ID NO: 1991204
uuacaucuuugucacgggc

SEQ ID NO: 1991206 - RNA, 19 nt, Artificial Sequence
  Description of Artificial Sequence: Synthetic oligonucleotide
  Sense strand starting at position 3148 of SEQ ID NO: 1880752
ccgugacaaagauguaaac

SEQ ID NO: 1991207 - RNA, 19 nt, Artificial Sequence
  Description of Artificial Sequence: Synthetic oligonucleotide
  Antisense strand to SEQ ID NO: 1991206
guuuacaucuuugucacgg

SEQ ID NO: 1991208 - RNA, 19 nt, Artificial Sequence
  Description of Artificial Sequence: Synthetic oligonucleotide
  Sense strand starting at position 3181 of SEQ ID NO: 1880752
ggucucaucugagucauaa

SEQ ID NO: 1991209 - RNA, 19 nt, Artificial Sequence
  Description of Artificial Sequence: Synthetic oligonucleotide
  Antisense strand to SEQ ID NO: 1991208
uuaugacucagaugagacc

SEQ ID NO: 1991210 - RNA, 19 nt, Artificial Sequence
  Description of Artificial Sequence: Synthetic oligonucleotide
  Sense strand starting at position 3192 of SEQ ID NO: 1880752
agucauaaugccuagcaaa

SEQ ID NO: 1991211 - RNA, 19 nt, Artificial Sequence
  Description of Artificial Sequence: Synthetic oligonucleotide
  Antisense strand to SEQ ID NO: 1991210
uuugcuaggcauuaugacu

SEQ ID NO: 1991212 - RNA, 19 nt, Artificial Sequence
  Description of Artificial Sequence: Synthetic oligonucleotide
  Sense strand starting at position 3231 of SEQ ID NO: 1880752
acucaaauguguuucugga

SEQ ID NO: 1991213 - RNA, 19 nt, Artificial Sequence
  Description of Artificial Sequence: Synthetic oligonucleotide
  Antisense strand to SEQ ID NO: 1991212
uccagaaacacauuugagu

SEQ ID NO: 1991214 - RNA, 19 nt, Artificial Sequence
  Description of Artificial Sequence: Synthetic oligonucleotide
  Sense strand starting at position 3233 of SEQ ID NO: 1880752
ucaaauguguuucuggaau

SEQ ID NO: 1991215 - RNA, 19 nt, Artificial Sequence
  Description of Artificial Sequence: Synthetic oligonucleotide
  Antisense strand to SEQ ID NO: 1991214
auuccagaaacacauuuga

SEQ ID NO: 1991216 - RNA, 19 nt, Artificial Sequence
  Description of Artificial Sequence: Synthetic oligonucleotide
  Sense strand starting at position 3386 of SEQ ID NO: 1880752
gugacagcucaugaucaag

SEQ ID NO: 1991217 - RNA, 19 nt, Artificial Sequence
  Description of Artificial Sequence: Synthetic oligonucleotide
  Antisense strand to SEQ ID NO: 1991216
cuugaucaugagcugucac

SEQ ID NO: 1991218 - RNA, 19 nt, Artificial Sequence
  Description of Artificial Sequence: Synthetic oligonucleotide
  Sense strand starting at position 3392 of SEQ ID NO: 1880752
gcucaugaucaagaaagca

SEQ ID NO: 1991219 - RNA, 19 nt, Artificial Sequence
  Description of Artificial Sequence: Synthetic oligonucleotide
  Antisense strand to SEQ ID NO: 1991218
ugcuuucuugaucaugagc

SEQ ID NO: 1991220 - RNA, 19 nt, Artificial Sequence
  Description of Artificial Sequence: Synthetic oligonucleotide
  Sense strand starting at position 3410 of SEQ ID NO: 1880752
agagaauucuaggcuugga

SEQ ID NO: 1991221 - RNA, 19 nt, Artificial Sequence
  Description of Artificial Sequence: Synthetic oligonucleotide
  Antisense strand to SEQ ID NO: 1991220
uccaagccuagaauucucu

SEQ ID NO: 1991222 - RNA, 19 nt, Artificial Sequence
  Description of Artificial Sequence: Synthetic oligonucleotide
  Sense strand starting at position 3438 of SEQ ID NO: 1880752
aguccuuguggugagaaga

SEQ ID NO: 1991223 - RNA, 19 nt, Artificial Sequence
  Description of Artificial Sequence: Synthetic oligonucleotide
  Antisense strand to SEQ ID NO: 1991222
ucuucucaccacaaggacu

SEQ ID NO: 1991224 - RNA, 19 nt, Artificial Sequence
  Description of Artificial Sequence: Synthetic oligonucleotide
  Sense strand starting at position 3602 of SEQ ID NO: 1880752
ccuccauguccauaggacu

SEQ ID NO: 1991225 - RNA, 19 nt, Artificial Sequence
  Description of Artificial Sequence: Synthetic oligonucleotide
  Antisense strand to SEQ ID NO: 1991224
aguccuauggacauggagg

SEQ ID NO: 1991226 - RNA, 19 nt, Artificial Sequence
  Description of Artificial Sequence: Synthetic oligonucleotide
  Sense strand starting at position 3684 of SEQ ID NO: 1880752
ugcuuauuccaauaggagu

SEQ ID NO: 1991227 - RNA, 19 nt, Artificial Sequence
  Description of Artificial Sequence: Synthetic oligonucleotide
  Antisense strand to SEQ ID NO: 1991226
acuccuauuggaauaagca

SEQ ID NO: 1991228 - RNA, 19 nt, Artificial Sequence
  Description of Artificial Sequence: Synthetic oligonucleotide
  Sense strand starting at position 3777 of SEQ ID NO: 1880752
gguaguuguggagggagga

SEQ ID NO: 1991229 - RNA, 19 nt, Artificial Sequence
  Description of Artificial Sequence: Synthetic oligonucleotide
  Antisense strand to SEQ ID NO: 1991228
uccucccuccacaacuacc

SEQ ID NO: 1991230 - RNA, 19 nt, Artificial Sequence
  Description of Artificial Sequence: Synthetic oligonucleotide
  Sense strand starting at position 3778 of SEQ ID NO: 1880752
guaguuguggagggaggaa

SEQ ID NO: 1991231 - RNA, 19 nt, Artificial Sequence
  Description of Artificial Sequence: Synthetic oligonucleotide
  Antisense strand to SEQ ID NO: 1991230
uuccucccuccacaacuac

SEQ ID NO: 1991232 - RNA, 19 nt, Artificial Sequence
  Description of Artificial Sequence: Synthetic oligonucleotide
  Sense strand starting at position 3839 of SEQ ID NO: 1880752
guugcuaaucuagaugauu

SEQ ID NO: 1991233 - RNA, 19 nt, Artificial Sequence
  Description of Artificial Sequence: Synthetic oligonucleotide
  Antisense strand to SEQ ID NO: 1991232
aaucaucuagauuagcaac

SEQ ID NO: 1991234 - RNA, 19 nt, Artificial Sequence
  Description of Artificial Sequence: Synthetic oligonucleotide
  Sense strand starting at position 30 of SEQ ID NO: 1880753
gcugaaccaucacugaaau

SEQ ID NO: 1991235 - RNA, 19 nt, Artificial Sequence
  Description of Artificial Sequence: Synthetic oligonucleotide
  Antisense strand to SEQ ID NO: 1991234
auuucagugaugguucagc

SEQ ID NO: 1991236 - RNA, 19 nt, Artificial Sequence
  Description of Artificial Sequence: Synthetic oligonucleotide
  Sense strand starting at position 41 of SEQ ID NO: 1880753
acugaaauguauguggacu

SEQ ID NO: 1991237 - RNA, 19 nt, Artificial Sequence
  Description of Artificial Sequence: Synthetic oligonucleotide
  Antisense strand to SEQ ID NO: 1991236
aguccacauacauuucagu

SEQ ID NO: 1991238 - RNA, 19 nt, Artificial Sequence
  Description of Artificial Sequence: Synthetic oligonucleotide
  Sense strand starting at position 42 of SEQ ID NO: 1880753
cugaaauguauguggacuu

SEQ ID NO: 1991239 - RNA, 19 nt, Artificial Sequence
  Description of Artificial Sequence: Synthetic oligonucleotide
  Antisense strand to SEQ ID NO: 1991238
aaguccacauacauuucag

SEQ ID NO: 1991240 - RNA, 19 nt, Artificial Sequence
  Description of Artificial Sequence: Synthetic oligonucleotide
  Sense strand starting at position 138 of SEQ ID NO: 1880753
ucaguuacccuggauagcu

SEQ ID NO: 1991241 - RNA, 19 nt, Artificial Sequence
  Description of Artificial Sequence: Synthetic oligonucleotide
  Antisense strand to SEQ ID NO: 1991240
agcuauccaggguaacuga

SEQ ID NO: 1991242 - RNA, 19 nt, Artificial Sequence
  Description of Artificial Sequence: Synthetic oligonucleotide
  Sense strand starting at position 306 of SEQ ID NO: 1880753
auagcaaugcaucagacuu

SEQ ID NO: 1991243 - RNA, 19 nt, Artificial Sequence
  Description of Artificial Sequence: Synthetic oligonucleotide
  Antisense strand to SEQ ID NO: 1991242
aagucugaugcauugcuau

SEQ ID NO: 1991244 - RNA, 19 nt, Artificial Sequence
  Description of Artificial Sequence: Synthetic oligonucleotide
  Sense strand starting at position 377 of SEQ ID NO: 1880753
agauguuauuauuccuaca

SEQ ID NO: 1991245 - RNA, 19 nt, Artificial Sequence
  Description of Artificial Sequence: Synthetic oligonucleotide
  Antisense strand to SEQ ID NO: 1991244
uguaggaauaauaacaucu

SEQ ID NO: 1991246 - RNA, 19 nt, Artificial Sequence
  Description of Artificial Sequence: Synthetic oligonucleotide
  Sense strand starting at position 409 of SEQ ID NO: 1880753
ggcaacuuaugauuaauua

SEQ ID NO: 1991247 - RNA, 19 nt, Artificial Sequence
  Description of Artificial Sequence: Synthetic oligonucleotide
  Antisense strand to SEQ ID NO: 1991246
uaauuaaucauaaguugcc

SEQ ID NO: 1991248 - RNA, 19 nt, Artificial Sequence
  Description of Artificial Sequence: Synthetic oligonucleotide
  Sense strand starting at position 467 of SEQ ID NO: 1880753
uagugaauguaguuacaca

SEQ ID NO: 1991249 - RNA, 19 nt, Artificial Sequence
  Description of Artificial Sequence: Synthetic oligonucleotide
  Antisense strand to SEQ ID NO: 1991248
uguguaacuacauucacua

SEQ ID NO: 1991250 - RNA, 19 nt, Artificial Sequence
  Description of Artificial Sequence: Synthetic oligonucleotide
  Sense strand starting at position 589 of SEQ ID NO: 1880753
agucauauucuacagcaga

SEQ ID NO: 1991251 - RNA, 19 nt, Artificial Sequence
  Description of Artificial Sequence: Synthetic oligonucleotide
  Antisense strand to SEQ ID NO: 1991250
ucugcuguagaauaugacu

SEQ ID NO: 1991252 - RNA, 19 nt, Artificial Sequence
  Description of Artificial Sequence: Synthetic oligonucleotide
  Sense strand starting at position 835 of SEQ ID NO: 1880753
auaucaaauggcugaucuu

SEQ ID NO: 1991253 - RNA, 19 nt, Artificial Sequence
  Description of Artificial Sequence: Synthetic oligonucleotide
  Antisense strand to SEQ ID NO: 1991252
aagaucagccauuugauau

SEQ ID NO: 1991254 - RNA, 19 nt, Artificial Sequence
  Description of Artificial Sequence: Synthetic oligonucleotide
  Sense strand starting at position 838 of SEQ ID NO: 1880753
ucaaauggcugaucuuaga

SEQ ID NO: 1991255 - RNA, 19 nt, Artificial Sequence
  Description of Artificial Sequence: Synthetic oligonucleotide
  Antisense strand to SEQ ID NO: 1991254
ucuaagaucagccauuuga

SEQ ID NO: 1991256 - RNA, 19 nt, Artificial Sequence
  Description of Artificial Sequence: Synthetic oligonucleotide
  Sense strand starting at position 1064 of SEQ ID NO: 1880753
auuauauacucugugauca

SEQ ID NO: 1991257 - RNA, 19 nt, Artificial Sequence
  Description of Artificial Sequence: Synthetic oligonucleotide
  Antisense strand to SEQ ID NO: 1991256
ugaucacagaguauauaau

SEQ ID NO: 1991258 - RNA, 19 nt, Artificial Sequence
  Description of Artificial Sequence: Synthetic oligonucleotide
  Sense strand starting at position 1065 of SEQ ID NO: 1880753
uuauauacucugugaucac

SEQ ID NO: 1991259 - RNA, 19 nt, Artificial Sequence
  Description of Artificial Sequence: Synthetic oligonucleotide
  Antisense strand to SEQ ID NO: 1991258
gugaucacagaguauauaa

SEQ ID NO: 1991260 - RNA, 19 nt, Artificial Sequence
  Description of Artificial Sequence: Synthetic oligonucleotide
  Sense strand starting at position 1436 of SEQ ID NO: 1880753
uuucuugauccuuauguac

SEQ ID NO: 1991261 - RNA, 19 nt, Artificial Sequence
  Description of Artificial Sequence: Synthetic oligonucleotide
  Antisense strand to SEQ ID NO: 1991260
guacauaaggaucaagaaa

SEQ ID NO: 1991262 - RNA, 19 nt, Artificial Sequence
  Description of Artificial Sequence: Synthetic oligonucleotide
  Sense strand starting at position 2052 of SEQ ID NO: 1880753
gaccgaugucagggaaaga

SEQ ID NO: 1991263 - RNA, 19 nt, Artificial Sequence
  Description of Artificial Sequence: Synthetic oligonucleotide
  Antisense strand to SEQ ID NO: 1991262
ucuuucccugacaucgguc

SEQ ID NO: 1991264 - RNA, 19 nt, Artificial Sequence
  Description of Artificial Sequence: Synthetic oligonucleotide
  Sense strand starting at position 2098 of SEQ ID NO: 1880753
cggagauacaugcaguaga

SEQ ID NO: 1991265 - RNA, 19 nt, Artificial Sequence
  Description of Artificial Sequence: Synthetic oligonucleotide
  Antisense strand to SEQ ID NO: 1991264
ucuacugcauguaucuccg

SEQ ID NO: 1991266 - RNA, 19 nt, Artificial Sequence
  Description of Artificial Sequence: Synthetic oligonucleotide
  Sense strand starting at position 2418 of SEQ ID NO: 1880753
ggaaauggaagauguguca

SEQ ID NO: 1991267 - RNA, 19 nt, Artificial Sequence
  Description of Artificial Sequence: Synthetic oligonucleotide
  Antisense strand to SEQ ID NO: 1991266
ugacacaucuuccauuucc

SEQ ID NO: 1991268 - RNA, 19 nt, Artificial Sequence
  Description of Artificial Sequence: Synthetic oligonucleotide
  Sense strand starting at position 2421 of SEQ ID NO: 1880753
aauggaagaugugucagua

SEQ ID NO: 1991269 - RNA, 19 nt, Artificial Sequence
  Description of Artificial Sequence: Synthetic oligonucleotide
  Antisense strand to SEQ ID NO: 1991268
uacugacacaucuuccauu

SEQ ID NO: 1991270 - RNA, 19 nt, Artificial Sequence
  Description of Artificial Sequence: Synthetic oligonucleotide
  Sense strand starting at position 2755 of SEQ ID NO: 1880753
cuuggaguacauuaugcua

SEQ ID NO: 1991271 - RNA, 19 nt, Artificial Sequence
  Description of Artificial Sequence: Synthetic oligonucleotide
  Antisense strand to SEQ ID NO: 1991270
uagcauaauguacuccaag

SEQ ID NO: 1991272 - RNA, 19 nt, Artificial Sequence
  Description of Artificial Sequence: Synthetic oligonucleotide
  Sense strand starting at position 2758 of SEQ ID NO: 1880753
ggaguacauuaugcuaaau

SEQ ID NO: 1991273 - RNA, 19 nt, Artificial Sequence
  Description of Artificial Sequence: Synthetic oligonucleotide
  Antisense strand to SEQ ID NO: 1991272
auuuagcauaauguacucc

SEQ ID NO: 1991274 - RNA, 19 nt, Artificial Sequence
  Description of Artificial Sequence: Synthetic oligonucleotide
  Sense strand starting at position 2836 of SEQ ID NO: 1880753
gucagacucuuauuaguag

SEQ ID NO: 1991275 - RNA, 19 nt, Artificial Sequence
  Description of Artificial Sequence: Synthetic oligonucleotide
  Antisense strand to SEQ ID NO: 1991274
cuacuaauaagagucugac

SEQ ID NO: 1991276 - RNA, 19 nt, Artificial Sequence
  Description of Artificial Sequence: Synthetic oligonucleotide
  Sense strand starting at position 2839 of SEQ ID NO: 1880753
agacucuuauuaguagaga

SEQ ID NO: 1991277 - RNA, 19 nt, Artificial Sequence
  Description of Artificial Sequence: Synthetic oligonucleotide
  Antisense strand to SEQ ID NO: 1991276
ucucuacuaauaagagucu

SEQ ID NO: 1991278 - RNA, 19 nt, Artificial Sequence
  Description of Artificial Sequence: Synthetic oligonucleotide
  Sense strand starting at position 2842 of SEQ ID NO: 1880753
cucuuauuaguagagagua

SEQ ID NO: 1991279 - RNA, 19 nt, Artificial Sequence
  Description of Artificial Sequence: Synthetic oligonucleotide
  Antisense strand to SEQ ID NO: 1991278
uacucucuacuaauaagag

SEQ ID NO: 1991280 - RNA, 19 nt, Artificial Sequence
  Description of Artificial Sequence: Synthetic oligonucleotide
  Sense strand starting at position 2858 of SEQ ID NO: 1880753
guagaauaguagcuaccaa

SEQ ID NO: 1991281 - RNA, 19 nt, Artificial Sequence
  Description of Artificial Sequence: Synthetic oligonucleotide
  Antisense strand to SEQ ID NO: 1991280
uugguagcuacuauucuac

SEQ ID NO: 1991282 - RNA, 19 nt, Artificial Sequence
  Description of Artificial Sequence: Synthetic oligonucleotide
  Sense strand starting at position 2901 of SEQ ID NO: 1880753
gaauaagauguuggucaaa

SEQ ID NO: 1991283 - RNA, 19 nt, Artificial Sequence
  Description of Artificial Sequence: Synthetic oligonucleotide
  Antisense strand to SEQ ID NO: 1991282
uuugaccaacaucuuauuc

SEQ ID NO: 1991284 - RNA, 19 nt, Artificial Sequence
  Description of Artificial Sequence: Synthetic oligonucleotide
  Sense strand starting at position 2931 of SEQ ID NO: 1880753
uccaguuagacacgagaaa

SEQ ID NO: 1991285 - RNA, 19 nt, Artificial Sequence
  Description of Artificial Sequence: Synthetic oligonucleotide
  Antisense strand to SEQ ID NO: 1991284
uuucucgugucuaacugga

SEQ ID NO: 1991286 - RNA, 19 nt, Artificial Sequence
  Description of Artificial Sequence: Synthetic oligonucleotide
  Sense strand starting at position 2991 of SEQ ID NO: 1880753
ggguguuaugauuaacaug

SEQ ID NO: 1991287 - RNA, 19 nt, Artificial Sequence
  Description of Artificial Sequence: Synthetic oligonucleotide
  Antisense strand to SEQ ID NO: 1991286
cauguuaaucauaacaccc

SEQ ID NO: 1991288 - RNA, 19 nt, Artificial Sequence
  Description of Artificial Sequence: Synthetic oligonucleotide
  Sense strand starting at position 3005 of SEQ ID NO: 1880753
acauguuaauuagccugaa

SEQ ID NO: 1991289 - RNA, 19 nt, Artificial Sequence
  Description of Artificial Sequence: Synthetic oligonucleotide
  Antisense strand to SEQ ID NO: 1991288
uucaggcuaauuaacaugu

SEQ ID NO: 1991290 - RNA, 19 nt, Artificial Sequence
  Description of Artificial Sequence: Synthetic oligonucleotide
  Sense strand starting at position 3006 of SEQ ID NO: 1880753
cauguuaauuagccugaag

SEQ ID NO: 1991291 - RNA, 19 nt, Artificial Sequence
  Description of Artificial Sequence: Synthetic oligonucleotide
  Antisense strand to SEQ ID NO: 1991290
cuucaggcuaauuaacaug

SEQ ID NO: 1991292 - RNA, 19 nt, Artificial Sequence
  Description of Artificial Sequence: Synthetic oligonucleotide
  Sense strand starting at position 3008 of SEQ ID NO: 1880753
uguuaauuagccugaagaa

SEQ ID NO: 1991293 - RNA, 19 nt, Artificial Sequence
  Description of Artificial Sequence: Synthetic oligonucleotide
  Antisense strand to SEQ ID NO: 1991292
uucuucaggcuaauuaaca

SEQ ID NO: 1991294 - RNA, 19 nt, Artificial Sequence
  Description of Artificial Sequence: Synthetic oligonucleotide
  Sense strand starting at position 3009 of SEQ ID NO: 1880753
guuaauuagccugaagaau

SEQ ID NO: 1991295 - RNA, 19 nt, Artificial Sequence
  Description of Artificial Sequence: Synthetic oligonucleotide
  Antisense strand to SEQ ID NO: 1991294
auucuucaggcuaauuaac

SEQ ID NO: 1991296 - RNA, 19 nt, Artificial Sequence
  Description of Artificial Sequence: Synthetic oligonucleotide
  Sense strand starting at position 3061 of SEQ ID NO: 1880753
ccuuguacuccugagauau

SEQ ID NO: 1991297 - RNA, 19 nt, Artificial Sequence
  Description of Artificial Sequence: Synthetic oligonucleotide
  Antisense strand to SEQ ID NO: 1991296
auaucucaggaguacaagg

SEQ ID NO: 1991298 - RNA, 19 nt, Artificial Sequence
  Description of Artificial Sequence: Synthetic oligonucleotide
  Sense strand starting at position 3460 of SEQ ID NO: 1880753
gaaagaacacugugagcaa

SEQ ID NO: 1991299 - RNA, 19 nt, Artificial Sequence
  Description of Artificial Sequence: Synthetic oligonucleotide
  Antisense strand to SEQ ID NO: 1991298
uugcucacaguguucuuuc

SEQ ID NO: 1991300 - RNA, 19 nt, Artificial Sequence
  Description of Artificial Sequence: Synthetic oligonucleotide
  Sense strand starting at position 3657 of SEQ ID NO: 1880753
uggguaaauggugaugcuu

SEQ ID NO: 1991301 - RNA, 19 nt, Artificial Sequence
  Description of Artificial Sequence: Synthetic oligonucleotide
  Antisense strand to SEQ ID NO: 1991300
aagcaucaccauuuaccca

SEQ ID NO: 1991302 - RNA, 19 nt, Artificial Sequence
  Description of Artificial Sequence: Synthetic oligonucleotide
  Sense strand starting at position 3670 of SEQ ID NO: 1880753
augcuuguagacugauaag

SEQ ID NO: 1991303 - RNA, 19 nt, Artificial Sequence
  Description of Artificial Sequence: Synthetic oligonucleotide
  Antisense strand to SEQ ID NO: 1991302
cuuaucagucuacaagcau

SEQ ID NO: 1991304 - RNA, 19 nt, Artificial Sequence
  Description of Artificial Sequence: Synthetic oligonucleotide
  Sense strand starting at position 3676 of SEQ ID NO: 1880753
guagacugauaaguaauga

SEQ ID NO: 1991305 - RNA, 19 nt, Artificial Sequence
  Description of Artificial Sequence: Synthetic oligonucleotide
  Antisense strand to SEQ ID NO: 1991304
ucauuacuuaucagucuac

SEQ ID NO: 1991306 - RNA, 19 nt, Artificial Sequence
  Description of Artificial Sequence: Synthetic oligonucleotide
  Sense strand starting at position 3779 of SEQ ID NO: 1880753
uuuguagauguggauagau

SEQ ID NO: 1991307 - RNA, 19 nt, Artificial Sequence
  Description of Artificial Sequence: Synthetic oligonucleotide
  Antisense strand to SEQ ID NO: 1991306
aucuauccacaucuacaaa

SEQ ID NO: 1991308 - RNA, 19 nt, Artificial Sequence
  Description of Artificial Sequence: Synthetic oligonucleotide
  Sense strand starting at position 3788 of SEQ ID NO: 1880753
guggauagauuauucuaaa

SEQ ID NO: 1991309 - RNA, 19 nt, Artificial Sequence
  Description of Artificial Sequence: Synthetic oligonucleotide
  Antisense strand to SEQ ID NO: 1991308
uuuagaauaaucuauccac

SEQ ID NO: 1991310 - RNA, 19 nt, Artificial Sequence
  Description of Artificial Sequence: Synthetic oligonucleotide
  Sense strand starting at position 3863 of SEQ ID NO: 1880753
cuguguguuauugacagag

SEQ ID NO: 1991311 - RNA, 19 nt, Artificial Sequence
  Description of Artificial Sequence: Synthetic oligonucleotide
  Antisense strand to SEQ ID NO: 1991310
cucugucaauaacacacag

SEQ ID NO: 1991312 - RNA, 19 nt, Artificial Sequence
  Description of Artificial Sequence: Synthetic oligonucleotide
  Sense strand starting at position 3881 of SEQ ID NO: 1880753
guggcaaacucauuaaaua

SEQ ID NO: 1991313 - RNA, 19 nt, Artificial Sequence
  Description of Artificial Sequence: Synthetic oligonucleotide
  Antisense strand to SEQ ID NO: 1991312
uauuuaaugaguuugccac

SEQ ID NO: 1991314 - RNA, 19 nt, Artificial Sequence
  Description of Artificial Sequence: Synthetic oligonucleotide
  Sense strand starting at position 45 of SEQ ID NO: 1880755
uggcauaagccugaaugaa

SEQ ID NO: 1991315 - RNA, 19 nt, Artificial Sequence
  Description of Artificial Sequence: Synthetic oligonucleotide
  Antisense strand to SEQ ID NO: 1991314
uucauucaggcuuaugcca

SEQ ID NO: 1991316 - RNA, 19 nt, Artificial Sequence
  Description of Artificial Sequence: Synthetic oligonucleotide
  Sense strand starting at position 72 of SEQ ID NO: 1880755
ugacucuugacuggcugaa

SEQ ID NO: 1991317 - RNA, 19 nt, Artificial Sequence
  Description of Artificial Sequence: Synthetic oligonucleotide
  Antisense strand to SEQ ID NO: 1991316
uucagccagucaagaguca

SEQ ID NO: 1991318 - RNA, 19 nt, Artificial Sequence
  Description of Artificial Sequence: Synthetic oligonucleotide
  Sense strand starting at position 74 of SEQ ID NO: 1880755
acucuugacuggcugaaua

SEQ ID NO: 1991319 - RNA, 19 nt, Artificial Sequence
  Description of Artificial Sequence: Synthetic oligonucleotide
  Antisense strand to SEQ ID NO: 1991318
uauucagccagucaagagu

SEQ ID NO: 1991320 - RNA, 19 nt, Artificial Sequence
  Description of Artificial Sequence: Synthetic oligonucleotide
  Sense strand starting at position 132 of SEQ ID NO: 1880755
agaugcuagaaaugagagu

SEQ ID NO: 1991321 - RNA, 19 nt, Artificial Sequence
  Description of Artificial Sequence: Synthetic oligonucleotide
  Antisense strand to SEQ ID NO: 1991320
acucucauuucuagcaucu

SEQ ID NO: 1991322 - RNA, 19 nt, Artificial Sequence
  Description of Artificial Sequence: Synthetic oligonucleotide
  Sense strand starting at position 350 of SEQ ID NO: 1880755
ugguguguggguaguaaca

SEQ ID NO: 1991323 - RNA, 19 nt, Artificial Sequence
  Description of Artificial Sequence: Synthetic oligonucleotide
  Antisense strand to SEQ ID NO: 1991322
uguuacuacccacacacca

SEQ ID NO: 1991324 - RNA, 19 nt, Artificial Sequence
  Description of Artificial Sequence: Synthetic oligonucleotide
  Sense strand starting at position 415 of SEQ ID NO: 1880755
guaugucaacccugaagau

SEQ ID NO: 1991325 - RNA, 19 nt, Artificial Sequence
  Description of Artificial Sequence: Synthetic oligonucleotide
  Antisense strand to SEQ ID NO: 1991324
aucuucaggguugacauac

SEQ ID NO: 1991326 - RNA, 19 nt, Artificial Sequence
  Description of Artificial Sequence: Synthetic oligonucleotide
  Sense strand starting at position 427 of SEQ ID NO: 1880755
ugaagauauacguauguca

SEQ ID NO: 1991327 - RNA, 19 nt, Artificial Sequence
  Description of Artificial Sequence: Synthetic oligonucleotide
  Antisense strand to SEQ ID NO: 1991326
ugacauacguauaucuuca

SEQ ID NO: 1991328 - RNA, 19 nt, Artificial Sequence
  Description of Artificial Sequence: Synthetic oligonucleotide
  Sense strand starting at position 429 of SEQ ID NO: 1880755
aagauauacguaugucaga

SEQ ID NO: 1991329 - RNA, 19 nt, Artificial Sequence
  Description of Artificial Sequence: Synthetic oligonucleotide
  Antisense strand to SEQ ID NO: 1991328
ucugacauacguauaucuu

SEQ ID NO: 1991330 - RNA, 19 nt, Artificial Sequence
  Description of Artificial Sequence: Synthetic oligonucleotide
  Sense strand starting at position 430 of SEQ ID NO: 1880755
agauauacguaugucagaa

SEQ ID NO: 1991331 - RNA, 19 nt, Artificial Sequence
  Description of Artificial Sequence: Synthetic oligonucleotide
  Antisense strand to SEQ ID NO: 1991330
uucugacauacguauaucu

SEQ ID NO: 1991332 - RNA, 19 nt, Artificial Sequence
  Description of Artificial Sequence: Synthetic oligonucleotide
  Sense strand starting at position 1280 of SEQ ID NO: 1880755
gcuugaagauuucugcugu

SEQ ID NO: 1991333 - RNA, 19 nt, Artificial Sequence
  Description of Artificial Sequence: Synthetic oligonucleotide
  Antisense strand to SEQ ID NO: 1991332
acagcagaaaucuucaagc

SEQ ID NO: 1991334 - RNA, 19 nt, Artificial Sequence
  Description of Artificial Sequence: Synthetic oligonucleotide
  Sense strand starting at position 1730 of SEQ ID NO: 1880755
cucuguguuaaugaaugga

SEQ ID NO: 1991335 - RNA, 19 nt, Artificial Sequence
  Description of Artificial Sequence: Synthetic oligonucleotide
  Antisense strand to SEQ ID NO: 1991334
uccauucauuaacacagag

SEQ ID NO: 1991336 - RNA, 19 nt, Artificial Sequence
  Description of Artificial Sequence: Synthetic oligonucleotide
  Sense strand starting at position 1734 of SEQ ID NO: 1880755
guguuaaugaauggacuga

SEQ ID NO: 1991337 - RNA, 19 nt, Artificial Sequence
  Description of Artificial Sequence: Synthetic oligonucleotide
  Antisense strand to SEQ ID NO: 1991336
ucaguccauucauuaacac

SEQ ID NO: 1991338 - RNA, 19 nt, Artificial Sequence
  Description of Artificial Sequence: Synthetic oligonucleotide
  Sense strand starting at position 1769 of SEQ ID NO: 1880755
cuuggacauuucuauggaa

SEQ ID NO: 1991339 - RNA, 19 nt, Artificial Sequence
  Description of Artificial Sequence: Synthetic oligonucleotide
  Antisense strand to SEQ ID NO: 1991338
uuccauagaaauguccaag

SEQ ID NO: 1991340 - RNA, 19 nt, Artificial Sequence
  Description of Artificial Sequence: Synthetic oligonucleotide
  Sense strand starting at position 1772 of SEQ ID NO: 1880755
ggacauuucuauggaaaca

SEQ ID NO: 1991341 - RNA, 19 nt, Artificial Sequence
  Description of Artificial Sequence: Synthetic oligonucleotide
  Antisense strand to SEQ ID NO: 1991340
uguuuccauagaaaugucc

SEQ ID NO: 1991342 - RNA, 19 nt, Artificial Sequence
  Description of Artificial Sequence: Synthetic oligonucleotide
  Sense strand starting at position 1837 of SEQ ID NO: 1880755
cuguguccacaugagaaca

SEQ ID NO: 1991343 - RNA, 19 nt, Artificial Sequence
  Description of Artificial Sequence: Synthetic oligonucleotide
  Antisense strand to SEQ ID NO: 1991342
uguucucauguggacacag

SEQ ID NO: 1991344 - RNA, 19 nt, Artificial Sequence
  Description of Artificial Sequence: Synthetic oligonucleotide
  Sense strand starting at position 2017 of SEQ ID NO: 1880755
uggaauucucgugauacag

SEQ ID NO: 1991345 - RNA, 19 nt, Artificial Sequence
  Description of Artificial Sequence: Synthetic oligonucleotide
  Antisense strand to SEQ ID NO: 1991344
cuguaucacgagaauucca

SEQ ID NO: 1991346 - RNA, 19 nt, Artificial Sequence
  Description of Artificial Sequence: Synthetic oligonucleotide
  Sense strand starting at position 2023 of SEQ ID NO: 1880755
ucucgugauacagauaugu

SEQ ID NO: 1991347 - RNA, 19 nt, Artificial Sequence
  Description of Artificial Sequence: Synthetic oligonucleotide
  Antisense strand to SEQ ID NO: 1991346
acauaucuguaucacgaga

SEQ ID NO: 1991348 - RNA, 19 nt, Artificial Sequence
  Description of Artificial Sequence: Synthetic oligonucleotide
  Sense strand starting at position 2072 of SEQ ID NO: 1880755
ccaugauaacuguggagua

SEQ ID NO: 1991349 - RNA, 19 nt, Artificial Sequence
  Description of Artificial Sequence: Synthetic oligonucleotide
  Antisense strand to SEQ ID NO: 1991348
uacuccacaguuaucaugg

SEQ ID NO: 1991350 - RNA, 19 nt, Artificial Sequence
  Description of Artificial Sequence: Synthetic oligonucleotide
  Sense strand starting at position 2092 of SEQ ID NO: 1880755
gaauuauaagcaggucaca

SEQ ID NO: 1991351 - RNA, 19 nt, Artificial Sequence
  Description of Artificial Sequence: Synthetic oligonucleotide
  Antisense strand to SEQ ID NO: 1991350
ugugaccugcuuauaauuc

SEQ ID NO: 1991352 - RNA, 19 nt, Artificial Sequence
  Description of Artificial Sequence: Synthetic oligonucleotide
  Sense strand starting at position 2116 of SEQ ID NO: 1880755
gggacuugagauugacagu

SEQ ID NO: 1991353 - RNA, 19 nt, Artificial Sequence
  Description of Artificial Sequence: Synthetic oligonucleotide
  Antisense strand to SEQ ID NO: 1991352
acugucaaucucaaguccc

SEQ ID NO: 1991354 - RNA, 19 nt, Artificial Sequence
  Description of Artificial Sequence: Synthetic oligonucleotide
  Sense strand starting at position 2213 of SEQ ID NO: 1880755
gguggauuaucugcaaaga

SEQ ID NO: 1991355 - RNA, 19 nt, Artificial Sequence
  Description of Artificial Sequence: Synthetic oligonucleotide
  Antisense strand to SEQ ID NO: 1991354
ucuuugcagauaauccacc

SEQ ID NO: 1991356 - RNA, 19 nt, Artificial Sequence
  Description of Artificial Sequence: Synthetic oligonucleotide
  Sense strand starting at position 2214 of SEQ ID NO: 1880755
guggauuaucugcaaagau

SEQ ID NO: 1991357 - RNA, 19 nt, Artificial Sequence
  Description of Artificial Sequence: Synthetic oligonucleotide
  Antisense strand to SEQ ID NO: 1991356
aucuuugcagauaauccac

SEQ ID NO: 1991358 - RNA, 19 nt, Artificial Sequence
  Description of Artificial Sequence: Synthetic oligonucleotide
  Sense strand starting at position 2276 of SEQ ID NO: 1880755
caccuuuaccaguggaaug

SEQ ID NO: 1991359 - RNA, 19 nt, Artificial Sequence
  Description of Artificial Sequence: Synthetic oligonucleotide
  Antisense strand to SEQ ID NO: 1991358
cauuccacugguaaaggug

SEQ ID NO: 1991360 - RNA, 19 nt, Artificial Sequence
  Description of Artificial Sequence: Synthetic oligonucleotide
  Sense strand starting at position 2283 of SEQ ID NO: 1880755
accaguggaaugugaugaa

SEQ ID NO: 1991361 - RNA, 19 nt, Artificial Sequence
  Description of Artificial Sequence: Synthetic oligonucleotide
  Antisense strand to SEQ ID NO: 1991360
uucaucacauuccacuggu

SEQ ID NO: 1991362 - RNA, 19 nt, Artificial Sequence
  Description of Artificial Sequence: Synthetic oligonucleotide
  Sense strand starting at position 2332 of SEQ ID NO: 1880755
uuaagaggucuagaugcuu

SEQ ID NO: 1991363 - RNA, 19 nt, Artificial Sequence
  Description of Artificial Sequence: Synthetic oligonucleotide
  Antisense strand to SEQ ID NO: 1991362
aagcaucuagaccucuuaa

SEQ ID NO: 1991364 - RNA, 19 nt, Artificial Sequence
  Description of Artificial Sequence: Synthetic oligonucleotide
  Sense strand starting at position 2368 of SEQ ID NO: 1880755
ggagcucugaguuaucaug

SEQ ID NO: 1991365 - RNA, 19 nt, Artificial Sequence
  Description of Artificial Sequence: Synthetic oligonucleotide
  Antisense strand to SEQ ID NO: 1991364
caugauaacucagagcucc

SEQ ID NO: 1991366 - RNA, 19 nt, Artificial Sequence
  Description of Artificial Sequence: Synthetic oligonucleotide
  Sense strand starting at position 2375 of SEQ ID NO: 1880755
ugaguuaucaugugagaac

SEQ ID NO: 1991367 - RNA, 19 nt, Artificial Sequence
  Description of Artificial Sequence: Synthetic oligonucleotide
  Antisense strand to SEQ ID NO: 1991366
guucucacaugauaacuca

SEQ ID NO: 1991368 - RNA, 19 nt, Artificial Sequence
  Description of Artificial Sequence: Synthetic oligonucleotide
  Sense strand starting at position 2541 of SEQ ID NO: 1880755
cugaacuaauguuuaaagu

SEQ ID NO: 1991369 - RNA, 19 nt, Artificial Sequence
  Description of Artificial Sequence: Synthetic oligonucleotide
  Antisense strand to SEQ ID NO: 1991368
acuuuaaacauuaguucag

SEQ ID NO: 1991370 - RNA, 19 nt, Artificial Sequence
  Description of Artificial Sequence: Synthetic oligonucleotide
  Sense strand starting at position 2551 of SEQ ID NO: 1880755
guuuaaagucaggauguaa

SEQ ID NO: 1991371 - RNA, 19 nt, Artificial Sequence
  Description of Artificial Sequence: Synthetic oligonucleotide
  Antisense strand to SEQ ID NO: 1991370
uuacauccugacuuuaaac

SEQ ID NO: 1991372 - RNA, 19 nt, Artificial Sequence
  Description of Artificial Sequence: Synthetic oligonucleotide
  Sense strand starting at position 2569 of SEQ ID NO: 1880755
acauauugucuccauguga

SEQ ID NO: 1991373 - RNA, 19 nt, Artificial Sequence
  Description of Artificial Sequence: Synthetic oligonucleotide
  Antisense strand to SEQ ID NO: 1991372
ucacauggagacaauaugu

SEQ ID NO: 1991374 - RNA, 19 nt, Artificial Sequence
  Description of Artificial Sequence: Synthetic oligonucleotide
  Sense strand starting at position 2583 of SEQ ID NO: 1880755
ugugacuuuguugaacuaa

SEQ ID NO: 1991375 - RNA, 19 nt, Artificial Sequence
  Description of Artificial Sequence: Synthetic oligonucleotide
  Antisense strand to SEQ ID NO: 1991374
uuaguucaacaaagucaca

SEQ ID NO: 1991376 - RNA, 19 nt, Artificial Sequence
  Description of Artificial Sequence: Synthetic oligonucleotide
  Sense strand starting at position 2659 of SEQ ID NO: 1880755
auugcucucugaucagaag

SEQ ID NO: 1991377 - RNA, 19 nt, Artificial Sequence
  Description of Artificial Sequence: Synthetic oligonucleotide
  Antisense strand to SEQ ID NO: 1991376
cuucugaucagagagcaau

SEQ ID NO: 1991378 - RNA, 19 nt, Artificial Sequence
  Description of Artificial Sequence: Synthetic oligonucleotide
  Sense strand starting at position 2660 of SEQ ID NO: 1880755
uugcucucugaucagaaga

SEQ ID NO: 1991379 - RNA, 19 nt, Artificial Sequence
  Description of Artificial Sequence: Synthetic oligonucleotide
  Antisense strand to SEQ ID NO: 1991378
ucuucugaucagagagcaa

SEQ ID NO: 1991380 - RNA, 19 nt, Artificial Sequence
  Description of Artificial Sequence: Synthetic oligonucleotide
  Sense strand starting at position 2731 of SEQ ID NO: 1880755
uccagagagaagcgauuau

SEQ ID NO: 1991381 - RNA, 19 nt, Artificial Sequence
  Description of Artificial Sequence: Synthetic oligonucleotide
  Antisense strand to SEQ ID NO: 1991380
auaaucgcuucucucugga

SEQ ID NO: 1991382 - RNA, 19 nt, Artificial Sequence
  Description of Artificial Sequence: Synthetic oligonucleotide
  Sense strand starting at position 3096 of SEQ ID NO: 1880755
aaauguucugcuuagaaug

SEQ ID NO: 1991383 - RNA, 19 nt, Artificial Sequence
  Description of Artificial Sequence: Synthetic oligonucleotide
  Antisense strand to SEQ ID NO: 1991382
cauucuaagcagaacauuu

SEQ ID NO: 1991384 - RNA, 19 nt, Artificial Sequence
  Description of Artificial Sequence: Synthetic oligonucleotide
  Sense strand starting at position 3101 of SEQ ID NO: 1880755
uucugcuuagaaugaggaa

SEQ ID NO: 1991385 - RNA, 19 nt, Artificial Sequence
  Description of Artificial Sequence: Synthetic oligonucleotide
  Antisense strand to SEQ ID NO: 1991384
uuccucauucuaagcagaa

SEQ ID NO: 1991386 - RNA, 19 nt, Artificial Sequence
  Description of Artificial Sequence: Synthetic oligonucleotide
  Sense strand starting at position 3312 of SEQ ID NO: 1880755
acagauaaugcuggaguca

SEQ ID NO: 1991387 - RNA, 19 nt, Artificial Sequence
  Description of Artificial Sequence: Synthetic oligonucleotide
  Antisense strand to SEQ ID NO: 1991386
ugacuccagcauuaucugu

SEQ ID NO: 1991388 - RNA, 19 nt, Artificial Sequence
  Description of Artificial Sequence: Synthetic oligonucleotide
  Sense strand starting at position 3610 of SEQ ID NO: 1880755
uccugcuuucuaggaagaa

SEQ ID NO: 1991389 - RNA, 19 nt, Artificial Sequence
  Description of Artificial Sequence: Synthetic oligonucleotide
  Antisense strand to SEQ ID NO: 1991388
uucuuccuagaaagcagga

SEQ ID NO: 1991390 - RNA, 19 nt, Artificial Sequence
  Description of Artificial Sequence: Synthetic oligonucleotide
  Sense strand starting at position 3710 of SEQ ID NO: 1880755
agaaauguacuguauaagu

SEQ ID NO: 1991391 - RNA, 19 nt, Artificial Sequence
  Description of Artificial Sequence: Synthetic oligonucleotide
  Antisense strand to SEQ ID NO: 1991390
acuuauacaguacauuucu

SEQ ID NO: 1991392 - RNA, 19 nt, Artificial Sequence
  Description of Artificial Sequence: Synthetic oligonucleotide
  Sense strand starting at position 3712 of SEQ ID NO: 1880755
aaauguacuguauaaguga

SEQ ID NO: 1991393 - RNA, 19 nt, Artificial Sequence
  Description of Artificial Sequence: Synthetic oligonucleotide
  Antisense strand to SEQ ID NO: 1991392
ucacuuauacaguacauuu

SEQ ID NO: 1991394 - RNA, 19 nt, Artificial Sequence
  Description of Artificial Sequence: Synthetic oligonucleotide
  Sense strand starting at position 219 of SEQ ID NO: 1880756
ugugcuauuucuuccuaga

SEQ ID NO: 1991395 - RNA, 19 nt, Artificial Sequence
  Description of Artificial Sequence: Synthetic oligonucleotide
  Antisense strand to SEQ ID NO: 1991394
ucuaggaagaaauagcaca

SEQ ID NO: 1991396 - RNA, 19 nt, Artificial Sequence
  Description of Artificial Sequence: Synthetic oligonucleotide
  Sense strand starting at position 402 of SEQ ID NO: 1880756
aaaguaagccuguaucagu

SEQ ID NO: 1991397 - RNA, 19 nt, Artificial Sequence
  Description of Artificial Sequence: Synthetic oligonucleotide
  Antisense strand to SEQ ID NO: 1991396
acugauacaggcuuacuuu

SEQ ID NO: 1991398 - RNA, 19 nt, Artificial Sequence
  Description of Artificial Sequence: Synthetic oligonucleotide
  Sense strand starting at position 522 of SEQ ID NO: 1880756
agcugacuccagcauuauc

SEQ ID NO: 1991399 - RNA, 19 nt, Artificial Sequence
  Description of Artificial Sequence: Synthetic oligonucleotide
  Antisense strand to SEQ ID NO: 1991398
gauaaugcuggagucagcu

SEQ ID NO: 1991400 - RNA, 19 nt, Artificial Sequence
  Description of Artificial Sequence: Synthetic oligonucleotide
  Sense strand starting at position 535 of SEQ ID NO: 1880756
auuaucugucuuuagcuga

SEQ ID NO: 1991401 - RNA, 19 nt, Artificial Sequence
  Description of Artificial Sequence: Synthetic oligonucleotide
  Antisense strand to SEQ ID NO: 1991400
ucagcuaaagacagauaau

SEQ ID NO: 1991402 - RNA, 19 nt, Artificial Sequence
  Description of Artificial Sequence: Synthetic oligonucleotide
  Sense strand starting at position 636 of SEQ ID NO: 1880756
guugcagaaacuuggagau

SEQ ID NO: 1991403 - RNA, 19 nt, Artificial Sequence
  Description of Artificial Sequence: Synthetic oligonucleotide
  Antisense strand to SEQ ID NO: 1991402
aucuccaaguuucugcaac

SEQ ID NO: 1991404 - RNA, 19 nt, Artificial Sequence
  Description of Artificial Sequence: Synthetic oligonucleotide
  Sense strand starting at position 813 of SEQ ID NO: 1880756
ggcagaauauuagcaagga

SEQ ID NO: 1991405 - RNA, 19 nt, Artificial Sequence
  Description of Artificial Sequence: Synthetic oligonucleotide
  Antisense strand to SEQ ID NO: 1991404
uccuugcuaauauucugcc

SEQ ID NO: 1991406 - RNA, 19 nt, Artificial Sequence
  Description of Artificial Sequence: Synthetic oligonucleotide
  Sense strand starting at position 817 of SEQ ID NO: 1880756
gaauauuagcaaggacagu

SEQ ID NO: 1991407 - RNA, 19 nt, Artificial Sequence
  Description of Artificial Sequence: Synthetic oligonucleotide
  Antisense strand to SEQ ID NO: 1991406
acuguccuugcuaauauuc

SEQ ID NO: 1991408 - RNA, 19 nt, Artificial Sequence
  Description of Artificial Sequence: Synthetic oligonucleotide
  Sense strand starting at position 1046 of SEQ ID NO: 1880756
ccaccuagucaagggauga

SEQ ID NO: 1991409 - RNA, 19 nt, Artificial Sequence
  Description of Artificial Sequence: Synthetic oligonucleotide
  Antisense strand to SEQ ID NO: 1991408
ucaucccuugacuaggugg

SEQ ID NO: 1991410 - RNA, 19 nt, Artificial Sequence
  Description of Artificial Sequence: Synthetic oligonucleotide
  Sense strand starting at position 1092 of SEQ ID NO: 1880756
agguauuggcauugauaau

SEQ ID NO: 1991411 - RNA, 19 nt, Artificial Sequence
  Description of Artificial Sequence: Synthetic oligonucleotide
  Antisense strand to SEQ ID NO: 1991410
auuaucaaugccaauaccu

SEQ ID NO: 1991412 - RNA, 19 nt, Artificial Sequence
  Description of Artificial Sequence: Synthetic oligonucleotide
  Sense strand starting at position 1093 of SEQ ID NO: 1880756
gguauuggcauugauaauc

SEQ ID NO: 1991413 - RNA, 19 nt, Artificial Sequence
  Description of Artificial Sequence: Synthetic oligonucleotide
  Antisense strand to SEQ ID NO: 1991412
gauuaucaaugccaauacc

SEQ ID NO: 1991414 - RNA, 19 nt, Artificial Sequence
  Description of Artificial Sequence: Synthetic oligonucleotide
  Sense strand starting at position 1126 of SEQ ID NO: 1880756
cuuuguguugaguaggauu

SEQ ID NO: 1991415 - RNA, 19 nt, Artificial Sequence
  Description of Artificial Sequence: Synthetic oligonucleotide
  Antisense strand to SEQ ID NO: 1991414
aauccuacucaacacaaag

SEQ ID NO: 1991416 - RNA, 19 nt, Artificial Sequence
  Description of Artificial Sequence: Synthetic oligonucleotide
  Sense strand starting at position 1141 of SEQ ID NO: 1880756
gauucugaggcucaaguua

SEQ ID NO: 1991417 - RNA, 19 nt, Artificial Sequence
  Description of Artificial Sequence: Synthetic oligonucleotide
  Antisense strand to SEQ ID NO: 1991416
uaacuugagccucagaauc

SEQ ID NO: 1991418 - RNA, 19 nt, Artificial Sequence
  Description of Artificial Sequence: Synthetic oligonucleotide
  Sense strand starting at position 1168 of SEQ ID NO: 1880756
aggauugacucuucugauc

SEQ ID NO: 1991419 - RNA, 19 nt, Artificial Sequence
  Description of Artificial Sequence: Synthetic oligonucleotide
  Antisense strand to SEQ ID NO: 1991418
gaucagaagagucaauccu

SEQ ID NO: 1991420 - RNA, 19 nt, Artificial Sequence
  Description of Artificial Sequence: Synthetic oligonucleotide
  Sense strand starting at position 1173 of SEQ ID NO: 1880756
ugacucuucugaucagaga

SEQ ID NO: 1991421 - RNA, 19 nt, Artificial Sequence
  Description of Artificial Sequence: Synthetic oligonucleotide
  Antisense strand to SEQ ID NO: 1991420
ucucugaucagaagaguca

SEQ ID NO: 1991422 - RNA, 19 nt, Artificial Sequence
  Description of Artificial Sequence: Synthetic oligonucleotide
  Sense strand starting at position 1188 of SEQ ID NO: 1880756
gagagcaaugccuagucuu

SEQ ID NO: 1991423 - RNA, 19 nt, Artificial Sequence
  Description of Artificial Sequence: Synthetic oligonucleotide
  Antisense strand to SEQ ID NO: 1991422
aagacuaggcauugcucuc

SEQ ID NO: 1991424 - RNA, 19 nt, Artificial Sequence
  Description of Artificial Sequence: Synthetic oligonucleotide
  Sense strand starting at position 1273 of SEQ ID NO: 1880756
uggagacaauauguuacau

SEQ ID NO: 1991425 - RNA, 19 nt, Artificial Sequence
  Description of Artificial Sequence: Synthetic oligonucleotide
  Antisense strand to SEQ ID NO: 1991424
auguaacauauugucucca

SEQ ID NO: 1991426 - RNA, 19 nt, Artificial Sequence
  Description of Artificial Sequence: Synthetic oligonucleotide
  Sense strand starting at position 1283 of SEQ ID NO: 1880756
auguuacauccugacuuua

SEQ ID NO: 1991427 - RNA, 19 nt, Artificial Sequence
  Description of Artificial Sequence: Synthetic oligonucleotide
  Antisense strand to SEQ ID NO: 1991426
uaaagucaggauguaacau

SEQ ID NO: 1991428 - RNA, 19 nt, Artificial Sequence
  Description of Artificial Sequence: Synthetic oligonucleotide
  Sense strand starting at position 1342 of SEQ ID NO: 1880756
gcaguuauccacgacuaca

SEQ ID NO: 1991429 - RNA, 19 nt, Artificial Sequence
  Description of Artificial Sequence: Synthetic oligonucleotide
  Antisense strand to SEQ ID NO: 1991428
uguagucguggauaacugc

SEQ ID NO: 1991430 - RNA, 19 nt, Artificial Sequence
  Description of Artificial Sequence: Synthetic oligonucleotide
  Sense strand starting at position 1345 of SEQ ID NO: 1880756
guuauccacgacuacauaa

SEQ ID NO: 1991431 - RNA, 19 nt, Artificial Sequence
  Description of Artificial Sequence: Synthetic oligonucleotide
  Antisense strand to SEQ ID NO: 1991430
uuauguagucguggauaac

SEQ ID NO: 1991432 - RNA, 19 nt, Artificial Sequence
  Description of Artificial Sequence: Synthetic oligonucleotide
  Sense strand starting at position 1460 of SEQ ID NO: 1880756
ugguucucacaugauaacu

SEQ ID NO: 1991433 - RNA, 19 nt, Artificial Sequence
  Description of Artificial Sequence: Synthetic oligonucleotide
  Antisense strand to SEQ ID NO: 1991432
aguuaucaugugagaacca

SEQ ID NO: 1991434 - RNA, 19 nt, Artificial Sequence
  Description of Artificial Sequence: Synthetic oligonucleotide
  Sense strand starting at position 1521 of SEQ ID NO: 1880756
uaaggcccugucuagaauu

SEQ ID NO: 1991435 - RNA, 19 nt, Artificial Sequence
  Description of Artificial Sequence: Synthetic oligonucleotide
  Antisense strand to SEQ ID NO: 1991434
aauucuagacagggccuua

SEQ ID NO: 1991436 - RNA, 19 nt, Artificial Sequence
  Description of Artificial Sequence: Synthetic oligonucleotide
  Sense strand starting at position 1620 of SEQ ID NO: 1880756
gccaucuuugcagauaauc

SEQ ID NO: 1991437 - RNA, 19 nt, Artificial Sequence
  Description of Artificial Sequence: Synthetic oligonucleotide
  Antisense strand to SEQ ID NO: 1991436
gauuaucugcaaagauggc

SEQ ID NO: 1991438 - RNA, 19 nt, Artificial Sequence
  Description of Artificial Sequence: Synthetic oligonucleotide
  Sense strand starting at position 1678 of SEQ ID NO: 1880756
gugaguacuccacaggcuu

SEQ ID NO: 1991439 - RNA, 19 nt, Artificial Sequence
  Description of Artificial Sequence: Synthetic oligonucleotide
  Antisense strand to SEQ ID NO: 1991438
aagccuguggaguacucac

SEQ ID NO: 1991440 - RNA, 19 nt, Artificial Sequence
  Description of Artificial Sequence: Synthetic oligonucleotide
  Sense strand starting at position 1744 of SEQ ID NO: 1880756
cugugaccugcuuauaauu

SEQ ID NO: 1991441 - RNA, 19 nt, Artificial Sequence
  Description of Artificial Sequence: Synthetic oligonucleotide
  Antisense strand to SEQ ID NO: 1991440
aauuauaagcaggucacag

SEQ ID NO: 1991442 - RNA, 19 nt, Artificial Sequence
  Description of Artificial Sequence: Synthetic oligonucleotide
  Sense strand starting at position 1770 of SEQ ID NO: 1880756
cacaguuaucauggugaag

SEQ ID NO: 1991443 - RNA, 19 nt, Artificial Sequence
  Description of Artificial Sequence: Synthetic oligonucleotide
  Antisense strand to SEQ ID NO: 1991442
cuucaccaugauaacugug

SEQ ID NO: 1991444 - RNA, 19 nt, Artificial Sequence
  Description of Artificial Sequence: Synthetic oligonucleotide
  Sense strand starting at position 1827 of SEQ ID NO: 1880756
acgagaauuccacgagaag

SEQ ID NO: 1991445 - RNA, 19 nt, Artificial Sequence
  Description of Artificial Sequence: Synthetic oligonucleotide
  Antisense strand to SEQ ID NO: 1991444
cuucucguggaauucucgu

SEQ ID NO: 1991446 - RNA, 19 nt, Artificial Sequence
  Description of Artificial Sequence: Synthetic oligonucleotide
  Sense strand starting at position 2063 of SEQ ID NO: 1880756
aguguuuccauagaaaugu

SEQ ID NO: 1991447 - RNA, 19 nt, Artificial Sequence
  Description of Artificial Sequence: Synthetic oligonucleotide
  Antisense strand to SEQ ID NO: 1991446
acauuucuauggaaacacu

SEQ ID NO: 1991448 - RNA, 19 nt, Artificial Sequence
  Description of Artificial Sequence: Synthetic oligonucleotide
  Sense strand starting at position 2094 of SEQ ID NO: 1880756
auuauagagucaguccauu

SEQ ID NO: 1991449 - RNA, 19 nt, Artificial Sequence
  Description of Artificial Sequence: Synthetic oligonucleotide
  Antisense strand to SEQ ID NO: 1991448
aauggacugacucuauaau

SEQ ID NO: 1991450 - RNA, 19 nt, Artificial Sequence
  Description of Artificial Sequence: Synthetic oligonucleotide
  Sense strand starting at position 2186 of SEQ ID NO: 1880756
gcccuagacguucauggaa

SEQ ID NO: 1991451 - RNA, 19 nt, Artificial Sequence
  Description of Artificial Sequence: Synthetic oligonucleotide
  Antisense strand to SEQ ID NO: 1991450
uuccaugaacgucuagggc

SEQ ID NO: 1991452 - RNA, 19 nt, Artificial Sequence
  Description of Artificial Sequence: Synthetic oligonucleotide
  Sense strand starting at position 2231 of SEQ ID NO: 1880756
gcccuuuccgcgguaacau

SEQ ID NO: 1991453 - RNA, 19 nt, Artificial Sequence
  Description of Artificial Sequence: Synthetic oligonucleotide
  Antisense strand to SEQ ID NO: 1991452
auguuaccgcggaaagggc

SEQ ID NO: 1991454 - RNA, 19 nt, Artificial Sequence
  Description of Artificial Sequence: Synthetic oligonucleotide
  Sense strand starting at position 2319 of SEQ ID NO: 1880756
gaagcaguccguuucuguu

SEQ ID NO: 1991455 - RNA, 19 nt, Artificial Sequence
  Description of Artificial Sequence: Synthetic oligonucleotide
  Antisense strand to SEQ ID NO: 1991454
aacagaaacggacugcuuc

SEQ ID NO: 1991456 - RNA, 19 nt, Artificial Sequence
  Description of Artificial Sequence: Synthetic oligonucleotide
  Sense strand starting at position 2603 of SEQ ID NO: 1880756
uugcuaagccaggaaguuu

SEQ ID NO: 1991457 - RNA, 19 nt, Artificial Sequence
  Description of Artificial Sequence: Synthetic oligonucleotide
  Antisense strand to SEQ ID NO: 1991456
aaacuuccuggcuuagcaa

SEQ ID NO: 1991458 - RNA, 19 nt, Artificial Sequence
  Description of Artificial Sequence: Synthetic oligonucleotide
  Sense strand starting at position 3000 of SEQ ID NO: 1880756
cuuagauaaguauguggaa

SEQ ID NO: 1991459 - RNA, 19 nt, Artificial Sequence
  Description of Artificial Sequence: Synthetic oligonucleotide
  Antisense strand to SEQ ID NO: 1991458
uuccacauacuuaucuaag

SEQ ID NO: 1991460 - RNA, 19 nt, Artificial Sequence
  Description of Artificial Sequence: Synthetic oligonucleotide
  Sense strand starting at position 3383 of SEQ ID NO: 1880756
agcugaugaucucuuuaua

SEQ ID NO: 1991461 - RNA, 19 nt, Artificial Sequence
  Description of Artificial Sequence: Synthetic oligonucleotide
  Antisense strand to SEQ ID NO: 1991460
uauaaagagaucaucagcu

SEQ ID NO: 1991462 - RNA, 19 nt, Artificial Sequence
  Description of Artificial Sequence: Synthetic oligonucleotide
  Sense strand starting at position 3634 of SEQ ID NO: 1880756
cugauaucugggcagcuaa

SEQ ID NO: 1991463 - RNA, 19 nt, Artificial Sequence
  Description of Artificial Sequence: Synthetic oligonucleotide
  Antisense strand to SEQ ID NO: 1991462
uuagcugcccagauaucag

SEQ ID NO: 1991464 - RNA, 19 nt, Artificial Sequence
  Description of Artificial Sequence: Synthetic oligonucleotide
  Sense strand starting at position 3812 of SEQ ID NO: 1880756
ucacuaaugucaguagaag

SEQ ID NO: 1991465 - RNA, 19 nt, Artificial Sequence
  Description of Artificial Sequence: Synthetic oligonucleotide
  Antisense strand to SEQ ID NO: 1991464
cuucuacugacauuaguga

SEQ ID NO: 1991466 - RNA, 19 nt, Artificial Sequence
  Description of Artificial Sequence: Synthetic oligonucleotide
  Sense strand starting at position 3851 of SEQ ID NO: 1880756
uguaguggaagauguagaa

SEQ ID NO: 1991467 - RNA, 19 nt, Artificial Sequence
  Description of Artificial Sequence: Synthetic oligonucleotide
  Antisense strand to SEQ ID NO: 1991466
uucuacaucuuccacuaca

SEQ ID NO: 1991468 - RNA, 19 nt, Artificial Sequence
  Description of Artificial Sequence: Synthetic oligonucleotide
  Sense strand starting at position 3888 of SEQ ID NO: 1880756
gggcaugauucaucuguga

SEQ ID NO: 1991469 - RNA, 19 nt, Artificial Sequence
  Description of Artificial Sequence: Synthetic oligonucleotide
  Antisense strand to SEQ ID NO: 1991468
ucacagaugaaucaugccc

SEQ ID NO: 1991470 - RNA, 19 nt, Artificial Sequence
  Description of Artificial Sequence: Synthetic oligonucleotide
  Sense strand starting at position 3892 of SEQ ID NO: 1880756
augauucaucugugagagg

SEQ ID NO: 1991471 - RNA, 19 nt, Artificial Sequence
  Description of Artificial Sequence: Synthetic oligonucleotide
  Antisense strand to SEQ ID NO: 1991470
ccucucacagaugaaucau

SEQ ID NO: 1991472 - RNA, 19 nt, Artificial Sequence
  Description of Artificial Sequence: Synthetic oligonucleotide
  Sense strand starting at position 3951 of SEQ ID NO: 1880756
ucuggacaggcuugaaaga

SEQ ID NO: 1991473 - RNA, 19 nt, Artificial Sequence
  Description of Artificial Sequence: Synthetic oligonucleotide
  Antisense strand to SEQ ID NO: 1991472
ucuuucaagccuguccaga

SEQ ID NO: 1991474 - RNA, 19 nt, Artificial Sequence
  Description of Artificial Sequence: Synthetic oligonucleotide
  Sense strand starting at position 1027 of SEQ ID NO: 1880757
gcgaguuugccugcaacgu

SEQ ID NO: 1991475 - RNA, 19 nt, Artificial Sequence
  Description of Artificial Sequence: Synthetic oligonucleotide
  Antisense strand to SEQ ID NO: 1991474
acguugcaggcaaacucgc

SEQ ID NO: 1991476 - RNA, 19 nt, Artificial Sequence
  Description of Artificial Sequence: Synthetic oligonucleotide
  Sense strand starting at position 1097 of SEQ ID NO: 1880757
aguggagcuaguuagaauc

SEQ ID NO: 1991477 - RNA, 19 nt, Artificial Sequence
  Description of Artificial Sequence: Synthetic oligonucleotide
  Antisense strand to SEQ ID NO: 1991476
gauucuaacuagcuccacu

SEQ ID NO: 1991478 - RNA, 19 nt, Artificial Sequence
  Description of Artificial Sequence: Synthetic oligonucleotide
  Sense strand starting at position 1099 of SEQ ID NO: 1880757
uggagcuaguuagaaucaa

SEQ ID NO: 1991479 - RNA, 19 nt, Artificial Sequence
  Description of Artificial Sequence: Synthetic oligonucleotide
  Antisense strand to SEQ ID NO: 1991478
uugauucuaacuagcucca

SEQ ID NO: 1991480 - RNA, 19 nt, Artificial Sequence
  Description of Artificial Sequence: Synthetic oligonucleotide
  Sense strand starting at position 1151 of SEQ ID NO: 1880757
cagaauuuguaccaggaga

SEQ ID NO: 1991481 - RNA, 19 nt, Artificial Sequence
  Description of Artificial Sequence: Synthetic oligonucleotide
  Antisense strand to SEQ ID NO: 1991480
ucuccugguacaaauucug

SEQ ID NO: 1991482 - RNA, 19 nt, Artificial Sequence
  Description of Artificial Sequence: Synthetic oligonucleotide
  Sense strand starting at position 1165 of SEQ ID NO: 1880757
ggagaaguuccacggagag

SEQ ID NO: 1991483 - RNA, 19 nt, Artificial Sequence
  Description of Artificial Sequence: Synthetic oligonucleotide
  Antisense strand to SEQ ID NO: 1991482
cucuccguggaacuucucc

SEQ ID NO: 1991484 - RNA, 19 nt, Artificial Sequence
  Description of Artificial Sequence: Synthetic oligonucleotide
  Sense strand starting at position 1222 of SEQ ID NO: 1880757
cgaaucuguacucgaggca

SEQ ID NO: 1991485 - RNA, 19 nt, Artificial Sequence
  Description of Artificial Sequence: Synthetic oligonucleotide
  Antisense strand to SEQ ID NO: 1991484
ugccucgaguacagauucg

SEQ ID NO: 1991486 - RNA, 19 nt, Artificial Sequence
  Description of Artificial Sequence: Synthetic oligonucleotide
  Sense strand starting at position 1237 of SEQ ID NO: 1880757
ggcagacuccauggaauuc

SEQ ID NO: 1991487 - RNA, 19 nt, Artificial Sequence
  Description of Artificial Sequence: Synthetic oligonucleotide
  Antisense strand to SEQ ID NO: 1991486
gaauuccauggagucugcc

SEQ ID NO: 1991488 - RNA, 19 nt, Artificial Sequence
  Description of Artificial Sequence: Synthetic oligonucleotide
  Sense strand starting at position 1247 of SEQ ID NO: 1880757
auggaauucgcccgggaac

SEQ ID NO: 1991489 - RNA, 19 nt, Artificial Sequence
  Description of Artificial Sequence: Synthetic oligonucleotide
  Antisense strand to SEQ ID NO: 1991488
guucccgggcgaauuccau

SEQ ID NO: 1991490 - RNA, 19 nt, Artificial Sequence
  Description of Artificial Sequence: Synthetic oligonucleotide
  Sense strand starting at position 1383 of SEQ ID NO: 1880757
ggacuuaccuuucuuagag

SEQ ID NO: 1991491 - RNA, 19 nt, Artificial Sequence
  Description of Artificial Sequence: Synthetic oligonucleotide
  Antisense strand to SEQ ID NO: 1991490
cucuaagaaagguaagucc

SEQ ID NO: 1991492 - RNA, 19 nt, Artificial Sequence
  Description of Artificial Sequence: Synthetic oligonucleotide
  Sense strand starting at position 2411 of SEQ ID NO: 1880757
ccugcucucggacagguau

SEQ ID NO: 1991493 - RNA, 19 nt, Artificial Sequence
  Description of Artificial Sequence: Synthetic oligonucleotide
  Antisense strand to SEQ ID NO: 1991492
auaccuguccgagagcagg

SEQ ID NO: 1991494 - RNA, 19 nt, Artificial Sequence
  Description of Artificial Sequence: Synthetic oligonucleotide
  Sense strand starting at position 2918 of SEQ ID NO: 1880757
gauaaaguuucugccuugu

SEQ ID NO: 1991495 - RNA, 19 nt, Artificial Sequence
  Description of Artificial Sequence: Synthetic oligonucleotide
  Antisense strand to SEQ ID NO: 1991494
acaaggcagaaacuuuauc

SEQ ID NO: 1991496 - RNA, 19 nt, Artificial Sequence
  Description of Artificial Sequence: Synthetic oligonucleotide
  Sense strand starting at position 2999 of SEQ ID NO: 1880757
guggaacacuccuuaugcu

SEQ ID NO: 1991497 - RNA, 19 nt, Artificial Sequence
  Description of Artificial Sequence: Synthetic oligonucleotide
  Antisense strand to SEQ ID NO: 1991496
agcauaaggaguguuccac

SEQ ID NO: 1991498 - RNA, 19 nt, Artificial Sequence
  Description of Artificial Sequence: Synthetic oligonucleotide
  Sense strand starting at position 3014 of SEQ ID NO: 1880757
ugcuccuuucugggagacu

SEQ ID NO: 1991499 - RNA, 19 nt, Artificial Sequence
  Description of Artificial Sequence: Synthetic oligonucleotide
  Antisense strand to SEQ ID NO: 1991498
agucucccagaaaggagca

SEQ ID NO: 1991500 - RNA, 19 nt, Artificial Sequence
  Description of Artificial Sequence: Synthetic oligonucleotide
  Sense strand starting at position 3049 of SEQ ID NO: 1880757
cggcgcuugcuuucacuga

SEQ ID NO: 1991501 - RNA, 19 nt, Artificial Sequence
  Description of Artificial Sequence: Synthetic oligonucleotide
  Antisense strand to SEQ ID NO: 1991500
ucagugaaagcaagcgccg

SEQ ID NO: 1991502 - RNA, 19 nt, Artificial Sequence
  Description of Artificial Sequence: Synthetic oligonucleotide
  Sense strand starting at position 3108 of SEQ ID NO: 1880757
ugagaucucagagguuuag

SEQ ID NO: 1991503 - RNA, 19 nt, Artificial Sequence
  Description of Artificial Sequence: Synthetic oligonucleotide
  Antisense strand to SEQ ID NO: 1991502
cuaaaccucugagaucuca

SEQ ID NO: 1991504 - RNA, 19 nt, Artificial Sequence
  Description of Artificial Sequence: Synthetic oligonucleotide
  Sense strand starting at position 3129 of SEQ ID NO: 1880757
ggacuuguaccucgaagca

SEQ ID NO: 1991505 - RNA, 19 nt, Artificial Sequence
  Description of Artificial Sequence: Synthetic oligonucleotide
  Antisense strand to SEQ ID NO: 1991504
ugcuucgagguacaagucc

SEQ ID NO: 1991506 - RNA, 19 nt, Artificial Sequence
  Description of Artificial Sequence: Synthetic oligonucleotide
  Sense strand starting at position 3148 of SEQ ID NO: 1880757
auuagagcuucugcuccau

SEQ ID NO: 1991507 - RNA, 19 nt, Artificial Sequence
  Description of Artificial Sequence: Synthetic oligonucleotide
  Antisense strand to SEQ ID NO: 1991506
auggagcagaagcucuaau

SEQ ID NO: 1991508 - RNA, 19 nt, Artificial Sequence
  Description of Artificial Sequence: Synthetic oligonucleotide
  Sense strand starting at position 3152 of SEQ ID NO: 1880757
gagcuucugcuccaucaga

SEQ ID NO: 1991509 - RNA, 19 nt, Artificial Sequence
  Description of Artificial Sequence: Synthetic oligonucleotide
  Antisense strand to SEQ ID NO: 1991508
ucugauggagcagaagcuc

SEQ ID NO: 1991510 - RNA, 19 nt, Artificial Sequence
  Description of Artificial Sequence: Synthetic oligonucleotide
  Sense strand starting at position 3183 of SEQ ID NO: 1880757
cgucucuugugagugaaau

SEQ ID NO: 1991511 - RNA, 19 nt, Artificial Sequence
  Description of Artificial Sequence: Synthetic oligonucleotide
  Antisense strand to SEQ ID NO: 1991510
auuucacucacaagagacg

SEQ ID NO: 1991512 - RNA, 19 nt, Artificial Sequence
  Description of Artificial Sequence: Synthetic oligonucleotide
  Sense strand starting at position 3184 of SEQ ID NO: 1880757
gucucuugugagugaaauc

SEQ ID NO: 1991513 - RNA, 19 nt, Artificial Sequence
  Description of Artificial Sequence: Synthetic oligonucleotide
  Antisense strand to SEQ ID NO: 1991512
gauuucacucacaagagac

SEQ ID NO: 1991514 - RNA, 19 nt, Artificial Sequence
  Description of Artificial Sequence: Synthetic oligonucleotide
  Sense strand starting at position 3204 of SEQ ID NO: 1880757
gagggcucacaauguuaau

SEQ ID NO: 1991515 - RNA, 19 nt, Artificial Sequence
  Description of Artificial Sequence: Synthetic oligonucleotide
  Antisense strand to SEQ ID NO: 1991514
auuaacauugugagcccuc

SEQ ID NO: 1991516 - RNA, 19 nt, Artificial Sequence
  Description of Artificial Sequence: Synthetic oligonucleotide
  Sense strand starting at position 3227 of SEQ ID NO: 1880757
ucacgucuuucccuugaua

SEQ ID NO: 1991517 - RNA, 19 nt, Artificial Sequence
  Description of Artificial Sequence: Synthetic oligonucleotide
  Antisense strand to SEQ ID NO: 1991516
uaucaagggaaagacguga

SEQ ID NO: 1991518 - RNA, 19 nt, Artificial Sequence
  Description of Artificial Sequence: Synthetic oligonucleotide
  Sense strand starting at position 3229 of SEQ ID NO: 1880757
acgucuuucccuugauaau

SEQ ID NO: 1991519 - RNA, 19 nt, Artificial Sequence
  Description of Artificial Sequence: Synthetic oligonucleotide
  Antisense strand to SEQ ID NO: 1991518
auuaucaagggaaagacgu

SEQ ID NO: 1991520 - RNA, 19 nt, Artificial Sequence
  Description of Artificial Sequence: Synthetic oligonucleotide
  Sense strand starting at position 3230 of SEQ ID NO: 1880757
cgucuuucccuugauaaua

SEQ ID NO: 1991521 - RNA, 19 nt, Artificial Sequence
  Description of Artificial Sequence: Synthetic oligonucleotide
  Antisense strand to SEQ ID NO: 1991520
uauuaucaagggaaagacg

SEQ ID NO: 1991522 - RNA, 19 nt, Artificial Sequence
  Description of Artificial Sequence: Synthetic oligonucleotide
  Sense strand starting at position 3253 of SEQ ID NO: 1880757
uuuguuuacugaguguaga

SEQ ID NO: 1991523 - RNA, 19 nt, Artificial Sequence
  Description of Artificial Sequence: Synthetic oligonucleotide
  Antisense strand to SEQ ID NO: 1991522
ucuacacucaguaaacaaa

SEQ ID NO: 1991524 - RNA, 19 nt, Artificial Sequence
  Description of Artificial Sequence: Synthetic oligonucleotide
  Sense strand starting at position 3254 of SEQ ID NO: 1880757
uuguuuacugaguguagag

SEQ ID NO: 1991525 - RNA, 19 nt, Artificial Sequence
  Description of Artificial Sequence: Synthetic oligonucleotide
  Antisense strand to SEQ ID NO: 1991524
cucuacacucaguaaacaa

SEQ ID NO: 1991526 - RNA, 19 nt, Artificial Sequence
  Description of Artificial Sequence: Synthetic oligonucleotide
  Sense strand starting at position 3288 of SEQ ID NO: 1880757
gugcaauugccacaggaaa

SEQ ID NO: 1991527 - RNA, 19 nt, Artificial Sequence
  Description of Artificial Sequence: Synthetic oligonucleotide
  Antisense strand to SEQ ID NO: 1991526
uuuccuguggcaauugcac

SEQ ID NO: 1991528 - RNA, 19 nt, Artificial Sequence
  Description of Artificial Sequence: Synthetic oligonucleotide
  Sense strand starting at position 3452 of SEQ ID NO: 1880757
gaaagagggugguuuccua

SEQ ID NO: 1991529 - RNA, 19 nt, Artificial Sequence
  Description of Artificial Sequence: Synthetic oligonucleotide
  Antisense strand to SEQ ID NO: 1991528
uaggaaaccacccucuuuc

SEQ ID NO: 1991530 - RNA, 19 nt, Artificial Sequence
  Description of Artificial Sequence: Synthetic oligonucleotide
  Sense strand starting at position 3589 of SEQ ID NO: 1880757
cugauugacuugucauaaa

SEQ ID NO: 1991531 - RNA, 19 nt, Artificial Sequence
  Description of Artificial Sequence: Synthetic oligonucleotide
  Antisense strand to SEQ ID NO: 1991530
uuuaugacaagucaaucag

SEQ ID NO: 1991532 - RNA, 19 nt, Artificial Sequence
  Description of Artificial Sequence: Synthetic oligonucleotide
  Sense strand starting at position 3618 of SEQ ID NO: 1880757
agcuguuguugccuaaauu

SEQ ID NO: 1991533 - RNA, 19 nt, Artificial Sequence
  Description of Artificial Sequence: Synthetic oligonucleotide
  Antisense strand to SEQ ID NO: 1991532
aauuuaggcaacaacagcu

SEQ ID NO: 1991534 - RNA, 19 nt, Artificial Sequence
  Description of Artificial Sequence: Synthetic oligonucleotide
  Sense strand starting at position 3619 of SEQ ID NO: 1880757
gcuguuguugccuaaauuu

SEQ ID NO: 1991535 - RNA, 19 nt, Artificial Sequence
  Description of Artificial Sequence: Synthetic oligonucleotide
  Antisense strand to SEQ ID NO: 1991534
aaauuuaggcaacaacagc

SEQ ID NO: 1991536 - RNA, 19 nt, Artificial Sequence
  Description of Artificial Sequence: Synthetic oligonucleotide
  Sense strand starting at position 3656 of SEQ ID NO: 1880757
uagaauaggcgccaucaca

SEQ ID NO: 1991537 - RNA, 19 nt, Artificial Sequence
  Description of Artificial Sequence: Synthetic oligonucleotide
  Antisense strand to SEQ ID NO: 1991536
ugugauggcgccuauucua

SEQ ID NO: 1991538 - RNA, 19 nt, Artificial Sequence
  Description of Artificial Sequence: Synthetic oligonucleotide
  Sense strand starting at position 3811 of SEQ ID NO: 1880757
gguggaugccuaggaauca

SEQ ID NO: 1991539 - RNA, 19 nt, Artificial Sequence
  Description of Artificial Sequence: Synthetic oligonucleotide
  Antisense strand to SEQ ID NO: 1991538
ugauuccuaggcauccacc

SEQ ID NO: 1991540 - RNA, 19 nt, Artificial Sequence
  Description of Artificial Sequence: Synthetic oligonucleotide
  Sense strand starting at position 3837 of SEQ ID NO: 1880757
guuaaagaggucugugguu

SEQ ID NO: 1991541 - RNA, 19 nt, Artificial Sequence
  Description of Artificial Sequence: Synthetic oligonucleotide
  Antisense strand to SEQ ID NO: 1991540
aaccacagaccucuuuaac

SEQ ID NO: 1991542 - RNA, 19 nt, Artificial Sequence
  Description of Artificial Sequence: Synthetic oligonucleotide
  Sense strand starting at position 3864 of SEQ ID NO: 1880757
gcuggaguucuugaguuug

SEQ ID NO: 1991543 - RNA, 19 nt, Artificial Sequence
  Description of Artificial Sequence: Synthetic oligonucleotide
  Antisense strand to SEQ ID NO: 1991542
caaacucaagaacuccagc

SEQ ID NO: 1991544 - RNA, 19 nt, Artificial Sequence
  Description of Artificial Sequence: Synthetic oligonucleotide
  Sense strand starting at position 3866 of SEQ ID NO: 1880757
uggaguucuugaguuugau

SEQ ID NO: 1991545 - RNA, 19 nt, Artificial Sequence
  Description of Artificial Sequence: Synthetic oligonucleotide
  Antisense strand to SEQ ID NO: 1991544
aucaaacucaagaacucca

SEQ ID NO: 1991546 - RNA, 19 nt, Artificial Sequence
  Description of Artificial Sequence: Synthetic oligonucleotide
  Sense strand starting at position 3872 of SEQ ID NO: 1880757
ucuugaguuugauuggaaa

SEQ ID NO: 1991547 - RNA, 19 nt, Artificial Sequence
  Description of Artificial Sequence: Synthetic oligonucleotide
  Antisense strand to SEQ ID NO: 1991546
uuuccaaucaaacucaaga

SEQ ID NO: 1991548 - RNA, 19 nt, Artificial Sequence
  Description of Artificial Sequence: Synthetic oligonucleotide
  Sense strand starting at position 3874 of SEQ ID NO: 1880757
uugaguuugauuggaaaug

SEQ ID NO: 1991549 - RNA, 19 nt, Artificial Sequence
  Description of Artificial Sequence: Synthetic oligonucleotide
  Antisense strand to SEQ ID NO: 1991548
cauuuccaaucaaacucaa

SEQ ID NO: 1991550 - RNA, 19 nt, Artificial Sequence
  Description of Artificial Sequence: Synthetic oligonucleotide
  Sense strand starting at position 3890 of SEQ ID NO: 1880757
auggaauaccugugcugaa

SEQ ID NO: 1991551 - RNA, 19 nt, Artificial Sequence
  Description of Artificial Sequence: Synthetic oligonucleotide
  Antisense strand to SEQ ID NO: 1991550
uucagcacagguauuccau

SEQ ID NO: 1991552 - RNA, 19 nt, Artificial Sequence
  Description of Artificial Sequence: Synthetic oligonucleotide
  Sense strand starting at position 3891 of SEQ ID NO: 1880757
uggaauaccugugcugaaa

SEQ ID NO: 1991553 - RNA, 19 nt, Artificial Sequence
  Description of Artificial Sequence: Synthetic oligonucleotide
  Antisense strand to SEQ ID NO: 1991552
uuucagcacagguauucca

SEQ ID NO: 1991554 - RNA, 19 nt, Artificial Sequence
  Description of Artificial Sequence: Synthetic oligonucleotide
  Sense strand starting at position 83 of SEQ ID NO: 1880758
auucgaagugcuuaauaaa

SEQ ID NO: 1991555 - RNA, 19 nt, Artificial Sequence
  Description of Artificial Sequence: Synthetic oligonucleotide
  Antisense strand to SEQ ID NO: 1991554
uuuauuaagcacuucgaau

SEQ ID NO: 1991556 - RNA, 19 nt, Artificial Sequence
  Description of Artificial Sequence: Synthetic oligonucleotide
  Sense strand starting at position 90 of SEQ ID NO: 1880758
gugcuuaauaaaugggaac

SEQ ID NO: 1991557 - RNA, 19 nt, Artificial Sequence
  Description of Artificial Sequence: Synthetic oligonucleotide
  Antisense strand to SEQ ID NO: 1991556
guucccauuuauuaagcac

SEQ ID NO: 1991558 - RNA, 19 nt, Artificial Sequence
  Description of Artificial Sequence: Synthetic oligonucleotide
  Sense strand starting at position 217 of SEQ ID NO: 1880758
aaauuauaugguuggucuu

SEQ ID NO: 1991559 - RNA, 19 nt, Artificial Sequence
  Description of Artificial Sequence: Synthetic oligonucleotide
  Antisense strand to SEQ ID NO: 1991558
aagaccaaccauauaauuu

SEQ ID NO: 1991560 - RNA, 19 nt, Artificial Sequence
  Description of Artificial Sequence: Synthetic oligonucleotide
  Sense strand starting at position 466 of SEQ ID NO: 1880758
agguccuauuaguuuacau

SEQ ID NO: 1991561 - RNA, 19 nt, Artificial Sequence
  Description of Artificial Sequence: Synthetic oligonucleotide
  Antisense strand to SEQ ID NO: 1991560
auguaaacuaauaggaccu

SEQ ID NO: 1991562 - RNA, 19 nt, Artificial Sequence
  Description of Artificial Sequence: Synthetic oligonucleotide
  Sense strand starting at position 468 of SEQ ID NO: 1880758
guccuauuaguuuacauag

SEQ ID NO: 1991563 - RNA, 19 nt, Artificial Sequence
  Description of Artificial Sequence: Synthetic oligonucleotide
  Antisense strand to SEQ ID NO: 1991562
cuauguaaacuaauaggac

SEQ ID NO: 1991564 - RNA, 19 nt, Artificial Sequence
  Description of Artificial Sequence: Synthetic oligonucleotide
  Sense strand starting at position 540 of SEQ ID NO: 1880758
gauacuaugcuaggugagu

SEQ ID NO: 1991565 - RNA, 19 nt, Artificial Sequence
  Description of Artificial Sequence: Synthetic oligonucleotide
  Antisense strand to SEQ ID NO: 1991564
acucaccuagcauaguauc

SEQ ID NO: 1991566 - RNA, 19 nt, Artificial Sequence
  Description of Artificial Sequence: Synthetic oligonucleotide
  Sense strand starting at position 541 of SEQ ID NO: 1880758
auacuaugcuaggugaguu

SEQ ID NO: 1991567 - RNA, 19 nt, Artificial Sequence
  Description of Artificial Sequence: Synthetic oligonucleotide
  Antisense strand to SEQ ID NO: 1991566
aacucaccuagcauaguau

SEQ ID NO: 1991568 - RNA, 19 nt, Artificial Sequence
  Description of Artificial Sequence: Synthetic oligonucleotide
  Sense strand starting at position 549 of SEQ ID NO: 1880758
cuaggugaguuaccaaaga

SEQ ID NO: 1991569 - RNA, 19 nt, Artificial Sequence
  Description of Artificial Sequence: Synthetic oligonucleotide
  Antisense strand to SEQ ID NO: 1991568
ucuuugguaacucaccuag

SEQ ID NO: 1991570 - RNA, 19 nt, Artificial Sequence
  Description of Artificial Sequence: Synthetic oligonucleotide
  Sense strand starting at position 616 of SEQ ID NO: 1880758
guuucugagauggguagau

SEQ ID NO: 1991571 - RNA, 19 nt, Artificial Sequence
  Description of Artificial Sequence: Synthetic oligonucleotide
  Antisense strand to SEQ ID NO: 1991570
aucuacccaucucagaaac

SEQ ID NO: 1991572 - RNA, 19 nt, Artificial Sequence
  Description of Artificial Sequence: Synthetic oligonucleotide
  Sense strand starting at position 646 of SEQ ID NO: 1880758
cccaguaauucgcucaaag

SEQ ID NO: 1991573 - RNA, 19 nt, Artificial Sequence
  Description of Artificial Sequence: Synthetic oligonucleotide
  Antisense strand to SEQ ID NO: 1991572
cuuugagcgaauuacuggg

SEQ ID NO: 1991574 - RNA, 19 nt, Artificial Sequence
  Description of Artificial Sequence: Synthetic oligonucleotide
  Sense strand starting at position 648 of SEQ ID NO: 1880758
caguaauucgcucaaaguc

SEQ ID NO: 1991575 - RNA, 19 nt, Artificial Sequence
  Description of Artificial Sequence: Synthetic oligonucleotide
  Antisense strand to SEQ ID NO: 1991574
gacuuugagcgaauuacug

SEQ ID NO: 1991576 - RNA, 19 nt, Artificial Sequence
  Description of Artificial Sequence: Synthetic oligonucleotide
  Sense strand starting at position 657 of SEQ ID NO: 1880758
gcucaaagucgugcagcua

SEQ ID NO: 1991577 - RNA, 19 nt, Artificial Sequence
  Description of Artificial Sequence: Synthetic oligonucleotide
  Antisense strand to SEQ ID NO: 1991576
uagcugcacgacuuugagc

SEQ ID NO: 1991578 - RNA, 19 nt, Artificial Sequence
  Description of Artificial Sequence: Synthetic oligonucleotide
  Sense strand starting at position 717 of SEQ ID NO: 1880758
cugcaucuacauuagagua

SEQ ID NO: 1991579 - RNA, 19 nt, Artificial Sequence
  Description of Artificial Sequence: Synthetic oligonucleotide
  Antisense strand to SEQ ID NO: 1991578
uacucuaauguagaugcag

SEQ ID NO: 1991580 - RNA, 19 nt, Artificial Sequence
  Description of Artificial Sequence: Synthetic oligonucleotide
  Sense strand starting at position 722 of SEQ ID NO: 1880758
ucuacauuagaguaaaugu

SEQ ID NO: 1991581 - RNA, 19 nt, Artificial Sequence
  Description of Artificial Sequence: Synthetic oligonucleotide
  Antisense strand to SEQ ID NO: 1991580
acauuuacucuaauguaga

SEQ ID NO: 1991582 - RNA, 19 nt, Artificial Sequence
  Description of Artificial Sequence: Synthetic oligonucleotide
  Sense strand starting at position 766 of SEQ ID NO: 1880758
cuaugaaucuggccaacag

SEQ ID NO: 1991583 - RNA, 19 nt, Artificial Sequence
  Description of Artificial Sequence: Synthetic oligonucleotide
  Antisense strand to SEQ ID NO: 1991582
cuguuggccagauucauag

SEQ ID NO: 1991584 - RNA, 19 nt, Artificial Sequence
  Description of Artificial Sequence: Synthetic oligonucleotide
  Sense strand starting at position 841 of SEQ ID NO: 1880758
guuuaauauuccuuggcaa

SEQ ID NO: 1991585 - RNA, 19 nt, Artificial Sequence
  Description of Artificial Sequence: Synthetic oligonucleotide
  Antisense strand to SEQ ID NO: 1991584
uugccaaggaauauuaaac

SEQ ID NO: 1991586 - RNA, 19 nt, Artificial Sequence
  Description of Artificial Sequence: Synthetic oligonucleotide
  Sense strand starting at position 916 of SEQ ID NO: 1880758
uaucgaguccuacauaguc

SEQ ID NO: 1991587 - RNA, 19 nt, Artificial Sequence
  Description of Artificial Sequence: Synthetic oligonucleotide
  Antisense strand to SEQ ID NO: 1991586
gacuauguaggacucgaua

SEQ ID NO: 1991588 - RNA, 19 nt, Artificial Sequence
  Description of Artificial Sequence: Synthetic oligonucleotide
  Sense strand starting at position 994 of SEQ ID NO: 1880758
gaacgaaguuucucaucuc

SEQ ID NO: 1991589 - RNA, 19 nt, Artificial Sequence
  Description of Artificial Sequence: Synthetic oligonucleotide
  Antisense strand to SEQ ID NO: 1991588
gagaugagaaacuucguuc

SEQ ID NO: 1991590 - RNA, 19 nt, Artificial Sequence
  Description of Artificial Sequence: Synthetic oligonucleotide
  Sense strand starting at position 997 of SEQ ID NO: 1880758
cgaaguuucucaucucuua

SEQ ID NO: 1991591 - RNA, 19 nt, Artificial Sequence
  Description of Artificial Sequence: Synthetic oligonucleotide
  Antisense strand to SEQ ID NO: 1991590
uaagagaugagaaacuucg

SEQ ID NO: 1991592 - RNA, 19 nt, Artificial Sequence
  Description of Artificial Sequence: Synthetic oligonucleotide
  Sense strand starting at position 1164 of SEQ ID NO: 1880758
agaucucucuaugucuaca

SEQ ID NO: 1991593 - RNA, 19 nt, Artificial Sequence
  Description of Artificial Sequence: Synthetic oligonucleotide
  Antisense strand to SEQ ID NO: 1991592
uguagacauagagagaucu

SEQ ID NO: 1991594 - RNA, 19 nt, Artificial Sequence
  Description of Artificial Sequence: Synthetic oligonucleotide
  Sense strand starting at position 2387 of SEQ ID NO: 1880758
agaagcgaucgcgagagaa

SEQ ID NO: 1991595 - RNA, 19 nt, Artificial Sequence
  Description of Artificial Sequence: Synthetic oligonucleotide
  Antisense strand to SEQ ID NO: 1991594
uucucucgcgaucgcuucu

SEQ ID NO: 1991596 - RNA, 19 nt, Artificial Sequence
  Description of Artificial Sequence: Synthetic oligonucleotide
  Sense strand starting at position 2474 of SEQ ID NO: 1880758
ggcagcuucgugucaguga

SEQ ID NO: 1991597 - RNA, 19 nt, Artificial Sequence
  Description of Artificial Sequence: Synthetic oligonucleotide
  Antisense strand to SEQ ID NO: 1991596
ucacugacacgaagcugcc

SEQ ID NO: 1991598 - RNA, 19 nt, Artificial Sequence
  Description of Artificial Sequence: Synthetic oligonucleotide
  Sense strand starting at position 2482 of SEQ ID NO: 1880758
cgugucagugaguuugcau

SEQ ID NO: 1991599 - RNA, 19 nt, Artificial Sequence
  Description of Artificial Sequence: Synthetic oligonucleotide
  Antisense strand to SEQ ID NO: 1991598
augcaaacucacugacacg

SEQ ID NO: 1991600 - RNA, 19 nt, Artificial Sequence
  Description of Artificial Sequence: Synthetic oligonucleotide
  Sense strand starting at position 2516 of SEQ ID NO: 1880758
acgagcuggagugauuaga

SEQ ID NO: 1991601 - RNA, 19 nt, Artificial Sequence
  Description of Artificial Sequence: Synthetic oligonucleotide
  Antisense strand to SEQ ID NO: 1991600
ucuaaucacuccagcucgu

SEQ ID NO: 1991602 - RNA, 19 nt, Artificial Sequence
  Description of Artificial Sequence: Synthetic oligonucleotide
  Sense strand starting at position 2538 of SEQ ID NO: 1880758
cuggaagggaauuguuacu

SEQ ID NO: 1991603 - RNA, 19 nt, Artificial Sequence
  Description of Artificial Sequence: Synthetic oligonucleotide
  Antisense strand to SEQ ID NO: 1991602
aguaacaauucccuuccag

SEQ ID NO: 1991604 - RNA, 19 nt, Artificial Sequence
  Description of Artificial Sequence: Synthetic oligonucleotide
  Sense strand starting at position 2551 of SEQ ID NO: 1880758
guuacucccguggagaagu

SEQ ID NO: 1991605 - RNA, 19 nt, Artificial Sequence
  Description of Artificial Sequence: Synthetic oligonucleotide
  Antisense strand to SEQ ID NO: 1991604
acuucuccacgggaguaac

SEQ ID NO: 1991606 - RNA, 19 nt, Artificial Sequence
  Description of Artificial Sequence: Synthetic oligonucleotide
  Sense strand starting at position 2846 of SEQ ID NO: 1880758
cuaguuauaguauauucca

SEQ ID NO: 1991607 - RNA, 19 nt, Artificial Sequence
  Description of Artificial Sequence: Synthetic oligonucleotide
  Antisense strand to SEQ ID NO: 1991606
uggaauauacuauaacuag

SEQ ID NO: 1991608 - RNA, 19 nt, Artificial Sequence
  Description of Artificial Sequence: Synthetic oligonucleotide
  Sense strand starting at position 2849 of SEQ ID NO: 1880758
guuauaguauauuccagga

SEQ ID NO: 1991609 - RNA, 19 nt, Artificial Sequence
  Description of Artificial Sequence: Synthetic oligonucleotide
  Antisense strand to SEQ ID NO: 1991608
uccuggaauauacuauaac

SEQ ID NO: 1991610 - RNA, 19 nt, Artificial Sequence
  Description of Artificial Sequence: Synthetic oligonucleotide
  Sense strand starting at position 3087 of SEQ ID NO: 1880758
cagucaucugcgcuuaccu

SEQ ID NO: 1991611 - RNA, 19 nt, Artificial Sequence
  Description of Artificial Sequence: Synthetic oligonucleotide
  Antisense strand to SEQ ID NO: 1991610
agguaagcgcagaugacug

SEQ ID NO: 1991612 - RNA, 19 nt, Artificial Sequence
  Description of Artificial Sequence: Synthetic oligonucleotide
  Sense strand starting at position 3218 of SEQ ID NO: 1880758
cuaucagagaccugccgaa

SEQ ID NO: 1991613 - RNA, 19 nt, Artificial Sequence
  Description of Artificial Sequence: Synthetic oligonucleotide
  Antisense strand to SEQ ID NO: 1991612
uucggcaggucucugauag

SEQ ID NO: 1991614 - RNA, 19 nt, Artificial Sequence
  Description of Artificial Sequence: Synthetic oligonucleotide
  Sense strand starting at position 3411 of SEQ ID NO: 1880758
ggagcaaagcggaguguuu

SEQ ID NO: 1991615 - RNA, 19 nt, Artificial Sequence
  Description of Artificial Sequence: Synthetic oligonucleotide
  Antisense strand to SEQ ID NO: 1991614
aaacacuccgcuuugcucc

SEQ ID NO: 1991616 - RNA, 19 nt, Artificial Sequence
  Description of Artificial Sequence: Synthetic oligonucleotide
  Sense strand starting at position 3535 of SEQ ID NO: 1880758
ggaagauguagcugaggcu

SEQ ID NO: 1991617 - RNA, 19 nt, Artificial Sequence
  Description of Artificial Sequence: Synthetic oligonucleotide
  Antisense strand to SEQ ID NO: 1991616
agccucagcuacaucuucc

SEQ ID NO: 1991618 - RNA, 19 nt, Artificial Sequence
  Description of Artificial Sequence: Synthetic oligonucleotide
  Sense strand starting at position 3552 of SEQ ID NO: 1880758
cugacaaugaauuguaggu

SEQ ID NO: 1991619 - RNA, 19 nt, Artificial Sequence
  Description of Artificial Sequence: Synthetic oligonucleotide
  Antisense strand to SEQ ID NO: 1991618
accuacaauucauugucag

SEQ ID NO: 1991620 - RNA, 19 nt, Artificial Sequence
  Description of Artificial Sequence: Synthetic oligonucleotide
  Sense strand starting at position 3578 of SEQ ID NO: 1880758
gugugaucccuccagaaag

SEQ ID NO: 1991621 - RNA, 19 nt, Artificial Sequence
  Description of Artificial Sequence: Synthetic oligonucleotide
  Antisense strand to SEQ ID NO: 1991620
cuuucuggagggaucacac

SEQ ID NO: 1991622 - RNA, 19 nt, Artificial Sequence
  Description of Artificial Sequence: Synthetic oligonucleotide
  Sense strand starting at position 3637 of SEQ ID NO: 1880758
uaggguccuucucuaguua

SEQ ID NO: 1991623 - RNA, 19 nt, Artificial Sequence
  Description of Artificial Sequence: Synthetic oligonucleotide
  Antisense strand to SEQ ID NO: 1991622
uaacuagagaaggacccua

SEQ ID NO: 1991624 - RNA, 19 nt, Artificial Sequence
  Description of Artificial Sequence: Synthetic oligonucleotide
  Sense strand starting at position 3698 of SEQ ID NO: 1880758
cuuugacuuugucuuagag

SEQ ID NO: 1991625 - RNA, 19 nt, Artificial Sequence
  Description of Artificial Sequence: Synthetic oligonucleotide
  Antisense strand to SEQ ID NO: 1991624
cucuaagacaaagucaaag

SEQ ID NO: 1991626 - RNA, 19 nt, Artificial Sequence
  Description of Artificial Sequence: Synthetic oligonucleotide
  Sense strand starting at position 3705 of SEQ ID NO: 1880758
uuugucuuagaggacuagu

SEQ ID NO: 1991627 - RNA, 19 nt, Artificial Sequence
  Description of Artificial Sequence: Synthetic oligonucleotide
  Antisense strand to SEQ ID NO: 1991626
acuaguccucuaagacaaa

SEQ ID NO: 1991628 - RNA, 19 nt, Artificial Sequence
  Description of Artificial Sequence: Synthetic oligonucleotide
  Sense strand starting at position 3814 of SEQ ID NO: 1880758
ggcuuugugaaguggaaua

SEQ ID NO: 1991629 - RNA, 19 nt, Artificial Sequence
  Description of Artificial Sequence: Synthetic oligonucleotide
  Antisense strand to SEQ ID NO: 1991628
uauuccacuucacaaagcc

SEQ ID NO: 1991630 - RNA, 19 nt, Artificial Sequence
  Description of Artificial Sequence: Synthetic oligonucleotide
  Sense strand starting at position 3832 of SEQ ID NO: 1880758
aaagaaagugcuggucagu

SEQ ID NO: 1991631 - RNA, 19 nt, Artificial Sequence
  Description of Artificial Sequence: Synthetic oligonucleotide
  Antisense strand to SEQ ID NO: 1991630
acugaccagcacuuucuuu

SEQ ID NO: 1991632 - RNA, 19 nt, Artificial Sequence
  Description of Artificial Sequence: Synthetic oligonucleotide
  Sense strand starting at position 3837 of SEQ ID NO: 1880758
aagugcuggucaguggaaa

SEQ ID NO: 1991633 - RNA, 19 nt, Artificial Sequence
  Description of Artificial Sequence: Synthetic oligonucleotide
  Antisense strand to SEQ ID NO: 1991632
uuuccacugaccagcacuu

SEQ ID NO: 1991634 - RNA, 19 nt, Artificial Sequence
  Description of Artificial Sequence: Synthetic oligonucleotide
  Sense strand starting at position 167 of SEQ ID NO: 1880759
ugcagcauagcucagaaau

SEQ ID NO: 1991635 - RNA, 19 nt, Artificial Sequence
  Description of Artificial Sequence: Synthetic oligonucleotide
  Antisense strand to SEQ ID NO: 1991634
auuucugagcuaugcugca

SEQ ID NO: 1991636 - RNA, 19 nt, Artificial Sequence
  Description of Artificial Sequence: Synthetic oligonucleotide
  Sense strand starting at position 291 of SEQ ID NO: 1880759
gucucuaccggauaagcau

SEQ ID NO: 1991637 - RNA, 19 nt, Artificial Sequence
  Description of Artificial Sequence: Synthetic oligonucleotide
  Antisense strand to SEQ ID NO: 1991636
augcuuauccgguagagac

SEQ ID NO: 1991638 - RNA, 19 nt, Artificial Sequence
  Description of Artificial Sequence: Synthetic oligonucleotide
  Sense strand starting at position 299 of SEQ ID NO: 1880759
cggauaagcauagggaaua

SEQ ID NO: 1991639 - RNA, 19 nt, Artificial Sequence
  Description of Artificial Sequence: Synthetic oligonucleotide
  Antisense strand to SEQ ID NO: 1991638
uauucccuaugcuuauccg

SEQ ID NO: 1991640 - RNA, 19 nt, Artificial Sequence
  Description of Artificial Sequence: Synthetic oligonucleotide
  Sense strand starting at position 358 of SEQ ID NO: 1880759
auaagauagacguaagcca

SEQ ID NO: 1991641 - RNA, 19 nt, Artificial Sequence
  Description of Artificial Sequence: Synthetic oligonucleotide
  Antisense strand to SEQ ID NO: 1991640
uggcuuacgucuaucuuau

SEQ ID NO: 1991642 - RNA, 19 nt, Artificial Sequence
  Description of Artificial Sequence: Synthetic oligonucleotide
  Sense strand starting at position 569 of SEQ ID NO: 1880759
uuugcuucugaugaaauca

SEQ ID NO: 1991643 - RNA, 19 nt, Artificial Sequence
  Description of Artificial Sequence: Synthetic oligonucleotide
  Antisense strand to SEQ ID NO: 1991642
ugauuucaucagaagcaaa

SEQ ID NO: 1991644 - RNA, 19 nt, Artificial Sequence
  Description of Artificial Sequence: Synthetic oligonucleotide
  Sense strand starting at position 696 of SEQ ID NO: 1880759
auaccagaguaucugauua

SEQ ID NO: 1991645 - RNA, 19 nt, Artificial Sequence
  Description of Artificial Sequence: Synthetic oligonucleotide
  Antisense strand to SEQ ID NO: 1991644
uaaucagauacucugguau

SEQ ID NO: 1991646 - RNA, 19 nt, Artificial Sequence
  Description of Artificial Sequence: Synthetic oligonucleotide
  Sense strand starting at position 1076 of SEQ ID NO: 1880759
uaugguagacucugcauaa

SEQ ID NO: 1991647 - RNA, 19 nt, Artificial Sequence
  Description of Artificial Sequence: Synthetic oligonucleotide
  Antisense strand to SEQ ID NO: 1991646
uuaugcagagucuaccaua

SEQ ID NO: 1991648 - RNA, 19 nt, Artificial Sequence
  Description of Artificial Sequence: Synthetic oligonucleotide
  Sense strand starting at position 1077 of SEQ ID NO: 1880759
augguagacucugcauaaa

SEQ ID NO: 1991649 - RNA, 19 nt, Artificial Sequence
  Description of Artificial Sequence: Synthetic oligonucleotide
  Antisense strand to SEQ ID NO: 1991648
uuuaugcagagucuaccau

SEQ ID NO: 1991650 - RNA, 19 nt, Artificial Sequence
  Description of Artificial Sequence: Synthetic oligonucleotide
  Sense strand starting at position 1080 of SEQ ID NO: 1880759
guagacucugcauaaauau

SEQ ID NO: 1991651 - RNA, 19 nt, Artificial Sequence
  Description of Artificial Sequence: Synthetic oligonucleotide
  Antisense strand to SEQ ID NO: 1991650
auauuuaugcagagucuac

SEQ ID NO: 1991652 - RNA, 19 nt, Artificial Sequence
  Description of Artificial Sequence: Synthetic oligonucleotide
  Sense strand starting at position 1548 of SEQ ID NO: 1880759
acaggcuugcuuuaggaau

SEQ ID NO: 1991653 - RNA, 19 nt, Artificial Sequence
  Description of Artificial Sequence: Synthetic oligonucleotide
  Antisense strand to SEQ ID NO: 1991652
auuccuaaagcaagccugu

SEQ ID NO: 1991654 - RNA, 19 nt, Artificial Sequence
  Description of Artificial Sequence: Synthetic oligonucleotide
  Sense strand starting at position 1614 of SEQ ID NO: 1880759
aagaguuguaagugacaag

SEQ ID NO: 1991655 - RNA, 19 nt, Artificial Sequence
  Description of Artificial Sequence: Synthetic oligonucleotide
  Antisense strand to SEQ ID NO: 1991654
cuugucacuuacaacucuu

SEQ ID NO: 1991656 - RNA, 19 nt, Artificial Sequence
  Description of Artificial Sequence: Synthetic oligonucleotide
  Sense strand starting at position 1615 of SEQ ID NO: 1880759
agaguuguaagugacaagu

SEQ ID NO: 1991657 - RNA, 19 nt, Artificial Sequence
  Description of Artificial Sequence: Synthetic oligonucleotide
  Antisense strand to SEQ ID NO: 1991656
acuugucacuuacaacucu

SEQ ID NO: 1991658 - RNA, 19 nt, Artificial Sequence
  Description of Artificial Sequence: Synthetic oligonucleotide
  Sense strand starting at position 1676 of SEQ ID NO: 1880759
uagugucuucucuagaagu

SEQ ID NO: 1991659 - RNA, 19 nt, Artificial Sequence
  Description of Artificial Sequence: Synthetic oligonucleotide
  Antisense strand to SEQ ID NO: 1991658
acuucuagagaagacacua

SEQ ID NO: 1991660 - RNA, 19 nt, Artificial Sequence
  Description of Artificial Sequence: Synthetic oligonucleotide
  Sense strand starting at position 1715 of SEQ ID NO: 1880759
cuaugcacugguuauaaau

SEQ ID NO: 1991661 - RNA, 19 nt, Artificial Sequence
  Description of Artificial Sequence: Synthetic oligonucleotide
  Antisense strand to SEQ ID NO: 1991660
auuuauaaccagugcauag

SEQ ID NO: 1991662 - RNA, 19 nt, Artificial Sequence
  Description of Artificial Sequence: Synthetic oligonucleotide
  Sense strand starting at position 1745 of SEQ ID NO: 1880759
aaauacgugguuuagcaaa

SEQ ID NO: 1991663 - RNA, 19 nt, Artificial Sequence
  Description of Artificial Sequence: Synthetic oligonucleotide
  Antisense strand to SEQ ID NO: 1991662
uuugcuaaaccacguauuu

SEQ ID NO: 1991664 - RNA, 19 nt, Artificial Sequence
  Description of Artificial Sequence: Synthetic oligonucleotide
  Sense strand starting at position 1752 of SEQ ID NO: 1880759
ugguuuagcaaagaguucu

SEQ ID NO: 1991665 - RNA, 19 nt, Artificial Sequence
  Description of Artificial Sequence: Synthetic oligonucleotide
  Antisense strand to SEQ ID NO: 1991664
agaacucuuugcuaaacca

SEQ ID NO: 1991666 - RNA, 19 nt, Artificial Sequence
  Description of Artificial Sequence: Synthetic oligonucleotide
  Sense strand starting at position 1796 of SEQ ID NO: 1880759
uggucagcgggagaagaau

SEQ ID NO: 1991667 - RNA, 19 nt, Artificial Sequence
  Description of Artificial Sequence: Synthetic oligonucleotide
  Antisense strand to SEQ ID NO: 1991666
auucuucucccgcugacca

SEQ ID NO: 1991668 - RNA, 19 nt, Artificial Sequence
  Description of Artificial Sequence: Synthetic oligonucleotide
  Sense strand starting at position 1822 of SEQ ID NO: 1880759
uguaauguccaagaucaug

SEQ ID NO: 1991669 - RNA, 19 nt, Artificial Sequence
  Description of Artificial Sequence: Synthetic oligonucleotide
  Antisense strand to SEQ ID NO: 1991668
caugaucuuggacauuaca

SEQ ID NO: 1991670 - RNA, 19 nt, Artificial Sequence
  Description of Artificial Sequence: Synthetic oligonucleotide
  Sense strand starting at position 1893 of SEQ ID NO: 1880759
augucagcucauuagaaau

SEQ ID NO: 1991671 - RNA, 19 nt, Artificial Sequence
  Description of Artificial Sequence: Synthetic oligonucleotide
  Antisense strand to SEQ ID NO: 1991670
auuucuaaugagcugacau

SEQ ID NO: 1991672 - RNA, 19 nt, Artificial Sequence
  Description of Artificial Sequence: Synthetic oligonucleotide
  Sense strand starting at position 1926 of SEQ ID NO: 1880759
ggacauaagugucuuccaa

SEQ ID NO: 1991673 - RNA, 19 nt, Artificial Sequence
  Description of Artificial Sequence: Synthetic oligonucleotide
  Antisense strand to SEQ ID NO: 1991672
uuggaagacacuuaugucc

SEQ ID NO: 1991674 - RNA, 19 nt, Artificial Sequence
  Description of Artificial Sequence: Synthetic oligonucleotide
  Sense strand starting at position 1928 of SEQ ID NO: 1880759
acauaagugucuuccaaac

SEQ ID NO: 1991675 - RNA, 19 nt, Artificial Sequence
  Description of Artificial Sequence: Synthetic oligonucleotide
  Antisense strand to SEQ ID NO: 1991674
guuuggaagacacuuaugu

SEQ ID NO: 1991676 - RNA, 19 nt, Artificial Sequence
  Description of Artificial Sequence: Synthetic oligonucleotide
  Sense strand starting at position 2060 of SEQ ID NO: 1880759
cccugucauccacagacuu

SEQ ID NO: 1991677 - RNA, 19 nt, Artificial Sequence
  Description of Artificial Sequence: Synthetic oligonucleotide
  Antisense strand to SEQ ID NO: 1991676
aagucuguggaugacaggg

SEQ ID NO: 1991678 - RNA, 19 nt, Artificial Sequence
  Description of Artificial Sequence: Synthetic oligonucleotide
  Sense strand starting at position 2276 of SEQ ID NO: 1880759
guguguagacauuauuauc

SEQ ID NO: 1991679 - RNA, 19 nt, Artificial Sequence
  Description of Artificial Sequence: Synthetic oligonucleotide
  Antisense strand to SEQ ID NO: 1991678
gauaauaaugucuacacac

SEQ ID NO: 1991680 - RNA, 19 nt, Artificial Sequence
  Description of Artificial Sequence: Synthetic oligonucleotide
  Sense strand starting at position 2548 of SEQ ID NO: 1880759
aauguuugagagcaaggua

SEQ ID NO: 1991681 - RNA, 19 nt, Artificial Sequence
  Description of Artificial Sequence: Synthetic oligonucleotide
  Antisense strand to SEQ ID NO: 1991680
uaccuugcucucaaacauu

SEQ ID NO: 1991682 - RNA, 19 nt, Artificial Sequence
  Description of Artificial Sequence: Synthetic oligonucleotide
  Sense strand starting at position 2568 of SEQ ID NO: 1880759
uuguuugggccauaggagu

SEQ ID NO: 1991683 - RNA, 19 nt, Artificial Sequence
  Description of Artificial Sequence: Synthetic oligonucleotide
  Antisense strand to SEQ ID NO: 1991682
acuccuauggcccaaacaa

SEQ ID NO: 1991684 - RNA, 19 nt, Artificial Sequence
  Description of Artificial Sequence: Synthetic oligonucleotide
  Sense strand starting at position 2685 of SEQ ID NO: 1880759
uugaauugucaauauuguc

SEQ ID NO: 1991685 - RNA, 19 nt, Artificial Sequence
  Description of Artificial Sequence: Synthetic oligonucleotide
  Antisense strand to SEQ ID NO: 1991684
gacaauauugacaauucaa

SEQ ID NO: 1991686 - RNA, 19 nt, Artificial Sequence
  Description of Artificial Sequence: Synthetic oligonucleotide
  Sense strand starting at position 2872 of SEQ ID NO: 1880759
uccagacuuuaguuccauu

SEQ ID NO: 1991687 - RNA, 19 nt, Artificial Sequence
  Description of Artificial Sequence: Synthetic oligonucleotide
  Antisense strand to SEQ ID NO: 1991686
aauggaacuaaagucugga

SEQ ID NO: 1991688 - RNA, 19 nt, Artificial Sequence
  Description of Artificial Sequence: Synthetic oligonucleotide
  Sense strand starting at position 2954 of SEQ ID NO: 1880759
cuucuuagauccuucugga

SEQ ID NO: 1991689 - RNA, 19 nt, Artificial Sequence
  Description of Artificial Sequence: Synthetic oligonucleotide
  Antisense strand to SEQ ID NO: 1991688
uccagaaggaucuaagaag

SEQ ID NO: 1991690 - RNA, 19 nt, Artificial Sequence
  Description of Artificial Sequence: Synthetic oligonucleotide
  Sense strand starting at position 2998 of SEQ ID NO: 1880759
uuaccuuuacacggaaaga

SEQ ID NO: 1991691 - RNA, 19 nt, Artificial Sequence
  Description of Artificial Sequence: Synthetic oligonucleotide
  Antisense strand to SEQ ID NO: 1991690
ucuuuccguguaaagguaa

SEQ ID NO: 1991692 - RNA, 19 nt, Artificial Sequence
  Description of Artificial Sequence: Synthetic oligonucleotide
  Sense strand starting at position 3142 of SEQ ID NO: 1880759
uccaaauuggucugauuaa

SEQ ID NO: 1991693 - RNA, 19 nt, Artificial Sequence
  Description of Artificial Sequence: Synthetic oligonucleotide
  Antisense strand to SEQ ID NO: 1991692
uuaaucagaccaauuugga

SEQ ID NO: 1991694 - RNA, 19 nt, Artificial Sequence
  Description of Artificial Sequence: Synthetic oligonucleotide
  Sense strand starting at position 3267 of SEQ ID NO: 1880759
agaagagauuuacaucuca

SEQ ID NO: 1991695 - RNA, 19 nt, Artificial Sequence
  Description of Artificial Sequence: Synthetic oligonucleotide
  Antisense strand to SEQ ID NO: 1991694
ugagauguaaaucucuucu

SEQ ID NO: 1991696 - RNA, 19 nt, Artificial Sequence
  Description of Artificial Sequence: Synthetic oligonucleotide
  Sense strand starting at position 3407 of SEQ ID NO: 1880759
agaucugagguacgagauu

SEQ ID NO: 1991697 - RNA, 19 nt, Artificial Sequence
  Description of Artificial Sequence: Synthetic oligonucleotide
  Antisense strand to SEQ ID NO: 1991696
aaucucguaccucagaucu

SEQ ID NO: 1991698 - RNA, 19 nt, Artificial Sequence
  Description of Artificial Sequence: Synthetic oligonucleotide
  Sense strand starting at position 3416 of SEQ ID NO: 1880759
guacgagauucucuuuaaa

SEQ ID NO: 1991699 - RNA, 19 nt, Artificial Sequence
  Description of Artificial Sequence: Synthetic oligonucleotide
  Antisense strand to SEQ ID NO: 1991698
uuuaaagagaaucucguac

SEQ ID NO: 1991700 - RNA, 19 nt, Artificial Sequence
  Description of Artificial Sequence: Synthetic oligonucleotide
  Sense strand starting at position 3418 of SEQ ID NO: 1880759
acgagauucucuuuaaacu

SEQ ID NO: 1991701 - RNA, 19 nt, Artificial Sequence
  Description of Artificial Sequence: Synthetic oligonucleotide
  Antisense strand to SEQ ID NO: 1991700
aguuuaaagagaaucucgu

SEQ ID NO: 1991702 - RNA, 19 nt, Artificial Sequence
  Description of Artificial Sequence: Synthetic oligonucleotide
  Sense strand starting at position 3453 of SEQ ID NO: 1880759
agugccuuuccauaccaua

SEQ ID NO: 1991703 - RNA, 19 nt, Artificial Sequence
  Description of Artificial Sequence: Synthetic oligonucleotide
  Antisense strand to SEQ ID NO: 1991702
uaugguauggaaaggcacu

SEQ ID NO: 1991704 - RNA, 19 nt, Artificial Sequence
  Description of Artificial Sequence: Synthetic oligonucleotide
  Sense strand starting at position 3645 of SEQ ID NO: 1880759
gcaugcuuuccauagaaga

SEQ ID NO: 1991705 - RNA, 19 nt, Artificial Sequence
  Description of Artificial Sequence: Synthetic oligonucleotide
  Antisense strand to SEQ ID NO: 1991704
ucuucuauggaaagcaugc

SEQ ID NO: 1991706 - RNA, 19 nt, Artificial Sequence
  Description of Artificial Sequence: Synthetic oligonucleotide
  Sense strand starting at position 3814 of SEQ ID NO: 1880759
ugguaaauugaaugguauu

SEQ ID NO: 1991707 - RNA, 19 nt, Artificial Sequence
  Description of Artificial Sequence: Synthetic oligonucleotide
  Antisense strand to SEQ ID NO: 1991706
aauaccauucaauuuacca

SEQ ID NO: 1991708 - RNA, 19 nt, Artificial Sequence
  Description of Artificial Sequence: Synthetic oligonucleotide
  Sense strand starting at position 3815 of SEQ ID NO: 1880759
gguaaauugaaugguauua

SEQ ID NO: 1991709 - RNA, 19 nt, Artificial Sequence
  Description of Artificial Sequence: Synthetic oligonucleotide
  Antisense strand to SEQ ID NO: 1991708
uaauaccauucaauuuacc

SEQ ID NO: 1991710 - RNA, 19 nt, Artificial Sequence
  Description of Artificial Sequence: Synthetic oligonucleotide
  Sense strand starting at position 3830 of SEQ ID NO: 1880759
auuacauaucucugggaca

SEQ ID NO: 1991711 - RNA, 19 nt, Artificial Sequence
  Description of Artificial Sequence: Synthetic oligonucleotide
  Antisense strand to SEQ ID NO: 1991710
ugucccagagauauguaau

SEQ ID NO: 1991712 - RNA, 19 nt, Artificial Sequence
  Description of Artificial Sequence: Synthetic oligonucleotide
  Sense strand starting at position 3868 of SEQ ID NO: 1880759
uuauuacugguuuagauac

SEQ ID NO: 1991713 - RNA, 19 nt, Artificial Sequence
  Description of Artificial Sequence: Synthetic oligonucleotide
  Antisense strand to SEQ ID NO: 1991712
guaucuaaaccaguaauaa

SEQ ID NO: 1991714 - RNA, 19 nt, Artificial Sequence
  Description of Artificial Sequence: Synthetic oligonucleotide
  Sense strand starting at position 306 of SEQ ID NO: 1880760
gcaggaauuccuggguuac

SEQ ID NO: 1991715 - RNA, 19 nt, Artificial Sequence
  Description of Artificial Sequence: Synthetic oligonucleotide
  Antisense strand to SEQ ID NO: 1991714
guaacccaggaauuccugc

SEQ ID NO: 1991716 - RNA, 19 nt, Artificial Sequence
  Description of Artificial Sequence: Synthetic oligonucleotide
  Sense strand starting at position 307 of SEQ ID NO: 1880760
caggaauuccuggguuaca

SEQ ID NO: 1991717 - RNA, 19 nt, Artificial Sequence
  Description of Artificial Sequence: Synthetic oligonucleotide
  Antisense strand to SEQ ID NO: 1991716
uguaacccaggaauuccug

SEQ ID NO: 1991718 - RNA, 19 nt, Artificial Sequence
  Description of Artificial Sequence: Synthetic oligonucleotide
  Sense strand starting at position 308 of SEQ ID NO: 1880760
aggaauuccuggguuacau

SEQ ID NO: 1991719 - RNA, 19 nt, Artificial Sequence
  Description of Artificial Sequence: Synthetic oligonucleotide
  Antisense strand to SEQ ID NO: 1991718
auguaacccaggaauuccu

SEQ ID NO: 1991720 - RNA, 19 nt, Artificial Sequence
  Description of Artificial Sequence: Synthetic oligonucleotide
  Sense strand starting at position 413 of SEQ ID NO: 1880760
ggagcuauagaagguauua

SEQ ID NO: 1991721 - RNA, 19 nt, Artificial Sequence
  Description of Artificial Sequence: Synthetic oligonucleotide
  Antisense strand to SEQ ID NO: 1991720
uaauaccuucuauagcucc

SEQ ID NO: 1991722 - RNA, 19 nt, Artificial Sequence
  Description of Artificial Sequence: Synthetic oligonucleotide
  Sense strand starting at position 424 of SEQ ID NO: 1880760
agguauuauguacacuaca

SEQ ID NO: 1991723 - RNA, 19 nt, Artificial Sequence
  Description of Artificial Sequence: Synthetic oligonucleotide
  Antisense strand to SEQ ID NO: 1991722
uguaguguacauaauaccu

SEQ ID NO: 1991724 - RNA, 19 nt, Artificial Sequence
  Description of Artificial Sequence: Synthetic oligonucleotide
  Sense strand starting at position 459 of SEQ ID NO: 1880760
ccugaaagcuccuuccuga

SEQ ID NO: 1991725 - RNA, 19 nt, Artificial Sequence
  Description of Artificial Sequence: Synthetic oligonucleotide
  Antisense strand to SEQ ID NO: 1991724
ucaggaaggagcuuucagg

SEQ ID NO: 1991726 - RNA, 19 nt, Artificial Sequence
  Description of Artificial Sequence: Synthetic oligonucleotide
  Sense strand starting at position 544 of SEQ ID NO: 1880760
acuuaauggcaguagcauu

SEQ ID NO: 1991727 - RNA, 19 nt, Artificial Sequence
  Description of Artificial Sequence: Synthetic oligonucleotide
  Antisense strand to SEQ ID NO: 1991726
aaugcuacugccauuaagu

SEQ ID NO: 1991728 - RNA, 19 nt, Artificial Sequence
  Description of Artificial Sequence: Synthetic oligonucleotide
  Sense strand starting at position 607 of SEQ ID NO: 1880760
caugguaaauuuggaagau

SEQ ID NO: 1991729 - RNA, 19 nt, Artificial Sequence
  Description of Artificial Sequence: Synthetic oligonucleotide
  Antisense strand to SEQ ID NO: 1991728
aucuuccaaauuuaccaug

SEQ ID NO: 1991730 - RNA, 19 nt, Artificial Sequence
  Description of Artificial Sequence: Synthetic oligonucleotide
  Sense strand starting at position 608 of SEQ ID NO: 1880760
augguaaauuuggaagauu

SEQ ID NO: 1991731 - RNA, 19 nt, Artificial Sequence
  Description of Artificial Sequence: Synthetic oligonucleotide
  Antisense strand to SEQ ID NO: 1991730
aaucuuccaaauuuaccau

SEQ ID NO: 1991732 - RNA, 19 nt, Artificial Sequence
  Description of Artificial Sequence: Synthetic oligonucleotide
  Sense strand starting at position 639 of SEQ ID NO: 1880760
uuuacacaucacgguaaau

SEQ ID NO: 1991733 - RNA, 19 nt, Artificial Sequence
  Description of Artificial Sequence: Synthetic oligonucleotide
  Antisense strand to SEQ ID NO: 1991732
auuuaccgugauguguaaa

SEQ ID NO: 1991734 - RNA, 19 nt, Artificial Sequence
  Description of Artificial Sequence: Synthetic oligonucleotide
  Sense strand starting at position 649 of SEQ ID NO: 1880760
acgguaaauuuggaagauu

SEQ ID NO: 1991735 - RNA, 19 nt, Artificial Sequence
  Description of Artificial Sequence: Synthetic oligonucleotide
  Antisense strand to SEQ ID NO: 1991734
aaucuuccaaauuuaccgu

SEQ ID NO: 1991736 - RNA, 19 nt, Artificial Sequence
  Description of Artificial Sequence: Synthetic oligonucleotide
  Sense strand starting at position 687 of SEQ ID NO: 1880760
agacgaggauucuuaacua

SEQ ID NO: 1991737 - RNA, 19 nt, Artificial Sequence
  Description of Artificial Sequence: Synthetic oligonucleotide
  Antisense strand to SEQ ID NO: 1991736
uaguuaagaauccucgucu

SEQ ID NO: 1991738 - RNA, 19 nt, Artificial Sequence
  Description of Artificial Sequence: Synthetic oligonucleotide
  Sense strand starting at position 879 of SEQ ID NO: 1880760
guguuuguacuuuaagaca

SEQ ID NO: 1991739 - RNA, 19 nt, Artificial Sequence
  Description of Artificial Sequence: Synthetic oligonucleotide
  Antisense strand to SEQ ID NO: 1991738
ugucuuaaaguacaaacac

SEQ ID NO: 1991740 - RNA, 19 nt, Artificial Sequence
  Description of Artificial Sequence: Synthetic oligonucleotide
  Sense strand starting at position 1122 of SEQ ID NO: 1880760
ugugaccgucuccauaauu

SEQ ID NO: 1991741 - RNA, 19 nt, Artificial Sequence
  Description of Artificial Sequence: Synthetic oligonucleotide
  Antisense strand to SEQ ID NO: 1991740
aauuauggagacggucaca

SEQ ID NO: 1991742 - RNA, 19 nt, Artificial Sequence
  Description of Artificial Sequence: Synthetic oligonucleotide
  Sense strand starting at position 1184 of SEQ ID NO: 1880760
auuagucaaucccuuagua

SEQ ID NO: 1991743 - RNA, 19 nt, Artificial Sequence
  Description of Artificial Sequence: Synthetic oligonucleotide
  Antisense strand to SEQ ID NO: 1991742
uacuaagggauugacuaau

SEQ ID NO: 1991744 - RNA, 19 nt, Artificial Sequence
  Description of Artificial Sequence: Synthetic oligonucleotide
  Sense strand starting at position 1206 of SEQ ID NO: 1880760
guuaaauaauagccaggaa

SEQ ID NO: 1991745 - RNA, 19 nt, Artificial Sequence
  Description of Artificial Sequence: Synthetic oligonucleotide
  Antisense strand to SEQ ID NO: 1991744
uuccuggcuauuauuuaac

SEQ ID NO: 1991746 - RNA, 19 nt, Artificial Sequence
  Description of Artificial Sequence: Synthetic oligonucleotide
  Sense strand starting at position 1237 of SEQ ID NO: 1880760
ccugaagguacauguaaag

SEQ ID NO: 1991747 - RNA, 19 nt, Artificial Sequence
  Description of Artificial Sequence: Synthetic oligonucleotide
  Antisense strand to SEQ ID NO: 1991746
cuuuacauguaccuucagg

SEQ ID NO: 1991748 - RNA, 19 nt, Artificial Sequence
  Description of Artificial Sequence: Synthetic oligonucleotide
  Sense strand starting at position 1494 of SEQ ID NO: 1880760
gguuaaacgagcgaacaua

SEQ ID NO: 1991749 - RNA, 19 nt, Artificial Sequence
  Description of Artificial Sequence: Synthetic oligonucleotide
  Antisense strand to SEQ ID NO: 1991748
uauguucgcucguuuaacc

SEQ ID NO: 1991750 - RNA, 19 nt, Artificial Sequence
  Description of Artificial Sequence: Synthetic oligonucleotide
  Sense strand starting at position 1547 of SEQ ID NO: 1880760
ucccuagggcauugaugaa

SEQ ID NO: 1991751 - RNA, 19 nt, Artificial Sequence
  Description of Artificial Sequence: Synthetic oligonucleotide
  Antisense strand to SEQ ID NO: 1991750
uucaucaaugcccuaggga

SEQ ID NO: 1991752 - RNA, 19 nt, Artificial Sequence
  Description of Artificial Sequence: Synthetic oligonucleotide
  Sense strand starting at position 1748 of SEQ ID NO: 1880760
cuagguucuccacaccauu

SEQ ID NO: 1991753 - RNA, 19 nt, Artificial Sequence
  Description of Artificial Sequence: Synthetic oligonucleotide
  Antisense strand to SEQ ID NO: 1991752
aaugguguggagaaccuag

SEQ ID NO: 1991754 - RNA, 19 nt, Artificial Sequence
  Description of Artificial Sequence: Synthetic oligonucleotide
  Sense strand starting at position 1791 of SEQ ID NO: 1880760
cagggacccugauucuauu

SEQ ID NO: 1991755 - RNA, 19 nt, Artificial Sequence
  Description of Artificial Sequence: Synthetic oligonucleotide
  Antisense strand to SEQ ID NO: 1991754
aauagaaucagggucccug

SEQ ID NO: 1991756 - RNA, 19 nt, Artificial Sequence
  Description of Artificial Sequence: Synthetic oligonucleotide
  Sense strand starting at position 1861 of SEQ ID NO: 1880760
ccucaaucgcuugaauacu

SEQ ID NO: 1991757 - RNA, 19 nt, Artificial Sequence
  Description of Artificial Sequence: Synthetic oligonucleotide
  Antisense strand to SEQ ID NO: 1991756
aguauucaagcgauugagg

SEQ ID NO: 1991758 - RNA, 19 nt, Artificial Sequence
  Description of Artificial Sequence: Synthetic oligonucleotide
  Sense strand starting at position 2052 of SEQ ID NO: 1880760
uuuccucugccuuaggaaa

SEQ ID NO: 1991759 - RNA, 19 nt, Artificial Sequence
  Description of Artificial Sequence: Synthetic oligonucleotide
  Antisense strand to SEQ ID NO: 1991758
uuuccuaaggcagaggaaa

SEQ ID NO: 1991760 - RNA, 19 nt, Artificial Sequence
  Description of Artificial Sequence: Synthetic oligonucleotide
  Sense strand starting at position 2269 of SEQ ID NO: 1880760
ccauguuagcgccuucuuu

SEQ ID NO: 1991761 - RNA, 19 nt, Artificial Sequence
  Description of Artificial Sequence: Synthetic oligonucleotide
  Antisense strand to SEQ ID NO: 1991760
aaagaaggcgcuaacaugg

SEQ ID NO: 1991762 - RNA, 19 nt, Artificial Sequence
  Description of Artificial Sequence: Synthetic oligonucleotide
  Sense strand starting at position 2479 of SEQ ID NO: 1880760
gcgagaucggacugacaac

SEQ ID NO: 1991763 - RNA, 19 nt, Artificial Sequence
  Description of Artificial Sequence: Synthetic oligonucleotide
  Antisense strand to SEQ ID NO: 1991762
guugucaguccgaucucgc

SEQ ID NO: 1991764 - RNA, 19 nt, Artificial Sequence
  Description of Artificial Sequence: Synthetic oligonucleotide
  Sense strand starting at position 3205 of SEQ ID NO: 1880760
aucagaggccucugugaga

SEQ ID NO: 1991765 - RNA, 19 nt, Artificial Sequence
  Description of Artificial Sequence: Synthetic oligonucleotide
  Antisense strand to SEQ ID NO: 1991764
ucucacagaggccucugau

SEQ ID NO: 1991766 - RNA, 19 nt, Artificial Sequence
  Description of Artificial Sequence: Synthetic oligonucleotide
  Sense strand starting at position 3373 of SEQ ID NO: 1880760
gagaguuaaugagccugaa

SEQ ID NO: 1991767 - RNA, 19 nt, Artificial Sequence
  Description of Artificial Sequence: Synthetic oligonucleotide
  Antisense strand to SEQ ID NO: 1991766
uucaggcucauuaacucuc

SEQ ID NO: 1991768 - RNA, 19 nt, Artificial Sequence
  Description of Artificial Sequence: Synthetic oligonucleotide
  Sense strand starting at position 3377 of SEQ ID NO: 1880760
guuaaugagccugaaguuc

SEQ ID NO: 1991769 - RNA, 19 nt, Artificial Sequence
  Description of Artificial Sequence: Synthetic oligonucleotide
  Antisense strand to SEQ ID NO: 1991768
gaacuucaggcucauuaac

SEQ ID NO: 1991770 - RNA, 19 nt, Artificial Sequence
  Description of Artificial Sequence: Synthetic oligonucleotide
  Sense strand starting at position 3424 of SEQ ID NO: 1880760
uuguaauggcauugacauu

SEQ ID NO: 1991771 - RNA, 19 nt, Artificial Sequence
  Description of Artificial Sequence: Synthetic oligonucleotide
  Antisense strand to SEQ ID NO: 1991770
aaugucaaugccauuacaa

SEQ ID NO: 1991772 - RNA, 19 nt, Artificial Sequence
  Description of Artificial Sequence: Synthetic oligonucleotide
  Sense strand starting at position 3579 of SEQ ID NO: 1880760
guaacaguaauguaguagu

SEQ ID NO: 1991773 - RNA, 19 nt, Artificial Sequence
  Description of Artificial Sequence: Synthetic oligonucleotide
  Antisense strand to SEQ ID NO: 1991772
acuacuacauuacuguuac

SEQ ID NO: 1991774 - RNA, 19 nt, Artificial Sequence
  Description of Artificial Sequence: Synthetic oligonucleotide
  Sense strand starting at position 3590 of SEQ ID NO: 1880760
guaguagugccauuguagu

SEQ ID NO: 1991775 - RNA, 19 nt, Artificial Sequence
  Description of Artificial Sequence: Synthetic oligonucleotide
  Antisense strand to SEQ ID NO: 1991774
acuacaauggcacuacuac

SEQ ID NO: 1991776 - RNA, 19 nt, Artificial Sequence
  Description of Artificial Sequence: Synthetic oligonucleotide
  Sense strand starting at position 3689 of SEQ ID NO: 1880760
cacaauuguuaggucuaga

SEQ ID NO: 1991777 - RNA, 19 nt, Artificial Sequence
  Description of Artificial Sequence: Synthetic oligonucleotide
  Antisense strand to SEQ ID NO: 1991776
ucuagaccuaacaauugug

SEQ ID NO: 1991778 - RNA, 19 nt, Artificial Sequence
  Description of Artificial Sequence: Synthetic oligonucleotide
  Sense strand starting at position 3692 of SEQ ID NO: 1880760
aauuguuaggucuagaacg

SEQ ID NO: 1991779 - RNA, 19 nt, Artificial Sequence
  Description of Artificial Sequence: Synthetic oligonucleotide
  Antisense strand to SEQ ID NO: 1991778
cguucuagaccuaacaauu

SEQ ID NO: 1991780 - RNA, 19 nt, Artificial Sequence
  Description of Artificial Sequence: Synthetic oligonucleotide
  Sense strand starting at position 3699 of SEQ ID NO: 1880760
aggucuagaacgcauugau

SEQ ID NO: 1991781 - RNA, 19 nt, Artificial Sequence
  Description of Artificial Sequence: Synthetic oligonucleotide
  Antisense strand to SEQ ID NO: 1991780
aucaaugcguucuagaccu

SEQ ID NO: 1991782 - RNA, 19 nt, Artificial Sequence
  Description of Artificial Sequence: Synthetic oligonucleotide
  Sense strand starting at position 3702 of SEQ ID NO: 1880760
ucuagaacgcauugauuaa

SEQ ID NO: 1991783 - RNA, 19 nt, Artificial Sequence
  Description of Artificial Sequence: Synthetic oligonucleotide
  Antisense strand to SEQ ID NO: 1991782
uuaaucaaugcguucuaga

SEQ ID NO: 1991784 - RNA, 19 nt, Artificial Sequence
  Description of Artificial Sequence: Synthetic oligonucleotide
  Sense strand starting at position 3793 of SEQ ID NO: 1880760
aaagaaguuugggucaauu

SEQ ID NO: 1991785 - RNA, 19 nt, Artificial Sequence
  Description of Artificial Sequence: Synthetic oligonucleotide
  Antisense strand to SEQ ID NO: 1991784
aauugacccaaacuucuuu

SEQ ID NO: 1991786 - RNA, 19 nt, Artificial Sequence
  Description of Artificial Sequence: Synthetic oligonucleotide
  Sense strand starting at position 3933 of SEQ ID NO: 1880760
guuaguuaucuacaugaug

SEQ ID NO: 1991787 - RNA, 19 nt, Artificial Sequence
  Description of Artificial Sequence: Synthetic oligonucleotide
  Antisense strand to SEQ ID NO: 1991786
caucauguagauaacuaac

SEQ ID NO: 1991788 - RNA, 19 nt, Artificial Sequence
  Description of Artificial Sequence: Synthetic oligonucleotide
  Sense strand starting at position 3936 of SEQ ID NO: 1880760
aguuaucuacaugaugcau

SEQ ID NO: 1991789 - RNA, 19 nt, Artificial Sequence
  Description of Artificial Sequence: Synthetic oligonucleotide
  Antisense strand to SEQ ID NO: 1991788
augcaucauguagauaacu

SEQ ID NO: 1991790 - RNA, 19 nt, Artificial Sequence
  Description of Artificial Sequence: Synthetic oligonucleotide
  Sense strand starting at position 3944 of SEQ ID NO: 1880760
acaugaugcauucgagaaa

SEQ ID NO: 1991791 - RNA, 19 nt, Artificial Sequence
  Description of Artificial Sequence: Synthetic oligonucleotide
  Antisense strand to SEQ ID NO: 1991790
uuucucgaaugcaucaugu

SEQ ID NO: 1991792 - RNA, 19 nt, Artificial Sequence
  Description of Artificial Sequence: Synthetic oligonucleotide
  Sense strand starting at position 3947 of SEQ ID NO: 1880760
ugaugcauucgagaaacac

SEQ ID NO: 1991793 - RNA, 19 nt, Artificial Sequence
  Description of Artificial Sequence: Synthetic oligonucleotide
  Antisense strand to SEQ ID NO: 1991792
guguuucucgaaugcauca

SEQ ID NO: 1991794 - RNA, 19 nt, Artificial Sequence
  Description of Artificial Sequence: Synthetic oligonucleotide
  Sense strand starting at position 41 of SEQ ID NO: 1880761
aauugaaguccaugguuua

SEQ ID NO: 1991795 - RNA, 19 nt, Artificial Sequence
  Description of Artificial Sequence: Synthetic oligonucleotide
  Antisense strand to SEQ ID NO: 1991794
uaaaccauggacuucaauu

SEQ ID NO: 1991796 - RNA, 19 nt, Artificial Sequence
  Description of Artificial Sequence: Synthetic oligonucleotide
  Sense strand starting at position 44 of SEQ ID NO: 1880761
ugaaguccaugguuuacau

SEQ ID NO: 1991797 - RNA, 19 nt, Artificial Sequence
  Description of Artificial Sequence: Synthetic oligonucleotide
  Antisense strand to SEQ ID NO: 1991796
auguaaaccauggacuuca

SEQ ID NO: 1991798 - RNA, 19 nt, Artificial Sequence
  Description of Artificial Sequence: Synthetic oligonucleotide
  Sense strand starting at position 153 of SEQ ID NO: 1880761
ucaguuguccuauaggaua

SEQ ID NO: 1991799 - RNA, 19 nt, Artificial Sequence
  Description of Artificial Sequence: Synthetic oligonucleotide
  Antisense strand to SEQ ID NO: 1991798
uauccuauaggacaacuga

SEQ ID NO: 1991800 - RNA, 19 nt, Artificial Sequence
  Description of Artificial Sequence: Synthetic oligonucleotide
  Sense strand starting at position 180 of SEQ ID NO: 1880761
ccagauuugucuguuugcu

SEQ ID NO: 1991801 - RNA, 19 nt, Artificial Sequence
  Description of Artificial Sequence: Synthetic oligonucleotide
  Antisense strand to SEQ ID NO: 1991800
agcaaacagacaaaucugg

SEQ ID NO: 1991802 - RNA, 19 nt, Artificial Sequence
  Description of Artificial Sequence: Synthetic oligonucleotide
  Sense strand starting at position 182 of SEQ ID NO: 1880761
agauuugucuguuugcuuu

SEQ ID NO: 1991803 - RNA, 19 nt, Artificial Sequence
  Description of Artificial Sequence: Synthetic oligonucleotide
  Antisense strand to SEQ ID NO: 1991802
aaagcaaacagacaaaucu

SEQ ID NO: 1991804 - RNA, 19 nt, Artificial Sequence
  Description of Artificial Sequence: Synthetic oligonucleotide
  Sense strand starting at position 232 of SEQ ID NO: 1880761
cuggguuuccuguaaacug

SEQ ID NO: 1991805 - RNA, 19 nt, Artificial Sequence
  Description of Artificial Sequence: Synthetic oligonucleotide
  Antisense strand to SEQ ID NO: 1991804
caguuuacaggaaacccag

SEQ ID NO: 1991806 - RNA, 19 nt, Artificial Sequence
  Description of Artificial Sequence: Synthetic oligonucleotide
  Sense strand starting at position 257 of SEQ ID NO: 1880761
uaucuaaaggcuugaagag

SEQ ID NO: 1991807 - RNA, 19 nt, Artificial Sequence
  Description of Artificial Sequence: Synthetic oligonucleotide
  Antisense strand to SEQ ID NO: 1991806
cucuucaagccuuuagaua

SEQ ID NO: 1991808 - RNA, 19 nt, Artificial Sequence
  Description of Artificial Sequence: Synthetic oligonucleotide
  Sense strand starting at position 269 of SEQ ID NO: 1880761
ugaagagauuugggcaaua

SEQ ID NO: 1991809 - RNA, 19 nt, Artificial Sequence
  Description of Artificial Sequence: Synthetic oligonucleotide
  Antisense strand to SEQ ID NO: 1991808
uauugcccaaaucucuuca

SEQ ID NO: 1991810 - RNA, 19 nt, Artificial Sequence
  Description of Artificial Sequence: Synthetic oligonucleotide
  Sense strand starting at position 283 of SEQ ID NO: 1880761
caauaaauucgaggcuaga

SEQ ID NO: 1991811 - RNA, 19 nt, Artificial Sequence
  Description of Artificial Sequence: Synthetic oligonucleotide
  Antisense strand to SEQ ID NO: 1991810
ucuagccucgaauuuauug

SEQ ID NO: 1991812 - RNA, 19 nt, Artificial Sequence
  Description of Artificial Sequence: Synthetic oligonucleotide
  Sense strand starting at position 286 of SEQ ID NO: 1880761
uaaauucgaggcuagacua

SEQ ID NO: 1991813 - RNA, 19 nt, Artificial Sequence
  Description of Artificial Sequence: Synthetic oligonucleotide
  Antisense strand to SEQ ID NO: 1991812
uagucuagccucgaauuua

SEQ ID NO: 1991814 - RNA, 19 nt, Artificial Sequence
  Description of Artificial Sequence: Synthetic oligonucleotide
  Sense strand starting at position 373 of SEQ ID NO: 1880761
cugggaugcuaaguuugau

SEQ ID NO: 1991815 - RNA, 19 nt, Artificial Sequence
  Description of Artificial Sequence: Synthetic oligonucleotide
  Antisense strand to SEQ ID NO: 1991814
aucaaacuuagcaucccag

SEQ ID NO: 1991816 - RNA, 19 nt, Artificial Sequence
  Description of Artificial Sequence: Synthetic oligonucleotide
  Sense strand starting at position 653 of SEQ ID NO: 1880761
gguugacaucuguagggua

SEQ ID NO: 1991817 - RNA, 19 nt, Artificial Sequence
  Description of Artificial Sequence: Synthetic oligonucleotide
  Antisense strand to SEQ ID NO: 1991816
uacccuacagaugucaacc

SEQ ID NO: 1991818 - RNA, 19 nt, Artificial Sequence
  Description of Artificial Sequence: Synthetic oligonucleotide
  Sense strand starting at position 689 of SEQ ID NO: 1880761
gugacuaggagccauacuu

SEQ ID NO: 1991819 - RNA, 19 nt, Artificial Sequence
  Description of Artificial Sequence: Synthetic oligonucleotide
  Antisense strand to SEQ ID NO: 1991818
aaguauggcuccuagucac

SEQ ID NO: 1991820 - RNA, 19 nt, Artificial Sequence
  Description of Artificial Sequence: Synthetic oligonucleotide
  Sense strand starting at position 1134 of SEQ ID NO: 1880761
cccugauucuuggcaccaa

SEQ ID NO: 1991821 - RNA, 19 nt, Artificial Sequence
  Description of Artificial Sequence: Synthetic oligonucleotide
  Antisense strand to SEQ ID NO: 1991820
uuggugccaagaaucaggg

SEQ ID NO: 1991822 - RNA, 19 nt, Artificial Sequence
  Description of Artificial Sequence: Synthetic oligonucleotide
  Sense strand starting at position 1618 of SEQ ID NO: 1880761
cauggagacuguccuagaa

SEQ ID NO: 1991823 - RNA, 19 nt, Artificial Sequence
  Description of Artificial Sequence: Synthetic oligonucleotide
  Antisense strand to SEQ ID NO: 1991822
uucuaggacagucuccaug

SEQ ID NO: 1991824 - RNA, 19 nt, Artificial Sequence
  Description of Artificial Sequence: Synthetic oligonucleotide
  Sense strand starting at position 1767 of SEQ ID NO: 1880761
caacauuuguuggauggaa

SEQ ID NO: 1991825 - RNA, 19 nt, Artificial Sequence
  Description of Artificial Sequence: Synthetic oligonucleotide
  Antisense strand to SEQ ID NO: 1991824
uuccauccaacaaauguug

SEQ ID NO: 1991826 - RNA, 19 nt, Artificial Sequence
  Description of Artificial Sequence: Synthetic oligonucleotide
  Sense strand starting at position 1837 of SEQ ID NO: 1880761
ugcucaucucaggaaaugu

SEQ ID NO: 1991827 - RNA, 19 nt, Artificial Sequence
  Description of Artificial Sequence: Synthetic oligonucleotide
  Antisense strand to SEQ ID NO: 1991826
acauuuccugagaugagca

SEQ ID NO: 1991828 - RNA, 19 nt, Artificial Sequence
  Description of Artificial Sequence: Synthetic oligonucleotide
  Sense strand starting at position 1848 of SEQ ID NO: 1880761
ggaaaugugacaugaucuc

SEQ ID NO: 1991829 - RNA, 19 nt, Artificial Sequence
  Description of Artificial Sequence: Synthetic oligonucleotide
  Antisense strand to SEQ ID NO: 1991828
gagaucaugucacauuucc

SEQ ID NO: 1991830 - RNA, 19 nt, Artificial Sequence
  Description of Artificial Sequence: Synthetic oligonucleotide
  Sense strand starting at position 1867 of SEQ ID NO: 1880761
agacucuuuccuggucaca

SEQ ID NO: 1991831 - RNA, 19 nt, Artificial Sequence
  Description of Artificial Sequence: Synthetic oligonucleotide
  Antisense strand to SEQ ID NO: 1991830
ugugaccaggaaagagucu

SEQ ID NO: 1991832 - RNA, 19 nt, Artificial Sequence
  Description of Artificial Sequence: Synthetic oligonucleotide
  Sense strand starting at position 2225 of SEQ ID NO: 1880761
guggguuuagucagggcuu

SEQ ID NO: 1991833 - RNA, 19 nt, Artificial Sequence
  Description of Artificial Sequence: Synthetic oligonucleotide
  Antisense strand to SEQ ID NO: 1991832
aagcccugacuaaacccac

SEQ ID NO: 1991834 - RNA, 19 nt, Artificial Sequence
  Description of Artificial Sequence: Synthetic oligonucleotide
  Sense strand starting at position 2395 of SEQ ID NO: 1880761
uggagcagccguuauuuau

SEQ ID NO: 1991835 - RNA, 19 nt, Artificial Sequence
  Description of Artificial Sequence: Synthetic oligonucleotide
  Antisense strand to SEQ ID NO: 1991834
auaaauaacggcugcucca

SEQ ID NO: 1991836 - RNA, 19 nt, Artificial Sequence
  Description of Artificial Sequence: Synthetic oligonucleotide
  Sense strand starting at position 2398 of SEQ ID NO: 1880761
agcagccguuauuuauaga

SEQ ID NO: 1991837 - RNA, 19 nt, Artificial Sequence
  Description of Artificial Sequence: Synthetic oligonucleotide
  Antisense strand to SEQ ID NO: 1991836
ucuauaaauaacggcugcu

SEQ ID NO: 1991838 - RNA, 19 nt, Artificial Sequence
  Description of Artificial Sequence: Synthetic oligonucleotide
  Sense strand starting at position 2411 of SEQ ID NO: 1880761
uauagaacugccuguugga

SEQ ID NO: 1991839 - RNA, 19 nt, Artificial Sequence
  Description of Artificial Sequence: Synthetic oligonucleotide
  Antisense strand to SEQ ID NO: 1991838
uccaacaggcaguucuaua

SEQ ID NO: 1991840 - RNA, 19 nt, Artificial Sequence
  Description of Artificial Sequence: Synthetic oligonucleotide
  Sense strand starting at position 2490 of SEQ ID NO: 1880761
guucuuagucuccagggau

SEQ ID NO: 1991841 - RNA, 19 nt, Artificial Sequence
  Description of Artificial Sequence: Synthetic oligonucleotide
  Antisense strand to SEQ ID NO: 1991840
aucccuggagacuaagaac

SEQ ID NO: 1991842 - RNA, 19 nt, Artificial Sequence
  Description of Artificial Sequence: Synthetic oligonucleotide
  Sense strand starting at position 2493 of SEQ ID NO: 1880761
cuuagucuccagggaugga

SEQ ID NO: 1991843 - RNA, 19 nt, Artificial Sequence
  Description of Artificial Sequence: Synthetic oligonucleotide
  Antisense strand to SEQ ID NO: 1991842
uccaucccuggagacuaag

SEQ ID NO: 1991844 - RNA, 19 nt, Artificial Sequence
  Description of Artificial Sequence: Synthetic oligonucleotide
  Sense strand starting at position 2695 of SEQ ID NO: 1880761
gccguuucucuugcaaugu

SEQ ID NO: 1991845 - RNA, 19 nt, Artificial Sequence
  Description of Artificial Sequence: Synthetic oligonucleotide
  Antisense strand to SEQ ID NO: 1991844
acauugcaagagaaacggc

SEQ ID NO: 1991846 - RNA, 19 nt, Artificial Sequence
  Description of Artificial Sequence: Synthetic oligonucleotide
  Sense strand starting at position 2816 of SEQ ID NO: 1880761
ucuaaucugcaagaagcau

SEQ ID NO: 1991847 - RNA, 19 nt, Artificial Sequence
  Description of Artificial Sequence: Synthetic oligonucleotide
  Antisense strand to SEQ ID NO: 1991846
augcuucuugcagauuaga

SEQ ID NO: 1991848 - RNA, 19 nt, Artificial Sequence
  Description of Artificial Sequence: Synthetic oligonucleotide
  Sense strand starting at position 2822 of SEQ ID NO: 1880761
cugcaagaagcauaacuuu

SEQ ID NO: 1991849 - RNA, 19 nt, Artificial Sequence
  Description of Artificial Sequence: Synthetic oligonucleotide
  Antisense strand to SEQ ID NO: 1991848
aaaguuaugcuucuugcag

SEQ ID NO: 1991850 - RNA, 19 nt, Artificial Sequence
  Description of Artificial Sequence: Synthetic oligonucleotide
  Sense strand starting at position 2855 of SEQ ID NO: 1880761
gaauguaauuucuauuagg

SEQ ID NO: 1991851 - RNA, 19 nt, Artificial Sequence
  Description of Artificial Sequence: Synthetic oligonucleotide
  Antisense strand to SEQ ID NO: 1991850
ccuaauagaaauuacauuc

SEQ ID NO: 1991852 - RNA, 19 nt, Artificial Sequence
  Description of Artificial Sequence: Synthetic oligonucleotide
  Sense strand starting at position 2858 of SEQ ID NO: 1880761
uguaauuucuauuaggaac

SEQ ID NO: 1991853 - RNA, 19 nt, Artificial Sequence
  Description of Artificial Sequence: Synthetic oligonucleotide
  Antisense strand to SEQ ID NO: 1991852
guuccuaauagaaauuaca

SEQ ID NO: 1991854 - RNA, 19 nt, Artificial Sequence
  Description of Artificial Sequence: Synthetic oligonucleotide
  Sense strand starting at position 2892 of SEQ ID NO: 1880761
gguagaaauuaaucucagu

SEQ ID NO: 1991855 - RNA, 19 nt, Artificial Sequence
  Description of Artificial Sequence: Synthetic oligonucleotide
  Antisense strand to SEQ ID NO: 1991854
acugagauuaauuucuacc

SEQ ID NO: 1991856 - RNA, 19 nt, Artificial Sequence
  Description of Artificial Sequence: Synthetic oligonucleotide
  Sense strand starting at position 3054 of SEQ ID NO: 1880761
ucaucaguuggucaugcaa

SEQ ID NO: 1991857 - RNA, 19 nt, Artificial Sequence
  Description of Artificial Sequence: Synthetic oligonucleotide
  Antisense strand to SEQ ID NO: 1991856
uugcaugaccaacugauga

SEQ ID NO: 1991858 - RNA, 19 nt, Artificial Sequence
  Description of Artificial Sequence: Synthetic oligonucleotide
  Sense strand starting at position 3174 of SEQ ID NO: 1880761
ucaggaagcucaguaauuc

SEQ ID NO: 1991859 - RNA, 19 nt, Artificial Sequence
  Description of Artificial Sequence: Synthetic oligonucleotide
  Antisense strand to SEQ ID NO: 1991858
gaauuacugagcuuccuga

SEQ ID NO: 1991860 - RNA, 19 nt, Artificial Sequence
  Description of Artificial Sequence: Synthetic oligonucleotide
  Sense strand starting at position 3649 of SEQ ID NO: 1880761
ggagauuacugucucuaaa

SEQ ID NO: 1991861 - RNA, 19 nt, Artificial Sequence
  Description of Artificial Sequence: Synthetic oligonucleotide
  Antisense strand to SEQ ID NO: 1991860
uuuagagacaguaaucucc

SEQ ID NO: 1991862 - RNA, 19 nt, Artificial Sequence
  Description of Artificial Sequence: Synthetic oligonucleotide
  Sense strand starting at position 3717 of SEQ ID NO: 1880761
acugaauugguuggaccau

SEQ ID NO: 1991863 - RNA, 19 nt, Artificial Sequence
  Description of Artificial Sequence: Synthetic oligonucleotide
  Antisense strand to SEQ ID NO: 1991862
augguccaaccaauucagu

SEQ ID NO: 1991864 - RNA, 19 nt, Artificial Sequence
  Description of Artificial Sequence: Synthetic oligonucleotide
  Sense strand starting at position 3739 of SEQ ID NO: 1880761
ugaagauguucccucacua

SEQ ID NO: 1991865 - RNA, 19 nt, Artificial Sequence
  Description of Artificial Sequence: Synthetic oligonucleotide
  Antisense strand to SEQ ID NO: 1991864
uagugagggaacaucuuca

SEQ ID NO: 1991866 - RNA, 19 nt, Artificial Sequence
  Description of Artificial Sequence: Synthetic oligonucleotide
  Sense strand starting at position 3744 of SEQ ID NO: 1880761
auguucccucacuagacau

SEQ ID NO: 1991867 - RNA, 19 nt, Artificial Sequence
  Description of Artificial Sequence: Synthetic oligonucleotide
  Antisense strand to SEQ ID NO: 1991866
augucuagugagggaacau

SEQ ID NO: 1991868 - RNA, 19 nt, Artificial Sequence
  Description of Artificial Sequence: Synthetic oligonucleotide
  Sense strand starting at position 3841 of SEQ ID NO: 1880761
gaggauuggaguuggguga

SEQ ID NO: 1991869 - RNA, 19 nt, Artificial Sequence
  Description of Artificial Sequence: Synthetic oligonucleotide
  Antisense strand to SEQ ID NO: 1991868
ucacccaacuccaauccuc

SEQ ID NO: 1991870 - RNA, 19 nt, Artificial Sequence
  Description of Artificial Sequence: Synthetic oligonucleotide
  Sense strand starting at position 3882 of SEQ ID NO: 1880761
ggaucucuccagugacagu

SEQ ID NO: 1991871 - RNA, 19 nt, Artificial Sequence
  Description of Artificial Sequence: Synthetic oligonucleotide
  Antisense strand to SEQ ID NO: 1991870
acugucacuggagagaucc

SEQ ID NO: 1991872 - RNA, 19 nt, Artificial Sequence
  Description of Artificial Sequence: Synthetic oligonucleotide
  Sense strand starting at position 3979 of SEQ ID NO: 1880761
gugggaccuucucuguaag

SEQ ID NO: 1991873 - RNA, 19 nt, Artificial Sequence
  Description of Artificial Sequence: Synthetic oligonucleotide
  Antisense strand to SEQ ID NO: 1991872
cuuacagagaaggucccac

SEQ ID NO: 1991874 - RNA, 19 nt, Artificial Sequence
  Description of Artificial Sequence: Synthetic oligonucleotide
  Sense strand starting at position 59 of SEQ ID NO: 1880762
gugccuauuauugggauca

SEQ ID NO: 1991875 - RNA, 19 nt, Artificial Sequence
  Description of Artificial Sequence: Synthetic oligonucleotide
  Antisense strand to SEQ ID NO: 1991874
ugaucccaauaauaggcac

SEQ ID NO: 1991876 - RNA, 19 nt, Artificial Sequence
  Description of Artificial Sequence: Synthetic oligonucleotide
  Sense strand starting at position 86 of SEQ ID NO: 1880762
ugauacuugucagucauua

SEQ ID NO: 1991877 - RNA, 19 nt, Artificial Sequence
  Description of Artificial Sequence: Synthetic oligonucleotide
  Antisense strand to SEQ ID NO: 1991876
uaaugacugacaaguauca

SEQ ID NO: 1991878 - RNA, 19 nt, Artificial Sequence
  Description of Artificial Sequence: Synthetic oligonucleotide
  Sense strand starting at position 94 of SEQ ID NO: 1880762
gucagucauuaucuugaga

SEQ ID NO: 1991879 - RNA, 19 nt, Artificial Sequence
  Description of Artificial Sequence: Synthetic oligonucleotide
  Antisense strand to SEQ ID NO: 1991878
ucucaagauaaugacugac

SEQ ID NO: 1991880 - RNA, 19 nt, Artificial Sequence
  Description of Artificial Sequence: Synthetic oligonucleotide
  Sense strand starting at position 97 of SEQ ID NO: 1880762
agucauuaucuugagagcu

SEQ ID NO: 1991881 - RNA, 19 nt, Artificial Sequence
  Description of Artificial Sequence: Synthetic oligonucleotide
  Antisense strand to SEQ ID NO: 1991880
agcucucaagauaaugacu

SEQ ID NO: 1991882 - RNA, 19 nt, Artificial Sequence
  Description of Artificial Sequence: Synthetic oligonucleotide
  Sense strand starting at position 251 of SEQ ID NO: 1880762
agccaaguucccugaaaga

SEQ ID NO: 1991883 - RNA, 19 nt, Artificial Sequence
  Description of Artificial Sequence: Synthetic oligonucleotide
  Antisense strand to SEQ ID NO: 1991882
ucuuucagggaacuuggcu

SEQ ID NO: 1991884 - RNA, 19 nt, Artificial Sequence
  Description of Artificial Sequence: Synthetic oligonucleotide
  Sense strand starting at position 430 of SEQ ID NO: 1880762
guuaaacaccguuaucucu

SEQ ID NO: 1991885 - RNA, 19 nt, Artificial Sequence
  Description of Artificial Sequence: Synthetic oligonucleotide
  Antisense strand to SEQ ID NO: 1991884
agagauaacgguguuuaac

SEQ ID NO: 1991886 - RNA, 19 nt, Artificial Sequence
  Description of Artificial Sequence: Synthetic oligonucleotide
  Sense strand starting at position 445 of SEQ ID NO: 1880762
cucuguucuacagagguga

SEQ ID NO: 1991887 - RNA, 19 nt, Artificial Sequence
  Description of Artificial Sequence: Synthetic oligonucleotide
  Antisense strand to SEQ ID NO: 1991886
ucaccucuguagaacagag

SEQ ID NO: 1991888 - RNA, 19 nt, Artificial Sequence
  Description of Artificial Sequence: Synthetic oligonucleotide
  Sense strand starting at position 447 of SEQ ID NO: 1880762
cuguucuacagaggugaaa

SEQ ID NO: 1991889 - RNA, 19 nt, Artificial Sequence
  Description of Artificial Sequence: Synthetic oligonucleotide
  Antisense strand to SEQ ID NO: 1991888
uuucaccucuguagaacag

SEQ ID NO: 1991890 - RNA, 19 nt, Artificial Sequence
  Description of Artificial Sequence: Synthetic oligonucleotide
  Sense strand starting at position 547 of SEQ ID NO: 1880762
agaucauuguggucccaug

SEQ ID NO: 1991891 - RNA, 19 nt, Artificial Sequence
  Description of Artificial Sequence: Synthetic oligonucleotide
  Antisense strand to SEQ ID NO: 1991890
caugggaccacaaugaucu

SEQ ID NO: 1991892 - RNA, 19 nt, Artificial Sequence
  Description of Artificial Sequence: Synthetic oligonucleotide
  Sense strand starting at position 565 of SEQ ID NO: 1880762
guacaucaaccuugcaaga

SEQ ID NO: 1991893 - RNA, 19 nt, Artificial Sequence
  Description of Artificial Sequence: Synthetic oligonucleotide
  Antisense strand to SEQ ID NO: 1991892
ucuugcaagguugauguac

SEQ ID NO: 1991894 - RNA, 19 nt, Artificial Sequence
  Description of Artificial Sequence: Synthetic oligonucleotide
  Sense strand starting at position 576 of SEQ ID NO: 1880762
uugcaagacugauuccauu

SEQ ID NO: 1991895 - RNA, 19 nt, Artificial Sequence
  Description of Artificial Sequence: Synthetic oligonucleotide
  Antisense strand to SEQ ID NO: 1991894
aauggaaucagucuugcaa

SEQ ID NO: 1991896 - RNA, 19 nt, Artificial Sequence
  Description of Artificial Sequence: Synthetic oligonucleotide
  Sense strand starting at position 641 of SEQ ID NO: 1880762
gccguaaucagacugugcu

SEQ ID NO: 1991897 - RNA, 19 nt, Artificial Sequence
  Description of Artificial Sequence: Synthetic oligonucleotide
  Antisense strand to SEQ ID NO: 1991896
agcacagucugauuacggc

SEQ ID NO: 1991898 - RNA, 19 nt, Artificial Sequence
  Description of Artificial Sequence: Synthetic oligonucleotide
  Sense strand starting at position 655 of SEQ ID NO: 1880762
gugcuaggucuugcugcua

SEQ ID NO: 1991899 - RNA, 19 nt, Artificial Sequence
  Description of Artificial Sequence: Synthetic oligonucleotide
  Antisense strand to SEQ ID NO: 1991898
uagcagcaagaccuagcac

SEQ ID NO: 1991900 - RNA, 19 nt, Artificial Sequence
  Description of Artificial Sequence: Synthetic oligonucleotide
  Sense strand starting at position 689 of SEQ ID NO: 1880762
uggcuucccugagugggaa

SEQ ID NO: 1991901 - RNA, 19 nt, Artificial Sequence
  Description of Artificial Sequence: Synthetic oligonucleotide
  Antisense strand to SEQ ID NO: 1991900
uucccacucagggaagcca

SEQ ID NO: 1991902 - RNA, 19 nt, Artificial Sequence
  Description of Artificial Sequence: Synthetic oligonucleotide
  Sense strand starting at position 690 of SEQ ID NO: 1880762
ggcuucccugagugggaaa

SEQ ID NO: 1991903 - RNA, 19 nt, Artificial Sequence
  Description of Artificial Sequence: Synthetic oligonucleotide
  Antisense strand to SEQ ID NO: 1991902
uuucccacucagggaagcc

SEQ ID NO: 1991904 - RNA, 19 nt, Artificial Sequence
  Description of Artificial Sequence: Synthetic oligonucleotide
  Sense strand starting at position 692 of SEQ ID NO: 1880762
cuucccugagugggaaauu

SEQ ID NO: 1991905 - RNA, 19 nt, Artificial Sequence
  Description of Artificial Sequence: Synthetic oligonucleotide
  Antisense strand to SEQ ID NO: 1991904
aauuucccacucagggaag

SEQ ID NO: 1991906 - RNA, 19 nt, Artificial Sequence
  Description of Artificial Sequence: Synthetic oligonucleotide
  Sense strand starting at position 703 of SEQ ID NO: 1880762
gggaaauuagcaugaacuc

SEQ ID NO: 1991907 - RNA, 19 nt, Artificial Sequence
  Description of Artificial Sequence: Synthetic oligonucleotide
  Antisense strand to SEQ ID NO: 1991906
gaguucaugcuaauuuccc

SEQ ID NO: 1991908 - RNA, 19 nt, Artificial Sequence
  Description of Artificial Sequence: Synthetic oligonucleotide
  Sense strand starting at position 827 of SEQ ID NO: 1880762
cuguuauagcgggauggau

SEQ ID NO: 1991909 - RNA, 19 nt, Artificial Sequence
  Description of Artificial Sequence: Synthetic oligonucleotide
  Antisense strand to SEQ ID NO: 1991908
auccaucccgcuauaacag

SEQ ID NO: 1991910 - RNA, 19 nt, Artificial Sequence
  Description of Artificial Sequence: Synthetic oligonucleotide
  Sense strand starting at position 829 of SEQ ID NO: 1880762
guuauagcgggauggauau

SEQ ID NO: 1991911 - RNA, 19 nt, Artificial Sequence
  Description of Artificial Sequence: Synthetic oligonucleotide
  Antisense strand to SEQ ID NO: 1991910
auauccaucccgcuauaac

SEQ ID NO: 1991912 - RNA, 19 nt, Artificial Sequence
  Description of Artificial Sequence: Synthetic oligonucleotide
  Sense strand starting at position 836 of SEQ ID NO: 1880762
cgggauggauaucucaagu

SEQ ID NO: 1991913 - RNA, 19 nt, Artificial Sequence
  Description of Artificial Sequence: Synthetic oligonucleotide
  Antisense strand to SEQ ID NO: 1991912
acuugagauauccaucccg

SEQ ID NO: 1991914 - RNA, 19 nt, Artificial Sequence
  Description of Artificial Sequence: Synthetic oligonucleotide
  Sense strand starting at position 1270 of SEQ ID NO: 1880762
cguccaaccugauuccaau

SEQ ID NO: 1991915 - RNA, 19 nt, Artificial Sequence
  Description of Artificial Sequence: Synthetic oligonucleotide
  Antisense strand to SEQ ID NO: 1991914
auuggaaucagguuggacg

SEQ ID NO: 1991916 - RNA, 19 nt, Artificial Sequence
  Description of Artificial Sequence: Synthetic oligonucleotide
  Sense strand starting at position 1454 of SEQ ID NO: 1880762
uccagaguuugaccuuuaa

SEQ ID NO: 1991917 - RNA, 19 nt, Artificial Sequence
  Description of Artificial Sequence: Synthetic oligonucleotide
  Antisense strand to SEQ ID NO: 1991916
uuaaaggucaaacucugga

SEQ ID NO: 1991918 - RNA, 19 nt, Artificial Sequence
  Description of Artificial Sequence: Synthetic oligonucleotide
  Sense strand starting at position 1475 of SEQ ID NO: 1880762
gagucagagcuggguugaa

SEQ ID NO: 1991919 - RNA, 19 nt, Artificial Sequence
  Description of Artificial Sequence: Synthetic oligonucleotide
  Antisense strand to SEQ ID NO: 1991918
uucaacccagcucugacuc

SEQ ID NO: 1991920 - RNA, 19 nt, Artificial Sequence
  Description of Artificial Sequence: Synthetic oligonucleotide
  Sense strand starting at position 1553 of SEQ ID NO: 1880762
gcuccuuuaccauagugaa

SEQ ID NO: 1991921 - RNA, 19 nt, Artificial Sequence
  Description of Artificial Sequence: Synthetic oligonucleotide
  Antisense strand to SEQ ID NO: 1991920
uucacuaugguaaaggagc

SEQ ID NO: 1991922 - RNA, 19 nt, Artificial Sequence
  Description of Artificial Sequence: Synthetic oligonucleotide
  Sense strand starting at position 1567 of SEQ ID NO: 1880762
gugaauagcuucucugaca

SEQ ID NO: 1991923 - RNA, 19 nt, Artificial Sequence
  Description of Artificial Sequence: Synthetic oligonucleotide
  Antisense strand to SEQ ID NO: 1991922
ugucagagaagcuauucac

SEQ ID NO: 1991924 - RNA, 19 nt, Artificial Sequence
  Description of Artificial Sequence: Synthetic oligonucleotide
  Sense strand starting at position 1568 of SEQ ID NO: 1880762
ugaauagcuucucugacaa

SEQ ID NO: 1991925 - RNA, 19 nt, Artificial Sequence
  Description of Artificial Sequence: Synthetic oligonucleotide
  Antisense strand to SEQ ID NO: 1991924
uugucagagaagcuauuca

SEQ ID NO: 1991926 - RNA, 19 nt, Artificial Sequence
  Description of Artificial Sequence: Synthetic oligonucleotide
  Sense strand starting at position 1695 of SEQ ID NO: 1880762
augcauuuguguccggaau

SEQ ID NO: 1991927 - RNA, 19 nt, Artificial Sequence
  Description of Artificial Sequence: Synthetic oligonucleotide
  Antisense strand to SEQ ID NO: 1991926
auuccggacacaaaugcau

SEQ ID NO: 1991928 - RNA, 19 nt, Artificial Sequence
  Description of Artificial Sequence: Synthetic oligonucleotide
  Sense strand starting at position 1696 of SEQ ID NO: 1880762
ugcauuuguguccggaauu

SEQ ID NO: 1991929 - RNA, 19 nt, Artificial Sequence
  Description of Artificial Sequence: Synthetic oligonucleotide
  Antisense strand to SEQ ID NO: 1991928
aauuccggacacaaaugca

SEQ ID NO: 1991930 - RNA, 19 nt, Artificial Sequence
  Description of Artificial Sequence: Synthetic oligonucleotide
  Sense strand starting at position 1751 of SEQ ID NO: 1880762
ggacccuccagguguuaca

SEQ ID NO: 1991931 - RNA, 19 nt, Artificial Sequence
  Description of Artificial Sequence: Synthetic oligonucleotide
  Antisense strand to SEQ ID NO: 1991930
uguaacaccuggagggucc

SEQ ID NO: 1991932 - RNA, 19 nt, Artificial Sequence
  Description of Artificial Sequence: Synthetic oligonucleotide
  Sense strand starting at position 2324 of SEQ ID NO: 1880762
auauaaagauuguccaagu

SEQ ID NO: 1991933 - RNA, 19 nt, Artificial Sequence
  Description of Artificial Sequence: Synthetic oligonucleotide
  Antisense strand to SEQ ID NO: 1991932
acuuggacaaucuuuauau

SEQ ID NO: 1991934 - RNA, 19 nt, Artificial Sequence
  Description of Artificial Sequence: Synthetic oligonucleotide
  Sense strand starting at position 2357 of SEQ ID NO: 1880762
auagauauagagugcugau

SEQ ID NO: 1991935 - RNA, 19 nt, Artificial Sequence
  Description of Artificial Sequence: Synthetic oligonucleotide
  Antisense strand to SEQ ID NO: 1991934
aucagcacucuauaucuau

SEQ ID NO: 1991936 - RNA, 19 nt, Artificial Sequence
  Description of Artificial Sequence: Synthetic oligonucleotide
  Sense strand starting at position 3446 of SEQ ID NO: 1880762
gaagaagaaugcucaguaa

SEQ ID NO: 1991937 - RNA, 19 nt, Artificial Sequence
  Description of Artificial Sequence: Synthetic oligonucleotide
  Antisense strand to SEQ ID NO: 1991936
uuacugagcauucuucuuc

SEQ ID NO: 1991938 - RNA, 19 nt, Artificial Sequence
  Description of Artificial Sequence: Synthetic oligonucleotide
  Sense strand starting at position 3567 of SEQ ID NO: 1880762
aguguaucuauguaaagug

SEQ ID NO: 1991939 - RNA, 19 nt, Artificial Sequence
  Description of Artificial Sequence: Synthetic oligonucleotide
  Antisense strand to SEQ ID NO: 1991938
cacuuuacauagauacacu

SEQ ID NO: 1991940 - RNA, 19 nt, Artificial Sequence
  Description of Artificial Sequence: Synthetic oligonucleotide
  Sense strand starting at position 3598 of SEQ ID NO: 1880762
ggcucuugucaucauaaca

SEQ ID NO: 1991941 - RNA, 19 nt, Artificial Sequence
  Description of Artificial Sequence: Synthetic oligonucleotide
  Antisense strand to SEQ ID NO: 1991940
uguuaugaugacaagagcc

SEQ ID NO: 1991942 - RNA, 19 nt, Artificial Sequence
  Description of Artificial Sequence: Synthetic oligonucleotide
  Sense strand starting at position 3684 of SEQ ID NO: 1880762
aauggucaggccugagaca

SEQ ID NO: 1991943 - RNA, 19 nt, Artificial Sequence
  Description of Artificial Sequence: Synthetic oligonucleotide
  Antisense strand to SEQ ID NO: 1991942
ugucucaggccugaccauu

SEQ ID NO: 1991944 - RNA, 19 nt, Artificial Sequence
  Description of Artificial Sequence: Synthetic oligonucleotide
  Sense strand starting at position 3706 of SEQ ID NO: 1880762
auaguaaggcucuaaacca

SEQ ID NO: 1991945 - RNA, 19 nt, Artificial Sequence
  Description of Artificial Sequence: Synthetic oligonucleotide
  Antisense strand to SEQ ID NO: 1991944
ugguuuagagccuuacuau

SEQ ID NO: 1991946 - RNA, 19 nt, Artificial Sequence
  Description of Artificial Sequence: Synthetic oligonucleotide
  Sense strand starting at position 3916 of SEQ ID NO: 1880762
auugccuuauggguaauaa

SEQ ID NO: 1991947 - RNA, 19 nt, Artificial Sequence
  Description of Artificial Sequence: Synthetic oligonucleotide
  Antisense strand to SEQ ID NO: 1991946
uuauuacccauaaggcaau

SEQ ID NO: 1991948 - RNA, 19 nt, Artificial Sequence
  Description of Artificial Sequence: Synthetic oligonucleotide
  Sense strand starting at position 3917 of SEQ ID NO: 1880762
uugccuuauggguaauaac

SEQ ID NO: 1991949 - RNA, 19 nt, Artificial Sequence
  Description of Artificial Sequence: Synthetic oligonucleotide
  Antisense strand to SEQ ID NO: 1991948
guuauuacccauaaggcaa

SEQ ID NO: 1991950 - RNA, 19 nt, Artificial Sequence
  Description of Artificial Sequence: Synthetic oligonucleotide
  Sense strand starting at position 3937 of SEQ ID NO: 1880762
guguuuguaguggaucaau

SEQ ID NO: 1991951 - RNA, 19 nt, Artificial Sequence
  Description of Artificial Sequence: Synthetic oligonucleotide
  Antisense strand to SEQ ID NO: 1991950
auugauccacuacaaacac

SEQ ID NO: 1991952 - RNA, 19 nt, Artificial Sequence
  Description of Artificial Sequence: Synthetic oligonucleotide
  Sense strand starting at position 3940 of SEQ ID NO: 1880762
uuuguaguggaucaauauu

SEQ ID NO: 1991953 - RNA, 19 nt, Artificial Sequence
  Description of Artificial Sequence: Synthetic oligonucleotide
  Antisense strand to SEQ ID NO: 1991952
aauauugauccacuacaaa

SEQ ID NO: 1991954 - RNA, 19 nt, Artificial Sequence
  Description of Artificial Sequence: Synthetic oligonucleotide
  Sense strand starting at position 6 of SEQ ID NO: 1880763
uagucucuaccgcaaggau

SEQ ID NO: 1991955 - RNA, 19 nt, Artificial Sequence
  Description of Artificial Sequence: Synthetic oligonucleotide
  Antisense strand to SEQ ID NO: 1991954
auccuugcgguagagacua

SEQ ID NO: 1991956 - RNA, 19 nt, Artificial Sequence
  Description of Artificial Sequence: Synthetic oligonucleotide
  Sense strand starting at position 149 of SEQ ID NO: 1880763
ccaucuguaccauggacaa

SEQ ID NO: 1991957 - RNA, 19 nt, Artificial Sequence
  Description of Artificial Sequence: Synthetic oligonucleotide
  Antisense strand to SEQ ID NO: 1991956
uuguccaugguacagaugg

SEQ ID NO: 1991958 - RNA, 19 nt, Artificial Sequence
  Description of Artificial Sequence: Synthetic oligonucleotide
  Sense strand starting at position 288 of SEQ ID NO: 1880763
uccagagguugcuucugaa

SEQ ID NO: 1991959 - RNA, 19 nt, Artificial Sequence
  Description of Artificial Sequence: Synthetic oligonucleotide
  Antisense strand to SEQ ID NO: 1991958
uucagaagcaaccucugga

SEQ ID NO: 1991960 - RNA, 19 nt, Artificial Sequence
  Description of Artificial Sequence: Synthetic oligonucleotide
  Sense strand starting at position 355 of SEQ ID NO: 1880763
gggcuuauuugagccguua

SEQ ID NO: 1991961 - RNA, 19 nt, Artificial Sequence
  Description of Artificial Sequence: Synthetic oligonucleotide
  Antisense strand to SEQ ID NO: 1991960
uaacggcucaaauaagccc

SEQ ID NO: 1991962 - RNA, 19 nt, Artificial Sequence
  Description of Artificial Sequence: Synthetic oligonucleotide
  Sense strand starting at position 357 of SEQ ID NO: 1880763
gcuuauuugagccguuauu

SEQ ID NO: 1991963 - RNA, 19 nt, Artificial Sequence
  Description of Artificial Sequence: Synthetic oligonucleotide
  Antisense strand to SEQ ID NO: 1991962
aauaacggcucaaauaagc

SEQ ID NO: 1991964 - RNA, 19 nt, Artificial Sequence
  Description of Artificial Sequence: Synthetic oligonucleotide
  Sense strand starting at position 373 of SEQ ID NO: 1880763
auugcauugugguugaaag

SEQ ID NO: 1991965 - RNA, 19 nt, Artificial Sequence
  Description of Artificial Sequence: Synthetic oligonucleotide
  Antisense strand to SEQ ID NO: 1991964
cuuucaaccacaaugcaau

SEQ ID NO: 1991966 - RNA, 19 nt, Artificial Sequence
  Description of Artificial Sequence: Synthetic oligonucleotide
  Sense strand starting at position 558 of SEQ ID NO: 1880763
ucccauguucucuaaaugu

SEQ ID NO: 1991967 - RNA, 19 nt, Artificial Sequence
  Description of Artificial Sequence: Synthetic oligonucleotide
  Antisense strand to SEQ ID NO: 1991966
acauuuagagaacauggga

SEQ ID NO: 1991968 - RNA, 19 nt, Artificial Sequence
  Description of Artificial Sequence: Synthetic oligonucleotide
  Sense strand starting at position 582 of SEQ ID NO: 1880763
cagucaauccucugaggca

SEQ ID NO: 1991969 - RNA, 19 nt, Artificial Sequence
  Description of Artificial Sequence: Synthetic oligonucleotide
  Antisense strand to SEQ ID NO: 1991968
ugccucagaggauugacug

SEQ ID NO: 1991970 - RNA, 19 nt, Artificial Sequence
  Description of Artificial Sequence: Synthetic oligonucleotide
  Sense strand starting at position 649 of SEQ ID NO: 1880763
caugccugguacuuagaua

SEQ ID NO: 1991971 - RNA, 19 nt, Artificial Sequence
  Description of Artificial Sequence: Synthetic oligonucleotide
  Antisense strand to SEQ ID NO: 1991970
uaucuaaguaccaggcaug

SEQ ID NO: 1991972 - RNA, 19 nt, Artificial Sequence
  Description of Artificial Sequence: Synthetic oligonucleotide
  Sense strand starting at position 760 of SEQ ID NO: 1880763
agggauguguuuccuagga

SEQ ID NO: 1991973 - RNA, 19 nt, Artificial Sequence
  Description of Artificial Sequence: Synthetic oligonucleotide
  Antisense strand to SEQ ID NO: 1991972
uccuaggaaacacaucccu

SEQ ID NO: 1991974 - RNA, 19 nt, Artificial Sequence
  Description of Artificial Sequence: Synthetic oligonucleotide
  Sense strand starting at position 764 of SEQ ID NO: 1880763
auguguuuccuaggacaga

SEQ ID NO: 1991975 - RNA, 19 nt, Artificial Sequence
  Description of Artificial Sequence: Synthetic oligonucleotide
  Antisense strand to SEQ ID NO: 1991974
ucuguccuaggaaacacau

SEQ ID NO: 1991976 - RNA, 19 nt, Artificial Sequence
  Description of Artificial Sequence: Synthetic oligonucleotide
  Sense strand starting at position 838 of SEQ ID NO: 1880763
auggguuuccuaggacaga

SEQ ID NO: 1991977 - RNA, 19 nt, Artificial Sequence
  Description of Artificial Sequence: Synthetic oligonucleotide
  Antisense strand to SEQ ID NO: 1991976
ucuguccuaggaaacccau

SEQ ID NO: 1991978 - RNA, 19 nt, Artificial Sequence
  Description of Artificial Sequence: Synthetic oligonucleotide
  Sense strand starting at position 1104 of SEQ ID NO: 1880763
caguuaaugucagugggac

SEQ ID NO: 1991979 - RNA, 19 nt, Artificial Sequence
  Description of Artificial Sequence: Synthetic oligonucleotide
  Antisense strand to SEQ ID NO: 1991978
gucccacugacauuaacug

SEQ ID NO: 1991980 - RNA, 19 nt, Artificial Sequence
  Description of Artificial Sequence: Synthetic oligonucleotide
  Sense strand starting at position 1266 of SEQ ID NO: 1880763
cagggagucugucugcaaa

SEQ ID NO: 1991981 - RNA, 19 nt, Artificial Sequence
  Description of Artificial Sequence: Synthetic oligonucleotide
  Antisense strand to SEQ ID NO: 1991980
uuugcagacagacucccug

SEQ ID NO: 1991982 - RNA, 19 nt, Artificial Sequence
  Description of Artificial Sequence: Synthetic oligonucleotide
  Sense strand starting at position 1269 of SEQ ID NO: 1880763
ggagucugucugcaaacaa

SEQ ID NO: 1991983 - RNA, 19 nt, Artificial Sequence
  Description of Artificial Sequence: Synthetic oligonucleotide
  Antisense strand to SEQ ID NO: 1991982
uuguuugcagacagacucc

SEQ ID NO: 1991984 - RNA, 19 nt, Artificial Sequence
  Description of Artificial Sequence: Synthetic oligonucleotide
  Sense strand starting at position 1561 of SEQ ID NO: 1880763
agagcagucugcucaaaga

SEQ ID NO: 1991985 - RNA, 19 nt, Artificial Sequence
  Description of Artificial Sequence: Synthetic oligonucleotide
  Antisense strand to SEQ ID NO: 1991984
ucuuugagcagacugcucu

SEQ ID NO: 1991986 - RNA, 19 nt, Artificial Sequence
  Description of Artificial Sequence: Synthetic oligonucleotide
  Sense strand starting at position 2222 of SEQ ID NO: 1880763
gacuuugcauaggugacau

SEQ ID NO: 1991987 - RNA, 19 nt, Artificial Sequence
  Description of Artificial Sequence: Synthetic oligonucleotide
  Antisense strand to SEQ ID NO: 1991986
augucaccuaugcaaaguc

SEQ ID NO: 1991988 - RNA, 19 nt, Artificial Sequence
  Description of Artificial Sequence: Synthetic oligonucleotide
  Sense strand starting at position 2302 of SEQ ID NO: 1880763
cggcacaucgucgaaauuu

SEQ ID NO: 1991989 - RNA, 19 nt, Artificial Sequence
  Description of Artificial Sequence: Synthetic oligonucleotide
  Antisense strand to SEQ ID NO: 1991988
aaauuucgacgaugugccg

SEQ ID NO: 1991990 - RNA, 19 nt, Artificial Sequence
  Description of Artificial Sequence: Synthetic oligonucleotide
  Sense strand starting at position 2318 of SEQ ID NO: 1880763
uuucuaacucugcagggaa

SEQ ID NO: 1991991 - RNA, 19 nt, Artificial Sequence
  Description of Artificial Sequence: Synthetic oligonucleotide
  Antisense strand to SEQ ID NO: 1991990
uucccugcagaguuagaaa

SEQ ID NO: 1991992 - RNA, 19 nt, Artificial Sequence
  Description of Artificial Sequence: Synthetic oligonucleotide
  Sense strand starting at position 2345 of SEQ ID NO: 1880763
guacuucggcuuuacaaau

SEQ ID NO: 1991993 - RNA, 19 nt, Artificial Sequence
  Description of Artificial Sequence: Synthetic oligonucleotide
  Antisense strand to SEQ ID NO: 1991992
auuuguaaagccgaaguac

SEQ ID NO: 1991994 - RNA, 19 nt, Artificial Sequence
  Description of Artificial Sequence: Synthetic oligonucleotide
  Sense strand starting at position 2798 of SEQ ID NO: 1880763
uccgaauuccaauggacau

SEQ ID NO: 1991995 - RNA, 19 nt, Artificial Sequence
  Description of Artificial Sequence: Synthetic oligonucleotide
  Antisense strand to SEQ ID NO: 1991994
auguccauuggaauucgga

SEQ ID NO: 1991996 - RNA, 19 nt, Artificial Sequence
  Description of Artificial Sequence: Synthetic oligonucleotide
  Sense strand starting at position 2909 of SEQ ID NO: 1880763
acauucuguucuccaggaa

SEQ ID NO: 1991997 - RNA, 19 nt, Artificial Sequence
  Description of Artificial Sequence: Synthetic oligonucleotide
  Antisense strand to SEQ ID NO: 1991996
uuccuggagaacagaaugu

SEQ ID NO: 1991998 - RNA, 19 nt, Artificial Sequence
  Description of Artificial Sequence: Synthetic oligonucleotide
  Sense strand starting at position 2993 of SEQ ID NO: 1880763
agauacuaguaucuccauu

SEQ ID NO: 1991999 - RNA, 19 nt, Artificial Sequence
  Description of Artificial Sequence: Synthetic oligonucleotide
  Antisense strand to SEQ ID NO: 1991998
aauggagauacuaguaucu

SEQ ID NO: 1992000 - RNA, 19 nt, Artificial Sequence
  Description of Artificial Sequence: Synthetic oligonucleotide
  Sense strand starting at position 3033 of SEQ ID NO: 1880763
cuuauaggauuguugugau

SEQ ID NO: 1992001 - RNA, 19 nt, Artificial Sequence
  Description of Artificial Sequence: Synthetic oligonucleotide
  Antisense strand to SEQ ID NO: 1992000
aucacaacaauccuauaag

SEQ ID NO: 1992002 - RNA, 19 nt, Artificial Sequence
  Description of Artificial Sequence: Synthetic oligonucleotide
  Sense strand starting at position 3131 of SEQ ID NO: 1880763
gggaacacuguaggugaau

SEQ ID NO: 1992003 - RNA, 19 nt, Artificial Sequence
  Description of Artificial Sequence: Synthetic oligonucleotide
  Antisense strand to SEQ ID NO: 1992002
auucaccuacaguguuccc

SEQ ID NO: 1992004 - RNA, 19 nt, Artificial Sequence
  Description of Artificial Sequence: Synthetic oligonucleotide
  Sense strand starting at position 3204 of SEQ ID NO: 1880763
aucaauuguugagugugaa

SEQ ID NO: 1992005 - RNA, 19 nt, Artificial Sequence
  Description of Artificial Sequence: Synthetic oligonucleotide
  Antisense strand to SEQ ID NO: 1992004
uucacacucaacaauugau

SEQ ID NO: 1992006 - RNA, 19 nt, Artificial Sequence
  Description of Artificial Sequence: Synthetic oligonucleotide
  Sense strand starting at position 3214 of SEQ ID NO: 1880763
gagugugaacccuggaaua

SEQ ID NO: 1992007 - RNA, 19 nt, Artificial Sequence
  Description of Artificial Sequence: Synthetic oligonucleotide
  Antisense strand to SEQ ID NO: 1992006
uauuccaggguucacacuc

SEQ ID NO: 1992008 - RNA, 19 nt, Artificial Sequence
  Description of Artificial Sequence: Synthetic oligonucleotide
  Sense strand starting at position 3350 of SEQ ID NO: 1880763
cccuuaagaguugauguag

SEQ ID NO: 1992009 - RNA, 19 nt, Artificial Sequence
  Description of Artificial Sequence: Synthetic oligonucleotide
  Antisense strand to SEQ ID NO: 1992008
cuacaucaacucuuaaggg

SEQ ID NO: 1992010 - RNA, 19 nt, Artificial Sequence
  Description of Artificial Sequence: Synthetic oligonucleotide
  Sense strand starting at position 3356 of SEQ ID NO: 1880763
agaguugauguagggacuu

SEQ ID NO: 1992011 - RNA, 19 nt, Artificial Sequence
  Description of Artificial Sequence: Synthetic oligonucleotide
  Antisense strand to SEQ ID NO: 1992010
aagucccuacaucaacucu

SEQ ID NO: 1992012 - RNA, 19 nt, Artificial Sequence
  Description of Artificial Sequence: Synthetic oligonucleotide
  Sense strand starting at position 3362 of SEQ ID NO: 1880763
gauguagggacuuaaguuc

SEQ ID NO: 1992013 - RNA, 19 nt, Artificial Sequence
  Description of Artificial Sequence: Synthetic oligonucleotide
  Antisense strand to SEQ ID NO: 1992012
gaacuuaagucccuacauc

SEQ ID NO: 1992014 - RNA, 19 nt, Artificial Sequence
  Description of Artificial Sequence: Synthetic oligonucleotide
  Sense strand starting at position 3379 of SEQ ID NO: 1880763
uccuuaagggcagaaguuu

SEQ ID NO: 1992015 - RNA, 19 nt, Artificial Sequence
  Description of Artificial Sequence: Synthetic oligonucleotide
  Antisense strand to SEQ ID NO: 1992014
aaacuucugcccuuaagga

SEQ ID NO: 1992016 - RNA, 19 nt, Artificial Sequence
  Description of Artificial Sequence: Synthetic oligonucleotide
  Sense strand starting at position 3423 of SEQ ID NO: 1880763
gcuuauuuauuugaaguag

SEQ ID NO: 1992017 - RNA, 19 nt, Artificial Sequence
  Description of Artificial Sequence: Synthetic oligonucleotide
  Antisense strand to SEQ ID NO: 1992016
cuacuucaaauaaauaagc

SEQ ID NO: 1992018 - RNA, 19 nt, Artificial Sequence
  Description of Artificial Sequence: Synthetic oligonucleotide
  Sense strand starting at position 3461 of SEQ ID NO: 1880763
acugacacacgcugauaua

SEQ ID NO: 1992019 - RNA, 19 nt, Artificial Sequence
  Description of Artificial Sequence: Synthetic oligonucleotide
  Antisense strand to SEQ ID NO: 1992018
uauaucagcgugugucagu

SEQ ID NO: 1992020 - RNA, 19 nt, Artificial Sequence
  Description of Artificial Sequence: Synthetic oligonucleotide
  Sense strand starting at position 3462 of SEQ ID NO: 1880763
cugacacacgcugauauau

SEQ ID NO: 1992021 - RNA, 19 nt, Artificial Sequence
  Description of Artificial Sequence: Synthetic oligonucleotide
  Antisense strand to SEQ ID NO: 1992020
auauaucagcgugugucag

SEQ ID NO: 1992022 - RNA, 19 nt, Artificial Sequence
  Description of Artificial Sequence: Synthetic oligonucleotide
  Sense strand starting at position 3579 of SEQ ID NO: 1880763
uggugucuucuauauucuu

SEQ ID NO: 1992023 - RNA, 19 nt, Artificial Sequence
  Description of Artificial Sequence: Synthetic oligonucleotide
  Antisense strand to SEQ ID NO: 1992022
aagaauauagaagacacca

SEQ ID NO: 1992024 - RNA, 19 nt, Artificial Sequence
  Description of Artificial Sequence: Synthetic oligonucleotide
  Sense strand starting at position 3733 of SEQ ID NO: 1880763
cucucuucuccaugaugag

SEQ ID NO: 1992025 - RNA, 19 nt, Artificial Sequence
  Description of Artificial Sequence: Synthetic oligonucleotide
  Antisense strand to SEQ ID NO: 1992024
cucaucauggagaagagag

SEQ ID NO: 1992026 - RNA, 19 nt, Artificial Sequence
  Description of Artificial Sequence: Synthetic oligonucleotide
  Sense strand starting at position 3749 of SEQ ID NO: 1880763
gagaauaguaaugggaguu

SEQ ID NO: 1992027 - RNA, 19 nt, Artificial Sequence
  Description of Artificial Sequence: Synthetic oligonucleotide
  Antisense strand to SEQ ID NO: 1992026
aacucccauuacuauucuc

SEQ ID NO: 1992028 - RNA, 19 nt, Artificial Sequence
  Description of Artificial Sequence: Synthetic oligonucleotide
  Sense strand starting at position 3777 of SEQ ID NO: 1880763
gguguugugaaucaauauc

SEQ ID NO: 1992029 - RNA, 19 nt, Artificial Sequence
  Description of Artificial Sequence: Synthetic oligonucleotide
  Antisense strand to SEQ ID NO: 1992028
gauauugauucacaacacc

SEQ ID NO: 1992030 - RNA, 19 nt, Artificial Sequence
  Description of Artificial Sequence: Synthetic oligonucleotide
  Sense strand starting at position 3884 of SEQ ID NO: 1880763
cagaguauccaauguguga

SEQ ID NO: 1992031 - RNA, 19 nt, Artificial Sequence
  Description of Artificial Sequence: Synthetic oligonucleotide
  Antisense strand to SEQ ID NO: 1992030
ucacacauuggauacucug

SEQ ID NO: 1992032 - RNA, 19 nt, Artificial Sequence
  Description of Artificial Sequence: Synthetic oligonucleotide
  Sense strand starting at position 3895 of SEQ ID NO: 1880763
augugugaguuaccauaau

SEQ ID NO: 1992033 - RNA, 19 nt, Artificial Sequence
  Description of Artificial Sequence: Synthetic oligonucleotide
  Antisense strand to SEQ ID NO: 1992032
auuaugguaacucacacau

SEQ ID NO: 1992034 - RNA, 19 nt, Artificial Sequence
  Description of Artificial Sequence: Synthetic oligonucleotide
  Sense strand starting at position 128 of SEQ ID NO: 1880764
cgugcuuaucuucuaacgu

SEQ ID NO: 1992035 - RNA, 19 nt, Artificial Sequence
  Description of Artificial Sequence: Synthetic oligonucleotide
  Antisense strand to SEQ ID NO: 1992034
acguuagaagauaagcacg

SEQ ID NO: 1992036 - RNA, 19 nt, Artificial Sequence
  Description of Artificial Sequence: Synthetic oligonucleotide
  Sense strand starting at position 148 of SEQ ID NO: 1880764
acuuaauuaucuguuaggu

SEQ ID NO: 1992037 - RNA, 19 nt, Artificial Sequence
  Description of Artificial Sequence: Synthetic oligonucleotide
  Antisense strand to SEQ ID NO: 1992036
accuaacagauaauuaagu

SEQ ID NO: 1992038 - RNA, 19 nt, Artificial Sequence
  Description of Artificial Sequence: Synthetic oligonucleotide
  Sense strand starting at position 198 of SEQ ID NO: 1880764
acgcuaauuccauaggaaa

SEQ ID NO: 1992039 - RNA, 19 nt, Artificial Sequence
  Description of Artificial Sequence: Synthetic oligonucleotide
  Antisense strand to SEQ ID NO: 1992038
uuuccuauggaauuagcgu

SEQ ID NO: 1992040 - RNA, 19 nt, Artificial Sequence
  Description of Artificial Sequence: Synthetic oligonucleotide
  Sense strand starting at position 265 of SEQ ID NO: 1880764
ucccaaacaucuguguaaa

SEQ ID NO: 1992041 - RNA, 19 nt, Artificial Sequence
  Description of Artificial Sequence: Synthetic oligonucleotide
  Antisense strand to SEQ ID NO: 1992040
uuuacacagauguuuggga

SEQ ID NO: 1992042 - RNA, 19 nt, Artificial Sequence
  Description of Artificial Sequence: Synthetic oligonucleotide
  Sense strand starting at position 266 of SEQ ID NO: 1880764
cccaaacaucuguguaaag

SEQ ID NO: 1992043 - RNA, 19 nt, Artificial Sequence
  Description of Artificial Sequence: Synthetic oligonucleotide
  Antisense strand to SEQ ID NO: 1992042
cuuuacacagauguuuggg

SEQ ID NO: 1992044 - RNA, 19 nt, Artificial Sequence
  Description of Artificial Sequence: Synthetic oligonucleotide
  Sense strand starting at position 287 of SEQ ID NO: 1880764
guaucugcccuauagcaga

SEQ ID NO: 1992045 - RNA, 19 nt, Artificial Sequence
  Description of Artificial Sequence: Synthetic oligonucleotide
  Antisense strand to SEQ ID NO: 1992044
ucugcuauagggcagauac

SEQ ID NO: 1992046 - RNA, 19 nt, Artificial Sequence
  Description of Artificial Sequence: Synthetic oligonucleotide
  Sense strand starting at position 292 of SEQ ID NO: 1880764
ugcccuauagcagacauau

SEQ ID NO: 1992047 - RNA, 19 nt, Artificial Sequence
  Description of Artificial Sequence: Synthetic oligonucleotide
  Antisense strand to SEQ ID NO: 1992046
auaugucugcuauagggca

SEQ ID NO: 1992048 - RNA, 19 nt, Artificial Sequence
  Description of Artificial Sequence: Synthetic oligonucleotide
  Sense strand starting at position 349 of SEQ ID NO: 1880764
cagacuucugaagguguga

SEQ ID NO: 1992049 - RNA, 19 nt, Artificial Sequence
  Description of Artificial Sequence: Synthetic oligonucleotide
  Antisense strand to SEQ ID NO: 1992048
ucacaccuucagaagucug

SEQ ID NO: 1992050 - RNA, 19 nt, Artificial Sequence
  Description of Artificial Sequence: Synthetic oligonucleotide
  Sense strand starting at position 351 of SEQ ID NO: 1880764
gacuucugaaggugugaua

SEQ ID NO: 1992051 - RNA, 19 nt, Artificial Sequence
  Description of Artificial Sequence: Synthetic oligonucleotide
  Antisense strand to SEQ ID NO: 1992050
uaucacaccuucagaaguc

SEQ ID NO: 1992052 - RNA, 19 nt, Artificial Sequence
  Description of Artificial Sequence: Synthetic oligonucleotide
  Sense strand starting at position 400 of SEQ ID NO: 1880764
ucucgcuauguuucuggua

SEQ ID NO: 1992053 - RNA, 19 nt, Artificial Sequence
  Description of Artificial Sequence: Synthetic oligonucleotide
  Antisense strand to SEQ ID NO: 1992052
uaccagaaacauagcgaga

SEQ ID NO: 1992054 - RNA, 19 nt, Artificial Sequence
  Description of Artificial Sequence: Synthetic oligonucleotide
  Sense strand starting at position 488 of SEQ ID NO: 1880764
cucaaagaauacguuuauu

SEQ ID NO: 1992055 - RNA, 19 nt, Artificial Sequence
  Description of Artificial Sequence: Synthetic oligonucleotide
  Antisense strand to SEQ ID NO: 1992054
aauaaacguauucuuugag

SEQ ID NO: 1992056 - RNA, 19 nt, Artificial Sequence
  Description of Artificial Sequence: Synthetic oligonucleotide
  Sense strand starting at position 919 of SEQ ID NO: 1880764
ggagaaguaugaucccauu

SEQ ID NO: 1992057 - RNA, 19 nt, Artificial Sequence
  Description of Artificial Sequence: Synthetic oligonucleotide
  Antisense strand to SEQ ID NO: 1992056
aaugggaucauacuucucc

SEQ ID NO: 1992058 - RNA, 19 nt, Artificial Sequence
  Description of Artificial Sequence: Synthetic oligonucleotide
  Sense strand starting at position 983 of SEQ ID NO: 1880764
ucuggaagguugucagaaa

SEQ ID NO: 1992059 - RNA, 19 nt, Artificial Sequence
  Description of Artificial Sequence: Synthetic oligonucleotide
  Antisense strand to SEQ ID NO: 1992058
uuucugacaaccuuccaga

SEQ ID NO: 1992060 - RNA, 19 nt, Artificial Sequence
  Description of Artificial Sequence: Synthetic oligonucleotide
  Sense strand starting at position 1102 of SEQ ID NO: 1880764
augcaacaggaauguuaaa

SEQ ID NO: 1992061 - RNA, 19 nt, Artificial Sequence
  Description of Artificial Sequence: Synthetic oligonucleotide
  Antisense strand to SEQ ID NO: 1992060
uuuaacauuccuguugcau

SEQ ID NO: 1992062 - RNA, 19 nt, Artificial Sequence
  Description of Artificial Sequence: Synthetic oligonucleotide
  Sense strand starting at position 1133 of SEQ ID NO: 1880764
uuucuaaaccgacaaugua

SEQ ID NO: 1992063 - RNA, 19 nt, Artificial Sequence
  Description of Artificial Sequence: Synthetic oligonucleotide
  Antisense strand to SEQ ID NO: 1992062
uacauugucgguuuagaaa

SEQ ID NO: 1992064 - RNA, 19 nt, Artificial Sequence
  Description of Artificial Sequence: Synthetic oligonucleotide
  Sense strand starting at position 1216 of SEQ ID NO: 1880764
accagagaucucugaaagc

SEQ ID NO: 1992065 - RNA, 19 nt, Artificial Sequence
  Description of Artificial Sequence: Synthetic oligonucleotide
  Antisense strand to SEQ ID NO: 1992064
gcuuucagagaucucuggu

SEQ ID NO: 1992066 - RNA, 19 nt, Artificial Sequence
  Description of Artificial Sequence: Synthetic oligonucleotide
  Sense strand starting at position 1330 of SEQ ID NO: 1880764
uugguaggucucgaucaaa

SEQ ID NO: 1992067 - RNA, 19 nt, Artificial Sequence
  Description of Artificial Sequence: Synthetic oligonucleotide
  Antisense strand to SEQ ID NO: 1992066
uuugaucgagaccuaccaa

SEQ ID NO: 1992068 - RNA, 19 nt, Artificial Sequence
  Description of Artificial Sequence: Synthetic oligonucleotide
  Sense strand starting at position 1580 of SEQ ID NO: 1880764
guucuugagcuccaagagu

SEQ ID NO: 1992069 - RNA, 19 nt, Artificial Sequence
  Description of Artificial Sequence: Synthetic oligonucleotide
  Antisense strand to SEQ ID NO: 1992068
acucuuggagcucaagaac

SEQ ID NO: 1992070 - RNA, 19 nt, Artificial Sequence
  Description of Artificial Sequence: Synthetic oligonucleotide
  Sense strand starting at position 1591 of SEQ ID NO: 1880764
ccaagagucugggcacaaa

SEQ ID NO: 1992071 - RNA, 19 nt, Artificial Sequence
  Description of Artificial Sequence: Synthetic oligonucleotide
  Antisense strand to SEQ ID NO: 1992070
uuugugcccagacucuugg

SEQ ID NO: 1992072 - RNA, 19 nt, Artificial Sequence
  Description of Artificial Sequence: Synthetic oligonucleotide
  Sense strand starting at position 2239 of SEQ ID NO: 1880764
gguucugaaaggugagcaa

SEQ ID NO: 1992073 - RNA, 19 nt, Artificial Sequence
  Description of Artificial Sequence: Synthetic oligonucleotide
  Antisense strand to SEQ ID NO: 1992072
uugcucaccuuucagaacc

SEQ ID NO: 1992074 - RNA, 19 nt, Artificial Sequence
  Description of Artificial Sequence: Synthetic oligonucleotide
  Sense strand starting at position 2350 of SEQ ID NO: 1880764
cgaagaagcaguuaaauac

SEQ ID NO: 1992075 - RNA, 19 nt, Artificial Sequence
  Description of Artificial Sequence: Synthetic oligonucleotide
  Antisense strand to SEQ ID NO: 1992074
guauuuaacugcuucuucg

SEQ ID NO: 1992076 - RNA, 19 nt, Artificial Sequence
  Description of Artificial Sequence: Synthetic oligonucleotide
  Sense strand starting at position 2424 of SEQ ID NO: 1880764
gauugauguuaccuagaaa

SEQ ID NO: 1992077 - RNA, 19 nt, Artificial Sequence
  Description of Artificial Sequence: Synthetic oligonucleotide
  Antisense strand to SEQ ID NO: 1992076
uuucuagguaacaucaauc

SEQ ID NO: 1992078 - RNA, 19 nt, Artificial Sequence
  Description of Artificial Sequence: Synthetic oligonucleotide
  Sense strand starting at position 2449 of SEQ ID NO: 1880764
ggaggcuacuagucuagau

SEQ ID NO: 1992079 - RNA, 19 nt, Artificial Sequence
  Description of Artificial Sequence: Synthetic oligonucleotide
  Antisense strand to SEQ ID NO: 1992078
aucuagacuaguagccucc

SEQ ID NO: 1992080 - RNA, 19 nt, Artificial Sequence
  Description of Artificial Sequence: Synthetic oligonucleotide
  Sense strand starting at position 2507 of SEQ ID NO: 1880764
auauauaagcuuugauagg

SEQ ID NO: 1992081 - RNA, 19 nt, Artificial Sequence
  Description of Artificial Sequence: Synthetic oligonucleotide
  Antisense strand to SEQ ID NO: 1992080
ccuaucaaagcuuauauau

SEQ ID NO: 1992082 - RNA, 19 nt, Artificial Sequence
  Description of Artificial Sequence: Synthetic oligonucleotide
  Sense strand starting at position 2608 of SEQ ID NO: 1880764
uuucuuaggcaauaugauu

SEQ ID NO: 1992083 - RNA, 19 nt, Artificial Sequence
  Description of Artificial Sequence: Synthetic oligonucleotide
  Antisense strand to SEQ ID NO: 1992082
aaucauauugccuaagaaa

SEQ ID NO: 1992084 - RNA, 19 nt, Artificial Sequence
  Description of Artificial Sequence: Synthetic oligonucleotide
  Sense strand starting at position 2688 of SEQ ID NO: 1880764
cuaugaugucuuuaguuaa

SEQ ID NO: 1992085 - RNA, 19 nt, Artificial Sequence
  Description of Artificial Sequence: Synthetic oligonucleotide
  Antisense strand to SEQ ID NO: 1992084
uuaacuaaagacaucauag

SEQ ID NO: 1992086 - RNA, 19 nt, Artificial Sequence
  Description of Artificial Sequence: Synthetic oligonucleotide
  Sense strand starting at position 2774 of SEQ ID NO: 1880764
uucggugauggguaauaag

SEQ ID NO: 1992087 - RNA, 19 nt, Artificial Sequence
  Description of Artificial Sequence: Synthetic oligonucleotide
  Antisense strand to SEQ ID NO: 1992086
cuuauuacccaucaccgaa

SEQ ID NO: 1992088 - RNA, 19 nt, Artificial Sequence
  Description of Artificial Sequence: Synthetic oligonucleotide
  Sense strand starting at position 2783 of SEQ ID NO: 1880764
ggguaauaaggguguuuau

SEQ ID NO: 1992089 - RNA, 19 nt, Artificial Sequence
  Description of Artificial Sequence: Synthetic oligonucleotide
  Antisense strand to SEQ ID NO: 1992088
auaaacacccuuauuaccc

SEQ ID NO: 1992090 - RNA, 19 nt, Artificial Sequence
  Description of Artificial Sequence: Synthetic oligonucleotide
  Sense strand starting at position 2890 of SEQ ID NO: 1880764
uucuuaaacggaugagguu

SEQ ID NO: 1992091 - RNA, 19 nt, Artificial Sequence
  Description of Artificial Sequence: Synthetic oligonucleotide
  Antisense strand to SEQ ID NO: 1992090
aaccucauccguuuaagaa

SEQ ID NO: 1992092 - RNA, 19 nt, Artificial Sequence
  Description of Artificial Sequence: Synthetic oligonucleotide
  Sense strand starting at position 2925 of SEQ ID NO: 1880764
caggguuguggaggagaca

SEQ ID NO: 1992093 - RNA, 19 nt, Artificial Sequence
  Description of Artificial Sequence: Synthetic oligonucleotide
  Antisense strand to SEQ ID NO: 1992092
ugucuccuccacaacccug

SEQ ID NO: 1992094 - RNA, 19 nt, Artificial Sequence
  Description of Artificial Sequence: Synthetic oligonucleotide
  Sense strand starting at position 3186 of SEQ ID NO: 1880764
uggugcuuuggucagaacu

SEQ ID NO: 1992095 - RNA, 19 nt, Artificial Sequence
  Description of Artificial Sequence: Synthetic oligonucleotide
  Antisense strand to SEQ ID NO: 1992094
aguucugaccaaagcacca

SEQ ID NO: 1992096 - RNA, 19 nt, Artificial Sequence
  Description of Artificial Sequence: Synthetic oligonucleotide
  Sense strand starting at position 3468 of SEQ ID NO: 1880764
ccagucugccaauagaaca

SEQ ID NO: 1992097 - RNA, 19 nt, Artificial Sequence
  Description of Artificial Sequence: Synthetic oligonucleotide
  Antisense strand to SEQ ID NO: 1992096
uguucuauuggcagacugg

SEQ ID NO: 1992098 - RNA, 19 nt, Artificial Sequence
  Description of Artificial Sequence: Synthetic oligonucleotide
  Sense strand starting at position 3662 of SEQ ID NO: 1880764
ugcccuaucaaguaggagu

SEQ ID NO: 1992099 - RNA, 19 nt, Artificial Sequence
  Description of Artificial Sequence: Synthetic oligonucleotide
  Antisense strand to SEQ ID NO: 1992098
acuccuacuugauagggca

SEQ ID NO: 1992100 - RNA, 19 nt, Artificial Sequence
  Description of Artificial Sequence: Synthetic oligonucleotide
  Sense strand starting at position 3831 of SEQ ID NO: 1880764
uggaacacugcucaaguuu

SEQ ID NO: 1992101 - RNA, 19 nt, Artificial Sequence
  Description of Artificial Sequence: Synthetic oligonucleotide
  Antisense strand to SEQ ID NO: 1992100
aaacuugagcaguguucca

SEQ ID NO: 1992102 - RNA, 19 nt, Artificial Sequence
  Description of Artificial Sequence: Synthetic oligonucleotide
  Sense strand starting at position 3905 of SEQ ID NO: 1880764
acugaucccguagagguua

SEQ ID NO: 1992103 - RNA, 19 nt, Artificial Sequence
  Description of Artificial Sequence: Synthetic oligonucleotide
  Antisense strand to SEQ ID NO: 1992102
uaaccucuacgggaucagu

SEQ ID NO: 1992104 - RNA, 19 nt, Artificial Sequence
  Description of Artificial Sequence: Synthetic oligonucleotide
  Sense strand starting at position 3935 of SEQ ID NO: 1880764
augucacauagauggguua

SEQ ID NO: 1992105 - RNA, 19 nt, Artificial Sequence
  Description of Artificial Sequence: Synthetic oligonucleotide
  Antisense strand to SEQ ID NO: 1992104
uaacccaucuaugugacau

SEQ ID NO: 1992106 - RNA, 19 nt, Artificial Sequence
  Description of Artificial Sequence: Synthetic oligonucleotide
  Sense strand starting at position 3936 of SEQ ID NO: 1880764
ugucacauagauggguuaa

SEQ ID NO: 1992107 - RNA, 19 nt, Artificial Sequence
  Description of Artificial Sequence: Synthetic oligonucleotide
  Antisense strand to SEQ ID NO: 1992106
uuaacccaucuaugugaca

SEQ ID NO: 1992108 - RNA, 19 nt, Artificial Sequence
  Description of Artificial Sequence: Synthetic oligonucleotide
  Sense strand starting at position 3937 of SEQ ID NO: 1880764
gucacauagauggguuaag

SEQ ID NO: 1992109 - RNA, 19 nt, Artificial Sequence
  Description of Artificial Sequence: Synthetic oligonucleotide
  Antisense strand to SEQ ID NO: 1992108
cuuaacccaucuaugugac

SEQ ID NO: 1992110 - RNA, 19 nt, Artificial Sequence
  Description of Artificial Sequence: Synthetic oligonucleotide
  Sense strand starting at position 3970 of SEQ ID NO: 1880764
agcgcuaauacagggaaua

SEQ ID NO: 1992111 - RNA, 19 nt, Artificial Sequence
  Description of Artificial Sequence: Synthetic oligonucleotide
  Antisense strand to SEQ ID NO: 1992110
uauucccuguauuagcgcu

SEQ ID NO: 1992112 - RNA, 19 nt, Artificial Sequence
  Description of Artificial Sequence: Synthetic oligonucleotide
  Sense strand starting at position 3971 of SEQ ID NO: 1880764
gcgcuaauacagggaauaa

SEQ ID NO: 1992113 - RNA, 19 nt, Artificial Sequence
  Description of Artificial Sequence: Synthetic oligonucleotide
  Antisense strand to SEQ ID NO: 1992112
uuauucccuguauuagcgc

SEQ ID NO: 1992114 - RNA, 19 nt, Artificial Sequence
  Description of Artificial Sequence: Synthetic oligonucleotide
  Sense strand starting at position 64 of SEQ ID NO: 1880765
cuggcuaggagucagagua

SEQ ID NO: 1992115 - RNA, 19 nt, Artificial Sequence
  Description of Artificial Sequence: Synthetic oligonucleotide
  Antisense strand to SEQ ID NO: 1992114
uacucugacuccuagccag

SEQ ID NO: 1992116 - RNA, 19 nt, Artificial Sequence
  Description of Artificial Sequence: Synthetic oligonucleotide
  Sense strand starting at position 82 of SEQ ID NO: 1880765
aggugaagaugaucugcua

SEQ ID NO: 1992117 - RNA, 19 nt, Artificial Sequence
  Description of Artificial Sequence: Synthetic oligonucleotide
  Antisense strand to SEQ ID NO: 1992116
uagcagaucaucuucaccu

SEQ ID NO: 1992118 - RNA, 19 nt, Artificial Sequence
  Description of Artificial Sequence: Synthetic oligonucleotide
  Sense strand starting at position 303 of SEQ ID NO: 1880765
ucgacugacucucuguaga

SEQ ID NO: 1992119 - RNA, 19 nt, Artificial Sequence
  Description of Artificial Sequence: Synthetic oligonucleotide
  Antisense strand to SEQ ID NO: 1992118
ucuacagagagucagucga

SEQ ID NO: 1992120 - RNA, 19 nt, Artificial Sequence
  Description of Artificial Sequence: Synthetic oligonucleotide
  Sense strand starting at position 305 of SEQ ID NO: 1880765
gacugacucucuguagacu

SEQ ID NO: 1992121 - RNA, 19 nt, Artificial Sequence
  Description of Artificial Sequence: Synthetic oligonucleotide
  Antisense strand to SEQ ID NO: 1992120
agucuacagagagucaguc

SEQ ID NO: 1992122 - RNA, 19 nt, Artificial Sequence
  Description of Artificial Sequence: Synthetic oligonucleotide
  Sense strand starting at position 344 of SEQ ID NO: 1880765
aaacguaagcugggagaga

SEQ ID NO: 1992123 - RNA, 19 nt, Artificial Sequence
  Description of Artificial Sequence: Synthetic oligonucleotide
  Antisense strand to SEQ ID NO: 1992122
ucucucccagcuuacguuu

SEQ ID NO: 1992124 - RNA, 19 nt, Artificial Sequence
  Description of Artificial Sequence: Synthetic oligonucleotide
  Sense strand starting at position 388 of SEQ ID NO: 1880765
uguggcacuuuccuuaauu

SEQ ID NO: 1992125 - RNA, 19 nt, Artificial Sequence
  Description of Artificial Sequence: Synthetic oligonucleotide
  Antisense strand to SEQ ID NO: 1992124
aauuaaggaaagugccaca

SEQ ID NO: 1992126 - RNA, 19 nt, Artificial Sequence
  Description of Artificial Sequence: Synthetic oligonucleotide
  Sense strand starting at position 389 of SEQ ID NO: 1880765
guggcacuuuccuuaauug

SEQ ID NO: 1992127 - RNA, 19 nt, Artificial Sequence
  Description of Artificial Sequence: Synthetic oligonucleotide
  Antisense strand to SEQ ID NO: 1992126
caauuaaggaaagugccac

SEQ ID NO: 1992128 - RNA, 19 nt, Artificial Sequence
  Description of Artificial Sequence: Synthetic oligonucleotide
  Sense strand starting at position 549 of SEQ ID NO: 1880765
ggauauaaggcacguucau

SEQ ID NO: 1992129 - RNA, 19 nt, Artificial Sequence
  Description of Artificial Sequence: Synthetic oligonucleotide
  Antisense strand to SEQ ID NO: 1992128
augaacgugccuuauaucc

SEQ ID NO: 1992130 - RNA, 19 nt, Artificial Sequence
  Description of Artificial Sequence: Synthetic oligonucleotide
  Sense strand starting at position 695 of SEQ ID NO: 1880765
aaccguuuccuccgauuaa

SEQ ID NO: 1992131 - RNA, 19 nt, Artificial Sequence
  Description of Artificial Sequence: Synthetic oligonucleotide
  Antisense strand to SEQ ID NO: 1992130
uuaaucggaggaaacgguu

SEQ ID NO: 1992132 - RNA, 19 nt, Artificial Sequence
  Description of Artificial Sequence: Synthetic oligonucleotide
  Sense strand starting at position 699 of SEQ ID NO: 1880765
guuuccuccgauuaaugua

SEQ ID NO: 1992133 - RNA, 19 nt, Artificial Sequence
  Description of Artificial Sequence: Synthetic oligonucleotide
  Antisense strand to SEQ ID NO: 1992132
uacauuaaucggaggaaac

SEQ ID NO: 1992134 - RNA, 19 nt, Artificial Sequence
  Description of Artificial Sequence: Synthetic oligonucleotide
  Sense strand starting at position 1028 of SEQ ID NO: 1880765
uugccaauuuaugcuguaa

SEQ ID NO: 1992135 - RNA, 19 nt, Artificial Sequence
  Description of Artificial Sequence: Synthetic oligonucleotide
  Antisense strand to SEQ ID NO: 1992134
uuacagcauaaauuggcaa

SEQ ID NO: 1992136 - RNA, 19 nt, Artificial Sequence
  Description of Artificial Sequence: Synthetic oligonucleotide
  Sense strand starting at position 1039 of SEQ ID NO: 1880765
ugcuguaaucuacgaauuu

SEQ ID NO: 1992137 - RNA, 19 nt, Artificial Sequence
  Description of Artificial Sequence: Synthetic oligonucleotide
  Antisense strand to SEQ ID NO: 1992136
aaauucguagauuacagca

SEQ ID NO: 1992138 - RNA, 19 nt, Artificial Sequence
  Description of Artificial Sequence: Synthetic oligonucleotide
  Sense strand starting at position 1086 of SEQ ID NO: 1880765
acaagaguuucgguauugu

SEQ ID NO: 1992139 - RNA, 19 nt, Artificial Sequence
  Description of Artificial Sequence: Synthetic oligonucleotide
  Antisense strand to SEQ ID NO: 1992138
acaauaccgaaacucuugu

SEQ ID NO: 1992140 - RNA, 19 nt, Artificial Sequence
  Description of Artificial Sequence: Synthetic oligonucleotide
  Sense strand starting at position 1097 of SEQ ID NO: 1880765
gguauuguugcccaggaug

SEQ ID NO: 1992141 - RNA, 19 nt, Artificial Sequence
  Description of Artificial Sequence: Synthetic oligonucleotide
  Antisense strand to SEQ ID NO: 1992140
cauccugggcaacaauacc

SEQ ID NO: 1992142 - RNA, 19 nt, Artificial Sequence
  Description of Artificial Sequence: Synthetic oligonucleotide
  Sense strand starting at position 1764 of SEQ ID NO: 1880765
ucagcuauucugggaucuu

SEQ ID NO: 1992143 - RNA, 19 nt, Artificial Sequence
  Description of Artificial Sequence: Synthetic oligonucleotide
  Antisense strand to SEQ ID NO: 1992142
aagaucccagaauagcuga

SEQ ID NO: 1992144 - RNA, 19 nt, Artificial Sequence
  Description of Artificial Sequence: Synthetic oligonucleotide
  Sense strand starting at position 2144 of SEQ ID NO: 1880765
ggaaccagcgcuuaauguu

SEQ ID NO: 1992145 - RNA, 19 nt, Artificial Sequence
  Description of Artificial Sequence: Synthetic oligonucleotide
  Antisense strand to SEQ ID NO: 1992144
aacauuaagcgcugguucc

SEQ ID NO: 1992146 - RNA, 19 nt, Artificial Sequence
  Description of Artificial Sequence: Synthetic oligonucleotide
  Sense strand starting at position 2151 of SEQ ID NO: 1880765
gcgcuuaauguuucuugau

SEQ ID NO: 1992147 - RNA, 19 nt, Artificial Sequence
  Description of Artificial Sequence: Synthetic oligonucleotide
  Antisense strand to SEQ ID NO: 1992146
aucaagaaacauuaagcgc

SEQ ID NO: 1992148 - RNA, 19 nt, Artificial Sequence
  Description of Artificial Sequence: Synthetic oligonucleotide
  Sense strand starting at position 2153 of SEQ ID NO: 1880765
gcuuaauguuucuugauca

SEQ ID NO: 1992149 - RNA, 19 nt, Artificial Sequence
  Description of Artificial Sequence: Synthetic oligonucleotide
  Antisense strand to SEQ ID NO: 1992148
ugaucaagaaacauuaagc

SEQ ID NO: 1992150 - RNA, 19 nt, Artificial Sequence
  Description of Artificial Sequence: Synthetic oligonucleotide
  Sense strand starting at position 2157 of SEQ ID NO: 1880765
aauguuucuugaucacguu

SEQ ID NO: 1992151 - RNA, 19 nt, Artificial Sequence
  Description of Artificial Sequence: Synthetic oligonucleotide
  Antisense strand to SEQ ID NO: 1992150
aacgugaucaagaaacauu

SEQ ID NO: 1992152 - RNA, 19 nt, Artificial Sequence
  Description of Artificial Sequence: Synthetic oligonucleotide
  Sense strand starting at position 2309 of SEQ ID NO: 1880765
ugcauuuaaggcugucuau

SEQ ID NO: 1992153 - RNA, 19 nt, Artificial Sequence
  Description of Artificial Sequence: Synthetic oligonucleotide
  Antisense strand to SEQ ID NO: 1992152
auagacagccuuaaaugca

SEQ ID NO: 1992154 - RNA, 19 nt, Artificial Sequence
  Description of Artificial Sequence: Synthetic oligonucleotide
  Sense strand starting at position 2320 of SEQ ID NO: 1880765
cugucuauucucugaguac

SEQ ID NO: 1992155 - RNA, 19 nt, Artificial Sequence
  Description of Artificial Sequence: Synthetic oligonucleotide
  Antisense strand to SEQ ID NO: 1992154
guacucagagaauagacag

SEQ ID NO: 1992156 - RNA, 19 nt, Artificial Sequence
  Description of Artificial Sequence: Synthetic oligonucleotide
  Sense strand starting at position 2324 of SEQ ID NO: 1880765
cuauucucugaguaccagu

SEQ ID NO: 1992157 - RNA, 19 nt, Artificial Sequence
  Description of Artificial Sequence: Synthetic oligonucleotide
  Antisense strand to SEQ ID NO: 1992156
acugguacucagagaauag

SEQ ID NO: 1992158 - RNA, 19 nt, Artificial Sequence
  Description of Artificial Sequence: Synthetic oligonucleotide
  Sense strand starting at position 2332 of SEQ ID NO: 1880765
ugaguaccaguucgugauu

SEQ ID NO: 1992159 - RNA, 19 nt, Artificial Sequence
  Description of Artificial Sequence: Synthetic oligonucleotide
  Antisense strand to SEQ ID NO: 1992158
aaucacgaacugguacuca

SEQ ID NO: 1992160 - RNA, 19 nt, Artificial Sequence
  Description of Artificial Sequence: Synthetic oligonucleotide
  Sense strand starting at position 2333 of SEQ ID NO: 1880765
gaguaccaguucgugauuu

SEQ ID NO: 1992161 - RNA, 19 nt, Artificial Sequence
  Description of Artificial Sequence: Synthetic oligonucleotide
  Antisense strand to SEQ ID NO: 1992160
aaaucacgaacugguacuc

SEQ ID NO: 1992162 - RNA, 19 nt, Artificial Sequence
  Description of Artificial Sequence: Synthetic oligonucleotide
  Sense strand starting at position 2357 of SEQ ID NO: 1880765
uuguuuccuucuuugauac

SEQ ID NO: 1992163 - RNA, 19 nt, Artificial Sequence
  Description of Artificial Sequence: Synthetic oligonucleotide
  Antisense strand to SEQ ID NO: 1992162
guaucaaagaaggaaacaa

SEQ ID NO: 1992164 - RNA, 19 nt, Artificial Sequence
  Description of Artificial Sequence: Synthetic oligonucleotide
  Sense strand starting at position 2358 of SEQ ID NO: 1880765
uguuuccuucuuugauaca

SEQ ID NO: 1992165 - RNA, 19 nt, Artificial Sequence
  Description of Artificial Sequence: Synthetic oligonucleotide
  Antisense strand to SEQ ID NO: 1992164
uguaucaaagaaggaaaca

SEQ ID NO: 1992166 - RNA, 19 nt, Artificial Sequence
  Description of Artificial Sequence: Synthetic oligonucleotide
  Sense strand starting at position 2795 of SEQ ID NO: 1880765
uauguuccgugguuauaaa

SEQ ID NO: 1992167 - RNA, 19 nt, Artificial Sequence
  Description of Artificial Sequence: Synthetic oligonucleotide
  Antisense strand to SEQ ID NO: 1992166
uuuauaaccacggaacaua

SEQ ID NO: 1992168 - RNA, 19 nt, Artificial Sequence
  Description of Artificial Sequence: Synthetic oligonucleotide
  Sense strand starting at position 2984 of SEQ ID NO: 1880765
ucucuucuauguguacauu

SEQ ID NO: 1992169 - RNA, 19 nt, Artificial Sequence
  Description of Artificial Sequence: Synthetic oligonucleotide
  Antisense strand to SEQ ID NO: 1992168
aauguacacauagaagaga

SEQ ID NO: 1992170 - RNA, 19 nt, Artificial Sequence
  Description of Artificial Sequence: Synthetic oligonucleotide
  Sense strand starting at position 3000 of SEQ ID NO: 1880765
auuggccugucucuagauu

SEQ ID NO: 1992171 - RNA, 19 nt, Artificial Sequence
  Description of Artificial Sequence: Synthetic oligonucleotide
  Antisense strand to SEQ ID NO: 1992170
aaucuagagacaggccaau

SEQ ID NO: 1992172 - RNA, 19 nt, Artificial Sequence
  Description of Artificial Sequence: Synthetic oligonucleotide
  Sense strand starting at position 3059 of SEQ ID NO: 1880765
accuaaucacaguguuaua

SEQ ID NO: 1992173 - RNA, 19 nt, Artificial Sequence
  Description of Artificial Sequence: Synthetic oligonucleotide
  Antisense strand to SEQ ID NO: 1992172
uauaacacugugauuaggu

SEQ ID NO: 1992174 - RNA, 19 nt, Artificial Sequence
  Description of Artificial Sequence: Synthetic oligonucleotide
  Sense strand starting at position 3078 of SEQ ID NO: 1880765
auaacuaucuagcugggua

SEQ ID NO: 1992175 - RNA, 19 nt, Artificial Sequence
  Description of Artificial Sequence: Synthetic oligonucleotide
  Antisense strand to SEQ ID NO: 1992174
uacccagcuagauaguuau

SEQ ID NO: 1992176 - RNA, 19 nt, Artificial Sequence
  Description of Artificial Sequence: Synthetic oligonucleotide
  Sense strand starting at position 3092 of SEQ ID NO: 1880765
ggguaacucuucucuccuu

SEQ ID NO: 1992177 - RNA, 19 nt, Artificial Sequence
  Description of Artificial Sequence: Synthetic oligonucleotide
  Antisense strand to SEQ ID NO: 1992176
aaggagagaagaguuaccc

SEQ ID NO: 1992178 - RNA, 19 nt, Artificial Sequence
  Description of Artificial Sequence: Synthetic oligonucleotide
  Sense strand starting at position 3270 of SEQ ID NO: 1880765
gcuauuggaucuucuaauc

SEQ ID NO: 1992179 - RNA, 19 nt, Artificial Sequence
  Description of Artificial Sequence: Synthetic oligonucleotide
  Antisense strand to SEQ ID NO: 1992178
gauuagaagauccaauagc

SEQ ID NO: 1992180 - RNA, 19 nt, Artificial Sequence
  Description of Artificial Sequence: Synthetic oligonucleotide
  Sense strand starting at position 3275 of SEQ ID NO: 1880765
uggaucuucuaaucuguua

SEQ ID NO: 1992181 - RNA, 19 nt, Artificial Sequence
  Description of Artificial Sequence: Synthetic oligonucleotide
  Antisense strand to SEQ ID NO: 1992180
uaacagauuagaagaucca

SEQ ID NO: 1992182 - RNA, 19 nt, Artificial Sequence
  Description of Artificial Sequence: Synthetic oligonucleotide
  Sense strand starting at position 3286 of SEQ ID NO: 1880765
aucuguuaacauggaauau

SEQ ID NO: 1992183 - RNA, 19 nt, Artificial Sequence
  Description of Artificial Sequence: Synthetic oligonucleotide
  Antisense strand to SEQ ID NO: 1992182
auauuccauguuaacagau

SEQ ID NO: 1992184 - RNA, 19 nt, Artificial Sequence
  Description of Artificial Sequence: Synthetic oligonucleotide
  Sense strand starting at position 3590 of SEQ ID NO: 1880765
uuaaauaguuucucugaag

SEQ ID NO: 1992185 - RNA, 19 nt, Artificial Sequence
  Description of Artificial Sequence: Synthetic oligonucleotide
  Antisense strand to SEQ ID NO: 1992184
cuucagagaaacuauuuaa

SEQ ID NO: 1992186 - RNA, 19 nt, Artificial Sequence
  Description of Artificial Sequence: Synthetic oligonucleotide
  Sense strand starting at position 3596 of SEQ ID NO: 1880765
aguuucucugaagguaaca

SEQ ID NO: 1992187 - RNA, 19 nt, Artificial Sequence
  Description of Artificial Sequence: Synthetic oligonucleotide
  Antisense strand to SEQ ID NO: 1992186
uguuaccuucagagaaacu

SEQ ID NO: 1992188 - RNA, 19 nt, Artificial Sequence
  Description of Artificial Sequence: Synthetic oligonucleotide
  Sense strand starting at position 3666 of SEQ ID NO: 1880765
aggaauauaaguuguugau

SEQ ID NO: 1992189 - RNA, 19 nt, Artificial Sequence
  Description of Artificial Sequence: Synthetic oligonucleotide
  Antisense strand to SEQ ID NO: 1992188
aucaacaacuuauauuccu

SEQ ID NO: 1992190 - RNA, 19 nt, Artificial Sequence
  Description of Artificial Sequence: Synthetic oligonucleotide
  Sense strand starting at position 3679 of SEQ ID NO: 1880765
guugauuuauagcauuuag

SEQ ID NO: 1992191 - RNA, 19 nt, Artificial Sequence
  Description of Artificial Sequence: Synthetic oligonucleotide
  Antisense strand to SEQ ID NO: 1992190
cuaaaugcuauaaaucaac

SEQ ID NO: 1992192 - RNA, 19 nt, Artificial Sequence
  Description of Artificial Sequence: Synthetic oligonucleotide
  Sense strand starting at position 3807 of SEQ ID NO: 1880765
uucuuugauccauggcuua

SEQ ID NO: 1992193 - RNA, 19 nt, Artificial Sequence
  Description of Artificial Sequence: Synthetic oligonucleotide
  Antisense strand to SEQ ID NO: 1992192
uaagccauggaucaaagaa

SEQ ID NO: 1992194 - RNA, 19 nt, Artificial Sequence
  Description of Artificial Sequence: Synthetic oligonucleotide
  Sense strand starting at position 403 of SEQ ID NO: 1880766
caagauauguguuaacugu

SEQ ID NO: 1992195 - RNA, 19 nt, Artificial Sequence
  Description of Artificial Sequence: Synthetic oligonucleotide
  Antisense strand to SEQ ID NO: 1992194
acaguuaacacauaucuug

SEQ ID NO: 1992196 - RNA, 19 nt, Artificial Sequence
  Description of Artificial Sequence: Synthetic oligonucleotide
  Sense strand starting at position 411 of SEQ ID NO: 1880766
guguuaacuguuuauguug

SEQ ID NO: 1992197 - RNA, 19 nt, Artificial Sequence
  Description of Artificial Sequence: Synthetic oligonucleotide
  Antisense strand to SEQ ID NO: 1992196
caacauaaacaguuaacac

SEQ ID NO: 1992198 - RNA, 19 nt, Artificial Sequence
  Description of Artificial Sequence: Synthetic oligonucleotide
  Sense strand starting at position 418 of SEQ ID NO: 1880766
cuguuuauguugucgguaa

SEQ ID NO: 1992199 - RNA, 19 nt, Artificial Sequence
  Description of Artificial Sequence: Synthetic oligonucleotide
  Antisense strand to SEQ ID NO: 1992198
uuaccgacaacauaaacag

SEQ ID NO: 1992200 - RNA, 19 nt, Artificial Sequence
  Description of Artificial Sequence: Synthetic oligonucleotide
  Sense strand starting at position 422 of SEQ ID NO: 1880766
uuauguugucgguaaggcu

SEQ ID NO: 1992201 - RNA, 19 nt, Artificial Sequence
  Description of Artificial Sequence: Synthetic oligonucleotide
  Antisense strand to SEQ ID NO: 1992200
agccuuaccgacaacauaa

SEQ ID NO: 1992202 - RNA, 19 nt, Artificial Sequence
  Description of Artificial Sequence: Synthetic oligonucleotide
  Sense strand starting at position 441 of SEQ ID NO: 1880766
uccagucaugaguaggcua

SEQ ID NO: 1992203 - RNA, 19 nt, Artificial Sequence
  Description of Artificial Sequence: Synthetic oligonucleotide
  Antisense strand to SEQ ID NO: 1992202
uagccuacucaugacugga

SEQ ID NO: 1992204 - RNA, 19 nt, Artificial Sequence
  Description of Artificial Sequence: Synthetic oligonucleotide
  Sense strand starting at position 443 of SEQ ID NO: 1880766
cagucaugaguaggcuauu

SEQ ID NO: 1992205 - RNA, 19 nt, Artificial Sequence
  Description of Artificial Sequence: Synthetic oligonucleotide
  Antisense strand to SEQ ID NO: 1992204
aauagccuacucaugacug

SEQ ID NO: 1992206 - RNA, 19 nt, Artificial Sequence
  Description of Artificial Sequence: Synthetic oligonucleotide
  Sense strand starting at position 444 of SEQ ID NO: 1880766
agucaugaguaggcuauua

SEQ ID NO: 1992207 - RNA, 19 nt, Artificial Sequence
  Description of Artificial Sequence: Synthetic oligonucleotide
  Antisense strand to SEQ ID NO: 1992206
uaauagccuacucaugacu

SEQ ID NO: 1992208 - RNA, 19 nt, Artificial Sequence
  Description of Artificial Sequence: Synthetic oligonucleotide
  Sense strand starting at position 446 of SEQ ID NO: 1880766
ucaugaguaggcuauuagu

SEQ ID NO: 1992209 - RNA, 19 nt, Artificial Sequence
  Description of Artificial Sequence: Synthetic oligonucleotide
  Antisense strand to SEQ ID NO: 1992208
acuaauagccuacucauga

SEQ ID NO: 1992210 - RNA, 19 nt, Artificial Sequence
  Description of Artificial Sequence: Synthetic oligonucleotide
  Sense strand starting at position 476 of SEQ ID NO: 1880766
ggaggagucaaacguuaua

SEQ ID NO: 1992211 - RNA, 19 nt, Artificial Sequence
  Description of Artificial Sequence: Synthetic oligonucleotide
  Antisense strand to SEQ ID NO: 1992210
uauaacguuugacuccucc

SEQ ID NO: 1992212 - RNA, 19 nt, Artificial Sequence
  Description of Artificial Sequence: Synthetic oligonucleotide
  Sense strand starting at position 479 of SEQ ID NO: 1880766
ggagucaaacguuauacac

SEQ ID NO: 1992213 - RNA, 19 nt, Artificial Sequence
  Description of Artificial Sequence: Synthetic oligonucleotide
  Antisense strand to SEQ ID NO: 1992212
guguauaacguuugacucc

SEQ ID NO: 1992214 - RNA, 19 nt, Artificial Sequence
  Description of Artificial Sequence: Synthetic oligonucleotide
  Sense strand starting at position 553 of SEQ ID NO: 1880766
gggucacaguaauuaguca

SEQ ID NO: 1992215 - RNA, 19 nt, Artificial Sequence
  Description of Artificial Sequence: Synthetic oligonucleotide
  Antisense strand to SEQ ID NO: 1992214
ugacuaauuacugugaccc

SEQ ID NO: 1992216 - RNA, 19 nt, Artificial Sequence
  Description of Artificial Sequence: Synthetic oligonucleotide
  Sense strand starting at position 617 of SEQ ID NO: 1880766
caggcuggugcuuaacaaa

SEQ ID NO: 1992217 - RNA, 19 nt, Artificial Sequence
  Description of Artificial Sequence: Synthetic oligonucleotide
  Antisense strand to SEQ ID NO: 1992216
uuuguuaagcaccagccug

SEQ ID NO: 1992218 - RNA, 19 nt, Artificial Sequence
  Description of Artificial Sequence: Synthetic oligonucleotide
  Sense strand starting at position 913 of SEQ ID NO: 1880766
cagaucaucgggcaucaga

SEQ ID NO: 1992219 - RNA, 19 nt, Artificial Sequence
  Description of Artificial Sequence: Synthetic oligonucleotide
  Antisense strand to SEQ ID NO: 1992218
ucugaugcccgaugaucug

SEQ ID NO: 1992220 - RNA, 19 nt, Artificial Sequence
  Description of Artificial Sequence: Synthetic oligonucleotide
  Sense strand starting at position 983 of SEQ ID NO: 1880766
guucgcgcuccagugagaa

SEQ ID NO: 1992221 - RNA, 19 nt, Artificial Sequence
  Description of Artificial Sequence: Synthetic oligonucleotide
  Antisense strand to SEQ ID NO: 1992220
uucucacuggagcgcgaac

SEQ ID NO: 1992222 - RNA, 19 nt, Artificial Sequence
  Description of Artificial Sequence: Synthetic oligonucleotide
  Sense strand starting at position 1391 of SEQ ID NO: 1880766
auguuaucuuccuugugaa

SEQ ID NO: 1992223 - RNA, 19 nt, Artificial Sequence
  Description of Artificial Sequence: Synthetic oligonucleotide
  Antisense strand to SEQ ID NO: 1992222
uucacaaggaagauaacau

SEQ ID NO: 1992224 - RNA, 19 nt, Artificial Sequence
  Description of Artificial Sequence: Synthetic oligonucleotide
  Sense strand starting at position 1392 of SEQ ID NO: 1880766
uguuaucuuccuugugaag

SEQ ID NO: 1992225 - RNA, 19 nt, Artificial Sequence
  Description of Artificial Sequence: Synthetic oligonucleotide
  Antisense strand to SEQ ID NO: 1992224
cuucacaaggaagauaaca

SEQ ID NO: 1992226 - RNA, 19 nt, Artificial Sequence
  Description of Artificial Sequence: Synthetic oligonucleotide
  Sense strand starting at position 1823 of SEQ ID NO: 1880766
acgaccuggccgugaaaca

SEQ ID NO: 1992227 - RNA, 19 nt, Artificial Sequence
  Description of Artificial Sequence: Synthetic oligonucleotide
  Antisense strand to SEQ ID NO: 1992226
uguuucacggccaggucgu

SEQ ID NO: 1992228 - RNA, 19 nt, Artificial Sequence
  Description of Artificial Sequence: Synthetic oligonucleotide
  Sense strand starting at position 1937 of SEQ ID NO: 1880766
gccauagcgcggagaagau

SEQ ID NO: 1992229 - RNA, 19 nt, Artificial Sequence
  Description of Artificial Sequence: Synthetic oligonucleotide
  Antisense strand to SEQ ID NO: 1992228
aucuucuccgcgcuauggc

SEQ ID NO: 1992230 - RNA, 19 nt, Artificial Sequence
  Description of Artificial Sequence: Synthetic oligonucleotide
  Sense strand starting at position 2048 of SEQ ID NO: 1880766
ggugugguggaucgugauu

SEQ ID NO: 1992231 - RNA, 19 nt, Artificial Sequence
  Description of Artificial Sequence: Synthetic oligonucleotide
  Antisense strand to SEQ ID NO: 1992230
aaucacgauccaccacacc

SEQ ID NO: 1992232 - RNA, 19 nt, Artificial Sequence
  Description of Artificial Sequence: Synthetic oligonucleotide
  Sense strand starting at position 2311 of SEQ ID NO: 1880766
gagaauuccucucaagagu

SEQ ID NO: 1992233 - RNA, 19 nt, Artificial Sequence
  Description of Artificial Sequence: Synthetic oligonucleotide
  Antisense strand to SEQ ID NO: 1992232
acucuugagaggaauucuc

SEQ ID NO: 1992234 - RNA, 19 nt, Artificial Sequence
  Description of Artificial Sequence: Synthetic oligonucleotide
  Sense strand starting at position 2411 of SEQ ID NO: 1880766
uuccguuccauguagagau

SEQ ID NO: 1992235 - RNA, 19 nt, Artificial Sequence
  Description of Artificial Sequence: Synthetic oligonucleotide
  Antisense strand to SEQ ID NO: 1992234
aucucuacauggaacggaa

SEQ ID NO: 1992236 - RNA, 19 nt, Artificial Sequence
  Description of Artificial Sequence: Synthetic oligonucleotide
  Sense strand starting at position 2413 of SEQ ID NO: 1880766
ccguuccauguagagauau

SEQ ID NO: 1992237 - RNA, 19 nt, Artificial Sequence
  Description of Artificial Sequence: Synthetic oligonucleotide
  Antisense strand to SEQ ID NO: 1992236
auaucucuacauggaacgg

SEQ ID NO: 1992238 - RNA, 19 nt, Artificial Sequence
  Description of Artificial Sequence: Synthetic oligonucleotide
  Sense strand starting at position 2590 of SEQ ID NO: 1880766
cggcacauuucccuuuaua

SEQ ID NO: 1992239 - RNA, 19 nt, Artificial Sequence
  Description of Artificial Sequence: Synthetic oligonucleotide
  Antisense strand to SEQ ID NO: 1992238
uauaaagggaaaugugccg

SEQ ID NO: 1992240 - RNA, 19 nt, Artificial Sequence
  Description of Artificial Sequence: Synthetic oligonucleotide
  Sense strand starting at position 2610 of SEQ ID NO: 1880766
gcaagagccuucccaacuu

SEQ ID NO: 1992241 - RNA, 19 nt, Artificial Sequence
  Description of Artificial Sequence: Synthetic oligonucleotide
  Antisense strand to SEQ ID NO: 1992240
aaguugggaaggcucuugc

SEQ ID NO: 1992242 - RNA, 19 nt, Artificial Sequence
  Description of Artificial Sequence: Synthetic oligonucleotide
  Sense strand starting at position 2630 of SEQ ID NO: 1880766
gaggucugguucccucuua

SEQ ID NO: 1992243 - RNA, 19 nt, Artificial Sequence
  Description of Artificial Sequence: Synthetic oligonucleotide
  Antisense strand to SEQ ID NO: 1992242
uaagagggaaccagaccuc

SEQ ID NO: 1992244 - RNA, 19 nt, Artificial Sequence
  Description of Artificial Sequence: Synthetic oligonucleotide
  Sense strand starting at position 2638 of SEQ ID NO: 1880766
guucccucuuaggaugaaa

SEQ ID NO: 1992245 - RNA, 19 nt, Artificial Sequence
  Description of Artificial Sequence: Synthetic oligonucleotide
  Antisense strand to SEQ ID NO: 1992244
uuucauccuaagagggaac

SEQ ID NO: 1992246 - RNA, 19 nt, Artificial Sequence
  Description of Artificial Sequence: Synthetic oligonucleotide
  Sense strand starting at position 2640 of SEQ ID NO: 1880766
ucccucuuaggaugaaaua

SEQ ID NO: 1992247 - RNA, 19 nt, Artificial Sequence
  Description of Artificial Sequence: Synthetic oligonucleotide
  Antisense strand to SEQ ID NO: 1992246
uauuucauccuaagaggga

SEQ ID NO: 1992248 - RNA, 19 nt, Artificial Sequence
  Description of Artificial Sequence: Synthetic oligonucleotide
  Sense strand starting at position 2707 of SEQ ID NO: 1880766
gaccuaagagcguaggcau

SEQ ID NO: 1992249 - RNA, 19 nt, Artificial Sequence
  Description of Artificial Sequence: Synthetic oligonucleotide
  Antisense strand to SEQ ID NO: 1992248
augccuacgcucuuagguc

SEQ ID NO: 1992250 - RNA, 19 nt, Artificial Sequence
  Description of Artificial Sequence: Synthetic oligonucleotide
  Sense strand starting at position 2732 of SEQ ID NO: 1880766
caaggugaugcuugugaag

SEQ ID NO: 1992251 - RNA, 19 nt, Artificial Sequence
  Description of Artificial Sequence: Synthetic oligonucleotide
  Antisense strand to SEQ ID NO: 1992250
cuucacaagcaucaccuug

SEQ ID NO: 1992252 - RNA, 19 nt, Artificial Sequence
  Description of Artificial Sequence: Synthetic oligonucleotide
  Sense strand starting at position 2735 of SEQ ID NO: 1880766
ggugaugcuugugaagaau

SEQ ID NO: 1992253 - RNA, 19 nt, Artificial Sequence
  Description of Artificial Sequence: Synthetic oligonucleotide
  Antisense strand to SEQ ID NO: 1992252
auucuucacaagcaucacc

SEQ ID NO: 1992254 - RNA, 19 nt, Artificial Sequence
  Description of Artificial Sequence: Synthetic oligonucleotide
  Sense strand starting at position 2762 of SEQ ID NO: 1880766
gugcuuucucagcugccua

SEQ ID NO: 1992255 - RNA, 19 nt, Artificial Sequence
  Description of Artificial Sequence: Synthetic oligonucleotide
  Antisense strand to SEQ ID NO: 1992254
uaggcagcugagaaagcac

SEQ ID NO: 1992256 - RNA, 19 nt, Artificial Sequence
  Description of Artificial Sequence: Synthetic oligonucleotide
  Sense strand starting at position 2971 of SEQ ID NO: 1880766
agguucuaauccguguaga

SEQ ID NO: 1992257 - RNA, 19 nt, Artificial Sequence
  Description of Artificial Sequence: Synthetic oligonucleotide
  Antisense strand to SEQ ID NO: 1992256
ucuacacggauuagaaccu

SEQ ID NO: 1992258 - RNA, 19 nt, Artificial Sequence
  Description of Artificial Sequence: Synthetic oligonucleotide
  Sense strand starting at position 2972 of SEQ ID NO: 1880766
gguucuaauccguguagaa

SEQ ID NO: 1992259 - RNA, 19 nt, Artificial Sequence
  Description of Artificial Sequence: Synthetic oligonucleotide
  Antisense strand to SEQ ID NO: 1992258
uucuacacggauuagaacc

SEQ ID NO: 1992260 - RNA, 19 nt, Artificial Sequence
  Description of Artificial Sequence: Synthetic oligonucleotide
  Sense strand starting at position 2974 of SEQ ID NO: 1880766
uucuaauccguguagaaac

SEQ ID NO: 1992261 - RNA, 19 nt, Artificial Sequence
  Description of Artificial Sequence: Synthetic oligonucleotide
  Antisense strand to SEQ ID NO: 1992260
guuucuacacggauuagaa

SEQ ID NO: 1992262 - RNA, 19 nt, Artificial Sequence
  Description of Artificial Sequence: Synthetic oligonucleotide
  Sense strand starting at position 2976 of SEQ ID NO: 1880766
cuaauccguguagaaacua

SEQ ID NO: 1992263 - RNA, 19 nt, Artificial Sequence
  Description of Artificial Sequence: Synthetic oligonucleotide
  Antisense strand to SEQ ID NO: 1992262
uaguuucuacacggauuag

SEQ ID NO: 1992264 - RNA, 19 nt, Artificial Sequence
  Description of Artificial Sequence: Synthetic oligonucleotide
  Sense strand starting at position 3391 of SEQ ID NO: 1880766
guguuaaugcuacaccaaa

SEQ ID NO: 1992265 - RNA, 19 nt, Artificial Sequence
  Description of Artificial Sequence: Synthetic oligonucleotide
  Antisense strand to SEQ ID NO: 1992264
uuugguguagcauuaacac

SEQ ID NO: 1992266 - RNA, 19 nt, Artificial Sequence
  Description of Artificial Sequence: Synthetic oligonucleotide
  Sense strand starting at position 3468 of SEQ ID NO: 1880766
caguuugucuagcucuaga

SEQ ID NO: 1992267 - RNA, 19 nt, Artificial Sequence
  Description of Artificial Sequence: Synthetic oligonucleotide
  Antisense strand to SEQ ID NO: 1992266
ucuagagcuagacaaacug

SEQ ID NO: 1992268 - RNA, 19 nt, Artificial Sequence
  Description of Artificial Sequence: Synthetic oligonucleotide
  Sense strand starting at position 3471 of SEQ ID NO: 1880766
uuugucuagcucuagaaau

SEQ ID NO: 1992269 - RNA, 19 nt, Artificial Sequence
  Description of Artificial Sequence: Synthetic oligonucleotide
  Antisense strand to SEQ ID NO: 1992268
auuucuagagcuagacaaa

SEQ ID NO: 1992270 - RNA, 19 nt, Artificial Sequence
  Description of Artificial Sequence: Synthetic oligonucleotide
  Sense strand starting at position 3473 of SEQ ID NO: 1880766
ugucuagcucuagaaauaa

SEQ ID NO: 1992271 - RNA, 19 nt, Artificial Sequence
  Description of Artificial Sequence: Synthetic oligonucleotide
  Antisense strand to SEQ ID NO: 1992270
uuauuucuagagcuagaca

SEQ ID NO: 1992272 - RNA, 19 nt, Artificial Sequence
  Description of Artificial Sequence: Synthetic oligonucleotide
  Sense strand starting at position 3867 of SEQ ID NO: 1880766
cuuugcucucucgaaccau

SEQ ID NO: 1992273 - RNA, 19 nt, Artificial Sequence
  Description of Artificial Sequence: Synthetic oligonucleotide
  Antisense strand to SEQ ID NO: 1992272
augguucgagagagcaaag

SEQ ID NO: 1992274 - RNA, 19 nt, Artificial Sequence
  Description of Artificial Sequence: Synthetic oligonucleotide
  Sense strand starting at position 113 of SEQ ID NO: 1880767
aagcaauaugugggaauug

SEQ ID NO: 1992275 - RNA, 19 nt, Artificial Sequence
  Description of Artificial Sequence: Synthetic oligonucleotide
  Antisense strand to SEQ ID NO: 1992274
caauucccacauauugcuu

SEQ ID NO: 1992276 - RNA, 19 nt, Artificial Sequence
  Description of Artificial Sequence: Synthetic oligonucleotide
  Sense strand starting at position 118 of SEQ ID NO: 1880767
auaugugggaauuguaaau

SEQ ID NO: 1992277 - RNA, 19 nt, Artificial Sequence
  Description of Artificial Sequence: Synthetic oligonucleotide
  Antisense strand to SEQ ID NO: 1992276
auuuacaauucccacauau

SEQ ID NO: 1992278 - RNA, 19 nt, Artificial Sequence
  Description of Artificial Sequence: Synthetic oligonucleotide
  Sense strand starting at position 138 of SEQ ID NO: 1880767
gcaaaugugcaguacagau

SEQ ID NO: 1992279 - RNA, 19 nt, Artificial Sequence
  Description of Artificial Sequence: Synthetic oligonucleotide
  Antisense strand to SEQ ID NO: 1992278
aucuguacugcacauuugc

SEQ ID NO: 1992280 - RNA, 19 nt, Artificial Sequence
  Description of Artificial Sequence: Synthetic oligonucleotide
  Sense strand starting at position 218 of SEQ ID NO: 1880767
aagagcauuuguuauugga

SEQ ID NO: 1992281 - RNA, 19 nt, Artificial Sequence
  Description of Artificial Sequence: Synthetic oligonucleotide
  Antisense strand to SEQ ID NO: 1992280
uccaauaacaaaugcucuu

SEQ ID NO: 1992282 - RNA, 19 nt, Artificial Sequence
  Description of Artificial Sequence: Synthetic oligonucleotide
  Sense strand starting at position 222 of SEQ ID NO: 1880767
gcauuuguuauuggagagu

SEQ ID NO: 1992283 - RNA, 19 nt, Artificial Sequence
  Description of Artificial Sequence: Synthetic oligonucleotide
  Antisense strand to SEQ ID NO: 1992282
acucuccaauaacaaaugc

SEQ ID NO: 1992284 - RNA, 19 nt, Artificial Sequence
  Description of Artificial Sequence: Synthetic oligonucleotide
  Sense strand starting at position 225 of SEQ ID NO: 1880767
uuuguuauuggagagugua

SEQ ID NO: 1992285 - RNA, 19 nt, Artificial Sequence
  Description of Artificial Sequence: Synthetic oligonucleotide
  Antisense strand to SEQ ID NO: 1992284
uacacucuccaauaacaaa

SEQ ID NO: 1992286 - RNA, 19 nt, Artificial Sequence
  Description of Artificial Sequence: Synthetic oligonucleotide
  Sense strand starting at position 252 of SEQ ID NO: 1880767
ggcccaguucuuuagguaa

SEQ ID NO: 1992287 - RNA, 19 nt, Artificial Sequence
  Description of Artificial Sequence: Synthetic oligonucleotide
  Antisense strand to SEQ ID NO: 1992286
uuaccuaaagaacugggcc

SEQ ID NO: 1992288 - RNA, 19 nt, Artificial Sequence
  Description of Artificial Sequence: Synthetic oligonucleotide
  Sense strand starting at position 274 of SEQ ID NO: 1880767
augagagcaucuuuauaaa

SEQ ID NO: 1992289 - RNA, 19 nt, Artificial Sequence
  Description of Artificial Sequence: Synthetic oligonucleotide
  Antisense strand to SEQ ID NO: 1992288
uuuauaaagaugcucucau

SEQ ID NO: 1992290 - RNA, 19 nt, Artificial Sequence
  Description of Artificial Sequence: Synthetic oligonucleotide
  Sense strand starting at position 314 of SEQ ID NO: 1880767
cuaggaaaggucuggucca

SEQ ID NO: 1992291 - RNA, 19 nt, Artificial Sequence
  Description of Artificial Sequence: Synthetic oligonucleotide
  Antisense strand to SEQ ID NO: 1992290
uggaccagaccuuuccuag

SEQ ID NO: 1992292 - RNA, 19 nt, Artificial Sequence
  Description of Artificial Sequence: Synthetic oligonucleotide
  Sense strand starting at position 509 of SEQ ID NO: 1880767
uccgcacugacuggaaauu

SEQ ID NO: 1992293 - RNA, 19 nt, Artificial Sequence
  Description of Artificial Sequence: Synthetic oligonucleotide
  Antisense strand to SEQ ID NO: 1992292
aauuuccagucagugcgga

SEQ ID NO: 1992294 - RNA, 19 nt, Artificial Sequence
  Description of Artificial Sequence: Synthetic oligonucleotide
  Sense strand starting at position 510 of SEQ ID NO: 1880767
ccgcacugacuggaaauua

SEQ ID NO: 1992295 - RNA, 19 nt, Artificial Sequence
  Description of Artificial Sequence: Synthetic oligonucleotide
  Antisense strand to SEQ ID NO: 1992294
uaauuuccagucagugcgg

SEQ ID NO: 1992296 - RNA, 19 nt, Artificial Sequence
  Description of Artificial Sequence: Synthetic oligonucleotide
  Sense strand starting at position 622 of SEQ ID NO: 1880767
cacagugaacguuagauga

SEQ ID NO: 1992297 - RNA, 19 nt, Artificial Sequence
  Description of Artificial Sequence: Synthetic oligonucleotide
  Antisense strand to SEQ ID NO: 1992296
ucaucuaacguucacugug

SEQ ID NO: 1992298 - RNA, 19 nt, Artificial Sequence
  Description of Artificial Sequence: Synthetic oligonucleotide
  Sense strand starting at position 666 of SEQ ID NO: 1880767
ggugcagggcucuaacaau

SEQ ID NO: 1992299 - RNA, 19 nt, Artificial Sequence
  Description of Artificial Sequence: Synthetic oligonucleotide
  Antisense strand to SEQ ID NO: 1992298
auuguuagagcccugcacc

SEQ ID NO: 1992300 - RNA, 19 nt, Artificial Sequence
  Description of Artificial Sequence: Synthetic oligonucleotide
  Sense strand starting at position 1029 of SEQ ID NO: 1880767
ucauauguugugcaaccau

SEQ ID NO: 1992301 - RNA, 19 nt, Artificial Sequence
  Description of Artificial Sequence: Synthetic oligonucleotide
  Antisense strand to SEQ ID NO: 1992300
augguugcacaacauauga

SEQ ID NO: 1992302 - RNA, 19 nt, Artificial Sequence
  Description of Artificial Sequence: Synthetic oligonucleotide
  Sense strand starting at position 1085 of SEQ ID NO: 1880767
acugaaauucugcaaguac

SEQ ID NO: 1992303 - RNA, 19 nt, Artificial Sequence
  Description of Artificial Sequence: Synthetic oligonucleotide
  Antisense strand to SEQ ID NO: 1992302
guacuugcagaauuucagu

SEQ ID NO: 1992304 - RNA, 19 nt, Artificial Sequence
  Description of Artificial Sequence: Synthetic oligonucleotide
  Sense strand starting at position 1096 of SEQ ID NO: 1880767
gcaaguaccgcugaaauau

SEQ ID NO: 1992305 - RNA, 19 nt, Artificial Sequence
  Description of Artificial Sequence: Synthetic oligonucleotide
  Antisense strand to SEQ ID NO: 1992304
auauuucagcgguacuugc

SEQ ID NO: 1992306 - RNA, 19 nt, Artificial Sequence
  Description of Artificial Sequence: Synthetic oligonucleotide
  Sense strand starting at position 1104 of SEQ ID NO: 1880767
cgcugaaauauggguacuu

SEQ ID NO: 1992307 - RNA, 19 nt, Artificial Sequence
  Description of Artificial Sequence: Synthetic oligonucleotide
  Antisense strand to SEQ ID NO: 1992306
aaguacccauauuucagcg

SEQ ID NO: 1992308 - RNA, 19 nt, Artificial Sequence
  Description of Artificial Sequence: Synthetic oligonucleotide
  Sense strand starting at position 1105 of SEQ ID NO: 1880767
gcugaaauauggguacuug

SEQ ID NO: 1992309 - RNA, 19 nt, Artificial Sequence
  Description of Artificial Sequence: Synthetic oligonucleotide
  Antisense strand to SEQ ID NO: 1992308
caaguacccauauuucagc

SEQ ID NO: 1992310 - RNA, 19 nt, Artificial Sequence
  Description of Artificial Sequence: Synthetic oligonucleotide
  Sense strand starting at position 1106 of SEQ ID NO: 1880767
cugaaauauggguacuugu

SEQ ID NO: 1992311 - RNA, 19 nt, Artificial Sequence
  Description of Artificial Sequence: Synthetic oligonucleotide
  Antisense strand to SEQ ID NO: 1992310
acaaguacccauauuucag

SEQ ID NO: 1992312 - RNA, 19 nt, Artificial Sequence
  Description of Artificial Sequence: Synthetic oligonucleotide
  Sense strand starting at position 1156 of SEQ ID NO: 1880767
gggagccucccggauguuu

SEQ ID NO: 1992313 - RNA, 19 nt, Artificial Sequence
  Description of Artificial Sequence: Synthetic oligonucleotide
  Antisense strand to SEQ ID NO: 1992312
aaacauccgggaggcuccc

SEQ ID NO: 1992314 - RNA, 19 nt, Artificial Sequence
  Description of Artificial Sequence: Synthetic oligonucleotide
  Sense strand starting at position 2087 of SEQ ID NO: 1880767
cuuuauuaaacguaagcga

SEQ ID NO: 1992315 - RNA, 19 nt, Artificial Sequence
  Description of Artificial Sequence: Synthetic oligonucleotide
  Antisense strand to SEQ ID NO: 1992314
ucgcuuacguuuaauaaag

SEQ ID NO: 1992316 - RNA, 19 nt, Artificial Sequence
  Description of Artificial Sequence: Synthetic oligonucleotide
  Sense strand starting at position 2274 of SEQ ID NO: 1880767
ucauucguugaacaauuau

SEQ ID NO: 1992317 - RNA, 19 nt, Artificial Sequence
  Description of Artificial Sequence: Synthetic oligonucleotide
  Antisense strand to SEQ ID NO: 1992316
auaauuguucaacgaauga

SEQ ID NO: 1992318 - RNA, 19 nt, Artificial Sequence
  Description of Artificial Sequence: Synthetic oligonucleotide
  Sense strand starting at position 2285 of SEQ ID NO: 1880767
acaauuauaugagcgccua

SEQ ID NO: 1992319 - RNA, 19 nt, Artificial Sequence
  Description of Artificial Sequence: Synthetic oligonucleotide
  Antisense strand to SEQ ID NO: 1992318
uaggcgcucauauaauugu

SEQ ID NO: 1992320 - RNA, 19 nt, Artificial Sequence
  Description of Artificial Sequence: Synthetic oligonucleotide
  Sense strand starting at position 2692 of SEQ ID NO: 1880767
uacauauaggguugccaga

SEQ ID NO: 1992321 - RNA, 19 nt, Artificial Sequence
  Description of Artificial Sequence: Synthetic oligonucleotide
  Antisense strand to SEQ ID NO: 1992320
ucuggcaacccuauaugua

SEQ ID NO: 1992322 - RNA, 19 nt, Artificial Sequence
  Description of Artificial Sequence: Synthetic oligonucleotide
  Sense strand starting at position 2701 of SEQ ID NO: 1880767
gguugccagaucuagcaaa

SEQ ID NO: 1992323 - RNA, 19 nt, Artificial Sequence
  Description of Artificial Sequence: Synthetic oligonucleotide
  Antisense strand to SEQ ID NO: 1992322
uuugcuagaucuggcaacc

SEQ ID NO: 1992324 - RNA, 19 nt, Artificial Sequence
  Description of Artificial Sequence: Synthetic oligonucleotide
  Sense strand starting at position 2760 of SEQ ID NO: 1880767
aacacuuugggaggucaua

SEQ ID NO: 1992325 - RNA, 19 nt, Artificial Sequence
  Description of Artificial Sequence: Synthetic oligonucleotide
  Antisense strand to SEQ ID NO: 1992324
uaugaccucccaaaguguu

SEQ ID NO: 1992326 - RNA, 19 nt, Artificial Sequence
  Description of Artificial Sequence: Synthetic oligonucleotide
  Sense strand starting at position 2866 of SEQ ID NO: 1880767
guaucucucccgcaaggaa

SEQ ID NO: 1992327 - RNA, 19 nt, Artificial Sequence
  Description of Artificial Sequence: Synthetic oligonucleotide
  Antisense strand to SEQ ID NO: 1992326
uuccuugcgggagagauac

SEQ ID NO: 1992328 - RNA, 19 nt, Artificial Sequence
  Description of Artificial Sequence: Synthetic oligonucleotide
  Sense strand starting at position 3266 of SEQ ID NO: 1880767
augguaaauuuacagugaa

SEQ ID NO: 1992329 - RNA, 19 nt, Artificial Sequence
  Description of Artificial Sequence: Synthetic oligonucleotide
  Antisense strand to SEQ ID NO: 1992328
uucacuguaaauuuaccau

SEQ ID NO: 1992330 - RNA, 19 nt, Artificial Sequence
  Description of Artificial Sequence: Synthetic oligonucleotide
  Sense strand starting at position 3305 of SEQ ID NO: 1880767
ucaaccacgugaucaaagu

SEQ ID NO: 1992331 - RNA, 19 nt, Artificial Sequence
  Description of Artificial Sequence: Synthetic oligonucleotide
  Antisense strand to SEQ ID NO: 1992330
acuuugaucacgugguuga

SEQ ID NO: 1992332 - RNA, 19 nt, Artificial Sequence
  Description of Artificial Sequence: Synthetic oligonucleotide
  Sense strand starting at position 3306 of SEQ ID NO: 1880767
caaccacgugaucaaaguu

SEQ ID NO: 1992333 - RNA, 19 nt, Artificial Sequence
  Description of Artificial Sequence: Synthetic oligonucleotide
  Antisense strand to SEQ ID NO: 1992332
aacuuugaucacgugguug

SEQ ID NO: 1992334 - RNA, 19 nt, Artificial Sequence
  Description of Artificial Sequence: Synthetic oligonucleotide
  Sense strand starting at position 3378 of SEQ ID NO: 1880767
ggagacacaucacuucgua

SEQ ID NO: 1992335 - RNA, 19 nt, Artificial Sequence
  Description of Artificial Sequence: Synthetic oligonucleotide
  Antisense strand to SEQ ID NO: 1992334
uacgaagugaugugucucc

SEQ ID NO: 1992336 - RNA, 19 nt, Artificial Sequence
  Description of Artificial Sequence: Synthetic oligonucleotide
  Sense strand starting at position 3537 of SEQ ID NO: 1880767
guuguaaagcuuuggaaca

SEQ ID NO: 1992337 - RNA, 19 nt, Artificial Sequence
  Description of Artificial Sequence: Synthetic oligonucleotide
  Antisense strand to SEQ ID NO: 1992336
uguuccaaagcuuuacaac

SEQ ID NO: 1992338 - RNA, 19 nt, Artificial Sequence
  Description of Artificial Sequence: Synthetic oligonucleotide
  Sense strand starting at position 3622 of SEQ ID NO: 1880767
agauaaauugcuuguacuc

SEQ ID NO: 1992339 - RNA, 19 nt, Artificial Sequence
  Description of Artificial Sequence: Synthetic oligonucleotide
  Antisense strand to SEQ ID NO: 1992338
gaguacaagcaauuuaucu

SEQ ID NO: 1992340 - RNA, 19 nt, Artificial Sequence
  Description of Artificial Sequence: Synthetic oligonucleotide
  Sense strand starting at position 3647 of SEQ ID NO: 1880767
gcuccaaggccaugaaaga

SEQ ID NO: 1992341 - RNA, 19 nt, Artificial Sequence
  Description of Artificial Sequence: Synthetic oligonucleotide
  Antisense strand to SEQ ID NO: 1992340
ucuuucauggccuuggagc

SEQ ID NO: 1992342 - RNA, 19 nt, Artificial Sequence
  Description of Artificial Sequence: Synthetic oligonucleotide
  Sense strand starting at position 3672 of SEQ ID NO: 1880767
augagaaacuguucuccau

SEQ ID NO: 1992343 - RNA, 19 nt, Artificial Sequence
  Description of Artificial Sequence: Synthetic oligonucleotide
  Antisense strand to SEQ ID NO: 1992342
auggagaacaguuucucau

SEQ ID NO: 1992344 - RNA, 19 nt, Artificial Sequence
  Description of Artificial Sequence: Synthetic oligonucleotide
  Sense strand starting at position 3838 of SEQ ID NO: 1880767
augaauaaagucugcaacu

SEQ ID NO: 1992345 - RNA, 19 nt, Artificial Sequence
  Description of Artificial Sequence: Synthetic oligonucleotide
  Antisense strand to SEQ ID NO: 1992344
aguugcagacuuuauucau

SEQ ID NO: 1992346 - RNA, 19 nt, Artificial Sequence
  Description of Artificial Sequence: Synthetic oligonucleotide
  Sense strand starting at position 3839 of SEQ ID NO: 1880767
ugaauaaagucugcaacua

SEQ ID NO: 1992347 - RNA, 19 nt, Artificial Sequence
  Description of Artificial Sequence: Synthetic oligonucleotide
  Antisense strand to SEQ ID NO: 1992346
uaguugcagacuuuauuca

SEQ ID NO: 1992348 - RNA, 19 nt, Artificial Sequence
  Description of Artificial Sequence: Synthetic oligonucleotide
  Sense strand starting at position 3936 of SEQ ID NO: 1880767
aggaccaugucuguaacuu

SEQ ID NO: 1992349 - RNA, 19 nt, Artificial Sequence
  Description of Artificial Sequence: Synthetic oligonucleotide
  Antisense strand to SEQ ID NO: 1992348
aaguuacagacaugguccu

SEQ ID NO: 1992350 - RNA, 19 nt, Artificial Sequence
  Description of Artificial Sequence: Synthetic oligonucleotide
  Sense strand starting at position 3937 of SEQ ID NO: 1880767
ggaccaugucuguaacuua

SEQ ID NO: 1992351 - RNA, 19 nt, Artificial Sequence
  Description of Artificial Sequence: Synthetic oligonucleotide
  Antisense strand to SEQ ID NO: 1992350
uaaguuacagacauggucc

SEQ ID NO: 1992352 - RNA, 19 nt, Artificial Sequence
  Description of Artificial Sequence: Synthetic oligonucleotide
  Sense strand starting at position 3981 of SEQ ID NO: 1880767
augcuuuguauguauaagu

SEQ ID NO: 1992353 - RNA, 19 nt, Artificial Sequence
  Description of Artificial Sequence: Synthetic oligonucleotide
  Antisense strand to SEQ ID NO: 1992352
acuuauacauacaaagcau

SEQ ID NO: 1992354 - RNA, 19 nt, Artificial Sequence
  Description of Artificial Sequence: Synthetic oligonucleotide
  Sense strand starting at position 53 of SEQ ID NO: 1880768
ucugcuauccaaggauuau

SEQ ID NO: 1992355 - RNA, 19 nt, Artificial Sequence
  Description of Artificial Sequence: Synthetic oligonucleotide
  Antisense strand to SEQ ID NO: 1992354
auaauccuuggauagcaga

SEQ ID NO: 1992356 - RNA, 19 nt, Artificial Sequence
  Description of Artificial Sequence: Synthetic oligonucleotide
  Sense strand starting at position 161 of SEQ ID NO: 1880768
gguguaaugacuuaguagu

SEQ ID NO: 1992357 - RNA, 19 nt, Artificial Sequence
  Description of Artificial Sequence: Synthetic oligonucleotide
  Antisense strand to SEQ ID NO: 1992356
acuacuaagucauuacacc

SEQ ID NO: 1992358 - RNA, 19 nt, Artificial Sequence
  Description of Artificial Sequence: Synthetic oligonucleotide
  Sense strand starting at position 440 of SEQ ID NO: 1880768
uuaaaucgcugaucuaacu

SEQ ID NO: 1992359 - RNA, 19 nt, Artificial Sequence
  Description of Artificial Sequence: Synthetic oligonucleotide
  Antisense strand to SEQ ID NO: 1992358
aguuagaucagcgauuuaa

SEQ ID NO: 1992360 - RNA, 19 nt, Artificial Sequence
  Description of Artificial Sequence: Synthetic oligonucleotide
  Sense strand starting at position 498 of SEQ ID NO: 1880768
agaaauaaucauugcuuga

SEQ ID NO: 1992361 - RNA, 19 nt, Artificial Sequence
  Description of Artificial Sequence: Synthetic oligonucleotide
  Antisense strand to SEQ ID NO: 1992360
ucaagcaaugauuauuucu

SEQ ID NO: 1992362 - RNA, 19 nt, Artificial Sequence
  Description of Artificial Sequence: Synthetic oligonucleotide
  Sense strand starting at position 519 of SEQ ID NO: 1880768
ucucaagauuagucauuga

SEQ ID NO: 1992363 - RNA, 19 nt, Artificial Sequence
  Description of Artificial Sequence: Synthetic oligonucleotide
  Antisense strand to SEQ ID NO: 1992362
ucaaugacuaaucuugaga

SEQ ID NO: 1992364 - RNA, 19 nt, Artificial Sequence
  Description of Artificial Sequence: Synthetic oligonucleotide
  Sense strand starting at position 635 of SEQ ID NO: 1880768
aggagcuucucuccucuaa

SEQ ID NO: 1992365 - RNA, 19 nt, Artificial Sequence
  Description of Artificial Sequence: Synthetic oligonucleotide
  Antisense strand to SEQ ID NO: 1992364
uuagaggagagaagcuccu

SEQ ID NO: 1992366 - RNA, 19 nt, Artificial Sequence
  Description of Artificial Sequence: Synthetic oligonucleotide
  Sense strand starting at position 819 of SEQ ID NO: 1880768
ucauuacuguacucauguu

SEQ ID NO: 1992367 - RNA, 19 nt, Artificial Sequence
  Description of Artificial Sequence: Synthetic oligonucleotide
  Antisense strand to SEQ ID NO: 1992366
aacaugaguacaguaauga

SEQ ID NO: 1992368 - RNA, 19 nt, Artificial Sequence
  Description of Artificial Sequence: Synthetic oligonucleotide
  Sense strand starting at position 845 of SEQ ID NO: 1880768
cugcuagggaguuaugacu

SEQ ID NO: 1992369 - RNA, 19 nt, Artificial Sequence
  Description of Artificial Sequence: Synthetic oligonucleotide
  Antisense strand to SEQ ID NO: 1992368
agucauaacucccuagcag

SEQ ID NO: 1992370 - RNA, 19 nt, Artificial Sequence
  Description of Artificial Sequence: Synthetic oligonucleotide
  Sense strand starting at position 1232 of SEQ ID NO: 1880768
ccuagagucuuagcaaaug

SEQ ID NO: 1992371 - RNA, 19 nt, Artificial Sequence
  Description of Artificial Sequence: Synthetic oligonucleotide
  Antisense strand to SEQ ID NO: 1992370
cauuugcuaagacucuagg

SEQ ID NO: 1992372 - RNA, 19 nt, Artificial Sequence
  Description of Artificial Sequence: Synthetic oligonucleotide
  Sense strand starting at position 1275 of SEQ ID NO: 1880768
aagcaagaagucugguguu

SEQ ID NO: 1992373 - RNA, 19 nt, Artificial Sequence
  Description of Artificial Sequence: Synthetic oligonucleotide
  Antisense strand to SEQ ID NO: 1992372
aacaccagacuucuugcuu

SEQ ID NO: 1992374 - RNA, 19 nt, Artificial Sequence
  Description of Artificial Sequence: Synthetic oligonucleotide
  Sense strand starting at position 1306 of SEQ ID NO: 1880768
gguaacaacugauuaguga

SEQ ID NO: 1992375 - RNA, 19 nt, Artificial Sequence
  Description of Artificial Sequence: Synthetic oligonucleotide
  Antisense strand to SEQ ID NO: 1992374
ucacuaaucaguuguuacc

SEQ ID NO: 1992376 - RNA, 19 nt, Artificial Sequence
  Description of Artificial Sequence: Synthetic oligonucleotide
  Sense strand starting at position 1573 of SEQ ID NO: 1880768
gugagauaagguugguagu

SEQ ID NO: 1992377 - RNA, 19 nt, Artificial Sequence
  Description of Artificial Sequence: Synthetic oligonucleotide
  Antisense strand to SEQ ID NO: 1992376
acuaccaaccuuaucucac

SEQ ID NO: 1992378 - RNA, 19 nt, Artificial Sequence
  Description of Artificial Sequence: Synthetic oligonucleotide
  Sense strand starting at position 2148 of SEQ ID NO: 1880768
uccuuucuguaagccagaa

SEQ ID NO: 1992379 - RNA, 19 nt, Artificial Sequence
  Description of Artificial Sequence: Synthetic oligonucleotide
  Antisense strand to SEQ ID NO: 1992378
uucuggcuuacagaaagga

SEQ ID NO: 1992380 - RNA, 19 nt, Artificial Sequence
  Description of Artificial Sequence: Synthetic oligonucleotide
  Sense strand starting at position 2168 of SEQ ID NO: 1880768
uuuguaaccgaguaacauu

SEQ ID NO: 1992381 - RNA, 19 nt, Artificial Sequence
  Description of Artificial Sequence: Synthetic oligonucleotide
  Antisense strand to SEQ ID NO: 1992380
aauguuacucgguuacaaa

SEQ ID NO: 1992382 - RNA, 19 nt, Artificial Sequence
  Description of Artificial Sequence: Synthetic oligonucleotide
  Sense strand starting at position 2378 of SEQ ID NO: 1880768
guaauaauauuaucgccau

SEQ ID NO: 1992383 - RNA, 19 nt, Artificial Sequence
  Description of Artificial Sequence: Synthetic oligonucleotide
  Antisense strand to SEQ ID NO: 1992382
auggcgauaauauuauuac

SEQ ID NO: 1992384 - RNA, 19 nt, Artificial Sequence
  Description of Artificial Sequence: Synthetic oligonucleotide
  Sense strand starting at position 2492 of SEQ ID NO: 1880768
cauuauauugcuggguuga

SEQ ID NO: 1992385 - RNA, 19 nt, Artificial Sequence
  Description of Artificial Sequence: Synthetic oligonucleotide
  Antisense strand to SEQ ID NO: 1992384
ucaacccagcaauauaaug

SEQ ID NO: 1992386 - RNA, 19 nt, Artificial Sequence
  Description of Artificial Sequence: Synthetic oligonucleotide
  Sense strand starting at position 2493 of SEQ ID NO: 1880768
auuauauugcuggguugau

SEQ ID NO: 1992387 - RNA, 19 nt, Artificial Sequence
  Description of Artificial Sequence: Synthetic oligonucleotide
  Antisense strand to SEQ ID NO: 1992386
aucaacccagcaauauaau

SEQ ID NO: 1992388 - RNA, 19 nt, Artificial Sequence
  Description of Artificial Sequence: Synthetic oligonucleotide
  Sense strand starting at position 2494 of SEQ ID NO: 1880768
uuauauugcuggguugauu

SEQ ID NO: 1992389 - RNA, 19 nt, Artificial Sequence
  Description of Artificial Sequence: Synthetic oligonucleotide
  Antisense strand to SEQ ID NO: 1992388
aaucaacccagcaauauaa

SEQ ID NO: 1992390 - RNA, 19 nt, Artificial Sequence
  Description of Artificial Sequence: Synthetic oligonucleotide
  Sense strand starting at position 2507 of SEQ ID NO: 1880768
uugauuaguccguggauag

SEQ ID NO: 1992391 - RNA, 19 nt, Artificial Sequence
  Description of Artificial Sequence: Synthetic oligonucleotide
  Antisense strand to SEQ ID NO: 1992390
cuauccacggacuaaucaa

SEQ ID NO: 1992392 - RNA, 19 nt, Artificial Sequence
  Description of Artificial Sequence: Synthetic oligonucleotide
  Sense strand starting at position 2508 of SEQ ID NO: 1880768
ugauuaguccguggauaga

SEQ ID NO: 1992393 - RNA, 19 nt, Artificial Sequence
  Description of Artificial Sequence: Synthetic oligonucleotide
  Antisense strand to SEQ ID NO: 1992392
ucuauccacggacuaauca

SEQ ID NO: 1992394 - RNA, 19 nt, Artificial Sequence
  Description of Artificial Sequence: Synthetic oligonucleotide
  Sense strand starting at position 2518 of SEQ ID NO: 1880768
guggauagacauuaguguu

SEQ ID NO: 1992395 - RNA, 19 nt, Artificial Sequence
  Description of Artificial Sequence: Synthetic oligonucleotide
  Antisense strand to SEQ ID NO: 1992394
aacacuaaugucuauccac

SEQ ID NO: 1992396 - RNA, 19 nt, Artificial Sequence
  Description of Artificial Sequence: Synthetic oligonucleotide
  Sense strand starting at position 2556 of SEQ ID NO: 1880768
ucaaacaugcuuggcagaa

SEQ ID NO: 1992397 - RNA, 19 nt, Artificial Sequence
  Description of Artificial Sequence: Synthetic oligonucleotide
  Antisense strand to SEQ ID NO: 1992396
uucugccaagcauguuuga

SEQ ID NO: 1992398 - RNA, 19 nt, Artificial Sequence
  Description of Artificial Sequence: Synthetic oligonucleotide
  Sense strand starting at position 2634 of SEQ ID NO: 1880768
aaaugaugcucagcuugga

SEQ ID NO: 1992399 - RNA, 19 nt, Artificial Sequence
  Description of Artificial Sequence: Synthetic oligonucleotide
  Antisense strand to SEQ ID NO: 1992398
uccaagcugagcaucauuu

SEQ ID NO: 1992400 - RNA, 19 nt, Artificial Sequence
  Description of Artificial Sequence: Synthetic oligonucleotide
  Sense strand starting at position 2637 of SEQ ID NO: 1880768
ugaugcucagcuuggagaa

SEQ ID NO: 1992401 - RNA, 19 nt, Artificial Sequence
  Description of Artificial Sequence: Synthetic oligonucleotide
  Antisense strand to SEQ ID NO: 1992400
uucuccaagcugagcauca

SEQ ID NO: 1992402 - RNA, 19 nt, Artificial Sequence
  Description of Artificial Sequence: Synthetic oligonucleotide
  Sense strand starting at position 2638 of SEQ ID NO: 1880768
gaugcucagcuuggagaau

SEQ ID NO: 1992403 - RNA, 19 nt, Artificial Sequence
  Description of Artificial Sequence: Synthetic oligonucleotide
  Antisense strand to SEQ ID NO: 1992402
auucuccaagcugagcauc

SEQ ID NO: 1992404 - RNA, 19 nt, Artificial Sequence
  Description of Artificial Sequence: Synthetic oligonucleotide
  Sense strand starting at position 2729 of SEQ ID NO: 1880768
cugaguaacuuugucuuaa

SEQ ID NO: 1992405 - RNA, 19 nt, Artificial Sequence
  Description of Artificial Sequence: Synthetic oligonucleotide
  Antisense strand to SEQ ID NO: 1992404
uuaagacaaaguuacucag

SEQ ID NO: 1992406 - RNA, 19 nt, Artificial Sequence
  Description of Artificial Sequence: Synthetic oligonucleotide
  Sense strand starting at position 2730 of SEQ ID NO: 1880768
ugaguaacuuugucuuaac

SEQ ID NO: 1992407 - RNA, 19 nt, Artificial Sequence
  Description of Artificial Sequence: Synthetic oligonucleotide
  Antisense strand to SEQ ID NO: 1992406
guuaagacaaaguuacuca

SEQ ID NO: 1992408 - RNA, 19 nt, Artificial Sequence
  Description of Artificial Sequence: Synthetic oligonucleotide
  Sense strand starting at position 2790 of SEQ ID NO: 1880768
gcauuacagauugguggua

SEQ ID NO: 1992409 - RNA, 19 nt, Artificial Sequence
  Description of Artificial Sequence: Synthetic oligonucleotide
  Antisense strand to SEQ ID NO: 1992408
uaccaccaaucuguaaugc

SEQ ID NO: 1992410 - RNA, 19 nt, Artificial Sequence
  Description of Artificial Sequence: Synthetic oligonucleotide
  Sense strand starting at position 2804 of SEQ ID NO: 1880768
ugguauuacaagugggaca

SEQ ID NO: 1992411 - RNA, 19 nt, Artificial Sequence
  Description of Artificial Sequence: Synthetic oligonucleotide
  Antisense strand to SEQ ID NO: 1992410
ugucccacuuguaauacca

SEQ ID NO: 1992412 - RNA, 19 nt, Artificial Sequence
  Description of Artificial Sequence: Synthetic oligonucleotide
  Sense strand starting at position 2869 of SEQ ID NO: 1880768
aguucagagaggugaggua

SEQ ID NO: 1992413 - RNA, 19 nt, Artificial Sequence
  Description of Artificial Sequence: Synthetic oligonucleotide
  Antisense strand to SEQ ID NO: 1992412
uaccucaccucucugaacu

SEQ ID NO: 1992414 - RNA, 19 nt, Artificial Sequence
  Description of Artificial Sequence: Synthetic oligonucleotide
  Sense strand starting at position 2947 of SEQ ID NO: 1880768
ggaaaccuguauucuaaga

SEQ ID NO: 1992415 - RNA, 19 nt, Artificial Sequence
  Description of Artificial Sequence: Synthetic oligonucleotide
  Antisense strand to SEQ ID NO: 1992414
ucuuagaauacagguuucc

SEQ ID NO: 1992416 - RNA, 19 nt, Artificial Sequence
  Description of Artificial Sequence: Synthetic oligonucleotide
  Sense strand starting at position 2974 of SEQ ID NO: 1880768
ccaugacauuuagaaagcu

SEQ ID NO: 1992417 - RNA, 19 nt, Artificial Sequence
  Description of Artificial Sequence: Synthetic oligonucleotide
  Antisense strand to SEQ ID NO: 1992416
agcuuucuaaaugucaugg

SEQ ID NO: 1992418 - RNA, 19 nt, Artificial Sequence
  Description of Artificial Sequence: Synthetic oligonucleotide
  Sense strand starting at position 3002 of SEQ ID NO: 1880768
uucuuuauauccguagauc

SEQ ID NO: 1992419 - RNA, 19 nt, Artificial Sequence
  Description of Artificial Sequence: Synthetic oligonucleotide
  Antisense strand to SEQ ID NO: 1992418
gaucuacggauauaaagaa

SEQ ID NO: 1992420 - RNA, 19 nt, Artificial Sequence
  Description of Artificial Sequence: Synthetic oligonucleotide
  Sense strand starting at position 3003 of SEQ ID NO: 1880768
ucuuuauauccguagaucu

SEQ ID NO: 1992421 - RNA, 19 nt, Artificial Sequence
  Description of Artificial Sequence: Synthetic oligonucleotide
  Antisense strand to SEQ ID NO: 1992420
agaucuacggauauaaaga

SEQ ID NO: 1992422 - RNA, 19 nt, Artificial Sequence
  Description of Artificial Sequence: Synthetic oligonucleotide
  Sense strand starting at position 3005 of SEQ ID NO: 1880768
uuuauauccguagaucucu

SEQ ID NO: 1992423 - RNA, 19 nt, Artificial Sequence
  Description of Artificial Sequence: Synthetic oligonucleotide
  Antisense strand to SEQ ID NO: 1992422
agagaucuacggauauaaa

SEQ ID NO: 1992424 - RNA, 19 nt, Artificial Sequence
  Description of Artificial Sequence: Synthetic oligonucleotide
  Sense strand starting at position 3011 of SEQ ID NO: 1880768
uccguagaucucuauuacu

SEQ ID NO: 1992425 - RNA, 19 nt, Artificial Sequence
  Description of Artificial Sequence: Synthetic oligonucleotide
  Antisense strand to SEQ ID NO: 1992424
aguaauagagaucuacgga

SEQ ID NO: 1992426 - RNA, 19 nt, Artificial Sequence
  Description of Artificial Sequence: Synthetic oligonucleotide
  Sense strand starting at position 3821 of SEQ ID NO: 1880768
gugucuucucuauagcuga

SEQ ID NO: 1992427 - RNA, 19 nt, Artificial Sequence
  Description of Artificial Sequence: Synthetic oligonucleotide
  Antisense strand to SEQ ID NO: 1992426
ucagcuauagagaagacac

SEQ ID NO: 1992428 - RNA, 19 nt, Artificial Sequence
  Description of Artificial Sequence: Synthetic oligonucleotide
  Sense strand starting at position 3849 of SEQ ID NO: 1880768
uugacaagcagcugugaau

SEQ ID NO: 1992429 - RNA, 19 nt, Artificial Sequence
  Description of Artificial Sequence: Synthetic oligonucleotide
  Antisense strand to SEQ ID NO: 1992428
auucacagcugcuugucaa

SEQ ID NO: 1992430 - RNA, 19 nt, Artificial Sequence
  Description of Artificial Sequence: Synthetic oligonucleotide
  Sense strand starting at position 3855 of SEQ ID NO: 1880768
agcagcugugaauaguaga

SEQ ID NO: 1992431 - RNA, 19 nt, Artificial Sequence
  Description of Artificial Sequence: Synthetic oligonucleotide
  Antisense strand to SEQ ID NO: 1992430
ucuacuauucacagcugcu

SEQ ID NO: 1992432 - RNA, 19 nt, Artificial Sequence
  Description of Artificial Sequence: Synthetic oligonucleotide
  Sense strand starting at position 3962 of SEQ ID NO: 1880768
cuccucaucccauagguau

SEQ ID NO: 1992433 - RNA, 19 nt, Artificial Sequence
  Description of Artificial Sequence: Synthetic oligonucleotide
  Antisense strand to SEQ ID NO: 1992432
auaccuaugggaugaggag

SEQ ID NO: 1992434 - RNA, 19 nt, Artificial Sequence
  Description of Artificial Sequence: Synthetic oligonucleotide
  Sense strand starting at position 47 of SEQ ID NO: 1880769
gaagaacaguugggaugaa

SEQ ID NO: 1992435 - RNA, 19 nt, Artificial Sequence
  Description of Artificial Sequence: Synthetic oligonucleotide
  Antisense strand to SEQ ID NO: 1992434
uucaucccaacuguucuuc

SEQ ID NO: 1992436 - RNA, 19 nt, Artificial Sequence
  Description of Artificial Sequence: Synthetic oligonucleotide
  Sense strand starting at position 48 of SEQ ID NO: 1880769
aagaacaguugggaugaaa

SEQ ID NO: 1992437 - RNA, 19 nt, Artificial Sequence
  Description of Artificial Sequence: Synthetic oligonucleotide
  Antisense strand to SEQ ID NO: 1992436
uuucaucccaacuguucuu

SEQ ID NO: 1992438 - RNA, 19 nt, Artificial Sequence
  Description of Artificial Sequence: Synthetic oligonucleotide
  Sense strand starting at position 118 of SEQ ID NO: 1880769
guaagucuggcacaaauuc

SEQ ID NO: 1992439 - RNA, 19 nt, Artificial Sequence
  Description of Artificial Sequence: Synthetic oligonucleotide
  Antisense strand to SEQ ID NO: 1992438
gaauuugugccagacuuac

SEQ ID NO: 1992440 - RNA, 19 nt, Artificial Sequence
  Description of Artificial Sequence: Synthetic oligonucleotide
  Sense strand starting at position 205 of SEQ ID NO: 1880769
ucccgcucacuggaaauua

SEQ ID NO: 1992441 - RNA, 19 nt, Artificial Sequence
  Description of Artificial Sequence: Synthetic oligonucleotide
  Antisense strand to SEQ ID NO: 1992440
uaauuuccagugagcggga

SEQ ID NO: 1992442 - RNA, 19 nt, Artificial Sequence
  Description of Artificial Sequence: Synthetic oligonucleotide
  Sense strand starting at position 281 of SEQ ID NO: 1880769
cuuccuccacugggagaaa

SEQ ID NO: 1992443 - RNA, 19 nt, Artificial Sequence
  Description of Artificial Sequence: Synthetic oligonucleotide
  Antisense strand to SEQ ID NO: 1992442
uuucucccaguggaggaag

SEQ ID NO: 1992444 - RNA, 19 nt, Artificial Sequence
  Description of Artificial Sequence: Synthetic oligonucleotide
  Sense strand starting at position 602 of SEQ ID NO: 1880769
acagguugugggcaacaga

SEQ ID NO: 1992445 - RNA, 19 nt, Artificial Sequence
  Description of Artificial Sequence: Synthetic oligonucleotide
  Antisense strand to SEQ ID NO: 1992444
ucuguugcccacaaccugu

SEQ ID NO: 1992446 - RNA, 19 nt, Artificial Sequence
  Description of Artificial Sequence: Synthetic oligonucleotide
  Sense strand starting at position 674 of SEQ ID NO: 1880769
gggaaagugcgaugaauug

SEQ ID NO: 1992447 - RNA, 19 nt, Artificial Sequence
  Description of Artificial Sequence: Synthetic oligonucleotide
  Antisense strand to SEQ ID NO: 1992446
caauucaucgcacuuuccc

SEQ ID NO: 1992448 - RNA, 19 nt, Artificial Sequence
  Description of Artificial Sequence: Synthetic oligonucleotide
  Sense strand starting at position 817 of SEQ ID NO: 1880769
agucuuagaccuugacaaa

SEQ ID NO: 1992449 - RNA, 19 nt, Artificial Sequence
  Description of Artificial Sequence: Synthetic oligonucleotide
  Antisense strand to SEQ ID NO: 1992448
uuugucaaggucuaagacu

SEQ ID NO: 1992450 - RNA, 19 nt, Artificial Sequence
  Description of Artificial Sequence: Synthetic oligonucleotide
  Sense strand starting at position 984 of SEQ ID NO: 1880769
acaccauacuucucguuga

SEQ ID NO: 1992451 - RNA, 19 nt, Artificial Sequence
  Description of Artificial Sequence: Synthetic oligonucleotide
  Antisense strand to SEQ ID NO: 1992450
ucaacgagaaguauggugu

SEQ ID NO: 1992452 - RNA, 19 nt, Artificial Sequence
  Description of Artificial Sequence: Synthetic oligonucleotide
  Sense strand starting at position 987 of SEQ ID NO: 1880769
ccauacuucucguugaacu

SEQ ID NO: 1992453 - RNA, 19 nt, Artificial Sequence
  Description of Artificial Sequence: Synthetic oligonucleotide
  Antisense strand to SEQ ID NO: 1992452
aguucaacgagaaguaugg

SEQ ID NO: 1992454 - RNA, 19 nt, Artificial Sequence
  Description of Artificial Sequence: Synthetic oligonucleotide
  Sense strand starting at position 988 of SEQ ID NO: 1880769
cauacuucucguugaacug

SEQ ID NO: 1992455 - RNA, 19 nt, Artificial Sequence
  Description of Artificial Sequence: Synthetic oligonucleotide
  Antisense strand to SEQ ID NO: 1992454
caguucaacgagaaguaug

SEQ ID NO: 1992456 - RNA, 19 nt, Artificial Sequence
  Description of Artificial Sequence: Synthetic oligonucleotide
  Sense strand starting at position 1279 of SEQ ID NO: 1880769
aggccauguagucagugau

SEQ ID NO: 1992457 - RNA, 19 nt, Artificial Sequence
  Description of Artificial Sequence: Synthetic oligonucleotide
  Antisense strand to SEQ ID NO: 1992456
aucacugacuacauggccu

SEQ ID NO: 1992458 - RNA, 19 nt, Artificial Sequence
  Description of Artificial Sequence: Synthetic oligonucleotide
  Sense strand starting at position 1282 of SEQ ID NO: 1880769
ccauguagucagugaucuc

SEQ ID NO: 1992459 - RNA, 19 nt, Artificial Sequence
  Description of Artificial Sequence: Synthetic oligonucleotide
  Antisense strand to SEQ ID NO: 1992458
gagaucacugacuacaugg

SEQ ID NO: 1992460 - RNA, 19 nt, Artificial Sequence
  Description of Artificial Sequence: Synthetic oligonucleotide
  Sense strand starting at position 1775 of SEQ ID NO: 1880769
agcaguccuggcugaggaa

SEQ ID NO: 1992461 - RNA, 19 nt, Artificial Sequence
  Description of Artificial Sequence: Synthetic oligonucleotide
  Antisense strand to SEQ ID NO: 1992460
uuccucagccaggacugcu

SEQ ID NO: 1992462 - RNA, 19 nt, Artificial Sequence
  Description of Artificial Sequence: Synthetic oligonucleotide
  Sense strand starting at position 1816 of SEQ ID NO: 1880769
guggaaacggauuaaguca

SEQ ID NO: 1992463 - RNA, 19 nt, Artificial Sequence
  Description of Artificial Sequence: Synthetic oligonucleotide
  Antisense strand to SEQ ID NO: 1992462
ugacuuaauccguuuccac

SEQ ID NO: 1992464 - RNA, 19 nt, Artificial Sequence
  Description of Artificial Sequence: Synthetic oligonucleotide
  Sense strand starting at position 1863 of SEQ ID NO: 1880769
gagacaaugucagugucca

SEQ ID NO: 1992465 - RNA, 19 nt, Artificial Sequence
  Description of Artificial Sequence: Synthetic oligonucleotide
  Antisense strand to SEQ ID NO: 1992464
uggacacugacauugucuc

SEQ ID NO: 1992466 - RNA, 19 nt, Artificial Sequence
  Description of Artificial Sequence: Synthetic oligonucleotide
  Sense strand starting at position 1958 of SEQ ID NO: 1880769
ggccuugacccggagaagu

SEQ ID NO: 1992467 - RNA, 19 nt, Artificial Sequence
  Description of Artificial Sequence: Synthetic oligonucleotide
  Antisense strand to SEQ ID NO: 1992466
acuucuccgggucaaggcc

SEQ ID NO: 1992468 - RNA, 19 nt, Artificial Sequence
  Description of Artificial Sequence: Synthetic oligonucleotide
  Sense strand starting at position 2559 of SEQ ID NO: 1880769
gcugcauuccaagagguua

SEQ ID NO: 1992469 - RNA, 19 nt, Artificial Sequence
  Description of Artificial Sequence: Synthetic oligonucleotide
  Antisense strand to SEQ ID NO: 1992468
uaaccucuuggaaugcagc

SEQ ID NO: 1992470 - RNA, 19 nt, Artificial Sequence
  Description of Artificial Sequence: Synthetic oligonucleotide
  Sense strand starting at position 2711 of SEQ ID NO: 1880769
ggucauccucacugccaaa

SEQ ID NO: 1992471 - RNA, 19 nt, Artificial Sequence
  Description of Artificial Sequence: Synthetic oligonucleotide
  Antisense strand to SEQ ID NO: 1992470
uuuggcagugaggaugacc

SEQ ID NO: 1992472 - RNA, 19 nt, Artificial Sequence
  Description of Artificial Sequence: Synthetic oligonucleotide
  Sense strand starting at position 2763 of SEQ ID NO: 1880769
auggaaaccucaguaaguu

SEQ ID NO: 1992473 - RNA, 19 nt, Artificial Sequence
  Description of Artificial Sequence: Synthetic oligonucleotide
  Antisense strand to SEQ ID NO: 1992472
aacuuacugagguuuccau

SEQ ID NO: 1992474 - RNA, 19 nt, Artificial Sequence
  Description of Artificial Sequence: Synthetic oligonucleotide
  Sense strand starting at position 2772 of SEQ ID NO: 1880769
ucaguaaguuacccuguau

SEQ ID NO: 1992475 - RNA, 19 nt, Artificial Sequence
  Description of Artificial Sequence: Synthetic oligonucleotide
  Antisense strand to SEQ ID NO: 1992474
auacaggguaacuuacuga

SEQ ID NO: 1992476 - RNA, 19 nt, Artificial Sequence
  Description of Artificial Sequence: Synthetic oligonucleotide
  Sense strand starting at position 2930 of SEQ ID NO: 1880769
acuugcuuucuuuggagua

SEQ ID NO: 1992477 - RNA, 19 nt, Artificial Sequence
  Description of Artificial Sequence: Synthetic oligonucleotide
  Antisense strand to SEQ ID NO: 1992476
uacuccaaagaaagcaagu

SEQ ID NO: 1992478 - RNA, 19 nt, Artificial Sequence
  Description of Artificial Sequence: Synthetic oligonucleotide
  Sense strand starting at position 3001 of SEQ ID NO: 1880769
uauggacuguccuugaauu

SEQ ID NO: 1992479 - RNA, 19 nt, Artificial Sequence
  Description of Artificial Sequence: Synthetic oligonucleotide
  Antisense strand to SEQ ID NO: 1992478
aauucaaggacaguccaua

SEQ ID NO: 1992480 - RNA, 19 nt, Artificial Sequence
  Description of Artificial Sequence: Synthetic oligonucleotide
  Sense strand starting at position 3002 of SEQ ID NO: 1880769
auggacuguccuugaauua

SEQ ID NO: 1992481 - RNA, 19 nt, Artificial Sequence
  Description of Artificial Sequence: Synthetic oligonucleotide
  Antisense strand to SEQ ID NO: 1992480
uaauucaaggacaguccau

SEQ ID NO: 1992482 - RNA, 19 nt, Artificial Sequence
  Description of Artificial Sequence: Synthetic oligonucleotide
  Sense strand starting at position 3003 of SEQ ID NO: 1880769
uggacuguccuugaauuau

SEQ ID NO: 1992483 - RNA, 19 nt, Artificial Sequence
  Description of Artificial Sequence: Synthetic oligonucleotide
  Antisense strand to SEQ ID NO: 1992482
auaauucaaggacagucca

SEQ ID NO: 1992484 - RNA, 19 nt, Artificial Sequence
  Description of Artificial Sequence: Synthetic oligonucleotide
  Sense strand starting at position 3074 of SEQ ID NO: 1880769
ucugguaacaaugggauua

SEQ ID NO: 1992485 - RNA, 19 nt, Artificial Sequence
  Description of Artificial Sequence: Synthetic oligonucleotide
  Antisense strand to SEQ ID NO: 1992484
uaaucccauuguuaccaga

SEQ ID NO: 1992486 - RNA, 19 nt, Artificial Sequence
  Description of Artificial Sequence: Synthetic oligonucleotide
  Sense strand starting at position 3076 of SEQ ID NO: 1880769
ugguaacaaugggauuaca

SEQ ID NO: 1992487 - RNA, 19 nt, Artificial Sequence
  Description of Artificial Sequence: Synthetic oligonucleotide
  Antisense strand to SEQ ID NO: 1992486
uguaaucccauuguuacca

SEQ ID NO: 1992488 - RNA, 19 nt, Artificial Sequence
  Description of Artificial Sequence: Synthetic oligonucleotide
  Sense strand starting at position 3127 of SEQ ID NO: 1880769
auuauugaucuauggccaa

SEQ ID NO: 1992489 - RNA, 19 nt, Artificial Sequence
  Description of Artificial Sequence: Synthetic oligonucleotide
  Antisense strand to SEQ ID NO: 1992488
uuggccauagaucaauaau

SEQ ID NO: 1992490 - RNA, 19 nt, Artificial Sequence
  Description of Artificial Sequence: Synthetic oligonucleotide
  Sense strand starting at position 3131 of SEQ ID NO: 1880769
uugaucuauggccaagacu

SEQ ID NO: 1992491 - RNA, 19 nt, Artificial Sequence
  Description of Artificial Sequence: Synthetic oligonucleotide
  Antisense strand to SEQ ID NO: 1992490
agucuuggccauagaucaa

SEQ ID NO: 1992492 - RNA, 19 nt, Artificial Sequence
  Description of Artificial Sequence: Synthetic oligonucleotide
  Sense strand starting at position 3188 of SEQ ID NO: 1880769
gcuugucauucuuugaggu

SEQ ID NO: 1992493 - RNA, 19 nt, Artificial Sequence
  Description of Artificial Sequence: Synthetic oligonucleotide
  Antisense strand to SEQ ID NO: 1992492
accucaaagaaugacaagc

SEQ ID NO: 1992494 - RNA, 19 nt, Artificial Sequence
  Description of Artificial Sequence: Synthetic oligonucleotide
  Sense strand starting at position 3325 of SEQ ID NO: 1880769
gccaucugcccuuggauga

SEQ ID NO: 1992495 - RNA, 19 nt, Artificial Sequence
  Description of Artificial Sequence: Synthetic oligonucleotide
  Antisense strand to SEQ ID NO: 1992494
ucauccaagggcagauggc

SEQ ID NO: 1992496 - RNA, 19 nt, Artificial Sequence
  Description of Artificial Sequence: Synthetic oligonucleotide
  Sense strand starting at position 3326 of SEQ ID NO: 1880769
ccaucugcccuuggaugaa

SEQ ID NO: 1992497 - RNA, 19 nt, Artificial Sequence
  Description of Artificial Sequence: Synthetic oligonucleotide
  Antisense strand to SEQ ID NO: 1992496
uucauccaagggcagaugg

SEQ ID NO: 1992498 - RNA, 19 nt, Artificial Sequence
  Description of Artificial Sequence: Synthetic oligonucleotide
  Sense strand starting at position 3329 of SEQ ID NO: 1880769
ucugcccuuggaugaauaa

SEQ ID NO: 1992499 - RNA, 19 nt, Artificial Sequence
  Description of Artificial Sequence: Synthetic oligonucleotide
  Antisense strand to SEQ ID NO: 1992498
uuauucauccaagggcaga

SEQ ID NO: 1992500 - RNA, 19 nt, Artificial Sequence
  Description of Artificial Sequence: Synthetic oligonucleotide
  Sense strand starting at position 3342 of SEQ ID NO: 1880769
gaauaagugcccuggcucu

SEQ ID NO: 1992501 - RNA, 19 nt, Artificial Sequence
  Description of Artificial Sequence: Synthetic oligonucleotide
  Antisense strand to SEQ ID NO: 1992500
agagccagggcacuuauuc

SEQ ID NO: 1992502 - RNA, 19 nt, Artificial Sequence
  Description of Artificial Sequence: Synthetic oligonucleotide
  Sense strand starting at position 3479 of SEQ ID NO: 1880769
aguuuccugaggcagaaau

SEQ ID NO: 1992503 - RNA, 19 nt, Artificial Sequence
  Description of Artificial Sequence: Synthetic oligonucleotide
  Antisense strand to SEQ ID NO: 1992502
auuucugccucaggaaacu

SEQ ID NO: 1992504 - RNA, 19 nt, Artificial Sequence
  Description of Artificial Sequence: Synthetic oligonucleotide
  Sense strand starting at position 3595 of SEQ ID NO: 1880769
cugcauguugauugugaga

SEQ ID NO: 1992505 - RNA, 19 nt, Artificial Sequence
  Description of Artificial Sequence: Synthetic oligonucleotide
  Antisense strand to SEQ ID NO: 1992504
ucucacaaucaacaugcag

SEQ ID NO: 1992506 - RNA, 19 nt, Artificial Sequence
  Description of Artificial Sequence: Synthetic oligonucleotide
  Sense strand starting at position 3721 of SEQ ID NO: 1880769
uuacaaaugcuauggaaac

SEQ ID NO: 1992507 - RNA, 19 nt, Artificial Sequence
  Description of Artificial Sequence: Synthetic oligonucleotide
  Antisense strand to SEQ ID NO: 1992506
guuuccauagcauuuguaa

SEQ ID NO: 1992508 - RNA, 19 nt, Artificial Sequence
  Description of Artificial Sequence: Synthetic oligonucleotide
  Sense strand starting at position 3873 of SEQ ID NO: 1880769
guauguuuacauuaaacga

SEQ ID NO: 1992509 - RNA, 19 nt, Artificial Sequence
  Description of Artificial Sequence: Synthetic oligonucleotide
  Antisense strand to SEQ ID NO: 1992508
ucguuuaauguaaacauac

SEQ ID NO: 1992510 - RNA, 19 nt, Artificial Sequence
  Description of Artificial Sequence: Synthetic oligonucleotide
  Sense strand starting at position 3905 of SEQ ID NO: 1880769
ucacauuauugggcaggua

SEQ ID NO: 1992511 - RNA, 19 nt, Artificial Sequence
  Description of Artificial Sequence: Synthetic oligonucleotide
  Antisense strand to SEQ ID NO: 1992510
uaccugcccaauaauguga

SEQ ID NO: 1992512 - RNA, 19 nt, Artificial Sequence
  Description of Artificial Sequence: Synthetic oligonucleotide
  Sense strand starting at position 3973 of SEQ ID NO: 1880769
gggugagaauuucaguuga

SEQ ID NO: 1992513 - RNA, 19 nt, Artificial Sequence
  Description of Artificial Sequence: Synthetic oligonucleotide
  Antisense strand to SEQ ID NO: 1992512
ucaacugaaauucucaccc

SEQ ID NO: 1992514 - RNA, 19 nt, Artificial Sequence
  Description of Artificial Sequence: Synthetic oligonucleotide
  Sense strand starting at position 137 of SEQ ID NO: 1880770
ucgccuucggccgaagaaa

SEQ ID NO: 1992515 - RNA, 19 nt, Artificial Sequence
  Description of Artificial Sequence: Synthetic oligonucleotide
  Antisense strand to SEQ ID NO: 1992514
uuucuucggccgaaggcga

SEQ ID NO: 1992516 - RNA, 19 nt, Artificial Sequence
  Description of Artificial Sequence: Synthetic oligonucleotide
  Sense strand starting at position 171 of SEQ ID NO: 1880770
ccucguagcucgcacuuau

SEQ ID NO: 1992517 - RNA, 19 nt, Artificial Sequence
  Description of Artificial Sequence: Synthetic oligonucleotide
  Antisense strand to SEQ ID NO: 1992516
auaagugcgagcuacgagg

SEQ ID NO: 1992518 - RNA, 19 nt, Artificial Sequence
  Description of Artificial Sequence: Synthetic oligonucleotide
  Sense strand starting at position 277 of SEQ ID NO: 1880770
gcguccucucccugcuauu

SEQ ID NO: 1992519 - RNA, 19 nt, Artificial Sequence
  Description of Artificial Sequence: Synthetic oligonucleotide
  Antisense strand to SEQ ID NO: 1992518
aauagcagggagaggacgc

SEQ ID NO: 1992520 - RNA, 19 nt, Artificial Sequence
  Description of Artificial Sequence: Synthetic oligonucleotide
  Sense strand starting at position 306 of SEQ ID NO: 1880770
ggacuagccuucuuucgua

SEQ ID NO: 1992521 - RNA, 19 nt, Artificial Sequence
  Description of Artificial Sequence: Synthetic oligonucleotide
  Antisense strand to SEQ ID NO: 1992520
uacgaaagaaggcuagucc

SEQ ID NO: 1992522 - RNA, 19 nt, Artificial Sequence
  Description of Artificial Sequence: Synthetic oligonucleotide
  Sense strand starting at position 309 of SEQ ID NO: 1880770
cuagccuucuuucguaauu

SEQ ID NO: 1992523 - RNA, 19 nt, Artificial Sequence
  Description of Artificial Sequence: Synthetic oligonucleotide
  Antisense strand to SEQ ID NO: 1992522
aauuacgaaagaaggcuag

SEQ ID NO: 1992524 - RNA, 19 nt, Artificial Sequence
  Description of Artificial Sequence: Synthetic oligonucleotide
  Sense strand starting at position 311 of SEQ ID NO: 1880770
agccuucuuucguaauuac

SEQ ID NO: 1992525 - RNA, 19 nt, Artificial Sequence
  Description of Artificial Sequence: Synthetic oligonucleotide
  Antisense strand to SEQ ID NO: 1992524
guaauuacgaaagaaggcu

SEQ ID NO: 1992526 - RNA, 19 nt, Artificial Sequence
  Description of Artificial Sequence: Synthetic oligonucleotide
  Sense strand starting at position 321 of SEQ ID NO: 1880770
cguaauuacacaggagcaa

SEQ ID NO: 1992527 - RNA, 19 nt, Artificial Sequence
  Description of Artificial Sequence: Synthetic oligonucleotide
  Antisense strand to SEQ ID NO: 1992526
uugcuccuguguaauuacg

SEQ ID NO: 1992528 - RNA, 19 nt, Artificial Sequence
  Description of Artificial Sequence: Synthetic oligonucleotide
  Sense strand starting at position 448 of SEQ ID NO: 1880770
cccggagcccuccguaauu

SEQ ID NO: 1992529 - RNA, 19 nt, Artificial Sequence
  Description of Artificial Sequence: Synthetic oligonucleotide
  Antisense strand to SEQ ID NO: 1992528
aauuacggagggcuccggg

SEQ ID NO: 1992530 - RNA, 19 nt, Artificial Sequence
  Description of Artificial Sequence: Synthetic oligonucleotide
  Sense strand starting at position 617 of SEQ ID NO: 1880770
gcagccuucucucugcaaa

SEQ ID NO: 1992531 - RNA, 19 nt, Artificial Sequence
  Description of Artificial Sequence: Synthetic oligonucleotide
  Antisense strand to SEQ ID NO: 1992530
uuugcagagagaaggcugc

SEQ ID NO: 1992532 - RNA, 19 nt, Artificial Sequence
  Description of Artificial Sequence: Synthetic oligonucleotide
  Sense strand starting at position 619 of SEQ ID NO: 1880770
agccuucucucugcaaaga

SEQ ID NO: 1992533 - RNA, 19 nt, Artificial Sequence
  Description of Artificial Sequence: Synthetic oligonucleotide
  Antisense strand to SEQ ID NO: 1992532
ucuuugcagagagaaggcu

SEQ ID NO: 1992534 - RNA, 19 nt, Artificial Sequence
  Description of Artificial Sequence: Synthetic oligonucleotide
  Sense strand starting at position 620 of SEQ ID NO: 1880770
gccuucucucugcaaagaa

SEQ ID NO: 1992535 - RNA, 19 nt, Artificial Sequence
  Description of Artificial Sequence: Synthetic oligonucleotide
  Antisense strand to SEQ ID NO: 1992534
uucuuugcagagagaaggc

SEQ ID NO: 1992536 - RNA, 19 nt, Artificial Sequence
  Description of Artificial Sequence: Synthetic oligonucleotide
  Sense strand starting at position 1545 of SEQ ID NO: 1880770
cguugucguggguuuggaa

SEQ ID NO: 1992537 - RNA, 19 nt, Artificial Sequence
  Description of Artificial Sequence: Synthetic oligonucleotide
  Antisense strand to SEQ ID NO: 1992536
uuccaaacccacgacaacg

SEQ ID NO: 1992538 - RNA, 19 nt, Artificial Sequence
  Description of Artificial Sequence: Synthetic oligonucleotide
  Sense strand starting at position 1595 of SEQ ID NO: 1880770
aagcuauuggcaggaguau

SEQ ID NO: 1992539 - RNA, 19 nt, Artificial Sequence
  Description of Artificial Sequence: Synthetic oligonucleotide
  Antisense strand to SEQ ID NO: 1992538
auacuccugccaauagcuu

SEQ ID NO: 1992540 - RNA, 19 nt, Artificial Sequence
  Description of Artificial Sequence: Synthetic oligonucleotide
  Sense strand starting at position 1687 of SEQ ID NO: 1880770
uguuguuggucucugucua

SEQ ID NO: 1992541 - RNA, 19 nt, Artificial Sequence
  Description of Artificial Sequence: Synthetic oligonucleotide
  Antisense strand to SEQ ID NO: 1992540
uagacagagaccaacaaca

SEQ ID NO: 1992542 - RNA, 19 nt, Artificial Sequence
  Description of Artificial Sequence: Synthetic oligonucleotide
  Sense strand starting at position 1691 of SEQ ID NO: 1880770
guuggucucugucuagaga

SEQ ID NO: 1992543 - RNA, 19 nt, Artificial Sequence
  Description of Artificial Sequence: Synthetic oligonucleotide
  Antisense strand to SEQ ID NO: 1992542
ucucuagacagagaccaac

SEQ ID NO: 1992544 - RNA, 19 nt, Artificial Sequence
  Description of Artificial Sequence: Synthetic oligonucleotide
  Sense strand starting at position 1692 of SEQ ID NO: 1880770
uuggucucugucuagagaa

SEQ ID NO: 1992545 - RNA, 19 nt, Artificial Sequence
  Description of Artificial Sequence: Synthetic oligonucleotide
  Antisense strand to SEQ ID NO: 1992544
uucucuagacagagaccaa

SEQ ID NO: 1992546 - RNA, 19 nt, Artificial Sequence
  Description of Artificial Sequence: Synthetic oligonucleotide
  Sense strand starting at position 1694 of SEQ ID NO: 1880770
ggucucugucuagagaaag

SEQ ID NO: 1992547 - RNA, 19 nt, Artificial Sequence
  Description of Artificial Sequence: Synthetic oligonucleotide
  Antisense strand to SEQ ID NO: 1992546
cuuucucuagacagagacc

SEQ ID NO: 1992548 - RNA, 19 nt, Artificial Sequence
  Description of Artificial Sequence: Synthetic oligonucleotide
  Sense strand starting at position 1788 of SEQ ID NO: 1880770
gguagaagguacuccaaau

SEQ ID NO: 1992549 - RNA, 19 nt, Artificial Sequence
  Description of Artificial Sequence: Synthetic oligonucleotide
  Antisense strand to SEQ ID NO: 1992548
auuuggaguaccuucuacc

SEQ ID NO: 1992550 - RNA, 19 nt, Artificial Sequence
  Description of Artificial Sequence: Synthetic oligonucleotide
  Sense strand starting at position 1882 of SEQ ID NO: 1880770
ugucugcgugcucgugaga

SEQ ID NO: 1992551 - RNA, 19 nt, Artificial Sequence
  Description of Artificial Sequence: Synthetic oligonucleotide
  Antisense strand to SEQ ID NO: 1992550
ucucacgagcacgcagaca

SEQ ID NO: 1992552 - RNA, 19 nt, Artificial Sequence
  Description of Artificial Sequence: Synthetic oligonucleotide
  Sense strand starting at position 1888 of SEQ ID NO: 1880770
cgugcucgugagagcuaga

SEQ ID NO: 1992553 - RNA, 19 nt, Artificial Sequence
  Description of Artificial Sequence: Synthetic oligonucleotide
  Antisense strand to SEQ ID NO: 1992552
ucuagcucucacgagcacg

SEQ ID NO: 1992554 - RNA, 19 nt, Artificial Sequence
  Description of Artificial Sequence: Synthetic oligonucleotide
  Sense strand starting at position 1891 of SEQ ID NO: 1880770
gcucgugagagcuagaauu

SEQ ID NO: 1992555 - RNA, 19 nt, Artificial Sequence
  Description of Artificial Sequence: Synthetic oligonucleotide
  Antisense strand to SEQ ID NO: 1992554
aauucuagcucucacgagc

SEQ ID NO: 1992556 - RNA, 19 nt, Artificial Sequence
  Description of Artificial Sequence: Synthetic oligonucleotide
  Sense strand starting at position 1893 of SEQ ID NO: 1880770
ucgugagagcuagaauucu

SEQ ID NO: 1992557 - RNA, 19 nt, Artificial Sequence
  Description of Artificial Sequence: Synthetic oligonucleotide
  Antisense strand to SEQ ID NO: 1992556
agaauucuagcucucacga

SEQ ID NO: 1992558 - RNA, 19 nt, Artificial Sequence
  Description of Artificial Sequence: Synthetic oligonucleotide
  Sense strand starting at position 1901 of SEQ ID NO: 1880770
gcuagaauucugcagccag

SEQ ID NO: 1992559 - RNA, 19 nt, Artificial Sequence
  Description of Artificial Sequence: Synthetic oligonucleotide
  Antisense strand to SEQ ID NO: 1992558
cuggcugcagaauucuagc

SEQ ID NO: 1992560 - RNA, 19 nt, Artificial Sequence
  Description of Artificial Sequence: Synthetic oligonucleotide
  Sense strand starting at position 1938 of SEQ ID NO: 1880770
ggcagugccuugugugaau

SEQ ID NO: 1992561 - RNA, 19 nt, Artificial Sequence
  Description of Artificial Sequence: Synthetic oligonucleotide
  Antisense strand to SEQ ID NO: 1992560
auucacacaaggcacugcc

SEQ ID NO: 1992562 - RNA, 19 nt, Artificial Sequence
  Description of Artificial Sequence: Synthetic oligonucleotide
  Sense strand starting at position 1940 of SEQ ID NO: 1880770
cagugccuugugugaauga

SEQ ID NO: 1992563 - RNA, 19 nt, Artificial Sequence
  Description of Artificial Sequence: Synthetic oligonucleotide
  Antisense strand to SEQ ID NO: 1992562
ucauucacacaaggcacug

SEQ ID NO: 1992564 - RNA, 19 nt, Artificial Sequence
  Description of Artificial Sequence: Synthetic oligonucleotide
  Sense strand starting at position 1941 of SEQ ID NO: 1880770
agugccuugugugaaugaa

SEQ ID NO: 1992565 - RNA, 19 nt, Artificial Sequence
  Description of Artificial Sequence: Synthetic oligonucleotide
  Antisense strand to SEQ ID NO: 1992564
uucauucacacaaggcacu

SEQ ID NO: 1992566 - RNA, 19 nt, Artificial Sequence
  Description of Artificial Sequence: Synthetic oligonucleotide
  Sense strand starting at position 2031 of SEQ ID NO: 1880770
guagacagcuuguacacaa

SEQ ID NO: 1992567 - RNA, 19 nt, Artificial Sequence
  Description of Artificial Sequence: Synthetic oligonucleotide
  Antisense strand to SEQ ID NO: 1992566
uuguguacaagcugucuac

SEQ ID NO: 1992568 - RNA, 19 nt, Artificial Sequence
  Description of Artificial Sequence: Synthetic oligonucleotide
  Sense strand starting at position 3190 of SEQ ID NO: 1880770
cccuuuguuagugcucgua

SEQ ID NO: 1992569 - RNA, 19 nt, Artificial Sequence
  Description of Artificial Sequence: Synthetic oligonucleotide
  Antisense strand to SEQ ID NO: 1992568
uacgagcacuaacaaaggg

SEQ ID NO: 1992570 - RNA, 19 nt, Artificial Sequence
  Description of Artificial Sequence: Synthetic oligonucleotide
  Sense strand starting at position 3192 of SEQ ID NO: 1880770
cuuuguuagugcucguaug

SEQ ID NO: 1992571 - RNA, 19 nt, Artificial Sequence
  Description of Artificial Sequence: Synthetic oligonucleotide
  Antisense strand to SEQ ID NO: 1992570
cauacgagcacuaacaaag

SEQ ID NO: 1992572 - RNA, 19 nt, Artificial Sequence
  Description of Artificial Sequence: Synthetic oligonucleotide
  Sense strand starting at position 3193 of SEQ ID NO: 1880770
uuuguuagugcucguaugu

SEQ ID NO: 1992573 - RNA, 19 nt, Artificial Sequence
  Description of Artificial Sequence: Synthetic oligonucleotide
  Antisense strand to SEQ ID NO: 1992572
acauacgagcacuaacaaa

SEQ ID NO: 1992574 - RNA, 19 nt, Artificial Sequence
  Description of Artificial Sequence: Synthetic oligonucleotide
  Sense strand starting at position 3429 of SEQ ID NO: 1880770
agcgcagucugaggaauaa

SEQ ID NO: 1992575 - RNA, 19 nt, Artificial Sequence
  Description of Artificial Sequence: Synthetic oligonucleotide
  Antisense strand to SEQ ID NO: 1992574
uuauuccucagacugcgcu

SEQ ID NO: 1992576 - RNA, 19 nt, Artificial Sequence
  Description of Artificial Sequence: Synthetic oligonucleotide
  Sense strand starting at position 3451 of SEQ ID NO: 1880770
uggagaaaguugguggcua

SEQ ID NO: 1992577 - RNA, 19 nt, Artificial Sequence
  Description of Artificial Sequence: Synthetic oligonucleotide
  Antisense strand to SEQ ID NO: 1992576
uagccaccaacuuucucca

SEQ ID NO: 1992578 - RNA, 19 nt, Artificial Sequence
  Description of Artificial Sequence: Synthetic oligonucleotide
  Sense strand starting at position 3452 of SEQ ID NO: 1880770
ggagaaaguugguggcuaa

SEQ ID NO: 1992579 - RNA, 19 nt, Artificial Sequence
  Description of Artificial Sequence: Synthetic oligonucleotide
  Antisense strand to SEQ ID NO: 1992578
uuagccaccaacuuucucc

SEQ ID NO: 1992580 - RNA, 19 nt, Artificial Sequence
  Description of Artificial Sequence: Synthetic oligonucleotide
  Sense strand starting at position 3453 of SEQ ID NO: 1880770
gagaaaguugguggcuaaa

SEQ ID NO: 1992581 - RNA, 19 nt, Artificial Sequence
  Description of Artificial Sequence: Synthetic oligonucleotide
  Antisense strand to SEQ ID NO: 1992580
uuuagccaccaacuuucuc

SEQ ID NO: 1992582 - RNA, 19 nt, Artificial Sequence
  Description of Artificial Sequence: Synthetic oligonucleotide
  Sense strand starting at position 3596 of SEQ ID NO: 1880770
ugugcaaagcccuguuuaa

SEQ ID NO: 1992583 - RNA, 19 nt, Artificial Sequence
  Description of Artificial Sequence: Synthetic oligonucleotide
  Antisense strand to SEQ ID NO: 1992582
uuaaacagggcuuugcaca

SEQ ID NO: 1992584 - RNA, 19 nt, Artificial Sequence
  Description of Artificial Sequence: Synthetic oligonucleotide
  Sense strand starting at position 3917 of SEQ ID NO: 1880770
guggaaacuggcuguaguu

SEQ ID NO: 1992585 - RNA, 19 nt, Artificial Sequence
  Description of Artificial Sequence: Synthetic oligonucleotide
  Antisense strand to SEQ ID NO: 1992584
aacuacagccaguuuccac

SEQ ID NO: 1992586 - RNA, 19 nt, Artificial Sequence
  Description of Artificial Sequence: Synthetic oligonucleotide
  Sense strand starting at position 3946 of SEQ ID NO: 1880770
gccugaauuccaggccuaa

SEQ ID NO: 1992587 - RNA, 19 nt, Artificial Sequence
  Description of Artificial Sequence: Synthetic oligonucleotide
  Antisense strand to SEQ ID NO: 1992586
uuaggccuggaauucaggc

SEQ ID NO: 1992588 - RNA, 19 nt, Artificial Sequence
  Description of Artificial Sequence: Synthetic oligonucleotide
  Sense strand starting at position 3958 of SEQ ID NO: 1880770
ggccuaauuugagauguga

SEQ ID NO: 1992589 - RNA, 19 nt, Artificial Sequence
  Description of Artificial Sequence: Synthetic oligonucleotide
  Antisense strand to SEQ ID NO: 1992588
ucacaucucaaauuaggcc

SEQ ID NO: 1992590 - RNA, 19 nt, Artificial Sequence
  Description of Artificial Sequence: Synthetic oligonucleotide
  Sense strand starting at position 3967 of SEQ ID NO: 1880770
ugagaugugaguuguaucu

SEQ ID NO: 1992591 - RNA, 19 nt, Artificial Sequence
  Description of Artificial Sequence: Synthetic oligonucleotide
  Antisense strand to SEQ ID NO: 1992590
agauacaacucacaucuca

SEQ ID NO: 1992592 - RNA, 19 nt, Artificial Sequence
  Description of Artificial Sequence: Synthetic oligonucleotide
  Sense strand starting at position 3973 of SEQ ID NO: 1880770
gugaguuguaucuguaacc

SEQ ID NO: 1992593 - RNA, 19 nt, Artificial Sequence
  Description of Artificial Sequence: Synthetic oligonucleotide
  Antisense strand to SEQ ID NO: 1992592
gguuacagauacaacucac

SEQ ID NO: 1992594 - RNA, 19 nt, Artificial Sequence
  Description of Artificial Sequence: Synthetic oligonucleotide
  Sense strand starting at position 56 of SEQ ID NO: 1880771
gugcgucagacccaaugaa

SEQ ID NO: 1992595 - RNA, 19 nt, Artificial Sequence
  Description of Artificial Sequence: Synthetic oligonucleotide
  Antisense strand to SEQ ID NO: 1992594
uucauugggucugacgcac

SEQ ID NO: 1992596 - RNA, 19 nt, Artificial Sequence
  Description of Artificial Sequence: Synthetic oligonucleotide
  Sense strand starting at position 205 of SEQ ID NO: 1880771
gccaguucugaggauucag

SEQ ID NO: 1992597 - RNA, 19 nt, Artificial Sequence
  Description of Artificial Sequence: Synthetic oligonucleotide
  Antisense strand to SEQ ID NO: 1992596
cugaauccucagaacuggc

SEQ ID NO: 1992598 - RNA, 19 nt, Artificial Sequence
  Description of Artificial Sequence: Synthetic oligonucleotide
  Sense strand starting at position 310 of SEQ ID NO: 1880771
uggucaaugcuacauagga

SEQ ID NO: 1992599 - RNA, 19 nt, Artificial Sequence
  Description of Artificial Sequence: Synthetic oligonucleotide
  Antisense strand to SEQ ID NO: 1992598
uccuauguagcauugacca

SEQ ID NO: 1992600 - RNA, 19 nt, Artificial Sequence
  Description of Artificial Sequence: Synthetic oligonucleotide
  Sense strand starting at position 497 of SEQ ID NO: 1880771
guuugacauucucuucuca

SEQ ID NO: 1992601 - RNA, 19 nt, Artificial Sequence
  Description of Artificial Sequence: Synthetic oligonucleotide
  Antisense strand to SEQ ID NO: 1992600
ugagaagagaaugucaaac

SEQ ID NO: 1992602 - RNA, 19 nt, Artificial Sequence
  Description of Artificial Sequence: Synthetic oligonucleotide
  Sense strand starting at position 1062 of SEQ ID NO: 1880771
ccuugaagcccucaaaguu

SEQ ID NO: 1992603 - RNA, 19 nt, Artificial Sequence
  Description of Artificial Sequence: Synthetic oligonucleotide
  Antisense strand to SEQ ID NO: 1992602
aacuuugagggcuucaagg

SEQ ID NO: 1992604 - RNA, 19 nt, Artificial Sequence
  Description of Artificial Sequence: Synthetic oligonucleotide
  Sense strand starting at position 1101 of SEQ ID NO: 1880771
auuccuccagcuggaauua

SEQ ID NO: 1992605 - RNA, 19 nt, Artificial Sequence
  Description of Artificial Sequence: Synthetic oligonucleotide
  Antisense strand to SEQ ID NO: 1992604
uaauuccagcuggaggaau

SEQ ID NO: 1992606 - RNA, 19 nt, Artificial Sequence
  Description of Artificial Sequence: Synthetic oligonucleotide
  Sense strand starting at position 1110 of SEQ ID NO: 1880771
gcuggaauuaccugugacu

SEQ ID NO: 1992607 - RNA, 19 nt, Artificial Sequence
  Description of Artificial Sequence: Synthetic oligonucleotide
  Antisense strand to SEQ ID NO: 1992606
agucacagguaauuccagc

SEQ ID NO: 1992608 - RNA, 19 nt, Artificial Sequence
  Description of Artificial Sequence: Synthetic oligonucleotide
  Sense strand starting at position 1112 of SEQ ID NO: 1880771
uggaauuaccugugacuuu

SEQ ID NO: 1992609 - RNA, 19 nt, Artificial Sequence
  Description of Artificial Sequence: Synthetic oligonucleotide
  Antisense strand to SEQ ID NO: 1992608
aaagucacagguaauucca

SEQ ID NO: 1992610 - RNA, 19 nt, Artificial Sequence
  Description of Artificial Sequence: Synthetic oligonucleotide
  Sense strand starting at position 1127 of SEQ ID NO: 1880771
cuuucucuguagucccaaa

SEQ ID NO: 1992611 - RNA, 19 nt, Artificial Sequence
  Description of Artificial Sequence: Synthetic oligonucleotide
  Antisense strand to SEQ ID NO: 1992610
uuugggacuacagagaaag

SEQ ID NO: 1992612 - RNA, 19 nt, Artificial Sequence
  Description of Artificial Sequence: Synthetic oligonucleotide
  Sense strand starting at position 1170 of SEQ ID NO: 1880771
ugugguggcccuuagauau

SEQ ID NO: 1992613 - RNA, 19 nt, Artificial Sequence
  Description of Artificial Sequence: Synthetic oligonucleotide
  Antisense strand to SEQ ID NO: 1992612
auaucuaagggccaccaca

SEQ ID NO: 1992614 - RNA, 19 nt, Artificial Sequence
  Description of Artificial Sequence: Synthetic oligonucleotide
  Sense strand starting at position 1230 of SEQ ID NO: 1880771
gucaauuucuuugagauca

SEQ ID NO: 1992615 - RNA, 19 nt, Artificial Sequence
  Description of Artificial Sequence: Synthetic oligonucleotide
  Antisense strand to SEQ ID NO: 1992614
ugaucucaaagaaauugac

SEQ ID NO: 1992616 - RNA, 19 nt, Artificial Sequence
  Description of Artificial Sequence: Synthetic oligonucleotide
  Sense strand starting at position 1238 of SEQ ID NO: 1880771
cuuugagaucagugacuac

SEQ ID NO: 1992617 - RNA, 19 nt, Artificial Sequence
  Description of Artificial Sequence: Synthetic oligonucleotide
  Antisense strand to SEQ ID NO: 1992616
guagucacugaucucaaag

SEQ ID NO: 1992618 - RNA, 19 nt, Artificial Sequence
  Description of Artificial Sequence: Synthetic oligonucleotide
  Sense strand starting at position 1262 of SEQ ID NO: 1880771
accuuugccuucccagaga

SEQ ID NO: 1992619 - RNA, 19 nt, Artificial Sequence
  Description of Artificial Sequence: Synthetic oligonucleotide
  Antisense strand to SEQ ID NO: 1992618
ucucugggaaggcaaaggu

SEQ ID NO: 1992620 - RNA, 19 nt, Artificial Sequence
  Description of Artificial Sequence: Synthetic oligonucleotide
  Sense strand starting at position 1299 of SEQ ID NO: 1880771
ugaagccuguucucaacaa

SEQ ID NO: 1992621 - RNA, 19 nt, Artificial Sequence
  Description of Artificial Sequence: Synthetic oligonucleotide
  Antisense strand to SEQ ID NO: 1992620
uuguugagaacaggcuuca

SEQ ID NO: 1992622 - RNA, 19 nt, Artificial Sequence
  Description of Artificial Sequence: Synthetic oligonucleotide
  Sense strand starting at position 1311 of SEQ ID NO: 1880771
ucaacaaacgcuuguaaau

SEQ ID NO: 1992623 - RNA, 19 nt, Artificial Sequence
  Description of Artificial Sequence: Synthetic oligonucleotide
  Antisense strand to SEQ ID NO: 1992622
auuuacaagcguuuguuga

SEQ ID NO: 1992624 - RNA, 19 nt, Artificial Sequence
  Description of Artificial Sequence: Synthetic oligonucleotide
  Sense strand starting at position 1991 of SEQ ID NO: 1880771
ccugguuuaguccaucaca

SEQ ID NO: 1992625 - RNA, 19 nt, Artificial Sequence
  Description of Artificial Sequence: Synthetic oligonucleotide
  Antisense strand to SEQ ID NO: 1992624
ugugauggacuaaaccagg

SEQ ID NO: 1992626 - RNA, 19 nt, Artificial Sequence
  Description of Artificial Sequence: Synthetic oligonucleotide
  Sense strand starting at position 1994 of SEQ ID NO: 1880771
gguuuaguccaucacauau

SEQ ID NO: 1992627 - RNA, 19 nt, Artificial Sequence
  Description of Artificial Sequence: Synthetic oligonucleotide
  Antisense strand to SEQ ID NO: 1992626
auaugugauggacuaaacc

SEQ ID NO: 1992628 - RNA, 19 nt, Artificial Sequence
  Description of Artificial Sequence: Synthetic oligonucleotide
  Sense strand starting at position 2216 of SEQ ID NO: 1880771
ggcaccauuccuggaauau

SEQ ID NO: 1992629 - RNA, 19 nt, Artificial Sequence
  Description of Artificial Sequence: Synthetic oligonucleotide
  Antisense strand to SEQ ID NO: 1992628
auauuccaggaauggugcc

SEQ ID NO: 1992630 - RNA, 19 nt, Artificial Sequence
  Description of Artificial Sequence: Synthetic oligonucleotide
  Sense strand starting at position 2217 of SEQ ID NO: 1880771
gcaccauuccuggaauaua

SEQ ID NO: 1992631 - RNA, 19 nt, Artificial Sequence
  Description of Artificial Sequence: Synthetic oligonucleotide
  Antisense strand to SEQ ID NO: 1992630
uauauuccaggaauggugc

SEQ ID NO: 1992632 - RNA, 19 nt, Artificial Sequence
  Description of Artificial Sequence: Synthetic oligonucleotide
  Sense strand starting at position 2246 of SEQ ID NO: 1880771
gauaaauauuugugggaga

SEQ ID NO: 1992633 - RNA, 19 nt, Artificial Sequence
  Description of Artificial Sequence: Synthetic oligonucleotide
  Antisense strand to SEQ ID NO: 1992632
ucucccacaaauauuuauc

SEQ ID NO: 1992634 - RNA, 19 nt, Artificial Sequence
  Description of Artificial Sequence: Synthetic oligonucleotide
  Sense strand starting at position 2249 of SEQ ID NO: 1880771
aaauauuugugggagagag

SEQ ID NO: 1992635 - RNA, 19 nt, Artificial Sequence
  Description of Artificial Sequence: Synthetic oligonucleotide
  Antisense strand to SEQ ID NO: 1992634
cucucucccacaaauauuu

SEQ ID NO: 1992636 - RNA, 19 nt, Artificial Sequence
  Description of Artificial Sequence: Synthetic oligonucleotide
  Sense strand starting at position 2394 of SEQ ID NO: 1880771
gaugguguaugggcugaau

SEQ ID NO: 1992637 - RNA, 19 nt, Artificial Sequence
  Description of Artificial Sequence: Synthetic oligonucleotide
  Antisense strand to SEQ ID NO: 1992636
auucagcccauacaccauc

SEQ ID NO: 1992638 - RNA, 19 nt, Artificial Sequence
  Description of Artificial Sequence: Synthetic oligonucleotide
  Sense strand starting at position 2471 of SEQ ID NO: 1880771
gugacuguacuggaaaucu

SEQ ID NO: 1992639 - RNA, 19 nt, Artificial Sequence
  Description of Artificial Sequence: Synthetic oligonucleotide
  Antisense strand to SEQ ID NO: 1992638
agauuuccaguacagucac

SEQ ID NO: 1992640 - RNA, 19 nt, Artificial Sequence
  Description of Artificial Sequence: Synthetic oligonucleotide
  Sense strand starting at position 2602 of SEQ ID NO: 1880771
gggagaaguccacgucuag

SEQ ID NO: 1992641 - RNA, 19 nt, Artificial Sequence
  Description of Artificial Sequence: Synthetic oligonucleotide
  Antisense strand to SEQ ID NO: 1992640
cuagacguggacuucuccc

SEQ ID NO: 1992642 - RNA, 19 nt, Artificial Sequence
  Description of Artificial Sequence: Synthetic oligonucleotide
  Sense strand starting at position 2660 of SEQ ID NO: 1880771
cuuccaagauugccagaau

SEQ ID NO: 1992643 - RNA, 19 nt, Artificial Sequence
  Description of Artificial Sequence: Synthetic oligonucleotide
  Antisense strand to SEQ ID NO: 1992642
auucuggcaaucuuggaag

SEQ ID NO: 1992644 - RNA, 19 nt, Artificial Sequence
  Description of Artificial Sequence: Synthetic oligonucleotide
  Sense strand starting at position 2707 of SEQ ID NO: 1880771
aggauugucccagagguuu

SEQ ID NO: 1992645 - RNA, 19 nt, Artificial Sequence
  Description of Artificial Sequence: Synthetic oligonucleotide
  Antisense strand to SEQ ID NO: 1992644
aaaccucugggacaauccu

SEQ ID NO: 1992646 - RNA, 19 nt, Artificial Sequence
  Description of Artificial Sequence: Synthetic oligonucleotide
  Sense strand starting at position 2718 of SEQ ID NO: 1880771
agagguuucagagggaguc

SEQ ID NO: 1992647 - RNA, 19 nt, Artificial Sequence
  Description of Artificial Sequence: Synthetic oligonucleotide
  Antisense strand to SEQ ID NO: 1992646
gacucccucugaaaccucu

SEQ ID NO: 1992648 - RNA, 19 nt, Artificial Sequence
  Description of Artificial Sequence: Synthetic oligonucleotide
  Sense strand starting at position 2765 of SEQ ID NO: 1880771
ccugcagaacugugagaau

SEQ ID NO: 1992649 - RNA, 19 nt, Artificial Sequence
  Description of Artificial Sequence: Synthetic oligonucleotide
  Antisense strand to SEQ ID NO: 1992648
auucucacaguucugcagg

SEQ ID NO: 1992650 - RNA, 19 nt, Artificial Sequence
  Description of Artificial Sequence: Synthetic oligonucleotide
  Sense strand starting at position 2852 of SEQ ID NO: 1880771
aaggaauucugccuugggu

SEQ ID NO: 1992651 - RNA, 19 nt, Artificial Sequence
  Description of Artificial Sequence: Synthetic oligonucleotide
  Antisense strand to SEQ ID NO: 1992650
acccaaggcagaauuccuu

SEQ ID NO: 1992652 - RNA, 19 nt, Artificial Sequence
  Description of Artificial Sequence: Synthetic oligonucleotide
  Sense strand starting at position 2876 of SEQ ID NO: 1880771
gaugcaugagauggaugau

SEQ ID NO: 1992653 - RNA, 19 nt, Artificial Sequence
  Description of Artificial Sequence: Synthetic oligonucleotide
  Antisense strand to SEQ ID NO: 1992652
aucauccaucucaugcauc

SEQ ID NO: 1992654 - RNA, 19 nt, Artificial Sequence
  Description of Artificial Sequence: Synthetic oligonucleotide
  Sense strand starting at position 2879 of SEQ ID NO: 1880771
gcaugagauggaugaucuc

SEQ ID NO: 1992655 - RNA, 19 nt, Artificial Sequence
  Description of Artificial Sequence: Synthetic oligonucleotide
  Antisense strand to SEQ ID NO: 1992654
gagaucauccaucucaugc

SEQ ID NO: 1992656 - RNA, 19 nt, Artificial Sequence
  Description of Artificial Sequence: Synthetic oligonucleotide
  Sense strand starting at position 3223 of SEQ ID NO: 1880771
ugcucuuuccguguuguca

SEQ ID NO: 1992657 - RNA, 19 nt, Artificial Sequence
  Description of Artificial Sequence: Synthetic oligonucleotide
  Antisense strand to SEQ ID NO: 1992656
ugacaacacggaaagagca

SEQ ID NO: 1992658 - RNA, 19 nt, Artificial Sequence
  Description of Artificial Sequence: Synthetic oligonucleotide
  Sense strand starting at position 3243 of SEQ ID NO: 1880771
aagaaauaacucugugguc

SEQ ID NO: 1992659 - RNA, 19 nt, Artificial Sequence
  Description of Artificial Sequence: Synthetic oligonucleotide
  Antisense strand to SEQ ID NO: 1992658
gaccacagaguuauuucuu

SEQ ID NO: 1992660 - RNA, 19 nt, Artificial Sequence
  Description of Artificial Sequence: Synthetic oligonucleotide
  Sense strand starting at position 3244 of SEQ ID NO: 1880771
agaaauaacucuguggucu

SEQ ID NO: 1992661 - RNA, 19 nt, Artificial Sequence
  Description of Artificial Sequence: Synthetic oligonucleotide
  Antisense strand to SEQ ID NO: 1992660
agaccacagaguuauuucu

SEQ ID NO: 1992662 - RNA, 19 nt, Artificial Sequence
  Description of Artificial Sequence: Synthetic oligonucleotide
  Sense strand starting at position 3245 of SEQ ID NO: 1880771
gaaauaacucuguggucua

SEQ ID NO: 1992663 - RNA, 19 nt, Artificial Sequence
  Description of Artificial Sequence: Synthetic oligonucleotide
  Antisense strand to SEQ ID NO: 1992662
uagaccacagaguuauuuc

SEQ ID NO: 1992664 - RNA, 19 nt, Artificial Sequence
  Description of Artificial Sequence: Synthetic oligonucleotide
  Sense strand starting at position 3636 of SEQ ID NO: 1880771
acuauaguguuguugggaa

SEQ ID NO: 1992665 - RNA, 19 nt, Artificial Sequence
  Description of Artificial Sequence: Synthetic oligonucleotide
  Antisense strand to SEQ ID NO: 1992664
uucccaacaacacuauagu

SEQ ID NO: 1992666 - RNA, 19 nt, Artificial Sequence
  Description of Artificial Sequence: Synthetic oligonucleotide
  Sense strand starting at position 3638 of SEQ ID NO: 1880771
uauaguguuguugggaaca

SEQ ID NO: 1992667 - RNA, 19 nt, Artificial Sequence
  Description of Artificial Sequence: Synthetic oligonucleotide
  Antisense strand to SEQ ID NO: 1992666
uguucccaacaacacuaua

SEQ ID NO: 1992668 - RNA, 19 nt, Artificial Sequence
  Description of Artificial Sequence: Synthetic oligonucleotide
  Sense strand starting at position 3753 of SEQ ID NO: 1880771
ggagcugucaggcaaaguc

SEQ ID NO: 1992669 - RNA, 19 nt, Artificial Sequence
  Description of Artificial Sequence: Synthetic oligonucleotide
  Antisense strand to SEQ ID NO: 1992668
gacuuugccugacagcucc

SEQ ID NO: 1992670 - RNA, 19 nt, Artificial Sequence
  Description of Artificial Sequence: Synthetic oligonucleotide
  Sense strand starting at position 3878 of SEQ ID NO: 1880771
agagguuucgcacguauuu

SEQ ID NO: 1992671 - RNA, 19 nt, Artificial Sequence
  Description of Artificial Sequence: Synthetic oligonucleotide
  Antisense strand to SEQ ID NO: 1992670
aaauacgugcgaaaccucu

SEQ ID NO: 1992672 - RNA, 19 nt, Artificial Sequence
  Description of Artificial Sequence: Synthetic oligonucleotide
  Sense strand starting at position 3924 of SEQ ID NO: 1880771
cccauucuucuuuguauga

SEQ ID NO: 1992673 - RNA, 19 nt, Artificial Sequence
  Description of Artificial Sequence: Synthetic oligonucleotide
  Antisense strand to SEQ ID NO: 1992672
ucauacaaagaagaauggg

SEQ ID NO: 1992674 - RNA, 19 nt, Artificial Sequence
  Description of Artificial Sequence: Synthetic oligonucleotide
  Sense strand starting at position 223 of SEQ ID NO: 1880772
ugaacugugaaaugucaga

SEQ ID NO: 1992675 - RNA, 19 nt, Artificial Sequence
  Description of Artificial Sequence: Synthetic oligonucleotide
  Antisense strand to SEQ ID NO: 1992674
ucugacauuucacaguuca

SEQ ID NO: 1992676 - RNA, 19 nt, Artificial Sequence
  Description of Artificial Sequence: Synthetic oligonucleotide
  Sense strand starting at position 302 of SEQ ID NO: 1880772
ccauacaagcgugaguaaa

SEQ ID NO: 1992677 - RNA, 19 nt, Artificial Sequence
  Description of Artificial Sequence: Synthetic oligonucleotide
  Antisense strand to SEQ ID NO: 1992676
uuuacucacgcuuguaugg

SEQ ID NO: 1992678 - RNA, 19 nt, Artificial Sequence
  Description of Artificial Sequence: Synthetic oligonucleotide
  Sense strand starting at position 310 of SEQ ID NO: 1880772
gcgugaguaaauuagagaa

SEQ ID NO: 1992679 - RNA, 19 nt, Artificial Sequence
  Description of Artificial Sequence: Synthetic oligonucleotide
  Antisense strand to SEQ ID NO: 1992678
uucucuaauuuacucacgc

SEQ ID NO: 1992680 - RNA, 19 nt, Artificial Sequence
  Description of Artificial Sequence: Synthetic oligonucleotide
  Sense strand starting at position 347 of SEQ ID NO: 1880772
uaagcaagugcauaauagu

SEQ ID NO: 1992681 - RNA, 19 nt, Artificial Sequence
  Description of Artificial Sequence: Synthetic oligonucleotide
  Antisense strand to SEQ ID NO: 1992680
acuauuaugcacuugcuua

SEQ ID NO: 1992682 - RNA, 19 nt, Artificial Sequence
  Description of Artificial Sequence: Synthetic oligonucleotide
  Sense strand starting at position 749 of SEQ ID NO: 1880772
augguaaagacguaagagu

SEQ ID NO: 1992683 - RNA, 19 nt, Artificial Sequence
  Description of Artificial Sequence: Synthetic oligonucleotide
  Antisense strand to SEQ ID NO: 1992682
acucuuacgucuuuaccau

SEQ ID NO: 1992684 - RNA, 19 nt, Artificial Sequence
  Description of Artificial Sequence: Synthetic oligonucleotide
  Sense strand starting at position 822 of SEQ ID NO: 1880772
ucaaguauagcucaaaugu

SEQ ID NO: 1992685 - RNA, 19 nt, Artificial Sequence
  Description of Artificial Sequence: Synthetic oligonucleotide
  Antisense strand to SEQ ID NO: 1992684
acauuugagcuauacuuga

SEQ ID NO: 1992686 - RNA, 19 nt, Artificial Sequence
  Description of Artificial Sequence: Synthetic oligonucleotide
  Sense strand starting at position 1105 of SEQ ID NO: 1880772
auccaaugaucucuagguu

SEQ ID NO: 1992687 - RNA, 19 nt, Artificial Sequence
  Description of Artificial Sequence: Synthetic oligonucleotide
  Antisense strand to SEQ ID NO: 1992686
aaccuagagaucauuggau

SEQ ID NO: 1992688 - RNA, 19 nt, Artificial Sequence
  Description of Artificial Sequence: Synthetic oligonucleotide
  Sense strand starting at position 1108 of SEQ ID NO: 1880772
caaugaucucuagguugau

SEQ ID NO: 1992689 - RNA, 19 nt, Artificial Sequence
  Description of Artificial Sequence: Synthetic oligonucleotide
  Antisense strand to SEQ ID NO: 1992688
aucaaccuagagaucauug

SEQ ID NO: 1992690 - RNA, 19 nt, Artificial Sequence
  Description of Artificial Sequence: Synthetic oligonucleotide
  Sense strand starting at position 1109 of SEQ ID NO: 1880772
aaugaucucuagguugauc

SEQ ID NO: 1992691 - RNA, 19 nt, Artificial Sequence
  Description of Artificial Sequence: Synthetic oligonucleotide
  Antisense strand to SEQ ID NO: 1992690
gaucaaccuagagaucauu

SEQ ID NO: 1992692 - RNA, 19 nt, Artificial Sequence
  Description of Artificial Sequence: Synthetic oligonucleotide
  Sense strand starting at position 1114 of SEQ ID NO: 1880772
ucucuagguugaucucuaa

SEQ ID NO: 1992693 - RNA, 19 nt, Artificial Sequence
  Description of Artificial Sequence: Synthetic oligonucleotide
  Antisense strand to SEQ ID NO: 1992692
uuagagaucaaccuagaga

SEQ ID NO: 1992694 - RNA, 19 nt, Artificial Sequence
  Description of Artificial Sequence: Synthetic oligonucleotide
  Sense strand starting at position 1118 of SEQ ID NO: 1880772
uagguugaucucuaaguuc

SEQ ID NO: 1992695 - RNA, 19 nt, Artificial Sequence
  Description of Artificial Sequence: Synthetic oligonucleotide
  Antisense strand to SEQ ID NO: 1992694
gaacuuagagaucaaccua

SEQ ID NO: 1992696 - RNA, 19 nt, Artificial Sequence
  Description of Artificial Sequence: Synthetic oligonucleotide
  Sense strand starting at position 1271 of SEQ ID NO: 1880772
uauugcagucacuaaggaa

SEQ ID NO: 1992697 - RNA, 19 nt, Artificial Sequence
  Description of Artificial Sequence: Synthetic oligonucleotide
  Antisense strand to SEQ ID NO: 1992696
uuccuuagugacugcaaua

SEQ ID NO: 1992698 - RNA, 19 nt, Artificial Sequence
  Description of Artificial Sequence: Synthetic oligonucleotide
  Sense strand starting at position 1389 of SEQ ID NO: 1880772
gaaaccucucuugggugaa

SEQ ID NO: 1992699 - RNA, 19 nt, Artificial Sequence
  Description of Artificial Sequence: Synthetic oligonucleotide
  Antisense strand to SEQ ID NO: 1992698
uucacccaagagagguuuc

SEQ ID NO: 1992700 - RNA, 19 nt, Artificial Sequence
  Description of Artificial Sequence: Synthetic oligonucleotide
  Sense strand starting at position 1456 of SEQ ID NO: 1880772
uggccucaagcugagaaau

SEQ ID NO: 1992701 - RNA, 19 nt, Artificial Sequence
  Description of Artificial Sequence: Synthetic oligonucleotide
  Antisense strand to SEQ ID NO: 1992700
auuucucagcuugaggcca

SEQ ID NO: 1992702 - RNA, 19 nt, Artificial Sequence
  Description of Artificial Sequence: Synthetic oligonucleotide
  Sense strand starting at position 1468 of SEQ ID NO: 1880772
gagaaauucugugcagaaa

SEQ ID NO: 1992703 - RNA, 19 nt, Artificial Sequence
  Description of Artificial Sequence: Synthetic oligonucleotide
  Antisense strand to SEQ ID NO: 1992702
uuucugcacagaauuucuc

SEQ ID NO: 1992704 - RNA, 19 nt, Artificial Sequence
  Description of Artificial Sequence: Synthetic oligonucleotide
  Sense strand starting at position 1480 of SEQ ID NO: 1880772
gcagaaauaaagugguuua

SEQ ID NO: 1992705 - RNA, 19 nt, Artificial Sequence
  Description of Artificial Sequence: Synthetic oligonucleotide
  Antisense strand to SEQ ID NO: 1992704
uaaaccacuuuauuucugc

SEQ ID NO: 1992706 - RNA, 19 nt, Artificial Sequence
  Description of Artificial Sequence: Synthetic oligonucleotide
  Sense strand starting at position 1490 of SEQ ID NO: 1880772
agugguuuauaaucccaca

SEQ ID NO: 1992707 - RNA, 19 nt, Artificial Sequence
  Description of Artificial Sequence: Synthetic oligonucleotide
  Antisense strand to SEQ ID NO: 1992706
ugugggauuauaaaccacu

SEQ ID NO: 1992708 - RNA, 19 nt, Artificial Sequence
  Description of Artificial Sequence: Synthetic oligonucleotide
  Sense strand starting at position 1621 of SEQ ID NO: 1880772
uacucaagaggguguuuau

SEQ ID NO: 1992709 - RNA, 19 nt, Artificial Sequence
  Description of Artificial Sequence: Synthetic oligonucleotide
  Antisense strand to SEQ ID NO: 1992708
auaaacacccucuugagua

SEQ ID NO: 1992710 - RNA, 19 nt, Artificial Sequence
  Description of Artificial Sequence: Synthetic oligonucleotide
  Sense strand starting at position 1700 of SEQ ID NO: 1880772
ccaggaaucugggugaugu

SEQ ID NO: 1992711 - RNA, 19 nt, Artificial Sequence
  Description of Artificial Sequence: Synthetic oligonucleotide
  Antisense strand to SEQ ID NO: 1992710
acaucacccagauuccugg

SEQ ID NO: 1992712 - RNA, 19 nt, Artificial Sequence
  Description of Artificial Sequence: Synthetic oligonucleotide
  Sense strand starting at position 1701 of SEQ ID NO: 1880772
caggaaucugggugauguc

SEQ ID NO: 1992713 - RNA, 19 nt, Artificial Sequence
  Description of Artificial Sequence: Synthetic oligonucleotide
  Antisense strand to SEQ ID NO: 1992712
gacaucacccagauuccug

SEQ ID NO: 1992714 - RNA, 19 nt, Artificial Sequence
  Description of Artificial Sequence: Synthetic oligonucleotide
  Sense strand starting at position 2010 of SEQ ID NO: 1880772
agguguuagccucagauga

SEQ ID NO: 1992715 - RNA, 19 nt, Artificial Sequence
  Description of Artificial Sequence: Synthetic oligonucleotide
  Antisense strand to SEQ ID NO: 1992714
ucaucugaggcuaacaccu

SEQ ID NO: 1992716 - RNA, 19 nt, Artificial Sequence
  Description of Artificial Sequence: Synthetic oligonucleotide
  Sense strand starting at position 2055 of SEQ ID NO: 1880772
accaaauccuuggugacuu

SEQ ID NO: 1992717 - RNA, 19 nt, Artificial Sequence
  Description of Artificial Sequence: Synthetic oligonucleotide
  Antisense strand to SEQ ID NO: 1992716
aagucaccaaggauuuggu

SEQ ID NO: 1992718 - RNA, 19 nt, Artificial Sequence
  Description of Artificial Sequence: Synthetic oligonucleotide
  Sense strand starting at position 2111 of SEQ ID NO: 1880772
gguagugagccugaucuau

SEQ ID NO: 1992719 - RNA, 19 nt, Artificial Sequence
  Description of Artificial Sequence: Synthetic oligonucleotide
  Antisense strand to SEQ ID NO: 1992718
auagaucaggcucacuacc

SEQ ID NO: 1992720 - RNA, 19 nt, Artificial Sequence
  Description of Artificial Sequence: Synthetic oligonucleotide
  Sense strand starting at position 2184 of SEQ ID NO: 1880772
guuugcaugucauuuaaca

SEQ ID NO: 1992721 - RNA, 19 nt, Artificial Sequence
  Description of Artificial Sequence: Synthetic oligonucleotide
  Antisense strand to SEQ ID NO: 1992720
uguuaaaugacaugcaaac

SEQ ID NO: 1992722 - RNA, 19 nt, Artificial Sequence
  Description of Artificial Sequence: Synthetic oligonucleotide
  Sense strand starting at position 2376 of SEQ ID NO: 1880772
augaguuucugaucugaau

SEQ ID NO: 1992723 - RNA, 19 nt, Artificial Sequence
  Description of Artificial Sequence: Synthetic oligonucleotide
  Antisense strand to SEQ ID NO: 1992722
auucagaucagaaacucau

SEQ ID NO: 1992724 - RNA, 19 nt, Artificial Sequence
  Description of Artificial Sequence: Synthetic oligonucleotide
  Sense strand starting at position 2881 of SEQ ID NO: 1880772
cacauaggcccaugugaaa

SEQ ID NO: 1992725 - RNA, 19 nt, Artificial Sequence
  Description of Artificial Sequence: Synthetic oligonucleotide
  Antisense strand to SEQ ID NO: 1992724
uuucacaugggccuaugug

SEQ ID NO: 1992726 - RNA, 19 nt, Artificial Sequence
  Description of Artificial Sequence: Synthetic oligonucleotide
  Sense strand starting at position 2888 of SEQ ID NO: 1880772
gcccaugugaaauaguuga

SEQ ID NO: 1992727 - RNA, 19 nt, Artificial Sequence
  Description of Artificial Sequence: Synthetic oligonucleotide
  Antisense strand to SEQ ID NO: 1992726
ucaacuauuucacaugggc

SEQ ID NO: 1992728 - RNA, 19 nt, Artificial Sequence
  Description of Artificial Sequence: Synthetic oligonucleotide
  Sense strand starting at position 2892 of SEQ ID NO: 1880772
augugaaauaguugaagac

SEQ ID NO: 1992729 - RNA, 19 nt, Artificial Sequence
  Description of Artificial Sequence: Synthetic oligonucleotide
  Antisense strand to SEQ ID NO: 1992728
gucuucaacuauuucacau

SEQ ID NO: 1992730 - RNA, 19 nt, Artificial Sequence
  Description of Artificial Sequence: Synthetic oligonucleotide
  Sense strand starting at position 2912 of SEQ ID NO: 1880772
gugcaauaacacuggauaa

SEQ ID NO: 1992731 - RNA, 19 nt, Artificial Sequence
  Description of Artificial Sequence: Synthetic oligonucleotide
  Antisense strand to SEQ ID NO: 1992730
uuauccaguguuauugcac

SEQ ID NO: 1992732 - RNA, 19 nt, Artificial Sequence
  Description of Artificial Sequence: Synthetic oligonucleotide
  Sense strand starting at position 2923 of SEQ ID NO: 1880772
cuggauaagcuauauccau

SEQ ID NO: 1992733 - RNA, 19 nt, Artificial Sequence
  Description of Artificial Sequence: Synthetic oligonucleotide
  Antisense strand to SEQ ID NO: 1992732
auggauauagcuuauccag

SEQ ID NO: 1992734 - RNA, 19 nt, Artificial Sequence
  Description of Artificial Sequence: Synthetic oligonucleotide
  Sense strand starting at position 2989 of SEQ ID NO: 1880772
gaaugcuuccuggagcaga

SEQ ID NO: 1992735 - RNA, 19 nt, Artificial Sequence
  Description of Artificial Sequence: Synthetic oligonucleotide
  Antisense strand to SEQ ID NO: 1992734
ucugcuccaggaagcauuc

SEQ ID NO: 1992736 - RNA, 19 nt, Artificial Sequence
  Description of Artificial Sequence: Synthetic oligonucleotide
  Sense strand starting at position 3005 of SEQ ID NO: 1880772
agauaaaucuagguacagu

SEQ ID NO: 1992737 - RNA, 19 nt, Artificial Sequence
  Description of Artificial Sequence: Synthetic oligonucleotide
  Antisense strand to SEQ ID NO: 1992736
acuguaccuagauuuaucu

SEQ ID NO: 1992738 - RNA, 19 nt, Artificial Sequence
  Description of Artificial Sequence: Synthetic oligonucleotide
  Sense strand starting at position 3161 of SEQ ID NO: 1880772
gccuuuguguuuccauuua

SEQ ID NO: 1992739 - RNA, 19 nt, Artificial Sequence
  Description of Artificial Sequence: Synthetic oligonucleotide
  Antisense strand to SEQ ID NO: 1992738
uaaauggaaacacaaaggc

SEQ ID NO: 1992740 - RNA, 19 nt, Artificial Sequence
  Description of Artificial Sequence: Synthetic oligonucleotide
  Sense strand starting at position 3318 of SEQ ID NO: 1880772
cugcuugcagaauaaauua

SEQ ID NO: 1992741 - RNA, 19 nt, Artificial Sequence
  Description of Artificial Sequence: Synthetic oligonucleotide
  Antisense strand to SEQ ID NO: 1992740
uaauuuauucugcaagcag

SEQ ID NO: 1992742 - RNA, 19 nt, Artificial Sequence
  Description of Artificial Sequence: Synthetic oligonucleotide
  Sense strand starting at position 3439 of SEQ ID NO: 1880772
guauacaagagucaguuga

SEQ ID NO: 1992743 - RNA, 19 nt, Artificial Sequence
  Description of Artificial Sequence: Synthetic oligonucleotide
  Antisense strand to SEQ ID NO: 1992742
ucaacugacucuuguauac

SEQ ID NO: 1992744 - RNA, 19 nt, Artificial Sequence
  Description of Artificial Sequence: Synthetic oligonucleotide
  Sense strand starting at position 3441 of SEQ ID NO: 1880772
auacaagagucaguugaag

SEQ ID NO: 1992745 - RNA, 19 nt, Artificial Sequence
  Description of Artificial Sequence: Synthetic oligonucleotide
  Antisense strand to SEQ ID NO: 1992744
cuucaacugacucuuguau

SEQ ID NO: 1992746 - RNA, 19 nt, Artificial Sequence
  Description of Artificial Sequence: Synthetic oligonucleotide
  Sense strand starting at position 3538 of SEQ ID NO: 1880772
agaguaacauaggaaauuu

SEQ ID NO: 1992747 - RNA, 19 nt, Artificial Sequence
  Description of Artificial Sequence: Synthetic oligonucleotide
  Antisense strand to SEQ ID NO: 1992746
aaauuuccuauguuacucu

SEQ ID NO: 1992748 - RNA, 19 nt, Artificial Sequence
  Description of Artificial Sequence: Synthetic oligonucleotide
  Sense strand starting at position 3562 of SEQ ID NO: 1880772
gagaaagagugucuuggca

SEQ ID NO: 1992749 - RNA, 19 nt, Artificial Sequence
  Description of Artificial Sequence: Synthetic oligonucleotide
  Antisense strand to SEQ ID NO: 1992748
ugccaagacacucuuucuc

SEQ ID NO: 1992750 - RNA, 19 nt, Artificial Sequence
  Description of Artificial Sequence: Synthetic oligonucleotide
  Sense strand starting at position 3829 of SEQ ID NO: 1880772
cccugauaguacuuauuag

SEQ ID NO: 1992751 - RNA, 19 nt, Artificial Sequence
  Description of Artificial Sequence: Synthetic oligonucleotide
  Antisense strand to SEQ ID NO: 1992750
cuaauaaguacuaucaggg

SEQ ID NO: 1992752 - RNA, 19 nt, Artificial Sequence
  Description of Artificial Sequence: Synthetic oligonucleotide
  Sense strand starting at position 3916 of SEQ ID NO: 1880772
auaaguguuuccucuaaga

SEQ ID NO: 1992753 - RNA, 19 nt, Artificial Sequence
  Description of Artificial Sequence: Synthetic oligonucleotide
  Antisense strand to SEQ ID NO: 1992752
ucuuagaggaaacacuuau

SEQ ID NO: 1992754 - RNA, 19 nt, Artificial Sequence
  Description of Artificial Sequence: Synthetic oligonucleotide
  Sense strand starting at position 29 of SEQ ID NO: 1880773
uccaguuuccuccaggaua

SEQ ID NO: 1992755 - RNA, 19 nt, Artificial Sequence
  Description of Artificial Sequence: Synthetic oligonucleotide
  Antisense strand to SEQ ID NO: 1992754
uauccuggaggaaacugga

SEQ ID NO: 1992756 - RNA, 19 nt, Artificial Sequence
  Description of Artificial Sequence: Synthetic oligonucleotide
  Sense strand starting at position 89 of SEQ ID NO: 1880773
cuaucucugcaccagaaga

SEQ ID NO: 1992757 - RNA, 19 nt, Artificial Sequence
  Description of Artificial Sequence: Synthetic oligonucleotide
  Antisense strand to SEQ ID NO: 1992756
ucuucuggugcagagauag

SEQ ID NO: 1992758 - RNA, 19 nt, Artificial Sequence
  Description of Artificial Sequence: Synthetic oligonucleotide
  Sense strand starting at position 442 of SEQ ID NO: 1880773
cagauagacuugcugacuu

SEQ ID NO: 1992759 - RNA, 19 nt, Artificial Sequence
  Description of Artificial Sequence: Synthetic oligonucleotide
  Antisense strand to SEQ ID NO: 1992758
aagucagcaagucuaucug

SEQ ID NO: 1992760 - RNA, 19 nt, Artificial Sequence
  Description of Artificial Sequence: Synthetic oligonucleotide
  Sense strand starting at position 476 of SEQ ID NO: 1880773
gaccacuuguacuuggaaa

SEQ ID NO: 1992761 - RNA, 19 nt, Artificial Sequence
  Description of Artificial Sequence: Synthetic oligonucleotide
  Antisense strand to SEQ ID NO: 1992760
uuuccaaguacaagugguc

SEQ ID NO: 1992762 - RNA, 19 nt, Artificial Sequence
  Description of Artificial Sequence: Synthetic oligonucleotide
  Sense strand starting at position 478 of SEQ ID NO: 1880773
ccacuuguacuuggaaaua

SEQ ID NO: 1992763 - RNA, 19 nt, Artificial Sequence
  Description of Artificial Sequence: Synthetic oligonucleotide
  Antisense strand to SEQ ID NO: 1992762
uauuuccaaguacaagugg

SEQ ID NO: 1992764 - RNA, 19 nt, Artificial Sequence
  Description of Artificial Sequence: Synthetic oligonucleotide
  Sense strand starting at position 507 of SEQ ID NO: 1880773
guagaaacuagguguauua

SEQ ID NO: 1992765 - RNA, 19 nt, Artificial Sequence
  Description of Artificial Sequence: Synthetic oligonucleotide
  Antisense strand to SEQ ID NO: 1992764
uaauacaccuaguuucuac

SEQ ID NO: 1992766 - RNA, 19 nt, Artificial Sequence
  Description of Artificial Sequence: Synthetic oligonucleotide
  Sense strand starting at position 829 of SEQ ID NO: 1880773
gaaugagcaccaugucaug

SEQ ID NO: 1992767 - RNA, 19 nt, Artificial Sequence
  Description of Artificial Sequence: Synthetic oligonucleotide
  Antisense strand to SEQ ID NO: 1992766
caugacauggugcucauuc

SEQ ID NO: 1992768 - RNA, 19 nt, Artificial Sequence
  Description of Artificial Sequence: Synthetic oligonucleotide
  Sense strand starting at position 889 of SEQ ID NO: 1880773
gcacuuucgcaagacaaag

SEQ ID NO: 1992769 - RNA, 19 nt, Artificial Sequence
  Description of Artificial Sequence: Synthetic oligonucleotide
  Antisense strand to SEQ ID NO: 1992768
cuuugucuugcgaaagugc

SEQ ID NO: 1992770 - RNA, 19 nt, Artificial Sequence
  Description of Artificial Sequence: Synthetic oligonucleotide
  Sense strand starting at position 938 of SEQ ID NO: 1880773
auggaugaggcuugacaca

SEQ ID NO: 1992771 - RNA, 19 nt, Artificial Sequence
  Description of Artificial Sequence: Synthetic oligonucleotide
  Antisense strand to SEQ ID NO: 1992770
ugugucaagccucauccau

SEQ ID NO: 1992772 - RNA, 19 nt, Artificial Sequence
  Description of Artificial Sequence: Synthetic oligonucleotide
  Sense strand starting at position 1020 of SEQ ID NO: 1880773
gaagacacucagugcucaa

SEQ ID NO: 1992773 - RNA, 19 nt, Artificial Sequence
  Description of Artificial Sequence: Synthetic oligonucleotide
  Antisense strand to SEQ ID NO: 1992772
uugagcacugagugucuuc

SEQ ID NO: 1992774 - RNA, 19 nt, Artificial Sequence
  Description of Artificial Sequence: Synthetic oligonucleotide
  Sense strand starting at position 1177 of SEQ ID NO: 1880773
gacagacaagcuggaguua

SEQ ID NO: 1992775 - RNA, 19 nt, Artificial Sequence
  Description of Artificial Sequence: Synthetic oligonucleotide
  Antisense strand to SEQ ID NO: 1992774
uaacuccagcuugucuguc

SEQ ID NO: 1992776 - RNA, 19 nt, Artificial Sequence
  Description of Artificial Sequence: Synthetic oligonucleotide
  Sense strand starting at position 1188 of SEQ ID NO: 1880773
uggaguuagcaacaauggu

SEQ ID NO: 1992777 - RNA, 19 nt, Artificial Sequence
  Description of Artificial Sequence: Synthetic oligonucleotide
  Antisense strand to SEQ ID NO: 1992776
accauuguugcuaacucca

SEQ ID NO: 1992778 - RNA, 19 nt, Artificial Sequence
  Description of Artificial Sequence: Synthetic oligonucleotide
  Sense strand starting at position 1310 of SEQ ID NO: 1880773
cucuuagugccauaacuga

SEQ ID NO: 1992779 - RNA, 19 nt, Artificial Sequence
  Description of Artificial Sequence: Synthetic oligonucleotide
  Antisense strand to SEQ ID NO: 1992778
ucaguuauggcacuaagag

SEQ ID NO: 1992780 - RNA, 19 nt, Artificial Sequence
  Description of Artificial Sequence: Synthetic oligonucleotide
  Sense strand starting at position 1368 of SEQ ID NO: 1880773
ugcagagccaaaugagaua

SEQ ID NO: 1992781 - RNA, 19 nt, Artificial Sequence
  Description of Artificial Sequence: Synthetic oligonucleotide
  Antisense strand to SEQ ID NO: 1992780
uaucucauuuggcucugca

SEQ ID NO: 1992782 - RNA, 19 nt, Artificial Sequence
  Description of Artificial Sequence: Synthetic oligonucleotide
  Sense strand starting at position 1386 of SEQ ID NO: 1880773
agaacugaguaacaaauuu

SEQ ID NO: 1992783 - RNA, 19 nt, Artificial Sequence
  Description of Artificial Sequence: Synthetic oligonucleotide
  Antisense strand to SEQ ID NO: 1992782
aaauuuguuacucaguucu

SEQ ID NO: 1992784 - RNA, 19 nt, Artificial Sequence
  Description of Artificial Sequence: Synthetic oligonucleotide
  Sense strand starting at position 1475 of SEQ ID NO: 1880773
gcauauuucugauaaaggg

SEQ ID NO: 1992785 - RNA, 19 nt, Artificial Sequence
  Description of Artificial Sequence: Synthetic oligonucleotide
  Antisense strand to SEQ ID NO: 1992784
cccuuuaucagaaauaugc

SEQ ID NO: 1992786 - RNA, 19 nt, Artificial Sequence
  Description of Artificial Sequence: Synthetic oligonucleotide
  Sense strand starting at position 1550 of SEQ ID NO: 1880773
gcauucuuaugacuuaaga

SEQ ID NO: 1992787 - RNA, 19 nt, Artificial Sequence
  Description of Artificial Sequence: Synthetic oligonucleotide
  Antisense strand to SEQ ID NO: 1992786
ucuuaagucauaagaaugc

SEQ ID NO: 1992788 - RNA, 19 nt, Artificial Sequence
  Description of Artificial Sequence: Synthetic oligonucleotide
  Sense strand starting at position 1736 of SEQ ID NO: 1880773
ucacacauucuugaagguu

SEQ ID NO: 1992789 - RNA, 19 nt, Artificial Sequence
  Description of Artificial Sequence: Synthetic oligonucleotide
  Antisense strand to SEQ ID NO: 1992788
aaccuucaagaauguguga

SEQ ID NO: 1992790 - RNA, 19 nt, Artificial Sequence
  Description of Artificial Sequence: Synthetic oligonucleotide
  Sense strand starting at position 1830 of SEQ ID NO: 1880773
cgcagcaagccuuugcuua

SEQ ID NO: 1992791 - RNA, 19 nt, Artificial Sequence
  Description of Artificial Sequence: Synthetic oligonucleotide
  Antisense strand to SEQ ID NO: 1992790
uaagcaaaggcuugcugcg

SEQ ID NO: 1992792 - RNA, 19 nt, Artificial Sequence
  Description of Artificial Sequence: Synthetic oligonucleotide
  Sense strand starting at position 1840 of SEQ ID NO: 1880773
cuuugcuuaccugagaaua

SEQ ID NO: 1992793 - RNA, 19 nt, Artificial Sequence
  Description of Artificial Sequence: Synthetic oligonucleotide
  Antisense strand to SEQ ID NO: 1992792
uauucucagguaagcaaag

SEQ ID NO: 1992794 - RNA, 19 nt, Artificial Sequence
  Description of Artificial Sequence: Synthetic oligonucleotide
  Sense strand starting at position 2184 of SEQ ID NO: 1880773
auuagaaacuggucaugua

SEQ ID NO: 1992795 - RNA, 19 nt, Artificial Sequence
  Description of Artificial Sequence: Synthetic oligonucleotide
  Antisense strand to SEQ ID NO: 1992794
uacaugaccaguuucuaau

SEQ ID NO: 1992796 - RNA, 19 nt, Artificial Sequence
  Description of Artificial Sequence: Synthetic oligonucleotide
  Sense strand starting at position 2185 of SEQ ID NO: 1880773
uuagaaacuggucauguau

SEQ ID NO: 1992797 - RNA, 19 nt, Artificial Sequence
  Description of Artificial Sequence: Synthetic oligonucleotide
  Antisense strand to SEQ ID NO: 1992796
auacaugaccaguuucuaa

SEQ ID NO: 1992798 - RNA, 19 nt, Artificial Sequence
  Description of Artificial Sequence: Synthetic oligonucleotide
  Sense strand starting at position 2227 of SEQ ID NO: 1880773
ugccacauuucccuugagu

SEQ ID NO: 1992799 - RNA, 19 nt, Artificial Sequence
  Description of Artificial Sequence: Synthetic oligonucleotide
  Antisense strand to SEQ ID NO: 1992798
acucaagggaaauguggca

SEQ ID NO: 1992800 - RNA, 19 nt, Artificial Sequence
  Description of Artificial Sequence: Synthetic oligonucleotide
  Sense strand starting at position 2241 of SEQ ID NO: 1880773
ugagucagaccugauugca

SEQ ID NO: 1992801 - RNA, 19 nt, Artificial Sequence
  Description of Artificial Sequence: Synthetic oligonucleotide
  Antisense strand to SEQ ID NO: 1992800
ugcaaucaggucugacuca

SEQ ID NO: 1992802 - RNA, 19 nt, Artificial Sequence
  Description of Artificial Sequence: Synthetic oligonucleotide
  Sense strand starting at position 2340 of SEQ ID NO: 1880773
ucucucagaguauggaaau

SEQ ID NO: 1992803 - RNA, 19 nt, Artificial Sequence
  Description of Artificial Sequence: Synthetic oligonucleotide
  Antisense strand to SEQ ID NO: 1992802
auuuccauacucugagaga

SEQ ID NO: 1992804 - RNA, 19 nt, Artificial Sequence
  Description of Artificial Sequence: Synthetic oligonucleotide
  Sense strand starting at position 2588 of SEQ ID NO: 1880773
ugaaucuuccaagauguuu

SEQ ID NO: 1992805 - RNA, 19 nt, Artificial Sequence
  Description of Artificial Sequence: Synthetic oligonucleotide
  Antisense strand to SEQ ID NO: 1992804
aaacaucuuggaagauuca

SEQ ID NO: 1992806 - RNA, 19 nt, Artificial Sequence
  Description of Artificial Sequence: Synthetic oligonucleotide
  Sense strand starting at position 2682 of SEQ ID NO: 1880773
uguuccugggauuauauua

SEQ ID NO: 1992807 - RNA, 19 nt, Artificial Sequence
  Description of Artificial Sequence: Synthetic oligonucleotide
  Antisense strand to SEQ ID NO: 1992806
uaauauaaucccaggaaca

SEQ ID NO: 1992808 - RNA, 19 nt, Artificial Sequence
  Description of Artificial Sequence: Synthetic oligonucleotide
  Sense strand starting at position 2883 of SEQ ID NO: 1880773
aggcaaauuugugagacaa

SEQ ID NO: 1992809 - RNA, 19 nt, Artificial Sequence
  Description of Artificial Sequence: Synthetic oligonucleotide
  Antisense strand to SEQ ID NO: 1992808
uugucucacaaauuugccu

SEQ ID NO: 1992810 - RNA, 19 nt, Artificial Sequence
  Description of Artificial Sequence: Synthetic oligonucleotide
  Sense strand starting at position 3031 of SEQ ID NO: 1880773
gcagaaguuguguaaggag

SEQ ID NO: 1992811 - RNA, 19 nt, Artificial Sequence
  Description of Artificial Sequence: Synthetic oligonucleotide
  Antisense strand to SEQ ID NO: 1992810
cuccuuacacaacuucugc

SEQ ID NO: 1992812 - RNA, 19 nt, Artificial Sequence
  Description of Artificial Sequence: Synthetic oligonucleotide
  Sense strand starting at position 3038 of SEQ ID NO: 1880773
uuguguaaggaguaguaga

SEQ ID NO: 1992813 - RNA, 19 nt, Artificial Sequence
  Description of Artificial Sequence: Synthetic oligonucleotide
  Antisense strand to SEQ ID NO: 1992812
ucuacuacuccuuacacaa

SEQ ID NO: 1992814 - RNA, 19 nt, Artificial Sequence
  Description of Artificial Sequence: Synthetic oligonucleotide
  Sense strand starting at position 3051 of SEQ ID NO: 1880773
aguagagucaaugauagug

SEQ ID NO: 1992815 - RNA, 19 nt, Artificial Sequence
  Description of Artificial Sequence: Synthetic oligonucleotide
  Antisense strand to SEQ ID NO: 1992814
cacuaucauugacucuacu

SEQ ID NO: 1992816 - RNA, 19 nt, Artificial Sequence
  Description of Artificial Sequence: Synthetic oligonucleotide
  Sense strand starting at position 3129 of SEQ ID NO: 1880773
gccucaaaggcauaacuga

SEQ ID NO: 1992817 - RNA, 19 nt, Artificial Sequence
  Description of Artificial Sequence: Synthetic oligonucleotide
  Antisense strand to SEQ ID NO: 1992816
ucaguuaugccuuugaggc

SEQ ID NO: 1992818 - RNA, 19 nt, Artificial Sequence
  Description of Artificial Sequence: Synthetic oligonucleotide
  Sense strand starting at position 3425 of SEQ ID NO: 1880773
ggucucuuccaagagucag

SEQ ID NO: 1992819 - RNA, 19 nt, Artificial Sequence
  Description of Artificial Sequence: Synthetic oligonucleotide
  Antisense strand to SEQ ID NO: 1992818
cugacucuuggaagagacc

SEQ ID NO: 1992820 - RNA, 19 nt, Artificial Sequence
  Description of Artificial Sequence: Synthetic oligonucleotide
  Sense strand starting at position 3562 of SEQ ID NO: 1880773
cauuacuuuccaggaggau

SEQ ID NO: 1992821 - RNA, 19 nt, Artificial Sequence
  Description of Artificial Sequence: Synthetic oligonucleotide
  Antisense strand to SEQ ID NO: 1992820
auccuccuggaaaguaaug

SEQ ID NO: 1992822 - RNA, 19 nt, Artificial Sequence
  Description of Artificial Sequence: Synthetic oligonucleotide
  Sense strand starting at position 3565 of SEQ ID NO: 1880773
uacuuuccaggaggauauu

SEQ ID NO: 1992823 - RNA, 19 nt, Artificial Sequence
  Description of Artificial Sequence: Synthetic oligonucleotide
  Antisense strand to SEQ ID NO: 1992822
aauauccuccuggaaagua

SEQ ID NO: 1992824 - RNA, 19 nt, Artificial Sequence
  Description of Artificial Sequence: Synthetic oligonucleotide
  Sense strand starting at position 3730 of SEQ ID NO: 1880773
uagguagcucucuagagaa

SEQ ID NO: 1992825 - RNA, 19 nt, Artificial Sequence
  Description of Artificial Sequence: Synthetic oligonucleotide
  Antisense strand to SEQ ID NO: 1992824
uucucuagagagcuaccua

SEQ ID NO: 1992826 - RNA, 19 nt, Artificial Sequence
  Description of Artificial Sequence: Synthetic oligonucleotide
  Sense strand starting at position 3732 of SEQ ID NO: 1880773
gguagcucucuagagaauu

SEQ ID NO: 1992827 - RNA, 19 nt, Artificial Sequence
  Description of Artificial Sequence: Synthetic oligonucleotide
  Antisense strand to SEQ ID NO: 1992826
aauucucuagagagcuacc

SEQ ID NO: 1992828 - RNA, 19 nt, Artificial Sequence
  Description of Artificial Sequence: Synthetic oligonucleotide
  Sense strand starting at position 3763 of SEQ ID NO: 1880773
gaaacaaaugauugcaguu

SEQ ID NO: 1992829 - RNA, 19 nt, Artificial Sequence
  Description of Artificial Sequence: Synthetic oligonucleotide
  Antisense strand to SEQ ID NO: 1992828
aacugcaaucauuuguuuc

SEQ ID NO: 1992830 - RNA, 19 nt, Artificial Sequence
  Description of Artificial Sequence: Synthetic oligonucleotide
  Sense strand starting at position 3798 of SEQ ID NO: 1880773
ccuuguuuaaagugaggga

SEQ ID NO: 1992831 - RNA, 19 nt, Artificial Sequence
  Description of Artificial Sequence: Synthetic oligonucleotide
  Antisense strand to SEQ ID NO: 1992830
ucccucacuuuaaacaagg

SEQ ID NO: 1992832 - RNA, 19 nt, Artificial Sequence
  Description of Artificial Sequence: Synthetic oligonucleotide
  Sense strand starting at position 3842 of SEQ ID NO: 1880773
gcguguuuggcaucuucac

SEQ ID NO: 1992833 - RNA, 19 nt, Artificial Sequence
  Description of Artificial Sequence: Synthetic oligonucleotide
  Antisense strand to SEQ ID NO: 1992832
gugaagaugccaaacacgc

SEQ ID NO: 1992834 - RNA, 19 nt, Artificial Sequence
  Description of Artificial Sequence: Synthetic oligonucleotide
  Sense strand starting at position 2 of SEQ ID NO: 1880774
uuuggaugaagguauugua

SEQ ID NO: 1992835 - RNA, 19 nt, Artificial Sequence
  Description of Artificial Sequence: Synthetic oligonucleotide
  Antisense strand to SEQ ID NO: 1992834
uacaauaccuucauccaaa

SEQ ID NO: 1992836 - RNA, 19 nt, Artificial Sequence
  Description of Artificial Sequence: Synthetic oligonucleotide
  Sense strand starting at position 11 of SEQ ID NO: 1880774
agguauuguagaugccuuu

SEQ ID NO: 1992837 - RNA, 19 nt, Artificial Sequence
  Description of Artificial Sequence: Synthetic oligonucleotide
  Antisense strand to SEQ ID NO: 1992836
aaaggcaucuacaauaccu

SEQ ID NO: 1992838 - RNA, 19 nt, Artificial Sequence
  Description of Artificial Sequence: Synthetic oligonucleotide
  Sense strand starting at position 18 of SEQ ID NO: 1880774
guagaugccuuucugccaa

SEQ ID NO: 1992839 - RNA, 19 nt, Artificial Sequence
  Description of Artificial Sequence: Synthetic oligonucleotide
  Antisense strand to SEQ ID NO: 1992838
uuggcagaaaggcaucuac

SEQ ID NO: 1992840 - RNA, 19 nt, Artificial Sequence
  Description of Artificial Sequence: Synthetic oligonucleotide
  Sense strand starting at position 366 of SEQ ID NO: 1880774
cucacugacucagaauaga

SEQ ID NO: 1992841 - RNA, 19 nt, Artificial Sequence
  Description of Artificial Sequence: Synthetic oligonucleotide
  Antisense strand to SEQ ID NO: 1992840
ucuauucugagucagugag

SEQ ID NO: 1992842 - RNA, 19 nt, Artificial Sequence
  Description of Artificial Sequence: Synthetic oligonucleotide
  Sense strand starting at position 762 of SEQ ID NO: 1880774
acugcaaaggucuguuaca

SEQ ID NO: 1992843 - RNA, 19 nt, Artificial Sequence
  Description of Artificial Sequence: Synthetic oligonucleotide
  Antisense strand to SEQ ID NO: 1992842
uguaacagaccuuugcagu

SEQ ID NO: 1992844 - RNA, 19 nt, Artificial Sequence
  Description of Artificial Sequence: Synthetic oligonucleotide
  Sense strand starting at position 763 of SEQ ID NO: 1880774
cugcaaaggucuguuacau

SEQ ID NO: 1992845 - RNA, 19 nt, Artificial Sequence
  Description of Artificial Sequence: Synthetic oligonucleotide
  Antisense strand to SEQ ID NO: 1992844
auguaacagaccuuugcag

SEQ ID NO: 1992846 - RNA, 19 nt, Artificial Sequence
  Description of Artificial Sequence: Synthetic oligonucleotide
  Sense strand starting at position 2204 of SEQ ID NO: 1880774
gcagcaguucuguucgguu

SEQ ID NO: 1992847 - RNA, 19 nt, Artificial Sequence
  Description of Artificial Sequence: Synthetic oligonucleotide
  Antisense strand to SEQ ID NO: 1992846
aaccgaacagaacugcugc

SEQ ID NO: 1992848 - RNA, 19 nt, Artificial Sequence
  Description of Artificial Sequence: Synthetic oligonucleotide
  Sense strand starting at position 2334 of SEQ ID NO: 1880774
cgaggaacgguagaguuua

SEQ ID NO: 1992849 - RNA, 19 nt, Artificial Sequence
  Description of Artificial Sequence: Synthetic oligonucleotide
  Antisense strand to SEQ ID NO: 1992848
uaaacucuaccguuccucg

SEQ ID NO: 1992850 - RNA, 19 nt, Artificial Sequence
  Description of Artificial Sequence: Synthetic oligonucleotide
  Sense strand starting at position 2346 of SEQ ID NO: 1880774
gaguuuagaaccugugagu

SEQ ID NO: 1992851 - RNA, 19 nt, Artificial Sequence
  Description of Artificial Sequence: Synthetic oligonucleotide
  Antisense strand to SEQ ID NO: 1992850
acucacagguucuaaacuc

SEQ ID NO: 1992852 - RNA, 19 nt, Artificial Sequence
  Description of Artificial Sequence: Synthetic oligonucleotide
  Sense strand starting at position 2352 of SEQ ID NO: 1880774
agaaccugugaguacguua

SEQ ID NO: 1992853 - RNA, 19 nt, Artificial Sequence
  Description of Artificial Sequence: Synthetic oligonucleotide
  Antisense strand to SEQ ID NO: 1992852
uaacguacucacagguucu

SEQ ID NO: 1992854 - RNA, 19 nt, Artificial Sequence
  Description of Artificial Sequence: Synthetic oligonucleotide
  Sense strand starting at position 2355 of SEQ ID NO: 1880774
accugugaguacguuagaa

SEQ ID NO: 1992855 - RNA, 19 nt, Artificial Sequence
  Description of Artificial Sequence: Synthetic oligonucleotide
  Antisense strand to SEQ ID NO: 1992854
uucuaacguacucacaggu

SEQ ID NO: 1992856 - RNA, 19 nt, Artificial Sequence
  Description of Artificial Sequence: Synthetic oligonucleotide
  Sense strand starting at position 2357 of SEQ ID NO: 1880774
cugugaguacguuagaaag

SEQ ID NO: 1992857 - RNA, 19 nt, Artificial Sequence
  Description of Artificial Sequence: Synthetic oligonucleotide
  Antisense strand to SEQ ID NO: 1992856
cuuucuaacguacucacag

SEQ ID NO: 1992858 - RNA, 19 nt, Artificial Sequence
  Description of Artificial Sequence: Synthetic oligonucleotide
  Sense strand starting at position 2372 of SEQ ID NO: 1880774
aaaguucgcagucgaggaa

SEQ ID NO: 1992859 - RNA, 19 nt, Artificial Sequence
  Description of Artificial Sequence: Synthetic oligonucleotide
  Antisense strand to SEQ ID NO: 1992858
uuccucgacugcgaacuuu

SEQ ID NO: 1992860 - RNA, 19 nt, Artificial Sequence
  Description of Artificial Sequence: Synthetic oligonucleotide
  Sense strand starting at position 2546 of SEQ ID NO: 1880774
ccagaaagaugagguaauu

SEQ ID NO: 1992861 - RNA, 19 nt, Artificial Sequence
  Description of Artificial Sequence: Synthetic oligonucleotide
  Antisense strand to SEQ ID NO: 1992860
aauuaccucaucuuucugg

SEQ ID NO: 1992862 - RNA, 19 nt, Artificial Sequence
  Description of Artificial Sequence: Synthetic oligonucleotide
  Sense strand starting at position 2622 of SEQ ID NO: 1880774
gugggcuuccacuguguaa

SEQ ID NO: 1992863 - RNA, 19 nt, Artificial Sequence
  Description of Artificial Sequence: Synthetic oligonucleotide
  Antisense strand to SEQ ID NO: 1992862
uuacacaguggaagcccac

SEQ ID NO: 1992864 - RNA, 19 nt, Artificial Sequence
  Description of Artificial Sequence: Synthetic oligonucleotide
  Sense strand starting at position 2624 of SEQ ID NO: 1880774
gggcuuccacuguguaaug

SEQ ID NO: 1992865 - RNA, 19 nt, Artificial Sequence
  Description of Artificial Sequence: Synthetic oligonucleotide
  Antisense strand to SEQ ID NO: 1992864
cauuacacaguggaagccc

SEQ ID NO: 1992866 - RNA, 19 nt, Artificial Sequence
  Description of Artificial Sequence: Synthetic oligonucleotide
  Sense strand starting at position 2635 of SEQ ID NO: 1880774
guguaaugcuaagcagaua

SEQ ID NO: 1992867 - RNA, 19 nt, Artificial Sequence
  Description of Artificial Sequence: Synthetic oligonucleotide
  Antisense strand to SEQ ID NO: 1992866
uaucugcuuagcauuacac

SEQ ID NO: 1992868 - RNA, 19 nt, Artificial Sequence
  Description of Artificial Sequence: Synthetic oligonucleotide
  Sense strand starting at position 2647 of SEQ ID NO: 1880774
gcagauaggacguaaauuc

SEQ ID NO: 1992869 - RNA, 19 nt, Artificial Sequence
  Description of Artificial Sequence: Synthetic oligonucleotide
  Antisense strand to SEQ ID NO: 1992868
gaauuuacguccuaucugc

SEQ ID NO: 1992870 - RNA, 19 nt, Artificial Sequence
  Description of Artificial Sequence: Synthetic oligonucleotide
  Sense strand starting at position 2654 of SEQ ID NO: 1880774
ggacguaaauuccuuugca

SEQ ID NO: 1992871 - RNA, 19 nt, Artificial Sequence
  Description of Artificial Sequence: Synthetic oligonucleotide
  Antisense strand to SEQ ID NO: 1992870
ugcaaaggaauuuacgucc

SEQ ID NO: 1992872 - RNA, 19 nt, Artificial Sequence
  Description of Artificial Sequence: Synthetic oligonucleotide
  Sense strand starting at position 2655 of SEQ ID NO: 1880774
gacguaaauuccuuugcag

SEQ ID NO: 1992873 - RNA, 19 nt, Artificial Sequence
  Description of Artificial Sequence: Synthetic oligonucleotide
  Antisense strand to SEQ ID NO: 1992872
cugcaaaggaauuuacguc

SEQ ID NO: 1992874 - RNA, 19 nt, Artificial Sequence
  Description of Artificial Sequence: Synthetic oligonucleotide
  Sense strand starting at position 2657 of SEQ ID NO: 1880774
cguaaauuccuuugcagac

SEQ ID NO: 1992875 - RNA, 19 nt, Artificial Sequence
  Description of Artificial Sequence: Synthetic oligonucleotide
  Antisense strand to SEQ ID NO: 1992874
gucugcaaaggaauuuacg

SEQ ID NO: 1992876 - RNA, 19 nt, Artificial Sequence
  Description of Artificial Sequence: Synthetic oligonucleotide
  Sense strand starting at position 2658 of SEQ ID NO: 1880774
guaaauuccuuugcagacu

SEQ ID NO: 1992877 - RNA, 19 nt, Artificial Sequence
  Description of Artificial Sequence: Synthetic oligonucleotide
  Antisense strand to SEQ ID NO: 1992876
agucugcaaaggaauuuac

SEQ ID NO: 1992878 - RNA, 19 nt, Artificial Sequence
  Description of Artificial Sequence: Synthetic oligonucleotide
  Sense strand starting at position 2861 of SEQ ID NO: 1880774
gagcaugugcuuuagagac

SEQ ID NO: 1992879 - RNA, 19 nt, Artificial Sequence
  Description of Artificial Sequence: Synthetic oligonucleotide
  Antisense strand to SEQ ID NO: 1992878
gucucuaaagcacaugcuc

SEQ ID NO: 1992880 - RNA, 19 nt, Artificial Sequence
  Description of Artificial Sequence: Synthetic oligonucleotide
  Sense strand starting at position 2895 of SEQ ID NO: 1880774
cuauuuacuugugagagcu

SEQ ID NO: 1992881 - RNA, 19 nt, Artificial Sequence
  Description of Artificial Sequence: Synthetic oligonucleotide
  Antisense strand to SEQ ID NO: 1992880
agcucucacaaguaaauag

SEQ ID NO: 1992882 - RNA, 19 nt, Artificial Sequence
  Description of Artificial Sequence: Synthetic oligonucleotide
  Sense strand starting at position 2897 of SEQ ID NO: 1880774
auuuacuugugagagcuuu

SEQ ID NO: 1992883 - RNA, 19 nt, Artificial Sequence
  Description of Artificial Sequence: Synthetic oligonucleotide
  Antisense strand to SEQ ID NO: 1992882
aaagcucucacaaguaaau

SEQ ID NO: 1992884 - RNA, 19 nt, Artificial Sequence
  Description of Artificial Sequence: Synthetic oligonucleotide
  Sense strand starting at position 2903 of SEQ ID NO: 1880774
uugugagagcuuuagguca

SEQ ID NO: 1992885 - RNA, 19 nt, Artificial Sequence
  Description of Artificial Sequence: Synthetic oligonucleotide
  Antisense strand to SEQ ID NO: 1992884
ugaccuaaagcucucacaa

SEQ ID NO: 1992886 - RNA, 19 nt, Artificial Sequence
  Description of Artificial Sequence: Synthetic oligonucleotide
  Sense strand starting at position 2968 of SEQ ID NO: 1880774
ugccuagcagaagauugau

SEQ ID NO: 1992887 - RNA, 19 nt, Artificial Sequence
  Description of Artificial Sequence: Synthetic oligonucleotide
  Antisense strand to SEQ ID NO: 1992886
aucaaucuucugcuaggca

SEQ ID NO: 1992888 - RNA, 19 nt, Artificial Sequence
  Description of Artificial Sequence: Synthetic oligonucleotide
  Sense strand starting at position 2971 of SEQ ID NO: 1880774
cuagcagaagauugauuaa

SEQ ID NO: 1992889 - RNA, 19 nt, Artificial Sequence
  Description of Artificial Sequence: Synthetic oligonucleotide
  Antisense strand to SEQ ID NO: 1992888
uuaaucaaucuucugcuag

SEQ ID NO: 1992890 - RNA, 19 nt, Artificial Sequence
  Description of Artificial Sequence: Synthetic oligonucleotide
  Sense strand starting at position 3006 of SEQ ID NO: 1880774
ccaacuagugccuagcaaa

SEQ ID NO: 1992891 - RNA, 19 nt, Artificial Sequence
  Description of Artificial Sequence: Synthetic oligonucleotide
  Antisense strand to SEQ ID NO: 1992890
uuugcuaggcacuaguugg

SEQ ID NO: 1992892 - RNA, 19 nt, Artificial Sequence
  Description of Artificial Sequence: Synthetic oligonucleotide
  Sense strand starting at position 3177 of SEQ ID NO: 1880774
uuaacuuccagugguguca

SEQ ID NO: 1992893 - RNA, 19 nt, Artificial Sequence
  Description of Artificial Sequence: Synthetic oligonucleotide
  Antisense strand to SEQ ID NO: 1992892
ugacaccacuggaaguuaa

SEQ ID NO: 1992894 - RNA, 19 nt, Artificial Sequence
  Description of Artificial Sequence: Synthetic oligonucleotide
  Sense strand starting at position 3264 of SEQ ID NO: 1880774
ucuaguuaauucuugguga

SEQ ID NO: 1992895 - RNA, 19 nt, Artificial Sequence
  Description of Artificial Sequence: Synthetic oligonucleotide
  Antisense strand to SEQ ID NO: 1992894
ucaccaagaauuaacuaga

SEQ ID NO: 1992896 - RNA, 19 nt, Artificial Sequence
  Description of Artificial Sequence: Synthetic oligonucleotide
  Sense strand starting at position 3266 of SEQ ID NO: 1880774
uaguuaauucuuggugaug

SEQ ID NO: 1992897 - RNA, 19 nt, Artificial Sequence
  Description of Artificial Sequence: Synthetic oligonucleotide
  Antisense strand to SEQ ID NO: 1992896
caucaccaagaauuaacua

SEQ ID NO: 1992898 - RNA, 19 nt, Artificial Sequence
  Description of Artificial Sequence: Synthetic oligonucleotide
  Sense strand starting at position 3267 of SEQ ID NO: 1880774
aguuaauucuuggugauga

SEQ ID NO: 1992899 - RNA, 19 nt, Artificial Sequence
  Description of Artificial Sequence: Synthetic oligonucleotide
  Antisense strand to SEQ ID NO: 1992898
ucaucaccaagaauuaacu

SEQ ID NO: 1992900 - RNA, 19 nt, Artificial Sequence
  Description of Artificial Sequence: Synthetic oligonucleotide
  Sense strand starting at position 3277 of SEQ ID NO: 1880774
uggugaugauaacagaaau

SEQ ID NO: 1992901 - RNA, 19 nt, Artificial Sequence
  Description of Artificial Sequence: Synthetic oligonucleotide
  Antisense strand to SEQ ID NO: 1992900
auuucuguuaucaucacca

SEQ ID NO: 1992902 - RNA, 19 nt, Artificial Sequence
  Description of Artificial Sequence: Synthetic oligonucleotide
  Sense strand starting at position 3335 of SEQ ID NO: 1880774
cuuucugaguaucuuuaga

SEQ ID NO: 1992903 - RNA, 19 nt, Artificial Sequence
  Description of Artificial Sequence: Synthetic oligonucleotide
  Antisense strand to SEQ ID NO: 1992902
ucuaaagauacucagaaag

SEQ ID NO: 1992904 - RNA, 19 nt, Artificial Sequence
  Description of Artificial Sequence: Synthetic oligonucleotide
  Sense strand starting at position 3337 of SEQ ID NO: 1880774
uucugaguaucuuuagauc

SEQ ID NO: 1992905 - RNA, 19 nt, Artificial Sequence
  Description of Artificial Sequence: Synthetic oligonucleotide
  Antisense strand to SEQ ID NO: 1992904
gaucuaaagauacucagaa

SEQ ID NO: 1992906 - RNA, 19 nt, Artificial Sequence
  Description of Artificial Sequence: Synthetic oligonucleotide
  Sense strand starting at position 3517 of SEQ ID NO: 1880774
ugaugucauacuggaaagu

SEQ ID NO: 1992907 - RNA, 19 nt, Artificial Sequence
  Description of Artificial Sequence: Synthetic oligonucleotide
  Antisense strand to SEQ ID NO: 1992906
acuuuccaguaugacauca

SEQ ID NO: 1992908 - RNA, 19 nt, Artificial Sequence
  Description of Artificial Sequence: Synthetic oligonucleotide
  Sense strand starting at position 3839 of SEQ ID NO: 1880774
aagaguuacggccaagagu

SEQ ID NO: 1992909 - RNA, 19 nt, Artificial Sequence
  Description of Artificial Sequence: Synthetic oligonucleotide
  Antisense strand to SEQ ID NO: 1992908
acucuuggccguaacucuu

SEQ ID NO: 1992910 - RNA, 19 nt, Artificial Sequence
  Description of Artificial Sequence: Synthetic oligonucleotide
  Sense strand starting at position 3850 of SEQ ID NO: 1880774
ccaagaguuugggcaaaga

SEQ ID NO: 1992911 - RNA, 19 nt, Artificial Sequence
  Description of Artificial Sequence: Synthetic oligonucleotide
  Antisense strand to SEQ ID NO: 1992910
ucuuugcccaaacucuugg

SEQ ID NO: 1992912 - RNA, 19 nt, Artificial Sequence
  Description of Artificial Sequence: Synthetic oligonucleotide
  Sense strand starting at position 3930 of SEQ ID NO: 1880774
ggcuaauuauaugaacauu

SEQ ID NO: 1992913 - RNA, 19 nt, Artificial Sequence
  Description of Artificial Sequence: Synthetic oligonucleotide
  Antisense strand to SEQ ID NO: 1992912
aauguucauauaauuagcc

SEQ ID NO: 1992914 - RNA, 19 nt, Artificial Sequence
  Description of Artificial Sequence: Synthetic oligonucleotide
  Sense strand starting at position 66 of SEQ ID NO: 1880775
uuuggaugaagguauugua

SEQ ID NO: 1992915 - RNA, 19 nt, Artificial Sequence
  Description of Artificial Sequence: Synthetic oligonucleotide
  Antisense strand to SEQ ID NO: 1992914
uacaauaccuucauccaaa

SEQ ID NO: 1992916 - RNA, 19 nt, Artificial Sequence
  Description of Artificial Sequence: Synthetic oligonucleotide
  Sense strand starting at position 75 of SEQ ID NO: 1880775
agguauuguagaugccuuu

SEQ ID NO: 1992917 - RNA, 19 nt, Artificial Sequence
  Description of Artificial Sequence: Synthetic oligonucleotide
  Antisense strand to SEQ ID NO: 1992916
aaaggcaucuacaauaccu

SEQ ID NO: 1992918 - RNA, 19 nt, Artificial Sequence
  Description of Artificial Sequence: Synthetic oligonucleotide
  Sense strand starting at position 82 of SEQ ID NO: 1880775
guagaugccuuucugccaa

SEQ ID NO: 1992919 - RNA, 19 nt, Artificial Sequence
  Description of Artificial Sequence: Synthetic oligonucleotide
  Antisense strand to SEQ ID NO: 1992918
uuggcagaaaggcaucuac

SEQ ID NO: 1992920 - RNA, 19 nt, Artificial Sequence
  Description of Artificial Sequence: Synthetic oligonucleotide
  Sense strand starting at position 430 of SEQ ID NO: 1880775
cucacugacucagaauaga

SEQ ID NO: 1992921 - RNA, 19 nt, Artificial Sequence
  Description of Artificial Sequence: Synthetic oligonucleotide
  Antisense strand to SEQ ID NO: 1992920
ucuauucugagucagugag

SEQ ID NO: 1992922 - RNA, 19 nt, Artificial Sequence
  Description of Artificial Sequence: Synthetic oligonucleotide
  Sense strand starting at position 826 of SEQ ID NO: 1880775
acugcaaaggucuguuaca

SEQ ID NO: 1992923 - RNA, 19 nt, Artificial Sequence
  Description of Artificial Sequence: Synthetic oligonucleotide
  Antisense strand to SEQ ID NO: 1992922
uguaacagaccuuugcagu

SEQ ID NO: 1992924 - RNA, 19 nt, Artificial Sequence
  Description of Artificial Sequence: Synthetic oligonucleotide
  Sense strand starting at position 827 of SEQ ID NO: 1880775
cugcaaaggucuguuacau

SEQ ID NO: 1992925 - RNA, 19 nt, Artificial Sequence
  Description of Artificial Sequence: Synthetic oligonucleotide
  Antisense strand to SEQ ID NO: 1992924
auguaacagaccuuugcag

SEQ ID NO: 1992926 - RNA, 19 nt, Artificial Sequence
  Description of Artificial Sequence: Synthetic oligonucleotide
  Sense strand starting at position 2268 of SEQ ID NO: 1880775
gcagcaguucuguucgguu

SEQ ID NO: 1992927 - RNA, 19 nt, Artificial Sequence
  Description of Artificial Sequence: Synthetic oligonucleotide
  Antisense strand to SEQ ID NO: 1992926
aaccgaacagaacugcugc

SEQ ID NO: 1992928 - RNA, 19 nt, Artificial Sequence
  Description of Artificial Sequence: Synthetic oligonucleotide
  Sense strand starting at position 2398 of SEQ ID NO: 1880775
cgaggaacgguagaguuua

SEQ ID NO: 1992929 - RNA, 19 nt, Artificial Sequence
  Description of Artificial Sequence: Synthetic oligonucleotide
  Antisense strand to SEQ ID NO: 1992928
uaaacucuaccguuccucg

SEQ ID NO: 1992930 - RNA, 19 nt, Artificial Sequence
  Description of Artificial Sequence: Synthetic oligonucleotide
  Sense strand starting at position 2410 of SEQ ID NO: 1880775
gaguuuagaaccugugagu

SEQ ID NO: 1992931 - RNA, 19 nt, Artificial Sequence
  Description of Artificial Sequence: Synthetic oligonucleotide
  Antisense strand to SEQ ID NO: 1992930
acucacagguucuaaacuc

SEQ ID NO: 1992932 - RNA, 19 nt, Artificial Sequence
  Description of Artificial Sequence: Synthetic oligonucleotide
  Sense strand starting at position 2416 of SEQ ID NO: 1880775
agaaccugugaguacguua

SEQ ID NO: 1992933 - RNA, 19 nt, Artificial Sequence
  Description of Artificial Sequence: Synthetic oligonucleotide
  Antisense strand to SEQ ID NO: 1992932
uaacguacucacagguucu

SEQ ID NO: 1992934 - RNA, 19 nt, Artificial Sequence
  Description of Artificial Sequence: Synthetic oligonucleotide
  Sense strand starting at position 2419 of SEQ ID NO: 1880775
accugugaguacguuagaa

SEQ ID NO: 1992935 - RNA, 19 nt, Artificial Sequence
  Description of Artificial Sequence: Synthetic oligonucleotide
  Antisense strand to SEQ ID NO: 1992934
uucuaacguacucacaggu

SEQ ID NO: 1992936 - RNA, 19 nt, Artificial Sequence
  Description of Artificial Sequence: Synthetic oligonucleotide
  Sense strand starting at position 2421 of SEQ ID NO: 1880775
cugugaguacguuagaaag

SEQ ID NO: 1992937 - RNA, 19 nt, Artificial Sequence
  Description of Artificial Sequence: Synthetic oligonucleotide
  Antisense strand to SEQ ID NO: 1992936
cuuucuaacguacucacag

SEQ ID NO: 1992938 - RNA, 19 nt, Artificial Sequence
  Description of Artificial Sequence: Synthetic oligonucleotide
  Sense strand starting at position 2436 of SEQ ID NO: 1880775
aaaguucgcagucgaggaa

SEQ ID NO: 1992939 - RNA, 19 nt, Artificial Sequence
  Description of Artificial Sequence: Synthetic oligonucleotide
  Antisense strand to SEQ ID NO: 1992938
uuccucgacugcgaacuuu

SEQ ID NO: 1992940 - RNA, 19 nt, Artificial Sequence
  Description of Artificial Sequence: Synthetic oligonucleotide
  Sense strand starting at position 2610 of SEQ ID NO: 1880775
ccagaaagaugagguaauu

SEQ ID NO: 1992941 - RNA, 19 nt, Artificial Sequence
  Description of Artificial Sequence: Synthetic oligonucleotide
  Antisense strand to SEQ ID NO: 1992940
aauuaccucaucuuucugg

SEQ ID NO: 1992942 - RNA, 19 nt, Artificial Sequence
  Description of Artificial Sequence: Synthetic oligonucleotide
  Sense strand starting at position 2686 of SEQ ID NO: 1880775
gugggcuuccacuguguaa

SEQ ID NO: 1992943 - RNA, 19 nt, Artificial Sequence
  Description of Artificial Sequence: Synthetic oligonucleotide
  Antisense strand to SEQ ID NO: 1992942
uuacacaguggaagcccac

SEQ ID NO: 1992944 - RNA, 19 nt, Artificial Sequence
  Description of Artificial Sequence: Synthetic oligonucleotide
  Sense strand starting at position 2688 of SEQ ID NO: 1880775
gggcuuccacuguguaaug

SEQ ID NO: 1992945 - RNA, 19 nt, Artificial Sequence
  Description of Artificial Sequence: Synthetic oligonucleotide
  Antisense strand to SEQ ID NO: 1992944
cauuacacaguggaagccc

SEQ ID NO: 1992946 - RNA, 19 nt, Artificial Sequence
  Description of Artificial Sequence: Synthetic oligonucleotide
  Sense strand starting at position 2699 of SEQ ID NO: 1880775
guguaaugcuaagcagaua

SEQ ID NO: 1992947 - RNA, 19 nt, Artificial Sequence
  Description of Artificial Sequence: Synthetic oligonucleotide
  Antisense strand to SEQ ID NO: 1992946
uaucugcuuagcauuacac

SEQ ID NO: 1992948 - RNA, 19 nt, Artificial Sequence
  Description of Artificial Sequence: Synthetic oligonucleotide
  Sense strand starting at position 2711 of SEQ ID NO: 1880775
gcagauaggacguaaauuc

SEQ ID NO: 1992949 - RNA, 19 nt, Artificial Sequence
  Description of Artificial Sequence: Synthetic oligonucleotide
  Antisense strand to SEQ ID NO: 1992948
gaauuuacguccuaucugc

SEQ ID NO: 1992950 - RNA, 19 nt, Artificial Sequence
  Description of Artificial Sequence: Synthetic oligonucleotide
  Sense strand starting at position 2718 of SEQ ID NO: 1880775
ggacguaaauuccuuugca

SEQ ID NO: 1992951 - RNA, 19 nt, Artificial Sequence
  Description of Artificial Sequence: Synthetic oligonucleotide
  Antisense strand to SEQ ID NO: 1992950
ugcaaaggaauuuacgucc

SEQ ID NO: 1992952 - RNA, 19 nt, Artificial Sequence
  Description of Artificial Sequence: Synthetic oligonucleotide
  Sense strand starting at position 2719 of SEQ ID NO: 1880775
gacguaaauuccuuugcag

SEQ ID NO: 1992953 - RNA, 19 nt, Artificial Sequence
  Description of Artificial Sequence: Synthetic oligonucleotide
  Antisense strand to SEQ ID NO: 1992952
cugcaaaggaauuuacguc

SEQ ID NO: 1992954 - RNA, 19 nt, Artificial Sequence
  Description of Artificial Sequence: Synthetic oligonucleotide
  Sense strand starting at position 2721 of SEQ ID NO: 1880775
cguaaauuccuuugcagac

SEQ ID NO: 1992955 - RNA, 19 nt, Artificial Sequence
  Description of Artificial Sequence: Synthetic oligonucleotide
  Antisense strand to SEQ ID NO: 1992954
gucugcaaaggaauuuacg

SEQ ID NO: 1992956 - RNA, 19 nt, Artificial Sequence
  Description of Artificial Sequence: Synthetic oligonucleotide
  Sense strand starting at position 2722 of SEQ ID NO: 1880775
guaaauuccuuugcagacu

SEQ ID NO: 1992957 - RNA, 19 nt, Artificial Sequence
  Description of Artificial Sequence: Synthetic oligonucleotide
  Antisense strand to SEQ ID NO: 1992956
agucugcaaaggaauuuac

SEQ ID NO: 1992958 - RNA, 19 nt, Artificial Sequence
  Description of Artificial Sequence: Synthetic oligonucleotide
  Sense strand starting at position 2925 of SEQ ID NO: 1880775
gagcaugugcuuuagagac

SEQ ID NO: 1992959 - RNA, 19 nt, Artificial Sequence
  Description of Artificial Sequence: Synthetic oligonucleotide
  Antisense strand to SEQ ID NO: 1992958
gucucuaaagcacaugcuc

SEQ ID NO: 1992960 - RNA, 19 nt, Artificial Sequence
  Description of Artificial Sequence: Synthetic oligonucleotide
  Sense strand starting at position 2959 of SEQ ID NO: 1880775
cuauuuacuugugagagcu

SEQ ID NO: 1992961 - RNA, 19 nt, Artificial Sequence
  Description of Artificial Sequence: Synthetic oligonucleotide
  Antisense strand to SEQ ID NO: 1992960
agcucucacaaguaaauag

SEQ ID NO: 1992962 - RNA, 19 nt, Artificial Sequence
  Description of Artificial Sequence: Synthetic oligonucleotide
  Sense strand starting at position 2961 of SEQ ID NO: 1880775
auuuacuugugagagcuuu

SEQ ID NO: 1992963 - RNA, 19 nt, Artificial Sequence
  Description of Artificial Sequence: Synthetic oligonucleotide
  Antisense strand to SEQ ID NO: 1992962
aaagcucucacaaguaaau

SEQ ID NO: 1992964 - RNA, 19 nt, Artificial Sequence
  Description of Artificial Sequence: Synthetic oligonucleotide
  Sense strand starting at position 2967 of SEQ ID NO: 1880775
uugugagagcuuuagguca

SEQ ID NO: 1992965 - RNA, 19 nt, Artificial Sequence
  Description of Artificial Sequence: Synthetic oligonucleotide
  Antisense strand to SEQ ID NO: 1992964
ugaccuaaagcucucacaa

SEQ ID NO: 1992966 - RNA, 19 nt, Artificial Sequence
  Description of Artificial Sequence: Synthetic oligonucleotide
  Sense strand starting at position 3032 of SEQ ID NO: 1880775
ugccuagcagaagauugau

SEQ ID NO: 1992967 - RNA, 19 nt, Artificial Sequence
  Description of Artificial Sequence: Synthetic oligonucleotide
  Antisense strand to SEQ ID NO: 1992966
aucaaucuucugcuaggca

SEQ ID NO: 1992968 - RNA, 19 nt, Artificial Sequence
  Description of Artificial Sequence: Synthetic oligonucleotide
  Sense strand starting at position 3035 of SEQ ID NO: 1880775
cuagcagaagauugauuaa

SEQ ID NO: 1992969 - RNA, 19 nt, Artificial Sequence
  Description of Artificial Sequence: Synthetic oligonucleotide
  Antisense strand to SEQ ID NO: 1992968
uuaaucaaucuucugcuag

SEQ ID NO: 1992970 - RNA, 19 nt, Artificial Sequence
  Description of Artificial Sequence: Synthetic oligonucleotide
  Sense strand starting at position 3070 of SEQ ID NO: 1880775
ccaacuagugccuagcaaa

SEQ ID NO: 1992971 - RNA, 19 nt, Artificial Sequence
  Description of Artificial Sequence: Synthetic oligonucleotide
  Antisense strand to SEQ ID NO: 1992970
uuugcuaggcacuaguugg

SEQ ID NO: 1992972 - RNA, 19 nt, Artificial Sequence
  Description of Artificial Sequence: Synthetic oligonucleotide
  Sense strand starting at position 3241 of SEQ ID NO: 1880775
uuaacuuccagugguguca

SEQ ID NO: 1992973 - RNA, 19 nt, Artificial Sequence
  Description of Artificial Sequence: Synthetic oligonucleotide
  Antisense strand to SEQ ID NO: 1992972
ugacaccacuggaaguuaa

SEQ ID NO: 1992974 - RNA, 19 nt, Artificial Sequence
  Description of Artificial Sequence: Synthetic oligonucleotide
  Sense strand starting at position 3328 of SEQ ID NO: 1880775
ucuaguuaauucuugguga

SEQ ID NO: 1992975 - RNA, 19 nt, Artificial Sequence
  Description of Artificial Sequence: Synthetic oligonucleotide
  Antisense strand to SEQ ID NO: 1992974
ucaccaagaauuaacuaga

SEQ ID NO: 1992976 - RNA, 19 nt, Artificial Sequence
  Description of Artificial Sequence: Synthetic oligonucleotide
  Sense strand starting at position 3330 of SEQ ID NO: 1880775
uaguuaauucuuggugaug

SEQ ID NO: 1992977 - RNA, 19 nt, Artificial Sequence
  Description of Artificial Sequence: Synthetic oligonucleotide
  Antisense strand to SEQ ID NO: 1992976
caucaccaagaauuaacua

SEQ ID NO: 1992978 - RNA, 19 nt, Artificial Sequence
  Description of Artificial Sequence: Synthetic oligonucleotide
  Sense strand starting at position 3331 of SEQ ID NO: 1880775
aguuaauucuuggugauga

SEQ ID NO: 1992979 - RNA, 19 nt, Artificial Sequence
  Description of Artificial Sequence: Synthetic oligonucleotide
  Antisense strand to SEQ ID NO: 1992978
ucaucaccaagaauuaacu

SEQ ID NO: 1992980 - RNA, 19 nt, Artificial Sequence
  Description of Artificial Sequence: Synthetic oligonucleotide
  Sense strand starting at position 3341 of SEQ ID NO: 1880775
uggugaugauaacagaaau

SEQ ID NO: 1992981 - RNA, 19 nt, Artificial Sequence
  Description of Artificial Sequence: Synthetic oligonucleotide
  Antisense strand to SEQ ID NO: 1992980
auuucuguuaucaucacca

SEQ ID NO: 1992982 - RNA, 19 nt, Artificial Sequence
  Description of Artificial Sequence: Synthetic oligonucleotide
  Sense strand starting at position 3399 of SEQ ID NO: 1880775
cuuucugaguaucuuuaga

SEQ ID NO: 1992983 - RNA, 19 nt, Artificial Sequence
  Description of Artificial Sequence: Synthetic oligonucleotide
  Antisense strand to SEQ ID NO: 1992982
ucuaaagauacucagaaag

SEQ ID NO: 1992984 - RNA, 19 nt, Artificial Sequence
  Description of Artificial Sequence: Synthetic oligonucleotide
  Sense strand starting at position 3401 of SEQ ID NO: 1880775
uucugaguaucuuuagauc

SEQ ID NO: 1992985 - RNA, 19 nt, Artificial Sequence
  Description of Artificial Sequence: Synthetic oligonucleotide
  Antisense strand to SEQ ID NO: 1992984
gaucuaaagauacucagaa

SEQ ID NO: 1992986 - RNA, 19 nt, Artificial Sequence
  Description of Artificial Sequence: Synthetic oligonucleotide
  Sense strand starting at position 3404 of SEQ ID NO: 1880775
ugaguaucuuuagaucaac

SEQ ID NO: 1992987 - RNA, 19 nt, Artificial Sequence
  Description of Artificial Sequence: Synthetic oligonucleotide
  Antisense strand to SEQ ID NO: 1992986
guugaucuaaagauacuca

SEQ ID NO: 1992988 - RNA, 19 nt, Artificial Sequence
  Description of Artificial Sequence: Synthetic oligonucleotide
  Sense strand starting at position 3581 of SEQ ID NO: 1880775
ugaugucauacuggaaagu

SEQ ID NO: 1992989 - RNA, 19 nt, Artificial Sequence
  Description of Artificial Sequence: Synthetic oligonucleotide
  Antisense strand to SEQ ID NO: 1992988
acuuuccaguaugacauca

SEQ ID NO: 1992990 - RNA, 19 nt, Artificial Sequence
  Description of Artificial Sequence: Synthetic oligonucleotide
  Sense strand starting at position 3903 of SEQ ID NO: 1880775
aagaguuacggccaagagu

SEQ ID NO: 1992991 - RNA, 19 nt, Artificial Sequence
  Description of Artificial Sequence: Synthetic oligonucleotide
  Antisense strand to SEQ ID NO: 1992990
acucuuggccguaacucuu

SEQ ID NO: 1992992 - RNA, 19 nt, Artificial Sequence
  Description of Artificial Sequence: Synthetic oligonucleotide
  Sense strand starting at position 3914 of SEQ ID NO: 1880775
ccaagaguuugggcaaaga

SEQ ID NO: 1992993 - RNA, 19 nt, Artificial Sequence
  Description of Artificial Sequence: Synthetic oligonucleotide
  Antisense strand to SEQ ID NO: 1992992
ucuuugcccaaacucuugg

SEQ ID NO: 1992994 - RNA, 19 nt, Artificial Sequence
  Description of Artificial Sequence: Synthetic oligonucleotide
  Sense strand starting at position 32 of SEQ ID NO: 1880776
acagauacguaauugcuau

SEQ ID NO: 1992995 - RNA, 19 nt, Artificial Sequence
  Description of Artificial Sequence: Synthetic oligonucleotide
  Antisense strand to SEQ ID NO: 1992994
auagcaauuacguaucugu

SEQ ID NO: 1992996 - RNA, 19 nt, Artificial Sequence
  Description of Artificial Sequence: Synthetic oligonucleotide
  Sense strand starting at position 220 of SEQ ID NO: 1880776
acaugaauugauuguugga

SEQ ID NO: 1992997 - RNA, 19 nt, Artificial Sequence
  Description of Artificial Sequence: Synthetic oligonucleotide
  Antisense strand to SEQ ID NO: 1992996
uccaacaaucaauucaugu

SEQ ID NO: 1992998 - RNA, 19 nt, Artificial Sequence
  Description of Artificial Sequence: Synthetic oligonucleotide
  Sense strand starting at position 222 of SEQ ID NO: 1880776
augaauugauuguuggauu

SEQ ID NO: 1992999 - RNA, 19 nt, Artificial Sequence
  Description of Artificial Sequence: Synthetic oligonucleotide
  Antisense strand to SEQ ID NO: 1992998
aauccaacaaucaauucau

SEQ ID NO: 1993000 - RNA, 19 nt, Artificial Sequence
  Description of Artificial Sequence: Synthetic oligonucleotide
  Sense strand starting at position 285 of SEQ ID NO: 1880776
ucagaugucugcccuccaa

SEQ ID NO: 1993001 - RNA, 19 nt, Artificial Sequence
  Description of Artificial Sequence: Synthetic oligonucleotide
  Antisense strand to SEQ ID NO: 1993000
uuggagggcagacaucuga

SEQ ID NO: 1993002 - RNA, 19 nt, Artificial Sequence
  Description of Artificial Sequence: Synthetic oligonucleotide
  Sense strand starting at position 423 of SEQ ID NO: 1880776
uaaguuaauucugugguua

SEQ ID NO: 1993003 - RNA, 19 nt, Artificial Sequence
  Description of Artificial Sequence: Synthetic oligonucleotide
  Antisense strand to SEQ ID NO: 1993002
uaaccacagaauuaacuua

SEQ ID NO: 1993004 - RNA, 19 nt, Artificial Sequence
  Description of Artificial Sequence: Synthetic oligonucleotide
  Sense strand starting at position 424 of SEQ ID NO: 1880776
aaguuaauucugugguuac

SEQ ID NO: 1993005 - RNA, 19 nt, Artificial Sequence
  Description of Artificial Sequence: Synthetic oligonucleotide
  Antisense strand to SEQ ID NO: 1993004
guaaccacagaauuaacuu

SEQ ID NO: 1993006 - RNA, 19 nt, Artificial Sequence
  Description of Artificial Sequence: Synthetic oligonucleotide
  Sense strand starting at position 449 of SEQ ID NO: 1880776
ggaaucaauuuaugguaag

SEQ ID NO: 1993007 - RNA, 19 nt, Artificial Sequence
  Description of Artificial Sequence: Synthetic oligonucleotide
  Antisense strand to SEQ ID NO: 1993006
cuuaccauaaauugauucc

SEQ ID NO: 1993008 - RNA, 19 nt, Artificial Sequence
  Description of Artificial Sequence: Synthetic oligonucleotide
  Sense strand starting at position 452 of SEQ ID NO: 1880776
aucaauuuaugguaagcau

SEQ ID NO: 1993009 - RNA, 19 nt, Artificial Sequence
  Description of Artificial Sequence: Synthetic oligonucleotide
  Antisense strand to SEQ ID NO: 1993008
augcuuaccauaaauugau

SEQ ID NO: 1993010 - RNA, 19 nt, Artificial Sequence
  Description of Artificial Sequence: Synthetic oligonucleotide
  Sense strand starting at position 485 of SEQ ID NO: 1880776
gcaauuaaccaaugagugu

SEQ ID NO: 1993011 - RNA, 19 nt, Artificial Sequence
  Description of Artificial Sequence: Synthetic oligonucleotide
  Antisense strand to SEQ ID NO: 1993010
acacucauugguuaauugc

SEQ ID NO: 1993012 - RNA, 19 nt, Artificial Sequence
  Description of Artificial Sequence: Synthetic oligonucleotide
  Sense strand starting at position 499 of SEQ ID NO: 1880776
aguguuaaggaguggaaac

SEQ ID NO: 1993013 - RNA, 19 nt, Artificial Sequence
  Description of Artificial Sequence: Synthetic oligonucleotide
  Antisense strand to SEQ ID NO: 1993012
guuuccacuccuuaacacu

SEQ ID NO: 1993014 - RNA, 19 nt, Artificial Sequence
  Description of Artificial Sequence: Synthetic oligonucleotide
  Sense strand starting at position 510 of SEQ ID NO: 1880776
guggaaacuuaucuaacca

SEQ ID NO: 1993015 - RNA, 19 nt, Artificial Sequence
  Description of Artificial Sequence: Synthetic oligonucleotide
  Antisense strand to SEQ ID NO: 1993014
ugguuagauaaguuuccac

SEQ ID NO: 1993016 - RNA, 19 nt, Artificial Sequence
  Description of Artificial Sequence: Synthetic oligonucleotide
  Sense strand starting at position 606 of SEQ ID NO: 1880776
acaguaauauaugcagauc

SEQ ID NO: 1993017 - RNA, 19 nt, Artificial Sequence
  Description of Artificial Sequence: Synthetic oligonucleotide
  Antisense strand to SEQ ID NO: 1993016
gaucugcauauauuacugu

SEQ ID NO: 1993018 - RNA, 19 nt, Artificial Sequence
  Description of Artificial Sequence: Synthetic oligonucleotide
  Sense strand starting at position 609 of SEQ ID NO: 1880776
guaauauaugcagaucucu

SEQ ID NO: 1993019 - RNA, 19 nt, Artificial Sequence
  Description of Artificial Sequence: Synthetic oligonucleotide
  Antisense strand to SEQ ID NO: 1993018
agagaucugcauauauuac

SEQ ID NO: 1993020 - RNA, 19 nt, Artificial Sequence
  Description of Artificial Sequence: Synthetic oligonucleotide
  Sense strand starting at position 724 of SEQ ID NO: 1880776
ucguuucuccagcaaagaa

SEQ ID NO: 1993021 - RNA, 19 nt, Artificial Sequence
  Description of Artificial Sequence: Synthetic oligonucleotide
  Antisense strand to SEQ ID NO: 1993020
uucuuugcuggagaaacga

SEQ ID NO: 1993022 - RNA, 19 nt, Artificial Sequence
  Description of Artificial Sequence: Synthetic oligonucleotide
  Sense strand starting at position 1098 of SEQ ID NO: 1880776
ugcucacaucgcuaacuau

SEQ ID NO: 1993023 - RNA, 19 nt, Artificial Sequence
  Description of Artificial Sequence: Synthetic oligonucleotide
  Antisense strand to SEQ ID NO: 1993022
auaguuagcgaugugagca

SEQ ID NO: 1993024 - RNA, 19 nt, Artificial Sequence
  Description of Artificial Sequence: Synthetic oligonucleotide
  Sense strand starting at position 1867 of SEQ ID NO: 1880776
gguguugaccaacaaguca

SEQ ID NO: 1993025 - RNA, 19 nt, Artificial Sequence
  Description of Artificial Sequence: Synthetic oligonucleotide
  Antisense strand to SEQ ID NO: 1993024
ugacuuguuggucaacacc

SEQ ID NO: 1993026 - RNA, 19 nt, Artificial Sequence
  Description of Artificial Sequence: Synthetic oligonucleotide
  Sense strand starting at position 1979 of SEQ ID NO: 1880776
ggaggagugucucuacgga

SEQ ID NO: 1993027 - RNA, 19 nt, Artificial Sequence
  Description of Artificial Sequence: Synthetic oligonucleotide
  Antisense strand to SEQ ID NO: 1993026
uccguagagacacuccucc

SEQ ID NO: 1993028 - RNA, 19 nt, Artificial Sequence
  Description of Artificial Sequence: Synthetic oligonucleotide
  Sense strand starting at position 2048 of SEQ ID NO: 1880776
aaggaaaugcuagguuaac

SEQ ID NO: 1993029 - RNA, 19 nt, Artificial Sequence
  Description of Artificial Sequence: Synthetic oligonucleotide
  Antisense strand to SEQ ID NO: 1993028
guuaaccuagcauuuccuu

SEQ ID NO: 1993030 - RNA, 19 nt, Artificial Sequence
  Description of Artificial Sequence: Synthetic oligonucleotide
  Sense strand starting at position 2386 of SEQ ID NO: 1880776
gggauuuccuggaggacgu

SEQ ID NO: 1993031 - RNA, 19 nt, Artificial Sequence
  Description of Artificial Sequence: Synthetic oligonucleotide
  Antisense strand to SEQ ID NO: 1993030
acguccuccaggaaauccc

SEQ ID NO: 1993032 - RNA, 19 nt, Artificial Sequence
  Description of Artificial Sequence: Synthetic oligonucleotide
  Sense strand starting at position 2552 of SEQ ID NO: 1880776
uuucucagugugggaguaa

SEQ ID NO: 1993033 - RNA, 19 nt, Artificial Sequence
  Description of Artificial Sequence: Synthetic oligonucleotide
  Antisense strand to SEQ ID NO: 1993032
uuacucccacacugagaaa

SEQ ID NO: 1993034 - RNA, 19 nt, Artificial Sequence
  Description of Artificial Sequence: Synthetic oligonucleotide
  Sense strand starting at position 2623 of SEQ ID NO: 1880776
gaaaguucguugccaggga

SEQ ID NO: 1993035 - RNA, 19 nt, Artificial Sequence
  Description of Artificial Sequence: Synthetic oligonucleotide
  Antisense strand to SEQ ID NO: 1993034
ucccuggcaacgaacuuuc

SEQ ID NO: 1993036 - RNA, 19 nt, Artificial Sequence
  Description of Artificial Sequence: Synthetic oligonucleotide
  Sense strand starting at position 2665 of SEQ ID NO: 1880776
aggagcucauugcuaggaa

SEQ ID NO: 1993037 - RNA, 19 nt, Artificial Sequence
  Description of Artificial Sequence: Synthetic oligonucleotide
  Antisense strand to SEQ ID NO: 1993036
uuccuagcaaugagcuccu

SEQ ID NO: 1993038 - RNA, 19 nt, Artificial Sequence
  Description of Artificial Sequence: Synthetic oligonucleotide
  Sense strand starting at position 2668 of SEQ ID NO: 1880776
agcucauugcuaggaaaca

SEQ ID NO: 1993039 - RNA, 19 nt, Artificial Sequence
  Description of Artificial Sequence: Synthetic oligonucleotide
  Antisense strand to SEQ ID NO: 1993038
uguuuccuagcaaugagcu

SEQ ID NO: 1993040 - RNA, 19 nt, Artificial Sequence
  Description of Artificial Sequence: Synthetic oligonucleotide
  Sense strand starting at position 2683 of SEQ ID NO: 1880776
aacaaaggcuuguugagaa

SEQ ID NO: 1993041 - RNA, 19 nt, Artificial Sequence
  Description of Artificial Sequence: Synthetic oligonucleotide
  Antisense strand to SEQ ID NO: 1993040
uucucaacaagccuuuguu

SEQ ID NO: 1993042 - RNA, 19 nt, Artificial Sequence
  Description of Artificial Sequence: Synthetic oligonucleotide
  Sense strand starting at position 2712 of SEQ ID NO: 1880776
uggaacuuggagugauuga

SEQ ID NO: 1993043 - RNA, 19 nt, Artificial Sequence
  Description of Artificial Sequence: Synthetic oligonucleotide
  Antisense strand to SEQ ID NO: 1993042
ucaaucacuccaaguucca

SEQ ID NO: 1993044 - RNA, 19 nt, Artificial Sequence
  Description of Artificial Sequence: Synthetic oligonucleotide
  Sense strand starting at position 2736 of SEQ ID NO: 1880776
ccagguagcagggaguuaa

SEQ ID NO: 1993045 - RNA, 19 nt, Artificial Sequence
  Description of Artificial Sequence: Synthetic oligonucleotide
  Antisense strand to SEQ ID NO: 1993044
uuaacucccugcuaccugg

SEQ ID NO: 1993046 - RNA, 19 nt, Artificial Sequence
  Description of Artificial Sequence: Synthetic oligonucleotide
  Sense strand starting at position 2843 of SEQ ID NO: 1880776
ggaaguuugugaguuaagu

SEQ ID NO: 1993047 - RNA, 19 nt, Artificial Sequence
  Description of Artificial Sequence: Synthetic oligonucleotide
  Antisense strand to SEQ ID NO: 1993046
acuuaacucacaaacuucc

SEQ ID NO: 1993048 - RNA, 19 nt, Artificial Sequence
  Description of Artificial Sequence: Synthetic oligonucleotide
  Sense strand starting at position 2861 of SEQ ID NO: 1880776
uacguuaucuggguagaag

SEQ ID NO: 1993049 - RNA, 19 nt, Artificial Sequence
  Description of Artificial Sequence: Synthetic oligonucleotide
  Antisense strand to SEQ ID NO: 1993048
cuucuacccagauaacgua

SEQ ID NO: 1993050 - RNA, 19 nt, Artificial Sequence
  Description of Artificial Sequence: Synthetic oligonucleotide
  Sense strand starting at position 2862 of SEQ ID NO: 1880776
acguuaucuggguagaagg

SEQ ID NO: 1993051 - RNA, 19 nt, Artificial Sequence
  Description of Artificial Sequence: Synthetic oligonucleotide
  Antisense strand to SEQ ID NO: 1993050
ccuucuacccagauaacgu

SEQ ID NO: 1993052 - RNA, 19 nt, Artificial Sequence
  Description of Artificial Sequence: Synthetic oligonucleotide
  Sense strand starting at position 2905 of SEQ ID NO: 1880776
aaaguagaccuauggcuua

SEQ ID NO: 1993053 - RNA, 19 nt, Artificial Sequence
  Description of Artificial Sequence: Synthetic oligonucleotide
  Antisense strand to SEQ ID NO: 1993052
uaagccauaggucuacuuu

SEQ ID NO: 1993054 - RNA, 19 nt, Artificial Sequence
  Description of Artificial Sequence: Synthetic oligonucleotide
  Sense strand starting at position 2965 of SEQ ID NO: 1880776
aagacagacguauagcuaa

SEQ ID NO: 1993055 - RNA, 19 nt, Artificial Sequence
  Description of Artificial Sequence: Synthetic oligonucleotide
  Antisense strand to SEQ ID NO: 1993054
uuagcuauacgucugucuu

SEQ ID NO: 1993056 - RNA, 19 nt, Artificial Sequence
  Description of Artificial Sequence: Synthetic oligonucleotide
  Sense strand starting at position 3094 of SEQ ID NO: 1880776
gggcaauaaaguugaaaua

SEQ ID NO: 1993057 - RNA, 19 nt, Artificial Sequence
  Description of Artificial Sequence: Synthetic oligonucleotide
  Antisense strand to SEQ ID NO: 1993056
uauuucaacuuuauugccc

SEQ ID NO: 1993058 - RNA, 19 nt, Artificial Sequence
  Description of Artificial Sequence: Synthetic oligonucleotide
  Sense strand starting at position 3181 of SEQ ID NO: 1880776
acaaauaccucuuugugga

SEQ ID NO: 1993059 - RNA, 19 nt, Artificial Sequence
  Description of Artificial Sequence: Synthetic oligonucleotide
  Antisense strand to SEQ ID NO: 1993058
uccacaaagagguauuugu

SEQ ID NO: 1993060 - RNA, 19 nt, Artificial Sequence
  Description of Artificial Sequence: Synthetic oligonucleotide
  Sense strand starting at position 3188 of SEQ ID NO: 1880776
ccucuuuguggacaguuau

SEQ ID NO: 1993061 - RNA, 19 nt, Artificial Sequence
  Description of Artificial Sequence: Synthetic oligonucleotide
  Antisense strand to SEQ ID NO: 1993060
auaacuguccacaaagagg

SEQ ID NO: 1993062 - RNA, 19 nt, Artificial Sequence
  Description of Artificial Sequence: Synthetic oligonucleotide
  Sense strand starting at position 3200 of SEQ ID NO: 1880776
caguuauaagcagagccua

SEQ ID NO: 1993063 - RNA, 19 nt, Artificial Sequence
  Description of Artificial Sequence: Synthetic oligonucleotide
  Antisense strand to SEQ ID NO: 1993062
uaggcucugcuuauaacug

SEQ ID NO: 1993064 - RNA, 19 nt, Artificial Sequence
  Description of Artificial Sequence: Synthetic oligonucleotide
  Sense strand starting at position 3286 of SEQ ID NO: 1880776
cugaauaucccuugagaua

SEQ ID NO: 1993065 - RNA, 19 nt, Artificial Sequence
  Description of Artificial Sequence: Synthetic oligonucleotide
  Antisense strand to SEQ ID NO: 1993064
uaucucaagggauauucag

SEQ ID NO: 1993066 - RNA, 19 nt, Artificial Sequence
  Description of Artificial Sequence: Synthetic oligonucleotide
  Sense strand starting at position 3489 of SEQ ID NO: 1880776
ggcucuauuucugaacaca

SEQ ID NO: 1993067 - RNA, 19 nt, Artificial Sequence
  Description of Artificial Sequence: Synthetic oligonucleotide
  Antisense strand to SEQ ID NO: 1993066
uguguucagaaauagagcc

SEQ ID NO: 1993068 - RNA, 19 nt, Artificial Sequence
  Description of Artificial Sequence: Synthetic oligonucleotide
  Sense strand starting at position 3562 of SEQ ID NO: 1880776
ggcuuucuaccagauguuu

SEQ ID NO: 1993069 - RNA, 19 nt, Artificial Sequence
  Description of Artificial Sequence: Synthetic oligonucleotide
  Antisense strand to SEQ ID NO: 1993068
aaacaucugguagaaagcc

SEQ ID NO: 1993070 - RNA, 19 nt, Artificial Sequence
  Description of Artificial Sequence: Synthetic oligonucleotide
  Sense strand starting at position 3570 of SEQ ID NO: 1880776
accagauguuuaccugguu

SEQ ID NO: 1993071 - RNA, 19 nt, Artificial Sequence
  Description of Artificial Sequence: Synthetic oligonucleotide
  Antisense strand to SEQ ID NO: 1993070
aaccagguaaacaucuggu

SEQ ID NO: 1993072 - RNA, 19 nt, Artificial Sequence
  Description of Artificial Sequence: Synthetic oligonucleotide
  Sense strand starting at position 3736 of SEQ ID NO: 1880776
cuuaaauggcuauacagua

SEQ ID NO: 1993073 - RNA, 19 nt, Artificial Sequence
  Description of Artificial Sequence: Synthetic oligonucleotide
  Antisense strand to SEQ ID NO: 1993072
uacuguauagccauuuaag

SEQ ID NO: 1993074 - RNA, 19 nt, Artificial Sequence
  Description of Artificial Sequence: Synthetic oligonucleotide
  Sense strand starting at position 76 of SEQ ID NO: 1880777
ugaggcccuaccugagaua

SEQ ID NO: 1993075 - RNA, 19 nt, Artificial Sequence
  Description of Artificial Sequence: Synthetic oligonucleotide
  Antisense strand to SEQ ID NO: 1993074
uaucucagguagggccuca

SEQ ID NO: 1993076 - RNA, 19 nt, Artificial Sequence
  Description of Artificial Sequence: Synthetic oligonucleotide
  Sense strand starting at position 259 of SEQ ID NO: 1880777
gcuaauauuucugauauug

SEQ ID NO: 1993077 - RNA, 19 nt, Artificial Sequence
  Description of Artificial Sequence: Synthetic oligonucleotide
  Antisense strand to SEQ ID NO: 1993076
caauaucagaaauauuagc

SEQ ID NO: 1993078 - RNA, 19 nt, Artificial Sequence
  Description of Artificial Sequence: Synthetic oligonucleotide
  Sense strand starting at position 264 of SEQ ID NO: 1880777
uauuucugauauugugaag

SEQ ID NO: 1993079 - RNA, 19 nt, Artificial Sequence
  Description of Artificial Sequence: Synthetic oligonucleotide
  Antisense strand to SEQ ID NO: 1993078
cuucacaauaucagaaaua

SEQ ID NO: 1993080 - RNA, 19 nt, Artificial Sequence
  Description of Artificial Sequence: Synthetic oligonucleotide
  Sense strand starting at position 267 of SEQ ID NO: 1880777
uucugauauugugaagaca

SEQ ID NO: 1993081 - RNA, 19 nt, Artificial Sequence
  Description of Artificial Sequence: Synthetic oligonucleotide
  Antisense strand to SEQ ID NO: 1993080
ugucuucacaauaucagaa

SEQ ID NO: 1993082 - RNA, 19 nt, Artificial Sequence
  Description of Artificial Sequence: Synthetic oligonucleotide
  Sense strand starting at position 278 of SEQ ID NO: 1880777
ugaagacaggucuagcuau

SEQ ID NO: 1993083 - RNA, 19 nt, Artificial Sequence
  Description of Artificial Sequence: Synthetic oligonucleotide
  Antisense strand to SEQ ID NO: 1993082
auagcuagaccugucuuca

SEQ ID NO: 1993084 - RNA, 19 nt, Artificial Sequence
  Description of Artificial Sequence: Synthetic oligonucleotide
  Sense strand starting at position 506 of SEQ ID NO: 1880777
aucagugacugcucggcua

SEQ ID NO: 1993085 - RNA, 19 nt, Artificial Sequence
  Description of Artificial Sequence: Synthetic oligonucleotide
  Antisense strand to SEQ ID NO: 1993084
uagccgagcagucacugau

SEQ ID NO: 1993086 - RNA, 19 nt, Artificial Sequence
  Description of Artificial Sequence: Synthetic oligonucleotide
  Sense strand starting at position 619 of SEQ ID NO: 1880777
acacucucaugagagguau

SEQ ID NO: 1993087 - RNA, 19 nt, Artificial Sequence
  Description of Artificial Sequence: Synthetic oligonucleotide
  Antisense strand to SEQ ID NO: 1993086
auaccucucaugagagugu

SEQ ID NO: 1993088 - RNA, 19 nt, Artificial Sequence
  Description of Artificial Sequence: Synthetic oligonucleotide
  Sense strand starting at position 623 of SEQ ID NO: 1880777
ucucaugagagguauguau

SEQ ID NO: 1993089 - RNA, 19 nt, Artificial Sequence
  Description of Artificial Sequence: Synthetic oligonucleotide
  Antisense strand to SEQ ID NO: 1993088
auacauaccucucaugaga

SEQ ID NO: 1993090 - RNA, 19 nt, Artificial Sequence
  Description of Artificial Sequence: Synthetic oligonucleotide
  Sense strand starting at position 627 of SEQ ID NO: 1880777
augagagguauguauggca

SEQ ID NO: 1993091 - RNA, 19 nt, Artificial Sequence
  Description of Artificial Sequence: Synthetic oligonucleotide
  Antisense strand to SEQ ID NO: 1993090
ugccauacauaccucucau

SEQ ID NO: 1993092 - RNA, 19 nt, Artificial Sequence
  Description of Artificial Sequence: Synthetic oligonucleotide
  Sense strand starting at position 639 of SEQ ID NO: 1880777
uauggcaucuuauuaggga

SEQ ID NO: 1993093 - RNA, 19 nt, Artificial Sequence
  Description of Artificial Sequence: Synthetic oligonucleotide
  Antisense strand to SEQ ID NO: 1993092
ucccuaauaagaugccaua

SEQ ID NO: 1993094 - RNA, 19 nt, Artificial Sequence
  Description of Artificial Sequence: Synthetic oligonucleotide
  Sense strand starting at position 640 of SEQ ID NO: 1880777
auggcaucuuauuagggaa

SEQ ID NO: 1993095 - RNA, 19 nt, Artificial Sequence
  Description of Artificial Sequence: Synthetic oligonucleotide
  Antisense strand to SEQ ID NO: 1993094
uucccuaauaagaugccau

SEQ ID NO: 1993096 - RNA, 19 nt, Artificial Sequence
  Description of Artificial Sequence: Synthetic oligonucleotide
  Sense strand starting at position 670 of SEQ ID NO: 1880777
gccucagacugucuggaaa

SEQ ID NO: 1993097 - RNA, 19 nt, Artificial Sequence
  Description of Artificial Sequence: Synthetic oligonucleotide
  Antisense strand to SEQ ID NO: 1993096
uuuccagacagucugaggc

SEQ ID NO: 1993098 - RNA, 19 nt, Artificial Sequence
  Description of Artificial Sequence: Synthetic oligonucleotide
  Sense strand starting at position 795 of SEQ ID NO: 1880777
ggucauucugaggagcuaa

SEQ ID NO: 1993099 - RNA, 19 nt, Artificial Sequence
  Description of Artificial Sequence: Synthetic oligonucleotide
  Antisense strand to SEQ ID NO: 1993098
uuagcuccucagaaugacc

SEQ ID NO: 1993100 - RNA, 19 nt, Artificial Sequence
  Description of Artificial Sequence: Synthetic oligonucleotide
  Sense strand starting at position 860 of SEQ ID NO: 1880777
cacacucuguguuuguuua

SEQ ID NO: 1993101 - RNA, 19 nt, Artificial Sequence
  Description of Artificial Sequence: Synthetic oligonucleotide
  Antisense strand to SEQ ID NO: 1993100
uaaacaaacacagagugug

SEQ ID NO: 1993102 - RNA, 19 nt, Artificial Sequence
  Description of Artificial Sequence: Synthetic oligonucleotide
  Sense strand starting at position 861 of SEQ ID NO: 1880777
acacucuguguuuguuuau

SEQ ID NO: 1993103 - RNA, 19 nt, Artificial Sequence
  Description of Artificial Sequence: Synthetic oligonucleotide
  Antisense strand to SEQ ID NO: 1993102
auaaacaaacacagagugu

SEQ ID NO: 1993104 - RNA, 19 nt, Artificial Sequence
  Description of Artificial Sequence: Synthetic oligonucleotide
  Sense strand starting at position 864 of SEQ ID NO: 1880777
cucuguguuuguuuauuga

SEQ ID NO: 1993105 - RNA, 19 nt, Artificial Sequence
  Description of Artificial Sequence: Synthetic oligonucleotide
  Antisense strand to SEQ ID NO: 1993104
ucaauaaacaaacacagag

SEQ ID NO: 1993106 - RNA, 19 nt, Artificial Sequence
  Description of Artificial Sequence: Synthetic oligonucleotide
  Sense strand starting at position 920 of SEQ ID NO: 1880777
auggcacuuuggcauuuaa

SEQ ID NO: 1993107 - RNA, 19 nt, Artificial Sequence
  Description of Artificial Sequence: Synthetic oligonucleotide
  Antisense strand to SEQ ID NO: 1993106
uuaaaugccaaagugccau

SEQ ID NO: 1993108 - RNA, 19 nt, Artificial Sequence
  Description of Artificial Sequence: Synthetic oligonucleotide
  Sense strand starting at position 1137 of SEQ ID NO: 1880777
ucaugaaaccaacgcauaa

SEQ ID NO: 1993109 - RNA, 19 nt, Artificial Sequence
  Description of Artificial Sequence: Synthetic oligonucleotide
  Antisense strand to SEQ ID NO: 1993108
uuaugcguugguuucauga

SEQ ID NO: 1993110 - RNA, 19 nt, Artificial Sequence
  Description of Artificial Sequence: Synthetic oligonucleotide
  Sense strand starting at position 1222 of SEQ ID NO: 1880777
gaaauaaauuugugugcuu

SEQ ID NO: 1993111 - RNA, 19 nt, Artificial Sequence
  Description of Artificial Sequence: Synthetic oligonucleotide
  Antisense strand to SEQ ID NO: 1993110
aagcacacaaauuuauuuc

SEQ ID NO: 1993112 - RNA, 19 nt, Artificial Sequence
  Description of Artificial Sequence: Synthetic oligonucleotide
  Sense strand starting at position 1503 of SEQ ID NO: 1880777
cuccaugaugcccaguuaa

SEQ ID NO: 1993113 - RNA, 19 nt, Artificial Sequence
  Description of Artificial Sequence: Synthetic oligonucleotide
  Antisense strand to SEQ ID NO: 1993112
uuaacugggcaucauggag

SEQ ID NO: 1993114 - RNA, 19 nt, Artificial Sequence
  Description of Artificial Sequence: Synthetic oligonucleotide
  Sense strand starting at position 1665 of SEQ ID NO: 1880777
guucuaaguccagaacuua

SEQ ID NO: 1993115 - RNA, 19 nt, Artificial Sequence
  Description of Artificial Sequence: Synthetic oligonucleotide
  Antisense strand to SEQ ID NO: 1993114
uaaguucuggacuuagaac

SEQ ID NO: 1993116 - RNA, 19 nt, Artificial Sequence
  Description of Artificial Sequence: Synthetic oligonucleotide
  Sense strand starting at position 1712 of SEQ ID NO: 1880777
aaagguccuguuuauugua

SEQ ID NO: 1993117 - RNA, 19 nt, Artificial Sequence
  Description of Artificial Sequence: Synthetic oligonucleotide
  Antisense strand to SEQ ID NO: 1993116
uacaauaaacaggaccuuu

SEQ ID NO: 1993118 - RNA, 19 nt, Artificial Sequence
  Description of Artificial Sequence: Synthetic oligonucleotide
  Sense strand starting at position 1714 of SEQ ID NO: 1880777
agguccuguuuauuguaau

SEQ ID NO: 1993119 - RNA, 19 nt, Artificial Sequence
  Description of Artificial Sequence: Synthetic oligonucleotide
  Antisense strand to SEQ ID NO: 1993118
auuacaauaaacaggaccu

SEQ ID NO: 1993120 - RNA, 19 nt, Artificial Sequence
  Description of Artificial Sequence: Synthetic oligonucleotide
  Sense strand starting at position 1814 of SEQ ID NO: 1880777
cugggauuggcccagguau

SEQ ID NO: 1993121 - RNA, 19 nt, Artificial Sequence
  Description of Artificial Sequence: Synthetic oligonucleotide
  Antisense strand to SEQ ID NO: 1993120
auaccugggccaaucccag

SEQ ID NO: 1993122 - RNA, 19 nt, Artificial Sequence
  Description of Artificial Sequence: Synthetic oligonucleotide
  Sense strand starting at position 1826 of SEQ ID NO: 1880777
cagguaucguggcuggaga

SEQ ID NO: 1993123 - RNA, 19 nt, Artificial Sequence
  Description of Artificial Sequence: Synthetic oligonucleotide
  Antisense strand to SEQ ID NO: 1993122
ucuccagccacgauaccug

SEQ ID NO: 1993124 - RNA, 19 nt, Artificial Sequence
  Description of Artificial Sequence: Synthetic oligonucleotide
  Sense strand starting at position 1914 of SEQ ID NO: 1880777
aggaauaucuccuccacug

SEQ ID NO: 1993125 - RNA, 19 nt, Artificial Sequence
  Description of Artificial Sequence: Synthetic oligonucleotide
  Antisense strand to SEQ ID NO: 1993124
caguggaggagauauuccu

SEQ ID NO: 1993126 - RNA, 19 nt, Artificial Sequence
  Description of Artificial Sequence: Synthetic oligonucleotide
  Sense strand starting at position 1950 of SEQ ID NO: 1880777
gcaggagauuuguagauag

SEQ ID NO: 1993127 - RNA, 19 nt, Artificial Sequence
  Description of Artificial Sequence: Synthetic oligonucleotide
  Antisense strand to SEQ ID NO: 1993126
cuaucuacaaaucuccugc

SEQ ID NO: 1993128 - RNA, 19 nt, Artificial Sequence
  Description of Artificial Sequence: Synthetic oligonucleotide
  Sense strand starting at position 2035 of SEQ ID NO: 1880777
gcaaaccuuugcucugaga

SEQ ID NO: 1993129 - RNA, 19 nt, Artificial Sequence
  Description of Artificial Sequence: Synthetic oligonucleotide
  Antisense strand to SEQ ID NO: 1993128
ucucagagcaaagguuugc

SEQ ID NO: 1993130 - RNA, 19 nt, Artificial Sequence
  Description of Artificial Sequence: Synthetic oligonucleotide
  Sense strand starting at position 2939 of SEQ ID NO: 1880777
gucccugaucucugucuca

SEQ ID NO: 1993131 - RNA, 19 nt, Artificial Sequence
  Description of Artificial Sequence: Synthetic oligonucleotide
  Antisense strand to SEQ ID NO: 1993130
ugagacagagaucagggac

SEQ ID NO: 1993132 - RNA, 19 nt, Artificial Sequence
  Description of Artificial Sequence: Synthetic oligonucleotide
  Sense strand starting at position 3012 of SEQ ID NO: 1880777
auaugcgcgccauggaaua

SEQ ID NO: 1993133 - RNA, 19 nt, Artificial Sequence
  Description of Artificial Sequence: Synthetic oligonucleotide
  Antisense strand to SEQ ID NO: 1993132
uauuccauggcgcgcauau

SEQ ID NO: 1993134 - RNA, 19 nt, Artificial Sequence
  Description of Artificial Sequence: Synthetic oligonucleotide
  Sense strand starting at position 3025 of SEQ ID NO: 1880777
ggaauacugugccaaugac

SEQ ID NO: 1993135 - RNA, 19 nt, Artificial Sequence
  Description of Artificial Sequence: Synthetic oligonucleotide
  Antisense strand to SEQ ID NO: 1993134
gucauuggcacaguauucc

SEQ ID NO: 1993136 - RNA, 19 nt, Artificial Sequence
  Description of Artificial Sequence: Synthetic oligonucleotide
  Sense strand starting at position 3085 of SEQ ID NO: 1880777
agccgugaggcugauguaa

SEQ ID NO: 1993137 - RNA, 19 nt, Artificial Sequence
  Description of Artificial Sequence: Synthetic oligonucleotide
  Antisense strand to SEQ ID NO: 1993136
uuacaucagccucacggcu

SEQ ID NO: 1993138 - RNA, 19 nt, Artificial Sequence
  Description of Artificial Sequence: Synthetic oligonucleotide
  Sense strand starting at position 3163 of SEQ ID NO: 1880777
cgugguguucgaagcagga

SEQ ID NO: 1993139 - RNA, 19 nt, Artificial Sequence
  Description of Artificial Sequence: Synthetic oligonucleotide
  Antisense strand to SEQ ID NO: 1993138
uccugcuucgaacaccacg

SEQ ID NO: 1993140 - RNA, 19 nt, Artificial Sequence
  Description of Artificial Sequence: Synthetic oligonucleotide
  Sense strand starting at position 3189 of SEQ ID NO: 1880777
gccuuugggagguagugau

SEQ ID NO: 1993141 - RNA, 19 nt, Artificial Sequence
  Description of Artificial Sequence: Synthetic oligonucleotide
  Antisense strand to SEQ ID NO: 1993140
aucacuaccucccaaaggc

SEQ ID NO: 1993142 - RNA, 19 nt, Artificial Sequence
  Description of Artificial Sequence: Synthetic oligonucleotide
  Sense strand starting at position 3251 of SEQ ID NO: 1880777
caccuugaucguggucaca

SEQ ID NO: 1993143 - RNA, 19 nt, Artificial Sequence
  Description of Artificial Sequence: Synthetic oligonucleotide
  Antisense strand to SEQ ID NO: 1993142
ugugaccacgaucaaggug

SEQ ID NO: 1993144 - RNA, 19 nt, Artificial Sequence
  Description of Artificial Sequence: Synthetic oligonucleotide
  Sense strand starting at position 3253 of SEQ ID NO: 1880777
ccuugaucguggucacaca

SEQ ID NO: 1993145 - RNA, 19 nt, Artificial Sequence
  Description of Artificial Sequence: Synthetic oligonucleotide
  Antisense strand to SEQ ID NO: 1993144
ugugugaccacgaucaagg

SEQ ID NO: 1993146 - RNA, 19 nt, Artificial Sequence
  Description of Artificial Sequence: Synthetic oligonucleotide
  Sense strand starting at position 3327 of SEQ ID NO: 1880777
uugcgucuucguguuaugu

SEQ ID NO: 1993147 - RNA, 19 nt, Artificial Sequence
  Description of Artificial Sequence: Synthetic oligonucleotide
  Antisense strand to SEQ ID NO: 1993146
acauaacacgaagacgcaa

SEQ ID NO: 1993148 - RNA, 19 nt, Artificial Sequence
  Description of Artificial Sequence: Synthetic oligonucleotide
  Sense strand starting at position 3328 of SEQ ID NO: 1880777
ugcgucuucguguuauguu

SEQ ID NO: 1993149 - RNA, 19 nt, Artificial Sequence
  Description of Artificial Sequence: Synthetic oligonucleotide
  Antisense strand to SEQ ID NO: 1993148
aacauaacacgaagacgca

SEQ ID NO: 1993150 - RNA, 19 nt, Artificial Sequence
  Description of Artificial Sequence: Synthetic oligonucleotide
  Sense strand starting at position 3333 of SEQ ID NO: 1880777
cuucguguuauguuggcua

SEQ ID NO: 1993151 - RNA, 19 nt, Artificial Sequence
  Description of Artificial Sequence: Synthetic oligonucleotide
  Antisense strand to SEQ ID NO: 1993150
uagccaacauaacacgaag

SEQ ID NO: 1993152 - RNA, 19 nt, Artificial Sequence
  Description of Artificial Sequence: Synthetic oligonucleotide
  Sense strand starting at position 3335 of SEQ ID NO: 1880777
ucguguuauguuggcuaag

SEQ ID NO: 1993153 - RNA, 19 nt, Artificial Sequence
  Description of Artificial Sequence: Synthetic oligonucleotide
  Antisense strand to SEQ ID NO: 1993152
cuuagccaacauaacacga

SEQ ID NO: 1993154 - RNA, 19 nt, Artificial Sequence
  Description of Artificial Sequence: Synthetic oligonucleotide
  Sense strand starting at position 45 of SEQ ID NO: 1880778
aucaaauaaucugugaagu

SEQ ID NO: 1993155 - RNA, 19 nt, Artificial Sequence
  Description of Artificial Sequence: Synthetic oligonucleotide
  Antisense strand to SEQ ID NO: 1993154
acuucacagauuauuugau

SEQ ID NO: 1993156 - RNA, 19 nt, Artificial Sequence
  Description of Artificial Sequence: Synthetic oligonucleotide
  Sense strand starting at position 46 of SEQ ID NO: 1880778
ucaaauaaucugugaaguc

SEQ ID NO: 1993157 - RNA, 19 nt, Artificial Sequence
  Description of Artificial Sequence: Synthetic oligonucleotide
  Antisense strand to SEQ ID NO: 1993156
gacuucacagauuauuuga

SEQ ID NO: 1993158 - RNA, 19 nt, Artificial Sequence
  Description of Artificial Sequence: Synthetic oligonucleotide
  Sense strand starting at position 89 of SEQ ID NO: 1880778
uccaguguugaucacagua

SEQ ID NO: 1993159 - RNA, 19 nt, Artificial Sequence
  Description of Artificial Sequence: Synthetic oligonucleotide
  Antisense strand to SEQ ID NO: 1993158
uacugugaucaacacugga

SEQ ID NO: 1993160 - RNA, 19 nt, Artificial Sequence
  Description of Artificial Sequence: Synthetic oligonucleotide
  Sense strand starting at position 445 of SEQ ID NO: 1880778
agcacucaugacugucauu

SEQ ID NO: 1993161 - RNA, 19 nt, Artificial Sequence
  Description of Artificial Sequence: Synthetic oligonucleotide
  Antisense strand to SEQ ID NO: 1993160
aaugacagucaugagugcu

SEQ ID NO: 1993162 - RNA, 19 nt, Artificial Sequence
  Description of Artificial Sequence: Synthetic oligonucleotide
  Sense strand starting at position 537 of SEQ ID NO: 1880778
gcacaauggccucaguucu

SEQ ID NO: 1993163 - RNA, 19 nt, Artificial Sequence
  Description of Artificial Sequence: Synthetic oligonucleotide
  Antisense strand to SEQ ID NO: 1993162
agaacugaggccauugugc

SEQ ID NO: 1993164 - RNA, 19 nt, Artificial Sequence
  Description of Artificial Sequence: Synthetic oligonucleotide
  Sense strand starting at position 612 of SEQ ID NO: 1880778
auguaaagugcuuaaacca

SEQ ID NO: 1993165 - RNA, 19 nt, Artificial Sequence
  Description of Artificial Sequence: Synthetic oligonucleotide
  Antisense strand to SEQ ID NO: 1993164
ugguuuaagcacuuuacau

SEQ ID NO: 1993166 - RNA, 19 nt, Artificial Sequence
  Description of Artificial Sequence: Synthetic oligonucleotide
  Sense strand starting at position 680 of SEQ ID NO: 1880778
uuuaauuggugcccaauaa

SEQ ID NO: 1993167 - RNA, 19 nt, Artificial Sequence
  Description of Artificial Sequence: Synthetic oligonucleotide
  Antisense strand to SEQ ID NO: 1993166
uuauugggcaccaauuaaa

SEQ ID NO: 1993168 - RNA, 19 nt, Artificial Sequence
  Description of Artificial Sequence: Synthetic oligonucleotide
  Sense strand starting at position 681 of SEQ ID NO: 1880778
uuaauuggugcccaauaau

SEQ ID NO: 1993169 - RNA, 19 nt, Artificial Sequence
  Description of Artificial Sequence: Synthetic oligonucleotide
  Antisense strand to SEQ ID NO: 1993168
auuauugggcaccaauuaa

SEQ ID NO: 1993170 - RNA, 19 nt, Artificial Sequence
  Description of Artificial Sequence: Synthetic oligonucleotide
  Sense strand starting at position 699 of SEQ ID NO: 1880778
uuacuaauugagugcaguu

SEQ ID NO: 1993171 - RNA, 19 nt, Artificial Sequence
  Description of Artificial Sequence: Synthetic oligonucleotide
  Antisense strand to SEQ ID NO: 1993170
aacugcacucaauuaguaa

SEQ ID NO: 1993172 - RNA, 19 nt, Artificial Sequence
  Description of Artificial Sequence: Synthetic oligonucleotide
  Sense strand starting at position 743 of SEQ ID NO: 1880778
uucuauagcucaguaucua

SEQ ID NO: 1993173 - RNA, 19 nt, Artificial Sequence
  Description of Artificial Sequence: Synthetic oligonucleotide
  Antisense strand to SEQ ID NO: 1993172
uagauacugagcuauagaa

SEQ ID NO: 1993174 - RNA, 19 nt, Artificial Sequence
  Description of Artificial Sequence: Synthetic oligonucleotide
  Sense strand starting at position 755 of SEQ ID NO: 1880778
guaucuaaaucugugaaua

SEQ ID NO: 1993175 - RNA, 19 nt, Artificial Sequence
  Description of Artificial Sequence: Synthetic oligonucleotide
  Antisense strand to SEQ ID NO: 1993174
uauucacagauuuagauac

SEQ ID NO: 1993176 - RNA, 19 nt, Artificial Sequence
  Description of Artificial Sequence: Synthetic oligonucleotide
  Sense strand starting at position 763 of SEQ ID NO: 1880778
aucugugaauacucuggaa

SEQ ID NO: 1993177 - RNA, 19 nt, Artificial Sequence
  Description of Artificial Sequence: Synthetic oligonucleotide
  Antisense strand to SEQ ID NO: 1993176
uuccagaguauucacagau

SEQ ID NO: 1993178 - RNA, 19 nt, Artificial Sequence
  Description of Artificial Sequence: Synthetic oligonucleotide
  Sense strand starting at position 765 of SEQ ID NO: 1880778
cugugaauacucuggaauu

SEQ ID NO: 1993179 - RNA, 19 nt, Artificial Sequence
  Description of Artificial Sequence: Synthetic oligonucleotide
  Antisense strand to SEQ ID NO: 1993178
aauuccagaguauucacag

SEQ ID NO: 1993180 - RNA, 19 nt, Artificial Sequence
  Description of Artificial Sequence: Synthetic oligonucleotide
  Sense strand starting at position 766 of SEQ ID NO: 1880778
ugugaauacucuggaauuu

SEQ ID NO: 1993181 - RNA, 19 nt, Artificial Sequence
  Description of Artificial Sequence: Synthetic oligonucleotide
  Antisense strand to SEQ ID NO: 1993180
aaauuccagaguauucaca

SEQ ID NO: 1993182 - RNA, 19 nt, Artificial Sequence
  Description of Artificial Sequence: Synthetic oligonucleotide
  Sense strand starting at position 901 of SEQ ID NO: 1880778
aagaguggauuacauuauu

SEQ ID NO: 1993183 - RNA, 19 nt, Artificial Sequence
  Description of Artificial Sequence: Synthetic oligonucleotide
  Antisense strand to SEQ ID NO: 1993182
aauaauguaauccacucuu

SEQ ID NO: 1993184 - RNA, 19 nt, Artificial Sequence
  Description of Artificial Sequence: Synthetic oligonucleotide
  Sense strand starting at position 1128 of SEQ ID NO: 1880778
gucuuugaaaggugaaacu

SEQ ID NO: 1993185 - RNA, 19 nt, Artificial Sequence
  Description of Artificial Sequence: Synthetic oligonucleotide
  Antisense strand to SEQ ID NO: 1993184
aguuucaccuuucaaagac

SEQ ID NO: 1993186 - RNA, 19 nt, Artificial Sequence
  Description of Artificial Sequence: Synthetic oligonucleotide
  Sense strand starting at position 1181 of SEQ ID NO: 1880778
ggaacagagugggcuuaau

SEQ ID NO: 1993187 - RNA, 19 nt, Artificial Sequence
  Description of Artificial Sequence: Synthetic oligonucleotide
  Antisense strand to SEQ ID NO: 1993186
auuaagcccacucuguucc

SEQ ID NO: 1993188 - RNA, 19 nt, Artificial Sequence
  Description of Artificial Sequence: Synthetic oligonucleotide
  Sense strand starting at position 1238 of SEQ ID NO: 1880778
ucggaauuccaucacuuag

SEQ ID NO: 1993189 - RNA, 19 nt, Artificial Sequence
  Description of Artificial Sequence: Synthetic oligonucleotide
  Antisense strand to SEQ ID NO: 1993188
cuaagugauggaauuccga

SEQ ID NO: 1993190 - RNA, 19 nt, Artificial Sequence
  Description of Artificial Sequence: Synthetic oligonucleotide
  Sense strand starting at position 1252 of SEQ ID NO: 1880778
cuuagaaacuguguaaccu

SEQ ID NO: 1993191 - RNA, 19 nt, Artificial Sequence
  Description of Artificial Sequence: Synthetic oligonucleotide
  Antisense strand to SEQ ID NO: 1993190
agguuacacaguuucuaag

SEQ ID NO: 1993192 - RNA, 19 nt, Artificial Sequence
  Description of Artificial Sequence: Synthetic oligonucleotide
  Sense strand starting at position 1353 of SEQ ID NO: 1880778
uucugauucugcguuuaga

SEQ ID NO: 1993193 - RNA, 19 nt, Artificial Sequence
  Description of Artificial Sequence: Synthetic oligonucleotide
  Antisense strand to SEQ ID NO: 1993192
ucuaaacgcagaaucagaa

SEQ ID NO: 1993194 - RNA, 19 nt, Artificial Sequence
  Description of Artificial Sequence: Synthetic oligonucleotide
  Sense strand starting at position 1356 of SEQ ID NO: 1880778
ugauucugcguuuagaaga

SEQ ID NO: 1993195 - RNA, 19 nt, Artificial Sequence
  Description of Artificial Sequence: Synthetic oligonucleotide
  Antisense strand to SEQ ID NO: 1993194
ucuucuaaacgcagaauca

SEQ ID NO: 1993196 - RNA, 19 nt, Artificial Sequence
  Description of Artificial Sequence: Synthetic oligonucleotide
  Sense strand starting at position 1910 of SEQ ID NO: 1880778
gguccugcugcggauaagu

SEQ ID NO: 1993197 - RNA, 19 nt, Artificial Sequence
  Description of Artificial Sequence: Synthetic oligonucleotide
  Antisense strand to SEQ ID NO: 1993196
acuuauccgcagcaggacc

SEQ ID NO: 1993198 - RNA, 19 nt, Artificial Sequence
  Description of Artificial Sequence: Synthetic oligonucleotide
  Sense strand starting at position 2204 of SEQ ID NO: 1880778
ccuggagcauuccuucuaa

SEQ ID NO: 1993199 - RNA, 19 nt, Artificial Sequence
  Description of Artificial Sequence: Synthetic oligonucleotide
  Antisense strand to SEQ ID NO: 1993198
uuagaaggaaugcuccagg

SEQ ID NO: 1993200 - RNA, 19 nt, Artificial Sequence
  Description of Artificial Sequence: Synthetic oligonucleotide
  Sense strand starting at position 2309 of SEQ ID NO: 1880778
gccacuuggucaucuugga

SEQ ID NO: 1993201 - RNA, 19 nt, Artificial Sequence
  Description of Artificial Sequence: Synthetic oligonucleotide
  Antisense strand to SEQ ID NO: 1993200
uccaagaugaccaaguggc

SEQ ID NO: 1993202 - RNA, 19 nt, Artificial Sequence
  Description of Artificial Sequence: Synthetic oligonucleotide
  Sense strand starting at position 2313 of SEQ ID NO: 1880778
cuuggucaucuuggaccaa

SEQ ID NO: 1993203 - RNA, 19 nt, Artificial Sequence
  Description of Artificial Sequence: Synthetic oligonucleotide
  Antisense strand to SEQ ID NO: 1993202
uugguccaagaugaccaag

SEQ ID NO: 1993204 - RNA, 19 nt, Artificial Sequence
  Description of Artificial Sequence: Synthetic oligonucleotide
  Sense strand starting at position 2339 of SEQ ID NO: 1880778
agaggauguaucugguaca

SEQ ID NO: 1993205 - RNA, 19 nt, Artificial Sequence
  Description of Artificial Sequence: Synthetic oligonucleotide
  Antisense strand to SEQ ID NO: 1993204
uguaccagauacauccucu

SEQ ID NO: 1993206 - RNA, 19 nt, Artificial Sequence
  Description of Artificial Sequence: Synthetic oligonucleotide
  Sense strand starting at position 2372 of SEQ ID NO: 1880778
cgauuaacaugagacuuga

SEQ ID NO: 1993207 - RNA, 19 nt, Artificial Sequence
  Description of Artificial Sequence: Synthetic oligonucleotide
  Antisense strand to SEQ ID NO: 1993206
ucaagucucauguuaaucg

SEQ ID NO: 1993208 - RNA, 19 nt, Artificial Sequence
  Description of Artificial Sequence: Synthetic oligonucleotide
  Sense strand starting at position 2434 of SEQ ID NO: 1880778
cagaaccuuccuggaguau

SEQ ID NO: 1993209 - RNA, 19 nt, Artificial Sequence
  Description of Artificial Sequence: Synthetic oligonucleotide
  Antisense strand to SEQ ID NO: 1993208
auacuccaggaagguucug

SEQ ID NO: 1993210 - RNA, 19 nt, Artificial Sequence
  Description of Artificial Sequence: Synthetic oligonucleotide
  Sense strand starting at position 2466 of SEQ ID NO: 1880778
ggacaacgguucucaaagu

SEQ ID NO: 1993211 - RNA, 19 nt, Artificial Sequence
  Description of Artificial Sequence: Synthetic oligonucleotide
  Antisense strand to SEQ ID NO: 1993210
acuuugagaaccguugucc

SEQ ID NO: 1993212 - RNA, 19 nt, Artificial Sequence
  Description of Artificial Sequence: Synthetic oligonucleotide
  Sense strand starting at position 2517 of SEQ ID NO: 1880778
acguuagaaaugcacguua

SEQ ID NO: 1993213 - RNA, 19 nt, Artificial Sequence
  Description of Artificial Sequence: Synthetic oligonucleotide
  Antisense strand to SEQ ID NO: 1993212
uaacgugcauuucuaacgu

SEQ ID NO: 1993214 - RNA, 19 nt, Artificial Sequence
  Description of Artificial Sequence: Synthetic oligonucleotide
  Sense strand starting at position 2519 of SEQ ID NO: 1880778
guuagaaaugcacguuaga

SEQ ID NO: 1993215 - RNA, 19 nt, Artificial Sequence
  Description of Artificial Sequence: Synthetic oligonucleotide
  Antisense strand to SEQ ID NO: 1993214
ucuaacgugcauuucuaac

SEQ ID NO: 1993216 - RNA, 19 nt, Artificial Sequence
  Description of Artificial Sequence: Synthetic oligonucleotide
  Sense strand starting at position 2522 of SEQ ID NO: 1880778
agaaaugcacguuagaaca

SEQ ID NO: 1993217 - RNA, 19 nt, Artificial Sequence
  Description of Artificial Sequence: Synthetic oligonucleotide
  Antisense strand to SEQ ID NO: 1993216
uguucuaacgugcauuucu

SEQ ID NO: 1993218 - RNA, 19 nt, Artificial Sequence
  Description of Artificial Sequence: Synthetic oligonucleotide
  Sense strand starting at position 2686 of SEQ ID NO: 1880778
gcgaucauagcucaccaaa

SEQ ID NO: 1993219 - RNA, 19 nt, Artificial Sequence
  Description of Artificial Sequence: Synthetic oligonucleotide
  Antisense strand to SEQ ID NO: 1993218
uuuggugagcuaugaucgc

SEQ ID NO: 1993220 - RNA, 19 nt, Artificial Sequence
  Description of Artificial Sequence: Synthetic oligonucleotide
  Sense strand starting at position 2981 of SEQ ID NO: 1880778
gagaaucacuguucuggaa

SEQ ID NO: 1993221 - RNA, 19 nt, Artificial Sequence
  Description of Artificial Sequence: Synthetic oligonucleotide
  Antisense strand to SEQ ID NO: 1993220
uuccagaacagugauucuc

SEQ ID NO: 1993222 - RNA, 19 nt, Artificial Sequence
  Description of Artificial Sequence: Synthetic oligonucleotide
  Sense strand starting at position 3004 of SEQ ID NO: 1880778
gaggacugguuuccagaau

SEQ ID NO: 1993223 - RNA, 19 nt, Artificial Sequence
  Description of Artificial Sequence: Synthetic oligonucleotide
  Antisense strand to SEQ ID NO: 1993222
auucuggaaaccaguccuc

SEQ ID NO: 1993224 - RNA, 19 nt, Artificial Sequence
  Description of Artificial Sequence: Synthetic oligonucleotide
  Sense strand starting at position 3010 of SEQ ID NO: 1880778
ugguuuccagaauggaaac

SEQ ID NO: 1993225 - RNA, 19 nt, Artificial Sequence
  Description of Artificial Sequence: Synthetic oligonucleotide
  Antisense strand to SEQ ID NO: 1993224
guuuccauucuggaaacca

SEQ ID NO: 1993226 - RNA, 19 nt, Artificial Sequence
  Description of Artificial Sequence: Synthetic oligonucleotide
  Sense strand starting at position 3371 of SEQ ID NO: 1880778
gaacaaucguucuucucag

SEQ ID NO: 1993227 - RNA, 19 nt, Artificial Sequence
  Description of Artificial Sequence: Synthetic oligonucleotide
  Antisense strand to SEQ ID NO: 1993226
cugagaagaacgauuguuc

SEQ ID NO: 1993228 - RNA, 19 nt, Artificial Sequence
  Description of Artificial Sequence: Synthetic oligonucleotide
  Sense strand starting at position 3407 of SEQ ID NO: 1880778
ucugauggauuccuuauca

SEQ ID NO: 1993229 - RNA, 19 nt, Artificial Sequence
  Description of Artificial Sequence: Synthetic oligonucleotide
  Antisense strand to SEQ ID NO: 1993228
ugauaaggaauccaucaga

SEQ ID NO: 1993230 - RNA, 19 nt, Artificial Sequence
  Description of Artificial Sequence: Synthetic oligonucleotide
  Sense strand starting at position 3412 of SEQ ID NO: 1880778
uggauuccuuaucauaaga

SEQ ID NO: 1993231 - RNA, 19 nt, Artificial Sequence
  Description of Artificial Sequence: Synthetic oligonucleotide
  Antisense strand to SEQ ID NO: 1993230
ucuuaugauaaggaaucca

SEQ ID NO: 1993232 - RNA, 19 nt, Artificial Sequence
  Description of Artificial Sequence: Synthetic oligonucleotide
  Sense strand starting at position 3711 of SEQ ID NO: 1880778
ugguguguccagagucugu

SEQ ID NO: 1993233 - RNA, 19 nt, Artificial Sequence
  Description of Artificial Sequence: Synthetic oligonucleotide
  Antisense strand to SEQ ID NO: 1993232
acagacucuggacacacca

SEQ ID NO: 1993234 - RNA, 19 nt, Artificial Sequence
  Description of Artificial Sequence: Synthetic oligonucleotide
  Sense strand starting at position 249 of SEQ ID NO: 1880780
uuuguuuaagacuagccaa

SEQ ID NO: 1993235 - RNA, 19 nt, Artificial Sequence
  Description of Artificial Sequence: Synthetic oligonucleotide
  Antisense strand to SEQ ID NO: 1993234
uuggcuagucuuaaacaaa

SEQ ID NO: 1993236 - RNA, 19 nt, Artificial Sequence
  Description of Artificial Sequence: Synthetic oligonucleotide
  Sense strand starting at position 267 of SEQ ID NO: 1880780
agugcagugguugagaagu

SEQ ID NO: 1993237 - RNA, 19 nt, Artificial Sequence
  Description of Artificial Sequence: Synthetic oligonucleotide
  Antisense strand to SEQ ID NO: 1993236
acuucucaaccacugcacu

SEQ ID NO: 1993238 - RNA, 19 nt, Artificial Sequence
  Description of Artificial Sequence: Synthetic oligonucleotide
  Sense strand starting at position 301 of SEQ ID NO: 1880780
caaggaguuuggucuguaa

SEQ ID NO: 1993239 - RNA, 19 nt, Artificial Sequence
  Description of Artificial Sequence: Synthetic oligonucleotide
  Antisense strand to SEQ ID NO: 1993238
uuacagaccaaacuccuug

SEQ ID NO: 1993240 - RNA, 19 nt, Artificial Sequence
  Description of Artificial Sequence: Synthetic oligonucleotide
  Sense strand starting at position 303 of SEQ ID NO: 1880780
aggaguuuggucuguaacu

SEQ ID NO: 1993241 - RNA, 19 nt, Artificial Sequence
  Description of Artificial Sequence: Synthetic oligonucleotide
  Antisense strand to SEQ ID NO: 1993240
aguuacagaccaaacuccu

SEQ ID NO: 1993242 - RNA, 19 nt, Artificial Sequence
  Description of Artificial Sequence: Synthetic oligonucleotide
  Sense strand starting at position 304 of SEQ ID NO: 1880780
ggaguuuggucuguaacug

SEQ ID NO: 1993243 - RNA, 19 nt, Artificial Sequence
  Description of Artificial Sequence: Synthetic oligonucleotide
  Antisense strand to SEQ ID NO: 1993242
caguuacagaccaaacucc

SEQ ID NO: 1993244 - RNA, 19 nt, Artificial Sequence
  Description of Artificial Sequence: Synthetic oligonucleotide
  Sense strand starting at position 316 of SEQ ID NO: 1880780
guaacuggcagugaacaau

SEQ ID NO: 1993245 - RNA, 19 nt, Artificial Sequence
  Description of Artificial Sequence: Synthetic oligonucleotide
  Antisense strand to SEQ ID NO: 1993244
auuguucacugccaguuac

SEQ ID NO: 1993246 - RNA, 19 nt, Artificial Sequence
  Description of Artificial Sequence: Synthetic oligonucleotide
  Sense strand starting at position 2795 of SEQ ID NO: 1880780
ggaugcgaggguuguuuau

SEQ ID NO: 1993247 - RNA, 19 nt, Artificial Sequence
  Description of Artificial Sequence: Synthetic oligonucleotide
  Antisense strand to SEQ ID NO: 1993246
auaaacaacccucgcaucc

SEQ ID NO: 1993248 - RNA, 19 nt, Artificial Sequence
  Description of Artificial Sequence: Synthetic oligonucleotide
  Sense strand starting at position 2802 of SEQ ID NO: 1880780
aggguuguuuauccaacca

SEQ ID NO: 1993249 - RNA, 19 nt, Artificial Sequence
  Description of Artificial Sequence: Synthetic oligonucleotide
  Antisense strand to SEQ ID NO: 1993248
ugguuggauaaacaacccu

SEQ ID NO: 1993250 - RNA, 19 nt, Artificial Sequence
  Description of Artificial Sequence: Synthetic oligonucleotide
  Sense strand starting at position 3027 of SEQ ID NO: 1880780
caacuagucauuggcgagu

SEQ ID NO: 1993251 - RNA, 19 nt, Artificial Sequence
  Description of Artificial Sequence: Synthetic oligonucleotide
  Antisense strand to SEQ ID NO: 1993250
acucgccaaugacuaguug

SEQ ID NO: 1993252 - RNA, 19 nt, Artificial Sequence
  Description of Artificial Sequence: Synthetic oligonucleotide
  Sense strand starting at position 3030 of SEQ ID NO: 1880780
cuagucauuggcgagugau

SEQ ID NO: 1993253 - RNA, 19 nt, Artificial Sequence
  Description of Artificial Sequence: Synthetic oligonucleotide
  Antisense strand to SEQ ID NO: 1993252
aucacucgccaaugacuag

SEQ ID NO: 1993254 - RNA, 19 nt, Artificial Sequence
  Description of Artificial Sequence: Synthetic oligonucleotide
  Sense strand starting at position 3039 of SEQ ID NO: 1880780
ggcgagugaugggugugaa

SEQ ID NO: 1993255 - RNA, 19 nt, Artificial Sequence
  Description of Artificial Sequence: Synthetic oligonucleotide
  Antisense strand to SEQ ID NO: 1993254
uucacacccaucacucgcc

SEQ ID NO: 1993256 - RNA, 19 nt, Artificial Sequence
  Description of Artificial Sequence: Synthetic oligonucleotide
  Sense strand starting at position 3040 of SEQ ID NO: 1880780
gcgagugaugggugugaag

SEQ ID NO: 1993257 - RNA, 19 nt, Artificial Sequence
  Description of Artificial Sequence: Synthetic oligonucleotide
  Antisense strand to SEQ ID NO: 1993256
cuucacacccaucacucgc

SEQ ID NO: 1993258 - RNA, 19 nt, Artificial Sequence
  Description of Artificial Sequence: Synthetic oligonucleotide
  Sense strand starting at position 3042 of SEQ ID NO: 1880780
gagugaugggugugaagaa

SEQ ID NO: 1993259 - RNA, 19 nt, Artificial Sequence
  Description of Artificial Sequence: Synthetic oligonucleotide
  Antisense strand to SEQ ID NO: 1993258
uucuucacacccaucacuc

SEQ ID NO: 1993260 - RNA, 19 nt, Artificial Sequence
  Description of Artificial Sequence: Synthetic oligonucleotide
  Sense strand starting at position 3210 of SEQ ID NO: 1880780
cgaagagcuucuuucugaa

SEQ ID NO: 1993261 - RNA, 19 nt, Artificial Sequence
  Description of Artificial Sequence: Synthetic oligonucleotide
  Antisense strand to SEQ ID NO: 1993260
uucagaaagaagcucuucg

SEQ ID NO: 1993262 - RNA, 19 nt, Artificial Sequence
  Description of Artificial Sequence: Synthetic oligonucleotide
  Sense strand starting at position 3239 of SEQ ID NO: 1880780
cgaacaagugcugaguuaa

SEQ ID NO: 1993263 - RNA, 19 nt, Artificial Sequence
  Description of Artificial Sequence: Synthetic oligonucleotide
  Antisense strand to SEQ ID NO: 1993262
uuaacucagcacuuguucg

SEQ ID NO: 1993264 - RNA, 19 nt, Artificial Sequence
  Description of Artificial Sequence: Synthetic oligonucleotide
  Sense strand starting at position 3251 of SEQ ID NO: 1880780
gaguuaagccugugcagac

SEQ ID NO: 1993265 - RNA, 19 nt, Artificial Sequence
  Description of Artificial Sequence: Synthetic oligonucleotide
  Antisense strand to SEQ ID NO: 1993264
gucugcacaggcuuaacuc

SEQ ID NO: 1993266 - RNA, 19 nt, Artificial Sequence
  Description of Artificial Sequence: Synthetic oligonucleotide
  Sense strand starting at position 3261 of SEQ ID NO: 1880780
ugugcagacuucucaacuu

SEQ ID NO: 1993267 - RNA, 19 nt, Artificial Sequence
  Description of Artificial Sequence: Synthetic oligonucleotide
  Antisense strand to SEQ ID NO: 1993266
aaguugagaagucugcaca

SEQ ID NO: 1993268 - RNA, 19 nt, Artificial Sequence
  Description of Artificial Sequence: Synthetic oligonucleotide
  Sense strand starting at position 3282 of SEQ ID NO: 1880780
cuuuguuguucuuugguau

SEQ ID NO: 1993269 - RNA, 19 nt, Artificial Sequence
  Description of Artificial Sequence: Synthetic oligonucleotide
  Antisense strand to SEQ ID NO: 1993268
auaccaaagaacaacaaag

SEQ ID NO: 1993270 - RNA, 19 nt, Artificial Sequence
  Description of Artificial Sequence: Synthetic oligonucleotide
  Sense strand starting at position 3316 of SEQ ID NO: 1880780
gacgaagaugaguguguga

SEQ ID NO: 1993271 - RNA, 19 nt, Artificial Sequence
  Description of Artificial Sequence: Synthetic oligonucleotide
  Antisense strand to SEQ ID NO: 1993270
ucacacacucaucuucguc

SEQ ID NO: 1993272 - RNA, 19 nt, Artificial Sequence
  Description of Artificial Sequence: Synthetic oligonucleotide
  Sense strand starting at position 3318 of SEQ ID NO: 1880780
cgaagaugagugugugauc

SEQ ID NO: 1993273 - RNA, 19 nt, Artificial Sequence
  Description of Artificial Sequence: Synthetic oligonucleotide
  Antisense strand to SEQ ID NO: 1993272
gaucacacacucaucuucg

SEQ ID NO: 1993274 - RNA, 19 nt, Artificial Sequence
  Description of Artificial Sequence: Synthetic oligonucleotide
  Sense strand starting at position 3319 of SEQ ID NO: 1880780
gaagaugagugugugaucu

SEQ ID NO: 1993275 - RNA, 19 nt, Artificial Sequence
  Description of Artificial Sequence: Synthetic oligonucleotide
  Antisense strand to SEQ ID NO: 1993274
agaucacacacucaucuuc

SEQ ID NO: 1993276 - RNA, 19 nt, Artificial Sequence
  Description of Artificial Sequence: Synthetic oligonucleotide
  Sense strand starting at position 3327 of SEQ ID NO: 1880780
gugugugaucuugcacguu

SEQ ID NO: 1993277 - RNA, 19 nt, Artificial Sequence
  Description of Artificial Sequence: Synthetic oligonucleotide
  Antisense strand to SEQ ID NO: 1993276
aacgugcaagaucacacac

SEQ ID NO: 1993278 - RNA, 19 nt, Artificial Sequence
  Description of Artificial Sequence: Synthetic oligonucleotide
  Sense strand starting at position 3357 of SEQ ID NO: 1880780
guacaauggagcuaaucga

SEQ ID NO: 1993279 - RNA, 19 nt, Artificial Sequence
  Description of Artificial Sequence: Synthetic oligonucleotide
  Antisense strand to SEQ ID NO: 1993278
ucgauuagcuccauuguac

SEQ ID NO: 1993280 - RNA, 19 nt, Artificial Sequence
  Description of Artificial Sequence: Synthetic oligonucleotide
  Sense strand starting at position 3455 of SEQ ID NO: 1880780
auaguuguuugcuucuaaa

SEQ ID NO: 1993281 - RNA, 19 nt, Artificial Sequence
  Description of Artificial Sequence: Synthetic oligonucleotide
  Antisense strand to SEQ ID NO: 1993280
uuuagaagcaaacaacuau

SEQ ID NO: 1993282 - RNA, 19 nt, Artificial Sequence
  Description of Artificial Sequence: Synthetic oligonucleotide
  Sense strand starting at position 3537 of SEQ ID NO: 1880780
cugggugaguuucugugua

SEQ ID NO: 1993283 - RNA, 19 nt, Artificial Sequence
  Description of Artificial Sequence: Synthetic oligonucleotide
  Antisense strand to SEQ ID NO: 1993282
uacacagaaacucacccag

SEQ ID NO: 1993284 - RNA, 19 nt, Artificial Sequence
  Description of Artificial Sequence: Synthetic oligonucleotide
  Sense strand starting at position 3539 of SEQ ID NO: 1880780
gggugaguuucuguguagu

SEQ ID NO: 1993285 - RNA, 19 nt, Artificial Sequence
  Description of Artificial Sequence: Synthetic oligonucleotide
  Antisense strand to SEQ ID NO: 1993284
acuacacagaaacucaccc

SEQ ID NO: 1993286 - RNA, 19 nt, Artificial Sequence
  Description of Artificial Sequence: Synthetic oligonucleotide
  Sense strand starting at position 3559 of SEQ ID NO: 1880780
gggugcguucauuaaauac

SEQ ID NO: 1993287 - RNA, 19 nt, Artificial Sequence
  Description of Artificial Sequence: Synthetic oligonucleotide
  Antisense strand to SEQ ID NO: 1993286
guauuuaaugaacgcaccc

SEQ ID NO: 1993288 - RNA, 19 nt, Artificial Sequence
  Description of Artificial Sequence: Synthetic oligonucleotide
  Sense strand starting at position 3594 of SEQ ID NO: 1880780
cugugagcucuuuaaacau

SEQ ID NO: 1993289 - RNA, 19 nt, Artificial Sequence
  Description of Artificial Sequence: Synthetic oligonucleotide
  Antisense strand to SEQ ID NO: 1993288
auguuuaaagagcucacag

SEQ ID NO: 1993290 - RNA, 19 nt, Artificial Sequence
  Description of Artificial Sequence: Synthetic oligonucleotide
  Sense strand starting at position 3653 of SEQ ID NO: 1880780
ucucuaguccuuugggaga

SEQ ID NO: 1993291 - RNA, 19 nt, Artificial Sequence
  Description of Artificial Sequence: Synthetic oligonucleotide
  Antisense strand to SEQ ID NO: 1993290
ucucccaaaggacuagaga

SEQ ID NO: 1993292 - RNA, 19 nt, Artificial Sequence
  Description of Artificial Sequence: Synthetic oligonucleotide
  Sense strand starting at position 3670 of SEQ ID NO: 1880780
gaccgugaugcagaagagu

SEQ ID NO: 1993293 - RNA, 19 nt, Artificial Sequence
  Description of Artificial Sequence: Synthetic oligonucleotide
  Antisense strand to SEQ ID NO: 1993292
acucuucugcaucacgguc

SEQ ID NO: 1993294 - RNA, 19 nt, Artificial Sequence
  Description of Artificial Sequence: Synthetic oligonucleotide
  Sense strand starting at position 3683 of SEQ ID NO: 1880780
aagagucagaagcgagaaa

SEQ ID NO: 1993295 - RNA, 19 nt, Artificial Sequence
  Description of Artificial Sequence: Synthetic oligonucleotide
  Antisense strand to SEQ ID NO: 1993294
uuucucgcuucugacucuu

SEQ ID NO: 1993296 - RNA, 19 nt, Artificial Sequence
  Description of Artificial Sequence: Synthetic oligonucleotide
  Sense strand starting at position 3788 of SEQ ID NO: 1880780
acgauuauuuacgacggua

SEQ ID NO: 1993297 - RNA, 19 nt, Artificial Sequence
  Description of Artificial Sequence: Synthetic oligonucleotide
  Antisense strand to SEQ ID NO: 1993296
uaccgucguaaauaaucgu

SEQ ID NO: 1993298 - RNA, 19 nt, Artificial Sequence
  Description of Artificial Sequence: Synthetic oligonucleotide
  Sense strand starting at position 3810 of SEQ ID NO: 1880780
gaccucucgauaugaggga

SEQ ID NO: 1993299 - RNA, 19 nt, Artificial Sequence
  Description of Artificial Sequence: Synthetic oligonucleotide
  Antisense strand to SEQ ID NO: 1993298
ucccucauaucgagagguc

SEQ ID NO: 1993300 - RNA, 19 nt, Artificial Sequence
  Description of Artificial Sequence: Synthetic oligonucleotide
  Sense strand starting at position 3844 of SEQ ID NO: 1880780
ccguuugcucaucaaggga

SEQ ID NO: 1993301 - RNA, 19 nt, Artificial Sequence
  Description of Artificial Sequence: Synthetic oligonucleotide
  Antisense strand to SEQ ID NO: 1993300
ucccuugaugagcaaacgg

SEQ ID NO: 1993302 - RNA, 19 nt, Artificial Sequence
  Description of Artificial Sequence: Synthetic oligonucleotide
  Sense strand starting at position 3863 of SEQ ID NO: 1880780
uugggagaauagcaacauu

SEQ ID NO: 1993303 - RNA, 19 nt, Artificial Sequence
  Description of Artificial Sequence: Synthetic oligonucleotide
  Antisense strand to SEQ ID NO: 1993302
aauguugcuauucucccaa

SEQ ID NO: 1993304 - RNA, 19 nt, Artificial Sequence
  Description of Artificial Sequence: Synthetic oligonucleotide
  Sense strand starting at position 3881 of SEQ ID NO: 1880780
ugauguugcgaccauauag

SEQ ID NO: 1993305 - RNA, 19 nt, Artificial Sequence
  Description of Artificial Sequence: Synthetic oligonucleotide
  Antisense strand to SEQ ID NO: 1993304
cuauauggucgcaacauca

SEQ ID NO: 1993306 - RNA, 19 nt, Artificial Sequence
  Description of Artificial Sequence: Synthetic oligonucleotide
  Sense strand starting at position 3909 of SEQ ID NO: 1880780
agcacagugccucagagua

SEQ ID NO: 1993307 - RNA, 19 nt, Artificial Sequence
  Description of Artificial Sequence: Synthetic oligonucleotide
  Antisense strand to SEQ ID NO: 1993306
uacucugaggcacugugcu

SEQ ID NO: 1993308 - RNA, 19 nt, Artificial Sequence
  Description of Artificial Sequence: Synthetic oligonucleotide
  Sense strand starting at position 3914 of SEQ ID NO: 1880780
agugccucagaguauugaa

SEQ ID NO: 1993309 - RNA, 19 nt, Artificial Sequence
  Description of Artificial Sequence: Synthetic oligonucleotide
  Antisense strand to SEQ ID NO: 1993308
uucaauacucugaggcacu

SEQ ID NO: 1993310 - RNA, 19 nt, Artificial Sequence
  Description of Artificial Sequence: Synthetic oligonucleotide
  Sense strand starting at position 3972 of SEQ ID NO: 1880780
ugaugaucugguuaucuug

SEQ ID NO: 1993311 - RNA, 19 nt, Artificial Sequence
  Description of Artificial Sequence: Synthetic oligonucleotide
  Antisense strand to SEQ ID NO: 1993310
caagauaaccagaucauca

SEQ ID NO: 1993312 - RNA, 19 nt, Artificial Sequence
  Description of Artificial Sequence: Synthetic oligonucleotide
  Sense strand starting at position 3979 of SEQ ID NO: 1880780
cugguuaucuuguuaaauu

SEQ ID NO: 1993313 - RNA, 19 nt, Artificial Sequence
  Description of Artificial Sequence: Synthetic oligonucleotide
  Antisense strand to SEQ ID NO: 1993312
aauuuaacaagauaaccag

SEQ ID NO: 1993314 - RNA, 19 nt, Artificial Sequence
  Description of Artificial Sequence: Synthetic oligonucleotide
  Sense strand starting at position 2460 of SEQ ID NO: 1880779
ggaugcgaggguuguuuau

SEQ ID NO: 1993315 - RNA, 19 nt, Artificial Sequence
  Description of Artificial Sequence: Synthetic oligonucleotide
  Antisense strand to SEQ ID NO: 1993314
auaaacaacccucgcaucc

SEQ ID NO: 1993316 - RNA, 19 nt, Artificial Sequence
  Description of Artificial Sequence: Synthetic oligonucleotide
  Sense strand starting at position 2467 of SEQ ID NO: 1880779
aggguuguuuauccaacca

SEQ ID NO: 1993317 - RNA, 19 nt, Artificial Sequence
  Description of Artificial Sequence: Synthetic oligonucleotide
  Antisense strand to SEQ ID NO: 1993316
ugguuggauaaacaacccu

SEQ ID NO: 1993318 - RNA, 19 nt, Artificial Sequence
  Description of Artificial Sequence: Synthetic oligonucleotide
  Sense strand starting at position 2692 of SEQ ID NO: 1880779
caacuagucauuggcgagu

SEQ ID NO: 1993319 - RNA, 19 nt, Artificial Sequence
  Description of Artificial Sequence: Synthetic oligonucleotide
  Antisense strand to SEQ ID NO: 1993318
acucgccaaugacuaguug

SEQ ID NO: 1993320 - RNA, 19 nt, Artificial Sequence
  Description of Artificial Sequence: Synthetic oligonucleotide
  Sense strand starting at position 2695 of SEQ ID NO: 1880779
cuagucauuggcgagugau

SEQ ID NO: 1993321 - RNA, 19 nt, Artificial Sequence
  Description of Artificial Sequence: Synthetic oligonucleotide
  Antisense strand to SEQ ID NO: 1993320
aucacucgccaaugacuag

SEQ ID NO: 1993322 - RNA, 19 nt, Artificial Sequence
  Description of Artificial Sequence: Synthetic oligonucleotide
  Sense strand starting at position 2704 of SEQ ID NO: 1880779
ggcgagugaugggugugaa

SEQ ID NO: 1993323 - RNA, 19 nt, Artificial Sequence
  Description of Artificial Sequence: Synthetic oligonucleotide
  Antisense strand to SEQ ID NO: 1993322
uucacacccaucacucgcc

SEQ ID NO: 1993324 - RNA, 19 nt, Artificial Sequence
  Description of Artificial Sequence: Synthetic oligonucleotide
  Sense strand starting at position 2705 of SEQ ID NO: 1880779
gcgagugaugggugugaag

SEQ ID NO: 1993325 - RNA, 19 nt, Artificial Sequence
  Description of Artificial Sequence: Synthetic oligonucleotide
  Antisense strand to SEQ ID NO: 1993324
cuucacacccaucacucgc

SEQ ID NO: 1993326 - RNA, 19 nt, Artificial Sequence
  Description of Artificial Sequence: Synthetic oligonucleotide
  Sense strand starting at position 2707 of SEQ ID NO: 1880779
gagugaugggugugaagaa

SEQ ID NO: 1993327 - RNA, 19 nt, Artificial Sequence
  Description of Artificial Sequence: Synthetic oligonucleotide
  Antisense strand to SEQ ID NO: 1993326
uucuucacacccaucacuc

SEQ ID NO: 1993328 - RNA, 19 nt, Artificial Sequence
  Description of Artificial Sequence: Synthetic oligonucleotide
  Sense strand starting at position 2875 of SEQ ID NO: 1880779
cgaagagcuucuuucugaa

SEQ ID NO: 1993329 - RNA, 19 nt, Artificial Sequence
  Description of Artificial Sequence: Synthetic oligonucleotide
  Antisense strand to SEQ ID NO: 1993328
uucagaaagaagcucuucg

SEQ ID NO: 1993330 - RNA, 19 nt, Artificial Sequence
  Description of Artificial Sequence: Synthetic oligonucleotide
  Sense strand starting at position 2904 of SEQ ID NO: 1880779
cgaacaagugcugaguuaa

SEQ ID NO: 1993331 - RNA, 19 nt, Artificial Sequence
  Description of Artificial Sequence: Synthetic oligonucleotide
  Antisense strand to SEQ ID NO: 1993330
uuaacucagcacuuguucg

SEQ ID NO: 1993332 - RNA, 19 nt, Artificial Sequence
  Description of Artificial Sequence: Synthetic oligonucleotide
  Sense strand starting at position 2916 of SEQ ID NO: 1880779
gaguuaagccugugcagac

SEQ ID NO: 1993333 - RNA, 19 nt, Artificial Sequence
  Description of Artificial Sequence: Synthetic oligonucleotide
  Antisense strand to SEQ ID NO: 1993332
gucugcacaggcuuaacuc

SEQ ID NO: 1993334 - RNA, 19 nt, Artificial Sequence
  Description of Artificial Sequence: Synthetic oligonucleotide
  Sense strand starting at position 2926 of SEQ ID NO: 1880779
ugugcagacuucucaacuu

SEQ ID NO: 1993335 - RNA, 19 nt, Artificial Sequence
  Description of Artificial Sequence: Synthetic oligonucleotide
  Antisense strand to SEQ ID NO: 1993334
aaguugagaagucugcaca

SEQ ID NO: 1993336 - RNA, 19 nt, Artificial Sequence
  Description of Artificial Sequence: Synthetic oligonucleotide
  Sense strand starting at position 2981 of SEQ ID NO: 1880779
gacgaagaugaguguguga

SEQ ID NO: 1993337 - RNA, 19 nt, Artificial Sequence
  Description of Artificial Sequence: Synthetic oligonucleotide
  Antisense strand to SEQ ID NO: 1993336
ucacacacucaucuucguc

SEQ ID NO: 1993338 - RNA, 19 nt, Artificial Sequence
  Description of Artificial Sequence: Synthetic oligonucleotide
  Sense strand starting at position 2983 of SEQ ID NO: 1880779
cgaagaugagugugugauc

SEQ ID NO: 1993339 - RNA, 19 nt, Artificial Sequence
  Description of Artificial Sequence: Synthetic oligonucleotide
  Antisense strand to SEQ ID NO: 1993338
gaucacacacucaucuucg

SEQ ID NO: 1993340 - RNA, 19 nt, Artificial Sequence
  Description of Artificial Sequence: Synthetic oligonucleotide
  Sense strand starting at position 2984 of SEQ ID NO: 1880779
gaagaugagugugugaucu

SEQ ID NO: 1993341 - RNA, 19 nt, Artificial Sequence
  Description of Artificial Sequence: Synthetic oligonucleotide
  Antisense strand to SEQ ID NO: 1993340
agaucacacacucaucuuc

SEQ ID NO: 1993342 - RNA, 19 nt, Artificial Sequence
  Description of Artificial Sequence: Synthetic oligonucleotide
  Sense strand starting at position 2992 of SEQ ID NO: 1880779
gugugugaucuugcacguu

SEQ ID NO: 1993343 - RNA, 19 nt, Artificial Sequence
  Description of Artificial Sequence: Synthetic oligonucleotide
  Antisense strand to SEQ ID NO: 1993342
aacgugcaagaucacacac

SEQ ID NO: 1993344 - RNA, 19 nt, Artificial Sequence
  Description of Artificial Sequence: Synthetic oligonucleotide
  Sense strand starting at position 3022 of SEQ ID NO: 1880779
guacaauggagcuaaucga

SEQ ID NO: 1993345 - RNA, 19 nt, Artificial Sequence
  Description of Artificial Sequence: Synthetic oligonucleotide
  Antisense strand to SEQ ID NO: 1993344
ucgauuagcuccauuguac

SEQ ID NO: 1993346 - RNA, 19 nt, Artificial Sequence
  Description of Artificial Sequence: Synthetic oligonucleotide
  Sense strand starting at position 3120 of SEQ ID NO: 1880779
auaguuguuugcuucuaaa

SEQ ID NO: 1993347 - RNA, 19 nt, Artificial Sequence
  Description of Artificial Sequence: Synthetic oligonucleotide
  Antisense strand to SEQ ID NO: 1993346
uuuagaagcaaacaacuau

SEQ ID NO: 1993348 - RNA, 19 nt, Artificial Sequence
  Description of Artificial Sequence: Synthetic oligonucleotide
  Sense strand starting at position 3202 of SEQ ID NO: 1880779
cugggugaguuucugugua

SEQ ID NO: 1993349 - RNA, 19 nt, Artificial Sequence
  Description of Artificial Sequence: Synthetic oligonucleotide
  Antisense strand to SEQ ID NO: 1993348
uacacagaaacucacccag

SEQ ID NO: 1993350 - RNA, 19 nt, Artificial Sequence
  Description of Artificial Sequence: Synthetic oligonucleotide
  Sense strand starting at position 3224 of SEQ ID NO: 1880779
gggugcguucauuaaauac

SEQ ID NO: 1993351 - RNA, 19 nt, Artificial Sequence
  Description of Artificial Sequence: Synthetic oligonucleotide
  Antisense strand to SEQ ID NO: 1993350
guauuuaaugaacgcaccc

SEQ ID NO: 1993352 - RNA, 19 nt, Artificial Sequence
  Description of Artificial Sequence: Synthetic oligonucleotide
  Sense strand starting at position 3259 of SEQ ID NO: 1880779
cugugagcucuuuaaacau

SEQ ID NO: 1993353 - RNA, 19 nt, Artificial Sequence
  Description of Artificial Sequence: Synthetic oligonucleotide
  Antisense strand to SEQ ID NO: 1993352
auguuuaaagagcucacag

SEQ ID NO: 1993354 - RNA, 19 nt, Artificial Sequence
  Description of Artificial Sequence: Synthetic oligonucleotide
  Sense strand starting at position 3318 of SEQ ID NO: 1880779
ucucuaguccuuugggaga

SEQ ID NO: 1993355 - RNA, 19 nt, Artificial Sequence
  Description of Artificial Sequence: Synthetic oligonucleotide
  Antisense strand to SEQ ID NO: 1993354
ucucccaaaggacuagaga

SEQ ID NO: 1993356 - RNA, 19 nt, Artificial Sequence
  Description of Artificial Sequence: Synthetic oligonucleotide
  Sense strand starting at position 3335 of SEQ ID NO: 1880779
gaccgugaugcagaagagu

SEQ ID NO: 1993357 - RNA, 19 nt, Artificial Sequence
  Description of Artificial Sequence: Synthetic oligonucleotide
  Antisense strand to SEQ ID NO: 1993356
acucuucugcaucacgguc

SEQ ID NO: 1993358 - RNA, 19 nt, Artificial Sequence
  Description of Artificial Sequence: Synthetic oligonucleotide
  Sense strand starting at position 3348 of SEQ ID NO: 1880779
aagagucagaagcgagaaa

SEQ ID NO: 1993359 - RNA, 19 nt, Artificial Sequence
  Description of Artificial Sequence: Synthetic oligonucleotide
  Antisense strand to SEQ ID NO: 1993358
uuucucgcuucugacucuu

SEQ ID NO: 1993360 - RNA, 19 nt, Artificial Sequence
  Description of Artificial Sequence: Synthetic oligonucleotide
  Sense strand starting at position 3453 of SEQ ID NO: 1880779
acgauuauuuacgacggua

SEQ ID NO: 1993361 - RNA, 19 nt, Artificial Sequence
  Description of Artificial Sequence: Synthetic oligonucleotide
  Antisense strand to SEQ ID NO: 1993360
uaccgucguaaauaaucgu

SEQ ID NO: 1993362 - RNA, 19 nt, Artificial Sequence
  Description of Artificial Sequence: Synthetic oligonucleotide
  Sense strand starting at position 3475 of SEQ ID NO: 1880779
gaccucucgauaugaggga

SEQ ID NO: 1993363 - RNA, 19 nt, Artificial Sequence
  Description of Artificial Sequence: Synthetic oligonucleotide
  Antisense strand to SEQ ID NO: 1993362
ucccucauaucgagagguc

SEQ ID NO: 1993364 - RNA, 19 nt, Artificial Sequence
  Description of Artificial Sequence: Synthetic oligonucleotide
  Sense strand starting at position 3509 of SEQ ID NO: 1880779
ccguuugcucaucaaggga

SEQ ID NO: 1993365 - RNA, 19 nt, Artificial Sequence
  Description of Artificial Sequence: Synthetic oligonucleotide
  Antisense strand to SEQ ID NO: 1993364
ucccuugaugagcaaacgg

SEQ ID NO: 1993366 - RNA, 19 nt, Artificial Sequence
  Description of Artificial Sequence: Synthetic oligonucleotide
  Sense strand starting at position 3528 of SEQ ID NO: 1880779
uugggagaauagcaacauu

SEQ ID NO: 1993367 - RNA, 19 nt, Artificial Sequence
  Description of Artificial Sequence: Synthetic oligonucleotide
  Antisense strand to SEQ ID NO: 1993366
aauguugcuauucucccaa

SEQ ID NO: 1993368 - RNA, 19 nt, Artificial Sequence
  Description of Artificial Sequence: Synthetic oligonucleotide
  Sense strand starting at position 3546 of SEQ ID NO: 1880779
ugauguugcgaccauauag

SEQ ID NO: 1993369 - RNA, 19 nt, Artificial Sequence
  Description of Artificial Sequence: Synthetic oligonucleotide
  Antisense strand to SEQ ID NO: 1993368
cuauauggucgcaacauca

SEQ ID NO: 1993370 - RNA, 19 nt, Artificial Sequence
  Description of Artificial Sequence: Synthetic oligonucleotide
  Sense strand starting at position 3574 of SEQ ID NO: 1880779
agcacagugccucagagua

SEQ ID NO: 1993371 - RNA, 19 nt, Artificial Sequence
  Description of Artificial Sequence: Synthetic oligonucleotide
  Antisense strand to SEQ ID NO: 1993370
uacucugaggcacugugcu

SEQ ID NO: 1993372 - RNA, 19 nt, Artificial Sequence
  Description of Artificial Sequence: Synthetic oligonucleotide
  Sense strand starting at position 3579 of SEQ ID NO: 1880779
agugccucagaguauugaa

SEQ ID NO: 1993373 - RNA, 19 nt, Artificial Sequence
  Description of Artificial Sequence: Synthetic oligonucleotide
  Antisense strand to SEQ ID NO: 1993372
uucaauacucugaggcacu

SEQ ID NO: 1993374 - RNA, 19 nt, Artificial Sequence
  Description of Artificial Sequence: Synthetic oligonucleotide
  Sense strand starting at position 3637 of SEQ ID NO: 1880779
ugaugaucugguuaucuug

SEQ ID NO: 1993375 - RNA, 19 nt, Artificial Sequence
  Description of Artificial Sequence: Synthetic oligonucleotide
  Antisense strand to SEQ ID NO: 1993374
caagauaaccagaucauca

SEQ ID NO: 1993376 - RNA, 19 nt, Artificial Sequence
  Description of Artificial Sequence: Synthetic oligonucleotide
  Sense strand starting at position 3644 of SEQ ID NO: 1880779
cugguuaucuuguuaaauu

SEQ ID NO: 1993377 - RNA, 19 nt, Artificial Sequence
  Description of Artificial Sequence: Synthetic oligonucleotide
  Antisense strand to SEQ ID NO: 1993376
aauuuaacaagauaaccag

SEQ ID NO: 1993378 - RNA, 19 nt, Artificial Sequence
  Description of Artificial Sequence: Synthetic oligonucleotide
  Sense strand starting at position 3809 of SEQ ID NO: 1880779
agguaagguuaaccaaagu

SEQ ID NO: 1993379 - RNA, 19 nt, Artificial Sequence
  Description of Artificial Sequence: Synthetic oligonucleotide
  Antisense strand to SEQ ID NO: 1993378
acuuugguuaaccuuaccu

SEQ ID NO: 1993380 - RNA, 19 nt, Artificial Sequence
  Description of Artificial Sequence: Synthetic oligonucleotide
  Sense strand starting at position 3828 of SEQ ID NO: 1880779
caggacuccuuagaggaga

SEQ ID NO: 1993381 - RNA, 19 nt, Artificial Sequence
  Description of Artificial Sequence: Synthetic oligonucleotide
  Antisense strand to SEQ ID NO: 1993380
ucuccucuaaggaguccug

SEQ ID NO: 1993382 - RNA, 19 nt, Artificial Sequence
  Description of Artificial Sequence: Synthetic oligonucleotide
  Sense strand starting at position 3860 of SEQ ID NO: 1880779
ggaggugucaaauauugua

SEQ ID NO: 1993383 - RNA, 19 nt, Artificial Sequence
  Description of Artificial Sequence: Synthetic oligonucleotide
  Antisense strand to SEQ ID NO: 1993382
uacaauauuugacaccucc

SEQ ID NO: 1993384 - RNA, 19 nt, Artificial Sequence
  Description of Artificial Sequence: Synthetic oligonucleotide
  Sense strand starting at position 3872 of SEQ ID NO: 1880779
uauuguaucucuguguuac

SEQ ID NO: 1993385 - RNA, 19 nt, Artificial Sequence
  Description of Artificial Sequence: Synthetic oligonucleotide
  Antisense strand to SEQ ID NO: 1993384
guaacacagagauacaaua

SEQ ID NO: 1993386 - RNA, 19 nt, Artificial Sequence
  Description of Artificial Sequence: Synthetic oligonucleotide
  Sense strand starting at position 3874 of SEQ ID NO: 1880779
uuguaucucuguguuacaa

SEQ ID NO: 1993387 - RNA, 19 nt, Artificial Sequence
  Description of Artificial Sequence: Synthetic oligonucleotide
  Antisense strand to SEQ ID NO: 1993386
uuguaacacagagauacaa

SEQ ID NO: 1993388 - RNA, 19 nt, Artificial Sequence
  Description of Artificial Sequence: Synthetic oligonucleotide
  Sense strand starting at position 3933 of SEQ ID NO: 1880779
accauaaauuuguguuaga

SEQ ID NO: 1993389 - RNA, 19 nt, Artificial Sequence
  Description of Artificial Sequence: Synthetic oligonucleotide
  Antisense strand to SEQ ID NO: 1993388
ucuaacacaaauuuauggu

SEQ ID NO: 1993390 - RNA, 19 nt, Artificial Sequence
  Description of Artificial Sequence: Synthetic oligonucleotide
  Sense strand starting at position 3936 of SEQ ID NO: 1880779
auaaauuuguguuagaacg

SEQ ID NO: 1993391 - RNA, 19 nt, Artificial Sequence
  Description of Artificial Sequence: Synthetic oligonucleotide
  Antisense strand to SEQ ID NO: 1993390
cguucuaacacaaauuuau

SEQ ID NO: 1993392 - RNA, 19 nt, Artificial Sequence
  Description of Artificial Sequence: Synthetic oligonucleotide
  Sense strand starting at position 3938 of SEQ ID NO: 1880779
aaauuuguguuagaacgga

SEQ ID NO: 1993393 - RNA, 19 nt, Artificial Sequence
  Description of Artificial Sequence: Synthetic oligonucleotide
  Antisense strand to SEQ ID NO: 1993392
uccguucuaacacaaauuu

SEQ ID NO: 1993394 - RNA, 19 nt, Artificial Sequence
  Description of Artificial Sequence: Synthetic oligonucleotide
  Sense strand starting at position 59 of SEQ ID NO: 1880781
acugaagaguucucugauu

SEQ ID NO: 1993395 - RNA, 19 nt, Artificial Sequence
  Description of Artificial Sequence: Synthetic oligonucleotide
  Antisense strand to SEQ ID NO: 1993394
aaucagagaacucuucagu

SEQ ID NO: 1993396 - RNA, 19 nt, Artificial Sequence
  Description of Artificial Sequence: Synthetic oligonucleotide
  Sense strand starting at position 61 of SEQ ID NO: 1880781
ugaagaguucucugauucc

SEQ ID NO: 1993397 - RNA, 19 nt, Artificial Sequence
  Description of Artificial Sequence: Synthetic oligonucleotide
  Antisense strand to SEQ ID NO: 1993396
ggaaucagagaacucuuca

SEQ ID NO: 1993398 - RNA, 19 nt, Artificial Sequence
  Description of Artificial Sequence: Synthetic oligonucleotide
  Sense strand starting at position 266 of SEQ ID NO: 1880781
gcuagacauuugucgcaca

SEQ ID NO: 1993399 - RNA, 19 nt, Artificial Sequence
  Description of Artificial Sequence: Synthetic oligonucleotide
  Antisense strand to SEQ ID NO: 1993398
ugugcgacaaaugucuagc

SEQ ID NO: 1993400 - RNA, 19 nt, Artificial Sequence
  Description of Artificial Sequence: Synthetic oligonucleotide
  Sense strand starting at position 475 of SEQ ID NO: 1880781
uucuguucucagcacugaa

SEQ ID NO: 1993401 - RNA, 19 nt, Artificial Sequence
  Description of Artificial Sequence: Synthetic oligonucleotide
  Antisense strand to SEQ ID NO: 1993400
uucagugcugagaacagaa

SEQ ID NO: 1993402 - RNA, 19 nt, Artificial Sequence
  Description of Artificial Sequence: Synthetic oligonucleotide
  Sense strand starting at position 679 of SEQ ID NO: 1880781
gccuuauuugcucacuugu

SEQ ID NO: 1993403 - RNA, 19 nt, Artificial Sequence
  Description of Artificial Sequence: Synthetic oligonucleotide
  Antisense strand to SEQ ID NO: 1993402
acaagugagcaaauaaggc

SEQ ID NO: 1993404 - RNA, 19 nt, Artificial Sequence
  Description of Artificial Sequence: Synthetic oligonucleotide
  Sense strand starting at position 782 of SEQ ID NO: 1880781
guaacuucucaauacaugu

SEQ ID NO: 1993405 - RNA, 19 nt, Artificial Sequence
  Description of Artificial Sequence: Synthetic oligonucleotide
  Antisense strand to SEQ ID NO: 1993404
acauguauugagaaguuac

SEQ ID NO: 1993406 - RNA, 19 nt, Artificial Sequence
  Description of Artificial Sequence: Synthetic oligonucleotide
  Sense strand starting at position 996 of SEQ ID NO: 1880781
augcuauaaggugacauau

SEQ ID NO: 1993407 - RNA, 19 nt, Artificial Sequence
  Description of Artificial Sequence: Synthetic oligonucleotide
  Antisense strand to SEQ ID NO: 1993406
auaugucaccuuauagcau

SEQ ID NO: 1993408 - RNA, 19 nt, Artificial Sequence
  Description of Artificial Sequence: Synthetic oligonucleotide
  Sense strand starting at position 1101 of SEQ ID NO: 1880781
gaggcuggaucaucacgua

SEQ ID NO: 1993409 - RNA, 19 nt, Artificial Sequence
  Description of Artificial Sequence: Synthetic oligonucleotide
  Antisense strand to SEQ ID NO: 1993408
uacgugaugauccagccuc

SEQ ID NO: 1993410 - RNA, 19 nt, Artificial Sequence
  Description of Artificial Sequence: Synthetic oligonucleotide
  Sense strand starting at position 1144 of SEQ ID NO: 1880781
agccuaagugugucaugcu

SEQ ID NO: 1993411 - RNA, 19 nt, Artificial Sequence
  Description of Artificial Sequence: Synthetic oligonucleotide
  Antisense strand to SEQ ID NO: 1993410
agcaugacacacuuaggcu

SEQ ID NO: 1993412 - RNA, 19 nt, Artificial Sequence
  Description of Artificial Sequence: Synthetic oligonucleotide
  Sense strand starting at position 1152 of SEQ ID NO: 1880781
ugugucaugcuggacaagu

SEQ ID NO: 1993413 - RNA, 19 nt, Artificial Sequence
  Description of Artificial Sequence: Synthetic oligonucleotide
  Antisense strand to SEQ ID NO: 1993412
acuuguccagcaugacaca

SEQ ID NO: 1993414 - RNA, 19 nt, Artificial Sequence
  Description of Artificial Sequence: Synthetic oligonucleotide
  Sense strand starting at position 1187 of SEQ ID NO: 1880781
ggaucucagcugcauauua

SEQ ID NO: 1993415 - RNA, 19 nt, Artificial Sequence
  Description of Artificial Sequence: Synthetic oligonucleotide
  Antisense strand to SEQ ID NO: 1993414
uaauaugcagcugagaucc

SEQ ID NO: 1993416 - RNA, 19 nt, Artificial Sequence
  Description of Artificial Sequence: Synthetic oligonucleotide
  Sense strand starting at position 1240 of SEQ ID NO: 1880781
acgagaagauuggaagaga

SEQ ID NO: 1993417 - RNA, 19 nt, Artificial Sequence
  Description of Artificial Sequence: Synthetic oligonucleotide
  Antisense strand to SEQ ID NO: 1993416
ucucuuccaaucuucucgu

SEQ ID NO: 1993418 - RNA, 19 nt, Artificial Sequence
  Description of Artificial Sequence: Synthetic oligonucleotide
  Sense strand starting at position 1343 of SEQ ID NO: 1880781
accauaaauucugcagaug

SEQ ID NO: 1993419 - RNA, 19 nt, Artificial Sequence
  Description of Artificial Sequence: Synthetic oligonucleotide
  Antisense strand to SEQ ID NO: 1993418
caucugcagaauuuauggu

SEQ ID NO: 1993420 - RNA, 19 nt, Artificial Sequence
  Description of Artificial Sequence: Synthetic oligonucleotide
  Sense strand starting at position 1346 of SEQ ID NO: 1880781
auaaauucugcagaugcga

SEQ ID NO: 1993421 - RNA, 19 nt, Artificial Sequence
  Description of Artificial Sequence: Synthetic oligonucleotide
  Antisense strand to SEQ ID NO: 1993420
ucgcaucugcagaauuuau

SEQ ID NO: 1993422 - RNA, 19 nt, Artificial Sequence
  Description of Artificial Sequence: Synthetic oligonucleotide
  Sense strand starting at position 1385 of SEQ ID NO: 1880781
acuguuguaucccuaagac

SEQ ID NO: 1993423 - RNA, 19 nt, Artificial Sequence
  Description of Artificial Sequence: Synthetic oligonucleotide
  Antisense strand to SEQ ID NO: 1993422
gucuuagggauacaacagu

SEQ ID NO: 1993424 - RNA, 19 nt, Artificial Sequence
  Description of Artificial Sequence: Synthetic oligonucleotide
  Sense strand starting at position 1394 of SEQ ID NO: 1880781
ucccuaagaccuggcaaau

SEQ ID NO: 1993425 - RNA, 19 nt, Artificial Sequence
  Description of Artificial Sequence: Synthetic oligonucleotide
  Antisense strand to SEQ ID NO: 1993424
auuugccaggucuuaggga

SEQ ID NO: 1993426 - RNA, 19 nt, Artificial Sequence
  Description of Artificial Sequence: Synthetic oligonucleotide
  Sense strand starting at position 1453 of SEQ ID NO: 1880781
agaugugucaacgaaucug

SEQ ID NO: 1993427 - RNA, 19 nt, Artificial Sequence
  Description of Artificial Sequence: Synthetic oligonucleotide
  Antisense strand to SEQ ID NO: 1993426
cagauucguugacacaucu

SEQ ID NO: 1993428 - RNA, 19 nt, Artificial Sequence
  Description of Artificial Sequence: Synthetic oligonucleotide
  Sense strand starting at position 1531 of SEQ ID NO: 1880781
uugcguucucuggaacaga

SEQ ID NO: 1993429 - RNA, 19 nt, Artificial Sequence
  Description of Artificial Sequence: Synthetic oligonucleotide
  Antisense strand to SEQ ID NO: 1993428
ucuguuccagagaacgcaa

SEQ ID NO: 1993430 - RNA, 19 nt, Artificial Sequence
  Description of Artificial Sequence: Synthetic oligonucleotide
  Sense strand starting at position 1574 of SEQ ID NO: 1880781
gcucacugacccugauuau

SEQ ID NO: 1993431 - RNA, 19 nt, Artificial Sequence
  Description of Artificial Sequence: Synthetic oligonucleotide
  Antisense strand to SEQ ID NO: 1993430
auaaucagggucagugagc

SEQ ID NO: 1993432 - RNA, 19 nt, Artificial Sequence
  Description of Artificial Sequence: Synthetic oligonucleotide
  Sense strand starting at position 1585 of SEQ ID NO: 1880781
cugauuaucccuuggucca

SEQ ID NO: 1993433 - RNA, 19 nt, Artificial Sequence
  Description of Artificial Sequence: Synthetic oligonucleotide
  Antisense strand to SEQ ID NO: 1993432
uggaccaagggauaaucag

SEQ ID NO: 1993434 - RNA, 19 nt, Artificial Sequence
  Description of Artificial Sequence: Synthetic oligonucleotide
  Sense strand starting at position 2563 of SEQ ID NO: 1880781
gagugaacccagcgaauga

SEQ ID NO: 1993435 - RNA, 19 nt, Artificial Sequence
  Description of Artificial Sequence: Synthetic oligonucleotide
  Antisense strand to SEQ ID NO: 1993434
ucauucgcuggguucacuc

SEQ ID NO: 1993436 - RNA, 19 nt, Artificial Sequence
  Description of Artificial Sequence: Synthetic oligonucleotide
  Sense strand starting at position 2593 of SEQ ID NO: 1880781
gugcgaauuccgaguggaa

SEQ ID NO: 1993437 - RNA, 19 nt, Artificial Sequence
  Description of Artificial Sequence: Synthetic oligonucleotide
  Antisense strand to SEQ ID NO: 1993436
uuccacucggaauucgcac

SEQ ID NO: 1993438 - RNA, 19 nt, Artificial Sequence
  Description of Artificial Sequence: Synthetic oligonucleotide
  Sense strand starting at position 2636 of SEQ ID NO: 1880781
guuucugcgauguuacguu

SEQ ID NO: 1993439 - RNA, 19 nt, Artificial Sequence
  Description of Artificial Sequence: Synthetic oligonucleotide
  Antisense strand to SEQ ID NO: 1993438
aacguaacaucgcagaaac

SEQ ID NO: 1993440 - RNA, 19 nt, Artificial Sequence
  Description of Artificial Sequence: Synthetic oligonucleotide
  Sense strand starting at position 2648 of SEQ ID NO: 1880781
uuacguuagaaguacugua

SEQ ID NO: 1993441 - RNA, 19 nt, Artificial Sequence
  Description of Artificial Sequence: Synthetic oligonucleotide
  Antisense strand to SEQ ID NO: 1993440
uacaguacuucuaacguaa

SEQ ID NO: 1993442 - RNA, 19 nt, Artificial Sequence
  Description of Artificial Sequence: Synthetic oligonucleotide
  Sense strand starting at position 3023 of SEQ ID NO: 1880781
guaucuaaaccuggauauu

SEQ ID NO: 1993443 - RNA, 19 nt, Artificial Sequence
  Description of Artificial Sequence: Synthetic oligonucleotide
  Antisense strand to SEQ ID NO: 1993442
aauauccagguuuagauac

SEQ ID NO: 1993444 - RNA, 19 nt, Artificial Sequence
  Description of Artificial Sequence: Synthetic oligonucleotide
  Sense strand starting at position 3059 of SEQ ID NO: 1880781
uccuuaaaguaaucuguuu

SEQ ID NO: 1993445 - RNA, 19 nt, Artificial Sequence
  Description of Artificial Sequence: Synthetic oligonucleotide
  Antisense strand to SEQ ID NO: 1993444
aaacagauuacuuuaagga

SEQ ID NO: 1993446 - RNA, 19 nt, Artificial Sequence
  Description of Artificial Sequence: Synthetic oligonucleotide
  Sense strand starting at position 3266 of SEQ ID NO: 1880781
ucagaauuagguugagagu

SEQ ID NO: 1993447 - RNA, 19 nt, Artificial Sequence
  Description of Artificial Sequence: Synthetic oligonucleotide
  Antisense strand to SEQ ID NO: 1993446
acucucaaccuaauucuga

SEQ ID NO: 1993448 - RNA, 19 nt, Artificial Sequence
  Description of Artificial Sequence: Synthetic oligonucleotide
  Sense strand starting at position 3281 of SEQ ID NO: 1880781
gaguucuucguggacccua

SEQ ID NO: 1993449 - RNA, 19 nt, Artificial Sequence
  Description of Artificial Sequence: Synthetic oligonucleotide
  Antisense strand to SEQ ID NO: 1993448
uaggguccacgaagaacuc

SEQ ID NO: 1993450 - RNA, 19 nt, Artificial Sequence
  Description of Artificial Sequence: Synthetic oligonucleotide
  Sense strand starting at position 3286 of SEQ ID NO: 1880781
cuucguggacccuauauca

SEQ ID NO: 1993451 - RNA, 19 nt, Artificial Sequence
  Description of Artificial Sequence: Synthetic oligonucleotide
  Antisense strand to SEQ ID NO: 1993450
ugauauaggguccacgaag

SEQ ID NO: 1993452 - RNA, 19 nt, Artificial Sequence
  Description of Artificial Sequence: Synthetic oligonucleotide
  Sense strand starting at position 3393 of SEQ ID NO: 1880781
uacauuuagccauguacgu

SEQ ID NO: 1993453 - RNA, 19 nt, Artificial Sequence
  Description of Artificial Sequence: Synthetic oligonucleotide
  Antisense strand to SEQ ID NO: 1993452
acguacauggcuaaaugua

SEQ ID NO: 1993454 - RNA, 19 nt, Artificial Sequence
  Description of Artificial Sequence: Synthetic oligonucleotide
  Sense strand starting at position 3399 of SEQ ID NO: 1880781
uagccauguacguagggau

SEQ ID NO: 1993455 - RNA, 19 nt, Artificial Sequence
  Description of Artificial Sequence: Synthetic oligonucleotide
  Antisense strand to SEQ ID NO: 1993454
aucccuacguacauggcua

SEQ ID NO: 1993456 - RNA, 19 nt, Artificial Sequence
  Description of Artificial Sequence: Synthetic oligonucleotide
  Sense strand starting at position 3403 of SEQ ID NO: 1880781
cauguacguagggauauau

SEQ ID NO: 1993457 - RNA, 19 nt, Artificial Sequence
  Description of Artificial Sequence: Synthetic oligonucleotide
  Antisense strand to SEQ ID NO: 1993456
auauaucccuacguacaug

SEQ ID NO: 1993458 - RNA, 19 nt, Artificial Sequence
  Description of Artificial Sequence: Synthetic oligonucleotide
  Sense strand starting at position 3413 of SEQ ID NO: 1880781
gggauauauuccuuaacuc

SEQ ID NO: 1993459 - RNA, 19 nt, Artificial Sequence
  Description of Artificial Sequence: Synthetic oligonucleotide
  Antisense strand to SEQ ID NO: 1993458
gaguuaaggaauauauccc

SEQ ID NO: 1993460 - RNA, 19 nt, Artificial Sequence
  Description of Artificial Sequence: Synthetic oligonucleotide
  Sense strand starting at position 3519 of SEQ ID NO: 1880781
ggcauaauagaaugguuag

SEQ ID NO: 1993461 - RNA, 19 nt, Artificial Sequence
  Description of Artificial Sequence: Synthetic oligonucleotide
  Antisense strand to SEQ ID NO: 1993460
cuaaccauucuauuaugcc

SEQ ID NO: 1993462 - RNA, 19 nt, Artificial Sequence
  Description of Artificial Sequence: Synthetic oligonucleotide
  Sense strand starting at position 3520 of SEQ ID NO: 1880781
gcauaauagaaugguuaga

SEQ ID NO: 1993463 - RNA, 19 nt, Artificial Sequence
  Description of Artificial Sequence: Synthetic oligonucleotide
  Antisense strand to SEQ ID NO: 1993462
ucuaaccauucuauuaugc

SEQ ID NO: 1993464 - RNA, 19 nt, Artificial Sequence
  Description of Artificial Sequence: Synthetic oligonucleotide
  Sense strand starting at position 3704 of SEQ ID NO: 1880781
ccaccauguuaccuaagga

SEQ ID NO: 1993465 - RNA, 19 nt, Artificial Sequence
  Description of Artificial Sequence: Synthetic oligonucleotide
  Antisense strand to SEQ ID NO: 1993464
uccuuagguaacauggugg

SEQ ID NO: 1993466 - RNA, 19 nt, Artificial Sequence
  Description of Artificial Sequence: Synthetic oligonucleotide
  Sense strand starting at position 3730 of SEQ ID NO: 1880781
agcggcucaggucagaaau

SEQ ID NO: 1993467 - RNA, 19 nt, Artificial Sequence
  Description of Artificial Sequence: Synthetic oligonucleotide
  Antisense strand to SEQ ID NO: 1993466
auuucugaccugagccgcu

SEQ ID NO: 1993468 - RNA, 19 nt, Artificial Sequence
  Description of Artificial Sequence: Synthetic oligonucleotide
  Sense strand starting at position 3782 of SEQ ID NO: 1880781
ugggaucaugccugugacu

SEQ ID NO: 1993469 - RNA, 19 nt, Artificial Sequence
  Description of Artificial Sequence: Synthetic oligonucleotide
  Antisense strand to SEQ ID NO: 1993468
agucacaggcaugauccca

SEQ ID NO: 1993470 - RNA, 19 nt, Artificial Sequence
  Description of Artificial Sequence: Synthetic oligonucleotide
  Sense strand starting at position 3784 of SEQ ID NO: 1880781
ggaucaugccugugacuaa

SEQ ID NO: 1993471 - RNA, 19 nt, Artificial Sequence
  Description of Artificial Sequence: Synthetic oligonucleotide
  Antisense strand to SEQ ID NO: 1993470
uuagucacaggcaugaucc

SEQ ID NO: 1993472 - RNA, 19 nt, Artificial Sequence
  Description of Artificial Sequence: Synthetic oligonucleotide
  Sense strand starting at position 3918 of SEQ ID NO: 1880781
gaaagaccuuagguaaguu

SEQ ID NO: 1993473 - RNA, 19 nt, Artificial Sequence
  Description of Artificial Sequence: Synthetic oligonucleotide
  Antisense strand to SEQ ID NO: 1993472
aacuuaccuaaggucuuuc

SEQ ID NO: 1993474 - RNA, 19 nt, Artificial Sequence
  Description of Artificial Sequence: Synthetic oligonucleotide
  Sense strand starting at position 174 of SEQ ID NO: 1880782
acaucaagaguuugucuau

SEQ ID NO: 1993475 - RNA, 19 nt, Artificial Sequence
  Description of Artificial Sequence: Synthetic oligonucleotide
  Antisense strand to SEQ ID NO: 1993474
auagacaaacucuugaugu

SEQ ID NO: 1993476 - RNA, 19 nt, Artificial Sequence
  Description of Artificial Sequence: Synthetic oligonucleotide
  Sense strand starting at position 389 of SEQ ID NO: 1880782
gugcauauucuugccaguu

SEQ ID NO: 1993477 - RNA, 19 nt, Artificial Sequence
  Description of Artificial Sequence: Synthetic oligonucleotide
  Antisense strand to SEQ ID NO: 1993476
aacuggcaagaauaugcac

SEQ ID NO: 1993478 - RNA, 19 nt, Artificial Sequence
  Description of Artificial Sequence: Synthetic oligonucleotide
  Sense strand starting at position 509 of SEQ ID NO: 1880782
ggcgaugucacccaacaau

SEQ ID NO: 1993479 - RNA, 19 nt, Artificial Sequence
  Description of Artificial Sequence: Synthetic oligonucleotide
  Antisense strand to SEQ ID NO: 1993478
auuguugggugacaucgcc

SEQ ID NO: 1993480 - RNA, 19 nt, Artificial Sequence
  Description of Artificial Sequence: Synthetic oligonucleotide
  Sense strand starting at position 654 of SEQ ID NO: 1880782
cccugaagggaugguucua

SEQ ID NO: 1993481 - RNA, 19 nt, Artificial Sequence
  Description of Artificial Sequence: Synthetic oligonucleotide
  Antisense strand to SEQ ID NO: 1993480
uagaaccaucccuucaggg

SEQ ID NO: 1993482 - RNA, 19 nt, Artificial Sequence
  Description of Artificial Sequence: Synthetic oligonucleotide
  Sense strand starting at position 686 of SEQ ID NO: 1880782
gaggguuccagcuaaguuu

SEQ ID NO: 1993483 - RNA, 19 nt, Artificial Sequence
  Description of Artificial Sequence: Synthetic oligonucleotide
  Antisense strand to SEQ ID NO: 1993482
aaacuuagcuggaacccuc

SEQ ID NO: 1993484 - RNA, 19 nt, Artificial Sequence
  Description of Artificial Sequence: Synthetic oligonucleotide
  Sense strand starting at position 762 of SEQ ID NO: 1880782
ggauauccauacuuaguau

SEQ ID NO: 1993485 - RNA, 19 nt, Artificial Sequence
  Description of Artificial Sequence: Synthetic oligonucleotide
  Antisense strand to SEQ ID NO: 1993484
auacuaaguauggauaucc

SEQ ID NO: 1993486 - RNA, 19 nt, Artificial Sequence
  Description of Artificial Sequence: Synthetic oligonucleotide
  Sense strand starting at position 768 of SEQ ID NO: 1880782
ccauacuuaguauagucau

SEQ ID NO: 1993487 - RNA, 19 nt, Artificial Sequence
  Description of Artificial Sequence: Synthetic oligonucleotide
  Antisense strand to SEQ ID NO: 1993486
augacuauacuaaguaugg

SEQ ID NO: 1993488 - RNA, 19 nt, Artificial Sequence
  Description of Artificial Sequence: Synthetic oligonucleotide
  Sense strand starting at position 774 of SEQ ID NO: 1880782
uuaguauagucauccacag

SEQ ID NO: 1993489 - RNA, 19 nt, Artificial Sequence
  Description of Artificial Sequence: Synthetic oligonucleotide
  Antisense strand to SEQ ID NO: 1993488
cuguggaugacuauacuaa

SEQ ID NO: 1993490 - RNA, 19 nt, Artificial Sequence
  Description of Artificial Sequence: Synthetic oligonucleotide
  Sense strand starting at position 781 of SEQ ID NO: 1880782
agucauccacaguauuguu

SEQ ID NO: 1993491 - RNA, 19 nt, Artificial Sequence
  Description of Artificial Sequence: Synthetic oligonucleotide
  Antisense strand to SEQ ID NO: 1993490
aacaauacuguggaugacu

SEQ ID NO: 1993492 - RNA, 19 nt, Artificial Sequence
  Description of Artificial Sequence: Synthetic oligonucleotide
  Sense strand starting at position 786 of SEQ ID NO: 1880782
uccacaguauuguuuggaa

SEQ ID NO: 1993493 - RNA, 19 nt, Artificial Sequence
  Description of Artificial Sequence: Synthetic oligonucleotide
  Antisense strand to SEQ ID NO: 1993492
uuccaaacaauacugugga

SEQ ID NO: 1993494 - RNA, 19 nt, Artificial Sequence
  Description of Artificial Sequence: Synthetic oligonucleotide
  Sense strand starting at position 821 of SEQ ID NO: 1880782
ggaagaaucuguuuggcaa

SEQ ID NO: 1993495 - RNA, 19 nt, Artificial Sequence
  Description of Artificial Sequence: Synthetic oligonucleotide
  Antisense strand to SEQ ID NO: 1993494
uugccaaacagauucuucc

SEQ ID NO: 1993496 - RNA, 19 nt, Artificial Sequence
  Description of Artificial Sequence: Synthetic oligonucleotide
  Sense strand starting at position 822 of SEQ ID NO: 1880782
gaagaaucuguuuggcaaa

SEQ ID NO: 1993497 - RNA, 19 nt, Artificial Sequence
  Description of Artificial Sequence: Synthetic oligonucleotide
  Antisense strand to SEQ ID NO: 1993496
uuugccaaacagauucuuc

SEQ ID NO: 1993498 - RNA, 19 nt, Artificial Sequence
  Description of Artificial Sequence: Synthetic oligonucleotide
  Sense strand starting at position 824 of SEQ ID NO: 1880782
agaaucuguuuggcaaaua

SEQ ID NO: 1993499 - RNA, 19 nt, Artificial Sequence
  Description of Artificial Sequence: Synthetic oligonucleotide
  Antisense strand to SEQ ID NO: 1993498
uauuugccaaacagauucu

SEQ ID NO: 1993500 - RNA, 19 nt, Artificial Sequence
  Description of Artificial Sequence: Synthetic oligonucleotide
  Sense strand starting at position 1224 of SEQ ID NO: 1880782
uauuuaagguuucccgagu

SEQ ID NO: 1993501 - RNA, 19 nt, Artificial Sequence
  Description of Artificial Sequence: Synthetic oligonucleotide
  Antisense strand to SEQ ID NO: 1993500
acucgggaaaccuuaaaua

SEQ ID NO: 1993502 - RNA, 19 nt, Artificial Sequence
  Description of Artificial Sequence: Synthetic oligonucleotide
  Sense strand starting at position 1274 of SEQ ID NO: 1880782
acaggcauuggcuaucauu

SEQ ID NO: 1993503 - RNA, 19 nt, Artificial Sequence
  Description of Artificial Sequence: Synthetic oligonucleotide
  Antisense strand to SEQ ID NO: 1993502
aaugauagccaaugccugu

SEQ ID NO: 1993504 - RNA, 19 nt, Artificial Sequence
  Description of Artificial Sequence: Synthetic oligonucleotide
  Sense strand starting at position 1344 of SEQ ID NO: 1880782
ucuuucuggguggaguuaa

SEQ ID NO: 1993505 - RNA, 19 nt, Artificial Sequence
  Description of Artificial Sequence: Synthetic oligonucleotide
  Antisense strand to SEQ ID NO: 1993504
uuaacuccacccagaaaga

SEQ ID NO: 1993506 - RNA, 19 nt, Artificial Sequence
  Description of Artificial Sequence: Synthetic oligonucleotide
  Sense strand starting at position 1392 of SEQ ID NO: 1880782
ccuauuagguccuuaauga

SEQ ID NO: 1993507 - RNA, 19 nt, Artificial Sequence
  Description of Artificial Sequence: Synthetic oligonucleotide
  Antisense strand to SEQ ID NO: 1993506
ucauuaaggaccuaauagg

SEQ ID NO: 1993508 - RNA, 19 nt, Artificial Sequence
  Description of Artificial Sequence: Synthetic oligonucleotide
  Sense strand starting at position 1393 of SEQ ID NO: 1880782
cuauuagguccuuaaugau

SEQ ID NO: 1993509 - RNA, 19 nt, Artificial Sequence
  Description of Artificial Sequence: Synthetic oligonucleotide
  Antisense strand to SEQ ID NO: 1993508
aucauuaaggaccuaauag

SEQ ID NO: 1993510 - RNA, 19 nt, Artificial Sequence
  Description of Artificial Sequence: Synthetic oligonucleotide
  Sense strand starting at position 1439 of SEQ ID NO: 1880782
cuaagauagugaguucuga

SEQ ID NO: 1993511 - RNA, 19 nt, Artificial Sequence
  Description of Artificial Sequence: Synthetic oligonucleotide
  Antisense strand to SEQ ID NO: 1993510
ucagaacucacuaucuuag

SEQ ID NO: 1993512 - RNA, 19 nt, Artificial Sequence
  Description of Artificial Sequence: Synthetic oligonucleotide
  Sense strand starting at position 1529 of SEQ ID NO: 1880782
uguagagaucgguaauauc

SEQ ID NO: 1993513 - RNA, 19 nt, Artificial Sequence
  Description of Artificial Sequence: Synthetic oligonucleotide
  Antisense strand to SEQ ID NO: 1993512
gauauuaccgaucucuaca

SEQ ID NO: 1993514 - RNA, 19 nt, Artificial Sequence
  Description of Artificial Sequence: Synthetic oligonucleotide
  Sense strand starting at position 1600 of SEQ ID NO: 1880782
gcuaguaaacuugauagua

SEQ ID NO: 1993515 - RNA, 19 nt, Artificial Sequence
  Description of Artificial Sequence: Synthetic oligonucleotide
  Antisense strand to SEQ ID NO: 1993514
uacuaucaaguuuacuagc

SEQ ID NO: 1993516 - RNA, 19 nt, Artificial Sequence
  Description of Artificial Sequence: Synthetic oligonucleotide
  Sense strand starting at position 1854 of SEQ ID NO: 1880782
gguuuaugagguuaugaau

SEQ ID NO: 1993517 - RNA, 19 nt, Artificial Sequence
  Description of Artificial Sequence: Synthetic oligonucleotide
  Antisense strand to SEQ ID NO: 1993516
auucauaaccucauaaacc

SEQ ID NO: 1993518 - RNA, 19 nt, Artificial Sequence
  Description of Artificial Sequence: Synthetic oligonucleotide
  Sense strand starting at position 1965 of SEQ ID NO: 1880782
ugacuuuaguaucugguaa

SEQ ID NO: 1993519 - RNA, 19 nt, Artificial Sequence
  Description of Artificial Sequence: Synthetic oligonucleotide
  Antisense strand to SEQ ID NO: 1993518
uuaccagauacuaaaguca

SEQ ID NO: 1993520 - RNA, 19 nt, Artificial Sequence
  Description of Artificial Sequence: Synthetic oligonucleotide
  Sense strand starting at position 2078 of SEQ ID NO: 1880782
cugagauguucuucuggga

SEQ ID NO: 1993521 - RNA, 19 nt, Artificial Sequence
  Description of Artificial Sequence: Synthetic oligonucleotide
  Antisense strand to SEQ ID NO: 1993520
ucccagaagaacaucucag

SEQ ID NO: 1993522 - RNA, 19 nt, Artificial Sequence
  Description of Artificial Sequence: Synthetic oligonucleotide
  Sense strand starting at position 2255 of SEQ ID NO: 1880782
caagucuccuugguagaac

SEQ ID NO: 1993523 - RNA, 19 nt, Artificial Sequence
  Description of Artificial Sequence: Synthetic oligonucleotide
  Antisense strand to SEQ ID NO: 1993522
guucuaccaaggagacuug

SEQ ID NO: 1993524 - RNA, 19 nt, Artificial Sequence
  Description of Artificial Sequence: Synthetic oligonucleotide
  Sense strand starting at position 2258 of SEQ ID NO: 1880782
gucuccuugguagaacaga

SEQ ID NO: 1993525 - RNA, 19 nt, Artificial Sequence
  Description of Artificial Sequence: Synthetic oligonucleotide
  Antisense strand to SEQ ID NO: 1993524
ucuguucuaccaaggagac

SEQ ID NO: 1993526 - RNA, 19 nt, Artificial Sequence
  Description of Artificial Sequence: Synthetic oligonucleotide
  Sense strand starting at position 2749 of SEQ ID NO: 1880782
agaggacuuucuguuugac

SEQ ID NO: 1993527 - RNA, 19 nt, Artificial Sequence
  Description of Artificial Sequence: Synthetic oligonucleotide
  Antisense strand to SEQ ID NO: 1993526
gucaaacagaaaguccucu

SEQ ID NO: 1993528 - RNA, 19 nt, Artificial Sequence
  Description of Artificial Sequence: Synthetic oligonucleotide
  Sense strand starting at position 2751 of SEQ ID NO: 1880782
aggacuuucuguuugacau

SEQ ID NO: 1993529 - RNA, 19 nt, Artificial Sequence
  Description of Artificial Sequence: Synthetic oligonucleotide
  Antisense strand to SEQ ID NO: 1993528
augucaaacagaaaguccu

SEQ ID NO: 1993530 - RNA, 19 nt, Artificial Sequence
  Description of Artificial Sequence: Synthetic oligonucleotide
  Sense strand starting at position 2752 of SEQ ID NO: 1880782
ggacuuucuguuugacaua

SEQ ID NO: 1993531 - RNA, 19 nt, Artificial Sequence
  Description of Artificial Sequence: Synthetic oligonucleotide
  Antisense strand to SEQ ID NO: 1993530
uaugucaaacagaaagucc

SEQ ID NO: 1993532 - RNA, 19 nt, Artificial Sequence
  Description of Artificial Sequence: Synthetic oligonucleotide
  Sense strand starting at position 3048 of SEQ ID NO: 1880782
aaguuuggugaaggaucuu

SEQ ID NO: 1993533 - RNA, 19 nt, Artificial Sequence
  Description of Artificial Sequence: Synthetic oligonucleotide
  Antisense strand to SEQ ID NO: 1993532
aagauccuucaccaaacuu

SEQ ID NO: 1993534 - RNA, 19 nt, Artificial Sequence
  Description of Artificial Sequence: Synthetic oligonucleotide
  Sense strand starting at position 3141 of SEQ ID NO: 1880782
aaguguauccucgagaggu

SEQ ID NO: 1993535 - RNA, 19 nt, Artificial Sequence
  Description of Artificial Sequence: Synthetic oligonucleotide
  Antisense strand to SEQ ID NO: 1993534
accucucgaggauacacuu

SEQ ID NO: 1993536 - RNA, 19 nt, Artificial Sequence
  Description of Artificial Sequence: Synthetic oligonucleotide
  Sense strand starting at position 3165 of SEQ ID NO: 1880782
auucuaucucugcaggaga

SEQ ID NO: 1993537 - RNA, 19 nt, Artificial Sequence
  Description of Artificial Sequence: Synthetic oligonucleotide
  Antisense strand to SEQ ID NO: 1993536
ucuccugcagagauagaau

SEQ ID NO: 1993538 - RNA, 19 nt, Artificial Sequence
  Description of Artificial Sequence: Synthetic oligonucleotide
  Sense strand starting at position 3167 of SEQ ID NO: 1880782
ucuaucucugcaggagaau

SEQ ID NO: 1993539 - RNA, 19 nt, Artificial Sequence
  Description of Artificial Sequence: Synthetic oligonucleotide
  Antisense strand to SEQ ID NO: 1993538
auucuccugcagagauaga

SEQ ID NO: 1993540 - RNA, 19 nt, Artificial Sequence
  Description of Artificial Sequence: Synthetic oligonucleotide
  Sense strand starting at position 3554 of SEQ ID NO: 1880782
cagcuaauugagcacugua

SEQ ID NO: 1993541 - RNA, 19 nt, Artificial Sequence
  Description of Artificial Sequence: Synthetic oligonucleotide
  Antisense strand to SEQ ID NO: 1993540
uacagugcucaauuagcug

SEQ ID NO: 1993542 - RNA, 19 nt, Artificial Sequence
  Description of Artificial Sequence: Synthetic oligonucleotide
  Sense strand starting at position 3599 of SEQ ID NO: 1880782
gaugucauccagggugacu

SEQ ID NO: 1993543 - RNA, 19 nt, Artificial Sequence
  Description of Artificial Sequence: Synthetic oligonucleotide
  Antisense strand to SEQ ID NO: 1993542
agucacccuggaugacauc

SEQ ID NO: 1993544 - RNA, 19 nt, Artificial Sequence
  Description of Artificial Sequence: Synthetic oligonucleotide
  Sense strand starting at position 3727 of SEQ ID NO: 1880782
auagguuugcaucacuauu

SEQ ID NO: 1993545 - RNA, 19 nt, Artificial Sequence
  Description of Artificial Sequence: Synthetic oligonucleotide
  Antisense strand to SEQ ID NO: 1993544
aauagugaugcaaaccuau

SEQ ID NO: 1993546 - RNA, 19 nt, Artificial Sequence
  Description of Artificial Sequence: Synthetic oligonucleotide
  Sense strand starting at position 3790 of SEQ ID NO: 1880782
aguggcugaguucaggaaa

SEQ ID NO: 1993547 - RNA, 19 nt, Artificial Sequence
  Description of Artificial Sequence: Synthetic oligonucleotide
  Antisense strand to SEQ ID NO: 1993546
uuuccugaacucagccacu

SEQ ID NO: 1993548 - RNA, 19 nt, Artificial Sequence
  Description of Artificial Sequence: Synthetic oligonucleotide
  Sense strand starting at position 3882 of SEQ ID NO: 1880782
gccagagacuuccuuuaga

SEQ ID NO: 1993549 - RNA, 19 nt, Artificial Sequence
  Description of Artificial Sequence: Synthetic oligonucleotide
  Antisense strand to SEQ ID NO: 1993548
ucuaaaggaagucucuggc

SEQ ID NO: 1993550 - RNA, 19 nt, Artificial Sequence
  Description of Artificial Sequence: Synthetic oligonucleotide
  Sense strand starting at position 3901 of SEQ ID NO: 1880782
ggauaacagucccuuuaca

SEQ ID NO: 1993551 - RNA, 19 nt, Artificial Sequence
  Description of Artificial Sequence: Synthetic oligonucleotide
  Antisense strand to SEQ ID NO: 1993550
uguaaagggacuguuaucc

SEQ ID NO: 1993552 - RNA, 19 nt, Artificial Sequence
  Description of Artificial Sequence: Synthetic oligonucleotide
  Sense strand starting at position 3928 of SEQ ID NO: 1880782
gguguaaacaaucagguca

SEQ ID NO: 1993553 - RNA, 19 nt, Artificial Sequence
  Description of Artificial Sequence: Synthetic oligonucleotide
  Antisense strand to SEQ ID NO: 1993552
ugaccugauuguuuacacc

SEQ ID NO: 1993554 - RNA, 19 nt, Artificial Sequence
  Description of Artificial Sequence: Synthetic oligonucleotide
  Sense strand starting at position 491 of SEQ ID NO: 1880783
aaagauacguacucagcua

SEQ ID NO: 1993555 - RNA, 19 nt, Artificial Sequence
  Description of Artificial Sequence: Synthetic oligonucleotide
  Antisense strand to SEQ ID NO: 1993554
uagcugaguacguaucuuu

SEQ ID NO: 1993556 - RNA, 19 nt, Artificial Sequence
  Description of Artificial Sequence: Synthetic oligonucleotide
  Sense strand starting at position 629 of SEQ ID NO: 1880783
gggauugguuuacucacau

SEQ ID NO: 1993557 - RNA, 19 nt, Artificial Sequence
  Description of Artificial Sequence: Synthetic oligonucleotide
  Antisense strand to SEQ ID NO: 1993556
augugaguaaaccaauccc

SEQ ID NO: 1993558 - RNA, 19 nt, Artificial Sequence
  Description of Artificial Sequence: Synthetic oligonucleotide
  Sense strand starting at position 786 of SEQ ID NO: 1880783
gaguaucugcauuauugac

SEQ ID NO: 1993559 - RNA, 19 nt, Artificial Sequence
  Description of Artificial Sequence: Synthetic oligonucleotide
  Antisense strand to SEQ ID NO: 1993558
gucaauaaugcagauacuc

SEQ ID NO: 1993560 - RNA, 19 nt, Artificial Sequence
  Description of Artificial Sequence: Synthetic oligonucleotide
  Sense strand starting at position 987 of SEQ ID NO: 1880783
ucagguaagucucuaugac

SEQ ID NO: 1993561 - RNA, 19 nt, Artificial Sequence
  Description of Artificial Sequence: Synthetic oligonucleotide
  Antisense strand to SEQ ID NO: 1993560
gucauagagacuuaccuga

SEQ ID NO: 1993562 - RNA, 19 nt, Artificial Sequence
  Description of Artificial Sequence: Synthetic oligonucleotide
  Sense strand starting at position 988 of SEQ ID NO: 1880783
cagguaagucucuaugaca

SEQ ID NO: 1993563 - RNA, 19 nt, Artificial Sequence
  Description of Artificial Sequence: Synthetic oligonucleotide
  Antisense strand to SEQ ID NO: 1993562
ugucauagagacuuaccug

SEQ ID NO: 1993564 - RNA, 19 nt, Artificial Sequence
  Description of Artificial Sequence: Synthetic oligonucleotide
  Sense strand starting at position 1076 of SEQ ID NO: 1880783
aaagaaauccgcgugcugu

SEQ ID NO: 1993565 - RNA, 19 nt, Artificial Sequence
  Description of Artificial Sequence: Synthetic oligonucleotide
  Antisense strand to SEQ ID NO: 1993564
acagcacgcggauuucuuu

SEQ ID NO: 1993566 - RNA, 19 nt, Artificial Sequence
  Description of Artificial Sequence: Synthetic oligonucleotide
  Sense strand starting at position 1078 of SEQ ID NO: 1880783
agaaauccgcgugcuguua

SEQ ID NO: 1993567 - RNA, 19 nt, Artificial Sequence
  Description of Artificial Sequence: Synthetic oligonucleotide
  Antisense strand to SEQ ID NO: 1993566
uaacagcacgcggauuucu

SEQ ID NO: 1993568 - RNA, 19 nt, Artificial Sequence
  Description of Artificial Sequence: Synthetic oligonucleotide
  Sense strand starting at position 1079 of SEQ ID NO: 1880783
gaaauccgcgugcuguuaa

SEQ ID NO: 1993569 - RNA, 19 nt, Artificial Sequence
  Description of Artificial Sequence: Synthetic oligonucleotide
  Antisense strand to SEQ ID NO: 1993568
uuaacagcacgcggauuuc

SEQ ID NO: 1993570 - RNA, 19 nt, Artificial Sequence
  Description of Artificial Sequence: Synthetic oligonucleotide
  Sense strand starting at position 1082 of SEQ ID NO: 1880783
auccgcgugcuguuaaagu

SEQ ID NO: 1993571 - RNA, 19 nt, Artificial Sequence
  Description of Artificial Sequence: Synthetic oligonucleotide
  Antisense strand to SEQ ID NO: 1993570
acuuuaacagcacgcggau

SEQ ID NO: 1993572 - RNA, 19 nt, Artificial Sequence
  Description of Artificial Sequence: Synthetic oligonucleotide
  Sense strand starting at position 1144 of SEQ ID NO: 1880783
aaugaauaaugggaaugaa

SEQ ID NO: 1993573 - RNA, 19 nt, Artificial Sequence
  Description of Artificial Sequence: Synthetic oligonucleotide
  Antisense strand to SEQ ID NO: 1993572
uucauucccauuauucauu

SEQ ID NO: 1993574 - RNA, 19 nt, Artificial Sequence
  Description of Artificial Sequence: Synthetic oligonucleotide
  Sense strand starting at position 1179 of SEQ ID NO: 1880783
gaucgugacuuacuagaga

SEQ ID NO: 1993575 - RNA, 19 nt, Artificial Sequence
  Description of Artificial Sequence: Synthetic oligonucleotide
  Antisense strand to SEQ ID NO: 1993574
ucucuaguaagucacgauc

SEQ ID NO: 1993576 - RNA, 19 nt, Artificial Sequence
  Description of Artificial Sequence: Synthetic oligonucleotide
  Sense strand starting at position 1271 of SEQ ID NO: 1880783
ugcuguuaaggucaauauc

SEQ ID NO: 1993577 - RNA, 19 nt, Artificial Sequence
  Description of Artificial Sequence: Synthetic oligonucleotide
  Antisense strand to SEQ ID NO: 1993576
gauauugaccuuaacagca

SEQ ID NO: 1993578 - RNA, 19 nt, Artificial Sequence
  Description of Artificial Sequence: Synthetic oligonucleotide
  Sense strand starting at position 1274 of SEQ ID NO: 1880783
uguuaaggucaauaucuca

SEQ ID NO: 1993579 - RNA, 19 nt, Artificial Sequence
  Description of Artificial Sequence: Synthetic oligonucleotide
  Antisense strand to SEQ ID NO: 1993578
ugagauauugaccuuaaca

SEQ ID NO: 1993580 - RNA, 19 nt, Artificial Sequence
  Description of Artificial Sequence: Synthetic oligonucleotide
  Sense strand starting at position 1301 of SEQ ID NO: 1880783
caaccacacgguugauuaa

SEQ ID NO: 1993581 - RNA, 19 nt, Artificial Sequence
  Description of Artificial Sequence: Synthetic oligonucleotide
  Antisense strand to SEQ ID NO: 1993580
uuaaucaaccgugugguug

SEQ ID NO: 1993582 - RNA, 19 nt, Artificial Sequence
  Description of Artificial Sequence: Synthetic oligonucleotide
  Sense strand starting at position 1349 of SEQ ID NO: 1880783
acaagauuccuuuggcaaa

SEQ ID NO: 1993583 - RNA, 19 nt, Artificial Sequence
  Description of Artificial Sequence: Synthetic oligonucleotide
  Antisense strand to SEQ ID NO: 1993582
uuugccaaaggaaucuugu

SEQ ID NO: 1993584 - RNA, 19 nt, Artificial Sequence
  Description of Artificial Sequence: Synthetic oligonucleotide
  Sense strand starting at position 1542 of SEQ ID NO: 1880783
cggguaucagaaggagguu

SEQ ID NO: 1993585 - RNA, 19 nt, Artificial Sequence
  Description of Artificial Sequence: Synthetic oligonucleotide
  Antisense strand to SEQ ID NO: 1993584
aaccuccuucugauacccg

SEQ ID NO: 1993586 - RNA, 19 nt, Artificial Sequence
  Description of Artificial Sequence: Synthetic oligonucleotide
  Sense strand starting at position 1560 of SEQ ID NO: 1880783
uaagguaugggccagucua

SEQ ID NO: 1993587 - RNA, 19 nt, Artificial Sequence
  Description of Artificial Sequence: Synthetic oligonucleotide
  Antisense strand to SEQ ID NO: 1993586
uagacuggcccauaccuua

SEQ ID NO: 1993588 - RNA, 19 nt, Artificial Sequence
  Description of Artificial Sequence: Synthetic oligonucleotide
  Sense strand starting at position 2073 of SEQ ID NO: 1880783
cugagaauuuccgaggaaa

SEQ ID NO: 1993589 - RNA, 19 nt, Artificial Sequence
  Description of Artificial Sequence: Synthetic oligonucleotide
  Antisense strand to SEQ ID NO: 1993588
uuuccucggaaauucucag

SEQ ID NO: 1993590 - RNA, 19 nt, Artificial Sequence
  Description of Artificial Sequence: Synthetic oligonucleotide
  Sense strand starting at position 2160 of SEQ ID NO: 1880783
uccugauuuguggguacuu

SEQ ID NO: 1993591 - RNA, 19 nt, Artificial Sequence
  Description of Artificial Sequence: Synthetic oligonucleotide
  Antisense strand to SEQ ID NO: 1993590
aaguacccacaaaucagga

SEQ ID NO: 1993592 - RNA, 19 nt, Artificial Sequence
  Description of Artificial Sequence: Synthetic oligonucleotide
  Sense strand starting at position 2217 of SEQ ID NO: 1880783
cauaauuagcgugaguuga

SEQ ID NO: 1993593 - RNA, 19 nt, Artificial Sequence
  Description of Artificial Sequence: Synthetic oligonucleotide
  Antisense strand to SEQ ID NO: 1993592
ucaacucacgcuaauuaug

SEQ ID NO: 1993594 - RNA, 19 nt, Artificial Sequence
  Description of Artificial Sequence: Synthetic oligonucleotide
  Sense strand starting at position 2399 of SEQ ID NO: 1880783
uuguguuauguagacaauu

SEQ ID NO: 1993595 - RNA, 19 nt, Artificial Sequence
  Description of Artificial Sequence: Synthetic oligonucleotide
  Antisense strand to SEQ ID NO: 1993594
aauugucuacauaacacaa

SEQ ID NO: 1993596 - RNA, 19 nt, Artificial Sequence
  Description of Artificial Sequence: Synthetic oligonucleotide
  Sense strand starting at position 2612 of SEQ ID NO: 1880783
uucuuuagggcauagucau

SEQ ID NO: 1993597 - RNA, 19 nt, Artificial Sequence
  Description of Artificial Sequence: Synthetic oligonucleotide
  Antisense strand to SEQ ID NO: 1993596
augacuaugcccuaaagaa

SEQ ID NO: 1993598 - RNA, 19 nt, Artificial Sequence
  Description of Artificial Sequence: Synthetic oligonucleotide
  Sense strand starting at position 2644 of SEQ ID NO: 1880783
acacauauucugcauaugu

SEQ ID NO: 1993599 - RNA, 19 nt, Artificial Sequence
  Description of Artificial Sequence: Synthetic oligonucleotide
  Antisense strand to SEQ ID NO: 1993598
acauaugcagaauaugugu

SEQ ID NO: 1993600 - RNA, 19 nt, Artificial Sequence
  Description of Artificial Sequence: Synthetic oligonucleotide
  Sense strand starting at position 2646 of SEQ ID NO: 1880783
acauauucugcauaugugu

SEQ ID NO: 1993601 - RNA, 19 nt, Artificial Sequence
  Description of Artificial Sequence: Synthetic oligonucleotide
  Antisense strand to SEQ ID NO: 1993600
acacauaugcagaauaugu

SEQ ID NO: 1993602 - RNA, 19 nt, Artificial Sequence
  Description of Artificial Sequence: Synthetic oligonucleotide
  Sense strand starting at position 2748 of SEQ ID NO: 1880783
ugcuccauaccaugaggau

SEQ ID NO: 1993603 - RNA, 19 nt, Artificial Sequence
  Description of Artificial Sequence: Synthetic oligonucleotide
  Antisense strand to SEQ ID NO: 1993602
auccucaugguauggagca

SEQ ID NO: 1993604 - RNA, 19 nt, Artificial Sequence
  Description of Artificial Sequence: Synthetic oligonucleotide
  Sense strand starting at position 2749 of SEQ ID NO: 1880783
gcuccauaccaugaggauu

SEQ ID NO: 1993605 - RNA, 19 nt, Artificial Sequence
  Description of Artificial Sequence: Synthetic oligonucleotide
  Antisense strand to SEQ ID NO: 1993604
aauccucaugguauggagc

SEQ ID NO: 1993606 - RNA, 19 nt, Artificial Sequence
  Description of Artificial Sequence: Synthetic oligonucleotide
  Sense strand starting at position 2840 of SEQ ID NO: 1880783
uugucuuuggaaugaggca

SEQ ID NO: 1993607 - RNA, 19 nt, Artificial Sequence
  Description of Artificial Sequence: Synthetic oligonucleotide
  Antisense strand to SEQ ID NO: 1993606
ugccucauuccaaagacaa

SEQ ID NO: 1993608 - RNA, 19 nt, Artificial Sequence
  Description of Artificial Sequence: Synthetic oligonucleotide
  Sense strand starting at position 2941 of SEQ ID NO: 1880783
gggugugugaauugaauug

SEQ ID NO: 1993609 - RNA, 19 nt, Artificial Sequence
  Description of Artificial Sequence: Synthetic oligonucleotide
  Antisense strand to SEQ ID NO: 1993608
caauucaauucacacaccc

SEQ ID NO: 1993610 - RNA, 19 nt, Artificial Sequence
  Description of Artificial Sequence: Synthetic oligonucleotide
  Sense strand starting at position 3060 of SEQ ID NO: 1880783
gucacauuggaguaccaca

SEQ ID NO: 1993611 - RNA, 19 nt, Artificial Sequence
  Description of Artificial Sequence: Synthetic oligonucleotide
  Antisense strand to SEQ ID NO: 1993610
ugugguacuccaaugugac

SEQ ID NO: 1993612 - RNA, 19 nt, Artificial Sequence
  Description of Artificial Sequence: Synthetic oligonucleotide
  Sense strand starting at position 3141 of SEQ ID NO: 1880783
augaguauuguagggcuaa

SEQ ID NO: 1993613 - RNA, 19 nt, Artificial Sequence
  Description of Artificial Sequence: Synthetic oligonucleotide
  Antisense strand to SEQ ID NO: 1993612
uuagcccuacaauacucau

SEQ ID NO: 1993614 - RNA, 19 nt, Artificial Sequence
  Description of Artificial Sequence: Synthetic oligonucleotide
  Sense strand starting at position 3339 of SEQ ID NO: 1880783
aucacauagccuugugaug

SEQ ID NO: 1993615 - RNA, 19 nt, Artificial Sequence
  Description of Artificial Sequence: Synthetic oligonucleotide
  Antisense strand to SEQ ID NO: 1993614
caucacaaggcuaugugau

SEQ ID NO: 1993616 - RNA, 19 nt, Artificial Sequence
  Description of Artificial Sequence: Synthetic oligonucleotide
  Sense strand starting at position 3410 of SEQ ID NO: 1880783
aguagaggugauuaaguua

SEQ ID NO: 1993617 - RNA, 19 nt, Artificial Sequence
  Description of Artificial Sequence: Synthetic oligonucleotide
  Antisense strand to SEQ ID NO: 1993616
uaacuuaaucaccucuacu

SEQ ID NO: 1993618 - RNA, 19 nt, Artificial Sequence
  Description of Artificial Sequence: Synthetic oligonucleotide
  Sense strand starting at position 3413 of SEQ ID NO: 1880783
agaggugauuaaguuaaua

SEQ ID NO: 1993619 - RNA, 19 nt, Artificial Sequence
  Description of Artificial Sequence: Synthetic oligonucleotide
  Antisense strand to SEQ ID NO: 1993618
uauuaacuuaaucaccucu

SEQ ID NO: 1993620 - RNA, 19 nt, Artificial Sequence
  Description of Artificial Sequence: Synthetic oligonucleotide
  Sense strand starting at position 3477 of SEQ ID NO: 1880783
gauucuaaagcuuagugua

SEQ ID NO: 1993621 - RNA, 19 nt, Artificial Sequence
  Description of Artificial Sequence: Synthetic oligonucleotide
  Antisense strand to SEQ ID NO: 1993620
uacacuaagcuuuagaauc

SEQ ID NO: 1993622 - RNA, 19 nt, Artificial Sequence
  Description of Artificial Sequence: Synthetic oligonucleotide
  Sense strand starting at position 3482 of SEQ ID NO: 1880783
uaaagcuuaguguauggau

SEQ ID NO: 1993623 - RNA, 19 nt, Artificial Sequence
  Description of Artificial Sequence: Synthetic oligonucleotide
  Antisense strand to SEQ ID NO: 1993622
auccauacacuaagcuuua

SEQ ID NO: 1993624 - RNA, 19 nt, Artificial Sequence
  Description of Artificial Sequence: Synthetic oligonucleotide
  Sense strand starting at position 3592 of SEQ ID NO: 1880783
acacauugaggcuagaugu

SEQ ID NO: 1993625 - RNA, 19 nt, Artificial Sequence
  Description of Artificial Sequence: Synthetic oligonucleotide
  Antisense strand to SEQ ID NO: 1993624
acaucuagccucaaugugu

SEQ ID NO: 1993626 - RNA, 19 nt, Artificial Sequence
  Description of Artificial Sequence: Synthetic oligonucleotide
  Sense strand starting at position 3779 of SEQ ID NO: 1880783
uuagauggauuugauauga

SEQ ID NO: 1993627 - RNA, 19 nt, Artificial Sequence
  Description of Artificial Sequence: Synthetic oligonucleotide
  Antisense strand to SEQ ID NO: 1993626
ucauaucaaauccaucuaa

SEQ ID NO: 1993628 - RNA, 19 nt, Artificial Sequence
  Description of Artificial Sequence: Synthetic oligonucleotide
  Sense strand starting at position 3784 of SEQ ID NO: 1880783
uggauuugauaugagugua

SEQ ID NO: 1993629 - RNA, 19 nt, Artificial Sequence
  Description of Artificial Sequence: Synthetic oligonucleotide
  Antisense strand to SEQ ID NO: 1993628
uacacucauaucaaaucca

SEQ ID NO: 1993630 - RNA, 19 nt, Artificial Sequence
  Description of Artificial Sequence: Synthetic oligonucleotide
  Sense strand starting at position 3813 of SEQ ID NO: 1880783
uagaaagaccucugugaua

SEQ ID NO: 1993631 - RNA, 19 nt, Artificial Sequence
  Description of Artificial Sequence: Synthetic oligonucleotide
  Antisense strand to SEQ ID NO: 1993630
uaucacagaggucuuucua

SEQ ID NO: 1993632 - RNA, 19 nt, Artificial Sequence
  Description of Artificial Sequence: Synthetic oligonucleotide
  Sense strand starting at position 3897 of SEQ ID NO: 1880783
ggguuuauuuaggaacaga

SEQ ID NO: 1993633 - RNA, 19 nt, Artificial Sequence
  Description of Artificial Sequence: Synthetic oligonucleotide
  Antisense strand to SEQ ID NO: 1993632
ucuguuccuaaauaaaccc

SEQ ID NO: 1993634 - RNA, 19 nt, Artificial Sequence
  Description of Artificial Sequence: Synthetic oligonucleotide
  Sense strand starting at position 213 of SEQ ID NO: 1880784
ggacgagauuacugccagu

SEQ ID NO: 1993635 - RNA, 19 nt, Artificial Sequence
  Description of Artificial Sequence: Synthetic oligonucleotide
  Antisense strand to SEQ ID NO: 1993634
acuggcaguaaucucgucc

SEQ ID NO: 1993636 - RNA, 19 nt, Artificial Sequence
  Description of Artificial Sequence: Synthetic oligonucleotide
  Sense strand starting at position 216 of SEQ ID NO: 1880784
cgagauuacugccaguauu

SEQ ID NO: 1993637 - RNA, 19 nt, Artificial Sequence
  Description of Artificial Sequence: Synthetic oligonucleotide
  Antisense strand to SEQ ID NO: 1993636
aauacuggcaguaaucucg

SEQ ID NO: 1993638 - RNA, 19 nt, Artificial Sequence
  Description of Artificial Sequence: Synthetic oligonucleotide
  Sense strand starting at position 219 of SEQ ID NO: 1880784
gauuacugccaguauugca

SEQ ID NO: 1993639 - RNA, 19 nt, Artificial Sequence
  Description of Artificial Sequence: Synthetic oligonucleotide
  Antisense strand to SEQ ID NO: 1993638
ugcaauacuggcaguaauc

SEQ ID NO: 1993640 - RNA, 19 nt, Artificial Sequence
  Description of Artificial Sequence: Synthetic oligonucleotide
  Sense strand starting at position 586 of SEQ ID NO: 1880784
aggguaagguuacauugaa

SEQ ID NO: 1993641 - RNA, 19 nt, Artificial Sequence
  Description of Artificial Sequence: Synthetic oligonucleotide
  Antisense strand to SEQ ID NO: 1993640
uucaauguaaccuuacccu

SEQ ID NO: 1993642 - RNA, 19 nt, Artificial Sequence
  Description of Artificial Sequence: Synthetic oligonucleotide
  Sense strand starting at position 593 of SEQ ID NO: 1880784
gguuacauugaauauggca

SEQ ID NO: 1993643 - RNA, 19 nt, Artificial Sequence
  Description of Artificial Sequence: Synthetic oligonucleotide
  Antisense strand to SEQ ID NO: 1993642
ugccauauucaauguaacc

SEQ ID NO: 1993644 - RNA, 19 nt, Artificial Sequence
  Description of Artificial Sequence: Synthetic oligonucleotide
  Sense strand starting at position 755 of SEQ ID NO: 1880784
ccaauauugccgggcuguu

SEQ ID NO: 1993645 - RNA, 19 nt, Artificial Sequence
  Description of Artificial Sequence: Synthetic oligonucleotide
  Antisense strand to SEQ ID NO: 1993644
aacagcccggcaauauugg

SEQ ID NO: 1993646 - RNA, 19 nt, Artificial Sequence
  Description of Artificial Sequence: Synthetic oligonucleotide
  Sense strand starting at position 773 of SEQ ID NO: 1880784
ucacaucuccagugacauu

SEQ ID NO: 1993647 - RNA, 19 nt, Artificial Sequence
  Description of Artificial Sequence: Synthetic oligonucleotide
  Antisense strand to SEQ ID NO: 1993646
aaugucacuggagauguga

SEQ ID NO: 1993648 - RNA, 19 nt, Artificial Sequence
  Description of Artificial Sequence: Synthetic oligonucleotide
  Sense strand starting at position 933 of SEQ ID NO: 1880784
acgauauuguucuuaaucu

SEQ ID NO: 1993649 - RNA, 19 nt, Artificial Sequence
  Description of Artificial Sequence: Synthetic oligonucleotide
  Antisense strand to SEQ ID NO: 1993648
agauuaagaacaauaucgu

SEQ ID NO: 1993650 - RNA, 19 nt, Artificial Sequence
  Description of Artificial Sequence: Synthetic oligonucleotide
  Sense strand starting at position 934 of SEQ ID NO: 1880784
cgauauuguucuuaaucuu

SEQ ID NO: 1993651 - RNA, 19 nt, Artificial Sequence
  Description of Artificial Sequence: Synthetic oligonucleotide
  Antisense strand to SEQ ID NO: 1993650
aagauuaagaacaauaucg

SEQ ID NO: 1993652 - RNA, 19 nt, Artificial Sequence
  Description of Artificial Sequence: Synthetic oligonucleotide
  Sense strand starting at position 1761 of SEQ ID NO: 1880784
ggaaucagaucuggaagaa

SEQ ID NO: 1993653 - RNA, 19 nt, Artificial Sequence
  Description of Artificial Sequence: Synthetic oligonucleotide
  Antisense strand to SEQ ID NO: 1993652
uucuuccagaucugauucc

SEQ ID NO: 1993654 - RNA, 19 nt, Artificial Sequence
  Description of Artificial Sequence: Synthetic oligonucleotide
  Sense strand starting at position 2029 of SEQ ID NO: 1880784
acaaaugcgagguguagaa

SEQ ID NO: 1993655 - RNA, 19 nt, Artificial Sequence
  Description of Artificial Sequence: Synthetic oligonucleotide
  Antisense strand to SEQ ID NO: 1993654
uucuacaccucgcauuugu

SEQ ID NO: 1993656 - RNA, 19 nt, Artificial Sequence
  Description of Artificial Sequence: Synthetic oligonucleotide
  Sense strand starting at position 2031 of SEQ ID NO: 1880784
aaaugcgagguguagaaau

SEQ ID NO: 1993657 - RNA, 19 nt, Artificial Sequence
  Description of Artificial Sequence: Synthetic oligonucleotide
  Antisense strand to SEQ ID NO: 1993656
auuucuacaccucgcauuu

SEQ ID NO: 1993658 - RNA, 19 nt, Artificial Sequence
  Description of Artificial Sequence: Synthetic oligonucleotide
  Sense strand starting at position 2240 of SEQ ID NO: 1880784
gguccaagaucagguguuu

SEQ ID NO: 1993659 - RNA, 19 nt, Artificial Sequence
  Description of Artificial Sequence: Synthetic oligonucleotide
  Antisense strand to SEQ ID NO: 1993658
aaacaccugaucuuggacc

SEQ ID NO: 1993660 - RNA, 19 nt, Artificial Sequence
  Description of Artificial Sequence: Synthetic oligonucleotide
  Sense strand starting at position 2251 of SEQ ID NO: 1880784
agguguuugagggagcacu

SEQ ID NO: 1993661 - RNA, 19 nt, Artificial Sequence
  Description of Artificial Sequence: Synthetic oligonucleotide
  Antisense strand to SEQ ID NO: 1993660
agugcucccucaaacaccu

SEQ ID NO: 1993662 - RNA, 19 nt, Artificial Sequence
  Description of Artificial Sequence: Synthetic oligonucleotide
  Sense strand starting at position 2264 of SEQ ID NO: 1880784
agcacugaugcccggaaga

SEQ ID NO: 1993663 - RNA, 19 nt, Artificial Sequence
  Description of Artificial Sequence: Synthetic oligonucleotide
  Antisense strand to SEQ ID NO: 1993662
ucuuccgggcaucagugcu

SEQ ID NO: 1993664 - RNA, 19 nt, Artificial Sequence
  Description of Artificial Sequence: Synthetic oligonucleotide
  Sense strand starting at position 2413 of SEQ ID NO: 1880784
uugcaagauuucucguuga

SEQ ID NO: 1993665 - RNA, 19 nt, Artificial Sequence
  Description of Artificial Sequence: Synthetic oligonucleotide
  Antisense strand to SEQ ID NO: 1993664
ucaacgagaaaucuugcaa

SEQ ID NO: 1993666 - RNA, 19 nt, Artificial Sequence
  Description of Artificial Sequence: Synthetic oligonucleotide
  Sense strand starting at position 2483 of SEQ ID NO: 1880784
gcuccaugcacuugaagga

SEQ ID NO: 1993667 - RNA, 19 nt, Artificial Sequence
  Description of Artificial Sequence: Synthetic oligonucleotide
  Antisense strand to SEQ ID NO: 1993666
uccuucaagugcauggagc

SEQ ID NO: 1993668 - RNA, 19 nt, Artificial Sequence
  Description of Artificial Sequence: Synthetic oligonucleotide
  Sense strand starting at position 2832 of SEQ ID NO: 1880784
caggguguagaguguuaca

SEQ ID NO: 1993669 - RNA, 19 nt, Artificial Sequence
  Description of Artificial Sequence: Synthetic oligonucleotide
  Antisense strand to SEQ ID NO: 1993668
uguaacacucuacacccug

SEQ ID NO: 1993670 - RNA, 19 nt, Artificial Sequence
  Description of Artificial Sequence: Synthetic oligonucleotide
  Sense strand starting at position 2835 of SEQ ID NO: 1880784
gguguagaguguuacaaac

SEQ ID NO: 1993671 - RNA, 19 nt, Artificial Sequence
  Description of Artificial Sequence: Synthetic oligonucleotide
  Antisense strand to SEQ ID NO: 1993670
guuuguaacacucuacacc

SEQ ID NO: 1993672 - RNA, 19 nt, Artificial Sequence
  Description of Artificial Sequence: Synthetic oligonucleotide
  Sense strand starting at position 2837 of SEQ ID NO: 1880784
uguagaguguuacaaacuu

SEQ ID NO: 1993673 - RNA, 19 nt, Artificial Sequence
  Description of Artificial Sequence: Synthetic oligonucleotide
  Antisense strand to SEQ ID NO: 1993672
aaguuuguaacacucuaca

SEQ ID NO: 1993674 - RNA, 19 nt, Artificial Sequence
  Description of Artificial Sequence: Synthetic oligonucleotide
  Sense strand starting at position 2985 of SEQ ID NO: 1880784
gccuaagagucagcuuauu

SEQ ID NO: 1993675 - RNA, 19 nt, Artificial Sequence
  Description of Artificial Sequence: Synthetic oligonucleotide
  Antisense strand to SEQ ID NO: 1993674
aauaagcugacucuuaggc

SEQ ID NO: 1993676 - RNA, 19 nt, Artificial Sequence
  Description of Artificial Sequence: Synthetic oligonucleotide
  Sense strand starting at position 3071 of SEQ ID NO: 1880784
ccgucuacuuguuuagaga

SEQ ID NO: 1993677 - RNA, 19 nt, Artificial Sequence
  Description of Artificial Sequence: Synthetic oligonucleotide
  Antisense strand to SEQ ID NO: 1993676
ucucuaaacaaguagacgg

SEQ ID NO: 1993678 - RNA, 19 nt, Artificial Sequence
  Description of Artificial Sequence: Synthetic oligonucleotide
  Sense strand starting at position 3072 of SEQ ID NO: 1880784
cgucuacuuguuuagagag

SEQ ID NO: 1993679 - RNA, 19 nt, Artificial Sequence
  Description of Artificial Sequence: Synthetic oligonucleotide
  Antisense strand to SEQ ID NO: 1993678
cucucuaaacaaguagacg

SEQ ID NO: 1993680 - RNA, 19 nt, Artificial Sequence
  Description of Artificial Sequence: Synthetic oligonucleotide
  Sense strand starting at position 3074 of SEQ ID NO: 1880784
ucuacuuguuuagagaggu

SEQ ID NO: 1993681 - RNA, 19 nt, Artificial Sequence
  Description of Artificial Sequence: Synthetic oligonucleotide
  Antisense strand to SEQ ID NO: 1993680
accucucuaaacaaguaga

SEQ ID NO: 1993682 - RNA, 19 nt, Artificial Sequence
  Description of Artificial Sequence: Synthetic oligonucleotide
  Sense strand starting at position 3215 of SEQ ID NO: 1880784
gccagaaguuguuccuuua

SEQ ID NO: 1993683 - RNA, 19 nt, Artificial Sequence
  Description of Artificial Sequence: Synthetic oligonucleotide
  Antisense strand to SEQ ID NO: 1993682
uaaaggaacaacuucuggc

SEQ ID NO: 1993684 - RNA, 19 nt, Artificial Sequence
  Description of Artificial Sequence: Synthetic oligonucleotide
  Sense strand starting at position 3306 of SEQ ID NO: 1880784
cuacaaaggcuuggcuaau

SEQ ID NO: 1993685 - RNA, 19 nt, Artificial Sequence
  Description of Artificial Sequence: Synthetic oligonucleotide
  Antisense strand to SEQ ID NO: 1993684
auuagccaagccuuuguag

SEQ ID NO: 1993686 - RNA, 19 nt, Artificial Sequence
  Description of Artificial Sequence: Synthetic oligonucleotide
  Sense strand starting at position 3393 of SEQ ID NO: 1880784
gccuuuaggcucggguaga

SEQ ID NO: 1993687 - RNA, 19 nt, Artificial Sequence
  Description of Artificial Sequence: Synthetic oligonucleotide
  Antisense strand to SEQ ID NO: 1993686
ucuacccgagccuaaaggc

SEQ ID NO: 1993688 - RNA, 19 nt, Artificial Sequence
  Description of Artificial Sequence: Synthetic oligonucleotide
  Sense strand starting at position 3394 of SEQ ID NO: 1880784
ccuuuaggcucggguagau

SEQ ID NO: 1993689 - RNA, 19 nt, Artificial Sequence
  Description of Artificial Sequence: Synthetic oligonucleotide
  Antisense strand to SEQ ID NO: 1993688
aucuacccgagccuaaagg

SEQ ID NO: 1993690 - RNA, 19 nt, Artificial Sequence
  Description of Artificial Sequence: Synthetic oligonucleotide
  Sense strand starting at position 3403 of SEQ ID NO: 1880784
ucggguagauugcaaauga

SEQ ID NO: 1993691 - RNA, 19 nt, Artificial Sequence
  Description of Artificial Sequence: Synthetic oligonucleotide
  Antisense strand to SEQ ID NO: 1993690
ucauuugcaaucuacccga

SEQ ID NO: 1993692 - RNA, 19 nt, Artificial Sequence
  Description of Artificial Sequence: Synthetic oligonucleotide
  Sense strand starting at position 3733 of SEQ ID NO: 1880784
guguacacuacucagugua

SEQ ID NO: 1993693 - RNA, 19 nt, Artificial Sequence
  Description of Artificial Sequence: Synthetic oligonucleotide
  Antisense strand to SEQ ID NO: 1993692
uacacugaguaguguacac

SEQ ID NO: 1993694 - RNA, 19 nt, Artificial Sequence
  Description of Artificial Sequence: Synthetic oligonucleotide
  Sense strand starting at position 3735 of SEQ ID NO: 1880784
guacacuacucaguguacu

SEQ ID NO: 1993695 - RNA, 19 nt, Artificial Sequence
  Description of Artificial Sequence: Synthetic oligonucleotide
  Antisense strand to SEQ ID NO: 1993694
aguacacugaguaguguac

SEQ ID NO: 1993696 - RNA, 19 nt, Artificial Sequence
  Description of Artificial Sequence: Synthetic oligonucleotide
  Sense strand starting at position 276 of SEQ ID NO: 1880785
gcaauuucccuaugguauu

SEQ ID NO: 1993697 - RNA, 19 nt, Artificial Sequence
  Description of Artificial Sequence: Synthetic oligonucleotide
  Antisense strand to SEQ ID NO: 1993696
aauaccauagggaaauugc

SEQ ID NO: 1993698 - RNA, 19 nt, Artificial Sequence
  Description of Artificial Sequence: Synthetic oligonucleotide
  Sense strand starting at position 379 of SEQ ID NO: 1880785
uggagcaucuuauuaaaua

SEQ ID NO: 1993699 - RNA, 19 nt, Artificial Sequence
  Description of Artificial Sequence: Synthetic oligonucleotide
  Antisense strand to SEQ ID NO: 1993698
uauuuaauaagaugcucca

SEQ ID NO: 1993700 - RNA, 19 nt, Artificial Sequence
  Description of Artificial Sequence: Synthetic oligonucleotide
  Sense strand starting at position 441 of SEQ ID NO: 1880785
ugagaaacguuuccuucuu

SEQ ID NO: 1993701 - RNA, 19 nt, Artificial Sequence
  Description of Artificial Sequence: Synthetic oligonucleotide
  Antisense strand to SEQ ID NO: 1993700
aagaaggaaacguuucuca

SEQ ID NO: 1993702 - RNA, 19 nt, Artificial Sequence
  Description of Artificial Sequence: Synthetic oligonucleotide
  Sense strand starting at position 442 of SEQ ID NO: 1880785
gagaaacguuuccuucuuu

SEQ ID NO: 1993703 - RNA, 19 nt, Artificial Sequence
  Description of Artificial Sequence: Synthetic oligonucleotide
  Antisense strand to SEQ ID NO: 1993702
aaagaaggaaacguuucuc

SEQ ID NO: 1993704 - RNA, 19 nt, Artificial Sequence
  Description of Artificial Sequence: Synthetic oligonucleotide
  Sense strand starting at position 721 of SEQ ID NO: 1880785
uuggauagauuagugguua

SEQ ID NO: 1993705 - RNA, 19 nt, Artificial Sequence
  Description of Artificial Sequence: Synthetic oligonucleotide
  Antisense strand to SEQ ID NO: 1993704
uaaccacuaaucuauccaa

SEQ ID NO: 1993706 - RNA, 19 nt, Artificial Sequence
  Description of Artificial Sequence: Synthetic oligonucleotide
  Sense strand starting at position 725 of SEQ ID NO: 1880785
auagauuagugguuaaaca

SEQ ID NO: 1993707 - RNA, 19 nt, Artificial Sequence
  Description of Artificial Sequence: Synthetic oligonucleotide
  Antisense strand to SEQ ID NO: 1993706
uguuuaaccacuaaucuau

SEQ ID NO: 1993708 - RNA, 19 nt, Artificial Sequence
  Description of Artificial Sequence: Synthetic oligonucleotide
  Sense strand starting at position 789 of SEQ ID NO: 1880785
acuuuauaacugugugacu

SEQ ID NO: 1993709 - RNA, 19 nt, Artificial Sequence
  Description of Artificial Sequence: Synthetic oligonucleotide
  Antisense strand to SEQ ID NO: 1993708
agucacacaguuauaaagu

SEQ ID NO: 1993710 - RNA, 19 nt, Artificial Sequence
  Description of Artificial Sequence: Synthetic oligonucleotide
  Sense strand starting at position 791 of SEQ ID NO: 1880785
uuuauaacugugugacuuu

SEQ ID NO: 1993711 - RNA, 19 nt, Artificial Sequence
  Description of Artificial Sequence: Synthetic oligonucleotide
  Antisense strand to SEQ ID NO: 1993710
aaagucacacaguuauaaa

SEQ ID NO: 1993712 - RNA, 19 nt, Artificial Sequence
  Description of Artificial Sequence: Synthetic oligonucleotide
  Sense strand starting at position 810 of SEQ ID NO: 1880785
guccaaaguccugacgauu

SEQ ID NO: 1993713 - RNA, 19 nt, Artificial Sequence
  Description of Artificial Sequence: Synthetic oligonucleotide
  Antisense strand to SEQ ID NO: 1993712
aaucgucaggacuuuggac

SEQ ID NO: 1993714 - RNA, 19 nt, Artificial Sequence
  Description of Artificial Sequence: Synthetic oligonucleotide
  Sense strand starting at position 831 of SEQ ID NO: 1880785
augaaaugaugugccugau

SEQ ID NO: 1993715 - RNA, 19 nt, Artificial Sequence
  Description of Artificial Sequence: Synthetic oligonucleotide
  Antisense strand to SEQ ID NO: 1993714
aucaggcacaucauuucau

SEQ ID NO: 1993716 - RNA, 19 nt, Artificial Sequence
  Description of Artificial Sequence: Synthetic oligonucleotide
  Sense strand starting at position 834 of SEQ ID NO: 1880785
aaaugaugugccugauaua

SEQ ID NO: 1993717 - RNA, 19 nt, Artificial Sequence
  Description of Artificial Sequence: Synthetic oligonucleotide
  Antisense strand to SEQ ID NO: 1993716
uauaucaggcacaucauuu

SEQ ID NO: 1993718 - RNA, 19 nt, Artificial Sequence
  Description of Artificial Sequence: Synthetic oligonucleotide
  Sense strand starting at position 835 of SEQ ID NO: 1880785
aaugaugugccugauauau

SEQ ID NO: 1993719 - RNA, 19 nt, Artificial Sequence
  Description of Artificial Sequence: Synthetic oligonucleotide
  Antisense strand to SEQ ID NO: 1993718
auauaucaggcacaucauu

SEQ ID NO: 1993720 - RNA, 19 nt, Artificial Sequence
  Description of Artificial Sequence: Synthetic oligonucleotide
  Sense strand starting at position 1045 of SEQ ID NO: 1880785
acgugcagugcccuuauau

SEQ ID NO: 1993721 - RNA, 19 nt, Artificial Sequence
  Description of Artificial Sequence: Synthetic oligonucleotide
  Antisense strand to SEQ ID NO: 1993720
auauaagggcacugcacgu

SEQ ID NO: 1993722 - RNA, 19 nt, Artificial Sequence
  Description of Artificial Sequence: Synthetic oligonucleotide
  Sense strand starting at position 1046 of SEQ ID NO: 1880785
cgugcagugcccuuauaua

SEQ ID NO: 1993723 - RNA, 19 nt, Artificial Sequence
  Description of Artificial Sequence: Synthetic oligonucleotide
  Antisense strand to SEQ ID NO: 1993722
uauauaagggcacugcacg

SEQ ID NO: 1993724 - RNA, 19 nt, Artificial Sequence
  Description of Artificial Sequence: Synthetic oligonucleotide
  Sense strand starting at position 1423 of SEQ ID NO: 1880785
ggaaucagguagguuagua

SEQ ID NO: 1993725 - RNA, 19 nt, Artificial Sequence
  Description of Artificial Sequence: Synthetic oligonucleotide
  Antisense strand to SEQ ID NO: 1993724
uacuaaccuaccugauucc

SEQ ID NO: 1993726 - RNA, 19 nt, Artificial Sequence
  Description of Artificial Sequence: Synthetic oligonucleotide
  Sense strand starting at position 1486 of SEQ ID NO: 1880785
aacgaaagguccucccaga

SEQ ID NO: 1993727 - RNA, 19 nt, Artificial Sequence
  Description of Artificial Sequence: Synthetic oligonucleotide
  Antisense strand to SEQ ID NO: 1993726
ucugggaggaccuuucguu

SEQ ID NO: 1993728 - RNA, 19 nt, Artificial Sequence
  Description of Artificial Sequence: Synthetic oligonucleotide
  Sense strand starting at position 2181 of SEQ ID NO: 1880785
aaggaaguguuguuuggau

SEQ ID NO: 1993729 - RNA, 19 nt, Artificial Sequence
  Description of Artificial Sequence: Synthetic oligonucleotide
  Antisense strand to SEQ ID NO: 1993728
auccaaacaacacuuccuu

SEQ ID NO: 1993730 - RNA, 19 nt, Artificial Sequence
  Description of Artificial Sequence: Synthetic oligonucleotide
  Sense strand starting at position 2189 of SEQ ID NO: 1880785
guuguuuggaucugaggaa

SEQ ID NO: 1993731 - RNA, 19 nt, Artificial Sequence
  Description of Artificial Sequence: Synthetic oligonucleotide
  Antisense strand to SEQ ID NO: 1993730
uuccucagauccaaacaac

SEQ ID NO: 1993732 - RNA, 19 nt, Artificial Sequence
  Description of Artificial Sequence: Synthetic oligonucleotide
  Sense strand starting at position 2235 of SEQ ID NO: 1880785
gcuguuugucuuguagcaa

SEQ ID NO: 1993733 - RNA, 19 nt, Artificial Sequence
  Description of Artificial Sequence: Synthetic oligonucleotide
  Antisense strand to SEQ ID NO: 1993732
uugcuacaagacaaacagc

SEQ ID NO: 1993734 - RNA, 19 nt, Artificial Sequence
  Description of Artificial Sequence: Synthetic oligonucleotide
  Sense strand starting at position 2623 of SEQ ID NO: 1880785
aauggaaauugauucgcau

SEQ ID NO: 1993735 - RNA, 19 nt, Artificial Sequence
  Description of Artificial Sequence: Synthetic oligonucleotide
  Antisense strand to SEQ ID NO: 1993734
augcgaaucaauuuccauu

SEQ ID NO: 1993736 - RNA, 19 nt, Artificial Sequence
  Description of Artificial Sequence: Synthetic oligonucleotide
  Sense strand starting at position 2660 of SEQ ID NO: 1880785
cuucauuuggcgugaaagg

SEQ ID NO: 1993737 - RNA, 19 nt, Artificial Sequence
  Description of Artificial Sequence: Synthetic oligonucleotide
  Antisense strand to SEQ ID NO: 1993736
ccuuucacgccaaaugaag

SEQ ID NO: 1993738 - RNA, 19 nt, Artificial Sequence
  Description of Artificial Sequence: Synthetic oligonucleotide
  Sense strand starting at position 2900 of SEQ ID NO: 1880785
guauuaagaacaggguauu

SEQ ID NO: 1993739 - RNA, 19 nt, Artificial Sequence
  Description of Artificial Sequence: Synthetic oligonucleotide
  Antisense strand to SEQ ID NO: 1993738
aauacccuguucuuaauac

SEQ ID NO: 1993740 - RNA, 19 nt, Artificial Sequence
  Description of Artificial Sequence: Synthetic oligonucleotide
  Sense strand starting at position 2952 of SEQ ID NO: 1880785
uacagaguacucugcgaac

SEQ ID NO: 1993741 - RNA, 19 nt, Artificial Sequence
  Description of Artificial Sequence: Synthetic oligonucleotide
  Antisense strand to SEQ ID NO: 1993740
guucgcagaguacucugua

SEQ ID NO: 1993742 - RNA, 19 nt, Artificial Sequence
  Description of Artificial Sequence: Synthetic oligonucleotide
  Sense strand starting at position 2954 of SEQ ID NO: 1880785
cagaguacucugcgaacag

SEQ ID NO: 1993743 - RNA, 19 nt, Artificial Sequence
  Description of Artificial Sequence: Synthetic oligonucleotide
  Antisense strand to SEQ ID NO: 1993742
cuguucgcagaguacucug

SEQ ID NO: 1993744 - RNA, 19 nt, Artificial Sequence
  Description of Artificial Sequence: Synthetic oligonucleotide
  Sense strand starting at position 2958 of SEQ ID NO: 1880785
guacucugcgaacagaaga

SEQ ID NO: 1993745 - RNA, 19 nt, Artificial Sequence
  Description of Artificial Sequence: Synthetic oligonucleotide
  Antisense strand to SEQ ID NO: 1993744
ucuucuguucgcagaguac

SEQ ID NO: 1993746 - RNA, 19 nt, Artificial Sequence
  Description of Artificial Sequence: Synthetic oligonucleotide
  Sense strand starting at position 2984 of SEQ ID NO: 1880785
ucauuaucgagcgagacaa

SEQ ID NO: 1993747 - RNA, 19 nt, Artificial Sequence
  Description of Artificial Sequence: Synthetic oligonucleotide
  Antisense strand to SEQ ID NO: 1993746
uugucucgcucgauaauga

SEQ ID NO: 1993748 - RNA, 19 nt, Artificial Sequence
  Description of Artificial Sequence: Synthetic oligonucleotide
  Sense strand starting at position 3027 of SEQ ID NO: 1880785
uuaccuagcacgugaagau

SEQ ID NO: 1993749 - RNA, 19 nt, Artificial Sequence
  Description of Artificial Sequence: Synthetic oligonucleotide
  Antisense strand to SEQ ID NO: 1993748
aucuucacgugcuagguaa

SEQ ID NO: 1993750 - RNA, 19 nt, Artificial Sequence
  Description of Artificial Sequence: Synthetic oligonucleotide
  Sense strand starting at position 3028 of SEQ ID NO: 1880785
uaccuagcacgugaagaua

SEQ ID NO: 1993751 - RNA, 19 nt, Artificial Sequence
  Description of Artificial Sequence: Synthetic oligonucleotide
  Antisense strand to SEQ ID NO: 1993750
uaucuucacgugcuaggua

SEQ ID NO: 1993752 - RNA, 19 nt, Artificial Sequence
  Description of Artificial Sequence: Synthetic oligonucleotide
  Sense strand starting at position 3274 of SEQ ID NO: 1880785
uugggucuguuauuaugaa

SEQ ID NO: 1993753 - RNA, 19 nt, Artificial Sequence
  Description of Artificial Sequence: Synthetic oligonucleotide
  Antisense strand to SEQ ID NO: 1993752
uucauaauaacagacccaa

SEQ ID NO: 1993754 - RNA, 19 nt, Artificial Sequence
  Description of Artificial Sequence: Synthetic oligonucleotide
  Sense strand starting at position 3281 of SEQ ID NO: 1880785
uguuauuaugaagggcuua

SEQ ID NO: 1993755 - RNA, 19 nt, Artificial Sequence
  Description of Artificial Sequence: Synthetic oligonucleotide
  Antisense strand to SEQ ID NO: 1993754
uaagcccuucauaauaaca

SEQ ID NO: 1993756 - RNA, 19 nt, Artificial Sequence
  Description of Artificial Sequence: Synthetic oligonucleotide
  Sense strand starting at position 3317 of SEQ ID NO: 1880785
uggucagauuuguauugaa

SEQ ID NO: 1993757 - RNA, 19 nt, Artificial Sequence
  Description of Artificial Sequence: Synthetic oligonucleotide
  Antisense strand to SEQ ID NO: 1993756
uucaauacaaaucugacca

SEQ ID NO: 1993758 - RNA, 19 nt, Artificial Sequence
  Description of Artificial Sequence: Synthetic oligonucleotide
  Sense strand starting at position 3333 of SEQ ID NO: 1880785
gaaagaucuuuggauaaag

SEQ ID NO: 1993759 - RNA, 19 nt, Artificial Sequence
  Description of Artificial Sequence: Synthetic oligonucleotide
  Antisense strand to SEQ ID NO: 1993758
cuuuauccaaagaucuuuc

SEQ ID NO: 1993760 - RNA, 19 nt, Artificial Sequence
  Description of Artificial Sequence: Synthetic oligonucleotide
  Sense strand starting at position 3390 of SEQ ID NO: 1880785
uugggagcuguuuaggaaa

SEQ ID NO: 1993761 - RNA, 19 nt, Artificial Sequence
  Description of Artificial Sequence: Synthetic oligonucleotide
  Antisense strand to SEQ ID NO: 1993760
uuuccuaaacagcucccaa

SEQ ID NO: 1993762 - RNA, 19 nt, Artificial Sequence
  Description of Artificial Sequence: Synthetic oligonucleotide
  Sense strand starting at position 3426 of SEQ ID NO: 1880785
ugaucauagccuugauacc

SEQ ID NO: 1993763 - RNA, 19 nt, Artificial Sequence
  Description of Artificial Sequence: Synthetic oligonucleotide
  Antisense strand to SEQ ID NO: 1993762
gguaucaaggcuaugauca

SEQ ID NO: 1993764 - RNA, 19 nt, Artificial Sequence
  Description of Artificial Sequence: Synthetic oligonucleotide
  Sense strand starting at position 3525 of SEQ ID NO: 1880785
gggagugacuagagacaga

SEQ ID NO: 1993765 - RNA, 19 nt, Artificial Sequence
  Description of Artificial Sequence: Synthetic oligonucleotide
  Antisense strand to SEQ ID NO: 1993764
ucugucucuagucacuccc

SEQ ID NO: 1993766 - RNA, 19 nt, Artificial Sequence
  Description of Artificial Sequence: Synthetic oligonucleotide
  Sense strand starting at position 3570 of SEQ ID NO: 1880785
uaacaaugauguguuugaa

SEQ ID NO: 1993767 - RNA, 19 nt, Artificial Sequence
  Description of Artificial Sequence: Synthetic oligonucleotide
  Antisense strand to SEQ ID NO: 1993766
uucaaacacaucauuguua

SEQ ID NO: 1993768 - RNA, 19 nt, Artificial Sequence
  Description of Artificial Sequence: Synthetic oligonucleotide
  Sense strand starting at position 3573 of SEQ ID NO: 1880785
caaugauguguuugaagag

SEQ ID NO: 1993769 - RNA, 19 nt, Artificial Sequence
  Description of Artificial Sequence: Synthetic oligonucleotide
  Antisense strand to SEQ ID NO: 1993768
cucuucaaacacaucauug

SEQ ID NO: 1993770 - RNA, 19 nt, Artificial Sequence
  Description of Artificial Sequence: Synthetic oligonucleotide
  Sense strand starting at position 3661 of SEQ ID NO: 1880785
aaaggaagauuguuugcau

SEQ ID NO: 1993771 - RNA, 19 nt, Artificial Sequence
  Description of Artificial Sequence: Synthetic oligonucleotide
  Antisense strand to SEQ ID NO: 1993770
augcaaacaaucuuccuuu

SEQ ID NO: 1993772 - RNA, 19 nt, Artificial Sequence
  Description of Artificial Sequence: Synthetic oligonucleotide
  Sense strand starting at position 3662 of SEQ ID NO: 1880785
aaggaagauuguuugcauc

SEQ ID NO: 1993773 - RNA, 19 nt, Artificial Sequence
  Description of Artificial Sequence: Synthetic oligonucleotide
  Antisense strand to SEQ ID NO: 1993772
gaugcaaacaaucuuccuu

SEQ ID NO: 1993774 - RNA, 19 nt, Artificial Sequence
  Description of Artificial Sequence: Synthetic oligonucleotide
  Sense strand starting at position 3680 of SEQ ID NO: 1880785
cccagaguuccaggaugca

SEQ ID NO: 1993775 - RNA, 19 nt, Artificial Sequence
  Description of Artificial Sequence: Synthetic oligonucleotide
  Antisense strand to SEQ ID NO: 1993774
ugcauccuggaacucuggg

SEQ ID NO: 1993776 - RNA, 19 nt, Artificial Sequence
  Description of Artificial Sequence: Synthetic oligonucleotide
  Sense strand starting at position 233 of SEQ ID NO: 1880786
ugcuaaauacaugggacuu

SEQ ID NO: 1993777 - RNA, 19 nt, Artificial Sequence
  Description of Artificial Sequence: Synthetic oligonucleotide
  Antisense strand to SEQ ID NO: 1993776
aagucccauguauuuagca

SEQ ID NO: 1993778 - RNA, 19 nt, Artificial Sequence
  Description of Artificial Sequence: Synthetic oligonucleotide
  Sense strand starting at position 303 of SEQ ID NO: 1880786
acuaaugugcccuagaguu

SEQ ID NO: 1993779 - RNA, 19 nt, Artificial Sequence
  Description of Artificial Sequence: Synthetic oligonucleotide
  Antisense strand to SEQ ID NO: 1993778
aacucuagggcacauuagu

SEQ ID NO: 1993780 - RNA, 19 nt, Artificial Sequence
  Description of Artificial Sequence: Synthetic oligonucleotide
  Sense strand starting at position 370 of SEQ ID NO: 1880786
ugccuagacgaggaaucua

SEQ ID NO: 1993781 - RNA, 19 nt, Artificial Sequence
  Description of Artificial Sequence: Synthetic oligonucleotide
  Antisense strand to SEQ ID NO: 1993780
uagauuccucgucuaggca

SEQ ID NO: 1993782 - RNA, 19 nt, Artificial Sequence
  Description of Artificial Sequence: Synthetic oligonucleotide
  Sense strand starting at position 419 of SEQ ID NO: 1880786
uugucuugacagcacagaa

SEQ ID NO: 1993783 - RNA, 19 nt, Artificial Sequence
  Description of Artificial Sequence: Synthetic oligonucleotide
  Antisense strand to SEQ ID NO: 1993782
uucugugcugucaagacaa

SEQ ID NO: 1993784 - RNA, 19 nt, Artificial Sequence
  Description of Artificial Sequence: Synthetic oligonucleotide
  Sense strand starting at position 443 of SEQ ID NO: 1880786
uugggauauacuugcugaa

SEQ ID NO: 1993785 - RNA, 19 nt, Artificial Sequence
  Description of Artificial Sequence: Synthetic oligonucleotide
  Antisense strand to SEQ ID NO: 1993784
uucagcaaguauaucccaa

SEQ ID NO: 1993786 - RNA, 19 nt, Artificial Sequence
  Description of Artificial Sequence: Synthetic oligonucleotide
  Sense strand starting at position 445 of SEQ ID NO: 1880786
gggauauacuugcugaaca

SEQ ID NO: 1993787 - RNA, 19 nt, Artificial Sequence
  Description of Artificial Sequence: Synthetic oligonucleotide
  Antisense strand to SEQ ID NO: 1993786
uguucagcaaguauauccc

SEQ ID NO: 1993788 - RNA, 19 nt, Artificial Sequence
  Description of Artificial Sequence: Synthetic oligonucleotide
  Sense strand starting at position 455 of SEQ ID NO: 1880786
ugcugaacauaauuggaau

SEQ ID NO: 1993789 - RNA, 19 nt, Artificial Sequence
  Description of Artificial Sequence: Synthetic oligonucleotide
  Antisense strand to SEQ ID NO: 1993788
auuccaauuauguucagca

SEQ ID NO: 1993790 - RNA, 19 nt, Artificial Sequence
  Description of Artificial Sequence: Synthetic oligonucleotide
  Sense strand starting at position 516 of SEQ ID NO: 1880786
acuggauuccaguguauaa

SEQ ID NO: 1993791 - RNA, 19 nt, Artificial Sequence
  Description of Artificial Sequence: Synthetic oligonucleotide
  Antisense strand to SEQ ID NO: 1993790
uuauacacuggaauccagu

SEQ ID NO: 1993792 - RNA, 19 nt, Artificial Sequence
  Description of Artificial Sequence: Synthetic oligonucleotide
  Sense strand starting at position 518 of SEQ ID NO: 1880786
uggauuccaguguauaaca

SEQ ID NO: 1993793 - RNA, 19 nt, Artificial Sequence
  Description of Artificial Sequence: Synthetic oligonucleotide
  Antisense strand to SEQ ID NO: 1993792
uguuauacacuggaaucca

SEQ ID NO: 1993794 - RNA, 19 nt, Artificial Sequence
  Description of Artificial Sequence: Synthetic oligonucleotide
  Sense strand starting at position 551 of SEQ ID NO: 1880786
ccucucuaaccguaugacu

SEQ ID NO: 1993795 - RNA, 19 nt, Artificial Sequence
  Description of Artificial Sequence: Synthetic oligonucleotide
  Antisense strand to SEQ ID NO: 1993794
agucauacgguuagagagg

SEQ ID NO: 1993796 - RNA, 19 nt, Artificial Sequence
  Description of Artificial Sequence: Synthetic oligonucleotide
  Sense strand starting at position 553 of SEQ ID NO: 1880786
ucucuaaccguaugacuaa

SEQ ID NO: 1993797 - RNA, 19 nt, Artificial Sequence
  Description of Artificial Sequence: Synthetic oligonucleotide
  Antisense strand to SEQ ID NO: 1993796
uuagucauacgguuagaga

SEQ ID NO: 1993798 - RNA, 19 nt, Artificial Sequence
  Description of Artificial Sequence: Synthetic oligonucleotide
  Sense strand starting at position 688 of SEQ ID NO: 1880786
gccagauguccugacuucu

SEQ ID NO: 1993799 - RNA, 19 nt, Artificial Sequence
  Description of Artificial Sequence: Synthetic oligonucleotide
  Antisense strand to SEQ ID NO: 1993798
agaagucaggacaucuggc

SEQ ID NO: 1993800 - RNA, 19 nt, Artificial Sequence
  Description of Artificial Sequence: Synthetic oligonucleotide
  Sense strand starting at position 730 of SEQ ID NO: 1880786
uugugugaccuccaaagca

SEQ ID NO: 1993801 - RNA, 19 nt, Artificial Sequence
  Description of Artificial Sequence: Synthetic oligonucleotide
  Antisense strand to SEQ ID NO: 1993800
ugcuuuggaggucacacaa

SEQ ID NO: 1993802 - RNA, 19 nt, Artificial Sequence
  Description of Artificial Sequence: Synthetic oligonucleotide
  Sense strand starting at position 1134 of SEQ ID NO: 1880786
uggaauaaaucuguccaau

SEQ ID NO: 1993803 - RNA, 19 nt, Artificial Sequence
  Description of Artificial Sequence: Synthetic oligonucleotide
  Antisense strand to SEQ ID NO: 1993802
auuggacagauuuauucca

SEQ ID NO: 1993804 - RNA, 19 nt, Artificial Sequence
  Description of Artificial Sequence: Synthetic oligonucleotide
  Sense strand starting at position 1501 of SEQ ID NO: 1880786
ccuagugaagugggagaaa

SEQ ID NO: 1993805 - RNA, 19 nt, Artificial Sequence
  Description of Artificial Sequence: Synthetic oligonucleotide
  Antisense strand to SEQ ID NO: 1993804
uuucucccacuucacuagg

SEQ ID NO: 1993806 - RNA, 19 nt, Artificial Sequence
  Description of Artificial Sequence: Synthetic oligonucleotide
  Sense strand starting at position 1525 of SEQ ID NO: 1880786
uacacuguccgaugagaaa

SEQ ID NO: 1993807 - RNA, 19 nt, Artificial Sequence
  Description of Artificial Sequence: Synthetic oligonucleotide
  Antisense strand to SEQ ID NO: 1993806
uuucucaucggacagugua

SEQ ID NO: 1993808 - RNA, 19 nt, Artificial Sequence
  Description of Artificial Sequence: Synthetic oligonucleotide
  Sense strand starting at position 1772 of SEQ ID NO: 1880786
uguguagucagacaaaccu

SEQ ID NO: 1993809 - RNA, 19 nt, Artificial Sequence
  Description of Artificial Sequence: Synthetic oligonucleotide
  Antisense strand to SEQ ID NO: 1993808
agguuugucugacuacaca

SEQ ID NO: 1993810 - RNA, 19 nt, Artificial Sequence
  Description of Artificial Sequence: Synthetic oligonucleotide
  Sense strand starting at position 2011 of SEQ ID NO: 1880786
gggcuuucuccugcagcga

SEQ ID NO: 1993811 - RNA, 19 nt, Artificial Sequence
  Description of Artificial Sequence: Synthetic oligonucleotide
  Antisense strand to SEQ ID NO: 1993810
ucgcugcaggagaaagccc

SEQ ID NO: 1993812 - RNA, 19 nt, Artificial Sequence
  Description of Artificial Sequence: Synthetic oligonucleotide
  Sense strand starting at position 2043 of SEQ ID NO: 1880786
cagucuuuaguagggaaag

SEQ ID NO: 1993813 - RNA, 19 nt, Artificial Sequence
  Description of Artificial Sequence: Synthetic oligonucleotide
  Antisense strand to SEQ ID NO: 1993812
cuuucccuacuaaagacug

SEQ ID NO: 1993814 - RNA, 19 nt, Artificial Sequence
  Description of Artificial Sequence: Synthetic oligonucleotide
  Sense strand starting at position 2089 of SEQ ID NO: 1880786
aguggaaggugggugaaau

SEQ ID NO: 1993815 - RNA, 19 nt, Artificial Sequence
  Description of Artificial Sequence: Synthetic oligonucleotide
  Antisense strand to SEQ ID NO: 1993814
auuucacccaccuuccacu

SEQ ID NO: 1993816 - RNA, 19 nt, Artificial Sequence
  Description of Artificial Sequence: Synthetic oligonucleotide
  Sense strand starting at position 2090 of SEQ ID NO: 1880786
guggaaggugggugaaauu

SEQ ID NO: 1993817 - RNA, 19 nt, Artificial Sequence
  Description of Artificial Sequence: Synthetic oligonucleotide
  Antisense strand to SEQ ID NO: 1993816
aauuucacccaccuuccac

SEQ ID NO: 1993818 - RNA, 19 nt, Artificial Sequence
  Description of Artificial Sequence: Synthetic oligonucleotide
  Sense strand starting at position 2100 of SEQ ID NO: 1880786
ggugaaauugcucacucuu

SEQ ID NO: 1993819 - RNA, 19 nt, Artificial Sequence
  Description of Artificial Sequence: Synthetic oligonucleotide
  Antisense strand to SEQ ID NO: 1993818
aagagugagcaauuucacc

SEQ ID NO: 1993820 - RNA, 19 nt, Artificial Sequence
  Description of Artificial Sequence: Synthetic oligonucleotide
  Sense strand starting at position 2240 of SEQ ID NO: 1880786
gcccgaaaggguagugcuu

SEQ ID NO: 1993821 - RNA, 19 nt, Artificial Sequence
  Description of Artificial Sequence: Synthetic oligonucleotide
  Antisense strand to SEQ ID NO: 1993820
aagcacuacccuuucgggc

SEQ ID NO: 1993822 - RNA, 19 nt, Artificial Sequence
  Description of Artificial Sequence: Synthetic oligonucleotide
  Sense strand starting at position 2295 of SEQ ID NO: 1880786
aucuaauuccucuagguug

SEQ ID NO: 1993823 - RNA, 19 nt, Artificial Sequence
  Description of Artificial Sequence: Synthetic oligonucleotide
  Antisense strand to SEQ ID NO: 1993822
caaccuagaggaauuagau

SEQ ID NO: 1993824 - RNA, 19 nt, Artificial Sequence
  Description of Artificial Sequence: Synthetic oligonucleotide
  Sense strand starting at position 2365 of SEQ ID NO: 1880786
aucucuaaucccugggaug

SEQ ID NO: 1993825 - RNA, 19 nt, Artificial Sequence
  Description of Artificial Sequence: Synthetic oligonucleotide
  Antisense strand to SEQ ID NO: 1993824
caucccagggauuagagau

SEQ ID NO: 1993826 - RNA, 19 nt, Artificial Sequence
  Description of Artificial Sequence: Synthetic oligonucleotide
  Sense strand starting at position 2404 of SEQ ID NO: 1880786
ggagaaaggcccugcuuua

SEQ ID NO: 1993827 - RNA, 19 nt, Artificial Sequence
  Description of Artificial Sequence: Synthetic oligonucleotide
  Antisense strand to SEQ ID NO: 1993826
uaaagcagggccuuucucc

SEQ ID NO: 1993828 - RNA, 19 nt, Artificial Sequence
  Description of Artificial Sequence: Synthetic oligonucleotide
  Sense strand starting at position 2467 of SEQ ID NO: 1880786
aggugcuucgcagugugaa

SEQ ID NO: 1993829 - RNA, 19 nt, Artificial Sequence
  Description of Artificial Sequence: Synthetic oligonucleotide
  Antisense strand to SEQ ID NO: 1993828
uucacacugcgaagcaccu

SEQ ID NO: 1993830 - RNA, 19 nt, Artificial Sequence
  Description of Artificial Sequence: Synthetic oligonucleotide
  Sense strand starting at position 2537 of SEQ ID NO: 1880786
uugggaagauccuuguuau

SEQ ID NO: 1993831 - RNA, 19 nt, Artificial Sequence
  Description of Artificial Sequence: Synthetic oligonucleotide
  Antisense strand to SEQ ID NO: 1993830
auaacaaggaucuucccaa

SEQ ID NO: 1993832 - RNA, 19 nt, Artificial Sequence
  Description of Artificial Sequence: Synthetic oligonucleotide
  Sense strand starting at position 2538 of SEQ ID NO: 1880786
ugggaagauccuuguuaug

SEQ ID NO: 1993833 - RNA, 19 nt, Artificial Sequence
  Description of Artificial Sequence: Synthetic oligonucleotide
  Antisense strand to SEQ ID NO: 1993832
cauaacaaggaucuuccca

SEQ ID NO: 1993834 - RNA, 19 nt, Artificial Sequence
  Description of Artificial Sequence: Synthetic oligonucleotide
  Sense strand starting at position 2540 of SEQ ID NO: 1880786
ggaagauccuuguuaugac

SEQ ID NO: 1993835 - RNA, 19 nt, Artificial Sequence
  Description of Artificial Sequence: Synthetic oligonucleotide
  Antisense strand to SEQ ID NO: 1993834
gucauaacaaggaucuucc

SEQ ID NO: 1993836 - RNA, 19 nt, Artificial Sequence
  Description of Artificial Sequence: Synthetic oligonucleotide
  Sense strand starting at position 3131 of SEQ ID NO: 1880786
uagaguaaguaugcuaauc

SEQ ID NO: 1993837 - RNA, 19 nt, Artificial Sequence
  Description of Artificial Sequence: Synthetic oligonucleotide
  Antisense strand to SEQ ID NO: 1993836
gauuagcauacuuacucua

SEQ ID NO: 1993838 - RNA, 19 nt, Artificial Sequence
  Description of Artificial Sequence: Synthetic oligonucleotide
  Sense strand starting at position 3142 of SEQ ID NO: 1880786
ugcuaaucuugacuaagac

SEQ ID NO: 1993839 - RNA, 19 nt, Artificial Sequence
  Description of Artificial Sequence: Synthetic oligonucleotide
  Antisense strand to SEQ ID NO: 1993838
gucuuagucaagauuagca

SEQ ID NO: 1993840 - RNA, 19 nt, Artificial Sequence
  Description of Artificial Sequence: Synthetic oligonucleotide
  Sense strand starting at position 3143 of SEQ ID NO: 1880786
gcuaaucuugacuaagacu

SEQ ID NO: 1993841 - RNA, 19 nt, Artificial Sequence
  Description of Artificial Sequence: Synthetic oligonucleotide
  Antisense strand to SEQ ID NO: 1993840
agucuuagucaagauuagc

SEQ ID NO: 1993842 - RNA, 19 nt, Artificial Sequence
  Description of Artificial Sequence: Synthetic oligonucleotide
  Sense strand starting at position 3263 of SEQ ID NO: 1880786
aauugaaacuaguugugau

SEQ ID NO: 1993843 - RNA, 19 nt, Artificial Sequence
  Description of Artificial Sequence: Synthetic oligonucleotide
  Antisense strand to SEQ ID NO: 1993842
aucacaacuaguuucaauu

SEQ ID NO: 1993844 - RNA, 19 nt, Artificial Sequence
  Description of Artificial Sequence: Synthetic oligonucleotide
  Sense strand starting at position 3264 of SEQ ID NO: 1880786
auugaaacuaguugugaug

SEQ ID NO: 1993845 - RNA, 19 nt, Artificial Sequence
  Description of Artificial Sequence: Synthetic oligonucleotide
  Antisense strand to SEQ ID NO: 1993844
caucacaacuaguuucaau

SEQ ID NO: 1993846 - RNA, 19 nt, Artificial Sequence
  Description of Artificial Sequence: Synthetic oligonucleotide
  Sense strand starting at position 3311 of SEQ ID NO: 1880786
uggaaauguguugggagaa

SEQ ID NO: 1993847 - RNA, 19 nt, Artificial Sequence
  Description of Artificial Sequence: Synthetic oligonucleotide
  Antisense strand to SEQ ID NO: 1993846
uucucccaacacauuucca

SEQ ID NO: 1993848 - RNA, 19 nt, Artificial Sequence
  Description of Artificial Sequence: Synthetic oligonucleotide
  Sense strand starting at position 3362 of SEQ ID NO: 1880786
guaaguagacauuaucuua

SEQ ID NO: 1993849 - RNA, 19 nt, Artificial Sequence
  Description of Artificial Sequence: Synthetic oligonucleotide
  Antisense strand to SEQ ID NO: 1993848
uaagauaaugucuacuuac

SEQ ID NO: 1993850 - RNA, 19 nt, Artificial Sequence
  Description of Artificial Sequence: Synthetic oligonucleotide
  Sense strand starting at position 3789 of SEQ ID NO: 1880786
gauuauaaacugugauguu

SEQ ID NO: 1993851 - RNA, 19 nt, Artificial Sequence
  Description of Artificial Sequence: Synthetic oligonucleotide
  Antisense strand to SEQ ID NO: 1993850
aacaucacaguuuauaauc

SEQ ID NO: 1993852 - RNA, 19 nt, Artificial Sequence
  Description of Artificial Sequence: Synthetic oligonucleotide
  Sense strand starting at position 3821 of SEQ ID NO: 1880786
caggcagguuaccuaaaua

SEQ ID NO: 1993853 - RNA, 19 nt, Artificial Sequence
  Description of Artificial Sequence: Synthetic oligonucleotide
  Antisense strand to SEQ ID NO: 1993852
uauuuagguaaccugccug

SEQ ID NO: 1993854 - RNA, 19 nt, Artificial Sequence
  Description of Artificial Sequence: Synthetic oligonucleotide
  Sense strand starting at position 3917 of SEQ ID NO: 1880786
ggaccuguguuauuagauu

SEQ ID NO: 1993855 - RNA, 19 nt, Artificial Sequence
  Description of Artificial Sequence: Synthetic oligonucleotide
  Antisense strand to SEQ ID NO: 1993854
aaucuaauaacacaggucc

SEQ ID NO: 1993856 - RNA, 19 nt, Artificial Sequence
  Description of Artificial Sequence: Synthetic oligonucleotide
  Sense strand starting at position 2060 of SEQ ID NO: 1880787
ccgguuuauuuacuuagua

SEQ ID NO: 1993857 - RNA, 19 nt, Artificial Sequence
  Description of Artificial Sequence: Synthetic oligonucleotide
  Antisense strand to SEQ ID NO: 1993856
uacuaaguaaauaaaccgg

SEQ ID NO: 1993858 - RNA, 19 nt, Artificial Sequence
  Description of Artificial Sequence: Synthetic oligonucleotide
  Sense strand starting at position 2061 of SEQ ID NO: 1880787
cgguuuauuuacuuaguau

SEQ ID NO: 1993859 - RNA, 19 nt, Artificial Sequence
  Description of Artificial Sequence: Synthetic oligonucleotide
  Antisense strand to SEQ ID NO: 1993858
auacuaaguaaauaaaccg

SEQ ID NO: 1993860 - RNA, 19 nt, Artificial Sequence
  Description of Artificial Sequence: Synthetic oligonucleotide
  Sense strand starting at position 2069 of SEQ ID NO: 1880787
uuacuuaguauguagaugu

SEQ ID NO: 1993861 - RNA, 19 nt, Artificial Sequence
  Description of Artificial Sequence: Synthetic oligonucleotide
  Antisense strand to SEQ ID NO: 1993860
acaucuacauacuaaguaa

SEQ ID NO: 1993862 - RNA, 19 nt, Artificial Sequence
  Description of Artificial Sequence: Synthetic oligonucleotide
  Sense strand starting at position 2073 of SEQ ID NO: 1880787
uuaguauguagaugucaaa

SEQ ID NO: 1993863 - RNA, 19 nt, Artificial Sequence
  Description of Artificial Sequence: Synthetic oligonucleotide
  Antisense strand to SEQ ID NO: 1993862
uuugacaucuacauacuaa

SEQ ID NO: 1993864 - RNA, 19 nt, Artificial Sequence
  Description of Artificial Sequence: Synthetic oligonucleotide
  Sense strand starting at position 2225 of SEQ ID NO: 1880787
gcgucuaauuuagcuaaug

SEQ ID NO: 1993865 - RNA, 19 nt, Artificial Sequence
  Description of Artificial Sequence: Synthetic oligonucleotide
  Antisense strand to SEQ ID NO: 1993864
cauuagcuaaauuagacgc

SEQ ID NO: 1993866 - RNA, 19 nt, Artificial Sequence
  Description of Artificial Sequence: Synthetic oligonucleotide
  Sense strand starting at position 2226 of SEQ ID NO: 1880787
cgucuaauuuagcuaaugu

SEQ ID NO: 1993867 - RNA, 19 nt, Artificial Sequence
  Description of Artificial Sequence: Synthetic oligonucleotide
  Antisense strand to SEQ ID NO: 1993866
acauuagcuaaauuagacg

SEQ ID NO: 1993868 - RNA, 19 nt, Artificial Sequence
  Description of Artificial Sequence: Synthetic oligonucleotide
  Sense strand starting at position 2239 of SEQ ID NO: 1880787
uaauguuuguaggcaagga

SEQ ID NO: 1993869 - RNA, 19 nt, Artificial Sequence
  Description of Artificial Sequence: Synthetic oligonucleotide
  Antisense strand to SEQ ID NO: 1993868
uccuugccuacaaacauua

SEQ ID NO: 1993870 - RNA, 19 nt, Artificial Sequence
  Description of Artificial Sequence: Synthetic oligonucleotide
  Sense strand starting at position 2411 of SEQ ID NO: 1880787
ccagauuucuuugggagaa

SEQ ID NO: 1993871 - RNA, 19 nt, Artificial Sequence
  Description of Artificial Sequence: Synthetic oligonucleotide
  Antisense strand to SEQ ID NO: 1993870
uucucccaaagaaaucugg

SEQ ID NO: 1993872 - RNA, 19 nt, Artificial Sequence
  Description of Artificial Sequence: Synthetic oligonucleotide
  Sense strand starting at position 2412 of SEQ ID NO: 1880787
cagauuucuuugggagaaa

SEQ ID NO: 1993873 - RNA, 19 nt, Artificial Sequence
  Description of Artificial Sequence: Synthetic oligonucleotide
  Antisense strand to SEQ ID NO: 1993872
uuucucccaaagaaaucug

SEQ ID NO: 1993874 - RNA, 19 nt, Artificial Sequence
  Description of Artificial Sequence: Synthetic oligonucleotide
  Sense strand starting at position 2475 of SEQ ID NO: 1880787
gugggacucuagcuauauu

SEQ ID NO: 1993875 - RNA, 19 nt, Artificial Sequence
  Description of Artificial Sequence: Synthetic oligonucleotide
  Antisense strand to SEQ ID NO: 1993874
aauauagcuagagucccac

SEQ ID NO: 1993876 - RNA, 19 nt, Artificial Sequence
  Description of Artificial Sequence: Synthetic oligonucleotide
  Sense strand starting at position 2478 of SEQ ID NO: 1880787
ggacucuagcuauauuagu

SEQ ID NO: 1993877 - RNA, 19 nt, Artificial Sequence
  Description of Artificial Sequence: Synthetic oligonucleotide
  Antisense strand to SEQ ID NO: 1993876
acuaauauagcuagagucc

SEQ ID NO: 1993878 - RNA, 19 nt, Artificial Sequence
  Description of Artificial Sequence: Synthetic oligonucleotide
  Sense strand starting at position 2489 of SEQ ID NO: 1880787
auauuaguaauagggaguu

SEQ ID NO: 1993879 - RNA, 19 nt, Artificial Sequence
  Description of Artificial Sequence: Synthetic oligonucleotide
  Antisense strand to SEQ ID NO: 1993878
aacucccuauuacuaauau

SEQ ID NO: 1993880 - RNA, 19 nt, Artificial Sequence
  Description of Artificial Sequence: Synthetic oligonucleotide
  Sense strand starting at position 2818 of SEQ ID NO: 1880787
uugguauuauagucucuau

SEQ ID NO: 1993881 - RNA, 19 nt, Artificial Sequence
  Description of Artificial Sequence: Synthetic oligonucleotide
  Antisense strand to SEQ ID NO: 1993880
auagagacuauaauaccaa

SEQ ID NO: 1993882 - RNA, 19 nt, Artificial Sequence
  Description of Artificial Sequence: Synthetic oligonucleotide
  Sense strand starting at position 2850 of SEQ ID NO: 1880787
uccagauuagauuguuuau

SEQ ID NO: 1993883 - RNA, 19 nt, Artificial Sequence
  Description of Artificial Sequence: Synthetic oligonucleotide
  Antisense strand to SEQ ID NO: 1993882
auaaacaaucuaaucugga

SEQ ID NO: 1993884 - RNA, 19 nt, Artificial Sequence
  Description of Artificial Sequence: Synthetic oligonucleotide
  Sense strand starting at position 2912 of SEQ ID NO: 1880787
auugguuaugcuuaagaau

SEQ ID NO: 1993885 - RNA, 19 nt, Artificial Sequence
  Description of Artificial Sequence: Synthetic oligonucleotide
  Antisense strand to SEQ ID NO: 1993884
auucuuaagcauaaccaau

SEQ ID NO: 1993886 - RNA, 19 nt, Artificial Sequence
  Description of Artificial Sequence: Synthetic oligonucleotide
  Sense strand starting at position 2952 of SEQ ID NO: 1880787
gugccucugaggcaaauau

SEQ ID NO: 1993887 - RNA, 19 nt, Artificial Sequence
  Description of Artificial Sequence: Synthetic oligonucleotide
  Antisense strand to SEQ ID NO: 1993886
auauuugccucagaggcac

SEQ ID NO: 1993888 - RNA, 19 nt, Artificial Sequence
  Description of Artificial Sequence: Synthetic oligonucleotide
  Sense strand starting at position 3043 of SEQ ID NO: 1880787
aauaacauuugaugaggua

SEQ ID NO: 1993889 - RNA, 19 nt, Artificial Sequence
  Description of Artificial Sequence: Synthetic oligonucleotide
  Antisense strand to SEQ ID NO: 1993888
uaccucaucaaauguuauu

SEQ ID NO: 1993890 - RNA, 19 nt, Artificial Sequence
  Description of Artificial Sequence: Synthetic oligonucleotide
  Sense strand starting at position 3055 of SEQ ID NO: 1880787
ugagguagguauagaggua

SEQ ID NO: 1993891 - RNA, 19 nt, Artificial Sequence
  Description of Artificial Sequence: Synthetic oligonucleotide
  Antisense strand to SEQ ID NO: 1993890
uaccucuauaccuaccuca

SEQ ID NO: 1993892 - RNA, 19 nt, Artificial Sequence
  Description of Artificial Sequence: Synthetic oligonucleotide
  Sense strand starting at position 3096 of SEQ ID NO: 1880787
ugagauucuuggguuagau

SEQ ID NO: 1993893 - RNA, 19 nt, Artificial Sequence
  Description of Artificial Sequence: Synthetic oligonucleotide
  Antisense strand to SEQ ID NO: 1993892
aucuaacccaagaaucuca

SEQ ID NO: 1993894 - RNA, 19 nt, Artificial Sequence
  Description of Artificial Sequence: Synthetic oligonucleotide
  Sense strand starting at position 3127 of SEQ ID NO: 1880787
aaugucuuucugggcaaua

SEQ ID NO: 1993895 - RNA, 19 nt, Artificial Sequence
  Description of Artificial Sequence: Synthetic oligonucleotide
  Antisense strand to SEQ ID NO: 1993894
uauugcccagaaagacauu

SEQ ID NO: 1993896 - RNA, 19 nt, Artificial Sequence
  Description of Artificial Sequence: Synthetic oligonucleotide
  Sense strand starting at position 3128 of SEQ ID NO: 1880787
augucuuucugggcaauaa

SEQ ID NO: 1993897 - RNA, 19 nt, Artificial Sequence
  Description of Artificial Sequence: Synthetic oligonucleotide
  Antisense strand to SEQ ID NO: 1993896
uuauugcccagaaagacau

SEQ ID NO: 1993898 - RNA, 19 nt, Artificial Sequence
  Description of Artificial Sequence: Synthetic oligonucleotide
  Sense strand starting at position 3129 of SEQ ID NO: 1880787
ugucuuucugggcaauaaa

SEQ ID NO: 1993899 - RNA, 19 nt, Artificial Sequence
  Description of Artificial Sequence: Synthetic oligonucleotide
  Antisense strand to SEQ ID NO: 1993898
uuuauugcccagaaagaca

SEQ ID NO: 1993900 - RNA, 19 nt, Artificial Sequence
  Description of Artificial Sequence: Synthetic oligonucleotide
  Sense strand starting at position 3220 of SEQ ID NO: 1880787
uagguuguguuccuaaaga

SEQ ID NO: 1993901 - RNA, 19 nt, Artificial Sequence
  Description of Artificial Sequence: Synthetic oligonucleotide
  Antisense strand to SEQ ID NO: 1993900
ucuuuaggaacacaaccua

SEQ ID NO: 1993902 - RNA, 19 nt, Artificial Sequence
  Description of Artificial Sequence: Synthetic oligonucleotide
  Sense strand starting at position 3231 of SEQ ID NO: 1880787
ccuaaagaguuguaaauuu

SEQ ID NO: 1993903 - RNA, 19 nt, Artificial Sequence
  Description of Artificial Sequence: Synthetic oligonucleotide
  Antisense strand to SEQ ID NO: 1993902
aaauuuacaacucuuuagg

SEQ ID NO: 1993904 - RNA, 19 nt, Artificial Sequence
  Description of Artificial Sequence: Synthetic oligonucleotide
  Sense strand starting at position 3337 of SEQ ID NO: 1880787
guaggcacuucuuuaaaga

SEQ ID NO: 1993905 - RNA, 19 nt, Artificial Sequence
  Description of Artificial Sequence: Synthetic oligonucleotide
  Antisense strand to SEQ ID NO: 1993904
ucuuuaaagaagugccuac

SEQ ID NO: 1993906 - RNA, 19 nt, Artificial Sequence
  Description of Artificial Sequence: Synthetic oligonucleotide
  Sense strand starting at position 3389 of SEQ ID NO: 1880787
cuaagugugguuugauuaa

SEQ ID NO: 1993907 - RNA, 19 nt, Artificial Sequence
  Description of Artificial Sequence: Synthetic oligonucleotide
  Antisense strand to SEQ ID NO: 1993906
uuaaucaaaccacacuuag

SEQ ID NO: 1993908 - RNA, 19 nt, Artificial Sequence
  Description of Artificial Sequence: Synthetic oligonucleotide
  Sense strand starting at position 3398 of SEQ ID NO: 1880787
guuugauuaaauuggugag

SEQ ID NO: 1993909 - RNA, 19 nt, Artificial Sequence
  Description of Artificial Sequence: Synthetic oligonucleotide
  Antisense strand to SEQ ID NO: 1993908
cucaccaauuuaaucaaac

SEQ ID NO: 1993910 - RNA, 19 nt, Artificial Sequence
  Description of Artificial Sequence: Synthetic oligonucleotide
  Sense strand starting at position 3399 of SEQ ID NO: 1880787
uuugauuaaauuggugagu

SEQ ID NO: 1993911 - RNA, 19 nt, Artificial Sequence
  Description of Artificial Sequence: Synthetic oligonucleotide
  Antisense strand to SEQ ID NO: 1993910
acucaccaauuuaaucaaa

SEQ ID NO: 1993912 - RNA, 19 nt, Artificial Sequence
  Description of Artificial Sequence: Synthetic oligonucleotide
  Sense strand starting at position 3434 of SEQ ID NO: 1880787
caaaguagacaguguucuu

SEQ ID NO: 1993913 - RNA, 19 nt, Artificial Sequence
  Description of Artificial Sequence: Synthetic oligonucleotide
  Antisense strand to SEQ ID NO: 1993912
aagaacacugucuacuuug

SEQ ID NO: 1993914 - RNA, 19 nt, Artificial Sequence
  Description of Artificial Sequence: Synthetic oligonucleotide
  Sense strand starting at position 3486 of SEQ ID NO: 1880787
ugguuuggucaagaucuua

SEQ ID NO: 1993915 - RNA, 19 nt, Artificial Sequence
  Description of Artificial Sequence: Synthetic oligonucleotide
  Antisense strand to SEQ ID NO: 1993914
uaagaucuugaccaaacca

SEQ ID NO: 1993916 - RNA, 19 nt, Artificial Sequence
  Description of Artificial Sequence: Synthetic oligonucleotide
  Sense strand starting at position 3491 of SEQ ID NO: 1880787
uggucaagaucuuauuuga

SEQ ID NO: 1993917 - RNA, 19 nt, Artificial Sequence
  Description of Artificial Sequence: Synthetic oligonucleotide
  Antisense strand to SEQ ID NO: 1993916
ucaaauaagaucuugacca

SEQ ID NO: 1993918 - RNA, 19 nt, Artificial Sequence
  Description of Artificial Sequence: Synthetic oligonucleotide
  Sense strand starting at position 3544 of SEQ ID NO: 1880787
gucugauagaucuaggugu

SEQ ID NO: 1993919 - RNA, 19 nt, Artificial Sequence
  Description of Artificial Sequence: Synthetic oligonucleotide
  Antisense strand to SEQ ID NO: 1993918
acaccuagaucuaucagac

SEQ ID NO: 1993920 - RNA, 19 nt, Artificial Sequence
  Description of Artificial Sequence: Synthetic oligonucleotide
  Sense strand starting at position 3546 of SEQ ID NO: 1880787
cugauagaucuagguguau

SEQ ID NO: 1993921 - RNA, 19 nt, Artificial Sequence
  Description of Artificial Sequence: Synthetic oligonucleotide
  Antisense strand to SEQ ID NO: 1993920
auacaccuagaucuaucag

SEQ ID NO: 1993922 - RNA, 19 nt, Artificial Sequence
  Description of Artificial Sequence: Synthetic oligonucleotide
  Sense strand starting at position 3550 of SEQ ID NO: 1880787
uagaucuagguguauuauu

SEQ ID NO: 1993923 - RNA, 19 nt, Artificial Sequence
  Description of Artificial Sequence: Synthetic oligonucleotide
  Antisense strand to SEQ ID NO: 1993922
aauaauacaccuagaucua

SEQ ID NO: 1993924 - RNA, 19 nt, Artificial Sequence
  Description of Artificial Sequence: Synthetic oligonucleotide
  Sense strand starting at position 3555 of SEQ ID NO: 1880787
cuagguguauuauucucau

SEQ ID NO: 1993925 - RNA, 19 nt, Artificial Sequence
  Description of Artificial Sequence: Synthetic oligonucleotide
  Antisense strand to SEQ ID NO: 1993924
augagaauaauacaccuag

SEQ ID NO: 1993926 - RNA, 19 nt, Artificial Sequence
  Description of Artificial Sequence: Synthetic oligonucleotide
  Sense strand starting at position 3558 of SEQ ID NO: 1880787
gguguauuauucucauuaa

SEQ ID NO: 1993927 - RNA, 19 nt, Artificial Sequence
  Description of Artificial Sequence: Synthetic oligonucleotide
  Antisense strand to SEQ ID NO: 1993926
uuaaugagaauaauacacc

SEQ ID NO: 1993928 - RNA, 19 nt, Artificial Sequence
  Description of Artificial Sequence: Synthetic oligonucleotide
  Sense strand starting at position 3635 of SEQ ID NO: 1880787
gaaggagucucuuuauaau

SEQ ID NO: 1993929 - RNA, 19 nt, Artificial Sequence
  Description of Artificial Sequence: Synthetic oligonucleotide
  Antisense strand to SEQ ID NO: 1993928
auuauaaagagacuccuuc

SEQ ID NO: 1993930 - RNA, 19 nt, Artificial Sequence
  Description of Artificial Sequence: Synthetic oligonucleotide
  Sense strand starting at position 3682 of SEQ ID NO: 1880787
uaucgcaugcuggauauaa

SEQ ID NO: 1993931 - RNA, 19 nt, Artificial Sequence
  Description of Artificial Sequence: Synthetic oligonucleotide
  Antisense strand to SEQ ID NO: 1993930
uuauauccagcaugcgaua

SEQ ID NO: 1993932 - RNA, 19 nt, Artificial Sequence
  Description of Artificial Sequence: Synthetic oligonucleotide
  Sense strand starting at position 3684 of SEQ ID NO: 1880787
ucgcaugcuggauauaaac

SEQ ID NO: 1993933 - RNA, 19 nt, Artificial Sequence
  Description of Artificial Sequence: Synthetic oligonucleotide
  Antisense strand to SEQ ID NO: 1993932
guuuauauccagcaugcga

SEQ ID NO: 1993934 - RNA, 19 nt, Artificial Sequence
  Description of Artificial Sequence: Synthetic oligonucleotide
  Sense strand starting at position 3936 of SEQ ID NO: 1880787
ggagacugaucucaagaaa

SEQ ID NO: 1993935 - RNA, 19 nt, Artificial Sequence
  Description of Artificial Sequence: Synthetic oligonucleotide
  Antisense strand to SEQ ID NO: 1993934
uuucuugagaucagucucc

SEQ ID NO: 1993936 - RNA, 19 nt, Artificial Sequence
  Description of Artificial Sequence: Synthetic oligonucleotide
  Sense strand starting at position 272 of SEQ ID NO: 1880789
agucaauaauugcugcuau

SEQ ID NO: 1993937 - RNA, 19 nt, Artificial Sequence
  Description of Artificial Sequence: Synthetic oligonucleotide
  Antisense strand to SEQ ID NO: 1993936
auagcagcaauuauugacu

SEQ ID NO: 1993938 - RNA, 19 nt, Artificial Sequence
  Description of Artificial Sequence: Synthetic oligonucleotide
  Sense strand starting at position 304 of SEQ ID NO: 1880789
ccugguggccuccagaauu

SEQ ID NO: 1993939 - RNA, 19 nt, Artificial Sequence
  Description of Artificial Sequence: Synthetic oligonucleotide
  Antisense strand to SEQ ID NO: 1993938
aauucuggaggccaccagg

SEQ ID NO: 1993940 - RNA, 19 nt, Artificial Sequence
  Description of Artificial Sequence: Synthetic oligonucleotide
  Sense strand starting at position 356 of SEQ ID NO: 1880789
cggaaagugcuguggaucu

SEQ ID NO: 1993941 - RNA, 19 nt, Artificial Sequence
  Description of Artificial Sequence: Synthetic oligonucleotide
  Antisense strand to SEQ ID NO: 1993940
agauccacagcacuuuccg

SEQ ID NO: 1993942 - RNA, 19 nt, Artificial Sequence
  Description of Artificial Sequence: Synthetic oligonucleotide
  Sense strand starting at position 358 of SEQ ID NO: 1880789
gaaagugcuguggaucuuu

SEQ ID NO: 1993943 - RNA, 19 nt, Artificial Sequence
  Description of Artificial Sequence: Synthetic oligonucleotide
  Antisense strand to SEQ ID NO: 1993942
aaagauccacagcacuuuc

SEQ ID NO: 1993944 - RNA, 19 nt, Artificial Sequence
  Description of Artificial Sequence: Synthetic oligonucleotide
  Sense strand starting at position 363 of SEQ ID NO: 1880789
ugcuguggaucuuugcaga

SEQ ID NO: 1993945 - RNA, 19 nt, Artificial Sequence
  Description of Artificial Sequence: Synthetic oligonucleotide
  Antisense strand to SEQ ID NO: 1993944
ucugcaaagauccacagca

SEQ ID NO: 1993946 - RNA, 19 nt, Artificial Sequence
  Description of Artificial Sequence: Synthetic oligonucleotide
  Sense strand starting at position 381 of SEQ ID NO: 1880789
aacccagcucgauggaaau

SEQ ID NO: 1993947 - RNA, 19 nt, Artificial Sequence
  Description of Artificial Sequence: Synthetic oligonucleotide
  Antisense strand to SEQ ID NO: 1993946
auuuccaucgagcuggguu

SEQ ID NO: 1993948 - RNA, 19 nt, Artificial Sequence
  Description of Artificial Sequence: Synthetic oligonucleotide
  Sense strand starting at position 422 of SEQ ID NO: 1880789
uggcacuguuauguaacua

SEQ ID NO: 1993949 - RNA, 19 nt, Artificial Sequence
  Description of Artificial Sequence: Synthetic oligonucleotide
  Antisense strand to SEQ ID NO: 1993948
uaguuacauaacagugcca

SEQ ID NO: 1993950 - RNA, 19 nt, Artificial Sequence
  Description of Artificial Sequence: Synthetic oligonucleotide
  Sense strand starting at position 426 of SEQ ID NO: 1880789
acuguuauguaacuacuga

SEQ ID NO: 1993951 - RNA, 19 nt, Artificial Sequence
  Description of Artificial Sequence: Synthetic oligonucleotide
  Antisense strand to SEQ ID NO: 1993950
ucaguaguuacauaacagu

SEQ ID NO: 1993952 - RNA, 19 nt, Artificial Sequence
  Description of Artificial Sequence: Synthetic oligonucleotide
  Sense strand starting at position 441 of SEQ ID NO: 1880789
cugagcauucccugaauuc

SEQ ID NO: 1993953 - RNA, 19 nt, Artificial Sequence
  Description of Artificial Sequence: Synthetic oligonucleotide
  Antisense strand to SEQ ID NO: 1993952
gaauucagggaaugcucag

SEQ ID NO: 1993954 - RNA, 19 nt, Artificial Sequence
  Description of Artificial Sequence: Synthetic oligonucleotide
  Sense strand starting at position 473 of SEQ ID NO: 1880789
ucacguagcagguauguga

SEQ ID NO: 1993955 - RNA, 19 nt, Artificial Sequence
  Description of Artificial Sequence: Synthetic oligonucleotide
  Antisense strand to SEQ ID NO: 1993954
ucacauaccugcuacguga

SEQ ID NO: 1993956 - RNA, 19 nt, Artificial Sequence
  Description of Artificial Sequence: Synthetic oligonucleotide
  Sense strand starting at position 484 of SEQ ID NO: 1880789
guaugugacgagugugaag

SEQ ID NO: 1993957 - RNA, 19 nt, Artificial Sequence
  Description of Artificial Sequence: Synthetic oligonucleotide
  Antisense strand to SEQ ID NO: 1993956
cuucacacucgucacauac

SEQ ID NO: 1993958 - RNA, 19 nt, Artificial Sequence
  Description of Artificial Sequence: Synthetic oligonucleotide
  Sense strand starting at position 510 of SEQ ID NO: 1880789
gggaauggguguguucuuu

SEQ ID NO: 1993959 - RNA, 19 nt, Artificial Sequence
  Description of Artificial Sequence: Synthetic oligonucleotide
  Antisense strand to SEQ ID NO: 1993958
aaagaacacacccauuccc

SEQ ID NO: 1993960 - RNA, 19 nt, Artificial Sequence
  Description of Artificial Sequence: Synthetic oligonucleotide
  Sense strand starting at position 615 of SEQ ID NO: 1880789
aggaguaccuaaggucaua

SEQ ID NO: 1993961 - RNA, 19 nt, Artificial Sequence
  Description of Artificial Sequence: Synthetic oligonucleotide
  Antisense strand to SEQ ID NO: 1993960
uaugaccuuagguacuccu

SEQ ID NO: 1993962 - RNA, 19 nt, Artificial Sequence
  Description of Artificial Sequence: Synthetic oligonucleotide
  Sense strand starting at position 676 of SEQ ID NO: 1880789
aggucuuacugaugaagac

SEQ ID NO: 1993963 - RNA, 19 nt, Artificial Sequence
  Description of Artificial Sequence: Synthetic oligonucleotide
  Antisense strand to SEQ ID NO: 1993962
gucuucaucaguaagaccu

SEQ ID NO: 1993964 - RNA, 19 nt, Artificial Sequence
  Description of Artificial Sequence: Synthetic oligonucleotide
  Sense strand starting at position 701 of SEQ ID NO: 1880789
guacuugacaaagaguguu

SEQ ID NO: 1993965 - RNA, 19 nt, Artificial Sequence
  Description of Artificial Sequence: Synthetic oligonucleotide
  Antisense strand to SEQ ID NO: 1993964
aacacucuuugucaaguac

SEQ ID NO: 1993966 - RNA, 19 nt, Artificial Sequence
  Description of Artificial Sequence: Synthetic oligonucleotide
  Sense strand starting at position 707 of SEQ ID NO: 1880789
gacaaagaguguuuccaac

SEQ ID NO: 1993967 - RNA, 19 nt, Artificial Sequence
  Description of Artificial Sequence: Synthetic oligonucleotide
  Antisense strand to SEQ ID NO: 1993966
guuggaaacacucuuuguc

SEQ ID NO: 1993968 - RNA, 19 nt, Artificial Sequence
  Description of Artificial Sequence: Synthetic oligonucleotide
  Sense strand starting at position 767 of SEQ ID NO: 1880789
cuucuauuuguuuggaugu

SEQ ID NO: 1993969 - RNA, 19 nt, Artificial Sequence
  Description of Artificial Sequence: Synthetic oligonucleotide
  Antisense strand to SEQ ID NO: 1993968
acauccaaacaaauagaag

SEQ ID NO: 1993970 - RNA, 19 nt, Artificial Sequence
  Description of Artificial Sequence: Synthetic oligonucleotide
  Sense strand starting at position 774 of SEQ ID NO: 1880789
uuguuuggauguggagaga

SEQ ID NO: 1993971 - RNA, 19 nt, Artificial Sequence
  Description of Artificial Sequence: Synthetic oligonucleotide
  Antisense strand to SEQ ID NO: 1993970
ucucuccacauccaaacaa

SEQ ID NO: 1993972 - RNA, 19 nt, Artificial Sequence
  Description of Artificial Sequence: Synthetic oligonucleotide
  Sense strand starting at position 797 of SEQ ID NO: 1880789
agaagaaauccacguggug

SEQ ID NO: 1993973 - RNA, 19 nt, Artificial Sequence
  Description of Artificial Sequence: Synthetic oligonucleotide
  Antisense strand to SEQ ID NO: 1993972
caccacguggauuucuucu

SEQ ID NO: 1993974 - RNA, 19 nt, Artificial Sequence
  Description of Artificial Sequence: Synthetic oligonucleotide
  Sense strand starting at position 848 of SEQ ID NO: 1880789
ccggguuuagucuguuuca

SEQ ID NO: 1993975 - RNA, 19 nt, Artificial Sequence
  Description of Artificial Sequence: Synthetic oligonucleotide
  Antisense strand to SEQ ID NO: 1993974
ugaaacagacuaaacccgg

SEQ ID NO: 1993976 - RNA, 19 nt, Artificial Sequence
  Description of Artificial Sequence: Synthetic oligonucleotide
  Sense strand starting at position 977 of SEQ ID NO: 1880789
gaggcaaagcucugauaua

SEQ ID NO: 1993977 - RNA, 19 nt, Artificial Sequence
  Description of Artificial Sequence: Synthetic oligonucleotide
  Antisense strand to SEQ ID NO: 1993976
uauaucagagcuuugccuc

SEQ ID NO: 1993978 - RNA, 19 nt, Artificial Sequence
  Description of Artificial Sequence: Synthetic oligonucleotide
  Sense strand starting at position 978 of SEQ ID NO: 1880789
aggcaaagcucugauauaa

SEQ ID NO: 1993979 - RNA, 19 nt, Artificial Sequence
  Description of Artificial Sequence: Synthetic oligonucleotide
  Antisense strand to SEQ ID NO: 1993978
uuauaucagagcuuugccu

SEQ ID NO: 1993980 - RNA, 19 nt, Artificial Sequence
  Description of Artificial Sequence: Synthetic oligonucleotide
  Sense strand starting at position 1013 of SEQ ID NO: 1880789
agaagugguccuuauguca

SEQ ID NO: 1993981 - RNA, 19 nt, Artificial Sequence
  Description of Artificial Sequence: Synthetic oligonucleotide
  Antisense strand to SEQ ID NO: 1993980
ugacauaaggaccacuucu

SEQ ID NO: 1993982 - RNA, 19 nt, Artificial Sequence
  Description of Artificial Sequence: Synthetic oligonucleotide
  Sense strand starting at position 1020 of SEQ ID NO: 1880789
guccuuaugucacccaguu

SEQ ID NO: 1993983 - RNA, 19 nt, Artificial Sequence
  Description of Artificial Sequence: Synthetic oligonucleotide
  Antisense strand to SEQ ID NO: 1993982
aacugggugacauaaggac

SEQ ID NO: 1993984 - RNA, 19 nt, Artificial Sequence
  Description of Artificial Sequence: Synthetic oligonucleotide
  Sense strand starting at position 1062 of SEQ ID NO: 1880789
acauucugaucccucgaau

SEQ ID NO: 1993985 - RNA, 19 nt, Artificial Sequence
  Description of Artificial Sequence: Synthetic oligonucleotide
  Antisense strand to SEQ ID NO: 1993984
auucgagggaucagaaugu

SEQ ID NO: 1993986 - RNA, 19 nt, Artificial Sequence
  Description of Artificial Sequence: Synthetic oligonucleotide
  Sense strand starting at position 1065 of SEQ ID NO: 1880789
uucugaucccucgaaucug

SEQ ID NO: 1993987 - RNA, 19 nt, Artificial Sequence
  Description of Artificial Sequence: Synthetic oligonucleotide
  Antisense strand to SEQ ID NO: 1993986
cagauucgagggaucagaa

SEQ ID NO: 1993988 - RNA, 19 nt, Artificial Sequence
  Description of Artificial Sequence: Synthetic oligonucleotide
  Sense strand starting at position 1110 of SEQ ID NO: 1880789
ugggacaaguuucuuaaac

SEQ ID NO: 1993989 - RNA, 19 nt, Artificial Sequence
  Description of Artificial Sequence: Synthetic oligonucleotide
  Antisense strand to SEQ ID NO: 1993988
guuuaagaaacuuguccca

SEQ ID NO: 1993990 - RNA, 19 nt, Artificial Sequence
  Description of Artificial Sequence: Synthetic oligonucleotide
  Sense strand starting at position 1111 of SEQ ID NO: 1880789
gggacaaguuucuuaaacc

SEQ ID NO: 1993991 - RNA, 19 nt, Artificial Sequence
  Description of Artificial Sequence: Synthetic oligonucleotide
  Antisense strand to SEQ ID NO: 1993990
gguuuaagaaacuuguccc

SEQ ID NO: 1993992 - RNA, 19 nt, Artificial Sequence
  Description of Artificial Sequence: Synthetic oligonucleotide
  Sense strand starting at position 1112 of SEQ ID NO: 1880789
ggacaaguuucuuaaaccu

SEQ ID NO: 1993993 - RNA, 19 nt, Artificial Sequence
  Description of Artificial Sequence: Synthetic oligonucleotide
  Antisense strand to SEQ ID NO: 1993992
agguuuaagaaacuugucc

SEQ ID NO: 1993994 - RNA, 19 nt, Artificial Sequence
  Description of Artificial Sequence: Synthetic oligonucleotide
  Sense strand starting at position 3024 of SEQ ID NO: 1880789
acaugaaguucucugugac

SEQ ID NO: 1993995 - RNA, 19 nt, Artificial Sequence
  Description of Artificial Sequence: Synthetic oligonucleotide
  Antisense strand to SEQ ID NO: 1993994
gucacagagaacuucaugu

SEQ ID NO: 1993996 - RNA, 19 nt, Artificial Sequence
  Description of Artificial Sequence: Synthetic oligonucleotide
  Sense strand starting at position 3156 of SEQ ID NO: 1880789
gcaacuuggccuugguaaa

SEQ ID NO: 1993997 - RNA, 19 nt, Artificial Sequence
  Description of Artificial Sequence: Synthetic oligonucleotide
  Antisense strand to SEQ ID NO: 1993996
uuuaccaaggccaaguugc

SEQ ID NO: 1993998 - RNA, 19 nt, Artificial Sequence
  Description of Artificial Sequence: Synthetic oligonucleotide
  Sense strand starting at position 3157 of SEQ ID NO: 1880789
caacuuggccuugguaaau

SEQ ID NO: 1993999 - RNA, 19 nt, Artificial Sequence
  Description of Artificial Sequence: Synthetic oligonucleotide
  Antisense strand to SEQ ID NO: 1993998
auuuaccaaggccaaguug

SEQ ID NO: 1994000 - RNA, 19 nt, Artificial Sequence
  Description of Artificial Sequence: Synthetic oligonucleotide
  Sense strand starting at position 3163 of SEQ ID NO: 1880789
ggccuugguaaaugcauaa

SEQ ID NO: 1994001 - RNA, 19 nt, Artificial Sequence
  Description of Artificial Sequence: Synthetic oligonucleotide
  Antisense strand to SEQ ID NO: 1994000
uuaugcauuuaccaaggcc

SEQ ID NO: 1994002 - RNA, 19 nt, Artificial Sequence
  Description of Artificial Sequence: Synthetic oligonucleotide
  Sense strand starting at position 3272 of SEQ ID NO: 1880789
gucagucccaguuguguuu

SEQ ID NO: 1994003 - RNA, 19 nt, Artificial Sequence
  Description of Artificial Sequence: Synthetic oligonucleotide
  Antisense strand to SEQ ID NO: 1994002
aaacacaacugggacugac

SEQ ID NO: 1994004 - RNA, 19 nt, Artificial Sequence
  Description of Artificial Sequence: Synthetic oligonucleotide
  Sense strand starting at position 3279 of SEQ ID NO: 1880789
ccaguuguguuuccaugau

SEQ ID NO: 1994005 - RNA, 19 nt, Artificial Sequence
  Description of Artificial Sequence: Synthetic oligonucleotide
  Antisense strand to SEQ ID NO: 1994004
aucauggaaacacaacugg

SEQ ID NO: 1994006 - RNA, 19 nt, Artificial Sequence
  Description of Artificial Sequence: Synthetic oligonucleotide
  Sense strand starting at position 3283 of SEQ ID NO: 1880789
uuguguuuccaugaugcag

SEQ ID NO: 1994007 - RNA, 19 nt, Artificial Sequence
  Description of Artificial Sequence: Synthetic oligonucleotide
  Antisense strand to SEQ ID NO: 1994006
cugcaucauggaaacacaa

SEQ ID NO: 1994008 - RNA, 19 nt, Artificial Sequence
  Description of Artificial Sequence: Synthetic oligonucleotide
  Sense strand starting at position 3759 of SEQ ID NO: 1880789
auaaguaaaucuggaagca

SEQ ID NO: 1994009 - RNA, 19 nt, Artificial Sequence
  Description of Artificial Sequence: Synthetic oligonucleotide
  Antisense strand to SEQ ID NO: 1994008
ugcuuccagauuuacuuau

SEQ ID NO: 1994010 - RNA, 19 nt, Artificial Sequence
  Description of Artificial Sequence: Synthetic oligonucleotide
  Sense strand starting at position 3802 of SEQ ID NO: 1880789
cucuuaugcugaugaggaa

SEQ ID NO: 1994011 - RNA, 19 nt, Artificial Sequence
  Description of Artificial Sequence: Synthetic oligonucleotide
  Antisense strand to SEQ ID NO: 1994010
uuccucaucagcauaagag

SEQ ID NO: 1994012 - RNA, 19 nt, Artificial Sequence
  Description of Artificial Sequence: Synthetic oligonucleotide
  Sense strand starting at position 3833 of SEQ ID NO: 1880789
aggagaaggucccugccaa

SEQ ID NO: 1994013 - RNA, 19 nt, Artificial Sequence
  Description of Artificial Sequence: Synthetic oligonucleotide
  Antisense strand to SEQ ID NO: 1994012
uuggcagggaccuucuccu

SEQ ID NO: 1994014 - RNA, 19 nt, Artificial Sequence
  Description of Artificial Sequence: Synthetic oligonucleotide
  Sense strand starting at position 3975 of SEQ ID NO: 1880789
aggaauggcugagagucaa

SEQ ID NO: 1994015 - RNA, 19 nt, Artificial Sequence
  Description of Artificial Sequence: Synthetic oligonucleotide
  Antisense strand to SEQ ID NO: 1994014
uugacucucagccauuccu

SEQ ID NO: 1994016 - RNA, 19 nt, Artificial Sequence
  Description of Artificial Sequence: Synthetic oligonucleotide
  Sense strand starting at position 25 of SEQ ID NO: 1880788
cuucuauuuguuuggaugu

SEQ ID NO: 1994017 - RNA, 19 nt, Artificial Sequence
  Description of Artificial Sequence: Synthetic oligonucleotide
  Antisense strand to SEQ ID NO: 1994016
acauccaaacaaauagaag

SEQ ID NO: 1994018 - RNA, 19 nt, Artificial Sequence
  Description of Artificial Sequence: Synthetic oligonucleotide
  Sense strand starting at position 32 of SEQ ID NO: 1880788
uuguuuggauguggagaga

SEQ ID NO: 1994019 - RNA, 19 nt, Artificial Sequence
  Description of Artificial Sequence: Synthetic oligonucleotide
  Antisense strand to SEQ ID NO: 1994018
ucucuccacauccaaacaa

SEQ ID NO: 1994020 - RNA, 19 nt, Artificial Sequence
  Description of Artificial Sequence: Synthetic oligonucleotide
  Sense strand starting at position 55 of SEQ ID NO: 1880788
agaagaaauccacguggug

SEQ ID NO: 1994021 - RNA, 19 nt, Artificial Sequence
  Description of Artificial Sequence: Synthetic oligonucleotide
  Antisense strand to SEQ ID NO: 1994020
caccacguggauuucuucu

SEQ ID NO: 1994022 - RNA, 19 nt, Artificial Sequence
  Description of Artificial Sequence: Synthetic oligonucleotide
  Sense strand starting at position 106 of SEQ ID NO: 1880788
ccggguuuagucuguuuca

SEQ ID NO: 1994023 - RNA, 19 nt, Artificial Sequence
  Description of Artificial Sequence: Synthetic oligonucleotide
  Antisense strand to SEQ ID NO: 1994022
ugaaacagacuaaacccgg

SEQ ID NO: 1994024 - RNA, 19 nt, Artificial Sequence
  Description of Artificial Sequence: Synthetic oligonucleotide
  Sense strand starting at position 235 of SEQ ID NO: 1880788
gaggcaaagcucugauaua

SEQ ID NO: 1994025 - RNA, 19 nt, Artificial Sequence
  Description of Artificial Sequence: Synthetic oligonucleotide
  Antisense strand to SEQ ID NO: 1994024
uauaucagagcuuugccuc

SEQ ID NO: 1994026 - RNA, 19 nt, Artificial Sequence
  Description of Artificial Sequence: Synthetic oligonucleotide
  Sense strand starting at position 236 of SEQ ID NO: 1880788
aggcaaagcucugauauaa

SEQ ID NO: 1994027 - RNA, 19 nt, Artificial Sequence
  Description of Artificial Sequence: Synthetic oligonucleotide
  Antisense strand to SEQ ID NO: 1994026
uuauaucagagcuuugccu

SEQ ID NO: 1994028 - RNA, 19 nt, Artificial Sequence
  Description of Artificial Sequence: Synthetic oligonucleotide
  Sense strand starting at position 271 of SEQ ID NO: 1880788
agaagugguccuuauguca

SEQ ID NO: 1994029 - RNA, 19 nt, Artificial Sequence
  Description of Artificial Sequence: Synthetic oligonucleotide
  Antisense strand to SEQ ID NO: 1994028
ugacauaaggaccacuucu

SEQ ID NO: 1994030 - RNA, 19 nt, Artificial Sequence
  Description of Artificial Sequence: Synthetic oligonucleotide
  Sense strand starting at position 278 of SEQ ID NO: 1880788
guccuuaugucacccaguu

SEQ ID NO: 1994031 - RNA, 19 nt, Artificial Sequence
  Description of Artificial Sequence: Synthetic oligonucleotide
  Antisense strand to SEQ ID NO: 1994030
aacugggugacauaaggac

SEQ ID NO: 1994032 - RNA, 19 nt, Artificial Sequence
  Description of Artificial Sequence: Synthetic oligonucleotide
  Sense strand starting at position 300 of SEQ ID NO: 1880788
ggcagugguugagagcaga

SEQ ID NO: 1994033 - RNA, 19 nt, Artificial Sequence
  Description of Artificial Sequence: Synthetic oligonucleotide
  Antisense strand to SEQ ID NO: 1994032
ucugcucucaaccacugcc

SEQ ID NO: 1994034 - RNA, 19 nt, Artificial Sequence
  Description of Artificial Sequence: Synthetic oligonucleotide
  Sense strand starting at position 320 of SEQ ID NO: 1880788
acauucugaucccucgaau

SEQ ID NO: 1994035 - RNA, 19 nt, Artificial Sequence
  Description of Artificial Sequence: Synthetic oligonucleotide
  Antisense strand to SEQ ID NO: 1994034
auucgagggaucagaaugu

SEQ ID NO: 1994036 - RNA, 19 nt, Artificial Sequence
  Description of Artificial Sequence: Synthetic oligonucleotide
  Sense strand starting at position 323 of SEQ ID NO: 1880788
uucugaucccucgaaucug

SEQ ID NO: 1994037 - RNA, 19 nt, Artificial Sequence
  Description of Artificial Sequence: Synthetic oligonucleotide
  Antisense strand to SEQ ID NO: 1994036
cagauucgagggaucagaa

SEQ ID NO: 1994038 - RNA, 19 nt, Artificial Sequence
  Description of Artificial Sequence: Synthetic oligonucleotide
  Sense strand starting at position 368 of SEQ ID NO: 1880788
ugggacaaguuucuuaaac

SEQ ID NO: 1994039 - RNA, 19 nt, Artificial Sequence
  Description of Artificial Sequence: Synthetic oligonucleotide
  Antisense strand to SEQ ID NO: 1994038
guuuaagaaacuuguccca

SEQ ID NO: 1994040 - RNA, 19 nt, Artificial Sequence
  Description of Artificial Sequence: Synthetic oligonucleotide
  Sense strand starting at position 369 of SEQ ID NO: 1880788
gggacaaguuucuuaaacc

SEQ ID NO: 1994041 - RNA, 19 nt, Artificial Sequence
  Description of Artificial Sequence: Synthetic oligonucleotide
  Antisense strand to SEQ ID NO: 1994040
gguuuaagaaacuuguccc

SEQ ID NO: 1994042 - RNA, 19 nt, Artificial Sequence
  Description of Artificial Sequence: Synthetic oligonucleotide
  Sense strand starting at position 370 of SEQ ID NO: 1880788
ggacaaguuucuuaaaccu

SEQ ID NO: 1994043 - RNA, 19 nt, Artificial Sequence
  Description of Artificial Sequence: Synthetic oligonucleotide
  Antisense strand to SEQ ID NO: 1994042
agguuuaagaaacuugucc

SEQ ID NO: 1994044 - RNA, 19 nt, Artificial Sequence
  Description of Artificial Sequence: Synthetic oligonucleotide
  Sense strand starting at position 498 of SEQ ID NO: 1880788
ucccaacaguguggugaaa

SEQ ID NO: 1994045 - RNA, 19 nt, Artificial Sequence
  Description of Artificial Sequence: Synthetic oligonucleotide
  Antisense strand to SEQ ID NO: 1994044
uuucaccacacuguuggga

SEQ ID NO: 1994046 - RNA, 19 nt, Artificial Sequence
  Description of Artificial Sequence: Synthetic oligonucleotide
  Sense strand starting at position 717 of SEQ ID NO: 1880788
gcugccaaguccuaagaca

SEQ ID NO: 1994047 - RNA, 19 nt, Artificial Sequence
  Description of Artificial Sequence: Synthetic oligonucleotide
  Antisense strand to SEQ ID NO: 1994046
ugucuuaggacuuggcagc

SEQ ID NO: 1994048 - RNA, 19 nt, Artificial Sequence
  Description of Artificial Sequence: Synthetic oligonucleotide
  Sense strand starting at position 2250 of SEQ ID NO: 1880788
ccuaauuccuccggcaacu

SEQ ID NO: 1994049 - RNA, 19 nt, Artificial Sequence
  Description of Artificial Sequence: Synthetic oligonucleotide
  Antisense strand to SEQ ID NO: 1994048
aguugccggaggaauuagg

SEQ ID NO: 1994050 - RNA, 19 nt, Artificial Sequence
  Description of Artificial Sequence: Synthetic oligonucleotide
  Sense strand starting at position 2282 of SEQ ID NO: 1880788
acaugaaguucucugugac

SEQ ID NO: 1994051 - RNA, 19 nt, Artificial Sequence
  Description of Artificial Sequence: Synthetic oligonucleotide
  Antisense strand to SEQ ID NO: 1994050
gucacagagaacuucaugu

SEQ ID NO: 1994052 - RNA, 19 nt, Artificial Sequence
  Description of Artificial Sequence: Synthetic oligonucleotide
  Sense strand starting at position 2414 of SEQ ID NO: 1880788
gcaacuuggccuugguaaa

SEQ ID NO: 1994053 - RNA, 19 nt, Artificial Sequence
  Description of Artificial Sequence: Synthetic oligonucleotide
  Antisense strand to SEQ ID NO: 1994052
uuuaccaaggccaaguugc

SEQ ID NO: 1994054 - RNA, 19 nt, Artificial Sequence
  Description of Artificial Sequence: Synthetic oligonucleotide
  Sense strand starting at position 2415 of SEQ ID NO: 1880788
caacuuggccuugguaaau

SEQ ID NO: 1994055 - RNA, 19 nt, Artificial Sequence
  Description of Artificial Sequence: Synthetic oligonucleotide
  Antisense strand to SEQ ID NO: 1994054
auuuaccaaggccaaguug

SEQ ID NO: 1994056 - RNA, 19 nt, Artificial Sequence
  Description of Artificial Sequence: Synthetic oligonucleotide
  Sense strand starting at position 2421 of SEQ ID NO: 1880788
ggccuugguaaaugcauaa

SEQ ID NO: 1994057 - RNA, 19 nt, Artificial Sequence
  Description of Artificial Sequence: Synthetic oligonucleotide
  Antisense strand to SEQ ID NO: 1994056
uuaugcauuuaccaaggcc

SEQ ID NO: 1994058 - RNA, 19 nt, Artificial Sequence
  Description of Artificial Sequence: Synthetic oligonucleotide
  Sense strand starting at position 2530 of SEQ ID NO: 1880788
gucagucccaguuguguuu

SEQ ID NO: 1994059 - RNA, 19 nt, Artificial Sequence
  Description of Artificial Sequence: Synthetic oligonucleotide
  Antisense strand to SEQ ID NO: 1994058
aaacacaacugggacugac

SEQ ID NO: 1994060 - RNA, 19 nt, Artificial Sequence
  Description of Artificial Sequence: Synthetic oligonucleotide
  Sense strand starting at position 2537 of SEQ ID NO: 1880788
ccaguuguguuuccaugau

SEQ ID NO: 1994061 - RNA, 19 nt, Artificial Sequence
  Description of Artificial Sequence: Synthetic oligonucleotide
  Antisense strand to SEQ ID NO: 1994060
aucauggaaacacaacugg

SEQ ID NO: 1994062 - RNA, 19 nt, Artificial Sequence
  Description of Artificial Sequence: Synthetic oligonucleotide
  Sense strand starting at position 2541 of SEQ ID NO: 1880788
uuguguuuccaugaugcag

SEQ ID NO: 1994063 - RNA, 19 nt, Artificial Sequence
  Description of Artificial Sequence: Synthetic oligonucleotide
  Antisense strand to SEQ ID NO: 1994062
cugcaucauggaaacacaa

SEQ ID NO: 1994064 - RNA, 19 nt, Artificial Sequence
  Description of Artificial Sequence: Synthetic oligonucleotide
  Sense strand starting at position 3017 of SEQ ID NO: 1880788
auaaguaaaucuggaagca

SEQ ID NO: 1994065 - RNA, 19 nt, Artificial Sequence
  Description of Artificial Sequence: Synthetic oligonucleotide
  Antisense strand to SEQ ID NO: 1994064
ugcuuccagauuuacuuau

SEQ ID NO: 1994066 - RNA, 19 nt, Artificial Sequence
  Description of Artificial Sequence: Synthetic oligonucleotide
  Sense strand starting at position 3060 of SEQ ID NO: 1880788
cucuuaugcugaugaggaa

SEQ ID NO: 1994067 - RNA, 19 nt, Artificial Sequence
  Description of Artificial Sequence: Synthetic oligonucleotide
  Antisense strand to SEQ ID NO: 1994066
uuccucaucagcauaagag

SEQ ID NO: 1994068 - RNA, 19 nt, Artificial Sequence
  Description of Artificial Sequence: Synthetic oligonucleotide
  Sense strand starting at position 3091 of SEQ ID NO: 1880788
aggagaaggucccugccaa

SEQ ID NO: 1994069 - RNA, 19 nt, Artificial Sequence
  Description of Artificial Sequence: Synthetic oligonucleotide
  Antisense strand to SEQ ID NO: 1994068
uuggcagggaccuucuccu

SEQ ID NO: 1994070 - RNA, 19 nt, Artificial Sequence
  Description of Artificial Sequence: Synthetic oligonucleotide
  Sense strand starting at position 3233 of SEQ ID NO: 1880788
aggaauggcugagagucaa

SEQ ID NO: 1994071 - RNA, 19 nt, Artificial Sequence
  Description of Artificial Sequence: Synthetic oligonucleotide
  Antisense strand to SEQ ID NO: 1994070
uugacucucagccauuccu

SEQ ID NO: 1994072 - RNA, 19 nt, Artificial Sequence
  Description of Artificial Sequence: Synthetic oligonucleotide
  Sense strand starting at position 3412 of SEQ ID NO: 1880788
aguucagcauuggaggaau

SEQ ID NO: 1994073 - RNA, 19 nt, Artificial Sequence
  Description of Artificial Sequence: Synthetic oligonucleotide
  Antisense strand to SEQ ID NO: 1994072
auuccuccaaugcugaacu

SEQ ID NO: 1994074 - RNA, 19 nt, Artificial Sequence
  Description of Artificial Sequence: Synthetic oligonucleotide
  Sense strand starting at position 3524 of SEQ ID NO: 1880788
cuugaaaugcuggagcaga

SEQ ID NO: 1994075 - RNA, 19 nt, Artificial Sequence
  Description of Artificial Sequence: Synthetic oligonucleotide
  Antisense strand to SEQ ID NO: 1994074
ucugcuccagcauuucaag

SEQ ID NO: 1994076 - RNA, 19 nt, Artificial Sequence
  Description of Artificial Sequence: Synthetic oligonucleotide
  Sense strand starting at position 3561 of SEQ ID NO: 1880788
gugugugagaccugucaca

SEQ ID NO: 1994077 - RNA, 19 nt, Artificial Sequence
  Description of Artificial Sequence: Synthetic oligonucleotide
  Antisense strand to SEQ ID NO: 1994076
ugugacaggucucacacac

SEQ ID NO: 1994078 - RNA, 19 nt, Artificial Sequence
  Description of Artificial Sequence: Synthetic oligonucleotide
  Sense strand starting at position 3727 of SEQ ID NO: 1880788
cuagaaagcccuuggacuu

SEQ ID NO: 1994079 - RNA, 19 nt, Artificial Sequence
  Description of Artificial Sequence: Synthetic oligonucleotide
  Antisense strand to SEQ ID NO: 1994078
aaguccaagggcuuucuag

SEQ ID NO: 1994080 - RNA, 19 nt, Artificial Sequence
  Description of Artificial Sequence: Synthetic oligonucleotide
  Sense strand starting at position 3786 of SEQ ID NO: 1880788
agaguaaccacagggucau

SEQ ID NO: 1994081 - RNA, 19 nt, Artificial Sequence
  Description of Artificial Sequence: Synthetic oligonucleotide
  Antisense strand to SEQ ID NO: 1994080
augacccugugguuacucu

SEQ ID NO: 1994082 - RNA, 19 nt, Artificial Sequence
  Description of Artificial Sequence: Synthetic oligonucleotide
  Sense strand starting at position 3792 of SEQ ID NO: 1880788
accacagggucaugugaua

SEQ ID NO: 1994083 - RNA, 19 nt, Artificial Sequence
  Description of Artificial Sequence: Synthetic oligonucleotide
  Antisense strand to SEQ ID NO: 1994082
uaucacaugacccuguggu

SEQ ID NO: 1994084 - RNA, 19 nt, Artificial Sequence
  Description of Artificial Sequence: Synthetic oligonucleotide
  Sense strand starting at position 17 of SEQ ID NO: 1880790
acguguugcauugaacuga

SEQ ID NO: 1994085 - RNA, 19 nt, Artificial Sequence
  Description of Artificial Sequence: Synthetic oligonucleotide
  Antisense strand to SEQ ID NO: 1994084
ucaguucaaugcaacacgu

SEQ ID NO: 1994086 - RNA, 19 nt, Artificial Sequence
  Description of Artificial Sequence: Synthetic oligonucleotide
  Sense strand starting at position 21 of SEQ ID NO: 1880790
guugcauugaacugaagag

SEQ ID NO: 1994087 - RNA, 19 nt, Artificial Sequence
  Description of Artificial Sequence: Synthetic oligonucleotide
  Antisense strand to SEQ ID NO: 1994086
cucuucaguucaaugcaac

SEQ ID NO: 1994088 - RNA, 19 nt, Artificial Sequence
  Description of Artificial Sequence: Synthetic oligonucleotide
  Sense strand starting at position 22 of SEQ ID NO: 1880790
uugcauugaacugaagagu

SEQ ID NO: 1994089 - RNA, 19 nt, Artificial Sequence
  Description of Artificial Sequence: Synthetic oligonucleotide
  Antisense strand to SEQ ID NO: 1994088
acucuucaguucaaugcaa

SEQ ID NO: 1994090 - RNA, 19 nt, Artificial Sequence
  Description of Artificial Sequence: Synthetic oligonucleotide
  Sense strand starting at position 60 of SEQ ID NO: 1880790
ucugucaugcucugucaau

SEQ ID NO: 1994091 - RNA, 19 nt, Artificial Sequence
  Description of Artificial Sequence: Synthetic oligonucleotide
  Antisense strand to SEQ ID NO: 1994090
auugacagagcaugacaga

SEQ ID NO: 1994092 - RNA, 19 nt, Artificial Sequence
  Description of Artificial Sequence: Synthetic oligonucleotide
  Sense strand starting at position 61 of SEQ ID NO: 1880790
cugucaugcucugucaauc

SEQ ID NO: 1994093 - RNA, 19 nt, Artificial Sequence
  Description of Artificial Sequence: Synthetic oligonucleotide
  Antisense strand to SEQ ID NO: 1994092
gauugacagagcaugacag

SEQ ID NO: 1994094 - RNA, 19 nt, Artificial Sequence
  Description of Artificial Sequence: Synthetic oligonucleotide
  Sense strand starting at position 69 of SEQ ID NO: 1880790
cucugucaaucucugcaga

SEQ ID NO: 1994095 - RNA, 19 nt, Artificial Sequence
  Description of Artificial Sequence: Synthetic oligonucleotide
  Antisense strand to SEQ ID NO: 1994094
ucugcagagauugacagag

SEQ ID NO: 1994096 - RNA, 19 nt, Artificial Sequence
  Description of Artificial Sequence: Synthetic oligonucleotide
  Sense strand starting at position 362 of SEQ ID NO: 1880790
uguagcucuuaucaggaaa

SEQ ID NO: 1994097 - RNA, 19 nt, Artificial Sequence
  Description of Artificial Sequence: Synthetic oligonucleotide
  Antisense strand to SEQ ID NO: 1994096
uuuccugauaagagcuaca

SEQ ID NO: 1994098 - RNA, 19 nt, Artificial Sequence
  Description of Artificial Sequence: Synthetic oligonucleotide
  Sense strand starting at position 383 of SEQ ID NO: 1880790
cugggagcugccugauaca

SEQ ID NO: 1994099 - RNA, 19 nt, Artificial Sequence
  Description of Artificial Sequence: Synthetic oligonucleotide
  Antisense strand to SEQ ID NO: 1994098
uguaucaggcagcucccag

SEQ ID NO: 1994100 - RNA, 19 nt, Artificial Sequence
  Description of Artificial Sequence: Synthetic oligonucleotide
  Sense strand starting at position 520 of SEQ ID NO: 1880790
aaaugugcucaccaguaag

SEQ ID NO: 1994101 - RNA, 19 nt, Artificial Sequence
  Description of Artificial Sequence: Synthetic oligonucleotide
  Antisense strand to SEQ ID NO: 1994100
cuuacuggugagcacauuu

SEQ ID NO: 1994102 - RNA, 19 nt, Artificial Sequence
  Description of Artificial Sequence: Synthetic oligonucleotide
  Sense strand starting at position 523 of SEQ ID NO: 1880790
ugugcucaccaguaaggaa

SEQ ID NO: 1994103 - RNA, 19 nt, Artificial Sequence
  Description of Artificial Sequence: Synthetic oligonucleotide
  Antisense strand to SEQ ID NO: 1994102
uuccuuacuggugagcaca

SEQ ID NO: 1994104 - RNA, 19 nt, Artificial Sequence
  Description of Artificial Sequence: Synthetic oligonucleotide
  Sense strand starting at position 560 of SEQ ID NO: 1880790
gacauugugugaccuugaa

SEQ ID NO: 1994105 - RNA, 19 nt, Artificial Sequence
  Description of Artificial Sequence: Synthetic oligonucleotide
  Antisense strand to SEQ ID NO: 1994104
uucaaggucacacaauguc

SEQ ID NO: 1994106 - RNA, 19 nt, Artificial Sequence
  Description of Artificial Sequence: Synthetic oligonucleotide
  Sense strand starting at position 564 of SEQ ID NO: 1880790
uugugugaccuugaauuaa

SEQ ID NO: 1994107 - RNA, 19 nt, Artificial Sequence
  Description of Artificial Sequence: Synthetic oligonucleotide
  Antisense strand to SEQ ID NO: 1994106
uuaauucaaggucacacaa

SEQ ID NO: 1994108 - RNA, 19 nt, Artificial Sequence
  Description of Artificial Sequence: Synthetic oligonucleotide
  Sense strand starting at position 599 of SEQ ID NO: 1880790
uuugucuuccucuguuuaa

SEQ ID NO: 1994109 - RNA, 19 nt, Artificial Sequence
  Description of Artificial Sequence: Synthetic oligonucleotide
  Antisense strand to SEQ ID NO: 1994108
uuaaacagaggaagacaaa

SEQ ID NO: 1994110 - RNA, 19 nt, Artificial Sequence
  Description of Artificial Sequence: Synthetic oligonucleotide
  Sense strand starting at position 600 of SEQ ID NO: 1880790
uugucuuccucuguuuaaa

SEQ ID NO: 1994111 - RNA, 19 nt, Artificial Sequence
  Description of Artificial Sequence: Synthetic oligonucleotide
  Antisense strand to SEQ ID NO: 1994110
uuuaaacagaggaagacaa

SEQ ID NO: 1994112 - RNA, 19 nt, Artificial Sequence
  Description of Artificial Sequence: Synthetic oligonucleotide
  Sense strand starting at position 679 of SEQ ID NO: 1880790
gauagaauacggugaacug

SEQ ID NO: 1994113 - RNA, 19 nt, Artificial Sequence
  Description of Artificial Sequence: Synthetic oligonucleotide
  Antisense strand to SEQ ID NO: 1994112
caguucaccguauucuauc

SEQ ID NO: 1994114 - RNA, 19 nt, Artificial Sequence
  Description of Artificial Sequence: Synthetic oligonucleotide
  Sense strand starting at position 766 of SEQ ID NO: 1880790
acacuuaauugugguaaac

SEQ ID NO: 1994115 - RNA, 19 nt, Artificial Sequence
  Description of Artificial Sequence: Synthetic oligonucleotide
  Antisense strand to SEQ ID NO: 1994114
guuuaccacaauuaagugu

SEQ ID NO: 1994116 - RNA, 19 nt, Artificial Sequence
  Description of Artificial Sequence: Synthetic oligonucleotide
  Sense strand starting at position 768 of SEQ ID NO: 1880790
acuuaauugugguaaacua

SEQ ID NO: 1994117 - RNA, 19 nt, Artificial Sequence
  Description of Artificial Sequence: Synthetic oligonucleotide
  Antisense strand to SEQ ID NO: 1994116
uaguuuaccacaauuaagu

SEQ ID NO: 1994118 - RNA, 19 nt, Artificial Sequence
  Description of Artificial Sequence: Synthetic oligonucleotide
  Sense strand starting at position 776 of SEQ ID NO: 1880790
gugguaaacuauuaauaag

SEQ ID NO: 1994119 - RNA, 19 nt, Artificial Sequence
  Description of Artificial Sequence: Synthetic oligonucleotide
  Antisense strand to SEQ ID NO: 1994118
cuuauuaauaguuuaccac

SEQ ID NO: 1994120 - RNA, 19 nt, Artificial Sequence
  Description of Artificial Sequence: Synthetic oligonucleotide
  Sense strand starting at position 802 of SEQ ID NO: 1880790
ggccaacuguccuaugaaa

SEQ ID NO: 1994121 - RNA, 19 nt, Artificial Sequence
  Description of Artificial Sequence: Synthetic oligonucleotide
  Antisense strand to SEQ ID NO: 1994120
uuucauaggacaguuggcc

SEQ ID NO: 1994122 - RNA, 19 nt, Artificial Sequence
  Description of Artificial Sequence: Synthetic oligonucleotide
  Sense strand starting at position 851 of SEQ ID NO: 1880790
ucucguucucuccagcaca

SEQ ID NO: 1994123 - RNA, 19 nt, Artificial Sequence
  Description of Artificial Sequence: Synthetic oligonucleotide
  Antisense strand to SEQ ID NO: 1994122
ugugcuggagagaacgaga

SEQ ID NO: 1994124 - RNA, 19 nt, Artificial Sequence
  Description of Artificial Sequence: Synthetic oligonucleotide
  Sense strand starting at position 932 of SEQ ID NO: 1880790
guuucuaaaugcuuuggua

SEQ ID NO: 1994125 - RNA, 19 nt, Artificial Sequence
  Description of Artificial Sequence: Synthetic oligonucleotide
  Antisense strand to SEQ ID NO: 1994124
uaccaaagcauuuagaaac

SEQ ID NO: 1994126 - RNA, 19 nt, Artificial Sequence
  Description of Artificial Sequence: Synthetic oligonucleotide
  Sense strand starting at position 934 of SEQ ID NO: 1880790
uucuaaaugcuuugguacu

SEQ ID NO: 1994127 - RNA, 19 nt, Artificial Sequence
  Description of Artificial Sequence: Synthetic oligonucleotide
  Antisense strand to SEQ ID NO: 1994126
aguaccaaagcauuuagaa

SEQ ID NO: 1994128 - RNA, 19 nt, Artificial Sequence
  Description of Artificial Sequence: Synthetic oligonucleotide
  Sense strand starting at position 1053 of SEQ ID NO: 1880790
ucgcguucccguuucaaau

SEQ ID NO: 1994129 - RNA, 19 nt, Artificial Sequence
  Description of Artificial Sequence: Synthetic oligonucleotide
  Antisense strand to SEQ ID NO: 1994128
auuugaaacgggaacgcga

SEQ ID NO: 1994130 - RNA, 19 nt, Artificial Sequence
  Description of Artificial Sequence: Synthetic oligonucleotide
  Sense strand starting at position 1054 of SEQ ID NO: 1880790
cgcguucccguuucaaauu

SEQ ID NO: 1994131 - RNA, 19 nt, Artificial Sequence
  Description of Artificial Sequence: Synthetic oligonucleotide
  Antisense strand to SEQ ID NO: 1994130
aauuugaaacgggaacgcg

SEQ ID NO: 1994132 - RNA, 19 nt, Artificial Sequence
  Description of Artificial Sequence: Synthetic oligonucleotide
  Sense strand starting at position 1179 of SEQ ID NO: 1880790
gggugcauucuagagcuuu

SEQ ID NO: 1994133 - RNA, 19 nt, Artificial Sequence
  Description of Artificial Sequence: Synthetic oligonucleotide
  Antisense strand to SEQ ID NO: 1994132
aaagcucuagaaugcaccc

SEQ ID NO: 1994134 - RNA, 19 nt, Artificial Sequence
  Description of Artificial Sequence: Synthetic oligonucleotide
  Sense strand starting at position 1207 of SEQ ID NO: 1880790
cccaauuucucguuggcga

SEQ ID NO: 1994135 - RNA, 19 nt, Artificial Sequence
  Description of Artificial Sequence: Synthetic oligonucleotide
  Antisense strand to SEQ ID NO: 1994134
ucgccaacgagaaauuggg

SEQ ID NO: 1994136 - RNA, 19 nt, Artificial Sequence
  Description of Artificial Sequence: Synthetic oligonucleotide
  Sense strand starting at position 1318 of SEQ ID NO: 1880790
agccgcuuucccugagaga

SEQ ID NO: 1994137 - RNA, 19 nt, Artificial Sequence
  Description of Artificial Sequence: Synthetic oligonucleotide
  Antisense strand to SEQ ID NO: 1994136
ucucucagggaaagcggcu

SEQ ID NO: 1994138 - RNA, 19 nt, Artificial Sequence
  Description of Artificial Sequence: Synthetic oligonucleotide
  Sense strand starting at position 1319 of SEQ ID NO: 1880790
gccgcuuucccugagagau

SEQ ID NO: 1994139 - RNA, 19 nt, Artificial Sequence
  Description of Artificial Sequence: Synthetic oligonucleotide
  Antisense strand to SEQ ID NO: 1994138
aucucucagggaaagcggc

SEQ ID NO: 1994140 - RNA, 19 nt, Artificial Sequence
  Description of Artificial Sequence: Synthetic oligonucleotide
  Sense strand starting at position 1321 of SEQ ID NO: 1880790
cgcuuucccugagagauug

SEQ ID NO: 1994141 - RNA, 19 nt, Artificial Sequence
  Description of Artificial Sequence: Synthetic oligonucleotide
  Antisense strand to SEQ ID NO: 1994140
caaucucucagggaaagcg

SEQ ID NO: 1994142 - RNA, 19 nt, Artificial Sequence
  Description of Artificial Sequence: Synthetic oligonucleotide
  Sense strand starting at position 1437 of SEQ ID NO: 1880790
gacacuuccucagcgggaa

SEQ ID NO: 1994143 - RNA, 19 nt, Artificial Sequence
  Description of Artificial Sequence: Synthetic oligonucleotide
  Antisense strand to SEQ ID NO: 1994142
uucccgcugaggaaguguc

SEQ ID NO: 1994144 - RNA, 19 nt, Artificial Sequence
  Description of Artificial Sequence: Synthetic oligonucleotide
  Sense strand starting at position 1640 of SEQ ID NO: 1880790
cguacacuauuguuucuaa

SEQ ID NO: 1994145 - RNA, 19 nt, Artificial Sequence
  Description of Artificial Sequence: Synthetic oligonucleotide
  Antisense strand to SEQ ID NO: 1994144
uuagaaacaauaguguacg

SEQ ID NO: 1994146 - RNA, 19 nt, Artificial Sequence
  Description of Artificial Sequence: Synthetic oligonucleotide
  Sense strand starting at position 1641 of SEQ ID NO: 1880790
guacacuauuguuucuaau

SEQ ID NO: 1994147 - RNA, 19 nt, Artificial Sequence
  Description of Artificial Sequence: Synthetic oligonucleotide
  Antisense strand to SEQ ID NO: 1994146
auuagaaacaauaguguac

SEQ ID NO: 1994148 - RNA, 19 nt, Artificial Sequence
  Description of Artificial Sequence: Synthetic oligonucleotide
  Sense strand starting at position 1643 of SEQ ID NO: 1880790
acacuauuguuucuaaugu

SEQ ID NO: 1994149 - RNA, 19 nt, Artificial Sequence
  Description of Artificial Sequence: Synthetic oligonucleotide
  Antisense strand to SEQ ID NO: 1994148
acauuagaaacaauagugu

SEQ ID NO: 1994150 - RNA, 19 nt, Artificial Sequence
  Description of Artificial Sequence: Synthetic oligonucleotide
  Sense strand starting at position 1713 of SEQ ID NO: 1880790
uguggcuuuaaccgaaaga

SEQ ID NO: 1994151 - RNA, 19 nt, Artificial Sequence
  Description of Artificial Sequence: Synthetic oligonucleotide
  Antisense strand to SEQ ID NO: 1994150
ucuuucgguuaaagccaca

SEQ ID NO: 1994152 - RNA, 19 nt, Artificial Sequence
  Description of Artificial Sequence: Synthetic oligonucleotide
  Sense strand starting at position 1714 of SEQ ID NO: 1880790
guggcuuuaaccgaaagaa

SEQ ID NO: 1994153 - RNA, 19 nt, Artificial Sequence
  Description of Artificial Sequence: Synthetic oligonucleotide
  Antisense strand to SEQ ID NO: 1994152
uucuuucgguuaaagccac

SEQ ID NO: 1994154 - RNA, 19 nt, Artificial Sequence
  Description of Artificial Sequence: Synthetic oligonucleotide
  Sense strand starting at position 1724 of SEQ ID NO: 1880790
ccgaaagaaacuugcgaaa

SEQ ID NO: 1994155 - RNA, 19 nt, Artificial Sequence
  Description of Artificial Sequence: Synthetic oligonucleotide
  Antisense strand to SEQ ID NO: 1994154
uuucgcaaguuucuuucgg

SEQ ID NO: 1994156 - RNA, 19 nt, Artificial Sequence
  Description of Artificial Sequence: Synthetic oligonucleotide
  Sense strand starting at position 2206 of SEQ ID NO: 1880790
ccgccagugccguuagagu

SEQ ID NO: 1994157 - RNA, 19 nt, Artificial Sequence
  Description of Artificial Sequence: Synthetic oligonucleotide
  Antisense strand to SEQ ID NO: 1994156
acucuaacggcacuggcgg

SEQ ID NO: 1994158 - RNA, 19 nt, Artificial Sequence
  Description of Artificial Sequence: Synthetic oligonucleotide
  Sense strand starting at position 2213 of SEQ ID NO: 1880790
ugccguuagaguuaauaaa

SEQ ID NO: 1994159 - RNA, 19 nt, Artificial Sequence
  Description of Artificial Sequence: Synthetic oligonucleotide
  Antisense strand to SEQ ID NO: 1994158
uuuauuaacucuaacggca

SEQ ID NO: 1994160 - RNA, 19 nt, Artificial Sequence
  Description of Artificial Sequence: Synthetic oligonucleotide
  Sense strand starting at position 2273 of SEQ ID NO: 1880790
gcccaucgugcgcuucauu

SEQ ID NO: 1994161 - RNA, 19 nt, Artificial Sequence
  Description of Artificial Sequence: Synthetic oligonucleotide
  Antisense strand to SEQ ID NO: 1994160
aaugaagcgcacgaugggc

SEQ ID NO: 1994162 - RNA, 19 nt, Artificial Sequence
  Description of Artificial Sequence: Synthetic oligonucleotide
  Sense strand starting at position 2293 of SEQ ID NO: 1880790
ucacuacugcagugucaga

SEQ ID NO: 1994163 - RNA, 19 nt, Artificial Sequence
  Description of Artificial Sequence: Synthetic oligonucleotide
  Antisense strand to SEQ ID NO: 1994162
ucugacacugcaguaguga

SEQ ID NO: 1994164 - RNA, 19 nt, Artificial Sequence
  Description of Artificial Sequence: Synthetic oligonucleotide
  Sense strand starting at position 7 of SEQ ID NO: 1880791
auaguauggucaucauaau

SEQ ID NO: 1994165 - RNA, 19 nt, Artificial Sequence
  Description of Artificial Sequence: Synthetic oligonucleotide
  Antisense strand to SEQ ID NO: 1994164
auuaugaugaccauacuau

SEQ ID NO: 1994166 - RNA, 19 nt, Artificial Sequence
  Description of Artificial Sequence: Synthetic oligonucleotide
  Sense strand starting at position 8 of SEQ ID NO: 1880791
uaguauggucaucauaaug

SEQ ID NO: 1994167 - RNA, 19 nt, Artificial Sequence
  Description of Artificial Sequence: Synthetic oligonucleotide
  Antisense strand to SEQ ID NO: 1994166
cauuaugaugaccauacua

SEQ ID NO: 1994168 - RNA, 19 nt, Artificial Sequence
  Description of Artificial Sequence: Synthetic oligonucleotide
  Sense strand starting at position 113 of SEQ ID NO: 1880791
uuugaucgagacuauucua

SEQ ID NO: 1994169 - RNA, 19 nt, Artificial Sequence
  Description of Artificial Sequence: Synthetic oligonucleotide
  Antisense strand to SEQ ID NO: 1994168
uagaauagucucgaucaaa

SEQ ID NO: 1994170 - RNA, 19 nt, Artificial Sequence
  Description of Artificial Sequence: Synthetic oligonucleotide
  Sense strand starting at position 116 of SEQ ID NO: 1880791
gaucgagacuauucuagau

SEQ ID NO: 1994171 - RNA, 19 nt, Artificial Sequence
  Description of Artificial Sequence: Synthetic oligonucleotide
  Antisense strand to SEQ ID NO: 1994170
aucuagaauagucucgauc

SEQ ID NO: 1994172 - RNA, 19 nt, Artificial Sequence
  Description of Artificial Sequence: Synthetic oligonucleotide
  Sense strand starting at position 179 of SEQ ID NO: 1880791
cguauauagaaaugaugau

SEQ ID NO: 1994173 - RNA, 19 nt, Artificial Sequence
  Description of Artificial Sequence: Synthetic oligonucleotide
  Antisense strand to SEQ ID NO: 1994172
aucaucauuucuauauacg

SEQ ID NO: 1994174 - RNA, 19 nt, Artificial Sequence
  Description of Artificial Sequence: Synthetic oligonucleotide
  Sense strand starting at position 191 of SEQ ID NO: 1880791
ugaugaugcaauugugaau

SEQ ID NO: 1994175 - RNA, 19 nt, Artificial Sequence
  Description of Artificial Sequence: Synthetic oligonucleotide
  Antisense strand to SEQ ID NO: 1994174
auucacaauugcaucauca

SEQ ID NO: 1994176 - RNA, 19 nt, Artificial Sequence
  Description of Artificial Sequence: Synthetic oligonucleotide
  Sense strand starting at position 197 of SEQ ID NO: 1880791
ugcaauugugaauaucuau

SEQ ID NO: 1994177 - RNA, 19 nt, Artificial Sequence
  Description of Artificial Sequence: Synthetic oligonucleotide
  Antisense strand to SEQ ID NO: 1994176
auagauauucacaauugca

SEQ ID NO: 1994178 - RNA, 19 nt, Artificial Sequence
  Description of Artificial Sequence: Synthetic oligonucleotide
  Sense strand starting at position 425 of SEQ ID NO: 1880791
augugugacagagaauagu

SEQ ID NO: 1994179 - RNA, 19 nt, Artificial Sequence
  Description of Artificial Sequence: Synthetic oligonucleotide
  Antisense strand to SEQ ID NO: 1994178
acuauucucugucacacau

SEQ ID NO: 1994180 - RNA, 19 nt, Artificial Sequence
  Description of Artificial Sequence: Synthetic oligonucleotide
  Sense strand starting at position 519 of SEQ ID NO: 1880791
gauuguaaggauuggagcu

SEQ ID NO: 1994181 - RNA, 19 nt, Artificial Sequence
  Description of Artificial Sequence: Synthetic oligonucleotide
  Antisense strand to SEQ ID NO: 1994180
agcuccaauccuuacaauc

SEQ ID NO: 1994182 - RNA, 19 nt, Artificial Sequence
  Description of Artificial Sequence: Synthetic oligonucleotide
  Sense strand starting at position 520 of SEQ ID NO: 1880791
auuguaaggauuggagcua

SEQ ID NO: 1994183 - RNA, 19 nt, Artificial Sequence
  Description of Artificial Sequence: Synthetic oligonucleotide
  Antisense strand to SEQ ID NO: 1994182
uagcuccaauccuuacaau

SEQ ID NO: 1994184 - RNA, 19 nt, Artificial Sequence
  Description of Artificial Sequence: Synthetic oligonucleotide
  Sense strand starting at position 634 of SEQ ID NO: 1880791
aagaacugugcuggacauu

SEQ ID NO: 1994185 - RNA, 19 nt, Artificial Sequence
  Description of Artificial Sequence: Synthetic oligonucleotide
  Antisense strand to SEQ ID NO: 1994184
aauguccagcacaguucuu

SEQ ID NO: 1994186 - RNA, 19 nt, Artificial Sequence
  Description of Artificial Sequence: Synthetic oligonucleotide
  Sense strand starting at position 713 of SEQ ID NO: 1880791
aguauacuguaauugaaag

SEQ ID NO: 1994187 - RNA, 19 nt, Artificial Sequence
  Description of Artificial Sequence: Synthetic oligonucleotide
  Antisense strand to SEQ ID NO: 1994186
cuuucaauuacaguauacu

SEQ ID NO: 1994188 - RNA, 19 nt, Artificial Sequence
  Description of Artificial Sequence: Synthetic oligonucleotide
  Sense strand starting at position 822 of SEQ ID NO: 1880791
cucuuaggagauuaguguu

SEQ ID NO: 1994189 - RNA, 19 nt, Artificial Sequence
  Description of Artificial Sequence: Synthetic oligonucleotide
  Antisense strand to SEQ ID NO: 1994188
aacacuaaucuccuaagag

SEQ ID NO: 1994190 - RNA, 19 nt, Artificial Sequence
  Description of Artificial Sequence: Synthetic oligonucleotide
  Sense strand starting at position 897 of SEQ ID NO: 1880791
aguaguuaagcucaacaau

SEQ ID NO: 1994191 - RNA, 19 nt, Artificial Sequence
  Description of Artificial Sequence: Synthetic oligonucleotide
  Antisense strand to SEQ ID NO: 1994190
auuguugagcuuaacuacu

SEQ ID NO: 1994192 - RNA, 19 nt, Artificial Sequence
  Description of Artificial Sequence: Synthetic oligonucleotide
  Sense strand starting at position 1150 of SEQ ID NO: 1880791
uucuucuugguuuagaaua

SEQ ID NO: 1994193 - RNA, 19 nt, Artificial Sequence
  Description of Artificial Sequence: Synthetic oligonucleotide
  Antisense strand to SEQ ID NO: 1994192
uauucuaaaccaagaagaa

SEQ ID NO: 1994194 - RNA, 19 nt, Artificial Sequence
  Description of Artificial Sequence: Synthetic oligonucleotide
  Sense strand starting at position 1158 of SEQ ID NO: 1880791
gguuuagaauauucccaag

SEQ ID NO: 1994195 - RNA, 19 nt, Artificial Sequence
  Description of Artificial Sequence: Synthetic oligonucleotide
  Antisense strand to SEQ ID NO: 1994194
cuugggaauauucuaaacc

SEQ ID NO: 1994196 - RNA, 19 nt, Artificial Sequence
  Description of Artificial Sequence: Synthetic oligonucleotide
  Sense strand starting at position 1281 of SEQ ID NO: 1880791
aguuaagguuccucaaauu

SEQ ID NO: 1994197 - RNA, 19 nt, Artificial Sequence
  Description of Artificial Sequence: Synthetic oligonucleotide
  Antisense strand to SEQ ID NO: 1994196
aauuugaggaaccuuaacu

SEQ ID NO: 1994198 - RNA, 19 nt, Artificial Sequence
  Description of Artificial Sequence: Synthetic oligonucleotide
  Sense strand starting at position 1473 of SEQ ID NO: 1880791
uugucaaauuauccuugga

SEQ ID NO: 1994199 - RNA, 19 nt, Artificial Sequence
  Description of Artificial Sequence: Synthetic oligonucleotide
  Antisense strand to SEQ ID NO: 1994198
uccaaggauaauuugacaa

SEQ ID NO: 1994200 - RNA, 19 nt, Artificial Sequence
  Description of Artificial Sequence: Synthetic oligonucleotide
  Sense strand starting at position 1475 of SEQ ID NO: 1880791
gucaaauuauccuuggaga

SEQ ID NO: 1994201 - RNA, 19 nt, Artificial Sequence
  Description of Artificial Sequence: Synthetic oligonucleotide
  Antisense strand to SEQ ID NO: 1994200
ucuccaaggauaauuugac

SEQ ID NO: 1994202 - RNA, 19 nt, Artificial Sequence
  Description of Artificial Sequence: Synthetic oligonucleotide
  Sense strand starting at position 1476 of SEQ ID NO: 1880791
ucaaauuauccuuggagau

SEQ ID NO: 1994203 - RNA, 19 nt, Artificial Sequence
  Description of Artificial Sequence: Synthetic oligonucleotide
  Antisense strand to SEQ ID NO: 1994202
aucuccaaggauaauuuga

SEQ ID NO: 1994204 - RNA, 19 nt, Artificial Sequence
  Description of Artificial Sequence: Synthetic oligonucleotide
  Sense strand starting at position 2023 of SEQ ID NO: 1880791
aggagcacugagggauauu

SEQ ID NO: 1994205 - RNA, 19 nt, Artificial Sequence
  Description of Artificial Sequence: Synthetic oligonucleotide
  Antisense strand to SEQ ID NO: 1994204
aauaucccucagugcuccu

SEQ ID NO: 1994206 - RNA, 19 nt, Artificial Sequence
  Description of Artificial Sequence: Synthetic oligonucleotide
  Sense strand starting at position 2095 of SEQ ID NO: 1880791
acuguuaacaugggagcuu

SEQ ID NO: 1994207 - RNA, 19 nt, Artificial Sequence
  Description of Artificial Sequence: Synthetic oligonucleotide
  Antisense strand to SEQ ID NO: 1994206
aagcucccauguuaacagu

SEQ ID NO: 1994208 - RNA, 19 nt, Artificial Sequence
  Description of Artificial Sequence: Synthetic oligonucleotide
  Sense strand starting at position 2107 of SEQ ID NO: 1880791
ggagcuuacuacuuaauac

SEQ ID NO: 1994209 - RNA, 19 nt, Artificial Sequence
  Description of Artificial Sequence: Synthetic oligonucleotide
  Antisense strand to SEQ ID NO: 1994208
guauuaaguaguaagcucc

SEQ ID NO: 1994210 - RNA, 19 nt, Artificial Sequence
  Description of Artificial Sequence: Synthetic oligonucleotide
  Sense strand starting at position 2134 of SEQ ID NO: 1880791
gauagcuuugugcuuuguu

SEQ ID NO: 1994211 - RNA, 19 nt, Artificial Sequence
  Description of Artificial Sequence: Synthetic oligonucleotide
  Antisense strand to SEQ ID NO: 1994210
aacaaagcacaaagcuauc

SEQ ID NO: 1994212 - RNA, 19 nt, Artificial Sequence
  Description of Artificial Sequence: Synthetic oligonucleotide
  Sense strand starting at position 2439 of SEQ ID NO: 1880791
agagauguaucuuuaugac

SEQ ID NO: 1994213 - RNA, 19 nt, Artificial Sequence
  Description of Artificial Sequence: Synthetic oligonucleotide
  Antisense strand to SEQ ID NO: 1994212
gucauaaagauacaucucu

SEQ ID NO: 1994214 - RNA, 19 nt, Artificial Sequence
  Description of Artificial Sequence: Synthetic oligonucleotide
  Sense strand starting at position 2451 of SEQ ID NO: 1880791
uuaugacaucuauguaaag

SEQ ID NO: 1994215 - RNA, 19 nt, Artificial Sequence
  Description of Artificial Sequence: Synthetic oligonucleotide
  Antisense strand to SEQ ID NO: 1994214
cuuuacauagaugucauaa

SEQ ID NO: 1994216 - RNA, 19 nt, Artificial Sequence
  Description of Artificial Sequence: Synthetic oligonucleotide
  Sense strand starting at position 2858 of SEQ ID NO: 1880791
caacuaugugggcaccaau

SEQ ID NO: 1994217 - RNA, 19 nt, Artificial Sequence
  Description of Artificial Sequence: Synthetic oligonucleotide
  Antisense strand to SEQ ID NO: 1994216
auuggugcccacauaguug

SEQ ID NO: 1994218 - RNA, 19 nt, Artificial Sequence
  Description of Artificial Sequence: Synthetic oligonucleotide
  Sense strand starting at position 2861 of SEQ ID NO: 1880791
cuaugugggcaccaauaua

SEQ ID NO: 1994219 - RNA, 19 nt, Artificial Sequence
  Description of Artificial Sequence: Synthetic oligonucleotide
  Antisense strand to SEQ ID NO: 1994218
uauauuggugcccacauag

SEQ ID NO: 1994220 - RNA, 19 nt, Artificial Sequence
  Description of Artificial Sequence: Synthetic oligonucleotide
  Sense strand starting at position 2878 of SEQ ID NO: 1880791
uacucauaccgguaguaua

SEQ ID NO: 1994221 - RNA, 19 nt, Artificial Sequence
  Description of Artificial Sequence: Synthetic oligonucleotide
  Antisense strand to SEQ ID NO: 1994220
uauacuaccgguaugagua

SEQ ID NO: 1994222 - RNA, 19 nt, Artificial Sequence
  Description of Artificial Sequence: Synthetic oligonucleotide
  Sense strand starting at position 3079 of SEQ ID NO: 1880791
auagcagaguaucuauaga

SEQ ID NO: 1994223 - RNA, 19 nt, Artificial Sequence
  Description of Artificial Sequence: Synthetic oligonucleotide
  Antisense strand to SEQ ID NO: 1994222
ucuauagauacucugcuau

SEQ ID NO: 1994224 - RNA, 19 nt, Artificial Sequence
  Description of Artificial Sequence: Synthetic oligonucleotide
  Sense strand starting at position 3126 of SEQ ID NO: 1880791
uauauagucgaaugucaaa

SEQ ID NO: 1994225 - RNA, 19 nt, Artificial Sequence
  Description of Artificial Sequence: Synthetic oligonucleotide
  Antisense strand to SEQ ID NO: 1994224
uuugacauucgacuauaua

SEQ ID NO: 1994226 - RNA, 19 nt, Artificial Sequence
  Description of Artificial Sequence: Synthetic oligonucleotide
  Sense strand starting at position 3405 of SEQ ID NO: 1880791
gaugacuuuauggguggua

SEQ ID NO: 1994227 - RNA, 19 nt, Artificial Sequence
  Description of Artificial Sequence: Synthetic oligonucleotide
  Antisense strand to SEQ ID NO: 1994226
uaccacccauaaagucauc

SEQ ID NO: 1994228 - RNA, 19 nt, Artificial Sequence
  Description of Artificial Sequence: Synthetic oligonucleotide
  Sense strand starting at position 3406 of SEQ ID NO: 1880791
augacuuuaugggugguau

SEQ ID NO: 1994229 - RNA, 19 nt, Artificial Sequence
  Description of Artificial Sequence: Synthetic oligonucleotide
  Antisense strand to SEQ ID NO: 1994228
auaccacccauaaagucau

SEQ ID NO: 1994230 - RNA, 19 nt, Artificial Sequence
  Description of Artificial Sequence: Synthetic oligonucleotide
  Sense strand starting at position 3586 of SEQ ID NO: 1880791
cuuagaaucgcuuacccau

SEQ ID NO: 1994231 - RNA, 19 nt, Artificial Sequence
  Description of Artificial Sequence: Synthetic oligonucleotide
  Antisense strand to SEQ ID NO: 1994230
auggguaagcgauucuaag

SEQ ID NO: 1994232 - RNA, 19 nt, Artificial Sequence
  Description of Artificial Sequence: Synthetic oligonucleotide
  Sense strand starting at position 3630 of SEQ ID NO: 1880791
uggaauuaguaccuuucca

SEQ ID NO: 1994233 - RNA, 19 nt, Artificial Sequence
  Description of Artificial Sequence: Synthetic oligonucleotide
  Antisense strand to SEQ ID NO: 1994232
uggaaagguacuaauucca

SEQ ID NO: 1994234 - RNA, 19 nt, Artificial Sequence
  Description of Artificial Sequence: Synthetic oligonucleotide
  Sense strand starting at position 3708 of SEQ ID NO: 1880791
aucugauagcaugagguuu

SEQ ID NO: 1994235 - RNA, 19 nt, Artificial Sequence
  Description of Artificial Sequence: Synthetic oligonucleotide
  Antisense strand to SEQ ID NO: 1994234
aaaccucaugcuaucagau

SEQ ID NO: 1994236 - RNA, 19 nt, Artificial Sequence
  Description of Artificial Sequence: Synthetic oligonucleotide
  Sense strand starting at position 3729 of SEQ ID NO: 1880791
ccuagacuacuuuguggaa

SEQ ID NO: 1994237 - RNA, 19 nt, Artificial Sequence
  Description of Artificial Sequence: Synthetic oligonucleotide
  Antisense strand to SEQ ID NO: 1994236
uuccacaaaguagucuagg

SEQ ID NO: 1994238 - RNA, 19 nt, Artificial Sequence
  Description of Artificial Sequence: Synthetic oligonucleotide
  Sense strand starting at position 3730 of SEQ ID NO: 1880791
cuagacuacuuuguggaau

SEQ ID NO: 1994239 - RNA, 19 nt, Artificial Sequence
  Description of Artificial Sequence: Synthetic oligonucleotide
  Antisense strand to SEQ ID NO: 1994238
auuccacaaaguagucuag

SEQ ID NO: 1994240 - RNA, 19 nt, Artificial Sequence
  Description of Artificial Sequence: Synthetic oligonucleotide
  Sense strand starting at position 3750 of SEQ ID NO: 1880791
gguuuaaugccauaaugga

SEQ ID NO: 1994241 - RNA, 19 nt, Artificial Sequence
  Description of Artificial Sequence: Synthetic oligonucleotide
  Antisense strand to SEQ ID NO: 1994240
uccauuauggcauuaaacc

SEQ ID NO: 1994242 - RNA, 19 nt, Artificial Sequence
  Description of Artificial Sequence: Synthetic oligonucleotide
  Sense strand starting at position 3928 of SEQ ID NO: 1880791
gccaucacugguggacuaa

SEQ ID NO: 1994243 - RNA, 19 nt, Artificial Sequence
  Description of Artificial Sequence: Synthetic oligonucleotide
  Antisense strand to SEQ ID NO: 1994242
uuaguccaccagugauggc

SEQ ID NO: 1994244 - RNA, 19 nt, Artificial Sequence
  Description of Artificial Sequence: Synthetic oligonucleotide
  Sense strand starting at position 162 of SEQ ID NO: 1880792
ccgguuuacugucuacaaa

SEQ ID NO: 1994245 - RNA, 19 nt, Artificial Sequence
  Description of Artificial Sequence: Synthetic oligonucleotide
  Antisense strand to SEQ ID NO: 1994244
uuuguagacaguaaaccgg

SEQ ID NO: 1994246 - RNA, 19 nt, Artificial Sequence
  Description of Artificial Sequence: Synthetic oligonucleotide
  Sense strand starting at position 163 of SEQ ID NO: 1880792
cgguuuacugucuacaaag

SEQ ID NO: 1994247 - RNA, 19 nt, Artificial Sequence
  Description of Artificial Sequence: Synthetic oligonucleotide
  Antisense strand to SEQ ID NO: 1994246
cuuuguagacaguaaaccg

SEQ ID NO: 1994248 - RNA, 19 nt, Artificial Sequence
  Description of Artificial Sequence: Synthetic oligonucleotide
  Sense strand starting at position 165 of SEQ ID NO: 1880792
guuuacugucuacaaagca

SEQ ID NO: 1994249 - RNA, 19 nt, Artificial Sequence
  Description of Artificial Sequence: Synthetic oligonucleotide
  Antisense strand to SEQ ID NO: 1994248
ugcuuuguagacaguaaac

SEQ ID NO: 1994250 - RNA, 19 nt, Artificial Sequence
  Description of Artificial Sequence: Synthetic oligonucleotide
  Sense strand starting at position 383 of SEQ ID NO: 1880792
guuuaucacagaugguagu

SEQ ID NO: 1994251 - RNA, 19 nt, Artificial Sequence
  Description of Artificial Sequence: Synthetic oligonucleotide
  Antisense strand to SEQ ID NO: 1994250
acuaccaucugugauaaac

SEQ ID NO: 1994252 - RNA, 19 nt, Artificial Sequence
  Description of Artificial Sequence: Synthetic oligonucleotide
  Sense strand starting at position 397 of SEQ ID NO: 1880792
guaguaugcaaaggugaua

SEQ ID NO: 1994253 - RNA, 19 nt, Artificial Sequence
  Description of Artificial Sequence: Synthetic oligonucleotide
  Antisense strand to SEQ ID NO: 1994252
uaucaccuuugcauacuac

SEQ ID NO: 1994254 - RNA, 19 nt, Artificial Sequence
  Description of Artificial Sequence: Synthetic oligonucleotide
  Sense strand starting at position 517 of SEQ ID NO: 1880792
ccaacuugguuucugauua

SEQ ID NO: 1994255 - RNA, 19 nt, Artificial Sequence
  Description of Artificial Sequence: Synthetic oligonucleotide
  Antisense strand to SEQ ID NO: 1994254
uaaucagaaaccaaguugg

SEQ ID NO: 1994256 - RNA, 19 nt, Artificial Sequence
  Description of Artificial Sequence: Synthetic oligonucleotide
  Sense strand starting at position 522 of SEQ ID NO: 1880792
uugguuucugauuauagca

SEQ ID NO: 1994257 - RNA, 19 nt, Artificial Sequence
  Description of Artificial Sequence: Synthetic oligonucleotide
  Antisense strand to SEQ ID NO: 1994256
ugcuauaaucagaaaccaa

SEQ ID NO: 1994258 - RNA, 19 nt, Artificial Sequence
  Description of Artificial Sequence: Synthetic oligonucleotide
  Sense strand starting at position 663 of SEQ ID NO: 1880792
ggagcaauuuaagaacguu

SEQ ID NO: 1994259 - RNA, 19 nt, Artificial Sequence
  Description of Artificial Sequence: Synthetic oligonucleotide
  Antisense strand to SEQ ID NO: 1994258
aacguucuuaaauugcucc

SEQ ID NO: 1994260 - RNA, 19 nt, Artificial Sequence
  Description of Artificial Sequence: Synthetic oligonucleotide
  Sense strand starting at position 671 of SEQ ID NO: 1880792
uuaagaacguucguacuau

SEQ ID NO: 1994261 - RNA, 19 nt, Artificial Sequence
  Description of Artificial Sequence: Synthetic oligonucleotide
  Antisense strand to SEQ ID NO: 1994260
auaguacgaacguucuuaa

SEQ ID NO: 1994262 - RNA, 19 nt, Artificial Sequence
  Description of Artificial Sequence: Synthetic oligonucleotide
  Sense strand starting at position 677 of SEQ ID NO: 1880792
acguucguacuauagauua

SEQ ID NO: 1994263 - RNA, 19 nt, Artificial Sequence
  Description of Artificial Sequence: Synthetic oligonucleotide
  Antisense strand to SEQ ID NO: 1994262
uaaucuauaguacgaacgu

SEQ ID NO: 1994264 - RNA, 19 nt, Artificial Sequence
  Description of Artificial Sequence: Synthetic oligonucleotide
  Sense strand starting at position 682 of SEQ ID NO: 1880792
cguacuauagauuacagau

SEQ ID NO: 1994265 - RNA, 19 nt, Artificial Sequence
  Description of Artificial Sequence: Synthetic oligonucleotide
  Antisense strand to SEQ ID NO: 1994264
aucuguaaucuauaguacg

SEQ ID NO: 1994266 - RNA, 19 nt, Artificial Sequence
  Description of Artificial Sequence: Synthetic oligonucleotide
  Sense strand starting at position 1024 of SEQ ID NO: 1880792
guccucaucuugcuggaaa

SEQ ID NO: 1994267 - RNA, 19 nt, Artificial Sequence
  Description of Artificial Sequence: Synthetic oligonucleotide
  Antisense strand to SEQ ID NO: 1994266
uuuccagcaagaugaggac

SEQ ID NO: 1994268 - RNA, 19 nt, Artificial Sequence
  Description of Artificial Sequence: Synthetic oligonucleotide
  Sense strand starting at position 1026 of SEQ ID NO: 1880792
ccucaucuugcuggaaaga

SEQ ID NO: 1994269 - RNA, 19 nt, Artificial Sequence
  Description of Artificial Sequence: Synthetic oligonucleotide
  Antisense strand to SEQ ID NO: 1994268
ucuuuccagcaagaugagg

SEQ ID NO: 1994270 - RNA, 19 nt, Artificial Sequence
  Description of Artificial Sequence: Synthetic oligonucleotide
  Sense strand starting at position 1096 of SEQ ID NO: 1880792
guguuaagacgaggucgau

SEQ ID NO: 1994271 - RNA, 19 nt, Artificial Sequence
  Description of Artificial Sequence: Synthetic oligonucleotide
  Antisense strand to SEQ ID NO: 1994270
aucgaccucgucuuaacac

SEQ ID NO: 1994272 - RNA, 19 nt, Artificial Sequence
  Description of Artificial Sequence: Synthetic oligonucleotide
  Sense strand starting at position 1146 of SEQ ID NO: 1880792
uacuccaguccuggaagaa

SEQ ID NO: 1994273 - RNA, 19 nt, Artificial Sequence
  Description of Artificial Sequence: Synthetic oligonucleotide
  Antisense strand to SEQ ID NO: 1994272
uucuuccaggacuggagua

SEQ ID NO: 1994274 - RNA, 19 nt, Artificial Sequence
  Description of Artificial Sequence: Synthetic oligonucleotide
  Sense strand starting at position 1255 of SEQ ID NO: 1880792
ugguauuugucccacacaa

SEQ ID NO: 1994275 - RNA, 19 nt, Artificial Sequence
  Description of Artificial Sequence: Synthetic oligonucleotide
  Antisense strand to SEQ ID NO: 1994274
uugugugggacaaauacca

SEQ ID NO: 1994276 - RNA, 19 nt, Artificial Sequence
  Description of Artificial Sequence: Synthetic oligonucleotide
  Sense strand starting at position 2585 of SEQ ID NO: 1880792
cugauuaaaccgugaaaga

SEQ ID NO: 1994277 - RNA, 19 nt, Artificial Sequence
  Description of Artificial Sequence: Synthetic oligonucleotide
  Antisense strand to SEQ ID NO: 1994276
ucuuucacgguuuaaucag

SEQ ID NO: 1994278 - RNA, 19 nt, Artificial Sequence
  Description of Artificial Sequence: Synthetic oligonucleotide
  Sense strand starting at position 2678 of SEQ ID NO: 1880792
gcuguauuccugguuugca

SEQ ID NO: 1994279 - RNA, 19 nt, Artificial Sequence
  Description of Artificial Sequence: Synthetic oligonucleotide
  Antisense strand to SEQ ID NO: 1994278
ugcaaaccaggaauacagc

SEQ ID NO: 1994280 - RNA, 19 nt, Artificial Sequence
  Description of Artificial Sequence: Synthetic oligonucleotide
  Sense strand starting at position 2686 of SEQ ID NO: 1880792
ccugguuugcaccgggaga

SEQ ID NO: 1994281 - RNA, 19 nt, Artificial Sequence
  Description of Artificial Sequence: Synthetic oligonucleotide
  Antisense strand to SEQ ID NO: 1994280
ucucccggugcaaaccagg

SEQ ID NO: 1994282 - RNA, 19 nt, Artificial Sequence
  Description of Artificial Sequence: Synthetic oligonucleotide
  Sense strand starting at position 2702 of SEQ ID NO: 1880792
agagcuauggauuguauac

SEQ ID NO: 1994283 - RNA, 19 nt, Artificial Sequence
  Description of Artificial Sequence: Synthetic oligonucleotide
  Antisense strand to SEQ ID NO: 1994282
guauacaauccauagcucu

SEQ ID NO: 1994284 - RNA, 19 nt, Artificial Sequence
  Description of Artificial Sequence: Synthetic oligonucleotide
  Sense strand starting at position 2709 of SEQ ID NO: 1880792
uggauuguauacucagaau

SEQ ID NO: 1994285 - RNA, 19 nt, Artificial Sequence
  Description of Artificial Sequence: Synthetic oligonucleotide
  Antisense strand to SEQ ID NO: 1994284
auucugaguauacaaucca

SEQ ID NO: 1994286 - RNA, 19 nt, Artificial Sequence
  Description of Artificial Sequence: Synthetic oligonucleotide
  Sense strand starting at position 2763 of SEQ ID NO: 1880792
uguuguuacguaugaggaa

SEQ ID NO: 1994287 - RNA, 19 nt, Artificial Sequence
  Description of Artificial Sequence: Synthetic oligonucleotide
  Antisense strand to SEQ ID NO: 1994286
uuccucauacguaacaaca

SEQ ID NO: 1994288 - RNA, 19 nt, Artificial Sequence
  Description of Artificial Sequence: Synthetic oligonucleotide
  Sense strand starting at position 2823 of SEQ ID NO: 1880792
gcaaguucgggcagaguua

SEQ ID NO: 1994289 - RNA, 19 nt, Artificial Sequence
  Description of Artificial Sequence: Synthetic oligonucleotide
  Antisense strand to SEQ ID NO: 1994288
uaacucugcccgaacuugc

SEQ ID NO: 1994290 - RNA, 19 nt, Artificial Sequence
  Description of Artificial Sequence: Synthetic oligonucleotide
  Sense strand starting at position 2924 of SEQ ID NO: 1880792
ugugaauuauucuccuuga

SEQ ID NO: 1994291 - RNA, 19 nt, Artificial Sequence
  Description of Artificial Sequence: Synthetic oligonucleotide
  Antisense strand to SEQ ID NO: 1994290
ucaaggagaauaauucaca

SEQ ID NO: 1994292 - RNA, 19 nt, Artificial Sequence
  Description of Artificial Sequence: Synthetic oligonucleotide
  Sense strand starting at position 2925 of SEQ ID NO: 1880792
gugaauuauucuccuugaa

SEQ ID NO: 1994293 - RNA, 19 nt, Artificial Sequence
  Description of Artificial Sequence: Synthetic oligonucleotide
  Antisense strand to SEQ ID NO: 1994292
uucaaggagaauaauucac

SEQ ID NO: 1994294 - RNA, 19 nt, Artificial Sequence
  Description of Artificial Sequence: Synthetic oligonucleotide
  Sense strand starting at position 2973 of SEQ ID NO: 1880792
agaauuagguagcauuuau

SEQ ID NO: 1994295 - RNA, 19 nt, Artificial Sequence
  Description of Artificial Sequence: Synthetic oligonucleotide
  Antisense strand to SEQ ID NO: 1994294
auaaaugcuaccuaauucu

SEQ ID NO: 1994296 - RNA, 19 nt, Artificial Sequence
  Description of Artificial Sequence: Synthetic oligonucleotide
  Sense strand starting at position 2982 of SEQ ID NO: 1880792
uagcauuuauuugguggau

SEQ ID NO: 1994297 - RNA, 19 nt, Artificial Sequence
  Description of Artificial Sequence: Synthetic oligonucleotide
  Antisense strand to SEQ ID NO: 1994296
auccaccaaauaaaugcua

SEQ ID NO: 1994298 - RNA, 19 nt, Artificial Sequence
  Description of Artificial Sequence: Synthetic oligonucleotide
  Sense strand starting at position 3007 of SEQ ID NO: 1880792
cgagugagggagugugaua

SEQ ID NO: 1994299 - RNA, 19 nt, Artificial Sequence
  Description of Artificial Sequence: Synthetic oligonucleotide
  Antisense strand to SEQ ID NO: 1994298
uaucacacucccucacucg

SEQ ID NO: 1994300 - RNA, 19 nt, Artificial Sequence
  Description of Artificial Sequence: Synthetic oligonucleotide
  Sense strand starting at position 3012 of SEQ ID NO: 1880792
gagggagugugauauuuau

SEQ ID NO: 1994301 - RNA, 19 nt, Artificial Sequence
  Description of Artificial Sequence: Synthetic oligonucleotide
  Antisense strand to SEQ ID NO: 1994300
auaaauaucacacucccuc

SEQ ID NO: 1994302 - RNA, 19 nt, Artificial Sequence
  Description of Artificial Sequence: Synthetic oligonucleotide
  Sense strand starting at position 3253 of SEQ ID NO: 1880792
gccuguuauuugucaggca

SEQ ID NO: 1994303 - RNA, 19 nt, Artificial Sequence
  Description of Artificial Sequence: Synthetic oligonucleotide
  Antisense strand to SEQ ID NO: 1994302
ugccugacaaauaacaggc

SEQ ID NO: 1994304 - RNA, 19 nt, Artificial Sequence
  Description of Artificial Sequence: Synthetic oligonucleotide
  Sense strand starting at position 3509 of SEQ ID NO: 1880792
uuguuaaugagguguaaca

SEQ ID NO: 1994305 - RNA, 19 nt, Artificial Sequence
  Description of Artificial Sequence: Synthetic oligonucleotide
  Antisense strand to SEQ ID NO: 1994304
uguuacaccucauuaacaa

SEQ ID NO: 1994306 - RNA, 19 nt, Artificial Sequence
  Description of Artificial Sequence: Synthetic oligonucleotide
  Sense strand starting at position 3511 of SEQ ID NO: 1880792
guuaaugagguguaacaua

SEQ ID NO: 1994307 - RNA, 19 nt, Artificial Sequence
  Description of Artificial Sequence: Synthetic oligonucleotide
  Antisense strand to SEQ ID NO: 1994306
uauguuacaccucauuaac

SEQ ID NO: 1994308 - RNA, 19 nt, Artificial Sequence
  Description of Artificial Sequence: Synthetic oligonucleotide
  Sense strand starting at position 3516 of SEQ ID NO: 1880792
ugagguguaacauacagua

SEQ ID NO: 1994309 - RNA, 19 nt, Artificial Sequence
  Description of Artificial Sequence: Synthetic oligonucleotide
  Antisense strand to SEQ ID NO: 1994308
uacuguauguuacaccuca

SEQ ID NO: 1994310 - RNA, 19 nt, Artificial Sequence
  Description of Artificial Sequence: Synthetic oligonucleotide
  Sense strand starting at position 3526 of SEQ ID NO: 1880792
cauacaguaugggaacaau

SEQ ID NO: 1994311 - RNA, 19 nt, Artificial Sequence
  Description of Artificial Sequence: Synthetic oligonucleotide
  Antisense strand to SEQ ID NO: 1994310
auuguucccauacuguaug

SEQ ID NO: 1994312 - RNA, 19 nt, Artificial Sequence
  Description of Artificial Sequence: Synthetic oligonucleotide
  Sense strand starting at position 3665 of SEQ ID NO: 1880792
cugacuguaucaccauaga

SEQ ID NO: 1994313 - RNA, 19 nt, Artificial Sequence
  Description of Artificial Sequence: Synthetic oligonucleotide
  Antisense strand to SEQ ID NO: 1994312
ucuauggugauacagucag

SEQ ID NO: 1994314 - RNA, 19 nt, Artificial Sequence
  Description of Artificial Sequence: Synthetic oligonucleotide
  Sense strand starting at position 3863 of SEQ ID NO: 1880792
gcgggcauuuggguuguua

SEQ ID NO: 1994315 - RNA, 19 nt, Artificial Sequence
  Description of Artificial Sequence: Synthetic oligonucleotide
  Antisense strand to SEQ ID NO: 1994314
uaacaacccaaaugcccgc

SEQ ID NO: 1994316 - RNA, 19 nt, Artificial Sequence
  Description of Artificial Sequence: Synthetic oligonucleotide
  Sense strand starting at position 3865 of SEQ ID NO: 1880792
gggcauuuggguuguuauu

SEQ ID NO: 1994317 - RNA, 19 nt, Artificial Sequence
  Description of Artificial Sequence: Synthetic oligonucleotide
  Antisense strand to SEQ ID NO: 1994316
aauaacaacccaaaugccc

SEQ ID NO: 1994318 - RNA, 19 nt, Artificial Sequence
  Description of Artificial Sequence: Synthetic oligonucleotide
  Sense strand starting at position 3885 of SEQ ID NO: 1880792
uuuggacuauuauuagcaa

SEQ ID NO: 1994319 - RNA, 19 nt, Artificial Sequence
  Description of Artificial Sequence: Synthetic oligonucleotide
  Antisense strand to SEQ ID NO: 1994318
uugcuaauaauaguccaaa

SEQ ID NO: 1994320 - RNA, 19 nt, Artificial Sequence
  Description of Artificial Sequence: Synthetic oligonucleotide
  Sense strand starting at position 3909 of SEQ ID NO: 1880792
uagugagcauucuuacaug

SEQ ID NO: 1994321 - RNA, 19 nt, Artificial Sequence
  Description of Artificial Sequence: Synthetic oligonucleotide
  Antisense strand to SEQ ID NO: 1994320
cauguaagaaugcucacua

SEQ ID NO: 1994322 - RNA, 19 nt, Artificial Sequence
  Description of Artificial Sequence: Synthetic oligonucleotide
  Sense strand starting at position 3946 of SEQ ID NO: 1880792
ugcacacauuucuaggaga

SEQ ID NO: 1994323 - RNA, 19 nt, Artificial Sequence
  Description of Artificial Sequence: Synthetic oligonucleotide
  Antisense strand to SEQ ID NO: 1994322
ucuccuagaaaugugugca

SEQ ID NO: 1994324 - RNA, 19 nt, Artificial Sequence
  Description of Artificial Sequence: Synthetic oligonucleotide
  Sense strand starting at position 13 of SEQ ID NO: 1880794
ggaggcucaggcugaaauu

SEQ ID NO: 1994325 - RNA, 19 nt, Artificial Sequence
  Description of Artificial Sequence: Synthetic oligonucleotide
  Antisense strand to SEQ ID NO: 1994324
aauuucagccugagccucc

SEQ ID NO: 1994326 - RNA, 19 nt, Artificial Sequence
  Description of Artificial Sequence: Synthetic oligonucleotide
  Sense strand starting at position 448 of SEQ ID NO: 1880794
ucaauugucugguuacuga

SEQ ID NO: 1994327 - RNA, 19 nt, Artificial Sequence
  Description of Artificial Sequence: Synthetic oligonucleotide
  Antisense strand to SEQ ID NO: 1994326
ucaguaaccagacaauuga

SEQ ID NO: 1994328 - RNA, 19 nt, Artificial Sequence
  Description of Artificial Sequence: Synthetic oligonucleotide
  Sense strand starting at position 517 of SEQ ID NO: 1880794
uaagcagaaucguuguaga

SEQ ID NO: 1994329 - RNA, 19 nt, Artificial Sequence
  Description of Artificial Sequence: Synthetic oligonucleotide
  Antisense strand to SEQ ID NO: 1994328
ucuacaacgauucugcuua

SEQ ID NO: 1994330 - RNA, 19 nt, Artificial Sequence
  Description of Artificial Sequence: Synthetic oligonucleotide
  Sense strand starting at position 534 of SEQ ID NO: 1880794
gaauguccuuuggcaaaca

SEQ ID NO: 1994331 - RNA, 19 nt, Artificial Sequence
  Description of Artificial Sequence: Synthetic oligonucleotide
  Antisense strand to SEQ ID NO: 1994330
uguuugccaaaggacauuc

SEQ ID NO: 1994332 - RNA, 19 nt, Artificial Sequence
  Description of Artificial Sequence: Synthetic oligonucleotide
  Sense strand starting at position 576 of SEQ ID NO: 1880794
aggucuuauuauuccagua

SEQ ID NO: 1994333 - RNA, 19 nt, Artificial Sequence
  Description of Artificial Sequence: Synthetic oligonucleotide
  Antisense strand to SEQ ID NO: 1994332
uacuggaauaauaagaccu

SEQ ID NO: 1994334 - RNA, 19 nt, Artificial Sequence
  Description of Artificial Sequence: Synthetic oligonucleotide
  Sense strand starting at position 848 of SEQ ID NO: 1880794
gguaucguucaaugcagaa

SEQ ID NO: 1994335 - RNA, 19 nt, Artificial Sequence
  Description of Artificial Sequence: Synthetic oligonucleotide
  Antisense strand to SEQ ID NO: 1994334
uucugcauugaacgauacc

SEQ ID NO: 1994336 - RNA, 19 nt, Artificial Sequence
  Description of Artificial Sequence: Synthetic oligonucleotide
  Sense strand starting at position 1089 of SEQ ID NO: 1880794
gacuuacuugcugaugaug

SEQ ID NO: 1994337 - RNA, 19 nt, Artificial Sequence
  Description of Artificial Sequence: Synthetic oligonucleotide
  Antisense strand to SEQ ID NO: 1994336
caucaucagcaaguaaguc

SEQ ID NO: 1994338 - RNA, 19 nt, Artificial Sequence
  Description of Artificial Sequence: Synthetic oligonucleotide
  Sense strand starting at position 1201 of SEQ ID NO: 1880794
acgccaauucuaugcaauc

SEQ ID NO: 1994339 - RNA, 19 nt, Artificial Sequence
  Description of Artificial Sequence: Synthetic oligonucleotide
  Antisense strand to SEQ ID NO: 1994338
gauugcauagaauuggcgu

SEQ ID NO: 1994340 - RNA, 19 nt, Artificial Sequence
  Description of Artificial Sequence: Synthetic oligonucleotide
  Sense strand starting at position 1202 of SEQ ID NO: 1880794
cgccaauucuaugcaauca

SEQ ID NO: 1994341 - RNA, 19 nt, Artificial Sequence
  Description of Artificial Sequence: Synthetic oligonucleotide
  Antisense strand to SEQ ID NO: 1994340
ugauugcauagaauuggcg

SEQ ID NO: 1994342 - RNA, 19 nt, Artificial Sequence
  Description of Artificial Sequence: Synthetic oligonucleotide
  Sense strand starting at position 2585 of SEQ ID NO: 1880794
aggagcauauuaucuguuu

SEQ ID NO: 1994343 - RNA, 19 nt, Artificial Sequence
  Description of Artificial Sequence: Synthetic oligonucleotide
  Antisense strand to SEQ ID NO: 1994342
aaacagauaauaugcuccu

SEQ ID NO: 1994344 - RNA, 19 nt, Artificial Sequence
  Description of Artificial Sequence: Synthetic oligonucleotide
  Sense strand starting at position 2608 of SEQ ID NO: 1880794
ugcugugacauggguagua

SEQ ID NO: 1994345 - RNA, 19 nt, Artificial Sequence
  Description of Artificial Sequence: Synthetic oligonucleotide
  Antisense strand to SEQ ID NO: 1994344
uacuacccaugucacagca

SEQ ID NO: 1994346 - RNA, 19 nt, Artificial Sequence
  Description of Artificial Sequence: Synthetic oligonucleotide
  Sense strand starting at position 2610 of SEQ ID NO: 1880794
cugugacauggguaguaga

SEQ ID NO: 1994347 - RNA, 19 nt, Artificial Sequence
  Description of Artificial Sequence: Synthetic oligonucleotide
  Antisense strand to SEQ ID NO: 1994346
ucuacuacccaugucacag

SEQ ID NO: 1994348 - RNA, 19 nt, Artificial Sequence
  Description of Artificial Sequence: Synthetic oligonucleotide
  Sense strand starting at position 2623 of SEQ ID NO: 1880794
aguagagcuaucuguguua

SEQ ID NO: 1994349 - RNA, 19 nt, Artificial Sequence
  Description of Artificial Sequence: Synthetic oligonucleotide
  Antisense strand to SEQ ID NO: 1994348
uaacacagauagcucuacu

SEQ ID NO: 1994350 - RNA, 19 nt, Artificial Sequence
  Description of Artificial Sequence: Synthetic oligonucleotide
  Sense strand starting at position 2630 of SEQ ID NO: 1880794
cuaucuguguuagcacaau

SEQ ID NO: 1994351 - RNA, 19 nt, Artificial Sequence
  Description of Artificial Sequence: Synthetic oligonucleotide
  Antisense strand to SEQ ID NO: 1994350
auugugcuaacacagauag

SEQ ID NO: 1994352 - RNA, 19 nt, Artificial Sequence
  Description of Artificial Sequence: Synthetic oligonucleotide
  Sense strand starting at position 2815 of SEQ ID NO: 1880794
gauguauucgaguaucagc

SEQ ID NO: 1994353 - RNA, 19 nt, Artificial Sequence
  Description of Artificial Sequence: Synthetic oligonucleotide
  Antisense strand to SEQ ID NO: 1994352
gcugauacucgaauacauc

SEQ ID NO: 1994354 - RNA, 19 nt, Artificial Sequence
  Description of Artificial Sequence: Synthetic oligonucleotide
  Sense strand starting at position 2862 of SEQ ID NO: 1880794
gaaaguguaacggguacau

SEQ ID NO: 1994355 - RNA, 19 nt, Artificial Sequence
  Description of Artificial Sequence: Synthetic oligonucleotide
  Antisense strand to SEQ ID NO: 1994354
auguacccguuacacuuuc

SEQ ID NO: 1994356 - RNA, 19 nt, Artificial Sequence
  Description of Artificial Sequence: Synthetic oligonucleotide
  Sense strand starting at position 2905 of SEQ ID NO: 1880794
agacaagucucaguuaaug

SEQ ID NO: 1994357 - RNA, 19 nt, Artificial Sequence
  Description of Artificial Sequence: Synthetic oligonucleotide
  Antisense strand to SEQ ID NO: 1994356
cauuaacugagacuugucu

SEQ ID NO: 1994358 - RNA, 19 nt, Artificial Sequence
  Description of Artificial Sequence: Synthetic oligonucleotide
  Sense strand starting at position 2923 of SEQ ID NO: 1880794
guauaaaguuuaucuugac

SEQ ID NO: 1994359 - RNA, 19 nt, Artificial Sequence
  Description of Artificial Sequence: Synthetic oligonucleotide
  Antisense strand to SEQ ID NO: 1994358
gucaagauaaacuuuauac

SEQ ID NO: 1994360 - RNA, 19 nt, Artificial Sequence
  Description of Artificial Sequence: Synthetic oligonucleotide
  Sense strand starting at position 3113 of SEQ ID NO: 1880794
ccagguuauaaguagguga

SEQ ID NO: 1994361 - RNA, 19 nt, Artificial Sequence
  Description of Artificial Sequence: Synthetic oligonucleotide
  Antisense strand to SEQ ID NO: 1994360
ucaccuacuuauaaccugg

SEQ ID NO: 1994362 - RNA, 19 nt, Artificial Sequence
  Description of Artificial Sequence: Synthetic oligonucleotide
  Sense strand starting at position 3115 of SEQ ID NO: 1880794
agguuauaaguaggugaga

SEQ ID NO: 1994363 - RNA, 19 nt, Artificial Sequence
  Description of Artificial Sequence: Synthetic oligonucleotide
  Antisense strand to SEQ ID NO: 1994362
ucucaccuacuuauaaccu

SEQ ID NO: 1994364 - RNA, 19 nt, Artificial Sequence
  Description of Artificial Sequence: Synthetic oligonucleotide
  Sense strand starting at position 3117 of SEQ ID NO: 1880794
guuauaaguaggugagaga

SEQ ID NO: 1994365 - RNA, 19 nt, Artificial Sequence
  Description of Artificial Sequence: Synthetic oligonucleotide
  Antisense strand to SEQ ID NO: 1994364
ucucucaccuacuuauaac

SEQ ID NO: 1994366 - RNA, 19 nt, Artificial Sequence
  Description of Artificial Sequence: Synthetic oligonucleotide
  Sense strand starting at position 3238 of SEQ ID NO: 1880794
cagguuugccuugagcagu

SEQ ID NO: 1994367 - RNA, 19 nt, Artificial Sequence
  Description of Artificial Sequence: Synthetic oligonucleotide
  Antisense strand to SEQ ID NO: 1994366
acugcucaaggcaaaccug

SEQ ID NO: 1994368 - RNA, 19 nt, Artificial Sequence
  Description of Artificial Sequence: Synthetic oligonucleotide
  Sense strand starting at position 3370 of SEQ ID NO: 1880794
uaccguaugggacauuauu

SEQ ID NO: 1994369 - RNA, 19 nt, Artificial Sequence
  Description of Artificial Sequence: Synthetic oligonucleotide
  Antisense strand to SEQ ID NO: 1994368
aauaaugucccauacggua

SEQ ID NO: 1994370 - RNA, 19 nt, Artificial Sequence
  Description of Artificial Sequence: Synthetic oligonucleotide
  Sense strand starting at position 3395 of SEQ ID NO: 1880794
gccagacagcuuugucaaa

SEQ ID NO: 1994371 - RNA, 19 nt, Artificial Sequence
  Description of Artificial Sequence: Synthetic oligonucleotide
  Antisense strand to SEQ ID NO: 1994370
uuugacaaagcugucuggc

SEQ ID NO: 1994372 - RNA, 19 nt, Artificial Sequence
  Description of Artificial Sequence: Synthetic oligonucleotide
  Sense strand starting at position 3405 of SEQ ID NO: 1880794
uuugucaaaccugguauca

SEQ ID NO: 1994373 - RNA, 19 nt, Artificial Sequence
  Description of Artificial Sequence: Synthetic oligonucleotide
  Antisense strand to SEQ ID NO: 1994372
ugauaccagguuugacaaa

SEQ ID NO: 1994374 - RNA, 19 nt, Artificial Sequence
  Description of Artificial Sequence: Synthetic oligonucleotide
  Sense strand starting at position 3454 of SEQ ID NO: 1880794
uuggcaaauuuccagauau

SEQ ID NO: 1994375 - RNA, 19 nt, Artificial Sequence
  Description of Artificial Sequence: Synthetic oligonucleotide
  Antisense strand to SEQ ID NO: 1994374
auaucuggaaauuugccaa

SEQ ID NO: 1994376 - RNA, 19 nt, Artificial Sequence
  Description of Artificial Sequence: Synthetic oligonucleotide
  Sense strand starting at position 3464 of SEQ ID NO: 1880794
uccagauaucuuugcugag

SEQ ID NO: 1994377 - RNA, 19 nt, Artificial Sequence
  Description of Artificial Sequence: Synthetic oligonucleotide
  Antisense strand to SEQ ID NO: 1994376
cucagcaaagauaucugga

SEQ ID NO: 1994378 - RNA, 19 nt, Artificial Sequence
  Description of Artificial Sequence: Synthetic oligonucleotide
  Sense strand starting at position 3465 of SEQ ID NO: 1880794
ccagauaucuuugcugagu

SEQ ID NO: 1994379 - RNA, 19 nt, Artificial Sequence
  Description of Artificial Sequence: Synthetic oligonucleotide
  Antisense strand to SEQ ID NO: 1994378
acucagcaaagauaucugg

SEQ ID NO: 1994380 - RNA, 19 nt, Artificial Sequence
  Description of Artificial Sequence: Synthetic oligonucleotide
  Sense strand starting at position 3466 of SEQ ID NO: 1880794
cagauaucuuugcugagug

SEQ ID NO: 1994381 - RNA, 19 nt, Artificial Sequence
  Description of Artificial Sequence: Synthetic oligonucleotide
  Antisense strand to SEQ ID NO: 1994380
cacucagcaaagauaucug

SEQ ID NO: 1994382 - RNA, 19 nt, Artificial Sequence
  Description of Artificial Sequence: Synthetic oligonucleotide
  Sense strand starting at position 3511 of SEQ ID NO: 1880794
guuucaaugggaugugcuu

SEQ ID NO: 1994383 - RNA, 19 nt, Artificial Sequence
  Description of Artificial Sequence: Synthetic oligonucleotide
  Antisense strand to SEQ ID NO: 1994382
aagcacaucccauugaaac

SEQ ID NO: 1994384 - RNA, 19 nt, Artificial Sequence
  Description of Artificial Sequence: Synthetic oligonucleotide
  Sense strand starting at position 3517 of SEQ ID NO: 1880794
augggaugugcuugggaau

SEQ ID NO: 1994385 - RNA, 19 nt, Artificial Sequence
  Description of Artificial Sequence: Synthetic oligonucleotide
  Antisense strand to SEQ ID NO: 1994384
auucccaagcacaucccau

SEQ ID NO: 1994386 - RNA, 19 nt, Artificial Sequence
  Description of Artificial Sequence: Synthetic oligonucleotide
  Sense strand starting at position 3530 of SEQ ID NO: 1880794
gggaauguugaugguguca

SEQ ID NO: 1994387 - RNA, 19 nt, Artificial Sequence
  Description of Artificial Sequence: Synthetic oligonucleotide
  Antisense strand to SEQ ID NO: 1994386
ugacaccaucaacauuccc

SEQ ID NO: 1994388 - RNA, 19 nt, Artificial Sequence
  Description of Artificial Sequence: Synthetic oligonucleotide
  Sense strand starting at position 3543 of SEQ ID NO: 1880794
gugucaccaccucauugau

SEQ ID NO: 1994389 - RNA, 19 nt, Artificial Sequence
  Description of Artificial Sequence: Synthetic oligonucleotide
  Antisense strand to SEQ ID NO: 1994388
aucaaugagguggugacac

SEQ ID NO: 1994390 - RNA, 19 nt, Artificial Sequence
  Description of Artificial Sequence: Synthetic oligonucleotide
  Sense strand starting at position 3590 of SEQ ID NO: 1880794
ccuucuucugcgggaccua

SEQ ID NO: 1994391 - RNA, 19 nt, Artificial Sequence
  Description of Artificial Sequence: Synthetic oligonucleotide
  Antisense strand to SEQ ID NO: 1994390
uaggucccgcagaagaagg

SEQ ID NO: 1994392 - RNA, 19 nt, Artificial Sequence
  Description of Artificial Sequence: Synthetic oligonucleotide
  Sense strand starting at position 3602 of SEQ ID NO: 1880794
ggaccuaaguuggaaagaa

SEQ ID NO: 1994393 - RNA, 19 nt, Artificial Sequence
  Description of Artificial Sequence: Synthetic oligonucleotide
  Antisense strand to SEQ ID NO: 1994392
uucuuuccaacuuaggucc

SEQ ID NO: 1994394 - RNA, 19 nt, Artificial Sequence
  Description of Artificial Sequence: Synthetic oligonucleotide
  Sense strand starting at position 3731 of SEQ ID NO: 1880794
cuagauuauucccugagcu

SEQ ID NO: 1994395 - RNA, 19 nt, Artificial Sequence
  Description of Artificial Sequence: Synthetic oligonucleotide
  Antisense strand to SEQ ID NO: 1994394
agcucagggaauaaucuag

SEQ ID NO: 1994396 - RNA, 19 nt, Artificial Sequence
  Description of Artificial Sequence: Synthetic oligonucleotide
  Sense strand starting at position 3749 of SEQ ID NO: 1880794
uccaaagucuugucacuuu

SEQ ID NO: 1994397 - RNA, 19 nt, Artificial Sequence
  Description of Artificial Sequence: Synthetic oligonucleotide
  Antisense strand to SEQ ID NO: 1994396
aaagugacaagacuuugga

SEQ ID NO: 1994398 - RNA, 19 nt, Artificial Sequence
  Description of Artificial Sequence: Synthetic oligonucleotide
  Sense strand starting at position 3839 of SEQ ID NO: 1880794
agaugcucagcugaacauu

SEQ ID NO: 1994399 - RNA, 19 nt, Artificial Sequence
  Description of Artificial Sequence: Synthetic oligonucleotide
  Antisense strand to SEQ ID NO: 1994398
aauguucagcugagcaucu

SEQ ID NO: 1994400 - RNA, 19 nt, Artificial Sequence
  Description of Artificial Sequence: Synthetic oligonucleotide
  Sense strand starting at position 3842 of SEQ ID NO: 1880794
ugcucagcugaacauuaau

SEQ ID NO: 1994401 - RNA, 19 nt, Artificial Sequence
  Description of Artificial Sequence: Synthetic oligonucleotide
  Antisense strand to SEQ ID NO: 1994400
auuaauguucagcugagca

SEQ ID NO: 1994402 - RNA, 19 nt, Artificial Sequence
  Description of Artificial Sequence: Synthetic oligonucleotide
  Sense strand starting at position 3854 of SEQ ID NO: 1880794
cauuaauuugcgugaaagu

SEQ ID NO: 1994403 - RNA, 19 nt, Artificial Sequence
  Description of Artificial Sequence: Synthetic oligonucleotide
  Antisense strand to SEQ ID NO: 1994402
acuuucacgcaaauuaaug

SEQ ID NO: 1994404 - RNA, 19 nt, Artificial Sequence
  Description of Artificial Sequence: Synthetic oligonucleotide
  Sense strand starting at position 252 of SEQ ID NO: 1880793
gguaucguucaaugcagaa

SEQ ID NO: 1994405 - RNA, 19 nt, Artificial Sequence
  Description of Artificial Sequence: Synthetic oligonucleotide
  Antisense strand to SEQ ID NO: 1994404
uucugcauugaacgauacc

SEQ ID NO: 1994406 - RNA, 19 nt, Artificial Sequence
  Description of Artificial Sequence: Synthetic oligonucleotide
  Sense strand starting at position 493 of SEQ ID NO: 1880793
gacuuacuugcugaugaug

SEQ ID NO: 1994407 - RNA, 19 nt, Artificial Sequence
  Description of Artificial Sequence: Synthetic oligonucleotide
  Antisense strand to SEQ ID NO: 1994406
caucaucagcaaguaaguc

SEQ ID NO: 1994408 - RNA, 19 nt, Artificial Sequence
  Description of Artificial Sequence: Synthetic oligonucleotide
  Sense strand starting at position 1989 of SEQ ID NO: 1880793
aggagcauauuaucuguuu

SEQ ID NO: 1994409 - RNA, 19 nt, Artificial Sequence
  Description of Artificial Sequence: Synthetic oligonucleotide
  Antisense strand to SEQ ID NO: 1994408
aaacagauaauaugcuccu

SEQ ID NO: 1994410 - RNA, 19 nt, Artificial Sequence
  Description of Artificial Sequence: Synthetic oligonucleotide
  Sense strand starting at position 2012 of SEQ ID NO: 1880793
ugcugugacauggguagua

SEQ ID NO: 1994411 - RNA, 19 nt, Artificial Sequence
  Description of Artificial Sequence: Synthetic oligonucleotide
  Antisense strand to SEQ ID NO: 1994410
uacuacccaugucacagca

SEQ ID NO: 1994412 - RNA, 19 nt, Artificial Sequence
  Description of Artificial Sequence: Synthetic oligonucleotide
  Sense strand starting at position 2014 of SEQ ID NO: 1880793
cugugacauggguaguaga

SEQ ID NO: 1994413 - RNA, 19 nt, Artificial Sequence
  Description of Artificial Sequence: Synthetic oligonucleotide
  Antisense strand to SEQ ID NO: 1994412
ucuacuacccaugucacag

SEQ ID NO: 1994414 - RNA, 19 nt, Artificial Sequence
  Description of Artificial Sequence: Synthetic oligonucleotide
  Sense strand starting at position 2034 of SEQ ID NO: 1880793
cuaucuguguuagcacaau

SEQ ID NO: 1994415 - RNA, 19 nt, Artificial Sequence
  Description of Artificial Sequence: Synthetic oligonucleotide
  Antisense strand to SEQ ID NO: 1994414
auugugcuaacacagauag

SEQ ID NO: 1994416 - RNA, 19 nt, Artificial Sequence
  Description of Artificial Sequence: Synthetic oligonucleotide
  Sense strand starting at position 2219 of SEQ ID NO: 1880793
gauguauucgaguaucagc

SEQ ID NO: 1994417 - RNA, 19 nt, Artificial Sequence
  Description of Artificial Sequence: Synthetic oligonucleotide
  Antisense strand to SEQ ID NO: 1994416
gcugauacucgaauacauc

SEQ ID NO: 1994418 - RNA, 19 nt, Artificial Sequence
  Description of Artificial Sequence: Synthetic oligonucleotide
  Sense strand starting at position 2266 of SEQ ID NO: 1880793
gaaaguguaacggguacau

SEQ ID NO: 1994419 - RNA, 19 nt, Artificial Sequence
  Description of Artificial Sequence: Synthetic oligonucleotide
  Antisense strand to SEQ ID NO: 1994418
auguacccguuacacuuuc

SEQ ID NO: 1994420 - RNA, 19 nt, Artificial Sequence
  Description of Artificial Sequence: Synthetic oligonucleotide
  Sense strand starting at position 2309 of SEQ ID NO: 1880793
agacaagucucaguuaaug

SEQ ID NO: 1994421 - RNA, 19 nt, Artificial Sequence
  Description of Artificial Sequence: Synthetic oligonucleotide
  Antisense strand to SEQ ID NO: 1994420
cauuaacugagacuugucu

SEQ ID NO: 1994422 - RNA, 19 nt, Artificial Sequence
  Description of Artificial Sequence: Synthetic oligonucleotide
  Sense strand starting at position 2327 of SEQ ID NO: 1880793
guauaaaguuuaucuugac

SEQ ID NO: 1994423 - RNA, 19 nt, Artificial Sequence
  Description of Artificial Sequence: Synthetic oligonucleotide
  Antisense strand to SEQ ID NO: 1994422
gucaagauaaacuuuauac

SEQ ID NO: 1994424 - RNA, 19 nt, Artificial Sequence
  Description of Artificial Sequence: Synthetic oligonucleotide
  Sense strand starting at position 2517 of SEQ ID NO: 1880793
ccagguuauaaguagguga

SEQ ID NO: 1994425 - RNA, 19 nt, Artificial Sequence
  Description of Artificial Sequence: Synthetic oligonucleotide
  Antisense strand to SEQ ID NO: 1994424
ucaccuacuuauaaccugg

SEQ ID NO: 1994426 - RNA, 19 nt, Artificial Sequence
  Description of Artificial Sequence: Synthetic oligonucleotide
  Sense strand starting at position 2519 of SEQ ID NO: 1880793
agguuauaaguaggugaga

SEQ ID NO: 1994427 - RNA, 19 nt, Artificial Sequence
  Description of Artificial Sequence: Synthetic oligonucleotide
  Antisense strand to SEQ ID NO: 1994426
ucucaccuacuuauaaccu

SEQ ID NO: 1994428 - RNA, 19 nt, Artificial Sequence
  Description of Artificial Sequence: Synthetic oligonucleotide
  Sense strand starting at position 2521 of SEQ ID NO: 1880793
guuauaaguaggugagaga

SEQ ID NO: 1994429 - RNA, 19 nt, Artificial Sequence
  Description of Artificial Sequence: Synthetic oligonucleotide
  Antisense strand to SEQ ID NO: 1994428
ucucucaccuacuuauaac

SEQ ID NO: 1994430 - RNA, 19 nt, Artificial Sequence
  Description of Artificial Sequence: Synthetic oligonucleotide
  Sense strand starting at position 2642 of SEQ ID NO: 1880793
cagguuugccuugagcagu

SEQ ID NO: 1994431 - RNA, 19 nt, Artificial Sequence
  Description of Artificial Sequence: Synthetic oligonucleotide
  Antisense strand to SEQ ID NO: 1994430
acugcucaaggcaaaccug

SEQ ID NO: 1994432 - RNA, 19 nt, Artificial Sequence
  Description of Artificial Sequence: Synthetic oligonucleotide
  Sense strand starting at position 2774 of SEQ ID NO: 1880793
uaccguaugggacauuauu

SEQ ID NO: 1994433 - RNA, 19 nt, Artificial Sequence
  Description of Artificial Sequence: Synthetic oligonucleotide
  Antisense strand to SEQ ID NO: 1994432
aauaaugucccauacggua

SEQ ID NO: 1994434 - RNA, 19 nt, Artificial Sequence
  Description of Artificial Sequence: Synthetic oligonucleotide
  Sense strand starting at position 2799 of SEQ ID NO: 1880793
gccagacagcuuugucaaa

SEQ ID NO: 1994435 - RNA, 19 nt, Artificial Sequence
  Description of Artificial Sequence: Synthetic oligonucleotide
  Antisense strand to SEQ ID NO: 1994434
uuugacaaagcugucuggc

SEQ ID NO: 1994436 - RNA, 19 nt, Artificial Sequence
  Description of Artificial Sequence: Synthetic oligonucleotide
  Sense strand starting at position 2809 of SEQ ID NO: 1880793
uuugucaaaccugguauca

SEQ ID NO: 1994437 - RNA, 19 nt, Artificial Sequence
  Description of Artificial Sequence: Synthetic oligonucleotide
  Antisense strand to SEQ ID NO: 1994436
ugauaccagguuugacaaa

SEQ ID NO: 1994438 - RNA, 19 nt, Artificial Sequence
  Description of Artificial Sequence: Synthetic oligonucleotide
  Sense strand starting at position 2858 of SEQ ID NO: 1880793
uuggcaaauuuccagauau

SEQ ID NO: 1994439 - RNA, 19 nt, Artificial Sequence
  Description of Artificial Sequence: Synthetic oligonucleotide
  Antisense strand to SEQ ID NO: 1994438
auaucuggaaauuugccaa

SEQ ID NO: 1994440 - RNA, 19 nt, Artificial Sequence
  Description of Artificial Sequence: Synthetic oligonucleotide
  Sense strand starting at position 2868 of SEQ ID NO: 1880793
uccagauaucuuugcugag

SEQ ID NO: 1994441 - RNA, 19 nt, Artificial Sequence
  Description of Artificial Sequence: Synthetic oligonucleotide
  Antisense strand to SEQ ID NO: 1994440
cucagcaaagauaucugga

SEQ ID NO: 1994442 - RNA, 19 nt, Artificial Sequence
  Description of Artificial Sequence: Synthetic oligonucleotide
  Sense strand starting at position 2869 of SEQ ID NO: 1880793
ccagauaucuuugcugagu

SEQ ID NO: 1994443 - RNA, 19 nt, Artificial Sequence
  Description of Artificial Sequence: Synthetic oligonucleotide
  Antisense strand to SEQ ID NO: 1994442
acucagcaaagauaucugg

SEQ ID NO: 1994444 - RNA, 19 nt, Artificial Sequence
  Description of Artificial Sequence: Synthetic oligonucleotide
  Sense strand starting at position 2870 of SEQ ID NO: 1880793
cagauaucuuugcugagug

SEQ ID NO: 1994445 - RNA, 19 nt, Artificial Sequence
  Description of Artificial Sequence: Synthetic oligonucleotide
  Antisense strand to SEQ ID NO: 1994444
cacucagcaaagauaucug

SEQ ID NO: 1994446 - RNA, 19 nt, Artificial Sequence
  Description of Artificial Sequence: Synthetic oligonucleotide
  Sense strand starting at position 2915 of SEQ ID NO: 1880793
guuucaaugggaugugcuu

SEQ ID NO: 1994447 - RNA, 19 nt, Artificial Sequence
  Description of Artificial Sequence: Synthetic oligonucleotide
  Antisense strand to SEQ ID NO: 1994446
aagcacaucccauugaaac

SEQ ID NO: 1994448 - RNA, 19 nt, Artificial Sequence
  Description of Artificial Sequence: Synthetic oligonucleotide
  Sense strand starting at position 2921 of SEQ ID NO: 1880793
augggaugugcuugggaau

SEQ ID NO: 1994449 - RNA, 19 nt, Artificial Sequence
  Description of Artificial Sequence: Synthetic oligonucleotide
  Antisense strand to SEQ ID NO: 1994448
auucccaagcacaucccau

SEQ ID NO: 1994450 - RNA, 19 nt, Artificial Sequence
  Description of Artificial Sequence: Synthetic oligonucleotide
  Sense strand starting at position 2934 of SEQ ID NO: 1880793
gggaauguugaugguguca

SEQ ID NO: 1994451 - RNA, 19 nt, Artificial Sequence
  Description of Artificial Sequence: Synthetic oligonucleotide
  Antisense strand to SEQ ID NO: 1994450
ugacaccaucaacauuccc

SEQ ID NO: 1994452 - RNA, 19 nt, Artificial Sequence
  Description of Artificial Sequence: Synthetic oligonucleotide
  Sense strand starting at position 2947 of SEQ ID NO: 1880793
gugucaccaccucauugau

SEQ ID NO: 1994453 - RNA, 19 nt, Artificial Sequence
  Description of Artificial Sequence: Synthetic oligonucleotide
  Antisense strand to SEQ ID NO: 1994452
aucaaugagguggugacac

SEQ ID NO: 1994454 - RNA, 19 nt, Artificial Sequence
  Description of Artificial Sequence: Synthetic oligonucleotide
  Sense strand starting at position 3006 of SEQ ID NO: 1880793
ggaccuaaguuggaaagaa

SEQ ID NO: 1994455 - RNA, 19 nt, Artificial Sequence
  Description of Artificial Sequence: Synthetic oligonucleotide
  Antisense strand to SEQ ID NO: 1994454
uucuuuccaacuuaggucc

SEQ ID NO: 1994456 - RNA, 19 nt, Artificial Sequence
  Description of Artificial Sequence: Synthetic oligonucleotide
  Sense strand starting at position 3135 of SEQ ID NO: 1880793
cuagauuauucccugagcu

SEQ ID NO: 1994457 - RNA, 19 nt, Artificial Sequence
  Description of Artificial Sequence: Synthetic oligonucleotide
  Antisense strand to SEQ ID NO: 1994456
agcucagggaauaaucuag

SEQ ID NO: 1994458 - RNA, 19 nt, Artificial Sequence
  Description of Artificial Sequence: Synthetic oligonucleotide
  Sense strand starting at position 3153 of SEQ ID NO: 1880793
uccaaagucuugucacuuu

SEQ ID NO: 1994459 - RNA, 19 nt, Artificial Sequence
  Description of Artificial Sequence: Synthetic oligonucleotide
  Antisense strand to SEQ ID NO: 1994458
aaagugacaagacuuugga

SEQ ID NO: 1994460 - RNA, 19 nt, Artificial Sequence
  Description of Artificial Sequence: Synthetic oligonucleotide
  Sense strand starting at position 3243 of SEQ ID NO: 1880793
agaugcucagcugaacauu

SEQ ID NO: 1994461 - RNA, 19 nt, Artificial Sequence
  Description of Artificial Sequence: Synthetic oligonucleotide
  Antisense strand to SEQ ID NO: 1994460
aauguucagcugagcaucu

SEQ ID NO: 1994462 - RNA, 19 nt, Artificial Sequence
  Description of Artificial Sequence: Synthetic oligonucleotide
  Sense strand starting at position 3246 of SEQ ID NO: 1880793
ugcucagcugaacauuaau

SEQ ID NO: 1994463 - RNA, 19 nt, Artificial Sequence
  Description of Artificial Sequence: Synthetic oligonucleotide
  Antisense strand to SEQ ID NO: 1994462
auuaauguucagcugagca

SEQ ID NO: 1994464 - RNA, 19 nt, Artificial Sequence
  Description of Artificial Sequence: Synthetic oligonucleotide
  Sense strand starting at position 3258 of SEQ ID NO: 1880793
cauuaauuugcgugaaagu

SEQ ID NO: 1994465 - RNA, 19 nt, Artificial Sequence
  Description of Artificial Sequence: Synthetic oligonucleotide
  Antisense strand to SEQ ID NO: 1994464
acuuucacgcaaauuaaug

SEQ ID NO: 1994466 - RNA, 19 nt, Artificial Sequence
  Description of Artificial Sequence: Synthetic oligonucleotide
  Sense strand starting at position 3401 of SEQ ID NO: 1880793
uacagagaaugugcauaua

SEQ ID NO: 1994467 - RNA, 19 nt, Artificial Sequence
  Description of Artificial Sequence: Synthetic oligonucleotide
  Antisense strand to SEQ ID NO: 1994466
uauaugcacauucucugua

SEQ ID NO: 1994468 - RNA, 19 nt, Artificial Sequence
  Description of Artificial Sequence: Synthetic oligonucleotide
  Sense strand starting at position 3446 of SEQ ID NO: 1880793
uuugcuucuuagucaaaga

SEQ ID NO: 1994469 - RNA, 19 nt, Artificial Sequence
  Description of Artificial Sequence: Synthetic oligonucleotide
  Antisense strand to SEQ ID NO: 1994468
ucuuugacuaagaagcaaa

SEQ ID NO: 1994470 - RNA, 19 nt, Artificial Sequence
  Description of Artificial Sequence: Synthetic oligonucleotide
  Sense strand starting at position 3483 of SEQ ID NO: 1880793
gagagaaccuuugaggacu

SEQ ID NO: 1994471 - RNA, 19 nt, Artificial Sequence
  Description of Artificial Sequence: Synthetic oligonucleotide
  Antisense strand to SEQ ID NO: 1994470
aguccucaaagguucucuc

SEQ ID NO: 1994472 - RNA, 19 nt, Artificial Sequence
  Description of Artificial Sequence: Synthetic oligonucleotide
  Sense strand starting at position 3504 of SEQ ID NO: 1880793
aguaaacagcuguauuacu

SEQ ID NO: 1994473 - RNA, 19 nt, Artificial Sequence
  Description of Artificial Sequence: Synthetic oligonucleotide
  Antisense strand to SEQ ID NO: 1994472
aguaauacagcuguuuacu

SEQ ID NO: 1994474 - RNA, 19 nt, Artificial Sequence
  Description of Artificial Sequence: Synthetic oligonucleotide
  Sense strand starting at position 3662 of SEQ ID NO: 1880793
gugagucaguuccuaccau

SEQ ID NO: 1994475 - RNA, 19 nt, Artificial Sequence
  Description of Artificial Sequence: Synthetic oligonucleotide
  Antisense strand to SEQ ID NO: 1994474
augguaggaacugacucac

SEQ ID NO: 1994476 - RNA, 19 nt, Artificial Sequence
  Description of Artificial Sequence: Synthetic oligonucleotide
  Sense strand starting at position 3680 of SEQ ID NO: 1880793
ucucuucuaccaugugagu

SEQ ID NO: 1994477 - RNA, 19 nt, Artificial Sequence
  Description of Artificial Sequence: Synthetic oligonucleotide
  Antisense strand to SEQ ID NO: 1994476
acucacaugguagaagaga

SEQ ID NO: 1994478 - RNA, 19 nt, Artificial Sequence
  Description of Artificial Sequence: Synthetic oligonucleotide
  Sense strand starting at position 3686 of SEQ ID NO: 1880793
cuaccaugugagugaaacu

SEQ ID NO: 1994479 - RNA, 19 nt, Artificial Sequence
  Description of Artificial Sequence: Synthetic oligonucleotide
  Antisense strand to SEQ ID NO: 1994478
aguuucacucacaugguag

SEQ ID NO: 1994480 - RNA, 19 nt, Artificial Sequence
  Description of Artificial Sequence: Synthetic oligonucleotide
  Sense strand starting at position 3695 of SEQ ID NO: 1880793
gagugaaacugccuuugaa

SEQ ID NO: 1994481 - RNA, 19 nt, Artificial Sequence
  Description of Artificial Sequence: Synthetic oligonucleotide
  Antisense strand to SEQ ID NO: 1994480
uucaaaggcaguuucacuc

SEQ ID NO: 1994482 - RNA, 19 nt, Artificial Sequence
  Description of Artificial Sequence: Synthetic oligonucleotide
  Sense strand starting at position 3871 of SEQ ID NO: 1880793
agagcucuuccaugaaaca

SEQ ID NO: 1994483 - RNA, 19 nt, Artificial Sequence
  Description of Artificial Sequence: Synthetic oligonucleotide
  Antisense strand to SEQ ID NO: 1994482
uguuucauggaagagcucu

SEQ ID NO: 1994484 - RNA, 19 nt, Artificial Sequence
  Description of Artificial Sequence: Synthetic oligonucleotide
  Sense strand starting at position 152 of SEQ ID NO: 1880795
gcagaaugaaaggguacau

SEQ ID NO: 1994485 - RNA, 19 nt, Artificial Sequence
  Description of Artificial Sequence: Synthetic oligonucleotide
  Antisense strand to SEQ ID NO: 1994484
auguacccuuucauucugc

SEQ ID NO: 1994486 - RNA, 19 nt, Artificial Sequence
  Description of Artificial Sequence: Synthetic oligonucleotide
  Sense strand starting at position 196 of SEQ ID NO: 1880795
guacccaguucuccuuuaa

SEQ ID NO: 1994487 - RNA, 19 nt, Artificial Sequence
  Description of Artificial Sequence: Synthetic oligonucleotide
  Antisense strand to SEQ ID NO: 1994486
uuaaaggagaacuggguac

SEQ ID NO: 1994488 - RNA, 19 nt, Artificial Sequence
  Description of Artificial Sequence: Synthetic oligonucleotide
  Sense strand starting at position 327 of SEQ ID NO: 1880795
ggccaagccuguuucuaag

SEQ ID NO: 1994489 - RNA, 19 nt, Artificial Sequence
  Description of Artificial Sequence: Synthetic oligonucleotide
  Antisense strand to SEQ ID NO: 1994488
cuuagaaacaggcuuggcc

SEQ ID NO: 1994490 - RNA, 19 nt, Artificial Sequence
  Description of Artificial Sequence: Synthetic oligonucleotide
  Sense strand starting at position 333 of SEQ ID NO: 1880795
gccuguuucuaaggcagga

SEQ ID NO: 1994491 - RNA, 19 nt, Artificial Sequence
  Description of Artificial Sequence: Synthetic oligonucleotide
  Antisense strand to SEQ ID NO: 1994490
uccugccuuagaaacaggc

SEQ ID NO: 1994492 - RNA, 19 nt, Artificial Sequence
  Description of Artificial Sequence: Synthetic oligonucleotide
  Sense strand starting at position 756 of SEQ ID NO: 1880795
cccaguccuuguucuaaag

SEQ ID NO: 1994493 - RNA, 19 nt, Artificial Sequence
  Description of Artificial Sequence: Synthetic oligonucleotide
  Antisense strand to SEQ ID NO: 1994492
cuuuagaacaaggacuggg

SEQ ID NO: 1994494 - RNA, 19 nt, Artificial Sequence
  Description of Artificial Sequence: Synthetic oligonucleotide
  Sense strand starting at position 758 of SEQ ID NO: 1880795
caguccuuguucuaaagag

SEQ ID NO: 1994495 - RNA, 19 nt, Artificial Sequence
  Description of Artificial Sequence: Synthetic oligonucleotide
  Antisense strand to SEQ ID NO: 1994494
cucuuuagaacaaggacug

SEQ ID NO: 1994496 - RNA, 19 nt, Artificial Sequence
  Description of Artificial Sequence: Synthetic oligonucleotide
  Sense strand starting at position 1999 of SEQ ID NO: 1880795
uuugcaauagucugccagu

SEQ ID NO: 1994497 - RNA, 19 nt, Artificial Sequence
  Description of Artificial Sequence: Synthetic oligonucleotide
  Antisense strand to SEQ ID NO: 1994496
acuggcagacuauugcaaa

SEQ ID NO: 1994498 - RNA, 19 nt, Artificial Sequence
  Description of Artificial Sequence: Synthetic oligonucleotide
  Sense strand starting at position 2323 of SEQ ID NO: 1880795
uuugacaucuggcaacauu

SEQ ID NO: 1994499 - RNA, 19 nt, Artificial Sequence
  Description of Artificial Sequence: Synthetic oligonucleotide
  Antisense strand to SEQ ID NO: 1994498
aauguugccagaugucaaa

SEQ ID NO: 1994500 - RNA, 19 nt, Artificial Sequence
  Description of Artificial Sequence: Synthetic oligonucleotide
  Sense strand starting at position 2667 of SEQ ID NO: 1880795
gggagugucuugcagaugu

SEQ ID NO: 1994501 - RNA, 19 nt, Artificial Sequence
  Description of Artificial Sequence: Synthetic oligonucleotide
  Antisense strand to SEQ ID NO: 1994500
acaucugcaagacacuccc

SEQ ID NO: 1994502 - RNA, 19 nt, Artificial Sequence
  Description of Artificial Sequence: Synthetic oligonucleotide
  Sense strand starting at position 2669 of SEQ ID NO: 1880795
gagugucuugcagauguau

SEQ ID NO: 1994503 - RNA, 19 nt, Artificial Sequence
  Description of Artificial Sequence: Synthetic oligonucleotide
  Antisense strand to SEQ ID NO: 1994502
auacaucugcaagacacuc

SEQ ID NO: 1994504 - RNA, 19 nt, Artificial Sequence
  Description of Artificial Sequence: Synthetic oligonucleotide
  Sense strand starting at position 2718 of SEQ ID NO: 1880795
cugaacaauucucuggcau

SEQ ID NO: 1994505 - RNA, 19 nt, Artificial Sequence
  Description of Artificial Sequence: Synthetic oligonucleotide
  Antisense strand to SEQ ID NO: 1994504
augccagagaauuguucag

SEQ ID NO: 1994506 - RNA, 19 nt, Artificial Sequence
  Description of Artificial Sequence: Synthetic oligonucleotide
  Sense strand starting at position 2719 of SEQ ID NO: 1880795
ugaacaauucucuggcauu

SEQ ID NO: 1994507 - RNA, 19 nt, Artificial Sequence
  Description of Artificial Sequence: Synthetic oligonucleotide
  Antisense strand to SEQ ID NO: 1994506
aaugccagagaauuguuca

SEQ ID NO: 1994508 - RNA, 19 nt, Artificial Sequence
  Description of Artificial Sequence: Synthetic oligonucleotide
  Sense strand starting at position 2722 of SEQ ID NO: 1880795
acaauucucuggcauuuga

SEQ ID NO: 1994509 - RNA, 19 nt, Artificial Sequence
  Description of Artificial Sequence: Synthetic oligonucleotide
  Antisense strand to SEQ ID NO: 1994508
ucaaaugccagagaauugu

SEQ ID NO: 1994510 - RNA, 19 nt, Artificial Sequence
  Description of Artificial Sequence: Synthetic oligonucleotide
  Sense strand starting at position 2965 of SEQ ID NO: 1880795
agacaaugaugcugcauau

SEQ ID NO: 1994511 - RNA, 19 nt, Artificial Sequence
  Description of Artificial Sequence: Synthetic oligonucleotide
  Antisense strand to SEQ ID NO: 1994510
auaugcagcaucauugucu

SEQ ID NO: 1994512 - RNA, 19 nt, Artificial Sequence
  Description of Artificial Sequence: Synthetic oligonucleotide
  Sense strand starting at position 3006 of SEQ ID NO: 1880795
cuccucaguugggauugau

SEQ ID NO: 1994513 - RNA, 19 nt, Artificial Sequence
  Description of Artificial Sequence: Synthetic oligonucleotide
  Antisense strand to SEQ ID NO: 1994512
aucaaucccaacugaggag

SEQ ID NO: 1994514 - RNA, 19 nt, Artificial Sequence
  Description of Artificial Sequence: Synthetic oligonucleotide
  Sense strand starting at position 3009 of SEQ ID NO: 1880795
cucaguugggauugaugaa

SEQ ID NO: 1994515 - RNA, 19 nt, Artificial Sequence
  Description of Artificial Sequence: Synthetic oligonucleotide
  Antisense strand to SEQ ID NO: 1994514
uucaucaaucccaacugag

SEQ ID NO: 1994516 - RNA, 19 nt, Artificial Sequence
  Description of Artificial Sequence: Synthetic oligonucleotide
  Sense strand starting at position 3321 of SEQ ID NO: 1880795
augggucuuccaugacaaa

SEQ ID NO: 1994517 - RNA, 19 nt, Artificial Sequence
  Description of Artificial Sequence: Synthetic oligonucleotide
  Antisense strand to SEQ ID NO: 1994516
uuugucauggaagacccau

SEQ ID NO: 1994518 - RNA, 19 nt, Artificial Sequence
  Description of Artificial Sequence: Synthetic oligonucleotide
  Sense strand starting at position 3691 of SEQ ID NO: 1880795
auuggucucgaaugauuga

SEQ ID NO: 1994519 - RNA, 19 nt, Artificial Sequence
  Description of Artificial Sequence: Synthetic oligonucleotide
  Antisense strand to SEQ ID NO: 1994518
ucaaucauucgagaccaau

SEQ ID NO: 1994520 - RNA, 19 nt, Artificial Sequence
  Description of Artificial Sequence: Synthetic oligonucleotide
  Sense strand starting at position 3692 of SEQ ID NO: 1880795
uuggucucgaaugauugaa

SEQ ID NO: 1994521 - RNA, 19 nt, Artificial Sequence
  Description of Artificial Sequence: Synthetic oligonucleotide
  Antisense strand to SEQ ID NO: 1994520
uucaaucauucgagaccaa

SEQ ID NO: 1994522 - RNA, 19 nt, Artificial Sequence
  Description of Artificial Sequence: Synthetic oligonucleotide
  Sense strand starting at position 3740 of SEQ ID NO: 1880795
uuggcauccugaguuagac

SEQ ID NO: 1994523 - RNA, 19 nt, Artificial Sequence
  Description of Artificial Sequence: Synthetic oligonucleotide
  Antisense strand to SEQ ID NO: 1994522
gucuaacucaggaugccaa

SEQ ID NO: 1994524 - RNA, 19 nt, Artificial Sequence
  Description of Artificial Sequence: Synthetic oligonucleotide
  Sense strand starting at position 3750 of SEQ ID NO: 1880795
gaguuagacucaggaauac

SEQ ID NO: 1994525 - RNA, 19 nt, Artificial Sequence
  Description of Artificial Sequence: Synthetic oligonucleotide
  Antisense strand to SEQ ID NO: 1994524
guauuccugagucuaacuc

SEQ ID NO: 1994526 - RNA, 19 nt, Artificial Sequence
  Description of Artificial Sequence: Synthetic oligonucleotide
  Sense strand starting at position 3800 of SEQ ID NO: 1880795
uugauauccuauuggauaa

SEQ ID NO: 1994527 - RNA, 19 nt, Artificial Sequence
  Description of Artificial Sequence: Synthetic oligonucleotide
  Antisense strand to SEQ ID NO: 1994526
uuauccaauaggauaucaa

SEQ ID NO: 1994528 - RNA, 19 nt, Artificial Sequence
  Description of Artificial Sequence: Synthetic oligonucleotide
  Sense strand starting at position 135 of SEQ ID NO: 1880796
gcagaaugaaaggguacau

SEQ ID NO: 1994529 - RNA, 19 nt, Artificial Sequence
  Description of Artificial Sequence: Synthetic oligonucleotide
  Antisense strand to SEQ ID NO: 1994528
auguacccuuucauucugc

SEQ ID NO: 1994530 - RNA, 19 nt, Artificial Sequence
  Description of Artificial Sequence: Synthetic oligonucleotide
  Sense strand starting at position 179 of SEQ ID NO: 1880796
guacccaguucuccuuuaa

SEQ ID NO: 1994531 - RNA, 19 nt, Artificial Sequence
  Description of Artificial Sequence: Synthetic oligonucleotide
  Antisense strand to SEQ ID NO: 1994530
uuaaaggagaacuggguac

SEQ ID NO: 1994532 - RNA, 19 nt, Artificial Sequence
  Description of Artificial Sequence: Synthetic oligonucleotide
  Sense strand starting at position 310 of SEQ ID NO: 1880796
ggccaagccuguuucuaag

SEQ ID NO: 1994533 - RNA, 19 nt, Artificial Sequence
  Description of Artificial Sequence: Synthetic oligonucleotide
  Antisense strand to SEQ ID NO: 1994532
cuuagaaacaggcuuggcc

SEQ ID NO: 1994534 - RNA, 19 nt, Artificial Sequence
  Description of Artificial Sequence: Synthetic oligonucleotide
  Sense strand starting at position 316 of SEQ ID NO: 1880796
gccuguuucuaaggcagga

SEQ ID NO: 1994535 - RNA, 19 nt, Artificial Sequence
  Description of Artificial Sequence: Synthetic oligonucleotide
  Antisense strand to SEQ ID NO: 1994534
uccugccuuagaaacaggc

SEQ ID NO: 1994536 - RNA, 19 nt, Artificial Sequence
  Description of Artificial Sequence: Synthetic oligonucleotide
  Sense strand starting at position 739 of SEQ ID NO: 1880796
cccaguccuuguucuaaag

SEQ ID NO: 1994537 - RNA, 19 nt, Artificial Sequence
  Description of Artificial Sequence: Synthetic oligonucleotide
  Antisense strand to SEQ ID NO: 1994536
cuuuagaacaaggacuggg

SEQ ID NO: 1994538 - RNA, 19 nt, Artificial Sequence
  Description of Artificial Sequence: Synthetic oligonucleotide
  Sense strand starting at position 741 of SEQ ID NO: 1880796
caguccuuguucuaaagag

SEQ ID NO: 1994539 - RNA, 19 nt, Artificial Sequence
  Description of Artificial Sequence: Synthetic oligonucleotide
  Antisense strand to SEQ ID NO: 1994538
cucuuuagaacaaggacug

SEQ ID NO: 1994540 - RNA, 19 nt, Artificial Sequence
  Description of Artificial Sequence: Synthetic oligonucleotide
  Sense strand starting at position 1982 of SEQ ID NO: 1880796
uuugcaauagucugccagu

SEQ ID NO: 1994541 - RNA, 19 nt, Artificial Sequence
  Description of Artificial Sequence: Synthetic oligonucleotide
  Antisense strand to SEQ ID NO: 1994540
acuggcagacuauugcaaa

SEQ ID NO: 1994542 - RNA, 19 nt, Artificial Sequence
  Description of Artificial Sequence: Synthetic oligonucleotide
  Sense strand starting at position 2306 of SEQ ID NO: 1880796
uuugacaucuggcaacauu

SEQ ID NO: 1994543 - RNA, 19 nt, Artificial Sequence
  Description of Artificial Sequence: Synthetic oligonucleotide
  Antisense strand to SEQ ID NO: 1994542
aauguugccagaugucaaa

SEQ ID NO: 1994544 - RNA, 19 nt, Artificial Sequence
  Description of Artificial Sequence: Synthetic oligonucleotide
  Sense strand starting at position 2650 of SEQ ID NO: 1880796
gggagugucuugcagaugu

SEQ ID NO: 1994545 - RNA, 19 nt, Artificial Sequence
  Description of Artificial Sequence: Synthetic oligonucleotide
  Antisense strand to SEQ ID NO: 1994544
acaucugcaagacacuccc

SEQ ID NO: 1994546 - RNA, 19 nt, Artificial Sequence
  Description of Artificial Sequence: Synthetic oligonucleotide
  Sense strand starting at position 2652 of SEQ ID NO: 1880796
gagugucuugcagauguau

SEQ ID NO: 1994547 - RNA, 19 nt, Artificial Sequence
  Description of Artificial Sequence: Synthetic oligonucleotide
  Antisense strand to SEQ ID NO: 1994546
auacaucugcaagacacuc

SEQ ID NO: 1994548 - RNA, 19 nt, Artificial Sequence
  Description of Artificial Sequence: Synthetic oligonucleotide
  Sense strand starting at position 2701 of SEQ ID NO: 1880796
cugaacaauucucuggcau

SEQ ID NO: 1994549 - RNA, 19 nt, Artificial Sequence
  Description of Artificial Sequence: Synthetic oligonucleotide
  Antisense strand to SEQ ID NO: 1994548
augccagagaauuguucag

SEQ ID NO: 1994550 - RNA, 19 nt, Artificial Sequence
  Description of Artificial Sequence: Synthetic oligonucleotide
  Sense strand starting at position 2702 of SEQ ID NO: 1880796
ugaacaauucucuggcauu

SEQ ID NO: 1994551 - RNA, 19 nt, Artificial Sequence
  Description of Artificial Sequence: Synthetic oligonucleotide
  Antisense strand to SEQ ID NO: 1994550
aaugccagagaauuguuca

SEQ ID NO: 1994552 - RNA, 19 nt, Artificial Sequence
  Description of Artificial Sequence: Synthetic oligonucleotide
  Sense strand starting at position 2705 of SEQ ID NO: 1880796
acaauucucuggcauuuga

SEQ ID NO: 1994553 - RNA, 19 nt, Artificial Sequence
  Description of Artificial Sequence: Synthetic oligonucleotide
  Antisense strand to SEQ ID NO: 1994552
ucaaaugccagagaauugu

SEQ ID NO: 1994554 - RNA, 19 nt, Artificial Sequence
  Description of Artificial Sequence: Synthetic oligonucleotide
  Sense strand starting at position 2948 of SEQ ID NO: 1880796
agacaaugaugcugcauau

SEQ ID NO: 1994555 - RNA, 19 nt, Artificial Sequence
  Description of Artificial Sequence: Synthetic oligonucleotide
  Antisense strand to SEQ ID NO: 1994554
auaugcagcaucauugucu

SEQ ID NO: 1994556 - RNA, 19 nt, Artificial Sequence
  Description of Artificial Sequence: Synthetic oligonucleotide
  Sense strand starting at position 2989 of SEQ ID NO: 1880796
cuccucaguugggauugau

SEQ ID NO: 1994557 - RNA, 19 nt, Artificial Sequence
  Description of Artificial Sequence: Synthetic oligonucleotide
  Antisense strand to SEQ ID NO: 1994556
aucaaucccaacugaggag

SEQ ID NO: 1994558 - RNA, 19 nt, Artificial Sequence
  Description of Artificial Sequence: Synthetic oligonucleotide
  Sense strand starting at position 2992 of SEQ ID NO: 1880796
cucaguugggauugaugaa

SEQ ID NO: 1994559 - RNA, 19 nt, Artificial Sequence
  Description of Artificial Sequence: Synthetic oligonucleotide
  Antisense strand to SEQ ID NO: 1994558
uucaucaaucccaacugag

SEQ ID NO: 1994560 - RNA, 19 nt, Artificial Sequence
  Description of Artificial Sequence: Synthetic oligonucleotide
  Sense strand starting at position 3304 of SEQ ID NO: 1880796
augggucuuccaugacaaa

SEQ ID NO: 1994561 - RNA, 19 nt, Artificial Sequence
  Description of Artificial Sequence: Synthetic oligonucleotide
  Antisense strand to SEQ ID NO: 1994560
uuugucauggaagacccau

SEQ ID NO: 1994562 - RNA, 19 nt, Artificial Sequence
  Description of Artificial Sequence: Synthetic oligonucleotide
  Sense strand starting at position 3674 of SEQ ID NO: 1880796
auuggucucgaaugauuga

SEQ ID NO: 1994563 - RNA, 19 nt, Artificial Sequence
  Description of Artificial Sequence: Synthetic oligonucleotide
  Antisense strand to SEQ ID NO: 1994562
ucaaucauucgagaccaau

SEQ ID NO: 1994564 - RNA, 19 nt, Artificial Sequence
  Description of Artificial Sequence: Synthetic oligonucleotide
  Sense strand starting at position 3675 of SEQ ID NO: 1880796
uuggucucgaaugauugaa

SEQ ID NO: 1994565 - RNA, 19 nt, Artificial Sequence
  Description of Artificial Sequence: Synthetic oligonucleotide
  Antisense strand to SEQ ID NO: 1994564
uucaaucauucgagaccaa

SEQ ID NO: 1994566 - RNA, 19 nt, Artificial Sequence
  Description of Artificial Sequence: Synthetic oligonucleotide
  Sense strand starting at position 3723 of SEQ ID NO: 1880796
uuggcauccugaguuagac

SEQ ID NO: 1994567 - RNA, 19 nt, Artificial Sequence
  Description of Artificial Sequence: Synthetic oligonucleotide
  Antisense strand to SEQ ID NO: 1994566
gucuaacucaggaugccaa

SEQ ID NO: 1994568 - RNA, 19 nt, Artificial Sequence
  Description of Artificial Sequence: Synthetic oligonucleotide
  Sense strand starting at position 3733 of SEQ ID NO: 1880796
gaguuagacucaggaauac

SEQ ID NO: 1994569 - RNA, 19 nt, Artificial Sequence
  Description of Artificial Sequence: Synthetic oligonucleotide
  Antisense strand to SEQ ID NO: 1994568
guauuccugagucuaacuc

SEQ ID NO: 1994570 - RNA, 19 nt, Artificial Sequence
  Description of Artificial Sequence: Synthetic oligonucleotide
  Sense strand starting at position 3783 of SEQ ID NO: 1880796
uugauauccuauuggauaa

SEQ ID NO: 1994571 - RNA, 19 nt, Artificial Sequence
  Description of Artificial Sequence: Synthetic oligonucleotide
  Antisense strand to SEQ ID NO: 1994570
uuauccaauaggauaucaa

SEQ ID NO: 1994572 - RNA, 19 nt, Artificial Sequence
  Description of Artificial Sequence: Synthetic oligonucleotide
  Sense strand starting at position 2008 of SEQ ID NO: 1880797
accuguugaauauguguua

SEQ ID NO: 1994573 - RNA, 19 nt, Artificial Sequence
  Description of Artificial Sequence: Synthetic oligonucleotide
  Antisense strand to SEQ ID NO: 1994572
uaacacauauucaacaggu

SEQ ID NO: 1994574 - RNA, 19 nt, Artificial Sequence
  Description of Artificial Sequence: Synthetic oligonucleotide
  Sense strand starting at position 2009 of SEQ ID NO: 1880797
ccuguugaauauguguuaa

SEQ ID NO: 1994575 - RNA, 19 nt, Artificial Sequence
  Description of Artificial Sequence: Synthetic oligonucleotide
  Antisense strand to SEQ ID NO: 1994574
uuaacacauauucaacagg

SEQ ID NO: 1994576 - RNA, 19 nt, Artificial Sequence
  Description of Artificial Sequence: Synthetic oligonucleotide
  Sense strand starting at position 2151 of SEQ ID NO: 1880797
ggcugucacccuuaagaaa

SEQ ID NO: 1994577 - RNA, 19 nt, Artificial Sequence
  Description of Artificial Sequence: Synthetic oligonucleotide
  Antisense strand to SEQ ID NO: 1994576
uuucuuaagggugacagcc

SEQ ID NO: 1994578 - RNA, 19 nt, Artificial Sequence
  Description of Artificial Sequence: Synthetic oligonucleotide
  Sense strand starting at position 2216 of SEQ ID NO: 1880797
aaguuaacguaucuggcaa

SEQ ID NO: 1994579 - RNA, 19 nt, Artificial Sequence
  Description of Artificial Sequence: Synthetic oligonucleotide
  Antisense strand to SEQ ID NO: 1994578
uugccagauacguuaacuu

SEQ ID NO: 1994580 - RNA, 19 nt, Artificial Sequence
  Description of Artificial Sequence: Synthetic oligonucleotide
  Sense strand starting at position 2217 of SEQ ID NO: 1880797
aguuaacguaucuggcaaa

SEQ ID NO: 1994581 - RNA, 19 nt, Artificial Sequence
  Description of Artificial Sequence: Synthetic oligonucleotide
  Antisense strand to SEQ ID NO: 1994580
uuugccagauacguuaacu

SEQ ID NO: 1994582 - RNA, 19 nt, Artificial Sequence
  Description of Artificial Sequence: Synthetic oligonucleotide
  Sense strand starting at position 2295 of SEQ ID NO: 1880797
cagccaaggucccuuugaa

SEQ ID NO: 1994583 - RNA, 19 nt, Artificial Sequence
  Description of Artificial Sequence: Synthetic oligonucleotide
  Antisense strand to SEQ ID NO: 1994582
uucaaagggaccuuggcug

SEQ ID NO: 1994584 - RNA, 19 nt, Artificial Sequence
  Description of Artificial Sequence: Synthetic oligonucleotide
  Sense strand starting at position 2319 of SEQ ID NO: 1880797
ccaguuguuccugacuaug

SEQ ID NO: 1994585 - RNA, 19 nt, Artificial Sequence
  Description of Artificial Sequence: Synthetic oligonucleotide
  Antisense strand to SEQ ID NO: 1994584
cauagucaggaacaacugg

SEQ ID NO: 1994586 - RNA, 19 nt, Artificial Sequence
  Description of Artificial Sequence: Synthetic oligonucleotide
  Sense strand starting at position 2330 of SEQ ID NO: 1880797
ugacuaugcugggaaagga

SEQ ID NO: 1994587 - RNA, 19 nt, Artificial Sequence
  Description of Artificial Sequence: Synthetic oligonucleotide
  Antisense strand to SEQ ID NO: 1994586
uccuuucccagcauaguca

SEQ ID NO: 1994588 - RNA, 19 nt, Artificial Sequence
  Description of Artificial Sequence: Synthetic oligonucleotide
  Sense strand starting at position 2340 of SEQ ID NO: 1880797
gggaaaggaucuggguaag

SEQ ID NO: 1994589 - RNA, 19 nt, Artificial Sequence
  Description of Artificial Sequence: Synthetic oligonucleotide
  Antisense strand to SEQ ID NO: 1994588
cuuacccagauccuuuccc

SEQ ID NO: 1994590 - RNA, 19 nt, Artificial Sequence
  Description of Artificial Sequence: Synthetic oligonucleotide
  Sense strand starting at position 2703 of SEQ ID NO: 1880797
ucauaaagucagugcaaua

SEQ ID NO: 1994591 - RNA, 19 nt, Artificial Sequence
  Description of Artificial Sequence: Synthetic oligonucleotide
  Antisense strand to SEQ ID NO: 1994590
uauugcacugacuuuauga

SEQ ID NO: 1994592 - RNA, 19 nt, Artificial Sequence
  Description of Artificial Sequence: Synthetic oligonucleotide
  Sense strand starting at position 2708 of SEQ ID NO: 1880797
aagucagugcaauagguaa

SEQ ID NO: 1994593 - RNA, 19 nt, Artificial Sequence
  Description of Artificial Sequence: Synthetic oligonucleotide
  Antisense strand to SEQ ID NO: 1994592
uuaccuauugcacugacuu

SEQ ID NO: 1994594 - RNA, 19 nt, Artificial Sequence
  Description of Artificial Sequence: Synthetic oligonucleotide
  Sense strand starting at position 2943 of SEQ ID NO: 1880797
ugcuuugaauuugcuguua

SEQ ID NO: 1994595 - RNA, 19 nt, Artificial Sequence
  Description of Artificial Sequence: Synthetic oligonucleotide
  Antisense strand to SEQ ID NO: 1994594
uaacagcaaauucaaagca

SEQ ID NO: 1994596 - RNA, 19 nt, Artificial Sequence
  Description of Artificial Sequence: Synthetic oligonucleotide
  Sense strand starting at position 2945 of SEQ ID NO: 1880797
cuuugaauuugcuguuauu

SEQ ID NO: 1994597 - RNA, 19 nt, Artificial Sequence
  Description of Artificial Sequence: Synthetic oligonucleotide
  Antisense strand to SEQ ID NO: 1994596
aauaacagcaaauucaaag

SEQ ID NO: 1994598 - RNA, 19 nt, Artificial Sequence
  Description of Artificial Sequence: Synthetic oligonucleotide
  Sense strand starting at position 2948 of SEQ ID NO: 1880797
ugaauuugcuguuauuaag

SEQ ID NO: 1994599 - RNA, 19 nt, Artificial Sequence
  Description of Artificial Sequence: Synthetic oligonucleotide
  Antisense strand to SEQ ID NO: 1994598
cuuaauaacagcaaauuca

SEQ ID NO: 1994600 - RNA, 19 nt, Artificial Sequence
  Description of Artificial Sequence: Synthetic oligonucleotide
  Sense strand starting at position 2951 of SEQ ID NO: 1880797
auuugcuguuauuaagcua

SEQ ID NO: 1994601 - RNA, 19 nt, Artificial Sequence
  Description of Artificial Sequence: Synthetic oligonucleotide
  Antisense strand to SEQ ID NO: 1994600
uagcuuaauaacagcaaau

SEQ ID NO: 1994602 - RNA, 19 nt, Artificial Sequence
  Description of Artificial Sequence: Synthetic oligonucleotide
  Sense strand starting at position 2987 of SEQ ID NO: 1880797
cucauuguuuaugauacua

SEQ ID NO: 1994603 - RNA, 19 nt, Artificial Sequence
  Description of Artificial Sequence: Synthetic oligonucleotide
  Antisense strand to SEQ ID NO: 1994602
uaguaucauaaacaaugag

SEQ ID NO: 1994604 - RNA, 19 nt, Artificial Sequence
  Description of Artificial Sequence: Synthetic oligonucleotide
  Sense strand starting at position 3150 of SEQ ID NO: 1880797
ccaagacuuugguccauag

SEQ ID NO: 1994605 - RNA, 19 nt, Artificial Sequence
  Description of Artificial Sequence: Synthetic oligonucleotide
  Antisense strand to SEQ ID NO: 1994604
cuauggaccaaagucuugg

SEQ ID NO: 1994606 - RNA, 19 nt, Artificial Sequence
  Description of Artificial Sequence: Synthetic oligonucleotide
  Sense strand starting at position 3154 of SEQ ID NO: 1880797
gacuuugguccauagccuu

SEQ ID NO: 1994607 - RNA, 19 nt, Artificial Sequence
  Description of Artificial Sequence: Synthetic oligonucleotide
  Antisense strand to SEQ ID NO: 1994606
aaggcuauggaccaaaguc

SEQ ID NO: 1994608 - RNA, 19 nt, Artificial Sequence
  Description of Artificial Sequence: Synthetic oligonucleotide
  Sense strand starting at position 3176 of SEQ ID NO: 1880797
uggauuaccuacugggaca

SEQ ID NO: 1994609 - RNA, 19 nt, Artificial Sequence
  Description of Artificial Sequence: Synthetic oligonucleotide
  Antisense strand to SEQ ID NO: 1994608
ugucccaguagguaaucca

SEQ ID NO: 1994610 - RNA, 19 nt, Artificial Sequence
  Description of Artificial Sequence: Synthetic oligonucleotide
  Sense strand starting at position 3265 of SEQ ID NO: 1880797
aguggugagucuguauuac

SEQ ID NO: 1994611 - RNA, 19 nt, Artificial Sequence
  Description of Artificial Sequence: Synthetic oligonucleotide
  Antisense strand to SEQ ID NO: 1994610
guaauacagacucaccacu

SEQ ID NO: 1994612 - RNA, 19 nt, Artificial Sequence
  Description of Artificial Sequence: Synthetic oligonucleotide
  Sense strand starting at position 3313 of SEQ ID NO: 1880797
gcuguaagaucuuugugug

SEQ ID NO: 1994613 - RNA, 19 nt, Artificial Sequence
  Description of Artificial Sequence: Synthetic oligonucleotide
  Antisense strand to SEQ ID NO: 1994612
cacacaaagaucuuacagc

SEQ ID NO: 1994614 - RNA, 19 nt, Artificial Sequence
  Description of Artificial Sequence: Synthetic oligonucleotide
  Sense strand starting at position 3314 of SEQ ID NO: 1880797
cuguaagaucuuugugugu

SEQ ID NO: 1994615 - RNA, 19 nt, Artificial Sequence
  Description of Artificial Sequence: Synthetic oligonucleotide
  Antisense strand to SEQ ID NO: 1994614
acacacaaagaucuuacag

SEQ ID NO: 1994616 - RNA, 19 nt, Artificial Sequence
  Description of Artificial Sequence: Synthetic oligonucleotide
  Sense strand starting at position 3318 of SEQ ID NO: 1880797
aagaucuuuguguguaugu

SEQ ID NO: 1994617 - RNA, 19 nt, Artificial Sequence
  Description of Artificial Sequence: Synthetic oligonucleotide
  Antisense strand to SEQ ID NO: 1994616
acauacacacaaagaucuu

SEQ ID NO: 1994618 - RNA, 19 nt, Artificial Sequence
  Description of Artificial Sequence: Synthetic oligonucleotide
  Sense strand starting at position 3327 of SEQ ID NO: 1880797
guguguauguguuuaaaug

SEQ ID NO: 1994619 - RNA, 19 nt, Artificial Sequence
  Description of Artificial Sequence: Synthetic oligonucleotide
  Antisense strand to SEQ ID NO: 1994618
cauuuaaacacauacacac

SEQ ID NO: 1994620 - RNA, 19 nt, Artificial Sequence
  Description of Artificial Sequence: Synthetic oligonucleotide
  Sense strand starting at position 3328 of SEQ ID NO: 1880797
uguguauguguuuaaaugu

SEQ ID NO: 1994621 - RNA, 19 nt, Artificial Sequence
  Description of Artificial Sequence: Synthetic oligonucleotide
  Antisense strand to SEQ ID NO: 1994620
acauuuaaacacauacaca

SEQ ID NO: 1994622 - RNA, 19 nt, Artificial Sequence
  Description of Artificial Sequence: Synthetic oligonucleotide
  Sense strand starting at position 3361 of SEQ ID NO: 1880797
guauuauguuguguuguau

SEQ ID NO: 1994623 - RNA, 19 nt, Artificial Sequence
  Description of Artificial Sequence: Synthetic oligonucleotide
  Antisense strand to SEQ ID NO: 1994622
auacaacacaacauaauac

SEQ ID NO: 1994624 - RNA, 19 nt, Artificial Sequence
  Description of Artificial Sequence: Synthetic oligonucleotide
  Sense strand starting at position 3367 of SEQ ID NO: 1880797
uguuguguuguaucuagca

SEQ ID NO: 1994625 - RNA, 19 nt, Artificial Sequence
  Description of Artificial Sequence: Synthetic oligonucleotide
  Antisense strand to SEQ ID NO: 1994624
ugcuagauacaacacaaca

SEQ ID NO: 1994626 - RNA, 19 nt, Artificial Sequence
  Description of Artificial Sequence: Synthetic oligonucleotide
  Sense strand starting at position 3369 of SEQ ID NO: 1880797
uuguguuguaucuagcaug

SEQ ID NO: 1994627 - RNA, 19 nt, Artificial Sequence
  Description of Artificial Sequence: Synthetic oligonucleotide
  Antisense strand to SEQ ID NO: 1994626
caugcuagauacaacacaa

SEQ ID NO: 1994628 - RNA, 19 nt, Artificial Sequence
  Description of Artificial Sequence: Synthetic oligonucleotide
  Sense strand starting at position 3388 of SEQ ID NO: 1880797
guaccaaacugguuuauaa

SEQ ID NO: 1994629 - RNA, 19 nt, Artificial Sequence
  Description of Artificial Sequence: Synthetic oligonucleotide
  Antisense strand to SEQ ID NO: 1994628
uuauaaaccaguuugguac

SEQ ID NO: 1994630 - RNA, 19 nt, Artificial Sequence
  Description of Artificial Sequence: Synthetic oligonucleotide
  Sense strand starting at position 3390 of SEQ ID NO: 1880797
accaaacugguuuauaagu

SEQ ID NO: 1994631 - RNA, 19 nt, Artificial Sequence
  Description of Artificial Sequence: Synthetic oligonucleotide
  Antisense strand to SEQ ID NO: 1994630
acuuauaaaccaguuuggu

SEQ ID NO: 1994632 - RNA, 19 nt, Artificial Sequence
  Description of Artificial Sequence: Synthetic oligonucleotide
  Sense strand starting at position 3454 of SEQ ID NO: 1880797
augugaacuuaguaaucug

SEQ ID NO: 1994633 - RNA, 19 nt, Artificial Sequence
  Description of Artificial Sequence: Synthetic oligonucleotide
  Antisense strand to SEQ ID NO: 1994632
cagauuacuaaguucacau

SEQ ID NO: 1994634 - RNA, 19 nt, Artificial Sequence
  Description of Artificial Sequence: Synthetic oligonucleotide
  Sense strand starting at position 3457 of SEQ ID NO: 1880797
ugaacuuaguaaucuggua

SEQ ID NO: 1994635 - RNA, 19 nt, Artificial Sequence
  Description of Artificial Sequence: Synthetic oligonucleotide
  Antisense strand to SEQ ID NO: 1994634
uaccagauuacuaaguuca

SEQ ID NO: 1994636 - RNA, 19 nt, Artificial Sequence
  Description of Artificial Sequence: Synthetic oligonucleotide
  Sense strand starting at position 3651 of SEQ ID NO: 1880797
agagaaugaucuuugugug

SEQ ID NO: 1994637 - RNA, 19 nt, Artificial Sequence
  Description of Artificial Sequence: Synthetic oligonucleotide
  Antisense strand to SEQ ID NO: 1994636
cacacaaagaucauucucu

SEQ ID NO: 1994638 - RNA, 19 nt, Artificial Sequence
  Description of Artificial Sequence: Synthetic oligonucleotide
  Sense strand starting at position 3652 of SEQ ID NO: 1880797
gagaaugaucuuuguguga

SEQ ID NO: 1994639 - RNA, 19 nt, Artificial Sequence
  Description of Artificial Sequence: Synthetic oligonucleotide
  Antisense strand to SEQ ID NO: 1994638
ucacacaaagaucauucuc

SEQ ID NO: 1994640 - RNA, 19 nt, Artificial Sequence
  Description of Artificial Sequence: Synthetic oligonucleotide
  Sense strand starting at position 3744 of SEQ ID NO: 1880797
gcuucugaguuguuggcaa

SEQ ID NO: 1994641 - RNA, 19 nt, Artificial Sequence
  Description of Artificial Sequence: Synthetic oligonucleotide
  Antisense strand to SEQ ID NO: 1994640
uugccaacaacucagaagc

SEQ ID NO: 1994642 - RNA, 19 nt, Artificial Sequence
  Description of Artificial Sequence: Synthetic oligonucleotide
  Sense strand starting at position 3855 of SEQ ID NO: 1880797
gcugaugacucgucacaua

SEQ ID NO: 1994643 - RNA, 19 nt, Artificial Sequence
  Description of Artificial Sequence: Synthetic oligonucleotide
  Antisense strand to SEQ ID NO: 1994642
uaugugacgagucaucagc

SEQ ID NO: 1994644 - RNA, 19 nt, Artificial Sequence
  Description of Artificial Sequence: Synthetic oligonucleotide
  Sense strand starting at position 3858 of SEQ ID NO: 1880797
gaugacucgucacauagaa

SEQ ID NO: 1994645 - RNA, 19 nt, Artificial Sequence
  Description of Artificial Sequence: Synthetic oligonucleotide
  Antisense strand to SEQ ID NO: 1994644
uucuaugugacgagucauc

SEQ ID NO: 1994646 - RNA, 19 nt, Artificial Sequence
  Description of Artificial Sequence: Synthetic oligonucleotide
  Sense strand starting at position 3881 of SEQ ID NO: 1880797
cagguaagucacuguugua

SEQ ID NO: 1994647 - RNA, 19 nt, Artificial Sequence
  Description of Artificial Sequence: Synthetic oligonucleotide
  Antisense strand to SEQ ID NO: 1994646
uacaacagugacuuaccug

SEQ ID NO: 1994648 - RNA, 19 nt, Artificial Sequence
  Description of Artificial Sequence: Synthetic oligonucleotide
  Sense strand starting at position 3967 of SEQ ID NO: 1880797
auccucaucuggccuagaa

SEQ ID NO: 1994649 - RNA, 19 nt, Artificial Sequence
  Description of Artificial Sequence: Synthetic oligonucleotide
  Antisense strand to SEQ ID NO: 1994648
uucuaggccagaugaggau

SEQ ID NO: 1994650 - RNA, 19 nt, Artificial Sequence
  Description of Artificial Sequence: Synthetic oligonucleotide
  Sense strand starting at position 3969 of SEQ ID NO: 1880797
ccucaucuggccuagaaug

SEQ ID NO: 1994651 - RNA, 19 nt, Artificial Sequence
  Description of Artificial Sequence: Synthetic oligonucleotide
  Antisense strand to SEQ ID NO: 1994650
cauucuaggccagaugagg

SEQ ID NO: 1994652 - RNA, 19 nt, Artificial Sequence
  Description of Artificial Sequence: Synthetic oligonucleotide
  Sense strand starting at position 27 of SEQ ID NO: 1880798
cuaugcuguuuauuaggga

SEQ ID NO: 1994653 - RNA, 19 nt, Artificial Sequence
  Description of Artificial Sequence: Synthetic oligonucleotide
  Antisense strand to SEQ ID NO: 1994652
ucccuaauaaacagcauag

SEQ ID NO: 1994654 - RNA, 19 nt, Artificial Sequence
  Description of Artificial Sequence: Synthetic oligonucleotide
  Sense strand starting at position 63 of SEQ ID NO: 1880798
ugauuccuguccucaggga

SEQ ID NO: 1994655 - RNA, 19 nt, Artificial Sequence
  Description of Artificial Sequence: Synthetic oligonucleotide
  Antisense strand to SEQ ID NO: 1994654
ucccugaggacaggaauca

SEQ ID NO: 1994656 - RNA, 19 nt, Artificial Sequence
  Description of Artificial Sequence: Synthetic oligonucleotide
  Sense strand starting at position 78 of SEQ ID NO: 1880798
gggagaucaguacgaauag

SEQ ID NO: 1994657 - RNA, 19 nt, Artificial Sequence
  Description of Artificial Sequence: Synthetic oligonucleotide
  Antisense strand to SEQ ID NO: 1994656
cuauucguacugaucuccc

SEQ ID NO: 1994658 - RNA, 19 nt, Artificial Sequence
  Description of Artificial Sequence: Synthetic oligonucleotide
  Sense strand starting at position 95 of SEQ ID NO: 1880798
agggaagagucgaguaaag

SEQ ID NO: 1994659 - RNA, 19 nt, Artificial Sequence
  Description of Artificial Sequence: Synthetic oligonucleotide
  Antisense strand to SEQ ID NO: 1994658
cuuuacucgacucuucccu

SEQ ID NO: 1994660 - RNA, 19 nt, Artificial Sequence
  Description of Artificial Sequence: Synthetic oligonucleotide
  Sense strand starting at position 413 of SEQ ID NO: 1880798
guccuaauuccucauguga

SEQ ID NO: 1994661 - RNA, 19 nt, Artificial Sequence
  Description of Artificial Sequence: Synthetic oligonucleotide
  Antisense strand to SEQ ID NO: 1994660
ucacaugaggaauuaggac

SEQ ID NO: 1994662 - RNA, 19 nt, Artificial Sequence
  Description of Artificial Sequence: Synthetic oligonucleotide
  Sense strand starting at position 427 of SEQ ID NO: 1880798
ugugacuucggacaaguca

SEQ ID NO: 1994663 - RNA, 19 nt, Artificial Sequence
  Description of Artificial Sequence: Synthetic oligonucleotide
  Antisense strand to SEQ ID NO: 1994662
ugacuuguccgaagucaca

SEQ ID NO: 1994664 - RNA, 19 nt, Artificial Sequence
  Description of Artificial Sequence: Synthetic oligonucleotide
  Sense strand starting at position 576 of SEQ ID NO: 1880798
gaccaugagucaguauuau

SEQ ID NO: 1994665 - RNA, 19 nt, Artificial Sequence
  Description of Artificial Sequence: Synthetic oligonucleotide
  Antisense strand to SEQ ID NO: 1994664
auaauacugacucaugguc

SEQ ID NO: 1994666 - RNA, 19 nt, Artificial Sequence
  Description of Artificial Sequence: Synthetic oligonucleotide
  Sense strand starting at position 670 of SEQ ID NO: 1880798
cggucuacauuugagauuu

SEQ ID NO: 1994667 - RNA, 19 nt, Artificial Sequence
  Description of Artificial Sequence: Synthetic oligonucleotide
  Antisense strand to SEQ ID NO: 1994666
aaaucucaaauguagaccg

SEQ ID NO: 1994668 - RNA, 19 nt, Artificial Sequence
  Description of Artificial Sequence: Synthetic oligonucleotide
  Sense strand starting at position 937 of SEQ ID NO: 1880798
gcaaguucccuggagcaga

SEQ ID NO: 1994669 - RNA, 19 nt, Artificial Sequence
  Description of Artificial Sequence: Synthetic oligonucleotide
  Antisense strand to SEQ ID NO: 1994668
ucugcuccagggaacuugc

SEQ ID NO: 1994670 - RNA, 19 nt, Artificial Sequence
  Description of Artificial Sequence: Synthetic oligonucleotide
  Sense strand starting at position 1019 of SEQ ID NO: 1880798
ggcagucagacauguggga

SEQ ID NO: 1994671 - RNA, 19 nt, Artificial Sequence
  Description of Artificial Sequence: Synthetic oligonucleotide
  Antisense strand to SEQ ID NO: 1994670
ucccacaugucugacugcc

SEQ ID NO: 1994672 - RNA, 19 nt, Artificial Sequence
  Description of Artificial Sequence: Synthetic oligonucleotide
  Sense strand starting at position 1021 of SEQ ID NO: 1880798
cagucagacaugugggaca

SEQ ID NO: 1994673 - RNA, 19 nt, Artificial Sequence
  Description of Artificial Sequence: Synthetic oligonucleotide
  Antisense strand to SEQ ID NO: 1994672
ugucccacaugucugacug

SEQ ID NO: 1994674 - RNA, 19 nt, Artificial Sequence
  Description of Artificial Sequence: Synthetic oligonucleotide
  Sense strand starting at position 1367 of SEQ ID NO: 1880798
ggcagcucuagaggagaau

SEQ ID NO: 1994675 - RNA, 19 nt, Artificial Sequence
  Description of Artificial Sequence: Synthetic oligonucleotide
  Antisense strand to SEQ ID NO: 1994674
auucuccucuagagcugcc

SEQ ID NO: 1994676 - RNA, 19 nt, Artificial Sequence
  Description of Artificial Sequence: Synthetic oligonucleotide
  Sense strand starting at position 1418 of SEQ ID NO: 1880798
uagggucguccggacuaaa

SEQ ID NO: 1994677 - RNA, 19 nt, Artificial Sequence
  Description of Artificial Sequence: Synthetic oligonucleotide
  Antisense strand to SEQ ID NO: 1994676
uuuaguccggacgacccua

SEQ ID NO: 1994678 - RNA, 19 nt, Artificial Sequence
  Description of Artificial Sequence: Synthetic oligonucleotide
  Sense strand starting at position 2013 of SEQ ID NO: 1880798
gagcccgugcugcuauaaa

SEQ ID NO: 1994679 - RNA, 19 nt, Artificial Sequence
  Description of Artificial Sequence: Synthetic oligonucleotide
  Antisense strand to SEQ ID NO: 1994678
uuuauagcagcacgggcuc

SEQ ID NO: 1994680 - RNA, 19 nt, Artificial Sequence
  Description of Artificial Sequence: Synthetic oligonucleotide
  Sense strand starting at position 2058 of SEQ ID NO: 1880798
gggauaaucuuccuugcag

SEQ ID NO: 1994681 - RNA, 19 nt, Artificial Sequence
  Description of Artificial Sequence: Synthetic oligonucleotide
  Antisense strand to SEQ ID NO: 1994680
cugcaaggaagauuauccc

SEQ ID NO: 1994682 - RNA, 19 nt, Artificial Sequence
  Description of Artificial Sequence: Synthetic oligonucleotide
  Sense strand starting at position 2059 of SEQ ID NO: 1880798
ggauaaucuuccuugcaga

SEQ ID NO: 1994683 - RNA, 19 nt, Artificial Sequence
  Description of Artificial Sequence: Synthetic oligonucleotide
  Antisense strand to SEQ ID NO: 1994682
ucugcaaggaagauuaucc

SEQ ID NO: 1994684 - RNA, 19 nt, Artificial Sequence
  Description of Artificial Sequence: Synthetic oligonucleotide
  Sense strand starting at position 2064 of SEQ ID NO: 1880798
aucuuccuugcagaggaau

SEQ ID NO: 1994685 - RNA, 19 nt, Artificial Sequence
  Description of Artificial Sequence: Synthetic oligonucleotide
  Antisense strand to SEQ ID NO: 1994684
auuccucugcaaggaagau

SEQ ID NO: 1994686 - RNA, 19 nt, Artificial Sequence
  Description of Artificial Sequence: Synthetic oligonucleotide
  Sense strand starting at position 2156 of SEQ ID NO: 1880798
cgaccuuuccaagaguaca

SEQ ID NO: 1994687 - RNA, 19 nt, Artificial Sequence
  Description of Artificial Sequence: Synthetic oligonucleotide
  Antisense strand to SEQ ID NO: 1994686
uguacucuuggaaaggucg

SEQ ID NO: 1994688 - RNA, 19 nt, Artificial Sequence
  Description of Artificial Sequence: Synthetic oligonucleotide
  Sense strand starting at position 2164 of SEQ ID NO: 1880798
ccaagaguacaguguggaa

SEQ ID NO: 1994689 - RNA, 19 nt, Artificial Sequence
  Description of Artificial Sequence: Synthetic oligonucleotide
  Antisense strand to SEQ ID NO: 1994688
uuccacacuguacucuugg

SEQ ID NO: 1994690 - RNA, 19 nt, Artificial Sequence
  Description of Artificial Sequence: Synthetic oligonucleotide
  Sense strand starting at position 2193 of SEQ ID NO: 1880798
agagccacuccacgugaaa

SEQ ID NO: 1994691 - RNA, 19 nt, Artificial Sequence
  Description of Artificial Sequence: Synthetic oligonucleotide
  Antisense strand to SEQ ID NO: 1994690
uuucacguggaguggcucu

SEQ ID NO: 1994692 - RNA, 19 nt, Artificial Sequence
  Description of Artificial Sequence: Synthetic oligonucleotide
  Sense strand starting at position 2266 of SEQ ID NO: 1880798
gugaccucagucuaacuga

SEQ ID NO: 1994693 - RNA, 19 nt, Artificial Sequence
  Description of Artificial Sequence: Synthetic oligonucleotide
  Antisense strand to SEQ ID NO: 1994692
ucaguuagacugaggucac

SEQ ID NO: 1994694 - RNA, 19 nt, Artificial Sequence
  Description of Artificial Sequence: Synthetic oligonucleotide
  Sense strand starting at position 2297 of SEQ ID NO: 1880798
agacaaaucucguuugugg

SEQ ID NO: 1994695 - RNA, 19 nt, Artificial Sequence
  Description of Artificial Sequence: Synthetic oligonucleotide
  Antisense strand to SEQ ID NO: 1994694
ccacaaacgagauuugucu

SEQ ID NO: 1994696 - RNA, 19 nt, Artificial Sequence
  Description of Artificial Sequence: Synthetic oligonucleotide
  Sense strand starting at position 2412 of SEQ ID NO: 1880798
guagcuaggcuauaaacuu

SEQ ID NO: 1994697 - RNA, 19 nt, Artificial Sequence
  Description of Artificial Sequence: Synthetic oligonucleotide
  Antisense strand to SEQ ID NO: 1994696
aaguuuauagccuagcuac

SEQ ID NO: 1994698 - RNA, 19 nt, Artificial Sequence
  Description of Artificial Sequence: Synthetic oligonucleotide
  Sense strand starting at position 2516 of SEQ ID NO: 1880798
uugugugaaggguauacua

SEQ ID NO: 1994699 - RNA, 19 nt, Artificial Sequence
  Description of Artificial Sequence: Synthetic oligonucleotide
  Antisense strand to SEQ ID NO: 1994698
uaguauacccuucacacaa

SEQ ID NO: 1994700 - RNA, 19 nt, Artificial Sequence
  Description of Artificial Sequence: Synthetic oligonucleotide
  Sense strand starting at position 2524 of SEQ ID NO: 1880798
aggguauacuagcuuuaua

SEQ ID NO: 1994701 - RNA, 19 nt, Artificial Sequence
  Description of Artificial Sequence: Synthetic oligonucleotide
  Antisense strand to SEQ ID NO: 1994700
uauaaagcuaguauacccu

SEQ ID NO: 1994702 - RNA, 19 nt, Artificial Sequence
  Description of Artificial Sequence: Synthetic oligonucleotide
  Sense strand starting at position 2610 of SEQ ID NO: 1880798
auaaauguuagccagguga

SEQ ID NO: 1994703 - RNA, 19 nt, Artificial Sequence
  Description of Artificial Sequence: Synthetic oligonucleotide
  Antisense strand to SEQ ID NO: 1994702
ucaccuggcuaacauuuau

SEQ ID NO: 1994704 - RNA, 19 nt, Artificial Sequence
  Description of Artificial Sequence: Synthetic oligonucleotide
  Sense strand starting at position 2612 of SEQ ID NO: 1880798
aaauguuagccaggugaga

SEQ ID NO: 1994705 - RNA, 19 nt, Artificial Sequence
  Description of Artificial Sequence: Synthetic oligonucleotide
  Antisense strand to SEQ ID NO: 1994704
ucucaccuggcuaacauuu

SEQ ID NO: 1994706 - RNA, 19 nt, Artificial Sequence
  Description of Artificial Sequence: Synthetic oligonucleotide
  Sense strand starting at position 2614 of SEQ ID NO: 1880798
auguuagccaggugagaug

SEQ ID NO: 1994707 - RNA, 19 nt, Artificial Sequence
  Description of Artificial Sequence: Synthetic oligonucleotide
  Antisense strand to SEQ ID NO: 1994706
caucucaccuggcuaacau

SEQ ID NO: 1994708 - RNA, 19 nt, Artificial Sequence
  Description of Artificial Sequence: Synthetic oligonucleotide
  Sense strand starting at position 2689 of SEQ ID NO: 1880798
ccagaaguuugaccugcaa

SEQ ID NO: 1994709 - RNA, 19 nt, Artificial Sequence
  Description of Artificial Sequence: Synthetic oligonucleotide
  Antisense strand to SEQ ID NO: 1994708
uugcaggucaaacuucugg

SEQ ID NO: 1994710 - RNA, 19 nt, Artificial Sequence
  Description of Artificial Sequence: Synthetic oligonucleotide
  Sense strand starting at position 3339 of SEQ ID NO: 1880798
uuggaagagcccuauuauu

SEQ ID NO: 1994711 - RNA, 19 nt, Artificial Sequence
  Description of Artificial Sequence: Synthetic oligonucleotide
  Antisense strand to SEQ ID NO: 1994710
aauaauagggcucuuccaa

SEQ ID NO: 1994712 - RNA, 19 nt, Artificial Sequence
  Description of Artificial Sequence: Synthetic oligonucleotide
  Sense strand starting at position 3555 of SEQ ID NO: 1880798
cuggaugagcucggguaaa

SEQ ID NO: 1994713 - RNA, 19 nt, Artificial Sequence
  Description of Artificial Sequence: Synthetic oligonucleotide
  Antisense strand to SEQ ID NO: 1994712
uuuacccgagcucauccag

SEQ ID NO: 1994714 - RNA, 19 nt, Artificial Sequence
  Description of Artificial Sequence: Synthetic oligonucleotide
  Sense strand starting at position 3567 of SEQ ID NO: 1880798
ggguaaauugccugacauc

SEQ ID NO: 1994715 - RNA, 19 nt, Artificial Sequence
  Description of Artificial Sequence: Synthetic oligonucleotide
  Antisense strand to SEQ ID NO: 1994714
gaugucaggcaauuuaccc

SEQ ID NO: 1994716 - RNA, 19 nt, Artificial Sequence
  Description of Artificial Sequence: Synthetic oligonucleotide
  Sense strand starting at position 3576 of SEQ ID NO: 1880798
gccugacaucaacaagcuu

SEQ ID NO: 1994717 - RNA, 19 nt, Artificial Sequence
  Description of Artificial Sequence: Synthetic oligonucleotide
  Antisense strand to SEQ ID NO: 1994716
aagcuuguugaugucaggc

SEQ ID NO: 1994718 - RNA, 19 nt, Artificial Sequence
  Description of Artificial Sequence: Synthetic oligonucleotide
  Sense strand starting at position 3642 of SEQ ID NO: 1880798
gucagucuuagggaccuuu

SEQ ID NO: 1994719 - RNA, 19 nt, Artificial Sequence
  Description of Artificial Sequence: Synthetic oligonucleotide
  Antisense strand to SEQ ID NO: 1994718
aaaggucccuaagacugac

SEQ ID NO: 1994720 - RNA, 19 nt, Artificial Sequence
  Description of Artificial Sequence: Synthetic oligonucleotide
  Sense strand starting at position 3652 of SEQ ID NO: 1880798
gggaccuuucagggucuga

SEQ ID NO: 1994721 - RNA, 19 nt, Artificial Sequence
  Description of Artificial Sequence: Synthetic oligonucleotide
  Antisense strand to SEQ ID NO: 1994720
ucagacccugaaagguccc

SEQ ID NO: 1994722 - RNA, 19 nt, Artificial Sequence
  Description of Artificial Sequence: Synthetic oligonucleotide
  Sense strand starting at position 3662 of SEQ ID NO: 1880798
agggucugaguuuggagua

SEQ ID NO: 1994723 - RNA, 19 nt, Artificial Sequence
  Description of Artificial Sequence: Synthetic oligonucleotide
  Antisense strand to SEQ ID NO: 1994722
uacuccaaacucagacccu

SEQ ID NO: 1994724 - RNA, 19 nt, Artificial Sequence
  Description of Artificial Sequence: Synthetic oligonucleotide
  Sense strand starting at position 3696 of SEQ ID NO: 1880798
acacauucucucugaguga

SEQ ID NO: 1994725 - RNA, 19 nt, Artificial Sequence
  Description of Artificial Sequence: Synthetic oligonucleotide
  Antisense strand to SEQ ID NO: 1994724
ucacucagagagaaugugu

SEQ ID NO: 1994726 - RNA, 19 nt, Artificial Sequence
  Description of Artificial Sequence: Synthetic oligonucleotide
  Sense strand starting at position 3709 of SEQ ID NO: 1880798
gagugaugggacuguggau

SEQ ID NO: 1994727 - RNA, 19 nt, Artificial Sequence
  Description of Artificial Sequence: Synthetic oligonucleotide
  Antisense strand to SEQ ID NO: 1994726
auccacagucccaucacuc

SEQ ID NO: 1994728 - RNA, 19 nt, Artificial Sequence
  Description of Artificial Sequence: Synthetic oligonucleotide
  Sense strand starting at position 3715 of SEQ ID NO: 1880798
ugggacuguggaugacauu

SEQ ID NO: 1994729 - RNA, 19 nt, Artificial Sequence
  Description of Artificial Sequence: Synthetic oligonucleotide
  Antisense strand to SEQ ID NO: 1994728
aaugucauccacaguccca

SEQ ID NO: 1994730 - RNA, 19 nt, Artificial Sequence
  Description of Artificial Sequence: Synthetic oligonucleotide
  Sense strand starting at position 3918 of SEQ ID NO: 1880798
ugggacacuuucucuacaa

SEQ ID NO: 1994731 - RNA, 19 nt, Artificial Sequence
  Description of Artificial Sequence: Synthetic oligonucleotide
  Antisense strand to SEQ ID NO: 1994730
uuguagagaaaguguccca

SEQ ID NO: 1994732 - RNA, 19 nt, Artificial Sequence
  Description of Artificial Sequence: Synthetic oligonucleotide
  Sense strand starting at position 165 of SEQ ID NO: 1880799
uuacuaauggugugagaau

SEQ ID NO: 1994733 - RNA, 19 nt, Artificial Sequence
  Description of Artificial Sequence: Synthetic oligonucleotide
  Antisense strand to SEQ ID NO: 1994732
auucucacaccauuaguaa

SEQ ID NO: 1994734 - RNA, 19 nt, Artificial Sequence
  Description of Artificial Sequence: Synthetic oligonucleotide
  Sense strand starting at position 166 of SEQ ID NO: 1880799
uacuaauggugugagaauu

SEQ ID NO: 1994735 - RNA, 19 nt, Artificial Sequence
  Description of Artificial Sequence: Synthetic oligonucleotide
  Antisense strand to SEQ ID NO: 1994734
aauucucacaccauuagua

SEQ ID NO: 1994736 - RNA, 19 nt, Artificial Sequence
  Description of Artificial Sequence: Synthetic oligonucleotide
  Sense strand starting at position 214 of SEQ ID NO: 1880799
ugcauauuugcaugcguaa

SEQ ID NO: 1994737 - RNA, 19 nt, Artificial Sequence
  Description of Artificial Sequence: Synthetic oligonucleotide
  Antisense strand to SEQ ID NO: 1994736
uuacgcaugcaaauaugca

SEQ ID NO: 1994738 - RNA, 19 nt, Artificial Sequence
  Description of Artificial Sequence: Synthetic oligonucleotide
  Sense strand starting at position 357 of SEQ ID NO: 1880799
ggcuuuccgaaagagcuua

SEQ ID NO: 1994739 - RNA, 19 nt, Artificial Sequence
  Description of Artificial Sequence: Synthetic oligonucleotide
  Antisense strand to SEQ ID NO: 1994738
uaagcucuuucggaaagcc

SEQ ID NO: 1994740 - RNA, 19 nt, Artificial Sequence
  Description of Artificial Sequence: Synthetic oligonucleotide
  Sense strand starting at position 365 of SEQ ID NO: 1880799
gaaagagcuuaugagagaa

SEQ ID NO: 1994741 - RNA, 19 nt, Artificial Sequence
  Description of Artificial Sequence: Synthetic oligonucleotide
  Antisense strand to SEQ ID NO: 1994740
uucucucauaagcucuuuc

SEQ ID NO: 1994742 - RNA, 19 nt, Artificial Sequence
  Description of Artificial Sequence: Synthetic oligonucleotide
  Sense strand starting at position 423 of SEQ ID NO: 1880799
ggcagagaaguuuguucua

SEQ ID NO: 1994743 - RNA, 19 nt, Artificial Sequence
  Description of Artificial Sequence: Synthetic oligonucleotide
  Antisense strand to SEQ ID NO: 1994742
uagaacaaacuucucugcc

SEQ ID NO: 1994744 - RNA, 19 nt, Artificial Sequence
  Description of Artificial Sequence: Synthetic oligonucleotide
  Sense strand starting at position 709 of SEQ ID NO: 1880799
uagcaaaucguaugauucu

SEQ ID NO: 1994745 - RNA, 19 nt, Artificial Sequence
  Description of Artificial Sequence: Synthetic oligonucleotide
  Antisense strand to SEQ ID NO: 1994744
agaaucauacgauuugcua

SEQ ID NO: 1994746 - RNA, 19 nt, Artificial Sequence
  Description of Artificial Sequence: Synthetic oligonucleotide
  Sense strand starting at position 715 of SEQ ID NO: 1880799
aucguaugauucuguuugu

SEQ ID NO: 1994747 - RNA, 19 nt, Artificial Sequence
  Description of Artificial Sequence: Synthetic oligonucleotide
  Antisense strand to SEQ ID NO: 1994746
acaaacagaaucauacgau

SEQ ID NO: 1994748 - RNA, 19 nt, Artificial Sequence
  Description of Artificial Sequence: Synthetic oligonucleotide
  Sense strand starting at position 716 of SEQ ID NO: 1880799
ucguaugauucuguuugua

SEQ ID NO: 1994749 - RNA, 19 nt, Artificial Sequence
  Description of Artificial Sequence: Synthetic oligonucleotide
  Antisense strand to SEQ ID NO: 1994748
uacaaacagaaucauacga

SEQ ID NO: 1994750 - RNA, 19 nt, Artificial Sequence
  Description of Artificial Sequence: Synthetic oligonucleotide
  Sense strand starting at position 855 of SEQ ID NO: 1880799
uaaaguuuauucugauggu

SEQ ID NO: 1994751 - RNA, 19 nt, Artificial Sequence
  Description of Artificial Sequence: Synthetic oligonucleotide
  Antisense strand to SEQ ID NO: 1994750
accaucagaauaaacuuua

SEQ ID NO: 1994752 - RNA, 19 nt, Artificial Sequence
  Description of Artificial Sequence: Synthetic oligonucleotide
  Sense strand starting at position 884 of SEQ ID NO: 1880799
cucucaacguauugaaauc

SEQ ID NO: 1994753 - RNA, 19 nt, Artificial Sequence
  Description of Artificial Sequence: Synthetic oligonucleotide
  Antisense strand to SEQ ID NO: 1994752
gauuucaauacguugagag

SEQ ID NO: 1994754 - RNA, 19 nt, Artificial Sequence
  Description of Artificial Sequence: Synthetic oligonucleotide
  Sense strand starting at position 891 of SEQ ID NO: 1880799
cguauugaaauccauugga

SEQ ID NO: 1994755 - RNA, 19 nt, Artificial Sequence
  Description of Artificial Sequence: Synthetic oligonucleotide
  Antisense strand to SEQ ID NO: 1994754
uccaauggauuucaauacg

SEQ ID NO: 1994756 - RNA, 19 nt, Artificial Sequence
  Description of Artificial Sequence: Synthetic oligonucleotide
  Sense strand starting at position 1097 of SEQ ID NO: 1880799
uuucccagauaugagaauu

SEQ ID NO: 1994757 - RNA, 19 nt, Artificial Sequence
  Description of Artificial Sequence: Synthetic oligonucleotide
  Antisense strand to SEQ ID NO: 1994756
aauucucauaucugggaaa

SEQ ID NO: 1994758 - RNA, 19 nt, Artificial Sequence
  Description of Artificial Sequence: Synthetic oligonucleotide
  Sense strand starting at position 1105 of SEQ ID NO: 1880799
auaugagaauuuggucacu

SEQ ID NO: 1994759 - RNA, 19 nt, Artificial Sequence
  Description of Artificial Sequence: Synthetic oligonucleotide
  Antisense strand to SEQ ID NO: 1994758
agugaccaaauucucauau

SEQ ID NO: 1994760 - RNA, 19 nt, Artificial Sequence
  Description of Artificial Sequence: Synthetic oligonucleotide
  Sense strand starting at position 1147 of SEQ ID NO: 1880799
agucuagauuucuuuguuu

SEQ ID NO: 1994761 - RNA, 19 nt, Artificial Sequence
  Description of Artificial Sequence: Synthetic oligonucleotide
  Antisense strand to SEQ ID NO: 1994760
aaacaaagaaaucuagacu

SEQ ID NO: 1994762 - RNA, 19 nt, Artificial Sequence
  Description of Artificial Sequence: Synthetic oligonucleotide
  Sense strand starting at position 1304 of SEQ ID NO: 1880799
cugaguauuuguugaauca

SEQ ID NO: 1994763 - RNA, 19 nt, Artificial Sequence
  Description of Artificial Sequence: Synthetic oligonucleotide
  Antisense strand to SEQ ID NO: 1994762
ugauucaacaaauacucag

SEQ ID NO: 1994764 - RNA, 19 nt, Artificial Sequence
  Description of Artificial Sequence: Synthetic oligonucleotide
  Sense strand starting at position 1525 of SEQ ID NO: 1880799
gcaugacaccguuaacaga

SEQ ID NO: 1994765 - RNA, 19 nt, Artificial Sequence
  Description of Artificial Sequence: Synthetic oligonucleotide
  Antisense strand to SEQ ID NO: 1994764
ucuguuaacggugucaugc

SEQ ID NO: 1994766 - RNA, 19 nt, Artificial Sequence
  Description of Artificial Sequence: Synthetic oligonucleotide
  Sense strand starting at position 2324 of SEQ ID NO: 1880799
gcuggaaccuuccaugaca

SEQ ID NO: 1994767 - RNA, 19 nt, Artificial Sequence
  Description of Artificial Sequence: Synthetic oligonucleotide
  Antisense strand to SEQ ID NO: 1994766
ugucauggaagguuccagc

SEQ ID NO: 1994768 - RNA, 19 nt, Artificial Sequence
  Description of Artificial Sequence: Synthetic oligonucleotide
  Sense strand starting at position 2494 of SEQ ID NO: 1880799
ucaggucuuggaugacaaa

SEQ ID NO: 1994769 - RNA, 19 nt, Artificial Sequence
  Description of Artificial Sequence: Synthetic oligonucleotide
  Antisense strand to SEQ ID NO: 1994768
uuugucauccaagaccuga

SEQ ID NO: 1994770 - RNA, 19 nt, Artificial Sequence
  Description of Artificial Sequence: Synthetic oligonucleotide
  Sense strand starting at position 2497 of SEQ ID NO: 1880799
ggucuuggaugacaaacuu

SEQ ID NO: 1994771 - RNA, 19 nt, Artificial Sequence
  Description of Artificial Sequence: Synthetic oligonucleotide
  Antisense strand to SEQ ID NO: 1994770
aaguuugucauccaagacc

SEQ ID NO: 1994772 - RNA, 19 nt, Artificial Sequence
  Description of Artificial Sequence: Synthetic oligonucleotide
  Sense strand starting at position 2876 of SEQ ID NO: 1880799
uugaccucucuaugucaga

SEQ ID NO: 1994773 - RNA, 19 nt, Artificial Sequence
  Description of Artificial Sequence: Synthetic oligonucleotide
  Antisense strand to SEQ ID NO: 1994772
ucugacauagagaggucaa

SEQ ID NO: 1994774 - RNA, 19 nt, Artificial Sequence
  Description of Artificial Sequence: Synthetic oligonucleotide
  Sense strand starting at position 2877 of SEQ ID NO: 1880799
ugaccucucuaugucagau

SEQ ID NO: 1994775 - RNA, 19 nt, Artificial Sequence
  Description of Artificial Sequence: Synthetic oligonucleotide
  Antisense strand to SEQ ID NO: 1994774
aucugacauagagagguca

SEQ ID NO: 1994776 - RNA, 19 nt, Artificial Sequence
  Description of Artificial Sequence: Synthetic oligonucleotide
  Sense strand starting at position 2881 of SEQ ID NO: 1880799
cucucuaugucagauguga

SEQ ID NO: 1994777 - RNA, 19 nt, Artificial Sequence
  Description of Artificial Sequence: Synthetic oligonucleotide
  Antisense strand to SEQ ID NO: 1994776
ucacaucugacauagagag

SEQ ID NO: 1994778 - RNA, 19 nt, Artificial Sequence
  Description of Artificial Sequence: Synthetic oligonucleotide
  Sense strand starting at position 2886 of SEQ ID NO: 1880799
uaugucagaugugaaauaa

SEQ ID NO: 1994779 - RNA, 19 nt, Artificial Sequence
  Description of Artificial Sequence: Synthetic oligonucleotide
  Antisense strand to SEQ ID NO: 1994778
uuauuucacaucugacaua

SEQ ID NO: 1994780 - RNA, 19 nt, Artificial Sequence
  Description of Artificial Sequence: Synthetic oligonucleotide
  Sense strand starting at position 3000 of SEQ ID NO: 1880799
uggaacguccugcggaauu

SEQ ID NO: 1994781 - RNA, 19 nt, Artificial Sequence
  Description of Artificial Sequence: Synthetic oligonucleotide
  Antisense strand to SEQ ID NO: 1994780
aauuccgcaggacguucca

SEQ ID NO: 1994782 - RNA, 19 nt, Artificial Sequence
  Description of Artificial Sequence: Synthetic oligonucleotide
  Sense strand starting at position 3359 of SEQ ID NO: 1880799
gcuuccagccuguauuuau

SEQ ID NO: 1994783 - RNA, 19 nt, Artificial Sequence
  Description of Artificial Sequence: Synthetic oligonucleotide
  Antisense strand to SEQ ID NO: 1994782
auaaauacaggcuggaagc

SEQ ID NO: 1994784 - RNA, 19 nt, Artificial Sequence
  Description of Artificial Sequence: Synthetic oligonucleotide
  Sense strand starting at position 3490 of SEQ ID NO: 1880799
guugggugguguugguaua

SEQ ID NO: 1994785 - RNA, 19 nt, Artificial Sequence
  Description of Artificial Sequence: Synthetic oligonucleotide
  Antisense strand to SEQ ID NO: 1994784
uauaccaacaccacccaac

SEQ ID NO: 1994786 - RNA, 19 nt, Artificial Sequence
  Description of Artificial Sequence: Synthetic oligonucleotide
  Sense strand starting at position 3757 of SEQ ID NO: 1880799
agagacuuccgcuguggca

SEQ ID NO: 1994787 - RNA, 19 nt, Artificial Sequence
  Description of Artificial Sequence: Synthetic oligonucleotide
  Antisense strand to SEQ ID NO: 1994786
ugccacagcggaagucucu

SEQ ID NO: 1994788 - RNA, 19 nt, Artificial Sequence
  Description of Artificial Sequence: Synthetic oligonucleotide
  Sense strand starting at position 3841 of SEQ ID NO: 1880799
acugcacucuuagagggau

SEQ ID NO: 1994789 - RNA, 19 nt, Artificial Sequence
  Description of Artificial Sequence: Synthetic oligonucleotide
  Antisense strand to SEQ ID NO: 1994788
aucccucuaagagugcagu

SEQ ID NO: 1994790 - RNA, 19 nt, Artificial Sequence
  Description of Artificial Sequence: Synthetic oligonucleotide
  Sense strand starting at position 3891 of SEQ ID NO: 1880799
ggugcuuucuaccugaaag

SEQ ID NO: 1994791 - RNA, 19 nt, Artificial Sequence
  Description of Artificial Sequence: Synthetic oligonucleotide
  Antisense strand to SEQ ID NO: 1994790
cuuucagguagaaagcacc

SEQ ID NO: 1994792 - RNA, 19 nt, Artificial Sequence
  Description of Artificial Sequence: Synthetic oligonucleotide
  Sense strand starting at position 3893 of SEQ ID NO: 1880799
ugcuuucuaccugaaagaa

SEQ ID NO: 1994793 - RNA, 19 nt, Artificial Sequence
  Description of Artificial Sequence: Synthetic oligonucleotide
  Antisense strand to SEQ ID NO: 1994792
uucuuucagguagaaagca

SEQ ID NO: 1994794 - RNA, 19 nt, Artificial Sequence
  Description of Artificial Sequence: Synthetic oligonucleotide
  Sense strand starting at position 251 of SEQ ID NO: 1880800
cucucuuaacauggugaca

SEQ ID NO: 1994795 - RNA, 19 nt, Artificial Sequence
  Description of Artificial Sequence: Synthetic oligonucleotide
  Antisense strand to SEQ ID NO: 1994794
ugucaccauguuaagagag

SEQ ID NO: 1994796 - RNA, 19 nt, Artificial Sequence
  Description of Artificial Sequence: Synthetic oligonucleotide
  Sense strand starting at position 498 of SEQ ID NO: 1880800
cucagaguucuuugaggac

SEQ ID NO: 1994797 - RNA, 19 nt, Artificial Sequence
  Description of Artificial Sequence: Synthetic oligonucleotide
  Antisense strand to SEQ ID NO: 1994796
guccucaaagaacucugag

SEQ ID NO: 1994798 - RNA, 19 nt, Artificial Sequence
  Description of Artificial Sequence: Synthetic oligonucleotide
  Sense strand starting at position 532 of SEQ ID NO: 1880800
aucacacaucgcuagcaua

SEQ ID NO: 1994799 - RNA, 19 nt, Artificial Sequence
  Description of Artificial Sequence: Synthetic oligonucleotide
  Antisense strand to SEQ ID NO: 1994798
uaugcuagcgaugugugau

SEQ ID NO: 1994800 - RNA, 19 nt, Artificial Sequence
  Description of Artificial Sequence: Synthetic oligonucleotide
  Sense strand starting at position 600 of SEQ ID NO: 1880800
uuauaucgggcuuacaaau

SEQ ID NO: 1994801 - RNA, 19 nt, Artificial Sequence
  Description of Artificial Sequence: Synthetic oligonucleotide
  Antisense strand to SEQ ID NO: 1994800
auuuguaagcccgauauaa

SEQ ID NO: 1994802 - RNA, 19 nt, Artificial Sequence
  Description of Artificial Sequence: Synthetic oligonucleotide
  Sense strand starting at position 911 of SEQ ID NO: 1880800
guugaaagcuauuucggca

SEQ ID NO: 1994803 - RNA, 19 nt, Artificial Sequence
  Description of Artificial Sequence: Synthetic oligonucleotide
  Antisense strand to SEQ ID NO: 1994802
ugccgaaauagcuuucaac

SEQ ID NO: 1994804 - RNA, 19 nt, Artificial Sequence
  Description of Artificial Sequence: Synthetic oligonucleotide
  Sense strand starting at position 1004 of SEQ ID NO: 1880800
ucaagacuuuccucaggau

SEQ ID NO: 1994805 - RNA, 19 nt, Artificial Sequence
  Description of Artificial Sequence: Synthetic oligonucleotide
  Antisense strand to SEQ ID NO: 1994804
auccugaggaaagucuuga

SEQ ID NO: 1994806 - RNA, 19 nt, Artificial Sequence
  Description of Artificial Sequence: Synthetic oligonucleotide
  Sense strand starting at position 1200 of SEQ ID NO: 1880800
acaguugccauggguuaaa

SEQ ID NO: 1994807 - RNA, 19 nt, Artificial Sequence
  Description of Artificial Sequence: Synthetic oligonucleotide
  Antisense strand to SEQ ID NO: 1994806
uuuaacccauggcaacugu

SEQ ID NO: 1994808 - RNA, 19 nt, Artificial Sequence
  Description of Artificial Sequence: Synthetic oligonucleotide
  Sense strand starting at position 1203 of SEQ ID NO: 1880800
guugccauggguuaaaucu

SEQ ID NO: 1994809 - RNA, 19 nt, Artificial Sequence
  Description of Artificial Sequence: Synthetic oligonucleotide
  Antisense strand to SEQ ID NO: 1994808
agauuuaacccauggcaac

SEQ ID NO: 1994810 - RNA, 19 nt, Artificial Sequence
  Description of Artificial Sequence: Synthetic oligonucleotide
  Sense strand starting at position 1443 of SEQ ID NO: 1880800
ccucgagccaucgaggaua

SEQ ID NO: 1994811 - RNA, 19 nt, Artificial Sequence
  Description of Artificial Sequence: Synthetic oligonucleotide
  Antisense strand to SEQ ID NO: 1994810
uauccucgauggcucgagg

SEQ ID NO: 1994812 - RNA, 19 nt, Artificial Sequence
  Description of Artificial Sequence: Synthetic oligonucleotide
  Sense strand starting at position 1446 of SEQ ID NO: 1880800
cgagccaucgaggauauaa

SEQ ID NO: 1994813 - RNA, 19 nt, Artificial Sequence
  Description of Artificial Sequence: Synthetic oligonucleotide
  Antisense strand to SEQ ID NO: 1994812
uuauauccucgauggcucg

SEQ ID NO: 1994814 - RNA, 19 nt, Artificial Sequence
  Description of Artificial Sequence: Synthetic oligonucleotide
  Sense strand starting at position 2375 of SEQ ID NO: 1880800
auguucuaaguaugacaua

SEQ ID NO: 1994815 - RNA, 19 nt, Artificial Sequence
  Description of Artificial Sequence: Synthetic oligonucleotide
  Antisense strand to SEQ ID NO: 1994814
uaugucauacuuagaacau

SEQ ID NO: 1994816 - RNA, 19 nt, Artificial Sequence
  Description of Artificial Sequence: Synthetic oligonucleotide
  Sense strand starting at position 2406 of SEQ ID NO: 1880800
augauaaaucauggguguu

SEQ ID NO: 1994817 - RNA, 19 nt, Artificial Sequence
  Description of Artificial Sequence: Synthetic oligonucleotide
  Antisense strand to SEQ ID NO: 1994816
aacacccaugauuuaucau

SEQ ID NO: 1994818 - RNA, 19 nt, Artificial Sequence
  Description of Artificial Sequence: Synthetic oligonucleotide
  Sense strand starting at position 2407 of SEQ ID NO: 1880800
ugauaaaucauggguguuu

SEQ ID NO: 1994819 - RNA, 19 nt, Artificial Sequence
  Description of Artificial Sequence: Synthetic oligonucleotide
  Antisense strand to SEQ ID NO: 1994818
aaacacccaugauuuauca

SEQ ID NO: 1994820 - RNA, 19 nt, Artificial Sequence
  Description of Artificial Sequence: Synthetic oligonucleotide
  Sense strand starting at position 2408 of SEQ ID NO: 1880800
gauaaaucauggguguuua

SEQ ID NO: 1994821 - RNA, 19 nt, Artificial Sequence
  Description of Artificial Sequence: Synthetic oligonucleotide
  Antisense strand to SEQ ID NO: 1994820
uaaacacccaugauuuauc

SEQ ID NO: 1994822 - RNA, 19 nt, Artificial Sequence
  Description of Artificial Sequence: Synthetic oligonucleotide
  Sense strand starting at position 2418 of SEQ ID NO: 1880800
ggguguuuagacgaaagau

SEQ ID NO: 1994823 - RNA, 19 nt, Artificial Sequence
  Description of Artificial Sequence: Synthetic oligonucleotide
  Antisense strand to SEQ ID NO: 1994822
aucuuucgucuaaacaccc

SEQ ID NO: 1994824 - RNA, 19 nt, Artificial Sequence
  Description of Artificial Sequence: Synthetic oligonucleotide
  Sense strand starting at position 2428 of SEQ ID NO: 1880800
acgaaagauuuacacauau

SEQ ID NO: 1994825 - RNA, 19 nt, Artificial Sequence
  Description of Artificial Sequence: Synthetic oligonucleotide
  Antisense strand to SEQ ID NO: 1994824
auauguguaaaucuuucgu

SEQ ID NO: 1994826 - RNA, 19 nt, Artificial Sequence
  Description of Artificial Sequence: Synthetic oligonucleotide
  Sense strand starting at position 2443 of SEQ ID NO: 1880800
auauaaauuggaggcuuua

SEQ ID NO: 1994827 - RNA, 19 nt, Artificial Sequence
  Description of Artificial Sequence: Synthetic oligonucleotide
  Antisense strand to SEQ ID NO: 1994826
uaaagccuccaauuuauau

SEQ ID NO: 1994828 - RNA, 19 nt, Artificial Sequence
  Description of Artificial Sequence: Synthetic oligonucleotide
  Sense strand starting at position 2454 of SEQ ID NO: 1880800
aggcuuuagcggucuuagu

SEQ ID NO: 1994829 - RNA, 19 nt, Artificial Sequence
  Description of Artificial Sequence: Synthetic oligonucleotide
  Antisense strand to SEQ ID NO: 1994828
acuaagaccgcuaaagccu

SEQ ID NO: 1994830 - RNA, 19 nt, Artificial Sequence
  Description of Artificial Sequence: Synthetic oligonucleotide
  Sense strand starting at position 2456 of SEQ ID NO: 1880800
gcuuuagcggucuuagugu

SEQ ID NO: 1994831 - RNA, 19 nt, Artificial Sequence
  Description of Artificial Sequence: Synthetic oligonucleotide
  Antisense strand to SEQ ID NO: 1994830
acacuaagaccgcuaaagc

SEQ ID NO: 1994832 - RNA, 19 nt, Artificial Sequence
  Description of Artificial Sequence: Synthetic oligonucleotide
  Sense strand starting at position 2533 of SEQ ID NO: 1880800
ggagcauuauacuccggaa

SEQ ID NO: 1994833 - RNA, 19 nt, Artificial Sequence
  Description of Artificial Sequence: Synthetic oligonucleotide
  Antisense strand to SEQ ID NO: 1994832
uuccggaguauaaugcucc

SEQ ID NO: 1994834 - RNA, 19 nt, Artificial Sequence
  Description of Artificial Sequence: Synthetic oligonucleotide
  Sense strand starting at position 2535 of SEQ ID NO: 1880800
agcauuauacuccggaaac

SEQ ID NO: 1994835 - RNA, 19 nt, Artificial Sequence
  Description of Artificial Sequence: Synthetic oligonucleotide
  Antisense strand to SEQ ID NO: 1994834
guuuccggaguauaaugcu

SEQ ID NO: 1994836 - RNA, 19 nt, Artificial Sequence
  Description of Artificial Sequence: Synthetic oligonucleotide
  Sense strand starting at position 2574 of SEQ ID NO: 1880800
agaaauuccucucuguaug

SEQ ID NO: 1994837 - RNA, 19 nt, Artificial Sequence
  Description of Artificial Sequence: Synthetic oligonucleotide
  Antisense strand to SEQ ID NO: 1994836
cauacagagaggaauuucu

SEQ ID NO: 1994838 - RNA, 19 nt, Artificial Sequence
  Description of Artificial Sequence: Synthetic oligonucleotide
  Sense strand starting at position 2590 of SEQ ID NO: 1880800
augcuaacuccguaauaca

SEQ ID NO: 1994839 - RNA, 19 nt, Artificial Sequence
  Description of Artificial Sequence: Synthetic oligonucleotide
  Antisense strand to SEQ ID NO: 1994838
uguauuacggaguuagcau

SEQ ID NO: 1994840 - RNA, 19 nt, Artificial Sequence
  Description of Artificial Sequence: Synthetic oligonucleotide
  Sense strand starting at position 2601 of SEQ ID NO: 1880800
guaauacaagcguuugugu

SEQ ID NO: 1994841 - RNA, 19 nt, Artificial Sequence
  Description of Artificial Sequence: Synthetic oligonucleotide
  Antisense strand to SEQ ID NO: 1994840
acacaaacgcuuguauuac

SEQ ID NO: 1994842 - RNA, 19 nt, Artificial Sequence
  Description of Artificial Sequence: Synthetic oligonucleotide
  Sense strand starting at position 2683 of SEQ ID NO: 1880800
gguguucuucaggacaguu

SEQ ID NO: 1994843 - RNA, 19 nt, Artificial Sequence
  Description of Artificial Sequence: Synthetic oligonucleotide
  Antisense strand to SEQ ID NO: 1994842
aacuguccugaagaacacc

SEQ ID NO: 1994844 - RNA, 19 nt, Artificial Sequence
  Description of Artificial Sequence: Synthetic oligonucleotide
  Sense strand starting at position 2710 of SEQ ID NO: 1880800
agcaauucuuagucucaag

SEQ ID NO: 1994845 - RNA, 19 nt, Artificial Sequence
  Description of Artificial Sequence: Synthetic oligonucleotide
  Antisense strand to SEQ ID NO: 1994844
cuugagacuaagaauugcu

SEQ ID NO: 1994846 - RNA, 19 nt, Artificial Sequence
  Description of Artificial Sequence: Synthetic oligonucleotide
  Sense strand starting at position 2948 of SEQ ID NO: 1880800
acauuaugucaacagcaug

SEQ ID NO: 1994847 - RNA, 19 nt, Artificial Sequence
  Description of Artificial Sequence: Synthetic oligonucleotide
  Antisense strand to SEQ ID NO: 1994846
caugcuguugacauaaugu

SEQ ID NO: 1994848 - RNA, 19 nt, Artificial Sequence
  Description of Artificial Sequence: Synthetic oligonucleotide
  Sense strand starting at position 2997 of SEQ ID NO: 1880800
ugaucugaacucugaccau

SEQ ID NO: 1994849 - RNA, 19 nt, Artificial Sequence
  Description of Artificial Sequence: Synthetic oligonucleotide
  Antisense strand to SEQ ID NO: 1994848
auggucagaguucagauca

SEQ ID NO: 1994850 - RNA, 19 nt, Artificial Sequence
  Description of Artificial Sequence: Synthetic oligonucleotide
  Sense strand starting at position 3041 of SEQ ID NO: 1880800
auaagagucugacuacuug

SEQ ID NO: 1994851 - RNA, 19 nt, Artificial Sequence
  Description of Artificial Sequence: Synthetic oligonucleotide
  Antisense strand to SEQ ID NO: 1994850
caaguagucagacucuuau

SEQ ID NO: 1994852 - RNA, 19 nt, Artificial Sequence
  Description of Artificial Sequence: Synthetic oligonucleotide
  Sense strand starting at position 3228 of SEQ ID NO: 1880800
uuggaaaggcauuguaacu

SEQ ID NO: 1994853 - RNA, 19 nt, Artificial Sequence
  Description of Artificial Sequence: Synthetic oligonucleotide
  Antisense strand to SEQ ID NO: 1994852
aguuacaaugccuuuccaa

SEQ ID NO: 1994854 - RNA, 19 nt, Artificial Sequence
  Description of Artificial Sequence: Synthetic oligonucleotide
  Sense strand starting at position 3277 of SEQ ID NO: 1880800
cuugucuuacccuaaaguc

SEQ ID NO: 1994855 - RNA, 19 nt, Artificial Sequence
  Description of Artificial Sequence: Synthetic oligonucleotide
  Antisense strand to SEQ ID NO: 1994854
gacuuuaggguaagacaag

SEQ ID NO: 1994856 - RNA, 19 nt, Artificial Sequence
  Description of Artificial Sequence: Synthetic oligonucleotide
  Sense strand starting at position 3299 of SEQ ID NO: 1880800
ugcugaagauucuuuacug

SEQ ID NO: 1994857 - RNA, 19 nt, Artificial Sequence
  Description of Artificial Sequence: Synthetic oligonucleotide
  Antisense strand to SEQ ID NO: 1994856
caguaaagaaucuucagca

SEQ ID NO: 1994858 - RNA, 19 nt, Artificial Sequence
  Description of Artificial Sequence: Synthetic oligonucleotide
  Sense strand starting at position 3440 of SEQ ID NO: 1880800
uugccaguuguaucagugu

SEQ ID NO: 1994859 - RNA, 19 nt, Artificial Sequence
  Description of Artificial Sequence: Synthetic oligonucleotide
  Antisense strand to SEQ ID NO: 1994858
acacugauacaacuggcaa

SEQ ID NO: 1994860 - RNA, 19 nt, Artificial Sequence
  Description of Artificial Sequence: Synthetic oligonucleotide
  Sense strand starting at position 3487 of SEQ ID NO: 1880800
aaacaugaacguuggaguu

SEQ ID NO: 1994861 - RNA, 19 nt, Artificial Sequence
  Description of Artificial Sequence: Synthetic oligonucleotide
  Antisense strand to SEQ ID NO: 1994860
aacuccaacguucauguuu

SEQ ID NO: 1994862 - RNA, 19 nt, Artificial Sequence
  Description of Artificial Sequence: Synthetic oligonucleotide
  Sense strand starting at position 3499 of SEQ ID NO: 1880800
uggaguugcccacagugaa

SEQ ID NO: 1994863 - RNA, 19 nt, Artificial Sequence
  Description of Artificial Sequence: Synthetic oligonucleotide
  Antisense strand to SEQ ID NO: 1994862
uucacugugggcaacucca

SEQ ID NO: 1994864 - RNA, 19 nt, Artificial Sequence
  Description of Artificial Sequence: Synthetic oligonucleotide
  Sense strand starting at position 3550 of SEQ ID NO: 1880800
ggguauguggcugacauau

SEQ ID NO: 1994865 - RNA, 19 nt, Artificial Sequence
  Description of Artificial Sequence: Synthetic oligonucleotide
  Antisense strand to SEQ ID NO: 1994864
auaugucagccacauaccc

SEQ ID NO: 1994866 - RNA, 19 nt, Artificial Sequence
  Description of Artificial Sequence: Synthetic oligonucleotide
  Sense strand starting at position 3561 of SEQ ID NO: 1880800
ugacauaugcauugggagu

SEQ ID NO: 1994867 - RNA, 19 nt, Artificial Sequence
  Description of Artificial Sequence: Synthetic oligonucleotide
  Antisense strand to SEQ ID NO: 1994866
acucccaaugcauauguca

SEQ ID NO: 1994868 - RNA, 19 nt, Artificial Sequence
  Description of Artificial Sequence: Synthetic oligonucleotide
  Sense strand starting at position 3630 of SEQ ID NO: 1880800
uugcuuggacuuuaacaaa

SEQ ID NO: 1994869 - RNA, 19 nt, Artificial Sequence
  Description of Artificial Sequence: Synthetic oligonucleotide
  Antisense strand to SEQ ID NO: 1994868
uuuguuaaaguccaagcaa

SEQ ID NO: 1994870 - RNA, 19 nt, Artificial Sequence
  Description of Artificial Sequence: Synthetic oligonucleotide
  Sense strand starting at position 3791 of SEQ ID NO: 1880800
gagaguucuggauguggau

SEQ ID NO: 1994871 - RNA, 19 nt, Artificial Sequence
  Description of Artificial Sequence: Synthetic oligonucleotide
  Antisense strand to SEQ ID NO: 1994870
auccacauccagaacucuc

SEQ ID NO: 1994872 - RNA, 19 nt, Artificial Sequence
  Description of Artificial Sequence: Synthetic oligonucleotide
  Sense strand starting at position 3797 of SEQ ID NO: 1880800
ucuggauguggaugguaau

SEQ ID NO: 1994873 - RNA, 19 nt, Artificial Sequence
  Description of Artificial Sequence: Synthetic oligonucleotide
  Antisense strand to SEQ ID NO: 1994872
auuaccauccacauccaga

SEQ ID NO: 1994874 - RNA, 19 nt, Artificial Sequence
  Description of Artificial Sequence: Synthetic oligonucleotide
  Sense strand starting at position 1448 of SEQ ID NO: 1880801
ucaaguuaugcuugagcuu

SEQ ID NO: 1994875 - RNA, 19 nt, Artificial Sequence
  Description of Artificial Sequence: Synthetic oligonucleotide
  Antisense strand to SEQ ID NO: 1994874
aagcucaagcauaacuuga

SEQ ID NO: 1994876 - RNA, 19 nt, Artificial Sequence
  Description of Artificial Sequence: Synthetic oligonucleotide
  Sense strand starting at position 1865 of SEQ ID NO: 1880801
gauagaguuggcuacugca

SEQ ID NO: 1994877 - RNA, 19 nt, Artificial Sequence
  Description of Artificial Sequence: Synthetic oligonucleotide
  Antisense strand to SEQ ID NO: 1994876
ugcaguagccaacucuauc

SEQ ID NO: 1994878 - RNA, 19 nt, Artificial Sequence
  Description of Artificial Sequence: Synthetic oligonucleotide
  Sense strand starting at position 1993 of SEQ ID NO: 1880801
agagcaguccugugagagu

SEQ ID NO: 1994879 - RNA, 19 nt, Artificial Sequence
  Description of Artificial Sequence: Synthetic oligonucleotide
  Antisense strand to SEQ ID NO: 1994878
acucucacaggacugcucu

SEQ ID NO: 1994880 - RNA, 19 nt, Artificial Sequence
  Description of Artificial Sequence: Synthetic oligonucleotide
  Sense strand starting at position 2314 of SEQ ID NO: 1880801
gaaugagaauaguagcuuu

SEQ ID NO: 1994881 - RNA, 19 nt, Artificial Sequence
  Description of Artificial Sequence: Synthetic oligonucleotide
  Antisense strand to SEQ ID NO: 1994880
aaagcuacuauucucauuc

SEQ ID NO: 1994882 - RNA, 19 nt, Artificial Sequence
  Description of Artificial Sequence: Synthetic oligonucleotide
  Sense strand starting at position 2345 of SEQ ID NO: 1880801
caccguaaugcuuaaauga

SEQ ID NO: 1994883 - RNA, 19 nt, Artificial Sequence
  Description of Artificial Sequence: Synthetic oligonucleotide
  Antisense strand to SEQ ID NO: 1994882
ucauuuaagcauuacggug

SEQ ID NO: 1994884 - RNA, 19 nt, Artificial Sequence
  Description of Artificial Sequence: Synthetic oligonucleotide
  Sense strand starting at position 3245 of SEQ ID NO: 1880801
accuguaauugagaacaug

SEQ ID NO: 1994885 - RNA, 19 nt, Artificial Sequence
  Description of Artificial Sequence: Synthetic oligonucleotide
  Antisense strand to SEQ ID NO: 1994884
cauguucucaauuacaggu

SEQ ID NO: 1994886 - RNA, 19 nt, Artificial Sequence
  Description of Artificial Sequence: Synthetic oligonucleotide
  Sense strand starting at position 3616 of SEQ ID NO: 1880801
gaaggauccugagagacag

SEQ ID NO: 1994887 - RNA, 19 nt, Artificial Sequence
  Description of Artificial Sequence: Synthetic oligonucleotide
  Antisense strand to SEQ ID NO: 1994886
cugucucucaggauccuuc

SEQ ID NO: 1994888 - RNA, 19 nt, Artificial Sequence
  Description of Artificial Sequence: Synthetic oligonucleotide
  Sense strand starting at position 3652 of SEQ ID NO: 1880801
auaacaggugucuggcuua

SEQ ID NO: 1994889 - RNA, 19 nt, Artificial Sequence
  Description of Artificial Sequence: Synthetic oligonucleotide
  Antisense strand to SEQ ID NO: 1994888
uaagccagacaccuguuau

SEQ ID NO: 1994890 - RNA, 19 nt, Artificial Sequence
  Description of Artificial Sequence: Synthetic oligonucleotide
  Sense strand starting at position 3655 of SEQ ID NO: 1880801
acaggugucuggcuuaugu

SEQ ID NO: 1994891 - RNA, 19 nt, Artificial Sequence
  Description of Artificial Sequence: Synthetic oligonucleotide
  Antisense strand to SEQ ID NO: 1994890
acauaagccagacaccugu

SEQ ID NO: 1994892 - RNA, 19 nt, Artificial Sequence
  Description of Artificial Sequence: Synthetic oligonucleotide
  Sense strand starting at position 9 of SEQ ID NO: 1880802
ggcuguaaagguggauaaa

SEQ ID NO: 1994893 - RNA, 19 nt, Artificial Sequence
  Description of Artificial Sequence: Synthetic oligonucleotide
  Antisense strand to SEQ ID NO: 1994892
uuuauccaccuuuacagcc

SEQ ID NO: 1994894 - RNA, 19 nt, Artificial Sequence
  Description of Artificial Sequence: Synthetic oligonucleotide
  Sense strand starting at position 10 of SEQ ID NO: 1880802
gcuguaaagguggauaaag

SEQ ID NO: 1994895 - RNA, 19 nt, Artificial Sequence
  Description of Artificial Sequence: Synthetic oligonucleotide
  Antisense strand to SEQ ID NO: 1994894
cuuuauccaccuuuacagc

SEQ ID NO: 1994896 - RNA, 19 nt, Artificial Sequence
  Description of Artificial Sequence: Synthetic oligonucleotide
  Sense strand starting at position 19 of SEQ ID NO: 1880802
guggauaaagccggcuuua

SEQ ID NO: 1994897 - RNA, 19 nt, Artificial Sequence
  Description of Artificial Sequence: Synthetic oligonucleotide
  Antisense strand to SEQ ID NO: 1994896
uaaagccggcuuuauccac

SEQ ID NO: 1994898 - RNA, 19 nt, Artificial Sequence
  Description of Artificial Sequence: Synthetic oligonucleotide
  Sense strand starting at position 49 of SEQ ID NO: 1880802
uccugugugagccguggaa

SEQ ID NO: 1994899 - RNA, 19 nt, Artificial Sequence
  Description of Artificial Sequence: Synthetic oligonucleotide
  Antisense strand to SEQ ID NO: 1994898
uuccacggcucacacagga

SEQ ID NO: 1994900 - RNA, 19 nt, Artificial Sequence
  Description of Artificial Sequence: Synthetic oligonucleotide
  Sense strand starting at position 53 of SEQ ID NO: 1880802
gugugagccguggaagcuu

SEQ ID NO: 1994901 - RNA, 19 nt, Artificial Sequence
  Description of Artificial Sequence: Synthetic oligonucleotide
  Antisense strand to SEQ ID NO: 1994900
aagcuuccacggcucacac

SEQ ID NO: 1994902 - RNA, 19 nt, Artificial Sequence
  Description of Artificial Sequence: Synthetic oligonucleotide
  Sense strand starting at position 173 of SEQ ID NO: 1880802
aaaugaggucuggguccau

SEQ ID NO: 1994903 - RNA, 19 nt, Artificial Sequence
  Description of Artificial Sequence: Synthetic oligonucleotide
  Antisense strand to SEQ ID NO: 1994902
auggacccagaccucauuu

SEQ ID NO: 1994904 - RNA, 19 nt, Artificial Sequence
  Description of Artificial Sequence: Synthetic oligonucleotide
  Sense strand starting at position 177 of SEQ ID NO: 1880802
gaggucuggguccaucauu

SEQ ID NO: 1994905 - RNA, 19 nt, Artificial Sequence
  Description of Artificial Sequence: Synthetic oligonucleotide
  Antisense strand to SEQ ID NO: 1994904
aaugauggacccagaccuc

SEQ ID NO: 1994906 - RNA, 19 nt, Artificial Sequence
  Description of Artificial Sequence: Synthetic oligonucleotide
  Sense strand starting at position 218 of SEQ ID NO: 1880802
augggagucucgccuaaag

SEQ ID NO: 1994907 - RNA, 19 nt, Artificial Sequence
  Description of Artificial Sequence: Synthetic oligonucleotide
  Antisense strand to SEQ ID NO: 1994906
cuuuaggcgagacucccau

SEQ ID NO: 1994908 - RNA, 19 nt, Artificial Sequence
  Description of Artificial Sequence: Synthetic oligonucleotide
  Sense strand starting at position 220 of SEQ ID NO: 1880802
gggagucucgccuaaagcu

SEQ ID NO: 1994909 - RNA, 19 nt, Artificial Sequence
  Description of Artificial Sequence: Synthetic oligonucleotide
  Antisense strand to SEQ ID NO: 1994908
agcuuuaggcgagacuccc

SEQ ID NO: 1994910 - RNA, 19 nt, Artificial Sequence
  Description of Artificial Sequence: Synthetic oligonucleotide
  Sense strand starting at position 438 of SEQ ID NO: 1880802
gagcaagagcucugugcuu

SEQ ID NO: 1994911 - RNA, 19 nt, Artificial Sequence
  Description of Artificial Sequence: Synthetic oligonucleotide
  Antisense strand to SEQ ID NO: 1994910
aagcacagagcucuugcuc

SEQ ID NO: 1994912 - RNA, 19 nt, Artificial Sequence
  Description of Artificial Sequence: Synthetic oligonucleotide
  Sense strand starting at position 440 of SEQ ID NO: 1880802
gcaagagcucugugcuuua

SEQ ID NO: 1994913 - RNA, 19 nt, Artificial Sequence
  Description of Artificial Sequence: Synthetic oligonucleotide
  Antisense strand to SEQ ID NO: 1994912
uaaagcacagagcucuugc

SEQ ID NO: 1994914 - RNA, 19 nt, Artificial Sequence
  Description of Artificial Sequence: Synthetic oligonucleotide
  Sense strand starting at position 450 of SEQ ID NO: 1880802
ugugcuuuaaccugaggag

SEQ ID NO: 1994915 - RNA, 19 nt, Artificial Sequence
  Description of Artificial Sequence: Synthetic oligonucleotide
  Antisense strand to SEQ ID NO: 1994914
cuccucagguuaaagcaca

SEQ ID NO: 1994916 - RNA, 19 nt, Artificial Sequence
  Description of Artificial Sequence: Synthetic oligonucleotide
  Sense strand starting at position 508 of SEQ ID NO: 1880802
ggaugaaucugccauuaaa

SEQ ID NO: 1994917 - RNA, 19 nt, Artificial Sequence
  Description of Artificial Sequence: Synthetic oligonucleotide
  Antisense strand to SEQ ID NO: 1994916
uuuaauggcagauucaucc

SEQ ID NO: 1994918 - RNA, 19 nt, Artificial Sequence
  Description of Artificial Sequence: Synthetic oligonucleotide
  Sense strand starting at position 573 of SEQ ID NO: 1880802
agggaagugucccagugac

SEQ ID NO: 1994919 - RNA, 19 nt, Artificial Sequence
  Description of Artificial Sequence: Synthetic oligonucleotide
  Antisense strand to SEQ ID NO: 1994918
gucacugggacacuucccu

SEQ ID NO: 1994920 - RNA, 19 nt, Artificial Sequence
  Description of Artificial Sequence: Synthetic oligonucleotide
  Sense strand starting at position 910 of SEQ ID NO: 1880802
agguguugagcugagagaa

SEQ ID NO: 1994921 - RNA, 19 nt, Artificial Sequence
  Description of Artificial Sequence: Synthetic oligonucleotide
  Antisense strand to SEQ ID NO: 1994920
uucucucagcucaacaccu

SEQ ID NO: 1994922 - RNA, 19 nt, Artificial Sequence
  Description of Artificial Sequence: Synthetic oligonucleotide
  Sense strand starting at position 1550 of SEQ ID NO: 1880802
cccauaucuuacggguguu

SEQ ID NO: 1994923 - RNA, 19 nt, Artificial Sequence
  Description of Artificial Sequence: Synthetic oligonucleotide
  Antisense strand to SEQ ID NO: 1994922
aacacccguaagauauggg

SEQ ID NO: 1994924 - RNA, 19 nt, Artificial Sequence
  Description of Artificial Sequence: Synthetic oligonucleotide
  Sense strand starting at position 1551 of SEQ ID NO: 1880802
ccauaucuuacggguguuu

SEQ ID NO: 1994925 - RNA, 19 nt, Artificial Sequence
  Description of Artificial Sequence: Synthetic oligonucleotide
  Antisense strand to SEQ ID NO: 1994924
aaacacccguaagauaugg

SEQ ID NO: 1994926 - RNA, 19 nt, Artificial Sequence
  Description of Artificial Sequence: Synthetic oligonucleotide
  Sense strand starting at position 1721 of SEQ ID NO: 1880802
aguccugagucuuggacca

SEQ ID NO: 1994927 - RNA, 19 nt, Artificial Sequence
  Description of Artificial Sequence: Synthetic oligonucleotide
  Antisense strand to SEQ ID NO: 1994926
ugguccaagacucaggacu

SEQ ID NO: 1994928 - RNA, 19 nt, Artificial Sequence
  Description of Artificial Sequence: Synthetic oligonucleotide
  Sense strand starting at position 1896 of SEQ ID NO: 1880802
ccaucauguguccggcuga

SEQ ID NO: 1994929 - RNA, 19 nt, Artificial Sequence
  Description of Artificial Sequence: Synthetic oligonucleotide
  Antisense strand to SEQ ID NO: 1994928
ucagccggacacaugaugg

SEQ ID NO: 1994930 - RNA, 19 nt, Artificial Sequence
  Description of Artificial Sequence: Synthetic oligonucleotide
  Sense strand starting at position 2039 of SEQ ID NO: 1880802
ggcgguuccugcucuaaau

SEQ ID NO: 1994931 - RNA, 19 nt, Artificial Sequence
  Description of Artificial Sequence: Synthetic oligonucleotide
  Antisense strand to SEQ ID NO: 1994930
auuuagagcaggaaccgcc

SEQ ID NO: 1994932 - RNA, 19 nt, Artificial Sequence
  Description of Artificial Sequence: Synthetic oligonucleotide
  Sense strand starting at position 2040 of SEQ ID NO: 1880802
gcgguuccugcucuaaauc

SEQ ID NO: 1994933 - RNA, 19 nt, Artificial Sequence
  Description of Artificial Sequence: Synthetic oligonucleotide
  Antisense strand to SEQ ID NO: 1994932
gauuuagagcaggaaccgc

SEQ ID NO: 1994934 - RNA, 19 nt, Artificial Sequence
  Description of Artificial Sequence: Synthetic oligonucleotide
  Sense strand starting at position 2084 of SEQ ID NO: 1880802
gcagaaucccaucagugaa

SEQ ID NO: 1994935 - RNA, 19 nt, Artificial Sequence
  Description of Artificial Sequence: Synthetic oligonucleotide
  Antisense strand to SEQ ID NO: 1994934
uucacugaugggauucugc

SEQ ID NO: 1994936 - RNA, 19 nt, Artificial Sequence
  Description of Artificial Sequence: Synthetic oligonucleotide
  Sense strand starting at position 2523 of SEQ ID NO: 1880802
gagggagcgcuccaggaua

SEQ ID NO: 1994937 - RNA, 19 nt, Artificial Sequence
  Description of Artificial Sequence: Synthetic oligonucleotide
  Antisense strand to SEQ ID NO: 1994936
uauccuggagcgcucccuc

SEQ ID NO: 1994938 - RNA, 19 nt, Artificial Sequence
  Description of Artificial Sequence: Synthetic oligonucleotide
  Sense strand starting at position 2845 of SEQ ID NO: 1880802
ggugacuucucuugcagua

SEQ ID NO: 1994939 - RNA, 19 nt, Artificial Sequence
  Description of Artificial Sequence: Synthetic oligonucleotide
  Antisense strand to SEQ ID NO: 1994938
uacugcaagagaagucacc

SEQ ID NO: 1994940 - RNA, 19 nt, Artificial Sequence
  Description of Artificial Sequence: Synthetic oligonucleotide
  Sense strand starting at position 2847 of SEQ ID NO: 1880802
ugacuucucuugcaguaag

SEQ ID NO: 1994941 - RNA, 19 nt, Artificial Sequence
  Description of Artificial Sequence: Synthetic oligonucleotide
  Antisense strand to SEQ ID NO: 1994940
cuuacugcaagagaaguca

SEQ ID NO: 1994942 - RNA, 19 nt, Artificial Sequence
  Description of Artificial Sequence: Synthetic oligonucleotide
  Sense strand starting at position 3166 of SEQ ID NO: 1880802
ggcggcaguccugaggaaa

SEQ ID NO: 1994943 - RNA, 19 nt, Artificial Sequence
  Description of Artificial Sequence: Synthetic oligonucleotide
  Antisense strand to SEQ ID NO: 1994942
uuuccucaggacugccgcc

SEQ ID NO: 1994944 - RNA, 19 nt, Artificial Sequence
  Description of Artificial Sequence: Synthetic oligonucleotide
  Sense strand starting at position 3190 of SEQ ID NO: 1880802
uggaauuccugcugacaac

SEQ ID NO: 1994945 - RNA, 19 nt, Artificial Sequence
  Description of Artificial Sequence: Synthetic oligonucleotide
  Antisense strand to SEQ ID NO: 1994944
guugucagcaggaauucca

SEQ ID NO: 1994946 - RNA, 19 nt, Artificial Sequence
  Description of Artificial Sequence: Synthetic oligonucleotide
  Sense strand starting at position 3389 of SEQ ID NO: 1880802
cuguauagcugggacgaga

SEQ ID NO: 1994947 - RNA, 19 nt, Artificial Sequence
  Description of Artificial Sequence: Synthetic oligonucleotide
  Antisense strand to SEQ ID NO: 1994946
ucucgucccagcuauacag

SEQ ID NO: 1994948 - RNA, 19 nt, Artificial Sequence
  Description of Artificial Sequence: Synthetic oligonucleotide
  Sense strand starting at position 3602 of SEQ ID NO: 1880802
aggugaagcugucucugau

SEQ ID NO: 1994949 - RNA, 19 nt, Artificial Sequence
  Description of Artificial Sequence: Synthetic oligonucleotide
  Antisense strand to SEQ ID NO: 1994948
aucagagacagcuucaccu

SEQ ID NO: 1994950 - RNA, 19 nt, Artificial Sequence
  Description of Artificial Sequence: Synthetic oligonucleotide
  Sense strand starting at position 9 of SEQ ID NO: 1880804
uaauaucagugaguauuag

SEQ ID NO: 1994951 - RNA, 19 nt, Artificial Sequence
  Description of Artificial Sequence: Synthetic oligonucleotide
  Antisense strand to SEQ ID NO: 1994950
cuaauacucacugauauua

SEQ ID NO: 1994952 - RNA, 19 nt, Artificial Sequence
  Description of Artificial Sequence: Synthetic oligonucleotide
  Sense strand starting at position 25 of SEQ ID NO: 1880804
uagacacugcuccagguua

SEQ ID NO: 1994953 - RNA, 19 nt, Artificial Sequence
  Description of Artificial Sequence: Synthetic oligonucleotide
  Antisense strand to SEQ ID NO: 1994952
uaaccuggagcagugucua

SEQ ID NO: 1994954 - RNA, 19 nt, Artificial Sequence
  Description of Artificial Sequence: Synthetic oligonucleotide
  Sense strand starting at position 114 of SEQ ID NO: 1880804
auggaaggugcucacuaau

SEQ ID NO: 1994955 - RNA, 19 nt, Artificial Sequence
  Description of Artificial Sequence: Synthetic oligonucleotide
  Antisense strand to SEQ ID NO: 1994954
auuagugagcaccuuccau

SEQ ID NO: 1994956 - RNA, 19 nt, Artificial Sequence
  Description of Artificial Sequence: Synthetic oligonucleotide
  Sense strand starting at position 161 of SEQ ID NO: 1880804
aauugaacugucugauaga

SEQ ID NO: 1994957 - RNA, 19 nt, Artificial Sequence
  Description of Artificial Sequence: Synthetic oligonucleotide
  Antisense strand to SEQ ID NO: 1994956
ucuaucagacaguucaauu

SEQ ID NO: 1994958 - RNA, 19 nt, Artificial Sequence
  Description of Artificial Sequence: Synthetic oligonucleotide
  Sense strand starting at position 516 of SEQ ID NO: 1880804
uuaugagaauaugcaacuu

SEQ ID NO: 1994959 - RNA, 19 nt, Artificial Sequence
  Description of Artificial Sequence: Synthetic oligonucleotide
  Antisense strand to SEQ ID NO: 1994958
aaguugcauauucucauaa

SEQ ID NO: 1994960 - RNA, 19 nt, Artificial Sequence
  Description of Artificial Sequence: Synthetic oligonucleotide
  Sense strand starting at position 566 of SEQ ID NO: 1880804
uuaagaguuacaggagcau

SEQ ID NO: 1994961 - RNA, 19 nt, Artificial Sequence
  Description of Artificial Sequence: Synthetic oligonucleotide
  Antisense strand to SEQ ID NO: 1994960
augcuccuguaacucuuaa

SEQ ID NO: 1994962 - RNA, 19 nt, Artificial Sequence
  Description of Artificial Sequence: Synthetic oligonucleotide
  Sense strand starting at position 570 of SEQ ID NO: 1880804
gaguuacaggagcauagua

SEQ ID NO: 1994963 - RNA, 19 nt, Artificial Sequence
  Description of Artificial Sequence: Synthetic oligonucleotide
  Antisense strand to SEQ ID NO: 1994962
uacuaugcuccuguaacuc

SEQ ID NO: 1994964 - RNA, 19 nt, Artificial Sequence
  Description of Artificial Sequence: Synthetic oligonucleotide
  Sense strand starting at position 572 of SEQ ID NO: 1880804
guuacaggagcauaguauu

SEQ ID NO: 1994965 - RNA, 19 nt, Artificial Sequence
  Description of Artificial Sequence: Synthetic oligonucleotide
  Antisense strand to SEQ ID NO: 1994964
aauacuaugcuccuguaac

SEQ ID NO: 1994966 - RNA, 19 nt, Artificial Sequence
  Description of Artificial Sequence: Synthetic oligonucleotide
  Sense strand starting at position 589 of SEQ ID NO: 1880804
uugucagaaucccuugaau

SEQ ID NO: 1994967 - RNA, 19 nt, Artificial Sequence
  Description of Artificial Sequence: Synthetic oligonucleotide
  Antisense strand to SEQ ID NO: 1994966
auucaagggauucugacaa

SEQ ID NO: 1994968 - RNA, 19 nt, Artificial Sequence
  Description of Artificial Sequence: Synthetic oligonucleotide
  Sense strand starting at position 591 of SEQ ID NO: 1880804
gucagaaucccuugaauau

SEQ ID NO: 1994969 - RNA, 19 nt, Artificial Sequence
  Description of Artificial Sequence: Synthetic oligonucleotide
  Antisense strand to SEQ ID NO: 1994968
auauucaagggauucugac

SEQ ID NO: 1994970 - RNA, 19 nt, Artificial Sequence
  Description of Artificial Sequence: Synthetic oligonucleotide
  Sense strand starting at position 662 of SEQ ID NO: 1880804
gugucaguaggauagauaa

SEQ ID NO: 1994971 - RNA, 19 nt, Artificial Sequence
  Description of Artificial Sequence: Synthetic oligonucleotide
  Antisense strand to SEQ ID NO: 1994970
uuaucuauccuacugacac

SEQ ID NO: 1994972 - RNA, 19 nt, Artificial Sequence
  Description of Artificial Sequence: Synthetic oligonucleotide
  Sense strand starting at position 693 of SEQ ID NO: 1880804
augacauccuguccaagau

SEQ ID NO: 1994973 - RNA, 19 nt, Artificial Sequence
  Description of Artificial Sequence: Synthetic oligonucleotide
  Antisense strand to SEQ ID NO: 1994972
aucuuggacaggaugucau

SEQ ID NO: 1994974 - RNA, 19 nt, Artificial Sequence
  Description of Artificial Sequence: Synthetic oligonucleotide
  Sense strand starting at position 759 of SEQ ID NO: 1880804
auuuaucuggccugagucu

SEQ ID NO: 1994975 - RNA, 19 nt, Artificial Sequence
  Description of Artificial Sequence: Synthetic oligonucleotide
  Antisense strand to SEQ ID NO: 1994974
agacucaggccagauaaau

SEQ ID NO: 1994976 - RNA, 19 nt, Artificial Sequence
  Description of Artificial Sequence: Synthetic oligonucleotide
  Sense strand starting at position 807 of SEQ ID NO: 1880804
ccugaaacacuaugaguca

SEQ ID NO: 1994977 - RNA, 19 nt, Artificial Sequence
  Description of Artificial Sequence: Synthetic oligonucleotide
  Antisense strand to SEQ ID NO: 1994976
ugacucauaguguuucagg

SEQ ID NO: 1994978 - RNA, 19 nt, Artificial Sequence
  Description of Artificial Sequence: Synthetic oligonucleotide
  Sense strand starting at position 914 of SEQ ID NO: 1880804
gguugauguccucauaaau

SEQ ID NO: 1994979 - RNA, 19 nt, Artificial Sequence
  Description of Artificial Sequence: Synthetic oligonucleotide
  Antisense strand to SEQ ID NO: 1994978
auuuaugaggacaucaacc

SEQ ID NO: 1994980 - RNA, 19 nt, Artificial Sequence
  Description of Artificial Sequence: Synthetic oligonucleotide
  Sense strand starting at position 972 of SEQ ID NO: 1880804
augccauugcaucaagaau

SEQ ID NO: 1994981 - RNA, 19 nt, Artificial Sequence
  Description of Artificial Sequence: Synthetic oligonucleotide
  Antisense strand to SEQ ID NO: 1994980
auucuugaugcaauggcau

SEQ ID NO: 1994982 - RNA, 19 nt, Artificial Sequence
  Description of Artificial Sequence: Synthetic oligonucleotide
  Sense strand starting at position 1012 of SEQ ID NO: 1880804
aggugauacagauguaaac

SEQ ID NO: 1994983 - RNA, 19 nt, Artificial Sequence
  Description of Artificial Sequence: Synthetic oligonucleotide
  Antisense strand to SEQ ID NO: 1994982
guuuacaucuguaucaccu

SEQ ID NO: 1994984 - RNA, 19 nt, Artificial Sequence
  Description of Artificial Sequence: Synthetic oligonucleotide
  Sense strand starting at position 2210 of SEQ ID NO: 1880804
aggguuuagguauggaauc

SEQ ID NO: 1994985 - RNA, 19 nt, Artificial Sequence
  Description of Artificial Sequence: Synthetic oligonucleotide
  Antisense strand to SEQ ID NO: 1994984
gauuccauaccuaaacccu

SEQ ID NO: 1994986 - RNA, 19 nt, Artificial Sequence
  Description of Artificial Sequence: Synthetic oligonucleotide
  Sense strand starting at position 2212 of SEQ ID NO: 1880804
gguuuagguauggaaucau

SEQ ID NO: 1994987 - RNA, 19 nt, Artificial Sequence
  Description of Artificial Sequence: Synthetic oligonucleotide
  Antisense strand to SEQ ID NO: 1994986
augauuccauaccuaaacc

SEQ ID NO: 1994988 - RNA, 19 nt, Artificial Sequence
  Description of Artificial Sequence: Synthetic oligonucleotide
  Sense strand starting at position 2238 of SEQ ID NO: 1880804
agcaacuuauaagucagau

SEQ ID NO: 1994989 - RNA, 19 nt, Artificial Sequence
  Description of Artificial Sequence: Synthetic oligonucleotide
  Antisense strand to SEQ ID NO: 1994988
aucugacuuauaaguugcu

SEQ ID NO: 1994990 - RNA, 19 nt, Artificial Sequence
  Description of Artificial Sequence: Synthetic oligonucleotide
  Sense strand starting at position 2333 of SEQ ID NO: 1880804
auguuuaugcuauaagauc

SEQ ID NO: 1994991 - RNA, 19 nt, Artificial Sequence
  Description of Artificial Sequence: Synthetic oligonucleotide
  Antisense strand to SEQ ID NO: 1994990
gaucuuauagcauaaacau

SEQ ID NO: 1994992 - RNA, 19 nt, Artificial Sequence
  Description of Artificial Sequence: Synthetic oligonucleotide
  Sense strand starting at position 2344 of SEQ ID NO: 1880804
auaagaucugguuaguuua

SEQ ID NO: 1994993 - RNA, 19 nt, Artificial Sequence
  Description of Artificial Sequence: Synthetic oligonucleotide
  Antisense strand to SEQ ID NO: 1994992
uaaacuaaccagaucuuau

SEQ ID NO: 1994994 - RNA, 19 nt, Artificial Sequence
  Description of Artificial Sequence: Synthetic oligonucleotide
  Sense strand starting at position 2346 of SEQ ID NO: 1880804
aagaucugguuaguuuaaa

SEQ ID NO: 1994995 - RNA, 19 nt, Artificial Sequence
  Description of Artificial Sequence: Synthetic oligonucleotide
  Antisense strand to SEQ ID NO: 1994994
uuuaaacuaaccagaucuu

SEQ ID NO: 1994996 - RNA, 19 nt, Artificial Sequence
  Description of Artificial Sequence: Synthetic oligonucleotide
  Sense strand starting at position 2347 of SEQ ID NO: 1880804
agaucugguuaguuuaaac

SEQ ID NO: 1994997 - RNA, 19 nt, Artificial Sequence
  Description of Artificial Sequence: Synthetic oligonucleotide
  Antisense strand to SEQ ID NO: 1994996
guuuaaacuaaccagaucu

SEQ ID NO: 1994998 - RNA, 19 nt, Artificial Sequence
  Description of Artificial Sequence: Synthetic oligonucleotide
  Sense strand starting at position 2739 of SEQ ID NO: 1880804
accuaaugguagucaacau

SEQ ID NO: 1994999 - RNA, 19 nt, Artificial Sequence
  Description of Artificial Sequence: Synthetic oligonucleotide
  Antisense strand to SEQ ID NO: 1994998
auguugacuaccauuaggu

SEQ ID NO: 1995000 - RNA, 19 nt, Artificial Sequence
  Description of Artificial Sequence: Synthetic oligonucleotide
  Sense strand starting at position 2765 of SEQ ID NO: 1880804
uguugucaacaguagaaau

SEQ ID NO: 1995001 - RNA, 19 nt, Artificial Sequence
  Description of Artificial Sequence: Synthetic oligonucleotide
  Antisense strand to SEQ ID NO: 1995000
auuucuacuguugacaaca

SEQ ID NO: 1995002 - RNA, 19 nt, Artificial Sequence
  Description of Artificial Sequence: Synthetic oligonucleotide
  Sense strand starting at position 2776 of SEQ ID NO: 1880804
guagaaauguauguaaaga

SEQ ID NO: 1995003 - RNA, 19 nt, Artificial Sequence
  Description of Artificial Sequence: Synthetic oligonucleotide
  Antisense strand to SEQ ID NO: 1995002
ucuuuacauacauuucuac

SEQ ID NO: 1995004 - RNA, 19 nt, Artificial Sequence
  Description of Artificial Sequence: Synthetic oligonucleotide
  Sense strand starting at position 2993 of SEQ ID NO: 1880804
uuucuugagaggcauuaug

SEQ ID NO: 1995005 - RNA, 19 nt, Artificial Sequence
  Description of Artificial Sequence: Synthetic oligonucleotide
  Antisense strand to SEQ ID NO: 1995004
cauaaugccucucaagaaa

SEQ ID NO: 1995006 - RNA, 19 nt, Artificial Sequence
  Description of Artificial Sequence: Synthetic oligonucleotide
  Sense strand starting at position 3000 of SEQ ID NO: 1880804
agaggcauuaugugaugaa

SEQ ID NO: 1995007 - RNA, 19 nt, Artificial Sequence
  Description of Artificial Sequence: Synthetic oligonucleotide
  Antisense strand to SEQ ID NO: 1995006
uucaucacauaaugccucu

SEQ ID NO: 1995008 - RNA, 19 nt, Artificial Sequence
  Description of Artificial Sequence: Synthetic oligonucleotide
  Sense strand starting at position 3004 of SEQ ID NO: 1880804
gcauuaugugaugaauacu

SEQ ID NO: 1995009 - RNA, 19 nt, Artificial Sequence
  Description of Artificial Sequence: Synthetic oligonucleotide
  Antisense strand to SEQ ID NO: 1995008
aguauucaucacauaaugc

SEQ ID NO: 1995010 - RNA, 19 nt, Artificial Sequence
  Description of Artificial Sequence: Synthetic oligonucleotide
  Sense strand starting at position 3160 of SEQ ID NO: 1880804
cauucuguugaaggaauau

SEQ ID NO: 1995011 - RNA, 19 nt, Artificial Sequence
  Description of Artificial Sequence: Synthetic oligonucleotide
  Antisense strand to SEQ ID NO: 1995010
auauuccuucaacagaaug

SEQ ID NO: 1995012 - RNA, 19 nt, Artificial Sequence
  Description of Artificial Sequence: Synthetic oligonucleotide
  Sense strand starting at position 3185 of SEQ ID NO: 1880804
gaauaugcauuauugaagu

SEQ ID NO: 1995013 - RNA, 19 nt, Artificial Sequence
  Description of Artificial Sequence: Synthetic oligonucleotide
  Antisense strand to SEQ ID NO: 1995012
acuucaauaaugcauauuc

SEQ ID NO: 1995014 - RNA, 19 nt, Artificial Sequence
  Description of Artificial Sequence: Synthetic oligonucleotide
  Sense strand starting at position 3272 of SEQ ID NO: 1880804
gcugacuagcaagaaaucu

SEQ ID NO: 1995015 - RNA, 19 nt, Artificial Sequence
  Description of Artificial Sequence: Synthetic oligonucleotide
  Antisense strand to SEQ ID NO: 1995014
agauuucuugcuagucagc

SEQ ID NO: 1995016 - RNA, 19 nt, Artificial Sequence
  Description of Artificial Sequence: Synthetic oligonucleotide
  Sense strand starting at position 3285 of SEQ ID NO: 1880804
aaaucuugugaugaguuua

SEQ ID NO: 1995017 - RNA, 19 nt, Artificial Sequence
  Description of Artificial Sequence: Synthetic oligonucleotide
  Antisense strand to SEQ ID NO: 1995016
uaaacucaucacaagauuu

SEQ ID NO: 1995018 - RNA, 19 nt, Artificial Sequence
  Description of Artificial Sequence: Synthetic oligonucleotide
  Sense strand starting at position 3297 of SEQ ID NO: 1880804
gaguuuauccguguagugu

SEQ ID NO: 1995019 - RNA, 19 nt, Artificial Sequence
  Description of Artificial Sequence: Synthetic oligonucleotide
  Antisense strand to SEQ ID NO: 1995018
acacuacacggauaaacuc

SEQ ID NO: 1995020 - RNA, 19 nt, Artificial Sequence
  Description of Artificial Sequence: Synthetic oligonucleotide
  Sense strand starting at position 3588 of SEQ ID NO: 1880804
ucuugugagguuuagauua

SEQ ID NO: 1995021 - RNA, 19 nt, Artificial Sequence
  Description of Artificial Sequence: Synthetic oligonucleotide
  Antisense strand to SEQ ID NO: 1995020
uaaucuaaaccucacaaga

SEQ ID NO: 1995022 - RNA, 19 nt, Artificial Sequence
  Description of Artificial Sequence: Synthetic oligonucleotide
  Sense strand starting at position 3595 of SEQ ID NO: 1880804
agguuuagauuacucaauu

SEQ ID NO: 1995023 - RNA, 19 nt, Artificial Sequence
  Description of Artificial Sequence: Synthetic oligonucleotide
  Antisense strand to SEQ ID NO: 1995022
aauugaguaaucuaaaccu

SEQ ID NO: 1995024 - RNA, 19 nt, Artificial Sequence
  Description of Artificial Sequence: Synthetic oligonucleotide
  Sense strand starting at position 3596 of SEQ ID NO: 1880804
gguuuagauuacucaauuc

SEQ ID NO: 1995025 - RNA, 19 nt, Artificial Sequence
  Description of Artificial Sequence: Synthetic oligonucleotide
  Antisense strand to SEQ ID NO: 1995024
gaauugaguaaucuaaacc

SEQ ID NO: 1995026 - RNA, 19 nt, Artificial Sequence
  Description of Artificial Sequence: Synthetic oligonucleotide
  Sense strand starting at position 3749 of SEQ ID NO: 1880804
uuggaauaauuugauucca

SEQ ID NO: 1995027 - RNA, 19 nt, Artificial Sequence
  Description of Artificial Sequence: Synthetic oligonucleotide
  Antisense strand to SEQ ID NO: 1995026
uggaaucaaauuauuccaa

SEQ ID NO: 1995028 - RNA, 19 nt, Artificial Sequence
  Description of Artificial Sequence: Synthetic oligonucleotide
  Sense strand starting at position 3803 of SEQ ID NO: 1880804
auguguuugguauaaauac

SEQ ID NO: 1995029 - RNA, 19 nt, Artificial Sequence
  Description of Artificial Sequence: Synthetic oligonucleotide
  Antisense strand to SEQ ID NO: 1995028
guauuuauaccaaacacau

SEQ ID NO: 1995030 - RNA, 19 nt, Artificial Sequence
  Description of Artificial Sequence: Synthetic oligonucleotide
  Sense strand starting at position 437 of SEQ ID NO: 1880803
cucugugugcuagaauuga

SEQ ID NO: 1995031 - RNA, 19 nt, Artificial Sequence
  Description of Artificial Sequence: Synthetic oligonucleotide
  Antisense strand to SEQ ID NO: 1995030
ucaauucuagcacacagag

SEQ ID NO: 1995032 - RNA, 19 nt, Artificial Sequence
  Description of Artificial Sequence: Synthetic oligonucleotide
  Sense strand starting at position 441 of SEQ ID NO: 1880803
gugugcuagaauugaagau

SEQ ID NO: 1995033 - RNA, 19 nt, Artificial Sequence
  Description of Artificial Sequence: Synthetic oligonucleotide
  Antisense strand to SEQ ID NO: 1995032
aucuucaauucuagcacac

SEQ ID NO: 1995034 - RNA, 19 nt, Artificial Sequence
  Description of Artificial Sequence: Synthetic oligonucleotide
  Sense strand starting at position 571 of SEQ ID NO: 1880803
guuacuuuagaauggacaa

SEQ ID NO: 1995035 - RNA, 19 nt, Artificial Sequence
  Description of Artificial Sequence: Synthetic oligonucleotide
  Antisense strand to SEQ ID NO: 1995034
uuguccauucuaaaguaac

SEQ ID NO: 1995036 - RNA, 19 nt, Artificial Sequence
  Description of Artificial Sequence: Synthetic oligonucleotide
  Sense strand starting at position 606 of SEQ ID NO: 1880803
auuaucaaggcuuguauga

SEQ ID NO: 1995037 - RNA, 19 nt, Artificial Sequence
  Description of Artificial Sequence: Synthetic oligonucleotide
  Antisense strand to SEQ ID NO: 1995036
ucauacaagccuugauaau

SEQ ID NO: 1995038 - RNA, 19 nt, Artificial Sequence
  Description of Artificial Sequence: Synthetic oligonucleotide
  Sense strand starting at position 724 of SEQ ID NO: 1880803
uuuguugguagugaugaga

SEQ ID NO: 1995039 - RNA, 19 nt, Artificial Sequence
  Description of Artificial Sequence: Synthetic oligonucleotide
  Antisense strand to SEQ ID NO: 1995038
ucucaucacuaccaacaaa

SEQ ID NO: 1995040 - RNA, 19 nt, Artificial Sequence
  Description of Artificial Sequence: Synthetic oligonucleotide
  Sense strand starting at position 727 of SEQ ID NO: 1880803
guugguagugaugagauaa

SEQ ID NO: 1995041 - RNA, 19 nt, Artificial Sequence
  Description of Artificial Sequence: Synthetic oligonucleotide
  Antisense strand to SEQ ID NO: 1995040
uuaucucaucacuaccaac

SEQ ID NO: 1995042 - RNA, 19 nt, Artificial Sequence
  Description of Artificial Sequence: Synthetic oligonucleotide
  Sense strand starting at position 830 of SEQ ID NO: 1880803
uggccuuucccugguggaa

SEQ ID NO: 1995043 - RNA, 19 nt, Artificial Sequence
  Description of Artificial Sequence: Synthetic oligonucleotide
  Antisense strand to SEQ ID NO: 1995042
uuccaccagggaaaggcca

SEQ ID NO: 1995044 - RNA, 19 nt, Artificial Sequence
  Description of Artificial Sequence: Synthetic oligonucleotide
  Sense strand starting at position 866 of SEQ ID NO: 1880803
gcuggucucccuuaaguaa

SEQ ID NO: 1995045 - RNA, 19 nt, Artificial Sequence
  Description of Artificial Sequence: Synthetic oligonucleotide
  Antisense strand to SEQ ID NO: 1995044
uuacuuaagggagaccagc

SEQ ID NO: 1995046 - RNA, 19 nt, Artificial Sequence
  Description of Artificial Sequence: Synthetic oligonucleotide
  Sense strand starting at position 1086 of SEQ ID NO: 1880803
uggcauuuccugugaguca

SEQ ID NO: 1995047 - RNA, 19 nt, Artificial Sequence
  Description of Artificial Sequence: Synthetic oligonucleotide
  Antisense strand to SEQ ID NO: 1995046
ugacucacaggaaaugcca

SEQ ID NO: 1995048 - RNA, 19 nt, Artificial Sequence
  Description of Artificial Sequence: Synthetic oligonucleotide
  Sense strand starting at position 1256 of SEQ ID NO: 1880803
agcaccuuucccugagaca

SEQ ID NO: 1995049 - RNA, 19 nt, Artificial Sequence
  Description of Artificial Sequence: Synthetic oligonucleotide
  Antisense strand to SEQ ID NO: 1995048
ugucucagggaaaggugcu

SEQ ID NO: 1995050 - RNA, 19 nt, Artificial Sequence
  Description of Artificial Sequence: Synthetic oligonucleotide
  Sense strand starting at position 1257 of SEQ ID NO: 1880803
gcaccuuucccugagacag

SEQ ID NO: 1995051 - RNA, 19 nt, Artificial Sequence
  Description of Artificial Sequence: Synthetic oligonucleotide
  Antisense strand to SEQ ID NO: 1995050
cugucucagggaaaggugc

SEQ ID NO: 1995052 - RNA, 19 nt, Artificial Sequence
  Description of Artificial Sequence: Synthetic oligonucleotide
  Sense strand starting at position 1275 of SEQ ID NO: 1880803
gcccucaauuaggauuuga

SEQ ID NO: 1995053 - RNA, 19 nt, Artificial Sequence
  Description of Artificial Sequence: Synthetic oligonucleotide
  Antisense strand to SEQ ID NO: 1995052
ucaaauccuaauugagggc

SEQ ID NO: 1995054 - RNA, 19 nt, Artificial Sequence
  Description of Artificial Sequence: Synthetic oligonucleotide
  Sense strand starting at position 1357 of SEQ ID NO: 1880803
auauuuauguauggagaca

SEQ ID NO: 1995055 - RNA, 19 nt, Artificial Sequence
  Description of Artificial Sequence: Synthetic oligonucleotide
  Antisense strand to SEQ ID NO: 1995054
ugucuccauacauaaauau

SEQ ID NO: 1995056 - RNA, 19 nt, Artificial Sequence
  Description of Artificial Sequence: Synthetic oligonucleotide
  Sense strand starting at position 1445 of SEQ ID NO: 1880803
auacgaagauaucauagaa

SEQ ID NO: 1995057 - RNA, 19 nt, Artificial Sequence
  Description of Artificial Sequence: Synthetic oligonucleotide
  Antisense strand to SEQ ID NO: 1995056
uucuaugauaucuucguau

SEQ ID NO: 1995058 - RNA, 19 nt, Artificial Sequence
  Description of Artificial Sequence: Synthetic oligonucleotide
  Sense strand starting at position 2071 of SEQ ID NO: 1880803
cauacauuaggugaaguuu

SEQ ID NO: 1995059 - RNA, 19 nt, Artificial Sequence
  Description of Artificial Sequence: Synthetic oligonucleotide
  Antisense strand to SEQ ID NO: 1995058
aaacuucaccuaauguaug

SEQ ID NO: 1995060 - RNA, 19 nt, Artificial Sequence
  Description of Artificial Sequence: Synthetic oligonucleotide
  Sense strand starting at position 2077 of SEQ ID NO: 1880803
uuaggugaaguuugcagaa

SEQ ID NO: 1995061 - RNA, 19 nt, Artificial Sequence
  Description of Artificial Sequence: Synthetic oligonucleotide
  Antisense strand to SEQ ID NO: 1995060
uucugcaaacuucaccuaa

SEQ ID NO: 1995062 - RNA, 19 nt, Artificial Sequence
  Description of Artificial Sequence: Synthetic oligonucleotide
  Sense strand starting at position 2094 of SEQ ID NO: 1880803
aagaacugggcuugguaga

SEQ ID NO: 1995063 - RNA, 19 nt, Artificial Sequence
  Description of Artificial Sequence: Synthetic oligonucleotide
  Antisense strand to SEQ ID NO: 1995062
ucuaccaagcccaguucuu

SEQ ID NO: 1995064 - RNA, 19 nt, Artificial Sequence
  Description of Artificial Sequence: Synthetic oligonucleotide
  Sense strand starting at position 2095 of SEQ ID NO: 1880803
agaacugggcuugguagaa

SEQ ID NO: 1995065 - RNA, 19 nt, Artificial Sequence
  Description of Artificial Sequence: Synthetic oligonucleotide
  Antisense strand to SEQ ID NO: 1995064
uucuaccaagcccaguucu

SEQ ID NO: 1995066 - RNA, 19 nt, Artificial Sequence
  Description of Artificial Sequence: Synthetic oligonucleotide
  Sense strand starting at position 2169 of SEQ ID NO: 1880803
accagaaaguuaucugguu

SEQ ID NO: 1995067 - RNA, 19 nt, Artificial Sequence
  Description of Artificial Sequence: Synthetic oligonucleotide
  Antisense strand to SEQ ID NO: 1995066
aaccagauaacuuucuggu

SEQ ID NO: 1995068 - RNA, 19 nt, Artificial Sequence
  Description of Artificial Sequence: Synthetic oligonucleotide
  Sense strand starting at position 2170 of SEQ ID NO: 1880803
ccagaaaguuaucugguuc

SEQ ID NO: 1995069 - RNA, 19 nt, Artificial Sequence
  Description of Artificial Sequence: Synthetic oligonucleotide
  Antisense strand to SEQ ID NO: 1995068
gaaccagauaacuuucugg

SEQ ID NO: 1995070 - RNA, 19 nt, Artificial Sequence
  Description of Artificial Sequence: Synthetic oligonucleotide
  Sense strand starting at position 2203 of SEQ ID NO: 1880803
auugguguccuuuaaaucu

SEQ ID NO: 1995071 - RNA, 19 nt, Artificial Sequence
  Description of Artificial Sequence: Synthetic oligonucleotide
  Antisense strand to SEQ ID NO: 1995070
agauuuaaaggacaccaau

SEQ ID NO: 1995072 - RNA, 19 nt, Artificial Sequence
  Description of Artificial Sequence: Synthetic oligonucleotide
  Sense strand starting at position 2280 of SEQ ID NO: 1880803
auaggaagccuuugucaag

SEQ ID NO: 1995073 - RNA, 19 nt, Artificial Sequence
  Description of Artificial Sequence: Synthetic oligonucleotide
  Antisense strand to SEQ ID NO: 1995072
cuugacaaaggcuuccuau

SEQ ID NO: 1995074 - RNA, 19 nt, Artificial Sequence
  Description of Artificial Sequence: Synthetic oligonucleotide
  Sense strand starting at position 2497 of SEQ ID NO: 1880803
acaguaacuuugucuggga

SEQ ID NO: 1995075 - RNA, 19 nt, Artificial Sequence
  Description of Artificial Sequence: Synthetic oligonucleotide
  Antisense strand to SEQ ID NO: 1995074
ucccagacaaaguuacugu

SEQ ID NO: 1995076 - RNA, 19 nt, Artificial Sequence
  Description of Artificial Sequence: Synthetic oligonucleotide
  Sense strand starting at position 2499 of SEQ ID NO: 1880803
aguaacuuugucugggaca

SEQ ID NO: 1995077 - RNA, 19 nt, Artificial Sequence
  Description of Artificial Sequence: Synthetic oligonucleotide
  Antisense strand to SEQ ID NO: 1995076
ugucccagacaaaguuacu

SEQ ID NO: 1995078 - RNA, 19 nt, Artificial Sequence
  Description of Artificial Sequence: Synthetic oligonucleotide
  Sense strand starting at position 2501 of SEQ ID NO: 1880803
uaacuuugucugggacagu

SEQ ID NO: 1995079 - RNA, 19 nt, Artificial Sequence
  Description of Artificial Sequence: Synthetic oligonucleotide
  Antisense strand to SEQ ID NO: 1995078
acugucccagacaaaguua

SEQ ID NO: 1995080 - RNA, 19 nt, Artificial Sequence
  Description of Artificial Sequence: Synthetic oligonucleotide
  Sense strand starting at position 2584 of SEQ ID NO: 1880803
gcagucuucugaccaacag

SEQ ID NO: 1995081 - RNA, 19 nt, Artificial Sequence
  Description of Artificial Sequence: Synthetic oligonucleotide
  Antisense strand to SEQ ID NO: 1995080
cuguuggucagaagacugc

SEQ ID NO: 1995082 - RNA, 19 nt, Artificial Sequence
  Description of Artificial Sequence: Synthetic oligonucleotide
  Sense strand starting at position 2603 of SEQ ID NO: 1880803
guacuaaacuuugcuagua

SEQ ID NO: 1995083 - RNA, 19 nt, Artificial Sequence
  Description of Artificial Sequence: Synthetic oligonucleotide
  Antisense strand to SEQ ID NO: 1995082
uacuagcaaaguuuaguac

SEQ ID NO: 1995084 - RNA, 19 nt, Artificial Sequence
  Description of Artificial Sequence: Synthetic oligonucleotide
  Sense strand starting at position 2627 of SEQ ID NO: 1880803
gugugcuugccaguuggau

SEQ ID NO: 1995085 - RNA, 19 nt, Artificial Sequence
  Description of Artificial Sequence: Synthetic oligonucleotide
  Antisense strand to SEQ ID NO: 1995084
auccaacuggcaagcacac

SEQ ID NO: 1995086 - RNA, 19 nt, Artificial Sequence
  Description of Artificial Sequence: Synthetic oligonucleotide
  Sense strand starting at position 2698 of SEQ ID NO: 1880803
aaugaaucugcuggugaga

SEQ ID NO: 1995087 - RNA, 19 nt, Artificial Sequence
  Description of Artificial Sequence: Synthetic oligonucleotide
  Antisense strand to SEQ ID NO: 1995086
ucucaccagcagauucauu

SEQ ID NO: 1995088 - RNA, 19 nt, Artificial Sequence
  Description of Artificial Sequence: Synthetic oligonucleotide
  Sense strand starting at position 2701 of SEQ ID NO: 1880803
gaaucugcuggugagaagu

SEQ ID NO: 1995089 - RNA, 19 nt, Artificial Sequence
  Description of Artificial Sequence: Synthetic oligonucleotide
  Antisense strand to SEQ ID NO: 1995088
acuucucaccagcagauuc

SEQ ID NO: 1995090 - RNA, 19 nt, Artificial Sequence
  Description of Artificial Sequence: Synthetic oligonucleotide
  Sense strand starting at position 3117 of SEQ ID NO: 1880803
gguauugauuugcugugga

SEQ ID NO: 1995091 - RNA, 19 nt, Artificial Sequence
  Description of Artificial Sequence: Synthetic oligonucleotide
  Antisense strand to SEQ ID NO: 1995090
uccacagcaaaucaauacc

SEQ ID NO: 1995092 - RNA, 19 nt, Artificial Sequence
  Description of Artificial Sequence: Synthetic oligonucleotide
  Sense strand starting at position 3165 of SEQ ID NO: 1880803
gcauguauuugggagaaga

SEQ ID NO: 1995093 - RNA, 19 nt, Artificial Sequence
  Description of Artificial Sequence: Synthetic oligonucleotide
  Antisense strand to SEQ ID NO: 1995092
ucuucucccaaauacaugc

SEQ ID NO: 1995094 - RNA, 19 nt, Artificial Sequence
  Description of Artificial Sequence: Synthetic oligonucleotide
  Sense strand starting at position 3239 of SEQ ID NO: 1880803
aucagugauuagucuccua

SEQ ID NO: 1995095 - RNA, 19 nt, Artificial Sequence
  Description of Artificial Sequence: Synthetic oligonucleotide
  Antisense strand to SEQ ID NO: 1995094
uaggagacuaaucacugau

SEQ ID NO: 1995096 - RNA, 19 nt, Artificial Sequence
  Description of Artificial Sequence: Synthetic oligonucleotide
  Sense strand starting at position 3273 of SEQ ID NO: 1880803
gccagagaguuucuaauga

SEQ ID NO: 1995097 - RNA, 19 nt, Artificial Sequence
  Description of Artificial Sequence: Synthetic oligonucleotide
  Antisense strand to SEQ ID NO: 1995096
ucauuagaaacucucuggc

SEQ ID NO: 1995098 - RNA, 19 nt, Artificial Sequence
  Description of Artificial Sequence: Synthetic oligonucleotide
  Sense strand starting at position 3415 of SEQ ID NO: 1880803
ggaugacucuugcugucac

SEQ ID NO: 1995099 - RNA, 19 nt, Artificial Sequence
  Description of Artificial Sequence: Synthetic oligonucleotide
  Antisense strand to SEQ ID NO: 1995098
gugacagcaagagucaucc

SEQ ID NO: 1995100 - RNA, 19 nt, Artificial Sequence
  Description of Artificial Sequence: Synthetic oligonucleotide
  Sense strand starting at position 3439 of SEQ ID NO: 1880803
uuagccuggugguuaagaa

SEQ ID NO: 1995101 - RNA, 19 nt, Artificial Sequence
  Description of Artificial Sequence: Synthetic oligonucleotide
  Antisense strand to SEQ ID NO: 1995100
uucuuaaccaccaggcuaa

SEQ ID NO: 1995102 - RNA, 19 nt, Artificial Sequence
  Description of Artificial Sequence: Synthetic oligonucleotide
  Sense strand starting at position 3496 of SEQ ID NO: 1880803
cagggaaauucgcuuuacu

SEQ ID NO: 1995103 - RNA, 19 nt, Artificial Sequence
  Description of Artificial Sequence: Synthetic oligonucleotide
  Antisense strand to SEQ ID NO: 1995102
aguaaagcgaauuucccug

SEQ ID NO: 1995104 - RNA, 19 nt, Artificial Sequence
  Description of Artificial Sequence: Synthetic oligonucleotide
  Sense strand starting at position 3499 of SEQ ID NO: 1880803
ggaaauucgcuuuacucuc

SEQ ID NO: 1995105 - RNA, 19 nt, Artificial Sequence
  Description of Artificial Sequence: Synthetic oligonucleotide
  Antisense strand to SEQ ID NO: 1995104
gagaguaaagcgaauuucc

SEQ ID NO: 1995106 - RNA, 19 nt, Artificial Sequence
  Description of Artificial Sequence: Synthetic oligonucleotide
  Sense strand starting at position 3653 of SEQ ID NO: 1880803
guauaaacacuauguaauc

SEQ ID NO: 1995107 - RNA, 19 nt, Artificial Sequence
  Description of Artificial Sequence: Synthetic oligonucleotide
  Antisense strand to SEQ ID NO: 1995106
gauuacauaguguuuauac

SEQ ID NO: 1995108 - RNA, 19 nt, Artificial Sequence
  Description of Artificial Sequence: Synthetic oligonucleotide
  Sense strand starting at position 3872 of SEQ ID NO: 1880803
guuuaaauguucucuuacc

SEQ ID NO: 1995109 - RNA, 19 nt, Artificial Sequence
  Description of Artificial Sequence: Synthetic oligonucleotide
  Antisense strand to SEQ ID NO: 1995108
gguaagagaacauuuaaac

SEQ ID NO: 1995110 - RNA, 19 nt, Artificial Sequence
  Description of Artificial Sequence: Synthetic oligonucleotide
  Sense strand starting at position 143 of SEQ ID NO: 1880805
cuugucguacuauaucaua

SEQ ID NO: 1995111 - RNA, 19 nt, Artificial Sequence
  Description of Artificial Sequence: Synthetic oligonucleotide
  Antisense strand to SEQ ID NO: 1995110
uaugauauaguacgacaag

SEQ ID NO: 1995112 - RNA, 19 nt, Artificial Sequence
  Description of Artificial Sequence: Synthetic oligonucleotide
  Sense strand starting at position 161 of SEQ ID NO: 1880805
aacuauguacuacguuaga

SEQ ID NO: 1995113 - RNA, 19 nt, Artificial Sequence
  Description of Artificial Sequence: Synthetic oligonucleotide
  Antisense strand to SEQ ID NO: 1995112
ucuaacguaguacauaguu

SEQ ID NO: 1995114 - RNA, 19 nt, Artificial Sequence
  Description of Artificial Sequence: Synthetic oligonucleotide
  Sense strand starting at position 164 of SEQ ID NO: 1880805
uauguacuacguuagaaua

SEQ ID NO: 1995115 - RNA, 19 nt, Artificial Sequence
  Description of Artificial Sequence: Synthetic oligonucleotide
  Antisense strand to SEQ ID NO: 1995114
uauucuaacguaguacaua

SEQ ID NO: 1995116 - RNA, 19 nt, Artificial Sequence
  Description of Artificial Sequence: Synthetic oligonucleotide
  Sense strand starting at position 172 of SEQ ID NO: 1880805
acguuagaauauuccauua

SEQ ID NO: 1995117 - RNA, 19 nt, Artificial Sequence
  Description of Artificial Sequence: Synthetic oligonucleotide
  Antisense strand to SEQ ID NO: 1995116
uaauggaauauucuaacgu

SEQ ID NO: 1995118 - RNA, 19 nt, Artificial Sequence
  Description of Artificial Sequence: Synthetic oligonucleotide
  Sense strand starting at position 186 of SEQ ID NO: 1880805
cauuaaaggugacuuguua

SEQ ID NO: 1995119 - RNA, 19 nt, Artificial Sequence
  Description of Artificial Sequence: Synthetic oligonucleotide
  Antisense strand to SEQ ID NO: 1995118
uaacaagucaccuuuaaug

SEQ ID NO: 1995120 - RNA, 19 nt, Artificial Sequence
  Description of Artificial Sequence: Synthetic oligonucleotide
  Sense strand starting at position 190 of SEQ ID NO: 1880805
aaaggugacuuguuaagcu

SEQ ID NO: 1995121 - RNA, 19 nt, Artificial Sequence
  Description of Artificial Sequence: Synthetic oligonucleotide
  Antisense strand to SEQ ID NO: 1995120
agcuuaacaagucaccuuu

SEQ ID NO: 1995122 - RNA, 19 nt, Artificial Sequence
  Description of Artificial Sequence: Synthetic oligonucleotide
  Sense strand starting at position 306 of SEQ ID NO: 1880805
auuacuuugggaggcuaua

SEQ ID NO: 1995123 - RNA, 19 nt, Artificial Sequence
  Description of Artificial Sequence: Synthetic oligonucleotide
  Antisense strand to SEQ ID NO: 1995122
uauagccucccaaaguaau

SEQ ID NO: 1995124 - RNA, 19 nt, Artificial Sequence
  Description of Artificial Sequence: Synthetic oligonucleotide
  Sense strand starting at position 404 of SEQ ID NO: 1880805
gcuggcuuucuggagaaga

SEQ ID NO: 1995125 - RNA, 19 nt, Artificial Sequence
  Description of Artificial Sequence: Synthetic oligonucleotide
  Antisense strand to SEQ ID NO: 1995124
ucuucuccagaaagccagc

SEQ ID NO: 1995126 - RNA, 19 nt, Artificial Sequence
  Description of Artificial Sequence: Synthetic oligonucleotide
  Sense strand starting at position 567 of SEQ ID NO: 1880805
auggauuuguuccaaacaa

SEQ ID NO: 1995127 - RNA, 19 nt, Artificial Sequence
  Description of Artificial Sequence: Synthetic oligonucleotide
  Antisense strand to SEQ ID NO: 1995126
uuguuuggaacaaauccau

SEQ ID NO: 1995128 - RNA, 19 nt, Artificial Sequence
  Description of Artificial Sequence: Synthetic oligonucleotide
  Sense strand starting at position 678 of SEQ ID NO: 1880805
uggaaaugcaacgaaguuu

SEQ ID NO: 1995129 - RNA, 19 nt, Artificial Sequence
  Description of Artificial Sequence: Synthetic oligonucleotide
  Antisense strand to SEQ ID NO: 1995128
aaacuucguugcauuucca

SEQ ID NO: 1995130 - RNA, 19 nt, Artificial Sequence
  Description of Artificial Sequence: Synthetic oligonucleotide
  Sense strand starting at position 741 of SEQ ID NO: 1880805
cuccuaugugauggugaag

SEQ ID NO: 1995131 - RNA, 19 nt, Artificial Sequence
  Description of Artificial Sequence: Synthetic oligonucleotide
  Antisense strand to SEQ ID NO: 1995130
cuucaccaucacauaggag

SEQ ID NO: 1995132 - RNA, 19 nt, Artificial Sequence
  Description of Artificial Sequence: Synthetic oligonucleotide
  Sense strand starting at position 1340 of SEQ ID NO: 1880805
ucauaucaucccuguggga

SEQ ID NO: 1995133 - RNA, 19 nt, Artificial Sequence
  Description of Artificial Sequence: Synthetic oligonucleotide
  Antisense strand to SEQ ID NO: 1995132
ucccacagggaugauauga

SEQ ID NO: 1995134 - RNA, 19 nt, Artificial Sequence
  Description of Artificial Sequence: Synthetic oligonucleotide
  Sense strand starting at position 1419 of SEQ ID NO: 1880805
aggagugguccacaccuuu

SEQ ID NO: 1995135 - RNA, 19 nt, Artificial Sequence
  Description of Artificial Sequence: Synthetic oligonucleotide
  Antisense strand to SEQ ID NO: 1995134
aaagguguggaccacuccu

SEQ ID NO: 1995136 - RNA, 19 nt, Artificial Sequence
  Description of Artificial Sequence: Synthetic oligonucleotide
  Sense strand starting at position 1445 of SEQ ID NO: 1880805
cuucucagccagcauuaga

SEQ ID NO: 1995137 - RNA, 19 nt, Artificial Sequence
  Description of Artificial Sequence: Synthetic oligonucleotide
  Antisense strand to SEQ ID NO: 1995136
ucuaaugcuggcugagaag

SEQ ID NO: 1995138 - RNA, 19 nt, Artificial Sequence
  Description of Artificial Sequence: Synthetic oligonucleotide
  Sense strand starting at position 2139 of SEQ ID NO: 1880805
cuugacucaugguccaaga

SEQ ID NO: 1995139 - RNA, 19 nt, Artificial Sequence
  Description of Artificial Sequence: Synthetic oligonucleotide
  Antisense strand to SEQ ID NO: 1995138
ucuuggaccaugagucaag

SEQ ID NO: 1995140 - RNA, 19 nt, Artificial Sequence
  Description of Artificial Sequence: Synthetic oligonucleotide
  Sense strand starting at position 2283 of SEQ ID NO: 1880805
uucuaagcgcaucaagaau

SEQ ID NO: 1995141 - RNA, 19 nt, Artificial Sequence
  Description of Artificial Sequence: Synthetic oligonucleotide
  Antisense strand to SEQ ID NO: 1995140
auucuugaugcgcuuagaa

SEQ ID NO: 1995142 - RNA, 19 nt, Artificial Sequence
  Description of Artificial Sequence: Synthetic oligonucleotide
  Sense strand starting at position 2295 of SEQ ID NO: 1880805
caagaauucuggccgacuc

SEQ ID NO: 1995143 - RNA, 19 nt, Artificial Sequence
  Description of Artificial Sequence: Synthetic oligonucleotide
  Antisense strand to SEQ ID NO: 1995142
gagucggccagaauucuug

SEQ ID NO: 1995144 - RNA, 19 nt, Artificial Sequence
  Description of Artificial Sequence: Synthetic oligonucleotide
  Sense strand starting at position 2369 of SEQ ID NO: 1880805
agcacaagcguggaaagau

SEQ ID NO: 1995145 - RNA, 19 nt, Artificial Sequence
  Description of Artificial Sequence: Synthetic oligonucleotide
  Antisense strand to SEQ ID NO: 1995144
aucuuuccacgcuugugcu

SEQ ID NO: 1995146 - RNA, 19 nt, Artificial Sequence
  Description of Artificial Sequence: Synthetic oligonucleotide
  Sense strand starting at position 2377 of SEQ ID NO: 1880805
cguggaaagauuuguguau

SEQ ID NO: 1995147 - RNA, 19 nt, Artificial Sequence
  Description of Artificial Sequence: Synthetic oligonucleotide
  Antisense strand to SEQ ID NO: 1995146
auacacaaaucuuuccacg

SEQ ID NO: 1995148 - RNA, 19 nt, Artificial Sequence
  Description of Artificial Sequence: Synthetic oligonucleotide
  Sense strand starting at position 2384 of SEQ ID NO: 1880805
agauuuguguauucggcua

SEQ ID NO: 1995149 - RNA, 19 nt, Artificial Sequence
  Description of Artificial Sequence: Synthetic oligonucleotide
  Antisense strand to SEQ ID NO: 1995148
uagccgaauacacaaaucu

SEQ ID NO: 1995150 - RNA, 19 nt, Artificial Sequence
  Description of Artificial Sequence: Synthetic oligonucleotide
  Sense strand starting at position 2405 of SEQ ID NO: 1880805
uugucauccgcauaugaua

SEQ ID NO: 1995151 - RNA, 19 nt, Artificial Sequence
  Description of Artificial Sequence: Synthetic oligonucleotide
  Antisense strand to SEQ ID NO: 1995150
uaucauaugcggaugacaa

SEQ ID NO: 1995152 - RNA, 19 nt, Artificial Sequence
  Description of Artificial Sequence: Synthetic oligonucleotide
  Sense strand starting at position 2429 of SEQ ID NO: 1880805
ggacaugcucugcacugua

SEQ ID NO: 1995153 - RNA, 19 nt, Artificial Sequence
  Description of Artificial Sequence: Synthetic oligonucleotide
  Antisense strand to SEQ ID NO: 1995152
uacagugcagagcaugucc

SEQ ID NO: 1995154 - RNA, 19 nt, Artificial Sequence
  Description of Artificial Sequence: Synthetic oligonucleotide
  Sense strand starting at position 2641 of SEQ ID NO: 1880805
agguaucgauuccuucuau

SEQ ID NO: 1995155 - RNA, 19 nt, Artificial Sequence
  Description of Artificial Sequence: Synthetic oligonucleotide
  Antisense strand to SEQ ID NO: 1995154
auagaaggaaucgauaccu

SEQ ID NO: 1995156 - RNA, 19 nt, Artificial Sequence
  Description of Artificial Sequence: Synthetic oligonucleotide
  Sense strand starting at position 2658 of SEQ ID NO: 1880805
augcaugcagaguagauau

SEQ ID NO: 1995157 - RNA, 19 nt, Artificial Sequence
  Description of Artificial Sequence: Synthetic oligonucleotide
  Antisense strand to SEQ ID NO: 1995156
auaucuacucugcaugcau

SEQ ID NO: 1995158 - RNA, 19 nt, Artificial Sequence
  Description of Artificial Sequence: Synthetic oligonucleotide
  Sense strand starting at position 2710 of SEQ ID NO: 1880805
cagaaauagucugccugag

SEQ ID NO: 1995159 - RNA, 19 nt, Artificial Sequence
  Description of Artificial Sequence: Synthetic oligonucleotide
  Antisense strand to SEQ ID NO: 1995158
cucaggcagacuauuucug

SEQ ID NO: 1995160 - RNA, 19 nt, Artificial Sequence
  Description of Artificial Sequence: Synthetic oligonucleotide
  Sense strand starting at position 2712 of SEQ ID NO: 1880805
gaaauagucugccugagag

SEQ ID NO: 1995161 - RNA, 19 nt, Artificial Sequence
  Description of Artificial Sequence: Synthetic oligonucleotide
  Antisense strand to SEQ ID NO: 1995160
cucucaggcagacuauuuc

SEQ ID NO: 1995162 - RNA, 19 nt, Artificial Sequence
  Description of Artificial Sequence: Synthetic oligonucleotide
  Sense strand starting at position 2714 of SEQ ID NO: 1880805
aauagucugccugagagau

SEQ ID NO: 1995163 - RNA, 19 nt, Artificial Sequence
  Description of Artificial Sequence: Synthetic oligonucleotide
  Antisense strand to SEQ ID NO: 1995162
aucucucaggcagacuauu

SEQ ID NO: 1995164 - RNA, 19 nt, Artificial Sequence
  Description of Artificial Sequence: Synthetic oligonucleotide
  Sense strand starting at position 2737 of SEQ ID NO: 1880805
uguggauacugcuugaauu

SEQ ID NO: 1995165 - RNA, 19 nt, Artificial Sequence
  Description of Artificial Sequence: Synthetic oligonucleotide
  Antisense strand to SEQ ID NO: 1995164
aauucaagcaguauccaca

SEQ ID NO: 1995166 - RNA, 19 nt, Artificial Sequence
  Description of Artificial Sequence: Synthetic oligonucleotide
  Sense strand starting at position 2738 of SEQ ID NO: 1880805
guggauacugcuugaauua

SEQ ID NO: 1995167 - RNA, 19 nt, Artificial Sequence
  Description of Artificial Sequence: Synthetic oligonucleotide
  Antisense strand to SEQ ID NO: 1995166
uaauucaagcaguauccac

SEQ ID NO: 1995168 - RNA, 19 nt, Artificial Sequence
  Description of Artificial Sequence: Synthetic oligonucleotide
  Sense strand starting at position 2789 of SEQ ID NO: 1880805
gauauucuucuagguauug

SEQ ID NO: 1995169 - RNA, 19 nt, Artificial Sequence
  Description of Artificial Sequence: Synthetic oligonucleotide
  Antisense strand to SEQ ID NO: 1995168
caauaccuagaagaauauc

SEQ ID NO: 1995170 - RNA, 19 nt, Artificial Sequence
  Description of Artificial Sequence: Synthetic oligonucleotide
  Sense strand starting at position 2790 of SEQ ID NO: 1880805
auauucuucuagguauugu

SEQ ID NO: 1995171 - RNA, 19 nt, Artificial Sequence
  Description of Artificial Sequence: Synthetic oligonucleotide
  Antisense strand to SEQ ID NO: 1995170
acaauaccuagaagaauau

SEQ ID NO: 1995172 - RNA, 19 nt, Artificial Sequence
  Description of Artificial Sequence: Synthetic oligonucleotide
  Sense strand starting at position 2958 of SEQ ID NO: 1880805
agcaaauugcaguaugcua

SEQ ID NO: 1995173 - RNA, 19 nt, Artificial Sequence
  Description of Artificial Sequence: Synthetic oligonucleotide
  Antisense strand to SEQ ID NO: 1995172
uagcauacugcaauuugcu

SEQ ID NO: 1995174 - RNA, 19 nt, Artificial Sequence
  Description of Artificial Sequence: Synthetic oligonucleotide
  Sense strand starting at position 3076 of SEQ ID NO: 1880805
ucaaauucuggauaguagu

SEQ ID NO: 1995175 - RNA, 19 nt, Artificial Sequence
  Description of Artificial Sequence: Synthetic oligonucleotide
  Antisense strand to SEQ ID NO: 1995174
acuacuauccagaauuuga

SEQ ID NO: 1995176 - RNA, 19 nt, Artificial Sequence
  Description of Artificial Sequence: Synthetic oligonucleotide
  Sense strand starting at position 3217 of SEQ ID NO: 1880805
uagguacaggaauguuaua

SEQ ID NO: 1995177 - RNA, 19 nt, Artificial Sequence
  Description of Artificial Sequence: Synthetic oligonucleotide
  Antisense strand to SEQ ID NO: 1995176
uauaacauuccuguaccua

SEQ ID NO: 1995178 - RNA, 19 nt, Artificial Sequence
  Description of Artificial Sequence: Synthetic oligonucleotide
  Sense strand starting at position 3241 of SEQ ID NO: 1880805
acuuuagaaugcuugcaaa

SEQ ID NO: 1995179 - RNA, 19 nt, Artificial Sequence
  Description of Artificial Sequence: Synthetic oligonucleotide
  Antisense strand to SEQ ID NO: 1995178
uuugcaagcauucuaaagu

SEQ ID NO: 1995180 - RNA, 19 nt, Artificial Sequence
  Description of Artificial Sequence: Synthetic oligonucleotide
  Sense strand starting at position 3295 of SEQ ID NO: 1880805
uuugacuauuagccaggaa

SEQ ID NO: 1995181 - RNA, 19 nt, Artificial Sequence
  Description of Artificial Sequence: Synthetic oligonucleotide
  Antisense strand to SEQ ID NO: 1995180
uuccuggcuaauagucaaa

SEQ ID NO: 1995182 - RNA, 19 nt, Artificial Sequence
  Description of Artificial Sequence: Synthetic oligonucleotide
  Sense strand starting at position 3319 of SEQ ID NO: 1880805
uagugaagggcugagucua

SEQ ID NO: 1995183 - RNA, 19 nt, Artificial Sequence
  Description of Artificial Sequence: Synthetic oligonucleotide
  Antisense strand to SEQ ID NO: 1995182
uagacucagcccuucacua

SEQ ID NO: 1995184 - RNA, 19 nt, Artificial Sequence
  Description of Artificial Sequence: Synthetic oligonucleotide
  Sense strand starting at position 3352 of SEQ ID NO: 1880805
cacuguaguguguaagaga

SEQ ID NO: 1995185 - RNA, 19 nt, Artificial Sequence
  Description of Artificial Sequence: Synthetic oligonucleotide
  Antisense strand to SEQ ID NO: 1995184
ucucuuacacacuacagug

SEQ ID NO: 1995186 - RNA, 19 nt, Artificial Sequence
  Description of Artificial Sequence: Synthetic oligonucleotide
  Sense strand starting at position 3507 of SEQ ID NO: 1880805
uuguaaguguaucucaaug

SEQ ID NO: 1995187 - RNA, 19 nt, Artificial Sequence
  Description of Artificial Sequence: Synthetic oligonucleotide
  Antisense strand to SEQ ID NO: 1995186
cauugagauacacuuacaa

SEQ ID NO: 1995188 - RNA, 19 nt, Artificial Sequence
  Description of Artificial Sequence: Synthetic oligonucleotide
  Sense strand starting at position 3908 of SEQ ID NO: 1880805
ugcaguguuagccagagag

SEQ ID NO: 1995189 - RNA, 19 nt, Artificial Sequence
  Description of Artificial Sequence: Synthetic oligonucleotide
  Antisense strand to SEQ ID NO: 1995188
cucucuggcuaacacugca

SEQ ID NO: 1995190 - RNA, 19 nt, Artificial Sequence
  Description of Artificial Sequence: Synthetic oligonucleotide
  Sense strand starting at position 112 of SEQ ID NO: 1880806
cucccaugcccaggaagau

SEQ ID NO: 1995191 - RNA, 19 nt, Artificial Sequence
  Description of Artificial Sequence: Synthetic oligonucleotide
  Antisense strand to SEQ ID NO: 1995190
aucuuccugggcaugggag

SEQ ID NO: 1995192 - RNA, 19 nt, Artificial Sequence
  Description of Artificial Sequence: Synthetic oligonucleotide
  Sense strand starting at position 121 of SEQ ID NO: 1880806
ccaggaagauccuuccacu

SEQ ID NO: 1995193 - RNA, 19 nt, Artificial Sequence
  Description of Artificial Sequence: Synthetic oligonucleotide
  Antisense strand to SEQ ID NO: 1995192
aguggaaggaucuuccugg

SEQ ID NO: 1995194 - RNA, 19 nt, Artificial Sequence
  Description of Artificial Sequence: Synthetic oligonucleotide
  Sense strand starting at position 127 of SEQ ID NO: 1880806
agauccuuccacugccaga

SEQ ID NO: 1995195 - RNA, 19 nt, Artificial Sequence
  Description of Artificial Sequence: Synthetic oligonucleotide
  Antisense strand to SEQ ID NO: 1995194
ucuggcaguggaaggaucu

SEQ ID NO: 1995196 - RNA, 19 nt, Artificial Sequence
  Description of Artificial Sequence: Synthetic oligonucleotide
  Sense strand starting at position 211 of SEQ ID NO: 1880806
cugcguaucucugaggguu

SEQ ID NO: 1995197 - RNA, 19 nt, Artificial Sequence
  Description of Artificial Sequence: Synthetic oligonucleotide
  Antisense strand to SEQ ID NO: 1995196
aacccucagagauacgcag

SEQ ID NO: 1995198 - RNA, 19 nt, Artificial Sequence
  Description of Artificial Sequence: Synthetic oligonucleotide
  Sense strand starting at position 456 of SEQ ID NO: 1880806
gccuguguccuuugccaca

SEQ ID NO: 1995199 - RNA, 19 nt, Artificial Sequence
  Description of Artificial Sequence: Synthetic oligonucleotide
  Antisense strand to SEQ ID NO: 1995198
uguggcaaaggacacaggc

SEQ ID NO: 1995200 - RNA, 19 nt, Artificial Sequence
  Description of Artificial Sequence: Synthetic oligonucleotide
  Sense strand starting at position 603 of SEQ ID NO: 1880806
aggguagagucacucacaa

SEQ ID NO: 1995201 - RNA, 19 nt, Artificial Sequence
  Description of Artificial Sequence: Synthetic oligonucleotide
  Antisense strand to SEQ ID NO: 1995200
uugugagugacucuacccu

SEQ ID NO: 1995202 - RNA, 19 nt, Artificial Sequence
  Description of Artificial Sequence: Synthetic oligonucleotide
  Sense strand starting at position 947 of SEQ ID NO: 1880806
uagguugagguauguguuu

SEQ ID NO: 1995203 - RNA, 19 nt, Artificial Sequence
  Description of Artificial Sequence: Synthetic oligonucleotide
  Antisense strand to SEQ ID NO: 1995202
aaacacauaccucaaccua

SEQ ID NO: 1995204 - RNA, 19 nt, Artificial Sequence
  Description of Artificial Sequence: Synthetic oligonucleotide
  Sense strand starting at position 1005 of SEQ ID NO: 1880806
ggcgcucuggcaugaugaa

SEQ ID NO: 1995205 - RNA, 19 nt, Artificial Sequence
  Description of Artificial Sequence: Synthetic oligonucleotide
  Antisense strand to SEQ ID NO: 1995204
uucaucaugccagagcgcc

SEQ ID NO: 1995206 - RNA, 19 nt, Artificial Sequence
  Description of Artificial Sequence: Synthetic oligonucleotide
  Sense strand starting at position 1006 of SEQ ID NO: 1880806
gcgcucuggcaugaugaau

SEQ ID NO: 1995207 - RNA, 19 nt, Artificial Sequence
  Description of Artificial Sequence: Synthetic oligonucleotide
  Antisense strand to SEQ ID NO: 1995206
auucaucaugccagagcgc

SEQ ID NO: 1995208 - RNA, 19 nt, Artificial Sequence
  Description of Artificial Sequence: Synthetic oligonucleotide
  Sense strand starting at position 1099 of SEQ ID NO: 1880806
ugcagagacucuccaacuu

SEQ ID NO: 1995209 - RNA, 19 nt, Artificial Sequence
  Description of Artificial Sequence: Synthetic oligonucleotide
  Antisense strand to SEQ ID NO: 1995208
aaguuggagagucucugca

SEQ ID NO: 1995210 - RNA, 19 nt, Artificial Sequence
  Description of Artificial Sequence: Synthetic oligonucleotide
  Sense strand starting at position 1122 of SEQ ID NO: 1880806
acagaugacuaaggaaacu

SEQ ID NO: 1995211 - RNA, 19 nt, Artificial Sequence
  Description of Artificial Sequence: Synthetic oligonucleotide
  Antisense strand to SEQ ID NO: 1995210
aguuuccuuagucaucugu

SEQ ID NO: 1995212 - RNA, 19 nt, Artificial Sequence
  Description of Artificial Sequence: Synthetic oligonucleotide
  Sense strand starting at position 1316 of SEQ ID NO: 1880806
uggugaguuuagggacaau

SEQ ID NO: 1995213 - RNA, 19 nt, Artificial Sequence
  Description of Artificial Sequence: Synthetic oligonucleotide
  Antisense strand to SEQ ID NO: 1995212
auugucccuaaacucacca

SEQ ID NO: 1995214 - RNA, 19 nt, Artificial Sequence
  Description of Artificial Sequence: Synthetic oligonucleotide
  Sense strand starting at position 2130 of SEQ ID NO: 1880806
ucgcucaguccucggacua

SEQ ID NO: 1995215 - RNA, 19 nt, Artificial Sequence
  Description of Artificial Sequence: Synthetic oligonucleotide
  Antisense strand to SEQ ID NO: 1995214
uaguccgaggacugagcga

SEQ ID NO: 1995216 - RNA, 19 nt, Artificial Sequence
  Description of Artificial Sequence: Synthetic oligonucleotide
  Sense strand starting at position 2328 of SEQ ID NO: 1880806
gcguucuugccacccgaua

SEQ ID NO: 1995217 - RNA, 19 nt, Artificial Sequence
  Description of Artificial Sequence: Synthetic oligonucleotide
  Antisense strand to SEQ ID NO: 1995216
uaucggguggcaagaacgc

SEQ ID NO: 1995218 - RNA, 19 nt, Artificial Sequence
  Description of Artificial Sequence: Synthetic oligonucleotide
  Sense strand starting at position 2333 of SEQ ID NO: 1880806
cuugccacccgauaguuua

SEQ ID NO: 1995219 - RNA, 19 nt, Artificial Sequence
  Description of Artificial Sequence: Synthetic oligonucleotide
  Antisense strand to SEQ ID NO: 1995218
uaaacuaucggguggcaag

SEQ ID NO: 1995220 - RNA, 19 nt, Artificial Sequence
  Description of Artificial Sequence: Synthetic oligonucleotide
  Sense strand starting at position 2430 of SEQ ID NO: 1880806
gggccauucugccgggauu

SEQ ID NO: 1995221 - RNA, 19 nt, Artificial Sequence
  Description of Artificial Sequence: Synthetic oligonucleotide
  Antisense strand to SEQ ID NO: 1995220
aaucccggcagaauggccc

SEQ ID NO: 1995222 - RNA, 19 nt, Artificial Sequence
  Description of Artificial Sequence: Synthetic oligonucleotide
  Sense strand starting at position 2431 of SEQ ID NO: 1880806
ggccauucugccgggauuu

SEQ ID NO: 1995223 - RNA, 19 nt, Artificial Sequence
  Description of Artificial Sequence: Synthetic oligonucleotide
  Antisense strand to SEQ ID NO: 1995222
aaaucccggcagaauggcc

SEQ ID NO: 1995224 - RNA, 19 nt, Artificial Sequence
  Description of Artificial Sequence: Synthetic oligonucleotide
  Sense strand starting at position 2497 of SEQ ID NO: 1880806
guuaaagccuccugcuuaa

SEQ ID NO: 1995225 - RNA, 19 nt, Artificial Sequence
  Description of Artificial Sequence: Synthetic oligonucleotide
  Antisense strand to SEQ ID NO: 1995224
uuaagcaggaggcuuuaac

SEQ ID NO: 1995226 - RNA, 19 nt, Artificial Sequence
  Description of Artificial Sequence: Synthetic oligonucleotide
  Sense strand starting at position 2560 of SEQ ID NO: 1880806
gagagacuuucugggacca

SEQ ID NO: 1995227 - RNA, 19 nt, Artificial Sequence
  Description of Artificial Sequence: Synthetic oligonucleotide
  Antisense strand to SEQ ID NO: 1995226
uggucccagaaagucucuc

SEQ ID NO: 1995228 - RNA, 19 nt, Artificial Sequence
  Description of Artificial Sequence: Synthetic oligonucleotide
  Sense strand starting at position 2562 of SEQ ID NO: 1880806
gagacuuucugggaccaga

SEQ ID NO: 1995229 - RNA, 19 nt, Artificial Sequence
  Description of Artificial Sequence: Synthetic oligonucleotide
  Antisense strand to SEQ ID NO: 1995228
ucuggucccagaaagucuc

SEQ ID NO: 1995230 - RNA, 19 nt, Artificial Sequence
  Description of Artificial Sequence: Synthetic oligonucleotide
  Sense strand starting at position 2711 of SEQ ID NO: 1880806
ugaaacuguuucuuaagga

SEQ ID NO: 1995231 - RNA, 19 nt, Artificial Sequence
  Description of Artificial Sequence: Synthetic oligonucleotide
  Antisense strand to SEQ ID NO: 1995230
uccuuaagaaacaguuuca

SEQ ID NO: 1995232 - RNA, 19 nt, Artificial Sequence
  Description of Artificial Sequence: Synthetic oligonucleotide
  Sense strand starting at position 2822 of SEQ ID NO: 1880806
uguauuagggccugguuau

SEQ ID NO: 1995233 - RNA, 19 nt, Artificial Sequence
  Description of Artificial Sequence: Synthetic oligonucleotide
  Antisense strand to SEQ ID NO: 1995232
auaaccaggcccuaauaca

SEQ ID NO: 1995234 - RNA, 19 nt, Artificial Sequence
  Description of Artificial Sequence: Synthetic oligonucleotide
  Sense strand starting at position 2823 of SEQ ID NO: 1880806
guauuagggccugguuaug

SEQ ID NO: 1995235 - RNA, 19 nt, Artificial Sequence
  Description of Artificial Sequence: Synthetic oligonucleotide
  Antisense strand to SEQ ID NO: 1995234
cauaaccaggcccuaauac

SEQ ID NO: 1995236 - RNA, 19 nt, Artificial Sequence
  Description of Artificial Sequence: Synthetic oligonucleotide
  Sense strand starting at position 3110 of SEQ ID NO: 1880806
uggcuagaucgauacugau

SEQ ID NO: 1995237 - RNA, 19 nt, Artificial Sequence
  Description of Artificial Sequence: Synthetic oligonucleotide
  Antisense strand to SEQ ID NO: 1995236
aucaguaucgaucuagcca

SEQ ID NO: 1995238 - RNA, 19 nt, Artificial Sequence
  Description of Artificial Sequence: Synthetic oligonucleotide
  Sense strand starting at position 3116 of SEQ ID NO: 1880806
gaucgauacugaucguuau

SEQ ID NO: 1995239 - RNA, 19 nt, Artificial Sequence
  Description of Artificial Sequence: Synthetic oligonucleotide
  Antisense strand to SEQ ID NO: 1995238
auaacgaucaguaucgauc

SEQ ID NO: 1995240 - RNA, 19 nt, Artificial Sequence
  Description of Artificial Sequence: Synthetic oligonucleotide
  Sense strand starting at position 3117 of SEQ ID NO: 1880806
aucgauacugaucguuauu

SEQ ID NO: 1995241 - RNA, 19 nt, Artificial Sequence
  Description of Artificial Sequence: Synthetic oligonucleotide
  Antisense strand to SEQ ID NO: 1995240
aauaacgaucaguaucgau

SEQ ID NO: 1995242 - RNA, 19 nt, Artificial Sequence
  Description of Artificial Sequence: Synthetic oligonucleotide
  Sense strand starting at position 3119 of SEQ ID NO: 1880806
cgauacugaucguuauuga

SEQ ID NO: 1995243 - RNA, 19 nt, Artificial Sequence
  Description of Artificial Sequence: Synthetic oligonucleotide
  Antisense strand to SEQ ID NO: 1995242
ucaauaacgaucaguaucg

SEQ ID NO: 1995244 - RNA, 19 nt, Artificial Sequence
  Description of Artificial Sequence: Synthetic oligonucleotide
  Sense strand starting at position 3120 of SEQ ID NO: 1880806
gauacugaucguuauugac

SEQ ID NO: 1995245 - RNA, 19 nt, Artificial Sequence
  Description of Artificial Sequence: Synthetic oligonucleotide
  Antisense strand to SEQ ID NO: 1995244
gucaauaacgaucaguauc

SEQ ID NO: 1995246 - RNA, 19 nt, Artificial Sequence
  Description of Artificial Sequence: Synthetic oligonucleotide
  Sense strand starting at position 3809 of SEQ ID NO: 1880806
ugugauaggucccuugaug

SEQ ID NO: 1995247 - RNA, 19 nt, Artificial Sequence
  Description of Artificial Sequence: Synthetic oligonucleotide
  Antisense strand to SEQ ID NO: 1995246
caucaagggaccuaucaca

SEQ ID NO: 1995248 - RNA, 19 nt, Artificial Sequence
  Description of Artificial Sequence: Synthetic oligonucleotide
  Sense strand starting at position 2128 of SEQ ID NO: 1880807
cccgcuagucccugaacau

SEQ ID NO: 1995249 - RNA, 19 nt, Artificial Sequence
  Description of Artificial Sequence: Synthetic oligonucleotide
  Antisense strand to SEQ ID NO: 1995248
auguucagggacuagcggg

SEQ ID NO: 1995250 - RNA, 19 nt, Artificial Sequence
  Description of Artificial Sequence: Synthetic oligonucleotide
  Sense strand starting at position 2129 of SEQ ID NO: 1880807
ccgcuagucccugaacauc

SEQ ID NO: 1995251 - RNA, 19 nt, Artificial Sequence
  Description of Artificial Sequence: Synthetic oligonucleotide
  Antisense strand to SEQ ID NO: 1995250
gauguucagggacuagcgg

SEQ ID NO: 1995252 - RNA, 19 nt, Artificial Sequence
  Description of Artificial Sequence: Synthetic oligonucleotide
  Sense strand starting at position 2776 of SEQ ID NO: 1880807
cagauuagggaguguggaa

SEQ ID NO: 1995253 - RNA, 19 nt, Artificial Sequence
  Description of Artificial Sequence: Synthetic oligonucleotide
  Antisense strand to SEQ ID NO: 1995252
uuccacacucccuaaucug

SEQ ID NO: 1995254 - RNA, 19 nt, Artificial Sequence
  Description of Artificial Sequence: Synthetic oligonucleotide
  Sense strand starting at position 2800 of SEQ ID NO: 1880807
ccagauccauacuguucua

SEQ ID NO: 1995255 - RNA, 19 nt, Artificial Sequence
  Description of Artificial Sequence: Synthetic oligonucleotide
  Antisense strand to SEQ ID NO: 1995254
uagaacaguauggaucugg

SEQ ID NO: 1995256 - RNA, 19 nt, Artificial Sequence
  Description of Artificial Sequence: Synthetic oligonucleotide
  Sense strand starting at position 2803 of SEQ ID NO: 1880807
gauccauacuguucuaagg

SEQ ID NO: 1995257 - RNA, 19 nt, Artificial Sequence
  Description of Artificial Sequence: Synthetic oligonucleotide
  Antisense strand to SEQ ID NO: 1995256
ccuuagaacaguauggauc

SEQ ID NO: 1995258 - RNA, 19 nt, Artificial Sequence
  Description of Artificial Sequence: Synthetic oligonucleotide
  Sense strand starting at position 2868 of SEQ ID NO: 1880807
uucugacaguucuuauuau

SEQ ID NO: 1995259 - RNA, 19 nt, Artificial Sequence
  Description of Artificial Sequence: Synthetic oligonucleotide
  Antisense strand to SEQ ID NO: 1995258
auaauaagaacugucagaa

SEQ ID NO: 1995260 - RNA, 19 nt, Artificial Sequence
  Description of Artificial Sequence: Synthetic oligonucleotide
  Sense strand starting at position 2869 of SEQ ID NO: 1880807
ucugacaguucuuauuauu

SEQ ID NO: 1995261 - RNA, 19 nt, Artificial Sequence
  Description of Artificial Sequence: Synthetic oligonucleotide
  Antisense strand to SEQ ID NO: 1995260
aauaauaagaacugucaga

SEQ ID NO: 1995262 - RNA, 19 nt, Artificial Sequence
  Description of Artificial Sequence: Synthetic oligonucleotide
  Sense strand starting at position 2894 of SEQ ID NO: 1880807
agaauaauugacugugcca

SEQ ID NO: 1995263 - RNA, 19 nt, Artificial Sequence
  Description of Artificial Sequence: Synthetic oligonucleotide
  Antisense strand to SEQ ID NO: 1995262
uggcacagucaauuauucu

SEQ ID NO: 1995264 - RNA, 19 nt, Artificial Sequence
  Description of Artificial Sequence: Synthetic oligonucleotide
  Sense strand starting at position 2961 of SEQ ID NO: 1880807
uuaagcuaucuugguguuu

SEQ ID NO: 1995265 - RNA, 19 nt, Artificial Sequence
  Description of Artificial Sequence: Synthetic oligonucleotide
  Antisense strand to SEQ ID NO: 1995264
aaacaccaagauagcuuaa

SEQ ID NO: 1995266 - RNA, 19 nt, Artificial Sequence
  Description of Artificial Sequence: Synthetic oligonucleotide
  Sense strand starting at position 3217 of SEQ ID NO: 1880807
gcguauuccucuuccuuau

SEQ ID NO: 1995267 - RNA, 19 nt, Artificial Sequence
  Description of Artificial Sequence: Synthetic oligonucleotide
  Antisense strand to SEQ ID NO: 1995266
auaaggaagaggaauacgc

SEQ ID NO: 1995268 - RNA, 19 nt, Artificial Sequence
  Description of Artificial Sequence: Synthetic oligonucleotide
  Sense strand starting at position 3244 of SEQ ID NO: 1880807
guucuuaccuuucucagca

SEQ ID NO: 1995269 - RNA, 19 nt, Artificial Sequence
  Description of Artificial Sequence: Synthetic oligonucleotide
  Antisense strand to SEQ ID NO: 1995268
ugcugagaaagguaagaac

SEQ ID NO: 1995270 - RNA, 19 nt, Artificial Sequence
  Description of Artificial Sequence: Synthetic oligonucleotide
  Sense strand starting at position 3267 of SEQ ID NO: 1880807
auaaguuacuuccuuuguu

SEQ ID NO: 1995271 - RNA, 19 nt, Artificial Sequence
  Description of Artificial Sequence: Synthetic oligonucleotide
  Antisense strand to SEQ ID NO: 1995270
aacaaaggaaguaacuuau

SEQ ID NO: 1995272 - RNA, 19 nt, Artificial Sequence
  Description of Artificial Sequence: Synthetic oligonucleotide
  Sense strand starting at position 3392 of SEQ ID NO: 1880807
cggaggacgugucagguua

SEQ ID NO: 1995273 - RNA, 19 nt, Artificial Sequence
  Description of Artificial Sequence: Synthetic oligonucleotide
  Antisense strand to SEQ ID NO: 1995272
uaaccugacacguccuccg

SEQ ID NO: 1995274 - RNA, 19 nt, Artificial Sequence
  Description of Artificial Sequence: Synthetic oligonucleotide
  Sense strand starting at position 3394 of SEQ ID NO: 1880807
gaggacgugucagguuaua

SEQ ID NO: 1995275 - RNA, 19 nt, Artificial Sequence
  Description of Artificial Sequence: Synthetic oligonucleotide
  Antisense strand to SEQ ID NO: 1995274
uauaaccugacacguccuc

SEQ ID NO: 1995276 - RNA, 19 nt, Artificial Sequence
  Description of Artificial Sequence: Synthetic oligonucleotide
  Sense strand starting at position 3561 of SEQ ID NO: 1880807
acagcuauccugggaaaca

SEQ ID NO: 1995277 - RNA, 19 nt, Artificial Sequence
  Description of Artificial Sequence: Synthetic oligonucleotide
  Antisense strand to SEQ ID NO: 1995276
uguuucccaggauagcugu

SEQ ID NO: 1995278 - RNA, 19 nt, Artificial Sequence
  Description of Artificial Sequence: Synthetic oligonucleotide
  Sense strand starting at position 3588 of SEQ ID NO: 1880807
uugaaugaggccuggaauu

SEQ ID NO: 1995279 - RNA, 19 nt, Artificial Sequence
  Description of Artificial Sequence: Synthetic oligonucleotide
  Antisense strand to SEQ ID NO: 1995278
aauuccaggccucauucaa

SEQ ID NO: 1995280 - RNA, 19 nt, Artificial Sequence
  Description of Artificial Sequence: Synthetic oligonucleotide
  Sense strand starting at position 3640 of SEQ ID NO: 1880807
aggcucgaaucccagauaa

SEQ ID NO: 1995281 - RNA, 19 nt, Artificial Sequence
  Description of Artificial Sequence: Synthetic oligonucleotide
  Antisense strand to SEQ ID NO: 1995280
uuaucugggauucgagccu

SEQ ID NO: 1995282 - RNA, 19 nt, Artificial Sequence
  Description of Artificial Sequence: Synthetic oligonucleotide
  Sense strand starting at position 3642 of SEQ ID NO: 1880807
gcucgaaucccagauaaca

SEQ ID NO: 1995283 - RNA, 19 nt, Artificial Sequence
  Description of Artificial Sequence: Synthetic oligonucleotide
  Antisense strand to SEQ ID NO: 1995282
uguuaucugggauucgagc

SEQ ID NO: 1995284 - RNA, 19 nt, Artificial Sequence
  Description of Artificial Sequence: Synthetic oligonucleotide
  Sense strand starting at position 3664 of SEQ ID NO: 1880807
agauauaccuaaggauauu

SEQ ID NO: 1995285 - RNA, 19 nt, Artificial Sequence
  Description of Artificial Sequence: Synthetic oligonucleotide
  Antisense strand to SEQ ID NO: 1995284
aauauccuuagguauaucu

SEQ ID NO: 1995286 - RNA, 19 nt, Artificial Sequence
  Description of Artificial Sequence: Synthetic oligonucleotide
  Sense strand starting at position 3680 of SEQ ID NO: 1880807
auuuaaccuuagugugaau

SEQ ID NO: 1995287 - RNA, 19 nt, Artificial Sequence
  Description of Artificial Sequence: Synthetic oligonucleotide
  Antisense strand to SEQ ID NO: 1995286
auucacacuaagguuaaau

SEQ ID NO: 1995288 - RNA, 19 nt, Artificial Sequence
  Description of Artificial Sequence: Synthetic oligonucleotide
  Sense strand starting at position 3687 of SEQ ID NO: 1880807
cuuagugugaaugggucau

SEQ ID NO: 1995289 - RNA, 19 nt, Artificial Sequence
  Description of Artificial Sequence: Synthetic oligonucleotide
  Antisense strand to SEQ ID NO: 1995288
augacccauucacacuaag

SEQ ID NO: 1995290 - RNA, 19 nt, Artificial Sequence
  Description of Artificial Sequence: Synthetic oligonucleotide
  Sense strand starting at position 3837 of SEQ ID NO: 1880807
cagaauuggccuuggauag

SEQ ID NO: 1995291 - RNA, 19 nt, Artificial Sequence
  Description of Artificial Sequence: Synthetic oligonucleotide
  Antisense strand to SEQ ID NO: 1995290
cuauccaaggccaauucug

SEQ ID NO: 1995292 - RNA, 19 nt, Artificial Sequence
  Description of Artificial Sequence: Synthetic oligonucleotide
  Sense strand starting at position 3844 of SEQ ID NO: 1880807
ggccuuggauagcacaauu

SEQ ID NO: 1995293 - RNA, 19 nt, Artificial Sequence
  Description of Artificial Sequence: Synthetic oligonucleotide
  Antisense strand to SEQ ID NO: 1995292
aauugugcuauccaaggcc

SEQ ID NO: 1995294 - RNA, 19 nt, Artificial Sequence
  Description of Artificial Sequence: Synthetic oligonucleotide
  Sense strand starting at position 128 of SEQ ID NO: 1880808
aguccagugugauuaggau

SEQ ID NO: 1995295 - RNA, 19 nt, Artificial Sequence
  Description of Artificial Sequence: Synthetic oligonucleotide
  Antisense strand to SEQ ID NO: 1995294
auccuaaucacacuggacu

SEQ ID NO: 1995296 - RNA, 19 nt, Artificial Sequence
  Description of Artificial Sequence: Synthetic oligonucleotide
  Sense strand starting at position 134 of SEQ ID NO: 1880808
gugugauuaggauguauug

SEQ ID NO: 1995297 - RNA, 19 nt, Artificial Sequence
  Description of Artificial Sequence: Synthetic oligonucleotide
  Antisense strand to SEQ ID NO: 1995296
caauacauccuaaucacac

SEQ ID NO: 1995298 - RNA, 19 nt, Artificial Sequence
  Description of Artificial Sequence: Synthetic oligonucleotide
  Sense strand starting at position 143 of SEQ ID NO: 1880808
ggauguauugagugaagac

SEQ ID NO: 1995299 - RNA, 19 nt, Artificial Sequence
  Description of Artificial Sequence: Synthetic oligonucleotide
  Antisense strand to SEQ ID NO: 1995298
gucuucacucaauacaucc

SEQ ID NO: 1995300 - RNA, 19 nt, Artificial Sequence
  Description of Artificial Sequence: Synthetic oligonucleotide
  Sense strand starting at position 195 of SEQ ID NO: 1880808
uggguccuugguuaagagu

SEQ ID NO: 1995301 - RNA, 19 nt, Artificial Sequence
  Description of Artificial Sequence: Synthetic oligonucleotide
  Antisense strand to SEQ ID NO: 1995300
acucuuaaccaaggaccca

SEQ ID NO: 1995302 - RNA, 19 nt, Artificial Sequence
  Description of Artificial Sequence: Synthetic oligonucleotide
  Sense strand starting at position 447 of SEQ ID NO: 1880808
gguggauuguaagcaaaga

SEQ ID NO: 1995303 - RNA, 19 nt, Artificial Sequence
  Description of Artificial Sequence: Synthetic oligonucleotide
  Antisense strand to SEQ ID NO: 1995302
ucuuugcuuacaauccacc

SEQ ID NO: 1995304 - RNA, 19 nt, Artificial Sequence
  Description of Artificial Sequence: Synthetic oligonucleotide
  Sense strand starting at position 512 of SEQ ID NO: 1880808
cgggcuguacggagguaau

SEQ ID NO: 1995305 - RNA, 19 nt, Artificial Sequence
  Description of Artificial Sequence: Synthetic oligonucleotide
  Antisense strand to SEQ ID NO: 1995304
auuaccuccguacagcccg

SEQ ID NO: 1995306 - RNA, 19 nt, Artificial Sequence
  Description of Artificial Sequence: Synthetic oligonucleotide
  Sense strand starting at position 543 of SEQ ID NO: 1880808
agccuuaaggcugauauag

SEQ ID NO: 1995307 - RNA, 19 nt, Artificial Sequence
  Description of Artificial Sequence: Synthetic oligonucleotide
  Antisense strand to SEQ ID NO: 1995306
cuauaucagccuuaaggcu

SEQ ID NO: 1995308 - RNA, 19 nt, Artificial Sequence
  Description of Artificial Sequence: Synthetic oligonucleotide
  Sense strand starting at position 584 of SEQ ID NO: 1880808
ugguuugggccgaguuaga

SEQ ID NO: 1995309 - RNA, 19 nt, Artificial Sequence
  Description of Artificial Sequence: Synthetic oligonucleotide
  Antisense strand to SEQ ID NO: 1995308
ucuaacucggcccaaacca

SEQ ID NO: 1995310 - RNA, 19 nt, Artificial Sequence
  Description of Artificial Sequence: Synthetic oligonucleotide
  Sense strand starting at position 650 of SEQ ID NO: 1880808
uggcaagaaacugaguguu

SEQ ID NO: 1995311 - RNA, 19 nt, Artificial Sequence
  Description of Artificial Sequence: Synthetic oligonucleotide
  Antisense strand to SEQ ID NO: 1995310
aacacucaguuucuugcca

SEQ ID NO: 1995312 - RNA, 19 nt, Artificial Sequence
  Description of Artificial Sequence: Synthetic oligonucleotide
  Sense strand starting at position 652 of SEQ ID NO: 1880808
gcaagaaacugaguguuua

SEQ ID NO: 1995313 - RNA, 19 nt, Artificial Sequence
  Description of Artificial Sequence: Synthetic oligonucleotide
  Antisense strand to SEQ ID NO: 1995312
uaaacacucaguuucuugc

SEQ ID NO: 1995314 - RNA, 19 nt, Artificial Sequence
  Description of Artificial Sequence: Synthetic oligonucleotide
  Sense strand starting at position 653 of SEQ ID NO: 1880808
caagaaacugaguguuuau

SEQ ID NO: 1995315 - RNA, 19 nt, Artificial Sequence
  Description of Artificial Sequence: Synthetic oligonucleotide
  Antisense strand to SEQ ID NO: 1995314
auaaacacucaguuucuug

SEQ ID NO: 1995316 - RNA, 19 nt, Artificial Sequence
  Description of Artificial Sequence: Synthetic oligonucleotide
  Sense strand starting at position 664 of SEQ ID NO: 1880808
guguuuauuugaucuuuac

SEQ ID NO: 1995317 - RNA, 19 nt, Artificial Sequence
  Description of Artificial Sequence: Synthetic oligonucleotide
  Antisense strand to SEQ ID NO: 1995316
guaaagaucaaauaaacac

SEQ ID NO: 1995318 - RNA, 19 nt, Artificial Sequence
  Description of Artificial Sequence: Synthetic oligonucleotide
  Sense strand starting at position 1003 of SEQ ID NO: 1880808
ucuggacagcuauaugcaa

SEQ ID NO: 1995319 - RNA, 19 nt, Artificial Sequence
  Description of Artificial Sequence: Synthetic oligonucleotide
  Antisense strand to SEQ ID NO: 1995318
uugcauauagcuguccaga

SEQ ID NO: 1995320 - RNA, 19 nt, Artificial Sequence
  Description of Artificial Sequence: Synthetic oligonucleotide
  Sense strand starting at position 1038 of SEQ ID NO: 1880808
gagcuuaagucuccaauug

SEQ ID NO: 1995321 - RNA, 19 nt, Artificial Sequence
  Description of Artificial Sequence: Synthetic oligonucleotide
  Antisense strand to SEQ ID NO: 1995320
caauuggagacuuaagcuc

SEQ ID NO: 1995322 - RNA, 19 nt, Artificial Sequence
  Description of Artificial Sequence: Synthetic oligonucleotide
  Sense strand starting at position 1039 of SEQ ID NO: 1880808
agcuuaagucuccaauuga

SEQ ID NO: 1995323 - RNA, 19 nt, Artificial Sequence
  Description of Artificial Sequence: Synthetic oligonucleotide
  Antisense strand to SEQ ID NO: 1995322
ucaauuggagacuuaagcu

SEQ ID NO: 1995324 - RNA, 19 nt, Artificial Sequence
  Description of Artificial Sequence: Synthetic oligonucleotide
  Sense strand starting at position 1053 of SEQ ID NO: 1880808
auugaaacuugaucucugu

SEQ ID NO: 1995325 - RNA, 19 nt, Artificial Sequence
  Description of Artificial Sequence: Synthetic oligonucleotide
  Antisense strand to SEQ ID NO: 1995324
acagagaucaaguuucaau

SEQ ID NO: 1995326 - RNA, 19 nt, Artificial Sequence
  Description of Artificial Sequence: Synthetic oligonucleotide
  Sense strand starting at position 1084 of SEQ ID NO: 1880808
ugcaaaugucacuacguga

SEQ ID NO: 1995327 - RNA, 19 nt, Artificial Sequence
  Description of Artificial Sequence: Synthetic oligonucleotide
  Antisense strand to SEQ ID NO: 1995326
ucacguagugacauuugca

SEQ ID NO: 1995328 - RNA, 19 nt, Artificial Sequence
  Description of Artificial Sequence: Synthetic oligonucleotide
  Sense strand starting at position 1087 of SEQ ID NO: 1880808
aaaugucacuacgugaauc

SEQ ID NO: 1995329 - RNA, 19 nt, Artificial Sequence
  Description of Artificial Sequence: Synthetic oligonucleotide
  Antisense strand to SEQ ID NO: 1995328
gauucacguagugacauuu

SEQ ID NO: 1995330 - RNA, 19 nt, Artificial Sequence
  Description of Artificial Sequence: Synthetic oligonucleotide
  Sense strand starting at position 1089 of SEQ ID NO: 1880808
augucacuacgugaaucua

SEQ ID NO: 1995331 - RNA, 19 nt, Artificial Sequence
  Description of Artificial Sequence: Synthetic oligonucleotide
  Antisense strand to SEQ ID NO: 1995330
uagauucacguagugacau

SEQ ID NO: 1995332 - RNA, 19 nt, Artificial Sequence
  Description of Artificial Sequence: Synthetic oligonucleotide
  Sense strand starting at position 1100 of SEQ ID NO: 1880808
ugaaucuaccuaugcaaug

SEQ ID NO: 1995333 - RNA, 19 nt, Artificial Sequence
  Description of Artificial Sequence: Synthetic oligonucleotide
  Antisense strand to SEQ ID NO: 1995332
cauugcauagguagauuca

SEQ ID NO: 1995334 - RNA, 19 nt, Artificial Sequence
  Description of Artificial Sequence: Synthetic oligonucleotide
  Sense strand starting at position 1115 of SEQ ID NO: 1880808
aaugguuugcgcguaugaa

SEQ ID NO: 1995335 - RNA, 19 nt, Artificial Sequence
  Description of Artificial Sequence: Synthetic oligonucleotide
  Antisense strand to SEQ ID NO: 1995334
uucauacgcgcaaaccauu

SEQ ID NO: 1995336 - RNA, 19 nt, Artificial Sequence
  Description of Artificial Sequence: Synthetic oligonucleotide
  Sense strand starting at position 1211 of SEQ ID NO: 1880808
guaggcucucaguauaaag

SEQ ID NO: 1995337 - RNA, 19 nt, Artificial Sequence
  Description of Artificial Sequence: Synthetic oligonucleotide
  Antisense strand to SEQ ID NO: 1995336
cuuuauacugagagccuac

SEQ ID NO: 1995338 - RNA, 19 nt, Artificial Sequence
  Description of Artificial Sequence: Synthetic oligonucleotide
  Sense strand starting at position 1379 of SEQ ID NO: 1880808
gaaacacuucuguagcagu

SEQ ID NO: 1995339 - RNA, 19 nt, Artificial Sequence
  Description of Artificial Sequence: Synthetic oligonucleotide
  Antisense strand to SEQ ID NO: 1995338
acugcuacagaaguguuuc

SEQ ID NO: 1995340 - RNA, 19 nt, Artificial Sequence
  Description of Artificial Sequence: Synthetic oligonucleotide
  Sense strand starting at position 2236 of SEQ ID NO: 1880808
cccgccauugcugagagaa

SEQ ID NO: 1995341 - RNA, 19 nt, Artificial Sequence
  Description of Artificial Sequence: Synthetic oligonucleotide
  Antisense strand to SEQ ID NO: 1995340
uucucucagcaauggcggg

SEQ ID NO: 1995342 - RNA, 19 nt, Artificial Sequence
  Description of Artificial Sequence: Synthetic oligonucleotide
  Sense strand starting at position 2331 of SEQ ID NO: 1880808
accagauaaugcuuaggga

SEQ ID NO: 1995343 - RNA, 19 nt, Artificial Sequence
  Description of Artificial Sequence: Synthetic oligonucleotide
  Antisense strand to SEQ ID NO: 1995342
ucccuaagcauuaucuggu

SEQ ID NO: 1995344 - RNA, 19 nt, Artificial Sequence
  Description of Artificial Sequence: Synthetic oligonucleotide
  Sense strand starting at position 2461 of SEQ ID NO: 1880808
auagaagugcuuuauuauc

SEQ ID NO: 1995345 - RNA, 19 nt, Artificial Sequence
  Description of Artificial Sequence: Synthetic oligonucleotide
  Antisense strand to SEQ ID NO: 1995344
gauaauaaagcacuucuau

SEQ ID NO: 1995346 - RNA, 19 nt, Artificial Sequence
  Description of Artificial Sequence: Synthetic oligonucleotide
  Sense strand starting at position 2463 of SEQ ID NO: 1880808
agaagugcuuuauuaucau

SEQ ID NO: 1995347 - RNA, 19 nt, Artificial Sequence
  Description of Artificial Sequence: Synthetic oligonucleotide
  Antisense strand to SEQ ID NO: 1995346
augauaauaaagcacuucu

SEQ ID NO: 1995348 - RNA, 19 nt, Artificial Sequence
  Description of Artificial Sequence: Synthetic oligonucleotide
  Sense strand starting at position 2491 of SEQ ID NO: 1880808
acaaguaaucauuggcuua

SEQ ID NO: 1995349 - RNA, 19 nt, Artificial Sequence
  Description of Artificial Sequence: Synthetic oligonucleotide
  Antisense strand to SEQ ID NO: 1995348
uaagccaaugauuacuugu

SEQ ID NO: 1995350 - RNA, 19 nt, Artificial Sequence
  Description of Artificial Sequence: Synthetic oligonucleotide
  Sense strand starting at position 2494 of SEQ ID NO: 1880808
aguaaucauuggcuuauua

SEQ ID NO: 1995351 - RNA, 19 nt, Artificial Sequence
  Description of Artificial Sequence: Synthetic oligonucleotide
  Antisense strand to SEQ ID NO: 1995350
uaauaagccaaugauuacu

SEQ ID NO: 1995352 - RNA, 19 nt, Artificial Sequence
  Description of Artificial Sequence: Synthetic oligonucleotide
  Sense strand starting at position 2601 of SEQ ID NO: 1880808
aagccuuuccaagggagaa

SEQ ID NO: 1995353 - RNA, 19 nt, Artificial Sequence
  Description of Artificial Sequence: Synthetic oligonucleotide
  Antisense strand to SEQ ID NO: 1995352
uucucccuuggaaaggcuu

SEQ ID NO: 1995354 - RNA, 19 nt, Artificial Sequence
  Description of Artificial Sequence: Synthetic oligonucleotide
  Sense strand starting at position 2935 of SEQ ID NO: 1880808
gugguugccagugaauuaa

SEQ ID NO: 1995355 - RNA, 19 nt, Artificial Sequence
  Description of Artificial Sequence: Synthetic oligonucleotide
  Antisense strand to SEQ ID NO: 1995354
uuaauucacuggcaaccac

SEQ ID NO: 1995356 - RNA, 19 nt, Artificial Sequence
  Description of Artificial Sequence: Synthetic oligonucleotide
  Sense strand starting at position 2945 of SEQ ID NO: 1880808
gugaauuaaaugugcuuga

SEQ ID NO: 1995357 - RNA, 19 nt, Artificial Sequence
  Description of Artificial Sequence: Synthetic oligonucleotide
  Antisense strand to SEQ ID NO: 1995356
ucaagcacauuuaauucac

SEQ ID NO: 1995358 - RNA, 19 nt, Artificial Sequence
  Description of Artificial Sequence: Synthetic oligonucleotide
  Sense strand starting at position 2946 of SEQ ID NO: 1880808
ugaauuaaaugugcuugau

SEQ ID NO: 1995359 - RNA, 19 nt, Artificial Sequence
  Description of Artificial Sequence: Synthetic oligonucleotide
  Antisense strand to SEQ ID NO: 1995358
aucaagcacauuuaauuca

SEQ ID NO: 1995360 - RNA, 19 nt, Artificial Sequence
  Description of Artificial Sequence: Synthetic oligonucleotide
  Sense strand starting at position 2949 of SEQ ID NO: 1880808
auuaaaugugcuugauaac

SEQ ID NO: 1995361 - RNA, 19 nt, Artificial Sequence
  Description of Artificial Sequence: Synthetic oligonucleotide
  Antisense strand to SEQ ID NO: 1995360
guuaucaagcacauuuaau

SEQ ID NO: 1995362 - RNA, 19 nt, Artificial Sequence
  Description of Artificial Sequence: Synthetic oligonucleotide
  Sense strand starting at position 2950 of SEQ ID NO: 1880808
uuaaaugugcuugauaaca

SEQ ID NO: 1995363 - RNA, 19 nt, Artificial Sequence
  Description of Artificial Sequence: Synthetic oligonucleotide
  Antisense strand to SEQ ID NO: 1995362
uguuaucaagcacauuuaa

SEQ ID NO: 1995364 - RNA, 19 nt, Artificial Sequence
  Description of Artificial Sequence: Synthetic oligonucleotide
  Sense strand starting at position 3096 of SEQ ID NO: 1880808
cgagaagaugugcaugcaa

SEQ ID NO: 1995365 - RNA, 19 nt, Artificial Sequence
  Description of Artificial Sequence: Synthetic oligonucleotide
  Antisense strand to SEQ ID NO: 1995364
uugcaugcacaucuucucg

SEQ ID NO: 1995366 - RNA, 19 nt, Artificial Sequence
  Description of Artificial Sequence: Synthetic oligonucleotide
  Sense strand starting at position 3098 of SEQ ID NO: 1880808
agaagaugugcaugcaaag

SEQ ID NO: 1995367 - RNA, 19 nt, Artificial Sequence
  Description of Artificial Sequence: Synthetic oligonucleotide
  Antisense strand to SEQ ID NO: 1995366
cuuugcaugcacaucuucu

SEQ ID NO: 1995368 - RNA, 19 nt, Artificial Sequence
  Description of Artificial Sequence: Synthetic oligonucleotide
  Sense strand starting at position 3133 of SEQ ID NO: 1880808
ggugucauucuacagaggu

SEQ ID NO: 1995369 - RNA, 19 nt, Artificial Sequence
  Description of Artificial Sequence: Synthetic oligonucleotide
  Antisense strand to SEQ ID NO: 1995368
accucuguagaaugacacc

SEQ ID NO: 1995370 - RNA, 19 nt, Artificial Sequence
  Description of Artificial Sequence: Synthetic oligonucleotide
  Sense strand starting at position 3592 of SEQ ID NO: 1880808
gugaauggcaacuaacagu

SEQ ID NO: 1995371 - RNA, 19 nt, Artificial Sequence
  Description of Artificial Sequence: Synthetic oligonucleotide
  Antisense strand to SEQ ID NO: 1995370
acuguuaguugccauucac

SEQ ID NO: 1995372 - RNA, 19 nt, Artificial Sequence
  Description of Artificial Sequence: Synthetic oligonucleotide
  Sense strand starting at position 3641 of SEQ ID NO: 1880808
agugaugaagagugaauuc

SEQ ID NO: 1995373 - RNA, 19 nt, Artificial Sequence
  Description of Artificial Sequence: Synthetic oligonucleotide
  Antisense strand to SEQ ID NO: 1995372
gaauucacucuucaucacu

SEQ ID NO: 1995374 - RNA, 19 nt, Artificial Sequence
  Description of Artificial Sequence: Synthetic oligonucleotide
  Sense strand starting at position 91 of SEQ ID NO: 1880809
cuugacaugugcuacaaca

SEQ ID NO: 1995375 - RNA, 19 nt, Artificial Sequence
  Description of Artificial Sequence: Synthetic oligonucleotide
  Antisense strand to SEQ ID NO: 1995374
uguuguagcacaugucaag

SEQ ID NO: 1995376 - RNA, 19 nt, Artificial Sequence
  Description of Artificial Sequence: Synthetic oligonucleotide
  Sense strand starting at position 125 of SEQ ID NO: 1880809
aaaucaugcuaagugaugu

SEQ ID NO: 1995377 - RNA, 19 nt, Artificial Sequence
  Description of Artificial Sequence: Synthetic oligonucleotide
  Antisense strand to SEQ ID NO: 1995376
acaucacuuagcaugauuu

SEQ ID NO: 1995378 - RNA, 19 nt, Artificial Sequence
  Description of Artificial Sequence: Synthetic oligonucleotide
  Sense strand starting at position 176 of SEQ ID NO: 1880809
cccuuuauaugagguaaua

SEQ ID NO: 1995379 - RNA, 19 nt, Artificial Sequence
  Description of Artificial Sequence: Synthetic oligonucleotide
  Antisense strand to SEQ ID NO: 1995378
uauuaccucauauaaaggg

SEQ ID NO: 1995380 - RNA, 19 nt, Artificial Sequence
  Description of Artificial Sequence: Synthetic oligonucleotide
  Sense strand starting at position 186 of SEQ ID NO: 1880809
gagguaauauaaguaguca

SEQ ID NO: 1995381 - RNA, 19 nt, Artificial Sequence
  Description of Artificial Sequence: Synthetic oligonucleotide
  Antisense strand to SEQ ID NO: 1995380
ugacuacuuauauuaccuc

SEQ ID NO: 1995382 - RNA, 19 nt, Artificial Sequence
  Description of Artificial Sequence: Synthetic oligonucleotide
  Sense strand starting at position 647 of SEQ ID NO: 1880809
agaguaaccucaucgugac

SEQ ID NO: 1995383 - RNA, 19 nt, Artificial Sequence
  Description of Artificial Sequence: Synthetic oligonucleotide
  Antisense strand to SEQ ID NO: 1995382
gucacgaugagguuacucu

SEQ ID NO: 1995384 - RNA, 19 nt, Artificial Sequence
  Description of Artificial Sequence: Synthetic oligonucleotide
  Sense strand starting at position 650 of SEQ ID NO: 1880809
guaaccucaucgugaccua

SEQ ID NO: 1995385 - RNA, 19 nt, Artificial Sequence
  Description of Artificial Sequence: Synthetic oligonucleotide
  Antisense strand to SEQ ID NO: 1995384
uaggucacgaugagguuac

SEQ ID NO: 1995386 - RNA, 19 nt, Artificial Sequence
  Description of Artificial Sequence: Synthetic oligonucleotide
  Sense strand starting at position 657 of SEQ ID NO: 1880809
caucgugaccuauggcaca

SEQ ID NO: 1995387 - RNA, 19 nt, Artificial Sequence
  Description of Artificial Sequence: Synthetic oligonucleotide
  Antisense strand to SEQ ID NO: 1995386
ugugccauaggucacgaug

SEQ ID NO: 1995388 - RNA, 19 nt, Artificial Sequence
  Description of Artificial Sequence: Synthetic oligonucleotide
  Sense strand starting at position 780 of SEQ ID NO: 1880809
agcugugugucaucgccau

SEQ ID NO: 1995389 - RNA, 19 nt, Artificial Sequence
  Description of Artificial Sequence: Synthetic oligonucleotide
  Antisense strand to SEQ ID NO: 1995388
auggcgaugacacacagcu

SEQ ID NO: 1995390 - RNA, 19 nt, Artificial Sequence
  Description of Artificial Sequence: Synthetic oligonucleotide
  Sense strand starting at position 784 of SEQ ID NO: 1880809
gugugucaucgccaucugu

SEQ ID NO: 1995391 - RNA, 19 nt, Artificial Sequence
  Description of Artificial Sequence: Synthetic oligonucleotide
  Antisense strand to SEQ ID NO: 1995390
acagauggcgaugacacac

SEQ ID NO: 1995392 - RNA, 19 nt, Artificial Sequence
  Description of Artificial Sequence: Synthetic oligonucleotide
  Sense strand starting at position 786 of SEQ ID NO: 1880809
gugucaucgccaucuguua

SEQ ID NO: 1995393 - RNA, 19 nt, Artificial Sequence
  Description of Artificial Sequence: Synthetic oligonucleotide
  Antisense strand to SEQ ID NO: 1995392
uaacagauggcgaugacac

SEQ ID NO: 1995394 - RNA, 19 nt, Artificial Sequence
  Description of Artificial Sequence: Synthetic oligonucleotide
  Sense strand starting at position 800 of SEQ ID NO: 1880809
uguuauuuccagcgggaga

SEQ ID NO: 1995395 - RNA, 19 nt, Artificial Sequence
  Description of Artificial Sequence: Synthetic oligonucleotide
  Antisense strand to SEQ ID NO: 1995394
ucucccgcuggaaauaaca

SEQ ID NO: 1995396 - RNA, 19 nt, Artificial Sequence
  Description of Artificial Sequence: Synthetic oligonucleotide
  Sense strand starting at position 815 of SEQ ID NO: 1880809
gagaauaacuggugggugu

SEQ ID NO: 1995397 - RNA, 19 nt, Artificial Sequence
  Description of Artificial Sequence: Synthetic oligonucleotide
  Antisense strand to SEQ ID NO: 1995396
acacccaccaguuauucuc

SEQ ID NO: 1995398 - RNA, 19 nt, Artificial Sequence
  Description of Artificial Sequence: Synthetic oligonucleotide
  Sense strand starting at position 892 of SEQ ID NO: 1880809
caacgugcuccuggcuaau

SEQ ID NO: 1995399 - RNA, 19 nt, Artificial Sequence
  Description of Artificial Sequence: Synthetic oligonucleotide
  Antisense strand to SEQ ID NO: 1995398
auuagccaggagcacguug

SEQ ID NO: 1995400 - RNA, 19 nt, Artificial Sequence
  Description of Artificial Sequence: Synthetic oligonucleotide
  Sense strand starting at position 930 of SEQ ID NO: 1880809
augggauccucgguauaca

SEQ ID NO: 1995401 - RNA, 19 nt, Artificial Sequence
  Description of Artificial Sequence: Synthetic oligonucleotide
  Antisense strand to SEQ ID NO: 1995400
uguauaccgaggaucccau

SEQ ID NO: 1995402 - RNA, 19 nt, Artificial Sequence
  Description of Artificial Sequence: Synthetic oligonucleotide
  Sense strand starting at position 931 of SEQ ID NO: 1880809
ugggauccucgguauacau

SEQ ID NO: 1995403 - RNA, 19 nt, Artificial Sequence
  Description of Artificial Sequence: Synthetic oligonucleotide
  Antisense strand to SEQ ID NO: 1995402
auguauaccgaggauccca

SEQ ID NO: 1995404 - RNA, 19 nt, Artificial Sequence
  Description of Artificial Sequence: Synthetic oligonucleotide
  Sense strand starting at position 933 of SEQ ID NO: 1880809
ggauccucgguauacauca

SEQ ID NO: 1995405 - RNA, 19 nt, Artificial Sequence
  Description of Artificial Sequence: Synthetic oligonucleotide
  Antisense strand to SEQ ID NO: 1995404
ugauguauaccgaggaucc

SEQ ID NO: 1995406 - RNA, 19 nt, Artificial Sequence
  Description of Artificial Sequence: Synthetic oligonucleotide
  Sense strand starting at position 1523 of SEQ ID NO: 1880809
uggcgaaaguuccuaggga

SEQ ID NO: 1995407 - RNA, 19 nt, Artificial Sequence
  Description of Artificial Sequence: Synthetic oligonucleotide
  Antisense strand to SEQ ID NO: 1995406
ucccuaggaacuuucgcca

SEQ ID NO: 1995408 - RNA, 19 nt, Artificial Sequence
  Description of Artificial Sequence: Synthetic oligonucleotide
  Sense strand starting at position 1524 of SEQ ID NO: 1880809
ggcgaaaguuccuagggac

SEQ ID NO: 1995409 - RNA, 19 nt, Artificial Sequence
  Description of Artificial Sequence: Synthetic oligonucleotide
  Antisense strand to SEQ ID NO: 1995408
gucccuaggaacuuucgcc

SEQ ID NO: 1995410 - RNA, 19 nt, Artificial Sequence
  Description of Artificial Sequence: Synthetic oligonucleotide
  Sense strand starting at position 2205 of SEQ ID NO: 1880809
ccuuuagugcccuaucaga

SEQ ID NO: 1995411 - RNA, 19 nt, Artificial Sequence
  Description of Artificial Sequence: Synthetic oligonucleotide
  Antisense strand to SEQ ID NO: 1995410
ucugauagggcacuaaagg

SEQ ID NO: 1995412 - RNA, 19 nt, Artificial Sequence
  Description of Artificial Sequence: Synthetic oligonucleotide
  Sense strand starting at position 2210 of SEQ ID NO: 1880809
agugcccuaucagaagaaa

SEQ ID NO: 1995413 - RNA, 19 nt, Artificial Sequence
  Description of Artificial Sequence: Synthetic oligonucleotide
  Antisense strand to SEQ ID NO: 1995412
uuucuucugauagggcacu

SEQ ID NO: 1995414 - RNA, 19 nt, Artificial Sequence
  Description of Artificial Sequence: Synthetic oligonucleotide
  Sense strand starting at position 2245 of SEQ ID NO: 1880809
ugcccaguauuggcugaaa

SEQ ID NO: 1995415 - RNA, 19 nt, Artificial Sequence
  Description of Artificial Sequence: Synthetic oligonucleotide
  Antisense strand to SEQ ID NO: 1995414
uuucagccaauacugggca

SEQ ID NO: 1995416 - RNA, 19 nt, Artificial Sequence
  Description of Artificial Sequence: Synthetic oligonucleotide
  Sense strand starting at position 2247 of SEQ ID NO: 1880809
cccaguauuggcugaaaug

SEQ ID NO: 1995417 - RNA, 19 nt, Artificial Sequence
  Description of Artificial Sequence: Synthetic oligonucleotide
  Antisense strand to SEQ ID NO: 1995416
cauuucagccaauacuggg

SEQ ID NO: 1995418 - RNA, 19 nt, Artificial Sequence
  Description of Artificial Sequence: Synthetic oligonucleotide
  Sense strand starting at position 2248 of SEQ ID NO: 1880809
ccaguauuggcugaaauga

SEQ ID NO: 1995419 - RNA, 19 nt, Artificial Sequence
  Description of Artificial Sequence: Synthetic oligonucleotide
  Antisense strand to SEQ ID NO: 1995418
ucauuucagccaauacugg

SEQ ID NO: 1995420 - RNA, 19 nt, Artificial Sequence
  Description of Artificial Sequence: Synthetic oligonucleotide
  Sense strand starting at position 2257 of SEQ ID NO: 1880809
gcugaaaugaacugugggu

SEQ ID NO: 1995421 - RNA, 19 nt, Artificial Sequence
  Description of Artificial Sequence: Synthetic oligonucleotide
  Antisense strand to SEQ ID NO: 1995420
acccacaguucauuucagc

SEQ ID NO: 1995422 - RNA, 19 nt, Artificial Sequence
  Description of Artificial Sequence: Synthetic oligonucleotide
  Sense strand starting at position 2259 of SEQ ID NO: 1880809
ugaaaugaacuguggguuu

SEQ ID NO: 1995423 - RNA, 19 nt, Artificial Sequence
  Description of Artificial Sequence: Synthetic oligonucleotide
  Antisense strand to SEQ ID NO: 1995422
aaacccacaguucauuuca

SEQ ID NO: 1995424 - RNA, 19 nt, Artificial Sequence
  Description of Artificial Sequence: Synthetic oligonucleotide
  Sense strand starting at position 2270 of SEQ ID NO: 1880809
guggguuuaccuuaaguua

SEQ ID NO: 1995425 - RNA, 19 nt, Artificial Sequence
  Description of Artificial Sequence: Synthetic oligonucleotide
  Antisense strand to SEQ ID NO: 1995424
uaacuuaagguaaacccac

SEQ ID NO: 1995426 - RNA, 19 nt, Artificial Sequence
  Description of Artificial Sequence: Synthetic oligonucleotide
  Sense strand starting at position 2289 of SEQ ID NO: 1880809
cggauucuccagugguuaa

SEQ ID NO: 1995427 - RNA, 19 nt, Artificial Sequence
  Description of Artificial Sequence: Synthetic oligonucleotide
  Antisense strand to SEQ ID NO: 1995426
uuaaccacuggagaauccg

SEQ ID NO: 1995428 - RNA, 19 nt, Artificial Sequence
  Description of Artificial Sequence: Synthetic oligonucleotide
  Sense strand starting at position 2290 of SEQ ID NO: 1880809
ggauucuccagugguuaaa

SEQ ID NO: 1995429 - RNA, 19 nt, Artificial Sequence
  Description of Artificial Sequence: Synthetic oligonucleotide
  Antisense strand to SEQ ID NO: 1995428
uuuaaccacuggagaaucc

SEQ ID NO: 1995430 - RNA, 19 nt, Artificial Sequence
  Description of Artificial Sequence: Synthetic oligonucleotide
  Sense strand starting at position 2292 of SEQ ID NO: 1880809
auucuccagugguuaaaca

SEQ ID NO: 1995431 - RNA, 19 nt, Artificial Sequence
  Description of Artificial Sequence: Synthetic oligonucleotide
  Antisense strand to SEQ ID NO: 1995430
uguuuaaccacuggagaau

SEQ ID NO: 1995432 - RNA, 19 nt, Artificial Sequence
  Description of Artificial Sequence: Synthetic oligonucleotide
  Sense strand starting at position 2293 of SEQ ID NO: 1880809
uucuccagugguuaaacaa

SEQ ID NO: 1995433 - RNA, 19 nt, Artificial Sequence
  Description of Artificial Sequence: Synthetic oligonucleotide
  Antisense strand to SEQ ID NO: 1995432
uuguuuaaccacuggagaa

SEQ ID NO: 1995434 - RNA, 19 nt, Artificial Sequence
  Description of Artificial Sequence: Synthetic oligonucleotide
  Sense strand starting at position 2366 of SEQ ID NO: 1880809
gcagaauagucuggaggca

SEQ ID NO: 1995435 - RNA, 19 nt, Artificial Sequence
  Description of Artificial Sequence: Synthetic oligonucleotide
  Antisense strand to SEQ ID NO: 1995434
ugccuccagacuauucugc

SEQ ID NO: 1995436 - RNA, 19 nt, Artificial Sequence
  Description of Artificial Sequence: Synthetic oligonucleotide
  Sense strand starting at position 2470 of SEQ ID NO: 1880809
cuggaauacuccguuugca

SEQ ID NO: 1995437 - RNA, 19 nt, Artificial Sequence
  Description of Artificial Sequence: Synthetic oligonucleotide
  Antisense strand to SEQ ID NO: 1995436
ugcaaacggaguauuccag

SEQ ID NO: 1995438 - RNA, 19 nt, Artificial Sequence
  Description of Artificial Sequence: Synthetic oligonucleotide
  Sense strand starting at position 2555 of SEQ ID NO: 1880809
gcaaccagacauuggcaua

SEQ ID NO: 1995439 - RNA, 19 nt, Artificial Sequence
  Description of Artificial Sequence: Synthetic oligonucleotide
  Antisense strand to SEQ ID NO: 1995438
uaugccaaugucugguugc

SEQ ID NO: 1995440 - RNA, 19 nt, Artificial Sequence
  Description of Artificial Sequence: Synthetic oligonucleotide
  Sense strand starting at position 2566 of SEQ ID NO: 1880809
uuggcauaggaguguaacu

SEQ ID NO: 1995441 - RNA, 19 nt, Artificial Sequence
  Description of Artificial Sequence: Synthetic oligonucleotide
  Antisense strand to SEQ ID NO: 1995440
aguuacacuccuaugccaa

SEQ ID NO: 1995442 - RNA, 19 nt, Artificial Sequence
  Description of Artificial Sequence: Synthetic oligonucleotide
  Sense strand starting at position 2568 of SEQ ID NO: 1880809
ggcauaggaguguaacuuu

SEQ ID NO: 1995443 - RNA, 19 nt, Artificial Sequence
  Description of Artificial Sequence: Synthetic oligonucleotide
  Antisense strand to SEQ ID NO: 1995442
aaaguuacacuccuaugcc

SEQ ID NO: 1995444 - RNA, 19 nt, Artificial Sequence
  Description of Artificial Sequence: Synthetic oligonucleotide
  Sense strand starting at position 2627 of SEQ ID NO: 1880809
caaugagaugcuugcauag

SEQ ID NO: 1995445 - RNA, 19 nt, Artificial Sequence
  Description of Artificial Sequence: Synthetic oligonucleotide
  Antisense strand to SEQ ID NO: 1995444
cuaugcaagcaucucauug

SEQ ID NO: 1995446 - RNA, 19 nt, Artificial Sequence
  Description of Artificial Sequence: Synthetic oligonucleotide
  Sense strand starting at position 2705 of SEQ ID NO: 1880809
ggguuuaaccuuuguaacu

SEQ ID NO: 1995447 - RNA, 19 nt, Artificial Sequence
  Description of Artificial Sequence: Synthetic oligonucleotide
  Antisense strand to SEQ ID NO: 1995446
aguuacaaagguuaaaccc

SEQ ID NO: 1995448 - RNA, 19 nt, Artificial Sequence
  Description of Artificial Sequence: Synthetic oligonucleotide
  Sense strand starting at position 2767 of SEQ ID NO: 1880809
auugcaggccacuaauuaa

SEQ ID NO: 1995449 - RNA, 19 nt, Artificial Sequence
  Description of Artificial Sequence: Synthetic oligonucleotide
  Antisense strand to SEQ ID NO: 1995448
uuaauuaguggccugcaau

SEQ ID NO: 1995450 - RNA, 19 nt, Artificial Sequence
  Description of Artificial Sequence: Synthetic oligonucleotide
  Sense strand starting at position 2887 of SEQ ID NO: 1880809
ggcuccuacucuguggaau

SEQ ID NO: 1995451 - RNA, 19 nt, Artificial Sequence
  Description of Artificial Sequence: Synthetic oligonucleotide
  Antisense strand to SEQ ID NO: 1995450
auuccacagaguaggagcc

SEQ ID NO: 1995452 - RNA, 19 nt, Artificial Sequence
  Description of Artificial Sequence: Synthetic oligonucleotide
  Sense strand starting at position 2898 of SEQ ID NO: 1880809
uguggaauguacuuucguu

SEQ ID NO: 1995453 - RNA, 19 nt, Artificial Sequence
  Description of Artificial Sequence: Synthetic oligonucleotide
  Antisense strand to SEQ ID NO: 1995452
aacgaaaguacauuccaca

SEQ ID NO: 1995454 - RNA, 19 nt, Artificial Sequence
  Description of Artificial Sequence: Synthetic oligonucleotide
  Sense strand starting at position 259 of SEQ ID NO: 1880810
auuauuauccgauggguaa

SEQ ID NO: 1995455 - RNA, 19 nt, Artificial Sequence
  Description of Artificial Sequence: Synthetic oligonucleotide
  Antisense strand to SEQ ID NO: 1995454
uuacccaucggauaauaau

SEQ ID NO: 1995456 - RNA, 19 nt, Artificial Sequence
  Description of Artificial Sequence: Synthetic oligonucleotide
  Sense strand starting at position 260 of SEQ ID NO: 1880810
uuauuauccgauggguaag

SEQ ID NO: 1995457 - RNA, 19 nt, Artificial Sequence
  Description of Artificial Sequence: Synthetic oligonucleotide
  Antisense strand to SEQ ID NO: 1995456
cuuacccaucggauaauaa

SEQ ID NO: 1995458 - RNA, 19 nt, Artificial Sequence
  Description of Artificial Sequence: Synthetic oligonucleotide
  Sense strand starting at position 415 of SEQ ID NO: 1880810
cuguaauaagacugcagua

SEQ ID NO: 1995459 - RNA, 19 nt, Artificial Sequence
  Description of Artificial Sequence: Synthetic oligonucleotide
  Antisense strand to SEQ ID NO: 1995458
uacugcagucuuauuacag

SEQ ID NO: 1995460 - RNA, 19 nt, Artificial Sequence
  Description of Artificial Sequence: Synthetic oligonucleotide
  Sense strand starting at position 417 of SEQ ID NO: 1880810
guaauaagacugcaguaaa

SEQ ID NO: 1995461 - RNA, 19 nt, Artificial Sequence
  Description of Artificial Sequence: Synthetic oligonucleotide
  Antisense strand to SEQ ID NO: 1995460
uuuacugcagucuuauuac

SEQ ID NO: 1995462 - RNA, 19 nt, Artificial Sequence
  Description of Artificial Sequence: Synthetic oligonucleotide
  Sense strand starting at position 496 of SEQ ID NO: 1880810
ggagccuucuguccaaaga

SEQ ID NO: 1995463 - RNA, 19 nt, Artificial Sequence
  Description of Artificial Sequence: Synthetic oligonucleotide
  Antisense strand to SEQ ID NO: 1995462
ucuuuggacagaaggcucc

SEQ ID NO: 1995464 - RNA, 19 nt, Artificial Sequence
  Description of Artificial Sequence: Synthetic oligonucleotide
  Sense strand starting at position 497 of SEQ ID NO: 1880810
gagccuucuguccaaagag

SEQ ID NO: 1995465 - RNA, 19 nt, Artificial Sequence
  Description of Artificial Sequence: Synthetic oligonucleotide
  Antisense strand to SEQ ID NO: 1995464
cucuuuggacagaaggcuc

SEQ ID NO: 1995466 - RNA, 19 nt, Artificial Sequence
  Description of Artificial Sequence: Synthetic oligonucleotide
  Sense strand starting at position 569 of SEQ ID NO: 1880810
guuauuaguagugaaagau

SEQ ID NO: 1995467 - RNA, 19 nt, Artificial Sequence
  Description of Artificial Sequence: Synthetic oligonucleotide
  Antisense strand to SEQ ID NO: 1995466
aucuuucacuacuaauaac

SEQ ID NO: 1995468 - RNA, 19 nt, Artificial Sequence
  Description of Artificial Sequence: Synthetic oligonucleotide
  Sense strand starting at position 575 of SEQ ID NO: 1880810
aguagugaaagauguuauu

SEQ ID NO: 1995469 - RNA, 19 nt, Artificial Sequence
  Description of Artificial Sequence: Synthetic oligonucleotide
  Antisense strand to SEQ ID NO: 1995468
aauaacaucuuucacuacu

SEQ ID NO: 1995470 - RNA, 19 nt, Artificial Sequence
  Description of Artificial Sequence: Synthetic oligonucleotide
  Sense strand starting at position 586 of SEQ ID NO: 1880810
auguuauuagguuguugaa

SEQ ID NO: 1995471 - RNA, 19 nt, Artificial Sequence
  Description of Artificial Sequence: Synthetic oligonucleotide
  Antisense strand to SEQ ID NO: 1995470
uucaacaaccuaauaacau

SEQ ID NO: 1995472 - RNA, 19 nt, Artificial Sequence
  Description of Artificial Sequence: Synthetic oligonucleotide
  Sense strand starting at position 588 of SEQ ID NO: 1880810
guuauuagguuguugaaga

SEQ ID NO: 1995473 - RNA, 19 nt, Artificial Sequence
  Description of Artificial Sequence: Synthetic oligonucleotide
  Antisense strand to SEQ ID NO: 1995472
ucuucaacaaccuaauaac

SEQ ID NO: 1995474 - RNA, 19 nt, Artificial Sequence
  Description of Artificial Sequence: Synthetic oligonucleotide
  Sense strand starting at position 641 of SEQ ID NO: 1880810
ggcgcuucucuaguaaucu

SEQ ID NO: 1995475 - RNA, 19 nt, Artificial Sequence
  Description of Artificial Sequence: Synthetic oligonucleotide
  Antisense strand to SEQ ID NO: 1995474
agauuacuagagaagcgcc

SEQ ID NO: 1995476 - RNA, 19 nt, Artificial Sequence
  Description of Artificial Sequence: Synthetic oligonucleotide
  Sense strand starting at position 840 of SEQ ID NO: 1880810
gagauuacgagagguacac

SEQ ID NO: 1995477 - RNA, 19 nt, Artificial Sequence
  Description of Artificial Sequence: Synthetic oligonucleotide
  Antisense strand to SEQ ID NO: 1995476
guguaccucucguaaucuc

SEQ ID NO: 1995478 - RNA, 19 nt, Artificial Sequence
  Description of Artificial Sequence: Synthetic oligonucleotide
  Sense strand starting at position 937 of SEQ ID NO: 1880810
cugacaagcuuccuagaua

SEQ ID NO: 1995479 - RNA, 19 nt, Artificial Sequence
  Description of Artificial Sequence: Synthetic oligonucleotide
  Antisense strand to SEQ ID NO: 1995478
uaucuaggaagcuugucag

SEQ ID NO: 1995480 - RNA, 19 nt, Artificial Sequence
  Description of Artificial Sequence: Synthetic oligonucleotide
  Sense strand starting at position 948 of SEQ ID NO: 1880810
ccuagauaucacuggguau

SEQ ID NO: 1995481 - RNA, 19 nt, Artificial Sequence
  Description of Artificial Sequence: Synthetic oligonucleotide
  Antisense strand to SEQ ID NO: 1995480
auacccagugauaucuagg

SEQ ID NO: 1995482 - RNA, 19 nt, Artificial Sequence
  Description of Artificial Sequence: Synthetic oligonucleotide
  Sense strand starting at position 950 of SEQ ID NO: 1880810
uagauaucacuggguauua

SEQ ID NO: 1995483 - RNA, 19 nt, Artificial Sequence
  Description of Artificial Sequence: Synthetic oligonucleotide
  Antisense strand to SEQ ID NO: 1995482
uaauacccagugauaucua

SEQ ID NO: 1995484 - RNA, 19 nt, Artificial Sequence
  Description of Artificial Sequence: Synthetic oligonucleotide
  Sense strand starting at position 951 of SEQ ID NO: 1880810
agauaucacuggguauuaa

SEQ ID NO: 1995485 - RNA, 19 nt, Artificial Sequence
  Description of Artificial Sequence: Synthetic oligonucleotide
  Antisense strand to SEQ ID NO: 1995484
uuaauacccagugauaucu

SEQ ID NO: 1995486 - RNA, 19 nt, Artificial Sequence
  Description of Artificial Sequence: Synthetic oligonucleotide
  Sense strand starting at position 966 of SEQ ID NO: 1880810
uuaaauugggaauguugau

SEQ ID NO: 1995487 - RNA, 19 nt, Artificial Sequence
  Description of Artificial Sequence: Synthetic oligonucleotide
  Antisense strand to SEQ ID NO: 1995486
aucaacauucccaauuuaa

SEQ ID NO: 1995488 - RNA, 19 nt, Artificial Sequence
  Description of Artificial Sequence: Synthetic oligonucleotide
  Sense strand starting at position 997 of SEQ ID NO: 1880810
ggauuucuuuaagaguucu

SEQ ID NO: 1995489 - RNA, 19 nt, Artificial Sequence
  Description of Artificial Sequence: Synthetic oligonucleotide
  Antisense strand to SEQ ID NO: 1995488
agaacucuuaaagaaaucc

SEQ ID NO: 1995490 - RNA, 19 nt, Artificial Sequence
  Description of Artificial Sequence: Synthetic oligonucleotide
  Sense strand starting at position 1010 of SEQ ID NO: 1880810
aguucuucucauuaccaga

SEQ ID NO: 1995491 - RNA, 19 nt, Artificial Sequence
  Description of Artificial Sequence: Synthetic oligonucleotide
  Antisense strand to SEQ ID NO: 1995490
ucugguaaugagaagaacu

SEQ ID NO: 1995492 - RNA, 19 nt, Artificial Sequence
  Description of Artificial Sequence: Synthetic oligonucleotide
  Sense strand starting at position 1063 of SEQ ID NO: 1880810
accggaacuuucccgaaga

SEQ ID NO: 1995493 - RNA, 19 nt, Artificial Sequence
  Description of Artificial Sequence: Synthetic oligonucleotide
  Antisense strand to SEQ ID NO: 1995492
ucuucgggaaaguuccggu

SEQ ID NO: 1995494 - RNA, 19 nt, Artificial Sequence
  Description of Artificial Sequence: Synthetic oligonucleotide
  Sense strand starting at position 1163 of SEQ ID NO: 1880810
uuuguccuuugauuauaca

SEQ ID NO: 1995495 - RNA, 19 nt, Artificial Sequence
  Description of Artificial Sequence: Synthetic oligonucleotide
  Antisense strand to SEQ ID NO: 1995494
uguauaaucaaaggacaaa

SEQ ID NO: 1995496 - RNA, 19 nt, Artificial Sequence
  Description of Artificial Sequence: Synthetic oligonucleotide
  Sense strand starting at position 1981 of SEQ ID NO: 1880810
gggucagauccugggcuga

SEQ ID NO: 1995497 - RNA, 19 nt, Artificial Sequence
  Description of Artificial Sequence: Synthetic oligonucleotide
  Antisense strand to SEQ ID NO: 1995496
ucagcccaggaucugaccc

SEQ ID NO: 1995498 - RNA, 19 nt, Artificial Sequence
  Description of Artificial Sequence: Synthetic oligonucleotide
  Sense strand starting at position 2097 of SEQ ID NO: 1880810
ccaugaaacuuccuggcuu

SEQ ID NO: 1995499 - RNA, 19 nt, Artificial Sequence
  Description of Artificial Sequence: Synthetic oligonucleotide
  Antisense strand to SEQ ID NO: 1995498
aagccaggaaguuucaugg

SEQ ID NO: 1995500 - RNA, 19 nt, Artificial Sequence
  Description of Artificial Sequence: Synthetic oligonucleotide
  Sense strand starting at position 2127 of SEQ ID NO: 1880810
aagagucuccuccagguaa

SEQ ID NO: 1995501 - RNA, 19 nt, Artificial Sequence
  Description of Artificial Sequence: Synthetic oligonucleotide
  Antisense strand to SEQ ID NO: 1995500
uuaccuggaggagacucuu

SEQ ID NO: 1995502 - RNA, 19 nt, Artificial Sequence
  Description of Artificial Sequence: Synthetic oligonucleotide
  Sense strand starting at position 2129 of SEQ ID NO: 1880810
gagucuccuccagguaaga

SEQ ID NO: 1995503 - RNA, 19 nt, Artificial Sequence
  Description of Artificial Sequence: Synthetic oligonucleotide
  Antisense strand to SEQ ID NO: 1995502
ucuuaccuggaggagacuc

SEQ ID NO: 1995504 - RNA, 19 nt, Artificial Sequence
  Description of Artificial Sequence: Synthetic oligonucleotide
  Sense strand starting at position 2218 of SEQ ID NO: 1880810
ccgugaacauuacuccaca

SEQ ID NO: 1995505 - RNA, 19 nt, Artificial Sequence
  Description of Artificial Sequence: Synthetic oligonucleotide
  Antisense strand to SEQ ID NO: 1995504
uguggaguaauguucacgg

SEQ ID NO: 1995506 - RNA, 19 nt, Artificial Sequence
  Description of Artificial Sequence: Synthetic oligonucleotide
  Sense strand starting at position 2487 of SEQ ID NO: 1880810
ccaagccuccucugagauu

SEQ ID NO: 1995507 - RNA, 19 nt, Artificial Sequence
  Description of Artificial Sequence: Synthetic oligonucleotide
  Antisense strand to SEQ ID NO: 1995506
aaucucagaggaggcuugg

SEQ ID NO: 1995508 - RNA, 19 nt, Artificial Sequence
  Description of Artificial Sequence: Synthetic oligonucleotide
  Sense strand starting at position 2498 of SEQ ID NO: 1880810
cugagauucuuccuccaug

SEQ ID NO: 1995509 - RNA, 19 nt, Artificial Sequence
  Description of Artificial Sequence: Synthetic oligonucleotide
  Antisense strand to SEQ ID NO: 1995508
cauggaggaagaaucucag

SEQ ID NO: 1995510 - RNA, 19 nt, Artificial Sequence
  Description of Artificial Sequence: Synthetic oligonucleotide
  Sense strand starting at position 2592 of SEQ ID NO: 1880810
gcuugagaaucucucuauu

SEQ ID NO: 1995511 - RNA, 19 nt, Artificial Sequence
  Description of Artificial Sequence: Synthetic oligonucleotide
  Antisense strand to SEQ ID NO: 1995510
aauagagagauucucaagc

SEQ ID NO: 1995512 - RNA, 19 nt, Artificial Sequence
  Description of Artificial Sequence: Synthetic oligonucleotide
  Sense strand starting at position 2700 of SEQ ID NO: 1880810
ggaggcugaauguggaaau

SEQ ID NO: 1995513 - RNA, 19 nt, Artificial Sequence
  Description of Artificial Sequence: Synthetic oligonucleotide
  Antisense strand to SEQ ID NO: 1995512
auuuccacauucagccucc

SEQ ID NO: 1995514 - RNA, 19 nt, Artificial Sequence
  Description of Artificial Sequence: Synthetic oligonucleotide
  Sense strand starting at position 2710 of SEQ ID NO: 1880810
uguggaaauacaugaaugu

SEQ ID NO: 1995515 - RNA, 19 nt, Artificial Sequence
  Description of Artificial Sequence: Synthetic oligonucleotide
  Antisense strand to SEQ ID NO: 1995514
acauucauguauuuccaca

SEQ ID NO: 1995516 - RNA, 19 nt, Artificial Sequence
  Description of Artificial Sequence: Synthetic oligonucleotide
  Sense strand starting at position 2714 of SEQ ID NO: 1880810
gaaauacaugaaugugcuu

SEQ ID NO: 1995517 - RNA, 19 nt, Artificial Sequence
  Description of Artificial Sequence: Synthetic oligonucleotide
  Antisense strand to SEQ ID NO: 1995516
aagcacauucauguauuuc

SEQ ID NO: 1995518 - RNA, 19 nt, Artificial Sequence
  Description of Artificial Sequence: Synthetic oligonucleotide
  Sense strand starting at position 2741 of SEQ ID NO: 1880810
uccaguucccuugaagaau

SEQ ID NO: 1995519 - RNA, 19 nt, Artificial Sequence
  Description of Artificial Sequence: Synthetic oligonucleotide
  Antisense strand to SEQ ID NO: 1995518
auucuucaagggaacugga

SEQ ID NO: 1995520 - RNA, 19 nt, Artificial Sequence
  Description of Artificial Sequence: Synthetic oligonucleotide
  Sense strand starting at position 3185 of SEQ ID NO: 1880810
ggagguuuguaccuacagu

SEQ ID NO: 1995521 - RNA, 19 nt, Artificial Sequence
  Description of Artificial Sequence: Synthetic oligonucleotide
  Antisense strand to SEQ ID NO: 1995520
acuguagguacaaaccucc

SEQ ID NO: 1995522 - RNA, 19 nt, Artificial Sequence
  Description of Artificial Sequence: Synthetic oligonucleotide
  Sense strand starting at position 3736 of SEQ ID NO: 1880810
gauccuuuacguuacugua

SEQ ID NO: 1995523 - RNA, 19 nt, Artificial Sequence
  Description of Artificial Sequence: Synthetic oligonucleotide
  Antisense strand to SEQ ID NO: 1995522
uacaguaacguaaaggauc

SEQ ID NO: 1995524 - RNA, 19 nt, Artificial Sequence
  Description of Artificial Sequence: Synthetic oligonucleotide
  Sense strand starting at position 3807 of SEQ ID NO: 1880810
ucuguuucccacuagauca

SEQ ID NO: 1995525 - RNA, 19 nt, Artificial Sequence
  Description of Artificial Sequence: Synthetic oligonucleotide
  Antisense strand to SEQ ID NO: 1995524
ugaucuagugggaaacaga

SEQ ID NO: 1995526 - RNA, 19 nt, Artificial Sequence
  Description of Artificial Sequence: Synthetic oligonucleotide
  Sense strand starting at position 3870 of SEQ ID NO: 1880810
ugaagaaagucugugacuu

SEQ ID NO: 1995527 - RNA, 19 nt, Artificial Sequence
  Description of Artificial Sequence: Synthetic oligonucleotide
  Antisense strand to SEQ ID NO: 1995526
aagucacagacuuucuuca

SEQ ID NO: 1995528 - RNA, 19 nt, Artificial Sequence
  Description of Artificial Sequence: Synthetic oligonucleotide
  Sense strand starting at position 3871 of SEQ ID NO: 1880810
gaagaaagucugugacuug

SEQ ID NO: 1995529 - RNA, 19 nt, Artificial Sequence
  Description of Artificial Sequence: Synthetic oligonucleotide
  Antisense strand to SEQ ID NO: 1995528
caagucacagacuuucuuc

SEQ ID NO: 1995530 - RNA, 19 nt, Artificial Sequence
  Description of Artificial Sequence: Synthetic oligonucleotide
  Sense strand starting at position 3955 of SEQ ID NO: 1880810
ucaccauggccuggaguaa

SEQ ID NO: 1995531 - RNA, 19 nt, Artificial Sequence
  Description of Artificial Sequence: Synthetic oligonucleotide
  Antisense strand to SEQ ID NO: 1995530
uuacuccaggccaugguga

SEQ ID NO: 1995532 - RNA, 19 nt, Artificial Sequence
  Description of Artificial Sequence: Synthetic oligonucleotide
  Sense strand starting at position 3956 of SEQ ID NO: 1880810
caccauggccuggaguaaa

SEQ ID NO: 1995533 - RNA, 19 nt, Artificial Sequence
  Description of Artificial Sequence: Synthetic oligonucleotide
  Antisense strand to SEQ ID NO: 1995532
uuuacuccaggccauggug

SEQ ID NO: 1995534 - RNA, 19 nt, Artificial Sequence
  Description of Artificial Sequence: Synthetic oligonucleotide
  Sense strand starting at position 63 of SEQ ID NO: 1880811
ucugaugaauaucaguaua

SEQ ID NO: 1995535 - RNA, 19 nt, Artificial Sequence
  Description of Artificial Sequence: Synthetic oligonucleotide
  Antisense strand to SEQ ID NO: 1995534
uauacugauauucaucaga

SEQ ID NO: 1995536 - RNA, 19 nt, Artificial Sequence
  Description of Artificial Sequence: Synthetic oligonucleotide
  Sense strand starting at position 90 of SEQ ID NO: 1880811
acaauuauauggccguuaa

SEQ ID NO: 1995537 - RNA, 19 nt, Artificial Sequence
  Description of Artificial Sequence: Synthetic oligonucleotide
  Antisense strand to SEQ ID NO: 1995536
uuaacggccauauaauugu

SEQ ID NO: 1995538 - RNA, 19 nt, Artificial Sequence
  Description of Artificial Sequence: Synthetic oligonucleotide
  Sense strand starting at position 91 of SEQ ID NO: 1880811
caauuauauggccguuaau

SEQ ID NO: 1995539 - RNA, 19 nt, Artificial Sequence
  Description of Artificial Sequence: Synthetic oligonucleotide
  Antisense strand to SEQ ID NO: 1995538
auuaacggccauauaauug

SEQ ID NO: 1995540 - RNA, 19 nt, Artificial Sequence
  Description of Artificial Sequence: Synthetic oligonucleotide
  Sense strand starting at position 94 of SEQ ID NO: 1880811
uuauauggccguuaauuga

SEQ ID NO: 1995541 - RNA, 19 nt, Artificial Sequence
  Description of Artificial Sequence: Synthetic oligonucleotide
  Antisense strand to SEQ ID NO: 1995540
ucaauuaacggccauauaa

SEQ ID NO: 1995542 - RNA, 19 nt, Artificial Sequence
  Description of Artificial Sequence: Synthetic oligonucleotide
  Sense strand starting at position 181 of SEQ ID NO: 1880811
ucucaagaaugacuuguuu

SEQ ID NO: 1995543 - RNA, 19 nt, Artificial Sequence
  Description of Artificial Sequence: Synthetic oligonucleotide
  Antisense strand to SEQ ID NO: 1995542
aaacaagucauucuugaga

SEQ ID NO: 1995544 - RNA, 19 nt, Artificial Sequence
  Description of Artificial Sequence: Synthetic oligonucleotide
  Sense strand starting at position 273 of SEQ ID NO: 1880811
ucauaagaggucugaguuu

SEQ ID NO: 1995545 - RNA, 19 nt, Artificial Sequence
  Description of Artificial Sequence: Synthetic oligonucleotide
  Antisense strand to SEQ ID NO: 1995544
aaacucagaccucuuauga

SEQ ID NO: 1995546 - RNA, 19 nt, Artificial Sequence
  Description of Artificial Sequence: Synthetic oligonucleotide
  Sense strand starting at position 295 of SEQ ID NO: 1880811
augguauguucguauuucu

SEQ ID NO: 1995547 - RNA, 19 nt, Artificial Sequence
  Description of Artificial Sequence: Synthetic oligonucleotide
  Antisense strand to SEQ ID NO: 1995546
agaaauacgaacauaccau

SEQ ID NO: 1995548 - RNA, 19 nt, Artificial Sequence
  Description of Artificial Sequence: Synthetic oligonucleotide
  Sense strand starting at position 298 of SEQ ID NO: 1880811
guauguucguauuucuguu

SEQ ID NO: 1995549 - RNA, 19 nt, Artificial Sequence
  Description of Artificial Sequence: Synthetic oligonucleotide
  Antisense strand to SEQ ID NO: 1995548
aacagaaauacgaacauac

SEQ ID NO: 1995550 - RNA, 19 nt, Artificial Sequence
  Description of Artificial Sequence: Synthetic oligonucleotide
  Sense strand starting at position 302 of SEQ ID NO: 1880811
guucguauuucuguuaugu

SEQ ID NO: 1995551 - RNA, 19 nt, Artificial Sequence
  Description of Artificial Sequence: Synthetic oligonucleotide
  Antisense strand to SEQ ID NO: 1995550
acauaacagaaauacgaac

SEQ ID NO: 1995552 - RNA, 19 nt, Artificial Sequence
  Description of Artificial Sequence: Synthetic oligonucleotide
  Sense strand starting at position 304 of SEQ ID NO: 1880811
ucguauuucuguuauguac

SEQ ID NO: 1995553 - RNA, 19 nt, Artificial Sequence
  Description of Artificial Sequence: Synthetic oligonucleotide
  Antisense strand to SEQ ID NO: 1995552
guacauaacagaaauacga

SEQ ID NO: 1995554 - RNA, 19 nt, Artificial Sequence
  Description of Artificial Sequence: Synthetic oligonucleotide
  Sense strand starting at position 310 of SEQ ID NO: 1880811
uucuguuauguacaucgau

SEQ ID NO: 1995555 - RNA, 19 nt, Artificial Sequence
  Description of Artificial Sequence: Synthetic oligonucleotide
  Antisense strand to SEQ ID NO: 1995554
aucgauguacauaacagaa

SEQ ID NO: 1995556 - RNA, 19 nt, Artificial Sequence
  Description of Artificial Sequence: Synthetic oligonucleotide
  Sense strand starting at position 316 of SEQ ID NO: 1880811
uauguacaucgaugucaaa

SEQ ID NO: 1995557 - RNA, 19 nt, Artificial Sequence
  Description of Artificial Sequence: Synthetic oligonucleotide
  Antisense strand to SEQ ID NO: 1995556
uuugacaucgauguacaua

SEQ ID NO: 1995558 - RNA, 19 nt, Artificial Sequence
  Description of Artificial Sequence: Synthetic oligonucleotide
  Sense strand starting at position 319 of SEQ ID NO: 1880811
guacaucgaugucaaacau

SEQ ID NO: 1995559 - RNA, 19 nt, Artificial Sequence
  Description of Artificial Sequence: Synthetic oligonucleotide
  Antisense strand to SEQ ID NO: 1995558
auguuugacaucgauguac

SEQ ID NO: 1995560 - RNA, 19 nt, Artificial Sequence
  Description of Artificial Sequence: Synthetic oligonucleotide
  Sense strand starting at position 389 of SEQ ID NO: 1880811
aauaaaugguugcuuggau

SEQ ID NO: 1995561 - RNA, 19 nt, Artificial Sequence
  Description of Artificial Sequence: Synthetic oligonucleotide
  Antisense strand to SEQ ID NO: 1995560
auccaagcaaccauuuauu

SEQ ID NO: 1995562 - RNA, 19 nt, Artificial Sequence
  Description of Artificial Sequence: Synthetic oligonucleotide
  Sense strand starting at position 393 of SEQ ID NO: 1880811
aaugguugcuuggauaauc

SEQ ID NO: 1995563 - RNA, 19 nt, Artificial Sequence
  Description of Artificial Sequence: Synthetic oligonucleotide
  Antisense strand to SEQ ID NO: 1995562
gauuauccaagcaaccauu

SEQ ID NO: 1995564 - RNA, 19 nt, Artificial Sequence
  Description of Artificial Sequence: Synthetic oligonucleotide
  Sense strand starting at position 453 of SEQ ID NO: 1880811
agugacugaucuuccauac

SEQ ID NO: 1995565 - RNA, 19 nt, Artificial Sequence
  Description of Artificial Sequence: Synthetic oligonucleotide
  Antisense strand to SEQ ID NO: 1995564
guauggaagaucagucacu

SEQ ID NO: 1995566 - RNA, 19 nt, Artificial Sequence
  Description of Artificial Sequence: Synthetic oligonucleotide
  Sense strand starting at position 582 of SEQ ID NO: 1880811
uggaaacacuugccauacu

SEQ ID NO: 1995567 - RNA, 19 nt, Artificial Sequence
  Description of Artificial Sequence: Synthetic oligonucleotide
  Antisense strand to SEQ ID NO: 1995566
aguauggcaaguguuucca

SEQ ID NO: 1995568 - RNA, 19 nt, Artificial Sequence
  Description of Artificial Sequence: Synthetic oligonucleotide
  Sense strand starting at position 766 of SEQ ID NO: 1880811
uaauaaucaggcugagugu

SEQ ID NO: 1995569 - RNA, 19 nt, Artificial Sequence
  Description of Artificial Sequence: Synthetic oligonucleotide
  Antisense strand to SEQ ID NO: 1995568
acacucagccugauuauua

SEQ ID NO: 1995570 - RNA, 19 nt, Artificial Sequence
  Description of Artificial Sequence: Synthetic oligonucleotide
  Sense strand starting at position 779 of SEQ ID NO: 1880811
gagugugauugugagauuc

SEQ ID NO: 1995571 - RNA, 19 nt, Artificial Sequence
  Description of Artificial Sequence: Synthetic oligonucleotide
  Antisense strand to SEQ ID NO: 1995570
gaaucucacaaucacacuc

SEQ ID NO: 1995572 - RNA, 19 nt, Artificial Sequence
  Description of Artificial Sequence: Synthetic oligonucleotide
  Sense strand starting at position 802 of SEQ ID NO: 1880811
uaauacaagucuuggguaa

SEQ ID NO: 1995573 - RNA, 19 nt, Artificial Sequence
  Description of Artificial Sequence: Synthetic oligonucleotide
  Antisense strand to SEQ ID NO: 1995572
uuacccaagacuuguauua

SEQ ID NO: 1995574 - RNA, 19 nt, Artificial Sequence
  Description of Artificial Sequence: Synthetic oligonucleotide
  Sense strand starting at position 803 of SEQ ID NO: 1880811
aauacaagucuuggguaau

SEQ ID NO: 1995575 - RNA, 19 nt, Artificial Sequence
  Description of Artificial Sequence: Synthetic oligonucleotide
  Antisense strand to SEQ ID NO: 1995574
auuacccaagacuuguauu

SEQ ID NO: 1995576 - RNA, 19 nt, Artificial Sequence
  Description of Artificial Sequence: Synthetic oligonucleotide
  Sense strand starting at position 804 of SEQ ID NO: 1880811
auacaagucuuggguaauu

SEQ ID NO: 1995577 - RNA, 19 nt, Artificial Sequence
  Description of Artificial Sequence: Synthetic oligonucleotide
  Antisense strand to SEQ ID NO: 1995576
aauuacccaagacuuguau

SEQ ID NO: 1995578 - RNA, 19 nt, Artificial Sequence
  Description of Artificial Sequence: Synthetic oligonucleotide
  Sense strand starting at position 806 of SEQ ID NO: 1880811
acaagucuuggguaauugu

SEQ ID NO: 1995579 - RNA, 19 nt, Artificial Sequence
  Description of Artificial Sequence: Synthetic oligonucleotide
  Antisense strand to SEQ ID NO: 1995578
acaauuacccaagacuugu

SEQ ID NO: 1995580 - RNA, 19 nt, Artificial Sequence
  Description of Artificial Sequence: Synthetic oligonucleotide
  Sense strand starting at position 815 of SEQ ID NO: 1880811
ggguaauuguaucaguuga

SEQ ID NO: 1995581 - RNA, 19 nt, Artificial Sequence
  Description of Artificial Sequence: Synthetic oligonucleotide
  Antisense strand to SEQ ID NO: 1995580
ucaacugauacaauuaccc

SEQ ID NO: 1995582 - RNA, 19 nt, Artificial Sequence
  Description of Artificial Sequence: Synthetic oligonucleotide
  Sense strand starting at position 817 of SEQ ID NO: 1880811
guaauuguaucaguugaca

SEQ ID NO: 1995583 - RNA, 19 nt, Artificial Sequence
  Description of Artificial Sequence: Synthetic oligonucleotide
  Antisense strand to SEQ ID NO: 1995582
ugucaacugauacaauuac

SEQ ID NO: 1995584 - RNA, 19 nt, Artificial Sequence
  Description of Artificial Sequence: Synthetic oligonucleotide
  Sense strand starting at position 867 of SEQ ID NO: 1880811
gcaggagcuacugaaacuu

SEQ ID NO: 1995585 - RNA, 19 nt, Artificial Sequence
  Description of Artificial Sequence: Synthetic oligonucleotide
  Antisense strand to SEQ ID NO: 1995584
aaguuucaguagcuccugc

SEQ ID NO: 1995586 - RNA, 19 nt, Artificial Sequence
  Description of Artificial Sequence: Synthetic oligonucleotide
  Sense strand starting at position 876 of SEQ ID NO: 1880811
acugaaacuuccugccuga

SEQ ID NO: 1995587 - RNA, 19 nt, Artificial Sequence
  Description of Artificial Sequence: Synthetic oligonucleotide
  Antisense strand to SEQ ID NO: 1995586
ucaggcaggaaguuucagu

SEQ ID NO: 1995588 - RNA, 19 nt, Artificial Sequence
  Description of Artificial Sequence: Synthetic oligonucleotide
  Sense strand starting at position 879 of SEQ ID NO: 1880811
gaaacuuccugccugaugu

SEQ ID NO: 1995589 - RNA, 19 nt, Artificial Sequence
  Description of Artificial Sequence: Synthetic oligonucleotide
  Antisense strand to SEQ ID NO: 1995588
acaucaggcaggaaguuuc

SEQ ID NO: 1995590 - RNA, 19 nt, Artificial Sequence
  Description of Artificial Sequence: Synthetic oligonucleotide
  Sense strand starting at position 889 of SEQ ID NO: 1880811
gccugauguuaggagagau

SEQ ID NO: 1995591 - RNA, 19 nt, Artificial Sequence
  Description of Artificial Sequence: Synthetic oligonucleotide
  Antisense strand to SEQ ID NO: 1995590
aucucuccuaacaucaggc

SEQ ID NO: 1995592 - RNA, 19 nt, Artificial Sequence
  Description of Artificial Sequence: Synthetic oligonucleotide
  Sense strand starting at position 901 of SEQ ID NO: 1880811
gagagauguugguccaugu

SEQ ID NO: 1995593 - RNA, 19 nt, Artificial Sequence
  Description of Artificial Sequence: Synthetic oligonucleotide
  Antisense strand to SEQ ID NO: 1995592
acauggaccaacaucucuc

SEQ ID NO: 1995594 - RNA, 19 nt, Artificial Sequence
  Description of Artificial Sequence: Synthetic oligonucleotide
  Sense strand starting at position 905 of SEQ ID NO: 1880811
gauguugguccaugugauu

SEQ ID NO: 1995595 - RNA, 19 nt, Artificial Sequence
  Description of Artificial Sequence: Synthetic oligonucleotide
  Antisense strand to SEQ ID NO: 1995594
aaucacauggaccaacauc

SEQ ID NO: 1995596 - RNA, 19 nt, Artificial Sequence
  Description of Artificial Sequence: Synthetic oligonucleotide
  Sense strand starting at position 914 of SEQ ID NO: 1880811
ccaugugauuaggccagau

SEQ ID NO: 1995597 - RNA, 19 nt, Artificial Sequence
  Description of Artificial Sequence: Synthetic oligonucleotide
  Antisense strand to SEQ ID NO: 1995596
aucuggccuaaucacaugg

SEQ ID NO: 1995598 - RNA, 19 nt, Artificial Sequence
  Description of Artificial Sequence: Synthetic oligonucleotide
  Sense strand starting at position 916 of SEQ ID NO: 1880811
augugauuaggccagaugu

SEQ ID NO: 1995599 - RNA, 19 nt, Artificial Sequence
  Description of Artificial Sequence: Synthetic oligonucleotide
  Antisense strand to SEQ ID NO: 1995598
acaucuggccuaaucacau

SEQ ID NO: 1995600 - RNA, 19 nt, Artificial Sequence
  Description of Artificial Sequence: Synthetic oligonucleotide
  Sense strand starting at position 918 of SEQ ID NO: 1880811
gugauuaggccagaugugu

SEQ ID NO: 1995601 - RNA, 19 nt, Artificial Sequence
  Description of Artificial Sequence: Synthetic oligonucleotide
  Antisense strand to SEQ ID NO: 1995600
acacaucuggccuaaucac

SEQ ID NO: 1995602 - RNA, 19 nt, Artificial Sequence
  Description of Artificial Sequence: Synthetic oligonucleotide
  Sense strand starting at position 926 of SEQ ID NO: 1880811
gccagauguguuugcuuaa

SEQ ID NO: 1995603 - RNA, 19 nt, Artificial Sequence
  Description of Artificial Sequence: Synthetic oligonucleotide
  Antisense strand to SEQ ID NO: 1995602
uuaagcaaacacaucuggc

SEQ ID NO: 1995604 - RNA, 19 nt, Artificial Sequence
  Description of Artificial Sequence: Synthetic oligonucleotide
  Sense strand starting at position 927 of SEQ ID NO: 1880811
ccagauguguuugcuuaau

SEQ ID NO: 1995605 - RNA, 19 nt, Artificial Sequence
  Description of Artificial Sequence: Synthetic oligonucleotide
  Antisense strand to SEQ ID NO: 1995604
auuaagcaaacacaucugg

SEQ ID NO: 1995606 - RNA, 19 nt, Artificial Sequence
  Description of Artificial Sequence: Synthetic oligonucleotide
  Sense strand starting at position 929 of SEQ ID NO: 1880811
agauguguuugcuuaauug

SEQ ID NO: 1995607 - RNA, 19 nt, Artificial Sequence
  Description of Artificial Sequence: Synthetic oligonucleotide
  Antisense strand to SEQ ID NO: 1995606
caauuaagcaaacacaucu

SEQ ID NO: 1995608 - RNA, 19 nt, Artificial Sequence
  Description of Artificial Sequence: Synthetic oligonucleotide
  Sense strand starting at position 936 of SEQ ID NO: 1880811
uuugcuuaauuguggcuua

SEQ ID NO: 1995609 - RNA, 19 nt, Artificial Sequence
  Description of Artificial Sequence: Synthetic oligonucleotide
  Antisense strand to SEQ ID NO: 1995608
uaagccacaauuaagcaaa

SEQ ID NO: 1995610 - RNA, 19 nt, Artificial Sequence
  Description of Artificial Sequence: Synthetic oligonucleotide
  Sense strand starting at position 939 of SEQ ID NO: 1880811
gcuuaauuguggcuuagaa

SEQ ID NO: 1995611 - RNA, 19 nt, Artificial Sequence
  Description of Artificial Sequence: Synthetic oligonucleotide
  Antisense strand to SEQ ID NO: 1995610
uucuaagccacaauuaagc

SEQ ID NO: 1995612 - RNA, 19 nt, Artificial Sequence
  Description of Artificial Sequence: Synthetic oligonucleotide
  Sense strand starting at position 961 of SEQ ID NO: 1880811
uuagguuucugaccucuca

SEQ ID NO: 1995613 - RNA, 19 nt, Artificial Sequence
  Description of Artificial Sequence: Synthetic oligonucleotide
  Antisense strand to SEQ ID NO: 1995612
ugagaggucagaaaccuaa

SEQ ID NO: 1995614 - RNA, 19 nt, Artificial Sequence
  Description of Artificial Sequence: Synthetic oligonucleotide
  Sense strand starting at position 4 of SEQ ID NO: 1880812
cgacuauuauuaguaucau

SEQ ID NO: 1995615 - RNA, 19 nt, Artificial Sequence
  Description of Artificial Sequence: Synthetic oligonucleotide
  Antisense strand to SEQ ID NO: 1995614
augauacuaauaauagucg

SEQ ID NO: 1995616 - RNA, 19 nt, Artificial Sequence
  Description of Artificial Sequence: Synthetic oligonucleotide
  Sense strand starting at position 100 of SEQ ID NO: 1880812
uggaaaccuucuuugcaga

SEQ ID NO: 1995617 - RNA, 19 nt, Artificial Sequence
  Description of Artificial Sequence: Synthetic oligonucleotide
  Antisense strand to SEQ ID NO: 1995616
ucugcaaagaagguuucca

SEQ ID NO: 1995618 - RNA, 19 nt, Artificial Sequence
  Description of Artificial Sequence: Synthetic oligonucleotide
  Sense strand starting at position 101 of SEQ ID NO: 1880812
ggaaaccuucuuugcagaa

SEQ ID NO: 1995619 - RNA, 19 nt, Artificial Sequence
  Description of Artificial Sequence: Synthetic oligonucleotide
  Antisense strand to SEQ ID NO: 1995618
uucugcaaagaagguuucc

SEQ ID NO: 1995620 - RNA, 19 nt, Artificial Sequence
  Description of Artificial Sequence: Synthetic oligonucleotide
  Sense strand starting at position 399 of SEQ ID NO: 1880812
acuagauccuggcuaucca

SEQ ID NO: 1995621 - RNA, 19 nt, Artificial Sequence
  Description of Artificial Sequence: Synthetic oligonucleotide
  Antisense strand to SEQ ID NO: 1995620
uggauagccaggaucuagu

SEQ ID NO: 1995622 - RNA, 19 nt, Artificial Sequence
  Description of Artificial Sequence: Synthetic oligonucleotide
  Sense strand starting at position 680 of SEQ ID NO: 1880812
acauuuaacuuguccgcaa

SEQ ID NO: 1995623 - RNA, 19 nt, Artificial Sequence
  Description of Artificial Sequence: Synthetic oligonucleotide
  Antisense strand to SEQ ID NO: 1995622
uugcggacaaguuaaaugu

SEQ ID NO: 1995624 - RNA, 19 nt, Artificial Sequence
  Description of Artificial Sequence: Synthetic oligonucleotide
  Sense strand starting at position 682 of SEQ ID NO: 1880812
auuuaacuuguccgcaaau

SEQ ID NO: 1995625 - RNA, 19 nt, Artificial Sequence
  Description of Artificial Sequence: Synthetic oligonucleotide
  Antisense strand to SEQ ID NO: 1995624
auuugcggacaaguuaaau

SEQ ID NO: 1995626 - RNA, 19 nt, Artificial Sequence
  Description of Artificial Sequence: Synthetic oligonucleotide
  Sense strand starting at position 735 of SEQ ID NO: 1880812
ggcagaguguaacugaaua

SEQ ID NO: 1995627 - RNA, 19 nt, Artificial Sequence
  Description of Artificial Sequence: Synthetic oligonucleotide
  Antisense strand to SEQ ID NO: 1995626
uauucaguuacacucugcc

SEQ ID NO: 1995628 - RNA, 19 nt, Artificial Sequence
  Description of Artificial Sequence: Synthetic oligonucleotide
  Sense strand starting at position 1108 of SEQ ID NO: 1880812
ucucauuccucacugagag

SEQ ID NO: 1995629 - RNA, 19 nt, Artificial Sequence
  Description of Artificial Sequence: Synthetic oligonucleotide
  Antisense strand to SEQ ID NO: 1995628
cucucagugaggaaugaga

SEQ ID NO: 1995630 - RNA, 19 nt, Artificial Sequence
  Description of Artificial Sequence: Synthetic oligonucleotide
  Sense strand starting at position 1109 of SEQ ID NO: 1880812
cucauuccucacugagaga

SEQ ID NO: 1995631 - RNA, 19 nt, Artificial Sequence
  Description of Artificial Sequence: Synthetic oligonucleotide
  Antisense strand to SEQ ID NO: 1995630
ucucucagugaggaaugag

SEQ ID NO: 1995632 - RNA, 19 nt, Artificial Sequence
  Description of Artificial Sequence: Synthetic oligonucleotide
  Sense strand starting at position 1239 of SEQ ID NO: 1880812
ggaagacucauggguuucu

SEQ ID NO: 1995633 - RNA, 19 nt, Artificial Sequence
  Description of Artificial Sequence: Synthetic oligonucleotide
  Antisense strand to SEQ ID NO: 1995632
agaaacccaugagucuucc

SEQ ID NO: 1995634 - RNA, 19 nt, Artificial Sequence
  Description of Artificial Sequence: Synthetic oligonucleotide
  Sense strand starting at position 1240 of SEQ ID NO: 1880812
gaagacucauggguuucua

SEQ ID NO: 1995635 - RNA, 19 nt, Artificial Sequence
  Description of Artificial Sequence: Synthetic oligonucleotide
  Antisense strand to SEQ ID NO: 1995634
uagaaacccaugagucuuc

SEQ ID NO: 1995636 - RNA, 19 nt, Artificial Sequence
  Description of Artificial Sequence: Synthetic oligonucleotide
  Sense strand starting at position 1244 of SEQ ID NO: 1880812
acucauggguuucuaagga

SEQ ID NO: 1995637 - RNA, 19 nt, Artificial Sequence
  Description of Artificial Sequence: Synthetic oligonucleotide
  Antisense strand to SEQ ID NO: 1995636
uccuuagaaacccaugagu

SEQ ID NO: 1995638 - RNA, 19 nt, Artificial Sequence
  Description of Artificial Sequence: Synthetic oligonucleotide
  Sense strand starting at position 2034 of SEQ ID NO: 1880812
gcggcaugagauuauuaca

SEQ ID NO: 1995639 - RNA, 19 nt, Artificial Sequence
  Description of Artificial Sequence: Synthetic oligonucleotide
  Antisense strand to SEQ ID NO: 1995638
uguaauaaucucaugccgc

SEQ ID NO: 1995640 - RNA, 19 nt, Artificial Sequence
  Description of Artificial Sequence: Synthetic oligonucleotide
  Sense strand starting at position 2041 of SEQ ID NO: 1880812
gagauuauuacacguggug

SEQ ID NO: 1995641 - RNA, 19 nt, Artificial Sequence
  Description of Artificial Sequence: Synthetic oligonucleotide
  Antisense strand to SEQ ID NO: 1995640
caccacguguaauaaucuc

SEQ ID NO: 1995642 - RNA, 19 nt, Artificial Sequence
  Description of Artificial Sequence: Synthetic oligonucleotide
  Sense strand starting at position 2043 of SEQ ID NO: 1880812
gauuauuacacguggugga

SEQ ID NO: 1995643 - RNA, 19 nt, Artificial Sequence
  Description of Artificial Sequence: Synthetic oligonucleotide
  Antisense strand to SEQ ID NO: 1995642
uccaccacguguaauaauc

SEQ ID NO: 1995644 - RNA, 19 nt, Artificial Sequence
  Description of Artificial Sequence: Synthetic oligonucleotide
  Sense strand starting at position 2252 of SEQ ID NO: 1880812
gcaggugcagaguaacauu

SEQ ID NO: 1995645 - RNA, 19 nt, Artificial Sequence
  Description of Artificial Sequence: Synthetic oligonucleotide
  Antisense strand to SEQ ID NO: 1995644
aauguuacucugcaccugc

SEQ ID NO: 1995646 - RNA, 19 nt, Artificial Sequence
  Description of Artificial Sequence: Synthetic oligonucleotide
  Sense strand starting at position 2374 of SEQ ID NO: 1880812
uguguuagagaaggucauu

SEQ ID NO: 1995647 - RNA, 19 nt, Artificial Sequence
  Description of Artificial Sequence: Synthetic oligonucleotide
  Antisense strand to SEQ ID NO: 1995646
aaugaccuucucuaacaca

SEQ ID NO: 1995648 - RNA, 19 nt, Artificial Sequence
  Description of Artificial Sequence: Synthetic oligonucleotide
  Sense strand starting at position 2398 of SEQ ID NO: 1880812
ggcugcuuucgucuuaaua

SEQ ID NO: 1995649 - RNA, 19 nt, Artificial Sequence
  Description of Artificial Sequence: Synthetic oligonucleotide
  Antisense strand to SEQ ID NO: 1995648
uauuaagacgaaagcagcc

SEQ ID NO: 1995650 - RNA, 19 nt, Artificial Sequence
  Description of Artificial Sequence: Synthetic oligonucleotide
  Sense strand starting at position 2399 of SEQ ID NO: 1880812
gcugcuuucgucuuaauac

SEQ ID NO: 1995651 - RNA, 19 nt, Artificial Sequence
  Description of Artificial Sequence: Synthetic oligonucleotide
  Antisense strand to SEQ ID NO: 1995650
guauuaagacgaaagcagc

SEQ ID NO: 1995652 - RNA, 19 nt, Artificial Sequence
  Description of Artificial Sequence: Synthetic oligonucleotide
  Sense strand starting at position 2509 of SEQ ID NO: 1880812
guguuaacaguggauugca

SEQ ID NO: 1995653 - RNA, 19 nt, Artificial Sequence
  Description of Artificial Sequence: Synthetic oligonucleotide
  Antisense strand to SEQ ID NO: 1995652
ugcaauccacuguuaacac

SEQ ID NO: 1995654 - RNA, 19 nt, Artificial Sequence
  Description of Artificial Sequence: Synthetic oligonucleotide
  Sense strand starting at position 2582 of SEQ ID NO: 1880812
aacguuacacaguauguua

SEQ ID NO: 1995655 - RNA, 19 nt, Artificial Sequence
  Description of Artificial Sequence: Synthetic oligonucleotide
  Antisense strand to SEQ ID NO: 1995654
uaacauacuguguaacguu

SEQ ID NO: 1995656 - RNA, 19 nt, Artificial Sequence
  Description of Artificial Sequence: Synthetic oligonucleotide
  Sense strand starting at position 2629 of SEQ ID NO: 1880812
aggugaugcaucugaacuu

SEQ ID NO: 1995657 - RNA, 19 nt, Artificial Sequence
  Description of Artificial Sequence: Synthetic oligonucleotide
  Antisense strand to SEQ ID NO: 1995656
aaguucagaugcaucaccu

SEQ ID NO: 1995658 - RNA, 19 nt, Artificial Sequence
  Description of Artificial Sequence: Synthetic oligonucleotide
  Sense strand starting at position 2755 of SEQ ID NO: 1880812
uuugcauuugugugaaaua

SEQ ID NO: 1995659 - RNA, 19 nt, Artificial Sequence
  Description of Artificial Sequence: Synthetic oligonucleotide
  Antisense strand to SEQ ID NO: 1995658
uauuucacacaaaugcaaa

SEQ ID NO: 1995660 - RNA, 19 nt, Artificial Sequence
  Description of Artificial Sequence: Synthetic oligonucleotide
  Sense strand starting at position 2809 of SEQ ID NO: 1880812
acagauucguaaccagauc

SEQ ID NO: 1995661 - RNA, 19 nt, Artificial Sequence
  Description of Artificial Sequence: Synthetic oligonucleotide
  Antisense strand to SEQ ID NO: 1995660
gaucugguuacgaaucugu

SEQ ID NO: 1995662 - RNA, 19 nt, Artificial Sequence
  Description of Artificial Sequence: Synthetic oligonucleotide
  Sense strand starting at position 2845 of SEQ ID NO: 1880812
gugugacgugcuuugcaua

SEQ ID NO: 1995663 - RNA, 19 nt, Artificial Sequence
  Description of Artificial Sequence: Synthetic oligonucleotide
  Antisense strand to SEQ ID NO: 1995662
uaugcaaagcacgucacac

SEQ ID NO: 1995664 - RNA, 19 nt, Artificial Sequence
  Description of Artificial Sequence: Synthetic oligonucleotide
  Sense strand starting at position 2868 of SEQ ID NO: 1880812
auuauaggccuuuguugaa

SEQ ID NO: 1995665 - RNA, 19 nt, Artificial Sequence
  Description of Artificial Sequence: Synthetic oligonucleotide
  Antisense strand to SEQ ID NO: 1995664
uucaacaaaggccuauaau

SEQ ID NO: 1995666 - RNA, 19 nt, Artificial Sequence
  Description of Artificial Sequence: Synthetic oligonucleotide
  Sense strand starting at position 2909 of SEQ ID NO: 1880812
agcuaaauguagcucauuu

SEQ ID NO: 1995667 - RNA, 19 nt, Artificial Sequence
  Description of Artificial Sequence: Synthetic oligonucleotide
  Antisense strand to SEQ ID NO: 1995666
aaaugagcuacauuuagcu

SEQ ID NO: 1995668 - RNA, 19 nt, Artificial Sequence
  Description of Artificial Sequence: Synthetic oligonucleotide
  Sense strand starting at position 2932 of SEQ ID NO: 1880812
agcuuaauauaucugagaa

SEQ ID NO: 1995669 - RNA, 19 nt, Artificial Sequence
  Description of Artificial Sequence: Synthetic oligonucleotide
  Antisense strand to SEQ ID NO: 1995668
uucucagauauauuaagcu

SEQ ID NO: 1995670 - RNA, 19 nt, Artificial Sequence
  Description of Artificial Sequence: Synthetic oligonucleotide
  Sense strand starting at position 3124 of SEQ ID NO: 1880812
aaguauagagguuguuaau

SEQ ID NO: 1995671 - RNA, 19 nt, Artificial Sequence
  Description of Artificial Sequence: Synthetic oligonucleotide
  Antisense strand to SEQ ID NO: 1995670
auuaacaaccucuauacuu

SEQ ID NO: 1995672 - RNA, 19 nt, Artificial Sequence
  Description of Artificial Sequence: Synthetic oligonucleotide
  Sense strand starting at position 3142 of SEQ ID NO: 1880812
ugugauaaguaucuacauu

SEQ ID NO: 1995673 - RNA, 19 nt, Artificial Sequence
  Description of Artificial Sequence: Synthetic oligonucleotide
  Antisense strand to SEQ ID NO: 1995672
aauguagauacuuaucaca

SEQ ID NO: 1995674 - RNA, 19 nt, Artificial Sequence
  Description of Artificial Sequence: Synthetic oligonucleotide
  Sense strand starting at position 3303 of SEQ ID NO: 1880812
gucgguaauucacuggaaa

SEQ ID NO: 1995675 - RNA, 19 nt, Artificial Sequence
  Description of Artificial Sequence: Synthetic oligonucleotide
  Antisense strand to SEQ ID NO: 1995674
uuuccagugaauuaccgac

SEQ ID NO: 1995676 - RNA, 19 nt, Artificial Sequence
  Description of Artificial Sequence: Synthetic oligonucleotide
  Sense strand starting at position 3315 of SEQ ID NO: 1880812
cuggaaacccguuagucaa

SEQ ID NO: 1995677 - RNA, 19 nt, Artificial Sequence
  Description of Artificial Sequence: Synthetic oligonucleotide
  Antisense strand to SEQ ID NO: 1995676
uugacuaacggguuuccag

SEQ ID NO: 1995678 - RNA, 19 nt, Artificial Sequence
  Description of Artificial Sequence: Synthetic oligonucleotide
  Sense strand starting at position 3317 of SEQ ID NO: 1880812
ggaaacccguuagucaaua

SEQ ID NO: 1995679 - RNA, 19 nt, Artificial Sequence
  Description of Artificial Sequence: Synthetic oligonucleotide
  Antisense strand to SEQ ID NO: 1995678
uauugacuaacggguuucc

SEQ ID NO: 1995680 - RNA, 19 nt, Artificial Sequence
  Description of Artificial Sequence: Synthetic oligonucleotide
  Sense strand starting at position 3318 of SEQ ID NO: 1880812
gaaacccguuagucaauaa

SEQ ID NO: 1995681 - RNA, 19 nt, Artificial Sequence
  Description of Artificial Sequence: Synthetic oligonucleotide
  Antisense strand to SEQ ID NO: 1995680
uuauugacuaacggguuuc

SEQ ID NO: 1995682 - RNA, 19 nt, Artificial Sequence
  Description of Artificial Sequence: Synthetic oligonucleotide
  Sense strand starting at position 3322 of SEQ ID NO: 1880812
cccguuagucaauaagaag

SEQ ID NO: 1995683 - RNA, 19 nt, Artificial Sequence
  Description of Artificial Sequence: Synthetic oligonucleotide
  Antisense strand to SEQ ID NO: 1995682
cuucuuauugacuaacggg

SEQ ID NO: 1995684 - RNA, 19 nt, Artificial Sequence
  Description of Artificial Sequence: Synthetic oligonucleotide
  Sense strand starting at position 3408 of SEQ ID NO: 1880812
uguguaucugccuaaauga

SEQ ID NO: 1995685 - RNA, 19 nt, Artificial Sequence
  Description of Artificial Sequence: Synthetic oligonucleotide
  Antisense strand to SEQ ID NO: 1995684
ucauuuaggcagauacaca

SEQ ID NO: 1995686 - RNA, 19 nt, Artificial Sequence
  Description of Artificial Sequence: Synthetic oligonucleotide
  Sense strand starting at position 3918 of SEQ ID NO: 1880812
aaagguugagaguguuuau

SEQ ID NO: 1995687 - RNA, 19 nt, Artificial Sequence
  Description of Artificial Sequence: Synthetic oligonucleotide
  Antisense strand to SEQ ID NO: 1995686
auaaacacucucaaccuuu

SEQ ID NO: 1995688 - RNA, 19 nt, Artificial Sequence
  Description of Artificial Sequence: Synthetic oligonucleotide
  Sense strand starting at position 3921 of SEQ ID NO: 1880812
gguugagaguguuuaugga

SEQ ID NO: 1995689 - RNA, 19 nt, Artificial Sequence
  Description of Artificial Sequence: Synthetic oligonucleotide
  Antisense strand to SEQ ID NO: 1995688
uccauaaacacucucaacc

SEQ ID NO: 1995690 - RNA, 19 nt, Artificial Sequence
  Description of Artificial Sequence: Synthetic oligonucleotide
  Sense strand starting at position 3976 of SEQ ID NO: 1880812
uggagacacugcccucaau

SEQ ID NO: 1995691 - RNA, 19 nt, Artificial Sequence
  Description of Artificial Sequence: Synthetic oligonucleotide
  Antisense strand to SEQ ID NO: 1995690
auugagggcagugucucca

SEQ ID NO: 1995692 - RNA, 19 nt, Artificial Sequence
  Description of Artificial Sequence: Synthetic oligonucleotide
  Sense strand starting at position 3979 of SEQ ID NO: 1880812
agacacugcccucaauguu

SEQ ID NO: 1995693 - RNA, 19 nt, Artificial Sequence
  Description of Artificial Sequence: Synthetic oligonucleotide
  Antisense strand to SEQ ID NO: 1995692
aacauugagggcagugucu

SEQ ID NO: 1995694 - RNA, 19 nt, Artificial Sequence
  Description of Artificial Sequence: Synthetic oligonucleotide
  Sense strand starting at position 9 of SEQ ID NO: 1880813
cccaauugccagcaguaga

SEQ ID NO: 1995695 - RNA, 19 nt, Artificial Sequence
  Description of Artificial Sequence: Synthetic oligonucleotide
  Antisense strand to SEQ ID NO: 1995694
ucuacugcuggcaauuggg

SEQ ID NO: 1995696 - RNA, 19 nt, Artificial Sequence
  Description of Artificial Sequence: Synthetic oligonucleotide
  Sense strand starting at position 22 of SEQ ID NO: 1880813
aguagauucuccuccucua

SEQ ID NO: 1995697 - RNA, 19 nt, Artificial Sequence
  Description of Artificial Sequence: Synthetic oligonucleotide
  Antisense strand to SEQ ID NO: 1995696
uagaggaggagaaucuacu

SEQ ID NO: 1995698 - RNA, 19 nt, Artificial Sequence
  Description of Artificial Sequence: Synthetic oligonucleotide
  Sense strand starting at position 62 of SEQ ID NO: 1880813
acagaaggcucuucuauaa

SEQ ID NO: 1995699 - RNA, 19 nt, Artificial Sequence
  Description of Artificial Sequence: Synthetic oligonucleotide
  Antisense strand to SEQ ID NO: 1995698
uuauagaagagccuucugu

SEQ ID NO: 1995700 - RNA, 19 nt, Artificial Sequence
  Description of Artificial Sequence: Synthetic oligonucleotide
  Sense strand starting at position 152 of SEQ ID NO: 1880813
augaguuuaucugugaaug

SEQ ID NO: 1995701 - RNA, 19 nt, Artificial Sequence
  Description of Artificial Sequence: Synthetic oligonucleotide
  Antisense strand to SEQ ID NO: 1995700
cauucacagauaaacucau

SEQ ID NO: 1995702 - RNA, 19 nt, Artificial Sequence
  Description of Artificial Sequence: Synthetic oligonucleotide
  Sense strand starting at position 162 of SEQ ID NO: 1880813
cugugaaugccugaaacac

SEQ ID NO: 1995703 - RNA, 19 nt, Artificial Sequence
  Description of Artificial Sequence: Synthetic oligonucleotide
  Antisense strand to SEQ ID NO: 1995702
guguuucaggcauucacag

SEQ ID NO: 1995704 - RNA, 19 nt, Artificial Sequence
  Description of Artificial Sequence: Synthetic oligonucleotide
  Sense strand starting at position 200 of SEQ ID NO: 1880813
gcuuaucucgaagaaccua

SEQ ID NO: 1995705 - RNA, 19 nt, Artificial Sequence
  Description of Artificial Sequence: Synthetic oligonucleotide
  Antisense strand to SEQ ID NO: 1995704
uagguucuucgagauaagc

SEQ ID NO: 1995706 - RNA, 19 nt, Artificial Sequence
  Description of Artificial Sequence: Synthetic oligonucleotide
  Sense strand starting at position 517 of SEQ ID NO: 1880813
uggagcacucagugaagga

SEQ ID NO: 1995707 - RNA, 19 nt, Artificial Sequence
  Description of Artificial Sequence: Synthetic oligonucleotide
  Antisense strand to SEQ ID NO: 1995706
uccuucacugagugcucca

SEQ ID NO: 1995708 - RNA, 19 nt, Artificial Sequence
  Description of Artificial Sequence: Synthetic oligonucleotide
  Sense strand starting at position 631 of SEQ ID NO: 1880813
caucucugugcugaaugau

SEQ ID NO: 1995709 - RNA, 19 nt, Artificial Sequence
  Description of Artificial Sequence: Synthetic oligonucleotide
  Antisense strand to SEQ ID NO: 1995708
aucauucagcacagagaug

SEQ ID NO: 1995710 - RNA, 19 nt, Artificial Sequence
  Description of Artificial Sequence: Synthetic oligonucleotide
  Sense strand starting at position 673 of SEQ ID NO: 1880813
uugggcugaugauuggaua

SEQ ID NO: 1995711 - RNA, 19 nt, Artificial Sequence
  Description of Artificial Sequence: Synthetic oligonucleotide
  Antisense strand to SEQ ID NO: 1995710
uauccaaucaucagcccaa

SEQ ID NO: 1995712 - RNA, 19 nt, Artificial Sequence
  Description of Artificial Sequence: Synthetic oligonucleotide
  Sense strand starting at position 698 of SEQ ID NO: 1880813
ggauuagucucaucucaua

SEQ ID NO: 1995713 - RNA, 19 nt, Artificial Sequence
  Description of Artificial Sequence: Synthetic oligonucleotide
  Antisense strand to SEQ ID NO: 1995712
uaugagaugagacuaaucc

SEQ ID NO: 1995714 - RNA, 19 nt, Artificial Sequence
  Description of Artificial Sequence: Synthetic oligonucleotide
  Sense strand starting at position 979 of SEQ ID NO: 1880813
ggagcuucugaggauucuu

SEQ ID NO: 1995715 - RNA, 19 nt, Artificial Sequence
  Description of Artificial Sequence: Synthetic oligonucleotide
  Antisense strand to SEQ ID NO: 1995714
aagaauccucagaagcucc

SEQ ID NO: 1995716 - RNA, 19 nt, Artificial Sequence
  Description of Artificial Sequence: Synthetic oligonucleotide
  Sense strand starting at position 984 of SEQ ID NO: 1880813
uucugaggauucuuuauag

SEQ ID NO: 1995717 - RNA, 19 nt, Artificial Sequence
  Description of Artificial Sequence: Synthetic oligonucleotide
  Antisense strand to SEQ ID NO: 1995716
cuauaaagaauccucagaa

SEQ ID NO: 1995718 - RNA, 19 nt, Artificial Sequence
  Description of Artificial Sequence: Synthetic oligonucleotide
  Sense strand starting at position 1074 of SEQ ID NO: 1880813
caagaugucuuugcucaag

SEQ ID NO: 1995719 - RNA, 19 nt, Artificial Sequence
  Description of Artificial Sequence: Synthetic oligonucleotide
  Antisense strand to SEQ ID NO: 1995718
cuugagcaaagacaucuug

SEQ ID NO: 1995720 - RNA, 19 nt, Artificial Sequence
  Description of Artificial Sequence: Synthetic oligonucleotide
  Sense strand starting at position 1076 of SEQ ID NO: 1880813
agaugucuuugcucaagac

SEQ ID NO: 1995721 - RNA, 19 nt, Artificial Sequence
  Description of Artificial Sequence: Synthetic oligonucleotide
  Antisense strand to SEQ ID NO: 1995720
gucuugagcaaagacaucu

SEQ ID NO: 1995722 - RNA, 19 nt, Artificial Sequence
  Description of Artificial Sequence: Synthetic oligonucleotide
  Sense strand starting at position 1080 of SEQ ID NO: 1880813
gucuuugcucaagacaaga

SEQ ID NO: 1995723 - RNA, 19 nt, Artificial Sequence
  Description of Artificial Sequence: Synthetic oligonucleotide
  Antisense strand to SEQ ID NO: 1995722
ucuugucuugagcaaagac

SEQ ID NO: 1995724 - RNA, 19 nt, Artificial Sequence
  Description of Artificial Sequence: Synthetic oligonucleotide
  Sense strand starting at position 1321 of SEQ ID NO: 1880813
gucacugauaaaggguuau

SEQ ID NO: 1995725 - RNA, 19 nt, Artificial Sequence
  Description of Artificial Sequence: Synthetic oligonucleotide
  Antisense strand to SEQ ID NO: 1995724
auaacccuuuaucagugac

SEQ ID NO: 1995726 - RNA, 19 nt, Artificial Sequence
  Description of Artificial Sequence: Synthetic oligonucleotide
  Sense strand starting at position 1325 of SEQ ID NO: 1880813
cugauaaaggguuaugcua

SEQ ID NO: 1995727 - RNA, 19 nt, Artificial Sequence
  Description of Artificial Sequence: Synthetic oligonucleotide
  Antisense strand to SEQ ID NO: 1995726
uagcauaacccuuuaucag

SEQ ID NO: 1995728 - RNA, 19 nt, Artificial Sequence
  Description of Artificial Sequence: Synthetic oligonucleotide
  Sense strand starting at position 1350 of SEQ ID NO: 1880813
aucucuaacuccuuaggga

SEQ ID NO: 1995729 - RNA, 19 nt, Artificial Sequence
  Description of Artificial Sequence: Synthetic oligonucleotide
  Antisense strand to SEQ ID NO: 1995728
ucccuaaggaguuagagau

SEQ ID NO: 1995730 - RNA, 19 nt, Artificial Sequence
  Description of Artificial Sequence: Synthetic oligonucleotide
  Sense strand starting at position 1567 of SEQ ID NO: 1880813
aggagaucagcaugaagca

SEQ ID NO: 1995731 - RNA, 19 nt, Artificial Sequence
  Description of Artificial Sequence: Synthetic oligonucleotide
  Antisense strand to SEQ ID NO: 1995730
ugcuucaugcugaucuccu

SEQ ID NO: 1995732 - RNA, 19 nt, Artificial Sequence
  Description of Artificial Sequence: Synthetic oligonucleotide
  Sense strand starting at position 1721 of SEQ ID NO: 1880813
cucugaauuccugacagca

SEQ ID NO: 1995733 - RNA, 19 nt, Artificial Sequence
  Description of Artificial Sequence: Synthetic oligonucleotide
  Antisense strand to SEQ ID NO: 1995732
ugcugucaggaauucagag

SEQ ID NO: 1995734 - RNA, 19 nt, Artificial Sequence
  Description of Artificial Sequence: Synthetic oligonucleotide
  Sense strand starting at position 1737 of SEQ ID NO: 1880813
gcaggaagguccucugaga

SEQ ID NO: 1995735 - RNA, 19 nt, Artificial Sequence
  Description of Artificial Sequence: Synthetic oligonucleotide
  Antisense strand to SEQ ID NO: 1995734
ucucagaggaccuuccugc

SEQ ID NO: 1995736 - RNA, 19 nt, Artificial Sequence
  Description of Artificial Sequence: Synthetic oligonucleotide
  Sense strand starting at position 1794 of SEQ ID NO: 1880813
acuauacaggcucaguaau

SEQ ID NO: 1995737 - RNA, 19 nt, Artificial Sequence
  Description of Artificial Sequence: Synthetic oligonucleotide
  Antisense strand to SEQ ID NO: 1995736
auuacugagccuguauagu

SEQ ID NO: 1995738 - RNA, 19 nt, Artificial Sequence
  Description of Artificial Sequence: Synthetic oligonucleotide
  Sense strand starting at position 1897 of SEQ ID NO: 1880813
gauuacagcccuugugaaa

SEQ ID NO: 1995739 - RNA, 19 nt, Artificial Sequence
  Description of Artificial Sequence: Synthetic oligonucleotide
  Antisense strand to SEQ ID NO: 1995738
uuucacaagggcuguaauc

SEQ ID NO: 1995740 - RNA, 19 nt, Artificial Sequence
  Description of Artificial Sequence: Synthetic oligonucleotide
  Sense strand starting at position 1977 of SEQ ID NO: 1880813
uagguaaugguagagaugu

SEQ ID NO: 1995741 - RNA, 19 nt, Artificial Sequence
  Description of Artificial Sequence: Synthetic oligonucleotide
  Antisense strand to SEQ ID NO: 1995740
acaucucuaccauuaccua

SEQ ID NO: 1995742 - RNA, 19 nt, Artificial Sequence
  Description of Artificial Sequence: Synthetic oligonucleotide
  Sense strand starting at position 1979 of SEQ ID NO: 1880813
gguaaugguagagauguau

SEQ ID NO: 1995743 - RNA, 19 nt, Artificial Sequence
  Description of Artificial Sequence: Synthetic oligonucleotide
  Antisense strand to SEQ ID NO: 1995742
auacaucucuaccauuacc

SEQ ID NO: 1995744 - RNA, 19 nt, Artificial Sequence
  Description of Artificial Sequence: Synthetic oligonucleotide
  Sense strand starting at position 1996 of SEQ ID NO: 1880813
auaacaggaucugagagaa

SEQ ID NO: 1995745 - RNA, 19 nt, Artificial Sequence
  Description of Artificial Sequence: Synthetic oligonucleotide
  Antisense strand to SEQ ID NO: 1995744
uucucucagauccuguuau

SEQ ID NO: 1995746 - RNA, 19 nt, Artificial Sequence
  Description of Artificial Sequence: Synthetic oligonucleotide
  Sense strand starting at position 2115 of SEQ ID NO: 1880813
cuggcauauccugggaaug

SEQ ID NO: 1995747 - RNA, 19 nt, Artificial Sequence
  Description of Artificial Sequence: Synthetic oligonucleotide
  Antisense strand to SEQ ID NO: 1995746
cauucccaggauaugccag

SEQ ID NO: 1995748 - RNA, 19 nt, Artificial Sequence
  Description of Artificial Sequence: Synthetic oligonucleotide
  Sense strand starting at position 2161 of SEQ ID NO: 1880813
cuggaaaccuuuccaaguu

SEQ ID NO: 1995749 - RNA, 19 nt, Artificial Sequence
  Description of Artificial Sequence: Synthetic oligonucleotide
  Antisense strand to SEQ ID NO: 1995748
aacuuggaaagguuuccag

SEQ ID NO: 1995750 - RNA, 19 nt, Artificial Sequence
  Description of Artificial Sequence: Synthetic oligonucleotide
  Sense strand starting at position 2501 of SEQ ID NO: 1880813
uccuucguagucuaauaua

SEQ ID NO: 1995751 - RNA, 19 nt, Artificial Sequence
  Description of Artificial Sequence: Synthetic oligonucleotide
  Antisense strand to SEQ ID NO: 1995750
uauauuagacuacgaagga

SEQ ID NO: 1995752 - RNA, 19 nt, Artificial Sequence
  Description of Artificial Sequence: Synthetic oligonucleotide
  Sense strand starting at position 2658 of SEQ ID NO: 1880813
uguuauaaccuuuauguac

SEQ ID NO: 1995753 - RNA, 19 nt, Artificial Sequence
  Description of Artificial Sequence: Synthetic oligonucleotide
  Antisense strand to SEQ ID NO: 1995752
guacauaaagguuauaaca

SEQ ID NO: 1995754 - RNA, 19 nt, Artificial Sequence
  Description of Artificial Sequence: Synthetic oligonucleotide
  Sense strand starting at position 2817 of SEQ ID NO: 1880813
cugagaaucucccuuacug

SEQ ID NO: 1995755 - RNA, 19 nt, Artificial Sequence
  Description of Artificial Sequence: Synthetic oligonucleotide
  Antisense strand to SEQ ID NO: 1995754
caguaagggagauucucag

SEQ ID NO: 1995756 - RNA, 19 nt, Artificial Sequence
  Description of Artificial Sequence: Synthetic oligonucleotide
  Sense strand starting at position 2968 of SEQ ID NO: 1880813
gucuccuuagcauagauua

SEQ ID NO: 1995757 - RNA, 19 nt, Artificial Sequence
  Description of Artificial Sequence: Synthetic oligonucleotide
  Antisense strand to SEQ ID NO: 1995756
uaaucuaugcuaaggagac

SEQ ID NO: 1995758 - RNA, 19 nt, Artificial Sequence
  Description of Artificial Sequence: Synthetic oligonucleotide
  Sense strand starting at position 3044 of SEQ ID NO: 1880813
ggaaccaggucuuugaucu

SEQ ID NO: 1995759 - RNA, 19 nt, Artificial Sequence
  Description of Artificial Sequence: Synthetic oligonucleotide
  Antisense strand to SEQ ID NO: 1995758
agaucaaagaccugguucc

SEQ ID NO: 1995760 - RNA, 19 nt, Artificial Sequence
  Description of Artificial Sequence: Synthetic oligonucleotide
  Sense strand starting at position 3045 of SEQ ID NO: 1880813
gaaccaggucuuugaucuu

SEQ ID NO: 1995761 - RNA, 19 nt, Artificial Sequence
  Description of Artificial Sequence: Synthetic oligonucleotide
  Antisense strand to SEQ ID NO: 1995760
aagaucaaagaccugguuc

SEQ ID NO: 1995762 - RNA, 19 nt, Artificial Sequence
  Description of Artificial Sequence: Synthetic oligonucleotide
  Sense strand starting at position 3051 of SEQ ID NO: 1880813
ggucuuugaucuuuggaga

SEQ ID NO: 1995763 - RNA, 19 nt, Artificial Sequence
  Description of Artificial Sequence: Synthetic oligonucleotide
  Antisense strand to SEQ ID NO: 1995762
ucuccaaagaucaaagacc

SEQ ID NO: 1995764 - RNA, 19 nt, Artificial Sequence
  Description of Artificial Sequence: Synthetic oligonucleotide
  Sense strand starting at position 3059 of SEQ ID NO: 1880813
aucuuuggagaagguaauu

SEQ ID NO: 1995765 - RNA, 19 nt, Artificial Sequence
  Description of Artificial Sequence: Synthetic oligonucleotide
  Antisense strand to SEQ ID NO: 1995764
aauuaccuucuccaaagau

SEQ ID NO: 1995766 - RNA, 19 nt, Artificial Sequence
  Description of Artificial Sequence: Synthetic oligonucleotide
  Sense strand starting at position 3277 of SEQ ID NO: 1880813
cuagauuccuugguacaag

SEQ ID NO: 1995767 - RNA, 19 nt, Artificial Sequence
  Description of Artificial Sequence: Synthetic oligonucleotide
  Antisense strand to SEQ ID NO: 1995766
cuuguaccaaggaaucuag

SEQ ID NO: 1995768 - RNA, 19 nt, Artificial Sequence
  Description of Artificial Sequence: Synthetic oligonucleotide
  Sense strand starting at position 3402 of SEQ ID NO: 1880813
aauggcucacgugauuaga

SEQ ID NO: 1995769 - RNA, 19 nt, Artificial Sequence
  Description of Artificial Sequence: Synthetic oligonucleotide
  Antisense strand to SEQ ID NO: 1995768
ucuaaucacgugagccauu

SEQ ID NO: 1995770 - RNA, 19 nt, Artificial Sequence
  Description of Artificial Sequence: Synthetic oligonucleotide
  Sense strand starting at position 3617 of SEQ ID NO: 1880813
gucauaauucugcauagca

SEQ ID NO: 1995771 - RNA, 19 nt, Artificial Sequence
  Description of Artificial Sequence: Synthetic oligonucleotide
  Antisense strand to SEQ ID NO: 1995770
ugcuaugcagaauuaugac

SEQ ID NO: 1995772 - RNA, 19 nt, Artificial Sequence
  Description of Artificial Sequence: Synthetic oligonucleotide
  Sense strand starting at position 3889 of SEQ ID NO: 1880813
gcuaauccucaggaacagu

SEQ ID NO: 1995773 - RNA, 19 nt, Artificial Sequence
  Description of Artificial Sequence: Synthetic oligonucleotide
  Antisense strand to SEQ ID NO: 1995772
acuguuccugaggauuagc

SEQ ID NO: 1995774 - RNA, 19 nt, Artificial Sequence
  Description of Artificial Sequence: Synthetic oligonucleotide
  Sense strand starting at position 7 of SEQ ID NO: 1880814
augguuaauugcuugguca

SEQ ID NO: 1995775 - RNA, 19 nt, Artificial Sequence
  Description of Artificial Sequence: Synthetic oligonucleotide
  Antisense strand to SEQ ID NO: 1995774
ugaccaagcaauuaaccau

SEQ ID NO: 1995776 - RNA, 19 nt, Artificial Sequence
  Description of Artificial Sequence: Synthetic oligonucleotide
  Sense strand starting at position 8 of SEQ ID NO: 1880814
ugguuaauugcuuggucau

SEQ ID NO: 1995777 - RNA, 19 nt, Artificial Sequence
  Description of Artificial Sequence: Synthetic oligonucleotide
  Antisense strand to SEQ ID NO: 1995776
augaccaagcaauuaacca

SEQ ID NO: 1995778 - RNA, 19 nt, Artificial Sequence
  Description of Artificial Sequence: Synthetic oligonucleotide
  Sense strand starting at position 9 of SEQ ID NO: 1880814
gguuaauugcuuggucaug

SEQ ID NO: 1995779 - RNA, 19 nt, Artificial Sequence
  Description of Artificial Sequence: Synthetic oligonucleotide
  Antisense strand to SEQ ID NO: 1995778
caugaccaagcaauuaacc

SEQ ID NO: 1995780 - RNA, 19 nt, Artificial Sequence
  Description of Artificial Sequence: Synthetic oligonucleotide
  Sense strand starting at position 43 of SEQ ID NO: 1880814
ugauuucuguauuguauca

SEQ ID NO: 1995781 - RNA, 19 nt, Artificial Sequence
  Description of Artificial Sequence: Synthetic oligonucleotide
  Antisense strand to SEQ ID NO: 1995780
ugauacaauacagaaauca

SEQ ID NO: 1995782 - RNA, 19 nt, Artificial Sequence
  Description of Artificial Sequence: Synthetic oligonucleotide
  Sense strand starting at position 48 of SEQ ID NO: 1880814
ucuguauuguaucauacuu

SEQ ID NO: 1995783 - RNA, 19 nt, Artificial Sequence
  Description of Artificial Sequence: Synthetic oligonucleotide
  Antisense strand to SEQ ID NO: 1995782
aaguaugauacaauacaga

SEQ ID NO: 1995784 - RNA, 19 nt, Artificial Sequence
  Description of Artificial Sequence: Synthetic oligonucleotide
  Sense strand starting at position 100 of SEQ ID NO: 1880814
cucuauaaauguuuacagu

SEQ ID NO: 1995785 - RNA, 19 nt, Artificial Sequence
  Description of Artificial Sequence: Synthetic oligonucleotide
  Antisense strand to SEQ ID NO: 1995784
acuguaaacauuuauagag

SEQ ID NO: 1995786 - RNA, 19 nt, Artificial Sequence
  Description of Artificial Sequence: Synthetic oligonucleotide
  Sense strand starting at position 113 of SEQ ID NO: 1880814
uacaguuuguugugacuaa

SEQ ID NO: 1995787 - RNA, 19 nt, Artificial Sequence
  Description of Artificial Sequence: Synthetic oligonucleotide
  Antisense strand to SEQ ID NO: 1995786
uuagucacaacaaacugua

SEQ ID NO: 1995788 - RNA, 19 nt, Artificial Sequence
  Description of Artificial Sequence: Synthetic oligonucleotide
  Sense strand starting at position 114 of SEQ ID NO: 1880814
acaguuuguugugacuaaa

SEQ ID NO: 1995789 - RNA, 19 nt, Artificial Sequence
  Description of Artificial Sequence: Synthetic oligonucleotide
  Antisense strand to SEQ ID NO: 1995788
uuuagucacaacaaacugu

SEQ ID NO: 1995790 - RNA, 19 nt, Artificial Sequence
  Description of Artificial Sequence: Synthetic oligonucleotide
  Sense strand starting at position 117 of SEQ ID NO: 1880814
guuuguugugacuaaagau

SEQ ID NO: 1995791 - RNA, 19 nt, Artificial Sequence
  Description of Artificial Sequence: Synthetic oligonucleotide
  Antisense strand to SEQ ID NO: 1995790
aucuuuagucacaacaaac

SEQ ID NO: 1995792 - RNA, 19 nt, Artificial Sequence
  Description of Artificial Sequence: Synthetic oligonucleotide
  Sense strand starting at position 178 of SEQ ID NO: 1880814
ccaaguaaugcauggugga

SEQ ID NO: 1995793 - RNA, 19 nt, Artificial Sequence
  Description of Artificial Sequence: Synthetic oligonucleotide
  Antisense strand to SEQ ID NO: 1995792
uccaccaugcauuacuugg

SEQ ID NO: 1995794 - RNA, 19 nt, Artificial Sequence
  Description of Artificial Sequence: Synthetic oligonucleotide
  Sense strand starting at position 194 of SEQ ID NO: 1880814
ggaggaaguuaccgauuug

SEQ ID NO: 1995795 - RNA, 19 nt, Artificial Sequence
  Description of Artificial Sequence: Synthetic oligonucleotide
  Antisense strand to SEQ ID NO: 1995794
caaaucgguaacuuccucc

SEQ ID NO: 1995796 - RNA, 19 nt, Artificial Sequence
  Description of Artificial Sequence: Synthetic oligonucleotide
  Sense strand starting at position 253 of SEQ ID NO: 1880814
guucuuccuuuacagucau

SEQ ID NO: 1995797 - RNA, 19 nt, Artificial Sequence
  Description of Artificial Sequence: Synthetic oligonucleotide
  Antisense strand to SEQ ID NO: 1995796
augacuguaaaggaagaac

SEQ ID NO: 1995798 - RNA, 19 nt, Artificial Sequence
  Description of Artificial Sequence: Synthetic oligonucleotide
  Sense strand starting at position 292 of SEQ ID NO: 1880814
ggcaaauacugaugauguc

SEQ ID NO: 1995799 - RNA, 19 nt, Artificial Sequence
  Description of Artificial Sequence: Synthetic oligonucleotide
  Antisense strand to SEQ ID NO: 1995798
gacaucaucaguauuugcc

SEQ ID NO: 1995800 - RNA, 19 nt, Artificial Sequence
  Description of Artificial Sequence: Synthetic oligonucleotide
  Sense strand starting at position 293 of SEQ ID NO: 1880814
gcaaauacugaugauguca

SEQ ID NO: 1995801 - RNA, 19 nt, Artificial Sequence
  Description of Artificial Sequence: Synthetic oligonucleotide
  Antisense strand to SEQ ID NO: 1995800
ugacaucaucaguauuugc

SEQ ID NO: 1995802 - RNA, 19 nt, Artificial Sequence
  Description of Artificial Sequence: Synthetic oligonucleotide
  Sense strand starting at position 298 of SEQ ID NO: 1880814
uacugaugaugucauauug

SEQ ID NO: 1995803 - RNA, 19 nt, Artificial Sequence
  Description of Artificial Sequence: Synthetic oligonucleotide
  Antisense strand to SEQ ID NO: 1995802
caauaugacaucaucagua

SEQ ID NO: 1995804 - RNA, 19 nt, Artificial Sequence
  Description of Artificial Sequence: Synthetic oligonucleotide
  Sense strand starting at position 305 of SEQ ID NO: 1880814
gaugucauauuguaguauu

SEQ ID NO: 1995805 - RNA, 19 nt, Artificial Sequence
  Description of Artificial Sequence: Synthetic oligonucleotide
  Antisense strand to SEQ ID NO: 1995804
aauacuacaauaugacauc

SEQ ID NO: 1995806 - RNA, 19 nt, Artificial Sequence
  Description of Artificial Sequence: Synthetic oligonucleotide
  Sense strand starting at position 405 of SEQ ID NO: 1880814
aauguugagucuccuaagu

SEQ ID NO: 1995807 - RNA, 19 nt, Artificial Sequence
  Description of Artificial Sequence: Synthetic oligonucleotide
  Antisense strand to SEQ ID NO: 1995806
acuuaggagacucaacauu

SEQ ID NO: 1995808 - RNA, 19 nt, Artificial Sequence
  Description of Artificial Sequence: Synthetic oligonucleotide
  Sense strand starting at position 407 of SEQ ID NO: 1880814
uguugagucuccuaaguuc

SEQ ID NO: 1995809 - RNA, 19 nt, Artificial Sequence
  Description of Artificial Sequence: Synthetic oligonucleotide
  Antisense strand to SEQ ID NO: 1995808
gaacuuaggagacucaaca

SEQ ID NO: 1995810 - RNA, 19 nt, Artificial Sequence
  Description of Artificial Sequence: Synthetic oligonucleotide
  Sense strand starting at position 516 of SEQ ID NO: 1880814
ugaugaaucuaccugcuuu

SEQ ID NO: 1995811 - RNA, 19 nt, Artificial Sequence
  Description of Artificial Sequence: Synthetic oligonucleotide
  Antisense strand to SEQ ID NO: 1995810
aaagcagguagauucauca

SEQ ID NO: 1995812 - RNA, 19 nt, Artificial Sequence
  Description of Artificial Sequence: Synthetic oligonucleotide
  Sense strand starting at position 539 of SEQ ID NO: 1880814
uuuaguacuuaagcucaga

SEQ ID NO: 1995813 - RNA, 19 nt, Artificial Sequence
  Description of Artificial Sequence: Synthetic oligonucleotide
  Antisense strand to SEQ ID NO: 1995812
ucugagcuuaaguacuaaa

SEQ ID NO: 1995814 - RNA, 19 nt, Artificial Sequence
  Description of Artificial Sequence: Synthetic oligonucleotide
  Sense strand starting at position 626 of SEQ ID NO: 1880814
accuaugacugcuaaguua

SEQ ID NO: 1995815 - RNA, 19 nt, Artificial Sequence
  Description of Artificial Sequence: Synthetic oligonucleotide
  Antisense strand to SEQ ID NO: 1995814
uaacuuagcagucauaggu

SEQ ID NO: 1995816 - RNA, 19 nt, Artificial Sequence
  Description of Artificial Sequence: Synthetic oligonucleotide
  Sense strand starting at position 646 of SEQ ID NO: 1880814
gggcgugucuggauaucua

SEQ ID NO: 1995817 - RNA, 19 nt, Artificial Sequence
  Description of Artificial Sequence: Synthetic oligonucleotide
  Antisense strand to SEQ ID NO: 1995816
uagauauccagacacgccc

SEQ ID NO: 1995818 - RNA, 19 nt, Artificial Sequence
  Description of Artificial Sequence: Synthetic oligonucleotide
  Sense strand starting at position 654 of SEQ ID NO: 1880814
cuggauaucuaauugaagu

SEQ ID NO: 1995819 - RNA, 19 nt, Artificial Sequence
  Description of Artificial Sequence: Synthetic oligonucleotide
  Antisense strand to SEQ ID NO: 1995818
acuucaauuagauauccag

SEQ ID NO: 1995820 - RNA, 19 nt, Artificial Sequence
  Description of Artificial Sequence: Synthetic oligonucleotide
  Sense strand starting at position 655 of SEQ ID NO: 1880814
uggauaucuaauugaagug

SEQ ID NO: 1995821 - RNA, 19 nt, Artificial Sequence
  Description of Artificial Sequence: Synthetic oligonucleotide
  Antisense strand to SEQ ID NO: 1995820
cacuucaauuagauaucca

SEQ ID NO: 1995822 - RNA, 19 nt, Artificial Sequence
  Description of Artificial Sequence: Synthetic oligonucleotide
  Sense strand starting at position 678 of SEQ ID NO: 1880814
aggugccagugucuagaaa

SEQ ID NO: 1995823 - RNA, 19 nt, Artificial Sequence
  Description of Artificial Sequence: Synthetic oligonucleotide
  Antisense strand to SEQ ID NO: 1995822
uuucuagacacuggcaccu

SEQ ID NO: 1995824 - RNA, 19 nt, Artificial Sequence
  Description of Artificial Sequence: Synthetic oligonucleotide
  Sense strand starting at position 763 of SEQ ID NO: 1880814
augauaugauguucugaca

SEQ ID NO: 1995825 - RNA, 19 nt, Artificial Sequence
  Description of Artificial Sequence: Synthetic oligonucleotide
  Antisense strand to SEQ ID NO: 1995824
ugucagaacaucauaucau

SEQ ID NO: 1995826 - RNA, 19 nt, Artificial Sequence
  Description of Artificial Sequence: Synthetic oligonucleotide
  Sense strand starting at position 766 of SEQ ID NO: 1880814
auaugauguucugacaagu

SEQ ID NO: 1995827 - RNA, 19 nt, Artificial Sequence
  Description of Artificial Sequence: Synthetic oligonucleotide
  Antisense strand to SEQ ID NO: 1995826
acuugucagaacaucauau

SEQ ID NO: 1995828 - RNA, 19 nt, Artificial Sequence
  Description of Artificial Sequence: Synthetic oligonucleotide
  Sense strand starting at position 852 of SEQ ID NO: 1880814
agccuuaaauaguugacau

SEQ ID NO: 1995829 - RNA, 19 nt, Artificial Sequence
  Description of Artificial Sequence: Synthetic oligonucleotide
  Antisense strand to SEQ ID NO: 1995828
augucaacuauuuaaggcu

SEQ ID NO: 1995830 - RNA, 19 nt, Artificial Sequence
  Description of Artificial Sequence: Synthetic oligonucleotide
  Sense strand starting at position 879 of SEQ ID NO: 1880814
aaguuugguugaucuacuu

SEQ ID NO: 1995831 - RNA, 19 nt, Artificial Sequence
  Description of Artificial Sequence: Synthetic oligonucleotide
  Antisense strand to SEQ ID NO: 1995830
aaguagaucaaccaaacuu

SEQ ID NO: 1995832 - RNA, 19 nt, Artificial Sequence
  Description of Artificial Sequence: Synthetic oligonucleotide
  Sense strand starting at position 888 of SEQ ID NO: 1880814
ugaucuacuuacggucauu

SEQ ID NO: 1995833 - RNA, 19 nt, Artificial Sequence
  Description of Artificial Sequence: Synthetic oligonucleotide
  Antisense strand to SEQ ID NO: 1995832
aaugaccguaaguagauca

SEQ ID NO: 1995834 - RNA, 19 nt, Artificial Sequence
  Description of Artificial Sequence: Synthetic oligonucleotide
  Sense strand starting at position 891 of SEQ ID NO: 1880814
ucuacuuacggucauugua

SEQ ID NO: 1995835 - RNA, 19 nt, Artificial Sequence
  Description of Artificial Sequence: Synthetic oligonucleotide
  Antisense strand to SEQ ID NO: 1995834
uacaaugaccguaaguaga

SEQ ID NO: 1995836 - RNA, 19 nt, Artificial Sequence
  Description of Artificial Sequence: Synthetic oligonucleotide
  Sense strand starting at position 893 of SEQ ID NO: 1880814
uacuuacggucauuguaca

SEQ ID NO: 1995837 - RNA, 19 nt, Artificial Sequence
  Description of Artificial Sequence: Synthetic oligonucleotide
  Antisense strand to SEQ ID NO: 1995836
uguacaaugaccguaagua

SEQ ID NO: 1995838 - RNA, 19 nt, Artificial Sequence
  Description of Artificial Sequence: Synthetic oligonucleotide
  Sense strand starting at position 972 of SEQ ID NO: 1880814
ggagugacuugggauguga

SEQ ID NO: 1995839 - RNA, 19 nt, Artificial Sequence
  Description of Artificial Sequence: Synthetic oligonucleotide
  Antisense strand to SEQ ID NO: 1995838
ucacaucccaagucacucc

SEQ ID NO: 1995840 - RNA, 19 nt, Artificial Sequence
  Description of Artificial Sequence: Synthetic oligonucleotide
  Sense strand starting at position 986 of SEQ ID NO: 1880814
ugugaugagugacuugaaa

SEQ ID NO: 1995841 - RNA, 19 nt, Artificial Sequence
  Description of Artificial Sequence: Synthetic oligonucleotide
  Antisense strand to SEQ ID NO: 1995840
uuucaagucacucaucaca

SEQ ID NO: 1995842 - RNA, 19 nt, Artificial Sequence
  Description of Artificial Sequence: Synthetic oligonucleotide
  Sense strand starting at position 1029 of SEQ ID NO: 1880814
ugcuguuaucaucauuacu

SEQ ID NO: 1995843 - RNA, 19 nt, Artificial Sequence
  Description of Artificial Sequence: Synthetic oligonucleotide
  Antisense strand to SEQ ID NO: 1995842
aguaaugaugauaacagca

SEQ ID NO: 1995844 - RNA, 19 nt, Artificial Sequence
  Description of Artificial Sequence: Synthetic oligonucleotide
  Sense strand starting at position 1031 of SEQ ID NO: 1880814
cuguuaucaucauuacugu

SEQ ID NO: 1995845 - RNA, 19 nt, Artificial Sequence
  Description of Artificial Sequence: Synthetic oligonucleotide
  Antisense strand to SEQ ID NO: 1995844
acaguaaugaugauaacag

SEQ ID NO: 1995846 - RNA, 19 nt, Artificial Sequence
  Description of Artificial Sequence: Synthetic oligonucleotide
  Sense strand starting at position 1046 of SEQ ID NO: 1880814
cuguuaucaucacugucau

SEQ ID NO: 1995847 - RNA, 19 nt, Artificial Sequence
  Description of Artificial Sequence: Synthetic oligonucleotide
  Antisense strand to SEQ ID NO: 1995846
augacagugaugauaacag

SEQ ID NO: 1995848 - RNA, 19 nt, Artificial Sequence
  Description of Artificial Sequence: Synthetic oligonucleotide
  Sense strand starting at position 1047 of SEQ ID NO: 1880814
uguuaucaucacugucaug

SEQ ID NO: 1995849 - RNA, 19 nt, Artificial Sequence
  Description of Artificial Sequence: Synthetic oligonucleotide
  Antisense strand to SEQ ID NO: 1995848
caugacagugaugauaaca

SEQ ID NO: 1995850 - RNA, 19 nt, Artificial Sequence
  Description of Artificial Sequence: Synthetic oligonucleotide
  Sense strand starting at position 1052 of SEQ ID NO: 1880814
ucaucacugucaugacauu

SEQ ID NO: 1995851 - RNA, 19 nt, Artificial Sequence
  Description of Artificial Sequence: Synthetic oligonucleotide
  Antisense strand to SEQ ID NO: 1995850
aaugucaugacagugauga

SEQ ID NO: 1995852 - RNA, 19 nt, Artificial Sequence
  Description of Artificial Sequence: Synthetic oligonucleotide
  Sense strand starting at position 2109 of SEQ ID NO: 1880814
gacacaaguucgucacagu

SEQ ID NO: 1995853 - RNA, 19 nt, Artificial Sequence
  Description of Artificial Sequence: Synthetic oligonucleotide
  Antisense strand to SEQ ID NO: 1995852
acugugacgaacuuguguc

SEQ ID NO: 1995854 - RNA, 19 nt, Artificial Sequence
  Description of Artificial Sequence: Synthetic oligonucleotide
  Sense strand starting at position 44 of SEQ ID NO: 1880815
auuggaacugucuggcaua

SEQ ID NO: 1995855 - RNA, 19 nt, Artificial Sequence
  Description of Artificial Sequence: Synthetic oligonucleotide
  Antisense strand to SEQ ID NO: 1995854
uaugccagacaguuccaau

SEQ ID NO: 1995856 - RNA, 19 nt, Artificial Sequence
  Description of Artificial Sequence: Synthetic oligonucleotide
  Sense strand starting at position 200 of SEQ ID NO: 1880815
auucgagauccugaaguau

SEQ ID NO: 1995857 - RNA, 19 nt, Artificial Sequence
  Description of Artificial Sequence: Synthetic oligonucleotide
  Antisense strand to SEQ ID NO: 1995856
auacuucaggaucucgaau

SEQ ID NO: 1995858 - RNA, 19 nt, Artificial Sequence
  Description of Artificial Sequence: Synthetic oligonucleotide
  Sense strand starting at position 251 of SEQ ID NO: 1880815
ugugguaaacaaugauauu

SEQ ID NO: 1995859 - RNA, 19 nt, Artificial Sequence
  Description of Artificial Sequence: Synthetic oligonucleotide
  Antisense strand to SEQ ID NO: 1995858
aauaucauuguuuaccaca

SEQ ID NO: 1995860 - RNA, 19 nt, Artificial Sequence
  Description of Artificial Sequence: Synthetic oligonucleotide
  Sense strand starting at position 606 of SEQ ID NO: 1880815
augacacugucacuacuau

SEQ ID NO: 1995861 - RNA, 19 nt, Artificial Sequence
  Description of Artificial Sequence: Synthetic oligonucleotide
  Antisense strand to SEQ ID NO: 1995860
auaguagugacagugucau

SEQ ID NO: 1995862 - RNA, 19 nt, Artificial Sequence
  Description of Artificial Sequence: Synthetic oligonucleotide
  Sense strand starting at position 607 of SEQ ID NO: 1880815
ugacacugucacuacuauu

SEQ ID NO: 1995863 - RNA, 19 nt, Artificial Sequence
  Description of Artificial Sequence: Synthetic oligonucleotide
  Antisense strand to SEQ ID NO: 1995862
aauaguagugacaguguca

SEQ ID NO: 1995864 - RNA, 19 nt, Artificial Sequence
  Description of Artificial Sequence: Synthetic oligonucleotide
  Sense strand starting at position 626 of SEQ ID NO: 1880815
auugaauauuguucuagag

SEQ ID NO: 1995865 - RNA, 19 nt, Artificial Sequence
  Description of Artificial Sequence: Synthetic oligonucleotide
  Antisense strand to SEQ ID NO: 1995864
cucuagaacaauauucaau

SEQ ID NO: 1995866 - RNA, 19 nt, Artificial Sequence
  Description of Artificial Sequence: Synthetic oligonucleotide
  Sense strand starting at position 704 of SEQ ID NO: 1880815
agaauaugguaaguaucau

SEQ ID NO: 1995867 - RNA, 19 nt, Artificial Sequence
  Description of Artificial Sequence: Synthetic oligonucleotide
  Antisense strand to SEQ ID NO: 1995866
augauacuuaccauauucu

SEQ ID NO: 1995868 - RNA, 19 nt, Artificial Sequence
  Description of Artificial Sequence: Synthetic oligonucleotide
  Sense strand starting at position 811 of SEQ ID NO: 1880815
aucaguagccaugacaaau

SEQ ID NO: 1995869 - RNA, 19 nt, Artificial Sequence
  Description of Artificial Sequence: Synthetic oligonucleotide
  Antisense strand to SEQ ID NO: 1995868
auuugucauggcuacugau

SEQ ID NO: 1995870 - RNA, 19 nt, Artificial Sequence
  Description of Artificial Sequence: Synthetic oligonucleotide
  Sense strand starting at position 917 of SEQ ID NO: 1880815
uaagaaucaugucugauag

SEQ ID NO: 1995871 - RNA, 19 nt, Artificial Sequence
  Description of Artificial Sequence: Synthetic oligonucleotide
  Antisense strand to SEQ ID NO: 1995870
cuaucagacaugauucuua

SEQ ID NO: 1995872 - RNA, 19 nt, Artificial Sequence
  Description of Artificial Sequence: Synthetic oligonucleotide
  Sense strand starting at position 1121 of SEQ ID NO: 1880815
aaguaagaguaguugugaa

SEQ ID NO: 1995873 - RNA, 19 nt, Artificial Sequence
  Description of Artificial Sequence: Synthetic oligonucleotide
  Antisense strand to SEQ ID NO: 1995872
uucacaacuacucuuacuu

SEQ ID NO: 1995874 - RNA, 19 nt, Artificial Sequence
  Description of Artificial Sequence: Synthetic oligonucleotide
  Sense strand starting at position 1369 of SEQ ID NO: 1880815
uaggauaggcuaugaauua

SEQ ID NO: 1995875 - RNA, 19 nt, Artificial Sequence
  Description of Artificial Sequence: Synthetic oligonucleotide
  Antisense strand to SEQ ID NO: 1995874
uaauucauagccuauccua

SEQ ID NO: 1995876 - RNA, 19 nt, Artificial Sequence
  Description of Artificial Sequence: Synthetic oligonucleotide
  Sense strand starting at position 1376 of SEQ ID NO: 1880815
ggcuaugaauuauuaagca

SEQ ID NO: 1995877 - RNA, 19 nt, Artificial Sequence
  Description of Artificial Sequence: Synthetic oligonucleotide
  Antisense strand to SEQ ID NO: 1995876
ugcuuaauaauucauagcc

SEQ ID NO: 1995878 - RNA, 19 nt, Artificial Sequence
  Description of Artificial Sequence: Synthetic oligonucleotide
  Sense strand starting at position 1388 of SEQ ID NO: 1880815
uuaagcaacugguuuauau

SEQ ID NO: 1995879 - RNA, 19 nt, Artificial Sequence
  Description of Artificial Sequence: Synthetic oligonucleotide
  Antisense strand to SEQ ID NO: 1995878
auauaaaccaguugcuuaa

SEQ ID NO: 1995880 - RNA, 19 nt, Artificial Sequence
  Description of Artificial Sequence: Synthetic oligonucleotide
  Sense strand starting at position 1408 of SEQ ID NO: 1880815
uaguuuaaccagcaagaug

SEQ ID NO: 1995881 - RNA, 19 nt, Artificial Sequence
  Description of Artificial Sequence: Synthetic oligonucleotide
  Antisense strand to SEQ ID NO: 1995880
caucuugcugguuaaacua

SEQ ID NO: 1995882 - RNA, 19 nt, Artificial Sequence
  Description of Artificial Sequence: Synthetic oligonucleotide
  Sense strand starting at position 1457 of SEQ ID NO: 1880815
gcaccaugauguccacaaa

SEQ ID NO: 1995883 - RNA, 19 nt, Artificial Sequence
  Description of Artificial Sequence: Synthetic oligonucleotide
  Antisense strand to SEQ ID NO: 1995882
uuuguggacaucauggugc

SEQ ID NO: 1995884 - RNA, 19 nt, Artificial Sequence
  Description of Artificial Sequence: Synthetic oligonucleotide
  Sense strand starting at position 1569 of SEQ ID NO: 1880815
caguaauuacucugcagag

SEQ ID NO: 1995885 - RNA, 19 nt, Artificial Sequence
  Description of Artificial Sequence: Synthetic oligonucleotide
  Antisense strand to SEQ ID NO: 1995884
cucugcagaguaauuacug

SEQ ID NO: 1995886 - RNA, 19 nt, Artificial Sequence
  Description of Artificial Sequence: Synthetic oligonucleotide
  Sense strand starting at position 1571 of SEQ ID NO: 1880815
guaauuacucugcagaggu

SEQ ID NO: 1995887 - RNA, 19 nt, Artificial Sequence
  Description of Artificial Sequence: Synthetic oligonucleotide
  Antisense strand to SEQ ID NO: 1995886
accucugcagaguaauuac

SEQ ID NO: 1995888 - RNA, 19 nt, Artificial Sequence
  Description of Artificial Sequence: Synthetic oligonucleotide
  Sense strand starting at position 1573 of SEQ ID NO: 1880815
aauuacucugcagagguaa

SEQ ID NO: 1995889 - RNA, 19 nt, Artificial Sequence
  Description of Artificial Sequence: Synthetic oligonucleotide
  Antisense strand to SEQ ID NO: 1995888
uuaccucugcagaguaauu

SEQ ID NO: 1995890 - RNA, 19 nt, Artificial Sequence
  Description of Artificial Sequence: Synthetic oligonucleotide
  Sense strand starting at position 1588 of SEQ ID NO: 1880815
guaauaggugcacacacua

SEQ ID NO: 1995891 - RNA, 19 nt, Artificial Sequence
  Description of Artificial Sequence: Synthetic oligonucleotide
  Antisense strand to SEQ ID NO: 1995890
uagugugugcaccuauuac

SEQ ID NO: 1995892 - RNA, 19 nt, Artificial Sequence
  Description of Artificial Sequence: Synthetic oligonucleotide
  Sense strand starting at position 1809 of SEQ ID NO: 1880815
cucagagagauccgugaua

SEQ ID NO: 1995893 - RNA, 19 nt, Artificial Sequence
  Description of Artificial Sequence: Synthetic oligonucleotide
  Antisense strand to SEQ ID NO: 1995892
uaucacggaucucucugag

SEQ ID NO: 1995894 - RNA, 19 nt, Artificial Sequence
  Description of Artificial Sequence: Synthetic oligonucleotide
  Sense strand starting at position 1811 of SEQ ID NO: 1880815
cagagagauccgugauaug

SEQ ID NO: 1995895 - RNA, 19 nt, Artificial Sequence
  Description of Artificial Sequence: Synthetic oligonucleotide
  Antisense strand to SEQ ID NO: 1995894
cauaucacggaucucucug

SEQ ID NO: 1995896 - RNA, 19 nt, Artificial Sequence
  Description of Artificial Sequence: Synthetic oligonucleotide
  Sense strand starting at position 1825 of SEQ ID NO: 1880815
auaugucacccaggagcau

SEQ ID NO: 1995897 - RNA, 19 nt, Artificial Sequence
  Description of Artificial Sequence: Synthetic oligonucleotide
  Antisense strand to SEQ ID NO: 1995896
augcuccugggugacauau

SEQ ID NO: 1995898 - RNA, 19 nt, Artificial Sequence
  Description of Artificial Sequence: Synthetic oligonucleotide
  Sense strand starting at position 1916 of SEQ ID NO: 1880815
ccaugaugagaaugcuucu

SEQ ID NO: 1995899 - RNA, 19 nt, Artificial Sequence
  Description of Artificial Sequence: Synthetic oligonucleotide
  Antisense strand to SEQ ID NO: 1995898
agaagcauucucaucaugg

SEQ ID NO: 1995900 - RNA, 19 nt, Artificial Sequence
  Description of Artificial Sequence: Synthetic oligonucleotide
  Sense strand starting at position 1955 of SEQ ID NO: 1880815
ggauuuauguaagaaugac

SEQ ID NO: 1995901 - RNA, 19 nt, Artificial Sequence
  Description of Artificial Sequence: Synthetic oligonucleotide
  Antisense strand to SEQ ID NO: 1995900
gucauucuuacauaaaucc

SEQ ID NO: 1995902 - RNA, 19 nt, Artificial Sequence
  Description of Artificial Sequence: Synthetic oligonucleotide
  Sense strand starting at position 1975 of SEQ ID NO: 1880815
cgaaaugacagaugugagu

SEQ ID NO: 1995903 - RNA, 19 nt, Artificial Sequence
  Description of Artificial Sequence: Synthetic oligonucleotide
  Antisense strand to SEQ ID NO: 1995902
acucacaucugucauuucg

SEQ ID NO: 1995904 - RNA, 19 nt, Artificial Sequence
  Description of Artificial Sequence: Synthetic oligonucleotide
  Sense strand starting at position 2030 of SEQ ID NO: 1880815
gaagaauuguuagcuuuga

SEQ ID NO: 1995905 - RNA, 19 nt, Artificial Sequence
  Description of Artificial Sequence: Synthetic oligonucleotide
  Antisense strand to SEQ ID NO: 1995904
ucaaagcuaacaauucuuc

SEQ ID NO: 1995906 - RNA, 19 nt, Artificial Sequence
  Description of Artificial Sequence: Synthetic oligonucleotide
  Sense strand starting at position 2389 of SEQ ID NO: 1880815
ucuuuaccagucugaugau

SEQ ID NO: 1995907 - RNA, 19 nt, Artificial Sequence
  Description of Artificial Sequence: Synthetic oligonucleotide
  Antisense strand to SEQ ID NO: 1995906
aucaucagacugguaaaga

SEQ ID NO: 1995908 - RNA, 19 nt, Artificial Sequence
  Description of Artificial Sequence: Synthetic oligonucleotide
  Sense strand starting at position 2588 of SEQ ID NO: 1880815
guggcuuuauugucuauuu

SEQ ID NO: 1995909 - RNA, 19 nt, Artificial Sequence
  Description of Artificial Sequence: Synthetic oligonucleotide
  Antisense strand to SEQ ID NO: 1995908
aaauagacaauaaagccac

SEQ ID NO: 1995910 - RNA, 19 nt, Artificial Sequence
  Description of Artificial Sequence: Synthetic oligonucleotide
  Sense strand starting at position 2782 of SEQ ID NO: 1880815
ccuggaugaacuuggguaa

SEQ ID NO: 1995911 - RNA, 19 nt, Artificial Sequence
  Description of Artificial Sequence: Synthetic oligonucleotide
  Antisense strand to SEQ ID NO: 1995910
uuacccaaguucauccagg

SEQ ID NO: 1995912 - RNA, 19 nt, Artificial Sequence
  Description of Artificial Sequence: Synthetic oligonucleotide
  Sense strand starting at position 2795 of SEQ ID NO: 1880815
ggguaagugaccuaagcuc

SEQ ID NO: 1995913 - RNA, 19 nt, Artificial Sequence
  Description of Artificial Sequence: Synthetic oligonucleotide
  Antisense strand to SEQ ID NO: 1995912
gagcuuaggucacuuaccc

SEQ ID NO: 1995914 - RNA, 19 nt, Artificial Sequence
  Description of Artificial Sequence: Synthetic oligonucleotide
  Sense strand starting at position 2934 of SEQ ID NO: 1880815
agcuuuccucccugaggga

SEQ ID NO: 1995915 - RNA, 19 nt, Artificial Sequence
  Description of Artificial Sequence: Synthetic oligonucleotide
  Antisense strand to SEQ ID NO: 1995914
ucccucagggaggaaagcu

SEQ ID NO: 1995916 - RNA, 19 nt, Artificial Sequence
  Description of Artificial Sequence: Synthetic oligonucleotide
  Sense strand starting at position 3056 of SEQ ID NO: 1880815
ggugaagacuugcugacua

SEQ ID NO: 1995917 - RNA, 19 nt, Artificial Sequence
  Description of Artificial Sequence: Synthetic oligonucleotide
  Antisense strand to SEQ ID NO: 1995916
uagucagcaagucuucacc

SEQ ID NO: 1995918 - RNA, 19 nt, Artificial Sequence
  Description of Artificial Sequence: Synthetic oligonucleotide
  Sense strand starting at position 3058 of SEQ ID NO: 1880815
ugaagacuugcugacuauu

SEQ ID NO: 1995919 - RNA, 19 nt, Artificial Sequence
  Description of Artificial Sequence: Synthetic oligonucleotide
  Antisense strand to SEQ ID NO: 1995918
aauagucagcaagucuuca

SEQ ID NO: 1995920 - RNA, 19 nt, Artificial Sequence
  Description of Artificial Sequence: Synthetic oligonucleotide
  Sense strand starting at position 3109 of SEQ ID NO: 1880815
cagagacaggcucagcaau

SEQ ID NO: 1995921 - RNA, 19 nt, Artificial Sequence
  Description of Artificial Sequence: Synthetic oligonucleotide
  Antisense strand to SEQ ID NO: 1995920
auugcugagccugucucug

SEQ ID NO: 1995922 - RNA, 19 nt, Artificial Sequence
  Description of Artificial Sequence: Synthetic oligonucleotide
  Sense strand starting at position 3313 of SEQ ID NO: 1880815
ugaugauacuucccugaau

SEQ ID NO: 1995923 - RNA, 19 nt, Artificial Sequence
  Description of Artificial Sequence: Synthetic oligonucleotide
  Antisense strand to SEQ ID NO: 1995922
auucagggaaguaucauca

SEQ ID NO: 1995924 - RNA, 19 nt, Artificial Sequence
  Description of Artificial Sequence: Synthetic oligonucleotide
  Sense strand starting at position 3499 of SEQ ID NO: 1880815
ugaugaaacucuuucugag

SEQ ID NO: 1995925 - RNA, 19 nt, Artificial Sequence
  Description of Artificial Sequence: Synthetic oligonucleotide
  Antisense strand to SEQ ID NO: 1995924
cucagaaagaguuucauca

SEQ ID NO: 1995926 - RNA, 19 nt, Artificial Sequence
  Description of Artificial Sequence: Synthetic oligonucleotide
  Sense strand starting at position 3562 of SEQ ID NO: 1880815
gagucacauccagaucguu

SEQ ID NO: 1995927 - RNA, 19 nt, Artificial Sequence
  Description of Artificial Sequence: Synthetic oligonucleotide
  Antisense strand to SEQ ID NO: 1995926
aacgaucuggaugugacuc

SEQ ID NO: 1995928 - RNA, 19 nt, Artificial Sequence
  Description of Artificial Sequence: Synthetic oligonucleotide
  Sense strand starting at position 3608 of SEQ ID NO: 1880815
acaugugauucucucgaaa

SEQ ID NO: 1995929 - RNA, 19 nt, Artificial Sequence
  Description of Artificial Sequence: Synthetic oligonucleotide
  Antisense strand to SEQ ID NO: 1995928
uuucgagagaaucacaugu

SEQ ID NO: 1995930 - RNA, 19 nt, Artificial Sequence
  Description of Artificial Sequence: Synthetic oligonucleotide
  Sense strand starting at position 3611 of SEQ ID NO: 1880815
ugugauucucucgaaacuc

SEQ ID NO: 1995931 - RNA, 19 nt, Artificial Sequence
  Description of Artificial Sequence: Synthetic oligonucleotide
  Antisense strand to SEQ ID NO: 1995930
gaguuucgagagaaucaca

SEQ ID NO: 1995932 - RNA, 19 nt, Artificial Sequence
  Description of Artificial Sequence: Synthetic oligonucleotide
  Sense strand starting at position 3631 of SEQ ID NO: 1880815
guguucuguagccugcaaa

SEQ ID NO: 1995933 - RNA, 19 nt, Artificial Sequence
  Description of Artificial Sequence: Synthetic oligonucleotide
  Antisense strand to SEQ ID NO: 1995932
uuugcaggcuacagaacac

SEQ ID NO: 1995934 - RNA, 19 nt, Artificial Sequence
  Description of Artificial Sequence: Synthetic oligonucleotide
  Sense strand starting at position 143 of SEQ ID NO: 1880816
guaggaugaucagucauaa

SEQ ID NO: 1995935 - RNA, 19 nt, Artificial Sequence
  Description of Artificial Sequence: Synthetic oligonucleotide
  Antisense strand to SEQ ID NO: 1995934
uuaugacugaucauccuac

SEQ ID NO: 1995936 - RNA, 19 nt, Artificial Sequence
  Description of Artificial Sequence: Synthetic oligonucleotide
  Sense strand starting at position 147 of SEQ ID NO: 1880816
gaugaucagucauaaaugg

SEQ ID NO: 1995937 - RNA, 19 nt, Artificial Sequence
  Description of Artificial Sequence: Synthetic oligonucleotide
  Antisense strand to SEQ ID NO: 1995936
ccauuuaugacugaucauc

SEQ ID NO: 1995938 - RNA, 19 nt, Artificial Sequence
  Description of Artificial Sequence: Synthetic oligonucleotide
  Sense strand starting at position 210 of SEQ ID NO: 1880816
uccgucuugaagugcaaua

SEQ ID NO: 1995939 - RNA, 19 nt, Artificial Sequence
  Description of Artificial Sequence: Synthetic oligonucleotide
  Antisense strand to SEQ ID NO: 1995938
uauugcacuucaagacgga

SEQ ID NO: 1995940 - RNA, 19 nt, Artificial Sequence
  Description of Artificial Sequence: Synthetic oligonucleotide
  Sense strand starting at position 221 of SEQ ID NO: 1880816
gugcaauagguaggaauga

SEQ ID NO: 1995941 - RNA, 19 nt, Artificial Sequence
  Description of Artificial Sequence: Synthetic oligonucleotide
  Antisense strand to SEQ ID NO: 1995940
ucauuccuaccuauugcac

SEQ ID NO: 1995942 - RNA, 19 nt, Artificial Sequence
  Description of Artificial Sequence: Synthetic oligonucleotide
  Sense strand starting at position 241 of SEQ ID NO: 1880816
gaaugaaagcuauggccaa

SEQ ID NO: 1995943 - RNA, 19 nt, Artificial Sequence
  Description of Artificial Sequence: Synthetic oligonucleotide
  Antisense strand to SEQ ID NO: 1995942
uuggccauagcuuucauuc

SEQ ID NO: 1995944 - RNA, 19 nt, Artificial Sequence
  Description of Artificial Sequence: Synthetic oligonucleotide
  Sense strand starting at position 294 of SEQ ID NO: 1880816
aauugauguucuuuggcca

SEQ ID NO: 1995945 - RNA, 19 nt, Artificial Sequence
  Description of Artificial Sequence: Synthetic oligonucleotide
  Antisense strand to SEQ ID NO: 1995944
uggccaaagaacaucaauu

SEQ ID NO: 1995946 - RNA, 19 nt, Artificial Sequence
  Description of Artificial Sequence: Synthetic oligonucleotide
  Sense strand starting at position 1029 of SEQ ID NO: 1880816
aauguuugccaauggagac

SEQ ID NO: 1995947 - RNA, 19 nt, Artificial Sequence
  Description of Artificial Sequence: Synthetic oligonucleotide
  Antisense strand to SEQ ID NO: 1995946
gucuccauuggcaaacauu

SEQ ID NO: 1995948 - RNA, 19 nt, Artificial Sequence
  Description of Artificial Sequence: Synthetic oligonucleotide
  Sense strand starting at position 1338 of SEQ ID NO: 1880816
uugauuugcuuacagagca

SEQ ID NO: 1995949 - RNA, 19 nt, Artificial Sequence
  Description of Artificial Sequence: Synthetic oligonucleotide
  Antisense strand to SEQ ID NO: 1995948
ugcucuguaagcaaaucaa

SEQ ID NO: 1995950 - RNA, 19 nt, Artificial Sequence
  Description of Artificial Sequence: Synthetic oligonucleotide
  Sense strand starting at position 2013 of SEQ ID NO: 1880816
cccagacgugcgucaucuu

SEQ ID NO: 1995951 - RNA, 19 nt, Artificial Sequence
  Description of Artificial Sequence: Synthetic oligonucleotide
  Antisense strand to SEQ ID NO: 1995950
aagaugacgcacgucuggg

SEQ ID NO: 1995952 - RNA, 19 nt, Artificial Sequence
  Description of Artificial Sequence: Synthetic oligonucleotide
  Sense strand starting at position 2453 of SEQ ID NO: 1880816
accgaagacuuguuugaaa

SEQ ID NO: 1995953 - RNA, 19 nt, Artificial Sequence
  Description of Artificial Sequence: Synthetic oligonucleotide
  Antisense strand to SEQ ID NO: 1995952
uuucaaacaagucuucggu

SEQ ID NO: 1995954 - RNA, 19 nt, Artificial Sequence
  Description of Artificial Sequence: Synthetic oligonucleotide
  Sense strand starting at position 2455 of SEQ ID NO: 1880816
cgaagacuuguuugaaaua

SEQ ID NO: 1995955 - RNA, 19 nt, Artificial Sequence
  Description of Artificial Sequence: Synthetic oligonucleotide
  Antisense strand to SEQ ID NO: 1995954
uauuucaaacaagucuucg

SEQ ID NO: 1995956 - RNA, 19 nt, Artificial Sequence
  Description of Artificial Sequence: Synthetic oligonucleotide
  Sense strand starting at position 2456 of SEQ ID NO: 1880816
gaagacuuguuugaaauau

SEQ ID NO: 1995957 - RNA, 19 nt, Artificial Sequence
  Description of Artificial Sequence: Synthetic oligonucleotide
  Antisense strand to SEQ ID NO: 1995956
auauuucaaacaagucuuc

SEQ ID NO: 1995958 - RNA, 19 nt, Artificial Sequence
  Description of Artificial Sequence: Synthetic oligonucleotide
  Sense strand starting at position 2476 of SEQ ID NO: 1880816
agaaacgucgcguaaaggu

SEQ ID NO: 1995959 - RNA, 19 nt, Artificial Sequence
  Description of Artificial Sequence: Synthetic oligonucleotide
  Antisense strand to SEQ ID NO: 1995958
accuuuacgcgacguuucu

SEQ ID NO: 1995960 - RNA, 19 nt, Artificial Sequence
  Description of Artificial Sequence: Synthetic oligonucleotide
  Sense strand starting at position 2504 of SEQ ID NO: 1880816
ccuaauaaacccuguguuu

SEQ ID NO: 1995961 - RNA, 19 nt, Artificial Sequence
  Description of Artificial Sequence: Synthetic oligonucleotide
  Antisense strand to SEQ ID NO: 1995960
aaacacaggguuuauuagg

SEQ ID NO: 1995962 - RNA, 19 nt, Artificial Sequence
  Description of Artificial Sequence: Synthetic oligonucleotide
  Sense strand starting at position 2516 of SEQ ID NO: 1880816
uguguuuaauccuccaucu

SEQ ID NO: 1995963 - RNA, 19 nt, Artificial Sequence
  Description of Artificial Sequence: Synthetic oligonucleotide
  Antisense strand to SEQ ID NO: 1995962
agauggaggauuaaacaca

SEQ ID NO: 1995964 - RNA, 19 nt, Artificial Sequence
  Description of Artificial Sequence: Synthetic oligonucleotide
  Sense strand starting at position 2533 of SEQ ID NO: 1880816
cuuuguugcaguuaaagug

SEQ ID NO: 1995965 - RNA, 19 nt, Artificial Sequence
  Description of Artificial Sequence: Synthetic oligonucleotide
  Antisense strand to SEQ ID NO: 1995964
cacuuuaacugcaacaaag

SEQ ID NO: 1995966 - RNA, 19 nt, Artificial Sequence
  Description of Artificial Sequence: Synthetic oligonucleotide
  Sense strand starting at position 2540 of SEQ ID NO: 1880816
gcaguuaaagugcaacaaa

SEQ ID NO: 1995967 - RNA, 19 nt, Artificial Sequence
  Description of Artificial Sequence: Synthetic oligonucleotide
  Antisense strand to SEQ ID NO: 1995966
uuuguugcacuuuaacugc

SEQ ID NO: 1995968 - RNA, 19 nt, Artificial Sequence
  Description of Artificial Sequence: Synthetic oligonucleotide
  Sense strand starting at position 2609 of SEQ ID NO: 1880816
cagcuaaauugggauugga

SEQ ID NO: 1995969 - RNA, 19 nt, Artificial Sequence
  Description of Artificial Sequence: Synthetic oligonucleotide
  Antisense strand to SEQ ID NO: 1995968
uccaaucccaauuuagcug

SEQ ID NO: 1995970 - RNA, 19 nt, Artificial Sequence
  Description of Artificial Sequence: Synthetic oligonucleotide
  Sense strand starting at position 2683 of SEQ ID NO: 1880816
gcaguuggauccuuguaac

SEQ ID NO: 1995971 - RNA, 19 nt, Artificial Sequence
  Description of Artificial Sequence: Synthetic oligonucleotide
  Antisense strand to SEQ ID NO: 1995970
guuacaaggauccaacugc

SEQ ID NO: 1995972 - RNA, 19 nt, Artificial Sequence
  Description of Artificial Sequence: Synthetic oligonucleotide
  Sense strand starting at position 2717 of SEQ ID NO: 1880816
gagggauuauucucacuuu

SEQ ID NO: 1995973 - RNA, 19 nt, Artificial Sequence
  Description of Artificial Sequence: Synthetic oligonucleotide
  Antisense strand to SEQ ID NO: 1995972
aaagugagaauaaucccuc

SEQ ID NO: 1995974 - RNA, 19 nt, Artificial Sequence
  Description of Artificial Sequence: Synthetic oligonucleotide
  Sense strand starting at position 2767 of SEQ ID NO: 1880816
agggcauguaacugacaga

SEQ ID NO: 1995975 - RNA, 19 nt, Artificial Sequence
  Description of Artificial Sequence: Synthetic oligonucleotide
  Antisense strand to SEQ ID NO: 1995974
ucugucaguuacaugcccu

SEQ ID NO: 1995976 - RNA, 19 nt, Artificial Sequence
  Description of Artificial Sequence: Synthetic oligonucleotide
  Sense strand starting at position 2770 of SEQ ID NO: 1880816
gcauguaacugacagagaa

SEQ ID NO: 1995977 - RNA, 19 nt, Artificial Sequence
  Description of Artificial Sequence: Synthetic oligonucleotide
  Antisense strand to SEQ ID NO: 1995976
uucucugucaguuacaugc

SEQ ID NO: 1995978 - RNA, 19 nt, Artificial Sequence
  Description of Artificial Sequence: Synthetic oligonucleotide
  Sense strand starting at position 2802 of SEQ ID NO: 1880816
agcuguucugacuguacca

SEQ ID NO: 1995979 - RNA, 19 nt, Artificial Sequence
  Description of Artificial Sequence: Synthetic oligonucleotide
  Antisense strand to SEQ ID NO: 1995978
ugguacagucagaacagcu

SEQ ID NO: 1995980 - RNA, 19 nt, Artificial Sequence
  Description of Artificial Sequence: Synthetic oligonucleotide
  Sense strand starting at position 2845 of SEQ ID NO: 1880816
accaaaguucguuaccugu

SEQ ID NO: 1995981 - RNA, 19 nt, Artificial Sequence
  Description of Artificial Sequence: Synthetic oligonucleotide
  Antisense strand to SEQ ID NO: 1995980
acagguaacgaacuuuggu

SEQ ID NO: 1995982 - RNA, 19 nt, Artificial Sequence
  Description of Artificial Sequence: Synthetic oligonucleotide
  Sense strand starting at position 2925 of SEQ ID NO: 1880816
guuguaaagaaaugguuaa

SEQ ID NO: 1995983 - RNA, 19 nt, Artificial Sequence
  Description of Artificial Sequence: Synthetic oligonucleotide
  Antisense strand to SEQ ID NO: 1995982
uuaaccauuucuuuacaac

SEQ ID NO: 1995984 - RNA, 19 nt, Artificial Sequence
  Description of Artificial Sequence: Synthetic oligonucleotide
  Sense strand starting at position 2968 of SEQ ID NO: 1880816
uuuguuaugcuuugaguuu

SEQ ID NO: 1995985 - RNA, 19 nt, Artificial Sequence
  Description of Artificial Sequence: Synthetic oligonucleotide
  Antisense strand to SEQ ID NO: 1995984
aaacucaaagcauaacaaa

SEQ ID NO: 1995986 - RNA, 19 nt, Artificial Sequence
  Description of Artificial Sequence: Synthetic oligonucleotide
  Sense strand starting at position 2974 of SEQ ID NO: 1880816
augcuuugaguuugacgaa

SEQ ID NO: 1995987 - RNA, 19 nt, Artificial Sequence
  Description of Artificial Sequence: Synthetic oligonucleotide
  Antisense strand to SEQ ID NO: 1995986
uucgucaaacucaaagcau

SEQ ID NO: 1995988 - RNA, 19 nt, Artificial Sequence
  Description of Artificial Sequence: Synthetic oligonucleotide
  Sense strand starting at position 2986 of SEQ ID NO: 1880816
ugacgaaagccuuauggug

SEQ ID NO: 1995989 - RNA, 19 nt, Artificial Sequence
  Description of Artificial Sequence: Synthetic oligonucleotide
  Antisense strand to SEQ ID NO: 1995988
caccauaaggcuuucguca

SEQ ID NO: 1995990 - RNA, 19 nt, Artificial Sequence
  Description of Artificial Sequence: Synthetic oligonucleotide
  Sense strand starting at position 3047 of SEQ ID NO: 1880816
gagucugacgugcaggaua

SEQ ID NO: 1995991 - RNA, 19 nt, Artificial Sequence
  Description of Artificial Sequence: Synthetic oligonucleotide
  Antisense strand to SEQ ID NO: 1995990
uauccugcacgucagacuc

SEQ ID NO: 1995992 - RNA, 19 nt, Artificial Sequence
  Description of Artificial Sequence: Synthetic oligonucleotide
  Sense strand starting at position 3049 of SEQ ID NO: 1880816
gucugacgugcaggauaaa

SEQ ID NO: 1995993 - RNA, 19 nt, Artificial Sequence
  Description of Artificial Sequence: Synthetic oligonucleotide
  Antisense strand to SEQ ID NO: 1995992
uuuauccugcacgucagac

SEQ ID NO: 1995994 - RNA, 19 nt, Artificial Sequence
  Description of Artificial Sequence: Synthetic oligonucleotide
  Sense strand starting at position 3276 of SEQ ID NO: 1880816
guguguggguuauuugcaa

SEQ ID NO: 1995995 - RNA, 19 nt, Artificial Sequence
  Description of Artificial Sequence: Synthetic oligonucleotide
  Antisense strand to SEQ ID NO: 1995994
uugcaaauaacccacacac

SEQ ID NO: 1995996 - RNA, 19 nt, Artificial Sequence
  Description of Artificial Sequence: Synthetic oligonucleotide
  Sense strand starting at position 3316 of SEQ ID NO: 1880816
acuuaagcauccucugaug

SEQ ID NO: 1995997 - RNA, 19 nt, Artificial Sequence
  Description of Artificial Sequence: Synthetic oligonucleotide
  Antisense strand to SEQ ID NO: 1995996
caucagaggaugcuuaagu

SEQ ID NO: 1995998 - RNA, 19 nt, Artificial Sequence
  Description of Artificial Sequence: Synthetic oligonucleotide
  Sense strand starting at position 3318 of SEQ ID NO: 1880816
uuaagcauccucugauguu

SEQ ID NO: 1995999 - RNA, 19 nt, Artificial Sequence
  Description of Artificial Sequence: Synthetic oligonucleotide
  Antisense strand to SEQ ID NO: 1995998
aacaucagaggaugcuuaa

SEQ ID NO: 1996000 - RNA, 19 nt, Artificial Sequence
  Description of Artificial Sequence: Synthetic oligonucleotide
  Sense strand starting at position 3330 of SEQ ID NO: 1880816
ugauguugguaucugugau

SEQ ID NO: 1996001 - RNA, 19 nt, Artificial Sequence
  Description of Artificial Sequence: Synthetic oligonucleotide
  Antisense strand to SEQ ID NO: 1996000
aucacagauaccaacauca

SEQ ID NO: 1996002 - RNA, 19 nt, Artificial Sequence
  Description of Artificial Sequence: Synthetic oligonucleotide
  Sense strand starting at position 3331 of SEQ ID NO: 1880816
gauguugguaucugugaug

SEQ ID NO: 1996003 - RNA, 19 nt, Artificial Sequence
  Description of Artificial Sequence: Synthetic oligonucleotide
  Antisense strand to SEQ ID NO: 1996002
caucacagauaccaacauc

SEQ ID NO: 1996004 - RNA, 19 nt, Artificial Sequence
  Description of Artificial Sequence: Synthetic oligonucleotide
  Sense strand starting at position 3607 of SEQ ID NO: 1880816
cucucauaucagugugaca

SEQ ID NO: 1996005 - RNA, 19 nt, Artificial Sequence
  Description of Artificial Sequence: Synthetic oligonucleotide
  Antisense strand to SEQ ID NO: 1996004
ugucacacugauaugagag

SEQ ID NO: 1996006 - RNA, 19 nt, Artificial Sequence
  Description of Artificial Sequence: Synthetic oligonucleotide
  Sense strand starting at position 3609 of SEQ ID NO: 1880816
cucauaucagugugacauu

SEQ ID NO: 1996007 - RNA, 19 nt, Artificial Sequence
  Description of Artificial Sequence: Synthetic oligonucleotide
  Antisense strand to SEQ ID NO: 1996006
aaugucacacugauaugag

SEQ ID NO: 1996008 - RNA, 19 nt, Artificial Sequence
  Description of Artificial Sequence: Synthetic oligonucleotide
  Sense strand starting at position 3610 of SEQ ID NO: 1880816
ucauaucagugugacauuu

SEQ ID NO: 1996009 - RNA, 19 nt, Artificial Sequence
  Description of Artificial Sequence: Synthetic oligonucleotide
  Antisense strand to SEQ ID NO: 1996008
aaaugucacacugauauga

SEQ ID NO: 1996010 - RNA, 19 nt, Artificial Sequence
  Description of Artificial Sequence: Synthetic oligonucleotide
  Sense strand starting at position 3696 of SEQ ID NO: 1880816
gggaaccucgugugauugu

SEQ ID NO: 1996011 - RNA, 19 nt, Artificial Sequence
  Description of Artificial Sequence: Synthetic oligonucleotide
  Antisense strand to SEQ ID NO: 1996010
acaaucacacgagguuccc

SEQ ID NO: 1996012 - RNA, 19 nt, Artificial Sequence
  Description of Artificial Sequence: Synthetic oligonucleotide
  Sense strand starting at position 3771 of SEQ ID NO: 1880816
uacuuacaguauuagggau

SEQ ID NO: 1996013 - RNA, 19 nt, Artificial Sequence
  Description of Artificial Sequence: Synthetic oligonucleotide
  Antisense strand to SEQ ID NO: 1996012
aucccuaauacuguaagua

SEQ ID NO: 1996014 - RNA, 19 nt, Artificial Sequence
  Description of Artificial Sequence: Synthetic oligonucleotide
  Sense strand starting at position 144 of SEQ ID NO: 1880817
guaggaugaucagucauaa

SEQ ID NO: 1996015 - RNA, 19 nt, Artificial Sequence
  Description of Artificial Sequence: Synthetic oligonucleotide
  Antisense strand to SEQ ID NO: 1996014
uuaugacugaucauccuac

SEQ ID NO: 1996016 - RNA, 19 nt, Artificial Sequence
  Description of Artificial Sequence: Synthetic oligonucleotide
  Sense strand starting at position 148 of SEQ ID NO: 1880817
gaugaucagucauaaaugg

SEQ ID NO: 1996017 - RNA, 19 nt, Artificial Sequence
  Description of Artificial Sequence: Synthetic oligonucleotide
  Antisense strand to SEQ ID NO: 1996016
ccauuuaugacugaucauc

SEQ ID NO: 1996018 - RNA, 19 nt, Artificial Sequence
  Description of Artificial Sequence: Synthetic oligonucleotide
  Sense strand starting at position 211 of SEQ ID NO: 1880817
uccgucuugaagugcaaua

SEQ ID NO: 1996019 - RNA, 19 nt, Artificial Sequence
  Description of Artificial Sequence: Synthetic oligonucleotide
  Antisense strand to SEQ ID NO: 1996018
uauugcacuucaagacgga

SEQ ID NO: 1996020 - RNA, 19 nt, Artificial Sequence
  Description of Artificial Sequence: Synthetic oligonucleotide
  Sense strand starting at position 222 of SEQ ID NO: 1880817
gugcaauagguaggaauga

SEQ ID NO: 1996021 - RNA, 19 nt, Artificial Sequence
  Description of Artificial Sequence: Synthetic oligonucleotide
  Antisense strand to SEQ ID NO: 1996020
ucauuccuaccuauugcac

SEQ ID NO: 1996022 - RNA, 19 nt, Artificial Sequence
  Description of Artificial Sequence: Synthetic oligonucleotide
  Sense strand starting at position 242 of SEQ ID NO: 1880817
gaaugaaagcuauggccaa

SEQ ID NO: 1996023 - RNA, 19 nt, Artificial Sequence
  Description of Artificial Sequence: Synthetic oligonucleotide
  Antisense strand to SEQ ID NO: 1996022
uuggccauagcuuucauuc

SEQ ID NO: 1996024 - RNA, 19 nt, Artificial Sequence
  Description of Artificial Sequence: Synthetic oligonucleotide
  Sense strand starting at position 295 of SEQ ID NO: 1880817
aauugauguucuuuggcca

SEQ ID NO: 1996025 - RNA, 19 nt, Artificial Sequence
  Description of Artificial Sequence: Synthetic oligonucleotide
  Antisense strand to SEQ ID NO: 1996024
uggccaaagaacaucaauu

SEQ ID NO: 1996026 - RNA, 19 nt, Artificial Sequence
  Description of Artificial Sequence: Synthetic oligonucleotide
  Sense strand starting at position 1030 of SEQ ID NO: 1880817
aauguuugccaauggagac

SEQ ID NO: 1996027 - RNA, 19 nt, Artificial Sequence
  Description of Artificial Sequence: Synthetic oligonucleotide
  Antisense strand to SEQ ID NO: 1996026
gucuccauuggcaaacauu

SEQ ID NO: 1996028 - RNA, 19 nt, Artificial Sequence
  Description of Artificial Sequence: Synthetic oligonucleotide
  Sense strand starting at position 1339 of SEQ ID NO: 1880817
uugauuugcuuacagagca

SEQ ID NO: 1996029 - RNA, 19 nt, Artificial Sequence
  Description of Artificial Sequence: Synthetic oligonucleotide
  Antisense strand to SEQ ID NO: 1996028
ugcucuguaagcaaaucaa

SEQ ID NO: 1996030 - RNA, 19 nt, Artificial Sequence
  Description of Artificial Sequence: Synthetic oligonucleotide
  Sense strand starting at position 2014 of SEQ ID NO: 1880817
cccagacgugcgucaucuu

SEQ ID NO: 1996031 - RNA, 19 nt, Artificial Sequence
  Description of Artificial Sequence: Synthetic oligonucleotide
  Antisense strand to SEQ ID NO: 1996030
aagaugacgcacgucuggg

SEQ ID NO: 1996032 - RNA, 19 nt, Artificial Sequence
  Description of Artificial Sequence: Synthetic oligonucleotide
  Sense strand starting at position 2454 of SEQ ID NO: 1880817
accgaagacuuguuugaaa

SEQ ID NO: 1996033 - RNA, 19 nt, Artificial Sequence
  Description of Artificial Sequence: Synthetic oligonucleotide
  Antisense strand to SEQ ID NO: 1996032
uuucaaacaagucuucggu

SEQ ID NO: 1996034 - RNA, 19 nt, Artificial Sequence
  Description of Artificial Sequence: Synthetic oligonucleotide
  Sense strand starting at position 2456 of SEQ ID NO: 1880817
cgaagacuuguuugaaaua

SEQ ID NO: 1996035 - RNA, 19 nt, Artificial Sequence
  Description of Artificial Sequence: Synthetic oligonucleotide
  Antisense strand to SEQ ID NO: 1996034
uauuucaaacaagucuucg

SEQ ID NO: 1996036 - RNA, 19 nt, Artificial Sequence
  Description of Artificial Sequence: Synthetic oligonucleotide
  Sense strand starting at position 2457 of SEQ ID NO: 1880817
gaagacuuguuugaaauau

SEQ ID NO: 1996037 - RNA, 19 nt, Artificial Sequence
  Description of Artificial Sequence: Synthetic oligonucleotide
  Antisense strand to SEQ ID NO: 1996036
auauuucaaacaagucuuc

SEQ ID NO: 1996038 - RNA, 19 nt, Artificial Sequence
  Description of Artificial Sequence: Synthetic oligonucleotide
  Sense strand starting at position 2477 of SEQ ID NO: 1880817
agaaacgucgcguaaaggu

SEQ ID NO: 1996039 - RNA, 19 nt, Artificial Sequence
  Description of Artificial Sequence: Synthetic oligonucleotide
  Antisense strand to SEQ ID NO: 1996038
accuuuacgcgacguuucu

SEQ ID NO: 1996040 - RNA, 19 nt, Artificial Sequence
  Description of Artificial Sequence: Synthetic oligonucleotide
  Sense strand starting at position 2505 of SEQ ID NO: 1880817
ccuaauaaacccuguguuu

SEQ ID NO: 1996041 - RNA, 19 nt, Artificial Sequence
  Description of Artificial Sequence: Synthetic oligonucleotide
  Antisense strand to SEQ ID NO: 1996040
aaacacaggguuuauuagg

SEQ ID NO: 1996042 - RNA, 19 nt, Artificial Sequence
  Description of Artificial Sequence: Synthetic oligonucleotide
  Sense strand starting at position 2517 of SEQ ID NO: 1880817
uguguuuaauccuccaucu

SEQ ID NO: 1996043 - RNA, 19 nt, Artificial Sequence
  Description of Artificial Sequence: Synthetic oligonucleotide
  Antisense strand to SEQ ID NO: 1996042
agauggaggauuaaacaca

SEQ ID NO: 1996044 - RNA, 19 nt, Artificial Sequence
  Description of Artificial Sequence: Synthetic oligonucleotide
  Sense strand starting at position 2534 of SEQ ID NO: 1880817
cuuuguugcaguuaaagug

SEQ ID NO: 1996045 - RNA, 19 nt, Artificial Sequence
  Description of Artificial Sequence: Synthetic oligonucleotide
  Antisense strand to SEQ ID NO: 1996044
cacuuuaacugcaacaaag

SEQ ID NO: 1996046 - RNA, 19 nt, Artificial Sequence
  Description of Artificial Sequence: Synthetic oligonucleotide
  Sense strand starting at position 2541 of SEQ ID NO: 1880817
gcaguuaaagugcaacaaa

SEQ ID NO: 1996047 - RNA, 19 nt, Artificial Sequence
  Description of Artificial Sequence: Synthetic oligonucleotide
  Antisense strand to SEQ ID NO: 1996046
uuuguugcacuuuaacugc

SEQ ID NO: 1996048 - RNA, 19 nt, Artificial Sequence
  Description of Artificial Sequence: Synthetic oligonucleotide
  Sense strand starting at position 2610 of SEQ ID NO: 1880817
cagcuaaauugggauugga

SEQ ID NO: 1996049 - RNA, 19 nt, Artificial Sequence
  Description of Artificial Sequence: Synthetic oligonucleotide
  Antisense strand to SEQ ID NO: 1996048
uccaaucccaauuuagcug

SEQ ID NO: 1996050 - RNA, 19 nt, Artificial Sequence
  Description of Artificial Sequence: Synthetic oligonucleotide
  Sense strand starting at position 2684 of SEQ ID NO: 1880817
gcaguuggauccuuguaac

SEQ ID NO: 1996051 - RNA, 19 nt, Artificial Sequence
  Description of Artificial Sequence: Synthetic oligonucleotide
  Antisense strand to SEQ ID NO: 1996050
guuacaaggauccaacugc

SEQ ID NO: 1996052 - RNA, 19 nt, Artificial Sequence
  Description of Artificial Sequence: Synthetic oligonucleotide
  Sense strand starting at position 2718 of SEQ ID NO: 1880817
gagggauuauucucacuuu

SEQ ID NO: 1996053 - RNA, 19 nt, Artificial Sequence
  Description of Artificial Sequence: Synthetic oligonucleotide
  Antisense strand to SEQ ID NO: 1996052
aaagugagaauaaucccuc

SEQ ID NO: 1996054 - RNA, 19 nt, Artificial Sequence
  Description of Artificial Sequence: Synthetic oligonucleotide
  Sense strand starting at position 2768 of SEQ ID NO: 1880817
agggcauguaacugacaga

SEQ ID NO: 1996055 - RNA, 19 nt, Artificial Sequence
  Description of Artificial Sequence: Synthetic oligonucleotide
  Antisense strand to SEQ ID NO: 1996054
ucugucaguuacaugcccu

SEQ ID NO: 1996056 - RNA, 19 nt, Artificial Sequence
  Description of Artificial Sequence: Synthetic oligonucleotide
  Sense strand starting at position 2771 of SEQ ID NO: 1880817
gcauguaacugacagagaa

SEQ ID NO: 1996057 - RNA, 19 nt, Artificial Sequence
  Description of Artificial Sequence: Synthetic oligonucleotide
  Antisense strand to SEQ ID NO: 1996056
uucucugucaguuacaugc

SEQ ID NO: 1996058 - RNA, 19 nt, Artificial Sequence
  Description of Artificial Sequence: Synthetic oligonucleotide
  Sense strand starting at position 2803 of SEQ ID NO: 1880817
agcuguucugacuguacca

SEQ ID NO: 1996059 - RNA, 19 nt, Artificial Sequence
  Description of Artificial Sequence: Synthetic oligonucleotide
  Antisense strand to SEQ ID NO: 1996058
ugguacagucagaacagcu

SEQ ID NO: 1996060 - RNA, 19 nt, Artificial Sequence
  Description of Artificial Sequence: Synthetic oligonucleotide
  Sense strand starting at position 2846 of SEQ ID NO: 1880817
accaaaguucguuaccugu

SEQ ID NO: 1996061 - RNA, 19 nt, Artificial Sequence
  Description of Artificial Sequence: Synthetic oligonucleotide
  Antisense strand to SEQ ID NO: 1996060
acagguaacgaacuuuggu

SEQ ID NO: 1996062 - RNA, 19 nt, Artificial Sequence
  Description of Artificial Sequence: Synthetic oligonucleotide
  Sense strand starting at position 2926 of SEQ ID NO: 1880817
guuguaaagaaaugguuaa

SEQ ID NO: 1996063 - RNA, 19 nt, Artificial Sequence
  Description of Artificial Sequence: Synthetic oligonucleotide
  Antisense strand to SEQ ID NO: 1996062
uuaaccauuucuuuacaac

SEQ ID NO: 1996064 - RNA, 19 nt, Artificial Sequence
  Description of Artificial Sequence: Synthetic oligonucleotide
  Sense strand starting at position 2969 of SEQ ID NO: 1880817
uuuguuaugcuuugaguuu

SEQ ID NO: 1996065 - RNA, 19 nt, Artificial Sequence
  Description of Artificial Sequence: Synthetic oligonucleotide
  Antisense strand to SEQ ID NO: 1996064
aaacucaaagcauaacaaa

SEQ ID NO: 1996066 - RNA, 19 nt, Artificial Sequence
  Description of Artificial Sequence: Synthetic oligonucleotide
  Sense strand starting at position 2975 of SEQ ID NO: 1880817
augcuuugaguuugacgaa

SEQ ID NO: 1996067 - RNA, 19 nt, Artificial Sequence
  Description of Artificial Sequence: Synthetic oligonucleotide
  Antisense strand to SEQ ID NO: 1996066
uucgucaaacucaaagcau

SEQ ID NO: 1996068 - RNA, 19 nt, Artificial Sequence
  Description of Artificial Sequence: Synthetic oligonucleotide
  Sense strand starting at position 2987 of SEQ ID NO: 1880817
ugacgaaagccuuauggug

SEQ ID NO: 1996069 - RNA, 19 nt, Artificial Sequence
  Description of Artificial Sequence: Synthetic oligonucleotide
  Antisense strand to SEQ ID NO: 1996068
caccauaaggcuuucguca

SEQ ID NO: 1996070 - RNA, 19 nt, Artificial Sequence
  Description of Artificial Sequence: Synthetic oligonucleotide
  Sense strand starting at position 3048 of SEQ ID NO: 1880817
gagucugacgugcaggaua

SEQ ID NO: 1996071 - RNA, 19 nt, Artificial Sequence
  Description of Artificial Sequence: Synthetic oligonucleotide
  Antisense strand to SEQ ID NO: 1996070
uauccugcacgucagacuc

SEQ ID NO: 1996072 - RNA, 19 nt, Artificial Sequence
  Description of Artificial Sequence: Synthetic oligonucleotide
  Sense strand starting at position 3050 of SEQ ID NO: 1880817
gucugacgugcaggauaaa

SEQ ID NO: 1996073 - RNA, 19 nt, Artificial Sequence
  Description of Artificial Sequence: Synthetic oligonucleotide
  Antisense strand to SEQ ID NO: 1996072
uuuauccugcacgucagac

SEQ ID NO: 1996074 - RNA, 19 nt, Artificial Sequence
  Description of Artificial Sequence: Synthetic oligonucleotide
  Sense strand starting at position 3277 of SEQ ID NO: 1880817
guguguggguuauuugcaa

SEQ ID NO: 1996075 - RNA, 19 nt, Artificial Sequence
  Description of Artificial Sequence: Synthetic oligonucleotide
  Antisense strand to SEQ ID NO: 1996074
uugcaaauaacccacacac

SEQ ID NO: 1996076 - RNA, 19 nt, Artificial Sequence
  Description of Artificial Sequence: Synthetic oligonucleotide
  Sense strand starting at position 3317 of SEQ ID NO: 1880817
acuuaagcauccucugaug

SEQ ID NO: 1996077 - RNA, 19 nt, Artificial Sequence
  Description of Artificial Sequence: Synthetic oligonucleotide
  Antisense strand to SEQ ID NO: 1996076
caucagaggaugcuuaagu

SEQ ID NO: 1996078 - RNA, 19 nt, Artificial Sequence
  Description of Artificial Sequence: Synthetic oligonucleotide
  Sense strand starting at position 3319 of SEQ ID NO: 1880817
uuaagcauccucugauguu

SEQ ID NO: 1996079 - RNA, 19 nt, Artificial Sequence
  Description of Artificial Sequence: Synthetic oligonucleotide
  Antisense strand to SEQ ID NO: 1996078
aacaucagaggaugcuuaa

SEQ ID NO: 1996080 - RNA, 19 nt, Artificial Sequence
  Description of Artificial Sequence: Synthetic oligonucleotide
  Sense strand starting at position 3331 of SEQ ID NO: 1880817
ugauguugguaucugugau

SEQ ID NO: 1996081 - RNA, 19 nt, Artificial Sequence
  Description of Artificial Sequence: Synthetic oligonucleotide
  Antisense strand to SEQ ID NO: 1996080
aucacagauaccaacauca

SEQ ID NO: 1996082 - RNA, 19 nt, Artificial Sequence
  Description of Artificial Sequence: Synthetic oligonucleotide
  Sense strand starting at position 3332 of SEQ ID NO: 1880817
gauguugguaucugugaug

SEQ ID NO: 1996083 - RNA, 19 nt, Artificial Sequence
  Description of Artificial Sequence: Synthetic oligonucleotide
  Antisense strand to SEQ ID NO: 1996082
caucacagauaccaacauc

SEQ ID NO: 1996084 - RNA, 19 nt, Artificial Sequence
  Description of Artificial Sequence: Synthetic oligonucleotide
  Sense strand starting at position 3608 of SEQ ID NO: 1880817
cucucauaucagugugaca

SEQ ID NO: 1996085 - RNA, 19 nt, Artificial Sequence
  Description of Artificial Sequence: Synthetic oligonucleotide
  Antisense strand to SEQ ID NO: 1996084
ugucacacugauaugagag

SEQ ID NO: 1996086 - RNA, 19 nt, Artificial Sequence
  Description of Artificial Sequence: Synthetic oligonucleotide
  Sense strand starting at position 3610 of SEQ ID NO: 1880817
cucauaucagugugacauu

SEQ ID NO: 1996087 - RNA, 19 nt, Artificial Sequence
  Description of Artificial Sequence: Synthetic oligonucleotide
  Antisense strand to SEQ ID NO: 1996086
aaugucacacugauaugag

SEQ ID NO: 1996088 - RNA, 19 nt, Artificial Sequence
  Description of Artificial Sequence: Synthetic oligonucleotide
  Sense strand starting at position 3611 of SEQ ID NO: 1880817
ucauaucagugugacauuu

SEQ ID NO: 1996089 - RNA, 19 nt, Artificial Sequence
  Description of Artificial Sequence: Synthetic oligonucleotide
  Antisense strand to SEQ ID NO: 1996088
aaaugucacacugauauga

SEQ ID NO: 1996090 - RNA, 19 nt, Artificial Sequence
  Description of Artificial Sequence: Synthetic oligonucleotide
  Sense strand starting at position 3697 of SEQ ID NO: 1880817
gggaaccucgugugauugu

SEQ ID NO: 1996091 - RNA, 19 nt, Artificial Sequence
  Description of Artificial Sequence: Synthetic oligonucleotide
  Antisense strand to SEQ ID NO: 1996090
acaaucacacgagguuccc

SEQ ID NO: 1996092 - RNA, 19 nt, Artificial Sequence
  Description of Artificial Sequence: Synthetic oligonucleotide
  Sense strand starting at position 3772 of SEQ ID NO: 1880817
uacuuacaguauuagggau

SEQ ID NO: 1996093 - RNA, 19 nt, Artificial Sequence
  Description of Artificial Sequence: Synthetic oligonucleotide
  Antisense strand to SEQ ID NO: 1996092
aucccuaauacuguaagua

SEQ ID NO: 1996094 - RNA, 19 nt, Artificial Sequence
  Description of Artificial Sequence: Synthetic oligonucleotide
  Sense strand starting at position 126 of SEQ ID NO: 1880818
auuaauaccuucgcagauc

SEQ ID NO: 1996095 - RNA, 19 nt, Artificial Sequence
  Description of Artificial Sequence: Synthetic oligonucleotide
  Antisense strand to SEQ ID NO: 1996094
gaucugcgaagguauuaau

SEQ ID NO: 1996096 - RNA, 19 nt, Artificial Sequence
  Description of Artificial Sequence: Synthetic oligonucleotide
  Sense strand starting at position 182 of SEQ ID NO: 1880818
agaaauugcugugcuugga

SEQ ID NO: 1996097 - RNA, 19 nt, Artificial Sequence
  Description of Artificial Sequence: Synthetic oligonucleotide
  Antisense strand to SEQ ID NO: 1996096
uccaagcacagcaauuucu

SEQ ID NO: 1996098 - RNA, 19 nt, Artificial Sequence
  Description of Artificial Sequence: Synthetic oligonucleotide
  Sense strand starting at position 496 of SEQ ID NO: 1880818
guguguucccucgguguag

SEQ ID NO: 1996099 - RNA, 19 nt, Artificial Sequence
  Description of Artificial Sequence: Synthetic oligonucleotide
  Antisense strand to SEQ ID NO: 1996098
cuacaccgagggaacacac

SEQ ID NO: 1996100 - RNA, 19 nt, Artificial Sequence
  Description of Artificial Sequence: Synthetic oligonucleotide
  Sense strand starting at position 500 of SEQ ID NO: 1880818
guucccucgguguaggaau

SEQ ID NO: 1996101 - RNA, 19 nt, Artificial Sequence
  Description of Artificial Sequence: Synthetic oligonucleotide
  Antisense strand to SEQ ID NO: 1996100
auuccuacaccgagggaac

SEQ ID NO: 1996102 - RNA, 19 nt, Artificial Sequence
  Description of Artificial Sequence: Synthetic oligonucleotide
  Sense strand starting at position 1651 of SEQ ID NO: 1880818
ccagcuguuuggucgcuua

SEQ ID NO: 1996103 - RNA, 19 nt, Artificial Sequence
  Description of Artificial Sequence: Synthetic oligonucleotide
  Antisense strand to SEQ ID NO: 1996102
uaagcgaccaaacagcugg

SEQ ID NO: 1996104 - RNA, 19 nt, Artificial Sequence
  Description of Artificial Sequence: Synthetic oligonucleotide
  Sense strand starting at position 1705 of SEQ ID NO: 1880818
gggugacuucuuuacccua

SEQ ID NO: 1996105 - RNA, 19 nt, Artificial Sequence
  Description of Artificial Sequence: Synthetic oligonucleotide
  Antisense strand to SEQ ID NO: 1996104
uaggguaaagaagucaccc

SEQ ID NO: 1996106 - RNA, 19 nt, Artificial Sequence
  Description of Artificial Sequence: Synthetic oligonucleotide
  Sense strand starting at position 1747 of SEQ ID NO: 1880818
ggauguccacuccaaaguu

SEQ ID NO: 1996107 - RNA, 19 nt, Artificial Sequence
  Description of Artificial Sequence: Synthetic oligonucleotide
  Antisense strand to SEQ ID NO: 1996106
aacuuuggaguggacaucc

SEQ ID NO: 1996108 - RNA, 19 nt, Artificial Sequence
  Description of Artificial Sequence: Synthetic oligonucleotide
  Sense strand starting at position 1757 of SEQ ID NO: 1880818
uccaaaguucguggucuuu

SEQ ID NO: 1996109 - RNA, 19 nt, Artificial Sequence
  Description of Artificial Sequence: Synthetic oligonucleotide
  Antisense strand to SEQ ID NO: 1996108
aaagaccacgaacuuugga

SEQ ID NO: 1996110 - RNA, 19 nt, Artificial Sequence
  Description of Artificial Sequence: Synthetic oligonucleotide
  Sense strand starting at position 2327 of SEQ ID NO: 1880818
gagaguugagccuggcaga

SEQ ID NO: 1996111 - RNA, 19 nt, Artificial Sequence
  Description of Artificial Sequence: Synthetic oligonucleotide
  Antisense strand to SEQ ID NO: 1996110
ucugccaggcucaacucuc

SEQ ID NO: 1996112 - RNA, 19 nt, Artificial Sequence
  Description of Artificial Sequence: Synthetic oligonucleotide
  Sense strand starting at position 2328 of SEQ ID NO: 1880818
agaguugagccuggcagau

SEQ ID NO: 1996113 - RNA, 19 nt, Artificial Sequence
  Description of Artificial Sequence: Synthetic oligonucleotide
  Antisense strand to SEQ ID NO: 1996112
aucugccaggcucaacucu

SEQ ID NO: 1996114 - RNA, 19 nt, Artificial Sequence
  Description of Artificial Sequence: Synthetic oligonucleotide
  Sense strand starting at position 2330 of SEQ ID NO: 1880818
aguugagccuggcagauaa

SEQ ID NO: 1996115 - RNA, 19 nt, Artificial Sequence
  Description of Artificial Sequence: Synthetic oligonucleotide
  Antisense strand to SEQ ID NO: 1996114
uuaucugccaggcucaacu

SEQ ID NO: 1996116 - RNA, 19 nt, Artificial Sequence
  Description of Artificial Sequence: Synthetic oligonucleotide
  Sense strand starting at position 2361 of SEQ ID NO: 1880818
aaugaaaugccagguagaa

SEQ ID NO: 1996117 - RNA, 19 nt, Artificial Sequence
  Description of Artificial Sequence: Synthetic oligonucleotide
  Antisense strand to SEQ ID NO: 1996116
uucuaccuggcauuucauu

SEQ ID NO: 1996118 - RNA, 19 nt, Artificial Sequence
  Description of Artificial Sequence: Synthetic oligonucleotide
  Sense strand starting at position 2375 of SEQ ID NO: 1880818
uagaaaguaaguuggugua

SEQ ID NO: 1996119 - RNA, 19 nt, Artificial Sequence
  Description of Artificial Sequence: Synthetic oligonucleotide
  Antisense strand to SEQ ID NO: 1996118
uacaccaacuuacuuucua

SEQ ID NO: 1996120 - RNA, 19 nt, Artificial Sequence
  Description of Artificial Sequence: Synthetic oligonucleotide
  Sense strand starting at position 2377 of SEQ ID NO: 1880818
gaaaguaaguugguguaga

SEQ ID NO: 1996121 - RNA, 19 nt, Artificial Sequence
  Description of Artificial Sequence: Synthetic oligonucleotide
  Antisense strand to SEQ ID NO: 1996120
ucuacaccaacuuacuuuc

SEQ ID NO: 1996122 - RNA, 19 nt, Artificial Sequence
  Description of Artificial Sequence: Synthetic oligonucleotide
  Sense strand starting at position 2480 of SEQ ID NO: 1880818
gggugucugagucaaagcu

SEQ ID NO: 1996123 - RNA, 19 nt, Artificial Sequence
  Description of Artificial Sequence: Synthetic oligonucleotide
  Antisense strand to SEQ ID NO: 1996122
agcuuugacucagacaccc

SEQ ID NO: 1996124 - RNA, 19 nt, Artificial Sequence
  Description of Artificial Sequence: Synthetic oligonucleotide
  Sense strand starting at position 2583 of SEQ ID NO: 1880818
gugugacaccgugaacuuu

SEQ ID NO: 1996125 - RNA, 19 nt, Artificial Sequence
  Description of Artificial Sequence: Synthetic oligonucleotide
  Antisense strand to SEQ ID NO: 1996124
aaaguucacggugucacac

SEQ ID NO: 1996126 - RNA, 19 nt, Artificial Sequence
  Description of Artificial Sequence: Synthetic oligonucleotide
  Sense strand starting at position 2651 of SEQ ID NO: 1880818
uguauucucuucuccggua

SEQ ID NO: 1996127 - RNA, 19 nt, Artificial Sequence
  Description of Artificial Sequence: Synthetic oligonucleotide
  Antisense strand to SEQ ID NO: 1996126
uaccggagaagagaauaca

SEQ ID NO: 1996128 - RNA, 19 nt, Artificial Sequence
  Description of Artificial Sequence: Synthetic oligonucleotide
  Sense strand starting at position 2740 of SEQ ID NO: 1880818
gugcaaaggaaaugugacu

SEQ ID NO: 1996129 - RNA, 19 nt, Artificial Sequence
  Description of Artificial Sequence: Synthetic oligonucleotide
  Antisense strand to SEQ ID NO: 1996128
agucacauuuccuuugcac

SEQ ID NO: 1996130 - RNA, 19 nt, Artificial Sequence
  Description of Artificial Sequence: Synthetic oligonucleotide
  Sense strand starting at position 2790 of SEQ ID NO: 1880818
cuuugaauucuaggccaag

SEQ ID NO: 1996131 - RNA, 19 nt, Artificial Sequence
  Description of Artificial Sequence: Synthetic oligonucleotide
  Antisense strand to SEQ ID NO: 1996130
cuuggccuagaauucaaag

SEQ ID NO: 1996132 - RNA, 19 nt, Artificial Sequence
  Description of Artificial Sequence: Synthetic oligonucleotide
  Sense strand starting at position 2791 of SEQ ID NO: 1880818
uuugaauucuaggccaaga

SEQ ID NO: 1996133 - RNA, 19 nt, Artificial Sequence
  Description of Artificial Sequence: Synthetic oligonucleotide
  Antisense strand to SEQ ID NO: 1996132
ucuuggccuagaauucaaa

SEQ ID NO: 1996134 - RNA, 19 nt, Artificial Sequence
  Description of Artificial Sequence: Synthetic oligonucleotide
  Sense strand starting at position 2813 of SEQ ID NO: 1880818
uggguuugacucuguguca

SEQ ID NO: 1996135 - RNA, 19 nt, Artificial Sequence
  Description of Artificial Sequence: Synthetic oligonucleotide
  Antisense strand to SEQ ID NO: 1996134
ugacacagagucaaaccca

SEQ ID NO: 1996136 - RNA, 19 nt, Artificial Sequence
  Description of Artificial Sequence: Synthetic oligonucleotide
  Sense strand starting at position 2828 of SEQ ID NO: 1880818
gucagugggagccauugau

SEQ ID NO: 1996137 - RNA, 19 nt, Artificial Sequence
  Description of Artificial Sequence: Synthetic oligonucleotide
  Antisense strand to SEQ ID NO: 1996136
aucaauggcucccacugac

SEQ ID NO: 1996138 - RNA, 19 nt, Artificial Sequence
  Description of Artificial Sequence: Synthetic oligonucleotide
  Sense strand starting at position 2865 of SEQ ID NO: 1880818
ugaucugagcccugcuuua

SEQ ID NO: 1996139 - RNA, 19 nt, Artificial Sequence
  Description of Artificial Sequence: Synthetic oligonucleotide
  Antisense strand to SEQ ID NO: 1996138
uaaagcagggcucagauca

SEQ ID NO: 1996140 - RNA, 19 nt, Artificial Sequence
  Description of Artificial Sequence: Synthetic oligonucleotide
  Sense strand starting at position 2875 of SEQ ID NO: 1880818
ccugcuuuagagugauuuc

SEQ ID NO: 1996141 - RNA, 19 nt, Artificial Sequence
  Description of Artificial Sequence: Synthetic oligonucleotide
  Antisense strand to SEQ ID NO: 1996140
gaaaucacucuaaagcagg

SEQ ID NO: 1996142 - RNA, 19 nt, Artificial Sequence
  Description of Artificial Sequence: Synthetic oligonucleotide
  Sense strand starting at position 2883 of SEQ ID NO: 1880818
agagugauuuccgcggugu

SEQ ID NO: 1996143 - RNA, 19 nt, Artificial Sequence
  Description of Artificial Sequence: Synthetic oligonucleotide
  Antisense strand to SEQ ID NO: 1996142
acaccgcggaaaucacucu

SEQ ID NO: 1996144 - RNA, 19 nt, Artificial Sequence
  Description of Artificial Sequence: Synthetic oligonucleotide
  Sense strand starting at position 2884 of SEQ ID NO: 1880818
gagugauuuccgcgguguu

SEQ ID NO: 1996145 - RNA, 19 nt, Artificial Sequence
  Description of Artificial Sequence: Synthetic oligonucleotide
  Antisense strand to SEQ ID NO: 1996144
aacaccgcggaaaucacuc

SEQ ID NO: 1996146 - RNA, 19 nt, Artificial Sequence
  Description of Artificial Sequence: Synthetic oligonucleotide
  Sense strand starting at position 2885 of SEQ ID NO: 1880818
agugauuuccgcgguguug

SEQ ID NO: 1996147 - RNA, 19 nt, Artificial Sequence
  Description of Artificial Sequence: Synthetic oligonucleotide
  Antisense strand to SEQ ID NO: 1996146
caacaccgcggaaaucacu

SEQ ID NO: 1996148 - RNA, 19 nt, Artificial Sequence
  Description of Artificial Sequence: Synthetic oligonucleotide
  Sense strand starting at position 3195 of SEQ ID NO: 1880818
ucaucugugccaugaggau

SEQ ID NO: 1996149 - RNA, 19 nt, Artificial Sequence
  Description of Artificial Sequence: Synthetic oligonucleotide
  Antisense strand to SEQ ID NO: 1996148
auccucauggcacagauga

SEQ ID NO: 1996150 - RNA, 19 nt, Artificial Sequence
  Description of Artificial Sequence: Synthetic oligonucleotide
  Sense strand starting at position 3273 of SEQ ID NO: 1880818
ucagcuugcuaguugguaa

SEQ ID NO: 1996151 - RNA, 19 nt, Artificial Sequence
  Description of Artificial Sequence: Synthetic oligonucleotide
  Antisense strand to SEQ ID NO: 1996150
uuaccaacuagcaagcuga

SEQ ID NO: 1996152 - RNA, 19 nt, Artificial Sequence
  Description of Artificial Sequence: Synthetic oligonucleotide
  Sense strand starting at position 3286 of SEQ ID NO: 1880818
ugguaaucccuguauccag

SEQ ID NO: 1996153 - RNA, 19 nt, Artificial Sequence
  Description of Artificial Sequence: Synthetic oligonucleotide
  Antisense strand to SEQ ID NO: 1996152
cuggauacagggauuacca

SEQ ID NO: 1996154 - RNA, 19 nt, Artificial Sequence
  Description of Artificial Sequence: Synthetic oligonucleotide
  Sense strand starting at position 3300 of SEQ ID NO: 1880818
uccagacuguugcuagagu

SEQ ID NO: 1996155 - RNA, 19 nt, Artificial Sequence
  Description of Artificial Sequence: Synthetic oligonucleotide
  Antisense strand to SEQ ID NO: 1996154
acucuagcaacagucugga

SEQ ID NO: 1996156 - RNA, 19 nt, Artificial Sequence
  Description of Artificial Sequence: Synthetic oligonucleotide
  Sense strand starting at position 3301 of SEQ ID NO: 1880818
ccagacuguugcuagagua

SEQ ID NO: 1996157 - RNA, 19 nt, Artificial Sequence
  Description of Artificial Sequence: Synthetic oligonucleotide
  Antisense strand to SEQ ID NO: 1996156
uacucuagcaacagucugg

SEQ ID NO: 1996158 - RNA, 19 nt, Artificial Sequence
  Description of Artificial Sequence: Synthetic oligonucleotide
  Sense strand starting at position 3336 of SEQ ID NO: 1880818
gauucagugugguuuggga

SEQ ID NO: 1996159 - RNA, 19 nt, Artificial Sequence
  Description of Artificial Sequence: Synthetic oligonucleotide
  Antisense strand to SEQ ID NO: 1996158
ucccaaaccacacugaauc

SEQ ID NO: 1996160 - RNA, 19 nt, Artificial Sequence
  Description of Artificial Sequence: Synthetic oligonucleotide
  Sense strand starting at position 3457 of SEQ ID NO: 1880818
gccugccucugagaacauu

SEQ ID NO: 1996161 - RNA, 19 nt, Artificial Sequence
  Description of Artificial Sequence: Synthetic oligonucleotide
  Antisense strand to SEQ ID NO: 1996160
aauguucucagaggcaggc

SEQ ID NO: 1996162 - RNA, 19 nt, Artificial Sequence
  Description of Artificial Sequence: Synthetic oligonucleotide
  Sense strand starting at position 3578 of SEQ ID NO: 1880818
gcccuuggagacugacaau

SEQ ID NO: 1996163 - RNA, 19 nt, Artificial Sequence
  Description of Artificial Sequence: Synthetic oligonucleotide
  Antisense strand to SEQ ID NO: 1996162
auugucagucuccaagggc

SEQ ID NO: 1996164 - RNA, 19 nt, Artificial Sequence
  Description of Artificial Sequence: Synthetic oligonucleotide
  Sense strand starting at position 3637 of SEQ ID NO: 1880818
ccuuguuguaaccauggga

SEQ ID NO: 1996165 - RNA, 19 nt, Artificial Sequence
  Description of Artificial Sequence: Synthetic oligonucleotide
  Antisense strand to SEQ ID NO: 1996164
ucccaugguuacaacaagg

SEQ ID NO: 1996166 - RNA, 19 nt, Artificial Sequence
  Description of Artificial Sequence: Synthetic oligonucleotide
  Sense strand starting at position 3641 of SEQ ID NO: 1880818
guuguaaccaugggaaccu

SEQ ID NO: 1996167 - RNA, 19 nt, Artificial Sequence
  Description of Artificial Sequence: Synthetic oligonucleotide
  Antisense strand to SEQ ID NO: 1996166
agguucccaugguuacaac

SEQ ID NO: 1996168 - RNA, 19 nt, Artificial Sequence
  Description of Artificial Sequence: Synthetic oligonucleotide
  Sense strand starting at position 3818 of SEQ ID NO: 1880818
uuggguggucuggaaccau

SEQ ID NO: 1996169 - RNA, 19 nt, Artificial Sequence
  Description of Artificial Sequence: Synthetic oligonucleotide
  Antisense strand to SEQ ID NO: 1996168
augguuccagaccacccaa

SEQ ID NO: 1996170 - RNA, 19 nt, Artificial Sequence
  Description of Artificial Sequence: Synthetic oligonucleotide
  Sense strand starting at position 3840 of SEQ ID NO: 1880818
ggaugauauugagcccuca

SEQ ID NO: 1996171 - RNA, 19 nt, Artificial Sequence
  Description of Artificial Sequence: Synthetic oligonucleotide
  Antisense strand to SEQ ID NO: 1996170
ugagggcucaauaucaucc

SEQ ID NO: 1996172 - RNA, 19 nt, Artificial Sequence
  Description of Artificial Sequence: Synthetic oligonucleotide
  Sense strand starting at position 3937 of SEQ ID NO: 1880818
gagugcuucuaaggaagag

SEQ ID NO: 1996173 - RNA, 19 nt, Artificial Sequence
  Description of Artificial Sequence: Synthetic oligonucleotide
  Antisense strand to SEQ ID NO: 1996172
cucuuccuuagaagcacuc

SEQ ID NO: 1996174 - RNA, 19 nt, Artificial Sequence
  Description of Artificial Sequence: Synthetic oligonucleotide
  Sense strand starting at position 127 of SEQ ID NO: 1880819
cuuaguuucuaccuaagga

SEQ ID NO: 1996175 - RNA, 19 nt, Artificial Sequence
  Description of Artificial Sequence: Synthetic oligonucleotide
  Antisense strand to SEQ ID NO: 1996174
uccuuagguagaaacuaag

SEQ ID NO: 1996176 - RNA, 19 nt, Artificial Sequence
  Description of Artificial Sequence: Synthetic oligonucleotide
  Sense strand starting at position 187 of SEQ ID NO: 1880819
ucauuaccuuuaguuguua

SEQ ID NO: 1996177 - RNA, 19 nt, Artificial Sequence
  Description of Artificial Sequence: Synthetic oligonucleotide
  Antisense strand to SEQ ID NO: 1996176
uaacaacuaaagguaauga

SEQ ID NO: 1996178 - RNA, 19 nt, Artificial Sequence
  Description of Artificial Sequence: Synthetic oligonucleotide
  Sense strand starting at position 337 of SEQ ID NO: 1880819
ucauguuuagacugagcuu

SEQ ID NO: 1996179 - RNA, 19 nt, Artificial Sequence
  Description of Artificial Sequence: Synthetic oligonucleotide
  Antisense strand to SEQ ID NO: 1996178
aagcucagucuaaacauga

SEQ ID NO: 1996180 - RNA, 19 nt, Artificial Sequence
  Description of Artificial Sequence: Synthetic oligonucleotide
  Sense strand starting at position 340 of SEQ ID NO: 1880819
uguuuagacugagcuuaag

SEQ ID NO: 1996181 - RNA, 19 nt, Artificial Sequence
  Description of Artificial Sequence: Synthetic oligonucleotide
  Antisense strand to SEQ ID NO: 1996180
cuuaagcucagucuaaaca

SEQ ID NO: 1996182 - RNA, 19 nt, Artificial Sequence
  Description of Artificial Sequence: Synthetic oligonucleotide
  Sense strand starting at position 404 of SEQ ID NO: 1880819
ucauaugacguguacuuga

SEQ ID NO: 1996183 - RNA, 19 nt, Artificial Sequence
  Description of Artificial Sequence: Synthetic oligonucleotide
  Antisense strand to SEQ ID NO: 1996182
ucaaguacacgucauauga

SEQ ID NO: 1996184 - RNA, 19 nt, Artificial Sequence
  Description of Artificial Sequence: Synthetic oligonucleotide
  Sense strand starting at position 668 of SEQ ID NO: 1880819
aguuucuugcaagaacauu

SEQ ID NO: 1996185 - RNA, 19 nt, Artificial Sequence
  Description of Artificial Sequence: Synthetic oligonucleotide
  Antisense strand to SEQ ID NO: 1996184
aauguucuugcaagaaacu

SEQ ID NO: 1996186 - RNA, 19 nt, Artificial Sequence
  Description of Artificial Sequence: Synthetic oligonucleotide
  Sense strand starting at position 890 of SEQ ID NO: 1880819
uuggaagcauguuuaauga

SEQ ID NO: 1996187 - RNA, 19 nt, Artificial Sequence
  Description of Artificial Sequence: Synthetic oligonucleotide
  Antisense strand to SEQ ID NO: 1996186
ucauuaaacaugcuuccaa

SEQ ID NO: 1996188 - RNA, 19 nt, Artificial Sequence
  Description of Artificial Sequence: Synthetic oligonucleotide
  Sense strand starting at position 945 of SEQ ID NO: 1880819
gguuuaaucugacuauugg

SEQ ID NO: 1996189 - RNA, 19 nt, Artificial Sequence
  Description of Artificial Sequence: Synthetic oligonucleotide
  Antisense strand to SEQ ID NO: 1996188
ccaauagucagauuaaacc

SEQ ID NO: 1996190 - RNA, 19 nt, Artificial Sequence
  Description of Artificial Sequence: Synthetic oligonucleotide
  Sense strand starting at position 1600 of SEQ ID NO: 1880819
acugaaacuucgucuccua

SEQ ID NO: 1996191 - RNA, 19 nt, Artificial Sequence
  Description of Artificial Sequence: Synthetic oligonucleotide
  Antisense strand to SEQ ID NO: 1996190
uaggagacgaaguuucagu

SEQ ID NO: 1996192 - RNA, 19 nt, Artificial Sequence
  Description of Artificial Sequence: Synthetic oligonucleotide
  Sense strand starting at position 1603 of SEQ ID NO: 1880819
gaaacuucgucuccuauug

SEQ ID NO: 1996193 - RNA, 19 nt, Artificial Sequence
  Description of Artificial Sequence: Synthetic oligonucleotide
  Antisense strand to SEQ ID NO: 1996192
caauaggagacgaaguuuc

SEQ ID NO: 1996194 - RNA, 19 nt, Artificial Sequence
  Description of Artificial Sequence: Synthetic oligonucleotide
  Sense strand starting at position 1643 of SEQ ID NO: 1880819
gcugacucagcauaaggaa

SEQ ID NO: 1996195 - RNA, 19 nt, Artificial Sequence
  Description of Artificial Sequence: Synthetic oligonucleotide
  Antisense strand to SEQ ID NO: 1996194
uuccuuaugcugagucagc

SEQ ID NO: 1996196 - RNA, 19 nt, Artificial Sequence
  Description of Artificial Sequence: Synthetic oligonucleotide
  Sense strand starting at position 1675 of SEQ ID NO: 1880819
ugaugaucggcguaaaguu

SEQ ID NO: 1996197 - RNA, 19 nt, Artificial Sequence
  Description of Artificial Sequence: Synthetic oligonucleotide
  Antisense strand to SEQ ID NO: 1996196
aacuuuacgccgaucauca

SEQ ID NO: 1996198 - RNA, 19 nt, Artificial Sequence
  Description of Artificial Sequence: Synthetic oligonucleotide
  Sense strand starting at position 1698 of SEQ ID NO: 1880819
gggugaaguucuguugaaa

SEQ ID NO: 1996199 - RNA, 19 nt, Artificial Sequence
  Description of Artificial Sequence: Synthetic oligonucleotide
  Antisense strand to SEQ ID NO: 1996198
uuucaacagaacuucaccc

SEQ ID NO: 1996200 - RNA, 19 nt, Artificial Sequence
  Description of Artificial Sequence: Synthetic oligonucleotide
  Sense strand starting at position 1711 of SEQ ID NO: 1880819
uugaaauccuucccguuua

SEQ ID NO: 1996201 - RNA, 19 nt, Artificial Sequence
  Description of Artificial Sequence: Synthetic oligonucleotide
  Antisense strand to SEQ ID NO: 1996200
uaaacgggaaggauuucaa

SEQ ID NO: 1996202 - RNA, 19 nt, Artificial Sequence
  Description of Artificial Sequence: Synthetic oligonucleotide
  Sense strand starting at position 1745 of SEQ ID NO: 1880819
gaaagaacuuuacuugcga

SEQ ID NO: 1996203 - RNA, 19 nt, Artificial Sequence
  Description of Artificial Sequence: Synthetic oligonucleotide
  Antisense strand to SEQ ID NO: 1996202
ucgcaaguaaaguucuuuc

SEQ ID NO: 1996204 - RNA, 19 nt, Artificial Sequence
  Description of Artificial Sequence: Synthetic oligonucleotide
  Sense strand starting at position 1752 of SEQ ID NO: 1880819
cuuuacuugcgacacuaaa

SEQ ID NO: 1996205 - RNA, 19 nt, Artificial Sequence
  Description of Artificial Sequence: Synthetic oligonucleotide
  Antisense strand to SEQ ID NO: 1996204
uuuagugucgcaaguaaag

SEQ ID NO: 1996206 - RNA, 19 nt, Artificial Sequence
  Description of Artificial Sequence: Synthetic oligonucleotide
  Sense strand starting at position 1795 of SEQ ID NO: 1880819
cugguuuaaccacaaagua

SEQ ID NO: 1996207 - RNA, 19 nt, Artificial Sequence
  Description of Artificial Sequence: Synthetic oligonucleotide
  Antisense strand to SEQ ID NO: 1996206
uacuuugugguuaaaccag

SEQ ID NO: 1996208 - RNA, 19 nt, Artificial Sequence
  Description of Artificial Sequence: Synthetic oligonucleotide
  Sense strand starting at position 1834 of SEQ ID NO: 1880819
ugcuguuugaacugauaag

SEQ ID NO: 1996209 - RNA, 19 nt, Artificial Sequence
  Description of Artificial Sequence: Synthetic oligonucleotide
  Antisense strand to SEQ ID NO: 1996208
cuuaucaguucaaacagca

SEQ ID NO: 1996210 - RNA, 19 nt, Artificial Sequence
  Description of Artificial Sequence: Synthetic oligonucleotide
  Sense strand starting at position 1835 of SEQ ID NO: 1880819
gcuguuugaacugauaagu

SEQ ID NO: 1996211 - RNA, 19 nt, Artificial Sequence
  Description of Artificial Sequence: Synthetic oligonucleotide
  Antisense strand to SEQ ID NO: 1996210
acuuaucaguucaaacagc

SEQ ID NO: 1996212 - RNA, 19 nt, Artificial Sequence
  Description of Artificial Sequence: Synthetic oligonucleotide
  Sense strand starting at position 1991 of SEQ ID NO: 1880819
aaaggaugguuauaauaga

SEQ ID NO: 1996213 - RNA, 19 nt, Artificial Sequence
  Description of Artificial Sequence: Synthetic oligonucleotide
  Antisense strand to SEQ ID NO: 1996212
ucuauuauaaccauccuuu

SEQ ID NO: 1996214 - RNA, 19 nt, Artificial Sequence
  Description of Artificial Sequence: Synthetic oligonucleotide
  Sense strand starting at position 2059 of SEQ ID NO: 1880819
uaauuaauucgugagccuc

SEQ ID NO: 1996215 - RNA, 19 nt, Artificial Sequence
  Description of Artificial Sequence: Synthetic oligonucleotide
  Antisense strand to SEQ ID NO: 1996214
gaggcucacgaauuaauua

SEQ ID NO: 1996216 - RNA, 19 nt, Artificial Sequence
  Description of Artificial Sequence: Synthetic oligonucleotide
  Sense strand starting at position 2077 of SEQ ID NO: 1880819
cgcccuagucggucuggua

SEQ ID NO: 1996217 - RNA, 19 nt, Artificial Sequence
  Description of Artificial Sequence: Synthetic oligonucleotide
  Antisense strand to SEQ ID NO: 1996216
uaccagaccgacuagggcg

SEQ ID NO: 1996218 - RNA, 19 nt, Artificial Sequence
  Description of Artificial Sequence: Synthetic oligonucleotide
  Sense strand starting at position 2356 of SEQ ID NO: 1880819
uuuccauuauagcuguaca

SEQ ID NO: 1996219 - RNA, 19 nt, Artificial Sequence
  Description of Artificial Sequence: Synthetic oligonucleotide
  Antisense strand to SEQ ID NO: 1996218
uguacagcuauaauggaaa

SEQ ID NO: 1996220 - RNA, 19 nt, Artificial Sequence
  Description of Artificial Sequence: Synthetic oligonucleotide
  Sense strand starting at position 2359 of SEQ ID NO: 1880819
ccauuauagcuguacauag

SEQ ID NO: 1996221 - RNA, 19 nt, Artificial Sequence
  Description of Artificial Sequence: Synthetic oligonucleotide
  Antisense strand to SEQ ID NO: 1996220
cuauguacagcuauaaugg

SEQ ID NO: 1996222 - RNA, 19 nt, Artificial Sequence
  Description of Artificial Sequence: Synthetic oligonucleotide
  Sense strand starting at position 2464 of SEQ ID NO: 1880819
gccggaaaugucuaggccu

SEQ ID NO: 1996223 - RNA, 19 nt, Artificial Sequence
  Description of Artificial Sequence: Synthetic oligonucleotide
  Antisense strand to SEQ ID NO: 1996222
aggccuagacauuuccggc

SEQ ID NO: 1996224 - RNA, 19 nt, Artificial Sequence
  Description of Artificial Sequence: Synthetic oligonucleotide
  Sense strand starting at position 2941 of SEQ ID NO: 1880819
aguaauacguguucuaaua

SEQ ID NO: 1996225 - RNA, 19 nt, Artificial Sequence
  Description of Artificial Sequence: Synthetic oligonucleotide
  Antisense strand to SEQ ID NO: 1996224
uauuagaacacguauuacu

SEQ ID NO: 1996226 - RNA, 19 nt, Artificial Sequence
  Description of Artificial Sequence: Synthetic oligonucleotide
  Sense strand starting at position 3050 of SEQ ID NO: 1880819
ccuuuaaugagaggcaguu

SEQ ID NO: 1996227 - RNA, 19 nt, Artificial Sequence
  Description of Artificial Sequence: Synthetic oligonucleotide
  Antisense strand to SEQ ID NO: 1996226
aacugccucucauuaaagg

SEQ ID NO: 1996228 - RNA, 19 nt, Artificial Sequence
  Description of Artificial Sequence: Synthetic oligonucleotide
  Sense strand starting at position 3114 of SEQ ID NO: 1880819
agaugauuaugguuggcau

SEQ ID NO: 1996229 - RNA, 19 nt, Artificial Sequence
  Description of Artificial Sequence: Synthetic oligonucleotide
  Antisense strand to SEQ ID NO: 1996228
augccaaccauaaucaucu

SEQ ID NO: 1996230 - RNA, 19 nt, Artificial Sequence
  Description of Artificial Sequence: Synthetic oligonucleotide
  Sense strand starting at position 3115 of SEQ ID NO: 1880819
gaugauuaugguuggcaug

SEQ ID NO: 1996231 - RNA, 19 nt, Artificial Sequence
  Description of Artificial Sequence: Synthetic oligonucleotide
  Antisense strand to SEQ ID NO: 1996230
caugccaaccauaaucauc

SEQ ID NO: 1996232 - RNA, 19 nt, Artificial Sequence
  Description of Artificial Sequence: Synthetic oligonucleotide
  Sense strand starting at position 3116 of SEQ ID NO: 1880819
augauuaugguuggcauga

SEQ ID NO: 1996233 - RNA, 19 nt, Artificial Sequence
  Description of Artificial Sequence: Synthetic oligonucleotide
  Antisense strand to SEQ ID NO: 1996232
ucaugccaaccauaaucau

SEQ ID NO: 1996234 - RNA, 19 nt, Artificial Sequence
  Description of Artificial Sequence: Synthetic oligonucleotide
  Sense strand starting at position 3121 of SEQ ID NO: 1880819
uaugguuggcaugacuauu

SEQ ID NO: 1996235 - RNA, 19 nt, Artificial Sequence
  Description of Artificial Sequence: Synthetic oligonucleotide
  Antisense strand to SEQ ID NO: 1996234
aauagucaugccaaccaua

SEQ ID NO: 1996236 - RNA, 19 nt, Artificial Sequence
  Description of Artificial Sequence: Synthetic oligonucleotide
  Sense strand starting at position 3359 of SEQ ID NO: 1880819
acauguauucuuuacuguu

SEQ ID NO: 1996237 - RNA, 19 nt, Artificial Sequence
  Description of Artificial Sequence: Synthetic oligonucleotide
  Antisense strand to SEQ ID NO: 1996236
aacaguaaagaauacaugu

SEQ ID NO: 1996238 - RNA, 19 nt, Artificial Sequence
  Description of Artificial Sequence: Synthetic oligonucleotide
  Sense strand starting at position 3416 of SEQ ID NO: 1880819
agcaccgacuguuuacaaa

SEQ ID NO: 1996239 - RNA, 19 nt, Artificial Sequence
  Description of Artificial Sequence: Synthetic oligonucleotide
  Antisense strand to SEQ ID NO: 1996238
uuuguaaacagucggugcu

SEQ ID NO: 1996240 - RNA, 19 nt, Artificial Sequence
  Description of Artificial Sequence: Synthetic oligonucleotide
  Sense strand starting at position 3553 of SEQ ID NO: 1880819
uaagcugaucucuggucua

SEQ ID NO: 1996241 - RNA, 19 nt, Artificial Sequence
  Description of Artificial Sequence: Synthetic oligonucleotide
  Antisense strand to SEQ ID NO: 1996240
uagaccagagaucagcuua

SEQ ID NO: 1996242 - RNA, 19 nt, Artificial Sequence
  Description of Artificial Sequence: Synthetic oligonucleotide
  Sense strand starting at position 3556 of SEQ ID NO: 1880819
gcugaucucuggucuacag

SEQ ID NO: 1996243 - RNA, 19 nt, Artificial Sequence
  Description of Artificial Sequence: Synthetic oligonucleotide
  Antisense strand to SEQ ID NO: 1996242
cuguagaccagagaucagc

SEQ ID NO: 1996244 - RNA, 19 nt, Artificial Sequence
  Description of Artificial Sequence: Synthetic oligonucleotide
  Sense strand starting at position 3789 of SEQ ID NO: 1880819
guugacucuuccucucaag

SEQ ID NO: 1996245 - RNA, 19 nt, Artificial Sequence
  Description of Artificial Sequence: Synthetic oligonucleotide
  Antisense strand to SEQ ID NO: 1996244
cuugagaggaagagucaac

SEQ ID NO: 1996246 - RNA, 19 nt, Artificial Sequence
  Description of Artificial Sequence: Synthetic oligonucleotide
  Sense strand starting at position 3874 of SEQ ID NO: 1880819
agacaaauaguguaucugu

SEQ ID NO: 1996247 - RNA, 19 nt, Artificial Sequence
  Description of Artificial Sequence: Synthetic oligonucleotide
  Antisense strand to SEQ ID NO: 1996246
acagauacacuauuugucu

SEQ ID NO: 1996248 - RNA, 19 nt, Artificial Sequence
  Description of Artificial Sequence: Synthetic oligonucleotide
  Sense strand starting at position 3882 of SEQ ID NO: 1880819
aguguaucuguccaugcaa

SEQ ID NO: 1996249 - RNA, 19 nt, Artificial Sequence
  Description of Artificial Sequence: Synthetic oligonucleotide
  Antisense strand to SEQ ID NO: 1996248
uugcauggacagauacacu

SEQ ID NO: 1996250 - RNA, 19 nt, Artificial Sequence
  Description of Artificial Sequence: Synthetic oligonucleotide
  Sense strand starting at position 3951 of SEQ ID NO: 1880819
uagagcugugagcaaagau

SEQ ID NO: 1996251 - RNA, 19 nt, Artificial Sequence
  Description of Artificial Sequence: Synthetic oligonucleotide
  Antisense strand to SEQ ID NO: 1996250
aucuuugcucacagcucua

SEQ ID NO: 1996252 - RNA, 19 nt, Artificial Sequence
  Description of Artificial Sequence: Synthetic oligonucleotide
  Sense strand starting at position 3960 of SEQ ID NO: 1880819
gagcaaagaugagugguuu

SEQ ID NO: 1996253 - RNA, 19 nt, Artificial Sequence
  Description of Artificial Sequence: Synthetic oligonucleotide
  Antisense strand to SEQ ID NO: 1996252
aaaccacucaucuuugcuc

SEQ ID NO: 1996254 - RNA, 19 nt, Artificial Sequence
  Description of Artificial Sequence: Synthetic oligonucleotide
  Sense strand starting at position 26 of SEQ ID NO: 1880820
gcugcuauuuguuucugga

SEQ ID NO: 1996255 - RNA, 19 nt, Artificial Sequence
  Description of Artificial Sequence: Synthetic oligonucleotide
  Antisense strand to SEQ ID NO: 1996254
uccagaaacaaauagcagc

SEQ ID NO: 1996256 - RNA, 19 nt, Artificial Sequence
  Description of Artificial Sequence: Synthetic oligonucleotide
  Sense strand starting at position 28 of SEQ ID NO: 1880820
ugcuauuuguuucuggaac

SEQ ID NO: 1996257 - RNA, 19 nt, Artificial Sequence
  Description of Artificial Sequence: Synthetic oligonucleotide
  Antisense strand to SEQ ID NO: 1996256
guuccagaaacaaauagca

SEQ ID NO: 1996258 - RNA, 19 nt, Artificial Sequence
  Description of Artificial Sequence: Synthetic oligonucleotide
  Sense strand starting at position 71 of SEQ ID NO: 1880820
augugugaccuuuaacuua

SEQ ID NO: 1996259 - RNA, 19 nt, Artificial Sequence
  Description of Artificial Sequence: Synthetic oligonucleotide
  Antisense strand to SEQ ID NO: 1996258
uaaguuaaaggucacacau

SEQ ID NO: 1996260 - RNA, 19 nt, Artificial Sequence
  Description of Artificial Sequence: Synthetic oligonucleotide
  Sense strand starting at position 142 of SEQ ID NO: 1880820
uuauguuaaguccaugaug

SEQ ID NO: 1996261 - RNA, 19 nt, Artificial Sequence
  Description of Artificial Sequence: Synthetic oligonucleotide
  Antisense strand to SEQ ID NO: 1996260
caucauggacuuaacauaa

SEQ ID NO: 1996262 - RNA, 19 nt, Artificial Sequence
  Description of Artificial Sequence: Synthetic oligonucleotide
  Sense strand starting at position 144 of SEQ ID NO: 1880820
auguuaaguccaugaugga

SEQ ID NO: 1996263 - RNA, 19 nt, Artificial Sequence
  Description of Artificial Sequence: Synthetic oligonucleotide
  Antisense strand to SEQ ID NO: 1996262
uccaucauggacuuaacau

SEQ ID NO: 1996264 - RNA, 19 nt, Artificial Sequence
  Description of Artificial Sequence: Synthetic oligonucleotide
  Sense strand starting at position 145 of SEQ ID NO: 1880820
uguuaaguccaugauggau

SEQ ID NO: 1996265 - RNA, 19 nt, Artificial Sequence
  Description of Artificial Sequence: Synthetic oligonucleotide
  Antisense strand to SEQ ID NO: 1996264
auccaucauggacuuaaca

SEQ ID NO: 1996266 - RNA, 19 nt, Artificial Sequence
  Description of Artificial Sequence: Synthetic oligonucleotide
  Sense strand starting at position 148 of SEQ ID NO: 1880820
uaaguccaugauggauauu

SEQ ID NO: 1996267 - RNA, 19 nt, Artificial Sequence
  Description of Artificial Sequence: Synthetic oligonucleotide
  Antisense strand to SEQ ID NO: 1996266
aauauccaucauggacuua

SEQ ID NO: 1996268 - RNA, 19 nt, Artificial Sequence
  Description of Artificial Sequence: Synthetic oligonucleotide
  Sense strand starting at position 452 of SEQ ID NO: 1880820
gguugaguucuccaccaga

SEQ ID NO: 1996269 - RNA, 19 nt, Artificial Sequence
  Description of Artificial Sequence: Synthetic oligonucleotide
  Antisense strand to SEQ ID NO: 1996268
ucugguggagaacucaacc

SEQ ID NO: 1996270 - RNA, 19 nt, Artificial Sequence
  Description of Artificial Sequence: Synthetic oligonucleotide
  Sense strand starting at position 455 of SEQ ID NO: 1880820
ugaguucuccaccagaagu

SEQ ID NO: 1996271 - RNA, 19 nt, Artificial Sequence
  Description of Artificial Sequence: Synthetic oligonucleotide
  Antisense strand to SEQ ID NO: 1996270
acuucugguggagaacuca

SEQ ID NO: 1996272 - RNA, 19 nt, Artificial Sequence
  Description of Artificial Sequence: Synthetic oligonucleotide
  Sense strand starting at position 471 of SEQ ID NO: 1880820
aguugagcaaggcagaauu

SEQ ID NO: 1996273 - RNA, 19 nt, Artificial Sequence
  Description of Artificial Sequence: Synthetic oligonucleotide
  Antisense strand to SEQ ID NO: 1996272
aauucugccuugcucaacu

SEQ ID NO: 1996274 - RNA, 19 nt, Artificial Sequence
  Description of Artificial Sequence: Synthetic oligonucleotide
  Sense strand starting at position 522 of SEQ ID NO: 1880820
agcuuuagacaauauaagu

SEQ ID NO: 1996275 - RNA, 19 nt, Artificial Sequence
  Description of Artificial Sequence: Synthetic oligonucleotide
  Antisense strand to SEQ ID NO: 1996274
acuuauauugucuaaagcu

SEQ ID NO: 1996276 - RNA, 19 nt, Artificial Sequence
  Description of Artificial Sequence: Synthetic oligonucleotide
  Sense strand starting at position 541 of SEQ ID NO: 1880820
uguccuauuuaagaaagau

SEQ ID NO: 1996277 - RNA, 19 nt, Artificial Sequence
  Description of Artificial Sequence: Synthetic oligonucleotide
  Antisense strand to SEQ ID NO: 1996276
aucuuucuuaaauaggaca

SEQ ID NO: 1996278 - RNA, 19 nt, Artificial Sequence
  Description of Artificial Sequence: Synthetic oligonucleotide
  Sense strand starting at position 1007 of SEQ ID NO: 1880820
cuguguaauaauggaagca

SEQ ID NO: 1996279 - RNA, 19 nt, Artificial Sequence
  Description of Artificial Sequence: Synthetic oligonucleotide
  Antisense strand to SEQ ID NO: 1996278
ugcuuccauuauuacacag

SEQ ID NO: 1996280 - RNA, 19 nt, Artificial Sequence
  Description of Artificial Sequence: Synthetic oligonucleotide
  Sense strand starting at position 1008 of SEQ ID NO: 1880820
uguguaauaauggaagcaa

SEQ ID NO: 1996281 - RNA, 19 nt, Artificial Sequence
  Description of Artificial Sequence: Synthetic oligonucleotide
  Antisense strand to SEQ ID NO: 1996280
uugcuuccauuauuacaca

SEQ ID NO: 1996282 - RNA, 19 nt, Artificial Sequence
  Description of Artificial Sequence: Synthetic oligonucleotide
  Sense strand starting at position 1066 of SEQ ID NO: 1880820
gugggacauuucuaaacau

SEQ ID NO: 1996283 - RNA, 19 nt, Artificial Sequence
  Description of Artificial Sequence: Synthetic oligonucleotide
  Antisense strand to SEQ ID NO: 1996282
auguuuagaaaugucccac

SEQ ID NO: 1996284 - RNA, 19 nt, Artificial Sequence
  Description of Artificial Sequence: Synthetic oligonucleotide
  Sense strand starting at position 1091 of SEQ ID NO: 1880820
guaugagaaacacguacau

SEQ ID NO: 1996285 - RNA, 19 nt, Artificial Sequence
  Description of Artificial Sequence: Synthetic oligonucleotide
  Antisense strand to SEQ ID NO: 1996284
auguacguguuucucauac

SEQ ID NO: 1996286 - RNA, 19 nt, Artificial Sequence
  Description of Artificial Sequence: Synthetic oligonucleotide
  Sense strand starting at position 1294 of SEQ ID NO: 1880820
agauauaacuuauugguca

SEQ ID NO: 1996287 - RNA, 19 nt, Artificial Sequence
  Description of Artificial Sequence: Synthetic oligonucleotide
  Antisense strand to SEQ ID NO: 1996286
ugaccaauaaguuauaucu

SEQ ID NO: 1996288 - RNA, 19 nt, Artificial Sequence
  Description of Artificial Sequence: Synthetic oligonucleotide
  Sense strand starting at position 1373 of SEQ ID NO: 1880820
aagcgaguguaauuuacca

SEQ ID NO: 1996289 - RNA, 19 nt, Artificial Sequence
  Description of Artificial Sequence: Synthetic oligonucleotide
  Antisense strand to SEQ ID NO: 1996288
ugguaaauuacacucgcuu

SEQ ID NO: 1996290 - RNA, 19 nt, Artificial Sequence
  Description of Artificial Sequence: Synthetic oligonucleotide
  Sense strand starting at position 1386 of SEQ ID NO: 1880820
uuaccaugacauugagauu

SEQ ID NO: 1996291 - RNA, 19 nt, Artificial Sequence
  Description of Artificial Sequence: Synthetic oligonucleotide
  Antisense strand to SEQ ID NO: 1996290
aaucucaaugucaugguaa

SEQ ID NO: 1996292 - RNA, 19 nt, Artificial Sequence
  Description of Artificial Sequence: Synthetic oligonucleotide
  Sense strand starting at position 2035 of SEQ ID NO: 1880820
augaauauggccuagguuu

SEQ ID NO: 1996293 - RNA, 19 nt, Artificial Sequence
  Description of Artificial Sequence: Synthetic oligonucleotide
  Antisense strand to SEQ ID NO: 1996292
aaaccuaggccauauucau

SEQ ID NO: 1996294 - RNA, 19 nt, Artificial Sequence
  Description of Artificial Sequence: Synthetic oligonucleotide
  Sense strand starting at position 2037 of SEQ ID NO: 1880820
gaauauggccuagguuuga

SEQ ID NO: 1996295 - RNA, 19 nt, Artificial Sequence
  Description of Artificial Sequence: Synthetic oligonucleotide
  Antisense strand to SEQ ID NO: 1996294
ucaaaccuaggccauauuc

SEQ ID NO: 1996296 - RNA, 19 nt, Artificial Sequence
  Description of Artificial Sequence: Synthetic oligonucleotide
  Sense strand starting at position 2495 of SEQ ID NO: 1880820
agacguuuggacuggauga

SEQ ID NO: 1996297 - RNA, 19 nt, Artificial Sequence
  Description of Artificial Sequence: Synthetic oligonucleotide
  Antisense strand to SEQ ID NO: 1996296
ucauccaguccaaacgucu

SEQ ID NO: 1996298 - RNA, 19 nt, Artificial Sequence
  Description of Artificial Sequence: Synthetic oligonucleotide
  Sense strand starting at position 2614 of SEQ ID NO: 1880820
uguuccauuguggaucaua

SEQ ID NO: 1996299 - RNA, 19 nt, Artificial Sequence
  Description of Artificial Sequence: Synthetic oligonucleotide
  Antisense strand to SEQ ID NO: 1996298
uaugauccacaauggaaca

SEQ ID NO: 1996300 - RNA, 19 nt, Artificial Sequence
  Description of Artificial Sequence: Synthetic oligonucleotide
  Sense strand starting at position 2664 of SEQ ID NO: 1880820
ggcucuuaauuucuguuau

SEQ ID NO: 1996301 - RNA, 19 nt, Artificial Sequence
  Description of Artificial Sequence: Synthetic oligonucleotide
  Antisense strand to SEQ ID NO: 1996300
auaacagaaauuaagagcc

SEQ ID NO: 1996302 - RNA, 19 nt, Artificial Sequence
  Description of Artificial Sequence: Synthetic oligonucleotide
  Sense strand starting at position 2772 of SEQ ID NO: 1880820
ugaggugacccuuauguag

SEQ ID NO: 1996303 - RNA, 19 nt, Artificial Sequence
  Description of Artificial Sequence: Synthetic oligonucleotide
  Antisense strand to SEQ ID NO: 1996302
cuacauaagggucaccuca

SEQ ID NO: 1996304 - RNA, 19 nt, Artificial Sequence
  Description of Artificial Sequence: Synthetic oligonucleotide
  Sense strand starting at position 2776 of SEQ ID NO: 1880820
gugacccuuauguagaagu

SEQ ID NO: 1996305 - RNA, 19 nt, Artificial Sequence
  Description of Artificial Sequence: Synthetic oligonucleotide
  Antisense strand to SEQ ID NO: 1996304
acuucuacauaagggucac

SEQ ID NO: 1996306 - RNA, 19 nt, Artificial Sequence
  Description of Artificial Sequence: Synthetic oligonucleotide
  Sense strand starting at position 2795 of SEQ ID NO: 1880820
ugcuuugcauuucugauau

SEQ ID NO: 1996307 - RNA, 19 nt, Artificial Sequence
  Description of Artificial Sequence: Synthetic oligonucleotide
  Antisense strand to SEQ ID NO: 1996306
auaucagaaaugcaaagca

SEQ ID NO: 1996308 - RNA, 19 nt, Artificial Sequence
  Description of Artificial Sequence: Synthetic oligonucleotide
  Sense strand starting at position 2962 of SEQ ID NO: 1880820
gagugcuuacacuaaggcu

SEQ ID NO: 1996309 - RNA, 19 nt, Artificial Sequence
  Description of Artificial Sequence: Synthetic oligonucleotide
  Antisense strand to SEQ ID NO: 1996308
agccuuaguguaagcacuc

SEQ ID NO: 1996310 - RNA, 19 nt, Artificial Sequence
  Description of Artificial Sequence: Synthetic oligonucleotide
  Sense strand starting at position 3021 of SEQ ID NO: 1880820
gcuauaagauaguuccuca

SEQ ID NO: 1996311 - RNA, 19 nt, Artificial Sequence
  Description of Artificial Sequence: Synthetic oligonucleotide
  Antisense strand to SEQ ID NO: 1996310
ugaggaacuaucuuauagc

SEQ ID NO: 1996312 - RNA, 19 nt, Artificial Sequence
  Description of Artificial Sequence: Synthetic oligonucleotide
  Sense strand starting at position 3031 of SEQ ID NO: 1880820
aguuccucaccuuauagau

SEQ ID NO: 1996313 - RNA, 19 nt, Artificial Sequence
  Description of Artificial Sequence: Synthetic oligonucleotide
  Antisense strand to SEQ ID NO: 1996312
aucuauaaggugaggaacu

SEQ ID NO: 1996314 - RNA, 19 nt, Artificial Sequence
  Description of Artificial Sequence: Synthetic oligonucleotide
  Sense strand starting at position 3053 of SEQ ID NO: 1880820
gaaacagguuuagugaagu

SEQ ID NO: 1996315 - RNA, 19 nt, Artificial Sequence
  Description of Artificial Sequence: Synthetic oligonucleotide
  Antisense strand to SEQ ID NO: 1996314
acuucacuaaaccuguuuc

SEQ ID NO: 1996316 - RNA, 19 nt, Artificial Sequence
  Description of Artificial Sequence: Synthetic oligonucleotide
  Sense strand starting at position 3070 of SEQ ID NO: 1880820
gugacuugcaaguaagaca

SEQ ID NO: 1996317 - RNA, 19 nt, Artificial Sequence
  Description of Artificial Sequence: Synthetic oligonucleotide
  Antisense strand to SEQ ID NO: 1996316
ugucuuacuugcaagucac

SEQ ID NO: 1996318 - RNA, 19 nt, Artificial Sequence
  Description of Artificial Sequence: Synthetic oligonucleotide
  Sense strand starting at position 3115 of SEQ ID NO: 1880820
gccauucuucuauauugag

SEQ ID NO: 1996319 - RNA, 19 nt, Artificial Sequence
  Description of Artificial Sequence: Synthetic oligonucleotide
  Antisense strand to SEQ ID NO: 1996318
cucaauauagaagaauggc

SEQ ID NO: 1996320 - RNA, 19 nt, Artificial Sequence
  Description of Artificial Sequence: Synthetic oligonucleotide
  Sense strand starting at position 3127 of SEQ ID NO: 1880820
uauugagaucuguauguau

SEQ ID NO: 1996321 - RNA, 19 nt, Artificial Sequence
  Description of Artificial Sequence: Synthetic oligonucleotide
  Antisense strand to SEQ ID NO: 1996320
auacauacagaucucaaua

SEQ ID NO: 1996322 - RNA, 19 nt, Artificial Sequence
  Description of Artificial Sequence: Synthetic oligonucleotide
  Sense strand starting at position 3129 of SEQ ID NO: 1880820
uugagaucuguauguauac

SEQ ID NO: 1996323 - RNA, 19 nt, Artificial Sequence
  Description of Artificial Sequence: Synthetic oligonucleotide
  Antisense strand to SEQ ID NO: 1996322
guauacauacagaucucaa

SEQ ID NO: 1996324 - RNA, 19 nt, Artificial Sequence
  Description of Artificial Sequence: Synthetic oligonucleotide
  Sense strand starting at position 3130 of SEQ ID NO: 1880820
ugagaucuguauguauaca

SEQ ID NO: 1996325 - RNA, 19 nt, Artificial Sequence
  Description of Artificial Sequence: Synthetic oligonucleotide
  Antisense strand to SEQ ID NO: 1996324
uguauacauacagaucuca

SEQ ID NO: 1996326 - RNA, 19 nt, Artificial Sequence
  Description of Artificial Sequence: Synthetic oligonucleotide
  Sense strand starting at position 3220 of SEQ ID NO: 1880820
augccagucuuuguaauuu

SEQ ID NO: 1996327 - RNA, 19 nt, Artificial Sequence
  Description of Artificial Sequence: Synthetic oligonucleotide
  Antisense strand to SEQ ID NO: 1996326
aaauuacaaagacuggcau

SEQ ID NO: 1996328 - RNA, 19 nt, Artificial Sequence
  Description of Artificial Sequence: Synthetic oligonucleotide
  Sense strand starting at position 3314 of SEQ ID NO: 1880820
agaugcagauucucggaaa

SEQ ID NO: 1996329 - RNA, 19 nt, Artificial Sequence
  Description of Artificial Sequence: Synthetic oligonucleotide
  Antisense strand to SEQ ID NO: 1996328
uuuccgagaaucugcaucu

SEQ ID NO: 1996330 - RNA, 19 nt, Artificial Sequence
  Description of Artificial Sequence: Synthetic oligonucleotide
  Sense strand starting at position 3540 of SEQ ID NO: 1880820
gaugcagaugucuagggua

SEQ ID NO: 1996331 - RNA, 19 nt, Artificial Sequence
  Description of Artificial Sequence: Synthetic oligonucleotide
  Antisense strand to SEQ ID NO: 1996330
uacccuagacaucugcauc

SEQ ID NO: 1996332 - RNA, 19 nt, Artificial Sequence
  Description of Artificial Sequence: Synthetic oligonucleotide
  Sense strand starting at position 3552 of SEQ ID NO: 1880820
uaggguagucucuacccua

SEQ ID NO: 1996333 - RNA, 19 nt, Artificial Sequence
  Description of Artificial Sequence: Synthetic oligonucleotide
  Antisense strand to SEQ ID NO: 1996332
uaggguagagacuacccua

SEQ ID NO: 1996334 - RNA, 19 nt, Artificial Sequence
  Description of Artificial Sequence: Synthetic oligonucleotide
  Sense strand starting at position 26 of SEQ ID NO: 1880821
gcugcuauuuguuucugga

SEQ ID NO: 1996335 - RNA, 19 nt, Artificial Sequence
  Description of Artificial Sequence: Synthetic oligonucleotide
  Antisense strand to SEQ ID NO: 1996334
uccagaaacaaauagcagc

SEQ ID NO: 1996336 - RNA, 19 nt, Artificial Sequence
  Description of Artificial Sequence: Synthetic oligonucleotide
  Sense strand starting at position 28 of SEQ ID NO: 1880821
ugcuauuuguuucuggaac

SEQ ID NO: 1996337 - RNA, 19 nt, Artificial Sequence
  Description of Artificial Sequence: Synthetic oligonucleotide
  Antisense strand to SEQ ID NO: 1996336
guuccagaaacaaauagca

SEQ ID NO: 1996338 - RNA, 19 nt, Artificial Sequence
  Description of Artificial Sequence: Synthetic oligonucleotide
  Sense strand starting at position 71 of SEQ ID NO: 1880821
augugugaccuuuaacuua

SEQ ID NO: 1996339 - RNA, 19 nt, Artificial Sequence
  Description of Artificial Sequence: Synthetic oligonucleotide
  Antisense strand to SEQ ID NO: 1996338
uaaguuaaaggucacacau

SEQ ID NO: 1996340 - RNA, 19 nt, Artificial Sequence
  Description of Artificial Sequence: Synthetic oligonucleotide
  Sense strand starting at position 142 of SEQ ID NO: 1880821
uuauguuaaguccaugaug

SEQ ID NO: 1996341 - RNA, 19 nt, Artificial Sequence
  Description of Artificial Sequence: Synthetic oligonucleotide
  Antisense strand to SEQ ID NO: 1996340
caucauggacuuaacauaa

SEQ ID NO: 1996342 - RNA, 19 nt, Artificial Sequence
  Description of Artificial Sequence: Synthetic oligonucleotide
  Sense strand starting at position 144 of SEQ ID NO: 1880821
auguuaaguccaugaugga

SEQ ID NO: 1996343 - RNA, 19 nt, Artificial Sequence
  Description of Artificial Sequence: Synthetic oligonucleotide
  Antisense strand to SEQ ID NO: 1996342
uccaucauggacuuaacau

SEQ ID NO: 1996344 - RNA, 19 nt, Artificial Sequence
  Description of Artificial Sequence: Synthetic oligonucleotide
  Sense strand starting at position 145 of SEQ ID NO: 1880821
uguuaaguccaugauggau

SEQ ID NO: 1996345 - RNA, 19 nt, Artificial Sequence
  Description of Artificial Sequence: Synthetic oligonucleotide
  Antisense strand to SEQ ID NO: 1996344
auccaucauggacuuaaca

SEQ ID NO: 1996346 - RNA, 19 nt, Artificial Sequence
  Description of Artificial Sequence: Synthetic oligonucleotide
  Sense strand starting at position 148 of SEQ ID NO: 1880821
uaaguccaugauggauauu

SEQ ID NO: 1996347 - RNA, 19 nt, Artificial Sequence
  Description of Artificial Sequence: Synthetic oligonucleotide
  Antisense strand to SEQ ID NO: 1996346
aauauccaucauggacuua

SEQ ID NO: 1996348 - RNA, 19 nt, Artificial Sequence
  Description of Artificial Sequence: Synthetic oligonucleotide
  Sense strand starting at position 452 of SEQ ID NO: 1880821
gguugaguucuccaccaga

SEQ ID NO: 1996349 - RNA, 19 nt, Artificial Sequence
  Description of Artificial Sequence: Synthetic oligonucleotide
  Antisense strand to SEQ ID NO: 1996348
ucugguggagaacucaacc

SEQ ID NO: 1996350 - RNA, 19 nt, Artificial Sequence
  Description of Artificial Sequence: Synthetic oligonucleotide
  Sense strand starting at position 455 of SEQ ID NO: 1880821
ugaguucuccaccagaagu

SEQ ID NO: 1996351 - RNA, 19 nt, Artificial Sequence
  Description of Artificial Sequence: Synthetic oligonucleotide
  Antisense strand to SEQ ID NO: 1996350
acuucugguggagaacuca

SEQ ID NO: 1996352 - RNA, 19 nt, Artificial Sequence
  Description of Artificial Sequence: Synthetic oligonucleotide
  Sense strand starting at position 471 of SEQ ID NO: 1880821
aguugagcaaggcagaauu

SEQ ID NO: 1996353 - RNA, 19 nt, Artificial Sequence
  Description of Artificial Sequence: Synthetic oligonucleotide
  Antisense strand to SEQ ID NO: 1996352
aauucugccuugcucaacu

SEQ ID NO: 1996354 - RNA, 19 nt, Artificial Sequence
  Description of Artificial Sequence: Synthetic oligonucleotide
  Sense strand starting at position 522 of SEQ ID NO: 1880821
agcuuuagacaauauaagu

SEQ ID NO: 1996355 - RNA, 19 nt, Artificial Sequence
  Description of Artificial Sequence: Synthetic oligonucleotide
  Antisense strand to SEQ ID NO: 1996354
acuuauauugucuaaagcu

SEQ ID NO: 1996356 - RNA, 19 nt, Artificial Sequence
  Description of Artificial Sequence: Synthetic oligonucleotide
  Sense strand starting at position 541 of SEQ ID NO: 1880821
uguccuauuuaagaaagau

SEQ ID NO: 1996357 - RNA, 19 nt, Artificial Sequence
  Description of Artificial Sequence: Synthetic oligonucleotide
  Antisense strand to SEQ ID NO: 1996356
aucuuucuuaaauaggaca

SEQ ID NO: 1996358 - RNA, 19 nt, Artificial Sequence
  Description of Artificial Sequence: Synthetic oligonucleotide
  Sense strand starting at position 1007 of SEQ ID NO: 1880821
cuguguaauaauggaagca

SEQ ID NO: 1996359 - RNA, 19 nt, Artificial Sequence
  Description of Artificial Sequence: Synthetic oligonucleotide
  Antisense strand to SEQ ID NO: 1996358
ugcuuccauuauuacacag

SEQ ID NO: 1996360 - RNA, 19 nt, Artificial Sequence
  Description of Artificial Sequence: Synthetic oligonucleotide
  Sense strand starting at position 1008 of SEQ ID NO: 1880821
uguguaauaauggaagcaa

SEQ ID NO: 1996361 - RNA, 19 nt, Artificial Sequence
  Description of Artificial Sequence: Synthetic oligonucleotide
  Antisense strand to SEQ ID NO: 1996360
uugcuuccauuauuacaca

SEQ ID NO: 1996362 - RNA, 19 nt, Artificial Sequence
  Description of Artificial Sequence: Synthetic oligonucleotide
  Sense strand starting at position 1066 of SEQ ID NO: 1880821
gugggacauuucuaaacau

SEQ ID NO: 1996363 - RNA, 19 nt, Artificial Sequence
  Description of Artificial Sequence: Synthetic oligonucleotide
  Antisense strand to SEQ ID NO: 1996362
auguuuagaaaugucccac

SEQ ID NO: 1996364 - RNA, 19 nt, Artificial Sequence
  Description of Artificial Sequence: Synthetic oligonucleotide
  Sense strand starting at position 1091 of SEQ ID NO: 1880821
guaugagaaacacguacau

SEQ ID NO: 1996365 - RNA, 19 nt, Artificial Sequence
  Description of Artificial Sequence: Synthetic oligonucleotide
  Antisense strand to SEQ ID NO: 1996364
auguacguguuucucauac

SEQ ID NO: 1996366 - RNA, 19 nt, Artificial Sequence
  Description of Artificial Sequence: Synthetic oligonucleotide
  Sense strand starting at position 1294 of SEQ ID NO: 1880821
agauauaacuuauugguca

SEQ ID NO: 1996367 - RNA, 19 nt, Artificial Sequence
  Description of Artificial Sequence: Synthetic oligonucleotide
  Antisense strand to SEQ ID NO: 1996366
ugaccaauaaguuauaucu

SEQ ID NO: 1996368 - RNA, 19 nt, Artificial Sequence
  Description of Artificial Sequence: Synthetic oligonucleotide
  Sense strand starting at position 1373 of SEQ ID NO: 1880821
aagcgaguguaauuuacca

SEQ ID NO: 1996369 - RNA, 19 nt, Artificial Sequence
  Description of Artificial Sequence: Synthetic oligonucleotide
  Antisense strand to SEQ ID NO: 1996368
ugguaaauuacacucgcuu

SEQ ID NO: 1996370 - RNA, 19 nt, Artificial Sequence
  Description of Artificial Sequence: Synthetic oligonucleotide
  Sense strand starting at position 1386 of SEQ ID NO: 1880821
uuaccaugacauugagauu

SEQ ID NO: 1996371 - RNA, 19 nt, Artificial Sequence
  Description of Artificial Sequence: Synthetic oligonucleotide
  Antisense strand to SEQ ID NO: 1996370
aaucucaaugucaugguaa

SEQ ID NO: 1996372 - RNA, 19 nt, Artificial Sequence
  Description of Artificial Sequence: Synthetic oligonucleotide
  Sense strand starting at position 2035 of SEQ ID NO: 1880821
augaauauggccuagguuu

SEQ ID NO: 1996373 - RNA, 19 nt, Artificial Sequence
  Description of Artificial Sequence: Synthetic oligonucleotide
  Antisense strand to SEQ ID NO: 1996372
aaaccuaggccauauucau

SEQ ID NO: 1996374 - RNA, 19 nt, Artificial Sequence
  Description of Artificial Sequence: Synthetic oligonucleotide
  Sense strand starting at position 2037 of SEQ ID NO: 1880821
gaauauggccuagguuuga

SEQ ID NO: 1996375 - RNA, 19 nt, Artificial Sequence
  Description of Artificial Sequence: Synthetic oligonucleotide
  Antisense strand to SEQ ID NO: 1996374
ucaaaccuaggccauauuc

SEQ ID NO: 1996376 - RNA, 19 nt, Artificial Sequence
  Description of Artificial Sequence: Synthetic oligonucleotide
  Sense strand starting at position 2495 of SEQ ID NO: 1880821
agacguuuggacuggauga

SEQ ID NO: 1996377 - RNA, 19 nt, Artificial Sequence
  Description of Artificial Sequence: Synthetic oligonucleotide
  Antisense strand to SEQ ID NO: 1996376
ucauccaguccaaacgucu

SEQ ID NO: 1996378 - RNA, 19 nt, Artificial Sequence
  Description of Artificial Sequence: Synthetic oligonucleotide
  Sense strand starting at position 2614 of SEQ ID NO: 1880821
uguuccauuguggaucaua

SEQ ID NO: 1996379 - RNA, 19 nt, Artificial Sequence
  Description of Artificial Sequence: Synthetic oligonucleotide
  Antisense strand to SEQ ID NO: 1996378
uaugauccacaauggaaca

SEQ ID NO: 1996380 - RNA, 19 nt, Artificial Sequence
  Description of Artificial Sequence: Synthetic oligonucleotide
  Sense strand starting at position 2664 of SEQ ID NO: 1880821
ggcucuuaauuucuguuau

SEQ ID NO: 1996381 - RNA, 19 nt, Artificial Sequence
  Description of Artificial Sequence: Synthetic oligonucleotide
  Antisense strand to SEQ ID NO: 1996380
auaacagaaauuaagagcc

SEQ ID NO: 1996382 - RNA, 19 nt, Artificial Sequence
  Description of Artificial Sequence: Synthetic oligonucleotide
  Sense strand starting at position 2772 of SEQ ID NO: 1880821
ugaggugacccuuauguag

SEQ ID NO: 1996383 - RNA, 19 nt, Artificial Sequence
  Description of Artificial Sequence: Synthetic oligonucleotide
  Antisense strand to SEQ ID NO: 1996382
cuacauaagggucaccuca

SEQ ID NO: 1996384 - RNA, 19 nt, Artificial Sequence
  Description of Artificial Sequence: Synthetic oligonucleotide
  Sense strand starting at position 2776 of SEQ ID NO: 1880821
gugacccuuauguagaagu

SEQ ID NO: 1996385 - RNA, 19 nt, Artificial Sequence
  Description of Artificial Sequence: Synthetic oligonucleotide
  Antisense strand to SEQ ID NO: 1996384
acuucuacauaagggucac

SEQ ID NO: 1996386 - RNA, 19 nt, Artificial Sequence
  Description of Artificial Sequence: Synthetic oligonucleotide
  Sense strand starting at position 2795 of SEQ ID NO: 1880821
ugcuuugcauuucugauau

SEQ ID NO: 1996387 - RNA, 19 nt, Artificial Sequence
  Description of Artificial Sequence: Synthetic oligonucleotide
  Antisense strand to SEQ ID NO: 1996386
auaucagaaaugcaaagca

SEQ ID NO: 1996388 - RNA, 19 nt, Artificial Sequence
  Description of Artificial Sequence: Synthetic oligonucleotide
  Sense strand starting at position 2962 of SEQ ID NO: 1880821
gagugcuuacacuaaggcu

SEQ ID NO: 1996389 - RNA, 19 nt, Artificial Sequence
  Description of Artificial Sequence: Synthetic oligonucleotide
  Antisense strand to SEQ ID NO: 1996388
agccuuaguguaagcacuc

SEQ ID NO: 1996390 - RNA, 19 nt, Artificial Sequence
  Description of Artificial Sequence: Synthetic oligonucleotide
  Sense strand starting at position 3021 of SEQ ID NO: 1880821
gcuauaagauaguuccuca

SEQ ID NO: 1996391 - RNA, 19 nt, Artificial Sequence
  Description of Artificial Sequence: Synthetic oligonucleotide
  Antisense strand to SEQ ID NO: 1996390
ugaggaacuaucuuauagc

SEQ ID NO: 1996392 - RNA, 19 nt, Artificial Sequence
  Description of Artificial Sequence: Synthetic oligonucleotide
  Sense strand starting at position 3031 of SEQ ID NO: 1880821
aguuccucaccuuauagau

SEQ ID NO: 1996393 - RNA, 19 nt, Artificial Sequence
  Description of Artificial Sequence: Synthetic oligonucleotide
  Antisense strand to SEQ ID NO: 1996392
aucuauaaggugaggaacu

SEQ ID NO: 1996394 - RNA, 19 nt, Artificial Sequence
  Description of Artificial Sequence: Synthetic oligonucleotide
  Sense strand starting at position 3053 of SEQ ID NO: 1880821
gaaacagguuuagugaagu

SEQ ID NO: 1996395 - RNA, 19 nt, Artificial Sequence
  Description of Artificial Sequence: Synthetic oligonucleotide
  Antisense strand to SEQ ID NO: 1996394
acuucacuaaaccuguuuc

SEQ ID NO: 1996396 - RNA, 19 nt, Artificial Sequence
  Description of Artificial Sequence: Synthetic oligonucleotide
  Sense strand starting at position 3070 of SEQ ID NO: 1880821
gugacuugcaaguaagaca

SEQ ID NO: 1996397 - RNA, 19 nt, Artificial Sequence
  Description of Artificial Sequence: Synthetic oligonucleotide
  Antisense strand to SEQ ID NO: 1996396
ugucuuacuugcaagucac

SEQ ID NO: 1996398 - RNA, 19 nt, Artificial Sequence
  Description of Artificial Sequence: Synthetic oligonucleotide
  Sense strand starting at position 3115 of SEQ ID NO: 1880821
gccauucuucuauauugag

SEQ ID NO: 1996399 - RNA, 19 nt, Artificial Sequence
  Description of Artificial Sequence: Synthetic oligonucleotide
  Antisense strand to SEQ ID NO: 1996398
cucaauauagaagaauggc

SEQ ID NO: 1996400 - RNA, 19 nt, Artificial Sequence
  Description of Artificial Sequence: Synthetic oligonucleotide
  Sense strand starting at position 3127 of SEQ ID NO: 1880821
uauugagaucuguauguau

SEQ ID NO: 1996401 - RNA, 19 nt, Artificial Sequence
  Description of Artificial Sequence: Synthetic oligonucleotide
  Antisense strand to SEQ ID NO: 1996400
auacauacagaucucaaua

SEQ ID NO: 1996402 - RNA, 19 nt, Artificial Sequence
  Description of Artificial Sequence: Synthetic oligonucleotide
  Sense strand starting at position 3129 of SEQ ID NO: 1880821
uugagaucuguauguauac

SEQ ID NO: 1996403 - RNA, 19 nt, Artificial Sequence
  Description of Artificial Sequence: Synthetic oligonucleotide
  Antisense strand to SEQ ID NO: 1996402
guauacauacagaucucaa

SEQ ID NO: 1996404 - RNA, 19 nt, Artificial Sequence
  Description of Artificial Sequence: Synthetic oligonucleotide
  Sense strand starting at position 3130 of SEQ ID NO: 1880821
ugagaucuguauguauaca

SEQ ID NO: 1996405 - RNA, 19 nt, Artificial Sequence
  Description of Artificial Sequence: Synthetic oligonucleotide
  Antisense strand to SEQ ID NO: 1996404
uguauacauacagaucuca

SEQ ID NO: 1996406 - RNA, 19 nt, Artificial Sequence
  Description of Artificial Sequence: Synthetic oligonucleotide
  Sense strand starting at position 3220 of SEQ ID NO: 1880821
augccagucuuuguaauuu

SEQ ID NO: 1996407 - RNA, 19 nt, Artificial Sequence
  Description of Artificial Sequence: Synthetic oligonucleotide
  Antisense strand to SEQ ID NO: 1996406
aaauuacaaagacuggcau

SEQ ID NO: 1996408 - RNA, 19 nt, Artificial Sequence
  Description of Artificial Sequence: Synthetic oligonucleotide
  Sense strand starting at position 3314 of SEQ ID NO: 1880821
agaugcagauucucggaaa

SEQ ID NO: 1996409 - RNA, 19 nt, Artificial Sequence
  Description of Artificial Sequence: Synthetic oligonucleotide
  Antisense strand to SEQ ID NO: 1996408
uuuccgagaaucugcaucu

SEQ ID NO: 1996410 - RNA, 19 nt, Artificial Sequence
  Description of Artificial Sequence: Synthetic oligonucleotide
  Sense strand starting at position 3540 of SEQ ID NO: 1880821
gaugcagaugucuagggua

SEQ ID NO: 1996411 - RNA, 19 nt, Artificial Sequence
  Description of Artificial Sequence: Synthetic oligonucleotide
  Antisense strand to SEQ ID NO: 1996410
uacccuagacaucugcauc

SEQ ID NO: 1996412 - RNA, 19 nt, Artificial Sequence
  Description of Artificial Sequence: Synthetic oligonucleotide
  Sense strand starting at position 3552 of SEQ ID NO: 1880821
uaggguagucucuacccua

SEQ ID NO: 1996413 - RNA, 19 nt, Artificial Sequence
  Description of Artificial Sequence: Synthetic oligonucleotide
  Antisense strand to SEQ ID NO: 1996412
uaggguagagacuacccua

SEQ ID NO: 1996414 - RNA, 19 nt, Artificial Sequence
  Description of Artificial Sequence: Synthetic oligonucleotide
  Sense strand starting at position 104 of SEQ ID NO: 1880822
uguguuugaagcugagaga

SEQ ID NO: 1996415 - RNA, 19 nt, Artificial Sequence
  Description of Artificial Sequence: Synthetic oligonucleotide
  Antisense strand to SEQ ID NO: 1996414
ucucucagcuucaaacaca

SEQ ID NO: 1996416 - RNA, 19 nt, Artificial Sequence
  Description of Artificial Sequence: Synthetic oligonucleotide
  Sense strand starting at position 105 of SEQ ID NO: 1880822
guguuugaagcugagagau

SEQ ID NO: 1996417 - RNA, 19 nt, Artificial Sequence
  Description of Artificial Sequence: Synthetic oligonucleotide
  Antisense strand to SEQ ID NO: 1996416
aucucucagcuucaaacac

SEQ ID NO: 1996418 - RNA, 19 nt, Artificial Sequence
  Description of Artificial Sequence: Synthetic oligonucleotide
  Sense strand starting at position 107 of SEQ ID NO: 1880822
guuugaagcugagagauaa

SEQ ID NO: 1996419 - RNA, 19 nt, Artificial Sequence
  Description of Artificial Sequence: Synthetic oligonucleotide
  Antisense strand to SEQ ID NO: 1996418
uuaucucucagcuucaaac

SEQ ID NO: 1996420 - RNA, 19 nt, Artificial Sequence
  Description of Artificial Sequence: Synthetic oligonucleotide
  Sense strand starting at position 129 of SEQ ID NO: 1880822
cuuaauaaucgauggcuua

SEQ ID NO: 1996421 - RNA, 19 nt, Artificial Sequence
  Description of Artificial Sequence: Synthetic oligonucleotide
  Antisense strand to SEQ ID NO: 1996420
uaagccaucgauuauuaag

SEQ ID NO: 1996422 - RNA, 19 nt, Artificial Sequence
  Description of Artificial Sequence: Synthetic oligonucleotide
  Sense strand starting at position 130 of SEQ ID NO: 1880822
uuaauaaucgauggcuuaa

SEQ ID NO: 1996423 - RNA, 19 nt, Artificial Sequence
  Description of Artificial Sequence: Synthetic oligonucleotide
  Antisense strand to SEQ ID NO: 1996422
uuaagccaucgauuauuaa

SEQ ID NO: 1996424 - RNA, 19 nt, Artificial Sequence
  Description of Artificial Sequence: Synthetic oligonucleotide
  Sense strand starting at position 164 of SEQ ID NO: 1880822
uucccucuaugaugaugua

SEQ ID NO: 1996425 - RNA, 19 nt, Artificial Sequence
  Description of Artificial Sequence: Synthetic oligonucleotide
  Antisense strand to SEQ ID NO: 1996424
uacaucaucauagagggaa

SEQ ID NO: 1996426 - RNA, 19 nt, Artificial Sequence
  Description of Artificial Sequence: Synthetic oligonucleotide
  Sense strand starting at position 167 of SEQ ID NO: 1880822
ccucuaugaugauguauuc

SEQ ID NO: 1996427 - RNA, 19 nt, Artificial Sequence
  Description of Artificial Sequence: Synthetic oligonucleotide
  Antisense strand to SEQ ID NO: 1996426
gaauacaucaucauagagg

SEQ ID NO: 1996428 - RNA, 19 nt, Artificial Sequence
  Description of Artificial Sequence: Synthetic oligonucleotide
  Sense strand starting at position 326 of SEQ ID NO: 1880822
uagguuguccagggaugga

SEQ ID NO: 1996429 - RNA, 19 nt, Artificial Sequence
  Description of Artificial Sequence: Synthetic oligonucleotide
  Antisense strand to SEQ ID NO: 1996428
uccaucccuggacaaccua

SEQ ID NO: 1996430 - RNA, 19 nt, Artificial Sequence
  Description of Artificial Sequence: Synthetic oligonucleotide
  Sense strand starting at position 352 of SEQ ID NO: 1880822
acuuuaaugucaggaacuc

SEQ ID NO: 1996431 - RNA, 19 nt, Artificial Sequence
  Description of Artificial Sequence: Synthetic oligonucleotide
  Antisense strand to SEQ ID NO: 1996430
gaguuccugacauuaaagu

SEQ ID NO: 1996432 - RNA, 19 nt, Artificial Sequence
  Description of Artificial Sequence: Synthetic oligonucleotide
  Sense strand starting at position 389 of SEQ ID NO: 1880822
cugcaauucucagcaaaug

SEQ ID NO: 1996433 - RNA, 19 nt, Artificial Sequence
  Description of Artificial Sequence: Synthetic oligonucleotide
  Antisense strand to SEQ ID NO: 1996432
cauuugcugagaauugcag

SEQ ID NO: 1996434 - RNA, 19 nt, Artificial Sequence
  Description of Artificial Sequence: Synthetic oligonucleotide
  Sense strand starting at position 390 of SEQ ID NO: 1880822
ugcaauucucagcaaauga

SEQ ID NO: 1996435 - RNA, 19 nt, Artificial Sequence
  Description of Artificial Sequence: Synthetic oligonucleotide
  Antisense strand to SEQ ID NO: 1996434
ucauuugcugagaauugca

SEQ ID NO: 1996436 - RNA, 19 nt, Artificial Sequence
  Description of Artificial Sequence: Synthetic oligonucleotide
  Sense strand starting at position 1131 of SEQ ID NO: 1880822
ucgguagugugaucauagc

SEQ ID NO: 1996437 - RNA, 19 nt, Artificial Sequence
  Description of Artificial Sequence: Synthetic oligonucleotide
  Antisense strand to SEQ ID NO: 1996436
gcuaugaucacacuaccga

SEQ ID NO: 1996438 - RNA, 19 nt, Artificial Sequence
  Description of Artificial Sequence: Synthetic oligonucleotide
  Sense strand starting at position 1201 of SEQ ID NO: 1880822
ccaaguagcucacuugauu

SEQ ID NO: 1996439 - RNA, 19 nt, Artificial Sequence
  Description of Artificial Sequence: Synthetic oligonucleotide
  Antisense strand to SEQ ID NO: 1996438
aaucaagugagcuacuugg

SEQ ID NO: 1996440 - RNA, 19 nt, Artificial Sequence
  Description of Artificial Sequence: Synthetic oligonucleotide
  Sense strand starting at position 1312 of SEQ ID NO: 1880822
ggguugcacgugugagaca

SEQ ID NO: 1996441 - RNA, 19 nt, Artificial Sequence
  Description of Artificial Sequence: Synthetic oligonucleotide
  Antisense strand to SEQ ID NO: 1996440
ugucucacacgugcaaccc

SEQ ID NO: 1996442 - RNA, 19 nt, Artificial Sequence
  Description of Artificial Sequence: Synthetic oligonucleotide
  Sense strand starting at position 1705 of SEQ ID NO: 1880822
aguucuaggguuugcacaa

SEQ ID NO: 1996443 - RNA, 19 nt, Artificial Sequence
  Description of Artificial Sequence: Synthetic oligonucleotide
  Antisense strand to SEQ ID NO: 1996442
uugugcaaacccuagaacu

SEQ ID NO: 1996444 - RNA, 19 nt, Artificial Sequence
  Description of Artificial Sequence: Synthetic oligonucleotide
  Sense strand starting at position 1727 of SEQ ID NO: 1880822
gcggguuuguuacaucaua

SEQ ID NO: 1996445 - RNA, 19 nt, Artificial Sequence
  Description of Artificial Sequence: Synthetic oligonucleotide
  Antisense strand to SEQ ID NO: 1996444
uaugauguaacaaacccgc

SEQ ID NO: 1996446 - RNA, 19 nt, Artificial Sequence
  Description of Artificial Sequence: Synthetic oligonucleotide
  Sense strand starting at position 1735 of SEQ ID NO: 1880822
guuacaucauauguauaca

SEQ ID NO: 1996447 - RNA, 19 nt, Artificial Sequence
  Description of Artificial Sequence: Synthetic oligonucleotide
  Antisense strand to SEQ ID NO: 1996446
uguauacauaugauguaac

SEQ ID NO: 1996448 - RNA, 19 nt, Artificial Sequence
  Description of Artificial Sequence: Synthetic oligonucleotide
  Sense strand starting at position 1788 of SEQ ID NO: 1880822
ccauuuacauuggguauau

SEQ ID NO: 1996449 - RNA, 19 nt, Artificial Sequence
  Description of Artificial Sequence: Synthetic oligonucleotide
  Antisense strand to SEQ ID NO: 1996448
auauacccaauguaaaugg

SEQ ID NO: 1996450 - RNA, 19 nt, Artificial Sequence
  Description of Artificial Sequence: Synthetic oligonucleotide
  Sense strand starting at position 1987 of SEQ ID NO: 1880822
ugccgaagugagcacuauu

SEQ ID NO: 1996451 - RNA, 19 nt, Artificial Sequence
  Description of Artificial Sequence: Synthetic oligonucleotide
  Antisense strand to SEQ ID NO: 1996450
aauagugcucacuucggca

SEQ ID NO: 1996452 - RNA, 19 nt, Artificial Sequence
  Description of Artificial Sequence: Synthetic oligonucleotide
  Sense strand starting at position 2647 of SEQ ID NO: 1880822
gcugguuguuggucauauc

SEQ ID NO: 1996453 - RNA, 19 nt, Artificial Sequence
  Description of Artificial Sequence: Synthetic oligonucleotide
  Antisense strand to SEQ ID NO: 1996452
gauaugaccaacaaccagc

SEQ ID NO: 1996454 - RNA, 19 nt, Artificial Sequence
  Description of Artificial Sequence: Synthetic oligonucleotide
  Sense strand starting at position 2676 of SEQ ID NO: 1880822
cuuccaacaguuggauauu

SEQ ID NO: 1996455 - RNA, 19 nt, Artificial Sequence
  Description of Artificial Sequence: Synthetic oligonucleotide
  Antisense strand to SEQ ID NO: 1996454
aauauccaacuguuggaag

SEQ ID NO: 1996456 - RNA, 19 nt, Artificial Sequence
  Description of Artificial Sequence: Synthetic oligonucleotide
  Sense strand starting at position 2713 of SEQ ID NO: 1880822
cuccucucuuguucuuaga

SEQ ID NO: 1996457 - RNA, 19 nt, Artificial Sequence
  Description of Artificial Sequence: Synthetic oligonucleotide
  Antisense strand to SEQ ID NO: 1996456
ucuaagaacaagagaggag

SEQ ID NO: 1996458 - RNA, 19 nt, Artificial Sequence
  Description of Artificial Sequence: Synthetic oligonucleotide
  Sense strand starting at position 2715 of SEQ ID NO: 1880822
ccucucuuguucuuagaag

SEQ ID NO: 1996459 - RNA, 19 nt, Artificial Sequence
  Description of Artificial Sequence: Synthetic oligonucleotide
  Antisense strand to SEQ ID NO: 1996458
cuucuaagaacaagagagg

SEQ ID NO: 1996460 - RNA, 19 nt, Artificial Sequence
  Description of Artificial Sequence: Synthetic oligonucleotide
  Sense strand starting at position 2716 of SEQ ID NO: 1880822
cucucuuguucuuagaagu

SEQ ID NO: 1996461 - RNA, 19 nt, Artificial Sequence
  Description of Artificial Sequence: Synthetic oligonucleotide
  Antisense strand to SEQ ID NO: 1996460
acuucuaagaacaagagag

SEQ ID NO: 1996462 - RNA, 19 nt, Artificial Sequence
  Description of Artificial Sequence: Synthetic oligonucleotide
  Sense strand starting at position 3160 of SEQ ID NO: 1880822
uguaguugagacugucauu

SEQ ID NO: 1996463 - RNA, 19 nt, Artificial Sequence
  Description of Artificial Sequence: Synthetic oligonucleotide
  Antisense strand to SEQ ID NO: 1996462
aaugacagucucaacuaca

SEQ ID NO: 1996464 - RNA, 19 nt, Artificial Sequence
  Description of Artificial Sequence: Synthetic oligonucleotide
  Sense strand starting at position 3250 of SEQ ID NO: 1880822
ggcaguggcuauucucaca

SEQ ID NO: 1996465 - RNA, 19 nt, Artificial Sequence
  Description of Artificial Sequence: Synthetic oligonucleotide
  Antisense strand to SEQ ID NO: 1996464
ugugagaauagccacugcc

SEQ ID NO: 1996466 - RNA, 19 nt, Artificial Sequence
  Description of Artificial Sequence: Synthetic oligonucleotide
  Sense strand starting at position 3253 of SEQ ID NO: 1880822
aguggcuauucucacauau

SEQ ID NO: 1996467 - RNA, 19 nt, Artificial Sequence
  Description of Artificial Sequence: Synthetic oligonucleotide
  Antisense strand to SEQ ID NO: 1996466
auaugugagaauagccacu

SEQ ID NO: 1996468 - RNA, 19 nt, Artificial Sequence
  Description of Artificial Sequence: Synthetic oligonucleotide
  Sense strand starting at position 3255 of SEQ ID NO: 1880822
uggcuauucucacauauga

SEQ ID NO: 1996469 - RNA, 19 nt, Artificial Sequence
  Description of Artificial Sequence: Synthetic oligonucleotide
  Antisense strand to SEQ ID NO: 1996468
ucauaugugagaauagcca

SEQ ID NO: 1996470 - RNA, 19 nt, Artificial Sequence
  Description of Artificial Sequence: Synthetic oligonucleotide
  Sense strand starting at position 3359 of SEQ ID NO: 1880822
cacugugcccagcaaugau

SEQ ID NO: 1996471 - RNA, 19 nt, Artificial Sequence
  Description of Artificial Sequence: Synthetic oligonucleotide
  Antisense strand to SEQ ID NO: 1996470
aucauugcugggcacagug

SEQ ID NO: 1996472 - RNA, 19 nt, Artificial Sequence
  Description of Artificial Sequence: Synthetic oligonucleotide
  Sense strand starting at position 3440 of SEQ ID NO: 1880822
gcuaaauuauuugcccagu

SEQ ID NO: 1996473 - RNA, 19 nt, Artificial Sequence
  Description of Artificial Sequence: Synthetic oligonucleotide
  Antisense strand to SEQ ID NO: 1996472
acugggcaaauaauuuagc

SEQ ID NO: 1996474 - RNA, 19 nt, Artificial Sequence
  Description of Artificial Sequence: Synthetic oligonucleotide
  Sense strand starting at position 3490 of SEQ ID NO: 1880822
uccauuagacuguagguau

SEQ ID NO: 1996475 - RNA, 19 nt, Artificial Sequence
  Description of Artificial Sequence: Synthetic oligonucleotide
  Antisense strand to SEQ ID NO: 1996474
auaccuacagucuaaugga

SEQ ID NO: 1996476 - RNA, 19 nt, Artificial Sequence
  Description of Artificial Sequence: Synthetic oligonucleotide
  Sense strand starting at position 3576 of SEQ ID NO: 1880822
acgguauccuaauaauuua

SEQ ID NO: 1996477 - RNA, 19 nt, Artificial Sequence
  Description of Artificial Sequence: Synthetic oligonucleotide
  Antisense strand to SEQ ID NO: 1996476
uaaauuauuaggauaccgu

SEQ ID NO: 1996478 - RNA, 19 nt, Artificial Sequence
  Description of Artificial Sequence: Synthetic oligonucleotide
  Sense strand starting at position 3596 of SEQ ID NO: 1880822
agauuauauucuugagacu

SEQ ID NO: 1996479 - RNA, 19 nt, Artificial Sequence
  Description of Artificial Sequence: Synthetic oligonucleotide
  Antisense strand to SEQ ID NO: 1996478
agucucaagaauauaaucu

SEQ ID NO: 1996480 - RNA, 19 nt, Artificial Sequence
  Description of Artificial Sequence: Synthetic oligonucleotide
  Sense strand starting at position 3599 of SEQ ID NO: 1880822
uuauauucuugagacugga

SEQ ID NO: 1996481 - RNA, 19 nt, Artificial Sequence
  Description of Artificial Sequence: Synthetic oligonucleotide
  Antisense strand to SEQ ID NO: 1996480
uccagucucaagaauauaa

SEQ ID NO: 1996482 - RNA, 19 nt, Artificial Sequence
  Description of Artificial Sequence: Synthetic oligonucleotide
  Sense strand starting at position 3687 of SEQ ID NO: 1880822
cuccuaugggcuugaaucu

SEQ ID NO: 1996483 - RNA, 19 nt, Artificial Sequence
  Description of Artificial Sequence: Synthetic oligonucleotide
  Antisense strand to SEQ ID NO: 1996482
agauucaagcccauaggag

SEQ ID NO: 1996484 - RNA, 19 nt, Artificial Sequence
  Description of Artificial Sequence: Synthetic oligonucleotide
  Sense strand starting at position 3732 of SEQ ID NO: 1880822
agucuuaaagcucagcaga

SEQ ID NO: 1996485 - RNA, 19 nt, Artificial Sequence
  Description of Artificial Sequence: Synthetic oligonucleotide
  Antisense strand to SEQ ID NO: 1996484
ucugcugagcuuuaagacu

SEQ ID NO: 1996486 - RNA, 19 nt, Artificial Sequence
  Description of Artificial Sequence: Synthetic oligonucleotide
  Sense strand starting at position 3873 of SEQ ID NO: 1880822
gcuuccuaauacuuggaau

SEQ ID NO: 1996487 - RNA, 19 nt, Artificial Sequence
  Description of Artificial Sequence: Synthetic oligonucleotide
  Antisense strand to SEQ ID NO: 1996486
auuccaaguauuaggaagc

SEQ ID NO: 1996488 - RNA, 19 nt, Artificial Sequence
  Description of Artificial Sequence: Synthetic oligonucleotide
  Sense strand starting at position 3950 of SEQ ID NO: 1880822
aguauuaagcgugacaccu

SEQ ID NO: 1996489 - RNA, 19 nt, Artificial Sequence
  Description of Artificial Sequence: Synthetic oligonucleotide
  Antisense strand to SEQ ID NO: 1996488
aggugucacgcuuaauacu

SEQ ID NO: 1996490 - RNA, 19 nt, Artificial Sequence
  Description of Artificial Sequence: Synthetic oligonucleotide
  Sense strand starting at position 26 of SEQ ID NO: 1880823
gcugcuauuuguuucugga

SEQ ID NO: 1996491 - RNA, 19 nt, Artificial Sequence
  Description of Artificial Sequence: Synthetic oligonucleotide
  Antisense strand to SEQ ID NO: 1996490
uccagaaacaaauagcagc

SEQ ID NO: 1996492 - RNA, 19 nt, Artificial Sequence
  Description of Artificial Sequence: Synthetic oligonucleotide
  Sense strand starting at position 28 of SEQ ID NO: 1880823
ugcuauuuguuucuggaac

SEQ ID NO: 1996493 - RNA, 19 nt, Artificial Sequence
  Description of Artificial Sequence: Synthetic oligonucleotide
  Antisense strand to SEQ ID NO: 1996492
guuccagaaacaaauagca

SEQ ID NO: 1996494 - RNA, 19 nt, Artificial Sequence
  Description of Artificial Sequence: Synthetic oligonucleotide
  Sense strand starting at position 71 of SEQ ID NO: 1880823
augugugaccuuuaacuua

SEQ ID NO: 1996495 - RNA, 19 nt, Artificial Sequence
  Description of Artificial Sequence: Synthetic oligonucleotide
  Antisense strand to SEQ ID NO: 1996494
uaaguuaaaggucacacau

SEQ ID NO: 1996496 - RNA, 19 nt, Artificial Sequence
  Description of Artificial Sequence: Synthetic oligonucleotide
  Sense strand starting at position 142 of SEQ ID NO: 1880823
uuauguuaaguccaugaug

SEQ ID NO: 1996497 - RNA, 19 nt, Artificial Sequence
  Description of Artificial Sequence: Synthetic oligonucleotide
  Antisense strand to SEQ ID NO: 1996496
caucauggacuuaacauaa

SEQ ID NO: 1996498 - RNA, 19 nt, Artificial Sequence
  Description of Artificial Sequence: Synthetic oligonucleotide
  Sense strand starting at position 144 of SEQ ID NO: 1880823
auguuaaguccaugaugga

SEQ ID NO: 1996499 - RNA, 19 nt, Artificial Sequence
  Description of Artificial Sequence: Synthetic oligonucleotide
  Antisense strand to SEQ ID NO: 1996498
uccaucauggacuuaacau

SEQ ID NO: 1996500 - RNA, 19 nt, Artificial Sequence
  Description of Artificial Sequence: Synthetic oligonucleotide
  Sense strand starting at position 145 of SEQ ID NO: 1880823
uguuaaguccaugauggau

SEQ ID NO: 1996501 - RNA, 19 nt, Artificial Sequence
  Description of Artificial Sequence: Synthetic oligonucleotide
  Antisense strand to SEQ ID NO: 1996500
auccaucauggacuuaaca

SEQ ID NO: 1996502 - RNA, 19 nt, Artificial Sequence
  Description of Artificial Sequence: Synthetic oligonucleotide
  Sense strand starting at position 148 of SEQ ID NO: 1880823
uaaguccaugauggauauu

SEQ ID NO: 1996503 - RNA, 19 nt, Artificial Sequence
  Description of Artificial Sequence: Synthetic oligonucleotide
  Antisense strand to SEQ ID NO: 1996502
aauauccaucauggacuua

SEQ ID NO: 1996504 - RNA, 19 nt, Artificial Sequence
  Description of Artificial Sequence: Synthetic oligonucleotide
  Sense strand starting at position 452 of SEQ ID NO: 1880823
gguugaguucuccaccaga

SEQ ID NO: 1996505 - RNA, 19 nt, Artificial Sequence
  Description of Artificial Sequence: Synthetic oligonucleotide
  Antisense strand to SEQ ID NO: 1996504
ucugguggagaacucaacc

SEQ ID NO: 1996506 - RNA, 19 nt, Artificial Sequence
  Description of Artificial Sequence: Synthetic oligonucleotide
  Sense strand starting at position 455 of SEQ ID NO: 1880823
ugaguucuccaccagaagu

SEQ ID NO: 1996507 - RNA, 19 nt, Artificial Sequence
  Description of Artificial Sequence: Synthetic oligonucleotide
  Antisense strand to SEQ ID NO: 1996506
acuucugguggagaacuca

SEQ ID NO: 1996508 - RNA, 19 nt, Artificial Sequence
  Description of Artificial Sequence: Synthetic oligonucleotide
  Sense strand starting at position 471 of SEQ ID NO: 1880823
aguugagcaaggcagaauu

SEQ ID NO: 1996509 - RNA, 19 nt, Artificial Sequence
  Description of Artificial Sequence: Synthetic oligonucleotide
  Antisense strand to SEQ ID NO: 1996508
aauucugccuugcucaacu

SEQ ID NO: 1996510 - RNA, 19 nt, Artificial Sequence
  Description of Artificial Sequence: Synthetic oligonucleotide
  Sense strand starting at position 522 of SEQ ID NO: 1880823
agcuuuagacaauauaagu

SEQ ID NO: 1996511 - RNA, 19 nt, Artificial Sequence
  Description of Artificial Sequence: Synthetic oligonucleotide
  Antisense strand to SEQ ID NO: 1996510
acuuauauugucuaaagcu

SEQ ID NO: 1996512 - RNA, 19 nt, Artificial Sequence
  Description of Artificial Sequence: Synthetic oligonucleotide
  Sense strand starting at position 541 of SEQ ID NO: 1880823
uguccuauuuaagaaagau

SEQ ID NO: 1996513 - RNA, 19 nt, Artificial Sequence
  Description of Artificial Sequence: Synthetic oligonucleotide
  Antisense strand to SEQ ID NO: 1996512
aucuuucuuaaauaggaca

SEQ ID NO: 1996514 - RNA, 19 nt, Artificial Sequence
  Description of Artificial Sequence: Synthetic oligonucleotide
  Sense strand starting at position 1007 of SEQ ID NO: 1880823
cuguguaauaauggaagca

SEQ ID NO: 1996515 - RNA, 19 nt, Artificial Sequence
  Description of Artificial Sequence: Synthetic oligonucleotide
  Antisense strand to SEQ ID NO: 1996514
ugcuuccauuauuacacag

SEQ ID NO: 1996516 - RNA, 19 nt, Artificial Sequence
  Description of Artificial Sequence: Synthetic oligonucleotide
  Sense strand starting at position 1008 of SEQ ID NO: 1880823
uguguaauaauggaagcaa

SEQ ID NO: 1996517 - RNA, 19 nt, Artificial Sequence
  Description of Artificial Sequence: Synthetic oligonucleotide
  Antisense strand to SEQ ID NO: 1996516
uugcuuccauuauuacaca

SEQ ID NO: 1996518 - RNA, 19 nt, Artificial Sequence
  Description of Artificial Sequence: Synthetic oligonucleotide
  Sense strand starting at position 1066 of SEQ ID NO: 1880823
gugggacauuucuaaacau

SEQ ID NO: 1996519 - RNA, 19 nt, Artificial Sequence
  Description of Artificial Sequence: Synthetic oligonucleotide
  Antisense strand to SEQ ID NO: 1996518
auguuuagaaaugucccac

SEQ ID NO: 1996520 - RNA, 19 nt, Artificial Sequence
  Description of Artificial Sequence: Synthetic oligonucleotide
  Sense strand starting at position 1091 of SEQ ID NO: 1880823
guaugagaaacacguacau

SEQ ID NO: 1996521 - RNA, 19 nt, Artificial Sequence
  Description of Artificial Sequence: Synthetic oligonucleotide
  Antisense strand to SEQ ID NO: 1996520
auguacguguuucucauac

SEQ ID NO: 1996522 - RNA, 19 nt, Artificial Sequence
  Description of Artificial Sequence: Synthetic oligonucleotide
  Sense strand starting at position 1294 of SEQ ID NO: 1880823
agauauaacuuauugguca

SEQ ID NO: 1996523 - RNA, 19 nt, Artificial Sequence
  Description of Artificial Sequence: Synthetic oligonucleotide
  Antisense strand to SEQ ID NO: 1996522
ugaccaauaaguuauaucu

SEQ ID NO: 1996524 - RNA, 19 nt, Artificial Sequence
  Description of Artificial Sequence: Synthetic oligonucleotide
  Sense strand starting at position 1373 of SEQ ID NO: 1880823
aagcgaguguaauuuacca

SEQ ID NO: 1996525 - RNA, 19 nt, Artificial Sequence
  Description of Artificial Sequence: Synthetic oligonucleotide
  Antisense strand to SEQ ID NO: 1996524
ugguaaauuacacucgcuu

SEQ ID NO: 1996526 - RNA, 19 nt, Artificial Sequence
  Description of Artificial Sequence: Synthetic oligonucleotide
  Sense strand starting at position 1386 of SEQ ID NO: 1880823
uuaccaugacauugagauu

SEQ ID NO: 1996527 - RNA, 19 nt, Artificial Sequence
  Description of Artificial Sequence: Synthetic oligonucleotide
  Antisense strand to SEQ ID NO: 1996526
aaucucaaugucaugguaa

SEQ ID NO: 1996528 - RNA, 19 nt, Artificial Sequence
  Description of Artificial Sequence: Synthetic oligonucleotide
  Sense strand starting at position 2035 of SEQ ID NO: 1880823
augaauauggccuagguuu

SEQ ID NO: 1996529 - RNA, 19 nt, Artificial Sequence
  Description of Artificial Sequence: Synthetic oligonucleotide
  Antisense strand to SEQ ID NO: 1996528
aaaccuaggccauauucau

SEQ ID NO: 1996530 - RNA, 19 nt, Artificial Sequence
  Description of Artificial Sequence: Synthetic oligonucleotide
  Sense strand starting at position 2037 of SEQ ID NO: 1880823
gaauauggccuagguuuga

SEQ ID NO: 1996531 - RNA, 19 nt, Artificial Sequence
  Description of Artificial Sequence: Synthetic oligonucleotide
  Antisense strand to SEQ ID NO: 1996530
ucaaaccuaggccauauuc

SEQ ID NO: 1996532 - RNA, 19 nt, Artificial Sequence
  Description of Artificial Sequence: Synthetic oligonucleotide
  Sense strand starting at position 2495 of SEQ ID NO: 1880823
agacguuuggacuggauga

SEQ ID NO: 1996533 - RNA, 19 nt, Artificial Sequence
  Description of Artificial Sequence: Synthetic oligonucleotide
  Antisense strand to SEQ ID NO: 1996532
ucauccaguccaaacgucu

SEQ ID NO: 1996534 - RNA, 19 nt, Artificial Sequence
  Description of Artificial Sequence: Synthetic oligonucleotide
  Sense strand starting at position 2614 of SEQ ID NO: 1880823
uguuccauuguggaucaua

SEQ ID NO: 1996535 - RNA, 19 nt, Artificial Sequence
  Description of Artificial Sequence: Synthetic oligonucleotide
  Antisense strand to SEQ ID NO: 1996534
uaugauccacaauggaaca

SEQ ID NO: 1996536 - RNA, 19 nt, Artificial Sequence
  Description of Artificial Sequence: Synthetic oligonucleotide
  Sense strand starting at position 2664 of SEQ ID NO: 1880823
ggcucuuaauuucuguuau

SEQ ID NO: 1996537 - RNA, 19 nt, Artificial Sequence
  Description of Artificial Sequence: Synthetic oligonucleotide
  Antisense strand to SEQ ID NO: 1996536
auaacagaaauuaagagcc

SEQ ID NO: 1996538 - RNA, 19 nt, Artificial Sequence
  Description of Artificial Sequence: Synthetic oligonucleotide
  Sense strand starting at position 2772 of SEQ ID NO: 1880823
ugaggugacccuuauguag

SEQ ID NO: 1996539 - RNA, 19 nt, Artificial Sequence
  Description of Artificial Sequence: Synthetic oligonucleotide
  Antisense strand to SEQ ID NO: 1996538
cuacauaagggucaccuca

SEQ ID NO: 1996540 - RNA, 19 nt, Artificial Sequence
  Description of Artificial Sequence: Synthetic oligonucleotide
  Sense strand starting at position 2776 of SEQ ID NO: 1880823
gugacccuuauguagaagu

SEQ ID NO: 1996541 - RNA, 19 nt, Artificial Sequence
  Description of Artificial Sequence: Synthetic oligonucleotide
  Antisense strand to SEQ ID NO: 1996540
acuucuacauaagggucac

SEQ ID NO: 1996542 - RNA, 19 nt, Artificial Sequence
  Description of Artificial Sequence: Synthetic oligonucleotide
  Sense strand starting at position 2795 of SEQ ID NO: 1880823
ugcuuugcauuucugauau

SEQ ID NO: 1996543 - RNA, 19 nt, Artificial Sequence
  Description of Artificial Sequence: Synthetic oligonucleotide
  Antisense strand to SEQ ID NO: 1996542
auaucagaaaugcaaagca

SEQ ID NO: 1996544 - RNA, 19 nt, Artificial Sequence
  Description of Artificial Sequence: Synthetic oligonucleotide
  Sense strand starting at position 2962 of SEQ ID NO: 1880823
gagugcuuacacuaaggcu

SEQ ID NO: 1996545 - RNA, 19 nt, Artificial Sequence
  Description of Artificial Sequence: Synthetic oligonucleotide
  Antisense strand to SEQ ID NO: 1996544
agccuuaguguaagcacuc

SEQ ID NO: 1996546 - RNA, 19 nt, Artificial Sequence
  Description of Artificial Sequence: Synthetic oligonucleotide
  Sense strand starting at position 3021 of SEQ ID NO: 1880823
gcuauaagauaguuccuca

SEQ ID NO: 1996547 - RNA, 19 nt, Artificial Sequence
  Description of Artificial Sequence: Synthetic oligonucleotide
  Antisense strand to SEQ ID NO: 1996546
ugaggaacuaucuuauagc

SEQ ID NO: 1996548 - RNA, 19 nt, Artificial Sequence
  Description of Artificial Sequence: Synthetic oligonucleotide
  Sense strand starting at position 3031 of SEQ ID NO: 1880823
aguuccucaccuuauagau

SEQ ID NO: 1996549 - RNA, 19 nt, Artificial Sequence
  Description of Artificial Sequence: Synthetic oligonucleotide
  Antisense strand to SEQ ID NO: 1996548
aucuauaaggugaggaacu

SEQ ID NO: 1996550 - RNA, 19 nt, Artificial Sequence
  Description of Artificial Sequence: Synthetic oligonucleotide
  Sense strand starting at position 3053 of SEQ ID NO: 1880823
gaaacagguuuagugaagu

SEQ ID NO: 1996551 - RNA, 19 nt, Artificial Sequence
  Description of Artificial Sequence: Synthetic oligonucleotide
  Antisense strand to SEQ ID NO: 1996550
acuucacuaaaccuguuuc

SEQ ID NO: 1996552 - RNA, 19 nt, Artificial Sequence
  Description of Artificial Sequence: Synthetic oligonucleotide
  Sense strand starting at position 3070 of SEQ ID NO: 1880823
gugacuugcaaguaagaca

SEQ ID NO: 1996553 - RNA, 19 nt, Artificial Sequence
  Description of Artificial Sequence: Synthetic oligonucleotide
  Antisense strand to SEQ ID NO: 1996552
ugucuuacuugcaagucac

SEQ ID NO: 1996554 - RNA, 19 nt, Artificial Sequence
  Description of Artificial Sequence: Synthetic oligonucleotide
  Sense strand starting at position 3115 of SEQ ID NO: 1880823
gccauucuucuauauugag

SEQ ID NO: 1996555 - RNA, 19 nt, Artificial Sequence
  Description of Artificial Sequence: Synthetic oligonucleotide
  Antisense strand to SEQ ID NO: 1996554
cucaauauagaagaauggc

SEQ ID NO: 1996556 - RNA, 19 nt, Artificial Sequence
  Description of Artificial Sequence: Synthetic oligonucleotide
  Sense strand starting at position 3127 of SEQ ID NO: 1880823
uauugagaucuguauguau

SEQ ID NO: 1996557 - RNA, 19 nt, Artificial Sequence
  Description of Artificial Sequence: Synthetic oligonucleotide
  Antisense strand to SEQ ID NO: 1996556
auacauacagaucucaaua

SEQ ID NO: 1996558 - RNA, 19 nt, Artificial Sequence
  Description of Artificial Sequence: Synthetic oligonucleotide
  Sense strand starting at position 3129 of SEQ ID NO: 1880823
uugagaucuguauguauac

SEQ ID NO: 1996559 - RNA, 19 nt, Artificial Sequence
  Description of Artificial Sequence: Synthetic oligonucleotide
  Antisense strand to SEQ ID NO: 1996558
guauacauacagaucucaa

SEQ ID NO: 1996560 - RNA, 19 nt, Artificial Sequence
  Description of Artificial Sequence: Synthetic oligonucleotide
  Sense strand starting at position 3130 of SEQ ID NO: 1880823
ugagaucuguauguauaca

SEQ ID NO: 1996561 - RNA, 19 nt, Artificial Sequence
  Description of Artificial Sequence: Synthetic oligonucleotide
  Antisense strand to SEQ ID NO: 1996560
uguauacauacagaucuca

SEQ ID NO: 1996562 - RNA, 19 nt, Artificial Sequence
  Description of Artificial Sequence: Synthetic oligonucleotide
  Sense strand starting at position 3220 of SEQ ID NO: 1880823
augccagucuuuguaauuu

SEQ ID NO: 1996563 - RNA, 19 nt, Artificial Sequence
  Description of Artificial Sequence: Synthetic oligonucleotide
  Antisense strand to SEQ ID NO: 1996562
aaauuacaaagacuggcau

SEQ ID NO: 1996564 - RNA, 19 nt, Artificial Sequence
  Description of Artificial Sequence: Synthetic oligonucleotide
  Sense strand starting at position 3314 of SEQ ID NO: 1880823
agaugcagauucucggaaa

SEQ ID NO: 1996565 - RNA, 19 nt, Artificial Sequence
  Description of Artificial Sequence: Synthetic oligonucleotide
  Antisense strand to SEQ ID NO: 1996564
uuuccgagaaucugcaucu

SEQ ID NO: 1996566 - RNA, 19 nt, Artificial Sequence
  Description of Artificial Sequence: Synthetic oligonucleotide
  Sense strand starting at position 3540 of SEQ ID NO: 1880823
gaugcagaugucuagggua

SEQ ID NO: 1996567 - RNA, 19 nt, Artificial Sequence
  Description of Artificial Sequence: Synthetic oligonucleotide
  Antisense strand to SEQ ID NO: 1996566
uacccuagacaucugcauc

SEQ ID NO: 1996568 - RNA, 19 nt, Artificial Sequence
  Description of Artificial Sequence: Synthetic oligonucleotide
  Sense strand starting at position 3552 of SEQ ID NO: 1880823
uaggguagucucuacccua

SEQ ID NO: 1996569 - RNA, 19 nt, Artificial Sequence
  Description of Artificial Sequence: Synthetic oligonucleotide
  Antisense strand to SEQ ID NO: 1996568
uaggguagagacuacccua

SEQ ID NO: 1996570 - RNA, 19 nt, Artificial Sequence
  Description of Artificial Sequence: Synthetic oligonucleotide
  Sense strand starting at position 26 of SEQ ID NO: 1880824
gcugcuauuuguuucugga

SEQ ID NO: 1996571 - RNA, 19 nt, Artificial Sequence
  Description of Artificial Sequence: Synthetic oligonucleotide
  Antisense strand to SEQ ID NO: 1996570
uccagaaacaaauagcagc

SEQ ID NO: 1996572 - RNA, 19 nt, Artificial Sequence
  Description of Artificial Sequence: Synthetic oligonucleotide
  Sense strand starting at position 28 of SEQ ID NO: 1880824
ugcuauuuguuucuggaac

SEQ ID NO: 1996573 - RNA, 19 nt, Artificial Sequence
  Description of Artificial Sequence: Synthetic oligonucleotide
  Antisense strand to SEQ ID NO: 1996572
guuccagaaacaaauagca

SEQ ID NO: 1996574 - RNA, 19 nt, Artificial Sequence
  Description of Artificial Sequence: Synthetic oligonucleotide
  Sense strand starting at position 71 of SEQ ID NO: 1880824
augugugaccuuuaacuua

SEQ ID NO: 1996575 - RNA, 19 nt, Artificial Sequence
  Description of Artificial Sequence: Synthetic oligonucleotide
  Antisense strand to SEQ ID NO: 1996574
uaaguuaaaggucacacau

SEQ ID NO: 1996576 - RNA, 19 nt, Artificial Sequence
  Description of Artificial Sequence: Synthetic oligonucleotide
  Sense strand starting at position 142 of SEQ ID NO: 1880824
uuauguuaaguccaugaug

SEQ ID NO: 1996577 - RNA, 19 nt, Artificial Sequence
  Description of Artificial Sequence: Synthetic oligonucleotide
  Antisense strand to SEQ ID NO: 1996576
caucauggacuuaacauaa

SEQ ID NO: 1996578 - RNA, 19 nt, Artificial Sequence
  Description of Artificial Sequence: Synthetic oligonucleotide
  Sense strand starting at position 144 of SEQ ID NO: 1880824
auguuaaguccaugaugga

SEQ ID NO: 1996579 - RNA, 19 nt, Artificial Sequence
  Description of Artificial Sequence: Synthetic oligonucleotide
  Antisense strand to SEQ ID NO: 1996578
uccaucauggacuuaacau

SEQ ID NO: 1996580 - RNA, 19 nt, Artificial Sequence
  Description of Artificial Sequence: Synthetic oligonucleotide
  Sense strand starting at position 145 of SEQ ID NO: 1880824
uguuaaguccaugauggau

SEQ ID NO: 1996581 - RNA, 19 nt, Artificial Sequence
  Description of Artificial Sequence: Synthetic oligonucleotide
  Antisense strand to SEQ ID NO: 1996580
auccaucauggacuuaaca

SEQ ID NO: 1996582 - RNA, 19 nt, Artificial Sequence
  Description of Artificial Sequence: Synthetic oligonucleotide
  Sense strand starting at position 148 of SEQ ID NO: 1880824
uaaguccaugauggauauu

SEQ ID NO: 1996583 - RNA, 19 nt, Artificial Sequence
  Description of Artificial Sequence: Synthetic oligonucleotide
  Antisense strand to SEQ ID NO: 1996582
aauauccaucauggacuua

SEQ ID NO: 1996584 - RNA, 19 nt, Artificial Sequence
  Description of Artificial Sequence: Synthetic oligonucleotide
  Sense strand starting at position 452 of SEQ ID NO: 1880824
gguugaguucuccaccaga

SEQ ID NO: 1996585 - RNA, 19 nt, Artificial Sequence
  Description of Artificial Sequence: Synthetic oligonucleotide
  Antisense strand to SEQ ID NO: 1996584
ucugguggagaacucaacc

SEQ ID NO: 1996586 - RNA, 19 nt, Artificial Sequence
  Description of Artificial Sequence: Synthetic oligonucleotide
  Sense strand starting at position 455 of SEQ ID NO: 1880824
ugaguucuccaccagaagu

SEQ ID NO: 1996587 - RNA, 19 nt, Artificial Sequence
  Description of Artificial Sequence: Synthetic oligonucleotide
  Antisense strand to SEQ ID NO: 1996586
acuucugguggagaacuca

SEQ ID NO: 1996588 - RNA, 19 nt, Artificial Sequence
  Description of Artificial Sequence: Synthetic oligonucleotide
  Sense strand starting at position 471 of SEQ ID NO: 1880824
aguugagcaaggcagaauu

SEQ ID NO: 1996589 - RNA, 19 nt, Artificial Sequence
  Description of Artificial Sequence: Synthetic oligonucleotide
  Antisense strand to SEQ ID NO: 1996588
aauucugccuugcucaacu

SEQ ID NO: 1996590 - RNA, 19 nt, Artificial Sequence
  Description of Artificial Sequence: Synthetic oligonucleotide
  Sense strand starting at position 522 of SEQ ID NO: 1880824
agcuuuagacaauauaagu

SEQ ID NO: 1996591 - RNA, 19 nt, Artificial Sequence
  Description of Artificial Sequence: Synthetic oligonucleotide
  Antisense strand to SEQ ID NO: 1996590
acuuauauugucuaaagcu

SEQ ID NO: 1996592 - RNA, 19 nt, Artificial Sequence
  Description of Artificial Sequence: Synthetic oligonucleotide
  Sense strand starting at position 541 of SEQ ID NO: 1880824
uguccuauuuaagaaagau

SEQ ID NO: 1996593 - RNA, 19 nt, Artificial Sequence
  Description of Artificial Sequence: Synthetic oligonucleotide
  Antisense strand to SEQ ID NO: 1996592
aucuuucuuaaauaggaca

SEQ ID NO: 1996594 - RNA, 19 nt, Artificial Sequence
  Description of Artificial Sequence: Synthetic oligonucleotide
  Sense strand starting at position 1007 of SEQ ID NO: 1880824
cuguguaauaauggaagca

SEQ ID NO: 1996595 - RNA, 19 nt, Artificial Sequence
  Description of Artificial Sequence: Synthetic oligonucleotide
  Antisense strand to SEQ ID NO: 1996594
ugcuuccauuauuacacag

SEQ ID NO: 1996596 - RNA, 19 nt, Artificial Sequence
  Description of Artificial Sequence: Synthetic oligonucleotide
  Sense strand starting at position 1008 of SEQ ID NO: 1880824
uguguaauaauggaagcaa

SEQ ID NO: 1996597 - RNA, 19 nt, Artificial Sequence
  Description of Artificial Sequence: Synthetic oligonucleotide
  Antisense strand to SEQ ID NO: 1996596
uugcuuccauuauuacaca

SEQ ID NO: 1996598 - RNA, 19 nt, Artificial Sequence
  Description of Artificial Sequence: Synthetic oligonucleotide
  Sense strand starting at position 1066 of SEQ ID NO: 1880824
gugggacauuucuaaacau

SEQ ID NO: 1996599 - RNA, 19 nt, Artificial Sequence
  Description of Artificial Sequence: Synthetic oligonucleotide
  Antisense strand to SEQ ID NO: 1996598
auguuuagaaaugucccac

SEQ ID NO: 1996600 - RNA, 19 nt, Artificial Sequence
  Description of Artificial Sequence: Synthetic oligonucleotide
  Sense strand starting at position 1091 of SEQ ID NO: 1880824
guaugagaaacacguacau

SEQ ID NO: 1996601 - RNA, 19 nt, Artificial Sequence
  Description of Artificial Sequence: Synthetic oligonucleotide
  Antisense strand to SEQ ID NO: 1996600
auguacguguuucucauac

SEQ ID NO: 1996602 - RNA, 19 nt, Artificial Sequence
  Description of Artificial Sequence: Synthetic oligonucleotide
  Sense strand starting at position 1294 of SEQ ID NO: 1880824
agauauaacuuauugguca

SEQ ID NO: 1996603 - RNA, 19 nt, Artificial Sequence
  Description of Artificial Sequence: Synthetic oligonucleotide
  Antisense strand to SEQ ID NO: 1996602
ugaccaauaaguuauaucu

SEQ ID NO: 1996604 - RNA, 19 nt, Artificial Sequence
  Description of Artificial Sequence: Synthetic oligonucleotide
  Sense strand starting at position 1373 of SEQ ID NO: 1880824
aagcgaguguaauuuacca

SEQ ID NO: 1996605 - RNA, 19 nt, Artificial Sequence
  Description of Artificial Sequence: Synthetic oligonucleotide
  Antisense strand to SEQ ID NO: 1996604
ugguaaauuacacucgcuu

SEQ ID NO: 1996606 - RNA, 19 nt, Artificial Sequence
  Description of Artificial Sequence: Synthetic oligonucleotide
  Sense strand starting at position 1386 of SEQ ID NO: 1880824
uuaccaugacauugagauu

SEQ ID NO: 1996607 - RNA, 19 nt, Artificial Sequence
  Description of Artificial Sequence: Synthetic oligonucleotide
  Antisense strand to SEQ ID NO: 1996606
aaucucaaugucaugguaa

SEQ ID NO: 1996608 - RNA, 19 nt, Artificial Sequence
  Description of Artificial Sequence: Synthetic oligonucleotide
  Sense strand starting at position 2035 of SEQ ID NO: 1880824
augaauauggccuagguuu

SEQ ID NO: 1996609 - RNA, 19 nt, Artificial Sequence
  Description of Artificial Sequence: Synthetic oligonucleotide
  Antisense strand to SEQ ID NO: 1996608
aaaccuaggccauauucau

SEQ ID NO: 1996610 - RNA, 19 nt, Artificial Sequence
  Description of Artificial Sequence: Synthetic oligonucleotide
  Sense strand starting at position 2037 of SEQ ID NO: 1880824
gaauauggccuagguuuga

SEQ ID NO: 1996611 - RNA, 19 nt, Artificial Sequence
  Description of Artificial Sequence: Synthetic oligonucleotide
  Antisense strand to SEQ ID NO: 1996610
ucaaaccuaggccauauuc

SEQ ID NO: 1996612 - RNA, 19 nt, Artificial Sequence
  Description of Artificial Sequence: Synthetic oligonucleotide
  Sense strand starting at position 2495 of SEQ ID NO: 1880824
agacguuuggacuggauga

SEQ ID NO: 1996613 - RNA, 19 nt, Artificial Sequence
  Description of Artificial Sequence: Synthetic oligonucleotide
  Antisense strand to SEQ ID NO: 1996612
ucauccaguccaaacgucu

SEQ ID NO: 1996614 - RNA, 19 nt, Artificial Sequence
  Description of Artificial Sequence: Synthetic oligonucleotide
  Sense strand starting at position 2614 of SEQ ID NO: 1880824
uguuccauuguggaucaua

SEQ ID NO: 1996615 - RNA, 19 nt, Artificial Sequence
  Description of Artificial Sequence: Synthetic oligonucleotide
  Antisense strand to SEQ ID NO: 1996614
uaugauccacaauggaaca

SEQ ID NO: 1996616 - RNA, 19 nt, Artificial Sequence
  Description of Artificial Sequence: Synthetic oligonucleotide
  Sense strand starting at position 2664 of SEQ ID NO: 1880824
ggcucuuaauuucuguuau

SEQ ID NO: 1996617 - RNA, 19 nt, Artificial Sequence
  Description of Artificial Sequence: Synthetic oligonucleotide
  Antisense strand to SEQ ID NO: 1996616
auaacagaaauuaagagcc

SEQ ID NO: 1996618 - RNA, 19 nt, Artificial Sequence
  Description of Artificial Sequence: Synthetic oligonucleotide
  Sense strand starting at position 2772 of SEQ ID NO: 1880824
ugaggugacccuuauguag

SEQ ID NO: 1996619 - RNA, 19 nt, Artificial Sequence
  Description of Artificial Sequence: Synthetic oligonucleotide
  Antisense strand to SEQ ID NO: 1996618
cuacauaagggucaccuca

SEQ ID NO: 1996620 - RNA, 19 nt, Artificial Sequence
  Description of Artificial Sequence: Synthetic oligonucleotide
  Sense strand starting at position 2776 of SEQ ID NO: 1880824
gugacccuuauguagaagu

SEQ ID NO: 1996621 - RNA, 19 nt, Artificial Sequence
  Description of Artificial Sequence: Synthetic oligonucleotide
  Antisense strand to SEQ ID NO: 1996620
acuucuacauaagggucac

SEQ ID NO: 1996622 - RNA, 19 nt, Artificial Sequence
  Description of Artificial Sequence: Synthetic oligonucleotide
  Sense strand starting at position 2795 of SEQ ID NO: 1880824
ugcuuugcauuucugauau

SEQ ID NO: 1996623 - RNA, 19 nt, Artificial Sequence
  Description of Artificial Sequence: Synthetic oligonucleotide
  Antisense strand to SEQ ID NO: 1996622
auaucagaaaugcaaagca

SEQ ID NO: 1996624 - RNA, 19 nt, Artificial Sequence
  Description of Artificial Sequence: Synthetic oligonucleotide
  Sense strand starting at position 2962 of SEQ ID NO: 1880824
gagugcuuacacuaaggcu

SEQ ID NO: 1996625 - RNA, 19 nt, Artificial Sequence
  Description of Artificial Sequence: Synthetic oligonucleotide
  Antisense strand to SEQ ID NO: 1996624
agccuuaguguaagcacuc

SEQ ID NO: 1996626 - RNA, 19 nt, Artificial Sequence
  Description of Artificial Sequence: Synthetic oligonucleotide
  Sense strand starting at position 3021 of SEQ ID NO: 1880824
gcuauaagauaguuccuca

SEQ ID NO: 1996627 - RNA, 19 nt, Artificial Sequence
  Description of Artificial Sequence: Synthetic oligonucleotide
  Antisense strand to SEQ ID NO: 1996626
ugaggaacuaucuuauagc

SEQ ID NO: 1996628 - RNA, 19 nt, Artificial Sequence
  Description of Artificial Sequence: Synthetic oligonucleotide
  Sense strand starting at position 3031 of SEQ ID NO: 1880824
aguuccucaccuuauagau

SEQ ID NO: 1996629 - RNA, 19 nt, Artificial Sequence
  Description of Artificial Sequence: Synthetic oligonucleotide
  Antisense strand to SEQ ID NO: 1996628
aucuauaaggugaggaacu

SEQ ID NO: 1996630 - RNA, 19 nt, Artificial Sequence
  Description of Artificial Sequence: Synthetic oligonucleotide
  Sense strand starting at position 3053 of SEQ ID NO: 1880824
gaaacagguuuagugaagu

SEQ ID NO: 1996631 - RNA, 19 nt, Artificial Sequence
  Description of Artificial Sequence: Synthetic oligonucleotide
  Antisense strand to SEQ ID NO: 1996630
acuucacuaaaccuguuuc

SEQ ID NO: 1996632 - RNA, 19 nt, Artificial Sequence
  Description of Artificial Sequence: Synthetic oligonucleotide
  Sense strand starting at position 3070 of SEQ ID NO: 1880824
gugacuugcaaguaagaca

SEQ ID NO: 1996633 - RNA, 19 nt, Artificial Sequence
  Description of Artificial Sequence: Synthetic oligonucleotide
  Antisense strand to SEQ ID NO: 1996632
ugucuuacuugcaagucac

SEQ ID NO: 1996634 - RNA, 19 nt, Artificial Sequence
  Description of Artificial Sequence: Synthetic oligonucleotide
  Sense strand starting at position 3115 of SEQ ID NO: 1880824
gccauucuucuauauugag

SEQ ID NO: 1996635 - RNA, 19 nt, Artificial Sequence
  Description of Artificial Sequence: Synthetic oligonucleotide
  Antisense strand to SEQ ID NO: 1996634
cucaauauagaagaauggc

SEQ ID NO: 1996636 - RNA, 19 nt, Artificial Sequence
  Description of Artificial Sequence: Synthetic oligonucleotide
  Sense strand starting at position 3127 of SEQ ID NO: 1880824
uauugagaucuguauguau

SEQ ID NO: 1996637 - RNA, 19 nt, Artificial Sequence
  Description of Artificial Sequence: Synthetic oligonucleotide
  Antisense strand to SEQ ID NO: 1996636
auacauacagaucucaaua

SEQ ID NO: 1996638 - RNA, 19 nt, Artificial Sequence
  Description of Artificial Sequence: Synthetic oligonucleotide
  Sense strand starting at position 3129 of SEQ ID NO: 1880824
uugagaucuguauguauac

SEQ ID NO: 1996639 - RNA, 19 nt, Artificial Sequence
  Description of Artificial Sequence: Synthetic oligonucleotide
  Antisense strand to SEQ ID NO: 1996638
guauacauacagaucucaa

SEQ ID NO: 1996640 - RNA, 19 nt, Artificial Sequence
  Description of Artificial Sequence: Synthetic oligonucleotide
  Sense strand starting at position 3130 of SEQ ID NO: 1880824
ugagaucuguauguauaca

SEQ ID NO: 1996641 - RNA, 19 nt, Artificial Sequence
  Description of Artificial Sequence: Synthetic oligonucleotide
  Antisense strand to SEQ ID NO: 1996640
uguauacauacagaucuca

SEQ ID NO: 1996642 - RNA, 19 nt, Artificial Sequence
  Description of Artificial Sequence: Synthetic oligonucleotide
  Sense strand starting at position 3220 of SEQ ID NO: 1880824
augccagucuuuguaauuu

SEQ ID NO: 1996643 - RNA, 19 nt, Artificial Sequence
  Description of Artificial Sequence: Synthetic oligonucleotide
  Antisense strand to SEQ ID NO: 1996642
aaauuacaaagacuggcau

SEQ ID NO: 1996644 - RNA, 19 nt, Artificial Sequence
  Description of Artificial Sequence: Synthetic oligonucleotide
  Sense strand starting at position 3314 of SEQ ID NO: 1880824
agaugcagauucucggaaa

SEQ ID NO: 1996645 - RNA, 19 nt, Artificial Sequence
  Description of Artificial Sequence: Synthetic oligonucleotide
  Antisense strand to SEQ ID NO: 1996644
uuuccgagaaucugcaucu

SEQ ID NO: 1996646 - RNA, 19 nt, Artificial Sequence
  Description of Artificial Sequence: Synthetic oligonucleotide
  Sense strand starting at position 3540 of SEQ ID NO: 1880824
gaugcagaugucuagggua

SEQ ID NO: 1996647 - RNA, 19 nt, Artificial Sequence
  Description of Artificial Sequence: Synthetic oligonucleotide
  Antisense strand to SEQ ID NO: 1996646
uacccuagacaucugcauc

SEQ ID NO: 1996648 - RNA, 19 nt, Artificial Sequence
  Description of Artificial Sequence: Synthetic oligonucleotide
  Sense strand starting at position 3552 of SEQ ID NO: 1880824
uaggguagucucuacccua

SEQ ID NO: 1996649 - RNA, 19 nt, Artificial Sequence
  Description of Artificial Sequence: Synthetic oligonucleotide
  Antisense strand to SEQ ID NO: 1996648
uaggguagagacuacccua

SEQ ID NO: 1996650 - RNA, 19 nt, Artificial Sequence
  Description of Artificial Sequence: Synthetic oligonucleotide
  Sense strand starting at position 26 of SEQ ID NO: 1880825
gcugcuauuuguuucugga

SEQ ID NO: 1996651 - RNA, 19 nt, Artificial Sequence
  Description of Artificial Sequence: Synthetic oligonucleotide
  Antisense strand to SEQ ID NO: 1996650
uccagaaacaaauagcagc

SEQ ID NO: 1996652 - RNA, 19 nt, Artificial Sequence
  Description of Artificial Sequence: Synthetic oligonucleotide
  Sense strand starting at position 28 of SEQ ID NO: 1880825
ugcuauuuguuucuggaac

SEQ ID NO: 1996653 - RNA, 19 nt, Artificial Sequence
  Description of Artificial Sequence: Synthetic oligonucleotide
  Antisense strand to SEQ ID NO: 1996652
guuccagaaacaaauagca

SEQ ID NO: 1996654 - RNA, 19 nt, Artificial Sequence
  Description of Artificial Sequence: Synthetic oligonucleotide
  Sense strand starting at position 71 of SEQ ID NO: 1880825
augugugaccuuuaacuua

SEQ ID NO: 1996655 - RNA, 19 nt, Artificial Sequence
  Description of Artificial Sequence: Synthetic oligonucleotide
  Antisense strand to SEQ ID NO: 1996654
uaaguuaaaggucacacau

SEQ ID NO: 1996656 - RNA, 19 nt, Artificial Sequence
  Description of Artificial Sequence: Synthetic oligonucleotide
  Sense strand starting at position 142 of SEQ ID NO: 1880825
uuauguuaaguccaugaug

SEQ ID NO: 1996657 - RNA, 19 nt, Artificial Sequence
  Description of Artificial Sequence: Synthetic oligonucleotide
  Antisense strand to SEQ ID NO: 1996656
caucauggacuuaacauaa

SEQ ID NO: 1996658 - RNA, 19 nt, Artificial Sequence
  Description of Artificial Sequence: Synthetic oligonucleotide
  Sense strand starting at position 144 of SEQ ID NO: 1880825
auguuaaguccaugaugga

SEQ ID NO: 1996659 - RNA, 19 nt, Artificial Sequence
  Description of Artificial Sequence: Synthetic oligonucleotide
  Antisense strand to SEQ ID NO: 1996658
uccaucauggacuuaacau

SEQ ID NO: 1996660 - RNA, 19 nt, Artificial Sequence
  Description of Artificial Sequence: Synthetic oligonucleotide
  Sense strand starting at position 145 of SEQ ID NO: 1880825
uguuaaguccaugauggau

SEQ ID NO: 1996661 - RNA, 19 nt, Artificial Sequence
  Description of Artificial Sequence: Synthetic oligonucleotide
  Antisense strand to SEQ ID NO: 1996660
auccaucauggacuuaaca

SEQ ID NO: 1996662 - RNA, 19 nt, Artificial Sequence
  Description of Artificial Sequence: Synthetic oligonucleotide
  Sense strand starting at position 148 of SEQ ID NO: 1880825
uaaguccaugauggauauu

SEQ ID NO: 1996663 - RNA, 19 nt, Artificial Sequence
  Description of Artificial Sequence: Synthetic oligonucleotide
  Antisense strand to SEQ ID NO: 1996662
aauauccaucauggacuua

SEQ ID NO: 1996664 - RNA, 19 nt, Artificial Sequence
  Description of Artificial Sequence: Synthetic oligonucleotide
  Sense strand starting at position 452 of SEQ ID NO: 1880825
gguugaguucuccaccaga

SEQ ID NO: 1996665 - RNA, 19 nt, Artificial Sequence
  Description of Artificial Sequence: Synthetic oligonucleotide
  Antisense strand to SEQ ID NO: 1996664
ucugguggagaacucaacc

SEQ ID NO: 1996666 - RNA, 19 nt, Artificial Sequence
  Description of Artificial Sequence: Synthetic oligonucleotide
  Sense strand starting at position 455 of SEQ ID NO: 1880825
ugaguucuccaccagaagu

SEQ ID NO: 1996667 - RNA, 19 nt, Artificial Sequence
  Description of Artificial Sequence: Synthetic oligonucleotide
  Antisense strand to SEQ ID NO: 1996666
acuucugguggagaacuca

SEQ ID NO: 1996668 - RNA, 19 nt, Artificial Sequence
  Description of Artificial Sequence: Synthetic oligonucleotide
  Sense strand starting at position 471 of SEQ ID NO: 1880825
aguugagcaaggcagaauu

SEQ ID NO: 1996669 - RNA, 19 nt, Artificial Sequence
  Description of Artificial Sequence: Synthetic oligonucleotide
  Antisense strand to SEQ ID NO: 1996668
aauucugccuugcucaacu

SEQ ID NO: 1996670 - RNA, 19 nt, Artificial Sequence
  Description of Artificial Sequence: Synthetic oligonucleotide
  Sense strand starting at position 522 of SEQ ID NO: 1880825
agcuuuagacaauauaagu

SEQ ID NO: 1996671 - RNA, 19 nt, Artificial Sequence
  Description of Artificial Sequence: Synthetic oligonucleotide
  Antisense strand to SEQ ID NO: 1996670
acuuauauugucuaaagcu

SEQ ID NO: 1996672 - RNA, 19 nt, Artificial Sequence
  Description of Artificial Sequence: Synthetic oligonucleotide
  Sense strand starting at position 541 of SEQ ID NO: 1880825
uguccuauuuaagaaagau

SEQ ID NO: 1996673 - RNA, 19 nt, Artificial Sequence
  Description of Artificial Sequence: Synthetic oligonucleotide
  Antisense strand to SEQ ID NO: 1996672
aucuuucuuaaauaggaca

SEQ ID NO: 1996674 - RNA, 19 nt, Artificial Sequence
  Description of Artificial Sequence: Synthetic oligonucleotide
  Sense strand starting at position 1007 of SEQ ID NO: 1880825
cuguguaauaauggaagca

SEQ ID NO: 1996675 - RNA, 19 nt, Artificial Sequence
  Description of Artificial Sequence: Synthetic oligonucleotide
  Antisense strand to SEQ ID NO: 1996674
ugcuuccauuauuacacag

SEQ ID NO: 1996676 - RNA, 19 nt, Artificial Sequence
  Description of Artificial Sequence: Synthetic oligonucleotide
  Sense strand starting at position 1008 of SEQ ID NO: 1880825
uguguaauaauggaagcaa

SEQ ID NO: 1996677 - RNA, 19 nt, Artificial Sequence
  Description of Artificial Sequence: Synthetic oligonucleotide
  Antisense strand to SEQ ID NO: 1996676
uugcuuccauuauuacaca

SEQ ID NO: 1996678 - RNA, 19 nt, Artificial Sequence
  Description of Artificial Sequence: Synthetic oligonucleotide
  Sense strand starting at position 1066 of SEQ ID NO: 1880825
gugggacauuucuaaacau

SEQ ID NO: 1996679 - RNA, 19 nt, Artificial Sequence
  Description of Artificial Sequence: Synthetic oligonucleotide
  Antisense strand to SEQ ID NO: 1996678
auguuuagaaaugucccac

SEQ ID NO: 1996680 - RNA, 19 nt, Artificial Sequence
  Description of Artificial Sequence: Synthetic oligonucleotide
  Sense strand starting at position 1091 of SEQ ID NO: 1880825
guaugagaaacacguacau

SEQ ID NO: 1996681 - RNA, 19 nt, Artificial Sequence
  Description of Artificial Sequence: Synthetic oligonucleotide
  Antisense strand to SEQ ID NO: 1996680
auguacguguuucucauac

SEQ ID NO: 1996682 - RNA, 19 nt, Artificial Sequence
  Description of Artificial Sequence: Synthetic oligonucleotide
  Sense strand starting at position 1294 of SEQ ID NO: 1880825
agauauaacuuauugguca

SEQ ID NO: 1996683 - RNA, 19 nt, Artificial Sequence
  Description of Artificial Sequence: Synthetic oligonucleotide
  Antisense strand to SEQ ID NO: 1996682
ugaccaauaaguuauaucu

SEQ ID NO: 1996684 - RNA, 19 nt, Artificial Sequence
  Description of Artificial Sequence: Synthetic oligonucleotide
  Sense strand starting at position 1373 of SEQ ID NO: 1880825
aagcgaguguaauuuacca

SEQ ID NO: 1996685 - RNA, 19 nt, Artificial Sequence
  Description of Artificial Sequence: Synthetic oligonucleotide
  Antisense strand to SEQ ID NO: 1996684
ugguaaauuacacucgcuu

SEQ ID NO: 1996686 - RNA, 19 nt, Artificial Sequence
  Description of Artificial Sequence: Synthetic oligonucleotide
  Sense strand starting at position 1386 of SEQ ID NO: 1880825
uuaccaugacauugagauu

SEQ ID NO: 1996687 - RNA, 19 nt, Artificial Sequence
  Description of Artificial Sequence: Synthetic oligonucleotide
  Antisense strand to SEQ ID NO: 1996686
aaucucaaugucaugguaa

SEQ ID NO: 1996688 - RNA, 19 nt, Artificial Sequence
  Description of Artificial Sequence: Synthetic oligonucleotide
  Sense strand starting at position 2035 of SEQ ID NO: 1880825
augaauauggccuagguuu

SEQ ID NO: 1996689 - RNA, 19 nt, Artificial Sequence
  Description of Artificial Sequence: Synthetic oligonucleotide
  Antisense strand to SEQ ID NO: 1996688
aaaccuaggccauauucau

SEQ ID NO: 1996690 - RNA, 19 nt, Artificial Sequence
  Description of Artificial Sequence: Synthetic oligonucleotide
  Sense strand starting at position 2037 of SEQ ID NO: 1880825
gaauauggccuagguuuga

SEQ ID NO: 1996691 - RNA, 19 nt, Artificial Sequence
  Description of Artificial Sequence: Synthetic oligonucleotide
  Antisense strand to SEQ ID NO: 1996690
ucaaaccuaggccauauuc

SEQ ID NO: 1996692 - RNA, 19 nt, Artificial Sequence
  Description of Artificial Sequence: Synthetic oligonucleotide
  Sense strand starting at position 2495 of SEQ ID NO: 1880825
agacguuuggacuggauga

SEQ ID NO: 1996693 - RNA, 19 nt, Artificial Sequence
  Description of Artificial Sequence: Synthetic oligonucleotide
  Antisense strand to SEQ ID NO: 1996692
ucauccaguccaaacgucu

SEQ ID NO: 1996694 - RNA, 19 nt, Artificial Sequence
  Description of Artificial Sequence: Synthetic oligonucleotide
  Sense strand starting at position 2614 of SEQ ID NO: 1880825
uguuccauuguggaucaua

SEQ ID NO: 1996695 - RNA, 19 nt, Artificial Sequence
  Description of Artificial Sequence: Synthetic oligonucleotide
  Antisense strand to SEQ ID NO: 1996694
uaugauccacaauggaaca

SEQ ID NO: 1996696 - RNA, 19 nt, Artificial Sequence
  Description of Artificial Sequence: Synthetic oligonucleotide
  Sense strand starting at position 2664 of SEQ ID NO: 1880825
ggcucuuaauuucuguuau

SEQ ID NO: 1996697 - RNA, 19 nt, Artificial Sequence
  Description of Artificial Sequence: Synthetic oligonucleotide
  Antisense strand to SEQ ID NO: 1996696
auaacagaaauuaagagcc

SEQ ID NO: 1996698 - RNA, 19 nt, Artificial Sequence
  Description of Artificial Sequence: Synthetic oligonucleotide
  Sense strand starting at position 2772 of SEQ ID NO: 1880825
ugaggugacccuuauguag

SEQ ID NO: 1996699 - RNA, 19 nt, Artificial Sequence
  Description of Artificial Sequence: Synthetic oligonucleotide
  Antisense strand to SEQ ID NO: 1996698
cuacauaagggucaccuca

SEQ ID NO: 1996700 - RNA, 19 nt, Artificial Sequence
  Description of Artificial Sequence: Synthetic oligonucleotide
  Sense strand starting at position 2776 of SEQ ID NO: 1880825
gugacccuuauguagaagu

SEQ ID NO: 1996701 - RNA, 19 nt, Artificial Sequence
  Description of Artificial Sequence: Synthetic oligonucleotide
  Antisense strand to SEQ ID NO: 1996700
acuucuacauaagggucac

SEQ ID NO: 1996702 - RNA, 19 nt, Artificial Sequence
  Description of Artificial Sequence: Synthetic oligonucleotide
  Sense strand starting at position 2795 of SEQ ID NO: 1880825
ugcuuugcauuucugauau

SEQ ID NO: 1996703 - RNA, 19 nt, Artificial Sequence
  Description of Artificial Sequence: Synthetic oligonucleotide
  Antisense strand to SEQ ID NO: 1996702
auaucagaaaugcaaagca

SEQ ID NO: 1996704 - RNA, 19 nt, Artificial Sequence
  Description of Artificial Sequence: Synthetic oligonucleotide
  Sense strand starting at position 2962 of SEQ ID NO: 1880825
gagugcuuacacuaaggcu

SEQ ID NO: 1996705 - RNA, 19 nt, Artificial Sequence
  Description of Artificial Sequence: Synthetic oligonucleotide
  Antisense strand to SEQ ID NO: 1996704
agccuuaguguaagcacuc

SEQ ID NO: 1996706 - RNA, 19 nt, Artificial Sequence
  Description of Artificial Sequence: Synthetic oligonucleotide
  Sense strand starting at position 3021 of SEQ ID NO: 1880825
gcuauaagauaguuccuca

SEQ ID NO: 1996707 - RNA, 19 nt, Artificial Sequence
  Description of Artificial Sequence: Synthetic oligonucleotide
  Antisense strand to SEQ ID NO: 1996706
ugaggaacuaucuuauagc

SEQ ID NO: 1996708 - RNA, 19 nt, Artificial Sequence
  Description of Artificial Sequence: Synthetic oligonucleotide
  Sense strand starting at position 3031 of SEQ ID NO: 1880825
aguuccucaccuuauagau

SEQ ID NO: 1996709 - RNA, 19 nt, Artificial Sequence
  Description of Artificial Sequence: Synthetic oligonucleotide
  Antisense strand to SEQ ID NO: 1996708
aucuauaaggugaggaacu

SEQ ID NO: 1996710 - RNA, 19 nt, Artificial Sequence
  Description of Artificial Sequence: Synthetic oligonucleotide
  Sense strand starting at position 3053 of SEQ ID NO: 1880825
gaaacagguuuagugaagu

SEQ ID NO: 1996711 - RNA, 19 nt, Artificial Sequence
  Description of Artificial Sequence: Synthetic oligonucleotide
  Antisense strand to SEQ ID NO: 1996710
acuucacuaaaccuguuuc

SEQ ID NO: 1996712 - RNA, 19 nt, Artificial Sequence
  Description of Artificial Sequence: Synthetic oligonucleotide
  Sense strand starting at position 3070 of SEQ ID NO: 1880825
gugacuugcaaguaagaca

SEQ ID NO: 1996713 - RNA, 19 nt, Artificial Sequence
  Description of Artificial Sequence: Synthetic oligonucleotide
  Antisense strand to SEQ ID NO: 1996712
ugucuuacuugcaagucac

SEQ ID NO: 1996714 - RNA, 19 nt, Artificial Sequence
  Description of Artificial Sequence: Synthetic oligonucleotide
  Sense strand starting at position 3115 of SEQ ID NO: 1880825
gccauucuucuauauugag

SEQ ID NO: 1996715 - RNA, 19 nt, Artificial Sequence
  Description of Artificial Sequence: Synthetic oligonucleotide
  Antisense strand to SEQ ID NO: 1996714
cucaauauagaagaauggc

SEQ ID NO: 1996716 - RNA, 19 nt, Artificial Sequence
  Description of Artificial Sequence: Synthetic oligonucleotide
  Sense strand starting at position 3127 of SEQ ID NO: 1880825
uauugagaucuguauguau

SEQ ID NO: 1996717 - RNA, 19 nt, Artificial Sequence
  Description of Artificial Sequence: Synthetic oligonucleotide
  Antisense strand to SEQ ID NO: 1996716
auacauacagaucucaaua

SEQ ID NO: 1996718 - RNA, 19 nt, Artificial Sequence
  Description of Artificial Sequence: Synthetic oligonucleotide
  Sense strand starting at position 3129 of SEQ ID NO: 1880825
uugagaucuguauguauac

SEQ ID NO: 1996719 - RNA, 19 nt, Artificial Sequence
  Description of Artificial Sequence: Synthetic oligonucleotide
  Antisense strand to SEQ ID NO: 1996718
guauacauacagaucucaa

SEQ ID NO: 1996720 - RNA, 19 nt, Artificial Sequence
  Description of Artificial Sequence: Synthetic oligonucleotide
  Sense strand starting at position 3130 of SEQ ID NO: 1880825
ugagaucuguauguauaca

SEQ ID NO: 1996721 - RNA, 19 nt, Artificial Sequence
  Description of Artificial Sequence: Synthetic oligonucleotide
  Antisense strand to SEQ ID NO: 1996720
uguauacauacagaucuca

SEQ ID NO: 1996722 - RNA, 19 nt, Artificial Sequence
  Description of Artificial Sequence: Synthetic oligonucleotide
  Sense strand starting at position 3220 of SEQ ID NO: 1880825
augccagucuuuguaauuu

SEQ ID NO: 1996723 - RNA, 19 nt, Artificial Sequence
  Description of Artificial Sequence: Synthetic oligonucleotide
  Antisense strand to SEQ ID NO: 1996722
aaauuacaaagacuggcau

SEQ ID NO: 1996724 - RNA, 19 nt, Artificial Sequence
  Description of Artificial Sequence: Synthetic oligonucleotide
  Sense strand starting at position 3314 of SEQ ID NO: 1880825
agaugcagauucucggaaa

SEQ ID NO: 1996725 - RNA, 19 nt, Artificial Sequence
  Description of Artificial Sequence: Synthetic oligonucleotide
  Antisense strand to SEQ ID NO: 1996724
uuuccgagaaucugcaucu

SEQ ID NO: 1996726 - RNA, 19 nt, Artificial Sequence
  Description of Artificial Sequence: Synthetic oligonucleotide
  Sense strand starting at position 3540 of SEQ ID NO: 1880825
gaugcagaugucuagggua

SEQ ID NO: 1996727 - RNA, 19 nt, Artificial Sequence
  Description of Artificial Sequence: Synthetic oligonucleotide
  Antisense strand to SEQ ID NO: 1996726
uacccuagacaucugcauc

SEQ ID NO: 1996728 - RNA, 19 nt, Artificial Sequence
  Description of Artificial Sequence: Synthetic oligonucleotide
  Sense strand starting at position 3552 of SEQ ID NO: 1880825
uaggguagucucuacccua

SEQ ID NO: 1996729 - RNA, 19 nt, Artificial Sequence
  Description of Artificial Sequence: Synthetic oligonucleotide
  Antisense strand to SEQ ID NO: 1996728
uaggguagagacuacccua

SEQ ID NO: 1996730 - RNA, 19 nt, Artificial Sequence
  Description of Artificial Sequence: Synthetic oligonucleotide
  Sense strand starting at position 241 of SEQ ID NO: 1880826
guggaugaugcugaaaguu

SEQ ID NO: 1996731 - RNA, 19 nt, Artificial Sequence
  Description of Artificial Sequence: Synthetic oligonucleotide
  Antisense strand to SEQ ID NO: 1996730
aacuuucagcaucauccac

SEQ ID NO: 1996732 - RNA, 19 nt, Artificial Sequence
  Description of Artificial Sequence: Synthetic oligonucleotide
  Sense strand starting at position 291 of SEQ ID NO: 1880826
cagcaucauccugaggcua

SEQ ID NO: 1996733 - RNA, 19 nt, Artificial Sequence
  Description of Artificial Sequence: Synthetic oligonucleotide
  Antisense strand to SEQ ID NO: 1996732
uagccucaggaugaugcug

SEQ ID NO: 1996734 - RNA, 19 nt, Artificial Sequence
  Description of Artificial Sequence: Synthetic oligonucleotide
  Sense strand starting at position 377 of SEQ ID NO: 1880826
gacaccuuauggguaacaa

SEQ ID NO: 1996735 - RNA, 19 nt, Artificial Sequence
  Description of Artificial Sequence: Synthetic oligonucleotide
  Antisense strand to SEQ ID NO: 1996734
uuguuacccauaagguguc

SEQ ID NO: 1996736 - RNA, 19 nt, Artificial Sequence
  Description of Artificial Sequence: Synthetic oligonucleotide
  Sense strand starting at position 502 of SEQ ID NO: 1880826
gcaauuccugagggugaau

SEQ ID NO: 1996737 - RNA, 19 nt, Artificial Sequence
  Description of Artificial Sequence: Synthetic oligonucleotide
  Antisense strand to SEQ ID NO: 1996736
auucacccucaggaauugc

SEQ ID NO: 1996738 - RNA, 19 nt, Artificial Sequence
  Description of Artificial Sequence: Synthetic oligonucleotide
  Sense strand starting at position 900 of SEQ ID NO: 1880826
uaggaaguaucugucaacu

SEQ ID NO: 1996739 - RNA, 19 nt, Artificial Sequence
  Description of Artificial Sequence: Synthetic oligonucleotide
  Antisense strand to SEQ ID NO: 1996738
aguugacagauacuuccua

SEQ ID NO: 1996740 - RNA, 19 nt, Artificial Sequence
  Description of Artificial Sequence: Synthetic oligonucleotide
  Sense strand starting at position 908 of SEQ ID NO: 1880826
aucugucaacugggugaga

SEQ ID NO: 1996741 - RNA, 19 nt, Artificial Sequence
  Description of Artificial Sequence: Synthetic oligonucleotide
  Antisense strand to SEQ ID NO: 1996740
ucucacccaguugacagau

SEQ ID NO: 1996742 - RNA, 19 nt, Artificial Sequence
  Description of Artificial Sequence: Synthetic oligonucleotide
  Sense strand starting at position 909 of SEQ ID NO: 1880826
ucugucaacugggugagaa

SEQ ID NO: 1996743 - RNA, 19 nt, Artificial Sequence
  Description of Artificial Sequence: Synthetic oligonucleotide
  Antisense strand to SEQ ID NO: 1996742
uucucacccaguugacaga

SEQ ID NO: 1996744 - RNA, 19 nt, Artificial Sequence
  Description of Artificial Sequence: Synthetic oligonucleotide
  Sense strand starting at position 910 of SEQ ID NO: 1880826
cugucaacugggugagaau

SEQ ID NO: 1996745 - RNA, 19 nt, Artificial Sequence
  Description of Artificial Sequence: Synthetic oligonucleotide
  Antisense strand to SEQ ID NO: 1996744
auucucacccaguugacag

SEQ ID NO: 1996746 - RNA, 19 nt, Artificial Sequence
  Description of Artificial Sequence: Synthetic oligonucleotide
  Sense strand starting at position 911 of SEQ ID NO: 1880826
ugucaacugggugagaauu

SEQ ID NO: 1996747 - RNA, 19 nt, Artificial Sequence
  Description of Artificial Sequence: Synthetic oligonucleotide
  Antisense strand to SEQ ID NO: 1996746
aauucucacccaguugaca

SEQ ID NO: 1996748 - RNA, 19 nt, Artificial Sequence
  Description of Artificial Sequence: Synthetic oligonucleotide
  Sense strand starting at position 937 of SEQ ID NO: 1880826
aguaguuuaccucacccua

SEQ ID NO: 1996749 - RNA, 19 nt, Artificial Sequence
  Description of Artificial Sequence: Synthetic oligonucleotide
  Antisense strand to SEQ ID NO: 1996748
uagggugagguaaacuacu

SEQ ID NO: 1996750 - RNA, 19 nt, Artificial Sequence
  Description of Artificial Sequence: Synthetic oligonucleotide
  Sense strand starting at position 976 of SEQ ID NO: 1880826
cugaaagcagcuuaguaaa

SEQ ID NO: 1996751 - RNA, 19 nt, Artificial Sequence
  Description of Artificial Sequence: Synthetic oligonucleotide
  Antisense strand to SEQ ID NO: 1996750
uuuacuaagcugcuuucag

SEQ ID NO: 1996752 - RNA, 19 nt, Artificial Sequence
  Description of Artificial Sequence: Synthetic oligonucleotide
  Sense strand starting at position 1067 of SEQ ID NO: 1880826
gcagaucugccucagaauu

SEQ ID NO: 1996753 - RNA, 19 nt, Artificial Sequence
  Description of Artificial Sequence: Synthetic oligonucleotide
  Antisense strand to SEQ ID NO: 1996752
aauucugaggcagaucugc

SEQ ID NO: 1996754 - RNA, 19 nt, Artificial Sequence
  Description of Artificial Sequence: Synthetic oligonucleotide
  Sense strand starting at position 1096 of SEQ ID NO: 1880826
ccuagauuagauuguaucu

SEQ ID NO: 1996755 - RNA, 19 nt, Artificial Sequence
  Description of Artificial Sequence: Synthetic oligonucleotide
  Antisense strand to SEQ ID NO: 1996754
agauacaaucuaaucuagg

SEQ ID NO: 1996756 - RNA, 19 nt, Artificial Sequence
  Description of Artificial Sequence: Synthetic oligonucleotide
  Sense strand starting at position 1101 of SEQ ID NO: 1880826
auuagauuguaucuaccga

SEQ ID NO: 1996757 - RNA, 19 nt, Artificial Sequence
  Description of Artificial Sequence: Synthetic oligonucleotide
  Antisense strand to SEQ ID NO: 1996756
ucgguagauacaaucuaau

SEQ ID NO: 1996758 - RNA, 19 nt, Artificial Sequence
  Description of Artificial Sequence: Synthetic oligonucleotide
  Sense strand starting at position 1138 of SEQ ID NO: 1880826
ggaaaugugauauguacau

SEQ ID NO: 1996759 - RNA, 19 nt, Artificial Sequence
  Description of Artificial Sequence: Synthetic oligonucleotide
  Antisense strand to SEQ ID NO: 1996758
auguacauaucacauuucc

SEQ ID NO: 1996760 - RNA, 19 nt, Artificial Sequence
  Description of Artificial Sequence: Synthetic oligonucleotide
  Sense strand starting at position 1175 of SEQ ID NO: 1880826
aaugucucgcuuuagaaca

SEQ ID NO: 1996761 - RNA, 19 nt, Artificial Sequence
  Description of Artificial Sequence: Synthetic oligonucleotide
  Antisense strand to SEQ ID NO: 1996760
uguucuaaagcgagacauu

SEQ ID NO: 1996762 - RNA, 19 nt, Artificial Sequence
  Description of Artificial Sequence: Synthetic oligonucleotide
  Sense strand starting at position 2058 of SEQ ID NO: 1880826
uggccuguuggauauguaa

SEQ ID NO: 1996763 - RNA, 19 nt, Artificial Sequence
  Description of Artificial Sequence: Synthetic oligonucleotide
  Antisense strand to SEQ ID NO: 1996762
uuacauauccaacaggcca

SEQ ID NO: 1996764 - RNA, 19 nt, Artificial Sequence
  Description of Artificial Sequence: Synthetic oligonucleotide
  Sense strand starting at position 2061 of SEQ ID NO: 1880826
ccuguuggauauguaaauu

SEQ ID NO: 1996765 - RNA, 19 nt, Artificial Sequence
  Description of Artificial Sequence: Synthetic oligonucleotide
  Antisense strand to SEQ ID NO: 1996764
aauuuacauauccaacagg

SEQ ID NO: 1996766 - RNA, 19 nt, Artificial Sequence
  Description of Artificial Sequence: Synthetic oligonucleotide
  Sense strand starting at position 2146 of SEQ ID NO: 1880826
uguucuauuccagacacua

SEQ ID NO: 1996767 - RNA, 19 nt, Artificial Sequence
  Description of Artificial Sequence: Synthetic oligonucleotide
  Antisense strand to SEQ ID NO: 1996766
uagugucuggaauagaaca

SEQ ID NO: 1996768 - RNA, 19 nt, Artificial Sequence
  Description of Artificial Sequence: Synthetic oligonucleotide
  Sense strand starting at position 2295 of SEQ ID NO: 1880826
acagauggguuuccuggua

SEQ ID NO: 1996769 - RNA, 19 nt, Artificial Sequence
  Description of Artificial Sequence: Synthetic oligonucleotide
  Antisense strand to SEQ ID NO: 1996768
uaccaggaaacccaucugu

SEQ ID NO: 1996770 - RNA, 19 nt, Artificial Sequence
  Description of Artificial Sequence: Synthetic oligonucleotide
  Sense strand starting at position 2403 of SEQ ID NO: 1880826
ugguuucuucuagaccaca

SEQ ID NO: 1996771 - RNA, 19 nt, Artificial Sequence
  Description of Artificial Sequence: Synthetic oligonucleotide
  Antisense strand to SEQ ID NO: 1996770
uguggucuagaagaaacca

SEQ ID NO: 1996772 - RNA, 19 nt, Artificial Sequence
  Description of Artificial Sequence: Synthetic oligonucleotide
  Sense strand starting at position 2420 of SEQ ID NO: 1880826
caggaugcauuccugagaa

SEQ ID NO: 1996773 - RNA, 19 nt, Artificial Sequence
  Description of Artificial Sequence: Synthetic oligonucleotide
  Antisense strand to SEQ ID NO: 1996772
uucucaggaaugcauccug

SEQ ID NO: 1996774 - RNA, 19 nt, Artificial Sequence
  Description of Artificial Sequence: Synthetic oligonucleotide
  Sense strand starting at position 2490 of SEQ ID NO: 1880826
gccaaugagcuuuacaucu

SEQ ID NO: 1996775 - RNA, 19 nt, Artificial Sequence
  Description of Artificial Sequence: Synthetic oligonucleotide
  Antisense strand to SEQ ID NO: 1996774
agauguaaagcucauuggc

SEQ ID NO: 1996776 - RNA, 19 nt, Artificial Sequence
  Description of Artificial Sequence: Synthetic oligonucleotide
  Sense strand starting at position 2545 of SEQ ID NO: 1880826
gaguauacacugcagaguu

SEQ ID NO: 1996777 - RNA, 19 nt, Artificial Sequence
  Description of Artificial Sequence: Synthetic oligonucleotide
  Antisense strand to SEQ ID NO: 1996776
aacucugcaguguauacuc

SEQ ID NO: 1996778 - RNA, 19 nt, Artificial Sequence
  Description of Artificial Sequence: Synthetic oligonucleotide
  Sense strand starting at position 2672 of SEQ ID NO: 1880826
augauuguuaugggauuaa

SEQ ID NO: 1996779 - RNA, 19 nt, Artificial Sequence
  Description of Artificial Sequence: Synthetic oligonucleotide
  Antisense strand to SEQ ID NO: 1996778
uuaaucccauaacaaucau

SEQ ID NO: 1996780 - RNA, 19 nt, Artificial Sequence
  Description of Artificial Sequence: Synthetic oligonucleotide
  Sense strand starting at position 2676 of SEQ ID NO: 1880826
uuguuaugggauuaacugu

SEQ ID NO: 1996781 - RNA, 19 nt, Artificial Sequence
  Description of Artificial Sequence: Synthetic oligonucleotide
  Antisense strand to SEQ ID NO: 1996780
acaguuaaucccauaacaa

SEQ ID NO: 1996782 - RNA, 19 nt, Artificial Sequence
  Description of Artificial Sequence: Synthetic oligonucleotide
  Sense strand starting at position 2694 of SEQ ID NO: 1880826
uuaauauaugccggcauuu

SEQ ID NO: 1996783 - RNA, 19 nt, Artificial Sequence
  Description of Artificial Sequence: Synthetic oligonucleotide
  Antisense strand to SEQ ID NO: 1996782
aaaugccggcauauauuaa

SEQ ID NO: 1996784 - RNA, 19 nt, Artificial Sequence
  Description of Artificial Sequence: Synthetic oligonucleotide
  Sense strand starting at position 2758 of SEQ ID NO: 1880826
cuauuauuaugacuacagu

SEQ ID NO: 1996785 - RNA, 19 nt, Artificial Sequence
  Description of Artificial Sequence: Synthetic oligonucleotide
  Antisense strand to SEQ ID NO: 1996784
acuguagucauaauaauag

SEQ ID NO: 1996786 - RNA, 19 nt, Artificial Sequence
  Description of Artificial Sequence: Synthetic oligonucleotide
  Sense strand starting at position 3079 of SEQ ID NO: 1880826
gggucaugaucuccauaga

SEQ ID NO: 1996787 - RNA, 19 nt, Artificial Sequence
  Description of Artificial Sequence: Synthetic oligonucleotide
  Antisense strand to SEQ ID NO: 1996786
ucuauggagaucaugaccc

SEQ ID NO: 1996788 - RNA, 19 nt, Artificial Sequence
  Description of Artificial Sequence: Synthetic oligonucleotide
  Sense strand starting at position 3082 of SEQ ID NO: 1880826
ucaugaucuccauagaguu

SEQ ID NO: 1996789 - RNA, 19 nt, Artificial Sequence
  Description of Artificial Sequence: Synthetic oligonucleotide
  Antisense strand to SEQ ID NO: 1996788
aacucuauggagaucauga

SEQ ID NO: 1996790 - RNA, 19 nt, Artificial Sequence
  Description of Artificial Sequence: Synthetic oligonucleotide
  Sense strand starting at position 3127 of SEQ ID NO: 1880826
ccaauucuagagugacuga

SEQ ID NO: 1996791 - RNA, 19 nt, Artificial Sequence
  Description of Artificial Sequence: Synthetic oligonucleotide
  Antisense strand to SEQ ID NO: 1996790
ucagucacucuagaauugg

SEQ ID NO: 1996792 - RNA, 19 nt, Artificial Sequence
  Description of Artificial Sequence: Synthetic oligonucleotide
  Sense strand starting at position 3130 of SEQ ID NO: 1880826
auucuagagugacugauua

SEQ ID NO: 1996793 - RNA, 19 nt, Artificial Sequence
  Description of Artificial Sequence: Synthetic oligonucleotide
  Antisense strand to SEQ ID NO: 1996792
uaaucagucacucuagaau

SEQ ID NO: 1996794 - RNA, 19 nt, Artificial Sequence
  Description of Artificial Sequence: Synthetic oligonucleotide
  Sense strand starting at position 3134 of SEQ ID NO: 1880826
uagagugacugauuaauca

SEQ ID NO: 1996795 - RNA, 19 nt, Artificial Sequence
  Description of Artificial Sequence: Synthetic oligonucleotide
  Antisense strand to SEQ ID NO: 1996794
ugauuaaucagucacucua

SEQ ID NO: 1996796 - RNA, 19 nt, Artificial Sequence
  Description of Artificial Sequence: Synthetic oligonucleotide
  Sense strand starting at position 3319 of SEQ ID NO: 1880826
uuugguugagacugaccaa

SEQ ID NO: 1996797 - RNA, 19 nt, Artificial Sequence
  Description of Artificial Sequence: Synthetic oligonucleotide
  Antisense strand to SEQ ID NO: 1996796
uuggucagucucaaccaaa

SEQ ID NO: 1996798 - RNA, 19 nt, Artificial Sequence
  Description of Artificial Sequence: Synthetic oligonucleotide
  Sense strand starting at position 3322 of SEQ ID NO: 1880826
gguugagacugaccaaacu

SEQ ID NO: 1996799 - RNA, 19 nt, Artificial Sequence
  Description of Artificial Sequence: Synthetic oligonucleotide
  Antisense strand to SEQ ID NO: 1996798
aguuuggucagucucaacc

SEQ ID NO: 1996800 - RNA, 19 nt, Artificial Sequence
  Description of Artificial Sequence: Synthetic oligonucleotide
  Sense strand starting at position 3438 of SEQ ID NO: 1880826
gccagugagacugauauau

SEQ ID NO: 1996801 - RNA, 19 nt, Artificial Sequence
  Description of Artificial Sequence: Synthetic oligonucleotide
  Antisense strand to SEQ ID NO: 1996800
auauaucagucucacuggc

SEQ ID NO: 1996802 - RNA, 19 nt, Artificial Sequence
  Description of Artificial Sequence: Synthetic oligonucleotide
  Sense strand starting at position 3459 of SEQ ID NO: 1880826
gggccaugguaagcagaaa

SEQ ID NO: 1996803 - RNA, 19 nt, Artificial Sequence
  Description of Artificial Sequence: Synthetic oligonucleotide
  Antisense strand to SEQ ID NO: 1996802
uuucugcuuaccauggccc

SEQ ID NO: 1996804 - RNA, 19 nt, Artificial Sequence
  Description of Artificial Sequence: Synthetic oligonucleotide
  Sense strand starting at position 3647 of SEQ ID NO: 1880826
guaagucuugcuuaaagac

SEQ ID NO: 1996805 - RNA, 19 nt, Artificial Sequence
  Description of Artificial Sequence: Synthetic oligonucleotide
  Antisense strand to SEQ ID NO: 1996804
gucuuuaagcaagacuuac

SEQ ID NO: 1996806 - RNA, 19 nt, Artificial Sequence
  Description of Artificial Sequence: Synthetic oligonucleotide
  Sense strand starting at position 3674 of SEQ ID NO: 1880826
ccuacugugugaccaauaa

SEQ ID NO: 1996807 - RNA, 19 nt, Artificial Sequence
  Description of Artificial Sequence: Synthetic oligonucleotide
  Antisense strand to SEQ ID NO: 1996806
uuauuggucacacaguagg

SEQ ID NO: 1996808 - RNA, 19 nt, Artificial Sequence
  Description of Artificial Sequence: Synthetic oligonucleotide
  Sense strand starting at position 3971 of SEQ ID NO: 1880826
uuugauacuugguuuacau

SEQ ID NO: 1996809 - RNA, 19 nt, Artificial Sequence
  Description of Artificial Sequence: Synthetic oligonucleotide
  Antisense strand to SEQ ID NO: 1996808
auguaaaccaaguaucaaa

SEQ ID NO: 1996810 - RNA, 19 nt, Artificial Sequence
  Description of Artificial Sequence: Synthetic oligonucleotide
  Sense strand starting at position 186 of SEQ ID NO: 1880827
agaggucauccguaaacau

SEQ ID NO: 1996811 - RNA, 19 nt, Artificial Sequence
  Description of Artificial Sequence: Synthetic oligonucleotide
  Antisense strand to SEQ ID NO: 1996810
auguuuacggaugaccucu

SEQ ID NO: 1996812 - RNA, 19 nt, Artificial Sequence
  Description of Artificial Sequence: Synthetic oligonucleotide
  Sense strand starting at position 373 of SEQ ID NO: 1880827
ccuaauaucccagguggua

SEQ ID NO: 1996813 - RNA, 19 nt, Artificial Sequence
  Description of Artificial Sequence: Synthetic oligonucleotide
  Antisense strand to SEQ ID NO: 1996812
uaccaccugggauauuagg

SEQ ID NO: 1996814 - RNA, 19 nt, Artificial Sequence
  Description of Artificial Sequence: Synthetic oligonucleotide
  Sense strand starting at position 392 of SEQ ID NO: 1880827
accuaagagcauuaugcua

SEQ ID NO: 1996815 - RNA, 19 nt, Artificial Sequence
  Description of Artificial Sequence: Synthetic oligonucleotide
  Antisense strand to SEQ ID NO: 1996814
uagcauaaugcucuuaggu

SEQ ID NO: 1996816 - RNA, 19 nt, Artificial Sequence
  Description of Artificial Sequence: Synthetic oligonucleotide
  Sense strand starting at position 523 of SEQ ID NO: 1880827
gcaugacuucugcaugugu

SEQ ID NO: 1996817 - RNA, 19 nt, Artificial Sequence
  Description of Artificial Sequence: Synthetic oligonucleotide
  Antisense strand to SEQ ID NO: 1996816
acacaugcagaagucaugc

SEQ ID NO: 1996818 - RNA, 19 nt, Artificial Sequence
  Description of Artificial Sequence: Synthetic oligonucleotide
  Sense strand starting at position 580 of SEQ ID NO: 1880827
gucguaggcucucugaaag

SEQ ID NO: 1996819 - RNA, 19 nt, Artificial Sequence
  Description of Artificial Sequence: Synthetic oligonucleotide
  Antisense strand to SEQ ID NO: 1996818
cuuucagagagccuacgac

SEQ ID NO: 1996820 - RNA, 19 nt, Artificial Sequence
  Description of Artificial Sequence: Synthetic oligonucleotide
  Sense strand starting at position 701 of SEQ ID NO: 1880827
ucacuaagauaggugcaua

SEQ ID NO: 1996821 - RNA, 19 nt, Artificial Sequence
  Description of Artificial Sequence: Synthetic oligonucleotide
  Antisense strand to SEQ ID NO: 1996820
uaugcaccuaucuuaguga

SEQ ID NO: 1996822 - RNA, 19 nt, Artificial Sequence
  Description of Artificial Sequence: Synthetic oligonucleotide
  Sense strand starting at position 704 of SEQ ID NO: 1880827
cuaagauaggugcauaucu

SEQ ID NO: 1996823 - RNA, 19 nt, Artificial Sequence
  Description of Artificial Sequence: Synthetic oligonucleotide
  Antisense strand to SEQ ID NO: 1996822
agauaugcaccuaucuuag

SEQ ID NO: 1996824 - RNA, 19 nt, Artificial Sequence
  Description of Artificial Sequence: Synthetic oligonucleotide
  Sense strand starting at position 953 of SEQ ID NO: 1880827
gggugcacgucuuucuaaa

SEQ ID NO: 1996825 - RNA, 19 nt, Artificial Sequence
  Description of Artificial Sequence: Synthetic oligonucleotide
  Antisense strand to SEQ ID NO: 1996824
uuuagaaagacgugcaccc

SEQ ID NO: 1996826 - RNA, 19 nt, Artificial Sequence
  Description of Artificial Sequence: Synthetic oligonucleotide
  Sense strand starting at position 1095 of SEQ ID NO: 1880827
uucguuacagccucgugaa

SEQ ID NO: 1996827 - RNA, 19 nt, Artificial Sequence
  Description of Artificial Sequence: Synthetic oligonucleotide
  Antisense strand to SEQ ID NO: 1996826
uucacgaggcuguaacgaa

SEQ ID NO: 1996828 - RNA, 19 nt, Artificial Sequence
  Description of Artificial Sequence: Synthetic oligonucleotide
  Sense strand starting at position 1250 of SEQ ID NO: 1880827
ugcucacugagauagguua

SEQ ID NO: 1996829 - RNA, 19 nt, Artificial Sequence
  Description of Artificial Sequence: Synthetic oligonucleotide
  Antisense strand to SEQ ID NO: 1996828
uaaccuaucucagugagca

SEQ ID NO: 1996830 - RNA, 19 nt, Artificial Sequence
  Description of Artificial Sequence: Synthetic oligonucleotide
  Sense strand starting at position 1287 of SEQ ID NO: 1880827
ugcggaggcuauucagaaa

SEQ ID NO: 1996831 - RNA, 19 nt, Artificial Sequence
  Description of Artificial Sequence: Synthetic oligonucleotide
  Antisense strand to SEQ ID NO: 1996830
uuucugaauagccuccgca

SEQ ID NO: 1996832 - RNA, 19 nt, Artificial Sequence
  Description of Artificial Sequence: Synthetic oligonucleotide
  Sense strand starting at position 1558 of SEQ ID NO: 1880827
gucucacauauucgagguu

SEQ ID NO: 1996833 - RNA, 19 nt, Artificial Sequence
  Description of Artificial Sequence: Synthetic oligonucleotide
  Antisense strand to SEQ ID NO: 1996832
aaccucgaauaugugagac

SEQ ID NO: 1996834 - RNA, 19 nt, Artificial Sequence
  Description of Artificial Sequence: Synthetic oligonucleotide
  Sense strand starting at position 1765 of SEQ ID NO: 1880827
ccggguuccucuccugauu

SEQ ID NO: 1996835 - RNA, 19 nt, Artificial Sequence
  Description of Artificial Sequence: Synthetic oligonucleotide
  Antisense strand to SEQ ID NO: 1996834
aaucaggagaggaacccgg

SEQ ID NO: 1996836 - RNA, 19 nt, Artificial Sequence
  Description of Artificial Sequence: Synthetic oligonucleotide
  Sense strand starting at position 1777 of SEQ ID NO: 1880827
ccugauuccugcucaguua

SEQ ID NO: 1996837 - RNA, 19 nt, Artificial Sequence
  Description of Artificial Sequence: Synthetic oligonucleotide
  Antisense strand to SEQ ID NO: 1996836
uaacugagcaggaaucagg

SEQ ID NO: 1996838 - RNA, 19 nt, Artificial Sequence
  Description of Artificial Sequence: Synthetic oligonucleotide
  Sense strand starting at position 1778 of SEQ ID NO: 1880827
cugauuccugcucaguuaa

SEQ ID NO: 1996839 - RNA, 19 nt, Artificial Sequence
  Description of Artificial Sequence: Synthetic oligonucleotide
  Antisense strand to SEQ ID NO: 1996838
uuaacugagcaggaaucag

SEQ ID NO: 1996840 - RNA, 19 nt, Artificial Sequence
  Description of Artificial Sequence: Synthetic oligonucleotide
  Sense strand starting at position 2922 of SEQ ID NO: 1880827
acaguagacucugcuauca

SEQ ID NO: 1996841 - RNA, 19 nt, Artificial Sequence
  Description of Artificial Sequence: Synthetic oligonucleotide
  Antisense strand to SEQ ID NO: 1996840
ugauagcagagucuacugu

SEQ ID NO: 1996842 - RNA, 19 nt, Artificial Sequence
  Description of Artificial Sequence: Synthetic oligonucleotide
  Sense strand starting at position 2935 of SEQ ID NO: 1880827
cuaucauugugucuuccau

SEQ ID NO: 1996843 - RNA, 19 nt, Artificial Sequence
  Description of Artificial Sequence: Synthetic oligonucleotide
  Antisense strand to SEQ ID NO: 1996842
auggaagacacaaugauag

SEQ ID NO: 1996844 - RNA, 19 nt, Artificial Sequence
  Description of Artificial Sequence: Synthetic oligonucleotide
  Sense strand starting at position 2971 of SEQ ID NO: 1880827
aggucugcucauggugaau

SEQ ID NO: 1996845 - RNA, 19 nt, Artificial Sequence
  Description of Artificial Sequence: Synthetic oligonucleotide
  Antisense strand to SEQ ID NO: 1996844
auucaccaugagcagaccu

SEQ ID NO: 1996846 - RNA, 19 nt, Artificial Sequence
  Description of Artificial Sequence: Synthetic oligonucleotide
  Sense strand starting at position 3060 of SEQ ID NO: 1880827
ucuggacugugguuacauu

SEQ ID NO: 1996847 - RNA, 19 nt, Artificial Sequence
  Description of Artificial Sequence: Synthetic oligonucleotide
  Antisense strand to SEQ ID NO: 1996846
aauguaaccacaguccaga

SEQ ID NO: 1996848 - RNA, 19 nt, Artificial Sequence
  Description of Artificial Sequence: Synthetic oligonucleotide
  Sense strand starting at position 3068 of SEQ ID NO: 1880827
gugguuacauucucaggaa

SEQ ID NO: 1996849 - RNA, 19 nt, Artificial Sequence
  Description of Artificial Sequence: Synthetic oligonucleotide
  Antisense strand to SEQ ID NO: 1996848
uuccugagaauguaaccac

SEQ ID NO: 1996850 - RNA, 19 nt, Artificial Sequence
  Description of Artificial Sequence: Synthetic oligonucleotide
  Sense strand starting at position 3080 of SEQ ID NO: 1880827
ucaggaaugucugcaaagu

SEQ ID NO: 1996851 - RNA, 19 nt, Artificial Sequence
  Description of Artificial Sequence: Synthetic oligonucleotide
  Antisense strand to SEQ ID NO: 1996850
acuuugcagacauuccuga

SEQ ID NO: 1996852 - RNA, 19 nt, Artificial Sequence
  Description of Artificial Sequence: Synthetic oligonucleotide
  Sense strand starting at position 3081 of SEQ ID NO: 1880827
caggaaugucugcaaaguc

SEQ ID NO: 1996853 - RNA, 19 nt, Artificial Sequence
  Description of Artificial Sequence: Synthetic oligonucleotide
  Antisense strand to SEQ ID NO: 1996852
gacuuugcagacauuccug

SEQ ID NO: 1996854 - RNA, 19 nt, Artificial Sequence
  Description of Artificial Sequence: Synthetic oligonucleotide
  Sense strand starting at position 3089 of SEQ ID NO: 1880827
ucugcaaagucauauuuag

SEQ ID NO: 1996855 - RNA, 19 nt, Artificial Sequence
  Description of Artificial Sequence: Synthetic oligonucleotide
  Antisense strand to SEQ ID NO: 1996854
cuaaauaugacuuugcaga

SEQ ID NO: 1996856 - RNA, 19 nt, Artificial Sequence
  Description of Artificial Sequence: Synthetic oligonucleotide
  Sense strand starting at position 3100 of SEQ ID NO: 1880827
auauuuaggugugaggaga

SEQ ID NO: 1996857 - RNA, 19 nt, Artificial Sequence
  Description of Artificial Sequence: Synthetic oligonucleotide
  Antisense strand to SEQ ID NO: 1996856
ucuccucacaccuaaauau

SEQ ID NO: 1996858 - RNA, 19 nt, Artificial Sequence
  Description of Artificial Sequence: Synthetic oligonucleotide
  Sense strand starting at position 3217 of SEQ ID NO: 1880827
gugcgcaggacuuaacuau

SEQ ID NO: 1996859 - RNA, 19 nt, Artificial Sequence
  Description of Artificial Sequence: Synthetic oligonucleotide
  Antisense strand to SEQ ID NO: 1996858
auaguuaaguccugcgcac

SEQ ID NO: 1996860 - RNA, 19 nt, Artificial Sequence
  Description of Artificial Sequence: Synthetic oligonucleotide
  Sense strand starting at position 3344 of SEQ ID NO: 1880827
ggagguacagcuggagauu

SEQ ID NO: 1996861 - RNA, 19 nt, Artificial Sequence
  Description of Artificial Sequence: Synthetic oligonucleotide
  Antisense strand to SEQ ID NO: 1996860
aaucuccagcuguaccucc

SEQ ID NO: 1996862 - RNA, 19 nt, Artificial Sequence
  Description of Artificial Sequence: Synthetic oligonucleotide
  Sense strand starting at position 3371 of SEQ ID NO: 1880827
gggacuuaucucugacaac

SEQ ID NO: 1996863 - RNA, 19 nt, Artificial Sequence
  Description of Artificial Sequence: Synthetic oligonucleotide
  Antisense strand to SEQ ID NO: 1996862
guugucagagauaaguccc

SEQ ID NO: 1996864 - RNA, 19 nt, Artificial Sequence
  Description of Artificial Sequence: Synthetic oligonucleotide
  Sense strand starting at position 3372 of SEQ ID NO: 1880827
ggacuuaucucugacaaca

SEQ ID NO: 1996865 - RNA, 19 nt, Artificial Sequence
  Description of Artificial Sequence: Synthetic oligonucleotide
  Antisense strand to SEQ ID NO: 1996864
uguugucagagauaagucc

SEQ ID NO: 1996866 - RNA, 19 nt, Artificial Sequence
  Description of Artificial Sequence: Synthetic oligonucleotide
  Sense strand starting at position 3394 of SEQ ID NO: 1880827
ucuuguugaucuucccaga

SEQ ID NO: 1996867 - RNA, 19 nt, Artificial Sequence
  Description of Artificial Sequence: Synthetic oligonucleotide
  Antisense strand to SEQ ID NO: 1996866
ucugggaagaucaacaaga

SEQ ID NO: 1996868 - RNA, 19 nt, Artificial Sequence
  Description of Artificial Sequence: Synthetic oligonucleotide
  Sense strand starting at position 3565 of SEQ ID NO: 1880827
ggcaaauccaaguauguug

SEQ ID NO: 1996869 - RNA, 19 nt, Artificial Sequence
  Description of Artificial Sequence: Synthetic oligonucleotide
  Antisense strand to SEQ ID NO: 1996868
caacauacuuggauuugcc

SEQ ID NO: 1996870 - RNA, 19 nt, Artificial Sequence
  Description of Artificial Sequence: Synthetic oligonucleotide
  Sense strand starting at position 3793 of SEQ ID NO: 1880827
uccucugagcccugagaga

SEQ ID NO: 1996871 - RNA, 19 nt, Artificial Sequence
  Description of Artificial Sequence: Synthetic oligonucleotide
  Antisense strand to SEQ ID NO: 1996870
ucucucagggcucagagga

SEQ ID NO: 1996872 - RNA, 19 nt, Artificial Sequence
  Description of Artificial Sequence: Synthetic oligonucleotide
  Sense strand starting at position 3827 of SEQ ID NO: 1880827
gaggacauuguaugugguu

SEQ ID NO: 1996873 - RNA, 19 nt, Artificial Sequence
  Description of Artificial Sequence: Synthetic oligonucleotide
  Antisense strand to SEQ ID NO: 1996872
aaccacauacaauguccuc

SEQ ID NO: 1996874 - RNA, 19 nt, Artificial Sequence
  Description of Artificial Sequence: Synthetic oligonucleotide
  Sense strand starting at position 3896 of SEQ ID NO: 1880827
ugacuaugccaccgugaca

SEQ ID NO: 1996875 - RNA, 19 nt, Artificial Sequence
  Description of Artificial Sequence: Synthetic oligonucleotide
  Antisense strand to SEQ ID NO: 1996874
ugucacgguggcauaguca

SEQ ID NO: 1996876 - RNA, 19 nt, Artificial Sequence
  Description of Artificial Sequence: Synthetic oligonucleotide
  Sense strand starting at position 3907 of SEQ ID NO: 1880827
ccgugacagauuggguaaa

SEQ ID NO: 1996877 - RNA, 19 nt, Artificial Sequence
  Description of Artificial Sequence: Synthetic oligonucleotide
  Antisense strand to SEQ ID NO: 1996876
uuuacccaaucugucacgg

SEQ ID NO: 1996878 - RNA, 19 nt, Artificial Sequence
  Description of Artificial Sequence: Synthetic oligonucleotide
  Sense strand starting at position 3931 of SEQ ID NO: 1880827
uaaagaugcuuucuuggag

SEQ ID NO: 1996879 - RNA, 19 nt, Artificial Sequence
  Description of Artificial Sequence: Synthetic oligonucleotide
  Antisense strand to SEQ ID NO: 1996878
cuccaagaaagcaucuuua

SEQ ID NO: 1996880 - RNA, 19 nt, Artificial Sequence
  Description of Artificial Sequence: Synthetic oligonucleotide
  Sense strand starting at position 3934 of SEQ ID NO: 1880827
agaugcuuucuuggaggga

SEQ ID NO: 1996881 - RNA, 19 nt, Artificial Sequence
  Description of Artificial Sequence: Synthetic oligonucleotide
  Antisense strand to SEQ ID NO: 1996880
ucccuccaagaaagcaucu

SEQ ID NO: 1996882 - RNA, 19 nt, Artificial Sequence
  Description of Artificial Sequence: Synthetic oligonucleotide
  Sense strand starting at position 3947 of SEQ ID NO: 1880827
gagggacucucugaaauag

SEQ ID NO: 1996883 - RNA, 19 nt, Artificial Sequence
  Description of Artificial Sequence: Synthetic oligonucleotide
  Antisense strand to SEQ ID NO: 1996882
cuauuucagagagucccuc

SEQ ID NO: 1996884 - RNA, 19 nt, Artificial Sequence
  Description of Artificial Sequence: Synthetic oligonucleotide
  Sense strand starting at position 3972 of SEQ ID NO: 1880827
cuggguagaacugacgauu

SEQ ID NO: 1996885 - RNA, 19 nt, Artificial Sequence
  Description of Artificial Sequence: Synthetic oligonucleotide
  Antisense strand to SEQ ID NO: 1996884
aaucgucaguucuacccag

SEQ ID NO: 1996886 - RNA, 19 nt, Artificial Sequence
  Description of Artificial Sequence: Synthetic oligonucleotide
  Sense strand starting at position 3978 of SEQ ID NO: 1880827
agaacugacgauugacuau

SEQ ID NO: 1996887 - RNA, 19 nt, Artificial Sequence
  Description of Artificial Sequence: Synthetic oligonucleotide
  Antisense strand to SEQ ID NO: 1996886
auagucaaucgucaguucu

SEQ ID NO: 1996888 - RNA, 19 nt, Artificial Sequence
  Description of Artificial Sequence: Synthetic oligonucleotide
  Sense strand starting at position 3981 of SEQ ID NO: 1880827
acugacgauugacuauaau

SEQ ID NO: 1996889 - RNA, 19 nt, Artificial Sequence
  Description of Artificial Sequence: Synthetic oligonucleotide
  Antisense strand to SEQ ID NO: 1996888
auuauagucaaucgucagu

SEQ ID NO: 1996890 - RNA, 19 nt, Artificial Sequence
  Description of Artificial Sequence: Synthetic oligonucleotide
  Sense strand starting at position 27 of SEQ ID NO: 1880828
auauauaauuugggagaag

SEQ ID NO: 1996891 - RNA, 19 nt, Artificial Sequence
  Description of Artificial Sequence: Synthetic oligonucleotide
  Antisense strand to SEQ ID NO: 1996890
cuucucccaaauuauauau

SEQ ID NO: 1996892 - RNA, 19 nt, Artificial Sequence
  Description of Artificial Sequence: Synthetic oligonucleotide
  Sense strand starting at position 242 of SEQ ID NO: 1880828
uguacuuaaacguauggca

SEQ ID NO: 1996893 - RNA, 19 nt, Artificial Sequence
  Description of Artificial Sequence: Synthetic oligonucleotide
  Antisense strand to SEQ ID NO: 1996892
ugccauacguuuaaguaca

SEQ ID NO: 1996894 - RNA, 19 nt, Artificial Sequence
  Description of Artificial Sequence: Synthetic oligonucleotide
  Sense strand starting at position 264 of SEQ ID NO: 1880828
uuuggugcuuuauuuagua

SEQ ID NO: 1996895 - RNA, 19 nt, Artificial Sequence
  Description of Artificial Sequence: Synthetic oligonucleotide
  Antisense strand to SEQ ID NO: 1996894
uacuaaauaaagcaccaaa

SEQ ID NO: 1996896 - RNA, 19 nt, Artificial Sequence
  Description of Artificial Sequence: Synthetic oligonucleotide
  Sense strand starting at position 610 of SEQ ID NO: 1880828
ggcuguaaaggguacucua

SEQ ID NO: 1996897 - RNA, 19 nt, Artificial Sequence
  Description of Artificial Sequence: Synthetic oligonucleotide
  Antisense strand to SEQ ID NO: 1996896
uagaguacccuuuacagcc

SEQ ID NO: 1996898 - RNA, 19 nt, Artificial Sequence
  Description of Artificial Sequence: Synthetic oligonucleotide
  Sense strand starting at position 613 of SEQ ID NO: 1880828
uguaaaggguacucuacua

SEQ ID NO: 1996899 - RNA, 19 nt, Artificial Sequence
  Description of Artificial Sequence: Synthetic oligonucleotide
  Antisense strand to SEQ ID NO: 1996898
uaguagaguacccuuuaca

SEQ ID NO: 1996900 - RNA, 19 nt, Artificial Sequence
  Description of Artificial Sequence: Synthetic oligonucleotide
  Sense strand starting at position 712 of SEQ ID NO: 1880828
aaagauggauuuggauaaa

SEQ ID NO: 1996901 - RNA, 19 nt, Artificial Sequence
  Description of Artificial Sequence: Synthetic oligonucleotide
  Antisense strand to SEQ ID NO: 1996900
uuuauccaaauccaucuuu

SEQ ID NO: 1996902 - RNA, 19 nt, Artificial Sequence
  Description of Artificial Sequence: Synthetic oligonucleotide
  Sense strand starting at position 877 of SEQ ID NO: 1880828
ggguuagguggccagagua

SEQ ID NO: 1996903 - RNA, 19 nt, Artificial Sequence
  Description of Artificial Sequence: Synthetic oligonucleotide
  Antisense strand to SEQ ID NO: 1996902
uacucuggccaccuaaccc

SEQ ID NO: 1996904 - RNA, 19 nt, Artificial Sequence
  Description of Artificial Sequence: Synthetic oligonucleotide
  Sense strand starting at position 928 of SEQ ID NO: 1880828
agauuauaaacguggguua

SEQ ID NO: 1996905 - RNA, 19 nt, Artificial Sequence
  Description of Artificial Sequence: Synthetic oligonucleotide
  Antisense strand to SEQ ID NO: 1996904
uaacccacguuuauaaucu

SEQ ID NO: 1996906 - RNA, 19 nt, Artificial Sequence
  Description of Artificial Sequence: Synthetic oligonucleotide
  Sense strand starting at position 929 of SEQ ID NO: 1880828
gauuauaaacguggguuaa

SEQ ID NO: 1996907 - RNA, 19 nt, Artificial Sequence
  Description of Artificial Sequence: Synthetic oligonucleotide
  Antisense strand to SEQ ID NO: 1996906
uuaacccacguuuauaauc

SEQ ID NO: 1996908 - RNA, 19 nt, Artificial Sequence
  Description of Artificial Sequence: Synthetic oligonucleotide
  Sense strand starting at position 930 of SEQ ID NO: 1880828
auuauaaacguggguuaag

SEQ ID NO: 1996909 - RNA, 19 nt, Artificial Sequence
  Description of Artificial Sequence: Synthetic oligonucleotide
  Antisense strand to SEQ ID NO: 1996908
cuuaacccacguuuauaau

SEQ ID NO: 1996910 - RNA, 19 nt, Artificial Sequence
  Description of Artificial Sequence: Synthetic oligonucleotide
  Sense strand starting at position 942 of SEQ ID NO: 1880828
gguuaaguaccacaucaua

SEQ ID NO: 1996911 - RNA, 19 nt, Artificial Sequence
  Description of Artificial Sequence: Synthetic oligonucleotide
  Antisense strand to SEQ ID NO: 1996910
uaugaugugguacuuaacc

SEQ ID NO: 1996912 - RNA, 19 nt, Artificial Sequence
  Description of Artificial Sequence: Synthetic oligonucleotide
  Sense strand starting at position 996 of SEQ ID NO: 1880828
uuauuuaaaugccaagaga

SEQ ID NO: 1996913 - RNA, 19 nt, Artificial Sequence
  Description of Artificial Sequence: Synthetic oligonucleotide
  Antisense strand to SEQ ID NO: 1996912
ucucuuggcauuuaaauaa

SEQ ID NO: 1996914 - RNA, 19 nt, Artificial Sequence
  Description of Artificial Sequence: Synthetic oligonucleotide
  Sense strand starting at position 1016 of SEQ ID NO: 1880828
guaggauuacuucggauag

SEQ ID NO: 1996915 - RNA, 19 nt, Artificial Sequence
  Description of Artificial Sequence: Synthetic oligonucleotide
  Antisense strand to SEQ ID NO: 1996914
cuauccgaaguaauccuac

SEQ ID NO: 1996916 - RNA, 19 nt, Artificial Sequence
  Description of Artificial Sequence: Synthetic oligonucleotide
  Sense strand starting at position 1020 of SEQ ID NO: 1880828
gauuacuucggauagcuga

SEQ ID NO: 1996917 - RNA, 19 nt, Artificial Sequence
  Description of Artificial Sequence: Synthetic oligonucleotide
  Antisense strand to SEQ ID NO: 1996916
ucagcuauccgaaguaauc

SEQ ID NO: 1996918 - RNA, 19 nt, Artificial Sequence
  Description of Artificial Sequence: Synthetic oligonucleotide
  Sense strand starting at position 1082 of SEQ ID NO: 1880828
acgagaugugucgaggaaa

SEQ ID NO: 1996919 - RNA, 19 nt, Artificial Sequence
  Description of Artificial Sequence: Synthetic oligonucleotide
  Antisense strand to SEQ ID NO: 1996918
uuuccucgacacaucucgu

SEQ ID NO: 1996920 - RNA, 19 nt, Artificial Sequence
  Description of Artificial Sequence: Synthetic oligonucleotide
  Sense strand starting at position 1175 of SEQ ID NO: 1880828
aagcaagugguuugaacua

SEQ ID NO: 1996921 - RNA, 19 nt, Artificial Sequence
  Description of Artificial Sequence: Synthetic oligonucleotide
  Antisense strand to SEQ ID NO: 1996920
uaguucaaaccacuugcuu

SEQ ID NO: 1996922 - RNA, 19 nt, Artificial Sequence
  Description of Artificial Sequence: Synthetic oligonucleotide
  Sense strand starting at position 1244 of SEQ ID NO: 1880828
gcgucagauugaccaugga

SEQ ID NO: 1996923 - RNA, 19 nt, Artificial Sequence
  Description of Artificial Sequence: Synthetic oligonucleotide
  Antisense strand to SEQ ID NO: 1996922
uccauggucaaucugacgc

SEQ ID NO: 1996924 - RNA, 19 nt, Artificial Sequence
  Description of Artificial Sequence: Synthetic oligonucleotide
  Sense strand starting at position 1315 of SEQ ID NO: 1880828
uggucagcgcaauaaauca

SEQ ID NO: 1996925 - RNA, 19 nt, Artificial Sequence
  Description of Artificial Sequence: Synthetic oligonucleotide
  Antisense strand to SEQ ID NO: 1996924
ugauuuauugcgcugacca

SEQ ID NO: 1996926 - RNA, 19 nt, Artificial Sequence
  Description of Artificial Sequence: Synthetic oligonucleotide
  Sense strand starting at position 1554 of SEQ ID NO: 1880828
gggucugagaaaggauucu

SEQ ID NO: 1996927 - RNA, 19 nt, Artificial Sequence
  Description of Artificial Sequence: Synthetic oligonucleotide
  Antisense strand to SEQ ID NO: 1996926
agaauccuuucucagaccc

SEQ ID NO: 1996928 - RNA, 19 nt, Artificial Sequence
  Description of Artificial Sequence: Synthetic oligonucleotide
  Sense strand starting at position 1563 of SEQ ID NO: 1880828
aaaggauucugguuccaag

SEQ ID NO: 1996929 - RNA, 19 nt, Artificial Sequence
  Description of Artificial Sequence: Synthetic oligonucleotide
  Antisense strand to SEQ ID NO: 1996928
cuuggaaccagaauccuuu

SEQ ID NO: 1996930 - RNA, 19 nt, Artificial Sequence
  Description of Artificial Sequence: Synthetic oligonucleotide
  Sense strand starting at position 2737 of SEQ ID NO: 1880828
aggccuuggacaugauacu

SEQ ID NO: 1996931 - RNA, 19 nt, Artificial Sequence
  Description of Artificial Sequence: Synthetic oligonucleotide
  Antisense strand to SEQ ID NO: 1996930
aguaucauguccaaggccu

SEQ ID NO: 1996932 - RNA, 19 nt, Artificial Sequence
  Description of Artificial Sequence: Synthetic oligonucleotide
  Sense strand starting at position 2866 of SEQ ID NO: 1880828
gguuguuagauguaacuau

SEQ ID NO: 1996933 - RNA, 19 nt, Artificial Sequence
  Description of Artificial Sequence: Synthetic oligonucleotide
  Antisense strand to SEQ ID NO: 1996932
auaguuacaucuaacaacc

SEQ ID NO: 1996934 - RNA, 19 nt, Artificial Sequence
  Description of Artificial Sequence: Synthetic oligonucleotide
  Sense strand starting at position 2937 of SEQ ID NO: 1880828
ccugaagaguuguccuaaa

SEQ ID NO: 1996935 - RNA, 19 nt, Artificial Sequence
  Description of Artificial Sequence: Synthetic oligonucleotide
  Antisense strand to SEQ ID NO: 1996934
uuuaggacaacucuucagg

SEQ ID NO: 1996936 - RNA, 19 nt, Artificial Sequence
  Description of Artificial Sequence: Synthetic oligonucleotide
  Sense strand starting at position 3001 of SEQ ID NO: 1880828
ccuuuauugagguggcaau

SEQ ID NO: 1996937 - RNA, 19 nt, Artificial Sequence
  Description of Artificial Sequence: Synthetic oligonucleotide
  Antisense strand to SEQ ID NO: 1996936
auugccaccucaauaaagg

SEQ ID NO: 1996938 - RNA, 19 nt, Artificial Sequence
  Description of Artificial Sequence: Synthetic oligonucleotide
  Sense strand starting at position 3002 of SEQ ID NO: 1880828
cuuuauugagguggcaauu

SEQ ID NO: 1996939 - RNA, 19 nt, Artificial Sequence
  Description of Artificial Sequence: Synthetic oligonucleotide
  Antisense strand to SEQ ID NO: 1996938
aauugccaccucaauaaag

SEQ ID NO: 1996940 - RNA, 19 nt, Artificial Sequence
  Description of Artificial Sequence: Synthetic oligonucleotide
  Sense strand starting at position 3012 of SEQ ID NO: 1880828
guggcaauuccugacaagu

SEQ ID NO: 1996941 - RNA, 19 nt, Artificial Sequence
  Description of Artificial Sequence: Synthetic oligonucleotide
  Antisense strand to SEQ ID NO: 1996940
acuugucaggaauugccac

SEQ ID NO: 1996942 - RNA, 19 nt, Artificial Sequence
  Description of Artificial Sequence: Synthetic oligonucleotide
  Sense strand starting at position 3076 of SEQ ID NO: 1880828
uggauauaguggguuugga

SEQ ID NO: 1996943 - RNA, 19 nt, Artificial Sequence
  Description of Artificial Sequence: Synthetic oligonucleotide
  Antisense strand to SEQ ID NO: 1996942
uccaaacccacuauaucca

SEQ ID NO: 1996944 - RNA, 19 nt, Artificial Sequence
  Description of Artificial Sequence: Synthetic oligonucleotide
  Sense strand starting at position 3145 of SEQ ID NO: 1880828
uguguuugucaucugccau

SEQ ID NO: 1996945 - RNA, 19 nt, Artificial Sequence
  Description of Artificial Sequence: Synthetic oligonucleotide
  Antisense strand to SEQ ID NO: 1996944
auggcagaugacaaacaca

SEQ ID NO: 1996946 - RNA, 19 nt, Artificial Sequence
  Description of Artificial Sequence: Synthetic oligonucleotide
  Sense strand starting at position 3151 of SEQ ID NO: 1880828
ugucaucugccauauugau

SEQ ID NO: 1996947 - RNA, 19 nt, Artificial Sequence
  Description of Artificial Sequence: Synthetic oligonucleotide
  Antisense strand to SEQ ID NO: 1996946
aucaauauggcagaugaca

SEQ ID NO: 1996948 - RNA, 19 nt, Artificial Sequence
  Description of Artificial Sequence: Synthetic oligonucleotide
  Sense strand starting at position 3290 of SEQ ID NO: 1880828
gcgucuugcaagccaugaa

SEQ ID NO: 1996949 - RNA, 19 nt, Artificial Sequence
  Description of Artificial Sequence: Synthetic oligonucleotide
  Antisense strand to SEQ ID NO: 1996948
uucauggcuugcaagacgc

SEQ ID NO: 1996950 - RNA, 19 nt, Artificial Sequence
  Description of Artificial Sequence: Synthetic oligonucleotide
  Sense strand starting at position 3382 of SEQ ID NO: 1880828
aguacucacuugucuuaaa

SEQ ID NO: 1996951 - RNA, 19 nt, Artificial Sequence
  Description of Artificial Sequence: Synthetic oligonucleotide
  Antisense strand to SEQ ID NO: 1996950
uuuaagacaagugaguacu

SEQ ID NO: 1996952 - RNA, 19 nt, Artificial Sequence
  Description of Artificial Sequence: Synthetic oligonucleotide
  Sense strand starting at position 3383 of SEQ ID NO: 1880828
guacucacuugucuuaaag

SEQ ID NO: 1996953 - RNA, 19 nt, Artificial Sequence
  Description of Artificial Sequence: Synthetic oligonucleotide
  Antisense strand to SEQ ID NO: 1996952
cuuuaagacaagugaguac

SEQ ID NO: 1996954 - RNA, 19 nt, Artificial Sequence
  Description of Artificial Sequence: Synthetic oligonucleotide
  Sense strand starting at position 3394 of SEQ ID NO: 1880828
ucuuaaagauguuugauga

SEQ ID NO: 1996955 - RNA, 19 nt, Artificial Sequence
  Description of Artificial Sequence: Synthetic oligonucleotide
  Antisense strand to SEQ ID NO: 1996954
ucaucaaacaucuuuaaga

SEQ ID NO: 1996956 - RNA, 19 nt, Artificial Sequence
  Description of Artificial Sequence: Synthetic oligonucleotide
  Sense strand starting at position 3395 of SEQ ID NO: 1880828
cuuaaagauguuugaugaa

SEQ ID NO: 1996957 - RNA, 19 nt, Artificial Sequence
  Description of Artificial Sequence: Synthetic oligonucleotide
  Antisense strand to SEQ ID NO: 1996956
uucaucaaacaucuuuaag

SEQ ID NO: 1996958 - RNA, 19 nt, Artificial Sequence
  Description of Artificial Sequence: Synthetic oligonucleotide
  Sense strand starting at position 3560 of SEQ ID NO: 1880828
gccagcugucugcuugaca

SEQ ID NO: 1996959 - RNA, 19 nt, Artificial Sequence
  Description of Artificial Sequence: Synthetic oligonucleotide
  Antisense strand to SEQ ID NO: 1996958
ugucaagcagacagcuggc

SEQ ID NO: 1996960 - RNA, 19 nt, Artificial Sequence
  Description of Artificial Sequence: Synthetic oligonucleotide
  Sense strand starting at position 3719 of SEQ ID NO: 1880828
ggaggcauucuugacuucu

SEQ ID NO: 1996961 - RNA, 19 nt, Artificial Sequence
  Description of Artificial Sequence: Synthetic oligonucleotide
  Antisense strand to SEQ ID NO: 1996960
agaagucaagaaugccucc

SEQ ID NO: 1996962 - RNA, 19 nt, Artificial Sequence
  Description of Artificial Sequence: Synthetic oligonucleotide
  Sense strand starting at position 3861 of SEQ ID NO: 1880828
ccuguauuaucaucuguaa

SEQ ID NO: 1996963 - RNA, 19 nt, Artificial Sequence
  Description of Artificial Sequence: Synthetic oligonucleotide
  Antisense strand to SEQ ID NO: 1996962
uuacagaugauaauacagg

SEQ ID NO: 1996964 - RNA, 19 nt, Artificial Sequence
  Description of Artificial Sequence: Synthetic oligonucleotide
  Sense strand starting at position 3899 of SEQ ID NO: 1880828
agccuauuggauuguuaug

SEQ ID NO: 1996965 - RNA, 19 nt, Artificial Sequence
  Description of Artificial Sequence: Synthetic oligonucleotide
  Antisense strand to SEQ ID NO: 1996964
cauaacaauccaauaggcu

SEQ ID NO: 1996966 - RNA, 19 nt, Artificial Sequence
  Description of Artificial Sequence: Synthetic oligonucleotide
  Sense strand starting at position 3954 of SEQ ID NO: 1880828
cagaguaaauggccaguaa

SEQ ID NO: 1996967 - RNA, 19 nt, Artificial Sequence
  Description of Artificial Sequence: Synthetic oligonucleotide
  Antisense strand to SEQ ID NO: 1996966
uuacuggccauuuacucug

SEQ ID NO: 1996968 - RNA, 19 nt, Artificial Sequence
  Description of Artificial Sequence: Synthetic oligonucleotide
  Sense strand starting at position 3958 of SEQ ID NO: 1880828
guaaauggccaguaagcau

SEQ ID NO: 1996969 - RNA, 19 nt, Artificial Sequence
  Description of Artificial Sequence: Synthetic oligonucleotide
  Antisense strand to SEQ ID NO: 1996968
augcuuacuggccauuuac

SEQ ID NO: 1996970 - RNA, 19 nt, Artificial Sequence
  Description of Artificial Sequence: Synthetic oligonucleotide
  Sense strand starting at position 190 of SEQ ID NO: 1880829
gaagaagacuccucaucgu

SEQ ID NO: 1996971 - RNA, 19 nt, Artificial Sequence
  Description of Artificial Sequence: Synthetic oligonucleotide
  Antisense strand to SEQ ID NO: 1996970
acgaugaggagucuucuuc

SEQ ID NO: 1996972 - RNA, 19 nt, Artificial Sequence
  Description of Artificial Sequence: Synthetic oligonucleotide
  Sense strand starting at position 197 of SEQ ID NO: 1880829
acuccucaucguggugaau

SEQ ID NO: 1996973 - RNA, 19 nt, Artificial Sequence
  Description of Artificial Sequence: Synthetic oligonucleotide
  Antisense strand to SEQ ID NO: 1996972
auucaccacgaugaggagu

SEQ ID NO: 1996974 - RNA, 19 nt, Artificial Sequence
  Description of Artificial Sequence: Synthetic oligonucleotide
  Sense strand starting at position 267 of SEQ ID NO: 1880829
agcauuaugcuguaauuag

SEQ ID NO: 1996975 - RNA, 19 nt, Artificial Sequence
  Description of Artificial Sequence: Synthetic oligonucleotide
  Antisense strand to SEQ ID NO: 1996974
cuaauuacagcauaaugcu

SEQ ID NO: 1996976 - RNA, 19 nt, Artificial Sequence
  Description of Artificial Sequence: Synthetic oligonucleotide
  Sense strand starting at position 319 of SEQ ID NO: 1880829
gagggaguguugguucugu

SEQ ID NO: 1996977 - RNA, 19 nt, Artificial Sequence
  Description of Artificial Sequence: Synthetic oligonucleotide
  Antisense strand to SEQ ID NO: 1996976
acagaaccaacacucccuc

SEQ ID NO: 1996978 - RNA, 19 nt, Artificial Sequence
  Description of Artificial Sequence: Synthetic oligonucleotide
  Sense strand starting at position 324 of SEQ ID NO: 1880829
aguguugguucugucacau

SEQ ID NO: 1996979 - RNA, 19 nt, Artificial Sequence
  Description of Artificial Sequence: Synthetic oligonucleotide
  Antisense strand to SEQ ID NO: 1996978
augugacagaaccaacacu

SEQ ID NO: 1996980 - RNA, 19 nt, Artificial Sequence
  Description of Artificial Sequence: Synthetic oligonucleotide
  Sense strand starting at position 458 of SEQ ID NO: 1880829
guuagacuucuagacucac

SEQ ID NO: 1996981 - RNA, 19 nt, Artificial Sequence
  Description of Artificial Sequence: Synthetic oligonucleotide
  Antisense strand to SEQ ID NO: 1996980
gugagucuagaagucuaac

SEQ ID NO: 1996982 - RNA, 19 nt, Artificial Sequence
  Description of Artificial Sequence: Synthetic oligonucleotide
  Sense strand starting at position 524 of SEQ ID NO: 1880829
uaaugugauuccuugugac

SEQ ID NO: 1996983 - RNA, 19 nt, Artificial Sequence
  Description of Artificial Sequence: Synthetic oligonucleotide
  Antisense strand to SEQ ID NO: 1996982
gucacaaggaaucacauua

SEQ ID NO: 1996984 - RNA, 19 nt, Artificial Sequence
  Description of Artificial Sequence: Synthetic oligonucleotide
  Sense strand starting at position 611 of SEQ ID NO: 1880829
cagagccuccuuuguguaa

SEQ ID NO: 1996985 - RNA, 19 nt, Artificial Sequence
  Description of Artificial Sequence: Synthetic oligonucleotide
  Antisense strand to SEQ ID NO: 1996984
uuacacaaaggaggcucug

SEQ ID NO: 1996986 - RNA, 19 nt, Artificial Sequence
  Description of Artificial Sequence: Synthetic oligonucleotide
  Sense strand starting at position 612 of SEQ ID NO: 1880829
agagccuccuuuguguaaa

SEQ ID NO: 1996987 - RNA, 19 nt, Artificial Sequence
  Description of Artificial Sequence: Synthetic oligonucleotide
  Antisense strand to SEQ ID NO: 1996986
uuuacacaaaggaggcucu

SEQ ID NO: 1996988 - RNA, 19 nt, Artificial Sequence
  Description of Artificial Sequence: Synthetic oligonucleotide
  Sense strand starting at position 748 of SEQ ID NO: 1880829
cgacgacacugugcuaauu

SEQ ID NO: 1996989 - RNA, 19 nt, Artificial Sequence
  Description of Artificial Sequence: Synthetic oligonucleotide
  Antisense strand to SEQ ID NO: 1996988
aauuagcacagugucgucg

SEQ ID NO: 1996990 - RNA, 19 nt, Artificial Sequence
  Description of Artificial Sequence: Synthetic oligonucleotide
  Sense strand starting at position 758 of SEQ ID NO: 1880829
gugcuaauuguuuaauauc

SEQ ID NO: 1996991 - RNA, 19 nt, Artificial Sequence
  Description of Artificial Sequence: Synthetic oligonucleotide
  Antisense strand to SEQ ID NO: 1996990
gauauuaaacaauuagcac

SEQ ID NO: 1996992 - RNA, 19 nt, Artificial Sequence
  Description of Artificial Sequence: Synthetic oligonucleotide
  Sense strand starting at position 767 of SEQ ID NO: 1880829
guuuaauaucuuuguccca

SEQ ID NO: 1996993 - RNA, 19 nt, Artificial Sequence
  Description of Artificial Sequence: Synthetic oligonucleotide
  Antisense strand to SEQ ID NO: 1996992
ugggacaaagauauuaaac

SEQ ID NO: 1996994 - RNA, 19 nt, Artificial Sequence
  Description of Artificial Sequence: Synthetic oligonucleotide
  Sense strand starting at position 860 of SEQ ID NO: 1880829
cacagagguucccaggauu

SEQ ID NO: 1996995 - RNA, 19 nt, Artificial Sequence
  Description of Artificial Sequence: Synthetic oligonucleotide
  Antisense strand to SEQ ID NO: 1996994
aauccugggaaccucugug

SEQ ID NO: 1996996 - RNA, 19 nt, Artificial Sequence
  Description of Artificial Sequence: Synthetic oligonucleotide
  Sense strand starting at position 1022 of SEQ ID NO: 1880829
acucauccuccucgagaca

SEQ ID NO: 1996997 - RNA, 19 nt, Artificial Sequence
  Description of Artificial Sequence: Synthetic oligonucleotide
  Antisense strand to SEQ ID NO: 1996996
ugucucgaggaggaugagu

SEQ ID NO: 1996998 - RNA, 19 nt, Artificial Sequence
  Description of Artificial Sequence: Synthetic oligonucleotide
  Sense strand starting at position 1066 of SEQ ID NO: 1880829
gcugaauggaaaugugugu

SEQ ID NO: 1996999 - RNA, 19 nt, Artificial Sequence
  Description of Artificial Sequence: Synthetic oligonucleotide
  Antisense strand to SEQ ID NO: 1996998
acacacauuuccauucagc

SEQ ID NO: 1997000 - RNA, 19 nt, Artificial Sequence
  Description of Artificial Sequence: Synthetic oligonucleotide
  Sense strand starting at position 1070 of SEQ ID NO: 1880829
aauggaaauguguguucuu

SEQ ID NO: 1997001 - RNA, 19 nt, Artificial Sequence
  Description of Artificial Sequence: Synthetic oligonucleotide
  Antisense strand to SEQ ID NO: 1997000
aagaacacacauuuccauu

SEQ ID NO: 1997002 - RNA, 19 nt, Artificial Sequence
  Description of Artificial Sequence: Synthetic oligonucleotide
  Sense strand starting at position 1071 of SEQ ID NO: 1880829
auggaaauguguguucuuu

SEQ ID NO: 1997003 - RNA, 19 nt, Artificial Sequence
  Description of Artificial Sequence: Synthetic oligonucleotide
  Antisense strand to SEQ ID NO: 1997002
aaagaacacacauuuccau

SEQ ID NO: 1997004 - RNA, 19 nt, Artificial Sequence
  Description of Artificial Sequence: Synthetic oligonucleotide
  Sense strand starting at position 1073 of SEQ ID NO: 1880829
ggaaauguguguucuuuga

SEQ ID NO: 1997005 - RNA, 19 nt, Artificial Sequence
  Description of Artificial Sequence: Synthetic oligonucleotide
  Antisense strand to SEQ ID NO: 1997004
ucaaagaacacacauuucc

SEQ ID NO: 1997006 - RNA, 19 nt, Artificial Sequence
  Description of Artificial Sequence: Synthetic oligonucleotide
  Sense strand starting at position 1079 of SEQ ID NO: 1880829
guguguucuuugaggagag

SEQ ID NO: 1997007 - RNA, 19 nt, Artificial Sequence
  Description of Artificial Sequence: Synthetic oligonucleotide
  Antisense strand to SEQ ID NO: 1997006
cucuccucaaagaacacac

SEQ ID NO: 1997008 - RNA, 19 nt, Artificial Sequence
  Description of Artificial Sequence: Synthetic oligonucleotide
  Sense strand starting at position 1081 of SEQ ID NO: 1880829
guguucuuugaggagaggu

SEQ ID NO: 1997009 - RNA, 19 nt, Artificial Sequence
  Description of Artificial Sequence: Synthetic oligonucleotide
  Antisense strand to SEQ ID NO: 1997008
accucuccucaaagaacac

SEQ ID NO: 1997010 - RNA, 19 nt, Artificial Sequence
  Description of Artificial Sequence: Synthetic oligonucleotide
  Sense strand starting at position 1091 of SEQ ID NO: 1880829
aggagagguugcagaagua

SEQ ID NO: 1997011 - RNA, 19 nt, Artificial Sequence
  Description of Artificial Sequence: Synthetic oligonucleotide
  Antisense strand to SEQ ID NO: 1997010
uacuucugcaaccucuccu

SEQ ID NO: 1997012 - RNA, 19 nt, Artificial Sequence
  Description of Artificial Sequence: Synthetic oligonucleotide
  Sense strand starting at position 1517 of SEQ ID NO: 1880829
ugugaucucgggcaaauca

SEQ ID NO: 1997013 - RNA, 19 nt, Artificial Sequence
  Description of Artificial Sequence: Synthetic oligonucleotide
  Antisense strand to SEQ ID NO: 1997012
ugauuugcccgagaucaca

SEQ ID NO: 1997014 - RNA, 19 nt, Artificial Sequence
  Description of Artificial Sequence: Synthetic oligonucleotide
  Sense strand starting at position 2649 of SEQ ID NO: 1880829
aagucagacugucugaagu

SEQ ID NO: 1997015 - RNA, 19 nt, Artificial Sequence
  Description of Artificial Sequence: Synthetic oligonucleotide
  Antisense strand to SEQ ID NO: 1997014
acuucagacagucugacuu

SEQ ID NO: 1997016 - RNA, 19 nt, Artificial Sequence
  Description of Artificial Sequence: Synthetic oligonucleotide
  Sense strand starting at position 2659 of SEQ ID NO: 1880829
gucugaagucccuguccca

SEQ ID NO: 1997017 - RNA, 19 nt, Artificial Sequence
  Description of Artificial Sequence: Synthetic oligonucleotide
  Antisense strand to SEQ ID NO: 1997016
ugggacagggacuucagac

SEQ ID NO: 1997018 - RNA, 19 nt, Artificial Sequence
  Description of Artificial Sequence: Synthetic oligonucleotide
  Sense strand starting at position 2976 of SEQ ID NO: 1880829
gccuggugugcugcgaaga

SEQ ID NO: 1997019 - RNA, 19 nt, Artificial Sequence
  Description of Artificial Sequence: Synthetic oligonucleotide
  Antisense strand to SEQ ID NO: 1997018
ucuucgcagcacaccaggc

SEQ ID NO: 1997020 - RNA, 19 nt, Artificial Sequence
  Description of Artificial Sequence: Synthetic oligonucleotide
  Sense strand starting at position 3219 of SEQ ID NO: 1880829
gugcuagucugcuugggaa

SEQ ID NO: 1997021 - RNA, 19 nt, Artificial Sequence
  Description of Artificial Sequence: Synthetic oligonucleotide
  Antisense strand to SEQ ID NO: 1997020
uucccaagcagacuagcac

SEQ ID NO: 1997022 - RNA, 19 nt, Artificial Sequence
  Description of Artificial Sequence: Synthetic oligonucleotide
  Sense strand starting at position 3221 of SEQ ID NO: 1880829
gcuagucugcuugggaagu

SEQ ID NO: 1997023 - RNA, 19 nt, Artificial Sequence
  Description of Artificial Sequence: Synthetic oligonucleotide
  Antisense strand to SEQ ID NO: 1997022
acuucccaagcagacuagc

SEQ ID NO: 1997024 - RNA, 19 nt, Artificial Sequence
  Description of Artificial Sequence: Synthetic oligonucleotide
  Sense strand starting at position 3383 of SEQ ID NO: 1880829
gggugagguugguuuagga

SEQ ID NO: 1997025 - RNA, 19 nt, Artificial Sequence
  Description of Artificial Sequence: Synthetic oligonucleotide
  Antisense strand to SEQ ID NO: 1997024
uccuaaaccaaccucaccc

SEQ ID NO: 1997026 - RNA, 19 nt, Artificial Sequence
  Description of Artificial Sequence: Synthetic oligonucleotide
  Sense strand starting at position 3385 of SEQ ID NO: 1880829
gugagguugguuuaggagu

SEQ ID NO: 1997027 - RNA, 19 nt, Artificial Sequence
  Description of Artificial Sequence: Synthetic oligonucleotide
  Antisense strand to SEQ ID NO: 1997026
acuccuaaaccaaccucac

SEQ ID NO: 1997028 - RNA, 19 nt, Artificial Sequence
  Description of Artificial Sequence: Synthetic oligonucleotide
  Sense strand starting at position 3447 of SEQ ID NO: 1880829
aagaguuaaucuuccucga

SEQ ID NO: 1997029 - RNA, 19 nt, Artificial Sequence
  Description of Artificial Sequence: Synthetic oligonucleotide
  Antisense strand to SEQ ID NO: 1997028
ucgaggaagauuaacucuu

SEQ ID NO: 1997030 - RNA, 19 nt, Artificial Sequence
  Description of Artificial Sequence: Synthetic oligonucleotide
  Sense strand starting at position 3449 of SEQ ID NO: 1880829
gaguuaaucuuccucgagc

SEQ ID NO: 1997031 - RNA, 19 nt, Artificial Sequence
  Description of Artificial Sequence: Synthetic oligonucleotide
  Antisense strand to SEQ ID NO: 1997030
gcucgaggaagauuaacuc

SEQ ID NO: 1997032 - RNA, 19 nt, Artificial Sequence
  Description of Artificial Sequence: Synthetic oligonucleotide
  Sense strand starting at position 3450 of SEQ ID NO: 1880829
aguuaaucuuccucgagcu

SEQ ID NO: 1997033 - RNA, 19 nt, Artificial Sequence
  Description of Artificial Sequence: Synthetic oligonucleotide
  Antisense strand to SEQ ID NO: 1997032
agcucgaggaagauuaacu

SEQ ID NO: 1997034 - RNA, 19 nt, Artificial Sequence
  Description of Artificial Sequence: Synthetic oligonucleotide
  Sense strand starting at position 3503 of SEQ ID NO: 1880829
uuaggaggacucuggaguu

SEQ ID NO: 1997035 - RNA, 19 nt, Artificial Sequence
  Description of Artificial Sequence: Synthetic oligonucleotide
  Antisense strand to SEQ ID NO: 1997034
aacuccagaguccuccuaa

SEQ ID NO: 1997036 - RNA, 19 nt, Artificial Sequence
  Description of Artificial Sequence: Synthetic oligonucleotide
  Sense strand starting at position 3606 of SEQ ID NO: 1880829
ggguaagucucagagacua

SEQ ID NO: 1997037 - RNA, 19 nt, Artificial Sequence
  Description of Artificial Sequence: Synthetic oligonucleotide
  Antisense strand to SEQ ID NO: 1997036
uagucucugagacuuaccc

SEQ ID NO: 1997038 - RNA, 19 nt, Artificial Sequence
  Description of Artificial Sequence: Synthetic oligonucleotide
  Sense strand starting at position 3674 of SEQ ID NO: 1880829
aggugucugcucuggagga

SEQ ID NO: 1997039 - RNA, 19 nt, Artificial Sequence
  Description of Artificial Sequence: Synthetic oligonucleotide
  Antisense strand to SEQ ID NO: 1997038
uccuccagagcagacaccu

SEQ ID NO: 1997040 - RNA, 19 nt, Artificial Sequence
  Description of Artificial Sequence: Synthetic oligonucleotide
  Sense strand starting at position 3676 of SEQ ID NO: 1880829
gugucugcucuggaggagu

SEQ ID NO: 1997041 - RNA, 19 nt, Artificial Sequence
  Description of Artificial Sequence: Synthetic oligonucleotide
  Antisense strand to SEQ ID NO: 1997040
acuccuccagagcagacac

SEQ ID NO: 1997042 - RNA, 19 nt, Artificial Sequence
  Description of Artificial Sequence: Synthetic oligonucleotide
  Sense strand starting at position 3687 of SEQ ID NO: 1880829
ggaggagucugccagggaa

SEQ ID NO: 1997043 - RNA, 19 nt, Artificial Sequence
  Description of Artificial Sequence: Synthetic oligonucleotide
  Antisense strand to SEQ ID NO: 1997042
uucccuggcagacuccucc

SEQ ID NO: 1997044 - RNA, 19 nt, Artificial Sequence
  Description of Artificial Sequence: Synthetic oligonucleotide
  Sense strand starting at position 3704 of SEQ ID NO: 1880829
aaccaucaggccugggaua

SEQ ID NO: 1997045 - RNA, 19 nt, Artificial Sequence
  Description of Artificial Sequence: Synthetic oligonucleotide
  Antisense strand to SEQ ID NO: 1997044
uaucccaggccugaugguu

SEQ ID NO: 1997046 - RNA, 19 nt, Artificial Sequence
  Description of Artificial Sequence: Synthetic oligonucleotide
  Sense strand starting at position 3733 of SEQ ID NO: 1880829
ugguuucuuccugggagag

SEQ ID NO: 1997047 - RNA, 19 nt, Artificial Sequence
  Description of Artificial Sequence: Synthetic oligonucleotide
  Antisense strand to SEQ ID NO: 1997046
cucucccaggaagaaacca

SEQ ID NO: 1997048 - RNA, 19 nt, Artificial Sequence
  Description of Artificial Sequence: Synthetic oligonucleotide
  Sense strand starting at position 3734 of SEQ ID NO: 1880829
gguuucuuccugggagagu

SEQ ID NO: 1997049 - RNA, 19 nt, Artificial Sequence
  Description of Artificial Sequence: Synthetic oligonucleotide
  Antisense strand to SEQ ID NO: 1997048
acucucccaggaagaaacc

SEQ ID NO: 1997050 - RNA, 19 nt, Artificial Sequence
  Description of Artificial Sequence: Synthetic oligonucleotide
  Sense strand starting at position 482 of SEQ ID NO: 1880830
ggaucagguuccuaagaaa

SEQ ID NO: 1997051 - RNA, 19 nt, Artificial Sequence
  Description of Artificial Sequence: Synthetic oligonucleotide
  Antisense strand to SEQ ID NO: 1997050
uuucuuaggaaccugaucc

SEQ ID NO: 1997052 - RNA, 19 nt, Artificial Sequence
  Description of Artificial Sequence: Synthetic oligonucleotide
  Sense strand starting at position 510 of SEQ ID NO: 1880830
ucaaauaagugaucucgcu

SEQ ID NO: 1997053 - RNA, 19 nt, Artificial Sequence
  Description of Artificial Sequence: Synthetic oligonucleotide
  Antisense strand to SEQ ID NO: 1997052
agcgagaucacuuauuuga

SEQ ID NO: 1997054 - RNA, 19 nt, Artificial Sequence
  Description of Artificial Sequence: Synthetic oligonucleotide
  Sense strand starting at position 516 of SEQ ID NO: 1880830
aagugaucucgcuacuuua

SEQ ID NO: 1997055 - RNA, 19 nt, Artificial Sequence
  Description of Artificial Sequence: Synthetic oligonucleotide
  Antisense strand to SEQ ID NO: 1997054
uaaaguagcgagaucacuu

SEQ ID NO: 1997056 - RNA, 19 nt, Artificial Sequence
  Description of Artificial Sequence: Synthetic oligonucleotide
  Sense strand starting at position 595 of SEQ ID NO: 1880830
gauggucugucuguacuga

SEQ ID NO: 1997057 - RNA, 19 nt, Artificial Sequence
  Description of Artificial Sequence: Synthetic oligonucleotide
  Antisense strand to SEQ ID NO: 1997056
ucaguacagacagaccauc

SEQ ID NO: 1997058 - RNA, 19 nt, Artificial Sequence
  Description of Artificial Sequence: Synthetic oligonucleotide
  Sense strand starting at position 614 of SEQ ID NO: 1880830
gcggguaucccagagcuga

SEQ ID NO: 1997059 - RNA, 19 nt, Artificial Sequence
  Description of Artificial Sequence: Synthetic oligonucleotide
  Antisense strand to SEQ ID NO: 1997058
ucagcucugggauacccgc

SEQ ID NO: 1997060 - RNA, 19 nt, Artificial Sequence
  Description of Artificial Sequence: Synthetic oligonucleotide
  Sense strand starting at position 740 of SEQ ID NO: 1880830
guuuacuucccgcagacga

SEQ ID NO: 1997061 - RNA, 19 nt, Artificial Sequence
  Description of Artificial Sequence: Synthetic oligonucleotide
  Antisense strand to SEQ ID NO: 1997060
ucgucugcgggaaguaaac

SEQ ID NO: 1997062 - RNA, 19 nt, Artificial Sequence
  Description of Artificial Sequence: Synthetic oligonucleotide
  Sense strand starting at position 796 of SEQ ID NO: 1880830
uggcucuuugagcagguaa

SEQ ID NO: 1997063 - RNA, 19 nt, Artificial Sequence
  Description of Artificial Sequence: Synthetic oligonucleotide
  Antisense strand to SEQ ID NO: 1997062
uuaccugcucaaagagcca

SEQ ID NO: 1997064 - RNA, 19 nt, Artificial Sequence
  Description of Artificial Sequence: Synthetic oligonucleotide
  Sense strand starting at position 798 of SEQ ID NO: 1880830
gcucuuugagcagguaauu

SEQ ID NO: 1997065 - RNA, 19 nt, Artificial Sequence
  Description of Artificial Sequence: Synthetic oligonucleotide
  Antisense strand to SEQ ID NO: 1997064
aauuaccugcucaaagagc

SEQ ID NO: 1997066 - RNA, 19 nt, Artificial Sequence
  Description of Artificial Sequence: Synthetic oligonucleotide
  Sense strand starting at position 878 of SEQ ID NO: 1880830
acccuuuccgguuaacaaa

SEQ ID NO: 1997067 - RNA, 19 nt, Artificial Sequence
  Description of Artificial Sequence: Synthetic oligonucleotide
  Antisense strand to SEQ ID NO: 1997066
uuuguuaaccggaaagggu

SEQ ID NO: 1997068 - RNA, 19 nt, Artificial Sequence
  Description of Artificial Sequence: Synthetic oligonucleotide
  Sense strand starting at position 1156 of SEQ ID NO: 1880830
ugcaaccacuugucugaaa

SEQ ID NO: 1997069 - RNA, 19 nt, Artificial Sequence
  Description of Artificial Sequence: Synthetic oligonucleotide
  Antisense strand to SEQ ID NO: 1997068
uuucagacaagugguugca

SEQ ID NO: 1997070 - RNA, 19 nt, Artificial Sequence
  Description of Artificial Sequence: Synthetic oligonucleotide
  Sense strand starting at position 1167 of SEQ ID NO: 1880830
gucugaaacuuaccagauu

SEQ ID NO: 1997071 - RNA, 19 nt, Artificial Sequence
  Description of Artificial Sequence: Synthetic oligonucleotide
  Antisense strand to SEQ ID NO: 1997070
aaucugguaaguuucagac

SEQ ID NO: 1997072 - RNA, 19 nt, Artificial Sequence
  Description of Artificial Sequence: Synthetic oligonucleotide
  Sense strand starting at position 1243 of SEQ ID NO: 1880830
gauaauugcgaaugucaaa

SEQ ID NO: 1997073 - RNA, 19 nt, Artificial Sequence
  Description of Artificial Sequence: Synthetic oligonucleotide
  Antisense strand to SEQ ID NO: 1997072
uuugacauucgcaauuauc

SEQ ID NO: 1997074 - RNA, 19 nt, Artificial Sequence
  Description of Artificial Sequence: Synthetic oligonucleotide
  Sense strand starting at position 1258 of SEQ ID NO: 1880830
caaauacucgggcgugaug

SEQ ID NO: 1997075 - RNA, 19 nt, Artificial Sequence
  Description of Artificial Sequence: Synthetic oligonucleotide
  Antisense strand to SEQ ID NO: 1997074
caucacgcccgaguauuug

SEQ ID NO: 1997076 - RNA, 19 nt, Artificial Sequence
  Description of Artificial Sequence: Synthetic oligonucleotide
  Sense strand starting at position 1474 of SEQ ID NO: 1880830
ucacuuagucuauacugga

SEQ ID NO: 1997077 - RNA, 19 nt, Artificial Sequence
  Description of Artificial Sequence: Synthetic oligonucleotide
  Antisense strand to SEQ ID NO: 1997076
uccaguauagacuaaguga

SEQ ID NO: 1997078 - RNA, 19 nt, Artificial Sequence
  Description of Artificial Sequence: Synthetic oligonucleotide
  Sense strand starting at position 2093 of SEQ ID NO: 1880830
guguuacucuuguuggauu

SEQ ID NO: 1997079 - RNA, 19 nt, Artificial Sequence
  Description of Artificial Sequence: Synthetic oligonucleotide
  Antisense strand to SEQ ID NO: 1997078
aauccaacaagaguaacac

SEQ ID NO: 1997080 - RNA, 19 nt, Artificial Sequence
  Description of Artificial Sequence: Synthetic oligonucleotide
  Sense strand starting at position 2135 of SEQ ID NO: 1880830
gaucaauuaugggugauac

SEQ ID NO: 1997081 - RNA, 19 nt, Artificial Sequence
  Description of Artificial Sequence: Synthetic oligonucleotide
  Antisense strand to SEQ ID NO: 1997080
guaucacccauaauugauc

SEQ ID NO: 1997082 - RNA, 19 nt, Artificial Sequence
  Description of Artificial Sequence: Synthetic oligonucleotide
  Sense strand starting at position 2145 of SEQ ID NO: 1880830
gggugauaccaugauguug

SEQ ID NO: 1997083 - RNA, 19 nt, Artificial Sequence
  Description of Artificial Sequence: Synthetic oligonucleotide
  Antisense strand to SEQ ID NO: 1997082
caacaucaugguaucaccc

SEQ ID NO: 1997084 - RNA, 19 nt, Artificial Sequence
  Description of Artificial Sequence: Synthetic oligonucleotide
  Sense strand starting at position 2350 of SEQ ID NO: 1880830
gguauauugcgguagggau

SEQ ID NO: 1997085 - RNA, 19 nt, Artificial Sequence
  Description of Artificial Sequence: Synthetic oligonucleotide
  Antisense strand to SEQ ID NO: 1997084
aucccuaccgcaauauacc

SEQ ID NO: 1997086 - RNA, 19 nt, Artificial Sequence
  Description of Artificial Sequence: Synthetic oligonucleotide
  Sense strand starting at position 2496 of SEQ ID NO: 1880830
ggaauuccugccgacuaca

SEQ ID NO: 1997087 - RNA, 19 nt, Artificial Sequence
  Description of Artificial Sequence: Synthetic oligonucleotide
  Antisense strand to SEQ ID NO: 1997086
uguagucggcaggaauucc

SEQ ID NO: 1997088 - RNA, 19 nt, Artificial Sequence
  Description of Artificial Sequence: Synthetic oligonucleotide
  Sense strand starting at position 2567 of SEQ ID NO: 1880830
cauugaaugccugaaguca

SEQ ID NO: 1997089 - RNA, 19 nt, Artificial Sequence
  Description of Artificial Sequence: Synthetic oligonucleotide
  Antisense strand to SEQ ID NO: 1997088
ugacuucaggcauucaaug

SEQ ID NO: 1997090 - RNA, 19 nt, Artificial Sequence
  Description of Artificial Sequence: Synthetic oligonucleotide
  Sense strand starting at position 2616 of SEQ ID NO: 1880830
acuccacuuguccgagguu

SEQ ID NO: 1997091 - RNA, 19 nt, Artificial Sequence
  Description of Artificial Sequence: Synthetic oligonucleotide
  Antisense strand to SEQ ID NO: 1997090
aaccucggacaaguggagu

SEQ ID NO: 1997092 - RNA, 19 nt, Artificial Sequence
  Description of Artificial Sequence: Synthetic oligonucleotide
  Sense strand starting at position 2628 of SEQ ID NO: 1880830
cgagguuuccaaugaugac

SEQ ID NO: 1997093 - RNA, 19 nt, Artificial Sequence
  Description of Artificial Sequence: Synthetic oligonucleotide
  Antisense strand to SEQ ID NO: 1997092
gucaucauuggaaaccucg

SEQ ID NO: 1997094 - RNA, 19 nt, Artificial Sequence
  Description of Artificial Sequence: Synthetic oligonucleotide
  Sense strand starting at position 2677 of SEQ ID NO: 1880830
gcaccuaaggcugagaguu

SEQ ID NO: 1997095 - RNA, 19 nt, Artificial Sequence
  Description of Artificial Sequence: Synthetic oligonucleotide
  Antisense strand to SEQ ID NO: 1997094
aacucucagccuuaggugc

SEQ ID NO: 1997096 - RNA, 19 nt, Artificial Sequence
  Description of Artificial Sequence: Synthetic oligonucleotide
  Sense strand starting at position 2842 of SEQ ID NO: 1880830
gccgaauccgcagaaguua

SEQ ID NO: 1997097 - RNA, 19 nt, Artificial Sequence
  Description of Artificial Sequence: Synthetic oligonucleotide
  Antisense strand to SEQ ID NO: 1997096
uaacuucugcggauucggc

SEQ ID NO: 1997098 - RNA, 19 nt, Artificial Sequence
  Description of Artificial Sequence: Synthetic oligonucleotide
  Sense strand starting at position 2925 of SEQ ID NO: 1880830
auuagaaaggccugagucu

SEQ ID NO: 1997099 - RNA, 19 nt, Artificial Sequence
  Description of Artificial Sequence: Synthetic oligonucleotide
  Antisense strand to SEQ ID NO: 1997098
agacucaggccuuucuaau

SEQ ID NO: 1997100 - RNA, 19 nt, Artificial Sequence
  Description of Artificial Sequence: Synthetic oligonucleotide
  Sense strand starting at position 3079 of SEQ ID NO: 1880830
acguguaagaugugauucu

SEQ ID NO: 1997101 - RNA, 19 nt, Artificial Sequence
  Description of Artificial Sequence: Synthetic oligonucleotide
  Antisense strand to SEQ ID NO: 1997100
agaaucacaucuuacacgu

SEQ ID NO: 1997102 - RNA, 19 nt, Artificial Sequence
  Description of Artificial Sequence: Synthetic oligonucleotide
  Sense strand starting at position 3088 of SEQ ID NO: 1880830
augugauucuaucugaguu

SEQ ID NO: 1997103 - RNA, 19 nt, Artificial Sequence
  Description of Artificial Sequence: Synthetic oligonucleotide
  Antisense strand to SEQ ID NO: 1997102
aacucagauagaaucacau

SEQ ID NO: 1997104 - RNA, 19 nt, Artificial Sequence
  Description of Artificial Sequence: Synthetic oligonucleotide
  Sense strand starting at position 3112 of SEQ ID NO: 1880830
aucuaagugcauugauuga

SEQ ID NO: 1997105 - RNA, 19 nt, Artificial Sequence
  Description of Artificial Sequence: Synthetic oligonucleotide
  Antisense strand to SEQ ID NO: 1997104
ucaaucaaugcacuuagau

SEQ ID NO: 1997106 - RNA, 19 nt, Artificial Sequence
  Description of Artificial Sequence: Synthetic oligonucleotide
  Sense strand starting at position 3146 of SEQ ID NO: 1880830
cggcgcauaacugucuuaa

SEQ ID NO: 1997107 - RNA, 19 nt, Artificial Sequence
  Description of Artificial Sequence: Synthetic oligonucleotide
  Antisense strand to SEQ ID NO: 1997106
uuaagacaguuaugcgccg

SEQ ID NO: 1997108 - RNA, 19 nt, Artificial Sequence
  Description of Artificial Sequence: Synthetic oligonucleotide
  Sense strand starting at position 3188 of SEQ ID NO: 1880830
aucacuucuuguucuugua

SEQ ID NO: 1997109 - RNA, 19 nt, Artificial Sequence
  Description of Artificial Sequence: Synthetic oligonucleotide
  Antisense strand to SEQ ID NO: 1997108
uacaagaacaagaagugau

SEQ ID NO: 1997110 - RNA, 19 nt, Artificial Sequence
  Description of Artificial Sequence: Synthetic oligonucleotide
  Sense strand starting at position 3605 of SEQ ID NO: 1880830
gaggacaaguacucucuca

SEQ ID NO: 1997111 - RNA, 19 nt, Artificial Sequence
  Description of Artificial Sequence: Synthetic oligonucleotide
  Antisense strand to SEQ ID NO: 1997110
ugagagaguacuuguccuc

SEQ ID NO: 1997112 - RNA, 19 nt, Artificial Sequence
  Description of Artificial Sequence: Synthetic oligonucleotide
  Sense strand starting at position 3824 of SEQ ID NO: 1880830
ggaugaucuugaguagggu

SEQ ID NO: 1997113 - RNA, 19 nt, Artificial Sequence
  Description of Artificial Sequence: Synthetic oligonucleotide
  Antisense strand to SEQ ID NO: 1997112
acccuacucaagaucaucc

SEQ ID NO: 1997114 - RNA, 19 nt, Artificial Sequence
  Description of Artificial Sequence: Synthetic oligonucleotide
  Sense strand starting at position 3868 of SEQ ID NO: 1880830
ggguguccagaagagguua

SEQ ID NO: 1997115 - RNA, 19 nt, Artificial Sequence
  Description of Artificial Sequence: Synthetic oligonucleotide
  Antisense strand to SEQ ID NO: 1997114
uaaccucuucuggacaccc

SEQ ID NO: 1997116 - RNA, 19 nt, Artificial Sequence
  Description of Artificial Sequence: Synthetic oligonucleotide
  Sense strand starting at position 3879 of SEQ ID NO: 1880830
agagguuagguguguggua

SEQ ID NO: 1997117 - RNA, 19 nt, Artificial Sequence
  Description of Artificial Sequence: Synthetic oligonucleotide
  Antisense strand to SEQ ID NO: 1997116
uaccacacaccuaaccucu

SEQ ID NO: 1997118 - RNA, 19 nt, Artificial Sequence
  Description of Artificial Sequence: Synthetic oligonucleotide
  Sense strand starting at position 3890 of SEQ ID NO: 1880830
gugugguagcucugggaag

SEQ ID NO: 1997119 - RNA, 19 nt, Artificial Sequence
  Description of Artificial Sequence: Synthetic oligonucleotide
  Antisense strand to SEQ ID NO: 1997118
cuucccagagcuaccacac

SEQ ID NO: 1997120 - RNA, 19 nt, Artificial Sequence
  Description of Artificial Sequence: Synthetic oligonucleotide
  Sense strand starting at position 3892 of SEQ ID NO: 1880830
gugguagcucugggaagaa

SEQ ID NO: 1997121 - RNA, 19 nt, Artificial Sequence
  Description of Artificial Sequence: Synthetic oligonucleotide
  Antisense strand to SEQ ID NO: 1997120
uucuucccagagcuaccac

SEQ ID NO: 1997122 - RNA, 19 nt, Artificial Sequence
  Description of Artificial Sequence: Synthetic oligonucleotide
  Sense strand starting at position 3904 of SEQ ID NO: 1880830
ggaagaaugcgcgagacgu

SEQ ID NO: 1997123 - RNA, 19 nt, Artificial Sequence
  Description of Artificial Sequence: Synthetic oligonucleotide
  Antisense strand to SEQ ID NO: 1997122
acgucucgcgcauucuucc

SEQ ID NO: 1997124 - RNA, 19 nt, Artificial Sequence
  Description of Artificial Sequence: Synthetic oligonucleotide
  Sense strand starting at position 3905 of SEQ ID NO: 1880830
gaagaaugcgcgagacguc

SEQ ID NO: 1997125 - RNA, 19 nt, Artificial Sequence
  Description of Artificial Sequence: Synthetic oligonucleotide
  Antisense strand to SEQ ID NO: 1997124
gacgucucgcgcauucuuc

SEQ ID NO: 1997126 - RNA, 19 nt, Artificial Sequence
  Description of Artificial Sequence: Synthetic oligonucleotide
  Sense strand starting at position 3912 of SEQ ID NO: 1880830
gcgcgagacguccuucacu

SEQ ID NO: 1997127 - RNA, 19 nt, Artificial Sequence
  Description of Artificial Sequence: Synthetic oligonucleotide
  Antisense strand to SEQ ID NO: 1997126
agugaaggacgucucgcgc

SEQ ID NO: 1997128 - RNA, 19 nt, Artificial Sequence
  Description of Artificial Sequence: Synthetic oligonucleotide
  Sense strand starting at position 3948 of SEQ ID NO: 1880830
cgggucugucuccaaguaa

SEQ ID NO: 1997129 - RNA, 19 nt, Artificial Sequence
  Description of Artificial Sequence: Synthetic oligonucleotide
  Antisense strand to SEQ ID NO: 1997128
uuacuuggagacagacccg

SEQ ID NO: 1997130 - RNA, 19 nt, Artificial Sequence
  Description of Artificial Sequence: Synthetic oligonucleotide
  Sense strand starting at position 151 of SEQ ID NO: 1880831
augugcauccugcaagaca

SEQ ID NO: 1997131 - RNA, 19 nt, Artificial Sequence
  Description of Artificial Sequence: Synthetic oligonucleotide
  Antisense strand to SEQ ID NO: 1997130
ugucuugcaggaugcacau

SEQ ID NO: 1997132 - RNA, 19 nt, Artificial Sequence
  Description of Artificial Sequence: Synthetic oligonucleotide
  Sense strand starting at position 167 of SEQ ID NO: 1880831
acaagcacccugugucaaa

SEQ ID NO: 1997133 - RNA, 19 nt, Artificial Sequence
  Description of Artificial Sequence: Synthetic oligonucleotide
  Antisense strand to SEQ ID NO: 1997132
uuugacacagggugcuugu

SEQ ID NO: 1997134 - RNA, 19 nt, Artificial Sequence
  Description of Artificial Sequence: Synthetic oligonucleotide
  Sense strand starting at position 498 of SEQ ID NO: 1880831
uuugguccagacugaguua

SEQ ID NO: 1997135 - RNA, 19 nt, Artificial Sequence
  Description of Artificial Sequence: Synthetic oligonucleotide
  Antisense strand to SEQ ID NO: 1997134
uaacucagucuggaccaaa

SEQ ID NO: 1997136 - RNA, 19 nt, Artificial Sequence
  Description of Artificial Sequence: Synthetic oligonucleotide
  Sense strand starting at position 501 of SEQ ID NO: 1880831
gguccagacugaguuaaua

SEQ ID NO: 1997137 - RNA, 19 nt, Artificial Sequence
  Description of Artificial Sequence: Synthetic oligonucleotide
  Antisense strand to SEQ ID NO: 1997136
uauuaacucagucuggacc

SEQ ID NO: 1997138 - RNA, 19 nt, Artificial Sequence
  Description of Artificial Sequence: Synthetic oligonucleotide
  Sense strand starting at position 626 of SEQ ID NO: 1880831
guccuaauauaaguagaug

SEQ ID NO: 1997139 - RNA, 19 nt, Artificial Sequence
  Description of Artificial Sequence: Synthetic oligonucleotide
  Antisense strand to SEQ ID NO: 1997138
caucuacuuauauuaggac

SEQ ID NO: 1997140 - RNA, 19 nt, Artificial Sequence
  Description of Artificial Sequence: Synthetic oligonucleotide
  Sense strand starting at position 651 of SEQ ID NO: 1880831
acaucaaucuguguuauaa

SEQ ID NO: 1997141 - RNA, 19 nt, Artificial Sequence
  Description of Artificial Sequence: Synthetic oligonucleotide
  Antisense strand to SEQ ID NO: 1997140
uuauaacacagauugaugu

SEQ ID NO: 1997142 - RNA, 19 nt, Artificial Sequence
  Description of Artificial Sequence: Synthetic oligonucleotide
  Sense strand starting at position 669 of SEQ ID NO: 1880831
auggaauucuauguaguuc

SEQ ID NO: 1997143 - RNA, 19 nt, Artificial Sequence
  Description of Artificial Sequence: Synthetic oligonucleotide
  Antisense strand to SEQ ID NO: 1997142
gaacuacauagaauuccau

SEQ ID NO: 1997144 - RNA, 19 nt, Artificial Sequence
  Description of Artificial Sequence: Synthetic oligonucleotide
  Sense strand starting at position 711 of SEQ ID NO: 1880831
guguguacuggcaguguga

SEQ ID NO: 1997145 - RNA, 19 nt, Artificial Sequence
  Description of Artificial Sequence: Synthetic oligonucleotide
  Antisense strand to SEQ ID NO: 1997144
ucacacugccaguacacac

SEQ ID NO: 1997146 - RNA, 19 nt, Artificial Sequence
  Description of Artificial Sequence: Synthetic oligonucleotide
  Sense strand starting at position 758 of SEQ ID NO: 1880831
ugcucagcuccagaaaggu

SEQ ID NO: 1997147 - RNA, 19 nt, Artificial Sequence
  Description of Artificial Sequence: Synthetic oligonucleotide
  Antisense strand to SEQ ID NO: 1997146
accuuucuggagcugagca

SEQ ID NO: 1997148 - RNA, 19 nt, Artificial Sequence
  Description of Artificial Sequence: Synthetic oligonucleotide
  Sense strand starting at position 1287 of SEQ ID NO: 1880831
agaagauuaugggcaguaa

SEQ ID NO: 1997149 - RNA, 19 nt, Artificial Sequence
  Description of Artificial Sequence: Synthetic oligonucleotide
  Antisense strand to SEQ ID NO: 1997148
uuacugcccauaaucuucu

SEQ ID NO: 1997150 - RNA, 19 nt, Artificial Sequence
  Description of Artificial Sequence: Synthetic oligonucleotide
  Sense strand starting at position 1374 of SEQ ID NO: 1880831
agagauacugcguauguuu

SEQ ID NO: 1997151 - RNA, 19 nt, Artificial Sequence
  Description of Artificial Sequence: Synthetic oligonucleotide
  Antisense strand to SEQ ID NO: 1997150
aaacauacgcaguaucucu

SEQ ID NO: 1997152 - RNA, 19 nt, Artificial Sequence
  Description of Artificial Sequence: Synthetic oligonucleotide
  Sense strand starting at position 1443 of SEQ ID NO: 1880831
ucaauaugagauuguuaag

SEQ ID NO: 1997153 - RNA, 19 nt, Artificial Sequence
  Description of Artificial Sequence: Synthetic oligonucleotide
  Antisense strand to SEQ ID NO: 1997152
cuuaacaaucucauauuga

SEQ ID NO: 1997154 - RNA, 19 nt, Artificial Sequence
  Description of Artificial Sequence: Synthetic oligonucleotide
  Sense strand starting at position 1449 of SEQ ID NO: 1880831
ugagauuguuaaguagaua

SEQ ID NO: 1997155 - RNA, 19 nt, Artificial Sequence
  Description of Artificial Sequence: Synthetic oligonucleotide
  Antisense strand to SEQ ID NO: 1997154
uaucuacuuaacaaucuca

SEQ ID NO: 1997156 - RNA, 19 nt, Artificial Sequence
  Description of Artificial Sequence: Synthetic oligonucleotide
  Sense strand starting at position 1460 of SEQ ID NO: 1880831
aguagauaaucacuugucu

SEQ ID NO: 1997157 - RNA, 19 nt, Artificial Sequence
  Description of Artificial Sequence: Synthetic oligonucleotide
  Antisense strand to SEQ ID NO: 1997156
agacaagugauuaucuacu

SEQ ID NO: 1997158 - RNA, 19 nt, Artificial Sequence
  Description of Artificial Sequence: Synthetic oligonucleotide
  Sense strand starting at position 1497 of SEQ ID NO: 1880831
gagaauaugugauauuuac

SEQ ID NO: 1997159 - RNA, 19 nt, Artificial Sequence
  Description of Artificial Sequence: Synthetic oligonucleotide
  Antisense strand to SEQ ID NO: 1997158
guaaauaucacauauucuc

SEQ ID NO: 1997160 - RNA, 19 nt, Artificial Sequence
  Description of Artificial Sequence: Synthetic oligonucleotide
  Sense strand starting at position 1514 of SEQ ID NO: 1880831
acauuugcuugggacuaaa

SEQ ID NO: 1997161 - RNA, 19 nt, Artificial Sequence
  Description of Artificial Sequence: Synthetic oligonucleotide
  Antisense strand to SEQ ID NO: 1997160
uuuagucccaagcaaaugu

SEQ ID NO: 1997162 - RNA, 19 nt, Artificial Sequence
  Description of Artificial Sequence: Synthetic oligonucleotide
  Sense strand starting at position 1589 of SEQ ID NO: 1880831
caggcaucacuuugguaac

SEQ ID NO: 1997163 - RNA, 19 nt, Artificial Sequence
  Description of Artificial Sequence: Synthetic oligonucleotide
  Antisense strand to SEQ ID NO: 1997162
guuaccaaagugaugccug

SEQ ID NO: 1997164 - RNA, 19 nt, Artificial Sequence
  Description of Artificial Sequence: Synthetic oligonucleotide
  Sense strand starting at position 1707 of SEQ ID NO: 1880831
guuucuuucuccuuaggag

SEQ ID NO: 1997165 - RNA, 19 nt, Artificial Sequence
  Description of Artificial Sequence: Synthetic oligonucleotide
  Antisense strand to SEQ ID NO: 1997164
cuccuaaggagaaagaaac

SEQ ID NO: 1997166 - RNA, 19 nt, Artificial Sequence
  Description of Artificial Sequence: Synthetic oligonucleotide
  Sense strand starting at position 2092 of SEQ ID NO: 1880831
gcggaacucucuuuacaac

SEQ ID NO: 1997167 - RNA, 19 nt, Artificial Sequence
  Description of Artificial Sequence: Synthetic oligonucleotide
  Antisense strand to SEQ ID NO: 1997166
guuguaaagagaguuccgc

SEQ ID NO: 1997168 - RNA, 19 nt, Artificial Sequence
  Description of Artificial Sequence: Synthetic oligonucleotide
  Sense strand starting at position 2267 of SEQ ID NO: 1880831
caguuauuaggccaguacu

SEQ ID NO: 1997169 - RNA, 19 nt, Artificial Sequence
  Description of Artificial Sequence: Synthetic oligonucleotide
  Antisense strand to SEQ ID NO: 1997168
aguacuggccuaauaacug

SEQ ID NO: 1997170 - RNA, 19 nt, Artificial Sequence
  Description of Artificial Sequence: Synthetic oligonucleotide
  Sense strand starting at position 2315 of SEQ ID NO: 1880831
cuuugugcucuguuuccua

SEQ ID NO: 1997171 - RNA, 19 nt, Artificial Sequence
  Description of Artificial Sequence: Synthetic oligonucleotide
  Antisense strand to SEQ ID NO: 1997170
uaggaaacagagcacaaag

SEQ ID NO: 1997172 - RNA, 19 nt, Artificial Sequence
  Description of Artificial Sequence: Synthetic oligonucleotide
  Sense strand starting at position 2450 of SEQ ID NO: 1880831
cucugaacuccgggugaca

SEQ ID NO: 1997173 - RNA, 19 nt, Artificial Sequence
  Description of Artificial Sequence: Synthetic oligonucleotide
  Antisense strand to SEQ ID NO: 1997172
ugucacccggaguucagag

SEQ ID NO: 1997174 - RNA, 19 nt, Artificial Sequence
  Description of Artificial Sequence: Synthetic oligonucleotide
  Sense strand starting at position 2824 of SEQ ID NO: 1880831
gguggaaaggcuugauaua

SEQ ID NO: 1997175 - RNA, 19 nt, Artificial Sequence
  Description of Artificial Sequence: Synthetic oligonucleotide
  Antisense strand to SEQ ID NO: 1997174
uauaucaagccuuuccacc

SEQ ID NO: 1997176 - RNA, 19 nt, Artificial Sequence
  Description of Artificial Sequence: Synthetic oligonucleotide
  Sense strand starting at position 2896 of SEQ ID NO: 1880831
aggcucugucaccauauca

SEQ ID NO: 1997177 - RNA, 19 nt, Artificial Sequence
  Description of Artificial Sequence: Synthetic oligonucleotide
  Antisense strand to SEQ ID NO: 1997176
ugauauggugacagagccu

SEQ ID NO: 1997178 - RNA, 19 nt, Artificial Sequence
  Description of Artificial Sequence: Synthetic oligonucleotide
  Sense strand starting at position 2933 of SEQ ID NO: 1880831
gcugaagcauacuuacgaa

SEQ ID NO: 1997179 - RNA, 19 nt, Artificial Sequence
  Description of Artificial Sequence: Synthetic oligonucleotide
  Antisense strand to SEQ ID NO: 1997178
uucguaaguaugcuucagc

SEQ ID NO: 1997180 - RNA, 19 nt, Artificial Sequence
  Description of Artificial Sequence: Synthetic oligonucleotide
  Sense strand starting at position 3039 of SEQ ID NO: 1880831
gacagagcgucuccuaaga

SEQ ID NO: 1997181 - RNA, 19 nt, Artificial Sequence
  Description of Artificial Sequence: Synthetic oligonucleotide
  Antisense strand to SEQ ID NO: 1997180
ucuuaggagacgcucuguc

SEQ ID NO: 1997182 - RNA, 19 nt, Artificial Sequence
  Description of Artificial Sequence: Synthetic oligonucleotide
  Sense strand starting at position 3092 of SEQ ID NO: 1880831
gagguuuacugcucaucaa

SEQ ID NO: 1997183 - RNA, 19 nt, Artificial Sequence
  Description of Artificial Sequence: Synthetic oligonucleotide
  Antisense strand to SEQ ID NO: 1997182
uugaugagcaguaaaccuc

SEQ ID NO: 1997184 - RNA, 19 nt, Artificial Sequence
  Description of Artificial Sequence: Synthetic oligonucleotide
  Sense strand starting at position 3093 of SEQ ID NO: 1880831
agguuuacugcucaucaaa

SEQ ID NO: 1997185 - RNA, 19 nt, Artificial Sequence
  Description of Artificial Sequence: Synthetic oligonucleotide
  Antisense strand to SEQ ID NO: 1997184
uuugaugagcaguaaaccu

SEQ ID NO: 1997186 - RNA, 19 nt, Artificial Sequence
  Description of Artificial Sequence: Synthetic oligonucleotide
  Sense strand starting at position 3127 of SEQ ID NO: 1880831
ccaagacgaccuugcuuaa

SEQ ID NO: 1997187 - RNA, 19 nt, Artificial Sequence
  Description of Artificial Sequence: Synthetic oligonucleotide
  Antisense strand to SEQ ID NO: 1997186
uuaagcaaggucgucuugg

SEQ ID NO: 1997188 - RNA, 19 nt, Artificial Sequence
  Description of Artificial Sequence: Synthetic oligonucleotide
  Sense strand starting at position 3147 of SEQ ID NO: 1880831
cagacugccucuguugaua

SEQ ID NO: 1997189 - RNA, 19 nt, Artificial Sequence
  Description of Artificial Sequence: Synthetic oligonucleotide
  Antisense strand to SEQ ID NO: 1997188
uaucaacagaggcagucug

SEQ ID NO: 1997190 - RNA, 19 nt, Artificial Sequence
  Description of Artificial Sequence: Synthetic oligonucleotide
  Sense strand starting at position 3416 of SEQ ID NO: 1880831
uuauuucuaugccuaguua

SEQ ID NO: 1997191 - RNA, 19 nt, Artificial Sequence
  Description of Artificial Sequence: Synthetic oligonucleotide
  Antisense strand to SEQ ID NO: 1997190
uaacuaggcauagaaauaa

SEQ ID NO: 1997192 - RNA, 19 nt, Artificial Sequence
  Description of Artificial Sequence: Synthetic oligonucleotide
  Sense strand starting at position 3420 of SEQ ID NO: 1880831
uucuaugccuaguuagaau

SEQ ID NO: 1997193 - RNA, 19 nt, Artificial Sequence
  Description of Artificial Sequence: Synthetic oligonucleotide
  Antisense strand to SEQ ID NO: 1997192
auucuaacuaggcauagaa

SEQ ID NO: 1997194 - RNA, 19 nt, Artificial Sequence
  Description of Artificial Sequence: Synthetic oligonucleotide
  Sense strand starting at position 3449 of SEQ ID NO: 1880831
acuugugaucaauguggag

SEQ ID NO: 1997195 - RNA, 19 nt, Artificial Sequence
  Description of Artificial Sequence: Synthetic oligonucleotide
  Antisense strand to SEQ ID NO: 1997194
cuccacauugaucacaagu

SEQ ID NO: 1997196 - RNA, 19 nt, Artificial Sequence
  Description of Artificial Sequence: Synthetic oligonucleotide
  Sense strand starting at position 3453 of SEQ ID NO: 1880831
gugaucaauguggagucua

SEQ ID NO: 1997197 - RNA, 19 nt, Artificial Sequence
  Description of Artificial Sequence: Synthetic oligonucleotide
  Antisense strand to SEQ ID NO: 1997196
uagacuccacauugaucac

SEQ ID NO: 1997198 - RNA, 19 nt, Artificial Sequence
  Description of Artificial Sequence: Synthetic oligonucleotide
  Sense strand starting at position 3498 of SEQ ID NO: 1880831
gcaugaguacuguacaaag

SEQ ID NO: 1997199 - RNA, 19 nt, Artificial Sequence
  Description of Artificial Sequence: Synthetic oligonucleotide
  Antisense strand to SEQ ID NO: 1997198
cuuuguacaguacucaugc

SEQ ID NO: 1997200 - RNA, 19 nt, Artificial Sequence
  Description of Artificial Sequence: Synthetic oligonucleotide
  Sense strand starting at position 3549 of SEQ ID NO: 1880831
ccggcauuccuaggaacau

SEQ ID NO: 1997201 - RNA, 19 nt, Artificial Sequence
  Description of Artificial Sequence: Synthetic oligonucleotide
  Antisense strand to SEQ ID NO: 1997200
auguuccuaggaaugccgg

SEQ ID NO: 1997202 - RNA, 19 nt, Artificial Sequence
  Description of Artificial Sequence: Synthetic oligonucleotide
  Sense strand starting at position 3625 of SEQ ID NO: 1880831
uuggcauaauuguuaagga

SEQ ID NO: 1997203 - RNA, 19 nt, Artificial Sequence
  Description of Artificial Sequence: Synthetic oligonucleotide
  Antisense strand to SEQ ID NO: 1997202
uccuuaacaauuaugccaa

SEQ ID NO: 1997204 - RNA, 19 nt, Artificial Sequence
  Description of Artificial Sequence: Synthetic oligonucleotide
  Sense strand starting at position 3834 of SEQ ID NO: 1880831
auauguauacucugcauca

SEQ ID NO: 1997205 - RNA, 19 nt, Artificial Sequence
  Description of Artificial Sequence: Synthetic oligonucleotide
  Antisense strand to SEQ ID NO: 1997204
ugaugcagaguauacauau

SEQ ID NO: 1997206 - RNA, 19 nt, Artificial Sequence
  Description of Artificial Sequence: Synthetic oligonucleotide
  Sense strand starting at position 3836 of SEQ ID NO: 1880831
auguauacucugcaucacu

SEQ ID NO: 1997207 - RNA, 19 nt, Artificial Sequence
  Description of Artificial Sequence: Synthetic oligonucleotide
  Antisense strand to SEQ ID NO: 1997206
agugaugcagaguauacau

SEQ ID NO: 1997208 - RNA, 19 nt, Artificial Sequence
  Description of Artificial Sequence: Synthetic oligonucleotide
  Sense strand starting at position 3895 of SEQ ID NO: 1880831
acauauacuuagguauacu

SEQ ID NO: 1997209 - RNA, 19 nt, Artificial Sequence
  Description of Artificial Sequence: Synthetic oligonucleotide
  Antisense strand to SEQ ID NO: 1997208
aguauaccuaaguauaugu

SEQ ID NO: 1997210 - RNA, 19 nt, Artificial Sequence
  Description of Artificial Sequence: Synthetic oligonucleotide
  Sense strand starting at position 126 of SEQ ID NO: 1880832
cugcaugcucaauaaauga

SEQ ID NO: 1997211 - RNA, 19 nt, Artificial Sequence
  Description of Artificial Sequence: Synthetic oligonucleotide
  Antisense strand to SEQ ID NO: 1997210
ucauuuauugagcaugcag

SEQ ID NO: 1997212 - RNA, 19 nt, Artificial Sequence
  Description of Artificial Sequence: Synthetic oligonucleotide
  Sense strand starting at position 134 of SEQ ID NO: 1880832
ucaauaaaugauugcuaag

SEQ ID NO: 1997213 - RNA, 19 nt, Artificial Sequence
  Description of Artificial Sequence: Synthetic oligonucleotide
  Antisense strand to SEQ ID NO: 1997212
cuuagcaaucauuuauuga

SEQ ID NO: 1997214 - RNA, 19 nt, Artificial Sequence
  Description of Artificial Sequence: Synthetic oligonucleotide
  Sense strand starting at position 201 of SEQ ID NO: 1880832
acacuauacguguaccgaa

SEQ ID NO: 1997215 - RNA, 19 nt, Artificial Sequence
  Description of Artificial Sequence: Synthetic oligonucleotide
  Antisense strand to SEQ ID NO: 1997214
uucgguacacguauagugu

SEQ ID NO: 1997216 - RNA, 19 nt, Artificial Sequence
  Description of Artificial Sequence: Synthetic oligonucleotide
  Sense strand starting at position 228 of SEQ ID NO: 1880832
cugccauguccugagaucu

SEQ ID NO: 1997217 - RNA, 19 nt, Artificial Sequence
  Description of Artificial Sequence: Synthetic oligonucleotide
  Antisense strand to SEQ ID NO: 1997216
agaucucaggacauggcag

SEQ ID NO: 1997218 - RNA, 19 nt, Artificial Sequence
  Description of Artificial Sequence: Synthetic oligonucleotide
  Sense strand starting at position 268 of SEQ ID NO: 1880832
gaaccauuacuguggagac

SEQ ID NO: 1997219 - RNA, 19 nt, Artificial Sequence
  Description of Artificial Sequence: Synthetic oligonucleotide
  Antisense strand to SEQ ID NO: 1997218
gucuccacaguaaugguuc

SEQ ID NO: 1997220 - RNA, 19 nt, Artificial Sequence
  Description of Artificial Sequence: Synthetic oligonucleotide
  Sense strand starting at position 303 of SEQ ID NO: 1880832
ucaggagcuuggguaucau

SEQ ID NO: 1997221 - RNA, 19 nt, Artificial Sequence
  Description of Artificial Sequence: Synthetic oligonucleotide
  Antisense strand to SEQ ID NO: 1997220
augauacccaagcuccuga

SEQ ID NO: 1997222 - RNA, 19 nt, Artificial Sequence
  Description of Artificial Sequence: Synthetic oligonucleotide
  Sense strand starting at position 418 of SEQ ID NO: 1880832
cugucuuuaugccugaaag

SEQ ID NO: 1997223 - RNA, 19 nt, Artificial Sequence
  Description of Artificial Sequence: Synthetic oligonucleotide
  Antisense strand to SEQ ID NO: 1997222
cuuucaggcauaaagacag

SEQ ID NO: 1997224 - RNA, 19 nt, Artificial Sequence
  Description of Artificial Sequence: Synthetic oligonucleotide
  Sense strand starting at position 419 of SEQ ID NO: 1880832
ugucuuuaugccugaaaga

SEQ ID NO: 1997225 - RNA, 19 nt, Artificial Sequence
  Description of Artificial Sequence: Synthetic oligonucleotide
  Antisense strand to SEQ ID NO: 1997224
ucuuucaggcauaaagaca

SEQ ID NO: 1997226 - RNA, 19 nt, Artificial Sequence
  Description of Artificial Sequence: Synthetic oligonucleotide
  Sense strand starting at position 420 of SEQ ID NO: 1880832
gucuuuaugccugaaagaa

SEQ ID NO: 1997227 - RNA, 19 nt, Artificial Sequence
  Description of Artificial Sequence: Synthetic oligonucleotide
  Antisense strand to SEQ ID NO: 1997226
uucuuucaggcauaaagac

SEQ ID NO: 1997228 - RNA, 19 nt, Artificial Sequence
  Description of Artificial Sequence: Synthetic oligonucleotide
  Sense strand starting at position 504 of SEQ ID NO: 1880832
accacugacuugucagagu

SEQ ID NO: 1997229 - RNA, 19 nt, Artificial Sequence
  Description of Artificial Sequence: Synthetic oligonucleotide
  Antisense strand to SEQ ID NO: 1997228
acucugacaagucaguggu

SEQ ID NO: 1997230 - RNA, 19 nt, Artificial Sequence
  Description of Artificial Sequence: Synthetic oligonucleotide
  Sense strand starting at position 513 of SEQ ID NO: 1880832
uugucagaguuacucacuu

SEQ ID NO: 1997231 - RNA, 19 nt, Artificial Sequence
  Description of Artificial Sequence: Synthetic oligonucleotide
  Antisense strand to SEQ ID NO: 1997230
aagugaguaacucugacaa

SEQ ID NO: 1997232 - RNA, 19 nt, Artificial Sequence
  Description of Artificial Sequence: Synthetic oligonucleotide
  Sense strand starting at position 815 of SEQ ID NO: 1880832
gagugugugcuaggagaga

SEQ ID NO: 1997233 - RNA, 19 nt, Artificial Sequence
  Description of Artificial Sequence: Synthetic oligonucleotide
  Antisense strand to SEQ ID NO: 1997232
ucucuccuagcacacacuc

SEQ ID NO: 1997234 - RNA, 19 nt, Artificial Sequence
  Description of Artificial Sequence: Synthetic oligonucleotide
  Sense strand starting at position 1236 of SEQ ID NO: 1880832
uguacuccaccugagugau

SEQ ID NO: 1997235 - RNA, 19 nt, Artificial Sequence
  Description of Artificial Sequence: Synthetic oligonucleotide
  Antisense strand to SEQ ID NO: 1997234
aucacucagguggaguaca

SEQ ID NO: 1997236 - RNA, 19 nt, Artificial Sequence
  Description of Artificial Sequence: Synthetic oligonucleotide
  Sense strand starting at position 1376 of SEQ ID NO: 1880832
cuuugaguguuggccaaag

SEQ ID NO: 1997237 - RNA, 19 nt, Artificial Sequence
  Description of Artificial Sequence: Synthetic oligonucleotide
  Antisense strand to SEQ ID NO: 1997236
cuuuggccaacacucaaag

SEQ ID NO: 1997238 - RNA, 19 nt, Artificial Sequence
  Description of Artificial Sequence: Synthetic oligonucleotide
  Sense strand starting at position 1378 of SEQ ID NO: 1880832
uugaguguuggccaaaggu

SEQ ID NO: 1997239 - RNA, 19 nt, Artificial Sequence
  Description of Artificial Sequence: Synthetic oligonucleotide
  Antisense strand to SEQ ID NO: 1997238
accuuuggccaacacucaa

SEQ ID NO: 1997240 - RNA, 19 nt, Artificial Sequence
  Description of Artificial Sequence: Synthetic oligonucleotide
  Sense strand starting at position 1613 of SEQ ID NO: 1880832
ugcugaaagucaguuccau

SEQ ID NO: 1997241 - RNA, 19 nt, Artificial Sequence
  Description of Artificial Sequence: Synthetic oligonucleotide
  Antisense strand to SEQ ID NO: 1997240
auggaacugacuuucagca

SEQ ID NO: 1997242 - RNA, 19 nt, Artificial Sequence
  Description of Artificial Sequence: Synthetic oligonucleotide
  Sense strand starting at position 1688 of SEQ ID NO: 1880832
aggacuccuuauguaaaca

SEQ ID NO: 1997243 - RNA, 19 nt, Artificial Sequence
  Description of Artificial Sequence: Synthetic oligonucleotide
  Antisense strand to SEQ ID NO: 1997242
uguuuacauaaggaguccu

SEQ ID NO: 1997244 - RNA, 19 nt, Artificial Sequence
  Description of Artificial Sequence: Synthetic oligonucleotide
  Sense strand starting at position 1735 of SEQ ID NO: 1880832
gaggucucagcuugaacaa

SEQ ID NO: 1997245 - RNA, 19 nt, Artificial Sequence
  Description of Artificial Sequence: Synthetic oligonucleotide
  Antisense strand to SEQ ID NO: 1997244
uuguucaagcugagaccuc

SEQ ID NO: 1997246 - RNA, 19 nt, Artificial Sequence
  Description of Artificial Sequence: Synthetic oligonucleotide
  Sense strand starting at position 2003 of SEQ ID NO: 1880832
cuaugcagugcaugaucaa

SEQ ID NO: 1997247 - RNA, 19 nt, Artificial Sequence
  Description of Artificial Sequence: Synthetic oligonucleotide
  Antisense strand to SEQ ID NO: 1997246
uugaucaugcacugcauag

SEQ ID NO: 1997248 - RNA, 19 nt, Artificial Sequence
  Description of Artificial Sequence: Synthetic oligonucleotide
  Sense strand starting at position 2006 of SEQ ID NO: 1880832
ugcagugcaugaucaacau

SEQ ID NO: 1997249 - RNA, 19 nt, Artificial Sequence
  Description of Artificial Sequence: Synthetic oligonucleotide
  Antisense strand to SEQ ID NO: 1997248
auguugaucaugcacugca

SEQ ID NO: 1997250 - RNA, 19 nt, Artificial Sequence
  Description of Artificial Sequence: Synthetic oligonucleotide
  Sense strand starting at position 2235 of SEQ ID NO: 1880832
gggugugguggguacuuau

SEQ ID NO: 1997251 - RNA, 19 nt, Artificial Sequence
  Description of Artificial Sequence: Synthetic oligonucleotide
  Antisense strand to SEQ ID NO: 1997250
auaaguacccaccacaccc

SEQ ID NO: 1997252 - RNA, 19 nt, Artificial Sequence
  Description of Artificial Sequence: Synthetic oligonucleotide
  Sense strand starting at position 2514 of SEQ ID NO: 1880832
aagcuuguaugaguucuca

SEQ ID NO: 1997253 - RNA, 19 nt, Artificial Sequence
  Description of Artificial Sequence: Synthetic oligonucleotide
  Antisense strand to SEQ ID NO: 1997252
ugagaacucauacaagcuu

SEQ ID NO: 1997254 - RNA, 19 nt, Artificial Sequence
  Description of Artificial Sequence: Synthetic oligonucleotide
  Sense strand starting at position 2518 of SEQ ID NO: 1880832
uuguaugaguucucagacu

SEQ ID NO: 1997255 - RNA, 19 nt, Artificial Sequence
  Description of Artificial Sequence: Synthetic oligonucleotide
  Antisense strand to SEQ ID NO: 1997254
agucugagaacucauacaa

SEQ ID NO: 1997256 - RNA, 19 nt, Artificial Sequence
  Description of Artificial Sequence: Synthetic oligonucleotide
  Sense strand starting at position 2524 of SEQ ID NO: 1880832
gaguucucagacugccuua

SEQ ID NO: 1997257 - RNA, 19 nt, Artificial Sequence
  Description of Artificial Sequence: Synthetic oligonucleotide
  Antisense strand to SEQ ID NO: 1997256
uaaggcagucugagaacuc

SEQ ID NO: 1997258 - RNA, 19 nt, Artificial Sequence
  Description of Artificial Sequence: Synthetic oligonucleotide
  Sense strand starting at position 2633 of SEQ ID NO: 1880832
acugauccuuccguaagau

SEQ ID NO: 1997259 - RNA, 19 nt, Artificial Sequence
  Description of Artificial Sequence: Synthetic oligonucleotide
  Antisense strand to SEQ ID NO: 1997258
aucuuacggaaggaucagu

SEQ ID NO: 1997260 - RNA, 19 nt, Artificial Sequence
  Description of Artificial Sequence: Synthetic oligonucleotide
  Sense strand starting at position 2634 of SEQ ID NO: 1880832
cugauccuuccguaagauc

SEQ ID NO: 1997261 - RNA, 19 nt, Artificial Sequence
  Description of Artificial Sequence: Synthetic oligonucleotide
  Antisense strand to SEQ ID NO: 1997260
gaucuuacggaaggaucag

SEQ ID NO: 1997262 - RNA, 19 nt, Artificial Sequence
  Description of Artificial Sequence: Synthetic oligonucleotide
  Sense strand starting at position 2643 of SEQ ID NO: 1880832
ccguaagaucaagaaagcu

SEQ ID NO: 1997263 - RNA, 19 nt, Artificial Sequence
  Description of Artificial Sequence: Synthetic oligonucleotide
  Antisense strand to SEQ ID NO: 1997262
agcuuucuugaucuuacgg

SEQ ID NO: 1997264 - RNA, 19 nt, Artificial Sequence
  Description of Artificial Sequence: Synthetic oligonucleotide
  Sense strand starting at position 2651 of SEQ ID NO: 1880832
ucaagaaagcuccaguaac

SEQ ID NO: 1997265 - RNA, 19 nt, Artificial Sequence
  Description of Artificial Sequence: Synthetic oligonucleotide
  Antisense strand to SEQ ID NO: 1997264
guuacuggagcuuucuuga

SEQ ID NO: 1997266 - RNA, 19 nt, Artificial Sequence
  Description of Artificial Sequence: Synthetic oligonucleotide
  Sense strand starting at position 2758 of SEQ ID NO: 1880832
uggguaggcuacuucuuaa

SEQ ID NO: 1997267 - RNA, 19 nt, Artificial Sequence
  Description of Artificial Sequence: Synthetic oligonucleotide
  Antisense strand to SEQ ID NO: 1997266
uuaagaaguagccuaccca

SEQ ID NO: 1997268 - RNA, 19 nt, Artificial Sequence
  Description of Artificial Sequence: Synthetic oligonucleotide
  Sense strand starting at position 2761 of SEQ ID NO: 1880832
guaggcuacuucuuaaauu

SEQ ID NO: 1997269 - RNA, 19 nt, Artificial Sequence
  Description of Artificial Sequence: Synthetic oligonucleotide
  Antisense strand to SEQ ID NO: 1997268
aauuuaagaaguagccuac

SEQ ID NO: 1997270 - RNA, 19 nt, Artificial Sequence
  Description of Artificial Sequence: Synthetic oligonucleotide
  Sense strand starting at position 3206 of SEQ ID NO: 1880832
uguucauaagugggauaug

SEQ ID NO: 1997271 - RNA, 19 nt, Artificial Sequence
  Description of Artificial Sequence: Synthetic oligonucleotide
  Antisense strand to SEQ ID NO: 1997270
cauaucccacuuaugaaca

SEQ ID NO: 1997272 - RNA, 19 nt, Artificial Sequence
  Description of Artificial Sequence: Synthetic oligonucleotide
  Sense strand starting at position 3338 of SEQ ID NO: 1880832
ggaacauguuaaucuuuac

SEQ ID NO: 1997273 - RNA, 19 nt, Artificial Sequence
  Description of Artificial Sequence: Synthetic oligonucleotide
  Antisense strand to SEQ ID NO: 1997272
guaaagauuaacauguucc

SEQ ID NO: 1997274 - RNA, 19 nt, Artificial Sequence
  Description of Artificial Sequence: Synthetic oligonucleotide
  Sense strand starting at position 3480 of SEQ ID NO: 1880832
ucuguaacaucugugaaca

SEQ ID NO: 1997275 - RNA, 19 nt, Artificial Sequence
  Description of Artificial Sequence: Synthetic oligonucleotide
  Antisense strand to SEQ ID NO: 1997274
uguucacagauguuacaga

SEQ ID NO: 1997276 - RNA, 19 nt, Artificial Sequence
  Description of Artificial Sequence: Synthetic oligonucleotide
  Sense strand starting at position 3481 of SEQ ID NO: 1880832
cuguaacaucugugaacag

SEQ ID NO: 1997277 - RNA, 19 nt, Artificial Sequence
  Description of Artificial Sequence: Synthetic oligonucleotide
  Antisense strand to SEQ ID NO: 1997276
cuguucacagauguuacag

SEQ ID NO: 1997278 - RNA, 19 nt, Artificial Sequence
  Description of Artificial Sequence: Synthetic oligonucleotide
  Sense strand starting at position 3497 of SEQ ID NO: 1880832
caggaaacauccuugugcu

SEQ ID NO: 1997279 - RNA, 19 nt, Artificial Sequence
  Description of Artificial Sequence: Synthetic oligonucleotide
  Antisense strand to SEQ ID NO: 1997278
agcacaaggauguuuccug

SEQ ID NO: 1997280 - RNA, 19 nt, Artificial Sequence
  Description of Artificial Sequence: Synthetic oligonucleotide
  Sense strand starting at position 3498 of SEQ ID NO: 1880832
aggaaacauccuugugcua

SEQ ID NO: 1997281 - RNA, 19 nt, Artificial Sequence
  Description of Artificial Sequence: Synthetic oligonucleotide
  Antisense strand to SEQ ID NO: 1997280
uagcacaaggauguuuccu

SEQ ID NO: 1997282 - RNA, 19 nt, Artificial Sequence
  Description of Artificial Sequence: Synthetic oligonucleotide
  Sense strand starting at position 3534 of SEQ ID NO: 1880832
caagaugaaugggaucaaa

SEQ ID NO: 1997283 - RNA, 19 nt, Artificial Sequence
  Description of Artificial Sequence: Synthetic oligonucleotide
  Antisense strand to SEQ ID NO: 1997282
uuugaucccauucaucuug

SEQ ID NO: 1997284 - RNA, 19 nt, Artificial Sequence
  Description of Artificial Sequence: Synthetic oligonucleotide
  Sense strand starting at position 3544 of SEQ ID NO: 1880832
gggaucaaaucucuuccuu

SEQ ID NO: 1997285 - RNA, 19 nt, Artificial Sequence
  Description of Artificial Sequence: Synthetic oligonucleotide
  Antisense strand to SEQ ID NO: 1997284
aaggaagagauuugauccc

SEQ ID NO: 1997286 - RNA, 19 nt, Artificial Sequence
  Description of Artificial Sequence: Synthetic oligonucleotide
  Sense strand starting at position 3577 of SEQ ID NO: 1880832
ucuuuaagagucugucaca

SEQ ID NO: 1997287 - RNA, 19 nt, Artificial Sequence
  Description of Artificial Sequence: Synthetic oligonucleotide
  Antisense strand to SEQ ID NO: 1997286
ugugacagacucuuaaaga

SEQ ID NO: 1997288 - RNA, 19 nt, Artificial Sequence
  Description of Artificial Sequence: Synthetic oligonucleotide
  Sense strand starting at position 3640 of SEQ ID NO: 1880832
uugacuuauuuccaggaau

SEQ ID NO: 1997289 - RNA, 19 nt, Artificial Sequence
  Description of Artificial Sequence: Synthetic oligonucleotide
  Antisense strand to SEQ ID NO: 1997288
auuccuggaaauaagucaa

SEQ ID NO: 1997290 - RNA, 19 nt, Artificial Sequence
  Description of Artificial Sequence: Synthetic oligonucleotide
  Sense strand starting at position 137 of SEQ ID NO: 1880833
gaaugaguugaucacagcu

SEQ ID NO: 1997291 - RNA, 19 nt, Artificial Sequence
  Description of Artificial Sequence: Synthetic oligonucleotide
  Antisense strand to SEQ ID NO: 1997290
agcugugaucaacucauuc

SEQ ID NO: 1997292 - RNA, 19 nt, Artificial Sequence
  Description of Artificial Sequence: Synthetic oligonucleotide
  Sense strand starting at position 231 of SEQ ID NO: 1880833
aguacucauuuguacagga

SEQ ID NO: 1997293 - RNA, 19 nt, Artificial Sequence
  Description of Artificial Sequence: Synthetic oligonucleotide
  Antisense strand to SEQ ID NO: 1997292
uccuguacaaaugaguacu

SEQ ID NO: 1997294 - RNA, 19 nt, Artificial Sequence
  Description of Artificial Sequence: Synthetic oligonucleotide
  Sense strand starting at position 267 of SEQ ID NO: 1880833
ggcagcuugaaaugaaagu

SEQ ID NO: 1997295 - RNA, 19 nt, Artificial Sequence
  Description of Artificial Sequence: Synthetic oligonucleotide
  Antisense strand to SEQ ID NO: 1997294
acuuucauuucaagcugcc

SEQ ID NO: 1997296 - RNA, 19 nt, Artificial Sequence
  Description of Artificial Sequence: Synthetic oligonucleotide
  Sense strand starting at position 268 of SEQ ID NO: 1880833
gcagcuugaaaugaaaguu

SEQ ID NO: 1997297 - RNA, 19 nt, Artificial Sequence
  Description of Artificial Sequence: Synthetic oligonucleotide
  Antisense strand to SEQ ID NO: 1997296
aacuuucauuucaagcugc

SEQ ID NO: 1997298 - RNA, 19 nt, Artificial Sequence
  Description of Artificial Sequence: Synthetic oligonucleotide
  Sense strand starting at position 364 of SEQ ID NO: 1880833
cugcauuucccaugaguua

SEQ ID NO: 1997299 - RNA, 19 nt, Artificial Sequence
  Description of Artificial Sequence: Synthetic oligonucleotide
  Antisense strand to SEQ ID NO: 1997298
uaacucaugggaaaugcag

SEQ ID NO: 1997300 - RNA, 19 nt, Artificial Sequence
  Description of Artificial Sequence: Synthetic oligonucleotide
  Sense strand starting at position 438 of SEQ ID NO: 1880833
gaugucauccuauaggcaa

SEQ ID NO: 1997301 - RNA, 19 nt, Artificial Sequence
  Description of Artificial Sequence: Synthetic oligonucleotide
  Antisense strand to SEQ ID NO: 1997300
uugccuauaggaugacauc

SEQ ID NO: 1997302 - RNA, 19 nt, Artificial Sequence
  Description of Artificial Sequence: Synthetic oligonucleotide
  Sense strand starting at position 441 of SEQ ID NO: 1880833
gucauccuauaggcaaaua

SEQ ID NO: 1997303 - RNA, 19 nt, Artificial Sequence
  Description of Artificial Sequence: Synthetic oligonucleotide
  Antisense strand to SEQ ID NO: 1997302
uauuugccuauaggaugac

SEQ ID NO: 1997304 - RNA, 19 nt, Artificial Sequence
  Description of Artificial Sequence: Synthetic oligonucleotide
  Sense strand starting at position 471 of SEQ ID NO: 1880833
uaaagagauugcucuguca

SEQ ID NO: 1997305 - RNA, 19 nt, Artificial Sequence
  Description of Artificial Sequence: Synthetic oligonucleotide
  Antisense strand to SEQ ID NO: 1997304
ugacagagcaaucucuuua

SEQ ID NO: 1997306 - RNA, 19 nt, Artificial Sequence
  Description of Artificial Sequence: Synthetic oligonucleotide
  Sense strand starting at position 473 of SEQ ID NO: 1880833
aagagauugcucugucaac

SEQ ID NO: 1997307 - RNA, 19 nt, Artificial Sequence
  Description of Artificial Sequence: Synthetic oligonucleotide
  Antisense strand to SEQ ID NO: 1997306
guugacagagcaaucucuu

SEQ ID NO: 1997308 - RNA, 19 nt, Artificial Sequence
  Description of Artificial Sequence: Synthetic oligonucleotide
  Sense strand starting at position 474 of SEQ ID NO: 1880833
agagauugcucugucaaca

SEQ ID NO: 1997309 - RNA, 19 nt, Artificial Sequence
  Description of Artificial Sequence: Synthetic oligonucleotide
  Antisense strand to SEQ ID NO: 1997308
uguugacagagcaaucucu

SEQ ID NO: 1997310 - RNA, 19 nt, Artificial Sequence
  Description of Artificial Sequence: Synthetic oligonucleotide
  Sense strand starting at position 479 of SEQ ID NO: 1880833
uugcucugucaacagaacu

SEQ ID NO: 1997311 - RNA, 19 nt, Artificial Sequence
  Description of Artificial Sequence: Synthetic oligonucleotide
  Antisense strand to SEQ ID NO: 1997310
aguucuguugacagagcaa

SEQ ID NO: 1997312 - RNA, 19 nt, Artificial Sequence
  Description of Artificial Sequence: Synthetic oligonucleotide
  Sense strand starting at position 502 of SEQ ID NO: 1880833
uguucugaggcuuacacaa

SEQ ID NO: 1997313 - RNA, 19 nt, Artificial Sequence
  Description of Artificial Sequence: Synthetic oligonucleotide
  Antisense strand to SEQ ID NO: 1997312
uuguguaagccucagaaca

SEQ ID NO: 1997314 - RNA, 19 nt, Artificial Sequence
  Description of Artificial Sequence: Synthetic oligonucleotide
  Sense strand starting at position 574 of SEQ ID NO: 1880833
aaagaugguuguguuauaa

SEQ ID NO: 1997315 - RNA, 19 nt, Artificial Sequence
  Description of Artificial Sequence: Synthetic oligonucleotide
  Antisense strand to SEQ ID NO: 1997314
uuauaacacaaccaucuuu

SEQ ID NO: 1997316 - RNA, 19 nt, Artificial Sequence
  Description of Artificial Sequence: Synthetic oligonucleotide
  Sense strand starting at position 774 of SEQ ID NO: 1880833
gaugauguugggugaccua

SEQ ID NO: 1997317 - RNA, 19 nt, Artificial Sequence
  Description of Artificial Sequence: Synthetic oligonucleotide
  Antisense strand to SEQ ID NO: 1997316
uaggucacccaacaucauc

SEQ ID NO: 1997318 - RNA, 19 nt, Artificial Sequence
  Description of Artificial Sequence: Synthetic oligonucleotide
  Sense strand starting at position 895 of SEQ ID NO: 1880833
agucuuagagcacaaacua

SEQ ID NO: 1997319 - RNA, 19 nt, Artificial Sequence
  Description of Artificial Sequence: Synthetic oligonucleotide
  Antisense strand to SEQ ID NO: 1997318
uaguuugugcucuaagacu

SEQ ID NO: 1997320 - RNA, 19 nt, Artificial Sequence
  Description of Artificial Sequence: Synthetic oligonucleotide
  Sense strand starting at position 914 of SEQ ID NO: 1880833
ccacuauuaugaguaucau

SEQ ID NO: 1997321 - RNA, 19 nt, Artificial Sequence
  Description of Artificial Sequence: Synthetic oligonucleotide
  Antisense strand to SEQ ID NO: 1997320
augauacucauaauagugg

SEQ ID NO: 1997322 - RNA, 19 nt, Artificial Sequence
  Description of Artificial Sequence: Synthetic oligonucleotide
  Sense strand starting at position 1227 of SEQ ID NO: 1880833
ccaauauucugcuuugaga

SEQ ID NO: 1997323 - RNA, 19 nt, Artificial Sequence
  Description of Artificial Sequence: Synthetic oligonucleotide
  Antisense strand to SEQ ID NO: 1997322
ucucaaagcagaauauugg

SEQ ID NO: 1997324 - RNA, 19 nt, Artificial Sequence
  Description of Artificial Sequence: Synthetic oligonucleotide
  Sense strand starting at position 1389 of SEQ ID NO: 1880833
ugguaacugucuucugaaa

SEQ ID NO: 1997325 - RNA, 19 nt, Artificial Sequence
  Description of Artificial Sequence: Synthetic oligonucleotide
  Antisense strand to SEQ ID NO: 1997324
uuucagaagacaguuacca

SEQ ID NO: 1997326 - RNA, 19 nt, Artificial Sequence
  Description of Artificial Sequence: Synthetic oligonucleotide
  Sense strand starting at position 1455 of SEQ ID NO: 1880833
gcagaagucuguccuagga

SEQ ID NO: 1997327 - RNA, 19 nt, Artificial Sequence
  Description of Artificial Sequence: Synthetic oligonucleotide
  Antisense strand to SEQ ID NO: 1997326
uccuaggacagacuucugc

SEQ ID NO: 1997328 - RNA, 19 nt, Artificial Sequence
  Description of Artificial Sequence: Synthetic oligonucleotide
  Sense strand starting at position 1509 of SEQ ID NO: 1880833
cucuuucuuccgcaaggaa

SEQ ID NO: 1997329 - RNA, 19 nt, Artificial Sequence
  Description of Artificial Sequence: Synthetic oligonucleotide
  Antisense strand to SEQ ID NO: 1997328
uuccuugcggaagaaagag

SEQ ID NO: 1997330 - RNA, 19 nt, Artificial Sequence
  Description of Artificial Sequence: Synthetic oligonucleotide
  Sense strand starting at position 1613 of SEQ ID NO: 1880833
aggguacuccugugacuaa

SEQ ID NO: 1997331 - RNA, 19 nt, Artificial Sequence
  Description of Artificial Sequence: Synthetic oligonucleotide
  Antisense strand to SEQ ID NO: 1997330
uuagucacaggaguacccu

SEQ ID NO: 1997332 - RNA, 19 nt, Artificial Sequence
  Description of Artificial Sequence: Synthetic oligonucleotide
  Sense strand starting at position 2943 of SEQ ID NO: 1880833
ucuccuugacucugagaaa

SEQ ID NO: 1997333 - RNA, 19 nt, Artificial Sequence
  Description of Artificial Sequence: Synthetic oligonucleotide
  Antisense strand to SEQ ID NO: 1997332
uuucucagagucaaggaga

SEQ ID NO: 1997334 - RNA, 19 nt, Artificial Sequence
  Description of Artificial Sequence: Synthetic oligonucleotide
  Sense strand starting at position 2968 of SEQ ID NO: 1880833
gcugaaauccaguauaacu

SEQ ID NO: 1997335 - RNA, 19 nt, Artificial Sequence
  Description of Artificial Sequence: Synthetic oligonucleotide
  Antisense strand to SEQ ID NO: 1997334
aguuauacuggauuucagc

SEQ ID NO: 1997336 - RNA, 19 nt, Artificial Sequence
  Description of Artificial Sequence: Synthetic oligonucleotide
  Sense strand starting at position 2995 of SEQ ID NO: 1880833
auguauucuccuuagcuca

SEQ ID NO: 1997337 - RNA, 19 nt, Artificial Sequence
  Description of Artificial Sequence: Synthetic oligonucleotide
  Antisense strand to SEQ ID NO: 1997336
ugagcuaaggagaauacau

SEQ ID NO: 1997338 - RNA, 19 nt, Artificial Sequence
  Description of Artificial Sequence: Synthetic oligonucleotide
  Sense strand starting at position 3052 of SEQ ID NO: 1880833
gggauacuauuagugguuu

SEQ ID NO: 1997339 - RNA, 19 nt, Artificial Sequence
  Description of Artificial Sequence: Synthetic oligonucleotide
  Antisense strand to SEQ ID NO: 1997338
aaaccacuaauaguauccc

SEQ ID NO: 1997340 - RNA, 19 nt, Artificial Sequence
  Description of Artificial Sequence: Synthetic oligonucleotide
  Sense strand starting at position 3058 of SEQ ID NO: 1880833
cuauuagugguuuacuguu

SEQ ID NO: 1997341 - RNA, 19 nt, Artificial Sequence
  Description of Artificial Sequence: Synthetic oligonucleotide
  Antisense strand to SEQ ID NO: 1997340
aacaguaaaccacuaauag

SEQ ID NO: 1997342 - RNA, 19 nt, Artificial Sequence
  Description of Artificial Sequence: Synthetic oligonucleotide
  Sense strand starting at position 3097 of SEQ ID NO: 1880833
ggaauacuuuccuuggcua

SEQ ID NO: 1997343 - RNA, 19 nt, Artificial Sequence
  Description of Artificial Sequence: Synthetic oligonucleotide
  Antisense strand to SEQ ID NO: 1997342
uagccaaggaaaguauucc

SEQ ID NO: 1997344 - RNA, 19 nt, Artificial Sequence
  Description of Artificial Sequence: Synthetic oligonucleotide
  Sense strand starting at position 3267 of SEQ ID NO: 1880833
agaagaauaucugucucau

SEQ ID NO: 1997345 - RNA, 19 nt, Artificial Sequence
  Description of Artificial Sequence: Synthetic oligonucleotide
  Antisense strand to SEQ ID NO: 1997344
augagacagauauucuucu

SEQ ID NO: 1997346 - RNA, 19 nt, Artificial Sequence
  Description of Artificial Sequence: Synthetic oligonucleotide
  Sense strand starting at position 3287 of SEQ ID NO: 1880833
ccaacaucuuauguuguau

SEQ ID NO: 1997347 - RNA, 19 nt, Artificial Sequence
  Description of Artificial Sequence: Synthetic oligonucleotide
  Antisense strand to SEQ ID NO: 1997346
auacaacauaagauguugg

SEQ ID NO: 1997348 - RNA, 19 nt, Artificial Sequence
  Description of Artificial Sequence: Synthetic oligonucleotide
  Sense strand starting at position 3347 of SEQ ID NO: 1880833
gcuguacaaugacuguaaa

SEQ ID NO: 1997349 - RNA, 19 nt, Artificial Sequence
  Description of Artificial Sequence: Synthetic oligonucleotide
  Antisense strand to SEQ ID NO: 1997348
uuuacagucauuguacagc

SEQ ID NO: 1997350 - RNA, 19 nt, Artificial Sequence
  Description of Artificial Sequence: Synthetic oligonucleotide
  Sense strand starting at position 3359 of SEQ ID NO: 1880833
cuguaaacagccuaugauu

SEQ ID NO: 1997351 - RNA, 19 nt, Artificial Sequence
  Description of Artificial Sequence: Synthetic oligonucleotide
  Antisense strand to SEQ ID NO: 1997350
aaucauaggcuguuuacag

SEQ ID NO: 1997352 - RNA, 19 nt, Artificial Sequence
  Description of Artificial Sequence: Synthetic oligonucleotide
  Sense strand starting at position 3433 of SEQ ID NO: 1880833
uacuaagacuuggaaggaa

SEQ ID NO: 1997353 - RNA, 19 nt, Artificial Sequence
  Description of Artificial Sequence: Synthetic oligonucleotide
  Antisense strand to SEQ ID NO: 1997352
uuccuuccaagucuuagua

SEQ ID NO: 1997354 - RNA, 19 nt, Artificial Sequence
  Description of Artificial Sequence: Synthetic oligonucleotide
  Sense strand starting at position 3585 of SEQ ID NO: 1880833
uuugguuggccucauacau

SEQ ID NO: 1997355 - RNA, 19 nt, Artificial Sequence
  Description of Artificial Sequence: Synthetic oligonucleotide
  Antisense strand to SEQ ID NO: 1997354
auguaugaggccaaccaaa

SEQ ID NO: 1997356 - RNA, 19 nt, Artificial Sequence
  Description of Artificial Sequence: Synthetic oligonucleotide
  Sense strand starting at position 3692 of SEQ ID NO: 1880833
aaccauggugagugauacu

SEQ ID NO: 1997357 - RNA, 19 nt, Artificial Sequence
  Description of Artificial Sequence: Synthetic oligonucleotide
  Antisense strand to SEQ ID NO: 1997356
aguaucacucaccaugguu

SEQ ID NO: 1997358 - RNA, 19 nt, Artificial Sequence
  Description of Artificial Sequence: Synthetic oligonucleotide
  Sense strand starting at position 3708 of SEQ ID NO: 1880833
acugcaaacucccuggaau

SEQ ID NO: 1997359 - RNA, 19 nt, Artificial Sequence
  Description of Artificial Sequence: Synthetic oligonucleotide
  Antisense strand to SEQ ID NO: 1997358
auuccagggaguuugcagu

SEQ ID NO: 1997360 - RNA, 19 nt, Artificial Sequence
  Description of Artificial Sequence: Synthetic oligonucleotide
  Sense strand starting at position 3709 of SEQ ID NO: 1880833
cugcaaacucccuggaauc

SEQ ID NO: 1997361 - RNA, 19 nt, Artificial Sequence
  Description of Artificial Sequence: Synthetic oligonucleotide
  Antisense strand to SEQ ID NO: 1997360
gauuccagggaguuugcag

SEQ ID NO: 1997362 - RNA, 19 nt, Artificial Sequence
  Description of Artificial Sequence: Synthetic oligonucleotide
  Sense strand starting at position 3738 of SEQ ID NO: 1880833
ccguuuguucaguauuugu

SEQ ID NO: 1997363 - RNA, 19 nt, Artificial Sequence
  Description of Artificial Sequence: Synthetic oligonucleotide
  Antisense strand to SEQ ID NO: 1997362
acaaauacugaacaaacgg

SEQ ID NO: 1997364 - RNA, 19 nt, Artificial Sequence
  Description of Artificial Sequence: Synthetic oligonucleotide
  Sense strand starting at position 3917 of SEQ ID NO: 1880833
ccagcuaauccaggaguaa

SEQ ID NO: 1997365 - RNA, 19 nt, Artificial Sequence
  Description of Artificial Sequence: Synthetic oligonucleotide
  Antisense strand to SEQ ID NO: 1997364
uuacuccuggauuagcugg

SEQ ID NO: 1997366 - RNA, 19 nt, Artificial Sequence
  Description of Artificial Sequence: Synthetic oligonucleotide
  Sense strand starting at position 3918 of SEQ ID NO: 1880833
cagcuaauccaggaguaau

SEQ ID NO: 1997367 - RNA, 19 nt, Artificial Sequence
  Description of Artificial Sequence: Synthetic oligonucleotide
  Antisense strand to SEQ ID NO: 1997366
auuacuccuggauuagcug

SEQ ID NO: 1997368 - RNA, 19 nt, Artificial Sequence
  Description of Artificial Sequence: Synthetic oligonucleotide
  Sense strand starting at position 3928 of SEQ ID NO: 1880833
aggaguaauacacaguugu

SEQ ID NO: 1997369 - RNA, 19 nt, Artificial Sequence
  Description of Artificial Sequence: Synthetic oligonucleotide
  Antisense strand to SEQ ID NO: 1997368
acaacuguguauuacuccu

SEQ ID NO: 1997370 - RNA, 19 nt, Artificial Sequence
  Description of Artificial Sequence: Synthetic oligonucleotide
  Sense strand starting at position 147 of SEQ ID NO: 1880834
gugaaagaagucugacaug

SEQ ID NO: 1997371 - RNA, 19 nt, Artificial Sequence
  Description of Artificial Sequence: Synthetic oligonucleotide
  Antisense strand to SEQ ID NO: 1997370
caugucagacuucuuucac

SEQ ID NO: 1997372 - RNA, 19 nt, Artificial Sequence
  Description of Artificial Sequence: Synthetic oligonucleotide
  Sense strand starting at position 307 of SEQ ID NO: 1880834
gguucuacagauuaugugu

SEQ ID NO: 1997373 - RNA, 19 nt, Artificial Sequence
  Description of Artificial Sequence: Synthetic oligonucleotide
  Antisense strand to SEQ ID NO: 1997372
acacauaaucuguagaacc

SEQ ID NO: 1997374 - RNA, 19 nt, Artificial Sequence
  Description of Artificial Sequence: Synthetic oligonucleotide
  Sense strand starting at position 310 of SEQ ID NO: 1880834
ucuacagauuauguguuaa

SEQ ID NO: 1997375 - RNA, 19 nt, Artificial Sequence
  Description of Artificial Sequence: Synthetic oligonucleotide
  Antisense strand to SEQ ID NO: 1997374
uuaacacauaaucuguaga

SEQ ID NO: 1997376 - RNA, 19 nt, Artificial Sequence
  Description of Artificial Sequence: Synthetic oligonucleotide
  Sense strand starting at position 359 of SEQ ID NO: 1880834
ucucuuguugagggaagga

SEQ ID NO: 1997377 - RNA, 19 nt, Artificial Sequence
  Description of Artificial Sequence: Synthetic oligonucleotide
  Antisense strand to SEQ ID NO: 1997376
uccuucccucaacaagaga

SEQ ID NO: 1997378 - RNA, 19 nt, Artificial Sequence
  Description of Artificial Sequence: Synthetic oligonucleotide
  Sense strand starting at position 380 of SEQ ID NO: 1880834
agucuaagacauuaagcuu

SEQ ID NO: 1997379 - RNA, 19 nt, Artificial Sequence
  Description of Artificial Sequence: Synthetic oligonucleotide
  Antisense strand to SEQ ID NO: 1997378
aagcuuaaugucuuagacu

SEQ ID NO: 1997380 - RNA, 19 nt, Artificial Sequence
  Description of Artificial Sequence: Synthetic oligonucleotide
  Sense strand starting at position 736 of SEQ ID NO: 1880834
ccaguaacucugggaaagu

SEQ ID NO: 1997381 - RNA, 19 nt, Artificial Sequence
  Description of Artificial Sequence: Synthetic oligonucleotide
  Antisense strand to SEQ ID NO: 1997380
acuuucccagaguuacugg

SEQ ID NO: 1997382 - RNA, 19 nt, Artificial Sequence
  Description of Artificial Sequence: Synthetic oligonucleotide
  Sense strand starting at position 798 of SEQ ID NO: 1880834
ccagauguucucgaaacuu

SEQ ID NO: 1997383 - RNA, 19 nt, Artificial Sequence
  Description of Artificial Sequence: Synthetic oligonucleotide
  Antisense strand to SEQ ID NO: 1997382
aaguuucgagaacaucugg

SEQ ID NO: 1997384 - RNA, 19 nt, Artificial Sequence
  Description of Artificial Sequence: Synthetic oligonucleotide
  Sense strand starting at position 897 of SEQ ID NO: 1880834
caggauuguccuggaauuc

SEQ ID NO: 1997385 - RNA, 19 nt, Artificial Sequence
  Description of Artificial Sequence: Synthetic oligonucleotide
  Antisense strand to SEQ ID NO: 1997384
gaauuccaggacaauccug

SEQ ID NO: 1997386 - RNA, 19 nt, Artificial Sequence
  Description of Artificial Sequence: Synthetic oligonucleotide
  Sense strand starting at position 925 of SEQ ID NO: 1880834
uggauccagucuguuaaau

SEQ ID NO: 1997387 - RNA, 19 nt, Artificial Sequence
  Description of Artificial Sequence: Synthetic oligonucleotide
  Antisense strand to SEQ ID NO: 1997386
auuuaacagacuggaucca

SEQ ID NO: 1997388 - RNA, 19 nt, Artificial Sequence
  Description of Artificial Sequence: Synthetic oligonucleotide
  Sense strand starting at position 1212 of SEQ ID NO: 1880834
uuaaucugugguuagacuu

SEQ ID NO: 1997389 - RNA, 19 nt, Artificial Sequence
  Description of Artificial Sequence: Synthetic oligonucleotide
  Antisense strand to SEQ ID NO: 1997388
aagucuaaccacagauuaa

SEQ ID NO: 1997390 - RNA, 19 nt, Artificial Sequence
  Description of Artificial Sequence: Synthetic oligonucleotide
  Sense strand starting at position 1218 of SEQ ID NO: 1880834
ugugguuagacuuaaucug

SEQ ID NO: 1997391 - RNA, 19 nt, Artificial Sequence
  Description of Artificial Sequence: Synthetic oligonucleotide
  Antisense strand to SEQ ID NO: 1997390
cagauuaagucuaaccaca

SEQ ID NO: 1997392 - RNA, 19 nt, Artificial Sequence
  Description of Artificial Sequence: Synthetic oligonucleotide
  Sense strand starting at position 1351 of SEQ ID NO: 1880834
gucauauaaggucacucau

SEQ ID NO: 1997393 - RNA, 19 nt, Artificial Sequence
  Description of Artificial Sequence: Synthetic oligonucleotide
  Antisense strand to SEQ ID NO: 1997392
augagugaccuuauaugac

SEQ ID NO: 1997394 - RNA, 19 nt, Artificial Sequence
  Description of Artificial Sequence: Synthetic oligonucleotide
  Sense strand starting at position 1521 of SEQ ID NO: 1880834
gaggaugaccucugguuaa

SEQ ID NO: 1997395 - RNA, 19 nt, Artificial Sequence
  Description of Artificial Sequence: Synthetic oligonucleotide
  Antisense strand to SEQ ID NO: 1997394
uuaaccagaggucauccuc

SEQ ID NO: 1997396 - RNA, 19 nt, Artificial Sequence
  Description of Artificial Sequence: Synthetic oligonucleotide
  Sense strand starting at position 1706 of SEQ ID NO: 1880834
uugagaugaaucugaugca

SEQ ID NO: 1997397 - RNA, 19 nt, Artificial Sequence
  Description of Artificial Sequence: Synthetic oligonucleotide
  Antisense strand to SEQ ID NO: 1997396
ugcaucagauucaucucaa

SEQ ID NO: 1997398 - RNA, 19 nt, Artificial Sequence
  Description of Artificial Sequence: Synthetic oligonucleotide
  Sense strand starting at position 1738 of SEQ ID NO: 1880834
aaagaugccuuggcugaua

SEQ ID NO: 1997399 - RNA, 19 nt, Artificial Sequence
  Description of Artificial Sequence: Synthetic oligonucleotide
  Antisense strand to SEQ ID NO: 1997398
uaucagccaaggcaucuuu

SEQ ID NO: 1997400 - RNA, 19 nt, Artificial Sequence
  Description of Artificial Sequence: Synthetic oligonucleotide
  Sense strand starting at position 1828 of SEQ ID NO: 1880834
aucugauagccugaguaug

SEQ ID NO: 1997401 - RNA, 19 nt, Artificial Sequence
  Description of Artificial Sequence: Synthetic oligonucleotide
  Antisense strand to SEQ ID NO: 1997400
cauacucaggcuaucagau

SEQ ID NO: 1997402 - RNA, 19 nt, Artificial Sequence
  Description of Artificial Sequence: Synthetic oligonucleotide
  Sense strand starting at position 1862 of SEQ ID NO: 1880834
acaggaguugcugaggcaa

SEQ ID NO: 1997403 - RNA, 19 nt, Artificial Sequence
  Description of Artificial Sequence: Synthetic oligonucleotide
  Antisense strand to SEQ ID NO: 1997402
uugccucagcaacuccugu

SEQ ID NO: 1997404 - RNA, 19 nt, Artificial Sequence
  Description of Artificial Sequence: Synthetic oligonucleotide
  Sense strand starting at position 1897 of SEQ ID NO: 1880834
agcacuucuccagaagauc

SEQ ID NO: 1997405 - RNA, 19 nt, Artificial Sequence
  Description of Artificial Sequence: Synthetic oligonucleotide
  Antisense strand to SEQ ID NO: 1997404
gaucuucuggagaagugcu

SEQ ID NO: 1997406 - RNA, 19 nt, Artificial Sequence
  Description of Artificial Sequence: Synthetic oligonucleotide
  Sense strand starting at position 2010 of SEQ ID NO: 1880834
aguucuaaagcuugaaauc

SEQ ID NO: 1997407 - RNA, 19 nt, Artificial Sequence
  Description of Artificial Sequence: Synthetic oligonucleotide
  Antisense strand to SEQ ID NO: 1997406
gauuucaagcuuuagaacu

SEQ ID NO: 1997408 - RNA, 19 nt, Artificial Sequence
  Description of Artificial Sequence: Synthetic oligonucleotide
  Sense strand starting at position 2011 of SEQ ID NO: 1880834
guucuaaagcuugaaauca

SEQ ID NO: 1997409 - RNA, 19 nt, Artificial Sequence
  Description of Artificial Sequence: Synthetic oligonucleotide
  Antisense strand to SEQ ID NO: 1997408
ugauuucaagcuuuagaac

SEQ ID NO: 1997410 - RNA, 19 nt, Artificial Sequence
  Description of Artificial Sequence: Synthetic oligonucleotide
  Sense strand starting at position 2198 of SEQ ID NO: 1880834
ccuguuguugaggauuaac

SEQ ID NO: 1997411 - RNA, 19 nt, Artificial Sequence
  Description of Artificial Sequence: Synthetic oligonucleotide
  Antisense strand to SEQ ID NO: 1997410
guuaauccucaacaacagg

SEQ ID NO: 1997412 - RNA, 19 nt, Artificial Sequence
  Description of Artificial Sequence: Synthetic oligonucleotide
  Sense strand starting at position 2201 of SEQ ID NO: 1880834
guuguugaggauuaacuau

SEQ ID NO: 1997413 - RNA, 19 nt, Artificial Sequence
  Description of Artificial Sequence: Synthetic oligonucleotide
  Antisense strand to SEQ ID NO: 1997412
auaguuaauccucaacaac

SEQ ID NO: 1997414 - RNA, 19 nt, Artificial Sequence
  Description of Artificial Sequence: Synthetic oligonucleotide
  Sense strand starting at position 2244 of SEQ ID NO: 1880834
gaaacauccugaguuggau

SEQ ID NO: 1997415 - RNA, 19 nt, Artificial Sequence
  Description of Artificial Sequence: Synthetic oligonucleotide
  Antisense strand to SEQ ID NO: 1997414
auccaacucaggauguuuc

SEQ ID NO: 1997416 - RNA, 19 nt, Artificial Sequence
  Description of Artificial Sequence: Synthetic oligonucleotide
  Sense strand starting at position 2294 of SEQ ID NO: 1880834
gaaugcugucucuagagag

SEQ ID NO: 1997417 - RNA, 19 nt, Artificial Sequence
  Description of Artificial Sequence: Synthetic oligonucleotide
  Antisense strand to SEQ ID NO: 1997416
cucucuagagacagcauuc

SEQ ID NO: 1997418 - RNA, 19 nt, Artificial Sequence
  Description of Artificial Sequence: Synthetic oligonucleotide
  Sense strand starting at position 2682 of SEQ ID NO: 1880834
agauuagcuuugccaaaua

SEQ ID NO: 1997419 - RNA, 19 nt, Artificial Sequence
  Description of Artificial Sequence: Synthetic oligonucleotide
  Antisense strand to SEQ ID NO: 1997418
uauuuggcaaagcuaaucu

SEQ ID NO: 1997420 - RNA, 19 nt, Artificial Sequence
  Description of Artificial Sequence: Synthetic oligonucleotide
  Sense strand starting at position 2693 of SEQ ID NO: 1880834
gccaaauagaauugucgaa

SEQ ID NO: 1997421 - RNA, 19 nt, Artificial Sequence
  Description of Artificial Sequence: Synthetic oligonucleotide
  Antisense strand to SEQ ID NO: 1997420
uucgacaauucuauuuggc

SEQ ID NO: 1997422 - RNA, 19 nt, Artificial Sequence
  Description of Artificial Sequence: Synthetic oligonucleotide
  Sense strand starting at position 2695 of SEQ ID NO: 1880834
caaauagaauugucgaaug

SEQ ID NO: 1997423 - RNA, 19 nt, Artificial Sequence
  Description of Artificial Sequence: Synthetic oligonucleotide
  Antisense strand to SEQ ID NO: 1997422
cauucgacaauucuauuug

SEQ ID NO: 1997424 - RNA, 19 nt, Artificial Sequence
  Description of Artificial Sequence: Synthetic oligonucleotide
  Sense strand starting at position 2697 of SEQ ID NO: 1880834
aauagaauugucgaauguu

SEQ ID NO: 1997425 - RNA, 19 nt, Artificial Sequence
  Description of Artificial Sequence: Synthetic oligonucleotide
  Antisense strand to SEQ ID NO: 1997424
aacauucgacaauucuauu

SEQ ID NO: 1997426 - RNA, 19 nt, Artificial Sequence
  Description of Artificial Sequence: Synthetic oligonucleotide
  Sense strand starting at position 2996 of SEQ ID NO: 1880834
caaugacauuuagauaggu

SEQ ID NO: 1997427 - RNA, 19 nt, Artificial Sequence
  Description of Artificial Sequence: Synthetic oligonucleotide
  Antisense strand to SEQ ID NO: 1997426
accuaucuaaaugucauug

SEQ ID NO: 1997428 - RNA, 19 nt, Artificial Sequence
  Description of Artificial Sequence: Synthetic oligonucleotide
  Sense strand starting at position 3044 of SEQ ID NO: 1880834
cuaaguuaacuugggauca

SEQ ID NO: 1997429 - RNA, 19 nt, Artificial Sequence
  Description of Artificial Sequence: Synthetic oligonucleotide
  Antisense strand to SEQ ID NO: 1997428
ugaucccaaguuaacuuag

SEQ ID NO: 1997430 - RNA, 19 nt, Artificial Sequence
  Description of Artificial Sequence: Synthetic oligonucleotide
  Sense strand starting at position 3094 of SEQ ID NO: 1880834
aguuaaugugaccauugua

SEQ ID NO: 1997431 - RNA, 19 nt, Artificial Sequence
  Description of Artificial Sequence: Synthetic oligonucleotide
  Antisense strand to SEQ ID NO: 1997430
uacaauggucacauuaacu

SEQ ID NO: 1997432 - RNA, 19 nt, Artificial Sequence
  Description of Artificial Sequence: Synthetic oligonucleotide
  Sense strand starting at position 3110 of SEQ ID NO: 1880834
guacauaaucuguauuguu

SEQ ID NO: 1997433 - RNA, 19 nt, Artificial Sequence
  Description of Artificial Sequence: Synthetic oligonucleotide
  Antisense strand to SEQ ID NO: 1997432
aacaauacagauuauguac

SEQ ID NO: 1997434 - RNA, 19 nt, Artificial Sequence
  Description of Artificial Sequence: Synthetic oligonucleotide
  Sense strand starting at position 3115 of SEQ ID NO: 1880834
uaaucuguauuguugagaa

SEQ ID NO: 1997435 - RNA, 19 nt, Artificial Sequence
  Description of Artificial Sequence: Synthetic oligonucleotide
  Antisense strand to SEQ ID NO: 1997434
uucucaacaauacagauua

SEQ ID NO: 1997436 - RNA, 19 nt, Artificial Sequence
  Description of Artificial Sequence: Synthetic oligonucleotide
  Sense strand starting at position 3117 of SEQ ID NO: 1880834
aucuguauuguugagaaug

SEQ ID NO: 1997437 - RNA, 19 nt, Artificial Sequence
  Description of Artificial Sequence: Synthetic oligonucleotide
  Antisense strand to SEQ ID NO: 1997436
cauucucaacaauacagau

SEQ ID NO: 1997438 - RNA, 19 nt, Artificial Sequence
  Description of Artificial Sequence: Synthetic oligonucleotide
  Sense strand starting at position 3122 of SEQ ID NO: 1880834
uauuguugagaauguagga

SEQ ID NO: 1997439 - RNA, 19 nt, Artificial Sequence
  Description of Artificial Sequence: Synthetic oligonucleotide
  Antisense strand to SEQ ID NO: 1997438
uccuacauucucaacaaua

SEQ ID NO: 1997440 - RNA, 19 nt, Artificial Sequence
  Description of Artificial Sequence: Synthetic oligonucleotide
  Sense strand starting at position 3310 of SEQ ID NO: 1880834
agagcuuucugacuagaau

SEQ ID NO: 1997441 - RNA, 19 nt, Artificial Sequence
  Description of Artificial Sequence: Synthetic oligonucleotide
  Antisense strand to SEQ ID NO: 1997440
auucuagucagaaagcucu

SEQ ID NO: 1997442 - RNA, 19 nt, Artificial Sequence
  Description of Artificial Sequence: Synthetic oligonucleotide
  Sense strand starting at position 3510 of SEQ ID NO: 1880834
uagucuaacucuguagaga

SEQ ID NO: 1997443 - RNA, 19 nt, Artificial Sequence
  Description of Artificial Sequence: Synthetic oligonucleotide
  Antisense strand to SEQ ID NO: 1997442
ucucuacagaguuagacua

SEQ ID NO: 1997444 - RNA, 19 nt, Artificial Sequence
  Description of Artificial Sequence: Synthetic oligonucleotide
  Sense strand starting at position 3511 of SEQ ID NO: 1880834
agucuaacucuguagagac

SEQ ID NO: 1997445 - RNA, 19 nt, Artificial Sequence
  Description of Artificial Sequence: Synthetic oligonucleotide
  Antisense strand to SEQ ID NO: 1997444
gucucuacagaguuagacu

SEQ ID NO: 1997446 - RNA, 19 nt, Artificial Sequence
  Description of Artificial Sequence: Synthetic oligonucleotide
  Sense strand starting at position 3609 of SEQ ID NO: 1880834
gugagaauauaacuuagug

SEQ ID NO: 1997447 - RNA, 19 nt, Artificial Sequence
  Description of Artificial Sequence: Synthetic oligonucleotide
  Antisense strand to SEQ ID NO: 1997446
cacuaaguuauauucucac

SEQ ID NO: 1997448 - RNA, 19 nt, Artificial Sequence
  Description of Artificial Sequence: Synthetic oligonucleotide
  Sense strand starting at position 3757 of SEQ ID NO: 1880834
cccugagucaagggauucu

SEQ ID NO: 1997449 - RNA, 19 nt, Artificial Sequence
  Description of Artificial Sequence: Synthetic oligonucleotide
  Antisense strand to SEQ ID NO: 1997448
agaaucccuugacucaggg

SEQ ID NO: 1997450 - RNA, 19 nt, Artificial Sequence
  Description of Artificial Sequence: Synthetic oligonucleotide
  Sense strand starting at position 262 of SEQ ID NO: 1880835
uggaauaaguuggcaugaa

SEQ ID NO: 1997451 - RNA, 19 nt, Artificial Sequence
  Description of Artificial Sequence: Synthetic oligonucleotide
  Antisense strand to SEQ ID NO: 1997450
uucaugccaacuuauucca

SEQ ID NO: 1997452 - RNA, 19 nt, Artificial Sequence
  Description of Artificial Sequence: Synthetic oligonucleotide
  Sense strand starting at position 404 of SEQ ID NO: 1880835
ccuagauguacugaugagu

SEQ ID NO: 1997453 - RNA, 19 nt, Artificial Sequence
  Description of Artificial Sequence: Synthetic oligonucleotide
  Antisense strand to SEQ ID NO: 1997452
acucaucaguacaucuagg

SEQ ID NO: 1997454 - RNA, 19 nt, Artificial Sequence
  Description of Artificial Sequence: Synthetic oligonucleotide
  Sense strand starting at position 467 of SEQ ID NO: 1880835
acucucucaugcuuaguau

SEQ ID NO: 1997455 - RNA, 19 nt, Artificial Sequence
  Description of Artificial Sequence: Synthetic oligonucleotide
  Antisense strand to SEQ ID NO: 1997454
auacuaagcaugagagagu

SEQ ID NO: 1997456 - RNA, 19 nt, Artificial Sequence
  Description of Artificial Sequence: Synthetic oligonucleotide
  Sense strand starting at position 468 of SEQ ID NO: 1880835
cucucucaugcuuaguaua

SEQ ID NO: 1997457 - RNA, 19 nt, Artificial Sequence
  Description of Artificial Sequence: Synthetic oligonucleotide
  Antisense strand to SEQ ID NO: 1997456
uauacuaagcaugagagag

SEQ ID NO: 1997458 - RNA, 19 nt, Artificial Sequence
  Description of Artificial Sequence: Synthetic oligonucleotide
  Sense strand starting at position 470 of SEQ ID NO: 1880835
cucucaugcuuaguauaag

SEQ ID NO: 1997459 - RNA, 19 nt, Artificial Sequence
  Description of Artificial Sequence: Synthetic oligonucleotide
  Antisense strand to SEQ ID NO: 1997458
cuuauacuaagcaugagag

SEQ ID NO: 1997460 - RNA, 19 nt, Artificial Sequence
  Description of Artificial Sequence: Synthetic oligonucleotide
  Sense strand starting at position 480 of SEQ ID NO: 1880835
uaguauaagcccuggauca

SEQ ID NO: 1997461 - RNA, 19 nt, Artificial Sequence
  Description of Artificial Sequence: Synthetic oligonucleotide
  Antisense strand to SEQ ID NO: 1997460
ugauccagggcuuauacua

SEQ ID NO: 1997462 - RNA, 19 nt, Artificial Sequence
  Description of Artificial Sequence: Synthetic oligonucleotide
  Sense strand starting at position 889 of SEQ ID NO: 1880835
uugugacgucuccuagcuu

SEQ ID NO: 1997463 - RNA, 19 nt, Artificial Sequence
  Description of Artificial Sequence: Synthetic oligonucleotide
  Antisense strand to SEQ ID NO: 1997462
aagcuaggagacgucacaa

SEQ ID NO: 1997464 - RNA, 19 nt, Artificial Sequence
  Description of Artificial Sequence: Synthetic oligonucleotide
  Sense strand starting at position 1001 of SEQ ID NO: 1880835
uugaaugguuuaccaauau

SEQ ID NO: 1997465 - RNA, 19 nt, Artificial Sequence
  Description of Artificial Sequence: Synthetic oligonucleotide
  Antisense strand to SEQ ID NO: 1997464
auauugguaaaccauucaa

SEQ ID NO: 1997466 - RNA, 19 nt, Artificial Sequence
  Description of Artificial Sequence: Synthetic oligonucleotide
  Sense strand starting at position 1068 of SEQ ID NO: 1880835
gagaguuaacguggaucca

SEQ ID NO: 1997467 - RNA, 19 nt, Artificial Sequence
  Description of Artificial Sequence: Synthetic oligonucleotide
  Antisense strand to SEQ ID NO: 1997466
uggauccacguuaacucuc

SEQ ID NO: 1997468 - RNA, 19 nt, Artificial Sequence
  Description of Artificial Sequence: Synthetic oligonucleotide
  Sense strand starting at position 1069 of SEQ ID NO: 1880835
agaguuaacguggauccaa

SEQ ID NO: 1997469 - RNA, 19 nt, Artificial Sequence
  Description of Artificial Sequence: Synthetic oligonucleotide
  Antisense strand to SEQ ID NO: 1997468
uuggauccacguuaacucu

SEQ ID NO: 1997470 - RNA, 19 nt, Artificial Sequence
  Description of Artificial Sequence: Synthetic oligonucleotide
  Sense strand starting at position 1104 of SEQ ID NO: 1880835
gcugcugucagagauguca

SEQ ID NO: 1997471 - RNA, 19 nt, Artificial Sequence
  Description of Artificial Sequence: Synthetic oligonucleotide
  Antisense strand to SEQ ID NO: 1997470
ugacaucucugacagcagc

SEQ ID NO: 1997472 - RNA, 19 nt, Artificial Sequence
  Description of Artificial Sequence: Synthetic oligonucleotide
  Sense strand starting at position 1251 of SEQ ID NO: 1880835
gacugaugggucugaaagc

SEQ ID NO: 1997473 - RNA, 19 nt, Artificial Sequence
  Description of Artificial Sequence: Synthetic oligonucleotide
  Antisense strand to SEQ ID NO: 1997472
gcuuucagacccaucaguc

SEQ ID NO: 1997474 - RNA, 19 nt, Artificial Sequence
  Description of Artificial Sequence: Synthetic oligonucleotide
  Sense strand starting at position 1276 of SEQ ID NO: 1880835
ggcgucaagcuggaaugau

SEQ ID NO: 1997475 - RNA, 19 nt, Artificial Sequence
  Description of Artificial Sequence: Synthetic oligonucleotide
  Antisense strand to SEQ ID NO: 1997474
aucauuccagcuugacgcc

SEQ ID NO: 1997476 - RNA, 19 nt, Artificial Sequence
  Description of Artificial Sequence: Synthetic oligonucleotide
  Sense strand starting at position 1338 of SEQ ID NO: 1880835
ggaacuucgaaaugaacga

SEQ ID NO: 1997477 - RNA, 19 nt, Artificial Sequence
  Description of Artificial Sequence: Synthetic oligonucleotide
  Antisense strand to SEQ ID NO: 1997476
ucguucauuucgaaguucc

SEQ ID NO: 1997478 - RNA, 19 nt, Artificial Sequence
  Description of Artificial Sequence: Synthetic oligonucleotide
  Sense strand starting at position 1700 of SEQ ID NO: 1880835
cgccuuaccagagauugga

SEQ ID NO: 1997479 - RNA, 19 nt, Artificial Sequence
  Description of Artificial Sequence: Synthetic oligonucleotide
  Antisense strand to SEQ ID NO: 1997478
uccaaucucugguaaggcg

SEQ ID NO: 1997480 - RNA, 19 nt, Artificial Sequence
  Description of Artificial Sequence: Synthetic oligonucleotide
  Sense strand starting at position 2428 of SEQ ID NO: 1880835
gggaguucacacuguaaug

SEQ ID NO: 1997481 - RNA, 19 nt, Artificial Sequence
  Description of Artificial Sequence: Synthetic oligonucleotide
  Antisense strand to SEQ ID NO: 1997480
cauuacagugugaacuccc

SEQ ID NO: 1997482 - RNA, 19 nt, Artificial Sequence
  Description of Artificial Sequence: Synthetic oligonucleotide
  Sense strand starting at position 2473 of SEQ ID NO: 1880835
gcaaauagauaauugcaau

SEQ ID NO: 1997483 - RNA, 19 nt, Artificial Sequence
  Description of Artificial Sequence: Synthetic oligonucleotide
  Antisense strand to SEQ ID NO: 1997482
auugcaauuaucuauuugc

SEQ ID NO: 1997484 - RNA, 19 nt, Artificial Sequence
  Description of Artificial Sequence: Synthetic oligonucleotide
  Sense strand starting at position 2502 of SEQ ID NO: 1880835
gcacguuugcuauaauaac

SEQ ID NO: 1997485 - RNA, 19 nt, Artificial Sequence
  Description of Artificial Sequence: Synthetic oligonucleotide
  Antisense strand to SEQ ID NO: 1997484
guuauuauagcaaacgugc

SEQ ID NO: 1997486 - RNA, 19 nt, Artificial Sequence
  Description of Artificial Sequence: Synthetic oligonucleotide
  Sense strand starting at position 2653 of SEQ ID NO: 1880835
gcauauccacuuggauauc

SEQ ID NO: 1997487 - RNA, 19 nt, Artificial Sequence
  Description of Artificial Sequence: Synthetic oligonucleotide
  Antisense strand to SEQ ID NO: 1997486
gauauccaaguggauaugc

SEQ ID NO: 1997488 - RNA, 19 nt, Artificial Sequence
  Description of Artificial Sequence: Synthetic oligonucleotide
  Sense strand starting at position 3117 of SEQ ID NO: 1880835
uguauuaguuauuuaggcu

SEQ ID NO: 1997489 - RNA, 19 nt, Artificial Sequence
  Description of Artificial Sequence: Synthetic oligonucleotide
  Antisense strand to SEQ ID NO: 1997488
agccuaaauaacuaauaca

SEQ ID NO: 1997490 - RNA, 19 nt, Artificial Sequence
  Description of Artificial Sequence: Synthetic oligonucleotide
  Sense strand starting at position 3121 of SEQ ID NO: 1880835
uuaguuauuuaggcugcaa

SEQ ID NO: 1997491 - RNA, 19 nt, Artificial Sequence
  Description of Artificial Sequence: Synthetic oligonucleotide
  Antisense strand to SEQ ID NO: 1997490
uugcagccuaaauaacuaa

SEQ ID NO: 1997492 - RNA, 19 nt, Artificial Sequence
  Description of Artificial Sequence: Synthetic oligonucleotide
  Sense strand starting at position 3193 of SEQ ID NO: 1880835
aagacauggucccugaauu

SEQ ID NO: 1997493 - RNA, 19 nt, Artificial Sequence
  Description of Artificial Sequence: Synthetic oligonucleotide
  Antisense strand to SEQ ID NO: 1997492
aauucagggaccaugucuu

SEQ ID NO: 1997494 - RNA, 19 nt, Artificial Sequence
  Description of Artificial Sequence: Synthetic oligonucleotide
  Sense strand starting at position 3194 of SEQ ID NO: 1880835
agacauggucccugaauuc

SEQ ID NO: 1997495 - RNA, 19 nt, Artificial Sequence
  Description of Artificial Sequence: Synthetic oligonucleotide
  Antisense strand to SEQ ID NO: 1997494
gaauucagggaccaugucu

SEQ ID NO: 1997496 - RNA, 19 nt, Artificial Sequence
  Description of Artificial Sequence: Synthetic oligonucleotide
  Sense strand starting at position 3273 of SEQ ID NO: 1880835
aucucucugcgucagaaau

SEQ ID NO: 1997497 - RNA, 19 nt, Artificial Sequence
  Description of Artificial Sequence: Synthetic oligonucleotide
  Antisense strand to SEQ ID NO: 1997496
auuucugacgcagagagau

SEQ ID NO: 1997498 - RNA, 19 nt, Artificial Sequence
  Description of Artificial Sequence: Synthetic oligonucleotide
  Sense strand starting at position 3283 of SEQ ID NO: 1880835
gucagaaauuuaggaguag

SEQ ID NO: 1997499 - RNA, 19 nt, Artificial Sequence
  Description of Artificial Sequence: Synthetic oligonucleotide
  Antisense strand to SEQ ID NO: 1997498
cuacuccuaaauuucugac

SEQ ID NO: 1997500 - RNA, 19 nt, Artificial Sequence
  Description of Artificial Sequence: Synthetic oligonucleotide
  Sense strand starting at position 3284 of SEQ ID NO: 1880835
ucagaaauuuaggaguagu

SEQ ID NO: 1997501 - RNA, 19 nt, Artificial Sequence
  Description of Artificial Sequence: Synthetic oligonucleotide
  Antisense strand to SEQ ID NO: 1997500
acuacuccuaaauuucuga

SEQ ID NO: 1997502 - RNA, 19 nt, Artificial Sequence
  Description of Artificial Sequence: Synthetic oligonucleotide
  Sense strand starting at position 3294 of SEQ ID NO: 1880835
aggaguaguuuagcuaggu

SEQ ID NO: 1997503 - RNA, 19 nt, Artificial Sequence
  Description of Artificial Sequence: Synthetic oligonucleotide
  Antisense strand to SEQ ID NO: 1997502
accuagcuaaacuacuccu

SEQ ID NO: 1997504 - RNA, 19 nt, Artificial Sequence
  Description of Artificial Sequence: Synthetic oligonucleotide
  Sense strand starting at position 3295 of SEQ ID NO: 1880835
ggaguaguuuagcuaggug

SEQ ID NO: 1997505 - RNA, 19 nt, Artificial Sequence
  Description of Artificial Sequence: Synthetic oligonucleotide
  Antisense strand to SEQ ID NO: 1997504
caccuagcuaaacuacucc

SEQ ID NO: 1997506 - RNA, 19 nt, Artificial Sequence
  Description of Artificial Sequence: Synthetic oligonucleotide
  Sense strand starting at position 3457 of SEQ ID NO: 1880835
aagugaagguuguucucca

SEQ ID NO: 1997507 - RNA, 19 nt, Artificial Sequence
  Description of Artificial Sequence: Synthetic oligonucleotide
  Antisense strand to SEQ ID NO: 1997506
uggagaacaaccuucacuu

SEQ ID NO: 1997508 - RNA, 19 nt, Artificial Sequence
  Description of Artificial Sequence: Synthetic oligonucleotide
  Sense strand starting at position 3461 of SEQ ID NO: 1880835
gaagguuguucuccacaug

SEQ ID NO: 1997509 - RNA, 19 nt, Artificial Sequence
  Description of Artificial Sequence: Synthetic oligonucleotide
  Antisense strand to SEQ ID NO: 1997508
cauguggagaacaaccuuc

SEQ ID NO: 1997510 - RNA, 19 nt, Artificial Sequence
  Description of Artificial Sequence: Synthetic oligonucleotide
  Sense strand starting at position 3462 of SEQ ID NO: 1880835
aagguuguucuccacauga

SEQ ID NO: 1997511 - RNA, 19 nt, Artificial Sequence
  Description of Artificial Sequence: Synthetic oligonucleotide
  Antisense strand to SEQ ID NO: 1997510
ucauguggagaacaaccuu

SEQ ID NO: 1997512 - RNA, 19 nt, Artificial Sequence
  Description of Artificial Sequence: Synthetic oligonucleotide
  Sense strand starting at position 3464 of SEQ ID NO: 1880835
gguuguucuccacaugaau

SEQ ID NO: 1997513 - RNA, 19 nt, Artificial Sequence
  Description of Artificial Sequence: Synthetic oligonucleotide
  Antisense strand to SEQ ID NO: 1997512
auucauguggagaacaacc

SEQ ID NO: 1997514 - RNA, 19 nt, Artificial Sequence
  Description of Artificial Sequence: Synthetic oligonucleotide
  Sense strand starting at position 3519 of SEQ ID NO: 1880835
gggugacuuccucagagca

SEQ ID NO: 1997515 - RNA, 19 nt, Artificial Sequence
  Description of Artificial Sequence: Synthetic oligonucleotide
  Antisense strand to SEQ ID NO: 1997514
ugcucugaggaagucaccc

SEQ ID NO: 1997516 - RNA, 19 nt, Artificial Sequence
  Description of Artificial Sequence: Synthetic oligonucleotide
  Sense strand starting at position 3569 of SEQ ID NO: 1880835
augauauauuugugaccua

SEQ ID NO: 1997517 - RNA, 19 nt, Artificial Sequence
  Description of Artificial Sequence: Synthetic oligonucleotide
  Antisense strand to SEQ ID NO: 1997516
uaggucacaaauauaucau

SEQ ID NO: 1997518 - RNA, 19 nt, Artificial Sequence
  Description of Artificial Sequence: Synthetic oligonucleotide
  Sense strand starting at position 3570 of SEQ ID NO: 1880835
ugauauauuugugaccuag

SEQ ID NO: 1997519 - RNA, 19 nt, Artificial Sequence
  Description of Artificial Sequence: Synthetic oligonucleotide
  Antisense strand to SEQ ID NO: 1997518
cuaggucacaaauauauca

SEQ ID NO: 1997520 - RNA, 19 nt, Artificial Sequence
  Description of Artificial Sequence: Synthetic oligonucleotide
  Sense strand starting at position 3602 of SEQ ID NO: 1880835
acacaaucucucggccaua

SEQ ID NO: 1997521 - RNA, 19 nt, Artificial Sequence
  Description of Artificial Sequence: Synthetic oligonucleotide
  Antisense strand to SEQ ID NO: 1997520
uauggccgagagauugugu

SEQ ID NO: 1997522 - RNA, 19 nt, Artificial Sequence
  Description of Artificial Sequence: Synthetic oligonucleotide
  Sense strand starting at position 3662 of SEQ ID NO: 1880835
gggacuucaccagguggua

SEQ ID NO: 1997523 - RNA, 19 nt, Artificial Sequence
  Description of Artificial Sequence: Synthetic oligonucleotide
  Antisense strand to SEQ ID NO: 1997522
uaccaccuggugaaguccc

SEQ ID NO: 1997524 - RNA, 19 nt, Artificial Sequence
  Description of Artificial Sequence: Synthetic oligonucleotide
  Sense strand starting at position 3712 of SEQ ID NO: 1880835
gccuccuuucuuggagacu

SEQ ID NO: 1997525 - RNA, 19 nt, Artificial Sequence
  Description of Artificial Sequence: Synthetic oligonucleotide
  Antisense strand to SEQ ID NO: 1997524
agucuccaagaaaggaggc

SEQ ID NO: 1997526 - RNA, 19 nt, Artificial Sequence
  Description of Artificial Sequence: Synthetic oligonucleotide
  Sense strand starting at position 3845 of SEQ ID NO: 1880835
ucaccuggacugugugaua

SEQ ID NO: 1997527 - RNA, 19 nt, Artificial Sequence
  Description of Artificial Sequence: Synthetic oligonucleotide
  Antisense strand to SEQ ID NO: 1997526
uaucacacaguccagguga

SEQ ID NO: 1997528 - RNA, 19 nt, Artificial Sequence
  Description of Artificial Sequence: Synthetic oligonucleotide
  Sense strand starting at position 3913 of SEQ ID NO: 1880835
cugccaucaggauaaucuu

SEQ ID NO: 1997529 - RNA, 19 nt, Artificial Sequence
  Description of Artificial Sequence: Synthetic oligonucleotide
  Antisense strand to SEQ ID NO: 1997528
aagauuauccugauggcag

SEQ ID NO: 1997530 - RNA, 19 nt, Artificial Sequence
  Description of Artificial Sequence: Synthetic oligonucleotide
  Sense strand starting at position 5 of SEQ ID NO: 1880836
agguuacuaacugggugau

SEQ ID NO: 1997531 - RNA, 19 nt, Artificial Sequence
  Description of Artificial Sequence: Synthetic oligonucleotide
  Antisense strand to SEQ ID NO: 1997530
aucacccaguuaguaaccu

SEQ ID NO: 1997532 - RNA, 19 nt, Artificial Sequence
  Description of Artificial Sequence: Synthetic oligonucleotide
  Sense strand starting at position 6 of SEQ ID NO: 1880836
gguuacuaacugggugauu

SEQ ID NO: 1997533 - RNA, 19 nt, Artificial Sequence
  Description of Artificial Sequence: Synthetic oligonucleotide
  Antisense strand to SEQ ID NO: 1997532
aaucacccaguuaguaacc

SEQ ID NO: 1997534 - RNA, 19 nt, Artificial Sequence
  Description of Artificial Sequence: Synthetic oligonucleotide
  Sense strand starting at position 19 of SEQ ID NO: 1880836
gugauuccauuauauaagu

SEQ ID NO: 1997535 - RNA, 19 nt, Artificial Sequence
  Description of Artificial Sequence: Synthetic oligonucleotide
  Antisense strand to SEQ ID NO: 1997534
acuuauauaauggaaucac

SEQ ID NO: 1997536 - RNA, 19 nt, Artificial Sequence
  Description of Artificial Sequence: Synthetic oligonucleotide
  Sense strand starting at position 28 of SEQ ID NO: 1880836
uuauauaagucuuggaaug

SEQ ID NO: 1997537 - RNA, 19 nt, Artificial Sequence
  Description of Artificial Sequence: Synthetic oligonucleotide
  Antisense strand to SEQ ID NO: 1997536
cauuccaagacuuauauaa

SEQ ID NO: 1997538 - RNA, 19 nt, Artificial Sequence
  Description of Artificial Sequence: Synthetic oligonucleotide
  Sense strand starting at position 29 of SEQ ID NO: 1880836
uauauaagucuuggaauga

SEQ ID NO: 1997539 - RNA, 19 nt, Artificial Sequence
  Description of Artificial Sequence: Synthetic oligonucleotide
  Antisense strand to SEQ ID NO: 1997538
ucauuccaagacuuauaua

SEQ ID NO: 1997540 - RNA, 19 nt, Artificial Sequence
  Description of Artificial Sequence: Synthetic oligonucleotide
  Sense strand starting at position 30 of SEQ ID NO: 1880836
auauaagucuuggaaugac

SEQ ID NO: 1997541 - RNA, 19 nt, Artificial Sequence
  Description of Artificial Sequence: Synthetic oligonucleotide
  Antisense strand to SEQ ID NO: 1997540
gucauuccaagacuuauau

SEQ ID NO: 1997542 - RNA, 19 nt, Artificial Sequence
  Description of Artificial Sequence: Synthetic oligonucleotide
  Sense strand starting at position 158 of SEQ ID NO: 1880836
cugggaacauccuuuaucu

SEQ ID NO: 1997543 - RNA, 19 nt, Artificial Sequence
  Description of Artificial Sequence: Synthetic oligonucleotide
  Antisense strand to SEQ ID NO: 1997542
agauaaaggauguucccag

SEQ ID NO: 1997544 - RNA, 19 nt, Artificial Sequence
  Description of Artificial Sequence: Synthetic oligonucleotide
  Sense strand starting at position 195 of SEQ ID NO: 1880836
acaauaugcugguugugau

SEQ ID NO: 1997545 - RNA, 19 nt, Artificial Sequence
  Description of Artificial Sequence: Synthetic oligonucleotide
  Antisense strand to SEQ ID NO: 1997544
aucacaaccagcauauugu

SEQ ID NO: 1997546 - RNA, 19 nt, Artificial Sequence
  Description of Artificial Sequence: Synthetic oligonucleotide
  Sense strand starting at position 198 of SEQ ID NO: 1880836
auaugcugguugugauauc

SEQ ID NO: 1997547 - RNA, 19 nt, Artificial Sequence
  Description of Artificial Sequence: Synthetic oligonucleotide
  Antisense strand to SEQ ID NO: 1997546
gauaucacaaccagcauau

SEQ ID NO: 1997548 - RNA, 19 nt, Artificial Sequence
  Description of Artificial Sequence: Synthetic oligonucleotide
  Sense strand starting at position 209 of SEQ ID NO: 1880836
gugauaucguacuaugggu

SEQ ID NO: 1997549 - RNA, 19 nt, Artificial Sequence
  Description of Artificial Sequence: Synthetic oligonucleotide
  Antisense strand to SEQ ID NO: 1997548
acccauaguacgauaucac

SEQ ID NO: 1997550 - RNA, 19 nt, Artificial Sequence
  Description of Artificial Sequence: Synthetic oligonucleotide
  Sense strand starting at position 211 of SEQ ID NO: 1880836
gauaucguacuauggguuu

SEQ ID NO: 1997551 - RNA, 19 nt, Artificial Sequence
  Description of Artificial Sequence: Synthetic oligonucleotide
  Antisense strand to SEQ ID NO: 1997550
aaacccauaguacgauauc

SEQ ID NO: 1997552 - RNA, 19 nt, Artificial Sequence
  Description of Artificial Sequence: Synthetic oligonucleotide
  Sense strand starting at position 217 of SEQ ID NO: 1880836
guacuauggguuugccaga

SEQ ID NO: 1997553 - RNA, 19 nt, Artificial Sequence
  Description of Artificial Sequence: Synthetic oligonucleotide
  Antisense strand to SEQ ID NO: 1997552
ucuggcaaacccauaguac

SEQ ID NO: 1997554 - RNA, 19 nt, Artificial Sequence
  Description of Artificial Sequence: Synthetic oligonucleotide
  Sense strand starting at position 218 of SEQ ID NO: 1880836
uacuauggguuugccagau

SEQ ID NO: 1997555 - RNA, 19 nt, Artificial Sequence
  Description of Artificial Sequence: Synthetic oligonucleotide
  Antisense strand to SEQ ID NO: 1997554
aucuggcaaacccauagua

SEQ ID NO: 1997556 - RNA, 19 nt, Artificial Sequence
  Description of Artificial Sequence: Synthetic oligonucleotide
  Sense strand starting at position 222 of SEQ ID NO: 1880836
auggguuugccagaucuua

SEQ ID NO: 1997557 - RNA, 19 nt, Artificial Sequence
  Description of Artificial Sequence: Synthetic oligonucleotide
  Antisense strand to SEQ ID NO: 1997556
uaagaucuggcaaacccau

SEQ ID NO: 1997558 - RNA, 19 nt, Artificial Sequence
  Description of Artificial Sequence: Synthetic oligonucleotide
  Sense strand starting at position 230 of SEQ ID NO: 1880836
gccagaucuuauuguggaa

SEQ ID NO: 1997559 - RNA, 19 nt, Artificial Sequence
  Description of Artificial Sequence: Synthetic oligonucleotide
  Antisense strand to SEQ ID NO: 1997558
uuccacaauaagaucuggc

SEQ ID NO: 1997560 - RNA, 19 nt, Artificial Sequence
  Description of Artificial Sequence: Synthetic oligonucleotide
  Sense strand starting at position 232 of SEQ ID NO: 1880836
cagaucuuauuguggaaag

SEQ ID NO: 1997561 - RNA, 19 nt, Artificial Sequence
  Description of Artificial Sequence: Synthetic oligonucleotide
  Antisense strand to SEQ ID NO: 1997560
cuuuccacaauaagaucug

SEQ ID NO: 1997562 - RNA, 19 nt, Artificial Sequence
  Description of Artificial Sequence: Synthetic oligonucleotide
  Sense strand starting at position 234 of SEQ ID NO: 1880836
gaucuuauuguggaaaggu

SEQ ID NO: 1997563 - RNA, 19 nt, Artificial Sequence
  Description of Artificial Sequence: Synthetic oligonucleotide
  Antisense strand to SEQ ID NO: 1997562
accuuuccacaauaagauc

SEQ ID NO: 1997564 - RNA, 19 nt, Artificial Sequence
  Description of Artificial Sequence: Synthetic oligonucleotide
  Sense strand starting at position 261 of SEQ ID NO: 1880836
gguacaggguucucacuau

SEQ ID NO: 1997565 - RNA, 19 nt, Artificial Sequence
  Description of Artificial Sequence: Synthetic oligonucleotide
  Antisense strand to SEQ ID NO: 1997564
auagugagaacccuguacc

SEQ ID NO: 1997566 - RNA, 19 nt, Artificial Sequence
  Description of Artificial Sequence: Synthetic oligonucleotide
  Sense strand starting at position 265 of SEQ ID NO: 1880836
caggguucucacuauacug

SEQ ID NO: 1997567 - RNA, 19 nt, Artificial Sequence
  Description of Artificial Sequence: Synthetic oligonucleotide
  Antisense strand to SEQ ID NO: 1997566
caguauagugagaacccug

SEQ ID NO: 1997568 - RNA, 19 nt, Artificial Sequence
  Description of Artificial Sequence: Synthetic oligonucleotide
  Sense strand starting at position 267 of SEQ ID NO: 1880836
ggguucucacuauacugua

SEQ ID NO: 1997569 - RNA, 19 nt, Artificial Sequence
  Description of Artificial Sequence: Synthetic oligonucleotide
  Antisense strand to SEQ ID NO: 1997568
uacaguauagugagaaccc

SEQ ID NO: 1997570 - RNA, 19 nt, Artificial Sequence
  Description of Artificial Sequence: Synthetic oligonucleotide
  Sense strand starting at position 411 of SEQ ID NO: 1880836
aguguucucuucugcucaa

SEQ ID NO: 1997571 - RNA, 19 nt, Artificial Sequence
  Description of Artificial Sequence: Synthetic oligonucleotide
  Antisense strand to SEQ ID NO: 1997570
uugagcagaagagaacacu

SEQ ID NO: 1997572 - RNA, 19 nt, Artificial Sequence
  Description of Artificial Sequence: Synthetic oligonucleotide
  Sense strand starting at position 424 of SEQ ID NO: 1880836
gcucaagcuuguuuggaua

SEQ ID NO: 1997573 - RNA, 19 nt, Artificial Sequence
  Description of Artificial Sequence: Synthetic oligonucleotide
  Antisense strand to SEQ ID NO: 1997572
uauccaaacaagcuugagc

SEQ ID NO: 1997574 - RNA, 19 nt, Artificial Sequence
  Description of Artificial Sequence: Synthetic oligonucleotide
  Sense strand starting at position 431 of SEQ ID NO: 1880836
cuuguuuggauacguaauc

SEQ ID NO: 1997575 - RNA, 19 nt, Artificial Sequence
  Description of Artificial Sequence: Synthetic oligonucleotide
  Antisense strand to SEQ ID NO: 1997574
gauuacguauccaaacaag

SEQ ID NO: 1997576 - RNA, 19 nt, Artificial Sequence
  Description of Artificial Sequence: Synthetic oligonucleotide
  Sense strand starting at position 436 of SEQ ID NO: 1880836
uuggauacguaaucuauga

SEQ ID NO: 1997577 - RNA, 19 nt, Artificial Sequence
  Description of Artificial Sequence: Synthetic oligonucleotide
  Antisense strand to SEQ ID NO: 1997576
ucauagauuacguauccaa

SEQ ID NO: 1997578 - RNA, 19 nt, Artificial Sequence
  Description of Artificial Sequence: Synthetic oligonucleotide
  Sense strand starting at position 440 of SEQ ID NO: 1880836
auacguaaucuaugaauca

SEQ ID NO: 1997579 - RNA, 19 nt, Artificial Sequence
  Description of Artificial Sequence: Synthetic oligonucleotide
  Antisense strand to SEQ ID NO: 1997578
ugauucauagauuacguau

SEQ ID NO: 1997580 - RNA, 19 nt, Artificial Sequence
  Description of Artificial Sequence: Synthetic oligonucleotide
  Sense strand starting at position 718 of SEQ ID NO: 1880836
uuaaacuucucauguagga

SEQ ID NO: 1997581 - RNA, 19 nt, Artificial Sequence
  Description of Artificial Sequence: Synthetic oligonucleotide
  Antisense strand to SEQ ID NO: 1997580
uccuacaugagaaguuuaa

SEQ ID NO: 1997582 - RNA, 19 nt, Artificial Sequence
  Description of Artificial Sequence: Synthetic oligonucleotide
  Sense strand starting at position 734 of SEQ ID NO: 1880836
ggagguugcuuaguagagu

SEQ ID NO: 1997583 - RNA, 19 nt, Artificial Sequence
  Description of Artificial Sequence: Synthetic oligonucleotide
  Antisense strand to SEQ ID NO: 1997582
acucuacuaagcaaccucc

SEQ ID NO: 1997584 - RNA, 19 nt, Artificial Sequence
  Description of Artificial Sequence: Synthetic oligonucleotide
  Sense strand starting at position 738 of SEQ ID NO: 1880836
guugcuuaguagagugguu

SEQ ID NO: 1997585 - RNA, 19 nt, Artificial Sequence
  Description of Artificial Sequence: Synthetic oligonucleotide
  Antisense strand to SEQ ID NO: 1997584
aaccacucuacuaagcaac

SEQ ID NO: 1997586 - RNA, 19 nt, Artificial Sequence
  Description of Artificial Sequence: Synthetic oligonucleotide
  Sense strand starting at position 743 of SEQ ID NO: 1880836
uuaguagagugguucucaa

SEQ ID NO: 1997587 - RNA, 19 nt, Artificial Sequence
  Description of Artificial Sequence: Synthetic oligonucleotide
  Antisense strand to SEQ ID NO: 1997586
uugagaaccacucuacuaa

SEQ ID NO: 1997588 - RNA, 19 nt, Artificial Sequence
  Description of Artificial Sequence: Synthetic oligonucleotide
  Sense strand starting at position 932 of SEQ ID NO: 1880836
acacgaccuugguacuauu

SEQ ID NO: 1997589 - RNA, 19 nt, Artificial Sequence
  Description of Artificial Sequence: Synthetic oligonucleotide
  Antisense strand to SEQ ID NO: 1997588
aauaguaccaaggucgugu

SEQ ID NO: 1997590 - RNA, 19 nt, Artificial Sequence
  Description of Artificial Sequence: Synthetic oligonucleotide
  Sense strand starting at position 1263 of SEQ ID NO: 1880836
cuccguuauagccguaaga

SEQ ID NO: 1997591 - RNA, 19 nt, Artificial Sequence
  Description of Artificial Sequence: Synthetic oligonucleotide
  Antisense strand to SEQ ID NO: 1997590
ucuuacggcuauaacggag

SEQ ID NO: 1997592 - RNA, 19 nt, Artificial Sequence
  Description of Artificial Sequence: Synthetic oligonucleotide
  Sense strand starting at position 1265 of SEQ ID NO: 1880836
ccguuauagccguaagaga

SEQ ID NO: 1997593 - RNA, 19 nt, Artificial Sequence
  Description of Artificial Sequence: Synthetic oligonucleotide
  Antisense strand to SEQ ID NO: 1997592
ucucuuacggcuauaacgg

SEQ ID NO: 1997594 - RNA, 19 nt, Artificial Sequence
  Description of Artificial Sequence: Synthetic oligonucleotide
  Sense strand starting at position 1323 of SEQ ID NO: 1880836
cgggaagucguucaagaac

SEQ ID NO: 1997595 - RNA, 19 nt, Artificial Sequence
  Description of Artificial Sequence: Synthetic oligonucleotide
  Antisense strand to SEQ ID NO: 1997594
guucuugaacgacuucccg

SEQ ID NO: 1997596 - RNA, 19 nt, Artificial Sequence
  Description of Artificial Sequence: Synthetic oligonucleotide
  Sense strand starting at position 2028 of SEQ ID NO: 1880836
gguagguguggccgagaca

SEQ ID NO: 1997597 - RNA, 19 nt, Artificial Sequence
  Description of Artificial Sequence: Synthetic oligonucleotide
  Antisense strand to SEQ ID NO: 1997596
ugucucggccacaccuacc

SEQ ID NO: 1997598 - RNA, 19 nt, Artificial Sequence
  Description of Artificial Sequence: Synthetic oligonucleotide
  Sense strand starting at position 76 of SEQ ID NO: 1880837
uugguaucuggacaucacu

SEQ ID NO: 1997599 - RNA, 19 nt, Artificial Sequence
  Description of Artificial Sequence: Synthetic oligonucleotide
  Antisense strand to SEQ ID NO: 1997598
agugauguccagauaccaa

SEQ ID NO: 1997600 - RNA, 19 nt, Artificial Sequence
  Description of Artificial Sequence: Synthetic oligonucleotide
  Sense strand starting at position 201 of SEQ ID NO: 1880837
uuuccuacuguauagacau

SEQ ID NO: 1997601 - RNA, 19 nt, Artificial Sequence
  Description of Artificial Sequence: Synthetic oligonucleotide
  Antisense strand to SEQ ID NO: 1997600
augucuauacaguaggaaa

SEQ ID NO: 1997602 - RNA, 19 nt, Artificial Sequence
  Description of Artificial Sequence: Synthetic oligonucleotide
  Sense strand starting at position 610 of SEQ ID NO: 1880837
ggaagaccucuugguaaca

SEQ ID NO: 1997603 - RNA, 19 nt, Artificial Sequence
  Description of Artificial Sequence: Synthetic oligonucleotide
  Antisense strand to SEQ ID NO: 1997602
uguuaccaagaggucuucc

SEQ ID NO: 1997604 - RNA, 19 nt, Artificial Sequence
  Description of Artificial Sequence: Synthetic oligonucleotide
  Sense strand starting at position 660 of SEQ ID NO: 1880837
gagucagaaggagguuauu

SEQ ID NO: 1997605 - RNA, 19 nt, Artificial Sequence
  Description of Artificial Sequence: Synthetic oligonucleotide
  Antisense strand to SEQ ID NO: 1997604
aauaaccuccuucugacuc

SEQ ID NO: 1997606 - RNA, 19 nt, Artificial Sequence
  Description of Artificial Sequence: Synthetic oligonucleotide
  Sense strand starting at position 790 of SEQ ID NO: 1880837
aggaaaggugucuggaaac

SEQ ID NO: 1997607 - RNA, 19 nt, Artificial Sequence
  Description of Artificial Sequence: Synthetic oligonucleotide
  Antisense strand to SEQ ID NO: 1997606
guuuccagacaccuuuccu

SEQ ID NO: 1997608 - RNA, 19 nt, Artificial Sequence
  Description of Artificial Sequence: Synthetic oligonucleotide
  Sense strand starting at position 877 of SEQ ID NO: 1880837
cagagaagugcucaccugu

SEQ ID NO: 1997609 - RNA, 19 nt, Artificial Sequence
  Description of Artificial Sequence: Synthetic oligonucleotide
  Antisense strand to SEQ ID NO: 1997608
acaggugagcacuucucug

SEQ ID NO: 1997610 - RNA, 19 nt, Artificial Sequence
  Description of Artificial Sequence: Synthetic oligonucleotide
  Sense strand starting at position 971 of SEQ ID NO: 1880837
cugugcuuagcgccuaaga

SEQ ID NO: 1997611 - RNA, 19 nt, Artificial Sequence
  Description of Artificial Sequence: Synthetic oligonucleotide
  Antisense strand to SEQ ID NO: 1997610
ucuuaggcgcuaagcacag

SEQ ID NO: 1997612 - RNA, 19 nt, Artificial Sequence
  Description of Artificial Sequence: Synthetic oligonucleotide
  Sense strand starting at position 972 of SEQ ID NO: 1880837
ugugcuuagcgccuaagau

SEQ ID NO: 1997613 - RNA, 19 nt, Artificial Sequence
  Description of Artificial Sequence: Synthetic oligonucleotide
  Antisense strand to SEQ ID NO: 1997612
aucuuaggcgcuaagcaca

SEQ ID NO: 1997614 - RNA, 19 nt, Artificial Sequence
  Description of Artificial Sequence: Synthetic oligonucleotide
  Sense strand starting at position 1060 of SEQ ID NO: 1880837
cacggaugggcuuggagau

SEQ ID NO: 1997615 - RNA, 19 nt, Artificial Sequence
  Description of Artificial Sequence: Synthetic oligonucleotide
  Antisense strand to SEQ ID NO: 1997614
aucuccaagcccauccgug

SEQ ID NO: 1997616 - RNA, 19 nt, Artificial Sequence
  Description of Artificial Sequence: Synthetic oligonucleotide
  Sense strand starting at position 1072 of SEQ ID NO: 1880837
uggagauguuuagaaauuu

SEQ ID NO: 1997617 - RNA, 19 nt, Artificial Sequence
  Description of Artificial Sequence: Synthetic oligonucleotide
  Antisense strand to SEQ ID NO: 1997616
aaauuucuaaacaucucca

SEQ ID NO: 1997618 - RNA, 19 nt, Artificial Sequence
  Description of Artificial Sequence: Synthetic oligonucleotide
  Sense strand starting at position 1112 of SEQ ID NO: 1880837
auauguagccucuagauuc

SEQ ID NO: 1997619 - RNA, 19 nt, Artificial Sequence
  Description of Artificial Sequence: Synthetic oligonucleotide
  Antisense strand to SEQ ID NO: 1997618
gaaucuagaggcuacauau

SEQ ID NO: 1997620 - RNA, 19 nt, Artificial Sequence
  Description of Artificial Sequence: Synthetic oligonucleotide
  Sense strand starting at position 1363 of SEQ ID NO: 1880837
uggacucuuguguaaaucu

SEQ ID NO: 1997621 - RNA, 19 nt, Artificial Sequence
  Description of Artificial Sequence: Synthetic oligonucleotide
  Antisense strand to SEQ ID NO: 1997620
agauuuacacaagagucca

SEQ ID NO: 1997622 - RNA, 19 nt, Artificial Sequence
  Description of Artificial Sequence: Synthetic oligonucleotide
  Sense strand starting at position 1395 of SEQ ID NO: 1880837
auccaaaggucaguacuaa

SEQ ID NO: 1997623 - RNA, 19 nt, Artificial Sequence
  Description of Artificial Sequence: Synthetic oligonucleotide
  Antisense strand to SEQ ID NO: 1997622
uuaguacugaccuuuggau

SEQ ID NO: 1997624 - RNA, 19 nt, Artificial Sequence
  Description of Artificial Sequence: Synthetic oligonucleotide
  Sense strand starting at position 1396 of SEQ ID NO: 1880837
uccaaaggucaguacuaau

SEQ ID NO: 1997625 - RNA, 19 nt, Artificial Sequence
  Description of Artificial Sequence: Synthetic oligonucleotide
  Antisense strand to SEQ ID NO: 1997624
auuaguacugaccuuugga

SEQ ID NO: 1997626 - RNA, 19 nt, Artificial Sequence
  Description of Artificial Sequence: Synthetic oligonucleotide
  Sense strand starting at position 1611 of SEQ ID NO: 1880837
ucuucucaagaagguauaa

SEQ ID NO: 1997627 - RNA, 19 nt, Artificial Sequence
  Description of Artificial Sequence: Synthetic oligonucleotide
  Antisense strand to SEQ ID NO: 1997626
uuauaccuucuugagaaga

SEQ ID NO: 1997628 - RNA, 19 nt, Artificial Sequence
  Description of Artificial Sequence: Synthetic oligonucleotide
  Sense strand starting at position 1639 of SEQ ID NO: 1880837
ggauguaaaucuuugaaua

SEQ ID NO: 1997629 - RNA, 19 nt, Artificial Sequence
  Description of Artificial Sequence: Synthetic oligonucleotide
  Antisense strand to SEQ ID NO: 1997628
uauucaaagauuuacaucc

SEQ ID NO: 1997630 - RNA, 19 nt, Artificial Sequence
  Description of Artificial Sequence: Synthetic oligonucleotide
  Sense strand starting at position 1650 of SEQ ID NO: 1880837
uuugaauauccaugguauc

SEQ ID NO: 1997631 - RNA, 19 nt, Artificial Sequence
  Description of Artificial Sequence: Synthetic oligonucleotide
  Antisense strand to SEQ ID NO: 1997630
gauaccauggauauucaaa

SEQ ID NO: 1997632 - RNA, 19 nt, Artificial Sequence
  Description of Artificial Sequence: Synthetic oligonucleotide
  Sense strand starting at position 1651 of SEQ ID NO: 1880837
uugaauauccaugguauca

SEQ ID NO: 1997633 - RNA, 19 nt, Artificial Sequence
  Description of Artificial Sequence: Synthetic oligonucleotide
  Antisense strand to SEQ ID NO: 1997632
ugauaccauggauauucaa

SEQ ID NO: 1997634 - RNA, 19 nt, Artificial Sequence
  Description of Artificial Sequence: Synthetic oligonucleotide
  Sense strand starting at position 1984 of SEQ ID NO: 1880837
ccuccuaaccaaggauuga

SEQ ID NO: 1997635 - RNA, 19 nt, Artificial Sequence
  Description of Artificial Sequence: Synthetic oligonucleotide
  Antisense strand to SEQ ID NO: 1997634
ucaauccuugguuaggagg

SEQ ID NO: 1997636 - RNA, 19 nt, Artificial Sequence
  Description of Artificial Sequence: Synthetic oligonucleotide
  Sense strand starting at position 1994 of SEQ ID NO: 1880837
aaggauugaccaugugauu

SEQ ID NO: 1997637 - RNA, 19 nt, Artificial Sequence
  Description of Artificial Sequence: Synthetic oligonucleotide
  Antisense strand to SEQ ID NO: 1997636
aaucacauggucaauccuu

SEQ ID NO: 1997638 - RNA, 19 nt, Artificial Sequence
  Description of Artificial Sequence: Synthetic oligonucleotide
  Sense strand starting at position 2162 of SEQ ID NO: 1880837
gugacuuagcaucagccaa

SEQ ID NO: 1997639 - RNA, 19 nt, Artificial Sequence
  Description of Artificial Sequence: Synthetic oligonucleotide
  Antisense strand to SEQ ID NO: 1997638
uuggcugaugcuaagucac

SEQ ID NO: 1997640 - RNA, 19 nt, Artificial Sequence
  Description of Artificial Sequence: Synthetic oligonucleotide
  Sense strand starting at position 2224 of SEQ ID NO: 1880837
acagcaugugacugaaacu

SEQ ID NO: 1997641 - RNA, 19 nt, Artificial Sequence
  Description of Artificial Sequence: Synthetic oligonucleotide
  Antisense strand to SEQ ID NO: 1997640
aguuucagucacaugcugu

SEQ ID NO: 1997642 - RNA, 19 nt, Artificial Sequence
  Description of Artificial Sequence: Synthetic oligonucleotide
  Sense strand starting at position 2585 of SEQ ID NO: 1880837
aagauaaugcaguaguuaa

SEQ ID NO: 1997643 - RNA, 19 nt, Artificial Sequence
  Description of Artificial Sequence: Synthetic oligonucleotide
  Antisense strand to SEQ ID NO: 1997642
uuaacuacugcauuaucuu

SEQ ID NO: 1997644 - RNA, 19 nt, Artificial Sequence
  Description of Artificial Sequence: Synthetic oligonucleotide
  Sense strand starting at position 2624 of SEQ ID NO: 1880837
gugaccaaauccucaguaa

SEQ ID NO: 1997645 - RNA, 19 nt, Artificial Sequence
  Description of Artificial Sequence: Synthetic oligonucleotide
  Antisense strand to SEQ ID NO: 1997644
uuacugaggauuuggucac

SEQ ID NO: 1997646 - RNA, 19 nt, Artificial Sequence
  Description of Artificial Sequence: Synthetic oligonucleotide
  Sense strand starting at position 2645 of SEQ ID NO: 1880837
auaacuucuugaguggauu

SEQ ID NO: 1997647 - RNA, 19 nt, Artificial Sequence
  Description of Artificial Sequence: Synthetic oligonucleotide
  Antisense strand to SEQ ID NO: 1997646
aauccacucaagaaguuau

SEQ ID NO: 1997648 - RNA, 19 nt, Artificial Sequence
  Description of Artificial Sequence: Synthetic oligonucleotide
  Sense strand starting at position 2794 of SEQ ID NO: 1880837
gggcuuuguauuuggcauu

SEQ ID NO: 1997649 - RNA, 19 nt, Artificial Sequence
  Description of Artificial Sequence: Synthetic oligonucleotide
  Antisense strand to SEQ ID NO: 1997648
aaugccaaauacaaagccc

SEQ ID NO: 1997650 - RNA, 19 nt, Artificial Sequence
  Description of Artificial Sequence: Synthetic oligonucleotide
  Sense strand starting at position 2969 of SEQ ID NO: 1880837
guaugcucucaagagaaau

SEQ ID NO: 1997651 - RNA, 19 nt, Artificial Sequence
  Description of Artificial Sequence: Synthetic oligonucleotide
  Antisense strand to SEQ ID NO: 1997650
auuucucuugagagcauac

SEQ ID NO: 1997652 - RNA, 19 nt, Artificial Sequence
  Description of Artificial Sequence: Synthetic oligonucleotide
  Sense strand starting at position 3076 of SEQ ID NO: 1880837
aggaaauccuuucugacuc

SEQ ID NO: 1997653 - RNA, 19 nt, Artificial Sequence
  Description of Artificial Sequence: Synthetic oligonucleotide
  Antisense strand to SEQ ID NO: 1997652
gagucagaaaggauuuccu

SEQ ID NO: 1997654 - RNA, 19 nt, Artificial Sequence
  Description of Artificial Sequence: Synthetic oligonucleotide
  Sense strand starting at position 3168 of SEQ ID NO: 1880837
aggcacaauggauguaaau

SEQ ID NO: 1997655 - RNA, 19 nt, Artificial Sequence
  Description of Artificial Sequence: Synthetic oligonucleotide
  Antisense strand to SEQ ID NO: 1997654
auuuacauccauugugccu

SEQ ID NO: 1997656 - RNA, 19 nt, Artificial Sequence
  Description of Artificial Sequence: Synthetic oligonucleotide
  Sense strand starting at position 3214 of SEQ ID NO: 1880837
aaaggauaaugucuuacgu

SEQ ID NO: 1997657 - RNA, 19 nt, Artificial Sequence
  Description of Artificial Sequence: Synthetic oligonucleotide
  Antisense strand to SEQ ID NO: 1997656
acguaagacauuauccuuu

SEQ ID NO: 1997658 - RNA, 19 nt, Artificial Sequence
  Description of Artificial Sequence: Synthetic oligonucleotide
  Sense strand starting at position 3250 of SEQ ID NO: 1880837
cuggguguuccugaucuaa

SEQ ID NO: 1997659 - RNA, 19 nt, Artificial Sequence
  Description of Artificial Sequence: Synthetic oligonucleotide
  Antisense strand to SEQ ID NO: 1997658
uuagaucaggaacacccag

SEQ ID NO: 1997660 - RNA, 19 nt, Artificial Sequence
  Description of Artificial Sequence: Synthetic oligonucleotide
  Sense strand starting at position 3308 of SEQ ID NO: 1880837
cuaggacauguuugccaaa

SEQ ID NO: 1997661 - RNA, 19 nt, Artificial Sequence
  Description of Artificial Sequence: Synthetic oligonucleotide
  Antisense strand to SEQ ID NO: 1997660
uuuggcaaacauguccuag

SEQ ID NO: 1997662 - RNA, 19 nt, Artificial Sequence
  Description of Artificial Sequence: Synthetic oligonucleotide
  Sense strand starting at position 3468 of SEQ ID NO: 1880837
agacucacugacuguagaa

SEQ ID NO: 1997663 - RNA, 19 nt, Artificial Sequence
  Description of Artificial Sequence: Synthetic oligonucleotide
  Antisense strand to SEQ ID NO: 1997662
uucuacagucagugagucu

SEQ ID NO: 1997664 - RNA, 19 nt, Artificial Sequence
  Description of Artificial Sequence: Synthetic oligonucleotide
  Sense strand starting at position 3484 of SEQ ID NO: 1880837
gaaauagacuuggccuguu

SEQ ID NO: 1997665 - RNA, 19 nt, Artificial Sequence
  Description of Artificial Sequence: Synthetic oligonucleotide
  Antisense strand to SEQ ID NO: 1997664
aacaggccaagucuauuuc

SEQ ID NO: 1997666 - RNA, 19 nt, Artificial Sequence
  Description of Artificial Sequence: Synthetic oligonucleotide
  Sense strand starting at position 3676 of SEQ ID NO: 1880837
gugcaaucuacucaugagg

SEQ ID NO: 1997667 - RNA, 19 nt, Artificial Sequence
  Description of Artificial Sequence: Synthetic oligonucleotide
  Antisense strand to SEQ ID NO: 1997666
ccucaugaguagauugcac

SEQ ID NO: 1997668 - RNA, 19 nt, Artificial Sequence
  Description of Artificial Sequence: Synthetic oligonucleotide
  Sense strand starting at position 3691 of SEQ ID NO: 1880837
gaggaaagaugguuugcaa

SEQ ID NO: 1997669 - RNA, 19 nt, Artificial Sequence
  Description of Artificial Sequence: Synthetic oligonucleotide
  Antisense strand to SEQ ID NO: 1997668
uugcaaaccaucuuuccuc

SEQ ID NO: 1997670 - RNA, 19 nt, Artificial Sequence
  Description of Artificial Sequence: Synthetic oligonucleotide
  Sense strand starting at position 3694 of SEQ ID NO: 1880837
gaaagaugguuugcaaaga

SEQ ID NO: 1997671 - RNA, 19 nt, Artificial Sequence
  Description of Artificial Sequence: Synthetic oligonucleotide
  Antisense strand to SEQ ID NO: 1997670
ucuuugcaaaccaucuuuc

SEQ ID NO: 1997672 - RNA, 19 nt, Artificial Sequence
  Description of Artificial Sequence: Synthetic oligonucleotide
  Sense strand starting at position 3841 of SEQ ID NO: 1880837
gcuguuucugaauauaaug

SEQ ID NO: 1997673 - RNA, 19 nt, Artificial Sequence
  Description of Artificial Sequence: Synthetic oligonucleotide
  Antisense strand to SEQ ID NO: 1997672
cauuauauucagaaacagc

SEQ ID NO: 1997674 - RNA, 19 nt, Artificial Sequence
  Description of Artificial Sequence: Synthetic oligonucleotide
  Sense strand starting at position 3896 of SEQ ID NO: 1880837
agaacuuuaagguguauga

SEQ ID NO: 1997675 - RNA, 19 nt, Artificial Sequence
  Description of Artificial Sequence: Synthetic oligonucleotide
  Antisense strand to SEQ ID NO: 1997674
ucauacaccuuaaaguucu

SEQ ID NO: 1997676 - RNA, 19 nt, Artificial Sequence
  Description of Artificial Sequence: Synthetic oligonucleotide
  Sense strand starting at position 3906 of SEQ ID NO: 1880837
gguguaugagcacaggaua

SEQ ID NO: 1997677 - RNA, 19 nt, Artificial Sequence
  Description of Artificial Sequence: Synthetic oligonucleotide
  Antisense strand to SEQ ID NO: 1997676
uauccugugcucauacacc

SEQ ID NO: 1997678 - RNA, 19 nt, Artificial Sequence
  Description of Artificial Sequence: Synthetic oligonucleotide
  Sense strand starting at position 897 of SEQ ID NO: 1880838
ugcugaauccucuggagga

SEQ ID NO: 1997679 - RNA, 19 nt, Artificial Sequence
  Description of Artificial Sequence: Synthetic oligonucleotide
  Antisense strand to SEQ ID NO: 1997678
uccuccagaggauucagca

SEQ ID NO: 1997680 - RNA, 19 nt, Artificial Sequence
  Description of Artificial Sequence: Synthetic oligonucleotide
  Sense strand starting at position 1085 of SEQ ID NO: 1880838
cacagaacccguugagcuu

SEQ ID NO: 1997681 - RNA, 19 nt, Artificial Sequence
  Description of Artificial Sequence: Synthetic oligonucleotide
  Antisense strand to SEQ ID NO: 1997680
aagcucaacggguucugug

SEQ ID NO: 1997682 - RNA, 19 nt, Artificial Sequence
  Description of Artificial Sequence: Synthetic oligonucleotide
  Sense strand starting at position 2375 of SEQ ID NO: 1880838
aaaguuagcccuuaacguu

SEQ ID NO: 1997683 - RNA, 19 nt, Artificial Sequence
  Description of Artificial Sequence: Synthetic oligonucleotide
  Antisense strand to SEQ ID NO: 1997682
aacguuaagggcuaacuuu

SEQ ID NO: 1997684 - RNA, 19 nt, Artificial Sequence
  Description of Artificial Sequence: Synthetic oligonucleotide
  Sense strand starting at position 2508 of SEQ ID NO: 1880838
aguagucuggaaggaguua

SEQ ID NO: 1997685 - RNA, 19 nt, Artificial Sequence
  Description of Artificial Sequence: Synthetic oligonucleotide
  Antisense strand to SEQ ID NO: 1997684
uaacuccuuccagacuacu

SEQ ID NO: 1997686 - RNA, 19 nt, Artificial Sequence
  Description of Artificial Sequence: Synthetic oligonucleotide
  Sense strand starting at position 2509 of SEQ ID NO: 1880838
guagucuggaaggaguuaa

SEQ ID NO: 1997687 - RNA, 19 nt, Artificial Sequence
  Description of Artificial Sequence: Synthetic oligonucleotide
  Antisense strand to SEQ ID NO: 1997686
uuaacuccuuccagacuac

SEQ ID NO: 1997688 - RNA, 19 nt, Artificial Sequence
  Description of Artificial Sequence: Synthetic oligonucleotide
  Sense strand starting at position 2564 of SEQ ID NO: 1880838
uggacuuggcagugucuaa

SEQ ID NO: 1997689 - RNA, 19 nt, Artificial Sequence
  Description of Artificial Sequence: Synthetic oligonucleotide
  Antisense strand to SEQ ID NO: 1997688
uuagacacugccaagucca

SEQ ID NO: 1997690 - RNA, 19 nt, Artificial Sequence
  Description of Artificial Sequence: Synthetic oligonucleotide
  Sense strand starting at position 2571 of SEQ ID NO: 1880838
ggcagugucuaaccagaag

SEQ ID NO: 1997691 - RNA, 19 nt, Artificial Sequence
  Description of Artificial Sequence: Synthetic oligonucleotide
  Antisense strand to SEQ ID NO: 1997690
cuucugguuagacacugcc

SEQ ID NO: 1997692 - RNA, 19 nt, Artificial Sequence
  Description of Artificial Sequence: Synthetic oligonucleotide
  Sense strand starting at position 2813 of SEQ ID NO: 1880838
augggaugcugguuuaaau

SEQ ID NO: 1997693 - RNA, 19 nt, Artificial Sequence
  Description of Artificial Sequence: Synthetic oligonucleotide
  Antisense strand to SEQ ID NO: 1997692
auuuaaaccagcaucccau

SEQ ID NO: 1997694 - RNA, 19 nt, Artificial Sequence
  Description of Artificial Sequence: Synthetic oligonucleotide
  Sense strand starting at position 2988 of SEQ ID NO: 1880838
uccuuccacuauguguaau

SEQ ID NO: 1997695 - RNA, 19 nt, Artificial Sequence
  Description of Artificial Sequence: Synthetic oligonucleotide
  Antisense strand to SEQ ID NO: 1997694
auuacacauaguggaagga

SEQ ID NO: 1997696 - RNA, 19 nt, Artificial Sequence
  Description of Artificial Sequence: Synthetic oligonucleotide
  Sense strand starting at position 2998 of SEQ ID NO: 1880838
auguguaauccugaaaugc

SEQ ID NO: 1997697 - RNA, 19 nt, Artificial Sequence
  Description of Artificial Sequence: Synthetic oligonucleotide
  Antisense strand to SEQ ID NO: 1997696
gcauuucaggauuacacau

SEQ ID NO: 1997698 - RNA, 19 nt, Artificial Sequence
  Description of Artificial Sequence: Synthetic oligonucleotide
  Sense strand starting at position 3006 of SEQ ID NO: 1880838
uccugaaaugcugggaaca

SEQ ID NO: 1997699 - RNA, 19 nt, Artificial Sequence
  Description of Artificial Sequence: Synthetic oligonucleotide
  Antisense strand to SEQ ID NO: 1997698
uguucccagcauuucagga

SEQ ID NO: 1997700 - RNA, 19 nt, Artificial Sequence
  Description of Artificial Sequence: Synthetic oligonucleotide
  Sense strand starting at position 3007 of SEQ ID NO: 1880838
ccugaaaugcugggaacau

SEQ ID NO: 1997701 - RNA, 19 nt, Artificial Sequence
  Description of Artificial Sequence: Synthetic oligonucleotide
  Antisense strand to SEQ ID NO: 1997700
auguucccagcauuucagg

SEQ ID NO: 1997702 - RNA, 19 nt, Artificial Sequence
  Description of Artificial Sequence: Synthetic oligonucleotide
  Sense strand starting at position 3048 of SEQ ID NO: 1880838
acugcaaaucucuaagguu

SEQ ID NO: 1997703 - RNA, 19 nt, Artificial Sequence
  Description of Artificial Sequence: Synthetic oligonucleotide
  Antisense strand to SEQ ID NO: 1997702
aaccuuagagauuugcagu

SEQ ID NO: 1997704 - RNA, 19 nt, Artificial Sequence
  Description of Artificial Sequence: Synthetic oligonucleotide
  Sense strand starting at position 3077 of SEQ ID NO: 1880838
acuuaaacccuuggauguu

SEQ ID NO: 1997705 - RNA, 19 nt, Artificial Sequence
  Description of Artificial Sequence: Synthetic oligonucleotide
  Antisense strand to SEQ ID NO: 1997704
aacauccaaggguuuaagu

SEQ ID NO: 1997706 - RNA, 19 nt, Artificial Sequence
  Description of Artificial Sequence: Synthetic oligonucleotide
  Sense strand starting at position 3089 of SEQ ID NO: 1880838
ggauguugagcuugaguua

SEQ ID NO: 1997707 - RNA, 19 nt, Artificial Sequence
  Description of Artificial Sequence: Synthetic oligonucleotide
  Antisense strand to SEQ ID NO: 1997706
uaacucaagcucaacaucc

SEQ ID NO: 1997708 - RNA, 19 nt, Artificial Sequence
  Description of Artificial Sequence: Synthetic oligonucleotide
  Sense strand starting at position 3090 of SEQ ID NO: 1880838
gauguugagcuugaguuaa

SEQ ID NO: 1997709 - RNA, 19 nt, Artificial Sequence
  Description of Artificial Sequence: Synthetic oligonucleotide
  Antisense strand to SEQ ID NO: 1997708
uuaacucaagcucaacauc

SEQ ID NO: 1997710 - RNA, 19 nt, Artificial Sequence
  Description of Artificial Sequence: Synthetic oligonucleotide
  Sense strand starting at position 3092 of SEQ ID NO: 1880838
uguugagcuugaguuaaau

SEQ ID NO: 1997711 - RNA, 19 nt, Artificial Sequence
  Description of Artificial Sequence: Synthetic oligonucleotide
  Antisense strand to SEQ ID NO: 1997710
auuuaacucaagcucaaca

SEQ ID NO: 1997712 - RNA, 19 nt, Artificial Sequence
  Description of Artificial Sequence: Synthetic oligonucleotide
  Sense strand starting at position 3103 of SEQ ID NO: 1880838
aguuaaaugccauacuuug

SEQ ID NO: 1997713 - RNA, 19 nt, Artificial Sequence
  Description of Artificial Sequence: Synthetic oligonucleotide
  Antisense strand to SEQ ID NO: 1997712
caaaguauggcauuuaacu

SEQ ID NO: 1997714 - RNA, 19 nt, Artificial Sequence
  Description of Artificial Sequence: Synthetic oligonucleotide
  Sense strand starting at position 3355 of SEQ ID NO: 1880838
accuucuucuguucugaua

SEQ ID NO: 1997715 - RNA, 19 nt, Artificial Sequence
  Description of Artificial Sequence: Synthetic oligonucleotide
  Antisense strand to SEQ ID NO: 1997714
uaucagaacagaagaaggu

SEQ ID NO: 1997716 - RNA, 19 nt, Artificial Sequence
  Description of Artificial Sequence: Synthetic oligonucleotide
  Sense strand starting at position 3423 of SEQ ID NO: 1880838
ugaugaccaucuguuuaca

SEQ ID NO: 1997717 - RNA, 19 nt, Artificial Sequence
  Description of Artificial Sequence: Synthetic oligonucleotide
  Antisense strand to SEQ ID NO: 1997716
uguaaacagauggucauca

SEQ ID NO: 1997718 - RNA, 19 nt, Artificial Sequence
  Description of Artificial Sequence: Synthetic oligonucleotide
  Sense strand starting at position 3425 of SEQ ID NO: 1880838
augaccaucuguuuacaga

SEQ ID NO: 1997719 - RNA, 19 nt, Artificial Sequence
  Description of Artificial Sequence: Synthetic oligonucleotide
  Antisense strand to SEQ ID NO: 1997718
ucuguaaacagauggucau

SEQ ID NO: 1997720 - RNA, 19 nt, Artificial Sequence
  Description of Artificial Sequence: Synthetic oligonucleotide
  Sense strand starting at position 3465 of SEQ ID NO: 1880838
gggacuuuguguuugacca

SEQ ID NO: 1997721 - RNA, 19 nt, Artificial Sequence
  Description of Artificial Sequence: Synthetic oligonucleotide
  Antisense strand to SEQ ID NO: 1997720
uggucaaacacaaaguccc

SEQ ID NO: 1997722 - RNA, 19 nt, Artificial Sequence
  Description of Artificial Sequence: Synthetic oligonucleotide
  Sense strand starting at position 3466 of SEQ ID NO: 1880838
ggacuuuguguuugaccag

SEQ ID NO: 1997723 - RNA, 19 nt, Artificial Sequence
  Description of Artificial Sequence: Synthetic oligonucleotide
  Antisense strand to SEQ ID NO: 1997722
cuggucaaacacaaagucc

SEQ ID NO: 1997724 - RNA, 19 nt, Artificial Sequence
  Description of Artificial Sequence: Synthetic oligonucleotide
  Sense strand starting at position 3472 of SEQ ID NO: 1880838
uguguuugaccaggagguu

SEQ ID NO: 1997725 - RNA, 19 nt, Artificial Sequence
  Description of Artificial Sequence: Synthetic oligonucleotide
  Antisense strand to SEQ ID NO: 1997724
aaccuccuggucaaacaca

SEQ ID NO: 1997726 - RNA, 19 nt, Artificial Sequence
  Description of Artificial Sequence: Synthetic oligonucleotide
  Sense strand starting at position 3473 of SEQ ID NO: 1880838
guguuugaccaggagguua

SEQ ID NO: 1997727 - RNA, 19 nt, Artificial Sequence
  Description of Artificial Sequence: Synthetic oligonucleotide
  Antisense strand to SEQ ID NO: 1997726
uaaccuccuggucaaacac

SEQ ID NO: 1997728 - RNA, 19 nt, Artificial Sequence
  Description of Artificial Sequence: Synthetic oligonucleotide
  Sense strand starting at position 3492 of SEQ ID NO: 1880838
ggagguaaccucugacaug

SEQ ID NO: 1997729 - RNA, 19 nt, Artificial Sequence
  Description of Artificial Sequence: Synthetic oligonucleotide
  Antisense strand to SEQ ID NO: 1997728
caugucagagguuaccucc

SEQ ID NO: 1997730 - RNA, 19 nt, Artificial Sequence
  Description of Artificial Sequence: Synthetic oligonucleotide
  Sense strand starting at position 3504 of SEQ ID NO: 1880838
ugacaugugacaggcugaa

SEQ ID NO: 1997731 - RNA, 19 nt, Artificial Sequence
  Description of Artificial Sequence: Synthetic oligonucleotide
  Antisense strand to SEQ ID NO: 1997730
uucagccugucacauguca

SEQ ID NO: 1997732 - RNA, 19 nt, Artificial Sequence
  Description of Artificial Sequence: Synthetic oligonucleotide
  Sense strand starting at position 3544 of SEQ ID NO: 1880838
uucuguggcauuuguagua

SEQ ID NO: 1997733 - RNA, 19 nt, Artificial Sequence
  Description of Artificial Sequence: Synthetic oligonucleotide
  Antisense strand to SEQ ID NO: 1997732
uacuacaaaugccacagaa

SEQ ID NO: 1997734 - RNA, 19 nt, Artificial Sequence
  Description of Artificial Sequence: Synthetic oligonucleotide
  Sense strand starting at position 3616 of SEQ ID NO: 1880838
uuaguauuagcaggaaauu

SEQ ID NO: 1997735 - RNA, 19 nt, Artificial Sequence
  Description of Artificial Sequence: Synthetic oligonucleotide
  Antisense strand to SEQ ID NO: 1997734
aauuuccugcuaauacuaa

SEQ ID NO: 1997736 - RNA, 19 nt, Artificial Sequence
  Description of Artificial Sequence: Synthetic oligonucleotide
  Sense strand starting at position 3653 of SEQ ID NO: 1880838
uguugagacccuugguuga

SEQ ID NO: 1997737 - RNA, 19 nt, Artificial Sequence
  Description of Artificial Sequence: Synthetic oligonucleotide
  Antisense strand to SEQ ID NO: 1997736
ucaaccaagggucucaaca

SEQ ID NO: 1997738 - RNA, 19 nt, Artificial Sequence
  Description of Artificial Sequence: Synthetic oligonucleotide
  Sense strand starting at position 3672 of SEQ ID NO: 1880838
cuuucuuuaugggugcaua

SEQ ID NO: 1997739 - RNA, 19 nt, Artificial Sequence
  Description of Artificial Sequence: Synthetic oligonucleotide
  Antisense strand to SEQ ID NO: 1997738
uaugcacccauaaagaaag

SEQ ID NO: 1997740 - RNA, 19 nt, Artificial Sequence
  Description of Artificial Sequence: Synthetic oligonucleotide
  Sense strand starting at position 3727 of SEQ ID NO: 1880838
cuggauguuguuuaauaga

SEQ ID NO: 1997741 - RNA, 19 nt, Artificial Sequence
  Description of Artificial Sequence: Synthetic oligonucleotide
  Antisense strand to SEQ ID NO: 1997740
ucuauuaaacaacauccag

SEQ ID NO: 1997742 - RNA, 19 nt, Artificial Sequence
  Description of Artificial Sequence: Synthetic oligonucleotide
  Sense strand starting at position 3738 of SEQ ID NO: 1880838
uuaauagacgagcacuuau

SEQ ID NO: 1997743 - RNA, 19 nt, Artificial Sequence
  Description of Artificial Sequence: Synthetic oligonucleotide
  Antisense strand to SEQ ID NO: 1997742
auaagugcucgucuauuaa

SEQ ID NO: 1997744 - RNA, 19 nt, Artificial Sequence
  Description of Artificial Sequence: Synthetic oligonucleotide
  Sense strand starting at position 3810 of SEQ ID NO: 1880838
acuaccaugcugggauaau

SEQ ID NO: 1997745 - RNA, 19 nt, Artificial Sequence
  Description of Artificial Sequence: Synthetic oligonucleotide
  Antisense strand to SEQ ID NO: 1997744
auuaucccagcaugguagu

SEQ ID NO: 1997746 - RNA, 19 nt, Artificial Sequence
  Description of Artificial Sequence: Synthetic oligonucleotide
  Sense strand starting at position 3888 of SEQ ID NO: 1880838
ugagcaacccuauacaguu

SEQ ID NO: 1997747 - RNA, 19 nt, Artificial Sequence
  Description of Artificial Sequence: Synthetic oligonucleotide
  Antisense strand to SEQ ID NO: 1997746
aacuguauaggguugcuca

SEQ ID NO: 1997748 - RNA, 19 nt, Artificial Sequence
  Description of Artificial Sequence: Synthetic oligonucleotide
  Sense strand starting at position 3897 of SEQ ID NO: 1880838
cuauacaguugguugacaa

SEQ ID NO: 1997749 - RNA, 19 nt, Artificial Sequence
  Description of Artificial Sequence: Synthetic oligonucleotide
  Antisense strand to SEQ ID NO: 1997748
uugucaaccaacuguauag

SEQ ID NO: 1997750 - RNA, 19 nt, Artificial Sequence
  Description of Artificial Sequence: Synthetic oligonucleotide
  Sense strand starting at position 3898 of SEQ ID NO: 1880838
uauacaguugguugacaaa

SEQ ID NO: 1997751 - RNA, 19 nt, Artificial Sequence
  Description of Artificial Sequence: Synthetic oligonucleotide
  Antisense strand to SEQ ID NO: 1997750
uuugucaaccaacuguaua

SEQ ID NO: 1997752 - RNA, 19 nt, Artificial Sequence
  Description of Artificial Sequence: Synthetic oligonucleotide
  Sense strand starting at position 3945 of SEQ ID NO: 1880838
uuuacuguccauuggaauu

SEQ ID NO: 1997753 - RNA, 19 nt, Artificial Sequence
  Description of Artificial Sequence: Synthetic oligonucleotide
  Antisense strand to SEQ ID NO: 1997752
aauuccaauggacaguaaa

SEQ ID NO: 1997754 - RNA, 19 nt, Artificial Sequence
  Description of Artificial Sequence: Synthetic oligonucleotide
  Sense strand starting at position 3967 of SEQ ID NO: 1880838
ugacuccugccaggaaagu

SEQ ID NO: 1997755 - RNA, 19 nt, Artificial Sequence
  Description of Artificial Sequence: Synthetic oligonucleotide
  Antisense strand to SEQ ID NO: 1997754
acuuuccuggcaggaguca

SEQ ID NO: 1997756 - RNA, 19 nt, Artificial Sequence
  Description of Artificial Sequence: Synthetic oligonucleotide
  Sense strand starting at position 3968 of SEQ ID NO: 1880838
gacuccugccaggaaaguu

SEQ ID NO: 1997757 - RNA, 19 nt, Artificial Sequence
  Description of Artificial Sequence: Synthetic oligonucleotide
  Antisense strand to SEQ ID NO: 1997756
aacuuuccuggcaggaguc

SEQ ID NO: 1997758 - RNA, 19 nt, Artificial Sequence
  Description of Artificial Sequence: Synthetic oligonucleotide
  Sense strand starting at position 216 of SEQ ID NO: 1880842
agguuaucacuuugaucau

SEQ ID NO: 1997759 - RNA, 19 nt, Artificial Sequence
  Description of Artificial Sequence: Synthetic oligonucleotide
  Antisense strand to SEQ ID NO: 1997758
augaucaaagugauaaccu

SEQ ID NO: 1997760 - RNA, 19 nt, Artificial Sequence
  Description of Artificial Sequence: Synthetic oligonucleotide
  Sense strand starting at position 341 of SEQ ID NO: 1880842
cucaacuguguguacagau

SEQ ID NO: 1997761 - RNA, 19 nt, Artificial Sequence
  Description of Artificial Sequence: Synthetic oligonucleotide
  Antisense strand to SEQ ID NO: 1997760
aucuguacacacaguugag

SEQ ID NO: 1997762 - RNA, 19 nt, Artificial Sequence
  Description of Artificial Sequence: Synthetic oligonucleotide
  Sense strand starting at position 360 of SEQ ID NO: 1880842
uuucuaagucguuaugaau

SEQ ID NO: 1997763 - RNA, 19 nt, Artificial Sequence
  Description of Artificial Sequence: Synthetic oligonucleotide
  Antisense strand to SEQ ID NO: 1997762
auucauaacgacuuagaaa

SEQ ID NO: 1997764 - RNA, 19 nt, Artificial Sequence
  Description of Artificial Sequence: Synthetic oligonucleotide
  Sense strand starting at position 429 of SEQ ID NO: 1880842
ggacaugcaucuccuguaa

SEQ ID NO: 1997765 - RNA, 19 nt, Artificial Sequence
  Description of Artificial Sequence: Synthetic oligonucleotide
  Antisense strand to SEQ ID NO: 1997764
uuacaggagaugcaugucc

SEQ ID NO: 1997766 - RNA, 19 nt, Artificial Sequence
  Description of Artificial Sequence: Synthetic oligonucleotide
  Sense strand starting at position 485 of SEQ ID NO: 1880842
ggcagcuucgugucacuuu

SEQ ID NO: 1997767 - RNA, 19 nt, Artificial Sequence
  Description of Artificial Sequence: Synthetic oligonucleotide
  Antisense strand to SEQ ID NO: 1997766
aaagugacacgaagcugcc

SEQ ID NO: 1997768 - RNA, 19 nt, Artificial Sequence
  Description of Artificial Sequence: Synthetic oligonucleotide
  Sense strand starting at position 556 of SEQ ID NO: 1880842
ggacacaucucuguccaca

SEQ ID NO: 1997769 - RNA, 19 nt, Artificial Sequence
  Description of Artificial Sequence: Synthetic oligonucleotide
  Antisense strand to SEQ ID NO: 1997768
uguggacagagaugugucc

SEQ ID NO: 1997770 - RNA, 19 nt, Artificial Sequence
  Description of Artificial Sequence: Synthetic oligonucleotide
  Sense strand starting at position 564 of SEQ ID NO: 1880842
cucuguccacaguguaaau

SEQ ID NO: 1997771 - RNA, 19 nt, Artificial Sequence
  Description of Artificial Sequence: Synthetic oligonucleotide
  Antisense strand to SEQ ID NO: 1997770
auuuacacuguggacagag

SEQ ID NO: 1997772 - RNA, 19 nt, Artificial Sequence
  Description of Artificial Sequence: Synthetic oligonucleotide
  Sense strand starting at position 887 of SEQ ID NO: 1880842
cgcgcauucgacccaaacu

SEQ ID NO: 1997773 - RNA, 19 nt, Artificial Sequence
  Description of Artificial Sequence: Synthetic oligonucleotide
  Antisense strand to SEQ ID NO: 1997772
aguuugggucgaaugcgcg

SEQ ID NO: 1997774 - RNA, 19 nt, Artificial Sequence
  Description of Artificial Sequence: Synthetic oligonucleotide
  Sense strand starting at position 1057 of SEQ ID NO: 1880842
aaucgcuguggucaagaaa

SEQ ID NO: 1997775 - RNA, 19 nt, Artificial Sequence
  Description of Artificial Sequence: Synthetic oligonucleotide
  Antisense strand to SEQ ID NO: 1997774
uuucuugaccacagcgauu

SEQ ID NO: 1997776 - RNA, 19 nt, Artificial Sequence
  Description of Artificial Sequence: Synthetic oligonucleotide
  Sense strand starting at position 1069 of SEQ ID NO: 1880842
caagaaaguccuggaagcu

SEQ ID NO: 1997777 - RNA, 19 nt, Artificial Sequence
  Description of Artificial Sequence: Synthetic oligonucleotide
  Antisense strand to SEQ ID NO: 1997776
agcuuccaggacuuucuug

SEQ ID NO: 1997778 - RNA, 19 nt, Artificial Sequence
  Description of Artificial Sequence: Synthetic oligonucleotide
  Sense strand starting at position 1104 of SEQ ID NO: 1880842
gggcgguuugcgguuaaca

SEQ ID NO: 1997779 - RNA, 19 nt, Artificial Sequence
  Description of Artificial Sequence: Synthetic oligonucleotide
  Antisense strand to SEQ ID NO: 1997778
uguuaaccgcaaaccgccc

SEQ ID NO: 1997780 - RNA, 19 nt, Artificial Sequence
  Description of Artificial Sequence: Synthetic oligonucleotide
  Sense strand starting at position 2253 of SEQ ID NO: 1880842
uugugugucuggguaagag

SEQ ID NO: 1997781 - RNA, 19 nt, Artificial Sequence
  Description of Artificial Sequence: Synthetic oligonucleotide
  Antisense strand to SEQ ID NO: 1997780
cucuuacccagacacacaa

SEQ ID NO: 1997782 - RNA, 19 nt, Artificial Sequence
  Description of Artificial Sequence: Synthetic oligonucleotide
  Sense strand starting at position 2293 of SEQ ID NO: 1880842
ugacguccucuggagaguu

SEQ ID NO: 1997783 - RNA, 19 nt, Artificial Sequence
  Description of Artificial Sequence: Synthetic oligonucleotide
  Antisense strand to SEQ ID NO: 1997782
aacucuccagaggacguca

SEQ ID NO: 1997784 - RNA, 19 nt, Artificial Sequence
  Description of Artificial Sequence: Synthetic oligonucleotide
  Sense strand starting at position 2304 of SEQ ID NO: 1880842
ggagaguuggaucgggcuu

SEQ ID NO: 1997785 - RNA, 19 nt, Artificial Sequence
  Description of Artificial Sequence: Synthetic oligonucleotide
  Antisense strand to SEQ ID NO: 1997784
aagcccgauccaacucucc

SEQ ID NO: 1997786 - RNA, 19 nt, Artificial Sequence
  Description of Artificial Sequence: Synthetic oligonucleotide
  Sense strand starting at position 2540 of SEQ ID NO: 1880842
uuucuuugcgacuacuaga

SEQ ID NO: 1997787 - RNA, 19 nt, Artificial Sequence
  Description of Artificial Sequence: Synthetic oligonucleotide
  Antisense strand to SEQ ID NO: 1997786
ucuaguagucgcaaagaaa

SEQ ID NO: 1997788 - RNA, 19 nt, Artificial Sequence
  Description of Artificial Sequence: Synthetic oligonucleotide
  Sense strand starting at position 2632 of SEQ ID NO: 1880842
uccugaguccuaugacaac

SEQ ID NO: 1997789 - RNA, 19 nt, Artificial Sequence
  Description of Artificial Sequence: Synthetic oligonucleotide
  Antisense strand to SEQ ID NO: 1997788
guugucauaggacucagga

SEQ ID NO: 1997790 - RNA, 19 nt, Artificial Sequence
  Description of Artificial Sequence: Synthetic oligonucleotide
  Sense strand starting at position 2638 of SEQ ID NO: 1880842
guccuaugacaacauuguu

SEQ ID NO: 1997791 - RNA, 19 nt, Artificial Sequence
  Description of Artificial Sequence: Synthetic oligonucleotide
  Antisense strand to SEQ ID NO: 1997790
aacaauguugucauaggac

SEQ ID NO: 1997792 - RNA, 19 nt, Artificial Sequence
  Description of Artificial Sequence: Synthetic oligonucleotide
  Sense strand starting at position 2672 of SEQ ID NO: 1880842
cuuagcccaugcuuagaua

SEQ ID NO: 1997793 - RNA, 19 nt, Artificial Sequence
  Description of Artificial Sequence: Synthetic oligonucleotide
  Antisense strand to SEQ ID NO: 1997792
uaucuaagcaugggcuaag

SEQ ID NO: 1997794 - RNA, 19 nt, Artificial Sequence
  Description of Artificial Sequence: Synthetic oligonucleotide
  Sense strand starting at position 2700 of SEQ ID NO: 1880842
guuaaagggagaugaaguu

SEQ ID NO: 1997795 - RNA, 19 nt, Artificial Sequence
  Description of Artificial Sequence: Synthetic oligonucleotide
  Antisense strand to SEQ ID NO: 1997794
aacuucaucucccuuuaac

SEQ ID NO: 1997796 - RNA, 19 nt, Artificial Sequence
  Description of Artificial Sequence: Synthetic oligonucleotide
  Sense strand starting at position 2728 of SEQ ID NO: 1880842
cggguuucuugauuguaaa

SEQ ID NO: 1997797 - RNA, 19 nt, Artificial Sequence
  Description of Artificial Sequence: Synthetic oligonucleotide
  Antisense strand to SEQ ID NO: 1997796
uuuacaaucaagaaacccg

SEQ ID NO: 1997798 - RNA, 19 nt, Artificial Sequence
  Description of Artificial Sequence: Synthetic oligonucleotide
  Sense strand starting at position 2906 of SEQ ID NO: 1880842
ccguuuggucuucagggau

SEQ ID NO: 1997799 - RNA, 19 nt, Artificial Sequence
  Description of Artificial Sequence: Synthetic oligonucleotide
  Antisense strand to SEQ ID NO: 1997798
aucccugaagaccaaacgg

SEQ ID NO: 1997800 - RNA, 19 nt, Artificial Sequence
  Description of Artificial Sequence: Synthetic oligonucleotide
  Sense strand starting at position 2920 of SEQ ID NO: 1880842
gggaucuuccuuuggugua

SEQ ID NO: 1997801 - RNA, 19 nt, Artificial Sequence
  Description of Artificial Sequence: Synthetic oligonucleotide
  Antisense strand to SEQ ID NO: 1997800
uacaccaaaggaagauccc

SEQ ID NO: 1997802 - RNA, 19 nt, Artificial Sequence
  Description of Artificial Sequence: Synthetic oligonucleotide
  Sense strand starting at position 3242 of SEQ ID NO: 1880842
uuugcuuucccagaucaug

SEQ ID NO: 1997803 - RNA, 19 nt, Artificial Sequence
  Description of Artificial Sequence: Synthetic oligonucleotide
  Antisense strand to SEQ ID NO: 1997802
caugaucugggaaagcaaa

SEQ ID NO: 1997804 - RNA, 19 nt, Artificial Sequence
  Description of Artificial Sequence: Synthetic oligonucleotide
  Sense strand starting at position 3250 of SEQ ID NO: 1880842
cccagaucaugaguugcuu

SEQ ID NO: 1997805 - RNA, 19 nt, Artificial Sequence
  Description of Artificial Sequence: Synthetic oligonucleotide
  Antisense strand to SEQ ID NO: 1997804
aagcaacucaugaucuggg

SEQ ID NO: 1997806 - RNA, 19 nt, Artificial Sequence
  Description of Artificial Sequence: Synthetic oligonucleotide
  Sense strand starting at position 3341 of SEQ ID NO: 1880842
aggugugauuccuuaucga

SEQ ID NO: 1997807 - RNA, 19 nt, Artificial Sequence
  Description of Artificial Sequence: Synthetic oligonucleotide
  Antisense strand to SEQ ID NO: 1997806
ucgauaaggaaucacaccu

SEQ ID NO: 1997808 - RNA, 19 nt, Artificial Sequence
  Description of Artificial Sequence: Synthetic oligonucleotide
  Sense strand starting at position 3344 of SEQ ID NO: 1880842
ugugauuccuuaucgacau

SEQ ID NO: 1997809 - RNA, 19 nt, Artificial Sequence
  Description of Artificial Sequence: Synthetic oligonucleotide
  Antisense strand to SEQ ID NO: 1997808
augucgauaaggaaucaca

SEQ ID NO: 1997810 - RNA, 19 nt, Artificial Sequence
  Description of Artificial Sequence: Synthetic oligonucleotide
  Sense strand starting at position 3435 of SEQ ID NO: 1880842
uggcaauaacuguggcuua

SEQ ID NO: 1997811 - RNA, 19 nt, Artificial Sequence
  Description of Artificial Sequence: Synthetic oligonucleotide
  Antisense strand to SEQ ID NO: 1997810
uaagccacaguuauugcca

SEQ ID NO: 1997812 - RNA, 19 nt, Artificial Sequence
  Description of Artificial Sequence: Synthetic oligonucleotide
  Sense strand starting at position 3514 of SEQ ID NO: 1880842
aaguuaacuucugugaaag

SEQ ID NO: 1997813 - RNA, 19 nt, Artificial Sequence
  Description of Artificial Sequence: Synthetic oligonucleotide
  Antisense strand to SEQ ID NO: 1997812
cuuucacagaaguuaacuu

SEQ ID NO: 1997814 - RNA, 19 nt, Artificial Sequence
  Description of Artificial Sequence: Synthetic oligonucleotide
  Sense strand starting at position 3515 of SEQ ID NO: 1880842
aguuaacuucugugaaaga

SEQ ID NO: 1997815 - RNA, 19 nt, Artificial Sequence
  Description of Artificial Sequence: Synthetic oligonucleotide
  Antisense strand to SEQ ID NO: 1997814
ucuuucacagaaguuaacu

SEQ ID NO: 1997816 - RNA, 19 nt, Artificial Sequence
  Description of Artificial Sequence: Synthetic oligonucleotide
  Sense strand starting at position 3522 of SEQ ID NO: 1880842
uucugugaaagacgaauua

SEQ ID NO: 1997817 - RNA, 19 nt, Artificial Sequence
  Description of Artificial Sequence: Synthetic oligonucleotide
  Antisense strand to SEQ ID NO: 1997816
uaauucgucuuucacagaa

SEQ ID NO: 1997818 - RNA, 19 nt, Artificial Sequence
  Description of Artificial Sequence: Synthetic oligonucleotide
  Sense strand starting at position 3592 of SEQ ID NO: 1880842
cucauugaaggcugaauga

SEQ ID NO: 1997819 - RNA, 19 nt, Artificial Sequence
  Description of Artificial Sequence: Synthetic oligonucleotide
  Antisense strand to SEQ ID NO: 1997818
ucauucagccuucaaugag

SEQ ID NO: 1997820 - RNA, 19 nt, Artificial Sequence
  Description of Artificial Sequence: Synthetic oligonucleotide
  Sense strand starting at position 3629 of SEQ ID NO: 1880842
uaaacaguaguuugguuaa

SEQ ID NO: 1997821 - RNA, 19 nt, Artificial Sequence
  Description of Artificial Sequence: Synthetic oligonucleotide
  Antisense strand to SEQ ID NO: 1997820
uuaaccaaacuacuguuua

SEQ ID NO: 1997822 - RNA, 19 nt, Artificial Sequence
  Description of Artificial Sequence: Synthetic oligonucleotide
  Sense strand starting at position 3632 of SEQ ID NO: 1880842
acaguaguuugguuaagga

SEQ ID NO: 1997823 - RNA, 19 nt, Artificial Sequence
  Description of Artificial Sequence: Synthetic oligonucleotide
  Antisense strand to SEQ ID NO: 1997822
uccuuaaccaaacuacugu

SEQ ID NO: 1997824 - RNA, 19 nt, Artificial Sequence
  Description of Artificial Sequence: Synthetic oligonucleotide
  Sense strand starting at position 3642 of SEQ ID NO: 1880842
gguuaaggaugguuacuaa

SEQ ID NO: 1997825 - RNA, 19 nt, Artificial Sequence
  Description of Artificial Sequence: Synthetic oligonucleotide
  Antisense strand to SEQ ID NO: 1997824
uuaguaaccauccuuaacc

SEQ ID NO: 1997826 - RNA, 19 nt, Artificial Sequence
  Description of Artificial Sequence: Synthetic oligonucleotide
  Sense strand starting at position 3666 of SEQ ID NO: 1880842
auuccauucccuuguauag

SEQ ID NO: 1997827 - RNA, 19 nt, Artificial Sequence
  Description of Artificial Sequence: Synthetic oligonucleotide
  Antisense strand to SEQ ID NO: 1997826
cuauacaagggaauggaau

SEQ ID NO: 1997828 - RNA, 19 nt, Artificial Sequence
  Description of Artificial Sequence: Synthetic oligonucleotide
  Sense strand starting at position 3690 of SEQ ID NO: 1880842
guugguauugucgauuaug

SEQ ID NO: 1997829 - RNA, 19 nt, Artificial Sequence
  Description of Artificial Sequence: Synthetic oligonucleotide
  Antisense strand to SEQ ID NO: 1997828
cauaaucgacaauaccaac

SEQ ID NO: 1997830 - RNA, 19 nt, Artificial Sequence
  Description of Artificial Sequence: Synthetic oligonucleotide
  Sense strand starting at position 3711 of SEQ ID NO: 1880842
ggcauaaugcaucaugguu

SEQ ID NO: 1997831 - RNA, 19 nt, Artificial Sequence
  Description of Artificial Sequence: Synthetic oligonucleotide
  Antisense strand to SEQ ID NO: 1997830
aaccaugaugcauuaugcc

SEQ ID NO: 1997832 - RNA, 19 nt, Artificial Sequence
  Description of Artificial Sequence: Synthetic oligonucleotide
  Sense strand starting at position 3741 of SEQ ID NO: 1880842
ggaaguguauccuugcaua

SEQ ID NO: 1997833 - RNA, 19 nt, Artificial Sequence
  Description of Artificial Sequence: Synthetic oligonucleotide
  Antisense strand to SEQ ID NO: 1997832
uaugcaaggauacacuucc

SEQ ID NO: 1997834 - RNA, 19 nt, Artificial Sequence
  Description of Artificial Sequence: Synthetic oligonucleotide
  Sense strand starting at position 3814 of SEQ ID NO: 1880842
cccgaaacuguggguagua

SEQ ID NO: 1997835 - RNA, 19 nt, Artificial Sequence
  Description of Artificial Sequence: Synthetic oligonucleotide
  Antisense strand to SEQ ID NO: 1997834
uacuacccacaguuucggg

SEQ ID NO: 1997836 - RNA, 19 nt, Artificial Sequence
  Description of Artificial Sequence: Synthetic oligonucleotide
  Sense strand starting at position 3960 of SEQ ID NO: 1880842
agcagacgaucaggaauuu

SEQ ID NO: 1997837 - RNA, 19 nt, Artificial Sequence
  Description of Artificial Sequence: Synthetic oligonucleotide
  Antisense strand to SEQ ID NO: 1997836
aaauuccugaucgucugcu

SEQ ID NO: 1997838 - RNA, 19 nt, Artificial Sequence
  Description of Artificial Sequence: Synthetic oligonucleotide
  Sense strand starting at position 93 of SEQ ID NO: 1880843
agguuaucacuuugaucau

SEQ ID NO: 1997839 - RNA, 19 nt, Artificial Sequence
  Description of Artificial Sequence: Synthetic oligonucleotide
  Antisense strand to SEQ ID NO: 1997838
augaucaaagugauaaccu

SEQ ID NO: 1997840 - RNA, 19 nt, Artificial Sequence
  Description of Artificial Sequence: Synthetic oligonucleotide
  Sense strand starting at position 218 of SEQ ID NO: 1880843
cucaacuguguguacagau

SEQ ID NO: 1997841 - RNA, 19 nt, Artificial Sequence
  Description of Artificial Sequence: Synthetic oligonucleotide
  Antisense strand to SEQ ID NO: 1997840
aucuguacacacaguugag

SEQ ID NO: 1997842 - RNA, 19 nt, Artificial Sequence
  Description of Artificial Sequence: Synthetic oligonucleotide
  Sense strand starting at position 237 of SEQ ID NO: 1880843
uuucuaagucguuaugaau

SEQ ID NO: 1997843 - RNA, 19 nt, Artificial Sequence
  Description of Artificial Sequence: Synthetic oligonucleotide
  Antisense strand to SEQ ID NO: 1997842
auucauaacgacuuagaaa

SEQ ID NO: 1997844 - RNA, 19 nt, Artificial Sequence
  Description of Artificial Sequence: Synthetic oligonucleotide
  Sense strand starting at position 306 of SEQ ID NO: 1880843
ggacaugcaucuccuguaa

SEQ ID NO: 1997845 - RNA, 19 nt, Artificial Sequence
  Description of Artificial Sequence: Synthetic oligonucleotide
  Antisense strand to SEQ ID NO: 1997844
uuacaggagaugcaugucc

SEQ ID NO: 1997846 - RNA, 19 nt, Artificial Sequence
  Description of Artificial Sequence: Synthetic oligonucleotide
  Sense strand starting at position 362 of SEQ ID NO: 1880843
ggcagcuucgugucacuuu

SEQ ID NO: 1997847 - RNA, 19 nt, Artificial Sequence
  Description of Artificial Sequence: Synthetic oligonucleotide
  Antisense strand to SEQ ID NO: 1997846
aaagugacacgaagcugcc

SEQ ID NO: 1997848 - RNA, 19 nt, Artificial Sequence
  Description of Artificial Sequence: Synthetic oligonucleotide
  Sense strand starting at position 433 of SEQ ID NO: 1880843
ggacacaucucuguccaca

SEQ ID NO: 1997849 - RNA, 19 nt, Artificial Sequence
  Description of Artificial Sequence: Synthetic oligonucleotide
  Antisense strand to SEQ ID NO: 1997848
uguggacagagaugugucc

SEQ ID NO: 1997850 - RNA, 19 nt, Artificial Sequence
  Description of Artificial Sequence: Synthetic oligonucleotide
  Sense strand starting at position 764 of SEQ ID NO: 1880843
cgcgcauucgacccaaacu

SEQ ID NO: 1997851 - RNA, 19 nt, Artificial Sequence
  Description of Artificial Sequence: Synthetic oligonucleotide
  Antisense strand to SEQ ID NO: 1997850
aguuugggucgaaugcgcg

SEQ ID NO: 1997852 - RNA, 19 nt, Artificial Sequence
  Description of Artificial Sequence: Synthetic oligonucleotide
  Sense strand starting at position 934 of SEQ ID NO: 1880843
aaucgcuguggucaagaaa

SEQ ID NO: 1997853 - RNA, 19 nt, Artificial Sequence
  Description of Artificial Sequence: Synthetic oligonucleotide
  Antisense strand to SEQ ID NO: 1997852
uuucuugaccacagcgauu

SEQ ID NO: 1997854 - RNA, 19 nt, Artificial Sequence
  Description of Artificial Sequence: Synthetic oligonucleotide
  Sense strand starting at position 946 of SEQ ID NO: 1880843
caagaaaguccuggaagcu

SEQ ID NO: 1997855 - RNA, 19 nt, Artificial Sequence
  Description of Artificial Sequence: Synthetic oligonucleotide
  Antisense strand to SEQ ID NO: 1997854
agcuuccaggacuuucuug

SEQ ID NO: 1997856 - RNA, 19 nt, Artificial Sequence
  Description of Artificial Sequence: Synthetic oligonucleotide
  Sense strand starting at position 981 of SEQ ID NO: 1880843
gggcgguuugcgguuaaca

SEQ ID NO: 1997857 - RNA, 19 nt, Artificial Sequence
  Description of Artificial Sequence: Synthetic oligonucleotide
  Antisense strand to SEQ ID NO: 1997856
uguuaaccgcaaaccgccc

SEQ ID NO: 1997858 - RNA, 19 nt, Artificial Sequence
  Description of Artificial Sequence: Synthetic oligonucleotide
  Sense strand starting at position 2170 of SEQ ID NO: 1880843
ugacguccucuggagaguu

SEQ ID NO: 1997859 - RNA, 19 nt, Artificial Sequence
  Description of Artificial Sequence: Synthetic oligonucleotide
  Antisense strand to SEQ ID NO: 1997858
aacucuccagaggacguca

SEQ ID NO: 1997860 - RNA, 19 nt, Artificial Sequence
  Description of Artificial Sequence: Synthetic oligonucleotide
  Sense strand starting at position 2181 of SEQ ID NO: 1880843
ggagaguuggaucgggcuu

SEQ ID NO: 1997861 - RNA, 19 nt, Artificial Sequence
  Description of Artificial Sequence: Synthetic oligonucleotide
  Antisense strand to SEQ ID NO: 1997860
aagcccgauccaacucucc

SEQ ID NO: 1997862 - RNA, 19 nt, Artificial Sequence
  Description of Artificial Sequence: Synthetic oligonucleotide
  Sense strand starting at position 2417 of SEQ ID NO: 1880843
uuucuuugcgacuacuaga

SEQ ID NO: 1997863 - RNA, 19 nt, Artificial Sequence
  Description of Artificial Sequence: Synthetic oligonucleotide
  Antisense strand to SEQ ID NO: 1997862
ucuaguagucgcaaagaaa

SEQ ID NO: 1997864 - RNA, 19 nt, Artificial Sequence
  Description of Artificial Sequence: Synthetic oligonucleotide
  Sense strand starting at position 2509 of SEQ ID NO: 1880843
uccugaguccuaugacaac

SEQ ID NO: 1997865 - RNA, 19 nt, Artificial Sequence
  Description of Artificial Sequence: Synthetic oligonucleotide
  Antisense strand to SEQ ID NO: 1997864
guugucauaggacucagga

SEQ ID NO: 1997866 - RNA, 19 nt, Artificial Sequence
  Description of Artificial Sequence: Synthetic oligonucleotide
  Sense strand starting at position 2515 of SEQ ID NO: 1880843
guccuaugacaacauuguu

SEQ ID NO: 1997867 - RNA, 19 nt, Artificial Sequence
  Description of Artificial Sequence: Synthetic oligonucleotide
  Antisense strand to SEQ ID NO: 1997866
aacaauguugucauaggac

SEQ ID NO: 1997868 - RNA, 19 nt, Artificial Sequence
  Description of Artificial Sequence: Synthetic oligonucleotide
  Sense strand starting at position 2577 of SEQ ID NO: 1880843
guuaaagggagaugaaguu

SEQ ID NO: 1997869 - RNA, 19 nt, Artificial Sequence
  Description of Artificial Sequence: Synthetic oligonucleotide
  Antisense strand to SEQ ID NO: 1997868
aacuucaucucccuuuaac

SEQ ID NO: 1997870 - RNA, 19 nt, Artificial Sequence
  Description of Artificial Sequence: Synthetic oligonucleotide
  Sense strand starting at position 2605 of SEQ ID NO: 1880843
cggguuucuugauuguaaa

SEQ ID NO: 1997871 - RNA, 19 nt, Artificial Sequence
  Description of Artificial Sequence: Synthetic oligonucleotide
  Antisense strand to SEQ ID NO: 1997870
uuuacaaucaagaaacccg

SEQ ID NO: 1997872 - RNA, 19 nt, Artificial Sequence
  Description of Artificial Sequence: Synthetic oligonucleotide
  Sense strand starting at position 2783 of SEQ ID NO: 1880843
ccguuuggucuucagggau

SEQ ID NO: 1997873 - RNA, 19 nt, Artificial Sequence
  Description of Artificial Sequence: Synthetic oligonucleotide
  Antisense strand to SEQ ID NO: 1997872
aucccugaagaccaaacgg

SEQ ID NO: 1997874 - RNA, 19 nt, Artificial Sequence
  Description of Artificial Sequence: Synthetic oligonucleotide
  Sense strand starting at position 2797 of SEQ ID NO: 1880843
gggaucuuccuuuggugua

SEQ ID NO: 1997875 - RNA, 19 nt, Artificial Sequence
  Description of Artificial Sequence: Synthetic oligonucleotide
  Antisense strand to SEQ ID NO: 1997874
uacaccaaaggaagauccc

SEQ ID NO: 1997876 - RNA, 19 nt, Artificial Sequence
  Description of Artificial Sequence: Synthetic oligonucleotide
  Sense strand starting at position 3119 of SEQ ID NO: 1880843
uuugcuuucccagaucaug

SEQ ID NO: 1997877 - RNA, 19 nt, Artificial Sequence
  Description of Artificial Sequence: Synthetic oligonucleotide
  Antisense strand to SEQ ID NO: 1997876
caugaucugggaaagcaaa

SEQ ID NO: 1997878 - RNA, 19 nt, Artificial Sequence
  Description of Artificial Sequence: Synthetic oligonucleotide
  Sense strand starting at position 3127 of SEQ ID NO: 1880843
cccagaucaugaguugcuu

SEQ ID NO: 1997879 - RNA, 19 nt, Artificial Sequence
  Description of Artificial Sequence: Synthetic oligonucleotide
  Antisense strand to SEQ ID NO: 1997878
aagcaacucaugaucuggg

SEQ ID NO: 1997880 - RNA, 19 nt, Artificial Sequence
  Description of Artificial Sequence: Synthetic oligonucleotide
  Sense strand starting at position 3218 of SEQ ID NO: 1880843
aggugugauuccuuaucga

SEQ ID NO: 1997881 - RNA, 19 nt, Artificial Sequence
  Description of Artificial Sequence: Synthetic oligonucleotide
  Antisense strand to SEQ ID NO: 1997880
ucgauaaggaaucacaccu

SEQ ID NO: 1997882 - RNA, 19 nt, Artificial Sequence
  Description of Artificial Sequence: Synthetic oligonucleotide
  Sense strand starting at position 3221 of SEQ ID NO: 1880843
ugugauuccuuaucgacau

SEQ ID NO: 1997883 - RNA, 19 nt, Artificial Sequence
  Description of Artificial Sequence: Synthetic oligonucleotide
  Antisense strand to SEQ ID NO: 1997882
augucgauaaggaaucaca

SEQ ID NO: 1997884 - RNA, 19 nt, Artificial Sequence
  Description of Artificial Sequence: Synthetic oligonucleotide
  Sense strand starting at position 3391 of SEQ ID NO: 1880843
aaguuaacuucugugaaag

SEQ ID NO: 1997885 - RNA, 19 nt, Artificial Sequence
  Description of Artificial Sequence: Synthetic oligonucleotide
  Antisense strand to SEQ ID NO: 1997884
cuuucacagaaguuaacuu

SEQ ID NO: 1997886 - RNA, 19 nt, Artificial Sequence
  Description of Artificial Sequence: Synthetic oligonucleotide
  Sense strand starting at position 3392 of SEQ ID NO: 1880843
aguuaacuucugugaaaga

SEQ ID NO: 1997887 - RNA, 19 nt, Artificial Sequence
  Description of Artificial Sequence: Synthetic oligonucleotide
  Antisense strand to SEQ ID NO: 1997886
ucuuucacagaaguuaacu

SEQ ID NO: 1997888 - RNA, 19 nt, Artificial Sequence
  Description of Artificial Sequence: Synthetic oligonucleotide
  Sense strand starting at position 3399 of SEQ ID NO: 1880843
uucugugaaagacgaauua

SEQ ID NO: 1997889 - RNA, 19 nt, Artificial Sequence
  Description of Artificial Sequence: Synthetic oligonucleotide
  Antisense strand to SEQ ID NO: 1997888
uaauucgucuuucacagaa

SEQ ID NO: 1997890 - RNA, 19 nt, Artificial Sequence
  Description of Artificial Sequence: Synthetic oligonucleotide
  Sense strand starting at position 3469 of SEQ ID NO: 1880843
cucauugaaggcugaauga

SEQ ID NO: 1997891 - RNA, 19 nt, Artificial Sequence
  Description of Artificial Sequence: Synthetic oligonucleotide
  Antisense strand to SEQ ID NO: 1997890
ucauucagccuucaaugag

SEQ ID NO: 1997892 - RNA, 19 nt, Artificial Sequence
  Description of Artificial Sequence: Synthetic oligonucleotide
  Sense strand starting at position 3506 of SEQ ID NO: 1880843
uaaacaguaguuugguuaa

SEQ ID NO: 1997893 - RNA, 19 nt, Artificial Sequence
  Description of Artificial Sequence: Synthetic oligonucleotide
  Antisense strand to SEQ ID NO: 1997892
uuaaccaaacuacuguuua

SEQ ID NO: 1997894 - RNA, 19 nt, Artificial Sequence
  Description of Artificial Sequence: Synthetic oligonucleotide
  Sense strand starting at position 3509 of SEQ ID NO: 1880843
acaguaguuugguuaagga

SEQ ID NO: 1997895 - RNA, 19 nt, Artificial Sequence
  Description of Artificial Sequence: Synthetic oligonucleotide
  Antisense strand to SEQ ID NO: 1997894
uccuuaaccaaacuacugu

SEQ ID NO: 1997896 - RNA, 19 nt, Artificial Sequence
  Description of Artificial Sequence: Synthetic oligonucleotide
  Sense strand starting at position 3519 of SEQ ID NO: 1880843
gguuaaggaugguuacuaa

SEQ ID NO: 1997897 - RNA, 19 nt, Artificial Sequence
  Description of Artificial Sequence: Synthetic oligonucleotide
  Antisense strand to SEQ ID NO: 1997896
uuaguaaccauccuuaacc

SEQ ID NO: 1997898 - RNA, 19 nt, Artificial Sequence
  Description of Artificial Sequence: Synthetic oligonucleotide
  Sense strand starting at position 3543 of SEQ ID NO: 1880843
auuccauucccuuguauag

SEQ ID NO: 1997899 - RNA, 19 nt, Artificial Sequence
  Description of Artificial Sequence: Synthetic oligonucleotide
  Antisense strand to SEQ ID NO: 1997898
cuauacaagggaauggaau

SEQ ID NO: 1997900 - RNA, 19 nt, Artificial Sequence
  Description of Artificial Sequence: Synthetic oligonucleotide
  Sense strand starting at position 3567 of SEQ ID NO: 1880843
guugguauugucgauuaug

SEQ ID NO: 1997901 - RNA, 19 nt, Artificial Sequence
  Description of Artificial Sequence: Synthetic oligonucleotide
  Antisense strand to SEQ ID NO: 1997900
cauaaucgacaauaccaac

SEQ ID NO: 1997902 - RNA, 19 nt, Artificial Sequence
  Description of Artificial Sequence: Synthetic oligonucleotide
  Sense strand starting at position 3588 of SEQ ID NO: 1880843
ggcauaaugcaucaugguu

SEQ ID NO: 1997903 - RNA, 19 nt, Artificial Sequence
  Description of Artificial Sequence: Synthetic oligonucleotide
  Antisense strand to SEQ ID NO: 1997902
aaccaugaugcauuaugcc

SEQ ID NO: 1997904 - RNA, 19 nt, Artificial Sequence
  Description of Artificial Sequence: Synthetic oligonucleotide
  Sense strand starting at position 3618 of SEQ ID NO: 1880843
ggaaguguauccuugcaua

SEQ ID NO: 1997905 - RNA, 19 nt, Artificial Sequence
  Description of Artificial Sequence: Synthetic oligonucleotide
  Antisense strand to SEQ ID NO: 1997904
uaugcaaggauacacuucc

SEQ ID NO: 1997906 - RNA, 19 nt, Artificial Sequence
  Description of Artificial Sequence: Synthetic oligonucleotide
  Sense strand starting at position 3885 of SEQ ID NO: 1880843
gaagauuuguucguacugu

SEQ ID NO: 1997907 - RNA, 19 nt, Artificial Sequence
  Description of Artificial Sequence: Synthetic oligonucleotide
  Antisense strand to SEQ ID NO: 1997906
acaguacgaacaaaucuuc

SEQ ID NO: 1997908 - RNA, 19 nt, Artificial Sequence
  Description of Artificial Sequence: Synthetic oligonucleotide
  Sense strand starting at position 3908 of SEQ ID NO: 1880843
cuuaguaaccucgguauaa

SEQ ID NO: 1997909 - RNA, 19 nt, Artificial Sequence
  Description of Artificial Sequence: Synthetic oligonucleotide
  Antisense strand to SEQ ID NO: 1997908
uuauaccgagguuacuaag

SEQ ID NO: 1997910 - RNA, 19 nt, Artificial Sequence
  Description of Artificial Sequence: Synthetic oligonucleotide
  Sense strand starting at position 3909 of SEQ ID NO: 1880843
uuaguaaccucgguauaag

SEQ ID NO: 1997911 - RNA, 19 nt, Artificial Sequence
  Description of Artificial Sequence: Synthetic oligonucleotide
  Antisense strand to SEQ ID NO: 1997910
cuuauaccgagguuacuaa

SEQ ID NO: 1997912 - RNA, 19 nt, Artificial Sequence
  Description of Artificial Sequence: Synthetic oligonucleotide
  Sense strand starting at position 3910 of SEQ ID NO: 1880843
uaguaaccucgguauaagu

SEQ ID NO: 1997913 - RNA, 19 nt, Artificial Sequence
  Description of Artificial Sequence: Synthetic oligonucleotide
  Antisense strand to SEQ ID NO: 1997912
acuuauaccgagguuacua

SEQ ID NO: 1997914 - RNA, 19 nt, Artificial Sequence
  Description of Artificial Sequence: Synthetic oligonucleotide
  Sense strand starting at position 3912 of SEQ ID NO: 1880843
guaaccucgguauaaguuu

SEQ ID NO: 1997915 - RNA, 19 nt, Artificial Sequence
  Description of Artificial Sequence: Synthetic oligonucleotide
  Antisense strand to SEQ ID NO: 1997914
aaacuuauaccgagguuac

SEQ ID NO: 1997916 - RNA, 19 nt, Artificial Sequence
  Description of Artificial Sequence: Synthetic oligonucleotide
  Sense strand starting at position 3983 of SEQ ID NO: 1880843
gugcuuauggcuucucuuu

SEQ ID NO: 1997917 - RNA, 19 nt, Artificial Sequence
  Description of Artificial Sequence: Synthetic oligonucleotide
  Antisense strand to SEQ ID NO: 1997916
aaagagaagccauaagcac

SEQ ID NO: 1997918 - RNA, 19 nt, Artificial Sequence
  Description of Artificial Sequence: Synthetic oligonucleotide
  Sense strand starting at position 78 of SEQ ID NO: 1880841
aacugaagagugugaucuu

SEQ ID NO: 1997919 - RNA, 19 nt, Artificial Sequence
  Description of Artificial Sequence: Synthetic oligonucleotide
  Antisense strand to SEQ ID NO: 1997918
aagaucacacucuucaguu

SEQ ID NO: 1997920 - RNA, 19 nt, Artificial Sequence
  Description of Artificial Sequence: Synthetic oligonucleotide
  Sense strand starting at position 81 of SEQ ID NO: 1880841
ugaagagugugaucuuggu

SEQ ID NO: 1997921 - RNA, 19 nt, Artificial Sequence
  Description of Artificial Sequence: Synthetic oligonucleotide
  Antisense strand to SEQ ID NO: 1997920
accaagaucacacucuuca

SEQ ID NO: 1997922 - RNA, 19 nt, Artificial Sequence
  Description of Artificial Sequence: Synthetic oligonucleotide
  Sense strand starting at position 85 of SEQ ID NO: 1880841
gagugugaucuugguacag

SEQ ID NO: 1997923 - RNA, 19 nt, Artificial Sequence
  Description of Artificial Sequence: Synthetic oligonucleotide
  Antisense strand to SEQ ID NO: 1997922
cuguaccaagaucacacuc

SEQ ID NO: 1997924 - RNA, 19 nt, Artificial Sequence
  Description of Artificial Sequence: Synthetic oligonucleotide
  Sense strand starting at position 119 of SEQ ID NO: 1880841
gccacacuggucugaucuu

SEQ ID NO: 1997925 - RNA, 19 nt, Artificial Sequence
  Description of Artificial Sequence: Synthetic oligonucleotide
  Antisense strand to SEQ ID NO: 1997924
aagaucagaccaguguggc

SEQ ID NO: 1997926 - RNA, 19 nt, Artificial Sequence
  Description of Artificial Sequence: Synthetic oligonucleotide
  Sense strand starting at position 294 of SEQ ID NO: 1880841
agcaguuauuucccuuuga

SEQ ID NO: 1997927 - RNA, 19 nt, Artificial Sequence
  Description of Artificial Sequence: Synthetic oligonucleotide
  Antisense strand to SEQ ID NO: 1997926
ucaaagggaaauaacugcu

SEQ ID NO: 1997928 - RNA, 19 nt, Artificial Sequence
  Description of Artificial Sequence: Synthetic oligonucleotide
  Sense strand starting at position 295 of SEQ ID NO: 1880841
gcaguuauuucccuuugac

SEQ ID NO: 1997929 - RNA, 19 nt, Artificial Sequence
  Description of Artificial Sequence: Synthetic oligonucleotide
  Antisense strand to SEQ ID NO: 1997928
gucaaagggaaauaacugc

SEQ ID NO: 1997930 - RNA, 19 nt, Artificial Sequence
  Description of Artificial Sequence: Synthetic oligonucleotide
  Sense strand starting at position 336 of SEQ ID NO: 1880841
guugacaugccagauccuu

SEQ ID NO: 1997931 - RNA, 19 nt, Artificial Sequence
  Description of Artificial Sequence: Synthetic oligonucleotide
  Antisense strand to SEQ ID NO: 1997930
aaggaucuggcaugucaac

SEQ ID NO: 1997932 - RNA, 19 nt, Artificial Sequence
  Description of Artificial Sequence: Synthetic oligonucleotide
  Sense strand starting at position 349 of SEQ ID NO: 1880841
auccuuauuucugcggaau

SEQ ID NO: 1997933 - RNA, 19 nt, Artificial Sequence
  Description of Artificial Sequence: Synthetic oligonucleotide
  Antisense strand to SEQ ID NO: 1997932
auuccgcagaaauaaggau

SEQ ID NO: 1997934 - RNA, 19 nt, Artificial Sequence
  Description of Artificial Sequence: Synthetic oligonucleotide
  Sense strand starting at position 567 of SEQ ID NO: 1880841
agguuaucacuuugaucau

SEQ ID NO: 1997935 - RNA, 19 nt, Artificial Sequence
  Description of Artificial Sequence: Synthetic oligonucleotide
  Antisense strand to SEQ ID NO: 1997934
augaucaaagugauaaccu

SEQ ID NO: 1997936 - RNA, 19 nt, Artificial Sequence
  Description of Artificial Sequence: Synthetic oligonucleotide
  Sense strand starting at position 692 of SEQ ID NO: 1880841
cucaacuguguguacagau

SEQ ID NO: 1997937 - RNA, 19 nt, Artificial Sequence
  Description of Artificial Sequence: Synthetic oligonucleotide
  Antisense strand to SEQ ID NO: 1997936
aucuguacacacaguugag

SEQ ID NO: 1997938 - RNA, 19 nt, Artificial Sequence
  Description of Artificial Sequence: Synthetic oligonucleotide
  Sense strand starting at position 711 of SEQ ID NO: 1880841
uuucuaagucguuaugaau

SEQ ID NO: 1997939 - RNA, 19 nt, Artificial Sequence
  Description of Artificial Sequence: Synthetic oligonucleotide
  Antisense strand to SEQ ID NO: 1997938
auucauaacgacuuagaaa

SEQ ID NO: 1997940 - RNA, 19 nt, Artificial Sequence
  Description of Artificial Sequence: Synthetic oligonucleotide
  Sense strand starting at position 780 of SEQ ID NO: 1880841
ggacaugcaucuccuguaa

SEQ ID NO: 1997941 - RNA, 19 nt, Artificial Sequence
  Description of Artificial Sequence: Synthetic oligonucleotide
  Antisense strand to SEQ ID NO: 1997940
uuacaggagaugcaugucc

SEQ ID NO: 1997942 - RNA, 19 nt, Artificial Sequence
  Description of Artificial Sequence: Synthetic oligonucleotide
  Sense strand starting at position 836 of SEQ ID NO: 1880841
ggcagcuucgugucacuuu

SEQ ID NO: 1997943 - RNA, 19 nt, Artificial Sequence
  Description of Artificial Sequence: Synthetic oligonucleotide
  Antisense strand to SEQ ID NO: 1997942
aaagugacacgaagcugcc

SEQ ID NO: 1997944 - RNA, 19 nt, Artificial Sequence
  Description of Artificial Sequence: Synthetic oligonucleotide
  Sense strand starting at position 907 of SEQ ID NO: 1880841
ggacacaucucuguccaca

SEQ ID NO: 1997945 - RNA, 19 nt, Artificial Sequence
  Description of Artificial Sequence: Synthetic oligonucleotide
  Antisense strand to SEQ ID NO: 1997944
uguggacagagaugugucc

SEQ ID NO: 1997946 - RNA, 19 nt, Artificial Sequence
  Description of Artificial Sequence: Synthetic oligonucleotide
  Sense strand starting at position 915 of SEQ ID NO: 1880841
cucuguccacaguguaaau

SEQ ID NO: 1997947 - RNA, 19 nt, Artificial Sequence
  Description of Artificial Sequence: Synthetic oligonucleotide
  Antisense strand to SEQ ID NO: 1997946
auuuacacuguggacagag

SEQ ID NO: 1997948 - RNA, 19 nt, Artificial Sequence
  Description of Artificial Sequence: Synthetic oligonucleotide
  Sense strand starting at position 1238 of SEQ ID NO: 1880841
cgcgcauucgacccaaacu

SEQ ID NO: 1997949 - RNA, 19 nt, Artificial Sequence
  Description of Artificial Sequence: Synthetic oligonucleotide
  Antisense strand to SEQ ID NO: 1997948
aguuugggucgaaugcgcg

SEQ ID NO: 1997950 - RNA, 19 nt, Artificial Sequence
  Description of Artificial Sequence: Synthetic oligonucleotide
  Sense strand starting at position 1408 of SEQ ID NO: 1880841
aaucgcuguggucaagaaa

SEQ ID NO: 1997951 - RNA, 19 nt, Artificial Sequence
  Description of Artificial Sequence: Synthetic oligonucleotide
  Antisense strand to SEQ ID NO: 1997950
uuucuugaccacagcgauu

SEQ ID NO: 1997952 - RNA, 19 nt, Artificial Sequence
  Description of Artificial Sequence: Synthetic oligonucleotide
  Sense strand starting at position 1420 of SEQ ID NO: 1880841
caagaaaguccuggaagcu

SEQ ID NO: 1997953 - RNA, 19 nt, Artificial Sequence
  Description of Artificial Sequence: Synthetic oligonucleotide
  Antisense strand to SEQ ID NO: 1997952
agcuuccaggacuuucuug

SEQ ID NO: 1997954 - RNA, 19 nt, Artificial Sequence
  Description of Artificial Sequence: Synthetic oligonucleotide
  Sense strand starting at position 1455 of SEQ ID NO: 1880841
gggcgguuugcgguuaaca

SEQ ID NO: 1997955 - RNA, 19 nt, Artificial Sequence
  Description of Artificial Sequence: Synthetic oligonucleotide
  Antisense strand to SEQ ID NO: 1997954
uguuaaccgcaaaccgccc

SEQ ID NO: 1997956 - RNA, 19 nt, Artificial Sequence
  Description of Artificial Sequence: Synthetic oligonucleotide
  Sense strand starting at position 2604 of SEQ ID NO: 1880841
uugugugucuggguaagag

SEQ ID NO: 1997957 - RNA, 19 nt, Artificial Sequence
  Description of Artificial Sequence: Synthetic oligonucleotide
  Antisense strand to SEQ ID NO: 1997956
cucuuacccagacacacaa

SEQ ID NO: 1997958 - RNA, 19 nt, Artificial Sequence
  Description of Artificial Sequence: Synthetic oligonucleotide
  Sense strand starting at position 2644 of SEQ ID NO: 1880841
ugacguccucuggagaguu

SEQ ID NO: 1997959 - RNA, 19 nt, Artificial Sequence
  Description of Artificial Sequence: Synthetic oligonucleotide
  Antisense strand to SEQ ID NO: 1997958
aacucuccagaggacguca

SEQ ID NO: 1997960 - RNA, 19 nt, Artificial Sequence
  Description of Artificial Sequence: Synthetic oligonucleotide
  Sense strand starting at position 2655 of SEQ ID NO: 1880841
ggagaguuggaucgggcuu

SEQ ID NO: 1997961 - RNA, 19 nt, Artificial Sequence
  Description of Artificial Sequence: Synthetic oligonucleotide
  Antisense strand to SEQ ID NO: 1997960
aagcccgauccaacucucc

SEQ ID NO: 1997962 - RNA, 19 nt, Artificial Sequence
  Description of Artificial Sequence: Synthetic oligonucleotide
  Sense strand starting at position 2891 of SEQ ID NO: 1880841
uuucuuugcgacuacuaga

SEQ ID NO: 1997963 - RNA, 19 nt, Artificial Sequence
  Description of Artificial Sequence: Synthetic oligonucleotide
  Antisense strand to SEQ ID NO: 1997962
ucuaguagucgcaaagaaa

SEQ ID NO: 1997964 - RNA, 19 nt, Artificial Sequence
  Description of Artificial Sequence: Synthetic oligonucleotide
  Sense strand starting at position 2983 of SEQ ID NO: 1880841
uccugaguccuaugacaac

SEQ ID NO: 1997965 - RNA, 19 nt, Artificial Sequence
  Description of Artificial Sequence: Synthetic oligonucleotide
  Antisense strand to SEQ ID NO: 1997964
guugucauaggacucagga

SEQ ID NO: 1997966 - RNA, 19 nt, Artificial Sequence
  Description of Artificial Sequence: Synthetic oligonucleotide
  Sense strand starting at position 2989 of SEQ ID NO: 1880841
guccuaugacaacauuguu

SEQ ID NO: 1997967 - RNA, 19 nt, Artificial Sequence
  Description of Artificial Sequence: Synthetic oligonucleotide
  Antisense strand to SEQ ID NO: 1997966
aacaauguugucauaggac

SEQ ID NO: 1997968 - RNA, 19 nt, Artificial Sequence
  Description of Artificial Sequence: Synthetic oligonucleotide
  Sense strand starting at position 3023 of SEQ ID NO: 1880841
cuuagcccaugcuuagaua

SEQ ID NO: 1997969 - RNA, 19 nt, Artificial Sequence
  Description of Artificial Sequence: Synthetic oligonucleotide
  Antisense strand to SEQ ID NO: 1997968
uaucuaagcaugggcuaag

SEQ ID NO: 1997970 - RNA, 19 nt, Artificial Sequence
  Description of Artificial Sequence: Synthetic oligonucleotide
  Sense strand starting at position 3051 of SEQ ID NO: 1880841
guuaaagggagaugaaguu

SEQ ID NO: 1997971 - RNA, 19 nt, Artificial Sequence
  Description of Artificial Sequence: Synthetic oligonucleotide
  Antisense strand to SEQ ID NO: 1997970
aacuucaucucccuuuaac

SEQ ID NO: 1997972 - RNA, 19 nt, Artificial Sequence
  Description of Artificial Sequence: Synthetic oligonucleotide
  Sense strand starting at position 3079 of SEQ ID NO: 1880841
cggguuucuugauuguaaa

SEQ ID NO: 1997973 - RNA, 19 nt, Artificial Sequence
  Description of Artificial Sequence: Synthetic oligonucleotide
  Antisense strand to SEQ ID NO: 1997972
uuuacaaucaagaaacccg

SEQ ID NO: 1997974 - RNA, 19 nt, Artificial Sequence
  Description of Artificial Sequence: Synthetic oligonucleotide
  Sense strand starting at position 3257 of SEQ ID NO: 1880841
ccguuuggucuucagggau

SEQ ID NO: 1997975 - RNA, 19 nt, Artificial Sequence
  Description of Artificial Sequence: Synthetic oligonucleotide
  Antisense strand to SEQ ID NO: 1997974
aucccugaagaccaaacgg

SEQ ID NO: 1997976 - RNA, 19 nt, Artificial Sequence
  Description of Artificial Sequence: Synthetic oligonucleotide
  Sense strand starting at position 3271 of SEQ ID NO: 1880841
gggaucuuccuuuggugua

SEQ ID NO: 1997977 - RNA, 19 nt, Artificial Sequence
  Description of Artificial Sequence: Synthetic oligonucleotide
  Antisense strand to SEQ ID NO: 1997976
uacaccaaaggaagauccc

SEQ ID NO: 1997978 - RNA, 19 nt, Artificial Sequence
  Description of Artificial Sequence: Synthetic oligonucleotide
  Sense strand starting at position 3593 of SEQ ID NO: 1880841
uuugcuuucccagaucaug

SEQ ID NO: 1997979 - RNA, 19 nt, Artificial Sequence
  Description of Artificial Sequence: Synthetic oligonucleotide
  Antisense strand to SEQ ID NO: 1997978
caugaucugggaaagcaaa

SEQ ID NO: 1997980 - RNA, 19 nt, Artificial Sequence
  Description of Artificial Sequence: Synthetic oligonucleotide
  Sense strand starting at position 3601 of SEQ ID NO: 1880841
cccagaucaugaguugcuu

SEQ ID NO: 1997981 - RNA, 19 nt, Artificial Sequence
  Description of Artificial Sequence: Synthetic oligonucleotide
  Antisense strand to SEQ ID NO: 1997980
aagcaacucaugaucuggg

SEQ ID NO: 1997982 - RNA, 19 nt, Artificial Sequence
  Description of Artificial Sequence: Synthetic oligonucleotide
  Sense strand starting at position 3692 of SEQ ID NO: 1880841
aggugugauuccuuaucga

SEQ ID NO: 1997983 - RNA, 19 nt, Artificial Sequence
  Description of Artificial Sequence: Synthetic oligonucleotide
  Antisense strand to SEQ ID NO: 1997982
ucgauaaggaaucacaccu

SEQ ID NO: 1997984 - RNA, 19 nt, Artificial Sequence
  Description of Artificial Sequence: Synthetic oligonucleotide
  Sense strand starting at position 3695 of SEQ ID NO: 1880841
ugugauuccuuaucgacau

SEQ ID NO: 1997985 - RNA, 19 nt, Artificial Sequence
  Description of Artificial Sequence: Synthetic oligonucleotide
  Antisense strand to SEQ ID NO: 1997984
augucgauaaggaaucaca

SEQ ID NO: 1997986 - RNA, 19 nt, Artificial Sequence
  Description of Artificial Sequence: Synthetic oligonucleotide
  Sense strand starting at position 3865 of SEQ ID NO: 1880841
aaguuaacuucugugaaag

SEQ ID NO: 1997987 - RNA, 19 nt, Artificial Sequence
  Description of Artificial Sequence: Synthetic oligonucleotide
  Antisense strand to SEQ ID NO: 1997986
cuuucacagaaguuaacuu

SEQ ID NO: 1997988 - RNA, 19 nt, Artificial Sequence
  Description of Artificial Sequence: Synthetic oligonucleotide
  Sense strand starting at position 3866 of SEQ ID NO: 1880841
aguuaacuucugugaaaga

SEQ ID NO: 1997989 - RNA, 19 nt, Artificial Sequence
  Description of Artificial Sequence: Synthetic oligonucleotide
  Antisense strand to SEQ ID NO: 1997988
ucuuucacagaaguuaacu

SEQ ID NO: 1997990 - RNA, 19 nt, Artificial Sequence
  Description of Artificial Sequence: Synthetic oligonucleotide
  Sense strand starting at position 3873 of SEQ ID NO: 1880841
uucugugaaagacgaauua

SEQ ID NO: 1997991 - RNA, 19 nt, Artificial Sequence
  Description of Artificial Sequence: Synthetic oligonucleotide
  Antisense strand to SEQ ID NO: 1997990
uaauucgucuuucacagaa

SEQ ID NO: 1997992 - RNA, 19 nt, Artificial Sequence
  Description of Artificial Sequence: Synthetic oligonucleotide
  Sense strand starting at position 3943 of SEQ ID NO: 1880841
cucauugaaggcugaauga

SEQ ID NO: 1997993 - RNA, 19 nt, Artificial Sequence
  Description of Artificial Sequence: Synthetic oligonucleotide
  Antisense strand to SEQ ID NO: 1997992
ucauucagccuucaaugag

SEQ ID NO: 1997994 - RNA, 19 nt, Artificial Sequence
  Description of Artificial Sequence: Synthetic oligonucleotide
  Sense strand starting at position 3980 of SEQ ID NO: 1880841
uaaacaguaguuugguuaa

SEQ ID NO: 1997995 - RNA, 19 nt, Artificial Sequence
  Description of Artificial Sequence: Synthetic oligonucleotide
  Antisense strand to SEQ ID NO: 1997994
uuaaccaaacuacuguuua

SEQ ID NO: 1997996 - RNA, 19 nt, Artificial Sequence
  Description of Artificial Sequence: Synthetic oligonucleotide
  Sense strand starting at position 3983 of SEQ ID NO: 1880841
acaguaguuugguuaagga

SEQ ID NO: 1997997 - RNA, 19 nt, Artificial Sequence
  Description of Artificial Sequence: Synthetic oligonucleotide
  Antisense strand to SEQ ID NO: 1997996
uccuuaaccaaacuacugu

SEQ ID NO: 1997998 - RNA, 19 nt, Artificial Sequence
  Description of Artificial Sequence: Synthetic oligonucleotide
  Sense strand starting at position 20 of SEQ ID NO: 1880840
ucaaccaagcaguauuaga

SEQ ID NO: 1997999 - RNA, 19 nt, Artificial Sequence
  Description of Artificial Sequence: Synthetic oligonucleotide
  Antisense strand to SEQ ID NO: 1997998
ucuaauacugcuugguuga

SEQ ID NO: 1998000 - RNA, 19 nt, Artificial Sequence
  Description of Artificial Sequence: Synthetic oligonucleotide
  Sense strand starting at position 28 of SEQ ID NO: 1880840
gcaguauuagagcaaauaa

SEQ ID NO: 1998001 - RNA, 19 nt, Artificial Sequence
  Description of Artificial Sequence: Synthetic oligonucleotide
  Antisense strand to SEQ ID NO: 1998000
uuauuugcucuaauacugc

SEQ ID NO: 1998002 - RNA, 19 nt, Artificial Sequence
  Description of Artificial Sequence: Synthetic oligonucleotide
  Sense strand starting at position 47 of SEQ ID NO: 1880840
gcaaauuccucaguugaga

SEQ ID NO: 1998003 - RNA, 19 nt, Artificial Sequence
  Description of Artificial Sequence: Synthetic oligonucleotide
  Antisense strand to SEQ ID NO: 1998002
ucucaacugaggaauuugc

SEQ ID NO: 1998004 - RNA, 19 nt, Artificial Sequence
  Description of Artificial Sequence: Synthetic oligonucleotide
  Sense strand starting at position 102 of SEQ ID NO: 1880840
auggccugaucuguaaaca

SEQ ID NO: 1998005 - RNA, 19 nt, Artificial Sequence
  Description of Artificial Sequence: Synthetic oligonucleotide
  Antisense strand to SEQ ID NO: 1998004
uguuuacagaucaggccau

SEQ ID NO: 1998006 - RNA, 19 nt, Artificial Sequence
  Description of Artificial Sequence: Synthetic oligonucleotide
  Sense strand starting at position 103 of SEQ ID NO: 1880840
uggccugaucuguaaacac

SEQ ID NO: 1998007 - RNA, 19 nt, Artificial Sequence
  Description of Artificial Sequence: Synthetic oligonucleotide
  Antisense strand to SEQ ID NO: 1998006
guguuuacagaucaggcca

SEQ ID NO: 1998008 - RNA, 19 nt, Artificial Sequence
  Description of Artificial Sequence: Synthetic oligonucleotide
  Sense strand starting at position 130 of SEQ ID NO: 1880840
agccauuggacuugggaau

SEQ ID NO: 1998009 - RNA, 19 nt, Artificial Sequence
  Description of Artificial Sequence: Synthetic oligonucleotide
  Antisense strand to SEQ ID NO: 1998008
auucccaaguccaauggcu

SEQ ID NO: 1998010 - RNA, 19 nt, Artificial Sequence
  Description of Artificial Sequence: Synthetic oligonucleotide
  Sense strand starting at position 175 of SEQ ID NO: 1880840
ccgcaagacucauccuaga

SEQ ID NO: 1998011 - RNA, 19 nt, Artificial Sequence
  Description of Artificial Sequence: Synthetic oligonucleotide
  Antisense strand to SEQ ID NO: 1998010
ucuaggaugagucuugcgg

SEQ ID NO: 1998012 - RNA, 19 nt, Artificial Sequence
  Description of Artificial Sequence: Synthetic oligonucleotide
  Sense strand starting at position 466 of SEQ ID NO: 1880840
accugaucagagugcugau

SEQ ID NO: 1998013 - RNA, 19 nt, Artificial Sequence
  Description of Artificial Sequence: Synthetic oligonucleotide
  Antisense strand to SEQ ID NO: 1998012
aucagcacucugaucaggu

SEQ ID NO: 1998014 - RNA, 19 nt, Artificial Sequence
  Description of Artificial Sequence: Synthetic oligonucleotide
  Sense strand starting at position 837 of SEQ ID NO: 1880840
aucgcaguucuauaaacuc

SEQ ID NO: 1998015 - RNA, 19 nt, Artificial Sequence
  Description of Artificial Sequence: Synthetic oligonucleotide
  Antisense strand to SEQ ID NO: 1998014
gaguuuauagaacugcgau

SEQ ID NO: 1998016 - RNA, 19 nt, Artificial Sequence
  Description of Artificial Sequence: Synthetic oligonucleotide
  Sense strand starting at position 888 of SEQ ID NO: 1880840
ugagaauccuacucggagu

SEQ ID NO: 1998017 - RNA, 19 nt, Artificial Sequence
  Description of Artificial Sequence: Synthetic oligonucleotide
  Antisense strand to SEQ ID NO: 1998016
acuccgaguaggauucuca

SEQ ID NO: 1998018 - RNA, 19 nt, Artificial Sequence
  Description of Artificial Sequence: Synthetic oligonucleotide
  Sense strand starting at position 890 of SEQ ID NO: 1880840
agaauccuacucggaguaa

SEQ ID NO: 1998019 - RNA, 19 nt, Artificial Sequence
  Description of Artificial Sequence: Synthetic oligonucleotide
  Antisense strand to SEQ ID NO: 1998018
uuacuccgaguaggauucu

SEQ ID NO: 1998020 - RNA, 19 nt, Artificial Sequence
  Description of Artificial Sequence: Synthetic oligonucleotide
  Sense strand starting at position 941 of SEQ ID NO: 1880840
uuuccaaucuaguuguaca

SEQ ID NO: 1998021 - RNA, 19 nt, Artificial Sequence
  Description of Artificial Sequence: Synthetic oligonucleotide
  Antisense strand to SEQ ID NO: 1998020
uguacaacuagauuggaaa

SEQ ID NO: 1998022 - RNA, 19 nt, Artificial Sequence
  Description of Artificial Sequence: Synthetic oligonucleotide
  Sense strand starting at position 1006 of SEQ ID NO: 1880840
ccacuuuccuuaccagagu

SEQ ID NO: 1998023 - RNA, 19 nt, Artificial Sequence
  Description of Artificial Sequence: Synthetic oligonucleotide
  Antisense strand to SEQ ID NO: 1998022
acucugguaaggaaagugg

SEQ ID NO: 1998024 - RNA, 19 nt, Artificial Sequence
  Description of Artificial Sequence: Synthetic oligonucleotide
  Sense strand starting at position 1129 of SEQ ID NO: 1880840
aguucuuacugauuacaua

SEQ ID NO: 1998025 - RNA, 19 nt, Artificial Sequence
  Description of Artificial Sequence: Synthetic oligonucleotide
  Antisense strand to SEQ ID NO: 1998024
uauguaaucaguaagaacu

SEQ ID NO: 1998026 - RNA, 19 nt, Artificial Sequence
  Description of Artificial Sequence: Synthetic oligonucleotide
  Sense strand starting at position 1130 of SEQ ID NO: 1880840
guucuuacugauuacauau

SEQ ID NO: 1998027 - RNA, 19 nt, Artificial Sequence
  Description of Artificial Sequence: Synthetic oligonucleotide
  Antisense strand to SEQ ID NO: 1998026
auauguaaucaguaagaac

SEQ ID NO: 1998028 - RNA, 19 nt, Artificial Sequence
  Description of Artificial Sequence: Synthetic oligonucleotide
  Sense strand starting at position 1176 of SEQ ID NO: 1880840
augugaaauggagguuaac

SEQ ID NO: 1998029 - RNA, 19 nt, Artificial Sequence
  Description of Artificial Sequence: Synthetic oligonucleotide
  Antisense strand to SEQ ID NO: 1998028
guuaaccuccauuucacau

SEQ ID NO: 1998030 - RNA, 19 nt, Artificial Sequence
  Description of Artificial Sequence: Synthetic oligonucleotide
  Sense strand starting at position 1182 of SEQ ID NO: 1880840
aauggagguuaacucauua

SEQ ID NO: 1998031 - RNA, 19 nt, Artificial Sequence
  Description of Artificial Sequence: Synthetic oligonucleotide
  Antisense strand to SEQ ID NO: 1998030
uaaugaguuaaccuccauu

SEQ ID NO: 1998032 - RNA, 19 nt, Artificial Sequence
  Description of Artificial Sequence: Synthetic oligonucleotide
  Sense strand starting at position 1284 of SEQ ID NO: 1880840
aaagaaaguguauguaucu

SEQ ID NO: 1998033 - RNA, 19 nt, Artificial Sequence
  Description of Artificial Sequence: Synthetic oligonucleotide
  Antisense strand to SEQ ID NO: 1998032
agauacauacacuuucuuu

SEQ ID NO: 1998034 - RNA, 19 nt, Artificial Sequence
  Description of Artificial Sequence: Synthetic oligonucleotide
  Sense strand starting at position 1285 of SEQ ID NO: 1880840
aagaaaguguauguaucua

SEQ ID NO: 1998035 - RNA, 19 nt, Artificial Sequence
  Description of Artificial Sequence: Synthetic oligonucleotide
  Antisense strand to SEQ ID NO: 1998034
uagauacauacacuuucuu

SEQ ID NO: 1998036 - RNA, 19 nt, Artificial Sequence
  Description of Artificial Sequence: Synthetic oligonucleotide
  Sense strand starting at position 1293 of SEQ ID NO: 1880840
guauguaucuaaucuuuag

SEQ ID NO: 1998037 - RNA, 19 nt, Artificial Sequence
  Description of Artificial Sequence: Synthetic oligonucleotide
  Antisense strand to SEQ ID NO: 1998036
cuaaagauuagauacauac

SEQ ID NO: 1998038 - RNA, 19 nt, Artificial Sequence
  Description of Artificial Sequence: Synthetic oligonucleotide
  Sense strand starting at position 1296 of SEQ ID NO: 1880840
uguaucuaaucuuuagaga

SEQ ID NO: 1998039 - RNA, 19 nt, Artificial Sequence
  Description of Artificial Sequence: Synthetic oligonucleotide
  Antisense strand to SEQ ID NO: 1998038
ucucuaaagauuagauaca

SEQ ID NO: 1998040 - RNA, 19 nt, Artificial Sequence
  Description of Artificial Sequence: Synthetic oligonucleotide
  Sense strand starting at position 1454 of SEQ ID NO: 1880840
ggacacaaagcuugucagu

SEQ ID NO: 1998041 - RNA, 19 nt, Artificial Sequence
  Description of Artificial Sequence: Synthetic oligonucleotide
  Antisense strand to SEQ ID NO: 1998040
acugacaagcuuugugucc

SEQ ID NO: 1998042 - RNA, 19 nt, Artificial Sequence
  Description of Artificial Sequence: Synthetic oligonucleotide
  Sense strand starting at position 1529 of SEQ ID NO: 1880840
cagacuaccgucugaacau

SEQ ID NO: 1998043 - RNA, 19 nt, Artificial Sequence
  Description of Artificial Sequence: Synthetic oligonucleotide
  Antisense strand to SEQ ID NO: 1998042
auguucagacgguagucug

SEQ ID NO: 1998044 - RNA, 19 nt, Artificial Sequence
  Description of Artificial Sequence: Synthetic oligonucleotide
  Sense strand starting at position 1684 of SEQ ID NO: 1880840
aacugaagagugugaucuu

SEQ ID NO: 1998045 - RNA, 19 nt, Artificial Sequence
  Description of Artificial Sequence: Synthetic oligonucleotide
  Antisense strand to SEQ ID NO: 1998044
aagaucacacucuucaguu

SEQ ID NO: 1998046 - RNA, 19 nt, Artificial Sequence
  Description of Artificial Sequence: Synthetic oligonucleotide
  Sense strand starting at position 1687 of SEQ ID NO: 1880840
ugaagagugugaucuuggu

SEQ ID NO: 1998047 - RNA, 19 nt, Artificial Sequence
  Description of Artificial Sequence: Synthetic oligonucleotide
  Antisense strand to SEQ ID NO: 1998046
accaagaucacacucuuca

SEQ ID NO: 1998048 - RNA, 19 nt, Artificial Sequence
  Description of Artificial Sequence: Synthetic oligonucleotide
  Sense strand starting at position 1691 of SEQ ID NO: 1880840
gagugugaucuugguacag

SEQ ID NO: 1998049 - RNA, 19 nt, Artificial Sequence
  Description of Artificial Sequence: Synthetic oligonucleotide
  Antisense strand to SEQ ID NO: 1998048
cuguaccaagaucacacuc

SEQ ID NO: 1998050 - RNA, 19 nt, Artificial Sequence
  Description of Artificial Sequence: Synthetic oligonucleotide
  Sense strand starting at position 1900 of SEQ ID NO: 1880840
agcaguuauuucccuuuga

SEQ ID NO: 1998051 - RNA, 19 nt, Artificial Sequence
  Description of Artificial Sequence: Synthetic oligonucleotide
  Antisense strand to SEQ ID NO: 1998050
ucaaagggaaauaacugcu

SEQ ID NO: 1998052 - RNA, 19 nt, Artificial Sequence
  Description of Artificial Sequence: Synthetic oligonucleotide
  Sense strand starting at position 1901 of SEQ ID NO: 1880840
gcaguuauuucccuuugac

SEQ ID NO: 1998053 - RNA, 19 nt, Artificial Sequence
  Description of Artificial Sequence: Synthetic oligonucleotide
  Antisense strand to SEQ ID NO: 1998052
gucaaagggaaauaacugc

SEQ ID NO: 1998054 - RNA, 19 nt, Artificial Sequence
  Description of Artificial Sequence: Synthetic oligonucleotide
  Sense strand starting at position 1942 of SEQ ID NO: 1880840
guugacaugccagauccuu

SEQ ID NO: 1998055 - RNA, 19 nt, Artificial Sequence
  Description of Artificial Sequence: Synthetic oligonucleotide
  Antisense strand to SEQ ID NO: 1998054
aaggaucuggcaugucaac

SEQ ID NO: 1998056 - RNA, 19 nt, Artificial Sequence
  Description of Artificial Sequence: Synthetic oligonucleotide
  Sense strand starting at position 1955 of SEQ ID NO: 1880840
auccuuauuucugcggaau

SEQ ID NO: 1998057 - RNA, 19 nt, Artificial Sequence
  Description of Artificial Sequence: Synthetic oligonucleotide
  Antisense strand to SEQ ID NO: 1998056
auuccgcagaaauaaggau

SEQ ID NO: 1998058 - RNA, 19 nt, Artificial Sequence
  Description of Artificial Sequence: Synthetic oligonucleotide
  Sense strand starting at position 2173 of SEQ ID NO: 1880840
agguuaucacuuugaucau

SEQ ID NO: 1998059 - RNA, 19 nt, Artificial Sequence
  Description of Artificial Sequence: Synthetic oligonucleotide
  Antisense strand to SEQ ID NO: 1998058
augaucaaagugauaaccu

SEQ ID NO: 1998060 - RNA, 19 nt, Artificial Sequence
  Description of Artificial Sequence: Synthetic oligonucleotide
  Sense strand starting at position 2298 of SEQ ID NO: 1880840
cucaacuguguguacagau

SEQ ID NO: 1998061 - RNA, 19 nt, Artificial Sequence
  Description of Artificial Sequence: Synthetic oligonucleotide
  Antisense strand to SEQ ID NO: 1998060
aucuguacacacaguugag

SEQ ID NO: 1998062 - RNA, 19 nt, Artificial Sequence
  Description of Artificial Sequence: Synthetic oligonucleotide
  Sense strand starting at position 2317 of SEQ ID NO: 1880840
uuucuaagucguuaugaau

SEQ ID NO: 1998063 - RNA, 19 nt, Artificial Sequence
  Description of Artificial Sequence: Synthetic oligonucleotide
  Antisense strand to SEQ ID NO: 1998062
auucauaacgacuuagaaa

SEQ ID NO: 1998064 - RNA, 19 nt, Artificial Sequence
  Description of Artificial Sequence: Synthetic oligonucleotide
  Sense strand starting at position 2386 of SEQ ID NO: 1880840
ggacaugcaucuccuguaa

SEQ ID NO: 1998065 - RNA, 19 nt, Artificial Sequence
  Description of Artificial Sequence: Synthetic oligonucleotide
  Antisense strand to SEQ ID NO: 1998064
uuacaggagaugcaugucc

SEQ ID NO: 1998066 - RNA, 19 nt, Artificial Sequence
  Description of Artificial Sequence: Synthetic oligonucleotide
  Sense strand starting at position 2442 of SEQ ID NO: 1880840
ggcagcuucgugucacuuu

SEQ ID NO: 1998067 - RNA, 19 nt, Artificial Sequence
  Description of Artificial Sequence: Synthetic oligonucleotide
  Antisense strand to SEQ ID NO: 1998066
aaagugacacgaagcugcc

SEQ ID NO: 1998068 - RNA, 19 nt, Artificial Sequence
  Description of Artificial Sequence: Synthetic oligonucleotide
  Sense strand starting at position 2513 of SEQ ID NO: 1880840
ggacacaucucuguccaca

SEQ ID NO: 1998069 - RNA, 19 nt, Artificial Sequence
  Description of Artificial Sequence: Synthetic oligonucleotide
  Antisense strand to SEQ ID NO: 1998068
uguggacagagaugugucc

SEQ ID NO: 1998070 - RNA, 19 nt, Artificial Sequence
  Description of Artificial Sequence: Synthetic oligonucleotide
  Sense strand starting at position 2844 of SEQ ID NO: 1880840
cgcgcauucgacccaaacu

SEQ ID NO: 1998071 - RNA, 19 nt, Artificial Sequence
  Description of Artificial Sequence: Synthetic oligonucleotide
  Antisense strand to SEQ ID NO: 1998070
aguuugggucgaaugcgcg

SEQ ID NO: 1998072 - RNA, 19 nt, Artificial Sequence
  Description of Artificial Sequence: Synthetic oligonucleotide
  Sense strand starting at position 3014 of SEQ ID NO: 1880840
aaucgcuguggucaagaaa

SEQ ID NO: 1998073 - RNA, 19 nt, Artificial Sequence
  Description of Artificial Sequence: Synthetic oligonucleotide
  Antisense strand to SEQ ID NO: 1998072
uuucuugaccacagcgauu

SEQ ID NO: 1998074 - RNA, 19 nt, Artificial Sequence
  Description of Artificial Sequence: Synthetic oligonucleotide
  Sense strand starting at position 3026 of SEQ ID NO: 1880840
caagaaaguccuggaagcu

SEQ ID NO: 1998075 - RNA, 19 nt, Artificial Sequence
  Description of Artificial Sequence: Synthetic oligonucleotide
  Antisense strand to SEQ ID NO: 1998074
agcuuccaggacuuucuug

SEQ ID NO: 1998076 - RNA, 19 nt, Artificial Sequence
  Description of Artificial Sequence: Synthetic oligonucleotide
  Sense strand starting at position 3061 of SEQ ID NO: 1880840
gggcgguuugcgguuaaca

SEQ ID NO: 1998077 - RNA, 19 nt, Artificial Sequence
  Description of Artificial Sequence: Synthetic oligonucleotide
  Antisense strand to SEQ ID NO: 1998076
uguuaaccgcaaaccgccc

SEQ ID NO: 1998078 - RNA, 19 nt, Artificial Sequence
  Description of Artificial Sequence: Synthetic oligonucleotide
  Sense strand starting at position 103 of SEQ ID NO: 1880839
aguagcucucagugcauuu

SEQ ID NO: 1998079 - RNA, 19 nt, Artificial Sequence
  Description of Artificial Sequence: Synthetic oligonucleotide
  Antisense strand to SEQ ID NO: 1998078
aaaugcacugagagcuacu

SEQ ID NO: 1998080 - RNA, 19 nt, Artificial Sequence
  Description of Artificial Sequence: Synthetic oligonucleotide
  Sense strand starting at position 172 of SEQ ID NO: 1880839
aucaaagguuucucaugca

SEQ ID NO: 1998081 - RNA, 19 nt, Artificial Sequence
  Description of Artificial Sequence: Synthetic oligonucleotide
  Antisense strand to SEQ ID NO: 1998080
ugcaugagaaaccuuugau

SEQ ID NO: 1998082 - RNA, 19 nt, Artificial Sequence
  Description of Artificial Sequence: Synthetic oligonucleotide
  Sense strand starting at position 184 of SEQ ID NO: 1880839
ucaugcaccuuguuauuua

SEQ ID NO: 1998083 - RNA, 19 nt, Artificial Sequence
  Description of Artificial Sequence: Synthetic oligonucleotide
  Antisense strand to SEQ ID NO: 1998082
uaaauaacaaggugcauga

SEQ ID NO: 1998084 - RNA, 19 nt, Artificial Sequence
  Description of Artificial Sequence: Synthetic oligonucleotide
  Sense strand starting at position 625 of SEQ ID NO: 1880839
guugaaaugauguauugca

SEQ ID NO: 1998085 - RNA, 19 nt, Artificial Sequence
  Description of Artificial Sequence: Synthetic oligonucleotide
  Antisense strand to SEQ ID NO: 1998084
ugcaauacaucauuucaac

SEQ ID NO: 1998086 - RNA, 19 nt, Artificial Sequence
  Description of Artificial Sequence: Synthetic oligonucleotide
  Sense strand starting at position 632 of SEQ ID NO: 1880839
ugauguauugcauacuaga

SEQ ID NO: 1998087 - RNA, 19 nt, Artificial Sequence
  Description of Artificial Sequence: Synthetic oligonucleotide
  Antisense strand to SEQ ID NO: 1998086
ucuaguaugcaauacauca

SEQ ID NO: 1998088 - RNA, 19 nt, Artificial Sequence
  Description of Artificial Sequence: Synthetic oligonucleotide
  Sense strand starting at position 729 of SEQ ID NO: 1880839
gauuuagagugucaaauau

SEQ ID NO: 1998089 - RNA, 19 nt, Artificial Sequence
  Description of Artificial Sequence: Synthetic oligonucleotide
  Antisense strand to SEQ ID NO: 1998088
auauuugacacucuaaauc

SEQ ID NO: 1998090 - RNA, 19 nt, Artificial Sequence
  Description of Artificial Sequence: Synthetic oligonucleotide
  Sense strand starting at position 1002 of SEQ ID NO: 1880839
gcgaaacauguagacugau

SEQ ID NO: 1998091 - RNA, 19 nt, Artificial Sequence
  Description of Artificial Sequence: Synthetic oligonucleotide
  Antisense strand to SEQ ID NO: 1998090
aucagucuacauguuucgc

SEQ ID NO: 1998092 - RNA, 19 nt, Artificial Sequence
  Description of Artificial Sequence: Synthetic oligonucleotide
  Sense strand starting at position 1044 of SEQ ID NO: 1880839
uuacuaucaggugguaauu

SEQ ID NO: 1998093 - RNA, 19 nt, Artificial Sequence
  Description of Artificial Sequence: Synthetic oligonucleotide
  Antisense strand to SEQ ID NO: 1998092
aauuaccaccugauaguaa

SEQ ID NO: 1998094 - RNA, 19 nt, Artificial Sequence
  Description of Artificial Sequence: Synthetic oligonucleotide
  Sense strand starting at position 1053 of SEQ ID NO: 1880839
ggugguaauuaucuuggga

SEQ ID NO: 1998095 - RNA, 19 nt, Artificial Sequence
  Description of Artificial Sequence: Synthetic oligonucleotide
  Antisense strand to SEQ ID NO: 1998094
ucccaagauaauuaccacc

SEQ ID NO: 1998096 - RNA, 19 nt, Artificial Sequence
  Description of Artificial Sequence: Synthetic oligonucleotide
  Sense strand starting at position 1056 of SEQ ID NO: 1880839
gguaauuaucuugggagag

SEQ ID NO: 1998097 - RNA, 19 nt, Artificial Sequence
  Description of Artificial Sequence: Synthetic oligonucleotide
  Antisense strand to SEQ ID NO: 1998096
cucucccaagauaauuacc

SEQ ID NO: 1998098 - RNA, 19 nt, Artificial Sequence
  Description of Artificial Sequence: Synthetic oligonucleotide
  Sense strand starting at position 1077 of SEQ ID NO: 1880839
gcucuagaugcucaauaug

SEQ ID NO: 1998099 - RNA, 19 nt, Artificial Sequence
  Description of Artificial Sequence: Synthetic oligonucleotide
  Antisense strand to SEQ ID NO: 1998098
cauauugagcaucuagagc

SEQ ID NO: 1998100 - RNA, 19 nt, Artificial Sequence
  Description of Artificial Sequence: Synthetic oligonucleotide
  Sense strand starting at position 1080 of SEQ ID NO: 1880839
cuagaugcucaauauguuu

SEQ ID NO: 1998101 - RNA, 19 nt, Artificial Sequence
  Description of Artificial Sequence: Synthetic oligonucleotide
  Antisense strand to SEQ ID NO: 1998100
aaacauauugagcaucuag

SEQ ID NO: 1998102 - RNA, 19 nt, Artificial Sequence
  Description of Artificial Sequence: Synthetic oligonucleotide
  Sense strand starting at position 1117 of SEQ ID NO: 1880839
uaucuagaugcuggauaca

SEQ ID NO: 1998103 - RNA, 19 nt, Artificial Sequence
  Description of Artificial Sequence: Synthetic oligonucleotide
  Antisense strand to SEQ ID NO: 1998102
uguauccagcaucuagaua

SEQ ID NO: 1998104 - RNA, 19 nt, Artificial Sequence
  Description of Artificial Sequence: Synthetic oligonucleotide
  Sense strand starting at position 1537 of SEQ ID NO: 1880839
ggacuucuucgucaaaugg

SEQ ID NO: 1998105 - RNA, 19 nt, Artificial Sequence
  Description of Artificial Sequence: Synthetic oligonucleotide
  Antisense strand to SEQ ID NO: 1998104
ccauuugacgaagaagucc

SEQ ID NO: 1998106 - RNA, 19 nt, Artificial Sequence
  Description of Artificial Sequence: Synthetic oligonucleotide
  Sense strand starting at position 1676 of SEQ ID NO: 1880839
ucaaccaagcaguauuaga

SEQ ID NO: 1998107 - RNA, 19 nt, Artificial Sequence
  Description of Artificial Sequence: Synthetic oligonucleotide
  Antisense strand to SEQ ID NO: 1998106
ucuaauacugcuugguuga

SEQ ID NO: 1998108 - RNA, 19 nt, Artificial Sequence
  Description of Artificial Sequence: Synthetic oligonucleotide
  Sense strand starting at position 1684 of SEQ ID NO: 1880839
gcaguauuagagcaaauaa

SEQ ID NO: 1998109 - RNA, 19 nt, Artificial Sequence
  Description of Artificial Sequence: Synthetic oligonucleotide
  Antisense strand to SEQ ID NO: 1998108
uuauuugcucuaauacugc

SEQ ID NO: 1998110 - RNA, 19 nt, Artificial Sequence
  Description of Artificial Sequence: Synthetic oligonucleotide
  Sense strand starting at position 1703 of SEQ ID NO: 1880839
gcaaauuccucaguugaga

SEQ ID NO: 1998111 - RNA, 19 nt, Artificial Sequence
  Description of Artificial Sequence: Synthetic oligonucleotide
  Antisense strand to SEQ ID NO: 1998110
ucucaacugaggaauuugc

SEQ ID NO: 1998112 - RNA, 19 nt, Artificial Sequence
  Description of Artificial Sequence: Synthetic oligonucleotide
  Sense strand starting at position 1758 of SEQ ID NO: 1880839
auggccugaucuguaaaca

SEQ ID NO: 1998113 - RNA, 19 nt, Artificial Sequence
  Description of Artificial Sequence: Synthetic oligonucleotide
  Antisense strand to SEQ ID NO: 1998112
uguuuacagaucaggccau

SEQ ID NO: 1998114 - RNA, 19 nt, Artificial Sequence
  Description of Artificial Sequence: Synthetic oligonucleotide
  Sense strand starting at position 1759 of SEQ ID NO: 1880839
uggccugaucuguaaacac

SEQ ID NO: 1998115 - RNA, 19 nt, Artificial Sequence
  Description of Artificial Sequence: Synthetic oligonucleotide
  Antisense strand to SEQ ID NO: 1998114
guguuuacagaucaggcca

SEQ ID NO: 1998116 - RNA, 19 nt, Artificial Sequence
  Description of Artificial Sequence: Synthetic oligonucleotide
  Sense strand starting at position 1786 of SEQ ID NO: 1880839
agccauuggacuugggaau

SEQ ID NO: 1998117 - RNA, 19 nt, Artificial Sequence
  Description of Artificial Sequence: Synthetic oligonucleotide
  Antisense strand to SEQ ID NO: 1998116
auucccaaguccaauggcu

SEQ ID NO: 1998118 - RNA, 19 nt, Artificial Sequence
  Description of Artificial Sequence: Synthetic oligonucleotide
  Sense strand starting at position 2122 of SEQ ID NO: 1880839
accugaucagagugcugau

SEQ ID NO: 1998119 - RNA, 19 nt, Artificial Sequence
  Description of Artificial Sequence: Synthetic oligonucleotide
  Antisense strand to SEQ ID NO: 1998118
aucagcacucugaucaggu

SEQ ID NO: 1998120 - RNA, 19 nt, Artificial Sequence
  Description of Artificial Sequence: Synthetic oligonucleotide
  Sense strand starting at position 2544 of SEQ ID NO: 1880839
ugagaauccuacucggagu

SEQ ID NO: 1998121 - RNA, 19 nt, Artificial Sequence
  Description of Artificial Sequence: Synthetic oligonucleotide
  Antisense strand to SEQ ID NO: 1998120
acuccgaguaggauucuca

SEQ ID NO: 1998122 - RNA, 19 nt, Artificial Sequence
  Description of Artificial Sequence: Synthetic oligonucleotide
  Sense strand starting at position 2546 of SEQ ID NO: 1880839
agaauccuacucggaguaa

SEQ ID NO: 1998123 - RNA, 19 nt, Artificial Sequence
  Description of Artificial Sequence: Synthetic oligonucleotide
  Antisense strand to SEQ ID NO: 1998122
uuacuccgaguaggauucu

SEQ ID NO: 1998124 - RNA, 19 nt, Artificial Sequence
  Description of Artificial Sequence: Synthetic oligonucleotide
  Sense strand starting at position 2662 of SEQ ID NO: 1880839
ccacuuuccuuaccagagu

SEQ ID NO: 1998125 - RNA, 19 nt, Artificial Sequence
  Description of Artificial Sequence: Synthetic oligonucleotide
  Antisense strand to SEQ ID NO: 1998124
acucugguaaggaaagugg

SEQ ID NO: 1998126 - RNA, 19 nt, Artificial Sequence
  Description of Artificial Sequence: Synthetic oligonucleotide
  Sense strand starting at position 2785 of SEQ ID NO: 1880839
aguucuuacugauuacaua

SEQ ID NO: 1998127 - RNA, 19 nt, Artificial Sequence
  Description of Artificial Sequence: Synthetic oligonucleotide
  Antisense strand to SEQ ID NO: 1998126
uauguaaucaguaagaacu

SEQ ID NO: 1998128 - RNA, 19 nt, Artificial Sequence
  Description of Artificial Sequence: Synthetic oligonucleotide
  Sense strand starting at position 2786 of SEQ ID NO: 1880839
guucuuacugauuacauau

SEQ ID NO: 1998129 - RNA, 19 nt, Artificial Sequence
  Description of Artificial Sequence: Synthetic oligonucleotide
  Antisense strand to SEQ ID NO: 1998128
auauguaaucaguaagaac

SEQ ID NO: 1998130 - RNA, 19 nt, Artificial Sequence
  Description of Artificial Sequence: Synthetic oligonucleotide
  Sense strand starting at position 2832 of SEQ ID NO: 1880839
augugaaauggagguuaac

SEQ ID NO: 1998131 - RNA, 19 nt, Artificial Sequence
  Description of Artificial Sequence: Synthetic oligonucleotide
  Antisense strand to SEQ ID NO: 1998130
guuaaccuccauuucacau

SEQ ID NO: 1998132 - RNA, 19 nt, Artificial Sequence
  Description of Artificial Sequence: Synthetic oligonucleotide
  Sense strand starting at position 2838 of SEQ ID NO: 1880839
aauggagguuaacucauua

SEQ ID NO: 1998133 - RNA, 19 nt, Artificial Sequence
  Description of Artificial Sequence: Synthetic oligonucleotide
  Antisense strand to SEQ ID NO: 1998132
uaaugaguuaaccuccauu

SEQ ID NO: 1998134 - RNA, 19 nt, Artificial Sequence
  Description of Artificial Sequence: Synthetic oligonucleotide
  Sense strand starting at position 2940 of SEQ ID NO: 1880839
aaagaaaguguauguaucu

SEQ ID NO: 1998135 - RNA, 19 nt, Artificial Sequence
  Description of Artificial Sequence: Synthetic oligonucleotide
  Antisense strand to SEQ ID NO: 1998134
agauacauacacuuucuuu

SEQ ID NO: 1998136 - RNA, 19 nt, Artificial Sequence
  Description of Artificial Sequence: Synthetic oligonucleotide
  Sense strand starting at position 2941 of SEQ ID NO: 1880839
aagaaaguguauguaucua

SEQ ID NO: 1998137 - RNA, 19 nt, Artificial Sequence
  Description of Artificial Sequence: Synthetic oligonucleotide
  Antisense strand to SEQ ID NO: 1998136
uagauacauacacuuucuu

SEQ ID NO: 1998138 - RNA, 19 nt, Artificial Sequence
  Description of Artificial Sequence: Synthetic oligonucleotide
  Sense strand starting at position 2952 of SEQ ID NO: 1880839
uguaucuaaucuuuagaga

SEQ ID NO: 1998139 - RNA, 19 nt, Artificial Sequence
  Description of Artificial Sequence: Synthetic oligonucleotide
  Antisense strand to SEQ ID NO: 1998138
ucucuaaagauuagauaca

SEQ ID NO: 1998140 - RNA, 19 nt, Artificial Sequence
  Description of Artificial Sequence: Synthetic oligonucleotide
  Sense strand starting at position 3185 of SEQ ID NO: 1880839
cagacuaccgucugaacau

SEQ ID NO: 1998141 - RNA, 19 nt, Artificial Sequence
  Description of Artificial Sequence: Synthetic oligonucleotide
  Antisense strand to SEQ ID NO: 1998140
auguucagacgguagucug

SEQ ID NO: 1998142 - RNA, 19 nt, Artificial Sequence
  Description of Artificial Sequence: Synthetic oligonucleotide
  Sense strand starting at position 3340 of SEQ ID NO: 1880839
aacugaagagugugaucuu

SEQ ID NO: 1998143 - RNA, 19 nt, Artificial Sequence
  Description of Artificial Sequence: Synthetic oligonucleotide
  Antisense strand to SEQ ID NO: 1998142
aagaucacacucuucaguu

SEQ ID NO: 1998144 - RNA, 19 nt, Artificial Sequence
  Description of Artificial Sequence: Synthetic oligonucleotide
  Sense strand starting at position 3556 of SEQ ID NO: 1880839
agcaguuauuucccuuuga

SEQ ID NO: 1998145 - RNA, 19 nt, Artificial Sequence
  Description of Artificial Sequence: Synthetic oligonucleotide
  Antisense strand to SEQ ID NO: 1998144
ucaaagggaaauaacugcu

SEQ ID NO: 1998146 - RNA, 19 nt, Artificial Sequence
  Description of Artificial Sequence: Synthetic oligonucleotide
  Sense strand starting at position 3557 of SEQ ID NO: 1880839
gcaguuauuucccuuugac

SEQ ID NO: 1998147 - RNA, 19 nt, Artificial Sequence
  Description of Artificial Sequence: Synthetic oligonucleotide
  Antisense strand to SEQ ID NO: 1998146
gucaaagggaaauaacugc

SEQ ID NO: 1998148 - RNA, 19 nt, Artificial Sequence
  Description of Artificial Sequence: Synthetic oligonucleotide
  Sense strand starting at position 3598 of SEQ ID NO: 1880839
guugacaugccagauccuu

SEQ ID NO: 1998149 - RNA, 19 nt, Artificial Sequence
  Description of Artificial Sequence: Synthetic oligonucleotide
  Antisense strand to SEQ ID NO: 1998148
aaggaucuggcaugucaac

SEQ ID NO: 1998150 - RNA, 19 nt, Artificial Sequence
  Description of Artificial Sequence: Synthetic oligonucleotide
  Sense strand starting at position 3611 of SEQ ID NO: 1880839
auccuuauuucugcggaau

SEQ ID NO: 1998151 - RNA, 19 nt, Artificial Sequence
  Description of Artificial Sequence: Synthetic oligonucleotide
  Antisense strand to SEQ ID NO: 1998150
auuccgcagaaauaaggau

SEQ ID NO: 1998152 - RNA, 19 nt, Artificial Sequence
  Description of Artificial Sequence: Synthetic oligonucleotide
  Sense strand starting at position 3829 of SEQ ID NO: 1880839
agguuaucacuuugaucau

SEQ ID NO: 1998153 - RNA, 19 nt, Artificial Sequence
  Description of Artificial Sequence: Synthetic oligonucleotide
  Antisense strand to SEQ ID NO: 1998152
augaucaaagugauaaccu

SEQ ID NO: 1998154 - RNA, 19 nt, Artificial Sequence
  Description of Artificial Sequence: Synthetic oligonucleotide
  Sense strand starting at position 3954 of SEQ ID NO: 1880839
cucaacuguguguacagau

SEQ ID NO: 1998155 - RNA, 19 nt, Artificial Sequence
  Description of Artificial Sequence: Synthetic oligonucleotide
  Antisense strand to SEQ ID NO: 1998154
aucuguacacacaguugag

SEQ ID NO: 1998156 - RNA, 19 nt, Artificial Sequence
  Description of Artificial Sequence: Synthetic oligonucleotide
  Sense strand starting at position 3973 of SEQ ID NO: 1880839
uuucuaagucguuaugaau

SEQ ID NO: 1998157 - RNA, 19 nt, Artificial Sequence
  Description of Artificial Sequence: Synthetic oligonucleotide
  Antisense strand to SEQ ID NO: 1998156
auucauaacgacuuagaaa

SEQ ID NO: 1998158 - RNA, 19 nt, Artificial Sequence
  Description of Artificial Sequence: Synthetic oligonucleotide
  Sense strand starting at position 201 of SEQ ID NO: 1880844
aggucuucccuuuggagga

SEQ ID NO: 1998159 - RNA, 19 nt, Artificial Sequence
  Description of Artificial Sequence: Synthetic oligonucleotide
  Antisense strand to SEQ ID NO: 1998158
uccuccaaagggaagaccu

SEQ ID NO: 1998160 - RNA, 19 nt, Artificial Sequence
  Description of Artificial Sequence: Synthetic oligonucleotide
  Sense strand starting at position 205 of SEQ ID NO: 1880844
cuucccuuuggaggaauau

SEQ ID NO: 1998161 - RNA, 19 nt, Artificial Sequence
  Description of Artificial Sequence: Synthetic oligonucleotide
  Antisense strand to SEQ ID NO: 1998160
auauuccuccaaagggaag

SEQ ID NO: 1998162 - RNA, 19 nt, Artificial Sequence
  Description of Artificial Sequence: Synthetic oligonucleotide
  Sense strand starting at position 266 of SEQ ID NO: 1880844
gcugucucuggcuaaguga

SEQ ID NO: 1998163 - RNA, 19 nt, Artificial Sequence
  Description of Artificial Sequence: Synthetic oligonucleotide
  Antisense strand to SEQ ID NO: 1998162
ucacuuagccagagacagc

SEQ ID NO: 1998164 - RNA, 19 nt, Artificial Sequence
  Description of Artificial Sequence: Synthetic oligonucleotide
  Sense strand starting at position 275 of SEQ ID NO: 1880844
ggcuaagugagccaguauu

SEQ ID NO: 1998165 - RNA, 19 nt, Artificial Sequence
  Description of Artificial Sequence: Synthetic oligonucleotide
  Antisense strand to SEQ ID NO: 1998164
aauacuggcucacuuagcc

SEQ ID NO: 1998166 - RNA, 19 nt, Artificial Sequence
  Description of Artificial Sequence: Synthetic oligonucleotide
  Sense strand starting at position 463 of SEQ ID NO: 1880844
cacguuagguuucccauuu

SEQ ID NO: 1998167 - RNA, 19 nt, Artificial Sequence
  Description of Artificial Sequence: Synthetic oligonucleotide
  Antisense strand to SEQ ID NO: 1998166
aaaugggaaaccuaacgug

SEQ ID NO: 1998168 - RNA, 19 nt, Artificial Sequence
  Description of Artificial Sequence: Synthetic oligonucleotide
  Sense strand starting at position 464 of SEQ ID NO: 1880844
acguuagguuucccauuua

SEQ ID NO: 1998169 - RNA, 19 nt, Artificial Sequence
  Description of Artificial Sequence: Synthetic oligonucleotide
  Antisense strand to SEQ ID NO: 1998168
uaaaugggaaaccuaacgu

SEQ ID NO: 1998170 - RNA, 19 nt, Artificial Sequence
  Description of Artificial Sequence: Synthetic oligonucleotide
  Sense strand starting at position 641 of SEQ ID NO: 1880844
ggcagcuuaggauaauuau

SEQ ID NO: 1998171 - RNA, 19 nt, Artificial Sequence
  Description of Artificial Sequence: Synthetic oligonucleotide
  Antisense strand to SEQ ID NO: 1998170
auaauuauccuaagcugcc

SEQ ID NO: 1998172 - RNA, 19 nt, Artificial Sequence
  Description of Artificial Sequence: Synthetic oligonucleotide
  Sense strand starting at position 673 of SEQ ID NO: 1880844
agggcagauuaguugaagu

SEQ ID NO: 1998173 - RNA, 19 nt, Artificial Sequence
  Description of Artificial Sequence: Synthetic oligonucleotide
  Antisense strand to SEQ ID NO: 1998172
acuucaacuaaucugcccu

SEQ ID NO: 1998174 - RNA, 19 nt, Artificial Sequence
  Description of Artificial Sequence: Synthetic oligonucleotide
  Sense strand starting at position 675 of SEQ ID NO: 1880844
ggcagauuaguugaagucu

SEQ ID NO: 1998175 - RNA, 19 nt, Artificial Sequence
  Description of Artificial Sequence: Synthetic oligonucleotide
  Antisense strand to SEQ ID NO: 1998174
agacuucaacuaaucugcc

SEQ ID NO: 1998176 - RNA, 19 nt, Artificial Sequence
  Description of Artificial Sequence: Synthetic oligonucleotide
  Sense strand starting at position 727 of SEQ ID NO: 1880844
ccgacaauguggucauugu

SEQ ID NO: 1998177 - RNA, 19 nt, Artificial Sequence
  Description of Artificial Sequence: Synthetic oligonucleotide
  Antisense strand to SEQ ID NO: 1998176
acaaugaccacauugucgg

SEQ ID NO: 1998178 - RNA, 19 nt, Artificial Sequence
  Description of Artificial Sequence: Synthetic oligonucleotide
  Sense strand starting at position 728 of SEQ ID NO: 1880844
cgacaauguggucauuguu

SEQ ID NO: 1998179 - RNA, 19 nt, Artificial Sequence
  Description of Artificial Sequence: Synthetic oligonucleotide
  Antisense strand to SEQ ID NO: 1998178
aacaaugaccacauugucg

SEQ ID NO: 1998180 - RNA, 19 nt, Artificial Sequence
  Description of Artificial Sequence: Synthetic oligonucleotide
  Sense strand starting at position 795 of SEQ ID NO: 1880844
ccgaguccugucuaaauau

SEQ ID NO: 1998181 - RNA, 19 nt, Artificial Sequence
  Description of Artificial Sequence: Synthetic oligonucleotide
  Antisense strand to SEQ ID NO: 1998180
auauuuagacaggacucgg

SEQ ID NO: 1998182 - RNA, 19 nt, Artificial Sequence
  Description of Artificial Sequence: Synthetic oligonucleotide
  Sense strand starting at position 815 of SEQ ID NO: 1880844
cacagugcucagggaaaga

SEQ ID NO: 1998183 - RNA, 19 nt, Artificial Sequence
  Description of Artificial Sequence: Synthetic oligonucleotide
  Antisense strand to SEQ ID NO: 1998182
ucuuucccugagcacugug

SEQ ID NO: 1998184 - RNA, 19 nt, Artificial Sequence
  Description of Artificial Sequence: Synthetic oligonucleotide
  Sense strand starting at position 844 of SEQ ID NO: 1880844
cccgacaaaucugcguaaa

SEQ ID NO: 1998185 - RNA, 19 nt, Artificial Sequence
  Description of Artificial Sequence: Synthetic oligonucleotide
  Antisense strand to SEQ ID NO: 1998184
uuuacgcagauuugucggg

SEQ ID NO: 1998186 - RNA, 19 nt, Artificial Sequence
  Description of Artificial Sequence: Synthetic oligonucleotide
  Sense strand starting at position 845 of SEQ ID NO: 1880844
ccgacaaaucugcguaaau

SEQ ID NO: 1998187 - RNA, 19 nt, Artificial Sequence
  Description of Artificial Sequence: Synthetic oligonucleotide
  Antisense strand to SEQ ID NO: 1998186
auuuacgcagauuugucgg

SEQ ID NO: 1998188 - RNA, 19 nt, Artificial Sequence
  Description of Artificial Sequence: Synthetic oligonucleotide
  Sense strand starting at position 846 of SEQ ID NO: 1880844
cgacaaaucugcguaaauc

SEQ ID NO: 1998189 - RNA, 19 nt, Artificial Sequence
  Description of Artificial Sequence: Synthetic oligonucleotide
  Antisense strand to SEQ ID NO: 1998188
gauuuacgcagauuugucg

SEQ ID NO: 1998190 - RNA, 19 nt, Artificial Sequence
  Description of Artificial Sequence: Synthetic oligonucleotide
  Sense strand starting at position 847 of SEQ ID NO: 1880844
gacaaaucugcguaaauca

SEQ ID NO: 1998191 - RNA, 19 nt, Artificial Sequence
  Description of Artificial Sequence: Synthetic oligonucleotide
  Antisense strand to SEQ ID NO: 1998190
ugauuuacgcagauuuguc

SEQ ID NO: 1998192 - RNA, 19 nt, Artificial Sequence
  Description of Artificial Sequence: Synthetic oligonucleotide
  Sense strand starting at position 865 of SEQ ID NO: 1880844
acacuuccauaguuacaga

SEQ ID NO: 1998193 - RNA, 19 nt, Artificial Sequence
  Description of Artificial Sequence: Synthetic oligonucleotide
  Antisense strand to SEQ ID NO: 1998192
ucuguaacuauggaagugu

SEQ ID NO: 1998194 - RNA, 19 nt, Artificial Sequence
  Description of Artificial Sequence: Synthetic oligonucleotide
  Sense strand starting at position 905 of SEQ ID NO: 1880844
gcucaagaugcugauuaca

SEQ ID NO: 1998195 - RNA, 19 nt, Artificial Sequence
  Description of Artificial Sequence: Synthetic oligonucleotide
  Antisense strand to SEQ ID NO: 1998194
uguaaucagcaucuugagc

SEQ ID NO: 1998196 - RNA, 19 nt, Artificial Sequence
  Description of Artificial Sequence: Synthetic oligonucleotide
  Sense strand starting at position 1046 of SEQ ID NO: 1880844
auguuacuuucccuagaga

SEQ ID NO: 1998197 - RNA, 19 nt, Artificial Sequence
  Description of Artificial Sequence: Synthetic oligonucleotide
  Antisense strand to SEQ ID NO: 1998196
ucucuagggaaaguaacau

SEQ ID NO: 1998198 - RNA, 19 nt, Artificial Sequence
  Description of Artificial Sequence: Synthetic oligonucleotide
  Sense strand starting at position 1047 of SEQ ID NO: 1880844
uguuacuuucccuagagaa

SEQ ID NO: 1998199 - RNA, 19 nt, Artificial Sequence
  Description of Artificial Sequence: Synthetic oligonucleotide
  Antisense strand to SEQ ID NO: 1998198
uucucuagggaaaguaaca

SEQ ID NO: 1998200 - RNA, 19 nt, Artificial Sequence
  Description of Artificial Sequence: Synthetic oligonucleotide
  Sense strand starting at position 1156 of SEQ ID NO: 1880844
guggcuggccuccaaaguu

SEQ ID NO: 1998201 - RNA, 19 nt, Artificial Sequence
  Description of Artificial Sequence: Synthetic oligonucleotide
  Antisense strand to SEQ ID NO: 1998200
aacuuuggaggccagccac

SEQ ID NO: 1998202 - RNA, 19 nt, Artificial Sequence
  Description of Artificial Sequence: Synthetic oligonucleotide
  Sense strand starting at position 1341 of SEQ ID NO: 1880844
agaguugaguugcuucuua

SEQ ID NO: 1998203 - RNA, 19 nt, Artificial Sequence
  Description of Artificial Sequence: Synthetic oligonucleotide
  Antisense strand to SEQ ID NO: 1998202
uaagaagcaacucaacucu

SEQ ID NO: 1998204 - RNA, 19 nt, Artificial Sequence
  Description of Artificial Sequence: Synthetic oligonucleotide
  Sense strand starting at position 1345 of SEQ ID NO: 1880844
uugaguugcuucuuaagau

SEQ ID NO: 1998205 - RNA, 19 nt, Artificial Sequence
  Description of Artificial Sequence: Synthetic oligonucleotide
  Antisense strand to SEQ ID NO: 1998204
aucuuaagaagcaacucaa

SEQ ID NO: 1998206 - RNA, 19 nt, Artificial Sequence
  Description of Artificial Sequence: Synthetic oligonucleotide
  Sense strand starting at position 1352 of SEQ ID NO: 1880844
gcuucuuaagauggaaaga

SEQ ID NO: 1998207 - RNA, 19 nt, Artificial Sequence
  Description of Artificial Sequence: Synthetic oligonucleotide
  Antisense strand to SEQ ID NO: 1998206
ucuuuccaucuuaagaagc

SEQ ID NO: 1998208 - RNA, 19 nt, Artificial Sequence
  Description of Artificial Sequence: Synthetic oligonucleotide
  Sense strand starting at position 1363 of SEQ ID NO: 1880844
uggaaagaaguguacuguu

SEQ ID NO: 1998209 - RNA, 19 nt, Artificial Sequence
  Description of Artificial Sequence: Synthetic oligonucleotide
  Antisense strand to SEQ ID NO: 1998208
aacaguacacuucuuucca

SEQ ID NO: 1998210 - RNA, 19 nt, Artificial Sequence
  Description of Artificial Sequence: Synthetic oligonucleotide
  Sense strand starting at position 1560 of SEQ ID NO: 1880844
gccagauacccucggaauc

SEQ ID NO: 1998211 - RNA, 19 nt, Artificial Sequence
  Description of Artificial Sequence: Synthetic oligonucleotide
  Antisense strand to SEQ ID NO: 1998210
gauuccgaggguaucuggc

SEQ ID NO: 1998212 - RNA, 19 nt, Artificial Sequence
  Description of Artificial Sequence: Synthetic oligonucleotide
  Sense strand starting at position 1656 of SEQ ID NO: 1880844
cuuccuugccacuauuagu

SEQ ID NO: 1998213 - RNA, 19 nt, Artificial Sequence
  Description of Artificial Sequence: Synthetic oligonucleotide
  Antisense strand to SEQ ID NO: 1998212
acuaauaguggcaaggaag

SEQ ID NO: 1998214 - RNA, 19 nt, Artificial Sequence
  Description of Artificial Sequence: Synthetic oligonucleotide
  Sense strand starting at position 1666 of SEQ ID NO: 1880844
acuauuagugcucacauag

SEQ ID NO: 1998215 - RNA, 19 nt, Artificial Sequence
  Description of Artificial Sequence: Synthetic oligonucleotide
  Antisense strand to SEQ ID NO: 1998214
cuaugugagcacuaauagu

SEQ ID NO: 1998216 - RNA, 19 nt, Artificial Sequence
  Description of Artificial Sequence: Synthetic oligonucleotide
  Sense strand starting at position 1858 of SEQ ID NO: 1880844
uuucgaauuucuggaucaa

SEQ ID NO: 1998217 - RNA, 19 nt, Artificial Sequence
  Description of Artificial Sequence: Synthetic oligonucleotide
  Antisense strand to SEQ ID NO: 1998216
uugauccagaaauucgaaa

SEQ ID NO: 1998218 - RNA, 19 nt, Artificial Sequence
  Description of Artificial Sequence: Synthetic oligonucleotide
  Sense strand starting at position 1869 of SEQ ID NO: 1880844
uggaucaacuucuuuagga

SEQ ID NO: 1998219 - RNA, 19 nt, Artificial Sequence
  Description of Artificial Sequence: Synthetic oligonucleotide
  Antisense strand to SEQ ID NO: 1998218
uccuaaagaaguugaucca

SEQ ID NO: 1998220 - RNA, 19 nt, Artificial Sequence
  Description of Artificial Sequence: Synthetic oligonucleotide
  Sense strand starting at position 1897 of SEQ ID NO: 1880844
gaagaagucucagagacag

SEQ ID NO: 1998221 - RNA, 19 nt, Artificial Sequence
  Description of Artificial Sequence: Synthetic oligonucleotide
  Antisense strand to SEQ ID NO: 1998220
cugucucugagacuucuuc

SEQ ID NO: 1998222 - RNA, 19 nt, Artificial Sequence
  Description of Artificial Sequence: Synthetic oligonucleotide
  Sense strand starting at position 2080 of SEQ ID NO: 1880844
uuacguucucgguauugau

SEQ ID NO: 1998223 - RNA, 19 nt, Artificial Sequence
  Description of Artificial Sequence: Synthetic oligonucleotide
  Antisense strand to SEQ ID NO: 1998222
aucaauaccgagaacguaa

SEQ ID NO: 1998224 - RNA, 19 nt, Artificial Sequence
  Description of Artificial Sequence: Synthetic oligonucleotide
  Sense strand starting at position 2092 of SEQ ID NO: 1880844
uauugauuggcagggcuga

SEQ ID NO: 1998225 - RNA, 19 nt, Artificial Sequence
  Description of Artificial Sequence: Synthetic oligonucleotide
  Antisense strand to SEQ ID NO: 1998224
ucagcccugccaaucaaua

SEQ ID NO: 1998226 - RNA, 19 nt, Artificial Sequence
  Description of Artificial Sequence: Synthetic oligonucleotide
  Sense strand starting at position 2252 of SEQ ID NO: 1880844
gguggaaucgcugaaucuu

SEQ ID NO: 1998227 - RNA, 19 nt, Artificial Sequence
  Description of Artificial Sequence: Synthetic oligonucleotide
  Antisense strand to SEQ ID NO: 1998226
aagauucagcgauuccacc

SEQ ID NO: 1998228 - RNA, 19 nt, Artificial Sequence
  Description of Artificial Sequence: Synthetic oligonucleotide
  Sense strand starting at position 3515 of SEQ ID NO: 1880844
uggccagucggagaaaguu

SEQ ID NO: 1998229 - RNA, 19 nt, Artificial Sequence
  Description of Artificial Sequence: Synthetic oligonucleotide
  Antisense strand to SEQ ID NO: 1998228
aacuuucuccgacuggcca

SEQ ID NO: 1998230 - RNA, 19 nt, Artificial Sequence
  Description of Artificial Sequence: Synthetic oligonucleotide
  Sense strand starting at position 3572 of SEQ ID NO: 1880844
ggcuguggguguauugauu

SEQ ID NO: 1998231 - RNA, 19 nt, Artificial Sequence
  Description of Artificial Sequence: Synthetic oligonucleotide
  Antisense strand to SEQ ID NO: 1998230
aaucaauacacccacagcc

SEQ ID NO: 1998232 - RNA, 19 nt, Artificial Sequence
  Description of Artificial Sequence: Synthetic oligonucleotide
  Sense strand starting at position 3773 of SEQ ID NO: 1880844
guucuuauuucugugcguu

SEQ ID NO: 1998233 - RNA, 19 nt, Artificial Sequence
  Description of Artificial Sequence: Synthetic oligonucleotide
  Antisense strand to SEQ ID NO: 1998232
aacgcacagaaauaagaac

SEQ ID NO: 1998234 - RNA, 19 nt, Artificial Sequence
  Description of Artificial Sequence: Synthetic oligonucleotide
  Sense strand starting at position 3777 of SEQ ID NO: 1880844
uuauuucugugcguugcaa

SEQ ID NO: 1998235 - RNA, 19 nt, Artificial Sequence
  Description of Artificial Sequence: Synthetic oligonucleotide
  Antisense strand to SEQ ID NO: 1998234
uugcaacgcacagaaauaa

SEQ ID NO: 1998236 - RNA, 19 nt, Artificial Sequence
  Description of Artificial Sequence: Synthetic oligonucleotide
  Sense strand starting at position 3803 of SEQ ID NO: 1880844
agagaaauccacuagcguc

SEQ ID NO: 1998237 - RNA, 19 nt, Artificial Sequence
  Description of Artificial Sequence: Synthetic oligonucleotide
  Antisense strand to SEQ ID NO: 1998236
gacgcuaguggauuucucu

SEQ ID NO: 1998238 - RNA, 19 nt, Artificial Sequence
  Description of Artificial Sequence: Synthetic oligonucleotide
  Sense strand starting at position 92 of SEQ ID NO: 1880845
cacguuagguuucccauuu

SEQ ID NO: 1998239 - RNA, 19 nt, Artificial Sequence
  Description of Artificial Sequence: Synthetic oligonucleotide
  Antisense strand to SEQ ID NO: 1998238
aaaugggaaaccuaacgug

SEQ ID NO: 1998240 - RNA, 19 nt, Artificial Sequence
  Description of Artificial Sequence: Synthetic oligonucleotide
  Sense strand starting at position 93 of SEQ ID NO: 1880845
acguuagguuucccauuua

SEQ ID NO: 1998241 - RNA, 19 nt, Artificial Sequence
  Description of Artificial Sequence: Synthetic oligonucleotide
  Antisense strand to SEQ ID NO: 1998240
uaaaugggaaaccuaacgu

SEQ ID NO: 1998242 - RNA, 19 nt, Artificial Sequence
  Description of Artificial Sequence: Synthetic oligonucleotide
  Sense strand starting at position 270 of SEQ ID NO: 1880845
ggcagcuuaggauaauuau

SEQ ID NO: 1998243 - RNA, 19 nt, Artificial Sequence
  Description of Artificial Sequence: Synthetic oligonucleotide
  Antisense strand to SEQ ID NO: 1998242
auaauuauccuaagcugcc

SEQ ID NO: 1998244 - RNA, 19 nt, Artificial Sequence
  Description of Artificial Sequence: Synthetic oligonucleotide
  Sense strand starting at position 302 of SEQ ID NO: 1880845
agggcagauuaguugaagu

SEQ ID NO: 1998245 - RNA, 19 nt, Artificial Sequence
  Description of Artificial Sequence: Synthetic oligonucleotide
  Antisense strand to SEQ ID NO: 1998244
acuucaacuaaucugcccu

SEQ ID NO: 1998246 - RNA, 19 nt, Artificial Sequence
  Description of Artificial Sequence: Synthetic oligonucleotide
  Sense strand starting at position 304 of SEQ ID NO: 1880845
ggcagauuaguugaagucu

SEQ ID NO: 1998247 - RNA, 19 nt, Artificial Sequence
  Description of Artificial Sequence: Synthetic oligonucleotide
  Antisense strand to SEQ ID NO: 1998246
agacuucaacuaaucugcc

SEQ ID NO: 1998248 - RNA, 19 nt, Artificial Sequence
  Description of Artificial Sequence: Synthetic oligonucleotide
  Sense strand starting at position 357 of SEQ ID NO: 1880845
cgacaauguggucauuguu

SEQ ID NO: 1998249 - RNA, 19 nt, Artificial Sequence
  Description of Artificial Sequence: Synthetic oligonucleotide
  Antisense strand to SEQ ID NO: 1998248
aacaaugaccacauugucg

SEQ ID NO: 1998250 - RNA, 19 nt, Artificial Sequence
  Description of Artificial Sequence: Synthetic oligonucleotide
  Sense strand starting at position 424 of SEQ ID NO: 1880845
ccgaguccugucuaaauau

SEQ ID NO: 1998251 - RNA, 19 nt, Artificial Sequence
  Description of Artificial Sequence: Synthetic oligonucleotide
  Antisense strand to SEQ ID NO: 1998250
auauuuagacaggacucgg

SEQ ID NO: 1998252 - RNA, 19 nt, Artificial Sequence
  Description of Artificial Sequence: Synthetic oligonucleotide
  Sense strand starting at position 444 of SEQ ID NO: 1880845
cacagugcucagggaaaga

SEQ ID NO: 1998253 - RNA, 19 nt, Artificial Sequence
  Description of Artificial Sequence: Synthetic oligonucleotide
  Antisense strand to SEQ ID NO: 1998252
ucuuucccugagcacugug

SEQ ID NO: 1998254 - RNA, 19 nt, Artificial Sequence
  Description of Artificial Sequence: Synthetic oligonucleotide
  Sense strand starting at position 473 of SEQ ID NO: 1880845
cccgacaaaucugcguaaa

SEQ ID NO: 1998255 - RNA, 19 nt, Artificial Sequence
  Description of Artificial Sequence: Synthetic oligonucleotide
  Antisense strand to SEQ ID NO: 1998254
uuuacgcagauuugucggg

SEQ ID NO: 1998256 - RNA, 19 nt, Artificial Sequence
  Description of Artificial Sequence: Synthetic oligonucleotide
  Sense strand starting at position 474 of SEQ ID NO: 1880845
ccgacaaaucugcguaaau

SEQ ID NO: 1998257 - RNA, 19 nt, Artificial Sequence
  Description of Artificial Sequence: Synthetic oligonucleotide
  Antisense strand to SEQ ID NO: 1998256
auuuacgcagauuugucgg

SEQ ID NO: 1998258 - RNA, 19 nt, Artificial Sequence
  Description of Artificial Sequence: Synthetic oligonucleotide
  Sense strand starting at position 475 of SEQ ID NO: 1880845
cgacaaaucugcguaaauc

SEQ ID NO: 1998259 - RNA, 19 nt, Artificial Sequence
  Description of Artificial Sequence: Synthetic oligonucleotide
  Antisense strand to SEQ ID NO: 1998258
gauuuacgcagauuugucg

SEQ ID NO: 1998260 - RNA, 19 nt, Artificial Sequence
  Description of Artificial Sequence: Synthetic oligonucleotide
  Sense strand starting at position 476 of SEQ ID NO: 1880845
gacaaaucugcguaaauca

SEQ ID NO: 1998261 - RNA, 19 nt, Artificial Sequence
  Description of Artificial Sequence: Synthetic oligonucleotide
  Antisense strand to SEQ ID NO: 1998260
ugauuuacgcagauuuguc

SEQ ID NO: 1998262 - RNA, 19 nt, Artificial Sequence
  Description of Artificial Sequence: Synthetic oligonucleotide
  Sense strand starting at position 494 of SEQ ID NO: 1880845
acacuuccauaguuacaga

SEQ ID NO: 1998263 - RNA, 19 nt, Artificial Sequence
  Description of Artificial Sequence: Synthetic oligonucleotide
  Antisense strand to SEQ ID NO: 1998262
ucuguaacuauggaagugu

SEQ ID NO: 1998264 - RNA, 19 nt, Artificial Sequence
  Description of Artificial Sequence: Synthetic oligonucleotide
  Sense strand starting at position 534 of SEQ ID NO: 1880845
gcucaagaugcugauuaca

SEQ ID NO: 1998265 - RNA, 19 nt, Artificial Sequence
  Description of Artificial Sequence: Synthetic oligonucleotide
  Antisense strand to SEQ ID NO: 1998264
uguaaucagcaucuugagc

SEQ ID NO: 1998266 - RNA, 19 nt, Artificial Sequence
  Description of Artificial Sequence: Synthetic oligonucleotide
  Sense strand starting at position 675 of SEQ ID NO: 1880845
auguuacuuucccuagaga

SEQ ID NO: 1998267 - RNA, 19 nt, Artificial Sequence
  Description of Artificial Sequence: Synthetic oligonucleotide
  Antisense strand to SEQ ID NO: 1998266
ucucuagggaaaguaacau

SEQ ID NO: 1998268 - RNA, 19 nt, Artificial Sequence
  Description of Artificial Sequence: Synthetic oligonucleotide
  Sense strand starting at position 676 of SEQ ID NO: 1880845
uguuacuuucccuagagaa

SEQ ID NO: 1998269 - RNA, 19 nt, Artificial Sequence
  Description of Artificial Sequence: Synthetic oligonucleotide
  Antisense strand to SEQ ID NO: 1998268
uucucuagggaaaguaaca

SEQ ID NO: 1998270 - RNA, 19 nt, Artificial Sequence
  Description of Artificial Sequence: Synthetic oligonucleotide
  Sense strand starting at position 785 of SEQ ID NO: 1880845
guggcuggccuccaaaguu

SEQ ID NO: 1998271 - RNA, 19 nt, Artificial Sequence
  Description of Artificial Sequence: Synthetic oligonucleotide
  Antisense strand to SEQ ID NO: 1998270
aacuuuggaggccagccac

SEQ ID NO: 1998272 - RNA, 19 nt, Artificial Sequence
  Description of Artificial Sequence: Synthetic oligonucleotide
  Sense strand starting at position 970 of SEQ ID NO: 1880845
agaguugaguugcuucuua

SEQ ID NO: 1998273 - RNA, 19 nt, Artificial Sequence
  Description of Artificial Sequence: Synthetic oligonucleotide
  Antisense strand to SEQ ID NO: 1998272
uaagaagcaacucaacucu

SEQ ID NO: 1998274 - RNA, 19 nt, Artificial Sequence
  Description of Artificial Sequence: Synthetic oligonucleotide
  Sense strand starting at position 974 of SEQ ID NO: 1880845
uugaguugcuucuuaagau

SEQ ID NO: 1998275 - RNA, 19 nt, Artificial Sequence
  Description of Artificial Sequence: Synthetic oligonucleotide
  Antisense strand to SEQ ID NO: 1998274
aucuuaagaagcaacucaa

SEQ ID NO: 1998276 - RNA, 19 nt, Artificial Sequence
  Description of Artificial Sequence: Synthetic oligonucleotide
  Sense strand starting at position 981 of SEQ ID NO: 1880845
gcuucuuaagauggaaaga

SEQ ID NO: 1998277 - RNA, 19 nt, Artificial Sequence
  Description of Artificial Sequence: Synthetic oligonucleotide
  Antisense strand to SEQ ID NO: 1998276
ucuuuccaucuuaagaagc

SEQ ID NO: 1998278 - RNA, 19 nt, Artificial Sequence
  Description of Artificial Sequence: Synthetic oligonucleotide
  Sense strand starting at position 992 of SEQ ID NO: 1880845
uggaaagaaguguacuguu

SEQ ID NO: 1998279 - RNA, 19 nt, Artificial Sequence
  Description of Artificial Sequence: Synthetic oligonucleotide
  Antisense strand to SEQ ID NO: 1998278
aacaguacacuucuuucca

SEQ ID NO: 1998280 - RNA, 19 nt, Artificial Sequence
  Description of Artificial Sequence: Synthetic oligonucleotide
  Sense strand starting at position 1189 of SEQ ID NO: 1880845
gccagauacccucggaauc

SEQ ID NO: 1998281 - RNA, 19 nt, Artificial Sequence
  Description of Artificial Sequence: Synthetic oligonucleotide
  Antisense strand to SEQ ID NO: 1998280
gauuccgaggguaucuggc

SEQ ID NO: 1998282 - RNA, 19 nt, Artificial Sequence
  Description of Artificial Sequence: Synthetic oligonucleotide
  Sense strand starting at position 1285 of SEQ ID NO: 1880845
cuuccuugccacuauuagu

SEQ ID NO: 1998283 - RNA, 19 nt, Artificial Sequence
  Description of Artificial Sequence: Synthetic oligonucleotide
  Antisense strand to SEQ ID NO: 1998282
acuaauaguggcaaggaag

SEQ ID NO: 1998284 - RNA, 19 nt, Artificial Sequence
  Description of Artificial Sequence: Synthetic oligonucleotide
  Sense strand starting at position 1295 of SEQ ID NO: 1880845
acuauuagugcucacauag

SEQ ID NO: 1998285 - RNA, 19 nt, Artificial Sequence
  Description of Artificial Sequence: Synthetic oligonucleotide
  Antisense strand to SEQ ID NO: 1998284
cuaugugagcacuaauagu

SEQ ID NO: 1998286 - RNA, 19 nt, Artificial Sequence
  Description of Artificial Sequence: Synthetic oligonucleotide
  Sense strand starting at position 1487 of SEQ ID NO: 1880845
uuucgaauuucuggaucaa

SEQ ID NO: 1998287 - RNA, 19 nt, Artificial Sequence
  Description of Artificial Sequence: Synthetic oligonucleotide
  Antisense strand to SEQ ID NO: 1998286
uugauccagaaauucgaaa

SEQ ID NO: 1998288 - RNA, 19 nt, Artificial Sequence
  Description of Artificial Sequence: Synthetic oligonucleotide
  Sense strand starting at position 1498 of SEQ ID NO: 1880845
uggaucaacuucuuuagga

SEQ ID NO: 1998289 - RNA, 19 nt, Artificial Sequence
  Description of Artificial Sequence: Synthetic oligonucleotide
  Antisense strand to SEQ ID NO: 1998288
uccuaaagaaguugaucca

SEQ ID NO: 1998290 - RNA, 19 nt, Artificial Sequence
  Description of Artificial Sequence: Synthetic oligonucleotide
  Sense strand starting at position 1526 of SEQ ID NO: 1880845
gaagaagucucagagacag

SEQ ID NO: 1998291 - RNA, 19 nt, Artificial Sequence
  Description of Artificial Sequence: Synthetic oligonucleotide
  Antisense strand to SEQ ID NO: 1998290
cugucucugagacuucuuc

SEQ ID NO: 1998292 - RNA, 19 nt, Artificial Sequence
  Description of Artificial Sequence: Synthetic oligonucleotide
  Sense strand starting at position 1709 of SEQ ID NO: 1880845
uuacguucucgguauugau

SEQ ID NO: 1998293 - RNA, 19 nt, Artificial Sequence
  Description of Artificial Sequence: Synthetic oligonucleotide
  Antisense strand to SEQ ID NO: 1998292
aucaauaccgagaacguaa

SEQ ID NO: 1998294 - RNA, 19 nt, Artificial Sequence
  Description of Artificial Sequence: Synthetic oligonucleotide
  Sense strand starting at position 1721 of SEQ ID NO: 1880845
uauugauuggcagggcuga

SEQ ID NO: 1998295 - RNA, 19 nt, Artificial Sequence
  Description of Artificial Sequence: Synthetic oligonucleotide
  Antisense strand to SEQ ID NO: 1998294
ucagcccugccaaucaaua

SEQ ID NO: 1998296 - RNA, 19 nt, Artificial Sequence
  Description of Artificial Sequence: Synthetic oligonucleotide
  Sense strand starting at position 1881 of SEQ ID NO: 1880845
gguggaaucgcugaaucuu

SEQ ID NO: 1998297 - RNA, 19 nt, Artificial Sequence
  Description of Artificial Sequence: Synthetic oligonucleotide
  Antisense strand to SEQ ID NO: 1998296
aagauucagcgauuccacc

SEQ ID NO: 1998298 - RNA, 19 nt, Artificial Sequence
  Description of Artificial Sequence: Synthetic oligonucleotide
  Sense strand starting at position 3144 of SEQ ID NO: 1880845
uggccagucggagaaaguu

SEQ ID NO: 1998299 - RNA, 19 nt, Artificial Sequence
  Description of Artificial Sequence: Synthetic oligonucleotide
  Antisense strand to SEQ ID NO: 1998298
aacuuucuccgacuggcca

SEQ ID NO: 1998300 - RNA, 19 nt, Artificial Sequence
  Description of Artificial Sequence: Synthetic oligonucleotide
  Sense strand starting at position 3201 of SEQ ID NO: 1880845
ggcuguggguguauugauu

SEQ ID NO: 1998301 - RNA, 19 nt, Artificial Sequence
  Description of Artificial Sequence: Synthetic oligonucleotide
  Antisense strand to SEQ ID NO: 1998300
aaucaauacacccacagcc

SEQ ID NO: 1998302 - RNA, 19 nt, Artificial Sequence
  Description of Artificial Sequence: Synthetic oligonucleotide
  Sense strand starting at position 3406 of SEQ ID NO: 1880845
uuauuucugugcguugcaa

SEQ ID NO: 1998303 - RNA, 19 nt, Artificial Sequence
  Description of Artificial Sequence: Synthetic oligonucleotide
  Antisense strand to SEQ ID NO: 1998302
uugcaacgcacagaaauaa

SEQ ID NO: 1998304 - RNA, 19 nt, Artificial Sequence
  Description of Artificial Sequence: Synthetic oligonucleotide
  Sense strand starting at position 3432 of SEQ ID NO: 1880845
agagaaauccacuagcguc

SEQ ID NO: 1998305 - RNA, 19 nt, Artificial Sequence
  Description of Artificial Sequence: Synthetic oligonucleotide
  Antisense strand to SEQ ID NO: 1998304
gacgcuaguggauuucucu

SEQ ID NO: 1998306 - RNA, 19 nt, Artificial Sequence
  Description of Artificial Sequence: Synthetic oligonucleotide
  Sense strand starting at position 3640 of SEQ ID NO: 1880845
ccuguuucagccgaggaga

SEQ ID NO: 1998307 - RNA, 19 nt, Artificial Sequence
  Description of Artificial Sequence: Synthetic oligonucleotide
  Antisense strand to SEQ ID NO: 1998306
ucuccucggcugaaacagg

SEQ ID NO: 1998308 - RNA, 19 nt, Artificial Sequence
  Description of Artificial Sequence: Synthetic oligonucleotide
  Sense strand starting at position 3642 of SEQ ID NO: 1880845
uguuucagccgaggagaau

SEQ ID NO: 1998309 - RNA, 19 nt, Artificial Sequence
  Description of Artificial Sequence: Synthetic oligonucleotide
  Antisense strand to SEQ ID NO: 1998308
auucuccucggcugaaaca

SEQ ID NO: 1998310 - RNA, 19 nt, Artificial Sequence
  Description of Artificial Sequence: Synthetic oligonucleotide
  Sense strand starting at position 3651 of SEQ ID NO: 1880845
cgaggagaaucccuuuggu

SEQ ID NO: 1998311 - RNA, 19 nt, Artificial Sequence
  Description of Artificial Sequence: Synthetic oligonucleotide
  Antisense strand to SEQ ID NO: 1998310
accaaagggauucuccucg

SEQ ID NO: 1998312 - RNA, 19 nt, Artificial Sequence
  Description of Artificial Sequence: Synthetic oligonucleotide
  Sense strand starting at position 3654 of SEQ ID NO: 1880845
ggagaaucccuuugguccu

SEQ ID NO: 1998313 - RNA, 19 nt, Artificial Sequence
  Description of Artificial Sequence: Synthetic oligonucleotide
  Antisense strand to SEQ ID NO: 1998312
aggaccaaagggauucucc

SEQ ID NO: 1998314 - RNA, 19 nt, Artificial Sequence
  Description of Artificial Sequence: Synthetic oligonucleotide
  Sense strand starting at position 3735 of SEQ ID NO: 1880845
uuguauagggcuugaccaa

SEQ ID NO: 1998315 - RNA, 19 nt, Artificial Sequence
  Description of Artificial Sequence: Synthetic oligonucleotide
  Antisense strand to SEQ ID NO: 1998314
uuggucaagcccuauacaa

SEQ ID NO: 1998316 - RNA, 19 nt, Artificial Sequence
  Description of Artificial Sequence: Synthetic oligonucleotide
  Sense strand starting at position 3857 of SEQ ID NO: 1880845
gggugaaagcccugaugug

SEQ ID NO: 1998317 - RNA, 19 nt, Artificial Sequence
  Description of Artificial Sequence: Synthetic oligonucleotide
  Antisense strand to SEQ ID NO: 1998316
cacaucagggcuuucaccc

SEQ ID NO: 1998318 - RNA, 19 nt, Artificial Sequence
  Description of Artificial Sequence: Synthetic oligonucleotide
  Sense strand starting at position 373 of SEQ ID NO: 1880846
aagguagaccauugcaaga

SEQ ID NO: 1998319 - RNA, 19 nt, Artificial Sequence
  Description of Artificial Sequence: Synthetic oligonucleotide
  Antisense strand to SEQ ID NO: 1998318
ucuugcaauggucuaccuu

SEQ ID NO: 1998320 - RNA, 19 nt, Artificial Sequence
  Description of Artificial Sequence: Synthetic oligonucleotide
  Sense strand starting at position 509 of SEQ ID NO: 1880846
gauagcucauaaguaggaa

SEQ ID NO: 1998321 - RNA, 19 nt, Artificial Sequence
  Description of Artificial Sequence: Synthetic oligonucleotide
  Antisense strand to SEQ ID NO: 1998320
uuccuacuuaugagcuauc

SEQ ID NO: 1998322 - RNA, 19 nt, Artificial Sequence
  Description of Artificial Sequence: Synthetic oligonucleotide
  Sense strand starting at position 754 of SEQ ID NO: 1880846
agagaaguauaagcuauau

SEQ ID NO: 1998323 - RNA, 19 nt, Artificial Sequence
  Description of Artificial Sequence: Synthetic oligonucleotide
  Antisense strand to SEQ ID NO: 1998322
auauagcuuauacuucucu

SEQ ID NO: 1998324 - RNA, 19 nt, Artificial Sequence
  Description of Artificial Sequence: Synthetic oligonucleotide
  Sense strand starting at position 775 of SEQ ID NO: 1880846
uccggucauguuugaaaga

SEQ ID NO: 1998325 - RNA, 19 nt, Artificial Sequence
  Description of Artificial Sequence: Synthetic oligonucleotide
  Antisense strand to SEQ ID NO: 1998324
ucuuucaaacaugaccgga

SEQ ID NO: 1998326 - RNA, 19 nt, Artificial Sequence
  Description of Artificial Sequence: Synthetic oligonucleotide
  Sense strand starting at position 818 of SEQ ID NO: 1880846
aaaguuaaggcaugaauag

SEQ ID NO: 1998327 - RNA, 19 nt, Artificial Sequence
  Description of Artificial Sequence: Synthetic oligonucleotide
  Antisense strand to SEQ ID NO: 1998326
cuauucaugccuuaacuuu

SEQ ID NO: 1998328 - RNA, 19 nt, Artificial Sequence
  Description of Artificial Sequence: Synthetic oligonucleotide
  Sense strand starting at position 836 of SEQ ID NO: 1880846
ggacuaaggacauguacgu

SEQ ID NO: 1998329 - RNA, 19 nt, Artificial Sequence
  Description of Artificial Sequence: Synthetic oligonucleotide
  Antisense strand to SEQ ID NO: 1998328
acguacauguccuuagucc

SEQ ID NO: 1998330 - RNA, 19 nt, Artificial Sequence
  Description of Artificial Sequence: Synthetic oligonucleotide
  Sense strand starting at position 1021 of SEQ ID NO: 1880846
aggucacauggcuaacaau

SEQ ID NO: 1998331 - RNA, 19 nt, Artificial Sequence
  Description of Artificial Sequence: Synthetic oligonucleotide
  Antisense strand to SEQ ID NO: 1998330
auuguuagccaugugaccu

SEQ ID NO: 1998332 - RNA, 19 nt, Artificial Sequence
  Description of Artificial Sequence: Synthetic oligonucleotide
  Sense strand starting at position 1083 of SEQ ID NO: 1880846
gcccuaauugcugauaaga

SEQ ID NO: 1998333 - RNA, 19 nt, Artificial Sequence
  Description of Artificial Sequence: Synthetic oligonucleotide
  Antisense strand to SEQ ID NO: 1998332
ucuuaucagcaauuagggc

SEQ ID NO: 1998334 - RNA, 19 nt, Artificial Sequence
  Description of Artificial Sequence: Synthetic oligonucleotide
  Sense strand starting at position 1110 of SEQ ID NO: 1880846
acuggauaacugugacuag

SEQ ID NO: 1998335 - RNA, 19 nt, Artificial Sequence
  Description of Artificial Sequence: Synthetic oligonucleotide
  Antisense strand to SEQ ID NO: 1998334
cuagucacaguuauccagu

SEQ ID NO: 1998336 - RNA, 19 nt, Artificial Sequence
  Description of Artificial Sequence: Synthetic oligonucleotide
  Sense strand starting at position 1144 of SEQ ID NO: 1880846
gugcgaauagccuaagaua

SEQ ID NO: 1998337 - RNA, 19 nt, Artificial Sequence
  Description of Artificial Sequence: Synthetic oligonucleotide
  Antisense strand to SEQ ID NO: 1998336
uaucuuaggcuauucgcac

SEQ ID NO: 1998338 - RNA, 19 nt, Artificial Sequence
  Description of Artificial Sequence: Synthetic oligonucleotide
  Sense strand starting at position 2304 of SEQ ID NO: 1880846
gccuauacugagcaagguu

SEQ ID NO: 1998339 - RNA, 19 nt, Artificial Sequence
  Description of Artificial Sequence: Synthetic oligonucleotide
  Antisense strand to SEQ ID NO: 1998338
aaccuugcucaguauaggc

SEQ ID NO: 1998340 - RNA, 19 nt, Artificial Sequence
  Description of Artificial Sequence: Synthetic oligonucleotide
  Sense strand starting at position 2316 of SEQ ID NO: 1880846
caagguuccgacggaucaa

SEQ ID NO: 1998341 - RNA, 19 nt, Artificial Sequence
  Description of Artificial Sequence: Synthetic oligonucleotide
  Antisense strand to SEQ ID NO: 1998340
uugauccgucggaaccuug

SEQ ID NO: 1998342 - RNA, 19 nt, Artificial Sequence
  Description of Artificial Sequence: Synthetic oligonucleotide
  Sense strand starting at position 2317 of SEQ ID NO: 1880846
aagguuccgacggaucaaa

SEQ ID NO: 1998343 - RNA, 19 nt, Artificial Sequence
  Description of Artificial Sequence: Synthetic oligonucleotide
  Antisense strand to SEQ ID NO: 1998342
uuugauccgucggaaccuu

SEQ ID NO: 1998344 - RNA, 19 nt, Artificial Sequence
  Description of Artificial Sequence: Synthetic oligonucleotide
  Sense strand starting at position 2357 of SEQ ID NO: 1880846
augaauuaaugacaacuga

SEQ ID NO: 1998345 - RNA, 19 nt, Artificial Sequence
  Description of Artificial Sequence: Synthetic oligonucleotide
  Antisense strand to SEQ ID NO: 1998344
ucaguugucauuaauucau

SEQ ID NO: 1998346 - RNA, 19 nt, Artificial Sequence
  Description of Artificial Sequence: Synthetic oligonucleotide
  Sense strand starting at position 2365 of SEQ ID NO: 1880846
augacaacugauggcaaau

SEQ ID NO: 1998347 - RNA, 19 nt, Artificial Sequence
  Description of Artificial Sequence: Synthetic oligonucleotide
  Antisense strand to SEQ ID NO: 1998346
auuugccaucaguugucau

SEQ ID NO: 1998348 - RNA, 19 nt, Artificial Sequence
  Description of Artificial Sequence: Synthetic oligonucleotide
  Sense strand starting at position 2442 of SEQ ID NO: 1880846
ugagaaauaugcuccuaaa

SEQ ID NO: 1998349 - RNA, 19 nt, Artificial Sequence
  Description of Artificial Sequence: Synthetic oligonucleotide
  Antisense strand to SEQ ID NO: 1998348
uuuaggagcauauuucuca

SEQ ID NO: 1998350 - RNA, 19 nt, Artificial Sequence
  Description of Artificial Sequence: Synthetic oligonucleotide
  Sense strand starting at position 2491 of SEQ ID NO: 1880846
uuugcuuugcgugcuauua

SEQ ID NO: 1998351 - RNA, 19 nt, Artificial Sequence
  Description of Artificial Sequence: Synthetic oligonucleotide
  Antisense strand to SEQ ID NO: 1998350
uaauagcacgcaaagcaaa

SEQ ID NO: 1998352 - RNA, 19 nt, Artificial Sequence
  Description of Artificial Sequence: Synthetic oligonucleotide
  Sense strand starting at position 2506 of SEQ ID NO: 1880846
auuacaacgguuuauuagu

SEQ ID NO: 1998353 - RNA, 19 nt, Artificial Sequence
  Description of Artificial Sequence: Synthetic oligonucleotide
  Antisense strand to SEQ ID NO: 1998352
acuaauaaaccguuguaau

SEQ ID NO: 1998354 - RNA, 19 nt, Artificial Sequence
  Description of Artificial Sequence: Synthetic oligonucleotide
  Sense strand starting at position 2511 of SEQ ID NO: 1880846
aacgguuuauuaguagacu

SEQ ID NO: 1998355 - RNA, 19 nt, Artificial Sequence
  Description of Artificial Sequence: Synthetic oligonucleotide
  Antisense strand to SEQ ID NO: 1998354
agucuacuaauaaaccguu

SEQ ID NO: 1998356 - RNA, 19 nt, Artificial Sequence
  Description of Artificial Sequence: Synthetic oligonucleotide
  Sense strand starting at position 2555 of SEQ ID NO: 1880846
uccugugugcaaugagaaa

SEQ ID NO: 1998357 - RNA, 19 nt, Artificial Sequence
  Description of Artificial Sequence: Synthetic oligonucleotide
  Antisense strand to SEQ ID NO: 1998356
uuucucauugcacacagga

SEQ ID NO: 1998358 - RNA, 19 nt, Artificial Sequence
  Description of Artificial Sequence: Synthetic oligonucleotide
  Sense strand starting at position 2579 of SEQ ID NO: 1880846
cucuaugugucuuugacag

SEQ ID NO: 1998359 - RNA, 19 nt, Artificial Sequence
  Description of Artificial Sequence: Synthetic oligonucleotide
  Antisense strand to SEQ ID NO: 1998358
cugucaaagacacauagag

SEQ ID NO: 1998360 - RNA, 19 nt, Artificial Sequence
  Description of Artificial Sequence: Synthetic oligonucleotide
  Sense strand starting at position 2610 of SEQ ID NO: 1880846
aucgcuugcccauacauga

SEQ ID NO: 1998361 - RNA, 19 nt, Artificial Sequence
  Description of Artificial Sequence: Synthetic oligonucleotide
  Antisense strand to SEQ ID NO: 1998360
ucauguaugggcaagcgau

SEQ ID NO: 1998362 - RNA, 19 nt, Artificial Sequence
  Description of Artificial Sequence: Synthetic oligonucleotide
  Sense strand starting at position 2736 of SEQ ID NO: 1880846
acuguauuaggcuacauau

SEQ ID NO: 1998363 - RNA, 19 nt, Artificial Sequence
  Description of Artificial Sequence: Synthetic oligonucleotide
  Antisense strand to SEQ ID NO: 1998362
auauguagccuaauacagu

SEQ ID NO: 1998364 - RNA, 19 nt, Artificial Sequence
  Description of Artificial Sequence: Synthetic oligonucleotide
  Sense strand starting at position 2777 of SEQ ID NO: 1880846
ccauuauaugccugacaug

SEQ ID NO: 1998365 - RNA, 19 nt, Artificial Sequence
  Description of Artificial Sequence: Synthetic oligonucleotide
  Antisense strand to SEQ ID NO: 1998364
caugucaggcauauaaugg

SEQ ID NO: 1998366 - RNA, 19 nt, Artificial Sequence
  Description of Artificial Sequence: Synthetic oligonucleotide
  Sense strand starting at position 2843 of SEQ ID NO: 1880846
gggcuuacagauggucaau

SEQ ID NO: 1998367 - RNA, 19 nt, Artificial Sequence
  Description of Artificial Sequence: Synthetic oligonucleotide
  Antisense strand to SEQ ID NO: 1998366
auugaccaucuguaagccc

SEQ ID NO: 1998368 - RNA, 19 nt, Artificial Sequence
  Description of Artificial Sequence: Synthetic oligonucleotide
  Sense strand starting at position 2855 of SEQ ID NO: 1880846
ggucaaugcuucuccacaa

SEQ ID NO: 1998369 - RNA, 19 nt, Artificial Sequence
  Description of Artificial Sequence: Synthetic oligonucleotide
  Antisense strand to SEQ ID NO: 1998368
uuguggagaagcauugacc

SEQ ID NO: 1998370 - RNA, 19 nt, Artificial Sequence
  Description of Artificial Sequence: Synthetic oligonucleotide
  Sense strand starting at position 3457 of SEQ ID NO: 1880846
agggcuucucuauacugua

SEQ ID NO: 1998371 - RNA, 19 nt, Artificial Sequence
  Description of Artificial Sequence: Synthetic oligonucleotide
  Antisense strand to SEQ ID NO: 1998370
uacaguauagagaagcccu

SEQ ID NO: 1998372 - RNA, 19 nt, Artificial Sequence
  Description of Artificial Sequence: Synthetic oligonucleotide
  Sense strand starting at position 3635 of SEQ ID NO: 1880846
uaaauuaugcaguggagau

SEQ ID NO: 1998373 - RNA, 19 nt, Artificial Sequence
  Description of Artificial Sequence: Synthetic oligonucleotide
  Antisense strand to SEQ ID NO: 1998372
aucuccacugcauaauuua

SEQ ID NO: 1998374 - RNA, 19 nt, Artificial Sequence
  Description of Artificial Sequence: Synthetic oligonucleotide
  Sense strand starting at position 3650 of SEQ ID NO: 1880846
agaugauggugaucuuauu

SEQ ID NO: 1998375 - RNA, 19 nt, Artificial Sequence
  Description of Artificial Sequence: Synthetic oligonucleotide
  Antisense strand to SEQ ID NO: 1998374
aauaagaucaccaucaucu

SEQ ID NO: 1998376 - RNA, 19 nt, Artificial Sequence
  Description of Artificial Sequence: Synthetic oligonucleotide
  Sense strand starting at position 3684 of SEQ ID NO: 1880846
ucuuuauucccuuggugaa

SEQ ID NO: 1998377 - RNA, 19 nt, Artificial Sequence
  Description of Artificial Sequence: Synthetic oligonucleotide
  Antisense strand to SEQ ID NO: 1998376
uucaccaagggaauaaaga

SEQ ID NO: 1998378 - RNA, 19 nt, Artificial Sequence
  Description of Artificial Sequence: Synthetic oligonucleotide
  Sense strand starting at position 3685 of SEQ ID NO: 1880846
cuuuauucccuuggugaag

SEQ ID NO: 1998379 - RNA, 19 nt, Artificial Sequence
  Description of Artificial Sequence: Synthetic oligonucleotide
  Antisense strand to SEQ ID NO: 1998378
cuucaccaagggaauaaag

SEQ ID NO: 1998380 - RNA, 19 nt, Artificial Sequence
  Description of Artificial Sequence: Synthetic oligonucleotide
  Sense strand starting at position 3754 of SEQ ID NO: 1880846
ugagcugcucuagacauau

SEQ ID NO: 1998381 - RNA, 19 nt, Artificial Sequence
  Description of Artificial Sequence: Synthetic oligonucleotide
  Antisense strand to SEQ ID NO: 1998380
auaugucuagagcagcuca

SEQ ID NO: 1998382 - RNA, 19 nt, Artificial Sequence
  Description of Artificial Sequence: Synthetic oligonucleotide
  Sense strand starting at position 3766 of SEQ ID NO: 1880846
gacauauauggcugugagu

SEQ ID NO: 1998383 - RNA, 19 nt, Artificial Sequence
  Description of Artificial Sequence: Synthetic oligonucleotide
  Antisense strand to SEQ ID NO: 1998382
acucacagccauauauguc

SEQ ID NO: 1998384 - RNA, 19 nt, Artificial Sequence
  Description of Artificial Sequence: Synthetic oligonucleotide
  Sense strand starting at position 3772 of SEQ ID NO: 1880846
uauggcugugaguacucua

SEQ ID NO: 1998385 - RNA, 19 nt, Artificial Sequence
  Description of Artificial Sequence: Synthetic oligonucleotide
  Antisense strand to SEQ ID NO: 1998384
uagaguacucacagccaua

SEQ ID NO: 1998386 - RNA, 19 nt, Artificial Sequence
  Description of Artificial Sequence: Synthetic oligonucleotide
  Sense strand starting at position 3777 of SEQ ID NO: 1880846
cugugaguacucuaucacu

SEQ ID NO: 1998387 - RNA, 19 nt, Artificial Sequence
  Description of Artificial Sequence: Synthetic oligonucleotide
  Antisense strand to SEQ ID NO: 1998386
agugauagaguacucacag

SEQ ID NO: 1998388 - RNA, 19 nt, Artificial Sequence
  Description of Artificial Sequence: Synthetic oligonucleotide
  Sense strand starting at position 3813 of SEQ ID NO: 1880846
ccugguauuuaguaggaca

SEQ ID NO: 1998389 - RNA, 19 nt, Artificial Sequence
  Description of Artificial Sequence: Synthetic oligonucleotide
  Antisense strand to SEQ ID NO: 1998388
uguccuacuaaauaccagg

SEQ ID NO: 1998390 - RNA, 19 nt, Artificial Sequence
  Description of Artificial Sequence: Synthetic oligonucleotide
  Sense strand starting at position 3816 of SEQ ID NO: 1880846
gguauuuaguaggacacua

SEQ ID NO: 1998391 - RNA, 19 nt, Artificial Sequence
  Description of Artificial Sequence: Synthetic oligonucleotide
  Antisense strand to SEQ ID NO: 1998390
uaguguccuacuaaauacc

SEQ ID NO: 1998392 - RNA, 19 nt, Artificial Sequence
  Description of Artificial Sequence: Synthetic oligonucleotide
  Sense strand starting at position 3831 of SEQ ID NO: 1880846
acuauauaaucagauggag

SEQ ID NO: 1998393 - RNA, 19 nt, Artificial Sequence
  Description of Artificial Sequence: Synthetic oligonucleotide
  Antisense strand to SEQ ID NO: 1998392
cuccaucugauuauauagu

SEQ ID NO: 1998394 - RNA, 19 nt, Artificial Sequence
  Description of Artificial Sequence: Synthetic oligonucleotide
  Sense strand starting at position 3853 of SEQ ID NO: 1880846
ugaacuagaugagcuuuaa

SEQ ID NO: 1998395 - RNA, 19 nt, Artificial Sequence
  Description of Artificial Sequence: Synthetic oligonucleotide
  Antisense strand to SEQ ID NO: 1998394
uuaaagcucaucuaguuca

SEQ ID NO: 1998396 - RNA, 19 nt, Artificial Sequence
  Description of Artificial Sequence: Synthetic oligonucleotide
  Sense strand starting at position 3857 of SEQ ID NO: 1880846
cuagaugagcuuuaaugcu

SEQ ID NO: 1998397 - RNA, 19 nt, Artificial Sequence
  Description of Artificial Sequence: Synthetic oligonucleotide
  Antisense strand to SEQ ID NO: 1998396
agcauuaaagcucaucuag

SEQ ID NO: 1998398 - RNA, 19 nt, Artificial Sequence
  Description of Artificial Sequence: Synthetic oligonucleotide
  Sense strand starting at position 12 of SEQ ID NO: 1880847
agcauaaauguggaugcaa

SEQ ID NO: 1998399 - RNA, 19 nt, Artificial Sequence
  Description of Artificial Sequence: Synthetic oligonucleotide
  Antisense strand to SEQ ID NO: 1998398
uugcauccacauuuaugcu

SEQ ID NO: 1998400 - RNA, 19 nt, Artificial Sequence
  Description of Artificial Sequence: Synthetic oligonucleotide
  Sense strand starting at position 33 of SEQ ID NO: 1880847
acucaugggcauuguaaca

SEQ ID NO: 1998401 - RNA, 19 nt, Artificial Sequence
  Description of Artificial Sequence: Synthetic oligonucleotide
  Antisense strand to SEQ ID NO: 1998400
uguuacaaugcccaugagu

SEQ ID NO: 1998402 - RNA, 19 nt, Artificial Sequence
  Description of Artificial Sequence: Synthetic oligonucleotide
  Sense strand starting at position 385 of SEQ ID NO: 1880847
ggagauuguaacggcuaga

SEQ ID NO: 1998403 - RNA, 19 nt, Artificial Sequence
  Description of Artificial Sequence: Synthetic oligonucleotide
  Antisense strand to SEQ ID NO: 1998402
ucuagccguuacaaucucc

SEQ ID NO: 1998404 - RNA, 19 nt, Artificial Sequence
  Description of Artificial Sequence: Synthetic oligonucleotide
  Sense strand starting at position 388 of SEQ ID NO: 1880847
gauuguaacggcuagaguu

SEQ ID NO: 1998405 - RNA, 19 nt, Artificial Sequence
  Description of Artificial Sequence: Synthetic oligonucleotide
  Antisense strand to SEQ ID NO: 1998404
aacucuagccguuacaauc

SEQ ID NO: 1998406 - RNA, 19 nt, Artificial Sequence
  Description of Artificial Sequence: Synthetic oligonucleotide
  Sense strand starting at position 404 of SEQ ID NO: 1880847
guuacuacagguuaagagu

SEQ ID NO: 1998407 - RNA, 19 nt, Artificial Sequence
  Description of Artificial Sequence: Synthetic oligonucleotide
  Antisense strand to SEQ ID NO: 1998406
acucuuaaccuguaguaac

SEQ ID NO: 1998408 - RNA, 19 nt, Artificial Sequence
  Description of Artificial Sequence: Synthetic oligonucleotide
  Sense strand starting at position 417 of SEQ ID NO: 1880847
aagaguuaacauuguggcu

SEQ ID NO: 1998409 - RNA, 19 nt, Artificial Sequence
  Description of Artificial Sequence: Synthetic oligonucleotide
  Antisense strand to SEQ ID NO: 1998408
agccacaauguuaacucuu

SEQ ID NO: 1998410 - RNA, 19 nt, Artificial Sequence
  Description of Artificial Sequence: Synthetic oligonucleotide
  Sense strand starting at position 552 of SEQ ID NO: 1880847
gagugaaaccacuguucug

SEQ ID NO: 1998411 - RNA, 19 nt, Artificial Sequence
  Description of Artificial Sequence: Synthetic oligonucleotide
  Antisense strand to SEQ ID NO: 1998410
cagaacagugguuucacuc

SEQ ID NO: 1998412 - RNA, 19 nt, Artificial Sequence
  Description of Artificial Sequence: Synthetic oligonucleotide
  Sense strand starting at position 559 of SEQ ID NO: 1880847
accacuguucugggaauuc

SEQ ID NO: 1998413 - RNA, 19 nt, Artificial Sequence
  Description of Artificial Sequence: Synthetic oligonucleotide
  Antisense strand to SEQ ID NO: 1998412
gaauucccagaacaguggu

SEQ ID NO: 1998414 - RNA, 19 nt, Artificial Sequence
  Description of Artificial Sequence: Synthetic oligonucleotide
  Sense strand starting at position 740 of SEQ ID NO: 1880847
gaggauaaacguggaaucu

SEQ ID NO: 1998415 - RNA, 19 nt, Artificial Sequence
  Description of Artificial Sequence: Synthetic oligonucleotide
  Antisense strand to SEQ ID NO: 1998414
agauuccacguuuauccuc

SEQ ID NO: 1998416 - RNA, 19 nt, Artificial Sequence
  Description of Artificial Sequence: Synthetic oligonucleotide
  Sense strand starting at position 751 of SEQ ID NO: 1880847
uggaaucuaccuugucuua

SEQ ID NO: 1998417 - RNA, 19 nt, Artificial Sequence
  Description of Artificial Sequence: Synthetic oligonucleotide
  Antisense strand to SEQ ID NO: 1998416
uaagacaagguagauucca

SEQ ID NO: 1998418 - RNA, 19 nt, Artificial Sequence
  Description of Artificial Sequence: Synthetic oligonucleotide
  Sense strand starting at position 862 of SEQ ID NO: 1880847
ccaugaaauuaugcuauga

SEQ ID NO: 1998419 - RNA, 19 nt, Artificial Sequence
  Description of Artificial Sequence: Synthetic oligonucleotide
  Antisense strand to SEQ ID NO: 1998418
ucauagcauaauuucaugg

SEQ ID NO: 1998420 - RNA, 19 nt, Artificial Sequence
  Description of Artificial Sequence: Synthetic oligonucleotide
  Sense strand starting at position 883 of SEQ ID NO: 1880847
acgugaauaacucaaggua

SEQ ID NO: 1998421 - RNA, 19 nt, Artificial Sequence
  Description of Artificial Sequence: Synthetic oligonucleotide
  Antisense strand to SEQ ID NO: 1998420
uaccuugaguuauucacgu

SEQ ID NO: 1998422 - RNA, 19 nt, Artificial Sequence
  Description of Artificial Sequence: Synthetic oligonucleotide
  Sense strand starting at position 1035 of SEQ ID NO: 1880847
cuuagagagauacgcgaua

SEQ ID NO: 1998423 - RNA, 19 nt, Artificial Sequence
  Description of Artificial Sequence: Synthetic oligonucleotide
  Antisense strand to SEQ ID NO: 1998422
uaucgcguaucucucuaag

SEQ ID NO: 1998424 - RNA, 19 nt, Artificial Sequence
  Description of Artificial Sequence: Synthetic oligonucleotide
  Sense strand starting at position 1253 of SEQ ID NO: 1880847
uugguuaucggagaguaag

SEQ ID NO: 1998425 - RNA, 19 nt, Artificial Sequence
  Description of Artificial Sequence: Synthetic oligonucleotide
  Antisense strand to SEQ ID NO: 1998424
cuuacucuccgauaaccaa

SEQ ID NO: 1998426 - RNA, 19 nt, Artificial Sequence
  Description of Artificial Sequence: Synthetic oligonucleotide
  Sense strand starting at position 1265 of SEQ ID NO: 1880847
gaguaagugauuugcugug

SEQ ID NO: 1998427 - RNA, 19 nt, Artificial Sequence
  Description of Artificial Sequence: Synthetic oligonucleotide
  Antisense strand to SEQ ID NO: 1998426
cacagcaaaucacuuacuc

SEQ ID NO: 1998428 - RNA, 19 nt, Artificial Sequence
  Description of Artificial Sequence: Synthetic oligonucleotide
  Sense strand starting at position 1270 of SEQ ID NO: 1880847
agugauuugcugugggucu

SEQ ID NO: 1998429 - RNA, 19 nt, Artificial Sequence
  Description of Artificial Sequence: Synthetic oligonucleotide
  Antisense strand to SEQ ID NO: 1998428
agacccacagcaaaucacu

SEQ ID NO: 1998430 - RNA, 19 nt, Artificial Sequence
  Description of Artificial Sequence: Synthetic oligonucleotide
  Sense strand starting at position 2284 of SEQ ID NO: 1880847
ggccguuccguuucacaaa

SEQ ID NO: 1998431 - RNA, 19 nt, Artificial Sequence
  Description of Artificial Sequence: Synthetic oligonucleotide
  Antisense strand to SEQ ID NO: 1998430
uuugugaaacggaacggcc

SEQ ID NO: 1998432 - RNA, 19 nt, Artificial Sequence
  Description of Artificial Sequence: Synthetic oligonucleotide
  Sense strand starting at position 2322 of SEQ ID NO: 1880847
gauaucccuuucucgauga

SEQ ID NO: 1998433 - RNA, 19 nt, Artificial Sequence
  Description of Artificial Sequence: Synthetic oligonucleotide
  Antisense strand to SEQ ID NO: 1998432
ucaucgagaaagggauauc

SEQ ID NO: 1998434 - RNA, 19 nt, Artificial Sequence
  Description of Artificial Sequence: Synthetic oligonucleotide
  Sense strand starting at position 2402 of SEQ ID NO: 1880847
agaucucagcucuaggagu

SEQ ID NO: 1998435 - RNA, 19 nt, Artificial Sequence
  Description of Artificial Sequence: Synthetic oligonucleotide
  Antisense strand to SEQ ID NO: 1998434
acuccuagagcugagaucu

SEQ ID NO: 1998436 - RNA, 19 nt, Artificial Sequence
  Description of Artificial Sequence: Synthetic oligonucleotide
  Sense strand starting at position 2404 of SEQ ID NO: 1880847
aucucagcucuaggaguua

SEQ ID NO: 1998437 - RNA, 19 nt, Artificial Sequence
  Description of Artificial Sequence: Synthetic oligonucleotide
  Antisense strand to SEQ ID NO: 1998436
uaacuccuagagcugagau

SEQ ID NO: 1998438 - RNA, 19 nt, Artificial Sequence
  Description of Artificial Sequence: Synthetic oligonucleotide
  Sense strand starting at position 2472 of SEQ ID NO: 1880847
ccuugucuacgauaaugau

SEQ ID NO: 1998439 - RNA, 19 nt, Artificial Sequence
  Description of Artificial Sequence: Synthetic oligonucleotide
  Antisense strand to SEQ ID NO: 1998438
aucauuaucguagacaagg

SEQ ID NO: 1998440 - RNA, 19 nt, Artificial Sequence
  Description of Artificial Sequence: Synthetic oligonucleotide
  Sense strand starting at position 2476 of SEQ ID NO: 1880847
gucuacgauaaugauagua

SEQ ID NO: 1998441 - RNA, 19 nt, Artificial Sequence
  Description of Artificial Sequence: Synthetic oligonucleotide
  Antisense strand to SEQ ID NO: 1998440
uacuaucauuaucguagac

SEQ ID NO: 1998442 - RNA, 19 nt, Artificial Sequence
  Description of Artificial Sequence: Synthetic oligonucleotide
  Sense strand starting at position 2523 of SEQ ID NO: 1880847
cuaggauugcaugaguuua

SEQ ID NO: 1998443 - RNA, 19 nt, Artificial Sequence
  Description of Artificial Sequence: Synthetic oligonucleotide
  Antisense strand to SEQ ID NO: 1998442
uaaacucaugcaauccuag

SEQ ID NO: 1998444 - RNA, 19 nt, Artificial Sequence
  Description of Artificial Sequence: Synthetic oligonucleotide
  Sense strand starting at position 2525 of SEQ ID NO: 1880847
aggauugcaugaguuuaca

SEQ ID NO: 1998445 - RNA, 19 nt, Artificial Sequence
  Description of Artificial Sequence: Synthetic oligonucleotide
  Antisense strand to SEQ ID NO: 1998444
uguaaacucaugcaauccu

SEQ ID NO: 1998446 - RNA, 19 nt, Artificial Sequence
  Description of Artificial Sequence: Synthetic oligonucleotide
  Sense strand starting at position 2534 of SEQ ID NO: 1880847
ugaguuuacauaugugaag

SEQ ID NO: 1998447 - RNA, 19 nt, Artificial Sequence
  Description of Artificial Sequence: Synthetic oligonucleotide
  Antisense strand to SEQ ID NO: 1998446
cuucacauauguaaacuca

SEQ ID NO: 1998448 - RNA, 19 nt, Artificial Sequence
  Description of Artificial Sequence: Synthetic oligonucleotide
  Sense strand starting at position 2536 of SEQ ID NO: 1880847
aguuuacauaugugaagga

SEQ ID NO: 1998449 - RNA, 19 nt, Artificial Sequence
  Description of Artificial Sequence: Synthetic oligonucleotide
  Antisense strand to SEQ ID NO: 1998448
uccuucacauauguaaacu

SEQ ID NO: 1998450 - RNA, 19 nt, Artificial Sequence
  Description of Artificial Sequence: Synthetic oligonucleotide
  Sense strand starting at position 2540 of SEQ ID NO: 1880847
uacauaugugaaggacgua

SEQ ID NO: 1998451 - RNA, 19 nt, Artificial Sequence
  Description of Artificial Sequence: Synthetic oligonucleotide
  Antisense strand to SEQ ID NO: 1998450
uacguccuucacauaugua

SEQ ID NO: 1998452 - RNA, 19 nt, Artificial Sequence
  Description of Artificial Sequence: Synthetic oligonucleotide
  Sense strand starting at position 2961 of SEQ ID NO: 1880847
gagaaagguuuguccagca

SEQ ID NO: 1998453 - RNA, 19 nt, Artificial Sequence
  Description of Artificial Sequence: Synthetic oligonucleotide
  Antisense strand to SEQ ID NO: 1998452
ugcuggacaaaccuuucuc

SEQ ID NO: 1998454 - RNA, 19 nt, Artificial Sequence
  Description of Artificial Sequence: Synthetic oligonucleotide
  Sense strand starting at position 3028 of SEQ ID NO: 1880847
uuuaacaucuuggucagau

SEQ ID NO: 1998455 - RNA, 19 nt, Artificial Sequence
  Description of Artificial Sequence: Synthetic oligonucleotide
  Antisense strand to SEQ ID NO: 1998454
aucugaccaagauguuaaa

SEQ ID NO: 1998456 - RNA, 19 nt, Artificial Sequence
  Description of Artificial Sequence: Synthetic oligonucleotide
  Sense strand starting at position 3029 of SEQ ID NO: 1880847
uuaacaucuuggucagaug

SEQ ID NO: 1998457 - RNA, 19 nt, Artificial Sequence
  Description of Artificial Sequence: Synthetic oligonucleotide
  Antisense strand to SEQ ID NO: 1998456
caucugaccaagauguuaa

SEQ ID NO: 1998458 - RNA, 19 nt, Artificial Sequence
  Description of Artificial Sequence: Synthetic oligonucleotide
  Sense strand starting at position 3040 of SEQ ID NO: 1880847
gucagauggcgugaagaaa

SEQ ID NO: 1998459 - RNA, 19 nt, Artificial Sequence
  Description of Artificial Sequence: Synthetic oligonucleotide
  Antisense strand to SEQ ID NO: 1998458
uuucuucacgccaucugac

SEQ ID NO: 1998460 - RNA, 19 nt, Artificial Sequence
  Description of Artificial Sequence: Synthetic oligonucleotide
  Sense strand starting at position 3121 of SEQ ID NO: 1880847
agugaaguugaaugcauau

SEQ ID NO: 1998461 - RNA, 19 nt, Artificial Sequence
  Description of Artificial Sequence: Synthetic oligonucleotide
  Antisense strand to SEQ ID NO: 1998460
auaugcauucaacuucacu

SEQ ID NO: 1998462 - RNA, 19 nt, Artificial Sequence
  Description of Artificial Sequence: Synthetic oligonucleotide
  Sense strand starting at position 3234 of SEQ ID NO: 1880847
gaaaccuauugugcagagu

SEQ ID NO: 1998463 - RNA, 19 nt, Artificial Sequence
  Description of Artificial Sequence: Synthetic oligonucleotide
  Antisense strand to SEQ ID NO: 1998462
acucugcacaauagguuuc

SEQ ID NO: 1998464 - RNA, 19 nt, Artificial Sequence
  Description of Artificial Sequence: Synthetic oligonucleotide
  Sense strand starting at position 3235 of SEQ ID NO: 1880847
aaaccuauugugcagagua

SEQ ID NO: 1998465 - RNA, 19 nt, Artificial Sequence
  Description of Artificial Sequence: Synthetic oligonucleotide
  Antisense strand to SEQ ID NO: 1998464
uacucugcacaauagguuu

SEQ ID NO: 1998466 - RNA, 19 nt, Artificial Sequence
  Description of Artificial Sequence: Synthetic oligonucleotide
  Sense strand starting at position 3237 of SEQ ID NO: 1880847
accuauugugcagaguaaa

SEQ ID NO: 1998467 - RNA, 19 nt, Artificial Sequence
  Description of Artificial Sequence: Synthetic oligonucleotide
  Antisense strand to SEQ ID NO: 1998466
uuuacucugcacaauaggu

SEQ ID NO: 1998468 - RNA, 19 nt, Artificial Sequence
  Description of Artificial Sequence: Synthetic oligonucleotide
  Sense strand starting at position 3669 of SEQ ID NO: 1880847
auuagcauucuuuagggua

SEQ ID NO: 1998469 - RNA, 19 nt, Artificial Sequence
  Description of Artificial Sequence: Synthetic oligonucleotide
  Antisense strand to SEQ ID NO: 1998468
uacccuaaagaaugcuaau

SEQ ID NO: 1998470 - RNA, 19 nt, Artificial Sequence
  Description of Artificial Sequence: Synthetic oligonucleotide
  Sense strand starting at position 3682 of SEQ ID NO: 1880847
aggguaucagcccauaaua

SEQ ID NO: 1998471 - RNA, 19 nt, Artificial Sequence
  Description of Artificial Sequence: Synthetic oligonucleotide
  Antisense strand to SEQ ID NO: 1998470
uauuaugggcugauacccu

SEQ ID NO: 1998472 - RNA, 19 nt, Artificial Sequence
  Description of Artificial Sequence: Synthetic oligonucleotide
  Sense strand starting at position 3693 of SEQ ID NO: 1880847
ccauaauacgccuaagaau

SEQ ID NO: 1998473 - RNA, 19 nt, Artificial Sequence
  Description of Artificial Sequence: Synthetic oligonucleotide
  Antisense strand to SEQ ID NO: 1998472
auucuuaggcguauuaugg

SEQ ID NO: 1998474 - RNA, 19 nt, Artificial Sequence
  Description of Artificial Sequence: Synthetic oligonucleotide
  Sense strand starting at position 3879 of SEQ ID NO: 1880847
aaauauggguuucugaauu

SEQ ID NO: 1998475 - RNA, 19 nt, Artificial Sequence
  Description of Artificial Sequence: Synthetic oligonucleotide
  Antisense strand to SEQ ID NO: 1998474
aauucagaaacccauauuu

SEQ ID NO: 1998476 - RNA, 19 nt, Artificial Sequence
  Description of Artificial Sequence: Synthetic oligonucleotide
  Sense strand starting at position 3910 of SEQ ID NO: 1880847
augauaguacuuuguuaag

SEQ ID NO: 1998477 - RNA, 19 nt, Artificial Sequence
  Description of Artificial Sequence: Synthetic oligonucleotide
  Antisense strand to SEQ ID NO: 1998476
cuuaacaaaguacuaucau

SEQ ID NO: 1998478 - RNA, 19 nt, Artificial Sequence
  Description of Artificial Sequence: Synthetic oligonucleotide
  Sense strand starting at position 572 of SEQ ID NO: 1880848
ccacgugccugucauugau

SEQ ID NO: 1998479 - RNA, 19 nt, Artificial Sequence
  Description of Artificial Sequence: Synthetic oligonucleotide
  Antisense strand to SEQ ID NO: 1998478
aucaaugacaggcacgugg

SEQ ID NO: 1998480 - RNA, 19 nt, Artificial Sequence
  Description of Artificial Sequence: Synthetic oligonucleotide
  Sense strand starting at position 574 of SEQ ID NO: 1880848
acgugccugucauugauga

SEQ ID NO: 1998481 - RNA, 19 nt, Artificial Sequence
  Description of Artificial Sequence: Synthetic oligonucleotide
  Antisense strand to SEQ ID NO: 1998480
ucaucaaugacaggcacgu

SEQ ID NO: 1998482 - RNA, 19 nt, Artificial Sequence
  Description of Artificial Sequence: Synthetic oligonucleotide
  Sense strand starting at position 578 of SEQ ID NO: 1880848
gccugucauugaugagguc

SEQ ID NO: 1998483 - RNA, 19 nt, Artificial Sequence
  Description of Artificial Sequence: Synthetic oligonucleotide
  Antisense strand to SEQ ID NO: 1998482
gaccucaucaaugacaggc

SEQ ID NO: 1998484 - RNA, 19 nt, Artificial Sequence
  Description of Artificial Sequence: Synthetic oligonucleotide
  Sense strand starting at position 934 of SEQ ID NO: 1880848
cggugaugguggcgaugaa

SEQ ID NO: 1998485 - RNA, 19 nt, Artificial Sequence
  Description of Artificial Sequence: Synthetic oligonucleotide
  Antisense strand to SEQ ID NO: 1998484
uucaucgccaccaucaccg

SEQ ID NO: 1998486 - RNA, 19 nt, Artificial Sequence
  Description of Artificial Sequence: Synthetic oligonucleotide
  Sense strand starting at position 2183 of SEQ ID NO: 1880848
gcccgauauucccacaauc

SEQ ID NO: 1998487 - RNA, 19 nt, Artificial Sequence
  Description of Artificial Sequence: Synthetic oligonucleotide
  Antisense strand to SEQ ID NO: 1998486
gauugugggaauaucgggc

SEQ ID NO: 1998488 - RNA, 19 nt, Artificial Sequence
  Description of Artificial Sequence: Synthetic oligonucleotide
  Sense strand starting at position 2400 of SEQ ID NO: 1880848
aacguuugaccuugacaca

SEQ ID NO: 1998489 - RNA, 19 nt, Artificial Sequence
  Description of Artificial Sequence: Synthetic oligonucleotide
  Antisense strand to SEQ ID NO: 1998488
ugugucaaggucaaacguu

SEQ ID NO: 1998490 - RNA, 19 nt, Artificial Sequence
  Description of Artificial Sequence: Synthetic oligonucleotide
  Sense strand starting at position 2403 of SEQ ID NO: 1880848
guuugaccuugacacagua

SEQ ID NO: 1998491 - RNA, 19 nt, Artificial Sequence
  Description of Artificial Sequence: Synthetic oligonucleotide
  Antisense strand to SEQ ID NO: 1998490
uacugugucaaggucaaac

SEQ ID NO: 1998492 - RNA, 19 nt, Artificial Sequence
  Description of Artificial Sequence: Synthetic oligonucleotide
  Sense strand starting at position 2481 of SEQ ID NO: 1880848
guuccaaaguucuaugcaa

SEQ ID NO: 1998493 - RNA, 19 nt, Artificial Sequence
  Description of Artificial Sequence: Synthetic oligonucleotide
  Antisense strand to SEQ ID NO: 1998492
uugcauagaacuuuggaac

SEQ ID NO: 1998494 - RNA, 19 nt, Artificial Sequence
  Description of Artificial Sequence: Synthetic oligonucleotide
  Sense strand starting at position 2625 of SEQ ID NO: 1880848
ucccgagaucaaugaaacu

SEQ ID NO: 1998495 - RNA, 19 nt, Artificial Sequence
  Description of Artificial Sequence: Synthetic oligonucleotide
  Antisense strand to SEQ ID NO: 1998494
aguuucauugaucucggga

SEQ ID NO: 1998496 - RNA, 19 nt, Artificial Sequence
  Description of Artificial Sequence: Synthetic oligonucleotide
  Sense strand starting at position 2674 of SEQ ID NO: 1880848
cccugugaccuugguacuu

SEQ ID NO: 1998497 - RNA, 19 nt, Artificial Sequence
  Description of Artificial Sequence: Synthetic oligonucleotide
  Antisense strand to SEQ ID NO: 1998496
aaguaccaaggucacaggg

SEQ ID NO: 1998498 - RNA, 19 nt, Artificial Sequence
  Description of Artificial Sequence: Synthetic oligonucleotide
  Sense strand starting at position 2709 of SEQ ID NO: 1880848
uggccucaucuagaucuca

SEQ ID NO: 1998499 - RNA, 19 nt, Artificial Sequence
  Description of Artificial Sequence: Synthetic oligonucleotide
  Antisense strand to SEQ ID NO: 1998498
ugagaucuagaugaggcca

SEQ ID NO: 1998500 - RNA, 19 nt, Artificial Sequence
  Description of Artificial Sequence: Synthetic oligonucleotide
  Sense strand starting at position 2777 of SEQ ID NO: 1880848
ggagcuaggaucuguugga

SEQ ID NO: 1998501 - RNA, 19 nt, Artificial Sequence
  Description of Artificial Sequence: Synthetic oligonucleotide
  Antisense strand to SEQ ID NO: 1998500
uccaacagauccuagcucc

SEQ ID NO: 1998502 - RNA, 19 nt, Artificial Sequence
  Description of Artificial Sequence: Synthetic oligonucleotide
  Sense strand starting at position 2798 of SEQ ID NO: 1880848
cccacauugucuugugugu

SEQ ID NO: 1998503 - RNA, 19 nt, Artificial Sequence
  Description of Artificial Sequence: Synthetic oligonucleotide
  Antisense strand to SEQ ID NO: 1998502
acacacaagacaauguggg

SEQ ID NO: 1998504 - RNA, 19 nt, Artificial Sequence
  Description of Artificial Sequence: Synthetic oligonucleotide
  Sense strand starting at position 2857 of SEQ ID NO: 1880848
ugccucgucucaggcauaa

SEQ ID NO: 1998505 - RNA, 19 nt, Artificial Sequence
  Description of Artificial Sequence: Synthetic oligonucleotide
  Antisense strand to SEQ ID NO: 1998504
uuaugccugagacgaggca

SEQ ID NO: 1998506 - RNA, 19 nt, Artificial Sequence
  Description of Artificial Sequence: Synthetic oligonucleotide
  Sense strand starting at position 2861 of SEQ ID NO: 1880848
ucgucucaggcauaauaau

SEQ ID NO: 1998507 - RNA, 19 nt, Artificial Sequence
  Description of Artificial Sequence: Synthetic oligonucleotide
  Antisense strand to SEQ ID NO: 1998506
auuauuaugccugagacga

SEQ ID NO: 1998508 - RNA, 19 nt, Artificial Sequence
  Description of Artificial Sequence: Synthetic oligonucleotide
  Sense strand starting at position 2897 of SEQ ID NO: 1880848
uucccauuuggucggcaga

SEQ ID NO: 1998509 - RNA, 19 nt, Artificial Sequence
  Description of Artificial Sequence: Synthetic oligonucleotide
  Antisense strand to SEQ ID NO: 1998508
ucugccgaccaaaugggaa

SEQ ID NO: 1998510 - RNA, 19 nt, Artificial Sequence
  Description of Artificial Sequence: Synthetic oligonucleotide
  Sense strand starting at position 2987 of SEQ ID NO: 1880848
gggcaucauuauccaugua

SEQ ID NO: 1998511 - RNA, 19 nt, Artificial Sequence
  Description of Artificial Sequence: Synthetic oligonucleotide
  Antisense strand to SEQ ID NO: 1998510
uacauggauaaugaugccc

SEQ ID NO: 1998512 - RNA, 19 nt, Artificial Sequence
  Description of Artificial Sequence: Synthetic oligonucleotide
  Sense strand starting at position 3051 of SEQ ID NO: 1880848
gaugaacuguccuccuaag

SEQ ID NO: 1998513 - RNA, 19 nt, Artificial Sequence
  Description of Artificial Sequence: Synthetic oligonucleotide
  Antisense strand to SEQ ID NO: 1998512
cuuaggaggacaguucauc

SEQ ID NO: 1998514 - RNA, 19 nt, Artificial Sequence
  Description of Artificial Sequence: Synthetic oligonucleotide
  Sense strand starting at position 3093 of SEQ ID NO: 1880848
gggaauuccuaggguggga

SEQ ID NO: 1998515 - RNA, 19 nt, Artificial Sequence
  Description of Artificial Sequence: Synthetic oligonucleotide
  Antisense strand to SEQ ID NO: 1998514
ucccacccuaggaauuccc

SEQ ID NO: 1998516 - RNA, 19 nt, Artificial Sequence
  Description of Artificial Sequence: Synthetic oligonucleotide
  Sense strand starting at position 3095 of SEQ ID NO: 1880848
gaauuccuagggugggaau

SEQ ID NO: 1998517 - RNA, 19 nt, Artificial Sequence
  Description of Artificial Sequence: Synthetic oligonucleotide
  Antisense strand to SEQ ID NO: 1998516
auucccacccuaggaauuc

SEQ ID NO: 1998518 - RNA, 19 nt, Artificial Sequence
  Description of Artificial Sequence: Synthetic oligonucleotide
  Sense strand starting at position 3106 of SEQ ID NO: 1880848
gugggaaucagcuaugccu

SEQ ID NO: 1998519 - RNA, 19 nt, Artificial Sequence
  Description of Artificial Sequence: Synthetic oligonucleotide
  Antisense strand to SEQ ID NO: 1998518
aggcauagcugauucccac

SEQ ID NO: 1998520 - RNA, 19 nt, Artificial Sequence
  Description of Artificial Sequence: Synthetic oligonucleotide
  Sense strand starting at position 3230 of SEQ ID NO: 1880848
aucagagugugcccuuauu

SEQ ID NO: 1998521 - RNA, 19 nt, Artificial Sequence
  Description of Artificial Sequence: Synthetic oligonucleotide
  Antisense strand to SEQ ID NO: 1998520
aauaagggcacacucugau

SEQ ID NO: 1998522 - RNA, 19 nt, Artificial Sequence
  Description of Artificial Sequence: Synthetic oligonucleotide
  Sense strand starting at position 3238 of SEQ ID NO: 1880848
gugcccuuauuuggcaaua

SEQ ID NO: 1998523 - RNA, 19 nt, Artificial Sequence
  Description of Artificial Sequence: Synthetic oligonucleotide
  Antisense strand to SEQ ID NO: 1998522
uauugccaaauaagggcac

SEQ ID NO: 1998524 - RNA, 19 nt, Artificial Sequence
  Description of Artificial Sequence: Synthetic oligonucleotide
  Sense strand starting at position 3240 of SEQ ID NO: 1880848
gcccuuauuuggcaauaac

SEQ ID NO: 1998525 - RNA, 19 nt, Artificial Sequence
  Description of Artificial Sequence: Synthetic oligonucleotide
  Antisense strand to SEQ ID NO: 1998524
guuauugccaaauaagggc

SEQ ID NO: 1998526 - RNA, 19 nt, Artificial Sequence
  Description of Artificial Sequence: Synthetic oligonucleotide
  Sense strand starting at position 3256 of SEQ ID NO: 1880848
aacguucuugcagauguua

SEQ ID NO: 1998527 - RNA, 19 nt, Artificial Sequence
  Description of Artificial Sequence: Synthetic oligonucleotide
  Antisense strand to SEQ ID NO: 1998526
uaacaucugcaagaacguu

SEQ ID NO: 1998528 - RNA, 19 nt, Artificial Sequence
  Description of Artificial Sequence: Synthetic oligonucleotide
  Sense strand starting at position 3258 of SEQ ID NO: 1880848
cguucuugcagauguuaag

SEQ ID NO: 1998529 - RNA, 19 nt, Artificial Sequence
  Description of Artificial Sequence: Synthetic oligonucleotide
  Antisense strand to SEQ ID NO: 1998528
cuuaacaucugcaagaacg

SEQ ID NO: 1998530 - RNA, 19 nt, Artificial Sequence
  Description of Artificial Sequence: Synthetic oligonucleotide
  Sense strand starting at position 3261 of SEQ ID NO: 1880848
ucuugcagauguuaagaua

SEQ ID NO: 1998531 - RNA, 19 nt, Artificial Sequence
  Description of Artificial Sequence: Synthetic oligonucleotide
  Antisense strand to SEQ ID NO: 1998530
uaucuuaacaucugcaaga

SEQ ID NO: 1998532 - RNA, 19 nt, Artificial Sequence
  Description of Artificial Sequence: Synthetic oligonucleotide
  Sense strand starting at position 3294 of SEQ ID NO: 1880848
cauuaugacugguguucca

SEQ ID NO: 1998533 - RNA, 19 nt, Artificial Sequence
  Description of Artificial Sequence: Synthetic oligonucleotide
  Antisense strand to SEQ ID NO: 1998532
uggaacaccagucauaaug

SEQ ID NO: 1998534 - RNA, 19 nt, Artificial Sequence
  Description of Artificial Sequence: Synthetic oligonucleotide
  Sense strand starting at position 3664 of SEQ ID NO: 1880848
cagagaacgcuuugugaag

SEQ ID NO: 1998535 - RNA, 19 nt, Artificial Sequence
  Description of Artificial Sequence: Synthetic oligonucleotide
  Antisense strand to SEQ ID NO: 1998534
cuucacaaagcguucucug

SEQ ID NO: 1998536 - RNA, 19 nt, Artificial Sequence
  Description of Artificial Sequence: Synthetic oligonucleotide
  Sense strand starting at position 3665 of SEQ ID NO: 1880848
agagaacgcuuugugaaga

SEQ ID NO: 1998537 - RNA, 19 nt, Artificial Sequence
  Description of Artificial Sequence: Synthetic oligonucleotide
  Antisense strand to SEQ ID NO: 1998536
ucuucacaaagcguucucu

SEQ ID NO: 1998538 - RNA, 19 nt, Artificial Sequence
  Description of Artificial Sequence: Synthetic oligonucleotide
  Sense strand starting at position 3670 of SEQ ID NO: 1880848
acgcuuugugaagacugga

SEQ ID NO: 1998539 - RNA, 19 nt, Artificial Sequence
  Description of Artificial Sequence: Synthetic oligonucleotide
  Antisense strand to SEQ ID NO: 1998538
uccagucuucacaaagcgu

SEQ ID NO: 1998540 - RNA, 19 nt, Artificial Sequence
  Description of Artificial Sequence: Synthetic oligonucleotide
  Sense strand starting at position 3673 of SEQ ID NO: 1880848
cuuugugaagacuggaguu

SEQ ID NO: 1998541 - RNA, 19 nt, Artificial Sequence
  Description of Artificial Sequence: Synthetic oligonucleotide
  Antisense strand to SEQ ID NO: 1998540
aacuccagucuucacaaag

SEQ ID NO: 1998542 - RNA, 19 nt, Artificial Sequence
  Description of Artificial Sequence: Synthetic oligonucleotide
  Sense strand starting at position 3810 of SEQ ID NO: 1880848
ccagaucuguaagacagua

SEQ ID NO: 1998543 - RNA, 19 nt, Artificial Sequence
  Description of Artificial Sequence: Synthetic oligonucleotide
  Antisense strand to SEQ ID NO: 1998542
uacugucuuacagaucugg

SEQ ID NO: 1998544 - RNA, 19 nt, Artificial Sequence
  Description of Artificial Sequence: Synthetic oligonucleotide
  Sense strand starting at position 3823 of SEQ ID NO: 1880848
acaguagauuuccauuguu

SEQ ID NO: 1998545 - RNA, 19 nt, Artificial Sequence
  Description of Artificial Sequence: Synthetic oligonucleotide
  Antisense strand to SEQ ID NO: 1998544
aacaauggaaaucuacugu

SEQ ID NO: 1998546 - RNA, 19 nt, Artificial Sequence
  Description of Artificial Sequence: Synthetic oligonucleotide
  Sense strand starting at position 3839 of SEQ ID NO: 1880848
guuuaagccacuggguuua

SEQ ID NO: 1998547 - RNA, 19 nt, Artificial Sequence
  Description of Artificial Sequence: Synthetic oligonucleotide
  Antisense strand to SEQ ID NO: 1998546
uaaacccaguggcuuaaac

SEQ ID NO: 1998548 - RNA, 19 nt, Artificial Sequence
  Description of Artificial Sequence: Synthetic oligonucleotide
  Sense strand starting at position 3844 of SEQ ID NO: 1880848
agccacuggguuuaugaua

SEQ ID NO: 1998549 - RNA, 19 nt, Artificial Sequence
  Description of Artificial Sequence: Synthetic oligonucleotide
  Antisense strand to SEQ ID NO: 1998548
uaucauaaacccaguggcu

SEQ ID NO: 1998550 - RNA, 19 nt, Artificial Sequence
  Description of Artificial Sequence: Synthetic oligonucleotide
  Sense strand starting at position 3852 of SEQ ID NO: 1880848
gguuuaugauacuguguua

SEQ ID NO: 1998551 - RNA, 19 nt, Artificial Sequence
  Description of Artificial Sequence: Synthetic oligonucleotide
  Antisense strand to SEQ ID NO: 1998550
uaacacaguaucauaaacc

SEQ ID NO: 1998552 - RNA, 19 nt, Artificial Sequence
  Description of Artificial Sequence: Synthetic oligonucleotide
  Sense strand starting at position 3855 of SEQ ID NO: 1880848
uuaugauacuguguuacag

SEQ ID NO: 1998553 - RNA, 19 nt, Artificial Sequence
  Description of Artificial Sequence: Synthetic oligonucleotide
  Antisense strand to SEQ ID NO: 1998552
cuguaacacaguaucauaa

SEQ ID NO: 1998554 - RNA, 19 nt, Artificial Sequence
  Description of Artificial Sequence: Synthetic oligonucleotide
  Sense strand starting at position 3857 of SEQ ID NO: 1880848
augauacuguguuacagua

SEQ ID NO: 1998555 - RNA, 19 nt, Artificial Sequence
  Description of Artificial Sequence: Synthetic oligonucleotide
  Antisense strand to SEQ ID NO: 1998554
uacuguaacacaguaucau

SEQ ID NO: 1998556 - RNA, 19 nt, Artificial Sequence
  Description of Artificial Sequence: Synthetic oligonucleotide
  Sense strand starting at position 24 of SEQ ID NO: 1880849
ucucgcaucucuccagaaa

SEQ ID NO: 1998557 - RNA, 19 nt, Artificial Sequence
  Description of Artificial Sequence: Synthetic oligonucleotide
  Antisense strand to SEQ ID NO: 1998556
uuucuggagagaugcgaga

SEQ ID NO: 1998558 - RNA, 19 nt, Artificial Sequence
  Description of Artificial Sequence: Synthetic oligonucleotide
  Sense strand starting at position 25 of SEQ ID NO: 1880849
cucgcaucucuccagaaag

SEQ ID NO: 1998559 - RNA, 19 nt, Artificial Sequence
  Description of Artificial Sequence: Synthetic oligonucleotide
  Antisense strand to SEQ ID NO: 1998558
cuuucuggagagaugcgag

SEQ ID NO: 1998560 - RNA, 19 nt, Artificial Sequence
  Description of Artificial Sequence: Synthetic oligonucleotide
  Sense strand starting at position 27 of SEQ ID NO: 1880849
cgcaucucuccagaaagag

SEQ ID NO: 1998561 - RNA, 19 nt, Artificial Sequence
  Description of Artificial Sequence: Synthetic oligonucleotide
  Antisense strand to SEQ ID NO: 1998560
cucuuucuggagagaugcg

SEQ ID NO: 1998562 - RNA, 19 nt, Artificial Sequence
  Description of Artificial Sequence: Synthetic oligonucleotide
  Sense strand starting at position 57 of SEQ ID NO: 1880849
gcaagagcuagcuguuguu

SEQ ID NO: 1998563 - RNA, 19 nt, Artificial Sequence
  Description of Artificial Sequence: Synthetic oligonucleotide
  Antisense strand to SEQ ID NO: 1998562
aacaacagcuagcucuugc

SEQ ID NO: 1998564 - RNA, 19 nt, Artificial Sequence
  Description of Artificial Sequence: Synthetic oligonucleotide
  Sense strand starting at position 859 of SEQ ID NO: 1880849
gccuauaauuccucaaggu

SEQ ID NO: 1998565 - RNA, 19 nt, Artificial Sequence
  Description of Artificial Sequence: Synthetic oligonucleotide
  Antisense strand to SEQ ID NO: 1998564
accuugaggaauuauaggc

SEQ ID NO: 1998566 - RNA, 19 nt, Artificial Sequence
  Description of Artificial Sequence: Synthetic oligonucleotide
  Sense strand starting at position 860 of SEQ ID NO: 1880849
ccuauaauuccucaaggug

SEQ ID NO: 1998567 - RNA, 19 nt, Artificial Sequence
  Description of Artificial Sequence: Synthetic oligonucleotide
  Antisense strand to SEQ ID NO: 1998566
caccuugaggaauuauagg

SEQ ID NO: 1998568 - RNA, 19 nt, Artificial Sequence
  Description of Artificial Sequence: Synthetic oligonucleotide
  Sense strand starting at position 863 of SEQ ID NO: 1880849
auaauuccucaagguguga

SEQ ID NO: 1998569 - RNA, 19 nt, Artificial Sequence
  Description of Artificial Sequence: Synthetic oligonucleotide
  Antisense strand to SEQ ID NO: 1998568
ucacaccuugaggaauuau

SEQ ID NO: 1998570 - RNA, 19 nt, Artificial Sequence
  Description of Artificial Sequence: Synthetic oligonucleotide
  Sense strand starting at position 1014 of SEQ ID NO: 1880849
ucggcuacucgagaugauc

SEQ ID NO: 1998571 - RNA, 19 nt, Artificial Sequence
  Description of Artificial Sequence: Synthetic oligonucleotide
  Antisense strand to SEQ ID NO: 1998570
gaucaucucgaguagccga

SEQ ID NO: 1998572 - RNA, 19 nt, Artificial Sequence
  Description of Artificial Sequence: Synthetic oligonucleotide
  Sense strand starting at position 1022 of SEQ ID NO: 1880849
ucgagaugaucacuugggu

SEQ ID NO: 1998573 - RNA, 19 nt, Artificial Sequence
  Description of Artificial Sequence: Synthetic oligonucleotide
  Antisense strand to SEQ ID NO: 1998572
acccaagugaucaucucga

SEQ ID NO: 1998574 - RNA, 19 nt, Artificial Sequence
  Description of Artificial Sequence: Synthetic oligonucleotide
  Sense strand starting at position 1031 of SEQ ID NO: 1880849
ucacuugggucggcuuuaa

SEQ ID NO: 1998575 - RNA, 19 nt, Artificial Sequence
  Description of Artificial Sequence: Synthetic oligonucleotide
  Antisense strand to SEQ ID NO: 1998574
uuaaagccgacccaaguga

SEQ ID NO: 1998576 - RNA, 19 nt, Artificial Sequence
  Description of Artificial Sequence: Synthetic oligonucleotide
  Sense strand starting at position 1246 of SEQ ID NO: 1880849
gaguuagggaagcgucuau

SEQ ID NO: 1998577 - RNA, 19 nt, Artificial Sequence
  Description of Artificial Sequence: Synthetic oligonucleotide
  Antisense strand to SEQ ID NO: 1998576
auagacgcuucccuaacuc

SEQ ID NO: 1998578 - RNA, 19 nt, Artificial Sequence
  Description of Artificial Sequence: Synthetic oligonucleotide
  Sense strand starting at position 1302 of SEQ ID NO: 1880849
gcgcuaucagcauugaggu

SEQ ID NO: 1998579 - RNA, 19 nt, Artificial Sequence
  Description of Artificial Sequence: Synthetic oligonucleotide
  Antisense strand to SEQ ID NO: 1998578
accucaaugcugauagcgc

SEQ ID NO: 1998580 - RNA, 19 nt, Artificial Sequence
  Description of Artificial Sequence: Synthetic oligonucleotide
  Sense strand starting at position 1308 of SEQ ID NO: 1880849
ucagcauugaggugaagag

SEQ ID NO: 1998581 - RNA, 19 nt, Artificial Sequence
  Description of Artificial Sequence: Synthetic oligonucleotide
  Antisense strand to SEQ ID NO: 1998580
cucuucaccucaaugcuga

SEQ ID NO: 1998582 - RNA, 19 nt, Artificial Sequence
  Description of Artificial Sequence: Synthetic oligonucleotide
  Sense strand starting at position 2440 of SEQ ID NO: 1880849
uguguaaucucucuacgca

SEQ ID NO: 1998583 - RNA, 19 nt, Artificial Sequence
  Description of Artificial Sequence: Synthetic oligonucleotide
  Antisense strand to SEQ ID NO: 1998582
ugcguagagagauuacaca

SEQ ID NO: 1998584 - RNA, 19 nt, Artificial Sequence
  Description of Artificial Sequence: Synthetic oligonucleotide
  Sense strand starting at position 2441 of SEQ ID NO: 1880849
guguaaucucucuacgcac

SEQ ID NO: 1998585 - RNA, 19 nt, Artificial Sequence
  Description of Artificial Sequence: Synthetic oligonucleotide
  Antisense strand to SEQ ID NO: 1998584
gugcguagagagauuacac

SEQ ID NO: 1998586 - RNA, 19 nt, Artificial Sequence
  Description of Artificial Sequence: Synthetic oligonucleotide
  Sense strand starting at position 2465 of SEQ ID NO: 1880849
ccauauaucgugcgguggu

SEQ ID NO: 1998587 - RNA, 19 nt, Artificial Sequence
  Description of Artificial Sequence: Synthetic oligonucleotide
  Antisense strand to SEQ ID NO: 1998586
accaccgcacgauauaugg

SEQ ID NO: 1998588 - RNA, 19 nt, Artificial Sequence
  Description of Artificial Sequence: Synthetic oligonucleotide
  Sense strand starting at position 2495 of SEQ ID NO: 1880849
uuuguaaugcuugaugagu

SEQ ID NO: 1998589 - RNA, 19 nt, Artificial Sequence
  Description of Artificial Sequence: Synthetic oligonucleotide
  Antisense strand to SEQ ID NO: 1998588
acucaucaagcauuacaaa

SEQ ID NO: 1998590 - RNA, 19 nt, Artificial Sequence
  Description of Artificial Sequence: Synthetic oligonucleotide
  Sense strand starting at position 2504 of SEQ ID NO: 1880849
cuugaugaguucuuuacgu

SEQ ID NO: 1998591 - RNA, 19 nt, Artificial Sequence
  Description of Artificial Sequence: Synthetic oligonucleotide
  Antisense strand to SEQ ID NO: 1998590
acguaaagaacucaucaag

SEQ ID NO: 1998592 - RNA, 19 nt, Artificial Sequence
  Description of Artificial Sequence: Synthetic oligonucleotide
  Sense strand starting at position 2506 of SEQ ID NO: 1880849
ugaugaguucuuuacguac

SEQ ID NO: 1998593 - RNA, 19 nt, Artificial Sequence
  Description of Artificial Sequence: Synthetic oligonucleotide
  Antisense strand to SEQ ID NO: 1998592
guacguaaagaacucauca

SEQ ID NO: 1998594 - RNA, 19 nt, Artificial Sequence
  Description of Artificial Sequence: Synthetic oligonucleotide
  Sense strand starting at position 2546 of SEQ ID NO: 1880849
ccaaacuagggcugucaga

SEQ ID NO: 1998595 - RNA, 19 nt, Artificial Sequence
  Description of Artificial Sequence: Synthetic oligonucleotide
  Antisense strand to SEQ ID NO: 1998594
ucugacagcccuaguuugg

SEQ ID NO: 1998596 - RNA, 19 nt, Artificial Sequence
  Description of Artificial Sequence: Synthetic oligonucleotide
  Sense strand starting at position 2555 of SEQ ID NO: 1880849
ggcugucagauugagaagu

SEQ ID NO: 1998597 - RNA, 19 nt, Artificial Sequence
  Description of Artificial Sequence: Synthetic oligonucleotide
  Antisense strand to SEQ ID NO: 1998596
acuucucaaucugacagcc

SEQ ID NO: 1998598 - RNA, 19 nt, Artificial Sequence
  Description of Artificial Sequence: Synthetic oligonucleotide
  Sense strand starting at position 2557 of SEQ ID NO: 1880849
cugucagauugagaagucu

SEQ ID NO: 1998599 - RNA, 19 nt, Artificial Sequence
  Description of Artificial Sequence: Synthetic oligonucleotide
  Antisense strand to SEQ ID NO: 1998598
agacuucucaaucugacag

SEQ ID NO: 1998600 - RNA, 19 nt, Artificial Sequence
  Description of Artificial Sequence: Synthetic oligonucleotide
  Sense strand starting at position 2565 of SEQ ID NO: 1880849
uugagaagucucugcagaa

SEQ ID NO: 1998601 - RNA, 19 nt, Artificial Sequence
  Description of Artificial Sequence: Synthetic oligonucleotide
  Antisense strand to SEQ ID NO: 1998600
uucugcagagacuucucaa

SEQ ID NO: 1998602 - RNA, 19 nt, Artificial Sequence
  Description of Artificial Sequence: Synthetic oligonucleotide
  Sense strand starting at position 2566 of SEQ ID NO: 1880849
ugagaagucucugcagaaa

SEQ ID NO: 1998603 - RNA, 19 nt, Artificial Sequence
  Description of Artificial Sequence: Synthetic oligonucleotide
  Antisense strand to SEQ ID NO: 1998602
uuucugcagagacuucuca

SEQ ID NO: 1998604 - RNA, 19 nt, Artificial Sequence
  Description of Artificial Sequence: Synthetic oligonucleotide
  Sense strand starting at position 2569 of SEQ ID NO: 1880849
gaagucucugcagaaagca

SEQ ID NO: 1998605 - RNA, 19 nt, Artificial Sequence
  Description of Artificial Sequence: Synthetic oligonucleotide
  Antisense strand to SEQ ID NO: 1998604
ugcuuucugcagagacuuc

SEQ ID NO: 1998606 - RNA, 19 nt, Artificial Sequence
  Description of Artificial Sequence: Synthetic oligonucleotide
  Sense strand starting at position 2624 of SEQ ID NO: 1880849
ggaccuucccugugcgaua

SEQ ID NO: 1998607 - RNA, 19 nt, Artificial Sequence
  Description of Artificial Sequence: Synthetic oligonucleotide
  Antisense strand to SEQ ID NO: 1998606
uaucgcacagggaaggucc

SEQ ID NO: 1998608 - RNA, 19 nt, Artificial Sequence
  Description of Artificial Sequence: Synthetic oligonucleotide
  Sense strand starting at position 2625 of SEQ ID NO: 1880849
gaccuucccugugcgauau

SEQ ID NO: 1998609 - RNA, 19 nt, Artificial Sequence
  Description of Artificial Sequence: Synthetic oligonucleotide
  Antisense strand to SEQ ID NO: 1998608
auaucgcacagggaagguc

SEQ ID NO: 1998610 - RNA, 19 nt, Artificial Sequence
  Description of Artificial Sequence: Synthetic oligonucleotide
  Sense strand starting at position 2636 of SEQ ID NO: 1880849
ugcgauaucugguacugaa

SEQ ID NO: 1998611 - RNA, 19 nt, Artificial Sequence
  Description of Artificial Sequence: Synthetic oligonucleotide
  Antisense strand to SEQ ID NO: 1998610
uucaguaccagauaucgca

SEQ ID NO: 1998612 - RNA, 19 nt, Artificial Sequence
  Description of Artificial Sequence: Synthetic oligonucleotide
  Sense strand starting at position 2639 of SEQ ID NO: 1880849
gauaucugguacugaaagu

SEQ ID NO: 1998613 - RNA, 19 nt, Artificial Sequence
  Description of Artificial Sequence: Synthetic oligonucleotide
  Antisense strand to SEQ ID NO: 1998612
acuuucaguaccagauauc

SEQ ID NO: 1998614 - RNA, 19 nt, Artificial Sequence
  Description of Artificial Sequence: Synthetic oligonucleotide
  Sense strand starting at position 2695 of SEQ ID NO: 1880849
gauggcaucuccuagccua

SEQ ID NO: 1998615 - RNA, 19 nt, Artificial Sequence
  Description of Artificial Sequence: Synthetic oligonucleotide
  Antisense strand to SEQ ID NO: 1998614
uaggcuaggagaugccauc

SEQ ID NO: 1998616 - RNA, 19 nt, Artificial Sequence
  Description of Artificial Sequence: Synthetic oligonucleotide
  Sense strand starting at position 2732 of SEQ ID NO: 1880849
acacgagccguuuauccau

SEQ ID NO: 1998617 - RNA, 19 nt, Artificial Sequence
  Description of Artificial Sequence: Synthetic oligonucleotide
  Antisense strand to SEQ ID NO: 1998616
auggauaaacggcucgugu

SEQ ID NO: 1998618 - RNA, 19 nt, Artificial Sequence
  Description of Artificial Sequence: Synthetic oligonucleotide
  Sense strand starting at position 2735 of SEQ ID NO: 1880849
cgagccguuuauccauuua

SEQ ID NO: 1998619 - RNA, 19 nt, Artificial Sequence
  Description of Artificial Sequence: Synthetic oligonucleotide
  Antisense strand to SEQ ID NO: 1998618
uaaauggauaaacggcucg

SEQ ID NO: 1998620 - RNA, 19 nt, Artificial Sequence
  Description of Artificial Sequence: Synthetic oligonucleotide
  Sense strand starting at position 3096 of SEQ ID NO: 1880849
guaaucaucacgcagaugu

SEQ ID NO: 1998621 - RNA, 19 nt, Artificial Sequence
  Description of Artificial Sequence: Synthetic oligonucleotide
  Antisense strand to SEQ ID NO: 1998620
acaucugcgugaugauuac

SEQ ID NO: 1998622 - RNA, 19 nt, Artificial Sequence
  Description of Artificial Sequence: Synthetic oligonucleotide
  Sense strand starting at position 3104 of SEQ ID NO: 1880849
cacgcagaugucuaccaaa

SEQ ID NO: 1998623 - RNA, 19 nt, Artificial Sequence
  Description of Artificial Sequence: Synthetic oligonucleotide
  Antisense strand to SEQ ID NO: 1998622
uuugguagacaucugcgug

SEQ ID NO: 1998624 - RNA, 19 nt, Artificial Sequence
  Description of Artificial Sequence: Synthetic oligonucleotide
  Sense strand starting at position 3444 of SEQ ID NO: 1880849
cgcucaaaccuccauaaug

SEQ ID NO: 1998625 - RNA, 19 nt, Artificial Sequence
  Description of Artificial Sequence: Synthetic oligonucleotide
  Antisense strand to SEQ ID NO: 1998624
cauuauggagguuugagcg

SEQ ID NO: 1998626 - RNA, 19 nt, Artificial Sequence
  Description of Artificial Sequence: Synthetic oligonucleotide
  Sense strand starting at position 3602 of SEQ ID NO: 1880849
acuacuaaguuccagagua

SEQ ID NO: 1998627 - RNA, 19 nt, Artificial Sequence
  Description of Artificial Sequence: Synthetic oligonucleotide
  Antisense strand to SEQ ID NO: 1998626
uacucuggaacuuaguagu

SEQ ID NO: 1998628 - RNA, 19 nt, Artificial Sequence
  Description of Artificial Sequence: Synthetic oligonucleotide
  Sense strand starting at position 3610 of SEQ ID NO: 1880849
guuccagaguaauaccuuu

SEQ ID NO: 1998629 - RNA, 19 nt, Artificial Sequence
  Description of Artificial Sequence: Synthetic oligonucleotide
  Antisense strand to SEQ ID NO: 1998628
aaagguauuacucuggaac

SEQ ID NO: 1998630 - RNA, 19 nt, Artificial Sequence
  Description of Artificial Sequence: Synthetic oligonucleotide
  Sense strand starting at position 3771 of SEQ ID NO: 1880849
cuguaaucuuuagugucca

SEQ ID NO: 1998631 - RNA, 19 nt, Artificial Sequence
  Description of Artificial Sequence: Synthetic oligonucleotide
  Antisense strand to SEQ ID NO: 1998630
uggacacuaaagauuacag

SEQ ID NO: 1998632 - RNA, 19 nt, Artificial Sequence
  Description of Artificial Sequence: Synthetic oligonucleotide
  Sense strand starting at position 3776 of SEQ ID NO: 1880849
aucuuuaguguccacucaa

SEQ ID NO: 1998633 - RNA, 19 nt, Artificial Sequence
  Description of Artificial Sequence: Synthetic oligonucleotide
  Antisense strand to SEQ ID NO: 1998632
uugaguggacacuaaagau

SEQ ID NO: 1998634 - RNA, 19 nt, Artificial Sequence
  Description of Artificial Sequence: Synthetic oligonucleotide
  Sense strand starting at position 3932 of SEQ ID NO: 1880849
uuaacauucucccaguguu

SEQ ID NO: 1998635 - RNA, 19 nt, Artificial Sequence
  Description of Artificial Sequence: Synthetic oligonucleotide
  Antisense strand to SEQ ID NO: 1998634
aacacugggagaauguuaa

SEQ ID NO: 1998636 - RNA, 19 nt, Artificial Sequence
  Description of Artificial Sequence: Synthetic oligonucleotide
  Sense strand starting at position 97 of SEQ ID NO: 1880850
gccaaagugcccuaaccaa

SEQ ID NO: 1998637 - RNA, 19 nt, Artificial Sequence
  Description of Artificial Sequence: Synthetic oligonucleotide
  Antisense strand to SEQ ID NO: 1998636
uugguuagggcacuuuggc

SEQ ID NO: 1998638 - RNA, 19 nt, Artificial Sequence
  Description of Artificial Sequence: Synthetic oligonucleotide
  Sense strand starting at position 175 of SEQ ID NO: 1880850
agaagaagccgcuguuacu

SEQ ID NO: 1998639 - RNA, 19 nt, Artificial Sequence
  Description of Artificial Sequence: Synthetic oligonucleotide
  Antisense strand to SEQ ID NO: 1998638
aguaacagcggcuucuucu

SEQ ID NO: 1998640 - RNA, 19 nt, Artificial Sequence
  Description of Artificial Sequence: Synthetic oligonucleotide
  Sense strand starting at position 717 of SEQ ID NO: 1880850
caguaugaccacuggauca

SEQ ID NO: 1998641 - RNA, 19 nt, Artificial Sequence
  Description of Artificial Sequence: Synthetic oligonucleotide
  Antisense strand to SEQ ID NO: 1998640
ugauccaguggucauacug

SEQ ID NO: 1998642 - RNA, 19 nt, Artificial Sequence
  Description of Artificial Sequence: Synthetic oligonucleotide
  Sense strand starting at position 1140 of SEQ ID NO: 1880850
acuauaugccaacaaaggu

SEQ ID NO: 1998643 - RNA, 19 nt, Artificial Sequence
  Description of Artificial Sequence: Synthetic oligonucleotide
  Antisense strand to SEQ ID NO: 1998642
accuuuguuggcauauagu

SEQ ID NO: 1998644 - RNA, 19 nt, Artificial Sequence
  Description of Artificial Sequence: Synthetic oligonucleotide
  Sense strand starting at position 1245 of SEQ ID NO: 1880850
gagcaaagaguuugaauca

SEQ ID NO: 1998645 - RNA, 19 nt, Artificial Sequence
  Description of Artificial Sequence: Synthetic oligonucleotide
  Antisense strand to SEQ ID NO: 1998644
ugauucaaacucuuugcuc

SEQ ID NO: 1998646 - RNA, 19 nt, Artificial Sequence
  Description of Artificial Sequence: Synthetic oligonucleotide
  Sense strand starting at position 1252 of SEQ ID NO: 1880850
gaguuugaaucaguagcaa

SEQ ID NO: 1998647 - RNA, 19 nt, Artificial Sequence
  Description of Artificial Sequence: Synthetic oligonucleotide
  Antisense strand to SEQ ID NO: 1998646
uugcuacugauucaaacuc

SEQ ID NO: 1998648 - RNA, 19 nt, Artificial Sequence
  Description of Artificial Sequence: Synthetic oligonucleotide
  Sense strand starting at position 1264 of SEQ ID NO: 1880850
guagcaaagucucccaaca

SEQ ID NO: 1998649 - RNA, 19 nt, Artificial Sequence
  Description of Artificial Sequence: Synthetic oligonucleotide
  Antisense strand to SEQ ID NO: 1998648
uguugggagacuuugcuac

SEQ ID NO: 1998650 - RNA, 19 nt, Artificial Sequence
  Description of Artificial Sequence: Synthetic oligonucleotide
  Sense strand starting at position 1555 of SEQ ID NO: 1880850
acaaucagguaagauuuau

SEQ ID NO: 1998651 - RNA, 19 nt, Artificial Sequence
  Description of Artificial Sequence: Synthetic oligonucleotide
  Antisense strand to SEQ ID NO: 1998650
auaaaucuuaccugauugu

SEQ ID NO: 1998652 - RNA, 19 nt, Artificial Sequence
  Description of Artificial Sequence: Synthetic oligonucleotide
  Sense strand starting at position 1889 of SEQ ID NO: 1880850
cuuaauguauuagugcauu

SEQ ID NO: 1998653 - RNA, 19 nt, Artificial Sequence
  Description of Artificial Sequence: Synthetic oligonucleotide
  Antisense strand to SEQ ID NO: 1998652
aaugcacuaauacauuaag

SEQ ID NO: 1998654 - RNA, 19 nt, Artificial Sequence
  Description of Artificial Sequence: Synthetic oligonucleotide
  Sense strand starting at position 2042 of SEQ ID NO: 1880850
acaacuuuguagggaggaa

SEQ ID NO: 1998655 - RNA, 19 nt, Artificial Sequence
  Description of Artificial Sequence: Synthetic oligonucleotide
  Antisense strand to SEQ ID NO: 1998654
uuccucccuacaaaguugu

SEQ ID NO: 1998656 - RNA, 19 nt, Artificial Sequence
  Description of Artificial Sequence: Synthetic oligonucleotide
  Sense strand starting at position 2190 of SEQ ID NO: 1880850
gcgcuugacauguagggau

SEQ ID NO: 1998657 - RNA, 19 nt, Artificial Sequence
  Description of Artificial Sequence: Synthetic oligonucleotide
  Antisense strand to SEQ ID NO: 1998656
aucccuacaugucaagcgc

SEQ ID NO: 1998658 - RNA, 19 nt, Artificial Sequence
  Description of Artificial Sequence: Synthetic oligonucleotide
  Sense strand starting at position 2192 of SEQ ID NO: 1880850
gcuugacauguagggauua

SEQ ID NO: 1998659 - RNA, 19 nt, Artificial Sequence
  Description of Artificial Sequence: Synthetic oligonucleotide
  Antisense strand to SEQ ID NO: 1998658
uaaucccuacaugucaagc

SEQ ID NO: 1998660 - RNA, 19 nt, Artificial Sequence
  Description of Artificial Sequence: Synthetic oligonucleotide
  Sense strand starting at position 2292 of SEQ ID NO: 1880850
ccaaucagguaagagaaau

SEQ ID NO: 1998661 - RNA, 19 nt, Artificial Sequence
  Description of Artificial Sequence: Synthetic oligonucleotide
  Antisense strand to SEQ ID NO: 1998660
auuucucuuaccugauugg

SEQ ID NO: 1998662 - RNA, 19 nt, Artificial Sequence
  Description of Artificial Sequence: Synthetic oligonucleotide
  Sense strand starting at position 2343 of SEQ ID NO: 1880850
aguugcucucuuugcaaau

SEQ ID NO: 1998663 - RNA, 19 nt, Artificial Sequence
  Description of Artificial Sequence: Synthetic oligonucleotide
  Antisense strand to SEQ ID NO: 1998662
auuugcaaagagagcaacu

SEQ ID NO: 1998664 - RNA, 19 nt, Artificial Sequence
  Description of Artificial Sequence: Synthetic oligonucleotide
  Sense strand starting at position 2344 of SEQ ID NO: 1880850
guugcucucuuugcaaaua

SEQ ID NO: 1998665 - RNA, 19 nt, Artificial Sequence
  Description of Artificial Sequence: Synthetic oligonucleotide
  Antisense strand to SEQ ID NO: 1998664
uauuugcaaagagagcaac

SEQ ID NO: 1998666 - RNA, 19 nt, Artificial Sequence
  Description of Artificial Sequence: Synthetic oligonucleotide
  Sense strand starting at position 2474 of SEQ ID NO: 1880850
uucuauacaugauuaguga

SEQ ID NO: 1998667 - RNA, 19 nt, Artificial Sequence
  Description of Artificial Sequence: Synthetic oligonucleotide
  Antisense strand to SEQ ID NO: 1998666
ucacuaaucauguauagaa

SEQ ID NO: 1998668 - RNA, 19 nt, Artificial Sequence
  Description of Artificial Sequence: Synthetic oligonucleotide
  Sense strand starting at position 2478 of SEQ ID NO: 1880850
auacaugauuagugaccua

SEQ ID NO: 1998669 - RNA, 19 nt, Artificial Sequence
  Description of Artificial Sequence: Synthetic oligonucleotide
  Antisense strand to SEQ ID NO: 1998668
uaggucacuaaucauguau

SEQ ID NO: 1998670 - RNA, 19 nt, Artificial Sequence
  Description of Artificial Sequence: Synthetic oligonucleotide
  Sense strand starting at position 2483 of SEQ ID NO: 1880850
ugauuagugaccuagcuga

SEQ ID NO: 1998671 - RNA, 19 nt, Artificial Sequence
  Description of Artificial Sequence: Synthetic oligonucleotide
  Antisense strand to SEQ ID NO: 1998670
ucagcuaggucacuaauca

SEQ ID NO: 1998672 - RNA, 19 nt, Artificial Sequence
  Description of Artificial Sequence: Synthetic oligonucleotide
  Sense strand starting at position 2528 of SEQ ID NO: 1880850
uuacaacagcuauagaagu

SEQ ID NO: 1998673 - RNA, 19 nt, Artificial Sequence
  Description of Artificial Sequence: Synthetic oligonucleotide
  Antisense strand to SEQ ID NO: 1998672
acuucuauagcuguuguaa

SEQ ID NO: 1998674 - RNA, 19 nt, Artificial Sequence
  Description of Artificial Sequence: Synthetic oligonucleotide
  Sense strand starting at position 2656 of SEQ ID NO: 1880850
ccaugcucaugcgucagaa

SEQ ID NO: 1998675 - RNA, 19 nt, Artificial Sequence
  Description of Artificial Sequence: Synthetic oligonucleotide
  Antisense strand to SEQ ID NO: 1998674
uucugacgcaugagcaugg

SEQ ID NO: 1998676 - RNA, 19 nt, Artificial Sequence
  Description of Artificial Sequence: Synthetic oligonucleotide
  Sense strand starting at position 2658 of SEQ ID NO: 1880850
augcucaugcgucagaaga

SEQ ID NO: 1998677 - RNA, 19 nt, Artificial Sequence
  Description of Artificial Sequence: Synthetic oligonucleotide
  Antisense strand to SEQ ID NO: 1998676
ucuucugacgcaugagcau

SEQ ID NO: 1998678 - RNA, 19 nt, Artificial Sequence
  Description of Artificial Sequence: Synthetic oligonucleotide
  Sense strand starting at position 2660 of SEQ ID NO: 1880850
gcucaugcgucagaagaau

SEQ ID NO: 1998679 - RNA, 19 nt, Artificial Sequence
  Description of Artificial Sequence: Synthetic oligonucleotide
  Antisense strand to SEQ ID NO: 1998678
auucuucugacgcaugagc

SEQ ID NO: 1998680 - RNA, 19 nt, Artificial Sequence
  Description of Artificial Sequence: Synthetic oligonucleotide
  Sense strand starting at position 2666 of SEQ ID NO: 1880850
gcgucagaagaauauuguu

SEQ ID NO: 1998681 - RNA, 19 nt, Artificial Sequence
  Description of Artificial Sequence: Synthetic oligonucleotide
  Antisense strand to SEQ ID NO: 1998680
aacaauauucuucugacgc

SEQ ID NO: 1998682 - RNA, 19 nt, Artificial Sequence
  Description of Artificial Sequence: Synthetic oligonucleotide
  Sense strand starting at position 2878 of SEQ ID NO: 1880850
guuacaagacucuaguaac

SEQ ID NO: 1998683 - RNA, 19 nt, Artificial Sequence
  Description of Artificial Sequence: Synthetic oligonucleotide
  Antisense strand to SEQ ID NO: 1998682
guuacuagagucuuguaac

SEQ ID NO: 1998684 - RNA, 19 nt, Artificial Sequence
  Description of Artificial Sequence: Synthetic oligonucleotide
  Sense strand starting at position 2901 of SEQ ID NO: 1880850
auugcaugguacuaguaua

SEQ ID NO: 1998685 - RNA, 19 nt, Artificial Sequence
  Description of Artificial Sequence: Synthetic oligonucleotide
  Antisense strand to SEQ ID NO: 1998684
uauacuaguaccaugcaau

SEQ ID NO: 1998686 - RNA, 19 nt, Artificial Sequence
  Description of Artificial Sequence: Synthetic oligonucleotide
  Sense strand starting at position 3010 of SEQ ID NO: 1880850
ccaagaacauauugggaaa

SEQ ID NO: 1998687 - RNA, 19 nt, Artificial Sequence
  Description of Artificial Sequence: Synthetic oligonucleotide
  Antisense strand to SEQ ID NO: 1998686
uuucccaauauguucuugg

SEQ ID NO: 1998688 - RNA, 19 nt, Artificial Sequence
  Description of Artificial Sequence: Synthetic oligonucleotide
  Sense strand starting at position 3550 of SEQ ID NO: 1880850
ugguaacauuggucuaggu

SEQ ID NO: 1998689 - RNA, 19 nt, Artificial Sequence
  Description of Artificial Sequence: Synthetic oligonucleotide
  Antisense strand to SEQ ID NO: 1998688
accuagaccaauguuacca

SEQ ID NO: 1998690 - RNA, 19 nt, Artificial Sequence
  Description of Artificial Sequence: Synthetic oligonucleotide
  Sense strand starting at position 3552 of SEQ ID NO: 1880850
guaacauuggucuagguua

SEQ ID NO: 1998691 - RNA, 19 nt, Artificial Sequence
  Description of Artificial Sequence: Synthetic oligonucleotide
  Antisense strand to SEQ ID NO: 1998690
uaaccuagaccaauguuac

SEQ ID NO: 1998692 - RNA, 19 nt, Artificial Sequence
  Description of Artificial Sequence: Synthetic oligonucleotide
  Sense strand starting at position 3554 of SEQ ID NO: 1880850
aacauuggucuagguuaag

SEQ ID NO: 1998693 - RNA, 19 nt, Artificial Sequence
  Description of Artificial Sequence: Synthetic oligonucleotide
  Antisense strand to SEQ ID NO: 1998692
cuuaaccuagaccaauguu

SEQ ID NO: 1998694 - RNA, 19 nt, Artificial Sequence
  Description of Artificial Sequence: Synthetic oligonucleotide
  Sense strand starting at position 3557 of SEQ ID NO: 1880850
auuggucuagguuaagauu

SEQ ID NO: 1998695 - RNA, 19 nt, Artificial Sequence
  Description of Artificial Sequence: Synthetic oligonucleotide
  Antisense strand to SEQ ID NO: 1998694
aaucuuaaccuagaccaau

SEQ ID NO: 1998696 - RNA, 19 nt, Artificial Sequence
  Description of Artificial Sequence: Synthetic oligonucleotide
  Sense strand starting at position 3575 of SEQ ID NO: 1880850
uuuauuauggcucagaccu

SEQ ID NO: 1998697 - RNA, 19 nt, Artificial Sequence
  Description of Artificial Sequence: Synthetic oligonucleotide
  Antisense strand to SEQ ID NO: 1998696
aggucugagccauaauaaa

SEQ ID NO: 1998698 - RNA, 19 nt, Artificial Sequence
  Description of Artificial Sequence: Synthetic oligonucleotide
  Sense strand starting at position 3627 of SEQ ID NO: 1880850
gugggacuuuauuaaauug

SEQ ID NO: 1998699 - RNA, 19 nt, Artificial Sequence
  Description of Artificial Sequence: Synthetic oligonucleotide
  Antisense strand to SEQ ID NO: 1998698
caauuuaauaaagucccac

SEQ ID NO: 1998700 - RNA, 19 nt, Artificial Sequence
  Description of Artificial Sequence: Synthetic oligonucleotide
  Sense strand starting at position 3875 of SEQ ID NO: 1880850
gggacuuaguaaucaguag

SEQ ID NO: 1998701 - RNA, 19 nt, Artificial Sequence
  Description of Artificial Sequence: Synthetic oligonucleotide
  Antisense strand to SEQ ID NO: 1998700
cuacugauuacuaaguccc

SEQ ID NO: 1998702 - RNA, 19 nt, Artificial Sequence
  Description of Artificial Sequence: Synthetic oligonucleotide
  Sense strand starting at position 3879 of SEQ ID NO: 1880850
cuuaguaaucaguagacau

SEQ ID NO: 1998703 - RNA, 19 nt, Artificial Sequence
  Description of Artificial Sequence: Synthetic oligonucleotide
  Antisense strand to SEQ ID NO: 1998702
augucuacugauuacuaag

SEQ ID NO: 1998704 - RNA, 19 nt, Artificial Sequence
  Description of Artificial Sequence: Synthetic oligonucleotide
  Sense strand starting at position 3939 of SEQ ID NO: 1880850
gugaguaaaugucauagac

SEQ ID NO: 1998705 - RNA, 19 nt, Artificial Sequence
  Description of Artificial Sequence: Synthetic oligonucleotide
  Antisense strand to SEQ ID NO: 1998704
gucuaugacauuuacucac

SEQ ID NO: 1998706 - RNA, 19 nt, Artificial Sequence
  Description of Artificial Sequence: Synthetic oligonucleotide
  Sense strand starting at position 3941 of SEQ ID NO: 1880850
gaguaaaugucauagacau

SEQ ID NO: 1998707 - RNA, 19 nt, Artificial Sequence
  Description of Artificial Sequence: Synthetic oligonucleotide
  Antisense strand to SEQ ID NO: 1998706
augucuaugacauuuacuc

SEQ ID NO: 1998708 - RNA, 19 nt, Artificial Sequence
  Description of Artificial Sequence: Synthetic oligonucleotide
  Sense strand starting at position 280 of SEQ ID NO: 1880852
cgcuaaucauuccaagcaa

SEQ ID NO: 1998709 - RNA, 19 nt, Artificial Sequence
  Description of Artificial Sequence: Synthetic oligonucleotide
  Antisense strand to SEQ ID NO: 1998708
uugcuuggaaugauuagcg

SEQ ID NO: 1998710 - RNA, 19 nt, Artificial Sequence
  Description of Artificial Sequence: Synthetic oligonucleotide
  Sense strand starting at position 294 of SEQ ID NO: 1880852
agcaaauucugucaugcca

SEQ ID NO: 1998711 - RNA, 19 nt, Artificial Sequence
  Description of Artificial Sequence: Synthetic oligonucleotide
  Antisense strand to SEQ ID NO: 1998710
uggcaugacagaauuugcu

SEQ ID NO: 1998712 - RNA, 19 nt, Artificial Sequence
  Description of Artificial Sequence: Synthetic oligonucleotide
  Sense strand starting at position 795 of SEQ ID NO: 1880852
cgucgcucgccucagagau

SEQ ID NO: 1998713 - RNA, 19 nt, Artificial Sequence
  Description of Artificial Sequence: Synthetic oligonucleotide
  Antisense strand to SEQ ID NO: 1998712
aucucugaggcgagcgacg

SEQ ID NO: 1998714 - RNA, 19 nt, Artificial Sequence
  Description of Artificial Sequence: Synthetic oligonucleotide
  Sense strand starting at position 796 of SEQ ID NO: 1880852
gucgcucgccucagagaug

SEQ ID NO: 1998715 - RNA, 19 nt, Artificial Sequence
  Description of Artificial Sequence: Synthetic oligonucleotide
  Antisense strand to SEQ ID NO: 1998714
caucucugaggcgagcgac

SEQ ID NO: 1998716 - RNA, 19 nt, Artificial Sequence
  Description of Artificial Sequence: Synthetic oligonucleotide
  Sense strand starting at position 799 of SEQ ID NO: 1880852
gcucgccucagagauggaa

SEQ ID NO: 1998717 - RNA, 19 nt, Artificial Sequence
  Description of Artificial Sequence: Synthetic oligonucleotide
  Antisense strand to SEQ ID NO: 1998716
uuccaucucugaggcgagc

SEQ ID NO: 1998718 - RNA, 19 nt, Artificial Sequence
  Description of Artificial Sequence: Synthetic oligonucleotide
  Sense strand starting at position 836 of SEQ ID NO: 1880852
cgccgaaagucgucaucaa

SEQ ID NO: 1998719 - RNA, 19 nt, Artificial Sequence
  Description of Artificial Sequence: Synthetic oligonucleotide
  Antisense strand to SEQ ID NO: 1998718
uugaugacgacuuucggcg

SEQ ID NO: 1998720 - RNA, 19 nt, Artificial Sequence
  Description of Artificial Sequence: Synthetic oligonucleotide
  Sense strand starting at position 837 of SEQ ID NO: 1880852
gccgaaagucgucaucaag

SEQ ID NO: 1998721 - RNA, 19 nt, Artificial Sequence
  Description of Artificial Sequence: Synthetic oligonucleotide
  Antisense strand to SEQ ID NO: 1998720
cuugaugacgacuuucggc

SEQ ID NO: 1998722 - RNA, 19 nt, Artificial Sequence
  Description of Artificial Sequence: Synthetic oligonucleotide
  Sense strand starting at position 993 of SEQ ID NO: 1880852
gggagugguccuuagcuga

SEQ ID NO: 1998723 - RNA, 19 nt, Artificial Sequence
  Description of Artificial Sequence: Synthetic oligonucleotide
  Antisense strand to SEQ ID NO: 1998722
ucagcuaaggaccacuccc

SEQ ID NO: 1998724 - RNA, 19 nt, Artificial Sequence
  Description of Artificial Sequence: Synthetic oligonucleotide
  Sense strand starting at position 1077 of SEQ ID NO: 1880852
gcgcguaagcaguauuguu

SEQ ID NO: 1998725 - RNA, 19 nt, Artificial Sequence
  Description of Artificial Sequence: Synthetic oligonucleotide
  Antisense strand to SEQ ID NO: 1998724
aacaauacugcuuacgcgc

SEQ ID NO: 1998726 - RNA, 19 nt, Artificial Sequence
  Description of Artificial Sequence: Synthetic oligonucleotide
  Sense strand starting at position 1079 of SEQ ID NO: 1880852
gcguaagcaguauuguuga

SEQ ID NO: 1998727 - RNA, 19 nt, Artificial Sequence
  Description of Artificial Sequence: Synthetic oligonucleotide
  Antisense strand to SEQ ID NO: 1998726
ucaacaauacugcuuacgc

SEQ ID NO: 1998728 - RNA, 19 nt, Artificial Sequence
  Description of Artificial Sequence: Synthetic oligonucleotide
  Sense strand starting at position 1084 of SEQ ID NO: 1880852
agcaguauuguugauuagu

SEQ ID NO: 1998729 - RNA, 19 nt, Artificial Sequence
  Description of Artificial Sequence: Synthetic oligonucleotide
  Antisense strand to SEQ ID NO: 1998728
acuaaucaacaauacugcu

SEQ ID NO: 1998730 - RNA, 19 nt, Artificial Sequence
  Description of Artificial Sequence: Synthetic oligonucleotide
  Sense strand starting at position 1169 of SEQ ID NO: 1880852
auugcacgcuuucuugaaa

SEQ ID NO: 1998731 - RNA, 19 nt, Artificial Sequence
  Description of Artificial Sequence: Synthetic oligonucleotide
  Antisense strand to SEQ ID NO: 1998730
uuucaagaaagcgugcaau

SEQ ID NO: 1998732 - RNA, 19 nt, Artificial Sequence
  Description of Artificial Sequence: Synthetic oligonucleotide
  Sense strand starting at position 1172 of SEQ ID NO: 1880852
gcacgcuuucuugaaagag

SEQ ID NO: 1998733 - RNA, 19 nt, Artificial Sequence
  Description of Artificial Sequence: Synthetic oligonucleotide
  Antisense strand to SEQ ID NO: 1998732
cucuuucaagaaagcgugc

SEQ ID NO: 1998734 - RNA, 19 nt, Artificial Sequence
  Description of Artificial Sequence: Synthetic oligonucleotide
  Sense strand starting at position 1176 of SEQ ID NO: 1880852
gcuuucuugaaagaggcau

SEQ ID NO: 1998735 - RNA, 19 nt, Artificial Sequence
  Description of Artificial Sequence: Synthetic oligonucleotide
  Antisense strand to SEQ ID NO: 1998734
augccucuuucaagaaagc

SEQ ID NO: 1998736 - RNA, 19 nt, Artificial Sequence
  Description of Artificial Sequence: Synthetic oligonucleotide
  Sense strand starting at position 2357 of SEQ ID NO: 1880852
cgccuauaaucuuugggac

SEQ ID NO: 1998737 - RNA, 19 nt, Artificial Sequence
  Description of Artificial Sequence: Synthetic oligonucleotide
  Antisense strand to SEQ ID NO: 1998736
gucccaaagauuauaggcg

SEQ ID NO: 1998738 - RNA, 19 nt, Artificial Sequence
  Description of Artificial Sequence: Synthetic oligonucleotide
  Sense strand starting at position 2471 of SEQ ID NO: 1880852
cgaucucuguccuguggua

SEQ ID NO: 1998739 - RNA, 19 nt, Artificial Sequence
  Description of Artificial Sequence: Synthetic oligonucleotide
  Antisense strand to SEQ ID NO: 1998738
uaccacaggacagagaucg

SEQ ID NO: 1998740 - RNA, 19 nt, Artificial Sequence
  Description of Artificial Sequence: Synthetic oligonucleotide
  Sense strand starting at position 2473 of SEQ ID NO: 1880852
aucucuguccugugguaua

SEQ ID NO: 1998741 - RNA, 19 nt, Artificial Sequence
  Description of Artificial Sequence: Synthetic oligonucleotide
  Antisense strand to SEQ ID NO: 1998740
uauaccacaggacagagau

SEQ ID NO: 1998742 - RNA, 19 nt, Artificial Sequence
  Description of Artificial Sequence: Synthetic oligonucleotide
  Sense strand starting at position 2594 of SEQ ID NO: 1880852
agcuuucccucugaugacu

SEQ ID NO: 1998743 - RNA, 19 nt, Artificial Sequence
  Description of Artificial Sequence: Synthetic oligonucleotide
  Antisense strand to SEQ ID NO: 1998742
agucaucagagggaaagcu

SEQ ID NO: 1998744 - RNA, 19 nt, Artificial Sequence
  Description of Artificial Sequence: Synthetic oligonucleotide
  Sense strand starting at position 3221 of SEQ ID NO: 1880852
cguuuauuggcuuaucucu

SEQ ID NO: 1998745 - RNA, 19 nt, Artificial Sequence
  Description of Artificial Sequence: Synthetic oligonucleotide
  Antisense strand to SEQ ID NO: 1998744
agagauaagccaauaaacg

SEQ ID NO: 1998746 - RNA, 19 nt, Artificial Sequence
  Description of Artificial Sequence: Synthetic oligonucleotide
  Sense strand starting at position 3253 of SEQ ID NO: 1880852
cucccuuguuuccauggaa

SEQ ID NO: 1998747 - RNA, 19 nt, Artificial Sequence
  Description of Artificial Sequence: Synthetic oligonucleotide
  Antisense strand to SEQ ID NO: 1998746
uuccauggaaacaagggag

SEQ ID NO: 1998748 - RNA, 19 nt, Artificial Sequence
  Description of Artificial Sequence: Synthetic oligonucleotide
  Sense strand starting at position 3256 of SEQ ID NO: 1880852
ccuuguuuccauggaaacu

SEQ ID NO: 1998749 - RNA, 19 nt, Artificial Sequence
  Description of Artificial Sequence: Synthetic oligonucleotide
  Antisense strand to SEQ ID NO: 1998748
aguuuccauggaaacaagg

SEQ ID NO: 1998750 - RNA, 19 nt, Artificial Sequence
  Description of Artificial Sequence: Synthetic oligonucleotide
  Sense strand starting at position 3360 of SEQ ID NO: 1880852
cacgauuucugacucgguu

SEQ ID NO: 1998751 - RNA, 19 nt, Artificial Sequence
  Description of Artificial Sequence: Synthetic oligonucleotide
  Antisense strand to SEQ ID NO: 1998750
aaccgagucagaaaucgug

SEQ ID NO: 1998752 - RNA, 19 nt, Artificial Sequence
  Description of Artificial Sequence: Synthetic oligonucleotide
  Sense strand starting at position 3362 of SEQ ID NO: 1880852
cgauuucugacucgguuua

SEQ ID NO: 1998753 - RNA, 19 nt, Artificial Sequence
  Description of Artificial Sequence: Synthetic oligonucleotide
  Antisense strand to SEQ ID NO: 1998752
uaaaccgagucagaaaucg

SEQ ID NO: 1998754 - RNA, 19 nt, Artificial Sequence
  Description of Artificial Sequence: Synthetic oligonucleotide
  Sense strand starting at position 3364 of SEQ ID NO: 1880852
auuucugacucgguuuauu

SEQ ID NO: 1998755 - RNA, 19 nt, Artificial Sequence
  Description of Artificial Sequence: Synthetic oligonucleotide
  Antisense strand to SEQ ID NO: 1998754
aauaaaccgagucagaaau

SEQ ID NO: 1998756 - RNA, 19 nt, Artificial Sequence
  Description of Artificial Sequence: Synthetic oligonucleotide
  Sense strand starting at position 3367 of SEQ ID NO: 1880852
ucugacucgguuuauuaga

SEQ ID NO: 1998757 - RNA, 19 nt, Artificial Sequence
  Description of Artificial Sequence: Synthetic oligonucleotide
  Antisense strand to SEQ ID NO: 1998756
ucuaauaaaccgagucaga

SEQ ID NO: 1998758 - RNA, 19 nt, Artificial Sequence
  Description of Artificial Sequence: Synthetic oligonucleotide
  Sense strand starting at position 3369 of SEQ ID NO: 1880852
ugacucgguuuauuagaga

SEQ ID NO: 1998759 - RNA, 19 nt, Artificial Sequence
  Description of Artificial Sequence: Synthetic oligonucleotide
  Antisense strand to SEQ ID NO: 1998758
ucucuaauaaaccgaguca

SEQ ID NO: 1998760 - RNA, 19 nt, Artificial Sequence
  Description of Artificial Sequence: Synthetic oligonucleotide
  Sense strand starting at position 3372 of SEQ ID NO: 1880852
cucgguuuauuagagacau

SEQ ID NO: 1998761 - RNA, 19 nt, Artificial Sequence
  Description of Artificial Sequence: Synthetic oligonucleotide
  Antisense strand to SEQ ID NO: 1998760
augucucuaauaaaccgag

SEQ ID NO: 1998762 - RNA, 19 nt, Artificial Sequence
  Description of Artificial Sequence: Synthetic oligonucleotide
  Sense strand starting at position 3463 of SEQ ID NO: 1880852
gcgaacuguggugagugua

SEQ ID NO: 1998763 - RNA, 19 nt, Artificial Sequence
  Description of Artificial Sequence: Synthetic oligonucleotide
  Antisense strand to SEQ ID NO: 1998762
uacacucaccacaguucgc

SEQ ID NO: 1998764 - RNA, 19 nt, Artificial Sequence
  Description of Artificial Sequence: Synthetic oligonucleotide
  Sense strand starting at position 3464 of SEQ ID NO: 1880852
cgaacuguggugaguguaa

SEQ ID NO: 1998765 - RNA, 19 nt, Artificial Sequence
  Description of Artificial Sequence: Synthetic oligonucleotide
  Antisense strand to SEQ ID NO: 1998764
uuacacucaccacaguucg

SEQ ID NO: 1998766 - RNA, 19 nt, Artificial Sequence
  Description of Artificial Sequence: Synthetic oligonucleotide
  Sense strand starting at position 3572 of SEQ ID NO: 1880852
cuuagaaguugucccuuau

SEQ ID NO: 1998767 - RNA, 19 nt, Artificial Sequence
  Description of Artificial Sequence: Synthetic oligonucleotide
  Antisense strand to SEQ ID NO: 1998766
auaagggacaacuucuaag

SEQ ID NO: 1998768 - RNA, 19 nt, Artificial Sequence
  Description of Artificial Sequence: Synthetic oligonucleotide
  Sense strand starting at position 3711 of SEQ ID NO: 1880852
ccaccucacuccugaguua

SEQ ID NO: 1998769 - RNA, 19 nt, Artificial Sequence
  Description of Artificial Sequence: Synthetic oligonucleotide
  Antisense strand to SEQ ID NO: 1998768
uaacucaggagugaggugg

SEQ ID NO: 1998770 - RNA, 19 nt, Artificial Sequence
  Description of Artificial Sequence: Synthetic oligonucleotide
  Sense strand starting at position 3714 of SEQ ID NO: 1880852
ccucacuccugaguuagca

SEQ ID NO: 1998771 - RNA, 19 nt, Artificial Sequence
  Description of Artificial Sequence: Synthetic oligonucleotide
  Antisense strand to SEQ ID NO: 1998770
ugcuaacucaggagugagg

SEQ ID NO: 1998772 - RNA, 19 nt, Artificial Sequence
  Description of Artificial Sequence: Synthetic oligonucleotide
  Sense strand starting at position 3730 of SEQ ID NO: 1880852
gcacacuuuccagguguca

SEQ ID NO: 1998773 - RNA, 19 nt, Artificial Sequence
  Description of Artificial Sequence: Synthetic oligonucleotide
  Antisense strand to SEQ ID NO: 1998772
ugacaccuggaaagugugc

SEQ ID NO: 1998774 - RNA, 19 nt, Artificial Sequence
  Description of Artificial Sequence: Synthetic oligonucleotide
  Sense strand starting at position 3770 of SEQ ID NO: 1880852
gagccaggguccugugaga

SEQ ID NO: 1998775 - RNA, 19 nt, Artificial Sequence
  Description of Artificial Sequence: Synthetic oligonucleotide
  Antisense strand to SEQ ID NO: 1998774
ucucacaggacccuggcuc

SEQ ID NO: 1998776 - RNA, 19 nt, Artificial Sequence
  Description of Artificial Sequence: Synthetic oligonucleotide
  Sense strand starting at position 3924 of SEQ ID NO: 1880852
ggcugagaugagcaauuga

SEQ ID NO: 1998777 - RNA, 19 nt, Artificial Sequence
  Description of Artificial Sequence: Synthetic oligonucleotide
  Antisense strand to SEQ ID NO: 1998776
ucaauugcucaucucagcc

SEQ ID NO: 1998778 - RNA, 19 nt, Artificial Sequence
  Description of Artificial Sequence: Synthetic oligonucleotide
  Sense strand starting at position 3974 of SEQ ID NO: 1880852
ggaacagaguccuugucac

SEQ ID NO: 1998779 - RNA, 19 nt, Artificial Sequence
  Description of Artificial Sequence: Synthetic oligonucleotide
  Antisense strand to SEQ ID NO: 1998778
gugacaaggacucuguucc

SEQ ID NO: 1998780 - RNA, 19 nt, Artificial Sequence
  Description of Artificial Sequence: Synthetic oligonucleotide
  Sense strand starting at position 163 of SEQ ID NO: 1880851
agagauuacagacgugagu

SEQ ID NO: 1998781 - RNA, 19 nt, Artificial Sequence
  Description of Artificial Sequence: Synthetic oligonucleotide
  Antisense strand to SEQ ID NO: 1998780
acucacgucuguaaucucu

SEQ ID NO: 1998782 - RNA, 19 nt, Artificial Sequence
  Description of Artificial Sequence: Synthetic oligonucleotide
  Sense strand starting at position 867 of SEQ ID NO: 1880851
uaaggcacuuggucaagaa

SEQ ID NO: 1998783 - RNA, 19 nt, Artificial Sequence
  Description of Artificial Sequence: Synthetic oligonucleotide
  Antisense strand to SEQ ID NO: 1998782
uucuugaccaagugccuua

SEQ ID NO: 1998784 - RNA, 19 nt, Artificial Sequence
  Description of Artificial Sequence: Synthetic oligonucleotide
  Sense strand starting at position 917 of SEQ ID NO: 1880851
gcauuaaacuguggacugu

SEQ ID NO: 1998785 - RNA, 19 nt, Artificial Sequence
  Description of Artificial Sequence: Synthetic oligonucleotide
  Antisense strand to SEQ ID NO: 1998784
acaguccacaguuuaaugc

SEQ ID NO: 1998786 - RNA, 19 nt, Artificial Sequence
  Description of Artificial Sequence: Synthetic oligonucleotide
  Sense strand starting at position 926 of SEQ ID NO: 1880851
uguggacuguucgguaagu

SEQ ID NO: 1998787 - RNA, 19 nt, Artificial Sequence
  Description of Artificial Sequence: Synthetic oligonucleotide
  Antisense strand to SEQ ID NO: 1998786
acuuaccgaacaguccaca

SEQ ID NO: 1998788 - RNA, 19 nt, Artificial Sequence
  Description of Artificial Sequence: Synthetic oligonucleotide
  Sense strand starting at position 937 of SEQ ID NO: 1880851
cgguaagugcggagcucua

SEQ ID NO: 1998789 - RNA, 19 nt, Artificial Sequence
  Description of Artificial Sequence: Synthetic oligonucleotide
  Antisense strand to SEQ ID NO: 1998788
uagagcuccgcacuuaccg

SEQ ID NO: 1998790 - RNA, 19 nt, Artificial Sequence
  Description of Artificial Sequence: Synthetic oligonucleotide
  Sense strand starting at position 948 of SEQ ID NO: 1880851
gagcucuagagacgaugaa

SEQ ID NO: 1998791 - RNA, 19 nt, Artificial Sequence
  Description of Artificial Sequence: Synthetic oligonucleotide
  Antisense strand to SEQ ID NO: 1998790
uucaucgucucuagagcuc

SEQ ID NO: 1998792 - RNA, 19 nt, Artificial Sequence
  Description of Artificial Sequence: Synthetic oligonucleotide
  Sense strand starting at position 970 of SEQ ID NO: 1880851
gagagcaucucugcucaga

SEQ ID NO: 1998793 - RNA, 19 nt, Artificial Sequence
  Description of Artificial Sequence: Synthetic oligonucleotide
  Antisense strand to SEQ ID NO: 1998792
ucugagcagagaugcucuc

SEQ ID NO: 1998794 - RNA, 19 nt, Artificial Sequence
  Description of Artificial Sequence: Synthetic oligonucleotide
  Sense strand starting at position 972 of SEQ ID NO: 1880851
gagcaucucugcucagaag

SEQ ID NO: 1998795 - RNA, 19 nt, Artificial Sequence
  Description of Artificial Sequence: Synthetic oligonucleotide
  Antisense strand to SEQ ID NO: 1998794
cuucugagcagagaugcuc

SEQ ID NO: 1998796 - RNA, 19 nt, Artificial Sequence
  Description of Artificial Sequence: Synthetic oligonucleotide
  Sense strand starting at position 973 of SEQ ID NO: 1880851
agcaucucugcucagaaga

SEQ ID NO: 1998797 - RNA, 19 nt, Artificial Sequence
  Description of Artificial Sequence: Synthetic oligonucleotide
  Antisense strand to SEQ ID NO: 1998796
ucuucugagcagagaugcu

SEQ ID NO: 1998798 - RNA, 19 nt, Artificial Sequence
  Description of Artificial Sequence: Synthetic oligonucleotide
  Sense strand starting at position 1273 of SEQ ID NO: 1880851
cgcuaaucauuccaagcaa

SEQ ID NO: 1998799 - RNA, 19 nt, Artificial Sequence
  Description of Artificial Sequence: Synthetic oligonucleotide
  Antisense strand to SEQ ID NO: 1998798
uugcuuggaaugauuagcg

SEQ ID NO: 1998800 - RNA, 19 nt, Artificial Sequence
  Description of Artificial Sequence: Synthetic oligonucleotide
  Sense strand starting at position 1287 of SEQ ID NO: 1880851
agcaaauucugucaugcca

SEQ ID NO: 1998801 - RNA, 19 nt, Artificial Sequence
  Description of Artificial Sequence: Synthetic oligonucleotide
  Antisense strand to SEQ ID NO: 1998800
uggcaugacagaauuugcu

SEQ ID NO: 1998802 - RNA, 19 nt, Artificial Sequence
  Description of Artificial Sequence: Synthetic oligonucleotide
  Sense strand starting at position 1788 of SEQ ID NO: 1880851
cgucgcucgccucagagau

SEQ ID NO: 1998803 - RNA, 19 nt, Artificial Sequence
  Description of Artificial Sequence: Synthetic oligonucleotide
  Antisense strand to SEQ ID NO: 1998802
aucucugaggcgagcgacg

SEQ ID NO: 1998804 - RNA, 19 nt, Artificial Sequence
  Description of Artificial Sequence: Synthetic oligonucleotide
  Sense strand starting at position 1789 of SEQ ID NO: 1880851
gucgcucgccucagagaug

SEQ ID NO: 1998805 - RNA, 19 nt, Artificial Sequence
  Description of Artificial Sequence: Synthetic oligonucleotide
  Antisense strand to SEQ ID NO: 1998804
caucucugaggcgagcgac

SEQ ID NO: 1998806 - RNA, 19 nt, Artificial Sequence
  Description of Artificial Sequence: Synthetic oligonucleotide
  Sense strand starting at position 1792 of SEQ ID NO: 1880851
gcucgccucagagauggaa

SEQ ID NO: 1998807 - RNA, 19 nt, Artificial Sequence
  Description of Artificial Sequence: Synthetic oligonucleotide
  Antisense strand to SEQ ID NO: 1998806
uuccaucucugaggcgagc

SEQ ID NO: 1998808 - RNA, 19 nt, Artificial Sequence
  Description of Artificial Sequence: Synthetic oligonucleotide
  Sense strand starting at position 1829 of SEQ ID NO: 1880851
cgccgaaagucgucaucaa

SEQ ID NO: 1998809 - RNA, 19 nt, Artificial Sequence
  Description of Artificial Sequence: Synthetic oligonucleotide
  Antisense strand to SEQ ID NO: 1998808
uugaugacgacuuucggcg

SEQ ID NO: 1998810 - RNA, 19 nt, Artificial Sequence
  Description of Artificial Sequence: Synthetic oligonucleotide
  Sense strand starting at position 1830 of SEQ ID NO: 1880851
gccgaaagucgucaucaag

SEQ ID NO: 1998811 - RNA, 19 nt, Artificial Sequence
  Description of Artificial Sequence: Synthetic oligonucleotide
  Antisense strand to SEQ ID NO: 1998810
cuugaugacgacuuucggc

SEQ ID NO: 1998812 - RNA, 19 nt, Artificial Sequence
  Description of Artificial Sequence: Synthetic oligonucleotide
  Sense strand starting at position 1986 of SEQ ID NO: 1880851
gggagugguccuuagcuga

SEQ ID NO: 1998813 - RNA, 19 nt, Artificial Sequence
  Description of Artificial Sequence: Synthetic oligonucleotide
  Antisense strand to SEQ ID NO: 1998812
ucagcuaaggaccacuccc

SEQ ID NO: 1998814 - RNA, 19 nt, Artificial Sequence
  Description of Artificial Sequence: Synthetic oligonucleotide
  Sense strand starting at position 2070 of SEQ ID NO: 1880851
gcgcguaagcaguauuguu

SEQ ID NO: 1998815 - RNA, 19 nt, Artificial Sequence
  Description of Artificial Sequence: Synthetic oligonucleotide
  Antisense strand to SEQ ID NO: 1998814
aacaauacugcuuacgcgc

SEQ ID NO: 1998816 - RNA, 19 nt, Artificial Sequence
  Description of Artificial Sequence: Synthetic oligonucleotide
  Sense strand starting at position 2072 of SEQ ID NO: 1880851
gcguaagcaguauuguuga

SEQ ID NO: 1998817 - RNA, 19 nt, Artificial Sequence
  Description of Artificial Sequence: Synthetic oligonucleotide
  Antisense strand to SEQ ID NO: 1998816
ucaacaauacugcuuacgc

SEQ ID NO: 1998818 - RNA, 19 nt, Artificial Sequence
  Description of Artificial Sequence: Synthetic oligonucleotide
  Sense strand starting at position 2077 of SEQ ID NO: 1880851
agcaguauuguugauuagu

SEQ ID NO: 1998819 - RNA, 19 nt, Artificial Sequence
  Description of Artificial Sequence: Synthetic oligonucleotide
  Antisense strand to SEQ ID NO: 1998818
acuaaucaacaauacugcu

SEQ ID NO: 1998820 - RNA, 19 nt, Artificial Sequence
  Description of Artificial Sequence: Synthetic oligonucleotide
  Sense strand starting at position 2162 of SEQ ID NO: 1880851
auugcacgcuuucuugaaa

SEQ ID NO: 1998821 - RNA, 19 nt, Artificial Sequence
  Description of Artificial Sequence: Synthetic oligonucleotide
  Antisense strand to SEQ ID NO: 1998820
uuucaagaaagcgugcaau

SEQ ID NO: 1998822 - RNA, 19 nt, Artificial Sequence
  Description of Artificial Sequence: Synthetic oligonucleotide
  Sense strand starting at position 2165 of SEQ ID NO: 1880851
gcacgcuuucuugaaagag

SEQ ID NO: 1998823 - RNA, 19 nt, Artificial Sequence
  Description of Artificial Sequence: Synthetic oligonucleotide
  Antisense strand to SEQ ID NO: 1998822
cucuuucaagaaagcgugc

SEQ ID NO: 1998824 - RNA, 19 nt, Artificial Sequence
  Description of Artificial Sequence: Synthetic oligonucleotide
  Sense strand starting at position 2169 of SEQ ID NO: 1880851
gcuuucuugaaagaggcau

SEQ ID NO: 1998825 - RNA, 19 nt, Artificial Sequence
  Description of Artificial Sequence: Synthetic oligonucleotide
  Antisense strand to SEQ ID NO: 1998824
augccucuuucaagaaagc

SEQ ID NO: 1998826 - RNA, 19 nt, Artificial Sequence
  Description of Artificial Sequence: Synthetic oligonucleotide
  Sense strand starting at position 3350 of SEQ ID NO: 1880851
cgccuauaaucuuugggac

SEQ ID NO: 1998827 - RNA, 19 nt, Artificial Sequence
  Description of Artificial Sequence: Synthetic oligonucleotide
  Antisense strand to SEQ ID NO: 1998826
gucccaaagauuauaggcg

SEQ ID NO: 1998828 - RNA, 19 nt, Artificial Sequence
  Description of Artificial Sequence: Synthetic oligonucleotide
  Sense strand starting at position 3464 of SEQ ID NO: 1880851
cgaucucuguccuguggua

SEQ ID NO: 1998829 - RNA, 19 nt, Artificial Sequence
  Description of Artificial Sequence: Synthetic oligonucleotide
  Antisense strand to SEQ ID NO: 1998828
uaccacaggacagagaucg

SEQ ID NO: 1998830 - RNA, 19 nt, Artificial Sequence
  Description of Artificial Sequence: Synthetic oligonucleotide
  Sense strand starting at position 3466 of SEQ ID NO: 1880851
aucucuguccugugguaua

SEQ ID NO: 1998831 - RNA, 19 nt, Artificial Sequence
  Description of Artificial Sequence: Synthetic oligonucleotide
  Antisense strand to SEQ ID NO: 1998830
uauaccacaggacagagau

SEQ ID NO: 1998832 - RNA, 19 nt, Artificial Sequence
  Description of Artificial Sequence: Synthetic oligonucleotide
  Sense strand starting at position 3587 of SEQ ID NO: 1880851
agcuuucccucugaugacu

SEQ ID NO: 1998833 - RNA, 19 nt, Artificial Sequence
  Description of Artificial Sequence: Synthetic oligonucleotide
  Antisense strand to SEQ ID NO: 1998832
agucaucagagggaaagcu

SEQ ID NO: 1998834 - RNA, 19 nt, Artificial Sequence
  Description of Artificial Sequence: Synthetic oligonucleotide
  Sense strand starting at position 148 of SEQ ID NO: 1880853
ggaguaagaucuuacuuau

SEQ ID NO: 1998835 - RNA, 19 nt, Artificial Sequence
  Description of Artificial Sequence: Synthetic oligonucleotide
  Antisense strand to SEQ ID NO: 1998834
auaaguaagaucuuacucc

SEQ ID NO: 1998836 - RNA, 19 nt, Artificial Sequence
  Description of Artificial Sequence: Synthetic oligonucleotide
  Sense strand starting at position 214 of SEQ ID NO: 1880853
uagaauggcuuaguggauu

SEQ ID NO: 1998837 - RNA, 19 nt, Artificial Sequence
  Description of Artificial Sequence: Synthetic oligonucleotide
  Antisense strand to SEQ ID NO: 1998836
aauccacuaagccauucua

SEQ ID NO: 1998838 - RNA, 19 nt, Artificial Sequence
  Description of Artificial Sequence: Synthetic oligonucleotide
  Sense strand starting at position 529 of SEQ ID NO: 1880853
auggcuaaauagggagaua

SEQ ID NO: 1998839 - RNA, 19 nt, Artificial Sequence
  Description of Artificial Sequence: Synthetic oligonucleotide
  Antisense strand to SEQ ID NO: 1998838
uaucucccuauuuagccau

SEQ ID NO: 1998840 - RNA, 19 nt, Artificial Sequence
  Description of Artificial Sequence: Synthetic oligonucleotide
  Sense strand starting at position 555 of SEQ ID NO: 1880853
auacuauaauagcuggaua

SEQ ID NO: 1998841 - RNA, 19 nt, Artificial Sequence
  Description of Artificial Sequence: Synthetic oligonucleotide
  Antisense strand to SEQ ID NO: 1998840
uauccagcuauuauaguau

SEQ ID NO: 1998842 - RNA, 19 nt, Artificial Sequence
  Description of Artificial Sequence: Synthetic oligonucleotide
  Sense strand starting at position 557 of SEQ ID NO: 1880853
acuauaauagcuggauacu

SEQ ID NO: 1998843 - RNA, 19 nt, Artificial Sequence
  Description of Artificial Sequence: Synthetic oligonucleotide
  Antisense strand to SEQ ID NO: 1998842
aguauccagcuauuauagu

SEQ ID NO: 1998844 - RNA, 19 nt, Artificial Sequence
  Description of Artificial Sequence: Synthetic oligonucleotide
  Sense strand starting at position 558 of SEQ ID NO: 1880853
cuauaauagcuggauacuu

SEQ ID NO: 1998845 - RNA, 19 nt, Artificial Sequence
  Description of Artificial Sequence: Synthetic oligonucleotide
  Antisense strand to SEQ ID NO: 1998844
aaguauccagcuauuauag

SEQ ID NO: 1998846 - RNA, 19 nt, Artificial Sequence
  Description of Artificial Sequence: Synthetic oligonucleotide
  Sense strand starting at position 731 of SEQ ID NO: 1880853
gcacaugaaucagucucaa

SEQ ID NO: 1998847 - RNA, 19 nt, Artificial Sequence
  Description of Artificial Sequence: Synthetic oligonucleotide
  Antisense strand to SEQ ID NO: 1998846
uugagacugauucaugugc

SEQ ID NO: 1998848 - RNA, 19 nt, Artificial Sequence
  Description of Artificial Sequence: Synthetic oligonucleotide
  Sense strand starting at position 735 of SEQ ID NO: 1880853
augaaucagucucaauugu

SEQ ID NO: 1998849 - RNA, 19 nt, Artificial Sequence
  Description of Artificial Sequence: Synthetic oligonucleotide
  Antisense strand to SEQ ID NO: 1998848
acaauugagacugauucau

SEQ ID NO: 1998850 - RNA, 19 nt, Artificial Sequence
  Description of Artificial Sequence: Synthetic oligonucleotide
  Sense strand starting at position 743 of SEQ ID NO: 1880853
gucucaauuguagaccaca

SEQ ID NO: 1998851 - RNA, 19 nt, Artificial Sequence
  Description of Artificial Sequence: Synthetic oligonucleotide
  Antisense strand to SEQ ID NO: 1998850
uguggucuacaauugagac

SEQ ID NO: 1998852 - RNA, 19 nt, Artificial Sequence
  Description of Artificial Sequence: Synthetic oligonucleotide
  Sense strand starting at position 1841 of SEQ ID NO: 1880853
gcauccucccuuuauguuu

SEQ ID NO: 1998853 - RNA, 19 nt, Artificial Sequence
  Description of Artificial Sequence: Synthetic oligonucleotide
  Antisense strand to SEQ ID NO: 1998852
aaacauaaagggaggaugc

SEQ ID NO: 1998854 - RNA, 19 nt, Artificial Sequence
  Description of Artificial Sequence: Synthetic oligonucleotide
  Sense strand starting at position 2012 of SEQ ID NO: 1880853
guccuuucuucccuuugau

SEQ ID NO: 1998855 - RNA, 19 nt, Artificial Sequence
  Description of Artificial Sequence: Synthetic oligonucleotide
  Antisense strand to SEQ ID NO: 1998854
aucaaagggaagaaaggac

SEQ ID NO: 1998856 - RNA, 19 nt, Artificial Sequence
  Description of Artificial Sequence: Synthetic oligonucleotide
  Sense strand starting at position 2465 of SEQ ID NO: 1880853
gaaggaagcuuauagguau

SEQ ID NO: 1998857 - RNA, 19 nt, Artificial Sequence
  Description of Artificial Sequence: Synthetic oligonucleotide
  Antisense strand to SEQ ID NO: 1998856
auaccuauaagcuuccuuc

SEQ ID NO: 1998858 - RNA, 19 nt, Artificial Sequence
  Description of Artificial Sequence: Synthetic oligonucleotide
  Sense strand starting at position 2468 of SEQ ID NO: 1880853
ggaagcuuauagguauaaa

SEQ ID NO: 1998859 - RNA, 19 nt, Artificial Sequence
  Description of Artificial Sequence: Synthetic oligonucleotide
  Antisense strand to SEQ ID NO: 1998858
uuuauaccuauaagcuucc

SEQ ID NO: 1998860 - RNA, 19 nt, Artificial Sequence
  Description of Artificial Sequence: Synthetic oligonucleotide
  Sense strand starting at position 2478 of SEQ ID NO: 1880853
agguauaaaugccuacaua

SEQ ID NO: 1998861 - RNA, 19 nt, Artificial Sequence
  Description of Artificial Sequence: Synthetic oligonucleotide
  Antisense strand to SEQ ID NO: 1998860
uauguaggcauuuauaccu

SEQ ID NO: 1998862 - RNA, 19 nt, Artificial Sequence
  Description of Artificial Sequence: Synthetic oligonucleotide
  Sense strand starting at position 2479 of SEQ ID NO: 1880853
gguauaaaugccuacauaa

SEQ ID NO: 1998863 - RNA, 19 nt, Artificial Sequence
  Description of Artificial Sequence: Synthetic oligonucleotide
  Antisense strand to SEQ ID NO: 1998862
uuauguaggcauuuauacc

SEQ ID NO: 1998864 - RNA, 19 nt, Artificial Sequence
  Description of Artificial Sequence: Synthetic oligonucleotide
  Sense strand starting at position 2821 of SEQ ID NO: 1880853
aaagaaucguuaguagcua

SEQ ID NO: 1998865 - RNA, 19 nt, Artificial Sequence
  Description of Artificial Sequence: Synthetic oligonucleotide
  Antisense strand to SEQ ID NO: 1998864
uagcuacuaacgauucuuu

SEQ ID NO: 1998866 - RNA, 19 nt, Artificial Sequence
  Description of Artificial Sequence: Synthetic oligonucleotide
  Sense strand starting at position 2822 of SEQ ID NO: 1880853
aagaaucguuaguagcuau

SEQ ID NO: 1998867 - RNA, 19 nt, Artificial Sequence
  Description of Artificial Sequence: Synthetic oligonucleotide
  Antisense strand to SEQ ID NO: 1998866
auagcuacuaacgauucuu

SEQ ID NO: 1998868 - RNA, 19 nt, Artificial Sequence
  Description of Artificial Sequence: Synthetic oligonucleotide
  Sense strand starting at position 2825 of SEQ ID NO: 1880853
aaucguuaguagcuauuau

SEQ ID NO: 1998869 - RNA, 19 nt, Artificial Sequence
  Description of Artificial Sequence: Synthetic oligonucleotide
  Antisense strand to SEQ ID NO: 1998868
auaauagcuacuaacgauu

SEQ ID NO: 1998870 - RNA, 19 nt, Artificial Sequence
  Description of Artificial Sequence: Synthetic oligonucleotide
  Sense strand starting at position 2832 of SEQ ID NO: 1880853
aguagcuauuaugcacaaa

SEQ ID NO: 1998871 - RNA, 19 nt, Artificial Sequence
  Description of Artificial Sequence: Synthetic oligonucleotide
  Antisense strand to SEQ ID NO: 1998870
uuugugcauaauagcuacu

SEQ ID NO: 1998872 - RNA, 19 nt, Artificial Sequence
  Description of Artificial Sequence: Synthetic oligonucleotide
  Sense strand starting at position 3117 of SEQ ID NO: 1880853
cuaugaggccaguaauacu

SEQ ID NO: 1998873 - RNA, 19 nt, Artificial Sequence
  Description of Artificial Sequence: Synthetic oligonucleotide
  Antisense strand to SEQ ID NO: 1998872
aguauuacuggccucauag

SEQ ID NO: 1998874 - RNA, 19 nt, Artificial Sequence
  Description of Artificial Sequence: Synthetic oligonucleotide
  Sense strand starting at position 3222 of SEQ ID NO: 1880853
ucgacaauauaccagcaau

SEQ ID NO: 1998875 - RNA, 19 nt, Artificial Sequence
  Description of Artificial Sequence: Synthetic oligonucleotide
  Antisense strand to SEQ ID NO: 1998874
auugcugguauauugucga

SEQ ID NO: 1998876 - RNA, 19 nt, Artificial Sequence
  Description of Artificial Sequence: Synthetic oligonucleotide
  Sense strand starting at position 3284 of SEQ ID NO: 1880853
gauguaucccagggaugca

SEQ ID NO: 1998877 - RNA, 19 nt, Artificial Sequence
  Description of Artificial Sequence: Synthetic oligonucleotide
  Antisense strand to SEQ ID NO: 1998876
ugcaucccugggauacauc

SEQ ID NO: 1998878 - RNA, 19 nt, Artificial Sequence
  Description of Artificial Sequence: Synthetic oligonucleotide
  Sense strand starting at position 3362 of SEQ ID NO: 1880853
acaagaaccuuagggucau

SEQ ID NO: 1998879 - RNA, 19 nt, Artificial Sequence
  Description of Artificial Sequence: Synthetic oligonucleotide
  Antisense strand to SEQ ID NO: 1998878
augacccuaagguucuugu

SEQ ID NO: 1998880 - RNA, 19 nt, Artificial Sequence
  Description of Artificial Sequence: Synthetic oligonucleotide
  Sense strand starting at position 3363 of SEQ ID NO: 1880853
caagaaccuuagggucauu

SEQ ID NO: 1998881 - RNA, 19 nt, Artificial Sequence
  Description of Artificial Sequence: Synthetic oligonucleotide
  Antisense strand to SEQ ID NO: 1998880
aaugacccuaagguucuug

SEQ ID NO: 1998882 - RNA, 19 nt, Artificial Sequence
  Description of Artificial Sequence: Synthetic oligonucleotide
  Sense strand starting at position 3529 of SEQ ID NO: 1880853
ggaguauugacucacgcua

SEQ ID NO: 1998883 - RNA, 19 nt, Artificial Sequence
  Description of Artificial Sequence: Synthetic oligonucleotide
  Antisense strand to SEQ ID NO: 1998882
uagcgugagucaauacucc

SEQ ID NO: 1998884 - RNA, 19 nt, Artificial Sequence
  Description of Artificial Sequence: Synthetic oligonucleotide
  Sense strand starting at position 3668 of SEQ ID NO: 1880853
cccgcaagcccuugguaaa

SEQ ID NO: 1998885 - RNA, 19 nt, Artificial Sequence
  Description of Artificial Sequence: Synthetic oligonucleotide
  Antisense strand to SEQ ID NO: 1998884
uuuaccaagggcuugcggg

SEQ ID NO: 1998886 - RNA, 19 nt, Artificial Sequence
  Description of Artificial Sequence: Synthetic oligonucleotide
  Sense strand starting at position 3680 of SEQ ID NO: 1880853
ugguaaaccacugguguga

SEQ ID NO: 1998887 - RNA, 19 nt, Artificial Sequence
  Description of Artificial Sequence: Synthetic oligonucleotide
  Antisense strand to SEQ ID NO: 1998886
ucacaccagugguuuacca

SEQ ID NO: 1998888 - RNA, 19 nt, Artificial Sequence
  Description of Artificial Sequence: Synthetic oligonucleotide
  Sense strand starting at position 3682 of SEQ ID NO: 1880853
guaaaccacuggugugauu

SEQ ID NO: 1998889 - RNA, 19 nt, Artificial Sequence
  Description of Artificial Sequence: Synthetic oligonucleotide
  Antisense strand to SEQ ID NO: 1998888
aaucacaccagugguuuac

SEQ ID NO: 1998890 - RNA, 19 nt, Artificial Sequence
  Description of Artificial Sequence: Synthetic oligonucleotide
  Sense strand starting at position 3693 of SEQ ID NO: 1880853
gugugauuccaagagucca

SEQ ID NO: 1998891 - RNA, 19 nt, Artificial Sequence
  Description of Artificial Sequence: Synthetic oligonucleotide
  Antisense strand to SEQ ID NO: 1998890
uggacucuuggaaucacac

SEQ ID NO: 1998892 - RNA, 19 nt, Artificial Sequence
  Description of Artificial Sequence: Synthetic oligonucleotide
  Sense strand starting at position 3724 of SEQ ID NO: 1880853
cuuggaguccaaugucaga

SEQ ID NO: 1998893 - RNA, 19 nt, Artificial Sequence
  Description of Artificial Sequence: Synthetic oligonucleotide
  Antisense strand to SEQ ID NO: 1998892
ucugacauuggacuccaag

SEQ ID NO: 1998894 - RNA, 19 nt, Artificial Sequence
  Description of Artificial Sequence: Synthetic oligonucleotide
  Sense strand starting at position 3745 of SEQ ID NO: 1880853
gcagaaagcauccaguaug

SEQ ID NO: 1998895 - RNA, 19 nt, Artificial Sequence
  Description of Artificial Sequence: Synthetic oligonucleotide
  Antisense strand to SEQ ID NO: 1998894
cauacuggaugcuuucugc

SEQ ID NO: 1998896 - RNA, 19 nt, Artificial Sequence
  Description of Artificial Sequence: Synthetic oligonucleotide
  Sense strand starting at position 3821 of SEQ ID NO: 1880853
gcuuuauucuaguugugcu

SEQ ID NO: 1998897 - RNA, 19 nt, Artificial Sequence
  Description of Artificial Sequence: Synthetic oligonucleotide
  Antisense strand to SEQ ID NO: 1998896
agcacaacuagaauaaagc

SEQ ID NO: 1998898 - RNA, 19 nt, Artificial Sequence
  Description of Artificial Sequence: Synthetic oligonucleotide
  Sense strand starting at position 63 of SEQ ID NO: 1880854
guuaguauuggauacugau

SEQ ID NO: 1998899 - RNA, 19 nt, Artificial Sequence
  Description of Artificial Sequence: Synthetic oligonucleotide
  Antisense strand to SEQ ID NO: 1998898
aucaguauccaauacuaac

SEQ ID NO: 1998900 - RNA, 19 nt, Artificial Sequence
  Description of Artificial Sequence: Synthetic oligonucleotide
  Sense strand starting at position 590 of SEQ ID NO: 1880854
uuccucauggccugaguaa

SEQ ID NO: 1998901 - RNA, 19 nt, Artificial Sequence
  Description of Artificial Sequence: Synthetic oligonucleotide
  Antisense strand to SEQ ID NO: 1998900
uuacucaggccaugaggaa

SEQ ID NO: 1998902 - RNA, 19 nt, Artificial Sequence
  Description of Artificial Sequence: Synthetic oligonucleotide
  Sense strand starting at position 591 of SEQ ID NO: 1880854
uccucauggccugaguaaa

SEQ ID NO: 1998903 - RNA, 19 nt, Artificial Sequence
  Description of Artificial Sequence: Synthetic oligonucleotide
  Antisense strand to SEQ ID NO: 1998902
uuuacucaggccaugagga

SEQ ID NO: 1998904 - RNA, 19 nt, Artificial Sequence
  Description of Artificial Sequence: Synthetic oligonucleotide
  Sense strand starting at position 688 of SEQ ID NO: 1880854
uuuaauggcucucugggaa

SEQ ID NO: 1998905 - RNA, 19 nt, Artificial Sequence
  Description of Artificial Sequence: Synthetic oligonucleotide
  Antisense strand to SEQ ID NO: 1998904
uucccagagagccauuaaa

SEQ ID NO: 1998906 - RNA, 19 nt, Artificial Sequence
  Description of Artificial Sequence: Synthetic oligonucleotide
  Sense strand starting at position 1064 of SEQ ID NO: 1880854
uggauccugcaaugagaau

SEQ ID NO: 1998907 - RNA, 19 nt, Artificial Sequence
  Description of Artificial Sequence: Synthetic oligonucleotide
  Antisense strand to SEQ ID NO: 1998906
auucucauugcaggaucca

SEQ ID NO: 1998908 - RNA, 19 nt, Artificial Sequence
  Description of Artificial Sequence: Synthetic oligonucleotide
  Sense strand starting at position 1079 of SEQ ID NO: 1880854
gaauaaaguccauguaagg

SEQ ID NO: 1998909 - RNA, 19 nt, Artificial Sequence
  Description of Artificial Sequence: Synthetic oligonucleotide
  Antisense strand to SEQ ID NO: 1998908
ccuuacauggacuuuauuc

SEQ ID NO: 1998910 - RNA, 19 nt, Artificial Sequence
  Description of Artificial Sequence: Synthetic oligonucleotide
  Sense strand starting at position 1156 of SEQ ID NO: 1880854
gugacaagugugcagagua

SEQ ID NO: 1998911 - RNA, 19 nt, Artificial Sequence
  Description of Artificial Sequence: Synthetic oligonucleotide
  Antisense strand to SEQ ID NO: 1998910
uacucugcacacuugucac

SEQ ID NO: 1998912 - RNA, 19 nt, Artificial Sequence
  Description of Artificial Sequence: Synthetic oligonucleotide
  Sense strand starting at position 1169 of SEQ ID NO: 1880854
agaguaucucaagauucgu

SEQ ID NO: 1998913 - RNA, 19 nt, Artificial Sequence
  Description of Artificial Sequence: Synthetic oligonucleotide
  Antisense strand to SEQ ID NO: 1998912
acgaaucuugagauacucu

SEQ ID NO: 1998914 - RNA, 19 nt, Artificial Sequence
  Description of Artificial Sequence: Synthetic oligonucleotide
  Sense strand starting at position 1223 of SEQ ID NO: 1880854
ccuggaaugucuuucuauc

SEQ ID NO: 1998915 - RNA, 19 nt, Artificial Sequence
  Description of Artificial Sequence: Synthetic oligonucleotide
  Antisense strand to SEQ ID NO: 1998914
gauagaaagacauuccagg

SEQ ID NO: 1998916 - RNA, 19 nt, Artificial Sequence
  Description of Artificial Sequence: Synthetic oligonucleotide
  Sense strand starting at position 1225 of SEQ ID NO: 1880854
uggaaugucuuucuaucuu

SEQ ID NO: 1998917 - RNA, 19 nt, Artificial Sequence
  Description of Artificial Sequence: Synthetic oligonucleotide
  Antisense strand to SEQ ID NO: 1998916
aagauagaaagacauucca

SEQ ID NO: 1998918 - RNA, 19 nt, Artificial Sequence
  Description of Artificial Sequence: Synthetic oligonucleotide
  Sense strand starting at position 1386 of SEQ ID NO: 1880854
gguacauaugcacaagcuu

SEQ ID NO: 1998919 - RNA, 19 nt, Artificial Sequence
  Description of Artificial Sequence: Synthetic oligonucleotide
  Antisense strand to SEQ ID NO: 1998918
aagcuugugcauauguacc

SEQ ID NO: 1998920 - RNA, 19 nt, Artificial Sequence
  Description of Artificial Sequence: Synthetic oligonucleotide
  Sense strand starting at position 1420 of SEQ ID NO: 1880854
gcagcaugacaacaucauu

SEQ ID NO: 1998921 - RNA, 19 nt, Artificial Sequence
  Description of Artificial Sequence: Synthetic oligonucleotide
  Antisense strand to SEQ ID NO: 1998920
aaugauguugucaugcugc

SEQ ID NO: 1998922 - RNA, 19 nt, Artificial Sequence
  Description of Artificial Sequence: Synthetic oligonucleotide
  Sense strand starting at position 1527 of SEQ ID NO: 1880854
aggguucaguuacucgaua

SEQ ID NO: 1998923 - RNA, 19 nt, Artificial Sequence
  Description of Artificial Sequence: Synthetic oligonucleotide
  Antisense strand to SEQ ID NO: 1998922
uaucgaguaacugaacccu

SEQ ID NO: 1998924 - RNA, 19 nt, Artificial Sequence
  Description of Artificial Sequence: Synthetic oligonucleotide
  Sense strand starting at position 1659 of SEQ ID NO: 1880854
uucuucugugaaugucaaa

SEQ ID NO: 1998925 - RNA, 19 nt, Artificial Sequence
  Description of Artificial Sequence: Synthetic oligonucleotide
  Antisense strand to SEQ ID NO: 1998924
uuugacauucacagaagaa

SEQ ID NO: 1998926 - RNA, 19 nt, Artificial Sequence
  Description of Artificial Sequence: Synthetic oligonucleotide
  Sense strand starting at position 1680 of SEQ ID NO: 1880854
agaggagucuuguuucuau

SEQ ID NO: 1998927 - RNA, 19 nt, Artificial Sequence
  Description of Artificial Sequence: Synthetic oligonucleotide
  Antisense strand to SEQ ID NO: 1998926
auagaaacaagacuccucu

SEQ ID NO: 1998928 - RNA, 19 nt, Artificial Sequence
  Description of Artificial Sequence: Synthetic oligonucleotide
  Sense strand starting at position 1836 of SEQ ID NO: 1880854
ucuuuaacuguugauguau

SEQ ID NO: 1998929 - RNA, 19 nt, Artificial Sequence
  Description of Artificial Sequence: Synthetic oligonucleotide
  Antisense strand to SEQ ID NO: 1998928
auacaucaacaguuaaaga

SEQ ID NO: 1998930 - RNA, 19 nt, Artificial Sequence
  Description of Artificial Sequence: Synthetic oligonucleotide
  Sense strand starting at position 1998 of SEQ ID NO: 1880854
uuggaagagucuuauuucu

SEQ ID NO: 1998931 - RNA, 19 nt, Artificial Sequence
  Description of Artificial Sequence: Synthetic oligonucleotide
  Antisense strand to SEQ ID NO: 1998930
agaaauaagacucuuccaa

SEQ ID NO: 1998932 - RNA, 19 nt, Artificial Sequence
  Description of Artificial Sequence: Synthetic oligonucleotide
  Sense strand starting at position 2158 of SEQ ID NO: 1880854
uugccagccauuugcgaua

SEQ ID NO: 1998933 - RNA, 19 nt, Artificial Sequence
  Description of Artificial Sequence: Synthetic oligonucleotide
  Antisense strand to SEQ ID NO: 1998932
uaucgcaaauggcuggcaa

SEQ ID NO: 1998934 - RNA, 19 nt, Artificial Sequence
  Description of Artificial Sequence: Synthetic oligonucleotide
  Sense strand starting at position 2418 of SEQ ID NO: 1880854
cgaacugaccucggaugau

SEQ ID NO: 1998935 - RNA, 19 nt, Artificial Sequence
  Description of Artificial Sequence: Synthetic oligonucleotide
  Antisense strand to SEQ ID NO: 1998934
aucauccgaggucaguucg

SEQ ID NO: 1998936 - RNA, 19 nt, Artificial Sequence
  Description of Artificial Sequence: Synthetic oligonucleotide
  Sense strand starting at position 2491 of SEQ ID NO: 1880854
cggccacugccauacaauu

SEQ ID NO: 1998937 - RNA, 19 nt, Artificial Sequence
  Description of Artificial Sequence: Synthetic oligonucleotide
  Antisense strand to SEQ ID NO: 1998936
aauuguauggcaguggccg

SEQ ID NO: 1998938 - RNA, 19 nt, Artificial Sequence
  Description of Artificial Sequence: Synthetic oligonucleotide
  Sense strand starting at position 2523 of SEQ ID NO: 1880854
ccuccuguuccucaaggaa

SEQ ID NO: 1998939 - RNA, 19 nt, Artificial Sequence
  Description of Artificial Sequence: Synthetic oligonucleotide
  Antisense strand to SEQ ID NO: 1998938
uuccuugaggaacaggagg

SEQ ID NO: 1998940 - RNA, 19 nt, Artificial Sequence
  Description of Artificial Sequence: Synthetic oligonucleotide
  Sense strand starting at position 2600 of SEQ ID NO: 1880854
acuucucuguuguccagaa

SEQ ID NO: 1998941 - RNA, 19 nt, Artificial Sequence
  Description of Artificial Sequence: Synthetic oligonucleotide
  Antisense strand to SEQ ID NO: 1998940
uucuggacaacagagaagu

SEQ ID NO: 1998942 - RNA, 19 nt, Artificial Sequence
  Description of Artificial Sequence: Synthetic oligonucleotide
  Sense strand starting at position 2602 of SEQ ID NO: 1880854
uucucuguuguccagaaua

SEQ ID NO: 1998943 - RNA, 19 nt, Artificial Sequence
  Description of Artificial Sequence: Synthetic oligonucleotide
  Antisense strand to SEQ ID NO: 1998942
uauucuggacaacagagaa

SEQ ID NO: 1998944 - RNA, 19 nt, Artificial Sequence
  Description of Artificial Sequence: Synthetic oligonucleotide
  Sense strand starting at position 2604 of SEQ ID NO: 1880854
cucuguuguccagaauaac

SEQ ID NO: 1998945 - RNA, 19 nt, Artificial Sequence
  Description of Artificial Sequence: Synthetic oligonucleotide
  Antisense strand to SEQ ID NO: 1998944
guuauucuggacaacagag

SEQ ID NO: 1998946 - RNA, 19 nt, Artificial Sequence
  Description of Artificial Sequence: Synthetic oligonucleotide
  Sense strand starting at position 2799 of SEQ ID NO: 1880854
gggaaugggaucugucagu

SEQ ID NO: 1998947 - RNA, 19 nt, Artificial Sequence
  Description of Artificial Sequence: Synthetic oligonucleotide
  Antisense strand to SEQ ID NO: 1998946
acugacagaucccauuccc

SEQ ID NO: 1998948 - RNA, 19 nt, Artificial Sequence
  Description of Artificial Sequence: Synthetic oligonucleotide
  Sense strand starting at position 2804 of SEQ ID NO: 1880854
ugggaucugucagucuaga

SEQ ID NO: 1998949 - RNA, 19 nt, Artificial Sequence
  Description of Artificial Sequence: Synthetic oligonucleotide
  Antisense strand to SEQ ID NO: 1998948
ucuagacugacagauccca

SEQ ID NO: 1998950 - RNA, 19 nt, Artificial Sequence
  Description of Artificial Sequence: Synthetic oligonucleotide
  Sense strand starting at position 2914 of SEQ ID NO: 1880854
accuuccaggucuguuuaa

SEQ ID NO: 1998951 - RNA, 19 nt, Artificial Sequence
  Description of Artificial Sequence: Synthetic oligonucleotide
  Antisense strand to SEQ ID NO: 1998950
uuaaacagaccuggaaggu

SEQ ID NO: 1998952 - RNA, 19 nt, Artificial Sequence
  Description of Artificial Sequence: Synthetic oligonucleotide
  Sense strand starting at position 2957 of SEQ ID NO: 1880854
acaggaugccauuguuacu

SEQ ID NO: 1998953 - RNA, 19 nt, Artificial Sequence
  Description of Artificial Sequence: Synthetic oligonucleotide
  Antisense strand to SEQ ID NO: 1998952
aguaacaauggcauccugu

SEQ ID NO: 1998954 - RNA, 19 nt, Artificial Sequence
  Description of Artificial Sequence: Synthetic oligonucleotide
  Sense strand starting at position 2990 of SEQ ID NO: 1880854
uaggcuuggugggcaaaua

SEQ ID NO: 1998955 - RNA, 19 nt, Artificial Sequence
  Description of Artificial Sequence: Synthetic oligonucleotide
  Antisense strand to SEQ ID NO: 1998954
uauuugcccaccaagccua

SEQ ID NO: 1998956 - RNA, 19 nt, Artificial Sequence
  Description of Artificial Sequence: Synthetic oligonucleotide
  Sense strand starting at position 3071 of SEQ ID NO: 1880854
gcgaauaugcaaggacaau

SEQ ID NO: 1998957 - RNA, 19 nt, Artificial Sequence
  Description of Artificial Sequence: Synthetic oligonucleotide
  Antisense strand to SEQ ID NO: 1998956
auuguccuugcauauucgc

SEQ ID NO: 1998958 - RNA, 19 nt, Artificial Sequence
  Description of Artificial Sequence: Synthetic oligonucleotide
  Sense strand starting at position 3503 of SEQ ID NO: 1880854
gugugaaccuguuucuaag

SEQ ID NO: 1998959 - RNA, 19 nt, Artificial Sequence
  Description of Artificial Sequence: Synthetic oligonucleotide
  Antisense strand to SEQ ID NO: 1998958
cuuagaaacagguucacac

SEQ ID NO: 1998960 - RNA, 19 nt, Artificial Sequence
  Description of Artificial Sequence: Synthetic oligonucleotide
  Sense strand starting at position 3546 of SEQ ID NO: 1880854
aagauuaucagguggcagu

SEQ ID NO: 1998961 - RNA, 19 nt, Artificial Sequence
  Description of Artificial Sequence: Synthetic oligonucleotide
  Antisense strand to SEQ ID NO: 1998960
acugccaccugauaaucuu

SEQ ID NO: 1998962 - RNA, 19 nt, Artificial Sequence
  Description of Artificial Sequence: Synthetic oligonucleotide
  Sense strand starting at position 3547 of SEQ ID NO: 1880854
agauuaucagguggcaguu

SEQ ID NO: 1998963 - RNA, 19 nt, Artificial Sequence
  Description of Artificial Sequence: Synthetic oligonucleotide
  Antisense strand to SEQ ID NO: 1998962
aacugccaccugauaaucu

SEQ ID NO: 1998964 - RNA, 19 nt, Artificial Sequence
  Description of Artificial Sequence: Synthetic oligonucleotide
  Sense strand starting at position 3614 of SEQ ID NO: 1880854
ugacuauuccuugauccug

SEQ ID NO: 1998965 - RNA, 19 nt, Artificial Sequence
  Description of Artificial Sequence: Synthetic oligonucleotide
  Antisense strand to SEQ ID NO: 1998964
caggaucaaggaauaguca

SEQ ID NO: 1998966 - RNA, 19 nt, Artificial Sequence
  Description of Artificial Sequence: Synthetic oligonucleotide
  Sense strand starting at position 3674 of SEQ ID NO: 1880854
auagcuacacuguaggaau

SEQ ID NO: 1998967 - RNA, 19 nt, Artificial Sequence
  Description of Artificial Sequence: Synthetic oligonucleotide
  Antisense strand to SEQ ID NO: 1998966
auuccuacaguguagcuau

SEQ ID NO: 1998968 - RNA, 19 nt, Artificial Sequence
  Description of Artificial Sequence: Synthetic oligonucleotide
  Sense strand starting at position 3693 of SEQ ID NO: 1880854
ggugaugugguuagcuuga

SEQ ID NO: 1998969 - RNA, 19 nt, Artificial Sequence
  Description of Artificial Sequence: Synthetic oligonucleotide
  Antisense strand to SEQ ID NO: 1998968
ucaagcuaaccacaucacc

SEQ ID NO: 1998970 - RNA, 19 nt, Artificial Sequence
  Description of Artificial Sequence: Synthetic oligonucleotide
  Sense strand starting at position 3698 of SEQ ID NO: 1880854
ugugguuagcuugaagaag

SEQ ID NO: 1998971 - RNA, 19 nt, Artificial Sequence
  Description of Artificial Sequence: Synthetic oligonucleotide
  Antisense strand to SEQ ID NO: 1998970
cuucuucaagcuaaccaca

SEQ ID NO: 1998972 - RNA, 19 nt, Artificial Sequence
  Description of Artificial Sequence: Synthetic oligonucleotide
  Sense strand starting at position 3777 of SEQ ID NO: 1880854
ccagacuuuguuuacuuga

SEQ ID NO: 1998973 - RNA, 19 nt, Artificial Sequence
  Description of Artificial Sequence: Synthetic oligonucleotide
  Antisense strand to SEQ ID NO: 1998972
ucaaguaaacaaagucugg

SEQ ID NO: 1998974 - RNA, 19 nt, Artificial Sequence
  Description of Artificial Sequence: Synthetic oligonucleotide
  Sense strand starting at position 3779 of SEQ ID NO: 1880854
agacuuuguuuacuugaga

SEQ ID NO: 1998975 - RNA, 19 nt, Artificial Sequence
  Description of Artificial Sequence: Synthetic oligonucleotide
  Antisense strand to SEQ ID NO: 1998974
ucucaaguaaacaaagucu

SEQ ID NO: 1998976 - RNA, 19 nt, Artificial Sequence
  Description of Artificial Sequence: Synthetic oligonucleotide
  Sense strand starting at position 3780 of SEQ ID NO: 1880854
gacuuuguuuacuugagag

SEQ ID NO: 1998977 - RNA, 19 nt, Artificial Sequence
  Description of Artificial Sequence: Synthetic oligonucleotide
  Antisense strand to SEQ ID NO: 1998976
cucucaaguaaacaaaguc

SEQ ID NO: 1998978 - RNA, 19 nt, Artificial Sequence
  Description of Artificial Sequence: Synthetic oligonucleotide
  Sense strand starting at position 412 of SEQ ID NO: 1880855
aacgguuuccaauacuuga

SEQ ID NO: 1998979 - RNA, 19 nt, Artificial Sequence
  Description of Artificial Sequence: Synthetic oligonucleotide
  Antisense strand to SEQ ID NO: 1998978
ucaaguauuggaaaccguu

SEQ ID NO: 1998980 - RNA, 19 nt, Artificial Sequence
  Description of Artificial Sequence: Synthetic oligonucleotide
  Sense strand starting at position 581 of SEQ ID NO: 1880855
gggaaccaguuaccuauau

SEQ ID NO: 1998981 - RNA, 19 nt, Artificial Sequence
  Description of Artificial Sequence: Synthetic oligonucleotide
  Antisense strand to SEQ ID NO: 1998980
auauagguaacugguuccc

SEQ ID NO: 1998982 - RNA, 19 nt, Artificial Sequence
  Description of Artificial Sequence: Synthetic oligonucleotide
  Sense strand starting at position 582 of SEQ ID NO: 1880855
ggaaccaguuaccuauaua

SEQ ID NO: 1998983 - RNA, 19 nt, Artificial Sequence
  Description of Artificial Sequence: Synthetic oligonucleotide
  Antisense strand to SEQ ID NO: 1998982
uauauagguaacugguucc

SEQ ID NO: 1998984 - RNA, 19 nt, Artificial Sequence
  Description of Artificial Sequence: Synthetic oligonucleotide
  Sense strand starting at position 658 of SEQ ID NO: 1880855
guuucuuuacaucaugagu

SEQ ID NO: 1998985 - RNA, 19 nt, Artificial Sequence
  Description of Artificial Sequence: Synthetic oligonucleotide
  Antisense strand to SEQ ID NO: 1998984
acucaugauguaaagaaac

SEQ ID NO: 1998986 - RNA, 19 nt, Artificial Sequence
  Description of Artificial Sequence: Synthetic oligonucleotide
  Sense strand starting at position 661 of SEQ ID NO: 1880855
ucuuuacaucaugagucau

SEQ ID NO: 1998987 - RNA, 19 nt, Artificial Sequence
  Description of Artificial Sequence: Synthetic oligonucleotide
  Antisense strand to SEQ ID NO: 1998986
augacucaugauguaaaga

SEQ ID NO: 1998988 - RNA, 19 nt, Artificial Sequence
  Description of Artificial Sequence: Synthetic oligonucleotide
  Sense strand starting at position 663 of SEQ ID NO: 1880855
uuuacaucaugagucauua

SEQ ID NO: 1998989 - RNA, 19 nt, Artificial Sequence
  Description of Artificial Sequence: Synthetic oligonucleotide
  Antisense strand to SEQ ID NO: 1998988
uaaugacucaugauguaaa

SEQ ID NO: 1998990 - RNA, 19 nt, Artificial Sequence
  Description of Artificial Sequence: Synthetic oligonucleotide
  Sense strand starting at position 696 of SEQ ID NO: 1880855
ccuguuaaguaguuguaag

SEQ ID NO: 1998991 - RNA, 19 nt, Artificial Sequence
  Description of Artificial Sequence: Synthetic oligonucleotide
  Antisense strand to SEQ ID NO: 1998990
cuuacaacuacuuaacagg

SEQ ID NO: 1998992 - RNA, 19 nt, Artificial Sequence
  Description of Artificial Sequence: Synthetic oligonucleotide
  Sense strand starting at position 704 of SEQ ID NO: 1880855
guaguuguaagucaugcca

SEQ ID NO: 1998993 - RNA, 19 nt, Artificial Sequence
  Description of Artificial Sequence: Synthetic oligonucleotide
  Antisense strand to SEQ ID NO: 1998992
uggcaugacuuacaacuac

SEQ ID NO: 1998994 - RNA, 19 nt, Artificial Sequence
  Description of Artificial Sequence: Synthetic oligonucleotide
  Sense strand starting at position 785 of SEQ ID NO: 1880855
ucaaguucccagugcaaag

SEQ ID NO: 1998995 - RNA, 19 nt, Artificial Sequence
  Description of Artificial Sequence: Synthetic oligonucleotide
  Antisense strand to SEQ ID NO: 1998994
cuuugcacugggaacuuga

SEQ ID NO: 1998996 - RNA, 19 nt, Artificial Sequence
  Description of Artificial Sequence: Synthetic oligonucleotide
  Sense strand starting at position 799 of SEQ ID NO: 1880855
caaagaugcuagguuacaa

SEQ ID NO: 1998997 - RNA, 19 nt, Artificial Sequence
  Description of Artificial Sequence: Synthetic oligonucleotide
  Antisense strand to SEQ ID NO: 1998996
uuguaaccuagcaucuuug

SEQ ID NO: 1998998 - RNA, 19 nt, Artificial Sequence
  Description of Artificial Sequence: Synthetic oligonucleotide
  Sense strand starting at position 844 of SEQ ID NO: 1880855
ggacaucacaaguggguaa

SEQ ID NO: 1998999 - RNA, 19 nt, Artificial Sequence
  Description of Artificial Sequence: Synthetic oligonucleotide
  Antisense strand to SEQ ID NO: 1998998
uuacccacuugugaugucc

SEQ ID NO: 1999000 - RNA, 19 nt, Artificial Sequence
  Description of Artificial Sequence: Synthetic oligonucleotide
  Sense strand starting at position 1538 of SEQ ID NO: 1880855
ucuuguaggaaagguugaa

SEQ ID NO: 1999001 - RNA, 19 nt, Artificial Sequence
  Description of Artificial Sequence: Synthetic oligonucleotide
  Antisense strand to SEQ ID NO: 1999000
uucaaccuuuccuacaaga

SEQ ID NO: 1999002 - RNA, 19 nt, Artificial Sequence
  Description of Artificial Sequence: Synthetic oligonucleotide
  Sense strand starting at position 1551 of SEQ ID NO: 1880855
guugaaacuguaggcaaau

SEQ ID NO: 1999003 - RNA, 19 nt, Artificial Sequence
  Description of Artificial Sequence: Synthetic oligonucleotide
  Antisense strand to SEQ ID NO: 1999002
auuugccuacaguuucaac

SEQ ID NO: 1999004 - RNA, 19 nt, Artificial Sequence
  Description of Artificial Sequence: Synthetic oligonucleotide
  Sense strand starting at position 1562 of SEQ ID NO: 1880855
aggcaaauuccagauguua

SEQ ID NO: 1999005 - RNA, 19 nt, Artificial Sequence
  Description of Artificial Sequence: Synthetic oligonucleotide
  Antisense strand to SEQ ID NO: 1999004
uaacaucuggaauuugccu

SEQ ID NO: 1999006 - RNA, 19 nt, Artificial Sequence
  Description of Artificial Sequence: Synthetic oligonucleotide
  Sense strand starting at position 2405 of SEQ ID NO: 1880855
uuggcuuaaccacauugau

SEQ ID NO: 1999007 - RNA, 19 nt, Artificial Sequence
  Description of Artificial Sequence: Synthetic oligonucleotide
  Antisense strand to SEQ ID NO: 1999006
aucaaugugguuaagccaa

SEQ ID NO: 1999008 - RNA, 19 nt, Artificial Sequence
  Description of Artificial Sequence: Synthetic oligonucleotide
  Sense strand starting at position 2421 of SEQ ID NO: 1880855
gauacaauugcugaucgau

SEQ ID NO: 1999009 - RNA, 19 nt, Artificial Sequence
  Description of Artificial Sequence: Synthetic oligonucleotide
  Antisense strand to SEQ ID NO: 1999008
aucgaucagcaauuguauc

SEQ ID NO: 1999010 - RNA, 19 nt, Artificial Sequence
  Description of Artificial Sequence: Synthetic oligonucleotide
  Sense strand starting at position 2423 of SEQ ID NO: 1880855
uacaauugcugaucgaugu

SEQ ID NO: 1999011 - RNA, 19 nt, Artificial Sequence
  Description of Artificial Sequence: Synthetic oligonucleotide
  Antisense strand to SEQ ID NO: 1999010
acaucgaucagcaauugua

SEQ ID NO: 1999012 - RNA, 19 nt, Artificial Sequence
  Description of Artificial Sequence: Synthetic oligonucleotide
  Sense strand starting at position 2424 of SEQ ID NO: 1880855
acaauugcugaucgaugua

SEQ ID NO: 1999013 - RNA, 19 nt, Artificial Sequence
  Description of Artificial Sequence: Synthetic oligonucleotide
  Antisense strand to SEQ ID NO: 1999012
uacaucgaucagcaauugu

SEQ ID NO: 1999014 - RNA, 19 nt, Artificial Sequence
  Description of Artificial Sequence: Synthetic oligonucleotide
  Sense strand starting at position 2427 of SEQ ID NO: 1880855
auugcugaucgauguauuc

SEQ ID NO: 1999015 - RNA, 19 nt, Artificial Sequence
  Description of Artificial Sequence: Synthetic oligonucleotide
  Antisense strand to SEQ ID NO: 1999014
gaauacaucgaucagcaau

SEQ ID NO: 1999016 - RNA, 19 nt, Artificial Sequence
  Description of Artificial Sequence: Synthetic oligonucleotide
  Sense strand starting at position 2429 of SEQ ID NO: 1880855
ugcugaucgauguauucuu

SEQ ID NO: 1999017 - RNA, 19 nt, Artificial Sequence
  Description of Artificial Sequence: Synthetic oligonucleotide
  Antisense strand to SEQ ID NO: 1999016
aagaauacaucgaucagca

SEQ ID NO: 1999018 - RNA, 19 nt, Artificial Sequence
  Description of Artificial Sequence: Synthetic oligonucleotide
  Sense strand starting at position 2580 of SEQ ID NO: 1880855
acagaugccugccacauuu

SEQ ID NO: 1999019 - RNA, 19 nt, Artificial Sequence
  Description of Artificial Sequence: Synthetic oligonucleotide
  Antisense strand to SEQ ID NO: 1999018
aaauguggcaggcaucugu

SEQ ID NO: 1999020 - RNA, 19 nt, Artificial Sequence
  Description of Artificial Sequence: Synthetic oligonucleotide
  Sense strand starting at position 2726 of SEQ ID NO: 1880855
gccgauauguucuuuauag

SEQ ID NO: 1999021 - RNA, 19 nt, Artificial Sequence
  Description of Artificial Sequence: Synthetic oligonucleotide
  Antisense strand to SEQ ID NO: 1999020
cuauaaagaacauaucggc

SEQ ID NO: 1999022 - RNA, 19 nt, Artificial Sequence
  Description of Artificial Sequence: Synthetic oligonucleotide
  Sense strand starting at position 2727 of SEQ ID NO: 1880855
ccgauauguucuuuauaga

SEQ ID NO: 1999023 - RNA, 19 nt, Artificial Sequence
  Description of Artificial Sequence: Synthetic oligonucleotide
  Antisense strand to SEQ ID NO: 1999022
ucuauaaagaacauaucgg

SEQ ID NO: 1999024 - RNA, 19 nt, Artificial Sequence
  Description of Artificial Sequence: Synthetic oligonucleotide
  Sense strand starting at position 2728 of SEQ ID NO: 1880855
cgauauguucuuuauagaa

SEQ ID NO: 1999025 - RNA, 19 nt, Artificial Sequence
  Description of Artificial Sequence: Synthetic oligonucleotide
  Antisense strand to SEQ ID NO: 1999024
uucuauaaagaacauaucg

SEQ ID NO: 1999026 - RNA, 19 nt, Artificial Sequence
  Description of Artificial Sequence: Synthetic oligonucleotide
  Sense strand starting at position 3018 of SEQ ID NO: 1880855
ccagguaaacacugucaua

SEQ ID NO: 1999027 - RNA, 19 nt, Artificial Sequence
  Description of Artificial Sequence: Synthetic oligonucleotide
  Antisense strand to SEQ ID NO: 1999026
uaugacaguguuuaccugg

SEQ ID NO: 1999028 - RNA, 19 nt, Artificial Sequence
  Description of Artificial Sequence: Synthetic oligonucleotide
  Sense strand starting at position 3059 of SEQ ID NO: 1880855
gcauuaguaccaugugaga

SEQ ID NO: 1999029 - RNA, 19 nt, Artificial Sequence
  Description of Artificial Sequence: Synthetic oligonucleotide
  Antisense strand to SEQ ID NO: 1999028
ucucacaugguacuaaugc

SEQ ID NO: 1999030 - RNA, 19 nt, Artificial Sequence
  Description of Artificial Sequence: Synthetic oligonucleotide
  Sense strand starting at position 3151 of SEQ ID NO: 1880855
ucaguuccauucuuaguga

SEQ ID NO: 1999031 - RNA, 19 nt, Artificial Sequence
  Description of Artificial Sequence: Synthetic oligonucleotide
  Antisense strand to SEQ ID NO: 1999030
ucacuaagaauggaacuga

SEQ ID NO: 1999032 - RNA, 19 nt, Artificial Sequence
  Description of Artificial Sequence: Synthetic oligonucleotide
  Sense strand starting at position 3154 of SEQ ID NO: 1880855
guuccauucuuagugaacu

SEQ ID NO: 1999033 - RNA, 19 nt, Artificial Sequence
  Description of Artificial Sequence: Synthetic oligonucleotide
  Antisense strand to SEQ ID NO: 1999032
aguucacuaagaauggaac

SEQ ID NO: 1999034 - RNA, 19 nt, Artificial Sequence
  Description of Artificial Sequence: Synthetic oligonucleotide
  Sense strand starting at position 3335 of SEQ ID NO: 1880855
uguucuaccuguucuguga

SEQ ID NO: 1999035 - RNA, 19 nt, Artificial Sequence
  Description of Artificial Sequence: Synthetic oligonucleotide
  Antisense strand to SEQ ID NO: 1999034
ucacagaacagguagaaca

SEQ ID NO: 1999036 - RNA, 19 nt, Artificial Sequence
  Description of Artificial Sequence: Synthetic oligonucleotide
  Sense strand starting at position 3379 of SEQ ID NO: 1880855
gccuucuaagguuacagaa

SEQ ID NO: 1999037 - RNA, 19 nt, Artificial Sequence
  Description of Artificial Sequence: Synthetic oligonucleotide
  Antisense strand to SEQ ID NO: 1999036
uucuguaaccuuagaaggc

SEQ ID NO: 1999038 - RNA, 19 nt, Artificial Sequence
  Description of Artificial Sequence: Synthetic oligonucleotide
  Sense strand starting at position 3466 of SEQ ID NO: 1880855
gauaaacuucgagagcagu

SEQ ID NO: 1999039 - RNA, 19 nt, Artificial Sequence
  Description of Artificial Sequence: Synthetic oligonucleotide
  Antisense strand to SEQ ID NO: 1999038
acugcucucgaaguuuauc

SEQ ID NO: 1999040 - RNA, 19 nt, Artificial Sequence
  Description of Artificial Sequence: Synthetic oligonucleotide
  Sense strand starting at position 3723 of SEQ ID NO: 1880855
auuaauuagugggcacuaa

SEQ ID NO: 1999041 - RNA, 19 nt, Artificial Sequence
  Description of Artificial Sequence: Synthetic oligonucleotide
  Antisense strand to SEQ ID NO: 1999040
uuagugcccacuaauuaau

SEQ ID NO: 1999042 - RNA, 19 nt, Artificial Sequence
  Description of Artificial Sequence: Synthetic oligonucleotide
  Sense strand starting at position 3744 of SEQ ID NO: 1880855
ccagcaggguugcuuuaau

SEQ ID NO: 1999043 - RNA, 19 nt, Artificial Sequence
  Description of Artificial Sequence: Synthetic oligonucleotide
  Antisense strand to SEQ ID NO: 1999042
auuaaagcaacccugcugg

SEQ ID NO: 1999044 - RNA, 19 nt, Artificial Sequence
  Description of Artificial Sequence: Synthetic oligonucleotide
  Sense strand starting at position 3794 of SEQ ID NO: 1880855
aaaccauauguuuggguca

SEQ ID NO: 1999045 - RNA, 19 nt, Artificial Sequence
  Description of Artificial Sequence: Synthetic oligonucleotide
  Antisense strand to SEQ ID NO: 1999044
ugacccaaacauaugguuu

SEQ ID NO: 1999046 - RNA, 19 nt, Artificial Sequence
  Description of Artificial Sequence: Synthetic oligonucleotide
  Sense strand starting at position 3813 of SEQ ID NO: 1880855
ccgcgcuauccugagaaau

SEQ ID NO: 1999047 - RNA, 19 nt, Artificial Sequence
  Description of Artificial Sequence: Synthetic oligonucleotide
  Antisense strand to SEQ ID NO: 1999046
auuucucaggauagcgcgg

SEQ ID NO: 1999048 - RNA, 19 nt, Artificial Sequence
  Description of Artificial Sequence: Synthetic oligonucleotide
  Sense strand starting at position 3823 of SEQ ID NO: 1880855
cugagaaaugucugccacu

SEQ ID NO: 1999049 - RNA, 19 nt, Artificial Sequence
  Description of Artificial Sequence: Synthetic oligonucleotide
  Antisense strand to SEQ ID NO: 1999048
aguggcagacauuucucag

SEQ ID NO: 1999050 - RNA, 19 nt, Artificial Sequence
  Description of Artificial Sequence: Synthetic oligonucleotide
  Sense strand starting at position 3824 of SEQ ID NO: 1880855
ugagaaaugucugccacua

SEQ ID NO: 1999051 - RNA, 19 nt, Artificial Sequence
  Description of Artificial Sequence: Synthetic oligonucleotide
  Antisense strand to SEQ ID NO: 1999050
uaguggcagacauuucuca

SEQ ID NO: 1999052 - RNA, 19 nt, Artificial Sequence
  Description of Artificial Sequence: Synthetic oligonucleotide
  Sense strand starting at position 3896 of SEQ ID NO: 1880855
guauuaacugggcagcgau

SEQ ID NO: 1999053 - RNA, 19 nt, Artificial Sequence
  Description of Artificial Sequence: Synthetic oligonucleotide
  Antisense strand to SEQ ID NO: 1999052
aucgcugcccaguuaauac

SEQ ID NO: 1999054 - RNA, 19 nt, Artificial Sequence
  Description of Artificial Sequence: Synthetic oligonucleotide
  Sense strand starting at position 3917 of SEQ ID NO: 1880855
ggaaacaccuggcugaauu

SEQ ID NO: 1999055 - RNA, 19 nt, Artificial Sequence
  Description of Artificial Sequence: Synthetic oligonucleotide
  Antisense strand to SEQ ID NO: 1999054
aauucagccagguguuucc

SEQ ID NO: 1999056 - RNA, 19 nt, Artificial Sequence
  Description of Artificial Sequence: Synthetic oligonucleotide
  Sense strand starting at position 3927 of SEQ ID NO: 1880855
ggcugaauuaaguguaaau

SEQ ID NO: 1999057 - RNA, 19 nt, Artificial Sequence
  Description of Artificial Sequence: Synthetic oligonucleotide
  Antisense strand to SEQ ID NO: 1999056
auuuacacuuaauucagcc

SEQ ID NO: 1999058 - RNA, 19 nt, Artificial Sequence
  Description of Artificial Sequence: Synthetic oligonucleotide
  Sense strand starting at position 39 of SEQ ID NO: 1880856
cucauugcugagcaacauu

SEQ ID NO: 1999059 - RNA, 19 nt, Artificial Sequence
  Description of Artificial Sequence: Synthetic oligonucleotide
  Antisense strand to SEQ ID NO: 1999058
aauguugcucagcaaugag

SEQ ID NO: 1999060 - RNA, 19 nt, Artificial Sequence
  Description of Artificial Sequence: Synthetic oligonucleotide
  Sense strand starting at position 190 of SEQ ID NO: 1880856
gcaauauaagaagaguguu

SEQ ID NO: 1999061 - RNA, 19 nt, Artificial Sequence
  Description of Artificial Sequence: Synthetic oligonucleotide
  Antisense strand to SEQ ID NO: 1999060
aacacucuucuuauauugc

SEQ ID NO: 1999062 - RNA, 19 nt, Artificial Sequence
  Description of Artificial Sequence: Synthetic oligonucleotide
  Sense strand starting at position 217 of SEQ ID NO: 1880856
cuguauagagguuaauauc

SEQ ID NO: 1999063 - RNA, 19 nt, Artificial Sequence
  Description of Artificial Sequence: Synthetic oligonucleotide
  Antisense strand to SEQ ID NO: 1999062
gauauuaaccucuauacag

SEQ ID NO: 1999064 - RNA, 19 nt, Artificial Sequence
  Description of Artificial Sequence: Synthetic oligonucleotide
  Sense strand starting at position 341 of SEQ ID NO: 1880856
uguauuacuuauguuggua

SEQ ID NO: 1999065 - RNA, 19 nt, Artificial Sequence
  Description of Artificial Sequence: Synthetic oligonucleotide
  Antisense strand to SEQ ID NO: 1999064
uaccaacauaaguaauaca

SEQ ID NO: 1999066 - RNA, 19 nt, Artificial Sequence
  Description of Artificial Sequence: Synthetic oligonucleotide
  Sense strand starting at position 784 of SEQ ID NO: 1880856
ggucaauaucaacagucca

SEQ ID NO: 1999067 - RNA, 19 nt, Artificial Sequence
  Description of Artificial Sequence: Synthetic oligonucleotide
  Antisense strand to SEQ ID NO: 1999066
uggacuguugauauugacc

SEQ ID NO: 1999068 - RNA, 19 nt, Artificial Sequence
  Description of Artificial Sequence: Synthetic oligonucleotide
  Sense strand starting at position 842 of SEQ ID NO: 1880856
agccuuaaagagugaacca

SEQ ID NO: 1999069 - RNA, 19 nt, Artificial Sequence
  Description of Artificial Sequence: Synthetic oligonucleotide
  Antisense strand to SEQ ID NO: 1999068
ugguucacucuuuaaggcu

SEQ ID NO: 1999070 - RNA, 19 nt, Artificial Sequence
  Description of Artificial Sequence: Synthetic oligonucleotide
  Sense strand starting at position 999 of SEQ ID NO: 1880856
cuggaaaccugacagagaa

SEQ ID NO: 1999071 - RNA, 19 nt, Artificial Sequence
  Description of Artificial Sequence: Synthetic oligonucleotide
  Antisense strand to SEQ ID NO: 1999070
uucucugucagguuuccag

SEQ ID NO: 1999072 - RNA, 19 nt, Artificial Sequence
  Description of Artificial Sequence: Synthetic oligonucleotide
  Sense strand starting at position 1033 of SEQ ID NO: 1880856
cguccagaguucuuauaua

SEQ ID NO: 1999073 - RNA, 19 nt, Artificial Sequence
  Description of Artificial Sequence: Synthetic oligonucleotide
  Antisense strand to SEQ ID NO: 1999072
uauauaagaacucuggacg

SEQ ID NO: 1999074 - RNA, 19 nt, Artificial Sequence
  Description of Artificial Sequence: Synthetic oligonucleotide
  Sense strand starting at position 1079 of SEQ ID NO: 1880856
aguugauagguaggagaca

SEQ ID NO: 1999075 - RNA, 19 nt, Artificial Sequence
  Description of Artificial Sequence: Synthetic oligonucleotide
  Antisense strand to SEQ ID NO: 1999074
ugucuccuaccuaucaacu

SEQ ID NO: 1999076 - RNA, 19 nt, Artificial Sequence
  Description of Artificial Sequence: Synthetic oligonucleotide
  Sense strand starting at position 1117 of SEQ ID NO: 1880856
uguuaaggaacguggaauu

SEQ ID NO: 1999077 - RNA, 19 nt, Artificial Sequence
  Description of Artificial Sequence: Synthetic oligonucleotide
  Antisense strand to SEQ ID NO: 1999076
aauuccacguuccuuaaca

SEQ ID NO: 1999078 - RNA, 19 nt, Artificial Sequence
  Description of Artificial Sequence: Synthetic oligonucleotide
  Sense strand starting at position 1220 of SEQ ID NO: 1880856
agaauuaugcucuguggua

SEQ ID NO: 1999079 - RNA, 19 nt, Artificial Sequence
  Description of Artificial Sequence: Synthetic oligonucleotide
  Antisense strand to SEQ ID NO: 1999078
uaccacagagcauaauucu

SEQ ID NO: 1999080 - RNA, 19 nt, Artificial Sequence
  Description of Artificial Sequence: Synthetic oligonucleotide
  Sense strand starting at position 1233 of SEQ ID NO: 1880856
gugguaucggugcuuguca

SEQ ID NO: 1999081 - RNA, 19 nt, Artificial Sequence
  Description of Artificial Sequence: Synthetic oligonucleotide
  Antisense strand to SEQ ID NO: 1999080
ugacaagcaccgauaccac

SEQ ID NO: 1999082 - RNA, 19 nt, Artificial Sequence
  Description of Artificial Sequence: Synthetic oligonucleotide
  Sense strand starting at position 1253 of SEQ ID NO: 1880856
acaugauauuccuuugcag

SEQ ID NO: 1999083 - RNA, 19 nt, Artificial Sequence
  Description of Artificial Sequence: Synthetic oligonucleotide
  Antisense strand to SEQ ID NO: 1999082
cugcaaaggaauaucaugu

SEQ ID NO: 1999084 - RNA, 19 nt, Artificial Sequence
  Description of Artificial Sequence: Synthetic oligonucleotide
  Sense strand starting at position 1256 of SEQ ID NO: 1880856
ugauauuccuuugcagauc

SEQ ID NO: 1999085 - RNA, 19 nt, Artificial Sequence
  Description of Artificial Sequence: Synthetic oligonucleotide
  Antisense strand to SEQ ID NO: 1999084
gaucugcaaaggaauauca

SEQ ID NO: 1999086 - RNA, 19 nt, Artificial Sequence
  Description of Artificial Sequence: Synthetic oligonucleotide
  Sense strand starting at position 1265 of SEQ ID NO: 1880856
uuugcagauccguauauuc

SEQ ID NO: 1999087 - RNA, 19 nt, Artificial Sequence
  Description of Artificial Sequence: Synthetic oligonucleotide
  Antisense strand to SEQ ID NO: 1999086
gaauauacggaucugcaaa

SEQ ID NO: 1999088 - RNA, 19 nt, Artificial Sequence
  Description of Artificial Sequence: Synthetic oligonucleotide
  Sense strand starting at position 1458 of SEQ ID NO: 1880856
ggaaguagaauguauuggu

SEQ ID NO: 1999089 - RNA, 19 nt, Artificial Sequence
  Description of Artificial Sequence: Synthetic oligonucleotide
  Antisense strand to SEQ ID NO: 1999088
accaauacauucuacuucc

SEQ ID NO: 1999090 - RNA, 19 nt, Artificial Sequence
  Description of Artificial Sequence: Synthetic oligonucleotide
  Sense strand starting at position 1462 of SEQ ID NO: 1880856
guagaauguauugguauua

SEQ ID NO: 1999091 - RNA, 19 nt, Artificial Sequence
  Description of Artificial Sequence: Synthetic oligonucleotide
  Antisense strand to SEQ ID NO: 1999090
uaauaccaauacauucuac

SEQ ID NO: 1999092 - RNA, 19 nt, Artificial Sequence
  Description of Artificial Sequence: Synthetic oligonucleotide
  Sense strand starting at position 1529 of SEQ ID NO: 1880856
uguccagagggccaugaau

SEQ ID NO: 1999093 - RNA, 19 nt, Artificial Sequence
  Description of Artificial Sequence: Synthetic oligonucleotide
  Antisense strand to SEQ ID NO: 1999092
auucauggcccucuggaca

SEQ ID NO: 1999094 - RNA, 19 nt, Artificial Sequence
  Description of Artificial Sequence: Synthetic oligonucleotide
  Sense strand starting at position 1541 of SEQ ID NO: 1880856
caugaauggcgacauacuu

SEQ ID NO: 1999095 - RNA, 19 nt, Artificial Sequence
  Description of Artificial Sequence: Synthetic oligonucleotide
  Antisense strand to SEQ ID NO: 1999094
aaguaugucgccauucaug

SEQ ID NO: 1999096 - RNA, 19 nt, Artificial Sequence
  Description of Artificial Sequence: Synthetic oligonucleotide
  Sense strand starting at position 1616 of SEQ ID NO: 1880856
cggcauugaacuuggugaa

SEQ ID NO: 1999097 - RNA, 19 nt, Artificial Sequence
  Description of Artificial Sequence: Synthetic oligonucleotide
  Antisense strand to SEQ ID NO: 1999096
uucaccaaguucaaugccg

SEQ ID NO: 1999098 - RNA, 19 nt, Artificial Sequence
  Description of Artificial Sequence: Synthetic oligonucleotide
  Sense strand starting at position 1728 of SEQ ID NO: 1880856
cuugguauggauggacaua

SEQ ID NO: 1999099 - RNA, 19 nt, Artificial Sequence
  Description of Artificial Sequence: Synthetic oligonucleotide
  Antisense strand to SEQ ID NO: 1999098
uauguccauccauaccaag

SEQ ID NO: 1999100 - RNA, 19 nt, Artificial Sequence
  Description of Artificial Sequence: Synthetic oligonucleotide
  Sense strand starting at position 1739 of SEQ ID NO: 1880856
uggacauaacuuggccaau

SEQ ID NO: 1999101 - RNA, 19 nt, Artificial Sequence
  Description of Artificial Sequence: Synthetic oligonucleotide
  Antisense strand to SEQ ID NO: 1999100
auuggccaaguuaugucca

SEQ ID NO: 1999102 - RNA, 19 nt, Artificial Sequence
  Description of Artificial Sequence: Synthetic oligonucleotide
  Sense strand starting at position 1741 of SEQ ID NO: 1880856
gacauaacuuggccaaugu

SEQ ID NO: 1999103 - RNA, 19 nt, Artificial Sequence
  Description of Artificial Sequence: Synthetic oligonucleotide
  Antisense strand to SEQ ID NO: 1999102
acauuggccaaguuauguc

SEQ ID NO: 1999104 - RNA, 19 nt, Artificial Sequence
  Description of Artificial Sequence: Synthetic oligonucleotide
  Sense strand starting at position 1998 of SEQ ID NO: 1880856
gcaggaccuccguaaucuu

SEQ ID NO: 1999105 - RNA, 19 nt, Artificial Sequence
  Description of Artificial Sequence: Synthetic oligonucleotide
  Antisense strand to SEQ ID NO: 1999104
aagauuacggagguccugc

SEQ ID NO: 1999106 - RNA, 19 nt, Artificial Sequence
  Description of Artificial Sequence: Synthetic oligonucleotide
  Sense strand starting at position 2001 of SEQ ID NO: 1880856
ggaccuccguaaucuuaca

SEQ ID NO: 1999107 - RNA, 19 nt, Artificial Sequence
  Description of Artificial Sequence: Synthetic oligonucleotide
  Antisense strand to SEQ ID NO: 1999106
uguaagauuacggaggucc

SEQ ID NO: 1999108 - RNA, 19 nt, Artificial Sequence
  Description of Artificial Sequence: Synthetic oligonucleotide
  Sense strand starting at position 2025 of SEQ ID NO: 1880856
aguugugacagcuauauga

SEQ ID NO: 1999109 - RNA, 19 nt, Artificial Sequence
  Description of Artificial Sequence: Synthetic oligonucleotide
  Antisense strand to SEQ ID NO: 1999108
ucauauagcugucacaacu

SEQ ID NO: 1999110 - RNA, 19 nt, Artificial Sequence
  Description of Artificial Sequence: Synthetic oligonucleotide
  Sense strand starting at position 2027 of SEQ ID NO: 1880856
uugugacagcuauaugacu

SEQ ID NO: 1999111 - RNA, 19 nt, Artificial Sequence
  Description of Artificial Sequence: Synthetic oligonucleotide
  Antisense strand to SEQ ID NO: 1999110
agucauauagcugucacaa

SEQ ID NO: 1999112 - RNA, 19 nt, Artificial Sequence
  Description of Artificial Sequence: Synthetic oligonucleotide
  Sense strand starting at position 2032 of SEQ ID NO: 1880856
acagcuauaugacuguuaa

SEQ ID NO: 1999113 - RNA, 19 nt, Artificial Sequence
  Description of Artificial Sequence: Synthetic oligonucleotide
  Antisense strand to SEQ ID NO: 1999112
uuaacagucauauagcugu

SEQ ID NO: 1999114 - RNA, 19 nt, Artificial Sequence
  Description of Artificial Sequence: Synthetic oligonucleotide
  Sense strand starting at position 2106 of SEQ ID NO: 1880856
aguuaacuguaccugagaa

SEQ ID NO: 1999115 - RNA, 19 nt, Artificial Sequence
  Description of Artificial Sequence: Synthetic oligonucleotide
  Antisense strand to SEQ ID NO: 1999114
uucucagguacaguuaacu

SEQ ID NO: 1999116 - RNA, 19 nt, Artificial Sequence
  Description of Artificial Sequence: Synthetic oligonucleotide
  Sense strand starting at position 2175 of SEQ ID NO: 1880856
agucucacaccauggauau

SEQ ID NO: 1999117 - RNA, 19 nt, Artificial Sequence
  Description of Artificial Sequence: Synthetic oligonucleotide
  Antisense strand to SEQ ID NO: 1999116
auauccauggugugagacu

SEQ ID NO: 1999118 - RNA, 19 nt, Artificial Sequence
  Description of Artificial Sequence: Synthetic oligonucleotide
  Sense strand starting at position 2176 of SEQ ID NO: 1880856
gucucacaccauggauaua

SEQ ID NO: 1999119 - RNA, 19 nt, Artificial Sequence
  Description of Artificial Sequence: Synthetic oligonucleotide
  Antisense strand to SEQ ID NO: 1999118
uauauccauggugugagac

SEQ ID NO: 1999120 - RNA, 19 nt, Artificial Sequence
  Description of Artificial Sequence: Synthetic oligonucleotide
  Sense strand starting at position 2206 of SEQ ID NO: 1880856
guaagcugucgcucugaau

SEQ ID NO: 1999121 - RNA, 19 nt, Artificial Sequence
  Description of Artificial Sequence: Synthetic oligonucleotide
  Antisense strand to SEQ ID NO: 1999120
auucagagcgacagcuuac

SEQ ID NO: 1999122 - RNA, 19 nt, Artificial Sequence
  Description of Artificial Sequence: Synthetic oligonucleotide
  Sense strand starting at position 3146 of SEQ ID NO: 1880856
ugaguuuaucuccacgcua

SEQ ID NO: 1999123 - RNA, 19 nt, Artificial Sequence
  Description of Artificial Sequence: Synthetic oligonucleotide
  Antisense strand to SEQ ID NO: 1999122
uagcguggagauaaacuca

SEQ ID NO: 1999124 - RNA, 19 nt, Artificial Sequence
  Description of Artificial Sequence: Synthetic oligonucleotide
  Sense strand starting at position 3219 of SEQ ID NO: 1880856
gcagauuauccaugcuuua

SEQ ID NO: 1999125 - RNA, 19 nt, Artificial Sequence
  Description of Artificial Sequence: Synthetic oligonucleotide
  Antisense strand to SEQ ID NO: 1999124
uaaagcauggauaaucugc

SEQ ID NO: 1999126 - RNA, 19 nt, Artificial Sequence
  Description of Artificial Sequence: Synthetic oligonucleotide
  Sense strand starting at position 3224 of SEQ ID NO: 1880856
uuauccaugcuuuauuagu

SEQ ID NO: 1999127 - RNA, 19 nt, Artificial Sequence
  Description of Artificial Sequence: Synthetic oligonucleotide
  Antisense strand to SEQ ID NO: 1999126
acuaauaaagcauggauaa

SEQ ID NO: 1999128 - RNA, 19 nt, Artificial Sequence
  Description of Artificial Sequence: Synthetic oligonucleotide
  Sense strand starting at position 3233 of SEQ ID NO: 1880856
cuuuauuaguaccuguuua

SEQ ID NO: 1999129 - RNA, 19 nt, Artificial Sequence
  Description of Artificial Sequence: Synthetic oligonucleotide
  Antisense strand to SEQ ID NO: 1999128
uaaacagguacuaauaaag

SEQ ID NO: 1999130 - RNA, 19 nt, Artificial Sequence
  Description of Artificial Sequence: Synthetic oligonucleotide
  Sense strand starting at position 3245 of SEQ ID NO: 1880856
cuguuuauccgcuaauuag

SEQ ID NO: 1999131 - RNA, 19 nt, Artificial Sequence
  Description of Artificial Sequence: Synthetic oligonucleotide
  Antisense strand to SEQ ID NO: 1999130
cuaauuagcggauaaacag

SEQ ID NO: 1999132 - RNA, 19 nt, Artificial Sequence
  Description of Artificial Sequence: Synthetic oligonucleotide
  Sense strand starting at position 3254 of SEQ ID NO: 1880856
cgcuaauuagaacgacaau

SEQ ID NO: 1999133 - RNA, 19 nt, Artificial Sequence
  Description of Artificial Sequence: Synthetic oligonucleotide
  Antisense strand to SEQ ID NO: 1999132
auugucguucuaauuagcg

SEQ ID NO: 1999134 - RNA, 19 nt, Artificial Sequence
  Description of Artificial Sequence: Synthetic oligonucleotide
  Sense strand starting at position 3362 of SEQ ID NO: 1880856
aaggcacugugaucuaacu

SEQ ID NO: 1999135 - RNA, 19 nt, Artificial Sequence
  Description of Artificial Sequence: Synthetic oligonucleotide
  Antisense strand to SEQ ID NO: 1999134
aguuagaucacagugccuu

SEQ ID NO: 1999136 - RNA, 19 nt, Artificial Sequence
  Description of Artificial Sequence: Synthetic oligonucleotide
  Sense strand starting at position 3784 of SEQ ID NO: 1880856
auccaugucuaucuagauc

SEQ ID NO: 1999137 - RNA, 19 nt, Artificial Sequence
  Description of Artificial Sequence: Synthetic oligonucleotide
  Antisense strand to SEQ ID NO: 1999136
gaucuagauagacauggau

SEQ ID NO: 1999138 - RNA, 19 nt, Artificial Sequence
  Description of Artificial Sequence: Synthetic oligonucleotide
  Sense strand starting at position 115 of SEQ ID NO: 1880857
guaugaaguuggucugaag

SEQ ID NO: 1999139 - RNA, 19 nt, Artificial Sequence
  Description of Artificial Sequence: Synthetic oligonucleotide
  Antisense strand to SEQ ID NO: 1999138
cuucagaccaacuucauac

SEQ ID NO: 1999140 - RNA, 19 nt, Artificial Sequence
  Description of Artificial Sequence: Synthetic oligonucleotide
  Sense strand starting at position 196 of SEQ ID NO: 1880857
cauggaauggcugagucuu

SEQ ID NO: 1999141 - RNA, 19 nt, Artificial Sequence
  Description of Artificial Sequence: Synthetic oligonucleotide
  Antisense strand to SEQ ID NO: 1999140
aagacucagccauuccaug

SEQ ID NO: 1999142 - RNA, 19 nt, Artificial Sequence
  Description of Artificial Sequence: Synthetic oligonucleotide
  Sense strand starting at position 230 of SEQ ID NO: 1880857
gauauuguauuugauggaa

SEQ ID NO: 1999143 - RNA, 19 nt, Artificial Sequence
  Description of Artificial Sequence: Synthetic oligonucleotide
  Antisense strand to SEQ ID NO: 1999142
uuccaucaaauacaauauc

SEQ ID NO: 1999144 - RNA, 19 nt, Artificial Sequence
  Description of Artificial Sequence: Synthetic oligonucleotide
  Sense strand starting at position 600 of SEQ ID NO: 1880857
ugccucugagaauguagaa

SEQ ID NO: 1999145 - RNA, 19 nt, Artificial Sequence
  Description of Artificial Sequence: Synthetic oligonucleotide
  Antisense strand to SEQ ID NO: 1999144
uucuacauucucagaggca

SEQ ID NO: 1999146 - RNA, 19 nt, Artificial Sequence
  Description of Artificial Sequence: Synthetic oligonucleotide
  Sense strand starting at position 924 of SEQ ID NO: 1880857
uucuacauagugugaaauu

SEQ ID NO: 1999147 - RNA, 19 nt, Artificial Sequence
  Description of Artificial Sequence: Synthetic oligonucleotide
  Antisense strand to SEQ ID NO: 1999146
aauuucacacuauguagaa

SEQ ID NO: 1999148 - RNA, 19 nt, Artificial Sequence
  Description of Artificial Sequence: Synthetic oligonucleotide
  Sense strand starting at position 969 of SEQ ID NO: 1880857
cuguauucugaauaguaaa

SEQ ID NO: 1999149 - RNA, 19 nt, Artificial Sequence
  Description of Artificial Sequence: Synthetic oligonucleotide
  Antisense strand to SEQ ID NO: 1999148
uuuacuauucagaauacag

SEQ ID NO: 1999150 - RNA, 19 nt, Artificial Sequence
  Description of Artificial Sequence: Synthetic oligonucleotide
  Sense strand starting at position 1135 of SEQ ID NO: 1880857
cuauuaaccgaguaaauug

SEQ ID NO: 1999151 - RNA, 19 nt, Artificial Sequence
  Description of Artificial Sequence: Synthetic oligonucleotide
  Antisense strand to SEQ ID NO: 1999150
caauuuacucgguuaauag

SEQ ID NO: 1999152 - RNA, 19 nt, Artificial Sequence
  Description of Artificial Sequence: Synthetic oligonucleotide
  Sense strand starting at position 1283 of SEQ ID NO: 1880857
gauggagcagagugauuga

SEQ ID NO: 1999153 - RNA, 19 nt, Artificial Sequence
  Description of Artificial Sequence: Synthetic oligonucleotide
  Antisense strand to SEQ ID NO: 1999152
ucaaucacucugcuccauc

SEQ ID NO: 1999154 - RNA, 19 nt, Artificial Sequence
  Description of Artificial Sequence: Synthetic oligonucleotide
  Sense strand starting at position 1330 of SEQ ID NO: 1880857
aagaguugccaccagcaga

SEQ ID NO: 1999155 - RNA, 19 nt, Artificial Sequence
  Description of Artificial Sequence: Synthetic oligonucleotide
  Antisense strand to SEQ ID NO: 1999154
ucugcugguggcaacucuu

SEQ ID NO: 1999156 - RNA, 19 nt, Artificial Sequence
  Description of Artificial Sequence: Synthetic oligonucleotide
  Sense strand starting at position 1612 of SEQ ID NO: 1880857
cgacauugaacuuggugaa

SEQ ID NO: 1999157 - RNA, 19 nt, Artificial Sequence
  Description of Artificial Sequence: Synthetic oligonucleotide
  Antisense strand to SEQ ID NO: 1999156
uucaccaaguucaaugucg

SEQ ID NO: 1999158 - RNA, 19 nt, Artificial Sequence
  Description of Artificial Sequence: Synthetic oligonucleotide
  Sense strand starting at position 1797 of SEQ ID NO: 1880857
ccucgcaugccuguuugaa

SEQ ID NO: 1999159 - RNA, 19 nt, Artificial Sequence
  Description of Artificial Sequence: Synthetic oligonucleotide
  Antisense strand to SEQ ID NO: 1999158
uucaaacaggcaugcgagg

SEQ ID NO: 1999160 - RNA, 19 nt, Artificial Sequence
  Description of Artificial Sequence: Synthetic oligonucleotide
  Sense strand starting at position 1857 of SEQ ID NO: 1880857
aucugaaaggccuauuauc

SEQ ID NO: 1999161 - RNA, 19 nt, Artificial Sequence
  Description of Artificial Sequence: Synthetic oligonucleotide
  Antisense strand to SEQ ID NO: 1999160
gauaauaggccuuucagau

SEQ ID NO: 1999162 - RNA, 19 nt, Artificial Sequence
  Description of Artificial Sequence: Synthetic oligonucleotide
  Sense strand starting at position 1983 of SEQ ID NO: 1880857
acacuuaauugacugcaga

SEQ ID NO: 1999163 - RNA, 19 nt, Artificial Sequence
  Description of Artificial Sequence: Synthetic oligonucleotide
  Antisense strand to SEQ ID NO: 1999162
ucugcagucaauuaagugu

SEQ ID NO: 1999164 - RNA, 19 nt, Artificial Sequence
  Description of Artificial Sequence: Synthetic oligonucleotide
  Sense strand starting at position 2005 of SEQ ID NO: 1880857
aaugacuuccauuguggaa

SEQ ID NO: 1999165 - RNA, 19 nt, Artificial Sequence
  Description of Artificial Sequence: Synthetic oligonucleotide
  Antisense strand to SEQ ID NO: 1999164
uuccacaauggaagucauu

SEQ ID NO: 1999166 - RNA, 19 nt, Artificial Sequence
  Description of Artificial Sequence: Synthetic oligonucleotide
  Sense strand starting at position 2017 of SEQ ID NO: 1880857
uguggaaccuugguccuaa

SEQ ID NO: 1999167 - RNA, 19 nt, Artificial Sequence
  Description of Artificial Sequence: Synthetic oligonucleotide
  Antisense strand to SEQ ID NO: 1999166
uuaggaccaagguuccaca

SEQ ID NO: 1999168 - RNA, 19 nt, Artificial Sequence
  Description of Artificial Sequence: Synthetic oligonucleotide
  Sense strand starting at position 2018 of SEQ ID NO: 1880857
guggaaccuugguccuaaa

SEQ ID NO: 1999169 - RNA, 19 nt, Artificial Sequence
  Description of Artificial Sequence: Synthetic oligonucleotide
  Antisense strand to SEQ ID NO: 1999168
uuuaggaccaagguuccac

SEQ ID NO: 1999170 - RNA, 19 nt, Artificial Sequence
  Description of Artificial Sequence: Synthetic oligonucleotide
  Sense strand starting at position 2037 of SEQ ID NO: 1880857
uguuucuguguacaggaua

SEQ ID NO: 1999171 - RNA, 19 nt, Artificial Sequence
  Description of Artificial Sequence: Synthetic oligonucleotide
  Antisense strand to SEQ ID NO: 1999170
uauccuguacacagaaaca

SEQ ID NO: 1999172 - RNA, 19 nt, Artificial Sequence
  Description of Artificial Sequence: Synthetic oligonucleotide
  Sense strand starting at position 2040 of SEQ ID NO: 1880857
uucuguguacaggauaauu

SEQ ID NO: 1999173 - RNA, 19 nt, Artificial Sequence
  Description of Artificial Sequence: Synthetic oligonucleotide
  Antisense strand to SEQ ID NO: 1999172
aauuauccuguacacagaa

SEQ ID NO: 1999174 - RNA, 19 nt, Artificial Sequence
  Description of Artificial Sequence: Synthetic oligonucleotide
  Sense strand starting at position 2042 of SEQ ID NO: 1880857
cuguguacaggauaauuau

SEQ ID NO: 1999175 - RNA, 19 nt, Artificial Sequence
  Description of Artificial Sequence: Synthetic oligonucleotide
  Antisense strand to SEQ ID NO: 1999174
auaauuauccuguacacag

SEQ ID NO: 1999176 - RNA, 19 nt, Artificial Sequence
  Description of Artificial Sequence: Synthetic oligonucleotide
  Sense strand starting at position 2088 of SEQ ID NO: 1880857
cucauaauucuuugugaag

SEQ ID NO: 1999177 - RNA, 19 nt, Artificial Sequence
  Description of Artificial Sequence: Synthetic oligonucleotide
  Antisense strand to SEQ ID NO: 1999176
cuucacaaagaauuaugag

SEQ ID NO: 1999178 - RNA, 19 nt, Artificial Sequence
  Description of Artificial Sequence: Synthetic oligonucleotide
  Sense strand starting at position 2089 of SEQ ID NO: 1880857
ucauaauucuuugugaagg

SEQ ID NO: 1999179 - RNA, 19 nt, Artificial Sequence
  Description of Artificial Sequence: Synthetic oligonucleotide
  Antisense strand to SEQ ID NO: 1999178
ccuucacaaagaauuauga

SEQ ID NO: 1999180 - RNA, 19 nt, Artificial Sequence
  Description of Artificial Sequence: Synthetic oligonucleotide
  Sense strand starting at position 2138 of SEQ ID NO: 1880857
uaucgauggcucuaaaugu

SEQ ID NO: 1999181 - RNA, 19 nt, Artificial Sequence
  Description of Artificial Sequence: Synthetic oligonucleotide
  Antisense strand to SEQ ID NO: 1999180
acauuuagagccaucgaua

SEQ ID NO: 1999182 - RNA, 19 nt, Artificial Sequence
  Description of Artificial Sequence: Synthetic oligonucleotide
  Sense strand starting at position 2148 of SEQ ID NO: 1880857
ucuaaaugucuccacguaa

SEQ ID NO: 1999183 - RNA, 19 nt, Artificial Sequence
  Description of Artificial Sequence: Synthetic oligonucleotide
  Antisense strand to SEQ ID NO: 1999182
uuacguggagacauuuaga

SEQ ID NO: 1999184 - RNA, 19 nt, Artificial Sequence
  Description of Artificial Sequence: Synthetic oligonucleotide
  Sense strand starting at position 2249 of SEQ ID NO: 1880857
agucaaauacuauguaauc

SEQ ID NO: 1999185 - RNA, 19 nt, Artificial Sequence
  Description of Artificial Sequence: Synthetic oligonucleotide
  Antisense strand to SEQ ID NO: 1999184
gauuacauaguauuugacu

SEQ ID NO: 1999186 - RNA, 19 nt, Artificial Sequence
  Description of Artificial Sequence: Synthetic oligonucleotide
  Sense strand starting at position 2250 of SEQ ID NO: 1880857
gucaaauacuauguaaucu

SEQ ID NO: 1999187 - RNA, 19 nt, Artificial Sequence
  Description of Artificial Sequence: Synthetic oligonucleotide
  Antisense strand to SEQ ID NO: 1999186
agauuacauaguauuugac

SEQ ID NO: 1999188 - RNA, 19 nt, Artificial Sequence
  Description of Artificial Sequence: Synthetic oligonucleotide
  Sense strand starting at position 2413 of SEQ ID NO: 1880857
gcaaccuaucaagaauggu

SEQ ID NO: 1999189 - RNA, 19 nt, Artificial Sequence
  Description of Artificial Sequence: Synthetic oligonucleotide
  Antisense strand to SEQ ID NO: 1999188
accauucuugauagguugc

SEQ ID NO: 1999190 - RNA, 19 nt, Artificial Sequence
  Description of Artificial Sequence: Synthetic oligonucleotide
  Sense strand starting at position 2416 of SEQ ID NO: 1880857
accuaucaagaaugguuau

SEQ ID NO: 1999191 - RNA, 19 nt, Artificial Sequence
  Description of Artificial Sequence: Synthetic oligonucleotide
  Antisense strand to SEQ ID NO: 1999190
auaaccauucuugauaggu

SEQ ID NO: 1999192 - RNA, 19 nt, Artificial Sequence
  Description of Artificial Sequence: Synthetic oligonucleotide
  Sense strand starting at position 2511 of SEQ ID NO: 1880857
agaauacuaguuuacgcau

SEQ ID NO: 1999193 - RNA, 19 nt, Artificial Sequence
  Description of Artificial Sequence: Synthetic oligonucleotide
  Antisense strand to SEQ ID NO: 1999192
augcguaaacuaguauucu

SEQ ID NO: 1999194 - RNA, 19 nt, Artificial Sequence
  Description of Artificial Sequence: Synthetic oligonucleotide
  Sense strand starting at position 2526 of SEQ ID NO: 1880857
gcauucugagggcagagau

SEQ ID NO: 1999195 - RNA, 19 nt, Artificial Sequence
  Description of Artificial Sequence: Synthetic oligonucleotide
  Antisense strand to SEQ ID NO: 1999194
aucucugcccucagaaugc

SEQ ID NO: 1999196 - RNA, 19 nt, Artificial Sequence
  Description of Artificial Sequence: Synthetic oligonucleotide
  Sense strand starting at position 2601 of SEQ ID NO: 1880857
caguguagugcucaauaaa

SEQ ID NO: 1999197 - RNA, 19 nt, Artificial Sequence
  Description of Artificial Sequence: Synthetic oligonucleotide
  Antisense strand to SEQ ID NO: 1999196
uuuauugagcacuacacug

SEQ ID NO: 1999198 - RNA, 19 nt, Artificial Sequence
  Description of Artificial Sequence: Synthetic oligonucleotide
  Sense strand starting at position 2669 of SEQ ID NO: 1880857
aagguaucacuugaauguu

SEQ ID NO: 1999199 - RNA, 19 nt, Artificial Sequence
  Description of Artificial Sequence: Synthetic oligonucleotide
  Antisense strand to SEQ ID NO: 1999198
aacauucaagugauaccuu

SEQ ID NO: 1999200 - RNA, 19 nt, Artificial Sequence
  Description of Artificial Sequence: Synthetic oligonucleotide
  Sense strand starting at position 2772 of SEQ ID NO: 1880857
uugauugucuacucuugaa

SEQ ID NO: 1999201 - RNA, 19 nt, Artificial Sequence
  Description of Artificial Sequence: Synthetic oligonucleotide
  Antisense strand to SEQ ID NO: 1999200
uucaagaguagacaaucaa

SEQ ID NO: 1999202 - RNA, 19 nt, Artificial Sequence
  Description of Artificial Sequence: Synthetic oligonucleotide
  Sense strand starting at position 2776 of SEQ ID NO: 1880857
uugucuacucuugaaguuu

SEQ ID NO: 1999203 - RNA, 19 nt, Artificial Sequence
  Description of Artificial Sequence: Synthetic oligonucleotide
  Antisense strand to SEQ ID NO: 1999202
aaacuucaagaguagacaa

SEQ ID NO: 1999204 - RNA, 19 nt, Artificial Sequence
  Description of Artificial Sequence: Synthetic oligonucleotide
  Sense strand starting at position 2782 of SEQ ID NO: 1880857
acucuugaaguuuaaagca

SEQ ID NO: 1999205 - RNA, 19 nt, Artificial Sequence
  Description of Artificial Sequence: Synthetic oligonucleotide
  Antisense strand to SEQ ID NO: 1999204
ugcuuuaaacuucaagagu

SEQ ID NO: 1999206 - RNA, 19 nt, Artificial Sequence
  Description of Artificial Sequence: Synthetic oligonucleotide
  Sense strand starting at position 2901 of SEQ ID NO: 1880857
accugaaacucuuugguug

SEQ ID NO: 1999207 - RNA, 19 nt, Artificial Sequence
  Description of Artificial Sequence: Synthetic oligonucleotide
  Antisense strand to SEQ ID NO: 1999206
caaccaaagaguuucaggu

SEQ ID NO: 1999208 - RNA, 19 nt, Artificial Sequence
  Description of Artificial Sequence: Synthetic oligonucleotide
  Sense strand starting at position 2982 of SEQ ID NO: 1880857
caagauucugugugacuua

SEQ ID NO: 1999209 - RNA, 19 nt, Artificial Sequence
  Description of Artificial Sequence: Synthetic oligonucleotide
  Antisense strand to SEQ ID NO: 1999208
uaagucacacagaaucuug

SEQ ID NO: 1999210 - RNA, 19 nt, Artificial Sequence
  Description of Artificial Sequence: Synthetic oligonucleotide
  Sense strand starting at position 3275 of SEQ ID NO: 1880857
auaacauacugagcuugau

SEQ ID NO: 1999211 - RNA, 19 nt, Artificial Sequence
  Description of Artificial Sequence: Synthetic oligonucleotide
  Antisense strand to SEQ ID NO: 1999210
aucaagcucaguauguuau

SEQ ID NO: 1999212 - RNA, 19 nt, Artificial Sequence
  Description of Artificial Sequence: Synthetic oligonucleotide
  Sense strand starting at position 3318 of SEQ ID NO: 1880857
agacuaaucucugugacua

SEQ ID NO: 1999213 - RNA, 19 nt, Artificial Sequence
  Description of Artificial Sequence: Synthetic oligonucleotide
  Antisense strand to SEQ ID NO: 1999212
uagucacagagauuagucu

SEQ ID NO: 1999214 - RNA, 19 nt, Artificial Sequence
  Description of Artificial Sequence: Synthetic oligonucleotide
  Sense strand starting at position 3436 of SEQ ID NO: 1880857
cuagauaauuguucuauug

SEQ ID NO: 1999215 - RNA, 19 nt, Artificial Sequence
  Description of Artificial Sequence: Synthetic oligonucleotide
  Antisense strand to SEQ ID NO: 1999214
caauagaacaauuaucuag

SEQ ID NO: 1999216 - RNA, 19 nt, Artificial Sequence
  Description of Artificial Sequence: Synthetic oligonucleotide
  Sense strand starting at position 3476 of SEQ ID NO: 1880857
gguuaauugccugcguaug

SEQ ID NO: 1999217 - RNA, 19 nt, Artificial Sequence
  Description of Artificial Sequence: Synthetic oligonucleotide
  Antisense strand to SEQ ID NO: 1999216
cauacgcaggcaauuaacc

SEQ ID NO: 1999218 - RNA, 19 nt, Artificial Sequence
  Description of Artificial Sequence: Synthetic oligonucleotide
  Sense strand starting at position 104 of SEQ ID NO: 1880858
auacguagugcagaacaaa

SEQ ID NO: 1999219 - RNA, 19 nt, Artificial Sequence
  Description of Artificial Sequence: Synthetic oligonucleotide
  Antisense strand to SEQ ID NO: 1999218
uuuguucugcacuacguau

SEQ ID NO: 1999220 - RNA, 19 nt, Artificial Sequence
  Description of Artificial Sequence: Synthetic oligonucleotide
  Sense strand starting at position 176 of SEQ ID NO: 1880858
caaaguguccacuggucua

SEQ ID NO: 1999221 - RNA, 19 nt, Artificial Sequence
  Description of Artificial Sequence: Synthetic oligonucleotide
  Antisense strand to SEQ ID NO: 1999220
uagaccaguggacacuuug

SEQ ID NO: 1999222 - RNA, 19 nt, Artificial Sequence
  Description of Artificial Sequence: Synthetic oligonucleotide
  Sense strand starting at position 536 of SEQ ID NO: 1880858
ugacuaaucuguuccugca

SEQ ID NO: 1999223 - RNA, 19 nt, Artificial Sequence
  Description of Artificial Sequence: Synthetic oligonucleotide
  Antisense strand to SEQ ID NO: 1999222
ugcaggaacagauuaguca

SEQ ID NO: 1999224 - RNA, 19 nt, Artificial Sequence
  Description of Artificial Sequence: Synthetic oligonucleotide
  Sense strand starting at position 679 of SEQ ID NO: 1880858
guuaguuagggcugggaua

SEQ ID NO: 1999225 - RNA, 19 nt, Artificial Sequence
  Description of Artificial Sequence: Synthetic oligonucleotide
  Antisense strand to SEQ ID NO: 1999224
uaucccagcccuaacuaac

SEQ ID NO: 1999226 - RNA, 19 nt, Artificial Sequence
  Description of Artificial Sequence: Synthetic oligonucleotide
  Sense strand starting at position 961 of SEQ ID NO: 1880858
ccaaacuauuuguaggaaa

SEQ ID NO: 1999227 - RNA, 19 nt, Artificial Sequence
  Description of Artificial Sequence: Synthetic oligonucleotide
  Antisense strand to SEQ ID NO: 1999226
uuuccuacaaauaguuugg

SEQ ID NO: 1999228 - RNA, 19 nt, Artificial Sequence
  Description of Artificial Sequence: Synthetic oligonucleotide
  Sense strand starting at position 1026 of SEQ ID NO: 1880858
agauaaggguuagcucuau

SEQ ID NO: 1999229 - RNA, 19 nt, Artificial Sequence
  Description of Artificial Sequence: Synthetic oligonucleotide
  Antisense strand to SEQ ID NO: 1999228
auagagcuaacccuuaucu

SEQ ID NO: 1999230 - RNA, 19 nt, Artificial Sequence
  Description of Artificial Sequence: Synthetic oligonucleotide
  Sense strand starting at position 1030 of SEQ ID NO: 1880858
aaggguuagcucuaucacu

SEQ ID NO: 1999231 - RNA, 19 nt, Artificial Sequence
  Description of Artificial Sequence: Synthetic oligonucleotide
  Antisense strand to SEQ ID NO: 1999230
agugauagagcuaacccuu

SEQ ID NO: 1999232 - RNA, 19 nt, Artificial Sequence
  Description of Artificial Sequence: Synthetic oligonucleotide
  Sense strand starting at position 1167 of SEQ ID NO: 1880858
cucagaaggcucugucauu

SEQ ID NO: 1999233 - RNA, 19 nt, Artificial Sequence
  Description of Artificial Sequence: Synthetic oligonucleotide
  Antisense strand to SEQ ID NO: 1999232
aaugacagagccuucugag

SEQ ID NO: 1999234 - RNA, 19 nt, Artificial Sequence
  Description of Artificial Sequence: Synthetic oligonucleotide
  Sense strand starting at position 1168 of SEQ ID NO: 1880858
ucagaaggcucugucauug

SEQ ID NO: 1999235 - RNA, 19 nt, Artificial Sequence
  Description of Artificial Sequence: Synthetic oligonucleotide
  Antisense strand to SEQ ID NO: 1999234
caaugacagagccuucuga

SEQ ID NO: 1999236 - RNA, 19 nt, Artificial Sequence
  Description of Artificial Sequence: Synthetic oligonucleotide
  Sense strand starting at position 1172 of SEQ ID NO: 1880858
aaggcucugucauugauca

SEQ ID NO: 1999237 - RNA, 19 nt, Artificial Sequence
  Description of Artificial Sequence: Synthetic oligonucleotide
  Antisense strand to SEQ ID NO: 1999236
ugaucaaugacagagccuu

SEQ ID NO: 1999238 - RNA, 19 nt, Artificial Sequence
  Description of Artificial Sequence: Synthetic oligonucleotide
  Sense strand starting at position 1389 of SEQ ID NO: 1880858
gugauuaggaaccgugaca

SEQ ID NO: 1999239 - RNA, 19 nt, Artificial Sequence
  Description of Artificial Sequence: Synthetic oligonucleotide
  Antisense strand to SEQ ID NO: 1999238
ugucacgguuccuaaucac

SEQ ID NO: 1999240 - RNA, 19 nt, Artificial Sequence
  Description of Artificial Sequence: Synthetic oligonucleotide
  Sense strand starting at position 1815 of SEQ ID NO: 1880858
cagaguagcucucuaugga

SEQ ID NO: 1999241 - RNA, 19 nt, Artificial Sequence
  Description of Artificial Sequence: Synthetic oligonucleotide
  Antisense strand to SEQ ID NO: 1999240
uccauagagagcuacucug

SEQ ID NO: 1999242 - RNA, 19 nt, Artificial Sequence
  Description of Artificial Sequence: Synthetic oligonucleotide
  Sense strand starting at position 1816 of SEQ ID NO: 1880858
agaguagcucucuauggaa

SEQ ID NO: 1999243 - RNA, 19 nt, Artificial Sequence
  Description of Artificial Sequence: Synthetic oligonucleotide
  Antisense strand to SEQ ID NO: 1999242
uuccauagagagcuacucu

SEQ ID NO: 1999244 - RNA, 19 nt, Artificial Sequence
  Description of Artificial Sequence: Synthetic oligonucleotide
  Sense strand starting at position 1916 of SEQ ID NO: 1880858
aaugcuaguucugugaauu

SEQ ID NO: 1999245 - RNA, 19 nt, Artificial Sequence
  Description of Artificial Sequence: Synthetic oligonucleotide
  Antisense strand to SEQ ID NO: 1999244
aauucacagaacuagcauu

SEQ ID NO: 1999246 - RNA, 19 nt, Artificial Sequence
  Description of Artificial Sequence: Synthetic oligonucleotide
  Sense strand starting at position 1936 of SEQ ID NO: 1880858
ucucuucuucucgugcgaa

SEQ ID NO: 1999247 - RNA, 19 nt, Artificial Sequence
  Description of Artificial Sequence: Synthetic oligonucleotide
  Antisense strand to SEQ ID NO: 1999246
uucgcacgagaagaagaga

SEQ ID NO: 1999248 - RNA, 19 nt, Artificial Sequence
  Description of Artificial Sequence: Synthetic oligonucleotide
  Sense strand starting at position 1938 of SEQ ID NO: 1880858
ucuucuucucgugcgaauc

SEQ ID NO: 1999249 - RNA, 19 nt, Artificial Sequence
  Description of Artificial Sequence: Synthetic oligonucleotide
  Antisense strand to SEQ ID NO: 1999248
gauucgcacgagaagaaga

SEQ ID NO: 1999250 - RNA, 19 nt, Artificial Sequence
  Description of Artificial Sequence: Synthetic oligonucleotide
  Sense strand starting at position 1958 of SEQ ID NO: 1880858
auaaacugccacugauaga

SEQ ID NO: 1999251 - RNA, 19 nt, Artificial Sequence
  Description of Artificial Sequence: Synthetic oligonucleotide
  Antisense strand to SEQ ID NO: 1999250
ucuaucaguggcaguuuau

SEQ ID NO: 1999252 - RNA, 19 nt, Artificial Sequence
  Description of Artificial Sequence: Synthetic oligonucleotide
  Sense strand starting at position 2007 of SEQ ID NO: 1880858
gacucaaggucugcacaga

SEQ ID NO: 1999253 - RNA, 19 nt, Artificial Sequence
  Description of Artificial Sequence: Synthetic oligonucleotide
  Antisense strand to SEQ ID NO: 1999252
ucugugcagaccuugaguc

SEQ ID NO: 1999254 - RNA, 19 nt, Artificial Sequence
  Description of Artificial Sequence: Synthetic oligonucleotide
  Sense strand starting at position 2190 of SEQ ID NO: 1880858
uuuggauggcucugggaag

SEQ ID NO: 1999255 - RNA, 19 nt, Artificial Sequence
  Description of Artificial Sequence: Synthetic oligonucleotide
  Antisense strand to SEQ ID NO: 1999254
cuucccagagccauccaaa

SEQ ID NO: 1999256 - RNA, 19 nt, Artificial Sequence
  Description of Artificial Sequence: Synthetic oligonucleotide
  Sense strand starting at position 2218 of SEQ ID NO: 1880858
augugacuuuaugugaagu

SEQ ID NO: 1999257 - RNA, 19 nt, Artificial Sequence
  Description of Artificial Sequence: Synthetic oligonucleotide
  Antisense strand to SEQ ID NO: 1999256
acuucacauaaagucacau

SEQ ID NO: 1999258 - RNA, 19 nt, Artificial Sequence
  Description of Artificial Sequence: Synthetic oligonucleotide
  Sense strand starting at position 2219 of SEQ ID NO: 1880858
ugugacuuuaugugaaguc

SEQ ID NO: 1999259 - RNA, 19 nt, Artificial Sequence
  Description of Artificial Sequence: Synthetic oligonucleotide
  Antisense strand to SEQ ID NO: 1999258
gacuucacauaaagucaca

SEQ ID NO: 1999260 - RNA, 19 nt, Artificial Sequence
  Description of Artificial Sequence: Synthetic oligonucleotide
  Sense strand starting at position 2232 of SEQ ID NO: 1880858
gaagucacaguucguaaca

SEQ ID NO: 1999261 - RNA, 19 nt, Artificial Sequence
  Description of Artificial Sequence: Synthetic oligonucleotide
  Antisense strand to SEQ ID NO: 1999260
uguuacgaacugugacuuc

SEQ ID NO: 1999262 - RNA, 19 nt, Artificial Sequence
  Description of Artificial Sequence: Synthetic oligonucleotide
  Sense strand starting at position 2282 of SEQ ID NO: 1880858
agccaagaauacuuguuau

SEQ ID NO: 1999263 - RNA, 19 nt, Artificial Sequence
  Description of Artificial Sequence: Synthetic oligonucleotide
  Antisense strand to SEQ ID NO: 1999262
auaacaaguauucuuggcu

SEQ ID NO: 1999264 - RNA, 19 nt, Artificial Sequence
  Description of Artificial Sequence: Synthetic oligonucleotide
  Sense strand starting at position 2332 of SEQ ID NO: 1880858
acuaguccuuaauuaaagu

SEQ ID NO: 1999265 - RNA, 19 nt, Artificial Sequence
  Description of Artificial Sequence: Synthetic oligonucleotide
  Antisense strand to SEQ ID NO: 1999264
acuuuaauuaaggacuagu

SEQ ID NO: 1999266 - RNA, 19 nt, Artificial Sequence
  Description of Artificial Sequence: Synthetic oligonucleotide
  Sense strand starting at position 2353 of SEQ ID NO: 1880858
aggcuauucuggguuuaca

SEQ ID NO: 1999267 - RNA, 19 nt, Artificial Sequence
  Description of Artificial Sequence: Synthetic oligonucleotide
  Antisense strand to SEQ ID NO: 1999266
uguaaacccagaauagccu

SEQ ID NO: 1999268 - RNA, 19 nt, Artificial Sequence
  Description of Artificial Sequence: Synthetic oligonucleotide
  Sense strand starting at position 2466 of SEQ ID NO: 1880858
gcaggaaaucaugggcaaa

SEQ ID NO: 1999269 - RNA, 19 nt, Artificial Sequence
  Description of Artificial Sequence: Synthetic oligonucleotide
  Antisense strand to SEQ ID NO: 1999268
uuugcccaugauuuccugc

SEQ ID NO: 1999270 - RNA, 19 nt, Artificial Sequence
  Description of Artificial Sequence: Synthetic oligonucleotide
  Sense strand starting at position 2486 of SEQ ID NO: 1880858
uugcuacucugaguugaca

SEQ ID NO: 1999271 - RNA, 19 nt, Artificial Sequence
  Description of Artificial Sequence: Synthetic oligonucleotide
  Antisense strand to SEQ ID NO: 1999270
ugucaacucagaguagcaa

SEQ ID NO: 1999272 - RNA, 19 nt, Artificial Sequence
  Description of Artificial Sequence: Synthetic oligonucleotide
  Sense strand starting at position 2567 of SEQ ID NO: 1880858
gguaaucagucaucauauc

SEQ ID NO: 1999273 - RNA, 19 nt, Artificial Sequence
  Description of Artificial Sequence: Synthetic oligonucleotide
  Antisense strand to SEQ ID NO: 1999272
gauaugaugacugauuacc

SEQ ID NO: 1999274 - RNA, 19 nt, Artificial Sequence
  Description of Artificial Sequence: Synthetic oligonucleotide
  Sense strand starting at position 2784 of SEQ ID NO: 1880858
gcuucuuuagcgucuucga

SEQ ID NO: 1999275 - RNA, 19 nt, Artificial Sequence
  Description of Artificial Sequence: Synthetic oligonucleotide
  Antisense strand to SEQ ID NO: 1999274
ucgaagacgcuaaagaagc

SEQ ID NO: 1999276 - RNA, 19 nt, Artificial Sequence
  Description of Artificial Sequence: Synthetic oligonucleotide
  Sense strand starting at position 2838 of SEQ ID NO: 1880858
aacaguuaaugcuuagagu

SEQ ID NO: 1999277 - RNA, 19 nt, Artificial Sequence
  Description of Artificial Sequence: Synthetic oligonucleotide
  Antisense strand to SEQ ID NO: 1999276
acucuaagcauuaacuguu

SEQ ID NO: 1999278 - RNA, 19 nt, Artificial Sequence
  Description of Artificial Sequence: Synthetic oligonucleotide
  Sense strand starting at position 2839 of SEQ ID NO: 1880858
acaguuaaugcuuagagua

SEQ ID NO: 1999279 - RNA, 19 nt, Artificial Sequence
  Description of Artificial Sequence: Synthetic oligonucleotide
  Antisense strand to SEQ ID NO: 1999278
uacucuaagcauuaacugu

SEQ ID NO: 1999280 - RNA, 19 nt, Artificial Sequence
  Description of Artificial Sequence: Synthetic oligonucleotide
  Sense strand starting at position 2844 of SEQ ID NO: 1880858
uaaugcuuagaguaaguua

SEQ ID NO: 1999281 - RNA, 19 nt, Artificial Sequence
  Description of Artificial Sequence: Synthetic oligonucleotide
  Antisense strand to SEQ ID NO: 1999280
uaacuuacucuaagcauua

SEQ ID NO: 1999282 - RNA, 19 nt, Artificial Sequence
  Description of Artificial Sequence: Synthetic oligonucleotide
  Sense strand starting at position 2995 of SEQ ID NO: 1880858
gaccuuacguuccuuuaga

SEQ ID NO: 1999283 - RNA, 19 nt, Artificial Sequence
  Description of Artificial Sequence: Synthetic oligonucleotide
  Antisense strand to SEQ ID NO: 1999282
ucuaaaggaacguaagguc

SEQ ID NO: 1999284 - RNA, 19 nt, Artificial Sequence
  Description of Artificial Sequence: Synthetic oligonucleotide
  Sense strand starting at position 3052 of SEQ ID NO: 1880858
gguauuaucuuacccuuua

SEQ ID NO: 1999285 - RNA, 19 nt, Artificial Sequence
  Description of Artificial Sequence: Synthetic oligonucleotide
  Antisense strand to SEQ ID NO: 1999284
uaaaggguaagauaauacc

SEQ ID NO: 1999286 - RNA, 19 nt, Artificial Sequence
  Description of Artificial Sequence: Synthetic oligonucleotide
  Sense strand starting at position 3053 of SEQ ID NO: 1880858
guauuaucuuacccuuuag

SEQ ID NO: 1999287 - RNA, 19 nt, Artificial Sequence
  Description of Artificial Sequence: Synthetic oligonucleotide
  Antisense strand to SEQ ID NO: 1999286
cuaaaggguaagauaauac

SEQ ID NO: 1999288 - RNA, 19 nt, Artificial Sequence
  Description of Artificial Sequence: Synthetic oligonucleotide
  Sense strand starting at position 3409 of SEQ ID NO: 1880858
uuccuagaaucaucugagu

SEQ ID NO: 1999289 - RNA, 19 nt, Artificial Sequence
  Description of Artificial Sequence: Synthetic oligonucleotide
  Antisense strand to SEQ ID NO: 1999288
acucagaugauucuaggaa

SEQ ID NO: 1999290 - RNA, 19 nt, Artificial Sequence
  Description of Artificial Sequence: Synthetic oligonucleotide
  Sense strand starting at position 3481 of SEQ ID NO: 1880858
gcuugauuugccuacugua

SEQ ID NO: 1999291 - RNA, 19 nt, Artificial Sequence
  Description of Artificial Sequence: Synthetic oligonucleotide
  Antisense strand to SEQ ID NO: 1999290
uacaguaggcaaaucaagc

SEQ ID NO: 1999292 - RNA, 19 nt, Artificial Sequence
  Description of Artificial Sequence: Synthetic oligonucleotide
  Sense strand starting at position 3573 of SEQ ID NO: 1880858
gguaucauguccuugaucu

SEQ ID NO: 1999293 - RNA, 19 nt, Artificial Sequence
  Description of Artificial Sequence: Synthetic oligonucleotide
  Antisense strand to SEQ ID NO: 1999292
agaucaaggacaugauacc

SEQ ID NO: 1999294 - RNA, 19 nt, Artificial Sequence
  Description of Artificial Sequence: Synthetic oligonucleotide
  Sense strand starting at position 3656 of SEQ ID NO: 1880858
aggaguucccuccaccaau

SEQ ID NO: 1999295 - RNA, 19 nt, Artificial Sequence
  Description of Artificial Sequence: Synthetic oligonucleotide
  Antisense strand to SEQ ID NO: 1999294
auugguggagggaacuccu

SEQ ID NO: 1999296 - RNA, 19 nt, Artificial Sequence
  Description of Artificial Sequence: Synthetic oligonucleotide
  Sense strand starting at position 3752 of SEQ ID NO: 1880858
cuuucucuccaguauagua

SEQ ID NO: 1999297 - RNA, 19 nt, Artificial Sequence
  Description of Artificial Sequence: Synthetic oligonucleotide
  Antisense strand to SEQ ID NO: 1999296
uacuauacuggagagaaag

SEQ ID NO: 1999298 - RNA, 19 nt, Artificial Sequence
  Description of Artificial Sequence: Synthetic oligonucleotide
  Sense strand starting at position 66 of SEQ ID NO: 1880859
ggccucauauacuuacaga

SEQ ID NO: 1999299 - RNA, 19 nt, Artificial Sequence
  Description of Artificial Sequence: Synthetic oligonucleotide
  Antisense strand to SEQ ID NO: 1999298
ucuguaaguauaugaggcc

SEQ ID NO: 1999300 - RNA, 19 nt, Artificial Sequence
  Description of Artificial Sequence: Synthetic oligonucleotide
  Sense strand starting at position 111 of SEQ ID NO: 1880859
ccagaauguccuuggcagu

SEQ ID NO: 1999301 - RNA, 19 nt, Artificial Sequence
  Description of Artificial Sequence: Synthetic oligonucleotide
  Antisense strand to SEQ ID NO: 1999300
acugccaaggacauucugg

SEQ ID NO: 1999302 - RNA, 19 nt, Artificial Sequence
  Description of Artificial Sequence: Synthetic oligonucleotide
  Sense strand starting at position 112 of SEQ ID NO: 1880859
cagaauguccuuggcagua

SEQ ID NO: 1999303 - RNA, 19 nt, Artificial Sequence
  Description of Artificial Sequence: Synthetic oligonucleotide
  Antisense strand to SEQ ID NO: 1999302
uacugccaaggacauucug

SEQ ID NO: 1999304 - RNA, 19 nt, Artificial Sequence
  Description of Artificial Sequence: Synthetic oligonucleotide
  Sense strand starting at position 188 of SEQ ID NO: 1880859
ucuugauguuccucugaaa

SEQ ID NO: 1999305 - RNA, 19 nt, Artificial Sequence
  Description of Artificial Sequence: Synthetic oligonucleotide
  Antisense strand to SEQ ID NO: 1999304
uuucagaggaacaucaaga

SEQ ID NO: 1999306 - RNA, 19 nt, Artificial Sequence
  Description of Artificial Sequence: Synthetic oligonucleotide
  Sense strand starting at position 293 of SEQ ID NO: 1880859
acugaauacuuacauggaa

SEQ ID NO: 1999307 - RNA, 19 nt, Artificial Sequence
  Description of Artificial Sequence: Synthetic oligonucleotide
  Antisense strand to SEQ ID NO: 1999306
uuccauguaaguauucagu

SEQ ID NO: 1999308 - RNA, 19 nt, Artificial Sequence
  Description of Artificial Sequence: Synthetic oligonucleotide
  Sense strand starting at position 397 of SEQ ID NO: 1880859
uuggaacagcagugacaau

SEQ ID NO: 1999309 - RNA, 19 nt, Artificial Sequence
  Description of Artificial Sequence: Synthetic oligonucleotide
  Antisense strand to SEQ ID NO: 1999308
auugucacugcuguuccaa

SEQ ID NO: 1999310 - RNA, 19 nt, Artificial Sequence
  Description of Artificial Sequence: Synthetic oligonucleotide
  Sense strand starting at position 408 of SEQ ID NO: 1880859
gugacaaucugagaaauaa

SEQ ID NO: 1999311 - RNA, 19 nt, Artificial Sequence
  Description of Artificial Sequence: Synthetic oligonucleotide
  Antisense strand to SEQ ID NO: 1999310
uuauuucucagauugucac

SEQ ID NO: 1999312 - RNA, 19 nt, Artificial Sequence
  Description of Artificial Sequence: Synthetic oligonucleotide
  Sense strand starting at position 432 of SEQ ID NO: 1880859
ggaauuugcugucuaccuu

SEQ ID NO: 1999313 - RNA, 19 nt, Artificial Sequence
  Description of Artificial Sequence: Synthetic oligonucleotide
  Antisense strand to SEQ ID NO: 1999312
aagguagacagcaaauucc

SEQ ID NO: 1999314 - RNA, 19 nt, Artificial Sequence
  Description of Artificial Sequence: Synthetic oligonucleotide
  Sense strand starting at position 528 of SEQ ID NO: 1880859
cuggccuggucauccuaau

SEQ ID NO: 1999315 - RNA, 19 nt, Artificial Sequence
  Description of Artificial Sequence: Synthetic oligonucleotide
  Antisense strand to SEQ ID NO: 1999314
auuaggaugaccaggccag

SEQ ID NO: 1999316 - RNA, 19 nt, Artificial Sequence
  Description of Artificial Sequence: Synthetic oligonucleotide
  Sense strand starting at position 547 of SEQ ID NO: 1880859
uauuacuaggcauaaggua

SEQ ID NO: 1999317 - RNA, 19 nt, Artificial Sequence
  Description of Artificial Sequence: Synthetic oligonucleotide
  Antisense strand to SEQ ID NO: 1999316
uaccuuaugccuaguaaua

SEQ ID NO: 1999318 - RNA, 19 nt, Artificial Sequence
  Description of Artificial Sequence: Synthetic oligonucleotide
  Sense strand starting at position 572 of SEQ ID NO: 1880859
uccauaaaccuuggcagua

SEQ ID NO: 1999319 - RNA, 19 nt, Artificial Sequence
  Description of Artificial Sequence: Synthetic oligonucleotide
  Antisense strand to SEQ ID NO: 1999318
uacugccaagguuuaugga

SEQ ID NO: 1999320 - RNA, 19 nt, Artificial Sequence
  Description of Artificial Sequence: Synthetic oligonucleotide
  Sense strand starting at position 682 of SEQ ID NO: 1880859
agaagcuuaucugcacuua

SEQ ID NO: 1999321 - RNA, 19 nt, Artificial Sequence
  Description of Artificial Sequence: Synthetic oligonucleotide
  Antisense strand to SEQ ID NO: 1999320
uaagugcagauaagcuucu

SEQ ID NO: 1999322 - RNA, 19 nt, Artificial Sequence
  Description of Artificial Sequence: Synthetic oligonucleotide
  Sense strand starting at position 694 of SEQ ID NO: 1880859
gcacuuagcucacugauau

SEQ ID NO: 1999323 - RNA, 19 nt, Artificial Sequence
  Description of Artificial Sequence: Synthetic oligonucleotide
  Antisense strand to SEQ ID NO: 1999322
auaucagugagcuaagugc

SEQ ID NO: 1999324 - RNA, 19 nt, Artificial Sequence
  Description of Artificial Sequence: Synthetic oligonucleotide
  Sense strand starting at position 721 of SEQ ID NO: 1880859
gucuuauaauggucugauu

SEQ ID NO: 1999325 - RNA, 19 nt, Artificial Sequence
  Description of Artificial Sequence: Synthetic oligonucleotide
  Antisense strand to SEQ ID NO: 1999324
aaucagaccauuauaagac

SEQ ID NO: 1999326 - RNA, 19 nt, Artificial Sequence
  Description of Artificial Sequence: Synthetic oligonucleotide
  Sense strand starting at position 1144 of SEQ ID NO: 1880859
cauggaaaugucuggagca

SEQ ID NO: 1999327 - RNA, 19 nt, Artificial Sequence
  Description of Artificial Sequence: Synthetic oligonucleotide
  Antisense strand to SEQ ID NO: 1999326
ugcuccagacauuuccaug

SEQ ID NO: 1999328 - RNA, 19 nt, Artificial Sequence
  Description of Artificial Sequence: Synthetic oligonucleotide
  Sense strand starting at position 1186 of SEQ ID NO: 1880859
ucauguauuagcuggguau

SEQ ID NO: 1999329 - RNA, 19 nt, Artificial Sequence
  Description of Artificial Sequence: Synthetic oligonucleotide
  Antisense strand to SEQ ID NO: 1999328
auacccagcuaauacauga

SEQ ID NO: 1999330 - RNA, 19 nt, Artificial Sequence
  Description of Artificial Sequence: Synthetic oligonucleotide
  Sense strand starting at position 1187 of SEQ ID NO: 1880859
cauguauuagcuggguaua

SEQ ID NO: 1999331 - RNA, 19 nt, Artificial Sequence
  Description of Artificial Sequence: Synthetic oligonucleotide
  Antisense strand to SEQ ID NO: 1999330
uauacccagcuaauacaug

SEQ ID NO: 1999332 - RNA, 19 nt, Artificial Sequence
  Description of Artificial Sequence: Synthetic oligonucleotide
  Sense strand starting at position 1188 of SEQ ID NO: 1880859
auguauuagcuggguauau

SEQ ID NO: 1999333 - RNA, 19 nt, Artificial Sequence
  Description of Artificial Sequence: Synthetic oligonucleotide
  Antisense strand to SEQ ID NO: 1999332
auauacccagcuaauacau

SEQ ID NO: 1999334 - RNA, 19 nt, Artificial Sequence
  Description of Artificial Sequence: Synthetic oligonucleotide
  Sense strand starting at position 1189 of SEQ ID NO: 1880859
uguauuagcuggguauaua

SEQ ID NO: 1999335 - RNA, 19 nt, Artificial Sequence
  Description of Artificial Sequence: Synthetic oligonucleotide
  Antisense strand to SEQ ID NO: 1999334
uauauacccagcuaauaca

SEQ ID NO: 1999336 - RNA, 19 nt, Artificial Sequence
  Description of Artificial Sequence: Synthetic oligonucleotide
  Sense strand starting at position 1190 of SEQ ID NO: 1880859
guauuagcuggguauauac

SEQ ID NO: 1999337 - RNA, 19 nt, Artificial Sequence
  Description of Artificial Sequence: Synthetic oligonucleotide
  Antisense strand to SEQ ID NO: 1999336
guauauacccagcuaauac

SEQ ID NO: 1999338 - RNA, 19 nt, Artificial Sequence
  Description of Artificial Sequence: Synthetic oligonucleotide
  Sense strand starting at position 1197 of SEQ ID NO: 1880859
cuggguauauacuucuuaa

SEQ ID NO: 1999339 - RNA, 19 nt, Artificial Sequence
  Description of Artificial Sequence: Synthetic oligonucleotide
  Antisense strand to SEQ ID NO: 1999338
uuaagaaguauauacccag

SEQ ID NO: 1999340 - RNA, 19 nt, Artificial Sequence
  Description of Artificial Sequence: Synthetic oligonucleotide
  Sense strand starting at position 1259 of SEQ ID NO: 1880859
gcuguuaccugaucagaau

SEQ ID NO: 1999341 - RNA, 19 nt, Artificial Sequence
  Description of Artificial Sequence: Synthetic oligonucleotide
  Antisense strand to SEQ ID NO: 1999340
auucugaucagguaacagc

SEQ ID NO: 1999342 - RNA, 19 nt, Artificial Sequence
  Description of Artificial Sequence: Synthetic oligonucleotide
  Sense strand starting at position 1260 of SEQ ID NO: 1880859
cuguuaccugaucagaauu

SEQ ID NO: 1999343 - RNA, 19 nt, Artificial Sequence
  Description of Artificial Sequence: Synthetic oligonucleotide
  Antisense strand to SEQ ID NO: 1999342
aauucugaucagguaacag

SEQ ID NO: 1999344 - RNA, 19 nt, Artificial Sequence
  Description of Artificial Sequence: Synthetic oligonucleotide
  Sense strand starting at position 1585 of SEQ ID NO: 1880859
ccggcuagaacucaguauu

SEQ ID NO: 1999345 - RNA, 19 nt, Artificial Sequence
  Description of Artificial Sequence: Synthetic oligonucleotide
  Antisense strand to SEQ ID NO: 1999344
aauacugaguucuagccgg

SEQ ID NO: 1999346 - RNA, 19 nt, Artificial Sequence
  Description of Artificial Sequence: Synthetic oligonucleotide
  Sense strand starting at position 1588 of SEQ ID NO: 1880859
gcuagaacucaguauucuu

SEQ ID NO: 1999347 - RNA, 19 nt, Artificial Sequence
  Description of Artificial Sequence: Synthetic oligonucleotide
  Antisense strand to SEQ ID NO: 1999346
aagaauacugaguucuagc

SEQ ID NO: 1999348 - RNA, 19 nt, Artificial Sequence
  Description of Artificial Sequence: Synthetic oligonucleotide
  Sense strand starting at position 1667 of SEQ ID NO: 1880859
ucucguauuugcuuagcua

SEQ ID NO: 1999349 - RNA, 19 nt, Artificial Sequence
  Description of Artificial Sequence: Synthetic oligonucleotide
  Antisense strand to SEQ ID NO: 1999348
uagcuaagcaaauacgaga

SEQ ID NO: 1999350 - RNA, 19 nt, Artificial Sequence
  Description of Artificial Sequence: Synthetic oligonucleotide
  Sense strand starting at position 1668 of SEQ ID NO: 1880859
cucguauuugcuuagcuau

SEQ ID NO: 1999351 - RNA, 19 nt, Artificial Sequence
  Description of Artificial Sequence: Synthetic oligonucleotide
  Antisense strand to SEQ ID NO: 1999350
auagcuaagcaaauacgag

SEQ ID NO: 1999352 - RNA, 19 nt, Artificial Sequence
  Description of Artificial Sequence: Synthetic oligonucleotide
  Sense strand starting at position 1670 of SEQ ID NO: 1880859
cguauuugcuuagcuauga

SEQ ID NO: 1999353 - RNA, 19 nt, Artificial Sequence
  Description of Artificial Sequence: Synthetic oligonucleotide
  Antisense strand to SEQ ID NO: 1999352
ucauagcuaagcaaauacg

SEQ ID NO: 1999354 - RNA, 19 nt, Artificial Sequence
  Description of Artificial Sequence: Synthetic oligonucleotide
  Sense strand starting at position 1674 of SEQ ID NO: 1880859
uuugcuuagcuaugagaau

SEQ ID NO: 1999355 - RNA, 19 nt, Artificial Sequence
  Description of Artificial Sequence: Synthetic oligonucleotide
  Antisense strand to SEQ ID NO: 1999354
auucucauagcuaagcaaa

SEQ ID NO: 1999356 - RNA, 19 nt, Artificial Sequence
  Description of Artificial Sequence: Synthetic oligonucleotide
  Sense strand starting at position 1728 of SEQ ID NO: 1880859
gcaagaacaucacucuagu

SEQ ID NO: 1999357 - RNA, 19 nt, Artificial Sequence
  Description of Artificial Sequence: Synthetic oligonucleotide
  Antisense strand to SEQ ID NO: 1999356
acuagagugauguucuugc

SEQ ID NO: 1999358 - RNA, 19 nt, Artificial Sequence
  Description of Artificial Sequence: Synthetic oligonucleotide
  Sense strand starting at position 2053 of SEQ ID NO: 1880859
uccgaaguugccuaaauca

SEQ ID NO: 1999359 - RNA, 19 nt, Artificial Sequence
  Description of Artificial Sequence: Synthetic oligonucleotide
  Antisense strand to SEQ ID NO: 1999358
ugauuuaggcaacuucgga

SEQ ID NO: 1999360 - RNA, 19 nt, Artificial Sequence
  Description of Artificial Sequence: Synthetic oligonucleotide
  Sense strand starting at position 2091 of SEQ ID NO: 1880859
gaguaacaacgcuagcaaa

SEQ ID NO: 1999361 - RNA, 19 nt, Artificial Sequence
  Description of Artificial Sequence: Synthetic oligonucleotide
  Antisense strand to SEQ ID NO: 1999360
uuugcuagcguuguuacuc

SEQ ID NO: 1999362 - RNA, 19 nt, Artificial Sequence
  Description of Artificial Sequence: Synthetic oligonucleotide
  Sense strand starting at position 2118 of SEQ ID NO: 1880859
uguuacagacaugguuaua

SEQ ID NO: 1999363 - RNA, 19 nt, Artificial Sequence
  Description of Artificial Sequence: Synthetic oligonucleotide
  Antisense strand to SEQ ID NO: 1999362
uauaaccaugucuguaaca

SEQ ID NO: 1999364 - RNA, 19 nt, Artificial Sequence
  Description of Artificial Sequence: Synthetic oligonucleotide
  Sense strand starting at position 2243 of SEQ ID NO: 1880859
aggccuaaacuuggaaagu

SEQ ID NO: 1999365 - RNA, 19 nt, Artificial Sequence
  Description of Artificial Sequence: Synthetic oligonucleotide
  Antisense strand to SEQ ID NO: 1999364
acuuuccaaguuuaggccu

SEQ ID NO: 1999366 - RNA, 19 nt, Artificial Sequence
  Description of Artificial Sequence: Synthetic oligonucleotide
  Sense strand starting at position 2415 of SEQ ID NO: 1880859
agaggauaauguuagaaga

SEQ ID NO: 1999367 - RNA, 19 nt, Artificial Sequence
  Description of Artificial Sequence: Synthetic oligonucleotide
  Antisense strand to SEQ ID NO: 1999366
ucuucuaacauuauccucu

SEQ ID NO: 1999368 - RNA, 19 nt, Artificial Sequence
  Description of Artificial Sequence: Synthetic oligonucleotide
  Sense strand starting at position 2417 of SEQ ID NO: 1880859
aggauaauguuagaagaga

SEQ ID NO: 1999369 - RNA, 19 nt, Artificial Sequence
  Description of Artificial Sequence: Synthetic oligonucleotide
  Antisense strand to SEQ ID NO: 1999368
ucucuucuaacauuauccu

SEQ ID NO: 1999370 - RNA, 19 nt, Artificial Sequence
  Description of Artificial Sequence: Synthetic oligonucleotide
  Sense strand starting at position 2642 of SEQ ID NO: 1880859
uguguauguccguucaucu

SEQ ID NO: 1999371 - RNA, 19 nt, Artificial Sequence
  Description of Artificial Sequence: Synthetic oligonucleotide
  Antisense strand to SEQ ID NO: 1999370
agaugaacggacauacaca

SEQ ID NO: 1999372 - RNA, 19 nt, Artificial Sequence
  Description of Artificial Sequence: Synthetic oligonucleotide
  Sense strand starting at position 2643 of SEQ ID NO: 1880859
guguauguccguucaucua

SEQ ID NO: 1999373 - RNA, 19 nt, Artificial Sequence
  Description of Artificial Sequence: Synthetic oligonucleotide
  Antisense strand to SEQ ID NO: 1999372
uagaugaacggacauacac

SEQ ID NO: 1999374 - RNA, 19 nt, Artificial Sequence
  Description of Artificial Sequence: Synthetic oligonucleotide
  Sense strand starting at position 2672 of SEQ ID NO: 1880859
uuccgaaaucaccgaguca

SEQ ID NO: 1999375 - RNA, 19 nt, Artificial Sequence
  Description of Artificial Sequence: Synthetic oligonucleotide
  Antisense strand to SEQ ID NO: 1999374
ugacucggugauuucggaa

SEQ ID NO: 1999376 - RNA, 19 nt, Artificial Sequence
  Description of Artificial Sequence: Synthetic oligonucleotide
  Sense strand starting at position 2673 of SEQ ID NO: 1880859
uccgaaaucaccgagucau

SEQ ID NO: 1999377 - RNA, 19 nt, Artificial Sequence
  Description of Artificial Sequence: Synthetic oligonucleotide
  Antisense strand to SEQ ID NO: 1999376
augacucggugauuucgga

SEQ ID NO: 1999378 - RNA, 19 nt, Artificial Sequence
  Description of Artificial Sequence: Synthetic oligonucleotide
  Sense strand starting at position 16 of SEQ ID NO: 1880860
gcaguacugcagugcuuau

SEQ ID NO: 1999379 - RNA, 19 nt, Artificial Sequence
  Description of Artificial Sequence: Synthetic oligonucleotide
  Antisense strand to SEQ ID NO: 1999378
auaagcacugcaguacugc

SEQ ID NO: 1999380 - RNA, 19 nt, Artificial Sequence
  Description of Artificial Sequence: Synthetic oligonucleotide
  Sense strand starting at position 392 of SEQ ID NO: 1880860
guuauauuaugacuguugu

SEQ ID NO: 1999381 - RNA, 19 nt, Artificial Sequence
  Description of Artificial Sequence: Synthetic oligonucleotide
  Antisense strand to SEQ ID NO: 1999380
acaacagucauaauauaac

SEQ ID NO: 1999382 - RNA, 19 nt, Artificial Sequence
  Description of Artificial Sequence: Synthetic oligonucleotide
  Sense strand starting at position 398 of SEQ ID NO: 1880860
uuaugacuguuguugauau

SEQ ID NO: 1999383 - RNA, 19 nt, Artificial Sequence
  Description of Artificial Sequence: Synthetic oligonucleotide
  Antisense strand to SEQ ID NO: 1999382
auaucaacaacagucauaa

SEQ ID NO: 1999384 - RNA, 19 nt, Artificial Sequence
  Description of Artificial Sequence: Synthetic oligonucleotide
  Sense strand starting at position 437 of SEQ ID NO: 1880860
agcuaagcuuuauuauaga

SEQ ID NO: 1999385 - RNA, 19 nt, Artificial Sequence
  Description of Artificial Sequence: Synthetic oligonucleotide
  Antisense strand to SEQ ID NO: 1999384
ucuauaauaaagcuuagcu

SEQ ID NO: 1999386 - RNA, 19 nt, Artificial Sequence
  Description of Artificial Sequence: Synthetic oligonucleotide
  Sense strand starting at position 478 of SEQ ID NO: 1880860
gcauauacaguauaggauu

SEQ ID NO: 1999387 - RNA, 19 nt, Artificial Sequence
  Description of Artificial Sequence: Synthetic oligonucleotide
  Antisense strand to SEQ ID NO: 1999386
aauccuauacuguauaugc

SEQ ID NO: 1999388 - RNA, 19 nt, Artificial Sequence
  Description of Artificial Sequence: Synthetic oligonucleotide
  Sense strand starting at position 496 of SEQ ID NO: 1880860
ucaguacuauccucuguuu

SEQ ID NO: 1999389 - RNA, 19 nt, Artificial Sequence
  Description of Artificial Sequence: Synthetic oligonucleotide
  Antisense strand to SEQ ID NO: 1999388
aaacagaggauaguacuga

SEQ ID NO: 1999390 - RNA, 19 nt, Artificial Sequence
  Description of Artificial Sequence: Synthetic oligonucleotide
  Sense strand starting at position 565 of SEQ ID NO: 1880860
ggacuauuguuaucaacau

SEQ ID NO: 1999391 - RNA, 19 nt, Artificial Sequence
  Description of Artificial Sequence: Synthetic oligonucleotide
  Antisense strand to SEQ ID NO: 1999390
auguugauaacaauagucc

SEQ ID NO: 1999392 - RNA, 19 nt, Artificial Sequence
  Description of Artificial Sequence: Synthetic oligonucleotide
  Sense strand starting at position 581 of SEQ ID NO: 1880860
caugcugcuuaguuggaua

SEQ ID NO: 1999393 - RNA, 19 nt, Artificial Sequence
  Description of Artificial Sequence: Synthetic oligonucleotide
  Antisense strand to SEQ ID NO: 1999392
uauccaacuaagcagcaug

SEQ ID NO: 1999394 - RNA, 19 nt, Artificial Sequence
  Description of Artificial Sequence: Synthetic oligonucleotide
  Sense strand starting at position 588 of SEQ ID NO: 1880860
cuuaguuggauaugcugua

SEQ ID NO: 1999395 - RNA, 19 nt, Artificial Sequence
  Description of Artificial Sequence: Synthetic oligonucleotide
  Antisense strand to SEQ ID NO: 1999394
uacagcauauccaacuaag

SEQ ID NO: 1999396 - RNA, 19 nt, Artificial Sequence
  Description of Artificial Sequence: Synthetic oligonucleotide
  Sense strand starting at position 593 of SEQ ID NO: 1880860
uuggauaugcuguauagaa

SEQ ID NO: 1999397 - RNA, 19 nt, Artificial Sequence
  Description of Artificial Sequence: Synthetic oligonucleotide
  Antisense strand to SEQ ID NO: 1999396
uucuauacagcauauccaa

SEQ ID NO: 1999398 - RNA, 19 nt, Artificial Sequence
  Description of Artificial Sequence: Synthetic oligonucleotide
  Sense strand starting at position 761 of SEQ ID NO: 1880860
ugcugugugcaaugucaca

SEQ ID NO: 1999399 - RNA, 19 nt, Artificial Sequence
  Description of Artificial Sequence: Synthetic oligonucleotide
  Antisense strand to SEQ ID NO: 1999398
ugugacauugcacacagca

SEQ ID NO: 1999400 - RNA, 19 nt, Artificial Sequence
  Description of Artificial Sequence: Synthetic oligonucleotide
  Sense strand starting at position 1052 of SEQ ID NO: 1880860
ugcuuacugcuacaaguuu

SEQ ID NO: 1999401 - RNA, 19 nt, Artificial Sequence
  Description of Artificial Sequence: Synthetic oligonucleotide
  Antisense strand to SEQ ID NO: 1999400
aaacuuguagcaguaagca

SEQ ID NO: 1999402 - RNA, 19 nt, Artificial Sequence
  Description of Artificial Sequence: Synthetic oligonucleotide
  Sense strand starting at position 1715 of SEQ ID NO: 1880860
uagugaaacuaagguaauc

SEQ ID NO: 1999403 - RNA, 19 nt, Artificial Sequence
  Description of Artificial Sequence: Synthetic oligonucleotide
  Antisense strand to SEQ ID NO: 1999402
gauuaccuuaguuucacua

SEQ ID NO: 1999404 - RNA, 19 nt, Artificial Sequence
  Description of Artificial Sequence: Synthetic oligonucleotide
  Sense strand starting at position 1742 of SEQ ID NO: 1880860
gcacaaauccucuacagug

SEQ ID NO: 1999405 - RNA, 19 nt, Artificial Sequence
  Description of Artificial Sequence: Synthetic oligonucleotide
  Antisense strand to SEQ ID NO: 1999404
cacuguagaggauuugugc

SEQ ID NO: 1999406 - RNA, 19 nt, Artificial Sequence
  Description of Artificial Sequence: Synthetic oligonucleotide
  Sense strand starting at position 1867 of SEQ ID NO: 1880860
ucauccgauuguucuaauu

SEQ ID NO: 1999407 - RNA, 19 nt, Artificial Sequence
  Description of Artificial Sequence: Synthetic oligonucleotide
  Antisense strand to SEQ ID NO: 1999406
aauuagaacaaucggauga

SEQ ID NO: 1999408 - RNA, 19 nt, Artificial Sequence
  Description of Artificial Sequence: Synthetic oligonucleotide
  Sense strand starting at position 1910 of SEQ ID NO: 1880860
gaccacaagugucucagaa

SEQ ID NO: 1999409 - RNA, 19 nt, Artificial Sequence
  Description of Artificial Sequence: Synthetic oligonucleotide
  Antisense strand to SEQ ID NO: 1999408
uucugagacacuugugguc

SEQ ID NO: 1999410 - RNA, 19 nt, Artificial Sequence
  Description of Artificial Sequence: Synthetic oligonucleotide
  Sense strand starting at position 1912 of SEQ ID NO: 1880860
ccacaagugucucagaaga

SEQ ID NO: 1999411 - RNA, 19 nt, Artificial Sequence
  Description of Artificial Sequence: Synthetic oligonucleotide
  Antisense strand to SEQ ID NO: 1999410
ucuucugagacacuugugg

SEQ ID NO: 1999412 - RNA, 19 nt, Artificial Sequence
  Description of Artificial Sequence: Synthetic oligonucleotide
  Sense strand starting at position 1998 of SEQ ID NO: 1880860
acacuuggcccuuagugau

SEQ ID NO: 1999413 - RNA, 19 nt, Artificial Sequence
  Description of Artificial Sequence: Synthetic oligonucleotide
  Antisense strand to SEQ ID NO: 1999412
aucacuaagggccaagugu

SEQ ID NO: 1999414 - RNA, 19 nt, Artificial Sequence
  Description of Artificial Sequence: Synthetic oligonucleotide
  Sense strand starting at position 2004 of SEQ ID NO: 1880860
ggcccuuagugaucuccca

SEQ ID NO: 1999415 - RNA, 19 nt, Artificial Sequence
  Description of Artificial Sequence: Synthetic oligonucleotide
  Antisense strand to SEQ ID NO: 1999414
ugggagaucacuaagggcc

SEQ ID NO: 1999416 - RNA, 19 nt, Artificial Sequence
  Description of Artificial Sequence: Synthetic oligonucleotide
  Sense strand starting at position 2058 of SEQ ID NO: 1880860
cuuuaacagcuguaguuua

SEQ ID NO: 1999417 - RNA, 19 nt, Artificial Sequence
  Description of Artificial Sequence: Synthetic oligonucleotide
  Antisense strand to SEQ ID NO: 1999416
uaaacuacagcuguuaaag

SEQ ID NO: 1999418 - RNA, 19 nt, Artificial Sequence
  Description of Artificial Sequence: Synthetic oligonucleotide
  Sense strand starting at position 2063 of SEQ ID NO: 1880860
acagcuguaguuuaaagau

SEQ ID NO: 1999419 - RNA, 19 nt, Artificial Sequence
  Description of Artificial Sequence: Synthetic oligonucleotide
  Antisense strand to SEQ ID NO: 1999418
aucuuuaaacuacagcugu

SEQ ID NO: 1999420 - RNA, 19 nt, Artificial Sequence
  Description of Artificial Sequence: Synthetic oligonucleotide
  Sense strand starting at position 2351 of SEQ ID NO: 1880860
agcccucaauuaugaaaga

SEQ ID NO: 1999421 - RNA, 19 nt, Artificial Sequence
  Description of Artificial Sequence: Synthetic oligonucleotide
  Antisense strand to SEQ ID NO: 1999420
ucuuucauaauugagggcu

SEQ ID NO: 1999422 - RNA, 19 nt, Artificial Sequence
  Description of Artificial Sequence: Synthetic oligonucleotide
  Sense strand starting at position 2649 of SEQ ID NO: 1880860
uuucuauaagauggcugua

SEQ ID NO: 1999423 - RNA, 19 nt, Artificial Sequence
  Description of Artificial Sequence: Synthetic oligonucleotide
  Antisense strand to SEQ ID NO: 1999422
uacagccaucuuauagaaa

SEQ ID NO: 1999424 - RNA, 19 nt, Artificial Sequence
  Description of Artificial Sequence: Synthetic oligonucleotide
  Sense strand starting at position 2651 of SEQ ID NO: 1880860
ucuauaagauggcuguaau

SEQ ID NO: 1999425 - RNA, 19 nt, Artificial Sequence
  Description of Artificial Sequence: Synthetic oligonucleotide
  Antisense strand to SEQ ID NO: 1999424
auuacagccaucuuauaga

SEQ ID NO: 1999426 - RNA, 19 nt, Artificial Sequence
  Description of Artificial Sequence: Synthetic oligonucleotide
  Sense strand starting at position 2652 of SEQ ID NO: 1880860
cuauaagauggcuguaaug

SEQ ID NO: 1999427 - RNA, 19 nt, Artificial Sequence
  Description of Artificial Sequence: Synthetic oligonucleotide
  Antisense strand to SEQ ID NO: 1999426
cauuacagccaucuuauag

SEQ ID NO: 1999428 - RNA, 19 nt, Artificial Sequence
  Description of Artificial Sequence: Synthetic oligonucleotide
  Sense strand starting at position 2666 of SEQ ID NO: 1880860
uaaugaggacuucguuaua

SEQ ID NO: 1999429 - RNA, 19 nt, Artificial Sequence
  Description of Artificial Sequence: Synthetic oligonucleotide
  Antisense strand to SEQ ID NO: 1999428
uauaacgaaguccucauua

SEQ ID NO: 1999430 - RNA, 19 nt, Artificial Sequence
  Description of Artificial Sequence: Synthetic oligonucleotide
  Sense strand starting at position 2669 of SEQ ID NO: 1880860
ugaggacuucguuauauaa

SEQ ID NO: 1999431 - RNA, 19 nt, Artificial Sequence
  Description of Artificial Sequence: Synthetic oligonucleotide
  Antisense strand to SEQ ID NO: 1999430
uuauauaacgaaguccuca

SEQ ID NO: 1999432 - RNA, 19 nt, Artificial Sequence
  Description of Artificial Sequence: Synthetic oligonucleotide
  Sense strand starting at position 2671 of SEQ ID NO: 1880860
aggacuucguuauauaaug

SEQ ID NO: 1999433 - RNA, 19 nt, Artificial Sequence
  Description of Artificial Sequence: Synthetic oligonucleotide
  Antisense strand to SEQ ID NO: 1999432
cauuauauaacgaaguccu

SEQ ID NO: 1999434 - RNA, 19 nt, Artificial Sequence
  Description of Artificial Sequence: Synthetic oligonucleotide
  Sense strand starting at position 2718 of SEQ ID NO: 1880860
aaaucuuagucagcguaac

SEQ ID NO: 1999435 - RNA, 19 nt, Artificial Sequence
  Description of Artificial Sequence: Synthetic oligonucleotide
  Antisense strand to SEQ ID NO: 1999434
guuacgcugacuaagauuu

SEQ ID NO: 1999436 - RNA, 19 nt, Artificial Sequence
  Description of Artificial Sequence: Synthetic oligonucleotide
  Sense strand starting at position 2719 of SEQ ID NO: 1880860
aaucuuagucagcguaacu

SEQ ID NO: 1999437 - RNA, 19 nt, Artificial Sequence
  Description of Artificial Sequence: Synthetic oligonucleotide
  Antisense strand to SEQ ID NO: 1999436
aguuacgcugacuaagauu

SEQ ID NO: 1999438 - RNA, 19 nt, Artificial Sequence
  Description of Artificial Sequence: Synthetic oligonucleotide
  Sense strand starting at position 2724 of SEQ ID NO: 1880860
uagucagcguaacuguauu

SEQ ID NO: 1999439 - RNA, 19 nt, Artificial Sequence
  Description of Artificial Sequence: Synthetic oligonucleotide
  Antisense strand to SEQ ID NO: 1999438
aauacaguuacgcugacua

SEQ ID NO: 1999440 - RNA, 19 nt, Artificial Sequence
  Description of Artificial Sequence: Synthetic oligonucleotide
  Sense strand starting at position 3099 of SEQ ID NO: 1880860
acauuuguaucaugcucuu

SEQ ID NO: 1999441 - RNA, 19 nt, Artificial Sequence
  Description of Artificial Sequence: Synthetic oligonucleotide
  Antisense strand to SEQ ID NO: 1999440
aagagcaugauacaaaugu

SEQ ID NO: 1999442 - RNA, 19 nt, Artificial Sequence
  Description of Artificial Sequence: Synthetic oligonucleotide
  Sense strand starting at position 3195 of SEQ ID NO: 1880860
aggcucaauccauaauugu

SEQ ID NO: 1999443 - RNA, 19 nt, Artificial Sequence
  Description of Artificial Sequence: Synthetic oligonucleotide
  Antisense strand to SEQ ID NO: 1999442
acaauuauggauugagccu

SEQ ID NO: 1999444 - RNA, 19 nt, Artificial Sequence
  Description of Artificial Sequence: Synthetic oligonucleotide
  Sense strand starting at position 3567 of SEQ ID NO: 1880860
ucagacgaugauuguaaau

SEQ ID NO: 1999445 - RNA, 19 nt, Artificial Sequence
  Description of Artificial Sequence: Synthetic oligonucleotide
  Antisense strand to SEQ ID NO: 1999444
auuuacaaucaucgucuga

SEQ ID NO: 1999446 - RNA, 19 nt, Artificial Sequence
  Description of Artificial Sequence: Synthetic oligonucleotide
  Sense strand starting at position 3569 of SEQ ID NO: 1880860
agacgaugauuguaaauua

SEQ ID NO: 1999447 - RNA, 19 nt, Artificial Sequence
  Description of Artificial Sequence: Synthetic oligonucleotide
  Antisense strand to SEQ ID NO: 1999446
uaauuuacaaucaucgucu

SEQ ID NO: 1999448 - RNA, 19 nt, Artificial Sequence
  Description of Artificial Sequence: Synthetic oligonucleotide
  Sense strand starting at position 3730 of SEQ ID NO: 1880860
guacuauagagcugguaac

SEQ ID NO: 1999449 - RNA, 19 nt, Artificial Sequence
  Description of Artificial Sequence: Synthetic oligonucleotide
  Antisense strand to SEQ ID NO: 1999448
guuaccagcucuauaguac

SEQ ID NO: 1999450 - RNA, 19 nt, Artificial Sequence
  Description of Artificial Sequence: Synthetic oligonucleotide
  Sense strand starting at position 3731 of SEQ ID NO: 1880860
uacuauagagcugguaaca

SEQ ID NO: 1999451 - RNA, 19 nt, Artificial Sequence
  Description of Artificial Sequence: Synthetic oligonucleotide
  Antisense strand to SEQ ID NO: 1999450
uguuaccagcucuauagua

SEQ ID NO: 1999452 - RNA, 19 nt, Artificial Sequence
  Description of Artificial Sequence: Synthetic oligonucleotide
  Sense strand starting at position 3756 of SEQ ID NO: 1880860
cuagauucuccaggaguaa

SEQ ID NO: 1999453 - RNA, 19 nt, Artificial Sequence
  Description of Artificial Sequence: Synthetic oligonucleotide
  Antisense strand to SEQ ID NO: 1999452
uuacuccuggagaaucuag

SEQ ID NO: 1999454 - RNA, 19 nt, Artificial Sequence
  Description of Artificial Sequence: Synthetic oligonucleotide
  Sense strand starting at position 3917 of SEQ ID NO: 1880860
cuuccuaucgccuauggaa

SEQ ID NO: 1999455 - RNA, 19 nt, Artificial Sequence
  Description of Artificial Sequence: Synthetic oligonucleotide
  Antisense strand to SEQ ID NO: 1999454
uuccauaggcgauaggaag

SEQ ID NO: 1999456 - RNA, 19 nt, Artificial Sequence
  Description of Artificial Sequence: Synthetic oligonucleotide
  Sense strand starting at position 3930 of SEQ ID NO: 1880860
auggaauguuugcagagga

SEQ ID NO: 1999457 - RNA, 19 nt, Artificial Sequence
  Description of Artificial Sequence: Synthetic oligonucleotide
  Antisense strand to SEQ ID NO: 1999456
uccucugcaaacauuccau

SEQ ID NO: 1999458 - RNA, 19 nt, Artificial Sequence
  Description of Artificial Sequence: Synthetic oligonucleotide
  Sense strand starting at position 8 of SEQ ID NO: 1880861
gcacaaauccucuacagug

SEQ ID NO: 1999459 - RNA, 19 nt, Artificial Sequence
  Description of Artificial Sequence: Synthetic oligonucleotide
  Antisense strand to SEQ ID NO: 1999458
cacuguagaggauuugugc

SEQ ID NO: 1999460 - RNA, 19 nt, Artificial Sequence
  Description of Artificial Sequence: Synthetic oligonucleotide
  Sense strand starting at position 133 of SEQ ID NO: 1880861
ucauccgauuguucuaauu

SEQ ID NO: 1999461 - RNA, 19 nt, Artificial Sequence
  Description of Artificial Sequence: Synthetic oligonucleotide
  Antisense strand to SEQ ID NO: 1999460
aauuagaacaaucggauga

SEQ ID NO: 1999462 - RNA, 19 nt, Artificial Sequence
  Description of Artificial Sequence: Synthetic oligonucleotide
  Sense strand starting at position 176 of SEQ ID NO: 1880861
gaccacaagugucucagaa

SEQ ID NO: 1999463 - RNA, 19 nt, Artificial Sequence
  Description of Artificial Sequence: Synthetic oligonucleotide
  Antisense strand to SEQ ID NO: 1999462
uucugagacacuugugguc

SEQ ID NO: 1999464 - RNA, 19 nt, Artificial Sequence
  Description of Artificial Sequence: Synthetic oligonucleotide
  Sense strand starting at position 264 of SEQ ID NO: 1880861
acacuuggcccuuagugau

SEQ ID NO: 1999465 - RNA, 19 nt, Artificial Sequence
  Description of Artificial Sequence: Synthetic oligonucleotide
  Antisense strand to SEQ ID NO: 1999464
aucacuaagggccaagugu

SEQ ID NO: 1999466 - RNA, 19 nt, Artificial Sequence
  Description of Artificial Sequence: Synthetic oligonucleotide
  Sense strand starting at position 270 of SEQ ID NO: 1880861
ggcccuuagugaucuccca

SEQ ID NO: 1999467 - RNA, 19 nt, Artificial Sequence
  Description of Artificial Sequence: Synthetic oligonucleotide
  Antisense strand to SEQ ID NO: 1999466
ugggagaucacuaagggcc

SEQ ID NO: 1999468 - RNA, 19 nt, Artificial Sequence
  Description of Artificial Sequence: Synthetic oligonucleotide
  Sense strand starting at position 324 of SEQ ID NO: 1880861
cuuuaacagcuguaguuua

SEQ ID NO: 1999469 - RNA, 19 nt, Artificial Sequence
  Description of Artificial Sequence: Synthetic oligonucleotide
  Antisense strand to SEQ ID NO: 1999468
uaaacuacagcuguuaaag

SEQ ID NO: 1999470 - RNA, 19 nt, Artificial Sequence
  Description of Artificial Sequence: Synthetic oligonucleotide
  Sense strand starting at position 329 of SEQ ID NO: 1880861
acagcuguaguuuaaagau

SEQ ID NO: 1999471 - RNA, 19 nt, Artificial Sequence
  Description of Artificial Sequence: Synthetic oligonucleotide
  Antisense strand to SEQ ID NO: 1999470
aucuuuaaacuacagcugu

SEQ ID NO: 1999472 - RNA, 19 nt, Artificial Sequence
  Description of Artificial Sequence: Synthetic oligonucleotide
  Sense strand starting at position 915 of SEQ ID NO: 1880861
uuucuauaagauggcugua

SEQ ID NO: 1999473 - RNA, 19 nt, Artificial Sequence
  Description of Artificial Sequence: Synthetic oligonucleotide
  Antisense strand to SEQ ID NO: 1999472
uacagccaucuuauagaaa

SEQ ID NO: 1999474 - RNA, 19 nt, Artificial Sequence
  Description of Artificial Sequence: Synthetic oligonucleotide
  Sense strand starting at position 917 of SEQ ID NO: 1880861
ucuauaagauggcuguaau

SEQ ID NO: 1999475 - RNA, 19 nt, Artificial Sequence
  Description of Artificial Sequence: Synthetic oligonucleotide
  Antisense strand to SEQ ID NO: 1999474
auuacagccaucuuauaga

SEQ ID NO: 1999476 - RNA, 19 nt, Artificial Sequence
  Description of Artificial Sequence: Synthetic oligonucleotide
  Sense strand starting at position 918 of SEQ ID NO: 1880861
cuauaagauggcuguaaug

SEQ ID NO: 1999477 - RNA, 19 nt, Artificial Sequence
  Description of Artificial Sequence: Synthetic oligonucleotide
  Antisense strand to SEQ ID NO: 1999476
cauuacagccaucuuauag

SEQ ID NO: 1999478 - RNA, 19 nt, Artificial Sequence
  Description of Artificial Sequence: Synthetic oligonucleotide
  Sense strand starting at position 932 of SEQ ID NO: 1880861
uaaugaggacuucguuaua

SEQ ID NO: 1999479 - RNA, 19 nt, Artificial Sequence
  Description of Artificial Sequence: Synthetic oligonucleotide
  Antisense strand to SEQ ID NO: 1999478
uauaacgaaguccucauua

SEQ ID NO: 1999480 - RNA, 19 nt, Artificial Sequence
  Description of Artificial Sequence: Synthetic oligonucleotide
  Sense strand starting at position 935 of SEQ ID NO: 1880861
ugaggacuucguuauauaa

SEQ ID NO: 1999481 - RNA, 19 nt, Artificial Sequence
  Description of Artificial Sequence: Synthetic oligonucleotide
  Antisense strand to SEQ ID NO: 1999480
uuauauaacgaaguccuca

SEQ ID NO: 1999482 - RNA, 19 nt, Artificial Sequence
  Description of Artificial Sequence: Synthetic oligonucleotide
  Sense strand starting at position 984 of SEQ ID NO: 1880861
aaaucuuagucagcguaac

SEQ ID NO: 1999483 - RNA, 19 nt, Artificial Sequence
  Description of Artificial Sequence: Synthetic oligonucleotide
  Antisense strand to SEQ ID NO: 1999482
guuacgcugacuaagauuu

SEQ ID NO: 1999484 - RNA, 19 nt, Artificial Sequence
  Description of Artificial Sequence: Synthetic oligonucleotide
  Sense strand starting at position 985 of SEQ ID NO: 1880861
aaucuuagucagcguaacu

SEQ ID NO: 1999485 - RNA, 19 nt, Artificial Sequence
  Description of Artificial Sequence: Synthetic oligonucleotide
  Antisense strand to SEQ ID NO: 1999484
aguuacgcugacuaagauu

SEQ ID NO: 1999486 - RNA, 19 nt, Artificial Sequence
  Description of Artificial Sequence: Synthetic oligonucleotide
  Sense strand starting at position 990 of SEQ ID NO: 1880861
uagucagcguaacuguauu

SEQ ID NO: 1999487 - RNA, 19 nt, Artificial Sequence
  Description of Artificial Sequence: Synthetic oligonucleotide
  Antisense strand to SEQ ID NO: 1999486
aauacaguuacgcugacua

SEQ ID NO: 1999488 - RNA, 19 nt, Artificial Sequence
  Description of Artificial Sequence: Synthetic oligonucleotide
  Sense strand starting at position 1461 of SEQ ID NO: 1880861
aggcucaauccauaauugu

SEQ ID NO: 1999489 - RNA, 19 nt, Artificial Sequence
  Description of Artificial Sequence: Synthetic oligonucleotide
  Antisense strand to SEQ ID NO: 1999488
acaauuauggauugagccu

SEQ ID NO: 1999490 - RNA, 19 nt, Artificial Sequence
  Description of Artificial Sequence: Synthetic oligonucleotide
  Sense strand starting at position 1833 of SEQ ID NO: 1880861
ucagacgaugauuguaaau

SEQ ID NO: 1999491 - RNA, 19 nt, Artificial Sequence
  Description of Artificial Sequence: Synthetic oligonucleotide
  Antisense strand to SEQ ID NO: 1999490
auuuacaaucaucgucuga

SEQ ID NO: 1999492 - RNA, 19 nt, Artificial Sequence
  Description of Artificial Sequence: Synthetic oligonucleotide
  Sense strand starting at position 1835 of SEQ ID NO: 1880861
agacgaugauuguaaauua

SEQ ID NO: 1999493 - RNA, 19 nt, Artificial Sequence
  Description of Artificial Sequence: Synthetic oligonucleotide
  Antisense strand to SEQ ID NO: 1999492
uaauuuacaaucaucgucu

SEQ ID NO: 1999494 - RNA, 19 nt, Artificial Sequence
  Description of Artificial Sequence: Synthetic oligonucleotide
  Sense strand starting at position 1996 of SEQ ID NO: 1880861
guacuauagagcugguaac

SEQ ID NO: 1999495 - RNA, 19 nt, Artificial Sequence
  Description of Artificial Sequence: Synthetic oligonucleotide
  Antisense strand to SEQ ID NO: 1999494
guuaccagcucuauaguac

SEQ ID NO: 1999496 - RNA, 19 nt, Artificial Sequence
  Description of Artificial Sequence: Synthetic oligonucleotide
  Sense strand starting at position 1997 of SEQ ID NO: 1880861
uacuauagagcugguaaca

SEQ ID NO: 1999497 - RNA, 19 nt, Artificial Sequence
  Description of Artificial Sequence: Synthetic oligonucleotide
  Antisense strand to SEQ ID NO: 1999496
uguuaccagcucuauagua

SEQ ID NO: 1999498 - RNA, 19 nt, Artificial Sequence
  Description of Artificial Sequence: Synthetic oligonucleotide
  Sense strand starting at position 2022 of SEQ ID NO: 1880861
cuagauucuccaggaguaa

SEQ ID NO: 1999499 - RNA, 19 nt, Artificial Sequence
  Description of Artificial Sequence: Synthetic oligonucleotide
  Antisense strand to SEQ ID NO: 1999498
uuacuccuggagaaucuag

SEQ ID NO: 1999500 - RNA, 19 nt, Artificial Sequence
  Description of Artificial Sequence: Synthetic oligonucleotide
  Sense strand starting at position 2183 of SEQ ID NO: 1880861
cuuccuaucgccuauggaa

SEQ ID NO: 1999501 - RNA, 19 nt, Artificial Sequence
  Description of Artificial Sequence: Synthetic oligonucleotide
  Antisense strand to SEQ ID NO: 1999500
uuccauaggcgauaggaag

SEQ ID NO: 1999502 - RNA, 19 nt, Artificial Sequence
  Description of Artificial Sequence: Synthetic oligonucleotide
  Sense strand starting at position 2196 of SEQ ID NO: 1880861
auggaauguuugcagagga

SEQ ID NO: 1999503 - RNA, 19 nt, Artificial Sequence
  Description of Artificial Sequence: Synthetic oligonucleotide
  Antisense strand to SEQ ID NO: 1999502
uccucugcaaacauuccau

SEQ ID NO: 1999504 - RNA, 19 nt, Artificial Sequence
  Description of Artificial Sequence: Synthetic oligonucleotide
  Sense strand starting at position 2318 of SEQ ID NO: 1880861
gaagaaguuugaccuagua

SEQ ID NO: 1999505 - RNA, 19 nt, Artificial Sequence
  Description of Artificial Sequence: Synthetic oligonucleotide
  Antisense strand to SEQ ID NO: 1999504
uacuaggucaaacuucuuc

SEQ ID NO: 1999506 - RNA, 19 nt, Artificial Sequence
  Description of Artificial Sequence: Synthetic oligonucleotide
  Sense strand starting at position 2559 of SEQ ID NO: 1880861
ucaaucaaguuccucugua

SEQ ID NO: 1999507 - RNA, 19 nt, Artificial Sequence
  Description of Artificial Sequence: Synthetic oligonucleotide
  Antisense strand to SEQ ID NO: 1999506
uacagaggaacuugauuga

SEQ ID NO: 1999508 - RNA, 19 nt, Artificial Sequence
  Description of Artificial Sequence: Synthetic oligonucleotide
  Sense strand starting at position 2564 of SEQ ID NO: 1880861
caaguuccucuguacguua

SEQ ID NO: 1999509 - RNA, 19 nt, Artificial Sequence
  Description of Artificial Sequence: Synthetic oligonucleotide
  Antisense strand to SEQ ID NO: 1999508
uaacguacagaggaacuug

SEQ ID NO: 1999510 - RNA, 19 nt, Artificial Sequence
  Description of Artificial Sequence: Synthetic oligonucleotide
  Sense strand starting at position 2575 of SEQ ID NO: 1880861
guacguuaacgacaaucaa

SEQ ID NO: 1999511 - RNA, 19 nt, Artificial Sequence
  Description of Artificial Sequence: Synthetic oligonucleotide
  Antisense strand to SEQ ID NO: 1999510
uugauugucguuaacguac

SEQ ID NO: 1999512 - RNA, 19 nt, Artificial Sequence
  Description of Artificial Sequence: Synthetic oligonucleotide
  Sense strand starting at position 2597 of SEQ ID NO: 1880861
ucaaguuccucuguauauu

SEQ ID NO: 1999513 - RNA, 19 nt, Artificial Sequence
  Description of Artificial Sequence: Synthetic oligonucleotide
  Antisense strand to SEQ ID NO: 1999512
aauauacagaggaacuuga

SEQ ID NO: 1999514 - RNA, 19 nt, Artificial Sequence
  Description of Artificial Sequence: Synthetic oligonucleotide
  Sense strand starting at position 2627 of SEQ ID NO: 1880861
cggcaauacugcuauuuag

SEQ ID NO: 1999515 - RNA, 19 nt, Artificial Sequence
  Description of Artificial Sequence: Synthetic oligonucleotide
  Antisense strand to SEQ ID NO: 1999514
cuaaauagcaguauugccg

SEQ ID NO: 1999516 - RNA, 19 nt, Artificial Sequence
  Description of Artificial Sequence: Synthetic oligonucleotide
  Sense strand starting at position 2764 of SEQ ID NO: 1880861
cugggaaucuugcuuaaca

SEQ ID NO: 1999517 - RNA, 19 nt, Artificial Sequence
  Description of Artificial Sequence: Synthetic oligonucleotide
  Antisense strand to SEQ ID NO: 1999516
uguuaagcaagauucccag

SEQ ID NO: 1999518 - RNA, 19 nt, Artificial Sequence
  Description of Artificial Sequence: Synthetic oligonucleotide
  Sense strand starting at position 2765 of SEQ ID NO: 1880861
ugggaaucuugcuuaacaa

SEQ ID NO: 1999519 - RNA, 19 nt, Artificial Sequence
  Description of Artificial Sequence: Synthetic oligonucleotide
  Antisense strand to SEQ ID NO: 1999518
uuguuaagcaagauuccca

SEQ ID NO: 1999520 - RNA, 19 nt, Artificial Sequence
  Description of Artificial Sequence: Synthetic oligonucleotide
  Sense strand starting at position 2784 of SEQ ID NO: 1880861
aaugcuauacgucauguuu

SEQ ID NO: 1999521 - RNA, 19 nt, Artificial Sequence
  Description of Artificial Sequence: Synthetic oligonucleotide
  Antisense strand to SEQ ID NO: 1999520
aaacaugacguauagcauu

SEQ ID NO: 1999522 - RNA, 19 nt, Artificial Sequence
  Description of Artificial Sequence: Synthetic oligonucleotide
  Sense strand starting at position 2833 of SEQ ID NO: 1880861
ugccuuaaaggaugaacaa

SEQ ID NO: 1999523 - RNA, 19 nt, Artificial Sequence
  Description of Artificial Sequence: Synthetic oligonucleotide
  Antisense strand to SEQ ID NO: 1999522
uuguucauccuuuaaggca

SEQ ID NO: 1999524 - RNA, 19 nt, Artificial Sequence
  Description of Artificial Sequence: Synthetic oligonucleotide
  Sense strand starting at position 2992 of SEQ ID NO: 1880861
aaggcuguaguagauuaaa

SEQ ID NO: 1999525 - RNA, 19 nt, Artificial Sequence
  Description of Artificial Sequence: Synthetic oligonucleotide
  Antisense strand to SEQ ID NO: 1999524
uuuaaucuacuacagccuu

SEQ ID NO: 1999526 - RNA, 19 nt, Artificial Sequence
  Description of Artificial Sequence: Synthetic oligonucleotide
  Sense strand starting at position 3410 of SEQ ID NO: 1880861
agcauuaaguauucuuaug

SEQ ID NO: 1999527 - RNA, 19 nt, Artificial Sequence
  Description of Artificial Sequence: Synthetic oligonucleotide
  Antisense strand to SEQ ID NO: 1999526
cauaagaauacuuaaugcu

SEQ ID NO: 1999528 - RNA, 19 nt, Artificial Sequence
  Description of Artificial Sequence: Synthetic oligonucleotide
  Sense strand starting at position 3424 of SEQ ID NO: 1880861
uuaugauguuaugcaacca

SEQ ID NO: 1999529 - RNA, 19 nt, Artificial Sequence
  Description of Artificial Sequence: Synthetic oligonucleotide
  Antisense strand to SEQ ID NO: 1999528
ugguugcauaacaucauaa

SEQ ID NO: 1999530 - RNA, 19 nt, Artificial Sequence
  Description of Artificial Sequence: Synthetic oligonucleotide
  Sense strand starting at position 3693 of SEQ ID NO: 1880861
cuaacauuccacuguguga

SEQ ID NO: 1999531 - RNA, 19 nt, Artificial Sequence
  Description of Artificial Sequence: Synthetic oligonucleotide
  Antisense strand to SEQ ID NO: 1999530
ucacacaguggaauguuag

SEQ ID NO: 1999532 - RNA, 19 nt, Artificial Sequence
  Description of Artificial Sequence: Synthetic oligonucleotide
  Sense strand starting at position 3695 of SEQ ID NO: 1880861
aacauuccacugugugaag

SEQ ID NO: 1999533 - RNA, 19 nt, Artificial Sequence
  Description of Artificial Sequence: Synthetic oligonucleotide
  Antisense strand to SEQ ID NO: 1999532
cuucacacaguggaauguu

SEQ ID NO: 1999534 - RNA, 19 nt, Artificial Sequence
  Description of Artificial Sequence: Synthetic oligonucleotide
  Sense strand starting at position 3774 of SEQ ID NO: 1880861
cacguaugaggcugaggau

SEQ ID NO: 1999535 - RNA, 19 nt, Artificial Sequence
  Description of Artificial Sequence: Synthetic oligonucleotide
  Antisense strand to SEQ ID NO: 1999534
auccucagccucauacgug

SEQ ID NO: 1999536 - RNA, 19 nt, Artificial Sequence
  Description of Artificial Sequence: Synthetic oligonucleotide
  Sense strand starting at position 3942 of SEQ ID NO: 1880861
ggauuugugugguaccaca

SEQ ID NO: 1999537 - RNA, 19 nt, Artificial Sequence
  Description of Artificial Sequence: Synthetic oligonucleotide
  Antisense strand to SEQ ID NO: 1999536
ugugguaccacacaaaucc

SEQ ID NO: 1999538 - RNA, 19 nt, Artificial Sequence
  Description of Artificial Sequence: Synthetic oligonucleotide
  Sense strand starting at position 92 of SEQ ID NO: 1880862
guuaguuagggcugggaua

SEQ ID NO: 1999539 - RNA, 19 nt, Artificial Sequence
  Description of Artificial Sequence: Synthetic oligonucleotide
  Antisense strand to SEQ ID NO: 1999538
uaucccagcccuaacuaac

SEQ ID NO: 1999540 - RNA, 19 nt, Artificial Sequence
  Description of Artificial Sequence: Synthetic oligonucleotide
  Sense strand starting at position 374 of SEQ ID NO: 1880862
ccaaacuauuuguaggaaa

SEQ ID NO: 1999541 - RNA, 19 nt, Artificial Sequence
  Description of Artificial Sequence: Synthetic oligonucleotide
  Antisense strand to SEQ ID NO: 1999540
uuuccuacaaauaguuugg

SEQ ID NO: 1999542 - RNA, 19 nt, Artificial Sequence
  Description of Artificial Sequence: Synthetic oligonucleotide
  Sense strand starting at position 439 of SEQ ID NO: 1880862
agauaaggguuagcucuau

SEQ ID NO: 1999543 - RNA, 19 nt, Artificial Sequence
  Description of Artificial Sequence: Synthetic oligonucleotide
  Antisense strand to SEQ ID NO: 1999542
auagagcuaacccuuaucu

SEQ ID NO: 1999544 - RNA, 19 nt, Artificial Sequence
  Description of Artificial Sequence: Synthetic oligonucleotide
  Sense strand starting at position 443 of SEQ ID NO: 1880862
aaggguuagcucuaucacu

SEQ ID NO: 1999545 - RNA, 19 nt, Artificial Sequence
  Description of Artificial Sequence: Synthetic oligonucleotide
  Antisense strand to SEQ ID NO: 1999544
agugauagagcuaacccuu

SEQ ID NO: 1999546 - RNA, 19 nt, Artificial Sequence
  Description of Artificial Sequence: Synthetic oligonucleotide
  Sense strand starting at position 580 of SEQ ID NO: 1880862
cucagaaggcucugucauu

SEQ ID NO: 1999547 - RNA, 19 nt, Artificial Sequence
  Description of Artificial Sequence: Synthetic oligonucleotide
  Antisense strand to SEQ ID NO: 1999546
aaugacagagccuucugag

SEQ ID NO: 1999548 - RNA, 19 nt, Artificial Sequence
  Description of Artificial Sequence: Synthetic oligonucleotide
  Sense strand starting at position 581 of SEQ ID NO: 1880862
ucagaaggcucugucauug

SEQ ID NO: 1999549 - RNA, 19 nt, Artificial Sequence
  Description of Artificial Sequence: Synthetic oligonucleotide
  Antisense strand to SEQ ID NO: 1999548
caaugacagagccuucuga

SEQ ID NO: 1999550 - RNA, 19 nt, Artificial Sequence
  Description of Artificial Sequence: Synthetic oligonucleotide
  Sense strand starting at position 585 of SEQ ID NO: 1880862
aaggcucugucauugauca

SEQ ID NO: 1999551 - RNA, 19 nt, Artificial Sequence
  Description of Artificial Sequence: Synthetic oligonucleotide
  Antisense strand to SEQ ID NO: 1999550
ugaucaaugacagagccuu

SEQ ID NO: 1999552 - RNA, 19 nt, Artificial Sequence
  Description of Artificial Sequence: Synthetic oligonucleotide
  Sense strand starting at position 802 of SEQ ID NO: 1880862
gugauuaggaaccgugaca

SEQ ID NO: 1999553 - RNA, 19 nt, Artificial Sequence
  Description of Artificial Sequence: Synthetic oligonucleotide
  Antisense strand to SEQ ID NO: 1999552
ugucacgguuccuaaucac

SEQ ID NO: 1999554 - RNA, 19 nt, Artificial Sequence
  Description of Artificial Sequence: Synthetic oligonucleotide
  Sense strand starting at position 1228 of SEQ ID NO: 1880862
cagaguagcucucuaugga

SEQ ID NO: 1999555 - RNA, 19 nt, Artificial Sequence
  Description of Artificial Sequence: Synthetic oligonucleotide
  Antisense strand to SEQ ID NO: 1999554
uccauagagagcuacucug

SEQ ID NO: 1999556 - RNA, 19 nt, Artificial Sequence
  Description of Artificial Sequence: Synthetic oligonucleotide
  Sense strand starting at position 1229 of SEQ ID NO: 1880862
agaguagcucucuauggaa

SEQ ID NO: 1999557 - RNA, 19 nt, Artificial Sequence
  Description of Artificial Sequence: Synthetic oligonucleotide
  Antisense strand to SEQ ID NO: 1999556
uuccauagagagcuacucu

SEQ ID NO: 1999558 - RNA, 19 nt, Artificial Sequence
  Description of Artificial Sequence: Synthetic oligonucleotide
  Sense strand starting at position 1349 of SEQ ID NO: 1880862
ucucuucuucucgugcgaa

SEQ ID NO: 1999559 - RNA, 19 nt, Artificial Sequence
  Description of Artificial Sequence: Synthetic oligonucleotide
  Antisense strand to SEQ ID NO: 1999558
uucgcacgagaagaagaga

SEQ ID NO: 1999560 - RNA, 19 nt, Artificial Sequence
  Description of Artificial Sequence: Synthetic oligonucleotide
  Sense strand starting at position 1351 of SEQ ID NO: 1880862
ucuucuucucgugcgaauc

SEQ ID NO: 1999561 - RNA, 19 nt, Artificial Sequence
  Description of Artificial Sequence: Synthetic oligonucleotide
  Antisense strand to SEQ ID NO: 1999560
gauucgcacgagaagaaga

SEQ ID NO: 1999562 - RNA, 19 nt, Artificial Sequence
  Description of Artificial Sequence: Synthetic oligonucleotide
  Sense strand starting at position 1371 of SEQ ID NO: 1880862
auaaacugccacugauaga

SEQ ID NO: 1999563 - RNA, 19 nt, Artificial Sequence
  Description of Artificial Sequence: Synthetic oligonucleotide
  Antisense strand to SEQ ID NO: 1999562
ucuaucaguggcaguuuau

SEQ ID NO: 1999564 - RNA, 19 nt, Artificial Sequence
  Description of Artificial Sequence: Synthetic oligonucleotide
  Sense strand starting at position 1420 of SEQ ID NO: 1880862
gacucaaggucugcacaga

SEQ ID NO: 1999565 - RNA, 19 nt, Artificial Sequence
  Description of Artificial Sequence: Synthetic oligonucleotide
  Antisense strand to SEQ ID NO: 1999564
ucugugcagaccuugaguc

SEQ ID NO: 1999566 - RNA, 19 nt, Artificial Sequence
  Description of Artificial Sequence: Synthetic oligonucleotide
  Sense strand starting at position 1603 of SEQ ID NO: 1880862
uuuggauggcucugggaag

SEQ ID NO: 1999567 - RNA, 19 nt, Artificial Sequence
  Description of Artificial Sequence: Synthetic oligonucleotide
  Antisense strand to SEQ ID NO: 1999566
cuucccagagccauccaaa

SEQ ID NO: 1999568 - RNA, 19 nt, Artificial Sequence
  Description of Artificial Sequence: Synthetic oligonucleotide
  Sense strand starting at position 1631 of SEQ ID NO: 1880862
augugacuuuaugugaagu

SEQ ID NO: 1999569 - RNA, 19 nt, Artificial Sequence
  Description of Artificial Sequence: Synthetic oligonucleotide
  Antisense strand to SEQ ID NO: 1999568
acuucacauaaagucacau

SEQ ID NO: 1999570 - RNA, 19 nt, Artificial Sequence
  Description of Artificial Sequence: Synthetic oligonucleotide
  Sense strand starting at position 1695 of SEQ ID NO: 1880862
agccaagaauacuuguuau

SEQ ID NO: 1999571 - RNA, 19 nt, Artificial Sequence
  Description of Artificial Sequence: Synthetic oligonucleotide
  Antisense strand to SEQ ID NO: 1999570
auaacaaguauucuuggcu

SEQ ID NO: 1999572 - RNA, 19 nt, Artificial Sequence
  Description of Artificial Sequence: Synthetic oligonucleotide
  Sense strand starting at position 1745 of SEQ ID NO: 1880862
acuaguccuuaauuaaagu

SEQ ID NO: 1999573 - RNA, 19 nt, Artificial Sequence
  Description of Artificial Sequence: Synthetic oligonucleotide
  Antisense strand to SEQ ID NO: 1999572
acuuuaauuaaggacuagu

SEQ ID NO: 1999574 - RNA, 19 nt, Artificial Sequence
  Description of Artificial Sequence: Synthetic oligonucleotide
  Sense strand starting at position 1766 of SEQ ID NO: 1880862
aggcuauucuggguuuaca

SEQ ID NO: 1999575 - RNA, 19 nt, Artificial Sequence
  Description of Artificial Sequence: Synthetic oligonucleotide
  Antisense strand to SEQ ID NO: 1999574
uguaaacccagaauagccu

SEQ ID NO: 1999576 - RNA, 19 nt, Artificial Sequence
  Description of Artificial Sequence: Synthetic oligonucleotide
  Sense strand starting at position 1879 of SEQ ID NO: 1880862
gcaggaaaucaugggcaaa

SEQ ID NO: 1999577 - RNA, 19 nt, Artificial Sequence
  Description of Artificial Sequence: Synthetic oligonucleotide
  Antisense strand to SEQ ID NO: 1999576
uuugcccaugauuuccugc

SEQ ID NO: 1999578 - RNA, 19 nt, Artificial Sequence
  Description of Artificial Sequence: Synthetic oligonucleotide
  Sense strand starting at position 1899 of SEQ ID NO: 1880862
uugcuacucugaguugaca

SEQ ID NO: 1999579 - RNA, 19 nt, Artificial Sequence
  Description of Artificial Sequence: Synthetic oligonucleotide
  Antisense strand to SEQ ID NO: 1999578
ugucaacucagaguagcaa

SEQ ID NO: 1999580 - RNA, 19 nt, Artificial Sequence
  Description of Artificial Sequence: Synthetic oligonucleotide
  Sense strand starting at position 1980 of SEQ ID NO: 1880862
gguaaucagucaucauauc

SEQ ID NO: 1999581 - RNA, 19 nt, Artificial Sequence
  Description of Artificial Sequence: Synthetic oligonucleotide
  Antisense strand to SEQ ID NO: 1999580
gauaugaugacugauuacc

SEQ ID NO: 1999582 - RNA, 19 nt, Artificial Sequence
  Description of Artificial Sequence: Synthetic oligonucleotide
  Sense strand starting at position 2197 of SEQ ID NO: 1880862
gcuucuuuagcgucuucga

SEQ ID NO: 1999583 - RNA, 19 nt, Artificial Sequence
  Description of Artificial Sequence: Synthetic oligonucleotide
  Antisense strand to SEQ ID NO: 1999582
ucgaagacgcuaaagaagc

SEQ ID NO: 1999584 - RNA, 19 nt, Artificial Sequence
  Description of Artificial Sequence: Synthetic oligonucleotide
  Sense strand starting at position 2251 of SEQ ID NO: 1880862
aacaguuaaugcuuagagu

SEQ ID NO: 1999585 - RNA, 19 nt, Artificial Sequence
  Description of Artificial Sequence: Synthetic oligonucleotide
  Antisense strand to SEQ ID NO: 1999584
acucuaagcauuaacuguu

SEQ ID NO: 1999586 - RNA, 19 nt, Artificial Sequence
  Description of Artificial Sequence: Synthetic oligonucleotide
  Sense strand starting at position 2252 of SEQ ID NO: 1880862
acaguuaaugcuuagagua

SEQ ID NO: 1999587 - RNA, 19 nt, Artificial Sequence
  Description of Artificial Sequence: Synthetic oligonucleotide
  Antisense strand to SEQ ID NO: 1999586
uacucuaagcauuaacugu

SEQ ID NO: 1999588 - RNA, 19 nt, Artificial Sequence
  Description of Artificial Sequence: Synthetic oligonucleotide
  Sense strand starting at position 2257 of SEQ ID NO: 1880862
uaaugcuuagaguaaguua

SEQ ID NO: 1999589 - RNA, 19 nt, Artificial Sequence
  Description of Artificial Sequence: Synthetic oligonucleotide
  Antisense strand to SEQ ID NO: 1999588
uaacuuacucuaagcauua

SEQ ID NO: 1999590 - RNA, 19 nt, Artificial Sequence
  Description of Artificial Sequence: Synthetic oligonucleotide
  Sense strand starting at position 2408 of SEQ ID NO: 1880862
gaccuuacguuccuuuaga

SEQ ID NO: 1999591 - RNA, 19 nt, Artificial Sequence
  Description of Artificial Sequence: Synthetic oligonucleotide
  Antisense strand to SEQ ID NO: 1999590
ucuaaaggaacguaagguc

SEQ ID NO: 1999592 - RNA, 19 nt, Artificial Sequence
  Description of Artificial Sequence: Synthetic oligonucleotide
  Sense strand starting at position 2465 of SEQ ID NO: 1880862
gguauuaucuuacccuuua

SEQ ID NO: 1999593 - RNA, 19 nt, Artificial Sequence
  Description of Artificial Sequence: Synthetic oligonucleotide
  Antisense strand to SEQ ID NO: 1999592
uaaaggguaagauaauacc

SEQ ID NO: 1999594 - RNA, 19 nt, Artificial Sequence
  Description of Artificial Sequence: Synthetic oligonucleotide
  Sense strand starting at position 2466 of SEQ ID NO: 1880862
guauuaucuuacccuuuag

SEQ ID NO: 1999595 - RNA, 19 nt, Artificial Sequence
  Description of Artificial Sequence: Synthetic oligonucleotide
  Antisense strand to SEQ ID NO: 1999594
cuaaaggguaagauaauac

SEQ ID NO: 1999596 - RNA, 19 nt, Artificial Sequence
  Description of Artificial Sequence: Synthetic oligonucleotide
  Sense strand starting at position 2822 of SEQ ID NO: 1880862
uuccuagaaucaucugagu

SEQ ID NO: 1999597 - RNA, 19 nt, Artificial Sequence
  Description of Artificial Sequence: Synthetic oligonucleotide
  Antisense strand to SEQ ID NO: 1999596
acucagaugauucuaggaa

SEQ ID NO: 1999598 - RNA, 19 nt, Artificial Sequence
  Description of Artificial Sequence: Synthetic oligonucleotide
  Sense strand starting at position 2894 of SEQ ID NO: 1880862
gcuugauuugccuacugua

SEQ ID NO: 1999599 - RNA, 19 nt, Artificial Sequence
  Description of Artificial Sequence: Synthetic oligonucleotide
  Antisense strand to SEQ ID NO: 1999598
uacaguaggcaaaucaagc

SEQ ID NO: 1999600 - RNA, 19 nt, Artificial Sequence
  Description of Artificial Sequence: Synthetic oligonucleotide
  Sense strand starting at position 2986 of SEQ ID NO: 1880862
gguaucauguccuugaucu

SEQ ID NO: 1999601 - RNA, 19 nt, Artificial Sequence
  Description of Artificial Sequence: Synthetic oligonucleotide
  Antisense strand to SEQ ID NO: 1999600
agaucaaggacaugauacc

SEQ ID NO: 1999602 - RNA, 19 nt, Artificial Sequence
  Description of Artificial Sequence: Synthetic oligonucleotide
  Sense strand starting at position 3069 of SEQ ID NO: 1880862
aggaguucccuccaccaau

SEQ ID NO: 1999603 - RNA, 19 nt, Artificial Sequence
  Description of Artificial Sequence: Synthetic oligonucleotide
  Antisense strand to SEQ ID NO: 1999602
auugguggagggaacuccu

SEQ ID NO: 1999604 - RNA, 19 nt, Artificial Sequence
  Description of Artificial Sequence: Synthetic oligonucleotide
  Sense strand starting at position 3165 of SEQ ID NO: 1880862
cuuucucuccaguauagua

SEQ ID NO: 1999605 - RNA, 19 nt, Artificial Sequence
  Description of Artificial Sequence: Synthetic oligonucleotide
  Antisense strand to SEQ ID NO: 1999604
uacuauacuggagagaaag

SEQ ID NO: 1999606 - RNA, 19 nt, Artificial Sequence
  Description of Artificial Sequence: Synthetic oligonucleotide
  Sense strand starting at position 3514 of SEQ ID NO: 1880862
auuguaagauaggcacauu

SEQ ID NO: 1999607 - RNA, 19 nt, Artificial Sequence
  Description of Artificial Sequence: Synthetic oligonucleotide
  Antisense strand to SEQ ID NO: 1999606
aaugugccuaucuuacaau

SEQ ID NO: 1999608 - RNA, 19 nt, Artificial Sequence
  Description of Artificial Sequence: Synthetic oligonucleotide
  Sense strand starting at position 3628 of SEQ ID NO: 1880862
agguuaaacuguccaagau

SEQ ID NO: 1999609 - RNA, 19 nt, Artificial Sequence
  Description of Artificial Sequence: Synthetic oligonucleotide
  Antisense strand to SEQ ID NO: 1999608
aucuuggacaguuuaaccu

SEQ ID NO: 1999610 - RNA, 19 nt, Artificial Sequence
  Description of Artificial Sequence: Synthetic oligonucleotide
  Sense strand starting at position 3629 of SEQ ID NO: 1880862
gguuaaacuguccaagauu

SEQ ID NO: 1999611 - RNA, 19 nt, Artificial Sequence
  Description of Artificial Sequence: Synthetic oligonucleotide
  Antisense strand to SEQ ID NO: 1999610
aaucuuggacaguuuaacc

SEQ ID NO: 1999612 - RNA, 19 nt, Artificial Sequence
  Description of Artificial Sequence: Synthetic oligonucleotide
  Sense strand starting at position 3689 of SEQ ID NO: 1880862
aggaaagugcauuaauguu

SEQ ID NO: 1999613 - RNA, 19 nt, Artificial Sequence
  Description of Artificial Sequence: Synthetic oligonucleotide
  Antisense strand to SEQ ID NO: 1999612
aacauuaaugcacuuuccu

SEQ ID NO: 1999614 - RNA, 19 nt, Artificial Sequence
  Description of Artificial Sequence: Synthetic oligonucleotide
  Sense strand starting at position 3854 of SEQ ID NO: 1880862
cucgcaucucgcucuagau

SEQ ID NO: 1999615 - RNA, 19 nt, Artificial Sequence
  Description of Artificial Sequence: Synthetic oligonucleotide
  Antisense strand to SEQ ID NO: 1999614
aucuagagcgagaugcgag

SEQ ID NO: 1999616 - RNA, 19 nt, Artificial Sequence
  Description of Artificial Sequence: Synthetic oligonucleotide
  Sense strand starting at position 3855 of SEQ ID NO: 1880862
ucgcaucucgcucuagauu

SEQ ID NO: 1999617 - RNA, 19 nt, Artificial Sequence
  Description of Artificial Sequence: Synthetic oligonucleotide
  Antisense strand to SEQ ID NO: 1999616
aaucuagagcgagaugcga

SEQ ID NO: 1999618 - RNA, 19 nt, Artificial Sequence
  Description of Artificial Sequence: Synthetic oligonucleotide
  Sense strand starting at position 65 of SEQ ID NO: 1880863
aacgguuuccaauacuuga

SEQ ID NO: 1999619 - RNA, 19 nt, Artificial Sequence
  Description of Artificial Sequence: Synthetic oligonucleotide
  Antisense strand to SEQ ID NO: 1999618
ucaaguauuggaaaccguu

SEQ ID NO: 1999620 - RNA, 19 nt, Artificial Sequence
  Description of Artificial Sequence: Synthetic oligonucleotide
  Sense strand starting at position 234 of SEQ ID NO: 1880863
gggaaccaguuaccuauau

SEQ ID NO: 1999621 - RNA, 19 nt, Artificial Sequence
  Description of Artificial Sequence: Synthetic oligonucleotide
  Antisense strand to SEQ ID NO: 1999620
auauagguaacugguuccc

SEQ ID NO: 1999622 - RNA, 19 nt, Artificial Sequence
  Description of Artificial Sequence: Synthetic oligonucleotide
  Sense strand starting at position 235 of SEQ ID NO: 1880863
ggaaccaguuaccuauaua

SEQ ID NO: 1999623 - RNA, 19 nt, Artificial Sequence
  Description of Artificial Sequence: Synthetic oligonucleotide
  Antisense strand to SEQ ID NO: 1999622
uauauagguaacugguucc

SEQ ID NO: 1999624 - RNA, 19 nt, Artificial Sequence
  Description of Artificial Sequence: Synthetic oligonucleotide
  Sense strand starting at position 311 of SEQ ID NO: 1880863
guuucuuuacaucaugagu

SEQ ID NO: 1999625 - RNA, 19 nt, Artificial Sequence
  Description of Artificial Sequence: Synthetic oligonucleotide
  Antisense strand to SEQ ID NO: 1999624
acucaugauguaaagaaac

SEQ ID NO: 1999626 - RNA, 19 nt, Artificial Sequence
  Description of Artificial Sequence: Synthetic oligonucleotide
  Sense strand starting at position 314 of SEQ ID NO: 1880863
ucuuuacaucaugagucau

SEQ ID NO: 1999627 - RNA, 19 nt, Artificial Sequence
  Description of Artificial Sequence: Synthetic oligonucleotide
  Antisense strand to SEQ ID NO: 1999626
augacucaugauguaaaga

SEQ ID NO: 1999628 - RNA, 19 nt, Artificial Sequence
  Description of Artificial Sequence: Synthetic oligonucleotide
  Sense strand starting at position 316 of SEQ ID NO: 1880863
uuuacaucaugagucauua

SEQ ID NO: 1999629 - RNA, 19 nt, Artificial Sequence
  Description of Artificial Sequence: Synthetic oligonucleotide
  Antisense strand to SEQ ID NO: 1999628
uaaugacucaugauguaaa

SEQ ID NO: 1999630 - RNA, 19 nt, Artificial Sequence
  Description of Artificial Sequence: Synthetic oligonucleotide
  Sense strand starting at position 349 of SEQ ID NO: 1880863
ccuguuaaguaguuguaag

SEQ ID NO: 1999631 - RNA, 19 nt, Artificial Sequence
  Description of Artificial Sequence: Synthetic oligonucleotide
  Antisense strand to SEQ ID NO: 1999630
cuuacaacuacuuaacagg

SEQ ID NO: 1999632 - RNA, 19 nt, Artificial Sequence
  Description of Artificial Sequence: Synthetic oligonucleotide
  Sense strand starting at position 357 of SEQ ID NO: 1880863
guaguuguaagucaugcca

SEQ ID NO: 1999633 - RNA, 19 nt, Artificial Sequence
  Description of Artificial Sequence: Synthetic oligonucleotide
  Antisense strand to SEQ ID NO: 1999632
uggcaugacuuacaacuac

SEQ ID NO: 1999634 - RNA, 19 nt, Artificial Sequence
  Description of Artificial Sequence: Synthetic oligonucleotide
  Sense strand starting at position 438 of SEQ ID NO: 1880863
ucaaguucccagugcaaag

SEQ ID NO: 1999635 - RNA, 19 nt, Artificial Sequence
  Description of Artificial Sequence: Synthetic oligonucleotide
  Antisense strand to SEQ ID NO: 1999634
cuuugcacugggaacuuga

SEQ ID NO: 1999636 - RNA, 19 nt, Artificial Sequence
  Description of Artificial Sequence: Synthetic oligonucleotide
  Sense strand starting at position 452 of SEQ ID NO: 1880863
caaagaugcuagguuacaa

SEQ ID NO: 1999637 - RNA, 19 nt, Artificial Sequence
  Description of Artificial Sequence: Synthetic oligonucleotide
  Antisense strand to SEQ ID NO: 1999636
uuguaaccuagcaucuuug

SEQ ID NO: 1999638 - RNA, 19 nt, Artificial Sequence
  Description of Artificial Sequence: Synthetic oligonucleotide
  Sense strand starting at position 497 of SEQ ID NO: 1880863
ggacaucacaaguggguaa

SEQ ID NO: 1999639 - RNA, 19 nt, Artificial Sequence
  Description of Artificial Sequence: Synthetic oligonucleotide
  Antisense strand to SEQ ID NO: 1999638
uuacccacuugugaugucc

SEQ ID NO: 1999640 - RNA, 19 nt, Artificial Sequence
  Description of Artificial Sequence: Synthetic oligonucleotide
  Sense strand starting at position 1191 of SEQ ID NO: 1880863
ucuuguaggaaagguugaa

SEQ ID NO: 1999641 - RNA, 19 nt, Artificial Sequence
  Description of Artificial Sequence: Synthetic oligonucleotide
  Antisense strand to SEQ ID NO: 1999640
uucaaccuuuccuacaaga

SEQ ID NO: 1999642 - RNA, 19 nt, Artificial Sequence
  Description of Artificial Sequence: Synthetic oligonucleotide
  Sense strand starting at position 1204 of SEQ ID NO: 1880863
guugaaacuguaggcaaau

SEQ ID NO: 1999643 - RNA, 19 nt, Artificial Sequence
  Description of Artificial Sequence: Synthetic oligonucleotide
  Antisense strand to SEQ ID NO: 1999642
auuugccuacaguuucaac

SEQ ID NO: 1999644 - RNA, 19 nt, Artificial Sequence
  Description of Artificial Sequence: Synthetic oligonucleotide
  Sense strand starting at position 1215 of SEQ ID NO: 1880863
aggcaaauuccagauguua

SEQ ID NO: 1999645 - RNA, 19 nt, Artificial Sequence
  Description of Artificial Sequence: Synthetic oligonucleotide
  Antisense strand to SEQ ID NO: 1999644
uaacaucuggaauuugccu

SEQ ID NO: 1999646 - RNA, 19 nt, Artificial Sequence
  Description of Artificial Sequence: Synthetic oligonucleotide
  Sense strand starting at position 2058 of SEQ ID NO: 1880863
uuggcuuaaccacauugau

SEQ ID NO: 1999647 - RNA, 19 nt, Artificial Sequence
  Description of Artificial Sequence: Synthetic oligonucleotide
  Antisense strand to SEQ ID NO: 1999646
aucaaugugguuaagccaa

SEQ ID NO: 1999648 - RNA, 19 nt, Artificial Sequence
  Description of Artificial Sequence: Synthetic oligonucleotide
  Sense strand starting at position 2074 of SEQ ID NO: 1880863
gauacaauugcugaucgau

SEQ ID NO: 1999649 - RNA, 19 nt, Artificial Sequence
  Description of Artificial Sequence: Synthetic oligonucleotide
  Antisense strand to SEQ ID NO: 1999648
aucgaucagcaauuguauc

SEQ ID NO: 1999650 - RNA, 19 nt, Artificial Sequence
  Description of Artificial Sequence: Synthetic oligonucleotide
  Sense strand starting at position 2076 of SEQ ID NO: 1880863
uacaauugcugaucgaugu

SEQ ID NO: 1999651 - RNA, 19 nt, Artificial Sequence
  Description of Artificial Sequence: Synthetic oligonucleotide
  Antisense strand to SEQ ID NO: 1999650
acaucgaucagcaauugua

SEQ ID NO: 1999652 - RNA, 19 nt, Artificial Sequence
  Description of Artificial Sequence: Synthetic oligonucleotide
  Sense strand starting at position 2077 of SEQ ID NO: 1880863
acaauugcugaucgaugua

SEQ ID NO: 1999653 - RNA, 19 nt, Artificial Sequence
  Description of Artificial Sequence: Synthetic oligonucleotide
  Antisense strand to SEQ ID NO: 1999652
uacaucgaucagcaauugu

SEQ ID NO: 1999654 - RNA, 19 nt, Artificial Sequence
  Description of Artificial Sequence: Synthetic oligonucleotide
  Sense strand starting at position 2080 of SEQ ID NO: 1880863
auugcugaucgauguauuc

SEQ ID NO: 1999655 - RNA, 19 nt, Artificial Sequence
  Description of Artificial Sequence: Synthetic oligonucleotide
  Antisense strand to SEQ ID NO: 1999654
gaauacaucgaucagcaau

SEQ ID NO: 1999656 - RNA, 19 nt, Artificial Sequence
  Description of Artificial Sequence: Synthetic oligonucleotide
  Sense strand starting at position 2082 of SEQ ID NO: 1880863
ugcugaucgauguauucuu

SEQ ID NO: 1999657 - RNA, 19 nt, Artificial Sequence
  Description of Artificial Sequence: Synthetic oligonucleotide
  Antisense strand to SEQ ID NO: 1999656
aagaauacaucgaucagca

SEQ ID NO: 1999658 - RNA, 19 nt, Artificial Sequence
  Description of Artificial Sequence: Synthetic oligonucleotide
  Sense strand starting at position 2233 of SEQ ID NO: 1880863
acagaugccugccacauuu

SEQ ID NO: 1999659 - RNA, 19 nt, Artificial Sequence
  Description of Artificial Sequence: Synthetic oligonucleotide
  Antisense strand to SEQ ID NO: 1999658
aaauguggcaggcaucugu

SEQ ID NO: 1999660 - RNA, 19 nt, Artificial Sequence
  Description of Artificial Sequence: Synthetic oligonucleotide
  Sense strand starting at position 2379 of SEQ ID NO: 1880863
gccgauauguucuuuauag

SEQ ID NO: 1999661 - RNA, 19 nt, Artificial Sequence
  Description of Artificial Sequence: Synthetic oligonucleotide
  Antisense strand to SEQ ID NO: 1999660
cuauaaagaacauaucggc

SEQ ID NO: 1999662 - RNA, 19 nt, Artificial Sequence
  Description of Artificial Sequence: Synthetic oligonucleotide
  Sense strand starting at position 2380 of SEQ ID NO: 1880863
ccgauauguucuuuauaga

SEQ ID NO: 1999663 - RNA, 19 nt, Artificial Sequence
  Description of Artificial Sequence: Synthetic oligonucleotide
  Antisense strand to SEQ ID NO: 1999662
ucuauaaagaacauaucgg

SEQ ID NO: 1999664 - RNA, 19 nt, Artificial Sequence
  Description of Artificial Sequence: Synthetic oligonucleotide
  Sense strand starting at position 2381 of SEQ ID NO: 1880863
cgauauguucuuuauagaa

SEQ ID NO: 1999665 - RNA, 19 nt, Artificial Sequence
  Description of Artificial Sequence: Synthetic oligonucleotide
  Antisense strand to SEQ ID NO: 1999664
uucuauaaagaacauaucg

SEQ ID NO: 1999666 - RNA, 19 nt, Artificial Sequence
  Description of Artificial Sequence: Synthetic oligonucleotide
  Sense strand starting at position 2671 of SEQ ID NO: 1880863
ccagguaaacacugucaua

SEQ ID NO: 1999667 - RNA, 19 nt, Artificial Sequence
  Description of Artificial Sequence: Synthetic oligonucleotide
  Antisense strand to SEQ ID NO: 1999666
uaugacaguguuuaccugg

SEQ ID NO: 1999668 - RNA, 19 nt, Artificial Sequence
  Description of Artificial Sequence: Synthetic oligonucleotide
  Sense strand starting at position 2712 of SEQ ID NO: 1880863
gcauuaguaccaugugaga

SEQ ID NO: 1999669 - RNA, 19 nt, Artificial Sequence
  Description of Artificial Sequence: Synthetic oligonucleotide
  Antisense strand to SEQ ID NO: 1999668
ucucacaugguacuaaugc

SEQ ID NO: 1999670 - RNA, 19 nt, Artificial Sequence
  Description of Artificial Sequence: Synthetic oligonucleotide
  Sense strand starting at position 2804 of SEQ ID NO: 1880863
ucaguuccauucuuaguga

SEQ ID NO: 1999671 - RNA, 19 nt, Artificial Sequence
  Description of Artificial Sequence: Synthetic oligonucleotide
  Antisense strand to SEQ ID NO: 1999670
ucacuaagaauggaacuga

SEQ ID NO: 1999672 - RNA, 19 nt, Artificial Sequence
  Description of Artificial Sequence: Synthetic oligonucleotide
  Sense strand starting at position 2807 of SEQ ID NO: 1880863
guuccauucuuagugaacu

SEQ ID NO: 1999673 - RNA, 19 nt, Artificial Sequence
  Description of Artificial Sequence: Synthetic oligonucleotide
  Antisense strand to SEQ ID NO: 1999672
aguucacuaagaauggaac

SEQ ID NO: 1999674 - RNA, 19 nt, Artificial Sequence
  Description of Artificial Sequence: Synthetic oligonucleotide
  Sense strand starting at position 2988 of SEQ ID NO: 1880863
uguucuaccuguucuguga

SEQ ID NO: 1999675 - RNA, 19 nt, Artificial Sequence
  Description of Artificial Sequence: Synthetic oligonucleotide
  Antisense strand to SEQ ID NO: 1999674
ucacagaacagguagaaca

SEQ ID NO: 1999676 - RNA, 19 nt, Artificial Sequence
  Description of Artificial Sequence: Synthetic oligonucleotide
  Sense strand starting at position 3032 of SEQ ID NO: 1880863
gccuucuaagguuacagaa

SEQ ID NO: 1999677 - RNA, 19 nt, Artificial Sequence
  Description of Artificial Sequence: Synthetic oligonucleotide
  Antisense strand to SEQ ID NO: 1999676
uucuguaaccuuagaaggc

SEQ ID NO: 1999678 - RNA, 19 nt, Artificial Sequence
  Description of Artificial Sequence: Synthetic oligonucleotide
  Sense strand starting at position 3119 of SEQ ID NO: 1880863
gauaaacuucgagagcagu

SEQ ID NO: 1999679 - RNA, 19 nt, Artificial Sequence
  Description of Artificial Sequence: Synthetic oligonucleotide
  Antisense strand to SEQ ID NO: 1999678
acugcucucgaaguuuauc

SEQ ID NO: 1999680 - RNA, 19 nt, Artificial Sequence
  Description of Artificial Sequence: Synthetic oligonucleotide
  Sense strand starting at position 3376 of SEQ ID NO: 1880863
auuaauuagugggcacuaa

SEQ ID NO: 1999681 - RNA, 19 nt, Artificial Sequence
  Description of Artificial Sequence: Synthetic oligonucleotide
  Antisense strand to SEQ ID NO: 1999680
uuagugcccacuaauuaau

SEQ ID NO: 1999682 - RNA, 19 nt, Artificial Sequence
  Description of Artificial Sequence: Synthetic oligonucleotide
  Sense strand starting at position 3397 of SEQ ID NO: 1880863
ccagcaggguugcuuuaau

SEQ ID NO: 1999683 - RNA, 19 nt, Artificial Sequence
  Description of Artificial Sequence: Synthetic oligonucleotide
  Antisense strand to SEQ ID NO: 1999682
auuaaagcaacccugcugg

SEQ ID NO: 1999684 - RNA, 19 nt, Artificial Sequence
  Description of Artificial Sequence: Synthetic oligonucleotide
  Sense strand starting at position 3447 of SEQ ID NO: 1880863
aaaccauauguuuggguca

SEQ ID NO: 1999685 - RNA, 19 nt, Artificial Sequence
  Description of Artificial Sequence: Synthetic oligonucleotide
  Antisense strand to SEQ ID NO: 1999684
ugacccaaacauaugguuu

SEQ ID NO: 1999686 - RNA, 19 nt, Artificial Sequence
  Description of Artificial Sequence: Synthetic oligonucleotide
  Sense strand starting at position 3466 of SEQ ID NO: 1880863
ccgcgcuauccugagaaau

SEQ ID NO: 1999687 - RNA, 19 nt, Artificial Sequence
  Description of Artificial Sequence: Synthetic oligonucleotide
  Antisense strand to SEQ ID NO: 1999686
auuucucaggauagcgcgg

SEQ ID NO: 1999688 - RNA, 19 nt, Artificial Sequence
  Description of Artificial Sequence: Synthetic oligonucleotide
  Sense strand starting at position 3476 of SEQ ID NO: 1880863
cugagaaaugucugccacu

SEQ ID NO: 1999689 - RNA, 19 nt, Artificial Sequence
  Description of Artificial Sequence: Synthetic oligonucleotide
  Antisense strand to SEQ ID NO: 1999688
aguggcagacauuucucag

SEQ ID NO: 1999690 - RNA, 19 nt, Artificial Sequence
  Description of Artificial Sequence: Synthetic oligonucleotide
  Sense strand starting at position 3477 of SEQ ID NO: 1880863
ugagaaaugucugccacua

SEQ ID NO: 1999691 - RNA, 19 nt, Artificial Sequence
  Description of Artificial Sequence: Synthetic oligonucleotide
  Antisense strand to SEQ ID NO: 1999690
uaguggcagacauuucuca

SEQ ID NO: 1999692 - RNA, 19 nt, Artificial Sequence
  Description of Artificial Sequence: Synthetic oligonucleotide
  Sense strand starting at position 3549 of SEQ ID NO: 1880863
guauuaacugggcagcgau

SEQ ID NO: 1999693 - RNA, 19 nt, Artificial Sequence
  Description of Artificial Sequence: Synthetic oligonucleotide
  Antisense strand to SEQ ID NO: 1999692
aucgcugcccaguuaauac

SEQ ID NO: 1999694 - RNA, 19 nt, Artificial Sequence
  Description of Artificial Sequence: Synthetic oligonucleotide
  Sense strand starting at position 3570 of SEQ ID NO: 1880863
ggaaacaccuggcugaauu

SEQ ID NO: 1999695 - RNA, 19 nt, Artificial Sequence
  Description of Artificial Sequence: Synthetic oligonucleotide
  Antisense strand to SEQ ID NO: 1999694
aauucagccagguguuucc

SEQ ID NO: 1999696 - RNA, 19 nt, Artificial Sequence
  Description of Artificial Sequence: Synthetic oligonucleotide
  Sense strand starting at position 3580 of SEQ ID NO: 1880863
ggcugaauuaaguguaaau

SEQ ID NO: 1999697 - RNA, 19 nt, Artificial Sequence
  Description of Artificial Sequence: Synthetic oligonucleotide
  Antisense strand to SEQ ID NO: 1999696
auuuacacuuaauucagcc

SEQ ID NO: 1999698 - RNA, 19 nt, Artificial Sequence
  Description of Artificial Sequence: Synthetic oligonucleotide
  Sense strand starting at position 15 of SEQ ID NO: 1880864
aguguccuuccuugauaaa

SEQ ID NO: 1999699 - RNA, 19 nt, Artificial Sequence
  Description of Artificial Sequence: Synthetic oligonucleotide
  Antisense strand to SEQ ID NO: 1999698
uuuaucaaggaaggacacu

SEQ ID NO: 1999700 - RNA, 19 nt, Artificial Sequence
  Description of Artificial Sequence: Synthetic oligonucleotide
  Sense strand starting at position 16 of SEQ ID NO: 1880864
guguccuuccuugauaaau

SEQ ID NO: 1999701 - RNA, 19 nt, Artificial Sequence
  Description of Artificial Sequence: Synthetic oligonucleotide
  Antisense strand to SEQ ID NO: 1999700
auuuaucaaggaaggacac

SEQ ID NO: 1999702 - RNA, 19 nt, Artificial Sequence
  Description of Artificial Sequence: Synthetic oligonucleotide
  Sense strand starting at position 620 of SEQ ID NO: 1880864
gcuaucauguaacugagga

SEQ ID NO: 1999703 - RNA, 19 nt, Artificial Sequence
  Description of Artificial Sequence: Synthetic oligonucleotide
  Antisense strand to SEQ ID NO: 1999702
uccucaguuacaugauagc

SEQ ID NO: 1999704 - RNA, 19 nt, Artificial Sequence
  Description of Artificial Sequence: Synthetic oligonucleotide
  Sense strand starting at position 652 of SEQ ID NO: 1880864
acauguuaugaacauguuu

SEQ ID NO: 1999705 - RNA, 19 nt, Artificial Sequence
  Description of Artificial Sequence: Synthetic oligonucleotide
  Antisense strand to SEQ ID NO: 1999704
aaacauguucauaacaugu

SEQ ID NO: 1999706 - RNA, 19 nt, Artificial Sequence
  Description of Artificial Sequence: Synthetic oligonucleotide
  Sense strand starting at position 799 of SEQ ID NO: 1880864
guauuucuguaagaaugaa

SEQ ID NO: 1999707 - RNA, 19 nt, Artificial Sequence
  Description of Artificial Sequence: Synthetic oligonucleotide
  Antisense strand to SEQ ID NO: 1999706
uucauucuuacagaaauac

SEQ ID NO: 1999708 - RNA, 19 nt, Artificial Sequence
  Description of Artificial Sequence: Synthetic oligonucleotide
  Sense strand starting at position 827 of SEQ ID NO: 1880864
auuccagauuccuuaugua

SEQ ID NO: 1999709 - RNA, 19 nt, Artificial Sequence
  Description of Artificial Sequence: Synthetic oligonucleotide
  Antisense strand to SEQ ID NO: 1999708
uacauaaggaaucuggaau

SEQ ID NO: 1999710 - RNA, 19 nt, Artificial Sequence
  Description of Artificial Sequence: Synthetic oligonucleotide
  Sense strand starting at position 831 of SEQ ID NO: 1880864
cagauuccuuauguaagag

SEQ ID NO: 1999711 - RNA, 19 nt, Artificial Sequence
  Description of Artificial Sequence: Synthetic oligonucleotide
  Antisense strand to SEQ ID NO: 1999710
cucuuacauaaggaaucug

SEQ ID NO: 1999712 - RNA, 19 nt, Artificial Sequence
  Description of Artificial Sequence: Synthetic oligonucleotide
  Sense strand starting at position 1056 of SEQ ID NO: 1880864
ugcgaaacccaaugauagu

SEQ ID NO: 1999713 - RNA, 19 nt, Artificial Sequence
  Description of Artificial Sequence: Synthetic oligonucleotide
  Antisense strand to SEQ ID NO: 1999712
acuaucauuggguuucgca

SEQ ID NO: 1999714 - RNA, 19 nt, Artificial Sequence
  Description of Artificial Sequence: Synthetic oligonucleotide
  Sense strand starting at position 1083 of SEQ ID NO: 1880864
caaguccuggcuugacuua

SEQ ID NO: 1999715 - RNA, 19 nt, Artificial Sequence
  Description of Artificial Sequence: Synthetic oligonucleotide
  Antisense strand to SEQ ID NO: 1999714
uaagucaagccaggacuug

SEQ ID NO: 1999716 - RNA, 19 nt, Artificial Sequence
  Description of Artificial Sequence: Synthetic oligonucleotide
  Sense strand starting at position 1090 of SEQ ID NO: 1880864
uggcuugacuuauuccauu

SEQ ID NO: 1999717 - RNA, 19 nt, Artificial Sequence
  Description of Artificial Sequence: Synthetic oligonucleotide
  Antisense strand to SEQ ID NO: 1999716
aauggaauaagucaagcca

SEQ ID NO: 1999718 - RNA, 19 nt, Artificial Sequence
  Description of Artificial Sequence: Synthetic oligonucleotide
  Sense strand starting at position 1209 of SEQ ID NO: 1880864
uuaugaaaucuaugauggu

SEQ ID NO: 1999719 - RNA, 19 nt, Artificial Sequence
  Description of Artificial Sequence: Synthetic oligonucleotide
  Antisense strand to SEQ ID NO: 1999718
accaucauagauuucauaa

SEQ ID NO: 1999720 - RNA, 19 nt, Artificial Sequence
  Description of Artificial Sequence: Synthetic oligonucleotide
  Sense strand starting at position 1305 of SEQ ID NO: 1880864
guuagaauuucccaguaau

SEQ ID NO: 1999721 - RNA, 19 nt, Artificial Sequence
  Description of Artificial Sequence: Synthetic oligonucleotide
  Antisense strand to SEQ ID NO: 1999720
auuacugggaaauucuaac

SEQ ID NO: 1999722 - RNA, 19 nt, Artificial Sequence
  Description of Artificial Sequence: Synthetic oligonucleotide
  Sense strand starting at position 1531 of SEQ ID NO: 1880864
aggaaaucauaccuuaguc

SEQ ID NO: 1999723 - RNA, 19 nt, Artificial Sequence
  Description of Artificial Sequence: Synthetic oligonucleotide
  Antisense strand to SEQ ID NO: 1999722
gacuaagguaugauuuccu

SEQ ID NO: 1999724 - RNA, 19 nt, Artificial Sequence
  Description of Artificial Sequence: Synthetic oligonucleotide
  Sense strand starting at position 1539 of SEQ ID NO: 1880864
auaccuuaguccuuaagua

SEQ ID NO: 1999725 - RNA, 19 nt, Artificial Sequence
  Description of Artificial Sequence: Synthetic oligonucleotide
  Antisense strand to SEQ ID NO: 1999724
uacuuaaggacuaagguau

SEQ ID NO: 1999726 - RNA, 19 nt, Artificial Sequence
  Description of Artificial Sequence: Synthetic oligonucleotide
  Sense strand starting at position 1547 of SEQ ID NO: 1880864
guccuuaaguauccucaau

SEQ ID NO: 1999727 - RNA, 19 nt, Artificial Sequence
  Description of Artificial Sequence: Synthetic oligonucleotide
  Antisense strand to SEQ ID NO: 1999726
auugaggauacuuaaggac

SEQ ID NO: 1999728 - RNA, 19 nt, Artificial Sequence
  Description of Artificial Sequence: Synthetic oligonucleotide
  Sense strand starting at position 1678 of SEQ ID NO: 1880864
cugaaagacugugaauuua

SEQ ID NO: 1999729 - RNA, 19 nt, Artificial Sequence
  Description of Artificial Sequence: Synthetic oligonucleotide
  Antisense strand to SEQ ID NO: 1999728
uaaauucacagucuuucag

SEQ ID NO: 1999730 - RNA, 19 nt, Artificial Sequence
  Description of Artificial Sequence: Synthetic oligonucleotide
  Sense strand starting at position 1737 of SEQ ID NO: 1880864
gacaguaguugguuaucag

SEQ ID NO: 1999731 - RNA, 19 nt, Artificial Sequence
  Description of Artificial Sequence: Synthetic oligonucleotide
  Antisense strand to SEQ ID NO: 1999730
cugauaaccaacuacuguc

SEQ ID NO: 1999732 - RNA, 19 nt, Artificial Sequence
  Description of Artificial Sequence: Synthetic oligonucleotide
  Sense strand starting at position 1738 of SEQ ID NO: 1880864
acaguaguugguuaucaga

SEQ ID NO: 1999733 - RNA, 19 nt, Artificial Sequence
  Description of Artificial Sequence: Synthetic oligonucleotide
  Antisense strand to SEQ ID NO: 1999732
ucugauaaccaacuacugu

SEQ ID NO: 1999734 - RNA, 19 nt, Artificial Sequence
  Description of Artificial Sequence: Synthetic oligonucleotide
  Sense strand starting at position 1740 of SEQ ID NO: 1880864
aguaguugguuaucagaac

SEQ ID NO: 1999735 - RNA, 19 nt, Artificial Sequence
  Description of Artificial Sequence: Synthetic oligonucleotide
  Antisense strand to SEQ ID NO: 1999734
guucugauaaccaacuacu

SEQ ID NO: 1999736 - RNA, 19 nt, Artificial Sequence
  Description of Artificial Sequence: Synthetic oligonucleotide
  Sense strand starting at position 1767 of SEQ ID NO: 1880864
uauuuagugucacuaacgu

SEQ ID NO: 1999737 - RNA, 19 nt, Artificial Sequence
  Description of Artificial Sequence: Synthetic oligonucleotide
  Antisense strand to SEQ ID NO: 1999736
acguuagugacacuaaaua

SEQ ID NO: 1999738 - RNA, 19 nt, Artificial Sequence
  Description of Artificial Sequence: Synthetic oligonucleotide
  Sense strand starting at position 1917 of SEQ ID NO: 1880864
gccagaaaugcucagacag

SEQ ID NO: 1999739 - RNA, 19 nt, Artificial Sequence
  Description of Artificial Sequence: Synthetic oligonucleotide
  Antisense strand to SEQ ID NO: 1999738
cugucugagcauuucuggc

SEQ ID NO: 1999740 - RNA, 19 nt, Artificial Sequence
  Description of Artificial Sequence: Synthetic oligonucleotide
  Sense strand starting at position 2072 of SEQ ID NO: 1880864
aauggagcaccaugaugau

SEQ ID NO: 1999741 - RNA, 19 nt, Artificial Sequence
  Description of Artificial Sequence: Synthetic oligonucleotide
  Antisense strand to SEQ ID NO: 1999740
aucaucauggugcuccauu

SEQ ID NO: 1999742 - RNA, 19 nt, Artificial Sequence
  Description of Artificial Sequence: Synthetic oligonucleotide
  Sense strand starting at position 2254 of SEQ ID NO: 1880864
ggcccagaugaucaugcau

SEQ ID NO: 1999743 - RNA, 19 nt, Artificial Sequence
  Description of Artificial Sequence: Synthetic oligonucleotide
  Antisense strand to SEQ ID NO: 1999742
augcaugaucaucugggcc

SEQ ID NO: 1999744 - RNA, 19 nt, Artificial Sequence
  Description of Artificial Sequence: Synthetic oligonucleotide
  Sense strand starting at position 2830 of SEQ ID NO: 1880864
guuuacuuuccucagcuau

SEQ ID NO: 1999745 - RNA, 19 nt, Artificial Sequence
  Description of Artificial Sequence: Synthetic oligonucleotide
  Antisense strand to SEQ ID NO: 1999744
auagcugaggaaaguaaac

SEQ ID NO: 1999746 - RNA, 19 nt, Artificial Sequence
  Description of Artificial Sequence: Synthetic oligonucleotide
  Sense strand starting at position 3023 of SEQ ID NO: 1880864
agcacuguugauuaacaaa

SEQ ID NO: 1999747 - RNA, 19 nt, Artificial Sequence
  Description of Artificial Sequence: Synthetic oligonucleotide
  Antisense strand to SEQ ID NO: 1999746
uuuguuaaucaacagugcu

SEQ ID NO: 1999748 - RNA, 19 nt, Artificial Sequence
  Description of Artificial Sequence: Synthetic oligonucleotide
  Sense strand starting at position 3047 of SEQ ID NO: 1880864
ucuguauguccugacacga

SEQ ID NO: 1999749 - RNA, 19 nt, Artificial Sequence
  Description of Artificial Sequence: Synthetic oligonucleotide
  Antisense strand to SEQ ID NO: 1999748
ucgugucaggacauacaga

SEQ ID NO: 1999750 - RNA, 19 nt, Artificial Sequence
  Description of Artificial Sequence: Synthetic oligonucleotide
  Sense strand starting at position 3052 of SEQ ID NO: 1880864
auguccugacacgauauua

SEQ ID NO: 1999751 - RNA, 19 nt, Artificial Sequence
  Description of Artificial Sequence: Synthetic oligonucleotide
  Antisense strand to SEQ ID NO: 1999750
uaauaucgugucaggacau

SEQ ID NO: 1999752 - RNA, 19 nt, Artificial Sequence
  Description of Artificial Sequence: Synthetic oligonucleotide
  Sense strand starting at position 3318 of SEQ ID NO: 1880864
cucauagucuugcugagga

SEQ ID NO: 1999753 - RNA, 19 nt, Artificial Sequence
  Description of Artificial Sequence: Synthetic oligonucleotide
  Antisense strand to SEQ ID NO: 1999752
uccucagcaagacuaugag

SEQ ID NO: 1999754 - RNA, 19 nt, Artificial Sequence
  Description of Artificial Sequence: Synthetic oligonucleotide
  Sense strand starting at position 3320 of SEQ ID NO: 1880864
cauagucuugcugaggauc

SEQ ID NO: 1999755 - RNA, 19 nt, Artificial Sequence
  Description of Artificial Sequence: Synthetic oligonucleotide
  Antisense strand to SEQ ID NO: 1999754
gauccucagcaagacuaug

SEQ ID NO: 1999756 - RNA, 19 nt, Artificial Sequence
  Description of Artificial Sequence: Synthetic oligonucleotide
  Sense strand starting at position 3323 of SEQ ID NO: 1880864
agucuugcugaggaucaua

SEQ ID NO: 1999757 - RNA, 19 nt, Artificial Sequence
  Description of Artificial Sequence: Synthetic oligonucleotide
  Antisense strand to SEQ ID NO: 1999756
uaugauccucagcaagacu

SEQ ID NO: 1999758 - RNA, 19 nt, Artificial Sequence
  Description of Artificial Sequence: Synthetic oligonucleotide
  Sense strand starting at position 3383 of SEQ ID NO: 1880864
uuuguacaugcuuacgaua

SEQ ID NO: 1999759 - RNA, 19 nt, Artificial Sequence
  Description of Artificial Sequence: Synthetic oligonucleotide
  Antisense strand to SEQ ID NO: 1999758
uaucguaagcauguacaaa

SEQ ID NO: 1999760 - RNA, 19 nt, Artificial Sequence
  Description of Artificial Sequence: Synthetic oligonucleotide
  Sense strand starting at position 3388 of SEQ ID NO: 1880864
acaugcuuacgauaacuca

SEQ ID NO: 1999761 - RNA, 19 nt, Artificial Sequence
  Description of Artificial Sequence: Synthetic oligonucleotide
  Antisense strand to SEQ ID NO: 1999760
ugaguuaucguaagcaugu

SEQ ID NO: 1999762 - RNA, 19 nt, Artificial Sequence
  Description of Artificial Sequence: Synthetic oligonucleotide
  Sense strand starting at position 3391 of SEQ ID NO: 1880864
ugcuuacgauaacucagaa

SEQ ID NO: 1999763 - RNA, 19 nt, Artificial Sequence
  Description of Artificial Sequence: Synthetic oligonucleotide
  Antisense strand to SEQ ID NO: 1999762
uucugaguuaucguaagca

SEQ ID NO: 1999764 - RNA, 19 nt, Artificial Sequence
  Description of Artificial Sequence: Synthetic oligonucleotide
  Sense strand starting at position 3415 of SEQ ID NO: 1880864
caagaaacgucucuaguaa

SEQ ID NO: 1999765 - RNA, 19 nt, Artificial Sequence
  Description of Artificial Sequence: Synthetic oligonucleotide
  Antisense strand to SEQ ID NO: 1999764
uuacuagagacguuucuug

SEQ ID NO: 1999766 - RNA, 19 nt, Artificial Sequence
  Description of Artificial Sequence: Synthetic oligonucleotide
  Sense strand starting at position 3416 of SEQ ID NO: 1880864
aagaaacgucucuaguaaa

SEQ ID NO: 1999767 - RNA, 19 nt, Artificial Sequence
  Description of Artificial Sequence: Synthetic oligonucleotide
  Antisense strand to SEQ ID NO: 1999766
uuuacuagagacguuucuu

SEQ ID NO: 1999768 - RNA, 19 nt, Artificial Sequence
  Description of Artificial Sequence: Synthetic oligonucleotide
  Sense strand starting at position 3437 of SEQ ID NO: 1880864
auguuaaaucauugcacug

SEQ ID NO: 1999769 - RNA, 19 nt, Artificial Sequence
  Description of Artificial Sequence: Synthetic oligonucleotide
  Antisense strand to SEQ ID NO: 1999768
cagugcaaugauuuaacau

SEQ ID NO: 1999770 - RNA, 19 nt, Artificial Sequence
  Description of Artificial Sequence: Synthetic oligonucleotide
  Sense strand starting at position 3720 of SEQ ID NO: 1880864
uuaaacugaccagguguua

SEQ ID NO: 1999771 - RNA, 19 nt, Artificial Sequence
  Description of Artificial Sequence: Synthetic oligonucleotide
  Antisense strand to SEQ ID NO: 1999770
uaacaccuggucaguuuaa

SEQ ID NO: 1999772 - RNA, 19 nt, Artificial Sequence
  Description of Artificial Sequence: Synthetic oligonucleotide
  Sense strand starting at position 3733 of SEQ ID NO: 1880864
guguuaaauuauguuggau

SEQ ID NO: 1999773 - RNA, 19 nt, Artificial Sequence
  Description of Artificial Sequence: Synthetic oligonucleotide
  Antisense strand to SEQ ID NO: 1999772
auccaacauaauuuaacac

SEQ ID NO: 1999774 - RNA, 19 nt, Artificial Sequence
  Description of Artificial Sequence: Synthetic oligonucleotide
  Sense strand starting at position 3824 of SEQ ID NO: 1880864
cuuaaagaccaauguuguu

SEQ ID NO: 1999775 - RNA, 19 nt, Artificial Sequence
  Description of Artificial Sequence: Synthetic oligonucleotide
  Antisense strand to SEQ ID NO: 1999774
aacaacauuggucuuuaag

SEQ ID NO: 1999776 - RNA, 19 nt, Artificial Sequence
  Description of Artificial Sequence: Synthetic oligonucleotide
  Sense strand starting at position 3884 of SEQ ID NO: 1880864
auugcuuuacuccagagua

SEQ ID NO: 1999777 - RNA, 19 nt, Artificial Sequence
  Description of Artificial Sequence: Synthetic oligonucleotide
  Antisense strand to SEQ ID NO: 1999776
uacucuggaguaaagcaau

SEQ ID NO: 1999778 - RNA, 19 nt, Artificial Sequence
  Description of Artificial Sequence: Synthetic oligonucleotide
  Sense strand starting at position 32 of SEQ ID NO: 1880865
ggcuguucucaggauuaca

SEQ ID NO: 1999779 - RNA, 19 nt, Artificial Sequence
  Description of Artificial Sequence: Synthetic oligonucleotide
  Antisense strand to SEQ ID NO: 1999778
uguaauccugagaacagcc

SEQ ID NO: 1999780 - RNA, 19 nt, Artificial Sequence
  Description of Artificial Sequence: Synthetic oligonucleotide
  Sense strand starting at position 80 of SEQ ID NO: 1880865
agcuguauacuugaccaca

SEQ ID NO: 1999781 - RNA, 19 nt, Artificial Sequence
  Description of Artificial Sequence: Synthetic oligonucleotide
  Antisense strand to SEQ ID NO: 1999780
uguggucaaguauacagcu

SEQ ID NO: 1999782 - RNA, 19 nt, Artificial Sequence
  Description of Artificial Sequence: Synthetic oligonucleotide
  Sense strand starting at position 82 of SEQ ID NO: 1880865
cuguauacuugaccacauu

SEQ ID NO: 1999783 - RNA, 19 nt, Artificial Sequence
  Description of Artificial Sequence: Synthetic oligonucleotide
  Antisense strand to SEQ ID NO: 1999782
aauguggucaaguauacag

SEQ ID NO: 1999784 - RNA, 19 nt, Artificial Sequence
  Description of Artificial Sequence: Synthetic oligonucleotide
  Sense strand starting at position 155 of SEQ ID NO: 1880865
cugguuuccacagggagau

SEQ ID NO: 1999785 - RNA, 19 nt, Artificial Sequence
  Description of Artificial Sequence: Synthetic oligonucleotide
  Antisense strand to SEQ ID NO: 1999784
aucucccuguggaaaccag

SEQ ID NO: 1999786 - RNA, 19 nt, Artificial Sequence
  Description of Artificial Sequence: Synthetic oligonucleotide
  Sense strand starting at position 257 of SEQ ID NO: 1880865
gguagugacgaaugaguca

SEQ ID NO: 1999787 - RNA, 19 nt, Artificial Sequence
  Description of Artificial Sequence: Synthetic oligonucleotide
  Antisense strand to SEQ ID NO: 1999786
ugacucauucgucacuacc

SEQ ID NO: 1999788 - RNA, 19 nt, Artificial Sequence
  Description of Artificial Sequence: Synthetic oligonucleotide
  Sense strand starting at position 541 of SEQ ID NO: 1880865
gccacauaacuuggaaaga

SEQ ID NO: 1999789 - RNA, 19 nt, Artificial Sequence
  Description of Artificial Sequence: Synthetic oligonucleotide
  Antisense strand to SEQ ID NO: 1999788
ucuuuccaaguuauguggc

SEQ ID NO: 1999790 - RNA, 19 nt, Artificial Sequence
  Description of Artificial Sequence: Synthetic oligonucleotide
  Sense strand starting at position 542 of SEQ ID NO: 1880865
ccacauaacuuggaaagaa

SEQ ID NO: 1999791 - RNA, 19 nt, Artificial Sequence
  Description of Artificial Sequence: Synthetic oligonucleotide
  Antisense strand to SEQ ID NO: 1999790
uucuuuccaaguuaugugg

SEQ ID NO: 1999792 - RNA, 19 nt, Artificial Sequence
  Description of Artificial Sequence: Synthetic oligonucleotide
  Sense strand starting at position 550 of SEQ ID NO: 1880865
cuuggaaagaagugcuuga

SEQ ID NO: 1999793 - RNA, 19 nt, Artificial Sequence
  Description of Artificial Sequence: Synthetic oligonucleotide
  Antisense strand to SEQ ID NO: 1999792
ucaagcacuucuuuccaag

SEQ ID NO: 1999794 - RNA, 19 nt, Artificial Sequence
  Description of Artificial Sequence: Synthetic oligonucleotide
  Sense strand starting at position 554 of SEQ ID NO: 1880865
gaaagaagugcuugacugu

SEQ ID NO: 1999795 - RNA, 19 nt, Artificial Sequence
  Description of Artificial Sequence: Synthetic oligonucleotide
  Antisense strand to SEQ ID NO: 1999794
acagucaagcacuucuuuc

SEQ ID NO: 1999796 - RNA, 19 nt, Artificial Sequence
  Description of Artificial Sequence: Synthetic oligonucleotide
  Sense strand starting at position 555 of SEQ ID NO: 1880865
aaagaagugcuugacuguu

SEQ ID NO: 1999797 - RNA, 19 nt, Artificial Sequence
  Description of Artificial Sequence: Synthetic oligonucleotide
  Antisense strand to SEQ ID NO: 1999796
aacagucaagcacuucuuu

SEQ ID NO: 1999798 - RNA, 19 nt, Artificial Sequence
  Description of Artificial Sequence: Synthetic oligonucleotide
  Sense strand starting at position 561 of SEQ ID NO: 1880865
gugcuugacuguuuccaaa

SEQ ID NO: 1999799 - RNA, 19 nt, Artificial Sequence
  Description of Artificial Sequence: Synthetic oligonucleotide
  Antisense strand to SEQ ID NO: 1999798
uuuggaaacagucaagcac

SEQ ID NO: 1999800 - RNA, 19 nt, Artificial Sequence
  Description of Artificial Sequence: Synthetic oligonucleotide
  Sense strand starting at position 608 of SEQ ID NO: 1880865
uguguaucagggugugaag

SEQ ID NO: 1999801 - RNA, 19 nt, Artificial Sequence
  Description of Artificial Sequence: Synthetic oligonucleotide
  Antisense strand to SEQ ID NO: 1999800
cuucacacccugauacaca

SEQ ID NO: 1999802 - RNA, 19 nt, Artificial Sequence
  Description of Artificial Sequence: Synthetic oligonucleotide
  Sense strand starting at position 610 of SEQ ID NO: 1880865
uguaucagggugugaaguu

SEQ ID NO: 1999803 - RNA, 19 nt, Artificial Sequence
  Description of Artificial Sequence: Synthetic oligonucleotide
  Antisense strand to SEQ ID NO: 1999802
aacuucacacccugauaca

SEQ ID NO: 1999804 - RNA, 19 nt, Artificial Sequence
  Description of Artificial Sequence: Synthetic oligonucleotide
  Sense strand starting at position 657 of SEQ ID NO: 1880865
ucuaaauguuaggcuagua

SEQ ID NO: 1999805 - RNA, 19 nt, Artificial Sequence
  Description of Artificial Sequence: Synthetic oligonucleotide
  Antisense strand to SEQ ID NO: 1999804
uacuagccuaacauuuaga

SEQ ID NO: 1999806 - RNA, 19 nt, Artificial Sequence
  Description of Artificial Sequence: Synthetic oligonucleotide
  Sense strand starting at position 669 of SEQ ID NO: 1880865
gcuaguaaugcuuggauua

SEQ ID NO: 1999807 - RNA, 19 nt, Artificial Sequence
  Description of Artificial Sequence: Synthetic oligonucleotide
  Antisense strand to SEQ ID NO: 1999806
uaauccaagcauuacuagc

SEQ ID NO: 1999808 - RNA, 19 nt, Artificial Sequence
  Description of Artificial Sequence: Synthetic oligonucleotide
  Sense strand starting at position 670 of SEQ ID NO: 1880865
cuaguaaugcuuggauuau

SEQ ID NO: 1999809 - RNA, 19 nt, Artificial Sequence
  Description of Artificial Sequence: Synthetic oligonucleotide
  Antisense strand to SEQ ID NO: 1999808
auaauccaagcauuacuag

SEQ ID NO: 1999810 - RNA, 19 nt, Artificial Sequence
  Description of Artificial Sequence: Synthetic oligonucleotide
  Sense strand starting at position 697 of SEQ ID NO: 1880865
aguuguaggcuuuggagga

SEQ ID NO: 1999811 - RNA, 19 nt, Artificial Sequence
  Description of Artificial Sequence: Synthetic oligonucleotide
  Antisense strand to SEQ ID NO: 1999810
uccuccaaagccuacaacu

SEQ ID NO: 1999812 - RNA, 19 nt, Artificial Sequence
  Description of Artificial Sequence: Synthetic oligonucleotide
  Sense strand starting at position 701 of SEQ ID NO: 1880865
guaggcuuuggaggaaauu

SEQ ID NO: 1999813 - RNA, 19 nt, Artificial Sequence
  Description of Artificial Sequence: Synthetic oligonucleotide
  Antisense strand to SEQ ID NO: 1999812
aauuuccuccaaagccuac

SEQ ID NO: 1999814 - RNA, 19 nt, Artificial Sequence
  Description of Artificial Sequence: Synthetic oligonucleotide
  Sense strand starting at position 729 of SEQ ID NO: 1880865
aguaaagauguugaagcuu

SEQ ID NO: 1999815 - RNA, 19 nt, Artificial Sequence
  Description of Artificial Sequence: Synthetic oligonucleotide
  Antisense strand to SEQ ID NO: 1999814
aagcuucaacaucuuuacu

SEQ ID NO: 1999816 - RNA, 19 nt, Artificial Sequence
  Description of Artificial Sequence: Synthetic oligonucleotide
  Sense strand starting at position 772 of SEQ ID NO: 1880865
gcuguacagagaugacuuu

SEQ ID NO: 1999817 - RNA, 19 nt, Artificial Sequence
  Description of Artificial Sequence: Synthetic oligonucleotide
  Antisense strand to SEQ ID NO: 1999816
aaagucaucucuguacagc

SEQ ID NO: 1999818 - RNA, 19 nt, Artificial Sequence
  Description of Artificial Sequence: Synthetic oligonucleotide
  Sense strand starting at position 781 of SEQ ID NO: 1880865
agaugacuuuauuauacag

SEQ ID NO: 1999819 - RNA, 19 nt, Artificial Sequence
  Description of Artificial Sequence: Synthetic oligonucleotide
  Antisense strand to SEQ ID NO: 1999818
cuguauaauaaagucaucu

SEQ ID NO: 1999820 - RNA, 19 nt, Artificial Sequence
  Description of Artificial Sequence: Synthetic oligonucleotide
  Sense strand starting at position 859 of SEQ ID NO: 1880865
uugucuauccuguacaaau

SEQ ID NO: 1999821 - RNA, 19 nt, Artificial Sequence
  Description of Artificial Sequence: Synthetic oligonucleotide
  Antisense strand to SEQ ID NO: 1999820
auuuguacaggauagacaa

SEQ ID NO: 1999822 - RNA, 19 nt, Artificial Sequence
  Description of Artificial Sequence: Synthetic oligonucleotide
  Sense strand starting at position 906 of SEQ ID NO: 1880865
gucucauucuuguuacauc

SEQ ID NO: 1999823 - RNA, 19 nt, Artificial Sequence
  Description of Artificial Sequence: Synthetic oligonucleotide
  Antisense strand to SEQ ID NO: 1999822
gauguaacaagaaugagac

SEQ ID NO: 1999824 - RNA, 19 nt, Artificial Sequence
  Description of Artificial Sequence: Synthetic oligonucleotide
  Sense strand starting at position 2373 of SEQ ID NO: 1880865
gcaacagugucaucuuaag

SEQ ID NO: 1999825 - RNA, 19 nt, Artificial Sequence
  Description of Artificial Sequence: Synthetic oligonucleotide
  Antisense strand to SEQ ID NO: 1999824
cuuaagaugacacuguugc

SEQ ID NO: 1999826 - RNA, 19 nt, Artificial Sequence
  Description of Artificial Sequence: Synthetic oligonucleotide
  Sense strand starting at position 2419 of SEQ ID NO: 1880865
auacuaguguggucccuua

SEQ ID NO: 1999827 - RNA, 19 nt, Artificial Sequence
  Description of Artificial Sequence: Synthetic oligonucleotide
  Antisense strand to SEQ ID NO: 1999826
uaagggaccacacuaguau

SEQ ID NO: 1999828 - RNA, 19 nt, Artificial Sequence
  Description of Artificial Sequence: Synthetic oligonucleotide
  Sense strand starting at position 2909 of SEQ ID NO: 1880865
agguauuacauuugugugu

SEQ ID NO: 1999829 - RNA, 19 nt, Artificial Sequence
  Description of Artificial Sequence: Synthetic oligonucleotide
  Antisense strand to SEQ ID NO: 1999828
acacacaaauguaauaccu

SEQ ID NO: 1999830 - RNA, 19 nt, Artificial Sequence
  Description of Artificial Sequence: Synthetic oligonucleotide
  Sense strand starting at position 2937 of SEQ ID NO: 1880865
gaagacaaauguguuccua

SEQ ID NO: 1999831 - RNA, 19 nt, Artificial Sequence
  Description of Artificial Sequence: Synthetic oligonucleotide
  Antisense strand to SEQ ID NO: 1999830
uaggaacacauuugucuuc

SEQ ID NO: 1999832 - RNA, 19 nt, Artificial Sequence
  Description of Artificial Sequence: Synthetic oligonucleotide
  Sense strand starting at position 2939 of SEQ ID NO: 1880865
agacaaauguguuccuacu

SEQ ID NO: 1999833 - RNA, 19 nt, Artificial Sequence
  Description of Artificial Sequence: Synthetic oligonucleotide
  Antisense strand to SEQ ID NO: 1999832
aguaggaacacauuugucu

SEQ ID NO: 1999834 - RNA, 19 nt, Artificial Sequence
  Description of Artificial Sequence: Synthetic oligonucleotide
  Sense strand starting at position 2941 of SEQ ID NO: 1880865
acaaauguguuccuacuga

SEQ ID NO: 1999835 - RNA, 19 nt, Artificial Sequence
  Description of Artificial Sequence: Synthetic oligonucleotide
  Antisense strand to SEQ ID NO: 1999834
ucaguaggaacacauuugu

SEQ ID NO: 1999836 - RNA, 19 nt, Artificial Sequence
  Description of Artificial Sequence: Synthetic oligonucleotide
  Sense strand starting at position 2974 of SEQ ID NO: 1880865
gguacuauccgagguuuaa

SEQ ID NO: 1999837 - RNA, 19 nt, Artificial Sequence
  Description of Artificial Sequence: Synthetic oligonucleotide
  Antisense strand to SEQ ID NO: 1999836
uuaaaccucggauaguacc

SEQ ID NO: 1999838 - RNA, 19 nt, Artificial Sequence
  Description of Artificial Sequence: Synthetic oligonucleotide
  Sense strand starting at position 2978 of SEQ ID NO: 1880865
cuauccgagguuuaaagua

SEQ ID NO: 1999839 - RNA, 19 nt, Artificial Sequence
  Description of Artificial Sequence: Synthetic oligonucleotide
  Antisense strand to SEQ ID NO: 1999838
uacuuuaaaccucggauag

SEQ ID NO: 1999840 - RNA, 19 nt, Artificial Sequence
  Description of Artificial Sequence: Synthetic oligonucleotide
  Sense strand starting at position 3013 of SEQ ID NO: 1880865
gaacauaaucccugugggu

SEQ ID NO: 1999841 - RNA, 19 nt, Artificial Sequence
  Description of Artificial Sequence: Synthetic oligonucleotide
  Antisense strand to SEQ ID NO: 1999840
acccacagggauuauguuc

SEQ ID NO: 1999842 - RNA, 19 nt, Artificial Sequence
  Description of Artificial Sequence: Synthetic oligonucleotide
  Sense strand starting at position 3015 of SEQ ID NO: 1880865
acauaaucccuguggguaa

SEQ ID NO: 1999843 - RNA, 19 nt, Artificial Sequence
  Description of Artificial Sequence: Synthetic oligonucleotide
  Antisense strand to SEQ ID NO: 1999842
uuacccacagggauuaugu

SEQ ID NO: 1999844 - RNA, 19 nt, Artificial Sequence
  Description of Artificial Sequence: Synthetic oligonucleotide
  Sense strand starting at position 3055 of SEQ ID NO: 1880865
auuaauugagauggccuau

SEQ ID NO: 1999845 - RNA, 19 nt, Artificial Sequence
  Description of Artificial Sequence: Synthetic oligonucleotide
  Antisense strand to SEQ ID NO: 1999844
auaggccaucucaauuaau

SEQ ID NO: 1999846 - RNA, 19 nt, Artificial Sequence
  Description of Artificial Sequence: Synthetic oligonucleotide
  Sense strand starting at position 3061 of SEQ ID NO: 1880865
ugagauggccuauauucca

SEQ ID NO: 1999847 - RNA, 19 nt, Artificial Sequence
  Description of Artificial Sequence: Synthetic oligonucleotide
  Antisense strand to SEQ ID NO: 1999846
uggaauauaggccaucuca

SEQ ID NO: 1999848 - RNA, 19 nt, Artificial Sequence
  Description of Artificial Sequence: Synthetic oligonucleotide
  Sense strand starting at position 3478 of SEQ ID NO: 1880865
ucaaauuacuaguucgaau

SEQ ID NO: 1999849 - RNA, 19 nt, Artificial Sequence
  Description of Artificial Sequence: Synthetic oligonucleotide
  Antisense strand to SEQ ID NO: 1999848
auucgaacuaguaauuuga

SEQ ID NO: 1999850 - RNA, 19 nt, Artificial Sequence
  Description of Artificial Sequence: Synthetic oligonucleotide
  Sense strand starting at position 3480 of SEQ ID NO: 1880865
aaauuacuaguucgaauug

SEQ ID NO: 1999851 - RNA, 19 nt, Artificial Sequence
  Description of Artificial Sequence: Synthetic oligonucleotide
  Antisense strand to SEQ ID NO: 1999850
caauucgaacuaguaauuu

SEQ ID NO: 1999852 - RNA, 19 nt, Artificial Sequence
  Description of Artificial Sequence: Synthetic oligonucleotide
  Sense strand starting at position 3532 of SEQ ID NO: 1880865
uccagucagcuguaguaca

SEQ ID NO: 1999853 - RNA, 19 nt, Artificial Sequence
  Description of Artificial Sequence: Synthetic oligonucleotide
  Antisense strand to SEQ ID NO: 1999852
uguacuacagcugacugga

SEQ ID NO: 1999854 - RNA, 19 nt, Artificial Sequence
  Description of Artificial Sequence: Synthetic oligonucleotide
  Sense strand starting at position 3846 of SEQ ID NO: 1880865
aucccuuuacaguaaagua

SEQ ID NO: 1999855 - RNA, 19 nt, Artificial Sequence
  Description of Artificial Sequence: Synthetic oligonucleotide
  Antisense strand to SEQ ID NO: 1999854
uacuuuacuguaaagggau

SEQ ID NO: 1999856 - RNA, 19 nt, Artificial Sequence
  Description of Artificial Sequence: Synthetic oligonucleotide
  Sense strand starting at position 3882 of SEQ ID NO: 1880865
uuuaauuugcgccaagcau

SEQ ID NO: 1999857 - RNA, 19 nt, Artificial Sequence
  Description of Artificial Sequence: Synthetic oligonucleotide
  Antisense strand to SEQ ID NO: 1999856
augcuuggcgcaaauuaaa

SEQ ID NO: 1999858 - RNA, 19 nt, Artificial Sequence
  Description of Artificial Sequence: Synthetic oligonucleotide
  Sense strand starting at position 78 of SEQ ID NO: 1880866
cggugcuaaauauggagau

SEQ ID NO: 1999859 - RNA, 19 nt, Artificial Sequence
  Description of Artificial Sequence: Synthetic oligonucleotide
  Antisense strand to SEQ ID NO: 1999858
aucuccauauuuagcaccg

SEQ ID NO: 1999860 - RNA, 19 nt, Artificial Sequence
  Description of Artificial Sequence: Synthetic oligonucleotide
  Sense strand starting at position 92 of SEQ ID NO: 1880866
gagauauagcagugucaac

SEQ ID NO: 1999861 - RNA, 19 nt, Artificial Sequence
  Description of Artificial Sequence: Synthetic oligonucleotide
  Antisense strand to SEQ ID NO: 1999860
guugacacugcuauaucuc

SEQ ID NO: 1999862 - RNA, 19 nt, Artificial Sequence
  Description of Artificial Sequence: Synthetic oligonucleotide
  Sense strand starting at position 145 of SEQ ID NO: 1880866
gucaaacucucuguuaggu

SEQ ID NO: 1999863 - RNA, 19 nt, Artificial Sequence
  Description of Artificial Sequence: Synthetic oligonucleotide
  Antisense strand to SEQ ID NO: 1999862
accuaacagagaguuugac

SEQ ID NO: 1999864 - RNA, 19 nt, Artificial Sequence
  Description of Artificial Sequence: Synthetic oligonucleotide
  Sense strand starting at position 278 of SEQ ID NO: 1880866
gaaagaucccuuuacguua

SEQ ID NO: 1999865 - RNA, 19 nt, Artificial Sequence
  Description of Artificial Sequence: Synthetic oligonucleotide
  Antisense strand to SEQ ID NO: 1999864
uaacguaaagggaucuuuc

SEQ ID NO: 1999866 - RNA, 19 nt, Artificial Sequence
  Description of Artificial Sequence: Synthetic oligonucleotide
  Sense strand starting at position 281 of SEQ ID NO: 1880866
agaucccuuuacguuaauu

SEQ ID NO: 1999867 - RNA, 19 nt, Artificial Sequence
  Description of Artificial Sequence: Synthetic oligonucleotide
  Antisense strand to SEQ ID NO: 1999866
aauuaacguaaagggaucu

SEQ ID NO: 1999868 - RNA, 19 nt, Artificial Sequence
  Description of Artificial Sequence: Synthetic oligonucleotide
  Sense strand starting at position 292 of SEQ ID NO: 1880866
cguuaauuuaggugcaucu

SEQ ID NO: 1999869 - RNA, 19 nt, Artificial Sequence
  Description of Artificial Sequence: Synthetic oligonucleotide
  Antisense strand to SEQ ID NO: 1999868
agaugcaccuaaauuaacg

SEQ ID NO: 1999870 - RNA, 19 nt, Artificial Sequence
  Description of Artificial Sequence: Synthetic oligonucleotide
  Sense strand starting at position 755 of SEQ ID NO: 1880866
gacaaaugugauggugcaa

SEQ ID NO: 1999871 - RNA, 19 nt, Artificial Sequence
  Description of Artificial Sequence: Synthetic oligonucleotide
  Antisense strand to SEQ ID NO: 1999870
uugcaccaucacauuuguc

SEQ ID NO: 1999872 - RNA, 19 nt, Artificial Sequence
  Description of Artificial Sequence: Synthetic oligonucleotide
  Sense strand starting at position 851 of SEQ ID NO: 1880866
aaggucucagcaugaagau

SEQ ID NO: 1999873 - RNA, 19 nt, Artificial Sequence
  Description of Artificial Sequence: Synthetic oligonucleotide
  Antisense strand to SEQ ID NO: 1999872
aucuucaugcugagaccuu

SEQ ID NO: 1999874 - RNA, 19 nt, Artificial Sequence
  Description of Artificial Sequence: Synthetic oligonucleotide
  Sense strand starting at position 905 of SEQ ID NO: 1880866
ggagcuaaauugcuuauaa

SEQ ID NO: 1999875 - RNA, 19 nt, Artificial Sequence
  Description of Artificial Sequence: Synthetic oligonucleotide
  Antisense strand to SEQ ID NO: 1999874
uuauaagcaauuuagcucc

SEQ ID NO: 1999876 - RNA, 19 nt, Artificial Sequence
  Description of Artificial Sequence: Synthetic oligonucleotide
  Sense strand starting at position 907 of SEQ ID NO: 1880866
agcuaaauugcuuauaaga

SEQ ID NO: 1999877 - RNA, 19 nt, Artificial Sequence
  Description of Artificial Sequence: Synthetic oligonucleotide
  Antisense strand to SEQ ID NO: 1999876
ucuuauaagcaauuuagcu

SEQ ID NO: 1999878 - RNA, 19 nt, Artificial Sequence
  Description of Artificial Sequence: Synthetic oligonucleotide
  Sense strand starting at position 1448 of SEQ ID NO: 1880866
gccagcguccgucucaaua

SEQ ID NO: 1999879 - RNA, 19 nt, Artificial Sequence
  Description of Artificial Sequence: Synthetic oligonucleotide
  Antisense strand to SEQ ID NO: 1999878
uauugagacggacgcuggc

SEQ ID NO: 1999880 - RNA, 19 nt, Artificial Sequence
  Description of Artificial Sequence: Synthetic oligonucleotide
  Sense strand starting at position 1515 of SEQ ID NO: 1880866
ccaaguuacgacugauuau

SEQ ID NO: 1999881 - RNA, 19 nt, Artificial Sequence
  Description of Artificial Sequence: Synthetic oligonucleotide
  Antisense strand to SEQ ID NO: 1999880
auaaucagucguaacuugg

SEQ ID NO: 1999882 - RNA, 19 nt, Artificial Sequence
  Description of Artificial Sequence: Synthetic oligonucleotide
  Sense strand starting at position 1518 of SEQ ID NO: 1880866
aguuacgacugauuaugga

SEQ ID NO: 1999883 - RNA, 19 nt, Artificial Sequence
  Description of Artificial Sequence: Synthetic oligonucleotide
  Antisense strand to SEQ ID NO: 1999882
uccauaaucagucguaacu

SEQ ID NO: 1999884 - RNA, 19 nt, Artificial Sequence
  Description of Artificial Sequence: Synthetic oligonucleotide
  Sense strand starting at position 1551 of SEQ ID NO: 1880866
ggaucuacaguuuaauucu

SEQ ID NO: 1999885 - RNA, 19 nt, Artificial Sequence
  Description of Artificial Sequence: Synthetic oligonucleotide
  Antisense strand to SEQ ID NO: 1999884
agaauuaaacuguagaucc

SEQ ID NO: 1999886 - RNA, 19 nt, Artificial Sequence
  Description of Artificial Sequence: Synthetic oligonucleotide
  Sense strand starting at position 1592 of SEQ ID NO: 1880866
ccuugaagauguuuacagu

SEQ ID NO: 1999887 - RNA, 19 nt, Artificial Sequence
  Description of Artificial Sequence: Synthetic oligonucleotide
  Antisense strand to SEQ ID NO: 1999886
acuguaaacaucuucaagg

SEQ ID NO: 1999888 - RNA, 19 nt, Artificial Sequence
  Description of Artificial Sequence: Synthetic oligonucleotide
  Sense strand starting at position 1593 of SEQ ID NO: 1880866
cuugaagauguuuacagua

SEQ ID NO: 1999889 - RNA, 19 nt, Artificial Sequence
  Description of Artificial Sequence: Synthetic oligonucleotide
  Antisense strand to SEQ ID NO: 1999888
uacuguaaacaucuucaag

SEQ ID NO: 1999890 - RNA, 19 nt, Artificial Sequence
  Description of Artificial Sequence: Synthetic oligonucleotide
  Sense strand starting at position 1877 of SEQ ID NO: 1880866
cuacuuguagugugguaaa

SEQ ID NO: 1999891 - RNA, 19 nt, Artificial Sequence
  Description of Artificial Sequence: Synthetic oligonucleotide
  Antisense strand to SEQ ID NO: 1999890
uuuaccacacuacaaguag

SEQ ID NO: 1999892 - RNA, 19 nt, Artificial Sequence
  Description of Artificial Sequence: Synthetic oligonucleotide
  Sense strand starting at position 2124 of SEQ ID NO: 1880866
uggacaagaugucaaacaa

SEQ ID NO: 1999893 - RNA, 19 nt, Artificial Sequence
  Description of Artificial Sequence: Synthetic oligonucleotide
  Antisense strand to SEQ ID NO: 1999892
uuguuugacaucuugucca

SEQ ID NO: 1999894 - RNA, 19 nt, Artificial Sequence
  Description of Artificial Sequence: Synthetic oligonucleotide
  Sense strand starting at position 2509 of SEQ ID NO: 1880866
ugucaccauguuuaguuaa

SEQ ID NO: 1999895 - RNA, 19 nt, Artificial Sequence
  Description of Artificial Sequence: Synthetic oligonucleotide
  Antisense strand to SEQ ID NO: 1999894
uuaacuaaacauggugaca

SEQ ID NO: 1999896 - RNA, 19 nt, Artificial Sequence
  Description of Artificial Sequence: Synthetic oligonucleotide
  Sense strand starting at position 2511 of SEQ ID NO: 1880866
ucaccauguuuaguuaaca

SEQ ID NO: 1999897 - RNA, 19 nt, Artificial Sequence
  Description of Artificial Sequence: Synthetic oligonucleotide
  Antisense strand to SEQ ID NO: 1999896
uguuaacuaaacaugguga

SEQ ID NO: 1999898 - RNA, 19 nt, Artificial Sequence
  Description of Artificial Sequence: Synthetic oligonucleotide
  Sense strand starting at position 2523 of SEQ ID NO: 1880866
guuaacagucauggcaaga

SEQ ID NO: 1999899 - RNA, 19 nt, Artificial Sequence
  Description of Artificial Sequence: Synthetic oligonucleotide
  Antisense strand to SEQ ID NO: 1999898
ucuugccaugacuguuaac

SEQ ID NO: 1999900 - RNA, 19 nt, Artificial Sequence
  Description of Artificial Sequence: Synthetic oligonucleotide
  Sense strand starting at position 2891 of SEQ ID NO: 1880866
acacuaauagaaugugcua

SEQ ID NO: 1999901 - RNA, 19 nt, Artificial Sequence
  Description of Artificial Sequence: Synthetic oligonucleotide
  Antisense strand to SEQ ID NO: 1999900
uagcacauucuauuagugu

SEQ ID NO: 1999902 - RNA, 19 nt, Artificial Sequence
  Description of Artificial Sequence: Synthetic oligonucleotide
  Sense strand starting at position 2946 of SEQ ID NO: 1880866
gguaauuaagucuagcaca

SEQ ID NO: 1999903 - RNA, 19 nt, Artificial Sequence
  Description of Artificial Sequence: Synthetic oligonucleotide
  Antisense strand to SEQ ID NO: 1999902
ugugcuagacuuaauuacc

SEQ ID NO: 1999904 - RNA, 19 nt, Artificial Sequence
  Description of Artificial Sequence: Synthetic oligonucleotide
  Sense strand starting at position 3009 of SEQ ID NO: 1880866
ccagguugucguggaagga

SEQ ID NO: 1999905 - RNA, 19 nt, Artificial Sequence
  Description of Artificial Sequence: Synthetic oligonucleotide
  Antisense strand to SEQ ID NO: 1999904
uccuuccacgacaaccugg

SEQ ID NO: 1999906 - RNA, 19 nt, Artificial Sequence
  Description of Artificial Sequence: Synthetic oligonucleotide
  Sense strand starting at position 3010 of SEQ ID NO: 1880866
cagguugucguggaaggaa

SEQ ID NO: 1999907 - RNA, 19 nt, Artificial Sequence
  Description of Artificial Sequence: Synthetic oligonucleotide
  Antisense strand to SEQ ID NO: 1999906
uuccuuccacgacaaccug

SEQ ID NO: 1999908 - RNA, 19 nt, Artificial Sequence
  Description of Artificial Sequence: Synthetic oligonucleotide
  Sense strand starting at position 3013 of SEQ ID NO: 1880866
guugucguggaaggaauau

SEQ ID NO: 1999909 - RNA, 19 nt, Artificial Sequence
  Description of Artificial Sequence: Synthetic oligonucleotide
  Antisense strand to SEQ ID NO: 1999908
auauuccuuccacgacaac

SEQ ID NO: 1999910 - RNA, 19 nt, Artificial Sequence
  Description of Artificial Sequence: Synthetic oligonucleotide
  Sense strand starting at position 3019 of SEQ ID NO: 1880866
guggaaggaauauguugau

SEQ ID NO: 1999911 - RNA, 19 nt, Artificial Sequence
  Description of Artificial Sequence: Synthetic oligonucleotide
  Antisense strand to SEQ ID NO: 1999910
aucaacauauuccuuccac

SEQ ID NO: 1999912 - RNA, 19 nt, Artificial Sequence
  Description of Artificial Sequence: Synthetic oligonucleotide
  Sense strand starting at position 3025 of SEQ ID NO: 1880866
ggaauauguugaucccaga

SEQ ID NO: 1999913 - RNA, 19 nt, Artificial Sequence
  Description of Artificial Sequence: Synthetic oligonucleotide
  Antisense strand to SEQ ID NO: 1999912
ucugggaucaacauauucc

SEQ ID NO: 1999914 - RNA, 19 nt, Artificial Sequence
  Description of Artificial Sequence: Synthetic oligonucleotide
  Sense strand starting at position 3051 of SEQ ID NO: 1880866
gauaccuuguaaucagaag

SEQ ID NO: 1999915 - RNA, 19 nt, Artificial Sequence
  Description of Artificial Sequence: Synthetic oligonucleotide
  Antisense strand to SEQ ID NO: 1999914
cuucugauuacaagguauc

SEQ ID NO: 1999916 - RNA, 19 nt, Artificial Sequence
  Description of Artificial Sequence: Synthetic oligonucleotide
  Sense strand starting at position 3566 of SEQ ID NO: 1880866
guaugacgaccuugagaau

SEQ ID NO: 1999917 - RNA, 19 nt, Artificial Sequence
  Description of Artificial Sequence: Synthetic oligonucleotide
  Antisense strand to SEQ ID NO: 1999916
auucucaaggucgucauac

SEQ ID NO: 1999918 - RNA, 19 nt, Artificial Sequence
  Description of Artificial Sequence: Synthetic oligonucleotide
  Sense strand starting at position 3626 of SEQ ID NO: 1880866
agauaaccauggucccaau

SEQ ID NO: 1999919 - RNA, 19 nt, Artificial Sequence
  Description of Artificial Sequence: Synthetic oligonucleotide
  Antisense strand to SEQ ID NO: 1999918
auugggaccaugguuaucu

SEQ ID NO: 1999920 - RNA, 19 nt, Artificial Sequence
  Description of Artificial Sequence: Synthetic oligonucleotide
  Sense strand starting at position 3637 of SEQ ID NO: 1880866
gucccaaugagauguuaga

SEQ ID NO: 1999921 - RNA, 19 nt, Artificial Sequence
  Description of Artificial Sequence: Synthetic oligonucleotide
  Antisense strand to SEQ ID NO: 1999920
ucuaacaucucauugggac

SEQ ID NO: 1999922 - RNA, 19 nt, Artificial Sequence
  Description of Artificial Sequence: Synthetic oligonucleotide
  Sense strand starting at position 3647 of SEQ ID NO: 1880866
gauguuagacucuggcaau

SEQ ID NO: 1999923 - RNA, 19 nt, Artificial Sequence
  Description of Artificial Sequence: Synthetic oligonucleotide
  Antisense strand to SEQ ID NO: 1999922
auugccagagucuaacauc

SEQ ID NO: 1999924 - RNA, 19 nt, Artificial Sequence
  Description of Artificial Sequence: Synthetic oligonucleotide
  Sense strand starting at position 3874 of SEQ ID NO: 1880866
guaauaguaucauccuuac

SEQ ID NO: 1999925 - RNA, 19 nt, Artificial Sequence
  Description of Artificial Sequence: Synthetic oligonucleotide
  Antisense strand to SEQ ID NO: 1999924
guaaggaugauacuauuac

SEQ ID NO: 1999926 - RNA, 19 nt, Artificial Sequence
  Description of Artificial Sequence: Synthetic oligonucleotide
  Sense strand starting at position 3877 of SEQ ID NO: 1880866
auaguaucauccuuacaug

SEQ ID NO: 1999927 - RNA, 19 nt, Artificial Sequence
  Description of Artificial Sequence: Synthetic oligonucleotide
  Antisense strand to SEQ ID NO: 1999926
cauguaaggaugauacuau

SEQ ID NO: 1999928 - RNA, 19 nt, Artificial Sequence
  Description of Artificial Sequence: Synthetic oligonucleotide
  Sense strand starting at position 3885 of SEQ ID NO: 1880866
auccuuacauguuuaagga

SEQ ID NO: 1999929 - RNA, 19 nt, Artificial Sequence
  Description of Artificial Sequence: Synthetic oligonucleotide
  Antisense strand to SEQ ID NO: 1999928
uccuuaaacauguaaggau

SEQ ID NO: 1999930 - RNA, 19 nt, Artificial Sequence
  Description of Artificial Sequence: Synthetic oligonucleotide
  Sense strand starting at position 3886 of SEQ ID NO: 1880866
uccuuacauguuuaaggau

SEQ ID NO: 1999931 - RNA, 19 nt, Artificial Sequence
  Description of Artificial Sequence: Synthetic oligonucleotide
  Antisense strand to SEQ ID NO: 1999930
auccuuaaacauguaagga

SEQ ID NO: 1999932 - RNA, 19 nt, Artificial Sequence
  Description of Artificial Sequence: Synthetic oligonucleotide
  Sense strand starting at position 3905 of SEQ ID NO: 1880866
caugaauugcuauguguaa

SEQ ID NO: 1999933 - RNA, 19 nt, Artificial Sequence
  Description of Artificial Sequence: Synthetic oligonucleotide
  Antisense strand to SEQ ID NO: 1999932
uuacacauagcaauucaug

SEQ ID NO: 1999934 - RNA, 19 nt, Artificial Sequence
  Description of Artificial Sequence: Synthetic oligonucleotide
  Sense strand starting at position 3906 of SEQ ID NO: 1880866
augaauugcuauguguaaa

SEQ ID NO: 1999935 - RNA, 19 nt, Artificial Sequence
  Description of Artificial Sequence: Synthetic oligonucleotide
  Antisense strand to SEQ ID NO: 1999934
uuuacacauagcaauucau

SEQ ID NO: 1999936 - RNA, 19 nt, Artificial Sequence
  Description of Artificial Sequence: Synthetic oligonucleotide
  Sense strand starting at position 3949 of SEQ ID NO: 1880866
ggcuccaagcauuaacuua

SEQ ID NO: 1999937 - RNA, 19 nt, Artificial Sequence
  Description of Artificial Sequence: Synthetic oligonucleotide
  Antisense strand to SEQ ID NO: 1999936
uaaguuaaugcuuggagcc

SEQ ID NO: 1999938 - RNA, 19 nt, Artificial Sequence
  Description of Artificial Sequence: Synthetic oligonucleotide
  Sense strand starting at position 131 of SEQ ID NO: 1880867
gggacuucguaagugagga

SEQ ID NO: 1999939 - RNA, 19 nt, Artificial Sequence
  Description of Artificial Sequence: Synthetic oligonucleotide
  Antisense strand to SEQ ID NO: 1999938
uccucacuuacgaaguccc

SEQ ID NO: 1999940 - RNA, 19 nt, Artificial Sequence
  Description of Artificial Sequence: Synthetic oligonucleotide
  Sense strand starting at position 132 of SEQ ID NO: 1880867
ggacuucguaagugaggau

SEQ ID NO: 1999941 - RNA, 19 nt, Artificial Sequence
  Description of Artificial Sequence: Synthetic oligonucleotide
  Antisense strand to SEQ ID NO: 1999940
auccucacuuacgaagucc

SEQ ID NO: 1999942 - RNA, 19 nt, Artificial Sequence
  Description of Artificial Sequence: Synthetic oligonucleotide
  Sense strand starting at position 136 of SEQ ID NO: 1880867
uucguaagugaggaucaaa

SEQ ID NO: 1999943 - RNA, 19 nt, Artificial Sequence
  Description of Artificial Sequence: Synthetic oligonucleotide
  Antisense strand to SEQ ID NO: 1999942
uuugauccucacuuacgaa

SEQ ID NO: 1999944 - RNA, 19 nt, Artificial Sequence
  Description of Artificial Sequence: Synthetic oligonucleotide
  Sense strand starting at position 155 of SEQ ID NO: 1880867
aucacaauauugguguuua

SEQ ID NO: 1999945 - RNA, 19 nt, Artificial Sequence
  Description of Artificial Sequence: Synthetic oligonucleotide
  Antisense strand to SEQ ID NO: 1999944
uaaacaccaauauugugau

SEQ ID NO: 1999946 - RNA, 19 nt, Artificial Sequence
  Description of Artificial Sequence: Synthetic oligonucleotide
  Sense strand starting at position 163 of SEQ ID NO: 1880867
auugguguuuacuugaaag

SEQ ID NO: 1999947 - RNA, 19 nt, Artificial Sequence
  Description of Artificial Sequence: Synthetic oligonucleotide
  Antisense strand to SEQ ID NO: 1999946
cuuucaaguaaacaccaau

SEQ ID NO: 1999948 - RNA, 19 nt, Artificial Sequence
  Description of Artificial Sequence: Synthetic oligonucleotide
  Sense strand starting at position 165 of SEQ ID NO: 1880867
ugguguuuacuugaaagac

SEQ ID NO: 1999949 - RNA, 19 nt, Artificial Sequence
  Description of Artificial Sequence: Synthetic oligonucleotide
  Antisense strand to SEQ ID NO: 1999948
gucuuucaaguaaacacca

SEQ ID NO: 1999950 - RNA, 19 nt, Artificial Sequence
  Description of Artificial Sequence: Synthetic oligonucleotide
  Sense strand starting at position 210 of SEQ ID NO: 1880867
aaggaauagugguuauauu

SEQ ID NO: 1999951 - RNA, 19 nt, Artificial Sequence
  Description of Artificial Sequence: Synthetic oligonucleotide
  Antisense strand to SEQ ID NO: 1999950
aauauaaccacuauuccuu

SEQ ID NO: 1999952 - RNA, 19 nt, Artificial Sequence
  Description of Artificial Sequence: Synthetic oligonucleotide
  Sense strand starting at position 434 of SEQ ID NO: 1880867
aaauuaucaggguguggca

SEQ ID NO: 1999953 - RNA, 19 nt, Artificial Sequence
  Description of Artificial Sequence: Synthetic oligonucleotide
  Antisense strand to SEQ ID NO: 1999952
ugccacacccugauaauuu

SEQ ID NO: 1999954 - RNA, 19 nt, Artificial Sequence
  Description of Artificial Sequence: Synthetic oligonucleotide
  Sense strand starting at position 897 of SEQ ID NO: 1880867
ucacauucgcugggagaau

SEQ ID NO: 1999955 - RNA, 19 nt, Artificial Sequence
  Description of Artificial Sequence: Synthetic oligonucleotide
  Antisense strand to SEQ ID NO: 1999954
auucucccagcgaauguga

SEQ ID NO: 1999956 - RNA, 19 nt, Artificial Sequence
  Description of Artificial Sequence: Synthetic oligonucleotide
  Sense strand starting at position 1141 of SEQ ID NO: 1880867
uguauaaucccggaucuga

SEQ ID NO: 1999957 - RNA, 19 nt, Artificial Sequence
  Description of Artificial Sequence: Synthetic oligonucleotide
  Antisense strand to SEQ ID NO: 1999956
ucagauccgggauuauaca

SEQ ID NO: 1999958 - RNA, 19 nt, Artificial Sequence
  Description of Artificial Sequence: Synthetic oligonucleotide
  Sense strand starting at position 1151 of SEQ ID NO: 1880867
cggaucugauaccugcaau

SEQ ID NO: 1999959 - RNA, 19 nt, Artificial Sequence
  Description of Artificial Sequence: Synthetic oligonucleotide
  Antisense strand to SEQ ID NO: 1999958
auugcagguaucagauccg

SEQ ID NO: 1999960 - RNA, 19 nt, Artificial Sequence
  Description of Artificial Sequence: Synthetic oligonucleotide
  Sense strand starting at position 1154 of SEQ ID NO: 1880867
aucugauaccugcaaucag

SEQ ID NO: 1999961 - RNA, 19 nt, Artificial Sequence
  Description of Artificial Sequence: Synthetic oligonucleotide
  Antisense strand to SEQ ID NO: 1999960
cugauugcagguaucagau

SEQ ID NO: 1999962 - RNA, 19 nt, Artificial Sequence
  Description of Artificial Sequence: Synthetic oligonucleotide
  Sense strand starting at position 1223 of SEQ ID NO: 1880867
cccuacaucucggcaaaga

SEQ ID NO: 1999963 - RNA, 19 nt, Artificial Sequence
  Description of Artificial Sequence: Synthetic oligonucleotide
  Antisense strand to SEQ ID NO: 1999962
ucuuugccgagauguaggg

SEQ ID NO: 1999964 - RNA, 19 nt, Artificial Sequence
  Description of Artificial Sequence: Synthetic oligonucleotide
  Sense strand starting at position 1224 of SEQ ID NO: 1880867
ccuacaucucggcaaagaa

SEQ ID NO: 1999965 - RNA, 19 nt, Artificial Sequence
  Description of Artificial Sequence: Synthetic oligonucleotide
  Antisense strand to SEQ ID NO: 1999964
uucuuugccgagauguagg

SEQ ID NO: 1999966 - RNA, 19 nt, Artificial Sequence
  Description of Artificial Sequence: Synthetic oligonucleotide
  Sense strand starting at position 1303 of SEQ ID NO: 1880867
acaacuuugcuguacaaag

SEQ ID NO: 1999967 - RNA, 19 nt, Artificial Sequence
  Description of Artificial Sequence: Synthetic oligonucleotide
  Antisense strand to SEQ ID NO: 1999966
cuuuguacagcaaaguugu

SEQ ID NO: 1999968 - RNA, 19 nt, Artificial Sequence
  Description of Artificial Sequence: Synthetic oligonucleotide
  Sense strand starting at position 1465 of SEQ ID NO: 1880867
guagguggcguuucuaguu

SEQ ID NO: 1999969 - RNA, 19 nt, Artificial Sequence
  Description of Artificial Sequence: Synthetic oligonucleotide
  Antisense strand to SEQ ID NO: 1999968
aacuagaaacgccaccuac

SEQ ID NO: 1999970 - RNA, 19 nt, Artificial Sequence
  Description of Artificial Sequence: Synthetic oligonucleotide
  Sense strand starting at position 1474 of SEQ ID NO: 1880867
guuucuaguugacuauuaa

SEQ ID NO: 1999971 - RNA, 19 nt, Artificial Sequence
  Description of Artificial Sequence: Synthetic oligonucleotide
  Antisense strand to SEQ ID NO: 1999970
uuaauagucaacuagaaac

SEQ ID NO: 1999972 - RNA, 19 nt, Artificial Sequence
  Description of Artificial Sequence: Synthetic oligonucleotide
  Sense strand starting at position 1475 of SEQ ID NO: 1880867
uuucuaguugacuauuaag

SEQ ID NO: 1999973 - RNA, 19 nt, Artificial Sequence
  Description of Artificial Sequence: Synthetic oligonucleotide
  Antisense strand to SEQ ID NO: 1999972
cuuaauagucaacuagaaa

SEQ ID NO: 1999974 - RNA, 19 nt, Artificial Sequence
  Description of Artificial Sequence: Synthetic oligonucleotide
  Sense strand starting at position 1747 of SEQ ID NO: 1880867
uuugguuacauuggguauu

SEQ ID NO: 1999975 - RNA, 19 nt, Artificial Sequence
  Description of Artificial Sequence: Synthetic oligonucleotide
  Antisense strand to SEQ ID NO: 1999974
aauacccaauguaaccaaa

SEQ ID NO: 1999976 - RNA, 19 nt, Artificial Sequence
  Description of Artificial Sequence: Synthetic oligonucleotide
  Sense strand starting at position 1792 of SEQ ID NO: 1880867
ccuauuccugaaggucuau

SEQ ID NO: 1999977 - RNA, 19 nt, Artificial Sequence
  Description of Artificial Sequence: Synthetic oligonucleotide
  Antisense strand to SEQ ID NO: 1999976
auagaccuucaggaauagg

SEQ ID NO: 1999978 - RNA, 19 nt, Artificial Sequence
  Description of Artificial Sequence: Synthetic oligonucleotide
  Sense strand starting at position 1837 of SEQ ID NO: 1880867
ugggaugccuuucuugaca

SEQ ID NO: 1999979 - RNA, 19 nt, Artificial Sequence
  Description of Artificial Sequence: Synthetic oligonucleotide
  Antisense strand to SEQ ID NO: 1999978
ugucaagaaaggcauccca

SEQ ID NO: 1999980 - RNA, 19 nt, Artificial Sequence
  Description of Artificial Sequence: Synthetic oligonucleotide
  Sense strand starting at position 1984 of SEQ ID NO: 1880867
ugucaucauuccucaguag

SEQ ID NO: 1999981 - RNA, 19 nt, Artificial Sequence
  Description of Artificial Sequence: Synthetic oligonucleotide
  Antisense strand to SEQ ID NO: 1999980
cuacugaggaaugaugaca

SEQ ID NO: 1999982 - RNA, 19 nt, Artificial Sequence
  Description of Artificial Sequence: Synthetic oligonucleotide
  Sense strand starting at position 2065 of SEQ ID NO: 1880867
gggaaauuauuaccugcca

SEQ ID NO: 1999983 - RNA, 19 nt, Artificial Sequence
  Description of Artificial Sequence: Synthetic oligonucleotide
  Antisense strand to SEQ ID NO: 1999982
uggcagguaauaauuuccc

SEQ ID NO: 1999984 - RNA, 19 nt, Artificial Sequence
  Description of Artificial Sequence: Synthetic oligonucleotide
  Sense strand starting at position 2066 of SEQ ID NO: 1880867
ggaaauuauuaccugccaa

SEQ ID NO: 1999985 - RNA, 19 nt, Artificial Sequence
  Description of Artificial Sequence: Synthetic oligonucleotide
  Antisense strand to SEQ ID NO: 1999984
uuggcagguaauaauuucc

SEQ ID NO: 1999986 - RNA, 19 nt, Artificial Sequence
  Description of Artificial Sequence: Synthetic oligonucleotide
  Sense strand starting at position 2254 of SEQ ID NO: 1880867
guuaaauacugguccacau

SEQ ID NO: 1999987 - RNA, 19 nt, Artificial Sequence
  Description of Artificial Sequence: Synthetic oligonucleotide
  Antisense strand to SEQ ID NO: 1999986
auguggaccaguauuuaac

SEQ ID NO: 1999988 - RNA, 19 nt, Artificial Sequence
  Description of Artificial Sequence: Synthetic oligonucleotide
  Sense strand starting at position 2305 of SEQ ID NO: 1880867
ggaggaaggugauucaugu

SEQ ID NO: 1999989 - RNA, 19 nt, Artificial Sequence
  Description of Artificial Sequence: Synthetic oligonucleotide
  Antisense strand to SEQ ID NO: 1999988
acaugaaucaccuuccucc

SEQ ID NO: 1999990 - RNA, 19 nt, Artificial Sequence
  Description of Artificial Sequence: Synthetic oligonucleotide
  Sense strand starting at position 2723 of SEQ ID NO: 1880867
cugucacuucuuuaucaug

SEQ ID NO: 1999991 - RNA, 19 nt, Artificial Sequence
  Description of Artificial Sequence: Synthetic oligonucleotide
  Antisense strand to SEQ ID NO: 1999990
caugauaaagaagugacag

SEQ ID NO: 1999992 - RNA, 19 nt, Artificial Sequence
  Description of Artificial Sequence: Synthetic oligonucleotide
  Sense strand starting at position 2834 of SEQ ID NO: 1880867
aaagacuuguguuucuaga

SEQ ID NO: 1999993 - RNA, 19 nt, Artificial Sequence
  Description of Artificial Sequence: Synthetic oligonucleotide
  Antisense strand to SEQ ID NO: 1999992
ucuagaaacacaagucuuu

SEQ ID NO: 1999994 - RNA, 19 nt, Artificial Sequence
  Description of Artificial Sequence: Synthetic oligonucleotide
  Sense strand starting at position 2836 of SEQ ID NO: 1880867
agacuuguguuucuagaga

SEQ ID NO: 1999995 - RNA, 19 nt, Artificial Sequence
  Description of Artificial Sequence: Synthetic oligonucleotide
  Antisense strand to SEQ ID NO: 1999994
ucucuagaaacacaagucu

SEQ ID NO: 1999996 - RNA, 19 nt, Artificial Sequence
  Description of Artificial Sequence: Synthetic oligonucleotide
  Sense strand starting at position 2841 of SEQ ID NO: 1880867
uguguuucuagagauauga

SEQ ID NO: 1999997 - RNA, 19 nt, Artificial Sequence
  Description of Artificial Sequence: Synthetic oligonucleotide
  Antisense strand to SEQ ID NO: 1999996
ucauaucucuagaaacaca

SEQ ID NO: 1999998 - RNA, 19 nt, Artificial Sequence
  Description of Artificial Sequence: Synthetic oligonucleotide
  Sense strand starting at position 2849 of SEQ ID NO: 1880867
uagagauaugaccguaauu

SEQ ID NO: 1999999 - RNA, 19 nt, Artificial Sequence
  Description of Artificial Sequence: Synthetic oligonucleotide
  Antisense strand to SEQ ID NO: 1999998
aauuacggucauaucucua

SEQ ID NO: 2000000 - RNA, 19 nt, Artificial Sequence
  Description of Artificial Sequence: Synthetic oligonucleotide
  Sense strand starting at position 2913 of SEQ ID NO: 1880867
uaaggaacacuauguuuga

SEQ ID NO: 2000001 - RNA, 19 nt, Artificial Sequence
  Description of Artificial Sequence: Synthetic oligonucleotide
  Antisense strand to SEQ ID NO: 2000000
ucaaacauaguguuccuua

SEQ ID NO: 2000002 - RNA, 19 nt, Artificial Sequence
  Description of Artificial Sequence: Synthetic oligonucleotide
  Sense strand starting at position 2930 of SEQ ID NO: 1880867
gacagcugcugauuaagaa

SEQ ID NO: 2000003 - RNA, 19 nt, Artificial Sequence
  Description of Artificial Sequence: Synthetic oligonucleotide
  Antisense strand to SEQ ID NO: 2000002
uucuuaaucagcagcuguc

SEQ ID NO: 2000004 - RNA, 19 nt, Artificial Sequence
  Description of Artificial Sequence: Synthetic oligonucleotide
  Sense strand starting at position 2931 of SEQ ID NO: 1880867
acagcugcugauuaagaaa

SEQ ID NO: 2000005 - RNA, 19 nt, Artificial Sequence
  Description of Artificial Sequence: Synthetic oligonucleotide
  Antisense strand to SEQ ID NO: 2000004
uuucuuaaucagcagcugu

SEQ ID NO: 2000006 - RNA, 19 nt, Artificial Sequence
  Description of Artificial Sequence: Synthetic oligonucleotide
  Sense strand starting at position 3026 of SEQ ID NO: 1880867
ccgucaaauuuauugcagu

SEQ ID NO: 2000007 - RNA, 19 nt, Artificial Sequence
  Description of Artificial Sequence: Synthetic oligonucleotide
  Antisense strand to SEQ ID NO: 2000006
acugcaauaaauuugacgg

SEQ ID NO: 2000008 - RNA, 19 nt, Artificial Sequence
  Description of Artificial Sequence: Synthetic oligonucleotide
  Sense strand starting at position 3039 of SEQ ID NO: 1880867
ugcaguuguccagucagca

SEQ ID NO: 2000009 - RNA, 19 nt, Artificial Sequence
  Description of Artificial Sequence: Synthetic oligonucleotide
  Antisense strand to SEQ ID NO: 2000008
ugcugacuggacaacugca

SEQ ID NO: 2000010 - RNA, 19 nt, Artificial Sequence
  Description of Artificial Sequence: Synthetic oligonucleotide
  Sense strand starting at position 3330 of SEQ ID NO: 1880867
gcuguauggcgugugaagu

SEQ ID NO: 2000011 - RNA, 19 nt, Artificial Sequence
  Description of Artificial Sequence: Synthetic oligonucleotide
  Antisense strand to SEQ ID NO: 2000010
acuucacacgccauacagc

SEQ ID NO: 2000012 - RNA, 19 nt, Artificial Sequence
  Description of Artificial Sequence: Synthetic oligonucleotide
  Sense strand starting at position 3359 of SEQ ID NO: 1880867
acacguaaacccuggaaua

SEQ ID NO: 2000013 - RNA, 19 nt, Artificial Sequence
  Description of Artificial Sequence: Synthetic oligonucleotide
  Antisense strand to SEQ ID NO: 2000012
uauuccaggguuuacgugu

SEQ ID NO: 2000014 - RNA, 19 nt, Artificial Sequence
  Description of Artificial Sequence: Synthetic oligonucleotide
  Sense strand starting at position 3500 of SEQ ID NO: 1880867
uggauuagaugagcaguca

SEQ ID NO: 2000015 - RNA, 19 nt, Artificial Sequence
  Description of Artificial Sequence: Synthetic oligonucleotide
  Antisense strand to SEQ ID NO: 2000014
ugacugcucaucuaaucca

SEQ ID NO: 2000016 - RNA, 19 nt, Artificial Sequence
  Description of Artificial Sequence: Synthetic oligonucleotide
  Sense strand starting at position 3683 of SEQ ID NO: 1880867
ucauuagcuacugggaaga

SEQ ID NO: 2000017 - RNA, 19 nt, Artificial Sequence
  Description of Artificial Sequence: Synthetic oligonucleotide
  Antisense strand to SEQ ID NO: 2000016
ucuucccaguagcuaauga

SEQ ID NO: 2000018 - RNA, 19 nt, Artificial Sequence
  Description of Artificial Sequence: Synthetic oligonucleotide
  Sense strand starting at position 95 of SEQ ID NO: 1880868
uccuuuauuccaggaagca

SEQ ID NO: 2000019 - RNA, 19 nt, Artificial Sequence
  Description of Artificial Sequence: Synthetic oligonucleotide
  Antisense strand to SEQ ID NO: 2000018
ugcuuccuggaauaaagga

SEQ ID NO: 2000020 - RNA, 19 nt, Artificial Sequence
  Description of Artificial Sequence: Synthetic oligonucleotide
  Sense strand starting at position 96 of SEQ ID NO: 1880868
ccuuuauuccaggaagcac

SEQ ID NO: 2000021 - RNA, 19 nt, Artificial Sequence
  Description of Artificial Sequence: Synthetic oligonucleotide
  Antisense strand to SEQ ID NO: 2000020
gugcuuccuggaauaaagg

SEQ ID NO: 2000022 - RNA, 19 nt, Artificial Sequence
  Description of Artificial Sequence: Synthetic oligonucleotide
  Sense strand starting at position 135 of SEQ ID NO: 1880868
ucagguucuuaagauuaac

SEQ ID NO: 2000023 - RNA, 19 nt, Artificial Sequence
  Description of Artificial Sequence: Synthetic oligonucleotide
  Antisense strand to SEQ ID NO: 2000022
guuaaucuuaagaaccuga

SEQ ID NO: 2000024 - RNA, 19 nt, Artificial Sequence
  Description of Artificial Sequence: Synthetic oligonucleotide
  Sense strand starting at position 193 of SEQ ID NO: 1880868
uggagacuccuagguauga

SEQ ID NO: 2000025 - RNA, 19 nt, Artificial Sequence
  Description of Artificial Sequence: Synthetic oligonucleotide
  Antisense strand to SEQ ID NO: 2000024
ucauaccuaggagucucca

SEQ ID NO: 2000026 - RNA, 19 nt, Artificial Sequence
  Description of Artificial Sequence: Synthetic oligonucleotide
  Sense strand starting at position 264 of SEQ ID NO: 1880868
ggacccugguaguagauuu

SEQ ID NO: 2000027 - RNA, 19 nt, Artificial Sequence
  Description of Artificial Sequence: Synthetic oligonucleotide
  Antisense strand to SEQ ID NO: 2000026
aaaucuacuaccagggucc

SEQ ID NO: 2000028 - RNA, 19 nt, Artificial Sequence
  Description of Artificial Sequence: Synthetic oligonucleotide
  Sense strand starting at position 500 of SEQ ID NO: 1880868
aggaauacauauuggauga

SEQ ID NO: 2000029 - RNA, 19 nt, Artificial Sequence
  Description of Artificial Sequence: Synthetic oligonucleotide
  Antisense strand to SEQ ID NO: 2000028
ucauccaauauguauuccu

SEQ ID NO: 2000030 - RNA, 19 nt, Artificial Sequence
  Description of Artificial Sequence: Synthetic oligonucleotide
  Sense strand starting at position 502 of SEQ ID NO: 1880868
gaauacauauuggaugagu

SEQ ID NO: 2000031 - RNA, 19 nt, Artificial Sequence
  Description of Artificial Sequence: Synthetic oligonucleotide
  Antisense strand to SEQ ID NO: 2000030
acucauccaauauguauuc

SEQ ID NO: 2000032 - RNA, 19 nt, Artificial Sequence
  Description of Artificial Sequence: Synthetic oligonucleotide
  Sense strand starting at position 561 of SEQ ID NO: 1880868
aacuuuauauggugaagag

SEQ ID NO: 2000033 - RNA, 19 nt, Artificial Sequence
  Description of Artificial Sequence: Synthetic oligonucleotide
  Antisense strand to SEQ ID NO: 2000032
cucuucaccauauaaaguu

SEQ ID NO: 2000034 - RNA, 19 nt, Artificial Sequence
  Description of Artificial Sequence: Synthetic oligonucleotide
  Sense strand starting at position 573 of SEQ ID NO: 1880868
ugaagagcaugcucaacua

SEQ ID NO: 2000035 - RNA, 19 nt, Artificial Sequence
  Description of Artificial Sequence: Synthetic oligonucleotide
  Antisense strand to SEQ ID NO: 2000034
uaguugagcaugcucuuca

SEQ ID NO: 2000036 - RNA, 19 nt, Artificial Sequence
  Description of Artificial Sequence: Synthetic oligonucleotide
  Sense strand starting at position 1395 of SEQ ID NO: 1880868
cuacauaagcucugacaga

SEQ ID NO: 2000037 - RNA, 19 nt, Artificial Sequence
  Description of Artificial Sequence: Synthetic oligonucleotide
  Antisense strand to SEQ ID NO: 2000036
ucugucagagcuuauguag

SEQ ID NO: 2000038 - RNA, 19 nt, Artificial Sequence
  Description of Artificial Sequence: Synthetic oligonucleotide
  Sense strand starting at position 1581 of SEQ ID NO: 1880868
uguccugugaaaugcuaga

SEQ ID NO: 2000039 - RNA, 19 nt, Artificial Sequence
  Description of Artificial Sequence: Synthetic oligonucleotide
  Antisense strand to SEQ ID NO: 2000038
ucuagcauuucacaggaca

SEQ ID NO: 2000040 - RNA, 19 nt, Artificial Sequence
  Description of Artificial Sequence: Synthetic oligonucleotide
  Sense strand starting at position 1603 of SEQ ID NO: 1880868
aguuaaaucucaguuagga

SEQ ID NO: 2000041 - RNA, 19 nt, Artificial Sequence
  Description of Artificial Sequence: Synthetic oligonucleotide
  Antisense strand to SEQ ID NO: 2000040
uccuaacugagauuuaacu

SEQ ID NO: 2000042 - RNA, 19 nt, Artificial Sequence
  Description of Artificial Sequence: Synthetic oligonucleotide
  Sense strand starting at position 1681 of SEQ ID NO: 1880868
ugauacauaucggaaagga

SEQ ID NO: 2000043 - RNA, 19 nt, Artificial Sequence
  Description of Artificial Sequence: Synthetic oligonucleotide
  Antisense strand to SEQ ID NO: 2000042
uccuuuccgauauguauca

SEQ ID NO: 2000044 - RNA, 19 nt, Artificial Sequence
  Description of Artificial Sequence: Synthetic oligonucleotide
  Sense strand starting at position 1696 of SEQ ID NO: 1880868
aggagagcuccacgaugaa

SEQ ID NO: 2000045 - RNA, 19 nt, Artificial Sequence
  Description of Artificial Sequence: Synthetic oligonucleotide
  Antisense strand to SEQ ID NO: 2000044
uucaucguggagcucuccu

SEQ ID NO: 2000046 - RNA, 19 nt, Artificial Sequence
  Description of Artificial Sequence: Synthetic oligonucleotide
  Sense strand starting at position 1699 of SEQ ID NO: 1880868
agagcuccacgaugaagua

SEQ ID NO: 2000047 - RNA, 19 nt, Artificial Sequence
  Description of Artificial Sequence: Synthetic oligonucleotide
  Antisense strand to SEQ ID NO: 2000046
uacuucaucguggagcucu

SEQ ID NO: 2000048 - RNA, 19 nt, Artificial Sequence
  Description of Artificial Sequence: Synthetic oligonucleotide
  Sense strand starting at position 1746 of SEQ ID NO: 1880868
gguuauuugugcuauaauu

SEQ ID NO: 2000049 - RNA, 19 nt, Artificial Sequence
  Description of Artificial Sequence: Synthetic oligonucleotide
  Antisense strand to SEQ ID NO: 2000048
aauuauagcacaaauaacc

SEQ ID NO: 2000050 - RNA, 19 nt, Artificial Sequence
  Description of Artificial Sequence: Synthetic oligonucleotide
  Sense strand starting at position 1844 of SEQ ID NO: 1880868
gcaccuuuguuucuuacau

SEQ ID NO: 2000051 - RNA, 19 nt, Artificial Sequence
  Description of Artificial Sequence: Synthetic oligonucleotide
  Antisense strand to SEQ ID NO: 2000050
auguaagaaacaaaggugc

SEQ ID NO: 2000052 - RNA, 19 nt, Artificial Sequence
  Description of Artificial Sequence: Synthetic oligonucleotide
  Sense strand starting at position 1907 of SEQ ID NO: 1880868
uacuuugggugcucagaca

SEQ ID NO: 2000053 - RNA, 19 nt, Artificial Sequence
  Description of Artificial Sequence: Synthetic oligonucleotide
  Antisense strand to SEQ ID NO: 2000052
ugucugagcacccaaagua

SEQ ID NO: 2000054 - RNA, 19 nt, Artificial Sequence
  Description of Artificial Sequence: Synthetic oligonucleotide
  Sense strand starting at position 2006 of SEQ ID NO: 1880868
uuccguaagcccugaguga

SEQ ID NO: 2000055 - RNA, 19 nt, Artificial Sequence
  Description of Artificial Sequence: Synthetic oligonucleotide
  Antisense strand to SEQ ID NO: 2000054
ucacucagggcuuacggaa

SEQ ID NO: 2000056 - RNA, 19 nt, Artificial Sequence
  Description of Artificial Sequence: Synthetic oligonucleotide
  Sense strand starting at position 2007 of SEQ ID NO: 1880868
uccguaagcccugagugaa

SEQ ID NO: 2000057 - RNA, 19 nt, Artificial Sequence
  Description of Artificial Sequence: Synthetic oligonucleotide
  Antisense strand to SEQ ID NO: 2000056
uucacucagggcuuacgga

SEQ ID NO: 2000058 - RNA, 19 nt, Artificial Sequence
  Description of Artificial Sequence: Synthetic oligonucleotide
  Sense strand starting at position 2083 of SEQ ID NO: 1880868
ggacuaaaugcuggaugua

SEQ ID NO: 2000059 - RNA, 19 nt, Artificial Sequence
  Description of Artificial Sequence: Synthetic oligonucleotide
  Antisense strand to SEQ ID NO: 2000058
uacauccagcauuuagucc

SEQ ID NO: 2000060 - RNA, 19 nt, Artificial Sequence
  Description of Artificial Sequence: Synthetic oligonucleotide
  Sense strand starting at position 2221 of SEQ ID NO: 1880868
ugagacaucgcuugagccu

SEQ ID NO: 2000061 - RNA, 19 nt, Artificial Sequence
  Description of Artificial Sequence: Synthetic oligonucleotide
  Antisense strand to SEQ ID NO: 2000060
aggcucaagcgaugucuca

SEQ ID NO: 2000062 - RNA, 19 nt, Artificial Sequence
  Description of Artificial Sequence: Synthetic oligonucleotide
  Sense strand starting at position 2723 of SEQ ID NO: 1880868
ucuugaauauugguucugu

SEQ ID NO: 2000063 - RNA, 19 nt, Artificial Sequence
  Description of Artificial Sequence: Synthetic oligonucleotide
  Antisense strand to SEQ ID NO: 2000062
acagaaccaauauucaaga

SEQ ID NO: 2000064 - RNA, 19 nt, Artificial Sequence
  Description of Artificial Sequence: Synthetic oligonucleotide
  Sense strand starting at position 2724 of SEQ ID NO: 1880868
cuugaauauugguucuguu

SEQ ID NO: 2000065 - RNA, 19 nt, Artificial Sequence
  Description of Artificial Sequence: Synthetic oligonucleotide
  Antisense strand to SEQ ID NO: 2000064
aacagaaccaauauucaag

SEQ ID NO: 2000066 - RNA, 19 nt, Artificial Sequence
  Description of Artificial Sequence: Synthetic oligonucleotide
  Sense strand starting at position 2748 of SEQ ID NO: 1880868
uuccaauacguuugaagua

SEQ ID NO: 2000067 - RNA, 19 nt, Artificial Sequence
  Description of Artificial Sequence: Synthetic oligonucleotide
  Antisense strand to SEQ ID NO: 2000066
uacuucaaacguauuggaa

SEQ ID NO: 2000068 - RNA, 19 nt, Artificial Sequence
  Description of Artificial Sequence: Synthetic oligonucleotide
  Sense strand starting at position 2753 of SEQ ID NO: 1880868
auacguuugaaguagacau

SEQ ID NO: 2000069 - RNA, 19 nt, Artificial Sequence
  Description of Artificial Sequence: Synthetic oligonucleotide
  Antisense strand to SEQ ID NO: 2000068
augucuacuucaaacguau

SEQ ID NO: 2000070 - RNA, 19 nt, Artificial Sequence
  Description of Artificial Sequence: Synthetic oligonucleotide
  Sense strand starting at position 2757 of SEQ ID NO: 1880868
guuugaaguagacaugucu

SEQ ID NO: 2000071 - RNA, 19 nt, Artificial Sequence
  Description of Artificial Sequence: Synthetic oligonucleotide
  Antisense strand to SEQ ID NO: 2000070
agacaugucuacuucaaac

SEQ ID NO: 2000072 - RNA, 19 nt, Artificial Sequence
  Description of Artificial Sequence: Synthetic oligonucleotide
  Sense strand starting at position 2766 of SEQ ID NO: 1880868
agacaugucuagucucuuu

SEQ ID NO: 2000073 - RNA, 19 nt, Artificial Sequence
  Description of Artificial Sequence: Synthetic oligonucleotide
  Antisense strand to SEQ ID NO: 2000072
aaagagacuagacaugucu

SEQ ID NO: 2000074 - RNA, 19 nt, Artificial Sequence
  Description of Artificial Sequence: Synthetic oligonucleotide
  Sense strand starting at position 2771 of SEQ ID NO: 1880868
ugucuagucucuuuaacau

SEQ ID NO: 2000075 - RNA, 19 nt, Artificial Sequence
  Description of Artificial Sequence: Synthetic oligonucleotide
  Antisense strand to SEQ ID NO: 2000074
auguuaaagagacuagaca

SEQ ID NO: 2000076 - RNA, 19 nt, Artificial Sequence
  Description of Artificial Sequence: Synthetic oligonucleotide
  Sense strand starting at position 2834 of SEQ ID NO: 1880868
ugauguaccugacaaugaa

SEQ ID NO: 2000077 - RNA, 19 nt, Artificial Sequence
  Description of Artificial Sequence: Synthetic oligonucleotide
  Antisense strand to SEQ ID NO: 2000076
uucauugucagguacauca

SEQ ID NO: 2000078 - RNA, 19 nt, Artificial Sequence
  Description of Artificial Sequence: Synthetic oligonucleotide
  Sense strand starting at position 2901 of SEQ ID NO: 1880868
cucuguguuuacucuauaa

SEQ ID NO: 2000079 - RNA, 19 nt, Artificial Sequence
  Description of Artificial Sequence: Synthetic oligonucleotide
  Antisense strand to SEQ ID NO: 2000078
uuauagaguaaacacagag

SEQ ID NO: 2000080 - RNA, 19 nt, Artificial Sequence
  Description of Artificial Sequence: Synthetic oligonucleotide
  Sense strand starting at position 2903 of SEQ ID NO: 1880868
cuguguuuacucuauaauu

SEQ ID NO: 2000081 - RNA, 19 nt, Artificial Sequence
  Description of Artificial Sequence: Synthetic oligonucleotide
  Antisense strand to SEQ ID NO: 2000080
aauuauagaguaaacacag

SEQ ID NO: 2000082 - RNA, 19 nt, Artificial Sequence
  Description of Artificial Sequence: Synthetic oligonucleotide
  Sense strand starting at position 3210 of SEQ ID NO: 1880868
gcuugugucagguaacuaa

SEQ ID NO: 2000083 - RNA, 19 nt, Artificial Sequence
  Description of Artificial Sequence: Synthetic oligonucleotide
  Antisense strand to SEQ ID NO: 2000082
uuaguuaccugacacaagc

SEQ ID NO: 2000084 - RNA, 19 nt, Artificial Sequence
  Description of Artificial Sequence: Synthetic oligonucleotide
  Sense strand starting at position 3220 of SEQ ID NO: 1880868
gguaacuaacccuggacau

SEQ ID NO: 2000085 - RNA, 19 nt, Artificial Sequence
  Description of Artificial Sequence: Synthetic oligonucleotide
  Antisense strand to SEQ ID NO: 2000084
auguccaggguuaguuacc

SEQ ID NO: 2000086 - RNA, 19 nt, Artificial Sequence
  Description of Artificial Sequence: Synthetic oligonucleotide
  Sense strand starting at position 3221 of SEQ ID NO: 1880868
guaacuaacccuggacaua

SEQ ID NO: 2000087 - RNA, 19 nt, Artificial Sequence
  Description of Artificial Sequence: Synthetic oligonucleotide
  Antisense strand to SEQ ID NO: 2000086
uauguccaggguuaguuac

SEQ ID NO: 2000088 - RNA, 19 nt, Artificial Sequence
  Description of Artificial Sequence: Synthetic oligonucleotide
  Sense strand starting at position 3341 of SEQ ID NO: 1880868
gagugagagugauaagaau

SEQ ID NO: 2000089 - RNA, 19 nt, Artificial Sequence
  Description of Artificial Sequence: Synthetic oligonucleotide
  Antisense strand to SEQ ID NO: 2000088
auucuuaucacucucacuc

SEQ ID NO: 2000090 - RNA, 19 nt, Artificial Sequence
  Description of Artificial Sequence: Synthetic oligonucleotide
  Sense strand starting at position 3392 of SEQ ID NO: 1880868
ggagaugaacuuugcgaau

SEQ ID NO: 2000091 - RNA, 19 nt, Artificial Sequence
  Description of Artificial Sequence: Synthetic oligonucleotide
  Antisense strand to SEQ ID NO: 2000090
auucgcaaaguucaucucc

SEQ ID NO: 2000092 - RNA, 19 nt, Artificial Sequence
  Description of Artificial Sequence: Synthetic oligonucleotide
  Sense strand starting at position 3404 of SEQ ID NO: 1880868
ugcgaauguccaggaaagu

SEQ ID NO: 2000093 - RNA, 19 nt, Artificial Sequence
  Description of Artificial Sequence: Synthetic oligonucleotide
  Antisense strand to SEQ ID NO: 2000092
acuuuccuggacauucgca

SEQ ID NO: 2000094 - RNA, 19 nt, Artificial Sequence
  Description of Artificial Sequence: Synthetic oligonucleotide
  Sense strand starting at position 3405 of SEQ ID NO: 1880868
gcgaauguccaggaaaguu

SEQ ID NO: 2000095 - RNA, 19 nt, Artificial Sequence
  Description of Artificial Sequence: Synthetic oligonucleotide
  Antisense strand to SEQ ID NO: 2000094
aacuuuccuggacauucgc

SEQ ID NO: 2000096 - RNA, 19 nt, Artificial Sequence
  Description of Artificial Sequence: Synthetic oligonucleotide
  Sense strand starting at position 3663 of SEQ ID NO: 1880868
ugcuguuuguuacucauau

SEQ ID NO: 2000097 - RNA, 19 nt, Artificial Sequence
  Description of Artificial Sequence: Synthetic oligonucleotide
  Antisense strand to SEQ ID NO: 2000096
auaugaguaacaaacagca

SEQ ID NO: 2000098 - RNA, 19 nt, Artificial Sequence
  Description of Artificial Sequence: Synthetic oligonucleotide
  Sense strand starting at position 421 of SEQ ID NO: 1880869
ggaggauuacacugcaauu

SEQ ID NO: 2000099 - RNA, 19 nt, Artificial Sequence
  Description of Artificial Sequence: Synthetic oligonucleotide
  Antisense strand to SEQ ID NO: 2000098
aauugcaguguaauccucc

SEQ ID NO: 2000100 - RNA, 19 nt, Artificial Sequence
  Description of Artificial Sequence: Synthetic oligonucleotide
  Sense strand starting at position 577 of SEQ ID NO: 1880869
uccugacuugcaugacaaa

SEQ ID NO: 2000101 - RNA, 19 nt, Artificial Sequence
  Description of Artificial Sequence: Synthetic oligonucleotide
  Antisense strand to SEQ ID NO: 2000100
uuugucaugcaagucagga

SEQ ID NO: 2000102 - RNA, 19 nt, Artificial Sequence
  Description of Artificial Sequence: Synthetic oligonucleotide
  Sense strand starting at position 958 of SEQ ID NO: 1880869
guguaaguucaguaacaga

SEQ ID NO: 2000103 - RNA, 19 nt, Artificial Sequence
  Description of Artificial Sequence: Synthetic oligonucleotide
  Antisense strand to SEQ ID NO: 2000102
ucuguuacugaacuuacac

SEQ ID NO: 2000104 - RNA, 19 nt, Artificial Sequence
  Description of Artificial Sequence: Synthetic oligonucleotide
  Sense strand starting at position 1164 of SEQ ID NO: 1880869
ucaggaugcccuggauagu

SEQ ID NO: 2000105 - RNA, 19 nt, Artificial Sequence
  Description of Artificial Sequence: Synthetic oligonucleotide
  Antisense strand to SEQ ID NO: 2000104
acuauccagggcauccuga

SEQ ID NO: 2000106 - RNA, 19 nt, Artificial Sequence
  Description of Artificial Sequence: Synthetic oligonucleotide
  Sense strand starting at position 1165 of SEQ ID NO: 1880869
caggaugcccuggauagua

SEQ ID NO: 2000107 - RNA, 19 nt, Artificial Sequence
  Description of Artificial Sequence: Synthetic oligonucleotide
  Antisense strand to SEQ ID NO: 2000106
uacuauccagggcauccug

SEQ ID NO: 2000108 - RNA, 19 nt, Artificial Sequence
  Description of Artificial Sequence: Synthetic oligonucleotide
  Sense strand starting at position 1511 of SEQ ID NO: 1880869
cuguguguacaugagaauc

SEQ ID NO: 2000109 - RNA, 19 nt, Artificial Sequence
  Description of Artificial Sequence: Synthetic oligonucleotide
  Antisense strand to SEQ ID NO: 2000108
gauucucauguacacacag

SEQ ID NO: 2000110 - RNA, 19 nt, Artificial Sequence
  Description of Artificial Sequence: Synthetic oligonucleotide
  Sense strand starting at position 1666 of SEQ ID NO: 1880869
auacacuucuggucuuaag

SEQ ID NO: 2000111 - RNA, 19 nt, Artificial Sequence
  Description of Artificial Sequence: Synthetic oligonucleotide
  Antisense strand to SEQ ID NO: 2000110
cuuaagaccagaaguguau

SEQ ID NO: 2000112 - RNA, 19 nt, Artificial Sequence
  Description of Artificial Sequence: Synthetic oligonucleotide
  Sense strand starting at position 1709 of SEQ ID NO: 1880869
cuguauuuguccucuugua

SEQ ID NO: 2000113 - RNA, 19 nt, Artificial Sequence
  Description of Artificial Sequence: Synthetic oligonucleotide
  Antisense strand to SEQ ID NO: 2000112
uacaagaggacaaauacag

SEQ ID NO: 2000114 - RNA, 19 nt, Artificial Sequence
  Description of Artificial Sequence: Synthetic oligonucleotide
  Sense strand starting at position 2139 of SEQ ID NO: 1880869
ggagauagcugacuagcaa

SEQ ID NO: 2000115 - RNA, 19 nt, Artificial Sequence
  Description of Artificial Sequence: Synthetic oligonucleotide
  Antisense strand to SEQ ID NO: 2000114
uugcuagucagcuaucucc

SEQ ID NO: 2000116 - RNA, 19 nt, Artificial Sequence
  Description of Artificial Sequence: Synthetic oligonucleotide
  Sense strand starting at position 2140 of SEQ ID NO: 1880869
gagauagcugacuagcaau

SEQ ID NO: 2000117 - RNA, 19 nt, Artificial Sequence
  Description of Artificial Sequence: Synthetic oligonucleotide
  Antisense strand to SEQ ID NO: 2000116
auugcuagucagcuaucuc

SEQ ID NO: 2000118 - RNA, 19 nt, Artificial Sequence
  Description of Artificial Sequence: Synthetic oligonucleotide
  Sense strand starting at position 2314 of SEQ ID NO: 1880869
caugaauaugcauaagguu

SEQ ID NO: 2000119 - RNA, 19 nt, Artificial Sequence
  Description of Artificial Sequence: Synthetic oligonucleotide
  Antisense strand to SEQ ID NO: 2000118
aaccuuaugcauauucaug

SEQ ID NO: 2000120 - RNA, 19 nt, Artificial Sequence
  Description of Artificial Sequence: Synthetic oligonucleotide
  Sense strand starting at position 2354 of SEQ ID NO: 1880869
uuaguaugugaaugaagug

SEQ ID NO: 2000121 - RNA, 19 nt, Artificial Sequence
  Description of Artificial Sequence: Synthetic oligonucleotide
  Antisense strand to SEQ ID NO: 2000120
cacuucauucacauacuaa

SEQ ID NO: 2000122 - RNA, 19 nt, Artificial Sequence
  Description of Artificial Sequence: Synthetic oligonucleotide
  Sense strand starting at position 2359 of SEQ ID NO: 1880869
augugaaugaagugcugau

SEQ ID NO: 2000123 - RNA, 19 nt, Artificial Sequence
  Description of Artificial Sequence: Synthetic oligonucleotide
  Antisense strand to SEQ ID NO: 2000122
aucagcacuucauucacau

SEQ ID NO: 2000124 - RNA, 19 nt, Artificial Sequence
  Description of Artificial Sequence: Synthetic oligonucleotide
  Sense strand starting at position 2434 of SEQ ID NO: 1880869
aguuuaguuaaugugcgua

SEQ ID NO: 2000125 - RNA, 19 nt, Artificial Sequence
  Description of Artificial Sequence: Synthetic oligonucleotide
  Antisense strand to SEQ ID NO: 2000124
uacgcacauuaacuaaacu

SEQ ID NO: 2000126 - RNA, 19 nt, Artificial Sequence
  Description of Artificial Sequence: Synthetic oligonucleotide
  Sense strand starting at position 2448 of SEQ ID NO: 1880869
gcguaaaugccagcuucca

SEQ ID NO: 2000127 - RNA, 19 nt, Artificial Sequence
  Description of Artificial Sequence: Synthetic oligonucleotide
  Antisense strand to SEQ ID NO: 2000126
uggaagcuggcauuuacgc

SEQ ID NO: 2000128 - RNA, 19 nt, Artificial Sequence
  Description of Artificial Sequence: Synthetic oligonucleotide
  Sense strand starting at position 2464 of SEQ ID NO: 1880869
ccagaagucuaaguacaca

SEQ ID NO: 2000129 - RNA, 19 nt, Artificial Sequence
  Description of Artificial Sequence: Synthetic oligonucleotide
  Antisense strand to SEQ ID NO: 2000128
uguguacuuagacuucugg

SEQ ID NO: 2000130 - RNA, 19 nt, Artificial Sequence
  Description of Artificial Sequence: Synthetic oligonucleotide
  Sense strand starting at position 2569 of SEQ ID NO: 1880869
cguuucuuugaucauauau

SEQ ID NO: 2000131 - RNA, 19 nt, Artificial Sequence
  Description of Artificial Sequence: Synthetic oligonucleotide
  Antisense strand to SEQ ID NO: 2000130
auauaugaucaaagaaacg

SEQ ID NO: 2000132 - RNA, 19 nt, Artificial Sequence
  Description of Artificial Sequence: Synthetic oligonucleotide
  Sense strand starting at position 2624 of SEQ ID NO: 1880869
gguuaagugacuuacuugu

SEQ ID NO: 2000133 - RNA, 19 nt, Artificial Sequence
  Description of Artificial Sequence: Synthetic oligonucleotide
  Antisense strand to SEQ ID NO: 2000132
acaaguaagucacuuaacc

SEQ ID NO: 2000134 - RNA, 19 nt, Artificial Sequence
  Description of Artificial Sequence: Synthetic oligonucleotide
  Sense strand starting at position 2631 of SEQ ID NO: 1880869
ugacuuacuuguccauaga

SEQ ID NO: 2000135 - RNA, 19 nt, Artificial Sequence
  Description of Artificial Sequence: Synthetic oligonucleotide
  Antisense strand to SEQ ID NO: 2000134
ucuauggacaaguaaguca

SEQ ID NO: 2000136 - RNA, 19 nt, Artificial Sequence
  Description of Artificial Sequence: Synthetic oligonucleotide
  Sense strand starting at position 2661 of SEQ ID NO: 1880869
gaaagauaauucucagcgu

SEQ ID NO: 2000137 - RNA, 19 nt, Artificial Sequence
  Description of Artificial Sequence: Synthetic oligonucleotide
  Antisense strand to SEQ ID NO: 2000136
acgcugagaauuaucuuuc

SEQ ID NO: 2000138 - RNA, 19 nt, Artificial Sequence
  Description of Artificial Sequence: Synthetic oligonucleotide
  Sense strand starting at position 2683 of SEQ ID NO: 1880869
guuugagagaacuaugccu

SEQ ID NO: 2000139 - RNA, 19 nt, Artificial Sequence
  Description of Artificial Sequence: Synthetic oligonucleotide
  Antisense strand to SEQ ID NO: 2000138
aggcauaguucucucaaac

SEQ ID NO: 2000140 - RNA, 19 nt, Artificial Sequence
  Description of Artificial Sequence: Synthetic oligonucleotide
  Sense strand starting at position 2685 of SEQ ID NO: 1880869
uugagagaacuaugccuua

SEQ ID NO: 2000141 - RNA, 19 nt, Artificial Sequence
  Description of Artificial Sequence: Synthetic oligonucleotide
  Antisense strand to SEQ ID NO: 2000140
uaaggcauaguucucucaa

SEQ ID NO: 2000142 - RNA, 19 nt, Artificial Sequence
  Description of Artificial Sequence: Synthetic oligonucleotide
  Sense strand starting at position 2688 of SEQ ID NO: 1880869
agagaacuaugccuuaucu

SEQ ID NO: 2000143 - RNA, 19 nt, Artificial Sequence
  Description of Artificial Sequence: Synthetic oligonucleotide
  Antisense strand to SEQ ID NO: 2000142
agauaaggcauaguucucu

SEQ ID NO: 2000144 - RNA, 19 nt, Artificial Sequence
  Description of Artificial Sequence: Synthetic oligonucleotide
  Sense strand starting at position 2760 of SEQ ID NO: 1880869
uugcaaguucccgaaucaa

SEQ ID NO: 2000145 - RNA, 19 nt, Artificial Sequence
  Description of Artificial Sequence: Synthetic oligonucleotide
  Antisense strand to SEQ ID NO: 2000144
uugauucgggaacuugcaa

SEQ ID NO: 2000146 - RNA, 19 nt, Artificial Sequence
  Description of Artificial Sequence: Synthetic oligonucleotide
  Sense strand starting at position 2783 of SEQ ID NO: 1880869
guguuauguggccaaauga

SEQ ID NO: 2000147 - RNA, 19 nt, Artificial Sequence
  Description of Artificial Sequence: Synthetic oligonucleotide
  Antisense strand to SEQ ID NO: 2000146
ucauuuggccacauaacac

SEQ ID NO: 2000148 - RNA, 19 nt, Artificial Sequence
  Description of Artificial Sequence: Synthetic oligonucleotide
  Sense strand starting at position 3031 of SEQ ID NO: 1880869
agcugagaagcuuaggagu

SEQ ID NO: 2000149 - RNA, 19 nt, Artificial Sequence
  Description of Artificial Sequence: Synthetic oligonucleotide
  Antisense strand to SEQ ID NO: 2000148
acuccuaagcuucucagcu

SEQ ID NO: 2000150 - RNA, 19 nt, Artificial Sequence
  Description of Artificial Sequence: Synthetic oligonucleotide
  Sense strand starting at position 3051 of SEQ ID NO: 1880869
agcagaacugccuaacuga

SEQ ID NO: 2000151 - RNA, 19 nt, Artificial Sequence
  Description of Artificial Sequence: Synthetic oligonucleotide
  Antisense strand to SEQ ID NO: 2000150
ucaguuaggcaguucugcu

SEQ ID NO: 2000152 - RNA, 19 nt, Artificial Sequence
  Description of Artificial Sequence: Synthetic oligonucleotide
  Sense strand starting at position 3144 of SEQ ID NO: 1880869
auauuauguguauagcaca

SEQ ID NO: 2000153 - RNA, 19 nt, Artificial Sequence
  Description of Artificial Sequence: Synthetic oligonucleotide
  Antisense strand to SEQ ID NO: 2000152
ugugcuauacacauaauau

SEQ ID NO: 2000154 - RNA, 19 nt, Artificial Sequence
  Description of Artificial Sequence: Synthetic oligonucleotide
  Sense strand starting at position 3231 of SEQ ID NO: 1880869
augcauuuccuuuguagau

SEQ ID NO: 2000155 - RNA, 19 nt, Artificial Sequence
  Description of Artificial Sequence: Synthetic oligonucleotide
  Antisense strand to SEQ ID NO: 2000154
aucuacaaaggaaaugcau

SEQ ID NO: 2000156 - RNA, 19 nt, Artificial Sequence
  Description of Artificial Sequence: Synthetic oligonucleotide
  Sense strand starting at position 3237 of SEQ ID NO: 1880869
uuccuuuguagauggagau

SEQ ID NO: 2000157 - RNA, 19 nt, Artificial Sequence
  Description of Artificial Sequence: Synthetic oligonucleotide
  Antisense strand to SEQ ID NO: 2000156
aucuccaucuacaaaggaa

SEQ ID NO: 2000158 - RNA, 19 nt, Artificial Sequence
  Description of Artificial Sequence: Synthetic oligonucleotide
  Sense strand starting at position 3349 of SEQ ID NO: 1880869
agggcaagauauguuuaga

SEQ ID NO: 2000159 - RNA, 19 nt, Artificial Sequence
  Description of Artificial Sequence: Synthetic oligonucleotide
  Antisense strand to SEQ ID NO: 2000158
ucuaaacauaucuugcccu

SEQ ID NO: 2000160 - RNA, 19 nt, Artificial Sequence
  Description of Artificial Sequence: Synthetic oligonucleotide
  Sense strand starting at position 3352 of SEQ ID NO: 1880869
gcaagauauguuuagaugu

SEQ ID NO: 2000161 - RNA, 19 nt, Artificial Sequence
  Description of Artificial Sequence: Synthetic oligonucleotide
  Antisense strand to SEQ ID NO: 2000160
acaucuaaacauaucuugc

SEQ ID NO: 2000162 - RNA, 19 nt, Artificial Sequence
  Description of Artificial Sequence: Synthetic oligonucleotide
  Sense strand starting at position 3363 of SEQ ID NO: 1880869
uuagauguaucaucacuca

SEQ ID NO: 2000163 - RNA, 19 nt, Artificial Sequence
  Description of Artificial Sequence: Synthetic oligonucleotide
  Antisense strand to SEQ ID NO: 2000162
ugagugaugauacaucuaa

SEQ ID NO: 2000164 - RNA, 19 nt, Artificial Sequence
  Description of Artificial Sequence: Synthetic oligonucleotide
  Sense strand starting at position 3462 of SEQ ID NO: 1880869
aggauauacuggcugguga

SEQ ID NO: 2000165 - RNA, 19 nt, Artificial Sequence
  Description of Artificial Sequence: Synthetic oligonucleotide
  Antisense strand to SEQ ID NO: 2000164
ucaccagccaguauauccu

SEQ ID NO: 2000166 - RNA, 19 nt, Artificial Sequence
  Description of Artificial Sequence: Synthetic oligonucleotide
  Sense strand starting at position 3600 of SEQ ID NO: 1880869
aggagugaucauuguuaug

SEQ ID NO: 2000167 - RNA, 19 nt, Artificial Sequence
  Description of Artificial Sequence: Synthetic oligonucleotide
  Antisense strand to SEQ ID NO: 2000166
cauaacaaugaucacuccu

SEQ ID NO: 2000168 - RNA, 19 nt, Artificial Sequence
  Description of Artificial Sequence: Synthetic oligonucleotide
  Sense strand starting at position 3693 of SEQ ID NO: 1880869
ggcuuaucccaggauucca

SEQ ID NO: 2000169 - RNA, 19 nt, Artificial Sequence
  Description of Artificial Sequence: Synthetic oligonucleotide
  Antisense strand to SEQ ID NO: 2000168
uggaauccugggauaagcc

SEQ ID NO: 2000170 - RNA, 19 nt, Artificial Sequence
  Description of Artificial Sequence: Synthetic oligonucleotide
  Sense strand starting at position 3851 of SEQ ID NO: 1880869
uugggaauuugauauacuu

SEQ ID NO: 2000171 - RNA, 19 nt, Artificial Sequence
  Description of Artificial Sequence: Synthetic oligonucleotide
  Antisense strand to SEQ ID NO: 2000170
aaguauaucaaauucccaa

SEQ ID NO: 2000172 - RNA, 19 nt, Artificial Sequence
  Description of Artificial Sequence: Synthetic oligonucleotide
  Sense strand starting at position 3917 of SEQ ID NO: 1880869
gccuacugacuuuaugaua

SEQ ID NO: 2000173 - RNA, 19 nt, Artificial Sequence
  Description of Artificial Sequence: Synthetic oligonucleotide
  Antisense strand to SEQ ID NO: 2000172
uaucauaaagucaguaggc

SEQ ID NO: 2000174 - RNA, 19 nt, Artificial Sequence
  Description of Artificial Sequence: Synthetic oligonucleotide
  Sense strand starting at position 3930 of SEQ ID NO: 1880869
augauacaguagucaccua

SEQ ID NO: 2000175 - RNA, 19 nt, Artificial Sequence
  Description of Artificial Sequence: Synthetic oligonucleotide
  Antisense strand to SEQ ID NO: 2000174
uaggugacuacuguaucau

SEQ ID NO: 2000176 - RNA, 19 nt, Artificial Sequence
  Description of Artificial Sequence: Synthetic oligonucleotide
  Sense strand starting at position 3935 of SEQ ID NO: 1880869
acaguagucaccuagugaa

SEQ ID NO: 2000177 - RNA, 19 nt, Artificial Sequence
  Description of Artificial Sequence: Synthetic oligonucleotide
  Antisense strand to SEQ ID NO: 2000176
uucacuaggugacuacugu

SEQ ID NO: 2000178 - RNA, 19 nt, Artificial Sequence
  Description of Artificial Sequence: Synthetic oligonucleotide
  Sense strand starting at position 527 of SEQ ID NO: 1880870
ucaagacaacuuugugaug

SEQ ID NO: 2000179 - RNA, 19 nt, Artificial Sequence
  Description of Artificial Sequence: Synthetic oligonucleotide
  Antisense strand to SEQ ID NO: 2000178
caucacaaaguugucuuga

SEQ ID NO: 2000180 - RNA, 19 nt, Artificial Sequence
  Description of Artificial Sequence: Synthetic oligonucleotide
  Sense strand starting at position 536 of SEQ ID NO: 1880870
cuuugugauguagaguacu

SEQ ID NO: 2000181 - RNA, 19 nt, Artificial Sequence
  Description of Artificial Sequence: Synthetic oligonucleotide
  Antisense strand to SEQ ID NO: 2000180
aguacucuacaucacaaag

SEQ ID NO: 2000182 - RNA, 19 nt, Artificial Sequence
  Description of Artificial Sequence: Synthetic oligonucleotide
  Sense strand starting at position 539 of SEQ ID NO: 1880870
ugugauguagaguacuauu

SEQ ID NO: 2000183 - RNA, 19 nt, Artificial Sequence
  Description of Artificial Sequence: Synthetic oligonucleotide
  Antisense strand to SEQ ID NO: 2000182
aauaguacucuacaucaca

SEQ ID NO: 2000184 - RNA, 19 nt, Artificial Sequence
  Description of Artificial Sequence: Synthetic oligonucleotide
  Sense strand starting at position 547 of SEQ ID NO: 1880870
agaguacuauuagcaccau

SEQ ID NO: 2000185 - RNA, 19 nt, Artificial Sequence
  Description of Artificial Sequence: Synthetic oligonucleotide
  Antisense strand to SEQ ID NO: 2000184
auggugcuaauaguacucu

SEQ ID NO: 2000186 - RNA, 19 nt, Artificial Sequence
  Description of Artificial Sequence: Synthetic oligonucleotide
  Sense strand starting at position 573 of SEQ ID NO: 1880870
aggugaauguuagcuuuag

SEQ ID NO: 2000187 - RNA, 19 nt, Artificial Sequence
  Description of Artificial Sequence: Synthetic oligonucleotide
  Antisense strand to SEQ ID NO: 2000186
cuaaagcuaacauucaccu

SEQ ID NO: 2000188 - RNA, 19 nt, Artificial Sequence
  Description of Artificial Sequence: Synthetic oligonucleotide
  Sense strand starting at position 574 of SEQ ID NO: 1880870
ggugaauguuagcuuuaga

SEQ ID NO: 2000189 - RNA, 19 nt, Artificial Sequence
  Description of Artificial Sequence: Synthetic oligonucleotide
  Antisense strand to SEQ ID NO: 2000188
ucuaaagcuaacauucacc

SEQ ID NO: 2000190 - RNA, 19 nt, Artificial Sequence
  Description of Artificial Sequence: Synthetic oligonucleotide
  Sense strand starting at position 577 of SEQ ID NO: 1880870
gaauguuagcuuuagaaua

SEQ ID NO: 2000191 - RNA, 19 nt, Artificial Sequence
  Description of Artificial Sequence: Synthetic oligonucleotide
  Antisense strand to SEQ ID NO: 2000190
uauucuaaagcuaacauuc

SEQ ID NO: 2000192 - RNA, 19 nt, Artificial Sequence
  Description of Artificial Sequence: Synthetic oligonucleotide
  Sense strand starting at position 582 of SEQ ID NO: 1880870
uuagcuuuagaauaagguu

SEQ ID NO: 2000193 - RNA, 19 nt, Artificial Sequence
  Description of Artificial Sequence: Synthetic oligonucleotide
  Antisense strand to SEQ ID NO: 2000192
aaccuuauucuaaagcuaa

SEQ ID NO: 2000194 - RNA, 19 nt, Artificial Sequence
  Description of Artificial Sequence: Synthetic oligonucleotide
  Sense strand starting at position 590 of SEQ ID NO: 1880870
agaauaagguuggauuaag

SEQ ID NO: 2000195 - RNA, 19 nt, Artificial Sequence
  Description of Artificial Sequence: Synthetic oligonucleotide
  Antisense strand to SEQ ID NO: 2000194
cuuaauccaaccuuauucu

SEQ ID NO: 2000196 - RNA, 19 nt, Artificial Sequence
  Description of Artificial Sequence: Synthetic oligonucleotide
  Sense strand starting at position 600 of SEQ ID NO: 1880870
uggauuaaguuuccuccau

SEQ ID NO: 2000197 - RNA, 19 nt, Artificial Sequence
  Description of Artificial Sequence: Synthetic oligonucleotide
  Antisense strand to SEQ ID NO: 2000196
auggaggaaacuuaaucca

SEQ ID NO: 2000198 - RNA, 19 nt, Artificial Sequence
  Description of Artificial Sequence: Synthetic oligonucleotide
  Sense strand starting at position 601 of SEQ ID NO: 1880870
ggauuaaguuuccuccauu

SEQ ID NO: 2000199 - RNA, 19 nt, Artificial Sequence
  Description of Artificial Sequence: Synthetic oligonucleotide
  Antisense strand to SEQ ID NO: 2000198
aauggaggaaacuuaaucc

SEQ ID NO: 2000200 - RNA, 19 nt, Artificial Sequence
  Description of Artificial Sequence: Synthetic oligonucleotide
  Sense strand starting at position 670 of SEQ ID NO: 1880870
gcgaccaguuucuuaggga

SEQ ID NO: 2000201 - RNA, 19 nt, Artificial Sequence
  Description of Artificial Sequence: Synthetic oligonucleotide
  Antisense strand to SEQ ID NO: 2000200
ucccuaagaaacuggucgc

SEQ ID NO: 2000202 - RNA, 19 nt, Artificial Sequence
  Description of Artificial Sequence: Synthetic oligonucleotide
  Sense strand starting at position 683 of SEQ ID NO: 1880870
uagggacuuucgguaaaua

SEQ ID NO: 2000203 - RNA, 19 nt, Artificial Sequence
  Description of Artificial Sequence: Synthetic oligonucleotide
  Antisense strand to SEQ ID NO: 2000202
uauuuaccgaaagucccua

SEQ ID NO: 2000204 - RNA, 19 nt, Artificial Sequence
  Description of Artificial Sequence: Synthetic oligonucleotide
  Sense strand starting at position 1299 of SEQ ID NO: 1880870
gagggucuaaguuagaucu

SEQ ID NO: 2000205 - RNA, 19 nt, Artificial Sequence
  Description of Artificial Sequence: Synthetic oligonucleotide
  Antisense strand to SEQ ID NO: 2000204
agaucuaacuuagacccuc

SEQ ID NO: 2000206 - RNA, 19 nt, Artificial Sequence
  Description of Artificial Sequence: Synthetic oligonucleotide
  Sense strand starting at position 1444 of SEQ ID NO: 1880870
gcaggaaucuaacauuuau

SEQ ID NO: 2000207 - RNA, 19 nt, Artificial Sequence
  Description of Artificial Sequence: Synthetic oligonucleotide
  Antisense strand to SEQ ID NO: 2000206
auaaauguuagauuccugc

SEQ ID NO: 2000208 - RNA, 19 nt, Artificial Sequence
  Description of Artificial Sequence: Synthetic oligonucleotide
  Sense strand starting at position 1499 of SEQ ID NO: 1880870
uguuaugggaugugacauu

SEQ ID NO: 2000209 - RNA, 19 nt, Artificial Sequence
  Description of Artificial Sequence: Synthetic oligonucleotide
  Antisense strand to SEQ ID NO: 2000208
aaugucacaucccauaaca

SEQ ID NO: 2000210 - RNA, 19 nt, Artificial Sequence
  Description of Artificial Sequence: Synthetic oligonucleotide
  Sense strand starting at position 1561 of SEQ ID NO: 1880870
ugacucauucugggaauuc

SEQ ID NO: 2000211 - RNA, 19 nt, Artificial Sequence
  Description of Artificial Sequence: Synthetic oligonucleotide
  Antisense strand to SEQ ID NO: 2000210
gaauucccagaaugaguca

SEQ ID NO: 2000212 - RNA, 19 nt, Artificial Sequence
  Description of Artificial Sequence: Synthetic oligonucleotide
  Sense strand starting at position 1582 of SEQ ID NO: 1880870
uucagaaaggcugaguagu

SEQ ID NO: 2000213 - RNA, 19 nt, Artificial Sequence
  Description of Artificial Sequence: Synthetic oligonucleotide
  Antisense strand to SEQ ID NO: 2000212
acuacucagccuuucugaa

SEQ ID NO: 2000214 - RNA, 19 nt, Artificial Sequence
  Description of Artificial Sequence: Synthetic oligonucleotide
  Sense strand starting at position 1660 of SEQ ID NO: 1880870
ccggccacaguguaauaaa

SEQ ID NO: 2000215 - RNA, 19 nt, Artificial Sequence
  Description of Artificial Sequence: Synthetic oligonucleotide
  Antisense strand to SEQ ID NO: 2000214
uuuauuacacuguggccgg

SEQ ID NO: 2000216 - RNA, 19 nt, Artificial Sequence
  Description of Artificial Sequence: Synthetic oligonucleotide
  Sense strand starting at position 2095 of SEQ ID NO: 1880870
acaugcgauuugguguuau

SEQ ID NO: 2000217 - RNA, 19 nt, Artificial Sequence
  Description of Artificial Sequence: Synthetic oligonucleotide
  Antisense strand to SEQ ID NO: 2000216
auaacaccaaaucgcaugu

SEQ ID NO: 2000218 - RNA, 19 nt, Artificial Sequence
  Description of Artificial Sequence: Synthetic oligonucleotide
  Sense strand starting at position 2138 of SEQ ID NO: 1880870
ccguauacccauuauccua

SEQ ID NO: 2000219 - RNA, 19 nt, Artificial Sequence
  Description of Artificial Sequence: Synthetic oligonucleotide
  Antisense strand to SEQ ID NO: 2000218
uaggauaauggguauacgg

SEQ ID NO: 2000220 - RNA, 19 nt, Artificial Sequence
  Description of Artificial Sequence: Synthetic oligonucleotide
  Sense strand starting at position 2423 of SEQ ID NO: 1880870
ugccucuguccucagggaa

SEQ ID NO: 2000221 - RNA, 19 nt, Artificial Sequence
  Description of Artificial Sequence: Synthetic oligonucleotide
  Antisense strand to SEQ ID NO: 2000220
uucccugaggacagaggca

SEQ ID NO: 2000222 - RNA, 19 nt, Artificial Sequence
  Description of Artificial Sequence: Synthetic oligonucleotide
  Sense strand starting at position 2529 of SEQ ID NO: 1880870
ugugguagagcauaaauau

SEQ ID NO: 2000223 - RNA, 19 nt, Artificial Sequence
  Description of Artificial Sequence: Synthetic oligonucleotide
  Antisense strand to SEQ ID NO: 2000222
auauuuaugcucuaccaca

SEQ ID NO: 2000224 - RNA, 19 nt, Artificial Sequence
  Description of Artificial Sequence: Synthetic oligonucleotide
  Sense strand starting at position 2538 of SEQ ID NO: 1880870
gcauaaauaugcuuaccag

SEQ ID NO: 2000225 - RNA, 19 nt, Artificial Sequence
  Description of Artificial Sequence: Synthetic oligonucleotide
  Antisense strand to SEQ ID NO: 2000224
cugguaagcauauuuaugc

SEQ ID NO: 2000226 - RNA, 19 nt, Artificial Sequence
  Description of Artificial Sequence: Synthetic oligonucleotide
  Sense strand starting at position 2544 of SEQ ID NO: 1880870
auaugcuuaccaggaaaga

SEQ ID NO: 2000227 - RNA, 19 nt, Artificial Sequence
  Description of Artificial Sequence: Synthetic oligonucleotide
  Antisense strand to SEQ ID NO: 2000226
ucuuuccugguaagcauau

SEQ ID NO: 2000228 - RNA, 19 nt, Artificial Sequence
  Description of Artificial Sequence: Synthetic oligonucleotide
  Sense strand starting at position 2653 of SEQ ID NO: 1880870
ggugguucgcuacaccuau

SEQ ID NO: 2000229 - RNA, 19 nt, Artificial Sequence
  Description of Artificial Sequence: Synthetic oligonucleotide
  Antisense strand to SEQ ID NO: 2000228
auagguguagcgaaccacc

SEQ ID NO: 2000230 - RNA, 19 nt, Artificial Sequence
  Description of Artificial Sequence: Synthetic oligonucleotide
  Sense strand starting at position 3040 of SEQ ID NO: 1880870
cgugcaaguaucuucguaa

SEQ ID NO: 2000231 - RNA, 19 nt, Artificial Sequence
  Description of Artificial Sequence: Synthetic oligonucleotide
  Antisense strand to SEQ ID NO: 2000230
uuacgaagauacuugcacg

SEQ ID NO: 2000232 - RNA, 19 nt, Artificial Sequence
  Description of Artificial Sequence: Synthetic oligonucleotide
  Sense strand starting at position 3043 of SEQ ID NO: 1880870
gcaaguaucuucguaauaa

SEQ ID NO: 2000233 - RNA, 19 nt, Artificial Sequence
  Description of Artificial Sequence: Synthetic oligonucleotide
  Antisense strand to SEQ ID NO: 2000232
uuauuacgaagauacuugc

SEQ ID NO: 2000234 - RNA, 19 nt, Artificial Sequence
  Description of Artificial Sequence: Synthetic oligonucleotide
  Sense strand starting at position 3205 of SEQ ID NO: 1880870
uguugaaccucuguuucua

SEQ ID NO: 2000235 - RNA, 19 nt, Artificial Sequence
  Description of Artificial Sequence: Synthetic oligonucleotide
  Antisense strand to SEQ ID NO: 2000234
uagaaacagagguucaaca

SEQ ID NO: 2000236 - RNA, 19 nt, Artificial Sequence
  Description of Artificial Sequence: Synthetic oligonucleotide
  Sense strand starting at position 3314 of SEQ ID NO: 1880870
ggacuuuauuagguuggaa

SEQ ID NO: 2000237 - RNA, 19 nt, Artificial Sequence
  Description of Artificial Sequence: Synthetic oligonucleotide
  Antisense strand to SEQ ID NO: 2000236
uuccaaccuaauaaagucc

SEQ ID NO: 2000238 - RNA, 19 nt, Artificial Sequence
  Description of Artificial Sequence: Synthetic oligonucleotide
  Sense strand starting at position 3467 of SEQ ID NO: 1880870
cccagaugccuuuggaauu

SEQ ID NO: 2000239 - RNA, 19 nt, Artificial Sequence
  Description of Artificial Sequence: Synthetic oligonucleotide
  Antisense strand to SEQ ID NO: 2000238
aauuccaaaggcaucuggg

SEQ ID NO: 2000240 - RNA, 19 nt, Artificial Sequence
  Description of Artificial Sequence: Synthetic oligonucleotide
  Sense strand starting at position 3478 of SEQ ID NO: 1880870
uuggaauuacccuggcaaa

SEQ ID NO: 2000241 - RNA, 19 nt, Artificial Sequence
  Description of Artificial Sequence: Synthetic oligonucleotide
  Antisense strand to SEQ ID NO: 2000240
uuugccaggguaauuccaa

SEQ ID NO: 2000242 - RNA, 19 nt, Artificial Sequence
  Description of Artificial Sequence: Synthetic oligonucleotide
  Sense strand starting at position 3479 of SEQ ID NO: 1880870
uggaauuacccuggcaaag

SEQ ID NO: 2000243 - RNA, 19 nt, Artificial Sequence
  Description of Artificial Sequence: Synthetic oligonucleotide
  Antisense strand to SEQ ID NO: 2000242
cuuugccaggguaauucca

SEQ ID NO: 2000244 - RNA, 19 nt, Artificial Sequence
  Description of Artificial Sequence: Synthetic oligonucleotide
  Sense strand starting at position 3497 of SEQ ID NO: 1880870
gcaugcacuagguguagaa

SEQ ID NO: 2000245 - RNA, 19 nt, Artificial Sequence
  Description of Artificial Sequence: Synthetic oligonucleotide
  Antisense strand to SEQ ID NO: 2000244
uucuacaccuagugcaugc

SEQ ID NO: 2000246 - RNA, 19 nt, Artificial Sequence
  Description of Artificial Sequence: Synthetic oligonucleotide
  Sense strand starting at position 3548 of SEQ ID NO: 1880870
gaagaagauuuagggacau

SEQ ID NO: 2000247 - RNA, 19 nt, Artificial Sequence
  Description of Artificial Sequence: Synthetic oligonucleotide
  Antisense strand to SEQ ID NO: 2000246
augucccuaaaucuucuuc

SEQ ID NO: 2000248 - RNA, 19 nt, Artificial Sequence
  Description of Artificial Sequence: Synthetic oligonucleotide
  Sense strand starting at position 3560 of SEQ ID NO: 1880870
gggacaucauuggagaaac

SEQ ID NO: 2000249 - RNA, 19 nt, Artificial Sequence
  Description of Artificial Sequence: Synthetic oligonucleotide
  Antisense strand to SEQ ID NO: 2000248
guuucuccaaugauguccc

SEQ ID NO: 2000250 - RNA, 19 nt, Artificial Sequence
  Description of Artificial Sequence: Synthetic oligonucleotide
  Sense strand starting at position 3832 of SEQ ID NO: 1880870
ggguauguacuagaugugu

SEQ ID NO: 2000251 - RNA, 19 nt, Artificial Sequence
  Description of Artificial Sequence: Synthetic oligonucleotide
  Antisense strand to SEQ ID NO: 2000250
acacaucuaguacauaccc

SEQ ID NO: 2000252 - RNA, 19 nt, Artificial Sequence
  Description of Artificial Sequence: Synthetic oligonucleotide
  Sense strand starting at position 3834 of SEQ ID NO: 1880870
guauguacuagauguguaa

SEQ ID NO: 2000253 - RNA, 19 nt, Artificial Sequence
  Description of Artificial Sequence: Synthetic oligonucleotide
  Antisense strand to SEQ ID NO: 2000252
uuacacaucuaguacauac

SEQ ID NO: 2000254 - RNA, 19 nt, Artificial Sequence
  Description of Artificial Sequence: Synthetic oligonucleotide
  Sense strand starting at position 3836 of SEQ ID NO: 1880870
auguacuagauguguaaga

SEQ ID NO: 2000255 - RNA, 19 nt, Artificial Sequence
  Description of Artificial Sequence: Synthetic oligonucleotide
  Antisense strand to SEQ ID NO: 2000254
ucuuacacaucuaguacau

SEQ ID NO: 2000256 - RNA, 19 nt, Artificial Sequence
  Description of Artificial Sequence: Synthetic oligonucleotide
  Sense strand starting at position 3838 of SEQ ID NO: 1880870
guacuagauguguaagaga

SEQ ID NO: 2000257 - RNA, 19 nt, Artificial Sequence
  Description of Artificial Sequence: Synthetic oligonucleotide
  Antisense strand to SEQ ID NO: 2000256
ucucuuacacaucuaguac

SEQ ID NO: 2000258 - RNA, 19 nt, Artificial Sequence
  Description of Artificial Sequence: Synthetic oligonucleotide
  Sense strand starting at position 46 of SEQ ID NO: 1880871
ggagcuguccuagauauaa

SEQ ID NO: 2000259 - RNA, 19 nt, Artificial Sequence
  Description of Artificial Sequence: Synthetic oligonucleotide
  Antisense strand to SEQ ID NO: 2000258
uuauaucuaggacagcucc

SEQ ID NO: 2000260 - RNA, 19 nt, Artificial Sequence
  Description of Artificial Sequence: Synthetic oligonucleotide
  Sense strand starting at position 58 of SEQ ID NO: 1880871
gauauaaguugugcucuau

SEQ ID NO: 2000261 - RNA, 19 nt, Artificial Sequence
  Description of Artificial Sequence: Synthetic oligonucleotide
  Antisense strand to SEQ ID NO: 2000260
auagagcacaacuuauauc

SEQ ID NO: 2000262 - RNA, 19 nt, Artificial Sequence
  Description of Artificial Sequence: Synthetic oligonucleotide
  Sense strand starting at position 201 of SEQ ID NO: 1880871
uuauaaagugcacaguuaa

SEQ ID NO: 2000263 - RNA, 19 nt, Artificial Sequence
  Description of Artificial Sequence: Synthetic oligonucleotide
  Antisense strand to SEQ ID NO: 2000262
uuaacugugcacuuuauaa

SEQ ID NO: 2000264 - RNA, 19 nt, Artificial Sequence
  Description of Artificial Sequence: Synthetic oligonucleotide
  Sense strand starting at position 609 of SEQ ID NO: 1880871
agguaacuuguucaggguu

SEQ ID NO: 2000265 - RNA, 19 nt, Artificial Sequence
  Description of Artificial Sequence: Synthetic oligonucleotide
  Antisense strand to SEQ ID NO: 2000264
aacccugaacaaguuaccu

SEQ ID NO: 2000266 - RNA, 19 nt, Artificial Sequence
  Description of Artificial Sequence: Synthetic oligonucleotide
  Sense strand starting at position 633 of SEQ ID NO: 1880871
acuaauuaucaguggagcu

SEQ ID NO: 2000267 - RNA, 19 nt, Artificial Sequence
  Description of Artificial Sequence: Synthetic oligonucleotide
  Antisense strand to SEQ ID NO: 2000266
agcuccacugauaauuagu

SEQ ID NO: 2000268 - RNA, 19 nt, Artificial Sequence
  Description of Artificial Sequence: Synthetic oligonucleotide
  Sense strand starting at position 645 of SEQ ID NO: 1880871
uggagcucuacugaguuaa

SEQ ID NO: 2000269 - RNA, 19 nt, Artificial Sequence
  Description of Artificial Sequence: Synthetic oligonucleotide
  Antisense strand to SEQ ID NO: 2000268
uuaacucaguagagcucca

SEQ ID NO: 2000270 - RNA, 19 nt, Artificial Sequence
  Description of Artificial Sequence: Synthetic oligonucleotide
  Sense strand starting at position 647 of SEQ ID NO: 1880871
gagcucuacugaguuaaau

SEQ ID NO: 2000271 - RNA, 19 nt, Artificial Sequence
  Description of Artificial Sequence: Synthetic oligonucleotide
  Antisense strand to SEQ ID NO: 2000270
auuuaacucaguagagcuc

SEQ ID NO: 2000272 - RNA, 19 nt, Artificial Sequence
  Description of Artificial Sequence: Synthetic oligonucleotide
  Sense strand starting at position 720 of SEQ ID NO: 1880871
cgauaauuggcacagcuaa

SEQ ID NO: 2000273 - RNA, 19 nt, Artificial Sequence
  Description of Artificial Sequence: Synthetic oligonucleotide
  Antisense strand to SEQ ID NO: 2000272
uuagcugugccaauuaucg

SEQ ID NO: 2000274 - RNA, 19 nt, Artificial Sequence
  Description of Artificial Sequence: Synthetic oligonucleotide
  Sense strand starting at position 743 of SEQ ID NO: 1880871
acugaaaugagccgaagaa

SEQ ID NO: 2000275 - RNA, 19 nt, Artificial Sequence
  Description of Artificial Sequence: Synthetic oligonucleotide
  Antisense strand to SEQ ID NO: 2000274
uucuucggcucauuucagu

SEQ ID NO: 2000276 - RNA, 19 nt, Artificial Sequence
  Description of Artificial Sequence: Synthetic oligonucleotide
  Sense strand starting at position 767 of SEQ ID NO: 1880871
aaggaaaucggugaaucgu

SEQ ID NO: 2000277 - RNA, 19 nt, Artificial Sequence
  Description of Artificial Sequence: Synthetic oligonucleotide
  Antisense strand to SEQ ID NO: 2000276
acgauucaccgauuuccuu

SEQ ID NO: 2000278 - RNA, 19 nt, Artificial Sequence
  Description of Artificial Sequence: Synthetic oligonucleotide
  Sense strand starting at position 776 of SEQ ID NO: 1880871
ggugaaucguuuguauaag

SEQ ID NO: 2000279 - RNA, 19 nt, Artificial Sequence
  Description of Artificial Sequence: Synthetic oligonucleotide
  Antisense strand to SEQ ID NO: 2000278
cuuauacaaacgauucacc

SEQ ID NO: 2000280 - RNA, 19 nt, Artificial Sequence
  Description of Artificial Sequence: Synthetic oligonucleotide
  Sense strand starting at position 810 of SEQ ID NO: 1880871
caaguugccgcucagauga

SEQ ID NO: 2000281 - RNA, 19 nt, Artificial Sequence
  Description of Artificial Sequence: Synthetic oligonucleotide
  Antisense strand to SEQ ID NO: 2000280
ucaucugagcggcaacuug

SEQ ID NO: 2000282 - RNA, 19 nt, Artificial Sequence
  Description of Artificial Sequence: Synthetic oligonucleotide
  Sense strand starting at position 831 of SEQ ID NO: 1880871
gaaggaaugugcuuugaca

SEQ ID NO: 2000283 - RNA, 19 nt, Artificial Sequence
  Description of Artificial Sequence: Synthetic oligonucleotide
  Antisense strand to SEQ ID NO: 2000282
ugucaaagcacauuccuuc

SEQ ID NO: 2000284 - RNA, 19 nt, Artificial Sequence
  Description of Artificial Sequence: Synthetic oligonucleotide
  Sense strand starting at position 904 of SEQ ID NO: 1880871
cuacuagagcaguaagacu

SEQ ID NO: 2000285 - RNA, 19 nt, Artificial Sequence
  Description of Artificial Sequence: Synthetic oligonucleotide
  Antisense strand to SEQ ID NO: 2000284
agucuuacugcucuaguag

SEQ ID NO: 2000286 - RNA, 19 nt, Artificial Sequence
  Description of Artificial Sequence: Synthetic oligonucleotide
  Sense strand starting at position 911 of SEQ ID NO: 1880871
agcaguaagacuggacaga

SEQ ID NO: 2000287 - RNA, 19 nt, Artificial Sequence
  Description of Artificial Sequence: Synthetic oligonucleotide
  Antisense strand to SEQ ID NO: 2000286
ucuguccagucuuacugcu

SEQ ID NO: 2000288 - RNA, 19 nt, Artificial Sequence
  Description of Artificial Sequence: Synthetic oligonucleotide
  Sense strand starting at position 971 of SEQ ID NO: 1880871
acauuaagcuucuuaggga

SEQ ID NO: 2000289 - RNA, 19 nt, Artificial Sequence
  Description of Artificial Sequence: Synthetic oligonucleotide
  Antisense strand to SEQ ID NO: 2000288
ucccuaagaagcuuaaugu

SEQ ID NO: 2000290 - RNA, 19 nt, Artificial Sequence
  Description of Artificial Sequence: Synthetic oligonucleotide
  Sense strand starting at position 984 of SEQ ID NO: 1880871
uagggaguucccggaaaug

SEQ ID NO: 2000291 - RNA, 19 nt, Artificial Sequence
  Description of Artificial Sequence: Synthetic oligonucleotide
  Antisense strand to SEQ ID NO: 2000290
cauuuccgggaacucccua

SEQ ID NO: 2000292 - RNA, 19 nt, Artificial Sequence
  Description of Artificial Sequence: Synthetic oligonucleotide
  Sense strand starting at position 1214 of SEQ ID NO: 1880871
gugaauguuauaggccuga

SEQ ID NO: 2000293 - RNA, 19 nt, Artificial Sequence
  Description of Artificial Sequence: Synthetic oligonucleotide
  Antisense strand to SEQ ID NO: 2000292
ucaggccuauaacauucac

SEQ ID NO: 2000294 - RNA, 19 nt, Artificial Sequence
  Description of Artificial Sequence: Synthetic oligonucleotide
  Sense strand starting at position 1218 of SEQ ID NO: 1880871
auguuauaggccugaggac

SEQ ID NO: 2000295 - RNA, 19 nt, Artificial Sequence
  Description of Artificial Sequence: Synthetic oligonucleotide
  Antisense strand to SEQ ID NO: 2000294
guccucaggccuauaacau

SEQ ID NO: 2000296 - RNA, 19 nt, Artificial Sequence
  Description of Artificial Sequence: Synthetic oligonucleotide
  Sense strand starting at position 1219 of SEQ ID NO: 1880871
uguuauaggccugaggaca

SEQ ID NO: 2000297 - RNA, 19 nt, Artificial Sequence
  Description of Artificial Sequence: Synthetic oligonucleotide
  Antisense strand to SEQ ID NO: 2000296
uguccucaggccuauaaca

SEQ ID NO: 2000298 - RNA, 19 nt, Artificial Sequence
  Description of Artificial Sequence: Synthetic oligonucleotide
  Sense strand starting at position 1318 of SEQ ID NO: 1880871
cggaguaacgcgcuaaucu

SEQ ID NO: 2000299 - RNA, 19 nt, Artificial Sequence
  Description of Artificial Sequence: Synthetic oligonucleotide
  Antisense strand to SEQ ID NO: 2000298
agauuagcgcguuacuccg

SEQ ID NO: 2000300 - RNA, 19 nt, Artificial Sequence
  Description of Artificial Sequence: Synthetic oligonucleotide
  Sense strand starting at position 1328 of SEQ ID NO: 1880871
cgcuaaucucccgagggau

SEQ ID NO: 2000301 - RNA, 19 nt, Artificial Sequence
  Description of Artificial Sequence: Synthetic oligonucleotide
  Antisense strand to SEQ ID NO: 2000300
aucccucgggagauuagcg

SEQ ID NO: 2000302 - RNA, 19 nt, Artificial Sequence
  Description of Artificial Sequence: Synthetic oligonucleotide
  Sense strand starting at position 1330 of SEQ ID NO: 1880871
cuaaucucccgagggauag

SEQ ID NO: 2000303 - RNA, 19 nt, Artificial Sequence
  Description of Artificial Sequence: Synthetic oligonucleotide
  Antisense strand to SEQ ID NO: 2000302
cuaucccucgggagauuag

SEQ ID NO: 2000304 - RNA, 19 nt, Artificial Sequence
  Description of Artificial Sequence: Synthetic oligonucleotide
  Sense strand starting at position 1331 of SEQ ID NO: 1880871
uaaucucccgagggauagu

SEQ ID NO: 2000305 - RNA, 19 nt, Artificial Sequence
  Description of Artificial Sequence: Synthetic oligonucleotide
  Antisense strand to SEQ ID NO: 2000304
acuaucccucgggagauua

SEQ ID NO: 2000306 - RNA, 19 nt, Artificial Sequence
  Description of Artificial Sequence: Synthetic oligonucleotide
  Sense strand starting at position 1986 of SEQ ID NO: 1880871
ggaguuggcccucauugca

SEQ ID NO: 2000307 - RNA, 19 nt, Artificial Sequence
  Description of Artificial Sequence: Synthetic oligonucleotide
  Antisense strand to SEQ ID NO: 2000306
ugcaaugagggccaacucc

SEQ ID NO: 2000308 - RNA, 19 nt, Artificial Sequence
  Description of Artificial Sequence: Synthetic oligonucleotide
  Sense strand starting at position 2038 of SEQ ID NO: 1880871
cggaaauuguaguccgauu

SEQ ID NO: 2000309 - RNA, 19 nt, Artificial Sequence
  Description of Artificial Sequence: Synthetic oligonucleotide
  Antisense strand to SEQ ID NO: 2000308
aaucggacuacaauuuccg

SEQ ID NO: 2000310 - RNA, 19 nt, Artificial Sequence
  Description of Artificial Sequence: Synthetic oligonucleotide
  Sense strand starting at position 2708 of SEQ ID NO: 1880871
gucgguuuauuucucagua

SEQ ID NO: 2000311 - RNA, 19 nt, Artificial Sequence
  Description of Artificial Sequence: Synthetic oligonucleotide
  Antisense strand to SEQ ID NO: 2000310
uacugagaaauaaaccgac

SEQ ID NO: 2000312 - RNA, 19 nt, Artificial Sequence
  Description of Artificial Sequence: Synthetic oligonucleotide
  Sense strand starting at position 2709 of SEQ ID NO: 1880871
ucgguuuauuucucaguaa

SEQ ID NO: 2000313 - RNA, 19 nt, Artificial Sequence
  Description of Artificial Sequence: Synthetic oligonucleotide
  Antisense strand to SEQ ID NO: 2000312
uuacugagaaauaaaccga

SEQ ID NO: 2000314 - RNA, 19 nt, Artificial Sequence
  Description of Artificial Sequence: Synthetic oligonucleotide
  Sense strand starting at position 2750 of SEQ ID NO: 1880871
cuugcaacccuagggauau

SEQ ID NO: 2000315 - RNA, 19 nt, Artificial Sequence
  Description of Artificial Sequence: Synthetic oligonucleotide
  Antisense strand to SEQ ID NO: 2000314
auaucccuaggguugcaag

SEQ ID NO: 2000316 - RNA, 19 nt, Artificial Sequence
  Description of Artificial Sequence: Synthetic oligonucleotide
  Sense strand starting at position 2767 of SEQ ID NO: 1880871
auaugauucugucccugga

SEQ ID NO: 2000317 - RNA, 19 nt, Artificial Sequence
  Description of Artificial Sequence: Synthetic oligonucleotide
  Antisense strand to SEQ ID NO: 2000316
uccagggacagaaucauau

SEQ ID NO: 2000318 - RNA, 19 nt, Artificial Sequence
  Description of Artificial Sequence: Synthetic oligonucleotide
  Sense strand starting at position 2770 of SEQ ID NO: 1880871
ugauucugucccuggagga

SEQ ID NO: 2000319 - RNA, 19 nt, Artificial Sequence
  Description of Artificial Sequence: Synthetic oligonucleotide
  Antisense strand to SEQ ID NO: 2000318
uccuccagggacagaauca

SEQ ID NO: 2000320 - RNA, 19 nt, Artificial Sequence
  Description of Artificial Sequence: Synthetic oligonucleotide
  Sense strand starting at position 2855 of SEQ ID NO: 1880871
auuuaaccauguggaaauc

SEQ ID NO: 2000321 - RNA, 19 nt, Artificial Sequence
  Description of Artificial Sequence: Synthetic oligonucleotide
  Antisense strand to SEQ ID NO: 2000320
gauuuccacaugguuaaau

SEQ ID NO: 2000322 - RNA, 19 nt, Artificial Sequence
  Description of Artificial Sequence: Synthetic oligonucleotide
  Sense strand starting at position 2876 of SEQ ID NO: 1880871
guaagcauccaauaguauu

SEQ ID NO: 2000323 - RNA, 19 nt, Artificial Sequence
  Description of Artificial Sequence: Synthetic oligonucleotide
  Antisense strand to SEQ ID NO: 2000322
aauacuauuggaugcuuac

SEQ ID NO: 2000324 - RNA, 19 nt, Artificial Sequence
  Description of Artificial Sequence: Synthetic oligonucleotide
  Sense strand starting at position 3324 of SEQ ID NO: 1880871
ugggcacuccucgggagaa

SEQ ID NO: 2000325 - RNA, 19 nt, Artificial Sequence
  Description of Artificial Sequence: Synthetic oligonucleotide
  Antisense strand to SEQ ID NO: 2000324
uucucccgaggagugccca

SEQ ID NO: 2000326 - RNA, 19 nt, Artificial Sequence
  Description of Artificial Sequence: Synthetic oligonucleotide
  Sense strand starting at position 3544 of SEQ ID NO: 1880871
caggcugcccaauaguaaa

SEQ ID NO: 2000327 - RNA, 19 nt, Artificial Sequence
  Description of Artificial Sequence: Synthetic oligonucleotide
  Antisense strand to SEQ ID NO: 2000326
uuuacuauugggcagccug

SEQ ID NO: 2000328 - RNA, 19 nt, Artificial Sequence
  Description of Artificial Sequence: Synthetic oligonucleotide
  Sense strand starting at position 3597 of SEQ ID NO: 1880871
ucugaauuguuccugcaac

SEQ ID NO: 2000329 - RNA, 19 nt, Artificial Sequence
  Description of Artificial Sequence: Synthetic oligonucleotide
  Antisense strand to SEQ ID NO: 2000328
guugcaggaacaauucaga

SEQ ID NO: 2000330 - RNA, 19 nt, Artificial Sequence
  Description of Artificial Sequence: Synthetic oligonucleotide
  Sense strand starting at position 3725 of SEQ ID NO: 1880871
gaccuacaguguccugaaa

SEQ ID NO: 2000331 - RNA, 19 nt, Artificial Sequence
  Description of Artificial Sequence: Synthetic oligonucleotide
  Antisense strand to SEQ ID NO: 2000330
uuucaggacacuguagguc

SEQ ID NO: 2000332 - RNA, 19 nt, Artificial Sequence
  Description of Artificial Sequence: Synthetic oligonucleotide
  Sense strand starting at position 3856 of SEQ ID NO: 1880871
uuuggugccuggcuagaaa

SEQ ID NO: 2000333 - RNA, 19 nt, Artificial Sequence
  Description of Artificial Sequence: Synthetic oligonucleotide
  Antisense strand to SEQ ID NO: 2000332
uuucuagccaggcaccaaa

SEQ ID NO: 2000334 - RNA, 19 nt, Artificial Sequence
  Description of Artificial Sequence: Synthetic oligonucleotide
  Sense strand starting at position 3932 of SEQ ID NO: 1880871
aggugcuugggucagagua

SEQ ID NO: 2000335 - RNA, 19 nt, Artificial Sequence
  Description of Artificial Sequence: Synthetic oligonucleotide
  Antisense strand to SEQ ID NO: 2000334
uacucugacccaagcaccu

SEQ ID NO: 2000336 - RNA, 19 nt, Artificial Sequence
  Description of Artificial Sequence: Synthetic oligonucleotide
  Sense strand starting at position 3940 of SEQ ID NO: 1880871
gggucagaguagucuuacu

SEQ ID NO: 2000337 - RNA, 19 nt, Artificial Sequence
  Description of Artificial Sequence: Synthetic oligonucleotide
  Antisense strand to SEQ ID NO: 2000336
aguaagacuacucugaccc

SEQ ID NO: 2000338 - RNA, 19 nt, Artificial Sequence
  Description of Artificial Sequence: Synthetic oligonucleotide
  Sense strand starting at position 36 of SEQ ID NO: 1880872
ugguuaaauguuuaacugu

SEQ ID NO: 2000339 - RNA, 19 nt, Artificial Sequence
  Description of Artificial Sequence: Synthetic oligonucleotide
  Antisense strand to SEQ ID NO: 2000338
acaguuaaacauuuaacca

SEQ ID NO: 2000340 - RNA, 19 nt, Artificial Sequence
  Description of Artificial Sequence: Synthetic oligonucleotide
  Sense strand starting at position 119 of SEQ ID NO: 1880872
aagcaaauggguuggauaa

SEQ ID NO: 2000341 - RNA, 19 nt, Artificial Sequence
  Description of Artificial Sequence: Synthetic oligonucleotide
  Antisense strand to SEQ ID NO: 2000340
uuauccaacccauuugcuu

SEQ ID NO: 2000342 - RNA, 19 nt, Artificial Sequence
  Description of Artificial Sequence: Synthetic oligonucleotide
  Sense strand starting at position 120 of SEQ ID NO: 1880872
agcaaauggguuggauaau

SEQ ID NO: 2000343 - RNA, 19 nt, Artificial Sequence
  Description of Artificial Sequence: Synthetic oligonucleotide
  Antisense strand to SEQ ID NO: 2000342
auuauccaacccauuugcu

SEQ ID NO: 2000344 - RNA, 19 nt, Artificial Sequence
  Description of Artificial Sequence: Synthetic oligonucleotide
  Sense strand starting at position 139 of SEQ ID NO: 1880872
ucacacaacgguuaguaaa

SEQ ID NO: 2000345 - RNA, 19 nt, Artificial Sequence
  Description of Artificial Sequence: Synthetic oligonucleotide
  Antisense strand to SEQ ID NO: 2000344
uuuacuaaccguuguguga

SEQ ID NO: 2000346 - RNA, 19 nt, Artificial Sequence
  Description of Artificial Sequence: Synthetic oligonucleotide
  Sense strand starting at position 221 of SEQ ID NO: 1880872
gucuuuguaagacagguuu

SEQ ID NO: 2000347 - RNA, 19 nt, Artificial Sequence
  Description of Artificial Sequence: Synthetic oligonucleotide
  Antisense strand to SEQ ID NO: 2000346
aaaccugucuuacaaagac

SEQ ID NO: 2000348 - RNA, 19 nt, Artificial Sequence
  Description of Artificial Sequence: Synthetic oligonucleotide
  Sense strand starting at position 442 of SEQ ID NO: 1880872
auuacaagaugccugguua

SEQ ID NO: 2000349 - RNA, 19 nt, Artificial Sequence
  Description of Artificial Sequence: Synthetic oligonucleotide
  Antisense strand to SEQ ID NO: 2000348
uaaccaggcaucuuguaau

SEQ ID NO: 2000350 - RNA, 19 nt, Artificial Sequence
  Description of Artificial Sequence: Synthetic oligonucleotide
  Sense strand starting at position 514 of SEQ ID NO: 1880872
aucguuguuaaagaggaau

SEQ ID NO: 2000351 - RNA, 19 nt, Artificial Sequence
  Description of Artificial Sequence: Synthetic oligonucleotide
  Antisense strand to SEQ ID NO: 2000350
auuccucuuuaacaacgau

SEQ ID NO: 2000352 - RNA, 19 nt, Artificial Sequence
  Description of Artificial Sequence: Synthetic oligonucleotide
  Sense strand starting at position 516 of SEQ ID NO: 1880872
cguuguuaaagaggaauau

SEQ ID NO: 2000353 - RNA, 19 nt, Artificial Sequence
  Description of Artificial Sequence: Synthetic oligonucleotide
  Antisense strand to SEQ ID NO: 2000352
auauuccucuuuaacaacg

SEQ ID NO: 2000354 - RNA, 19 nt, Artificial Sequence
  Description of Artificial Sequence: Synthetic oligonucleotide
  Sense strand starting at position 724 of SEQ ID NO: 1880872
ucuguaguguggaugugua

SEQ ID NO: 2000355 - RNA, 19 nt, Artificial Sequence
  Description of Artificial Sequence: Synthetic oligonucleotide
  Antisense strand to SEQ ID NO: 2000354
uacacauccacacuacaga

SEQ ID NO: 2000356 - RNA, 19 nt, Artificial Sequence
  Description of Artificial Sequence: Synthetic oligonucleotide
  Sense strand starting at position 750 of SEQ ID NO: 1880872
ugagucaggacagguuaau

SEQ ID NO: 2000357 - RNA, 19 nt, Artificial Sequence
  Description of Artificial Sequence: Synthetic oligonucleotide
  Antisense strand to SEQ ID NO: 2000356
auuaaccuguccugacuca

SEQ ID NO: 2000358 - RNA, 19 nt, Artificial Sequence
  Description of Artificial Sequence: Synthetic oligonucleotide
  Sense strand starting at position 772 of SEQ ID NO: 1880872
cuugucaaagcucacgaaa

SEQ ID NO: 2000359 - RNA, 19 nt, Artificial Sequence
  Description of Artificial Sequence: Synthetic oligonucleotide
  Antisense strand to SEQ ID NO: 2000358
uuucgugagcuuugacaag

SEQ ID NO: 2000360 - RNA, 19 nt, Artificial Sequence
  Description of Artificial Sequence: Synthetic oligonucleotide
  Sense strand starting at position 775 of SEQ ID NO: 1880872
gucaaagcucacgaaauga

SEQ ID NO: 2000361 - RNA, 19 nt, Artificial Sequence
  Description of Artificial Sequence: Synthetic oligonucleotide
  Antisense strand to SEQ ID NO: 2000360
ucauuucgugagcuuugac

SEQ ID NO: 2000362 - RNA, 19 nt, Artificial Sequence
  Description of Artificial Sequence: Synthetic oligonucleotide
  Sense strand starting at position 1139 of SEQ ID NO: 1880872
uguagcucaccagaucauu

SEQ ID NO: 2000363 - RNA, 19 nt, Artificial Sequence
  Description of Artificial Sequence: Synthetic oligonucleotide
  Antisense strand to SEQ ID NO: 2000362
aaugaucuggugagcuaca

SEQ ID NO: 2000364 - RNA, 19 nt, Artificial Sequence
  Description of Artificial Sequence: Synthetic oligonucleotide
  Sense strand starting at position 1210 of SEQ ID NO: 1880872
guagucaaacuuggaacua

SEQ ID NO: 2000365 - RNA, 19 nt, Artificial Sequence
  Description of Artificial Sequence: Synthetic oligonucleotide
  Antisense strand to SEQ ID NO: 2000364
uaguuccaaguuugacuac

SEQ ID NO: 2000366 - RNA, 19 nt, Artificial Sequence
  Description of Artificial Sequence: Synthetic oligonucleotide
  Sense strand starting at position 1320 of SEQ ID NO: 1880872
cuuaaaguccaauggcaga

SEQ ID NO: 2000367 - RNA, 19 nt, Artificial Sequence
  Description of Artificial Sequence: Synthetic oligonucleotide
  Antisense strand to SEQ ID NO: 2000366
ucugccauuggacuuuaag

SEQ ID NO: 2000368 - RNA, 19 nt, Artificial Sequence
  Description of Artificial Sequence: Synthetic oligonucleotide
  Sense strand starting at position 1360 of SEQ ID NO: 1880872
cguuccuccguugaauuua

SEQ ID NO: 2000369 - RNA, 19 nt, Artificial Sequence
  Description of Artificial Sequence: Synthetic oligonucleotide
  Antisense strand to SEQ ID NO: 2000368
uaaauucaacggaggaacg

SEQ ID NO: 2000370 - RNA, 19 nt, Artificial Sequence
  Description of Artificial Sequence: Synthetic oligonucleotide
  Sense strand starting at position 1449 of SEQ ID NO: 1880872
uuuguugugcugucuuaac

SEQ ID NO: 2000371 - RNA, 19 nt, Artificial Sequence
  Description of Artificial Sequence: Synthetic oligonucleotide
  Antisense strand to SEQ ID NO: 2000370
guuaagacagcacaacaaa

SEQ ID NO: 2000372 - RNA, 19 nt, Artificial Sequence
  Description of Artificial Sequence: Synthetic oligonucleotide
  Sense strand starting at position 1566 of SEQ ID NO: 1880872
gcuacuaagggcgagaaau

SEQ ID NO: 2000373 - RNA, 19 nt, Artificial Sequence
  Description of Artificial Sequence: Synthetic oligonucleotide
  Antisense strand to SEQ ID NO: 2000372
auuucucgcccuuaguagc

SEQ ID NO: 2000374 - RNA, 19 nt, Artificial Sequence
  Description of Artificial Sequence: Synthetic oligonucleotide
  Sense strand starting at position 1577 of SEQ ID NO: 1880872
cgagaaauucagugagugg

SEQ ID NO: 2000375 - RNA, 19 nt, Artificial Sequence
  Description of Artificial Sequence: Synthetic oligonucleotide
  Antisense strand to SEQ ID NO: 2000374
ccacucacugaauuucucg

SEQ ID NO: 2000376 - RNA, 19 nt, Artificial Sequence
  Description of Artificial Sequence: Synthetic oligonucleotide
  Sense strand starting at position 2238 of SEQ ID NO: 1880872
cuucguugucgucucugaa

SEQ ID NO: 2000377 - RNA, 19 nt, Artificial Sequence
  Description of Artificial Sequence: Synthetic oligonucleotide
  Antisense strand to SEQ ID NO: 2000376
uucagagacgacaacgaag

SEQ ID NO: 2000378 - RNA, 19 nt, Artificial Sequence
  Description of Artificial Sequence: Synthetic oligonucleotide
  Sense strand starting at position 2239 of SEQ ID NO: 1880872
uucguugucgucucugaau

SEQ ID NO: 2000379 - RNA, 19 nt, Artificial Sequence
  Description of Artificial Sequence: Synthetic oligonucleotide
  Antisense strand to SEQ ID NO: 2000378
auucagagacgacaacgaa

SEQ ID NO: 2000380 - RNA, 19 nt, Artificial Sequence
  Description of Artificial Sequence: Synthetic oligonucleotide
  Sense strand starting at position 2344 of SEQ ID NO: 1880872
aaaggugaguucucaacac

SEQ ID NO: 2000381 - RNA, 19 nt, Artificial Sequence
  Description of Artificial Sequence: Synthetic oligonucleotide
  Antisense strand to SEQ ID NO: 2000380
guguugagaacucaccuuu

SEQ ID NO: 2000382 - RNA, 19 nt, Artificial Sequence
  Description of Artificial Sequence: Synthetic oligonucleotide
  Sense strand starting at position 2448 of SEQ ID NO: 1880872
gaugcuuagcaaugaagaa

SEQ ID NO: 2000383 - RNA, 19 nt, Artificial Sequence
  Description of Artificial Sequence: Synthetic oligonucleotide
  Antisense strand to SEQ ID NO: 2000382
uucuucauugcuaagcauc

SEQ ID NO: 2000384 - RNA, 19 nt, Artificial Sequence
  Description of Artificial Sequence: Synthetic oligonucleotide
  Sense strand starting at position 2458 of SEQ ID NO: 1880872
aaugaagaacuaugguguu

SEQ ID NO: 2000385 - RNA, 19 nt, Artificial Sequence
  Description of Artificial Sequence: Synthetic oligonucleotide
  Antisense strand to SEQ ID NO: 2000384
aacaccauaguucuucauu

SEQ ID NO: 2000386 - RNA, 19 nt, Artificial Sequence
  Description of Artificial Sequence: Synthetic oligonucleotide
  Sense strand starting at position 2675 of SEQ ID NO: 1880872
agucuuauugcugagagga

SEQ ID NO: 2000387 - RNA, 19 nt, Artificial Sequence
  Description of Artificial Sequence: Synthetic oligonucleotide
  Antisense strand to SEQ ID NO: 2000386
uccucucagcaauaagacu

SEQ ID NO: 2000388 - RNA, 19 nt, Artificial Sequence
  Description of Artificial Sequence: Synthetic oligonucleotide
  Sense strand starting at position 2688 of SEQ ID NO: 1880872
agaggaucuuccucagguu

SEQ ID NO: 2000389 - RNA, 19 nt, Artificial Sequence
  Description of Artificial Sequence: Synthetic oligonucleotide
  Antisense strand to SEQ ID NO: 2000388
aaccugaggaagauccucu

SEQ ID NO: 2000390 - RNA, 19 nt, Artificial Sequence
  Description of Artificial Sequence: Synthetic oligonucleotide
  Sense strand starting at position 2702 of SEQ ID NO: 1880872
agguuauaucgcguaugua

SEQ ID NO: 2000391 - RNA, 19 nt, Artificial Sequence
  Description of Artificial Sequence: Synthetic oligonucleotide
  Antisense strand to SEQ ID NO: 2000390
uacauacgcgauauaaccu

SEQ ID NO: 2000392 - RNA, 19 nt, Artificial Sequence
  Description of Artificial Sequence: Synthetic oligonucleotide
  Sense strand starting at position 2822 of SEQ ID NO: 1880872
ggguuugguauauaacuua

SEQ ID NO: 2000393 - RNA, 19 nt, Artificial Sequence
  Description of Artificial Sequence: Synthetic oligonucleotide
  Antisense strand to SEQ ID NO: 2000392
uaaguuauauaccaaaccc

SEQ ID NO: 2000394 - RNA, 19 nt, Artificial Sequence
  Description of Artificial Sequence: Synthetic oligonucleotide
  Sense strand starting at position 3142 of SEQ ID NO: 1880872
guccguugaugggcauuua

SEQ ID NO: 2000395 - RNA, 19 nt, Artificial Sequence
  Description of Artificial Sequence: Synthetic oligonucleotide
  Antisense strand to SEQ ID NO: 2000394
uaaaugcccaucaacggac

SEQ ID NO: 2000396 - RNA, 19 nt, Artificial Sequence
  Description of Artificial Sequence: Synthetic oligonucleotide
  Sense strand starting at position 3316 of SEQ ID NO: 1880872
ggaagccagugauccuaua

SEQ ID NO: 2000397 - RNA, 19 nt, Artificial Sequence
  Description of Artificial Sequence: Synthetic oligonucleotide
  Antisense strand to SEQ ID NO: 2000396
uauaggaucacuggcuucc

SEQ ID NO: 2000398 - RNA, 19 nt, Artificial Sequence
  Description of Artificial Sequence: Synthetic oligonucleotide
  Sense strand starting at position 3361 of SEQ ID NO: 1880872
agcaguaacuuccuaagga

SEQ ID NO: 2000399 - RNA, 19 nt, Artificial Sequence
  Description of Artificial Sequence: Synthetic oligonucleotide
  Antisense strand to SEQ ID NO: 2000398
uccuuaggaaguuacugcu

SEQ ID NO: 2000400 - RNA, 19 nt, Artificial Sequence
  Description of Artificial Sequence: Synthetic oligonucleotide
  Sense strand starting at position 3374 of SEQ ID NO: 1880872
uaaggagguguuugagagu

SEQ ID NO: 2000401 - RNA, 19 nt, Artificial Sequence
  Description of Artificial Sequence: Synthetic oligonucleotide
  Antisense strand to SEQ ID NO: 2000400
acucucaaacaccuccuua

SEQ ID NO: 2000402 - RNA, 19 nt, Artificial Sequence
  Description of Artificial Sequence: Synthetic oligonucleotide
  Sense strand starting at position 3610 of SEQ ID NO: 1880872
guuagcuguuauuucuauu

SEQ ID NO: 2000403 - RNA, 19 nt, Artificial Sequence
  Description of Artificial Sequence: Synthetic oligonucleotide
  Antisense strand to SEQ ID NO: 2000402
aauagaaauaacagcuaac

SEQ ID NO: 2000404 - RNA, 19 nt, Artificial Sequence
  Description of Artificial Sequence: Synthetic oligonucleotide
  Sense strand starting at position 3674 of SEQ ID NO: 1880872
cagauauaauagucgggua

SEQ ID NO: 2000405 - RNA, 19 nt, Artificial Sequence
  Description of Artificial Sequence: Synthetic oligonucleotide
  Antisense strand to SEQ ID NO: 2000404
uacccgacuauuauaucug

SEQ ID NO: 2000406 - RNA, 19 nt, Artificial Sequence
  Description of Artificial Sequence: Synthetic oligonucleotide
  Sense strand starting at position 3675 of SEQ ID NO: 1880872
agauauaauagucggguaa

SEQ ID NO: 2000407 - RNA, 19 nt, Artificial Sequence
  Description of Artificial Sequence: Synthetic oligonucleotide
  Antisense strand to SEQ ID NO: 2000406
uuacccgacuauuauaucu

SEQ ID NO: 2000408 - RNA, 19 nt, Artificial Sequence
  Description of Artificial Sequence: Synthetic oligonucleotide
  Sense strand starting at position 3676 of SEQ ID NO: 1880872
gauauaauagucggguaau

SEQ ID NO: 2000409 - RNA, 19 nt, Artificial Sequence
  Description of Artificial Sequence: Synthetic oligonucleotide
  Antisense strand to SEQ ID NO: 2000408
auuacccgacuauuauauc

SEQ ID NO: 2000410 - RNA, 19 nt, Artificial Sequence
  Description of Artificial Sequence: Synthetic oligonucleotide
  Sense strand starting at position 3761 of SEQ ID NO: 1880872
cugaguacucauuaaaugc

SEQ ID NO: 2000411 - RNA, 19 nt, Artificial Sequence
  Description of Artificial Sequence: Synthetic oligonucleotide
  Antisense strand to SEQ ID NO: 2000410
gcauuuaaugaguacucag

SEQ ID NO: 2000412 - RNA, 19 nt, Artificial Sequence
  Description of Artificial Sequence: Synthetic oligonucleotide
  Sense strand starting at position 3894 of SEQ ID NO: 1880872
gguuguuuccuauaaaucc

SEQ ID NO: 2000413 - RNA, 19 nt, Artificial Sequence
  Description of Artificial Sequence: Synthetic oligonucleotide
  Antisense strand to SEQ ID NO: 2000412
ggauuuauaggaaacaacc

SEQ ID NO: 2000414 - RNA, 19 nt, Artificial Sequence
  Description of Artificial Sequence: Synthetic oligonucleotide
  Sense strand starting at position 3929 of SEQ ID NO: 1880872
cuggguaaggaguggucaa

SEQ ID NO: 2000415 - RNA, 19 nt, Artificial Sequence
  Description of Artificial Sequence: Synthetic oligonucleotide
  Antisense strand to SEQ ID NO: 2000414
uugaccacuccuuacccag

SEQ ID NO: 2000416 - RNA, 19 nt, Artificial Sequence
  Description of Artificial Sequence: Synthetic oligonucleotide
  Sense strand starting at position 3961 of SEQ ID NO: 1880872
uggcauauccagcaagaca

SEQ ID NO: 2000417 - RNA, 19 nt, Artificial Sequence
  Description of Artificial Sequence: Synthetic oligonucleotide
  Antisense strand to SEQ ID NO: 2000416
ugucuugcuggauaugcca

SEQ ID NO: 2000418 - RNA, 19 nt, Artificial Sequence
  Description of Artificial Sequence: Synthetic oligonucleotide
  Sense strand starting at position 31 of SEQ ID NO: 1880873
uccaacuuugcagagauua

SEQ ID NO: 2000419 - RNA, 19 nt, Artificial Sequence
  Description of Artificial Sequence: Synthetic oligonucleotide
  Antisense strand to SEQ ID NO: 2000418
uaaucucugcaaaguugga

SEQ ID NO: 2000420 - RNA, 19 nt, Artificial Sequence
  Description of Artificial Sequence: Synthetic oligonucleotide
  Sense strand starting at position 42 of SEQ ID NO: 1880873
agagauuaaugccuuagga

SEQ ID NO: 2000421 - RNA, 19 nt, Artificial Sequence
  Description of Artificial Sequence: Synthetic oligonucleotide
  Antisense strand to SEQ ID NO: 2000420
uccuaaggcauuaaucucu

SEQ ID NO: 2000422 - RNA, 19 nt, Artificial Sequence
  Description of Artificial Sequence: Synthetic oligonucleotide
  Sense strand starting at position 44 of SEQ ID NO: 1880873
agauuaaugccuuaggagu

SEQ ID NO: 2000423 - RNA, 19 nt, Artificial Sequence
  Description of Artificial Sequence: Synthetic oligonucleotide
  Antisense strand to SEQ ID NO: 2000422
acuccuaaggcauuaaucu

SEQ ID NO: 2000424 - RNA, 19 nt, Artificial Sequence
  Description of Artificial Sequence: Synthetic oligonucleotide
  Sense strand starting at position 61 of SEQ ID NO: 1880873
guuccugagcugucugcua

SEQ ID NO: 2000425 - RNA, 19 nt, Artificial Sequence
  Description of Artificial Sequence: Synthetic oligonucleotide
  Antisense strand to SEQ ID NO: 2000424
uagcagacagcucaggaac

SEQ ID NO: 2000426 - RNA, 19 nt, Artificial Sequence
  Description of Artificial Sequence: Synthetic oligonucleotide
  Sense strand starting at position 76 of SEQ ID NO: 1880873
gcuagaucucaacaggguu

SEQ ID NO: 2000427 - RNA, 19 nt, Artificial Sequence
  Description of Artificial Sequence: Synthetic oligonucleotide
  Antisense strand to SEQ ID NO: 2000426
aacccuguugagaucuagc

SEQ ID NO: 2000428 - RNA, 19 nt, Artificial Sequence
  Description of Artificial Sequence: Synthetic oligonucleotide
  Sense strand starting at position 236 of SEQ ID NO: 1880873
cccaauacucuugagcuga

SEQ ID NO: 2000429 - RNA, 19 nt, Artificial Sequence
  Description of Artificial Sequence: Synthetic oligonucleotide
  Antisense strand to SEQ ID NO: 2000428
ucagcucaagaguauuggg

SEQ ID NO: 2000430 - RNA, 19 nt, Artificial Sequence
  Description of Artificial Sequence: Synthetic oligonucleotide
  Sense strand starting at position 747 of SEQ ID NO: 1880873
cugggaaaguaacuuaauu

SEQ ID NO: 2000431 - RNA, 19 nt, Artificial Sequence
  Description of Artificial Sequence: Synthetic oligonucleotide
  Antisense strand to SEQ ID NO: 2000430
aauuaaguuacuuucccag

SEQ ID NO: 2000432 - RNA, 19 nt, Artificial Sequence
  Description of Artificial Sequence: Synthetic oligonucleotide
  Sense strand starting at position 1178 of SEQ ID NO: 1880873
auaggucugcucuaaaccu

SEQ ID NO: 2000433 - RNA, 19 nt, Artificial Sequence
  Description of Artificial Sequence: Synthetic oligonucleotide
  Antisense strand to SEQ ID NO: 2000432
agguuuagagcagaccuau

SEQ ID NO: 2000434 - RNA, 19 nt, Artificial Sequence
  Description of Artificial Sequence: Synthetic oligonucleotide
  Sense strand starting at position 1444 of SEQ ID NO: 1880873
gggagauagucugugguug

SEQ ID NO: 2000435 - RNA, 19 nt, Artificial Sequence
  Description of Artificial Sequence: Synthetic oligonucleotide
  Antisense strand to SEQ ID NO: 2000434
caaccacagacuaucuccc

SEQ ID NO: 2000436 - RNA, 19 nt, Artificial Sequence
  Description of Artificial Sequence: Synthetic oligonucleotide
  Sense strand starting at position 1466 of SEQ ID NO: 1880873
uugccaugaguuugagaca

SEQ ID NO: 2000437 - RNA, 19 nt, Artificial Sequence
  Description of Artificial Sequence: Synthetic oligonucleotide
  Antisense strand to SEQ ID NO: 2000436
ugucucaaacucauggcaa

SEQ ID NO: 2000438 - RNA, 19 nt, Artificial Sequence
  Description of Artificial Sequence: Synthetic oligonucleotide
  Sense strand starting at position 1537 of SEQ ID NO: 1880873
augcaaagguucuuauaaa

SEQ ID NO: 2000439 - RNA, 19 nt, Artificial Sequence
  Description of Artificial Sequence: Synthetic oligonucleotide
  Antisense strand to SEQ ID NO: 2000438
uuuauaagaaccuuugcau

SEQ ID NO: 2000440 - RNA, 19 nt, Artificial Sequence
  Description of Artificial Sequence: Synthetic oligonucleotide
  Sense strand starting at position 1653 of SEQ ID NO: 1880873
ugguaaagccuucgaagaa

SEQ ID NO: 2000441 - RNA, 19 nt, Artificial Sequence
  Description of Artificial Sequence: Synthetic oligonucleotide
  Antisense strand to SEQ ID NO: 2000440
uucuucgaaggcuuuacca

SEQ ID NO: 2000442 - RNA, 19 nt, Artificial Sequence
  Description of Artificial Sequence: Synthetic oligonucleotide
  Sense strand starting at position 1777 of SEQ ID NO: 1880873
ucacauccaggguaucuua

SEQ ID NO: 2000443 - RNA, 19 nt, Artificial Sequence
  Description of Artificial Sequence: Synthetic oligonucleotide
  Antisense strand to SEQ ID NO: 2000442
uaagauacccuggauguga

SEQ ID NO: 2000444 - RNA, 19 nt, Artificial Sequence
  Description of Artificial Sequence: Synthetic oligonucleotide
  Sense strand starting at position 1982 of SEQ ID NO: 1880873
ggugucugcagagaagacu

SEQ ID NO: 2000445 - RNA, 19 nt, Artificial Sequence
  Description of Artificial Sequence: Synthetic oligonucleotide
  Antisense strand to SEQ ID NO: 2000444
agucuucucugcagacacc

SEQ ID NO: 2000446 - RNA, 19 nt, Artificial Sequence
  Description of Artificial Sequence: Synthetic oligonucleotide
  Sense strand starting at position 1993 of SEQ ID NO: 1880873
agaagacugucccuugaag

SEQ ID NO: 2000447 - RNA, 19 nt, Artificial Sequence
  Description of Artificial Sequence: Synthetic oligonucleotide
  Antisense strand to SEQ ID NO: 2000446
cuucaagggacagucuucu

SEQ ID NO: 2000448 - RNA, 19 nt, Artificial Sequence
  Description of Artificial Sequence: Synthetic oligonucleotide
  Sense strand starting at position 2544 of SEQ ID NO: 1880873
gauggaguucugggucauc

SEQ ID NO: 2000449 - RNA, 19 nt, Artificial Sequence
  Description of Artificial Sequence: Synthetic oligonucleotide
  Antisense strand to SEQ ID NO: 2000448
gaugacccagaacuccauc

SEQ ID NO: 2000450 - RNA, 19 nt, Artificial Sequence
  Description of Artificial Sequence: Synthetic oligonucleotide
  Sense strand starting at position 2547 of SEQ ID NO: 1880873
ggaguucugggucauccca

SEQ ID NO: 2000451 - RNA, 19 nt, Artificial Sequence
  Description of Artificial Sequence: Synthetic oligonucleotide
  Antisense strand to SEQ ID NO: 2000450
ugggaugacccagaacucc

SEQ ID NO: 2000452 - RNA, 19 nt, Artificial Sequence
  Description of Artificial Sequence: Synthetic oligonucleotide
  Sense strand starting at position 2549 of SEQ ID NO: 1880873
aguucugggucaucccaaa

SEQ ID NO: 2000453 - RNA, 19 nt, Artificial Sequence
  Description of Artificial Sequence: Synthetic oligonucleotide
  Antisense strand to SEQ ID NO: 2000452
uuugggaugacccagaacu

SEQ ID NO: 2000454 - RNA, 19 nt, Artificial Sequence
  Description of Artificial Sequence: Synthetic oligonucleotide
  Sense strand starting at position 2573 of SEQ ID NO: 1880873
guucuuguaggauagugau

SEQ ID NO: 2000455 - RNA, 19 nt, Artificial Sequence
  Description of Artificial Sequence: Synthetic oligonucleotide
  Antisense strand to SEQ ID NO: 2000454
aucacuauccuacaagaac

SEQ ID NO: 2000456 - RNA, 19 nt, Artificial Sequence
  Description of Artificial Sequence: Synthetic oligonucleotide
  Sense strand starting at position 2581 of SEQ ID NO: 1880873
aggauagugaugcaugguu

SEQ ID NO: 2000457 - RNA, 19 nt, Artificial Sequence
  Description of Artificial Sequence: Synthetic oligonucleotide
  Antisense strand to SEQ ID NO: 2000456
aaccaugcaucacuauccu

SEQ ID NO: 2000458 - RNA, 19 nt, Artificial Sequence
  Description of Artificial Sequence: Synthetic oligonucleotide
  Sense strand starting at position 2583 of SEQ ID NO: 1880873
gauagugaugcaugguuaa

SEQ ID NO: 2000459 - RNA, 19 nt, Artificial Sequence
  Description of Artificial Sequence: Synthetic oligonucleotide
  Antisense strand to SEQ ID NO: 2000458
uuaaccaugcaucacuauc

SEQ ID NO: 2000460 - RNA, 19 nt, Artificial Sequence
  Description of Artificial Sequence: Synthetic oligonucleotide
  Sense strand starting at position 2696 of SEQ ID NO: 1880873
uccugagucucacugaaga

SEQ ID NO: 2000461 - RNA, 19 nt, Artificial Sequence
  Description of Artificial Sequence: Synthetic oligonucleotide
  Antisense strand to SEQ ID NO: 2000460
ucuucagugagacucagga

SEQ ID NO: 2000462 - RNA, 19 nt, Artificial Sequence
  Description of Artificial Sequence: Synthetic oligonucleotide
  Sense strand starting at position 2757 of SEQ ID NO: 1880873
auacuugcucacuaggaau

SEQ ID NO: 2000463 - RNA, 19 nt, Artificial Sequence
  Description of Artificial Sequence: Synthetic oligonucleotide
  Antisense strand to SEQ ID NO: 2000462
auuccuagugagcaaguau

SEQ ID NO: 2000464 - RNA, 19 nt, Artificial Sequence
  Description of Artificial Sequence: Synthetic oligonucleotide
  Sense strand starting at position 2825 of SEQ ID NO: 1880873
agaaguauaugguuuagaa

SEQ ID NO: 2000465 - RNA, 19 nt, Artificial Sequence
  Description of Artificial Sequence: Synthetic oligonucleotide
  Antisense strand to SEQ ID NO: 2000464
uucuaaaccauauacuucu

SEQ ID NO: 2000466 - RNA, 19 nt, Artificial Sequence
  Description of Artificial Sequence: Synthetic oligonucleotide
  Sense strand starting at position 2853 of SEQ ID NO: 1880873
ugaugauacugcuuuauuc

SEQ ID NO: 2000467 - RNA, 19 nt, Artificial Sequence
  Description of Artificial Sequence: Synthetic oligonucleotide
  Antisense strand to SEQ ID NO: 2000466
gaauaaagcaguaucauca

SEQ ID NO: 2000468 - RNA, 19 nt, Artificial Sequence
  Description of Artificial Sequence: Synthetic oligonucleotide
  Sense strand starting at position 2929 of SEQ ID NO: 1880873
gaagauagucuggguugau

SEQ ID NO: 2000469 - RNA, 19 nt, Artificial Sequence
  Description of Artificial Sequence: Synthetic oligonucleotide
  Antisense strand to SEQ ID NO: 2000468
aucaacccagacuaucuuc

SEQ ID NO: 2000470 - RNA, 19 nt, Artificial Sequence
  Description of Artificial Sequence: Synthetic oligonucleotide
  Sense strand starting at position 2930 of SEQ ID NO: 1880873
aagauagucuggguugaug

SEQ ID NO: 2000471 - RNA, 19 nt, Artificial Sequence
  Description of Artificial Sequence: Synthetic oligonucleotide
  Antisense strand to SEQ ID NO: 2000470
caucaacccagacuaucuu

SEQ ID NO: 2000472 - RNA, 19 nt, Artificial Sequence
  Description of Artificial Sequence: Synthetic oligonucleotide
  Sense strand starting at position 2932 of SEQ ID NO: 1880873
gauagucuggguugaugga

SEQ ID NO: 2000473 - RNA, 19 nt, Artificial Sequence
  Description of Artificial Sequence: Synthetic oligonucleotide
  Antisense strand to SEQ ID NO: 2000472
uccaucaacccagacuauc

SEQ ID NO: 2000474 - RNA, 19 nt, Artificial Sequence
  Description of Artificial Sequence: Synthetic oligonucleotide
  Sense strand starting at position 2979 of SEQ ID NO: 1880873
guguaugacagucaauuga

SEQ ID NO: 2000475 - RNA, 19 nt, Artificial Sequence
  Description of Artificial Sequence: Synthetic oligonucleotide
  Antisense strand to SEQ ID NO: 2000474
ucaauugacugucauacac

SEQ ID NO: 2000476 - RNA, 19 nt, Artificial Sequence
  Description of Artificial Sequence: Synthetic oligonucleotide
  Sense strand starting at position 3014 of SEQ ID NO: 1880873
cugucugucaaguggaaga

SEQ ID NO: 2000477 - RNA, 19 nt, Artificial Sequence
  Description of Artificial Sequence: Synthetic oligonucleotide
  Antisense strand to SEQ ID NO: 2000476
ucuuccacuugacagacag

SEQ ID NO: 2000478 - RNA, 19 nt, Artificial Sequence
  Description of Artificial Sequence: Synthetic oligonucleotide
  Sense strand starting at position 3021 of SEQ ID NO: 1880873
ucaaguggaagaugugaau

SEQ ID NO: 2000479 - RNA, 19 nt, Artificial Sequence
  Description of Artificial Sequence: Synthetic oligonucleotide
  Antisense strand to SEQ ID NO: 2000478
auucacaucuuccacuuga

SEQ ID NO: 2000480 - RNA, 19 nt, Artificial Sequence
  Description of Artificial Sequence: Synthetic oligonucleotide
  Sense strand starting at position 3035 of SEQ ID NO: 1880873
ugaauagacuuguuccuua

SEQ ID NO: 2000481 - RNA, 19 nt, Artificial Sequence
  Description of Artificial Sequence: Synthetic oligonucleotide
  Antisense strand to SEQ ID NO: 2000480
uaaggaacaagucuauuca

SEQ ID NO: 2000482 - RNA, 19 nt, Artificial Sequence
  Description of Artificial Sequence: Synthetic oligonucleotide
  Sense strand starting at position 3040 of SEQ ID NO: 1880873
agacuuguuccuuauuguc

SEQ ID NO: 2000483 - RNA, 19 nt, Artificial Sequence
  Description of Artificial Sequence: Synthetic oligonucleotide
  Antisense strand to SEQ ID NO: 2000482
gacaauaaggaacaagucu

SEQ ID NO: 2000484 - RNA, 19 nt, Artificial Sequence
  Description of Artificial Sequence: Synthetic oligonucleotide
  Sense strand starting at position 3048 of SEQ ID NO: 1880873
uccuuauuguccucagaga

SEQ ID NO: 2000485 - RNA, 19 nt, Artificial Sequence
  Description of Artificial Sequence: Synthetic oligonucleotide
  Antisense strand to SEQ ID NO: 2000484
ucucugaggacaauaagga

SEQ ID NO: 2000486 - RNA, 19 nt, Artificial Sequence
  Description of Artificial Sequence: Synthetic oligonucleotide
  Sense strand starting at position 3049 of SEQ ID NO: 1880873
ccuuauuguccucagagau

SEQ ID NO: 2000487 - RNA, 19 nt, Artificial Sequence
  Description of Artificial Sequence: Synthetic oligonucleotide
  Antisense strand to SEQ ID NO: 2000486
aucucugaggacaauaagg

SEQ ID NO: 2000488 - RNA, 19 nt, Artificial Sequence
  Description of Artificial Sequence: Synthetic oligonucleotide
  Sense strand starting at position 3336 of SEQ ID NO: 1880873
cuguaaguuccacaaaccu

SEQ ID NO: 2000489 - RNA, 19 nt, Artificial Sequence
  Description of Artificial Sequence: Synthetic oligonucleotide
  Antisense strand to SEQ ID NO: 2000488
agguuuguggaacuuacag

SEQ ID NO: 2000490 - RNA, 19 nt, Artificial Sequence
  Description of Artificial Sequence: Synthetic oligonucleotide
  Sense strand starting at position 3620 of SEQ ID NO: 1880873
acaauuagcucugucugaa

SEQ ID NO: 2000491 - RNA, 19 nt, Artificial Sequence
  Description of Artificial Sequence: Synthetic oligonucleotide
  Antisense strand to SEQ ID NO: 2000490
uucagacagagcuaauugu

SEQ ID NO: 2000492 - RNA, 19 nt, Artificial Sequence
  Description of Artificial Sequence: Synthetic oligonucleotide
  Sense strand starting at position 3685 of SEQ ID NO: 1880873
caaacagugucuguauaag

SEQ ID NO: 2000493 - RNA, 19 nt, Artificial Sequence
  Description of Artificial Sequence: Synthetic oligonucleotide
  Antisense strand to SEQ ID NO: 2000492
cuuauacagacacuguuug

SEQ ID NO: 2000494 - RNA, 19 nt, Artificial Sequence
  Description of Artificial Sequence: Synthetic oligonucleotide
  Sense strand starting at position 3824 of SEQ ID NO: 1880873
cagaucaggugucuuaauu

SEQ ID NO: 2000495 - RNA, 19 nt, Artificial Sequence
  Description of Artificial Sequence: Synthetic oligonucleotide
  Antisense strand to SEQ ID NO: 2000494
aauuaagacaccugaucug

SEQ ID NO: 2000496 - RNA, 19 nt, Artificial Sequence
  Description of Artificial Sequence: Synthetic oligonucleotide
  Sense strand starting at position 3925 of SEQ ID NO: 1880873
cagguugcuccugagcaga

SEQ ID NO: 2000497 - RNA, 19 nt, Artificial Sequence
  Description of Artificial Sequence: Synthetic oligonucleotide
  Antisense strand to SEQ ID NO: 2000496
ucugcucaggagcaaccug

SEQ ID NO: 2000498 - RNA, 19 nt, Artificial Sequence
  Description of Artificial Sequence: Synthetic oligonucleotide
  Sense strand starting at position 1226 of SEQ ID NO: 1880874
ugucccuuggcagggaaau

SEQ ID NO: 2000499 - RNA, 19 nt, Artificial Sequence
  Description of Artificial Sequence: Synthetic oligonucleotide
  Antisense strand to SEQ ID NO: 2000498
auuucccugccaagggaca

SEQ ID NO: 2000500 - RNA, 19 nt, Artificial Sequence
  Description of Artificial Sequence: Synthetic oligonucleotide
  Sense strand starting at position 2091 of SEQ ID NO: 1880874
cgacuacugcccgcggaau

SEQ ID NO: 2000501 - RNA, 19 nt, Artificial Sequence
  Description of Artificial Sequence: Synthetic oligonucleotide
  Antisense strand to SEQ ID NO: 2000500
auuccgcgggcaguagucg

SEQ ID NO: 2000502 - RNA, 19 nt, Artificial Sequence
  Description of Artificial Sequence: Synthetic oligonucleotide
  Sense strand starting at position 2104 of SEQ ID NO: 1880874
cggaaugggcaagauuagu

SEQ ID NO: 2000503 - RNA, 19 nt, Artificial Sequence
  Description of Artificial Sequence: Synthetic oligonucleotide
  Antisense strand to SEQ ID NO: 2000502
acuaaucuugcccauuccg

SEQ ID NO: 2000504 - RNA, 19 nt, Artificial Sequence
  Description of Artificial Sequence: Synthetic oligonucleotide
  Sense strand starting at position 2110 of SEQ ID NO: 1880874
gggcaagauuaguuuguua

SEQ ID NO: 2000505 - RNA, 19 nt, Artificial Sequence
  Description of Artificial Sequence: Synthetic oligonucleotide
  Antisense strand to SEQ ID NO: 2000504
uaacaaacuaaucuugccc

SEQ ID NO: 2000506 - RNA, 19 nt, Artificial Sequence
  Description of Artificial Sequence: Synthetic oligonucleotide
  Sense strand starting at position 2112 of SEQ ID NO: 1880874
gcaagauuaguuuguuaau

SEQ ID NO: 2000507 - RNA, 19 nt, Artificial Sequence
  Description of Artificial Sequence: Synthetic oligonucleotide
  Antisense strand to SEQ ID NO: 2000506
auuaacaaacuaaucuugc

SEQ ID NO: 2000508 - RNA, 19 nt, Artificial Sequence
  Description of Artificial Sequence: Synthetic oligonucleotide
  Sense strand starting at position 2256 of SEQ ID NO: 1880874
uugaaagagucgccugaau

SEQ ID NO: 2000509 - RNA, 19 nt, Artificial Sequence
  Description of Artificial Sequence: Synthetic oligonucleotide
  Antisense strand to SEQ ID NO: 2000508
auucaggcgacucuuucaa

SEQ ID NO: 2000510 - RNA, 19 nt, Artificial Sequence
  Description of Artificial Sequence: Synthetic oligonucleotide
  Sense strand starting at position 2258 of SEQ ID NO: 1880874
gaaagagucgccugaauau

SEQ ID NO: 2000511 - RNA, 19 nt, Artificial Sequence
  Description of Artificial Sequence: Synthetic oligonucleotide
  Antisense strand to SEQ ID NO: 2000510
auauucaggcgacucuuuc

SEQ ID NO: 2000512 - RNA, 19 nt, Artificial Sequence
  Description of Artificial Sequence: Synthetic oligonucleotide
  Sense strand starting at position 2279 of SEQ ID NO: 1880874
acucuuuaguguccaagga

SEQ ID NO: 2000513 - RNA, 19 nt, Artificial Sequence
  Description of Artificial Sequence: Synthetic oligonucleotide
  Antisense strand to SEQ ID NO: 2000512
uccuuggacacuaaagagu

SEQ ID NO: 2000514 - RNA, 19 nt, Artificial Sequence
  Description of Artificial Sequence: Synthetic oligonucleotide
  Sense strand starting at position 2280 of SEQ ID NO: 1880874
cucuuuaguguccaaggaa

SEQ ID NO: 2000515 - RNA, 19 nt, Artificial Sequence
  Description of Artificial Sequence: Synthetic oligonucleotide
  Antisense strand to SEQ ID NO: 2000514
uuccuuggacacuaaagag

SEQ ID NO: 2000516 - RNA, 19 nt, Artificial Sequence
  Description of Artificial Sequence: Synthetic oligonucleotide
  Sense strand starting at position 2283 of SEQ ID NO: 1880874
uuuaguguccaaggaauug

SEQ ID NO: 2000517 - RNA, 19 nt, Artificial Sequence
  Description of Artificial Sequence: Synthetic oligonucleotide
  Antisense strand to SEQ ID NO: 2000516
caauuccuuggacacuaaa

SEQ ID NO: 2000518 - RNA, 19 nt, Artificial Sequence
  Description of Artificial Sequence: Synthetic oligonucleotide
  Sense strand starting at position 2358 of SEQ ID NO: 1880874
agacuaagcuuccuggagu

SEQ ID NO: 2000519 - RNA, 19 nt, Artificial Sequence
  Description of Artificial Sequence: Synthetic oligonucleotide
  Antisense strand to SEQ ID NO: 2000518
acuccaggaagcuuagucu

SEQ ID NO: 2000520 - RNA, 19 nt, Artificial Sequence
  Description of Artificial Sequence: Synthetic oligonucleotide
  Sense strand starting at position 2401 of SEQ ID NO: 1880874
uaucguguuuauguuauga

SEQ ID NO: 2000521 - RNA, 19 nt, Artificial Sequence
  Description of Artificial Sequence: Synthetic oligonucleotide
  Antisense strand to SEQ ID NO: 2000520
ucauaacauaaacacgaua

SEQ ID NO: 2000522 - RNA, 19 nt, Artificial Sequence
  Description of Artificial Sequence: Synthetic oligonucleotide
  Sense strand starting at position 2494 of SEQ ID NO: 1880874
aggaaacaauugggacaau

SEQ ID NO: 2000523 - RNA, 19 nt, Artificial Sequence
  Description of Artificial Sequence: Synthetic oligonucleotide
  Antisense strand to SEQ ID NO: 2000522
auugucccaauuguuuccu

SEQ ID NO: 2000524 - RNA, 19 nt, Artificial Sequence
  Description of Artificial Sequence: Synthetic oligonucleotide
  Sense strand starting at position 2505 of SEQ ID NO: 1880874
gggacaauguggagauagu

SEQ ID NO: 2000525 - RNA, 19 nt, Artificial Sequence
  Description of Artificial Sequence: Synthetic oligonucleotide
  Antisense strand to SEQ ID NO: 2000524
acuaucuccacauuguccc

SEQ ID NO: 2000526 - RNA, 19 nt, Artificial Sequence
  Description of Artificial Sequence: Synthetic oligonucleotide
  Sense strand starting at position 2515 of SEQ ID NO: 1880874
ggagauaguugcuuggauu

SEQ ID NO: 2000527 - RNA, 19 nt, Artificial Sequence
  Description of Artificial Sequence: Synthetic oligonucleotide
  Antisense strand to SEQ ID NO: 2000526
aauccaagcaacuaucucc

SEQ ID NO: 2000528 - RNA, 19 nt, Artificial Sequence
  Description of Artificial Sequence: Synthetic oligonucleotide
  Sense strand starting at position 2758 of SEQ ID NO: 1880874
uuggcuaugcucugaagaa

SEQ ID NO: 2000529 - RNA, 19 nt, Artificial Sequence
  Description of Artificial Sequence: Synthetic oligonucleotide
  Antisense strand to SEQ ID NO: 2000528
uucuucagagcauagccaa

SEQ ID NO: 2000530 - RNA, 19 nt, Artificial Sequence
  Description of Artificial Sequence: Synthetic oligonucleotide
  Sense strand starting at position 2909 of SEQ ID NO: 1880874
uucgaauuacaagguaauu

SEQ ID NO: 2000531 - RNA, 19 nt, Artificial Sequence
  Description of Artificial Sequence: Synthetic oligonucleotide
  Antisense strand to SEQ ID NO: 2000530
aauuaccuuguaauucgaa

SEQ ID NO: 2000532 - RNA, 19 nt, Artificial Sequence
  Description of Artificial Sequence: Synthetic oligonucleotide
  Sense strand starting at position 2929 of SEQ ID NO: 1880874
agugcauugucauugauag

SEQ ID NO: 2000533 - RNA, 19 nt, Artificial Sequence
  Description of Artificial Sequence: Synthetic oligonucleotide
  Antisense strand to SEQ ID NO: 2000532
cuaucaaugacaaugcacu

SEQ ID NO: 2000534 - RNA, 19 nt, Artificial Sequence
  Description of Artificial Sequence: Synthetic oligonucleotide
  Sense strand starting at position 2937 of SEQ ID NO: 1880874
gucauugauagcuacagga

SEQ ID NO: 2000535 - RNA, 19 nt, Artificial Sequence
  Description of Artificial Sequence: Synthetic oligonucleotide
  Antisense strand to SEQ ID NO: 2000534
uccuguagcuaucaaugac

SEQ ID NO: 2000536 - RNA, 19 nt, Artificial Sequence
  Description of Artificial Sequence: Synthetic oligonucleotide
  Sense strand starting at position 2966 of SEQ ID NO: 1880874
uuuggagaauuuggaauga

SEQ ID NO: 2000537 - RNA, 19 nt, Artificial Sequence
  Description of Artificial Sequence: Synthetic oligonucleotide
  Antisense strand to SEQ ID NO: 2000536
ucauuccaaauucuccaaa

SEQ ID NO: 2000538 - RNA, 19 nt, Artificial Sequence
  Description of Artificial Sequence: Synthetic oligonucleotide
  Sense strand starting at position 2982 of SEQ ID NO: 1880874
ugaagaaugcucuggagau

SEQ ID NO: 2000539 - RNA, 19 nt, Artificial Sequence
  Description of Artificial Sequence: Synthetic oligonucleotide
  Antisense strand to SEQ ID NO: 2000538
aucuccagagcauucuuca

SEQ ID NO: 2000540 - RNA, 19 nt, Artificial Sequence
  Description of Artificial Sequence: Synthetic oligonucleotide
  Sense strand starting at position 2988 of SEQ ID NO: 1880874
augcucuggagaugaaaua

SEQ ID NO: 2000541 - RNA, 19 nt, Artificial Sequence
  Description of Artificial Sequence: Synthetic oligonucleotide
  Antisense strand to SEQ ID NO: 2000540
uauuucaucuccagagcau

SEQ ID NO: 2000542 - RNA, 19 nt, Artificial Sequence
  Description of Artificial Sequence: Synthetic oligonucleotide
  Sense strand starting at position 2999 of SEQ ID NO: 1880874
augaaauagugccuaguuu

SEQ ID NO: 2000543 - RNA, 19 nt, Artificial Sequence
  Description of Artificial Sequence: Synthetic oligonucleotide
  Antisense strand to SEQ ID NO: 2000542
aaacuaggcacuauuucau

SEQ ID NO: 2000544 - RNA, 19 nt, Artificial Sequence
  Description of Artificial Sequence: Synthetic oligonucleotide
  Sense strand starting at position 3102 of SEQ ID NO: 1880874
agcgcauugcucuagauuu

SEQ ID NO: 2000545 - RNA, 19 nt, Artificial Sequence
  Description of Artificial Sequence: Synthetic oligonucleotide
  Antisense strand to SEQ ID NO: 2000544
aaaucuagagcaaugcgcu

SEQ ID NO: 2000546 - RNA, 19 nt, Artificial Sequence
  Description of Artificial Sequence: Synthetic oligonucleotide
  Sense strand starting at position 3104 of SEQ ID NO: 1880874
cgcauugcucuagauuuac

SEQ ID NO: 2000547 - RNA, 19 nt, Artificial Sequence
  Description of Artificial Sequence: Synthetic oligonucleotide
  Antisense strand to SEQ ID NO: 2000546
guaaaucuagagcaaugcg

SEQ ID NO: 2000548 - RNA, 19 nt, Artificial Sequence
  Description of Artificial Sequence: Synthetic oligonucleotide
  Sense strand starting at position 3211 of SEQ ID NO: 1880874
uccugagucucaucuaugu

SEQ ID NO: 2000549 - RNA, 19 nt, Artificial Sequence
  Description of Artificial Sequence: Synthetic oligonucleotide
  Antisense strand to SEQ ID NO: 2000548
acauagaugagacucagga

SEQ ID NO: 2000550 - RNA, 19 nt, Artificial Sequence
  Description of Artificial Sequence: Synthetic oligonucleotide
  Sense strand starting at position 3215 of SEQ ID NO: 1880874
gagucucaucuauguacug

SEQ ID NO: 2000551 - RNA, 19 nt, Artificial Sequence
  Description of Artificial Sequence: Synthetic oligonucleotide
  Antisense strand to SEQ ID NO: 2000550
caguacauagaugagacuc

SEQ ID NO: 2000552 - RNA, 19 nt, Artificial Sequence
  Description of Artificial Sequence: Synthetic oligonucleotide
  Sense strand starting at position 3247 of SEQ ID NO: 1880874
gaguuagaacagugauauu

SEQ ID NO: 2000553 - RNA, 19 nt, Artificial Sequence
  Description of Artificial Sequence: Synthetic oligonucleotide
  Antisense strand to SEQ ID NO: 2000552
aauaucacuguucuaacuc

SEQ ID NO: 2000554 - RNA, 19 nt, Artificial Sequence
  Description of Artificial Sequence: Synthetic oligonucleotide
  Sense strand starting at position 3267 of SEQ ID NO: 1880874
auaucucuauggcuugaaa

SEQ ID NO: 2000555 - RNA, 19 nt, Artificial Sequence
  Description of Artificial Sequence: Synthetic oligonucleotide
  Antisense strand to SEQ ID NO: 2000554
uuucaagccauagagauau

SEQ ID NO: 2000556 - RNA, 19 nt, Artificial Sequence
  Description of Artificial Sequence: Synthetic oligonucleotide
  Sense strand starting at position 3269 of SEQ ID NO: 1880874
aucucuauggcuugaaauu

SEQ ID NO: 2000557 - RNA, 19 nt, Artificial Sequence
  Description of Artificial Sequence: Synthetic oligonucleotide
  Antisense strand to SEQ ID NO: 2000556
aauuucaagccauagagau

SEQ ID NO: 2000558 - RNA, 19 nt, Artificial Sequence
  Description of Artificial Sequence: Synthetic oligonucleotide
  Sense strand starting at position 3350 of SEQ ID NO: 1880874
guaggaugcagcuaacagu

SEQ ID NO: 2000559 - RNA, 19 nt, Artificial Sequence
  Description of Artificial Sequence: Synthetic oligonucleotide
  Antisense strand to SEQ ID NO: 2000558
acuguuagcugcauccuac

SEQ ID NO: 2000560 - RNA, 19 nt, Artificial Sequence
  Description of Artificial Sequence: Synthetic oligonucleotide
  Sense strand starting at position 3403 of SEQ ID NO: 1880874
gccuguguggaagaugaaa

SEQ ID NO: 2000561 - RNA, 19 nt, Artificial Sequence
  Description of Artificial Sequence: Synthetic oligonucleotide
  Antisense strand to SEQ ID NO: 2000560
uuucaucuuccacacaggc

SEQ ID NO: 2000562 - RNA, 19 nt, Artificial Sequence
  Description of Artificial Sequence: Synthetic oligonucleotide
  Sense strand starting at position 3456 of SEQ ID NO: 1880874
cauugaaagggcuggucaa

SEQ ID NO: 2000563 - RNA, 19 nt, Artificial Sequence
  Description of Artificial Sequence: Synthetic oligonucleotide
  Antisense strand to SEQ ID NO: 2000562
uugaccagcccuuucaaug

SEQ ID NO: 2000564 - RNA, 19 nt, Artificial Sequence
  Description of Artificial Sequence: Synthetic oligonucleotide
  Sense strand starting at position 3649 of SEQ ID NO: 1880874
cuagcuaagccagaacuuu

SEQ ID NO: 2000565 - RNA, 19 nt, Artificial Sequence
  Description of Artificial Sequence: Synthetic oligonucleotide
  Antisense strand to SEQ ID NO: 2000564
aaaguucuggcuuagcuag

SEQ ID NO: 2000566 - RNA, 19 nt, Artificial Sequence
  Description of Artificial Sequence: Synthetic oligonucleotide
  Sense strand starting at position 3726 of SEQ ID NO: 1880874
acagcaugucuaugucauu

SEQ ID NO: 2000567 - RNA, 19 nt, Artificial Sequence
  Description of Artificial Sequence: Synthetic oligonucleotide
  Antisense strand to SEQ ID NO: 2000566
aaugacauagacaugcugu

SEQ ID NO: 2000568 - RNA, 19 nt, Artificial Sequence
  Description of Artificial Sequence: Synthetic oligonucleotide
  Sense strand starting at position 3790 of SEQ ID NO: 1880874
aagguauguuuggcuuacu

SEQ ID NO: 2000569 - RNA, 19 nt, Artificial Sequence
  Description of Artificial Sequence: Synthetic oligonucleotide
  Antisense strand to SEQ ID NO: 2000568
aguaagccaaacauaccuu

SEQ ID NO: 2000570 - RNA, 19 nt, Artificial Sequence
  Description of Artificial Sequence: Synthetic oligonucleotide
  Sense strand starting at position 3791 of SEQ ID NO: 1880874
agguauguuuggcuuacua

SEQ ID NO: 2000571 - RNA, 19 nt, Artificial Sequence
  Description of Artificial Sequence: Synthetic oligonucleotide
  Antisense strand to SEQ ID NO: 2000570
uaguaagccaaacauaccu

SEQ ID NO: 2000572 - RNA, 19 nt, Artificial Sequence
  Description of Artificial Sequence: Synthetic oligonucleotide
  Sense strand starting at position 3799 of SEQ ID NO: 1880874
uuggcuuacuagccagauu

SEQ ID NO: 2000573 - RNA, 19 nt, Artificial Sequence
  Description of Artificial Sequence: Synthetic oligonucleotide
  Antisense strand to SEQ ID NO: 2000572
aaucuggcuaguaagccaa

SEQ ID NO: 2000574 - RNA, 19 nt, Artificial Sequence
  Description of Artificial Sequence: Synthetic oligonucleotide
  Sense strand starting at position 3802 of SEQ ID NO: 1880874
gcuuacuagccagauugua

SEQ ID NO: 2000575 - RNA, 19 nt, Artificial Sequence
  Description of Artificial Sequence: Synthetic oligonucleotide
  Antisense strand to SEQ ID NO: 2000574
uacaaucuggcuaguaagc

SEQ ID NO: 2000576 - RNA, 19 nt, Artificial Sequence
  Description of Artificial Sequence: Synthetic oligonucleotide
  Sense strand starting at position 3894 of SEQ ID NO: 1880874
gauaaugggucuucuugag

SEQ ID NO: 2000577 - RNA, 19 nt, Artificial Sequence
  Description of Artificial Sequence: Synthetic oligonucleotide
  Antisense strand to SEQ ID NO: 2000576
cucaagaagacccauuauc

SEQ ID NO: 2000578 - RNA, 19 nt, Artificial Sequence
  Description of Artificial Sequence: Synthetic oligonucleotide
  Sense strand starting at position 90 of SEQ ID NO: 1880875
cagagugaaucugucucua

SEQ ID NO: 2000579 - RNA, 19 nt, Artificial Sequence
  Description of Artificial Sequence: Synthetic oligonucleotide
  Antisense strand to SEQ ID NO: 2000578
uagagacagauucacucug

SEQ ID NO: 2000580 - RNA, 19 nt, Artificial Sequence
  Description of Artificial Sequence: Synthetic oligonucleotide
  Sense strand starting at position 92 of SEQ ID NO: 1880875
gagugaaucugucucuaaa

SEQ ID NO: 2000581 - RNA, 19 nt, Artificial Sequence
  Description of Artificial Sequence: Synthetic oligonucleotide
  Antisense strand to SEQ ID NO: 2000580
uuuagagacagauucacuc

SEQ ID NO: 2000582 - RNA, 19 nt, Artificial Sequence
  Description of Artificial Sequence: Synthetic oligonucleotide
  Sense strand starting at position 129 of SEQ ID NO: 1880875
gcugcuguccuggauuugu

SEQ ID NO: 2000583 - RNA, 19 nt, Artificial Sequence
  Description of Artificial Sequence: Synthetic oligonucleotide
  Antisense strand to SEQ ID NO: 2000582
acaaauccaggacagcagc

SEQ ID NO: 2000584 - RNA, 19 nt, Artificial Sequence
  Description of Artificial Sequence: Synthetic oligonucleotide
  Sense strand starting at position 133 of SEQ ID NO: 1880875
cuguccuggauuuguaagu

SEQ ID NO: 2000585 - RNA, 19 nt, Artificial Sequence
  Description of Artificial Sequence: Synthetic oligonucleotide
  Antisense strand to SEQ ID NO: 2000584
acuuacaaauccaggacag

SEQ ID NO: 2000586 - RNA, 19 nt, Artificial Sequence
  Description of Artificial Sequence: Synthetic oligonucleotide
  Sense strand starting at position 222 of SEQ ID NO: 1880875
acaguaaggcuuugagauc

SEQ ID NO: 2000587 - RNA, 19 nt, Artificial Sequence
  Description of Artificial Sequence: Synthetic oligonucleotide
  Antisense strand to SEQ ID NO: 2000586
gaucucaaagccuuacugu

SEQ ID NO: 2000588 - RNA, 19 nt, Artificial Sequence
  Description of Artificial Sequence: Synthetic oligonucleotide
  Sense strand starting at position 233 of SEQ ID NO: 1880875
uugagaucuagaggcugau

SEQ ID NO: 2000589 - RNA, 19 nt, Artificial Sequence
  Description of Artificial Sequence: Synthetic oligonucleotide
  Antisense strand to SEQ ID NO: 2000588
aucagccucuagaucucaa

SEQ ID NO: 2000590 - RNA, 19 nt, Artificial Sequence
  Description of Artificial Sequence: Synthetic oligonucleotide
  Sense strand starting at position 236 of SEQ ID NO: 1880875
agaucuagaggcugaucuu

SEQ ID NO: 2000591 - RNA, 19 nt, Artificial Sequence
  Description of Artificial Sequence: Synthetic oligonucleotide
  Antisense strand to SEQ ID NO: 2000590
aagaucagccucuagaucu

SEQ ID NO: 2000592 - RNA, 19 nt, Artificial Sequence
  Description of Artificial Sequence: Synthetic oligonucleotide
  Sense strand starting at position 239 of SEQ ID NO: 1880875
ucuagaggcugaucuuagu

SEQ ID NO: 2000593 - RNA, 19 nt, Artificial Sequence
  Description of Artificial Sequence: Synthetic oligonucleotide
  Antisense strand to SEQ ID NO: 2000592
acuaagaucagccucuaga

SEQ ID NO: 2000594 - RNA, 19 nt, Artificial Sequence
  Description of Artificial Sequence: Synthetic oligonucleotide
  Sense strand starting at position 264 of SEQ ID NO: 1880875
uuuggagaucucugccuua

SEQ ID NO: 2000595 - RNA, 19 nt, Artificial Sequence
  Description of Artificial Sequence: Synthetic oligonucleotide
  Antisense strand to SEQ ID NO: 2000594
uaaggcagagaucuccaaa

SEQ ID NO: 2000596 - RNA, 19 nt, Artificial Sequence
  Description of Artificial Sequence: Synthetic oligonucleotide
  Sense strand starting at position 267 of SEQ ID NO: 1880875
ggagaucucugccuuaauc

SEQ ID NO: 2000597 - RNA, 19 nt, Artificial Sequence
  Description of Artificial Sequence: Synthetic oligonucleotide
  Antisense strand to SEQ ID NO: 2000596
gauuaaggcagagaucucc

SEQ ID NO: 2000598 - RNA, 19 nt, Artificial Sequence
  Description of Artificial Sequence: Synthetic oligonucleotide
  Sense strand starting at position 375 of SEQ ID NO: 1880875
augugaguggagugaauga

SEQ ID NO: 2000599 - RNA, 19 nt, Artificial Sequence
  Description of Artificial Sequence: Synthetic oligonucleotide
  Antisense strand to SEQ ID NO: 2000598
ucauucacuccacucacau

SEQ ID NO: 2000600 - RNA, 19 nt, Artificial Sequence
  Description of Artificial Sequence: Synthetic oligonucleotide
  Sense strand starting at position 395 of SEQ ID NO: 1880875
guaguaagggcuuaacaga

SEQ ID NO: 2000601 - RNA, 19 nt, Artificial Sequence
  Description of Artificial Sequence: Synthetic oligonucleotide
  Antisense strand to SEQ ID NO: 2000600
ucuguuaagcccuuacuac

SEQ ID NO: 2000602 - RNA, 19 nt, Artificial Sequence
  Description of Artificial Sequence: Synthetic oligonucleotide
  Sense strand starting at position 402 of SEQ ID NO: 1880875
gggcuuaacagaugucuug

SEQ ID NO: 2000603 - RNA, 19 nt, Artificial Sequence
  Description of Artificial Sequence: Synthetic oligonucleotide
  Antisense strand to SEQ ID NO: 2000602
caagacaucuguuaagccc

SEQ ID NO: 2000604 - RNA, 19 nt, Artificial Sequence
  Description of Artificial Sequence: Synthetic oligonucleotide
  Sense strand starting at position 405 of SEQ ID NO: 1880875
cuuaacagaugucuuguga

SEQ ID NO: 2000605 - RNA, 19 nt, Artificial Sequence
  Description of Artificial Sequence: Synthetic oligonucleotide
  Antisense strand to SEQ ID NO: 2000604
ucacaagacaucuguuaag

SEQ ID NO: 2000606 - RNA, 19 nt, Artificial Sequence
  Description of Artificial Sequence: Synthetic oligonucleotide
  Sense strand starting at position 594 of SEQ ID NO: 1880875
agagguaaagaguguugca

SEQ ID NO: 2000607 - RNA, 19 nt, Artificial Sequence
  Description of Artificial Sequence: Synthetic oligonucleotide
  Antisense strand to SEQ ID NO: 2000606
ugcaacacucuuuaccucu

SEQ ID NO: 2000608 - RNA, 19 nt, Artificial Sequence
  Description of Artificial Sequence: Synthetic oligonucleotide
  Sense strand starting at position 696 of SEQ ID NO: 1880875
gcugcauuuccugaaagcu

SEQ ID NO: 2000609 - RNA, 19 nt, Artificial Sequence
  Description of Artificial Sequence: Synthetic oligonucleotide
  Antisense strand to SEQ ID NO: 2000608
agcuuucaggaaaugcagc

SEQ ID NO: 2000610 - RNA, 19 nt, Artificial Sequence
  Description of Artificial Sequence: Synthetic oligonucleotide
  Sense strand starting at position 732 of SEQ ID NO: 1880875
agguguuuaugguuaagag

SEQ ID NO: 2000611 - RNA, 19 nt, Artificial Sequence
  Description of Artificial Sequence: Synthetic oligonucleotide
  Antisense strand to SEQ ID NO: 2000610
cucuuaaccauaaacaccu

SEQ ID NO: 2000612 - RNA, 19 nt, Artificial Sequence
  Description of Artificial Sequence: Synthetic oligonucleotide
  Sense strand starting at position 733 of SEQ ID NO: 1880875
gguguuuaugguuaagaga

SEQ ID NO: 2000613 - RNA, 19 nt, Artificial Sequence
  Description of Artificial Sequence: Synthetic oligonucleotide
  Antisense strand to SEQ ID NO: 2000612
ucucuuaaccauaaacacc

SEQ ID NO: 2000614 - RNA, 19 nt, Artificial Sequence
  Description of Artificial Sequence: Synthetic oligonucleotide
  Sense strand starting at position 792 of SEQ ID NO: 1880875
gaguccagauaucccgaua

SEQ ID NO: 2000615 - RNA, 19 nt, Artificial Sequence
  Description of Artificial Sequence: Synthetic oligonucleotide
  Antisense strand to SEQ ID NO: 2000614
uaucgggauaucuggacuc

SEQ ID NO: 2000616 - RNA, 19 nt, Artificial Sequence
  Description of Artificial Sequence: Synthetic oligonucleotide
  Sense strand starting at position 953 of SEQ ID NO: 1880875
cauuguaccuuaguuggau

SEQ ID NO: 2000617 - RNA, 19 nt, Artificial Sequence
  Description of Artificial Sequence: Synthetic oligonucleotide
  Antisense strand to SEQ ID NO: 2000616
auccaacuaagguacaaug

SEQ ID NO: 2000618 - RNA, 19 nt, Artificial Sequence
  Description of Artificial Sequence: Synthetic oligonucleotide
  Sense strand starting at position 954 of SEQ ID NO: 1880875
auuguaccuuaguuggaua

SEQ ID NO: 2000619 - RNA, 19 nt, Artificial Sequence
  Description of Artificial Sequence: Synthetic oligonucleotide
  Antisense strand to SEQ ID NO: 2000618
uauccaacuaagguacaau

SEQ ID NO: 2000620 - RNA, 19 nt, Artificial Sequence
  Description of Artificial Sequence: Synthetic oligonucleotide
  Sense strand starting at position 1077 of SEQ ID NO: 1880875
ccgugaguagcugagacaa

SEQ ID NO: 2000621 - RNA, 19 nt, Artificial Sequence
  Description of Artificial Sequence: Synthetic oligonucleotide
  Antisense strand to SEQ ID NO: 2000620
uugucucagcuacucacgg

SEQ ID NO: 2000622 - RNA, 19 nt, Artificial Sequence
  Description of Artificial Sequence: Synthetic oligonucleotide
  Sense strand starting at position 1117 of SEQ ID NO: 1880875
ggccaauauuuguauuucu

SEQ ID NO: 2000623 - RNA, 19 nt, Artificial Sequence
  Description of Artificial Sequence: Synthetic oligonucleotide
  Antisense strand to SEQ ID NO: 2000622
agaaauacaaauauuggcc

SEQ ID NO: 2000624 - RNA, 19 nt, Artificial Sequence
  Description of Artificial Sequence: Synthetic oligonucleotide
  Sense strand starting at position 1294 of SEQ ID NO: 1880875
guggacuuacucugaauug

SEQ ID NO: 2000625 - RNA, 19 nt, Artificial Sequence
  Description of Artificial Sequence: Synthetic oligonucleotide
  Antisense strand to SEQ ID NO: 2000624
caauucagaguaaguccac

SEQ ID NO: 2000626 - RNA, 19 nt, Artificial Sequence
  Description of Artificial Sequence: Synthetic oligonucleotide
  Sense strand starting at position 1312 of SEQ ID NO: 1880875
guuucuugcgugagaucga

SEQ ID NO: 2000627 - RNA, 19 nt, Artificial Sequence
  Description of Artificial Sequence: Synthetic oligonucleotide
  Antisense strand to SEQ ID NO: 2000626
ucgaucucacgcaagaaac

SEQ ID NO: 2000628 - RNA, 19 nt, Artificial Sequence
  Description of Artificial Sequence: Synthetic oligonucleotide
  Sense strand starting at position 1384 of SEQ ID NO: 1880875
uugggcugaucuccaagau

SEQ ID NO: 2000629 - RNA, 19 nt, Artificial Sequence
  Description of Artificial Sequence: Synthetic oligonucleotide
  Antisense strand to SEQ ID NO: 2000628
aucuuggagaucagcccaa

SEQ ID NO: 2000630 - RNA, 19 nt, Artificial Sequence
  Description of Artificial Sequence: Synthetic oligonucleotide
  Sense strand starting at position 1385 of SEQ ID NO: 1880875
ugggcugaucuccaagauu

SEQ ID NO: 2000631 - RNA, 19 nt, Artificial Sequence
  Description of Artificial Sequence: Synthetic oligonucleotide
  Antisense strand to SEQ ID NO: 2000630
aaucuuggagaucagccca

SEQ ID NO: 2000632 - RNA, 19 nt, Artificial Sequence
  Description of Artificial Sequence: Synthetic oligonucleotide
  Sense strand starting at position 2034 of SEQ ID NO: 1880875
ucacaaacuguaugucauu

SEQ ID NO: 2000633 - RNA, 19 nt, Artificial Sequence
  Description of Artificial Sequence: Synthetic oligonucleotide
  Antisense strand to SEQ ID NO: 2000632
aaugacauacaguuuguga

SEQ ID NO: 2000634 - RNA, 19 nt, Artificial Sequence
  Description of Artificial Sequence: Synthetic oligonucleotide
  Sense strand starting at position 2194 of SEQ ID NO: 1880875
ggcaucgugcucuccgauu

SEQ ID NO: 2000635 - RNA, 19 nt, Artificial Sequence
  Description of Artificial Sequence: Synthetic oligonucleotide
  Antisense strand to SEQ ID NO: 2000634
aaucggagagcacgaugcc

SEQ ID NO: 2000636 - RNA, 19 nt, Artificial Sequence
  Description of Artificial Sequence: Synthetic oligonucleotide
  Sense strand starting at position 2751 of SEQ ID NO: 1880875
gcugcagcucgggauuuaa

SEQ ID NO: 2000637 - RNA, 19 nt, Artificial Sequence
  Description of Artificial Sequence: Synthetic oligonucleotide
  Antisense strand to SEQ ID NO: 2000636
uuaaaucccgagcugcagc

SEQ ID NO: 2000638 - RNA, 19 nt, Artificial Sequence
  Description of Artificial Sequence: Synthetic oligonucleotide
  Sense strand starting at position 2911 of SEQ ID NO: 1880875
gguagaaauuugccgguga

SEQ ID NO: 2000639 - RNA, 19 nt, Artificial Sequence
  Description of Artificial Sequence: Synthetic oligonucleotide
  Antisense strand to SEQ ID NO: 2000638
ucaccggcaaauuucuacc

SEQ ID NO: 2000640 - RNA, 19 nt, Artificial Sequence
  Description of Artificial Sequence: Synthetic oligonucleotide
  Sense strand starting at position 2915 of SEQ ID NO: 1880875
gaaauuugccggugaccuu

SEQ ID NO: 2000641 - RNA, 19 nt, Artificial Sequence
  Description of Artificial Sequence: Synthetic oligonucleotide
  Antisense strand to SEQ ID NO: 2000640
aaggucaccggcaaauuuc

SEQ ID NO: 2000642 - RNA, 19 nt, Artificial Sequence
  Description of Artificial Sequence: Synthetic oligonucleotide
  Sense strand starting at position 3022 of SEQ ID NO: 1880875
gcgggugugcauucauugu

SEQ ID NO: 2000643 - RNA, 19 nt, Artificial Sequence
  Description of Artificial Sequence: Synthetic oligonucleotide
  Antisense strand to SEQ ID NO: 2000642
acaaugaaugcacacccgc

SEQ ID NO: 2000644 - RNA, 19 nt, Artificial Sequence
  Description of Artificial Sequence: Synthetic oligonucleotide
  Sense strand starting at position 3618 of SEQ ID NO: 1880875
uuguguaauccugagagcu

SEQ ID NO: 2000645 - RNA, 19 nt, Artificial Sequence
  Description of Artificial Sequence: Synthetic oligonucleotide
  Antisense strand to SEQ ID NO: 2000644
agcucucaggauuacacaa

SEQ ID NO: 2000646 - RNA, 19 nt, Artificial Sequence
  Description of Artificial Sequence: Synthetic oligonucleotide
  Sense strand starting at position 3695 of SEQ ID NO: 1880875
ccagcugucacuuggagaa

SEQ ID NO: 2000647 - RNA, 19 nt, Artificial Sequence
  Description of Artificial Sequence: Synthetic oligonucleotide
  Antisense strand to SEQ ID NO: 2000646
uucuccaagugacagcugg

SEQ ID NO: 2000648 - RNA, 19 nt, Artificial Sequence
  Description of Artificial Sequence: Synthetic oligonucleotide
  Sense strand starting at position 3820 of SEQ ID NO: 1880875
uuggauauucuggguuaug

SEQ ID NO: 2000649 - RNA, 19 nt, Artificial Sequence
  Description of Artificial Sequence: Synthetic oligonucleotide
  Antisense strand to SEQ ID NO: 2000648
cauaacccagaauauccaa

SEQ ID NO: 2000650 - RNA, 19 nt, Artificial Sequence
  Description of Artificial Sequence: Synthetic oligonucleotide
  Sense strand starting at position 3821 of SEQ ID NO: 1880875
uggauauucuggguuauga

SEQ ID NO: 2000651 - RNA, 19 nt, Artificial Sequence
  Description of Artificial Sequence: Synthetic oligonucleotide
  Antisense strand to SEQ ID NO: 2000650
ucauaacccagaauaucca

SEQ ID NO: 2000652 - RNA, 19 nt, Artificial Sequence
  Description of Artificial Sequence: Synthetic oligonucleotide
  Sense strand starting at position 3829 of SEQ ID NO: 1880875
cuggguuaugaucagcauu

SEQ ID NO: 2000653 - RNA, 19 nt, Artificial Sequence
  Description of Artificial Sequence: Synthetic oligonucleotide
  Antisense strand to SEQ ID NO: 2000652
aaugcugaucauaacccag

SEQ ID NO: 2000654 - RNA, 19 nt, Artificial Sequence
  Description of Artificial Sequence: Synthetic oligonucleotide
  Sense strand starting at position 3839 of SEQ ID NO: 1880875
aucagcauuucuucgucua

SEQ ID NO: 2000655 - RNA, 19 nt, Artificial Sequence
  Description of Artificial Sequence: Synthetic oligonucleotide
  Antisense strand to SEQ ID NO: 2000654
uagacgaagaaaugcugau

SEQ ID NO: 2000656 - RNA, 19 nt, Artificial Sequence
  Description of Artificial Sequence: Synthetic oligonucleotide
  Sense strand starting at position 3956 of SEQ ID NO: 1880875
uuuggacaguucuuauaau

SEQ ID NO: 2000657 - RNA, 19 nt, Artificial Sequence
  Description of Artificial Sequence: Synthetic oligonucleotide
  Antisense strand to SEQ ID NO: 2000656
auuauaagaacuguccaaa

SEQ ID NO: 2000658 - RNA, 19 nt, Artificial Sequence
  Description of Artificial Sequence: Synthetic oligonucleotide
  Sense strand starting at position 19 of SEQ ID NO: 1880876
ccugaaauauuccugauug

SEQ ID NO: 2000659 - RNA, 19 nt, Artificial Sequence
  Description of Artificial Sequence: Synthetic oligonucleotide
  Antisense strand to SEQ ID NO: 2000658
caaucaggaauauuucagg

SEQ ID NO: 2000660 - RNA, 19 nt, Artificial Sequence
  Description of Artificial Sequence: Synthetic oligonucleotide
  Sense strand starting at position 56 of SEQ ID NO: 1880876
gacucuuccuaguuaggga

SEQ ID NO: 2000661 - RNA, 19 nt, Artificial Sequence
  Description of Artificial Sequence: Synthetic oligonucleotide
  Antisense strand to SEQ ID NO: 2000660
ucccuaacuaggaagaguc

SEQ ID NO: 2000662 - RNA, 19 nt, Artificial Sequence
  Description of Artificial Sequence: Synthetic oligonucleotide
  Sense strand starting at position 152 of SEQ ID NO: 1880876
acagaaucaguccggagaa

SEQ ID NO: 2000663 - RNA, 19 nt, Artificial Sequence
  Description of Artificial Sequence: Synthetic oligonucleotide
  Antisense strand to SEQ ID NO: 2000662
uucuccggacugauucugu

SEQ ID NO: 2000664 - RNA, 19 nt, Artificial Sequence
  Description of Artificial Sequence: Synthetic oligonucleotide
  Sense strand starting at position 266 of SEQ ID NO: 1880876
ccgcuauggagcuacagau

SEQ ID NO: 2000665 - RNA, 19 nt, Artificial Sequence
  Description of Artificial Sequence: Synthetic oligonucleotide
  Antisense strand to SEQ ID NO: 2000664
aucuguagcuccauagcgg

SEQ ID NO: 2000666 - RNA, 19 nt, Artificial Sequence
  Description of Artificial Sequence: Synthetic oligonucleotide
  Sense strand starting at position 326 of SEQ ID NO: 1880876
cuauuucuccauugcgauu

SEQ ID NO: 2000667 - RNA, 19 nt, Artificial Sequence
  Description of Artificial Sequence: Synthetic oligonucleotide
  Antisense strand to SEQ ID NO: 2000666
aaucgcaauggagaaauag

SEQ ID NO: 2000668 - RNA, 19 nt, Artificial Sequence
  Description of Artificial Sequence: Synthetic oligonucleotide
  Sense strand starting at position 340 of SEQ ID NO: 1880876
cgauuaaguccaugcauau

SEQ ID NO: 2000669 - RNA, 19 nt, Artificial Sequence
  Description of Artificial Sequence: Synthetic oligonucleotide
  Antisense strand to SEQ ID NO: 2000668
auaugcauggacuuaaucg

SEQ ID NO: 2000670 - RNA, 19 nt, Artificial Sequence
  Description of Artificial Sequence: Synthetic oligonucleotide
  Sense strand starting at position 616 of SEQ ID NO: 1880876
ccacuaugagacuggaguu

SEQ ID NO: 2000671 - RNA, 19 nt, Artificial Sequence
  Description of Artificial Sequence: Synthetic oligonucleotide
  Antisense strand to SEQ ID NO: 2000670
aacuccagucucauagugg

SEQ ID NO: 2000672 - RNA, 19 nt, Artificial Sequence
  Description of Artificial Sequence: Synthetic oligonucleotide
  Sense strand starting at position 671 of SEQ ID NO: 1880876
ccgggaucagaguguuuaa

SEQ ID NO: 2000673 - RNA, 19 nt, Artificial Sequence
  Description of Artificial Sequence: Synthetic oligonucleotide
  Antisense strand to SEQ ID NO: 2000672
uuaaacacucugaucccgg

SEQ ID NO: 2000674 - RNA, 19 nt, Artificial Sequence
  Description of Artificial Sequence: Synthetic oligonucleotide
  Sense strand starting at position 735 of SEQ ID NO: 1880876
acugguugggucgagauga

SEQ ID NO: 2000675 - RNA, 19 nt, Artificial Sequence
  Description of Artificial Sequence: Synthetic oligonucleotide
  Antisense strand to SEQ ID NO: 2000674
ucaucucgacccaaccagu

SEQ ID NO: 2000676 - RNA, 19 nt, Artificial Sequence
  Description of Artificial Sequence: Synthetic oligonucleotide
  Sense strand starting at position 737 of SEQ ID NO: 1880876
ugguugggucgagaugaaa

SEQ ID NO: 2000677 - RNA, 19 nt, Artificial Sequence
  Description of Artificial Sequence: Synthetic oligonucleotide
  Antisense strand to SEQ ID NO: 2000676
uuucaucucgacccaacca

SEQ ID NO: 2000678 - RNA, 19 nt, Artificial Sequence
  Description of Artificial Sequence: Synthetic oligonucleotide
  Sense strand starting at position 996 of SEQ ID NO: 1880876
gcagucuaguucccagaua

SEQ ID NO: 2000679 - RNA, 19 nt, Artificial Sequence
  Description of Artificial Sequence: Synthetic oligonucleotide
  Antisense strand to SEQ ID NO: 2000678
uaucugggaacuagacugc

SEQ ID NO: 2000680 - RNA, 19 nt, Artificial Sequence
  Description of Artificial Sequence: Synthetic oligonucleotide
  Sense strand starting at position 2343 of SEQ ID NO: 1880876
ggucguuggcccuuguuua

SEQ ID NO: 2000681 - RNA, 19 nt, Artificial Sequence
  Description of Artificial Sequence: Synthetic oligonucleotide
  Antisense strand to SEQ ID NO: 2000680
uaaacaagggccaacgacc

SEQ ID NO: 2000682 - RNA, 19 nt, Artificial Sequence
  Description of Artificial Sequence: Synthetic oligonucleotide
  Sense strand starting at position 2379 of SEQ ID NO: 1880876
uggcaauacagucgauuga

SEQ ID NO: 2000683 - RNA, 19 nt, Artificial Sequence
  Description of Artificial Sequence: Synthetic oligonucleotide
  Antisense strand to SEQ ID NO: 2000682
ucaaucgacuguauugcca

SEQ ID NO: 2000684 - RNA, 19 nt, Artificial Sequence
  Description of Artificial Sequence: Synthetic oligonucleotide
  Sense strand starting at position 2380 of SEQ ID NO: 1880876
ggcaauacagucgauugaa

SEQ ID NO: 2000685 - RNA, 19 nt, Artificial Sequence
  Description of Artificial Sequence: Synthetic oligonucleotide
  Antisense strand to SEQ ID NO: 2000684
uucaaucgacuguauugcc

SEQ ID NO: 2000686 - RNA, 19 nt, Artificial Sequence
  Description of Artificial Sequence: Synthetic oligonucleotide
  Sense strand starting at position 2405 of SEQ ID NO: 1880876
ucagcaaaccgcguuguua

SEQ ID NO: 2000687 - RNA, 19 nt, Artificial Sequence
  Description of Artificial Sequence: Synthetic oligonucleotide
  Antisense strand to SEQ ID NO: 2000686
uaacaacgcgguuugcuga

SEQ ID NO: 2000688 - RNA, 19 nt, Artificial Sequence
  Description of Artificial Sequence: Synthetic oligonucleotide
  Sense strand starting at position 2406 of SEQ ID NO: 1880876
cagcaaaccgcguuguuau

SEQ ID NO: 2000689 - RNA, 19 nt, Artificial Sequence
  Description of Artificial Sequence: Synthetic oligonucleotide
  Antisense strand to SEQ ID NO: 2000688
auaacaacgcgguuugcug

SEQ ID NO: 2000690 - RNA, 19 nt, Artificial Sequence
  Description of Artificial Sequence: Synthetic oligonucleotide
  Sense strand starting at position 2423 of SEQ ID NO: 1880876
auuugucucugugugucaa

SEQ ID NO: 2000691 - RNA, 19 nt, Artificial Sequence
  Description of Artificial Sequence: Synthetic oligonucleotide
  Antisense strand to SEQ ID NO: 2000690
uugacacacagagacaaau

SEQ ID NO: 2000692 - RNA, 19 nt, Artificial Sequence
  Description of Artificial Sequence: Synthetic oligonucleotide
  Sense strand starting at position 2442 of SEQ ID NO: 1880876
uuugcauuugucggguuau

SEQ ID NO: 2000693 - RNA, 19 nt, Artificial Sequence
  Description of Artificial Sequence: Synthetic oligonucleotide
  Antisense strand to SEQ ID NO: 2000692
auaacccgacaaaugcaaa

SEQ ID NO: 2000694 - RNA, 19 nt, Artificial Sequence
  Description of Artificial Sequence: Synthetic oligonucleotide
  Sense strand starting at position 2583 of SEQ ID NO: 1880876
ucauguaaucuguaaucuu

SEQ ID NO: 2000695 - RNA, 19 nt, Artificial Sequence
  Description of Artificial Sequence: Synthetic oligonucleotide
  Antisense strand to SEQ ID NO: 2000694
aagauuacagauuacauga

SEQ ID NO: 2000696 - RNA, 19 nt, Artificial Sequence
  Description of Artificial Sequence: Synthetic oligonucleotide
  Sense strand starting at position 2658 of SEQ ID NO: 1880876
gugggcugcuauuugcaaa

SEQ ID NO: 2000697 - RNA, 19 nt, Artificial Sequence
  Description of Artificial Sequence: Synthetic oligonucleotide
  Antisense strand to SEQ ID NO: 2000696
uuugcaaauagcagcccac

SEQ ID NO: 2000698 - RNA, 19 nt, Artificial Sequence
  Description of Artificial Sequence: Synthetic oligonucleotide
  Sense strand starting at position 2694 of SEQ ID NO: 1880876
gggacucaggccugugaga

SEQ ID NO: 2000699 - RNA, 19 nt, Artificial Sequence
  Description of Artificial Sequence: Synthetic oligonucleotide
  Antisense strand to SEQ ID NO: 2000698
ucucacaggccugaguccc

SEQ ID NO: 2000700 - RNA, 19 nt, Artificial Sequence
  Description of Artificial Sequence: Synthetic oligonucleotide
  Sense strand starting at position 2696 of SEQ ID NO: 1880876
gacucaggccugugagaaa

SEQ ID NO: 2000701 - RNA, 19 nt, Artificial Sequence
  Description of Artificial Sequence: Synthetic oligonucleotide
  Antisense strand to SEQ ID NO: 2000700
uuucucacaggccugaguc

SEQ ID NO: 2000702 - RNA, 19 nt, Artificial Sequence
  Description of Artificial Sequence: Synthetic oligonucleotide
  Sense strand starting at position 2719 of SEQ ID NO: 1880876
aggagagcccucugucauc

SEQ ID NO: 2000703 - RNA, 19 nt, Artificial Sequence
  Description of Artificial Sequence: Synthetic oligonucleotide
  Antisense strand to SEQ ID NO: 2000702
gaugacagagggcucuccu

SEQ ID NO: 2000704 - RNA, 19 nt, Artificial Sequence
  Description of Artificial Sequence: Synthetic oligonucleotide
  Sense strand starting at position 2839 of SEQ ID NO: 1880876
cgacguuaacuagaacuuu

SEQ ID NO: 2000705 - RNA, 19 nt, Artificial Sequence
  Description of Artificial Sequence: Synthetic oligonucleotide
  Antisense strand to SEQ ID NO: 2000704
aaaguucuaguuaacgucg

SEQ ID NO: 2000706 - RNA, 19 nt, Artificial Sequence
  Description of Artificial Sequence: Synthetic oligonucleotide
  Sense strand starting at position 2857 of SEQ ID NO: 1880876
ugggaauagugucccauua

SEQ ID NO: 2000707 - RNA, 19 nt, Artificial Sequence
  Description of Artificial Sequence: Synthetic oligonucleotide
  Antisense strand to SEQ ID NO: 2000706
uaaugggacacuauuccca

SEQ ID NO: 2000708 - RNA, 19 nt, Artificial Sequence
  Description of Artificial Sequence: Synthetic oligonucleotide
  Sense strand starting at position 2935 of SEQ ID NO: 1880876
uuuguuaaucuguaguucu

SEQ ID NO: 2000709 - RNA, 19 nt, Artificial Sequence
  Description of Artificial Sequence: Synthetic oligonucleotide
  Antisense strand to SEQ ID NO: 2000708
agaacuacagauuaacaaa

SEQ ID NO: 2000710 - RNA, 19 nt, Artificial Sequence
  Description of Artificial Sequence: Synthetic oligonucleotide
  Sense strand starting at position 2947 of SEQ ID NO: 1880876
uaguucugagacuguaguu

SEQ ID NO: 2000711 - RNA, 19 nt, Artificial Sequence
  Description of Artificial Sequence: Synthetic oligonucleotide
  Antisense strand to SEQ ID NO: 2000710
aacuacagucucagaacua

SEQ ID NO: 2000712 - RNA, 19 nt, Artificial Sequence
  Description of Artificial Sequence: Synthetic oligonucleotide
  Sense strand starting at position 2960 of SEQ ID NO: 1880876
guaguuuccagguaauguc

SEQ ID NO: 2000713 - RNA, 19 nt, Artificial Sequence
  Description of Artificial Sequence: Synthetic oligonucleotide
  Antisense strand to SEQ ID NO: 2000712
gacauuaccuggaaacuac

SEQ ID NO: 2000714 - RNA, 19 nt, Artificial Sequence
  Description of Artificial Sequence: Synthetic oligonucleotide
  Sense strand starting at position 2982 of SEQ ID NO: 1880876
gggaaacuuugcuuugguu

SEQ ID NO: 2000715 - RNA, 19 nt, Artificial Sequence
  Description of Artificial Sequence: Synthetic oligonucleotide
  Antisense strand to SEQ ID NO: 2000714
aaccaaagcaaaguuuccc

SEQ ID NO: 2000716 - RNA, 19 nt, Artificial Sequence
  Description of Artificial Sequence: Synthetic oligonucleotide
  Sense strand starting at position 3007 of SEQ ID NO: 1880876
uuaccuugugucuguauuu

SEQ ID NO: 2000717 - RNA, 19 nt, Artificial Sequence
  Description of Artificial Sequence: Synthetic oligonucleotide
  Antisense strand to SEQ ID NO: 2000716
aaauacagacacaagguaa

SEQ ID NO: 2000718 - RNA, 19 nt, Artificial Sequence
  Description of Artificial Sequence: Synthetic oligonucleotide
  Sense strand starting at position 3070 of SEQ ID NO: 1880876
aguacuuugccgugauuuc

SEQ ID NO: 2000719 - RNA, 19 nt, Artificial Sequence
  Description of Artificial Sequence: Synthetic oligonucleotide
  Antisense strand to SEQ ID NO: 2000718
gaaaucacggcaaaguacu

SEQ ID NO: 2000720 - RNA, 19 nt, Artificial Sequence
  Description of Artificial Sequence: Synthetic oligonucleotide
  Sense strand starting at position 3234 of SEQ ID NO: 1880876
cugugugggagguguaaca

SEQ ID NO: 2000721 - RNA, 19 nt, Artificial Sequence
  Description of Artificial Sequence: Synthetic oligonucleotide
  Antisense strand to SEQ ID NO: 2000720
uguuacaccucccacacag

SEQ ID NO: 2000722 - RNA, 19 nt, Artificial Sequence
  Description of Artificial Sequence: Synthetic oligonucleotide
  Sense strand starting at position 3283 of SEQ ID NO: 1880876
cuaugaauuguggguaaau

SEQ ID NO: 2000723 - RNA, 19 nt, Artificial Sequence
  Description of Artificial Sequence: Synthetic oligonucleotide
  Antisense strand to SEQ ID NO: 2000722
auuuacccacaauucauag

SEQ ID NO: 2000724 - RNA, 19 nt, Artificial Sequence
  Description of Artificial Sequence: Synthetic oligonucleotide
  Sense strand starting at position 3284 of SEQ ID NO: 1880876
uaugaauuguggguaaaug

SEQ ID NO: 2000725 - RNA, 19 nt, Artificial Sequence
  Description of Artificial Sequence: Synthetic oligonucleotide
  Antisense strand to SEQ ID NO: 2000724
cauuuacccacaauucaua

SEQ ID NO: 2000726 - RNA, 19 nt, Artificial Sequence
  Description of Artificial Sequence: Synthetic oligonucleotide
  Sense strand starting at position 3300 of SEQ ID NO: 1880876
augcaagucuaucuuaaga

SEQ ID NO: 2000727 - RNA, 19 nt, Artificial Sequence
  Description of Artificial Sequence: Synthetic oligonucleotide
  Antisense strand to SEQ ID NO: 2000726
ucuuaagauagacuugcau

SEQ ID NO: 2000728 - RNA, 19 nt, Artificial Sequence
  Description of Artificial Sequence: Synthetic oligonucleotide
  Sense strand starting at position 3411 of SEQ ID NO: 1880876
cuaucaaagcgugauaggu

SEQ ID NO: 2000729 - RNA, 19 nt, Artificial Sequence
  Description of Artificial Sequence: Synthetic oligonucleotide
  Antisense strand to SEQ ID NO: 2000728
accuaucacgcuuugauag

SEQ ID NO: 2000730 - RNA, 19 nt, Artificial Sequence
  Description of Artificial Sequence: Synthetic oligonucleotide
  Sense strand starting at position 3415 of SEQ ID NO: 1880876
caaagcgugauagguauuu

SEQ ID NO: 2000731 - RNA, 19 nt, Artificial Sequence
  Description of Artificial Sequence: Synthetic oligonucleotide
  Antisense strand to SEQ ID NO: 2000730
aaauaccuaucacgcuuug

SEQ ID NO: 2000732 - RNA, 19 nt, Artificial Sequence
  Description of Artificial Sequence: Synthetic oligonucleotide
  Sense strand starting at position 3464 of SEQ ID NO: 1880876
cuuggccauugguuauaau

SEQ ID NO: 2000733 - RNA, 19 nt, Artificial Sequence
  Description of Artificial Sequence: Synthetic oligonucleotide
  Antisense strand to SEQ ID NO: 2000732
auuauaaccaauggccaag

SEQ ID NO: 2000734 - RNA, 19 nt, Artificial Sequence
  Description of Artificial Sequence: Synthetic oligonucleotide
  Sense strand starting at position 3487 of SEQ ID NO: 1880876
gucucuugggugugggaaa

SEQ ID NO: 2000735 - RNA, 19 nt, Artificial Sequence
  Description of Artificial Sequence: Synthetic oligonucleotide
  Antisense strand to SEQ ID NO: 2000734
uuucccacacccaagagac

SEQ ID NO: 2000736 - RNA, 19 nt, Artificial Sequence
  Description of Artificial Sequence: Synthetic oligonucleotide
  Sense strand starting at position 3962 of SEQ ID NO: 1880876
auccuuguuccacaguuaa

SEQ ID NO: 2000737 - RNA, 19 nt, Artificial Sequence
  Description of Artificial Sequence: Synthetic oligonucleotide
  Antisense strand to SEQ ID NO: 2000736
uuaacuguggaacaaggau

SEQ ID NO: 2000738 - RNA, 19 nt, Artificial Sequence
  Description of Artificial Sequence: Synthetic oligonucleotide
  Sense strand starting at position 59 of SEQ ID NO: 1880877
caagucucuguagagaagu

SEQ ID NO: 2000739 - RNA, 19 nt, Artificial Sequence
  Description of Artificial Sequence: Synthetic oligonucleotide
  Antisense strand to SEQ ID NO: 2000738
acuucucuacagagacuug

SEQ ID NO: 2000740 - RNA, 19 nt, Artificial Sequence
  Description of Artificial Sequence: Synthetic oligonucleotide
  Sense strand starting at position 76 of SEQ ID NO: 1880877
guagaagugaccuaugagc

SEQ ID NO: 2000741 - RNA, 19 nt, Artificial Sequence
  Description of Artificial Sequence: Synthetic oligonucleotide
  Antisense strand to SEQ ID NO: 2000740
gcucauaggucacuucuac

SEQ ID NO: 2000742 - RNA, 19 nt, Artificial Sequence
  Description of Artificial Sequence: Synthetic oligonucleotide
  Sense strand starting at position 78 of SEQ ID NO: 1880877
agaagugaccuaugagcau

SEQ ID NO: 2000743 - RNA, 19 nt, Artificial Sequence
  Description of Artificial Sequence: Synthetic oligonucleotide
  Antisense strand to SEQ ID NO: 2000742
augcucauaggucacuucu

SEQ ID NO: 2000744 - RNA, 19 nt, Artificial Sequence
  Description of Artificial Sequence: Synthetic oligonucleotide
  Sense strand starting at position 87 of SEQ ID NO: 1880877
cuaugagcaucucuggaca

SEQ ID NO: 2000745 - RNA, 19 nt, Artificial Sequence
  Description of Artificial Sequence: Synthetic oligonucleotide
  Antisense strand to SEQ ID NO: 2000744
uguccagagaugcucauag

SEQ ID NO: 2000746 - RNA, 19 nt, Artificial Sequence
  Description of Artificial Sequence: Synthetic oligonucleotide
  Sense strand starting at position 384 of SEQ ID NO: 1880877
ccuacaguuggagauguuu

SEQ ID NO: 2000747 - RNA, 19 nt, Artificial Sequence
  Description of Artificial Sequence: Synthetic oligonucleotide
  Antisense strand to SEQ ID NO: 2000746
aaacaucuccaacuguagg

SEQ ID NO: 2000748 - RNA, 19 nt, Artificial Sequence
  Description of Artificial Sequence: Synthetic oligonucleotide
  Sense strand starting at position 579 of SEQ ID NO: 1880877
cuccauaaccaggagucuu

SEQ ID NO: 2000749 - RNA, 19 nt, Artificial Sequence
  Description of Artificial Sequence: Synthetic oligonucleotide
  Antisense strand to SEQ ID NO: 2000748
aagacuccugguuauggag

SEQ ID NO: 2000750 - RNA, 19 nt, Artificial Sequence
  Description of Artificial Sequence: Synthetic oligonucleotide
  Sense strand starting at position 587 of SEQ ID NO: 1880877
ccaggagucuuucugaccu

SEQ ID NO: 2000751 - RNA, 19 nt, Artificial Sequence
  Description of Artificial Sequence: Synthetic oligonucleotide
  Antisense strand to SEQ ID NO: 2000750
aggucagaaagacuccugg

SEQ ID NO: 2000752 - RNA, 19 nt, Artificial Sequence
  Description of Artificial Sequence: Synthetic oligonucleotide
  Sense strand starting at position 591 of SEQ ID NO: 1880877
gagucuuucugaccuugaa

SEQ ID NO: 2000753 - RNA, 19 nt, Artificial Sequence
  Description of Artificial Sequence: Synthetic oligonucleotide
  Antisense strand to SEQ ID NO: 2000752
uucaaggucagaaagacuc

SEQ ID NO: 2000754 - RNA, 19 nt, Artificial Sequence
  Description of Artificial Sequence: Synthetic oligonucleotide
  Sense strand starting at position 594 of SEQ ID NO: 1880877
ucuuucugaccuugaagaa

SEQ ID NO: 2000755 - RNA, 19 nt, Artificial Sequence
  Description of Artificial Sequence: Synthetic oligonucleotide
  Antisense strand to SEQ ID NO: 2000754
uucuucaaggucagaaaga

SEQ ID NO: 2000756 - RNA, 19 nt, Artificial Sequence
  Description of Artificial Sequence: Synthetic oligonucleotide
  Sense strand starting at position 998 of SEQ ID NO: 1880877
uauagaaaucuuugagguc

SEQ ID NO: 2000757 - RNA, 19 nt, Artificial Sequence
  Description of Artificial Sequence: Synthetic oligonucleotide
  Antisense strand to SEQ ID NO: 2000756
gaccucaaagauuucuaua

SEQ ID NO: 2000758 - RNA, 19 nt, Artificial Sequence
  Description of Artificial Sequence: Synthetic oligonucleotide
  Sense strand starting at position 1075 of SEQ ID NO: 1880877
cuuaucaaguacuugucaa

SEQ ID NO: 2000759 - RNA, 19 nt, Artificial Sequence
  Description of Artificial Sequence: Synthetic oligonucleotide
  Antisense strand to SEQ ID NO: 2000758
uugacaaguacuugauaag

SEQ ID NO: 2000760 - RNA, 19 nt, Artificial Sequence
  Description of Artificial Sequence: Synthetic oligonucleotide
  Sense strand starting at position 1095 of SEQ ID NO: 1880877
cccgcauugggugagacau

SEQ ID NO: 2000761 - RNA, 19 nt, Artificial Sequence
  Description of Artificial Sequence: Synthetic oligonucleotide
  Antisense strand to SEQ ID NO: 2000760
augucucacccaaugcggg

SEQ ID NO: 2000762 - RNA, 19 nt, Artificial Sequence
  Description of Artificial Sequence: Synthetic oligonucleotide
  Sense strand starting at position 1147 of SEQ ID NO: 1880877
uccaucagugagggauaau

SEQ ID NO: 2000763 - RNA, 19 nt, Artificial Sequence
  Description of Artificial Sequence: Synthetic oligonucleotide
  Antisense strand to SEQ ID NO: 2000762
auuaucccucacugaugga

SEQ ID NO: 2000764 - RNA, 19 nt, Artificial Sequence
  Description of Artificial Sequence: Synthetic oligonucleotide
  Sense strand starting at position 1192 of SEQ ID NO: 1880877
aaacaugguuuaucaaggu

SEQ ID NO: 2000765 - RNA, 19 nt, Artificial Sequence
  Description of Artificial Sequence: Synthetic oligonucleotide
  Antisense strand to SEQ ID NO: 2000764
accuugauaaaccauguuu

SEQ ID NO: 2000766 - RNA, 19 nt, Artificial Sequence
  Description of Artificial Sequence: Synthetic oligonucleotide
  Sense strand starting at position 1196 of SEQ ID NO: 1880877
augguuuaucaaggucaca

SEQ ID NO: 2000767 - RNA, 19 nt, Artificial Sequence
  Description of Artificial Sequence: Synthetic oligonucleotide
  Antisense strand to SEQ ID NO: 2000766
ugugaccuugauaaaccau

SEQ ID NO: 2000768 - RNA, 19 nt, Artificial Sequence
  Description of Artificial Sequence: Synthetic oligonucleotide
  Sense strand starting at position 1272 of SEQ ID NO: 1880877
gguucugucaggugagaga

SEQ ID NO: 2000769 - RNA, 19 nt, Artificial Sequence
  Description of Artificial Sequence: Synthetic oligonucleotide
  Antisense strand to SEQ ID NO: 2000768
ucucucaccugacagaacc

SEQ ID NO: 2000770 - RNA, 19 nt, Artificial Sequence
  Description of Artificial Sequence: Synthetic oligonucleotide
  Sense strand starting at position 1575 of SEQ ID NO: 1880877
gcggaucaugcuggaaaga

SEQ ID NO: 2000771 - RNA, 19 nt, Artificial Sequence
  Description of Artificial Sequence: Synthetic oligonucleotide
  Antisense strand to SEQ ID NO: 2000770
ucuuuccagcaugauccgc

SEQ ID NO: 2000772 - RNA, 19 nt, Artificial Sequence
  Description of Artificial Sequence: Synthetic oligonucleotide
  Sense strand starting at position 1626 of SEQ ID NO: 1880877
ccagacgacccaugaagua

SEQ ID NO: 2000773 - RNA, 19 nt, Artificial Sequence
  Description of Artificial Sequence: Synthetic oligonucleotide
  Antisense strand to SEQ ID NO: 2000772
uacuucaugggucgucugg

SEQ ID NO: 2000774 - RNA, 19 nt, Artificial Sequence
  Description of Artificial Sequence: Synthetic oligonucleotide
  Sense strand starting at position 2134 of SEQ ID NO: 1880877
uggugaggguucucuacuu

SEQ ID NO: 2000775 - RNA, 19 nt, Artificial Sequence
  Description of Artificial Sequence: Synthetic oligonucleotide
  Antisense strand to SEQ ID NO: 2000774
aaguagagaacccucacca

SEQ ID NO: 2000776 - RNA, 19 nt, Artificial Sequence
  Description of Artificial Sequence: Synthetic oligonucleotide
  Sense strand starting at position 2401 of SEQ ID NO: 1880877
uagucucagugguuaagag

SEQ ID NO: 2000777 - RNA, 19 nt, Artificial Sequence
  Description of Artificial Sequence: Synthetic oligonucleotide
  Antisense strand to SEQ ID NO: 2000776
cucuuaaccacugagacua

SEQ ID NO: 2000778 - RNA, 19 nt, Artificial Sequence
  Description of Artificial Sequence: Synthetic oligonucleotide
  Sense strand starting at position 2423 of SEQ ID NO: 1880877
aggcuugugaaccagacuu

SEQ ID NO: 2000779 - RNA, 19 nt, Artificial Sequence
  Description of Artificial Sequence: Synthetic oligonucleotide
  Antisense strand to SEQ ID NO: 2000778
aagucugguucacaagccu

SEQ ID NO: 2000780 - RNA, 19 nt, Artificial Sequence
  Description of Artificial Sequence: Synthetic oligonucleotide
  Sense strand starting at position 2555 of SEQ ID NO: 1880877
gguuaaguagcuuaacugu

SEQ ID NO: 2000781 - RNA, 19 nt, Artificial Sequence
  Description of Artificial Sequence: Synthetic oligonucleotide
  Antisense strand to SEQ ID NO: 2000780
acaguuaagcuacuuaacc

SEQ ID NO: 2000782 - RNA, 19 nt, Artificial Sequence
  Description of Artificial Sequence: Synthetic oligonucleotide
  Sense strand starting at position 2594 of SEQ ID NO: 1880877
aaaugacagcuccguuaac

SEQ ID NO: 2000783 - RNA, 19 nt, Artificial Sequence
  Description of Artificial Sequence: Synthetic oligonucleotide
  Antisense strand to SEQ ID NO: 2000782
guuaacggagcugucauuu

SEQ ID NO: 2000784 - RNA, 19 nt, Artificial Sequence
  Description of Artificial Sequence: Synthetic oligonucleotide
  Sense strand starting at position 2692 of SEQ ID NO: 1880877
accucauggaguugaagau

SEQ ID NO: 2000785 - RNA, 19 nt, Artificial Sequence
  Description of Artificial Sequence: Synthetic oligonucleotide
  Antisense strand to SEQ ID NO: 2000784
aucuucaacuccaugaggu

SEQ ID NO: 2000786 - RNA, 19 nt, Artificial Sequence
  Description of Artificial Sequence: Synthetic oligonucleotide
  Sense strand starting at position 2712 of SEQ ID NO: 1880877
aaaugagauguacaguguu

SEQ ID NO: 2000787 - RNA, 19 nt, Artificial Sequence
  Description of Artificial Sequence: Synthetic oligonucleotide
  Antisense strand to SEQ ID NO: 2000786
aacacuguacaucucauuu

SEQ ID NO: 2000788 - RNA, 19 nt, Artificial Sequence
  Description of Artificial Sequence: Synthetic oligonucleotide
  Sense strand starting at position 2715 of SEQ ID NO: 1880877
ugagauguacaguguuuaa

SEQ ID NO: 2000789 - RNA, 19 nt, Artificial Sequence
  Description of Artificial Sequence: Synthetic oligonucleotide
  Antisense strand to SEQ ID NO: 2000788
uuaaacacuguacaucuca

SEQ ID NO: 2000790 - RNA, 19 nt, Artificial Sequence
  Description of Artificial Sequence: Synthetic oligonucleotide
  Sense strand starting at position 2718 of SEQ ID NO: 1880877
gauguacaguguuuaauac

SEQ ID NO: 2000791 - RNA, 19 nt, Artificial Sequence
  Description of Artificial Sequence: Synthetic oligonucleotide
  Antisense strand to SEQ ID NO: 2000790
guauuaaacacuguacauc

SEQ ID NO: 2000792 - RNA, 19 nt, Artificial Sequence
  Description of Artificial Sequence: Synthetic oligonucleotide
  Sense strand starting at position 2719 of SEQ ID NO: 1880877
auguacaguguuuaauaca

SEQ ID NO: 2000793 - RNA, 19 nt, Artificial Sequence
  Description of Artificial Sequence: Synthetic oligonucleotide
  Antisense strand to SEQ ID NO: 2000792
uguauuaaacacuguacau

SEQ ID NO: 2000794 - RNA, 19 nt, Artificial Sequence
  Description of Artificial Sequence: Synthetic oligonucleotide
  Sense strand starting at position 2765 of SEQ ID NO: 1880877
gucaauaaaccguaauuau

SEQ ID NO: 2000795 - RNA, 19 nt, Artificial Sequence
  Description of Artificial Sequence: Synthetic oligonucleotide
  Antisense strand to SEQ ID NO: 2000794
auaauuacgguuuauugac

SEQ ID NO: 2000796 - RNA, 19 nt, Artificial Sequence
  Description of Artificial Sequence: Synthetic oligonucleotide
  Sense strand starting at position 2806 of SEQ ID NO: 1880877
cauucuugagacuguaaag

SEQ ID NO: 2000797 - RNA, 19 nt, Artificial Sequence
  Description of Artificial Sequence: Synthetic oligonucleotide
  Antisense strand to SEQ ID NO: 2000796
cuuuacagucucaagaaug

SEQ ID NO: 2000798 - RNA, 19 nt, Artificial Sequence
  Description of Artificial Sequence: Synthetic oligonucleotide
  Sense strand starting at position 2868 of SEQ ID NO: 1880877
agcaguuguccuuaauauc

SEQ ID NO: 2000799 - RNA, 19 nt, Artificial Sequence
  Description of Artificial Sequence: Synthetic oligonucleotide
  Antisense strand to SEQ ID NO: 2000798
gauauuaaggacaacugcu

SEQ ID NO: 2000800 - RNA, 19 nt, Artificial Sequence
  Description of Artificial Sequence: Synthetic oligonucleotide
  Sense strand starting at position 3030 of SEQ ID NO: 1880877
cccggaucacccugaagau

SEQ ID NO: 2000801 - RNA, 19 nt, Artificial Sequence
  Description of Artificial Sequence: Synthetic oligonucleotide
  Antisense strand to SEQ ID NO: 2000800
aucuucagggugauccggg

SEQ ID NO: 2000802 - RNA, 19 nt, Artificial Sequence
  Description of Artificial Sequence: Synthetic oligonucleotide
  Sense strand starting at position 3149 of SEQ ID NO: 1880877
ggcugaggauuugagauga

SEQ ID NO: 2000803 - RNA, 19 nt, Artificial Sequence
  Description of Artificial Sequence: Synthetic oligonucleotide
  Antisense strand to SEQ ID NO: 2000802
ucaucucaaauccucagcc

SEQ ID NO: 2000804 - RNA, 19 nt, Artificial Sequence
  Description of Artificial Sequence: Synthetic oligonucleotide
  Sense strand starting at position 3285 of SEQ ID NO: 1880877
ugagguaggaucugagauu

SEQ ID NO: 2000805 - RNA, 19 nt, Artificial Sequence
  Description of Artificial Sequence: Synthetic oligonucleotide
  Antisense strand to SEQ ID NO: 2000804
aaucucagauccuaccuca

SEQ ID NO: 2000806 - RNA, 19 nt, Artificial Sequence
  Description of Artificial Sequence: Synthetic oligonucleotide
  Sense strand starting at position 3286 of SEQ ID NO: 1880877
gagguaggaucugagauuu

SEQ ID NO: 2000807 - RNA, 19 nt, Artificial Sequence
  Description of Artificial Sequence: Synthetic oligonucleotide
  Antisense strand to SEQ ID NO: 2000806
aaaucucagauccuaccuc

SEQ ID NO: 2000808 - RNA, 19 nt, Artificial Sequence
  Description of Artificial Sequence: Synthetic oligonucleotide
  Sense strand starting at position 3477 of SEQ ID NO: 1880877
cucggaguagcuuggaaua

SEQ ID NO: 2000809 - RNA, 19 nt, Artificial Sequence
  Description of Artificial Sequence: Synthetic oligonucleotide
  Antisense strand to SEQ ID NO: 2000808
uauuccaagcuacuccgag

SEQ ID NO: 2000810 - RNA, 19 nt, Artificial Sequence
  Description of Artificial Sequence: Synthetic oligonucleotide
  Sense strand starting at position 3680 of SEQ ID NO: 1880877
ccaggugaugucgaugaag

SEQ ID NO: 2000811 - RNA, 19 nt, Artificial Sequence
  Description of Artificial Sequence: Synthetic oligonucleotide
  Antisense strand to SEQ ID NO: 2000810
cuucaucgacaucaccugg

SEQ ID NO: 2000812 - RNA, 19 nt, Artificial Sequence
  Description of Artificial Sequence: Synthetic oligonucleotide
  Sense strand starting at position 3775 of SEQ ID NO: 1880877
agaggaaguccaggcuaaa

SEQ ID NO: 2000813 - RNA, 19 nt, Artificial Sequence
  Description of Artificial Sequence: Synthetic oligonucleotide
  Antisense strand to SEQ ID NO: 2000812
uuuagccuggacuuccucu

SEQ ID NO: 2000814 - RNA, 19 nt, Artificial Sequence
  Description of Artificial Sequence: Synthetic oligonucleotide
  Sense strand starting at position 3845 of SEQ ID NO: 1880877
ccaggaauccgacacguga

SEQ ID NO: 2000815 - RNA, 19 nt, Artificial Sequence
  Description of Artificial Sequence: Synthetic oligonucleotide
  Antisense strand to SEQ ID NO: 2000814
ucacgugucggauuccugg

SEQ ID NO: 2000816 - RNA, 19 nt, Artificial Sequence
  Description of Artificial Sequence: Synthetic oligonucleotide
  Sense strand starting at position 3866 of SEQ ID NO: 1880877
gucuguccgccgucucaga

SEQ ID NO: 2000817 - RNA, 19 nt, Artificial Sequence
  Description of Artificial Sequence: Synthetic oligonucleotide
  Antisense strand to SEQ ID NO: 2000816
ucugagacggcggacagac

SEQ ID NO: 2000818 - RNA, 19 nt, Artificial Sequence
  Description of Artificial Sequence: Synthetic oligonucleotide
  Sense strand starting at position 279 of SEQ ID NO: 1880878
aacacuuaguggucuaaag

SEQ ID NO: 2000819 - RNA, 19 nt, Artificial Sequence
  Description of Artificial Sequence: Synthetic oligonucleotide
  Antisense strand to SEQ ID NO: 2000818
cuuuagaccacuaaguguu

SEQ ID NO: 2000820 - RNA, 19 nt, Artificial Sequence
  Description of Artificial Sequence: Synthetic oligonucleotide
  Sense strand starting at position 281 of SEQ ID NO: 1880878
cacuuaguggucuaaaggu

SEQ ID NO: 2000821 - RNA, 19 nt, Artificial Sequence
  Description of Artificial Sequence: Synthetic oligonucleotide
  Antisense strand to SEQ ID NO: 2000820
accuuuagaccacuaagug

SEQ ID NO: 2000822 - RNA, 19 nt, Artificial Sequence
  Description of Artificial Sequence: Synthetic oligonucleotide
  Sense strand starting at position 290 of SEQ ID NO: 1880878
gucuaaaggucaccucaaa

SEQ ID NO: 2000823 - RNA, 19 nt, Artificial Sequence
  Description of Artificial Sequence: Synthetic oligonucleotide
  Antisense strand to SEQ ID NO: 2000822
uuugaggugaccuuuagac

SEQ ID NO: 2000824 - RNA, 19 nt, Artificial Sequence
  Description of Artificial Sequence: Synthetic oligonucleotide
  Sense strand starting at position 321 of SEQ ID NO: 1880878
caaacugagcuguaguuua

SEQ ID NO: 2000825 - RNA, 19 nt, Artificial Sequence
  Description of Artificial Sequence: Synthetic oligonucleotide
  Antisense strand to SEQ ID NO: 2000824
uaaacuacagcucaguuug

SEQ ID NO: 2000826 - RNA, 19 nt, Artificial Sequence
  Description of Artificial Sequence: Synthetic oligonucleotide
  Sense strand starting at position 404 of SEQ ID NO: 1880878
agaggccacucaguugaua

SEQ ID NO: 2000827 - RNA, 19 nt, Artificial Sequence
  Description of Artificial Sequence: Synthetic oligonucleotide
  Antisense strand to SEQ ID NO: 2000826
uaucaacugaguggccucu

SEQ ID NO: 2000828 - RNA, 19 nt, Artificial Sequence
  Description of Artificial Sequence: Synthetic oligonucleotide
  Sense strand starting at position 415 of SEQ ID NO: 1880878
aguugauaaagccggaaga

SEQ ID NO: 2000829 - RNA, 19 nt, Artificial Sequence
  Description of Artificial Sequence: Synthetic oligonucleotide
  Antisense strand to SEQ ID NO: 2000828
ucuuccggcuuuaucaacu

SEQ ID NO: 2000830 - RNA, 19 nt, Artificial Sequence
  Description of Artificial Sequence: Synthetic oligonucleotide
  Sense strand starting at position 698 of SEQ ID NO: 1880878
uggcauccaccugaucauu

SEQ ID NO: 2000831 - RNA, 19 nt, Artificial Sequence
  Description of Artificial Sequence: Synthetic oligonucleotide
  Antisense strand to SEQ ID NO: 2000830
aaugaucagguggaugcca

SEQ ID NO: 2000832 - RNA, 19 nt, Artificial Sequence
  Description of Artificial Sequence: Synthetic oligonucleotide
  Sense strand starting at position 907 of SEQ ID NO: 1880878
gauagagucuuuguagagg

SEQ ID NO: 2000833 - RNA, 19 nt, Artificial Sequence
  Description of Artificial Sequence: Synthetic oligonucleotide
  Antisense strand to SEQ ID NO: 2000832
ccucuacaaagacucuauc

SEQ ID NO: 2000834 - RNA, 19 nt, Artificial Sequence
  Description of Artificial Sequence: Synthetic oligonucleotide
  Sense strand starting at position 910 of SEQ ID NO: 1880878
agagucuuuguagagguaa

SEQ ID NO: 2000835 - RNA, 19 nt, Artificial Sequence
  Description of Artificial Sequence: Synthetic oligonucleotide
  Antisense strand to SEQ ID NO: 2000834
uuaccucuacaaagacucu

SEQ ID NO: 2000836 - RNA, 19 nt, Artificial Sequence
  Description of Artificial Sequence: Synthetic oligonucleotide
  Sense strand starting at position 948 of SEQ ID NO: 1880878
uuaggauggcucuaaccca

SEQ ID NO: 2000837 - RNA, 19 nt, Artificial Sequence
  Description of Artificial Sequence: Synthetic oligonucleotide
  Antisense strand to SEQ ID NO: 2000836
uggguuagagccauccuaa

SEQ ID NO: 2000838 - RNA, 19 nt, Artificial Sequence
  Description of Artificial Sequence: Synthetic oligonucleotide
  Sense strand starting at position 1002 of SEQ ID NO: 1880878
gagguagaugugcacacau

SEQ ID NO: 2000839 - RNA, 19 nt, Artificial Sequence
  Description of Artificial Sequence: Synthetic oligonucleotide
  Antisense strand to SEQ ID NO: 2000838
augugugcacaucuaccuc

SEQ ID NO: 2000840 - RNA, 19 nt, Artificial Sequence
  Description of Artificial Sequence: Synthetic oligonucleotide
  Sense strand starting at position 1026 of SEQ ID NO: 1880878
gugcaaugugaauaucaag

SEQ ID NO: 2000841 - RNA, 19 nt, Artificial Sequence
  Description of Artificial Sequence: Synthetic oligonucleotide
  Antisense strand to SEQ ID NO: 2000840
cuugauauucacauugcac

SEQ ID NO: 2000842 - RNA, 19 nt, Artificial Sequence
  Description of Artificial Sequence: Synthetic oligonucleotide
  Sense strand starting at position 1032 of SEQ ID NO: 1880878
ugugaauaucaagaugcca

SEQ ID NO: 2000843 - RNA, 19 nt, Artificial Sequence
  Description of Artificial Sequence: Synthetic oligonucleotide
  Antisense strand to SEQ ID NO: 2000842
uggcaucuugauauucaca

SEQ ID NO: 2000844 - RNA, 19 nt, Artificial Sequence
  Description of Artificial Sequence: Synthetic oligonucleotide
  Sense strand starting at position 1090 of SEQ ID NO: 1880878
cucacagcccucgaaagaa

SEQ ID NO: 2000845 - RNA, 19 nt, Artificial Sequence
  Description of Artificial Sequence: Synthetic oligonucleotide
  Antisense strand to SEQ ID NO: 2000844
uucuuucgagggcugugag

SEQ ID NO: 2000846 - RNA, 19 nt, Artificial Sequence
  Description of Artificial Sequence: Synthetic oligonucleotide
  Sense strand starting at position 1249 of SEQ ID NO: 1880878
aucccaguagcucagaauu

SEQ ID NO: 2000847 - RNA, 19 nt, Artificial Sequence
  Description of Artificial Sequence: Synthetic oligonucleotide
  Antisense strand to SEQ ID NO: 2000846
aauucugagcuacugggau

SEQ ID NO: 2000848 - RNA, 19 nt, Artificial Sequence
  Description of Artificial Sequence: Synthetic oligonucleotide
  Sense strand starting at position 1415 of SEQ ID NO: 1880878
uguaaaucccugcaggaca

SEQ ID NO: 2000849 - RNA, 19 nt, Artificial Sequence
  Description of Artificial Sequence: Synthetic oligonucleotide
  Antisense strand to SEQ ID NO: 2000848
uguccugcagggauuuaca

SEQ ID NO: 2000850 - RNA, 19 nt, Artificial Sequence
  Description of Artificial Sequence: Synthetic oligonucleotide
  Sense strand starting at position 1429 of SEQ ID NO: 1880878
ggacaaagauaacaaacau

SEQ ID NO: 2000851 - RNA, 19 nt, Artificial Sequence
  Description of Artificial Sequence: Synthetic oligonucleotide
  Antisense strand to SEQ ID NO: 2000850
auguuuguuaucuuugucc

SEQ ID NO: 2000852 - RNA, 19 nt, Artificial Sequence
  Description of Artificial Sequence: Synthetic oligonucleotide
  Sense strand starting at position 1491 of SEQ ID NO: 1880878
gauucuugauagguaauug

SEQ ID NO: 2000853 - RNA, 19 nt, Artificial Sequence
  Description of Artificial Sequence: Synthetic oligonucleotide
  Antisense strand to SEQ ID NO: 2000852
caauuaccuaucaagaauc

SEQ ID NO: 2000854 - RNA, 19 nt, Artificial Sequence
  Description of Artificial Sequence: Synthetic oligonucleotide
  Sense strand starting at position 1495 of SEQ ID NO: 1880878
cuugauagguaauuguuga

SEQ ID NO: 2000855 - RNA, 19 nt, Artificial Sequence
  Description of Artificial Sequence: Synthetic oligonucleotide
  Antisense strand to SEQ ID NO: 2000854
ucaacaauuaccuaucaag

SEQ ID NO: 2000856 - RNA, 19 nt, Artificial Sequence
  Description of Artificial Sequence: Synthetic oligonucleotide
  Sense strand starting at position 1496 of SEQ ID NO: 1880878
uugauagguaauuguugaa

SEQ ID NO: 2000857 - RNA, 19 nt, Artificial Sequence
  Description of Artificial Sequence: Synthetic oligonucleotide
  Antisense strand to SEQ ID NO: 2000856
uucaacaauuaccuaucaa

SEQ ID NO: 2000858 - RNA, 19 nt, Artificial Sequence
  Description of Artificial Sequence: Synthetic oligonucleotide
  Sense strand starting at position 1503 of SEQ ID NO: 1880878
guaauuguugaaugaaaga

SEQ ID NO: 2000859 - RNA, 19 nt, Artificial Sequence
  Description of Artificial Sequence: Synthetic oligonucleotide
  Antisense strand to SEQ ID NO: 2000858
ucuuucauucaacaauuac

SEQ ID NO: 2000860 - RNA, 19 nt, Artificial Sequence
  Description of Artificial Sequence: Synthetic oligonucleotide
  Sense strand starting at position 1552 of SEQ ID NO: 1880878
ugaagaaucugcuuugacu

SEQ ID NO: 2000861 - RNA, 19 nt, Artificial Sequence
  Description of Artificial Sequence: Synthetic oligonucleotide
  Antisense strand to SEQ ID NO: 2000860
agucaaagcagauucuuca

SEQ ID NO: 2000862 - RNA, 19 nt, Artificial Sequence
  Description of Artificial Sequence: Synthetic oligonucleotide
  Sense strand starting at position 1649 of SEQ ID NO: 1880878
uugccauucugucugauuu

SEQ ID NO: 2000863 - RNA, 19 nt, Artificial Sequence
  Description of Artificial Sequence: Synthetic oligonucleotide
  Antisense strand to SEQ ID NO: 2000862
aaaucagacagaauggcaa

SEQ ID NO: 2000864 - RNA, 19 nt, Artificial Sequence
  Description of Artificial Sequence: Synthetic oligonucleotide
  Sense strand starting at position 1650 of SEQ ID NO: 1880878
ugccauucugucugauuua

SEQ ID NO: 2000865 - RNA, 19 nt, Artificial Sequence
  Description of Artificial Sequence: Synthetic oligonucleotide
  Antisense strand to SEQ ID NO: 2000864
uaaaucagacagaauggca

SEQ ID NO: 2000866 - RNA, 19 nt, Artificial Sequence
  Description of Artificial Sequence: Synthetic oligonucleotide
  Sense strand starting at position 1717 of SEQ ID NO: 1880878
ccauaaggugcugauacau

SEQ ID NO: 2000867 - RNA, 19 nt, Artificial Sequence
  Description of Artificial Sequence: Synthetic oligonucleotide
  Antisense strand to SEQ ID NO: 2000866
auguaucagcaccuuaugg

SEQ ID NO: 2000868 - RNA, 19 nt, Artificial Sequence
  Description of Artificial Sequence: Synthetic oligonucleotide
  Sense strand starting at position 2336 of SEQ ID NO: 1880878
ggagcaagccuccaggaau

SEQ ID NO: 2000869 - RNA, 19 nt, Artificial Sequence
  Description of Artificial Sequence: Synthetic oligonucleotide
  Antisense strand to SEQ ID NO: 2000868
auuccuggaggcuugcucc

SEQ ID NO: 2000870 - RNA, 19 nt, Artificial Sequence
  Description of Artificial Sequence: Synthetic oligonucleotide
  Sense strand starting at position 2427 of SEQ ID NO: 1880878
uuugguuauccauggagau

SEQ ID NO: 2000871 - RNA, 19 nt, Artificial Sequence
  Description of Artificial Sequence: Synthetic oligonucleotide
  Antisense strand to SEQ ID NO: 2000870
aucuccauggauaaccaaa

SEQ ID NO: 2000872 - RNA, 19 nt, Artificial Sequence
  Description of Artificial Sequence: Synthetic oligonucleotide
  Sense strand starting at position 2428 of SEQ ID NO: 1880878
uugguuauccauggagauu

SEQ ID NO: 2000873 - RNA, 19 nt, Artificial Sequence
  Description of Artificial Sequence: Synthetic oligonucleotide
  Antisense strand to SEQ ID NO: 2000872
aaucuccauggauaaccaa

SEQ ID NO: 2000874 - RNA, 19 nt, Artificial Sequence
  Description of Artificial Sequence: Synthetic oligonucleotide
  Sense strand starting at position 2542 of SEQ ID NO: 1880878
gacaguccagcugggaauu

SEQ ID NO: 2000875 - RNA, 19 nt, Artificial Sequence
  Description of Artificial Sequence: Synthetic oligonucleotide
  Antisense strand to SEQ ID NO: 2000874
aauucccagcuggacuguc

SEQ ID NO: 2000876 - RNA, 19 nt, Artificial Sequence
  Description of Artificial Sequence: Synthetic oligonucleotide
  Sense strand starting at position 2626 of SEQ ID NO: 1880878
gagguuagacugcaauauu

SEQ ID NO: 2000877 - RNA, 19 nt, Artificial Sequence
  Description of Artificial Sequence: Synthetic oligonucleotide
  Antisense strand to SEQ ID NO: 2000876
aauauugcagucuaaccuc

SEQ ID NO: 2000878 - RNA, 19 nt, Artificial Sequence
  Description of Artificial Sequence: Synthetic oligonucleotide
  Sense strand starting at position 2689 of SEQ ID NO: 1880878
aguuuacaugcagacaaau

SEQ ID NO: 2000879 - RNA, 19 nt, Artificial Sequence
  Description of Artificial Sequence: Synthetic oligonucleotide
  Antisense strand to SEQ ID NO: 2000878
auuugucugcauguaaacu

SEQ ID NO: 2000880 - RNA, 19 nt, Artificial Sequence
  Description of Artificial Sequence: Synthetic oligonucleotide
  Sense strand starting at position 2720 of SEQ ID NO: 1880878
aguuuaugucuugaugaau

SEQ ID NO: 2000881 - RNA, 19 nt, Artificial Sequence
  Description of Artificial Sequence: Synthetic oligonucleotide
  Antisense strand to SEQ ID NO: 2000880
auucaucaagacauaaacu

SEQ ID NO: 2000882 - RNA, 19 nt, Artificial Sequence
  Description of Artificial Sequence: Synthetic oligonucleotide
  Sense strand starting at position 2804 of SEQ ID NO: 1880878
cggacaauuuccucaugcu

SEQ ID NO: 2000883 - RNA, 19 nt, Artificial Sequence
  Description of Artificial Sequence: Synthetic oligonucleotide
  Antisense strand to SEQ ID NO: 2000882
agcaugaggaaauuguccg

SEQ ID NO: 2000884 - RNA, 19 nt, Artificial Sequence
  Description of Artificial Sequence: Synthetic oligonucleotide
  Sense strand starting at position 3209 of SEQ ID NO: 1880878
uuggguguaugacuaugau

SEQ ID NO: 2000885 - RNA, 19 nt, Artificial Sequence
  Description of Artificial Sequence: Synthetic oligonucleotide
  Antisense strand to SEQ ID NO: 2000884
aucauagucauacacccaa

SEQ ID NO: 2000886 - RNA, 19 nt, Artificial Sequence
  Description of Artificial Sequence: Synthetic oligonucleotide
  Sense strand starting at position 3227 of SEQ ID NO: 1880878
uuugaauugcuggauuauu

SEQ ID NO: 2000887 - RNA, 19 nt, Artificial Sequence
  Description of Artificial Sequence: Synthetic oligonucleotide
  Antisense strand to SEQ ID NO: 2000886
aauaauccagcaauucaaa

SEQ ID NO: 2000888 - RNA, 19 nt, Artificial Sequence
  Description of Artificial Sequence: Synthetic oligonucleotide
  Sense strand starting at position 3272 of SEQ ID NO: 1880878
ccaguuucuccauacauag

SEQ ID NO: 2000889 - RNA, 19 nt, Artificial Sequence
  Description of Artificial Sequence: Synthetic oligonucleotide
  Antisense strand to SEQ ID NO: 2000888
cuauguauggagaaacugg

SEQ ID NO: 2000890 - RNA, 19 nt, Artificial Sequence
  Description of Artificial Sequence: Synthetic oligonucleotide
  Sense strand starting at position 3414 of SEQ ID NO: 1880878
uuauuuaugucacucagcu

SEQ ID NO: 2000891 - RNA, 19 nt, Artificial Sequence
  Description of Artificial Sequence: Synthetic oligonucleotide
  Antisense strand to SEQ ID NO: 2000890
agcugagugacauaaauaa

SEQ ID NO: 2000892 - RNA, 19 nt, Artificial Sequence
  Description of Artificial Sequence: Synthetic oligonucleotide
  Sense strand starting at position 3452 of SEQ ID NO: 1880878
ugccuuaucggcgcaguaa

SEQ ID NO: 2000893 - RNA, 19 nt, Artificial Sequence
  Description of Artificial Sequence: Synthetic oligonucleotide
  Antisense strand to SEQ ID NO: 2000892
uuacugcgccgauaaggca

SEQ ID NO: 2000894 - RNA, 19 nt, Artificial Sequence
  Description of Artificial Sequence: Synthetic oligonucleotide
  Sense strand starting at position 3626 of SEQ ID NO: 1880878
cucagucauguugaaggga

SEQ ID NO: 2000895 - RNA, 19 nt, Artificial Sequence
  Description of Artificial Sequence: Synthetic oligonucleotide
  Antisense strand to SEQ ID NO: 2000894
ucccuucaacaugacugag

SEQ ID NO: 2000896 - RNA, 19 nt, Artificial Sequence
  Description of Artificial Sequence: Synthetic oligonucleotide
  Sense strand starting at position 3751 of SEQ ID NO: 1880878
agagaaacauugccucagu

SEQ ID NO: 2000897 - RNA, 19 nt, Artificial Sequence
  Description of Artificial Sequence: Synthetic oligonucleotide
  Antisense strand to SEQ ID NO: 2000896
acugaggcaauguuucucu

SEQ ID NO: 2000898 - RNA, 19 nt, Artificial Sequence
  Description of Artificial Sequence: Synthetic oligonucleotide
  Sense strand starting at position 509 of SEQ ID NO: 1880879
guugcauugagggaggagu

SEQ ID NO: 2000899 - RNA, 19 nt, Artificial Sequence
  Description of Artificial Sequence: Synthetic oligonucleotide
  Antisense strand to SEQ ID NO: 2000898
acuccucccucaaugcaac

SEQ ID NO: 2000900 - RNA, 19 nt, Artificial Sequence
  Description of Artificial Sequence: Synthetic oligonucleotide
  Sense strand starting at position 555 of SEQ ID NO: 1880879
uuugguugcccagaagaaa

SEQ ID NO: 2000901 - RNA, 19 nt, Artificial Sequence
  Description of Artificial Sequence: Synthetic oligonucleotide
  Antisense strand to SEQ ID NO: 2000900
uuucuucugggcaaccaaa

SEQ ID NO: 2000902 - RNA, 19 nt, Artificial Sequence
  Description of Artificial Sequence: Synthetic oligonucleotide
  Sense strand starting at position 607 of SEQ ID NO: 1880879
agaggugcucagugaggaa

SEQ ID NO: 2000903 - RNA, 19 nt, Artificial Sequence
  Description of Artificial Sequence: Synthetic oligonucleotide
  Antisense strand to SEQ ID NO: 2000902
uuccucacugagcaccucu

SEQ ID NO: 2000904 - RNA, 19 nt, Artificial Sequence
  Description of Artificial Sequence: Synthetic oligonucleotide
  Sense strand starting at position 681 of SEQ ID NO: 1880879
gauggaugaucauugccaa

SEQ ID NO: 2000905 - RNA, 19 nt, Artificial Sequence
  Description of Artificial Sequence: Synthetic oligonucleotide
  Antisense strand to SEQ ID NO: 2000904
uuggcaaugaucauccauc

SEQ ID NO: 2000906 - RNA, 19 nt, Artificial Sequence
  Description of Artificial Sequence: Synthetic oligonucleotide
  Sense strand starting at position 682 of SEQ ID NO: 1880879
auggaugaucauugccaau

SEQ ID NO: 2000907 - RNA, 19 nt, Artificial Sequence
  Description of Artificial Sequence: Synthetic oligonucleotide
  Antisense strand to SEQ ID NO: 2000906
auuggcaaugaucauccau

SEQ ID NO: 2000908 - RNA, 19 nt, Artificial Sequence
  Description of Artificial Sequence: Synthetic oligonucleotide
  Sense strand starting at position 694 of SEQ ID NO: 1880879
ugccaauccucauuugugu

SEQ ID NO: 2000909 - RNA, 19 nt, Artificial Sequence
  Description of Artificial Sequence: Synthetic oligonucleotide
  Antisense strand to SEQ ID NO: 2000908
acacaaaugaggauuggca

SEQ ID NO: 2000910 - RNA, 19 nt, Artificial Sequence
  Description of Artificial Sequence: Synthetic oligonucleotide
  Sense strand starting at position 703 of SEQ ID NO: 1880879
ucauuuguguuucugacau

SEQ ID NO: 2000911 - RNA, 19 nt, Artificial Sequence
  Description of Artificial Sequence: Synthetic oligonucleotide
  Antisense strand to SEQ ID NO: 2000910
augucagaaacacaaauga

SEQ ID NO: 2000912 - RNA, 19 nt, Artificial Sequence
  Description of Artificial Sequence: Synthetic oligonucleotide
  Sense strand starting at position 1020 of SEQ ID NO: 1880879
cuggcuuuccuagacacau

SEQ ID NO: 2000913 - RNA, 19 nt, Artificial Sequence
  Description of Artificial Sequence: Synthetic oligonucleotide
  Antisense strand to SEQ ID NO: 2000912
augugucuaggaaagccag

SEQ ID NO: 2000914 - RNA, 19 nt, Artificial Sequence
  Description of Artificial Sequence: Synthetic oligonucleotide
  Sense strand starting at position 1058 of SEQ ID NO: 1880879
gcucauaaaggcuagacuu

SEQ ID NO: 2000915 - RNA, 19 nt, Artificial Sequence
  Description of Artificial Sequence: Synthetic oligonucleotide
  Antisense strand to SEQ ID NO: 2000914
aagucuagccuuuaugagc

SEQ ID NO: 2000916 - RNA, 19 nt, Artificial Sequence
  Description of Artificial Sequence: Synthetic oligonucleotide
  Sense strand starting at position 1109 of SEQ ID NO: 1880879
acaauacgauaucuuuagu

SEQ ID NO: 2000917 - RNA, 19 nt, Artificial Sequence
  Description of Artificial Sequence: Synthetic oligonucleotide
  Antisense strand to SEQ ID NO: 2000916
acuaaagauaucguauugu

SEQ ID NO: 2000918 - RNA, 19 nt, Artificial Sequence
  Description of Artificial Sequence: Synthetic oligonucleotide
  Sense strand starting at position 1112 of SEQ ID NO: 1880879
auacgauaucuuuagucac

SEQ ID NO: 2000919 - RNA, 19 nt, Artificial Sequence
  Description of Artificial Sequence: Synthetic oligonucleotide
  Antisense strand to SEQ ID NO: 2000918
gugacuaaagauaucguau

SEQ ID NO: 2000920 - RNA, 19 nt, Artificial Sequence
  Description of Artificial Sequence: Synthetic oligonucleotide
  Sense strand starting at position 1115 of SEQ ID NO: 1880879
cgauaucuuuagucacuca

SEQ ID NO: 2000921 - RNA, 19 nt, Artificial Sequence
  Description of Artificial Sequence: Synthetic oligonucleotide
  Antisense strand to SEQ ID NO: 2000920
ugagugacuaaagauaucg

SEQ ID NO: 2000922 - RNA, 19 nt, Artificial Sequence
  Description of Artificial Sequence: Synthetic oligonucleotide
  Sense strand starting at position 1290 of SEQ ID NO: 1880879
ccucauucuguguauguua

SEQ ID NO: 2000923 - RNA, 19 nt, Artificial Sequence
  Description of Artificial Sequence: Synthetic oligonucleotide
  Antisense strand to SEQ ID NO: 2000922
uaacauacacagaaugagg

SEQ ID NO: 2000924 - RNA, 19 nt, Artificial Sequence
  Description of Artificial Sequence: Synthetic oligonucleotide
  Sense strand starting at position 1403 of SEQ ID NO: 1880879
guugaucuggcauaucaaa

SEQ ID NO: 2000925 - RNA, 19 nt, Artificial Sequence
  Description of Artificial Sequence: Synthetic oligonucleotide
  Antisense strand to SEQ ID NO: 2000924
uuugauaugccagaucaac

SEQ ID NO: 2000926 - RNA, 19 nt, Artificial Sequence
  Description of Artificial Sequence: Synthetic oligonucleotide
  Sense strand starting at position 1850 of SEQ ID NO: 1880879
gagugcuuaccugagaguu

SEQ ID NO: 2000927 - RNA, 19 nt, Artificial Sequence
  Description of Artificial Sequence: Synthetic oligonucleotide
  Antisense strand to SEQ ID NO: 2000926
aacucucagguaagcacuc

SEQ ID NO: 2000928 - RNA, 19 nt, Artificial Sequence
  Description of Artificial Sequence: Synthetic oligonucleotide
  Sense strand starting at position 2055 of SEQ ID NO: 1880879
uuaaauaaccgcugaacau

SEQ ID NO: 2000929 - RNA, 19 nt, Artificial Sequence
  Description of Artificial Sequence: Synthetic oligonucleotide
  Antisense strand to SEQ ID NO: 2000928
auguucagcgguuauuuaa

SEQ ID NO: 2000930 - RNA, 19 nt, Artificial Sequence
  Description of Artificial Sequence: Synthetic oligonucleotide
  Sense strand starting at position 2557 of SEQ ID NO: 1880879
auuguacuuuagucacuaa

SEQ ID NO: 2000931 - RNA, 19 nt, Artificial Sequence
  Description of Artificial Sequence: Synthetic oligonucleotide
  Antisense strand to SEQ ID NO: 2000930
uuagugacuaaaguacaau

SEQ ID NO: 2000932 - RNA, 19 nt, Artificial Sequence
  Description of Artificial Sequence: Synthetic oligonucleotide
  Sense strand starting at position 2560 of SEQ ID NO: 1880879
guacuuuagucacuaaauu

SEQ ID NO: 2000933 - RNA, 19 nt, Artificial Sequence
  Description of Artificial Sequence: Synthetic oligonucleotide
  Antisense strand to SEQ ID NO: 2000932
aauuuagugacuaaaguac

SEQ ID NO: 2000934 - RNA, 19 nt, Artificial Sequence
  Description of Artificial Sequence: Synthetic oligonucleotide
  Sense strand starting at position 2568 of SEQ ID NO: 1880879
gucacuaaauucuuagaag

SEQ ID NO: 2000935 - RNA, 19 nt, Artificial Sequence
  Description of Artificial Sequence: Synthetic oligonucleotide
  Antisense strand to SEQ ID NO: 2000934
cuucuaagaauuuagugac

SEQ ID NO: 2000936 - RNA, 19 nt, Artificial Sequence
  Description of Artificial Sequence: Synthetic oligonucleotide
  Sense strand starting at position 2610 of SEQ ID NO: 1880879
uugucuaggcaauaaguuu

SEQ ID NO: 2000937 - RNA, 19 nt, Artificial Sequence
  Description of Artificial Sequence: Synthetic oligonucleotide
  Antisense strand to SEQ ID NO: 2000936
aaacuuauugccuagacaa

SEQ ID NO: 2000938 - RNA, 19 nt, Artificial Sequence
  Description of Artificial Sequence: Synthetic oligonucleotide
  Sense strand starting at position 2695 of SEQ ID NO: 1880879
guccucuuuggagacgaua

SEQ ID NO: 2000939 - RNA, 19 nt, Artificial Sequence
  Description of Artificial Sequence: Synthetic oligonucleotide
  Antisense strand to SEQ ID NO: 2000938
uaucgucuccaaagaggac

SEQ ID NO: 2000940 - RNA, 19 nt, Artificial Sequence
  Description of Artificial Sequence: Synthetic oligonucleotide
  Sense strand starting at position 2737 of SEQ ID NO: 1880879
guguuugaauauuuaagcu

SEQ ID NO: 2000941 - RNA, 19 nt, Artificial Sequence
  Description of Artificial Sequence: Synthetic oligonucleotide
  Antisense strand to SEQ ID NO: 2000940
agcuuaaauauucaaacac

SEQ ID NO: 2000942 - RNA, 19 nt, Artificial Sequence
  Description of Artificial Sequence: Synthetic oligonucleotide
  Sense strand starting at position 2772 of SEQ ID NO: 1880879
ugacgugucuaccuacaaa

SEQ ID NO: 2000943 - RNA, 19 nt, Artificial Sequence
  Description of Artificial Sequence: Synthetic oligonucleotide
  Antisense strand to SEQ ID NO: 2000942
uuuguagguagacacguca

SEQ ID NO: 2000944 - RNA, 19 nt, Artificial Sequence
  Description of Artificial Sequence: Synthetic oligonucleotide
  Sense strand starting at position 3003 of SEQ ID NO: 1880879
gauguagaacucugguuau

SEQ ID NO: 2000945 - RNA, 19 nt, Artificial Sequence
  Description of Artificial Sequence: Synthetic oligonucleotide
  Antisense strand to SEQ ID NO: 2000944
auaaccagaguucuacauc

SEQ ID NO: 2000946 - RNA, 19 nt, Artificial Sequence
  Description of Artificial Sequence: Synthetic oligonucleotide
  Sense strand starting at position 3006 of SEQ ID NO: 1880879
guagaacucugguuauaau

SEQ ID NO: 2000947 - RNA, 19 nt, Artificial Sequence
  Description of Artificial Sequence: Synthetic oligonucleotide
  Antisense strand to SEQ ID NO: 2000946
auuauaaccagaguucuac

SEQ ID NO: 2000948 - RNA, 19 nt, Artificial Sequence
  Description of Artificial Sequence: Synthetic oligonucleotide
  Sense strand starting at position 3040 of SEQ ID NO: 1880879
aguauuacucuuuggaaau

SEQ ID NO: 2000949 - RNA, 19 nt, Artificial Sequence
  Description of Artificial Sequence: Synthetic oligonucleotide
  Antisense strand to SEQ ID NO: 2000948
auuuccaaagaguaauacu

SEQ ID NO: 2000950 - RNA, 19 nt, Artificial Sequence
  Description of Artificial Sequence: Synthetic oligonucleotide
  Sense strand starting at position 3211 of SEQ ID NO: 1880879
agaugcuaacacugacauu

SEQ ID NO: 2000951 - RNA, 19 nt, Artificial Sequence
  Description of Artificial Sequence: Synthetic oligonucleotide
  Antisense strand to SEQ ID NO: 2000950
aaugucaguguuagcaucu

SEQ ID NO: 2000952 - RNA, 19 nt, Artificial Sequence
  Description of Artificial Sequence: Synthetic oligonucleotide
  Sense strand starting at position 3241 of SEQ ID NO: 1880879
agcuuauuagaccagaggu

SEQ ID NO: 2000953 - RNA, 19 nt, Artificial Sequence
  Description of Artificial Sequence: Synthetic oligonucleotide
  Antisense strand to SEQ ID NO: 2000952
accucuggucuaauaagcu

SEQ ID NO: 2000954 - RNA, 19 nt, Artificial Sequence
  Description of Artificial Sequence: Synthetic oligonucleotide
  Sense strand starting at position 3327 of SEQ ID NO: 1880879
ucuuuaaugugguuagauu

SEQ ID NO: 2000955 - RNA, 19 nt, Artificial Sequence
  Description of Artificial Sequence: Synthetic oligonucleotide
  Antisense strand to SEQ ID NO: 2000954
aaucuaaccacauuaaaga

SEQ ID NO: 2000956 - RNA, 19 nt, Artificial Sequence
  Description of Artificial Sequence: Synthetic oligonucleotide
  Sense strand starting at position 3405 of SEQ ID NO: 1880879
ucuaguuaagccuagaaua

SEQ ID NO: 2000957 - RNA, 19 nt, Artificial Sequence
  Description of Artificial Sequence: Synthetic oligonucleotide
  Antisense strand to SEQ ID NO: 2000956
uauucuaggcuuaacuaga

SEQ ID NO: 2000958 - RNA, 19 nt, Artificial Sequence
  Description of Artificial Sequence: Synthetic oligonucleotide
  Sense strand starting at position 3413 of SEQ ID NO: 1880879
agccuagaauacuuaaagu

SEQ ID NO: 2000959 - RNA, 19 nt, Artificial Sequence
  Description of Artificial Sequence: Synthetic oligonucleotide
  Antisense strand to SEQ ID NO: 2000958
acuuuaaguauucuaggcu

SEQ ID NO: 2000960 - RNA, 19 nt, Artificial Sequence
  Description of Artificial Sequence: Synthetic oligonucleotide
  Sense strand starting at position 3487 of SEQ ID NO: 1880879
auccaagugucacuaaaua

SEQ ID NO: 2000961 - RNA, 19 nt, Artificial Sequence
  Description of Artificial Sequence: Synthetic oligonucleotide
  Antisense strand to SEQ ID NO: 2000960
uauuuagugacacuuggau

SEQ ID NO: 2000962 - RNA, 19 nt, Artificial Sequence
  Description of Artificial Sequence: Synthetic oligonucleotide
  Sense strand starting at position 3594 of SEQ ID NO: 1880879
uccaaaguguaaguuuaua

SEQ ID NO: 2000963 - RNA, 19 nt, Artificial Sequence
  Description of Artificial Sequence: Synthetic oligonucleotide
  Antisense strand to SEQ ID NO: 2000962
uauaaacuuacacuuugga

SEQ ID NO: 2000964 - RNA, 19 nt, Artificial Sequence
  Description of Artificial Sequence: Synthetic oligonucleotide
  Sense strand starting at position 3668 of SEQ ID NO: 1880879
gucaaugacucauucuaga

SEQ ID NO: 2000965 - RNA, 19 nt, Artificial Sequence
  Description of Artificial Sequence: Synthetic oligonucleotide
  Antisense strand to SEQ ID NO: 2000964
ucuagaaugagucauugac

SEQ ID NO: 2000966 - RNA, 19 nt, Artificial Sequence
  Description of Artificial Sequence: Synthetic oligonucleotide
  Sense strand starting at position 3686 of SEQ ID NO: 1880879
aggagaacuuuaguaaugu

SEQ ID NO: 2000967 - RNA, 19 nt, Artificial Sequence
  Description of Artificial Sequence: Synthetic oligonucleotide
  Antisense strand to SEQ ID NO: 2000966
acauuacuaaaguucuccu

SEQ ID NO: 2000968 - RNA, 19 nt, Artificial Sequence
  Description of Artificial Sequence: Synthetic oligonucleotide
  Sense strand starting at position 3723 of SEQ ID NO: 1880879
uccugugcccguguuagaa

SEQ ID NO: 2000969 - RNA, 19 nt, Artificial Sequence
  Description of Artificial Sequence: Synthetic oligonucleotide
  Antisense strand to SEQ ID NO: 2000968
uucuaacacgggcacagga

SEQ ID NO: 2000970 - RNA, 19 nt, Artificial Sequence
  Description of Artificial Sequence: Synthetic oligonucleotide
  Sense strand starting at position 3781 of SEQ ID NO: 1880879
cuacuuccucccgaguuau

SEQ ID NO: 2000971 - RNA, 19 nt, Artificial Sequence
  Description of Artificial Sequence: Synthetic oligonucleotide
  Antisense strand to SEQ ID NO: 2000970
auaacucgggaggaaguag

SEQ ID NO: 2000972 - RNA, 19 nt, Artificial Sequence
  Description of Artificial Sequence: Synthetic oligonucleotide
  Sense strand starting at position 3785 of SEQ ID NO: 1880879
uuccucccgaguuaugaga

SEQ ID NO: 2000973 - RNA, 19 nt, Artificial Sequence
  Description of Artificial Sequence: Synthetic oligonucleotide
  Antisense strand to SEQ ID NO: 2000972
ucucauaacucgggaggaa

SEQ ID NO: 2000974 - RNA, 19 nt, Artificial Sequence
  Description of Artificial Sequence: Synthetic oligonucleotide
  Sense strand starting at position 3800 of SEQ ID NO: 1880879
gagacucaaggccauguua

SEQ ID NO: 2000975 - RNA, 19 nt, Artificial Sequence
  Description of Artificial Sequence: Synthetic oligonucleotide
  Antisense strand to SEQ ID NO: 2000974
uaacauggccuugagucuc

SEQ ID NO: 2000976 - RNA, 19 nt, Artificial Sequence
  Description of Artificial Sequence: Synthetic oligonucleotide
  Sense strand starting at position 3802 of SEQ ID NO: 1880879
gacucaaggccauguuaua

SEQ ID NO: 2000977 - RNA, 19 nt, Artificial Sequence
  Description of Artificial Sequence: Synthetic oligonucleotide
  Antisense strand to SEQ ID NO: 2000976
uauaacauggccuugaguc

SEQ ID NO: 2000978 - RNA, 19 nt, Artificial Sequence
  Description of Artificial Sequence: Synthetic oligonucleotide
  Sense strand starting at position 29 of SEQ ID NO: 1880880
uccugaguucugggagaaa

SEQ ID NO: 2000979 - RNA, 19 nt, Artificial Sequence
  Description of Artificial Sequence: Synthetic oligonucleotide
  Antisense strand to SEQ ID NO: 2000978
uuucucccagaacucagga

SEQ ID NO: 2000980 - RNA, 19 nt, Artificial Sequence
  Description of Artificial Sequence: Synthetic oligonucleotide
  Sense strand starting at position 83 of SEQ ID NO: 1880880
ugugauaucuaaucuucug

SEQ ID NO: 2000981 - RNA, 19 nt, Artificial Sequence
  Description of Artificial Sequence: Synthetic oligonucleotide
  Antisense strand to SEQ ID NO: 2000980
cagaagauuagauaucaca

SEQ ID NO: 2000982 - RNA, 19 nt, Artificial Sequence
  Description of Artificial Sequence: Synthetic oligonucleotide
  Sense strand starting at position 235 of SEQ ID NO: 1880880
cccauuucuuaggaauaga

SEQ ID NO: 2000983 - RNA, 19 nt, Artificial Sequence
  Description of Artificial Sequence: Synthetic oligonucleotide
  Antisense strand to SEQ ID NO: 2000982
ucuauuccuaagaaauggg

SEQ ID NO: 2000984 - RNA, 19 nt, Artificial Sequence
  Description of Artificial Sequence: Synthetic oligonucleotide
  Sense strand starting at position 252 of SEQ ID NO: 1880880
gaggcauuaguugaaauuc

SEQ ID NO: 2000985 - RNA, 19 nt, Artificial Sequence
  Description of Artificial Sequence: Synthetic oligonucleotide
  Antisense strand to SEQ ID NO: 2000984
gaauuucaacuaaugccuc

SEQ ID NO: 2000986 - RNA, 19 nt, Artificial Sequence
  Description of Artificial Sequence: Synthetic oligonucleotide
  Sense strand starting at position 348 of SEQ ID NO: 1880880
aucugcuuucguguagcau

SEQ ID NO: 2000987 - RNA, 19 nt, Artificial Sequence
  Description of Artificial Sequence: Synthetic oligonucleotide
  Antisense strand to SEQ ID NO: 2000986
augcuacacgaaagcagau

SEQ ID NO: 2000988 - RNA, 19 nt, Artificial Sequence
  Description of Artificial Sequence: Synthetic oligonucleotide
  Sense strand starting at position 717 of SEQ ID NO: 1880880
ugucuuccagaggagugau

SEQ ID NO: 2000989 - RNA, 19 nt, Artificial Sequence
  Description of Artificial Sequence: Synthetic oligonucleotide
  Antisense strand to SEQ ID NO: 2000988
aucacuccucuggaagaca

SEQ ID NO: 2000990 - RNA, 19 nt, Artificial Sequence
  Description of Artificial Sequence: Synthetic oligonucleotide
  Sense strand starting at position 720 of SEQ ID NO: 1880880
cuuccagaggagugauugu

SEQ ID NO: 2000991 - RNA, 19 nt, Artificial Sequence
  Description of Artificial Sequence: Synthetic oligonucleotide
  Antisense strand to SEQ ID NO: 2000990
acaaucacuccucuggaag

SEQ ID NO: 2000992 - RNA, 19 nt, Artificial Sequence
  Description of Artificial Sequence: Synthetic oligonucleotide
  Sense strand starting at position 955 of SEQ ID NO: 1880880
cccacauggugaccaauau

SEQ ID NO: 2000993 - RNA, 19 nt, Artificial Sequence
  Description of Artificial Sequence: Synthetic oligonucleotide
  Antisense strand to SEQ ID NO: 2000992
auauuggucaccauguggg

SEQ ID NO: 2000994 - RNA, 19 nt, Artificial Sequence
  Description of Artificial Sequence: Synthetic oligonucleotide
  Sense strand starting at position 1008 of SEQ ID NO: 1880880
aaguuucuccaugaggcua

SEQ ID NO: 2000995 - RNA, 19 nt, Artificial Sequence
  Description of Artificial Sequence: Synthetic oligonucleotide
  Antisense strand to SEQ ID NO: 2000994
uagccucauggagaaacuu

SEQ ID NO: 2000996 - RNA, 19 nt, Artificial Sequence
  Description of Artificial Sequence: Synthetic oligonucleotide
  Sense strand starting at position 1046 of SEQ ID NO: 1880880
cucaguucucucuauggga

SEQ ID NO: 2000997 - RNA, 19 nt, Artificial Sequence
  Description of Artificial Sequence: Synthetic oligonucleotide
  Antisense strand to SEQ ID NO: 2000996
ucccauagagagaacugag

SEQ ID NO: 2000998 - RNA, 19 nt, Artificial Sequence
  Description of Artificial Sequence: Synthetic oligonucleotide
  Sense strand starting at position 1048 of SEQ ID NO: 1880880
caguucucucuaugggaau

SEQ ID NO: 2000999 - RNA, 19 nt, Artificial Sequence
  Description of Artificial Sequence: Synthetic oligonucleotide
  Antisense strand to SEQ ID NO: 2000998
auucccauagagagaacug

SEQ ID NO: 2001000 - RNA, 19 nt, Artificial Sequence
  Description of Artificial Sequence: Synthetic oligonucleotide
  Sense strand starting at position 1112 of SEQ ID NO: 1880880
acugauuuccguuggugga

SEQ ID NO: 2001001 - RNA, 19 nt, Artificial Sequence
  Description of Artificial Sequence: Synthetic oligonucleotide
  Antisense strand to SEQ ID NO: 2001000
uccaccaacggaaaucagu

SEQ ID NO: 2001002 - RNA, 19 nt, Artificial Sequence
  Description of Artificial Sequence: Synthetic oligonucleotide
  Sense strand starting at position 1113 of SEQ ID NO: 1880880
cugauuuccguugguggau

SEQ ID NO: 2001003 - RNA, 19 nt, Artificial Sequence
  Description of Artificial Sequence: Synthetic oligonucleotide
  Antisense strand to SEQ ID NO: 2001002
auccaccaacggaaaucag

SEQ ID NO: 2001004 - RNA, 19 nt, Artificial Sequence
  Description of Artificial Sequence: Synthetic oligonucleotide
  Sense strand starting at position 1114 of SEQ ID NO: 1880880
ugauuuccguugguggaua

SEQ ID NO: 2001005 - RNA, 19 nt, Artificial Sequence
  Description of Artificial Sequence: Synthetic oligonucleotide
  Antisense strand to SEQ ID NO: 2001004
uauccaccaacggaaauca

SEQ ID NO: 2001006 - RNA, 19 nt, Artificial Sequence
  Description of Artificial Sequence: Synthetic oligonucleotide
  Sense strand starting at position 1275 of SEQ ID NO: 1880880
uugggaauuccugguuuaa

SEQ ID NO: 2001007 - RNA, 19 nt, Artificial Sequence
  Description of Artificial Sequence: Synthetic oligonucleotide
  Antisense strand to SEQ ID NO: 2001006
uuaaaccaggaauucccaa

SEQ ID NO: 2001008 - RNA, 19 nt, Artificial Sequence
  Description of Artificial Sequence: Synthetic oligonucleotide
  Sense strand starting at position 1277 of SEQ ID NO: 1880880
gggaauuccugguuuaaau

SEQ ID NO: 2001009 - RNA, 19 nt, Artificial Sequence
  Description of Artificial Sequence: Synthetic oligonucleotide
  Antisense strand to SEQ ID NO: 2001008
auuuaaaccaggaauuccc

SEQ ID NO: 2001010 - RNA, 19 nt, Artificial Sequence
  Description of Artificial Sequence: Synthetic oligonucleotide
  Sense strand starting at position 1299 of SEQ ID NO: 1880880
cugggcuaaguguaaauca

SEQ ID NO: 2001011 - RNA, 19 nt, Artificial Sequence
  Description of Artificial Sequence: Synthetic oligonucleotide
  Antisense strand to SEQ ID NO: 2001010
ugauuuacacuuagcccag

SEQ ID NO: 2001012 - RNA, 19 nt, Artificial Sequence
  Description of Artificial Sequence: Synthetic oligonucleotide
  Sense strand starting at position 1332 of SEQ ID NO: 1880880
cugcucuuacaaggagaaa

SEQ ID NO: 2001013 - RNA, 19 nt, Artificial Sequence
  Description of Artificial Sequence: Synthetic oligonucleotide
  Antisense strand to SEQ ID NO: 2001012
uuucuccuuguaagagcag

SEQ ID NO: 2001014 - RNA, 19 nt, Artificial Sequence
  Description of Artificial Sequence: Synthetic oligonucleotide
  Sense strand starting at position 1364 of SEQ ID NO: 1880880
cagaaacaccagggucauu

SEQ ID NO: 2001015 - RNA, 19 nt, Artificial Sequence
  Description of Artificial Sequence: Synthetic oligonucleotide
  Antisense strand to SEQ ID NO: 2001014
aaugacccugguguuucug

SEQ ID NO: 2001016 - RNA, 19 nt, Artificial Sequence
  Description of Artificial Sequence: Synthetic oligonucleotide
  Sense strand starting at position 1530 of SEQ ID NO: 1880880
uaucaaagaguuggaggua

SEQ ID NO: 2001017 - RNA, 19 nt, Artificial Sequence
  Description of Artificial Sequence: Synthetic oligonucleotide
  Antisense strand to SEQ ID NO: 2001016
uaccuccaacucuuugaua

SEQ ID NO: 2001018 - RNA, 19 nt, Artificial Sequence
  Description of Artificial Sequence: Synthetic oligonucleotide
  Sense strand starting at position 1640 of SEQ ID NO: 1880880
gggcucagucucuaaggua

SEQ ID NO: 2001019 - RNA, 19 nt, Artificial Sequence
  Description of Artificial Sequence: Synthetic oligonucleotide
  Antisense strand to SEQ ID NO: 2001018
uaccuuagagacugagccc

SEQ ID NO: 2001020 - RNA, 19 nt, Artificial Sequence
  Description of Artificial Sequence: Synthetic oligonucleotide
  Sense strand starting at position 1717 of SEQ ID NO: 1880880
ggcagauuauugcuaggag

SEQ ID NO: 2001021 - RNA, 19 nt, Artificial Sequence
  Description of Artificial Sequence: Synthetic oligonucleotide
  Antisense strand to SEQ ID NO: 2001020
cuccuagcaauaaucugcc

SEQ ID NO: 2001022 - RNA, 19 nt, Artificial Sequence
  Description of Artificial Sequence: Synthetic oligonucleotide
  Sense strand starting at position 1720 of SEQ ID NO: 1880880
agauuauugcuaggagguu

SEQ ID NO: 2001023 - RNA, 19 nt, Artificial Sequence
  Description of Artificial Sequence: Synthetic oligonucleotide
  Antisense strand to SEQ ID NO: 2001022
aaccuccuagcaauaaucu

SEQ ID NO: 2001024 - RNA, 19 nt, Artificial Sequence
  Description of Artificial Sequence: Synthetic oligonucleotide
  Sense strand starting at position 1729 of SEQ ID NO: 1880880
cuaggagguucuuccuuaa

SEQ ID NO: 2001025 - RNA, 19 nt, Artificial Sequence
  Description of Artificial Sequence: Synthetic oligonucleotide
  Antisense strand to SEQ ID NO: 2001024
uuaaggaagaaccuccuag

SEQ ID NO: 2001026 - RNA, 19 nt, Artificial Sequence
  Description of Artificial Sequence: Synthetic oligonucleotide
  Sense strand starting at position 1732 of SEQ ID NO: 1880880
ggagguucuuccuuaaaca

SEQ ID NO: 2001027 - RNA, 19 nt, Artificial Sequence
  Description of Artificial Sequence: Synthetic oligonucleotide
  Antisense strand to SEQ ID NO: 2001026
uguuuaaggaagaaccucc

SEQ ID NO: 2001028 - RNA, 19 nt, Artificial Sequence
  Description of Artificial Sequence: Synthetic oligonucleotide
  Sense strand starting at position 1790 of SEQ ID NO: 1880880
ugaauuccauccuuggaag

SEQ ID NO: 2001029 - RNA, 19 nt, Artificial Sequence
  Description of Artificial Sequence: Synthetic oligonucleotide
  Antisense strand to SEQ ID NO: 2001028
cuuccaaggauggaauuca

SEQ ID NO: 2001030 - RNA, 19 nt, Artificial Sequence
  Description of Artificial Sequence: Synthetic oligonucleotide
  Sense strand starting at position 1999 of SEQ ID NO: 1880880
cugugcgaccaauagaaua

SEQ ID NO: 2001031 - RNA, 19 nt, Artificial Sequence
  Description of Artificial Sequence: Synthetic oligonucleotide
  Antisense strand to SEQ ID NO: 2001030
uauucuauuggucgcacag

SEQ ID NO: 2001032 - RNA, 19 nt, Artificial Sequence
  Description of Artificial Sequence: Synthetic oligonucleotide
  Sense strand starting at position 2094 of SEQ ID NO: 1880880
uuggauuggucacucugga

SEQ ID NO: 2001033 - RNA, 19 nt, Artificial Sequence
  Description of Artificial Sequence: Synthetic oligonucleotide
  Antisense strand to SEQ ID NO: 2001032
uccagagugaccaauccaa

SEQ ID NO: 2001034 - RNA, 19 nt, Artificial Sequence
  Description of Artificial Sequence: Synthetic oligonucleotide
  Sense strand starting at position 2146 of SEQ ID NO: 1880880
uggagagguccauguggaa

SEQ ID NO: 2001035 - RNA, 19 nt, Artificial Sequence
  Description of Artificial Sequence: Synthetic oligonucleotide
  Antisense strand to SEQ ID NO: 2001034
uuccacauggaccucucca

SEQ ID NO: 2001036 - RNA, 19 nt, Artificial Sequence
  Description of Artificial Sequence: Synthetic oligonucleotide
  Sense strand starting at position 2418 of SEQ ID NO: 1880880
aguauucuuuaagcaagaa

SEQ ID NO: 2001037 - RNA, 19 nt, Artificial Sequence
  Description of Artificial Sequence: Synthetic oligonucleotide
  Antisense strand to SEQ ID NO: 2001036
uucuugcuuaaagaauacu

SEQ ID NO: 2001038 - RNA, 19 nt, Artificial Sequence
  Description of Artificial Sequence: Synthetic oligonucleotide
  Sense strand starting at position 3256 of SEQ ID NO: 1880880
ggucaaugcgaauacauca

SEQ ID NO: 2001039 - RNA, 19 nt, Artificial Sequence
  Description of Artificial Sequence: Synthetic oligonucleotide
  Antisense strand to SEQ ID NO: 2001038
ugauguauucgcauugacc

SEQ ID NO: 2001040 - RNA, 19 nt, Artificial Sequence
  Description of Artificial Sequence: Synthetic oligonucleotide
  Sense strand starting at position 3332 of SEQ ID NO: 1880880
uagguaaacccauguugag

SEQ ID NO: 2001041 - RNA, 19 nt, Artificial Sequence
  Description of Artificial Sequence: Synthetic oligonucleotide
  Antisense strand to SEQ ID NO: 2001040
cucaacauggguuuaccua

SEQ ID NO: 2001042 - RNA, 19 nt, Artificial Sequence
  Description of Artificial Sequence: Synthetic oligonucleotide
  Sense strand starting at position 3373 of SEQ ID NO: 1880880
uaaagaggucacuggcauu

SEQ ID NO: 2001043 - RNA, 19 nt, Artificial Sequence
  Description of Artificial Sequence: Synthetic oligonucleotide
  Antisense strand to SEQ ID NO: 2001042
aaugccagugaccucuuua

SEQ ID NO: 2001044 - RNA, 19 nt, Artificial Sequence
  Description of Artificial Sequence: Synthetic oligonucleotide
  Sense strand starting at position 3523 of SEQ ID NO: 1880880
gguggcauuucccucauca

SEQ ID NO: 2001045 - RNA, 19 nt, Artificial Sequence
  Description of Artificial Sequence: Synthetic oligonucleotide
  Antisense strand to SEQ ID NO: 2001044
ugaugagggaaaugccacc

SEQ ID NO: 2001046 - RNA, 19 nt, Artificial Sequence
  Description of Artificial Sequence: Synthetic oligonucleotide
  Sense strand starting at position 3527 of SEQ ID NO: 1880880
gcauuucccucaucagucu

SEQ ID NO: 2001047 - RNA, 19 nt, Artificial Sequence
  Description of Artificial Sequence: Synthetic oligonucleotide
  Antisense strand to SEQ ID NO: 2001046
agacugaugagggaaaugc

SEQ ID NO: 2001048 - RNA, 19 nt, Artificial Sequence
  Description of Artificial Sequence: Synthetic oligonucleotide
  Sense strand starting at position 3604 of SEQ ID NO: 1880880
guaauaaauuggucuaaug

SEQ ID NO: 2001049 - RNA, 19 nt, Artificial Sequence
  Description of Artificial Sequence: Synthetic oligonucleotide
  Antisense strand to SEQ ID NO: 2001048
cauuagaccaauuuauuac

SEQ ID NO: 2001050 - RNA, 19 nt, Artificial Sequence
  Description of Artificial Sequence: Synthetic oligonucleotide
  Sense strand starting at position 3788 of SEQ ID NO: 1880880
cagguuucucaguacauug

SEQ ID NO: 2001051 - RNA, 19 nt, Artificial Sequence
  Description of Artificial Sequence: Synthetic oligonucleotide
  Antisense strand to SEQ ID NO: 2001050
caauguacugagaaaccug

SEQ ID NO: 2001052 - RNA, 19 nt, Artificial Sequence
  Description of Artificial Sequence: Synthetic oligonucleotide
  Sense strand starting at position 3790 of SEQ ID NO: 1880880
gguuucucaguacauugaa

SEQ ID NO: 2001053 - RNA, 19 nt, Artificial Sequence
  Description of Artificial Sequence: Synthetic oligonucleotide
  Antisense strand to SEQ ID NO: 2001052
uucaauguacugagaaacc

SEQ ID NO: 2001054 - RNA, 19 nt, Artificial Sequence
  Description of Artificial Sequence: Synthetic oligonucleotide
  Sense strand starting at position 3793 of SEQ ID NO: 1880880
uucucaguacauugaagua

SEQ ID NO: 2001055 - RNA, 19 nt, Artificial Sequence
  Description of Artificial Sequence: Synthetic oligonucleotide
  Antisense strand to SEQ ID NO: 2001054
uacuucaauguacugagaa

SEQ ID NO: 2001056 - RNA, 19 nt, Artificial Sequence
  Description of Artificial Sequence: Synthetic oligonucleotide
  Sense strand starting at position 3821 of SEQ ID NO: 1880880
uguaccugugaugaguaaa

SEQ ID NO: 2001057 - RNA, 19 nt, Artificial Sequence
  Description of Artificial Sequence: Synthetic oligonucleotide
  Antisense strand to SEQ ID NO: 2001056
uuuacucaucacagguaca

SEQ ID NO: 2001058 - RNA, 19 nt, Artificial Sequence
  Description of Artificial Sequence: Synthetic oligonucleotide
  Sense strand starting at position 208 of SEQ ID NO: 1880881
uuccaaggguuucuaaaua

SEQ ID NO: 2001059 - RNA, 19 nt, Artificial Sequence
  Description of Artificial Sequence: Synthetic oligonucleotide
  Antisense strand to SEQ ID NO: 2001058
uauuuagaaacccuuggaa

SEQ ID NO: 2001060 - RNA, 19 nt, Artificial Sequence
  Description of Artificial Sequence: Synthetic oligonucleotide
  Sense strand starting at position 1025 of SEQ ID NO: 1880881
cauaguagguguuuaacaa

SEQ ID NO: 2001061 - RNA, 19 nt, Artificial Sequence
  Description of Artificial Sequence: Synthetic oligonucleotide
  Antisense strand to SEQ ID NO: 2001060
uuguuaaacaccuacuaug

SEQ ID NO: 2001062 - RNA, 19 nt, Artificial Sequence
  Description of Artificial Sequence: Synthetic oligonucleotide
  Sense strand starting at position 1071 of SEQ ID NO: 1880881
acaaacauuugucagagau

SEQ ID NO: 2001063 - RNA, 19 nt, Artificial Sequence
  Description of Artificial Sequence: Synthetic oligonucleotide
  Antisense strand to SEQ ID NO: 2001062
aucucugacaaauguuugu

SEQ ID NO: 2001064 - RNA, 19 nt, Artificial Sequence
  Description of Artificial Sequence: Synthetic oligonucleotide
  Sense strand starting at position 1098 of SEQ ID NO: 1880881
agggauauaugucuuuaag

SEQ ID NO: 2001065 - RNA, 19 nt, Artificial Sequence
  Description of Artificial Sequence: Synthetic oligonucleotide
  Antisense strand to SEQ ID NO: 2001064
cuuaaagacauauaucccu

SEQ ID NO: 2001066 - RNA, 19 nt, Artificial Sequence
  Description of Artificial Sequence: Synthetic oligonucleotide
  Sense strand starting at position 1100 of SEQ ID NO: 1880881
ggauauaugucuuuaaggg

SEQ ID NO: 2001067 - RNA, 19 nt, Artificial Sequence
  Description of Artificial Sequence: Synthetic oligonucleotide
  Antisense strand to SEQ ID NO: 2001066
cccuuaaagacauauaucc

SEQ ID NO: 2001068 - RNA, 19 nt, Artificial Sequence
  Description of Artificial Sequence: Synthetic oligonucleotide
  Sense strand starting at position 1101 of SEQ ID NO: 1880881
gauauaugucuuuaagggc

SEQ ID NO: 2001069 - RNA, 19 nt, Artificial Sequence
  Description of Artificial Sequence: Synthetic oligonucleotide
  Antisense strand to SEQ ID NO: 2001068
gcccuuaaagacauauauc

SEQ ID NO: 2001070 - RNA, 19 nt, Artificial Sequence
  Description of Artificial Sequence: Synthetic oligonucleotide
  Sense strand starting at position 1334 of SEQ ID NO: 1880881
uaagaaagugaccaucgua

SEQ ID NO: 2001071 - RNA, 19 nt, Artificial Sequence
  Description of Artificial Sequence: Synthetic oligonucleotide
  Antisense strand to SEQ ID NO: 2001070
uacgauggucacuuucuua

SEQ ID NO: 2001072 - RNA, 19 nt, Artificial Sequence
  Description of Artificial Sequence: Synthetic oligonucleotide
  Sense strand starting at position 1337 of SEQ ID NO: 1880881
gaaagugaccaucguacaa

SEQ ID NO: 2001073 - RNA, 19 nt, Artificial Sequence
  Description of Artificial Sequence: Synthetic oligonucleotide
  Antisense strand to SEQ ID NO: 2001072
uuguacgauggucacuuuc

SEQ ID NO: 2001074 - RNA, 19 nt, Artificial Sequence
  Description of Artificial Sequence: Synthetic oligonucleotide
  Sense strand starting at position 1385 of SEQ ID NO: 1880881
ggagacuauucucugguga

SEQ ID NO: 2001075 - RNA, 19 nt, Artificial Sequence
  Description of Artificial Sequence: Synthetic oligonucleotide
  Antisense strand to SEQ ID NO: 2001074
ucaccagagaauagucucc

SEQ ID NO: 2001076 - RNA, 19 nt, Artificial Sequence
  Description of Artificial Sequence: Synthetic oligonucleotide
  Sense strand starting at position 1386 of SEQ ID NO: 1880881
gagacuauucucuggugaa

SEQ ID NO: 2001077 - RNA, 19 nt, Artificial Sequence
  Description of Artificial Sequence: Synthetic oligonucleotide
  Antisense strand to SEQ ID NO: 2001076
uucaccagagaauagucuc

SEQ ID NO: 2001078 - RNA, 19 nt, Artificial Sequence
  Description of Artificial Sequence: Synthetic oligonucleotide
  Sense strand starting at position 1390 of SEQ ID NO: 1880881
cuauucucuggugaaaggu

SEQ ID NO: 2001079 - RNA, 19 nt, Artificial Sequence
  Description of Artificial Sequence: Synthetic oligonucleotide
  Antisense strand to SEQ ID NO: 2001078
accuuucaccagagaauag

SEQ ID NO: 2001080 - RNA, 19 nt, Artificial Sequence
  Description of Artificial Sequence: Synthetic oligonucleotide
  Sense strand starting at position 1400 of SEQ ID NO: 1880881
gugaaagguaagcaaguuu

SEQ ID NO: 2001081 - RNA, 19 nt, Artificial Sequence
  Description of Artificial Sequence: Synthetic oligonucleotide
  Antisense strand to SEQ ID NO: 2001080
aaacuugcuuaccuuucac

SEQ ID NO: 2001082 - RNA, 19 nt, Artificial Sequence
  Description of Artificial Sequence: Synthetic oligonucleotide
  Sense strand starting at position 1411 of SEQ ID NO: 1880881
gcaaguuugcaggaggauu

SEQ ID NO: 2001083 - RNA, 19 nt, Artificial Sequence
  Description of Artificial Sequence: Synthetic oligonucleotide
  Antisense strand to SEQ ID NO: 2001082
aauccuccugcaaacuugc

SEQ ID NO: 2001084 - RNA, 19 nt, Artificial Sequence
  Description of Artificial Sequence: Synthetic oligonucleotide
  Sense strand starting at position 1457 of SEQ ID NO: 1880881
aaagcagacucgguaauua

SEQ ID NO: 2001085 - RNA, 19 nt, Artificial Sequence
  Description of Artificial Sequence: Synthetic oligonucleotide
  Antisense strand to SEQ ID NO: 2001084
uaauuaccgagucugcuuu

SEQ ID NO: 2001086 - RNA, 19 nt, Artificial Sequence
  Description of Artificial Sequence: Synthetic oligonucleotide
  Sense strand starting at position 1483 of SEQ ID NO: 1880881
ucaaaugaugccuaaacgu

SEQ ID NO: 2001087 - RNA, 19 nt, Artificial Sequence
  Description of Artificial Sequence: Synthetic oligonucleotide
  Antisense strand to SEQ ID NO: 2001086
acguuuaggcaucauuuga

SEQ ID NO: 2001088 - RNA, 19 nt, Artificial Sequence
  Description of Artificial Sequence: Synthetic oligonucleotide
  Sense strand starting at position 1556 of SEQ ID NO: 1880881
ccagaaggugcccaguaaa

SEQ ID NO: 2001089 - RNA, 19 nt, Artificial Sequence
  Description of Artificial Sequence: Synthetic oligonucleotide
  Antisense strand to SEQ ID NO: 2001088
uuuacugggcaccuucugg

SEQ ID NO: 2001090 - RNA, 19 nt, Artificial Sequence
  Description of Artificial Sequence: Synthetic oligonucleotide
  Sense strand starting at position 1559 of SEQ ID NO: 1880881
gaaggugcccaguaaauua

SEQ ID NO: 2001091 - RNA, 19 nt, Artificial Sequence
  Description of Artificial Sequence: Synthetic oligonucleotide
  Antisense strand to SEQ ID NO: 2001090
uaauuuacugggcaccuuc

SEQ ID NO: 2001092 - RNA, 19 nt, Artificial Sequence
  Description of Artificial Sequence: Synthetic oligonucleotide
  Sense strand starting at position 1640 of SEQ ID NO: 1880881
ggcugacucccacaaacau

SEQ ID NO: 2001093 - RNA, 19 nt, Artificial Sequence
  Description of Artificial Sequence: Synthetic oligonucleotide
  Antisense strand to SEQ ID NO: 2001092
auguuugugggagucagcc

SEQ ID NO: 2001094 - RNA, 19 nt, Artificial Sequence
  Description of Artificial Sequence: Synthetic oligonucleotide
  Sense strand starting at position 1678 of SEQ ID NO: 1880881
ccacguggagucgaggaau

SEQ ID NO: 2001095 - RNA, 19 nt, Artificial Sequence
  Description of Artificial Sequence: Synthetic oligonucleotide
  Antisense strand to SEQ ID NO: 2001094
auuccucgacuccacgugg

SEQ ID NO: 2001096 - RNA, 19 nt, Artificial Sequence
  Description of Artificial Sequence: Synthetic oligonucleotide
  Sense strand starting at position 1767 of SEQ ID NO: 1880881
cgccgaauccuggcgauac

SEQ ID NO: 2001097 - RNA, 19 nt, Artificial Sequence
  Description of Artificial Sequence: Synthetic oligonucleotide
  Antisense strand to SEQ ID NO: 2001096
guaucgccaggauucggcg

SEQ ID NO: 2001098 - RNA, 19 nt, Artificial Sequence
  Description of Artificial Sequence: Synthetic oligonucleotide
  Sense strand starting at position 1771 of SEQ ID NO: 1880881
gaauccuggcgauaccaaa

SEQ ID NO: 2001099 - RNA, 19 nt, Artificial Sequence
  Description of Artificial Sequence: Synthetic oligonucleotide
  Antisense strand to SEQ ID NO: 2001098
uuugguaucgccaggauuc

SEQ ID NO: 2001100 - RNA, 19 nt, Artificial Sequence
  Description of Artificial Sequence: Synthetic oligonucleotide
  Sense strand starting at position 1890 of SEQ ID NO: 1880881
gcacgucggcgucugagaa

SEQ ID NO: 2001101 - RNA, 19 nt, Artificial Sequence
  Description of Artificial Sequence: Synthetic oligonucleotide
  Antisense strand to SEQ ID NO: 2001100
uucucagacgccgacgugc

SEQ ID NO: 2001102 - RNA, 19 nt, Artificial Sequence
  Description of Artificial Sequence: Synthetic oligonucleotide
  Sense strand starting at position 2033 of SEQ ID NO: 1880881
aggagucaucgcgagaauu

SEQ ID NO: 2001103 - RNA, 19 nt, Artificial Sequence
  Description of Artificial Sequence: Synthetic oligonucleotide
  Antisense strand to SEQ ID NO: 2001102
aauucucgcgaugacuccu

SEQ ID NO: 2001104 - RNA, 19 nt, Artificial Sequence
  Description of Artificial Sequence: Synthetic oligonucleotide
  Sense strand starting at position 2035 of SEQ ID NO: 1880881
gagucaucgcgagaauuga

SEQ ID NO: 2001105 - RNA, 19 nt, Artificial Sequence
  Description of Artificial Sequence: Synthetic oligonucleotide
  Antisense strand to SEQ ID NO: 2001104
ucaauucucgcgaugacuc

SEQ ID NO: 2001106 - RNA, 19 nt, Artificial Sequence
  Description of Artificial Sequence: Synthetic oligonucleotide
  Sense strand starting at position 2215 of SEQ ID NO: 1880881
cggucucuuguugaaugaa

SEQ ID NO: 2001107 - RNA, 19 nt, Artificial Sequence
  Description of Artificial Sequence: Synthetic oligonucleotide
  Antisense strand to SEQ ID NO: 2001106
uucauucaacaagagaccg

SEQ ID NO: 2001108 - RNA, 19 nt, Artificial Sequence
  Description of Artificial Sequence: Synthetic oligonucleotide
  Sense strand starting at position 2360 of SEQ ID NO: 1880881
ggaacgaguccagggaguu

SEQ ID NO: 2001109 - RNA, 19 nt, Artificial Sequence
  Description of Artificial Sequence: Synthetic oligonucleotide
  Antisense strand to SEQ ID NO: 2001108
aacucccuggacucguucc

SEQ ID NO: 2001110 - RNA, 19 nt, Artificial Sequence
  Description of Artificial Sequence: Synthetic oligonucleotide
  Sense strand starting at position 2361 of SEQ ID NO: 1880881
gaacgaguccagggaguuu

SEQ ID NO: 2001111 - RNA, 19 nt, Artificial Sequence
  Description of Artificial Sequence: Synthetic oligonucleotide
  Antisense strand to SEQ ID NO: 2001110
aaacucccuggacucguuc

SEQ ID NO: 2001112 - RNA, 19 nt, Artificial Sequence
  Description of Artificial Sequence: Synthetic oligonucleotide
  Sense strand starting at position 2429 of SEQ ID NO: 1880881
acgagaaggauucggacua

SEQ ID NO: 2001113 - RNA, 19 nt, Artificial Sequence
  Description of Artificial Sequence: Synthetic oligonucleotide
  Antisense strand to SEQ ID NO: 2001112
uaguccgaauccuucucgu

SEQ ID NO: 2001114 - RNA, 19 nt, Artificial Sequence
  Description of Artificial Sequence: Synthetic oligonucleotide
  Sense strand starting at position 2450 of SEQ ID NO: 1880881
augaguagugcugaaccaa

SEQ ID NO: 2001115 - RNA, 19 nt, Artificial Sequence
  Description of Artificial Sequence: Synthetic oligonucleotide
  Antisense strand to SEQ ID NO: 2001114
uugguucagcacuacucau

SEQ ID NO: 2001116 - RNA, 19 nt, Artificial Sequence
  Description of Artificial Sequence: Synthetic oligonucleotide
  Sense strand starting at position 2680 of SEQ ID NO: 1880881
ugcuauuaucaggaguauu

SEQ ID NO: 2001117 - RNA, 19 nt, Artificial Sequence
  Description of Artificial Sequence: Synthetic oligonucleotide
  Antisense strand to SEQ ID NO: 2001116
aauacuccugauaauagca

SEQ ID NO: 2001118 - RNA, 19 nt, Artificial Sequence
  Description of Artificial Sequence: Synthetic oligonucleotide
  Sense strand starting at position 2730 of SEQ ID NO: 1880881
aaacguuaaugacuuaagu

SEQ ID NO: 2001119 - RNA, 19 nt, Artificial Sequence
  Description of Artificial Sequence: Synthetic oligonucleotide
  Antisense strand to SEQ ID NO: 2001118
acuuaagucauuaacguuu

SEQ ID NO: 2001120 - RNA, 19 nt, Artificial Sequence
  Description of Artificial Sequence: Synthetic oligonucleotide
  Sense strand starting at position 2810 of SEQ ID NO: 1880881
ccacauaauguauguauca

SEQ ID NO: 2001121 - RNA, 19 nt, Artificial Sequence
  Description of Artificial Sequence: Synthetic oligonucleotide
  Antisense strand to SEQ ID NO: 2001120
ugauacauacauuaugugg

SEQ ID NO: 2001122 - RNA, 19 nt, Artificial Sequence
  Description of Artificial Sequence: Synthetic oligonucleotide
  Sense strand starting at position 3261 of SEQ ID NO: 1880881
ugugcauuauuuccaguuu

SEQ ID NO: 2001123 - RNA, 19 nt, Artificial Sequence
  Description of Artificial Sequence: Synthetic oligonucleotide
  Antisense strand to SEQ ID NO: 2001122
aaacuggaaauaaugcaca

SEQ ID NO: 2001124 - RNA, 19 nt, Artificial Sequence
  Description of Artificial Sequence: Synthetic oligonucleotide
  Sense strand starting at position 3340 of SEQ ID NO: 1880881
acgguucuccaccauaauu

SEQ ID NO: 2001125 - RNA, 19 nt, Artificial Sequence
  Description of Artificial Sequence: Synthetic oligonucleotide
  Antisense strand to SEQ ID NO: 2001124
aauuaugguggagaaccgu

SEQ ID NO: 2001126 - RNA, 19 nt, Artificial Sequence
  Description of Artificial Sequence: Synthetic oligonucleotide
  Sense strand starting at position 3457 of SEQ ID NO: 1880881
uugaaaugcuacuuuacag

SEQ ID NO: 2001127 - RNA, 19 nt, Artificial Sequence
  Description of Artificial Sequence: Synthetic oligonucleotide
  Antisense strand to SEQ ID NO: 2001126
cuguaaaguagcauuucaa

SEQ ID NO: 2001128 - RNA, 19 nt, Artificial Sequence
  Description of Artificial Sequence: Synthetic oligonucleotide
  Sense strand starting at position 3949 of SEQ ID NO: 1880881
caguuugaacaguaagcau

SEQ ID NO: 2001129 - RNA, 19 nt, Artificial Sequence
  Description of Artificial Sequence: Synthetic oligonucleotide
  Antisense strand to SEQ ID NO: 2001128
augcuuacuguucaaacug

SEQ ID NO: 2001130 - RNA, 19 nt, Artificial Sequence
  Description of Artificial Sequence: Synthetic oligonucleotide
  Sense strand starting at position 3956 of SEQ ID NO: 1880881
aacaguaagcauuguauga

SEQ ID NO: 2001131 - RNA, 19 nt, Artificial Sequence
  Description of Artificial Sequence: Synthetic oligonucleotide
  Antisense strand to SEQ ID NO: 2001130
ucauacaaugcuuacuguu

SEQ ID NO: 2001132 - RNA, 19 nt, Artificial Sequence
  Description of Artificial Sequence: Synthetic oligonucleotide
  Sense strand starting at position 3960 of SEQ ID NO: 1880881
guaagcauuguaugaauag

SEQ ID NO: 2001133 - RNA, 19 nt, Artificial Sequence
  Description of Artificial Sequence: Synthetic oligonucleotide
  Antisense strand to SEQ ID NO: 2001132
cuauucauacaaugcuuac

SEQ ID NO: 2001134 - RNA, 19 nt, Artificial Sequence
  Description of Artificial Sequence: Synthetic oligonucleotide
  Sense strand starting at position 3967 of SEQ ID NO: 1880881
uuguaugaauaguugaagu

SEQ ID NO: 2001135 - RNA, 19 nt, Artificial Sequence
  Description of Artificial Sequence: Synthetic oligonucleotide
  Antisense strand to SEQ ID NO: 2001134
acuucaacuauucauacaa

SEQ ID NO: 2001136 - RNA, 19 nt, Artificial Sequence
  Description of Artificial Sequence: Synthetic oligonucleotide
  Sense strand starting at position 3969 of SEQ ID NO: 1880881
guaugaauaguugaaguau

SEQ ID NO: 2001137 - RNA, 19 nt, Artificial Sequence
  Description of Artificial Sequence: Synthetic oligonucleotide
  Antisense strand to SEQ ID NO: 2001136
auacuucaacuauucauac

SEQ ID NO: 2001138 - RNA, 19 nt, Artificial Sequence
  Description of Artificial Sequence: Synthetic oligonucleotide
  Sense strand starting at position 69 of SEQ ID NO: 1880882
cgugguguuacagaaauaa

SEQ ID NO: 2001139 - RNA, 19 nt, Artificial Sequence
  Description of Artificial Sequence: Synthetic oligonucleotide
  Antisense strand to SEQ ID NO: 2001138
uuauuucuguaacaccacg

SEQ ID NO: 2001140 - RNA, 19 nt, Artificial Sequence
  Description of Artificial Sequence: Synthetic oligonucleotide
  Sense strand starting at position 94 of SEQ ID NO: 1880882
uccaauguuccagggaaga

SEQ ID NO: 2001141 - RNA, 19 nt, Artificial Sequence
  Description of Artificial Sequence: Synthetic oligonucleotide
  Antisense strand to SEQ ID NO: 2001140
ucuucccuggaacauugga

SEQ ID NO: 2001142 - RNA, 19 nt, Artificial Sequence
  Description of Artificial Sequence: Synthetic oligonucleotide
  Sense strand starting at position 107 of SEQ ID NO: 1880882
ggaagauucccaugguaau

SEQ ID NO: 2001143 - RNA, 19 nt, Artificial Sequence
  Description of Artificial Sequence: Synthetic oligonucleotide
  Antisense strand to SEQ ID NO: 2001142
auuaccaugggaaucuucc

SEQ ID NO: 2001144 - RNA, 19 nt, Artificial Sequence
  Description of Artificial Sequence: Synthetic oligonucleotide
  Sense strand starting at position 108 of SEQ ID NO: 1880882
gaagauucccaugguaauu

SEQ ID NO: 2001145 - RNA, 19 nt, Artificial Sequence
  Description of Artificial Sequence: Synthetic oligonucleotide
  Antisense strand to SEQ ID NO: 2001144
aauuaccaugggaaucuuc

SEQ ID NO: 2001146 - RNA, 19 nt, Artificial Sequence
  Description of Artificial Sequence: Synthetic oligonucleotide
  Sense strand starting at position 148 of SEQ ID NO: 1880882
gggcuuuaaagcuagagag

SEQ ID NO: 2001147 - RNA, 19 nt, Artificial Sequence
  Description of Artificial Sequence: Synthetic oligonucleotide
  Antisense strand to SEQ ID NO: 2001146
cucucuagcuuuaaagccc

SEQ ID NO: 2001148 - RNA, 19 nt, Artificial Sequence
  Description of Artificial Sequence: Synthetic oligonucleotide
  Sense strand starting at position 150 of SEQ ID NO: 1880882
gcuuuaaagcuagagagac

SEQ ID NO: 2001149 - RNA, 19 nt, Artificial Sequence
  Description of Artificial Sequence: Synthetic oligonucleotide
  Antisense strand to SEQ ID NO: 2001148
gucucucuagcuuuaaagc

SEQ ID NO: 2001150 - RNA, 19 nt, Artificial Sequence
  Description of Artificial Sequence: Synthetic oligonucleotide
  Sense strand starting at position 321 of SEQ ID NO: 1880882
ucaggauugccuuaacuuu

SEQ ID NO: 2001151 - RNA, 19 nt, Artificial Sequence
  Description of Artificial Sequence: Synthetic oligonucleotide
  Antisense strand to SEQ ID NO: 2001150
aaaguuaaggcaauccuga

SEQ ID NO: 2001152 - RNA, 19 nt, Artificial Sequence
  Description of Artificial Sequence: Synthetic oligonucleotide
  Sense strand starting at position 359 of SEQ ID NO: 1880882
gagcaacuuggguggaauu

SEQ ID NO: 2001153 - RNA, 19 nt, Artificial Sequence
  Description of Artificial Sequence: Synthetic oligonucleotide
  Antisense strand to SEQ ID NO: 2001152
aauuccacccaaguugcuc

SEQ ID NO: 2001154 - RNA, 19 nt, Artificial Sequence
  Description of Artificial Sequence: Synthetic oligonucleotide
  Sense strand starting at position 369 of SEQ ID NO: 1880882
gguggaauuucagagauua

SEQ ID NO: 2001155 - RNA, 19 nt, Artificial Sequence
  Description of Artificial Sequence: Synthetic oligonucleotide
  Antisense strand to SEQ ID NO: 2001154
uaaucucugaaauuccacc

SEQ ID NO: 2001156 - RNA, 19 nt, Artificial Sequence
  Description of Artificial Sequence: Synthetic oligonucleotide
  Sense strand starting at position 689 of SEQ ID NO: 1880882
cuaugucauggucauauag

SEQ ID NO: 2001157 - RNA, 19 nt, Artificial Sequence
  Description of Artificial Sequence: Synthetic oligonucleotide
  Antisense strand to SEQ ID NO: 2001156
cuauaugaccaugacauag

SEQ ID NO: 2001158 - RNA, 19 nt, Artificial Sequence
  Description of Artificial Sequence: Synthetic oligonucleotide
  Sense strand starting at position 787 of SEQ ID NO: 1880882
guugcaugacuugaauaaa

SEQ ID NO: 2001159 - RNA, 19 nt, Artificial Sequence
  Description of Artificial Sequence: Synthetic oligonucleotide
  Antisense strand to SEQ ID NO: 2001158
uuuauucaagucaugcaac

SEQ ID NO: 2001160 - RNA, 19 nt, Artificial Sequence
  Description of Artificial Sequence: Synthetic oligonucleotide
  Sense strand starting at position 797 of SEQ ID NO: 1880882
uugaauaaauucucggacu

SEQ ID NO: 2001161 - RNA, 19 nt, Artificial Sequence
  Description of Artificial Sequence: Synthetic oligonucleotide
  Antisense strand to SEQ ID NO: 2001160
aguccgagaauuuauucaa

SEQ ID NO: 2001162 - RNA, 19 nt, Artificial Sequence
  Description of Artificial Sequence: Synthetic oligonucleotide
  Sense strand starting at position 913 of SEQ ID NO: 1880882
gaacaugugccugacacau

SEQ ID NO: 2001163 - RNA, 19 nt, Artificial Sequence
  Description of Artificial Sequence: Synthetic oligonucleotide
  Antisense strand to SEQ ID NO: 2001162
augugucaggcacauguuc

SEQ ID NO: 2001164 - RNA, 19 nt, Artificial Sequence
  Description of Artificial Sequence: Synthetic oligonucleotide
  Sense strand starting at position 1323 of SEQ ID NO: 1880882
aacuaugaggccugcaaga

SEQ ID NO: 2001165 - RNA, 19 nt, Artificial Sequence
  Description of Artificial Sequence: Synthetic oligonucleotide
  Antisense strand to SEQ ID NO: 2001164
ucuugcaggccucauaguu

SEQ ID NO: 2001166 - RNA, 19 nt, Artificial Sequence
  Description of Artificial Sequence: Synthetic oligonucleotide
  Sense strand starting at position 1328 of SEQ ID NO: 1880882
ugaggccugcaagaguaua

SEQ ID NO: 2001167 - RNA, 19 nt, Artificial Sequence
  Description of Artificial Sequence: Synthetic oligonucleotide
  Antisense strand to SEQ ID NO: 2001166
uauacucuugcaggccuca

SEQ ID NO: 2001168 - RNA, 19 nt, Artificial Sequence
  Description of Artificial Sequence: Synthetic oligonucleotide
  Sense strand starting at position 1333 of SEQ ID NO: 1880882
ccugcaagaguauauuauu

SEQ ID NO: 2001169 - RNA, 19 nt, Artificial Sequence
  Description of Artificial Sequence: Synthetic oligonucleotide
  Antisense strand to SEQ ID NO: 2001168
aauaauauacucuugcagg

SEQ ID NO: 2001170 - RNA, 19 nt, Artificial Sequence
  Description of Artificial Sequence: Synthetic oligonucleotide
  Sense strand starting at position 1472 of SEQ ID NO: 1880882
guaacugaacuuggagauu

SEQ ID NO: 2001171 - RNA, 19 nt, Artificial Sequence
  Description of Artificial Sequence: Synthetic oligonucleotide
  Antisense strand to SEQ ID NO: 2001170
aaucuccaaguucaguuac

SEQ ID NO: 2001172 - RNA, 19 nt, Artificial Sequence
  Description of Artificial Sequence: Synthetic oligonucleotide
  Sense strand starting at position 1531 of SEQ ID NO: 1880882
gccagauucuaauuacagg

SEQ ID NO: 2001173 - RNA, 19 nt, Artificial Sequence
  Description of Artificial Sequence: Synthetic oligonucleotide
  Antisense strand to SEQ ID NO: 2001172
ccuguaauuagaaucuggc

SEQ ID NO: 2001174 - RNA, 19 nt, Artificial Sequence
  Description of Artificial Sequence: Synthetic oligonucleotide
  Sense strand starting at position 1576 of SEQ ID NO: 1880882
ggaaauaacuugccucaac

SEQ ID NO: 2001175 - RNA, 19 nt, Artificial Sequence
  Description of Artificial Sequence: Synthetic oligonucleotide
  Antisense strand to SEQ ID NO: 2001174
guugaggcaaguuauuucc

SEQ ID NO: 2001176 - RNA, 19 nt, Artificial Sequence
  Description of Artificial Sequence: Synthetic oligonucleotide
  Sense strand starting at position 1606 of SEQ ID NO: 1880882
aaacuugagcccugagaag

SEQ ID NO: 2001177 - RNA, 19 nt, Artificial Sequence
  Description of Artificial Sequence: Synthetic oligonucleotide
  Antisense strand to SEQ ID NO: 2001176
cuucucagggcucaaguuu

SEQ ID NO: 2001178 - RNA, 19 nt, Artificial Sequence
  Description of Artificial Sequence: Synthetic oligonucleotide
  Sense strand starting at position 1637 of SEQ ID NO: 1880882
uuugcuauacaaggaaaga

SEQ ID NO: 2001179 - RNA, 19 nt, Artificial Sequence
  Description of Artificial Sequence: Synthetic oligonucleotide
  Antisense strand to SEQ ID NO: 2001178
ucuuuccuuguauagcaaa

SEQ ID NO: 2001180 - RNA, 19 nt, Artificial Sequence
  Description of Artificial Sequence: Synthetic oligonucleotide
  Sense strand starting at position 2209 of SEQ ID NO: 1880882
gcaccagaauggguuagaa

SEQ ID NO: 2001181 - RNA, 19 nt, Artificial Sequence
  Description of Artificial Sequence: Synthetic oligonucleotide
  Antisense strand to SEQ ID NO: 2001180
uucuaacccauucuggugc

SEQ ID NO: 2001182 - RNA, 19 nt, Artificial Sequence
  Description of Artificial Sequence: Synthetic oligonucleotide
  Sense strand starting at position 2221 of SEQ ID NO: 1880882
guuagaaucacagguggaa

SEQ ID NO: 2001183 - RNA, 19 nt, Artificial Sequence
  Description of Artificial Sequence: Synthetic oligonucleotide
  Antisense strand to SEQ ID NO: 2001182
uuccaccugugauucuaac

SEQ ID NO: 2001184 - RNA, 19 nt, Artificial Sequence
  Description of Artificial Sequence: Synthetic oligonucleotide
  Sense strand starting at position 2486 of SEQ ID NO: 1880882
uuggaaucuccaggacgga

SEQ ID NO: 2001185 - RNA, 19 nt, Artificial Sequence
  Description of Artificial Sequence: Synthetic oligonucleotide
  Antisense strand to SEQ ID NO: 2001184
uccguccuggagauuccaa

SEQ ID NO: 2001186 - RNA, 19 nt, Artificial Sequence
  Description of Artificial Sequence: Synthetic oligonucleotide
  Sense strand starting at position 2513 of SEQ ID NO: 1880882
guuccuguucucuaacaaa

SEQ ID NO: 2001187 - RNA, 19 nt, Artificial Sequence
  Description of Artificial Sequence: Synthetic oligonucleotide
  Antisense strand to SEQ ID NO: 2001186
uuuguuagagaacaggaac

SEQ ID NO: 2001188 - RNA, 19 nt, Artificial Sequence
  Description of Artificial Sequence: Synthetic oligonucleotide
  Sense strand starting at position 2731 of SEQ ID NO: 1880882
caagauaaacagcgugaaa

SEQ ID NO: 2001189 - RNA, 19 nt, Artificial Sequence
  Description of Artificial Sequence: Synthetic oligonucleotide
  Antisense strand to SEQ ID NO: 2001188
uuucacgcuguuuaucuug

SEQ ID NO: 2001190 - RNA, 19 nt, Artificial Sequence
  Description of Artificial Sequence: Synthetic oligonucleotide
  Sense strand starting at position 2733 of SEQ ID NO: 1880882
agauaaacagcgugaaauu

SEQ ID NO: 2001191 - RNA, 19 nt, Artificial Sequence
  Description of Artificial Sequence: Synthetic oligonucleotide
  Antisense strand to SEQ ID NO: 2001190
aauuucacgcuguuuaucu

SEQ ID NO: 2001192 - RNA, 19 nt, Artificial Sequence
  Description of Artificial Sequence: Synthetic oligonucleotide
  Sense strand starting at position 2734 of SEQ ID NO: 1880882
gauaaacagcgugaaauua

SEQ ID NO: 2001193 - RNA, 19 nt, Artificial Sequence
  Description of Artificial Sequence: Synthetic oligonucleotide
  Antisense strand to SEQ ID NO: 2001192
uaauuucacgcuguuuauc

SEQ ID NO: 2001194 - RNA, 19 nt, Artificial Sequence
  Description of Artificial Sequence: Synthetic oligonucleotide
  Sense strand starting at position 2763 of SEQ ID NO: 1880882
uguauauugagucaguuau

SEQ ID NO: 2001195 - RNA, 19 nt, Artificial Sequence
  Description of Artificial Sequence: Synthetic oligonucleotide
  Antisense strand to SEQ ID NO: 2001194
auaacugacucaauauaca

SEQ ID NO: 2001196 - RNA, 19 nt, Artificial Sequence
  Description of Artificial Sequence: Synthetic oligonucleotide
  Sense strand starting at position 2985 of SEQ ID NO: 1880882
uccuaagacucuucugaug

SEQ ID NO: 2001197 - RNA, 19 nt, Artificial Sequence
  Description of Artificial Sequence: Synthetic oligonucleotide
  Antisense strand to SEQ ID NO: 2001196
caucagaagagucuuagga

SEQ ID NO: 2001198 - RNA, 19 nt, Artificial Sequence
  Description of Artificial Sequence: Synthetic oligonucleotide
  Sense strand starting at position 3541 of SEQ ID NO: 1880882
ccacccugucuugaggauu

SEQ ID NO: 2001199 - RNA, 19 nt, Artificial Sequence
  Description of Artificial Sequence: Synthetic oligonucleotide
  Antisense strand to SEQ ID NO: 2001198
aauccucaagacagggugg

SEQ ID NO: 2001200 - RNA, 19 nt, Artificial Sequence
  Description of Artificial Sequence: Synthetic oligonucleotide
  Sense strand starting at position 3592 of SEQ ID NO: 1880882
gggcuuagaggauggugaa

SEQ ID NO: 2001201 - RNA, 19 nt, Artificial Sequence
  Description of Artificial Sequence: Synthetic oligonucleotide
  Antisense strand to SEQ ID NO: 2001200
uucaccauccucuaagccc

SEQ ID NO: 2001202 - RNA, 19 nt, Artificial Sequence
  Description of Artificial Sequence: Synthetic oligonucleotide
  Sense strand starting at position 3605 of SEQ ID NO: 1880882
ggugaaguugaaugacuca

SEQ ID NO: 2001203 - RNA, 19 nt, Artificial Sequence
  Description of Artificial Sequence: Synthetic oligonucleotide
  Antisense strand to SEQ ID NO: 2001202
ugagucauucaacuucacc

SEQ ID NO: 2001204 - RNA, 19 nt, Artificial Sequence
  Description of Artificial Sequence: Synthetic oligonucleotide
  Sense strand starting at position 3697 of SEQ ID NO: 1880882
ucuugaguccagcaugaag

SEQ ID NO: 2001205 - RNA, 19 nt, Artificial Sequence
  Description of Artificial Sequence: Synthetic oligonucleotide
  Antisense strand to SEQ ID NO: 2001204
cuucaugcuggacucaaga

SEQ ID NO: 2001206 - RNA, 19 nt, Artificial Sequence
  Description of Artificial Sequence: Synthetic oligonucleotide
  Sense strand starting at position 3708 of SEQ ID NO: 1880882
gcaugaaggauguguaaga

SEQ ID NO: 2001207 - RNA, 19 nt, Artificial Sequence
  Description of Artificial Sequence: Synthetic oligonucleotide
  Antisense strand to SEQ ID NO: 2001206
ucuuacacauccuucaugc

SEQ ID NO: 2001208 - RNA, 19 nt, Artificial Sequence
  Description of Artificial Sequence: Synthetic oligonucleotide
  Sense strand starting at position 3798 of SEQ ID NO: 1880882
guguuauuagagcauaaag

SEQ ID NO: 2001209 - RNA, 19 nt, Artificial Sequence
  Description of Artificial Sequence: Synthetic oligonucleotide
  Antisense strand to SEQ ID NO: 2001208
cuuuaugcucuaauaacac

SEQ ID NO: 2001210 - RNA, 19 nt, Artificial Sequence
  Description of Artificial Sequence: Synthetic oligonucleotide
  Sense strand starting at position 3800 of SEQ ID NO: 1880882
guuauuagagcauaaagua

SEQ ID NO: 2001211 - RNA, 19 nt, Artificial Sequence
  Description of Artificial Sequence: Synthetic oligonucleotide
  Antisense strand to SEQ ID NO: 2001210
uacuuuaugcucuaauaac

SEQ ID NO: 2001212 - RNA, 19 nt, Artificial Sequence
  Description of Artificial Sequence: Synthetic oligonucleotide
  Sense strand starting at position 3807 of SEQ ID NO: 1880882
gagcauaaaguauaugagu

SEQ ID NO: 2001213 - RNA, 19 nt, Artificial Sequence
  Description of Artificial Sequence: Synthetic oligonucleotide
  Antisense strand to SEQ ID NO: 2001212
acucauauacuuuaugcuc

SEQ ID NO: 2001214 - RNA, 19 nt, Artificial Sequence
  Description of Artificial Sequence: Synthetic oligonucleotide
  Sense strand starting at position 3812 of SEQ ID NO: 1880882
uaaaguauaugaguggagu

SEQ ID NO: 2001215 - RNA, 19 nt, Artificial Sequence
  Description of Artificial Sequence: Synthetic oligonucleotide
  Antisense strand to SEQ ID NO: 2001214
acuccacucauauacuuua

SEQ ID NO: 2001216 - RNA, 19 nt, Artificial Sequence
  Description of Artificial Sequence: Synthetic oligonucleotide
  Sense strand starting at position 3813 of SEQ ID NO: 1880882
aaaguauaugaguggagua

SEQ ID NO: 2001217 - RNA, 19 nt, Artificial Sequence
  Description of Artificial Sequence: Synthetic oligonucleotide
  Antisense strand to SEQ ID NO: 2001216
uacuccacucauauacuuu

SEQ ID NO: 2001218 - RNA, 19 nt, Artificial Sequence
  Description of Artificial Sequence: Synthetic oligonucleotide
  Sense strand starting at position 4 of SEQ ID NO: 1880884
ucccaacuagagugaguua

SEQ ID NO: 2001219 - RNA, 19 nt, Artificial Sequence
  Description of Artificial Sequence: Synthetic oligonucleotide
  Antisense strand to SEQ ID NO: 2001218
uaacucacucuaguuggga

SEQ ID NO: 2001220 - RNA, 19 nt, Artificial Sequence
  Description of Artificial Sequence: Synthetic oligonucleotide
  Sense strand starting at position 7 of SEQ ID NO: 1880884
caacuagagugaguuaauu

SEQ ID NO: 2001221 - RNA, 19 nt, Artificial Sequence
  Description of Artificial Sequence: Synthetic oligonucleotide
  Antisense strand to SEQ ID NO: 2001220
aauuaacucacucuaguug

SEQ ID NO: 2001222 - RNA, 19 nt, Artificial Sequence
  Description of Artificial Sequence: Synthetic oligonucleotide
  Sense strand starting at position 191 of SEQ ID NO: 1880884
caucguacuuggcuaauuu

SEQ ID NO: 2001223 - RNA, 19 nt, Artificial Sequence
  Description of Artificial Sequence: Synthetic oligonucleotide
  Antisense strand to SEQ ID NO: 2001222
aaauuagccaaguacgaug

SEQ ID NO: 2001224 - RNA, 19 nt, Artificial Sequence
  Description of Artificial Sequence: Synthetic oligonucleotide
  Sense strand starting at position 328 of SEQ ID NO: 1880884
cgugacaggccuuaacuau

SEQ ID NO: 2001225 - RNA, 19 nt, Artificial Sequence
  Description of Artificial Sequence: Synthetic oligonucleotide
  Antisense strand to SEQ ID NO: 2001224
auaguuaaggccugucacg

SEQ ID NO: 2001226 - RNA, 19 nt, Artificial Sequence
  Description of Artificial Sequence: Synthetic oligonucleotide
  Sense strand starting at position 659 of SEQ ID NO: 1880884
caaaguaaugugcaaugua

SEQ ID NO: 2001227 - RNA, 19 nt, Artificial Sequence
  Description of Artificial Sequence: Synthetic oligonucleotide
  Antisense strand to SEQ ID NO: 2001226
uacauugcacauuacuuug

SEQ ID NO: 2001228 - RNA, 19 nt, Artificial Sequence
  Description of Artificial Sequence: Synthetic oligonucleotide
  Sense strand starting at position 662 of SEQ ID NO: 1880884
aguaaugugcaauguaaug

SEQ ID NO: 2001229 - RNA, 19 nt, Artificial Sequence
  Description of Artificial Sequence: Synthetic oligonucleotide
  Antisense strand to SEQ ID NO: 2001228
cauuacauugcacauuacu

SEQ ID NO: 2001230 - RNA, 19 nt, Artificial Sequence
  Description of Artificial Sequence: Synthetic oligonucleotide
  Sense strand starting at position 668 of SEQ ID NO: 1880884
gugcaauguaaugaggcaa

SEQ ID NO: 2001231 - RNA, 19 nt, Artificial Sequence
  Description of Artificial Sequence: Synthetic oligonucleotide
  Antisense strand to SEQ ID NO: 2001230
uugccucauuacauugcac

SEQ ID NO: 2001232 - RNA, 19 nt, Artificial Sequence
  Description of Artificial Sequence: Synthetic oligonucleotide
  Sense strand starting at position 772 of SEQ ID NO: 1880884
ggagccucugcuugggaga

SEQ ID NO: 2001233 - RNA, 19 nt, Artificial Sequence
  Description of Artificial Sequence: Synthetic oligonucleotide
  Antisense strand to SEQ ID NO: 2001232
ucucccaagcagaggcucc

SEQ ID NO: 2001234 - RNA, 19 nt, Artificial Sequence
  Description of Artificial Sequence: Synthetic oligonucleotide
  Sense strand starting at position 773 of SEQ ID NO: 1880884
gagccucugcuugggagau

SEQ ID NO: 2001235 - RNA, 19 nt, Artificial Sequence
  Description of Artificial Sequence: Synthetic oligonucleotide
  Antisense strand to SEQ ID NO: 2001234
aucucccaagcagaggcuc

SEQ ID NO: 2001236 - RNA, 19 nt, Artificial Sequence
  Description of Artificial Sequence: Synthetic oligonucleotide
  Sense strand starting at position 796 of SEQ ID NO: 1880884
cacaguuggucaggagacu

SEQ ID NO: 2001237 - RNA, 19 nt, Artificial Sequence
  Description of Artificial Sequence: Synthetic oligonucleotide
  Antisense strand to SEQ ID NO: 2001236
agucuccugaccaacugug

SEQ ID NO: 2001238 - RNA, 19 nt, Artificial Sequence
  Description of Artificial Sequence: Synthetic oligonucleotide
  Sense strand starting at position 886 of SEQ ID NO: 1880884
gcagcaaacugucccagaa

SEQ ID NO: 2001239 - RNA, 19 nt, Artificial Sequence
  Description of Artificial Sequence: Synthetic oligonucleotide
  Antisense strand to SEQ ID NO: 2001238
uucugggacaguuugcugc

SEQ ID NO: 2001240 - RNA, 19 nt, Artificial Sequence
  Description of Artificial Sequence: Synthetic oligonucleotide
  Sense strand starting at position 888 of SEQ ID NO: 1880884
agcaaacugucccagaaca

SEQ ID NO: 2001241 - RNA, 19 nt, Artificial Sequence
  Description of Artificial Sequence: Synthetic oligonucleotide
  Antisense strand to SEQ ID NO: 2001240
uguucugggacaguuugcu

SEQ ID NO: 2001242 - RNA, 19 nt, Artificial Sequence
  Description of Artificial Sequence: Synthetic oligonucleotide
  Sense strand starting at position 984 of SEQ ID NO: 1880884
gaagaugcaucuuuggaag

SEQ ID NO: 2001243 - RNA, 19 nt, Artificial Sequence
  Description of Artificial Sequence: Synthetic oligonucleotide
  Antisense strand to SEQ ID NO: 2001242
cuuccaaagaugcaucuuc

SEQ ID NO: 2001244 - RNA, 19 nt, Artificial Sequence
  Description of Artificial Sequence: Synthetic oligonucleotide
  Sense strand starting at position 986 of SEQ ID NO: 1880884
agaugcaucuuuggaagca

SEQ ID NO: 2001245 - RNA, 19 nt, Artificial Sequence
  Description of Artificial Sequence: Synthetic oligonucleotide
  Antisense strand to SEQ ID NO: 2001244
ugcuuccaaagaugcaucu

SEQ ID NO: 2001246 - RNA, 19 nt, Artificial Sequence
  Description of Artificial Sequence: Synthetic oligonucleotide
  Sense strand starting at position 1148 of SEQ ID NO: 1880884
aggaauugccgcugaaucu

SEQ ID NO: 2001247 - RNA, 19 nt, Artificial Sequence
  Description of Artificial Sequence: Synthetic oligonucleotide
  Antisense strand to SEQ ID NO: 2001246
agauucagcggcaauuccu

SEQ ID NO: 2001248 - RNA, 19 nt, Artificial Sequence
  Description of Artificial Sequence: Synthetic oligonucleotide
  Sense strand starting at position 1448 of SEQ ID NO: 1880884
gccucaaugccguuuguga

SEQ ID NO: 2001249 - RNA, 19 nt, Artificial Sequence
  Description of Artificial Sequence: Synthetic oligonucleotide
  Antisense strand to SEQ ID NO: 2001248
ucacaaacggcauugaggc

SEQ ID NO: 2001250 - RNA, 19 nt, Artificial Sequence
  Description of Artificial Sequence: Synthetic oligonucleotide
  Sense strand starting at position 1457 of SEQ ID NO: 1880884
ccguuugugauggcgcaga

SEQ ID NO: 2001251 - RNA, 19 nt, Artificial Sequence
  Description of Artificial Sequence: Synthetic oligonucleotide
  Antisense strand to SEQ ID NO: 2001250
ucugcgccaucacaaacgg

SEQ ID NO: 2001252 - RNA, 19 nt, Artificial Sequence
  Description of Artificial Sequence: Synthetic oligonucleotide
  Sense strand starting at position 1458 of SEQ ID NO: 1880884
cguuugugauggcgcagaa

SEQ ID NO: 2001253 - RNA, 19 nt, Artificial Sequence
  Description of Artificial Sequence: Synthetic oligonucleotide
  Antisense strand to SEQ ID NO: 2001252
uucugcgccaucacaaacg

SEQ ID NO: 2001254 - RNA, 19 nt, Artificial Sequence
  Description of Artificial Sequence: Synthetic oligonucleotide
  Sense strand starting at position 1550 of SEQ ID NO: 1880884
aguguucucccagacugaa

SEQ ID NO: 2001255 - RNA, 19 nt, Artificial Sequence
  Description of Artificial Sequence: Synthetic oligonucleotide
  Antisense strand to SEQ ID NO: 2001254
uucagucugggagaacacu

SEQ ID NO: 2001256 - RNA, 19 nt, Artificial Sequence
  Description of Artificial Sequence: Synthetic oligonucleotide
  Sense strand starting at position 1650 of SEQ ID NO: 1880884
acuguagaggccugagauc

SEQ ID NO: 2001257 - RNA, 19 nt, Artificial Sequence
  Description of Artificial Sequence: Synthetic oligonucleotide
  Antisense strand to SEQ ID NO: 2001256
gaucucaggccucuacagu

SEQ ID NO: 2001258 - RNA, 19 nt, Artificial Sequence
  Description of Artificial Sequence: Synthetic oligonucleotide
  Sense strand starting at position 2219 of SEQ ID NO: 1880884
ggcccaagcccagaaauau

SEQ ID NO: 2001259 - RNA, 19 nt, Artificial Sequence
  Description of Artificial Sequence: Synthetic oligonucleotide
  Antisense strand to SEQ ID NO: 2001258
auauuucugggcuugggcc

SEQ ID NO: 2001260 - RNA, 19 nt, Artificial Sequence
  Description of Artificial Sequence: Synthetic oligonucleotide
  Sense strand starting at position 2252 of SEQ ID NO: 1880884
agggcaagugcuuacauca

SEQ ID NO: 2001261 - RNA, 19 nt, Artificial Sequence
  Description of Artificial Sequence: Synthetic oligonucleotide
  Antisense strand to SEQ ID NO: 2001260
ugauguaagcacuugcccu

SEQ ID NO: 2001262 - RNA, 19 nt, Artificial Sequence
  Description of Artificial Sequence: Synthetic oligonucleotide
  Sense strand starting at position 2447 of SEQ ID NO: 1880884
acaggagggucauagacaa

SEQ ID NO: 2001263 - RNA, 19 nt, Artificial Sequence
  Description of Artificial Sequence: Synthetic oligonucleotide
  Antisense strand to SEQ ID NO: 2001262
uugucuaugacccuccugu

SEQ ID NO: 2001264 - RNA, 19 nt, Artificial Sequence
  Description of Artificial Sequence: Synthetic oligonucleotide
  Sense strand starting at position 2473 of SEQ ID NO: 1880884
guggcagcgagucaucuua

SEQ ID NO: 2001265 - RNA, 19 nt, Artificial Sequence
  Description of Artificial Sequence: Synthetic oligonucleotide
  Antisense strand to SEQ ID NO: 2001264
uaagaugacucgcugccac

SEQ ID NO: 2001266 - RNA, 19 nt, Artificial Sequence
  Description of Artificial Sequence: Synthetic oligonucleotide
  Sense strand starting at position 2475 of SEQ ID NO: 1880884
ggcagcgagucaucuuaga

SEQ ID NO: 2001267 - RNA, 19 nt, Artificial Sequence
  Description of Artificial Sequence: Synthetic oligonucleotide
  Antisense strand to SEQ ID NO: 2001266
ucuaagaugacucgcugcc

SEQ ID NO: 2001268 - RNA, 19 nt, Artificial Sequence
  Description of Artificial Sequence: Synthetic oligonucleotide
  Sense strand starting at position 2480 of SEQ ID NO: 1880884
cgagucaucuuagaauucu

SEQ ID NO: 2001269 - RNA, 19 nt, Artificial Sequence
  Description of Artificial Sequence: Synthetic oligonucleotide
  Antisense strand to SEQ ID NO: 2001268
agaauucuaagaugacucg

SEQ ID NO: 2001270 - RNA, 19 nt, Artificial Sequence
  Description of Artificial Sequence: Synthetic oligonucleotide
  Sense strand starting at position 2587 of SEQ ID NO: 1880884
gccucauccuguuacugga

SEQ ID NO: 2001271 - RNA, 19 nt, Artificial Sequence
  Description of Artificial Sequence: Synthetic oligonucleotide
  Antisense strand to SEQ ID NO: 2001270
uccaguaacaggaugaggc

SEQ ID NO: 2001272 - RNA, 19 nt, Artificial Sequence
  Description of Artificial Sequence: Synthetic oligonucleotide
  Sense strand starting at position 2629 of SEQ ID NO: 1880884
acaggauucuuggaucuug

SEQ ID NO: 2001273 - RNA, 19 nt, Artificial Sequence
  Description of Artificial Sequence: Synthetic oligonucleotide
  Antisense strand to SEQ ID NO: 2001272
caagauccaagaauccugu

SEQ ID NO: 2001274 - RNA, 19 nt, Artificial Sequence
  Description of Artificial Sequence: Synthetic oligonucleotide
  Sense strand starting at position 2634 of SEQ ID NO: 1880884
auucuuggaucuugcagaa

SEQ ID NO: 2001275 - RNA, 19 nt, Artificial Sequence
  Description of Artificial Sequence: Synthetic oligonucleotide
  Antisense strand to SEQ ID NO: 2001274
uucugcaagauccaagaau

SEQ ID NO: 2001276 - RNA, 19 nt, Artificial Sequence
  Description of Artificial Sequence: Synthetic oligonucleotide
  Sense strand starting at position 2901 of SEQ ID NO: 1880884
cgugaacugucauggcacu

SEQ ID NO: 2001277 - RNA, 19 nt, Artificial Sequence
  Description of Artificial Sequence: Synthetic oligonucleotide
  Antisense strand to SEQ ID NO: 2001276
agugccaugacaguucacg

SEQ ID NO: 2001278 - RNA, 19 nt, Artificial Sequence
  Description of Artificial Sequence: Synthetic oligonucleotide
  Sense strand starting at position 2955 of SEQ ID NO: 1880884
acuaguauauaaugagcau

SEQ ID NO: 2001279 - RNA, 19 nt, Artificial Sequence
  Description of Artificial Sequence: Synthetic oligonucleotide
  Antisense strand to SEQ ID NO: 2001278
augcucauuauauacuagu

SEQ ID NO: 2001280 - RNA, 19 nt, Artificial Sequence
  Description of Artificial Sequence: Synthetic oligonucleotide
  Sense strand starting at position 2958 of SEQ ID NO: 1880884
aguauauaaugagcauuga

SEQ ID NO: 2001281 - RNA, 19 nt, Artificial Sequence
  Description of Artificial Sequence: Synthetic oligonucleotide
  Antisense strand to SEQ ID NO: 2001280
ucaaugcucauuauauacu

SEQ ID NO: 2001282 - RNA, 19 nt, Artificial Sequence
  Description of Artificial Sequence: Synthetic oligonucleotide
  Sense strand starting at position 3822 of SEQ ID NO: 1880884
guucgaacgcuucuggcaa

SEQ ID NO: 2001283 - RNA, 19 nt, Artificial Sequence
  Description of Artificial Sequence: Synthetic oligonucleotide
  Antisense strand to SEQ ID NO: 2001282
uugccagaagcguucgaac

SEQ ID NO: 2001284 - RNA, 19 nt, Artificial Sequence
  Description of Artificial Sequence: Synthetic oligonucleotide
  Sense strand starting at position 3823 of SEQ ID NO: 1880884
uucgaacgcuucuggcaau

SEQ ID NO: 2001285 - RNA, 19 nt, Artificial Sequence
  Description of Artificial Sequence: Synthetic oligonucleotide
  Antisense strand to SEQ ID NO: 2001284
auugccagaagcguucgaa

SEQ ID NO: 2001286 - RNA, 19 nt, Artificial Sequence
  Description of Artificial Sequence: Synthetic oligonucleotide
  Sense strand starting at position 3834 of SEQ ID NO: 1880884
cuggcaaucucauuagagu

SEQ ID NO: 2001287 - RNA, 19 nt, Artificial Sequence
  Description of Artificial Sequence: Synthetic oligonucleotide
  Antisense strand to SEQ ID NO: 2001286
acucuaaugagauugccag

SEQ ID NO: 2001288 - RNA, 19 nt, Artificial Sequence
  Description of Artificial Sequence: Synthetic oligonucleotide
  Sense strand starting at position 3835 of SEQ ID NO: 1880884
uggcaaucucauuagaguc

SEQ ID NO: 2001289 - RNA, 19 nt, Artificial Sequence
  Description of Artificial Sequence: Synthetic oligonucleotide
  Antisense strand to SEQ ID NO: 2001288
gacucuaaugagauugcca

SEQ ID NO: 2001290 - RNA, 19 nt, Artificial Sequence
  Description of Artificial Sequence: Synthetic oligonucleotide
  Sense strand starting at position 3968 of SEQ ID NO: 1880884
gcuguaaucugcuaaacac

SEQ ID NO: 2001291 - RNA, 19 nt, Artificial Sequence
  Description of Artificial Sequence: Synthetic oligonucleotide
  Antisense strand to SEQ ID NO: 2001290
guguuuagcagauuacagc

SEQ ID NO: 2001292 - RNA, 19 nt, Artificial Sequence
  Description of Artificial Sequence: Synthetic oligonucleotide
  Sense strand starting at position 5 of SEQ ID NO: 1880885
ucccaacuagagugaguua

SEQ ID NO: 2001293 - RNA, 19 nt, Artificial Sequence
  Description of Artificial Sequence: Synthetic oligonucleotide
  Antisense strand to SEQ ID NO: 2001292
uaacucacucuaguuggga

SEQ ID NO: 2001294 - RNA, 19 nt, Artificial Sequence
  Description of Artificial Sequence: Synthetic oligonucleotide
  Sense strand starting at position 8 of SEQ ID NO: 1880885
caacuagagugaguuaauu

SEQ ID NO: 2001295 - RNA, 19 nt, Artificial Sequence
  Description of Artificial Sequence: Synthetic oligonucleotide
  Antisense strand to SEQ ID NO: 2001294
aauuaacucacucuaguug

SEQ ID NO: 2001296 - RNA, 19 nt, Artificial Sequence
  Description of Artificial Sequence: Synthetic oligonucleotide
  Sense strand starting at position 192 of SEQ ID NO: 1880885
caucguacuuggcuaauuu

SEQ ID NO: 2001297 - RNA, 19 nt, Artificial Sequence
  Description of Artificial Sequence: Synthetic oligonucleotide
  Antisense strand to SEQ ID NO: 2001296
aaauuagccaaguacgaug

SEQ ID NO: 2001298 - RNA, 19 nt, Artificial Sequence
  Description of Artificial Sequence: Synthetic oligonucleotide
  Sense strand starting at position 329 of SEQ ID NO: 1880885
cgugacaggccuuaacuau

SEQ ID NO: 2001299 - RNA, 19 nt, Artificial Sequence
  Description of Artificial Sequence: Synthetic oligonucleotide
  Antisense strand to SEQ ID NO: 2001298
auaguuaaggccugucacg

SEQ ID NO: 2001300 - RNA, 19 nt, Artificial Sequence
  Description of Artificial Sequence: Synthetic oligonucleotide
  Sense strand starting at position 660 of SEQ ID NO: 1880885
caaaguaaugugcaaugua

SEQ ID NO: 2001301 - RNA, 19 nt, Artificial Sequence
  Description of Artificial Sequence: Synthetic oligonucleotide
  Antisense strand to SEQ ID NO: 2001300
uacauugcacauuacuuug

SEQ ID NO: 2001302 - RNA, 19 nt, Artificial Sequence
  Description of Artificial Sequence: Synthetic oligonucleotide
  Sense strand starting at position 663 of SEQ ID NO: 1880885
aguaaugugcaauguaaug

SEQ ID NO: 2001303 - RNA, 19 nt, Artificial Sequence
  Description of Artificial Sequence: Synthetic oligonucleotide
  Antisense strand to SEQ ID NO: 2001302
cauuacauugcacauuacu

SEQ ID NO: 2001304 - RNA, 19 nt, Artificial Sequence
  Description of Artificial Sequence: Synthetic oligonucleotide
  Sense strand starting at position 669 of SEQ ID NO: 1880885
gugcaauguaaugaggcaa

SEQ ID NO: 2001305 - RNA, 19 nt, Artificial Sequence
  Description of Artificial Sequence: Synthetic oligonucleotide
  Antisense strand to SEQ ID NO: 2001304
uugccucauuacauugcac

SEQ ID NO: 2001306 - RNA, 19 nt, Artificial Sequence
  Description of Artificial Sequence: Synthetic oligonucleotide
  Sense strand starting at position 774 of SEQ ID NO: 1880885
gagccucugcuugggagau

SEQ ID NO: 2001307 - RNA, 19 nt, Artificial Sequence
  Description of Artificial Sequence: Synthetic oligonucleotide
  Antisense strand to SEQ ID NO: 2001306
aucucccaagcagaggcuc

SEQ ID NO: 2001308 - RNA, 19 nt, Artificial Sequence
  Description of Artificial Sequence: Synthetic oligonucleotide
  Sense strand starting at position 797 of SEQ ID NO: 1880885
cacaguuggucaggagacu

SEQ ID NO: 2001309 - RNA, 19 nt, Artificial Sequence
  Description of Artificial Sequence: Synthetic oligonucleotide
  Antisense strand to SEQ ID NO: 2001308
agucuccugaccaacugug

SEQ ID NO: 2001310 - RNA, 19 nt, Artificial Sequence
  Description of Artificial Sequence: Synthetic oligonucleotide
  Sense strand starting at position 887 of SEQ ID NO: 1880885
gcagcaaacugucccagaa

SEQ ID NO: 2001311 - RNA, 19 nt, Artificial Sequence
  Description of Artificial Sequence: Synthetic oligonucleotide
  Antisense strand to SEQ ID NO: 2001310
uucugggacaguuugcugc

SEQ ID NO: 2001312 - RNA, 19 nt, Artificial Sequence
  Description of Artificial Sequence: Synthetic oligonucleotide
  Sense strand starting at position 889 of SEQ ID NO: 1880885
agcaaacugucccagaaca

SEQ ID NO: 2001313 - RNA, 19 nt, Artificial Sequence
  Description of Artificial Sequence: Synthetic oligonucleotide
  Antisense strand to SEQ ID NO: 2001312
uguucugggacaguuugcu

SEQ ID NO: 2001314 - RNA, 19 nt, Artificial Sequence
  Description of Artificial Sequence: Synthetic oligonucleotide
  Sense strand starting at position 985 of SEQ ID NO: 1880885
gaagaugcaucuuuggaag

SEQ ID NO: 2001315 - RNA, 19 nt, Artificial Sequence
  Description of Artificial Sequence: Synthetic oligonucleotide
  Antisense strand to SEQ ID NO: 2001314
cuuccaaagaugcaucuuc

SEQ ID NO: 2001316 - RNA, 19 nt, Artificial Sequence
  Description of Artificial Sequence: Synthetic oligonucleotide
  Sense strand starting at position 987 of SEQ ID NO: 1880885
agaugcaucuuuggaagca

SEQ ID NO: 2001317 - RNA, 19 nt, Artificial Sequence
  Description of Artificial Sequence: Synthetic oligonucleotide
  Antisense strand to SEQ ID NO: 2001316
ugcuuccaaagaugcaucu

SEQ ID NO: 2001318 - RNA, 19 nt, Artificial Sequence
  Description of Artificial Sequence: Synthetic oligonucleotide
  Sense strand starting at position 1110 of SEQ ID NO: 1880885
cccucuggccuccaaagau

SEQ ID NO: 2001319 - RNA, 19 nt, Artificial Sequence
  Description of Artificial Sequence: Synthetic oligonucleotide
  Antisense strand to SEQ ID NO: 2001318
aucuuuggaggccagaggg

SEQ ID NO: 2001320 - RNA, 19 nt, Artificial Sequence
  Description of Artificial Sequence: Synthetic oligonucleotide
  Sense strand starting at position 1149 of SEQ ID NO: 1880885
aggaauugccgcugaaucu

SEQ ID NO: 2001321 - RNA, 19 nt, Artificial Sequence
  Description of Artificial Sequence: Synthetic oligonucleotide
  Antisense strand to SEQ ID NO: 2001320
agauucagcggcaauuccu

SEQ ID NO: 2001322 - RNA, 19 nt, Artificial Sequence
  Description of Artificial Sequence: Synthetic oligonucleotide
  Sense strand starting at position 1449 of SEQ ID NO: 1880885
gccucaaugccguuuguga

SEQ ID NO: 2001323 - RNA, 19 nt, Artificial Sequence
  Description of Artificial Sequence: Synthetic oligonucleotide
  Antisense strand to SEQ ID NO: 2001322
ucacaaacggcauugaggc

SEQ ID NO: 2001324 - RNA, 19 nt, Artificial Sequence
  Description of Artificial Sequence: Synthetic oligonucleotide
  Sense strand starting at position 1458 of SEQ ID NO: 1880885
ccguuugugauggcgcaga

SEQ ID NO: 2001325 - RNA, 19 nt, Artificial Sequence
  Description of Artificial Sequence: Synthetic oligonucleotide
  Antisense strand to SEQ ID NO: 2001324
ucugcgccaucacaaacgg

SEQ ID NO: 2001326 - RNA, 19 nt, Artificial Sequence
  Description of Artificial Sequence: Synthetic oligonucleotide
  Sense strand starting at position 1546 of SEQ ID NO: 1880885
ggcccaguguucucccaga

SEQ ID NO: 2001327 - RNA, 19 nt, Artificial Sequence
  Description of Artificial Sequence: Synthetic oligonucleotide
  Antisense strand to SEQ ID NO: 2001326
ucugggagaacacugggcc

SEQ ID NO: 2001328 - RNA, 19 nt, Artificial Sequence
  Description of Artificial Sequence: Synthetic oligonucleotide
  Sense strand starting at position 1551 of SEQ ID NO: 1880885
aguguucucccagacugaa

SEQ ID NO: 2001329 - RNA, 19 nt, Artificial Sequence
  Description of Artificial Sequence: Synthetic oligonucleotide
  Antisense strand to SEQ ID NO: 2001328
uucagucugggagaacacu

SEQ ID NO: 2001330 - RNA, 19 nt, Artificial Sequence
  Description of Artificial Sequence: Synthetic oligonucleotide
  Sense strand starting at position 1651 of SEQ ID NO: 1880885
acuguagaggccugagauc

SEQ ID NO: 2001331 - RNA, 19 nt, Artificial Sequence
  Description of Artificial Sequence: Synthetic oligonucleotide
  Antisense strand to SEQ ID NO: 2001330
gaucucaggccucuacagu

SEQ ID NO: 2001332 - RNA, 19 nt, Artificial Sequence
  Description of Artificial Sequence: Synthetic oligonucleotide
  Sense strand starting at position 2220 of SEQ ID NO: 1880885
ggcccaagcccagaaauau

SEQ ID NO: 2001333 - RNA, 19 nt, Artificial Sequence
  Description of Artificial Sequence: Synthetic oligonucleotide
  Antisense strand to SEQ ID NO: 2001332
auauuucugggcuugggcc

SEQ ID NO: 2001334 - RNA, 19 nt, Artificial Sequence
  Description of Artificial Sequence: Synthetic oligonucleotide
  Sense strand starting at position 2253 of SEQ ID NO: 1880885
agggcaagugcuuacauca

SEQ ID NO: 2001335 - RNA, 19 nt, Artificial Sequence
  Description of Artificial Sequence: Synthetic oligonucleotide
  Antisense strand to SEQ ID NO: 2001334
ugauguaagcacuugcccu

SEQ ID NO: 2001336 - RNA, 19 nt, Artificial Sequence
  Description of Artificial Sequence: Synthetic oligonucleotide
  Sense strand starting at position 2266 of SEQ ID NO: 1880885
acaucacgucaucaagcau

SEQ ID NO: 2001337 - RNA, 19 nt, Artificial Sequence
  Description of Artificial Sequence: Synthetic oligonucleotide
  Antisense strand to SEQ ID NO: 2001336
augcuugaugacgugaugu

SEQ ID NO: 2001338 - RNA, 19 nt, Artificial Sequence
  Description of Artificial Sequence: Synthetic oligonucleotide
  Sense strand starting at position 2448 of SEQ ID NO: 1880885
acaggagggucauagacaa

SEQ ID NO: 2001339 - RNA, 19 nt, Artificial Sequence
  Description of Artificial Sequence: Synthetic oligonucleotide
  Antisense strand to SEQ ID NO: 2001338
uugucuaugacccuccugu

SEQ ID NO: 2001340 - RNA, 19 nt, Artificial Sequence
  Description of Artificial Sequence: Synthetic oligonucleotide
  Sense strand starting at position 2474 of SEQ ID NO: 1880885
guggcagcgagucaucuua

SEQ ID NO: 2001341 - RNA, 19 nt, Artificial Sequence
  Description of Artificial Sequence: Synthetic oligonucleotide
  Antisense strand to SEQ ID NO: 2001340
uaagaugacucgcugccac

SEQ ID NO: 2001342 - RNA, 19 nt, Artificial Sequence
  Description of Artificial Sequence: Synthetic oligonucleotide
  Sense strand starting at position 2476 of SEQ ID NO: 1880885
ggcagcgagucaucuuaga

SEQ ID NO: 2001343 - RNA, 19 nt, Artificial Sequence
  Description of Artificial Sequence: Synthetic oligonucleotide
  Antisense strand to SEQ ID NO: 2001342
ucuaagaugacucgcugcc

SEQ ID NO: 2001344 - RNA, 19 nt, Artificial Sequence
  Description of Artificial Sequence: Synthetic oligonucleotide
  Sense strand starting at position 2481 of SEQ ID NO: 1880885
cgagucaucuuagaauucu

SEQ ID NO: 2001345 - RNA, 19 nt, Artificial Sequence
  Description of Artificial Sequence: Synthetic oligonucleotide
  Antisense strand to SEQ ID NO: 2001344
agaauucuaagaugacucg

SEQ ID NO: 2001346 - RNA, 19 nt, Artificial Sequence
  Description of Artificial Sequence: Synthetic oligonucleotide
  Sense strand starting at position 2588 of SEQ ID NO: 1880885
gccucauccuguuacugga

SEQ ID NO: 2001347 - RNA, 19 nt, Artificial Sequence
  Description of Artificial Sequence: Synthetic oligonucleotide
  Antisense strand to SEQ ID NO: 2001346
uccaguaacaggaugaggc

SEQ ID NO: 2001348 - RNA, 19 nt, Artificial Sequence
  Description of Artificial Sequence: Synthetic oligonucleotide
  Sense strand starting at position 2635 of SEQ ID NO: 1880885
auucuuggaucuugcagaa

SEQ ID NO: 2001349 - RNA, 19 nt, Artificial Sequence
  Description of Artificial Sequence: Synthetic oligonucleotide
  Antisense strand to SEQ ID NO: 2001348
uucugcaagauccaagaau

SEQ ID NO: 2001350 - RNA, 19 nt, Artificial Sequence
  Description of Artificial Sequence: Synthetic oligonucleotide
  Sense strand starting at position 2902 of SEQ ID NO: 1880885
cgugaacugucauggcacu

SEQ ID NO: 2001351 - RNA, 19 nt, Artificial Sequence
  Description of Artificial Sequence: Synthetic oligonucleotide
  Antisense strand to SEQ ID NO: 2001350
agugccaugacaguucacg

SEQ ID NO: 2001352 - RNA, 19 nt, Artificial Sequence
  Description of Artificial Sequence: Synthetic oligonucleotide
  Sense strand starting at position 2956 of SEQ ID NO: 1880885
acuaguauauaaugagcau

SEQ ID NO: 2001353 - RNA, 19 nt, Artificial Sequence
  Description of Artificial Sequence: Synthetic oligonucleotide
  Antisense strand to SEQ ID NO: 2001352
augcucauuauauacuagu

SEQ ID NO: 2001354 - RNA, 19 nt, Artificial Sequence
  Description of Artificial Sequence: Synthetic oligonucleotide
  Sense strand starting at position 2959 of SEQ ID NO: 1880885
aguauauaaugagcauuga

SEQ ID NO: 2001355 - RNA, 19 nt, Artificial Sequence
  Description of Artificial Sequence: Synthetic oligonucleotide
  Antisense strand to SEQ ID NO: 2001354
ucaaugcucauuauauacu

SEQ ID NO: 2001356 - RNA, 19 nt, Artificial Sequence
  Description of Artificial Sequence: Synthetic oligonucleotide
  Sense strand starting at position 3490 of SEQ ID NO: 1880885
aucacaaagucaguagauu

SEQ ID NO: 2001357 - RNA, 19 nt, Artificial Sequence
  Description of Artificial Sequence: Synthetic oligonucleotide
  Antisense strand to SEQ ID NO: 2001356
aaucuacugacuuugugau

SEQ ID NO: 2001358 - RNA, 19 nt, Artificial Sequence
  Description of Artificial Sequence: Synthetic oligonucleotide
  Sense strand starting at position 3810 of SEQ ID NO: 1880885
uggaauugcucugguucga

SEQ ID NO: 2001359 - RNA, 19 nt, Artificial Sequence
  Description of Artificial Sequence: Synthetic oligonucleotide
  Antisense strand to SEQ ID NO: 2001358
ucgaaccagagcaauucca

SEQ ID NO: 2001360 - RNA, 19 nt, Artificial Sequence
  Description of Artificial Sequence: Synthetic oligonucleotide
  Sense strand starting at position 3823 of SEQ ID NO: 1880885
guucgaacgcuucuggcaa

SEQ ID NO: 2001361 - RNA, 19 nt, Artificial Sequence
  Description of Artificial Sequence: Synthetic oligonucleotide
  Antisense strand to SEQ ID NO: 2001360
uugccagaagcguucgaac

SEQ ID NO: 2001362 - RNA, 19 nt, Artificial Sequence
  Description of Artificial Sequence: Synthetic oligonucleotide
  Sense strand starting at position 3824 of SEQ ID NO: 1880885
uucgaacgcuucuggcaau

SEQ ID NO: 2001363 - RNA, 19 nt, Artificial Sequence
  Description of Artificial Sequence: Synthetic oligonucleotide
  Antisense strand to SEQ ID NO: 2001362
auugccagaagcguucgaa

SEQ ID NO: 2001364 - RNA, 19 nt, Artificial Sequence
  Description of Artificial Sequence: Synthetic oligonucleotide
  Sense strand starting at position 3835 of SEQ ID NO: 1880885
cuggcaaucucauuagagu

SEQ ID NO: 2001365 - RNA, 19 nt, Artificial Sequence
  Description of Artificial Sequence: Synthetic oligonucleotide
  Antisense strand to SEQ ID NO: 2001364
acucuaaugagauugccag

SEQ ID NO: 2001366 - RNA, 19 nt, Artificial Sequence
  Description of Artificial Sequence: Synthetic oligonucleotide
  Sense strand starting at position 3836 of SEQ ID NO: 1880885
uggcaaucucauuagaguc

SEQ ID NO: 2001367 - RNA, 19 nt, Artificial Sequence
  Description of Artificial Sequence: Synthetic oligonucleotide
  Antisense strand to SEQ ID NO: 2001366
gacucuaaugagauugcca

SEQ ID NO: 2001368 - RNA, 19 nt, Artificial Sequence
  Description of Artificial Sequence: Synthetic oligonucleotide
  Sense strand starting at position 3955 of SEQ ID NO: 1880885
ggaugagguucccagcugu

SEQ ID NO: 2001369 - RNA, 19 nt, Artificial Sequence
  Description of Artificial Sequence: Synthetic oligonucleotide
  Antisense strand to SEQ ID NO: 2001368
acagcugggaaccucaucc

SEQ ID NO: 2001370 - RNA, 19 nt, Artificial Sequence
  Description of Artificial Sequence: Synthetic oligonucleotide
  Sense strand starting at position 3969 of SEQ ID NO: 1880885
gcuguaaucugcuaaacac

SEQ ID NO: 2001371 - RNA, 19 nt, Artificial Sequence
  Description of Artificial Sequence: Synthetic oligonucleotide
  Antisense strand to SEQ ID NO: 2001370
guguuuagcagauuacagc

SEQ ID NO: 2001372 - RNA, 19 nt, Artificial Sequence
  Description of Artificial Sequence: Synthetic oligonucleotide
  Sense strand starting at position 7 of SEQ ID NO: 1880883
ucccaacuagagugaguua

SEQ ID NO: 2001373 - RNA, 19 nt, Artificial Sequence
  Description of Artificial Sequence: Synthetic oligonucleotide
  Antisense strand to SEQ ID NO: 2001372
uaacucacucuaguuggga

SEQ ID NO: 2001374 - RNA, 19 nt, Artificial Sequence
  Description of Artificial Sequence: Synthetic oligonucleotide
  Sense strand starting at position 10 of SEQ ID NO: 1880883
caacuagagugaguuaauu

SEQ ID NO: 2001375 - RNA, 19 nt, Artificial Sequence
  Description of Artificial Sequence: Synthetic oligonucleotide
  Antisense strand to SEQ ID NO: 2001374
aauuaacucacucuaguug

SEQ ID NO: 2001376 - RNA, 19 nt, Artificial Sequence
  Description of Artificial Sequence: Synthetic oligonucleotide
  Sense strand starting at position 194 of SEQ ID NO: 1880883
caucguacuuggcuaauuu

SEQ ID NO: 2001377 - RNA, 19 nt, Artificial Sequence
  Description of Artificial Sequence: Synthetic oligonucleotide
  Antisense strand to SEQ ID NO: 2001376
aaauuagccaaguacgaug

SEQ ID NO: 2001378 - RNA, 19 nt, Artificial Sequence
  Description of Artificial Sequence: Synthetic oligonucleotide
  Sense strand starting at position 331 of SEQ ID NO: 1880883
cgugacaggccuuaacuau

SEQ ID NO: 2001379 - RNA, 19 nt, Artificial Sequence
  Description of Artificial Sequence: Synthetic oligonucleotide
  Antisense strand to SEQ ID NO: 2001378
auaguuaaggccugucacg

SEQ ID NO: 2001380 - RNA, 19 nt, Artificial Sequence
  Description of Artificial Sequence: Synthetic oligonucleotide
  Sense strand starting at position 662 of SEQ ID NO: 1880883
caaaguaaugugcaaugua

SEQ ID NO: 2001381 - RNA, 19 nt, Artificial Sequence
  Description of Artificial Sequence: Synthetic oligonucleotide
  Antisense strand to SEQ ID NO: 2001380
uacauugcacauuacuuug

SEQ ID NO: 2001382 - RNA, 19 nt, Artificial Sequence
  Description of Artificial Sequence: Synthetic oligonucleotide
  Sense strand starting at position 665 of SEQ ID NO: 1880883
aguaaugugcaauguaaug

SEQ ID NO: 2001383 - RNA, 19 nt, Artificial Sequence
  Description of Artificial Sequence: Synthetic oligonucleotide
  Antisense strand to SEQ ID NO: 2001382
cauuacauugcacauuacu

SEQ ID NO: 2001384 - RNA, 19 nt, Artificial Sequence
  Description of Artificial Sequence: Synthetic oligonucleotide
  Sense strand starting at position 671 of SEQ ID NO: 1880883
gugcaauguaaugaggcaa

SEQ ID NO: 2001385 - RNA, 19 nt, Artificial Sequence
  Description of Artificial Sequence: Synthetic oligonucleotide
  Antisense strand to SEQ ID NO: 2001384
uugccucauuacauugcac

SEQ ID NO: 2001386 - RNA, 19 nt, Artificial Sequence
  Description of Artificial Sequence: Synthetic oligonucleotide
  Sense strand starting at position 775 of SEQ ID NO: 1880883
ggagccucugcuugggaga

SEQ ID NO: 2001387 - RNA, 19 nt, Artificial Sequence
  Description of Artificial Sequence: Synthetic oligonucleotide
  Antisense strand to SEQ ID NO: 2001386
ucucccaagcagaggcucc

SEQ ID NO: 2001388 - RNA, 19 nt, Artificial Sequence
  Description of Artificial Sequence: Synthetic oligonucleotide
  Sense strand starting at position 776 of SEQ ID NO: 1880883
gagccucugcuugggagau

SEQ ID NO: 2001389 - RNA, 19 nt, Artificial Sequence
  Description of Artificial Sequence: Synthetic oligonucleotide
  Antisense strand to SEQ ID NO: 2001388
aucucccaagcagaggcuc

SEQ ID NO: 2001390 - RNA, 19 nt, Artificial Sequence
  Description of Artificial Sequence: Synthetic oligonucleotide
  Sense strand starting at position 799 of SEQ ID NO: 1880883
cacaguuggucaggagacu

SEQ ID NO: 2001391 - RNA, 19 nt, Artificial Sequence
  Description of Artificial Sequence: Synthetic oligonucleotide
  Antisense strand to SEQ ID NO: 2001390
agucuccugaccaacugug

SEQ ID NO: 2001392 - RNA, 19 nt, Artificial Sequence
  Description of Artificial Sequence: Synthetic oligonucleotide
  Sense strand starting at position 889 of SEQ ID NO: 1880883
gcagcaaacugucccagaa

SEQ ID NO: 2001393 - RNA, 19 nt, Artificial Sequence
  Description of Artificial Sequence: Synthetic oligonucleotide
  Antisense strand to SEQ ID NO: 2001392
uucugggacaguuugcugc

SEQ ID NO: 2001394 - RNA, 19 nt, Artificial Sequence
  Description of Artificial Sequence: Synthetic oligonucleotide
  Sense strand starting at position 891 of SEQ ID NO: 1880883
agcaaacugucccagaaca

SEQ ID NO: 2001395 - RNA, 19 nt, Artificial Sequence
  Description of Artificial Sequence: Synthetic oligonucleotide
  Antisense strand to SEQ ID NO: 2001394
uguucugggacaguuugcu

SEQ ID NO: 2001396 - RNA, 19 nt, Artificial Sequence
  Description of Artificial Sequence: Synthetic oligonucleotide
  Sense strand starting at position 987 of SEQ ID NO: 1880883
gaagaugcaucuuuggaag

SEQ ID NO: 2001397 - RNA, 19 nt, Artificial Sequence
  Description of Artificial Sequence: Synthetic oligonucleotide
  Antisense strand to SEQ ID NO: 2001396
cuuccaaagaugcaucuuc

SEQ ID NO: 2001398 - RNA, 19 nt, Artificial Sequence
  Description of Artificial Sequence: Synthetic oligonucleotide
  Sense strand starting at position 989 of SEQ ID NO: 1880883
agaugcaucuuuggaagca

SEQ ID NO: 2001399 - RNA, 19 nt, Artificial Sequence
  Description of Artificial Sequence: Synthetic oligonucleotide
  Antisense strand to SEQ ID NO: 2001398
ugcuuccaaagaugcaucu

SEQ ID NO: 2001400 - RNA, 19 nt, Artificial Sequence
  Description of Artificial Sequence: Synthetic oligonucleotide
  Sense strand starting at position 1151 of SEQ ID NO: 1880883
aggaauugccgcugaaucu

SEQ ID NO: 2001401 - RNA, 19 nt, Artificial Sequence
  Description of Artificial Sequence: Synthetic oligonucleotide
  Antisense strand to SEQ ID NO: 2001400
agauucagcggcaauuccu

SEQ ID NO: 2001402 - RNA, 19 nt, Artificial Sequence
  Description of Artificial Sequence: Synthetic oligonucleotide
  Sense strand starting at position 1451 of SEQ ID NO: 1880883
gccucaaugccguuuguga

SEQ ID NO: 2001403 - RNA, 19 nt, Artificial Sequence
  Description of Artificial Sequence: Synthetic oligonucleotide
  Antisense strand to SEQ ID NO: 2001402
ucacaaacggcauugaggc

SEQ ID NO: 2001404 - RNA, 19 nt, Artificial Sequence
  Description of Artificial Sequence: Synthetic oligonucleotide
  Sense strand starting at position 1460 of SEQ ID NO: 1880883
ccguuugugauggcgcaga

SEQ ID NO: 2001405 - RNA, 19 nt, Artificial Sequence
  Description of Artificial Sequence: Synthetic oligonucleotide
  Antisense strand to SEQ ID NO: 2001404
ucugcgccaucacaaacgg

SEQ ID NO: 2001406 - RNA, 19 nt, Artificial Sequence
  Description of Artificial Sequence: Synthetic oligonucleotide
  Sense strand starting at position 1461 of SEQ ID NO: 1880883
cguuugugauggcgcagaa

SEQ ID NO: 2001407 - RNA, 19 nt, Artificial Sequence
  Description of Artificial Sequence: Synthetic oligonucleotide
  Antisense strand to SEQ ID NO: 2001406
uucugcgccaucacaaacg

SEQ ID NO: 2001408 - RNA, 19 nt, Artificial Sequence
  Description of Artificial Sequence: Synthetic oligonucleotide
  Sense strand starting at position 1553 of SEQ ID NO: 1880883
aguguucucccagacugaa

SEQ ID NO: 2001409 - RNA, 19 nt, Artificial Sequence
  Description of Artificial Sequence: Synthetic oligonucleotide
  Antisense strand to SEQ ID NO: 2001408
uucagucugggagaacacu

SEQ ID NO: 2001410 - RNA, 19 nt, Artificial Sequence
  Description of Artificial Sequence: Synthetic oligonucleotide
  Sense strand starting at position 1653 of SEQ ID NO: 1880883
acuguagaggccugagauc

SEQ ID NO: 2001411 - RNA, 19 nt, Artificial Sequence
  Description of Artificial Sequence: Synthetic oligonucleotide
  Antisense strand to SEQ ID NO: 2001410
gaucucaggccucuacagu

SEQ ID NO: 2001412 - RNA, 19 nt, Artificial Sequence
  Description of Artificial Sequence: Synthetic oligonucleotide
  Sense strand starting at position 2222 of SEQ ID NO: 1880883
ggcccaagcccagaaauau

SEQ ID NO: 2001413 - RNA, 19 nt, Artificial Sequence
  Description of Artificial Sequence: Synthetic oligonucleotide
  Antisense strand to SEQ ID NO: 2001412
auauuucugggcuugggcc

SEQ ID NO: 2001414 - RNA, 19 nt, Artificial Sequence
  Description of Artificial Sequence: Synthetic oligonucleotide
  Sense strand starting at position 2255 of SEQ ID NO: 1880883
agggcaagugcuuacauca

SEQ ID NO: 2001415 - RNA, 19 nt, Artificial Sequence
  Description of Artificial Sequence: Synthetic oligonucleotide
  Antisense strand to SEQ ID NO: 2001414
ugauguaagcacuugcccu

SEQ ID NO: 2001416 - RNA, 19 nt, Artificial Sequence
  Description of Artificial Sequence: Synthetic oligonucleotide
  Sense strand starting at position 2450 of SEQ ID NO: 1880883
acaggagggucauagacaa

SEQ ID NO: 2001417 - RNA, 19 nt, Artificial Sequence
  Description of Artificial Sequence: Synthetic oligonucleotide
  Antisense strand to SEQ ID NO: 2001416
uugucuaugacccuccugu

SEQ ID NO: 2001418 - RNA, 19 nt, Artificial Sequence
  Description of Artificial Sequence: Synthetic oligonucleotide
  Sense strand starting at position 2476 of SEQ ID NO: 1880883
guggcagcgagucaucuua

SEQ ID NO: 2001419 - RNA, 19 nt, Artificial Sequence
  Description of Artificial Sequence: Synthetic oligonucleotide
  Antisense strand to SEQ ID NO: 2001418
uaagaugacucgcugccac

SEQ ID NO: 2001420 - RNA, 19 nt, Artificial Sequence
  Description of Artificial Sequence: Synthetic oligonucleotide
  Sense strand starting at position 2478 of SEQ ID NO: 1880883
ggcagcgagucaucuuaga

SEQ ID NO: 2001421 - RNA, 19 nt, Artificial Sequence
  Description of Artificial Sequence: Synthetic oligonucleotide
  Antisense strand to SEQ ID NO: 2001420
ucuaagaugacucgcugcc

SEQ ID NO: 2001422 - RNA, 19 nt, Artificial Sequence
  Description of Artificial Sequence: Synthetic oligonucleotide
  Sense strand starting at position 2483 of SEQ ID NO: 1880883
cgagucaucuuagaauucu

SEQ ID NO: 2001423 - RNA, 19 nt, Artificial Sequence
  Description of Artificial Sequence: Synthetic oligonucleotide
  Antisense strand to SEQ ID NO: 2001422
agaauucuaagaugacucg

SEQ ID NO: 2001424 - RNA, 19 nt, Artificial Sequence
  Description of Artificial Sequence: Synthetic oligonucleotide
  Sense strand starting at position 2590 of SEQ ID NO: 1880883
gccucauccuguuacugga

SEQ ID NO: 2001425 - RNA, 19 nt, Artificial Sequence
  Description of Artificial Sequence: Synthetic oligonucleotide
  Antisense strand to SEQ ID NO: 2001424
uccaguaacaggaugaggc

SEQ ID NO: 2001426 - RNA, 19 nt, Artificial Sequence
  Description of Artificial Sequence: Synthetic oligonucleotide
  Sense strand starting at position 2632 of SEQ ID NO: 1880883
acaggauucuuggaucuug

SEQ ID NO: 2001427 - RNA, 19 nt, Artificial Sequence
  Description of Artificial Sequence: Synthetic oligonucleotide
  Antisense strand to SEQ ID NO: 2001426
caagauccaagaauccugu

SEQ ID NO: 2001428 - RNA, 19 nt, Artificial Sequence
  Description of Artificial Sequence: Synthetic oligonucleotide
  Sense strand starting at position 2637 of SEQ ID NO: 1880883
auucuuggaucuugcagaa

SEQ ID NO: 2001429 - RNA, 19 nt, Artificial Sequence
  Description of Artificial Sequence: Synthetic oligonucleotide
  Antisense strand to SEQ ID NO: 2001428
uucugcaagauccaagaau

SEQ ID NO: 2001430 - RNA, 19 nt, Artificial Sequence
  Description of Artificial Sequence: Synthetic oligonucleotide
  Sense strand starting at position 2904 of SEQ ID NO: 1880883
cgugaacugucauggcacu

SEQ ID NO: 2001431 - RNA, 19 nt, Artificial Sequence
  Description of Artificial Sequence: Synthetic oligonucleotide
  Antisense strand to SEQ ID NO: 2001430
agugccaugacaguucacg

SEQ ID NO: 2001432 - RNA, 19 nt, Artificial Sequence
  Description of Artificial Sequence: Synthetic oligonucleotide
  Sense strand starting at position 2958 of SEQ ID NO: 1880883
acuaguauauaaugagcau

SEQ ID NO: 2001433 - RNA, 19 nt, Artificial Sequence
  Description of Artificial Sequence: Synthetic oligonucleotide
  Antisense strand to SEQ ID NO: 2001432
augcucauuauauacuagu

SEQ ID NO: 2001434 - RNA, 19 nt, Artificial Sequence
  Description of Artificial Sequence: Synthetic oligonucleotide
  Sense strand starting at position 2961 of SEQ ID NO: 1880883
aguauauaaugagcauuga

SEQ ID NO: 2001435 - RNA, 19 nt, Artificial Sequence
  Description of Artificial Sequence: Synthetic oligonucleotide
  Antisense strand to SEQ ID NO: 2001434
ucaaugcucauuauauacu

SEQ ID NO: 2001436 - RNA, 19 nt, Artificial Sequence
  Description of Artificial Sequence: Synthetic oligonucleotide
  Sense strand starting at position 3825 of SEQ ID NO: 1880883
guucgaacgcuucuggcaa

SEQ ID NO: 2001437 - RNA, 19 nt, Artificial Sequence
  Description of Artificial Sequence: Synthetic oligonucleotide
  Antisense strand to SEQ ID NO: 2001436
uugccagaagcguucgaac

SEQ ID NO: 2001438 - RNA, 19 nt, Artificial Sequence
  Description of Artificial Sequence: Synthetic oligonucleotide
  Sense strand starting at position 3826 of SEQ ID NO: 1880883
uucgaacgcuucuggcaau

SEQ ID NO: 2001439 - RNA, 19 nt, Artificial Sequence
  Description of Artificial Sequence: Synthetic oligonucleotide
  Antisense strand to SEQ ID NO: 2001438
auugccagaagcguucgaa

SEQ ID NO: 2001440 - RNA, 19 nt, Artificial Sequence
  Description of Artificial Sequence: Synthetic oligonucleotide
  Sense strand starting at position 3837 of SEQ ID NO: 1880883
cuggcaaucucauuagagu

SEQ ID NO: 2001441 - RNA, 19 nt, Artificial Sequence
  Description of Artificial Sequence: Synthetic oligonucleotide
  Antisense strand to SEQ ID NO: 2001440
acucuaaugagauugccag

SEQ ID NO: 2001442 - RNA, 19 nt, Artificial Sequence
  Description of Artificial Sequence: Synthetic oligonucleotide
  Sense strand starting at position 3838 of SEQ ID NO: 1880883
uggcaaucucauuagaguc

SEQ ID NO: 2001443 - RNA, 19 nt, Artificial Sequence
  Description of Artificial Sequence: Synthetic oligonucleotide
  Antisense strand to SEQ ID NO: 2001442
gacucuaaugagauugcca

SEQ ID NO: 2001444 - RNA, 19 nt, Artificial Sequence
  Description of Artificial Sequence: Synthetic oligonucleotide
  Sense strand starting at position 3971 of SEQ ID NO: 1880883
gcuguaaucugcuaaacac

SEQ ID NO: 2001445 - RNA, 19 nt, Artificial Sequence
  Description of Artificial Sequence: Synthetic oligonucleotide
  Antisense strand to SEQ ID NO: 2001444
guguuuagcagauuacagc

SEQ ID NO: 2001446 - RNA, 19 nt, Artificial Sequence
  Description of Artificial Sequence: Synthetic oligonucleotide
  Sense strand starting at position 8 of SEQ ID NO: 1880886
ucccaacuagagugaguua

SEQ ID NO: 2001447 - RNA, 19 nt, Artificial Sequence
  Description of Artificial Sequence: Synthetic oligonucleotide
  Antisense strand to SEQ ID NO: 2001446
uaacucacucuaguuggga

SEQ ID NO: 2001448 - RNA, 19 nt, Artificial Sequence
  Description of Artificial Sequence: Synthetic oligonucleotide
  Sense strand starting at position 11 of SEQ ID NO: 1880886
caacuagagugaguuaauu

SEQ ID NO: 2001449 - RNA, 19 nt, Artificial Sequence
  Description of Artificial Sequence: Synthetic oligonucleotide
  Antisense strand to SEQ ID NO: 2001448
aauuaacucacucuaguug

SEQ ID NO: 2001450 - RNA, 19 nt, Artificial Sequence
  Description of Artificial Sequence: Synthetic oligonucleotide
  Sense strand starting at position 195 of SEQ ID NO: 1880886
caucguacuuggcuaauuu

SEQ ID NO: 2001451 - RNA, 19 nt, Artificial Sequence
  Description of Artificial Sequence: Synthetic oligonucleotide
  Antisense strand to SEQ ID NO: 2001450
aaauuagccaaguacgaug

SEQ ID NO: 2001452 - RNA, 19 nt, Artificial Sequence
  Description of Artificial Sequence: Synthetic oligonucleotide
  Sense strand starting at position 332 of SEQ ID NO: 1880886
cgugacaggccuuaacuau

SEQ ID NO: 2001453 - RNA, 19 nt, Artificial Sequence
  Description of Artificial Sequence: Synthetic oligonucleotide
  Antisense strand to SEQ ID NO: 2001452
auaguuaaggccugucacg

SEQ ID NO: 2001454 - RNA, 19 nt, Artificial Sequence
  Description of Artificial Sequence: Synthetic oligonucleotide
  Sense strand starting at position 663 of SEQ ID NO: 1880886
caaaguaaugugcaaugua

SEQ ID NO: 2001455 - RNA, 19 nt, Artificial Sequence
  Description of Artificial Sequence: Synthetic oligonucleotide
  Antisense strand to SEQ ID NO: 2001454
uacauugcacauuacuuug

SEQ ID NO: 2001456 - RNA, 19 nt, Artificial Sequence
  Description of Artificial Sequence: Synthetic oligonucleotide
  Sense strand starting at position 666 of SEQ ID NO: 1880886
aguaaugugcaauguaaug

SEQ ID NO: 2001457 - RNA, 19 nt, Artificial Sequence
  Description of Artificial Sequence: Synthetic oligonucleotide
  Antisense strand to SEQ ID NO: 2001456
cauuacauugcacauuacu

SEQ ID NO: 2001458 - RNA, 19 nt, Artificial Sequence
  Description of Artificial Sequence: Synthetic oligonucleotide
  Sense strand starting at position 672 of SEQ ID NO: 1880886
gugcaauguaaugaggcaa

SEQ ID NO: 2001459 - RNA, 19 nt, Artificial Sequence
  Description of Artificial Sequence: Synthetic oligonucleotide
  Antisense strand to SEQ ID NO: 2001458
uugccucauuacauugcac

SEQ ID NO: 2001460 - RNA, 19 nt, Artificial Sequence
  Description of Artificial Sequence: Synthetic oligonucleotide
  Sense strand starting at position 777 of SEQ ID NO: 1880886
gagccucugcuugggagau

SEQ ID NO: 2001461 - RNA, 19 nt, Artificial Sequence
  Description of Artificial Sequence: Synthetic oligonucleotide
  Antisense strand to SEQ ID NO: 2001460
aucucccaagcagaggcuc

SEQ ID NO: 2001462 - RNA, 19 nt, Artificial Sequence
  Description of Artificial Sequence: Synthetic oligonucleotide
  Sense strand starting at position 800 of SEQ ID NO: 1880886
cacaguuggucaggagacu

SEQ ID NO: 2001463 - RNA, 19 nt, Artificial Sequence
  Description of Artificial Sequence: Synthetic oligonucleotide
  Antisense strand to SEQ ID NO: 2001462
agucuccugaccaacugug

SEQ ID NO: 2001464 - RNA, 19 nt, Artificial Sequence
  Description of Artificial Sequence: Synthetic oligonucleotide
  Sense strand starting at position 890 of SEQ ID NO: 1880886
gcagcaaacugucccagaa

SEQ ID NO: 2001465 - RNA, 19 nt, Artificial Sequence
  Description of Artificial Sequence: Synthetic oligonucleotide
  Antisense strand to SEQ ID NO: 2001464
uucugggacaguuugcugc

SEQ ID NO: 2001466 - RNA, 19 nt, Artificial Sequence
  Description of Artificial Sequence: Synthetic oligonucleotide
  Sense strand starting at position 892 of SEQ ID NO: 1880886
agcaaacugucccagaaca

SEQ ID NO: 2001467 - RNA, 19 nt, Artificial Sequence
  Description of Artificial Sequence: Synthetic oligonucleotide
  Antisense strand to SEQ ID NO: 2001466
uguucugggacaguuugcu

SEQ ID NO: 2001468 - RNA, 19 nt, Artificial Sequence
  Description of Artificial Sequence: Synthetic oligonucleotide
  Sense strand starting at position 988 of SEQ ID NO: 1880886
gaagaugcaucuuuggaag

SEQ ID NO: 2001469 - RNA, 19 nt, Artificial Sequence
  Description of Artificial Sequence: Synthetic oligonucleotide
  Antisense strand to SEQ ID NO: 2001468
cuuccaaagaugcaucuuc

SEQ ID NO: 2001470 - RNA, 19 nt, Artificial Sequence
  Description of Artificial Sequence: Synthetic oligonucleotide
  Sense strand starting at position 990 of SEQ ID NO: 1880886
agaugcaucuuuggaagca

SEQ ID NO: 2001471 - RNA, 19 nt, Artificial Sequence
  Description of Artificial Sequence: Synthetic oligonucleotide
  Antisense strand to SEQ ID NO: 2001470
ugcuuccaaagaugcaucu

SEQ ID NO: 2001472 - RNA, 19 nt, Artificial Sequence
  Description of Artificial Sequence: Synthetic oligonucleotide
  Sense strand starting at position 1113 of SEQ ID NO: 1880886
cccucuggccuccaaagau

SEQ ID NO: 2001473 - RNA, 19 nt, Artificial Sequence
  Description of Artificial Sequence: Synthetic oligonucleotide
  Antisense strand to SEQ ID NO: 2001472
aucuuuggaggccagaggg

SEQ ID NO: 2001474 - RNA, 19 nt, Artificial Sequence
  Description of Artificial Sequence: Synthetic oligonucleotide
  Sense strand starting at position 1152 of SEQ ID NO: 1880886
aggaauugccgcugaaucu

SEQ ID NO: 2001475 - RNA, 19 nt, Artificial Sequence
  Description of Artificial Sequence: Synthetic oligonucleotide
  Antisense strand to SEQ ID NO: 2001474
agauucagcggcaauuccu

SEQ ID NO: 2001476 - RNA, 19 nt, Artificial Sequence
  Description of Artificial Sequence: Synthetic oligonucleotide
  Sense strand starting at position 1452 of SEQ ID NO: 1880886
gccucaaugccguuuguga

SEQ ID NO: 2001477 - RNA, 19 nt, Artificial Sequence
  Description of Artificial Sequence: Synthetic oligonucleotide
  Antisense strand to SEQ ID NO: 2001476
ucacaaacggcauugaggc

SEQ ID NO: 2001478 - RNA, 19 nt, Artificial Sequence
  Description of Artificial Sequence: Synthetic oligonucleotide
  Sense strand starting at position 1461 of SEQ ID NO: 1880886
ccguuugugauggcgcaga

SEQ ID NO: 2001479 - RNA, 19 nt, Artificial Sequence
  Description of Artificial Sequence: Synthetic oligonucleotide
  Antisense strand to SEQ ID NO: 2001478
ucugcgccaucacaaacgg

SEQ ID NO: 2001480 - RNA, 19 nt, Artificial Sequence
  Description of Artificial Sequence: Synthetic oligonucleotide
  Sense strand starting at position 1549 of SEQ ID NO: 1880886
ggcccaguguucucccaga

SEQ ID NO: 2001481 - RNA, 19 nt, Artificial Sequence
  Description of Artificial Sequence: Synthetic oligonucleotide
  Antisense strand to SEQ ID NO: 2001480
ucugggagaacacugggcc

SEQ ID NO: 2001482 - RNA, 19 nt, Artificial Sequence
  Description of Artificial Sequence: Synthetic oligonucleotide
  Sense strand starting at position 1554 of SEQ ID NO: 1880886
aguguucucccagacugaa

SEQ ID NO: 2001483 - RNA, 19 nt, Artificial Sequence
  Description of Artificial Sequence: Synthetic oligonucleotide
  Antisense strand to SEQ ID NO: 2001482
uucagucugggagaacacu

SEQ ID NO: 2001484 - RNA, 19 nt, Artificial Sequence
  Description of Artificial Sequence: Synthetic oligonucleotide
  Sense strand starting at position 1654 of SEQ ID NO: 1880886
acuguagaggccugagauc

SEQ ID NO: 2001485 - RNA, 19 nt, Artificial Sequence
  Description of Artificial Sequence: Synthetic oligonucleotide
  Antisense strand to SEQ ID NO: 2001484
gaucucaggccucuacagu

SEQ ID NO: 2001486 - RNA, 19 nt, Artificial Sequence
  Description of Artificial Sequence: Synthetic oligonucleotide
  Sense strand starting at position 2223 of SEQ ID NO: 1880886
ggcccaagcccagaaauau

SEQ ID NO: 2001487 - RNA, 19 nt, Artificial Sequence
  Description of Artificial Sequence: Synthetic oligonucleotide
  Antisense strand to SEQ ID NO: 2001486
auauuucugggcuugggcc

SEQ ID NO: 2001488 - RNA, 19 nt, Artificial Sequence
  Description of Artificial Sequence: Synthetic oligonucleotide
  Sense strand starting at position 2256 of SEQ ID NO: 1880886
agggcaagugcuuacauca

SEQ ID NO: 2001489 - RNA, 19 nt, Artificial Sequence
  Description of Artificial Sequence: Synthetic oligonucleotide
  Antisense strand to SEQ ID NO: 2001488
ugauguaagcacuugcccu

SEQ ID NO: 2001490 - RNA, 19 nt, Artificial Sequence
  Description of Artificial Sequence: Synthetic oligonucleotide
  Sense strand starting at position 2269 of SEQ ID NO: 1880886
acaucacgucaucaagcau

SEQ ID NO: 2001491 - RNA, 19 nt, Artificial Sequence
  Description of Artificial Sequence: Synthetic oligonucleotide
  Antisense strand to SEQ ID NO: 2001490
augcuugaugacgugaugu

SEQ ID NO: 2001492 - RNA, 19 nt, Artificial Sequence
  Description of Artificial Sequence: Synthetic oligonucleotide
  Sense strand starting at position 2451 of SEQ ID NO: 1880886
acaggagggucauagacaa

SEQ ID NO: 2001493 - RNA, 19 nt, Artificial Sequence
  Description of Artificial Sequence: Synthetic oligonucleotide
  Antisense strand to SEQ ID NO: 2001492
uugucuaugacccuccugu

SEQ ID NO: 2001494 - RNA, 19 nt, Artificial Sequence
  Description of Artificial Sequence: Synthetic oligonucleotide
  Sense strand starting at position 2477 of SEQ ID NO: 1880886
guggcagcgagucaucuua

SEQ ID NO: 2001495 - RNA, 19 nt, Artificial Sequence
  Description of Artificial Sequence: Synthetic oligonucleotide
  Antisense strand to SEQ ID NO: 2001494
uaagaugacucgcugccac

SEQ ID NO: 2001496 - RNA, 19 nt, Artificial Sequence
  Description of Artificial Sequence: Synthetic oligonucleotide
  Sense strand starting at position 2479 of SEQ ID NO: 1880886
ggcagcgagucaucuuaga

SEQ ID NO: 2001497 - RNA, 19 nt, Artificial Sequence
  Description of Artificial Sequence: Synthetic oligonucleotide
  Antisense strand to SEQ ID NO: 2001496
ucuaagaugacucgcugcc

SEQ ID NO: 2001498 - RNA, 19 nt, Artificial Sequence
  Description of Artificial Sequence: Synthetic oligonucleotide
  Sense strand starting at position 2484 of SEQ ID NO: 1880886
cgagucaucuuagaauucu

SEQ ID NO: 2001499 - RNA, 19 nt, Artificial Sequence
  Description of Artificial Sequence: Synthetic oligonucleotide
  Antisense strand to SEQ ID NO: 2001498
agaauucuaagaugacucg

SEQ ID NO: 2001500 - RNA, 19 nt, Artificial Sequence
  Description of Artificial Sequence: Synthetic oligonucleotide
  Sense strand starting at position 2591 of SEQ ID NO: 1880886
gccucauccuguuacugga

SEQ ID NO: 2001501 - RNA, 19 nt, Artificial Sequence
  Description of Artificial Sequence: Synthetic oligonucleotide
  Antisense strand to SEQ ID NO: 2001500
uccaguaacaggaugaggc

SEQ ID NO: 2001502 - RNA, 19 nt, Artificial Sequence
  Description of Artificial Sequence: Synthetic oligonucleotide
  Sense strand starting at position 2638 of SEQ ID NO: 1880886
auucuuggaucuugcagaa

SEQ ID NO: 2001503 - RNA, 19 nt, Artificial Sequence
  Description of Artificial Sequence: Synthetic oligonucleotide
  Antisense strand to SEQ ID NO: 2001502
uucugcaagauccaagaau

SEQ ID NO: 2001504 - RNA, 19 nt, Artificial Sequence
  Description of Artificial Sequence: Synthetic oligonucleotide
  Sense strand starting at position 2905 of SEQ ID NO: 1880886
cgugaacugucauggcacu

SEQ ID NO: 2001505 - RNA, 19 nt, Artificial Sequence
  Description of Artificial Sequence: Synthetic oligonucleotide
  Antisense strand to SEQ ID NO: 2001504
agugccaugacaguucacg

SEQ ID NO: 2001506 - RNA, 19 nt, Artificial Sequence
  Description of Artificial Sequence: Synthetic oligonucleotide
  Sense strand starting at position 2959 of SEQ ID NO: 1880886
acuaguauauaaugagcau

SEQ ID NO: 2001507 - RNA, 19 nt, Artificial Sequence
  Description of Artificial Sequence: Synthetic oligonucleotide
  Antisense strand to SEQ ID NO: 2001506
augcucauuauauacuagu

SEQ ID NO: 2001508 - RNA, 19 nt, Artificial Sequence
  Description of Artificial Sequence: Synthetic oligonucleotide
  Sense strand starting at position 2962 of SEQ ID NO: 1880886
aguauauaaugagcauuga

SEQ ID NO: 2001509 - RNA, 19 nt, Artificial Sequence
  Description of Artificial Sequence: Synthetic oligonucleotide
  Antisense strand to SEQ ID NO: 2001508
ucaaugcucauuauauacu

SEQ ID NO: 2001510 - RNA, 19 nt, Artificial Sequence
  Description of Artificial Sequence: Synthetic oligonucleotide
  Sense strand starting at position 3493 of SEQ ID NO: 1880886
aucacaaagucaguagauu

SEQ ID NO: 2001511 - RNA, 19 nt, Artificial Sequence
  Description of Artificial Sequence: Synthetic oligonucleotide
  Antisense strand to SEQ ID NO: 2001510
aaucuacugacuuugugau

SEQ ID NO: 2001512 - RNA, 19 nt, Artificial Sequence
  Description of Artificial Sequence: Synthetic oligonucleotide
  Sense strand starting at position 3813 of SEQ ID NO: 1880886
uggaauugcucugguucga

SEQ ID NO: 2001513 - RNA, 19 nt, Artificial Sequence
  Description of Artificial Sequence: Synthetic oligonucleotide
  Antisense strand to SEQ ID NO: 2001512
ucgaaccagagcaauucca

SEQ ID NO: 2001514 - RNA, 19 nt, Artificial Sequence
  Description of Artificial Sequence: Synthetic oligonucleotide
  Sense strand starting at position 3826 of SEQ ID NO: 1880886
guucgaacgcuucuggcaa

SEQ ID NO: 2001515 - RNA, 19 nt, Artificial Sequence
  Description of Artificial Sequence: Synthetic oligonucleotide
  Antisense strand to SEQ ID NO: 2001514
uugccagaagcguucgaac

SEQ ID NO: 2001516 - RNA, 19 nt, Artificial Sequence
  Description of Artificial Sequence: Synthetic oligonucleotide
  Sense strand starting at position 3827 of SEQ ID NO: 1880886
uucgaacgcuucuggcaau

SEQ ID NO: 2001517 - RNA, 19 nt, Artificial Sequence
  Description of Artificial Sequence: Synthetic oligonucleotide
  Antisense strand to SEQ ID NO: 2001516
auugccagaagcguucgaa

SEQ ID NO: 2001518 - RNA, 19 nt, Artificial Sequence
  Description of Artificial Sequence: Synthetic oligonucleotide
  Sense strand starting at position 3838 of SEQ ID NO: 1880886
cuggcaaucucauuagagu

SEQ ID NO: 2001519 - RNA, 19 nt, Artificial Sequence
  Description of Artificial Sequence: Synthetic oligonucleotide
  Antisense strand to SEQ ID NO: 2001518
acucuaaugagauugccag

SEQ ID NO: 2001520 - RNA, 19 nt, Artificial Sequence
  Description of Artificial Sequence: Synthetic oligonucleotide
  Sense strand starting at position 3839 of SEQ ID NO: 1880886
uggcaaucucauuagaguc

SEQ ID NO: 2001521 - RNA, 19 nt, Artificial Sequence
  Description of Artificial Sequence: Synthetic oligonucleotide
  Antisense strand to SEQ ID NO: 2001520
gacucuaaugagauugcca

SEQ ID NO: 2001522 - RNA, 19 nt, Artificial Sequence
  Description of Artificial Sequence: Synthetic oligonucleotide
  Sense strand starting at position 3958 of SEQ ID NO: 1880886
ggaugagguucccagcugu

SEQ ID NO: 2001523 - RNA, 19 nt, Artificial Sequence
  Description of Artificial Sequence: Synthetic oligonucleotide
  Antisense strand to SEQ ID NO: 2001522
acagcugggaaccucaucc

SEQ ID NO: 2001524 - RNA, 19 nt, Artificial Sequence
  Description of Artificial Sequence: Synthetic oligonucleotide
  Sense strand starting at position 3972 of SEQ ID NO: 1880886
gcuguaaucugcuaaacac

SEQ ID NO: 2001525 - RNA, 19 nt, Artificial Sequence
  Description of Artificial Sequence: Synthetic oligonucleotide
  Antisense strand to SEQ ID NO: 2001524
guguuuagcagauuacagc

SEQ ID NO: 2001526 - RNA, 19 nt, Artificial Sequence
  Description of Artificial Sequence: Synthetic oligonucleotide
  Sense strand starting at position 9 of SEQ ID NO: 1880887
aucugagggcuccagcuua

SEQ ID NO: 2001527 - RNA, 19 nt, Artificial Sequence
  Description of Artificial Sequence: Synthetic oligonucleotide
  Antisense strand to SEQ ID NO: 2001526
uaagcuggagcccucagau

SEQ ID NO: 2001528 - RNA, 19 nt, Artificial Sequence
  Description of Artificial Sequence: Synthetic oligonucleotide
  Sense strand starting at position 118 of SEQ ID NO: 1880887
gccucacuccugggaggau

SEQ ID NO: 2001529 - RNA, 19 nt, Artificial Sequence
  Description of Artificial Sequence: Synthetic oligonucleotide
  Antisense strand to SEQ ID NO: 2001528
auccucccaggagugaggc

SEQ ID NO: 2001530 - RNA, 19 nt, Artificial Sequence
  Description of Artificial Sequence: Synthetic oligonucleotide
  Sense strand starting at position 185 of SEQ ID NO: 1880887
guaacugucaaguaguguu

SEQ ID NO: 2001531 - RNA, 19 nt, Artificial Sequence
  Description of Artificial Sequence: Synthetic oligonucleotide
  Antisense strand to SEQ ID NO: 2001530
aacacuacuugacaguuac

SEQ ID NO: 2001532 - RNA, 19 nt, Artificial Sequence
  Description of Artificial Sequence: Synthetic oligonucleotide
  Sense strand starting at position 193 of SEQ ID NO: 1880887
caaguaguguuguuauuaa

SEQ ID NO: 2001533 - RNA, 19 nt, Artificial Sequence
  Description of Artificial Sequence: Synthetic oligonucleotide
  Antisense strand to SEQ ID NO: 2001532
uuaauaacaacacuacuug

SEQ ID NO: 2001534 - RNA, 19 nt, Artificial Sequence
  Description of Artificial Sequence: Synthetic oligonucleotide
  Sense strand starting at position 213 of SEQ ID NO: 1880887
uggcucuuaggauacuuau

SEQ ID NO: 2001535 - RNA, 19 nt, Artificial Sequence
  Description of Artificial Sequence: Synthetic oligonucleotide
  Antisense strand to SEQ ID NO: 2001534
auaaguauccuaagagcca

SEQ ID NO: 2001536 - RNA, 19 nt, Artificial Sequence
  Description of Artificial Sequence: Synthetic oligonucleotide
  Sense strand starting at position 222 of SEQ ID NO: 1880887
ggauacuuauuguuccuga

SEQ ID NO: 2001537 - RNA, 19 nt, Artificial Sequence
  Description of Artificial Sequence: Synthetic oligonucleotide
  Antisense strand to SEQ ID NO: 2001536
ucaggaacaauaaguaucc

SEQ ID NO: 2001538 - RNA, 19 nt, Artificial Sequence
  Description of Artificial Sequence: Synthetic oligonucleotide
  Sense strand starting at position 247 of SEQ ID NO: 1880887
aggacagcucuuugcuuga

SEQ ID NO: 2001539 - RNA, 19 nt, Artificial Sequence
  Description of Artificial Sequence: Synthetic oligonucleotide
  Antisense strand to SEQ ID NO: 2001538
ucaagcaaagagcuguccu

SEQ ID NO: 2001540 - RNA, 19 nt, Artificial Sequence
  Description of Artificial Sequence: Synthetic oligonucleotide
  Sense strand starting at position 697 of SEQ ID NO: 1880887
gaagcuuuagagcaagguu

SEQ ID NO: 2001541 - RNA, 19 nt, Artificial Sequence
  Description of Artificial Sequence: Synthetic oligonucleotide
  Antisense strand to SEQ ID NO: 2001540
aaccuugcucuaaagcuuc

SEQ ID NO: 2001542 - RNA, 19 nt, Artificial Sequence
  Description of Artificial Sequence: Synthetic oligonucleotide
  Sense strand starting at position 906 of SEQ ID NO: 1880887
aguugaggucccuaaggcu

SEQ ID NO: 2001543 - RNA, 19 nt, Artificial Sequence
  Description of Artificial Sequence: Synthetic oligonucleotide
  Antisense strand to SEQ ID NO: 2001542
agccuuagggaccucaacu

SEQ ID NO: 2001544 - RNA, 19 nt, Artificial Sequence
  Description of Artificial Sequence: Synthetic oligonucleotide
  Sense strand starting at position 972 of SEQ ID NO: 1880887
ggaaauugcccuggcuaga

SEQ ID NO: 2001545 - RNA, 19 nt, Artificial Sequence
  Description of Artificial Sequence: Synthetic oligonucleotide
  Antisense strand to SEQ ID NO: 2001544
ucuagccagggcaauuucc

SEQ ID NO: 2001546 - RNA, 19 nt, Artificial Sequence
  Description of Artificial Sequence: Synthetic oligonucleotide
  Sense strand starting at position 1189 of SEQ ID NO: 1880887
uccauaugccagugaugga

SEQ ID NO: 2001547 - RNA, 19 nt, Artificial Sequence
  Description of Artificial Sequence: Synthetic oligonucleotide
  Antisense strand to SEQ ID NO: 2001546
uccaucacuggcauaugga

SEQ ID NO: 2001548 - RNA, 19 nt, Artificial Sequence
  Description of Artificial Sequence: Synthetic oligonucleotide
  Sense strand starting at position 1330 of SEQ ID NO: 1880887
ugagauguuucugccacaa

SEQ ID NO: 2001549 - RNA, 19 nt, Artificial Sequence
  Description of Artificial Sequence: Synthetic oligonucleotide
  Antisense strand to SEQ ID NO: 2001548
uuguggcagaaacaucuca

SEQ ID NO: 2001550 - RNA, 19 nt, Artificial Sequence
  Description of Artificial Sequence: Synthetic oligonucleotide
  Sense strand starting at position 2379 of SEQ ID NO: 1880887
aacggugaguccucuagga

SEQ ID NO: 2001551 - RNA, 19 nt, Artificial Sequence
  Description of Artificial Sequence: Synthetic oligonucleotide
  Antisense strand to SEQ ID NO: 2001550
uccuagaggacucaccguu

SEQ ID NO: 2001552 - RNA, 19 nt, Artificial Sequence
  Description of Artificial Sequence: Synthetic oligonucleotide
  Sense strand starting at position 2381 of SEQ ID NO: 1880887
cggugaguccucuaggaag

SEQ ID NO: 2001553 - RNA, 19 nt, Artificial Sequence
  Description of Artificial Sequence: Synthetic oligonucleotide
  Antisense strand to SEQ ID NO: 2001552
cuuccuagaggacucaccg

SEQ ID NO: 2001554 - RNA, 19 nt, Artificial Sequence
  Description of Artificial Sequence: Synthetic oligonucleotide
  Sense strand starting at position 2383 of SEQ ID NO: 1880887
gugaguccucuaggaagcu

SEQ ID NO: 2001555 - RNA, 19 nt, Artificial Sequence
  Description of Artificial Sequence: Synthetic oligonucleotide
  Antisense strand to SEQ ID NO: 2001554
agcuuccuagaggacucac

SEQ ID NO: 2001556 - RNA, 19 nt, Artificial Sequence
  Description of Artificial Sequence: Synthetic oligonucleotide
  Sense strand starting at position 2466 of SEQ ID NO: 1880887
caaagacuuggcuguuucu

SEQ ID NO: 2001557 - RNA, 19 nt, Artificial Sequence
  Description of Artificial Sequence: Synthetic oligonucleotide
  Antisense strand to SEQ ID NO: 2001556
agaaacagccaagucuuug

SEQ ID NO: 2001558 - RNA, 19 nt, Artificial Sequence
  Description of Artificial Sequence: Synthetic oligonucleotide
  Sense strand starting at position 2472 of SEQ ID NO: 1880887
cuuggcuguuucuuaagaa

SEQ ID NO: 2001559 - RNA, 19 nt, Artificial Sequence
  Description of Artificial Sequence: Synthetic oligonucleotide
  Antisense strand to SEQ ID NO: 2001558
uucuuaagaaacagccaag

SEQ ID NO: 2001560 - RNA, 19 nt, Artificial Sequence
  Description of Artificial Sequence: Synthetic oligonucleotide
  Sense strand starting at position 2571 of SEQ ID NO: 1880887
ugcuuuccugcauacaagu

SEQ ID NO: 2001561 - RNA, 19 nt, Artificial Sequence
  Description of Artificial Sequence: Synthetic oligonucleotide
  Antisense strand to SEQ ID NO: 2001560
acuuguaugcaggaaagca

SEQ ID NO: 2001562 - RNA, 19 nt, Artificial Sequence
  Description of Artificial Sequence: Synthetic oligonucleotide
  Sense strand starting at position 2595 of SEQ ID NO: 1880887
auguacuagccagaaauca

SEQ ID NO: 2001563 - RNA, 19 nt, Artificial Sequence
  Description of Artificial Sequence: Synthetic oligonucleotide
  Antisense strand to SEQ ID NO: 2001562
ugauuucuggcuaguacau

SEQ ID NO: 2001564 - RNA, 19 nt, Artificial Sequence
  Description of Artificial Sequence: Synthetic oligonucleotide
  Sense strand starting at position 2603 of SEQ ID NO: 1880887
gccagaaaucaguguccaa

SEQ ID NO: 2001565 - RNA, 19 nt, Artificial Sequence
  Description of Artificial Sequence: Synthetic oligonucleotide
  Antisense strand to SEQ ID NO: 2001564
uuggacacugauuucuggc

SEQ ID NO: 2001566 - RNA, 19 nt, Artificial Sequence
  Description of Artificial Sequence: Synthetic oligonucleotide
  Sense strand starting at position 2694 of SEQ ID NO: 1880887
gacacauguaggugucagu

SEQ ID NO: 2001567 - RNA, 19 nt, Artificial Sequence
  Description of Artificial Sequence: Synthetic oligonucleotide
  Antisense strand to SEQ ID NO: 2001566
acugacaccuacauguguc

SEQ ID NO: 2001568 - RNA, 19 nt, Artificial Sequence
  Description of Artificial Sequence: Synthetic oligonucleotide
  Sense strand starting at position 2707 of SEQ ID NO: 1880887
gucaguguagaguagguaa

SEQ ID NO: 2001569 - RNA, 19 nt, Artificial Sequence
  Description of Artificial Sequence: Synthetic oligonucleotide
  Antisense strand to SEQ ID NO: 2001568
uuaccuacucuacacugac

SEQ ID NO: 2001570 - RNA, 19 nt, Artificial Sequence
  Description of Artificial Sequence: Synthetic oligonucleotide
  Sense strand starting at position 2739 of SEQ ID NO: 1880887
caguguugguaagcaaaga

SEQ ID NO: 2001571 - RNA, 19 nt, Artificial Sequence
  Description of Artificial Sequence: Synthetic oligonucleotide
  Antisense strand to SEQ ID NO: 2001570
ucuuugcuuaccaacacug

SEQ ID NO: 2001572 - RNA, 19 nt, Artificial Sequence
  Description of Artificial Sequence: Synthetic oligonucleotide
  Sense strand starting at position 2837 of SEQ ID NO: 1880887
aaacuuacaggcuaugagu

SEQ ID NO: 2001573 - RNA, 19 nt, Artificial Sequence
  Description of Artificial Sequence: Synthetic oligonucleotide
  Antisense strand to SEQ ID NO: 2001572
acucauagccuguaaguuu

SEQ ID NO: 2001574 - RNA, 19 nt, Artificial Sequence
  Description of Artificial Sequence: Synthetic oligonucleotide
  Sense strand starting at position 2853 of SEQ ID NO: 1880887
agugcauuccuggauguuu

SEQ ID NO: 2001575 - RNA, 19 nt, Artificial Sequence
  Description of Artificial Sequence: Synthetic oligonucleotide
  Antisense strand to SEQ ID NO: 2001574
aaacauccaggaaugcacu

SEQ ID NO: 2001576 - RNA, 19 nt, Artificial Sequence
  Description of Artificial Sequence: Synthetic oligonucleotide
  Sense strand starting at position 3192 of SEQ ID NO: 1880887
cccggauguuucuuaaauu

SEQ ID NO: 2001577 - RNA, 19 nt, Artificial Sequence
  Description of Artificial Sequence: Synthetic oligonucleotide
  Antisense strand to SEQ ID NO: 2001576
aauuuaagaaacauccggg

SEQ ID NO: 2001578 - RNA, 19 nt, Artificial Sequence
  Description of Artificial Sequence: Synthetic oligonucleotide
  Sense strand starting at position 3206 of SEQ ID NO: 1880887
aaauuauugcaagggugga

SEQ ID NO: 2001579 - RNA, 19 nt, Artificial Sequence
  Description of Artificial Sequence: Synthetic oligonucleotide
  Antisense strand to SEQ ID NO: 2001578
uccacccuugcaauaauuu

SEQ ID NO: 2001580 - RNA, 19 nt, Artificial Sequence
  Description of Artificial Sequence: Synthetic oligonucleotide
  Sense strand starting at position 3210 of SEQ ID NO: 1880887
uauugcaaggguggaaaua

SEQ ID NO: 2001581 - RNA, 19 nt, Artificial Sequence
  Description of Artificial Sequence: Synthetic oligonucleotide
  Antisense strand to SEQ ID NO: 2001580
uauuuccacccuugcaaua

SEQ ID NO: 2001582 - RNA, 19 nt, Artificial Sequence
  Description of Artificial Sequence: Synthetic oligonucleotide
  Sense strand starting at position 3251 of SEQ ID NO: 1880887
cuggcauucugucucaaag

SEQ ID NO: 2001583 - RNA, 19 nt, Artificial Sequence
  Description of Artificial Sequence: Synthetic oligonucleotide
  Antisense strand to SEQ ID NO: 2001582
cuuugagacagaaugccag

SEQ ID NO: 2001584 - RNA, 19 nt, Artificial Sequence
  Description of Artificial Sequence: Synthetic oligonucleotide
  Sense strand starting at position 3291 of SEQ ID NO: 1880887
gcccuugugagaugacaga

SEQ ID NO: 2001585 - RNA, 19 nt, Artificial Sequence
  Description of Artificial Sequence: Synthetic oligonucleotide
  Antisense strand to SEQ ID NO: 2001584
ucugucaucucacaagggc

SEQ ID NO: 2001586 - RNA, 19 nt, Artificial Sequence
  Description of Artificial Sequence: Synthetic oligonucleotide
  Sense strand starting at position 3378 of SEQ ID NO: 1880887
aggcaaaggcuaugugaaa

SEQ ID NO: 2001587 - RNA, 19 nt, Artificial Sequence
  Description of Artificial Sequence: Synthetic oligonucleotide
  Antisense strand to SEQ ID NO: 2001586
uuucacauagccuuugccu

SEQ ID NO: 2001588 - RNA, 19 nt, Artificial Sequence
  Description of Artificial Sequence: Synthetic oligonucleotide
  Sense strand starting at position 3403 of SEQ ID NO: 1880887
gguccugugcuuuagagaa

SEQ ID NO: 2001589 - RNA, 19 nt, Artificial Sequence
  Description of Artificial Sequence: Synthetic oligonucleotide
  Antisense strand to SEQ ID NO: 2001588
uucucuaaagcacaggacc

SEQ ID NO: 2001590 - RNA, 19 nt, Artificial Sequence
  Description of Artificial Sequence: Synthetic oligonucleotide
  Sense strand starting at position 3411 of SEQ ID NO: 1880887
gcuuuagagaaguagagca

SEQ ID NO: 2001591 - RNA, 19 nt, Artificial Sequence
  Description of Artificial Sequence: Synthetic oligonucleotide
  Antisense strand to SEQ ID NO: 2001590
ugcucuacuucucuaaagc

SEQ ID NO: 2001592 - RNA, 19 nt, Artificial Sequence
  Description of Artificial Sequence: Synthetic oligonucleotide
  Sense strand starting at position 3815 of SEQ ID NO: 1880887
agagcccuguccuuaaaca

SEQ ID NO: 2001593 - RNA, 19 nt, Artificial Sequence
  Description of Artificial Sequence: Synthetic oligonucleotide
  Antisense strand to SEQ ID NO: 2001592
uguuuaaggacagggcucu

SEQ ID NO: 2001594 - RNA, 19 nt, Artificial Sequence
  Description of Artificial Sequence: Synthetic oligonucleotide
  Sense strand starting at position 3861 of SEQ ID NO: 1880887
caagaaguauggcugugua

SEQ ID NO: 2001595 - RNA, 19 nt, Artificial Sequence
  Description of Artificial Sequence: Synthetic oligonucleotide
  Antisense strand to SEQ ID NO: 2001594
uacacagccauacuucuug

SEQ ID NO: 2001596 - RNA, 19 nt, Artificial Sequence
  Description of Artificial Sequence: Synthetic oligonucleotide
  Sense strand starting at position 3873 of SEQ ID NO: 1880887
cuguguagugaucacugua

SEQ ID NO: 2001597 - RNA, 19 nt, Artificial Sequence
  Description of Artificial Sequence: Synthetic oligonucleotide
  Antisense strand to SEQ ID NO: 2001596
uacagugaucacuacacag

SEQ ID NO: 2001598 - RNA, 19 nt, Artificial Sequence
  Description of Artificial Sequence: Synthetic oligonucleotide
  Sense strand starting at position 3876 of SEQ ID NO: 1880887
uguagugaucacuguacaa

SEQ ID NO: 2001599 - RNA, 19 nt, Artificial Sequence
  Description of Artificial Sequence: Synthetic oligonucleotide
  Antisense strand to SEQ ID NO: 2001598
uuguacagugaucacuaca

SEQ ID NO: 2001600 - RNA, 19 nt, Artificial Sequence
  Description of Artificial Sequence: Synthetic oligonucleotide
  Sense strand starting at position 3895 of SEQ ID NO: 1880887
gcacaccuggcugaauaaa

SEQ ID NO: 2001601 - RNA, 19 nt, Artificial Sequence
  Description of Artificial Sequence: Synthetic oligonucleotide
  Antisense strand to SEQ ID NO: 2001600
uuuauucagccaggugugc

SEQ ID NO: 2001602 - RNA, 19 nt, Artificial Sequence
  Description of Artificial Sequence: Synthetic oligonucleotide
  Sense strand starting at position 3953 of SEQ ID NO: 1880887
ugcuuugugccucaggaca

SEQ ID NO: 2001603 - RNA, 19 nt, Artificial Sequence
  Description of Artificial Sequence: Synthetic oligonucleotide
  Antisense strand to SEQ ID NO: 2001602
uguccugaggcacaaagca

SEQ ID NO: 2001604 - RNA, 19 nt, Artificial Sequence
  Description of Artificial Sequence: Synthetic oligonucleotide
  Sense strand starting at position 3975 of SEQ ID NO: 1880887
gugugcuuccuugcuaauu

SEQ ID NO: 2001605 - RNA, 19 nt, Artificial Sequence
  Description of Artificial Sequence: Synthetic oligonucleotide
  Antisense strand to SEQ ID NO: 2001604
aauuagcaaggaagcacac

SEQ ID NO: 2001606 - RNA, 19 nt, Artificial Sequence
  Description of Artificial Sequence: Synthetic oligonucleotide
  Sense strand starting at position 179 of SEQ ID NO: 1880888
uuaauaaggccacgguaau

SEQ ID NO: 2001607 - RNA, 19 nt, Artificial Sequence
  Description of Artificial Sequence: Synthetic oligonucleotide
  Antisense strand to SEQ ID NO: 2001606
auuaccguggccuuauuaa

SEQ ID NO: 2001608 - RNA, 19 nt, Artificial Sequence
  Description of Artificial Sequence: Synthetic oligonucleotide
  Sense strand starting at position 180 of SEQ ID NO: 1880888
uaauaaggccacgguaauu

SEQ ID NO: 2001609 - RNA, 19 nt, Artificial Sequence
  Description of Artificial Sequence: Synthetic oligonucleotide
  Antisense strand to SEQ ID NO: 2001608
aauuaccguggccuuauua

SEQ ID NO: 2001610 - RNA, 19 nt, Artificial Sequence
  Description of Artificial Sequence: Synthetic oligonucleotide
  Sense strand starting at position 193 of SEQ ID NO: 1880888
guaauuaucccgcgaaucu

SEQ ID NO: 2001611 - RNA, 19 nt, Artificial Sequence
  Description of Artificial Sequence: Synthetic oligonucleotide
  Antisense strand to SEQ ID NO: 2001610
agauucgcgggauaauuac

SEQ ID NO: 2001612 - RNA, 19 nt, Artificial Sequence
  Description of Artificial Sequence: Synthetic oligonucleotide
  Sense strand starting at position 2348 of SEQ ID NO: 1880888
uucguagcucguucauguu

SEQ ID NO: 2001613 - RNA, 19 nt, Artificial Sequence
  Description of Artificial Sequence: Synthetic oligonucleotide
  Antisense strand to SEQ ID NO: 2001612
aacaugaacgagcuacgaa

SEQ ID NO: 2001614 - RNA, 19 nt, Artificial Sequence
  Description of Artificial Sequence: Synthetic oligonucleotide
  Sense strand starting at position 2460 of SEQ ID NO: 1880888
augcgcuuucaucgguauu

SEQ ID NO: 2001615 - RNA, 19 nt, Artificial Sequence
  Description of Artificial Sequence: Synthetic oligonucleotide
  Antisense strand to SEQ ID NO: 2001614
aauaccgaugaaagcgcau

SEQ ID NO: 2001616 - RNA, 19 nt, Artificial Sequence
  Description of Artificial Sequence: Synthetic oligonucleotide
  Sense strand starting at position 2472 of SEQ ID NO: 1880888
cgguauugcugccuggagu

SEQ ID NO: 2001617 - RNA, 19 nt, Artificial Sequence
  Description of Artificial Sequence: Synthetic oligonucleotide
  Antisense strand to SEQ ID NO: 2001616
acuccaggcagcaauaccg

SEQ ID NO: 2001618 - RNA, 19 nt, Artificial Sequence
  Description of Artificial Sequence: Synthetic oligonucleotide
  Sense strand starting at position 2473 of SEQ ID NO: 1880888
gguauugcugccuggaguu

SEQ ID NO: 2001619 - RNA, 19 nt, Artificial Sequence
  Description of Artificial Sequence: Synthetic oligonucleotide
  Antisense strand to SEQ ID NO: 2001618
aacuccaggcagcaauacc

SEQ ID NO: 2001620 - RNA, 19 nt, Artificial Sequence
  Description of Artificial Sequence: Synthetic oligonucleotide
  Sense strand starting at position 2506 of SEQ ID NO: 1880888
caugguaucucuccgacau

SEQ ID NO: 2001621 - RNA, 19 nt, Artificial Sequence
  Description of Artificial Sequence: Synthetic oligonucleotide
  Antisense strand to SEQ ID NO: 2001620
augucggagagauaccaug

SEQ ID NO: 2001622 - RNA, 19 nt, Artificial Sequence
  Description of Artificial Sequence: Synthetic oligonucleotide
  Sense strand starting at position 2507 of SEQ ID NO: 1880888
augguaucucuccgacauc

SEQ ID NO: 2001623 - RNA, 19 nt, Artificial Sequence
  Description of Artificial Sequence: Synthetic oligonucleotide
  Antisense strand to SEQ ID NO: 2001622
gaugucggagagauaccau

SEQ ID NO: 2001624 - RNA, 19 nt, Artificial Sequence
  Description of Artificial Sequence: Synthetic oligonucleotide
  Sense strand starting at position 2799 of SEQ ID NO: 1880888
uucuguuagccaggugaag

SEQ ID NO: 2001625 - RNA, 19 nt, Artificial Sequence
  Description of Artificial Sequence: Synthetic oligonucleotide
  Antisense strand to SEQ ID NO: 2001624
cuucaccuggcuaacagaa

SEQ ID NO: 2001626 - RNA, 19 nt, Artificial Sequence
  Description of Artificial Sequence: Synthetic oligonucleotide
  Sense strand starting at position 2862 of SEQ ID NO: 1880888
cccgaauuauucguaacuu

SEQ ID NO: 2001627 - RNA, 19 nt, Artificial Sequence
  Description of Artificial Sequence: Synthetic oligonucleotide
  Antisense strand to SEQ ID NO: 2001626
aaguuacgaauaauucggg

SEQ ID NO: 2001628 - RNA, 19 nt, Artificial Sequence
  Description of Artificial Sequence: Synthetic oligonucleotide
  Sense strand starting at position 2870 of SEQ ID NO: 1880888
auucguaacuuccuuggga

SEQ ID NO: 2001629 - RNA, 19 nt, Artificial Sequence
  Description of Artificial Sequence: Synthetic oligonucleotide
  Antisense strand to SEQ ID NO: 2001628
ucccaaggaaguuacgaau

SEQ ID NO: 2001630 - RNA, 19 nt, Artificial Sequence
  Description of Artificial Sequence: Synthetic oligonucleotide
  Sense strand starting at position 2872 of SEQ ID NO: 1880888
ucguaacuuccuugggaga

SEQ ID NO: 2001631 - RNA, 19 nt, Artificial Sequence
  Description of Artificial Sequence: Synthetic oligonucleotide
  Antisense strand to SEQ ID NO: 2001630
ucucccaaggaaguuacga

SEQ ID NO: 2001632 - RNA, 19 nt, Artificial Sequence
  Description of Artificial Sequence: Synthetic oligonucleotide
  Sense strand starting at position 2873 of SEQ ID NO: 1880888
cguaacuuccuugggagau

SEQ ID NO: 2001633 - RNA, 19 nt, Artificial Sequence
  Description of Artificial Sequence: Synthetic oligonucleotide
  Antisense strand to SEQ ID NO: 2001632
aucucccaaggaaguuacg

SEQ ID NO: 2001634 - RNA, 19 nt, Artificial Sequence
  Description of Artificial Sequence: Synthetic oligonucleotide
  Sense strand starting at position 2874 of SEQ ID NO: 1880888
guaacuuccuugggagauu

SEQ ID NO: 2001635 - RNA, 19 nt, Artificial Sequence
  Description of Artificial Sequence: Synthetic oligonucleotide
  Antisense strand to SEQ ID NO: 2001634
aaucucccaaggaaguuac

SEQ ID NO: 2001636 - RNA, 19 nt, Artificial Sequence
  Description of Artificial Sequence: Synthetic oligonucleotide
  Sense strand starting at position 2971 of SEQ ID NO: 1880888
cuaagauauccuggugaau

SEQ ID NO: 2001637 - RNA, 19 nt, Artificial Sequence
  Description of Artificial Sequence: Synthetic oligonucleotide
  Antisense strand to SEQ ID NO: 2001636
auucaccaggauaucuuag

SEQ ID NO: 2001638 - RNA, 19 nt, Artificial Sequence
  Description of Artificial Sequence: Synthetic oligonucleotide
  Sense strand starting at position 2973 of SEQ ID NO: 1880888
aagauauccuggugaauga

SEQ ID NO: 2001639 - RNA, 19 nt, Artificial Sequence
  Description of Artificial Sequence: Synthetic oligonucleotide
  Antisense strand to SEQ ID NO: 2001638
ucauucaccaggauaucuu

SEQ ID NO: 2001640 - RNA, 19 nt, Artificial Sequence
  Description of Artificial Sequence: Synthetic oligonucleotide
  Sense strand starting at position 2984 of SEQ ID NO: 1880888
gugaaugagaagcgaucua

SEQ ID NO: 2001641 - RNA, 19 nt, Artificial Sequence
  Description of Artificial Sequence: Synthetic oligonucleotide
  Antisense strand to SEQ ID NO: 2001640
uagaucgcuucucauucac

SEQ ID NO: 2001642 - RNA, 19 nt, Artificial Sequence
  Description of Artificial Sequence: Synthetic oligonucleotide
  Sense strand starting at position 2989 of SEQ ID NO: 1880888
ugagaagcgaucuaguaga

SEQ ID NO: 2001643 - RNA, 19 nt, Artificial Sequence
  Description of Artificial Sequence: Synthetic oligonucleotide
  Antisense strand to SEQ ID NO: 2001642
ucuacuagaucgcuucuca

SEQ ID NO: 2001644 - RNA, 19 nt, Artificial Sequence
  Description of Artificial Sequence: Synthetic oligonucleotide
  Sense strand starting at position 2996 of SEQ ID NO: 1880888
cgaucuaguagaggacaaa

SEQ ID NO: 2001645 - RNA, 19 nt, Artificial Sequence
  Description of Artificial Sequence: Synthetic oligonucleotide
  Antisense strand to SEQ ID NO: 2001644
uuuguccucuacuagaucg

SEQ ID NO: 2001646 - RNA, 19 nt, Artificial Sequence
  Description of Artificial Sequence: Synthetic oligonucleotide
  Sense strand starting at position 3082 of SEQ ID NO: 1880888
uuugcaugcguguaguaua

SEQ ID NO: 2001647 - RNA, 19 nt, Artificial Sequence
  Description of Artificial Sequence: Synthetic oligonucleotide
  Antisense strand to SEQ ID NO: 2001646
uauacuacacgcaugcaaa

SEQ ID NO: 2001648 - RNA, 19 nt, Artificial Sequence
  Description of Artificial Sequence: Synthetic oligonucleotide
  Sense strand starting at position 3125 of SEQ ID NO: 1880888
auuauuguccacuguagga

SEQ ID NO: 2001649 - RNA, 19 nt, Artificial Sequence
  Description of Artificial Sequence: Synthetic oligonucleotide
  Antisense strand to SEQ ID NO: 2001648
uccuacaguggacaauaau

SEQ ID NO: 2001650 - RNA, 19 nt, Artificial Sequence
  Description of Artificial Sequence: Synthetic oligonucleotide
  Sense strand starting at position 3161 of SEQ ID NO: 1880888
gggagcuauuuauaauuau

SEQ ID NO: 2001651 - RNA, 19 nt, Artificial Sequence
  Description of Artificial Sequence: Synthetic oligonucleotide
  Antisense strand to SEQ ID NO: 2001650
auaauuauaaauagcuccc

SEQ ID NO: 2001652 - RNA, 19 nt, Artificial Sequence
  Description of Artificial Sequence: Synthetic oligonucleotide
  Sense strand starting at position 3189 of SEQ ID NO: 1880888
ggacaacagucacucuaau

SEQ ID NO: 2001653 - RNA, 19 nt, Artificial Sequence
  Description of Artificial Sequence: Synthetic oligonucleotide
  Antisense strand to SEQ ID NO: 2001652
auuagagugacuguugucc

SEQ ID NO: 2001654 - RNA, 19 nt, Artificial Sequence
  Description of Artificial Sequence: Synthetic oligonucleotide
  Sense strand starting at position 3210 of SEQ ID NO: 1880888
ucaggaguccugggaaugu

SEQ ID NO: 2001655 - RNA, 19 nt, Artificial Sequence
  Description of Artificial Sequence: Synthetic oligonucleotide
  Antisense strand to SEQ ID NO: 2001654
acauucccaggacuccuga

SEQ ID NO: 2001656 - RNA, 19 nt, Artificial Sequence
  Description of Artificial Sequence: Synthetic oligonucleotide
  Sense strand starting at position 3219 of SEQ ID NO: 1880888
cugggaauguggccagaga

SEQ ID NO: 2001657 - RNA, 19 nt, Artificial Sequence
  Description of Artificial Sequence: Synthetic oligonucleotide
  Antisense strand to SEQ ID NO: 2001656
ucucuggccacauucccag

SEQ ID NO: 2001658 - RNA, 19 nt, Artificial Sequence
  Description of Artificial Sequence: Synthetic oligonucleotide
  Sense strand starting at position 3455 of SEQ ID NO: 1880888
agacacuuggccuguguua

SEQ ID NO: 2001659 - RNA, 19 nt, Artificial Sequence
  Description of Artificial Sequence: Synthetic oligonucleotide
  Antisense strand to SEQ ID NO: 2001658
uaacacaggccaagugucu

SEQ ID NO: 2001660 - RNA, 19 nt, Artificial Sequence
  Description of Artificial Sequence: Synthetic oligonucleotide
  Sense strand starting at position 3473 of SEQ ID NO: 1880888
aggaacagucucgaagcaa

SEQ ID NO: 2001661 - RNA, 19 nt, Artificial Sequence
  Description of Artificial Sequence: Synthetic oligonucleotide
  Antisense strand to SEQ ID NO: 2001660
uugcuucgagacuguuccu

SEQ ID NO: 2001662 - RNA, 19 nt, Artificial Sequence
  Description of Artificial Sequence: Synthetic oligonucleotide
  Sense strand starting at position 3493 of SEQ ID NO: 1880888
cccugcuguugagucagaa

SEQ ID NO: 2001663 - RNA, 19 nt, Artificial Sequence
  Description of Artificial Sequence: Synthetic oligonucleotide
  Antisense strand to SEQ ID NO: 2001662
uucugacucaacagcaggg

SEQ ID NO: 2001664 - RNA, 19 nt, Artificial Sequence
  Description of Artificial Sequence: Synthetic oligonucleotide
  Sense strand starting at position 3497 of SEQ ID NO: 1880888
gcuguugagucagaaagag

SEQ ID NO: 2001665 - RNA, 19 nt, Artificial Sequence
  Description of Artificial Sequence: Synthetic oligonucleotide
  Antisense strand to SEQ ID NO: 2001664
cucuuucugacucaacagc

SEQ ID NO: 2001666 - RNA, 19 nt, Artificial Sequence
  Description of Artificial Sequence: Synthetic oligonucleotide
  Sense strand starting at position 3543 of SEQ ID NO: 1880888
ccaagagagcuuuguaaua

SEQ ID NO: 2001667 - RNA, 19 nt, Artificial Sequence
  Description of Artificial Sequence: Synthetic oligonucleotide
  Antisense strand to SEQ ID NO: 2001666
uauuacaaagcucucuugg

SEQ ID NO: 2001668 - RNA, 19 nt, Artificial Sequence
  Description of Artificial Sequence: Synthetic oligonucleotide
  Sense strand starting at position 3548 of SEQ ID NO: 1880888
agagcuuuguaauaauuag

SEQ ID NO: 2001669 - RNA, 19 nt, Artificial Sequence
  Description of Artificial Sequence: Synthetic oligonucleotide
  Antisense strand to SEQ ID NO: 2001668
cuaauuauuacaaagcucu

SEQ ID NO: 2001670 - RNA, 19 nt, Artificial Sequence
  Description of Artificial Sequence: Synthetic oligonucleotide
  Sense strand starting at position 3570 of SEQ ID NO: 1880888
uugggacaccugugugcua

SEQ ID NO: 2001671 - RNA, 19 nt, Artificial Sequence
  Description of Artificial Sequence: Synthetic oligonucleotide
  Antisense strand to SEQ ID NO: 2001670
uagcacacaggugucccaa

SEQ ID NO: 2001672 - RNA, 19 nt, Artificial Sequence
  Description of Artificial Sequence: Synthetic oligonucleotide
  Sense strand starting at position 3666 of SEQ ID NO: 1880888
ucuguaagaugagaagcau

SEQ ID NO: 2001673 - RNA, 19 nt, Artificial Sequence
  Description of Artificial Sequence: Synthetic oligonucleotide
  Antisense strand to SEQ ID NO: 2001672
augcuucucaucuuacaga

SEQ ID NO: 2001674 - RNA, 19 nt, Artificial Sequence
  Description of Artificial Sequence: Synthetic oligonucleotide
  Sense strand starting at position 3704 of SEQ ID NO: 1880888
ucaugugguugcuuuagaa

SEQ ID NO: 2001675 - RNA, 19 nt, Artificial Sequence
  Description of Artificial Sequence: Synthetic oligonucleotide
  Antisense strand to SEQ ID NO: 2001674
uucuaaagcaaccacauga

SEQ ID NO: 2001676 - RNA, 19 nt, Artificial Sequence
  Description of Artificial Sequence: Synthetic oligonucleotide
  Sense strand starting at position 3738 of SEQ ID NO: 1880888
caggaaaucuaugaaggcu

SEQ ID NO: 2001677 - RNA, 19 nt, Artificial Sequence
  Description of Artificial Sequence: Synthetic oligonucleotide
  Antisense strand to SEQ ID NO: 2001676
agccuucauagauuuccug

SEQ ID NO: 2001678 - RNA, 19 nt, Artificial Sequence
  Description of Artificial Sequence: Synthetic oligonucleotide
  Sense strand starting at position 3778 of SEQ ID NO: 1880888
cugaguguuagggauccaa

SEQ ID NO: 2001679 - RNA, 19 nt, Artificial Sequence
  Description of Artificial Sequence: Synthetic oligonucleotide
  Antisense strand to SEQ ID NO: 2001678
uuggaucccuaacacucag

SEQ ID NO: 2001680 - RNA, 19 nt, Artificial Sequence
  Description of Artificial Sequence: Synthetic oligonucleotide
  Sense strand starting at position 3782 of SEQ ID NO: 1880888
guguuagggauccaauaug

SEQ ID NO: 2001681 - RNA, 19 nt, Artificial Sequence
  Description of Artificial Sequence: Synthetic oligonucleotide
  Antisense strand to SEQ ID NO: 2001680
cauauuggaucccuaacac

SEQ ID NO: 2001682 - RNA, 19 nt, Artificial Sequence
  Description of Artificial Sequence: Synthetic oligonucleotide
  Sense strand starting at position 3858 of SEQ ID NO: 1880888
ggaaacaaauaaugucauu

SEQ ID NO: 2001683 - RNA, 19 nt, Artificial Sequence
  Description of Artificial Sequence: Synthetic oligonucleotide
  Antisense strand to SEQ ID NO: 2001682
aaugacauuauuuguuucc

SEQ ID NO: 2001684 - RNA, 19 nt, Artificial Sequence
  Description of Artificial Sequence: Synthetic oligonucleotide
  Sense strand starting at position 3876 of SEQ ID NO: 1880888
uguguaacaauguggcaau

SEQ ID NO: 2001685 - RNA, 19 nt, Artificial Sequence
  Description of Artificial Sequence: Synthetic oligonucleotide
  Antisense strand to SEQ ID NO: 2001684
auugccacauuguuacaca

SEQ ID NO: 2001686 - RNA, 19 nt, Artificial Sequence
  Description of Artificial Sequence: Synthetic oligonucleotide
  Sense strand starting at position 36 of SEQ ID NO: 1880889
uaaaccauacuguguggaa

SEQ ID NO: 2001687 - RNA, 19 nt, Artificial Sequence
  Description of Artificial Sequence: Synthetic oligonucleotide
  Antisense strand to SEQ ID NO: 2001686
uuccacacaguaugguuua

SEQ ID NO: 2001688 - RNA, 19 nt, Artificial Sequence
  Description of Artificial Sequence: Synthetic oligonucleotide
  Sense strand starting at position 38 of SEQ ID NO: 1880889
aaccauacuguguggaagu

SEQ ID NO: 2001689 - RNA, 19 nt, Artificial Sequence
  Description of Artificial Sequence: Synthetic oligonucleotide
  Antisense strand to SEQ ID NO: 2001688
acuuccacacaguaugguu

SEQ ID NO: 2001690 - RNA, 19 nt, Artificial Sequence
  Description of Artificial Sequence: Synthetic oligonucleotide
  Sense strand starting at position 204 of SEQ ID NO: 1880889
agaacuuacuguccugaaa

SEQ ID NO: 2001691 - RNA, 19 nt, Artificial Sequence
  Description of Artificial Sequence: Synthetic oligonucleotide
  Antisense strand to SEQ ID NO: 2001690
uuucaggacaguaaguucu

SEQ ID NO: 2001692 - RNA, 19 nt, Artificial Sequence
  Description of Artificial Sequence: Synthetic oligonucleotide
  Sense strand starting at position 376 of SEQ ID NO: 1880889
uagauagcuuaugugaucu

SEQ ID NO: 2001693 - RNA, 19 nt, Artificial Sequence
  Description of Artificial Sequence: Synthetic oligonucleotide
  Antisense strand to SEQ ID NO: 2001692
agaucacauaagcuaucua

SEQ ID NO: 2001694 - RNA, 19 nt, Artificial Sequence
  Description of Artificial Sequence: Synthetic oligonucleotide
  Sense strand starting at position 464 of SEQ ID NO: 1880889
agccuuagauuccucagau

SEQ ID NO: 2001695 - RNA, 19 nt, Artificial Sequence
  Description of Artificial Sequence: Synthetic oligonucleotide
  Antisense strand to SEQ ID NO: 2001694
aucugaggaaucuaaggcu

SEQ ID NO: 2001696 - RNA, 19 nt, Artificial Sequence
  Description of Artificial Sequence: Synthetic oligonucleotide
  Sense strand starting at position 465 of SEQ ID NO: 1880889
gccuuagauuccucagaua

SEQ ID NO: 2001697 - RNA, 19 nt, Artificial Sequence
  Description of Artificial Sequence: Synthetic oligonucleotide
  Antisense strand to SEQ ID NO: 2001696
uaucugaggaaucuaaggc

SEQ ID NO: 2001698 - RNA, 19 nt, Artificial Sequence
  Description of Artificial Sequence: Synthetic oligonucleotide
  Sense strand starting at position 529 of SEQ ID NO: 1880889
gggacauuauaauggauga

SEQ ID NO: 2001699 - RNA, 19 nt, Artificial Sequence
  Description of Artificial Sequence: Synthetic oligonucleotide
  Antisense strand to SEQ ID NO: 2001698
ucauccauuauaauguccc

SEQ ID NO: 2001700 - RNA, 19 nt, Artificial Sequence
  Description of Artificial Sequence: Synthetic oligonucleotide
  Sense strand starting at position 540 of SEQ ID NO: 1880889
auggaugacgugugugaac

SEQ ID NO: 2001701 - RNA, 19 nt, Artificial Sequence
  Description of Artificial Sequence: Synthetic oligonucleotide
  Antisense strand to SEQ ID NO: 2001700
guucacacacgucauccau

SEQ ID NO: 2001702 - RNA, 19 nt, Artificial Sequence
  Description of Artificial Sequence: Synthetic oligonucleotide
  Sense strand starting at position 1015 of SEQ ID NO: 1880889
ggcgguuuaacauacaaug

SEQ ID NO: 2001703 - RNA, 19 nt, Artificial Sequence
  Description of Artificial Sequence: Synthetic oligonucleotide
  Antisense strand to SEQ ID NO: 2001702
cauuguauguuaaaccgcc

SEQ ID NO: 2001704 - RNA, 19 nt, Artificial Sequence
  Description of Artificial Sequence: Synthetic oligonucleotide
  Sense strand starting at position 1109 of SEQ ID NO: 1880889
ggaaauagaucgcuuagac

SEQ ID NO: 2001705 - RNA, 19 nt, Artificial Sequence
  Description of Artificial Sequence: Synthetic oligonucleotide
  Antisense strand to SEQ ID NO: 2001704
gucuaagcgaucuauuucc

SEQ ID NO: 2001706 - RNA, 19 nt, Artificial Sequence
  Description of Artificial Sequence: Synthetic oligonucleotide
  Sense strand starting at position 1127 of SEQ ID NO: 1880889
cugugacgccaaugagaua

SEQ ID NO: 2001707 - RNA, 19 nt, Artificial Sequence
  Description of Artificial Sequence: Synthetic oligonucleotide
  Antisense strand to SEQ ID NO: 2001706
uaucucauuggcgucacag

SEQ ID NO: 2001708 - RNA, 19 nt, Artificial Sequence
  Description of Artificial Sequence: Synthetic oligonucleotide
  Sense strand starting at position 1139 of SEQ ID NO: 1880889
ugagauaaauacgagacaa

SEQ ID NO: 2001709 - RNA, 19 nt, Artificial Sequence
  Description of Artificial Sequence: Synthetic oligonucleotide
  Antisense strand to SEQ ID NO: 2001708
uugucucguauuuaucuca

SEQ ID NO: 2001710 - RNA, 19 nt, Artificial Sequence
  Description of Artificial Sequence: Synthetic oligonucleotide
  Sense strand starting at position 1287 of SEQ ID NO: 1880889
ccaugugagccacaguaga

SEQ ID NO: 2001711 - RNA, 19 nt, Artificial Sequence
  Description of Artificial Sequence: Synthetic oligonucleotide
  Antisense strand to SEQ ID NO: 2001710
ucuacuguggcucacaugg

SEQ ID NO: 2001712 - RNA, 19 nt, Artificial Sequence
  Description of Artificial Sequence: Synthetic oligonucleotide
  Sense strand starting at position 1319 of SEQ ID NO: 1880889
uccuguguggcauaggaaa

SEQ ID NO: 2001713 - RNA, 19 nt, Artificial Sequence
  Description of Artificial Sequence: Synthetic oligonucleotide
  Antisense strand to SEQ ID NO: 2001712
uuuccuaugccacacagga

SEQ ID NO: 2001714 - RNA, 19 nt, Artificial Sequence
  Description of Artificial Sequence: Synthetic oligonucleotide
  Sense strand starting at position 1397 of SEQ ID NO: 1880889
aacgcucauucgcugaaga

SEQ ID NO: 2001715 - RNA, 19 nt, Artificial Sequence
  Description of Artificial Sequence: Synthetic oligonucleotide
  Antisense strand to SEQ ID NO: 2001714
ucuucagcgaaugagcguu

SEQ ID NO: 2001716 - RNA, 19 nt, Artificial Sequence
  Description of Artificial Sequence: Synthetic oligonucleotide
  Sense strand starting at position 1420 of SEQ ID NO: 1880889
gugcuaaucgagccuucga

SEQ ID NO: 2001717 - RNA, 19 nt, Artificial Sequence
  Description of Artificial Sequence: Synthetic oligonucleotide
  Antisense strand to SEQ ID NO: 2001716
ucgaaggcucgauuagcac

SEQ ID NO: 2001718 - RNA, 19 nt, Artificial Sequence
  Description of Artificial Sequence: Synthetic oligonucleotide
  Sense strand starting at position 1427 of SEQ ID NO: 1880889
ucgagccuucgauauaaac

SEQ ID NO: 2001719 - RNA, 19 nt, Artificial Sequence
  Description of Artificial Sequence: Synthetic oligonucleotide
  Antisense strand to SEQ ID NO: 2001718
guuuauaucgaaggcucga

SEQ ID NO: 2001720 - RNA, 19 nt, Artificial Sequence
  Description of Artificial Sequence: Synthetic oligonucleotide
  Sense strand starting at position 2049 of SEQ ID NO: 1880889
caggcaucgccagaaacaa

SEQ ID NO: 2001721 - RNA, 19 nt, Artificial Sequence
  Description of Artificial Sequence: Synthetic oligonucleotide
  Antisense strand to SEQ ID NO: 2001720
uuguuucuggcgaugccug

SEQ ID NO: 2001722 - RNA, 19 nt, Artificial Sequence
  Description of Artificial Sequence: Synthetic oligonucleotide
  Sense strand starting at position 2152 of SEQ ID NO: 1880889
agcuuauauguguguauuu

SEQ ID NO: 2001723 - RNA, 19 nt, Artificial Sequence
  Description of Artificial Sequence: Synthetic oligonucleotide
  Antisense strand to SEQ ID NO: 2001722
aaauacacacauauaagcu

SEQ ID NO: 2001724 - RNA, 19 nt, Artificial Sequence
  Description of Artificial Sequence: Synthetic oligonucleotide
  Sense strand starting at position 2196 of SEQ ID NO: 1880889
ggaaauauuugacaacgaa

SEQ ID NO: 2001725 - RNA, 19 nt, Artificial Sequence
  Description of Artificial Sequence: Synthetic oligonucleotide
  Antisense strand to SEQ ID NO: 2001724
uucguugucaaauauuucc

SEQ ID NO: 2001726 - RNA, 19 nt, Artificial Sequence
  Description of Artificial Sequence: Synthetic oligonucleotide
  Sense strand starting at position 2210 of SEQ ID NO: 1880889
acgaaagaguaugcacaaa

SEQ ID NO: 2001727 - RNA, 19 nt, Artificial Sequence
  Description of Artificial Sequence: Synthetic oligonucleotide
  Antisense strand to SEQ ID NO: 2001726
uuugugcauacucuuucgu

SEQ ID NO: 2001728 - RNA, 19 nt, Artificial Sequence
  Description of Artificial Sequence: Synthetic oligonucleotide
  Sense strand starting at position 2254 of SEQ ID NO: 1880889
gaguucagccuucgugaga

SEQ ID NO: 2001729 - RNA, 19 nt, Artificial Sequence
  Description of Artificial Sequence: Synthetic oligonucleotide
  Antisense strand to SEQ ID NO: 2001728
ucucacgaaggcugaacuc

SEQ ID NO: 2001730 - RNA, 19 nt, Artificial Sequence
  Description of Artificial Sequence: Synthetic oligonucleotide
  Sense strand starting at position 2377 of SEQ ID NO: 1880889
uuuaaugucuucucuguau

SEQ ID NO: 2001731 - RNA, 19 nt, Artificial Sequence
  Description of Artificial Sequence: Synthetic oligonucleotide
  Antisense strand to SEQ ID NO: 2001730
auacagagaagacauuaaa

SEQ ID NO: 2001732 - RNA, 19 nt, Artificial Sequence
  Description of Artificial Sequence: Synthetic oligonucleotide
  Sense strand starting at position 2445 of SEQ ID NO: 1880889
ugggauguuucucuuucca

SEQ ID NO: 2001733 - RNA, 19 nt, Artificial Sequence
  Description of Artificial Sequence: Synthetic oligonucleotide
  Antisense strand to SEQ ID NO: 2001732
uggaaagagaaacauccca

SEQ ID NO: 2001734 - RNA, 19 nt, Artificial Sequence
  Description of Artificial Sequence: Synthetic oligonucleotide
  Sense strand starting at position 2447 of SEQ ID NO: 1880889
ggauguuucucuuuccacu

SEQ ID NO: 2001735 - RNA, 19 nt, Artificial Sequence
  Description of Artificial Sequence: Synthetic oligonucleotide
  Antisense strand to SEQ ID NO: 2001734
aguggaaagagaaacaucc

SEQ ID NO: 2001736 - RNA, 19 nt, Artificial Sequence
  Description of Artificial Sequence: Synthetic oligonucleotide
  Sense strand starting at position 2534 of SEQ ID NO: 1880889
cccuuuguucuugaagagu

SEQ ID NO: 2001737 - RNA, 19 nt, Artificial Sequence
  Description of Artificial Sequence: Synthetic oligonucleotide
  Antisense strand to SEQ ID NO: 2001736
acucuucaagaacaaaggg

SEQ ID NO: 2001738 - RNA, 19 nt, Artificial Sequence
  Description of Artificial Sequence: Synthetic oligonucleotide
  Sense strand starting at position 2537 of SEQ ID NO: 1880889
uuuguucuugaagaguuau

SEQ ID NO: 2001739 - RNA, 19 nt, Artificial Sequence
  Description of Artificial Sequence: Synthetic oligonucleotide
  Antisense strand to SEQ ID NO: 2001738
auaacucuucaagaacaaa

SEQ ID NO: 2001740 - RNA, 19 nt, Artificial Sequence
  Description of Artificial Sequence: Synthetic oligonucleotide
  Sense strand starting at position 2577 of SEQ ID NO: 1880889
uguguucuugaacaguuau

SEQ ID NO: 2001741 - RNA, 19 nt, Artificial Sequence
  Description of Artificial Sequence: Synthetic oligonucleotide
  Antisense strand to SEQ ID NO: 2001740
auaacuguucaagaacaca

SEQ ID NO: 2001742 - RNA, 19 nt, Artificial Sequence
  Description of Artificial Sequence: Synthetic oligonucleotide
  Sense strand starting at position 2621 of SEQ ID NO: 1880889
uguguugcacucgccagau

SEQ ID NO: 2001743 - RNA, 19 nt, Artificial Sequence
  Description of Artificial Sequence: Synthetic oligonucleotide
  Antisense strand to SEQ ID NO: 2001742
aucuggcgagugcaacaca

SEQ ID NO: 2001744 - RNA, 19 nt, Artificial Sequence
  Description of Artificial Sequence: Synthetic oligonucleotide
  Sense strand starting at position 2625 of SEQ ID NO: 1880889
uugcacucgccagaugaau

SEQ ID NO: 2001745 - RNA, 19 nt, Artificial Sequence
  Description of Artificial Sequence: Synthetic oligonucleotide
  Antisense strand to SEQ ID NO: 2001744
auucaucuggcgagugcaa

SEQ ID NO: 2001746 - RNA, 19 nt, Artificial Sequence
  Description of Artificial Sequence: Synthetic oligonucleotide
  Sense strand starting at position 2627 of SEQ ID NO: 1880889
gcacucgccagaugaauug

SEQ ID NO: 2001747 - RNA, 19 nt, Artificial Sequence
  Description of Artificial Sequence: Synthetic oligonucleotide
  Antisense strand to SEQ ID NO: 2001746
caauucaucuggcgagugc

SEQ ID NO: 2001748 - RNA, 19 nt, Artificial Sequence
  Description of Artificial Sequence: Synthetic oligonucleotide
  Sense strand starting at position 2634 of SEQ ID NO: 1880889
ccagaugaauuggaaugau

SEQ ID NO: 2001749 - RNA, 19 nt, Artificial Sequence
  Description of Artificial Sequence: Synthetic oligonucleotide
  Antisense strand to SEQ ID NO: 2001748
aucauuccaauucaucugg

SEQ ID NO: 2001750 - RNA, 19 nt, Artificial Sequence
  Description of Artificial Sequence: Synthetic oligonucleotide
  Sense strand starting at position 2680 of SEQ ID NO: 1880889
cuugcuuuguuucugacau

SEQ ID NO: 2001751 - RNA, 19 nt, Artificial Sequence
  Description of Artificial Sequence: Synthetic oligonucleotide
  Antisense strand to SEQ ID NO: 2001750
augucagaaacaaagcaag

SEQ ID NO: 2001752 - RNA, 19 nt, Artificial Sequence
  Description of Artificial Sequence: Synthetic oligonucleotide
  Sense strand starting at position 2687 of SEQ ID NO: 1880889
uguuucugacauuauucua

SEQ ID NO: 2001753 - RNA, 19 nt, Artificial Sequence
  Description of Artificial Sequence: Synthetic oligonucleotide
  Antisense strand to SEQ ID NO: 2001752
uagaauaaugucagaaaca

SEQ ID NO: 2001754 - RNA, 19 nt, Artificial Sequence
  Description of Artificial Sequence: Synthetic oligonucleotide
  Sense strand starting at position 3106 of SEQ ID NO: 1880889
uucuuaucucguguuuguu

SEQ ID NO: 2001755 - RNA, 19 nt, Artificial Sequence
  Description of Artificial Sequence: Synthetic oligonucleotide
  Antisense strand to SEQ ID NO: 2001754
aacaaacacgagauaagaa

SEQ ID NO: 2001756 - RNA, 19 nt, Artificial Sequence
  Description of Artificial Sequence: Synthetic oligonucleotide
  Sense strand starting at position 3133 of SEQ ID NO: 1880889
acccauucgucuguccuaa

SEQ ID NO: 2001757 - RNA, 19 nt, Artificial Sequence
  Description of Artificial Sequence: Synthetic oligonucleotide
  Antisense strand to SEQ ID NO: 2001756
uuaggacagacgaaugggu

SEQ ID NO: 2001758 - RNA, 19 nt, Artificial Sequence
  Description of Artificial Sequence: Synthetic oligonucleotide
  Sense strand starting at position 3135 of SEQ ID NO: 1880889
ccauucgucuguccuaaag

SEQ ID NO: 2001759 - RNA, 19 nt, Artificial Sequence
  Description of Artificial Sequence: Synthetic oligonucleotide
  Antisense strand to SEQ ID NO: 2001758
cuuuaggacagacgaaugg

SEQ ID NO: 2001760 - RNA, 19 nt, Artificial Sequence
  Description of Artificial Sequence: Synthetic oligonucleotide
  Sense strand starting at position 3523 of SEQ ID NO: 1880889
guuguugaguucuuauaug

SEQ ID NO: 2001761 - RNA, 19 nt, Artificial Sequence
  Description of Artificial Sequence: Synthetic oligonucleotide
  Antisense strand to SEQ ID NO: 2001760
cauauaagaacucaacaac

SEQ ID NO: 2001762 - RNA, 19 nt, Artificial Sequence
  Description of Artificial Sequence: Synthetic oligonucleotide
  Sense strand starting at position 3534 of SEQ ID NO: 1880889
cuuauaugcccaugcugau

SEQ ID NO: 2001763 - RNA, 19 nt, Artificial Sequence
  Description of Artificial Sequence: Synthetic oligonucleotide
  Antisense strand to SEQ ID NO: 2001762
aucagcaugggcauauaag

SEQ ID NO: 2001764 - RNA, 19 nt, Artificial Sequence
  Description of Artificial Sequence: Synthetic oligonucleotide
  Sense strand starting at position 3983 of SEQ ID NO: 1880889
guucccuucuggucuauua

SEQ ID NO: 2001765 - RNA, 19 nt, Artificial Sequence
  Description of Artificial Sequence: Synthetic oligonucleotide
  Antisense strand to SEQ ID NO: 2001764
uaauagaccagaagggaac

SEQ ID NO: 2001766 - RNA, 19 nt, Artificial Sequence
  Description of Artificial Sequence: Synthetic oligonucleotide
  Sense strand starting at position 188 of SEQ ID NO: 1880890
auugcuagugcauaggaaa

SEQ ID NO: 2001767 - RNA, 19 nt, Artificial Sequence
  Description of Artificial Sequence: Synthetic oligonucleotide
  Antisense strand to SEQ ID NO: 2001766
uuuccuaugcacuagcaau

SEQ ID NO: 2001768 - RNA, 19 nt, Artificial Sequence
  Description of Artificial Sequence: Synthetic oligonucleotide
  Sense strand starting at position 512 of SEQ ID NO: 1880890
guaggacuauaucugcaga

SEQ ID NO: 2001769 - RNA, 19 nt, Artificial Sequence
  Description of Artificial Sequence: Synthetic oligonucleotide
  Antisense strand to SEQ ID NO: 2001768
ucugcagauauaguccuac

SEQ ID NO: 2001770 - RNA, 19 nt, Artificial Sequence
  Description of Artificial Sequence: Synthetic oligonucleotide
  Sense strand starting at position 514 of SEQ ID NO: 1880890
aggacuauaucugcagaga

SEQ ID NO: 2001771 - RNA, 19 nt, Artificial Sequence
  Description of Artificial Sequence: Synthetic oligonucleotide
  Antisense strand to SEQ ID NO: 2001770
ucucugcagauauaguccu

SEQ ID NO: 2001772 - RNA, 19 nt, Artificial Sequence
  Description of Artificial Sequence: Synthetic oligonucleotide
  Sense strand starting at position 517 of SEQ ID NO: 1880890
acuauaucugcagagaagu

SEQ ID NO: 2001773 - RNA, 19 nt, Artificial Sequence
  Description of Artificial Sequence: Synthetic oligonucleotide
  Antisense strand to SEQ ID NO: 2001772
acuucucugcagauauagu

SEQ ID NO: 2001774 - RNA, 19 nt, Artificial Sequence
  Description of Artificial Sequence: Synthetic oligonucleotide
  Sense strand starting at position 761 of SEQ ID NO: 1880890
cucauaacacuuggcagaa

SEQ ID NO: 2001775 - RNA, 19 nt, Artificial Sequence
  Description of Artificial Sequence: Synthetic oligonucleotide
  Antisense strand to SEQ ID NO: 2001774
uucugccaaguguuaugag

SEQ ID NO: 2001776 - RNA, 19 nt, Artificial Sequence
  Description of Artificial Sequence: Synthetic oligonucleotide
  Sense strand starting at position 762 of SEQ ID NO: 1880890
ucauaacacuuggcagaaa

SEQ ID NO: 2001777 - RNA, 19 nt, Artificial Sequence
  Description of Artificial Sequence: Synthetic oligonucleotide
  Antisense strand to SEQ ID NO: 2001776
uuucugccaaguguuauga

SEQ ID NO: 2001778 - RNA, 19 nt, Artificial Sequence
  Description of Artificial Sequence: Synthetic oligonucleotide
  Sense strand starting at position 930 of SEQ ID NO: 1880890
gaaugaauuugaggagaca

SEQ ID NO: 2001779 - RNA, 19 nt, Artificial Sequence
  Description of Artificial Sequence: Synthetic oligonucleotide
  Antisense strand to SEQ ID NO: 2001778
ugucuccucaaauucauuc

SEQ ID NO: 2001780 - RNA, 19 nt, Artificial Sequence
  Description of Artificial Sequence: Synthetic oligonucleotide
  Sense strand starting at position 1000 of SEQ ID NO: 1880890
ccaaauugcucuccuagga

SEQ ID NO: 2001781 - RNA, 19 nt, Artificial Sequence
  Description of Artificial Sequence: Synthetic oligonucleotide
  Antisense strand to SEQ ID NO: 2001780
uccuaggagagcaauuugg

SEQ ID NO: 2001782 - RNA, 19 nt, Artificial Sequence
  Description of Artificial Sequence: Synthetic oligonucleotide
  Sense strand starting at position 1004 of SEQ ID NO: 1880890
auugcucuccuaggaaauu

SEQ ID NO: 2001783 - RNA, 19 nt, Artificial Sequence
  Description of Artificial Sequence: Synthetic oligonucleotide
  Antisense strand to SEQ ID NO: 2001782
aauuuccuaggagagcaau

SEQ ID NO: 2001784 - RNA, 19 nt, Artificial Sequence
  Description of Artificial Sequence: Synthetic oligonucleotide
  Sense strand starting at position 1166 of SEQ ID NO: 1880890
uguguugagauugagcaau

SEQ ID NO: 2001785 - RNA, 19 nt, Artificial Sequence
  Description of Artificial Sequence: Synthetic oligonucleotide
  Antisense strand to SEQ ID NO: 2001784
auugcucaaucucaacaca

SEQ ID NO: 2001786 - RNA, 19 nt, Artificial Sequence
  Description of Artificial Sequence: Synthetic oligonucleotide
  Sense strand starting at position 1218 of SEQ ID NO: 1880890
guauauaacugguucuaaa

SEQ ID NO: 2001787 - RNA, 19 nt, Artificial Sequence
  Description of Artificial Sequence: Synthetic oligonucleotide
  Antisense strand to SEQ ID NO: 2001786
uuuagaaccaguuauauac

SEQ ID NO: 2001788 - RNA, 19 nt, Artificial Sequence
  Description of Artificial Sequence: Synthetic oligonucleotide
  Sense strand starting at position 1530 of SEQ ID NO: 1880890
gaguucuccguguuucucu

SEQ ID NO: 2001789 - RNA, 19 nt, Artificial Sequence
  Description of Artificial Sequence: Synthetic oligonucleotide
  Antisense strand to SEQ ID NO: 2001788
agagaaacacggagaacuc

SEQ ID NO: 2001790 - RNA, 19 nt, Artificial Sequence
  Description of Artificial Sequence: Synthetic oligonucleotide
  Sense strand starting at position 2074 of SEQ ID NO: 1880890
ccaagucccuagucaagaa

SEQ ID NO: 2001791 - RNA, 19 nt, Artificial Sequence
  Description of Artificial Sequence: Synthetic oligonucleotide
  Antisense strand to SEQ ID NO: 2001790
uucuugacuagggacuugg

SEQ ID NO: 2001792 - RNA, 19 nt, Artificial Sequence
  Description of Artificial Sequence: Synthetic oligonucleotide
  Sense strand starting at position 2167 of SEQ ID NO: 1880890
ggaaccaguaauugugaua

SEQ ID NO: 2001793 - RNA, 19 nt, Artificial Sequence
  Description of Artificial Sequence: Synthetic oligonucleotide
  Antisense strand to SEQ ID NO: 2001792
uaucacaauuacugguucc

SEQ ID NO: 2001794 - RNA, 19 nt, Artificial Sequence
  Description of Artificial Sequence: Synthetic oligonucleotide
  Sense strand starting at position 2412 of SEQ ID NO: 1880890
ugaauaacauuaguaggua

SEQ ID NO: 2001795 - RNA, 19 nt, Artificial Sequence
  Description of Artificial Sequence: Synthetic oligonucleotide
  Antisense strand to SEQ ID NO: 2001794
uaccuacuaauguuauuca

SEQ ID NO: 2001796 - RNA, 19 nt, Artificial Sequence
  Description of Artificial Sequence: Synthetic oligonucleotide
  Sense strand starting at position 2459 of SEQ ID NO: 1880890
ccggaauuccuguaauaag

SEQ ID NO: 2001797 - RNA, 19 nt, Artificial Sequence
  Description of Artificial Sequence: Synthetic oligonucleotide
  Antisense strand to SEQ ID NO: 2001796
cuuauuacaggaauuccgg

SEQ ID NO: 2001798 - RNA, 19 nt, Artificial Sequence
  Description of Artificial Sequence: Synthetic oligonucleotide
  Sense strand starting at position 2482 of SEQ ID NO: 1880890
ccugguuaaggugaauuau

SEQ ID NO: 2001799 - RNA, 19 nt, Artificial Sequence
  Description of Artificial Sequence: Synthetic oligonucleotide
  Antisense strand to SEQ ID NO: 2001798
auaauucaccuuaaccagg

SEQ ID NO: 2001800 - RNA, 19 nt, Artificial Sequence
  Description of Artificial Sequence: Synthetic oligonucleotide
  Sense strand starting at position 2555 of SEQ ID NO: 1880890
aagauuuaaugagacuagu

SEQ ID NO: 2001801 - RNA, 19 nt, Artificial Sequence
  Description of Artificial Sequence: Synthetic oligonucleotide
  Antisense strand to SEQ ID NO: 2001800
acuagucucauuaaaucuu

SEQ ID NO: 2001802 - RNA, 19 nt, Artificial Sequence
  Description of Artificial Sequence: Synthetic oligonucleotide
  Sense strand starting at position 2707 of SEQ ID NO: 1880890
ggaauagugaggcaagcaa

SEQ ID NO: 2001803 - RNA, 19 nt, Artificial Sequence
  Description of Artificial Sequence: Synthetic oligonucleotide
  Antisense strand to SEQ ID NO: 2001802
uugcuugccucacuauucc

SEQ ID NO: 2001804 - RNA, 19 nt, Artificial Sequence
  Description of Artificial Sequence: Synthetic oligonucleotide
  Sense strand starting at position 2852 of SEQ ID NO: 1880890
cuacuauguguguagagag

SEQ ID NO: 2001805 - RNA, 19 nt, Artificial Sequence
  Description of Artificial Sequence: Synthetic oligonucleotide
  Antisense strand to SEQ ID NO: 2001804
cucucuacacacauaguag

SEQ ID NO: 2001806 - RNA, 19 nt, Artificial Sequence
  Description of Artificial Sequence: Synthetic oligonucleotide
  Sense strand starting at position 2892 of SEQ ID NO: 1880890
ggcauuguauuauuuaagu

SEQ ID NO: 2001807 - RNA, 19 nt, Artificial Sequence
  Description of Artificial Sequence: Synthetic oligonucleotide
  Antisense strand to SEQ ID NO: 2001806
acuuaaauaauacaaugcc

SEQ ID NO: 2001808 - RNA, 19 nt, Artificial Sequence
  Description of Artificial Sequence: Synthetic oligonucleotide
  Sense strand starting at position 2970 of SEQ ID NO: 1880890
acauuaaagccuugaaguu

SEQ ID NO: 2001809 - RNA, 19 nt, Artificial Sequence
  Description of Artificial Sequence: Synthetic oligonucleotide
  Antisense strand to SEQ ID NO: 2001808
aacuucaaggcuuuaaugu

SEQ ID NO: 2001810 - RNA, 19 nt, Artificial Sequence
  Description of Artificial Sequence: Synthetic oligonucleotide
  Sense strand starting at position 3017 of SEQ ID NO: 1880890
uuuaguugauuacuagagu

SEQ ID NO: 2001811 - RNA, 19 nt, Artificial Sequence
  Description of Artificial Sequence: Synthetic oligonucleotide
  Antisense strand to SEQ ID NO: 2001810
acucuaguaaucaacuaaa

SEQ ID NO: 2001812 - RNA, 19 nt, Artificial Sequence
  Description of Artificial Sequence: Synthetic oligonucleotide
  Sense strand starting at position 3140 of SEQ ID NO: 1880890
uauggcuuucuguaugaaa

SEQ ID NO: 2001813 - RNA, 19 nt, Artificial Sequence
  Description of Artificial Sequence: Synthetic oligonucleotide
  Antisense strand to SEQ ID NO: 2001812
uuucauacagaaagccaua

SEQ ID NO: 2001814 - RNA, 19 nt, Artificial Sequence
  Description of Artificial Sequence: Synthetic oligonucleotide
  Sense strand starting at position 3155 of SEQ ID NO: 1880890
gaaacuccuguguaguaau

SEQ ID NO: 2001815 - RNA, 19 nt, Artificial Sequence
  Description of Artificial Sequence: Synthetic oligonucleotide
  Antisense strand to SEQ ID NO: 2001814
auuacuacacaggaguuuc

SEQ ID NO: 2001816 - RNA, 19 nt, Artificial Sequence
  Description of Artificial Sequence: Synthetic oligonucleotide
  Sense strand starting at position 3197 of SEQ ID NO: 1880890
acguaauguaacuagugau

SEQ ID NO: 2001817 - RNA, 19 nt, Artificial Sequence
  Description of Artificial Sequence: Synthetic oligonucleotide
  Antisense strand to SEQ ID NO: 2001816
aucacuaguuacauuacgu

SEQ ID NO: 2001818 - RNA, 19 nt, Artificial Sequence
  Description of Artificial Sequence: Synthetic oligonucleotide
  Sense strand starting at position 3223 of SEQ ID NO: 1880890
augagaaaguauguaugca

SEQ ID NO: 2001819 - RNA, 19 nt, Artificial Sequence
  Description of Artificial Sequence: Synthetic oligonucleotide
  Antisense strand to SEQ ID NO: 2001818
ugcauacauacuuucucau

SEQ ID NO: 2001820 - RNA, 19 nt, Artificial Sequence
  Description of Artificial Sequence: Synthetic oligonucleotide
  Sense strand starting at position 3287 of SEQ ID NO: 1880890
auuaaaugggcuugggaua

SEQ ID NO: 2001821 - RNA, 19 nt, Artificial Sequence
  Description of Artificial Sequence: Synthetic oligonucleotide
  Antisense strand to SEQ ID NO: 2001820
uaucccaagcccauuuaau

SEQ ID NO: 2001822 - RNA, 19 nt, Artificial Sequence
  Description of Artificial Sequence: Synthetic oligonucleotide
  Sense strand starting at position 3288 of SEQ ID NO: 1880890
uuaaaugggcuugggauaa

SEQ ID NO: 2001823 - RNA, 19 nt, Artificial Sequence
  Description of Artificial Sequence: Synthetic oligonucleotide
  Antisense strand to SEQ ID NO: 2001822
uuaucccaagcccauuuaa

SEQ ID NO: 2001824 - RNA, 19 nt, Artificial Sequence
  Description of Artificial Sequence: Synthetic oligonucleotide
  Sense strand starting at position 3341 of SEQ ID NO: 1880890
uucuguaguagugaacaca

SEQ ID NO: 2001825 - RNA, 19 nt, Artificial Sequence
  Description of Artificial Sequence: Synthetic oligonucleotide
  Antisense strand to SEQ ID NO: 2001824
uguguucacuacuacagaa

SEQ ID NO: 2001826 - RNA, 19 nt, Artificial Sequence
  Description of Artificial Sequence: Synthetic oligonucleotide
  Sense strand starting at position 3349 of SEQ ID NO: 1880890
uagugaacacauugacugu

SEQ ID NO: 2001827 - RNA, 19 nt, Artificial Sequence
  Description of Artificial Sequence: Synthetic oligonucleotide
  Antisense strand to SEQ ID NO: 2001826
acagucaauguguucacua

SEQ ID NO: 2001828 - RNA, 19 nt, Artificial Sequence
  Description of Artificial Sequence: Synthetic oligonucleotide
  Sense strand starting at position 3353 of SEQ ID NO: 1880890
gaacacauugacuguagau

SEQ ID NO: 2001829 - RNA, 19 nt, Artificial Sequence
  Description of Artificial Sequence: Synthetic oligonucleotide
  Antisense strand to SEQ ID NO: 2001828
aucuacagucaauguguuc

SEQ ID NO: 2001830 - RNA, 19 nt, Artificial Sequence
  Description of Artificial Sequence: Synthetic oligonucleotide
  Sense strand starting at position 3372 of SEQ ID NO: 1880890
uggaucauggagugccaaa

SEQ ID NO: 2001831 - RNA, 19 nt, Artificial Sequence
  Description of Artificial Sequence: Synthetic oligonucleotide
  Antisense strand to SEQ ID NO: 2001830
uuuggcacuccaugaucca

SEQ ID NO: 2001832 - RNA, 19 nt, Artificial Sequence
  Description of Artificial Sequence: Synthetic oligonucleotide
  Sense strand starting at position 3385 of SEQ ID NO: 1880890
gccaaacucuaaucugaag

SEQ ID NO: 2001833 - RNA, 19 nt, Artificial Sequence
  Description of Artificial Sequence: Synthetic oligonucleotide
  Antisense strand to SEQ ID NO: 2001832
cuucagauuagaguuuggc

SEQ ID NO: 2001834 - RNA, 19 nt, Artificial Sequence
  Description of Artificial Sequence: Synthetic oligonucleotide
  Sense strand starting at position 3391 of SEQ ID NO: 1880890
cucuaaucugaaggaagua

SEQ ID NO: 2001835 - RNA, 19 nt, Artificial Sequence
  Description of Artificial Sequence: Synthetic oligonucleotide
  Antisense strand to SEQ ID NO: 2001834
uacuuccuucagauuagag

SEQ ID NO: 2001836 - RNA, 19 nt, Artificial Sequence
  Description of Artificial Sequence: Synthetic oligonucleotide
  Sense strand starting at position 3452 of SEQ ID NO: 1880890
gguuaaauugguuaaugug

SEQ ID NO: 2001837 - RNA, 19 nt, Artificial Sequence
  Description of Artificial Sequence: Synthetic oligonucleotide
  Antisense strand to SEQ ID NO: 2001836
cacauuaaccaauuuaacc

SEQ ID NO: 2001838 - RNA, 19 nt, Artificial Sequence
  Description of Artificial Sequence: Synthetic oligonucleotide
  Sense strand starting at position 3468 of SEQ ID NO: 1880890
gugacagugccugauagau

SEQ ID NO: 2001839 - RNA, 19 nt, Artificial Sequence
  Description of Artificial Sequence: Synthetic oligonucleotide
  Antisense strand to SEQ ID NO: 2001838
aucuaucaggcacugucac

SEQ ID NO: 2001840 - RNA, 19 nt, Artificial Sequence
  Description of Artificial Sequence: Synthetic oligonucleotide
  Sense strand starting at position 3495 of SEQ ID NO: 1880890
aaaugcuaggaguaucuua

SEQ ID NO: 2001841 - RNA, 19 nt, Artificial Sequence
  Description of Artificial Sequence: Synthetic oligonucleotide
  Antisense strand to SEQ ID NO: 2001840
uaagauacuccuagcauuu

SEQ ID NO: 2001842 - RNA, 19 nt, Artificial Sequence
  Description of Artificial Sequence: Synthetic oligonucleotide
  Sense strand starting at position 3728 of SEQ ID NO: 1880890
uggaauauuaugggugucu

SEQ ID NO: 2001843 - RNA, 19 nt, Artificial Sequence
  Description of Artificial Sequence: Synthetic oligonucleotide
  Antisense strand to SEQ ID NO: 2001842
agacacccauaauauucca

SEQ ID NO: 2001844 - RNA, 19 nt, Artificial Sequence
  Description of Artificial Sequence: Synthetic oligonucleotide
  Sense strand starting at position 3729 of SEQ ID NO: 1880890
ggaauauuaugggugucuu

SEQ ID NO: 2001845 - RNA, 19 nt, Artificial Sequence
  Description of Artificial Sequence: Synthetic oligonucleotide
  Antisense strand to SEQ ID NO: 2001844
aagacacccauaauauucc

SEQ ID NO: 2001846 - RNA, 19 nt, Artificial Sequence
  Description of Artificial Sequence: Synthetic oligonucleotide
  Sense strand starting at position 65 of SEQ ID NO: 1880891
uaacuaaauguuugaggua

SEQ ID NO: 2001847 - RNA, 19 nt, Artificial Sequence
  Description of Artificial Sequence: Synthetic oligonucleotide
  Antisense strand to SEQ ID NO: 2001846
uaccucaaacauuuaguua

SEQ ID NO: 2001848 - RNA, 19 nt, Artificial Sequence
  Description of Artificial Sequence: Synthetic oligonucleotide
  Sense strand starting at position 66 of SEQ ID NO: 1880891
aacuaaauguuugagguaa

SEQ ID NO: 2001849 - RNA, 19 nt, Artificial Sequence
  Description of Artificial Sequence: Synthetic oligonucleotide
  Antisense strand to SEQ ID NO: 2001848
uuaccucaaacauuuaguu

SEQ ID NO: 2001850 - RNA, 19 nt, Artificial Sequence
  Description of Artificial Sequence: Synthetic oligonucleotide
  Sense strand starting at position 131 of SEQ ID NO: 1880891
agaugaaaguuuguguuau

SEQ ID NO: 2001851 - RNA, 19 nt, Artificial Sequence
  Description of Artificial Sequence: Synthetic oligonucleotide
  Antisense strand to SEQ ID NO: 2001850
auaacacaaacuuucaucu

SEQ ID NO: 2001852 - RNA, 19 nt, Artificial Sequence
  Description of Artificial Sequence: Synthetic oligonucleotide
  Sense strand starting at position 132 of SEQ ID NO: 1880891
gaugaaaguuuguguuauu

SEQ ID NO: 2001853 - RNA, 19 nt, Artificial Sequence
  Description of Artificial Sequence: Synthetic oligonucleotide
  Antisense strand to SEQ ID NO: 2001852
aauaacacaaacuuucauc

SEQ ID NO: 2001854 - RNA, 19 nt, Artificial Sequence
  Description of Artificial Sequence: Synthetic oligonucleotide
  Sense strand starting at position 135 of SEQ ID NO: 1880891
gaaaguuuguguuauuaac

SEQ ID NO: 2001855 - RNA, 19 nt, Artificial Sequence
  Description of Artificial Sequence: Synthetic oligonucleotide
  Antisense strand to SEQ ID NO: 2001854
guuaauaacacaaacuuuc

SEQ ID NO: 2001856 - RNA, 19 nt, Artificial Sequence
  Description of Artificial Sequence: Synthetic oligonucleotide
  Sense strand starting at position 233 of SEQ ID NO: 1880891
uggguuugaguuugagauu

SEQ ID NO: 2001857 - RNA, 19 nt, Artificial Sequence
  Description of Artificial Sequence: Synthetic oligonucleotide
  Antisense strand to SEQ ID NO: 2001856
aaucucaaacucaaaccca

SEQ ID NO: 2001858 - RNA, 19 nt, Artificial Sequence
  Description of Artificial Sequence: Synthetic oligonucleotide
  Sense strand starting at position 234 of SEQ ID NO: 1880891
ggguuugaguuugagauuc

SEQ ID NO: 2001859 - RNA, 19 nt, Artificial Sequence
  Description of Artificial Sequence: Synthetic oligonucleotide
  Antisense strand to SEQ ID NO: 2001858
gaaucucaaacucaaaccc

SEQ ID NO: 2001860 - RNA, 19 nt, Artificial Sequence
  Description of Artificial Sequence: Synthetic oligonucleotide
  Sense strand starting at position 236 of SEQ ID NO: 1880891
guuugaguuugagauucua

SEQ ID NO: 2001861 - RNA, 19 nt, Artificial Sequence
  Description of Artificial Sequence: Synthetic oligonucleotide
  Antisense strand to SEQ ID NO: 2001860
uagaaucucaaacucaaac

SEQ ID NO: 2001862 - RNA, 19 nt, Artificial Sequence
  Description of Artificial Sequence: Synthetic oligonucleotide
  Sense strand starting at position 244 of SEQ ID NO: 1880891
uugagauucuagggaguau

SEQ ID NO: 2001863 - RNA, 19 nt, Artificial Sequence
  Description of Artificial Sequence: Synthetic oligonucleotide
  Antisense strand to SEQ ID NO: 2001862
auacucccuagaaucucaa

SEQ ID NO: 2001864 - RNA, 19 nt, Artificial Sequence
  Description of Artificial Sequence: Synthetic oligonucleotide
  Sense strand starting at position 264 of SEQ ID NO: 1880891
gcgccucaaugcuuccaaa

SEQ ID NO: 2001865 - RNA, 19 nt, Artificial Sequence
  Description of Artificial Sequence: Synthetic oligonucleotide
  Antisense strand to SEQ ID NO: 2001864
uuuggaagcauugaggcgc

SEQ ID NO: 2001866 - RNA, 19 nt, Artificial Sequence
  Description of Artificial Sequence: Synthetic oligonucleotide
  Sense strand starting at position 288 of SEQ ID NO: 1880891
uccugucccuccuucgaaa

SEQ ID NO: 2001867 - RNA, 19 nt, Artificial Sequence
  Description of Artificial Sequence: Synthetic oligonucleotide
  Antisense strand to SEQ ID NO: 2001866
uuucgaaggagggacagga

SEQ ID NO: 2001868 - RNA, 19 nt, Artificial Sequence
  Description of Artificial Sequence: Synthetic oligonucleotide
  Sense strand starting at position 623 of SEQ ID NO: 1880891
ucuguugccuacuugagaa

SEQ ID NO: 2001869 - RNA, 19 nt, Artificial Sequence
  Description of Artificial Sequence: Synthetic oligonucleotide
  Antisense strand to SEQ ID NO: 2001868
uucucaaguaggcaacaga

SEQ ID NO: 2001870 - RNA, 19 nt, Artificial Sequence
  Description of Artificial Sequence: Synthetic oligonucleotide
  Sense strand starting at position 735 of SEQ ID NO: 1880891
cuggucucacuuugguaaa

SEQ ID NO: 2001871 - RNA, 19 nt, Artificial Sequence
  Description of Artificial Sequence: Synthetic oligonucleotide
  Antisense strand to SEQ ID NO: 2001870
uuuaccaaagugagaccag

SEQ ID NO: 2001872 - RNA, 19 nt, Artificial Sequence
  Description of Artificial Sequence: Synthetic oligonucleotide
  Sense strand starting at position 737 of SEQ ID NO: 1880891
ggucucacuuugguaaagu

SEQ ID NO: 2001873 - RNA, 19 nt, Artificial Sequence
  Description of Artificial Sequence: Synthetic oligonucleotide
  Antisense strand to SEQ ID NO: 2001872
acuuuaccaaagugagacc

SEQ ID NO: 2001874 - RNA, 19 nt, Artificial Sequence
  Description of Artificial Sequence: Synthetic oligonucleotide
  Sense strand starting at position 738 of SEQ ID NO: 1880891
gucucacuuugguaaaguu

SEQ ID NO: 2001875 - RNA, 19 nt, Artificial Sequence
  Description of Artificial Sequence: Synthetic oligonucleotide
  Antisense strand to SEQ ID NO: 2001874
aacuuuaccaaagugagac

SEQ ID NO: 2001876 - RNA, 19 nt, Artificial Sequence
  Description of Artificial Sequence: Synthetic oligonucleotide
  Sense strand starting at position 746 of SEQ ID NO: 1880891
uugguaaaguucucucaac

SEQ ID NO: 2001877 - RNA, 19 nt, Artificial Sequence
  Description of Artificial Sequence: Synthetic oligonucleotide
  Antisense strand to SEQ ID NO: 2001876
guugagagaacuuuaccaa

SEQ ID NO: 2001878 - RNA, 19 nt, Artificial Sequence
  Description of Artificial Sequence: Synthetic oligonucleotide
  Sense strand starting at position 747 of SEQ ID NO: 1880891
ugguaaaguucucucaacu

SEQ ID NO: 2001879 - RNA, 19 nt, Artificial Sequence
  Description of Artificial Sequence: Synthetic oligonucleotide
  Antisense strand to SEQ ID NO: 2001878
aguugagagaacuuuacca

SEQ ID NO: 2001880 - RNA, 19 nt, Artificial Sequence
  Description of Artificial Sequence: Synthetic oligonucleotide
  Sense strand starting at position 1429 of SEQ ID NO: 1880891
agacccuugucugcucaau

SEQ ID NO: 2001881 - RNA, 19 nt, Artificial Sequence
  Description of Artificial Sequence: Synthetic oligonucleotide
  Antisense strand to SEQ ID NO: 2001880
auugagcagacaagggucu

SEQ ID NO: 2001882 - RNA, 19 nt, Artificial Sequence
  Description of Artificial Sequence: Synthetic oligonucleotide
  Sense strand starting at position 1456 of SEQ ID NO: 1880891
cuucgagcaucuguuacau

SEQ ID NO: 2001883 - RNA, 19 nt, Artificial Sequence
  Description of Artificial Sequence: Synthetic oligonucleotide
  Antisense strand to SEQ ID NO: 2001882
auguaacagaugcucgaag

SEQ ID NO: 2001884 - RNA, 19 nt, Artificial Sequence
  Description of Artificial Sequence: Synthetic oligonucleotide
  Sense strand starting at position 1458 of SEQ ID NO: 1880891
ucgagcaucuguuacauca

SEQ ID NO: 2001885 - RNA, 19 nt, Artificial Sequence
  Description of Artificial Sequence: Synthetic oligonucleotide
  Antisense strand to SEQ ID NO: 2001884
ugauguaacagaugcucga

SEQ ID NO: 2001886 - RNA, 19 nt, Artificial Sequence
  Description of Artificial Sequence: Synthetic oligonucleotide
  Sense strand starting at position 1465 of SEQ ID NO: 1880891
ucuguuacaucaggaucau

SEQ ID NO: 2001887 - RNA, 19 nt, Artificial Sequence
  Description of Artificial Sequence: Synthetic oligonucleotide
  Antisense strand to SEQ ID NO: 2001886
augauccugauguaacaga

SEQ ID NO: 2001888 - RNA, 19 nt, Artificial Sequence
  Description of Artificial Sequence: Synthetic oligonucleotide
  Sense strand starting at position 1659 of SEQ ID NO: 1880891
uuuaccucuucgccguaau

SEQ ID NO: 2001889 - RNA, 19 nt, Artificial Sequence
  Description of Artificial Sequence: Synthetic oligonucleotide
  Antisense strand to SEQ ID NO: 2001888
auuacggcgaagagguaaa

SEQ ID NO: 2001890 - RNA, 19 nt, Artificial Sequence
  Description of Artificial Sequence: Synthetic oligonucleotide
  Sense strand starting at position 1999 of SEQ ID NO: 1880891
aaugaaagguagucuagua

SEQ ID NO: 2001891 - RNA, 19 nt, Artificial Sequence
  Description of Artificial Sequence: Synthetic oligonucleotide
  Antisense strand to SEQ ID NO: 2001890
uacuagacuaccuuucauu

SEQ ID NO: 2001892 - RNA, 19 nt, Artificial Sequence
  Description of Artificial Sequence: Synthetic oligonucleotide
  Sense strand starting at position 2004 of SEQ ID NO: 1880891
aagguagucuaguauuuga

SEQ ID NO: 2001893 - RNA, 19 nt, Artificial Sequence
  Description of Artificial Sequence: Synthetic oligonucleotide
  Antisense strand to SEQ ID NO: 2001892
ucaaauacuagacuaccuu

SEQ ID NO: 2001894 - RNA, 19 nt, Artificial Sequence
  Description of Artificial Sequence: Synthetic oligonucleotide
  Sense strand starting at position 2009 of SEQ ID NO: 1880891
agucuaguauuugauacca

SEQ ID NO: 2001895 - RNA, 19 nt, Artificial Sequence
  Description of Artificial Sequence: Synthetic oligonucleotide
  Antisense strand to SEQ ID NO: 2001894
ugguaucaaauacuagacu

SEQ ID NO: 2001896 - RNA, 19 nt, Artificial Sequence
  Description of Artificial Sequence: Synthetic oligonucleotide
  Sense strand starting at position 2014 of SEQ ID NO: 1880891
aguauuugauaccagccaa

SEQ ID NO: 2001897 - RNA, 19 nt, Artificial Sequence
  Description of Artificial Sequence: Synthetic oligonucleotide
  Antisense strand to SEQ ID NO: 2001896
uuggcugguaucaaauacu

SEQ ID NO: 2001898 - RNA, 19 nt, Artificial Sequence
  Description of Artificial Sequence: Synthetic oligonucleotide
  Sense strand starting at position 2202 of SEQ ID NO: 1880891
gggaaucguuagguucguu

SEQ ID NO: 2001899 - RNA, 19 nt, Artificial Sequence
  Description of Artificial Sequence: Synthetic oligonucleotide
  Antisense strand to SEQ ID NO: 2001898
aacgaaccuaacgauuccc

SEQ ID NO: 2001900 - RNA, 19 nt, Artificial Sequence
  Description of Artificial Sequence: Synthetic oligonucleotide
  Sense strand starting at position 2207 of SEQ ID NO: 1880891
ucguuagguucguucugga

SEQ ID NO: 2001901 - RNA, 19 nt, Artificial Sequence
  Description of Artificial Sequence: Synthetic oligonucleotide
  Antisense strand to SEQ ID NO: 2001900
uccagaacgaaccuaacga

SEQ ID NO: 2001902 - RNA, 19 nt, Artificial Sequence
  Description of Artificial Sequence: Synthetic oligonucleotide
  Sense strand starting at position 2587 of SEQ ID NO: 1880891
ggcugugcgacucaugaag

SEQ ID NO: 2001903 - RNA, 19 nt, Artificial Sequence
  Description of Artificial Sequence: Synthetic oligonucleotide
  Antisense strand to SEQ ID NO: 2001902
cuucaugagucgcacagcc

SEQ ID NO: 2001904 - RNA, 19 nt, Artificial Sequence
  Description of Artificial Sequence: Synthetic oligonucleotide
  Sense strand starting at position 2770 of SEQ ID NO: 1880891
ggaggcugucaucgagaug

SEQ ID NO: 2001905 - RNA, 19 nt, Artificial Sequence
  Description of Artificial Sequence: Synthetic oligonucleotide
  Antisense strand to SEQ ID NO: 2001904
caucucgaugacagccucc

SEQ ID NO: 2001906 - RNA, 19 nt, Artificial Sequence
  Description of Artificial Sequence: Synthetic oligonucleotide
  Sense strand starting at position 3382 of SEQ ID NO: 1880891
gacuauagcuucugagcuu

SEQ ID NO: 2001907 - RNA, 19 nt, Artificial Sequence
  Description of Artificial Sequence: Synthetic oligonucleotide
  Antisense strand to SEQ ID NO: 2001906
aagcucagaagcuauaguc

SEQ ID NO: 2001908 - RNA, 19 nt, Artificial Sequence
  Description of Artificial Sequence: Synthetic oligonucleotide
  Sense strand starting at position 3383 of SEQ ID NO: 1880891
acuauagcuucugagcuuu

SEQ ID NO: 2001909 - RNA, 19 nt, Artificial Sequence
  Description of Artificial Sequence: Synthetic oligonucleotide
  Antisense strand to SEQ ID NO: 2001908
aaagcucagaagcuauagu

SEQ ID NO: 2001910 - RNA, 19 nt, Artificial Sequence
  Description of Artificial Sequence: Synthetic oligonucleotide
  Sense strand starting at position 3405 of SEQ ID NO: 1880891
ggcaaagucuugcuuucca

SEQ ID NO: 2001911 - RNA, 19 nt, Artificial Sequence
  Description of Artificial Sequence: Synthetic oligonucleotide
  Antisense strand to SEQ ID NO: 2001910
uggaaagcaagacuuugcc

SEQ ID NO: 2001912 - RNA, 19 nt, Artificial Sequence
  Description of Artificial Sequence: Synthetic oligonucleotide
  Sense strand starting at position 3430 of SEQ ID NO: 1880891
ucccgagucuuggaggaag

SEQ ID NO: 2001913 - RNA, 19 nt, Artificial Sequence
  Description of Artificial Sequence: Synthetic oligonucleotide
  Antisense strand to SEQ ID NO: 2001912
cuuccuccaagacucggga

SEQ ID NO: 2001914 - RNA, 19 nt, Artificial Sequence
  Description of Artificial Sequence: Synthetic oligonucleotide
  Sense strand starting at position 3432 of SEQ ID NO: 1880891
ccgagucuuggaggaagca

SEQ ID NO: 2001915 - RNA, 19 nt, Artificial Sequence
  Description of Artificial Sequence: Synthetic oligonucleotide
  Antisense strand to SEQ ID NO: 2001914
ugcuuccuccaagacucgg

SEQ ID NO: 2001916 - RNA, 19 nt, Artificial Sequence
  Description of Artificial Sequence: Synthetic oligonucleotide
  Sense strand starting at position 3433 of SEQ ID NO: 1880891
cgagucuuggaggaagcau

SEQ ID NO: 2001917 - RNA, 19 nt, Artificial Sequence
  Description of Artificial Sequence: Synthetic oligonucleotide
  Antisense strand to SEQ ID NO: 2001916
augcuuccuccaagacucg

SEQ ID NO: 2001918 - RNA, 19 nt, Artificial Sequence
  Description of Artificial Sequence: Synthetic oligonucleotide
  Sense strand starting at position 3565 of SEQ ID NO: 1880891
cuggcaucuuugugucaca

SEQ ID NO: 2001919 - RNA, 19 nt, Artificial Sequence
  Description of Artificial Sequence: Synthetic oligonucleotide
  Antisense strand to SEQ ID NO: 2001918
ugugacacaaagaugccag

SEQ ID NO: 2001920 - RNA, 19 nt, Artificial Sequence
  Description of Artificial Sequence: Synthetic oligonucleotide
  Sense strand starting at position 3568 of SEQ ID NO: 1880891
gcaucuuugugucacagac

SEQ ID NO: 2001921 - RNA, 19 nt, Artificial Sequence
  Description of Artificial Sequence: Synthetic oligonucleotide
  Antisense strand to SEQ ID NO: 2001920
gucugugacacaaagaugc

SEQ ID NO: 2001922 - RNA, 19 nt, Artificial Sequence
  Description of Artificial Sequence: Synthetic oligonucleotide
  Sense strand starting at position 3570 of SEQ ID NO: 1880891
aucuuugugucacagacua

SEQ ID NO: 2001923 - RNA, 19 nt, Artificial Sequence
  Description of Artificial Sequence: Synthetic oligonucleotide
  Antisense strand to SEQ ID NO: 2001922
uagucugugacacaaagau

SEQ ID NO: 2001924 - RNA, 19 nt, Artificial Sequence
  Description of Artificial Sequence: Synthetic oligonucleotide
  Sense strand starting at position 3647 of SEQ ID NO: 1880891
ugacauaagucccagguua

SEQ ID NO: 2001925 - RNA, 19 nt, Artificial Sequence
  Description of Artificial Sequence: Synthetic oligonucleotide
  Antisense strand to SEQ ID NO: 2001924
uaaccugggacuuauguca

SEQ ID NO: 2001926 - RNA, 19 nt, Artificial Sequence
  Description of Artificial Sequence: Synthetic oligonucleotide
  Sense strand starting at position 418 of SEQ ID NO: 1880893
uagauauaguucucaugga

SEQ ID NO: 2001927 - RNA, 19 nt, Artificial Sequence
  Description of Artificial Sequence: Synthetic oligonucleotide
  Antisense strand to SEQ ID NO: 2001926
uccaugagaacuauaucua

SEQ ID NO: 2001928 - RNA, 19 nt, Artificial Sequence
  Description of Artificial Sequence: Synthetic oligonucleotide
  Sense strand starting at position 505 of SEQ ID NO: 1880893
cucggaaucagcugugauu

SEQ ID NO: 2001929 - RNA, 19 nt, Artificial Sequence
  Description of Artificial Sequence: Synthetic oligonucleotide
  Antisense strand to SEQ ID NO: 2001928
aaucacagcugauuccgag

SEQ ID NO: 2001930 - RNA, 19 nt, Artificial Sequence
  Description of Artificial Sequence: Synthetic oligonucleotide
  Sense strand starting at position 507 of SEQ ID NO: 1880893
cggaaucagcugugauuca

SEQ ID NO: 2001931 - RNA, 19 nt, Artificial Sequence
  Description of Artificial Sequence: Synthetic oligonucleotide
  Antisense strand to SEQ ID NO: 2001930
ugaaucacagcugauuccg

SEQ ID NO: 2001932 - RNA, 19 nt, Artificial Sequence
  Description of Artificial Sequence: Synthetic oligonucleotide
  Sense strand starting at position 597 of SEQ ID NO: 1880893
agaugauuaacacgguaua

SEQ ID NO: 2001933 - RNA, 19 nt, Artificial Sequence
  Description of Artificial Sequence: Synthetic oligonucleotide
  Antisense strand to SEQ ID NO: 2001932
uauaccguguuaaucaucu

SEQ ID NO: 2001934 - RNA, 19 nt, Artificial Sequence
  Description of Artificial Sequence: Synthetic oligonucleotide
  Sense strand starting at position 598 of SEQ ID NO: 1880893
gaugauuaacacgguauag

SEQ ID NO: 2001935 - RNA, 19 nt, Artificial Sequence
  Description of Artificial Sequence: Synthetic oligonucleotide
  Antisense strand to SEQ ID NO: 2001934
cuauaccguguuaaucauc

SEQ ID NO: 2001936 - RNA, 19 nt, Artificial Sequence
  Description of Artificial Sequence: Synthetic oligonucleotide
  Sense strand starting at position 761 of SEQ ID NO: 1880893
uucccaagucuagaucagu

SEQ ID NO: 2001937 - RNA, 19 nt, Artificial Sequence
  Description of Artificial Sequence: Synthetic oligonucleotide
  Antisense strand to SEQ ID NO: 2001936
acugaucuagacuugggaa

SEQ ID NO: 2001938 - RNA, 19 nt, Artificial Sequence
  Description of Artificial Sequence: Synthetic oligonucleotide
  Sense strand starting at position 766 of SEQ ID NO: 1880893
aagucuagaucaguuguuu

SEQ ID NO: 2001939 - RNA, 19 nt, Artificial Sequence
  Description of Artificial Sequence: Synthetic oligonucleotide
  Antisense strand to SEQ ID NO: 2001938
aaacaacugaucuagacuu

SEQ ID NO: 2001940 - RNA, 19 nt, Artificial Sequence
  Description of Artificial Sequence: Synthetic oligonucleotide
  Sense strand starting at position 810 of SEQ ID NO: 1880893
auggaagacugacacuauu

SEQ ID NO: 2001941 - RNA, 19 nt, Artificial Sequence
  Description of Artificial Sequence: Synthetic oligonucleotide
  Antisense strand to SEQ ID NO: 2001940
aauagugucagucuuccau

SEQ ID NO: 2001942 - RNA, 19 nt, Artificial Sequence
  Description of Artificial Sequence: Synthetic oligonucleotide
  Sense strand starting at position 865 of SEQ ID NO: 1880893
ugaucuagacuugguaaua

SEQ ID NO: 2001943 - RNA, 19 nt, Artificial Sequence
  Description of Artificial Sequence: Synthetic oligonucleotide
  Antisense strand to SEQ ID NO: 2001942
uauuaccaagucuagauca

SEQ ID NO: 2001944 - RNA, 19 nt, Artificial Sequence
  Description of Artificial Sequence: Synthetic oligonucleotide
  Sense strand starting at position 866 of SEQ ID NO: 1880893
gaucuagacuugguaauaa

SEQ ID NO: 2001945 - RNA, 19 nt, Artificial Sequence
  Description of Artificial Sequence: Synthetic oligonucleotide
  Antisense strand to SEQ ID NO: 2001944
uuauuaccaagucuagauc

SEQ ID NO: 2001946 - RNA, 19 nt, Artificial Sequence
  Description of Artificial Sequence: Synthetic oligonucleotide
  Sense strand starting at position 934 of SEQ ID NO: 1880893
auuauaagccuaugauguu

SEQ ID NO: 2001947 - RNA, 19 nt, Artificial Sequence
  Description of Artificial Sequence: Synthetic oligonucleotide
  Antisense strand to SEQ ID NO: 2001946
aacaucauaggcuuauaau

SEQ ID NO: 2001948 - RNA, 19 nt, Artificial Sequence
  Description of Artificial Sequence: Synthetic oligonucleotide
  Sense strand starting at position 943 of SEQ ID NO: 1880893
cuaugauguuauuugccua

SEQ ID NO: 2001949 - RNA, 19 nt, Artificial Sequence
  Description of Artificial Sequence: Synthetic oligonucleotide
  Antisense strand to SEQ ID NO: 2001948
uaggcaaauaacaucauag

SEQ ID NO: 2001950 - RNA, 19 nt, Artificial Sequence
  Description of Artificial Sequence: Synthetic oligonucleotide
  Sense strand starting at position 1127 of SEQ ID NO: 1880893
cagaaauucuuugagggau

SEQ ID NO: 2001951 - RNA, 19 nt, Artificial Sequence
  Description of Artificial Sequence: Synthetic oligonucleotide
  Antisense strand to SEQ ID NO: 2001950
aucccucaaagaauuucug

SEQ ID NO: 2001952 - RNA, 19 nt, Artificial Sequence
  Description of Artificial Sequence: Synthetic oligonucleotide
  Sense strand starting at position 1225 of SEQ ID NO: 1880893
gcagaagccucagccagau

SEQ ID NO: 2001953 - RNA, 19 nt, Artificial Sequence
  Description of Artificial Sequence: Synthetic oligonucleotide
  Antisense strand to SEQ ID NO: 2001952
aucuggcugaggcuucugc

SEQ ID NO: 2001954 - RNA, 19 nt, Artificial Sequence
  Description of Artificial Sequence: Synthetic oligonucleotide
  Sense strand starting at position 1257 of SEQ ID NO: 1880893
ucaaucguaccacagaguu

SEQ ID NO: 2001955 - RNA, 19 nt, Artificial Sequence
  Description of Artificial Sequence: Synthetic oligonucleotide
  Antisense strand to SEQ ID NO: 2001954
aacucugugguacgauuga

SEQ ID NO: 2001956 - RNA, 19 nt, Artificial Sequence
  Description of Artificial Sequence: Synthetic oligonucleotide
  Sense strand starting at position 1406 of SEQ ID NO: 1880893
gccuguuggccaggacaau

SEQ ID NO: 2001957 - RNA, 19 nt, Artificial Sequence
  Description of Artificial Sequence: Synthetic oligonucleotide
  Antisense strand to SEQ ID NO: 2001956
auuguccuggccaacaggc

SEQ ID NO: 2001958 - RNA, 19 nt, Artificial Sequence
  Description of Artificial Sequence: Synthetic oligonucleotide
  Sense strand starting at position 1407 of SEQ ID NO: 1880893
ccuguuggccaggacaauu

SEQ ID NO: 2001959 - RNA, 19 nt, Artificial Sequence
  Description of Artificial Sequence: Synthetic oligonucleotide
  Antisense strand to SEQ ID NO: 2001958
aauuguccuggccaacagg

SEQ ID NO: 2001960 - RNA, 19 nt, Artificial Sequence
  Description of Artificial Sequence: Synthetic oligonucleotide
  Sense strand starting at position 1418 of SEQ ID NO: 1880893
ggacaauucuccguggacu

SEQ ID NO: 2001961 - RNA, 19 nt, Artificial Sequence
  Description of Artificial Sequence: Synthetic oligonucleotide
  Antisense strand to SEQ ID NO: 2001960
aguccacggagaauugucc

SEQ ID NO: 2001962 - RNA, 19 nt, Artificial Sequence
  Description of Artificial Sequence: Synthetic oligonucleotide
  Sense strand starting at position 1419 of SEQ ID NO: 1880893
gacaauucuccguggacua

SEQ ID NO: 2001963 - RNA, 19 nt, Artificial Sequence
  Description of Artificial Sequence: Synthetic oligonucleotide
  Antisense strand to SEQ ID NO: 2001962
uaguccacggagaauuguc

SEQ ID NO: 2001964 - RNA, 19 nt, Artificial Sequence
  Description of Artificial Sequence: Synthetic oligonucleotide
  Sense strand starting at position 1420 of SEQ ID NO: 1880893
acaauucuccguggacuaa

SEQ ID NO: 2001965 - RNA, 19 nt, Artificial Sequence
  Description of Artificial Sequence: Synthetic oligonucleotide
  Antisense strand to SEQ ID NO: 2001964
uuaguccacggagaauugu

SEQ ID NO: 2001966 - RNA, 19 nt, Artificial Sequence
  Description of Artificial Sequence: Synthetic oligonucleotide
  Sense strand starting at position 1478 of SEQ ID NO: 1880893
auacacauuuccugggcau

SEQ ID NO: 2001967 - RNA, 19 nt, Artificial Sequence
  Description of Artificial Sequence: Synthetic oligonucleotide
  Antisense strand to SEQ ID NO: 2001966
augcccaggaaauguguau

SEQ ID NO: 2001968 - RNA, 19 nt, Artificial Sequence
  Description of Artificial Sequence: Synthetic oligonucleotide
  Sense strand starting at position 2032 of SEQ ID NO: 1880893
aggagugguuccucagcau

SEQ ID NO: 2001969 - RNA, 19 nt, Artificial Sequence
  Description of Artificial Sequence: Synthetic oligonucleotide
  Antisense strand to SEQ ID NO: 2001968
augcugaggaaccacuccu

SEQ ID NO: 2001970 - RNA, 19 nt, Artificial Sequence
  Description of Artificial Sequence: Synthetic oligonucleotide
  Sense strand starting at position 2035 of SEQ ID NO: 1880893
agugguuccucagcauuau

SEQ ID NO: 2001971 - RNA, 19 nt, Artificial Sequence
  Description of Artificial Sequence: Synthetic oligonucleotide
  Antisense strand to SEQ ID NO: 2001970
auaaugcugaggaaccacu

SEQ ID NO: 2001972 - RNA, 19 nt, Artificial Sequence
  Description of Artificial Sequence: Synthetic oligonucleotide
  Sense strand starting at position 2036 of SEQ ID NO: 1880893
gugguuccucagcauuaug

SEQ ID NO: 2001973 - RNA, 19 nt, Artificial Sequence
  Description of Artificial Sequence: Synthetic oligonucleotide
  Antisense strand to SEQ ID NO: 2001972
cauaaugcugaggaaccac

SEQ ID NO: 2001974 - RNA, 19 nt, Artificial Sequence
  Description of Artificial Sequence: Synthetic oligonucleotide
  Sense strand starting at position 2236 of SEQ ID NO: 1880893
gcuacaugaucagccgaau

SEQ ID NO: 2001975 - RNA, 19 nt, Artificial Sequence
  Description of Artificial Sequence: Synthetic oligonucleotide
  Antisense strand to SEQ ID NO: 2001974
auucggcugaucauguagc

SEQ ID NO: 2001976 - RNA, 19 nt, Artificial Sequence
  Description of Artificial Sequence: Synthetic oligonucleotide
  Sense strand starting at position 2239 of SEQ ID NO: 1880893
acaugaucagccgaaucau

SEQ ID NO: 2001977 - RNA, 19 nt, Artificial Sequence
  Description of Artificial Sequence: Synthetic oligonucleotide
  Antisense strand to SEQ ID NO: 2001976
augauucggcugaucaugu

SEQ ID NO: 2001978 - RNA, 19 nt, Artificial Sequence
  Description of Artificial Sequence: Synthetic oligonucleotide
  Sense strand starting at position 2261 of SEQ ID NO: 1880893
gcaauuacaugucugcauu

SEQ ID NO: 2001979 - RNA, 19 nt, Artificial Sequence
  Description of Artificial Sequence: Synthetic oligonucleotide
  Antisense strand to SEQ ID NO: 2001978
aaugcagacauguaauugc

SEQ ID NO: 2001980 - RNA, 19 nt, Artificial Sequence
  Description of Artificial Sequence: Synthetic oligonucleotide
  Sense strand starting at position 2308 of SEQ ID NO: 1880893
aggaacugcuguuuacuaa

SEQ ID NO: 2001981 - RNA, 19 nt, Artificial Sequence
  Description of Artificial Sequence: Synthetic oligonucleotide
  Antisense strand to SEQ ID NO: 2001980
uuaguaaacagcaguuccu

SEQ ID NO: 2001982 - RNA, 19 nt, Artificial Sequence
  Description of Artificial Sequence: Synthetic oligonucleotide
  Sense strand starting at position 2367 of SEQ ID NO: 1880893
uugacauucucguccauaa

SEQ ID NO: 2001983 - RNA, 19 nt, Artificial Sequence
  Description of Artificial Sequence: Synthetic oligonucleotide
  Antisense strand to SEQ ID NO: 2001982
uuauggacgagaaugucaa

SEQ ID NO: 2001984 - RNA, 19 nt, Artificial Sequence
  Description of Artificial Sequence: Synthetic oligonucleotide
  Sense strand starting at position 2414 of SEQ ID NO: 1880893
uauuauugugacgauuaga

SEQ ID NO: 2001985 - RNA, 19 nt, Artificial Sequence
  Description of Artificial Sequence: Synthetic oligonucleotide
  Antisense strand to SEQ ID NO: 2001984
ucuaaucgucacaauaaua

SEQ ID NO: 2001986 - RNA, 19 nt, Artificial Sequence
  Description of Artificial Sequence: Synthetic oligonucleotide
  Sense strand starting at position 2432 of SEQ ID NO: 1880893
acaaguuacuacuuguaaa

SEQ ID NO: 2001987 - RNA, 19 nt, Artificial Sequence
  Description of Artificial Sequence: Synthetic oligonucleotide
  Antisense strand to SEQ ID NO: 2001986
uuuacaaguaguaacuugu

SEQ ID NO: 2001988 - RNA, 19 nt, Artificial Sequence
  Description of Artificial Sequence: Synthetic oligonucleotide
  Sense strand starting at position 2581 of SEQ ID NO: 1880893
acugguacucauuagaugu

SEQ ID NO: 2001989 - RNA, 19 nt, Artificial Sequence
  Description of Artificial Sequence: Synthetic oligonucleotide
  Antisense strand to SEQ ID NO: 2001988
acaucuaaugaguaccagu

SEQ ID NO: 2001990 - RNA, 19 nt, Artificial Sequence
  Description of Artificial Sequence: Synthetic oligonucleotide
  Sense strand starting at position 3501 of SEQ ID NO: 1880893
ugugaucucucugucucua

SEQ ID NO: 2001991 - RNA, 19 nt, Artificial Sequence
  Description of Artificial Sequence: Synthetic oligonucleotide
  Antisense strand to SEQ ID NO: 2001990
uagagacagagagaucaca

SEQ ID NO: 2001992 - RNA, 19 nt, Artificial Sequence
  Description of Artificial Sequence: Synthetic oligonucleotide
  Sense strand starting at position 3503 of SEQ ID NO: 1880893
ugaucucucugucucuaua

SEQ ID NO: 2001993 - RNA, 19 nt, Artificial Sequence
  Description of Artificial Sequence: Synthetic oligonucleotide
  Antisense strand to SEQ ID NO: 2001992
uauagagacagagagauca

SEQ ID NO: 2001994 - RNA, 19 nt, Artificial Sequence
  Description of Artificial Sequence: Synthetic oligonucleotide
  Sense strand starting at position 3614 of SEQ ID NO: 1880893
ggaacaaaguaccauaaau

SEQ ID NO: 2001995 - RNA, 19 nt, Artificial Sequence
  Description of Artificial Sequence: Synthetic oligonucleotide
  Antisense strand to SEQ ID NO: 2001994
auuuaugguacuuuguucc

SEQ ID NO: 2001996 - RNA, 19 nt, Artificial Sequence
  Description of Artificial Sequence: Synthetic oligonucleotide
  Sense strand starting at position 3625 of SEQ ID NO: 1880893
ccauaaaucgaguggcaga

SEQ ID NO: 2001997 - RNA, 19 nt, Artificial Sequence
  Description of Artificial Sequence: Synthetic oligonucleotide
  Antisense strand to SEQ ID NO: 2001996
ucugccacucgauuuaugg

SEQ ID NO: 2001998 - RNA, 19 nt, Artificial Sequence
  Description of Artificial Sequence: Synthetic oligonucleotide
  Sense strand starting at position 3721 of SEQ ID NO: 1880893
ugagaacucugagggaaga

SEQ ID NO: 2001999 - RNA, 19 nt, Artificial Sequence
  Description of Artificial Sequence: Synthetic oligonucleotide
  Antisense strand to SEQ ID NO: 2001998
ucuucccucagaguucuca

SEQ ID NO: 2002000 - RNA, 19 nt, Artificial Sequence
  Description of Artificial Sequence: Synthetic oligonucleotide
  Sense strand starting at position 3734 of SEQ ID NO: 1880893
ggaagaaucucuccuaagc

SEQ ID NO: 2002001 - RNA, 19 nt, Artificial Sequence
  Description of Artificial Sequence: Synthetic oligonucleotide
  Antisense strand to SEQ ID NO: 2002000
gcuuaggagagauucuucc

SEQ ID NO: 2002002 - RNA, 19 nt, Artificial Sequence
  Description of Artificial Sequence: Synthetic oligonucleotide
  Sense strand starting at position 3929 of SEQ ID NO: 1880893
gguacuugagguuaugagu

SEQ ID NO: 2002003 - RNA, 19 nt, Artificial Sequence
  Description of Artificial Sequence: Synthetic oligonucleotide
  Antisense strand to SEQ ID NO: 2002002
acucauaaccucaaguacc

SEQ ID NO: 2002004 - RNA, 19 nt, Artificial Sequence
  Description of Artificial Sequence: Synthetic oligonucleotide
  Sense strand starting at position 3937 of SEQ ID NO: 1880893
agguuaugaguccaacauc

SEQ ID NO: 2002005 - RNA, 19 nt, Artificial Sequence
  Description of Artificial Sequence: Synthetic oligonucleotide
  Antisense strand to SEQ ID NO: 2002004
gauguuggacucauaaccu

SEQ ID NO: 2002006 - RNA, 19 nt, Artificial Sequence
  Description of Artificial Sequence: Synthetic oligonucleotide
  Sense strand starting at position 54 of SEQ ID NO: 1880892
uagauauaguucucaugga

SEQ ID NO: 2002007 - RNA, 19 nt, Artificial Sequence
  Description of Artificial Sequence: Synthetic oligonucleotide
  Antisense strand to SEQ ID NO: 2002006
uccaugagaacuauaucua

SEQ ID NO: 2002008 - RNA, 19 nt, Artificial Sequence
  Description of Artificial Sequence: Synthetic oligonucleotide
  Sense strand starting at position 143 of SEQ ID NO: 1880892
cggaaucagcugugauuca

SEQ ID NO: 2002009 - RNA, 19 nt, Artificial Sequence
  Description of Artificial Sequence: Synthetic oligonucleotide
  Antisense strand to SEQ ID NO: 2002008
ugaaucacagcugauuccg

SEQ ID NO: 2002010 - RNA, 19 nt, Artificial Sequence
  Description of Artificial Sequence: Synthetic oligonucleotide
  Sense strand starting at position 233 of SEQ ID NO: 1880892
agaugauuaacacgguaua

SEQ ID NO: 2002011 - RNA, 19 nt, Artificial Sequence
  Description of Artificial Sequence: Synthetic oligonucleotide
  Antisense strand to SEQ ID NO: 2002010
uauaccguguuaaucaucu

SEQ ID NO: 2002012 - RNA, 19 nt, Artificial Sequence
  Description of Artificial Sequence: Synthetic oligonucleotide
  Sense strand starting at position 234 of SEQ ID NO: 1880892
gaugauuaacacgguauag

SEQ ID NO: 2002013 - RNA, 19 nt, Artificial Sequence
  Description of Artificial Sequence: Synthetic oligonucleotide
  Antisense strand to SEQ ID NO: 2002012
cuauaccguguuaaucauc

SEQ ID NO: 2002014 - RNA, 19 nt, Artificial Sequence
  Description of Artificial Sequence: Synthetic oligonucleotide
  Sense strand starting at position 397 of SEQ ID NO: 1880892
uucccaagucuagaucagu

SEQ ID NO: 2002015 - RNA, 19 nt, Artificial Sequence
  Description of Artificial Sequence: Synthetic oligonucleotide
  Antisense strand to SEQ ID NO: 2002014
acugaucuagacuugggaa

SEQ ID NO: 2002016 - RNA, 19 nt, Artificial Sequence
  Description of Artificial Sequence: Synthetic oligonucleotide
  Sense strand starting at position 402 of SEQ ID NO: 1880892
aagucuagaucaguuguuu

SEQ ID NO: 2002017 - RNA, 19 nt, Artificial Sequence
  Description of Artificial Sequence: Synthetic oligonucleotide
  Antisense strand to SEQ ID NO: 2002016
aaacaacugaucuagacuu

SEQ ID NO: 2002018 - RNA, 19 nt, Artificial Sequence
  Description of Artificial Sequence: Synthetic oligonucleotide
  Sense strand starting at position 501 of SEQ ID NO: 1880892
ugaucuagacuugguaaua

SEQ ID NO: 2002019 - RNA, 19 nt, Artificial Sequence
  Description of Artificial Sequence: Synthetic oligonucleotide
  Antisense strand to SEQ ID NO: 2002018
uauuaccaagucuagauca

SEQ ID NO: 2002020 - RNA, 19 nt, Artificial Sequence
  Description of Artificial Sequence: Synthetic oligonucleotide
  Sense strand starting at position 502 of SEQ ID NO: 1880892
gaucuagacuugguaauaa

SEQ ID NO: 2002021 - RNA, 19 nt, Artificial Sequence
  Description of Artificial Sequence: Synthetic oligonucleotide
  Antisense strand to SEQ ID NO: 2002020
uuauuaccaagucuagauc

SEQ ID NO: 2002022 - RNA, 19 nt, Artificial Sequence
  Description of Artificial Sequence: Synthetic oligonucleotide
  Sense strand starting at position 570 of SEQ ID NO: 1880892
auuauaagccuaugauguu

SEQ ID NO: 2002023 - RNA, 19 nt, Artificial Sequence
  Description of Artificial Sequence: Synthetic oligonucleotide
  Antisense strand to SEQ ID NO: 2002022
aacaucauaggcuuauaau

SEQ ID NO: 2002024 - RNA, 19 nt, Artificial Sequence
  Description of Artificial Sequence: Synthetic oligonucleotide
  Sense strand starting at position 579 of SEQ ID NO: 1880892
cuaugauguuauuugccua

SEQ ID NO: 2002025 - RNA, 19 nt, Artificial Sequence
  Description of Artificial Sequence: Synthetic oligonucleotide
  Antisense strand to SEQ ID NO: 2002024
uaggcaaauaacaucauag

SEQ ID NO: 2002026 - RNA, 19 nt, Artificial Sequence
  Description of Artificial Sequence: Synthetic oligonucleotide
  Sense strand starting at position 893 of SEQ ID NO: 1880892
ucaaucguaccacagaguu

SEQ ID NO: 2002027 - RNA, 19 nt, Artificial Sequence
  Description of Artificial Sequence: Synthetic oligonucleotide
  Antisense strand to SEQ ID NO: 2002026
aacucugugguacgauuga

SEQ ID NO: 2002028 - RNA, 19 nt, Artificial Sequence
  Description of Artificial Sequence: Synthetic oligonucleotide
  Sense strand starting at position 1043 of SEQ ID NO: 1880892
ccuguuggccaggacaauu

SEQ ID NO: 2002029 - RNA, 19 nt, Artificial Sequence
  Description of Artificial Sequence: Synthetic oligonucleotide
  Antisense strand to SEQ ID NO: 2002028
aauuguccuggccaacagg

SEQ ID NO: 2002030 - RNA, 19 nt, Artificial Sequence
  Description of Artificial Sequence: Synthetic oligonucleotide
  Sense strand starting at position 1054 of SEQ ID NO: 1880892
ggacaauucuccguggacu

SEQ ID NO: 2002031 - RNA, 19 nt, Artificial Sequence
  Description of Artificial Sequence: Synthetic oligonucleotide
  Antisense strand to SEQ ID NO: 2002030
aguccacggagaauugucc

SEQ ID NO: 2002032 - RNA, 19 nt, Artificial Sequence
  Description of Artificial Sequence: Synthetic oligonucleotide
  Sense strand starting at position 1055 of SEQ ID NO: 1880892
gacaauucuccguggacua

SEQ ID NO: 2002033 - RNA, 19 nt, Artificial Sequence
  Description of Artificial Sequence: Synthetic oligonucleotide
  Antisense strand to SEQ ID NO: 2002032
uaguccacggagaauuguc

SEQ ID NO: 2002034 - RNA, 19 nt, Artificial Sequence
  Description of Artificial Sequence: Synthetic oligonucleotide
  Sense strand starting at position 1056 of SEQ ID NO: 1880892
acaauucuccguggacuaa

SEQ ID NO: 2002035 - RNA, 19 nt, Artificial Sequence
  Description of Artificial Sequence: Synthetic oligonucleotide
  Antisense strand to SEQ ID NO: 2002034
uuaguccacggagaauugu

SEQ ID NO: 2002036 - RNA, 19 nt, Artificial Sequence
  Description of Artificial Sequence: Synthetic oligonucleotide
  Sense strand starting at position 1668 of SEQ ID NO: 1880892
aggagugguuccucagcau

SEQ ID NO: 2002037 - RNA, 19 nt, Artificial Sequence
  Description of Artificial Sequence: Synthetic oligonucleotide
  Antisense strand to SEQ ID NO: 2002036
augcugaggaaccacuccu

SEQ ID NO: 2002038 - RNA, 19 nt, Artificial Sequence
  Description of Artificial Sequence: Synthetic oligonucleotide
  Sense strand starting at position 1672 of SEQ ID NO: 1880892
gugguuccucagcauuaug

SEQ ID NO: 2002039 - RNA, 19 nt, Artificial Sequence
  Description of Artificial Sequence: Synthetic oligonucleotide
  Antisense strand to SEQ ID NO: 2002038
cauaaugcugaggaaccac

SEQ ID NO: 2002040 - RNA, 19 nt, Artificial Sequence
  Description of Artificial Sequence: Synthetic oligonucleotide
  Sense strand starting at position 1872 of SEQ ID NO: 1880892
gcuacaugaucagccgaau

SEQ ID NO: 2002041 - RNA, 19 nt, Artificial Sequence
  Description of Artificial Sequence: Synthetic oligonucleotide
  Antisense strand to SEQ ID NO: 2002040
auucggcugaucauguagc

SEQ ID NO: 2002042 - RNA, 19 nt, Artificial Sequence
  Description of Artificial Sequence: Synthetic oligonucleotide
  Sense strand starting at position 1875 of SEQ ID NO: 1880892
acaugaucagccgaaucau

SEQ ID NO: 2002043 - RNA, 19 nt, Artificial Sequence
  Description of Artificial Sequence: Synthetic oligonucleotide
  Antisense strand to SEQ ID NO: 2002042
augauucggcugaucaugu

SEQ ID NO: 2002044 - RNA, 19 nt, Artificial Sequence
  Description of Artificial Sequence: Synthetic oligonucleotide
  Sense strand starting at position 1944 of SEQ ID NO: 1880892
aggaacugcuguuuacuaa

SEQ ID NO: 2002045 - RNA, 19 nt, Artificial Sequence
  Description of Artificial Sequence: Synthetic oligonucleotide
  Antisense strand to SEQ ID NO: 2002044
uuaguaaacagcaguuccu

SEQ ID NO: 2002046 - RNA, 19 nt, Artificial Sequence
  Description of Artificial Sequence: Synthetic oligonucleotide
  Sense strand starting at position 2003 of SEQ ID NO: 1880892
uugacauucucguccauaa

SEQ ID NO: 2002047 - RNA, 19 nt, Artificial Sequence
  Description of Artificial Sequence: Synthetic oligonucleotide
  Antisense strand to SEQ ID NO: 2002046
uuauggacgagaaugucaa

SEQ ID NO: 2002048 - RNA, 19 nt, Artificial Sequence
  Description of Artificial Sequence: Synthetic oligonucleotide
  Sense strand starting at position 2050 of SEQ ID NO: 1880892
uauuauugugacgauuaga

SEQ ID NO: 2002049 - RNA, 19 nt, Artificial Sequence
  Description of Artificial Sequence: Synthetic oligonucleotide
  Antisense strand to SEQ ID NO: 2002048
ucuaaucgucacaauaaua

SEQ ID NO: 2002050 - RNA, 19 nt, Artificial Sequence
  Description of Artificial Sequence: Synthetic oligonucleotide
  Sense strand starting at position 2068 of SEQ ID NO: 1880892
acaaguuacuacuuguaaa

SEQ ID NO: 2002051 - RNA, 19 nt, Artificial Sequence
  Description of Artificial Sequence: Synthetic oligonucleotide
  Antisense strand to SEQ ID NO: 2002050
uuuacaaguaguaacuugu

SEQ ID NO: 2002052 - RNA, 19 nt, Artificial Sequence
  Description of Artificial Sequence: Synthetic oligonucleotide
  Sense strand starting at position 2217 of SEQ ID NO: 1880892
acugguacucauuagaugu

SEQ ID NO: 2002053 - RNA, 19 nt, Artificial Sequence
  Description of Artificial Sequence: Synthetic oligonucleotide
  Antisense strand to SEQ ID NO: 2002052
acaucuaaugaguaccagu

SEQ ID NO: 2002054 - RNA, 19 nt, Artificial Sequence
  Description of Artificial Sequence: Synthetic oligonucleotide
  Sense strand starting at position 3139 of SEQ ID NO: 1880892
ugaucucucugucucuaua

SEQ ID NO: 2002055 - RNA, 19 nt, Artificial Sequence
  Description of Artificial Sequence: Synthetic oligonucleotide
  Antisense strand to SEQ ID NO: 2002054
uauagagacagagagauca

SEQ ID NO: 2002056 - RNA, 19 nt, Artificial Sequence
  Description of Artificial Sequence: Synthetic oligonucleotide
  Sense strand starting at position 3261 of SEQ ID NO: 1880892
ccauaaaucgaguggcaga

SEQ ID NO: 2002057 - RNA, 19 nt, Artificial Sequence
  Description of Artificial Sequence: Synthetic oligonucleotide
  Antisense strand to SEQ ID NO: 2002056
ucugccacucgauuuaugg

SEQ ID NO: 2002058 - RNA, 19 nt, Artificial Sequence
  Description of Artificial Sequence: Synthetic oligonucleotide
  Sense strand starting at position 3370 of SEQ ID NO: 1880892
ggaagaaucucuccuaagc

SEQ ID NO: 2002059 - RNA, 19 nt, Artificial Sequence
  Description of Artificial Sequence: Synthetic oligonucleotide
  Antisense strand to SEQ ID NO: 2002058
gcuuaggagagauucuucc

SEQ ID NO: 2002060 - RNA, 19 nt, Artificial Sequence
  Description of Artificial Sequence: Synthetic oligonucleotide
  Sense strand starting at position 3565 of SEQ ID NO: 1880892
gguacuugagguuaugagu

SEQ ID NO: 2002061 - RNA, 19 nt, Artificial Sequence
  Description of Artificial Sequence: Synthetic oligonucleotide
  Antisense strand to SEQ ID NO: 2002060
acucauaaccucaaguacc

SEQ ID NO: 2002062 - RNA, 19 nt, Artificial Sequence
  Description of Artificial Sequence: Synthetic oligonucleotide
  Sense strand starting at position 3573 of SEQ ID NO: 1880892
agguuaugaguccaacauc

SEQ ID NO: 2002063 - RNA, 19 nt, Artificial Sequence
  Description of Artificial Sequence: Synthetic oligonucleotide
  Antisense strand to SEQ ID NO: 2002062
gauguuggacucauaaccu

SEQ ID NO: 2002064 - RNA, 19 nt, Artificial Sequence
  Description of Artificial Sequence: Synthetic oligonucleotide
  Sense strand starting at position 3644 of SEQ ID NO: 1880892
acagcaccucuuuauagua

SEQ ID NO: 2002065 - RNA, 19 nt, Artificial Sequence
  Description of Artificial Sequence: Synthetic oligonucleotide
  Antisense strand to SEQ ID NO: 2002064
uacuauaaagaggugcugu

SEQ ID NO: 2002066 - RNA, 19 nt, Artificial Sequence
  Description of Artificial Sequence: Synthetic oligonucleotide
  Sense strand starting at position 3704 of SEQ ID NO: 1880892
auccaauaguagcugauua

SEQ ID NO: 2002067 - RNA, 19 nt, Artificial Sequence
  Description of Artificial Sequence: Synthetic oligonucleotide
  Antisense strand to SEQ ID NO: 2002066
uaaucagcuacuauuggau

SEQ ID NO: 2002068 - RNA, 19 nt, Artificial Sequence
  Description of Artificial Sequence: Synthetic oligonucleotide
  Sense strand starting at position 3708 of SEQ ID NO: 1880892
aauaguagcugauuaugua

SEQ ID NO: 2002069 - RNA, 19 nt, Artificial Sequence
  Description of Artificial Sequence: Synthetic oligonucleotide
  Antisense strand to SEQ ID NO: 2002068
uacauaaucagcuacuauu

SEQ ID NO: 2002070 - RNA, 19 nt, Artificial Sequence
  Description of Artificial Sequence: Synthetic oligonucleotide
  Sense strand starting at position 3715 of SEQ ID NO: 1880892
gcugauuauguagaugaac

SEQ ID NO: 2002071 - RNA, 19 nt, Artificial Sequence
  Description of Artificial Sequence: Synthetic oligonucleotide
  Antisense strand to SEQ ID NO: 2002070
guucaucuacauaaucagc

SEQ ID NO: 2002072 - RNA, 19 nt, Artificial Sequence
  Description of Artificial Sequence: Synthetic oligonucleotide
  Sense strand starting at position 3731 of SEQ ID NO: 1880892
aaccauagagguuguuaaa

SEQ ID NO: 2002073 - RNA, 19 nt, Artificial Sequence
  Description of Artificial Sequence: Synthetic oligonucleotide
  Antisense strand to SEQ ID NO: 2002072
uuuaacaaccucuaugguu

SEQ ID NO: 2002074 - RNA, 19 nt, Artificial Sequence
  Description of Artificial Sequence: Synthetic oligonucleotide
  Sense strand starting at position 3741 of SEQ ID NO: 1880892
guuguuaaaccagaaacga

SEQ ID NO: 2002075 - RNA, 19 nt, Artificial Sequence
  Description of Artificial Sequence: Synthetic oligonucleotide
  Antisense strand to SEQ ID NO: 2002074
ucguuucugguuuaacaac

SEQ ID NO: 2002076 - RNA, 19 nt, Artificial Sequence
  Description of Artificial Sequence: Synthetic oligonucleotide
  Sense strand starting at position 3812 of SEQ ID NO: 1880892
uugauaucuccauggugac

SEQ ID NO: 2002077 - RNA, 19 nt, Artificial Sequence
  Description of Artificial Sequence: Synthetic oligonucleotide
  Antisense strand to SEQ ID NO: 2002076
gucaccauggagauaucaa

SEQ ID NO: 2002078 - RNA, 19 nt, Artificial Sequence
  Description of Artificial Sequence: Synthetic oligonucleotide
  Sense strand starting at position 3813 of SEQ ID NO: 1880892
ugauaucuccauggugacu

SEQ ID NO: 2002079 - RNA, 19 nt, Artificial Sequence
  Description of Artificial Sequence: Synthetic oligonucleotide
  Antisense strand to SEQ ID NO: 2002078
agucaccauggagauauca

SEQ ID NO: 2002080 - RNA, 19 nt, Artificial Sequence
  Description of Artificial Sequence: Synthetic oligonucleotide
  Sense strand starting at position 3853 of SEQ ID NO: 1880892
gaucgugcuccagaaagaa

SEQ ID NO: 2002081 - RNA, 19 nt, Artificial Sequence
  Description of Artificial Sequence: Synthetic oligonucleotide
  Antisense strand to SEQ ID NO: 2002080
uucuuucuggagcacgauc

SEQ ID NO: 2002082 - RNA, 19 nt, Artificial Sequence
  Description of Artificial Sequence: Synthetic oligonucleotide
  Sense strand starting at position 3939 of SEQ ID NO: 1880892
auuuccuuguaauaggaga

SEQ ID NO: 2002083 - RNA, 19 nt, Artificial Sequence
  Description of Artificial Sequence: Synthetic oligonucleotide
  Antisense strand to SEQ ID NO: 2002082
ucuccuauuacaaggaaau

SEQ ID NO: 2002084 - RNA, 19 nt, Artificial Sequence
  Description of Artificial Sequence: Synthetic oligonucleotide
  Sense strand starting at position 3962 of SEQ ID NO: 1880892
agugacugcuacuuaagua

SEQ ID NO: 2002085 - RNA, 19 nt, Artificial Sequence
  Description of Artificial Sequence: Synthetic oligonucleotide
  Antisense strand to SEQ ID NO: 2002084
uacuuaaguagcagucacu

SEQ ID NO: 2002086 - RNA, 19 nt, Artificial Sequence
  Description of Artificial Sequence: Synthetic oligonucleotide
  Sense strand starting at position 345 of SEQ ID NO: 1880894
gaccaagagucagaaucau

SEQ ID NO: 2002087 - RNA, 19 nt, Artificial Sequence
  Description of Artificial Sequence: Synthetic oligonucleotide
  Antisense strand to SEQ ID NO: 2002086
augauucugacucuugguc

SEQ ID NO: 2002088 - RNA, 19 nt, Artificial Sequence
  Description of Artificial Sequence: Synthetic oligonucleotide
  Sense strand starting at position 434 of SEQ ID NO: 1880894
auguuuccacuaugacauc

SEQ ID NO: 2002089 - RNA, 19 nt, Artificial Sequence
  Description of Artificial Sequence: Synthetic oligonucleotide
  Antisense strand to SEQ ID NO: 2002088
gaugucauaguggaaacau

SEQ ID NO: 2002090 - RNA, 19 nt, Artificial Sequence
  Description of Artificial Sequence: Synthetic oligonucleotide
  Sense strand starting at position 1130 of SEQ ID NO: 1880894
ucuuaaucccagcgggaca

SEQ ID NO: 2002091 - RNA, 19 nt, Artificial Sequence
  Description of Artificial Sequence: Synthetic oligonucleotide
  Antisense strand to SEQ ID NO: 2002090
ugucccgcugggauuaaga

SEQ ID NO: 2002092 - RNA, 19 nt, Artificial Sequence
  Description of Artificial Sequence: Synthetic oligonucleotide
  Sense strand starting at position 1325 of SEQ ID NO: 1880894
cgcaguucucacugagacc

SEQ ID NO: 2002093 - RNA, 19 nt, Artificial Sequence
  Description of Artificial Sequence: Synthetic oligonucleotide
  Antisense strand to SEQ ID NO: 2002092
ggucucagugagaacugcg

SEQ ID NO: 2002094 - RNA, 19 nt, Artificial Sequence
  Description of Artificial Sequence: Synthetic oligonucleotide
  Sense strand starting at position 1544 of SEQ ID NO: 1880894
ugacuuuggccgagccgua

SEQ ID NO: 2002095 - RNA, 19 nt, Artificial Sequence
  Description of Artificial Sequence: Synthetic oligonucleotide
  Antisense strand to SEQ ID NO: 2002094
uacggcucggccaaaguca

SEQ ID NO: 2002096 - RNA, 19 nt, Artificial Sequence
  Description of Artificial Sequence: Synthetic oligonucleotide
  Sense strand starting at position 1659 of SEQ ID NO: 1880894
gagcauuugugucccgacu

SEQ ID NO: 2002097 - RNA, 19 nt, Artificial Sequence
  Description of Artificial Sequence: Synthetic oligonucleotide
  Antisense strand to SEQ ID NO: 2002096
agucgggacacaaaugcuc

SEQ ID NO: 2002098 - RNA, 19 nt, Artificial Sequence
  Description of Artificial Sequence: Synthetic oligonucleotide
  Sense strand starting at position 1671 of SEQ ID NO: 1880894
cccgacucuguaugagagu

SEQ ID NO: 2002099 - RNA, 19 nt, Artificial Sequence
  Description of Artificial Sequence: Synthetic oligonucleotide
  Antisense strand to SEQ ID NO: 2002098
acucucauacagagucggg

SEQ ID NO: 2002100 - RNA, 19 nt, Artificial Sequence
  Description of Artificial Sequence: Synthetic oligonucleotide
  Sense strand starting at position 2109 of SEQ ID NO: 1880894
cccgcuuugggcugggaaa

SEQ ID NO: 2002101 - RNA, 19 nt, Artificial Sequence
  Description of Artificial Sequence: Synthetic oligonucleotide
  Antisense strand to SEQ ID NO: 2002100
uuucccagcccaaagcggg

SEQ ID NO: 2002102 - RNA, 19 nt, Artificial Sequence
  Description of Artificial Sequence: Synthetic oligonucleotide
  Sense strand starting at position 2110 of SEQ ID NO: 1880894
ccgcuuugggcugggaaau

SEQ ID NO: 2002103 - RNA, 19 nt, Artificial Sequence
  Description of Artificial Sequence: Synthetic oligonucleotide
  Antisense strand to SEQ ID NO: 2002102
auuucccagcccaaagcgg

SEQ ID NO: 2002104 - RNA, 19 nt, Artificial Sequence
  Description of Artificial Sequence: Synthetic oligonucleotide
  Sense strand starting at position 2111 of SEQ ID NO: 1880894
cgcuuugggcugggaaaua

SEQ ID NO: 2002105 - RNA, 19 nt, Artificial Sequence
  Description of Artificial Sequence: Synthetic oligonucleotide
  Antisense strand to SEQ ID NO: 2002104
uauuucccagcccaaagcg

SEQ ID NO: 2002106 - RNA, 19 nt, Artificial Sequence
  Description of Artificial Sequence: Synthetic oligonucleotide
  Sense strand starting at position 2268 of SEQ ID NO: 1880894
ccgccauuucgguguggga

SEQ ID NO: 2002107 - RNA, 19 nt, Artificial Sequence
  Description of Artificial Sequence: Synthetic oligonucleotide
  Antisense strand to SEQ ID NO: 2002106
ucccacaccgaaauggcgg

SEQ ID NO: 2002108 - RNA, 19 nt, Artificial Sequence
  Description of Artificial Sequence: Synthetic oligonucleotide
  Sense strand starting at position 2270 of SEQ ID NO: 1880894
gccauuucggugugggaag

SEQ ID NO: 2002109 - RNA, 19 nt, Artificial Sequence
  Description of Artificial Sequence: Synthetic oligonucleotide
  Antisense strand to SEQ ID NO: 2002108
cuucccacaccgaaauggc

SEQ ID NO: 2002110 - RNA, 19 nt, Artificial Sequence
  Description of Artificial Sequence: Synthetic oligonucleotide
  Sense strand starting at position 2398 of SEQ ID NO: 1880894
ccugcugucugagcuuaca

SEQ ID NO: 2002111 - RNA, 19 nt, Artificial Sequence
  Description of Artificial Sequence: Synthetic oligonucleotide
  Antisense strand to SEQ ID NO: 2002110
uguaagcucagacagcagg

SEQ ID NO: 2002112 - RNA, 19 nt, Artificial Sequence
  Description of Artificial Sequence: Synthetic oligonucleotide
  Sense strand starting at position 2570 of SEQ ID NO: 1880894
uggcguguggucaguugau

SEQ ID NO: 2002113 - RNA, 19 nt, Artificial Sequence
  Description of Artificial Sequence: Synthetic oligonucleotide
  Antisense strand to SEQ ID NO: 2002112
aucaacugaccacacgcca

SEQ ID NO: 2002114 - RNA, 19 nt, Artificial Sequence
  Description of Artificial Sequence: Synthetic oligonucleotide
  Sense strand starting at position 2637 of SEQ ID NO: 1880894
gggaaaggguucuaugaau

SEQ ID NO: 2002115 - RNA, 19 nt, Artificial Sequence
  Description of Artificial Sequence: Synthetic oligonucleotide
  Antisense strand to SEQ ID NO: 2002114
auucauagaacccuuuccc

SEQ ID NO: 2002116 - RNA, 19 nt, Artificial Sequence
  Description of Artificial Sequence: Synthetic oligonucleotide
  Sense strand starting at position 2676 of SEQ ID NO: 1880894
gcaaauaauuaaucaagug

SEQ ID NO: 2002117 - RNA, 19 nt, Artificial Sequence
  Description of Artificial Sequence: Synthetic oligonucleotide
  Antisense strand to SEQ ID NO: 2002116
cacuugauuaauuauuugc

SEQ ID NO: 2002118 - RNA, 19 nt, Artificial Sequence
  Description of Artificial Sequence: Synthetic oligonucleotide
  Sense strand starting at position 2755 of SEQ ID NO: 1880894
cagugcucacuugacagau

SEQ ID NO: 2002119 - RNA, 19 nt, Artificial Sequence
  Description of Artificial Sequence: Synthetic oligonucleotide
  Antisense strand to SEQ ID NO: 2002118
aucugucaagugagcacug

SEQ ID NO: 2002120 - RNA, 19 nt, Artificial Sequence
  Description of Artificial Sequence: Synthetic oligonucleotide
  Sense strand starting at position 2914 of SEQ ID NO: 1880894
agucauccuagcugguaga

SEQ ID NO: 2002121 - RNA, 19 nt, Artificial Sequence
  Description of Artificial Sequence: Synthetic oligonucleotide
  Antisense strand to SEQ ID NO: 2002120
ucuaccagcuaggaugacu

SEQ ID NO: 2002122 - RNA, 19 nt, Artificial Sequence
  Description of Artificial Sequence: Synthetic oligonucleotide
  Sense strand starting at position 3002 of SEQ ID NO: 1880894
ucuaucccucagcgugaau

SEQ ID NO: 2002123 - RNA, 19 nt, Artificial Sequence
  Description of Artificial Sequence: Synthetic oligonucleotide
  Antisense strand to SEQ ID NO: 2002122
auucacgcugagggauaga

SEQ ID NO: 2002124 - RNA, 19 nt, Artificial Sequence
  Description of Artificial Sequence: Synthetic oligonucleotide
  Sense strand starting at position 3013 of SEQ ID NO: 1880894
gcgugaaugcaucucaguc

SEQ ID NO: 2002125 - RNA, 19 nt, Artificial Sequence
  Description of Artificial Sequence: Synthetic oligonucleotide
  Antisense strand to SEQ ID NO: 2002124
gacugagaugcauucacgc

SEQ ID NO: 2002126 - RNA, 19 nt, Artificial Sequence
  Description of Artificial Sequence: Synthetic oligonucleotide
  Sense strand starting at position 3073 of SEQ ID NO: 1880894
ggagcucuauugcuuggaa

SEQ ID NO: 2002127 - RNA, 19 nt, Artificial Sequence
  Description of Artificial Sequence: Synthetic oligonucleotide
  Antisense strand to SEQ ID NO: 2002126
uuccaagcaauagagcucc

SEQ ID NO: 2002128 - RNA, 19 nt, Artificial Sequence
  Description of Artificial Sequence: Synthetic oligonucleotide
  Sense strand starting at position 3074 of SEQ ID NO: 1880894
gagcucuauugcuuggaac

SEQ ID NO: 2002129 - RNA, 19 nt, Artificial Sequence
  Description of Artificial Sequence: Synthetic oligonucleotide
  Antisense strand to SEQ ID NO: 2002128
guuccaagcaauagagcuc

SEQ ID NO: 2002130 - RNA, 19 nt, Artificial Sequence
  Description of Artificial Sequence: Synthetic oligonucleotide
  Sense strand starting at position 3075 of SEQ ID NO: 1880894
agcucuauugcuuggaaca

SEQ ID NO: 2002131 - RNA, 19 nt, Artificial Sequence
  Description of Artificial Sequence: Synthetic oligonucleotide
  Antisense strand to SEQ ID NO: 2002130
uguuccaagcaauagagcu

SEQ ID NO: 2002132 - RNA, 19 nt, Artificial Sequence
  Description of Artificial Sequence: Synthetic oligonucleotide
  Sense strand starting at position 3076 of SEQ ID NO: 1880894
gcucuauugcuuggaacau

SEQ ID NO: 2002133 - RNA, 19 nt, Artificial Sequence
  Description of Artificial Sequence: Synthetic oligonucleotide
  Antisense strand to SEQ ID NO: 2002132
auguuccaagcaauagagc

SEQ ID NO: 2002134 - RNA, 19 nt, Artificial Sequence
  Description of Artificial Sequence: Synthetic oligonucleotide
  Sense strand starting at position 3229 of SEQ ID NO: 1880894
ggucauuggugagaggaag

SEQ ID NO: 2002135 - RNA, 19 nt, Artificial Sequence
  Description of Artificial Sequence: Synthetic oligonucleotide
  Antisense strand to SEQ ID NO: 2002134
cuuccucucaccaaugacc

SEQ ID NO: 2002136 - RNA, 19 nt, Artificial Sequence
  Description of Artificial Sequence: Synthetic oligonucleotide
  Sense strand starting at position 3283 of SEQ ID NO: 1880894
aagcuucucccuggagaga

SEQ ID NO: 2002137 - RNA, 19 nt, Artificial Sequence
  Description of Artificial Sequence: Synthetic oligonucleotide
  Antisense strand to SEQ ID NO: 2002136
ucucuccagggagaagcuu

SEQ ID NO: 2002138 - RNA, 19 nt, Artificial Sequence
  Description of Artificial Sequence: Synthetic oligonucleotide
  Sense strand starting at position 3317 of SEQ ID NO: 1880894
aggcauuccuagcccugaa

SEQ ID NO: 2002139 - RNA, 19 nt, Artificial Sequence
  Description of Artificial Sequence: Synthetic oligonucleotide
  Antisense strand to SEQ ID NO: 2002138
uucagggcuaggaaugccu

SEQ ID NO: 2002140 - RNA, 19 nt, Artificial Sequence
  Description of Artificial Sequence: Synthetic oligonucleotide
  Sense strand starting at position 3438 of SEQ ID NO: 1880894
gaggaugaguccuuccaug

SEQ ID NO: 2002141 - RNA, 19 nt, Artificial Sequence
  Description of Artificial Sequence: Synthetic oligonucleotide
  Antisense strand to SEQ ID NO: 2002140
cauggaaggacucauccuc

SEQ ID NO: 2002142 - RNA, 19 nt, Artificial Sequence
  Description of Artificial Sequence: Synthetic oligonucleotide
  Sense strand starting at position 3574 of SEQ ID NO: 1880894
gcagcucaucacugggaaa

SEQ ID NO: 2002143 - RNA, 19 nt, Artificial Sequence
  Description of Artificial Sequence: Synthetic oligonucleotide
  Antisense strand to SEQ ID NO: 2002142
uuucccagugaugagcugc

SEQ ID NO: 2002144 - RNA, 19 nt, Artificial Sequence
  Description of Artificial Sequence: Synthetic oligonucleotide
  Sense strand starting at position 3576 of SEQ ID NO: 1880894
agcucaucacugggaaaga

SEQ ID NO: 2002145 - RNA, 19 nt, Artificial Sequence
  Description of Artificial Sequence: Synthetic oligonucleotide
  Antisense strand to SEQ ID NO: 2002144
ucuuucccagugaugagcu

SEQ ID NO: 2002146 - RNA, 19 nt, Artificial Sequence
  Description of Artificial Sequence: Synthetic oligonucleotide
  Sense strand starting at position 3595 of SEQ ID NO: 1880894
ggaugcugccaacaacuau

SEQ ID NO: 2002147 - RNA, 19 nt, Artificial Sequence
  Description of Artificial Sequence: Synthetic oligonucleotide
  Antisense strand to SEQ ID NO: 2002146
auaguuguuggcagcaucc

SEQ ID NO: 2002148 - RNA, 19 nt, Artificial Sequence
  Description of Artificial Sequence: Synthetic oligonucleotide
  Sense strand starting at position 3614 of SEQ ID NO: 1880894
gcccguggucacuauacca

SEQ ID NO: 2002149 - RNA, 19 nt, Artificial Sequence
  Description of Artificial Sequence: Synthetic oligonucleotide
  Antisense strand to SEQ ID NO: 2002148
ugguauagugaccacgggc

SEQ ID NO: 2002150 - RNA, 19 nt, Artificial Sequence
  Description of Artificial Sequence: Synthetic oligonucleotide
  Sense strand starting at position 3680 of SEQ ID NO: 1880894
gugagagugugucuuggga

SEQ ID NO: 2002151 - RNA, 19 nt, Artificial Sequence
  Description of Artificial Sequence: Synthetic oligonucleotide
  Antisense strand to SEQ ID NO: 2002150
ucccaagacacacucucac

SEQ ID NO: 2002152 - RNA, 19 nt, Artificial Sequence
  Description of Artificial Sequence: Synthetic oligonucleotide
  Sense strand starting at position 3717 of SEQ ID NO: 1880894
cugugcuaauggucaggaa

SEQ ID NO: 2002153 - RNA, 19 nt, Artificial Sequence
  Description of Artificial Sequence: Synthetic oligonucleotide
  Antisense strand to SEQ ID NO: 2002152
uuccugaccauuagcacag

SEQ ID NO: 2002154 - RNA, 19 nt, Artificial Sequence
  Description of Artificial Sequence: Synthetic oligonucleotide
  Sense strand starting at position 3718 of SEQ ID NO: 1880894
ugugcuaauggucaggaau

SEQ ID NO: 2002155 - RNA, 19 nt, Artificial Sequence
  Description of Artificial Sequence: Synthetic oligonucleotide
  Antisense strand to SEQ ID NO: 2002154
auuccugaccauuagcaca

SEQ ID NO: 2002156 - RNA, 19 nt, Artificial Sequence
  Description of Artificial Sequence: Synthetic oligonucleotide
  Sense strand starting at position 3721 of SEQ ID NO: 1880894
gcuaauggucaggaauauu

SEQ ID NO: 2002157 - RNA, 19 nt, Artificial Sequence
  Description of Artificial Sequence: Synthetic oligonucleotide
  Antisense strand to SEQ ID NO: 2002156
aauauuccugaccauuagc

SEQ ID NO: 2002158 - RNA, 19 nt, Artificial Sequence
  Description of Artificial Sequence: Synthetic oligonucleotide
  Sense strand starting at position 3810 of SEQ ID NO: 1880894
cucaguauuugcccugacu

SEQ ID NO: 2002159 - RNA, 19 nt, Artificial Sequence
  Description of Artificial Sequence: Synthetic oligonucleotide
  Antisense strand to SEQ ID NO: 2002158
agucagggcaaauacugag

SEQ ID NO: 2002160 - RNA, 19 nt, Artificial Sequence
  Description of Artificial Sequence: Synthetic oligonucleotide
  Sense strand starting at position 3828 of SEQ ID NO: 1880894
ugcugauguaucuuacgcu

SEQ ID NO: 2002161 - RNA, 19 nt, Artificial Sequence
  Description of Artificial Sequence: Synthetic oligonucleotide
  Antisense strand to SEQ ID NO: 2002160
agcguaagauacaucagca

SEQ ID NO: 2002162 - RNA, 19 nt, Artificial Sequence
  Description of Artificial Sequence: Synthetic oligonucleotide
  Sense strand starting at position 3832 of SEQ ID NO: 1880894
gauguaucuuacgcuuuau

SEQ ID NO: 2002163 - RNA, 19 nt, Artificial Sequence
  Description of Artificial Sequence: Synthetic oligonucleotide
  Antisense strand to SEQ ID NO: 2002162
auaaagcguaagauacauc

SEQ ID NO: 2002164 - RNA, 19 nt, Artificial Sequence
  Description of Artificial Sequence: Synthetic oligonucleotide
  Sense strand starting at position 3844 of SEQ ID NO: 1880894
gcuuuauggagccagguga

SEQ ID NO: 2002165 - RNA, 19 nt, Artificial Sequence
  Description of Artificial Sequence: Synthetic oligonucleotide
  Antisense strand to SEQ ID NO: 2002164
ucaccuggcuccauaaagc

SEQ ID NO: 2002166 - RNA, 19 nt, Artificial Sequence
  Description of Artificial Sequence: Synthetic oligonucleotide
  Sense strand starting at position 54 of SEQ ID NO: 1880895
cagagaaaguuguuuguaa

SEQ ID NO: 2002167 - RNA, 19 nt, Artificial Sequence
  Description of Artificial Sequence: Synthetic oligonucleotide
  Antisense strand to SEQ ID NO: 2002166
uuacaaacaacuuucucug

SEQ ID NO: 2002168 - RNA, 19 nt, Artificial Sequence
  Description of Artificial Sequence: Synthetic oligonucleotide
  Sense strand starting at position 55 of SEQ ID NO: 1880895
agagaaaguuguuuguaau

SEQ ID NO: 2002169 - RNA, 19 nt, Artificial Sequence
  Description of Artificial Sequence: Synthetic oligonucleotide
  Antisense strand to SEQ ID NO: 2002168
auuacaaacaacuuucucu

SEQ ID NO: 2002170 - RNA, 19 nt, Artificial Sequence
  Description of Artificial Sequence: Synthetic oligonucleotide
  Sense strand starting at position 56 of SEQ ID NO: 1880895
gagaaaguuguuuguaauu

SEQ ID NO: 2002171 - RNA, 19 nt, Artificial Sequence
  Description of Artificial Sequence: Synthetic oligonucleotide
  Antisense strand to SEQ ID NO: 2002170
aauuacaaacaacuuucuc

SEQ ID NO: 2002172 - RNA, 19 nt, Artificial Sequence
  Description of Artificial Sequence: Synthetic oligonucleotide
  Sense strand starting at position 109 of SEQ ID NO: 1880895
guaugucuugucugaagag

SEQ ID NO: 2002173 - RNA, 19 nt, Artificial Sequence
  Description of Artificial Sequence: Synthetic oligonucleotide
  Antisense strand to SEQ ID NO: 2002172
cucuucagacaagacauac

SEQ ID NO: 2002174 - RNA, 19 nt, Artificial Sequence
  Description of Artificial Sequence: Synthetic oligonucleotide
  Sense strand starting at position 208 of SEQ ID NO: 1880895
gcaacuuacgucuagcaca

SEQ ID NO: 2002175 - RNA, 19 nt, Artificial Sequence
  Description of Artificial Sequence: Synthetic oligonucleotide
  Antisense strand to SEQ ID NO: 2002174
ugugcuagacguaaguugc

SEQ ID NO: 2002176 - RNA, 19 nt, Artificial Sequence
  Description of Artificial Sequence: Synthetic oligonucleotide
  Sense strand starting at position 415 of SEQ ID NO: 1880895
ggagcaguggcaggaucau

SEQ ID NO: 2002177 - RNA, 19 nt, Artificial Sequence
  Description of Artificial Sequence: Synthetic oligonucleotide
  Antisense strand to SEQ ID NO: 2002176
augauccugccacugcucc

SEQ ID NO: 2002178 - RNA, 19 nt, Artificial Sequence
  Description of Artificial Sequence: Synthetic oligonucleotide
  Sense strand starting at position 707 of SEQ ID NO: 1880895
uuguuugagaccgaguuua

SEQ ID NO: 2002179 - RNA, 19 nt, Artificial Sequence
  Description of Artificial Sequence: Synthetic oligonucleotide
  Antisense strand to SEQ ID NO: 2002178
uaaacucggucucaaacaa

SEQ ID NO: 2002180 - RNA, 19 nt, Artificial Sequence
  Description of Artificial Sequence: Synthetic oligonucleotide
  Sense strand starting at position 893 of SEQ ID NO: 1880895
ucuacuggcuggucuugaa

SEQ ID NO: 2002181 - RNA, 19 nt, Artificial Sequence
  Description of Artificial Sequence: Synthetic oligonucleotide
  Antisense strand to SEQ ID NO: 2002180
uucaagaccagccaguaga

SEQ ID NO: 2002182 - RNA, 19 nt, Artificial Sequence
  Description of Artificial Sequence: Synthetic oligonucleotide
  Sense strand starting at position 989 of SEQ ID NO: 1880895
ccagaacuguaauucuaug

SEQ ID NO: 2002183 - RNA, 19 nt, Artificial Sequence
  Description of Artificial Sequence: Synthetic oligonucleotide
  Antisense strand to SEQ ID NO: 2002182
cauagaauuacaguucugg

SEQ ID NO: 2002184 - RNA, 19 nt, Artificial Sequence
  Description of Artificial Sequence: Synthetic oligonucleotide
  Sense strand starting at position 1245 of SEQ ID NO: 1880895
acuagaaccuaaguaaguu

SEQ ID NO: 2002185 - RNA, 19 nt, Artificial Sequence
  Description of Artificial Sequence: Synthetic oligonucleotide
  Antisense strand to SEQ ID NO: 2002184
aacuuacuuagguucuagu

SEQ ID NO: 2002186 - RNA, 19 nt, Artificial Sequence
  Description of Artificial Sequence: Synthetic oligonucleotide
  Sense strand starting at position 1261 of SEQ ID NO: 1880895
guuagaauucaagacgagu

SEQ ID NO: 2002187 - RNA, 19 nt, Artificial Sequence
  Description of Artificial Sequence: Synthetic oligonucleotide
  Antisense strand to SEQ ID NO: 2002186
acucgucuugaauucuaac

SEQ ID NO: 2002188 - RNA, 19 nt, Artificial Sequence
  Description of Artificial Sequence: Synthetic oligonucleotide
  Sense strand starting at position 1368 of SEQ ID NO: 1880895
cugacagaugcggaguaaa

SEQ ID NO: 2002189 - RNA, 19 nt, Artificial Sequence
  Description of Artificial Sequence: Synthetic oligonucleotide
  Antisense strand to SEQ ID NO: 2002188
uuuacuccgcaucugucag

SEQ ID NO: 2002190 - RNA, 19 nt, Artificial Sequence
  Description of Artificial Sequence: Synthetic oligonucleotide
  Sense strand starting at position 1447 of SEQ ID NO: 1880895
augggacuuucuccggaaa

SEQ ID NO: 2002191 - RNA, 19 nt, Artificial Sequence
  Description of Artificial Sequence: Synthetic oligonucleotide
  Antisense strand to SEQ ID NO: 2002190
uuuccggagaaagucccau

SEQ ID NO: 2002192 - RNA, 19 nt, Artificial Sequence
  Description of Artificial Sequence: Synthetic oligonucleotide
  Sense strand starting at position 1448 of SEQ ID NO: 1880895
ugggacuuucuccggaaau

SEQ ID NO: 2002193 - RNA, 19 nt, Artificial Sequence
  Description of Artificial Sequence: Synthetic oligonucleotide
  Antisense strand to SEQ ID NO: 2002192
auuuccggagaaaguccca

SEQ ID NO: 2002194 - RNA, 19 nt, Artificial Sequence
  Description of Artificial Sequence: Synthetic oligonucleotide
  Sense strand starting at position 1598 of SEQ ID NO: 1880895
aagguaaagacgugucucu

SEQ ID NO: 2002195 - RNA, 19 nt, Artificial Sequence
  Description of Artificial Sequence: Synthetic oligonucleotide
  Antisense strand to SEQ ID NO: 2002194
agagacacgucuuuaccuu

SEQ ID NO: 2002196 - RNA, 19 nt, Artificial Sequence
  Description of Artificial Sequence: Synthetic oligonucleotide
  Sense strand starting at position 1677 of SEQ ID NO: 1880895
ugaacugcucccgagaaac

SEQ ID NO: 2002197 - RNA, 19 nt, Artificial Sequence
  Description of Artificial Sequence: Synthetic oligonucleotide
  Antisense strand to SEQ ID NO: 2002196
guuucucgggagcaguuca

SEQ ID NO: 2002198 - RNA, 19 nt, Artificial Sequence
  Description of Artificial Sequence: Synthetic oligonucleotide
  Sense strand starting at position 2513 of SEQ ID NO: 1880895
guuuguuuauuucccugau

SEQ ID NO: 2002199 - RNA, 19 nt, Artificial Sequence
  Description of Artificial Sequence: Synthetic oligonucleotide
  Antisense strand to SEQ ID NO: 2002198
aucagggaaauaaacaaac

SEQ ID NO: 2002200 - RNA, 19 nt, Artificial Sequence
  Description of Artificial Sequence: Synthetic oligonucleotide
  Sense strand starting at position 2534 of SEQ ID NO: 1880895
accuauccgucucuaauga

SEQ ID NO: 2002201 - RNA, 19 nt, Artificial Sequence
  Description of Artificial Sequence: Synthetic oligonucleotide
  Antisense strand to SEQ ID NO: 2002200
ucauuagagacggauaggu

SEQ ID NO: 2002202 - RNA, 19 nt, Artificial Sequence
  Description of Artificial Sequence: Synthetic oligonucleotide
  Sense strand starting at position 2602 of SEQ ID NO: 1880895
gauacaagugaucaaacgu

SEQ ID NO: 2002203 - RNA, 19 nt, Artificial Sequence
  Description of Artificial Sequence: Synthetic oligonucleotide
  Antisense strand to SEQ ID NO: 2002202
acguuugaucacuuguauc

SEQ ID NO: 2002204 - RNA, 19 nt, Artificial Sequence
  Description of Artificial Sequence: Synthetic oligonucleotide
  Sense strand starting at position 2608 of SEQ ID NO: 1880895
agugaucaaacgugauuag

SEQ ID NO: 2002205 - RNA, 19 nt, Artificial Sequence
  Description of Artificial Sequence: Synthetic oligonucleotide
  Antisense strand to SEQ ID NO: 2002204
cuaaucacguuugaucacu

SEQ ID NO: 2002206 - RNA, 19 nt, Artificial Sequence
  Description of Artificial Sequence: Synthetic oligonucleotide
  Sense strand starting at position 2609 of SEQ ID NO: 1880895
gugaucaaacgugauuagu

SEQ ID NO: 2002207 - RNA, 19 nt, Artificial Sequence
  Description of Artificial Sequence: Synthetic oligonucleotide
  Antisense strand to SEQ ID NO: 2002206
acuaaucacguuugaucac

SEQ ID NO: 2002208 - RNA, 19 nt, Artificial Sequence
  Description of Artificial Sequence: Synthetic oligonucleotide
  Sense strand starting at position 2620 of SEQ ID NO: 1880895
ugauuaguggcccagacau

SEQ ID NO: 2002209 - RNA, 19 nt, Artificial Sequence
  Description of Artificial Sequence: Synthetic oligonucleotide
  Antisense strand to SEQ ID NO: 2002208
augucugggccacuaauca

SEQ ID NO: 2002210 - RNA, 19 nt, Artificial Sequence
  Description of Artificial Sequence: Synthetic oligonucleotide
  Sense strand starting at position 2650 of SEQ ID NO: 1880895
gccauugcuugacuuaaag

SEQ ID NO: 2002211 - RNA, 19 nt, Artificial Sequence
  Description of Artificial Sequence: Synthetic oligonucleotide
  Antisense strand to SEQ ID NO: 2002210
cuuuaagucaagcaauggc

SEQ ID NO: 2002212 - RNA, 19 nt, Artificial Sequence
  Description of Artificial Sequence: Synthetic oligonucleotide
  Sense strand starting at position 2760 of SEQ ID NO: 1880895
cguuguagugagcugugau

SEQ ID NO: 2002213 - RNA, 19 nt, Artificial Sequence
  Description of Artificial Sequence: Synthetic oligonucleotide
  Antisense strand to SEQ ID NO: 2002212
aucacagcucacuacaacg

SEQ ID NO: 2002214 - RNA, 19 nt, Artificial Sequence
  Description of Artificial Sequence: Synthetic oligonucleotide
  Sense strand starting at position 2843 of SEQ ID NO: 1880895
ggcucaucuugucugaaca

SEQ ID NO: 2002215 - RNA, 19 nt, Artificial Sequence
  Description of Artificial Sequence: Synthetic oligonucleotide
  Antisense strand to SEQ ID NO: 2002214
uguucagacaagaugagcc

SEQ ID NO: 2002216 - RNA, 19 nt, Artificial Sequence
  Description of Artificial Sequence: Synthetic oligonucleotide
  Sense strand starting at position 2844 of SEQ ID NO: 1880895
gcucaucuugucugaacau

SEQ ID NO: 2002217 - RNA, 19 nt, Artificial Sequence
  Description of Artificial Sequence: Synthetic oligonucleotide
  Antisense strand to SEQ ID NO: 2002216
auguucagacaagaugagc

SEQ ID NO: 2002218 - RNA, 19 nt, Artificial Sequence
  Description of Artificial Sequence: Synthetic oligonucleotide
  Sense strand starting at position 2917 of SEQ ID NO: 1880895
caugaauguuugcugaaua

SEQ ID NO: 2002219 - RNA, 19 nt, Artificial Sequence
  Description of Artificial Sequence: Synthetic oligonucleotide
  Antisense strand to SEQ ID NO: 2002218
uauucagcaaacauucaug

SEQ ID NO: 2002220 - RNA, 19 nt, Artificial Sequence
  Description of Artificial Sequence: Synthetic oligonucleotide
  Sense strand starting at position 2922 of SEQ ID NO: 1880895
auguuugcugaauacauua

SEQ ID NO: 2002221 - RNA, 19 nt, Artificial Sequence
  Description of Artificial Sequence: Synthetic oligonucleotide
  Antisense strand to SEQ ID NO: 2002220
uaauguauucagcaaacau

SEQ ID NO: 2002222 - RNA, 19 nt, Artificial Sequence
  Description of Artificial Sequence: Synthetic oligonucleotide
  Sense strand starting at position 2941 of SEQ ID NO: 1880895
auaaauggguaagauugaa

SEQ ID NO: 2002223 - RNA, 19 nt, Artificial Sequence
  Description of Artificial Sequence: Synthetic oligonucleotide
  Antisense strand to SEQ ID NO: 2002222
uucaaucuuacccauuuau

SEQ ID NO: 2002224 - RNA, 19 nt, Artificial Sequence
  Description of Artificial Sequence: Synthetic oligonucleotide
  Sense strand starting at position 2991 of SEQ ID NO: 1880895
uaaugucaccuuggguaga

SEQ ID NO: 2002225 - RNA, 19 nt, Artificial Sequence
  Description of Artificial Sequence: Synthetic oligonucleotide
  Antisense strand to SEQ ID NO: 2002224
ucuacccaaggugacauua

SEQ ID NO: 2002226 - RNA, 19 nt, Artificial Sequence
  Description of Artificial Sequence: Synthetic oligonucleotide
  Sense strand starting at position 3213 of SEQ ID NO: 1880895
guuucugaauggcugauua

SEQ ID NO: 2002227 - RNA, 19 nt, Artificial Sequence
  Description of Artificial Sequence: Synthetic oligonucleotide
  Antisense strand to SEQ ID NO: 2002226
uaaucagccauucagaaac

SEQ ID NO: 2002228 - RNA, 19 nt, Artificial Sequence
  Description of Artificial Sequence: Synthetic oligonucleotide
  Sense strand starting at position 3215 of SEQ ID NO: 1880895
uucugaauggcugauuaua

SEQ ID NO: 2002229 - RNA, 19 nt, Artificial Sequence
  Description of Artificial Sequence: Synthetic oligonucleotide
  Antisense strand to SEQ ID NO: 2002228
uauaaucagccauucagaa

SEQ ID NO: 2002230 - RNA, 19 nt, Artificial Sequence
  Description of Artificial Sequence: Synthetic oligonucleotide
  Sense strand starting at position 3251 of SEQ ID NO: 1880895
gacauauggucacuugggu

SEQ ID NO: 2002231 - RNA, 19 nt, Artificial Sequence
  Description of Artificial Sequence: Synthetic oligonucleotide
  Antisense strand to SEQ ID NO: 2002230
acccaagugaccauauguc

SEQ ID NO: 2002232 - RNA, 19 nt, Artificial Sequence
  Description of Artificial Sequence: Synthetic oligonucleotide
  Sense strand starting at position 3332 of SEQ ID NO: 1880895
cagauuguaucguucccaa

SEQ ID NO: 2002233 - RNA, 19 nt, Artificial Sequence
  Description of Artificial Sequence: Synthetic oligonucleotide
  Antisense strand to SEQ ID NO: 2002232
uugggaacgauacaaucug

SEQ ID NO: 2002234 - RNA, 19 nt, Artificial Sequence
  Description of Artificial Sequence: Synthetic oligonucleotide
  Sense strand starting at position 3335 of SEQ ID NO: 1880895
auuguaucguucccaaaca

SEQ ID NO: 2002235 - RNA, 19 nt, Artificial Sequence
  Description of Artificial Sequence: Synthetic oligonucleotide
  Antisense strand to SEQ ID NO: 2002234
uguuugggaacgauacaau

SEQ ID NO: 2002236 - RNA, 19 nt, Artificial Sequence
  Description of Artificial Sequence: Synthetic oligonucleotide
  Sense strand starting at position 3355 of SEQ ID NO: 1880895
ugcagaacugcugauaaca

SEQ ID NO: 2002237 - RNA, 19 nt, Artificial Sequence
  Description of Artificial Sequence: Synthetic oligonucleotide
  Antisense strand to SEQ ID NO: 2002236
uguuaucagcaguucugca

SEQ ID NO: 2002238 - RNA, 19 nt, Artificial Sequence
  Description of Artificial Sequence: Synthetic oligonucleotide
  Sense strand starting at position 3695 of SEQ ID NO: 1880895
gaaaguuuauuucccgcuu

SEQ ID NO: 2002239 - RNA, 19 nt, Artificial Sequence
  Description of Artificial Sequence: Synthetic oligonucleotide
  Antisense strand to SEQ ID NO: 2002238
aagcgggaaauaaacuuuc

SEQ ID NO: 2002240 - RNA, 19 nt, Artificial Sequence
  Description of Artificial Sequence: Synthetic oligonucleotide
  Sense strand starting at position 3738 of SEQ ID NO: 1880895
augcuauugguguaaucau

SEQ ID NO: 2002241 - RNA, 19 nt, Artificial Sequence
  Description of Artificial Sequence: Synthetic oligonucleotide
  Antisense strand to SEQ ID NO: 2002240
augauuacaccaauagcau

SEQ ID NO: 2002242 - RNA, 19 nt, Artificial Sequence
  Description of Artificial Sequence: Synthetic oligonucleotide
  Sense strand starting at position 3759 of SEQ ID NO: 1880895
uacaguauugguuguauac

SEQ ID NO: 2002243 - RNA, 19 nt, Artificial Sequence
  Description of Artificial Sequence: Synthetic oligonucleotide
  Antisense strand to SEQ ID NO: 2002242
guauacaaccaauacugua

SEQ ID NO: 2002244 - RNA, 19 nt, Artificial Sequence
  Description of Artificial Sequence: Synthetic oligonucleotide
  Sense strand starting at position 3978 of SEQ ID NO: 1880895
ugauuaagaugcuuaacuc

SEQ ID NO: 2002245 - RNA, 19 nt, Artificial Sequence
  Description of Artificial Sequence: Synthetic oligonucleotide
  Antisense strand to SEQ ID NO: 2002244
gaguuaagcaucuuaauca

SEQ ID NO: 2002246 - RNA, 19 nt, Artificial Sequence
  Description of Artificial Sequence: Synthetic oligonucleotide
  Sense strand starting at position 17 of SEQ ID NO: 1880896
ucaagaggcuagcugaaua

SEQ ID NO: 2002247 - RNA, 19 nt, Artificial Sequence
  Description of Artificial Sequence: Synthetic oligonucleotide
  Antisense strand to SEQ ID NO: 2002246
uauucagcuagccucuuga

SEQ ID NO: 2002248 - RNA, 19 nt, Artificial Sequence
  Description of Artificial Sequence: Synthetic oligonucleotide
  Sense strand starting at position 141 of SEQ ID NO: 1880896
gcauuucgguaacagauca

SEQ ID NO: 2002249 - RNA, 19 nt, Artificial Sequence
  Description of Artificial Sequence: Synthetic oligonucleotide
  Antisense strand to SEQ ID NO: 2002248
ugaucuguuaccgaaaugc

SEQ ID NO: 2002250 - RNA, 19 nt, Artificial Sequence
  Description of Artificial Sequence: Synthetic oligonucleotide
  Sense strand starting at position 159 of SEQ ID NO: 1880896
agcuguucugaacagcauu

SEQ ID NO: 2002251 - RNA, 19 nt, Artificial Sequence
  Description of Artificial Sequence: Synthetic oligonucleotide
  Antisense strand to SEQ ID NO: 2002250
aaugcuguucagaacagcu

SEQ ID NO: 2002252 - RNA, 19 nt, Artificial Sequence
  Description of Artificial Sequence: Synthetic oligonucleotide
  Sense strand starting at position 167 of SEQ ID NO: 1880896
ugaacagcauucucaguuu

SEQ ID NO: 2002253 - RNA, 19 nt, Artificial Sequence
  Description of Artificial Sequence: Synthetic oligonucleotide
  Antisense strand to SEQ ID NO: 2002252
aaacugagaaugcuguuca

SEQ ID NO: 2002254 - RNA, 19 nt, Artificial Sequence
  Description of Artificial Sequence: Synthetic oligonucleotide
  Sense strand starting at position 170 of SEQ ID NO: 1880896
acagcauucucaguuucua

SEQ ID NO: 2002255 - RNA, 19 nt, Artificial Sequence
  Description of Artificial Sequence: Synthetic oligonucleotide
  Antisense strand to SEQ ID NO: 2002254
uagaaacugagaaugcugu

SEQ ID NO: 2002256 - RNA, 19 nt, Artificial Sequence
  Description of Artificial Sequence: Synthetic oligonucleotide
  Sense strand starting at position 198 of SEQ ID NO: 1880896
aguuguaauuggcccaguu

SEQ ID NO: 2002257 - RNA, 19 nt, Artificial Sequence
  Description of Artificial Sequence: Synthetic oligonucleotide
  Antisense strand to SEQ ID NO: 2002256
aacugggccaauuacaacu

SEQ ID NO: 2002258 - RNA, 19 nt, Artificial Sequence
  Description of Artificial Sequence: Synthetic oligonucleotide
  Sense strand starting at position 264 of SEQ ID NO: 1880896
gcaucuggugugcaacuua

SEQ ID NO: 2002259 - RNA, 19 nt, Artificial Sequence
  Description of Artificial Sequence: Synthetic oligonucleotide
  Antisense strand to SEQ ID NO: 2002258
uaaguugcacaccagaugc

SEQ ID NO: 2002260 - RNA, 19 nt, Artificial Sequence
  Description of Artificial Sequence: Synthetic oligonucleotide
  Sense strand starting at position 288 of SEQ ID NO: 1880896
gccaucaagugauauuuac

SEQ ID NO: 2002261 - RNA, 19 nt, Artificial Sequence
  Description of Artificial Sequence: Synthetic oligonucleotide
  Antisense strand to SEQ ID NO: 2002260
guaaauaucacuugauggc

SEQ ID NO: 2002262 - RNA, 19 nt, Artificial Sequence
  Description of Artificial Sequence: Synthetic oligonucleotide
  Sense strand starting at position 401 of SEQ ID NO: 1880896
acaauuccuuccgaaugga

SEQ ID NO: 2002263 - RNA, 19 nt, Artificial Sequence
  Description of Artificial Sequence: Synthetic oligonucleotide
  Antisense strand to SEQ ID NO: 2002262
uccauucggaaggaauugu

SEQ ID NO: 2002264 - RNA, 19 nt, Artificial Sequence
  Description of Artificial Sequence: Synthetic oligonucleotide
  Sense strand starting at position 702 of SEQ ID NO: 1880896
gcacuaagcuuggugugau

SEQ ID NO: 2002265 - RNA, 19 nt, Artificial Sequence
  Description of Artificial Sequence: Synthetic oligonucleotide
  Antisense strand to SEQ ID NO: 2002264
aucacaccaagcuuagugc

SEQ ID NO: 2002266 - RNA, 19 nt, Artificial Sequence
  Description of Artificial Sequence: Synthetic oligonucleotide
  Sense strand starting at position 705 of SEQ ID NO: 1880896
cuaagcuuggugugauucu

SEQ ID NO: 2002267 - RNA, 19 nt, Artificial Sequence
  Description of Artificial Sequence: Synthetic oligonucleotide
  Antisense strand to SEQ ID NO: 2002266
agaaucacaccaagcuuag

SEQ ID NO: 2002268 - RNA, 19 nt, Artificial Sequence
  Description of Artificial Sequence: Synthetic oligonucleotide
  Sense strand starting at position 714 of SEQ ID NO: 1880896
gugugauucugucucucaa

SEQ ID NO: 2002269 - RNA, 19 nt, Artificial Sequence
  Description of Artificial Sequence: Synthetic oligonucleotide
  Antisense strand to SEQ ID NO: 2002268
uugagagacagaaucacac

SEQ ID NO: 2002270 - RNA, 19 nt, Artificial Sequence
  Description of Artificial Sequence: Synthetic oligonucleotide
  Sense strand starting at position 716 of SEQ ID NO: 1880896
gugauucugucucucaauc

SEQ ID NO: 2002271 - RNA, 19 nt, Artificial Sequence
  Description of Artificial Sequence: Synthetic oligonucleotide
  Antisense strand to SEQ ID NO: 2002270
gauugagagacagaaucac

SEQ ID NO: 2002272 - RNA, 19 nt, Artificial Sequence
  Description of Artificial Sequence: Synthetic oligonucleotide
  Sense strand starting at position 787 of SEQ ID NO: 1880896
ccaggauuccucugcacca

SEQ ID NO: 2002273 - RNA, 19 nt, Artificial Sequence
  Description of Artificial Sequence: Synthetic oligonucleotide
  Antisense strand to SEQ ID NO: 2002272
uggugcagaggaauccugg

SEQ ID NO: 2002274 - RNA, 19 nt, Artificial Sequence
  Description of Artificial Sequence: Synthetic oligonucleotide
  Sense strand starting at position 869 of SEQ ID NO: 1880896
gucugauacccaggucuag

SEQ ID NO: 2002275 - RNA, 19 nt, Artificial Sequence
  Description of Artificial Sequence: Synthetic oligonucleotide
  Antisense strand to SEQ ID NO: 2002274
cuagaccuggguaucagac

SEQ ID NO: 2002276 - RNA, 19 nt, Artificial Sequence
  Description of Artificial Sequence: Synthetic oligonucleotide
  Sense strand starting at position 972 of SEQ ID NO: 1880896
agaagcuuucucuggcuau

SEQ ID NO: 2002277 - RNA, 19 nt, Artificial Sequence
  Description of Artificial Sequence: Synthetic oligonucleotide
  Antisense strand to SEQ ID NO: 2002276
auagccagagaaagcuucu

SEQ ID NO: 2002278 - RNA, 19 nt, Artificial Sequence
  Description of Artificial Sequence: Synthetic oligonucleotide
  Sense strand starting at position 1147 of SEQ ID NO: 1880896
ugcacuaauuguuccaaga

SEQ ID NO: 2002279 - RNA, 19 nt, Artificial Sequence
  Description of Artificial Sequence: Synthetic oligonucleotide
  Antisense strand to SEQ ID NO: 2002278
ucuuggaacaauuagugca

SEQ ID NO: 2002280 - RNA, 19 nt, Artificial Sequence
  Description of Artificial Sequence: Synthetic oligonucleotide
  Sense strand starting at position 1182 of SEQ ID NO: 1880896
ucuccuuugcugugguaaa

SEQ ID NO: 2002281 - RNA, 19 nt, Artificial Sequence
  Description of Artificial Sequence: Synthetic oligonucleotide
  Antisense strand to SEQ ID NO: 2002280
uuuaccacagcaaaggaga

SEQ ID NO: 2002282 - RNA, 19 nt, Artificial Sequence
  Description of Artificial Sequence: Synthetic oligonucleotide
  Sense strand starting at position 1234 of SEQ ID NO: 1880896
uagguaagcguccauacuu

SEQ ID NO: 2002283 - RNA, 19 nt, Artificial Sequence
  Description of Artificial Sequence: Synthetic oligonucleotide
  Antisense strand to SEQ ID NO: 2002282
aaguauggacgcuuaccua

SEQ ID NO: 2002284 - RNA, 19 nt, Artificial Sequence
  Description of Artificial Sequence: Synthetic oligonucleotide
  Sense strand starting at position 2287 of SEQ ID NO: 1880896
gggcuauccuucccugaag

SEQ ID NO: 2002285 - RNA, 19 nt, Artificial Sequence
  Description of Artificial Sequence: Synthetic oligonucleotide
  Antisense strand to SEQ ID NO: 2002284
cuucagggaaggauagccc

SEQ ID NO: 2002286 - RNA, 19 nt, Artificial Sequence
  Description of Artificial Sequence: Synthetic oligonucleotide
  Sense strand starting at position 2289 of SEQ ID NO: 1880896
gcuauccuucccugaagga

SEQ ID NO: 2002287 - RNA, 19 nt, Artificial Sequence
  Description of Artificial Sequence: Synthetic oligonucleotide
  Antisense strand to SEQ ID NO: 2002286
uccuucagggaaggauagc

SEQ ID NO: 2002288 - RNA, 19 nt, Artificial Sequence
  Description of Artificial Sequence: Synthetic oligonucleotide
  Sense strand starting at position 2586 of SEQ ID NO: 1880896
uagcguccugugugauuga

SEQ ID NO: 2002289 - RNA, 19 nt, Artificial Sequence
  Description of Artificial Sequence: Synthetic oligonucleotide
  Antisense strand to SEQ ID NO: 2002288
ucaaucacacaggacgcua

SEQ ID NO: 2002290 - RNA, 19 nt, Artificial Sequence
  Description of Artificial Sequence: Synthetic oligonucleotide
  Sense strand starting at position 2589 of SEQ ID NO: 1880896
cguccugugugauugacga

SEQ ID NO: 2002291 - RNA, 19 nt, Artificial Sequence
  Description of Artificial Sequence: Synthetic oligonucleotide
  Antisense strand to SEQ ID NO: 2002290
ucgucaaucacacaggacg

SEQ ID NO: 2002292 - RNA, 19 nt, Artificial Sequence
  Description of Artificial Sequence: Synthetic oligonucleotide
  Sense strand starting at position 2729 of SEQ ID NO: 1880896
agagguuucuaacagugga

SEQ ID NO: 2002293 - RNA, 19 nt, Artificial Sequence
  Description of Artificial Sequence: Synthetic oligonucleotide
  Antisense strand to SEQ ID NO: 2002292
uccacuguuagaaaccucu

SEQ ID NO: 2002294 - RNA, 19 nt, Artificial Sequence
  Description of Artificial Sequence: Synthetic oligonucleotide
  Sense strand starting at position 2733 of SEQ ID NO: 1880896
guuucuaacaguggaguga

SEQ ID NO: 2002295 - RNA, 19 nt, Artificial Sequence
  Description of Artificial Sequence: Synthetic oligonucleotide
  Antisense strand to SEQ ID NO: 2002294
ucacuccacuguuagaaac

SEQ ID NO: 2002296 - RNA, 19 nt, Artificial Sequence
  Description of Artificial Sequence: Synthetic oligonucleotide
  Sense strand starting at position 2737 of SEQ ID NO: 1880896
cuaacaguggagugacuau

SEQ ID NO: 2002297 - RNA, 19 nt, Artificial Sequence
  Description of Artificial Sequence: Synthetic oligonucleotide
  Antisense strand to SEQ ID NO: 2002296
auagucacuccacuguuag

SEQ ID NO: 2002298 - RNA, 19 nt, Artificial Sequence
  Description of Artificial Sequence: Synthetic oligonucleotide
  Sense strand starting at position 2841 of SEQ ID NO: 1880896
ccaugagcccaagaguuua

SEQ ID NO: 2002299 - RNA, 19 nt, Artificial Sequence
  Description of Artificial Sequence: Synthetic oligonucleotide
  Antisense strand to SEQ ID NO: 2002298
uaaacucuugggcucaugg

SEQ ID NO: 2002300 - RNA, 19 nt, Artificial Sequence
  Description of Artificial Sequence: Synthetic oligonucleotide
  Sense strand starting at position 3076 of SEQ ID NO: 1880896
aggcuuuggcucuaaguga

SEQ ID NO: 2002301 - RNA, 19 nt, Artificial Sequence
  Description of Artificial Sequence: Synthetic oligonucleotide
  Antisense strand to SEQ ID NO: 2002300
ucacuuagagccaaagccu

SEQ ID NO: 2002302 - RNA, 19 nt, Artificial Sequence
  Description of Artificial Sequence: Synthetic oligonucleotide
  Sense strand starting at position 3087 of SEQ ID NO: 1880896
cuaagugagucggugggaa

SEQ ID NO: 2002303 - RNA, 19 nt, Artificial Sequence
  Description of Artificial Sequence: Synthetic oligonucleotide
  Antisense strand to SEQ ID NO: 2002302
uucccaccgacucacuuag

SEQ ID NO: 2002304 - RNA, 19 nt, Artificial Sequence
  Description of Artificial Sequence: Synthetic oligonucleotide
  Sense strand starting at position 3394 of SEQ ID NO: 1880896
cagcaagacuguuuccaga

SEQ ID NO: 2002305 - RNA, 19 nt, Artificial Sequence
  Description of Artificial Sequence: Synthetic oligonucleotide
  Antisense strand to SEQ ID NO: 2002304
ucuggaaacagucuugcug

SEQ ID NO: 2002306 - RNA, 19 nt, Artificial Sequence
  Description of Artificial Sequence: Synthetic oligonucleotide
  Sense strand starting at position 3396 of SEQ ID NO: 1880896
gcaagacuguuuccagaaa

SEQ ID NO: 2002307 - RNA, 19 nt, Artificial Sequence
  Description of Artificial Sequence: Synthetic oligonucleotide
  Antisense strand to SEQ ID NO: 2002306
uuucuggaaacagucuugc

SEQ ID NO: 2002308 - RNA, 19 nt, Artificial Sequence
  Description of Artificial Sequence: Synthetic oligonucleotide
  Sense strand starting at position 3440 of SEQ ID NO: 1880896
uuguguuauuucuuguguu

SEQ ID NO: 2002309 - RNA, 19 nt, Artificial Sequence
  Description of Artificial Sequence: Synthetic oligonucleotide
  Antisense strand to SEQ ID NO: 2002308
aacacaagaaauaacacaa

SEQ ID NO: 2002310 - RNA, 19 nt, Artificial Sequence
  Description of Artificial Sequence: Synthetic oligonucleotide
  Sense strand starting at position 3620 of SEQ ID NO: 1880896
uggccuguuucccugacua

SEQ ID NO: 2002311 - RNA, 19 nt, Artificial Sequence
  Description of Artificial Sequence: Synthetic oligonucleotide
  Antisense strand to SEQ ID NO: 2002310
uagucagggaaacaggcca

SEQ ID NO: 2002312 - RNA, 19 nt, Artificial Sequence
  Description of Artificial Sequence: Synthetic oligonucleotide
  Sense strand starting at position 3622 of SEQ ID NO: 1880896
gccuguuucccugacuaag

SEQ ID NO: 2002313 - RNA, 19 nt, Artificial Sequence
  Description of Artificial Sequence: Synthetic oligonucleotide
  Antisense strand to SEQ ID NO: 2002312
cuuagucagggaaacaggc

SEQ ID NO: 2002314 - RNA, 19 nt, Artificial Sequence
  Description of Artificial Sequence: Synthetic oligonucleotide
  Sense strand starting at position 3709 of SEQ ID NO: 1880896
ggaacaugcaggugauuaa

SEQ ID NO: 2002315 - RNA, 19 nt, Artificial Sequence
  Description of Artificial Sequence: Synthetic oligonucleotide
  Antisense strand to SEQ ID NO: 2002314
uuaaucaccugcauguucc

SEQ ID NO: 2002316 - RNA, 19 nt, Artificial Sequence
  Description of Artificial Sequence: Synthetic oligonucleotide
  Sense strand starting at position 3795 of SEQ ID NO: 1880896
ugaagauugcaguguguga

SEQ ID NO: 2002317 - RNA, 19 nt, Artificial Sequence
  Description of Artificial Sequence: Synthetic oligonucleotide
  Antisense strand to SEQ ID NO: 2002316
ucacacacugcaaucuuca

SEQ ID NO: 2002318 - RNA, 19 nt, Artificial Sequence
  Description of Artificial Sequence: Synthetic oligonucleotide
  Sense strand starting at position 3828 of SEQ ID NO: 1880896
uggcgugagcacuugucuu

SEQ ID NO: 2002319 - RNA, 19 nt, Artificial Sequence
  Description of Artificial Sequence: Synthetic oligonucleotide
  Antisense strand to SEQ ID NO: 2002318
aagacaagugcucacgcca

SEQ ID NO: 2002320 - RNA, 19 nt, Artificial Sequence
  Description of Artificial Sequence: Synthetic oligonucleotide
  Sense strand starting at position 3830 of SEQ ID NO: 1880896
gcgugagcacuugucuuac

SEQ ID NO: 2002321 - RNA, 19 nt, Artificial Sequence
  Description of Artificial Sequence: Synthetic oligonucleotide
  Antisense strand to SEQ ID NO: 2002320
guaagacaagugcucacgc

SEQ ID NO: 2002322 - RNA, 19 nt, Artificial Sequence
  Description of Artificial Sequence: Synthetic oligonucleotide
  Sense strand starting at position 3855 of SEQ ID NO: 1880896
gcgucacugucugcagaau

SEQ ID NO: 2002323 - RNA, 19 nt, Artificial Sequence
  Description of Artificial Sequence: Synthetic oligonucleotide
  Antisense strand to SEQ ID NO: 2002322
auucugcagacagugacgc

SEQ ID NO: 2002324 - RNA, 19 nt, Artificial Sequence
  Description of Artificial Sequence: Synthetic oligonucleotide
  Sense strand starting at position 3931 of SEQ ID NO: 1880896
agucauuucuagcuccauu

SEQ ID NO: 2002325 - RNA, 19 nt, Artificial Sequence
  Description of Artificial Sequence: Synthetic oligonucleotide
  Antisense strand to SEQ ID NO: 2002324
aauggagcuagaaaugacu

SEQ ID NO: 2002326 - RNA, 19 nt, Artificial Sequence
  Description of Artificial Sequence: Synthetic oligonucleotide
  Sense strand starting at position 17 of SEQ ID NO: 1880897
ucaagaggcuagcugaaua

SEQ ID NO: 2002327 - RNA, 19 nt, Artificial Sequence
  Description of Artificial Sequence: Synthetic oligonucleotide
  Antisense strand to SEQ ID NO: 2002326
uauucagcuagccucuuga

SEQ ID NO: 2002328 - RNA, 19 nt, Artificial Sequence
  Description of Artificial Sequence: Synthetic oligonucleotide
  Sense strand starting at position 141 of SEQ ID NO: 1880897
gcauuucgguaacagauca

SEQ ID NO: 2002329 - RNA, 19 nt, Artificial Sequence
  Description of Artificial Sequence: Synthetic oligonucleotide
  Antisense strand to SEQ ID NO: 2002328
ugaucuguuaccgaaaugc

SEQ ID NO: 2002330 - RNA, 19 nt, Artificial Sequence
  Description of Artificial Sequence: Synthetic oligonucleotide
  Sense strand starting at position 159 of SEQ ID NO: 1880897
agcuguucugaacagcauu

SEQ ID NO: 2002331 - RNA, 19 nt, Artificial Sequence
  Description of Artificial Sequence: Synthetic oligonucleotide
  Antisense strand to SEQ ID NO: 2002330
aaugcuguucagaacagcu

SEQ ID NO: 2002332 - RNA, 19 nt, Artificial Sequence
  Description of Artificial Sequence: Synthetic oligonucleotide
  Sense strand starting at position 167 of SEQ ID NO: 1880897
ugaacagcauucucaguuu

SEQ ID NO: 2002333 - RNA, 19 nt, Artificial Sequence
  Description of Artificial Sequence: Synthetic oligonucleotide
  Antisense strand to SEQ ID NO: 2002332
aaacugagaaugcuguuca

SEQ ID NO: 2002334 - RNA, 19 nt, Artificial Sequence
  Description of Artificial Sequence: Synthetic oligonucleotide
  Sense strand starting at position 170 of SEQ ID NO: 1880897
acagcauucucaguuucua

SEQ ID NO: 2002335 - RNA, 19 nt, Artificial Sequence
  Description of Artificial Sequence: Synthetic oligonucleotide
  Antisense strand to SEQ ID NO: 2002334
uagaaacugagaaugcugu

SEQ ID NO: 2002336 - RNA, 19 nt, Artificial Sequence
  Description of Artificial Sequence: Synthetic oligonucleotide
  Sense strand starting at position 198 of SEQ ID NO: 1880897
aguuguaauuggcccaguu

SEQ ID NO: 2002337 - RNA, 19 nt, Artificial Sequence
  Description of Artificial Sequence: Synthetic oligonucleotide
  Antisense strand to SEQ ID NO: 2002336
aacugggccaauuacaacu

SEQ ID NO: 2002338 - RNA, 19 nt, Artificial Sequence
  Description of Artificial Sequence: Synthetic oligonucleotide
  Sense strand starting at position 264 of SEQ ID NO: 1880897
gcaucuggugugcaacuua

SEQ ID NO: 2002339 - RNA, 19 nt, Artificial Sequence
  Description of Artificial Sequence: Synthetic oligonucleotide
  Antisense strand to SEQ ID NO: 2002338
uaaguugcacaccagaugc

SEQ ID NO: 2002340 - RNA, 19 nt, Artificial Sequence
  Description of Artificial Sequence: Synthetic oligonucleotide
  Sense strand starting at position 288 of SEQ ID NO: 1880897
gccaucaagugauauuuac

SEQ ID NO: 2002341 - RNA, 19 nt, Artificial Sequence
  Description of Artificial Sequence: Synthetic oligonucleotide
  Antisense strand to SEQ ID NO: 2002340
guaaauaucacuugauggc

SEQ ID NO: 2002342 - RNA, 19 nt, Artificial Sequence
  Description of Artificial Sequence: Synthetic oligonucleotide
  Sense strand starting at position 401 of SEQ ID NO: 1880897
acaauuccuuccgaaugga

SEQ ID NO: 2002343 - RNA, 19 nt, Artificial Sequence
  Description of Artificial Sequence: Synthetic oligonucleotide
  Antisense strand to SEQ ID NO: 2002342
uccauucggaaggaauugu

SEQ ID NO: 2002344 - RNA, 19 nt, Artificial Sequence
  Description of Artificial Sequence: Synthetic oligonucleotide
  Sense strand starting at position 702 of SEQ ID NO: 1880897
gcacuaagcuuggugugau

SEQ ID NO: 2002345 - RNA, 19 nt, Artificial Sequence
  Description of Artificial Sequence: Synthetic oligonucleotide
  Antisense strand to SEQ ID NO: 2002344
aucacaccaagcuuagugc

SEQ ID NO: 2002346 - RNA, 19 nt, Artificial Sequence
  Description of Artificial Sequence: Synthetic oligonucleotide
  Sense strand starting at position 705 of SEQ ID NO: 1880897
cuaagcuuggugugauucu

SEQ ID NO: 2002347 - RNA, 19 nt, Artificial Sequence
  Description of Artificial Sequence: Synthetic oligonucleotide
  Antisense strand to SEQ ID NO: 2002346
agaaucacaccaagcuuag

SEQ ID NO: 2002348 - RNA, 19 nt, Artificial Sequence
  Description of Artificial Sequence: Synthetic oligonucleotide
  Sense strand starting at position 714 of SEQ ID NO: 1880897
gugugauucugucucucaa

SEQ ID NO: 2002349 - RNA, 19 nt, Artificial Sequence
  Description of Artificial Sequence: Synthetic oligonucleotide
  Antisense strand to SEQ ID NO: 2002348
uugagagacagaaucacac

SEQ ID NO: 2002350 - RNA, 19 nt, Artificial Sequence
  Description of Artificial Sequence: Synthetic oligonucleotide
  Sense strand starting at position 716 of SEQ ID NO: 1880897
gugauucugucucucaauc

SEQ ID NO: 2002351 - RNA, 19 nt, Artificial Sequence
  Description of Artificial Sequence: Synthetic oligonucleotide
  Antisense strand to SEQ ID NO: 2002350
gauugagagacagaaucac

SEQ ID NO: 2002352 - RNA, 19 nt, Artificial Sequence
  Description of Artificial Sequence: Synthetic oligonucleotide
  Sense strand starting at position 787 of SEQ ID NO: 1880897
ccaggauuccucugcacca

SEQ ID NO: 2002353 - RNA, 19 nt, Artificial Sequence
  Description of Artificial Sequence: Synthetic oligonucleotide
  Antisense strand to SEQ ID NO: 2002352
uggugcagaggaauccugg

SEQ ID NO: 2002354 - RNA, 19 nt, Artificial Sequence
  Description of Artificial Sequence: Synthetic oligonucleotide
  Sense strand starting at position 869 of SEQ ID NO: 1880897
gucugauacccaggucuag

SEQ ID NO: 2002355 - RNA, 19 nt, Artificial Sequence
  Description of Artificial Sequence: Synthetic oligonucleotide
  Antisense strand to SEQ ID NO: 2002354
cuagaccuggguaucagac

SEQ ID NO: 2002356 - RNA, 19 nt, Artificial Sequence
  Description of Artificial Sequence: Synthetic oligonucleotide
  Sense strand starting at position 972 of SEQ ID NO: 1880897
agaagcuuucucuggcuau

SEQ ID NO: 2002357 - RNA, 19 nt, Artificial Sequence
  Description of Artificial Sequence: Synthetic oligonucleotide
  Antisense strand to SEQ ID NO: 2002356
auagccagagaaagcuucu

SEQ ID NO: 2002358 - RNA, 19 nt, Artificial Sequence
  Description of Artificial Sequence: Synthetic oligonucleotide
  Sense strand starting at position 1147 of SEQ ID NO: 1880897
ugcacuaauuguuccaaga

SEQ ID NO: 2002359 - RNA, 19 nt, Artificial Sequence
  Description of Artificial Sequence: Synthetic oligonucleotide
  Antisense strand to SEQ ID NO: 2002358
ucuuggaacaauuagugca

SEQ ID NO: 2002360 - RNA, 19 nt, Artificial Sequence
  Description of Artificial Sequence: Synthetic oligonucleotide
  Sense strand starting at position 1182 of SEQ ID NO: 1880897
ucuccuuugcugugguaaa

SEQ ID NO: 2002361 - RNA, 19 nt, Artificial Sequence
  Description of Artificial Sequence: Synthetic oligonucleotide
  Antisense strand to SEQ ID NO: 2002360
uuuaccacagcaaaggaga

SEQ ID NO: 2002362 - RNA, 19 nt, Artificial Sequence
  Description of Artificial Sequence: Synthetic oligonucleotide
  Sense strand starting at position 1234 of SEQ ID NO: 1880897
uagguaagcguccauacuu

SEQ ID NO: 2002363 - RNA, 19 nt, Artificial Sequence
  Description of Artificial Sequence: Synthetic oligonucleotide
  Antisense strand to SEQ ID NO: 2002362
aaguauggacgcuuaccua

SEQ ID NO: 2002364 - RNA, 19 nt, Artificial Sequence
  Description of Artificial Sequence: Synthetic oligonucleotide
  Sense strand starting at position 2287 of SEQ ID NO: 1880897
gggcuauccuucccugaag

SEQ ID NO: 2002365 - RNA, 19 nt, Artificial Sequence
  Description of Artificial Sequence: Synthetic oligonucleotide
  Antisense strand to SEQ ID NO: 2002364
cuucagggaaggauagccc

SEQ ID NO: 2002366 - RNA, 19 nt, Artificial Sequence
  Description of Artificial Sequence: Synthetic oligonucleotide
  Sense strand starting at position 2289 of SEQ ID NO: 1880897
gcuauccuucccugaagga

SEQ ID NO: 2002367 - RNA, 19 nt, Artificial Sequence
  Description of Artificial Sequence: Synthetic oligonucleotide
  Antisense strand to SEQ ID NO: 2002366
uccuucagggaaggauagc

SEQ ID NO: 2002368 - RNA, 19 nt, Artificial Sequence
  Description of Artificial Sequence: Synthetic oligonucleotide
  Sense strand starting at position 2586 of SEQ ID NO: 1880897
uagcguccugugugauuga

SEQ ID NO: 2002369 - RNA, 19 nt, Artificial Sequence
  Description of Artificial Sequence: Synthetic oligonucleotide
  Antisense strand to SEQ ID NO: 2002368
ucaaucacacaggacgcua

SEQ ID NO: 2002370 - RNA, 19 nt, Artificial Sequence
  Description of Artificial Sequence: Synthetic oligonucleotide
  Sense strand starting at position 2589 of SEQ ID NO: 1880897
cguccugugugauugacga

SEQ ID NO: 2002371 - RNA, 19 nt, Artificial Sequence
  Description of Artificial Sequence: Synthetic oligonucleotide
  Antisense strand to SEQ ID NO: 2002370
ucgucaaucacacaggacg

SEQ ID NO: 2002372 - RNA, 19 nt, Artificial Sequence
  Description of Artificial Sequence: Synthetic oligonucleotide
  Sense strand starting at position 2729 of SEQ ID NO: 1880897
agagguuucuaacagugga

SEQ ID NO: 2002373 - RNA, 19 nt, Artificial Sequence
  Description of Artificial Sequence: Synthetic oligonucleotide
  Antisense strand to SEQ ID NO: 2002372
uccacuguuagaaaccucu

SEQ ID NO: 2002374 - RNA, 19 nt, Artificial Sequence
  Description of Artificial Sequence: Synthetic oligonucleotide
  Sense strand starting at position 2733 of SEQ ID NO: 1880897
guuucuaacaguggaguga

SEQ ID NO: 2002375 - RNA, 19 nt, Artificial Sequence
  Description of Artificial Sequence: Synthetic oligonucleotide
  Antisense strand to SEQ ID NO: 2002374
ucacuccacuguuagaaac

SEQ ID NO: 2002376 - RNA, 19 nt, Artificial Sequence
  Description of Artificial Sequence: Synthetic oligonucleotide
  Sense strand starting at position 2737 of SEQ ID NO: 1880897
cuaacaguggagugacuau

SEQ ID NO: 2002377 - RNA, 19 nt, Artificial Sequence
  Description of Artificial Sequence: Synthetic oligonucleotide
  Antisense strand to SEQ ID NO: 2002376
auagucacuccacuguuag

SEQ ID NO: 2002378 - RNA, 19 nt, Artificial Sequence
  Description of Artificial Sequence: Synthetic oligonucleotide
  Sense strand starting at position 2841 of SEQ ID NO: 1880897
ccaugagcccaagaguuua

SEQ ID NO: 2002379 - RNA, 19 nt, Artificial Sequence
  Description of Artificial Sequence: Synthetic oligonucleotide
  Antisense strand to SEQ ID NO: 2002378
uaaacucuugggcucaugg

SEQ ID NO: 2002380 - RNA, 19 nt, Artificial Sequence
  Description of Artificial Sequence: Synthetic oligonucleotide
  Sense strand starting at position 3076 of SEQ ID NO: 1880897
aggcuuuggcucuaaguga

SEQ ID NO: 2002381 - RNA, 19 nt, Artificial Sequence
  Description of Artificial Sequence: Synthetic oligonucleotide
  Antisense strand to SEQ ID NO: 2002380
ucacuuagagccaaagccu

SEQ ID NO: 2002382 - RNA, 19 nt, Artificial Sequence
  Description of Artificial Sequence: Synthetic oligonucleotide
  Sense strand starting at position 3087 of SEQ ID NO: 1880897
cuaagugagucggugggaa

SEQ ID NO: 2002383 - RNA, 19 nt, Artificial Sequence
  Description of Artificial Sequence: Synthetic oligonucleotide
  Antisense strand to SEQ ID NO: 2002382
uucccaccgacucacuuag

SEQ ID NO: 2002384 - RNA, 19 nt, Artificial Sequence
  Description of Artificial Sequence: Synthetic oligonucleotide
  Sense strand starting at position 3394 of SEQ ID NO: 1880897
cagcaagacuguuuccaga

SEQ ID NO: 2002385 - RNA, 19 nt, Artificial Sequence
  Description of Artificial Sequence: Synthetic oligonucleotide
  Antisense strand to SEQ ID NO: 2002384
ucuggaaacagucuugcug

SEQ ID NO: 2002386 - RNA, 19 nt, Artificial Sequence
  Description of Artificial Sequence: Synthetic oligonucleotide
  Sense strand starting at position 3396 of SEQ ID NO: 1880897
gcaagacuguuuccagaaa

SEQ ID NO: 2002387 - RNA, 19 nt, Artificial Sequence
  Description of Artificial Sequence: Synthetic oligonucleotide
  Antisense strand to SEQ ID NO: 2002386
uuucuggaaacagucuugc

SEQ ID NO: 2002388 - RNA, 19 nt, Artificial Sequence
  Description of Artificial Sequence: Synthetic oligonucleotide
  Sense strand starting at position 3440 of SEQ ID NO: 1880897
uuguguuauuucuuguguu

SEQ ID NO: 2002389 - RNA, 19 nt, Artificial Sequence
  Description of Artificial Sequence: Synthetic oligonucleotide
  Antisense strand to SEQ ID NO: 2002388
aacacaagaaauaacacaa

SEQ ID NO: 2002390 - RNA, 19 nt, Artificial Sequence
  Description of Artificial Sequence: Synthetic oligonucleotide
  Sense strand starting at position 3620 of SEQ ID NO: 1880897
uggccuguuucccugacua

SEQ ID NO: 2002391 - RNA, 19 nt, Artificial Sequence
  Description of Artificial Sequence: Synthetic oligonucleotide
  Antisense strand to SEQ ID NO: 2002390
uagucagggaaacaggcca

SEQ ID NO: 2002392 - RNA, 19 nt, Artificial Sequence
  Description of Artificial Sequence: Synthetic oligonucleotide
  Sense strand starting at position 3622 of SEQ ID NO: 1880897
gccuguuucccugacuaag

SEQ ID NO: 2002393 - RNA, 19 nt, Artificial Sequence
  Description of Artificial Sequence: Synthetic oligonucleotide
  Antisense strand to SEQ ID NO: 2002392
cuuagucagggaaacaggc

SEQ ID NO: 2002394 - RNA, 19 nt, Artificial Sequence
  Description of Artificial Sequence: Synthetic oligonucleotide
  Sense strand starting at position 3709 of SEQ ID NO: 1880897
ggaacaugcaggugauuaa

SEQ ID NO: 2002395 - RNA, 19 nt, Artificial Sequence
  Description of Artificial Sequence: Synthetic oligonucleotide
  Antisense strand to SEQ ID NO: 2002394
uuaaucaccugcauguucc

SEQ ID NO: 2002396 - RNA, 19 nt, Artificial Sequence
  Description of Artificial Sequence: Synthetic oligonucleotide
  Sense strand starting at position 3795 of SEQ ID NO: 1880897
ugaagauugcaguguguga

SEQ ID NO: 2002397 - RNA, 19 nt, Artificial Sequence
  Description of Artificial Sequence: Synthetic oligonucleotide
  Antisense strand to SEQ ID NO: 2002396
ucacacacugcaaucuuca

SEQ ID NO: 2002398 - RNA, 19 nt, Artificial Sequence
  Description of Artificial Sequence: Synthetic oligonucleotide
  Sense strand starting at position 3828 of SEQ ID NO: 1880897
uggcgugagcacuugucuu

SEQ ID NO: 2002399 - RNA, 19 nt, Artificial Sequence
  Description of Artificial Sequence: Synthetic oligonucleotide
  Antisense strand to SEQ ID NO: 2002398
aagacaagugcucacgcca

SEQ ID NO: 2002400 - RNA, 19 nt, Artificial Sequence
  Description of Artificial Sequence: Synthetic oligonucleotide
  Sense strand starting at position 3830 of SEQ ID NO: 1880897
gcgugagcacuugucuuac

SEQ ID NO: 2002401 - RNA, 19 nt, Artificial Sequence
  Description of Artificial Sequence: Synthetic oligonucleotide
  Antisense strand to SEQ ID NO: 2002400
guaagacaagugcucacgc

SEQ ID NO: 2002402 - RNA, 19 nt, Artificial Sequence
  Description of Artificial Sequence: Synthetic oligonucleotide
  Sense strand starting at position 3855 of SEQ ID NO: 1880897
gcgucacugucugcagaau

SEQ ID NO: 2002403 - RNA, 19 nt, Artificial Sequence
  Description of Artificial Sequence: Synthetic oligonucleotide
  Antisense strand to SEQ ID NO: 2002402
auucugcagacagugacgc

SEQ ID NO: 2002404 - RNA, 19 nt, Artificial Sequence
  Description of Artificial Sequence: Synthetic oligonucleotide
  Sense strand starting at position 3931 of SEQ ID NO: 1880897
agucauuucuagcuccauu

SEQ ID NO: 2002405 - RNA, 19 nt, Artificial Sequence
  Description of Artificial Sequence: Synthetic oligonucleotide
  Antisense strand to SEQ ID NO: 2002404
aauggagcuagaaaugacu

SEQ ID NO: 2002406 - RNA, 19 nt, Artificial Sequence
  Description of Artificial Sequence: Synthetic oligonucleotide
  Sense strand starting at position 37 of SEQ ID NO: 1880898
agcaccauuugagaugaaa

SEQ ID NO: 2002407 - RNA, 19 nt, Artificial Sequence
  Description of Artificial Sequence: Synthetic oligonucleotide
  Antisense strand to SEQ ID NO: 2002406
uuucaucucaaauggugcu

SEQ ID NO: 2002408 - RNA, 19 nt, Artificial Sequence
  Description of Artificial Sequence: Synthetic oligonucleotide
  Sense strand starting at position 146 of SEQ ID NO: 1880898
cagagaagcagacguaaga

SEQ ID NO: 2002409 - RNA, 19 nt, Artificial Sequence
  Description of Artificial Sequence: Synthetic oligonucleotide
  Antisense strand to SEQ ID NO: 2002408
ucuuacgucugcuucucug

SEQ ID NO: 2002410 - RNA, 19 nt, Artificial Sequence
  Description of Artificial Sequence: Synthetic oligonucleotide
  Sense strand starting at position 159 of SEQ ID NO: 1880898
guaagaaucucacugaagu

SEQ ID NO: 2002411 - RNA, 19 nt, Artificial Sequence
  Description of Artificial Sequence: Synthetic oligonucleotide
  Antisense strand to SEQ ID NO: 2002410
acuucagugagauucuuac

SEQ ID NO: 2002412 - RNA, 19 nt, Artificial Sequence
  Description of Artificial Sequence: Synthetic oligonucleotide
  Sense strand starting at position 291 of SEQ ID NO: 1880898
gugccauguggcuuugcau

SEQ ID NO: 2002413 - RNA, 19 nt, Artificial Sequence
  Description of Artificial Sequence: Synthetic oligonucleotide
  Antisense strand to SEQ ID NO: 2002412
augcaaagccacauggcac

SEQ ID NO: 2002414 - RNA, 19 nt, Artificial Sequence
  Description of Artificial Sequence: Synthetic oligonucleotide
  Sense strand starting at position 303 of SEQ ID NO: 1880898
uuugcaugauaagcauuau

SEQ ID NO: 2002415 - RNA, 19 nt, Artificial Sequence
  Description of Artificial Sequence: Synthetic oligonucleotide
  Antisense strand to SEQ ID NO: 2002414
auaaugcuuaucaugcaaa

SEQ ID NO: 2002416 - RNA, 19 nt, Artificial Sequence
  Description of Artificial Sequence: Synthetic oligonucleotide
  Sense strand starting at position 320 of SEQ ID NO: 1880898
auacuugcggcaugaugaa

SEQ ID NO: 2002417 - RNA, 19 nt, Artificial Sequence
  Description of Artificial Sequence: Synthetic oligonucleotide
  Antisense strand to SEQ ID NO: 2002416
uucaucaugccgcaaguau

SEQ ID NO: 2002418 - RNA, 19 nt, Artificial Sequence
  Description of Artificial Sequence: Synthetic oligonucleotide
  Sense strand starting at position 635 of SEQ ID NO: 1880898
uguauuguuacagggaaac

SEQ ID NO: 2002419 - RNA, 19 nt, Artificial Sequence
  Description of Artificial Sequence: Synthetic oligonucleotide
  Antisense strand to SEQ ID NO: 2002418
guuucccuguaacaauaca

SEQ ID NO: 2002420 - RNA, 19 nt, Artificial Sequence
  Description of Artificial Sequence: Synthetic oligonucleotide
  Sense strand starting at position 785 of SEQ ID NO: 1880898
ggucacuuccuuuaauaag

SEQ ID NO: 2002421 - RNA, 19 nt, Artificial Sequence
  Description of Artificial Sequence: Synthetic oligonucleotide
  Antisense strand to SEQ ID NO: 2002420
cuuauuaaaggaagugacc

SEQ ID NO: 2002422 - RNA, 19 nt, Artificial Sequence
  Description of Artificial Sequence: Synthetic oligonucleotide
  Sense strand starting at position 803 of SEQ ID NO: 1880898
guuucauguggccaggagu

SEQ ID NO: 2002423 - RNA, 19 nt, Artificial Sequence
  Description of Artificial Sequence: Synthetic oligonucleotide
  Antisense strand to SEQ ID NO: 2002422
acuccuggccacaugaaac

SEQ ID NO: 2002424 - RNA, 19 nt, Artificial Sequence
  Description of Artificial Sequence: Synthetic oligonucleotide
  Sense strand starting at position 984 of SEQ ID NO: 1880898
ggcuacaauuauuccaagu

SEQ ID NO: 2002425 - RNA, 19 nt, Artificial Sequence
  Description of Artificial Sequence: Synthetic oligonucleotide
  Antisense strand to SEQ ID NO: 2002424
acuuggaauaauuguagcc

SEQ ID NO: 2002426 - RNA, 19 nt, Artificial Sequence
  Description of Artificial Sequence: Synthetic oligonucleotide
  Sense strand starting at position 1008 of SEQ ID NO: 1880898
ggugcuguuaaauagcuau

SEQ ID NO: 2002427 - RNA, 19 nt, Artificial Sequence
  Description of Artificial Sequence: Synthetic oligonucleotide
  Antisense strand to SEQ ID NO: 2002426
auagcuauuuaacagcacc

SEQ ID NO: 2002428 - RNA, 19 nt, Artificial Sequence
  Description of Artificial Sequence: Synthetic oligonucleotide
  Sense strand starting at position 1011 of SEQ ID NO: 1880898
gcuguuaaauagcuauuua

SEQ ID NO: 2002429 - RNA, 19 nt, Artificial Sequence
  Description of Artificial Sequence: Synthetic oligonucleotide
  Antisense strand to SEQ ID NO: 2002428
uaaauagcuauuuaacagc

SEQ ID NO: 2002430 - RNA, 19 nt, Artificial Sequence
  Description of Artificial Sequence: Synthetic oligonucleotide
  Sense strand starting at position 1051 of SEQ ID NO: 1880898
aguguaagauucuugaagg

SEQ ID NO: 2002431 - RNA, 19 nt, Artificial Sequence
  Description of Artificial Sequence: Synthetic oligonucleotide
  Antisense strand to SEQ ID NO: 2002430
ccuucaagaaucuuacacu

SEQ ID NO: 2002432 - RNA, 19 nt, Artificial Sequence
  Description of Artificial Sequence: Synthetic oligonucleotide
  Sense strand starting at position 1219 of SEQ ID NO: 1880898
ugcagauucuggccaagga

SEQ ID NO: 2002433 - RNA, 19 nt, Artificial Sequence
  Description of Artificial Sequence: Synthetic oligonucleotide
  Antisense strand to SEQ ID NO: 2002432
uccuuggccagaaucugca

SEQ ID NO: 2002434 - RNA, 19 nt, Artificial Sequence
  Description of Artificial Sequence: Synthetic oligonucleotide
  Sense strand starting at position 1220 of SEQ ID NO: 1880898
gcagauucuggccaaggaa

SEQ ID NO: 2002435 - RNA, 19 nt, Artificial Sequence
  Description of Artificial Sequence: Synthetic oligonucleotide
  Antisense strand to SEQ ID NO: 2002434
uuccuuggccagaaucugc

SEQ ID NO: 2002436 - RNA, 19 nt, Artificial Sequence
  Description of Artificial Sequence: Synthetic oligonucleotide
  Sense strand starting at position 1462 of SEQ ID NO: 1880898
uucucaacucacugaggau

SEQ ID NO: 2002437 - RNA, 19 nt, Artificial Sequence
  Description of Artificial Sequence: Synthetic oligonucleotide
  Antisense strand to SEQ ID NO: 2002436
auccucagugaguugagaa

SEQ ID NO: 2002438 - RNA, 19 nt, Artificial Sequence
  Description of Artificial Sequence: Synthetic oligonucleotide
  Sense strand starting at position 1475 of SEQ ID NO: 1880898
gaggaucaagcuuggucua

SEQ ID NO: 2002439 - RNA, 19 nt, Artificial Sequence
  Description of Artificial Sequence: Synthetic oligonucleotide
  Antisense strand to SEQ ID NO: 2002438
uagaccaagcuugauccuc

SEQ ID NO: 2002440 - RNA, 19 nt, Artificial Sequence
  Description of Artificial Sequence: Synthetic oligonucleotide
  Sense strand starting at position 1476 of SEQ ID NO: 1880898
aggaucaagcuuggucuaa

SEQ ID NO: 2002441 - RNA, 19 nt, Artificial Sequence
  Description of Artificial Sequence: Synthetic oligonucleotide
  Antisense strand to SEQ ID NO: 2002440
uuagaccaagcuugauccu

SEQ ID NO: 2002442 - RNA, 19 nt, Artificial Sequence
  Description of Artificial Sequence: Synthetic oligonucleotide
  Sense strand starting at position 1477 of SEQ ID NO: 1880898
ggaucaagcuuggucuaaa

SEQ ID NO: 2002443 - RNA, 19 nt, Artificial Sequence
  Description of Artificial Sequence: Synthetic oligonucleotide
  Antisense strand to SEQ ID NO: 2002442
uuuagaccaagcuugaucc

SEQ ID NO: 2002444 - RNA, 19 nt, Artificial Sequence
  Description of Artificial Sequence: Synthetic oligonucleotide
  Sense strand starting at position 1478 of SEQ ID NO: 1880898
gaucaagcuuggucuaaau

SEQ ID NO: 2002445 - RNA, 19 nt, Artificial Sequence
  Description of Artificial Sequence: Synthetic oligonucleotide
  Antisense strand to SEQ ID NO: 2002444
auuuagaccaagcuugauc

SEQ ID NO: 2002446 - RNA, 19 nt, Artificial Sequence
  Description of Artificial Sequence: Synthetic oligonucleotide
  Sense strand starting at position 1489 of SEQ ID NO: 1880898
gucuaaauccaugguagga

SEQ ID NO: 2002447 - RNA, 19 nt, Artificial Sequence
  Description of Artificial Sequence: Synthetic oligonucleotide
  Antisense strand to SEQ ID NO: 2002446
uccuaccauggauuuagac

SEQ ID NO: 2002448 - RNA, 19 nt, Artificial Sequence
  Description of Artificial Sequence: Synthetic oligonucleotide
  Sense strand starting at position 1605 of SEQ ID NO: 1880898
agcgauaccuugccaagaa

SEQ ID NO: 2002449 - RNA, 19 nt, Artificial Sequence
  Description of Artificial Sequence: Synthetic oligonucleotide
  Antisense strand to SEQ ID NO: 2002448
uucuuggcaagguaucgcu

SEQ ID NO: 2002450 - RNA, 19 nt, Artificial Sequence
  Description of Artificial Sequence: Synthetic oligonucleotide
  Sense strand starting at position 2244 of SEQ ID NO: 1880898
aacagucagucggugaaau

SEQ ID NO: 2002451 - RNA, 19 nt, Artificial Sequence
  Description of Artificial Sequence: Synthetic oligonucleotide
  Antisense strand to SEQ ID NO: 2002450
auuucaccgacugacuguu

SEQ ID NO: 2002452 - RNA, 19 nt, Artificial Sequence
  Description of Artificial Sequence: Synthetic oligonucleotide
  Sense strand starting at position 2277 of SEQ ID NO: 1880898
gggacuuacucccuuaaac

SEQ ID NO: 2002453 - RNA, 19 nt, Artificial Sequence
  Description of Artificial Sequence: Synthetic oligonucleotide
  Antisense strand to SEQ ID NO: 2002452
guuuaagggaguaaguccc

SEQ ID NO: 2002454 - RNA, 19 nt, Artificial Sequence
  Description of Artificial Sequence: Synthetic oligonucleotide
  Sense strand starting at position 2451 of SEQ ID NO: 1880898
agccgcuugagcuuucuua

SEQ ID NO: 2002455 - RNA, 19 nt, Artificial Sequence
  Description of Artificial Sequence: Synthetic oligonucleotide
  Antisense strand to SEQ ID NO: 2002454
uaagaaagcucaagcggcu

SEQ ID NO: 2002456 - RNA, 19 nt, Artificial Sequence
  Description of Artificial Sequence: Synthetic oligonucleotide
  Sense strand starting at position 2452 of SEQ ID NO: 1880898
gccgcuugagcuuucuuau

SEQ ID NO: 2002457 - RNA, 19 nt, Artificial Sequence
  Description of Artificial Sequence: Synthetic oligonucleotide
  Antisense strand to SEQ ID NO: 2002456
auaagaaagcucaagcggc

SEQ ID NO: 2002458 - RNA, 19 nt, Artificial Sequence
  Description of Artificial Sequence: Synthetic oligonucleotide
  Sense strand starting at position 2459 of SEQ ID NO: 1880898
gagcuuucuuauucggaca

SEQ ID NO: 2002459 - RNA, 19 nt, Artificial Sequence
  Description of Artificial Sequence: Synthetic oligonucleotide
  Antisense strand to SEQ ID NO: 2002458
uguccgaauaagaaagcuc

SEQ ID NO: 2002460 - RNA, 19 nt, Artificial Sequence
  Description of Artificial Sequence: Synthetic oligonucleotide
  Sense strand starting at position 2558 of SEQ ID NO: 1880898
uggaauagguagcauuuaa

SEQ ID NO: 2002461 - RNA, 19 nt, Artificial Sequence
  Description of Artificial Sequence: Synthetic oligonucleotide
  Antisense strand to SEQ ID NO: 2002460
uuaaaugcuaccuauucca

SEQ ID NO: 2002462 - RNA, 19 nt, Artificial Sequence
  Description of Artificial Sequence: Synthetic oligonucleotide
  Sense strand starting at position 2593 of SEQ ID NO: 1880898
uaccucuuuggaggguaua

SEQ ID NO: 2002463 - RNA, 19 nt, Artificial Sequence
  Description of Artificial Sequence: Synthetic oligonucleotide
  Antisense strand to SEQ ID NO: 2002462
uauacccuccaaagaggua

SEQ ID NO: 2002464 - RNA, 19 nt, Artificial Sequence
  Description of Artificial Sequence: Synthetic oligonucleotide
  Sense strand starting at position 2594 of SEQ ID NO: 1880898
accucuuuggaggguauau

SEQ ID NO: 2002465 - RNA, 19 nt, Artificial Sequence
  Description of Artificial Sequence: Synthetic oligonucleotide
  Antisense strand to SEQ ID NO: 2002464
auauacccuccaaagaggu

SEQ ID NO: 2002466 - RNA, 19 nt, Artificial Sequence
  Description of Artificial Sequence: Synthetic oligonucleotide
  Sense strand starting at position 3585 of SEQ ID NO: 1880898
ccauguguagcagagcauu

SEQ ID NO: 2002467 - RNA, 19 nt, Artificial Sequence
  Description of Artificial Sequence: Synthetic oligonucleotide
  Antisense strand to SEQ ID NO: 2002466
aaugcucugcuacacaugg

SEQ ID NO: 2002468 - RNA, 19 nt, Artificial Sequence
  Description of Artificial Sequence: Synthetic oligonucleotide
  Sense strand starting at position 3621 of SEQ ID NO: 1880898
cugcuuucucuguauauug

SEQ ID NO: 2002469 - RNA, 19 nt, Artificial Sequence
  Description of Artificial Sequence: Synthetic oligonucleotide
  Antisense strand to SEQ ID NO: 2002468
caauauacagagaaagcag

SEQ ID NO: 2002470 - RNA, 19 nt, Artificial Sequence
  Description of Artificial Sequence: Synthetic oligonucleotide
  Sense strand starting at position 3632 of SEQ ID NO: 1880898
guauauugggcucggagag

SEQ ID NO: 2002471 - RNA, 19 nt, Artificial Sequence
  Description of Artificial Sequence: Synthetic oligonucleotide
  Antisense strand to SEQ ID NO: 2002470
cucuccgagcccaauauac

SEQ ID NO: 2002472 - RNA, 19 nt, Artificial Sequence
  Description of Artificial Sequence: Synthetic oligonucleotide
  Sense strand starting at position 3633 of SEQ ID NO: 1880898
uauauugggcucggagagu

SEQ ID NO: 2002473 - RNA, 19 nt, Artificial Sequence
  Description of Artificial Sequence: Synthetic oligonucleotide
  Antisense strand to SEQ ID NO: 2002472
acucuccgagcccaauaua

SEQ ID NO: 2002474 - RNA, 19 nt, Artificial Sequence
  Description of Artificial Sequence: Synthetic oligonucleotide
  Sense strand starting at position 3655 of SEQ ID NO: 1880898
cugggucucuaugugaaua

SEQ ID NO: 2002475 - RNA, 19 nt, Artificial Sequence
  Description of Artificial Sequence: Synthetic oligonucleotide
  Antisense strand to SEQ ID NO: 2002474
uauucacauagagacccag

SEQ ID NO: 2002476 - RNA, 19 nt, Artificial Sequence
  Description of Artificial Sequence: Synthetic oligonucleotide
  Sense strand starting at position 3656 of SEQ ID NO: 1880898
ugggucucuaugugaauau

SEQ ID NO: 2002477 - RNA, 19 nt, Artificial Sequence
  Description of Artificial Sequence: Synthetic oligonucleotide
  Antisense strand to SEQ ID NO: 2002476
auauucacauagagaccca

SEQ ID NO: 2002478 - RNA, 19 nt, Artificial Sequence
  Description of Artificial Sequence: Synthetic oligonucleotide
  Sense strand starting at position 3831 of SEQ ID NO: 1880898
gcauguuuaauugcgaugu

SEQ ID NO: 2002479 - RNA, 19 nt, Artificial Sequence
  Description of Artificial Sequence: Synthetic oligonucleotide
  Antisense strand to SEQ ID NO: 2002478
acaucgcaauuaaacaugc

SEQ ID NO: 2002480 - RNA, 19 nt, Artificial Sequence
  Description of Artificial Sequence: Synthetic oligonucleotide
  Sense strand starting at position 3839 of SEQ ID NO: 1880898
aauugcgauguuugacaca

SEQ ID NO: 2002481 - RNA, 19 nt, Artificial Sequence
  Description of Artificial Sequence: Synthetic oligonucleotide
  Antisense strand to SEQ ID NO: 2002480
ugugucaaacaucgcaauu

SEQ ID NO: 2002482 - RNA, 19 nt, Artificial Sequence
  Description of Artificial Sequence: Synthetic oligonucleotide
  Sense strand starting at position 3920 of SEQ ID NO: 1880898
ugccacucagugggagaau

SEQ ID NO: 2002483 - RNA, 19 nt, Artificial Sequence
  Description of Artificial Sequence: Synthetic oligonucleotide
  Antisense strand to SEQ ID NO: 2002482
auucucccacugaguggca

SEQ ID NO: 2002484 - RNA, 19 nt, Artificial Sequence
  Description of Artificial Sequence: Synthetic oligonucleotide
  Sense strand starting at position 3941 of SEQ ID NO: 1880898
gcagaaccucuaggaucuu

SEQ ID NO: 2002485 - RNA, 19 nt, Artificial Sequence
  Description of Artificial Sequence: Synthetic oligonucleotide
  Antisense strand to SEQ ID NO: 2002484
aagauccuagagguucugc

SEQ ID NO: 2002486 - RNA, 19 nt, Artificial Sequence
  Description of Artificial Sequence: Synthetic oligonucleotide
  Sense strand starting at position 47 of SEQ ID NO: 1880899
aguguuaagaauugcaaag

SEQ ID NO: 2002487 - RNA, 19 nt, Artificial Sequence
  Description of Artificial Sequence: Synthetic oligonucleotide
  Antisense strand to SEQ ID NO: 2002486
cuuugcaauucuuaacacu

SEQ ID NO: 2002488 - RNA, 19 nt, Artificial Sequence
  Description of Artificial Sequence: Synthetic oligonucleotide
  Sense strand starting at position 134 of SEQ ID NO: 1880899
ggaagaugguuccugucaa

SEQ ID NO: 2002489 - RNA, 19 nt, Artificial Sequence
  Description of Artificial Sequence: Synthetic oligonucleotide
  Antisense strand to SEQ ID NO: 2002488
uugacaggaaccaucuucc

SEQ ID NO: 2002490 - RNA, 19 nt, Artificial Sequence
  Description of Artificial Sequence: Synthetic oligonucleotide
  Sense strand starting at position 242 of SEQ ID NO: 1880899
aggugugcuuguacaguga

SEQ ID NO: 2002491 - RNA, 19 nt, Artificial Sequence
  Description of Artificial Sequence: Synthetic oligonucleotide
  Antisense strand to SEQ ID NO: 2002490
ucacuguacaagcacaccu

SEQ ID NO: 2002492 - RNA, 19 nt, Artificial Sequence
  Description of Artificial Sequence: Synthetic oligonucleotide
  Sense strand starting at position 302 of SEQ ID NO: 1880899
guccuaauguguuuaagga

SEQ ID NO: 2002493 - RNA, 19 nt, Artificial Sequence
  Description of Artificial Sequence: Synthetic oligonucleotide
  Antisense strand to SEQ ID NO: 2002492
uccuuaaacacauuaggac

SEQ ID NO: 2002494 - RNA, 19 nt, Artificial Sequence
  Description of Artificial Sequence: Synthetic oligonucleotide
  Sense strand starting at position 303 of SEQ ID NO: 1880899
uccuaauguguuuaaggac

SEQ ID NO: 2002495 - RNA, 19 nt, Artificial Sequence
  Description of Artificial Sequence: Synthetic oligonucleotide
  Antisense strand to SEQ ID NO: 2002494
guccuuaaacacauuagga

SEQ ID NO: 2002496 - RNA, 19 nt, Artificial Sequence
  Description of Artificial Sequence: Synthetic oligonucleotide
  Sense strand starting at position 693 of SEQ ID NO: 1880899
caagucauugugcaguuua

SEQ ID NO: 2002497 - RNA, 19 nt, Artificial Sequence
  Description of Artificial Sequence: Synthetic oligonucleotide
  Antisense strand to SEQ ID NO: 2002496
uaaacugcacaaugacuug

SEQ ID NO: 2002498 - RNA, 19 nt, Artificial Sequence
  Description of Artificial Sequence: Synthetic oligonucleotide
  Sense strand starting at position 766 of SEQ ID NO: 1880899
ucaccaguguugccaaacu

SEQ ID NO: 2002499 - RNA, 19 nt, Artificial Sequence
  Description of Artificial Sequence: Synthetic oligonucleotide
  Antisense strand to SEQ ID NO: 2002498
aguuuggcaacacugguga

SEQ ID NO: 2002500 - RNA, 19 nt, Artificial Sequence
  Description of Artificial Sequence: Synthetic oligonucleotide
  Sense strand starting at position 826 of SEQ ID NO: 1880899
aggugaugaucugucaucu

SEQ ID NO: 2002501 - RNA, 19 nt, Artificial Sequence
  Description of Artificial Sequence: Synthetic oligonucleotide
  Antisense strand to SEQ ID NO: 2002500
agaugacagaucaucaccu

SEQ ID NO: 2002502 - RNA, 19 nt, Artificial Sequence
  Description of Artificial Sequence: Synthetic oligonucleotide
  Sense strand starting at position 1289 of SEQ ID NO: 1880899
acucauagccuguaaguuu

SEQ ID NO: 2002503 - RNA, 19 nt, Artificial Sequence
  Description of Artificial Sequence: Synthetic oligonucleotide
  Antisense strand to SEQ ID NO: 2002502
aaacuuacaggcuaugagu

SEQ ID NO: 2002504 - RNA, 19 nt, Artificial Sequence
  Description of Artificial Sequence: Synthetic oligonucleotide
  Sense strand starting at position 1309 of SEQ ID NO: 1880899
uggugaagcuggucaguaa

SEQ ID NO: 2002505 - RNA, 19 nt, Artificial Sequence
  Description of Artificial Sequence: Synthetic oligonucleotide
  Antisense strand to SEQ ID NO: 2002504
uuacugaccagcuucacca

SEQ ID NO: 2002506 - RNA, 19 nt, Artificial Sequence
  Description of Artificial Sequence: Synthetic oligonucleotide
  Sense strand starting at position 1310 of SEQ ID NO: 1880899
ggugaagcuggucaguaau

SEQ ID NO: 2002507 - RNA, 19 nt, Artificial Sequence
  Description of Artificial Sequence: Synthetic oligonucleotide
  Antisense strand to SEQ ID NO: 2002506
auuacugaccagcuucacc

SEQ ID NO: 2002508 - RNA, 19 nt, Artificial Sequence
  Description of Artificial Sequence: Synthetic oligonucleotide
  Sense strand starting at position 1356 of SEQ ID NO: 1880899
cccagauuccuccgggucu

SEQ ID NO: 2002509 - RNA, 19 nt, Artificial Sequence
  Description of Artificial Sequence: Synthetic oligonucleotide
  Antisense strand to SEQ ID NO: 2002508
agacccggaggaaucuggg

SEQ ID NO: 2002510 - RNA, 19 nt, Artificial Sequence
  Description of Artificial Sequence: Synthetic oligonucleotide
  Sense strand starting at position 1471 of SEQ ID NO: 1880899
uggucucugccgucuuauu

SEQ ID NO: 2002511 - RNA, 19 nt, Artificial Sequence
  Description of Artificial Sequence: Synthetic oligonucleotide
  Antisense strand to SEQ ID NO: 2002510
aauaagacggcagagacca

SEQ ID NO: 2002512 - RNA, 19 nt, Artificial Sequence
  Description of Artificial Sequence: Synthetic oligonucleotide
  Sense strand starting at position 1491 of SEQ ID NO: 1880899
caaauaaguguugaucagu

SEQ ID NO: 2002513 - RNA, 19 nt, Artificial Sequence
  Description of Artificial Sequence: Synthetic oligonucleotide
  Antisense strand to SEQ ID NO: 2002512
acugaucaacacuuauuug

SEQ ID NO: 2002514 - RNA, 19 nt, Artificial Sequence
  Description of Artificial Sequence: Synthetic oligonucleotide
  Sense strand starting at position 1496 of SEQ ID NO: 1880899
aaguguugaucagucggga

SEQ ID NO: 2002515 - RNA, 19 nt, Artificial Sequence
  Description of Artificial Sequence: Synthetic oligonucleotide
  Antisense strand to SEQ ID NO: 2002514
ucccgacugaucaacacuu

SEQ ID NO: 2002516 - RNA, 19 nt, Artificial Sequence
  Description of Artificial Sequence: Synthetic oligonucleotide
  Sense strand starting at position 1499 of SEQ ID NO: 1880899
uguugaucagucgggaaac

SEQ ID NO: 2002517 - RNA, 19 nt, Artificial Sequence
  Description of Artificial Sequence: Synthetic oligonucleotide
  Antisense strand to SEQ ID NO: 2002516
guuucccgacugaucaaca

SEQ ID NO: 2002518 - RNA, 19 nt, Artificial Sequence
  Description of Artificial Sequence: Synthetic oligonucleotide
  Sense strand starting at position 1513 of SEQ ID NO: 1880899
gaaacacgucuuggacacu

SEQ ID NO: 2002519 - RNA, 19 nt, Artificial Sequence
  Description of Artificial Sequence: Synthetic oligonucleotide
  Antisense strand to SEQ ID NO: 2002518
aguguccaagacguguuuc

SEQ ID NO: 2002520 - RNA, 19 nt, Artificial Sequence
  Description of Artificial Sequence: Synthetic oligonucleotide
  Sense strand starting at position 1551 of SEQ ID NO: 1880899
guguacuuguaugcaggaa

SEQ ID NO: 2002521 - RNA, 19 nt, Artificial Sequence
  Description of Artificial Sequence: Synthetic oligonucleotide
  Antisense strand to SEQ ID NO: 2002520
uuccugcauacaaguacac

SEQ ID NO: 2002522 - RNA, 19 nt, Artificial Sequence
  Description of Artificial Sequence: Synthetic oligonucleotide
  Sense strand starting at position 1552 of SEQ ID NO: 1880899
uguacuuguaugcaggaaa

SEQ ID NO: 2002523 - RNA, 19 nt, Artificial Sequence
  Description of Artificial Sequence: Synthetic oligonucleotide
  Antisense strand to SEQ ID NO: 2002522
uuuccugcauacaaguaca

SEQ ID NO: 2002524 - RNA, 19 nt, Artificial Sequence
  Description of Artificial Sequence: Synthetic oligonucleotide
  Sense strand starting at position 1555 of SEQ ID NO: 1880899
acuuguaugcaggaaagca

SEQ ID NO: 2002525 - RNA, 19 nt, Artificial Sequence
  Description of Artificial Sequence: Synthetic oligonucleotide
  Antisense strand to SEQ ID NO: 2002524
ugcuuuccugcauacaagu

SEQ ID NO: 2002526 - RNA, 19 nt, Artificial Sequence
  Description of Artificial Sequence: Synthetic oligonucleotide
  Sense strand starting at position 1644 of SEQ ID NO: 1880899
gcgcuuggauuucuuaaga

SEQ ID NO: 2002527 - RNA, 19 nt, Artificial Sequence
  Description of Artificial Sequence: Synthetic oligonucleotide
  Antisense strand to SEQ ID NO: 2002526
ucuuaagaaauccaagcgc

SEQ ID NO: 2002528 - RNA, 19 nt, Artificial Sequence
  Description of Artificial Sequence: Synthetic oligonucleotide
  Sense strand starting at position 1649 of SEQ ID NO: 1880899
uggauuucuuaagaaacag

SEQ ID NO: 2002529 - RNA, 19 nt, Artificial Sequence
  Description of Artificial Sequence: Synthetic oligonucleotide
  Antisense strand to SEQ ID NO: 2002528
cuguuucuuaagaaaucca

SEQ ID NO: 2002530 - RNA, 19 nt, Artificial Sequence
  Description of Artificial Sequence: Synthetic oligonucleotide
  Sense strand starting at position 1738 of SEQ ID NO: 1880899
gagagagcuuccuagagga

SEQ ID NO: 2002531 - RNA, 19 nt, Artificial Sequence
  Description of Artificial Sequence: Synthetic oligonucleotide
  Antisense strand to SEQ ID NO: 2002530
uccucuaggaagcucucuc

SEQ ID NO: 2002532 - RNA, 19 nt, Artificial Sequence
  Description of Artificial Sequence: Synthetic oligonucleotide
  Sense strand starting at position 2129 of SEQ ID NO: 1880899
ggccgcucggcccuuuaaa

SEQ ID NO: 2002533 - RNA, 19 nt, Artificial Sequence
  Description of Artificial Sequence: Synthetic oligonucleotide
  Antisense strand to SEQ ID NO: 2002532
uuuaaagggccgagcggcc

SEQ ID NO: 2002534 - RNA, 19 nt, Artificial Sequence
  Description of Artificial Sequence: Synthetic oligonucleotide
  Sense strand starting at position 2792 of SEQ ID NO: 1880899
augguuguggcagaaacau

SEQ ID NO: 2002535 - RNA, 19 nt, Artificial Sequence
  Description of Artificial Sequence: Synthetic oligonucleotide
  Antisense strand to SEQ ID NO: 2002534
auguuucugccacaaccau

SEQ ID NO: 2002536 - RNA, 19 nt, Artificial Sequence
  Description of Artificial Sequence: Synthetic oligonucleotide
  Sense strand starting at position 2804 of SEQ ID NO: 1880899
gaaacaucucaagguagcu

SEQ ID NO: 2002537 - RNA, 19 nt, Artificial Sequence
  Description of Artificial Sequence: Synthetic oligonucleotide
  Antisense strand to SEQ ID NO: 2002536
agcuaccuugagauguuuc

SEQ ID NO: 2002538 - RNA, 19 nt, Artificial Sequence
  Description of Artificial Sequence: Synthetic oligonucleotide
  Sense strand starting at position 2923 of SEQ ID NO: 1880899
gccugucagcguucuccau

SEQ ID NO: 2002539 - RNA, 19 nt, Artificial Sequence
  Description of Artificial Sequence: Synthetic oligonucleotide
  Antisense strand to SEQ ID NO: 2002538
auggagaacgcugacaggc

SEQ ID NO: 2002540 - RNA, 19 nt, Artificial Sequence
  Description of Artificial Sequence: Synthetic oligonucleotide
  Sense strand starting at position 2945 of SEQ ID NO: 1880899
uggcauauggacuguguga

SEQ ID NO: 2002541 - RNA, 19 nt, Artificial Sequence
  Description of Artificial Sequence: Synthetic oligonucleotide
  Antisense strand to SEQ ID NO: 2002540
ucacacaguccauaugcca

SEQ ID NO: 2002542 - RNA, 19 nt, Artificial Sequence
  Description of Artificial Sequence: Synthetic oligonucleotide
  Sense strand starting at position 2947 of SEQ ID NO: 1880899
gcauauggacugugugagu

SEQ ID NO: 2002543 - RNA, 19 nt, Artificial Sequence
  Description of Artificial Sequence: Synthetic oligonucleotide
  Antisense strand to SEQ ID NO: 2002542
acucacacaguccauaugc

SEQ ID NO: 2002544 - RNA, 19 nt, Artificial Sequence
  Description of Artificial Sequence: Synthetic oligonucleotide
  Sense strand starting at position 3130 of SEQ ID NO: 1880899
caggguggcccugacaaau

SEQ ID NO: 2002545 - RNA, 19 nt, Artificial Sequence
  Description of Artificial Sequence: Synthetic oligonucleotide
  Antisense strand to SEQ ID NO: 2002544
auuugucagggccacccug

SEQ ID NO: 2002546 - RNA, 19 nt, Artificial Sequence
  Description of Artificial Sequence: Synthetic oligonucleotide
  Sense strand starting at position 3273 of SEQ ID NO: 1880899
gccagaaaucaagguugaa

SEQ ID NO: 2002547 - RNA, 19 nt, Artificial Sequence
  Description of Artificial Sequence: Synthetic oligonucleotide
  Antisense strand to SEQ ID NO: 2002546
uucaaccuugauuucuggc

SEQ ID NO: 2002548 - RNA, 19 nt, Artificial Sequence
  Description of Artificial Sequence: Synthetic oligonucleotide
  Sense strand starting at position 3339 of SEQ ID NO: 1880899
ggugacaguucuguuccca

SEQ ID NO: 2002549 - RNA, 19 nt, Artificial Sequence
  Description of Artificial Sequence: Synthetic oligonucleotide
  Antisense strand to SEQ ID NO: 2002548
ugggaacagaacugucacc

SEQ ID NO: 2002550 - RNA, 19 nt, Artificial Sequence
  Description of Artificial Sequence: Synthetic oligonucleotide
  Sense strand starting at position 3363 of SEQ ID NO: 1880899
augccauggcugugaugaa

SEQ ID NO: 2002551 - RNA, 19 nt, Artificial Sequence
  Description of Artificial Sequence: Synthetic oligonucleotide
  Antisense strand to SEQ ID NO: 2002550
uucaucacagccauggcau

SEQ ID NO: 2002552 - RNA, 19 nt, Artificial Sequence
  Description of Artificial Sequence: Synthetic oligonucleotide
  Sense strand starting at position 3387 of SEQ ID NO: 1880899
auguaugcccuguggagaa

SEQ ID NO: 2002553 - RNA, 19 nt, Artificial Sequence
  Description of Artificial Sequence: Synthetic oligonucleotide
  Antisense strand to SEQ ID NO: 2002552
uucuccacagggcauacau

SEQ ID NO: 2002554 - RNA, 19 nt, Artificial Sequence
  Description of Artificial Sequence: Synthetic oligonucleotide
  Sense strand starting at position 3422 of SEQ ID NO: 1880899
ugcagacaaccuugcucua

SEQ ID NO: 2002555 - RNA, 19 nt, Artificial Sequence
  Description of Artificial Sequence: Synthetic oligonucleotide
  Antisense strand to SEQ ID NO: 2002554
uagagcaagguugucugca

SEQ ID NO: 2002556 - RNA, 19 nt, Artificial Sequence
  Description of Artificial Sequence: Synthetic oligonucleotide
  Sense strand starting at position 3425 of SEQ ID NO: 1880899
agacaaccuugcucuaaag

SEQ ID NO: 2002557 - RNA, 19 nt, Artificial Sequence
  Description of Artificial Sequence: Synthetic oligonucleotide
  Antisense strand to SEQ ID NO: 2002556
cuuuagagcaagguugucu

SEQ ID NO: 2002558 - RNA, 19 nt, Artificial Sequence
  Description of Artificial Sequence: Synthetic oligonucleotide
  Sense strand starting at position 3617 of SEQ ID NO: 1880899
gggaucuucugucccugua

SEQ ID NO: 2002559 - RNA, 19 nt, Artificial Sequence
  Description of Artificial Sequence: Synthetic oligonucleotide
  Antisense strand to SEQ ID NO: 2002558
uacagggacagaagauccc

SEQ ID NO: 2002560 - RNA, 19 nt, Artificial Sequence
  Description of Artificial Sequence: Synthetic oligonucleotide
  Sense strand starting at position 3646 of SEQ ID NO: 1880899
gggagagaguccucuuuga

SEQ ID NO: 2002561 - RNA, 19 nt, Artificial Sequence
  Description of Artificial Sequence: Synthetic oligonucleotide
  Antisense strand to SEQ ID NO: 2002560
ucaaagaggacucucuccc

SEQ ID NO: 2002562 - RNA, 19 nt, Artificial Sequence
  Description of Artificial Sequence: Synthetic oligonucleotide
  Sense strand starting at position 3820 of SEQ ID NO: 1880899
cagguaaggccuggacauu

SEQ ID NO: 2002563 - RNA, 19 nt, Artificial Sequence
  Description of Artificial Sequence: Synthetic oligonucleotide
  Antisense strand to SEQ ID NO: 2002562
aauguccaggccuuaccug

SEQ ID NO: 2002564 - RNA, 19 nt, Artificial Sequence
  Description of Artificial Sequence: Synthetic oligonucleotide
  Sense strand starting at position 3841 of SEQ ID NO: 1880899
gccggucagggagaucuaa

SEQ ID NO: 2002565 - RNA, 19 nt, Artificial Sequence
  Description of Artificial Sequence: Synthetic oligonucleotide
  Antisense strand to SEQ ID NO: 2002564
uuagaucucccugaccggc

SEQ ID NO: 2002566 - RNA, 19 nt, Artificial Sequence
  Description of Artificial Sequence: Synthetic oligonucleotide
  Sense strand starting at position 313 of SEQ ID NO: 1880900
ugaaacugcuguucgaaga

SEQ ID NO: 2002567 - RNA, 19 nt, Artificial Sequence
  Description of Artificial Sequence: Synthetic oligonucleotide
  Antisense strand to SEQ ID NO: 2002566
ucuucgaacagcaguuuca

SEQ ID NO: 2002568 - RNA, 19 nt, Artificial Sequence
  Description of Artificial Sequence: Synthetic oligonucleotide
  Sense strand starting at position 324 of SEQ ID NO: 1880900
uucgaagaccuggguucua

SEQ ID NO: 2002569 - RNA, 19 nt, Artificial Sequence
  Description of Artificial Sequence: Synthetic oligonucleotide
  Antisense strand to SEQ ID NO: 2002568
uagaacccaggucuucgaa

SEQ ID NO: 2002570 - RNA, 19 nt, Artificial Sequence
  Description of Artificial Sequence: Synthetic oligonucleotide
  Sense strand starting at position 388 of SEQ ID NO: 1880900
cucuuacuaucugugugau

SEQ ID NO: 2002571 - RNA, 19 nt, Artificial Sequence
  Description of Artificial Sequence: Synthetic oligonucleotide
  Antisense strand to SEQ ID NO: 2002570
aucacacagauaguaagag

SEQ ID NO: 2002572 - RNA, 19 nt, Artificial Sequence
  Description of Artificial Sequence: Synthetic oligonucleotide
  Sense strand starting at position 394 of SEQ ID NO: 1880900
cuaucugugugaucaucca

SEQ ID NO: 2002573 - RNA, 19 nt, Artificial Sequence
  Description of Artificial Sequence: Synthetic oligonucleotide
  Antisense strand to SEQ ID NO: 2002572
uggaugaucacacagauag

SEQ ID NO: 2002574 - RNA, 19 nt, Artificial Sequence
  Description of Artificial Sequence: Synthetic oligonucleotide
  Sense strand starting at position 485 of SEQ ID NO: 1880900
aggguugcucaaugauuga

SEQ ID NO: 2002575 - RNA, 19 nt, Artificial Sequence
  Description of Artificial Sequence: Synthetic oligonucleotide
  Antisense strand to SEQ ID NO: 2002574
ucaaucauugagcaacccu

SEQ ID NO: 2002576 - RNA, 19 nt, Artificial Sequence
  Description of Artificial Sequence: Synthetic oligonucleotide
  Sense strand starting at position 489 of SEQ ID NO: 1880900
uugcucaaugauugagaca

SEQ ID NO: 2002577 - RNA, 19 nt, Artificial Sequence
  Description of Artificial Sequence: Synthetic oligonucleotide
  Antisense strand to SEQ ID NO: 2002576
ugucucaaucauugagcaa

SEQ ID NO: 2002578 - RNA, 19 nt, Artificial Sequence
  Description of Artificial Sequence: Synthetic oligonucleotide
  Sense strand starting at position 492 of SEQ ID NO: 1880900
cucaaugauugagacaaug

SEQ ID NO: 2002579 - RNA, 19 nt, Artificial Sequence
  Description of Artificial Sequence: Synthetic oligonucleotide
  Antisense strand to SEQ ID NO: 2002578
cauugucucaaucauugag

SEQ ID NO: 2002580 - RNA, 19 nt, Artificial Sequence
  Description of Artificial Sequence: Synthetic oligonucleotide
  Sense strand starting at position 545 of SEQ ID NO: 1880900
caacaaauguagguaguau

SEQ ID NO: 2002581 - RNA, 19 nt, Artificial Sequence
  Description of Artificial Sequence: Synthetic oligonucleotide
  Antisense strand to SEQ ID NO: 2002580
auacuaccuacauuuguug

SEQ ID NO: 2002582 - RNA, 19 nt, Artificial Sequence
  Description of Artificial Sequence: Synthetic oligonucleotide
  Sense strand starting at position 808 of SEQ ID NO: 1880900
cuuccuagagcucaacuga

SEQ ID NO: 2002583 - RNA, 19 nt, Artificial Sequence
  Description of Artificial Sequence: Synthetic oligonucleotide
  Antisense strand to SEQ ID NO: 2002582
ucaguugagcucuaggaag

SEQ ID NO: 2002584 - RNA, 19 nt, Artificial Sequence
  Description of Artificial Sequence: Synthetic oligonucleotide
  Sense strand starting at position 864 of SEQ ID NO: 1880900
gaaucagaucuugguaacg

SEQ ID NO: 2002585 - RNA, 19 nt, Artificial Sequence
  Description of Artificial Sequence: Synthetic oligonucleotide
  Antisense strand to SEQ ID NO: 2002584
cguuaccaagaucugauuc

SEQ ID NO: 2002586 - RNA, 19 nt, Artificial Sequence
  Description of Artificial Sequence: Synthetic oligonucleotide
  Sense strand starting at position 953 of SEQ ID NO: 1880900
gggagcuauuucuagucca

SEQ ID NO: 2002587 - RNA, 19 nt, Artificial Sequence
  Description of Artificial Sequence: Synthetic oligonucleotide
  Antisense strand to SEQ ID NO: 2002586
uggacuagaaauagcuccc

SEQ ID NO: 2002588 - RNA, 19 nt, Artificial Sequence
  Description of Artificial Sequence: Synthetic oligonucleotide
  Sense strand starting at position 1118 of SEQ ID NO: 1880900
caugcugugagcgaugaca

SEQ ID NO: 2002589 - RNA, 19 nt, Artificial Sequence
  Description of Artificial Sequence: Synthetic oligonucleotide
  Antisense strand to SEQ ID NO: 2002588
ugucaucgcucacagcaug

SEQ ID NO: 2002590 - RNA, 19 nt, Artificial Sequence
  Description of Artificial Sequence: Synthetic oligonucleotide
  Sense strand starting at position 1120 of SEQ ID NO: 1880900
ugcugugagcgaugacaga

SEQ ID NO: 2002591 - RNA, 19 nt, Artificial Sequence
  Description of Artificial Sequence: Synthetic oligonucleotide
  Antisense strand to SEQ ID NO: 2002590
ucugucaucgcucacagca

SEQ ID NO: 2002592 - RNA, 19 nt, Artificial Sequence
  Description of Artificial Sequence: Synthetic oligonucleotide
  Sense strand starting at position 1311 of SEQ ID NO: 1880900
agaguuaaacgcugaguaa

SEQ ID NO: 2002593 - RNA, 19 nt, Artificial Sequence
  Description of Artificial Sequence: Synthetic oligonucleotide
  Antisense strand to SEQ ID NO: 2002592
uuacucagcguuuaacucu

SEQ ID NO: 2002594 - RNA, 19 nt, Artificial Sequence
  Description of Artificial Sequence: Synthetic oligonucleotide
  Sense strand starting at position 1312 of SEQ ID NO: 1880900
gaguuaaacgcugaguaau

SEQ ID NO: 2002595 - RNA, 19 nt, Artificial Sequence
  Description of Artificial Sequence: Synthetic oligonucleotide
  Antisense strand to SEQ ID NO: 2002594
auuacucagcguuuaacuc

SEQ ID NO: 2002596 - RNA, 19 nt, Artificial Sequence
  Description of Artificial Sequence: Synthetic oligonucleotide
  Sense strand starting at position 1314 of SEQ ID NO: 1880900
guuaaacgcugaguaauuu

SEQ ID NO: 2002597 - RNA, 19 nt, Artificial Sequence
  Description of Artificial Sequence: Synthetic oligonucleotide
  Antisense strand to SEQ ID NO: 2002596
aaauuacucagcguuuaac

SEQ ID NO: 2002598 - RNA, 19 nt, Artificial Sequence
  Description of Artificial Sequence: Synthetic oligonucleotide
  Sense strand starting at position 1365 of SEQ ID NO: 1880900
ugccaauggccacaguauu

SEQ ID NO: 2002599 - RNA, 19 nt, Artificial Sequence
  Description of Artificial Sequence: Synthetic oligonucleotide
  Antisense strand to SEQ ID NO: 2002598
aauacuguggccauuggca

SEQ ID NO: 2002600 - RNA, 19 nt, Artificial Sequence
  Description of Artificial Sequence: Synthetic oligonucleotide
  Sense strand starting at position 2264 of SEQ ID NO: 1880900
gcuggauucguuucgcuga

SEQ ID NO: 2002601 - RNA, 19 nt, Artificial Sequence
  Description of Artificial Sequence: Synthetic oligonucleotide
  Antisense strand to SEQ ID NO: 2002600
ucagcgaaacgaauccagc

SEQ ID NO: 2002602 - RNA, 19 nt, Artificial Sequence
  Description of Artificial Sequence: Synthetic oligonucleotide
  Sense strand starting at position 2416 of SEQ ID NO: 1880900
uugaaugccugccucagaa

SEQ ID NO: 2002603 - RNA, 19 nt, Artificial Sequence
  Description of Artificial Sequence: Synthetic oligonucleotide
  Antisense strand to SEQ ID NO: 2002602
uucugaggcaggcauucaa

SEQ ID NO: 2002604 - RNA, 19 nt, Artificial Sequence
  Description of Artificial Sequence: Synthetic oligonucleotide
  Sense strand starting at position 2476 of SEQ ID NO: 1880900
uuagaauaucggcagcgaa

SEQ ID NO: 2002605 - RNA, 19 nt, Artificial Sequence
  Description of Artificial Sequence: Synthetic oligonucleotide
  Antisense strand to SEQ ID NO: 2002604
uucgcugccgauauucuaa

SEQ ID NO: 2002606 - RNA, 19 nt, Artificial Sequence
  Description of Artificial Sequence: Synthetic oligonucleotide
  Sense strand starting at position 2744 of SEQ ID NO: 1880900
uuaugagugcuguacugau

SEQ ID NO: 2002607 - RNA, 19 nt, Artificial Sequence
  Description of Artificial Sequence: Synthetic oligonucleotide
  Antisense strand to SEQ ID NO: 2002606
aucaguacagcacucauaa

SEQ ID NO: 2002608 - RNA, 19 nt, Artificial Sequence
  Description of Artificial Sequence: Synthetic oligonucleotide
  Sense strand starting at position 2748 of SEQ ID NO: 1880900
gagugcuguacugauugca

SEQ ID NO: 2002609 - RNA, 19 nt, Artificial Sequence
  Description of Artificial Sequence: Synthetic oligonucleotide
  Antisense strand to SEQ ID NO: 2002608
ugcaaucaguacagcacuc

SEQ ID NO: 2002610 - RNA, 19 nt, Artificial Sequence
  Description of Artificial Sequence: Synthetic oligonucleotide
  Sense strand starting at position 2757 of SEQ ID NO: 1880900
acugauugcauaggaggua

SEQ ID NO: 2002611 - RNA, 19 nt, Artificial Sequence
  Description of Artificial Sequence: Synthetic oligonucleotide
  Antisense strand to SEQ ID NO: 2002610
uaccuccuaugcaaucagu

SEQ ID NO: 2002612 - RNA, 19 nt, Artificial Sequence
  Description of Artificial Sequence: Synthetic oligonucleotide
  Sense strand starting at position 2766 of SEQ ID NO: 1880900
auaggagguaccuguguuu

SEQ ID NO: 2002613 - RNA, 19 nt, Artificial Sequence
  Description of Artificial Sequence: Synthetic oligonucleotide
  Antisense strand to SEQ ID NO: 2002612
aaacacagguaccuccuau

SEQ ID NO: 2002614 - RNA, 19 nt, Artificial Sequence
  Description of Artificial Sequence: Synthetic oligonucleotide
  Sense strand starting at position 2769 of SEQ ID NO: 1880900
ggagguaccuguguuuaaa

SEQ ID NO: 2002615 - RNA, 19 nt, Artificial Sequence
  Description of Artificial Sequence: Synthetic oligonucleotide
  Antisense strand to SEQ ID NO: 2002614
uuuaaacacagguaccucc

SEQ ID NO: 2002616 - RNA, 19 nt, Artificial Sequence
  Description of Artificial Sequence: Synthetic oligonucleotide
  Sense strand starting at position 2818 of SEQ ID NO: 1880900
ggagauguaucagaagauc

SEQ ID NO: 2002617 - RNA, 19 nt, Artificial Sequence
  Description of Artificial Sequence: Synthetic oligonucleotide
  Antisense strand to SEQ ID NO: 2002616
gaucuucugauacaucucc

SEQ ID NO: 2002618 - RNA, 19 nt, Artificial Sequence
  Description of Artificial Sequence: Synthetic oligonucleotide
  Sense strand starting at position 2848 of SEQ ID NO: 1880900
ggaagcuugucauuggauc

SEQ ID NO: 2002619 - RNA, 19 nt, Artificial Sequence
  Description of Artificial Sequence: Synthetic oligonucleotide
  Antisense strand to SEQ ID NO: 2002618
gauccaaugacaagcuucc

SEQ ID NO: 2002620 - RNA, 19 nt, Artificial Sequence
  Description of Artificial Sequence: Synthetic oligonucleotide
  Sense strand starting at position 2849 of SEQ ID NO: 1880900
gaagcuugucauuggaucu

SEQ ID NO: 2002621 - RNA, 19 nt, Artificial Sequence
  Description of Artificial Sequence: Synthetic oligonucleotide
  Antisense strand to SEQ ID NO: 2002620
agauccaaugacaagcuuc

SEQ ID NO: 2002622 - RNA, 19 nt, Artificial Sequence
  Description of Artificial Sequence: Synthetic oligonucleotide
  Sense strand starting at position 3153 of SEQ ID NO: 1880900
gugcaaaugaugugauucu

SEQ ID NO: 2002623 - RNA, 19 nt, Artificial Sequence
  Description of Artificial Sequence: Synthetic oligonucleotide
  Antisense strand to SEQ ID NO: 2002622
agaaucacaucauuugcac

SEQ ID NO: 2002624 - RNA, 19 nt, Artificial Sequence
  Description of Artificial Sequence: Synthetic oligonucleotide
  Sense strand starting at position 3209 of SEQ ID NO: 1880900
uguugagaaucccugacua

SEQ ID NO: 2002625 - RNA, 19 nt, Artificial Sequence
  Description of Artificial Sequence: Synthetic oligonucleotide
  Antisense strand to SEQ ID NO: 2002624
uagucagggauucucaaca

SEQ ID NO: 2002626 - RNA, 19 nt, Artificial Sequence
  Description of Artificial Sequence: Synthetic oligonucleotide
  Sense strand starting at position 3271 of SEQ ID NO: 1880900
augcaugcugcccauagau

SEQ ID NO: 2002627 - RNA, 19 nt, Artificial Sequence
  Description of Artificial Sequence: Synthetic oligonucleotide
  Antisense strand to SEQ ID NO: 2002626
aucuaugggcagcaugcau

SEQ ID NO: 2002628 - RNA, 19 nt, Artificial Sequence
  Description of Artificial Sequence: Synthetic oligonucleotide
  Sense strand starting at position 3321 of SEQ ID NO: 1880900
cugacucugacguguccaa

SEQ ID NO: 2002629 - RNA, 19 nt, Artificial Sequence
  Description of Artificial Sequence: Synthetic oligonucleotide
  Antisense strand to SEQ ID NO: 2002628
uuggacacgucagagucag

SEQ ID NO: 2002630 - RNA, 19 nt, Artificial Sequence
  Description of Artificial Sequence: Synthetic oligonucleotide
  Sense strand starting at position 3622 of SEQ ID NO: 1880900
ugaagcuucuaggcggauu

SEQ ID NO: 2002631 - RNA, 19 nt, Artificial Sequence
  Description of Artificial Sequence: Synthetic oligonucleotide
  Antisense strand to SEQ ID NO: 2002630
aauccgccuagaagcuuca

SEQ ID NO: 2002632 - RNA, 19 nt, Artificial Sequence
  Description of Artificial Sequence: Synthetic oligonucleotide
  Sense strand starting at position 3623 of SEQ ID NO: 1880900
gaagcuucuaggcggauuu

SEQ ID NO: 2002633 - RNA, 19 nt, Artificial Sequence
  Description of Artificial Sequence: Synthetic oligonucleotide
  Antisense strand to SEQ ID NO: 2002632
aaauccgccuagaagcuuc

SEQ ID NO: 2002634 - RNA, 19 nt, Artificial Sequence
  Description of Artificial Sequence: Synthetic oligonucleotide
  Sense strand starting at position 3671 of SEQ ID NO: 1880900
guugauagguauccuauua

SEQ ID NO: 2002635 - RNA, 19 nt, Artificial Sequence
  Description of Artificial Sequence: Synthetic oligonucleotide
  Antisense strand to SEQ ID NO: 2002634
uaauaggauaccuaucaac

SEQ ID NO: 2002636 - RNA, 19 nt, Artificial Sequence
  Description of Artificial Sequence: Synthetic oligonucleotide
  Sense strand starting at position 3717 of SEQ ID NO: 1880900
auuugccauuucuguacua

SEQ ID NO: 2002637 - RNA, 19 nt, Artificial Sequence
  Description of Artificial Sequence: Synthetic oligonucleotide
  Antisense strand to SEQ ID NO: 2002636
uaguacagaaauggcaaau

SEQ ID NO: 2002638 - RNA, 19 nt, Artificial Sequence
  Description of Artificial Sequence: Synthetic oligonucleotide
  Sense strand starting at position 3794 of SEQ ID NO: 1880900
caacuucugcccuguggga

SEQ ID NO: 2002639 - RNA, 19 nt, Artificial Sequence
  Description of Artificial Sequence: Synthetic oligonucleotide
  Antisense strand to SEQ ID NO: 2002638
ucccacagggcagaaguug

SEQ ID NO: 2002640 - RNA, 19 nt, Artificial Sequence
  Description of Artificial Sequence: Synthetic oligonucleotide
  Sense strand starting at position 3796 of SEQ ID NO: 1880900
acuucugcccugugggauu

SEQ ID NO: 2002641 - RNA, 19 nt, Artificial Sequence
  Description of Artificial Sequence: Synthetic oligonucleotide
  Antisense strand to SEQ ID NO: 2002640
aaucccacagggcagaagu

SEQ ID NO: 2002642 - RNA, 19 nt, Artificial Sequence
  Description of Artificial Sequence: Synthetic oligonucleotide
  Sense strand starting at position 3835 of SEQ ID NO: 1880900
agcagcugcaguugaaaua

SEQ ID NO: 2002643 - RNA, 19 nt, Artificial Sequence
  Description of Artificial Sequence: Synthetic oligonucleotide
  Antisense strand to SEQ ID NO: 2002642
uauuucaacugcagcugcu

SEQ ID NO: 2002644 - RNA, 19 nt, Artificial Sequence
  Description of Artificial Sequence: Synthetic oligonucleotide
  Sense strand starting at position 3887 of SEQ ID NO: 1880900
guuggugucccaggacacu

SEQ ID NO: 2002645 - RNA, 19 nt, Artificial Sequence
  Description of Artificial Sequence: Synthetic oligonucleotide
  Antisense strand to SEQ ID NO: 2002644
aguguccugggacaccaac

SEQ ID NO: 2002646 - RNA, 19 nt, Artificial Sequence
  Description of Artificial Sequence: Synthetic oligonucleotide
  Sense strand starting at position 50 of SEQ ID NO: 1880901
uugugugcacucuaugaaa

SEQ ID NO: 2002647 - RNA, 19 nt, Artificial Sequence
  Description of Artificial Sequence: Synthetic oligonucleotide
  Antisense strand to SEQ ID NO: 2002646
uuucauagagugcacacaa

SEQ ID NO: 2002648 - RNA, 19 nt, Artificial Sequence
  Description of Artificial Sequence: Synthetic oligonucleotide
  Sense strand starting at position 182 of SEQ ID NO: 1880901
ugagaaggguaagcauuaa

SEQ ID NO: 2002649 - RNA, 19 nt, Artificial Sequence
  Description of Artificial Sequence: Synthetic oligonucleotide
  Antisense strand to SEQ ID NO: 2002648
uuaaugcuuacccuucuca

SEQ ID NO: 2002650 - RNA, 19 nt, Artificial Sequence
  Description of Artificial Sequence: Synthetic oligonucleotide
  Sense strand starting at position 217 of SEQ ID NO: 1880901
ggaucaugaccaggugugu

SEQ ID NO: 2002651 - RNA, 19 nt, Artificial Sequence
  Description of Artificial Sequence: Synthetic oligonucleotide
  Antisense strand to SEQ ID NO: 2002650
acacaccuggucaugaucc

SEQ ID NO: 2002652 - RNA, 19 nt, Artificial Sequence
  Description of Artificial Sequence: Synthetic oligonucleotide
  Sense strand starting at position 487 of SEQ ID NO: 1880901
cucagacugccauaacgaa

SEQ ID NO: 2002653 - RNA, 19 nt, Artificial Sequence
  Description of Artificial Sequence: Synthetic oligonucleotide
  Antisense strand to SEQ ID NO: 2002652
uucguuauggcagucugag

SEQ ID NO: 2002654 - RNA, 19 nt, Artificial Sequence
  Description of Artificial Sequence: Synthetic oligonucleotide
  Sense strand starting at position 615 of SEQ ID NO: 1880901
ucaguuugcagauaggcau

SEQ ID NO: 2002655 - RNA, 19 nt, Artificial Sequence
  Description of Artificial Sequence: Synthetic oligonucleotide
  Antisense strand to SEQ ID NO: 2002654
augccuaucugcaaacuga

SEQ ID NO: 2002656 - RNA, 19 nt, Artificial Sequence
  Description of Artificial Sequence: Synthetic oligonucleotide
  Sense strand starting at position 797 of SEQ ID NO: 1880901
gacagucaccuuggugauu

SEQ ID NO: 2002657 - RNA, 19 nt, Artificial Sequence
  Description of Artificial Sequence: Synthetic oligonucleotide
  Antisense strand to SEQ ID NO: 2002656
aaucaccaaggugacuguc

SEQ ID NO: 2002658 - RNA, 19 nt, Artificial Sequence
  Description of Artificial Sequence: Synthetic oligonucleotide
  Sense strand starting at position 798 of SEQ ID NO: 1880901
acagucaccuuggugauua

SEQ ID NO: 2002659 - RNA, 19 nt, Artificial Sequence
  Description of Artificial Sequence: Synthetic oligonucleotide
  Antisense strand to SEQ ID NO: 2002658
uaaucaccaaggugacugu

SEQ ID NO: 2002660 - RNA, 19 nt, Artificial Sequence
  Description of Artificial Sequence: Synthetic oligonucleotide
  Sense strand starting at position 1100 of SEQ ID NO: 1880901
gacucuuaagcucaaguga

SEQ ID NO: 2002661 - RNA, 19 nt, Artificial Sequence
  Description of Artificial Sequence: Synthetic oligonucleotide
  Antisense strand to SEQ ID NO: 2002660
ucacuugagcuuaagaguc

SEQ ID NO: 2002662 - RNA, 19 nt, Artificial Sequence
  Description of Artificial Sequence: Synthetic oligonucleotide
  Sense strand starting at position 1327 of SEQ ID NO: 1880901
uaggauguggacugacauu

SEQ ID NO: 2002663 - RNA, 19 nt, Artificial Sequence
  Description of Artificial Sequence: Synthetic oligonucleotide
  Antisense strand to SEQ ID NO: 2002662
aaugucaguccacauccua

SEQ ID NO: 2002664 - RNA, 19 nt, Artificial Sequence
  Description of Artificial Sequence: Synthetic oligonucleotide
  Sense strand starting at position 1489 of SEQ ID NO: 1880901
augagauucuggcugacug

SEQ ID NO: 2002665 - RNA, 19 nt, Artificial Sequence
  Description of Artificial Sequence: Synthetic oligonucleotide
  Antisense strand to SEQ ID NO: 2002664
cagucagccagaaucucau

SEQ ID NO: 2002666 - RNA, 19 nt, Artificial Sequence
  Description of Artificial Sequence: Synthetic oligonucleotide
  Sense strand starting at position 1509 of SEQ ID NO: 1880901
aggagucacuaggcuuuau

SEQ ID NO: 2002667 - RNA, 19 nt, Artificial Sequence
  Description of Artificial Sequence: Synthetic oligonucleotide
  Antisense strand to SEQ ID NO: 2002666
auaaagccuagugacuccu

SEQ ID NO: 2002668 - RNA, 19 nt, Artificial Sequence
  Description of Artificial Sequence: Synthetic oligonucleotide
  Sense strand starting at position 1518 of SEQ ID NO: 1880901
uaggcuuuaucugugagga

SEQ ID NO: 2002669 - RNA, 19 nt, Artificial Sequence
  Description of Artificial Sequence: Synthetic oligonucleotide
  Antisense strand to SEQ ID NO: 2002668
uccucacagauaaagccua

SEQ ID NO: 2002670 - RNA, 19 nt, Artificial Sequence
  Description of Artificial Sequence: Synthetic oligonucleotide
  Sense strand starting at position 1519 of SEQ ID NO: 1880901
aggcuuuaucugugaggau

SEQ ID NO: 2002671 - RNA, 19 nt, Artificial Sequence
  Description of Artificial Sequence: Synthetic oligonucleotide
  Antisense strand to SEQ ID NO: 2002670
auccucacagauaaagccu

SEQ ID NO: 2002672 - RNA, 19 nt, Artificial Sequence
  Description of Artificial Sequence: Synthetic oligonucleotide
  Sense strand starting at position 1601 of SEQ ID NO: 1880901
uuccuagaacugugagaga

SEQ ID NO: 2002673 - RNA, 19 nt, Artificial Sequence
  Description of Artificial Sequence: Synthetic oligonucleotide
  Antisense strand to SEQ ID NO: 2002672
ucucucacaguucuaggaa

SEQ ID NO: 2002674 - RNA, 19 nt, Artificial Sequence
  Description of Artificial Sequence: Synthetic oligonucleotide
  Sense strand starting at position 1768 of SEQ ID NO: 1880901
uuaggagacugucuagaac

SEQ ID NO: 2002675 - RNA, 19 nt, Artificial Sequence
  Description of Artificial Sequence: Synthetic oligonucleotide
  Antisense strand to SEQ ID NO: 2002674
guucuagacagucuccuaa

SEQ ID NO: 2002676 - RNA, 19 nt, Artificial Sequence
  Description of Artificial Sequence: Synthetic oligonucleotide
  Sense strand starting at position 1986 of SEQ ID NO: 1880901
aguuauuaggacugacaac

SEQ ID NO: 2002677 - RNA, 19 nt, Artificial Sequence
  Description of Artificial Sequence: Synthetic oligonucleotide
  Antisense strand to SEQ ID NO: 2002676
guugucaguccuaauaacu

SEQ ID NO: 2002678 - RNA, 19 nt, Artificial Sequence
  Description of Artificial Sequence: Synthetic oligonucleotide
  Sense strand starting at position 2022 of SEQ ID NO: 1880901
cuggcuuucugauucugaa

SEQ ID NO: 2002679 - RNA, 19 nt, Artificial Sequence
  Description of Artificial Sequence: Synthetic oligonucleotide
  Antisense strand to SEQ ID NO: 2002678
uucagaaucagaaagccag

SEQ ID NO: 2002680 - RNA, 19 nt, Artificial Sequence
  Description of Artificial Sequence: Synthetic oligonucleotide
  Sense strand starting at position 2047 of SEQ ID NO: 1880901
gggauagaauaacauaaug

SEQ ID NO: 2002681 - RNA, 19 nt, Artificial Sequence
  Description of Artificial Sequence: Synthetic oligonucleotide
  Antisense strand to SEQ ID NO: 2002680
cauuauguuauucuauccc

SEQ ID NO: 2002682 - RNA, 19 nt, Artificial Sequence
  Description of Artificial Sequence: Synthetic oligonucleotide
  Sense strand starting at position 2059 of SEQ ID NO: 1880901
cauaaugaagcuugggauu

SEQ ID NO: 2002683 - RNA, 19 nt, Artificial Sequence
  Description of Artificial Sequence: Synthetic oligonucleotide
  Antisense strand to SEQ ID NO: 2002682
aaucccaagcuucauuaug

SEQ ID NO: 2002684 - RNA, 19 nt, Artificial Sequence
  Description of Artificial Sequence: Synthetic oligonucleotide
  Sense strand starting at position 2062 of SEQ ID NO: 1880901
aaugaagcuugggauuuaa

SEQ ID NO: 2002685 - RNA, 19 nt, Artificial Sequence
  Description of Artificial Sequence: Synthetic oligonucleotide
  Antisense strand to SEQ ID NO: 2002684
uuaaaucccaagcuucauu

SEQ ID NO: 2002686 - RNA, 19 nt, Artificial Sequence
  Description of Artificial Sequence: Synthetic oligonucleotide
  Sense strand starting at position 2111 of SEQ ID NO: 1880901
aggugacuucuguaccaaa

SEQ ID NO: 2002687 - RNA, 19 nt, Artificial Sequence
  Description of Artificial Sequence: Synthetic oligonucleotide
  Antisense strand to SEQ ID NO: 2002686
uuugguacagaagucaccu

SEQ ID NO: 2002688 - RNA, 19 nt, Artificial Sequence
  Description of Artificial Sequence: Synthetic oligonucleotide
  Sense strand starting at position 2141 of SEQ ID NO: 1880901
uuuguaaucccauaguuuc

SEQ ID NO: 2002689 - RNA, 19 nt, Artificial Sequence
  Description of Artificial Sequence: Synthetic oligonucleotide
  Antisense strand to SEQ ID NO: 2002688
gaaacuaugggauuacaaa

SEQ ID NO: 2002690 - RNA, 19 nt, Artificial Sequence
  Description of Artificial Sequence: Synthetic oligonucleotide
  Sense strand starting at position 2257 of SEQ ID NO: 1880901
auggcauucugaucaaacu

SEQ ID NO: 2002691 - RNA, 19 nt, Artificial Sequence
  Description of Artificial Sequence: Synthetic oligonucleotide
  Antisense strand to SEQ ID NO: 2002690
aguuugaucagaaugccau

SEQ ID NO: 2002692 - RNA, 19 nt, Artificial Sequence
  Description of Artificial Sequence: Synthetic oligonucleotide
  Sense strand starting at position 2443 of SEQ ID NO: 1880901
aaaguuauugcuggaauuc

SEQ ID NO: 2002693 - RNA, 19 nt, Artificial Sequence
  Description of Artificial Sequence: Synthetic oligonucleotide
  Antisense strand to SEQ ID NO: 2002692
gaauuccagcaauaacuuu

SEQ ID NO: 2002694 - RNA, 19 nt, Artificial Sequence
  Description of Artificial Sequence: Synthetic oligonucleotide
  Sense strand starting at position 2444 of SEQ ID NO: 1880901
aaguuauugcuggaauucu

SEQ ID NO: 2002695 - RNA, 19 nt, Artificial Sequence
  Description of Artificial Sequence: Synthetic oligonucleotide
  Antisense strand to SEQ ID NO: 2002694
agaauuccagcaauaacuu

SEQ ID NO: 2002696 - RNA, 19 nt, Artificial Sequence
  Description of Artificial Sequence: Synthetic oligonucleotide
  Sense strand starting at position 2452 of SEQ ID NO: 1880901
gcuggaauucugcaguaag

SEQ ID NO: 2002697 - RNA, 19 nt, Artificial Sequence
  Description of Artificial Sequence: Synthetic oligonucleotide
  Antisense strand to SEQ ID NO: 2002696
cuuacugcagaauuccagc

SEQ ID NO: 2002698 - RNA, 19 nt, Artificial Sequence
  Description of Artificial Sequence: Synthetic oligonucleotide
  Sense strand starting at position 2487 of SEQ ID NO: 1880901
gucaauaugaccugcagga

SEQ ID NO: 2002699 - RNA, 19 nt, Artificial Sequence
  Description of Artificial Sequence: Synthetic oligonucleotide
  Antisense strand to SEQ ID NO: 2002698
uccugcaggucauauugac

SEQ ID NO: 2002700 - RNA, 19 nt, Artificial Sequence
  Description of Artificial Sequence: Synthetic oligonucleotide
  Sense strand starting at position 2644 of SEQ ID NO: 1880901
cuacgauauccgggaguca

SEQ ID NO: 2002701 - RNA, 19 nt, Artificial Sequence
  Description of Artificial Sequence: Synthetic oligonucleotide
  Antisense strand to SEQ ID NO: 2002700
ugacucccggauaucguag

SEQ ID NO: 2002702 - RNA, 19 nt, Artificial Sequence
  Description of Artificial Sequence: Synthetic oligonucleotide
  Sense strand starting at position 2645 of SEQ ID NO: 1880901
uacgauauccgggagucaa

SEQ ID NO: 2002703 - RNA, 19 nt, Artificial Sequence
  Description of Artificial Sequence: Synthetic oligonucleotide
  Antisense strand to SEQ ID NO: 2002702
uugacucccggauaucgua

SEQ ID NO: 2002704 - RNA, 19 nt, Artificial Sequence
  Description of Artificial Sequence: Synthetic oligonucleotide
  Sense strand starting at position 2682 of SEQ ID NO: 1880901
agugcaauaucaucaacga

SEQ ID NO: 2002705 - RNA, 19 nt, Artificial Sequence
  Description of Artificial Sequence: Synthetic oligonucleotide
  Antisense strand to SEQ ID NO: 2002704
ucguugaugauauugcacu

SEQ ID NO: 2002706 - RNA, 19 nt, Artificial Sequence
  Description of Artificial Sequence: Synthetic oligonucleotide
  Sense strand starting at position 2683 of SEQ ID NO: 1880901
gugcaauaucaucaacgaa

SEQ ID NO: 2002707 - RNA, 19 nt, Artificial Sequence
  Description of Artificial Sequence: Synthetic oligonucleotide
  Antisense strand to SEQ ID NO: 2002706
uucguugaugauauugcac

SEQ ID NO: 2002708 - RNA, 19 nt, Artificial Sequence
  Description of Artificial Sequence: Synthetic oligonucleotide
  Sense strand starting at position 2813 of SEQ ID NO: 1880901
gaguuauaauagcuaguau

SEQ ID NO: 2002709 - RNA, 19 nt, Artificial Sequence
  Description of Artificial Sequence: Synthetic oligonucleotide
  Antisense strand to SEQ ID NO: 2002708
auacuagcuauuauaacuc

SEQ ID NO: 2002710 - RNA, 19 nt, Artificial Sequence
  Description of Artificial Sequence: Synthetic oligonucleotide
  Sense strand starting at position 2944 of SEQ ID NO: 1880901
gguaauacauacguuagga

SEQ ID NO: 2002711 - RNA, 19 nt, Artificial Sequence
  Description of Artificial Sequence: Synthetic oligonucleotide
  Antisense strand to SEQ ID NO: 2002710
uccuaacguauguauuacc

SEQ ID NO: 2002712 - RNA, 19 nt, Artificial Sequence
  Description of Artificial Sequence: Synthetic oligonucleotide
  Sense strand starting at position 2991 of SEQ ID NO: 1880901
guuuauaugggaggugauu

SEQ ID NO: 2002713 - RNA, 19 nt, Artificial Sequence
  Description of Artificial Sequence: Synthetic oligonucleotide
  Antisense strand to SEQ ID NO: 2002712
aaucaccucccauauaaac

SEQ ID NO: 2002714 - RNA, 19 nt, Artificial Sequence
  Description of Artificial Sequence: Synthetic oligonucleotide
  Sense strand starting at position 3000 of SEQ ID NO: 1880901
ggaggugauuucuagaaau

SEQ ID NO: 2002715 - RNA, 19 nt, Artificial Sequence
  Description of Artificial Sequence: Synthetic oligonucleotide
  Antisense strand to SEQ ID NO: 2002714
auuucuagaaaucaccucc

SEQ ID NO: 2002716 - RNA, 19 nt, Artificial Sequence
  Description of Artificial Sequence: Synthetic oligonucleotide
  Sense strand starting at position 3128 of SEQ ID NO: 1880901
cccucagagugauuccaga

SEQ ID NO: 2002717 - RNA, 19 nt, Artificial Sequence
  Description of Artificial Sequence: Synthetic oligonucleotide
  Antisense strand to SEQ ID NO: 2002716
ucuggaaucacucugaggg

SEQ ID NO: 2002718 - RNA, 19 nt, Artificial Sequence
  Description of Artificial Sequence: Synthetic oligonucleotide
  Sense strand starting at position 3522 of SEQ ID NO: 1880901
agucaaggauucuuaugaa

SEQ ID NO: 2002719 - RNA, 19 nt, Artificial Sequence
  Description of Artificial Sequence: Synthetic oligonucleotide
  Antisense strand to SEQ ID NO: 2002718
uucauaagaauccuugacu

SEQ ID NO: 2002720 - RNA, 19 nt, Artificial Sequence
  Description of Artificial Sequence: Synthetic oligonucleotide
  Sense strand starting at position 3569 of SEQ ID NO: 1880901
uggaaacucuaggauagaa

SEQ ID NO: 2002721 - RNA, 19 nt, Artificial Sequence
  Description of Artificial Sequence: Synthetic oligonucleotide
  Antisense strand to SEQ ID NO: 2002720
uucuauccuagaguuucca

SEQ ID NO: 2002722 - RNA, 19 nt, Artificial Sequence
  Description of Artificial Sequence: Synthetic oligonucleotide
  Sense strand starting at position 3689 of SEQ ID NO: 1880901
agaaucauccuaugagcaa

SEQ ID NO: 2002723 - RNA, 19 nt, Artificial Sequence
  Description of Artificial Sequence: Synthetic oligonucleotide
  Antisense strand to SEQ ID NO: 2002722
uugcucauaggaugauucu

SEQ ID NO: 2002724 - RNA, 19 nt, Artificial Sequence
  Description of Artificial Sequence: Synthetic oligonucleotide
  Sense strand starting at position 3722 of SEQ ID NO: 1880901
cuguaaauguuaucaaccu

SEQ ID NO: 2002725 - RNA, 19 nt, Artificial Sequence
  Description of Artificial Sequence: Synthetic oligonucleotide
  Antisense strand to SEQ ID NO: 2002724
agguugauaacauuuacag

SEQ ID NO: 2002726 - RNA, 19 nt, Artificial Sequence
  Description of Artificial Sequence: Synthetic oligonucleotide
  Sense strand starting at position 163 of SEQ ID NO: 1880902
cuugaucuguugucugaau

SEQ ID NO: 2002727 - RNA, 19 nt, Artificial Sequence
  Description of Artificial Sequence: Synthetic oligonucleotide
  Antisense strand to SEQ ID NO: 2002726
auucagacaacagaucaag

SEQ ID NO: 2002728 - RNA, 19 nt, Artificial Sequence
  Description of Artificial Sequence: Synthetic oligonucleotide
  Sense strand starting at position 164 of SEQ ID NO: 1880902
uugaucuguugucugaauu

SEQ ID NO: 2002729 - RNA, 19 nt, Artificial Sequence
  Description of Artificial Sequence: Synthetic oligonucleotide
  Antisense strand to SEQ ID NO: 2002728
aauucagacaacagaucaa

SEQ ID NO: 2002730 - RNA, 19 nt, Artificial Sequence
  Description of Artificial Sequence: Synthetic oligonucleotide
  Sense strand starting at position 165 of SEQ ID NO: 1880902
ugaucuguugucugaauuc

SEQ ID NO: 2002731 - RNA, 19 nt, Artificial Sequence
  Description of Artificial Sequence: Synthetic oligonucleotide
  Antisense strand to SEQ ID NO: 2002730
gaauucagacaacagauca

SEQ ID NO: 2002732 - RNA, 19 nt, Artificial Sequence
  Description of Artificial Sequence: Synthetic oligonucleotide
  Sense strand starting at position 364 of SEQ ID NO: 1880902
gcccguaguguguggucaa

SEQ ID NO: 2002733 - RNA, 19 nt, Artificial Sequence
  Description of Artificial Sequence: Synthetic oligonucleotide
  Antisense strand to SEQ ID NO: 2002732
uugaccacacacuacgggc

SEQ ID NO: 2002734 - RNA, 19 nt, Artificial Sequence
  Description of Artificial Sequence: Synthetic oligonucleotide
  Sense strand starting at position 367 of SEQ ID NO: 1880902
cguaguguguggucaacac

SEQ ID NO: 2002735 - RNA, 19 nt, Artificial Sequence
  Description of Artificial Sequence: Synthetic oligonucleotide
  Antisense strand to SEQ ID NO: 2002734
guguugaccacacacuacg

SEQ ID NO: 2002736 - RNA, 19 nt, Artificial Sequence
  Description of Artificial Sequence: Synthetic oligonucleotide
  Sense strand starting at position 572 of SEQ ID NO: 1880902
gacaauaacuaguggagaa

SEQ ID NO: 2002737 - RNA, 19 nt, Artificial Sequence
  Description of Artificial Sequence: Synthetic oligonucleotide
  Antisense strand to SEQ ID NO: 2002736
uucuccacuaguuauuguc

SEQ ID NO: 2002738 - RNA, 19 nt, Artificial Sequence
  Description of Artificial Sequence: Synthetic oligonucleotide
  Sense strand starting at position 634 of SEQ ID NO: 1880902
gucuccuaucagggaguuu

SEQ ID NO: 2002739 - RNA, 19 nt, Artificial Sequence
  Description of Artificial Sequence: Synthetic oligonucleotide
  Antisense strand to SEQ ID NO: 2002738
aaacucccugauaggagac

SEQ ID NO: 2002740 - RNA, 19 nt, Artificial Sequence
  Description of Artificial Sequence: Synthetic oligonucleotide
  Sense strand starting at position 698 of SEQ ID NO: 1880902
ucacucuaggucugcgaua

SEQ ID NO: 2002741 - RNA, 19 nt, Artificial Sequence
  Description of Artificial Sequence: Synthetic oligonucleotide
  Antisense strand to SEQ ID NO: 2002740
uaucgcagaccuagaguga

SEQ ID NO: 2002742 - RNA, 19 nt, Artificial Sequence
  Description of Artificial Sequence: Synthetic oligonucleotide
  Sense strand starting at position 699 of SEQ ID NO: 1880902
cacucuaggucugcgauau

SEQ ID NO: 2002743 - RNA, 19 nt, Artificial Sequence
  Description of Artificial Sequence: Synthetic oligonucleotide
  Antisense strand to SEQ ID NO: 2002742
auaucgcagaccuagagug

SEQ ID NO: 2002744 - RNA, 19 nt, Artificial Sequence
  Description of Artificial Sequence: Synthetic oligonucleotide
  Sense strand starting at position 700 of SEQ ID NO: 1880902
acucuaggucugcgauauu

SEQ ID NO: 2002745 - RNA, 19 nt, Artificial Sequence
  Description of Artificial Sequence: Synthetic oligonucleotide
  Antisense strand to SEQ ID NO: 2002744
aauaucgcagaccuagagu

SEQ ID NO: 2002746 - RNA, 19 nt, Artificial Sequence
  Description of Artificial Sequence: Synthetic oligonucleotide
  Sense strand starting at position 845 of SEQ ID NO: 1880902
guacauguguaucgcacaa

SEQ ID NO: 2002747 - RNA, 19 nt, Artificial Sequence
  Description of Artificial Sequence: Synthetic oligonucleotide
  Antisense strand to SEQ ID NO: 2002746
uugugcgauacacauguac

SEQ ID NO: 2002748 - RNA, 19 nt, Artificial Sequence
  Description of Artificial Sequence: Synthetic oligonucleotide
  Sense strand starting at position 876 of SEQ ID NO: 1880902
acagcacugcuuuacagaa

SEQ ID NO: 2002749 - RNA, 19 nt, Artificial Sequence
  Description of Artificial Sequence: Synthetic oligonucleotide
  Antisense strand to SEQ ID NO: 2002748
uucuguaaagcagugcugu

SEQ ID NO: 2002750 - RNA, 19 nt, Artificial Sequence
  Description of Artificial Sequence: Synthetic oligonucleotide
  Sense strand starting at position 883 of SEQ ID NO: 1880902
ugcuuuacagaauguaaac

SEQ ID NO: 2002751 - RNA, 19 nt, Artificial Sequence
  Description of Artificial Sequence: Synthetic oligonucleotide
  Antisense strand to SEQ ID NO: 2002750
guuuacauucuguaaagca

SEQ ID NO: 2002752 - RNA, 19 nt, Artificial Sequence
  Description of Artificial Sequence: Synthetic oligonucleotide
  Sense strand starting at position 2142 of SEQ ID NO: 1880902
ugccuagaguagucagaau

SEQ ID NO: 2002753 - RNA, 19 nt, Artificial Sequence
  Description of Artificial Sequence: Synthetic oligonucleotide
  Antisense strand to SEQ ID NO: 2002752
auucugacuacucuaggca

SEQ ID NO: 2002754 - RNA, 19 nt, Artificial Sequence
  Description of Artificial Sequence: Synthetic oligonucleotide
  Sense strand starting at position 2787 of SEQ ID NO: 1880902
gggaguuagauugaguugu

SEQ ID NO: 2002755 - RNA, 19 nt, Artificial Sequence
  Description of Artificial Sequence: Synthetic oligonucleotide
  Antisense strand to SEQ ID NO: 2002754
acaacucaaucuaacuccc

SEQ ID NO: 2002756 - RNA, 19 nt, Artificial Sequence
  Description of Artificial Sequence: Synthetic oligonucleotide
  Sense strand starting at position 2789 of SEQ ID NO: 1880902
gaguuagauugaguuguaa

SEQ ID NO: 2002757 - RNA, 19 nt, Artificial Sequence
  Description of Artificial Sequence: Synthetic oligonucleotide
  Antisense strand to SEQ ID NO: 2002756
uuacaacucaaucuaacuc

SEQ ID NO: 2002758 - RNA, 19 nt, Artificial Sequence
  Description of Artificial Sequence: Synthetic oligonucleotide
  Sense strand starting at position 2791 of SEQ ID NO: 1880902
guuagauugaguuguaaca

SEQ ID NO: 2002759 - RNA, 19 nt, Artificial Sequence
  Description of Artificial Sequence: Synthetic oligonucleotide
  Antisense strand to SEQ ID NO: 2002758
uguuacaacucaaucuaac

SEQ ID NO: 2002760 - RNA, 19 nt, Artificial Sequence
  Description of Artificial Sequence: Synthetic oligonucleotide
  Sense strand starting at position 2793 of SEQ ID NO: 1880902
uagauugaguuguaacaag

SEQ ID NO: 2002761 - RNA, 19 nt, Artificial Sequence
  Description of Artificial Sequence: Synthetic oligonucleotide
  Antisense strand to SEQ ID NO: 2002760
cuuguuacaacucaaucua

SEQ ID NO: 2002762 - RNA, 19 nt, Artificial Sequence
  Description of Artificial Sequence: Synthetic oligonucleotide
  Sense strand starting at position 92 of SEQ ID NO: 1880903
uacuuuaaaugguuugagu

SEQ ID NO: 2002763 - RNA, 19 nt, Artificial Sequence
  Description of Artificial Sequence: Synthetic oligonucleotide
  Antisense strand to SEQ ID NO: 2002762
acucaaaccauuuaaagua

SEQ ID NO: 2002764 - RNA, 19 nt, Artificial Sequence
  Description of Artificial Sequence: Synthetic oligonucleotide
  Sense strand starting at position 94 of SEQ ID NO: 1880903
cuuuaaaugguuugaguua

SEQ ID NO: 2002765 - RNA, 19 nt, Artificial Sequence
  Description of Artificial Sequence: Synthetic oligonucleotide
  Antisense strand to SEQ ID NO: 2002764
uaacucaaaccauuuaaag

SEQ ID NO: 2002766 - RNA, 19 nt, Artificial Sequence
  Description of Artificial Sequence: Synthetic oligonucleotide
  Sense strand starting at position 327 of SEQ ID NO: 1880903
acuagaugguaguuuauca

SEQ ID NO: 2002767 - RNA, 19 nt, Artificial Sequence
  Description of Artificial Sequence: Synthetic oligonucleotide
  Antisense strand to SEQ ID NO: 2002766
ugauaaacuaccaucuagu

SEQ ID NO: 2002768 - RNA, 19 nt, Artificial Sequence
  Description of Artificial Sequence: Synthetic oligonucleotide
  Sense strand starting at position 334 of SEQ ID NO: 1880903
gguaguuuaucaccacaau

SEQ ID NO: 2002769 - RNA, 19 nt, Artificial Sequence
  Description of Artificial Sequence: Synthetic oligonucleotide
  Antisense strand to SEQ ID NO: 2002768
auuguggugauaaacuacc

SEQ ID NO: 2002770 - RNA, 19 nt, Artificial Sequence
  Description of Artificial Sequence: Synthetic oligonucleotide
  Sense strand starting at position 335 of SEQ ID NO: 1880903
guaguuuaucaccacaaug

SEQ ID NO: 2002771 - RNA, 19 nt, Artificial Sequence
  Description of Artificial Sequence: Synthetic oligonucleotide
  Antisense strand to SEQ ID NO: 2002770
cauuguggugauaaacuac

SEQ ID NO: 2002772 - RNA, 19 nt, Artificial Sequence
  Description of Artificial Sequence: Synthetic oligonucleotide
  Sense strand starting at position 607 of SEQ ID NO: 1880903
gcuguauaucagcucuguu

SEQ ID NO: 2002773 - RNA, 19 nt, Artificial Sequence
  Description of Artificial Sequence: Synthetic oligonucleotide
  Antisense strand to SEQ ID NO: 2002772
aacagagcugauauacagc

SEQ ID NO: 2002774 - RNA, 19 nt, Artificial Sequence
  Description of Artificial Sequence: Synthetic oligonucleotide
  Sense strand starting at position 656 of SEQ ID NO: 1880903
caucauagagguuggauca

SEQ ID NO: 2002775 - RNA, 19 nt, Artificial Sequence
  Description of Artificial Sequence: Synthetic oligonucleotide
  Antisense strand to SEQ ID NO: 2002774
ugauccaaccucuaugaug

SEQ ID NO: 2002776 - RNA, 19 nt, Artificial Sequence
  Description of Artificial Sequence: Synthetic oligonucleotide
  Sense strand starting at position 840 of SEQ ID NO: 1880903
uguaaagcuccugauacag

SEQ ID NO: 2002777 - RNA, 19 nt, Artificial Sequence
  Description of Artificial Sequence: Synthetic oligonucleotide
  Antisense strand to SEQ ID NO: 2002776
cuguaucaggagcuuuaca

SEQ ID NO: 2002778 - RNA, 19 nt, Artificial Sequence
  Description of Artificial Sequence: Synthetic oligonucleotide
  Sense strand starting at position 876 of SEQ ID NO: 1880903
uggaauuagugaaggguga

SEQ ID NO: 2002779 - RNA, 19 nt, Artificial Sequence
  Description of Artificial Sequence: Synthetic oligonucleotide
  Antisense strand to SEQ ID NO: 2002778
ucacccuucacuaauucca

SEQ ID NO: 2002780 - RNA, 19 nt, Artificial Sequence
  Description of Artificial Sequence: Synthetic oligonucleotide
  Sense strand starting at position 880 of SEQ ID NO: 1880903
auuagugaagggugagaua

SEQ ID NO: 2002781 - RNA, 19 nt, Artificial Sequence
  Description of Artificial Sequence: Synthetic oligonucleotide
  Antisense strand to SEQ ID NO: 2002780
uaucucacccuucacuaau

SEQ ID NO: 2002782 - RNA, 19 nt, Artificial Sequence
  Description of Artificial Sequence: Synthetic oligonucleotide
  Sense strand starting at position 1017 of SEQ ID NO: 1880903
uuucuugugaaguggaaag

SEQ ID NO: 2002783 - RNA, 19 nt, Artificial Sequence
  Description of Artificial Sequence: Synthetic oligonucleotide
  Antisense strand to SEQ ID NO: 2002782
cuuuccacuucacaagaaa

SEQ ID NO: 2002784 - RNA, 19 nt, Artificial Sequence
  Description of Artificial Sequence: Synthetic oligonucleotide
  Sense strand starting at position 1019 of SEQ ID NO: 1880903
ucuugugaaguggaaagua

SEQ ID NO: 2002785 - RNA, 19 nt, Artificial Sequence
  Description of Artificial Sequence: Synthetic oligonucleotide
  Antisense strand to SEQ ID NO: 2002784
uacuuuccacuucacaaga

SEQ ID NO: 2002786 - RNA, 19 nt, Artificial Sequence
  Description of Artificial Sequence: Synthetic oligonucleotide
  Sense strand starting at position 1052 of SEQ ID NO: 1880903
gcuauccuacccuagaaag

SEQ ID NO: 2002787 - RNA, 19 nt, Artificial Sequence
  Description of Artificial Sequence: Synthetic oligonucleotide
  Antisense strand to SEQ ID NO: 2002786
cuuucuaggguaggauagc

SEQ ID NO: 2002788 - RNA, 19 nt, Artificial Sequence
  Description of Artificial Sequence: Synthetic oligonucleotide
  Sense strand starting at position 1164 of SEQ ID NO: 1880903
gucuuugaugucuauaaau

SEQ ID NO: 2002789 - RNA, 19 nt, Artificial Sequence
  Description of Artificial Sequence: Synthetic oligonucleotide
  Antisense strand to SEQ ID NO: 2002788
auuuauagacaucaaagac

SEQ ID NO: 2002790 - RNA, 19 nt, Artificial Sequence
  Description of Artificial Sequence: Synthetic oligonucleotide
  Sense strand starting at position 1889 of SEQ ID NO: 1880903
gugcuaagaguuuaauccu

SEQ ID NO: 2002791 - RNA, 19 nt, Artificial Sequence
  Description of Artificial Sequence: Synthetic oligonucleotide
  Antisense strand to SEQ ID NO: 2002790
aggauuaaacucuuagcac

SEQ ID NO: 2002792 - RNA, 19 nt, Artificial Sequence
  Description of Artificial Sequence: Synthetic oligonucleotide
  Sense strand starting at position 1892 of SEQ ID NO: 1880903
cuaagaguuuaauccuaug

SEQ ID NO: 2002793 - RNA, 19 nt, Artificial Sequence
  Description of Artificial Sequence: Synthetic oligonucleotide
  Antisense strand to SEQ ID NO: 2002792
cauaggauuaaacucuuag

SEQ ID NO: 2002794 - RNA, 19 nt, Artificial Sequence
  Description of Artificial Sequence: Synthetic oligonucleotide
  Sense strand starting at position 1955 of SEQ ID NO: 1880903
ggauacugaucaguguucu

SEQ ID NO: 2002795 - RNA, 19 nt, Artificial Sequence
  Description of Artificial Sequence: Synthetic oligonucleotide
  Antisense strand to SEQ ID NO: 2002794
agaacacugaucaguaucc

SEQ ID NO: 2002796 - RNA, 19 nt, Artificial Sequence
  Description of Artificial Sequence: Synthetic oligonucleotide
  Sense strand starting at position 2133 of SEQ ID NO: 1880903
gcacacaaguagguaaaua

SEQ ID NO: 2002797 - RNA, 19 nt, Artificial Sequence
  Description of Artificial Sequence: Synthetic oligonucleotide
  Antisense strand to SEQ ID NO: 2002796
uauuuaccuacuugugugc

SEQ ID NO: 2002798 - RNA, 19 nt, Artificial Sequence
  Description of Artificial Sequence: Synthetic oligonucleotide
  Sense strand starting at position 2164 of SEQ ID NO: 1880903
ggauuauauaaagggcuau

SEQ ID NO: 2002799 - RNA, 19 nt, Artificial Sequence
  Description of Artificial Sequence: Synthetic oligonucleotide
  Antisense strand to SEQ ID NO: 2002798
auagcccuuuauauaaucc

SEQ ID NO: 2002800 - RNA, 19 nt, Artificial Sequence
  Description of Artificial Sequence: Synthetic oligonucleotide
  Sense strand starting at position 2383 of SEQ ID NO: 1880903
ccauguucccaugagagug

SEQ ID NO: 2002801 - RNA, 19 nt, Artificial Sequence
  Description of Artificial Sequence: Synthetic oligonucleotide
  Antisense strand to SEQ ID NO: 2002800
cacucucaugggaacaugg

SEQ ID NO: 2002802 - RNA, 19 nt, Artificial Sequence
  Description of Artificial Sequence: Synthetic oligonucleotide
  Sense strand starting at position 2388 of SEQ ID NO: 1880903
uucccaugagaguguauua

SEQ ID NO: 2002803 - RNA, 19 nt, Artificial Sequence
  Description of Artificial Sequence: Synthetic oligonucleotide
  Antisense strand to SEQ ID NO: 2002802
uaauacacucucaugggaa

SEQ ID NO: 2002804 - RNA, 19 nt, Artificial Sequence
  Description of Artificial Sequence: Synthetic oligonucleotide
  Sense strand starting at position 2722 of SEQ ID NO: 1880903
augugauugugucugauuu

SEQ ID NO: 2002805 - RNA, 19 nt, Artificial Sequence
  Description of Artificial Sequence: Synthetic oligonucleotide
  Antisense strand to SEQ ID NO: 2002804
aaaucagacacaaucacau

SEQ ID NO: 2002806 - RNA, 19 nt, Artificial Sequence
  Description of Artificial Sequence: Synthetic oligonucleotide
  Sense strand starting at position 2723 of SEQ ID NO: 1880903
ugugauugugucugauuua

SEQ ID NO: 2002807 - RNA, 19 nt, Artificial Sequence
  Description of Artificial Sequence: Synthetic oligonucleotide
  Antisense strand to SEQ ID NO: 2002806
uaaaucagacacaaucaca

SEQ ID NO: 2002808 - RNA, 19 nt, Artificial Sequence
  Description of Artificial Sequence: Synthetic oligonucleotide
  Sense strand starting at position 2799 of SEQ ID NO: 1880903
uguccuuuccacuaggaca

SEQ ID NO: 2002809 - RNA, 19 nt, Artificial Sequence
  Description of Artificial Sequence: Synthetic oligonucleotide
  Antisense strand to SEQ ID NO: 2002808
uguccuaguggaaaggaca

SEQ ID NO: 2002810 - RNA, 19 nt, Artificial Sequence
  Description of Artificial Sequence: Synthetic oligonucleotide
  Sense strand starting at position 2812 of SEQ ID NO: 1880903
aggacauacuuccuuugau

SEQ ID NO: 2002811 - RNA, 19 nt, Artificial Sequence
  Description of Artificial Sequence: Synthetic oligonucleotide
  Antisense strand to SEQ ID NO: 2002810
aucaaaggaaguauguccu

SEQ ID NO: 2002812 - RNA, 19 nt, Artificial Sequence
  Description of Artificial Sequence: Synthetic oligonucleotide
  Sense strand starting at position 2813 of SEQ ID NO: 1880903
ggacauacuuccuuugauu

SEQ ID NO: 2002813 - RNA, 19 nt, Artificial Sequence
  Description of Artificial Sequence: Synthetic oligonucleotide
  Antisense strand to SEQ ID NO: 2002812
aaucaaaggaaguaugucc

SEQ ID NO: 2002814 - RNA, 19 nt, Artificial Sequence
  Description of Artificial Sequence: Synthetic oligonucleotide
  Sense strand starting at position 3011 of SEQ ID NO: 1880903
gcuauaugacucuggacau

SEQ ID NO: 2002815 - RNA, 19 nt, Artificial Sequence
  Description of Artificial Sequence: Synthetic oligonucleotide
  Antisense strand to SEQ ID NO: 2002814
auguccagagucauauagc

SEQ ID NO: 2002816 - RNA, 19 nt, Artificial Sequence
  Description of Artificial Sequence: Synthetic oligonucleotide
  Sense strand starting at position 3023 of SEQ ID NO: 1880903
uggacauguuccuuaguag

SEQ ID NO: 2002817 - RNA, 19 nt, Artificial Sequence
  Description of Artificial Sequence: Synthetic oligonucleotide
  Antisense strand to SEQ ID NO: 2002816
cuacuaaggaacaugucca

SEQ ID NO: 2002818 - RNA, 19 nt, Artificial Sequence
  Description of Artificial Sequence: Synthetic oligonucleotide
  Sense strand starting at position 3104 of SEQ ID NO: 1880903
guauuaaauagguagguua

SEQ ID NO: 2002819 - RNA, 19 nt, Artificial Sequence
  Description of Artificial Sequence: Synthetic oligonucleotide
  Antisense strand to SEQ ID NO: 2002818
uaaccuaccuauuuaauac

SEQ ID NO: 2002820 - RNA, 19 nt, Artificial Sequence
  Description of Artificial Sequence: Synthetic oligonucleotide
  Sense strand starting at position 3249 of SEQ ID NO: 1880903
ggaccugacuguccaguau

SEQ ID NO: 2002821 - RNA, 19 nt, Artificial Sequence
  Description of Artificial Sequence: Synthetic oligonucleotide
  Antisense strand to SEQ ID NO: 2002820
auacuggacagucaggucc

SEQ ID NO: 2002822 - RNA, 19 nt, Artificial Sequence
  Description of Artificial Sequence: Synthetic oligonucleotide
  Sense strand starting at position 3253 of SEQ ID NO: 1880903
cugacuguccaguauauua

SEQ ID NO: 2002823 - RNA, 19 nt, Artificial Sequence
  Description of Artificial Sequence: Synthetic oligonucleotide
  Antisense strand to SEQ ID NO: 2002822
uaauauacuggacagucag

SEQ ID NO: 2002824 - RNA, 19 nt, Artificial Sequence
  Description of Artificial Sequence: Synthetic oligonucleotide
  Sense strand starting at position 3272 of SEQ ID NO: 1880903
ggcauuggucuuuacuauu

SEQ ID NO: 2002825 - RNA, 19 nt, Artificial Sequence
  Description of Artificial Sequence: Synthetic oligonucleotide
  Antisense strand to SEQ ID NO: 2002824
aauaguaaagaccaaugcc

SEQ ID NO: 2002826 - RNA, 19 nt, Artificial Sequence
  Description of Artificial Sequence: Synthetic oligonucleotide
  Sense strand starting at position 3333 of SEQ ID NO: 1880903
agaaucuuccuaugagagc

SEQ ID NO: 2002827 - RNA, 19 nt, Artificial Sequence
  Description of Artificial Sequence: Synthetic oligonucleotide
  Antisense strand to SEQ ID NO: 2002826
gcucucauaggaagauucu

SEQ ID NO: 2002828 - RNA, 19 nt, Artificial Sequence
  Description of Artificial Sequence: Synthetic oligonucleotide
  Sense strand starting at position 3348 of SEQ ID NO: 1880903
gagccaaagcaucaauugu

SEQ ID NO: 2002829 - RNA, 19 nt, Artificial Sequence
  Description of Artificial Sequence: Synthetic oligonucleotide
  Antisense strand to SEQ ID NO: 2002828
acaauugaugcuuuggcuc

SEQ ID NO: 2002830 - RNA, 19 nt, Artificial Sequence
  Description of Artificial Sequence: Synthetic oligonucleotide
  Sense strand starting at position 3435 of SEQ ID NO: 1880903
ugaagugccaguuauagag

SEQ ID NO: 2002831 - RNA, 19 nt, Artificial Sequence
  Description of Artificial Sequence: Synthetic oligonucleotide
  Antisense strand to SEQ ID NO: 2002830
cucuauaacuggcacuuca

SEQ ID NO: 2002832 - RNA, 19 nt, Artificial Sequence
  Description of Artificial Sequence: Synthetic oligonucleotide
  Sense strand starting at position 3439 of SEQ ID NO: 1880903
gugccaguuauagagaaau

SEQ ID NO: 2002833 - RNA, 19 nt, Artificial Sequence
  Description of Artificial Sequence: Synthetic oligonucleotide
  Antisense strand to SEQ ID NO: 2002832
auuucucuauaacuggcac

SEQ ID NO: 2002834 - RNA, 19 nt, Artificial Sequence
  Description of Artificial Sequence: Synthetic oligonucleotide
  Sense strand starting at position 3664 of SEQ ID NO: 1880903
gguaauaauuagucuaccu

SEQ ID NO: 2002835 - RNA, 19 nt, Artificial Sequence
  Description of Artificial Sequence: Synthetic oligonucleotide
  Antisense strand to SEQ ID NO: 2002834
agguagacuaauuauuacc

SEQ ID NO: 2002836 - RNA, 19 nt, Artificial Sequence
  Description of Artificial Sequence: Synthetic oligonucleotide
  Sense strand starting at position 3710 of SEQ ID NO: 1880903
uguuaauguaggcaauuga

SEQ ID NO: 2002837 - RNA, 19 nt, Artificial Sequence
  Description of Artificial Sequence: Synthetic oligonucleotide
  Antisense strand to SEQ ID NO: 2002836
ucaauugccuacauuaaca

SEQ ID NO: 2002838 - RNA, 19 nt, Artificial Sequence
  Description of Artificial Sequence: Synthetic oligonucleotide
  Sense strand starting at position 3753 of SEQ ID NO: 1880903
cacugauggugucugagau

SEQ ID NO: 2002839 - RNA, 19 nt, Artificial Sequence
  Description of Artificial Sequence: Synthetic oligonucleotide
  Antisense strand to SEQ ID NO: 2002838
aucucagacaccaucagug

SEQ ID NO: 2002840 - RNA, 19 nt, Artificial Sequence
  Description of Artificial Sequence: Synthetic oligonucleotide
  Sense strand starting at position 3754 of SEQ ID NO: 1880903
acugauggugucugagaug

SEQ ID NO: 2002841 - RNA, 19 nt, Artificial Sequence
  Description of Artificial Sequence: Synthetic oligonucleotide
  Antisense strand to SEQ ID NO: 2002840
caucucagacaccaucagu

SEQ ID NO: 2002842 - RNA, 19 nt, Artificial Sequence
  Description of Artificial Sequence: Synthetic oligonucleotide
  Sense strand starting at position 91 of SEQ ID NO: 1880904
gagcuaugacaguagcacu

SEQ ID NO: 2002843 - RNA, 19 nt, Artificial Sequence
  Description of Artificial Sequence: Synthetic oligonucleotide
  Antisense strand to SEQ ID NO: 2002842
agugcuacugucauagcuc

SEQ ID NO: 2002844 - RNA, 19 nt, Artificial Sequence
  Description of Artificial Sequence: Synthetic oligonucleotide
  Sense strand starting at position 196 of SEQ ID NO: 1880904
uuacuuuguguagaaauca

SEQ ID NO: 2002845 - RNA, 19 nt, Artificial Sequence
  Description of Artificial Sequence: Synthetic oligonucleotide
  Antisense strand to SEQ ID NO: 2002844
ugauuucuacacaaaguaa

SEQ ID NO: 2002846 - RNA, 19 nt, Artificial Sequence
  Description of Artificial Sequence: Synthetic oligonucleotide
  Sense strand starting at position 291 of SEQ ID NO: 1880904
cuguaaucccaguauuacg

SEQ ID NO: 2002847 - RNA, 19 nt, Artificial Sequence
  Description of Artificial Sequence: Synthetic oligonucleotide
  Antisense strand to SEQ ID NO: 2002846
cguaauacugggauuacag

SEQ ID NO: 2002848 - RNA, 19 nt, Artificial Sequence
  Description of Artificial Sequence: Synthetic oligonucleotide
  Sense strand starting at position 591 of SEQ ID NO: 1880904
ccagaagcuaagugaugaa

SEQ ID NO: 2002849 - RNA, 19 nt, Artificial Sequence
  Description of Artificial Sequence: Synthetic oligonucleotide
  Antisense strand to SEQ ID NO: 2002848
uucaucacuuagcuucugg

SEQ ID NO: 2002850 - RNA, 19 nt, Artificial Sequence
  Description of Artificial Sequence: Synthetic oligonucleotide
  Sense strand starting at position 691 of SEQ ID NO: 1880904
ggucuuacauacuuucuau

SEQ ID NO: 2002851 - RNA, 19 nt, Artificial Sequence
  Description of Artificial Sequence: Synthetic oligonucleotide
  Antisense strand to SEQ ID NO: 2002850
auagaaaguauguaagacc

SEQ ID NO: 2002852 - RNA, 19 nt, Artificial Sequence
  Description of Artificial Sequence: Synthetic oligonucleotide
  Sense strand starting at position 706 of SEQ ID NO: 1880904
cuauucuaggcuuaacagu

SEQ ID NO: 2002853 - RNA, 19 nt, Artificial Sequence
  Description of Artificial Sequence: Synthetic oligonucleotide
  Antisense strand to SEQ ID NO: 2002852
acuguuaagccuagaauag

SEQ ID NO: 2002854 - RNA, 19 nt, Artificial Sequence
  Description of Artificial Sequence: Synthetic oligonucleotide
  Sense strand starting at position 714 of SEQ ID NO: 1880904
ggcuuaacaguccaaauug

SEQ ID NO: 2002855 - RNA, 19 nt, Artificial Sequence
  Description of Artificial Sequence: Synthetic oligonucleotide
  Antisense strand to SEQ ID NO: 2002854
caauuuggacuguuaagcc

SEQ ID NO: 2002856 - RNA, 19 nt, Artificial Sequence
  Description of Artificial Sequence: Synthetic oligonucleotide
  Sense strand starting at position 775 of SEQ ID NO: 1880904
gcagauucucuccauaggu

SEQ ID NO: 2002857 - RNA, 19 nt, Artificial Sequence
  Description of Artificial Sequence: Synthetic oligonucleotide
  Antisense strand to SEQ ID NO: 2002856
accuauggagagaaucugc

SEQ ID NO: 2002858 - RNA, 19 nt, Artificial Sequence
  Description of Artificial Sequence: Synthetic oligonucleotide
  Sense strand starting at position 777 of SEQ ID NO: 1880904
agauucucuccauagguuu

SEQ ID NO: 2002859 - RNA, 19 nt, Artificial Sequence
  Description of Artificial Sequence: Synthetic oligonucleotide
  Antisense strand to SEQ ID NO: 2002858
aaaccuauggagagaaucu

SEQ ID NO: 2002860 - RNA, 19 nt, Artificial Sequence
  Description of Artificial Sequence: Synthetic oligonucleotide
  Sense strand starting at position 820 of SEQ ID NO: 1880904
gcacuuguagucuauuaca

SEQ ID NO: 2002861 - RNA, 19 nt, Artificial Sequence
  Description of Artificial Sequence: Synthetic oligonucleotide
  Antisense strand to SEQ ID NO: 2002860
uguaauagacuacaagugc

SEQ ID NO: 2002862 - RNA, 19 nt, Artificial Sequence
  Description of Artificial Sequence: Synthetic oligonucleotide
  Sense strand starting at position 846 of SEQ ID NO: 1880904
ucugauaaugacugaucau

SEQ ID NO: 2002863 - RNA, 19 nt, Artificial Sequence
  Description of Artificial Sequence: Synthetic oligonucleotide
  Antisense strand to SEQ ID NO: 2002862
augaucagucauuaucaga

SEQ ID NO: 2002864 - RNA, 19 nt, Artificial Sequence
  Description of Artificial Sequence: Synthetic oligonucleotide
  Sense strand starting at position 1007 of SEQ ID NO: 1880904
cuuucaguuguguccguuu

SEQ ID NO: 2002865 - RNA, 19 nt, Artificial Sequence
  Description of Artificial Sequence: Synthetic oligonucleotide
  Antisense strand to SEQ ID NO: 2002864
aaacggacacaacugaaag

SEQ ID NO: 2002866 - RNA, 19 nt, Artificial Sequence
  Description of Artificial Sequence: Synthetic oligonucleotide
  Sense strand starting at position 1039 of SEQ ID NO: 1880904
aggcauaaauccuuugaau

SEQ ID NO: 2002867 - RNA, 19 nt, Artificial Sequence
  Description of Artificial Sequence: Synthetic oligonucleotide
  Antisense strand to SEQ ID NO: 2002866
auucaaaggauuuaugccu

SEQ ID NO: 2002868 - RNA, 19 nt, Artificial Sequence
  Description of Artificial Sequence: Synthetic oligonucleotide
  Sense strand starting at position 1041 of SEQ ID NO: 1880904
gcauaaauccuuugaaugu

SEQ ID NO: 2002869 - RNA, 19 nt, Artificial Sequence
  Description of Artificial Sequence: Synthetic oligonucleotide
  Antisense strand to SEQ ID NO: 2002868
acauucaaaggauuuaugc

SEQ ID NO: 2002870 - RNA, 19 nt, Artificial Sequence
  Description of Artificial Sequence: Synthetic oligonucleotide
  Sense strand starting at position 1094 of SEQ ID NO: 1880904
cccucuaguuucuuaagga

SEQ ID NO: 2002871 - RNA, 19 nt, Artificial Sequence
  Description of Artificial Sequence: Synthetic oligonucleotide
  Antisense strand to SEQ ID NO: 2002870
uccuuaagaaacuagaggg

SEQ ID NO: 2002872 - RNA, 19 nt, Artificial Sequence
  Description of Artificial Sequence: Synthetic oligonucleotide
  Sense strand starting at position 1157 of SEQ ID NO: 1880904
cuggaaaccuuguccuuua

SEQ ID NO: 2002873 - RNA, 19 nt, Artificial Sequence
  Description of Artificial Sequence: Synthetic oligonucleotide
  Antisense strand to SEQ ID NO: 2002872
uaaaggacaagguuuccag

SEQ ID NO: 2002874 - RNA, 19 nt, Artificial Sequence
  Description of Artificial Sequence: Synthetic oligonucleotide
  Sense strand starting at position 1287 of SEQ ID NO: 1880904
ucaucucgguuuguauuua

SEQ ID NO: 2002875 - RNA, 19 nt, Artificial Sequence
  Description of Artificial Sequence: Synthetic oligonucleotide
  Antisense strand to SEQ ID NO: 2002874
uaaauacaaaccgagauga

SEQ ID NO: 2002876 - RNA, 19 nt, Artificial Sequence
  Description of Artificial Sequence: Synthetic oligonucleotide
  Sense strand starting at position 1291 of SEQ ID NO: 1880904
cucgguuuguauuuaugua

SEQ ID NO: 2002877 - RNA, 19 nt, Artificial Sequence
  Description of Artificial Sequence: Synthetic oligonucleotide
  Antisense strand to SEQ ID NO: 2002876
uacauaaauacaaaccgag

SEQ ID NO: 2002878 - RNA, 19 nt, Artificial Sequence
  Description of Artificial Sequence: Synthetic oligonucleotide
  Sense strand starting at position 1292 of SEQ ID NO: 1880904
ucgguuuguauuuauguau

SEQ ID NO: 2002879 - RNA, 19 nt, Artificial Sequence
  Description of Artificial Sequence: Synthetic oligonucleotide
  Antisense strand to SEQ ID NO: 2002878
auacauaaauacaaaccga

SEQ ID NO: 2002880 - RNA, 19 nt, Artificial Sequence
  Description of Artificial Sequence: Synthetic oligonucleotide
  Sense strand starting at position 1301 of SEQ ID NO: 1880904
auuuauguaucguugcuuu

SEQ ID NO: 2002881 - RNA, 19 nt, Artificial Sequence
  Description of Artificial Sequence: Synthetic oligonucleotide
  Antisense strand to SEQ ID NO: 2002880
aaagcaacgauacauaaau

SEQ ID NO: 2002882 - RNA, 19 nt, Artificial Sequence
  Description of Artificial Sequence: Synthetic oligonucleotide
  Sense strand starting at position 1313 of SEQ ID NO: 1880904
uugcuuugauuauugaacu

SEQ ID NO: 2002883 - RNA, 19 nt, Artificial Sequence
  Description of Artificial Sequence: Synthetic oligonucleotide
  Antisense strand to SEQ ID NO: 2002882
aguucaauaaucaaagcaa

SEQ ID NO: 2002884 - RNA, 19 nt, Artificial Sequence
  Description of Artificial Sequence: Synthetic oligonucleotide
  Sense strand starting at position 1330 of SEQ ID NO: 1880904
cugaguaucucucccacua

SEQ ID NO: 2002885 - RNA, 19 nt, Artificial Sequence
  Description of Artificial Sequence: Synthetic oligonucleotide
  Antisense strand to SEQ ID NO: 2002884
uagugggagagauacucag

SEQ ID NO: 2002886 - RNA, 19 nt, Artificial Sequence
  Description of Artificial Sequence: Synthetic oligonucleotide
  Sense strand starting at position 1855 of SEQ ID NO: 1880904
ucuggauaugggcgaugau

SEQ ID NO: 2002887 - RNA, 19 nt, Artificial Sequence
  Description of Artificial Sequence: Synthetic oligonucleotide
  Antisense strand to SEQ ID NO: 2002886
aucaucgcccauauccaga

SEQ ID NO: 2002888 - RNA, 19 nt, Artificial Sequence
  Description of Artificial Sequence: Synthetic oligonucleotide
  Sense strand starting at position 2102 of SEQ ID NO: 1880904
cgaauuuguuuaucgccuu

SEQ ID NO: 2002889 - RNA, 19 nt, Artificial Sequence
  Description of Artificial Sequence: Synthetic oligonucleotide
  Antisense strand to SEQ ID NO: 2002888
aaggcgauaaacaaauucg

SEQ ID NO: 2002890 - RNA, 19 nt, Artificial Sequence
  Description of Artificial Sequence: Synthetic oligonucleotide
  Sense strand starting at position 2657 of SEQ ID NO: 1880904
gccucuggagaauguugaa

SEQ ID NO: 2002891 - RNA, 19 nt, Artificial Sequence
  Description of Artificial Sequence: Synthetic oligonucleotide
  Antisense strand to SEQ ID NO: 2002890
uucaacauucuccagaggc

SEQ ID NO: 2002892 - RNA, 19 nt, Artificial Sequence
  Description of Artificial Sequence: Synthetic oligonucleotide
  Sense strand starting at position 2704 of SEQ ID NO: 1880904
cucagagagaagugauucu

SEQ ID NO: 2002893 - RNA, 19 nt, Artificial Sequence
  Description of Artificial Sequence: Synthetic oligonucleotide
  Antisense strand to SEQ ID NO: 2002892
agaaucacuucucucugag

SEQ ID NO: 2002894 - RNA, 19 nt, Artificial Sequence
  Description of Artificial Sequence: Synthetic oligonucleotide
  Sense strand starting at position 2711 of SEQ ID NO: 1880904
agaagugauucuuugaagu

SEQ ID NO: 2002895 - RNA, 19 nt, Artificial Sequence
  Description of Artificial Sequence: Synthetic oligonucleotide
  Antisense strand to SEQ ID NO: 2002894
acuucaaagaaucacuucu

SEQ ID NO: 2002896 - RNA, 19 nt, Artificial Sequence
  Description of Artificial Sequence: Synthetic oligonucleotide
  Sense strand starting at position 2750 of SEQ ID NO: 1880904
aggcccuuuguggaucaga

SEQ ID NO: 2002897 - RNA, 19 nt, Artificial Sequence
  Description of Artificial Sequence: Synthetic oligonucleotide
  Antisense strand to SEQ ID NO: 2002896
ucugauccacaaagggccu

SEQ ID NO: 2002898 - RNA, 19 nt, Artificial Sequence
  Description of Artificial Sequence: Synthetic oligonucleotide
  Sense strand starting at position 3107 of SEQ ID NO: 1880904
uuaccauauugaguuugaa

SEQ ID NO: 2002899 - RNA, 19 nt, Artificial Sequence
  Description of Artificial Sequence: Synthetic oligonucleotide
  Antisense strand to SEQ ID NO: 2002898
uucaaacucaauaugguaa

SEQ ID NO: 2002900 - RNA, 19 nt, Artificial Sequence
  Description of Artificial Sequence: Synthetic oligonucleotide
  Sense strand starting at position 3110 of SEQ ID NO: 1880904
ccauauugaguuugaacuu

SEQ ID NO: 2002901 - RNA, 19 nt, Artificial Sequence
  Description of Artificial Sequence: Synthetic oligonucleotide
  Antisense strand to SEQ ID NO: 2002900
aaguucaaacucaauaugg

SEQ ID NO: 2002902 - RNA, 19 nt, Artificial Sequence
  Description of Artificial Sequence: Synthetic oligonucleotide
  Sense strand starting at position 3145 of SEQ ID NO: 1880904
aucugcauucgauacaaau

SEQ ID NO: 2002903 - RNA, 19 nt, Artificial Sequence
  Description of Artificial Sequence: Synthetic oligonucleotide
  Antisense strand to SEQ ID NO: 2002902
auuuguaucgaaugcagau

SEQ ID NO: 2002904 - RNA, 19 nt, Artificial Sequence
  Description of Artificial Sequence: Synthetic oligonucleotide
  Sense strand starting at position 3263 of SEQ ID NO: 1880904
gaguaaagagauugccaua

SEQ ID NO: 2002905 - RNA, 19 nt, Artificial Sequence
  Description of Artificial Sequence: Synthetic oligonucleotide
  Antisense strand to SEQ ID NO: 2002904
uauggcaaucucuuuacuc

SEQ ID NO: 2002906 - RNA, 19 nt, Artificial Sequence
  Description of Artificial Sequence: Synthetic oligonucleotide
  Sense strand starting at position 3316 of SEQ ID NO: 1880904
gcugcuuuacaagaaguau

SEQ ID NO: 2002907 - RNA, 19 nt, Artificial Sequence
  Description of Artificial Sequence: Synthetic oligonucleotide
  Antisense strand to SEQ ID NO: 2002906
auacuucuuguaaagcagc

SEQ ID NO: 2002908 - RNA, 19 nt, Artificial Sequence
  Description of Artificial Sequence: Synthetic oligonucleotide
  Sense strand starting at position 3340 of SEQ ID NO: 1880904
gucagcgucgggaauaugu

SEQ ID NO: 2002909 - RNA, 19 nt, Artificial Sequence
  Description of Artificial Sequence: Synthetic oligonucleotide
  Antisense strand to SEQ ID NO: 2002908
acauauucccgacgcugac

SEQ ID NO: 2002910 - RNA, 19 nt, Artificial Sequence
  Description of Artificial Sequence: Synthetic oligonucleotide
  Sense strand starting at position 3347 of SEQ ID NO: 1880904
ucgggaauauguucuggga

SEQ ID NO: 2002911 - RNA, 19 nt, Artificial Sequence
  Description of Artificial Sequence: Synthetic oligonucleotide
  Antisense strand to SEQ ID NO: 2002910
ucccagaacauauucccga

SEQ ID NO: 2002912 - RNA, 19 nt, Artificial Sequence
  Description of Artificial Sequence: Synthetic oligonucleotide
  Sense strand starting at position 3351 of SEQ ID NO: 1880904
gaauauguucugggauaug

SEQ ID NO: 2002913 - RNA, 19 nt, Artificial Sequence
  Description of Artificial Sequence: Synthetic oligonucleotide
  Antisense strand to SEQ ID NO: 2002912
cauaucccagaacauauuc

SEQ ID NO: 2002914 - RNA, 19 nt, Artificial Sequence
  Description of Artificial Sequence: Synthetic oligonucleotide
  Sense strand starting at position 3354 of SEQ ID NO: 1880904
uauguucugggauauguuu

SEQ ID NO: 2002915 - RNA, 19 nt, Artificial Sequence
  Description of Artificial Sequence: Synthetic oligonucleotide
  Antisense strand to SEQ ID NO: 2002914
aaacauaucccagaacaua

SEQ ID NO: 2002916 - RNA, 19 nt, Artificial Sequence
  Description of Artificial Sequence: Synthetic oligonucleotide
  Sense strand starting at position 3395 of SEQ ID NO: 1880904
gcgaauauuauagagugua

SEQ ID NO: 2002917 - RNA, 19 nt, Artificial Sequence
  Description of Artificial Sequence: Synthetic oligonucleotide
  Antisense strand to SEQ ID NO: 2002916
uacacucuauaauauucgc

SEQ ID NO: 2002918 - RNA, 19 nt, Artificial Sequence
  Description of Artificial Sequence: Synthetic oligonucleotide
  Sense strand starting at position 3424 of SEQ ID NO: 1880904
ccuagaugguauguguaua

SEQ ID NO: 2002919 - RNA, 19 nt, Artificial Sequence
  Description of Artificial Sequence: Synthetic oligonucleotide
  Antisense strand to SEQ ID NO: 2002918
uauacacauaccaucuagg

SEQ ID NO: 2002920 - RNA, 19 nt, Artificial Sequence
  Description of Artificial Sequence: Synthetic oligonucleotide
  Sense strand starting at position 3983 of SEQ ID NO: 1880904
gcuaucaauccgggaauua

SEQ ID NO: 2002921 - RNA, 19 nt, Artificial Sequence
  Description of Artificial Sequence: Synthetic oligonucleotide
  Antisense strand to SEQ ID NO: 2002920
uaauucccggauugauagc

SEQ ID NO: 2002922 - RNA, 19 nt, Artificial Sequence
  Description of Artificial Sequence: Synthetic oligonucleotide
  Sense strand starting at position 250 of SEQ ID NO: 1880905
gaucuagauguauguagaa

SEQ ID NO: 2002923 - RNA, 19 nt, Artificial Sequence
  Description of Artificial Sequence: Synthetic oligonucleotide
  Antisense strand to SEQ ID NO: 2002922
uucuacauacaucuagauc

SEQ ID NO: 2002924 - RNA, 19 nt, Artificial Sequence
  Description of Artificial Sequence: Synthetic oligonucleotide
  Sense strand starting at position 324 of SEQ ID NO: 1880905
ucagaauugaaugggucau

SEQ ID NO: 2002925 - RNA, 19 nt, Artificial Sequence
  Description of Artificial Sequence: Synthetic oligonucleotide
  Antisense strand to SEQ ID NO: 2002924
augacccauucaauucuga

SEQ ID NO: 2002926 - RNA, 19 nt, Artificial Sequence
  Description of Artificial Sequence: Synthetic oligonucleotide
  Sense strand starting at position 503 of SEQ ID NO: 1880905
ugcaauaaaccuuggaaau

SEQ ID NO: 2002927 - RNA, 19 nt, Artificial Sequence
  Description of Artificial Sequence: Synthetic oligonucleotide
  Antisense strand to SEQ ID NO: 2002926
auuuccaagguuuauugca

SEQ ID NO: 2002928 - RNA, 19 nt, Artificial Sequence
  Description of Artificial Sequence: Synthetic oligonucleotide
  Sense strand starting at position 504 of SEQ ID NO: 1880905
gcaauaaaccuuggaaauu

SEQ ID NO: 2002929 - RNA, 19 nt, Artificial Sequence
  Description of Artificial Sequence: Synthetic oligonucleotide
  Antisense strand to SEQ ID NO: 2002928
aauuuccaagguuuauugc

SEQ ID NO: 2002930 - RNA, 19 nt, Artificial Sequence
  Description of Artificial Sequence: Synthetic oligonucleotide
  Sense strand starting at position 710 of SEQ ID NO: 1880905
guauauguauuugugugau

SEQ ID NO: 2002931 - RNA, 19 nt, Artificial Sequence
  Description of Artificial Sequence: Synthetic oligonucleotide
  Antisense strand to SEQ ID NO: 2002930
aucacacaaauacauauac

SEQ ID NO: 2002932 - RNA, 19 nt, Artificial Sequence
  Description of Artificial Sequence: Synthetic oligonucleotide
  Sense strand starting at position 716 of SEQ ID NO: 1880905
guauuugugugauugucau

SEQ ID NO: 2002933 - RNA, 19 nt, Artificial Sequence
  Description of Artificial Sequence: Synthetic oligonucleotide
  Antisense strand to SEQ ID NO: 2002932
augacaaucacacaaauac

SEQ ID NO: 2002934 - RNA, 19 nt, Artificial Sequence
  Description of Artificial Sequence: Synthetic oligonucleotide
  Sense strand starting at position 774 of SEQ ID NO: 1880905
aguaaugacguccaauaga

SEQ ID NO: 2002935 - RNA, 19 nt, Artificial Sequence
  Description of Artificial Sequence: Synthetic oligonucleotide
  Antisense strand to SEQ ID NO: 2002934
ucuauuggacgucauuacu

SEQ ID NO: 2002936 - RNA, 19 nt, Artificial Sequence
  Description of Artificial Sequence: Synthetic oligonucleotide
  Sense strand starting at position 942 of SEQ ID NO: 1880905
cauguaaaucgucaugaua

SEQ ID NO: 2002937 - RNA, 19 nt, Artificial Sequence
  Description of Artificial Sequence: Synthetic oligonucleotide
  Antisense strand to SEQ ID NO: 2002936
uaucaugacgauuuacaug

SEQ ID NO: 2002938 - RNA, 19 nt, Artificial Sequence
  Description of Artificial Sequence: Synthetic oligonucleotide
  Sense strand starting at position 945 of SEQ ID NO: 1880905
guaaaucgucaugauauug

SEQ ID NO: 2002939 - RNA, 19 nt, Artificial Sequence
  Description of Artificial Sequence: Synthetic oligonucleotide
  Antisense strand to SEQ ID NO: 2002938
caauaucaugacgauuuac

SEQ ID NO: 2002940 - RNA, 19 nt, Artificial Sequence
  Description of Artificial Sequence: Synthetic oligonucleotide
  Sense strand starting at position 968 of SEQ ID NO: 1880905
cugacauucguccaaugag

SEQ ID NO: 2002941 - RNA, 19 nt, Artificial Sequence
  Description of Artificial Sequence: Synthetic oligonucleotide
  Antisense strand to SEQ ID NO: 2002940
cucauuggacgaaugucag

SEQ ID NO: 2002942 - RNA, 19 nt, Artificial Sequence
  Description of Artificial Sequence: Synthetic oligonucleotide
  Sense strand starting at position 1005 of SEQ ID NO: 1880905
agaguugauccagaugcua

SEQ ID NO: 2002943 - RNA, 19 nt, Artificial Sequence
  Description of Artificial Sequence: Synthetic oligonucleotide
  Antisense strand to SEQ ID NO: 2002942
uagcaucuggaucaacucu

SEQ ID NO: 2002944 - RNA, 19 nt, Artificial Sequence
  Description of Artificial Sequence: Synthetic oligonucleotide
  Sense strand starting at position 1147 of SEQ ID NO: 1880905
acuugucuucgagaacuag

SEQ ID NO: 2002945 - RNA, 19 nt, Artificial Sequence
  Description of Artificial Sequence: Synthetic oligonucleotide
  Antisense strand to SEQ ID NO: 2002944
cuaguucucgaagacaagu

SEQ ID NO: 2002946 - RNA, 19 nt, Artificial Sequence
  Description of Artificial Sequence: Synthetic oligonucleotide
  Sense strand starting at position 1151 of SEQ ID NO: 1880905
gucuucgagaacuagggau

SEQ ID NO: 2002947 - RNA, 19 nt, Artificial Sequence
  Description of Artificial Sequence: Synthetic oligonucleotide
  Antisense strand to SEQ ID NO: 2002946
aucccuaguucucgaagac

SEQ ID NO: 2002948 - RNA, 19 nt, Artificial Sequence
  Description of Artificial Sequence: Synthetic oligonucleotide
  Sense strand starting at position 1163 of SEQ ID NO: 1880905
uagggaugaucuccucucu

SEQ ID NO: 2002949 - RNA, 19 nt, Artificial Sequence
  Description of Artificial Sequence: Synthetic oligonucleotide
  Antisense strand to SEQ ID NO: 2002948
agagaggagaucaucccua

SEQ ID NO: 2002950 - RNA, 19 nt, Artificial Sequence
  Description of Artificial Sequence: Synthetic oligonucleotide
  Sense strand starting at position 1330 of SEQ ID NO: 1880905
cuuaauugucuuggaaaua

SEQ ID NO: 2002951 - RNA, 19 nt, Artificial Sequence
  Description of Artificial Sequence: Synthetic oligonucleotide
  Antisense strand to SEQ ID NO: 2002950
uauuuccaagacaauuaag

SEQ ID NO: 2002952 - RNA, 19 nt, Artificial Sequence
  Description of Artificial Sequence: Synthetic oligonucleotide
  Sense strand starting at position 1403 of SEQ ID NO: 1880905
guuaaaugaaauggugcaa

SEQ ID NO: 2002953 - RNA, 19 nt, Artificial Sequence
  Description of Artificial Sequence: Synthetic oligonucleotide
  Antisense strand to SEQ ID NO: 2002952
uugcaccauuucauuuaac

SEQ ID NO: 2002954 - RNA, 19 nt, Artificial Sequence
  Description of Artificial Sequence: Synthetic oligonucleotide
  Sense strand starting at position 1594 of SEQ ID NO: 1880905
uauaacuggucucuggaua

SEQ ID NO: 2002955 - RNA, 19 nt, Artificial Sequence
  Description of Artificial Sequence: Synthetic oligonucleotide
  Antisense strand to SEQ ID NO: 2002954
uauccagagaccaguuaua

SEQ ID NO: 2002956 - RNA, 19 nt, Artificial Sequence
  Description of Artificial Sequence: Synthetic oligonucleotide
  Sense strand starting at position 1740 of SEQ ID NO: 1880905
aaauauugucaguggauca

SEQ ID NO: 2002957 - RNA, 19 nt, Artificial Sequence
  Description of Artificial Sequence: Synthetic oligonucleotide
  Antisense strand to SEQ ID NO: 2002956
ugauccacugacaauauuu

SEQ ID NO: 2002958 - RNA, 19 nt, Artificial Sequence
  Description of Artificial Sequence: Synthetic oligonucleotide
  Sense strand starting at position 1895 of SEQ ID NO: 1880905
ugaugacucccacauguuc

SEQ ID NO: 2002959 - RNA, 19 nt, Artificial Sequence
  Description of Artificial Sequence: Synthetic oligonucleotide
  Antisense strand to SEQ ID NO: 2002958
gaacaugugggagucauca

SEQ ID NO: 2002960 - RNA, 19 nt, Artificial Sequence
  Description of Artificial Sequence: Synthetic oligonucleotide
  Sense strand starting at position 1926 of SEQ ID NO: 1880905
auuacagucagugagucaa

SEQ ID NO: 2002961 - RNA, 19 nt, Artificial Sequence
  Description of Artificial Sequence: Synthetic oligonucleotide
  Antisense strand to SEQ ID NO: 2002960
uugacucacugacuguaau

SEQ ID NO: 2002962 - RNA, 19 nt, Artificial Sequence
  Description of Artificial Sequence: Synthetic oligonucleotide
  Sense strand starting at position 2038 of SEQ ID NO: 1880905
gucguucacgugguaacua

SEQ ID NO: 2002963 - RNA, 19 nt, Artificial Sequence
  Description of Artificial Sequence: Synthetic oligonucleotide
  Antisense strand to SEQ ID NO: 2002962
uaguuaccacgugaacgac

SEQ ID NO: 2002964 - RNA, 19 nt, Artificial Sequence
  Description of Artificial Sequence: Synthetic oligonucleotide
  Sense strand starting at position 2245 of SEQ ID NO: 1880905
uuaauauucugacuguaga

SEQ ID NO: 2002965 - RNA, 19 nt, Artificial Sequence
  Description of Artificial Sequence: Synthetic oligonucleotide
  Antisense strand to SEQ ID NO: 2002964
ucuacagucagaauauuaa

SEQ ID NO: 2002966 - RNA, 19 nt, Artificial Sequence
  Description of Artificial Sequence: Synthetic oligonucleotide
  Sense strand starting at position 2253 of SEQ ID NO: 1880905
cugacuguagaaugucaga

SEQ ID NO: 2002967 - RNA, 19 nt, Artificial Sequence
  Description of Artificial Sequence: Synthetic oligonucleotide
  Antisense strand to SEQ ID NO: 2002966
ucugacauucuacagucag

SEQ ID NO: 2002968 - RNA, 19 nt, Artificial Sequence
  Description of Artificial Sequence: Synthetic oligonucleotide
  Sense strand starting at position 2266 of SEQ ID NO: 1880905
gucagaaauguguacauau

SEQ ID NO: 2002969 - RNA, 19 nt, Artificial Sequence
  Description of Artificial Sequence: Synthetic oligonucleotide
  Antisense strand to SEQ ID NO: 2002968
auauguacacauuucugac

SEQ ID NO: 2002970 - RNA, 19 nt, Artificial Sequence
  Description of Artificial Sequence: Synthetic oligonucleotide
  Sense strand starting at position 2388 of SEQ ID NO: 1880905
ggugcuuggagacaucaau

SEQ ID NO: 2002971 - RNA, 19 nt, Artificial Sequence
  Description of Artificial Sequence: Synthetic oligonucleotide
  Antisense strand to SEQ ID NO: 2002970
auugaugucuccaagcacc

SEQ ID NO: 2002972 - RNA, 19 nt, Artificial Sequence
  Description of Artificial Sequence: Synthetic oligonucleotide
  Sense strand starting at position 2535 of SEQ ID NO: 1880905
aaacauaggccaggauagu

SEQ ID NO: 2002973 - RNA, 19 nt, Artificial Sequence
  Description of Artificial Sequence: Synthetic oligonucleotide
  Antisense strand to SEQ ID NO: 2002972
acuauccuggccuauguuu

SEQ ID NO: 2002974 - RNA, 19 nt, Artificial Sequence
  Description of Artificial Sequence: Synthetic oligonucleotide
  Sense strand starting at position 2611 of SEQ ID NO: 1880905
acgggaaggugacauuuaa

SEQ ID NO: 2002975 - RNA, 19 nt, Artificial Sequence
  Description of Artificial Sequence: Synthetic oligonucleotide
  Antisense strand to SEQ ID NO: 2002974
uuaaaugucaccuucccgu

SEQ ID NO: 2002976 - RNA, 19 nt, Artificial Sequence
  Description of Artificial Sequence: Synthetic oligonucleotide
  Sense strand starting at position 2977 of SEQ ID NO: 1880905
gaggcagaauauucucuga

SEQ ID NO: 2002977 - RNA, 19 nt, Artificial Sequence
  Description of Artificial Sequence: Synthetic oligonucleotide
  Antisense strand to SEQ ID NO: 2002976
ucagagaauauucugccuc

SEQ ID NO: 2002978 - RNA, 19 nt, Artificial Sequence
  Description of Artificial Sequence: Synthetic oligonucleotide
  Sense strand starting at position 2979 of SEQ ID NO: 1880905
ggcagaauauucucugaau

SEQ ID NO: 2002979 - RNA, 19 nt, Artificial Sequence
  Description of Artificial Sequence: Synthetic oligonucleotide
  Antisense strand to SEQ ID NO: 2002978
auucagagaauauucugcc

SEQ ID NO: 2002980 - RNA, 19 nt, Artificial Sequence
  Description of Artificial Sequence: Synthetic oligonucleotide
  Sense strand starting at position 2980 of SEQ ID NO: 1880905
gcagaauauucucugaaug

SEQ ID NO: 2002981 - RNA, 19 nt, Artificial Sequence
  Description of Artificial Sequence: Synthetic oligonucleotide
  Antisense strand to SEQ ID NO: 2002980
cauucagagaauauucugc

SEQ ID NO: 2002982 - RNA, 19 nt, Artificial Sequence
  Description of Artificial Sequence: Synthetic oligonucleotide
  Sense strand starting at position 3061 of SEQ ID NO: 1880905
ggaaacauaccgcaguaaa

SEQ ID NO: 2002983 - RNA, 19 nt, Artificial Sequence
  Description of Artificial Sequence: Synthetic oligonucleotide
  Antisense strand to SEQ ID NO: 2002982
uuuacugcgguauguuucc

SEQ ID NO: 2002984 - RNA, 19 nt, Artificial Sequence
  Description of Artificial Sequence: Synthetic oligonucleotide
  Sense strand starting at position 3657 of SEQ ID NO: 1880905
accuaauggguuugaaauu

SEQ ID NO: 2002985 - RNA, 19 nt, Artificial Sequence
  Description of Artificial Sequence: Synthetic oligonucleotide
  Antisense strand to SEQ ID NO: 2002984
aauuucaaacccauuaggu

SEQ ID NO: 2002986 - RNA, 19 nt, Artificial Sequence
  Description of Artificial Sequence: Synthetic oligonucleotide
  Sense strand starting at position 3668 of SEQ ID NO: 1880905
uugaaauuagaaugucagu

SEQ ID NO: 2002987 - RNA, 19 nt, Artificial Sequence
  Description of Artificial Sequence: Synthetic oligonucleotide
  Antisense strand to SEQ ID NO: 2002986
acugacauucuaauuucaa

SEQ ID NO: 2002988 - RNA, 19 nt, Artificial Sequence
  Description of Artificial Sequence: Synthetic oligonucleotide
  Sense strand starting at position 3673 of SEQ ID NO: 1880905
auuagaaugucaguacaaa

SEQ ID NO: 2002989 - RNA, 19 nt, Artificial Sequence
  Description of Artificial Sequence: Synthetic oligonucleotide
  Antisense strand to SEQ ID NO: 2002988
uuuguacugacauucuaau

SEQ ID NO: 2002990 - RNA, 19 nt, Artificial Sequence
  Description of Artificial Sequence: Synthetic oligonucleotide
  Sense strand starting at position 3825 of SEQ ID NO: 1880905
gccagagaaguuugaugac

SEQ ID NO: 2002991 - RNA, 19 nt, Artificial Sequence
  Description of Artificial Sequence: Synthetic oligonucleotide
  Antisense strand to SEQ ID NO: 2002990
gucaucaaacuucucuggc

SEQ ID NO: 2002992 - RNA, 19 nt, Artificial Sequence
  Description of Artificial Sequence: Synthetic oligonucleotide
  Sense strand starting at position 3839 of SEQ ID NO: 1880905
augacagguauuggugaua

SEQ ID NO: 2002993 - RNA, 19 nt, Artificial Sequence
  Description of Artificial Sequence: Synthetic oligonucleotide
  Antisense strand to SEQ ID NO: 2002992
uaucaccaauaccugucau

SEQ ID NO: 2002994 - RNA, 19 nt, Artificial Sequence
  Description of Artificial Sequence: Synthetic oligonucleotide
  Sense strand starting at position 3864 of SEQ ID NO: 1880905
uagcaagacugaguuuaag

SEQ ID NO: 2002995 - RNA, 19 nt, Artificial Sequence
  Description of Artificial Sequence: Synthetic oligonucleotide
  Antisense strand to SEQ ID NO: 2002994
cuuaaacucagucuugcua

SEQ ID NO: 2002996 - RNA, 19 nt, Artificial Sequence
  Description of Artificial Sequence: Synthetic oligonucleotide
  Sense strand starting at position 3903 of SEQ ID NO: 1880905
aggauuagggcauggcuaa

SEQ ID NO: 2002997 - RNA, 19 nt, Artificial Sequence
  Description of Artificial Sequence: Synthetic oligonucleotide
  Antisense strand to SEQ ID NO: 2002996
uuagccaugcccuaauccu

SEQ ID NO: 2002998 - RNA, 19 nt, Artificial Sequence
  Description of Artificial Sequence: Synthetic oligonucleotide
  Sense strand starting at position 3904 of SEQ ID NO: 1880905
ggauuagggcauggcuaaa

SEQ ID NO: 2002999 - RNA, 19 nt, Artificial Sequence
  Description of Artificial Sequence: Synthetic oligonucleotide
  Antisense strand to SEQ ID NO: 2002998
uuuagccaugcccuaaucc

SEQ ID NO: 2003000 - RNA, 19 nt, Artificial Sequence
  Description of Artificial Sequence: Synthetic oligonucleotide
  Sense strand starting at position 3921 of SEQ ID NO: 1880905
aaagaaacucaguguucug

SEQ ID NO: 2003001 - RNA, 19 nt, Artificial Sequence
  Description of Artificial Sequence: Synthetic oligonucleotide
  Antisense strand to SEQ ID NO: 2003000
cagaacacugaguuucuuu

SEQ ID NO: 2003002 - RNA, 19 nt, Artificial Sequence
  Description of Artificial Sequence: Synthetic oligonucleotide
  Sense strand starting at position 69 of SEQ ID NO: 1880906
auauacugccuacaugagu

SEQ ID NO: 2003003 - RNA, 19 nt, Artificial Sequence
  Description of Artificial Sequence: Synthetic oligonucleotide
  Antisense strand to SEQ ID NO: 2003002
acucauguaggcaguauau

SEQ ID NO: 2003004 - RNA, 19 nt, Artificial Sequence
  Description of Artificial Sequence: Synthetic oligonucleotide
  Sense strand starting at position 105 of SEQ ID NO: 1880906
agaauuugcucaggagaaa

SEQ ID NO: 2003005 - RNA, 19 nt, Artificial Sequence
  Description of Artificial Sequence: Synthetic oligonucleotide
  Antisense strand to SEQ ID NO: 2003004
uuucuccugagcaaauucu

SEQ ID NO: 2003006 - RNA, 19 nt, Artificial Sequence
  Description of Artificial Sequence: Synthetic oligonucleotide
  Sense strand starting at position 2080 of SEQ ID NO: 1880906
ccaggaugauguccaccua

SEQ ID NO: 2003007 - RNA, 19 nt, Artificial Sequence
  Description of Artificial Sequence: Synthetic oligonucleotide
  Antisense strand to SEQ ID NO: 2003006
uagguggacaucauccugg

SEQ ID NO: 2003008 - RNA, 19 nt, Artificial Sequence
  Description of Artificial Sequence: Synthetic oligonucleotide
  Sense strand starting at position 2272 of SEQ ID NO: 1880906
ugguaauaguaaucagacu

SEQ ID NO: 2003009 - RNA, 19 nt, Artificial Sequence
  Description of Artificial Sequence: Synthetic oligonucleotide
  Antisense strand to SEQ ID NO: 2003008
agucugauuacuauuacca

SEQ ID NO: 2003010 - RNA, 19 nt, Artificial Sequence
  Description of Artificial Sequence: Synthetic oligonucleotide
  Sense strand starting at position 2308 of SEQ ID NO: 1880906
augggaauuuccugcaaag

SEQ ID NO: 2003011 - RNA, 19 nt, Artificial Sequence
  Description of Artificial Sequence: Synthetic oligonucleotide
  Antisense strand to SEQ ID NO: 2003010
cuuugcaggaaauucccau

SEQ ID NO: 2003012 - RNA, 19 nt, Artificial Sequence
  Description of Artificial Sequence: Synthetic oligonucleotide
  Sense strand starting at position 2358 of SEQ ID NO: 1880906
aguacuguaugucuugaau

SEQ ID NO: 2003013 - RNA, 19 nt, Artificial Sequence
  Description of Artificial Sequence: Synthetic oligonucleotide
  Antisense strand to SEQ ID NO: 2003012
auucaagacauacaguacu

SEQ ID NO: 2003014 - RNA, 19 nt, Artificial Sequence
  Description of Artificial Sequence: Synthetic oligonucleotide
  Sense strand starting at position 2369 of SEQ ID NO: 1880906
ucuugaauagggugcugau

SEQ ID NO: 2003015 - RNA, 19 nt, Artificial Sequence
  Description of Artificial Sequence: Synthetic oligonucleotide
  Antisense strand to SEQ ID NO: 2003014
aucagcacccuauucaaga

SEQ ID NO: 2003016 - RNA, 19 nt, Artificial Sequence
  Description of Artificial Sequence: Synthetic oligonucleotide
  Sense strand starting at position 2383 of SEQ ID NO: 1880906
cugauaauguggguguaca

SEQ ID NO: 2003017 - RNA, 19 nt, Artificial Sequence
  Description of Artificial Sequence: Synthetic oligonucleotide
  Antisense strand to SEQ ID NO: 2003016
uguacacccacauuaucag

SEQ ID NO: 2003018 - RNA, 19 nt, Artificial Sequence
  Description of Artificial Sequence: Synthetic oligonucleotide
  Sense strand starting at position 2504 of SEQ ID NO: 1880906
ucaagcuaugaguagauau

SEQ ID NO: 2003019 - RNA, 19 nt, Artificial Sequence
  Description of Artificial Sequence: Synthetic oligonucleotide
  Antisense strand to SEQ ID NO: 2003018
auaucuacucauagcuuga

SEQ ID NO: 2003020 - RNA, 19 nt, Artificial Sequence
  Description of Artificial Sequence: Synthetic oligonucleotide
  Sense strand starting at position 2553 of SEQ ID NO: 1880906
cccagauguguauaccuaa

SEQ ID NO: 2003021 - RNA, 19 nt, Artificial Sequence
  Description of Artificial Sequence: Synthetic oligonucleotide
  Antisense strand to SEQ ID NO: 2003020
uuagguauacacaucuggg

SEQ ID NO: 2003022 - RNA, 19 nt, Artificial Sequence
  Description of Artificial Sequence: Synthetic oligonucleotide
  Sense strand starting at position 2556 of SEQ ID NO: 1880906
agauguguauaccuaaauu

SEQ ID NO: 2003023 - RNA, 19 nt, Artificial Sequence
  Description of Artificial Sequence: Synthetic oligonucleotide
  Antisense strand to SEQ ID NO: 2003022
aauuuagguauacacaucu

SEQ ID NO: 2003024 - RNA, 19 nt, Artificial Sequence
  Description of Artificial Sequence: Synthetic oligonucleotide
  Sense strand starting at position 2632 of SEQ ID NO: 1880906
cccuucugugagugaacua

SEQ ID NO: 2003025 - RNA, 19 nt, Artificial Sequence
  Description of Artificial Sequence: Synthetic oligonucleotide
  Antisense strand to SEQ ID NO: 2003024
uaguucacucacagaaggg

SEQ ID NO: 2003026 - RNA, 19 nt, Artificial Sequence
  Description of Artificial Sequence: Synthetic oligonucleotide
  Sense strand starting at position 2725 of SEQ ID NO: 1880906
ucuguaacugcauacagau

SEQ ID NO: 2003027 - RNA, 19 nt, Artificial Sequence
  Description of Artificial Sequence: Synthetic oligonucleotide
  Antisense strand to SEQ ID NO: 2003026
aucuguaugcaguuacaga

SEQ ID NO: 2003028 - RNA, 19 nt, Artificial Sequence
  Description of Artificial Sequence: Synthetic oligonucleotide
  Sense strand starting at position 2796 of SEQ ID NO: 1880906
uucaaaugggauugagguu

SEQ ID NO: 2003029 - RNA, 19 nt, Artificial Sequence
  Description of Artificial Sequence: Synthetic oligonucleotide
  Antisense strand to SEQ ID NO: 2003028
aaccucaaucccauuugaa

SEQ ID NO: 2003030 - RNA, 19 nt, Artificial Sequence
  Description of Artificial Sequence: Synthetic oligonucleotide
  Sense strand starting at position 2836 of SEQ ID NO: 1880906
uugcuaugcuuauuugcau

SEQ ID NO: 2003031 - RNA, 19 nt, Artificial Sequence
  Description of Artificial Sequence: Synthetic oligonucleotide
  Antisense strand to SEQ ID NO: 2003030
augcaaauaagcauagcaa

SEQ ID NO: 2003032 - RNA, 19 nt, Artificial Sequence
  Description of Artificial Sequence: Synthetic oligonucleotide
  Sense strand starting at position 2884 of SEQ ID NO: 1880906
caaagauauuuguggaagg

SEQ ID NO: 2003033 - RNA, 19 nt, Artificial Sequence
  Description of Artificial Sequence: Synthetic oligonucleotide
  Antisense strand to SEQ ID NO: 2003032
ccuuccacaaauaucuuug

SEQ ID NO: 2003034 - RNA, 19 nt, Artificial Sequence
  Description of Artificial Sequence: Synthetic oligonucleotide
  Sense strand starting at position 2909 of SEQ ID NO: 1880906
ggucuacugagcugaugaa

SEQ ID NO: 2003035 - RNA, 19 nt, Artificial Sequence
  Description of Artificial Sequence: Synthetic oligonucleotide
  Antisense strand to SEQ ID NO: 2003034
uucaucagcucaguagacc

SEQ ID NO: 2003036 - RNA, 19 nt, Artificial Sequence
  Description of Artificial Sequence: Synthetic oligonucleotide
  Sense strand starting at position 2910 of SEQ ID NO: 1880906
gucuacugagcugaugaaa

SEQ ID NO: 2003037 - RNA, 19 nt, Artificial Sequence
  Description of Artificial Sequence: Synthetic oligonucleotide
  Antisense strand to SEQ ID NO: 2003036
uuucaucagcucaguagac

SEQ ID NO: 2003038 - RNA, 19 nt, Artificial Sequence
  Description of Artificial Sequence: Synthetic oligonucleotide
  Sense strand starting at position 2922 of SEQ ID NO: 1880906
gaugaaauggcauggcuuu

SEQ ID NO: 2003039 - RNA, 19 nt, Artificial Sequence
  Description of Artificial Sequence: Synthetic oligonucleotide
  Antisense strand to SEQ ID NO: 2003038
aaagccaugccauuucauc

SEQ ID NO: 2003040 - RNA, 19 nt, Artificial Sequence
  Description of Artificial Sequence: Synthetic oligonucleotide
  Sense strand starting at position 2934 of SEQ ID NO: 1880906
uggcuuucuguauacauag

SEQ ID NO: 2003041 - RNA, 19 nt, Artificial Sequence
  Description of Artificial Sequence: Synthetic oligonucleotide
  Antisense strand to SEQ ID NO: 2003040
cuauguauacagaaagcca

SEQ ID NO: 2003042 - RNA, 19 nt, Artificial Sequence
  Description of Artificial Sequence: Synthetic oligonucleotide
  Sense strand starting at position 3010 of SEQ ID NO: 1880906
aagcauagucucugauuag

SEQ ID NO: 2003043 - RNA, 19 nt, Artificial Sequence
  Description of Artificial Sequence: Synthetic oligonucleotide
  Antisense strand to SEQ ID NO: 2003042
cuaaucagagacuaugcuu

SEQ ID NO: 2003044 - RNA, 19 nt, Artificial Sequence
  Description of Artificial Sequence: Synthetic oligonucleotide
  Sense strand starting at position 3013 of SEQ ID NO: 1880906
cauagucucugauuagaag

SEQ ID NO: 2003045 - RNA, 19 nt, Artificial Sequence
  Description of Artificial Sequence: Synthetic oligonucleotide
  Antisense strand to SEQ ID NO: 2003044
cuucuaaucagagacuaug

SEQ ID NO: 2003046 - RNA, 19 nt, Artificial Sequence
  Description of Artificial Sequence: Synthetic oligonucleotide
  Sense strand starting at position 3066 of SEQ ID NO: 1880906
guucaacauguggaggauu

SEQ ID NO: 2003047 - RNA, 19 nt, Artificial Sequence
  Description of Artificial Sequence: Synthetic oligonucleotide
  Antisense strand to SEQ ID NO: 2003046
aauccuccacauguugaac

SEQ ID NO: 2003048 - RNA, 19 nt, Artificial Sequence
  Description of Artificial Sequence: Synthetic oligonucleotide
  Sense strand starting at position 3157 of SEQ ID NO: 1880906
gagccuuguauuugggagu

SEQ ID NO: 2003049 - RNA, 19 nt, Artificial Sequence
  Description of Artificial Sequence: Synthetic oligonucleotide
  Antisense strand to SEQ ID NO: 2003048
acucccaaauacaaggcuc

SEQ ID NO: 2003050 - RNA, 19 nt, Artificial Sequence
  Description of Artificial Sequence: Synthetic oligonucleotide
  Sense strand starting at position 3232 of SEQ ID NO: 1880906
auucuugaucuuuauguac

SEQ ID NO: 2003051 - RNA, 19 nt, Artificial Sequence
  Description of Artificial Sequence: Synthetic oligonucleotide
  Antisense strand to SEQ ID NO: 2003050
guacauaaagaucaagaau

SEQ ID NO: 2003052 - RNA, 19 nt, Artificial Sequence
  Description of Artificial Sequence: Synthetic oligonucleotide
  Sense strand starting at position 3432 of SEQ ID NO: 1880906
cccacauucucacugggaa

SEQ ID NO: 2003053 - RNA, 19 nt, Artificial Sequence
  Description of Artificial Sequence: Synthetic oligonucleotide
  Antisense strand to SEQ ID NO: 2003052
uucccagugagaauguggg

SEQ ID NO: 2003054 - RNA, 19 nt, Artificial Sequence
  Description of Artificial Sequence: Synthetic oligonucleotide
  Sense strand starting at position 3433 of SEQ ID NO: 1880906
ccacauucucacugggaau

SEQ ID NO: 2003055 - RNA, 19 nt, Artificial Sequence
  Description of Artificial Sequence: Synthetic oligonucleotide
  Antisense strand to SEQ ID NO: 2003054
auucccagugagaaugugg

SEQ ID NO: 2003056 - RNA, 19 nt, Artificial Sequence
  Description of Artificial Sequence: Synthetic oligonucleotide
  Sense strand starting at position 3435 of SEQ ID NO: 1880906
acauucucacugggaaugu

SEQ ID NO: 2003057 - RNA, 19 nt, Artificial Sequence
  Description of Artificial Sequence: Synthetic oligonucleotide
  Antisense strand to SEQ ID NO: 2003056
acauucccagugagaaugu

SEQ ID NO: 2003058 - RNA, 19 nt, Artificial Sequence
  Description of Artificial Sequence: Synthetic oligonucleotide
  Sense strand starting at position 3454 of SEQ ID NO: 1880906
aguagaggucaacggguau

SEQ ID NO: 2003059 - RNA, 19 nt, Artificial Sequence
  Description of Artificial Sequence: Synthetic oligonucleotide
  Antisense strand to SEQ ID NO: 2003058
auacccguugaccucuacu

SEQ ID NO: 2003060 - RNA, 19 nt, Artificial Sequence
  Description of Artificial Sequence: Synthetic oligonucleotide
  Sense strand starting at position 3460 of SEQ ID NO: 1880906
ggucaacggguaugacuuu

SEQ ID NO: 2003061 - RNA, 19 nt, Artificial Sequence
  Description of Artificial Sequence: Synthetic oligonucleotide
  Antisense strand to SEQ ID NO: 2003060
aaagucauacccguugacc

SEQ ID NO: 2003062 - RNA, 19 nt, Artificial Sequence
  Description of Artificial Sequence: Synthetic oligonucleotide
  Sense strand starting at position 3499 of SEQ ID NO: 1880906
gcaucaugggaguagguaa

SEQ ID NO: 2003063 - RNA, 19 nt, Artificial Sequence
  Description of Artificial Sequence: Synthetic oligonucleotide
  Antisense strand to SEQ ID NO: 2003062
uuaccuacucccaugaugc

SEQ ID NO: 2003064 - RNA, 19 nt, Artificial Sequence
  Description of Artificial Sequence: Synthetic oligonucleotide
  Sense strand starting at position 3512 of SEQ ID NO: 1880906
agguaaggcaugugucaag

SEQ ID NO: 2003065 - RNA, 19 nt, Artificial Sequence
  Description of Artificial Sequence: Synthetic oligonucleotide
  Antisense strand to SEQ ID NO: 2003064
cuugacacaugccuuaccu

SEQ ID NO: 2003066 - RNA, 19 nt, Artificial Sequence
  Description of Artificial Sequence: Synthetic oligonucleotide
  Sense strand starting at position 3587 of SEQ ID NO: 1880906
acaagugcccucugauuag

SEQ ID NO: 2003067 - RNA, 19 nt, Artificial Sequence
  Description of Artificial Sequence: Synthetic oligonucleotide
  Antisense strand to SEQ ID NO: 2003066
cuaaucagagggcacuugu

SEQ ID NO: 2003068 - RNA, 19 nt, Artificial Sequence
  Description of Artificial Sequence: Synthetic oligonucleotide
  Sense strand starting at position 3597 of SEQ ID NO: 1880906
ucugauuaguucuccucau

SEQ ID NO: 2003069 - RNA, 19 nt, Artificial Sequence
  Description of Artificial Sequence: Synthetic oligonucleotide
  Antisense strand to SEQ ID NO: 2003068
augaggagaacuaaucaga

SEQ ID NO: 2003070 - RNA, 19 nt, Artificial Sequence
  Description of Artificial Sequence: Synthetic oligonucleotide
  Sense strand starting at position 3598 of SEQ ID NO: 1880906
cugauuaguucuccucaug

SEQ ID NO: 2003071 - RNA, 19 nt, Artificial Sequence
  Description of Artificial Sequence: Synthetic oligonucleotide
  Antisense strand to SEQ ID NO: 2003070
caugaggagaacuaaucag

SEQ ID NO: 2003072 - RNA, 19 nt, Artificial Sequence
  Description of Artificial Sequence: Synthetic oligonucleotide
  Sense strand starting at position 3601 of SEQ ID NO: 1880906
auuaguucuccucaugguu

SEQ ID NO: 2003073 - RNA, 19 nt, Artificial Sequence
  Description of Artificial Sequence: Synthetic oligonucleotide
  Antisense strand to SEQ ID NO: 2003072
aaccaugaggagaacuaau

SEQ ID NO: 2003074 - RNA, 19 nt, Artificial Sequence
  Description of Artificial Sequence: Synthetic oligonucleotide
  Sense strand starting at position 3696 of SEQ ID NO: 1880906
ccuuuauucucaguuugga

SEQ ID NO: 2003075 - RNA, 19 nt, Artificial Sequence
  Description of Artificial Sequence: Synthetic oligonucleotide
  Antisense strand to SEQ ID NO: 2003074
uccaaacugagaauaaagg

SEQ ID NO: 2003076 - RNA, 19 nt, Artificial Sequence
  Description of Artificial Sequence: Synthetic oligonucleotide
  Sense strand starting at position 3699 of SEQ ID NO: 1880906
uuauucucaguuuggaguu

SEQ ID NO: 2003077 - RNA, 19 nt, Artificial Sequence
  Description of Artificial Sequence: Synthetic oligonucleotide
  Antisense strand to SEQ ID NO: 2003076
aacuccaaacugagaauaa

SEQ ID NO: 2003078 - RNA, 19 nt, Artificial Sequence
  Description of Artificial Sequence: Synthetic oligonucleotide
  Sense strand starting at position 3837 of SEQ ID NO: 1880906
ggucuuucuccagauaguc

SEQ ID NO: 2003079 - RNA, 19 nt, Artificial Sequence
  Description of Artificial Sequence: Synthetic oligonucleotide
  Antisense strand to SEQ ID NO: 2003078
gacuaucuggagaaagacc

SEQ ID NO: 2003080 - RNA, 19 nt, Artificial Sequence
  Description of Artificial Sequence: Synthetic oligonucleotide
  Sense strand starting at position 3972 of SEQ ID NO: 1880906
gcuugaauuucuuugucuu

SEQ ID NO: 2003081 - RNA, 19 nt, Artificial Sequence
  Description of Artificial Sequence: Synthetic oligonucleotide
  Antisense strand to SEQ ID NO: 2003080
aagacaaagaaauucaagc

SEQ ID NO: 2003082 - RNA, 19 nt, Artificial Sequence
  Description of Artificial Sequence: Synthetic oligonucleotide
  Sense strand starting at position 30 of SEQ ID NO: 1880907
ccucgaggauuaguuuaaa

SEQ ID NO: 2003083 - RNA, 19 nt, Artificial Sequence
  Description of Artificial Sequence: Synthetic oligonucleotide
  Antisense strand to SEQ ID NO: 2003082
uuuaaacuaauccucgagg

SEQ ID NO: 2003084 - RNA, 19 nt, Artificial Sequence
  Description of Artificial Sequence: Synthetic oligonucleotide
  Sense strand starting at position 178 of SEQ ID NO: 1880907
cuggaaagugaguaucagu

SEQ ID NO: 2003085 - RNA, 19 nt, Artificial Sequence
  Description of Artificial Sequence: Synthetic oligonucleotide
  Antisense strand to SEQ ID NO: 2003084
acugauacucacuuuccag

SEQ ID NO: 2003086 - RNA, 19 nt, Artificial Sequence
  Description of Artificial Sequence: Synthetic oligonucleotide
  Sense strand starting at position 338 of SEQ ID NO: 1880907
uccuauugauuugaaauug

SEQ ID NO: 2003087 - RNA, 19 nt, Artificial Sequence
  Description of Artificial Sequence: Synthetic oligonucleotide
  Antisense strand to SEQ ID NO: 2003086
caauuucaaaucaauagga

SEQ ID NO: 2003088 - RNA, 19 nt, Artificial Sequence
  Description of Artificial Sequence: Synthetic oligonucleotide
  Sense strand starting at position 392 of SEQ ID NO: 1880907
aagugucugggaugaaaca

SEQ ID NO: 2003089 - RNA, 19 nt, Artificial Sequence
  Description of Artificial Sequence: Synthetic oligonucleotide
  Antisense strand to SEQ ID NO: 2003088
uguuucaucccagacacuu

SEQ ID NO: 2003090 - RNA, 19 nt, Artificial Sequence
  Description of Artificial Sequence: Synthetic oligonucleotide
  Sense strand starting at position 517 of SEQ ID NO: 1880907
cagggcauuugugcuguaa

SEQ ID NO: 2003091 - RNA, 19 nt, Artificial Sequence
  Description of Artificial Sequence: Synthetic oligonucleotide
  Antisense strand to SEQ ID NO: 2003090
uuacagcacaaaugcccug

SEQ ID NO: 2003092 - RNA, 19 nt, Artificial Sequence
  Description of Artificial Sequence: Synthetic oligonucleotide
  Sense strand starting at position 521 of SEQ ID NO: 1880907
gcauuugugcuguaaacuu

SEQ ID NO: 2003093 - RNA, 19 nt, Artificial Sequence
  Description of Artificial Sequence: Synthetic oligonucleotide
  Antisense strand to SEQ ID NO: 2003092
aaguuuacagcacaaaugc

SEQ ID NO: 2003094 - RNA, 19 nt, Artificial Sequence
  Description of Artificial Sequence: Synthetic oligonucleotide
  Sense strand starting at position 655 of SEQ ID NO: 1880907
ucaucacuguuccugggaa

SEQ ID NO: 2003095 - RNA, 19 nt, Artificial Sequence
  Description of Artificial Sequence: Synthetic oligonucleotide
  Antisense strand to SEQ ID NO: 2003094
uucccaggaacagugauga

SEQ ID NO: 2003096 - RNA, 19 nt, Artificial Sequence
  Description of Artificial Sequence: Synthetic oligonucleotide
  Sense strand starting at position 657 of SEQ ID NO: 1880907
aucacuguuccugggaacu

SEQ ID NO: 2003097 - RNA, 19 nt, Artificial Sequence
  Description of Artificial Sequence: Synthetic oligonucleotide
  Antisense strand to SEQ ID NO: 2003096
aguucccaggaacagugau

SEQ ID NO: 2003098 - RNA, 19 nt, Artificial Sequence
  Description of Artificial Sequence: Synthetic oligonucleotide
  Sense strand starting at position 811 of SEQ ID NO: 1880907
cccugauauccugacagca

SEQ ID NO: 2003099 - RNA, 19 nt, Artificial Sequence
  Description of Artificial Sequence: Synthetic oligonucleotide
  Antisense strand to SEQ ID NO: 2003098
ugcugucaggauaucaggg

SEQ ID NO: 2003100 - RNA, 19 nt, Artificial Sequence
  Description of Artificial Sequence: Synthetic oligonucleotide
  Sense strand starting at position 875 of SEQ ID NO: 1880907
acucaaguuccaugaggac

SEQ ID NO: 2003101 - RNA, 19 nt, Artificial Sequence
  Description of Artificial Sequence: Synthetic oligonucleotide
  Antisense strand to SEQ ID NO: 2003100
guccucauggaacuugagu

SEQ ID NO: 2003102 - RNA, 19 nt, Artificial Sequence
  Description of Artificial Sequence: Synthetic oligonucleotide
  Sense strand starting at position 916 of SEQ ID NO: 1880907
acagaagugagguguuacu

SEQ ID NO: 2003103 - RNA, 19 nt, Artificial Sequence
  Description of Artificial Sequence: Synthetic oligonucleotide
  Antisense strand to SEQ ID NO: 2003102
aguaacaccucacuucugu

SEQ ID NO: 2003104 - RNA, 19 nt, Artificial Sequence
  Description of Artificial Sequence: Synthetic oligonucleotide
  Sense strand starting at position 997 of SEQ ID NO: 1880907
agacaacuuucugcuuaga

SEQ ID NO: 2003105 - RNA, 19 nt, Artificial Sequence
  Description of Artificial Sequence: Synthetic oligonucleotide
  Antisense strand to SEQ ID NO: 2003104
ucuaagcagaaaguugucu

SEQ ID NO: 2003106 - RNA, 19 nt, Artificial Sequence
  Description of Artificial Sequence: Synthetic oligonucleotide
  Sense strand starting at position 1039 of SEQ ID NO: 1880907
gaugaacugccaugucuaa

SEQ ID NO: 2003107 - RNA, 19 nt, Artificial Sequence
  Description of Artificial Sequence: Synthetic oligonucleotide
  Antisense strand to SEQ ID NO: 2003106
uuagacauggcaguucauc

SEQ ID NO: 2003108 - RNA, 19 nt, Artificial Sequence
  Description of Artificial Sequence: Synthetic oligonucleotide
  Sense strand starting at position 1043 of SEQ ID NO: 1880907
aacugccaugucuaagaga

SEQ ID NO: 2003109 - RNA, 19 nt, Artificial Sequence
  Description of Artificial Sequence: Synthetic oligonucleotide
  Antisense strand to SEQ ID NO: 2003108
ucucuuagacauggcaguu

SEQ ID NO: 2003110 - RNA, 19 nt, Artificial Sequence
  Description of Artificial Sequence: Synthetic oligonucleotide
  Sense strand starting at position 1073 of SEQ ID NO: 1880907
ccgaauuuguaggucugua

SEQ ID NO: 2003111 - RNA, 19 nt, Artificial Sequence
  Description of Artificial Sequence: Synthetic oligonucleotide
  Antisense strand to SEQ ID NO: 2003110
uacagaccuacaaauucgg

SEQ ID NO: 2003112 - RNA, 19 nt, Artificial Sequence
  Description of Artificial Sequence: Synthetic oligonucleotide
  Sense strand starting at position 1078 of SEQ ID NO: 1880907
uuuguaggucuguaacuga

SEQ ID NO: 2003113 - RNA, 19 nt, Artificial Sequence
  Description of Artificial Sequence: Synthetic oligonucleotide
  Antisense strand to SEQ ID NO: 2003112
ucaguuacagaccuacaaa

SEQ ID NO: 2003114 - RNA, 19 nt, Artificial Sequence
  Description of Artificial Sequence: Synthetic oligonucleotide
  Sense strand starting at position 1086 of SEQ ID NO: 1880907
ucuguaacugaccaaguuu

SEQ ID NO: 2003115 - RNA, 19 nt, Artificial Sequence
  Description of Artificial Sequence: Synthetic oligonucleotide
  Antisense strand to SEQ ID NO: 2003114
aaacuuggucaguuacaga

SEQ ID NO: 2003116 - RNA, 19 nt, Artificial Sequence
  Description of Artificial Sequence: Synthetic oligonucleotide
  Sense strand starting at position 1408 of SEQ ID NO: 1880907
ugaaauuccuacccacgga

SEQ ID NO: 2003117 - RNA, 19 nt, Artificial Sequence
  Description of Artificial Sequence: Synthetic oligonucleotide
  Antisense strand to SEQ ID NO: 2003116
uccguggguaggaauuuca

SEQ ID NO: 2003118 - RNA, 19 nt, Artificial Sequence
  Description of Artificial Sequence: Synthetic oligonucleotide
  Sense strand starting at position 1548 of SEQ ID NO: 1880907
cugcgaagucuuguuugua

SEQ ID NO: 2003119 - RNA, 19 nt, Artificial Sequence
  Description of Artificial Sequence: Synthetic oligonucleotide
  Antisense strand to SEQ ID NO: 2003118
uacaaacaagacuucgcag

SEQ ID NO: 2003120 - RNA, 19 nt, Artificial Sequence
  Description of Artificial Sequence: Synthetic oligonucleotide
  Sense strand starting at position 1716 of SEQ ID NO: 1880907
gcagguuagaacugaucuc

SEQ ID NO: 2003121 - RNA, 19 nt, Artificial Sequence
  Description of Artificial Sequence: Synthetic oligonucleotide
  Antisense strand to SEQ ID NO: 2003120
gagaucaguucuaaccugc

SEQ ID NO: 2003122 - RNA, 19 nt, Artificial Sequence
  Description of Artificial Sequence: Synthetic oligonucleotide
  Sense strand starting at position 1775 of SEQ ID NO: 1880907
acguguuacgccucuucua

SEQ ID NO: 2003123 - RNA, 19 nt, Artificial Sequence
  Description of Artificial Sequence: Synthetic oligonucleotide
  Antisense strand to SEQ ID NO: 2003122
uagaagaggcguaacacgu

SEQ ID NO: 2003124 - RNA, 19 nt, Artificial Sequence
  Description of Artificial Sequence: Synthetic oligonucleotide
  Sense strand starting at position 1776 of SEQ ID NO: 1880907
cguguuacgccucuucuaa

SEQ ID NO: 2003125 - RNA, 19 nt, Artificial Sequence
  Description of Artificial Sequence: Synthetic oligonucleotide
  Antisense strand to SEQ ID NO: 2003124
uuagaagaggcguaacacg

SEQ ID NO: 2003126 - RNA, 19 nt, Artificial Sequence
  Description of Artificial Sequence: Synthetic oligonucleotide
  Sense strand starting at position 1922 of SEQ ID NO: 1880907
caaguuucucucugggaaa

SEQ ID NO: 2003127 - RNA, 19 nt, Artificial Sequence
  Description of Artificial Sequence: Synthetic oligonucleotide
  Antisense strand to SEQ ID NO: 2003126
uuucccagagagaaacuug

SEQ ID NO: 2003128 - RNA, 19 nt, Artificial Sequence
  Description of Artificial Sequence: Synthetic oligonucleotide
  Sense strand starting at position 1976 of SEQ ID NO: 1880907
aacgcuuuaguggaagaaa

SEQ ID NO: 2003129 - RNA, 19 nt, Artificial Sequence
  Description of Artificial Sequence: Synthetic oligonucleotide
  Antisense strand to SEQ ID NO: 2003128
uuucuuccacuaaagcguu

SEQ ID NO: 2003130 - RNA, 19 nt, Artificial Sequence
  Description of Artificial Sequence: Synthetic oligonucleotide
  Sense strand starting at position 2279 of SEQ ID NO: 1880907
acaucaaauuguguaggua

SEQ ID NO: 2003131 - RNA, 19 nt, Artificial Sequence
  Description of Artificial Sequence: Synthetic oligonucleotide
  Antisense strand to SEQ ID NO: 2003130
uaccuacacaauuugaugu

SEQ ID NO: 2003132 - RNA, 19 nt, Artificial Sequence
  Description of Artificial Sequence: Synthetic oligonucleotide
  Sense strand starting at position 2280 of SEQ ID NO: 1880907
caucaaauuguguagguau

SEQ ID NO: 2003133 - RNA, 19 nt, Artificial Sequence
  Description of Artificial Sequence: Synthetic oligonucleotide
  Antisense strand to SEQ ID NO: 2003132
auaccuacacaauuugaug

SEQ ID NO: 2003134 - RNA, 19 nt, Artificial Sequence
  Description of Artificial Sequence: Synthetic oligonucleotide
  Sense strand starting at position 2292 of SEQ ID NO: 1880907
uagguaucucaguacagcu

SEQ ID NO: 2003135 - RNA, 19 nt, Artificial Sequence
  Description of Artificial Sequence: Synthetic oligonucleotide
  Antisense strand to SEQ ID NO: 2003134
agcuguacugagauaccua

SEQ ID NO: 2003136 - RNA, 19 nt, Artificial Sequence
  Description of Artificial Sequence: Synthetic oligonucleotide
  Sense strand starting at position 2739 of SEQ ID NO: 1880907
cucugaagggauugguuau

SEQ ID NO: 2003137 - RNA, 19 nt, Artificial Sequence
  Description of Artificial Sequence: Synthetic oligonucleotide
  Antisense strand to SEQ ID NO: 2003136
auaaccaaucccuucagag

SEQ ID NO: 2003138 - RNA, 19 nt, Artificial Sequence
  Description of Artificial Sequence: Synthetic oligonucleotide
  Sense strand starting at position 2746 of SEQ ID NO: 1880907
gggauugguuaugcaaaua

SEQ ID NO: 2003139 - RNA, 19 nt, Artificial Sequence
  Description of Artificial Sequence: Synthetic oligonucleotide
  Antisense strand to SEQ ID NO: 2003138
uauuugcauaaccaauccc

SEQ ID NO: 2003140 - RNA, 19 nt, Artificial Sequence
  Description of Artificial Sequence: Synthetic oligonucleotide
  Sense strand starting at position 2908 of SEQ ID NO: 1880907
gucagcaauuuagcaagua

SEQ ID NO: 2003141 - RNA, 19 nt, Artificial Sequence
  Description of Artificial Sequence: Synthetic oligonucleotide
  Antisense strand to SEQ ID NO: 2003140
uacuugcuaaauugcugac

SEQ ID NO: 2003142 - RNA, 19 nt, Artificial Sequence
  Description of Artificial Sequence: Synthetic oligonucleotide
  Sense strand starting at position 3027 of SEQ ID NO: 1880907
ugguuuacacugcacauaa

SEQ ID NO: 2003143 - RNA, 19 nt, Artificial Sequence
  Description of Artificial Sequence: Synthetic oligonucleotide
  Antisense strand to SEQ ID NO: 2003142
uuaugugcaguguaaacca

SEQ ID NO: 2003144 - RNA, 19 nt, Artificial Sequence
  Description of Artificial Sequence: Synthetic oligonucleotide
  Sense strand starting at position 3157 of SEQ ID NO: 1880907
cuuaaauaacugugagacu

SEQ ID NO: 2003145 - RNA, 19 nt, Artificial Sequence
  Description of Artificial Sequence: Synthetic oligonucleotide
  Antisense strand to SEQ ID NO: 2003144
agucucacaguuauuuaag

SEQ ID NO: 2003146 - RNA, 19 nt, Artificial Sequence
  Description of Artificial Sequence: Synthetic oligonucleotide
  Sense strand starting at position 3184 of SEQ ID NO: 1880907
uuuccuaaagagugaaagu

SEQ ID NO: 2003147 - RNA, 19 nt, Artificial Sequence
  Description of Artificial Sequence: Synthetic oligonucleotide
  Antisense strand to SEQ ID NO: 2003146
acuuucacucuuuaggaaa

SEQ ID NO: 2003148 - RNA, 19 nt, Artificial Sequence
  Description of Artificial Sequence: Synthetic oligonucleotide
  Sense strand starting at position 3521 of SEQ ID NO: 1880907
uccacacucccagagguau

SEQ ID NO: 2003149 - RNA, 19 nt, Artificial Sequence
  Description of Artificial Sequence: Synthetic oligonucleotide
  Antisense strand to SEQ ID NO: 2003148
auaccucugggagugugga

SEQ ID NO: 2003150 - RNA, 19 nt, Artificial Sequence
  Description of Artificial Sequence: Synthetic oligonucleotide
  Sense strand starting at position 3535 of SEQ ID NO: 1880907
gguauacgucuuuguauuu

SEQ ID NO: 2003151 - RNA, 19 nt, Artificial Sequence
  Description of Artificial Sequence: Synthetic oligonucleotide
  Antisense strand to SEQ ID NO: 2003150
aaauacaaagacguauacc

SEQ ID NO: 2003152 - RNA, 19 nt, Artificial Sequence
  Description of Artificial Sequence: Synthetic oligonucleotide
  Sense strand starting at position 3627 of SEQ ID NO: 1880907
cuuguucuaggaugcaaga

SEQ ID NO: 2003153 - RNA, 19 nt, Artificial Sequence
  Description of Artificial Sequence: Synthetic oligonucleotide
  Antisense strand to SEQ ID NO: 2003152
ucuugcauccuagaacaag

SEQ ID NO: 2003154 - RNA, 19 nt, Artificial Sequence
  Description of Artificial Sequence: Synthetic oligonucleotide
  Sense strand starting at position 3749 of SEQ ID NO: 1880907
cagauaaagugucuauaga

SEQ ID NO: 2003155 - RNA, 19 nt, Artificial Sequence
  Description of Artificial Sequence: Synthetic oligonucleotide
  Antisense strand to SEQ ID NO: 2003154
ucuauagacacuuuaucug

SEQ ID NO: 2003156 - RNA, 19 nt, Artificial Sequence
  Description of Artificial Sequence: Synthetic oligonucleotide
  Sense strand starting at position 3890 of SEQ ID NO: 1880907
cuaaauauaugugugacuu

SEQ ID NO: 2003157 - RNA, 19 nt, Artificial Sequence
  Description of Artificial Sequence: Synthetic oligonucleotide
  Antisense strand to SEQ ID NO: 2003156
aagucacacauauauuuag

SEQ ID NO: 2003158 - RNA, 19 nt, Artificial Sequence
  Description of Artificial Sequence: Synthetic oligonucleotide
  Sense strand starting at position 3894 of SEQ ID NO: 1880907
auauaugugugacuuauca

SEQ ID NO: 2003159 - RNA, 19 nt, Artificial Sequence
  Description of Artificial Sequence: Synthetic oligonucleotide
  Antisense strand to SEQ ID NO: 2003158
ugauaagucacacauauau

SEQ ID NO: 2003160 - RNA, 19 nt, Artificial Sequence
  Description of Artificial Sequence: Synthetic oligonucleotide
  Sense strand starting at position 3910 of SEQ ID NO: 1880907
ucaaguuccucuucugaga

SEQ ID NO: 2003161 - RNA, 19 nt, Artificial Sequence
  Description of Artificial Sequence: Synthetic oligonucleotide
  Antisense strand to SEQ ID NO: 2003160
ucucagaagaggaacuuga

SEQ ID NO: 2003162 - RNA, 19 nt, Artificial Sequence
  Description of Artificial Sequence: Synthetic oligonucleotide
  Sense strand starting at position 66 of SEQ ID NO: 1880908
agaaauugagccugaacca

SEQ ID NO: 2003163 - RNA, 19 nt, Artificial Sequence
  Description of Artificial Sequence: Synthetic oligonucleotide
  Antisense strand to SEQ ID NO: 2003162
ugguucaggcucaauuucu

SEQ ID NO: 2003164 - RNA, 19 nt, Artificial Sequence
  Description of Artificial Sequence: Synthetic oligonucleotide
  Sense strand starting at position 137 of SEQ ID NO: 1880908
cucaaauuuggcugucuuu

SEQ ID NO: 2003165 - RNA, 19 nt, Artificial Sequence
  Description of Artificial Sequence: Synthetic oligonucleotide
  Antisense strand to SEQ ID NO: 2003164
aaagacagccaaauuugag

SEQ ID NO: 2003166 - RNA, 19 nt, Artificial Sequence
  Description of Artificial Sequence: Synthetic oligonucleotide
  Sense strand starting at position 264 of SEQ ID NO: 1880908
ggaagugggcucugaauug

SEQ ID NO: 2003167 - RNA, 19 nt, Artificial Sequence
  Description of Artificial Sequence: Synthetic oligonucleotide
  Antisense strand to SEQ ID NO: 2003166
caauucagagcccacuucc

SEQ ID NO: 2003168 - RNA, 19 nt, Artificial Sequence
  Description of Artificial Sequence: Synthetic oligonucleotide
  Sense strand starting at position 312 of SEQ ID NO: 1880908
cugacuuccagauguggaa

SEQ ID NO: 2003169 - RNA, 19 nt, Artificial Sequence
  Description of Artificial Sequence: Synthetic oligonucleotide
  Antisense strand to SEQ ID NO: 2003168
uuccacaucuggaagucag

SEQ ID NO: 2003170 - RNA, 19 nt, Artificial Sequence
  Description of Artificial Sequence: Synthetic oligonucleotide
  Sense strand starting at position 332 of SEQ ID NO: 1880908
auaucuuucuuguuuagga

SEQ ID NO: 2003171 - RNA, 19 nt, Artificial Sequence
  Description of Artificial Sequence: Synthetic oligonucleotide
  Antisense strand to SEQ ID NO: 2003170
uccuaaacaagaaagauau

SEQ ID NO: 2003172 - RNA, 19 nt, Artificial Sequence
  Description of Artificial Sequence: Synthetic oligonucleotide
  Sense strand starting at position 348 of SEQ ID NO: 1880908
ggaccuauguaaccugauu

SEQ ID NO: 2003173 - RNA, 19 nt, Artificial Sequence
  Description of Artificial Sequence: Synthetic oligonucleotide
  Antisense strand to SEQ ID NO: 2003172
aaucagguuacauaggucc

SEQ ID NO: 2003174 - RNA, 19 nt, Artificial Sequence
  Description of Artificial Sequence: Synthetic oligonucleotide
  Sense strand starting at position 353 of SEQ ID NO: 1880908
uauguaaccugauuggauu

SEQ ID NO: 2003175 - RNA, 19 nt, Artificial Sequence
  Description of Artificial Sequence: Synthetic oligonucleotide
  Antisense strand to SEQ ID NO: 2003174
aauccaaucagguuacaua

SEQ ID NO: 2003176 - RNA, 19 nt, Artificial Sequence
  Description of Artificial Sequence: Synthetic oligonucleotide
  Sense strand starting at position 354 of SEQ ID NO: 1880908
auguaaccugauuggauua

SEQ ID NO: 2003177 - RNA, 19 nt, Artificial Sequence
  Description of Artificial Sequence: Synthetic oligonucleotide
  Antisense strand to SEQ ID NO: 2003176
uaauccaaucagguuacau

SEQ ID NO: 2003178 - RNA, 19 nt, Artificial Sequence
  Description of Artificial Sequence: Synthetic oligonucleotide
  Sense strand starting at position 425 of SEQ ID NO: 1880908
aguagaaagcuguauucuc

SEQ ID NO: 2003179 - RNA, 19 nt, Artificial Sequence
  Description of Artificial Sequence: Synthetic oligonucleotide
  Antisense strand to SEQ ID NO: 2003178
gagaauacagcuuucuacu

SEQ ID NO: 2003180 - RNA, 19 nt, Artificial Sequence
  Description of Artificial Sequence: Synthetic oligonucleotide
  Sense strand starting at position 432 of SEQ ID NO: 1880908
agcuguauucuccaggaaa

SEQ ID NO: 2003181 - RNA, 19 nt, Artificial Sequence
  Description of Artificial Sequence: Synthetic oligonucleotide
  Antisense strand to SEQ ID NO: 2003180
uuuccuggagaauacagcu

SEQ ID NO: 2003182 - RNA, 19 nt, Artificial Sequence
  Description of Artificial Sequence: Synthetic oligonucleotide
  Sense strand starting at position 434 of SEQ ID NO: 1880908
cuguauucuccaggaaauc

SEQ ID NO: 2003183 - RNA, 19 nt, Artificial Sequence
  Description of Artificial Sequence: Synthetic oligonucleotide
  Antisense strand to SEQ ID NO: 2003182
gauuuccuggagaauacag

SEQ ID NO: 2003184 - RNA, 19 nt, Artificial Sequence
  Description of Artificial Sequence: Synthetic oligonucleotide
  Sense strand starting at position 699 of SEQ ID NO: 1880908
ccaaccgaguguucuauuu

SEQ ID NO: 2003185 - RNA, 19 nt, Artificial Sequence
  Description of Artificial Sequence: Synthetic oligonucleotide
  Antisense strand to SEQ ID NO: 2003184
aaauagaacacucgguugg

SEQ ID NO: 2003186 - RNA, 19 nt, Artificial Sequence
  Description of Artificial Sequence: Synthetic oligonucleotide
  Sense strand starting at position 895 of SEQ ID NO: 1880908
cagagaacuuuguuccaga

SEQ ID NO: 2003187 - RNA, 19 nt, Artificial Sequence
  Description of Artificial Sequence: Synthetic oligonucleotide
  Antisense strand to SEQ ID NO: 2003186
ucuggaacaaaguucucug

SEQ ID NO: 2003188 - RNA, 19 nt, Artificial Sequence
  Description of Artificial Sequence: Synthetic oligonucleotide
  Sense strand starting at position 896 of SEQ ID NO: 1880908
agagaacuuuguuccagaa

SEQ ID NO: 2003189 - RNA, 19 nt, Artificial Sequence
  Description of Artificial Sequence: Synthetic oligonucleotide
  Antisense strand to SEQ ID NO: 2003188
uucuggaacaaaguucucu

SEQ ID NO: 2003190 - RNA, 19 nt, Artificial Sequence
  Description of Artificial Sequence: Synthetic oligonucleotide
  Sense strand starting at position 949 of SEQ ID NO: 1880908
ucucaaaucuggucauuag

SEQ ID NO: 2003191 - RNA, 19 nt, Artificial Sequence
  Description of Artificial Sequence: Synthetic oligonucleotide
  Antisense strand to SEQ ID NO: 2003190
cuaaugaccagauuugaga

SEQ ID NO: 2003192 - RNA, 19 nt, Artificial Sequence
  Description of Artificial Sequence: Synthetic oligonucleotide
  Sense strand starting at position 952 of SEQ ID NO: 1880908
caaaucuggucauuagaga

SEQ ID NO: 2003193 - RNA, 19 nt, Artificial Sequence
  Description of Artificial Sequence: Synthetic oligonucleotide
  Antisense strand to SEQ ID NO: 2003192
ucucuaaugaccagauuug

SEQ ID NO: 2003194 - RNA, 19 nt, Artificial Sequence
  Description of Artificial Sequence: Synthetic oligonucleotide
  Sense strand starting at position 959 of SEQ ID NO: 1880908
ggucauuagagauaucugu

SEQ ID NO: 2003195 - RNA, 19 nt, Artificial Sequence
  Description of Artificial Sequence: Synthetic oligonucleotide
  Antisense strand to SEQ ID NO: 2003194
acagauaucucuaaugacc

SEQ ID NO: 2003196 - RNA, 19 nt, Artificial Sequence
  Description of Artificial Sequence: Synthetic oligonucleotide
  Sense strand starting at position 1077 of SEQ ID NO: 1880908
cccuguacucuguaggauu

SEQ ID NO: 2003197 - RNA, 19 nt, Artificial Sequence
  Description of Artificial Sequence: Synthetic oligonucleotide
  Antisense strand to SEQ ID NO: 2003196
aauccuacagaguacaggg

SEQ ID NO: 2003198 - RNA, 19 nt, Artificial Sequence
  Description of Artificial Sequence: Synthetic oligonucleotide
  Sense strand starting at position 1263 of SEQ ID NO: 1880908
gguauaaucuaucccagau

SEQ ID NO: 2003199 - RNA, 19 nt, Artificial Sequence
  Description of Artificial Sequence: Synthetic oligonucleotide
  Antisense strand to SEQ ID NO: 2003198
aucugggauagauuauacc

SEQ ID NO: 2003200 - RNA, 19 nt, Artificial Sequence
  Description of Artificial Sequence: Synthetic oligonucleotide
  Sense strand starting at position 1289 of SEQ ID NO: 1880908
cagagagaaacuuggcgau

SEQ ID NO: 2003201 - RNA, 19 nt, Artificial Sequence
  Description of Artificial Sequence: Synthetic oligonucleotide
  Antisense strand to SEQ ID NO: 2003200
aucgccaaguuucucucug

SEQ ID NO: 2003202 - RNA, 19 nt, Artificial Sequence
  Description of Artificial Sequence: Synthetic oligonucleotide
  Sense strand starting at position 1291 of SEQ ID NO: 1880908
gagagaaacuuggcgauca

SEQ ID NO: 2003203 - RNA, 19 nt, Artificial Sequence
  Description of Artificial Sequence: Synthetic oligonucleotide
  Antisense strand to SEQ ID NO: 2003202
ugaucgccaaguuucucuc

SEQ ID NO: 2003204 - RNA, 19 nt, Artificial Sequence
  Description of Artificial Sequence: Synthetic oligonucleotide
  Sense strand starting at position 1661 of SEQ ID NO: 1880908
aaacaagacuucgcaggua

SEQ ID NO: 2003205 - RNA, 19 nt, Artificial Sequence
  Description of Artificial Sequence: Synthetic oligonucleotide
  Antisense strand to SEQ ID NO: 2003204
uaccugcgaagucuuguuu

SEQ ID NO: 2003206 - RNA, 19 nt, Artificial Sequence
  Description of Artificial Sequence: Synthetic oligonucleotide
  Sense strand starting at position 1774 of SEQ ID NO: 1880908
gugagucugaagugagaag

SEQ ID NO: 2003207 - RNA, 19 nt, Artificial Sequence
  Description of Artificial Sequence: Synthetic oligonucleotide
  Antisense strand to SEQ ID NO: 2003206
cuucucacuucagacucac

SEQ ID NO: 2003208 - RNA, 19 nt, Artificial Sequence
  Description of Artificial Sequence: Synthetic oligonucleotide
  Sense strand starting at position 1795 of SEQ ID NO: 1880908
guguccguggguaggaauu

SEQ ID NO: 2003209 - RNA, 19 nt, Artificial Sequence
  Description of Artificial Sequence: Synthetic oligonucleotide
  Antisense strand to SEQ ID NO: 2003208
aauuccuacccacggacac

SEQ ID NO: 2003210 - RNA, 19 nt, Artificial Sequence
  Description of Artificial Sequence: Synthetic oligonucleotide
  Sense strand starting at position 1858 of SEQ ID NO: 1880908
gcuucuucgcuuucucuua

SEQ ID NO: 2003211 - RNA, 19 nt, Artificial Sequence
  Description of Artificial Sequence: Synthetic oligonucleotide
  Antisense strand to SEQ ID NO: 2003210
uaagagaaagcgaagaagc

SEQ ID NO: 2003212 - RNA, 19 nt, Artificial Sequence
  Description of Artificial Sequence: Synthetic oligonucleotide
  Sense strand starting at position 2000 of SEQ ID NO: 1880908
agaauuauauggcuggaau

SEQ ID NO: 2003213 - RNA, 19 nt, Artificial Sequence
  Description of Artificial Sequence: Synthetic oligonucleotide
  Antisense strand to SEQ ID NO: 2003212
auuccagccauauaauucu

SEQ ID NO: 2003214 - RNA, 19 nt, Artificial Sequence
  Description of Artificial Sequence: Synthetic oligonucleotide
  Sense strand starting at position 2001 of SEQ ID NO: 1880908
gaauuauauggcuggaaua

SEQ ID NO: 2003215 - RNA, 19 nt, Artificial Sequence
  Description of Artificial Sequence: Synthetic oligonucleotide
  Antisense strand to SEQ ID NO: 2003214
uauuccagccauauaauuc

SEQ ID NO: 2003216 - RNA, 19 nt, Artificial Sequence
  Description of Artificial Sequence: Synthetic oligonucleotide
  Sense strand starting at position 2323 of SEQ ID NO: 1880908
aagugaaaguccucaugga

SEQ ID NO: 2003217 - RNA, 19 nt, Artificial Sequence
  Description of Artificial Sequence: Synthetic oligonucleotide
  Antisense strand to SEQ ID NO: 2003216
uccaugaggacuuucacuu

SEQ ID NO: 2003218 - RNA, 19 nt, Artificial Sequence
  Description of Artificial Sequence: Synthetic oligonucleotide
  Sense strand starting at position 2327 of SEQ ID NO: 1880908
gaaaguccucauggaacuu

SEQ ID NO: 2003219 - RNA, 19 nt, Artificial Sequence
  Description of Artificial Sequence: Synthetic oligonucleotide
  Antisense strand to SEQ ID NO: 2003218
aaguuccaugaggacuuuc

SEQ ID NO: 2003220 - RNA, 19 nt, Artificial Sequence
  Description of Artificial Sequence: Synthetic oligonucleotide
  Sense strand starting at position 2342 of SEQ ID NO: 1880908
acuugagucguuuaccaaa

SEQ ID NO: 2003221 - RNA, 19 nt, Artificial Sequence
  Description of Artificial Sequence: Synthetic oligonucleotide
  Antisense strand to SEQ ID NO: 2003220
uuugguaaacgacucaagu

SEQ ID NO: 2003222 - RNA, 19 nt, Artificial Sequence
  Description of Artificial Sequence: Synthetic oligonucleotide
  Sense strand starting at position 2392 of SEQ ID NO: 1880908
aacugcugucaggauauca

SEQ ID NO: 2003223 - RNA, 19 nt, Artificial Sequence
  Description of Artificial Sequence: Synthetic oligonucleotide
  Antisense strand to SEQ ID NO: 2003222
ugauauccugacagcaguu

SEQ ID NO: 2003224 - RNA, 19 nt, Artificial Sequence
  Description of Artificial Sequence: Synthetic oligonucleotide
  Sense strand starting at position 2626 of SEQ ID NO: 1880908
cccuguaaugaugaaggca

SEQ ID NO: 2003225 - RNA, 19 nt, Artificial Sequence
  Description of Artificial Sequence: Synthetic oligonucleotide
  Antisense strand to SEQ ID NO: 2003224
ugccuucaucauuacaggg

SEQ ID NO: 2003226 - RNA, 19 nt, Artificial Sequence
  Description of Artificial Sequence: Synthetic oligonucleotide
  Sense strand starting at position 2629 of SEQ ID NO: 1880908
uguaaugaugaaggcaaga

SEQ ID NO: 2003227 - RNA, 19 nt, Artificial Sequence
  Description of Artificial Sequence: Synthetic oligonucleotide
  Antisense strand to SEQ ID NO: 2003226
ucuugccuucaucauuaca

SEQ ID NO: 2003228 - RNA, 19 nt, Artificial Sequence
  Description of Artificial Sequence: Synthetic oligonucleotide
  Sense strand starting at position 2783 of SEQ ID NO: 1880908
ugugucucaggaugaauau

SEQ ID NO: 2003229 - RNA, 19 nt, Artificial Sequence
  Description of Artificial Sequence: Synthetic oligonucleotide
  Antisense strand to SEQ ID NO: 2003228
auauucauccugagacaca

SEQ ID NO: 2003230 - RNA, 19 nt, Artificial Sequence
  Description of Artificial Sequence: Synthetic oligonucleotide
  Sense strand starting at position 2833 of SEQ ID NO: 1880908
gugugaccauuucuuuauu

SEQ ID NO: 2003231 - RNA, 19 nt, Artificial Sequence
  Description of Artificial Sequence: Synthetic oligonucleotide
  Antisense strand to SEQ ID NO: 2003230
aauaaagaaauggucacac

SEQ ID NO: 2003232 - RNA, 19 nt, Artificial Sequence
  Description of Artificial Sequence: Synthetic oligonucleotide
  Sense strand starting at position 3568 of SEQ ID NO: 1880908
uuuaucauugcggcguaaa

SEQ ID NO: 2003233 - RNA, 19 nt, Artificial Sequence
  Description of Artificial Sequence: Synthetic oligonucleotide
  Antisense strand to SEQ ID NO: 2003232
uuuacgccgcaaugauaaa

SEQ ID NO: 2003234 - RNA, 19 nt, Artificial Sequence
  Description of Artificial Sequence: Synthetic oligonucleotide
  Sense strand starting at position 3679 of SEQ ID NO: 1880908
gugggcuuccuauaauuac

SEQ ID NO: 2003235 - RNA, 19 nt, Artificial Sequence
  Description of Artificial Sequence: Synthetic oligonucleotide
  Antisense strand to SEQ ID NO: 2003234
guaauuauaggaagcccac

SEQ ID NO: 2003236 - RNA, 19 nt, Artificial Sequence
  Description of Artificial Sequence: Synthetic oligonucleotide
  Sense strand starting at position 3701 of SEQ ID NO: 1880908
uaucaauuugcccgagugu

SEQ ID NO: 2003237 - RNA, 19 nt, Artificial Sequence
  Description of Artificial Sequence: Synthetic oligonucleotide
  Antisense strand to SEQ ID NO: 2003236
acacucgggcaaauugaua

SEQ ID NO: 2003238 - RNA, 19 nt, Artificial Sequence
  Description of Artificial Sequence: Synthetic oligonucleotide
  Sense strand starting at position 3922 of SEQ ID NO: 1880908
ucauacggucaggaguuau

SEQ ID NO: 2003239 - RNA, 19 nt, Artificial Sequence
  Description of Artificial Sequence: Synthetic oligonucleotide
  Antisense strand to SEQ ID NO: 2003238
auaacuccugaccguauga

SEQ ID NO: 2003240 - RNA, 19 nt, Artificial Sequence
  Description of Artificial Sequence: Synthetic oligonucleotide
  Sense strand starting at position 3926 of SEQ ID NO: 1880908
acggucaggaguuaugacu

SEQ ID NO: 2003241 - RNA, 19 nt, Artificial Sequence
  Description of Artificial Sequence: Synthetic oligonucleotide
  Antisense strand to SEQ ID NO: 2003240
agucauaacuccugaccgu

SEQ ID NO: 2003242 - RNA, 19 nt, Artificial Sequence
  Description of Artificial Sequence: Synthetic oligonucleotide
  Sense strand starting at position 208 of SEQ ID NO: 1880910
ucccuagauguauagcuuu

SEQ ID NO: 2003243 - RNA, 19 nt, Artificial Sequence
  Description of Artificial Sequence: Synthetic oligonucleotide
  Antisense strand to SEQ ID NO: 2003242
aaagcuauacaucuaggga

SEQ ID NO: 2003244 - RNA, 19 nt, Artificial Sequence
  Description of Artificial Sequence: Synthetic oligonucleotide
  Sense strand starting at position 231 of SEQ ID NO: 1880910
guaauuuguugacauuauc

SEQ ID NO: 2003245 - RNA, 19 nt, Artificial Sequence
  Description of Artificial Sequence: Synthetic oligonucleotide
  Antisense strand to SEQ ID NO: 2003244
gauaaugucaacaaauuac

SEQ ID NO: 2003246 - RNA, 19 nt, Artificial Sequence
  Description of Artificial Sequence: Synthetic oligonucleotide
  Sense strand starting at position 257 of SEQ ID NO: 1880910
ugauauuacuuugugauac

SEQ ID NO: 2003247 - RNA, 19 nt, Artificial Sequence
  Description of Artificial Sequence: Synthetic oligonucleotide
  Antisense strand to SEQ ID NO: 2003246
guaucacaaaguaauauca

SEQ ID NO: 2003248 - RNA, 19 nt, Artificial Sequence
  Description of Artificial Sequence: Synthetic oligonucleotide
  Sense strand starting at position 314 of SEQ ID NO: 1880910
cgaagauuccagugaagaa

SEQ ID NO: 2003249 - RNA, 19 nt, Artificial Sequence
  Description of Artificial Sequence: Synthetic oligonucleotide
  Antisense strand to SEQ ID NO: 2003248
uucuucacuggaaucuucg

SEQ ID NO: 2003250 - RNA, 19 nt, Artificial Sequence
  Description of Artificial Sequence: Synthetic oligonucleotide
  Sense strand starting at position 346 of SEQ ID NO: 1880910
gcugcauuggaguaaagcu

SEQ ID NO: 2003251 - RNA, 19 nt, Artificial Sequence
  Description of Artificial Sequence: Synthetic oligonucleotide
  Antisense strand to SEQ ID NO: 2003250
agcuuuacuccaaugcagc

SEQ ID NO: 2003252 - RNA, 19 nt, Artificial Sequence
  Description of Artificial Sequence: Synthetic oligonucleotide
  Sense strand starting at position 354 of SEQ ID NO: 1880910
ggaguaaagcuagguaucu

SEQ ID NO: 2003253 - RNA, 19 nt, Artificial Sequence
  Description of Artificial Sequence: Synthetic oligonucleotide
  Antisense strand to SEQ ID NO: 2003252
agauaccuagcuuuacucc

SEQ ID NO: 2003254 - RNA, 19 nt, Artificial Sequence
  Description of Artificial Sequence: Synthetic oligonucleotide
  Sense strand starting at position 355 of SEQ ID NO: 1880910
gaguaaagcuagguaucuu

SEQ ID NO: 2003255 - RNA, 19 nt, Artificial Sequence
  Description of Artificial Sequence: Synthetic oligonucleotide
  Antisense strand to SEQ ID NO: 2003254
aagauaccuagcuuuacuc

SEQ ID NO: 2003256 - RNA, 19 nt, Artificial Sequence
  Description of Artificial Sequence: Synthetic oligonucleotide
  Sense strand starting at position 381 of SEQ ID NO: 1880910
accagugguuccucaccua

SEQ ID NO: 2003257 - RNA, 19 nt, Artificial Sequence
  Description of Artificial Sequence: Synthetic oligonucleotide
  Antisense strand to SEQ ID NO: 2003256
uaggugaggaaccacuggu

SEQ ID NO: 2003258 - RNA, 19 nt, Artificial Sequence
  Description of Artificial Sequence: Synthetic oligonucleotide
  Sense strand starting at position 384 of SEQ ID NO: 1880910
agugguuccucaccuauaa

SEQ ID NO: 2003259 - RNA, 19 nt, Artificial Sequence
  Description of Artificial Sequence: Synthetic oligonucleotide
  Antisense strand to SEQ ID NO: 2003258
uuauaggugaggaaccacu

SEQ ID NO: 2003260 - RNA, 19 nt, Artificial Sequence
  Description of Artificial Sequence: Synthetic oligonucleotide
  Sense strand starting at position 388 of SEQ ID NO: 1880910
guuccucaccuauaacgua

SEQ ID NO: 2003261 - RNA, 19 nt, Artificial Sequence
  Description of Artificial Sequence: Synthetic oligonucleotide
  Antisense strand to SEQ ID NO: 2003260
uacguuauaggugaggaac

SEQ ID NO: 2003262 - RNA, 19 nt, Artificial Sequence
  Description of Artificial Sequence: Synthetic oligonucleotide
  Sense strand starting at position 403 of SEQ ID NO: 1880910
cguaacacauuuggagaaa

SEQ ID NO: 2003263 - RNA, 19 nt, Artificial Sequence
  Description of Artificial Sequence: Synthetic oligonucleotide
  Antisense strand to SEQ ID NO: 2003262
uuucuccaaauguguuacg

SEQ ID NO: 2003264 - RNA, 19 nt, Artificial Sequence
  Description of Artificial Sequence: Synthetic oligonucleotide
  Sense strand starting at position 404 of SEQ ID NO: 1880910
guaacacauuuggagaaau

SEQ ID NO: 2003265 - RNA, 19 nt, Artificial Sequence
  Description of Artificial Sequence: Synthetic oligonucleotide
  Antisense strand to SEQ ID NO: 2003264
auuucuccaaauguguuac

SEQ ID NO: 2003266 - RNA, 19 nt, Artificial Sequence
  Description of Artificial Sequence: Synthetic oligonucleotide
  Sense strand starting at position 438 of SEQ ID NO: 1880910
ugacuauggccucaaacua

SEQ ID NO: 2003267 - RNA, 19 nt, Artificial Sequence
  Description of Artificial Sequence: Synthetic oligonucleotide
  Antisense strand to SEQ ID NO: 2003266
uaguuugaggccauaguca

SEQ ID NO: 2003268 - RNA, 19 nt, Artificial Sequence
  Description of Artificial Sequence: Synthetic oligonucleotide
  Sense strand starting at position 464 of SEQ ID NO: 1880910
gaacauaacugaggaauga

SEQ ID NO: 2003269 - RNA, 19 nt, Artificial Sequence
  Description of Artificial Sequence: Synthetic oligonucleotide
  Antisense strand to SEQ ID NO: 2003268
ucauuccucaguuauguuc

SEQ ID NO: 2003270 - RNA, 19 nt, Artificial Sequence
  Description of Artificial Sequence: Synthetic oligonucleotide
  Sense strand starting at position 475 of SEQ ID NO: 1880910
aggaaugaaugacaauuga

SEQ ID NO: 2003271 - RNA, 19 nt, Artificial Sequence
  Description of Artificial Sequence: Synthetic oligonucleotide
  Antisense strand to SEQ ID NO: 2003270
ucaauugucauucauuccu

SEQ ID NO: 2003272 - RNA, 19 nt, Artificial Sequence
  Description of Artificial Sequence: Synthetic oligonucleotide
  Sense strand starting at position 503 of SEQ ID NO: 1880910
ccuguuauacauggcuaaa

SEQ ID NO: 2003273 - RNA, 19 nt, Artificial Sequence
  Description of Artificial Sequence: Synthetic oligonucleotide
  Antisense strand to SEQ ID NO: 2003272
uuuagccauguauaacagg

SEQ ID NO: 2003274 - RNA, 19 nt, Artificial Sequence
  Description of Artificial Sequence: Synthetic oligonucleotide
  Sense strand starting at position 523 of SEQ ID NO: 1880910
ugaguuuaagcugaauaau

SEQ ID NO: 2003275 - RNA, 19 nt, Artificial Sequence
  Description of Artificial Sequence: Synthetic oligonucleotide
  Antisense strand to SEQ ID NO: 2003274
auuauucagcuuaaacuca

SEQ ID NO: 2003276 - RNA, 19 nt, Artificial Sequence
  Description of Artificial Sequence: Synthetic oligonucleotide
  Sense strand starting at position 526 of SEQ ID NO: 1880910
guuuaagcugaauaauuag

SEQ ID NO: 2003277 - RNA, 19 nt, Artificial Sequence
  Description of Artificial Sequence: Synthetic oligonucleotide
  Antisense strand to SEQ ID NO: 2003276
cuaauuauucagcuuaaac

SEQ ID NO: 2003278 - RNA, 19 nt, Artificial Sequence
  Description of Artificial Sequence: Synthetic oligonucleotide
  Sense strand starting at position 549 of SEQ ID NO: 1880910
uaauaagaaugaugggaau

SEQ ID NO: 2003279 - RNA, 19 nt, Artificial Sequence
  Description of Artificial Sequence: Synthetic oligonucleotide
  Antisense strand to SEQ ID NO: 2003278
auucccaucauucuuauua

SEQ ID NO: 2003280 - RNA, 19 nt, Artificial Sequence
  Description of Artificial Sequence: Synthetic oligonucleotide
  Sense strand starting at position 576 of SEQ ID NO: 1880910
gaaauugagucacagacaa

SEQ ID NO: 2003281 - RNA, 19 nt, Artificial Sequence
  Description of Artificial Sequence: Synthetic oligonucleotide
  Antisense strand to SEQ ID NO: 2003280
uugucugugacucaauuuc

SEQ ID NO: 2003282 - RNA, 19 nt, Artificial Sequence
  Description of Artificial Sequence: Synthetic oligonucleotide
  Sense strand starting at position 940 of SEQ ID NO: 1880910
gcaaucugauagucccuau

SEQ ID NO: 2003283 - RNA, 19 nt, Artificial Sequence
  Description of Artificial Sequence: Synthetic oligonucleotide
  Antisense strand to SEQ ID NO: 2003282
auagggacuaucagauugc

SEQ ID NO: 2003284 - RNA, 19 nt, Artificial Sequence
  Description of Artificial Sequence: Synthetic oligonucleotide
  Sense strand starting at position 1478 of SEQ ID NO: 1880910
ggcgguuuguaaccuggaa

SEQ ID NO: 2003285 - RNA, 19 nt, Artificial Sequence
  Description of Artificial Sequence: Synthetic oligonucleotide
  Antisense strand to SEQ ID NO: 2003284
uuccagguuacaaaccgcc

SEQ ID NO: 2003286 - RNA, 19 nt, Artificial Sequence
  Description of Artificial Sequence: Synthetic oligonucleotide
  Sense strand starting at position 1482 of SEQ ID NO: 1880910
guuuguaaccuggaaggcu

SEQ ID NO: 2003287 - RNA, 19 nt, Artificial Sequence
  Description of Artificial Sequence: Synthetic oligonucleotide
  Antisense strand to SEQ ID NO: 2003286
agccuuccagguuacaaac

SEQ ID NO: 2003288 - RNA, 19 nt, Artificial Sequence
  Description of Artificial Sequence: Synthetic oligonucleotide
  Sense strand starting at position 1504 of SEQ ID NO: 1880910
gauggagcaucgucaugau

SEQ ID NO: 2003289 - RNA, 19 nt, Artificial Sequence
  Description of Artificial Sequence: Synthetic oligonucleotide
  Antisense strand to SEQ ID NO: 2003288
aucaugacgaugcuccauc

SEQ ID NO: 2003290 - RNA, 19 nt, Artificial Sequence
  Description of Artificial Sequence: Synthetic oligonucleotide
  Sense strand starting at position 1754 of SEQ ID NO: 1880910
gcgggagccgcaucucuau

SEQ ID NO: 2003291 - RNA, 19 nt, Artificial Sequence
  Description of Artificial Sequence: Synthetic oligonucleotide
  Antisense strand to SEQ ID NO: 2003290
auagagaugcggcucccgc

SEQ ID NO: 2003292 - RNA, 19 nt, Artificial Sequence
  Description of Artificial Sequence: Synthetic oligonucleotide
  Sense strand starting at position 2631 of SEQ ID NO: 1880910
uguagagagccuugaguac

SEQ ID NO: 2003293 - RNA, 19 nt, Artificial Sequence
  Description of Artificial Sequence: Synthetic oligonucleotide
  Antisense strand to SEQ ID NO: 2003292
guacucaaggcucucuaca

SEQ ID NO: 2003294 - RNA, 19 nt, Artificial Sequence
  Description of Artificial Sequence: Synthetic oligonucleotide
  Sense strand starting at position 2646 of SEQ ID NO: 1880910
guaccaggcugaguuuaua

SEQ ID NO: 2003295 - RNA, 19 nt, Artificial Sequence
  Description of Artificial Sequence: Synthetic oligonucleotide
  Antisense strand to SEQ ID NO: 2003294
uauaaacucagccugguac

SEQ ID NO: 2003296 - RNA, 19 nt, Artificial Sequence
  Description of Artificial Sequence: Synthetic oligonucleotide
  Sense strand starting at position 2729 of SEQ ID NO: 1880910
uggagcugaucccuaugau

SEQ ID NO: 2003297 - RNA, 19 nt, Artificial Sequence
  Description of Artificial Sequence: Synthetic oligonucleotide
  Antisense strand to SEQ ID NO: 2003296
aucauagggaucagcucca

SEQ ID NO: 2003298 - RNA, 19 nt, Artificial Sequence
  Description of Artificial Sequence: Synthetic oligonucleotide
  Sense strand starting at position 2730 of SEQ ID NO: 1880910
ggagcugaucccuaugaug

SEQ ID NO: 2003299 - RNA, 19 nt, Artificial Sequence
  Description of Artificial Sequence: Synthetic oligonucleotide
  Antisense strand to SEQ ID NO: 2003298
caucauagggaucagcucc

SEQ ID NO: 2003300 - RNA, 19 nt, Artificial Sequence
  Description of Artificial Sequence: Synthetic oligonucleotide
  Sense strand starting at position 2732 of SEQ ID NO: 1880910
agcugaucccuaugaugaa

SEQ ID NO: 2003301 - RNA, 19 nt, Artificial Sequence
  Description of Artificial Sequence: Synthetic oligonucleotide
  Antisense strand to SEQ ID NO: 2003300
uucaucauagggaucagcu

SEQ ID NO: 2003302 - RNA, 19 nt, Artificial Sequence
  Description of Artificial Sequence: Synthetic oligonucleotide
  Sense strand starting at position 2835 of SEQ ID NO: 1880910
acaguuuaggugggaggua

SEQ ID NO: 2003303 - RNA, 19 nt, Artificial Sequence
  Description of Artificial Sequence: Synthetic oligonucleotide
  Antisense strand to SEQ ID NO: 2003302
uaccucccaccuaaacugu

SEQ ID NO: 2003304 - RNA, 19 nt, Artificial Sequence
  Description of Artificial Sequence: Synthetic oligonucleotide
  Sense strand starting at position 2858 of SEQ ID NO: 1880910
aggucuaaacaagacguua

SEQ ID NO: 2003305 - RNA, 19 nt, Artificial Sequence
  Description of Artificial Sequence: Synthetic oligonucleotide
  Antisense strand to SEQ ID NO: 2003304
uaacgucuuguuuagaccu

SEQ ID NO: 2003306 - RNA, 19 nt, Artificial Sequence
  Description of Artificial Sequence: Synthetic oligonucleotide
  Sense strand starting at position 2910 of SEQ ID NO: 1880910
ggacauuacucauaacaag

SEQ ID NO: 2003307 - RNA, 19 nt, Artificial Sequence
  Description of Artificial Sequence: Synthetic oligonucleotide
  Antisense strand to SEQ ID NO: 2003306
cuuguuaugaguaaugucc

SEQ ID NO: 2003308 - RNA, 19 nt, Artificial Sequence
  Description of Artificial Sequence: Synthetic oligonucleotide
  Sense strand starting at position 3033 of SEQ ID NO: 1880910
auccauuacccugauguga

SEQ ID NO: 2003309 - RNA, 19 nt, Artificial Sequence
  Description of Artificial Sequence: Synthetic oligonucleotide
  Antisense strand to SEQ ID NO: 2003308
ucacaucaggguaauggau

SEQ ID NO: 2003310 - RNA, 19 nt, Artificial Sequence
  Description of Artificial Sequence: Synthetic oligonucleotide
  Sense strand starting at position 3044 of SEQ ID NO: 1880910
ugaugugaagccuguuuau

SEQ ID NO: 2003311 - RNA, 19 nt, Artificial Sequence
  Description of Artificial Sequence: Synthetic oligonucleotide
  Antisense strand to SEQ ID NO: 2003310
auaaacaggcuucacauca

SEQ ID NO: 2003312 - RNA, 19 nt, Artificial Sequence
  Description of Artificial Sequence: Synthetic oligonucleotide
  Sense strand starting at position 3047 of SEQ ID NO: 1880910
ugugaagccuguuuauaua

SEQ ID NO: 2003313 - RNA, 19 nt, Artificial Sequence
  Description of Artificial Sequence: Synthetic oligonucleotide
  Antisense strand to SEQ ID NO: 2003312
uauauaaacaggcuucaca

SEQ ID NO: 2003314 - RNA, 19 nt, Artificial Sequence
  Description of Artificial Sequence: Synthetic oligonucleotide
  Sense strand starting at position 3090 of SEQ ID NO: 1880910
cagacaugguccucuggua

SEQ ID NO: 2003315 - RNA, 19 nt, Artificial Sequence
  Description of Artificial Sequence: Synthetic oligonucleotide
  Antisense strand to SEQ ID NO: 2003314
uaccagaggaccaugucug

SEQ ID NO: 2003316 - RNA, 19 nt, Artificial Sequence
  Description of Artificial Sequence: Synthetic oligonucleotide
  Sense strand starting at position 3208 of SEQ ID NO: 1880910
gguauugacccacacagua

SEQ ID NO: 2003317 - RNA, 19 nt, Artificial Sequence
  Description of Artificial Sequence: Synthetic oligonucleotide
  Antisense strand to SEQ ID NO: 2003316
uacugugugggucaauacc

SEQ ID NO: 2003318 - RNA, 19 nt, Artificial Sequence
  Description of Artificial Sequence: Synthetic oligonucleotide
  Sense strand starting at position 3930 of SEQ ID NO: 1880910
gcaggcuuucuagggacau

SEQ ID NO: 2003319 - RNA, 19 nt, Artificial Sequence
  Description of Artificial Sequence: Synthetic oligonucleotide
  Antisense strand to SEQ ID NO: 2003318
augucccuagaaagccugc

SEQ ID NO: 2003320 - RNA, 19 nt, Artificial Sequence
  Description of Artificial Sequence: Synthetic oligonucleotide
  Sense strand starting at position 3974 of SEQ ID NO: 1880910
agaugagcaguuuggagaa

SEQ ID NO: 2003321 - RNA, 19 nt, Artificial Sequence
  Description of Artificial Sequence: Synthetic oligonucleotide
  Antisense strand to SEQ ID NO: 2003320
uucuccaaacugcucaucu

SEQ ID NO: 2003322 - RNA, 19 nt, Artificial Sequence
  Description of Artificial Sequence: Synthetic oligonucleotide
  Sense strand starting at position 300 of SEQ ID NO: 1880909
ucccuagauguauagcuuu

SEQ ID NO: 2003323 - RNA, 19 nt, Artificial Sequence
  Description of Artificial Sequence: Synthetic oligonucleotide
  Antisense strand to SEQ ID NO: 2003322
aaagcuauacaucuaggga

SEQ ID NO: 2003324 - RNA, 19 nt, Artificial Sequence
  Description of Artificial Sequence: Synthetic oligonucleotide
  Sense strand starting at position 323 of SEQ ID NO: 1880909
guaauuuguugacauuauc

SEQ ID NO: 2003325 - RNA, 19 nt, Artificial Sequence
  Description of Artificial Sequence: Synthetic oligonucleotide
  Antisense strand to SEQ ID NO: 2003324
gauaaugucaacaaauuac

SEQ ID NO: 2003326 - RNA, 19 nt, Artificial Sequence
  Description of Artificial Sequence: Synthetic oligonucleotide
  Sense strand starting at position 349 of SEQ ID NO: 1880909
ugauauuacuuugugauac

SEQ ID NO: 2003327 - RNA, 19 nt, Artificial Sequence
  Description of Artificial Sequence: Synthetic oligonucleotide
  Antisense strand to SEQ ID NO: 2003326
guaucacaaaguaauauca

SEQ ID NO: 2003328 - RNA, 19 nt, Artificial Sequence
  Description of Artificial Sequence: Synthetic oligonucleotide
  Sense strand starting at position 406 of SEQ ID NO: 1880909
cgaagauuccagugaagaa

SEQ ID NO: 2003329 - RNA, 19 nt, Artificial Sequence
  Description of Artificial Sequence: Synthetic oligonucleotide
  Antisense strand to SEQ ID NO: 2003328
uucuucacuggaaucuucg

SEQ ID NO: 2003330 - RNA, 19 nt, Artificial Sequence
  Description of Artificial Sequence: Synthetic oligonucleotide
  Sense strand starting at position 438 of SEQ ID NO: 1880909
gcugcauuggaguaaagcu

SEQ ID NO: 2003331 - RNA, 19 nt, Artificial Sequence
  Description of Artificial Sequence: Synthetic oligonucleotide
  Antisense strand to SEQ ID NO: 2003330
agcuuuacuccaaugcagc

SEQ ID NO: 2003332 - RNA, 19 nt, Artificial Sequence
  Description of Artificial Sequence: Synthetic oligonucleotide
  Sense strand starting at position 446 of SEQ ID NO: 1880909
ggaguaaagcuagguaucu

SEQ ID NO: 2003333 - RNA, 19 nt, Artificial Sequence
  Description of Artificial Sequence: Synthetic oligonucleotide
  Antisense strand to SEQ ID NO: 2003332
agauaccuagcuuuacucc

SEQ ID NO: 2003334 - RNA, 19 nt, Artificial Sequence
  Description of Artificial Sequence: Synthetic oligonucleotide
  Sense strand starting at position 447 of SEQ ID NO: 1880909
gaguaaagcuagguaucuu

SEQ ID NO: 2003335 - RNA, 19 nt, Artificial Sequence
  Description of Artificial Sequence: Synthetic oligonucleotide
  Antisense strand to SEQ ID NO: 2003334
aagauaccuagcuuuacuc

SEQ ID NO: 2003336 - RNA, 19 nt, Artificial Sequence
  Description of Artificial Sequence: Synthetic oligonucleotide
  Sense strand starting at position 473 of SEQ ID NO: 1880909
accagugguuccucaccua

SEQ ID NO: 2003337 - RNA, 19 nt, Artificial Sequence
  Description of Artificial Sequence: Synthetic oligonucleotide
  Antisense strand to SEQ ID NO: 2003336
uaggugaggaaccacuggu

SEQ ID NO: 2003338 - RNA, 19 nt, Artificial Sequence
  Description of Artificial Sequence: Synthetic oligonucleotide
  Sense strand starting at position 476 of SEQ ID NO: 1880909
agugguuccucaccuauaa

SEQ ID NO: 2003339 - RNA, 19 nt, Artificial Sequence
  Description of Artificial Sequence: Synthetic oligonucleotide
  Antisense strand to SEQ ID NO: 2003338
uuauaggugaggaaccacu

SEQ ID NO: 2003340 - RNA, 19 nt, Artificial Sequence
  Description of Artificial Sequence: Synthetic oligonucleotide
  Sense strand starting at position 480 of SEQ ID NO: 1880909
guuccucaccuauaacgua

SEQ ID NO: 2003341 - RNA, 19 nt, Artificial Sequence
  Description of Artificial Sequence: Synthetic oligonucleotide
  Antisense strand to SEQ ID NO: 2003340
uacguuauaggugaggaac

SEQ ID NO: 2003342 - RNA, 19 nt, Artificial Sequence
  Description of Artificial Sequence: Synthetic oligonucleotide
  Sense strand starting at position 495 of SEQ ID NO: 1880909
cguaacacauuuggagaaa

SEQ ID NO: 2003343 - RNA, 19 nt, Artificial Sequence
  Description of Artificial Sequence: Synthetic oligonucleotide
  Antisense strand to SEQ ID NO: 2003342
uuucuccaaauguguuacg

SEQ ID NO: 2003344 - RNA, 19 nt, Artificial Sequence
  Description of Artificial Sequence: Synthetic oligonucleotide
  Sense strand starting at position 496 of SEQ ID NO: 1880909
guaacacauuuggagaaau

SEQ ID NO: 2003345 - RNA, 19 nt, Artificial Sequence
  Description of Artificial Sequence: Synthetic oligonucleotide
  Antisense strand to SEQ ID NO: 2003344
auuucuccaaauguguuac

SEQ ID NO: 2003346 - RNA, 19 nt, Artificial Sequence
  Description of Artificial Sequence: Synthetic oligonucleotide
  Sense strand starting at position 530 of SEQ ID NO: 1880909
ugacuauggccucaaacua

SEQ ID NO: 2003347 - RNA, 19 nt, Artificial Sequence
  Description of Artificial Sequence: Synthetic oligonucleotide
  Antisense strand to SEQ ID NO: 2003346
uaguuugaggccauaguca

SEQ ID NO: 2003348 - RNA, 19 nt, Artificial Sequence
  Description of Artificial Sequence: Synthetic oligonucleotide
  Sense strand starting at position 556 of SEQ ID NO: 1880909
gaacauaacugaggaauga

SEQ ID NO: 2003349 - RNA, 19 nt, Artificial Sequence
  Description of Artificial Sequence: Synthetic oligonucleotide
  Antisense strand to SEQ ID NO: 2003348
ucauuccucaguuauguuc

SEQ ID NO: 2003350 - RNA, 19 nt, Artificial Sequence
  Description of Artificial Sequence: Synthetic oligonucleotide
  Sense strand starting at position 567 of SEQ ID NO: 1880909
aggaaugaaugacaauuga

SEQ ID NO: 2003351 - RNA, 19 nt, Artificial Sequence
  Description of Artificial Sequence: Synthetic oligonucleotide
  Antisense strand to SEQ ID NO: 2003350
ucaauugucauucauuccu

SEQ ID NO: 2003352 - RNA, 19 nt, Artificial Sequence
  Description of Artificial Sequence: Synthetic oligonucleotide
  Sense strand starting at position 595 of SEQ ID NO: 1880909
ccuguuauacauggcuaaa

SEQ ID NO: 2003353 - RNA, 19 nt, Artificial Sequence
  Description of Artificial Sequence: Synthetic oligonucleotide
  Antisense strand to SEQ ID NO: 2003352
uuuagccauguauaacagg

SEQ ID NO: 2003354 - RNA, 19 nt, Artificial Sequence
  Description of Artificial Sequence: Synthetic oligonucleotide
  Sense strand starting at position 615 of SEQ ID NO: 1880909
ugaguuuaagcugaauaau

SEQ ID NO: 2003355 - RNA, 19 nt, Artificial Sequence
  Description of Artificial Sequence: Synthetic oligonucleotide
  Antisense strand to SEQ ID NO: 2003354
auuauucagcuuaaacuca

SEQ ID NO: 2003356 - RNA, 19 nt, Artificial Sequence
  Description of Artificial Sequence: Synthetic oligonucleotide
  Sense strand starting at position 618 of SEQ ID NO: 1880909
guuuaagcugaauaauuag

SEQ ID NO: 2003357 - RNA, 19 nt, Artificial Sequence
  Description of Artificial Sequence: Synthetic oligonucleotide
  Antisense strand to SEQ ID NO: 2003356
cuaauuauucagcuuaaac

SEQ ID NO: 2003358 - RNA, 19 nt, Artificial Sequence
  Description of Artificial Sequence: Synthetic oligonucleotide
  Sense strand starting at position 641 of SEQ ID NO: 1880909
uaauaagaaugaugggaau

SEQ ID NO: 2003359 - RNA, 19 nt, Artificial Sequence
  Description of Artificial Sequence: Synthetic oligonucleotide
  Antisense strand to SEQ ID NO: 2003358
auucccaucauucuuauua

SEQ ID NO: 2003360 - RNA, 19 nt, Artificial Sequence
  Description of Artificial Sequence: Synthetic oligonucleotide
  Sense strand starting at position 668 of SEQ ID NO: 1880909
gaaauugagucacagacaa

SEQ ID NO: 2003361 - RNA, 19 nt, Artificial Sequence
  Description of Artificial Sequence: Synthetic oligonucleotide
  Antisense strand to SEQ ID NO: 2003360
uugucugugacucaauuuc

SEQ ID NO: 2003362 - RNA, 19 nt, Artificial Sequence
  Description of Artificial Sequence: Synthetic oligonucleotide
  Sense strand starting at position 1032 of SEQ ID NO: 1880909
gcaaucugauagucccuau

SEQ ID NO: 2003363 - RNA, 19 nt, Artificial Sequence
  Description of Artificial Sequence: Synthetic oligonucleotide
  Antisense strand to SEQ ID NO: 2003362
auagggacuaucagauugc

SEQ ID NO: 2003364 - RNA, 19 nt, Artificial Sequence
  Description of Artificial Sequence: Synthetic oligonucleotide
  Sense strand starting at position 1161 of SEQ ID NO: 1880909
ugaauauuaucgcuguucu

SEQ ID NO: 2003365 - RNA, 19 nt, Artificial Sequence
  Description of Artificial Sequence: Synthetic oligonucleotide
  Antisense strand to SEQ ID NO: 2003364
agaacagcgauaauauuca

SEQ ID NO: 2003366 - RNA, 19 nt, Artificial Sequence
  Description of Artificial Sequence: Synthetic oligonucleotide
  Sense strand starting at position 1315 of SEQ ID NO: 1880909
gcuuaucuuccgggcagga

SEQ ID NO: 2003367 - RNA, 19 nt, Artificial Sequence
  Description of Artificial Sequence: Synthetic oligonucleotide
  Antisense strand to SEQ ID NO: 2003366
uccugcccggaagauaagc

SEQ ID NO: 2003368 - RNA, 19 nt, Artificial Sequence
  Description of Artificial Sequence: Synthetic oligonucleotide
  Sense strand starting at position 1570 of SEQ ID NO: 1880909
ggcgguuuguaaccuggaa

SEQ ID NO: 2003369 - RNA, 19 nt, Artificial Sequence
  Description of Artificial Sequence: Synthetic oligonucleotide
  Antisense strand to SEQ ID NO: 2003368
uuccagguuacaaaccgcc

SEQ ID NO: 2003370 - RNA, 19 nt, Artificial Sequence
  Description of Artificial Sequence: Synthetic oligonucleotide
  Sense strand starting at position 1574 of SEQ ID NO: 1880909
guuuguaaccuggaaggcu

SEQ ID NO: 2003371 - RNA, 19 nt, Artificial Sequence
  Description of Artificial Sequence: Synthetic oligonucleotide
  Antisense strand to SEQ ID NO: 2003370
agccuuccagguuacaaac

SEQ ID NO: 2003372 - RNA, 19 nt, Artificial Sequence
  Description of Artificial Sequence: Synthetic oligonucleotide
  Sense strand starting at position 1596 of SEQ ID NO: 1880909
gauggagcaucgucaugau

SEQ ID NO: 2003373 - RNA, 19 nt, Artificial Sequence
  Description of Artificial Sequence: Synthetic oligonucleotide
  Antisense strand to SEQ ID NO: 2003372
aucaugacgaugcuccauc

SEQ ID NO: 2003374 - RNA, 19 nt, Artificial Sequence
  Description of Artificial Sequence: Synthetic oligonucleotide
  Sense strand starting at position 1846 of SEQ ID NO: 1880909
gcgggagccgcaucucuau

SEQ ID NO: 2003375 - RNA, 19 nt, Artificial Sequence
  Description of Artificial Sequence: Synthetic oligonucleotide
  Antisense strand to SEQ ID NO: 2003374
auagagaugcggcucccgc

SEQ ID NO: 2003376 - RNA, 19 nt, Artificial Sequence
  Description of Artificial Sequence: Synthetic oligonucleotide
  Sense strand starting at position 2723 of SEQ ID NO: 1880909
uguagagagccuugaguac

SEQ ID NO: 2003377 - RNA, 19 nt, Artificial Sequence
  Description of Artificial Sequence: Synthetic oligonucleotide
  Antisense strand to SEQ ID NO: 2003376
guacucaaggcucucuaca

SEQ ID NO: 2003378 - RNA, 19 nt, Artificial Sequence
  Description of Artificial Sequence: Synthetic oligonucleotide
  Sense strand starting at position 2738 of SEQ ID NO: 1880909
guaccaggcugaguuuaua

SEQ ID NO: 2003379 - RNA, 19 nt, Artificial Sequence
  Description of Artificial Sequence: Synthetic oligonucleotide
  Antisense strand to SEQ ID NO: 2003378
uauaaacucagccugguac

SEQ ID NO: 2003380 - RNA, 19 nt, Artificial Sequence
  Description of Artificial Sequence: Synthetic oligonucleotide
  Sense strand starting at position 2821 of SEQ ID NO: 1880909
uggagcugaucccuaugau

SEQ ID NO: 2003381 - RNA, 19 nt, Artificial Sequence
  Description of Artificial Sequence: Synthetic oligonucleotide
  Antisense strand to SEQ ID NO: 2003380
aucauagggaucagcucca

SEQ ID NO: 2003382 - RNA, 19 nt, Artificial Sequence
  Description of Artificial Sequence: Synthetic oligonucleotide
  Sense strand starting at position 2822 of SEQ ID NO: 1880909
ggagcugaucccuaugaug

SEQ ID NO: 2003383 - RNA, 19 nt, Artificial Sequence
  Description of Artificial Sequence: Synthetic oligonucleotide
  Antisense strand to SEQ ID NO: 2003382
caucauagggaucagcucc

SEQ ID NO: 2003384 - RNA, 19 nt, Artificial Sequence
  Description of Artificial Sequence: Synthetic oligonucleotide
  Sense strand starting at position 2824 of SEQ ID NO: 1880909
agcugaucccuaugaugaa

SEQ ID NO: 2003385 - RNA, 19 nt, Artificial Sequence
  Description of Artificial Sequence: Synthetic oligonucleotide
  Antisense strand to SEQ ID NO: 2003384
uucaucauagggaucagcu

SEQ ID NO: 2003386 - RNA, 19 nt, Artificial Sequence
  Description of Artificial Sequence: Synthetic oligonucleotide
  Sense strand starting at position 2927 of SEQ ID NO: 1880909
acaguuuaggugggaggua

SEQ ID NO: 2003387 - RNA, 19 nt, Artificial Sequence
  Description of Artificial Sequence: Synthetic oligonucleotide
  Antisense strand to SEQ ID NO: 2003386
uaccucccaccuaaacugu

SEQ ID NO: 2003388 - RNA, 19 nt, Artificial Sequence
  Description of Artificial Sequence: Synthetic oligonucleotide
  Sense strand starting at position 2950 of SEQ ID NO: 1880909
aggucuaaacaagacguua

SEQ ID NO: 2003389 - RNA, 19 nt, Artificial Sequence
  Description of Artificial Sequence: Synthetic oligonucleotide
  Antisense strand to SEQ ID NO: 2003388
uaacgucuuguuuagaccu

SEQ ID NO: 2003390 - RNA, 19 nt, Artificial Sequence
  Description of Artificial Sequence: Synthetic oligonucleotide
  Sense strand starting at position 3002 of SEQ ID NO: 1880909
ggacauuacucauaacaag

SEQ ID NO: 2003391 - RNA, 19 nt, Artificial Sequence
  Description of Artificial Sequence: Synthetic oligonucleotide
  Antisense strand to SEQ ID NO: 2003390
cuuguuaugaguaaugucc

SEQ ID NO: 2003392 - RNA, 19 nt, Artificial Sequence
  Description of Artificial Sequence: Synthetic oligonucleotide
  Sense strand starting at position 3125 of SEQ ID NO: 1880909
auccauuacccugauguga

SEQ ID NO: 2003393 - RNA, 19 nt, Artificial Sequence
  Description of Artificial Sequence: Synthetic oligonucleotide
  Antisense strand to SEQ ID NO: 2003392
ucacaucaggguaauggau

SEQ ID NO: 2003394 - RNA, 19 nt, Artificial Sequence
  Description of Artificial Sequence: Synthetic oligonucleotide
  Sense strand starting at position 3136 of SEQ ID NO: 1880909
ugaugugaagccuguuuau

SEQ ID NO: 2003395 - RNA, 19 nt, Artificial Sequence
  Description of Artificial Sequence: Synthetic oligonucleotide
  Antisense strand to SEQ ID NO: 2003394
auaaacaggcuucacauca

SEQ ID NO: 2003396 - RNA, 19 nt, Artificial Sequence
  Description of Artificial Sequence: Synthetic oligonucleotide
  Sense strand starting at position 3139 of SEQ ID NO: 1880909
ugugaagccuguuuauaua

SEQ ID NO: 2003397 - RNA, 19 nt, Artificial Sequence
  Description of Artificial Sequence: Synthetic oligonucleotide
  Antisense strand to SEQ ID NO: 2003396
uauauaaacaggcuucaca

SEQ ID NO: 2003398 - RNA, 19 nt, Artificial Sequence
  Description of Artificial Sequence: Synthetic oligonucleotide
  Sense strand starting at position 3182 of SEQ ID NO: 1880909
cagacaugguccucuggua

SEQ ID NO: 2003399 - RNA, 19 nt, Artificial Sequence
  Description of Artificial Sequence: Synthetic oligonucleotide
  Antisense strand to SEQ ID NO: 2003398
uaccagaggaccaugucug

SEQ ID NO: 2003400 - RNA, 19 nt, Artificial Sequence
  Description of Artificial Sequence: Synthetic oligonucleotide
  Sense strand starting at position 3300 of SEQ ID NO: 1880909
gguauugacccacacagua

SEQ ID NO: 2003401 - RNA, 19 nt, Artificial Sequence
  Description of Artificial Sequence: Synthetic oligonucleotide
  Antisense strand to SEQ ID NO: 2003400
uacugugugggucaauacc

SEQ ID NO: 2003402 - RNA, 19 nt, Artificial Sequence
  Description of Artificial Sequence: Synthetic oligonucleotide
  Sense strand starting at position 107 of SEQ ID NO: 1880911
guguacacauuguugaaga

SEQ ID NO: 2003403 - RNA, 19 nt, Artificial Sequence
  Description of Artificial Sequence: Synthetic oligonucleotide
  Antisense strand to SEQ ID NO: 2003402
ucuucaacaauguguacac

SEQ ID NO: 2003404 - RNA, 19 nt, Artificial Sequence
  Description of Artificial Sequence: Synthetic oligonucleotide
  Sense strand starting at position 190 of SEQ ID NO: 1880911
auuacauuagagcagaguu

SEQ ID NO: 2003405 - RNA, 19 nt, Artificial Sequence
  Description of Artificial Sequence: Synthetic oligonucleotide
  Antisense strand to SEQ ID NO: 2003404
aacucugcucuaauguaau

SEQ ID NO: 2003406 - RNA, 19 nt, Artificial Sequence
  Description of Artificial Sequence: Synthetic oligonucleotide
  Sense strand starting at position 262 of SEQ ID NO: 1880911
ugcuaugcacuguagaaua

SEQ ID NO: 2003407 - RNA, 19 nt, Artificial Sequence
  Description of Artificial Sequence: Synthetic oligonucleotide
  Antisense strand to SEQ ID NO: 2003406
uauucuacagugcauagca

SEQ ID NO: 2003408 - RNA, 19 nt, Artificial Sequence
  Description of Artificial Sequence: Synthetic oligonucleotide
  Sense strand starting at position 264 of SEQ ID NO: 1880911
cuaugcacuguagaauauu

SEQ ID NO: 2003409 - RNA, 19 nt, Artificial Sequence
  Description of Artificial Sequence: Synthetic oligonucleotide
  Antisense strand to SEQ ID NO: 2003408
aauauucuacagugcauag

SEQ ID NO: 2003410 - RNA, 19 nt, Artificial Sequence
  Description of Artificial Sequence: Synthetic oligonucleotide
  Sense strand starting at position 267 of SEQ ID NO: 1880911
ugcacuguagaauauuaua

SEQ ID NO: 2003411 - RNA, 19 nt, Artificial Sequence
  Description of Artificial Sequence: Synthetic oligonucleotide
  Antisense strand to SEQ ID NO: 2003410
uauaauauucuacagugca

SEQ ID NO: 2003412 - RNA, 19 nt, Artificial Sequence
  Description of Artificial Sequence: Synthetic oligonucleotide
  Sense strand starting at position 556 of SEQ ID NO: 1880911
ucacaaaggccugaaaguu

SEQ ID NO: 2003413 - RNA, 19 nt, Artificial Sequence
  Description of Artificial Sequence: Synthetic oligonucleotide
  Antisense strand to SEQ ID NO: 2003412
aacuuucaggccuuuguga

SEQ ID NO: 2003414 - RNA, 19 nt, Artificial Sequence
  Description of Artificial Sequence: Synthetic oligonucleotide
  Sense strand starting at position 622 of SEQ ID NO: 1880911
caggaaggccucugagcau

SEQ ID NO: 2003415 - RNA, 19 nt, Artificial Sequence
  Description of Artificial Sequence: Synthetic oligonucleotide
  Antisense strand to SEQ ID NO: 2003414
augcucagaggccuuccug

SEQ ID NO: 2003416 - RNA, 19 nt, Artificial Sequence
  Description of Artificial Sequence: Synthetic oligonucleotide
  Sense strand starting at position 640 of SEQ ID NO: 1880911
ugugcaaagacucagaguu

SEQ ID NO: 2003417 - RNA, 19 nt, Artificial Sequence
  Description of Artificial Sequence: Synthetic oligonucleotide
  Antisense strand to SEQ ID NO: 2003416
aacucugagucuuugcaca

SEQ ID NO: 2003418 - RNA, 19 nt, Artificial Sequence
  Description of Artificial Sequence: Synthetic oligonucleotide
  Sense strand starting at position 655 of SEQ ID NO: 1880911
aguuuauaaugaguacaac

SEQ ID NO: 2003419 - RNA, 19 nt, Artificial Sequence
  Description of Artificial Sequence: Synthetic oligonucleotide
  Antisense strand to SEQ ID NO: 2003418
guuguacucauuauaaacu

SEQ ID NO: 2003420 - RNA, 19 nt, Artificial Sequence
  Description of Artificial Sequence: Synthetic oligonucleotide
  Sense strand starting at position 684 of SEQ ID NO: 1880911
gacuaaagguggcuuagaa

SEQ ID NO: 2003421 - RNA, 19 nt, Artificial Sequence
  Description of Artificial Sequence: Synthetic oligonucleotide
  Antisense strand to SEQ ID NO: 2003420
uucuaagccaccuuuaguc

SEQ ID NO: 2003422 - RNA, 19 nt, Artificial Sequence
  Description of Artificial Sequence: Synthetic oligonucleotide
  Sense strand starting at position 823 of SEQ ID NO: 1880911
gggacaaccagguguagau

SEQ ID NO: 2003423 - RNA, 19 nt, Artificial Sequence
  Description of Artificial Sequence: Synthetic oligonucleotide
  Antisense strand to SEQ ID NO: 2003422
aucuacaccugguuguccc

SEQ ID NO: 2003424 - RNA, 19 nt, Artificial Sequence
  Description of Artificial Sequence: Synthetic oligonucleotide
  Sense strand starting at position 923 of SEQ ID NO: 1880911
augccauauguauaaauga

SEQ ID NO: 2003425 - RNA, 19 nt, Artificial Sequence
  Description of Artificial Sequence: Synthetic oligonucleotide
  Antisense strand to SEQ ID NO: 2003424
ucauuuauacauauggcau

SEQ ID NO: 2003426 - RNA, 19 nt, Artificial Sequence
  Description of Artificial Sequence: Synthetic oligonucleotide
  Sense strand starting at position 1023 of SEQ ID NO: 1880911
cagggcaguccugauguca

SEQ ID NO: 2003427 - RNA, 19 nt, Artificial Sequence
  Description of Artificial Sequence: Synthetic oligonucleotide
  Antisense strand to SEQ ID NO: 2003426
ugacaucaggacugcccug

SEQ ID NO: 2003428 - RNA, 19 nt, Artificial Sequence
  Description of Artificial Sequence: Synthetic oligonucleotide
  Sense strand starting at position 1076 of SEQ ID NO: 1880911
uagcauaaaggucaaguaa

SEQ ID NO: 2003429 - RNA, 19 nt, Artificial Sequence
  Description of Artificial Sequence: Synthetic oligonucleotide
  Antisense strand to SEQ ID NO: 2003428
uuacuugaccuuuaugcua

SEQ ID NO: 2003430 - RNA, 19 nt, Artificial Sequence
  Description of Artificial Sequence: Synthetic oligonucleotide
  Sense strand starting at position 1145 of SEQ ID NO: 1880911
ugaccuuugccagaaguac

SEQ ID NO: 2003431 - RNA, 19 nt, Artificial Sequence
  Description of Artificial Sequence: Synthetic oligonucleotide
  Antisense strand to SEQ ID NO: 2003430
guacuucuggcaaagguca

SEQ ID NO: 2003432 - RNA, 19 nt, Artificial Sequence
  Description of Artificial Sequence: Synthetic oligonucleotide
  Sense strand starting at position 1154 of SEQ ID NO: 1880911
ccagaaguaccuuauuggu

SEQ ID NO: 2003433 - RNA, 19 nt, Artificial Sequence
  Description of Artificial Sequence: Synthetic oligonucleotide
  Antisense strand to SEQ ID NO: 2003432
accaauaagguacuucugg

SEQ ID NO: 2003434 - RNA, 19 nt, Artificial Sequence
  Description of Artificial Sequence: Synthetic oligonucleotide
  Sense strand starting at position 1241 of SEQ ID NO: 1880911
caagacauuuggcagaaag

SEQ ID NO: 2003435 - RNA, 19 nt, Artificial Sequence
  Description of Artificial Sequence: Synthetic oligonucleotide
  Antisense strand to SEQ ID NO: 2003434
cuuucugccaaaugucuug

SEQ ID NO: 2003436 - RNA, 19 nt, Artificial Sequence
  Description of Artificial Sequence: Synthetic oligonucleotide
  Sense strand starting at position 1274 of SEQ ID NO: 1880911
aaagacagugcuuauggua

SEQ ID NO: 2003437 - RNA, 19 nt, Artificial Sequence
  Description of Artificial Sequence: Synthetic oligonucleotide
  Antisense strand to SEQ ID NO: 2003436
uaccauaagcacugucuuu

SEQ ID NO: 2003438 - RNA, 19 nt, Artificial Sequence
  Description of Artificial Sequence: Synthetic oligonucleotide
  Sense strand starting at position 1300 of SEQ ID NO: 1880911
uaacaaaugugcccagagu

SEQ ID NO: 2003439 - RNA, 19 nt, Artificial Sequence
  Description of Artificial Sequence: Synthetic oligonucleotide
  Antisense strand to SEQ ID NO: 2003438
acucugggcacauuuguua

SEQ ID NO: 2003440 - RNA, 19 nt, Artificial Sequence
  Description of Artificial Sequence: Synthetic oligonucleotide
  Sense strand starting at position 1301 of SEQ ID NO: 1880911
aacaaaugugcccagagua

SEQ ID NO: 2003441 - RNA, 19 nt, Artificial Sequence
  Description of Artificial Sequence: Synthetic oligonucleotide
  Antisense strand to SEQ ID NO: 2003440
uacucugggcacauuuguu

SEQ ID NO: 2003442 - RNA, 19 nt, Artificial Sequence
  Description of Artificial Sequence: Synthetic oligonucleotide
  Sense strand starting at position 1353 of SEQ ID NO: 1880911
agguuauguggauacuguu

SEQ ID NO: 2003443 - RNA, 19 nt, Artificial Sequence
  Description of Artificial Sequence: Synthetic oligonucleotide
  Antisense strand to SEQ ID NO: 2003442
aacaguauccacauaaccu

SEQ ID NO: 2003444 - RNA, 19 nt, Artificial Sequence
  Description of Artificial Sequence: Synthetic oligonucleotide
  Sense strand starting at position 1431 of SEQ ID NO: 1880911
cauggaauuucugaaugua

SEQ ID NO: 2003445 - RNA, 19 nt, Artificial Sequence
  Description of Artificial Sequence: Synthetic oligonucleotide
  Antisense strand to SEQ ID NO: 2003444
uacauucagaaauuccaug

SEQ ID NO: 2003446 - RNA, 19 nt, Artificial Sequence
  Description of Artificial Sequence: Synthetic oligonucleotide
  Sense strand starting at position 1511 of SEQ ID NO: 1880911
guaccuauuuacuugccua

SEQ ID NO: 2003447 - RNA, 19 nt, Artificial Sequence
  Description of Artificial Sequence: Synthetic oligonucleotide
  Antisense strand to SEQ ID NO: 2003446
uaggcaaguaaauagguac

SEQ ID NO: 2003448 - RNA, 19 nt, Artificial Sequence
  Description of Artificial Sequence: Synthetic oligonucleotide
  Sense strand starting at position 1652 of SEQ ID NO: 1880911
gccauuauaucugucaaga

SEQ ID NO: 2003449 - RNA, 19 nt, Artificial Sequence
  Description of Artificial Sequence: Synthetic oligonucleotide
  Antisense strand to SEQ ID NO: 2003448
ucuugacagauauaauggc

SEQ ID NO: 2003450 - RNA, 19 nt, Artificial Sequence
  Description of Artificial Sequence: Synthetic oligonucleotide
  Sense strand starting at position 1741 of SEQ ID NO: 1880911
ucuaacagucuuggaauaa

SEQ ID NO: 2003451 - RNA, 19 nt, Artificial Sequence
  Description of Artificial Sequence: Synthetic oligonucleotide
  Antisense strand to SEQ ID NO: 2003450
uuauuccaagacuguuaga

SEQ ID NO: 2003452 - RNA, 19 nt, Artificial Sequence
  Description of Artificial Sequence: Synthetic oligonucleotide
  Sense strand starting at position 1833 of SEQ ID NO: 1880911
gugauuugauaggaaucac

SEQ ID NO: 2003453 - RNA, 19 nt, Artificial Sequence
  Description of Artificial Sequence: Synthetic oligonucleotide
  Antisense strand to SEQ ID NO: 2003452
gugauuccuaucaaaucac

SEQ ID NO: 2003454 - RNA, 19 nt, Artificial Sequence
  Description of Artificial Sequence: Synthetic oligonucleotide
  Sense strand starting at position 1918 of SEQ ID NO: 1880911
ccauguaccucuguaauag

SEQ ID NO: 2003455 - RNA, 19 nt, Artificial Sequence
  Description of Artificial Sequence: Synthetic oligonucleotide
  Antisense strand to SEQ ID NO: 2003454
cuauuacagagguacaugg

SEQ ID NO: 2003456 - RNA, 19 nt, Artificial Sequence
  Description of Artificial Sequence: Synthetic oligonucleotide
  Sense strand starting at position 1985 of SEQ ID NO: 1880911
uugcaagaaugaucucucu

SEQ ID NO: 2003457 - RNA, 19 nt, Artificial Sequence
  Description of Artificial Sequence: Synthetic oligonucleotide
  Antisense strand to SEQ ID NO: 2003456
agagagaucauucuugcaa

SEQ ID NO: 2003458 - RNA, 19 nt, Artificial Sequence
  Description of Artificial Sequence: Synthetic oligonucleotide
  Sense strand starting at position 2432 of SEQ ID NO: 1880911
acugucacuuccuugaaga

SEQ ID NO: 2003459 - RNA, 19 nt, Artificial Sequence
  Description of Artificial Sequence: Synthetic oligonucleotide
  Antisense strand to SEQ ID NO: 2003458
ucuucaaggaagugacagu

SEQ ID NO: 2003460 - RNA, 19 nt, Artificial Sequence
  Description of Artificial Sequence: Synthetic oligonucleotide
  Sense strand starting at position 2508 of SEQ ID NO: 1880911
guaguaucuguuuaaagga

SEQ ID NO: 2003461 - RNA, 19 nt, Artificial Sequence
  Description of Artificial Sequence: Synthetic oligonucleotide
  Antisense strand to SEQ ID NO: 2003460
uccuuuaaacagauacuac

SEQ ID NO: 2003462 - RNA, 19 nt, Artificial Sequence
  Description of Artificial Sequence: Synthetic oligonucleotide
  Sense strand starting at position 2602 of SEQ ID NO: 1880911
ucaucuaaugaguggcuaa

SEQ ID NO: 2003463 - RNA, 19 nt, Artificial Sequence
  Description of Artificial Sequence: Synthetic oligonucleotide
  Antisense strand to SEQ ID NO: 2003462
uuagccacucauuagauga

SEQ ID NO: 2003464 - RNA, 19 nt, Artificial Sequence
  Description of Artificial Sequence: Synthetic oligonucleotide
  Sense strand starting at position 2770 of SEQ ID NO: 1880911
guaaauauuuaaugaggag

SEQ ID NO: 2003465 - RNA, 19 nt, Artificial Sequence
  Description of Artificial Sequence: Synthetic oligonucleotide
  Antisense strand to SEQ ID NO: 2003464
cuccucauuaaauauuuac

SEQ ID NO: 2003466 - RNA, 19 nt, Artificial Sequence
  Description of Artificial Sequence: Synthetic oligonucleotide
  Sense strand starting at position 2810 of SEQ ID NO: 1880911
aagaaacagugagcuagau

SEQ ID NO: 2003467 - RNA, 19 nt, Artificial Sequence
  Description of Artificial Sequence: Synthetic oligonucleotide
  Antisense strand to SEQ ID NO: 2003466
aucuagcucacuguuucuu

SEQ ID NO: 2003468 - RNA, 19 nt, Artificial Sequence
  Description of Artificial Sequence: Synthetic oligonucleotide
  Sense strand starting at position 2814 of SEQ ID NO: 1880911
aacagugagcuagaucauu

SEQ ID NO: 2003469 - RNA, 19 nt, Artificial Sequence
  Description of Artificial Sequence: Synthetic oligonucleotide
  Antisense strand to SEQ ID NO: 2003468
aaugaucuagcucacuguu

SEQ ID NO: 2003470 - RNA, 19 nt, Artificial Sequence
  Description of Artificial Sequence: Synthetic oligonucleotide
  Sense strand starting at position 3208 of SEQ ID NO: 1880911
ccugguugaccuuaccaau

SEQ ID NO: 2003471 - RNA, 19 nt, Artificial Sequence
  Description of Artificial Sequence: Synthetic oligonucleotide
  Antisense strand to SEQ ID NO: 2003470
auugguaaggucaaccagg

SEQ ID NO: 2003472 - RNA, 19 nt, Artificial Sequence
  Description of Artificial Sequence: Synthetic oligonucleotide
  Sense strand starting at position 3301 of SEQ ID NO: 1880911
acauucuuguuggcagaag

SEQ ID NO: 2003473 - RNA, 19 nt, Artificial Sequence
  Description of Artificial Sequence: Synthetic oligonucleotide
  Antisense strand to SEQ ID NO: 2003472
cuucugccaacaagaaugu

SEQ ID NO: 2003474 - RNA, 19 nt, Artificial Sequence
  Description of Artificial Sequence: Synthetic oligonucleotide
  Sense strand starting at position 3458 of SEQ ID NO: 1880911
agaauuaugugacuaagug

SEQ ID NO: 2003475 - RNA, 19 nt, Artificial Sequence
  Description of Artificial Sequence: Synthetic oligonucleotide
  Antisense strand to SEQ ID NO: 2003474
cacuuagucacauaauucu

SEQ ID NO: 2003476 - RNA, 19 nt, Artificial Sequence
  Description of Artificial Sequence: Synthetic oligonucleotide
  Sense strand starting at position 3699 of SEQ ID NO: 1880911
ugcagagacuaucucagau

SEQ ID NO: 2003477 - RNA, 19 nt, Artificial Sequence
  Description of Artificial Sequence: Synthetic oligonucleotide
  Antisense strand to SEQ ID NO: 2003476
aucugagauagucucugca

SEQ ID NO: 2003478 - RNA, 19 nt, Artificial Sequence
  Description of Artificial Sequence: Synthetic oligonucleotide
  Sense strand starting at position 3720 of SEQ ID NO: 1880911
aggcuaauuucuguuguuu

SEQ ID NO: 2003479 - RNA, 19 nt, Artificial Sequence
  Description of Artificial Sequence: Synthetic oligonucleotide
  Antisense strand to SEQ ID NO: 2003478
aaacaacagaaauuagccu

SEQ ID NO: 2003480 - RNA, 19 nt, Artificial Sequence
  Description of Artificial Sequence: Synthetic oligonucleotide
  Sense strand starting at position 3725 of SEQ ID NO: 1880911
aauuucuguuguuuaggua

SEQ ID NO: 2003481 - RNA, 19 nt, Artificial Sequence
  Description of Artificial Sequence: Synthetic oligonucleotide
  Antisense strand to SEQ ID NO: 2003480
uaccuaaacaacagaaauu

SEQ ID NO: 2003482 - RNA, 19 nt, Artificial Sequence
  Description of Artificial Sequence: Synthetic oligonucleotide
  Sense strand starting at position 169 of SEQ ID NO: 1880912
ugaagugacuacuaagaau

SEQ ID NO: 2003483 - RNA, 19 nt, Artificial Sequence
  Description of Artificial Sequence: Synthetic oligonucleotide
  Antisense strand to SEQ ID NO: 2003482
auucuuaguagucacuuca

SEQ ID NO: 2003484 - RNA, 19 nt, Artificial Sequence
  Description of Artificial Sequence: Synthetic oligonucleotide
  Sense strand starting at position 172 of SEQ ID NO: 1880912
agugacuacuaagaauaaa

SEQ ID NO: 2003485 - RNA, 19 nt, Artificial Sequence
  Description of Artificial Sequence: Synthetic oligonucleotide
  Antisense strand to SEQ ID NO: 2003484
uuuauucuuaguagucacu

SEQ ID NO: 2003486 - RNA, 19 nt, Artificial Sequence
  Description of Artificial Sequence: Synthetic oligonucleotide
  Sense strand starting at position 373 of SEQ ID NO: 1880912
ccagcaguucuuuauuagu

SEQ ID NO: 2003487 - RNA, 19 nt, Artificial Sequence
  Description of Artificial Sequence: Synthetic oligonucleotide
  Antisense strand to SEQ ID NO: 2003486
acuaauaaagaacugcugg

SEQ ID NO: 2003488 - RNA, 19 nt, Artificial Sequence
  Description of Artificial Sequence: Synthetic oligonucleotide
  Sense strand starting at position 375 of SEQ ID NO: 1880912
agcaguucuuuauuaguau

SEQ ID NO: 2003489 - RNA, 19 nt, Artificial Sequence
  Description of Artificial Sequence: Synthetic oligonucleotide
  Antisense strand to SEQ ID NO: 2003488
auacuaauaaagaacugcu

SEQ ID NO: 2003490 - RNA, 19 nt, Artificial Sequence
  Description of Artificial Sequence: Synthetic oligonucleotide
  Sense strand starting at position 381 of SEQ ID NO: 1880912
ucuuuauuaguauagaguc

SEQ ID NO: 2003491 - RNA, 19 nt, Artificial Sequence
  Description of Artificial Sequence: Synthetic oligonucleotide
  Antisense strand to SEQ ID NO: 2003490
gacucuauacuaauaaaga

SEQ ID NO: 2003492 - RNA, 19 nt, Artificial Sequence
  Description of Artificial Sequence: Synthetic oligonucleotide
  Sense strand starting at position 417 of SEQ ID NO: 1880912
gaaucauuagugcagcaag

SEQ ID NO: 2003493 - RNA, 19 nt, Artificial Sequence
  Description of Artificial Sequence: Synthetic oligonucleotide
  Antisense strand to SEQ ID NO: 2003492
cuugcugcacuaaugauuc

SEQ ID NO: 2003494 - RNA, 19 nt, Artificial Sequence
  Description of Artificial Sequence: Synthetic oligonucleotide
  Sense strand starting at position 420 of SEQ ID NO: 1880912
ucauuagugcagcaagaua

SEQ ID NO: 2003495 - RNA, 19 nt, Artificial Sequence
  Description of Artificial Sequence: Synthetic oligonucleotide
  Antisense strand to SEQ ID NO: 2003494
uaucuugcugcacuaauga

SEQ ID NO: 2003496 - RNA, 19 nt, Artificial Sequence
  Description of Artificial Sequence: Synthetic oligonucleotide
  Sense strand starting at position 441 of SEQ ID NO: 1880912
uggccucuucgggaggaaa

SEQ ID NO: 2003497 - RNA, 19 nt, Artificial Sequence
  Description of Artificial Sequence: Synthetic oligonucleotide
  Antisense strand to SEQ ID NO: 2003496
uuuccucccgaagaggcca

SEQ ID NO: 2003498 - RNA, 19 nt, Artificial Sequence
  Description of Artificial Sequence: Synthetic oligonucleotide
  Sense strand starting at position 443 of SEQ ID NO: 1880912
gccucuucgggaggaaaca

SEQ ID NO: 2003499 - RNA, 19 nt, Artificial Sequence
  Description of Artificial Sequence: Synthetic oligonucleotide
  Antisense strand to SEQ ID NO: 2003498
uguuuccucccgaagaggc

SEQ ID NO: 2003500 - RNA, 19 nt, Artificial Sequence
  Description of Artificial Sequence: Synthetic oligonucleotide
  Sense strand starting at position 479 of SEQ ID NO: 1880912
gaccaauucucaguaaagg

SEQ ID NO: 2003501 - RNA, 19 nt, Artificial Sequence
  Description of Artificial Sequence: Synthetic oligonucleotide
  Antisense strand to SEQ ID NO: 2003500
ccuuuacugagaauugguc

SEQ ID NO: 2003502 - RNA, 19 nt, Artificial Sequence
  Description of Artificial Sequence: Synthetic oligonucleotide
  Sense strand starting at position 569 of SEQ ID NO: 1880912
ucguguugaaguuagagca

SEQ ID NO: 2003503 - RNA, 19 nt, Artificial Sequence
  Description of Artificial Sequence: Synthetic oligonucleotide
  Antisense strand to SEQ ID NO: 2003502
ugcucuaacuucaacacga

SEQ ID NO: 2003504 - RNA, 19 nt, Artificial Sequence
  Description of Artificial Sequence: Synthetic oligonucleotide
  Sense strand starting at position 642 of SEQ ID NO: 1880912
gggcaaauuaauuguguug

SEQ ID NO: 2003505 - RNA, 19 nt, Artificial Sequence
  Description of Artificial Sequence: Synthetic oligonucleotide
  Antisense strand to SEQ ID NO: 2003504
caacacaauuaauuugccc

SEQ ID NO: 2003506 - RNA, 19 nt, Artificial Sequence
  Description of Artificial Sequence: Synthetic oligonucleotide
  Sense strand starting at position 721 of SEQ ID NO: 1880912
uuuauauucuggguagggu

SEQ ID NO: 2003507 - RNA, 19 nt, Artificial Sequence
  Description of Artificial Sequence: Synthetic oligonucleotide
  Antisense strand to SEQ ID NO: 2003506
acccuacccagaauauaaa

SEQ ID NO: 2003508 - RNA, 19 nt, Artificial Sequence
  Description of Artificial Sequence: Synthetic oligonucleotide
  Sense strand starting at position 747 of SEQ ID NO: 1880912
gcgaacuugcucuauaaau

SEQ ID NO: 2003509 - RNA, 19 nt, Artificial Sequence
  Description of Artificial Sequence: Synthetic oligonucleotide
  Antisense strand to SEQ ID NO: 2003508
auuuauagagcaaguucgc

SEQ ID NO: 2003510 - RNA, 19 nt, Artificial Sequence
  Description of Artificial Sequence: Synthetic oligonucleotide
  Sense strand starting at position 787 of SEQ ID NO: 1880912
auauuugagucagacuaaa

SEQ ID NO: 2003511 - RNA, 19 nt, Artificial Sequence
  Description of Artificial Sequence: Synthetic oligonucleotide
  Antisense strand to SEQ ID NO: 2003510
uuuagucugacucaaauau

SEQ ID NO: 2003512 - RNA, 19 nt, Artificial Sequence
  Description of Artificial Sequence: Synthetic oligonucleotide
  Sense strand starting at position 810 of SEQ ID NO: 1880912
guccaaauaugugcuaaug

SEQ ID NO: 2003513 - RNA, 19 nt, Artificial Sequence
  Description of Artificial Sequence: Synthetic oligonucleotide
  Antisense strand to SEQ ID NO: 2003512
cauuagcacauauuuggac

SEQ ID NO: 2003514 - RNA, 19 nt, Artificial Sequence
  Description of Artificial Sequence: Synthetic oligonucleotide
  Sense strand starting at position 871 of SEQ ID NO: 1880912
aaugcuggcuucuuugaga

SEQ ID NO: 2003515 - RNA, 19 nt, Artificial Sequence
  Description of Artificial Sequence: Synthetic oligonucleotide
  Antisense strand to SEQ ID NO: 2003514
ucucaaagaagccagcauu

SEQ ID NO: 2003516 - RNA, 19 nt, Artificial Sequence
  Description of Artificial Sequence: Synthetic oligonucleotide
  Sense strand starting at position 1031 of SEQ ID NO: 1880912
ugaagcgaucguagcgauu

SEQ ID NO: 2003517 - RNA, 19 nt, Artificial Sequence
  Description of Artificial Sequence: Synthetic oligonucleotide
  Antisense strand to SEQ ID NO: 2003516
aaucgcuacgaucgcuuca

SEQ ID NO: 2003518 - RNA, 19 nt, Artificial Sequence
  Description of Artificial Sequence: Synthetic oligonucleotide
  Sense strand starting at position 1164 of SEQ ID NO: 1880912
uuuggaauugugcauguuu

SEQ ID NO: 2003519 - RNA, 19 nt, Artificial Sequence
  Description of Artificial Sequence: Synthetic oligonucleotide
  Antisense strand to SEQ ID NO: 2003518
aaacaugcacaauuccaaa

SEQ ID NO: 2003520 - RNA, 19 nt, Artificial Sequence
  Description of Artificial Sequence: Synthetic oligonucleotide
  Sense strand starting at position 1166 of SEQ ID NO: 1880912
uggaauugugcauguuuga

SEQ ID NO: 2003521 - RNA, 19 nt, Artificial Sequence
  Description of Artificial Sequence: Synthetic oligonucleotide
  Antisense strand to SEQ ID NO: 2003520
ucaaacaugcacaauucca

SEQ ID NO: 2003522 - RNA, 19 nt, Artificial Sequence
  Description of Artificial Sequence: Synthetic oligonucleotide
  Sense strand starting at position 1169 of SEQ ID NO: 1880912
aauugugcauguuugaauu

SEQ ID NO: 2003523 - RNA, 19 nt, Artificial Sequence
  Description of Artificial Sequence: Synthetic oligonucleotide
  Antisense strand to SEQ ID NO: 2003522
aauucaaacaugcacaauu

SEQ ID NO: 2003524 - RNA, 19 nt, Artificial Sequence
  Description of Artificial Sequence: Synthetic oligonucleotide
  Sense strand starting at position 1179 of SEQ ID NO: 1880912
guuugaauuccauaggcag

SEQ ID NO: 2003525 - RNA, 19 nt, Artificial Sequence
  Description of Artificial Sequence: Synthetic oligonucleotide
  Antisense strand to SEQ ID NO: 2003524
cugccuauggaauucaaac

SEQ ID NO: 2003526 - RNA, 19 nt, Artificial Sequence
  Description of Artificial Sequence: Synthetic oligonucleotide
  Sense strand starting at position 1186 of SEQ ID NO: 1880912
uuccauaggcagugauuaa

SEQ ID NO: 2003527 - RNA, 19 nt, Artificial Sequence
  Description of Artificial Sequence: Synthetic oligonucleotide
  Antisense strand to SEQ ID NO: 2003526
uuaaucacugccuauggaa

SEQ ID NO: 2003528 - RNA, 19 nt, Artificial Sequence
  Description of Artificial Sequence: Synthetic oligonucleotide
  Sense strand starting at position 1187 of SEQ ID NO: 1880912
uccauaggcagugauuaag

SEQ ID NO: 2003529 - RNA, 19 nt, Artificial Sequence
  Description of Artificial Sequence: Synthetic oligonucleotide
  Antisense strand to SEQ ID NO: 2003528
cuuaaucacugccuaugga

SEQ ID NO: 2003530 - RNA, 19 nt, Artificial Sequence
  Description of Artificial Sequence: Synthetic oligonucleotide
  Sense strand starting at position 1574 of SEQ ID NO: 1880912
uuauucgagccauguaacu

SEQ ID NO: 2003531 - RNA, 19 nt, Artificial Sequence
  Description of Artificial Sequence: Synthetic oligonucleotide
  Antisense strand to SEQ ID NO: 2003530
aguuacauggcucgaauaa

SEQ ID NO: 2003532 - RNA, 19 nt, Artificial Sequence
  Description of Artificial Sequence: Synthetic oligonucleotide
  Sense strand starting at position 1658 of SEQ ID NO: 1880912
ugucaaaguuuguuguaua

SEQ ID NO: 2003533 - RNA, 19 nt, Artificial Sequence
  Description of Artificial Sequence: Synthetic oligonucleotide
  Antisense strand to SEQ ID NO: 2003532
uauacaacaaacuuugaca

SEQ ID NO: 2003534 - RNA, 19 nt, Artificial Sequence
  Description of Artificial Sequence: Synthetic oligonucleotide
  Sense strand starting at position 1666 of SEQ ID NO: 1880912
uuuguuguauacucacaga

SEQ ID NO: 2003535 - RNA, 19 nt, Artificial Sequence
  Description of Artificial Sequence: Synthetic oligonucleotide
  Antisense strand to SEQ ID NO: 2003534
ucugugaguauacaacaaa

SEQ ID NO: 2003536 - RNA, 19 nt, Artificial Sequence
  Description of Artificial Sequence: Synthetic oligonucleotide
  Sense strand starting at position 1764 of SEQ ID NO: 1880912
auuauuccucaggaaacgu

SEQ ID NO: 2003537 - RNA, 19 nt, Artificial Sequence
  Description of Artificial Sequence: Synthetic oligonucleotide
  Antisense strand to SEQ ID NO: 2003536
acguuuccugaggaauaau

SEQ ID NO: 2003538 - RNA, 19 nt, Artificial Sequence
  Description of Artificial Sequence: Synthetic oligonucleotide
  Sense strand starting at position 1791 of SEQ ID NO: 1880912
gcguuauugagaggugaca

SEQ ID NO: 2003539 - RNA, 19 nt, Artificial Sequence
  Description of Artificial Sequence: Synthetic oligonucleotide
  Antisense strand to SEQ ID NO: 2003538
ugucaccucucaauaacgc

SEQ ID NO: 2003540 - RNA, 19 nt, Artificial Sequence
  Description of Artificial Sequence: Synthetic oligonucleotide
  Sense strand starting at position 2681 of SEQ ID NO: 1880912
agcucagaguuuguaaaca

SEQ ID NO: 2003541 - RNA, 19 nt, Artificial Sequence
  Description of Artificial Sequence: Synthetic oligonucleotide
  Antisense strand to SEQ ID NO: 2003540
uguuuacaaacucugagcu

SEQ ID NO: 2003542 - RNA, 19 nt, Artificial Sequence
  Description of Artificial Sequence: Synthetic oligonucleotide
  Sense strand starting at position 3307 of SEQ ID NO: 1880912
ugcagaauaccagguauug

SEQ ID NO: 2003543 - RNA, 19 nt, Artificial Sequence
  Description of Artificial Sequence: Synthetic oligonucleotide
  Antisense strand to SEQ ID NO: 2003542
caauaccugguauucugca

SEQ ID NO: 2003544 - RNA, 19 nt, Artificial Sequence
  Description of Artificial Sequence: Synthetic oligonucleotide
  Sense strand starting at position 3351 of SEQ ID NO: 1880912
gucauuagcgcugucacca

SEQ ID NO: 2003545 - RNA, 19 nt, Artificial Sequence
  Description of Artificial Sequence: Synthetic oligonucleotide
  Antisense strand to SEQ ID NO: 2003544
uggugacagcgcuaaugac

SEQ ID NO: 2003546 - RNA, 19 nt, Artificial Sequence
  Description of Artificial Sequence: Synthetic oligonucleotide
  Sense strand starting at position 3448 of SEQ ID NO: 1880912
ucacuugcucuagagugga

SEQ ID NO: 2003547 - RNA, 19 nt, Artificial Sequence
  Description of Artificial Sequence: Synthetic oligonucleotide
  Antisense strand to SEQ ID NO: 2003546
uccacucuagagcaaguga

SEQ ID NO: 2003548 - RNA, 19 nt, Artificial Sequence
  Description of Artificial Sequence: Synthetic oligonucleotide
  Sense strand starting at position 3461 of SEQ ID NO: 1880912
aguggauuuccuggcaggu

SEQ ID NO: 2003549 - RNA, 19 nt, Artificial Sequence
  Description of Artificial Sequence: Synthetic oligonucleotide
  Antisense strand to SEQ ID NO: 2003548
accugccaggaaauccacu

SEQ ID NO: 2003550 - RNA, 19 nt, Artificial Sequence
  Description of Artificial Sequence: Synthetic oligonucleotide
  Sense strand starting at position 3463 of SEQ ID NO: 1880912
uggauuuccuggcagguua

SEQ ID NO: 2003551 - RNA, 19 nt, Artificial Sequence
  Description of Artificial Sequence: Synthetic oligonucleotide
  Antisense strand to SEQ ID NO: 2003550
uaaccugccaggaaaucca

SEQ ID NO: 2003552 - RNA, 19 nt, Artificial Sequence
  Description of Artificial Sequence: Synthetic oligonucleotide
  Sense strand starting at position 3478 of SEQ ID NO: 1880912
guuauaugccuuuauccuc

SEQ ID NO: 2003553 - RNA, 19 nt, Artificial Sequence
  Description of Artificial Sequence: Synthetic oligonucleotide
  Antisense strand to SEQ ID NO: 2003552
gaggauaaaggcauauaac

SEQ ID NO: 2003554 - RNA, 19 nt, Artificial Sequence
  Description of Artificial Sequence: Synthetic oligonucleotide
  Sense strand starting at position 3550 of SEQ ID NO: 1880912
accgaaaguaauggauaau

SEQ ID NO: 2003555 - RNA, 19 nt, Artificial Sequence
  Description of Artificial Sequence: Synthetic oligonucleotide
  Antisense strand to SEQ ID NO: 2003554
auuauccauuacuuucggu

SEQ ID NO: 2003556 - RNA, 19 nt, Artificial Sequence
  Description of Artificial Sequence: Synthetic oligonucleotide
  Sense strand starting at position 3556 of SEQ ID NO: 1880912
aguaauggauaauuccuua

SEQ ID NO: 2003557 - RNA, 19 nt, Artificial Sequence
  Description of Artificial Sequence: Synthetic oligonucleotide
  Antisense strand to SEQ ID NO: 2003556
uaaggaauuauccauuacu

SEQ ID NO: 2003558 - RNA, 19 nt, Artificial Sequence
  Description of Artificial Sequence: Synthetic oligonucleotide
  Sense strand starting at position 3633 of SEQ ID NO: 1880912
gugauaucagccuaacaua

SEQ ID NO: 2003559 - RNA, 19 nt, Artificial Sequence
  Description of Artificial Sequence: Synthetic oligonucleotide
  Antisense strand to SEQ ID NO: 2003558
uauguuaggcugauaucac

SEQ ID NO: 2003560 - RNA, 19 nt, Artificial Sequence
  Description of Artificial Sequence: Synthetic oligonucleotide
  Sense strand starting at position 3874 of SEQ ID NO: 1880912
guuggaccaagugaucuua

SEQ ID NO: 2003561 - RNA, 19 nt, Artificial Sequence
  Description of Artificial Sequence: Synthetic oligonucleotide
  Antisense strand to SEQ ID NO: 2003560
uaagaucacuugguccaac

SEQ ID NO: 2003562 - RNA, 19 nt, Artificial Sequence
  Description of Artificial Sequence: Synthetic oligonucleotide
  Sense strand starting at position 227 of SEQ ID NO: 1880913
gcaaguuugaacugaguga

SEQ ID NO: 2003563 - RNA, 19 nt, Artificial Sequence
  Description of Artificial Sequence: Synthetic oligonucleotide
  Antisense strand to SEQ ID NO: 2003562
ucacucaguucaaacuugc

SEQ ID NO: 2003564 - RNA, 19 nt, Artificial Sequence
  Description of Artificial Sequence: Synthetic oligonucleotide
  Sense strand starting at position 240 of SEQ ID NO: 1880913
gagugagucuacuuacaca

SEQ ID NO: 2003565 - RNA, 19 nt, Artificial Sequence
  Description of Artificial Sequence: Synthetic oligonucleotide
  Antisense strand to SEQ ID NO: 2003564
uguguaaguagacucacuc

SEQ ID NO: 2003566 - RNA, 19 nt, Artificial Sequence
  Description of Artificial Sequence: Synthetic oligonucleotide
  Sense strand starting at position 330 of SEQ ID NO: 1880913
ggaccaacucuauaugcua

SEQ ID NO: 2003567 - RNA, 19 nt, Artificial Sequence
  Description of Artificial Sequence: Synthetic oligonucleotide
  Antisense strand to SEQ ID NO: 2003566
uagcauauagaguuggucc

SEQ ID NO: 2003568 - RNA, 19 nt, Artificial Sequence
  Description of Artificial Sequence: Synthetic oligonucleotide
  Sense strand starting at position 1045 of SEQ ID NO: 1880913
gagaauaaggcauguauca

SEQ ID NO: 2003569 - RNA, 19 nt, Artificial Sequence
  Description of Artificial Sequence: Synthetic oligonucleotide
  Antisense strand to SEQ ID NO: 2003568
ugauacaugccuuauucuc

SEQ ID NO: 2003570 - RNA, 19 nt, Artificial Sequence
  Description of Artificial Sequence: Synthetic oligonucleotide
  Sense strand starting at position 1088 of SEQ ID NO: 1880913
gccaguagagaauguugaa

SEQ ID NO: 2003571 - RNA, 19 nt, Artificial Sequence
  Description of Artificial Sequence: Synthetic oligonucleotide
  Antisense strand to SEQ ID NO: 2003570
uucaacauucucuacuggc

SEQ ID NO: 2003572 - RNA, 19 nt, Artificial Sequence
  Description of Artificial Sequence: Synthetic oligonucleotide
  Sense strand starting at position 1150 of SEQ ID NO: 1880913
guuaaauauccaggcuaag

SEQ ID NO: 2003573 - RNA, 19 nt, Artificial Sequence
  Description of Artificial Sequence: Synthetic oligonucleotide
  Antisense strand to SEQ ID NO: 2003572
cuuagccuggauauuuaac

SEQ ID NO: 2003574 - RNA, 19 nt, Artificial Sequence
  Description of Artificial Sequence: Synthetic oligonucleotide
  Sense strand starting at position 1164 of SEQ ID NO: 1880913
cuaaguguccuugaauuau

SEQ ID NO: 2003575 - RNA, 19 nt, Artificial Sequence
  Description of Artificial Sequence: Synthetic oligonucleotide
  Antisense strand to SEQ ID NO: 2003574
auaauucaaggacacuuag

SEQ ID NO: 2003576 - RNA, 19 nt, Artificial Sequence
  Description of Artificial Sequence: Synthetic oligonucleotide
  Sense strand starting at position 1204 of SEQ ID NO: 1880913
ggcaguuugcuacagagaa

SEQ ID NO: 2003577 - RNA, 19 nt, Artificial Sequence
  Description of Artificial Sequence: Synthetic oligonucleotide
  Antisense strand to SEQ ID NO: 2003576
uucucuguagcaaacugcc

SEQ ID NO: 2003578 - RNA, 19 nt, Artificial Sequence
  Description of Artificial Sequence: Synthetic oligonucleotide
  Sense strand starting at position 1208 of SEQ ID NO: 1880913
guuugcuacagagaaguuu

SEQ ID NO: 2003579 - RNA, 19 nt, Artificial Sequence
  Description of Artificial Sequence: Synthetic oligonucleotide
  Antisense strand to SEQ ID NO: 2003578
aaacuucucuguagcaaac

SEQ ID NO: 2003580 - RNA, 19 nt, Artificial Sequence
  Description of Artificial Sequence: Synthetic oligonucleotide
  Sense strand starting at position 1256 of SEQ ID NO: 1880913
aguaguuagccucacuaga

SEQ ID NO: 2003581 - RNA, 19 nt, Artificial Sequence
  Description of Artificial Sequence: Synthetic oligonucleotide
  Antisense strand to SEQ ID NO: 2003580
ucuagugaggcuaacuacu

SEQ ID NO: 2003582 - RNA, 19 nt, Artificial Sequence
  Description of Artificial Sequence: Synthetic oligonucleotide
  Sense strand starting at position 1454 of SEQ ID NO: 1880913
gccugaauccaagauuguu

SEQ ID NO: 2003583 - RNA, 19 nt, Artificial Sequence
  Description of Artificial Sequence: Synthetic oligonucleotide
  Antisense strand to SEQ ID NO: 2003582
aacaaucuuggauucaggc

SEQ ID NO: 2003584 - RNA, 19 nt, Artificial Sequence
  Description of Artificial Sequence: Synthetic oligonucleotide
  Sense strand starting at position 1463 of SEQ ID NO: 1880913
caagauuguuguguagaau

SEQ ID NO: 2003585 - RNA, 19 nt, Artificial Sequence
  Description of Artificial Sequence: Synthetic oligonucleotide
  Antisense strand to SEQ ID NO: 2003584
auucuacacaacaaucuug

SEQ ID NO: 2003586 - RNA, 19 nt, Artificial Sequence
  Description of Artificial Sequence: Synthetic oligonucleotide
  Sense strand starting at position 1464 of SEQ ID NO: 1880913
aagauuguuguguagaauu

SEQ ID NO: 2003587 - RNA, 19 nt, Artificial Sequence
  Description of Artificial Sequence: Synthetic oligonucleotide
  Antisense strand to SEQ ID NO: 2003586
aauucuacacaacaaucuu

SEQ ID NO: 2003588 - RNA, 19 nt, Artificial Sequence
  Description of Artificial Sequence: Synthetic oligonucleotide
  Sense strand starting at position 1664 of SEQ ID NO: 1880913
cuguuagggauuuguguua

SEQ ID NO: 2003589 - RNA, 19 nt, Artificial Sequence
  Description of Artificial Sequence: Synthetic oligonucleotide
  Antisense strand to SEQ ID NO: 2003588
uaacacaaaucccuaacag

SEQ ID NO: 2003590 - RNA, 19 nt, Artificial Sequence
  Description of Artificial Sequence: Synthetic oligonucleotide
  Sense strand starting at position 1669 of SEQ ID NO: 1880913
agggauuuguguuaaagaa

SEQ ID NO: 2003591 - RNA, 19 nt, Artificial Sequence
  Description of Artificial Sequence: Synthetic oligonucleotide
  Antisense strand to SEQ ID NO: 2003590
uucuuuaacacaaaucccu

SEQ ID NO: 2003592 - RNA, 19 nt, Artificial Sequence
  Description of Artificial Sequence: Synthetic oligonucleotide
  Sense strand starting at position 1676 of SEQ ID NO: 1880913
uguguuaaagaaugaaguu

SEQ ID NO: 2003593 - RNA, 19 nt, Artificial Sequence
  Description of Artificial Sequence: Synthetic oligonucleotide
  Antisense strand to SEQ ID NO: 2003592
aacuucauucuuuaacaca

SEQ ID NO: 2003594 - RNA, 19 nt, Artificial Sequence
  Description of Artificial Sequence: Synthetic oligonucleotide
  Sense strand starting at position 1677 of SEQ ID NO: 1880913
guguuaaagaaugaaguuu

SEQ ID NO: 2003595 - RNA, 19 nt, Artificial Sequence
  Description of Artificial Sequence: Synthetic oligonucleotide
  Antisense strand to SEQ ID NO: 2003594
aaacuucauucuuuaacac

SEQ ID NO: 2003596 - RNA, 19 nt, Artificial Sequence
  Description of Artificial Sequence: Synthetic oligonucleotide
  Sense strand starting at position 2020 of SEQ ID NO: 1880913
agcaaauacuuguuugaaa

SEQ ID NO: 2003597 - RNA, 19 nt, Artificial Sequence
  Description of Artificial Sequence: Synthetic oligonucleotide
  Antisense strand to SEQ ID NO: 2003596
uuucaaacaaguauuugcu

SEQ ID NO: 2003598 - RNA, 19 nt, Artificial Sequence
  Description of Artificial Sequence: Synthetic oligonucleotide
  Sense strand starting at position 2021 of SEQ ID NO: 1880913
gcaaauacuuguuugaaac

SEQ ID NO: 2003599 - RNA, 19 nt, Artificial Sequence
  Description of Artificial Sequence: Synthetic oligonucleotide
  Antisense strand to SEQ ID NO: 2003598
guuucaaacaaguauuugc

SEQ ID NO: 2003600 - RNA, 19 nt, Artificial Sequence
  Description of Artificial Sequence: Synthetic oligonucleotide
  Sense strand starting at position 2169 of SEQ ID NO: 1880913
aaaggcgagcucugagaaa

SEQ ID NO: 2003601 - RNA, 19 nt, Artificial Sequence
  Description of Artificial Sequence: Synthetic oligonucleotide
  Antisense strand to SEQ ID NO: 2003600
uuucucagagcucgccuuu

SEQ ID NO: 2003602 - RNA, 19 nt, Artificial Sequence
  Description of Artificial Sequence: Synthetic oligonucleotide
  Sense strand starting at position 2348 of SEQ ID NO: 1880913
auaacaaaccuucgaguaa

SEQ ID NO: 2003603 - RNA, 19 nt, Artificial Sequence
  Description of Artificial Sequence: Synthetic oligonucleotide
  Antisense strand to SEQ ID NO: 2003602
uuacucgaagguuuguuau

SEQ ID NO: 2003604 - RNA, 19 nt, Artificial Sequence
  Description of Artificial Sequence: Synthetic oligonucleotide
  Sense strand starting at position 2857 of SEQ ID NO: 1880913
guaagucugccucaugaua

SEQ ID NO: 2003605 - RNA, 19 nt, Artificial Sequence
  Description of Artificial Sequence: Synthetic oligonucleotide
  Antisense strand to SEQ ID NO: 2003604
uaucaugaggcagacuuac

SEQ ID NO: 2003606 - RNA, 19 nt, Artificial Sequence
  Description of Artificial Sequence: Synthetic oligonucleotide
  Sense strand starting at position 3044 of SEQ ID NO: 1880913
ggguguacgacugaaugua

SEQ ID NO: 2003607 - RNA, 19 nt, Artificial Sequence
  Description of Artificial Sequence: Synthetic oligonucleotide
  Antisense strand to SEQ ID NO: 2003606
uacauucagucguacaccc

SEQ ID NO: 2003608 - RNA, 19 nt, Artificial Sequence
  Description of Artificial Sequence: Synthetic oligonucleotide
  Sense strand starting at position 3053 of SEQ ID NO: 1880913
acugaauguagaugcagau

SEQ ID NO: 2003609 - RNA, 19 nt, Artificial Sequence
  Description of Artificial Sequence: Synthetic oligonucleotide
  Antisense strand to SEQ ID NO: 2003608
aucugcaucuacauucagu

SEQ ID NO: 2003610 - RNA, 19 nt, Artificial Sequence
  Description of Artificial Sequence: Synthetic oligonucleotide
  Sense strand starting at position 3059 of SEQ ID NO: 1880913
uguagaugcagauauaugu

SEQ ID NO: 2003611 - RNA, 19 nt, Artificial Sequence
  Description of Artificial Sequence: Synthetic oligonucleotide
  Antisense strand to SEQ ID NO: 2003610
acauauaucugcaucuaca

SEQ ID NO: 2003612 - RNA, 19 nt, Artificial Sequence
  Description of Artificial Sequence: Synthetic oligonucleotide
  Sense strand starting at position 3110 of SEQ ID NO: 1880913
ggcucuugugauuggagag

SEQ ID NO: 2003613 - RNA, 19 nt, Artificial Sequence
  Description of Artificial Sequence: Synthetic oligonucleotide
  Antisense strand to SEQ ID NO: 2003612
cucuccaaucacaagagcc

SEQ ID NO: 2003614 - RNA, 19 nt, Artificial Sequence
  Description of Artificial Sequence: Synthetic oligonucleotide
  Sense strand starting at position 3120 of SEQ ID NO: 1880913
auuggagagguguaguagu

SEQ ID NO: 2003615 - RNA, 19 nt, Artificial Sequence
  Description of Artificial Sequence: Synthetic oligonucleotide
  Antisense strand to SEQ ID NO: 2003614
acuacuacaccucuccaau

SEQ ID NO: 2003616 - RNA, 19 nt, Artificial Sequence
  Description of Artificial Sequence: Synthetic oligonucleotide
  Sense strand starting at position 3170 of SEQ ID NO: 1880913
caggaaagccgauaaugua

SEQ ID NO: 2003617 - RNA, 19 nt, Artificial Sequence
  Description of Artificial Sequence: Synthetic oligonucleotide
  Antisense strand to SEQ ID NO: 2003616
uacauuaucggcuuuccug

SEQ ID NO: 2003618 - RNA, 19 nt, Artificial Sequence
  Description of Artificial Sequence: Synthetic oligonucleotide
  Sense strand starting at position 3284 of SEQ ID NO: 1880913
ugaggauaauugcuuuaug

SEQ ID NO: 2003619 - RNA, 19 nt, Artificial Sequence
  Description of Artificial Sequence: Synthetic oligonucleotide
  Antisense strand to SEQ ID NO: 2003618
cauaaagcaauuauccuca

SEQ ID NO: 2003620 - RNA, 19 nt, Artificial Sequence
  Description of Artificial Sequence: Synthetic oligonucleotide
  Sense strand starting at position 3292 of SEQ ID NO: 1880913
auugcuuuauggccaagaa

SEQ ID NO: 2003621 - RNA, 19 nt, Artificial Sequence
  Description of Artificial Sequence: Synthetic oligonucleotide
  Antisense strand to SEQ ID NO: 2003620
uucuuggccauaaagcaau

SEQ ID NO: 2003622 - RNA, 19 nt, Artificial Sequence
  Description of Artificial Sequence: Synthetic oligonucleotide
  Sense strand starting at position 3390 of SEQ ID NO: 1880913
uguaaauuaagucaguagu

SEQ ID NO: 2003623 - RNA, 19 nt, Artificial Sequence
  Description of Artificial Sequence: Synthetic oligonucleotide
  Antisense strand to SEQ ID NO: 2003622
acuacugacuuaauuuaca

SEQ ID NO: 2003624 - RNA, 19 nt, Artificial Sequence
  Description of Artificial Sequence: Synthetic oligonucleotide
  Sense strand starting at position 3410 of SEQ ID NO: 1880913
uuaacuguguuauugaaac

SEQ ID NO: 2003625 - RNA, 19 nt, Artificial Sequence
  Description of Artificial Sequence: Synthetic oligonucleotide
  Antisense strand to SEQ ID NO: 2003624
guuucaauaacacaguuaa

SEQ ID NO: 2003626 - RNA, 19 nt, Artificial Sequence
  Description of Artificial Sequence: Synthetic oligonucleotide
  Sense strand starting at position 3630 of SEQ ID NO: 1880913
ccaaguaucuauguuggaa

SEQ ID NO: 2003627 - RNA, 19 nt, Artificial Sequence
  Description of Artificial Sequence: Synthetic oligonucleotide
  Antisense strand to SEQ ID NO: 2003626
uuccaacauagauacuugg

SEQ ID NO: 2003628 - RNA, 19 nt, Artificial Sequence
  Description of Artificial Sequence: Synthetic oligonucleotide
  Sense strand starting at position 3633 of SEQ ID NO: 1880913
aguaucuauguuggaaaua

SEQ ID NO: 2003629 - RNA, 19 nt, Artificial Sequence
  Description of Artificial Sequence: Synthetic oligonucleotide
  Antisense strand to SEQ ID NO: 2003628
uauuuccaacauagauacu

SEQ ID NO: 2003630 - RNA, 19 nt, Artificial Sequence
  Description of Artificial Sequence: Synthetic oligonucleotide
  Sense strand starting at position 3710 of SEQ ID NO: 1880913
agaggaaagcgaugaagua

SEQ ID NO: 2003631 - RNA, 19 nt, Artificial Sequence
  Description of Artificial Sequence: Synthetic oligonucleotide
  Antisense strand to SEQ ID NO: 2003630
uacuucaucgcuuuccucu

SEQ ID NO: 2003632 - RNA, 19 nt, Artificial Sequence
  Description of Artificial Sequence: Synthetic oligonucleotide
  Sense strand starting at position 3720 of SEQ ID NO: 1880913
gaugaaguauuugacagaa

SEQ ID NO: 2003633 - RNA, 19 nt, Artificial Sequence
  Description of Artificial Sequence: Synthetic oligonucleotide
  Antisense strand to SEQ ID NO: 2003632
uucugucaaauacuucauc

SEQ ID NO: 2003634 - RNA, 19 nt, Artificial Sequence
  Description of Artificial Sequence: Synthetic oligonucleotide
  Sense strand starting at position 3722 of SEQ ID NO: 1880913
ugaaguauuugacagaaua

SEQ ID NO: 2003635 - RNA, 19 nt, Artificial Sequence
  Description of Artificial Sequence: Synthetic oligonucleotide
  Antisense strand to SEQ ID NO: 2003634
uauucugucaaauacuuca

SEQ ID NO: 2003636 - RNA, 19 nt, Artificial Sequence
  Description of Artificial Sequence: Synthetic oligonucleotide
  Sense strand starting at position 3764 of SEQ ID NO: 1880913
cugaaauugugguuacaaa

SEQ ID NO: 2003637 - RNA, 19 nt, Artificial Sequence
  Description of Artificial Sequence: Synthetic oligonucleotide
  Antisense strand to SEQ ID NO: 2003636
uuuguaaccacaauuucag

SEQ ID NO: 2003638 - RNA, 19 nt, Artificial Sequence
  Description of Artificial Sequence: Synthetic oligonucleotide
  Sense strand starting at position 3936 of SEQ ID NO: 1880913
agaagaaacuaagaaucua

SEQ ID NO: 2003639 - RNA, 19 nt, Artificial Sequence
  Description of Artificial Sequence: Synthetic oligonucleotide
  Antisense strand to SEQ ID NO: 2003638
uagauucuuaguuucuucu

SEQ ID NO: 2003640 - RNA, 19 nt, Artificial Sequence
  Description of Artificial Sequence: Synthetic oligonucleotide
  Sense strand starting at position 3979 of SEQ ID NO: 1880913
aguggauuaaauuguggga

SEQ ID NO: 2003641 - RNA, 19 nt, Artificial Sequence
  Description of Artificial Sequence: Synthetic oligonucleotide
  Antisense strand to SEQ ID NO: 2003640
ucccacaauuuaauccacu

SEQ ID NO: 2003642 - RNA, 19 nt, Artificial Sequence
  Description of Artificial Sequence: Synthetic oligonucleotide
  Sense strand starting at position 20 of SEQ ID NO: 1880914
gcacauguagaucauauga

SEQ ID NO: 2003643 - RNA, 19 nt, Artificial Sequence
  Description of Artificial Sequence: Synthetic oligonucleotide
  Antisense strand to SEQ ID NO: 2003642
ucauaugaucuacaugugc

SEQ ID NO: 2003644 - RNA, 19 nt, Artificial Sequence
  Description of Artificial Sequence: Synthetic oligonucleotide
  Sense strand starting at position 217 of SEQ ID NO: 1880914
acacguacucuacauagau

SEQ ID NO: 2003645 - RNA, 19 nt, Artificial Sequence
  Description of Artificial Sequence: Synthetic oligonucleotide
  Antisense strand to SEQ ID NO: 2003644
aucuauguagaguacgugu

SEQ ID NO: 2003646 - RNA, 19 nt, Artificial Sequence
  Description of Artificial Sequence: Synthetic oligonucleotide
  Sense strand starting at position 226 of SEQ ID NO: 1880914
cuacauagaugacuguaau

SEQ ID NO: 2003647 - RNA, 19 nt, Artificial Sequence
  Description of Artificial Sequence: Synthetic oligonucleotide
  Antisense strand to SEQ ID NO: 2003646
auuacagucaucuauguag

SEQ ID NO: 2003648 - RNA, 19 nt, Artificial Sequence
  Description of Artificial Sequence: Synthetic oligonucleotide
  Sense strand starting at position 250 of SEQ ID NO: 1880914
ugcugugggaauuaguaaa

SEQ ID NO: 2003649 - RNA, 19 nt, Artificial Sequence
  Description of Artificial Sequence: Synthetic oligonucleotide
  Antisense strand to SEQ ID NO: 2003648
uuuacuaauucccacagca

SEQ ID NO: 2003650 - RNA, 19 nt, Artificial Sequence
  Description of Artificial Sequence: Synthetic oligonucleotide
  Sense strand starting at position 337 of SEQ ID NO: 1880914
uggauagaauuuggagaaa

SEQ ID NO: 2003651 - RNA, 19 nt, Artificial Sequence
  Description of Artificial Sequence: Synthetic oligonucleotide
  Antisense strand to SEQ ID NO: 2003650
uuucuccaaauucuaucca

SEQ ID NO: 2003652 - RNA, 19 nt, Artificial Sequence
  Description of Artificial Sequence: Synthetic oligonucleotide
  Sense strand starting at position 410 of SEQ ID NO: 1880914
guugguauugagcaucaaa

SEQ ID NO: 2003653 - RNA, 19 nt, Artificial Sequence
  Description of Artificial Sequence: Synthetic oligonucleotide
  Antisense strand to SEQ ID NO: 2003652
uuugaugcucaauaccaac

SEQ ID NO: 2003654 - RNA, 19 nt, Artificial Sequence
  Description of Artificial Sequence: Synthetic oligonucleotide
  Sense strand starting at position 413 of SEQ ID NO: 1880914
gguauugagcaucaaaugu

SEQ ID NO: 2003655 - RNA, 19 nt, Artificial Sequence
  Description of Artificial Sequence: Synthetic oligonucleotide
  Antisense strand to SEQ ID NO: 2003654
acauuugaugcucaauacc

SEQ ID NO: 2003656 - RNA, 19 nt, Artificial Sequence
  Description of Artificial Sequence: Synthetic oligonucleotide
  Sense strand starting at position 448 of SEQ ID NO: 1880914
agugcaauaccucagugaa

SEQ ID NO: 2003657 - RNA, 19 nt, Artificial Sequence
  Description of Artificial Sequence: Synthetic oligonucleotide
  Antisense strand to SEQ ID NO: 2003656
uucacugagguauugcacu

SEQ ID NO: 2003658 - RNA, 19 nt, Artificial Sequence
  Description of Artificial Sequence: Synthetic oligonucleotide
  Sense strand starting at position 799 of SEQ ID NO: 1880914
uguguucuugaauaauaag

SEQ ID NO: 2003659 - RNA, 19 nt, Artificial Sequence
  Description of Artificial Sequence: Synthetic oligonucleotide
  Antisense strand to SEQ ID NO: 2003658
cuuauuauucaagaacaca

SEQ ID NO: 2003660 - RNA, 19 nt, Artificial Sequence
  Description of Artificial Sequence: Synthetic oligonucleotide
  Sense strand starting at position 810 of SEQ ID NO: 1880914
auaauaagccaaggaguuu

SEQ ID NO: 2003661 - RNA, 19 nt, Artificial Sequence
  Description of Artificial Sequence: Synthetic oligonucleotide
  Antisense strand to SEQ ID NO: 2003660
aaacuccuuggcuuauuau

SEQ ID NO: 2003662 - RNA, 19 nt, Artificial Sequence
  Description of Artificial Sequence: Synthetic oligonucleotide
  Sense strand starting at position 866 of SEQ ID NO: 1880914
caagacaaagcuugucaga

SEQ ID NO: 2003663 - RNA, 19 nt, Artificial Sequence
  Description of Artificial Sequence: Synthetic oligonucleotide
  Antisense strand to SEQ ID NO: 2003662
ucugacaagcuuugucuug

SEQ ID NO: 2003664 - RNA, 19 nt, Artificial Sequence
  Description of Artificial Sequence: Synthetic oligonucleotide
  Sense strand starting at position 868 of SEQ ID NO: 1880914
agacaaagcuugucagaug

SEQ ID NO: 2003665 - RNA, 19 nt, Artificial Sequence
  Description of Artificial Sequence: Synthetic oligonucleotide
  Antisense strand to SEQ ID NO: 2003664
caucugacaagcuuugucu

SEQ ID NO: 2003666 - RNA, 19 nt, Artificial Sequence
  Description of Artificial Sequence: Synthetic oligonucleotide
  Sense strand starting at position 1360 of SEQ ID NO: 1880914
gcacaugaacuuuaguuau

SEQ ID NO: 2003667 - RNA, 19 nt, Artificial Sequence
  Description of Artificial Sequence: Synthetic oligonucleotide
  Antisense strand to SEQ ID NO: 2003666
auaacuaaaguucaugugc

SEQ ID NO: 2003668 - RNA, 19 nt, Artificial Sequence
  Description of Artificial Sequence: Synthetic oligonucleotide
  Sense strand starting at position 1400 of SEQ ID NO: 1880914
ugugucauuggugggauuu

SEQ ID NO: 2003669 - RNA, 19 nt, Artificial Sequence
  Description of Artificial Sequence: Synthetic oligonucleotide
  Antisense strand to SEQ ID NO: 2003668
aaaucccaccaaugacaca

SEQ ID NO: 2003670 - RNA, 19 nt, Artificial Sequence
  Description of Artificial Sequence: Synthetic oligonucleotide
  Sense strand starting at position 1437 of SEQ ID NO: 1880914
auauccugugucuaggaaa

SEQ ID NO: 2003671 - RNA, 19 nt, Artificial Sequence
  Description of Artificial Sequence: Synthetic oligonucleotide
  Antisense strand to SEQ ID NO: 2003670
uuuccuagacacaggauau

SEQ ID NO: 2003672 - RNA, 19 nt, Artificial Sequence
  Description of Artificial Sequence: Synthetic oligonucleotide
  Sense strand starting at position 1444 of SEQ ID NO: 1880914
gugucuaggaaagguaaca

SEQ ID NO: 2003673 - RNA, 19 nt, Artificial Sequence
  Description of Artificial Sequence: Synthetic oligonucleotide
  Antisense strand to SEQ ID NO: 2003672
uguuaccuuuccuagacac

SEQ ID NO: 2003674 - RNA, 19 nt, Artificial Sequence
  Description of Artificial Sequence: Synthetic oligonucleotide
  Sense strand starting at position 1494 of SEQ ID NO: 1880914
cuuaguauuuccuuaguuc

SEQ ID NO: 2003675 - RNA, 19 nt, Artificial Sequence
  Description of Artificial Sequence: Synthetic oligonucleotide
  Antisense strand to SEQ ID NO: 2003674
gaacuaaggaaauacuaag

SEQ ID NO: 2003676 - RNA, 19 nt, Artificial Sequence
  Description of Artificial Sequence: Synthetic oligonucleotide
  Sense strand starting at position 1497 of SEQ ID NO: 1880914
aguauuuccuuaguucugu

SEQ ID NO: 2003677 - RNA, 19 nt, Artificial Sequence
  Description of Artificial Sequence: Synthetic oligonucleotide
  Antisense strand to SEQ ID NO: 2003676
acagaacuaaggaaauacu

SEQ ID NO: 2003678 - RNA, 19 nt, Artificial Sequence
  Description of Artificial Sequence: Synthetic oligonucleotide
  Sense strand starting at position 1598 of SEQ ID NO: 1880914
ggaucaaagaugugggucu

SEQ ID NO: 2003679 - RNA, 19 nt, Artificial Sequence
  Description of Artificial Sequence: Synthetic oligonucleotide
  Antisense strand to SEQ ID NO: 2003678
agacccacaucuuugaucc

SEQ ID NO: 2003680 - RNA, 19 nt, Artificial Sequence
  Description of Artificial Sequence: Synthetic oligonucleotide
  Sense strand starting at position 1600 of SEQ ID NO: 1880914
aucaaagaugugggucuaa

SEQ ID NO: 2003681 - RNA, 19 nt, Artificial Sequence
  Description of Artificial Sequence: Synthetic oligonucleotide
  Antisense strand to SEQ ID NO: 2003680
uuagacccacaucuuugau

SEQ ID NO: 2003682 - RNA, 19 nt, Artificial Sequence
  Description of Artificial Sequence: Synthetic oligonucleotide
  Sense strand starting at position 1632 of SEQ ID NO: 1880914
augauucgaagauguauug

SEQ ID NO: 2003683 - RNA, 19 nt, Artificial Sequence
  Description of Artificial Sequence: Synthetic oligonucleotide
  Antisense strand to SEQ ID NO: 2003682
caauacaucuucgaaucau

SEQ ID NO: 2003684 - RNA, 19 nt, Artificial Sequence
  Description of Artificial Sequence: Synthetic oligonucleotide
  Sense strand starting at position 1639 of SEQ ID NO: 1880914
gaagauguauuguuaggaa

SEQ ID NO: 2003685 - RNA, 19 nt, Artificial Sequence
  Description of Artificial Sequence: Synthetic oligonucleotide
  Antisense strand to SEQ ID NO: 2003684
uuccuaacaauacaucuuc

SEQ ID NO: 2003686 - RNA, 19 nt, Artificial Sequence
  Description of Artificial Sequence: Synthetic oligonucleotide
  Sense strand starting at position 1820 of SEQ ID NO: 1880914
agacuaaggacgugugaau

SEQ ID NO: 2003687 - RNA, 19 nt, Artificial Sequence
  Description of Artificial Sequence: Synthetic oligonucleotide
  Antisense strand to SEQ ID NO: 2003686
auucacacguccuuagucu

SEQ ID NO: 2003688 - RNA, 19 nt, Artificial Sequence
  Description of Artificial Sequence: Synthetic oligonucleotide
  Sense strand starting at position 1829 of SEQ ID NO: 1880914
acgugugaauuugucuaug

SEQ ID NO: 2003689 - RNA, 19 nt, Artificial Sequence
  Description of Artificial Sequence: Synthetic oligonucleotide
  Antisense strand to SEQ ID NO: 2003688
cauagacaaauucacacgu

SEQ ID NO: 2003690 - RNA, 19 nt, Artificial Sequence
  Description of Artificial Sequence: Synthetic oligonucleotide
  Sense strand starting at position 1834 of SEQ ID NO: 1880914
ugaauuugucuaugcccuu

SEQ ID NO: 2003691 - RNA, 19 nt, Artificial Sequence
  Description of Artificial Sequence: Synthetic oligonucleotide
  Antisense strand to SEQ ID NO: 2003690
aagggcauagacaaauuca

SEQ ID NO: 2003692 - RNA, 19 nt, Artificial Sequence
  Description of Artificial Sequence: Synthetic oligonucleotide
  Sense strand starting at position 1857 of SEQ ID NO: 1880914
uuuccaagucaagaguauu

SEQ ID NO: 2003693 - RNA, 19 nt, Artificial Sequence
  Description of Artificial Sequence: Synthetic oligonucleotide
  Antisense strand to SEQ ID NO: 2003692
aauacucuugacuuggaaa

SEQ ID NO: 2003694 - RNA, 19 nt, Artificial Sequence
  Description of Artificial Sequence: Synthetic oligonucleotide
  Sense strand starting at position 2321 of SEQ ID NO: 1880914
ggaagugcugcuuaaggga

SEQ ID NO: 2003695 - RNA, 19 nt, Artificial Sequence
  Description of Artificial Sequence: Synthetic oligonucleotide
  Antisense strand to SEQ ID NO: 2003694
ucccuuaagcagcacuucc

SEQ ID NO: 2003696 - RNA, 19 nt, Artificial Sequence
  Description of Artificial Sequence: Synthetic oligonucleotide
  Sense strand starting at position 2354 of SEQ ID NO: 1880914
guuggcaugaguuaaagga

SEQ ID NO: 2003697 - RNA, 19 nt, Artificial Sequence
  Description of Artificial Sequence: Synthetic oligonucleotide
  Antisense strand to SEQ ID NO: 2003696
uccuuuaacucaugccaac

SEQ ID NO: 2003698 - RNA, 19 nt, Artificial Sequence
  Description of Artificial Sequence: Synthetic oligonucleotide
  Sense strand starting at position 2358 of SEQ ID NO: 1880914
gcaugaguuaaaggaacuu

SEQ ID NO: 2003699 - RNA, 19 nt, Artificial Sequence
  Description of Artificial Sequence: Synthetic oligonucleotide
  Antisense strand to SEQ ID NO: 2003698
aaguuccuuuaacucaugc

SEQ ID NO: 2003700 - RNA, 19 nt, Artificial Sequence
  Description of Artificial Sequence: Synthetic oligonucleotide
  Sense strand starting at position 2453 of SEQ ID NO: 1880914
uuaagauaacuuggaaguu

SEQ ID NO: 2003701 - RNA, 19 nt, Artificial Sequence
  Description of Artificial Sequence: Synthetic oligonucleotide
  Antisense strand to SEQ ID NO: 2003700
aacuuccaaguuaucuuaa

SEQ ID NO: 2003702 - RNA, 19 nt, Artificial Sequence
  Description of Artificial Sequence: Synthetic oligonucleotide
  Sense strand starting at position 2465 of SEQ ID NO: 1880914
ggaaguuacaaaugguuaa

SEQ ID NO: 2003703 - RNA, 19 nt, Artificial Sequence
  Description of Artificial Sequence: Synthetic oligonucleotide
  Antisense strand to SEQ ID NO: 2003702
uuaaccauuuguaacuucc

SEQ ID NO: 2003704 - RNA, 19 nt, Artificial Sequence
  Description of Artificial Sequence: Synthetic oligonucleotide
  Sense strand starting at position 2468 of SEQ ID NO: 1880914
aguuacaaaugguuaauga

SEQ ID NO: 2003705 - RNA, 19 nt, Artificial Sequence
  Description of Artificial Sequence: Synthetic oligonucleotide
  Antisense strand to SEQ ID NO: 2003704
ucauuaaccauuuguaacu

SEQ ID NO: 2003706 - RNA, 19 nt, Artificial Sequence
  Description of Artificial Sequence: Synthetic oligonucleotide
  Sense strand starting at position 2859 of SEQ ID NO: 1880914
guccacuaaugagcagaau

SEQ ID NO: 2003707 - RNA, 19 nt, Artificial Sequence
  Description of Artificial Sequence: Synthetic oligonucleotide
  Antisense strand to SEQ ID NO: 2003706
auucugcucauuaguggac

SEQ ID NO: 2003708 - RNA, 19 nt, Artificial Sequence
  Description of Artificial Sequence: Synthetic oligonucleotide
  Sense strand starting at position 3062 of SEQ ID NO: 1880914
gacugacauguguacuuua

SEQ ID NO: 2003709 - RNA, 19 nt, Artificial Sequence
  Description of Artificial Sequence: Synthetic oligonucleotide
  Antisense strand to SEQ ID NO: 2003708
uaaaguacacaugucaguc

SEQ ID NO: 2003710 - RNA, 19 nt, Artificial Sequence
  Description of Artificial Sequence: Synthetic oligonucleotide
  Sense strand starting at position 3159 of SEQ ID NO: 1880914
gacacuuacuaggcagacu

SEQ ID NO: 2003711 - RNA, 19 nt, Artificial Sequence
  Description of Artificial Sequence: Synthetic oligonucleotide
  Antisense strand to SEQ ID NO: 2003710
agucugccuaguaaguguc

SEQ ID NO: 2003712 - RNA, 19 nt, Artificial Sequence
  Description of Artificial Sequence: Synthetic oligonucleotide
  Sense strand starting at position 3201 of SEQ ID NO: 1880914
caaggauguucuuucugga

SEQ ID NO: 2003713 - RNA, 19 nt, Artificial Sequence
  Description of Artificial Sequence: Synthetic oligonucleotide
  Antisense strand to SEQ ID NO: 2003712
uccagaaagaacauccuug

SEQ ID NO: 2003714 - RNA, 19 nt, Artificial Sequence
  Description of Artificial Sequence: Synthetic oligonucleotide
  Sense strand starting at position 3292 of SEQ ID NO: 1880914
gugugcugggcugcugaaa

SEQ ID NO: 2003715 - RNA, 19 nt, Artificial Sequence
  Description of Artificial Sequence: Synthetic oligonucleotide
  Antisense strand to SEQ ID NO: 2003714
uuucagcagcccagcacac

SEQ ID NO: 2003716 - RNA, 19 nt, Artificial Sequence
  Description of Artificial Sequence: Synthetic oligonucleotide
  Sense strand starting at position 3568 of SEQ ID NO: 1880914
guauuaugcagguaugaua

SEQ ID NO: 2003717 - RNA, 19 nt, Artificial Sequence
  Description of Artificial Sequence: Synthetic oligonucleotide
  Antisense strand to SEQ ID NO: 2003716
uaucauaccugcauaauac

SEQ ID NO: 2003718 - RNA, 19 nt, Artificial Sequence
  Description of Artificial Sequence: Synthetic oligonucleotide
  Sense strand starting at position 3577 of SEQ ID NO: 1880914
agguaugauauugagcagu

SEQ ID NO: 2003719 - RNA, 19 nt, Artificial Sequence
  Description of Artificial Sequence: Synthetic oligonucleotide
  Antisense strand to SEQ ID NO: 2003718
acugcucaauaucauaccu

SEQ ID NO: 2003720 - RNA, 19 nt, Artificial Sequence
  Description of Artificial Sequence: Synthetic oligonucleotide
  Sense strand starting at position 3706 of SEQ ID NO: 1880914
caguaugguggucacauga

SEQ ID NO: 2003721 - RNA, 19 nt, Artificial Sequence
  Description of Artificial Sequence: Synthetic oligonucleotide
  Antisense strand to SEQ ID NO: 2003720
ucaugugaccaccauacug

SEQ ID NO: 2003722 - RNA, 19 nt, Artificial Sequence
  Description of Artificial Sequence: Synthetic oligonucleotide
  Sense strand starting at position 98 of SEQ ID NO: 1880915
agagauuucuuauagaccu

SEQ ID NO: 2003723 - RNA, 19 nt, Artificial Sequence
  Description of Artificial Sequence: Synthetic oligonucleotide
  Antisense strand to SEQ ID NO: 2003722
aggucuauaagaaaucucu

SEQ ID NO: 2003724 - RNA, 19 nt, Artificial Sequence
  Description of Artificial Sequence: Synthetic oligonucleotide
  Sense strand starting at position 355 of SEQ ID NO: 1880915
uccuuagagucuuuggacu

SEQ ID NO: 2003725 - RNA, 19 nt, Artificial Sequence
  Description of Artificial Sequence: Synthetic oligonucleotide
  Antisense strand to SEQ ID NO: 2003724
aguccaaagacucuaagga

SEQ ID NO: 2003726 - RNA, 19 nt, Artificial Sequence
  Description of Artificial Sequence: Synthetic oligonucleotide
  Sense strand starting at position 447 of SEQ ID NO: 1880915
ccaugugugcugcuaaagu

SEQ ID NO: 2003727 - RNA, 19 nt, Artificial Sequence
  Description of Artificial Sequence: Synthetic oligonucleotide
  Antisense strand to SEQ ID NO: 2003726
acuuuagcagcacacaugg

SEQ ID NO: 2003728 - RNA, 19 nt, Artificial Sequence
  Description of Artificial Sequence: Synthetic oligonucleotide
  Sense strand starting at position 560 of SEQ ID NO: 1880915
agagaaauaugccaaauuu

SEQ ID NO: 2003729 - RNA, 19 nt, Artificial Sequence
  Description of Artificial Sequence: Synthetic oligonucleotide
  Antisense strand to SEQ ID NO: 2003728
aaauuuggcauauuucucu

SEQ ID NO: 2003730 - RNA, 19 nt, Artificial Sequence
  Description of Artificial Sequence: Synthetic oligonucleotide
  Sense strand starting at position 585 of SEQ ID NO: 1880915
uuugguaaggaccaguuau

SEQ ID NO: 2003731 - RNA, 19 nt, Artificial Sequence
  Description of Artificial Sequence: Synthetic oligonucleotide
  Antisense strand to SEQ ID NO: 2003730
auaacugguccuuaccaaa

SEQ ID NO: 2003732 - RNA, 19 nt, Artificial Sequence
  Description of Artificial Sequence: Synthetic oligonucleotide
  Sense strand starting at position 702 of SEQ ID NO: 1880915
ccgagaugauuauaauuua

SEQ ID NO: 2003733 - RNA, 19 nt, Artificial Sequence
  Description of Artificial Sequence: Synthetic oligonucleotide
  Antisense strand to SEQ ID NO: 2003732
uaaauuauaaucaucucgg

SEQ ID NO: 2003734 - RNA, 19 nt, Artificial Sequence
  Description of Artificial Sequence: Synthetic oligonucleotide
  Sense strand starting at position 727 of SEQ ID NO: 1880915
guaaguucuaaguagacag

SEQ ID NO: 2003735 - RNA, 19 nt, Artificial Sequence
  Description of Artificial Sequence: Synthetic oligonucleotide
  Antisense strand to SEQ ID NO: 2003734
cugucuacuuagaacuuac

SEQ ID NO: 2003736 - RNA, 19 nt, Artificial Sequence
  Description of Artificial Sequence: Synthetic oligonucleotide
  Sense strand starting at position 804 of SEQ ID NO: 1880915
ugcauaagugcucaaugaa

SEQ ID NO: 2003737 - RNA, 19 nt, Artificial Sequence
  Description of Artificial Sequence: Synthetic oligonucleotide
  Antisense strand to SEQ ID NO: 2003736
uucauugagcacuuaugca

SEQ ID NO: 2003738 - RNA, 19 nt, Artificial Sequence
  Description of Artificial Sequence: Synthetic oligonucleotide
  Sense strand starting at position 807 of SEQ ID NO: 1880915
auaagugcucaaugaauaa

SEQ ID NO: 2003739 - RNA, 19 nt, Artificial Sequence
  Description of Artificial Sequence: Synthetic oligonucleotide
  Antisense strand to SEQ ID NO: 2003738
uuauucauugagcacuuau

SEQ ID NO: 2003740 - RNA, 19 nt, Artificial Sequence
  Description of Artificial Sequence: Synthetic oligonucleotide
  Sense strand starting at position 847 of SEQ ID NO: 1880915
auuauacucugguuaauga

SEQ ID NO: 2003741 - RNA, 19 nt, Artificial Sequence
  Description of Artificial Sequence: Synthetic oligonucleotide
  Antisense strand to SEQ ID NO: 2003740
ucauuaaccagaguauaau

SEQ ID NO: 2003742 - RNA, 19 nt, Artificial Sequence
  Description of Artificial Sequence: Synthetic oligonucleotide
  Sense strand starting at position 888 of SEQ ID NO: 1880915
ggaguauuugcauguguaa

SEQ ID NO: 2003743 - RNA, 19 nt, Artificial Sequence
  Description of Artificial Sequence: Synthetic oligonucleotide
  Antisense strand to SEQ ID NO: 2003742
uuacacaugcaaauacucc

SEQ ID NO: 2003744 - RNA, 19 nt, Artificial Sequence
  Description of Artificial Sequence: Synthetic oligonucleotide
  Sense strand starting at position 890 of SEQ ID NO: 1880915
aguauuugcauguguaaca

SEQ ID NO: 2003745 - RNA, 19 nt, Artificial Sequence
  Description of Artificial Sequence: Synthetic oligonucleotide
  Antisense strand to SEQ ID NO: 2003744
uguuacacaugcaaauacu

SEQ ID NO: 2003746 - RNA, 19 nt, Artificial Sequence
  Description of Artificial Sequence: Synthetic oligonucleotide
  Sense strand starting at position 891 of SEQ ID NO: 1880915
guauuugcauguguaacau

SEQ ID NO: 2003747 - RNA, 19 nt, Artificial Sequence
  Description of Artificial Sequence: Synthetic oligonucleotide
  Antisense strand to SEQ ID NO: 2003746
auguuacacaugcaaauac

SEQ ID NO: 2003748 - RNA, 19 nt, Artificial Sequence
  Description of Artificial Sequence: Synthetic oligonucleotide
  Sense strand starting at position 1156 of SEQ ID NO: 1880915
uccuuugugcaauaaugau

SEQ ID NO: 2003749 - RNA, 19 nt, Artificial Sequence
  Description of Artificial Sequence: Synthetic oligonucleotide
  Antisense strand to SEQ ID NO: 2003748
aucauuauugcacaaagga

SEQ ID NO: 2003750 - RNA, 19 nt, Artificial Sequence
  Description of Artificial Sequence: Synthetic oligonucleotide
  Sense strand starting at position 1163 of SEQ ID NO: 1880915
ugcaauaaugauuaugguu

SEQ ID NO: 2003751 - RNA, 19 nt, Artificial Sequence
  Description of Artificial Sequence: Synthetic oligonucleotide
  Antisense strand to SEQ ID NO: 2003750
aaccauaaucauuauugca

SEQ ID NO: 2003752 - RNA, 19 nt, Artificial Sequence
  Description of Artificial Sequence: Synthetic oligonucleotide
  Sense strand starting at position 1214 of SEQ ID NO: 1880915
acuagaaauuaggcuuaug

SEQ ID NO: 2003753 - RNA, 19 nt, Artificial Sequence
  Description of Artificial Sequence: Synthetic oligonucleotide
  Antisense strand to SEQ ID NO: 2003752
cauaagccuaauuucuagu

SEQ ID NO: 2003754 - RNA, 19 nt, Artificial Sequence
  Description of Artificial Sequence: Synthetic oligonucleotide
  Sense strand starting at position 1268 of SEQ ID NO: 1880915
auuguuagguucccuaaac

SEQ ID NO: 2003755 - RNA, 19 nt, Artificial Sequence
  Description of Artificial Sequence: Synthetic oligonucleotide
  Antisense strand to SEQ ID NO: 2003754
guuuagggaaccuaacaau

SEQ ID NO: 2003756 - RNA, 19 nt, Artificial Sequence
  Description of Artificial Sequence: Synthetic oligonucleotide
  Sense strand starting at position 1421 of SEQ ID NO: 1880915
gcaggagcucuuuaaacug

SEQ ID NO: 2003757 - RNA, 19 nt, Artificial Sequence
  Description of Artificial Sequence: Synthetic oligonucleotide
  Antisense strand to SEQ ID NO: 2003756
caguuuaaagagcuccugc

SEQ ID NO: 2003758 - RNA, 19 nt, Artificial Sequence
  Description of Artificial Sequence: Synthetic oligonucleotide
  Sense strand starting at position 2070 of SEQ ID NO: 1880915
cgggcugauagauacuaca

SEQ ID NO: 2003759 - RNA, 19 nt, Artificial Sequence
  Description of Artificial Sequence: Synthetic oligonucleotide
  Antisense strand to SEQ ID NO: 2003758
uguaguaucuaucagcccg

SEQ ID NO: 2003760 - RNA, 19 nt, Artificial Sequence
  Description of Artificial Sequence: Synthetic oligonucleotide
  Sense strand starting at position 2119 of SEQ ID NO: 1880915
aacgguccuagaugggaaa

SEQ ID NO: 2003761 - RNA, 19 nt, Artificial Sequence
  Description of Artificial Sequence: Synthetic oligonucleotide
  Antisense strand to SEQ ID NO: 2003760
uuucccaucuaggaccguu

SEQ ID NO: 2003762 - RNA, 19 nt, Artificial Sequence
  Description of Artificial Sequence: Synthetic oligonucleotide
  Sense strand starting at position 2245 of SEQ ID NO: 1880915
gccuguauaaccuggaaug

SEQ ID NO: 2003763 - RNA, 19 nt, Artificial Sequence
  Description of Artificial Sequence: Synthetic oligonucleotide
  Antisense strand to SEQ ID NO: 2003762
cauuccagguuauacaggc

SEQ ID NO: 2003764 - RNA, 19 nt, Artificial Sequence
  Description of Artificial Sequence: Synthetic oligonucleotide
  Sense strand starting at position 2247 of SEQ ID NO: 1880915
cuguauaaccuggaauggu

SEQ ID NO: 2003765 - RNA, 19 nt, Artificial Sequence
  Description of Artificial Sequence: Synthetic oligonucleotide
  Antisense strand to SEQ ID NO: 2003764
accauuccagguuauacag

SEQ ID NO: 2003766 - RNA, 19 nt, Artificial Sequence
  Description of Artificial Sequence: Synthetic oligonucleotide
  Sense strand starting at position 2257 of SEQ ID NO: 1880915
uggaaugguaucggacauu

SEQ ID NO: 2003767 - RNA, 19 nt, Artificial Sequence
  Description of Artificial Sequence: Synthetic oligonucleotide
  Antisense strand to SEQ ID NO: 2003766
aauguccgauaccauucca

SEQ ID NO: 2003768 - RNA, 19 nt, Artificial Sequence
  Description of Artificial Sequence: Synthetic oligonucleotide
  Sense strand starting at position 2280 of SEQ ID NO: 1880915
gcucuagaucuauaugccu

SEQ ID NO: 2003769 - RNA, 19 nt, Artificial Sequence
  Description of Artificial Sequence: Synthetic oligonucleotide
  Antisense strand to SEQ ID NO: 2003768
aggcauauagaucuagagc

SEQ ID NO: 2003770 - RNA, 19 nt, Artificial Sequence
  Description of Artificial Sequence: Synthetic oligonucleotide
  Sense strand starting at position 2285 of SEQ ID NO: 1880915
agaucuauaugccugauua

SEQ ID NO: 2003771 - RNA, 19 nt, Artificial Sequence
  Description of Artificial Sequence: Synthetic oligonucleotide
  Antisense strand to SEQ ID NO: 2003770
uaaucaggcauauagaucu

SEQ ID NO: 2003772 - RNA, 19 nt, Artificial Sequence
  Description of Artificial Sequence: Synthetic oligonucleotide
  Sense strand starting at position 2289 of SEQ ID NO: 1880915
cuauaugccugauuaacga

SEQ ID NO: 2003773 - RNA, 19 nt, Artificial Sequence
  Description of Artificial Sequence: Synthetic oligonucleotide
  Antisense strand to SEQ ID NO: 2003772
ucguuaaucaggcauauag

SEQ ID NO: 2003774 - RNA, 19 nt, Artificial Sequence
  Description of Artificial Sequence: Synthetic oligonucleotide
  Sense strand starting at position 2789 of SEQ ID NO: 1880915
uauguaugauugcuaggaa

SEQ ID NO: 2003775 - RNA, 19 nt, Artificial Sequence
  Description of Artificial Sequence: Synthetic oligonucleotide
  Antisense strand to SEQ ID NO: 2003774
uuccuagcaaucauacaua

SEQ ID NO: 2003776 - RNA, 19 nt, Artificial Sequence
  Description of Artificial Sequence: Synthetic oligonucleotide
  Sense strand starting at position 2796 of SEQ ID NO: 1880915
gauugcuaggaaggugaau

SEQ ID NO: 2003777 - RNA, 19 nt, Artificial Sequence
  Description of Artificial Sequence: Synthetic oligonucleotide
  Antisense strand to SEQ ID NO: 2003776
auucaccuuccuagcaauc

SEQ ID NO: 2003778 - RNA, 19 nt, Artificial Sequence
  Description of Artificial Sequence: Synthetic oligonucleotide
  Sense strand starting at position 2798 of SEQ ID NO: 1880915
uugcuaggaaggugaauua

SEQ ID NO: 2003779 - RNA, 19 nt, Artificial Sequence
  Description of Artificial Sequence: Synthetic oligonucleotide
  Antisense strand to SEQ ID NO: 2003778
uaauucaccuuccuagcaa

SEQ ID NO: 2003780 - RNA, 19 nt, Artificial Sequence
  Description of Artificial Sequence: Synthetic oligonucleotide
  Sense strand starting at position 2823 of SEQ ID NO: 1880915
uuuguugugaaguaauaug

SEQ ID NO: 2003781 - RNA, 19 nt, Artificial Sequence
  Description of Artificial Sequence: Synthetic oligonucleotide
  Antisense strand to SEQ ID NO: 2003780
cauauuacuucacaacaaa

SEQ ID NO: 2003782 - RNA, 19 nt, Artificial Sequence
  Description of Artificial Sequence: Synthetic oligonucleotide
  Sense strand starting at position 2831 of SEQ ID NO: 1880915
gaaguaauauggccacauc

SEQ ID NO: 2003783 - RNA, 19 nt, Artificial Sequence
  Description of Artificial Sequence: Synthetic oligonucleotide
  Antisense strand to SEQ ID NO: 2003782
gauguggccauauuacuuc

SEQ ID NO: 2003784 - RNA, 19 nt, Artificial Sequence
  Description of Artificial Sequence: Synthetic oligonucleotide
  Sense strand starting at position 2834 of SEQ ID NO: 1880915
guaauauggccacaucuau

SEQ ID NO: 2003785 - RNA, 19 nt, Artificial Sequence
  Description of Artificial Sequence: Synthetic oligonucleotide
  Antisense strand to SEQ ID NO: 2003784
auagauguggccauauuac

SEQ ID NO: 2003786 - RNA, 19 nt, Artificial Sequence
  Description of Artificial Sequence: Synthetic oligonucleotide
  Sense strand starting at position 2896 of SEQ ID NO: 1880915
guggcaccaauuugugauu

SEQ ID NO: 2003787 - RNA, 19 nt, Artificial Sequence
  Description of Artificial Sequence: Synthetic oligonucleotide
  Antisense strand to SEQ ID NO: 2003786
aaucacaaauuggugccac

SEQ ID NO: 2003788 - RNA, 19 nt, Artificial Sequence
  Description of Artificial Sequence: Synthetic oligonucleotide
  Sense strand starting at position 2936 of SEQ ID NO: 1880915
aguucuuaagacugcauau

SEQ ID NO: 2003789 - RNA, 19 nt, Artificial Sequence
  Description of Artificial Sequence: Synthetic oligonucleotide
  Antisense strand to SEQ ID NO: 2003788
auaugcagucuuaagaacu

SEQ ID NO: 2003790 - RNA, 19 nt, Artificial Sequence
  Description of Artificial Sequence: Synthetic oligonucleotide
  Sense strand starting at position 3097 of SEQ ID NO: 1880915
aagcaucaaccauggaguu

SEQ ID NO: 2003791 - RNA, 19 nt, Artificial Sequence
  Description of Artificial Sequence: Synthetic oligonucleotide
  Antisense strand to SEQ ID NO: 2003790
aacuccaugguugaugcuu

SEQ ID NO: 2003792 - RNA, 19 nt, Artificial Sequence
  Description of Artificial Sequence: Synthetic oligonucleotide
  Sense strand starting at position 3119 of SEQ ID NO: 1880915
cguaguaguuuccuauuua

SEQ ID NO: 2003793 - RNA, 19 nt, Artificial Sequence
  Description of Artificial Sequence: Synthetic oligonucleotide
  Antisense strand to SEQ ID NO: 2003792
uaaauaggaaacuacuacg

SEQ ID NO: 2003794 - RNA, 19 nt, Artificial Sequence
  Description of Artificial Sequence: Synthetic oligonucleotide
  Sense strand starting at position 3260 of SEQ ID NO: 1880915
uagugaauccagcaugucu

SEQ ID NO: 2003795 - RNA, 19 nt, Artificial Sequence
  Description of Artificial Sequence: Synthetic oligonucleotide
  Antisense strand to SEQ ID NO: 2003794
agacaugcuggauucacua

SEQ ID NO: 2003796 - RNA, 19 nt, Artificial Sequence
  Description of Artificial Sequence: Synthetic oligonucleotide
  Sense strand starting at position 3302 of SEQ ID NO: 1880915
guuggaacagucuggaaca

SEQ ID NO: 2003797 - RNA, 19 nt, Artificial Sequence
  Description of Artificial Sequence: Synthetic oligonucleotide
  Antisense strand to SEQ ID NO: 2003796
uguuccagacuguuccaac

SEQ ID NO: 2003798 - RNA, 19 nt, Artificial Sequence
  Description of Artificial Sequence: Synthetic oligonucleotide
  Sense strand starting at position 3344 of SEQ ID NO: 1880915
gaucucuuucuugagaggu

SEQ ID NO: 2003799 - RNA, 19 nt, Artificial Sequence
  Description of Artificial Sequence: Synthetic oligonucleotide
  Antisense strand to SEQ ID NO: 2003798
accucucaagaaagagauc

SEQ ID NO: 2003800 - RNA, 19 nt, Artificial Sequence
  Description of Artificial Sequence: Synthetic oligonucleotide
  Sense strand starting at position 3466 of SEQ ID NO: 1880915
uguuguagacucuaaggga

SEQ ID NO: 2003801 - RNA, 19 nt, Artificial Sequence
  Description of Artificial Sequence: Synthetic oligonucleotide
  Antisense strand to SEQ ID NO: 2003800
ucccuuagagucuacaaca

SEQ ID NO: 2003802 - RNA, 19 nt, Artificial Sequence
  Description of Artificial Sequence: Synthetic oligonucleotide
  Sense strand starting at position 42 of SEQ ID NO: 1880916
acagcuucuggccaaauga

SEQ ID NO: 2003803 - RNA, 19 nt, Artificial Sequence
  Description of Artificial Sequence: Synthetic oligonucleotide
  Antisense strand to SEQ ID NO: 2003802
ucauuuggccagaagcugu

SEQ ID NO: 2003804 - RNA, 19 nt, Artificial Sequence
  Description of Artificial Sequence: Synthetic oligonucleotide
  Sense strand starting at position 134 of SEQ ID NO: 1880916
aggacaggccuuugagacu

SEQ ID NO: 2003805 - RNA, 19 nt, Artificial Sequence
  Description of Artificial Sequence: Synthetic oligonucleotide
  Antisense strand to SEQ ID NO: 2003804
agucucaaaggccuguccu

SEQ ID NO: 2003806 - RNA, 19 nt, Artificial Sequence
  Description of Artificial Sequence: Synthetic oligonucleotide
  Sense strand starting at position 169 of SEQ ID NO: 1880916
gugucuucaguuugucagu

SEQ ID NO: 2003807 - RNA, 19 nt, Artificial Sequence
  Description of Artificial Sequence: Synthetic oligonucleotide
  Antisense strand to SEQ ID NO: 2003806
acugacaaacugaagacac

SEQ ID NO: 2003808 - RNA, 19 nt, Artificial Sequence
  Description of Artificial Sequence: Synthetic oligonucleotide
  Sense strand starting at position 216 of SEQ ID NO: 1880916
cuaagcuuccugugagauu

SEQ ID NO: 2003809 - RNA, 19 nt, Artificial Sequence
  Description of Artificial Sequence: Synthetic oligonucleotide
  Antisense strand to SEQ ID NO: 2003808
aaucucacaggaagcuuag

SEQ ID NO: 2003810 - RNA, 19 nt, Artificial Sequence
  Description of Artificial Sequence: Synthetic oligonucleotide
  Sense strand starting at position 217 of SEQ ID NO: 1880916
uaagcuuccugugagauuu

SEQ ID NO: 2003811 - RNA, 19 nt, Artificial Sequence
  Description of Artificial Sequence: Synthetic oligonucleotide
  Antisense strand to SEQ ID NO: 2003810
aaaucucacaggaagcuua

SEQ ID NO: 2003812 - RNA, 19 nt, Artificial Sequence
  Description of Artificial Sequence: Synthetic oligonucleotide
  Sense strand starting at position 257 of SEQ ID NO: 1880916
cagggcugucccugucauu

SEQ ID NO: 2003813 - RNA, 19 nt, Artificial Sequence
  Description of Artificial Sequence: Synthetic oligonucleotide
  Antisense strand to SEQ ID NO: 2003812
aaugacagggacagcccug

SEQ ID NO: 2003814 - RNA, 19 nt, Artificial Sequence
  Description of Artificial Sequence: Synthetic oligonucleotide
  Sense strand starting at position 268 of SEQ ID NO: 1880916
cugucauuucuugggccua

SEQ ID NO: 2003815 - RNA, 19 nt, Artificial Sequence
  Description of Artificial Sequence: Synthetic oligonucleotide
  Antisense strand to SEQ ID NO: 2003814
uaggcccaagaaaugacag

SEQ ID NO: 2003816 - RNA, 19 nt, Artificial Sequence
  Description of Artificial Sequence: Synthetic oligonucleotide
  Sense strand starting at position 830 of SEQ ID NO: 1880916
ggaagagcgcguuccucuu

SEQ ID NO: 2003817 - RNA, 19 nt, Artificial Sequence
  Description of Artificial Sequence: Synthetic oligonucleotide
  Antisense strand to SEQ ID NO: 2003816
aagaggaacgcgcucuucc

SEQ ID NO: 2003818 - RNA, 19 nt, Artificial Sequence
  Description of Artificial Sequence: Synthetic oligonucleotide
  Sense strand starting at position 1015 of SEQ ID NO: 1880916
cccgcaguacuaggaaauu

SEQ ID NO: 2003819 - RNA, 19 nt, Artificial Sequence
  Description of Artificial Sequence: Synthetic oligonucleotide
  Antisense strand to SEQ ID NO: 2003818
aauuuccuaguacugcggg

SEQ ID NO: 2003820 - RNA, 19 nt, Artificial Sequence
  Description of Artificial Sequence: Synthetic oligonucleotide
  Sense strand starting at position 1081 of SEQ ID NO: 1880916
guaaacugugcccggguua

SEQ ID NO: 2003821 - RNA, 19 nt, Artificial Sequence
  Description of Artificial Sequence: Synthetic oligonucleotide
  Antisense strand to SEQ ID NO: 2003820
uaacccgggcacaguuuac

SEQ ID NO: 2003822 - RNA, 19 nt, Artificial Sequence
  Description of Artificial Sequence: Synthetic oligonucleotide
  Sense strand starting at position 1093 of SEQ ID NO: 1880916
cggguuaggucauuggaau

SEQ ID NO: 2003823 - RNA, 19 nt, Artificial Sequence
  Description of Artificial Sequence: Synthetic oligonucleotide
  Antisense strand to SEQ ID NO: 2003822
auuccaaugaccuaacccg

SEQ ID NO: 2003824 - RNA, 19 nt, Artificial Sequence
  Description of Artificial Sequence: Synthetic oligonucleotide
  Sense strand starting at position 1094 of SEQ ID NO: 1880916
ggguuaggucauuggaaua

SEQ ID NO: 2003825 - RNA, 19 nt, Artificial Sequence
  Description of Artificial Sequence: Synthetic oligonucleotide
  Antisense strand to SEQ ID NO: 2003824
uauuccaaugaccuaaccc

SEQ ID NO: 2003826 - RNA, 19 nt, Artificial Sequence
  Description of Artificial Sequence: Synthetic oligonucleotide
  Sense strand starting at position 1104 of SEQ ID NO: 1880916
auuggaauaugcguugaca

SEQ ID NO: 2003827 - RNA, 19 nt, Artificial Sequence
  Description of Artificial Sequence: Synthetic oligonucleotide
  Antisense strand to SEQ ID NO: 2003826
ugucaacgcauauuccaau

SEQ ID NO: 2003828 - RNA, 19 nt, Artificial Sequence
  Description of Artificial Sequence: Synthetic oligonucleotide
  Sense strand starting at position 1106 of SEQ ID NO: 1880916
uggaauaugcguugacaau

SEQ ID NO: 2003829 - RNA, 19 nt, Artificial Sequence
  Description of Artificial Sequence: Synthetic oligonucleotide
  Antisense strand to SEQ ID NO: 2003828
auugucaacgcauauucca

SEQ ID NO: 2003830 - RNA, 19 nt, Artificial Sequence
  Description of Artificial Sequence: Synthetic oligonucleotide
  Sense strand starting at position 1107 of SEQ ID NO: 1880916
ggaauaugcguugacaaug

SEQ ID NO: 2003831 - RNA, 19 nt, Artificial Sequence
  Description of Artificial Sequence: Synthetic oligonucleotide
  Antisense strand to SEQ ID NO: 2003830
cauugucaacgcauauucc

SEQ ID NO: 2003832 - RNA, 19 nt, Artificial Sequence
  Description of Artificial Sequence: Synthetic oligonucleotide
  Sense strand starting at position 1112 of SEQ ID NO: 1880916
augcguugacaaugacaca

SEQ ID NO: 2003833 - RNA, 19 nt, Artificial Sequence
  Description of Artificial Sequence: Synthetic oligonucleotide
  Antisense strand to SEQ ID NO: 2003832
ugugucauugucaacgcau

SEQ ID NO: 2003834 - RNA, 19 nt, Artificial Sequence
  Description of Artificial Sequence: Synthetic oligonucleotide
  Sense strand starting at position 1299 of SEQ ID NO: 1880916
cagagagacugauggagau

SEQ ID NO: 2003835 - RNA, 19 nt, Artificial Sequence
  Description of Artificial Sequence: Synthetic oligonucleotide
  Antisense strand to SEQ ID NO: 2003834
aucuccaucagucucucug

SEQ ID NO: 2003836 - RNA, 19 nt, Artificial Sequence
  Description of Artificial Sequence: Synthetic oligonucleotide
  Sense strand starting at position 1334 of SEQ ID NO: 1880916
acaggcugauccucagaaa

SEQ ID NO: 2003837 - RNA, 19 nt, Artificial Sequence
  Description of Artificial Sequence: Synthetic oligonucleotide
  Antisense strand to SEQ ID NO: 2003836
uuucugaggaucagccugu

SEQ ID NO: 2003838 - RNA, 19 nt, Artificial Sequence
  Description of Artificial Sequence: Synthetic oligonucleotide
  Sense strand starting at position 1337 of SEQ ID NO: 1880916
ggcugauccucagaaauac

SEQ ID NO: 2003839 - RNA, 19 nt, Artificial Sequence
  Description of Artificial Sequence: Synthetic oligonucleotide
  Antisense strand to SEQ ID NO: 2003838
guauuucugaggaucagcc

SEQ ID NO: 2003840 - RNA, 19 nt, Artificial Sequence
  Description of Artificial Sequence: Synthetic oligonucleotide
  Sense strand starting at position 2111 of SEQ ID NO: 1880916
ggcuucuucucaguggaac

SEQ ID NO: 2003841 - RNA, 19 nt, Artificial Sequence
  Description of Artificial Sequence: Synthetic oligonucleotide
  Antisense strand to SEQ ID NO: 2003840
guuccacugagaagaagcc

SEQ ID NO: 2003842 - RNA, 19 nt, Artificial Sequence
  Description of Artificial Sequence: Synthetic oligonucleotide
  Sense strand starting at position 2112 of SEQ ID NO: 1880916
gcuucuucucaguggaaca

SEQ ID NO: 2003843 - RNA, 19 nt, Artificial Sequence
  Description of Artificial Sequence: Synthetic oligonucleotide
  Antisense strand to SEQ ID NO: 2003842
uguuccacugagaagaagc

SEQ ID NO: 2003844 - RNA, 19 nt, Artificial Sequence
  Description of Artificial Sequence: Synthetic oligonucleotide
  Sense strand starting at position 2144 of SEQ ID NO: 1880916
ucaguucucuggccuguau

SEQ ID NO: 2003845 - RNA, 19 nt, Artificial Sequence
  Description of Artificial Sequence: Synthetic oligonucleotide
  Antisense strand to SEQ ID NO: 2003844
auacaggccagagaacuga

SEQ ID NO: 2003846 - RNA, 19 nt, Artificial Sequence
  Description of Artificial Sequence: Synthetic oligonucleotide
  Sense strand starting at position 2146 of SEQ ID NO: 1880916
aguucucuggccuguauaa

SEQ ID NO: 2003847 - RNA, 19 nt, Artificial Sequence
  Description of Artificial Sequence: Synthetic oligonucleotide
  Antisense strand to SEQ ID NO: 2003846
uuauacaggccagagaacu

SEQ ID NO: 2003848 - RNA, 19 nt, Artificial Sequence
  Description of Artificial Sequence: Synthetic oligonucleotide
  Sense strand starting at position 2148 of SEQ ID NO: 1880916
uucucuggccuguauaaug

SEQ ID NO: 2003849 - RNA, 19 nt, Artificial Sequence
  Description of Artificial Sequence: Synthetic oligonucleotide
  Antisense strand to SEQ ID NO: 2003848
cauuauacaggccagagaa

SEQ ID NO: 2003850 - RNA, 19 nt, Artificial Sequence
  Description of Artificial Sequence: Synthetic oligonucleotide
  Sense strand starting at position 2155 of SEQ ID NO: 1880916
gccuguauaauggaguuaa

SEQ ID NO: 2003851 - RNA, 19 nt, Artificial Sequence
  Description of Artificial Sequence: Synthetic oligonucleotide
  Antisense strand to SEQ ID NO: 2003850
uuaacuccauuauacaggc

SEQ ID NO: 2003852 - RNA, 19 nt, Artificial Sequence
  Description of Artificial Sequence: Synthetic oligonucleotide
  Sense strand starting at position 2197 of SEQ ID NO: 1880916
uguccuagguucuuaagga

SEQ ID NO: 2003853 - RNA, 19 nt, Artificial Sequence
  Description of Artificial Sequence: Synthetic oligonucleotide
  Antisense strand to SEQ ID NO: 2003852
uccuuaagaaccuaggaca

SEQ ID NO: 2003854 - RNA, 19 nt, Artificial Sequence
  Description of Artificial Sequence: Synthetic oligonucleotide
  Sense strand starting at position 2198 of SEQ ID NO: 1880916
guccuagguucuuaaggac

SEQ ID NO: 2003855 - RNA, 19 nt, Artificial Sequence
  Description of Artificial Sequence: Synthetic oligonucleotide
  Antisense strand to SEQ ID NO: 2003854
guccuuaagaaccuaggac

SEQ ID NO: 2003856 - RNA, 19 nt, Artificial Sequence
  Description of Artificial Sequence: Synthetic oligonucleotide
  Sense strand starting at position 2256 of SEQ ID NO: 1880916
uuguguaaaugccagauau

SEQ ID NO: 2003857 - RNA, 19 nt, Artificial Sequence
  Description of Artificial Sequence: Synthetic oligonucleotide
  Antisense strand to SEQ ID NO: 2003856
auaucuggcauuuacacaa

SEQ ID NO: 2003858 - RNA, 19 nt, Artificial Sequence
  Description of Artificial Sequence: Synthetic oligonucleotide
  Sense strand starting at position 2258 of SEQ ID NO: 1880916
guguaaaugccagauauug

SEQ ID NO: 2003859 - RNA, 19 nt, Artificial Sequence
  Description of Artificial Sequence: Synthetic oligonucleotide
  Antisense strand to SEQ ID NO: 2003858
caauaucuggcauuuacac

SEQ ID NO: 2003860 - RNA, 19 nt, Artificial Sequence
  Description of Artificial Sequence: Synthetic oligonucleotide
  Sense strand starting at position 2266 of SEQ ID NO: 1880916
gccagauauuguuaugcag

SEQ ID NO: 2003861 - RNA, 19 nt, Artificial Sequence
  Description of Artificial Sequence: Synthetic oligonucleotide
  Antisense strand to SEQ ID NO: 2003860
cugcauaacaauaucuggc

SEQ ID NO: 2003862 - RNA, 19 nt, Artificial Sequence
  Description of Artificial Sequence: Synthetic oligonucleotide
  Sense strand starting at position 2414 of SEQ ID NO: 1880916
ccugguuggcgauguguua

SEQ ID NO: 2003863 - RNA, 19 nt, Artificial Sequence
  Description of Artificial Sequence: Synthetic oligonucleotide
  Antisense strand to SEQ ID NO: 2003862
uaacacaucgccaaccagg

SEQ ID NO: 2003864 - RNA, 19 nt, Artificial Sequence
  Description of Artificial Sequence: Synthetic oligonucleotide
  Sense strand starting at position 2421 of SEQ ID NO: 1880916
ggcgauguguuaccaacgu

SEQ ID NO: 2003865 - RNA, 19 nt, Artificial Sequence
  Description of Artificial Sequence: Synthetic oligonucleotide
  Antisense strand to SEQ ID NO: 2003864
acguugguaacacaucgcc

SEQ ID NO: 2003866 - RNA, 19 nt, Artificial Sequence
  Description of Artificial Sequence: Synthetic oligonucleotide
  Sense strand starting at position 2736 of SEQ ID NO: 1880916
ggaugcgaucccgaaggaa

SEQ ID NO: 2003867 - RNA, 19 nt, Artificial Sequence
  Description of Artificial Sequence: Synthetic oligonucleotide
  Antisense strand to SEQ ID NO: 2003866
uuccuucgggaucgcaucc

SEQ ID NO: 2003868 - RNA, 19 nt, Artificial Sequence
  Description of Artificial Sequence: Synthetic oligonucleotide
  Sense strand starting at position 2870 of SEQ ID NO: 1880916
cgcugugagaacgaguuua

SEQ ID NO: 2003869 - RNA, 19 nt, Artificial Sequence
  Description of Artificial Sequence: Synthetic oligonucleotide
  Antisense strand to SEQ ID NO: 2003868
uaaacucguucucacagcg

SEQ ID NO: 2003870 - RNA, 19 nt, Artificial Sequence
  Description of Artificial Sequence: Synthetic oligonucleotide
  Sense strand starting at position 2880 of SEQ ID NO: 1880916
acgaguuuagcggagucua

SEQ ID NO: 2003871 - RNA, 19 nt, Artificial Sequence
  Description of Artificial Sequence: Synthetic oligonucleotide
  Antisense strand to SEQ ID NO: 2003870
uagacuccgcuaaacucgu

SEQ ID NO: 2003872 - RNA, 19 nt, Artificial Sequence
  Description of Artificial Sequence: Synthetic oligonucleotide
  Sense strand starting at position 2881 of SEQ ID NO: 1880916
cgaguuuagcggagucuau

SEQ ID NO: 2003873 - RNA, 19 nt, Artificial Sequence
  Description of Artificial Sequence: Synthetic oligonucleotide
  Antisense strand to SEQ ID NO: 2003872
auagacuccgcuaaacucg

SEQ ID NO: 2003874 - RNA, 19 nt, Artificial Sequence
  Description of Artificial Sequence: Synthetic oligonucleotide
  Sense strand starting at position 2908 of SEQ ID NO: 1880916
cgagcuuguggccacaaga

SEQ ID NO: 2003875 - RNA, 19 nt, Artificial Sequence
  Description of Artificial Sequence: Synthetic oligonucleotide
  Antisense strand to SEQ ID NO: 2003874
ucuuguggccacaagcucg

SEQ ID NO: 2003876 - RNA, 19 nt, Artificial Sequence
  Description of Artificial Sequence: Synthetic oligonucleotide
  Sense strand starting at position 3322 of SEQ ID NO: 1880916
uucgguuuccgccucuaga

SEQ ID NO: 2003877 - RNA, 19 nt, Artificial Sequence
  Description of Artificial Sequence: Synthetic oligonucleotide
  Antisense strand to SEQ ID NO: 2003876
ucuagaggcggaaaccgaa

SEQ ID NO: 2003878 - RNA, 19 nt, Artificial Sequence
  Description of Artificial Sequence: Synthetic oligonucleotide
  Sense strand starting at position 3344 of SEQ ID NO: 1880916
ugggcuuuccgguguggaa

SEQ ID NO: 2003879 - RNA, 19 nt, Artificial Sequence
  Description of Artificial Sequence: Synthetic oligonucleotide
  Antisense strand to SEQ ID NO: 2003878
uuccacaccggaaagccca

SEQ ID NO: 2003880 - RNA, 19 nt, Artificial Sequence
  Description of Artificial Sequence: Synthetic oligonucleotide
  Sense strand starting at position 3478 of SEQ ID NO: 1880916
cgagacaucuucucuuaaa

SEQ ID NO: 2003881 - RNA, 19 nt, Artificial Sequence
  Description of Artificial Sequence: Synthetic oligonucleotide
  Antisense strand to SEQ ID NO: 2003880
uuuaagagaagaugucucg

SEQ ID NO: 2003882 - RNA, 19 nt, Artificial Sequence
  Description of Artificial Sequence: Synthetic oligonucleotide
  Sense strand starting at position 9 of SEQ ID NO: 1880917
ugggaacuugcuggaggau

SEQ ID NO: 2003883 - RNA, 19 nt, Artificial Sequence
  Description of Artificial Sequence: Synthetic oligonucleotide
  Antisense strand to SEQ ID NO: 2003882
auccuccagcaaguuccca

SEQ ID NO: 2003884 - RNA, 19 nt, Artificial Sequence
  Description of Artificial Sequence: Synthetic oligonucleotide
  Sense strand starting at position 122 of SEQ ID NO: 1880917
ggcccaggucguagaagua

SEQ ID NO: 2003885 - RNA, 19 nt, Artificial Sequence
  Description of Artificial Sequence: Synthetic oligonucleotide
  Antisense strand to SEQ ID NO: 2003884
uacuucuacgaccugggcc

SEQ ID NO: 2003886 - RNA, 19 nt, Artificial Sequence
  Description of Artificial Sequence: Synthetic oligonucleotide
  Sense strand starting at position 196 of SEQ ID NO: 1880917
ugauucgacugggugguaa

SEQ ID NO: 2003887 - RNA, 19 nt, Artificial Sequence
  Description of Artificial Sequence: Synthetic oligonucleotide
  Antisense strand to SEQ ID NO: 2003886
uuaccacccagucgaauca

SEQ ID NO: 2003888 - RNA, 19 nt, Artificial Sequence
  Description of Artificial Sequence: Synthetic oligonucleotide
  Sense strand starting at position 217 of SEQ ID NO: 1880917
gaggaaucguggugcuuug

SEQ ID NO: 2003889 - RNA, 19 nt, Artificial Sequence
  Description of Artificial Sequence: Synthetic oligonucleotide
  Antisense strand to SEQ ID NO: 2003888
caaagcaccacgauuccuc

SEQ ID NO: 2003890 - RNA, 19 nt, Artificial Sequence
  Description of Artificial Sequence: Synthetic oligonucleotide
  Sense strand starting at position 224 of SEQ ID NO: 1880917
cguggugcuuugcaaaugu

SEQ ID NO: 2003891 - RNA, 19 nt, Artificial Sequence
  Description of Artificial Sequence: Synthetic oligonucleotide
  Antisense strand to SEQ ID NO: 2003890
acauuugcaaagcaccacg

SEQ ID NO: 2003892 - RNA, 19 nt, Artificial Sequence
  Description of Artificial Sequence: Synthetic oligonucleotide
  Sense strand starting at position 228 of SEQ ID NO: 1880917
gugcuuugcaaauguguau

SEQ ID NO: 2003893 - RNA, 19 nt, Artificial Sequence
  Description of Artificial Sequence: Synthetic oligonucleotide
  Antisense strand to SEQ ID NO: 2003892
auacacauuugcaaagcac

SEQ ID NO: 2003894 - RNA, 19 nt, Artificial Sequence
  Description of Artificial Sequence: Synthetic oligonucleotide
  Sense strand starting at position 232 of SEQ ID NO: 1880917
uuugcaaauguguaucaag

SEQ ID NO: 2003895 - RNA, 19 nt, Artificial Sequence
  Description of Artificial Sequence: Synthetic oligonucleotide
  Antisense strand to SEQ ID NO: 2003894
cuugauacacauuugcaaa

SEQ ID NO: 2003896 - RNA, 19 nt, Artificial Sequence
  Description of Artificial Sequence: Synthetic oligonucleotide
  Sense strand starting at position 582 of SEQ ID NO: 1880917
acggguucauggucugaga

SEQ ID NO: 2003897 - RNA, 19 nt, Artificial Sequence
  Description of Artificial Sequence: Synthetic oligonucleotide
  Antisense strand to SEQ ID NO: 2003896
ucucagaccaugaacccgu

SEQ ID NO: 2003898 - RNA, 19 nt, Artificial Sequence
  Description of Artificial Sequence: Synthetic oligonucleotide
  Sense strand starting at position 584 of SEQ ID NO: 1880917
ggguucauggucugagaaa

SEQ ID NO: 2003899 - RNA, 19 nt, Artificial Sequence
  Description of Artificial Sequence: Synthetic oligonucleotide
  Antisense strand to SEQ ID NO: 2003898
uuucucagaccaugaaccc

SEQ ID NO: 2003900 - RNA, 19 nt, Artificial Sequence
  Description of Artificial Sequence: Synthetic oligonucleotide
  Sense strand starting at position 585 of SEQ ID NO: 1880917
gguucauggucugagaaag

SEQ ID NO: 2003901 - RNA, 19 nt, Artificial Sequence
  Description of Artificial Sequence: Synthetic oligonucleotide
  Antisense strand to SEQ ID NO: 2003900
cuuucucagaccaugaacc

SEQ ID NO: 2003902 - RNA, 19 nt, Artificial Sequence
  Description of Artificial Sequence: Synthetic oligonucleotide
  Sense strand starting at position 748 of SEQ ID NO: 1880917
ggcagacacugugugcuau

SEQ ID NO: 2003903 - RNA, 19 nt, Artificial Sequence
  Description of Artificial Sequence: Synthetic oligonucleotide
  Antisense strand to SEQ ID NO: 2003902
auagcacacagugucugcc

SEQ ID NO: 2003904 - RNA, 19 nt, Artificial Sequence
  Description of Artificial Sequence: Synthetic oligonucleotide
  Sense strand starting at position 752 of SEQ ID NO: 1880917
gacacugugugcuaucagu

SEQ ID NO: 2003905 - RNA, 19 nt, Artificial Sequence
  Description of Artificial Sequence: Synthetic oligonucleotide
  Antisense strand to SEQ ID NO: 2003904
acugauagcacacaguguc

SEQ ID NO: 2003906 - RNA, 19 nt, Artificial Sequence
  Description of Artificial Sequence: Synthetic oligonucleotide
  Sense strand starting at position 832 of SEQ ID NO: 1880917
ccuuucagcguuugggaga

SEQ ID NO: 2003907 - RNA, 19 nt, Artificial Sequence
  Description of Artificial Sequence: Synthetic oligonucleotide
  Antisense strand to SEQ ID NO: 2003906
ucucccaaacgcugaaagg

SEQ ID NO: 2003908 - RNA, 19 nt, Artificial Sequence
  Description of Artificial Sequence: Synthetic oligonucleotide
  Sense strand starting at position 882 of SEQ ID NO: 1880917
cucucuacugcaggaagaa

SEQ ID NO: 2003909 - RNA, 19 nt, Artificial Sequence
  Description of Artificial Sequence: Synthetic oligonucleotide
  Antisense strand to SEQ ID NO: 2003908
uucuuccugcaguagagag

SEQ ID NO: 2003910 - RNA, 19 nt, Artificial Sequence
  Description of Artificial Sequence: Synthetic oligonucleotide
  Sense strand starting at position 897 of SEQ ID NO: 1880917
agaagcuggcccuguuaga

SEQ ID NO: 2003911 - RNA, 19 nt, Artificial Sequence
  Description of Artificial Sequence: Synthetic oligonucleotide
  Antisense strand to SEQ ID NO: 2003910
ucuaacagggccagcuucu

SEQ ID NO: 2003912 - RNA, 19 nt, Artificial Sequence
  Description of Artificial Sequence: Synthetic oligonucleotide
  Sense strand starting at position 983 of SEQ ID NO: 1880917
gcaggagucgcgggauaca

SEQ ID NO: 2003913 - RNA, 19 nt, Artificial Sequence
  Description of Artificial Sequence: Synthetic oligonucleotide
  Antisense strand to SEQ ID NO: 2003912
uguaucccgcgacuccugc

SEQ ID NO: 2003914 - RNA, 19 nt, Artificial Sequence
  Description of Artificial Sequence: Synthetic oligonucleotide
  Sense strand starting at position 1032 of SEQ ID NO: 1880917
gggagucgccaaugcuaau

SEQ ID NO: 2003915 - RNA, 19 nt, Artificial Sequence
  Description of Artificial Sequence: Synthetic oligonucleotide
  Antisense strand to SEQ ID NO: 2003914
auuagcauuggcgacuccc

SEQ ID NO: 2003916 - RNA, 19 nt, Artificial Sequence
  Description of Artificial Sequence: Synthetic oligonucleotide
  Sense strand starting at position 1400 of SEQ ID NO: 1880917
ucaggaguuuccgaauccu

SEQ ID NO: 2003917 - RNA, 19 nt, Artificial Sequence
  Description of Artificial Sequence: Synthetic oligonucleotide
  Antisense strand to SEQ ID NO: 2003916
aggauucggaaacuccuga

SEQ ID NO: 2003918 - RNA, 19 nt, Artificial Sequence
  Description of Artificial Sequence: Synthetic oligonucleotide
  Sense strand starting at position 2838 of SEQ ID NO: 1880917
cuacuagucguuggcacua

SEQ ID NO: 2003919 - RNA, 19 nt, Artificial Sequence
  Description of Artificial Sequence: Synthetic oligonucleotide
  Antisense strand to SEQ ID NO: 2003918
uagugccaacgacuaguag

SEQ ID NO: 2003920 - RNA, 19 nt, Artificial Sequence
  Description of Artificial Sequence: Synthetic oligonucleotide
  Sense strand starting at position 2983 of SEQ ID NO: 1880917
gcuggagccucuccuugau

SEQ ID NO: 2003921 - RNA, 19 nt, Artificial Sequence
  Description of Artificial Sequence: Synthetic oligonucleotide
  Antisense strand to SEQ ID NO: 2003920
aucaaggagaggcuccagc

SEQ ID NO: 2003922 - RNA, 19 nt, Artificial Sequence
  Description of Artificial Sequence: Synthetic oligonucleotide
  Sense strand starting at position 3675 of SEQ ID NO: 1880917
ucccguuugccucaguaca

SEQ ID NO: 2003923 - RNA, 19 nt, Artificial Sequence
  Description of Artificial Sequence: Synthetic oligonucleotide
  Antisense strand to SEQ ID NO: 2003922
uguacugaggcaaacggga

SEQ ID NO: 2003924 - RNA, 19 nt, Artificial Sequence
  Description of Artificial Sequence: Synthetic oligonucleotide
  Sense strand starting at position 107 of SEQ ID NO: 1880918
gggacuggugcucagcaau

SEQ ID NO: 2003925 - RNA, 19 nt, Artificial Sequence
  Description of Artificial Sequence: Synthetic oligonucleotide
  Antisense strand to SEQ ID NO: 2003924
auugcugagcaccaguccc

SEQ ID NO: 2003926 - RNA, 19 nt, Artificial Sequence
  Description of Artificial Sequence: Synthetic oligonucleotide
  Sense strand starting at position 110 of SEQ ID NO: 1880918
acuggugcucagcaauuga

SEQ ID NO: 2003927 - RNA, 19 nt, Artificial Sequence
  Description of Artificial Sequence: Synthetic oligonucleotide
  Antisense strand to SEQ ID NO: 2003926
ucaauugcugagcaccagu

SEQ ID NO: 2003928 - RNA, 19 nt, Artificial Sequence
  Description of Artificial Sequence: Synthetic oligonucleotide
  Sense strand starting at position 182 of SEQ ID NO: 1880918
cucuacuaucuuggcaaga

SEQ ID NO: 2003929 - RNA, 19 nt, Artificial Sequence
  Description of Artificial Sequence: Synthetic oligonucleotide
  Antisense strand to SEQ ID NO: 2003928
ucuugccaagauaguagag

SEQ ID NO: 2003930 - RNA, 19 nt, Artificial Sequence
  Description of Artificial Sequence: Synthetic oligonucleotide
  Sense strand starting at position 183 of SEQ ID NO: 1880918
ucuacuaucuuggcaagag

SEQ ID NO: 2003931 - RNA, 19 nt, Artificial Sequence
  Description of Artificial Sequence: Synthetic oligonucleotide
  Antisense strand to SEQ ID NO: 2003930
cucuugccaagauaguaga

SEQ ID NO: 2003932 - RNA, 19 nt, Artificial Sequence
  Description of Artificial Sequence: Synthetic oligonucleotide
  Sense strand starting at position 195 of SEQ ID NO: 1880918
gcaagagggauguggcauu

SEQ ID NO: 2003933 - RNA, 19 nt, Artificial Sequence
  Description of Artificial Sequence: Synthetic oligonucleotide
  Antisense strand to SEQ ID NO: 2003932
aaugccacaucccucuugc

SEQ ID NO: 2003934 - RNA, 19 nt, Artificial Sequence
  Description of Artificial Sequence: Synthetic oligonucleotide
  Sense strand starting at position 273 of SEQ ID NO: 1880918
aggacucagugucauaagu

SEQ ID NO: 2003935 - RNA, 19 nt, Artificial Sequence
  Description of Artificial Sequence: Synthetic oligonucleotide
  Antisense strand to SEQ ID NO: 2003934
acuuaugacacugaguccu

SEQ ID NO: 2003936 - RNA, 19 nt, Artificial Sequence
  Description of Artificial Sequence: Synthetic oligonucleotide
  Sense strand starting at position 275 of SEQ ID NO: 1880918
gacucagugucauaaguaa

SEQ ID NO: 2003937 - RNA, 19 nt, Artificial Sequence
  Description of Artificial Sequence: Synthetic oligonucleotide
  Antisense strand to SEQ ID NO: 2003936
uuacuuaugacacugaguc

SEQ ID NO: 2003938 - RNA, 19 nt, Artificial Sequence
  Description of Artificial Sequence: Synthetic oligonucleotide
  Sense strand starting at position 676 of SEQ ID NO: 1880918
ggccauaucucagacaauc

SEQ ID NO: 2003939 - RNA, 19 nt, Artificial Sequence
  Description of Artificial Sequence: Synthetic oligonucleotide
  Antisense strand to SEQ ID NO: 2003938
gauugucugagauauggcc

SEQ ID NO: 2003940 - RNA, 19 nt, Artificial Sequence
  Description of Artificial Sequence: Synthetic oligonucleotide
  Sense strand starting at position 763 of SEQ ID NO: 1880918
cacuguguaccugguuaau

SEQ ID NO: 2003941 - RNA, 19 nt, Artificial Sequence
  Description of Artificial Sequence: Synthetic oligonucleotide
  Antisense strand to SEQ ID NO: 2003940
auuaaccagguacacagug

SEQ ID NO: 2003942 - RNA, 19 nt, Artificial Sequence
  Description of Artificial Sequence: Synthetic oligonucleotide
  Sense strand starting at position 769 of SEQ ID NO: 1880918
guaccugguuaaucgagaa

SEQ ID NO: 2003943 - RNA, 19 nt, Artificial Sequence
  Description of Artificial Sequence: Synthetic oligonucleotide
  Antisense strand to SEQ ID NO: 2003942
uucucgauuaaccagguac

SEQ ID NO: 2003944 - RNA, 19 nt, Artificial Sequence
  Description of Artificial Sequence: Synthetic oligonucleotide
  Sense strand starting at position 825 of SEQ ID NO: 1880918
gcaaacaaaugguuaacaa

SEQ ID NO: 2003945 - RNA, 19 nt, Artificial Sequence
  Description of Artificial Sequence: Synthetic oligonucleotide
  Antisense strand to SEQ ID NO: 2003944
uuguuaaccauuuguuugc

SEQ ID NO: 2003946 - RNA, 19 nt, Artificial Sequence
  Description of Artificial Sequence: Synthetic oligonucleotide
  Sense strand starting at position 918 of SEQ ID NO: 1880918
gggcuaaggcuacagauua

SEQ ID NO: 2003947 - RNA, 19 nt, Artificial Sequence
  Description of Artificial Sequence: Synthetic oligonucleotide
  Antisense strand to SEQ ID NO: 2003946
uaaucuguagccuuagccc

SEQ ID NO: 2003948 - RNA, 19 nt, Artificial Sequence
  Description of Artificial Sequence: Synthetic oligonucleotide
  Sense strand starting at position 979 of SEQ ID NO: 1880918
aauggaguuucuucugucu

SEQ ID NO: 2003949 - RNA, 19 nt, Artificial Sequence
  Description of Artificial Sequence: Synthetic oligonucleotide
  Antisense strand to SEQ ID NO: 2003948
agacagaagaaacuccauu

SEQ ID NO: 2003950 - RNA, 19 nt, Artificial Sequence
  Description of Artificial Sequence: Synthetic oligonucleotide
  Sense strand starting at position 981 of SEQ ID NO: 1880918
uggaguuucuucugucuuc

SEQ ID NO: 2003951 - RNA, 19 nt, Artificial Sequence
  Description of Artificial Sequence: Synthetic oligonucleotide
  Antisense strand to SEQ ID NO: 2003950
gaagacagaagaaacucca

SEQ ID NO: 2003952 - RNA, 19 nt, Artificial Sequence
  Description of Artificial Sequence: Synthetic oligonucleotide
  Sense strand starting at position 1182 of SEQ ID NO: 1880918
ccucccaucugacgagaaa

SEQ ID NO: 2003953 - RNA, 19 nt, Artificial Sequence
  Description of Artificial Sequence: Synthetic oligonucleotide
  Antisense strand to SEQ ID NO: 2003952
uuucucgucagaugggagg

SEQ ID NO: 2003954 - RNA, 19 nt, Artificial Sequence
  Description of Artificial Sequence: Synthetic oligonucleotide
  Sense strand starting at position 1368 of SEQ ID NO: 1880918
gcuguuccggccucagauu

SEQ ID NO: 2003955 - RNA, 19 nt, Artificial Sequence
  Description of Artificial Sequence: Synthetic oligonucleotide
  Antisense strand to SEQ ID NO: 2003954
aaucugaggccggaacagc

SEQ ID NO: 2003956 - RNA, 19 nt, Artificial Sequence
  Description of Artificial Sequence: Synthetic oligonucleotide
  Sense strand starting at position 1392 of SEQ ID NO: 1880918
ccuugagaaccgcggucau

SEQ ID NO: 2003957 - RNA, 19 nt, Artificial Sequence
  Description of Artificial Sequence: Synthetic oligonucleotide
  Antisense strand to SEQ ID NO: 2003956
augaccgcgguucucaagg

SEQ ID NO: 2003958 - RNA, 19 nt, Artificial Sequence
  Description of Artificial Sequence: Synthetic oligonucleotide
  Sense strand starting at position 1405 of SEQ ID NO: 1880918
ggucaugacugccgagaga

SEQ ID NO: 2003959 - RNA, 19 nt, Artificial Sequence
  Description of Artificial Sequence: Synthetic oligonucleotide
  Antisense strand to SEQ ID NO: 2003958
ucucucggcagucaugacc

SEQ ID NO: 2003960 - RNA, 19 nt, Artificial Sequence
  Description of Artificial Sequence: Synthetic oligonucleotide
  Sense strand starting at position 1830 of SEQ ID NO: 1880918
ggaacugaccgcggaguua

SEQ ID NO: 2003961 - RNA, 19 nt, Artificial Sequence
  Description of Artificial Sequence: Synthetic oligonucleotide
  Antisense strand to SEQ ID NO: 2003960
uaacuccgcggucaguucc

SEQ ID NO: 2003962 - RNA, 19 nt, Artificial Sequence
  Description of Artificial Sequence: Synthetic oligonucleotide
  Sense strand starting at position 2058 of SEQ ID NO: 1880918
agccgagcuuuccacucaa

SEQ ID NO: 2003963 - RNA, 19 nt, Artificial Sequence
  Description of Artificial Sequence: Synthetic oligonucleotide
  Antisense strand to SEQ ID NO: 2003962
uugaguggaaagcucggcu

SEQ ID NO: 2003964 - RNA, 19 nt, Artificial Sequence
  Description of Artificial Sequence: Synthetic oligonucleotide
  Sense strand starting at position 2111 of SEQ ID NO: 1880918
gaagguguaucuuuacgaa

SEQ ID NO: 2003965 - RNA, 19 nt, Artificial Sequence
  Description of Artificial Sequence: Synthetic oligonucleotide
  Antisense strand to SEQ ID NO: 2003964
uucguaaagauacaccuuc

SEQ ID NO: 2003966 - RNA, 19 nt, Artificial Sequence
  Description of Artificial Sequence: Synthetic oligonucleotide
  Sense strand starting at position 2150 of SEQ ID NO: 1880918
ccggaagucuuuccaccuu

SEQ ID NO: 2003967 - RNA, 19 nt, Artificial Sequence
  Description of Artificial Sequence: Synthetic oligonucleotide
  Antisense strand to SEQ ID NO: 2003966
aagguggaaagacuuccgg

SEQ ID NO: 2003968 - RNA, 19 nt, Artificial Sequence
  Description of Artificial Sequence: Synthetic oligonucleotide
  Sense strand starting at position 2398 of SEQ ID NO: 1880918
cuuucccauucuuucgaga

SEQ ID NO: 2003969 - RNA, 19 nt, Artificial Sequence
  Description of Artificial Sequence: Synthetic oligonucleotide
  Antisense strand to SEQ ID NO: 2003968
ucucgaaagaaugggaaag

SEQ ID NO: 2003970 - RNA, 19 nt, Artificial Sequence
  Description of Artificial Sequence: Synthetic oligonucleotide
  Sense strand starting at position 2400 of SEQ ID NO: 1880918
uucccauucuuucgagaag

SEQ ID NO: 2003971 - RNA, 19 nt, Artificial Sequence
  Description of Artificial Sequence: Synthetic oligonucleotide
  Antisense strand to SEQ ID NO: 2003970
cuucucgaaagaaugggaa

SEQ ID NO: 2003972 - RNA, 19 nt, Artificial Sequence
  Description of Artificial Sequence: Synthetic oligonucleotide
  Sense strand starting at position 2401 of SEQ ID NO: 1880918
ucccauucuuucgagaaga

SEQ ID NO: 2003973 - RNA, 19 nt, Artificial Sequence
  Description of Artificial Sequence: Synthetic oligonucleotide
  Antisense strand to SEQ ID NO: 2003972
ucuucucgaaagaauggga

SEQ ID NO: 2003974 - RNA, 19 nt, Artificial Sequence
  Description of Artificial Sequence: Synthetic oligonucleotide
  Sense strand starting at position 2477 of SEQ ID NO: 1880918
gugacaagcucucuaacug

SEQ ID NO: 2003975 - RNA, 19 nt, Artificial Sequence
  Description of Artificial Sequence: Synthetic oligonucleotide
  Antisense strand to SEQ ID NO: 2003974
caguuagagagcuugucac

SEQ ID NO: 2003976 - RNA, 19 nt, Artificial Sequence
  Description of Artificial Sequence: Synthetic oligonucleotide
  Sense strand starting at position 2628 of SEQ ID NO: 1880918
ccuugacacuuaguagaug

SEQ ID NO: 2003977 - RNA, 19 nt, Artificial Sequence
  Description of Artificial Sequence: Synthetic oligonucleotide
  Antisense strand to SEQ ID NO: 2003976
caucuacuaagugucaagg

SEQ ID NO: 2003978 - RNA, 19 nt, Artificial Sequence
  Description of Artificial Sequence: Synthetic oligonucleotide
  Sense strand starting at position 2651 of SEQ ID NO: 1880918
auaaguacuugucgaauga

SEQ ID NO: 2003979 - RNA, 19 nt, Artificial Sequence
  Description of Artificial Sequence: Synthetic oligonucleotide
  Antisense strand to SEQ ID NO: 2003978
ucauucgacaaguacuuau

SEQ ID NO: 2003980 - RNA, 19 nt, Artificial Sequence
  Description of Artificial Sequence: Synthetic oligonucleotide
  Sense strand starting at position 2652 of SEQ ID NO: 1880918
uaaguacuugucgaaugag

SEQ ID NO: 2003981 - RNA, 19 nt, Artificial Sequence
  Description of Artificial Sequence: Synthetic oligonucleotide
  Antisense strand to SEQ ID NO: 2003980
cucauucgacaaguacuua

SEQ ID NO: 2003982 - RNA, 19 nt, Artificial Sequence
  Description of Artificial Sequence: Synthetic oligonucleotide
  Sense strand starting at position 2655 of SEQ ID NO: 1880918
guacuugucgaaugaguaa

SEQ ID NO: 2003983 - RNA, 19 nt, Artificial Sequence
  Description of Artificial Sequence: Synthetic oligonucleotide
  Antisense strand to SEQ ID NO: 2003982
uuacucauucgacaaguac

SEQ ID NO: 2003984 - RNA, 19 nt, Artificial Sequence
  Description of Artificial Sequence: Synthetic oligonucleotide
  Sense strand starting at position 2784 of SEQ ID NO: 1880918
ggagaguagugcugggcuu

SEQ ID NO: 2003985 - RNA, 19 nt, Artificial Sequence
  Description of Artificial Sequence: Synthetic oligonucleotide
  Antisense strand to SEQ ID NO: 2003984
aagcccagcacuacucucc

SEQ ID NO: 2003986 - RNA, 19 nt, Artificial Sequence
  Description of Artificial Sequence: Synthetic oligonucleotide
  Sense strand starting at position 2785 of SEQ ID NO: 1880918
gagaguagugcugggcuuu

SEQ ID NO: 2003987 - RNA, 19 nt, Artificial Sequence
  Description of Artificial Sequence: Synthetic oligonucleotide
  Antisense strand to SEQ ID NO: 2003986
aaagcccagcacuacucuc

SEQ ID NO: 2003988 - RNA, 19 nt, Artificial Sequence
  Description of Artificial Sequence: Synthetic oligonucleotide
  Sense strand starting at position 3070 of SEQ ID NO: 1880918
cucagauuccuccguggaa

SEQ ID NO: 2003989 - RNA, 19 nt, Artificial Sequence
  Description of Artificial Sequence: Synthetic oligonucleotide
  Antisense strand to SEQ ID NO: 2003988
uuccacggaggaaucugag

SEQ ID NO: 2003990 - RNA, 19 nt, Artificial Sequence
  Description of Artificial Sequence: Synthetic oligonucleotide
  Sense strand starting at position 3071 of SEQ ID NO: 1880918
ucagauuccuccguggaag

SEQ ID NO: 2003991 - RNA, 19 nt, Artificial Sequence
  Description of Artificial Sequence: Synthetic oligonucleotide
  Antisense strand to SEQ ID NO: 2003990
cuuccacggaggaaucuga

SEQ ID NO: 2003992 - RNA, 19 nt, Artificial Sequence
  Description of Artificial Sequence: Synthetic oligonucleotide
  Sense strand starting at position 3072 of SEQ ID NO: 1880918
cagauuccuccguggaaga

SEQ ID NO: 2003993 - RNA, 19 nt, Artificial Sequence
  Description of Artificial Sequence: Synthetic oligonucleotide
  Antisense strand to SEQ ID NO: 2003992
ucuuccacggaggaaucug

SEQ ID NO: 2003994 - RNA, 19 nt, Artificial Sequence
  Description of Artificial Sequence: Synthetic oligonucleotide
  Sense strand starting at position 3073 of SEQ ID NO: 1880918
agauuccuccguggaagaa

SEQ ID NO: 2003995 - RNA, 19 nt, Artificial Sequence
  Description of Artificial Sequence: Synthetic oligonucleotide
  Antisense strand to SEQ ID NO: 2003994
uucuuccacggaggaaucu

SEQ ID NO: 2003996 - RNA, 19 nt, Artificial Sequence
  Description of Artificial Sequence: Synthetic oligonucleotide
  Sense strand starting at position 3855 of SEQ ID NO: 1880918
ccugucucccauggagaga

SEQ ID NO: 2003997 - RNA, 19 nt, Artificial Sequence
  Description of Artificial Sequence: Synthetic oligonucleotide
  Antisense strand to SEQ ID NO: 2003996
ucucuccaugggagacagg

SEQ ID NO: 2003998 - RNA, 19 nt, Artificial Sequence
  Description of Artificial Sequence: Synthetic oligonucleotide
  Sense strand starting at position 32 of SEQ ID NO: 1880919
acaguaacagaauguagau

SEQ ID NO: 2003999 - RNA, 19 nt, Artificial Sequence
  Description of Artificial Sequence: Synthetic oligonucleotide
  Antisense strand to SEQ ID NO: 2003998
aucuacauucuguuacugu

SEQ ID NO: 2004000 - RNA, 19 nt, Artificial Sequence
  Description of Artificial Sequence: Synthetic oligonucleotide
  Sense strand starting at position 45 of SEQ ID NO: 1880919
guagauaauaccggcacau

SEQ ID NO: 2004001 - RNA, 19 nt, Artificial Sequence
  Description of Artificial Sequence: Synthetic oligonucleotide
  Antisense strand to SEQ ID NO: 2004000
augugccgguauuaucuac

SEQ ID NO: 2004002 - RNA, 19 nt, Artificial Sequence
  Description of Artificial Sequence: Synthetic oligonucleotide
  Sense strand starting at position 47 of SEQ ID NO: 1880919
agauaauaccggcacauau

SEQ ID NO: 2004003 - RNA, 19 nt, Artificial Sequence
  Description of Artificial Sequence: Synthetic oligonucleotide
  Antisense strand to SEQ ID NO: 2004002
auaugugccgguauuaucu

SEQ ID NO: 2004004 - RNA, 19 nt, Artificial Sequence
  Description of Artificial Sequence: Synthetic oligonucleotide
  Sense strand starting at position 91 of SEQ ID NO: 1880919
gugaacuucucauccgacu

SEQ ID NO: 2004005 - RNA, 19 nt, Artificial Sequence
  Description of Artificial Sequence: Synthetic oligonucleotide
  Antisense strand to SEQ ID NO: 2004004
agucggaugagaaguucac

SEQ ID NO: 2004006 - RNA, 19 nt, Artificial Sequence
  Description of Artificial Sequence: Synthetic oligonucleotide
  Sense strand starting at position 172 of SEQ ID NO: 1880919
gcagguagugccagagguu

SEQ ID NO: 2004007 - RNA, 19 nt, Artificial Sequence
  Description of Artificial Sequence: Synthetic oligonucleotide
  Antisense strand to SEQ ID NO: 2004006
aaccucuggcacuaccugc

SEQ ID NO: 2004008 - RNA, 19 nt, Artificial Sequence
  Description of Artificial Sequence: Synthetic oligonucleotide
  Sense strand starting at position 173 of SEQ ID NO: 1880919
cagguagugccagagguuu

SEQ ID NO: 2004009 - RNA, 19 nt, Artificial Sequence
  Description of Artificial Sequence: Synthetic oligonucleotide
  Antisense strand to SEQ ID NO: 2004008
aaaccucuggcacuaccug

SEQ ID NO: 2004010 - RNA, 19 nt, Artificial Sequence
  Description of Artificial Sequence: Synthetic oligonucleotide
  Sense strand starting at position 179 of SEQ ID NO: 1880919
gugccagagguuuaaagau

SEQ ID NO: 2004011 - RNA, 19 nt, Artificial Sequence
  Description of Artificial Sequence: Synthetic oligonucleotide
  Antisense strand to SEQ ID NO: 2004010
aucuuuaaaccucuggcac

SEQ ID NO: 2004012 - RNA, 19 nt, Artificial Sequence
  Description of Artificial Sequence: Synthetic oligonucleotide
  Sense strand starting at position 198 of SEQ ID NO: 1880919
ggaaacagaucugaaagau

SEQ ID NO: 2004013 - RNA, 19 nt, Artificial Sequence
  Description of Artificial Sequence: Synthetic oligonucleotide
  Antisense strand to SEQ ID NO: 2004012
aucuuucagaucuguuucc

SEQ ID NO: 2004014 - RNA, 19 nt, Artificial Sequence
  Description of Artificial Sequence: Synthetic oligonucleotide
  Sense strand starting at position 399 of SEQ ID NO: 1880919
aagguaucagccugacaac

SEQ ID NO: 2004015 - RNA, 19 nt, Artificial Sequence
  Description of Artificial Sequence: Synthetic oligonucleotide
  Antisense strand to SEQ ID NO: 2004014
guugucaggcugauaccuu

SEQ ID NO: 2004016 - RNA, 19 nt, Artificial Sequence
  Description of Artificial Sequence: Synthetic oligonucleotide
  Sense strand starting at position 498 of SEQ ID NO: 1880919
agggcaccucgacgaaaua

SEQ ID NO: 2004017 - RNA, 19 nt, Artificial Sequence
  Description of Artificial Sequence: Synthetic oligonucleotide
  Antisense strand to SEQ ID NO: 2004016
uauuucgucgaggugcccu

SEQ ID NO: 2004018 - RNA, 19 nt, Artificial Sequence
  Description of Artificial Sequence: Synthetic oligonucleotide
  Sense strand starting at position 525 of SEQ ID NO: 1880919
acuguugguuuccuuagaa

SEQ ID NO: 2004019 - RNA, 19 nt, Artificial Sequence
  Description of Artificial Sequence: Synthetic oligonucleotide
  Antisense strand to SEQ ID NO: 2004018
uucuaaggaaaccaacagu

SEQ ID NO: 2004020 - RNA, 19 nt, Artificial Sequence
  Description of Artificial Sequence: Synthetic oligonucleotide
  Sense strand starting at position 597 of SEQ ID NO: 1880919
agaugaaugcacugaggca

SEQ ID NO: 2004021 - RNA, 19 nt, Artificial Sequence
  Description of Artificial Sequence: Synthetic oligonucleotide
  Antisense strand to SEQ ID NO: 2004020
ugccucagugcauucaucu

SEQ ID NO: 2004022 - RNA, 19 nt, Artificial Sequence
  Description of Artificial Sequence: Synthetic oligonucleotide
  Sense strand starting at position 682 of SEQ ID NO: 1880919
ugcacaguacucuacaguu

SEQ ID NO: 2004023 - RNA, 19 nt, Artificial Sequence
  Description of Artificial Sequence: Synthetic oligonucleotide
  Antisense strand to SEQ ID NO: 2004022
aacuguagaguacugugca

SEQ ID NO: 2004024 - RNA, 19 nt, Artificial Sequence
  Description of Artificial Sequence: Synthetic oligonucleotide
  Sense strand starting at position 785 of SEQ ID NO: 1880919
ggcugaaagaacugagucu

SEQ ID NO: 2004025 - RNA, 19 nt, Artificial Sequence
  Description of Artificial Sequence: Synthetic oligonucleotide
  Antisense strand to SEQ ID NO: 2004024
agacucaguucuuucagcc

SEQ ID NO: 2004026 - RNA, 19 nt, Artificial Sequence
  Description of Artificial Sequence: Synthetic oligonucleotide
  Sense strand starting at position 786 of SEQ ID NO: 1880919
gcugaaagaacugagucuu

SEQ ID NO: 2004027 - RNA, 19 nt, Artificial Sequence
  Description of Artificial Sequence: Synthetic oligonucleotide
  Antisense strand to SEQ ID NO: 2004026
aagacucaguucuuucagc

SEQ ID NO: 2004028 - RNA, 19 nt, Artificial Sequence
  Description of Artificial Sequence: Synthetic oligonucleotide
  Sense strand starting at position 1197 of SEQ ID NO: 1880919
gagccagauuucugaggaa

SEQ ID NO: 2004029 - RNA, 19 nt, Artificial Sequence
  Description of Artificial Sequence: Synthetic oligonucleotide
  Antisense strand to SEQ ID NO: 2004028
uuccucagaaaucuggcuc

SEQ ID NO: 2004030 - RNA, 19 nt, Artificial Sequence
  Description of Artificial Sequence: Synthetic oligonucleotide
  Sense strand starting at position 1200 of SEQ ID NO: 1880919
ccagauuucugaggaaccu

SEQ ID NO: 2004031 - RNA, 19 nt, Artificial Sequence
  Description of Artificial Sequence: Synthetic oligonucleotide
  Antisense strand to SEQ ID NO: 2004030
agguuccucagaaaucugg

SEQ ID NO: 2004032 - RNA, 19 nt, Artificial Sequence
  Description of Artificial Sequence: Synthetic oligonucleotide
  Sense strand starting at position 1296 of SEQ ID NO: 1880919
guguaagcuguuuaggaau

SEQ ID NO: 2004033 - RNA, 19 nt, Artificial Sequence
  Description of Artificial Sequence: Synthetic oligonucleotide
  Antisense strand to SEQ ID NO: 2004032
auuccuaaacagcuuacac

SEQ ID NO: 2004034 - RNA, 19 nt, Artificial Sequence
  Description of Artificial Sequence: Synthetic oligonucleotide
  Sense strand starting at position 1461 of SEQ ID NO: 1880919
ggaaaugucucacccuuuc

SEQ ID NO: 2004035 - RNA, 19 nt, Artificial Sequence
  Description of Artificial Sequence: Synthetic oligonucleotide
  Antisense strand to SEQ ID NO: 2004034
gaaagggugagacauuucc

SEQ ID NO: 2004036 - RNA, 19 nt, Artificial Sequence
  Description of Artificial Sequence: Synthetic oligonucleotide
  Sense strand starting at position 1472 of SEQ ID NO: 1880919
acccuuucucugggaaggu

SEQ ID NO: 2004037 - RNA, 19 nt, Artificial Sequence
  Description of Artificial Sequence: Synthetic oligonucleotide
  Antisense strand to SEQ ID NO: 2004036
accuucccagagaaagggu

SEQ ID NO: 2004038 - RNA, 19 nt, Artificial Sequence
  Description of Artificial Sequence: Synthetic oligonucleotide
  Sense strand starting at position 2204 of SEQ ID NO: 1880919
ugggaaaucucccugugua

SEQ ID NO: 2004039 - RNA, 19 nt, Artificial Sequence
  Description of Artificial Sequence: Synthetic oligonucleotide
  Antisense strand to SEQ ID NO: 2004038
uacacagggagauuuccca

SEQ ID NO: 2004040 - RNA, 19 nt, Artificial Sequence
  Description of Artificial Sequence: Synthetic oligonucleotide
  Sense strand starting at position 2205 of SEQ ID NO: 1880919
gggaaaucucccuguguac

SEQ ID NO: 2004041 - RNA, 19 nt, Artificial Sequence
  Description of Artificial Sequence: Synthetic oligonucleotide
  Antisense strand to SEQ ID NO: 2004040
guacacagggagauuuccc

SEQ ID NO: 2004042 - RNA, 19 nt, Artificial Sequence
  Description of Artificial Sequence: Synthetic oligonucleotide
  Sense strand starting at position 2207 of SEQ ID NO: 1880919
gaaaucucccuguguacag

SEQ ID NO: 2004043 - RNA, 19 nt, Artificial Sequence
  Description of Artificial Sequence: Synthetic oligonucleotide
  Antisense strand to SEQ ID NO: 2004042
cuguacacagggagauuuc

SEQ ID NO: 2004044 - RNA, 19 nt, Artificial Sequence
  Description of Artificial Sequence: Synthetic oligonucleotide
  Sense strand starting at position 2383 of SEQ ID NO: 1880919
gaugguggauuccugagau

SEQ ID NO: 2004045 - RNA, 19 nt, Artificial Sequence
  Description of Artificial Sequence: Synthetic oligonucleotide
  Antisense strand to SEQ ID NO: 2004044
aucucaggaauccaccauc

SEQ ID NO: 2004046 - RNA, 19 nt, Artificial Sequence
  Description of Artificial Sequence: Synthetic oligonucleotide
  Sense strand starting at position 2414 of SEQ ID NO: 1880919
cuaguugacauguauguua

SEQ ID NO: 2004047 - RNA, 19 nt, Artificial Sequence
  Description of Artificial Sequence: Synthetic oligonucleotide
  Antisense strand to SEQ ID NO: 2004046
uaacauacaugucaacuag

SEQ ID NO: 2004048 - RNA, 19 nt, Artificial Sequence
  Description of Artificial Sequence: Synthetic oligonucleotide
  Sense strand starting at position 2416 of SEQ ID NO: 1880919
aguugacauguauguuaca

SEQ ID NO: 2004049 - RNA, 19 nt, Artificial Sequence
  Description of Artificial Sequence: Synthetic oligonucleotide
  Antisense strand to SEQ ID NO: 2004048
uguaacauacaugucaacu

SEQ ID NO: 2004050 - RNA, 19 nt, Artificial Sequence
  Description of Artificial Sequence: Synthetic oligonucleotide
  Sense strand starting at position 2417 of SEQ ID NO: 1880919
guugacauguauguuacau

SEQ ID NO: 2004051 - RNA, 19 nt, Artificial Sequence
  Description of Artificial Sequence: Synthetic oligonucleotide
  Antisense strand to SEQ ID NO: 2004050
auguaacauacaugucaac

SEQ ID NO: 2004052 - RNA, 19 nt, Artificial Sequence
  Description of Artificial Sequence: Synthetic oligonucleotide
  Sense strand starting at position 2457 of SEQ ID NO: 1880919
gaaaguggguguucaguca

SEQ ID NO: 2004053 - RNA, 19 nt, Artificial Sequence
  Description of Artificial Sequence: Synthetic oligonucleotide
  Antisense strand to SEQ ID NO: 2004052
ugacugaacacccacuuuc

SEQ ID NO: 2004054 - RNA, 19 nt, Artificial Sequence
  Description of Artificial Sequence: Synthetic oligonucleotide
  Sense strand starting at position 2476 of SEQ ID NO: 1880919
cagagcggucuggauacaa

SEQ ID NO: 2004055 - RNA, 19 nt, Artificial Sequence
  Description of Artificial Sequence: Synthetic oligonucleotide
  Antisense strand to SEQ ID NO: 2004054
uuguauccagaccgcucug

SEQ ID NO: 2004056 - RNA, 19 nt, Artificial Sequence
  Description of Artificial Sequence: Synthetic oligonucleotide
  Sense strand starting at position 2502 of SEQ ID NO: 1880919
accucuguccugggaaaca

SEQ ID NO: 2004057 - RNA, 19 nt, Artificial Sequence
  Description of Artificial Sequence: Synthetic oligonucleotide
  Antisense strand to SEQ ID NO: 2004056
uguuucccaggacagaggu

SEQ ID NO: 2004058 - RNA, 19 nt, Artificial Sequence
  Description of Artificial Sequence: Synthetic oligonucleotide
  Sense strand starting at position 2865 of SEQ ID NO: 1880919
ucuguuccugaaugggauu

SEQ ID NO: 2004059 - RNA, 19 nt, Artificial Sequence
  Description of Artificial Sequence: Synthetic oligonucleotide
  Antisense strand to SEQ ID NO: 2004058
aaucccauucaggaacaga

SEQ ID NO: 2004060 - RNA, 19 nt, Artificial Sequence
  Description of Artificial Sequence: Synthetic oligonucleotide
  Sense strand starting at position 2871 of SEQ ID NO: 1880919
ccugaaugggauugcagaa

SEQ ID NO: 2004061 - RNA, 19 nt, Artificial Sequence
  Description of Artificial Sequence: Synthetic oligonucleotide
  Antisense strand to SEQ ID NO: 2004060
uucugcaaucccauucagg

SEQ ID NO: 2004062 - RNA, 19 nt, Artificial Sequence
  Description of Artificial Sequence: Synthetic oligonucleotide
  Sense strand starting at position 3246 of SEQ ID NO: 1880919
cauugucucgguuauaauu

SEQ ID NO: 2004063 - RNA, 19 nt, Artificial Sequence
  Description of Artificial Sequence: Synthetic oligonucleotide
  Antisense strand to SEQ ID NO: 2004062
aauuauaaccgagacaaug

SEQ ID NO: 2004064 - RNA, 19 nt, Artificial Sequence
  Description of Artificial Sequence: Synthetic oligonucleotide
  Sense strand starting at position 3622 of SEQ ID NO: 1880919
uagcauugaccacaguguu

SEQ ID NO: 2004065 - RNA, 19 nt, Artificial Sequence
  Description of Artificial Sequence: Synthetic oligonucleotide
  Antisense strand to SEQ ID NO: 2004064
aacacuguggucaaugcua

SEQ ID NO: 2004066 - RNA, 19 nt, Artificial Sequence
  Description of Artificial Sequence: Synthetic oligonucleotide
  Sense strand starting at position 3629 of SEQ ID NO: 1880919
gaccacaguguugggaaau

SEQ ID NO: 2004067 - RNA, 19 nt, Artificial Sequence
  Description of Artificial Sequence: Synthetic oligonucleotide
  Antisense strand to SEQ ID NO: 2004066
auuucccaacacugugguc

SEQ ID NO: 2004068 - RNA, 19 nt, Artificial Sequence
  Description of Artificial Sequence: Synthetic oligonucleotide
  Sense strand starting at position 3663 of SEQ ID NO: 1880919
ugugucaacuccuugagaa

SEQ ID NO: 2004069 - RNA, 19 nt, Artificial Sequence
  Description of Artificial Sequence: Synthetic oligonucleotide
  Antisense strand to SEQ ID NO: 2004068
uucucaaggaguugacaca

SEQ ID NO: 2004070 - RNA, 19 nt, Artificial Sequence
  Description of Artificial Sequence: Synthetic oligonucleotide
  Sense strand starting at position 3664 of SEQ ID NO: 1880919
gugucaacuccuugagaag

SEQ ID NO: 2004071 - RNA, 19 nt, Artificial Sequence
  Description of Artificial Sequence: Synthetic oligonucleotide
  Antisense strand to SEQ ID NO: 2004070
cuucucaaggaguugacac

SEQ ID NO: 2004072 - RNA, 19 nt, Artificial Sequence
  Description of Artificial Sequence: Synthetic oligonucleotide
  Sense strand starting at position 3871 of SEQ ID NO: 1880919
gguugauauuuacuugcuu

SEQ ID NO: 2004073 - RNA, 19 nt, Artificial Sequence
  Description of Artificial Sequence: Synthetic oligonucleotide
  Antisense strand to SEQ ID NO: 2004072
aagcaaguaaauaucaacc

SEQ ID NO: 2004074 - RNA, 19 nt, Artificial Sequence
  Description of Artificial Sequence: Synthetic oligonucleotide
  Sense strand starting at position 3872 of SEQ ID NO: 1880919
guugauauuuacuugcuua

SEQ ID NO: 2004075 - RNA, 19 nt, Artificial Sequence
  Description of Artificial Sequence: Synthetic oligonucleotide
  Antisense strand to SEQ ID NO: 2004074
uaagcaaguaaauaucaac

SEQ ID NO: 2004076 - RNA, 19 nt, Artificial Sequence
  Description of Artificial Sequence: Synthetic oligonucleotide
  Sense strand starting at position 3917 of SEQ ID NO: 1880919
ggaaacaacugccuuugua

SEQ ID NO: 2004077 - RNA, 19 nt, Artificial Sequence
  Description of Artificial Sequence: Synthetic oligonucleotide
  Antisense strand to SEQ ID NO: 2004076
uacaaaggcaguuguuucc

SEQ ID NO: 2004078 - RNA, 19 nt, Artificial Sequence
  Description of Artificial Sequence: Synthetic oligonucleotide
  Sense strand starting at position 124 of SEQ ID NO: 1880920
caauuaauguuaucugagg

SEQ ID NO: 2004079 - RNA, 19 nt, Artificial Sequence
  Description of Artificial Sequence: Synthetic oligonucleotide
  Antisense strand to SEQ ID NO: 2004078
ccucagauaacauuaauug

SEQ ID NO: 2004080 - RNA, 19 nt, Artificial Sequence
  Description of Artificial Sequence: Synthetic oligonucleotide
  Sense strand starting at position 125 of SEQ ID NO: 1880920
aauuaauguuaucugagga

SEQ ID NO: 2004081 - RNA, 19 nt, Artificial Sequence
  Description of Artificial Sequence: Synthetic oligonucleotide
  Antisense strand to SEQ ID NO: 2004080
uccucagauaacauuaauu

SEQ ID NO: 2004082 - RNA, 19 nt, Artificial Sequence
  Description of Artificial Sequence: Synthetic oligonucleotide
  Sense strand starting at position 150 of SEQ ID NO: 1880920
agccucaucccugagcuau

SEQ ID NO: 2004083 - RNA, 19 nt, Artificial Sequence
  Description of Artificial Sequence: Synthetic oligonucleotide
  Antisense strand to SEQ ID NO: 2004082
auagcucagggaugaggcu

SEQ ID NO: 2004084 - RNA, 19 nt, Artificial Sequence
  Description of Artificial Sequence: Synthetic oligonucleotide
  Sense strand starting at position 152 of SEQ ID NO: 1880920
ccucaucccugagcuauga

SEQ ID NO: 2004085 - RNA, 19 nt, Artificial Sequence
  Description of Artificial Sequence: Synthetic oligonucleotide
  Antisense strand to SEQ ID NO: 2004084
ucauagcucagggaugagg

SEQ ID NO: 2004086 - RNA, 19 nt, Artificial Sequence
  Description of Artificial Sequence: Synthetic oligonucleotide
  Sense strand starting at position 215 of SEQ ID NO: 1880920
agcucuaguugugugauaa

SEQ ID NO: 2004087 - RNA, 19 nt, Artificial Sequence
  Description of Artificial Sequence: Synthetic oligonucleotide
  Antisense strand to SEQ ID NO: 2004086
uuaucacacaacuagagcu

SEQ ID NO: 2004088 - RNA, 19 nt, Artificial Sequence
  Description of Artificial Sequence: Synthetic oligonucleotide
  Sense strand starting at position 238 of SEQ ID NO: 1880920
gguggaaucugagacagag

SEQ ID NO: 2004089 - RNA, 19 nt, Artificial Sequence
  Description of Artificial Sequence: Synthetic oligonucleotide
  Antisense strand to SEQ ID NO: 2004088
cucugucucagauuccacc

SEQ ID NO: 2004090 - RNA, 19 nt, Artificial Sequence
  Description of Artificial Sequence: Synthetic oligonucleotide
  Sense strand starting at position 502 of SEQ ID NO: 1880920
ucacuugguuggguuuaaa

SEQ ID NO: 2004091 - RNA, 19 nt, Artificial Sequence
  Description of Artificial Sequence: Synthetic oligonucleotide
  Antisense strand to SEQ ID NO: 2004090
uuuaaacccaaccaaguga

SEQ ID NO: 2004092 - RNA, 19 nt, Artificial Sequence
  Description of Artificial Sequence: Synthetic oligonucleotide
  Sense strand starting at position 505 of SEQ ID NO: 1880920
cuugguuggguuuaaauga

SEQ ID NO: 2004093 - RNA, 19 nt, Artificial Sequence
  Description of Artificial Sequence: Synthetic oligonucleotide
  Antisense strand to SEQ ID NO: 2004092
ucauuuaaacccaaccaag

SEQ ID NO: 2004094 - RNA, 19 nt, Artificial Sequence
  Description of Artificial Sequence: Synthetic oligonucleotide
  Sense strand starting at position 573 of SEQ ID NO: 1880920
acgggagacugcuugucaa

SEQ ID NO: 2004095 - RNA, 19 nt, Artificial Sequence
  Description of Artificial Sequence: Synthetic oligonucleotide
  Antisense strand to SEQ ID NO: 2004094
uugacaagcagucucccgu

SEQ ID NO: 2004096 - RNA, 19 nt, Artificial Sequence
  Description of Artificial Sequence: Synthetic oligonucleotide
  Sense strand starting at position 576 of SEQ ID NO: 1880920
ggagacugcuugucaauuc

SEQ ID NO: 2004097 - RNA, 19 nt, Artificial Sequence
  Description of Artificial Sequence: Synthetic oligonucleotide
  Antisense strand to SEQ ID NO: 2004096
gaauugacaagcagucucc

SEQ ID NO: 2004098 - RNA, 19 nt, Artificial Sequence
  Description of Artificial Sequence: Synthetic oligonucleotide
  Sense strand starting at position 618 of SEQ ID NO: 1880920
acuuaauucgcccaucagu

SEQ ID NO: 2004099 - RNA, 19 nt, Artificial Sequence
  Description of Artificial Sequence: Synthetic oligonucleotide
  Antisense strand to SEQ ID NO: 2004098
acugaugggcgaauuaagu

SEQ ID NO: 2004100 - RNA, 19 nt, Artificial Sequence
  Description of Artificial Sequence: Synthetic oligonucleotide
  Sense strand starting at position 632 of SEQ ID NO: 1880920
ucaguagagauccgacuuu

SEQ ID NO: 2004101 - RNA, 19 nt, Artificial Sequence
  Description of Artificial Sequence: Synthetic oligonucleotide
  Antisense strand to SEQ ID NO: 2004100
aaagucggaucucuacuga

SEQ ID NO: 2004102 - RNA, 19 nt, Artificial Sequence
  Description of Artificial Sequence: Synthetic oligonucleotide
  Sense strand starting at position 712 of SEQ ID NO: 1880920
gccagagucccgggacuau

SEQ ID NO: 2004103 - RNA, 19 nt, Artificial Sequence
  Description of Artificial Sequence: Synthetic oligonucleotide
  Antisense strand to SEQ ID NO: 2004102
auagucccgggacucuggc

SEQ ID NO: 2004104 - RNA, 19 nt, Artificial Sequence
  Description of Artificial Sequence: Synthetic oligonucleotide
  Sense strand starting at position 1543 of SEQ ID NO: 1880920
cgcugugcgccgguaagaa

SEQ ID NO: 2004105 - RNA, 19 nt, Artificial Sequence
  Description of Artificial Sequence: Synthetic oligonucleotide
  Antisense strand to SEQ ID NO: 2004104
uucuuaccggcgcacagcg

SEQ ID NO: 2004106 - RNA, 19 nt, Artificial Sequence
  Description of Artificial Sequence: Synthetic oligonucleotide
  Sense strand starting at position 1763 of SEQ ID NO: 1880920
gcgggauucugguuccuag

SEQ ID NO: 2004107 - RNA, 19 nt, Artificial Sequence
  Description of Artificial Sequence: Synthetic oligonucleotide
  Antisense strand to SEQ ID NO: 2004106
cuaggaaccagaaucccgc

SEQ ID NO: 2004108 - RNA, 19 nt, Artificial Sequence
  Description of Artificial Sequence: Synthetic oligonucleotide
  Sense strand starting at position 2362 of SEQ ID NO: 1880920
cggaguuccgccuggaaag

SEQ ID NO: 2004109 - RNA, 19 nt, Artificial Sequence
  Description of Artificial Sequence: Synthetic oligonucleotide
  Antisense strand to SEQ ID NO: 2004108
cuuuccaggcggaacuccg

SEQ ID NO: 2004110 - RNA, 19 nt, Artificial Sequence
  Description of Artificial Sequence: Synthetic oligonucleotide
  Sense strand starting at position 2620 of SEQ ID NO: 1880920
ccgccuggagucugggaaa

SEQ ID NO: 2004111 - RNA, 19 nt, Artificial Sequence
  Description of Artificial Sequence: Synthetic oligonucleotide
  Antisense strand to SEQ ID NO: 2004110
uuucccagacuccaggcgg

SEQ ID NO: 2004112 - RNA, 19 nt, Artificial Sequence
  Description of Artificial Sequence: Synthetic oligonucleotide
  Sense strand starting at position 2786 of SEQ ID NO: 1880920
gagugaguucuguagggua

SEQ ID NO: 2004113 - RNA, 19 nt, Artificial Sequence
  Description of Artificial Sequence: Synthetic oligonucleotide
  Antisense strand to SEQ ID NO: 2004112
uacccuacagaacucacuc

SEQ ID NO: 2004114 - RNA, 19 nt, Artificial Sequence
  Description of Artificial Sequence: Synthetic oligonucleotide
  Sense strand starting at position 2861 of SEQ ID NO: 1880920
accugaguaccguauggaa

SEQ ID NO: 2004115 - RNA, 19 nt, Artificial Sequence
  Description of Artificial Sequence: Synthetic oligonucleotide
  Antisense strand to SEQ ID NO: 2004114
uuccauacgguacucaggu

SEQ ID NO: 2004116 - RNA, 19 nt, Artificial Sequence
  Description of Artificial Sequence: Synthetic oligonucleotide
  Sense strand starting at position 2863 of SEQ ID NO: 1880920
cugaguaccguauggaaga

SEQ ID NO: 2004117 - RNA, 19 nt, Artificial Sequence
  Description of Artificial Sequence: Synthetic oligonucleotide
  Antisense strand to SEQ ID NO: 2004116
ucuuccauacgguacucag

SEQ ID NO: 2004118 - RNA, 19 nt, Artificial Sequence
  Description of Artificial Sequence: Synthetic oligonucleotide
  Sense strand starting at position 2986 of SEQ ID NO: 1880920
gaaggagugcucgaaagug

SEQ ID NO: 2004119 - RNA, 19 nt, Artificial Sequence
  Description of Artificial Sequence: Synthetic oligonucleotide
  Antisense strand to SEQ ID NO: 2004118
cacuuucgagcacuccuuc

SEQ ID NO: 2004120 - RNA, 19 nt, Artificial Sequence
  Description of Artificial Sequence: Synthetic oligonucleotide
  Sense strand starting at position 3011 of SEQ ID NO: 1880920
gaggcauuggucugcuaga

SEQ ID NO: 2004121 - RNA, 19 nt, Artificial Sequence
  Description of Artificial Sequence: Synthetic oligonucleotide
  Antisense strand to SEQ ID NO: 2004120
ucuagcagaccaaugccuc

SEQ ID NO: 2004122 - RNA, 19 nt, Artificial Sequence
  Description of Artificial Sequence: Synthetic oligonucleotide
  Sense strand starting at position 3012 of SEQ ID NO: 1880920
aggcauuggucugcuagag

SEQ ID NO: 2004123 - RNA, 19 nt, Artificial Sequence
  Description of Artificial Sequence: Synthetic oligonucleotide
  Antisense strand to SEQ ID NO: 2004122
cucuagcagaccaaugccu

SEQ ID NO: 2004124 - RNA, 19 nt, Artificial Sequence
  Description of Artificial Sequence: Synthetic oligonucleotide
  Sense strand starting at position 3039 of SEQ ID NO: 1880920
gcagcaagcugacuugaua

SEQ ID NO: 2004125 - RNA, 19 nt, Artificial Sequence
  Description of Artificial Sequence: Synthetic oligonucleotide
  Antisense strand to SEQ ID NO: 2004124
uaucaagucagcuugcugc

SEQ ID NO: 2004126 - RNA, 19 nt, Artificial Sequence
  Description of Artificial Sequence: Synthetic oligonucleotide
  Sense strand starting at position 3098 of SEQ ID NO: 1880920
gugccugaucccuggaagu

SEQ ID NO: 2004127 - RNA, 19 nt, Artificial Sequence
  Description of Artificial Sequence: Synthetic oligonucleotide
  Antisense strand to SEQ ID NO: 2004126
acuuccagggaucaggcac

SEQ ID NO: 2004128 - RNA, 19 nt, Artificial Sequence
  Description of Artificial Sequence: Synthetic oligonucleotide
  Sense strand starting at position 3330 of SEQ ID NO: 1880920
ggcagucagagucacacua

SEQ ID NO: 2004129 - RNA, 19 nt, Artificial Sequence
  Description of Artificial Sequence: Synthetic oligonucleotide
  Antisense strand to SEQ ID NO: 2004128
uagugugacucugacugcc

SEQ ID NO: 2004130 - RNA, 19 nt, Artificial Sequence
  Description of Artificial Sequence: Synthetic oligonucleotide
  Sense strand starting at position 3419 of SEQ ID NO: 1880920
gucccugaccuguggagaa

SEQ ID NO: 2004131 - RNA, 19 nt, Artificial Sequence
  Description of Artificial Sequence: Synthetic oligonucleotide
  Antisense strand to SEQ ID NO: 2004130
uucuccacaggucagggac

SEQ ID NO: 2004132 - RNA, 19 nt, Artificial Sequence
  Description of Artificial Sequence: Synthetic oligonucleotide
  Sense strand starting at position 3563 of SEQ ID NO: 1880920
gcacacaaugccugcuaga

SEQ ID NO: 2004133 - RNA, 19 nt, Artificial Sequence
  Description of Artificial Sequence: Synthetic oligonucleotide
  Antisense strand to SEQ ID NO: 2004132
ucuagcaggcauugugugc

SEQ ID NO: 2004134 - RNA, 19 nt, Artificial Sequence
  Description of Artificial Sequence: Synthetic oligonucleotide
  Sense strand starting at position 3592 of SEQ ID NO: 1880920
agaagagugcugugugaca

SEQ ID NO: 2004135 - RNA, 19 nt, Artificial Sequence
  Description of Artificial Sequence: Synthetic oligonucleotide
  Antisense strand to SEQ ID NO: 2004134
ugucacacagcacucuucu

SEQ ID NO: 2004136 - RNA, 19 nt, Artificial Sequence
  Description of Artificial Sequence: Synthetic oligonucleotide
  Sense strand starting at position 3594 of SEQ ID NO: 1880920
aagagugcugugugacaga

SEQ ID NO: 2004137 - RNA, 19 nt, Artificial Sequence
  Description of Artificial Sequence: Synthetic oligonucleotide
  Antisense strand to SEQ ID NO: 2004136
ucugucacacagcacucuu

SEQ ID NO: 2004138 - RNA, 19 nt, Artificial Sequence
  Description of Artificial Sequence: Synthetic oligonucleotide
  Sense strand starting at position 3599 of SEQ ID NO: 1880920
ugcugugugacagaaauag

SEQ ID NO: 2004139 - RNA, 19 nt, Artificial Sequence
  Description of Artificial Sequence: Synthetic oligonucleotide
  Antisense strand to SEQ ID NO: 2004138
cuauuucugucacacagca

SEQ ID NO: 2004140 - RNA, 19 nt, Artificial Sequence
  Description of Artificial Sequence: Synthetic oligonucleotide
  Sense strand starting at position 3603 of SEQ ID NO: 1880920
gugugacagaaauagugua

SEQ ID NO: 2004141 - RNA, 19 nt, Artificial Sequence
  Description of Artificial Sequence: Synthetic oligonucleotide
  Antisense strand to SEQ ID NO: 2004140
uacacuauuucugucacac

SEQ ID NO: 2004142 - RNA, 19 nt, Artificial Sequence
  Description of Artificial Sequence: Synthetic oligonucleotide
  Sense strand starting at position 3610 of SEQ ID NO: 1880920
agaaauaguguaugaacua

SEQ ID NO: 2004143 - RNA, 19 nt, Artificial Sequence
  Description of Artificial Sequence: Synthetic oligonucleotide
  Antisense strand to SEQ ID NO: 2004142
uaguucauacacuauuucu

SEQ ID NO: 2004144 - RNA, 19 nt, Artificial Sequence
  Description of Artificial Sequence: Synthetic oligonucleotide
  Sense strand starting at position 3617 of SEQ ID NO: 1880920
guguaugaacuauggauag

SEQ ID NO: 2004145 - RNA, 19 nt, Artificial Sequence
  Description of Artificial Sequence: Synthetic oligonucleotide
  Antisense strand to SEQ ID NO: 2004144
cuauccauaguucauacac

SEQ ID NO: 2004146 - RNA, 19 nt, Artificial Sequence
  Description of Artificial Sequence: Synthetic oligonucleotide
  Sense strand starting at position 3677 of SEQ ID NO: 1880920
agaagaaacagcugugucu

SEQ ID NO: 2004147 - RNA, 19 nt, Artificial Sequence
  Description of Artificial Sequence: Synthetic oligonucleotide
  Antisense strand to SEQ ID NO: 2004146
agacacagcuguuucuucu

SEQ ID NO: 2004148 - RNA, 19 nt, Artificial Sequence
  Description of Artificial Sequence: Synthetic oligonucleotide
  Sense strand starting at position 3679 of SEQ ID NO: 1880920
aagaaacagcugugucuua

SEQ ID NO: 2004149 - RNA, 19 nt, Artificial Sequence
  Description of Artificial Sequence: Synthetic oligonucleotide
  Antisense strand to SEQ ID NO: 2004148
uaagacacagcuguuucuu

SEQ ID NO: 2004150 - RNA, 19 nt, Artificial Sequence
  Description of Artificial Sequence: Synthetic oligonucleotide
  Sense strand starting at position 3758 of SEQ ID NO: 1880920
gucaaaguucuggaagcuc

SEQ ID NO: 2004151 - RNA, 19 nt, Artificial Sequence
  Description of Artificial Sequence: Synthetic oligonucleotide
  Antisense strand to SEQ ID NO: 2004150
gagcuuccagaacuuugac

SEQ ID NO: 2004152 - RNA, 19 nt, Artificial Sequence
  Description of Artificial Sequence: Synthetic oligonucleotide
  Sense strand starting at position 3844 of SEQ ID NO: 1880920
gcagauaucugccuucuua

SEQ ID NO: 2004153 - RNA, 19 nt, Artificial Sequence
  Description of Artificial Sequence: Synthetic oligonucleotide
  Antisense strand to SEQ ID NO: 2004152
uaagaaggcagauaucugc

SEQ ID NO: 2004154 - RNA, 19 nt, Artificial Sequence
  Description of Artificial Sequence: Synthetic oligonucleotide
  Sense strand starting at position 3925 of SEQ ID NO: 1880920
ugugaauccuguucucauu

SEQ ID NO: 2004155 - RNA, 19 nt, Artificial Sequence
  Description of Artificial Sequence: Synthetic oligonucleotide
  Antisense strand to SEQ ID NO: 2004154
aaugagaacaggauucaca

SEQ ID NO: 2004156 - RNA, 19 nt, Artificial Sequence
  Description of Artificial Sequence: Synthetic oligonucleotide
  Sense strand starting at position 3931 of SEQ ID NO: 1880920
uccuguucucauuaccuga

SEQ ID NO: 2004157 - RNA, 19 nt, Artificial Sequence
  Description of Artificial Sequence: Synthetic oligonucleotide
  Antisense strand to SEQ ID NO: 2004156
ucagguaaugagaacagga

SEQ ID NO: 2004158 - RNA, 19 nt, Artificial Sequence
  Description of Artificial Sequence: Synthetic oligonucleotide
  Sense strand starting at position 113 of SEQ ID NO: 1880921
caguguaaucaaugggaaa

SEQ ID NO: 2004159 - RNA, 19 nt, Artificial Sequence
  Description of Artificial Sequence: Synthetic oligonucleotide
  Antisense strand to SEQ ID NO: 2004158
uuucccauugauuacacug

SEQ ID NO: 2004160 - RNA, 19 nt, Artificial Sequence
  Description of Artificial Sequence: Synthetic oligonucleotide
  Sense strand starting at position 114 of SEQ ID NO: 1880921
aguguaaucaaugggaaau

SEQ ID NO: 2004161 - RNA, 19 nt, Artificial Sequence
  Description of Artificial Sequence: Synthetic oligonucleotide
  Antisense strand to SEQ ID NO: 2004160
auuucccauugauuacacu

SEQ ID NO: 2004162 - RNA, 19 nt, Artificial Sequence
  Description of Artificial Sequence: Synthetic oligonucleotide
  Sense strand starting at position 115 of SEQ ID NO: 1880921
guguaaucaaugggaaaua

SEQ ID NO: 2004163 - RNA, 19 nt, Artificial Sequence
  Description of Artificial Sequence: Synthetic oligonucleotide
  Antisense strand to SEQ ID NO: 2004162
uauuucccauugauuacac

SEQ ID NO: 2004164 - RNA, 19 nt, Artificial Sequence
  Description of Artificial Sequence: Synthetic oligonucleotide
  Sense strand starting at position 144 of SEQ ID NO: 1880921
agcucuaaugagcauuaaa

SEQ ID NO: 2004165 - RNA, 19 nt, Artificial Sequence
  Description of Artificial Sequence: Synthetic oligonucleotide
  Antisense strand to SEQ ID NO: 2004164
uuuaaugcucauuagagcu

SEQ ID NO: 2004166 - RNA, 19 nt, Artificial Sequence
  Description of Artificial Sequence: Synthetic oligonucleotide
  Sense strand starting at position 162 of SEQ ID NO: 1880921
auggccauucucuauagau

SEQ ID NO: 2004167 - RNA, 19 nt, Artificial Sequence
  Description of Artificial Sequence: Synthetic oligonucleotide
  Antisense strand to SEQ ID NO: 2004166
aucuauagagaauggccau

SEQ ID NO: 2004168 - RNA, 19 nt, Artificial Sequence
  Description of Artificial Sequence: Synthetic oligonucleotide
  Sense strand starting at position 164 of SEQ ID NO: 1880921
ggccauucucuauagauag

SEQ ID NO: 2004169 - RNA, 19 nt, Artificial Sequence
  Description of Artificial Sequence: Synthetic oligonucleotide
  Antisense strand to SEQ ID NO: 2004168
cuaucuauagagaauggcc

SEQ ID NO: 2004170 - RNA, 19 nt, Artificial Sequence
  Description of Artificial Sequence: Synthetic oligonucleotide
  Sense strand starting at position 378 of SEQ ID NO: 1880921
auagauuuaucugaaacag

SEQ ID NO: 2004171 - RNA, 19 nt, Artificial Sequence
  Description of Artificial Sequence: Synthetic oligonucleotide
  Antisense strand to SEQ ID NO: 2004170
cuguuucagauaaaucuau

SEQ ID NO: 2004172 - RNA, 19 nt, Artificial Sequence
  Description of Artificial Sequence: Synthetic oligonucleotide
  Sense strand starting at position 543 of SEQ ID NO: 1880921
gcuacagguuaauuggaaa

SEQ ID NO: 2004173 - RNA, 19 nt, Artificial Sequence
  Description of Artificial Sequence: Synthetic oligonucleotide
  Antisense strand to SEQ ID NO: 2004172
uuuccaauuaaccuguagc

SEQ ID NO: 2004174 - RNA, 19 nt, Artificial Sequence
  Description of Artificial Sequence: Synthetic oligonucleotide
  Sense strand starting at position 571 of SEQ ID NO: 1880921
ucaaguuugaaaggucaug

SEQ ID NO: 2004175 - RNA, 19 nt, Artificial Sequence
  Description of Artificial Sequence: Synthetic oligonucleotide
  Antisense strand to SEQ ID NO: 2004174
caugaccuuucaaacuuga

SEQ ID NO: 2004176 - RNA, 19 nt, Artificial Sequence
  Description of Artificial Sequence: Synthetic oligonucleotide
  Sense strand starting at position 616 of SEQ ID NO: 1880921
uuaggaauauggcuuuaau

SEQ ID NO: 2004177 - RNA, 19 nt, Artificial Sequence
  Description of Artificial Sequence: Synthetic oligonucleotide
  Antisense strand to SEQ ID NO: 2004176
auuaaagccauauuccuaa

SEQ ID NO: 2004178 - RNA, 19 nt, Artificial Sequence
  Description of Artificial Sequence: Synthetic oligonucleotide
  Sense strand starting at position 619 of SEQ ID NO: 1880921
ggaauauggcuuuaaugua

SEQ ID NO: 2004179 - RNA, 19 nt, Artificial Sequence
  Description of Artificial Sequence: Synthetic oligonucleotide
  Antisense strand to SEQ ID NO: 2004178
uacauuaaagccauauucc

SEQ ID NO: 2004180 - RNA, 19 nt, Artificial Sequence
  Description of Artificial Sequence: Synthetic oligonucleotide
  Sense strand starting at position 802 of SEQ ID NO: 1880921
cuggccauaagugagauua

SEQ ID NO: 2004181 - RNA, 19 nt, Artificial Sequence
  Description of Artificial Sequence: Synthetic oligonucleotide
  Antisense strand to SEQ ID NO: 2004180
uaaucucacuuauggccag

SEQ ID NO: 2004182 - RNA, 19 nt, Artificial Sequence
  Description of Artificial Sequence: Synthetic oligonucleotide
  Sense strand starting at position 861 of SEQ ID NO: 1880921
gaggaaaguuaauugcaga

SEQ ID NO: 2004183 - RNA, 19 nt, Artificial Sequence
  Description of Artificial Sequence: Synthetic oligonucleotide
  Antisense strand to SEQ ID NO: 2004182
ucugcaauuaacuuuccuc

SEQ ID NO: 2004184 - RNA, 19 nt, Artificial Sequence
  Description of Artificial Sequence: Synthetic oligonucleotide
  Sense strand starting at position 862 of SEQ ID NO: 1880921
aggaaaguuaauugcagau

SEQ ID NO: 2004185 - RNA, 19 nt, Artificial Sequence
  Description of Artificial Sequence: Synthetic oligonucleotide
  Antisense strand to SEQ ID NO: 2004184
aucugcaauuaacuuuccu

SEQ ID NO: 2004186 - RNA, 19 nt, Artificial Sequence
  Description of Artificial Sequence: Synthetic oligonucleotide
  Sense strand starting at position 951 of SEQ ID NO: 1880921
aaacauuaagcccgaggaa

SEQ ID NO: 2004187 - RNA, 19 nt, Artificial Sequence
  Description of Artificial Sequence: Synthetic oligonucleotide
  Antisense strand to SEQ ID NO: 2004186
uuccucgggcuuaauguuu

SEQ ID NO: 2004188 - RNA, 19 nt, Artificial Sequence
  Description of Artificial Sequence: Synthetic oligonucleotide
  Sense strand starting at position 954 of SEQ ID NO: 1880921
cauuaagcccgaggaaaug

SEQ ID NO: 2004189 - RNA, 19 nt, Artificial Sequence
  Description of Artificial Sequence: Synthetic oligonucleotide
  Antisense strand to SEQ ID NO: 2004188
cauuuccucgggcuuaaug

SEQ ID NO: 2004190 - RNA, 19 nt, Artificial Sequence
  Description of Artificial Sequence: Synthetic oligonucleotide
  Sense strand starting at position 1277 of SEQ ID NO: 1880921
gcacuauuuccagguugug

SEQ ID NO: 2004191 - RNA, 19 nt, Artificial Sequence
  Description of Artificial Sequence: Synthetic oligonucleotide
  Antisense strand to SEQ ID NO: 2004190
cacaaccuggaaauagugc

SEQ ID NO: 2004192 - RNA, 19 nt, Artificial Sequence
  Description of Artificial Sequence: Synthetic oligonucleotide
  Sense strand starting at position 1470 of SEQ ID NO: 1880921
cgaugugauagcuaugaaa

SEQ ID NO: 2004193 - RNA, 19 nt, Artificial Sequence
  Description of Artificial Sequence: Synthetic oligonucleotide
  Antisense strand to SEQ ID NO: 2004192
uuucauagcuaucacaucg

SEQ ID NO: 2004194 - RNA, 19 nt, Artificial Sequence
  Description of Artificial Sequence: Synthetic oligonucleotide
  Sense strand starting at position 1481 of SEQ ID NO: 1880921
cuaugaaagucauuggauu

SEQ ID NO: 2004195 - RNA, 19 nt, Artificial Sequence
  Description of Artificial Sequence: Synthetic oligonucleotide
  Antisense strand to SEQ ID NO: 2004194
aauccaaugacuuucauag

SEQ ID NO: 2004196 - RNA, 19 nt, Artificial Sequence
  Description of Artificial Sequence: Synthetic oligonucleotide
  Sense strand starting at position 1482 of SEQ ID NO: 1880921
uaugaaagucauuggauua

SEQ ID NO: 2004197 - RNA, 19 nt, Artificial Sequence
  Description of Artificial Sequence: Synthetic oligonucleotide
  Antisense strand to SEQ ID NO: 2004196
uaauccaaugacuuucaua

SEQ ID NO: 2004198 - RNA, 19 nt, Artificial Sequence
  Description of Artificial Sequence: Synthetic oligonucleotide
  Sense strand starting at position 2124 of SEQ ID NO: 1880921
ucuguaucuguuuaaauag

SEQ ID NO: 2004199 - RNA, 19 nt, Artificial Sequence
  Description of Artificial Sequence: Synthetic oligonucleotide
  Antisense strand to SEQ ID NO: 2004198
cuauuuaaacagauacaga

SEQ ID NO: 2004200 - RNA, 19 nt, Artificial Sequence
  Description of Artificial Sequence: Synthetic oligonucleotide
  Sense strand starting at position 2149 of SEQ ID NO: 1880921
ggcagacuuuagguagaac

SEQ ID NO: 2004201 - RNA, 19 nt, Artificial Sequence
  Description of Artificial Sequence: Synthetic oligonucleotide
  Antisense strand to SEQ ID NO: 2004200
guucuaccuaaagucugcc

SEQ ID NO: 2004202 - RNA, 19 nt, Artificial Sequence
  Description of Artificial Sequence: Synthetic oligonucleotide
  Sense strand starting at position 2200 of SEQ ID NO: 1880921
ggcugucagguagaagaua

SEQ ID NO: 2004203 - RNA, 19 nt, Artificial Sequence
  Description of Artificial Sequence: Synthetic oligonucleotide
  Antisense strand to SEQ ID NO: 2004202
uaucuucuaccugacagcc

SEQ ID NO: 2004204 - RNA, 19 nt, Artificial Sequence
  Description of Artificial Sequence: Synthetic oligonucleotide
  Sense strand starting at position 2228 of SEQ ID NO: 1880921
gugaaaccuugauuaauua

SEQ ID NO: 2004205 - RNA, 19 nt, Artificial Sequence
  Description of Artificial Sequence: Synthetic oligonucleotide
  Antisense strand to SEQ ID NO: 2004204
uaauuaaucaagguuucac

SEQ ID NO: 2004206 - RNA, 19 nt, Artificial Sequence
  Description of Artificial Sequence: Synthetic oligonucleotide
  Sense strand starting at position 2235 of SEQ ID NO: 1880921
cuugauuaauuagugaaag

SEQ ID NO: 2004207 - RNA, 19 nt, Artificial Sequence
  Description of Artificial Sequence: Synthetic oligonucleotide
  Antisense strand to SEQ ID NO: 2004206
cuuucacuaauuaaucaag

SEQ ID NO: 2004208 - RNA, 19 nt, Artificial Sequence
  Description of Artificial Sequence: Synthetic oligonucleotide
  Sense strand starting at position 2534 of SEQ ID NO: 1880921
gcuugaggugcagagauaa

SEQ ID NO: 2004209 - RNA, 19 nt, Artificial Sequence
  Description of Artificial Sequence: Synthetic oligonucleotide
  Antisense strand to SEQ ID NO: 2004208
uuaucucugcaccucaagc

SEQ ID NO: 2004210 - RNA, 19 nt, Artificial Sequence
  Description of Artificial Sequence: Synthetic oligonucleotide
  Sense strand starting at position 2607 of SEQ ID NO: 1880921
aaggguaugguuuggagaa

SEQ ID NO: 2004211 - RNA, 19 nt, Artificial Sequence
  Description of Artificial Sequence: Synthetic oligonucleotide
  Antisense strand to SEQ ID NO: 2004210
uucuccaaaccauacccuu

SEQ ID NO: 2004212 - RNA, 19 nt, Artificial Sequence
  Description of Artificial Sequence: Synthetic oligonucleotide
  Sense strand starting at position 2697 of SEQ ID NO: 1880921
cagacaaggugagcauuau

SEQ ID NO: 2004213 - RNA, 19 nt, Artificial Sequence
  Description of Artificial Sequence: Synthetic oligonucleotide
  Antisense strand to SEQ ID NO: 2004212
auaaugcucaccuugucug

SEQ ID NO: 2004214 - RNA, 19 nt, Artificial Sequence
  Description of Artificial Sequence: Synthetic oligonucleotide
  Sense strand starting at position 2770 of SEQ ID NO: 1880921
gugucauuuguccaagugu

SEQ ID NO: 2004215 - RNA, 19 nt, Artificial Sequence
  Description of Artificial Sequence: Synthetic oligonucleotide
  Antisense strand to SEQ ID NO: 2004214
acacuuggacaaaugacac

SEQ ID NO: 2004216 - RNA, 19 nt, Artificial Sequence
  Description of Artificial Sequence: Synthetic oligonucleotide
  Sense strand starting at position 3314 of SEQ ID NO: 1880921
ggcaacgucagauauagaa

SEQ ID NO: 2004217 - RNA, 19 nt, Artificial Sequence
  Description of Artificial Sequence: Synthetic oligonucleotide
  Antisense strand to SEQ ID NO: 2004216
uucuauaucugacguugcc

SEQ ID NO: 2004218 - RNA, 19 nt, Artificial Sequence
  Description of Artificial Sequence: Synthetic oligonucleotide
  Sense strand starting at position 3476 of SEQ ID NO: 1880921
guaagagaguguucagaaa

SEQ ID NO: 2004219 - RNA, 19 nt, Artificial Sequence
  Description of Artificial Sequence: Synthetic oligonucleotide
  Antisense strand to SEQ ID NO: 2004218
uuucugaacacucucuuac

SEQ ID NO: 2004220 - RNA, 19 nt, Artificial Sequence
  Description of Artificial Sequence: Synthetic oligonucleotide
  Sense strand starting at position 3611 of SEQ ID NO: 1880921
ccacauaugcacugaggaa

SEQ ID NO: 2004221 - RNA, 19 nt, Artificial Sequence
  Description of Artificial Sequence: Synthetic oligonucleotide
  Antisense strand to SEQ ID NO: 2004220
uuccucagugcauaugugg

SEQ ID NO: 2004222 - RNA, 19 nt, Artificial Sequence
  Description of Artificial Sequence: Synthetic oligonucleotide
  Sense strand starting at position 3623 of SEQ ID NO: 1880921
ugaggaaauuccucuucuc

SEQ ID NO: 2004223 - RNA, 19 nt, Artificial Sequence
  Description of Artificial Sequence: Synthetic oligonucleotide
  Antisense strand to SEQ ID NO: 2004222
gagaagaggaauuuccuca

SEQ ID NO: 2004224 - RNA, 19 nt, Artificial Sequence
  Description of Artificial Sequence: Synthetic oligonucleotide
  Sense strand starting at position 3626 of SEQ ID NO: 1880921
ggaaauuccucuucucuga

SEQ ID NO: 2004225 - RNA, 19 nt, Artificial Sequence
  Description of Artificial Sequence: Synthetic oligonucleotide
  Antisense strand to SEQ ID NO: 2004224
ucagagaagaggaauuucc

SEQ ID NO: 2004226 - RNA, 19 nt, Artificial Sequence
  Description of Artificial Sequence: Synthetic oligonucleotide
  Sense strand starting at position 3725 of SEQ ID NO: 1880921
uguuaaacucuguggaaga

SEQ ID NO: 2004227 - RNA, 19 nt, Artificial Sequence
  Description of Artificial Sequence: Synthetic oligonucleotide
  Antisense strand to SEQ ID NO: 2004226
ucuuccacagaguuuaaca

SEQ ID NO: 2004228 - RNA, 19 nt, Artificial Sequence
  Description of Artificial Sequence: Synthetic oligonucleotide
  Sense strand starting at position 3738 of SEQ ID NO: 1880921
ggaagaauagacggcuuca

SEQ ID NO: 2004229 - RNA, 19 nt, Artificial Sequence
  Description of Artificial Sequence: Synthetic oligonucleotide
  Antisense strand to SEQ ID NO: 2004228
ugaagccgucuauucuucc

SEQ ID NO: 2004230 - RNA, 19 nt, Artificial Sequence
  Description of Artificial Sequence: Synthetic oligonucleotide
  Sense strand starting at position 3935 of SEQ ID NO: 1880921
ggugaaaguggacggaaua

SEQ ID NO: 2004231 - RNA, 19 nt, Artificial Sequence
  Description of Artificial Sequence: Synthetic oligonucleotide
  Antisense strand to SEQ ID NO: 2004230
uauuccguccacuuucacc

SEQ ID NO: 2004232 - RNA, 19 nt, Artificial Sequence
  Description of Artificial Sequence: Synthetic oligonucleotide
  Sense strand starting at position 3936 of SEQ ID NO: 1880921
gugaaaguggacggaauau

SEQ ID NO: 2004233 - RNA, 19 nt, Artificial Sequence
  Description of Artificial Sequence: Synthetic oligonucleotide
  Antisense strand to SEQ ID NO: 2004232
auauuccguccacuuucac

SEQ ID NO: 2004234 - RNA, 19 nt, Artificial Sequence
  Description of Artificial Sequence: Synthetic oligonucleotide
  Sense strand starting at position 3947 of SEQ ID NO: 1880921
cggaauaucauaggaguau

SEQ ID NO: 2004235 - RNA, 19 nt, Artificial Sequence
  Description of Artificial Sequence: Synthetic oligonucleotide
  Antisense strand to SEQ ID NO: 2004234
auacuccuaugauauuccg

SEQ ID NO: 2004236 - RNA, 19 nt, Artificial Sequence
  Description of Artificial Sequence: Synthetic oligonucleotide
  Sense strand starting at position 3956 of SEQ ID NO: 1880921
auaggaguaucuccuauga

SEQ ID NO: 2004237 - RNA, 19 nt, Artificial Sequence
  Description of Artificial Sequence: Synthetic oligonucleotide
  Antisense strand to SEQ ID NO: 2004236
ucauaggagauacuccuau

SEQ ID NO: 2004238 - RNA, 19 nt, Artificial Sequence
  Description of Artificial Sequence: Synthetic oligonucleotide
  Sense strand starting at position 128 of SEQ ID NO: 1880922
ccgccaaugccggauuuau

SEQ ID NO: 2004239 - RNA, 19 nt, Artificial Sequence
  Description of Artificial Sequence: Synthetic oligonucleotide
  Antisense strand to SEQ ID NO: 2004238
auaaauccggcauuggcgg

SEQ ID NO: 2004240 - RNA, 19 nt, Artificial Sequence
  Description of Artificial Sequence: Synthetic oligonucleotide
  Sense strand starting at position 137 of SEQ ID NO: 1880922
ccggauuuaucgcuccacu

SEQ ID NO: 2004241 - RNA, 19 nt, Artificial Sequence
  Description of Artificial Sequence: Synthetic oligonucleotide
  Antisense strand to SEQ ID NO: 2004240
aguggagcgauaaauccgg

SEQ ID NO: 2004242 - RNA, 19 nt, Artificial Sequence
  Description of Artificial Sequence: Synthetic oligonucleotide
  Sense strand starting at position 140 of SEQ ID NO: 1880922
gauuuaucgcuccacuguu

SEQ ID NO: 2004243 - RNA, 19 nt, Artificial Sequence
  Description of Artificial Sequence: Synthetic oligonucleotide
  Antisense strand to SEQ ID NO: 2004242
aacaguggagcgauaaauc

SEQ ID NO: 2004244 - RNA, 19 nt, Artificial Sequence
  Description of Artificial Sequence: Synthetic oligonucleotide
  Sense strand starting at position 240 of SEQ ID NO: 1880922
cuacaaaggcuaugucaau

SEQ ID NO: 2004245 - RNA, 19 nt, Artificial Sequence
  Description of Artificial Sequence: Synthetic oligonucleotide
  Antisense strand to SEQ ID NO: 2004244
auugacauagccuuuguag

SEQ ID NO: 2004246 - RNA, 19 nt, Artificial Sequence
  Description of Artificial Sequence: Synthetic oligonucleotide
  Sense strand starting at position 246 of SEQ ID NO: 1880922
aggcuaugucaauaccaac

SEQ ID NO: 2004247 - RNA, 19 nt, Artificial Sequence
  Description of Artificial Sequence: Synthetic oligonucleotide
  Antisense strand to SEQ ID NO: 2004246
guugguauugacauagccu

SEQ ID NO: 2004248 - RNA, 19 nt, Artificial Sequence
  Description of Artificial Sequence: Synthetic oligonucleotide
  Sense strand starting at position 348 of SEQ ID NO: 1880922
ccgcuucuagaagacuuaa

SEQ ID NO: 2004249 - RNA, 19 nt, Artificial Sequence
  Description of Artificial Sequence: Synthetic oligonucleotide
  Antisense strand to SEQ ID NO: 2004248
uuaagucuucuagaagcgg

SEQ ID NO: 2004250 - RNA, 19 nt, Artificial Sequence
  Description of Artificial Sequence: Synthetic oligonucleotide
  Sense strand starting at position 420 of SEQ ID NO: 1880922
cguuaaauaucagcuagaa

SEQ ID NO: 2004251 - RNA, 19 nt, Artificial Sequence
  Description of Artificial Sequence: Synthetic oligonucleotide
  Antisense strand to SEQ ID NO: 2004250
uucuagcugauauuuaacg

SEQ ID NO: 2004252 - RNA, 19 nt, Artificial Sequence
  Description of Artificial Sequence: Synthetic oligonucleotide
  Sense strand starting at position 589 of SEQ ID NO: 1880922
ggaagucaguuuccaaacu

SEQ ID NO: 2004253 - RNA, 19 nt, Artificial Sequence
  Description of Artificial Sequence: Synthetic oligonucleotide
  Antisense strand to SEQ ID NO: 2004252
aguuuggaaacugacuucc

SEQ ID NO: 2004254 - RNA, 19 nt, Artificial Sequence
  Description of Artificial Sequence: Synthetic oligonucleotide
  Sense strand starting at position 597 of SEQ ID NO: 1880922
guuuccaaacucggagaaa

SEQ ID NO: 2004255 - RNA, 19 nt, Artificial Sequence
  Description of Artificial Sequence: Synthetic oligonucleotide
  Antisense strand to SEQ ID NO: 2004254
uuucuccgaguuuggaaac

SEQ ID NO: 2004256 - RNA, 19 nt, Artificial Sequence
  Description of Artificial Sequence: Synthetic oligonucleotide
  Sense strand starting at position 610 of SEQ ID NO: 1880922
gagaaaguuacuggaguug

SEQ ID NO: 2004257 - RNA, 19 nt, Artificial Sequence
  Description of Artificial Sequence: Synthetic oligonucleotide
  Antisense strand to SEQ ID NO: 2004256
caacuccaguaacuuucuc

SEQ ID NO: 2004258 - RNA, 19 nt, Artificial Sequence
  Description of Artificial Sequence: Synthetic oligonucleotide
  Sense strand starting at position 1171 of SEQ ID NO: 1880922
cuucuugcgcugccaaaua

SEQ ID NO: 2004259 - RNA, 19 nt, Artificial Sequence
  Description of Artificial Sequence: Synthetic oligonucleotide
  Antisense strand to SEQ ID NO: 2004258
uauuuggcagcgcaagaag

SEQ ID NO: 2004260 - RNA, 19 nt, Artificial Sequence
  Description of Artificial Sequence: Synthetic oligonucleotide
  Sense strand starting at position 1330 of SEQ ID NO: 1880922
aagggugguccuugacuuu

SEQ ID NO: 2004261 - RNA, 19 nt, Artificial Sequence
  Description of Artificial Sequence: Synthetic oligonucleotide
  Antisense strand to SEQ ID NO: 2004260
aaagucaaggaccacccuu

SEQ ID NO: 2004262 - RNA, 19 nt, Artificial Sequence
  Description of Artificial Sequence: Synthetic oligonucleotide
  Sense strand starting at position 1986 of SEQ ID NO: 1880922
uguguacgucaaguuugua

SEQ ID NO: 2004263 - RNA, 19 nt, Artificial Sequence
  Description of Artificial Sequence: Synthetic oligonucleotide
  Antisense strand to SEQ ID NO: 2004262
uacaaacuugacguacaca

SEQ ID NO: 2004264 - RNA, 19 nt, Artificial Sequence
  Description of Artificial Sequence: Synthetic oligonucleotide
  Sense strand starting at position 2061 of SEQ ID NO: 1880922
ccagcaguuguauaaauau

SEQ ID NO: 2004265 - RNA, 19 nt, Artificial Sequence
  Description of Artificial Sequence: Synthetic oligonucleotide
  Antisense strand to SEQ ID NO: 2004264
auauuuauacaacugcugg

SEQ ID NO: 2004266 - RNA, 19 nt, Artificial Sequence
  Description of Artificial Sequence: Synthetic oligonucleotide
  Sense strand starting at position 2172 of SEQ ID NO: 1880922
gacuaccuggacugugaua

SEQ ID NO: 2004267 - RNA, 19 nt, Artificial Sequence
  Description of Artificial Sequence: Synthetic oligonucleotide
  Antisense strand to SEQ ID NO: 2004266
uaucacaguccagguaguc

SEQ ID NO: 2004268 - RNA, 19 nt, Artificial Sequence
  Description of Artificial Sequence: Synthetic oligonucleotide
  Sense strand starting at position 2174 of SEQ ID NO: 1880922
cuaccuggacugugauaac

SEQ ID NO: 2004269 - RNA, 19 nt, Artificial Sequence
  Description of Artificial Sequence: Synthetic oligonucleotide
  Antisense strand to SEQ ID NO: 2004268
guuaucacaguccagguag

SEQ ID NO: 2004270 - RNA, 19 nt, Artificial Sequence
  Description of Artificial Sequence: Synthetic oligonucleotide
  Sense strand starting at position 2323 of SEQ ID NO: 1880922
gucuuccuucuggaaguua

SEQ ID NO: 2004271 - RNA, 19 nt, Artificial Sequence
  Description of Artificial Sequence: Synthetic oligonucleotide
  Antisense strand to SEQ ID NO: 2004270
uaacuuccagaaggaagac

SEQ ID NO: 2004272 - RNA, 19 nt, Artificial Sequence
  Description of Artificial Sequence: Synthetic oligonucleotide
  Sense strand starting at position 2410 of SEQ ID NO: 1880922
aggagucuuccaggaaauc

SEQ ID NO: 2004273 - RNA, 19 nt, Artificial Sequence
  Description of Artificial Sequence: Synthetic oligonucleotide
  Antisense strand to SEQ ID NO: 2004272
gauuuccuggaagacuccu

SEQ ID NO: 2004274 - RNA, 19 nt, Artificial Sequence
  Description of Artificial Sequence: Synthetic oligonucleotide
  Sense strand starting at position 2440 of SEQ ID NO: 1880922
accagagucuaccagauuu

SEQ ID NO: 2004275 - RNA, 19 nt, Artificial Sequence
  Description of Artificial Sequence: Synthetic oligonucleotide
  Antisense strand to SEQ ID NO: 2004274
aaaucugguagacucuggu

SEQ ID NO: 2004276 - RNA, 19 nt, Artificial Sequence
  Description of Artificial Sequence: Synthetic oligonucleotide
  Sense strand starting at position 2872 of SEQ ID NO: 1880922
cuucuuuggagguguauau

SEQ ID NO: 2004277 - RNA, 19 nt, Artificial Sequence
  Description of Artificial Sequence: Synthetic oligonucleotide
  Antisense strand to SEQ ID NO: 2004276
auauacaccuccaaagaag

SEQ ID NO: 2004278 - RNA, 19 nt, Artificial Sequence
  Description of Artificial Sequence: Synthetic oligonucleotide
  Sense strand starting at position 2876 of SEQ ID NO: 1880922
uuuggagguguauauaauu

SEQ ID NO: 2004279 - RNA, 19 nt, Artificial Sequence
  Description of Artificial Sequence: Synthetic oligonucleotide
  Antisense strand to SEQ ID NO: 2004278
aauuauauacaccuccaaa

SEQ ID NO: 2004280 - RNA, 19 nt, Artificial Sequence
  Description of Artificial Sequence: Synthetic oligonucleotide
  Sense strand starting at position 2976 of SEQ ID NO: 1880922
cugagagucucucuuauga

SEQ ID NO: 2004281 - RNA, 19 nt, Artificial Sequence
  Description of Artificial Sequence: Synthetic oligonucleotide
  Antisense strand to SEQ ID NO: 2004280
ucauaagagagacucucag

SEQ ID NO: 2004282 - RNA, 19 nt, Artificial Sequence
  Description of Artificial Sequence: Synthetic oligonucleotide
  Sense strand starting at position 3001 of SEQ ID NO: 1880922
guacguucucccuuguauc

SEQ ID NO: 2004283 - RNA, 19 nt, Artificial Sequence
  Description of Artificial Sequence: Synthetic oligonucleotide
  Antisense strand to SEQ ID NO: 2004282
gauacaagggagaacguac

SEQ ID NO: 2004284 - RNA, 19 nt, Artificial Sequence
  Description of Artificial Sequence: Synthetic oligonucleotide
  Sense strand starting at position 3118 of SEQ ID NO: 1880922
cuuagcauauauguuugaa

SEQ ID NO: 2004285 - RNA, 19 nt, Artificial Sequence
  Description of Artificial Sequence: Synthetic oligonucleotide
  Antisense strand to SEQ ID NO: 2004284
uucaaacauauaugcuaag

SEQ ID NO: 2004286 - RNA, 19 nt, Artificial Sequence
  Description of Artificial Sequence: Synthetic oligonucleotide
  Sense strand starting at position 3207 of SEQ ID NO: 1880922
uuggcaucacauugauaug

SEQ ID NO: 2004287 - RNA, 19 nt, Artificial Sequence
  Description of Artificial Sequence: Synthetic oligonucleotide
  Antisense strand to SEQ ID NO: 2004286
cauaucaaugugaugccaa

SEQ ID NO: 2004288 - RNA, 19 nt, Artificial Sequence
  Description of Artificial Sequence: Synthetic oligonucleotide
  Sense strand starting at position 3359 of SEQ ID NO: 1880922
cuuugagagcuggagacuu

SEQ ID NO: 2004289 - RNA, 19 nt, Artificial Sequence
  Description of Artificial Sequence: Synthetic oligonucleotide
  Antisense strand to SEQ ID NO: 2004288
aagucuccagcucucaaag

SEQ ID NO: 2004290 - RNA, 19 nt, Artificial Sequence
  Description of Artificial Sequence: Synthetic oligonucleotide
  Sense strand starting at position 3367 of SEQ ID NO: 1880922
gcuggagacuugcucaaga

SEQ ID NO: 2004291 - RNA, 19 nt, Artificial Sequence
  Description of Artificial Sequence: Synthetic oligonucleotide
  Antisense strand to SEQ ID NO: 2004290
ucuugagcaagucuccagc

SEQ ID NO: 2004292 - RNA, 19 nt, Artificial Sequence
  Description of Artificial Sequence: Synthetic oligonucleotide
  Sense strand starting at position 3433 of SEQ ID NO: 1880922
ugauccaugugcuuaacca

SEQ ID NO: 2004293 - RNA, 19 nt, Artificial Sequence
  Description of Artificial Sequence: Synthetic oligonucleotide
  Antisense strand to SEQ ID NO: 2004292
ugguuaagcacauggauca

SEQ ID NO: 2004294 - RNA, 19 nt, Artificial Sequence
  Description of Artificial Sequence: Synthetic oligonucleotide
  Sense strand starting at position 3437 of SEQ ID NO: 1880922
ccaugugcuuaaccauaga

SEQ ID NO: 2004295 - RNA, 19 nt, Artificial Sequence
  Description of Artificial Sequence: Synthetic oligonucleotide
  Antisense strand to SEQ ID NO: 2004294
ucuaugguuaagcacaugg

SEQ ID NO: 2004296 - RNA, 19 nt, Artificial Sequence
  Description of Artificial Sequence: Synthetic oligonucleotide
  Sense strand starting at position 3440 of SEQ ID NO: 1880922
ugugcuuaaccauagacca

SEQ ID NO: 2004297 - RNA, 19 nt, Artificial Sequence
  Description of Artificial Sequence: Synthetic oligonucleotide
  Antisense strand to SEQ ID NO: 2004296
uggucuaugguuaagcaca

SEQ ID NO: 2004298 - RNA, 19 nt, Artificial Sequence
  Description of Artificial Sequence: Synthetic oligonucleotide
  Sense strand starting at position 3455 of SEQ ID NO: 1880922
accagagacugauccuguu

SEQ ID NO: 2004299 - RNA, 19 nt, Artificial Sequence
  Description of Artificial Sequence: Synthetic oligonucleotide
  Antisense strand to SEQ ID NO: 2004298
aacaggaucagucucuggu

SEQ ID NO: 2004300 - RNA, 19 nt, Artificial Sequence
  Description of Artificial Sequence: Synthetic oligonucleotide
  Sense strand starting at position 3467 of SEQ ID NO: 1880922
uccuguucuccugaagaga

SEQ ID NO: 2004301 - RNA, 19 nt, Artificial Sequence
  Description of Artificial Sequence: Synthetic oligonucleotide
  Antisense strand to SEQ ID NO: 2004300
ucucuucaggagaacagga

SEQ ID NO: 2004302 - RNA, 19 nt, Artificial Sequence
  Description of Artificial Sequence: Synthetic oligonucleotide
  Sense strand starting at position 3660 of SEQ ID NO: 1880922
ggcucuuucccaggacuca

SEQ ID NO: 2004303 - RNA, 19 nt, Artificial Sequence
  Description of Artificial Sequence: Synthetic oligonucleotide
  Antisense strand to SEQ ID NO: 2004302
ugaguccugggaaagagcc

SEQ ID NO: 2004304 - RNA, 19 nt, Artificial Sequence
  Description of Artificial Sequence: Synthetic oligonucleotide
  Sense strand starting at position 3661 of SEQ ID NO: 1880922
gcucuuucccaggacucau

SEQ ID NO: 2004305 - RNA, 19 nt, Artificial Sequence
  Description of Artificial Sequence: Synthetic oligonucleotide
  Antisense strand to SEQ ID NO: 2004304
augaguccugggaaagagc

SEQ ID NO: 2004306 - RNA, 19 nt, Artificial Sequence
  Description of Artificial Sequence: Synthetic oligonucleotide
  Sense strand starting at position 3672 of SEQ ID NO: 1880922
ggacucaugucucugauag

SEQ ID NO: 2004307 - RNA, 19 nt, Artificial Sequence
  Description of Artificial Sequence: Synthetic oligonucleotide
  Antisense strand to SEQ ID NO: 2004306
cuaucagagacaugagucc

SEQ ID NO: 2004308 - RNA, 19 nt, Artificial Sequence
  Description of Artificial Sequence: Synthetic oligonucleotide
  Sense strand starting at position 3673 of SEQ ID NO: 1880922
gacucaugucucugauagg

SEQ ID NO: 2004309 - RNA, 19 nt, Artificial Sequence
  Description of Artificial Sequence: Synthetic oligonucleotide
  Antisense strand to SEQ ID NO: 2004308
ccuaucagagacaugaguc

SEQ ID NO: 2004310 - RNA, 19 nt, Artificial Sequence
  Description of Artificial Sequence: Synthetic oligonucleotide
  Sense strand starting at position 3703 of SEQ ID NO: 1880922
gugauaugcucucugauuu

SEQ ID NO: 2004311 - RNA, 19 nt, Artificial Sequence
  Description of Artificial Sequence: Synthetic oligonucleotide
  Antisense strand to SEQ ID NO: 2004310
aaaucagagagcauaucac

SEQ ID NO: 2004312 - RNA, 19 nt, Artificial Sequence
  Description of Artificial Sequence: Synthetic oligonucleotide
  Sense strand starting at position 3735 of SEQ ID NO: 1880922
accagaguuguguauugaa

SEQ ID NO: 2004313 - RNA, 19 nt, Artificial Sequence
  Description of Artificial Sequence: Synthetic oligonucleotide
  Antisense strand to SEQ ID NO: 2004312
uucaauacacaacucuggu

SEQ ID NO: 2004314 - RNA, 19 nt, Artificial Sequence
  Description of Artificial Sequence: Synthetic oligonucleotide
  Sense strand starting at position 3862 of SEQ ID NO: 1880922
gaaucauguggagagcuuu

SEQ ID NO: 2004315 - RNA, 19 nt, Artificial Sequence
  Description of Artificial Sequence: Synthetic oligonucleotide
  Antisense strand to SEQ ID NO: 2004314
aaagcucuccacaugauuc

SEQ ID NO: 2004316 - RNA, 19 nt, Artificial Sequence
  Description of Artificial Sequence: Synthetic oligonucleotide
  Sense strand starting at position 3920 of SEQ ID NO: 1880922
aauucugaaucugugagua

SEQ ID NO: 2004317 - RNA, 19 nt, Artificial Sequence
  Description of Artificial Sequence: Synthetic oligonucleotide
  Antisense strand to SEQ ID NO: 2004316
uacucacagauucagaauu

SEQ ID NO: 2004318 - RNA, 19 nt, Artificial Sequence
  Description of Artificial Sequence: Synthetic oligonucleotide
  Sense strand starting at position 17 of SEQ ID NO: 1880923
ggaguucuguucuuuguag

SEQ ID NO: 2004319 - RNA, 19 nt, Artificial Sequence
  Description of Artificial Sequence: Synthetic oligonucleotide
  Antisense strand to SEQ ID NO: 2004318
cuacaaagaacagaacucc

SEQ ID NO: 2004320 - RNA, 19 nt, Artificial Sequence
  Description of Artificial Sequence: Synthetic oligonucleotide
  Sense strand starting at position 18 of SEQ ID NO: 1880923
gaguucuguucuuuguagu

SEQ ID NO: 2004321 - RNA, 19 nt, Artificial Sequence
  Description of Artificial Sequence: Synthetic oligonucleotide
  Antisense strand to SEQ ID NO: 2004320
acuacaaagaacagaacuc

SEQ ID NO: 2004322 - RNA, 19 nt, Artificial Sequence
  Description of Artificial Sequence: Synthetic oligonucleotide
  Sense strand starting at position 24 of SEQ ID NO: 1880923
uguucuuuguagucacuga

SEQ ID NO: 2004323 - RNA, 19 nt, Artificial Sequence
  Description of Artificial Sequence: Synthetic oligonucleotide
  Antisense strand to SEQ ID NO: 2004322
ucagugacuacaaagaaca

SEQ ID NO: 2004324 - RNA, 19 nt, Artificial Sequence
  Description of Artificial Sequence: Synthetic oligonucleotide
  Sense strand starting at position 48 of SEQ ID NO: 1880923
ucucauuccuuaggucuua

SEQ ID NO: 2004325 - RNA, 19 nt, Artificial Sequence
  Description of Artificial Sequence: Synthetic oligonucleotide
  Antisense strand to SEQ ID NO: 2004324
uaagaccuaaggaaugaga

SEQ ID NO: 2004326 - RNA, 19 nt, Artificial Sequence
  Description of Artificial Sequence: Synthetic oligonucleotide
  Sense strand starting at position 26 of SEQ ID NO: 1880924
uguugaaaguuacugggua

SEQ ID NO: 2004327 - RNA, 19 nt, Artificial Sequence
  Description of Artificial Sequence: Synthetic oligonucleotide
  Antisense strand to SEQ ID NO: 2004326
uacccaguaacuuucaaca

SEQ ID NO: 2004328 - RNA, 19 nt, Artificial Sequence
  Description of Artificial Sequence: Synthetic oligonucleotide
  Sense strand starting at position 28 of SEQ ID NO: 1880924
uugaaaguuacuggguaaa

SEQ ID NO: 2004329 - RNA, 19 nt, Artificial Sequence
  Description of Artificial Sequence: Synthetic oligonucleotide
  Antisense strand to SEQ ID NO: 2004328
uuuacccaguaacuuucaa

SEQ ID NO: 2004330 - RNA, 19 nt, Artificial Sequence
  Description of Artificial Sequence: Synthetic oligonucleotide
  Sense strand starting at position 121 of SEQ ID NO: 1880924
guacaugauuacuucugaa

SEQ ID NO: 2004331 - RNA, 19 nt, Artificial Sequence
  Description of Artificial Sequence: Synthetic oligonucleotide
  Antisense strand to SEQ ID NO: 2004330
uucagaaguaaucauguac

SEQ ID NO: 2004332 - RNA, 19 nt, Artificial Sequence
  Description of Artificial Sequence: Synthetic oligonucleotide
  Sense strand starting at position 763 of SEQ ID NO: 1880924
agucucauguaauucucaa

SEQ ID NO: 2004333 - RNA, 19 nt, Artificial Sequence
  Description of Artificial Sequence: Synthetic oligonucleotide
  Antisense strand to SEQ ID NO: 2004332
uugagaauuacaugagacu

SEQ ID NO: 2004334 - RNA, 19 nt, Artificial Sequence
  Description of Artificial Sequence: Synthetic oligonucleotide
  Sense strand starting at position 948 of SEQ ID NO: 1880924
ugggacuccugauuaaauu

SEQ ID NO: 2004335 - RNA, 19 nt, Artificial Sequence
  Description of Artificial Sequence: Synthetic oligonucleotide
  Antisense strand to SEQ ID NO: 2004334
aauuuaaucaggaguccca

SEQ ID NO: 2004336 - RNA, 19 nt, Artificial Sequence
  Description of Artificial Sequence: Synthetic oligonucleotide
  Sense strand starting at position 979 of SEQ ID NO: 1880924
gcacuuugggaagauucuu

SEQ ID NO: 2004337 - RNA, 19 nt, Artificial Sequence
  Description of Artificial Sequence: Synthetic oligonucleotide
  Antisense strand to SEQ ID NO: 2004336
aagaaucuucccaaagugc

SEQ ID NO: 2004338 - RNA, 19 nt, Artificial Sequence
  Description of Artificial Sequence: Synthetic oligonucleotide
  Sense strand starting at position 985 of SEQ ID NO: 1880924
ugggaagauucuuuccucu

SEQ ID NO: 2004339 - RNA, 19 nt, Artificial Sequence
  Description of Artificial Sequence: Synthetic oligonucleotide
  Antisense strand to SEQ ID NO: 2004338
agaggaaagaaucuuccca

SEQ ID NO: 2004340 - RNA, 19 nt, Artificial Sequence
  Description of Artificial Sequence: Synthetic oligonucleotide
  Sense strand starting at position 1216 of SEQ ID NO: 1880924
ggaagaccuuucccuguca

SEQ ID NO: 2004341 - RNA, 19 nt, Artificial Sequence
  Description of Artificial Sequence: Synthetic oligonucleotide
  Antisense strand to SEQ ID NO: 2004340
ugacagggaaaggucuucc

SEQ ID NO: 2004342 - RNA, 19 nt, Artificial Sequence
  Description of Artificial Sequence: Synthetic oligonucleotide
  Sense strand starting at position 1976 of SEQ ID NO: 1880924
cgcuuaggucaagaagacu

SEQ ID NO: 2004343 - RNA, 19 nt, Artificial Sequence
  Description of Artificial Sequence: Synthetic oligonucleotide
  Antisense strand to SEQ ID NO: 2004342
agucuucuugaccuaagcg

SEQ ID NO: 2004344 - RNA, 19 nt, Artificial Sequence
  Description of Artificial Sequence: Synthetic oligonucleotide
  Sense strand starting at position 2009 of SEQ ID NO: 1880924
ggagaauucccagggcuuu

SEQ ID NO: 2004345 - RNA, 19 nt, Artificial Sequence
  Description of Artificial Sequence: Synthetic oligonucleotide
  Antisense strand to SEQ ID NO: 2004344
aaagcccugggaauucucc

SEQ ID NO: 2004346 - RNA, 19 nt, Artificial Sequence
  Description of Artificial Sequence: Synthetic oligonucleotide
  Sense strand starting at position 2438 of SEQ ID NO: 1880924
uguagaaugccgggaguga

SEQ ID NO: 2004347 - RNA, 19 nt, Artificial Sequence
  Description of Artificial Sequence: Synthetic oligonucleotide
  Antisense strand to SEQ ID NO: 2004346
ucacucccggcauucuaca

SEQ ID NO: 2004348 - RNA, 19 nt, Artificial Sequence
  Description of Artificial Sequence: Synthetic oligonucleotide
  Sense strand starting at position 2439 of SEQ ID NO: 1880924
guagaaugccgggagugau

SEQ ID NO: 2004349 - RNA, 19 nt, Artificial Sequence
  Description of Artificial Sequence: Synthetic oligonucleotide
  Antisense strand to SEQ ID NO: 2004348
aucacucccggcauucuac

SEQ ID NO: 2004350 - RNA, 19 nt, Artificial Sequence
  Description of Artificial Sequence: Synthetic oligonucleotide
  Sense strand starting at position 2442 of SEQ ID NO: 1880924
gaaugccgggagugauaau

SEQ ID NO: 2004351 - RNA, 19 nt, Artificial Sequence
  Description of Artificial Sequence: Synthetic oligonucleotide
  Antisense strand to SEQ ID NO: 2004350
auuaucacucccggcauuc

SEQ ID NO: 2004352 - RNA, 19 nt, Artificial Sequence
  Description of Artificial Sequence: Synthetic oligonucleotide
  Sense strand starting at position 2449 of SEQ ID NO: 1880924
gggagugauaauugcguau

SEQ ID NO: 2004353 - RNA, 19 nt, Artificial Sequence
  Description of Artificial Sequence: Synthetic oligonucleotide
  Antisense strand to SEQ ID NO: 2004352
auacgcaauuaucacuccc

SEQ ID NO: 2004354 - RNA, 19 nt, Artificial Sequence
  Description of Artificial Sequence: Synthetic oligonucleotide
  Sense strand starting at position 2743 of SEQ ID NO: 1880924
gaggcuguuccaggucaca

SEQ ID NO: 2004355 - RNA, 19 nt, Artificial Sequence
  Description of Artificial Sequence: Synthetic oligonucleotide
  Antisense strand to SEQ ID NO: 2004354
ugugaccuggaacagccuc

SEQ ID NO: 2004356 - RNA, 19 nt, Artificial Sequence
  Description of Artificial Sequence: Synthetic oligonucleotide
  Sense strand starting at position 2792 of SEQ ID NO: 1880924
gccacaucacccuguucua

SEQ ID NO: 2004357 - RNA, 19 nt, Artificial Sequence
  Description of Artificial Sequence: Synthetic oligonucleotide
  Antisense strand to SEQ ID NO: 2004356
uagaacagggugauguggc

SEQ ID NO: 2004358 - RNA, 19 nt, Artificial Sequence
  Description of Artificial Sequence: Synthetic oligonucleotide
  Sense strand starting at position 2838 of SEQ ID NO: 1880924
cugauauuuccuuguuucu

SEQ ID NO: 2004359 - RNA, 19 nt, Artificial Sequence
  Description of Artificial Sequence: Synthetic oligonucleotide
  Antisense strand to SEQ ID NO: 2004358
agaaacaaggaaauaucag

SEQ ID NO: 2004360 - RNA, 19 nt, Artificial Sequence
  Description of Artificial Sequence: Synthetic oligonucleotide
  Sense strand starting at position 2906 of SEQ ID NO: 1880924
acaggaaauuugugagaug

SEQ ID NO: 2004361 - RNA, 19 nt, Artificial Sequence
  Description of Artificial Sequence: Synthetic oligonucleotide
  Antisense strand to SEQ ID NO: 2004360
caucucacaaauuuccugu

SEQ ID NO: 2004362 - RNA, 19 nt, Artificial Sequence
  Description of Artificial Sequence: Synthetic oligonucleotide
  Sense strand starting at position 2907 of SEQ ID NO: 1880924
caggaaauuugugagaugu

SEQ ID NO: 2004363 - RNA, 19 nt, Artificial Sequence
  Description of Artificial Sequence: Synthetic oligonucleotide
  Antisense strand to SEQ ID NO: 2004362
acaucucacaaauuuccug

SEQ ID NO: 2004364 - RNA, 19 nt, Artificial Sequence
  Description of Artificial Sequence: Synthetic oligonucleotide
  Sense strand starting at position 2909 of SEQ ID NO: 1880924
ggaaauuugugagauguau

SEQ ID NO: 2004365 - RNA, 19 nt, Artificial Sequence
  Description of Artificial Sequence: Synthetic oligonucleotide
  Antisense strand to SEQ ID NO: 2004364
auacaucucacaaauuucc

SEQ ID NO: 2004366 - RNA, 19 nt, Artificial Sequence
  Description of Artificial Sequence: Synthetic oligonucleotide
  Sense strand starting at position 2992 of SEQ ID NO: 1880924
uggcuuaaugcauguauuu

SEQ ID NO: 2004367 - RNA, 19 nt, Artificial Sequence
  Description of Artificial Sequence: Synthetic oligonucleotide
  Antisense strand to SEQ ID NO: 2004366
aaauacaugcauuaagcca

SEQ ID NO: 2004368 - RNA, 19 nt, Artificial Sequence
  Description of Artificial Sequence: Synthetic oligonucleotide
  Sense strand starting at position 3134 of SEQ ID NO: 1880924
cccucauaucuguggaacu

SEQ ID NO: 2004369 - RNA, 19 nt, Artificial Sequence
  Description of Artificial Sequence: Synthetic oligonucleotide
  Antisense strand to SEQ ID NO: 2004368
aguuccacagauaugaggg

SEQ ID NO: 2004370 - RNA, 19 nt, Artificial Sequence
  Description of Artificial Sequence: Synthetic oligonucleotide
  Sense strand starting at position 3145 of SEQ ID NO: 1880924
guggaacuucucgacucau

SEQ ID NO: 2004371 - RNA, 19 nt, Artificial Sequence
  Description of Artificial Sequence: Synthetic oligonucleotide
  Antisense strand to SEQ ID NO: 2004370
augagucgagaaguuccac

SEQ ID NO: 2004372 - RNA, 19 nt, Artificial Sequence
  Description of Artificial Sequence: Synthetic oligonucleotide
  Sense strand starting at position 3280 of SEQ ID NO: 1880924
agauuccuccauuauguga

SEQ ID NO: 2004373 - RNA, 19 nt, Artificial Sequence
  Description of Artificial Sequence: Synthetic oligonucleotide
  Antisense strand to SEQ ID NO: 2004372
ucacauaauggaggaaucu

SEQ ID NO: 2004374 - RNA, 19 nt, Artificial Sequence
  Description of Artificial Sequence: Synthetic oligonucleotide
  Sense strand starting at position 3287 of SEQ ID NO: 1880924
uccauuaugugaucacaga

SEQ ID NO: 2004375 - RNA, 19 nt, Artificial Sequence
  Description of Artificial Sequence: Synthetic oligonucleotide
  Antisense strand to SEQ ID NO: 2004374
ucugugaucacauaaugga

SEQ ID NO: 2004376 - RNA, 19 nt, Artificial Sequence
  Description of Artificial Sequence: Synthetic oligonucleotide
  Sense strand starting at position 3300 of SEQ ID NO: 1880924
cacagagaggccuguaauu

SEQ ID NO: 2004377 - RNA, 19 nt, Artificial Sequence
  Description of Artificial Sequence: Synthetic oligonucleotide
  Antisense strand to SEQ ID NO: 2004376
aauuacaggccucucugug

SEQ ID NO: 2004378 - RNA, 19 nt, Artificial Sequence
  Description of Artificial Sequence: Synthetic oligonucleotide
  Sense strand starting at position 3676 of SEQ ID NO: 1880924
cugggauugcuugauuaac

SEQ ID NO: 2004379 - RNA, 19 nt, Artificial Sequence
  Description of Artificial Sequence: Synthetic oligonucleotide
  Antisense strand to SEQ ID NO: 2004378
guuaaucaagcaaucccag

SEQ ID NO: 2004380 - RNA, 19 nt, Artificial Sequence
  Description of Artificial Sequence: Synthetic oligonucleotide
  Sense strand starting at position 3678 of SEQ ID NO: 1880924
gggauugcuugauuaacau

SEQ ID NO: 2004381 - RNA, 19 nt, Artificial Sequence
  Description of Artificial Sequence: Synthetic oligonucleotide
  Antisense strand to SEQ ID NO: 2004380
auguuaaucaagcaauccc

SEQ ID NO: 2004382 - RNA, 19 nt, Artificial Sequence
  Description of Artificial Sequence: Synthetic oligonucleotide
  Sense strand starting at position 3687 of SEQ ID NO: 1880924
ugauuaacaugucucugga

SEQ ID NO: 2004383 - RNA, 19 nt, Artificial Sequence
  Description of Artificial Sequence: Synthetic oligonucleotide
  Antisense strand to SEQ ID NO: 2004382
uccagagacauguuaauca

SEQ ID NO: 2004384 - RNA, 19 nt, Artificial Sequence
  Description of Artificial Sequence: Synthetic oligonucleotide
  Sense strand starting at position 3690 of SEQ ID NO: 1880924
uuaacaugucucuggacaa

SEQ ID NO: 2004385 - RNA, 19 nt, Artificial Sequence
  Description of Artificial Sequence: Synthetic oligonucleotide
  Antisense strand to SEQ ID NO: 2004384
uuguccagagacauguuaa

SEQ ID NO: 2004386 - RNA, 19 nt, Artificial Sequence
  Description of Artificial Sequence: Synthetic oligonucleotide
  Sense strand starting at position 3713 of SEQ ID NO: 1880924
ggcgaagacuagcuuauuc

SEQ ID NO: 2004387 - RNA, 19 nt, Artificial Sequence
  Description of Artificial Sequence: Synthetic oligonucleotide
  Antisense strand to SEQ ID NO: 2004386
gaauaagcuagucuucgcc

SEQ ID NO: 2004388 - RNA, 19 nt, Artificial Sequence
  Description of Artificial Sequence: Synthetic oligonucleotide
  Sense strand starting at position 3721 of SEQ ID NO: 1880924
cuagcuuauucuccuggga

SEQ ID NO: 2004389 - RNA, 19 nt, Artificial Sequence
  Description of Artificial Sequence: Synthetic oligonucleotide
  Antisense strand to SEQ ID NO: 2004388
ucccaggagaauaagcuag

SEQ ID NO: 2004390 - RNA, 19 nt, Artificial Sequence
  Description of Artificial Sequence: Synthetic oligonucleotide
  Sense strand starting at position 3724 of SEQ ID NO: 1880924
gcuuauucuccugggaagu

SEQ ID NO: 2004391 - RNA, 19 nt, Artificial Sequence
  Description of Artificial Sequence: Synthetic oligonucleotide
  Antisense strand to SEQ ID NO: 2004390
acuucccaggagaauaagc

SEQ ID NO: 2004392 - RNA, 19 nt, Artificial Sequence
  Description of Artificial Sequence: Synthetic oligonucleotide
  Sense strand starting at position 3725 of SEQ ID NO: 1880924
cuuauucuccugggaaguc

SEQ ID NO: 2004393 - RNA, 19 nt, Artificial Sequence
  Description of Artificial Sequence: Synthetic oligonucleotide
  Antisense strand to SEQ ID NO: 2004392
gacuucccaggagaauaag

SEQ ID NO: 2004394 - RNA, 19 nt, Artificial Sequence
  Description of Artificial Sequence: Synthetic oligonucleotide
  Sense strand starting at position 3773 of SEQ ID NO: 1880924
gaaggugugccauauaauc

SEQ ID NO: 2004395 - RNA, 19 nt, Artificial Sequence
  Description of Artificial Sequence: Synthetic oligonucleotide
  Antisense strand to SEQ ID NO: 2004394
gauuauauggcacaccuuc

SEQ ID NO: 2004396 - RNA, 19 nt, Artificial Sequence
  Description of Artificial Sequence: Synthetic oligonucleotide
  Sense strand starting at position 3781 of SEQ ID NO: 1880924
gccauauaaucuguaggaa

SEQ ID NO: 2004397 - RNA, 19 nt, Artificial Sequence
  Description of Artificial Sequence: Synthetic oligonucleotide
  Antisense strand to SEQ ID NO: 2004396
uuccuacagauuauauggc

SEQ ID NO: 2004398 - RNA, 19 nt, Artificial Sequence
  Description of Artificial Sequence: Synthetic oligonucleotide
  Sense strand starting at position 3828 of SEQ ID NO: 1880924
gggaaagugguguguucug

SEQ ID NO: 2004399 - RNA, 19 nt, Artificial Sequence
  Description of Artificial Sequence: Synthetic oligonucleotide
  Antisense strand to SEQ ID NO: 2004398
cagaacacaccacuuuccc

SEQ ID NO: 2004400 - RNA, 19 nt, Artificial Sequence
  Description of Artificial Sequence: Synthetic oligonucleotide
  Sense strand starting at position 3839 of SEQ ID NO: 1880924
guguucugaacuugggagu

SEQ ID NO: 2004401 - RNA, 19 nt, Artificial Sequence
  Description of Artificial Sequence: Synthetic oligonucleotide
  Antisense strand to SEQ ID NO: 2004400
acucccaaguucagaacac

SEQ ID NO: 2004402 - RNA, 19 nt, Artificial Sequence
  Description of Artificial Sequence: Synthetic oligonucleotide
  Sense strand starting at position 3893 of SEQ ID NO: 1880924
ugaacaauggcuuggaggu

SEQ ID NO: 2004403 - RNA, 19 nt, Artificial Sequence
  Description of Artificial Sequence: Synthetic oligonucleotide
  Antisense strand to SEQ ID NO: 2004402
accuccaagccauuguuca

SEQ ID NO: 2004404 - RNA, 19 nt, Artificial Sequence
  Description of Artificial Sequence: Synthetic oligonucleotide
  Sense strand starting at position 3894 of SEQ ID NO: 1880924
gaacaauggcuuggagguu

SEQ ID NO: 2004405 - RNA, 19 nt, Artificial Sequence
  Description of Artificial Sequence: Synthetic oligonucleotide
  Antisense strand to SEQ ID NO: 2004404
aaccuccaagccauuguuc

SEQ ID NO: 2004406 - RNA, 19 nt, Artificial Sequence
  Description of Artificial Sequence: Synthetic oligonucleotide
  Sense strand starting at position 10 of SEQ ID NO: 1880925
ggacguagccuugaacaug

SEQ ID NO: 2004407 - RNA, 19 nt, Artificial Sequence
  Description of Artificial Sequence: Synthetic oligonucleotide
  Antisense strand to SEQ ID NO: 2004406
cauguucaaggcuacgucc

SEQ ID NO: 2004408 - RNA, 19 nt, Artificial Sequence
  Description of Artificial Sequence: Synthetic oligonucleotide
  Sense strand starting at position 45 of SEQ ID NO: 1880925
gcuucuuacugggagggaa

SEQ ID NO: 2004409 - RNA, 19 nt, Artificial Sequence
  Description of Artificial Sequence: Synthetic oligonucleotide
  Antisense strand to SEQ ID NO: 2004408
uucccucccaguaagaagc

SEQ ID NO: 2004410 - RNA, 19 nt, Artificial Sequence
  Description of Artificial Sequence: Synthetic oligonucleotide
  Sense strand starting at position 57 of SEQ ID NO: 1880925
gagggaacuugugacaagu

SEQ ID NO: 2004411 - RNA, 19 nt, Artificial Sequence
  Description of Artificial Sequence: Synthetic oligonucleotide
  Antisense strand to SEQ ID NO: 2004410
acuugucacaaguucccuc

SEQ ID NO: 2004412 - RNA, 19 nt, Artificial Sequence
  Description of Artificial Sequence: Synthetic oligonucleotide
  Sense strand starting at position 67 of SEQ ID NO: 1880925
gugacaaguccgugagcaa

SEQ ID NO: 2004413 - RNA, 19 nt, Artificial Sequence
  Description of Artificial Sequence: Synthetic oligonucleotide
  Antisense strand to SEQ ID NO: 2004412
uugcucacggacuugucac

SEQ ID NO: 2004414 - RNA, 19 nt, Artificial Sequence
  Description of Artificial Sequence: Synthetic oligonucleotide
  Sense strand starting at position 68 of SEQ ID NO: 1880925
ugacaaguccgugagcaag

SEQ ID NO: 2004415 - RNA, 19 nt, Artificial Sequence
  Description of Artificial Sequence: Synthetic oligonucleotide
  Antisense strand to SEQ ID NO: 2004414
cuugcucacggacuuguca

SEQ ID NO: 2004416 - RNA, 19 nt, Artificial Sequence
  Description of Artificial Sequence: Synthetic oligonucleotide
  Sense strand starting at position 70 of SEQ ID NO: 1880925
acaaguccgugagcaagau

SEQ ID NO: 2004417 - RNA, 19 nt, Artificial Sequence
  Description of Artificial Sequence: Synthetic oligonucleotide
  Antisense strand to SEQ ID NO: 2004416
aucuugcucacggacuugu

SEQ ID NO: 2004418 - RNA, 19 nt, Artificial Sequence
  Description of Artificial Sequence: Synthetic oligonucleotide
  Sense strand starting at position 79 of SEQ ID NO: 1880925
ugagcaagaugcuugcaga

SEQ ID NO: 2004419 - RNA, 19 nt, Artificial Sequence
  Description of Artificial Sequence: Synthetic oligonucleotide
  Antisense strand to SEQ ID NO: 2004418
ucugcaagcaucuugcuca

SEQ ID NO: 2004420 - RNA, 19 nt, Artificial Sequence
  Description of Artificial Sequence: Synthetic oligonucleotide
  Sense strand starting at position 217 of SEQ ID NO: 1880925
aggaguuggccaugaagac

SEQ ID NO: 2004421 - RNA, 19 nt, Artificial Sequence
  Description of Artificial Sequence: Synthetic oligonucleotide
  Antisense strand to SEQ ID NO: 2004420
gucuucauggccaacuccu

SEQ ID NO: 2004422 - RNA, 19 nt, Artificial Sequence
  Description of Artificial Sequence: Synthetic oligonucleotide
  Sense strand starting at position 246 of SEQ ID NO: 1880925
guguuucuggcugaggguu

SEQ ID NO: 2004423 - RNA, 19 nt, Artificial Sequence
  Description of Artificial Sequence: Synthetic oligonucleotide
  Antisense strand to SEQ ID NO: 2004422
aacccucagccagaaacac

SEQ ID NO: 2004424 - RNA, 19 nt, Artificial Sequence
  Description of Artificial Sequence: Synthetic oligonucleotide
  Sense strand starting at position 419 of SEQ ID NO: 1880925
guugcauccuuaguguaaa

SEQ ID NO: 2004425 - RNA, 19 nt, Artificial Sequence
  Description of Artificial Sequence: Synthetic oligonucleotide
  Antisense strand to SEQ ID NO: 2004424
uuuacacuaaggaugcaac

SEQ ID NO: 2004426 - RNA, 19 nt, Artificial Sequence
  Description of Artificial Sequence: Synthetic oligonucleotide
  Sense strand starting at position 422 of SEQ ID NO: 1880925
gcauccuuaguguaaagag

SEQ ID NO: 2004427 - RNA, 19 nt, Artificial Sequence
  Description of Artificial Sequence: Synthetic oligonucleotide
  Antisense strand to SEQ ID NO: 2004426
cucuuuacacuaaggaugc

SEQ ID NO: 2004428 - RNA, 19 nt, Artificial Sequence
  Description of Artificial Sequence: Synthetic oligonucleotide
  Sense strand starting at position 494 of SEQ ID NO: 1880925
cccaguagaggugaaguua

SEQ ID NO: 2004429 - RNA, 19 nt, Artificial Sequence
  Description of Artificial Sequence: Synthetic oligonucleotide
  Antisense strand to SEQ ID NO: 2004428
uaacuucaccucuacuggg

SEQ ID NO: 2004430 - RNA, 19 nt, Artificial Sequence
  Description of Artificial Sequence: Synthetic oligonucleotide
  Sense strand starting at position 738 of SEQ ID NO: 1880925
gccauaugcugucucagag

SEQ ID NO: 2004431 - RNA, 19 nt, Artificial Sequence
  Description of Artificial Sequence: Synthetic oligonucleotide
  Antisense strand to SEQ ID NO: 2004430
cucugagacagcauauggc

SEQ ID NO: 2004432 - RNA, 19 nt, Artificial Sequence
  Description of Artificial Sequence: Synthetic oligonucleotide
  Sense strand starting at position 1468 of SEQ ID NO: 1880925
cagugagucugggcaguaa

SEQ ID NO: 2004433 - RNA, 19 nt, Artificial Sequence
  Description of Artificial Sequence: Synthetic oligonucleotide
  Antisense strand to SEQ ID NO: 2004432
uuacugcccagacucacug

SEQ ID NO: 2004434 - RNA, 19 nt, Artificial Sequence
  Description of Artificial Sequence: Synthetic oligonucleotide
  Sense strand starting at position 1565 of SEQ ID NO: 1880925
uuaaauggcugccucagau

SEQ ID NO: 2004435 - RNA, 19 nt, Artificial Sequence
  Description of Artificial Sequence: Synthetic oligonucleotide
  Antisense strand to SEQ ID NO: 2004434
aucugaggcagccauuuaa

SEQ ID NO: 2004436 - RNA, 19 nt, Artificial Sequence
  Description of Artificial Sequence: Synthetic oligonucleotide
  Sense strand starting at position 1575 of SEQ ID NO: 1880925
gccucagauuggcuuugua

SEQ ID NO: 2004437 - RNA, 19 nt, Artificial Sequence
  Description of Artificial Sequence: Synthetic oligonucleotide
  Antisense strand to SEQ ID NO: 2004436
uacaaagccaaucugaggc

SEQ ID NO: 2004438 - RNA, 19 nt, Artificial Sequence
  Description of Artificial Sequence: Synthetic oligonucleotide
  Sense strand starting at position 1578 of SEQ ID NO: 1880925
ucagauuggcuuuguauuc

SEQ ID NO: 2004439 - RNA, 19 nt, Artificial Sequence
  Description of Artificial Sequence: Synthetic oligonucleotide
  Antisense strand to SEQ ID NO: 2004438
gaauacaaagccaaucuga

SEQ ID NO: 2004440 - RNA, 19 nt, Artificial Sequence
  Description of Artificial Sequence: Synthetic oligonucleotide
  Sense strand starting at position 1663 of SEQ ID NO: 1880925
cucgacuucucaccuggaa

SEQ ID NO: 2004441 - RNA, 19 nt, Artificial Sequence
  Description of Artificial Sequence: Synthetic oligonucleotide
  Antisense strand to SEQ ID NO: 2004440
uuccaggugagaagucgag

SEQ ID NO: 2004442 - RNA, 19 nt, Artificial Sequence
  Description of Artificial Sequence: Synthetic oligonucleotide
  Sense strand starting at position 1665 of SEQ ID NO: 1880925
cgacuucucaccuggaagu

SEQ ID NO: 2004443 - RNA, 19 nt, Artificial Sequence
  Description of Artificial Sequence: Synthetic oligonucleotide
  Antisense strand to SEQ ID NO: 2004442
acuuccaggugagaagucg

SEQ ID NO: 2004444 - RNA, 19 nt, Artificial Sequence
  Description of Artificial Sequence: Synthetic oligonucleotide
  Sense strand starting at position 1829 of SEQ ID NO: 1880925
gacagugaccuucgaauac

SEQ ID NO: 2004445 - RNA, 19 nt, Artificial Sequence
  Description of Artificial Sequence: Synthetic oligonucleotide
  Antisense strand to SEQ ID NO: 2004444
guauucgaaggucacuguc

SEQ ID NO: 2004446 - RNA, 19 nt, Artificial Sequence
  Description of Artificial Sequence: Synthetic oligonucleotide
  Sense strand starting at position 1833 of SEQ ID NO: 1880925
gugaccuucgaauacugaa

SEQ ID NO: 2004447 - RNA, 19 nt, Artificial Sequence
  Description of Artificial Sequence: Synthetic oligonucleotide
  Antisense strand to SEQ ID NO: 2004446
uucaguauucgaaggucac

SEQ ID NO: 2004448 - RNA, 19 nt, Artificial Sequence
  Description of Artificial Sequence: Synthetic oligonucleotide
  Sense strand starting at position 1849 of SEQ ID NO: 1880925
gaagaaaggucuuugugag

SEQ ID NO: 2004449 - RNA, 19 nt, Artificial Sequence
  Description of Artificial Sequence: Synthetic oligonucleotide
  Antisense strand to SEQ ID NO: 2004448
cucacaaagaccuuucuuc

SEQ ID NO: 2004450 - RNA, 19 nt, Artificial Sequence
  Description of Artificial Sequence: Synthetic oligonucleotide
  Sense strand starting at position 1850 of SEQ ID NO: 1880925
aagaaaggucuuugugaga

SEQ ID NO: 2004451 - RNA, 19 nt, Artificial Sequence
  Description of Artificial Sequence: Synthetic oligonucleotide
  Antisense strand to SEQ ID NO: 2004450
ucucacaaagaccuuucuu

SEQ ID NO: 2004452 - RNA, 19 nt, Artificial Sequence
  Description of Artificial Sequence: Synthetic oligonucleotide
  Sense strand starting at position 1853 of SEQ ID NO: 1880925
aaaggucuuugugagaaga

SEQ ID NO: 2004453 - RNA, 19 nt, Artificial Sequence
  Description of Artificial Sequence: Synthetic oligonucleotide
  Antisense strand to SEQ ID NO: 2004452
ucuucucacaaagaccuuu

SEQ ID NO: 2004454 - RNA, 19 nt, Artificial Sequence
  Description of Artificial Sequence: Synthetic oligonucleotide
  Sense strand starting at position 2050 of SEQ ID NO: 1880925
gaauaaagcuucugaagag

SEQ ID NO: 2004455 - RNA, 19 nt, Artificial Sequence
  Description of Artificial Sequence: Synthetic oligonucleotide
  Antisense strand to SEQ ID NO: 2004454
cucuucagaagcuuuauuc

SEQ ID NO: 2004456 - RNA, 19 nt, Artificial Sequence
  Description of Artificial Sequence: Synthetic oligonucleotide
  Sense strand starting at position 2133 of SEQ ID NO: 1880925
ugcgcaaucaccuggguau

SEQ ID NO: 2004457 - RNA, 19 nt, Artificial Sequence
  Description of Artificial Sequence: Synthetic oligonucleotide
  Antisense strand to SEQ ID NO: 2004456
auacccaggugauugcgca

SEQ ID NO: 2004458 - RNA, 19 nt, Artificial Sequence
  Description of Artificial Sequence: Synthetic oligonucleotide
  Sense strand starting at position 2134 of SEQ ID NO: 1880925
gcgcaaucaccuggguaug

SEQ ID NO: 2004459 - RNA, 19 nt, Artificial Sequence
  Description of Artificial Sequence: Synthetic oligonucleotide
  Antisense strand to SEQ ID NO: 2004458
cauacccaggugauugcgc

SEQ ID NO: 2004460 - RNA, 19 nt, Artificial Sequence
  Description of Artificial Sequence: Synthetic oligonucleotide
  Sense strand starting at position 2135 of SEQ ID NO: 1880925
cgcaaucaccuggguauga

SEQ ID NO: 2004461 - RNA, 19 nt, Artificial Sequence
  Description of Artificial Sequence: Synthetic oligonucleotide
  Antisense strand to SEQ ID NO: 2004460
ucauacccaggugauugcg

SEQ ID NO: 2004462 - RNA, 19 nt, Artificial Sequence
  Description of Artificial Sequence: Synthetic oligonucleotide
  Sense strand starting at position 2136 of SEQ ID NO: 1880925
gcaaucaccuggguaugau

SEQ ID NO: 2004463 - RNA, 19 nt, Artificial Sequence
  Description of Artificial Sequence: Synthetic oligonucleotide
  Antisense strand to SEQ ID NO: 2004462
aucauacccaggugauugc

SEQ ID NO: 2004464 - RNA, 19 nt, Artificial Sequence
  Description of Artificial Sequence: Synthetic oligonucleotide
  Sense strand starting at position 2663 of SEQ ID NO: 1880925
ggagcucucuucuuagcau

SEQ ID NO: 2004465 - RNA, 19 nt, Artificial Sequence
  Description of Artificial Sequence: Synthetic oligonucleotide
  Antisense strand to SEQ ID NO: 2004464
augcuaagaagagagcucc

SEQ ID NO: 2004466 - RNA, 19 nt, Artificial Sequence
  Description of Artificial Sequence: Synthetic oligonucleotide
  Sense strand starting at position 2791 of SEQ ID NO: 1880925
ucugcaugucugggaacau

SEQ ID NO: 2004467 - RNA, 19 nt, Artificial Sequence
  Description of Artificial Sequence: Synthetic oligonucleotide
  Antisense strand to SEQ ID NO: 2004466
auguucccagacaugcaga

SEQ ID NO: 2004468 - RNA, 19 nt, Artificial Sequence
  Description of Artificial Sequence: Synthetic oligonucleotide
  Sense strand starting at position 2898 of SEQ ID NO: 1880925
gauuccugcucuucuagga

SEQ ID NO: 2004469 - RNA, 19 nt, Artificial Sequence
  Description of Artificial Sequence: Synthetic oligonucleotide
  Antisense strand to SEQ ID NO: 2004468
uccuagaagagcaggaauc

SEQ ID NO: 2004470 - RNA, 19 nt, Artificial Sequence
  Description of Artificial Sequence: Synthetic oligonucleotide
  Sense strand starting at position 2914 of SEQ ID NO: 1880925
ggaagugugugcuuccaua

SEQ ID NO: 2004471 - RNA, 19 nt, Artificial Sequence
  Description of Artificial Sequence: Synthetic oligonucleotide
  Antisense strand to SEQ ID NO: 2004470
uauggaagcacacacuucc

SEQ ID NO: 2004472 - RNA, 19 nt, Artificial Sequence
  Description of Artificial Sequence: Synthetic oligonucleotide
  Sense strand starting at position 3033 of SEQ ID NO: 1880925
cucgaugccaggcaagaau

SEQ ID NO: 2004473 - RNA, 19 nt, Artificial Sequence
  Description of Artificial Sequence: Synthetic oligonucleotide
  Antisense strand to SEQ ID NO: 2004472
auucuugccuggcaucgag

SEQ ID NO: 2004474 - RNA, 19 nt, Artificial Sequence
  Description of Artificial Sequence: Synthetic oligonucleotide
  Sense strand starting at position 3063 of SEQ ID NO: 1880925
augcauguuucucuugcua

SEQ ID NO: 2004475 - RNA, 19 nt, Artificial Sequence
  Description of Artificial Sequence: Synthetic oligonucleotide
  Antisense strand to SEQ ID NO: 2004474
uagcaagagaaacaugcau

SEQ ID NO: 2004476 - RNA, 19 nt, Artificial Sequence
  Description of Artificial Sequence: Synthetic oligonucleotide
  Sense strand starting at position 3083 of SEQ ID NO: 1880925
ucaugaucccagggaggca

SEQ ID NO: 2004477 - RNA, 19 nt, Artificial Sequence
  Description of Artificial Sequence: Synthetic oligonucleotide
  Antisense strand to SEQ ID NO: 2004476
ugccucccugggaucauga

SEQ ID NO: 2004478 - RNA, 19 nt, Artificial Sequence
  Description of Artificial Sequence: Synthetic oligonucleotide
  Sense strand starting at position 3668 of SEQ ID NO: 1880925
cucuguuccuagcucagaa

SEQ ID NO: 2004479 - RNA, 19 nt, Artificial Sequence
  Description of Artificial Sequence: Synthetic oligonucleotide
  Antisense strand to SEQ ID NO: 2004478
uucugagcuaggaacagag

SEQ ID NO: 2004480 - RNA, 19 nt, Artificial Sequence
  Description of Artificial Sequence: Synthetic oligonucleotide
  Sense strand starting at position 3670 of SEQ ID NO: 1880925
cuguuccuagcucagaauu

SEQ ID NO: 2004481 - RNA, 19 nt, Artificial Sequence
  Description of Artificial Sequence: Synthetic oligonucleotide
  Antisense strand to SEQ ID NO: 2004480
aauucugagcuaggaacag

SEQ ID NO: 2004482 - RNA, 19 nt, Artificial Sequence
  Description of Artificial Sequence: Synthetic oligonucleotide
  Sense strand starting at position 3721 of SEQ ID NO: 1880925
ggcagcuucccggagagaa

SEQ ID NO: 2004483 - RNA, 19 nt, Artificial Sequence
  Description of Artificial Sequence: Synthetic oligonucleotide
  Antisense strand to SEQ ID NO: 2004482
uucucuccgggaagcugcc

SEQ ID NO: 2004484 - RNA, 19 nt, Artificial Sequence
  Description of Artificial Sequence: Synthetic oligonucleotide
  Sense strand starting at position 3809 of SEQ ID NO: 1880925
gucaacugcuuccugaguu

SEQ ID NO: 2004485 - RNA, 19 nt, Artificial Sequence
  Description of Artificial Sequence: Synthetic oligonucleotide
  Antisense strand to SEQ ID NO: 2004484
aacucaggaagcaguugac

SEQ ID NO: 2004486 - RNA, 19 nt, Artificial Sequence
  Description of Artificial Sequence: Synthetic oligonucleotide
  Sense strand starting at position 5 of SEQ ID NO: 1880926
agggaaagcuucccugaag

SEQ ID NO: 2004487 - RNA, 19 nt, Artificial Sequence
  Description of Artificial Sequence: Synthetic oligonucleotide
  Antisense strand to SEQ ID NO: 2004486
cuucagggaagcuuucccu

SEQ ID NO: 2004488 - RNA, 19 nt, Artificial Sequence
  Description of Artificial Sequence: Synthetic oligonucleotide
  Sense strand starting at position 6 of SEQ ID NO: 1880926
gggaaagcuucccugaagu

SEQ ID NO: 2004489 - RNA, 19 nt, Artificial Sequence
  Description of Artificial Sequence: Synthetic oligonucleotide
  Antisense strand to SEQ ID NO: 2004488
acuucagggaagcuuuccc

SEQ ID NO: 2004490 - RNA, 19 nt, Artificial Sequence
  Description of Artificial Sequence: Synthetic oligonucleotide
  Sense strand starting at position 8 of SEQ ID NO: 1880926
gaaagcuucccugaaguca

SEQ ID NO: 2004491 - RNA, 19 nt, Artificial Sequence
  Description of Artificial Sequence: Synthetic oligonucleotide
  Antisense strand to SEQ ID NO: 2004490
ugacuucagggaagcuuuc

SEQ ID NO: 2004492 - RNA, 19 nt, Artificial Sequence
  Description of Artificial Sequence: Synthetic oligonucleotide
  Sense strand starting at position 93 of SEQ ID NO: 1880926
gaaacuuuaugagucgaga

SEQ ID NO: 2004493 - RNA, 19 nt, Artificial Sequence
  Description of Artificial Sequence: Synthetic oligonucleotide
  Antisense strand to SEQ ID NO: 2004492
ucucgacucauaaaguuuc

SEQ ID NO: 2004494 - RNA, 19 nt, Artificial Sequence
  Description of Artificial Sequence: Synthetic oligonucleotide
  Sense strand starting at position 96 of SEQ ID NO: 1880926
acuuuaugagucgagaagu

SEQ ID NO: 2004495 - RNA, 19 nt, Artificial Sequence
  Description of Artificial Sequence: Synthetic oligonucleotide
  Antisense strand to SEQ ID NO: 2004494
acuucucgacucauaaagu

SEQ ID NO: 2004496 - RNA, 19 nt, Artificial Sequence
  Description of Artificial Sequence: Synthetic oligonucleotide
  Sense strand starting at position 170 of SEQ ID NO: 1880926
gggacagugccugaaagua

SEQ ID NO: 2004497 - RNA, 19 nt, Artificial Sequence
  Description of Artificial Sequence: Synthetic oligonucleotide
  Antisense strand to SEQ ID NO: 2004496
uacuuucaggcacuguccc

SEQ ID NO: 2004498 - RNA, 19 nt, Artificial Sequence
  Description of Artificial Sequence: Synthetic oligonucleotide
  Sense strand starting at position 178 of SEQ ID NO: 1880926
gccugaaaguaggcuaagu

SEQ ID NO: 2004499 - RNA, 19 nt, Artificial Sequence
  Description of Artificial Sequence: Synthetic oligonucleotide
  Antisense strand to SEQ ID NO: 2004498
acuuagccuacuuucaggc

SEQ ID NO: 2004500 - RNA, 19 nt, Artificial Sequence
  Description of Artificial Sequence: Synthetic oligonucleotide
  Sense strand starting at position 232 of SEQ ID NO: 1880926
cccauacuggcuuauguga

SEQ ID NO: 2004501 - RNA, 19 nt, Artificial Sequence
  Description of Artificial Sequence: Synthetic oligonucleotide
  Antisense strand to SEQ ID NO: 2004500
ucacauaagccaguauggg

SEQ ID NO: 2004502 - RNA, 19 nt, Artificial Sequence
  Description of Artificial Sequence: Synthetic oligonucleotide
  Sense strand starting at position 303 of SEQ ID NO: 1880926
aagccaucacuguguauug

SEQ ID NO: 2004503 - RNA, 19 nt, Artificial Sequence
  Description of Artificial Sequence: Synthetic oligonucleotide
  Antisense strand to SEQ ID NO: 2004502
caauacacagugauggcuu

SEQ ID NO: 2004504 - RNA, 19 nt, Artificial Sequence
  Description of Artificial Sequence: Synthetic oligonucleotide
  Sense strand starting at position 433 of SEQ ID NO: 1880926
aguuaagugcugugaagga

SEQ ID NO: 2004505 - RNA, 19 nt, Artificial Sequence
  Description of Artificial Sequence: Synthetic oligonucleotide
  Antisense strand to SEQ ID NO: 2004504
uccuucacagcacuuaacu

SEQ ID NO: 2004506 - RNA, 19 nt, Artificial Sequence
  Description of Artificial Sequence: Synthetic oligonucleotide
  Sense strand starting at position 484 of SEQ ID NO: 1880926
gagggacuuccuuaguuug

SEQ ID NO: 2004507 - RNA, 19 nt, Artificial Sequence
  Description of Artificial Sequence: Synthetic oligonucleotide
  Antisense strand to SEQ ID NO: 2004506
caaacuaaggaagucccuc

SEQ ID NO: 2004508 - RNA, 19 nt, Artificial Sequence
  Description of Artificial Sequence: Synthetic oligonucleotide
  Sense strand starting at position 496 of SEQ ID NO: 1880926
uaguuugugugaccuggaa

SEQ ID NO: 2004509 - RNA, 19 nt, Artificial Sequence
  Description of Artificial Sequence: Synthetic oligonucleotide
  Antisense strand to SEQ ID NO: 2004508
uuccaggucacacaaacua

SEQ ID NO: 2004510 - RNA, 19 nt, Artificial Sequence
  Description of Artificial Sequence: Synthetic oligonucleotide
  Sense strand starting at position 498 of SEQ ID NO: 1880926
guuugugugaccuggaaca

SEQ ID NO: 2004511 - RNA, 19 nt, Artificial Sequence
  Description of Artificial Sequence: Synthetic oligonucleotide
  Antisense strand to SEQ ID NO: 2004510
uguuccaggucacacaaac

SEQ ID NO: 2004512 - RNA, 19 nt, Artificial Sequence
  Description of Artificial Sequence: Synthetic oligonucleotide
  Sense strand starting at position 532 of SEQ ID NO: 1880926
ugcaucagauaucugauau

SEQ ID NO: 2004513 - RNA, 19 nt, Artificial Sequence
  Description of Artificial Sequence: Synthetic oligonucleotide
  Antisense strand to SEQ ID NO: 2004512
auaucagauaucugaugca

SEQ ID NO: 2004514 - RNA, 19 nt, Artificial Sequence
  Description of Artificial Sequence: Synthetic oligonucleotide
  Sense strand starting at position 536 of SEQ ID NO: 1880926
ucagauaucugauauguga

SEQ ID NO: 2004515 - RNA, 19 nt, Artificial Sequence
  Description of Artificial Sequence: Synthetic oligonucleotide
  Antisense strand to SEQ ID NO: 2004514
ucacauaucagauaucuga

SEQ ID NO: 2004516 - RNA, 19 nt, Artificial Sequence
  Description of Artificial Sequence: Synthetic oligonucleotide
  Sense strand starting at position 673 of SEQ ID NO: 1880926
gcgagagggucgccucaaa

SEQ ID NO: 2004517 - RNA, 19 nt, Artificial Sequence
  Description of Artificial Sequence: Synthetic oligonucleotide
  Antisense strand to SEQ ID NO: 2004516
uuugaggcgacccucucgc

SEQ ID NO: 2004518 - RNA, 19 nt, Artificial Sequence
  Description of Artificial Sequence: Synthetic oligonucleotide
  Sense strand starting at position 741 of SEQ ID NO: 1880926
ggaaggguguuccaggaga

SEQ ID NO: 2004519 - RNA, 19 nt, Artificial Sequence
  Description of Artificial Sequence: Synthetic oligonucleotide
  Antisense strand to SEQ ID NO: 2004518
ucuccuggaacacccuucc

SEQ ID NO: 2004520 - RNA, 19 nt, Artificial Sequence
  Description of Artificial Sequence: Synthetic oligonucleotide
  Sense strand starting at position 743 of SEQ ID NO: 1880926
aaggguguuccaggagaag

SEQ ID NO: 2004521 - RNA, 19 nt, Artificial Sequence
  Description of Artificial Sequence: Synthetic oligonucleotide
  Antisense strand to SEQ ID NO: 2004520
cuucuccuggaacacccuu

SEQ ID NO: 2004522 - RNA, 19 nt, Artificial Sequence
  Description of Artificial Sequence: Synthetic oligonucleotide
  Sense strand starting at position 779 of SEQ ID NO: 1880926
gcuugcagucaugaaacaa

SEQ ID NO: 2004523 - RNA, 19 nt, Artificial Sequence
  Description of Artificial Sequence: Synthetic oligonucleotide
  Antisense strand to SEQ ID NO: 2004522
uuguuucaugacugcaagc

SEQ ID NO: 2004524 - RNA, 19 nt, Artificial Sequence
  Description of Artificial Sequence: Synthetic oligonucleotide
  Sense strand starting at position 1112 of SEQ ID NO: 1880926
gcccaucaagagugagaga

SEQ ID NO: 2004525 - RNA, 19 nt, Artificial Sequence
  Description of Artificial Sequence: Synthetic oligonucleotide
  Antisense strand to SEQ ID NO: 2004524
ucucucacucuugaugggc

SEQ ID NO: 2004526 - RNA, 19 nt, Artificial Sequence
  Description of Artificial Sequence: Synthetic oligonucleotide
  Sense strand starting at position 1246 of SEQ ID NO: 1880926
ggaauucuccaagggucca

SEQ ID NO: 2004527 - RNA, 19 nt, Artificial Sequence
  Description of Artificial Sequence: Synthetic oligonucleotide
  Antisense strand to SEQ ID NO: 2004526
uggacccuuggagaauucc

SEQ ID NO: 2004528 - RNA, 19 nt, Artificial Sequence
  Description of Artificial Sequence: Synthetic oligonucleotide
  Sense strand starting at position 1267 of SEQ ID NO: 1880926
guaagucuucuugaccuaa

SEQ ID NO: 2004529 - RNA, 19 nt, Artificial Sequence
  Description of Artificial Sequence: Synthetic oligonucleotide
  Antisense strand to SEQ ID NO: 2004528
uuaggucaagaagacuuac

SEQ ID NO: 2004530 - RNA, 19 nt, Artificial Sequence
  Description of Artificial Sequence: Synthetic oligonucleotide
  Sense strand starting at position 2034 of SEQ ID NO: 1880926
agggaaaggucuucccuga

SEQ ID NO: 2004531 - RNA, 19 nt, Artificial Sequence
  Description of Artificial Sequence: Synthetic oligonucleotide
  Antisense strand to SEQ ID NO: 2004530
ucagggaagaccuuucccu

SEQ ID NO: 2004532 - RNA, 19 nt, Artificial Sequence
  Description of Artificial Sequence: Synthetic oligonucleotide
  Sense strand starting at position 2341 of SEQ ID NO: 1880926
ucuggugucaggugacuuu

SEQ ID NO: 2004533 - RNA, 19 nt, Artificial Sequence
  Description of Artificial Sequence: Synthetic oligonucleotide
  Antisense strand to SEQ ID NO: 2004532
aaagucaccugacaccaga

SEQ ID NO: 2004534 - RNA, 19 nt, Artificial Sequence
  Description of Artificial Sequence: Synthetic oligonucleotide
  Sense strand starting at position 2398 of SEQ ID NO: 1880926
caaguuucuuguguucuga

SEQ ID NO: 2004535 - RNA, 19 nt, Artificial Sequence
  Description of Artificial Sequence: Synthetic oligonucleotide
  Antisense strand to SEQ ID NO: 2004534
ucagaacacaagaaacuug

SEQ ID NO: 2004536 - RNA, 19 nt, Artificial Sequence
  Description of Artificial Sequence: Synthetic oligonucleotide
  Sense strand starting at position 2400 of SEQ ID NO: 1880926
aguuucuuguguucugaau

SEQ ID NO: 2004537 - RNA, 19 nt, Artificial Sequence
  Description of Artificial Sequence: Synthetic oligonucleotide
  Antisense strand to SEQ ID NO: 2004536
auucagaacacaagaaacu

SEQ ID NO: 2004538 - RNA, 19 nt, Artificial Sequence
  Description of Artificial Sequence: Synthetic oligonucleotide
  Sense strand starting at position 2419 of SEQ ID NO: 1880926
cuuaguuucuugucucuaa

SEQ ID NO: 2004539 - RNA, 19 nt, Artificial Sequence
  Description of Artificial Sequence: Synthetic oligonucleotide
  Antisense strand to SEQ ID NO: 2004538
uuagagacaagaaacuaag

SEQ ID NO: 2004540 - RNA, 19 nt, Artificial Sequence
  Description of Artificial Sequence: Synthetic oligonucleotide
  Sense strand starting at position 2420 of SEQ ID NO: 1880926
uuaguuucuugucucuaaa

SEQ ID NO: 2004541 - RNA, 19 nt, Artificial Sequence
  Description of Artificial Sequence: Synthetic oligonucleotide
  Antisense strand to SEQ ID NO: 2004540
uuuagagacaagaaacuaa

SEQ ID NO: 2004542 - RNA, 19 nt, Artificial Sequence
  Description of Artificial Sequence: Synthetic oligonucleotide
  Sense strand starting at position 2470 of SEQ ID NO: 1880926
cucccaagauugcuugaga

SEQ ID NO: 2004543 - RNA, 19 nt, Artificial Sequence
  Description of Artificial Sequence: Synthetic oligonucleotide
  Antisense strand to SEQ ID NO: 2004542
ucucaagcaaucuugggag

SEQ ID NO: 2004544 - RNA, 19 nt, Artificial Sequence
  Description of Artificial Sequence: Synthetic oligonucleotide
  Sense strand starting at position 2471 of SEQ ID NO: 1880926
ucccaagauugcuugagaa

SEQ ID NO: 2004545 - RNA, 19 nt, Artificial Sequence
  Description of Artificial Sequence: Synthetic oligonucleotide
  Antisense strand to SEQ ID NO: 2004544
uucucaagcaaucuuggga

SEQ ID NO: 2004546 - RNA, 19 nt, Artificial Sequence
  Description of Artificial Sequence: Synthetic oligonucleotide
  Sense strand starting at position 2481 of SEQ ID NO: 1880926
gcuugagaauuacaugaga

SEQ ID NO: 2004547 - RNA, 19 nt, Artificial Sequence
  Description of Artificial Sequence: Synthetic oligonucleotide
  Antisense strand to SEQ ID NO: 2004546
ucucauguaauucucaagc

SEQ ID NO: 2004548 - RNA, 19 nt, Artificial Sequence
  Description of Artificial Sequence: Synthetic oligonucleotide
  Sense strand starting at position 2530 of SEQ ID NO: 1880926
ggagaauguuggcugcugu

SEQ ID NO: 2004549 - RNA, 19 nt, Artificial Sequence
  Description of Artificial Sequence: Synthetic oligonucleotide
  Antisense strand to SEQ ID NO: 2004548
acagcagccaacauucucc

SEQ ID NO: 2004550 - RNA, 19 nt, Artificial Sequence
  Description of Artificial Sequence: Synthetic oligonucleotide
  Sense strand starting at position 2531 of SEQ ID NO: 1880926
gagaauguuggcugcuguu

SEQ ID NO: 2004551 - RNA, 19 nt, Artificial Sequence
  Description of Artificial Sequence: Synthetic oligonucleotide
  Antisense strand to SEQ ID NO: 2004550
aacagcagccaacauucuc

SEQ ID NO: 2004552 - RNA, 19 nt, Artificial Sequence
  Description of Artificial Sequence: Synthetic oligonucleotide
  Sense strand starting at position 3333 of SEQ ID NO: 1880926
cacaauuaucgugguuugu

SEQ ID NO: 2004553 - RNA, 19 nt, Artificial Sequence
  Description of Artificial Sequence: Synthetic oligonucleotide
  Antisense strand to SEQ ID NO: 2004552
acaaaccacgauaauugug

SEQ ID NO: 2004554 - RNA, 19 nt, Artificial Sequence
  Description of Artificial Sequence: Synthetic oligonucleotide
  Sense strand starting at position 3335 of SEQ ID NO: 1880926
caauuaucgugguuuguua

SEQ ID NO: 2004555 - RNA, 19 nt, Artificial Sequence
  Description of Artificial Sequence: Synthetic oligonucleotide
  Antisense strand to SEQ ID NO: 2004554
uaacaaaccacgauaauug

SEQ ID NO: 2004556 - RNA, 19 nt, Artificial Sequence
  Description of Artificial Sequence: Synthetic oligonucleotide
  Sense strand starting at position 3371 of SEQ ID NO: 1880926
cagugucagguuuguauaa

SEQ ID NO: 2004557 - RNA, 19 nt, Artificial Sequence
  Description of Artificial Sequence: Synthetic oligonucleotide
  Antisense strand to SEQ ID NO: 2004556
uuauacaaaccugacacug

SEQ ID NO: 2004558 - RNA, 19 nt, Artificial Sequence
  Description of Artificial Sequence: Synthetic oligonucleotide
  Sense strand starting at position 3378 of SEQ ID NO: 1880926
agguuuguauaacucaaua

SEQ ID NO: 2004559 - RNA, 19 nt, Artificial Sequence
  Description of Artificial Sequence: Synthetic oligonucleotide
  Antisense strand to SEQ ID NO: 2004558
uauugaguuauacaaaccu

SEQ ID NO: 2004560 - RNA, 19 nt, Artificial Sequence
  Description of Artificial Sequence: Synthetic oligonucleotide
  Sense strand starting at position 3480 of SEQ ID NO: 1880926
uuuagaguaagaugugaac

SEQ ID NO: 2004561 - RNA, 19 nt, Artificial Sequence
  Description of Artificial Sequence: Synthetic oligonucleotide
  Antisense strand to SEQ ID NO: 2004560
guucacaucuuacucuaaa

SEQ ID NO: 2004562 - RNA, 19 nt, Artificial Sequence
  Description of Artificial Sequence: Synthetic oligonucleotide
  Sense strand starting at position 3483 of SEQ ID NO: 1880926
agaguaagaugugaacuau

SEQ ID NO: 2004563 - RNA, 19 nt, Artificial Sequence
  Description of Artificial Sequence: Synthetic oligonucleotide
  Antisense strand to SEQ ID NO: 2004562
auaguucacaucuuacucu

SEQ ID NO: 2004564 - RNA, 19 nt, Artificial Sequence
  Description of Artificial Sequence: Synthetic oligonucleotide
  Sense strand starting at position 3580 of SEQ ID NO: 1880926
agugcagaguucccauauu

SEQ ID NO: 2004565 - RNA, 19 nt, Artificial Sequence
  Description of Artificial Sequence: Synthetic oligonucleotide
  Antisense strand to SEQ ID NO: 2004564
aauaugggaacucugcacu

SEQ ID NO: 2004566 - RNA, 19 nt, Artificial Sequence
  Description of Artificial Sequence: Synthetic oligonucleotide
  Sense strand starting at position 315 of SEQ ID NO: 1880927
ugcccagucuaacugaauu

SEQ ID NO: 2004567 - RNA, 19 nt, Artificial Sequence
  Description of Artificial Sequence: Synthetic oligonucleotide
  Antisense strand to SEQ ID NO: 2004566
aauucaguuagacugggca

SEQ ID NO: 2004568 - RNA, 19 nt, Artificial Sequence
  Description of Artificial Sequence: Synthetic oligonucleotide
  Sense strand starting at position 645 of SEQ ID NO: 1880927
agaggauccucuguccaca

SEQ ID NO: 2004569 - RNA, 19 nt, Artificial Sequence
  Description of Artificial Sequence: Synthetic oligonucleotide
  Antisense strand to SEQ ID NO: 2004568
uguggacagaggauccucu

SEQ ID NO: 2004570 - RNA, 19 nt, Artificial Sequence
  Description of Artificial Sequence: Synthetic oligonucleotide
  Sense strand starting at position 750 of SEQ ID NO: 1880927
ccuccaaccugguuuaagu

SEQ ID NO: 2004571 - RNA, 19 nt, Artificial Sequence
  Description of Artificial Sequence: Synthetic oligonucleotide
  Antisense strand to SEQ ID NO: 2004570
acuuaaaccagguuggagg

SEQ ID NO: 2004572 - RNA, 19 nt, Artificial Sequence
  Description of Artificial Sequence: Synthetic oligonucleotide
  Sense strand starting at position 759 of SEQ ID NO: 1880927
ugguuuaagugacuuccua

SEQ ID NO: 2004573 - RNA, 19 nt, Artificial Sequence
  Description of Artificial Sequence: Synthetic oligonucleotide
  Antisense strand to SEQ ID NO: 2004572
uaggaagucacuuaaacca

SEQ ID NO: 2004574 - RNA, 19 nt, Artificial Sequence
  Description of Artificial Sequence: Synthetic oligonucleotide
  Sense strand starting at position 773 of SEQ ID NO: 1880927
uccuaugcccuuuauggua

SEQ ID NO: 2004575 - RNA, 19 nt, Artificial Sequence
  Description of Artificial Sequence: Synthetic oligonucleotide
  Antisense strand to SEQ ID NO: 2004574
uaccauaaagggcauagga

SEQ ID NO: 2004576 - RNA, 19 nt, Artificial Sequence
  Description of Artificial Sequence: Synthetic oligonucleotide
  Sense strand starting at position 849 of SEQ ID NO: 1880927
ccaggcccgaguuagaaau

SEQ ID NO: 2004577 - RNA, 19 nt, Artificial Sequence
  Description of Artificial Sequence: Synthetic oligonucleotide
  Antisense strand to SEQ ID NO: 2004576
auuucuaacucgggccugg

SEQ ID NO: 2004578 - RNA, 19 nt, Artificial Sequence
  Description of Artificial Sequence: Synthetic oligonucleotide
  Sense strand starting at position 1227 of SEQ ID NO: 1880927
gcauaaugcuaggcauaua

SEQ ID NO: 2004579 - RNA, 19 nt, Artificial Sequence
  Description of Artificial Sequence: Synthetic oligonucleotide
  Antisense strand to SEQ ID NO: 2004578
uauaugccuagcauuaugc

SEQ ID NO: 2004580 - RNA, 19 nt, Artificial Sequence
  Description of Artificial Sequence: Synthetic oligonucleotide
  Sense strand starting at position 1238 of SEQ ID NO: 1880927
ggcauauaauaagcacuaa

SEQ ID NO: 2004581 - RNA, 19 nt, Artificial Sequence
  Description of Artificial Sequence: Synthetic oligonucleotide
  Antisense strand to SEQ ID NO: 2004580
uuagugcuuauuauaugcc

SEQ ID NO: 2004582 - RNA, 19 nt, Artificial Sequence
  Description of Artificial Sequence: Synthetic oligonucleotide
  Sense strand starting at position 1299 of SEQ ID NO: 1880927
gugccuuaagccuagagua

SEQ ID NO: 2004583 - RNA, 19 nt, Artificial Sequence
  Description of Artificial Sequence: Synthetic oligonucleotide
  Antisense strand to SEQ ID NO: 2004582
uacucuaggcuuaaggcac

SEQ ID NO: 2004584 - RNA, 19 nt, Artificial Sequence
  Description of Artificial Sequence: Synthetic oligonucleotide
  Sense strand starting at position 1301 of SEQ ID NO: 1880927
gccuuaagccuagaguaua

SEQ ID NO: 2004585 - RNA, 19 nt, Artificial Sequence
  Description of Artificial Sequence: Synthetic oligonucleotide
  Antisense strand to SEQ ID NO: 2004584
uauacucuaggcuuaaggc

SEQ ID NO: 2004586 - RNA, 19 nt, Artificial Sequence
  Description of Artificial Sequence: Synthetic oligonucleotide
  Sense strand starting at position 1341 of SEQ ID NO: 1880927
gccaauaaugccuaaugga

SEQ ID NO: 2004587 - RNA, 19 nt, Artificial Sequence
  Description of Artificial Sequence: Synthetic oligonucleotide
  Antisense strand to SEQ ID NO: 2004586
uccauuaggcauuauuggc

SEQ ID NO: 2004588 - RNA, 19 nt, Artificial Sequence
  Description of Artificial Sequence: Synthetic oligonucleotide
  Sense strand starting at position 1526 of SEQ ID NO: 1880927
gcugguuugcaggcuguaa

SEQ ID NO: 2004589 - RNA, 19 nt, Artificial Sequence
  Description of Artificial Sequence: Synthetic oligonucleotide
  Antisense strand to SEQ ID NO: 2004588
uuacagccugcaaaccagc

SEQ ID NO: 2004590 - RNA, 19 nt, Artificial Sequence
  Description of Artificial Sequence: Synthetic oligonucleotide
  Sense strand starting at position 1558 of SEQ ID NO: 1880927
ggccaaucucuaggguauc

SEQ ID NO: 2004591 - RNA, 19 nt, Artificial Sequence
  Description of Artificial Sequence: Synthetic oligonucleotide
  Antisense strand to SEQ ID NO: 2004590
gauacccuagagauuggcc

SEQ ID NO: 2004592 - RNA, 19 nt, Artificial Sequence
  Description of Artificial Sequence: Synthetic oligonucleotide
  Sense strand starting at position 1680 of SEQ ID NO: 1880927
cagagucugguuuggaguu

SEQ ID NO: 2004593 - RNA, 19 nt, Artificial Sequence
  Description of Artificial Sequence: Synthetic oligonucleotide
  Antisense strand to SEQ ID NO: 2004592
aacuccaaaccagacucug

SEQ ID NO: 2004594 - RNA, 19 nt, Artificial Sequence
  Description of Artificial Sequence: Synthetic oligonucleotide
  Sense strand starting at position 1690 of SEQ ID NO: 1880927
uuuggaguuccaggucuga

SEQ ID NO: 2004595 - RNA, 19 nt, Artificial Sequence
  Description of Artificial Sequence: Synthetic oligonucleotide
  Antisense strand to SEQ ID NO: 2004594
ucagaccuggaacuccaaa

SEQ ID NO: 2004596 - RNA, 19 nt, Artificial Sequence
  Description of Artificial Sequence: Synthetic oligonucleotide
  Sense strand starting at position 2119 of SEQ ID NO: 1880927
cugcauuugucuccucuga

SEQ ID NO: 2004597 - RNA, 19 nt, Artificial Sequence
  Description of Artificial Sequence: Synthetic oligonucleotide
  Antisense strand to SEQ ID NO: 2004596
ucagaggagacaaaugcag

SEQ ID NO: 2004598 - RNA, 19 nt, Artificial Sequence
  Description of Artificial Sequence: Synthetic oligonucleotide
  Sense strand starting at position 2121 of SEQ ID NO: 1880927
gcauuugucuccucugaug

SEQ ID NO: 2004599 - RNA, 19 nt, Artificial Sequence
  Description of Artificial Sequence: Synthetic oligonucleotide
  Antisense strand to SEQ ID NO: 2004598
caucagaggagacaaaugc

SEQ ID NO: 2004600 - RNA, 19 nt, Artificial Sequence
  Description of Artificial Sequence: Synthetic oligonucleotide
  Sense strand starting at position 2123 of SEQ ID NO: 1880927
auuugucuccucugaugca

SEQ ID NO: 2004601 - RNA, 19 nt, Artificial Sequence
  Description of Artificial Sequence: Synthetic oligonucleotide
  Antisense strand to SEQ ID NO: 2004600
ugcaucagaggagacaaau

SEQ ID NO: 2004602 - RNA, 19 nt, Artificial Sequence
  Description of Artificial Sequence: Synthetic oligonucleotide
  Sense strand starting at position 2169 of SEQ ID NO: 1880927
ugucuuacuccucaguuua

SEQ ID NO: 2004603 - RNA, 19 nt, Artificial Sequence
  Description of Artificial Sequence: Synthetic oligonucleotide
  Antisense strand to SEQ ID NO: 2004602
uaaacugaggaguaagaca

SEQ ID NO: 2004604 - RNA, 19 nt, Artificial Sequence
  Description of Artificial Sequence: Synthetic oligonucleotide
  Sense strand starting at position 2299 of SEQ ID NO: 1880927
gggaacaucuguguucaug

SEQ ID NO: 2004605 - RNA, 19 nt, Artificial Sequence
  Description of Artificial Sequence: Synthetic oligonucleotide
  Antisense strand to SEQ ID NO: 2004604
caugaacacagauguuccc

SEQ ID NO: 2004606 - RNA, 19 nt, Artificial Sequence
  Description of Artificial Sequence: Synthetic oligonucleotide
  Sense strand starting at position 2460 of SEQ ID NO: 1880927
cagugaugagcccacguga

SEQ ID NO: 2004607 - RNA, 19 nt, Artificial Sequence
  Description of Artificial Sequence: Synthetic oligonucleotide
  Antisense strand to SEQ ID NO: 2004606
ucacgugggcucaucacug

SEQ ID NO: 2004608 - RNA, 19 nt, Artificial Sequence
  Description of Artificial Sequence: Synthetic oligonucleotide
  Sense strand starting at position 2503 of SEQ ID NO: 1880927
aggaaaugacuuggcagua

SEQ ID NO: 2004609 - RNA, 19 nt, Artificial Sequence
  Description of Artificial Sequence: Synthetic oligonucleotide
  Antisense strand to SEQ ID NO: 2004608
uacugccaagucauuuccu

SEQ ID NO: 2004610 - RNA, 19 nt, Artificial Sequence
  Description of Artificial Sequence: Synthetic oligonucleotide
  Sense strand starting at position 2516 of SEQ ID NO: 1880927
gcaguacagccggaggauu

SEQ ID NO: 2004611 - RNA, 19 nt, Artificial Sequence
  Description of Artificial Sequence: Synthetic oligonucleotide
  Antisense strand to SEQ ID NO: 2004610
aauccuccggcuguacugc

SEQ ID NO: 2004612 - RNA, 19 nt, Artificial Sequence
  Description of Artificial Sequence: Synthetic oligonucleotide
  Sense strand starting at position 2535 of SEQ ID NO: 1880927
cagggucuggacgauaguu

SEQ ID NO: 2004613 - RNA, 19 nt, Artificial Sequence
  Description of Artificial Sequence: Synthetic oligonucleotide
  Antisense strand to SEQ ID NO: 2004612
aacuaucguccagacccug

SEQ ID NO: 2004614 - RNA, 19 nt, Artificial Sequence
  Description of Artificial Sequence: Synthetic oligonucleotide
  Sense strand starting at position 2560 of SEQ ID NO: 1880927
gccggaggauucuucgaag

SEQ ID NO: 2004615 - RNA, 19 nt, Artificial Sequence
  Description of Artificial Sequence: Synthetic oligonucleotide
  Antisense strand to SEQ ID NO: 2004614
cuucgaagaauccuccggc

SEQ ID NO: 2004616 - RNA, 19 nt, Artificial Sequence
  Description of Artificial Sequence: Synthetic oligonucleotide
  Sense strand starting at position 3057 of SEQ ID NO: 1880927
cagagucccggcuguauuu

SEQ ID NO: 2004617 - RNA, 19 nt, Artificial Sequence
  Description of Artificial Sequence: Synthetic oligonucleotide
  Antisense strand to SEQ ID NO: 2004616
aaauacagccgggacucug

SEQ ID NO: 2004618 - RNA, 19 nt, Artificial Sequence
  Description of Artificial Sequence: Synthetic oligonucleotide
  Sense strand starting at position 3067 of SEQ ID NO: 1880927
gcuguauuuagucaaggcu

SEQ ID NO: 2004619 - RNA, 19 nt, Artificial Sequence
  Description of Artificial Sequence: Synthetic oligonucleotide
  Antisense strand to SEQ ID NO: 2004618
agccuugacuaaauacagc

SEQ ID NO: 2004620 - RNA, 19 nt, Artificial Sequence
  Description of Artificial Sequence: Synthetic oligonucleotide
  Sense strand starting at position 3090 of SEQ ID NO: 1880927
ggaguaagagauuguuggu

SEQ ID NO: 2004621 - RNA, 19 nt, Artificial Sequence
  Description of Artificial Sequence: Synthetic oligonucleotide
  Antisense strand to SEQ ID NO: 2004620
accaacaaucucuuacucc

SEQ ID NO: 2004622 - RNA, 19 nt, Artificial Sequence
  Description of Artificial Sequence: Synthetic oligonucleotide
  Sense strand starting at position 3127 of SEQ ID NO: 1880927
aagacagucccucagaguu

SEQ ID NO: 2004623 - RNA, 19 nt, Artificial Sequence
  Description of Artificial Sequence: Synthetic oligonucleotide
  Antisense strand to SEQ ID NO: 2004622
aacucugagggacugucuu

SEQ ID NO: 2004624 - RNA, 19 nt, Artificial Sequence
  Description of Artificial Sequence: Synthetic oligonucleotide
  Sense strand starting at position 3231 of SEQ ID NO: 1880927
aaguccuagcgcuaauuga

SEQ ID NO: 2004625 - RNA, 19 nt, Artificial Sequence
  Description of Artificial Sequence: Synthetic oligonucleotide
  Antisense strand to SEQ ID NO: 2004624
ucaauuagcgcuaggacuu

SEQ ID NO: 2004626 - RNA, 19 nt, Artificial Sequence
  Description of Artificial Sequence: Synthetic oligonucleotide
  Sense strand starting at position 3279 of SEQ ID NO: 1880927
cguucugagcuuuagauuc

SEQ ID NO: 2004627 - RNA, 19 nt, Artificial Sequence
  Description of Artificial Sequence: Synthetic oligonucleotide
  Antisense strand to SEQ ID NO: 2004626
gaaucuaaagcucagaacg

SEQ ID NO: 2004628 - RNA, 19 nt, Artificial Sequence
  Description of Artificial Sequence: Synthetic oligonucleotide
  Sense strand starting at position 3343 of SEQ ID NO: 1880927
caggcaccucgagaauaau

SEQ ID NO: 2004629 - RNA, 19 nt, Artificial Sequence
  Description of Artificial Sequence: Synthetic oligonucleotide
  Antisense strand to SEQ ID NO: 2004628
auuauucucgaggugccug

SEQ ID NO: 2004630 - RNA, 19 nt, Artificial Sequence
  Description of Artificial Sequence: Synthetic oligonucleotide
  Sense strand starting at position 3414 of SEQ ID NO: 1880927
gagaguccugucugaaacu

SEQ ID NO: 2004631 - RNA, 19 nt, Artificial Sequence
  Description of Artificial Sequence: Synthetic oligonucleotide
  Antisense strand to SEQ ID NO: 2004630
aguuucagacaggacucuc

SEQ ID NO: 2004632 - RNA, 19 nt, Artificial Sequence
  Description of Artificial Sequence: Synthetic oligonucleotide
  Sense strand starting at position 3423 of SEQ ID NO: 1880927
gucugaaacuugguccuau

SEQ ID NO: 2004633 - RNA, 19 nt, Artificial Sequence
  Description of Artificial Sequence: Synthetic oligonucleotide
  Antisense strand to SEQ ID NO: 2004632
auaggaccaaguuucagac

SEQ ID NO: 2004634 - RNA, 19 nt, Artificial Sequence
  Description of Artificial Sequence: Synthetic oligonucleotide
  Sense strand starting at position 3424 of SEQ ID NO: 1880927
ucugaaacuugguccuaug

SEQ ID NO: 2004635 - RNA, 19 nt, Artificial Sequence
  Description of Artificial Sequence: Synthetic oligonucleotide
  Antisense strand to SEQ ID NO: 2004634
cauaggaccaaguuucaga

SEQ ID NO: 2004636 - RNA, 19 nt, Artificial Sequence
  Description of Artificial Sequence: Synthetic oligonucleotide
  Sense strand starting at position 3434 of SEQ ID NO: 1880927
gguccuaugccuuagagag

SEQ ID NO: 2004637 - RNA, 19 nt, Artificial Sequence
  Description of Artificial Sequence: Synthetic oligonucleotide
  Antisense strand to SEQ ID NO: 2004636
cucucuaaggcauaggacc

SEQ ID NO: 2004638 - RNA, 19 nt, Artificial Sequence
  Description of Artificial Sequence: Synthetic oligonucleotide
  Sense strand starting at position 3599 of SEQ ID NO: 1880927
gcuaguaaaguuugaauga

SEQ ID NO: 2004639 - RNA, 19 nt, Artificial Sequence
  Description of Artificial Sequence: Synthetic oligonucleotide
  Antisense strand to SEQ ID NO: 2004638
ucauucaaacuuuacuagc

SEQ ID NO: 2004640 - RNA, 19 nt, Artificial Sequence
  Description of Artificial Sequence: Synthetic oligonucleotide
  Sense strand starting at position 3672 of SEQ ID NO: 1880927
guauguuuaagugaagucu

SEQ ID NO: 2004641 - RNA, 19 nt, Artificial Sequence
  Description of Artificial Sequence: Synthetic oligonucleotide
  Antisense strand to SEQ ID NO: 2004640
agacuucacuuaaacauac

SEQ ID NO: 2004642 - RNA, 19 nt, Artificial Sequence
  Description of Artificial Sequence: Synthetic oligonucleotide
  Sense strand starting at position 3760 of SEQ ID NO: 1880927
uuccacucaguuugagaaa

SEQ ID NO: 2004643 - RNA, 19 nt, Artificial Sequence
  Description of Artificial Sequence: Synthetic oligonucleotide
  Antisense strand to SEQ ID NO: 2004642
uuucucaaacugaguggaa

SEQ ID NO: 2004644 - RNA, 19 nt, Artificial Sequence
  Description of Artificial Sequence: Synthetic oligonucleotide
  Sense strand starting at position 3778 of SEQ ID NO: 1880927
auagaacauuacuagggau

SEQ ID NO: 2004645 - RNA, 19 nt, Artificial Sequence
  Description of Artificial Sequence: Synthetic oligonucleotide
  Antisense strand to SEQ ID NO: 2004644
aucccuaguaauguucuau

SEQ ID NO: 2004646 - RNA, 19 nt, Artificial Sequence
  Description of Artificial Sequence: Synthetic oligonucleotide
  Sense strand starting at position 234 of SEQ ID NO: 1880928
gggaucugguccuuagacu

SEQ ID NO: 2004647 - RNA, 19 nt, Artificial Sequence
  Description of Artificial Sequence: Synthetic oligonucleotide
  Antisense strand to SEQ ID NO: 2004646
agucuaaggaccagauccc

SEQ ID NO: 2004648 - RNA, 19 nt, Artificial Sequence
  Description of Artificial Sequence: Synthetic oligonucleotide
  Sense strand starting at position 284 of SEQ ID NO: 1880928
gggugaguccuccagacuc

SEQ ID NO: 2004649 - RNA, 19 nt, Artificial Sequence
  Description of Artificial Sequence: Synthetic oligonucleotide
  Antisense strand to SEQ ID NO: 2004648
gagucuggaggacucaccc

SEQ ID NO: 2004650 - RNA, 19 nt, Artificial Sequence
  Description of Artificial Sequence: Synthetic oligonucleotide
  Sense strand starting at position 286 of SEQ ID NO: 1880928
gugaguccuccagacucaa

SEQ ID NO: 2004651 - RNA, 19 nt, Artificial Sequence
  Description of Artificial Sequence: Synthetic oligonucleotide
  Antisense strand to SEQ ID NO: 2004650
uugagucuggaggacucac

SEQ ID NO: 2004652 - RNA, 19 nt, Artificial Sequence
  Description of Artificial Sequence: Synthetic oligonucleotide
  Sense strand starting at position 312 of SEQ ID NO: 1880928
acuguuaaucugggagucu

SEQ ID NO: 2004653 - RNA, 19 nt, Artificial Sequence
  Description of Artificial Sequence: Synthetic oligonucleotide
  Antisense strand to SEQ ID NO: 2004652
agacucccagauuaacagu

SEQ ID NO: 2004654 - RNA, 19 nt, Artificial Sequence
  Description of Artificial Sequence: Synthetic oligonucleotide
  Sense strand starting at position 313 of SEQ ID NO: 1880928
cuguuaaucugggagucuu

SEQ ID NO: 2004655 - RNA, 19 nt, Artificial Sequence
  Description of Artificial Sequence: Synthetic oligonucleotide
  Antisense strand to SEQ ID NO: 2004654
aagacucccagauuaacag

SEQ ID NO: 2004656 - RNA, 19 nt, Artificial Sequence
  Description of Artificial Sequence: Synthetic oligonucleotide
  Sense strand starting at position 321 of SEQ ID NO: 1880928
cugggagucuuccacaucu

SEQ ID NO: 2004657 - RNA, 19 nt, Artificial Sequence
  Description of Artificial Sequence: Synthetic oligonucleotide
  Antisense strand to SEQ ID NO: 2004656
agauguggaagacucccag

SEQ ID NO: 2004658 - RNA, 19 nt, Artificial Sequence
  Description of Artificial Sequence: Synthetic oligonucleotide
  Sense strand starting at position 323 of SEQ ID NO: 1880928
gggagucuuccacaucugu

SEQ ID NO: 2004659 - RNA, 19 nt, Artificial Sequence
  Description of Artificial Sequence: Synthetic oligonucleotide
  Antisense strand to SEQ ID NO: 2004658
acagauguggaagacuccc

SEQ ID NO: 2004660 - RNA, 19 nt, Artificial Sequence
  Description of Artificial Sequence: Synthetic oligonucleotide
  Sense strand starting at position 355 of SEQ ID NO: 1880928
ucuauaacccugggaaacu

SEQ ID NO: 2004661 - RNA, 19 nt, Artificial Sequence
  Description of Artificial Sequence: Synthetic oligonucleotide
  Antisense strand to SEQ ID NO: 2004660
aguuucccaggguuauaga

SEQ ID NO: 2004662 - RNA, 19 nt, Artificial Sequence
  Description of Artificial Sequence: Synthetic oligonucleotide
  Sense strand starting at position 454 of SEQ ID NO: 1880928
cugggauucugguuaggug

SEQ ID NO: 2004663 - RNA, 19 nt, Artificial Sequence
  Description of Artificial Sequence: Synthetic oligonucleotide
  Antisense strand to SEQ ID NO: 2004662
caccuaaccagaaucccag

SEQ ID NO: 2004664 - RNA, 19 nt, Artificial Sequence
  Description of Artificial Sequence: Synthetic oligonucleotide
  Sense strand starting at position 455 of SEQ ID NO: 1880928
ugggauucugguuagguga

SEQ ID NO: 2004665 - RNA, 19 nt, Artificial Sequence
  Description of Artificial Sequence: Synthetic oligonucleotide
  Antisense strand to SEQ ID NO: 2004664
ucaccuaaccagaauccca

SEQ ID NO: 2004666 - RNA, 19 nt, Artificial Sequence
  Description of Artificial Sequence: Synthetic oligonucleotide
  Sense strand starting at position 509 of SEQ ID NO: 1880928
gggcuucauccuggaagug

SEQ ID NO: 2004667 - RNA, 19 nt, Artificial Sequence
  Description of Artificial Sequence: Synthetic oligonucleotide
  Antisense strand to SEQ ID NO: 2004666
cacuuccaggaugaagccc

SEQ ID NO: 2004668 - RNA, 19 nt, Artificial Sequence
  Description of Artificial Sequence: Synthetic oligonucleotide
  Sense strand starting at position 510 of SEQ ID NO: 1880928
ggcuucauccuggaaguga

SEQ ID NO: 2004669 - RNA, 19 nt, Artificial Sequence
  Description of Artificial Sequence: Synthetic oligonucleotide
  Antisense strand to SEQ ID NO: 2004668
ucacuuccaggaugaagcc

SEQ ID NO: 2004670 - RNA, 19 nt, Artificial Sequence
  Description of Artificial Sequence: Synthetic oligonucleotide
  Sense strand starting at position 560 of SEQ ID NO: 1880928
cgugaaugugcaugagugu

SEQ ID NO: 2004671 - RNA, 19 nt, Artificial Sequence
  Description of Artificial Sequence: Synthetic oligonucleotide
  Antisense strand to SEQ ID NO: 2004670
acacucaugcacauucacg

SEQ ID NO: 2004672 - RNA, 19 nt, Artificial Sequence
  Description of Artificial Sequence: Synthetic oligonucleotide
  Sense strand starting at position 604 of SEQ ID NO: 1880928
ggugcugaaccuuaauaug

SEQ ID NO: 2004673 - RNA, 19 nt, Artificial Sequence
  Description of Artificial Sequence: Synthetic oligonucleotide
  Antisense strand to SEQ ID NO: 2004672
cauauuaagguucagcacc

SEQ ID NO: 2004674 - RNA, 19 nt, Artificial Sequence
  Description of Artificial Sequence: Synthetic oligonucleotide
  Sense strand starting at position 612 of SEQ ID NO: 1880928
accuuaauaugaggaggau

SEQ ID NO: 2004675 - RNA, 19 nt, Artificial Sequence
  Description of Artificial Sequence: Synthetic oligonucleotide
  Antisense strand to SEQ ID NO: 2004674
auccuccucauauuaaggu

SEQ ID NO: 2004676 - RNA, 19 nt, Artificial Sequence
  Description of Artificial Sequence: Synthetic oligonucleotide
  Sense strand starting at position 745 of SEQ ID NO: 1880928
acaggcugugccuaaugua

SEQ ID NO: 2004677 - RNA, 19 nt, Artificial Sequence
  Description of Artificial Sequence: Synthetic oligonucleotide
  Antisense strand to SEQ ID NO: 2004676
uacauuaggcacagccugu

SEQ ID NO: 2004678 - RNA, 19 nt, Artificial Sequence
  Description of Artificial Sequence: Synthetic oligonucleotide
  Sense strand starting at position 803 of SEQ ID NO: 1880928
cagagacccuuguguagaa

SEQ ID NO: 2004679 - RNA, 19 nt, Artificial Sequence
  Description of Artificial Sequence: Synthetic oligonucleotide
  Antisense strand to SEQ ID NO: 2004678
uucuacacaagggucucug

SEQ ID NO: 2004680 - RNA, 19 nt, Artificial Sequence
  Description of Artificial Sequence: Synthetic oligonucleotide
  Sense strand starting at position 1206 of SEQ ID NO: 1880928
cucacucacucugguauuu

SEQ ID NO: 2004681 - RNA, 19 nt, Artificial Sequence
  Description of Artificial Sequence: Synthetic oligonucleotide
  Antisense strand to SEQ ID NO: 2004680
aaauaccagagugagugag

SEQ ID NO: 2004682 - RNA, 19 nt, Artificial Sequence
  Description of Artificial Sequence: Synthetic oligonucleotide
  Sense strand starting at position 1433 of SEQ ID NO: 1880928
agccucuuguccuagacaa

SEQ ID NO: 2004683 - RNA, 19 nt, Artificial Sequence
  Description of Artificial Sequence: Synthetic oligonucleotide
  Antisense strand to SEQ ID NO: 2004682
uugucuaggacaagaggcu

SEQ ID NO: 2004684 - RNA, 19 nt, Artificial Sequence
  Description of Artificial Sequence: Synthetic oligonucleotide
  Sense strand starting at position 1467 of SEQ ID NO: 1880928
gucgcauaugucccagcuu

SEQ ID NO: 2004685 - RNA, 19 nt, Artificial Sequence
  Description of Artificial Sequence: Synthetic oligonucleotide
  Antisense strand to SEQ ID NO: 2004684
aagcugggacauaugcgac

SEQ ID NO: 2004686 - RNA, 19 nt, Artificial Sequence
  Description of Artificial Sequence: Synthetic oligonucleotide
  Sense strand starting at position 1511 of SEQ ID NO: 1880928
cacucagucgcuggaguuu

SEQ ID NO: 2004687 - RNA, 19 nt, Artificial Sequence
  Description of Artificial Sequence: Synthetic oligonucleotide
  Antisense strand to SEQ ID NO: 2004686
aaacuccagcgacugagug

SEQ ID NO: 2004688 - RNA, 19 nt, Artificial Sequence
  Description of Artificial Sequence: Synthetic oligonucleotide
  Sense strand starting at position 1522 of SEQ ID NO: 1880928
uggaguuucccagacccga

SEQ ID NO: 2004689 - RNA, 19 nt, Artificial Sequence
  Description of Artificial Sequence: Synthetic oligonucleotide
  Antisense strand to SEQ ID NO: 2004688
ucgggucugggaaacucca

SEQ ID NO: 2004690 - RNA, 19 nt, Artificial Sequence
  Description of Artificial Sequence: Synthetic oligonucleotide
  Sense strand starting at position 2069 of SEQ ID NO: 1880928
cggguguugcucuggaguu

SEQ ID NO: 2004691 - RNA, 19 nt, Artificial Sequence
  Description of Artificial Sequence: Synthetic oligonucleotide
  Antisense strand to SEQ ID NO: 2004690
aacuccagagcaacacccg

SEQ ID NO: 2004692 - RNA, 19 nt, Artificial Sequence
  Description of Artificial Sequence: Synthetic oligonucleotide
  Sense strand starting at position 2423 of SEQ ID NO: 1880928
gcuguguggguucguggaa

SEQ ID NO: 2004693 - RNA, 19 nt, Artificial Sequence
  Description of Artificial Sequence: Synthetic oligonucleotide
  Antisense strand to SEQ ID NO: 2004692
uuccacgaacccacacagc

SEQ ID NO: 2004694 - RNA, 19 nt, Artificial Sequence
  Description of Artificial Sequence: Synthetic oligonucleotide
  Sense strand starting at position 2426 of SEQ ID NO: 1880928
guguggguucguggaacuu

SEQ ID NO: 2004695 - RNA, 19 nt, Artificial Sequence
  Description of Artificial Sequence: Synthetic oligonucleotide
  Antisense strand to SEQ ID NO: 2004694
aaguuccacgaacccacac

SEQ ID NO: 2004696 - RNA, 19 nt, Artificial Sequence
  Description of Artificial Sequence: Synthetic oligonucleotide
  Sense strand starting at position 2634 of SEQ ID NO: 1880928
gcugaagacuuaucuggga

SEQ ID NO: 2004697 - RNA, 19 nt, Artificial Sequence
  Description of Artificial Sequence: Synthetic oligonucleotide
  Antisense strand to SEQ ID NO: 2004696
ucccagauaagucuucagc

SEQ ID NO: 2004698 - RNA, 19 nt, Artificial Sequence
  Description of Artificial Sequence: Synthetic oligonucleotide
  Sense strand starting at position 2637 of SEQ ID NO: 1880928
gaagacuuaucugggacag

SEQ ID NO: 2004699 - RNA, 19 nt, Artificial Sequence
  Description of Artificial Sequence: Synthetic oligonucleotide
  Antisense strand to SEQ ID NO: 2004698
cugucccagauaagucuuc

SEQ ID NO: 2004700 - RNA, 19 nt, Artificial Sequence
  Description of Artificial Sequence: Synthetic oligonucleotide
  Sense strand starting at position 2639 of SEQ ID NO: 1880928
agacuuaucugggacagac

SEQ ID NO: 2004701 - RNA, 19 nt, Artificial Sequence
  Description of Artificial Sequence: Synthetic oligonucleotide
  Antisense strand to SEQ ID NO: 2004700
gucugucccagauaagucu

SEQ ID NO: 2004702 - RNA, 19 nt, Artificial Sequence
  Description of Artificial Sequence: Synthetic oligonucleotide
  Sense strand starting at position 2977 of SEQ ID NO: 1880928
ggaguuuacugucugccaa

SEQ ID NO: 2004703 - RNA, 19 nt, Artificial Sequence
  Description of Artificial Sequence: Synthetic oligonucleotide
  Antisense strand to SEQ ID NO: 2004702
uuggcagacaguaaacucc

SEQ ID NO: 2004704 - RNA, 19 nt, Artificial Sequence
  Description of Artificial Sequence: Synthetic oligonucleotide
  Sense strand starting at position 2978 of SEQ ID NO: 1880928
gaguuuacugucugccaag

SEQ ID NO: 2004705 - RNA, 19 nt, Artificial Sequence
  Description of Artificial Sequence: Synthetic oligonucleotide
  Antisense strand to SEQ ID NO: 2004704
cuuggcagacaguaaacuc

SEQ ID NO: 2004706 - RNA, 19 nt, Artificial Sequence
  Description of Artificial Sequence: Synthetic oligonucleotide
  Sense strand starting at position 3029 of SEQ ID NO: 1880928
gggacccuugucugaguga

SEQ ID NO: 2004707 - RNA, 19 nt, Artificial Sequence
  Description of Artificial Sequence: Synthetic oligonucleotide
  Antisense strand to SEQ ID NO: 2004706
ucacucagacaaggguccc

SEQ ID NO: 2004708 - RNA, 19 nt, Artificial Sequence
  Description of Artificial Sequence: Synthetic oligonucleotide
  Sense strand starting at position 3586 of SEQ ID NO: 1880928
agcgguacauucuggaaga

SEQ ID NO: 2004709 - RNA, 19 nt, Artificial Sequence
  Description of Artificial Sequence: Synthetic oligonucleotide
  Antisense strand to SEQ ID NO: 2004708
ucuuccagaauguaccgcu

SEQ ID NO: 2004710 - RNA, 19 nt, Artificial Sequence
  Description of Artificial Sequence: Synthetic oligonucleotide
  Sense strand starting at position 3630 of SEQ ID NO: 1880928
uccucuugcugugugauca

SEQ ID NO: 2004711 - RNA, 19 nt, Artificial Sequence
  Description of Artificial Sequence: Synthetic oligonucleotide
  Antisense strand to SEQ ID NO: 2004710
ugaucacacagcaagagga

SEQ ID NO: 2004712 - RNA, 19 nt, Artificial Sequence
  Description of Artificial Sequence: Synthetic oligonucleotide
  Sense strand starting at position 3655 of SEQ ID NO: 1880928
guguguggccucucuguaa

SEQ ID NO: 2004713 - RNA, 19 nt, Artificial Sequence
  Description of Artificial Sequence: Synthetic oligonucleotide
  Antisense strand to SEQ ID NO: 2004712
uuacagagaggccacacac

SEQ ID NO: 2004714 - RNA, 19 nt, Artificial Sequence
  Description of Artificial Sequence: Synthetic oligonucleotide
  Sense strand starting at position 3659 of SEQ ID NO: 1880928
guggccucucuguaacgua

SEQ ID NO: 2004715 - RNA, 19 nt, Artificial Sequence
  Description of Artificial Sequence: Synthetic oligonucleotide
  Antisense strand to SEQ ID NO: 2004714
uacguuacagagaggccac

SEQ ID NO: 2004716 - RNA, 19 nt, Artificial Sequence
  Description of Artificial Sequence: Synthetic oligonucleotide
  Sense strand starting at position 3772 of SEQ ID NO: 1880928
cagggaugagcacgguuua

SEQ ID NO: 2004717 - RNA, 19 nt, Artificial Sequence
  Description of Artificial Sequence: Synthetic oligonucleotide
  Antisense strand to SEQ ID NO: 2004716
uaaaccgugcucaucccug

SEQ ID NO: 2004718 - RNA, 19 nt, Artificial Sequence
  Description of Artificial Sequence: Synthetic oligonucleotide
  Sense strand starting at position 3782 of SEQ ID NO: 1880928
cacgguuuagaggaucuau

SEQ ID NO: 2004719 - RNA, 19 nt, Artificial Sequence
  Description of Artificial Sequence: Synthetic oligonucleotide
  Antisense strand to SEQ ID NO: 2004718
auagauccucuaaaccgug

SEQ ID NO: 2004720 - RNA, 19 nt, Artificial Sequence
  Description of Artificial Sequence: Synthetic oligonucleotide
  Sense strand starting at position 3945 of SEQ ID NO: 1880928
gcaggacagaucugaucuu

SEQ ID NO: 2004721 - RNA, 19 nt, Artificial Sequence
  Description of Artificial Sequence: Synthetic oligonucleotide
  Antisense strand to SEQ ID NO: 2004720
aagaucagaucuguccugc

SEQ ID NO: 2004722 - RNA, 19 nt, Artificial Sequence
  Description of Artificial Sequence: Synthetic oligonucleotide
  Sense strand starting at position 3946 of SEQ ID NO: 1880928
caggacagaucugaucuua

SEQ ID NO: 2004723 - RNA, 19 nt, Artificial Sequence
  Description of Artificial Sequence: Synthetic oligonucleotide
  Antisense strand to SEQ ID NO: 2004722
uaagaucagaucuguccug

SEQ ID NO: 2004724 - RNA, 19 nt, Artificial Sequence
  Description of Artificial Sequence: Synthetic oligonucleotide
  Sense strand starting at position 3958 of SEQ ID NO: 1880928
gaucuuaugcuaggugucu

SEQ ID NO: 2004725 - RNA, 19 nt, Artificial Sequence
  Description of Artificial Sequence: Synthetic oligonucleotide
  Antisense strand to SEQ ID NO: 2004724
agacaccuagcauaagauc

SEQ ID NO: 2004726 - RNA, 19 nt, Artificial Sequence
  Description of Artificial Sequence: Synthetic oligonucleotide
  Sense strand starting at position 193 of SEQ ID NO: 1880929
gcagcagugccugagacua

SEQ ID NO: 2004727 - RNA, 19 nt, Artificial Sequence
  Description of Artificial Sequence: Synthetic oligonucleotide
  Antisense strand to SEQ ID NO: 2004726
uagucucaggcacugcugc

SEQ ID NO: 2004728 - RNA, 19 nt, Artificial Sequence
  Description of Artificial Sequence: Synthetic oligonucleotide
  Sense strand starting at position 494 of SEQ ID NO: 1880929
caggauuacagguguuuga

SEQ ID NO: 2004729 - RNA, 19 nt, Artificial Sequence
  Description of Artificial Sequence: Synthetic oligonucleotide
  Antisense strand to SEQ ID NO: 2004728
ucaaacaccuguaauccug

SEQ ID NO: 2004730 - RNA, 19 nt, Artificial Sequence
  Description of Artificial Sequence: Synthetic oligonucleotide
  Sense strand starting at position 498 of SEQ ID NO: 1880929
auuacagguguuugaguca

SEQ ID NO: 2004731 - RNA, 19 nt, Artificial Sequence
  Description of Artificial Sequence: Synthetic oligonucleotide
  Antisense strand to SEQ ID NO: 2004730
ugacucaaacaccuguaau

SEQ ID NO: 2004732 - RNA, 19 nt, Artificial Sequence
  Description of Artificial Sequence: Synthetic oligonucleotide
  Sense strand starting at position 572 of SEQ ID NO: 1880929
gccagagagcagcauauua

SEQ ID NO: 2004733 - RNA, 19 nt, Artificial Sequence
  Description of Artificial Sequence: Synthetic oligonucleotide
  Antisense strand to SEQ ID NO: 2004732
uaauaugcugcucucuggc

SEQ ID NO: 2004734 - RNA, 19 nt, Artificial Sequence
  Description of Artificial Sequence: Synthetic oligonucleotide
  Sense strand starting at position 603 of SEQ ID NO: 1880929
ggccuccuagccugaugua

SEQ ID NO: 2004735 - RNA, 19 nt, Artificial Sequence
  Description of Artificial Sequence: Synthetic oligonucleotide
  Antisense strand to SEQ ID NO: 2004734
uacaucaggcuaggaggcc

SEQ ID NO: 2004736 - RNA, 19 nt, Artificial Sequence
  Description of Artificial Sequence: Synthetic oligonucleotide
  Sense strand starting at position 618 of SEQ ID NO: 1880929
uguaguaagacugggauau

SEQ ID NO: 2004737 - RNA, 19 nt, Artificial Sequence
  Description of Artificial Sequence: Synthetic oligonucleotide
  Antisense strand to SEQ ID NO: 2004736
auaucccagucuuacuaca

SEQ ID NO: 2004738 - RNA, 19 nt, Artificial Sequence
  Description of Artificial Sequence: Synthetic oligonucleotide
  Sense strand starting at position 619 of SEQ ID NO: 1880929
guaguaagacugggauauu

SEQ ID NO: 2004739 - RNA, 19 nt, Artificial Sequence
  Description of Artificial Sequence: Synthetic oligonucleotide
  Antisense strand to SEQ ID NO: 2004738
aauaucccagucuuacuac

SEQ ID NO: 2004740 - RNA, 19 nt, Artificial Sequence
  Description of Artificial Sequence: Synthetic oligonucleotide
  Sense strand starting at position 620 of SEQ ID NO: 1880929
uaguaagacugggauauuc

SEQ ID NO: 2004741 - RNA, 19 nt, Artificial Sequence
  Description of Artificial Sequence: Synthetic oligonucleotide
  Antisense strand to SEQ ID NO: 2004740
gaauaucccagucuuacua

SEQ ID NO: 2004742 - RNA, 19 nt, Artificial Sequence
  Description of Artificial Sequence: Synthetic oligonucleotide
  Sense strand starting at position 644 of SEQ ID NO: 1880929
ccuacaaaugucugugucu

SEQ ID NO: 2004743 - RNA, 19 nt, Artificial Sequence
  Description of Artificial Sequence: Synthetic oligonucleotide
  Antisense strand to SEQ ID NO: 2004742
agacacagacauuuguagg

SEQ ID NO: 2004744 - RNA, 19 nt, Artificial Sequence
  Description of Artificial Sequence: Synthetic oligonucleotide
  Sense strand starting at position 651 of SEQ ID NO: 1880929
augucugugucucuggaaa

SEQ ID NO: 2004745 - RNA, 19 nt, Artificial Sequence
  Description of Artificial Sequence: Synthetic oligonucleotide
  Antisense strand to SEQ ID NO: 2004744
uuuccagagacacagacau

SEQ ID NO: 2004746 - RNA, 19 nt, Artificial Sequence
  Description of Artificial Sequence: Synthetic oligonucleotide
  Sense strand starting at position 665 of SEQ ID NO: 1880929
ggaaaugacucagggauuc

SEQ ID NO: 2004747 - RNA, 19 nt, Artificial Sequence
  Description of Artificial Sequence: Synthetic oligonucleotide
  Antisense strand to SEQ ID NO: 2004746
gaaucccugagucauuucc

SEQ ID NO: 2004748 - RNA, 19 nt, Artificial Sequence
  Description of Artificial Sequence: Synthetic oligonucleotide
  Sense strand starting at position 675 of SEQ ID NO: 1880929
cagggauucuguccaagac

SEQ ID NO: 2004749 - RNA, 19 nt, Artificial Sequence
  Description of Artificial Sequence: Synthetic oligonucleotide
  Antisense strand to SEQ ID NO: 2004748
gucuuggacagaaucccug

SEQ ID NO: 2004750 - RNA, 19 nt, Artificial Sequence
  Description of Artificial Sequence: Synthetic oligonucleotide
  Sense strand starting at position 679 of SEQ ID NO: 1880929
gauucuguccaagacugca

SEQ ID NO: 2004751 - RNA, 19 nt, Artificial Sequence
  Description of Artificial Sequence: Synthetic oligonucleotide
  Antisense strand to SEQ ID NO: 2004750
ugcagucuuggacagaauc

SEQ ID NO: 2004752 - RNA, 19 nt, Artificial Sequence
  Description of Artificial Sequence: Synthetic oligonucleotide
  Sense strand starting at position 702 of SEQ ID NO: 1880929
cugagaagcuguguuugac

SEQ ID NO: 2004753 - RNA, 19 nt, Artificial Sequence
  Description of Artificial Sequence: Synthetic oligonucleotide
  Antisense strand to SEQ ID NO: 2004752
gucaaacacagcuucucag

SEQ ID NO: 2004754 - RNA, 19 nt, Artificial Sequence
  Description of Artificial Sequence: Synthetic oligonucleotide
  Sense strand starting at position 705 of SEQ ID NO: 1880929
agaagcuguguuugacuca

SEQ ID NO: 2004755 - RNA, 19 nt, Artificial Sequence
  Description of Artificial Sequence: Synthetic oligonucleotide
  Antisense strand to SEQ ID NO: 2004754
ugagucaaacacagcuucu

SEQ ID NO: 2004756 - RNA, 19 nt, Artificial Sequence
  Description of Artificial Sequence: Synthetic oligonucleotide
  Sense strand starting at position 712 of SEQ ID NO: 1880929
guguuugacucaucucugu

SEQ ID NO: 2004757 - RNA, 19 nt, Artificial Sequence
  Description of Artificial Sequence: Synthetic oligonucleotide
  Antisense strand to SEQ ID NO: 2004756
acagagaugagucaaacac

SEQ ID NO: 2004758 - RNA, 19 nt, Artificial Sequence
  Description of Artificial Sequence: Synthetic oligonucleotide
  Sense strand starting at position 765 of SEQ ID NO: 1880929
gcuggcucaugacuaagaa

SEQ ID NO: 2004759 - RNA, 19 nt, Artificial Sequence
  Description of Artificial Sequence: Synthetic oligonucleotide
  Antisense strand to SEQ ID NO: 2004758
uucuuagucaugagccagc

SEQ ID NO: 2004760 - RNA, 19 nt, Artificial Sequence
  Description of Artificial Sequence: Synthetic oligonucleotide
  Sense strand starting at position 820 of SEQ ID NO: 1880929
uggucuuagcucugcaaug

SEQ ID NO: 2004761 - RNA, 19 nt, Artificial Sequence
  Description of Artificial Sequence: Synthetic oligonucleotide
  Antisense strand to SEQ ID NO: 2004760
cauugcagagcuaagacca

SEQ ID NO: 2004762 - RNA, 19 nt, Artificial Sequence
  Description of Artificial Sequence: Synthetic oligonucleotide
  Sense strand starting at position 822 of SEQ ID NO: 1880929
gucuuagcucugcaauguc

SEQ ID NO: 2004763 - RNA, 19 nt, Artificial Sequence
  Description of Artificial Sequence: Synthetic oligonucleotide
  Antisense strand to SEQ ID NO: 2004762
gacauugcagagcuaagac

SEQ ID NO: 2004764 - RNA, 19 nt, Artificial Sequence
  Description of Artificial Sequence: Synthetic oligonucleotide
  Sense strand starting at position 1022 of SEQ ID NO: 1880929
ugguucuacacguggcaaa

SEQ ID NO: 2004765 - RNA, 19 nt, Artificial Sequence
  Description of Artificial Sequence: Synthetic oligonucleotide
  Antisense strand to SEQ ID NO: 2004764
uuugccacguguagaacca

SEQ ID NO: 2004766 - RNA, 19 nt, Artificial Sequence
  Description of Artificial Sequence: Synthetic oligonucleotide
  Sense strand starting at position 1302 of SEQ ID NO: 1880929
accucuagcucuucugaga

SEQ ID NO: 2004767 - RNA, 19 nt, Artificial Sequence
  Description of Artificial Sequence: Synthetic oligonucleotide
  Antisense strand to SEQ ID NO: 2004766
ucucagaagagcuagaggu

SEQ ID NO: 2004768 - RNA, 19 nt, Artificial Sequence
  Description of Artificial Sequence: Synthetic oligonucleotide
  Sense strand starting at position 1319 of SEQ ID NO: 1880929
gaaggcuguccuuggaauc

SEQ ID NO: 2004769 - RNA, 19 nt, Artificial Sequence
  Description of Artificial Sequence: Synthetic oligonucleotide
  Antisense strand to SEQ ID NO: 2004768
gauuccaaggacagccuuc

SEQ ID NO: 2004770 - RNA, 19 nt, Artificial Sequence
  Description of Artificial Sequence: Synthetic oligonucleotide
  Sense strand starting at position 1431 of SEQ ID NO: 1880929
gcauaugagacacgucaaa

SEQ ID NO: 2004771 - RNA, 19 nt, Artificial Sequence
  Description of Artificial Sequence: Synthetic oligonucleotide
  Antisense strand to SEQ ID NO: 2004770
uuugacgugucucauaugc

SEQ ID NO: 2004772 - RNA, 19 nt, Artificial Sequence
  Description of Artificial Sequence: Synthetic oligonucleotide
  Sense strand starting at position 2100 of SEQ ID NO: 1880929
ggcugaaaggucugaauca

SEQ ID NO: 2004773 - RNA, 19 nt, Artificial Sequence
  Description of Artificial Sequence: Synthetic oligonucleotide
  Antisense strand to SEQ ID NO: 2004772
ugauucagaccuuucagcc

SEQ ID NO: 2004774 - RNA, 19 nt, Artificial Sequence
  Description of Artificial Sequence: Synthetic oligonucleotide
  Sense strand starting at position 2194 of SEQ ID NO: 1880929
acaguagucuguccucaug

SEQ ID NO: 2004775 - RNA, 19 nt, Artificial Sequence
  Description of Artificial Sequence: Synthetic oligonucleotide
  Antisense strand to SEQ ID NO: 2004774
caugaggacagacuacugu

SEQ ID NO: 2004776 - RNA, 19 nt, Artificial Sequence
  Description of Artificial Sequence: Synthetic oligonucleotide
  Sense strand starting at position 2384 of SEQ ID NO: 1880929
gaggacuacugcuucguca

SEQ ID NO: 2004777 - RNA, 19 nt, Artificial Sequence
  Description of Artificial Sequence: Synthetic oligonucleotide
  Antisense strand to SEQ ID NO: 2004776
ugacgaagcaguaguccuc

SEQ ID NO: 2004778 - RNA, 19 nt, Artificial Sequence
  Description of Artificial Sequence: Synthetic oligonucleotide
  Sense strand starting at position 2395 of SEQ ID NO: 1880929
cuucgucacgcuuuccgaa

SEQ ID NO: 2004779 - RNA, 19 nt, Artificial Sequence
  Description of Artificial Sequence: Synthetic oligonucleotide
  Antisense strand to SEQ ID NO: 2004778
uucggaaagcgugacgaag

SEQ ID NO: 2004780 - RNA, 19 nt, Artificial Sequence
  Description of Artificial Sequence: Synthetic oligonucleotide
  Sense strand starting at position 2425 of SEQ ID NO: 1880929
gggcuauguaagugaccuu

SEQ ID NO: 2004781 - RNA, 19 nt, Artificial Sequence
  Description of Artificial Sequence: Synthetic oligonucleotide
  Antisense strand to SEQ ID NO: 2004780
aaggucacuuacauagccc

SEQ ID NO: 2004782 - RNA, 19 nt, Artificial Sequence
  Description of Artificial Sequence: Synthetic oligonucleotide
  Sense strand starting at position 2665 of SEQ ID NO: 1880929
cacuuaaugguuggacuga

SEQ ID NO: 2004783 - RNA, 19 nt, Artificial Sequence
  Description of Artificial Sequence: Synthetic oligonucleotide
  Antisense strand to SEQ ID NO: 2004782
ucaguccaaccauuaagug

SEQ ID NO: 2004784 - RNA, 19 nt, Artificial Sequence
  Description of Artificial Sequence: Synthetic oligonucleotide
  Sense strand starting at position 2681 of SEQ ID NO: 1880929
ugaguuaaugcaggacuua

SEQ ID NO: 2004785 - RNA, 19 nt, Artificial Sequence
  Description of Artificial Sequence: Synthetic oligonucleotide
  Antisense strand to SEQ ID NO: 2004784
uaaguccugcauuaacuca

SEQ ID NO: 2004786 - RNA, 19 nt, Artificial Sequence
  Description of Artificial Sequence: Synthetic oligonucleotide
  Sense strand starting at position 2750 of SEQ ID NO: 1880929
cacgguugaucucucauua

SEQ ID NO: 2004787 - RNA, 19 nt, Artificial Sequence
  Description of Artificial Sequence: Synthetic oligonucleotide
  Antisense strand to SEQ ID NO: 2004786
uaaugagagaucaaccgug

SEQ ID NO: 2004788 - RNA, 19 nt, Artificial Sequence
  Description of Artificial Sequence: Synthetic oligonucleotide
  Sense strand starting at position 2754 of SEQ ID NO: 1880929
guugaucucucauuaugcu

SEQ ID NO: 2004789 - RNA, 19 nt, Artificial Sequence
  Description of Artificial Sequence: Synthetic oligonucleotide
  Antisense strand to SEQ ID NO: 2004788
agcauaaugagagaucaac

SEQ ID NO: 2004790 - RNA, 19 nt, Artificial Sequence
  Description of Artificial Sequence: Synthetic oligonucleotide
  Sense strand starting at position 2761 of SEQ ID NO: 1880929
ucucauuaugcugagcaua

SEQ ID NO: 2004791 - RNA, 19 nt, Artificial Sequence
  Description of Artificial Sequence: Synthetic oligonucleotide
  Antisense strand to SEQ ID NO: 2004790
uaugcucagcauaaugaga

SEQ ID NO: 2004792 - RNA, 19 nt, Artificial Sequence
  Description of Artificial Sequence: Synthetic oligonucleotide
  Sense strand starting at position 2763 of SEQ ID NO: 1880929
ucauuaugcugagcauauc

SEQ ID NO: 2004793 - RNA, 19 nt, Artificial Sequence
  Description of Artificial Sequence: Synthetic oligonucleotide
  Antisense strand to SEQ ID NO: 2004792
gauaugcucagcauaauga

SEQ ID NO: 2004794 - RNA, 19 nt, Artificial Sequence
  Description of Artificial Sequence: Synthetic oligonucleotide
  Sense strand starting at position 2771 of SEQ ID NO: 1880929
cugagcauaucucuuggaa

SEQ ID NO: 2004795 - RNA, 19 nt, Artificial Sequence
  Description of Artificial Sequence: Synthetic oligonucleotide
  Antisense strand to SEQ ID NO: 2004794
uuccaagagauaugcucag

SEQ ID NO: 2004796 - RNA, 19 nt, Artificial Sequence
  Description of Artificial Sequence: Synthetic oligonucleotide
  Sense strand starting at position 2774 of SEQ ID NO: 1880929
agcauaucucuuggaaagg

SEQ ID NO: 2004797 - RNA, 19 nt, Artificial Sequence
  Description of Artificial Sequence: Synthetic oligonucleotide
  Antisense strand to SEQ ID NO: 2004796
ccuuuccaagagauaugcu

SEQ ID NO: 2004798 - RNA, 19 nt, Artificial Sequence
  Description of Artificial Sequence: Synthetic oligonucleotide
  Sense strand starting at position 3123 of SEQ ID NO: 1880929
agagaugugcuuugggcua

SEQ ID NO: 2004799 - RNA, 19 nt, Artificial Sequence
  Description of Artificial Sequence: Synthetic oligonucleotide
  Antisense strand to SEQ ID NO: 2004798
uagcccaaagcacaucucu

SEQ ID NO: 2004800 - RNA, 19 nt, Artificial Sequence
  Description of Artificial Sequence: Synthetic oligonucleotide
  Sense strand starting at position 3720 of SEQ ID NO: 1880929
cuguuucuuccucaagugu

SEQ ID NO: 2004801 - RNA, 19 nt, Artificial Sequence
  Description of Artificial Sequence: Synthetic oligonucleotide
  Antisense strand to SEQ ID NO: 2004800
acacuugaggaagaaacag

SEQ ID NO: 2004802 - RNA, 19 nt, Artificial Sequence
  Description of Artificial Sequence: Synthetic oligonucleotide
  Sense strand starting at position 3880 of SEQ ID NO: 1880929
cagggauucucaguaagua

SEQ ID NO: 2004803 - RNA, 19 nt, Artificial Sequence
  Description of Artificial Sequence: Synthetic oligonucleotide
  Antisense strand to SEQ ID NO: 2004802
uacuuacugagaaucccug

SEQ ID NO: 2004804 - RNA, 19 nt, Artificial Sequence
  Description of Artificial Sequence: Synthetic oligonucleotide
  Sense strand starting at position 3974 of SEQ ID NO: 1880929
ggagcucaugcugaaguaa

SEQ ID NO: 2004805 - RNA, 19 nt, Artificial Sequence
  Description of Artificial Sequence: Synthetic oligonucleotide
  Antisense strand to SEQ ID NO: 2004804
uuacuucagcaugagcucc

SEQ ID NO: 2004806 - RNA, 19 nt, Artificial Sequence
  Description of Artificial Sequence: Synthetic oligonucleotide
  Sense strand starting at position 26 of SEQ ID NO: 1880930
acuuguggaucugcagaaa

SEQ ID NO: 2004807 - RNA, 19 nt, Artificial Sequence
  Description of Artificial Sequence: Synthetic oligonucleotide
  Antisense strand to SEQ ID NO: 2004806
uuucugcagauccacaagu

SEQ ID NO: 2004808 - RNA, 19 nt, Artificial Sequence
  Description of Artificial Sequence: Synthetic oligonucleotide
  Sense strand starting at position 223 of SEQ ID NO: 1880930
aaguaaauucccuguagga

SEQ ID NO: 2004809 - RNA, 19 nt, Artificial Sequence
  Description of Artificial Sequence: Synthetic oligonucleotide
  Antisense strand to SEQ ID NO: 2004808
uccuacagggaauuuacuu

SEQ ID NO: 2004810 - RNA, 19 nt, Artificial Sequence
  Description of Artificial Sequence: Synthetic oligonucleotide
  Sense strand starting at position 225 of SEQ ID NO: 1880930
guaaauucccuguaggaug

SEQ ID NO: 2004811 - RNA, 19 nt, Artificial Sequence
  Description of Artificial Sequence: Synthetic oligonucleotide
  Antisense strand to SEQ ID NO: 2004810
cauccuacagggaauuuac

SEQ ID NO: 2004812 - RNA, 19 nt, Artificial Sequence
  Description of Artificial Sequence: Synthetic oligonucleotide
  Sense strand starting at position 314 of SEQ ID NO: 1880930
ucaaguauguuaucguuug

SEQ ID NO: 2004813 - RNA, 19 nt, Artificial Sequence
  Description of Artificial Sequence: Synthetic oligonucleotide
  Antisense strand to SEQ ID NO: 2004812
caaacgauaacauacuuga

SEQ ID NO: 2004814 - RNA, 19 nt, Artificial Sequence
  Description of Artificial Sequence: Synthetic oligonucleotide
  Sense strand starting at position 315 of SEQ ID NO: 1880930
caaguauguuaucguuugu

SEQ ID NO: 2004815 - RNA, 19 nt, Artificial Sequence
  Description of Artificial Sequence: Synthetic oligonucleotide
  Antisense strand to SEQ ID NO: 2004814
acaaacgauaacauacuug

SEQ ID NO: 2004816 - RNA, 19 nt, Artificial Sequence
  Description of Artificial Sequence: Synthetic oligonucleotide
  Sense strand starting at position 706 of SEQ ID NO: 1880930
gccugcuugugaggucauu

SEQ ID NO: 2004817 - RNA, 19 nt, Artificial Sequence
  Description of Artificial Sequence: Synthetic oligonucleotide
  Antisense strand to SEQ ID NO: 2004816
aaugaccucacaagcaggc

SEQ ID NO: 2004818 - RNA, 19 nt, Artificial Sequence
  Description of Artificial Sequence: Synthetic oligonucleotide
  Sense strand starting at position 727 of SEQ ID NO: 1880930
uaggaaggccuuuggcaau

SEQ ID NO: 2004819 - RNA, 19 nt, Artificial Sequence
  Description of Artificial Sequence: Synthetic oligonucleotide
  Antisense strand to SEQ ID NO: 2004818
auugccaaaggccuuccua

SEQ ID NO: 2004820 - RNA, 19 nt, Artificial Sequence
  Description of Artificial Sequence: Synthetic oligonucleotide
  Sense strand starting at position 985 of SEQ ID NO: 1880930
uccauucuguuccauguau

SEQ ID NO: 2004821 - RNA, 19 nt, Artificial Sequence
  Description of Artificial Sequence: Synthetic oligonucleotide
  Antisense strand to SEQ ID NO: 2004820
auacauggaacagaaugga

SEQ ID NO: 2004822 - RNA, 19 nt, Artificial Sequence
  Description of Artificial Sequence: Synthetic oligonucleotide
  Sense strand starting at position 1021 of SEQ ID NO: 1880930
auaguaaauaauuguggga

SEQ ID NO: 2004823 - RNA, 19 nt, Artificial Sequence
  Description of Artificial Sequence: Synthetic oligonucleotide
  Antisense strand to SEQ ID NO: 2004822
ucccacaauuauuuacuau

SEQ ID NO: 2004824 - RNA, 19 nt, Artificial Sequence
  Description of Artificial Sequence: Synthetic oligonucleotide
  Sense strand starting at position 1023 of SEQ ID NO: 1880930
aguaaauaauugugggaau

SEQ ID NO: 2004825 - RNA, 19 nt, Artificial Sequence
  Description of Artificial Sequence: Synthetic oligonucleotide
  Antisense strand to SEQ ID NO: 2004824
auucccacaauuauuuacu

SEQ ID NO: 2004826 - RNA, 19 nt, Artificial Sequence
  Description of Artificial Sequence: Synthetic oligonucleotide
  Sense strand starting at position 1024 of SEQ ID NO: 1880930
guaaauaauugugggaauu

SEQ ID NO: 2004827 - RNA, 19 nt, Artificial Sequence
  Description of Artificial Sequence: Synthetic oligonucleotide
  Antisense strand to SEQ ID NO: 2004826
aauucccacaauuauuuac

SEQ ID NO: 2004828 - RNA, 19 nt, Artificial Sequence
  Description of Artificial Sequence: Synthetic oligonucleotide
  Sense strand starting at position 1193 of SEQ ID NO: 1880930
auggaaagagcucauguuu

SEQ ID NO: 2004829 - RNA, 19 nt, Artificial Sequence
  Description of Artificial Sequence: Synthetic oligonucleotide
  Antisense strand to SEQ ID NO: 2004828
aaacaugagcucuuuccau

SEQ ID NO: 2004830 - RNA, 19 nt, Artificial Sequence
  Description of Artificial Sequence: Synthetic oligonucleotide
  Sense strand starting at position 1299 of SEQ ID NO: 1880930
uggguggauucggauguaa

SEQ ID NO: 2004831 - RNA, 19 nt, Artificial Sequence
  Description of Artificial Sequence: Synthetic oligonucleotide
  Antisense strand to SEQ ID NO: 2004830
uuacauccgaauccaccca

SEQ ID NO: 2004832 - RNA, 19 nt, Artificial Sequence
  Description of Artificial Sequence: Synthetic oligonucleotide
  Sense strand starting at position 1338 of SEQ ID NO: 1880930
ugagaacuuuccgccuacu

SEQ ID NO: 2004833 - RNA, 19 nt, Artificial Sequence
  Description of Artificial Sequence: Synthetic oligonucleotide
  Antisense strand to SEQ ID NO: 2004832
aguaggcggaaaguucuca

SEQ ID NO: 2004834 - RNA, 19 nt, Artificial Sequence
  Description of Artificial Sequence: Synthetic oligonucleotide
  Sense strand starting at position 1357 of SEQ ID NO: 1880930
gaacaugacucaugguauu

SEQ ID NO: 2004835 - RNA, 19 nt, Artificial Sequence
  Description of Artificial Sequence: Synthetic oligonucleotide
  Antisense strand to SEQ ID NO: 2004834
aauaccaugagucauguuc

SEQ ID NO: 2004836 - RNA, 19 nt, Artificial Sequence
  Description of Artificial Sequence: Synthetic oligonucleotide
  Sense strand starting at position 1384 of SEQ ID NO: 1880930
gggaaugaguucucauuaa

SEQ ID NO: 2004837 - RNA, 19 nt, Artificial Sequence
  Description of Artificial Sequence: Synthetic oligonucleotide
  Antisense strand to SEQ ID NO: 2004836
uuaaugagaacucauuccc

SEQ ID NO: 2004838 - RNA, 19 nt, Artificial Sequence
  Description of Artificial Sequence: Synthetic oligonucleotide
  Sense strand starting at position 1388 of SEQ ID NO: 1880930
augaguucucauuaagcac

SEQ ID NO: 2004839 - RNA, 19 nt, Artificial Sequence
  Description of Artificial Sequence: Synthetic oligonucleotide
  Antisense strand to SEQ ID NO: 2004838
gugcuuaaugagaacucau

SEQ ID NO: 2004840 - RNA, 19 nt, Artificial Sequence
  Description of Artificial Sequence: Synthetic oligonucleotide
  Sense strand starting at position 1428 of SEQ ID NO: 1880930
acgaguauaugcuuaacuu

SEQ ID NO: 2004841 - RNA, 19 nt, Artificial Sequence
  Description of Artificial Sequence: Synthetic oligonucleotide
  Antisense strand to SEQ ID NO: 2004840
aaguuaagcauauacucgu

SEQ ID NO: 2004842 - RNA, 19 nt, Artificial Sequence
  Description of Artificial Sequence: Synthetic oligonucleotide
  Sense strand starting at position 1429 of SEQ ID NO: 1880930
cgaguauaugcuuaacuuu

SEQ ID NO: 2004843 - RNA, 19 nt, Artificial Sequence
  Description of Artificial Sequence: Synthetic oligonucleotide
  Antisense strand to SEQ ID NO: 2004842
aaaguuaagcauauacucg

SEQ ID NO: 2004844 - RNA, 19 nt, Artificial Sequence
  Description of Artificial Sequence: Synthetic oligonucleotide
  Sense strand starting at position 1437 of SEQ ID NO: 1880930
ugcuuaacuuugugaguug

SEQ ID NO: 2004845 - RNA, 19 nt, Artificial Sequence
  Description of Artificial Sequence: Synthetic oligonucleotide
  Antisense strand to SEQ ID NO: 2004844
caacucacaaaguuaagca

SEQ ID NO: 2004846 - RNA, 19 nt, Artificial Sequence
  Description of Artificial Sequence: Synthetic oligonucleotide
  Sense strand starting at position 1438 of SEQ ID NO: 1880930
gcuuaacuuugugaguuga

SEQ ID NO: 2004847 - RNA, 19 nt, Artificial Sequence
  Description of Artificial Sequence: Synthetic oligonucleotide
  Antisense strand to SEQ ID NO: 2004846
ucaacucacaaaguuaagc

SEQ ID NO: 2004848 - RNA, 19 nt, Artificial Sequence
  Description of Artificial Sequence: Synthetic oligonucleotide
  Sense strand starting at position 1449 of SEQ ID NO: 1880930
ugaguugaaucacucaacu

SEQ ID NO: 2004849 - RNA, 19 nt, Artificial Sequence
  Description of Artificial Sequence: Synthetic oligonucleotide
  Antisense strand to SEQ ID NO: 2004848
aguugagugauucaacuca

SEQ ID NO: 2004850 - RNA, 19 nt, Artificial Sequence
  Description of Artificial Sequence: Synthetic oligonucleotide
  Sense strand starting at position 1490 of SEQ ID NO: 1880930
gggaauugccagcgaugga

SEQ ID NO: 2004851 - RNA, 19 nt, Artificial Sequence
  Description of Artificial Sequence: Synthetic oligonucleotide
  Antisense strand to SEQ ID NO: 2004850
uccaucgcuggcaauuccc

SEQ ID NO: 2004852 - RNA, 19 nt, Artificial Sequence
  Description of Artificial Sequence: Synthetic oligonucleotide
  Sense strand starting at position 1491 of SEQ ID NO: 1880930
ggaauugccagcgauggaa

SEQ ID NO: 2004853 - RNA, 19 nt, Artificial Sequence
  Description of Artificial Sequence: Synthetic oligonucleotide
  Antisense strand to SEQ ID NO: 2004852
uuccaucgcuggcaauucc

SEQ ID NO: 2004854 - RNA, 19 nt, Artificial Sequence
  Description of Artificial Sequence: Synthetic oligonucleotide
  Sense strand starting at position 1769 of SEQ ID NO: 1880930
ccggguacucguggucgau

SEQ ID NO: 2004855 - RNA, 19 nt, Artificial Sequence
  Description of Artificial Sequence: Synthetic oligonucleotide
  Antisense strand to SEQ ID NO: 2004854
aucgaccacgaguacccgg

SEQ ID NO: 2004856 - RNA, 19 nt, Artificial Sequence
  Description of Artificial Sequence: Synthetic oligonucleotide
  Sense strand starting at position 1928 of SEQ ID NO: 1880930
cgagauguagcucagaauc

SEQ ID NO: 2004857 - RNA, 19 nt, Artificial Sequence
  Description of Artificial Sequence: Synthetic oligonucleotide
  Antisense strand to SEQ ID NO: 2004856
gauucugagcuacaucucg

SEQ ID NO: 2004858 - RNA, 19 nt, Artificial Sequence
  Description of Artificial Sequence: Synthetic oligonucleotide
  Sense strand starting at position 3028 of SEQ ID NO: 1880930
cgagcaggcucgggaguua

SEQ ID NO: 2004859 - RNA, 19 nt, Artificial Sequence
  Description of Artificial Sequence: Synthetic oligonucleotide
  Antisense strand to SEQ ID NO: 2004858
uaacucccgagccugcucg

SEQ ID NO: 2004860 - RNA, 19 nt, Artificial Sequence
  Description of Artificial Sequence: Synthetic oligonucleotide
  Sense strand starting at position 3050 of SEQ ID NO: 1880930
ggcaguuguugccugcaca

SEQ ID NO: 2004861 - RNA, 19 nt, Artificial Sequence
  Description of Artificial Sequence: Synthetic oligonucleotide
  Antisense strand to SEQ ID NO: 2004860
ugugcaggcaacaacugcc

SEQ ID NO: 2004862 - RNA, 19 nt, Artificial Sequence
  Description of Artificial Sequence: Synthetic oligonucleotide
  Sense strand starting at position 3272 of SEQ ID NO: 1880930
aaagguaacuauuauguga

SEQ ID NO: 2004863 - RNA, 19 nt, Artificial Sequence
  Description of Artificial Sequence: Synthetic oligonucleotide
  Antisense strand to SEQ ID NO: 2004862
ucacauaauaguuaccuuu

SEQ ID NO: 2004864 - RNA, 19 nt, Artificial Sequence
  Description of Artificial Sequence: Synthetic oligonucleotide
  Sense strand starting at position 3276 of SEQ ID NO: 1880930
guaacuauuaugugaggua

SEQ ID NO: 2004865 - RNA, 19 nt, Artificial Sequence
  Description of Artificial Sequence: Synthetic oligonucleotide
  Antisense strand to SEQ ID NO: 2004864
uaccucacauaauaguuac

SEQ ID NO: 2004866 - RNA, 19 nt, Artificial Sequence
  Description of Artificial Sequence: Synthetic oligonucleotide
  Sense strand starting at position 3277 of SEQ ID NO: 1880930
uaacuauuaugugagguaa

SEQ ID NO: 2004867 - RNA, 19 nt, Artificial Sequence
  Description of Artificial Sequence: Synthetic oligonucleotide
  Antisense strand to SEQ ID NO: 2004866
uuaccucacauaauaguua

SEQ ID NO: 2004868 - RNA, 19 nt, Artificial Sequence
  Description of Artificial Sequence: Synthetic oligonucleotide
  Sense strand starting at position 3279 of SEQ ID NO: 1880930
acuauuaugugagguaauu

SEQ ID NO: 2004869 - RNA, 19 nt, Artificial Sequence
  Description of Artificial Sequence: Synthetic oligonucleotide
  Antisense strand to SEQ ID NO: 2004868
aauuaccucacauaauagu

SEQ ID NO: 2004870 - RNA, 19 nt, Artificial Sequence
  Description of Artificial Sequence: Synthetic oligonucleotide
  Sense strand starting at position 3331 of SEQ ID NO: 1880930
ucagaaugugcauauauaa

SEQ ID NO: 2004871 - RNA, 19 nt, Artificial Sequence
  Description of Artificial Sequence: Synthetic oligonucleotide
  Antisense strand to SEQ ID NO: 2004870
uuauauaugcacauucuga

SEQ ID NO: 2004872 - RNA, 19 nt, Artificial Sequence
  Description of Artificial Sequence: Synthetic oligonucleotide
  Sense strand starting at position 17 of SEQ ID NO: 1880931
uaucuuggacauugauaug

SEQ ID NO: 2004873 - RNA, 19 nt, Artificial Sequence
  Description of Artificial Sequence: Synthetic oligonucleotide
  Antisense strand to SEQ ID NO: 2004872
cauaucaauguccaagaua

SEQ ID NO: 2004874 - RNA, 19 nt, Artificial Sequence
  Description of Artificial Sequence: Synthetic oligonucleotide
  Sense strand starting at position 187 of SEQ ID NO: 1880931
acgggagucuccuugcaaa

SEQ ID NO: 2004875 - RNA, 19 nt, Artificial Sequence
  Description of Artificial Sequence: Synthetic oligonucleotide
  Antisense strand to SEQ ID NO: 2004874
uuugcaaggagacucccgu

SEQ ID NO: 2004876 - RNA, 19 nt, Artificial Sequence
  Description of Artificial Sequence: Synthetic oligonucleotide
  Sense strand starting at position 216 of SEQ ID NO: 1880931
ucucuugagugccuuuaau

SEQ ID NO: 2004877 - RNA, 19 nt, Artificial Sequence
  Description of Artificial Sequence: Synthetic oligonucleotide
  Antisense strand to SEQ ID NO: 2004876
auuaaaggcacucaagaga

SEQ ID NO: 2004878 - RNA, 19 nt, Artificial Sequence
  Description of Artificial Sequence: Synthetic oligonucleotide
  Sense strand starting at position 623 of SEQ ID NO: 1880931
ugcuuauccucauuguaga

SEQ ID NO: 2004879 - RNA, 19 nt, Artificial Sequence
  Description of Artificial Sequence: Synthetic oligonucleotide
  Antisense strand to SEQ ID NO: 2004878
ucuacaaugaggauaagca

SEQ ID NO: 2004880 - RNA, 19 nt, Artificial Sequence
  Description of Artificial Sequence: Synthetic oligonucleotide
  Sense strand starting at position 624 of SEQ ID NO: 1880931
gcuuauccucauuguagau

SEQ ID NO: 2004881 - RNA, 19 nt, Artificial Sequence
  Description of Artificial Sequence: Synthetic oligonucleotide
  Antisense strand to SEQ ID NO: 2004880
aucuacaaugaggauaagc

SEQ ID NO: 2004882 - RNA, 19 nt, Artificial Sequence
  Description of Artificial Sequence: Synthetic oligonucleotide
  Sense strand starting at position 815 of SEQ ID NO: 1880931
uugugucuugcuuucuuau

SEQ ID NO: 2004883 - RNA, 19 nt, Artificial Sequence
  Description of Artificial Sequence: Synthetic oligonucleotide
  Antisense strand to SEQ ID NO: 2004882
auaagaaagcaagacacaa

SEQ ID NO: 2004884 - RNA, 19 nt, Artificial Sequence
  Description of Artificial Sequence: Synthetic oligonucleotide
  Sense strand starting at position 824 of SEQ ID NO: 1880931
gcuuucuuauaaccgaagu

SEQ ID NO: 2004885 - RNA, 19 nt, Artificial Sequence
  Description of Artificial Sequence: Synthetic oligonucleotide
  Antisense strand to SEQ ID NO: 2004884
acuucgguuauaagaaagc

SEQ ID NO: 2004886 - RNA, 19 nt, Artificial Sequence
  Description of Artificial Sequence: Synthetic oligonucleotide
  Sense strand starting at position 1189 of SEQ ID NO: 1880931
ggcccauaguaguuuauca

SEQ ID NO: 2004887 - RNA, 19 nt, Artificial Sequence
  Description of Artificial Sequence: Synthetic oligonucleotide
  Antisense strand to SEQ ID NO: 2004886
ugauaaacuacuaugggcc

SEQ ID NO: 2004888 - RNA, 19 nt, Artificial Sequence
  Description of Artificial Sequence: Synthetic oligonucleotide
  Sense strand starting at position 1191 of SEQ ID NO: 1880931
cccauaguaguuuaucaua

SEQ ID NO: 2004889 - RNA, 19 nt, Artificial Sequence
  Description of Artificial Sequence: Synthetic oligonucleotide
  Antisense strand to SEQ ID NO: 2004888
uaugauaaacuacuauggg

SEQ ID NO: 2004890 - RNA, 19 nt, Artificial Sequence
  Description of Artificial Sequence: Synthetic oligonucleotide
  Sense strand starting at position 1241 of SEQ ID NO: 1880931
acuggacauuuauaguuau

SEQ ID NO: 2004891 - RNA, 19 nt, Artificial Sequence
  Description of Artificial Sequence: Synthetic oligonucleotide
  Antisense strand to SEQ ID NO: 2004890
auaacuauaaauguccagu

SEQ ID NO: 2004892 - RNA, 19 nt, Artificial Sequence
  Description of Artificial Sequence: Synthetic oligonucleotide
  Sense strand starting at position 1371 of SEQ ID NO: 1880931
aaagguguguuauuaguca

SEQ ID NO: 2004893 - RNA, 19 nt, Artificial Sequence
  Description of Artificial Sequence: Synthetic oligonucleotide
  Antisense strand to SEQ ID NO: 2004892
ugacuaauaacacaccuuu

SEQ ID NO: 2004894 - RNA, 19 nt, Artificial Sequence
  Description of Artificial Sequence: Synthetic oligonucleotide
  Sense strand starting at position 1375 of SEQ ID NO: 1880931
guguguuauuagucagaac

SEQ ID NO: 2004895 - RNA, 19 nt, Artificial Sequence
  Description of Artificial Sequence: Synthetic oligonucleotide
  Antisense strand to SEQ ID NO: 2004894
guucugacuaauaacacac

SEQ ID NO: 2004896 - RNA, 19 nt, Artificial Sequence
  Description of Artificial Sequence: Synthetic oligonucleotide
  Sense strand starting at position 1376 of SEQ ID NO: 1880931
uguguuauuagucagaacu

SEQ ID NO: 2004897 - RNA, 19 nt, Artificial Sequence
  Description of Artificial Sequence: Synthetic oligonucleotide
  Antisense strand to SEQ ID NO: 2004896
aguucugacuaauaacaca

SEQ ID NO: 2004898 - RNA, 19 nt, Artificial Sequence
  Description of Artificial Sequence: Synthetic oligonucleotide
  Sense strand starting at position 1389 of SEQ ID NO: 1880931
agaacucucuugguuguga

SEQ ID NO: 2004899 - RNA, 19 nt, Artificial Sequence
  Description of Artificial Sequence: Synthetic oligonucleotide
  Antisense strand to SEQ ID NO: 2004898
ucacaaccaagagaguucu

SEQ ID NO: 2004900 - RNA, 19 nt, Artificial Sequence
  Description of Artificial Sequence: Synthetic oligonucleotide
  Sense strand starting at position 1397 of SEQ ID NO: 1880931
cuugguugugacugaagga

SEQ ID NO: 2004901 - RNA, 19 nt, Artificial Sequence
  Description of Artificial Sequence: Synthetic oligonucleotide
  Antisense strand to SEQ ID NO: 2004900
uccuucagucacaaccaag

SEQ ID NO: 2004902 - RNA, 19 nt, Artificial Sequence
  Description of Artificial Sequence: Synthetic oligonucleotide
  Sense strand starting at position 1734 of SEQ ID NO: 1880931
ugguuuguccuggaugucu

SEQ ID NO: 2004903 - RNA, 19 nt, Artificial Sequence
  Description of Artificial Sequence: Synthetic oligonucleotide
  Antisense strand to SEQ ID NO: 2004902
agacauccaggacaaacca

SEQ ID NO: 2004904 - RNA, 19 nt, Artificial Sequence
  Description of Artificial Sequence: Synthetic oligonucleotide
  Sense strand starting at position 1883 of SEQ ID NO: 1880931
aaaggaaucucugacgaga

SEQ ID NO: 2004905 - RNA, 19 nt, Artificial Sequence
  Description of Artificial Sequence: Synthetic oligonucleotide
  Antisense strand to SEQ ID NO: 2004904
ucucgucagagauuccuuu

SEQ ID NO: 2004906 - RNA, 19 nt, Artificial Sequence
  Description of Artificial Sequence: Synthetic oligonucleotide
  Sense strand starting at position 2771 of SEQ ID NO: 1880931
ggagaaaccugucucauga

SEQ ID NO: 2004907 - RNA, 19 nt, Artificial Sequence
  Description of Artificial Sequence: Synthetic oligonucleotide
  Antisense strand to SEQ ID NO: 2004906
ucaugagacagguuucucc

SEQ ID NO: 2004908 - RNA, 19 nt, Artificial Sequence
  Description of Artificial Sequence: Synthetic oligonucleotide
  Sense strand starting at position 3104 of SEQ ID NO: 1880931
cgcagugcugguucacaau

SEQ ID NO: 2004909 - RNA, 19 nt, Artificial Sequence
  Description of Artificial Sequence: Synthetic oligonucleotide
  Antisense strand to SEQ ID NO: 2004908
auugugaaccagcacugcg

SEQ ID NO: 2004910 - RNA, 19 nt, Artificial Sequence
  Description of Artificial Sequence: Synthetic oligonucleotide
  Sense strand starting at position 3116 of SEQ ID NO: 1880931
ucacaaucaggcuguuaac

SEQ ID NO: 2004911 - RNA, 19 nt, Artificial Sequence
  Description of Artificial Sequence: Synthetic oligonucleotide
  Antisense strand to SEQ ID NO: 2004910
guuaacagccugauuguga

SEQ ID NO: 2004912 - RNA, 19 nt, Artificial Sequence
  Description of Artificial Sequence: Synthetic oligonucleotide
  Sense strand starting at position 3126 of SEQ ID NO: 1880931
gcuguuaacgcgguuucca

SEQ ID NO: 2004913 - RNA, 19 nt, Artificial Sequence
  Description of Artificial Sequence: Synthetic oligonucleotide
  Antisense strand to SEQ ID NO: 2004912
uggaaaccgcguuaacagc

SEQ ID NO: 2004914 - RNA, 19 nt, Artificial Sequence
  Description of Artificial Sequence: Synthetic oligonucleotide
  Sense strand starting at position 3251 of SEQ ID NO: 1880931
cccuuugcugcggagauuu

SEQ ID NO: 2004915 - RNA, 19 nt, Artificial Sequence
  Description of Artificial Sequence: Synthetic oligonucleotide
  Antisense strand to SEQ ID NO: 2004914
aaaucuccgcagcaaaggg

SEQ ID NO: 2004916 - RNA, 19 nt, Artificial Sequence
  Description of Artificial Sequence: Synthetic oligonucleotide
  Sense strand starting at position 3332 of SEQ ID NO: 1880931
gggugaaguccugggacuc

SEQ ID NO: 2004917 - RNA, 19 nt, Artificial Sequence
  Description of Artificial Sequence: Synthetic oligonucleotide
  Antisense strand to SEQ ID NO: 2004916
gagucccaggacuucaccc

SEQ ID NO: 2004918 - RNA, 19 nt, Artificial Sequence
  Description of Artificial Sequence: Synthetic oligonucleotide
  Sense strand starting at position 3333 of SEQ ID NO: 1880931
ggugaaguccugggacucu

SEQ ID NO: 2004919 - RNA, 19 nt, Artificial Sequence
  Description of Artificial Sequence: Synthetic oligonucleotide
  Antisense strand to SEQ ID NO: 2004918
agagucccaggacuucacc

SEQ ID NO: 2004920 - RNA, 19 nt, Artificial Sequence
  Description of Artificial Sequence: Synthetic oligonucleotide
  Sense strand starting at position 3366 of SEQ ID NO: 1880931
uauguaauccuaggcaaga

SEQ ID NO: 2004921 - RNA, 19 nt, Artificial Sequence
  Description of Artificial Sequence: Synthetic oligonucleotide
  Antisense strand to SEQ ID NO: 2004920
ucuugccuaggauuacaua

SEQ ID NO: 2004922 - RNA, 19 nt, Artificial Sequence
  Description of Artificial Sequence: Synthetic oligonucleotide
  Sense strand starting at position 3367 of SEQ ID NO: 1880931
auguaauccuaggcaagau

SEQ ID NO: 2004923 - RNA, 19 nt, Artificial Sequence
  Description of Artificial Sequence: Synthetic oligonucleotide
  Antisense strand to SEQ ID NO: 2004922
aucuugccuaggauuacau

SEQ ID NO: 2004924 - RNA, 19 nt, Artificial Sequence
  Description of Artificial Sequence: Synthetic oligonucleotide
  Sense strand starting at position 3376 of SEQ ID NO: 1880931
uaggcaagauuauuacagu

SEQ ID NO: 2004925 - RNA, 19 nt, Artificial Sequence
  Description of Artificial Sequence: Synthetic oligonucleotide
  Antisense strand to SEQ ID NO: 2004924
acuguaauaaucuugccua

SEQ ID NO: 2004926 - RNA, 19 nt, Artificial Sequence
  Description of Artificial Sequence: Synthetic oligonucleotide
  Sense strand starting at position 3412 of SEQ ID NO: 1880931
agaauauacccuugucuag

SEQ ID NO: 2004927 - RNA, 19 nt, Artificial Sequence
  Description of Artificial Sequence: Synthetic oligonucleotide
  Antisense strand to SEQ ID NO: 2004926
cuagacaaggguauauucu

SEQ ID NO: 2004928 - RNA, 19 nt, Artificial Sequence
  Description of Artificial Sequence: Synthetic oligonucleotide
  Sense strand starting at position 3480 of SEQ ID NO: 1880931
cuccuagccgucuagaaca

SEQ ID NO: 2004929 - RNA, 19 nt, Artificial Sequence
  Description of Artificial Sequence: Synthetic oligonucleotide
  Antisense strand to SEQ ID NO: 2004928
uguucuagacggcuaggag

SEQ ID NO: 2004930 - RNA, 19 nt, Artificial Sequence
  Description of Artificial Sequence: Synthetic oligonucleotide
  Sense strand starting at position 3530 of SEQ ID NO: 1880931
uagggccaucuauguaaua

SEQ ID NO: 2004931 - RNA, 19 nt, Artificial Sequence
  Description of Artificial Sequence: Synthetic oligonucleotide
  Antisense strand to SEQ ID NO: 2004930
uauuacauagauggcccua

SEQ ID NO: 2004932 - RNA, 19 nt, Artificial Sequence
  Description of Artificial Sequence: Synthetic oligonucleotide
  Sense strand starting at position 3531 of SEQ ID NO: 1880931
agggccaucuauguaauaa

SEQ ID NO: 2004933 - RNA, 19 nt, Artificial Sequence
  Description of Artificial Sequence: Synthetic oligonucleotide
  Antisense strand to SEQ ID NO: 2004932
uuauuacauagauggcccu

SEQ ID NO: 2004934 - RNA, 19 nt, Artificial Sequence
  Description of Artificial Sequence: Synthetic oligonucleotide
  Sense strand starting at position 3667 of SEQ ID NO: 1880931
uguuaugaaauacgauagu

SEQ ID NO: 2004935 - RNA, 19 nt, Artificial Sequence
  Description of Artificial Sequence: Synthetic oligonucleotide
  Antisense strand to SEQ ID NO: 2004934
acuaucguauuucauaaca

SEQ ID NO: 2004936 - RNA, 19 nt, Artificial Sequence
  Description of Artificial Sequence: Synthetic oligonucleotide
  Sense strand starting at position 3673 of SEQ ID NO: 1880931
gaaauacgauaguuauugu

SEQ ID NO: 2004937 - RNA, 19 nt, Artificial Sequence
  Description of Artificial Sequence: Synthetic oligonucleotide
  Antisense strand to SEQ ID NO: 2004936
acaauaacuaucguauuuc

SEQ ID NO: 2004938 - RNA, 19 nt, Artificial Sequence
  Description of Artificial Sequence: Synthetic oligonucleotide
  Sense strand starting at position 3681 of SEQ ID NO: 1880931
auaguuauuguugguugau

SEQ ID NO: 2004939 - RNA, 19 nt, Artificial Sequence
  Description of Artificial Sequence: Synthetic oligonucleotide
  Antisense strand to SEQ ID NO: 2004938
aucaaccaacaauaacuau

SEQ ID NO: 2004940 - RNA, 19 nt, Artificial Sequence
  Description of Artificial Sequence: Synthetic oligonucleotide
  Sense strand starting at position 3682 of SEQ ID NO: 1880931
uaguuauuguugguugaug

SEQ ID NO: 2004941 - RNA, 19 nt, Artificial Sequence
  Description of Artificial Sequence: Synthetic oligonucleotide
  Antisense strand to SEQ ID NO: 2004940
caucaaccaacaauaacua

SEQ ID NO: 2004942 - RNA, 19 nt, Artificial Sequence
  Description of Artificial Sequence: Synthetic oligonucleotide
  Sense strand starting at position 3724 of SEQ ID NO: 1880931
uuagcaguccuagguagau

SEQ ID NO: 2004943 - RNA, 19 nt, Artificial Sequence
  Description of Artificial Sequence: Synthetic oligonucleotide
  Antisense strand to SEQ ID NO: 2004942
aucuaccuaggacugcuaa

SEQ ID NO: 2004944 - RNA, 19 nt, Artificial Sequence
  Description of Artificial Sequence: Synthetic oligonucleotide
  Sense strand starting at position 3789 of SEQ ID NO: 1880931
guaccauugcuguauucca

SEQ ID NO: 2004945 - RNA, 19 nt, Artificial Sequence
  Description of Artificial Sequence: Synthetic oligonucleotide
  Antisense strand to SEQ ID NO: 2004944
uggaauacagcaaugguac

SEQ ID NO: 2004946 - RNA, 19 nt, Artificial Sequence
  Description of Artificial Sequence: Synthetic oligonucleotide
  Sense strand starting at position 3841 of SEQ ID NO: 1880931
caaggagauuuguagcuau

SEQ ID NO: 2004947 - RNA, 19 nt, Artificial Sequence
  Description of Artificial Sequence: Synthetic oligonucleotide
  Antisense strand to SEQ ID NO: 2004946
auagcuacaaaucuccuug

SEQ ID NO: 2004948 - RNA, 19 nt, Artificial Sequence
  Description of Artificial Sequence: Synthetic oligonucleotide
  Sense strand starting at position 3960 of SEQ ID NO: 1880931
agaggagucuuucucuacu

SEQ ID NO: 2004949 - RNA, 19 nt, Artificial Sequence
  Description of Artificial Sequence: Synthetic oligonucleotide
  Antisense strand to SEQ ID NO: 2004948
aguagagaaagacuccucu

SEQ ID NO: 2004950 - RNA, 19 nt, Artificial Sequence
  Description of Artificial Sequence: Synthetic oligonucleotide
  Sense strand starting at position 3962 of SEQ ID NO: 1880931
aggagucuuucucuacucu

SEQ ID NO: 2004951 - RNA, 19 nt, Artificial Sequence
  Description of Artificial Sequence: Synthetic oligonucleotide
  Antisense strand to SEQ ID NO: 2004950
agaguagagaaagacuccu

SEQ ID NO: 2004952 - RNA, 19 nt, Artificial Sequence
  Description of Artificial Sequence: Synthetic oligonucleotide
  Sense strand starting at position 1 of SEQ ID NO: 1880932
cuaugaagucgucacaaau

SEQ ID NO: 2004953 - RNA, 19 nt, Artificial Sequence
  Description of Artificial Sequence: Synthetic oligonucleotide
  Antisense strand to SEQ ID NO: 2004952
auuugugacgacuucauag

SEQ ID NO: 2004954 - RNA, 19 nt, Artificial Sequence
  Description of Artificial Sequence: Synthetic oligonucleotide
  Sense strand starting at position 20 of SEQ ID NO: 1880932
auugguuauacuuguuugu

SEQ ID NO: 2004955 - RNA, 19 nt, Artificial Sequence
  Description of Artificial Sequence: Synthetic oligonucleotide
  Antisense strand to SEQ ID NO: 2004954
acaaacaaguauaaccaau

SEQ ID NO: 2004956 - RNA, 19 nt, Artificial Sequence
  Description of Artificial Sequence: Synthetic oligonucleotide
  Sense strand starting at position 22 of SEQ ID NO: 1880932
ugguuauacuuguuuguag

SEQ ID NO: 2004957 - RNA, 19 nt, Artificial Sequence
  Description of Artificial Sequence: Synthetic oligonucleotide
  Antisense strand to SEQ ID NO: 2004956
cuacaaacaaguauaacca

SEQ ID NO: 2004958 - RNA, 19 nt, Artificial Sequence
  Description of Artificial Sequence: Synthetic oligonucleotide
  Sense strand starting at position 23 of SEQ ID NO: 1880932
gguuauacuuguuuguaga

SEQ ID NO: 2004959 - RNA, 19 nt, Artificial Sequence
  Description of Artificial Sequence: Synthetic oligonucleotide
  Antisense strand to SEQ ID NO: 2004958
ucuacaaacaaguauaacc

SEQ ID NO: 2004960 - RNA, 19 nt, Artificial Sequence
  Description of Artificial Sequence: Synthetic oligonucleotide
  Sense strand starting at position 25 of SEQ ID NO: 1880932
uuauacuuguuuguagaag

SEQ ID NO: 2004961 - RNA, 19 nt, Artificial Sequence
  Description of Artificial Sequence: Synthetic oligonucleotide
  Antisense strand to SEQ ID NO: 2004960
cuucuacaaacaaguauaa

SEQ ID NO: 2004962 - RNA, 19 nt, Artificial Sequence
  Description of Artificial Sequence: Synthetic oligonucleotide
  Sense strand starting at position 134 of SEQ ID NO: 1880932
cuccauuugucagucggua

SEQ ID NO: 2004963 - RNA, 19 nt, Artificial Sequence
  Description of Artificial Sequence: Synthetic oligonucleotide
  Antisense strand to SEQ ID NO: 2004962
uaccgacugacaaauggag

SEQ ID NO: 2004964 - RNA, 19 nt, Artificial Sequence
  Description of Artificial Sequence: Synthetic oligonucleotide
  Sense strand starting at position 136 of SEQ ID NO: 1880932
ccauuugucagucgguaac

SEQ ID NO: 2004965 - RNA, 19 nt, Artificial Sequence
  Description of Artificial Sequence: Synthetic oligonucleotide
  Antisense strand to SEQ ID NO: 2004964
guuaccgacugacaaaugg

SEQ ID NO: 2004966 - RNA, 19 nt, Artificial Sequence
  Description of Artificial Sequence: Synthetic oligonucleotide
  Sense strand starting at position 138 of SEQ ID NO: 1880932
auuugucagucgguaacca

SEQ ID NO: 2004967 - RNA, 19 nt, Artificial Sequence
  Description of Artificial Sequence: Synthetic oligonucleotide
  Antisense strand to SEQ ID NO: 2004966
ugguuaccgacugacaaau

SEQ ID NO: 2004968 - RNA, 19 nt, Artificial Sequence
  Description of Artificial Sequence: Synthetic oligonucleotide
  Sense strand starting at position 243 of SEQ ID NO: 1880932
uguaccuacaugugaguau

SEQ ID NO: 2004969 - RNA, 19 nt, Artificial Sequence
  Description of Artificial Sequence: Synthetic oligonucleotide
  Antisense strand to SEQ ID NO: 2004968
auacucacauguagguaca

SEQ ID NO: 2004970 - RNA, 19 nt, Artificial Sequence
  Description of Artificial Sequence: Synthetic oligonucleotide
  Sense strand starting at position 246 of SEQ ID NO: 1880932
accuacaugugaguaugua

SEQ ID NO: 2004971 - RNA, 19 nt, Artificial Sequence
  Description of Artificial Sequence: Synthetic oligonucleotide
  Antisense strand to SEQ ID NO: 2004970
uacauacucacauguaggu

SEQ ID NO: 2004972 - RNA, 19 nt, Artificial Sequence
  Description of Artificial Sequence: Synthetic oligonucleotide
  Sense strand starting at position 247 of SEQ ID NO: 1880932
ccuacaugugaguauguaa

SEQ ID NO: 2004973 - RNA, 19 nt, Artificial Sequence
  Description of Artificial Sequence: Synthetic oligonucleotide
  Antisense strand to SEQ ID NO: 2004972
uuacauacucacauguagg

SEQ ID NO: 2004974 - RNA, 19 nt, Artificial Sequence
  Description of Artificial Sequence: Synthetic oligonucleotide
  Sense strand starting at position 250 of SEQ ID NO: 1880932
acaugugaguauguaauca

SEQ ID NO: 2004975 - RNA, 19 nt, Artificial Sequence
  Description of Artificial Sequence: Synthetic oligonucleotide
  Antisense strand to SEQ ID NO: 2004974
ugauuacauacucacaugu

SEQ ID NO: 2004976 - RNA, 19 nt, Artificial Sequence
  Description of Artificial Sequence: Synthetic oligonucleotide
  Sense strand starting at position 254 of SEQ ID NO: 1880932
gugaguauguaaucagcca

SEQ ID NO: 2004977 - RNA, 19 nt, Artificial Sequence
  Description of Artificial Sequence: Synthetic oligonucleotide
  Antisense strand to SEQ ID NO: 2004976
uggcugauuacauacucac

SEQ ID NO: 2004978 - RNA, 19 nt, Artificial Sequence
  Description of Artificial Sequence: Synthetic oligonucleotide
  Sense strand starting at position 261 of SEQ ID NO: 1880932
uguaaucagccaugucuuc

SEQ ID NO: 2004979 - RNA, 19 nt, Artificial Sequence
  Description of Artificial Sequence: Synthetic oligonucleotide
  Antisense strand to SEQ ID NO: 2004978
gaagacauggcugauuaca

SEQ ID NO: 2004980 - RNA, 19 nt, Artificial Sequence
  Description of Artificial Sequence: Synthetic oligonucleotide
  Sense strand starting at position 896 of SEQ ID NO: 1880932
gggcccauuugucuugcua

SEQ ID NO: 2004981 - RNA, 19 nt, Artificial Sequence
  Description of Artificial Sequence: Synthetic oligonucleotide
  Antisense strand to SEQ ID NO: 2004980
uagcaagacaaaugggccc

SEQ ID NO: 2004982 - RNA, 19 nt, Artificial Sequence
  Description of Artificial Sequence: Synthetic oligonucleotide
  Sense strand starting at position 900 of SEQ ID NO: 1880932
ccauuugucuugcuaauag

SEQ ID NO: 2004983 - RNA, 19 nt, Artificial Sequence
  Description of Artificial Sequence: Synthetic oligonucleotide
  Antisense strand to SEQ ID NO: 2004982
cuauuagcaagacaaaugg

SEQ ID NO: 2004984 - RNA, 19 nt, Artificial Sequence
  Description of Artificial Sequence: Synthetic oligonucleotide
  Sense strand starting at position 949 of SEQ ID NO: 1880932
uuauuugucuucucaaguu

SEQ ID NO: 2004985 - RNA, 19 nt, Artificial Sequence
  Description of Artificial Sequence: Synthetic oligonucleotide
  Antisense strand to SEQ ID NO: 2004984
aacuugagaagacaaauaa

SEQ ID NO: 2004986 - RNA, 19 nt, Artificial Sequence
  Description of Artificial Sequence: Synthetic oligonucleotide
  Sense strand starting at position 969 of SEQ ID NO: 1880932
gccucauuauugucacaca

SEQ ID NO: 2004987 - RNA, 19 nt, Artificial Sequence
  Description of Artificial Sequence: Synthetic oligonucleotide
  Antisense strand to SEQ ID NO: 2004986
ugugugacaauaaugaggc

SEQ ID NO: 2004988 - RNA, 19 nt, Artificial Sequence
  Description of Artificial Sequence: Synthetic oligonucleotide
  Sense strand starting at position 1116 of SEQ ID NO: 1880932
ccaccaugugccggaaaua

SEQ ID NO: 2004989 - RNA, 19 nt, Artificial Sequence
  Description of Artificial Sequence: Synthetic oligonucleotide
  Antisense strand to SEQ ID NO: 2004988
uauuuccggcacauggugg

SEQ ID NO: 2004990 - RNA, 19 nt, Artificial Sequence
  Description of Artificial Sequence: Synthetic oligonucleotide
  Sense strand starting at position 1169 of SEQ ID NO: 1880932
ugcaaauuacuguguaaag

SEQ ID NO: 2004991 - RNA, 19 nt, Artificial Sequence
  Description of Artificial Sequence: Synthetic oligonucleotide
  Antisense strand to SEQ ID NO: 2004990
cuuuacacaguaauuugca

SEQ ID NO: 2004992 - RNA, 19 nt, Artificial Sequence
  Description of Artificial Sequence: Synthetic oligonucleotide
  Sense strand starting at position 1170 of SEQ ID NO: 1880932
gcaaauuacuguguaaaga

SEQ ID NO: 2004993 - RNA, 19 nt, Artificial Sequence
  Description of Artificial Sequence: Synthetic oligonucleotide
  Antisense strand to SEQ ID NO: 2004992
ucuuuacacaguaauuugc

SEQ ID NO: 2004994 - RNA, 19 nt, Artificial Sequence
  Description of Artificial Sequence: Synthetic oligonucleotide
  Sense strand starting at position 1364 of SEQ ID NO: 1880932
agguuaugaggcugucaaa

SEQ ID NO: 2004995 - RNA, 19 nt, Artificial Sequence
  Description of Artificial Sequence: Synthetic oligonucleotide
  Antisense strand to SEQ ID NO: 2004994
uuugacagccucauaaccu

SEQ ID NO: 2004996 - RNA, 19 nt, Artificial Sequence
  Description of Artificial Sequence: Synthetic oligonucleotide
  Sense strand starting at position 1374 of SEQ ID NO: 1880932
gcugucaaacuuugagugu

SEQ ID NO: 2004997 - RNA, 19 nt, Artificial Sequence
  Description of Artificial Sequence: Synthetic oligonucleotide
  Antisense strand to SEQ ID NO: 2004996
acacucaaaguuugacagc

SEQ ID NO: 2004998 - RNA, 19 nt, Artificial Sequence
  Description of Artificial Sequence: Synthetic oligonucleotide
  Sense strand starting at position 1380 of SEQ ID NO: 1880932
aaacuuugaguguggccaa

SEQ ID NO: 2004999 - RNA, 19 nt, Artificial Sequence
  Description of Artificial Sequence: Synthetic oligonucleotide
  Antisense strand to SEQ ID NO: 2004998
uuggccacacucaaaguuu

SEQ ID NO: 2005000 - RNA, 19 nt, Artificial Sequence
  Description of Artificial Sequence: Synthetic oligonucleotide
  Sense strand starting at position 1448 of SEQ ID NO: 1880932
gcaguagugaagugucuug

SEQ ID NO: 2005001 - RNA, 19 nt, Artificial Sequence
  Description of Artificial Sequence: Synthetic oligonucleotide
  Antisense strand to SEQ ID NO: 2005000
caagacacuucacuacugc

SEQ ID NO: 2005002 - RNA, 19 nt, Artificial Sequence
  Description of Artificial Sequence: Synthetic oligonucleotide
  Sense strand starting at position 1527 of SEQ ID NO: 1880932
uguaguguaaauugagcuu

SEQ ID NO: 2005003 - RNA, 19 nt, Artificial Sequence
  Description of Artificial Sequence: Synthetic oligonucleotide
  Antisense strand to SEQ ID NO: 2005002
aagcucaauuuacacuaca

SEQ ID NO: 2005004 - RNA, 19 nt, Artificial Sequence
  Description of Artificial Sequence: Synthetic oligonucleotide
  Sense strand starting at position 1530 of SEQ ID NO: 1880932
aguguaaauugagcuuauu

SEQ ID NO: 2005005 - RNA, 19 nt, Artificial Sequence
  Description of Artificial Sequence: Synthetic oligonucleotide
  Antisense strand to SEQ ID NO: 2005004
aauaagcucaauuuacacu

SEQ ID NO: 2005006 - RNA, 19 nt, Artificial Sequence
  Description of Artificial Sequence: Synthetic oligonucleotide
  Sense strand starting at position 1659 of SEQ ID NO: 1880932
cagucuuuccuacggaaag

SEQ ID NO: 2005007 - RNA, 19 nt, Artificial Sequence
  Description of Artificial Sequence: Synthetic oligonucleotide
  Antisense strand to SEQ ID NO: 2005006
cuuuccguaggaaagacug

SEQ ID NO: 2005008 - RNA, 19 nt, Artificial Sequence
  Description of Artificial Sequence: Synthetic oligonucleotide
  Sense strand starting at position 1695 of SEQ ID NO: 1880932
gcccaucuaucuguuuaua

SEQ ID NO: 2005009 - RNA, 19 nt, Artificial Sequence
  Description of Artificial Sequence: Synthetic oligonucleotide
  Antisense strand to SEQ ID NO: 2005008
uauaaacagauagaugggc

SEQ ID NO: 2005010 - RNA, 19 nt, Artificial Sequence
  Description of Artificial Sequence: Synthetic oligonucleotide
  Sense strand starting at position 1738 of SEQ ID NO: 1880932
acgagcccaucugauuuaa

SEQ ID NO: 2005011 - RNA, 19 nt, Artificial Sequence
  Description of Artificial Sequence: Synthetic oligonucleotide
  Antisense strand to SEQ ID NO: 2005010
uuaaaucagaugggcucgu

SEQ ID NO: 2005012 - RNA, 19 nt, Artificial Sequence
  Description of Artificial Sequence: Synthetic oligonucleotide
  Sense strand starting at position 1775 of SEQ ID NO: 1880932
agggcaugacucugcguua

SEQ ID NO: 2005013 - RNA, 19 nt, Artificial Sequence
  Description of Artificial Sequence: Synthetic oligonucleotide
  Antisense strand to SEQ ID NO: 2005012
uaacgcagagucaugcccu

SEQ ID NO: 2005014 - RNA, 19 nt, Artificial Sequence
  Description of Artificial Sequence: Synthetic oligonucleotide
  Sense strand starting at position 1778 of SEQ ID NO: 1880932
gcaugacucugcguuagaa

SEQ ID NO: 2005015 - RNA, 19 nt, Artificial Sequence
  Description of Artificial Sequence: Synthetic oligonucleotide
  Antisense strand to SEQ ID NO: 2005014
uucuaacgcagagucaugc

SEQ ID NO: 2005016 - RNA, 19 nt, Artificial Sequence
  Description of Artificial Sequence: Synthetic oligonucleotide
  Sense strand starting at position 1780 of SEQ ID NO: 1880932
augacucugcguuagaacu

SEQ ID NO: 2005017 - RNA, 19 nt, Artificial Sequence
  Description of Artificial Sequence: Synthetic oligonucleotide
  Antisense strand to SEQ ID NO: 2005016
aguucuaacgcagagucau

SEQ ID NO: 2005018 - RNA, 19 nt, Artificial Sequence
  Description of Artificial Sequence: Synthetic oligonucleotide
  Sense strand starting at position 2034 of SEQ ID NO: 1880932
gucgguuucccagggagac

SEQ ID NO: 2005019 - RNA, 19 nt, Artificial Sequence
  Description of Artificial Sequence: Synthetic oligonucleotide
  Antisense strand to SEQ ID NO: 2005018
gucucccugggaaaccgac

SEQ ID NO: 2005020 - RNA, 19 nt, Artificial Sequence
  Description of Artificial Sequence: Synthetic oligonucleotide
  Sense strand starting at position 2035 of SEQ ID NO: 1880932
ucgguuucccagggagacu

SEQ ID NO: 2005021 - RNA, 19 nt, Artificial Sequence
  Description of Artificial Sequence: Synthetic oligonucleotide
  Antisense strand to SEQ ID NO: 2005020
agucucccugggaaaccga

SEQ ID NO: 2005022 - RNA, 19 nt, Artificial Sequence
  Description of Artificial Sequence: Synthetic oligonucleotide
  Sense strand starting at position 2309 of SEQ ID NO: 1880932
gguaaauuugcgugggagc

SEQ ID NO: 2005023 - RNA, 19 nt, Artificial Sequence
  Description of Artificial Sequence: Synthetic oligonucleotide
  Antisense strand to SEQ ID NO: 2005022
gcucccacgcaaauuuacc

SEQ ID NO: 2005024 - RNA, 19 nt, Artificial Sequence
  Description of Artificial Sequence: Synthetic oligonucleotide
  Sense strand starting at position 2402 of SEQ ID NO: 1880932
cgaguuucccaagaaagcu

SEQ ID NO: 2005025 - RNA, 19 nt, Artificial Sequence
  Description of Artificial Sequence: Synthetic oligonucleotide
  Antisense strand to SEQ ID NO: 2005024
agcuuucuugggaaacucg

SEQ ID NO: 2005026 - RNA, 19 nt, Artificial Sequence
  Description of Artificial Sequence: Synthetic oligonucleotide
  Sense strand starting at position 2446 of SEQ ID NO: 1880932
ucggcuugcacucagugaa

SEQ ID NO: 2005027 - RNA, 19 nt, Artificial Sequence
  Description of Artificial Sequence: Synthetic oligonucleotide
  Antisense strand to SEQ ID NO: 2005026
uucacugagugcaagccga

SEQ ID NO: 2005028 - RNA, 19 nt, Artificial Sequence
  Description of Artificial Sequence: Synthetic oligonucleotide
  Sense strand starting at position 2513 of SEQ ID NO: 1880932
cgcggaggugauuggauua

SEQ ID NO: 2005029 - RNA, 19 nt, Artificial Sequence
  Description of Artificial Sequence: Synthetic oligonucleotide
  Antisense strand to SEQ ID NO: 2005028
uaauccaaucaccuccgcg

SEQ ID NO: 2005030 - RNA, 19 nt, Artificial Sequence
  Description of Artificial Sequence: Synthetic oligonucleotide
  Sense strand starting at position 3906 of SEQ ID NO: 1880932
gaaaguaaauguguuggga

SEQ ID NO: 2005031 - RNA, 19 nt, Artificial Sequence
  Description of Artificial Sequence: Synthetic oligonucleotide
  Antisense strand to SEQ ID NO: 2005030
ucccaacacauuuacuuuc

SEQ ID NO: 2005032 - RNA, 19 nt, Artificial Sequence
  Description of Artificial Sequence: Synthetic oligonucleotide
  Sense strand starting at position 112 of SEQ ID NO: 1880933
caaugugaugauuguaaca

SEQ ID NO: 2005033 - RNA, 19 nt, Artificial Sequence
  Description of Artificial Sequence: Synthetic oligonucleotide
  Antisense strand to SEQ ID NO: 2005032
uguuacaaucaucacauug

SEQ ID NO: 2005034 - RNA, 19 nt, Artificial Sequence
  Description of Artificial Sequence: Synthetic oligonucleotide
  Sense strand starting at position 142 of SEQ ID NO: 1880933
ugcagaggcauauaaugua

SEQ ID NO: 2005035 - RNA, 19 nt, Artificial Sequence
  Description of Artificial Sequence: Synthetic oligonucleotide
  Antisense strand to SEQ ID NO: 2005034
uacauuauaugccucugca

SEQ ID NO: 2005036 - RNA, 19 nt, Artificial Sequence
  Description of Artificial Sequence: Synthetic oligonucleotide
  Sense strand starting at position 275 of SEQ ID NO: 1880933
agucucgucacugaugaac

SEQ ID NO: 2005037 - RNA, 19 nt, Artificial Sequence
  Description of Artificial Sequence: Synthetic oligonucleotide
  Antisense strand to SEQ ID NO: 2005036
guucaucagugacgagacu

SEQ ID NO: 2005038 - RNA, 19 nt, Artificial Sequence
  Description of Artificial Sequence: Synthetic oligonucleotide
  Sense strand starting at position 854 of SEQ ID NO: 1880933
ugaugaaaucuggguacac

SEQ ID NO: 2005039 - RNA, 19 nt, Artificial Sequence
  Description of Artificial Sequence: Synthetic oligonucleotide
  Antisense strand to SEQ ID NO: 2005038
guguacccagauuucauca

SEQ ID NO: 2005040 - RNA, 19 nt, Artificial Sequence
  Description of Artificial Sequence: Synthetic oligonucleotide
  Sense strand starting at position 956 of SEQ ID NO: 1880933
cucugagagucagucuaga

SEQ ID NO: 2005041 - RNA, 19 nt, Artificial Sequence
  Description of Artificial Sequence: Synthetic oligonucleotide
  Antisense strand to SEQ ID NO: 2005040
ucuagacugacucucagag

SEQ ID NO: 2005042 - RNA, 19 nt, Artificial Sequence
  Description of Artificial Sequence: Synthetic oligonucleotide
  Sense strand starting at position 1061 of SEQ ID NO: 1880933
aaaugcuuagauggugaaa

SEQ ID NO: 2005043 - RNA, 19 nt, Artificial Sequence
  Description of Artificial Sequence: Synthetic oligonucleotide
  Antisense strand to SEQ ID NO: 2005042
uuucaccaucuaagcauuu

SEQ ID NO: 2005044 - RNA, 19 nt, Artificial Sequence
  Description of Artificial Sequence: Synthetic oligonucleotide
  Sense strand starting at position 1195 of SEQ ID NO: 1880933
agacuuaguaauuaugugu

SEQ ID NO: 2005045 - RNA, 19 nt, Artificial Sequence
  Description of Artificial Sequence: Synthetic oligonucleotide
  Antisense strand to SEQ ID NO: 2005044
acacauaauuacuaagucu

SEQ ID NO: 2005046 - RNA, 19 nt, Artificial Sequence
  Description of Artificial Sequence: Synthetic oligonucleotide
  Sense strand starting at position 1213 of SEQ ID NO: 1880933
uguaaagugacccgaagaa

SEQ ID NO: 2005047 - RNA, 19 nt, Artificial Sequence
  Description of Artificial Sequence: Synthetic oligonucleotide
  Antisense strand to SEQ ID NO: 2005046
uucuucgggucacuuuaca

SEQ ID NO: 2005048 - RNA, 19 nt, Artificial Sequence
  Description of Artificial Sequence: Synthetic oligonucleotide
  Sense strand starting at position 1231 of SEQ ID NO: 1880933
augucucucauguagguaa

SEQ ID NO: 2005049 - RNA, 19 nt, Artificial Sequence
  Description of Artificial Sequence: Synthetic oligonucleotide
  Antisense strand to SEQ ID NO: 2005048
uuaccuacaugagagacau

SEQ ID NO: 2005050 - RNA, 19 nt, Artificial Sequence
  Description of Artificial Sequence: Synthetic oligonucleotide
  Sense strand starting at position 1578 of SEQ ID NO: 1880933
gggaguuaacaguaggcuu

SEQ ID NO: 2005051 - RNA, 19 nt, Artificial Sequence
  Description of Artificial Sequence: Synthetic oligonucleotide
  Antisense strand to SEQ ID NO: 2005050
aagccuacuguuaacuccc

SEQ ID NO: 2005052 - RNA, 19 nt, Artificial Sequence
  Description of Artificial Sequence: Synthetic oligonucleotide
  Sense strand starting at position 1599 of SEQ ID NO: 1880933
gugccaguugagcagauuu

SEQ ID NO: 2005053 - RNA, 19 nt, Artificial Sequence
  Description of Artificial Sequence: Synthetic oligonucleotide
  Antisense strand to SEQ ID NO: 2005052
aaaucugcucaacuggcac

SEQ ID NO: 2005054 - RNA, 19 nt, Artificial Sequence
  Description of Artificial Sequence: Synthetic oligonucleotide
  Sense strand starting at position 1696 of SEQ ID NO: 1880933
uccagaguuaugcagggua

SEQ ID NO: 2005055 - RNA, 19 nt, Artificial Sequence
  Description of Artificial Sequence: Synthetic oligonucleotide
  Antisense strand to SEQ ID NO: 2005054
uacccugcauaacucugga

SEQ ID NO: 2005056 - RNA, 19 nt, Artificial Sequence
  Description of Artificial Sequence: Synthetic oligonucleotide
  Sense strand starting at position 1826 of SEQ ID NO: 1880933
gaaguauuucguggaaugc

SEQ ID NO: 2005057 - RNA, 19 nt, Artificial Sequence
  Description of Artificial Sequence: Synthetic oligonucleotide
  Antisense strand to SEQ ID NO: 2005056
gcauuccacgaaauacuuc

SEQ ID NO: 2005058 - RNA, 19 nt, Artificial Sequence
  Description of Artificial Sequence: Synthetic oligonucleotide
  Sense strand starting at position 1854 of SEQ ID NO: 1880933
ucagaaguaccuugaacca

SEQ ID NO: 2005059 - RNA, 19 nt, Artificial Sequence
  Description of Artificial Sequence: Synthetic oligonucleotide
  Antisense strand to SEQ ID NO: 2005058
ugguucaagguacuucuga

SEQ ID NO: 2005060 - RNA, 19 nt, Artificial Sequence
  Description of Artificial Sequence: Synthetic oligonucleotide
  Sense strand starting at position 2024 of SEQ ID NO: 1880933
agggauucugauuggucca

SEQ ID NO: 2005061 - RNA, 19 nt, Artificial Sequence
  Description of Artificial Sequence: Synthetic oligonucleotide
  Antisense strand to SEQ ID NO: 2005060
uggaccaaucagaaucccu

SEQ ID NO: 2005062 - RNA, 19 nt, Artificial Sequence
  Description of Artificial Sequence: Synthetic oligonucleotide
  Sense strand starting at position 2025 of SEQ ID NO: 1880933
gggauucugauugguccaa

SEQ ID NO: 2005063 - RNA, 19 nt, Artificial Sequence
  Description of Artificial Sequence: Synthetic oligonucleotide
  Antisense strand to SEQ ID NO: 2005062
uuggaccaaucagaauccc

SEQ ID NO: 2005064 - RNA, 19 nt, Artificial Sequence
  Description of Artificial Sequence: Synthetic oligonucleotide
  Sense strand starting at position 2027 of SEQ ID NO: 1880933
gauucugauugguccaacu

SEQ ID NO: 2005065 - RNA, 19 nt, Artificial Sequence
  Description of Artificial Sequence: Synthetic oligonucleotide
  Antisense strand to SEQ ID NO: 2005064
aguuggaccaaucagaauc

SEQ ID NO: 2005066 - RNA, 19 nt, Artificial Sequence
  Description of Artificial Sequence: Synthetic oligonucleotide
  Sense strand starting at position 2029 of SEQ ID NO: 1880933
uucugauugguccaacuug

SEQ ID NO: 2005067 - RNA, 19 nt, Artificial Sequence
  Description of Artificial Sequence: Synthetic oligonucleotide
  Antisense strand to SEQ ID NO: 2005066
caaguuggaccaaucagaa

SEQ ID NO: 2005068 - RNA, 19 nt, Artificial Sequence
  Description of Artificial Sequence: Synthetic oligonucleotide
  Sense strand starting at position 2054 of SEQ ID NO: 1880933
guggauacucuuggaccaa

SEQ ID NO: 2005069 - RNA, 19 nt, Artificial Sequence
  Description of Artificial Sequence: Synthetic oligonucleotide
  Antisense strand to SEQ ID NO: 2005068
uugguccaagaguauccac

SEQ ID NO: 2005070 - RNA, 19 nt, Artificial Sequence
  Description of Artificial Sequence: Synthetic oligonucleotide
  Sense strand starting at position 2245 of SEQ ID NO: 1880933
gguaaucauccugauucca

SEQ ID NO: 2005071 - RNA, 19 nt, Artificial Sequence
  Description of Artificial Sequence: Synthetic oligonucleotide
  Antisense strand to SEQ ID NO: 2005070
uggaaucaggaugauuacc

SEQ ID NO: 2005072 - RNA, 19 nt, Artificial Sequence
  Description of Artificial Sequence: Synthetic oligonucleotide
  Sense strand starting at position 2362 of SEQ ID NO: 1880933
uggacaaucucuucuggga

SEQ ID NO: 2005073 - RNA, 19 nt, Artificial Sequence
  Description of Artificial Sequence: Synthetic oligonucleotide
  Antisense strand to SEQ ID NO: 2005072
ucccagaagagauugucca

SEQ ID NO: 2005074 - RNA, 19 nt, Artificial Sequence
  Description of Artificial Sequence: Synthetic oligonucleotide
  Sense strand starting at position 2423 of SEQ ID NO: 1880933
acauaauaguccucgggau

SEQ ID NO: 2005075 - RNA, 19 nt, Artificial Sequence
  Description of Artificial Sequence: Synthetic oligonucleotide
  Antisense strand to SEQ ID NO: 2005074
aucccgaggacuauuaugu

SEQ ID NO: 2005076 - RNA, 19 nt, Artificial Sequence
  Description of Artificial Sequence: Synthetic oligonucleotide
  Sense strand starting at position 2425 of SEQ ID NO: 1880933
auaauaguccucgggauga

SEQ ID NO: 2005077 - RNA, 19 nt, Artificial Sequence
  Description of Artificial Sequence: Synthetic oligonucleotide
  Antisense strand to SEQ ID NO: 2005076
ucaucccgaggacuauuau

SEQ ID NO: 2005078 - RNA, 19 nt, Artificial Sequence
  Description of Artificial Sequence: Synthetic oligonucleotide
  Sense strand starting at position 2471 of SEQ ID NO: 1880933
uuguguucuuaagccauuu

SEQ ID NO: 2005079 - RNA, 19 nt, Artificial Sequence
  Description of Artificial Sequence: Synthetic oligonucleotide
  Antisense strand to SEQ ID NO: 2005078
aaauggcuuaagaacacaa

SEQ ID NO: 2005080 - RNA, 19 nt, Artificial Sequence
  Description of Artificial Sequence: Synthetic oligonucleotide
  Sense strand starting at position 2714 of SEQ ID NO: 1880933
gauggugaugucgagaacu

SEQ ID NO: 2005081 - RNA, 19 nt, Artificial Sequence
  Description of Artificial Sequence: Synthetic oligonucleotide
  Antisense strand to SEQ ID NO: 2005080
aguucucgacaucaccauc

SEQ ID NO: 2005082 - RNA, 19 nt, Artificial Sequence
  Description of Artificial Sequence: Synthetic oligonucleotide
  Sense strand starting at position 2716 of SEQ ID NO: 1880933
uggugaugucgagaacuga

SEQ ID NO: 2005083 - RNA, 19 nt, Artificial Sequence
  Description of Artificial Sequence: Synthetic oligonucleotide
  Antisense strand to SEQ ID NO: 2005082
ucaguucucgacaucacca

SEQ ID NO: 2005084 - RNA, 19 nt, Artificial Sequence
  Description of Artificial Sequence: Synthetic oligonucleotide
  Sense strand starting at position 2795 of SEQ ID NO: 1880933
ccguguuagguuuauuucu

SEQ ID NO: 2005085 - RNA, 19 nt, Artificial Sequence
  Description of Artificial Sequence: Synthetic oligonucleotide
  Antisense strand to SEQ ID NO: 2005084
agaaauaaaccuaacacgg

SEQ ID NO: 2005086 - RNA, 19 nt, Artificial Sequence
  Description of Artificial Sequence: Synthetic oligonucleotide
  Sense strand starting at position 2797 of SEQ ID NO: 1880933
guguuagguuuauuucucu

SEQ ID NO: 2005087 - RNA, 19 nt, Artificial Sequence
  Description of Artificial Sequence: Synthetic oligonucleotide
  Antisense strand to SEQ ID NO: 2005086
agagaaauaaaccuaacac

SEQ ID NO: 2005088 - RNA, 19 nt, Artificial Sequence
  Description of Artificial Sequence: Synthetic oligonucleotide
  Sense strand starting at position 3312 of SEQ ID NO: 1880933
gccaauuagcuggaugaac

SEQ ID NO: 2005089 - RNA, 19 nt, Artificial Sequence
  Description of Artificial Sequence: Synthetic oligonucleotide
  Antisense strand to SEQ ID NO: 2005088
guucauccagcuaauuggc

SEQ ID NO: 2005090 - RNA, 19 nt, Artificial Sequence
  Description of Artificial Sequence: Synthetic oligonucleotide
  Sense strand starting at position 3323 of SEQ ID NO: 1880933
ggaugaacagcuggcuaau

SEQ ID NO: 2005091 - RNA, 19 nt, Artificial Sequence
  Description of Artificial Sequence: Synthetic oligonucleotide
  Antisense strand to SEQ ID NO: 2005090
auuagccagcuguucaucc

SEQ ID NO: 2005092 - RNA, 19 nt, Artificial Sequence
  Description of Artificial Sequence: Synthetic oligonucleotide
  Sense strand starting at position 3376 of SEQ ID NO: 1880933
gcuagaauagguuaucuuc

SEQ ID NO: 2005093 - RNA, 19 nt, Artificial Sequence
  Description of Artificial Sequence: Synthetic oligonucleotide
  Antisense strand to SEQ ID NO: 2005092
gaagauaaccuauucuagc

SEQ ID NO: 2005094 - RNA, 19 nt, Artificial Sequence
  Description of Artificial Sequence: Synthetic oligonucleotide
  Sense strand starting at position 3421 of SEQ ID NO: 1880933
guauguuacgugcucaugu

SEQ ID NO: 2005095 - RNA, 19 nt, Artificial Sequence
  Description of Artificial Sequence: Synthetic oligonucleotide
  Antisense strand to SEQ ID NO: 2005094
acaugagcacguaacauac

SEQ ID NO: 2005096 - RNA, 19 nt, Artificial Sequence
  Description of Artificial Sequence: Synthetic oligonucleotide
  Sense strand starting at position 3440 of SEQ ID NO: 1880933
guucuuagugccucuguau

SEQ ID NO: 2005097 - RNA, 19 nt, Artificial Sequence
  Description of Artificial Sequence: Synthetic oligonucleotide
  Antisense strand to SEQ ID NO: 2005096
auacagaggcacuaagaac

SEQ ID NO: 2005098 - RNA, 19 nt, Artificial Sequence
  Description of Artificial Sequence: Synthetic oligonucleotide
  Sense strand starting at position 3458 of SEQ ID NO: 1880933
uauuuagugccuuguaagu

SEQ ID NO: 2005099 - RNA, 19 nt, Artificial Sequence
  Description of Artificial Sequence: Synthetic oligonucleotide
  Antisense strand to SEQ ID NO: 2005098
acuuacaaggcacuaaaua

SEQ ID NO: 2005100 - RNA, 19 nt, Artificial Sequence
  Description of Artificial Sequence: Synthetic oligonucleotide
  Sense strand starting at position 3551 of SEQ ID NO: 1880933
guguuaggugcacacauuu

SEQ ID NO: 2005101 - RNA, 19 nt, Artificial Sequence
  Description of Artificial Sequence: Synthetic oligonucleotide
  Antisense strand to SEQ ID NO: 2005100
aaaugugugcaccuaacac

SEQ ID NO: 2005102 - RNA, 19 nt, Artificial Sequence
  Description of Artificial Sequence: Synthetic oligonucleotide
  Sense strand starting at position 3659 of SEQ ID NO: 1880933
cguaauugaaauuaguagu

SEQ ID NO: 2005103 - RNA, 19 nt, Artificial Sequence
  Description of Artificial Sequence: Synthetic oligonucleotide
  Antisense strand to SEQ ID NO: 2005102
acuacuaauuucaauuacg

SEQ ID NO: 2005104 - RNA, 19 nt, Artificial Sequence
  Description of Artificial Sequence: Synthetic oligonucleotide
  Sense strand starting at position 3665 of SEQ ID NO: 1880933
ugaaauuaguagucucuaa

SEQ ID NO: 2005105 - RNA, 19 nt, Artificial Sequence
  Description of Artificial Sequence: Synthetic oligonucleotide
  Antisense strand to SEQ ID NO: 2005104
uuagagacuacuaauuuca

SEQ ID NO: 2005106 - RNA, 19 nt, Artificial Sequence
  Description of Artificial Sequence: Synthetic oligonucleotide
  Sense strand starting at position 3737 of SEQ ID NO: 1880933
ccuauauaagugugaagau

SEQ ID NO: 2005107 - RNA, 19 nt, Artificial Sequence
  Description of Artificial Sequence: Synthetic oligonucleotide
  Antisense strand to SEQ ID NO: 2005106
aucuucacacuuauauagg

SEQ ID NO: 2005108 - RNA, 19 nt, Artificial Sequence
  Description of Artificial Sequence: Synthetic oligonucleotide
  Sense strand starting at position 3789 of SEQ ID NO: 1880933
cugcauuugucagucucca

SEQ ID NO: 2005109 - RNA, 19 nt, Artificial Sequence
  Description of Artificial Sequence: Synthetic oligonucleotide
  Antisense strand to SEQ ID NO: 2005108
uggagacugacaaaugcag

SEQ ID NO: 2005110 - RNA, 19 nt, Artificial Sequence
  Description of Artificial Sequence: Synthetic oligonucleotide
  Sense strand starting at position 3822 of SEQ ID NO: 1880933
gccauccaacccuggaaau

SEQ ID NO: 2005111 - RNA, 19 nt, Artificial Sequence
  Description of Artificial Sequence: Synthetic oligonucleotide
  Antisense strand to SEQ ID NO: 2005110
auuuccaggguuggauggc

SEQ ID NO: 2005112 - RNA, 19 nt, Artificial Sequence
  Description of Artificial Sequence: Synthetic oligonucleotide
  Sense strand starting at position 154 of SEQ ID NO: 1880934
ccucaagucuuaguagaua

SEQ ID NO: 2005113 - RNA, 19 nt, Artificial Sequence
  Description of Artificial Sequence: Synthetic oligonucleotide
  Antisense strand to SEQ ID NO: 2005112
uaucuacuaagacuugagg

SEQ ID NO: 2005114 - RNA, 19 nt, Artificial Sequence
  Description of Artificial Sequence: Synthetic oligonucleotide
  Sense strand starting at position 165 of SEQ ID NO: 1880934
aguagauacugugaaauua

SEQ ID NO: 2005115 - RNA, 19 nt, Artificial Sequence
  Description of Artificial Sequence: Synthetic oligonucleotide
  Antisense strand to SEQ ID NO: 2005114
uaauuucacaguaucuacu

SEQ ID NO: 2005116 - RNA, 19 nt, Artificial Sequence
  Description of Artificial Sequence: Synthetic oligonucleotide
  Sense strand starting at position 670 of SEQ ID NO: 1880934
ucuguuauaauguguaagu

SEQ ID NO: 2005117 - RNA, 19 nt, Artificial Sequence
  Description of Artificial Sequence: Synthetic oligonucleotide
  Antisense strand to SEQ ID NO: 2005116
acuuacacauuauaacaga

SEQ ID NO: 2005118 - RNA, 19 nt, Artificial Sequence
  Description of Artificial Sequence: Synthetic oligonucleotide
  Sense strand starting at position 671 of SEQ ID NO: 1880934
cuguuauaauguguaagug

SEQ ID NO: 2005119 - RNA, 19 nt, Artificial Sequence
  Description of Artificial Sequence: Synthetic oligonucleotide
  Antisense strand to SEQ ID NO: 2005118
cacuuacacauuauaacag

SEQ ID NO: 2005120 - RNA, 19 nt, Artificial Sequence
  Description of Artificial Sequence: Synthetic oligonucleotide
  Sense strand starting at position 672 of SEQ ID NO: 1880934
uguuauaauguguaagugu

SEQ ID NO: 2005121 - RNA, 19 nt, Artificial Sequence
  Description of Artificial Sequence: Synthetic oligonucleotide
  Antisense strand to SEQ ID NO: 2005120
acacuuacacauuauaaca

SEQ ID NO: 2005122 - RNA, 19 nt, Artificial Sequence
  Description of Artificial Sequence: Synthetic oligonucleotide
  Sense strand starting at position 817 of SEQ ID NO: 1880934
augugaagucaacauuauu

SEQ ID NO: 2005123 - RNA, 19 nt, Artificial Sequence
  Description of Artificial Sequence: Synthetic oligonucleotide
  Antisense strand to SEQ ID NO: 2005122
aauaauguugacuucacau

SEQ ID NO: 2005124 - RNA, 19 nt, Artificial Sequence
  Description of Artificial Sequence: Synthetic oligonucleotide
  Sense strand starting at position 1048 of SEQ ID NO: 1880934
uuuacuagagaccguauaa

SEQ ID NO: 2005125 - RNA, 19 nt, Artificial Sequence
  Description of Artificial Sequence: Synthetic oligonucleotide
  Antisense strand to SEQ ID NO: 2005124
uuauacggucucuaguaaa

SEQ ID NO: 2005126 - RNA, 19 nt, Artificial Sequence
  Description of Artificial Sequence: Synthetic oligonucleotide
  Sense strand starting at position 1134 of SEQ ID NO: 1880934
agcagaguauuaucacucu

SEQ ID NO: 2005127 - RNA, 19 nt, Artificial Sequence
  Description of Artificial Sequence: Synthetic oligonucleotide
  Antisense strand to SEQ ID NO: 2005126
agagugauaauacucugcu

SEQ ID NO: 2005128 - RNA, 19 nt, Artificial Sequence
  Description of Artificial Sequence: Synthetic oligonucleotide
  Sense strand starting at position 1137 of SEQ ID NO: 1880934
agaguauuaucacucucau

SEQ ID NO: 2005129 - RNA, 19 nt, Artificial Sequence
  Description of Artificial Sequence: Synthetic oligonucleotide
  Antisense strand to SEQ ID NO: 2005128
augagagugauaauacucu

SEQ ID NO: 2005130 - RNA, 19 nt, Artificial Sequence
  Description of Artificial Sequence: Synthetic oligonucleotide
  Sense strand starting at position 1185 of SEQ ID NO: 1880934
gguugagucauguaauuau

SEQ ID NO: 2005131 - RNA, 19 nt, Artificial Sequence
  Description of Artificial Sequence: Synthetic oligonucleotide
  Antisense strand to SEQ ID NO: 2005130
auaauuacaugacucaacc

SEQ ID NO: 2005132 - RNA, 19 nt, Artificial Sequence
  Description of Artificial Sequence: Synthetic oligonucleotide
  Sense strand starting at position 1196 of SEQ ID NO: 1880934
guaauuauuaaguagugga

SEQ ID NO: 2005133 - RNA, 19 nt, Artificial Sequence
  Description of Artificial Sequence: Synthetic oligonucleotide
  Antisense strand to SEQ ID NO: 2005132
uccacuacuuaauaauuac

SEQ ID NO: 2005134 - RNA, 19 nt, Artificial Sequence
  Description of Artificial Sequence: Synthetic oligonucleotide
  Sense strand starting at position 1253 of SEQ ID NO: 1880934
ggaggugugacuuggaaug

SEQ ID NO: 2005135 - RNA, 19 nt, Artificial Sequence
  Description of Artificial Sequence: Synthetic oligonucleotide
  Antisense strand to SEQ ID NO: 2005134
cauuccaagucacaccucc

SEQ ID NO: 2005136 - RNA, 19 nt, Artificial Sequence
  Description of Artificial Sequence: Synthetic oligonucleotide
  Sense strand starting at position 1255 of SEQ ID NO: 1880934
aggugugacuuggaaugga

SEQ ID NO: 2005137 - RNA, 19 nt, Artificial Sequence
  Description of Artificial Sequence: Synthetic oligonucleotide
  Antisense strand to SEQ ID NO: 2005136
uccauuccaagucacaccu

SEQ ID NO: 2005138 - RNA, 19 nt, Artificial Sequence
  Description of Artificial Sequence: Synthetic oligonucleotide
  Sense strand starting at position 1269 of SEQ ID NO: 1880934
auggaaugugcggauauua

SEQ ID NO: 2005139 - RNA, 19 nt, Artificial Sequence
  Description of Artificial Sequence: Synthetic oligonucleotide
  Antisense strand to SEQ ID NO: 2005138
uaauauccgcacauuccau

SEQ ID NO: 2005140 - RNA, 19 nt, Artificial Sequence
  Description of Artificial Sequence: Synthetic oligonucleotide
  Sense strand starting at position 1448 of SEQ ID NO: 1880934
aacgguaagcauugucaau

SEQ ID NO: 2005141 - RNA, 19 nt, Artificial Sequence
  Description of Artificial Sequence: Synthetic oligonucleotide
  Antisense strand to SEQ ID NO: 2005140
auugacaaugcuuaccguu

SEQ ID NO: 2005142 - RNA, 19 nt, Artificial Sequence
  Description of Artificial Sequence: Synthetic oligonucleotide
  Sense strand starting at position 2090 of SEQ ID NO: 1880934
cucugaguggcugaagagu

SEQ ID NO: 2005143 - RNA, 19 nt, Artificial Sequence
  Description of Artificial Sequence: Synthetic oligonucleotide
  Antisense strand to SEQ ID NO: 2005142
acucuucagccacucagag

SEQ ID NO: 2005144 - RNA, 19 nt, Artificial Sequence
  Description of Artificial Sequence: Synthetic oligonucleotide
  Sense strand starting at position 2181 of SEQ ID NO: 1880934
gagguagcucguucucgua

SEQ ID NO: 2005145 - RNA, 19 nt, Artificial Sequence
  Description of Artificial Sequence: Synthetic oligonucleotide
  Antisense strand to SEQ ID NO: 2005144
uacgagaacgagcuaccuc

SEQ ID NO: 2005146 - RNA, 19 nt, Artificial Sequence
  Description of Artificial Sequence: Synthetic oligonucleotide
  Sense strand starting at position 2185 of SEQ ID NO: 1880934
uagcucguucucguaacua

SEQ ID NO: 2005147 - RNA, 19 nt, Artificial Sequence
  Description of Artificial Sequence: Synthetic oligonucleotide
  Antisense strand to SEQ ID NO: 2005146
uaguuacgagaacgagcua

SEQ ID NO: 2005148 - RNA, 19 nt, Artificial Sequence
  Description of Artificial Sequence: Synthetic oligonucleotide
  Sense strand starting at position 2219 of SEQ ID NO: 1880934
cggagauaagcuggaggau

SEQ ID NO: 2005149 - RNA, 19 nt, Artificial Sequence
  Description of Artificial Sequence: Synthetic oligonucleotide
  Antisense strand to SEQ ID NO: 2005148
auccuccagcuuaucuccg

SEQ ID NO: 2005150 - RNA, 19 nt, Artificial Sequence
  Description of Artificial Sequence: Synthetic oligonucleotide
  Sense strand starting at position 2239 of SEQ ID NO: 1880934
cgggacaaaucuccagcaa

SEQ ID NO: 2005151 - RNA, 19 nt, Artificial Sequence
  Description of Artificial Sequence: Synthetic oligonucleotide
  Antisense strand to SEQ ID NO: 2005150
uugcuggagauuugucccg

SEQ ID NO: 2005152 - RNA, 19 nt, Artificial Sequence
  Description of Artificial Sequence: Synthetic oligonucleotide
  Sense strand starting at position 2437 of SEQ ID NO: 1880934
cuagaauucuggccgacuu

SEQ ID NO: 2005153 - RNA, 19 nt, Artificial Sequence
  Description of Artificial Sequence: Synthetic oligonucleotide
  Antisense strand to SEQ ID NO: 2005152
aagucggccagaauucuag

SEQ ID NO: 2005154 - RNA, 19 nt, Artificial Sequence
  Description of Artificial Sequence: Synthetic oligonucleotide
  Sense strand starting at position 2438 of SEQ ID NO: 1880934
uagaauucuggccgacuua

SEQ ID NO: 2005155 - RNA, 19 nt, Artificial Sequence
  Description of Artificial Sequence: Synthetic oligonucleotide
  Antisense strand to SEQ ID NO: 2005154
uaagucggccagaauucua

SEQ ID NO: 2005156 - RNA, 19 nt, Artificial Sequence
  Description of Artificial Sequence: Synthetic oligonucleotide
  Sense strand starting at position 2514 of SEQ ID NO: 1880934
gggaaauucgcuugcuaaa

SEQ ID NO: 2005157 - RNA, 19 nt, Artificial Sequence
  Description of Artificial Sequence: Synthetic oligonucleotide
  Antisense strand to SEQ ID NO: 2005156
uuuagcaagcgaauuuccc

SEQ ID NO: 2005158 - RNA, 19 nt, Artificial Sequence
  Description of Artificial Sequence: Synthetic oligonucleotide
  Sense strand starting at position 2591 of SEQ ID NO: 1880934
acauaugugaaacggaauu

SEQ ID NO: 2005159 - RNA, 19 nt, Artificial Sequence
  Description of Artificial Sequence: Synthetic oligonucleotide
  Antisense strand to SEQ ID NO: 2005158
aauuccguuucacauaugu

SEQ ID NO: 2005160 - RNA, 19 nt, Artificial Sequence
  Description of Artificial Sequence: Synthetic oligonucleotide
  Sense strand starting at position 2597 of SEQ ID NO: 1880934
gugaaacggaauuguauga

SEQ ID NO: 2005161 - RNA, 19 nt, Artificial Sequence
  Description of Artificial Sequence: Synthetic oligonucleotide
  Antisense strand to SEQ ID NO: 2005160
ucauacaauuccguuucac

SEQ ID NO: 2005162 - RNA, 19 nt, Artificial Sequence
  Description of Artificial Sequence: Synthetic oligonucleotide
  Sense strand starting at position 2601 of SEQ ID NO: 1880934
aacggaauuguaugauauu

SEQ ID NO: 2005163 - RNA, 19 nt, Artificial Sequence
  Description of Artificial Sequence: Synthetic oligonucleotide
  Antisense strand to SEQ ID NO: 2005162
aauaucauacaauuccguu

SEQ ID NO: 2005164 - RNA, 19 nt, Artificial Sequence
  Description of Artificial Sequence: Synthetic oligonucleotide
  Sense strand starting at position 2602 of SEQ ID NO: 1880934
acggaauuguaugauauuu

SEQ ID NO: 2005165 - RNA, 19 nt, Artificial Sequence
  Description of Artificial Sequence: Synthetic oligonucleotide
  Antisense strand to SEQ ID NO: 2005164
aaauaucauacaauuccgu

SEQ ID NO: 2005166 - RNA, 19 nt, Artificial Sequence
  Description of Artificial Sequence: Synthetic oligonucleotide
  Sense strand starting at position 3096 of SEQ ID NO: 1880934
acauaaauugcuggcuauu

SEQ ID NO: 2005167 - RNA, 19 nt, Artificial Sequence
  Description of Artificial Sequence: Synthetic oligonucleotide
  Antisense strand to SEQ ID NO: 2005166
aauagccagcaauuuaugu

SEQ ID NO: 2005168 - RNA, 19 nt, Artificial Sequence
  Description of Artificial Sequence: Synthetic oligonucleotide
  Sense strand starting at position 3117 of SEQ ID NO: 1880934
guaucugcaagaugaagau

SEQ ID NO: 2005169 - RNA, 19 nt, Artificial Sequence
  Description of Artificial Sequence: Synthetic oligonucleotide
  Antisense strand to SEQ ID NO: 2005168
aucuucaucuugcagauac

SEQ ID NO: 2005170 - RNA, 19 nt, Artificial Sequence
  Description of Artificial Sequence: Synthetic oligonucleotide
  Sense strand starting at position 3124 of SEQ ID NO: 1880934
caagaugaagauuguuauc

SEQ ID NO: 2005171 - RNA, 19 nt, Artificial Sequence
  Description of Artificial Sequence: Synthetic oligonucleotide
  Antisense strand to SEQ ID NO: 2005170
gauaacaaucuucaucuug

SEQ ID NO: 2005172 - RNA, 19 nt, Artificial Sequence
  Description of Artificial Sequence: Synthetic oligonucleotide
  Sense strand starting at position 3126 of SEQ ID NO: 1880934
agaugaagauuguuaucuc

SEQ ID NO: 2005173 - RNA, 19 nt, Artificial Sequence
  Description of Artificial Sequence: Synthetic oligonucleotide
  Antisense strand to SEQ ID NO: 2005172
gagauaacaaucuucaucu

SEQ ID NO: 2005174 - RNA, 19 nt, Artificial Sequence
  Description of Artificial Sequence: Synthetic oligonucleotide
  Sense strand starting at position 3129 of SEQ ID NO: 1880934
ugaagauuguuaucucuug

SEQ ID NO: 2005175 - RNA, 19 nt, Artificial Sequence
  Description of Artificial Sequence: Synthetic oligonucleotide
  Antisense strand to SEQ ID NO: 2005174
caagagauaacaaucuuca

SEQ ID NO: 2005176 - RNA, 19 nt, Artificial Sequence
  Description of Artificial Sequence: Synthetic oligonucleotide
  Sense strand starting at position 3130 of SEQ ID NO: 1880934
gaagauuguuaucucuuga

SEQ ID NO: 2005177 - RNA, 19 nt, Artificial Sequence
  Description of Artificial Sequence: Synthetic oligonucleotide
  Antisense strand to SEQ ID NO: 2005176
ucaagagauaacaaucuuc

SEQ ID NO: 2005178 - RNA, 19 nt, Artificial Sequence
  Description of Artificial Sequence: Synthetic oligonucleotide
  Sense strand starting at position 3135 of SEQ ID NO: 1880934
uuguuaucucuugacuguu

SEQ ID NO: 2005179 - RNA, 19 nt, Artificial Sequence
  Description of Artificial Sequence: Synthetic oligonucleotide
  Antisense strand to SEQ ID NO: 2005178
aacagucaagagauaacaa

SEQ ID NO: 2005180 - RNA, 19 nt, Artificial Sequence
  Description of Artificial Sequence: Synthetic oligonucleotide
  Sense strand starting at position 3257 of SEQ ID NO: 1880934
gcacaauauguagggaucu

SEQ ID NO: 2005181 - RNA, 19 nt, Artificial Sequence
  Description of Artificial Sequence: Synthetic oligonucleotide
  Antisense strand to SEQ ID NO: 2005180
agaucccuacauauugugc

SEQ ID NO: 2005182 - RNA, 19 nt, Artificial Sequence
  Description of Artificial Sequence: Synthetic oligonucleotide
  Sense strand starting at position 3267 of SEQ ID NO: 1880934
uagggaucuguguguccau

SEQ ID NO: 2005183 - RNA, 19 nt, Artificial Sequence
  Description of Artificial Sequence: Synthetic oligonucleotide
  Antisense strand to SEQ ID NO: 2005182
auggacacacagaucccua

SEQ ID NO: 2005184 - RNA, 19 nt, Artificial Sequence
  Description of Artificial Sequence: Synthetic oligonucleotide
  Sense strand starting at position 3268 of SEQ ID NO: 1880934
agggaucuguguguccauu

SEQ ID NO: 2005185 - RNA, 19 nt, Artificial Sequence
  Description of Artificial Sequence: Synthetic oligonucleotide
  Antisense strand to SEQ ID NO: 2005184
aauggacacacagaucccu

SEQ ID NO: 2005186 - RNA, 19 nt, Artificial Sequence
  Description of Artificial Sequence: Synthetic oligonucleotide
  Sense strand starting at position 3340 of SEQ ID NO: 1880934
ugagaaucccaguguauuc

SEQ ID NO: 2005187 - RNA, 19 nt, Artificial Sequence
  Description of Artificial Sequence: Synthetic oligonucleotide
  Antisense strand to SEQ ID NO: 2005186
gaauacacugggauucuca

SEQ ID NO: 2005188 - RNA, 19 nt, Artificial Sequence
  Description of Artificial Sequence: Synthetic oligonucleotide
  Sense strand starting at position 3374 of SEQ ID NO: 1880934
auuugagacuaagauacau

SEQ ID NO: 2005189 - RNA, 19 nt, Artificial Sequence
  Description of Artificial Sequence: Synthetic oligonucleotide
  Antisense strand to SEQ ID NO: 2005188
auguaucuuagucucaaau

SEQ ID NO: 2005190 - RNA, 19 nt, Artificial Sequence
  Description of Artificial Sequence: Synthetic oligonucleotide
  Sense strand starting at position 3408 of SEQ ID NO: 1880934
gucucuguccuuuacuaaa

SEQ ID NO: 2005191 - RNA, 19 nt, Artificial Sequence
  Description of Artificial Sequence: Synthetic oligonucleotide
  Antisense strand to SEQ ID NO: 2005190
uuuaguaaaggacagagac

SEQ ID NO: 2005192 - RNA, 19 nt, Artificial Sequence
  Description of Artificial Sequence: Synthetic oligonucleotide
  Sense strand starting at position 195 of SEQ ID NO: 1880935
uucugaugucaugaagcaa

SEQ ID NO: 2005193 - RNA, 19 nt, Artificial Sequence
  Description of Artificial Sequence: Synthetic oligonucleotide
  Antisense strand to SEQ ID NO: 2005192
uugcuucaugacaucagaa

SEQ ID NO: 2005194 - RNA, 19 nt, Artificial Sequence
  Description of Artificial Sequence: Synthetic oligonucleotide
  Sense strand starting at position 380 of SEQ ID NO: 1880935
uaaagcacugaguguuuaa

SEQ ID NO: 2005195 - RNA, 19 nt, Artificial Sequence
  Description of Artificial Sequence: Synthetic oligonucleotide
  Antisense strand to SEQ ID NO: 2005194
uuaaacacucagugcuuua

SEQ ID NO: 2005196 - RNA, 19 nt, Artificial Sequence
  Description of Artificial Sequence: Synthetic oligonucleotide
  Sense strand starting at position 739 of SEQ ID NO: 1880935
cucugauagccaugauucu

SEQ ID NO: 2005197 - RNA, 19 nt, Artificial Sequence
  Description of Artificial Sequence: Synthetic oligonucleotide
  Antisense strand to SEQ ID NO: 2005196
agaaucauggcuaucagag

SEQ ID NO: 2005198 - RNA, 19 nt, Artificial Sequence
  Description of Artificial Sequence: Synthetic oligonucleotide
  Sense strand starting at position 887 of SEQ ID NO: 1880935
gaauaaagccaguaguuuc

SEQ ID NO: 2005199 - RNA, 19 nt, Artificial Sequence
  Description of Artificial Sequence: Synthetic oligonucleotide
  Antisense strand to SEQ ID NO: 2005198
gaaacuacuggcuuuauuc

SEQ ID NO: 2005200 - RNA, 19 nt, Artificial Sequence
  Description of Artificial Sequence: Synthetic oligonucleotide
  Sense strand starting at position 1012 of SEQ ID NO: 1880935
uugguuauugucugacaga

SEQ ID NO: 2005201 - RNA, 19 nt, Artificial Sequence
  Description of Artificial Sequence: Synthetic oligonucleotide
  Antisense strand to SEQ ID NO: 2005200
ucugucagacaauaaccaa

SEQ ID NO: 2005202 - RNA, 19 nt, Artificial Sequence
  Description of Artificial Sequence: Synthetic oligonucleotide
  Sense strand starting at position 1023 of SEQ ID NO: 1880935
cugacagacuguuuccuaa

SEQ ID NO: 2005203 - RNA, 19 nt, Artificial Sequence
  Description of Artificial Sequence: Synthetic oligonucleotide
  Antisense strand to SEQ ID NO: 2005202
uuaggaaacagucugucag

SEQ ID NO: 2005204 - RNA, 19 nt, Artificial Sequence
  Description of Artificial Sequence: Synthetic oligonucleotide
  Sense strand starting at position 1025 of SEQ ID NO: 1880935
gacagacuguuuccuaaag

SEQ ID NO: 2005205 - RNA, 19 nt, Artificial Sequence
  Description of Artificial Sequence: Synthetic oligonucleotide
  Antisense strand to SEQ ID NO: 2005204
cuuuaggaaacagucuguc

SEQ ID NO: 2005206 - RNA, 19 nt, Artificial Sequence
  Description of Artificial Sequence: Synthetic oligonucleotide
  Sense strand starting at position 1044 of SEQ ID NO: 1880935
gauuacauauugccagaga

SEQ ID NO: 2005207 - RNA, 19 nt, Artificial Sequence
  Description of Artificial Sequence: Synthetic oligonucleotide
  Antisense strand to SEQ ID NO: 2005206
ucucuggcaauauguaauc

SEQ ID NO: 2005208 - RNA, 19 nt, Artificial Sequence
  Description of Artificial Sequence: Synthetic oligonucleotide
  Sense strand starting at position 1047 of SEQ ID NO: 1880935
uacauauugccagagaagu

SEQ ID NO: 2005209 - RNA, 19 nt, Artificial Sequence
  Description of Artificial Sequence: Synthetic oligonucleotide
  Antisense strand to SEQ ID NO: 2005208
acuucucuggcaauaugua

SEQ ID NO: 2005210 - RNA, 19 nt, Artificial Sequence
  Description of Artificial Sequence: Synthetic oligonucleotide
  Sense strand starting at position 1075 of SEQ ID NO: 1880935
uuaggauguuauccacagu

SEQ ID NO: 2005211 - RNA, 19 nt, Artificial Sequence
  Description of Artificial Sequence: Synthetic oligonucleotide
  Antisense strand to SEQ ID NO: 2005210
acuguggauaacauccuaa

SEQ ID NO: 2005212 - RNA, 19 nt, Artificial Sequence
  Description of Artificial Sequence: Synthetic oligonucleotide
  Sense strand starting at position 1078 of SEQ ID NO: 1880935
ggauguuauccacaguuaa

SEQ ID NO: 2005213 - RNA, 19 nt, Artificial Sequence
  Description of Artificial Sequence: Synthetic oligonucleotide
  Antisense strand to SEQ ID NO: 2005212
uuaacuguggauaacaucc

SEQ ID NO: 2005214 - RNA, 19 nt, Artificial Sequence
  Description of Artificial Sequence: Synthetic oligonucleotide
  Sense strand starting at position 1147 of SEQ ID NO: 1880935
cacgaaugauacuuaguaa

SEQ ID NO: 2005215 - RNA, 19 nt, Artificial Sequence
  Description of Artificial Sequence: Synthetic oligonucleotide
  Antisense strand to SEQ ID NO: 2005214
uuacuaaguaucauucgug

SEQ ID NO: 2005216 - RNA, 19 nt, Artificial Sequence
  Description of Artificial Sequence: Synthetic oligonucleotide
  Sense strand starting at position 1158 of SEQ ID NO: 1880935
cuuaguaaacucuguaaag

SEQ ID NO: 2005217 - RNA, 19 nt, Artificial Sequence
  Description of Artificial Sequence: Synthetic oligonucleotide
  Antisense strand to SEQ ID NO: 2005216
cuuuacagaguuuacuaag

SEQ ID NO: 2005218 - RNA, 19 nt, Artificial Sequence
  Description of Artificial Sequence: Synthetic oligonucleotide
  Sense strand starting at position 1159 of SEQ ID NO: 1880935
uuaguaaacucuguaaagu

SEQ ID NO: 2005219 - RNA, 19 nt, Artificial Sequence
  Description of Artificial Sequence: Synthetic oligonucleotide
  Antisense strand to SEQ ID NO: 2005218
acuuuacagaguuuacuaa

SEQ ID NO: 2005220 - RNA, 19 nt, Artificial Sequence
  Description of Artificial Sequence: Synthetic oligonucleotide
  Sense strand starting at position 1160 of SEQ ID NO: 1880935
uaguaaacucuguaaagug

SEQ ID NO: 2005221 - RNA, 19 nt, Artificial Sequence
  Description of Artificial Sequence: Synthetic oligonucleotide
  Antisense strand to SEQ ID NO: 2005220
cacuuuacagaguuuacua

SEQ ID NO: 2005222 - RNA, 19 nt, Artificial Sequence
  Description of Artificial Sequence: Synthetic oligonucleotide
  Sense strand starting at position 1327 of SEQ ID NO: 1880935
uaaguugagcauuguuaaa

SEQ ID NO: 2005223 - RNA, 19 nt, Artificial Sequence
  Description of Artificial Sequence: Synthetic oligonucleotide
  Antisense strand to SEQ ID NO: 2005222
uuuaacaaugcucaacuua

SEQ ID NO: 2005224 - RNA, 19 nt, Artificial Sequence
  Description of Artificial Sequence: Synthetic oligonucleotide
  Sense strand starting at position 2185 of SEQ ID NO: 1880935
gcaagaugugcgccggagu

SEQ ID NO: 2005225 - RNA, 19 nt, Artificial Sequence
  Description of Artificial Sequence: Synthetic oligonucleotide
  Antisense strand to SEQ ID NO: 2005224
acuccggcgcacaucuugc

SEQ ID NO: 2005226 - RNA, 19 nt, Artificial Sequence
  Description of Artificial Sequence: Synthetic oligonucleotide
  Sense strand starting at position 2389 of SEQ ID NO: 1880935
agagauuucuaccaggcau

SEQ ID NO: 2005227 - RNA, 19 nt, Artificial Sequence
  Description of Artificial Sequence: Synthetic oligonucleotide
  Antisense strand to SEQ ID NO: 2005226
augccugguagaaaucucu

SEQ ID NO: 2005228 - RNA, 19 nt, Artificial Sequence
  Description of Artificial Sequence: Synthetic oligonucleotide
  Sense strand starting at position 2401 of SEQ ID NO: 1880935
caggcauaaucuccuguga

SEQ ID NO: 2005229 - RNA, 19 nt, Artificial Sequence
  Description of Artificial Sequence: Synthetic oligonucleotide
  Antisense strand to SEQ ID NO: 2005228
ucacaggagauuaugccug

SEQ ID NO: 2005230 - RNA, 19 nt, Artificial Sequence
  Description of Artificial Sequence: Synthetic oligonucleotide
  Sense strand starting at position 2405 of SEQ ID NO: 1880935
cauaaucuccugugaguag

SEQ ID NO: 2005231 - RNA, 19 nt, Artificial Sequence
  Description of Artificial Sequence: Synthetic oligonucleotide
  Antisense strand to SEQ ID NO: 2005230
cuacucacaggagauuaug

SEQ ID NO: 2005232 - RNA, 19 nt, Artificial Sequence
  Description of Artificial Sequence: Synthetic oligonucleotide
  Sense strand starting at position 2409 of SEQ ID NO: 1880935
aucuccugugaguagauua

SEQ ID NO: 2005233 - RNA, 19 nt, Artificial Sequence
  Description of Artificial Sequence: Synthetic oligonucleotide
  Antisense strand to SEQ ID NO: 2005232
uaaucuacucacaggagau

SEQ ID NO: 2005234 - RNA, 19 nt, Artificial Sequence
  Description of Artificial Sequence: Synthetic oligonucleotide
  Sense strand starting at position 2422 of SEQ ID NO: 1880935
agauuacagucuccagaau

SEQ ID NO: 2005235 - RNA, 19 nt, Artificial Sequence
  Description of Artificial Sequence: Synthetic oligonucleotide
  Antisense strand to SEQ ID NO: 2005234
auucuggagacuguaaucu

SEQ ID NO: 2005236 - RNA, 19 nt, Artificial Sequence
  Description of Artificial Sequence: Synthetic oligonucleotide
  Sense strand starting at position 2452 of SEQ ID NO: 1880935
guggucaggaaagguauua

SEQ ID NO: 2005237 - RNA, 19 nt, Artificial Sequence
  Description of Artificial Sequence: Synthetic oligonucleotide
  Antisense strand to SEQ ID NO: 2005236
uaauaccuuuccugaccac

SEQ ID NO: 2005238 - RNA, 19 nt, Artificial Sequence
  Description of Artificial Sequence: Synthetic oligonucleotide
  Sense strand starting at position 2463 of SEQ ID NO: 1880935
agguauuaauagucaauac

SEQ ID NO: 2005239 - RNA, 19 nt, Artificial Sequence
  Description of Artificial Sequence: Synthetic oligonucleotide
  Antisense strand to SEQ ID NO: 2005238
guauugacuauuaauaccu

SEQ ID NO: 2005240 - RNA, 19 nt, Artificial Sequence
  Description of Artificial Sequence: Synthetic oligonucleotide
  Sense strand starting at position 2727 of SEQ ID NO: 1880935
uuugcauggguguaggauu

SEQ ID NO: 2005241 - RNA, 19 nt, Artificial Sequence
  Description of Artificial Sequence: Synthetic oligonucleotide
  Antisense strand to SEQ ID NO: 2005240
aauccuacacccaugcaaa

SEQ ID NO: 2005242 - RNA, 19 nt, Artificial Sequence
  Description of Artificial Sequence: Synthetic oligonucleotide
  Sense strand starting at position 2909 of SEQ ID NO: 1880935
acgguuguaagcgugugau

SEQ ID NO: 2005243 - RNA, 19 nt, Artificial Sequence
  Description of Artificial Sequence: Synthetic oligonucleotide
  Antisense strand to SEQ ID NO: 2005242
aucacacgcuuacaaccgu

SEQ ID NO: 2005244 - RNA, 19 nt, Artificial Sequence
  Description of Artificial Sequence: Synthetic oligonucleotide
  Sense strand starting at position 2911 of SEQ ID NO: 1880935
gguuguaagcgugugauua

SEQ ID NO: 2005245 - RNA, 19 nt, Artificial Sequence
  Description of Artificial Sequence: Synthetic oligonucleotide
  Antisense strand to SEQ ID NO: 2005244
uaaucacacgcuuacaacc

SEQ ID NO: 2005246 - RNA, 19 nt, Artificial Sequence
  Description of Artificial Sequence: Synthetic oligonucleotide
  Sense strand starting at position 3015 of SEQ ID NO: 1880935
uagugauucuuguugaaag

SEQ ID NO: 2005247 - RNA, 19 nt, Artificial Sequence
  Description of Artificial Sequence: Synthetic oligonucleotide
  Antisense strand to SEQ ID NO: 2005246
cuuucaacaagaaucacua

SEQ ID NO: 2005248 - RNA, 19 nt, Artificial Sequence
  Description of Artificial Sequence: Synthetic oligonucleotide
  Sense strand starting at position 3017 of SEQ ID NO: 1880935
gugauucuuguugaaagac

SEQ ID NO: 2005249 - RNA, 19 nt, Artificial Sequence
  Description of Artificial Sequence: Synthetic oligonucleotide
  Antisense strand to SEQ ID NO: 2005248
gucuuucaacaagaaucac

SEQ ID NO: 2005250 - RNA, 19 nt, Artificial Sequence
  Description of Artificial Sequence: Synthetic oligonucleotide
  Sense strand starting at position 3070 of SEQ ID NO: 1880935
acauauaaauguccuugua

SEQ ID NO: 2005251 - RNA, 19 nt, Artificial Sequence
  Description of Artificial Sequence: Synthetic oligonucleotide
  Antisense strand to SEQ ID NO: 2005250
uacaaggacauuuauaugu

SEQ ID NO: 2005252 - RNA, 19 nt, Artificial Sequence
  Description of Artificial Sequence: Synthetic oligonucleotide
  Sense strand starting at position 3196 of SEQ ID NO: 1880935
gguaguucugaguauuaaa

SEQ ID NO: 2005253 - RNA, 19 nt, Artificial Sequence
  Description of Artificial Sequence: Synthetic oligonucleotide
  Antisense strand to SEQ ID NO: 2005252
uuuaauacucagaacuacc

SEQ ID NO: 2005254 - RNA, 19 nt, Artificial Sequence
  Description of Artificial Sequence: Synthetic oligonucleotide
  Sense strand starting at position 3226 of SEQ ID NO: 1880935
uacagauguuuggcacaua

SEQ ID NO: 2005255 - RNA, 19 nt, Artificial Sequence
  Description of Artificial Sequence: Synthetic oligonucleotide
  Antisense strand to SEQ ID NO: 2005254
uaugugccaaacaucugua

SEQ ID NO: 2005256 - RNA, 19 nt, Artificial Sequence
  Description of Artificial Sequence: Synthetic oligonucleotide
  Sense strand starting at position 3322 of SEQ ID NO: 1880935
uaacuauggugguucuuua

SEQ ID NO: 2005257 - RNA, 19 nt, Artificial Sequence
  Description of Artificial Sequence: Synthetic oligonucleotide
  Antisense strand to SEQ ID NO: 2005256
uaaagaaccaccauaguua

SEQ ID NO: 2005258 - RNA, 19 nt, Artificial Sequence
  Description of Artificial Sequence: Synthetic oligonucleotide
  Sense strand starting at position 3345 of SEQ ID NO: 1880935
cugaacuucuaaucgugaa

SEQ ID NO: 2005259 - RNA, 19 nt, Artificial Sequence
  Description of Artificial Sequence: Synthetic oligonucleotide
  Antisense strand to SEQ ID NO: 2005258
uucacgauuagaaguucag

SEQ ID NO: 2005260 - RNA, 19 nt, Artificial Sequence
  Description of Artificial Sequence: Synthetic oligonucleotide
  Sense strand starting at position 3349 of SEQ ID NO: 1880935
acuucuaaucgugaaugca

SEQ ID NO: 2005261 - RNA, 19 nt, Artificial Sequence
  Description of Artificial Sequence: Synthetic oligonucleotide
  Antisense strand to SEQ ID NO: 2005260
ugcauucacgauuagaagu

SEQ ID NO: 2005262 - RNA, 19 nt, Artificial Sequence
  Description of Artificial Sequence: Synthetic oligonucleotide
  Sense strand starting at position 3692 of SEQ ID NO: 1880935
ucaaaucguuaucuuagau

SEQ ID NO: 2005263 - RNA, 19 nt, Artificial Sequence
  Description of Artificial Sequence: Synthetic oligonucleotide
  Antisense strand to SEQ ID NO: 2005262
aucuaagauaacgauuuga

SEQ ID NO: 2005264 - RNA, 19 nt, Artificial Sequence
  Description of Artificial Sequence: Synthetic oligonucleotide
  Sense strand starting at position 3707 of SEQ ID NO: 1880935
agauaaguauaguugauag

SEQ ID NO: 2005265 - RNA, 19 nt, Artificial Sequence
  Description of Artificial Sequence: Synthetic oligonucleotide
  Antisense strand to SEQ ID NO: 2005264
cuaucaacuauacuuaucu

SEQ ID NO: 2005266 - RNA, 19 nt, Artificial Sequence
  Description of Artificial Sequence: Synthetic oligonucleotide
  Sense strand starting at position 3715 of SEQ ID NO: 1880935
auaguugauagauggcuua

SEQ ID NO: 2005267 - RNA, 19 nt, Artificial Sequence
  Description of Artificial Sequence: Synthetic oligonucleotide
  Antisense strand to SEQ ID NO: 2005266
uaagccaucuaucaacuau

SEQ ID NO: 2005268 - RNA, 19 nt, Artificial Sequence
  Description of Artificial Sequence: Synthetic oligonucleotide
  Sense strand starting at position 3718 of SEQ ID NO: 1880935
guugauagauggcuuauua

SEQ ID NO: 2005269 - RNA, 19 nt, Artificial Sequence
  Description of Artificial Sequence: Synthetic oligonucleotide
  Antisense strand to SEQ ID NO: 2005268
uaauaagccaucuaucaac

SEQ ID NO: 2005270 - RNA, 19 nt, Artificial Sequence
  Description of Artificial Sequence: Synthetic oligonucleotide
  Sense strand starting at position 3725 of SEQ ID NO: 1880935
gauggcuuauuacuagaga

SEQ ID NO: 2005271 - RNA, 19 nt, Artificial Sequence
  Description of Artificial Sequence: Synthetic oligonucleotide
  Antisense strand to SEQ ID NO: 2005270
ucucuaguaauaagccauc

SEQ ID NO: 2005272 - RNA, 19 nt, Artificial Sequence
  Description of Artificial Sequence: Synthetic oligonucleotide
  Sense strand starting at position 81 of SEQ ID NO: 1880936
uaugaauacuucccggaug

SEQ ID NO: 2005273 - RNA, 19 nt, Artificial Sequence
  Description of Artificial Sequence: Synthetic oligonucleotide
  Antisense strand to SEQ ID NO: 2005272
cauccgggaaguauucaua

SEQ ID NO: 2005274 - RNA, 19 nt, Artificial Sequence
  Description of Artificial Sequence: Synthetic oligonucleotide
  Sense strand starting at position 83 of SEQ ID NO: 1880936
ugaauacuucccggaugag

SEQ ID NO: 2005275 - RNA, 19 nt, Artificial Sequence
  Description of Artificial Sequence: Synthetic oligonucleotide
  Antisense strand to SEQ ID NO: 2005274
cucauccgggaaguauuca

SEQ ID NO: 2005276 - RNA, 19 nt, Artificial Sequence
  Description of Artificial Sequence: Synthetic oligonucleotide
  Sense strand starting at position 84 of SEQ ID NO: 1880936
gaauacuucccggaugagu

SEQ ID NO: 2005277 - RNA, 19 nt, Artificial Sequence
  Description of Artificial Sequence: Synthetic oligonucleotide
  Antisense strand to SEQ ID NO: 2005276
acucauccgggaaguauuc

SEQ ID NO: 2005278 - RNA, 19 nt, Artificial Sequence
  Description of Artificial Sequence: Synthetic oligonucleotide
  Sense strand starting at position 86 of SEQ ID NO: 1880936
auacuucccggaugaguaa

SEQ ID NO: 2005279 - RNA, 19 nt, Artificial Sequence
  Description of Artificial Sequence: Synthetic oligonucleotide
  Antisense strand to SEQ ID NO: 2005278
uuacucauccgggaaguau

SEQ ID NO: 2005280 - RNA, 19 nt, Artificial Sequence
  Description of Artificial Sequence: Synthetic oligonucleotide
  Sense strand starting at position 429 of SEQ ID NO: 1880936
acucauuaguccucggaua

SEQ ID NO: 2005281 - RNA, 19 nt, Artificial Sequence
  Description of Artificial Sequence: Synthetic oligonucleotide
  Antisense strand to SEQ ID NO: 2005280
uauccgaggacuaaugagu

SEQ ID NO: 2005282 - RNA, 19 nt, Artificial Sequence
  Description of Artificial Sequence: Synthetic oligonucleotide
  Sense strand starting at position 571 of SEQ ID NO: 1880936
ugaagugcucuuuagauag

SEQ ID NO: 2005283 - RNA, 19 nt, Artificial Sequence
  Description of Artificial Sequence: Synthetic oligonucleotide
  Antisense strand to SEQ ID NO: 2005282
cuaucuaaagagcacuuca

SEQ ID NO: 2005284 - RNA, 19 nt, Artificial Sequence
  Description of Artificial Sequence: Synthetic oligonucleotide
  Sense strand starting at position 701 of SEQ ID NO: 1880936
gguuguaaucuuuggaugg

SEQ ID NO: 2005285 - RNA, 19 nt, Artificial Sequence
  Description of Artificial Sequence: Synthetic oligonucleotide
  Antisense strand to SEQ ID NO: 2005284
ccauccaaagauuacaacc

SEQ ID NO: 2005286 - RNA, 19 nt, Artificial Sequence
  Description of Artificial Sequence: Synthetic oligonucleotide
  Sense strand starting at position 706 of SEQ ID NO: 1880936
uaaucuuuggauggugaca

SEQ ID NO: 2005287 - RNA, 19 nt, Artificial Sequence
  Description of Artificial Sequence: Synthetic oligonucleotide
  Antisense strand to SEQ ID NO: 2005286
ugucaccauccaaagauua

SEQ ID NO: 2005288 - RNA, 19 nt, Artificial Sequence
  Description of Artificial Sequence: Synthetic oligonucleotide
  Sense strand starting at position 755 of SEQ ID NO: 1880936
guugaaguccauuacugac

SEQ ID NO: 2005289 - RNA, 19 nt, Artificial Sequence
  Description of Artificial Sequence: Synthetic oligonucleotide
  Antisense strand to SEQ ID NO: 2005288
gucaguaauggacuucaac

SEQ ID NO: 2005290 - RNA, 19 nt, Artificial Sequence
  Description of Artificial Sequence: Synthetic oligonucleotide
  Sense strand starting at position 781 of SEQ ID NO: 1880936
uauagaaguucugugaacu

SEQ ID NO: 2005291 - RNA, 19 nt, Artificial Sequence
  Description of Artificial Sequence: Synthetic oligonucleotide
  Antisense strand to SEQ ID NO: 2005290
aguucacagaacuucuaua

SEQ ID NO: 2005292 - RNA, 19 nt, Artificial Sequence
  Description of Artificial Sequence: Synthetic oligonucleotide
  Sense strand starting at position 782 of SEQ ID NO: 1880936
auagaaguucugugaacuu

SEQ ID NO: 2005293 - RNA, 19 nt, Artificial Sequence
  Description of Artificial Sequence: Synthetic oligonucleotide
  Antisense strand to SEQ ID NO: 2005292
aaguucacagaacuucuau

SEQ ID NO: 2005294 - RNA, 19 nt, Artificial Sequence
  Description of Artificial Sequence: Synthetic oligonucleotide
  Sense strand starting at position 789 of SEQ ID NO: 1880936
uucugugaacuuugauucu

SEQ ID NO: 2005295 - RNA, 19 nt, Artificial Sequence
  Description of Artificial Sequence: Synthetic oligonucleotide
  Antisense strand to SEQ ID NO: 2005294
agaaucaaaguucacagaa

SEQ ID NO: 2005296 - RNA, 19 nt, Artificial Sequence
  Description of Artificial Sequence: Synthetic oligonucleotide
  Sense strand starting at position 792 of SEQ ID NO: 1880936
ugugaacuuugauucuuaa

SEQ ID NO: 2005297 - RNA, 19 nt, Artificial Sequence
  Description of Artificial Sequence: Synthetic oligonucleotide
  Antisense strand to SEQ ID NO: 2005296
uuaagaaucaaaguucaca

SEQ ID NO: 2005298 - RNA, 19 nt, Artificial Sequence
  Description of Artificial Sequence: Synthetic oligonucleotide
  Sense strand starting at position 795 of SEQ ID NO: 1880936
gaacuuugauucuuaagug

SEQ ID NO: 2005299 - RNA, 19 nt, Artificial Sequence
  Description of Artificial Sequence: Synthetic oligonucleotide
  Antisense strand to SEQ ID NO: 2005298
cacuuaagaaucaaaguuc

SEQ ID NO: 2005300 - RNA, 19 nt, Artificial Sequence
  Description of Artificial Sequence: Synthetic oligonucleotide
  Sense strand starting at position 799 of SEQ ID NO: 1880936
uuugauucuuaagugguaa

SEQ ID NO: 2005301 - RNA, 19 nt, Artificial Sequence
  Description of Artificial Sequence: Synthetic oligonucleotide
  Antisense strand to SEQ ID NO: 2005300
uuaccacuuaagaaucaaa

SEQ ID NO: 2005302 - RNA, 19 nt, Artificial Sequence
  Description of Artificial Sequence: Synthetic oligonucleotide
  Sense strand starting at position 813 of SEQ ID NO: 1880936
gguaauagucaacaucuua

SEQ ID NO: 2005303 - RNA, 19 nt, Artificial Sequence
  Description of Artificial Sequence: Synthetic oligonucleotide
  Antisense strand to SEQ ID NO: 2005302
uaagauguugacuauuacc

SEQ ID NO: 2005304 - RNA, 19 nt, Artificial Sequence
  Description of Artificial Sequence: Synthetic oligonucleotide
  Sense strand starting at position 931 of SEQ ID NO: 1880936
uaaaguaagguguguagga

SEQ ID NO: 2005305 - RNA, 19 nt, Artificial Sequence
  Description of Artificial Sequence: Synthetic oligonucleotide
  Antisense strand to SEQ ID NO: 2005304
uccuacacaccuuacuuua

SEQ ID NO: 2005306 - RNA, 19 nt, Artificial Sequence
  Description of Artificial Sequence: Synthetic oligonucleotide
  Sense strand starting at position 940 of SEQ ID NO: 1880936
guguguaggaccuaugaua

SEQ ID NO: 2005307 - RNA, 19 nt, Artificial Sequence
  Description of Artificial Sequence: Synthetic oligonucleotide
  Antisense strand to SEQ ID NO: 2005306
uaucauagguccuacacac

SEQ ID NO: 2005308 - RNA, 19 nt, Artificial Sequence
  Description of Artificial Sequence: Synthetic oligonucleotide
  Sense strand starting at position 1396 of SEQ ID NO: 1880936
cccugucaguaucucagaa

SEQ ID NO: 2005309 - RNA, 19 nt, Artificial Sequence
  Description of Artificial Sequence: Synthetic oligonucleotide
  Antisense strand to SEQ ID NO: 2005308
uucugagauacugacaggg

SEQ ID NO: 2005310 - RNA, 19 nt, Artificial Sequence
  Description of Artificial Sequence: Synthetic oligonucleotide
  Sense strand starting at position 1429 of SEQ ID NO: 1880936
guacuuauuucuuugcaag

SEQ ID NO: 2005311 - RNA, 19 nt, Artificial Sequence
  Description of Artificial Sequence: Synthetic oligonucleotide
  Antisense strand to SEQ ID NO: 2005310
cuugcaaagaaauaaguac

SEQ ID NO: 2005312 - RNA, 19 nt, Artificial Sequence
  Description of Artificial Sequence: Synthetic oligonucleotide
  Sense strand starting at position 1666 of SEQ ID NO: 1880936
aggaguagcuccuccauca

SEQ ID NO: 2005313 - RNA, 19 nt, Artificial Sequence
  Description of Artificial Sequence: Synthetic oligonucleotide
  Antisense strand to SEQ ID NO: 2005312
ugauggaggagcuacuccu

SEQ ID NO: 2005314 - RNA, 19 nt, Artificial Sequence
  Description of Artificial Sequence: Synthetic oligonucleotide
  Sense strand starting at position 2270 of SEQ ID NO: 1880936
cgcuuuccuggacaucuua

SEQ ID NO: 2005315 - RNA, 19 nt, Artificial Sequence
  Description of Artificial Sequence: Synthetic oligonucleotide
  Antisense strand to SEQ ID NO: 2005314
uaagauguccaggaaagcg

SEQ ID NO: 2005316 - RNA, 19 nt, Artificial Sequence
  Description of Artificial Sequence: Synthetic oligonucleotide
  Sense strand starting at position 2459 of SEQ ID NO: 1880936
uccucuuauuaccugggaa

SEQ ID NO: 2005317 - RNA, 19 nt, Artificial Sequence
  Description of Artificial Sequence: Synthetic oligonucleotide
  Antisense strand to SEQ ID NO: 2005316
uucccagguaauaagagga

SEQ ID NO: 2005318 - RNA, 19 nt, Artificial Sequence
  Description of Artificial Sequence: Synthetic oligonucleotide
  Sense strand starting at position 2461 of SEQ ID NO: 1880936
cucuuauuaccugggaaga

SEQ ID NO: 2005319 - RNA, 19 nt, Artificial Sequence
  Description of Artificial Sequence: Synthetic oligonucleotide
  Antisense strand to SEQ ID NO: 2005318
ucuucccagguaauaagag

SEQ ID NO: 2005320 - RNA, 19 nt, Artificial Sequence
  Description of Artificial Sequence: Synthetic oligonucleotide
  Sense strand starting at position 2462 of SEQ ID NO: 1880936
ucuuauuaccugggaagau

SEQ ID NO: 2005321 - RNA, 19 nt, Artificial Sequence
  Description of Artificial Sequence: Synthetic oligonucleotide
  Antisense strand to SEQ ID NO: 2005320
aucuucccagguaauaaga

SEQ ID NO: 2005322 - RNA, 19 nt, Artificial Sequence
  Description of Artificial Sequence: Synthetic oligonucleotide
  Sense strand starting at position 2573 of SEQ ID NO: 1880936
gguaguaacuuucuccaag

SEQ ID NO: 2005323 - RNA, 19 nt, Artificial Sequence
  Description of Artificial Sequence: Synthetic oligonucleotide
  Antisense strand to SEQ ID NO: 2005322
cuuggagaaaguuacuacc

SEQ ID NO: 2005324 - RNA, 19 nt, Artificial Sequence
  Description of Artificial Sequence: Synthetic oligonucleotide
  Sense strand starting at position 2640 of SEQ ID NO: 1880936
aguugaucugcuggacacu

SEQ ID NO: 2005325 - RNA, 19 nt, Artificial Sequence
  Description of Artificial Sequence: Synthetic oligonucleotide
  Antisense strand to SEQ ID NO: 2005324
aguguccagcagaucaacu

SEQ ID NO: 2005326 - RNA, 19 nt, Artificial Sequence
  Description of Artificial Sequence: Synthetic oligonucleotide
  Sense strand starting at position 2641 of SEQ ID NO: 1880936
guugaucugcuggacacuu

SEQ ID NO: 2005327 - RNA, 19 nt, Artificial Sequence
  Description of Artificial Sequence: Synthetic oligonucleotide
  Antisense strand to SEQ ID NO: 2005326
aaguguccagcagaucaac

SEQ ID NO: 2005328 - RNA, 19 nt, Artificial Sequence
  Description of Artificial Sequence: Synthetic oligonucleotide
  Sense strand starting at position 2666 of SEQ ID NO: 1880936
cuuaacaagguuuguuaaa

SEQ ID NO: 2005329 - RNA, 19 nt, Artificial Sequence
  Description of Artificial Sequence: Synthetic oligonucleotide
  Antisense strand to SEQ ID NO: 2005328
uuuaacaaaccuuguuaag

SEQ ID NO: 2005330 - RNA, 19 nt, Artificial Sequence
  Description of Artificial Sequence: Synthetic oligonucleotide
  Sense strand starting at position 2689 of SEQ ID NO: 1880936
uaguauaugccaggaggua

SEQ ID NO: 2005331 - RNA, 19 nt, Artificial Sequence
  Description of Artificial Sequence: Synthetic oligonucleotide
  Antisense strand to SEQ ID NO: 2005330
uaccuccuggcauauacua

SEQ ID NO: 2005332 - RNA, 19 nt, Artificial Sequence
  Description of Artificial Sequence: Synthetic oligonucleotide
  Sense strand starting at position 2690 of SEQ ID NO: 1880936
aguauaugccaggagguau

SEQ ID NO: 2005333 - RNA, 19 nt, Artificial Sequence
  Description of Artificial Sequence: Synthetic oligonucleotide
  Antisense strand to SEQ ID NO: 2005332
auaccuccuggcauauacu

SEQ ID NO: 2005334 - RNA, 19 nt, Artificial Sequence
  Description of Artificial Sequence: Synthetic oligonucleotide
  Sense strand starting at position 2701 of SEQ ID NO: 1880936
ggagguaugccagggauug

SEQ ID NO: 2005335 - RNA, 19 nt, Artificial Sequence
  Description of Artificial Sequence: Synthetic oligonucleotide
  Antisense strand to SEQ ID NO: 2005334
caaucccuggcauaccucc

SEQ ID NO: 2005336 - RNA, 19 nt, Artificial Sequence
  Description of Artificial Sequence: Synthetic oligonucleotide
  Sense strand starting at position 2794 of SEQ ID NO: 1880936
gugaacagauaguucuaga

SEQ ID NO: 2005337 - RNA, 19 nt, Artificial Sequence
  Description of Artificial Sequence: Synthetic oligonucleotide
  Antisense strand to SEQ ID NO: 2005336
ucuagaacuaucuguucac

SEQ ID NO: 2005338 - RNA, 19 nt, Artificial Sequence
  Description of Artificial Sequence: Synthetic oligonucleotide
  Sense strand starting at position 2846 of SEQ ID NO: 1880936
uaugguugcgcagaggaga

SEQ ID NO: 2005339 - RNA, 19 nt, Artificial Sequence
  Description of Artificial Sequence: Synthetic oligonucleotide
  Antisense strand to SEQ ID NO: 2005338
ucuccucugcgcaaccaua

SEQ ID NO: 2005340 - RNA, 19 nt, Artificial Sequence
  Description of Artificial Sequence: Synthetic oligonucleotide
  Sense strand starting at position 2968 of SEQ ID NO: 1880936
ggaccagacuacuuaagca

SEQ ID NO: 2005341 - RNA, 19 nt, Artificial Sequence
  Description of Artificial Sequence: Synthetic oligonucleotide
  Antisense strand to SEQ ID NO: 2005340
ugcuuaaguagucuggucc

SEQ ID NO: 2005342 - RNA, 19 nt, Artificial Sequence
  Description of Artificial Sequence: Synthetic oligonucleotide
  Sense strand starting at position 2993 of SEQ ID NO: 1880936
gguuuagacuguccuuuaa

SEQ ID NO: 2005343 - RNA, 19 nt, Artificial Sequence
  Description of Artificial Sequence: Synthetic oligonucleotide
  Antisense strand to SEQ ID NO: 2005342
uuaaaggacagucuaaacc

SEQ ID NO: 2005344 - RNA, 19 nt, Artificial Sequence
  Description of Artificial Sequence: Synthetic oligonucleotide
  Sense strand starting at position 3141 of SEQ ID NO: 1880936
gaaagucuguaaguccaua

SEQ ID NO: 2005345 - RNA, 19 nt, Artificial Sequence
  Description of Artificial Sequence: Synthetic oligonucleotide
  Antisense strand to SEQ ID NO: 2005344
uauggacuuacagacuuuc

SEQ ID NO: 2005346 - RNA, 19 nt, Artificial Sequence
  Description of Artificial Sequence: Synthetic oligonucleotide
  Sense strand starting at position 3282 of SEQ ID NO: 1880936
acgugucuuuggaagggaa

SEQ ID NO: 2005347 - RNA, 19 nt, Artificial Sequence
  Description of Artificial Sequence: Synthetic oligonucleotide
  Antisense strand to SEQ ID NO: 2005346
uucccuuccaaagacacgu

SEQ ID NO: 2005348 - RNA, 19 nt, Artificial Sequence
  Description of Artificial Sequence: Synthetic oligonucleotide
  Sense strand starting at position 3327 of SEQ ID NO: 1880936
ugguauuagguacaacuua

SEQ ID NO: 2005349 - RNA, 19 nt, Artificial Sequence
  Description of Artificial Sequence: Synthetic oligonucleotide
  Antisense strand to SEQ ID NO: 2005348
uaaguuguaccuaauacca

SEQ ID NO: 2005350 - RNA, 19 nt, Artificial Sequence
  Description of Artificial Sequence: Synthetic oligonucleotide
  Sense strand starting at position 3660 of SEQ ID NO: 1880936
cuuuguaccuacucauaug

SEQ ID NO: 2005351 - RNA, 19 nt, Artificial Sequence
  Description of Artificial Sequence: Synthetic oligonucleotide
  Antisense strand to SEQ ID NO: 2005350
cauaugaguagguacaaag

SEQ ID NO: 2005352 - RNA, 19 nt, Artificial Sequence
  Description of Artificial Sequence: Synthetic oligonucleotide
  Sense strand starting at position 1140 of SEQ ID NO: 1880938
gucuguuggacagggaaga

SEQ ID NO: 2005353 - RNA, 19 nt, Artificial Sequence
  Description of Artificial Sequence: Synthetic oligonucleotide
  Antisense strand to SEQ ID NO: 2005352
ucuucccuguccaacagac

SEQ ID NO: 2005354 - RNA, 19 nt, Artificial Sequence
  Description of Artificial Sequence: Synthetic oligonucleotide
  Sense strand starting at position 1221 of SEQ ID NO: 1880938
guggcuuccucauuauaga

SEQ ID NO: 2005355 - RNA, 19 nt, Artificial Sequence
  Description of Artificial Sequence: Synthetic oligonucleotide
  Antisense strand to SEQ ID NO: 2005354
ucuauaaugaggaagccac

SEQ ID NO: 2005356 - RNA, 19 nt, Artificial Sequence
  Description of Artificial Sequence: Synthetic oligonucleotide
  Sense strand starting at position 1222 of SEQ ID NO: 1880938
uggcuuccucauuauagag

SEQ ID NO: 2005357 - RNA, 19 nt, Artificial Sequence
  Description of Artificial Sequence: Synthetic oligonucleotide
  Antisense strand to SEQ ID NO: 2005356
cucuauaaugaggaagcca

SEQ ID NO: 2005358 - RNA, 19 nt, Artificial Sequence
  Description of Artificial Sequence: Synthetic oligonucleotide
  Sense strand starting at position 1288 of SEQ ID NO: 1880938
augugcuucuaucuugaga

SEQ ID NO: 2005359 - RNA, 19 nt, Artificial Sequence
  Description of Artificial Sequence: Synthetic oligonucleotide
  Antisense strand to SEQ ID NO: 2005358
ucucaagauagaagcacau

SEQ ID NO: 2005360 - RNA, 19 nt, Artificial Sequence
  Description of Artificial Sequence: Synthetic oligonucleotide
  Sense strand starting at position 1291 of SEQ ID NO: 1880938
ugcuucuaucuugagaacu

SEQ ID NO: 2005361 - RNA, 19 nt, Artificial Sequence
  Description of Artificial Sequence: Synthetic oligonucleotide
  Antisense strand to SEQ ID NO: 2005360
aguucucaagauagaagca

SEQ ID NO: 2005362 - RNA, 19 nt, Artificial Sequence
  Description of Artificial Sequence: Synthetic oligonucleotide
  Sense strand starting at position 1392 of SEQ ID NO: 1880938
agaaauauguacuucuguu

SEQ ID NO: 2005363 - RNA, 19 nt, Artificial Sequence
  Description of Artificial Sequence: Synthetic oligonucleotide
  Antisense strand to SEQ ID NO: 2005362
aacagaaguacauauuucu

SEQ ID NO: 2005364 - RNA, 19 nt, Artificial Sequence
  Description of Artificial Sequence: Synthetic oligonucleotide
  Sense strand starting at position 1399 of SEQ ID NO: 1880938
uguacuucuguuuaauaag

SEQ ID NO: 2005365 - RNA, 19 nt, Artificial Sequence
  Description of Artificial Sequence: Synthetic oligonucleotide
  Antisense strand to SEQ ID NO: 2005364
cuuauuaaacagaaguaca

SEQ ID NO: 2005366 - RNA, 19 nt, Artificial Sequence
  Description of Artificial Sequence: Synthetic oligonucleotide
  Sense strand starting at position 1424 of SEQ ID NO: 1880938
cugcuaauuguguaagcau

SEQ ID NO: 2005367 - RNA, 19 nt, Artificial Sequence
  Description of Artificial Sequence: Synthetic oligonucleotide
  Antisense strand to SEQ ID NO: 2005366
augcuuacacaauuagcag

SEQ ID NO: 2005368 - RNA, 19 nt, Artificial Sequence
  Description of Artificial Sequence: Synthetic oligonucleotide
  Sense strand starting at position 1427 of SEQ ID NO: 1880938
cuaauuguguaagcauagu

SEQ ID NO: 2005369 - RNA, 19 nt, Artificial Sequence
  Description of Artificial Sequence: Synthetic oligonucleotide
  Antisense strand to SEQ ID NO: 2005368
acuaugcuuacacaauuag

SEQ ID NO: 2005370 - RNA, 19 nt, Artificial Sequence
  Description of Artificial Sequence: Synthetic oligonucleotide
  Sense strand starting at position 1575 of SEQ ID NO: 1880938
gguuaauugcuuuagcccu

SEQ ID NO: 2005371 - RNA, 19 nt, Artificial Sequence
  Description of Artificial Sequence: Synthetic oligonucleotide
  Antisense strand to SEQ ID NO: 2005370
agggcuaaagcaauuaacc

SEQ ID NO: 2005372 - RNA, 19 nt, Artificial Sequence
  Description of Artificial Sequence: Synthetic oligonucleotide
  Sense strand starting at position 1582 of SEQ ID NO: 1880938
ugcuuuagcccugacuauu

SEQ ID NO: 2005373 - RNA, 19 nt, Artificial Sequence
  Description of Artificial Sequence: Synthetic oligonucleotide
  Antisense strand to SEQ ID NO: 2005372
aauagucagggcuaaagca

SEQ ID NO: 2005374 - RNA, 19 nt, Artificial Sequence
  Description of Artificial Sequence: Synthetic oligonucleotide
  Sense strand starting at position 1631 of SEQ ID NO: 1880938
gucuaaucugcuuaccugu

SEQ ID NO: 2005375 - RNA, 19 nt, Artificial Sequence
  Description of Artificial Sequence: Synthetic oligonucleotide
  Antisense strand to SEQ ID NO: 2005374
acagguaagcagauuagac

SEQ ID NO: 2005376 - RNA, 19 nt, Artificial Sequence
  Description of Artificial Sequence: Synthetic oligonucleotide
  Sense strand starting at position 1638 of SEQ ID NO: 1880938
cugcuuaccuguuccuaua

SEQ ID NO: 2005377 - RNA, 19 nt, Artificial Sequence
  Description of Artificial Sequence: Synthetic oligonucleotide
  Antisense strand to SEQ ID NO: 2005376
uauaggaacagguaagcag

SEQ ID NO: 2005378 - RNA, 19 nt, Artificial Sequence
  Description of Artificial Sequence: Synthetic oligonucleotide
  Sense strand starting at position 1780 of SEQ ID NO: 1880938
agauuugacugccaaauga

SEQ ID NO: 2005379 - RNA, 19 nt, Artificial Sequence
  Description of Artificial Sequence: Synthetic oligonucleotide
  Antisense strand to SEQ ID NO: 2005378
ucauuuggcagucaaaucu

SEQ ID NO: 2005380 - RNA, 19 nt, Artificial Sequence
  Description of Artificial Sequence: Synthetic oligonucleotide
  Sense strand starting at position 1852 of SEQ ID NO: 1880938
uggauaucaucuuuguuuc

SEQ ID NO: 2005381 - RNA, 19 nt, Artificial Sequence
  Description of Artificial Sequence: Synthetic oligonucleotide
  Antisense strand to SEQ ID NO: 2005380
gaaacaaagaugauaucca

SEQ ID NO: 2005382 - RNA, 19 nt, Artificial Sequence
  Description of Artificial Sequence: Synthetic oligonucleotide
  Sense strand starting at position 1853 of SEQ ID NO: 1880938
ggauaucaucuuuguuucu

SEQ ID NO: 2005383 - RNA, 19 nt, Artificial Sequence
  Description of Artificial Sequence: Synthetic oligonucleotide
  Antisense strand to SEQ ID NO: 2005382
agaaacaaagaugauaucc

SEQ ID NO: 2005384 - RNA, 19 nt, Artificial Sequence
  Description of Artificial Sequence: Synthetic oligonucleotide
  Sense strand starting at position 1889 of SEQ ID NO: 1880938
ggaagugaauaucucauua

SEQ ID NO: 2005385 - RNA, 19 nt, Artificial Sequence
  Description of Artificial Sequence: Synthetic oligonucleotide
  Antisense strand to SEQ ID NO: 2005384
uaaugagauauucacuucc

SEQ ID NO: 2005386 - RNA, 19 nt, Artificial Sequence
  Description of Artificial Sequence: Synthetic oligonucleotide
  Sense strand starting at position 2189 of SEQ ID NO: 1880938
ccaucagaugcauggagaa

SEQ ID NO: 2005387 - RNA, 19 nt, Artificial Sequence
  Description of Artificial Sequence: Synthetic oligonucleotide
  Antisense strand to SEQ ID NO: 2005386
uucuccaugcaucugaugg

SEQ ID NO: 2005388 - RNA, 19 nt, Artificial Sequence
  Description of Artificial Sequence: Synthetic oligonucleotide
  Sense strand starting at position 2201 of SEQ ID NO: 1880938
uggagaacuccacguaguu

SEQ ID NO: 2005389 - RNA, 19 nt, Artificial Sequence
  Description of Artificial Sequence: Synthetic oligonucleotide
  Antisense strand to SEQ ID NO: 2005388
aacuacguggaguucucca

SEQ ID NO: 2005390 - RNA, 19 nt, Artificial Sequence
  Description of Artificial Sequence: Synthetic oligonucleotide
  Sense strand starting at position 2291 of SEQ ID NO: 1880938
cagccauuuggccaguagu

SEQ ID NO: 2005391 - RNA, 19 nt, Artificial Sequence
  Description of Artificial Sequence: Synthetic oligonucleotide
  Antisense strand to SEQ ID NO: 2005390
acuacuggccaaauggcug

SEQ ID NO: 2005392 - RNA, 19 nt, Artificial Sequence
  Description of Artificial Sequence: Synthetic oligonucleotide
  Sense strand starting at position 2438 of SEQ ID NO: 1880938
ugcccagagcaguaaacuu

SEQ ID NO: 2005393 - RNA, 19 nt, Artificial Sequence
  Description of Artificial Sequence: Synthetic oligonucleotide
  Antisense strand to SEQ ID NO: 2005392
aaguuuacugcucugggca

SEQ ID NO: 2005394 - RNA, 19 nt, Artificial Sequence
  Description of Artificial Sequence: Synthetic oligonucleotide
  Sense strand starting at position 2611 of SEQ ID NO: 1880938
acaggcuuucccuaagguu

SEQ ID NO: 2005395 - RNA, 19 nt, Artificial Sequence
  Description of Artificial Sequence: Synthetic oligonucleotide
  Antisense strand to SEQ ID NO: 2005394
aaccuuagggaaagccugu

SEQ ID NO: 2005396 - RNA, 19 nt, Artificial Sequence
  Description of Artificial Sequence: Synthetic oligonucleotide
  Sense strand starting at position 2667 of SEQ ID NO: 1880938
agguuaguuuaaguugaca

SEQ ID NO: 2005397 - RNA, 19 nt, Artificial Sequence
  Description of Artificial Sequence: Synthetic oligonucleotide
  Antisense strand to SEQ ID NO: 2005396
ugucaacuuaaacuaaccu

SEQ ID NO: 2005398 - RNA, 19 nt, Artificial Sequence
  Description of Artificial Sequence: Synthetic oligonucleotide
  Sense strand starting at position 2730 of SEQ ID NO: 1880938
ccaguucuuccggagaaca

SEQ ID NO: 2005399 - RNA, 19 nt, Artificial Sequence
  Description of Artificial Sequence: Synthetic oligonucleotide
  Antisense strand to SEQ ID NO: 2005398
uguucuccggaagaacugg

SEQ ID NO: 2005400 - RNA, 19 nt, Artificial Sequence
  Description of Artificial Sequence: Synthetic oligonucleotide
  Sense strand starting at position 2870 of SEQ ID NO: 1880938
ucuucuagauaauucgagu

SEQ ID NO: 2005401 - RNA, 19 nt, Artificial Sequence
  Description of Artificial Sequence: Synthetic oligonucleotide
  Antisense strand to SEQ ID NO: 2005400
acucgaauuaucuagaaga

SEQ ID NO: 2005402 - RNA, 19 nt, Artificial Sequence
  Description of Artificial Sequence: Synthetic oligonucleotide
  Sense strand starting at position 2876 of SEQ ID NO: 1880938
agauaauucgaguagcuua

SEQ ID NO: 2005403 - RNA, 19 nt, Artificial Sequence
  Description of Artificial Sequence: Synthetic oligonucleotide
  Antisense strand to SEQ ID NO: 2005402
uaagcuacucgaauuaucu

SEQ ID NO: 2005404 - RNA, 19 nt, Artificial Sequence
  Description of Artificial Sequence: Synthetic oligonucleotide
  Sense strand starting at position 2879 of SEQ ID NO: 1880938
uaauucgaguagcuuaaau

SEQ ID NO: 2005405 - RNA, 19 nt, Artificial Sequence
  Description of Artificial Sequence: Synthetic oligonucleotide
  Antisense strand to SEQ ID NO: 2005404
auuuaagcuacucgaauua

SEQ ID NO: 2005406 - RNA, 19 nt, Artificial Sequence
  Description of Artificial Sequence: Synthetic oligonucleotide
  Sense strand starting at position 2881 of SEQ ID NO: 1880938
auucgaguagcuuaaauaa

SEQ ID NO: 2005407 - RNA, 19 nt, Artificial Sequence
  Description of Artificial Sequence: Synthetic oligonucleotide
  Antisense strand to SEQ ID NO: 2005406
uuauuuaagcuacucgaau

SEQ ID NO: 2005408 - RNA, 19 nt, Artificial Sequence
  Description of Artificial Sequence: Synthetic oligonucleotide
  Sense strand starting at position 2896 of SEQ ID NO: 1880938
auaagucugucuucucuga

SEQ ID NO: 2005409 - RNA, 19 nt, Artificial Sequence
  Description of Artificial Sequence: Synthetic oligonucleotide
  Antisense strand to SEQ ID NO: 2005408
ucagagaagacagacuuau

SEQ ID NO: 2005410 - RNA, 19 nt, Artificial Sequence
  Description of Artificial Sequence: Synthetic oligonucleotide
  Sense strand starting at position 2915 of SEQ ID NO: 1880938
cuuccaaguccagaaaugu

SEQ ID NO: 2005411 - RNA, 19 nt, Artificial Sequence
  Description of Artificial Sequence: Synthetic oligonucleotide
  Antisense strand to SEQ ID NO: 2005410
acauuucuggacuuggaag

SEQ ID NO: 2005412 - RNA, 19 nt, Artificial Sequence
  Description of Artificial Sequence: Synthetic oligonucleotide
  Sense strand starting at position 2921 of SEQ ID NO: 1880938
aguccagaaaugugucaca

SEQ ID NO: 2005413 - RNA, 19 nt, Artificial Sequence
  Description of Artificial Sequence: Synthetic oligonucleotide
  Antisense strand to SEQ ID NO: 2005412
ugugacacauuucuggacu

SEQ ID NO: 2005414 - RNA, 19 nt, Artificial Sequence
  Description of Artificial Sequence: Synthetic oligonucleotide
  Sense strand starting at position 2937 of SEQ ID NO: 1880938
acaccaaaguguuuaguuu

SEQ ID NO: 2005415 - RNA, 19 nt, Artificial Sequence
  Description of Artificial Sequence: Synthetic oligonucleotide
  Antisense strand to SEQ ID NO: 2005414
aaacuaaacacuuuggugu

SEQ ID NO: 2005416 - RNA, 19 nt, Artificial Sequence
  Description of Artificial Sequence: Synthetic oligonucleotide
  Sense strand starting at position 3000 of SEQ ID NO: 1880938
ucucuugugguagaaauua

SEQ ID NO: 2005417 - RNA, 19 nt, Artificial Sequence
  Description of Artificial Sequence: Synthetic oligonucleotide
  Antisense strand to SEQ ID NO: 2005416
uaauuucuaccacaagaga

SEQ ID NO: 2005418 - RNA, 19 nt, Artificial Sequence
  Description of Artificial Sequence: Synthetic oligonucleotide
  Sense strand starting at position 3049 of SEQ ID NO: 1880938
ggguuuagaccucauguca

SEQ ID NO: 2005419 - RNA, 19 nt, Artificial Sequence
  Description of Artificial Sequence: Synthetic oligonucleotide
  Antisense strand to SEQ ID NO: 2005418
ugacaugaggucuaaaccc

SEQ ID NO: 2005420 - RNA, 19 nt, Artificial Sequence
  Description of Artificial Sequence: Synthetic oligonucleotide
  Sense strand starting at position 3089 of SEQ ID NO: 1880938
gccuaaagaugccugggau

SEQ ID NO: 2005421 - RNA, 19 nt, Artificial Sequence
  Description of Artificial Sequence: Synthetic oligonucleotide
  Antisense strand to SEQ ID NO: 2005420
aucccaggcaucuuuaggc

SEQ ID NO: 2005422 - RNA, 19 nt, Artificial Sequence
  Description of Artificial Sequence: Synthetic oligonucleotide
  Sense strand starting at position 3090 of SEQ ID NO: 1880938
ccuaaagaugccugggauu

SEQ ID NO: 2005423 - RNA, 19 nt, Artificial Sequence
  Description of Artificial Sequence: Synthetic oligonucleotide
  Antisense strand to SEQ ID NO: 2005422
aaucccaggcaucuuuagg

SEQ ID NO: 2005424 - RNA, 19 nt, Artificial Sequence
  Description of Artificial Sequence: Synthetic oligonucleotide
  Sense strand starting at position 3092 of SEQ ID NO: 1880938
uaaagaugccugggauuau

SEQ ID NO: 2005425 - RNA, 19 nt, Artificial Sequence
  Description of Artificial Sequence: Synthetic oligonucleotide
  Antisense strand to SEQ ID NO: 2005424
auaaucccaggcaucuuua

SEQ ID NO: 2005426 - RNA, 19 nt, Artificial Sequence
  Description of Artificial Sequence: Synthetic oligonucleotide
  Sense strand starting at position 3616 of SEQ ID NO: 1880938
cuaaaugacugccucagaa

SEQ ID NO: 2005427 - RNA, 19 nt, Artificial Sequence
  Description of Artificial Sequence: Synthetic oligonucleotide
  Antisense strand to SEQ ID NO: 2005426
uucugaggcagucauuuag

SEQ ID NO: 2005428 - RNA, 19 nt, Artificial Sequence
  Description of Artificial Sequence: Synthetic oligonucleotide
  Sense strand starting at position 3778 of SEQ ID NO: 1880938
cucacagaguucucaugaa

SEQ ID NO: 2005429 - RNA, 19 nt, Artificial Sequence
  Description of Artificial Sequence: Synthetic oligonucleotide
  Antisense strand to SEQ ID NO: 2005428
uucaugagaacucugugag

SEQ ID NO: 2005430 - RNA, 19 nt, Artificial Sequence
  Description of Artificial Sequence: Synthetic oligonucleotide
  Sense strand starting at position 3785 of SEQ ID NO: 1880938
aguucucaugaagaucagu

SEQ ID NO: 2005431 - RNA, 19 nt, Artificial Sequence
  Description of Artificial Sequence: Synthetic oligonucleotide
  Antisense strand to SEQ ID NO: 2005430
acugaucuucaugagaacu

SEQ ID NO: 2005432 - RNA, 19 nt, Artificial Sequence
  Description of Artificial Sequence: Synthetic oligonucleotide
  Sense strand starting at position 941 of SEQ ID NO: 1880937
gucuguuggacagggaaga

SEQ ID NO: 2005433 - RNA, 19 nt, Artificial Sequence
  Description of Artificial Sequence: Synthetic oligonucleotide
  Antisense strand to SEQ ID NO: 2005432
ucuucccuguccaacagac

SEQ ID NO: 2005434 - RNA, 19 nt, Artificial Sequence
  Description of Artificial Sequence: Synthetic oligonucleotide
  Sense strand starting at position 1022 of SEQ ID NO: 1880937
guggcuuccucauuauaga

SEQ ID NO: 2005435 - RNA, 19 nt, Artificial Sequence
  Description of Artificial Sequence: Synthetic oligonucleotide
  Antisense strand to SEQ ID NO: 2005434
ucuauaaugaggaagccac

SEQ ID NO: 2005436 - RNA, 19 nt, Artificial Sequence
  Description of Artificial Sequence: Synthetic oligonucleotide
  Sense strand starting at position 1023 of SEQ ID NO: 1880937
uggcuuccucauuauagag

SEQ ID NO: 2005437 - RNA, 19 nt, Artificial Sequence
  Description of Artificial Sequence: Synthetic oligonucleotide
  Antisense strand to SEQ ID NO: 2005436
cucuauaaugaggaagcca

SEQ ID NO: 2005438 - RNA, 19 nt, Artificial Sequence
  Description of Artificial Sequence: Synthetic oligonucleotide
  Sense strand starting at position 1089 of SEQ ID NO: 1880937
augugcuucuaucuugaga

SEQ ID NO: 2005439 - RNA, 19 nt, Artificial Sequence
  Description of Artificial Sequence: Synthetic oligonucleotide
  Antisense strand to SEQ ID NO: 2005438
ucucaagauagaagcacau

SEQ ID NO: 2005440 - RNA, 19 nt, Artificial Sequence
  Description of Artificial Sequence: Synthetic oligonucleotide
  Sense strand starting at position 1092 of SEQ ID NO: 1880937
ugcuucuaucuugagaacu

SEQ ID NO: 2005441 - RNA, 19 nt, Artificial Sequence
  Description of Artificial Sequence: Synthetic oligonucleotide
  Antisense strand to SEQ ID NO: 2005440
aguucucaagauagaagca

SEQ ID NO: 2005442 - RNA, 19 nt, Artificial Sequence
  Description of Artificial Sequence: Synthetic oligonucleotide
  Sense strand starting at position 1193 of SEQ ID NO: 1880937
agaaauauguacuucuguu

SEQ ID NO: 2005443 - RNA, 19 nt, Artificial Sequence
  Description of Artificial Sequence: Synthetic oligonucleotide
  Antisense strand to SEQ ID NO: 2005442
aacagaaguacauauuucu

SEQ ID NO: 2005444 - RNA, 19 nt, Artificial Sequence
  Description of Artificial Sequence: Synthetic oligonucleotide
  Sense strand starting at position 1200 of SEQ ID NO: 1880937
uguacuucuguuuaauaag

SEQ ID NO: 2005445 - RNA, 19 nt, Artificial Sequence
  Description of Artificial Sequence: Synthetic oligonucleotide
  Antisense strand to SEQ ID NO: 2005444
cuuauuaaacagaaguaca

SEQ ID NO: 2005446 - RNA, 19 nt, Artificial Sequence
  Description of Artificial Sequence: Synthetic oligonucleotide
  Sense strand starting at position 1225 of SEQ ID NO: 1880937
cugcuaauuguguaagcau

SEQ ID NO: 2005447 - RNA, 19 nt, Artificial Sequence
  Description of Artificial Sequence: Synthetic oligonucleotide
  Antisense strand to SEQ ID NO: 2005446
augcuuacacaauuagcag

SEQ ID NO: 2005448 - RNA, 19 nt, Artificial Sequence
  Description of Artificial Sequence: Synthetic oligonucleotide
  Sense strand starting at position 1228 of SEQ ID NO: 1880937
cuaauuguguaagcauagu

SEQ ID NO: 2005449 - RNA, 19 nt, Artificial Sequence
  Description of Artificial Sequence: Synthetic oligonucleotide
  Antisense strand to SEQ ID NO: 2005448
acuaugcuuacacaauuag

SEQ ID NO: 2005450 - RNA, 19 nt, Artificial Sequence
  Description of Artificial Sequence: Synthetic oligonucleotide
  Sense strand starting at position 1376 of SEQ ID NO: 1880937
gguuaauugcuuuagcccu

SEQ ID NO: 2005451 - RNA, 19 nt, Artificial Sequence
  Description of Artificial Sequence: Synthetic oligonucleotide
  Antisense strand to SEQ ID NO: 2005450
agggcuaaagcaauuaacc

SEQ ID NO: 2005452 - RNA, 19 nt, Artificial Sequence
  Description of Artificial Sequence: Synthetic oligonucleotide
  Sense strand starting at position 1383 of SEQ ID NO: 1880937
ugcuuuagcccugacuauu

SEQ ID NO: 2005453 - RNA, 19 nt, Artificial Sequence
  Description of Artificial Sequence: Synthetic oligonucleotide
  Antisense strand to SEQ ID NO: 2005452
aauagucagggcuaaagca

SEQ ID NO: 2005454 - RNA, 19 nt, Artificial Sequence
  Description of Artificial Sequence: Synthetic oligonucleotide
  Sense strand starting at position 1432 of SEQ ID NO: 1880937
gucuaaucugcuuaccugu

SEQ ID NO: 2005455 - RNA, 19 nt, Artificial Sequence
  Description of Artificial Sequence: Synthetic oligonucleotide
  Antisense strand to SEQ ID NO: 2005454
acagguaagcagauuagac

SEQ ID NO: 2005456 - RNA, 19 nt, Artificial Sequence
  Description of Artificial Sequence: Synthetic oligonucleotide
  Sense strand starting at position 1439 of SEQ ID NO: 1880937
cugcuuaccuguuccuaua

SEQ ID NO: 2005457 - RNA, 19 nt, Artificial Sequence
  Description of Artificial Sequence: Synthetic oligonucleotide
  Antisense strand to SEQ ID NO: 2005456
uauaggaacagguaagcag

SEQ ID NO: 2005458 - RNA, 19 nt, Artificial Sequence
  Description of Artificial Sequence: Synthetic oligonucleotide
  Sense strand starting at position 1581 of SEQ ID NO: 1880937
agauuugacugccaaauga

SEQ ID NO: 2005459 - RNA, 19 nt, Artificial Sequence
  Description of Artificial Sequence: Synthetic oligonucleotide
  Antisense strand to SEQ ID NO: 2005458
ucauuuggcagucaaaucu

SEQ ID NO: 2005460 - RNA, 19 nt, Artificial Sequence
  Description of Artificial Sequence: Synthetic oligonucleotide
  Sense strand starting at position 1653 of SEQ ID NO: 1880937
uggauaucaucuuuguuuc

SEQ ID NO: 2005461 - RNA, 19 nt, Artificial Sequence
  Description of Artificial Sequence: Synthetic oligonucleotide
  Antisense strand to SEQ ID NO: 2005460
gaaacaaagaugauaucca

SEQ ID NO: 2005462 - RNA, 19 nt, Artificial Sequence
  Description of Artificial Sequence: Synthetic oligonucleotide
  Sense strand starting at position 1654 of SEQ ID NO: 1880937
ggauaucaucuuuguuucu

SEQ ID NO: 2005463 - RNA, 19 nt, Artificial Sequence
  Description of Artificial Sequence: Synthetic oligonucleotide
  Antisense strand to SEQ ID NO: 2005462
agaaacaaagaugauaucc

SEQ ID NO: 2005464 - RNA, 19 nt, Artificial Sequence
  Description of Artificial Sequence: Synthetic oligonucleotide
  Sense strand starting at position 1690 of SEQ ID NO: 1880937
ggaagugaauaucucauua

SEQ ID NO: 2005465 - RNA, 19 nt, Artificial Sequence
  Description of Artificial Sequence: Synthetic oligonucleotide
  Antisense strand to SEQ ID NO: 2005464
uaaugagauauucacuucc

SEQ ID NO: 2005466 - RNA, 19 nt, Artificial Sequence
  Description of Artificial Sequence: Synthetic oligonucleotide
  Sense strand starting at position 1990 of SEQ ID NO: 1880937
ccaucagaugcauggagaa

SEQ ID NO: 2005467 - RNA, 19 nt, Artificial Sequence
  Description of Artificial Sequence: Synthetic oligonucleotide
  Antisense strand to SEQ ID NO: 2005466
uucuccaugcaucugaugg

SEQ ID NO: 2005468 - RNA, 19 nt, Artificial Sequence
  Description of Artificial Sequence: Synthetic oligonucleotide
  Sense strand starting at position 2002 of SEQ ID NO: 1880937
uggagaacuccacguaguu

SEQ ID NO: 2005469 - RNA, 19 nt, Artificial Sequence
  Description of Artificial Sequence: Synthetic oligonucleotide
  Antisense strand to SEQ ID NO: 2005468
aacuacguggaguucucca

SEQ ID NO: 2005470 - RNA, 19 nt, Artificial Sequence
  Description of Artificial Sequence: Synthetic oligonucleotide
  Sense strand starting at position 2092 of SEQ ID NO: 1880937
cagccauuuggccaguagu

SEQ ID NO: 2005471 - RNA, 19 nt, Artificial Sequence
  Description of Artificial Sequence: Synthetic oligonucleotide
  Antisense strand to SEQ ID NO: 2005470
acuacuggccaaauggcug

SEQ ID NO: 2005472 - RNA, 19 nt, Artificial Sequence
  Description of Artificial Sequence: Synthetic oligonucleotide
  Sense strand starting at position 2239 of SEQ ID NO: 1880937
ugcccagagcaguaaacuu

SEQ ID NO: 2005473 - RNA, 19 nt, Artificial Sequence
  Description of Artificial Sequence: Synthetic oligonucleotide
  Antisense strand to SEQ ID NO: 2005472
aaguuuacugcucugggca

SEQ ID NO: 2005474 - RNA, 19 nt, Artificial Sequence
  Description of Artificial Sequence: Synthetic oligonucleotide
  Sense strand starting at position 2412 of SEQ ID NO: 1880937
acaggcuuucccuaagguu

SEQ ID NO: 2005475 - RNA, 19 nt, Artificial Sequence
  Description of Artificial Sequence: Synthetic oligonucleotide
  Antisense strand to SEQ ID NO: 2005474
aaccuuagggaaagccugu

SEQ ID NO: 2005476 - RNA, 19 nt, Artificial Sequence
  Description of Artificial Sequence: Synthetic oligonucleotide
  Sense strand starting at position 2468 of SEQ ID NO: 1880937
agguuaguuuaaguugaca

SEQ ID NO: 2005477 - RNA, 19 nt, Artificial Sequence
  Description of Artificial Sequence: Synthetic oligonucleotide
  Antisense strand to SEQ ID NO: 2005476
ugucaacuuaaacuaaccu

SEQ ID NO: 2005478 - RNA, 19 nt, Artificial Sequence
  Description of Artificial Sequence: Synthetic oligonucleotide
  Sense strand starting at position 2531 of SEQ ID NO: 1880937
ccaguucuuccggagaaca

SEQ ID NO: 2005479 - RNA, 19 nt, Artificial Sequence
  Description of Artificial Sequence: Synthetic oligonucleotide
  Antisense strand to SEQ ID NO: 2005478
uguucuccggaagaacugg

SEQ ID NO: 2005480 - RNA, 19 nt, Artificial Sequence
  Description of Artificial Sequence: Synthetic oligonucleotide
  Sense strand starting at position 2671 of SEQ ID NO: 1880937
ucuucuagauaauucgagu

SEQ ID NO: 2005481 - RNA, 19 nt, Artificial Sequence
  Description of Artificial Sequence: Synthetic oligonucleotide
  Antisense strand to SEQ ID NO: 2005480
acucgaauuaucuagaaga

SEQ ID NO: 2005482 - RNA, 19 nt, Artificial Sequence
  Description of Artificial Sequence: Synthetic oligonucleotide
  Sense strand starting at position 2677 of SEQ ID NO: 1880937
agauaauucgaguagcuua

SEQ ID NO: 2005483 - RNA, 19 nt, Artificial Sequence
  Description of Artificial Sequence: Synthetic oligonucleotide
  Antisense strand to SEQ ID NO: 2005482
uaagcuacucgaauuaucu

SEQ ID NO: 2005484 - RNA, 19 nt, Artificial Sequence
  Description of Artificial Sequence: Synthetic oligonucleotide
  Sense strand starting at position 2680 of SEQ ID NO: 1880937
uaauucgaguagcuuaaau

SEQ ID NO: 2005485 - RNA, 19 nt, Artificial Sequence
  Description of Artificial Sequence: Synthetic oligonucleotide
  Antisense strand to SEQ ID NO: 2005484
auuuaagcuacucgaauua

SEQ ID NO: 2005486 - RNA, 19 nt, Artificial Sequence
  Description of Artificial Sequence: Synthetic oligonucleotide
  Sense strand starting at position 2682 of SEQ ID NO: 1880937
auucgaguagcuuaaauaa

SEQ ID NO: 2005487 - RNA, 19 nt, Artificial Sequence
  Description of Artificial Sequence: Synthetic oligonucleotide
  Antisense strand to SEQ ID NO: 2005486
uuauuuaagcuacucgaau

SEQ ID NO: 2005488 - RNA, 19 nt, Artificial Sequence
  Description of Artificial Sequence: Synthetic oligonucleotide
  Sense strand starting at position 2697 of SEQ ID NO: 1880937
auaagucugucuucucuga

SEQ ID NO: 2005489 - RNA, 19 nt, Artificial Sequence
  Description of Artificial Sequence: Synthetic oligonucleotide
  Antisense strand to SEQ ID NO: 2005488
ucagagaagacagacuuau

SEQ ID NO: 2005490 - RNA, 19 nt, Artificial Sequence
  Description of Artificial Sequence: Synthetic oligonucleotide
  Sense strand starting at position 2716 of SEQ ID NO: 1880937
cuuccaaguccagaaaugu

SEQ ID NO: 2005491 - RNA, 19 nt, Artificial Sequence
  Description of Artificial Sequence: Synthetic oligonucleotide
  Antisense strand to SEQ ID NO: 2005490
acauuucuggacuuggaag

SEQ ID NO: 2005492 - RNA, 19 nt, Artificial Sequence
  Description of Artificial Sequence: Synthetic oligonucleotide
  Sense strand starting at position 2722 of SEQ ID NO: 1880937
aguccagaaaugugucaca

SEQ ID NO: 2005493 - RNA, 19 nt, Artificial Sequence
  Description of Artificial Sequence: Synthetic oligonucleotide
  Antisense strand to SEQ ID NO: 2005492
ugugacacauuucuggacu

SEQ ID NO: 2005494 - RNA, 19 nt, Artificial Sequence
  Description of Artificial Sequence: Synthetic oligonucleotide
  Sense strand starting at position 2738 of SEQ ID NO: 1880937
acaccaaaguguuuaguuu

SEQ ID NO: 2005495 - RNA, 19 nt, Artificial Sequence
  Description of Artificial Sequence: Synthetic oligonucleotide
  Antisense strand to SEQ ID NO: 2005494
aaacuaaacacuuuggugu

SEQ ID NO: 2005496 - RNA, 19 nt, Artificial Sequence
  Description of Artificial Sequence: Synthetic oligonucleotide
  Sense strand starting at position 2801 of SEQ ID NO: 1880937
ucucuugugguagaaauua

SEQ ID NO: 2005497 - RNA, 19 nt, Artificial Sequence
  Description of Artificial Sequence: Synthetic oligonucleotide
  Antisense strand to SEQ ID NO: 2005496
uaauuucuaccacaagaga

SEQ ID NO: 2005498 - RNA, 19 nt, Artificial Sequence
  Description of Artificial Sequence: Synthetic oligonucleotide
  Sense strand starting at position 2850 of SEQ ID NO: 1880937
ggguuuagaccucauguca

SEQ ID NO: 2005499 - RNA, 19 nt, Artificial Sequence
  Description of Artificial Sequence: Synthetic oligonucleotide
  Antisense strand to SEQ ID NO: 2005498
ugacaugaggucuaaaccc

SEQ ID NO: 2005500 - RNA, 19 nt, Artificial Sequence
  Description of Artificial Sequence: Synthetic oligonucleotide
  Sense strand starting at position 2890 of SEQ ID NO: 1880937
gccuaaagaugccugggau

SEQ ID NO: 2005501 - RNA, 19 nt, Artificial Sequence
  Description of Artificial Sequence: Synthetic oligonucleotide
  Antisense strand to SEQ ID NO: 2005500
aucccaggcaucuuuaggc

SEQ ID NO: 2005502 - RNA, 19 nt, Artificial Sequence
  Description of Artificial Sequence: Synthetic oligonucleotide
  Sense strand starting at position 2891 of SEQ ID NO: 1880937
ccuaaagaugccugggauu

SEQ ID NO: 2005503 - RNA, 19 nt, Artificial Sequence
  Description of Artificial Sequence: Synthetic oligonucleotide
  Antisense strand to SEQ ID NO: 2005502
aaucccaggcaucuuuagg

SEQ ID NO: 2005504 - RNA, 19 nt, Artificial Sequence
  Description of Artificial Sequence: Synthetic oligonucleotide
  Sense strand starting at position 2893 of SEQ ID NO: 1880937
uaaagaugccugggauuau

SEQ ID NO: 2005505 - RNA, 19 nt, Artificial Sequence
  Description of Artificial Sequence: Synthetic oligonucleotide
  Antisense strand to SEQ ID NO: 2005504
auaaucccaggcaucuuua

SEQ ID NO: 2005506 - RNA, 19 nt, Artificial Sequence
  Description of Artificial Sequence: Synthetic oligonucleotide
  Sense strand starting at position 3417 of SEQ ID NO: 1880937
cuaaaugacugccucagaa

SEQ ID NO: 2005507 - RNA, 19 nt, Artificial Sequence
  Description of Artificial Sequence: Synthetic oligonucleotide
  Antisense strand to SEQ ID NO: 2005506
uucugaggcagucauuuag

SEQ ID NO: 2005508 - RNA, 19 nt, Artificial Sequence
  Description of Artificial Sequence: Synthetic oligonucleotide
  Sense strand starting at position 3579 of SEQ ID NO: 1880937
cucacagaguucucaugaa

SEQ ID NO: 2005509 - RNA, 19 nt, Artificial Sequence
  Description of Artificial Sequence: Synthetic oligonucleotide
  Antisense strand to SEQ ID NO: 2005508
uucaugagaacucugugag

SEQ ID NO: 2005510 - RNA, 19 nt, Artificial Sequence
  Description of Artificial Sequence: Synthetic oligonucleotide
  Sense strand starting at position 3586 of SEQ ID NO: 1880937
aguucucaugaagaucagu

SEQ ID NO: 2005511 - RNA, 19 nt, Artificial Sequence
  Description of Artificial Sequence: Synthetic oligonucleotide
  Antisense strand to SEQ ID NO: 2005510
acugaucuucaugagaacu

SEQ ID NO: 2005512 - RNA, 19 nt, Artificial Sequence
  Description of Artificial Sequence: Synthetic oligonucleotide
  Sense strand starting at position 85 of SEQ ID NO: 1880939
gugaaaugguacuucuuga

SEQ ID NO: 2005513 - RNA, 19 nt, Artificial Sequence
  Description of Artificial Sequence: Synthetic oligonucleotide
  Antisense strand to SEQ ID NO: 2005512
ucaagaaguaccauuucac

SEQ ID NO: 2005514 - RNA, 19 nt, Artificial Sequence
  Description of Artificial Sequence: Synthetic oligonucleotide
  Sense strand starting at position 121 of SEQ ID NO: 1880939
gguuucugggaauguaaca

SEQ ID NO: 2005515 - RNA, 19 nt, Artificial Sequence
  Description of Artificial Sequence: Synthetic oligonucleotide
  Antisense strand to SEQ ID NO: 2005514
uguuacauucccagaaacc

SEQ ID NO: 2005516 - RNA, 19 nt, Artificial Sequence
  Description of Artificial Sequence: Synthetic oligonucleotide
  Sense strand starting at position 180 of SEQ ID NO: 1880939
gguagugaaucuuuagaug

SEQ ID NO: 2005517 - RNA, 19 nt, Artificial Sequence
  Description of Artificial Sequence: Synthetic oligonucleotide
  Antisense strand to SEQ ID NO: 2005516
caucuaaagauucacuacc

SEQ ID NO: 2005518 - RNA, 19 nt, Artificial Sequence
  Description of Artificial Sequence: Synthetic oligonucleotide
  Sense strand starting at position 207 of SEQ ID NO: 1880939
ugaguuguuggugaaauca

SEQ ID NO: 2005519 - RNA, 19 nt, Artificial Sequence
  Description of Artificial Sequence: Synthetic oligonucleotide
  Antisense strand to SEQ ID NO: 2005518
ugauuucaccaacaacuca

SEQ ID NO: 2005520 - RNA, 19 nt, Artificial Sequence
  Description of Artificial Sequence: Synthetic oligonucleotide
  Sense strand starting at position 319 of SEQ ID NO: 1880939
guaaguaaccagugacuaa

SEQ ID NO: 2005521 - RNA, 19 nt, Artificial Sequence
  Description of Artificial Sequence: Synthetic oligonucleotide
  Antisense strand to SEQ ID NO: 2005520
uuagucacugguuacuuac

SEQ ID NO: 2005522 - RNA, 19 nt, Artificial Sequence
  Description of Artificial Sequence: Synthetic oligonucleotide
  Sense strand starting at position 602 of SEQ ID NO: 1880939
augauaagauucuugaugu

SEQ ID NO: 2005523 - RNA, 19 nt, Artificial Sequence
  Description of Artificial Sequence: Synthetic oligonucleotide
  Antisense strand to SEQ ID NO: 2005522
acaucaagaaucuuaucau

SEQ ID NO: 2005524 - RNA, 19 nt, Artificial Sequence
  Description of Artificial Sequence: Synthetic oligonucleotide
  Sense strand starting at position 640 of SEQ ID NO: 1880939
ugcuuuaagccugaaagaa

SEQ ID NO: 2005525 - RNA, 19 nt, Artificial Sequence
  Description of Artificial Sequence: Synthetic oligonucleotide
  Antisense strand to SEQ ID NO: 2005524
uucuuucaggcuuaaagca

SEQ ID NO: 2005526 - RNA, 19 nt, Artificial Sequence
  Description of Artificial Sequence: Synthetic oligonucleotide
  Sense strand starting at position 672 of SEQ ID NO: 1880939
aacaauuguggguagucau

SEQ ID NO: 2005527 - RNA, 19 nt, Artificial Sequence
  Description of Artificial Sequence: Synthetic oligonucleotide
  Antisense strand to SEQ ID NO: 2005526
augacuacccacaauuguu

SEQ ID NO: 2005528 - RNA, 19 nt, Artificial Sequence
  Description of Artificial Sequence: Synthetic oligonucleotide
  Sense strand starting at position 679 of SEQ ID NO: 1880939
guggguagucaugacauga

SEQ ID NO: 2005529 - RNA, 19 nt, Artificial Sequence
  Description of Artificial Sequence: Synthetic oligonucleotide
  Antisense strand to SEQ ID NO: 2005528
ucaugucaugacuacccac

SEQ ID NO: 2005530 - RNA, 19 nt, Artificial Sequence
  Description of Artificial Sequence: Synthetic oligonucleotide
  Sense strand starting at position 732 of SEQ ID NO: 1880939
ccaguaucggauugaacca

SEQ ID NO: 2005531 - RNA, 19 nt, Artificial Sequence
  Description of Artificial Sequence: Synthetic oligonucleotide
  Antisense strand to SEQ ID NO: 2005530
ugguucaauccgauacugg

SEQ ID NO: 2005532 - RNA, 19 nt, Artificial Sequence
  Description of Artificial Sequence: Synthetic oligonucleotide
  Sense strand starting at position 1399 of SEQ ID NO: 1880939
augaauauaugucucuagu

SEQ ID NO: 2005533 - RNA, 19 nt, Artificial Sequence
  Description of Artificial Sequence: Synthetic oligonucleotide
  Antisense strand to SEQ ID NO: 2005532
acuagagacauauauucau

SEQ ID NO: 2005534 - RNA, 19 nt, Artificial Sequence
  Description of Artificial Sequence: Synthetic oligonucleotide
  Sense strand starting at position 1451 of SEQ ID NO: 1880939
ccugguauuugagcuguaa

SEQ ID NO: 2005535 - RNA, 19 nt, Artificial Sequence
  Description of Artificial Sequence: Synthetic oligonucleotide
  Antisense strand to SEQ ID NO: 2005534
uuacagcucaaauaccagg

SEQ ID NO: 2005536 - RNA, 19 nt, Artificial Sequence
  Description of Artificial Sequence: Synthetic oligonucleotide
  Sense strand starting at position 1501 of SEQ ID NO: 1880939
gcuggauuggguuaugauc

SEQ ID NO: 2005537 - RNA, 19 nt, Artificial Sequence
  Description of Artificial Sequence: Synthetic oligonucleotide
  Antisense strand to SEQ ID NO: 2005536
gaucauaacccaauccagc

SEQ ID NO: 2005538 - RNA, 19 nt, Artificial Sequence
  Description of Artificial Sequence: Synthetic oligonucleotide
  Sense strand starting at position 1634 of SEQ ID NO: 1880939
gauguccuugguuauauca

SEQ ID NO: 2005539 - RNA, 19 nt, Artificial Sequence
  Description of Artificial Sequence: Synthetic oligonucleotide
  Antisense strand to SEQ ID NO: 2005538
ugauauaaccaaggacauc

SEQ ID NO: 2005540 - RNA, 19 nt, Artificial Sequence
  Description of Artificial Sequence: Synthetic oligonucleotide
  Sense strand starting at position 1641 of SEQ ID NO: 1880939
uugguuauaucacuaccau

SEQ ID NO: 2005541 - RNA, 19 nt, Artificial Sequence
  Description of Artificial Sequence: Synthetic oligonucleotide
  Antisense strand to SEQ ID NO: 2005540
augguagugauauaaccaa

SEQ ID NO: 2005542 - RNA, 19 nt, Artificial Sequence
  Description of Artificial Sequence: Synthetic oligonucleotide
  Sense strand starting at position 1642 of SEQ ID NO: 1880939
ugguuauaucacuaccauu

SEQ ID NO: 2005543 - RNA, 19 nt, Artificial Sequence
  Description of Artificial Sequence: Synthetic oligonucleotide
  Antisense strand to SEQ ID NO: 2005542
aaugguagugauauaacca

SEQ ID NO: 2005544 - RNA, 19 nt, Artificial Sequence
  Description of Artificial Sequence: Synthetic oligonucleotide
  Sense strand starting at position 1662 of SEQ ID NO: 1880939
caaugugauugauugaaac

SEQ ID NO: 2005545 - RNA, 19 nt, Artificial Sequence
  Description of Artificial Sequence: Synthetic oligonucleotide
  Antisense strand to SEQ ID NO: 2005544
guuucaaucaaucacauug

SEQ ID NO: 2005546 - RNA, 19 nt, Artificial Sequence
  Description of Artificial Sequence: Synthetic oligonucleotide
  Sense strand starting at position 1710 of SEQ ID NO: 1880939
cugggaauaugucucucca

SEQ ID NO: 2005547 - RNA, 19 nt, Artificial Sequence
  Description of Artificial Sequence: Synthetic oligonucleotide
  Antisense strand to SEQ ID NO: 2005546
uggagagacauauucccag

SEQ ID NO: 2005548 - RNA, 19 nt, Artificial Sequence
  Description of Artificial Sequence: Synthetic oligonucleotide
  Sense strand starting at position 1712 of SEQ ID NO: 1880939
gggaauaugucucuccaaa

SEQ ID NO: 2005549 - RNA, 19 nt, Artificial Sequence
  Description of Artificial Sequence: Synthetic oligonucleotide
  Antisense strand to SEQ ID NO: 2005548
uuuggagagacauauuccc

SEQ ID NO: 2005550 - RNA, 19 nt, Artificial Sequence
  Description of Artificial Sequence: Synthetic oligonucleotide
  Sense strand starting at position 1790 of SEQ ID NO: 1880939
acaugugacuuaguuauga

SEQ ID NO: 2005551 - RNA, 19 nt, Artificial Sequence
  Description of Artificial Sequence: Synthetic oligonucleotide
  Antisense strand to SEQ ID NO: 2005550
ucauaacuaagucacaugu

SEQ ID NO: 2005552 - RNA, 19 nt, Artificial Sequence
  Description of Artificial Sequence: Synthetic oligonucleotide
  Sense strand starting at position 1792 of SEQ ID NO: 1880939
augugacuuaguuaugaug

SEQ ID NO: 2005553 - RNA, 19 nt, Artificial Sequence
  Description of Artificial Sequence: Synthetic oligonucleotide
  Antisense strand to SEQ ID NO: 2005552
caucauaacuaagucacau

SEQ ID NO: 2005554 - RNA, 19 nt, Artificial Sequence
  Description of Artificial Sequence: Synthetic oligonucleotide
  Sense strand starting at position 2105 of SEQ ID NO: 1880939
cgaugcuuucuggaaacuc

SEQ ID NO: 2005555 - RNA, 19 nt, Artificial Sequence
  Description of Artificial Sequence: Synthetic oligonucleotide
  Antisense strand to SEQ ID NO: 2005554
gaguuuccagaaagcaucg

SEQ ID NO: 2005556 - RNA, 19 nt, Artificial Sequence
  Description of Artificial Sequence: Synthetic oligonucleotide
  Sense strand starting at position 2141 of SEQ ID NO: 1880939
aaggaaggcuacuuagacu

SEQ ID NO: 2005557 - RNA, 19 nt, Artificial Sequence
  Description of Artificial Sequence: Synthetic oligonucleotide
  Antisense strand to SEQ ID NO: 2005556
agucuaaguagccuuccuu

SEQ ID NO: 2005558 - RNA, 19 nt, Artificial Sequence
  Description of Artificial Sequence: Synthetic oligonucleotide
  Sense strand starting at position 2215 of SEQ ID NO: 1880939
uccuguuaucaguaaugaa

SEQ ID NO: 2005559 - RNA, 19 nt, Artificial Sequence
  Description of Artificial Sequence: Synthetic oligonucleotide
  Antisense strand to SEQ ID NO: 2005558
uucauuacugauaacagga

SEQ ID NO: 2005560 - RNA, 19 nt, Artificial Sequence
  Description of Artificial Sequence: Synthetic oligonucleotide
  Sense strand starting at position 2606 of SEQ ID NO: 1880939
gcugauuuaugggacaaga

SEQ ID NO: 2005561 - RNA, 19 nt, Artificial Sequence
  Description of Artificial Sequence: Synthetic oligonucleotide
  Antisense strand to SEQ ID NO: 2005560
ucuugucccauaaaucagc

SEQ ID NO: 2005562 - RNA, 19 nt, Artificial Sequence
  Description of Artificial Sequence: Synthetic oligonucleotide
  Sense strand starting at position 2647 of SEQ ID NO: 1880939
uuccaaagcuuauuagaga

SEQ ID NO: 2005563 - RNA, 19 nt, Artificial Sequence
  Description of Artificial Sequence: Synthetic oligonucleotide
  Antisense strand to SEQ ID NO: 2005562
ucucuaauaagcuuuggaa

SEQ ID NO: 2005564 - RNA, 19 nt, Artificial Sequence
  Description of Artificial Sequence: Synthetic oligonucleotide
  Sense strand starting at position 2963 of SEQ ID NO: 1880939
uaaaguagaugguccuaaa

SEQ ID NO: 2005565 - RNA, 19 nt, Artificial Sequence
  Description of Artificial Sequence: Synthetic oligonucleotide
  Antisense strand to SEQ ID NO: 2005564
uuuaggaccaucuacuuua

SEQ ID NO: 2005566 - RNA, 19 nt, Artificial Sequence
  Description of Artificial Sequence: Synthetic oligonucleotide
  Sense strand starting at position 3478 of SEQ ID NO: 1880939
guguuauaccuuuaugaug

SEQ ID NO: 2005567 - RNA, 19 nt, Artificial Sequence
  Description of Artificial Sequence: Synthetic oligonucleotide
  Antisense strand to SEQ ID NO: 2005566
caucauaaagguauaacac

SEQ ID NO: 2005568 - RNA, 19 nt, Artificial Sequence
  Description of Artificial Sequence: Synthetic oligonucleotide
  Sense strand starting at position 3525 of SEQ ID NO: 1880939
gguaaagccuaaccugaaa

SEQ ID NO: 2005569 - RNA, 19 nt, Artificial Sequence
  Description of Artificial Sequence: Synthetic oligonucleotide
  Antisense strand to SEQ ID NO: 2005568
uuucagguuaggcuuuacc

SEQ ID NO: 2005570 - RNA, 19 nt, Artificial Sequence
  Description of Artificial Sequence: Synthetic oligonucleotide
  Sense strand starting at position 3550 of SEQ ID NO: 1880939
gggugagacaugggcuuau

SEQ ID NO: 2005571 - RNA, 19 nt, Artificial Sequence
  Description of Artificial Sequence: Synthetic oligonucleotide
  Antisense strand to SEQ ID NO: 2005570
auaagcccaugucucaccc

SEQ ID NO: 2005572 - RNA, 19 nt, Artificial Sequence
  Description of Artificial Sequence: Synthetic oligonucleotide
  Sense strand starting at position 3672 of SEQ ID NO: 1880939
gccucaucucaucagguaa

SEQ ID NO: 2005573 - RNA, 19 nt, Artificial Sequence
  Description of Artificial Sequence: Synthetic oligonucleotide
  Antisense strand to SEQ ID NO: 2005572
uuaccugaugagaugaggc

SEQ ID NO: 2005574 - RNA, 19 nt, Artificial Sequence
  Description of Artificial Sequence: Synthetic oligonucleotide
  Sense strand starting at position 3736 of SEQ ID NO: 1880939
uggcucugcagacagaauu

SEQ ID NO: 2005575 - RNA, 19 nt, Artificial Sequence
  Description of Artificial Sequence: Synthetic oligonucleotide
  Antisense strand to SEQ ID NO: 2005574
aauucugucugcagagcca

SEQ ID NO: 2005576 - RNA, 19 nt, Artificial Sequence
  Description of Artificial Sequence: Synthetic oligonucleotide
  Sense strand starting at position 3771 of SEQ ID NO: 1880939
ugauaaaugcugcaacaga

SEQ ID NO: 2005577 - RNA, 19 nt, Artificial Sequence
  Description of Artificial Sequence: Synthetic oligonucleotide
  Antisense strand to SEQ ID NO: 2005576
ucuguugcagcauuuauca

SEQ ID NO: 2005578 - RNA, 19 nt, Artificial Sequence
  Description of Artificial Sequence: Synthetic oligonucleotide
  Sense strand starting at position 3831 of SEQ ID NO: 1880939
auuaguguuacucaagagu

SEQ ID NO: 2005579 - RNA, 19 nt, Artificial Sequence
  Description of Artificial Sequence: Synthetic oligonucleotide
  Antisense strand to SEQ ID NO: 2005578
acucuugaguaacacuaau

SEQ ID NO: 2005580 - RNA, 19 nt, Artificial Sequence
  Description of Artificial Sequence: Synthetic oligonucleotide
  Sense strand starting at position 3877 of SEQ ID NO: 1880939
uuugcugagccuuaaagga

SEQ ID NO: 2005581 - RNA, 19 nt, Artificial Sequence
  Description of Artificial Sequence: Synthetic oligonucleotide
  Antisense strand to SEQ ID NO: 2005580
uccuuuaaggcucagcaaa

SEQ ID NO: 2005582 - RNA, 19 nt, Artificial Sequence
  Description of Artificial Sequence: Synthetic oligonucleotide
  Sense strand starting at position 3891 of SEQ ID NO: 1880939
aaggauagguggguaucau

SEQ ID NO: 2005583 - RNA, 19 nt, Artificial Sequence
  Description of Artificial Sequence: Synthetic oligonucleotide
  Antisense strand to SEQ ID NO: 2005582
augauacccaccuauccuu

SEQ ID NO: 2005584 - RNA, 19 nt, Artificial Sequence
  Description of Artificial Sequence: Synthetic oligonucleotide
  Sense strand starting at position 3899 of SEQ ID NO: 1880939
guggguaucauguaaacag

SEQ ID NO: 2005585 - RNA, 19 nt, Artificial Sequence
  Description of Artificial Sequence: Synthetic oligonucleotide
  Antisense strand to SEQ ID NO: 2005584
cuguuuacaugauacccac

SEQ ID NO: 2005586 - RNA, 19 nt, Artificial Sequence
  Description of Artificial Sequence: Synthetic oligonucleotide
  Sense strand starting at position 3903 of SEQ ID NO: 1880939
guaucauguaaacaguuga

SEQ ID NO: 2005587 - RNA, 19 nt, Artificial Sequence
  Description of Artificial Sequence: Synthetic oligonucleotide
  Antisense strand to SEQ ID NO: 2005586
ucaacuguuuacaugauac

SEQ ID NO: 2005588 - RNA, 19 nt, Artificial Sequence
  Description of Artificial Sequence: Synthetic oligonucleotide
  Sense strand starting at position 3916 of SEQ ID NO: 1880939
aguugaaagcuugacuuga

SEQ ID NO: 2005589 - RNA, 19 nt, Artificial Sequence
  Description of Artificial Sequence: Synthetic oligonucleotide
  Antisense strand to SEQ ID NO: 2005588
ucaagucaagcuuucaacu

SEQ ID NO: 2005590 - RNA, 19 nt, Artificial Sequence
  Description of Artificial Sequence: Synthetic oligonucleotide
  Sense strand starting at position 3918 of SEQ ID NO: 1880939
uugaaagcuugacuugaug

SEQ ID NO: 2005591 - RNA, 19 nt, Artificial Sequence
  Description of Artificial Sequence: Synthetic oligonucleotide
  Antisense strand to SEQ ID NO: 2005590
caucaagucaagcuuucaa

SEQ ID NO: 2005592 - RNA, 19 nt, Artificial Sequence
  Description of Artificial Sequence: Synthetic oligonucleotide
  Sense strand starting at position 330 of SEQ ID NO: 1880940
ugguauucuggcuacacaa

SEQ ID NO: 2005593 - RNA, 19 nt, Artificial Sequence
  Description of Artificial Sequence: Synthetic oligonucleotide
  Antisense strand to SEQ ID NO: 2005592
uuguguagccagaauacca

SEQ ID NO: 2005594 - RNA, 19 nt, Artificial Sequence
  Description of Artificial Sequence: Synthetic oligonucleotide
  Sense strand starting at position 385 of SEQ ID NO: 1880940
gaaugaacggucugugggu

SEQ ID NO: 2005595 - RNA, 19 nt, Artificial Sequence
  Description of Artificial Sequence: Synthetic oligonucleotide
  Antisense strand to SEQ ID NO: 2005594
acccacagaccguucauuc

SEQ ID NO: 2005596 - RNA, 19 nt, Artificial Sequence
  Description of Artificial Sequence: Synthetic oligonucleotide
  Sense strand starting at position 391 of SEQ ID NO: 1880940
acggucuguggguacuuaa

SEQ ID NO: 2005597 - RNA, 19 nt, Artificial Sequence
  Description of Artificial Sequence: Synthetic oligonucleotide
  Antisense strand to SEQ ID NO: 2005596
uuaaguacccacagaccgu

SEQ ID NO: 2005598 - RNA, 19 nt, Artificial Sequence
  Description of Artificial Sequence: Synthetic oligonucleotide
  Sense strand starting at position 408 of SEQ ID NO: 1880940
aaggcauuggccuagcuaa

SEQ ID NO: 2005599 - RNA, 19 nt, Artificial Sequence
  Description of Artificial Sequence: Synthetic oligonucleotide
  Antisense strand to SEQ ID NO: 2005598
uuagcuaggccaaugccuu

SEQ ID NO: 2005600 - RNA, 19 nt, Artificial Sequence
  Description of Artificial Sequence: Synthetic oligonucleotide
  Sense strand starting at position 444 of SEQ ID NO: 1880940
uccugauuauacuugauag

SEQ ID NO: 2005601 - RNA, 19 nt, Artificial Sequence
  Description of Artificial Sequence: Synthetic oligonucleotide
  Antisense strand to SEQ ID NO: 2005600
cuaucaaguauaaucagga

SEQ ID NO: 2005602 - RNA, 19 nt, Artificial Sequence
  Description of Artificial Sequence: Synthetic oligonucleotide
  Sense strand starting at position 672 of SEQ ID NO: 1880940
uucccauauugguuuccua

SEQ ID NO: 2005603 - RNA, 19 nt, Artificial Sequence
  Description of Artificial Sequence: Synthetic oligonucleotide
  Antisense strand to SEQ ID NO: 2005602
uaggaaaccaauaugggaa

SEQ ID NO: 2005604 - RNA, 19 nt, Artificial Sequence
  Description of Artificial Sequence: Synthetic oligonucleotide
  Sense strand starting at position 685 of SEQ ID NO: 1880940
uuccuacuccgccaggauu

SEQ ID NO: 2005605 - RNA, 19 nt, Artificial Sequence
  Description of Artificial Sequence: Synthetic oligonucleotide
  Antisense strand to SEQ ID NO: 2005604
aauccuggcggaguaggaa

SEQ ID NO: 2005606 - RNA, 19 nt, Artificial Sequence
  Description of Artificial Sequence: Synthetic oligonucleotide
  Sense strand starting at position 718 of SEQ ID NO: 1880940
cccgguuugaguuacagaa

SEQ ID NO: 2005607 - RNA, 19 nt, Artificial Sequence
  Description of Artificial Sequence: Synthetic oligonucleotide
  Antisense strand to SEQ ID NO: 2005606
uucuguaacucaaaccggg

SEQ ID NO: 2005608 - RNA, 19 nt, Artificial Sequence
  Description of Artificial Sequence: Synthetic oligonucleotide
  Sense strand starting at position 982 of SEQ ID NO: 1880940
gagaaagucugaguuuagu

SEQ ID NO: 2005609 - RNA, 19 nt, Artificial Sequence
  Description of Artificial Sequence: Synthetic oligonucleotide
  Antisense strand to SEQ ID NO: 2005608
acuaaacucagacuuucuc

SEQ ID NO: 2005610 - RNA, 19 nt, Artificial Sequence
  Description of Artificial Sequence: Synthetic oligonucleotide
  Sense strand starting at position 1245 of SEQ ID NO: 1880940
gugagcucauuugaauaaa

SEQ ID NO: 2005611 - RNA, 19 nt, Artificial Sequence
  Description of Artificial Sequence: Synthetic oligonucleotide
  Antisense strand to SEQ ID NO: 2005610
uuuauucaaaugagcucac

SEQ ID NO: 2005612 - RNA, 19 nt, Artificial Sequence
  Description of Artificial Sequence: Synthetic oligonucleotide
  Sense strand starting at position 1337 of SEQ ID NO: 1880940
gggaaacucucaucuaguc

SEQ ID NO: 2005613 - RNA, 19 nt, Artificial Sequence
  Description of Artificial Sequence: Synthetic oligonucleotide
  Antisense strand to SEQ ID NO: 2005612
gacuagaugagaguuuccc

SEQ ID NO: 2005614 - RNA, 19 nt, Artificial Sequence
  Description of Artificial Sequence: Synthetic oligonucleotide
  Sense strand starting at position 1514 of SEQ ID NO: 1880940
ggaugugaaugucucucuu

SEQ ID NO: 2005615 - RNA, 19 nt, Artificial Sequence
  Description of Artificial Sequence: Synthetic oligonucleotide
  Antisense strand to SEQ ID NO: 2005614
aagagagacauucacaucc

SEQ ID NO: 2005616 - RNA, 19 nt, Artificial Sequence
  Description of Artificial Sequence: Synthetic oligonucleotide
  Sense strand starting at position 1656 of SEQ ID NO: 1880940
cagaauugaugcuuaguga

SEQ ID NO: 2005617 - RNA, 19 nt, Artificial Sequence
  Description of Artificial Sequence: Synthetic oligonucleotide
  Antisense strand to SEQ ID NO: 2005616
ucacuaagcaucaauucug

SEQ ID NO: 2005618 - RNA, 19 nt, Artificial Sequence
  Description of Artificial Sequence: Synthetic oligonucleotide
  Sense strand starting at position 1659 of SEQ ID NO: 1880940
aauugaugcuuagugagaa

SEQ ID NO: 2005619 - RNA, 19 nt, Artificial Sequence
  Description of Artificial Sequence: Synthetic oligonucleotide
  Antisense strand to SEQ ID NO: 2005618
uucucacuaagcaucaauu

SEQ ID NO: 2005620 - RNA, 19 nt, Artificial Sequence
  Description of Artificial Sequence: Synthetic oligonucleotide
  Sense strand starting at position 1669 of SEQ ID NO: 1880940
uagugagaaccuggugaaa

SEQ ID NO: 2005621 - RNA, 19 nt, Artificial Sequence
  Description of Artificial Sequence: Synthetic oligonucleotide
  Antisense strand to SEQ ID NO: 2005620
uuucaccagguucucacua

SEQ ID NO: 2005622 - RNA, 19 nt, Artificial Sequence
  Description of Artificial Sequence: Synthetic oligonucleotide
  Sense strand starting at position 1821 of SEQ ID NO: 1880940
gguggaugaauugguaguu

SEQ ID NO: 2005623 - RNA, 19 nt, Artificial Sequence
  Description of Artificial Sequence: Synthetic oligonucleotide
  Antisense strand to SEQ ID NO: 2005622
aacuaccaauucauccacc

SEQ ID NO: 2005624 - RNA, 19 nt, Artificial Sequence
  Description of Artificial Sequence: Synthetic oligonucleotide
  Sense strand starting at position 1822 of SEQ ID NO: 1880940
guggaugaauugguaguua

SEQ ID NO: 2005625 - RNA, 19 nt, Artificial Sequence
  Description of Artificial Sequence: Synthetic oligonucleotide
  Antisense strand to SEQ ID NO: 2005624
uaacuaccaauucauccac

SEQ ID NO: 2005626 - RNA, 19 nt, Artificial Sequence
  Description of Artificial Sequence: Synthetic oligonucleotide
  Sense strand starting at position 1826 of SEQ ID NO: 1880940
augaauugguaguuagaga

SEQ ID NO: 2005627 - RNA, 19 nt, Artificial Sequence
  Description of Artificial Sequence: Synthetic oligonucleotide
  Antisense strand to SEQ ID NO: 2005626
ucucuaacuaccaauucau

SEQ ID NO: 2005628 - RNA, 19 nt, Artificial Sequence
  Description of Artificial Sequence: Synthetic oligonucleotide
  Sense strand starting at position 1976 of SEQ ID NO: 1880940
ccuuuagagagcuagcaga

SEQ ID NO: 2005629 - RNA, 19 nt, Artificial Sequence
  Description of Artificial Sequence: Synthetic oligonucleotide
  Antisense strand to SEQ ID NO: 2005628
ucugcuagcucucuaaagg

SEQ ID NO: 2005630 - RNA, 19 nt, Artificial Sequence
  Description of Artificial Sequence: Synthetic oligonucleotide
  Sense strand starting at position 1989 of SEQ ID NO: 1880940
agcagaaaguucucuauga

SEQ ID NO: 2005631 - RNA, 19 nt, Artificial Sequence
  Description of Artificial Sequence: Synthetic oligonucleotide
  Antisense strand to SEQ ID NO: 2005630
ucauagagaacuuucugcu

SEQ ID NO: 2005632 - RNA, 19 nt, Artificial Sequence
  Description of Artificial Sequence: Synthetic oligonucleotide
  Sense strand starting at position 1990 of SEQ ID NO: 1880940
gcagaaaguucucuaugag

SEQ ID NO: 2005633 - RNA, 19 nt, Artificial Sequence
  Description of Artificial Sequence: Synthetic oligonucleotide
  Antisense strand to SEQ ID NO: 2005632
cucauagagaacuuucugc

SEQ ID NO: 2005634 - RNA, 19 nt, Artificial Sequence
  Description of Artificial Sequence: Synthetic oligonucleotide
  Sense strand starting at position 2269 of SEQ ID NO: 1880940
gggugagucaacuaauucu

SEQ ID NO: 2005635 - RNA, 19 nt, Artificial Sequence
  Description of Artificial Sequence: Synthetic oligonucleotide
  Antisense strand to SEQ ID NO: 2005634
agaauuaguugacucaccc

SEQ ID NO: 2005636 - RNA, 19 nt, Artificial Sequence
  Description of Artificial Sequence: Synthetic oligonucleotide
  Sense strand starting at position 2365 of SEQ ID NO: 1880940
agguucugaaucugucaga

SEQ ID NO: 2005637 - RNA, 19 nt, Artificial Sequence
  Description of Artificial Sequence: Synthetic oligonucleotide
  Antisense strand to SEQ ID NO: 2005636
ucugacagauucagaaccu

SEQ ID NO: 2005638 - RNA, 19 nt, Artificial Sequence
  Description of Artificial Sequence: Synthetic oligonucleotide
  Sense strand starting at position 2366 of SEQ ID NO: 1880940
gguucugaaucugucagau

SEQ ID NO: 2005639 - RNA, 19 nt, Artificial Sequence
  Description of Artificial Sequence: Synthetic oligonucleotide
  Antisense strand to SEQ ID NO: 2005638
aucugacagauucagaacc

SEQ ID NO: 2005640 - RNA, 19 nt, Artificial Sequence
  Description of Artificial Sequence: Synthetic oligonucleotide
  Sense strand starting at position 2408 of SEQ ID NO: 1880940
ggugcuuuccugcaaggag

SEQ ID NO: 2005641 - RNA, 19 nt, Artificial Sequence
  Description of Artificial Sequence: Synthetic oligonucleotide
  Antisense strand to SEQ ID NO: 2005640
cuccuugcaggaaagcacc

SEQ ID NO: 2005642 - RNA, 19 nt, Artificial Sequence
  Description of Artificial Sequence: Synthetic oligonucleotide
  Sense strand starting at position 2522 of SEQ ID NO: 1880940
gagagaauauuggaaagac

SEQ ID NO: 2005643 - RNA, 19 nt, Artificial Sequence
  Description of Artificial Sequence: Synthetic oligonucleotide
  Antisense strand to SEQ ID NO: 2005642
gucuuuccaauauucucuc

SEQ ID NO: 2005644 - RNA, 19 nt, Artificial Sequence
  Description of Artificial Sequence: Synthetic oligonucleotide
  Sense strand starting at position 2808 of SEQ ID NO: 1880940
caaggucggguguaauaga

SEQ ID NO: 2005645 - RNA, 19 nt, Artificial Sequence
  Description of Artificial Sequence: Synthetic oligonucleotide
  Antisense strand to SEQ ID NO: 2005644
ucuauuacacccgaccuug

SEQ ID NO: 2005646 - RNA, 19 nt, Artificial Sequence
  Description of Artificial Sequence: Synthetic oligonucleotide
  Sense strand starting at position 2813 of SEQ ID NO: 1880940
ucggguguaauagaugcua

SEQ ID NO: 2005647 - RNA, 19 nt, Artificial Sequence
  Description of Artificial Sequence: Synthetic oligonucleotide
  Antisense strand to SEQ ID NO: 2005646
uagcaucuauuacacccga

SEQ ID NO: 2005648 - RNA, 19 nt, Artificial Sequence
  Description of Artificial Sequence: Synthetic oligonucleotide
  Sense strand starting at position 2862 of SEQ ID NO: 1880940
agggaagagccuggaucuu

SEQ ID NO: 2005649 - RNA, 19 nt, Artificial Sequence
  Description of Artificial Sequence: Synthetic oligonucleotide
  Antisense strand to SEQ ID NO: 2005648
aagauccaggcucuucccu

SEQ ID NO: 2005650 - RNA, 19 nt, Artificial Sequence
  Description of Artificial Sequence: Synthetic oligonucleotide
  Sense strand starting at position 2957 of SEQ ID NO: 1880940
gaaugugguggugagcuaa

SEQ ID NO: 2005651 - RNA, 19 nt, Artificial Sequence
  Description of Artificial Sequence: Synthetic oligonucleotide
  Antisense strand to SEQ ID NO: 2005650
uuagcucaccaccacauuc

SEQ ID NO: 2005652 - RNA, 19 nt, Artificial Sequence
  Description of Artificial Sequence: Synthetic oligonucleotide
  Sense strand starting at position 3388 of SEQ ID NO: 1880940
uuuggacuuucuccugaga

SEQ ID NO: 2005653 - RNA, 19 nt, Artificial Sequence
  Description of Artificial Sequence: Synthetic oligonucleotide
  Antisense strand to SEQ ID NO: 2005652
ucucaggagaaaguccaaa

SEQ ID NO: 2005654 - RNA, 19 nt, Artificial Sequence
  Description of Artificial Sequence: Synthetic oligonucleotide
  Sense strand starting at position 3600 of SEQ ID NO: 1880940
ccaagcucuggcgaaugau

SEQ ID NO: 2005655 - RNA, 19 nt, Artificial Sequence
  Description of Artificial Sequence: Synthetic oligonucleotide
  Antisense strand to SEQ ID NO: 2005654
aucauucgccagagcuugg

SEQ ID NO: 2005656 - RNA, 19 nt, Artificial Sequence
  Description of Artificial Sequence: Synthetic oligonucleotide
  Sense strand starting at position 3603 of SEQ ID NO: 1880940
agcucuggcgaaugauuaa

SEQ ID NO: 2005657 - RNA, 19 nt, Artificial Sequence
  Description of Artificial Sequence: Synthetic oligonucleotide
  Antisense strand to SEQ ID NO: 2005656
uuaaucauucgccagagcu

SEQ ID NO: 2005658 - RNA, 19 nt, Artificial Sequence
  Description of Artificial Sequence: Synthetic oligonucleotide
  Sense strand starting at position 3614 of SEQ ID NO: 1880940
augauuaacgugcagggaa

SEQ ID NO: 2005659 - RNA, 19 nt, Artificial Sequence
  Description of Artificial Sequence: Synthetic oligonucleotide
  Antisense strand to SEQ ID NO: 2005658
uucccugcacguuaaucau

SEQ ID NO: 2005660 - RNA, 19 nt, Artificial Sequence
  Description of Artificial Sequence: Synthetic oligonucleotide
  Sense strand starting at position 3629 of SEQ ID NO: 1880940
ggaagagaugccuguggag

SEQ ID NO: 2005661 - RNA, 19 nt, Artificial Sequence
  Description of Artificial Sequence: Synthetic oligonucleotide
  Antisense strand to SEQ ID NO: 2005660
cuccacaggcaucucuucc

SEQ ID NO: 2005662 - RNA, 19 nt, Artificial Sequence
  Description of Artificial Sequence: Synthetic oligonucleotide
  Sense strand starting at position 3631 of SEQ ID NO: 1880940
aagagaugccuguggaguc

SEQ ID NO: 2005663 - RNA, 19 nt, Artificial Sequence
  Description of Artificial Sequence: Synthetic oligonucleotide
  Antisense strand to SEQ ID NO: 2005662
gacuccacaggcaucucuu

SEQ ID NO: 2005664 - RNA, 19 nt, Artificial Sequence
  Description of Artificial Sequence: Synthetic oligonucleotide
  Sense strand starting at position 3641 of SEQ ID NO: 1880940
uguggaguccucuaggaca

SEQ ID NO: 2005665 - RNA, 19 nt, Artificial Sequence
  Description of Artificial Sequence: Synthetic oligonucleotide
  Antisense strand to SEQ ID NO: 2005664
uguccuagaggacuccaca

SEQ ID NO: 2005666 - RNA, 19 nt, Artificial Sequence
  Description of Artificial Sequence: Synthetic oligonucleotide
  Sense strand starting at position 3934 of SEQ ID NO: 1880940
uagggacugugguuauaca

SEQ ID NO: 2005667 - RNA, 19 nt, Artificial Sequence
  Description of Artificial Sequence: Synthetic oligonucleotide
  Antisense strand to SEQ ID NO: 2005666
uguauaaccacagucccua

SEQ ID NO: 2005668 - RNA, 19 nt, Artificial Sequence
  Description of Artificial Sequence: Synthetic oligonucleotide
  Sense strand starting at position 3973 of SEQ ID NO: 1880940
guaguucugcucuauaaag

SEQ ID NO: 2005669 - RNA, 19 nt, Artificial Sequence
  Description of Artificial Sequence: Synthetic oligonucleotide
  Antisense strand to SEQ ID NO: 2005668
cuuuauagagcagaacuac

SEQ ID NO: 2005670 - RNA, 19 nt, Artificial Sequence
  Description of Artificial Sequence: Synthetic oligonucleotide
  Sense strand starting at position 3975 of SEQ ID NO: 1880940
aguucugcucuauaaaguc

SEQ ID NO: 2005671 - RNA, 19 nt, Artificial Sequence
  Description of Artificial Sequence: Synthetic oligonucleotide
  Antisense strand to SEQ ID NO: 2005670
gacuuuauagagcagaacu

SEQ ID NO: 2005672 - RNA, 19 nt, Artificial Sequence
  Description of Artificial Sequence: Synthetic oligonucleotide
  Sense strand starting at position 29 of SEQ ID NO: 1880941
gggacagugaugcauuacu

SEQ ID NO: 2005673 - RNA, 19 nt, Artificial Sequence
  Description of Artificial Sequence: Synthetic oligonucleotide
  Antisense strand to SEQ ID NO: 2005672
aguaaugcaucacuguccc

SEQ ID NO: 2005674 - RNA, 19 nt, Artificial Sequence
  Description of Artificial Sequence: Synthetic oligonucleotide
  Sense strand starting at position 47 of SEQ ID NO: 1880941
ugggcaaguacuggacuaa

SEQ ID NO: 2005675 - RNA, 19 nt, Artificial Sequence
  Description of Artificial Sequence: Synthetic oligonucleotide
  Antisense strand to SEQ ID NO: 2005674
uuaguccaguacuugccca

SEQ ID NO: 2005676 - RNA, 19 nt, Artificial Sequence
  Description of Artificial Sequence: Synthetic oligonucleotide
  Sense strand starting at position 73 of SEQ ID NO: 1880941
gugguuggugaugacuuaa

SEQ ID NO: 2005677 - RNA, 19 nt, Artificial Sequence
  Description of Artificial Sequence: Synthetic oligonucleotide
  Antisense strand to SEQ ID NO: 2005676
uuaagucaucaccaaccac

SEQ ID NO: 2005678 - RNA, 19 nt, Artificial Sequence
  Description of Artificial Sequence: Synthetic oligonucleotide
  Sense strand starting at position 270 of SEQ ID NO: 1880941
cucuuugagcgcgcaagaa

SEQ ID NO: 2005679 - RNA, 19 nt, Artificial Sequence
  Description of Artificial Sequence: Synthetic oligonucleotide
  Antisense strand to SEQ ID NO: 2005678
uucuugcgcgcucaaagag

SEQ ID NO: 2005680 - RNA, 19 nt, Artificial Sequence
  Description of Artificial Sequence: Synthetic oligonucleotide
  Sense strand starting at position 499 of SEQ ID NO: 1880941
caauuauucucuuugggug

SEQ ID NO: 2005681 - RNA, 19 nt, Artificial Sequence
  Description of Artificial Sequence: Synthetic oligonucleotide
  Antisense strand to SEQ ID NO: 2005680
cacccaaagagaauaauug

SEQ ID NO: 2005682 - RNA, 19 nt, Artificial Sequence
  Description of Artificial Sequence: Synthetic oligonucleotide
  Sense strand starting at position 626 of SEQ ID NO: 1880941
ggaacaagucauggcgacu

SEQ ID NO: 2005683 - RNA, 19 nt, Artificial Sequence
  Description of Artificial Sequence: Synthetic oligonucleotide
  Antisense strand to SEQ ID NO: 2005682
agucgccaugacuuguucc

SEQ ID NO: 2005684 - RNA, 19 nt, Artificial Sequence
  Description of Artificial Sequence: Synthetic oligonucleotide
  Sense strand starting at position 663 of SEQ ID NO: 1880941
augacugcuuuacucagaa

SEQ ID NO: 2005685 - RNA, 19 nt, Artificial Sequence
  Description of Artificial Sequence: Synthetic oligonucleotide
  Antisense strand to SEQ ID NO: 2005684
uucugaguaaagcagucau

SEQ ID NO: 2005686 - RNA, 19 nt, Artificial Sequence
  Description of Artificial Sequence: Synthetic oligonucleotide
  Sense strand starting at position 723 of SEQ ID NO: 1880941
ugaccaguauacguggaau

SEQ ID NO: 2005687 - RNA, 19 nt, Artificial Sequence
  Description of Artificial Sequence: Synthetic oligonucleotide
  Antisense strand to SEQ ID NO: 2005686
auuccacguauacugguca

SEQ ID NO: 2005688 - RNA, 19 nt, Artificial Sequence
  Description of Artificial Sequence: Synthetic oligonucleotide
  Sense strand starting at position 834 of SEQ ID NO: 1880941
aauacugugcucgauugga

SEQ ID NO: 2005689 - RNA, 19 nt, Artificial Sequence
  Description of Artificial Sequence: Synthetic oligonucleotide
  Antisense strand to SEQ ID NO: 2005688
uccaaucgagcacaguauu

SEQ ID NO: 2005690 - RNA, 19 nt, Artificial Sequence
  Description of Artificial Sequence: Synthetic oligonucleotide
  Sense strand starting at position 923 of SEQ ID NO: 1880941
gagggagacugguuucuac

SEQ ID NO: 2005691 - RNA, 19 nt, Artificial Sequence
  Description of Artificial Sequence: Synthetic oligonucleotide
  Antisense strand to SEQ ID NO: 2005690
guagaaaccagucucccuc

SEQ ID NO: 2005692 - RNA, 19 nt, Artificial Sequence
  Description of Artificial Sequence: Synthetic oligonucleotide
  Sense strand starting at position 1021 of SEQ ID NO: 1880941
gagcuugauucuguggaau

SEQ ID NO: 2005693 - RNA, 19 nt, Artificial Sequence
  Description of Artificial Sequence: Synthetic oligonucleotide
  Antisense strand to SEQ ID NO: 2005692
auuccacagaaucaagcuc

SEQ ID NO: 2005694 - RNA, 19 nt, Artificial Sequence
  Description of Artificial Sequence: Synthetic oligonucleotide
  Sense strand starting at position 1166 of SEQ ID NO: 1880941
ccucuuacagauggaucau

SEQ ID NO: 2005695 - RNA, 19 nt, Artificial Sequence
  Description of Artificial Sequence: Synthetic oligonucleotide
  Antisense strand to SEQ ID NO: 2005694
augauccaucuguaagagg

SEQ ID NO: 2005696 - RNA, 19 nt, Artificial Sequence
  Description of Artificial Sequence: Synthetic oligonucleotide
  Sense strand starting at position 1251 of SEQ ID NO: 1880941
ccaguaaccuuagugacau

SEQ ID NO: 2005697 - RNA, 19 nt, Artificial Sequence
  Description of Artificial Sequence: Synthetic oligonucleotide
  Antisense strand to SEQ ID NO: 2005696
augucacuaagguuacugg

SEQ ID NO: 2005698 - RNA, 19 nt, Artificial Sequence
  Description of Artificial Sequence: Synthetic oligonucleotide
  Sense strand starting at position 1369 of SEQ ID NO: 1880941
augcauauuagcucgugua

SEQ ID NO: 2005699 - RNA, 19 nt, Artificial Sequence
  Description of Artificial Sequence: Synthetic oligonucleotide
  Antisense strand to SEQ ID NO: 2005698
uacacgagcuaauaugcau

SEQ ID NO: 2005700 - RNA, 19 nt, Artificial Sequence
  Description of Artificial Sequence: Synthetic oligonucleotide
  Sense strand starting at position 1381 of SEQ ID NO: 1880941
ucguguaaaccucaacacu

SEQ ID NO: 2005701 - RNA, 19 nt, Artificial Sequence
  Description of Artificial Sequence: Synthetic oligonucleotide
  Antisense strand to SEQ ID NO: 2005700
aguguugagguuuacacga

SEQ ID NO: 2005702 - RNA, 19 nt, Artificial Sequence
  Description of Artificial Sequence: Synthetic oligonucleotide
  Sense strand starting at position 1603 of SEQ ID NO: 1880941
gauguaccugcuggaacau

SEQ ID NO: 2005703 - RNA, 19 nt, Artificial Sequence
  Description of Artificial Sequence: Synthetic oligonucleotide
  Antisense strand to SEQ ID NO: 2005702
auguuccagcagguacauc

SEQ ID NO: 2005704 - RNA, 19 nt, Artificial Sequence
  Description of Artificial Sequence: Synthetic oligonucleotide
  Sense strand starting at position 2025 of SEQ ID NO: 1880941
cuggaauugucugucauua

SEQ ID NO: 2005705 - RNA, 19 nt, Artificial Sequence
  Description of Artificial Sequence: Synthetic oligonucleotide
  Antisense strand to SEQ ID NO: 2005704
uaaugacagacaauuccag

SEQ ID NO: 2005706 - RNA, 19 nt, Artificial Sequence
  Description of Artificial Sequence: Synthetic oligonucleotide
  Sense strand starting at position 2030 of SEQ ID NO: 1880941
auugucugucauuaucaac

SEQ ID NO: 2005707 - RNA, 19 nt, Artificial Sequence
  Description of Artificial Sequence: Synthetic oligonucleotide
  Antisense strand to SEQ ID NO: 2005706
guugauaaugacagacaau

SEQ ID NO: 2005708 - RNA, 19 nt, Artificial Sequence
  Description of Artificial Sequence: Synthetic oligonucleotide
  Sense strand starting at position 2283 of SEQ ID NO: 1880941
gucaguggaguggaugauu

SEQ ID NO: 2005709 - RNA, 19 nt, Artificial Sequence
  Description of Artificial Sequence: Synthetic oligonucleotide
  Antisense strand to SEQ ID NO: 2005708
aaucauccacuccacugac

SEQ ID NO: 2005710 - RNA, 19 nt, Artificial Sequence
  Description of Artificial Sequence: Synthetic oligonucleotide
  Sense strand starting at position 2318 of SEQ ID NO: 1880941
ggcauuaaaguuuauugaa

SEQ ID NO: 2005711 - RNA, 19 nt, Artificial Sequence
  Description of Artificial Sequence: Synthetic oligonucleotide
  Antisense strand to SEQ ID NO: 2005710
uucaauaaacuuuaaugcc

SEQ ID NO: 2005712 - RNA, 19 nt, Artificial Sequence
  Description of Artificial Sequence: Synthetic oligonucleotide
  Sense strand starting at position 2355 of SEQ ID NO: 1880941
uuuaaacaucagugucuaa

SEQ ID NO: 2005713 - RNA, 19 nt, Artificial Sequence
  Description of Artificial Sequence: Synthetic oligonucleotide
  Antisense strand to SEQ ID NO: 2005712
uuagacacugauguuuaaa

SEQ ID NO: 2005714 - RNA, 19 nt, Artificial Sequence
  Description of Artificial Sequence: Synthetic oligonucleotide
  Sense strand starting at position 2525 of SEQ ID NO: 1880941
ggaccagcucugcaguaua

SEQ ID NO: 2005715 - RNA, 19 nt, Artificial Sequence
  Description of Artificial Sequence: Synthetic oligonucleotide
  Antisense strand to SEQ ID NO: 2005714
uauacugcagagcuggucc

SEQ ID NO: 2005716 - RNA, 19 nt, Artificial Sequence
  Description of Artificial Sequence: Synthetic oligonucleotide
  Sense strand starting at position 2537 of SEQ ID NO: 1880941
caguauagacuuggugaua

SEQ ID NO: 2005717 - RNA, 19 nt, Artificial Sequence
  Description of Artificial Sequence: Synthetic oligonucleotide
  Antisense strand to SEQ ID NO: 2005716
uaucaccaagucuauacug

SEQ ID NO: 2005718 - RNA, 19 nt, Artificial Sequence
  Description of Artificial Sequence: Synthetic oligonucleotide
  Sense strand starting at position 2538 of SEQ ID NO: 1880941
aguauagacuuggugauaa

SEQ ID NO: 2005719 - RNA, 19 nt, Artificial Sequence
  Description of Artificial Sequence: Synthetic oligonucleotide
  Antisense strand to SEQ ID NO: 2005718
uuaucaccaagucuauacu

SEQ ID NO: 2005720 - RNA, 19 nt, Artificial Sequence
  Description of Artificial Sequence: Synthetic oligonucleotide
  Sense strand starting at position 2671 of SEQ ID NO: 1880941
guuggucauaguuaugauu

SEQ ID NO: 2005721 - RNA, 19 nt, Artificial Sequence
  Description of Artificial Sequence: Synthetic oligonucleotide
  Antisense strand to SEQ ID NO: 2005720
aaucauaacuaugaccaac

SEQ ID NO: 2005722 - RNA, 19 nt, Artificial Sequence
  Description of Artificial Sequence: Synthetic oligonucleotide
  Sense strand starting at position 2700 of SEQ ID NO: 1880941
ugaguucuugcucaggaca

SEQ ID NO: 2005723 - RNA, 19 nt, Artificial Sequence
  Description of Artificial Sequence: Synthetic oligonucleotide
  Antisense strand to SEQ ID NO: 2005722
uguccugagcaagaacuca

SEQ ID NO: 2005724 - RNA, 19 nt, Artificial Sequence
  Description of Artificial Sequence: Synthetic oligonucleotide
  Sense strand starting at position 2703 of SEQ ID NO: 1880941
guucuugcucaggacagua

SEQ ID NO: 2005725 - RNA, 19 nt, Artificial Sequence
  Description of Artificial Sequence: Synthetic oligonucleotide
  Antisense strand to SEQ ID NO: 2005724
uacuguccugagcaagaac

SEQ ID NO: 2005726 - RNA, 19 nt, Artificial Sequence
  Description of Artificial Sequence: Synthetic oligonucleotide
  Sense strand starting at position 3110 of SEQ ID NO: 1880941
gucugcuucguguuauucu

SEQ ID NO: 2005727 - RNA, 19 nt, Artificial Sequence
  Description of Artificial Sequence: Synthetic oligonucleotide
  Antisense strand to SEQ ID NO: 2005726
agaauaacacgaagcagac

SEQ ID NO: 2005728 - RNA, 19 nt, Artificial Sequence
  Description of Artificial Sequence: Synthetic oligonucleotide
  Sense strand starting at position 3119 of SEQ ID NO: 1880941
guguuauucuuaucaggaa

SEQ ID NO: 2005729 - RNA, 19 nt, Artificial Sequence
  Description of Artificial Sequence: Synthetic oligonucleotide
  Antisense strand to SEQ ID NO: 2005728
uuccugauaagaauaacac

SEQ ID NO: 2005730 - RNA, 19 nt, Artificial Sequence
  Description of Artificial Sequence: Synthetic oligonucleotide
  Sense strand starting at position 3303 of SEQ ID NO: 1880941
ugacgaaucuaccuccaua

SEQ ID NO: 2005731 - RNA, 19 nt, Artificial Sequence
  Description of Artificial Sequence: Synthetic oligonucleotide
  Antisense strand to SEQ ID NO: 2005730
uauggagguagauucguca

SEQ ID NO: 2005732 - RNA, 19 nt, Artificial Sequence
  Description of Artificial Sequence: Synthetic oligonucleotide
  Sense strand starting at position 3376 of SEQ ID NO: 1880941
agggauuucugagaaacuu

SEQ ID NO: 2005733 - RNA, 19 nt, Artificial Sequence
  Description of Artificial Sequence: Synthetic oligonucleotide
  Antisense strand to SEQ ID NO: 2005732
aaguuucucagaaaucccu

SEQ ID NO: 2005734 - RNA, 19 nt, Artificial Sequence
  Description of Artificial Sequence: Synthetic oligonucleotide
  Sense strand starting at position 3391 of SEQ ID NO: 1880941
acuuuaaaguagcuuagaa

SEQ ID NO: 2005735 - RNA, 19 nt, Artificial Sequence
  Description of Artificial Sequence: Synthetic oligonucleotide
  Antisense strand to SEQ ID NO: 2005734
uucuaagcuacuuuaaagu

SEQ ID NO: 2005736 - RNA, 19 nt, Artificial Sequence
  Description of Artificial Sequence: Synthetic oligonucleotide
  Sense strand starting at position 3427 of SEQ ID NO: 1880941
cucuuucuauagguugaga

SEQ ID NO: 2005737 - RNA, 19 nt, Artificial Sequence
  Description of Artificial Sequence: Synthetic oligonucleotide
  Antisense strand to SEQ ID NO: 2005736
ucucaaccuauagaaagag

SEQ ID NO: 2005738 - RNA, 19 nt, Artificial Sequence
  Description of Artificial Sequence: Synthetic oligonucleotide
  Sense strand starting at position 3429 of SEQ ID NO: 1880941
cuuucuauagguugagauu

SEQ ID NO: 2005739 - RNA, 19 nt, Artificial Sequence
  Description of Artificial Sequence: Synthetic oligonucleotide
  Antisense strand to SEQ ID NO: 2005738
aaucucaaccuauagaaag

SEQ ID NO: 2005740 - RNA, 19 nt, Artificial Sequence
  Description of Artificial Sequence: Synthetic oligonucleotide
  Sense strand starting at position 3481 of SEQ ID NO: 1880941
cucuuagaagcuuagugua

SEQ ID NO: 2005741 - RNA, 19 nt, Artificial Sequence
  Description of Artificial Sequence: Synthetic oligonucleotide
  Antisense strand to SEQ ID NO: 2005740
uacacuaagcuucuaagag

SEQ ID NO: 2005742 - RNA, 19 nt, Artificial Sequence
  Description of Artificial Sequence: Synthetic oligonucleotide
  Sense strand starting at position 3483 of SEQ ID NO: 1880941
cuuagaagcuuaguguaaa

SEQ ID NO: 2005743 - RNA, 19 nt, Artificial Sequence
  Description of Artificial Sequence: Synthetic oligonucleotide
  Antisense strand to SEQ ID NO: 2005742
uuuacacuaagcuucuaag

SEQ ID NO: 2005744 - RNA, 19 nt, Artificial Sequence
  Description of Artificial Sequence: Synthetic oligonucleotide
  Sense strand starting at position 3522 of SEQ ID NO: 1880941
ugggauuaccuaggguuga

SEQ ID NO: 2005745 - RNA, 19 nt, Artificial Sequence
  Description of Artificial Sequence: Synthetic oligonucleotide
  Antisense strand to SEQ ID NO: 2005744
ucaacccuagguaauccca

SEQ ID NO: 2005746 - RNA, 19 nt, Artificial Sequence
  Description of Artificial Sequence: Synthetic oligonucleotide
  Sense strand starting at position 3533 of SEQ ID NO: 1880941
aggguugaacugugaagca

SEQ ID NO: 2005747 - RNA, 19 nt, Artificial Sequence
  Description of Artificial Sequence: Synthetic oligonucleotide
  Antisense strand to SEQ ID NO: 2005746
ugcuucacaguucaacccu

SEQ ID NO: 2005748 - RNA, 19 nt, Artificial Sequence
  Description of Artificial Sequence: Synthetic oligonucleotide
  Sense strand starting at position 3538 of SEQ ID NO: 1880941
ugaacugugaagcaguaau

SEQ ID NO: 2005749 - RNA, 19 nt, Artificial Sequence
  Description of Artificial Sequence: Synthetic oligonucleotide
  Antisense strand to SEQ ID NO: 2005748
auuacugcuucacaguuca

SEQ ID NO: 2005750 - RNA, 19 nt, Artificial Sequence
  Description of Artificial Sequence: Synthetic oligonucleotide
  Sense strand starting at position 3767 of SEQ ID NO: 1880941
uugugaaacacacgaugua

SEQ ID NO: 2005751 - RNA, 19 nt, Artificial Sequence
  Description of Artificial Sequence: Synthetic oligonucleotide
  Antisense strand to SEQ ID NO: 2005750
uacaucguguguuucacaa

SEQ ID NO: 2005752 - RNA, 19 nt, Artificial Sequence
  Description of Artificial Sequence: Synthetic oligonucleotide
  Sense strand starting at position 53 of SEQ ID NO: 1880943
ccuagagguucugcaaguu

SEQ ID NO: 2005753 - RNA, 19 nt, Artificial Sequence
  Description of Artificial Sequence: Synthetic oligonucleotide
  Antisense strand to SEQ ID NO: 2005752
aacuugcagaaccucuagg

SEQ ID NO: 2005754 - RNA, 19 nt, Artificial Sequence
  Description of Artificial Sequence: Synthetic oligonucleotide
  Sense strand starting at position 133 of SEQ ID NO: 1880943
ucaagaaauacgugucgac

SEQ ID NO: 2005755 - RNA, 19 nt, Artificial Sequence
  Description of Artificial Sequence: Synthetic oligonucleotide
  Antisense strand to SEQ ID NO: 2005754
gucgacacguauuucuuga

SEQ ID NO: 2005756 - RNA, 19 nt, Artificial Sequence
  Description of Artificial Sequence: Synthetic oligonucleotide
  Sense strand starting at position 150 of SEQ ID NO: 1880943
accgcaugauugcuaagau

SEQ ID NO: 2005757 - RNA, 19 nt, Artificial Sequence
  Description of Artificial Sequence: Synthetic oligonucleotide
  Antisense strand to SEQ ID NO: 2005756
aucuuagcaaucaugcggu

SEQ ID NO: 2005758 - RNA, 19 nt, Artificial Sequence
  Description of Artificial Sequence: Synthetic oligonucleotide
  Sense strand starting at position 159 of SEQ ID NO: 1880943
uugcuaagauuucccugua

SEQ ID NO: 2005759 - RNA, 19 nt, Artificial Sequence
  Description of Artificial Sequence: Synthetic oligonucleotide
  Antisense strand to SEQ ID NO: 2005758
uacagggaaaucuuagcaa

SEQ ID NO: 2005760 - RNA, 19 nt, Artificial Sequence
  Description of Artificial Sequence: Synthetic oligonucleotide
  Sense strand starting at position 304 of SEQ ID NO: 1880943
gucucagucccugggucaa

SEQ ID NO: 2005761 - RNA, 19 nt, Artificial Sequence
  Description of Artificial Sequence: Synthetic oligonucleotide
  Antisense strand to SEQ ID NO: 2005760
uugacccagggacugagac

SEQ ID NO: 2005762 - RNA, 19 nt, Artificial Sequence
  Description of Artificial Sequence: Synthetic oligonucleotide
  Sense strand starting at position 768 of SEQ ID NO: 1880943
gggcaauuccuggacgcga

SEQ ID NO: 2005763 - RNA, 19 nt, Artificial Sequence
  Description of Artificial Sequence: Synthetic oligonucleotide
  Antisense strand to SEQ ID NO: 2005762
ucgcguccaggaauugccc

SEQ ID NO: 2005764 - RNA, 19 nt, Artificial Sequence
  Description of Artificial Sequence: Synthetic oligonucleotide
  Sense strand starting at position 1230 of SEQ ID NO: 1880943
acacgugagacucauguga

SEQ ID NO: 2005765 - RNA, 19 nt, Artificial Sequence
  Description of Artificial Sequence: Synthetic oligonucleotide
  Antisense strand to SEQ ID NO: 2005764
ucacaugagucucacgugu

SEQ ID NO: 2005766 - RNA, 19 nt, Artificial Sequence
  Description of Artificial Sequence: Synthetic oligonucleotide
  Sense strand starting at position 1234 of SEQ ID NO: 1880943
gugagacucaugugaugaa

SEQ ID NO: 2005767 - RNA, 19 nt, Artificial Sequence
  Description of Artificial Sequence: Synthetic oligonucleotide
  Antisense strand to SEQ ID NO: 2005766
uucaucacaugagucucac

SEQ ID NO: 2005768 - RNA, 19 nt, Artificial Sequence
  Description of Artificial Sequence: Synthetic oligonucleotide
  Sense strand starting at position 2114 of SEQ ID NO: 1880943
gcgcgcugaguuuccaaga

SEQ ID NO: 2005769 - RNA, 19 nt, Artificial Sequence
  Description of Artificial Sequence: Synthetic oligonucleotide
  Antisense strand to SEQ ID NO: 2005768
ucuuggaaacucagcgcgc

SEQ ID NO: 2005770 - RNA, 19 nt, Artificial Sequence
  Description of Artificial Sequence: Synthetic oligonucleotide
  Sense strand starting at position 2183 of SEQ ID NO: 1880943
ugccucuucugagugacuu

SEQ ID NO: 2005771 - RNA, 19 nt, Artificial Sequence
  Description of Artificial Sequence: Synthetic oligonucleotide
  Antisense strand to SEQ ID NO: 2005770
aagucacucagaagaggca

SEQ ID NO: 2005772 - RNA, 19 nt, Artificial Sequence
  Description of Artificial Sequence: Synthetic oligonucleotide
  Sense strand starting at position 2187 of SEQ ID NO: 1880943
ucuucugagugacuuggaa

SEQ ID NO: 2005773 - RNA, 19 nt, Artificial Sequence
  Description of Artificial Sequence: Synthetic oligonucleotide
  Antisense strand to SEQ ID NO: 2005772
uuccaagucacucagaaga

SEQ ID NO: 2005774 - RNA, 19 nt, Artificial Sequence
  Description of Artificial Sequence: Synthetic oligonucleotide
  Sense strand starting at position 2611 of SEQ ID NO: 1880943
ggcugacucaugcaaauga

SEQ ID NO: 2005775 - RNA, 19 nt, Artificial Sequence
  Description of Artificial Sequence: Synthetic oligonucleotide
  Antisense strand to SEQ ID NO: 2005774
ucauuugcaugagucagcc

SEQ ID NO: 2005776 - RNA, 19 nt, Artificial Sequence
  Description of Artificial Sequence: Synthetic oligonucleotide
  Sense strand starting at position 2831 of SEQ ID NO: 1880943
uugcuuuggugugugauuu

SEQ ID NO: 2005777 - RNA, 19 nt, Artificial Sequence
  Description of Artificial Sequence: Synthetic oligonucleotide
  Antisense strand to SEQ ID NO: 2005776
aaaucacacaccaaagcaa

SEQ ID NO: 2005778 - RNA, 19 nt, Artificial Sequence
  Description of Artificial Sequence: Synthetic oligonucleotide
  Sense strand starting at position 2857 of SEQ ID NO: 1880943
cuguccuuucuugacagua

SEQ ID NO: 2005779 - RNA, 19 nt, Artificial Sequence
  Description of Artificial Sequence: Synthetic oligonucleotide
  Antisense strand to SEQ ID NO: 2005778
uacugucaagaaaggacag

SEQ ID NO: 2005780 - RNA, 19 nt, Artificial Sequence
  Description of Artificial Sequence: Synthetic oligonucleotide
  Sense strand starting at position 2924 of SEQ ID NO: 1880943
aauaguauuucgggaggaa

SEQ ID NO: 2005781 - RNA, 19 nt, Artificial Sequence
  Description of Artificial Sequence: Synthetic oligonucleotide
  Antisense strand to SEQ ID NO: 2005780
uuccucccgaaauacuauu

SEQ ID NO: 2005782 - RNA, 19 nt, Artificial Sequence
  Description of Artificial Sequence: Synthetic oligonucleotide
  Sense strand starting at position 2951 of SEQ ID NO: 1880943
ccuggaugagcuggaaguu

SEQ ID NO: 2005783 - RNA, 19 nt, Artificial Sequence
  Description of Artificial Sequence: Synthetic oligonucleotide
  Antisense strand to SEQ ID NO: 2005782
aacuuccagcucauccagg

SEQ ID NO: 2005784 - RNA, 19 nt, Artificial Sequence
  Description of Artificial Sequence: Synthetic oligonucleotide
  Sense strand starting at position 2964 of SEQ ID NO: 1880943
gaaguucugaaagggugua

SEQ ID NO: 2005785 - RNA, 19 nt, Artificial Sequence
  Description of Artificial Sequence: Synthetic oligonucleotide
  Antisense strand to SEQ ID NO: 2005784
uacacccuuucagaacuuc

SEQ ID NO: 2005786 - RNA, 19 nt, Artificial Sequence
  Description of Artificial Sequence: Synthetic oligonucleotide
  Sense strand starting at position 2965 of SEQ ID NO: 1880943
aaguucugaaaggguguaa

SEQ ID NO: 2005787 - RNA, 19 nt, Artificial Sequence
  Description of Artificial Sequence: Synthetic oligonucleotide
  Antisense strand to SEQ ID NO: 2005786
uuacacccuuucagaacuu

SEQ ID NO: 2005788 - RNA, 19 nt, Artificial Sequence
  Description of Artificial Sequence: Synthetic oligonucleotide
  Sense strand starting at position 3008 of SEQ ID NO: 1880943
ggcugccagacguaauaga

SEQ ID NO: 2005789 - RNA, 19 nt, Artificial Sequence
  Description of Artificial Sequence: Synthetic oligonucleotide
  Antisense strand to SEQ ID NO: 2005788
ucuauuacgucuggcagcc

SEQ ID NO: 2005790 - RNA, 19 nt, Artificial Sequence
  Description of Artificial Sequence: Synthetic oligonucleotide
  Sense strand starting at position 3024 of SEQ ID NO: 1880943
agaggucccucucugaguu

SEQ ID NO: 2005791 - RNA, 19 nt, Artificial Sequence
  Description of Artificial Sequence: Synthetic oligonucleotide
  Antisense strand to SEQ ID NO: 2005790
aacucagagagggaccucu

SEQ ID NO: 2005792 - RNA, 19 nt, Artificial Sequence
  Description of Artificial Sequence: Synthetic oligonucleotide
  Sense strand starting at position 3028 of SEQ ID NO: 1880943
gucccucucugaguugaca

SEQ ID NO: 2005793 - RNA, 19 nt, Artificial Sequence
  Description of Artificial Sequence: Synthetic oligonucleotide
  Antisense strand to SEQ ID NO: 2005792
ugucaacucagagagggac

SEQ ID NO: 2005794 - RNA, 19 nt, Artificial Sequence
  Description of Artificial Sequence: Synthetic oligonucleotide
  Sense strand starting at position 3079 of SEQ ID NO: 1880943
cugaguuaaggucggcaga

SEQ ID NO: 2005795 - RNA, 19 nt, Artificial Sequence
  Description of Artificial Sequence: Synthetic oligonucleotide
  Antisense strand to SEQ ID NO: 2005794
ucugccgaccuuaacucag

SEQ ID NO: 2005796 - RNA, 19 nt, Artificial Sequence
  Description of Artificial Sequence: Synthetic oligonucleotide
  Sense strand starting at position 3256 of SEQ ID NO: 1880943
cauauaugaguguaucugu

SEQ ID NO: 2005797 - RNA, 19 nt, Artificial Sequence
  Description of Artificial Sequence: Synthetic oligonucleotide
  Antisense strand to SEQ ID NO: 2005796
acagauacacucauauaug

SEQ ID NO: 2005798 - RNA, 19 nt, Artificial Sequence
  Description of Artificial Sequence: Synthetic oligonucleotide
  Sense strand starting at position 3259 of SEQ ID NO: 1880943
auaugaguguaucugucua

SEQ ID NO: 2005799 - RNA, 19 nt, Artificial Sequence
  Description of Artificial Sequence: Synthetic oligonucleotide
  Antisense strand to SEQ ID NO: 2005798
uagacagauacacucauau

SEQ ID NO: 2005800 - RNA, 19 nt, Artificial Sequence
  Description of Artificial Sequence: Synthetic oligonucleotide
  Sense strand starting at position 3264 of SEQ ID NO: 1880943
aguguaucugucuaucuuu

SEQ ID NO: 2005801 - RNA, 19 nt, Artificial Sequence
  Description of Artificial Sequence: Synthetic oligonucleotide
  Antisense strand to SEQ ID NO: 2005800
aaagauagacagauacacu

SEQ ID NO: 2005802 - RNA, 19 nt, Artificial Sequence
  Description of Artificial Sequence: Synthetic oligonucleotide
  Sense strand starting at position 3383 of SEQ ID NO: 1880943
gugggacuucucugaccuc

SEQ ID NO: 2005803 - RNA, 19 nt, Artificial Sequence
  Description of Artificial Sequence: Synthetic oligonucleotide
  Antisense strand to SEQ ID NO: 2005802
gaggucagagaagucccac

SEQ ID NO: 2005804 - RNA, 19 nt, Artificial Sequence
  Description of Artificial Sequence: Synthetic oligonucleotide
  Sense strand starting at position 3395 of SEQ ID NO: 1880943
ugaccucaccgcugacuaa

SEQ ID NO: 2005805 - RNA, 19 nt, Artificial Sequence
  Description of Artificial Sequence: Synthetic oligonucleotide
  Antisense strand to SEQ ID NO: 2005804
uuagucagcggugagguca

SEQ ID NO: 2005806 - RNA, 19 nt, Artificial Sequence
  Description of Artificial Sequence: Synthetic oligonucleotide
  Sense strand starting at position 3569 of SEQ ID NO: 1880943
uggcuaugcucucuuuaag

SEQ ID NO: 2005807 - RNA, 19 nt, Artificial Sequence
  Description of Artificial Sequence: Synthetic oligonucleotide
  Antisense strand to SEQ ID NO: 2005806
cuuaaagagagcauagcca

SEQ ID NO: 2005808 - RNA, 19 nt, Artificial Sequence
  Description of Artificial Sequence: Synthetic oligonucleotide
  Sense strand starting at position 3572 of SEQ ID NO: 1880943
cuaugcucucuuuaagagu

SEQ ID NO: 2005809 - RNA, 19 nt, Artificial Sequence
  Description of Artificial Sequence: Synthetic oligonucleotide
  Antisense strand to SEQ ID NO: 2005808
acucuuaaagagagcauag

SEQ ID NO: 2005810 - RNA, 19 nt, Artificial Sequence
  Description of Artificial Sequence: Synthetic oligonucleotide
  Sense strand starting at position 3583 of SEQ ID NO: 1880943
uuaagaguuugagugcaaa

SEQ ID NO: 2005811 - RNA, 19 nt, Artificial Sequence
  Description of Artificial Sequence: Synthetic oligonucleotide
  Antisense strand to SEQ ID NO: 2005810
uuugcacucaaacucuuaa

SEQ ID NO: 2005812 - RNA, 19 nt, Artificial Sequence
  Description of Artificial Sequence: Synthetic oligonucleotide
  Sense strand starting at position 3614 of SEQ ID NO: 1880943
gggcucaacaucugaugua

SEQ ID NO: 2005813 - RNA, 19 nt, Artificial Sequence
  Description of Artificial Sequence: Synthetic oligonucleotide
  Antisense strand to SEQ ID NO: 2005812
uacaucagauguugagccc

SEQ ID NO: 2005814 - RNA, 19 nt, Artificial Sequence
  Description of Artificial Sequence: Synthetic oligonucleotide
  Sense strand starting at position 3645 of SEQ ID NO: 1880943
gcaacaaauugcuuaugca

SEQ ID NO: 2005815 - RNA, 19 nt, Artificial Sequence
  Description of Artificial Sequence: Synthetic oligonucleotide
  Antisense strand to SEQ ID NO: 2005814
ugcauaagcaauuuguugc

SEQ ID NO: 2005816 - RNA, 19 nt, Artificial Sequence
  Description of Artificial Sequence: Synthetic oligonucleotide
  Sense strand starting at position 3716 of SEQ ID NO: 1880943
uuugaaaugcauugugcca

SEQ ID NO: 2005817 - RNA, 19 nt, Artificial Sequence
  Description of Artificial Sequence: Synthetic oligonucleotide
  Antisense strand to SEQ ID NO: 2005816
uggcacaaugcauuucaaa

SEQ ID NO: 2005818 - RNA, 19 nt, Artificial Sequence
  Description of Artificial Sequence: Synthetic oligonucleotide
  Sense strand starting at position 3736 of SEQ ID NO: 1880943
cuggcaugaauacguauua

SEQ ID NO: 2005819 - RNA, 19 nt, Artificial Sequence
  Description of Artificial Sequence: Synthetic oligonucleotide
  Antisense strand to SEQ ID NO: 2005818
uaauacguauucaugccag

SEQ ID NO: 2005820 - RNA, 19 nt, Artificial Sequence
  Description of Artificial Sequence: Synthetic oligonucleotide
  Sense strand starting at position 3743 of SEQ ID NO: 1880943
gaauacguauuagugaaau

SEQ ID NO: 2005821 - RNA, 19 nt, Artificial Sequence
  Description of Artificial Sequence: Synthetic oligonucleotide
  Antisense strand to SEQ ID NO: 2005820
auuucacuaauacguauuc

SEQ ID NO: 2005822 - RNA, 19 nt, Artificial Sequence
  Description of Artificial Sequence: Synthetic oligonucleotide
  Sense strand starting at position 3745 of SEQ ID NO: 1880943
auacguauuagugaaauga

SEQ ID NO: 2005823 - RNA, 19 nt, Artificial Sequence
  Description of Artificial Sequence: Synthetic oligonucleotide
  Antisense strand to SEQ ID NO: 2005822
ucauuucacuaauacguau

SEQ ID NO: 2005824 - RNA, 19 nt, Artificial Sequence
  Description of Artificial Sequence: Synthetic oligonucleotide
  Sense strand starting at position 3749 of SEQ ID NO: 1880943
guauuagugaaaugauaag

SEQ ID NO: 2005825 - RNA, 19 nt, Artificial Sequence
  Description of Artificial Sequence: Synthetic oligonucleotide
  Antisense strand to SEQ ID NO: 2005824
cuuaucauuucacuaauac

SEQ ID NO: 2005826 - RNA, 19 nt, Artificial Sequence
  Description of Artificial Sequence: Synthetic oligonucleotide
  Sense strand starting at position 3765 of SEQ ID NO: 1880943
aagauauuccuguggcauu

SEQ ID NO: 2005827 - RNA, 19 nt, Artificial Sequence
  Description of Artificial Sequence: Synthetic oligonucleotide
  Antisense strand to SEQ ID NO: 2005826
aaugccacaggaauaucuu

SEQ ID NO: 2005828 - RNA, 19 nt, Artificial Sequence
  Description of Artificial Sequence: Synthetic oligonucleotide
  Sense strand starting at position 3787 of SEQ ID NO: 1880943
gcuugagagucucuggguu

SEQ ID NO: 2005829 - RNA, 19 nt, Artificial Sequence
  Description of Artificial Sequence: Synthetic oligonucleotide
  Antisense strand to SEQ ID NO: 2005828
aacccagagacucucaagc

SEQ ID NO: 2005830 - RNA, 19 nt, Artificial Sequence
  Description of Artificial Sequence: Synthetic oligonucleotide
  Sense strand starting at position 3965 of SEQ ID NO: 1880943
uggugugauccuggcagga

SEQ ID NO: 2005831 - RNA, 19 nt, Artificial Sequence
  Description of Artificial Sequence: Synthetic oligonucleotide
  Antisense strand to SEQ ID NO: 2005830
uccugccaggaucacacca

SEQ ID NO: 2005832 - RNA, 19 nt, Artificial Sequence
  Description of Artificial Sequence: Synthetic oligonucleotide
  Sense strand starting at position 32 of SEQ ID NO: 1880942
cucauagagucauugaggu

SEQ ID NO: 2005833 - RNA, 19 nt, Artificial Sequence
  Description of Artificial Sequence: Synthetic oligonucleotide
  Antisense strand to SEQ ID NO: 2005832
accucaaugacucuaugag

SEQ ID NO: 2005834 - RNA, 19 nt, Artificial Sequence
  Description of Artificial Sequence: Synthetic oligonucleotide
  Sense strand starting at position 45 of SEQ ID NO: 1880942
ugagguuuccaaugauauu

SEQ ID NO: 2005835 - RNA, 19 nt, Artificial Sequence
  Description of Artificial Sequence: Synthetic oligonucleotide
  Antisense strand to SEQ ID NO: 2005834
aauaucauuggaaaccuca

SEQ ID NO: 2005836 - RNA, 19 nt, Artificial Sequence
  Description of Artificial Sequence: Synthetic oligonucleotide
  Sense strand starting at position 445 of SEQ ID NO: 1880942
augggaaccuugcucuaaa

SEQ ID NO: 2005837 - RNA, 19 nt, Artificial Sequence
  Description of Artificial Sequence: Synthetic oligonucleotide
  Antisense strand to SEQ ID NO: 2005836
uuuagagcaagguucccau

SEQ ID NO: 2005838 - RNA, 19 nt, Artificial Sequence
  Description of Artificial Sequence: Synthetic oligonucleotide
  Sense strand starting at position 500 of SEQ ID NO: 1880942
aagauugcgcaagagucaa

SEQ ID NO: 2005839 - RNA, 19 nt, Artificial Sequence
  Description of Artificial Sequence: Synthetic oligonucleotide
  Antisense strand to SEQ ID NO: 2005838
uugacucuugcgcaaucuu

SEQ ID NO: 2005840 - RNA, 19 nt, Artificial Sequence
  Description of Artificial Sequence: Synthetic oligonucleotide
  Sense strand starting at position 554 of SEQ ID NO: 1880942
guugcagaauuaucuaaag

SEQ ID NO: 2005841 - RNA, 19 nt, Artificial Sequence
  Description of Artificial Sequence: Synthetic oligonucleotide
  Antisense strand to SEQ ID NO: 2005840
cuuuagauaauucugcaac

SEQ ID NO: 2005842 - RNA, 19 nt, Artificial Sequence
  Description of Artificial Sequence: Synthetic oligonucleotide
  Sense strand starting at position 803 of SEQ ID NO: 1880942
acaagcaaucucuagaggu

SEQ ID NO: 2005843 - RNA, 19 nt, Artificial Sequence
  Description of Artificial Sequence: Synthetic oligonucleotide
  Antisense strand to SEQ ID NO: 2005842
accucuagagauugcuugu

SEQ ID NO: 2005844 - RNA, 19 nt, Artificial Sequence
  Description of Artificial Sequence: Synthetic oligonucleotide
  Sense strand starting at position 805 of SEQ ID NO: 1880942
aagcaaucucuagagguug

SEQ ID NO: 2005845 - RNA, 19 nt, Artificial Sequence
  Description of Artificial Sequence: Synthetic oligonucleotide
  Antisense strand to SEQ ID NO: 2005844
caaccucuagagauugcuu

SEQ ID NO: 2005846 - RNA, 19 nt, Artificial Sequence
  Description of Artificial Sequence: Synthetic oligonucleotide
  Sense strand starting at position 807 of SEQ ID NO: 1880942
gcaaucucuagagguugaa

SEQ ID NO: 2005847 - RNA, 19 nt, Artificial Sequence
  Description of Artificial Sequence: Synthetic oligonucleotide
  Antisense strand to SEQ ID NO: 2005846
uucaaccucuagagauugc

SEQ ID NO: 2005848 - RNA, 19 nt, Artificial Sequence
  Description of Artificial Sequence: Synthetic oligonucleotide
  Sense strand starting at position 810 of SEQ ID NO: 1880942
aucucuagagguugaauua

SEQ ID NO: 2005849 - RNA, 19 nt, Artificial Sequence
  Description of Artificial Sequence: Synthetic oligonucleotide
  Antisense strand to SEQ ID NO: 2005848
uaauucaaccucuagagau

SEQ ID NO: 2005850 - RNA, 19 nt, Artificial Sequence
  Description of Artificial Sequence: Synthetic oligonucleotide
  Sense strand starting at position 846 of SEQ ID NO: 1880942
cauuauuaguaagcagaug

SEQ ID NO: 2005851 - RNA, 19 nt, Artificial Sequence
  Description of Artificial Sequence: Synthetic oligonucleotide
  Antisense strand to SEQ ID NO: 2005850
caucugcuuacuaauaaug

SEQ ID NO: 2005852 - RNA, 19 nt, Artificial Sequence
  Description of Artificial Sequence: Synthetic oligonucleotide
  Sense strand starting at position 982 of SEQ ID NO: 1880942
accuauuguccuggcauuu

SEQ ID NO: 2005853 - RNA, 19 nt, Artificial Sequence
  Description of Artificial Sequence: Synthetic oligonucleotide
  Antisense strand to SEQ ID NO: 2005852
aaaugccaggacaauaggu

SEQ ID NO: 2005854 - RNA, 19 nt, Artificial Sequence
  Description of Artificial Sequence: Synthetic oligonucleotide
  Sense strand starting at position 1073 of SEQ ID NO: 1880942
ggaagaaagucuaggugag

SEQ ID NO: 2005855 - RNA, 19 nt, Artificial Sequence
  Description of Artificial Sequence: Synthetic oligonucleotide
  Antisense strand to SEQ ID NO: 2005854
cucaccuagacuuucuucc

SEQ ID NO: 2005856 - RNA, 19 nt, Artificial Sequence
  Description of Artificial Sequence: Synthetic oligonucleotide
  Sense strand starting at position 1263 of SEQ ID NO: 1880942
uacucaggacucugaggua

SEQ ID NO: 2005857 - RNA, 19 nt, Artificial Sequence
  Description of Artificial Sequence: Synthetic oligonucleotide
  Antisense strand to SEQ ID NO: 2005856
uaccucagaguccugagua

SEQ ID NO: 2005858 - RNA, 19 nt, Artificial Sequence
  Description of Artificial Sequence: Synthetic oligonucleotide
  Sense strand starting at position 1458 of SEQ ID NO: 1880942
ccaggaccucuuggaucau

SEQ ID NO: 2005859 - RNA, 19 nt, Artificial Sequence
  Description of Artificial Sequence: Synthetic oligonucleotide
  Antisense strand to SEQ ID NO: 2005858
augauccaagagguccugg

SEQ ID NO: 2005860 - RNA, 19 nt, Artificial Sequence
  Description of Artificial Sequence: Synthetic oligonucleotide
  Sense strand starting at position 1581 of SEQ ID NO: 1880942
cagauuagcuaguuuaaag

SEQ ID NO: 2005861 - RNA, 19 nt, Artificial Sequence
  Description of Artificial Sequence: Synthetic oligonucleotide
  Antisense strand to SEQ ID NO: 2005860
cuuuaaacuagcuaaucug

SEQ ID NO: 2005862 - RNA, 19 nt, Artificial Sequence
  Description of Artificial Sequence: Synthetic oligonucleotide
  Sense strand starting at position 1638 of SEQ ID NO: 1880942
augagugagcucugggaau

SEQ ID NO: 2005863 - RNA, 19 nt, Artificial Sequence
  Description of Artificial Sequence: Synthetic oligonucleotide
  Antisense strand to SEQ ID NO: 2005862
auucccagagcucacucau

SEQ ID NO: 2005864 - RNA, 19 nt, Artificial Sequence
  Description of Artificial Sequence: Synthetic oligonucleotide
  Sense strand starting at position 1640 of SEQ ID NO: 1880942
gagugagcucugggaauag

SEQ ID NO: 2005865 - RNA, 19 nt, Artificial Sequence
  Description of Artificial Sequence: Synthetic oligonucleotide
  Antisense strand to SEQ ID NO: 2005864
cuauucccagagcucacuc

SEQ ID NO: 2005866 - RNA, 19 nt, Artificial Sequence
  Description of Artificial Sequence: Synthetic oligonucleotide
  Sense strand starting at position 1644 of SEQ ID NO: 1880942
gagcucugggaauagguuu

SEQ ID NO: 2005867 - RNA, 19 nt, Artificial Sequence
  Description of Artificial Sequence: Synthetic oligonucleotide
  Antisense strand to SEQ ID NO: 2005866
aaaccuauucccagagcuc

SEQ ID NO: 2005868 - RNA, 19 nt, Artificial Sequence
  Description of Artificial Sequence: Synthetic oligonucleotide
  Sense strand starting at position 1651 of SEQ ID NO: 1880942
gggaauagguuucugggua

SEQ ID NO: 2005869 - RNA, 19 nt, Artificial Sequence
  Description of Artificial Sequence: Synthetic oligonucleotide
  Antisense strand to SEQ ID NO: 2005868
uacccagaaaccuauuccc

SEQ ID NO: 2005870 - RNA, 19 nt, Artificial Sequence
  Description of Artificial Sequence: Synthetic oligonucleotide
  Sense strand starting at position 1656 of SEQ ID NO: 1880942
uagguuucuggguacccaa

SEQ ID NO: 2005871 - RNA, 19 nt, Artificial Sequence
  Description of Artificial Sequence: Synthetic oligonucleotide
  Antisense strand to SEQ ID NO: 2005870
uuggguacccagaaaccua

SEQ ID NO: 2005872 - RNA, 19 nt, Artificial Sequence
  Description of Artificial Sequence: Synthetic oligonucleotide
  Sense strand starting at position 1748 of SEQ ID NO: 1880942
ugccuagggcaauacauua

SEQ ID NO: 2005873 - RNA, 19 nt, Artificial Sequence
  Description of Artificial Sequence: Synthetic oligonucleotide
  Antisense strand to SEQ ID NO: 2005872
uaauguauugcccuaggca

SEQ ID NO: 2005874 - RNA, 19 nt, Artificial Sequence
  Description of Artificial Sequence: Synthetic oligonucleotide
  Sense strand starting at position 1788 of SEQ ID NO: 1880942
gugguuucuguagaacaaa

SEQ ID NO: 2005875 - RNA, 19 nt, Artificial Sequence
  Description of Artificial Sequence: Synthetic oligonucleotide
  Antisense strand to SEQ ID NO: 2005874
uuuguucuacagaaaccac

SEQ ID NO: 2005876 - RNA, 19 nt, Artificial Sequence
  Description of Artificial Sequence: Synthetic oligonucleotide
  Sense strand starting at position 2429 of SEQ ID NO: 1880942
uuguuuguucuagagacaa

SEQ ID NO: 2005877 - RNA, 19 nt, Artificial Sequence
  Description of Artificial Sequence: Synthetic oligonucleotide
  Antisense strand to SEQ ID NO: 2005876
uugucucuagaacaaacaa

SEQ ID NO: 2005878 - RNA, 19 nt, Artificial Sequence
  Description of Artificial Sequence: Synthetic oligonucleotide
  Sense strand starting at position 2708 of SEQ ID NO: 1880942
uaugauagaccgugagauc

SEQ ID NO: 2005879 - RNA, 19 nt, Artificial Sequence
  Description of Artificial Sequence: Synthetic oligonucleotide
  Antisense strand to SEQ ID NO: 2005878
gaucucacggucuaucaua

SEQ ID NO: 2005880 - RNA, 19 nt, Artificial Sequence
  Description of Artificial Sequence: Synthetic oligonucleotide
  Sense strand starting at position 2767 of SEQ ID NO: 1880942
aacuguuaacccuggagac

SEQ ID NO: 2005881 - RNA, 19 nt, Artificial Sequence
  Description of Artificial Sequence: Synthetic oligonucleotide
  Antisense strand to SEQ ID NO: 2005880
gucuccaggguuaacaguu

SEQ ID NO: 2005882 - RNA, 19 nt, Artificial Sequence
  Description of Artificial Sequence: Synthetic oligonucleotide
  Sense strand starting at position 2768 of SEQ ID NO: 1880942
acuguuaacccuggagacu

SEQ ID NO: 2005883 - RNA, 19 nt, Artificial Sequence
  Description of Artificial Sequence: Synthetic oligonucleotide
  Antisense strand to SEQ ID NO: 2005882
agucuccaggguuaacagu

SEQ ID NO: 2005884 - RNA, 19 nt, Artificial Sequence
  Description of Artificial Sequence: Synthetic oligonucleotide
  Sense strand starting at position 2780 of SEQ ID NO: 1880942
ggagacuguaagugugaau

SEQ ID NO: 2005885 - RNA, 19 nt, Artificial Sequence
  Description of Artificial Sequence: Synthetic oligonucleotide
  Antisense strand to SEQ ID NO: 2005884
auucacacuuacagucucc

SEQ ID NO: 2005886 - RNA, 19 nt, Artificial Sequence
  Description of Artificial Sequence: Synthetic oligonucleotide
  Sense strand starting at position 2883 of SEQ ID NO: 1880942
auugaauggcuguaauaug

SEQ ID NO: 2005887 - RNA, 19 nt, Artificial Sequence
  Description of Artificial Sequence: Synthetic oligonucleotide
  Antisense strand to SEQ ID NO: 2005886
cauauuacagccauucaau

SEQ ID NO: 2005888 - RNA, 19 nt, Artificial Sequence
  Description of Artificial Sequence: Synthetic oligonucleotide
  Sense strand starting at position 3015 of SEQ ID NO: 1880942
aauggacaucauugggcua

SEQ ID NO: 2005889 - RNA, 19 nt, Artificial Sequence
  Description of Artificial Sequence: Synthetic oligonucleotide
  Antisense strand to SEQ ID NO: 2005888
uagcccaaugauguccauu

SEQ ID NO: 2005890 - RNA, 19 nt, Artificial Sequence
  Description of Artificial Sequence: Synthetic oligonucleotide
  Sense strand starting at position 3018 of SEQ ID NO: 1880942
ggacaucauugggcuagau

SEQ ID NO: 2005891 - RNA, 19 nt, Artificial Sequence
  Description of Artificial Sequence: Synthetic oligonucleotide
  Antisense strand to SEQ ID NO: 2005890
aucuagcccaaugaugucc

SEQ ID NO: 2005892 - RNA, 19 nt, Artificial Sequence
  Description of Artificial Sequence: Synthetic oligonucleotide
  Sense strand starting at position 3054 of SEQ ID NO: 1880942
cuugacauuguguauaaug

SEQ ID NO: 2005893 - RNA, 19 nt, Artificial Sequence
  Description of Artificial Sequence: Synthetic oligonucleotide
  Antisense strand to SEQ ID NO: 2005892
cauuauacacaaugucaag

SEQ ID NO: 2005894 - RNA, 19 nt, Artificial Sequence
  Description of Artificial Sequence: Synthetic oligonucleotide
  Sense strand starting at position 3142 of SEQ ID NO: 1880942
gcagcuauugaauagaucu

SEQ ID NO: 2005895 - RNA, 19 nt, Artificial Sequence
  Description of Artificial Sequence: Synthetic oligonucleotide
  Antisense strand to SEQ ID NO: 2005894
agaucuauucaauagcugc

SEQ ID NO: 2005896 - RNA, 19 nt, Artificial Sequence
  Description of Artificial Sequence: Synthetic oligonucleotide
  Sense strand starting at position 3270 of SEQ ID NO: 1880942
uaaggaaacucgucaguag

SEQ ID NO: 2005897 - RNA, 19 nt, Artificial Sequence
  Description of Artificial Sequence: Synthetic oligonucleotide
  Antisense strand to SEQ ID NO: 2005896
cuacugacgaguuuccuua

SEQ ID NO: 2005898 - RNA, 19 nt, Artificial Sequence
  Description of Artificial Sequence: Synthetic oligonucleotide
  Sense strand starting at position 3331 of SEQ ID NO: 1880942
aucacagggcuguagaauu

SEQ ID NO: 2005899 - RNA, 19 nt, Artificial Sequence
  Description of Artificial Sequence: Synthetic oligonucleotide
  Antisense strand to SEQ ID NO: 2005898
aauucuacagcccugugau

SEQ ID NO: 2005900 - RNA, 19 nt, Artificial Sequence
  Description of Artificial Sequence: Synthetic oligonucleotide
  Sense strand starting at position 3409 of SEQ ID NO: 1880942
cagggcauuuguuauuuaa

SEQ ID NO: 2005901 - RNA, 19 nt, Artificial Sequence
  Description of Artificial Sequence: Synthetic oligonucleotide
  Antisense strand to SEQ ID NO: 2005900
uuaaauaacaaaugcccug

SEQ ID NO: 2005902 - RNA, 19 nt, Artificial Sequence
  Description of Artificial Sequence: Synthetic oligonucleotide
  Sense strand starting at position 3506 of SEQ ID NO: 1880942
agaauccaguucuuggaga

SEQ ID NO: 2005903 - RNA, 19 nt, Artificial Sequence
  Description of Artificial Sequence: Synthetic oligonucleotide
  Antisense strand to SEQ ID NO: 2005902
ucuccaagaacuggauucu

SEQ ID NO: 2005904 - RNA, 19 nt, Artificial Sequence
  Description of Artificial Sequence: Synthetic oligonucleotide
  Sense strand starting at position 3508 of SEQ ID NO: 1880942
aauccaguucuuggagauc

SEQ ID NO: 2005905 - RNA, 19 nt, Artificial Sequence
  Description of Artificial Sequence: Synthetic oligonucleotide
  Antisense strand to SEQ ID NO: 2005904
gaucuccaagaacuggauu

SEQ ID NO: 2005906 - RNA, 19 nt, Artificial Sequence
  Description of Artificial Sequence: Synthetic oligonucleotide
  Sense strand starting at position 3549 of SEQ ID NO: 1880942
ugugguucaguuggaauuu

SEQ ID NO: 2005907 - RNA, 19 nt, Artificial Sequence
  Description of Artificial Sequence: Synthetic oligonucleotide
  Antisense strand to SEQ ID NO: 2005906
aaauuccaacugaaccaca

SEQ ID NO: 2005908 - RNA, 19 nt, Artificial Sequence
  Description of Artificial Sequence: Synthetic oligonucleotide
  Sense strand starting at position 3649 of SEQ ID NO: 1880942
uggucugacuccuuaugga

SEQ ID NO: 2005909 - RNA, 19 nt, Artificial Sequence
  Description of Artificial Sequence: Synthetic oligonucleotide
  Antisense strand to SEQ ID NO: 2005908
uccauaaggagucagacca

SEQ ID NO: 2005910 - RNA, 19 nt, Artificial Sequence
  Description of Artificial Sequence: Synthetic oligonucleotide
  Sense strand starting at position 3657 of SEQ ID NO: 1880942
cuccuuauggauugacuuu

SEQ ID NO: 2005911 - RNA, 19 nt, Artificial Sequence
  Description of Artificial Sequence: Synthetic oligonucleotide
  Antisense strand to SEQ ID NO: 2005910
aaagucaauccauaaggag

SEQ ID NO: 2005912 - RNA, 19 nt, Artificial Sequence
  Description of Artificial Sequence: Synthetic oligonucleotide
  Sense strand starting at position 1994 of SEQ ID NO: 1880944
cuuccuuucugugaagaaa

SEQ ID NO: 2005913 - RNA, 19 nt, Artificial Sequence
  Description of Artificial Sequence: Synthetic oligonucleotide
  Antisense strand to SEQ ID NO: 2005912
uuucuucacagaaaggaag

SEQ ID NO: 2005914 - RNA, 19 nt, Artificial Sequence
  Description of Artificial Sequence: Synthetic oligonucleotide
  Sense strand starting at position 2146 of SEQ ID NO: 1880944
acaagcacaucuuugauga

SEQ ID NO: 2005915 - RNA, 19 nt, Artificial Sequence
  Description of Artificial Sequence: Synthetic oligonucleotide
  Antisense strand to SEQ ID NO: 2005914
ucaucaaagaugugcuugu

SEQ ID NO: 2005916 - RNA, 19 nt, Artificial Sequence
  Description of Artificial Sequence: Synthetic oligonucleotide
  Sense strand starting at position 2194 of SEQ ID NO: 1880944
gugugaggaugcuaauaau

SEQ ID NO: 2005917 - RNA, 19 nt, Artificial Sequence
  Description of Artificial Sequence: Synthetic oligonucleotide
  Antisense strand to SEQ ID NO: 2005916
auuauuagcauccucacac

SEQ ID NO: 2005918 - RNA, 19 nt, Artificial Sequence
  Description of Artificial Sequence: Synthetic oligonucleotide
  Sense strand starting at position 2330 of SEQ ID NO: 1880944
ggcugucacacccagagaa

SEQ ID NO: 2005919 - RNA, 19 nt, Artificial Sequence
  Description of Artificial Sequence: Synthetic oligonucleotide
  Antisense strand to SEQ ID NO: 2005918
uucucugggugugacagcc

SEQ ID NO: 2005920 - RNA, 19 nt, Artificial Sequence
  Description of Artificial Sequence: Synthetic oligonucleotide
  Sense strand starting at position 2358 of SEQ ID NO: 1880944
gagagacuuuaacggacuu

SEQ ID NO: 2005921 - RNA, 19 nt, Artificial Sequence
  Description of Artificial Sequence: Synthetic oligonucleotide
  Antisense strand to SEQ ID NO: 2005920
aaguccguuaaagucucuc

SEQ ID NO: 2005922 - RNA, 19 nt, Artificial Sequence
  Description of Artificial Sequence: Synthetic oligonucleotide
  Sense strand starting at position 2413 of SEQ ID NO: 1880944
agggcagaguggguuuauu

SEQ ID NO: 2005923 - RNA, 19 nt, Artificial Sequence
  Description of Artificial Sequence: Synthetic oligonucleotide
  Antisense strand to SEQ ID NO: 2005922
aauaaacccacucugcccu

SEQ ID NO: 2005924 - RNA, 19 nt, Artificial Sequence
  Description of Artificial Sequence: Synthetic oligonucleotide
  Sense strand starting at position 2422 of SEQ ID NO: 1880944
uggguuuauuaacagacuu

SEQ ID NO: 2005925 - RNA, 19 nt, Artificial Sequence
  Description of Artificial Sequence: Synthetic oligonucleotide
  Antisense strand to SEQ ID NO: 2005924
aagucuguuaauaaaccca

SEQ ID NO: 2005926 - RNA, 19 nt, Artificial Sequence
  Description of Artificial Sequence: Synthetic oligonucleotide
  Sense strand starting at position 2433 of SEQ ID NO: 1880944
acagacuuaucccuggcuu

SEQ ID NO: 2005927 - RNA, 19 nt, Artificial Sequence
  Description of Artificial Sequence: Synthetic oligonucleotide
  Antisense strand to SEQ ID NO: 2005926
aagccagggauaagucugu

SEQ ID NO: 2005928 - RNA, 19 nt, Artificial Sequence
  Description of Artificial Sequence: Synthetic oligonucleotide
  Sense strand starting at position 2434 of SEQ ID NO: 1880944
cagacuuaucccuggcuug

SEQ ID NO: 2005929 - RNA, 19 nt, Artificial Sequence
  Description of Artificial Sequence: Synthetic oligonucleotide
  Antisense strand to SEQ ID NO: 2005928
caagccagggauaagucug

SEQ ID NO: 2005930 - RNA, 19 nt, Artificial Sequence
  Description of Artificial Sequence: Synthetic oligonucleotide
  Sense strand starting at position 2463 of SEQ ID NO: 1880944
uggcuugaauucucaucaa

SEQ ID NO: 2005931 - RNA, 19 nt, Artificial Sequence
  Description of Artificial Sequence: Synthetic oligonucleotide
  Antisense strand to SEQ ID NO: 2005930
uugaugagaauucaagcca

SEQ ID NO: 2005932 - RNA, 19 nt, Artificial Sequence
  Description of Artificial Sequence: Synthetic oligonucleotide
  Sense strand starting at position 2646 of SEQ ID NO: 1880944
agaggauggugacgcaauu

SEQ ID NO: 2005933 - RNA, 19 nt, Artificial Sequence
  Description of Artificial Sequence: Synthetic oligonucleotide
  Antisense strand to SEQ ID NO: 2005932
aauugcgucaccauccucu

SEQ ID NO: 2005934 - RNA, 19 nt, Artificial Sequence
  Description of Artificial Sequence: Synthetic oligonucleotide
  Sense strand starting at position 2698 of SEQ ID NO: 1880944
guucuagaauauccuuaga

SEQ ID NO: 2005935 - RNA, 19 nt, Artificial Sequence
  Description of Artificial Sequence: Synthetic oligonucleotide
  Antisense strand to SEQ ID NO: 2005934
ucuaaggauauucuagaac

SEQ ID NO: 2005936 - RNA, 19 nt, Artificial Sequence
  Description of Artificial Sequence: Synthetic oligonucleotide
  Sense strand starting at position 2703 of SEQ ID NO: 1880944
agaauauccuuagaagagc

SEQ ID NO: 2005937 - RNA, 19 nt, Artificial Sequence
  Description of Artificial Sequence: Synthetic oligonucleotide
  Antisense strand to SEQ ID NO: 2005936
gcucuucuaaggauauucu

SEQ ID NO: 2005938 - RNA, 19 nt, Artificial Sequence
  Description of Artificial Sequence: Synthetic oligonucleotide
  Sense strand starting at position 2779 of SEQ ID NO: 1880944
uuaagcaguccugagaaug

SEQ ID NO: 2005939 - RNA, 19 nt, Artificial Sequence
  Description of Artificial Sequence: Synthetic oligonucleotide
  Antisense strand to SEQ ID NO: 2005938
cauucucaggacugcuuaa

SEQ ID NO: 2005940 - RNA, 19 nt, Artificial Sequence
  Description of Artificial Sequence: Synthetic oligonucleotide
  Sense strand starting at position 2785 of SEQ ID NO: 1880944
aguccugagaaugguguua

SEQ ID NO: 2005941 - RNA, 19 nt, Artificial Sequence
  Description of Artificial Sequence: Synthetic oligonucleotide
  Antisense strand to SEQ ID NO: 2005940
uaacaccauucucaggacu

SEQ ID NO: 2005942 - RNA, 19 nt, Artificial Sequence
  Description of Artificial Sequence: Synthetic oligonucleotide
  Sense strand starting at position 2787 of SEQ ID NO: 1880944
uccugagaaugguguuaua

SEQ ID NO: 2005943 - RNA, 19 nt, Artificial Sequence
  Description of Artificial Sequence: Synthetic oligonucleotide
  Antisense strand to SEQ ID NO: 2005942
uauaacaccauucucagga

SEQ ID NO: 2005944 - RNA, 19 nt, Artificial Sequence
  Description of Artificial Sequence: Synthetic oligonucleotide
  Sense strand starting at position 2908 of SEQ ID NO: 1880944
gugugaggauccuugugga

SEQ ID NO: 2005945 - RNA, 19 nt, Artificial Sequence
  Description of Artificial Sequence: Synthetic oligonucleotide
  Antisense strand to SEQ ID NO: 2005944
uccacaaggauccucacac

SEQ ID NO: 2005946 - RNA, 19 nt, Artificial Sequence
  Description of Artificial Sequence: Synthetic oligonucleotide
  Sense strand starting at position 2911 of SEQ ID NO: 1880944
ugaggauccuuguggagga

SEQ ID NO: 2005947 - RNA, 19 nt, Artificial Sequence
  Description of Artificial Sequence: Synthetic oligonucleotide
  Antisense strand to SEQ ID NO: 2005946
uccuccacaaggauccuca

SEQ ID NO: 2005948 - RNA, 19 nt, Artificial Sequence
  Description of Artificial Sequence: Synthetic oligonucleotide
  Sense strand starting at position 2912 of SEQ ID NO: 1880944
gaggauccuuguggaggau

SEQ ID NO: 2005949 - RNA, 19 nt, Artificial Sequence
  Description of Artificial Sequence: Synthetic oligonucleotide
  Antisense strand to SEQ ID NO: 2005948
auccuccacaaggauccuc

SEQ ID NO: 2005950 - RNA, 19 nt, Artificial Sequence
  Description of Artificial Sequence: Synthetic oligonucleotide
  Sense strand starting at position 3046 of SEQ ID NO: 1880944
agccauggcuccuuucuau

SEQ ID NO: 2005951 - RNA, 19 nt, Artificial Sequence
  Description of Artificial Sequence: Synthetic oligonucleotide
  Antisense strand to SEQ ID NO: 2005950
auagaaaggagccauggcu

SEQ ID NO: 2005952 - RNA, 19 nt, Artificial Sequence
  Description of Artificial Sequence: Synthetic oligonucleotide
  Sense strand starting at position 3115 of SEQ ID NO: 1880944
gggagaugguauagcugau

SEQ ID NO: 2005953 - RNA, 19 nt, Artificial Sequence
  Description of Artificial Sequence: Synthetic oligonucleotide
  Antisense strand to SEQ ID NO: 2005952
aucagcuauaccaucuccc

SEQ ID NO: 2005954 - RNA, 19 nt, Artificial Sequence
  Description of Artificial Sequence: Synthetic oligonucleotide
  Sense strand starting at position 3131 of SEQ ID NO: 1880944
gauauaggcucagaaaggu

SEQ ID NO: 2005955 - RNA, 19 nt, Artificial Sequence
  Description of Artificial Sequence: Synthetic oligonucleotide
  Antisense strand to SEQ ID NO: 2005954
accuuucugagccuauauc

SEQ ID NO: 2005956 - RNA, 19 nt, Artificial Sequence
  Description of Artificial Sequence: Synthetic oligonucleotide
  Sense strand starting at position 3401 of SEQ ID NO: 1880944
gacauaacaugugggaauu

SEQ ID NO: 2005957 - RNA, 19 nt, Artificial Sequence
  Description of Artificial Sequence: Synthetic oligonucleotide
  Antisense strand to SEQ ID NO: 2005956
aauucccacauguuauguc

SEQ ID NO: 2005958 - RNA, 19 nt, Artificial Sequence
  Description of Artificial Sequence: Synthetic oligonucleotide
  Sense strand starting at position 3685 of SEQ ID NO: 1880944
uuggaauccuccugcacau

SEQ ID NO: 2005959 - RNA, 19 nt, Artificial Sequence
  Description of Artificial Sequence: Synthetic oligonucleotide
  Antisense strand to SEQ ID NO: 2005958
augugcaggaggauuccaa

SEQ ID NO: 2005960 - RNA, 19 nt, Artificial Sequence
  Description of Artificial Sequence: Synthetic oligonucleotide
  Sense strand starting at position 3749 of SEQ ID NO: 1880944
gugcuuacagccugucagu

SEQ ID NO: 2005961 - RNA, 19 nt, Artificial Sequence
  Description of Artificial Sequence: Synthetic oligonucleotide
  Antisense strand to SEQ ID NO: 2005960
acugacaggcuguaagcac

SEQ ID NO: 2005962 - RNA, 19 nt, Artificial Sequence
  Description of Artificial Sequence: Synthetic oligonucleotide
  Sense strand starting at position 3760 of SEQ ID NO: 1880944
cugucaguguaccaacauu

SEQ ID NO: 2005963 - RNA, 19 nt, Artificial Sequence
  Description of Artificial Sequence: Synthetic oligonucleotide
  Antisense strand to SEQ ID NO: 2005962
aauguugguacacugacag

SEQ ID NO: 2005964 - RNA, 19 nt, Artificial Sequence
  Description of Artificial Sequence: Synthetic oligonucleotide
  Sense strand starting at position 3805 of SEQ ID NO: 1880944
caauaugcacguugaugau

SEQ ID NO: 2005965 - RNA, 19 nt, Artificial Sequence
  Description of Artificial Sequence: Synthetic oligonucleotide
  Antisense strand to SEQ ID NO: 2005964
aucaucaacgugcauauug

SEQ ID NO: 2005966 - RNA, 19 nt, Artificial Sequence
  Description of Artificial Sequence: Synthetic oligonucleotide
  Sense strand starting at position 3811 of SEQ ID NO: 1880944
gcacguugaugauaucuac

SEQ ID NO: 2005967 - RNA, 19 nt, Artificial Sequence
  Description of Artificial Sequence: Synthetic oligonucleotide
  Antisense strand to SEQ ID NO: 2005966
guagauaucaucaacgugc

SEQ ID NO: 2005968 - RNA, 19 nt, Artificial Sequence
  Description of Artificial Sequence: Synthetic oligonucleotide
  Sense strand starting at position 3814 of SEQ ID NO: 1880944
cguugaugauaucuacuuu

SEQ ID NO: 2005969 - RNA, 19 nt, Artificial Sequence
  Description of Artificial Sequence: Synthetic oligonucleotide
  Antisense strand to SEQ ID NO: 2005968
aaaguagauaucaucaacg

SEQ ID NO: 2005970 - RNA, 19 nt, Artificial Sequence
  Description of Artificial Sequence: Synthetic oligonucleotide
  Sense strand starting at position 3831 of SEQ ID NO: 1880944
uuugcacacuggucugauu

SEQ ID NO: 2005971 - RNA, 19 nt, Artificial Sequence
  Description of Artificial Sequence: Synthetic oligonucleotide
  Antisense strand to SEQ ID NO: 2005970
aaucagaccagugugcaaa

SEQ ID NO: 2005972 - RNA, 19 nt, Artificial Sequence
  Description of Artificial Sequence: Synthetic oligonucleotide
  Sense strand starting at position 3840 of SEQ ID NO: 1880944
uggucugauuuacaucacu

SEQ ID NO: 2005973 - RNA, 19 nt, Artificial Sequence
  Description of Artificial Sequence: Synthetic oligonucleotide
  Antisense strand to SEQ ID NO: 2005972
agugauguaaaucagacca

SEQ ID NO: 2005974 - RNA, 19 nt, Artificial Sequence
  Description of Artificial Sequence: Synthetic oligonucleotide
  Sense strand starting at position 111 of SEQ ID NO: 1880945
aguguuugugagcauauuc

SEQ ID NO: 2005975 - RNA, 19 nt, Artificial Sequence
  Description of Artificial Sequence: Synthetic oligonucleotide
  Antisense strand to SEQ ID NO: 2005974
gaauaugcucacaaacacu

SEQ ID NO: 2005976 - RNA, 19 nt, Artificial Sequence
  Description of Artificial Sequence: Synthetic oligonucleotide
  Sense strand starting at position 140 of SEQ ID NO: 1880945
ggaaauauauggcacaaga

SEQ ID NO: 2005977 - RNA, 19 nt, Artificial Sequence
  Description of Artificial Sequence: Synthetic oligonucleotide
  Antisense strand to SEQ ID NO: 2005976
ucuugugccauauauuucc

SEQ ID NO: 2005978 - RNA, 19 nt, Artificial Sequence
  Description of Artificial Sequence: Synthetic oligonucleotide
  Sense strand starting at position 184 of SEQ ID NO: 1880945
ggagacaacuaauaacaga

SEQ ID NO: 2005979 - RNA, 19 nt, Artificial Sequence
  Description of Artificial Sequence: Synthetic oligonucleotide
  Antisense strand to SEQ ID NO: 2005978
ucuguuauuaguugucucc

SEQ ID NO: 2005980 - RNA, 19 nt, Artificial Sequence
  Description of Artificial Sequence: Synthetic oligonucleotide
  Sense strand starting at position 195 of SEQ ID NO: 1880945
auaacagaguugucauaag

SEQ ID NO: 2005981 - RNA, 19 nt, Artificial Sequence
  Description of Artificial Sequence: Synthetic oligonucleotide
  Antisense strand to SEQ ID NO: 2005980
cuuaugacaacucuguuau

SEQ ID NO: 2005982 - RNA, 19 nt, Artificial Sequence
  Description of Artificial Sequence: Synthetic oligonucleotide
  Sense strand starting at position 209 of SEQ ID NO: 1880945
auaaguauaccaggcacuu

SEQ ID NO: 2005983 - RNA, 19 nt, Artificial Sequence
  Description of Artificial Sequence: Synthetic oligonucleotide
  Antisense strand to SEQ ID NO: 2005982
aagugccugguauacuuau

SEQ ID NO: 2005984 - RNA, 19 nt, Artificial Sequence
  Description of Artificial Sequence: Synthetic oligonucleotide
  Sense strand starting at position 629 of SEQ ID NO: 1880945
agauucuaacuuugcagaa

SEQ ID NO: 2005985 - RNA, 19 nt, Artificial Sequence
  Description of Artificial Sequence: Synthetic oligonucleotide
  Antisense strand to SEQ ID NO: 2005984
uucugcaaaguuagaaucu

SEQ ID NO: 2005986 - RNA, 19 nt, Artificial Sequence
  Description of Artificial Sequence: Synthetic oligonucleotide
  Sense strand starting at position 798 of SEQ ID NO: 1880945
ggaccaucaucugcaggaa

SEQ ID NO: 2005987 - RNA, 19 nt, Artificial Sequence
  Description of Artificial Sequence: Synthetic oligonucleotide
  Antisense strand to SEQ ID NO: 2005986
uuccugcagaugauggucc

SEQ ID NO: 2005988 - RNA, 19 nt, Artificial Sequence
  Description of Artificial Sequence: Synthetic oligonucleotide
  Sense strand starting at position 1106 of SEQ ID NO: 1880945
gcuaacacccuaugugaua

SEQ ID NO: 2005989 - RNA, 19 nt, Artificial Sequence
  Description of Artificial Sequence: Synthetic oligonucleotide
  Antisense strand to SEQ ID NO: 2005988
uaucacauaggguguuagc

SEQ ID NO: 2005990 - RNA, 19 nt, Artificial Sequence
  Description of Artificial Sequence: Synthetic oligonucleotide
  Sense strand starting at position 1141 of SEQ ID NO: 1880945
gagaauugaauggguuugu

SEQ ID NO: 2005991 - RNA, 19 nt, Artificial Sequence
  Description of Artificial Sequence: Synthetic oligonucleotide
  Antisense strand to SEQ ID NO: 2005990
acaaacccauucaauucuc

SEQ ID NO: 2005992 - RNA, 19 nt, Artificial Sequence
  Description of Artificial Sequence: Synthetic oligonucleotide
  Sense strand starting at position 1142 of SEQ ID NO: 1880945
agaauugaauggguuugua

SEQ ID NO: 2005993 - RNA, 19 nt, Artificial Sequence
  Description of Artificial Sequence: Synthetic oligonucleotide
  Antisense strand to SEQ ID NO: 2005992
uacaaacccauucaauucu

SEQ ID NO: 2005994 - RNA, 19 nt, Artificial Sequence
  Description of Artificial Sequence: Synthetic oligonucleotide
  Sense strand starting at position 1311 of SEQ ID NO: 1880945
gcagaaaccggcuguaaau

SEQ ID NO: 2005995 - RNA, 19 nt, Artificial Sequence
  Description of Artificial Sequence: Synthetic oligonucleotide
  Antisense strand to SEQ ID NO: 2005994
auuuacagccgguuucugc

SEQ ID NO: 2005996 - RNA, 19 nt, Artificial Sequence
  Description of Artificial Sequence: Synthetic oligonucleotide
  Sense strand starting at position 1342 of SEQ ID NO: 1880945
ggaaguaauuuggaaagcu

SEQ ID NO: 2005997 - RNA, 19 nt, Artificial Sequence
  Description of Artificial Sequence: Synthetic oligonucleotide
  Antisense strand to SEQ ID NO: 2005996
agcuuuccaaauuacuucc

SEQ ID NO: 2005998 - RNA, 19 nt, Artificial Sequence
  Description of Artificial Sequence: Synthetic oligonucleotide
  Sense strand starting at position 1354 of SEQ ID NO: 1880945
gaaagcucucaggguaaug

SEQ ID NO: 2005999 - RNA, 19 nt, Artificial Sequence
  Description of Artificial Sequence: Synthetic oligonucleotide
  Antisense strand to SEQ ID NO: 2005998
cauuacccugagagcuuuc

SEQ ID NO: 2006000 - RNA, 19 nt, Artificial Sequence
  Description of Artificial Sequence: Synthetic oligonucleotide
  Sense strand starting at position 1542 of SEQ ID NO: 1880945
cccaguuccucagugugaa

SEQ ID NO: 2006001 - RNA, 19 nt, Artificial Sequence
  Description of Artificial Sequence: Synthetic oligonucleotide
  Antisense strand to SEQ ID NO: 2006000
uucacacugaggaacuggg

SEQ ID NO: 2006002 - RNA, 19 nt, Artificial Sequence
  Description of Artificial Sequence: Synthetic oligonucleotide
  Sense strand starting at position 1543 of SEQ ID NO: 1880945
ccaguuccucagugugaau

SEQ ID NO: 2006003 - RNA, 19 nt, Artificial Sequence
  Description of Artificial Sequence: Synthetic oligonucleotide
  Antisense strand to SEQ ID NO: 2006002
auucacacugaggaacugg

SEQ ID NO: 2006004 - RNA, 19 nt, Artificial Sequence
  Description of Artificial Sequence: Synthetic oligonucleotide
  Sense strand starting at position 1554 of SEQ ID NO: 1880945
gugugaaucccagaugguu

SEQ ID NO: 2006005 - RNA, 19 nt, Artificial Sequence
  Description of Artificial Sequence: Synthetic oligonucleotide
  Antisense strand to SEQ ID NO: 2006004
aaccaucugggauucacac

SEQ ID NO: 2006006 - RNA, 19 nt, Artificial Sequence
  Description of Artificial Sequence: Synthetic oligonucleotide
  Sense strand starting at position 1799 of SEQ ID NO: 1880945
uccgguuacccggaggaga

SEQ ID NO: 2006007 - RNA, 19 nt, Artificial Sequence
  Description of Artificial Sequence: Synthetic oligonucleotide
  Antisense strand to SEQ ID NO: 2006006
ucuccuccggguaaccgga

SEQ ID NO: 2006008 - RNA, 19 nt, Artificial Sequence
  Description of Artificial Sequence: Synthetic oligonucleotide
  Sense strand starting at position 1814 of SEQ ID NO: 1880945
gagaguugcuacucucgag

SEQ ID NO: 2006009 - RNA, 19 nt, Artificial Sequence
  Description of Artificial Sequence: Synthetic oligonucleotide
  Antisense strand to SEQ ID NO: 2006008
cucgagaguagcaacucuc

SEQ ID NO: 2006010 - RNA, 19 nt, Artificial Sequence
  Description of Artificial Sequence: Synthetic oligonucleotide
  Sense strand starting at position 1955 of SEQ ID NO: 1880945
gcuccuucucagcaugaua

SEQ ID NO: 2006011 - RNA, 19 nt, Artificial Sequence
  Description of Artificial Sequence: Synthetic oligonucleotide
  Antisense strand to SEQ ID NO: 2006010
uaucaugcugagaaggagc

SEQ ID NO: 2006012 - RNA, 19 nt, Artificial Sequence
  Description of Artificial Sequence: Synthetic oligonucleotide
  Sense strand starting at position 2754 of SEQ ID NO: 1880945
gggcuuauguaaccuuaac

SEQ ID NO: 2006013 - RNA, 19 nt, Artificial Sequence
  Description of Artificial Sequence: Synthetic oligonucleotide
  Antisense strand to SEQ ID NO: 2006012
guuaagguuacauaagccc

SEQ ID NO: 2006014 - RNA, 19 nt, Artificial Sequence
  Description of Artificial Sequence: Synthetic oligonucleotide
  Sense strand starting at position 2876 of SEQ ID NO: 1880945
aguggcugucagggaagau

SEQ ID NO: 2006015 - RNA, 19 nt, Artificial Sequence
  Description of Artificial Sequence: Synthetic oligonucleotide
  Antisense strand to SEQ ID NO: 2006014
aucuucccugacagccacu

SEQ ID NO: 2006016 - RNA, 19 nt, Artificial Sequence
  Description of Artificial Sequence: Synthetic oligonucleotide
  Sense strand starting at position 2877 of SEQ ID NO: 1880945
guggcugucagggaagaua

SEQ ID NO: 2006017 - RNA, 19 nt, Artificial Sequence
  Description of Artificial Sequence: Synthetic oligonucleotide
  Antisense strand to SEQ ID NO: 2006016
uaucuucccugacagccac

SEQ ID NO: 2006018 - RNA, 19 nt, Artificial Sequence
  Description of Artificial Sequence: Synthetic oligonucleotide
  Sense strand starting at position 2886 of SEQ ID NO: 1880945
agggaagauaagugucacu

SEQ ID NO: 2006019 - RNA, 19 nt, Artificial Sequence
  Description of Artificial Sequence: Synthetic oligonucleotide
  Antisense strand to SEQ ID NO: 2006018
agugacacuuaucuucccu

SEQ ID NO: 2006020 - RNA, 19 nt, Artificial Sequence
  Description of Artificial Sequence: Synthetic oligonucleotide
  Sense strand starting at position 2891 of SEQ ID NO: 1880945
agauaagugucacugcgag

SEQ ID NO: 2006021 - RNA, 19 nt, Artificial Sequence
  Description of Artificial Sequence: Synthetic oligonucleotide
  Antisense strand to SEQ ID NO: 2006020
cucgcagugacacuuaucu

SEQ ID NO: 2006022 - RNA, 19 nt, Artificial Sequence
  Description of Artificial Sequence: Synthetic oligonucleotide
  Sense strand starting at position 2926 of SEQ ID NO: 1880945
auaguugaaccaugaacuu

SEQ ID NO: 2006023 - RNA, 19 nt, Artificial Sequence
  Description of Artificial Sequence: Synthetic oligonucleotide
  Antisense strand to SEQ ID NO: 2006022
aaguucaugguucaacuau

SEQ ID NO: 2006024 - RNA, 19 nt, Artificial Sequence
  Description of Artificial Sequence: Synthetic oligonucleotide
  Sense strand starting at position 2952 of SEQ ID NO: 1880945
ggcuuuccuugggcauuua

SEQ ID NO: 2006025 - RNA, 19 nt, Artificial Sequence
  Description of Artificial Sequence: Synthetic oligonucleotide
  Antisense strand to SEQ ID NO: 2006024
uaaaugcccaaggaaagcc

SEQ ID NO: 2006026 - RNA, 19 nt, Artificial Sequence
  Description of Artificial Sequence: Synthetic oligonucleotide
  Sense strand starting at position 2963 of SEQ ID NO: 1880945
ggcauuuaguggcuguaau

SEQ ID NO: 2006027 - RNA, 19 nt, Artificial Sequence
  Description of Artificial Sequence: Synthetic oligonucleotide
  Antisense strand to SEQ ID NO: 2006026
auuacagccacuaaaugcc

SEQ ID NO: 2006028 - RNA, 19 nt, Artificial Sequence
  Description of Artificial Sequence: Synthetic oligonucleotide
  Sense strand starting at position 2964 of SEQ ID NO: 1880945
gcauuuaguggcuguaauc

SEQ ID NO: 2006029 - RNA, 19 nt, Artificial Sequence
  Description of Artificial Sequence: Synthetic oligonucleotide
  Antisense strand to SEQ ID NO: 2006028
gauuacagccacuaaaugc

SEQ ID NO: 2006030 - RNA, 19 nt, Artificial Sequence
  Description of Artificial Sequence: Synthetic oligonucleotide
  Sense strand starting at position 3112 of SEQ ID NO: 1880945
ugagucauccagcaccaga

SEQ ID NO: 2006031 - RNA, 19 nt, Artificial Sequence
  Description of Artificial Sequence: Synthetic oligonucleotide
  Antisense strand to SEQ ID NO: 2006030
ucuggugcuggaugacuca

SEQ ID NO: 2006032 - RNA, 19 nt, Artificial Sequence
  Description of Artificial Sequence: Synthetic oligonucleotide
  Sense strand starting at position 3130 of SEQ ID NO: 1880945
auauguucucguuaccuua

SEQ ID NO: 2006033 - RNA, 19 nt, Artificial Sequence
  Description of Artificial Sequence: Synthetic oligonucleotide
  Antisense strand to SEQ ID NO: 2006032
uaagguaacgagaacauau

SEQ ID NO: 2006034 - RNA, 19 nt, Artificial Sequence
  Description of Artificial Sequence: Synthetic oligonucleotide
  Sense strand starting at position 3373 of SEQ ID NO: 1880945
aggcauuaucuuugcacca

SEQ ID NO: 2006035 - RNA, 19 nt, Artificial Sequence
  Description of Artificial Sequence: Synthetic oligonucleotide
  Antisense strand to SEQ ID NO: 2006034
uggugcaaagauaaugccu

SEQ ID NO: 2006036 - RNA, 19 nt, Artificial Sequence
  Description of Artificial Sequence: Synthetic oligonucleotide
  Sense strand starting at position 3374 of SEQ ID NO: 1880945
ggcauuaucuuugcaccaa

SEQ ID NO: 2006037 - RNA, 19 nt, Artificial Sequence
  Description of Artificial Sequence: Synthetic oligonucleotide
  Antisense strand to SEQ ID NO: 2006036
uuggugcaaagauaaugcc

SEQ ID NO: 2006038 - RNA, 19 nt, Artificial Sequence
  Description of Artificial Sequence: Synthetic oligonucleotide
  Sense strand starting at position 3448 of SEQ ID NO: 1880945
ccaugugggucugcugaua

SEQ ID NO: 2006039 - RNA, 19 nt, Artificial Sequence
  Description of Artificial Sequence: Synthetic oligonucleotide
  Antisense strand to SEQ ID NO: 2006038
uaucagcagacccacaugg

SEQ ID NO: 2006040 - RNA, 19 nt, Artificial Sequence
  Description of Artificial Sequence: Synthetic oligonucleotide
  Sense strand starting at position 3552 of SEQ ID NO: 1880945
guguguuuauuuccucaga

SEQ ID NO: 2006041 - RNA, 19 nt, Artificial Sequence
  Description of Artificial Sequence: Synthetic oligonucleotide
  Antisense strand to SEQ ID NO: 2006040
ucugaggaaauaaacacac

SEQ ID NO: 2006042 - RNA, 19 nt, Artificial Sequence
  Description of Artificial Sequence: Synthetic oligonucleotide
  Sense strand starting at position 3694 of SEQ ID NO: 1880945
uaguaaugcaguuggauag

SEQ ID NO: 2006043 - RNA, 19 nt, Artificial Sequence
  Description of Artificial Sequence: Synthetic oligonucleotide
  Antisense strand to SEQ ID NO: 2006042
cuauccaacugcauuacua

SEQ ID NO: 2006044 - RNA, 19 nt, Artificial Sequence
  Description of Artificial Sequence: Synthetic oligonucleotide
  Sense strand starting at position 3858 of SEQ ID NO: 1880945
uauugagaguucccuguau

SEQ ID NO: 2006045 - RNA, 19 nt, Artificial Sequence
  Description of Artificial Sequence: Synthetic oligonucleotide
  Antisense strand to SEQ ID NO: 2006044
auacagggaacucucaaua

SEQ ID NO: 2006046 - RNA, 19 nt, Artificial Sequence
  Description of Artificial Sequence: Synthetic oligonucleotide
  Sense strand starting at position 3860 of SEQ ID NO: 1880945
uugagaguucccuguaugg

SEQ ID NO: 2006047 - RNA, 19 nt, Artificial Sequence
  Description of Artificial Sequence: Synthetic oligonucleotide
  Antisense strand to SEQ ID NO: 2006046
ccauacagggaacucucaa

SEQ ID NO: 2006048 - RNA, 19 nt, Artificial Sequence
  Description of Artificial Sequence: Synthetic oligonucleotide
  Sense strand starting at position 3919 of SEQ ID NO: 1880945
cugcuuguaguuuaucaga

SEQ ID NO: 2006049 - RNA, 19 nt, Artificial Sequence
  Description of Artificial Sequence: Synthetic oligonucleotide
  Antisense strand to SEQ ID NO: 2006048
ucugauaaacuacaagcag

SEQ ID NO: 2006050 - RNA, 19 nt, Artificial Sequence
  Description of Artificial Sequence: Synthetic oligonucleotide
  Sense strand starting at position 3921 of SEQ ID NO: 1880945
gcuuguaguuuaucagaug

SEQ ID NO: 2006051 - RNA, 19 nt, Artificial Sequence
  Description of Artificial Sequence: Synthetic oligonucleotide
  Antisense strand to SEQ ID NO: 2006050
caucugauaaacuacaagc

SEQ ID NO: 2006052 - RNA, 19 nt, Artificial Sequence
  Description of Artificial Sequence: Synthetic oligonucleotide
  Sense strand starting at position 3933 of SEQ ID NO: 1880945
ucagauguugcagagccaa

SEQ ID NO: 2006053 - RNA, 19 nt, Artificial Sequence
  Description of Artificial Sequence: Synthetic oligonucleotide
  Antisense strand to SEQ ID NO: 2006052
uuggcucugcaacaucuga

SEQ ID NO: 2006054 - RNA, 19 nt, Artificial Sequence
  Description of Artificial Sequence: Synthetic oligonucleotide
  Sense strand starting at position 93 of SEQ ID NO: 1880946
ggaaaucauuaagagaaca

SEQ ID NO: 2006055 - RNA, 19 nt, Artificial Sequence
  Description of Artificial Sequence: Synthetic oligonucleotide
  Antisense strand to SEQ ID NO: 2006054
uguucucuuaaugauuucc

SEQ ID NO: 2006056 - RNA, 19 nt, Artificial Sequence
  Description of Artificial Sequence: Synthetic oligonucleotide
  Sense strand starting at position 130 of SEQ ID NO: 1880946
guaucuuugcauugcauuu

SEQ ID NO: 2006057 - RNA, 19 nt, Artificial Sequence
  Description of Artificial Sequence: Synthetic oligonucleotide
  Antisense strand to SEQ ID NO: 2006056
aaaugcaaugcaaagauac

SEQ ID NO: 2006058 - RNA, 19 nt, Artificial Sequence
  Description of Artificial Sequence: Synthetic oligonucleotide
  Sense strand starting at position 185 of SEQ ID NO: 1880946
cugucagucauuuggugua

SEQ ID NO: 2006059 - RNA, 19 nt, Artificial Sequence
  Description of Artificial Sequence: Synthetic oligonucleotide
  Antisense strand to SEQ ID NO: 2006058
uacaccaaaugacugacag

SEQ ID NO: 2006060 - RNA, 19 nt, Artificial Sequence
  Description of Artificial Sequence: Synthetic oligonucleotide
  Sense strand starting at position 187 of SEQ ID NO: 1880946
gucagucauuugguguaca

SEQ ID NO: 2006061 - RNA, 19 nt, Artificial Sequence
  Description of Artificial Sequence: Synthetic oligonucleotide
  Antisense strand to SEQ ID NO: 2006060
uguacaccaaaugacugac

SEQ ID NO: 2006062 - RNA, 19 nt, Artificial Sequence
  Description of Artificial Sequence: Synthetic oligonucleotide
  Sense strand starting at position 211 of SEQ ID NO: 1880946
gccucauguguacacuuaa

SEQ ID NO: 2006063 - RNA, 19 nt, Artificial Sequence
  Description of Artificial Sequence: Synthetic oligonucleotide
  Antisense strand to SEQ ID NO: 2006062
uuaaguguacacaugaggc

SEQ ID NO: 2006064 - RNA, 19 nt, Artificial Sequence
  Description of Artificial Sequence: Synthetic oligonucleotide
  Sense strand starting at position 255 of SEQ ID NO: 1880946
gucacaacauguguaauaa

SEQ ID NO: 2006065 - RNA, 19 nt, Artificial Sequence
  Description of Artificial Sequence: Synthetic oligonucleotide
  Antisense strand to SEQ ID NO: 2006064
uuauuacacauguugugac

SEQ ID NO: 2006066 - RNA, 19 nt, Artificial Sequence
  Description of Artificial Sequence: Synthetic oligonucleotide
  Sense strand starting at position 411 of SEQ ID NO: 1880946
guaacuggaaaucguauua

SEQ ID NO: 2006067 - RNA, 19 nt, Artificial Sequence
  Description of Artificial Sequence: Synthetic oligonucleotide
  Antisense strand to SEQ ID NO: 2006066
uaauacgauuuccaguuac

SEQ ID NO: 2006068 - RNA, 19 nt, Artificial Sequence
  Description of Artificial Sequence: Synthetic oligonucleotide
  Sense strand starting at position 416 of SEQ ID NO: 1880946
uggaaaucguauuauuuga

SEQ ID NO: 2006069 - RNA, 19 nt, Artificial Sequence
  Description of Artificial Sequence: Synthetic oligonucleotide
  Antisense strand to SEQ ID NO: 2006068
ucaaauaauacgauuucca

SEQ ID NO: 2006070 - RNA, 19 nt, Artificial Sequence
  Description of Artificial Sequence: Synthetic oligonucleotide
  Sense strand starting at position 458 of SEQ ID NO: 1880946
gaugcuuccuagucugaaa

SEQ ID NO: 2006071 - RNA, 19 nt, Artificial Sequence
  Description of Artificial Sequence: Synthetic oligonucleotide
  Antisense strand to SEQ ID NO: 2006070
uuucagacuaggaagcauc

SEQ ID NO: 2006072 - RNA, 19 nt, Artificial Sequence
  Description of Artificial Sequence: Synthetic oligonucleotide
  Sense strand starting at position 633 of SEQ ID NO: 1880946
ggguagugaguuggugaau

SEQ ID NO: 2006073 - RNA, 19 nt, Artificial Sequence
  Description of Artificial Sequence: Synthetic oligonucleotide
  Antisense strand to SEQ ID NO: 2006072
auucaccaacucacuaccc

SEQ ID NO: 2006074 - RNA, 19 nt, Artificial Sequence
  Description of Artificial Sequence: Synthetic oligonucleotide
  Sense strand starting at position 702 of SEQ ID NO: 1880946
gaagauuaaucuguaaagu

SEQ ID NO: 2006075 - RNA, 19 nt, Artificial Sequence
  Description of Artificial Sequence: Synthetic oligonucleotide
  Antisense strand to SEQ ID NO: 2006074
acuuuacagauuaaucuuc

SEQ ID NO: 2006076 - RNA, 19 nt, Artificial Sequence
  Description of Artificial Sequence: Synthetic oligonucleotide
  Sense strand starting at position 711 of SEQ ID NO: 1880946
ucuguaaaguguguaggaa

SEQ ID NO: 2006077 - RNA, 19 nt, Artificial Sequence
  Description of Artificial Sequence: Synthetic oligonucleotide
  Antisense strand to SEQ ID NO: 2006076
uuccuacacacuuuacaga

SEQ ID NO: 2006078 - RNA, 19 nt, Artificial Sequence
  Description of Artificial Sequence: Synthetic oligonucleotide
  Sense strand starting at position 736 of SEQ ID NO: 1880946
augggauaaucuguaaagu

SEQ ID NO: 2006079 - RNA, 19 nt, Artificial Sequence
  Description of Artificial Sequence: Synthetic oligonucleotide
  Antisense strand to SEQ ID NO: 2006078
acuuuacagauuaucccau

SEQ ID NO: 2006080 - RNA, 19 nt, Artificial Sequence
  Description of Artificial Sequence: Synthetic oligonucleotide
  Sense strand starting at position 751 of SEQ ID NO: 1880946
aaguguguaggauggauau

SEQ ID NO: 2006081 - RNA, 19 nt, Artificial Sequence
  Description of Artificial Sequence: Synthetic oligonucleotide
  Antisense strand to SEQ ID NO: 2006080
auauccauccuacacacuu

SEQ ID NO: 2006082 - RNA, 19 nt, Artificial Sequence
  Description of Artificial Sequence: Synthetic oligonucleotide
  Sense strand starting at position 753 of SEQ ID NO: 1880946
guguguaggauggauauau

SEQ ID NO: 2006083 - RNA, 19 nt, Artificial Sequence
  Description of Artificial Sequence: Synthetic oligonucleotide
  Antisense strand to SEQ ID NO: 2006082
auauauccauccuacacac

SEQ ID NO: 2006084 - RNA, 19 nt, Artificial Sequence
  Description of Artificial Sequence: Synthetic oligonucleotide
  Sense strand starting at position 876 of SEQ ID NO: 1880946
uuaguuugucucuagugaa

SEQ ID NO: 2006085 - RNA, 19 nt, Artificial Sequence
  Description of Artificial Sequence: Synthetic oligonucleotide
  Antisense strand to SEQ ID NO: 2006084
uucacuagagacaaacuaa

SEQ ID NO: 2006086 - RNA, 19 nt, Artificial Sequence
  Description of Artificial Sequence: Synthetic oligonucleotide
  Sense strand starting at position 1112 of SEQ ID NO: 1880946
auuugaaagugagaucagu

SEQ ID NO: 2006087 - RNA, 19 nt, Artificial Sequence
  Description of Artificial Sequence: Synthetic oligonucleotide
  Antisense strand to SEQ ID NO: 2006086
acugaucucacuuucaaau

SEQ ID NO: 2006088 - RNA, 19 nt, Artificial Sequence
  Description of Artificial Sequence: Synthetic oligonucleotide
  Sense strand starting at position 1118 of SEQ ID NO: 1880946
aagugagaucagugaggca

SEQ ID NO: 2006089 - RNA, 19 nt, Artificial Sequence
  Description of Artificial Sequence: Synthetic oligonucleotide
  Antisense strand to SEQ ID NO: 2006088
ugccucacugaucucacuu

SEQ ID NO: 2006090 - RNA, 19 nt, Artificial Sequence
  Description of Artificial Sequence: Synthetic oligonucleotide
  Sense strand starting at position 2114 of SEQ ID NO: 1880946
cccagucaucuguauauug

SEQ ID NO: 2006091 - RNA, 19 nt, Artificial Sequence
  Description of Artificial Sequence: Synthetic oligonucleotide
  Antisense strand to SEQ ID NO: 2006090
caauauacagaugacuggg

SEQ ID NO: 2006092 - RNA, 19 nt, Artificial Sequence
  Description of Artificial Sequence: Synthetic oligonucleotide
  Sense strand starting at position 2116 of SEQ ID NO: 1880946
cagucaucuguauauuggu

SEQ ID NO: 2006093 - RNA, 19 nt, Artificial Sequence
  Description of Artificial Sequence: Synthetic oligonucleotide
  Antisense strand to SEQ ID NO: 2006092
accaauauacagaugacug

SEQ ID NO: 2006094 - RNA, 19 nt, Artificial Sequence
  Description of Artificial Sequence: Synthetic oligonucleotide
  Sense strand starting at position 2122 of SEQ ID NO: 1880946
ucuguauauugguuaccaa

SEQ ID NO: 2006095 - RNA, 19 nt, Artificial Sequence
  Description of Artificial Sequence: Synthetic oligonucleotide
  Antisense strand to SEQ ID NO: 2006094
uugguaaccaauauacaga

SEQ ID NO: 2006096 - RNA, 19 nt, Artificial Sequence
  Description of Artificial Sequence: Synthetic oligonucleotide
  Sense strand starting at position 2140 of SEQ ID NO: 1880946
acacguggccgcguagaau

SEQ ID NO: 2006097 - RNA, 19 nt, Artificial Sequence
  Description of Artificial Sequence: Synthetic oligonucleotide
  Antisense strand to SEQ ID NO: 2006096
auucuacgcggccacgugu

SEQ ID NO: 2006098 - RNA, 19 nt, Artificial Sequence
  Description of Artificial Sequence: Synthetic oligonucleotide
  Sense strand starting at position 2204 of SEQ ID NO: 1880946
cugagaaugcgaugaggaa

SEQ ID NO: 2006099 - RNA, 19 nt, Artificial Sequence
  Description of Artificial Sequence: Synthetic oligonucleotide
  Antisense strand to SEQ ID NO: 2006098
uuccucaucgcauucucag

SEQ ID NO: 2006100 - RNA, 19 nt, Artificial Sequence
  Description of Artificial Sequence: Synthetic oligonucleotide
  Sense strand starting at position 2390 of SEQ ID NO: 1880946
aaugaagagguuugugcaa

SEQ ID NO: 2006101 - RNA, 19 nt, Artificial Sequence
  Description of Artificial Sequence: Synthetic oligonucleotide
  Antisense strand to SEQ ID NO: 2006100
uugcacaaaccucuucauu

SEQ ID NO: 2006102 - RNA, 19 nt, Artificial Sequence
  Description of Artificial Sequence: Synthetic oligonucleotide
  Sense strand starting at position 2411 of SEQ ID NO: 1880946
uguggaauuuguagcgaag

SEQ ID NO: 2006103 - RNA, 19 nt, Artificial Sequence
  Description of Artificial Sequence: Synthetic oligonucleotide
  Antisense strand to SEQ ID NO: 2006102
cuucgcuacaaauuccaca

SEQ ID NO: 2006104 - RNA, 19 nt, Artificial Sequence
  Description of Artificial Sequence: Synthetic oligonucleotide
  Sense strand starting at position 2455 of SEQ ID NO: 1880946
aaggaaggcuccuuuaugu

SEQ ID NO: 2006105 - RNA, 19 nt, Artificial Sequence
  Description of Artificial Sequence: Synthetic oligonucleotide
  Antisense strand to SEQ ID NO: 2006104
acauaaaggagccuuccuu

SEQ ID NO: 2006106 - RNA, 19 nt, Artificial Sequence
  Description of Artificial Sequence: Synthetic oligonucleotide
  Sense strand starting at position 2512 of SEQ ID NO: 1880946
uuggaagacaccugucagu

SEQ ID NO: 2006107 - RNA, 19 nt, Artificial Sequence
  Description of Artificial Sequence: Synthetic oligonucleotide
  Antisense strand to SEQ ID NO: 2006106
acugacaggugucuuccaa

SEQ ID NO: 2006108 - RNA, 19 nt, Artificial Sequence
  Description of Artificial Sequence: Synthetic oligonucleotide
  Sense strand starting at position 2541 of SEQ ID NO: 1880946
uuugucagucuccaagaca

SEQ ID NO: 2006109 - RNA, 19 nt, Artificial Sequence
  Description of Artificial Sequence: Synthetic oligonucleotide
  Antisense strand to SEQ ID NO: 2006108
ugucuuggagacugacaaa

SEQ ID NO: 2006110 - RNA, 19 nt, Artificial Sequence
  Description of Artificial Sequence: Synthetic oligonucleotide
  Sense strand starting at position 2576 of SEQ ID NO: 1880946
ucuagugauccuuaccuca

SEQ ID NO: 2006111 - RNA, 19 nt, Artificial Sequence
  Description of Artificial Sequence: Synthetic oligonucleotide
  Antisense strand to SEQ ID NO: 2006110
ugagguaaggaucacuaga

SEQ ID NO: 2006112 - RNA, 19 nt, Artificial Sequence
  Description of Artificial Sequence: Synthetic oligonucleotide
  Sense strand starting at position 2579 of SEQ ID NO: 1880946
agugauccuuaccucauua

SEQ ID NO: 2006113 - RNA, 19 nt, Artificial Sequence
  Description of Artificial Sequence: Synthetic oligonucleotide
  Antisense strand to SEQ ID NO: 2006112
uaaugagguaaggaucacu

SEQ ID NO: 2006114 - RNA, 19 nt, Artificial Sequence
  Description of Artificial Sequence: Synthetic oligonucleotide
  Sense strand starting at position 2926 of SEQ ID NO: 1880946
gcagucuuacuuuauugaa

SEQ ID NO: 2006115 - RNA, 19 nt, Artificial Sequence
  Description of Artificial Sequence: Synthetic oligonucleotide
  Antisense strand to SEQ ID NO: 2006114
uucaauaaaguaagacugc

SEQ ID NO: 2006116 - RNA, 19 nt, Artificial Sequence
  Description of Artificial Sequence: Synthetic oligonucleotide
  Sense strand starting at position 2995 of SEQ ID NO: 1880946
ugggucauccucggaaaca

SEQ ID NO: 2006117 - RNA, 19 nt, Artificial Sequence
  Description of Artificial Sequence: Synthetic oligonucleotide
  Antisense strand to SEQ ID NO: 2006116
uguuuccgaggaugaccca

SEQ ID NO: 2006118 - RNA, 19 nt, Artificial Sequence
  Description of Artificial Sequence: Synthetic oligonucleotide
  Sense strand starting at position 3049 of SEQ ID NO: 1880946
ggguaauucuuccuaaaca

SEQ ID NO: 2006119 - RNA, 19 nt, Artificial Sequence
  Description of Artificial Sequence: Synthetic oligonucleotide
  Antisense strand to SEQ ID NO: 2006118
uguuuaggaagaauuaccc

SEQ ID NO: 2006120 - RNA, 19 nt, Artificial Sequence
  Description of Artificial Sequence: Synthetic oligonucleotide
  Sense strand starting at position 3187 of SEQ ID NO: 1880946
gcuugaaauaaguagaagu

SEQ ID NO: 2006121 - RNA, 19 nt, Artificial Sequence
  Description of Artificial Sequence: Synthetic oligonucleotide
  Antisense strand to SEQ ID NO: 2006120
acuucuacuuauuucaagc

SEQ ID NO: 2006122 - RNA, 19 nt, Artificial Sequence
  Description of Artificial Sequence: Synthetic oligonucleotide
  Sense strand starting at position 3447 of SEQ ID NO: 1880946
acacccuugugauuacauu

SEQ ID NO: 2006123 - RNA, 19 nt, Artificial Sequence
  Description of Artificial Sequence: Synthetic oligonucleotide
  Antisense strand to SEQ ID NO: 2006122
aauguaaucacaagggugu

SEQ ID NO: 2006124 - RNA, 19 nt, Artificial Sequence
  Description of Artificial Sequence: Synthetic oligonucleotide
  Sense strand starting at position 3585 of SEQ ID NO: 1880946
agauacuggugcuuggaga

SEQ ID NO: 2006125 - RNA, 19 nt, Artificial Sequence
  Description of Artificial Sequence: Synthetic oligonucleotide
  Antisense strand to SEQ ID NO: 2006124
ucuccaagcaccaguaucu

SEQ ID NO: 2006126 - RNA, 19 nt, Artificial Sequence
  Description of Artificial Sequence: Synthetic oligonucleotide
  Sense strand starting at position 3614 of SEQ ID NO: 1880946
uuuauucgauuugaccaaa

SEQ ID NO: 2006127 - RNA, 19 nt, Artificial Sequence
  Description of Artificial Sequence: Synthetic oligonucleotide
  Antisense strand to SEQ ID NO: 2006126
uuuggucaaaucgaauaaa

SEQ ID NO: 2006128 - RNA, 19 nt, Artificial Sequence
  Description of Artificial Sequence: Synthetic oligonucleotide
  Sense strand starting at position 3646 of SEQ ID NO: 1880946
agagcaagaucucucagau

SEQ ID NO: 2006129 - RNA, 19 nt, Artificial Sequence
  Description of Artificial Sequence: Synthetic oligonucleotide
  Antisense strand to SEQ ID NO: 2006128
aucugagagaucuugcucu

SEQ ID NO: 2006130 - RNA, 19 nt, Artificial Sequence
  Description of Artificial Sequence: Synthetic oligonucleotide
  Sense strand starting at position 3747 of SEQ ID NO: 1880946
gucuguguuucuuccauuu

SEQ ID NO: 2006131 - RNA, 19 nt, Artificial Sequence
  Description of Artificial Sequence: Synthetic oligonucleotide
  Antisense strand to SEQ ID NO: 2006130
aaauggaagaaacacagac

SEQ ID NO: 2006132 - RNA, 19 nt, Artificial Sequence
  Description of Artificial Sequence: Synthetic oligonucleotide
  Sense strand starting at position 3846 of SEQ ID NO: 1880946
uucuuaugacccugaaguu

SEQ ID NO: 2006133 - RNA, 19 nt, Artificial Sequence
  Description of Artificial Sequence: Synthetic oligonucleotide
  Antisense strand to SEQ ID NO: 2006132
aacuucagggucauaagaa

SEQ ID NO: 2006134 - RNA, 19 nt, Artificial Sequence
  Description of Artificial Sequence: Synthetic oligonucleotide
  Sense strand starting at position 92 of SEQ ID NO: 1880947
aagggagucuuaucauaua

SEQ ID NO: 2006135 - RNA, 19 nt, Artificial Sequence
  Description of Artificial Sequence: Synthetic oligonucleotide
  Antisense strand to SEQ ID NO: 2006134
uauaugauaagacucccuu

SEQ ID NO: 2006136 - RNA, 19 nt, Artificial Sequence
  Description of Artificial Sequence: Synthetic oligonucleotide
  Sense strand starting at position 164 of SEQ ID NO: 1880947
acuguuggccaaggucaua

SEQ ID NO: 2006137 - RNA, 19 nt, Artificial Sequence
  Description of Artificial Sequence: Synthetic oligonucleotide
  Antisense strand to SEQ ID NO: 2006136
uaugaccuuggccaacagu

SEQ ID NO: 2006138 - RNA, 19 nt, Artificial Sequence
  Description of Artificial Sequence: Synthetic oligonucleotide
  Sense strand starting at position 346 of SEQ ID NO: 1880947
uuaaucagugcacaggauu

SEQ ID NO: 2006139 - RNA, 19 nt, Artificial Sequence
  Description of Artificial Sequence: Synthetic oligonucleotide
  Antisense strand to SEQ ID NO: 2006138
aauccugugcacugauuaa

SEQ ID NO: 2006140 - RNA, 19 nt, Artificial Sequence
  Description of Artificial Sequence: Synthetic oligonucleotide
  Sense strand starting at position 461 of SEQ ID NO: 1880947
uucuauaaagccugucuga

SEQ ID NO: 2006141 - RNA, 19 nt, Artificial Sequence
  Description of Artificial Sequence: Synthetic oligonucleotide
  Antisense strand to SEQ ID NO: 2006140
ucagacaggcuuuauagaa

SEQ ID NO: 2006142 - RNA, 19 nt, Artificial Sequence
  Description of Artificial Sequence: Synthetic oligonucleotide
  Sense strand starting at position 551 of SEQ ID NO: 1880947
ccacuacugcugggaauga

SEQ ID NO: 2006143 - RNA, 19 nt, Artificial Sequence
  Description of Artificial Sequence: Synthetic oligonucleotide
  Antisense strand to SEQ ID NO: 2006142
ucauucccagcaguagugg

SEQ ID NO: 2006144 - RNA, 19 nt, Artificial Sequence
  Description of Artificial Sequence: Synthetic oligonucleotide
  Sense strand starting at position 670 of SEQ ID NO: 1880947
gacgacuugcuuugaccaa

SEQ ID NO: 2006145 - RNA, 19 nt, Artificial Sequence
  Description of Artificial Sequence: Synthetic oligonucleotide
  Antisense strand to SEQ ID NO: 2006144
uuggucaaagcaagucguc

SEQ ID NO: 2006146 - RNA, 19 nt, Artificial Sequence
  Description of Artificial Sequence: Synthetic oligonucleotide
  Sense strand starting at position 693 of SEQ ID NO: 1880947
auguaauagaugugaugga

SEQ ID NO: 2006147 - RNA, 19 nt, Artificial Sequence
  Description of Artificial Sequence: Synthetic oligonucleotide
  Antisense strand to SEQ ID NO: 2006146
uccaucacaucuauuacau

SEQ ID NO: 2006148 - RNA, 19 nt, Artificial Sequence
  Description of Artificial Sequence: Synthetic oligonucleotide
  Sense strand starting at position 697 of SEQ ID NO: 1880947
aauagaugugauggaguuu

SEQ ID NO: 2006149 - RNA, 19 nt, Artificial Sequence
  Description of Artificial Sequence: Synthetic oligonucleotide
  Antisense strand to SEQ ID NO: 2006148
aaacuccaucacaucuauu

SEQ ID NO: 2006150 - RNA, 19 nt, Artificial Sequence
  Description of Artificial Sequence: Synthetic oligonucleotide
  Sense strand starting at position 723 of SEQ ID NO: 1880947
gagcuuaggccucaauaag

SEQ ID NO: 2006151 - RNA, 19 nt, Artificial Sequence
  Description of Artificial Sequence: Synthetic oligonucleotide
  Antisense strand to SEQ ID NO: 2006150
cuuauugaggccuaagcuc

SEQ ID NO: 2006152 - RNA, 19 nt, Artificial Sequence
  Description of Artificial Sequence: Synthetic oligonucleotide
  Sense strand starting at position 965 of SEQ ID NO: 1880947
acagaauugugagcccaua

SEQ ID NO: 2006153 - RNA, 19 nt, Artificial Sequence
  Description of Artificial Sequence: Synthetic oligonucleotide
  Antisense strand to SEQ ID NO: 2006152
uaugggcucacaauucugu

SEQ ID NO: 2006154 - RNA, 19 nt, Artificial Sequence
  Description of Artificial Sequence: Synthetic oligonucleotide
  Sense strand starting at position 1057 of SEQ ID NO: 1880947
cagugacuauugguuuaca

SEQ ID NO: 2006155 - RNA, 19 nt, Artificial Sequence
  Description of Artificial Sequence: Synthetic oligonucleotide
  Antisense strand to SEQ ID NO: 2006154
uguaaaccaauagucacug

SEQ ID NO: 2006156 - RNA, 19 nt, Artificial Sequence
  Description of Artificial Sequence: Synthetic oligonucleotide
  Sense strand starting at position 1058 of SEQ ID NO: 1880947
agugacuauugguuuacaa

SEQ ID NO: 2006157 - RNA, 19 nt, Artificial Sequence
  Description of Artificial Sequence: Synthetic oligonucleotide
  Antisense strand to SEQ ID NO: 2006156
uuguaaaccaauagucacu

SEQ ID NO: 2006158 - RNA, 19 nt, Artificial Sequence
  Description of Artificial Sequence: Synthetic oligonucleotide
  Sense strand starting at position 1091 of SEQ ID NO: 1880947
agaauuacucagugagacu

SEQ ID NO: 2006159 - RNA, 19 nt, Artificial Sequence
  Description of Artificial Sequence: Synthetic oligonucleotide
  Antisense strand to SEQ ID NO: 2006158
agucucacugaguaauucu

SEQ ID NO: 2006160 - RNA, 19 nt, Artificial Sequence
  Description of Artificial Sequence: Synthetic oligonucleotide
  Sense strand starting at position 1124 of SEQ ID NO: 1880947
uuggcauugguacaauaga

SEQ ID NO: 2006161 - RNA, 19 nt, Artificial Sequence
  Description of Artificial Sequence: Synthetic oligonucleotide
  Antisense strand to SEQ ID NO: 2006160
ucuauuguaccaaugccaa

SEQ ID NO: 2006162 - RNA, 19 nt, Artificial Sequence
  Description of Artificial Sequence: Synthetic oligonucleotide
  Sense strand starting at position 1205 of SEQ ID NO: 1880947
cgggaguaugcucagaggu

SEQ ID NO: 2006163 - RNA, 19 nt, Artificial Sequence
  Description of Artificial Sequence: Synthetic oligonucleotide
  Antisense strand to SEQ ID NO: 2006162
accucugagcauacucccg

SEQ ID NO: 2006164 - RNA, 19 nt, Artificial Sequence
  Description of Artificial Sequence: Synthetic oligonucleotide
  Sense strand starting at position 1313 of SEQ ID NO: 1880947
augggucucuggagaggua

SEQ ID NO: 2006165 - RNA, 19 nt, Artificial Sequence
  Description of Artificial Sequence: Synthetic oligonucleotide
  Antisense strand to SEQ ID NO: 2006164
uaccucuccagagacccau

SEQ ID NO: 2006166 - RNA, 19 nt, Artificial Sequence
  Description of Artificial Sequence: Synthetic oligonucleotide
  Sense strand starting at position 1329 of SEQ ID NO: 1880947
guaauuaggccaugaugac

SEQ ID NO: 2006167 - RNA, 19 nt, Artificial Sequence
  Description of Artificial Sequence: Synthetic oligonucleotide
  Antisense strand to SEQ ID NO: 2006166
gucaucauggccuaauuac

SEQ ID NO: 2006168 - RNA, 19 nt, Artificial Sequence
  Description of Artificial Sequence: Synthetic oligonucleotide
  Sense strand starting at position 1338 of SEQ ID NO: 1880947
ccaugaugacucugacuuc

SEQ ID NO: 2006169 - RNA, 19 nt, Artificial Sequence
  Description of Artificial Sequence: Synthetic oligonucleotide
  Antisense strand to SEQ ID NO: 2006168
gaagucagagucaucaugg

SEQ ID NO: 2006170 - RNA, 19 nt, Artificial Sequence
  Description of Artificial Sequence: Synthetic oligonucleotide
  Sense strand starting at position 1363 of SEQ ID NO: 1880947
gaauuaaugccaugauugu

SEQ ID NO: 2006171 - RNA, 19 nt, Artificial Sequence
  Description of Artificial Sequence: Synthetic oligonucleotide
  Antisense strand to SEQ ID NO: 2006170
acaaucauggcauuaauuc

SEQ ID NO: 2006172 - RNA, 19 nt, Artificial Sequence
  Description of Artificial Sequence: Synthetic oligonucleotide
  Sense strand starting at position 1390 of SEQ ID NO: 1880947
guuaauuaucaugggaaug

SEQ ID NO: 2006173 - RNA, 19 nt, Artificial Sequence
  Description of Artificial Sequence: Synthetic oligonucleotide
  Antisense strand to SEQ ID NO: 2006172
cauucccaugauaauuaac

SEQ ID NO: 2006174 - RNA, 19 nt, Artificial Sequence
  Description of Artificial Sequence: Synthetic oligonucleotide
  Sense strand starting at position 2017 of SEQ ID NO: 1880947
auagaaaugugcccagaua

SEQ ID NO: 2006175 - RNA, 19 nt, Artificial Sequence
  Description of Artificial Sequence: Synthetic oligonucleotide
  Antisense strand to SEQ ID NO: 2006174
uaucugggcacauuucuau

SEQ ID NO: 2006176 - RNA, 19 nt, Artificial Sequence
  Description of Artificial Sequence: Synthetic oligonucleotide
  Sense strand starting at position 2242 of SEQ ID NO: 1880947
auaccauauggcgaugacu

SEQ ID NO: 2006177 - RNA, 19 nt, Artificial Sequence
  Description of Artificial Sequence: Synthetic oligonucleotide
  Antisense strand to SEQ ID NO: 2006176
agucaucgccauaugguau

SEQ ID NO: 2006178 - RNA, 19 nt, Artificial Sequence
  Description of Artificial Sequence: Synthetic oligonucleotide
  Sense strand starting at position 2286 of SEQ ID NO: 1880947
acaggaaauugaguuugca

SEQ ID NO: 2006179 - RNA, 19 nt, Artificial Sequence
  Description of Artificial Sequence: Synthetic oligonucleotide
  Antisense strand to SEQ ID NO: 2006178
ugcaaacucaauuuccugu

SEQ ID NO: 2006180 - RNA, 19 nt, Artificial Sequence
  Description of Artificial Sequence: Synthetic oligonucleotide
  Sense strand starting at position 2296 of SEQ ID NO: 1880947
gaguuugcacagcaagagu

SEQ ID NO: 2006181 - RNA, 19 nt, Artificial Sequence
  Description of Artificial Sequence: Synthetic oligonucleotide
  Antisense strand to SEQ ID NO: 2006180
acucuugcugugcaaacuc

SEQ ID NO: 2006182 - RNA, 19 nt, Artificial Sequence
  Description of Artificial Sequence: Synthetic oligonucleotide
  Sense strand starting at position 2328 of SEQ ID NO: 1880947
uuuguaagauagucaaaga

SEQ ID NO: 2006183 - RNA, 19 nt, Artificial Sequence
  Description of Artificial Sequence: Synthetic oligonucleotide
  Antisense strand to SEQ ID NO: 2006182
ucuuugacuaucuuacaaa

SEQ ID NO: 2006184 - RNA, 19 nt, Artificial Sequence
  Description of Artificial Sequence: Synthetic oligonucleotide
  Sense strand starting at position 2665 of SEQ ID NO: 1880947
aaugucauauuugagcaga

SEQ ID NO: 2006185 - RNA, 19 nt, Artificial Sequence
  Description of Artificial Sequence: Synthetic oligonucleotide
  Antisense strand to SEQ ID NO: 2006184
ucugcucaaauaugacauu

SEQ ID NO: 2006186 - RNA, 19 nt, Artificial Sequence
  Description of Artificial Sequence: Synthetic oligonucleotide
  Sense strand starting at position 2675 of SEQ ID NO: 1880947
uugagcagauaucugacaa

SEQ ID NO: 2006187 - RNA, 19 nt, Artificial Sequence
  Description of Artificial Sequence: Synthetic oligonucleotide
  Antisense strand to SEQ ID NO: 2006186
uugucagauaucugcucaa

SEQ ID NO: 2006188 - RNA, 19 nt, Artificial Sequence
  Description of Artificial Sequence: Synthetic oligonucleotide
  Sense strand starting at position 2802 of SEQ ID NO: 1880947
agaguaguguggcugagua

SEQ ID NO: 2006189 - RNA, 19 nt, Artificial Sequence
  Description of Artificial Sequence: Synthetic oligonucleotide
  Antisense strand to SEQ ID NO: 2006188
uacucagccacacuacucu

SEQ ID NO: 2006190 - RNA, 19 nt, Artificial Sequence
  Description of Artificial Sequence: Synthetic oligonucleotide
  Sense strand starting at position 2812 of SEQ ID NO: 1880947
ggcugaguagugggagcaa

SEQ ID NO: 2006191 - RNA, 19 nt, Artificial Sequence
  Description of Artificial Sequence: Synthetic oligonucleotide
  Antisense strand to SEQ ID NO: 2006190
uugcucccacuacucagcc

SEQ ID NO: 2006192 - RNA, 19 nt, Artificial Sequence
  Description of Artificial Sequence: Synthetic oligonucleotide
  Sense strand starting at position 2964 of SEQ ID NO: 1880947
cucuuacuggcacauugau

SEQ ID NO: 2006193 - RNA, 19 nt, Artificial Sequence
  Description of Artificial Sequence: Synthetic oligonucleotide
  Antisense strand to SEQ ID NO: 2006192
aucaaugugccaguaagag

SEQ ID NO: 2006194 - RNA, 19 nt, Artificial Sequence
  Description of Artificial Sequence: Synthetic oligonucleotide
  Sense strand starting at position 3149 of SEQ ID NO: 1880947
gguggauugaaaugugcag

SEQ ID NO: 2006195 - RNA, 19 nt, Artificial Sequence
  Description of Artificial Sequence: Synthetic oligonucleotide
  Antisense strand to SEQ ID NO: 2006194
cugcacauuucaauccacc

SEQ ID NO: 2006196 - RNA, 19 nt, Artificial Sequence
  Description of Artificial Sequence: Synthetic oligonucleotide
  Sense strand starting at position 3422 of SEQ ID NO: 1880947
gcaggaggauugcuuuaua

SEQ ID NO: 2006197 - RNA, 19 nt, Artificial Sequence
  Description of Artificial Sequence: Synthetic oligonucleotide
  Antisense strand to SEQ ID NO: 2006196
uauaaagcaauccuccugc

SEQ ID NO: 2006198 - RNA, 19 nt, Artificial Sequence
  Description of Artificial Sequence: Synthetic oligonucleotide
  Sense strand starting at position 3432 of SEQ ID NO: 1880947
ugcuuuauaccaggaguuu

SEQ ID NO: 2006199 - RNA, 19 nt, Artificial Sequence
  Description of Artificial Sequence: Synthetic oligonucleotide
  Antisense strand to SEQ ID NO: 2006198
aaacuccugguauaaagca

SEQ ID NO: 2006200 - RNA, 19 nt, Artificial Sequence
  Description of Artificial Sequence: Synthetic oligonucleotide
  Sense strand starting at position 3433 of SEQ ID NO: 1880947
gcuuuauaccaggaguuua

SEQ ID NO: 2006201 - RNA, 19 nt, Artificial Sequence
  Description of Artificial Sequence: Synthetic oligonucleotide
  Antisense strand to SEQ ID NO: 2006200
uaaacuccugguauaaagc

SEQ ID NO: 2006202 - RNA, 19 nt, Artificial Sequence
  Description of Artificial Sequence: Synthetic oligonucleotide
  Sense strand starting at position 3581 of SEQ ID NO: 1880947
ggaguucaaggaugcauua

SEQ ID NO: 2006203 - RNA, 19 nt, Artificial Sequence
  Description of Artificial Sequence: Synthetic oligonucleotide
  Antisense strand to SEQ ID NO: 2006202
uaaugcauccuugaacucc

SEQ ID NO: 2006204 - RNA, 19 nt, Artificial Sequence
  Description of Artificial Sequence: Synthetic oligonucleotide
  Sense strand starting at position 3872 of SEQ ID NO: 1880947
gcaacuugagcugacugau

SEQ ID NO: 2006205 - RNA, 19 nt, Artificial Sequence
  Description of Artificial Sequence: Synthetic oligonucleotide
  Antisense strand to SEQ ID NO: 2006204
aucagucagcucaaguugc

SEQ ID NO: 2006206 - RNA, 19 nt, Artificial Sequence
  Description of Artificial Sequence: Synthetic oligonucleotide
  Sense strand starting at position 3875 of SEQ ID NO: 1880947
acuugagcugacugauaaa

SEQ ID NO: 2006207 - RNA, 19 nt, Artificial Sequence
  Description of Artificial Sequence: Synthetic oligonucleotide
  Antisense strand to SEQ ID NO: 2006206
uuuaucagucagcucaagu

SEQ ID NO: 2006208 - RNA, 19 nt, Artificial Sequence
  Description of Artificial Sequence: Synthetic oligonucleotide
  Sense strand starting at position 3956 of SEQ ID NO: 1880947
cucugagcuggagauguau

SEQ ID NO: 2006209 - RNA, 19 nt, Artificial Sequence
  Description of Artificial Sequence: Synthetic oligonucleotide
  Antisense strand to SEQ ID NO: 2006208
auacaucuccagcucagag

SEQ ID NO: 2006210 - RNA, 19 nt, Artificial Sequence
  Description of Artificial Sequence: Synthetic oligonucleotide
  Sense strand starting at position 3967 of SEQ ID NO: 1880947
agauguauagcugggaguu

SEQ ID NO: 2006211 - RNA, 19 nt, Artificial Sequence
  Description of Artificial Sequence: Synthetic oligonucleotide
  Antisense strand to SEQ ID NO: 2006210
aacucccagcuauacaucu

SEQ ID NO: 2006212 - RNA, 19 nt, Artificial Sequence
  Description of Artificial Sequence: Synthetic oligonucleotide
  Sense strand starting at position 3968 of SEQ ID NO: 1880947
gauguauagcugggaguug

SEQ ID NO: 2006213 - RNA, 19 nt, Artificial Sequence
  Description of Artificial Sequence: Synthetic oligonucleotide
  Antisense strand to SEQ ID NO: 2006212
caacucccagcuauacauc

SEQ ID NO: 2006214 - RNA, 19 nt, Artificial Sequence
  Description of Artificial Sequence: Synthetic oligonucleotide
  Sense strand starting at position 35 of SEQ ID NO: 1880948
auguaccaucaguagcaua

SEQ ID NO: 2006215 - RNA, 19 nt, Artificial Sequence
  Description of Artificial Sequence: Synthetic oligonucleotide
  Antisense strand to SEQ ID NO: 2006214
uaugcuacugaugguacau

SEQ ID NO: 2006216 - RNA, 19 nt, Artificial Sequence
  Description of Artificial Sequence: Synthetic oligonucleotide
  Sense strand starting at position 53 of SEQ ID NO: 1880948
auguacuacucuccaggaa

SEQ ID NO: 2006217 - RNA, 19 nt, Artificial Sequence
  Description of Artificial Sequence: Synthetic oligonucleotide
  Antisense strand to SEQ ID NO: 2006216
uuccuggagaguaguacau

SEQ ID NO: 2006218 - RNA, 19 nt, Artificial Sequence
  Description of Artificial Sequence: Synthetic oligonucleotide
  Sense strand starting at position 127 of SEQ ID NO: 1880948
ggaagugguucagugacag

SEQ ID NO: 2006219 - RNA, 19 nt, Artificial Sequence
  Description of Artificial Sequence: Synthetic oligonucleotide
  Antisense strand to SEQ ID NO: 2006218
cugucacugaaccacuucc

SEQ ID NO: 2006220 - RNA, 19 nt, Artificial Sequence
  Description of Artificial Sequence: Synthetic oligonucleotide
  Sense strand starting at position 153 of SEQ ID NO: 1880948
acuggaguugaaugguauu

SEQ ID NO: 2006221 - RNA, 19 nt, Artificial Sequence
  Description of Artificial Sequence: Synthetic oligonucleotide
  Antisense strand to SEQ ID NO: 2006220
aauaccauucaacuccagu

SEQ ID NO: 2006222 - RNA, 19 nt, Artificial Sequence
  Description of Artificial Sequence: Synthetic oligonucleotide
  Sense strand starting at position 164 of SEQ ID NO: 1880948
augguauugguuuaacuca

SEQ ID NO: 2006223 - RNA, 19 nt, Artificial Sequence
  Description of Artificial Sequence: Synthetic oligonucleotide
  Antisense strand to SEQ ID NO: 2006222
ugaguuaaaccaauaccau

SEQ ID NO: 2006224 - RNA, 19 nt, Artificial Sequence
  Description of Artificial Sequence: Synthetic oligonucleotide
  Sense strand starting at position 540 of SEQ ID NO: 1880948
uagacuuguguauaguuau

SEQ ID NO: 2006225 - RNA, 19 nt, Artificial Sequence
  Description of Artificial Sequence: Synthetic oligonucleotide
  Antisense strand to SEQ ID NO: 2006224
auaacuauacacaagucua

SEQ ID NO: 2006226 - RNA, 19 nt, Artificial Sequence
  Description of Artificial Sequence: Synthetic oligonucleotide
  Sense strand starting at position 823 of SEQ ID NO: 1880948
gucucagaaucucuagaag

SEQ ID NO: 2006227 - RNA, 19 nt, Artificial Sequence
  Description of Artificial Sequence: Synthetic oligonucleotide
  Antisense strand to SEQ ID NO: 2006226
cuucuagagauucugagac

SEQ ID NO: 2006228 - RNA, 19 nt, Artificial Sequence
  Description of Artificial Sequence: Synthetic oligonucleotide
  Sense strand starting at position 1055 of SEQ ID NO: 1880948
uggaaaucucugcaguauu

SEQ ID NO: 2006229 - RNA, 19 nt, Artificial Sequence
  Description of Artificial Sequence: Synthetic oligonucleotide
  Antisense strand to SEQ ID NO: 2006228
aauacugcagagauuucca

SEQ ID NO: 2006230 - RNA, 19 nt, Artificial Sequence
  Description of Artificial Sequence: Synthetic oligonucleotide
  Sense strand starting at position 1109 of SEQ ID NO: 1880948
ugaugcuuccaggacucau

SEQ ID NO: 2006231 - RNA, 19 nt, Artificial Sequence
  Description of Artificial Sequence: Synthetic oligonucleotide
  Antisense strand to SEQ ID NO: 2006230
augaguccuggaagcauca

SEQ ID NO: 2006232 - RNA, 19 nt, Artificial Sequence
  Description of Artificial Sequence: Synthetic oligonucleotide
  Sense strand starting at position 1322 of SEQ ID NO: 1880948
auuaaacaauguguccaua

SEQ ID NO: 2006233 - RNA, 19 nt, Artificial Sequence
  Description of Artificial Sequence: Synthetic oligonucleotide
  Antisense strand to SEQ ID NO: 2006232
uauggacacauuguuuaau

SEQ ID NO: 2006234 - RNA, 19 nt, Artificial Sequence
  Description of Artificial Sequence: Synthetic oligonucleotide
  Sense strand starting at position 1340 of SEQ ID NO: 1880948
agugaaaugugauuaguac

SEQ ID NO: 2006235 - RNA, 19 nt, Artificial Sequence
  Description of Artificial Sequence: Synthetic oligonucleotide
  Antisense strand to SEQ ID NO: 2006234
guacuaaucacauuucacu

SEQ ID NO: 2006236 - RNA, 19 nt, Artificial Sequence
  Description of Artificial Sequence: Synthetic oligonucleotide
  Sense strand starting at position 1341 of SEQ ID NO: 1880948
gugaaaugugauuaguaca

SEQ ID NO: 2006237 - RNA, 19 nt, Artificial Sequence
  Description of Artificial Sequence: Synthetic oligonucleotide
  Antisense strand to SEQ ID NO: 2006236
uguacuaaucacauuucac

SEQ ID NO: 2006238 - RNA, 19 nt, Artificial Sequence
  Description of Artificial Sequence: Synthetic oligonucleotide
  Sense strand starting at position 1391 of SEQ ID NO: 1880948
gaaagaaagcacugaucgu

SEQ ID NO: 2006239 - RNA, 19 nt, Artificial Sequence
  Description of Artificial Sequence: Synthetic oligonucleotide
  Antisense strand to SEQ ID NO: 2006238
acgaucagugcuuucuuuc

SEQ ID NO: 2006240 - RNA, 19 nt, Artificial Sequence
  Description of Artificial Sequence: Synthetic oligonucleotide
  Sense strand starting at position 1409 of SEQ ID NO: 1880948
uggaccuauuucgaagaau

SEQ ID NO: 2006241 - RNA, 19 nt, Artificial Sequence
  Description of Artificial Sequence: Synthetic oligonucleotide
  Antisense strand to SEQ ID NO: 2006240
auucuucgaaauaggucca

SEQ ID NO: 2006242 - RNA, 19 nt, Artificial Sequence
  Description of Artificial Sequence: Synthetic oligonucleotide
  Sense strand starting at position 1589 of SEQ ID NO: 1880948
agauguuucugaucauaaa

SEQ ID NO: 2006243 - RNA, 19 nt, Artificial Sequence
  Description of Artificial Sequence: Synthetic oligonucleotide
  Antisense strand to SEQ ID NO: 2006242
uuuaugaucagaaacaucu

SEQ ID NO: 2006244 - RNA, 19 nt, Artificial Sequence
  Description of Artificial Sequence: Synthetic oligonucleotide
  Sense strand starting at position 1730 of SEQ ID NO: 1880948
agacucucauuugacagaa

SEQ ID NO: 2006245 - RNA, 19 nt, Artificial Sequence
  Description of Artificial Sequence: Synthetic oligonucleotide
  Antisense strand to SEQ ID NO: 2006244
uucugucaaaugagagucu

SEQ ID NO: 2006246 - RNA, 19 nt, Artificial Sequence
  Description of Artificial Sequence: Synthetic oligonucleotide
  Sense strand starting at position 1751 of SEQ ID NO: 1880948
ggaaaugaaucucuguuac

SEQ ID NO: 2006247 - RNA, 19 nt, Artificial Sequence
  Description of Artificial Sequence: Synthetic oligonucleotide
  Antisense strand to SEQ ID NO: 2006246
guaacagagauucauuucc

SEQ ID NO: 2006248 - RNA, 19 nt, Artificial Sequence
  Description of Artificial Sequence: Synthetic oligonucleotide
  Sense strand starting at position 2106 of SEQ ID NO: 1880948
gaggucaccagugauguau

SEQ ID NO: 2006249 - RNA, 19 nt, Artificial Sequence
  Description of Artificial Sequence: Synthetic oligonucleotide
  Antisense strand to SEQ ID NO: 2006248
auacaucacuggugaccuc

SEQ ID NO: 2006250 - RNA, 19 nt, Artificial Sequence
  Description of Artificial Sequence: Synthetic oligonucleotide
  Sense strand starting at position 2137 of SEQ ID NO: 1880948
ugugaaauuccauggaccu

SEQ ID NO: 2006251 - RNA, 19 nt, Artificial Sequence
  Description of Artificial Sequence: Synthetic oligonucleotide
  Antisense strand to SEQ ID NO: 2006250
agguccauggaauuucaca

SEQ ID NO: 2006252 - RNA, 19 nt, Artificial Sequence
  Description of Artificial Sequence: Synthetic oligonucleotide
  Sense strand starting at position 2138 of SEQ ID NO: 1880948
gugaaauuccauggaccuu

SEQ ID NO: 2006253 - RNA, 19 nt, Artificial Sequence
  Description of Artificial Sequence: Synthetic oligonucleotide
  Antisense strand to SEQ ID NO: 2006252
aagguccauggaauuucac

SEQ ID NO: 2006254 - RNA, 19 nt, Artificial Sequence
  Description of Artificial Sequence: Synthetic oligonucleotide
  Sense strand starting at position 2202 of SEQ ID NO: 1880948
augaucugauugccucaau

SEQ ID NO: 2006255 - RNA, 19 nt, Artificial Sequence
  Description of Artificial Sequence: Synthetic oligonucleotide
  Antisense strand to SEQ ID NO: 2006254
auugaggcaaucagaucau

SEQ ID NO: 2006256 - RNA, 19 nt, Artificial Sequence
  Description of Artificial Sequence: Synthetic oligonucleotide
  Sense strand starting at position 2303 of SEQ ID NO: 1880948
agaagugcguauuugaacu

SEQ ID NO: 2006257 - RNA, 19 nt, Artificial Sequence
  Description of Artificial Sequence: Synthetic oligonucleotide
  Antisense strand to SEQ ID NO: 2006256
aguucaaauacgcacuucu

SEQ ID NO: 2006258 - RNA, 19 nt, Artificial Sequence
  Description of Artificial Sequence: Synthetic oligonucleotide
  Sense strand starting at position 2350 of SEQ ID NO: 1880948
caacgauacgcugauuaac

SEQ ID NO: 2006259 - RNA, 19 nt, Artificial Sequence
  Description of Artificial Sequence: Synthetic oligonucleotide
  Antisense strand to SEQ ID NO: 2006258
guuaaucagcguaucguug

SEQ ID NO: 2006260 - RNA, 19 nt, Artificial Sequence
  Description of Artificial Sequence: Synthetic oligonucleotide
  Sense strand starting at position 2385 of SEQ ID NO: 1880948
uuagaucucucaguuacag

SEQ ID NO: 2006261 - RNA, 19 nt, Artificial Sequence
  Description of Artificial Sequence: Synthetic oligonucleotide
  Antisense strand to SEQ ID NO: 2006260
cuguaacugagagaucuaa

SEQ ID NO: 2006262 - RNA, 19 nt, Artificial Sequence
  Description of Artificial Sequence: Synthetic oligonucleotide
  Sense strand starting at position 2421 of SEQ ID NO: 1880948
uguccugugggacacauau

SEQ ID NO: 2006263 - RNA, 19 nt, Artificial Sequence
  Description of Artificial Sequence: Synthetic oligonucleotide
  Antisense strand to SEQ ID NO: 2006262
auaugugucccacaggaca

SEQ ID NO: 2006264 - RNA, 19 nt, Artificial Sequence
  Description of Artificial Sequence: Synthetic oligonucleotide
  Sense strand starting at position 2640 of SEQ ID NO: 1880948
agcagacacuaggauuuau

SEQ ID NO: 2006265 - RNA, 19 nt, Artificial Sequence
  Description of Artificial Sequence: Synthetic oligonucleotide
  Antisense strand to SEQ ID NO: 2006264
auaaauccuagugucugcu

SEQ ID NO: 2006266 - RNA, 19 nt, Artificial Sequence
  Description of Artificial Sequence: Synthetic oligonucleotide
  Sense strand starting at position 2674 of SEQ ID NO: 1880948
gcgguuugaguuguucagu

SEQ ID NO: 2006267 - RNA, 19 nt, Artificial Sequence
  Description of Artificial Sequence: Synthetic oligonucleotide
  Antisense strand to SEQ ID NO: 2006266
acugaacaacucaaaccgc

SEQ ID NO: 2006268 - RNA, 19 nt, Artificial Sequence
  Description of Artificial Sequence: Synthetic oligonucleotide
  Sense strand starting at position 2691 of SEQ ID NO: 1880948
gucaaauaacuagaugcuu

SEQ ID NO: 2006269 - RNA, 19 nt, Artificial Sequence
  Description of Artificial Sequence: Synthetic oligonucleotide
  Antisense strand to SEQ ID NO: 2006268
aagcaucuaguuauuugac

SEQ ID NO: 2006270 - RNA, 19 nt, Artificial Sequence
  Description of Artificial Sequence: Synthetic oligonucleotide
  Sense strand starting at position 2758 of SEQ ID NO: 1880948
cugcuuucuguguuugcau

SEQ ID NO: 2006271 - RNA, 19 nt, Artificial Sequence
  Description of Artificial Sequence: Synthetic oligonucleotide
  Antisense strand to SEQ ID NO: 2006270
augcaaacacagaaagcag

SEQ ID NO: 2006272 - RNA, 19 nt, Artificial Sequence
  Description of Artificial Sequence: Synthetic oligonucleotide
  Sense strand starting at position 2998 of SEQ ID NO: 1880948
gaaugaaguguauaauguu

SEQ ID NO: 2006273 - RNA, 19 nt, Artificial Sequence
  Description of Artificial Sequence: Synthetic oligonucleotide
  Antisense strand to SEQ ID NO: 2006272
aacauuauacacuucauuc

SEQ ID NO: 2006274 - RNA, 19 nt, Artificial Sequence
  Description of Artificial Sequence: Synthetic oligonucleotide
  Sense strand starting at position 3037 of SEQ ID NO: 1880948
uugggaauuaugcaugagu

SEQ ID NO: 2006275 - RNA, 19 nt, Artificial Sequence
  Description of Artificial Sequence: Synthetic oligonucleotide
  Antisense strand to SEQ ID NO: 2006274
acucaugcauaauucccaa

SEQ ID NO: 2006276 - RNA, 19 nt, Artificial Sequence
  Description of Artificial Sequence: Synthetic oligonucleotide
  Sense strand starting at position 3040 of SEQ ID NO: 1880948
ggaauuaugcaugaguucu

SEQ ID NO: 2006277 - RNA, 19 nt, Artificial Sequence
  Description of Artificial Sequence: Synthetic oligonucleotide
  Antisense strand to SEQ ID NO: 2006276
agaacucaugcauaauucc

SEQ ID NO: 2006278 - RNA, 19 nt, Artificial Sequence
  Description of Artificial Sequence: Synthetic oligonucleotide
  Sense strand starting at position 3221 of SEQ ID NO: 1880948
auccauauucuaggagagu

SEQ ID NO: 2006279 - RNA, 19 nt, Artificial Sequence
  Description of Artificial Sequence: Synthetic oligonucleotide
  Antisense strand to SEQ ID NO: 2006278
acucuccuagaauauggau

SEQ ID NO: 2006280 - RNA, 19 nt, Artificial Sequence
  Description of Artificial Sequence: Synthetic oligonucleotide
  Sense strand starting at position 3250 of SEQ ID NO: 1880948
guuccucugucccuuauuu

SEQ ID NO: 2006281 - RNA, 19 nt, Artificial Sequence
  Description of Artificial Sequence: Synthetic oligonucleotide
  Antisense strand to SEQ ID NO: 2006280
aaauaagggacagaggaac

SEQ ID NO: 2006282 - RNA, 19 nt, Artificial Sequence
  Description of Artificial Sequence: Synthetic oligonucleotide
  Sense strand starting at position 3281 of SEQ ID NO: 1880948
aguagagcauaucuaauau

SEQ ID NO: 2006283 - RNA, 19 nt, Artificial Sequence
  Description of Artificial Sequence: Synthetic oligonucleotide
  Antisense strand to SEQ ID NO: 2006282
auauuagauaugcucuacu

SEQ ID NO: 2006284 - RNA, 19 nt, Artificial Sequence
  Description of Artificial Sequence: Synthetic oligonucleotide
  Sense strand starting at position 3354 of SEQ ID NO: 1880948
gcauccucagagcacaaua

SEQ ID NO: 2006285 - RNA, 19 nt, Artificial Sequence
  Description of Artificial Sequence: Synthetic oligonucleotide
  Antisense strand to SEQ ID NO: 2006284
uauugugcucugaggaugc

SEQ ID NO: 2006286 - RNA, 19 nt, Artificial Sequence
  Description of Artificial Sequence: Synthetic oligonucleotide
  Sense strand starting at position 3374 of SEQ ID NO: 1880948
auaauaggugcuugaauaa

SEQ ID NO: 2006287 - RNA, 19 nt, Artificial Sequence
  Description of Artificial Sequence: Synthetic oligonucleotide
  Antisense strand to SEQ ID NO: 2006286
uuauucaagcaccuauuau

SEQ ID NO: 2006288 - RNA, 19 nt, Artificial Sequence
  Description of Artificial Sequence: Synthetic oligonucleotide
  Sense strand starting at position 3593 of SEQ ID NO: 1880948
uauguaauaggcugaaaca

SEQ ID NO: 2006289 - RNA, 19 nt, Artificial Sequence
  Description of Artificial Sequence: Synthetic oligonucleotide
  Antisense strand to SEQ ID NO: 2006288
uguuucagccuauuacaua

SEQ ID NO: 2006290 - RNA, 19 nt, Artificial Sequence
  Description of Artificial Sequence: Synthetic oligonucleotide
  Sense strand starting at position 3735 of SEQ ID NO: 1880948
uugagcugugucuggauuu

SEQ ID NO: 2006291 - RNA, 19 nt, Artificial Sequence
  Description of Artificial Sequence: Synthetic oligonucleotide
  Antisense strand to SEQ ID NO: 2006290
aaauccagacacagcucaa

SEQ ID NO: 2006292 - RNA, 19 nt, Artificial Sequence
  Description of Artificial Sequence: Synthetic oligonucleotide
  Sense strand starting at position 3748 of SEQ ID NO: 1880948
ggauuuacauucuagaucu

SEQ ID NO: 2006293 - RNA, 19 nt, Artificial Sequence
  Description of Artificial Sequence: Synthetic oligonucleotide
  Antisense strand to SEQ ID NO: 2006292
agaucuagaauguaaaucc

SEQ ID NO: 2006294 - RNA, 19 nt, Artificial Sequence
  Description of Artificial Sequence: Synthetic oligonucleotide
  Sense strand starting at position 119 of SEQ ID NO: 1880949
acacauucugcccauguau

SEQ ID NO: 2006295 - RNA, 19 nt, Artificial Sequence
  Description of Artificial Sequence: Synthetic oligonucleotide
  Antisense strand to SEQ ID NO: 2006294
auacaugggcagaaugugu

SEQ ID NO: 2006296 - RNA, 19 nt, Artificial Sequence
  Description of Artificial Sequence: Synthetic oligonucleotide
  Sense strand starting at position 234 of SEQ ID NO: 1880949
auaaauccugagugaugca

SEQ ID NO: 2006297 - RNA, 19 nt, Artificial Sequence
  Description of Artificial Sequence: Synthetic oligonucleotide
  Antisense strand to SEQ ID NO: 2006296
ugcaucacucaggauuuau

SEQ ID NO: 2006298 - RNA, 19 nt, Artificial Sequence
  Description of Artificial Sequence: Synthetic oligonucleotide
  Sense strand starting at position 239 of SEQ ID NO: 1880949
uccugagugaugcauguaa

SEQ ID NO: 2006299 - RNA, 19 nt, Artificial Sequence
  Description of Artificial Sequence: Synthetic oligonucleotide
  Antisense strand to SEQ ID NO: 2006298
uuacaugcaucacucagga

SEQ ID NO: 2006300 - RNA, 19 nt, Artificial Sequence
  Description of Artificial Sequence: Synthetic oligonucleotide
  Sense strand starting at position 462 of SEQ ID NO: 1880949
auccuuuguguuuaacaca

SEQ ID NO: 2006301 - RNA, 19 nt, Artificial Sequence
  Description of Artificial Sequence: Synthetic oligonucleotide
  Antisense strand to SEQ ID NO: 2006300
uguguuaaacacaaaggau

SEQ ID NO: 2006302 - RNA, 19 nt, Artificial Sequence
  Description of Artificial Sequence: Synthetic oligonucleotide
  Sense strand starting at position 644 of SEQ ID NO: 1880949
ugagaaauccauuggccuu

SEQ ID NO: 2006303 - RNA, 19 nt, Artificial Sequence
  Description of Artificial Sequence: Synthetic oligonucleotide
  Antisense strand to SEQ ID NO: 2006302
aaggccaauggauuucuca

SEQ ID NO: 2006304 - RNA, 19 nt, Artificial Sequence
  Description of Artificial Sequence: Synthetic oligonucleotide
  Sense strand starting at position 720 of SEQ ID NO: 1880949
uuuacaacuucuguggaaa

SEQ ID NO: 2006305 - RNA, 19 nt, Artificial Sequence
  Description of Artificial Sequence: Synthetic oligonucleotide
  Antisense strand to SEQ ID NO: 2006304
uuuccacagaaguuguaaa

SEQ ID NO: 2006306 - RNA, 19 nt, Artificial Sequence
  Description of Artificial Sequence: Synthetic oligonucleotide
  Sense strand starting at position 721 of SEQ ID NO: 1880949
uuacaacuucuguggaaac

SEQ ID NO: 2006307 - RNA, 19 nt, Artificial Sequence
  Description of Artificial Sequence: Synthetic oligonucleotide
  Antisense strand to SEQ ID NO: 2006306
guuuccacagaaguuguaa

SEQ ID NO: 2006308 - RNA, 19 nt, Artificial Sequence
  Description of Artificial Sequence: Synthetic oligonucleotide
  Sense strand starting at position 761 of SEQ ID NO: 1880949
uggagaguuucuguuagga

SEQ ID NO: 2006309 - RNA, 19 nt, Artificial Sequence
  Description of Artificial Sequence: Synthetic oligonucleotide
  Antisense strand to SEQ ID NO: 2006308
uccuaacagaaacucucca

SEQ ID NO: 2006310 - RNA, 19 nt, Artificial Sequence
  Description of Artificial Sequence: Synthetic oligonucleotide
  Sense strand starting at position 779 of SEQ ID NO: 1880949
aguagcccucgugagauuu

SEQ ID NO: 2006311 - RNA, 19 nt, Artificial Sequence
  Description of Artificial Sequence: Synthetic oligonucleotide
  Antisense strand to SEQ ID NO: 2006310
aaaucucacgagggcuacu

SEQ ID NO: 2006312 - RNA, 19 nt, Artificial Sequence
  Description of Artificial Sequence: Synthetic oligonucleotide
  Sense strand starting at position 832 of SEQ ID NO: 1880949
ggcacuaggaguuaguuau

SEQ ID NO: 2006313 - RNA, 19 nt, Artificial Sequence
  Description of Artificial Sequence: Synthetic oligonucleotide
  Antisense strand to SEQ ID NO: 2006312
auaacuaacuccuagugcc

SEQ ID NO: 2006314 - RNA, 19 nt, Artificial Sequence
  Description of Artificial Sequence: Synthetic oligonucleotide
  Sense strand starting at position 1049 of SEQ ID NO: 1880949
uggacaugaucaucuuuga

SEQ ID NO: 2006315 - RNA, 19 nt, Artificial Sequence
  Description of Artificial Sequence: Synthetic oligonucleotide
  Antisense strand to SEQ ID NO: 2006314
ucaaagaugaucaugucca

SEQ ID NO: 2006316 - RNA, 19 nt, Artificial Sequence
  Description of Artificial Sequence: Synthetic oligonucleotide
  Sense strand starting at position 1107 of SEQ ID NO: 1880949
ugcaaaucgaaugaguaca

SEQ ID NO: 2006317 - RNA, 19 nt, Artificial Sequence
  Description of Artificial Sequence: Synthetic oligonucleotide
  Antisense strand to SEQ ID NO: 2006316
uguacucauucgauuugca

SEQ ID NO: 2006318 - RNA, 19 nt, Artificial Sequence
  Description of Artificial Sequence: Synthetic oligonucleotide
  Sense strand starting at position 1191 of SEQ ID NO: 1880949
agguuauucuccucaaagg

SEQ ID NO: 2006319 - RNA, 19 nt, Artificial Sequence
  Description of Artificial Sequence: Synthetic oligonucleotide
  Antisense strand to SEQ ID NO: 2006318
ccuuugaggagaauaaccu

SEQ ID NO: 2006320 - RNA, 19 nt, Artificial Sequence
  Description of Artificial Sequence: Synthetic oligonucleotide
  Sense strand starting at position 1209 of SEQ ID NO: 1880949
ggccacuugagugaucaga

SEQ ID NO: 2006321 - RNA, 19 nt, Artificial Sequence
  Description of Artificial Sequence: Synthetic oligonucleotide
  Antisense strand to SEQ ID NO: 2006320
ucugaucacucaaguggcc

SEQ ID NO: 2006322 - RNA, 19 nt, Artificial Sequence
  Description of Artificial Sequence: Synthetic oligonucleotide
  Sense strand starting at position 1211 of SEQ ID NO: 1880949
ccacuugagugaucagaac

SEQ ID NO: 2006323 - RNA, 19 nt, Artificial Sequence
  Description of Artificial Sequence: Synthetic oligonucleotide
  Antisense strand to SEQ ID NO: 2006322
guucugaucacucaagugg

SEQ ID NO: 2006324 - RNA, 19 nt, Artificial Sequence
  Description of Artificial Sequence: Synthetic oligonucleotide
  Sense strand starting at position 1400 of SEQ ID NO: 1880949
acugucucuccucaaaugu

SEQ ID NO: 2006325 - RNA, 19 nt, Artificial Sequence
  Description of Artificial Sequence: Synthetic oligonucleotide
  Antisense strand to SEQ ID NO: 2006324
acauuugaggagagacagu

SEQ ID NO: 2006326 - RNA, 19 nt, Artificial Sequence
  Description of Artificial Sequence: Synthetic oligonucleotide
  Sense strand starting at position 1729 of SEQ ID NO: 1880949
cauguugcagagcauaaua

SEQ ID NO: 2006327 - RNA, 19 nt, Artificial Sequence
  Description of Artificial Sequence: Synthetic oligonucleotide
  Antisense strand to SEQ ID NO: 2006326
uauuaugcucugcaacaug

SEQ ID NO: 2006328 - RNA, 19 nt, Artificial Sequence
  Description of Artificial Sequence: Synthetic oligonucleotide
  Sense strand starting at position 1737 of SEQ ID NO: 1880949
agagcauaauauucggaga

SEQ ID NO: 2006329 - RNA, 19 nt, Artificial Sequence
  Description of Artificial Sequence: Synthetic oligonucleotide
  Antisense strand to SEQ ID NO: 2006328
ucuccgaauauuaugcucu

SEQ ID NO: 2006330 - RNA, 19 nt, Artificial Sequence
  Description of Artificial Sequence: Synthetic oligonucleotide
  Sense strand starting at position 2004 of SEQ ID NO: 1880949
uugugcuccgugguaguua

SEQ ID NO: 2006331 - RNA, 19 nt, Artificial Sequence
  Description of Artificial Sequence: Synthetic oligonucleotide
  Antisense strand to SEQ ID NO: 2006330
uaacuaccacggagcacaa

SEQ ID NO: 2006332 - RNA, 19 nt, Artificial Sequence
  Description of Artificial Sequence: Synthetic oligonucleotide
  Sense strand starting at position 2106 of SEQ ID NO: 1880949
guuccauuucuuugcucca

SEQ ID NO: 2006333 - RNA, 19 nt, Artificial Sequence
  Description of Artificial Sequence: Synthetic oligonucleotide
  Antisense strand to SEQ ID NO: 2006332
uggagcaaagaaauggaac

SEQ ID NO: 2006334 - RNA, 19 nt, Artificial Sequence
  Description of Artificial Sequence: Synthetic oligonucleotide
  Sense strand starting at position 2223 of SEQ ID NO: 1880949
uguucugaucuacagauuc

SEQ ID NO: 2006335 - RNA, 19 nt, Artificial Sequence
  Description of Artificial Sequence: Synthetic oligonucleotide
  Antisense strand to SEQ ID NO: 2006334
gaaucuguagaucagaaca

SEQ ID NO: 2006336 - RNA, 19 nt, Artificial Sequence
  Description of Artificial Sequence: Synthetic oligonucleotide
  Sense strand starting at position 2254 of SEQ ID NO: 1880949
gcucucuuuggguagaaug

SEQ ID NO: 2006337 - RNA, 19 nt, Artificial Sequence
  Description of Artificial Sequence: Synthetic oligonucleotide
  Antisense strand to SEQ ID NO: 2006336
cauucuacccaaagagagc

SEQ ID NO: 2006338 - RNA, 19 nt, Artificial Sequence
  Description of Artificial Sequence: Synthetic oligonucleotide
  Sense strand starting at position 2319 of SEQ ID NO: 1880949
ugcuaagcugcagauaaau

SEQ ID NO: 2006339 - RNA, 19 nt, Artificial Sequence
  Description of Artificial Sequence: Synthetic oligonucleotide
  Antisense strand to SEQ ID NO: 2006338
auuuaucugcagcuuagca

SEQ ID NO: 2006340 - RNA, 19 nt, Artificial Sequence
  Description of Artificial Sequence: Synthetic oligonucleotide
  Sense strand starting at position 2341 of SEQ ID NO: 1880949
augagcagauguucuuaua

SEQ ID NO: 2006341 - RNA, 19 nt, Artificial Sequence
  Description of Artificial Sequence: Synthetic oligonucleotide
  Antisense strand to SEQ ID NO: 2006340
uauaagaacaucugcucau

SEQ ID NO: 2006342 - RNA, 19 nt, Artificial Sequence
  Description of Artificial Sequence: Synthetic oligonucleotide
  Sense strand starting at position 2386 of SEQ ID NO: 1880949
ugauauuagagucagugua

SEQ ID NO: 2006343 - RNA, 19 nt, Artificial Sequence
  Description of Artificial Sequence: Synthetic oligonucleotide
  Antisense strand to SEQ ID NO: 2006342
uacacugacucuaauauca

SEQ ID NO: 2006344 - RNA, 19 nt, Artificial Sequence
  Description of Artificial Sequence: Synthetic oligonucleotide
  Sense strand starting at position 2388 of SEQ ID NO: 1880949
auauuagagucaguguaau

SEQ ID NO: 2006345 - RNA, 19 nt, Artificial Sequence
  Description of Artificial Sequence: Synthetic oligonucleotide
  Antisense strand to SEQ ID NO: 2006344
auuacacugacucuaauau

SEQ ID NO: 2006346 - RNA, 19 nt, Artificial Sequence
  Description of Artificial Sequence: Synthetic oligonucleotide
  Sense strand starting at position 2455 of SEQ ID NO: 1880949
gugcaaguuguucuguguu

SEQ ID NO: 2006347 - RNA, 19 nt, Artificial Sequence
  Description of Artificial Sequence: Synthetic oligonucleotide
  Antisense strand to SEQ ID NO: 2006346
aacacagaacaacuugcac

SEQ ID NO: 2006348 - RNA, 19 nt, Artificial Sequence
  Description of Artificial Sequence: Synthetic oligonucleotide
  Sense strand starting at position 2460 of SEQ ID NO: 1880949
aguuguucuguguuuagug

SEQ ID NO: 2006349 - RNA, 19 nt, Artificial Sequence
  Description of Artificial Sequence: Synthetic oligonucleotide
  Antisense strand to SEQ ID NO: 2006348
cacuaaacacagaacaacu

SEQ ID NO: 2006350 - RNA, 19 nt, Artificial Sequence
  Description of Artificial Sequence: Synthetic oligonucleotide
  Sense strand starting at position 2469 of SEQ ID NO: 1880949
guguuuagugacuaugaaa

SEQ ID NO: 2006351 - RNA, 19 nt, Artificial Sequence
  Description of Artificial Sequence: Synthetic oligonucleotide
  Antisense strand to SEQ ID NO: 2006350
uuucauagucacuaaacac

SEQ ID NO: 2006352 - RNA, 19 nt, Artificial Sequence
  Description of Artificial Sequence: Synthetic oligonucleotide
  Sense strand starting at position 2633 of SEQ ID NO: 1880949
aauuuaugguaaggagaua

SEQ ID NO: 2006353 - RNA, 19 nt, Artificial Sequence
  Description of Artificial Sequence: Synthetic oligonucleotide
  Antisense strand to SEQ ID NO: 2006352
uaucuccuuaccauaaauu

SEQ ID NO: 2006354 - RNA, 19 nt, Artificial Sequence
  Description of Artificial Sequence: Synthetic oligonucleotide
  Sense strand starting at position 2769 of SEQ ID NO: 1880949
acucucgagcuggaauaaa

SEQ ID NO: 2006355 - RNA, 19 nt, Artificial Sequence
  Description of Artificial Sequence: Synthetic oligonucleotide
  Antisense strand to SEQ ID NO: 2006354
uuuauuccagcucgagagu

SEQ ID NO: 2006356 - RNA, 19 nt, Artificial Sequence
  Description of Artificial Sequence: Synthetic oligonucleotide
  Sense strand starting at position 3006 of SEQ ID NO: 1880949
augucaaucgccgcuauua

SEQ ID NO: 2006357 - RNA, 19 nt, Artificial Sequence
  Description of Artificial Sequence: Synthetic oligonucleotide
  Antisense strand to SEQ ID NO: 2006356
uaauagcggcgauugacau

SEQ ID NO: 2006358 - RNA, 19 nt, Artificial Sequence
  Description of Artificial Sequence: Synthetic oligonucleotide
  Sense strand starting at position 3007 of SEQ ID NO: 1880949
ugucaaucgccgcuauuau

SEQ ID NO: 2006359 - RNA, 19 nt, Artificial Sequence
  Description of Artificial Sequence: Synthetic oligonucleotide
  Antisense strand to SEQ ID NO: 2006358
auaauagcggcgauugaca

SEQ ID NO: 2006360 - RNA, 19 nt, Artificial Sequence
  Description of Artificial Sequence: Synthetic oligonucleotide
  Sense strand starting at position 3079 of SEQ ID NO: 1880949
uacgauauucucuagguau

SEQ ID NO: 2006361 - RNA, 19 nt, Artificial Sequence
  Description of Artificial Sequence: Synthetic oligonucleotide
  Antisense strand to SEQ ID NO: 2006360
auaccuagagaauaucgua

SEQ ID NO: 2006362 - RNA, 19 nt, Artificial Sequence
  Description of Artificial Sequence: Synthetic oligonucleotide
  Sense strand starting at position 3082 of SEQ ID NO: 1880949
gauauucucuagguaugac

SEQ ID NO: 2006363 - RNA, 19 nt, Artificial Sequence
  Description of Artificial Sequence: Synthetic oligonucleotide
  Antisense strand to SEQ ID NO: 2006362
gucauaccuagagaauauc

SEQ ID NO: 2006364 - RNA, 19 nt, Artificial Sequence
  Description of Artificial Sequence: Synthetic oligonucleotide
  Sense strand starting at position 3386 of SEQ ID NO: 1880949
uuacuccagguuugaugaa

SEQ ID NO: 2006365 - RNA, 19 nt, Artificial Sequence
  Description of Artificial Sequence: Synthetic oligonucleotide
  Antisense strand to SEQ ID NO: 2006364
uucaucaaaccuggaguaa

SEQ ID NO: 2006366 - RNA, 19 nt, Artificial Sequence
  Description of Artificial Sequence: Synthetic oligonucleotide
  Sense strand starting at position 3565 of SEQ ID NO: 1880949
ucaaaugaguaucuuauga

SEQ ID NO: 2006367 - RNA, 19 nt, Artificial Sequence
  Description of Artificial Sequence: Synthetic oligonucleotide
  Antisense strand to SEQ ID NO: 2006366
ucauaagauacucauuuga

SEQ ID NO: 2006368 - RNA, 19 nt, Artificial Sequence
  Description of Artificial Sequence: Synthetic oligonucleotide
  Sense strand starting at position 3720 of SEQ ID NO: 1880949
gaggaugucuagccucaga

SEQ ID NO: 2006369 - RNA, 19 nt, Artificial Sequence
  Description of Artificial Sequence: Synthetic oligonucleotide
  Antisense strand to SEQ ID NO: 2006368
ucugaggcuagacauccuc

SEQ ID NO: 2006370 - RNA, 19 nt, Artificial Sequence
  Description of Artificial Sequence: Synthetic oligonucleotide
  Sense strand starting at position 3758 of SEQ ID NO: 1880949
cuauguguucgugucagca

SEQ ID NO: 2006371 - RNA, 19 nt, Artificial Sequence
  Description of Artificial Sequence: Synthetic oligonucleotide
  Antisense strand to SEQ ID NO: 2006370
ugcugacacgaacacauag

SEQ ID NO: 2006372 - RNA, 19 nt, Artificial Sequence
  Description of Artificial Sequence: Synthetic oligonucleotide
  Sense strand starting at position 3854 of SEQ ID NO: 1880949
gggaucagucuguauaguc

SEQ ID NO: 2006373 - RNA, 19 nt, Artificial Sequence
  Description of Artificial Sequence: Synthetic oligonucleotide
  Antisense strand to SEQ ID NO: 2006372
gacuauacagacugauccc

SEQ ID NO: 2006374 - RNA, 19 nt, Artificial Sequence
  Description of Artificial Sequence: Synthetic oligonucleotide
  Sense strand starting at position 180 of SEQ ID NO: 1880950
guguaaauaugaccacuga

SEQ ID NO: 2006375 - RNA, 19 nt, Artificial Sequence
  Description of Artificial Sequence: Synthetic oligonucleotide
  Antisense strand to SEQ ID NO: 2006374
ucaguggucauauuuacac

SEQ ID NO: 2006376 - RNA, 19 nt, Artificial Sequence
  Description of Artificial Sequence: Synthetic oligonucleotide
  Sense strand starting at position 438 of SEQ ID NO: 1880950
ugcagaauuggugacugua

SEQ ID NO: 2006377 - RNA, 19 nt, Artificial Sequence
  Description of Artificial Sequence: Synthetic oligonucleotide
  Antisense strand to SEQ ID NO: 2006376
uacagucaccaauucugca

SEQ ID NO: 2006378 - RNA, 19 nt, Artificial Sequence
  Description of Artificial Sequence: Synthetic oligonucleotide
  Sense strand starting at position 440 of SEQ ID NO: 1880950
cagaauuggugacuguaga

SEQ ID NO: 2006379 - RNA, 19 nt, Artificial Sequence
  Description of Artificial Sequence: Synthetic oligonucleotide
  Antisense strand to SEQ ID NO: 2006378
ucuacagucaccaauucug

SEQ ID NO: 2006380 - RNA, 19 nt, Artificial Sequence
  Description of Artificial Sequence: Synthetic oligonucleotide
  Sense strand starting at position 451 of SEQ ID NO: 1880950
acuguagaccgauaugauu

SEQ ID NO: 2006381 - RNA, 19 nt, Artificial Sequence
  Description of Artificial Sequence: Synthetic oligonucleotide
  Antisense strand to SEQ ID NO: 2006380
aaucauaucggucuacagu

SEQ ID NO: 2006382 - RNA, 19 nt, Artificial Sequence
  Description of Artificial Sequence: Synthetic oligonucleotide
  Sense strand starting at position 460 of SEQ ID NO: 1880950
cgauaugauuacucucuua

SEQ ID NO: 2006383 - RNA, 19 nt, Artificial Sequence
  Description of Artificial Sequence: Synthetic oligonucleotide
  Antisense strand to SEQ ID NO: 2006382
uaagagaguaaucauaucg

SEQ ID NO: 2006384 - RNA, 19 nt, Artificial Sequence
  Description of Artificial Sequence: Synthetic oligonucleotide
  Sense strand starting at position 603 of SEQ ID NO: 1880950
ugugguggcagguaaauaa

SEQ ID NO: 2006385 - RNA, 19 nt, Artificial Sequence
  Description of Artificial Sequence: Synthetic oligonucleotide
  Antisense strand to SEQ ID NO: 2006384
uuauuuaccugccaccaca

SEQ ID NO: 2006386 - RNA, 19 nt, Artificial Sequence
  Description of Artificial Sequence: Synthetic oligonucleotide
  Sense strand starting at position 856 of SEQ ID NO: 1880950
aagaaauugucaguacuug

SEQ ID NO: 2006387 - RNA, 19 nt, Artificial Sequence
  Description of Artificial Sequence: Synthetic oligonucleotide
  Antisense strand to SEQ ID NO: 2006386
caaguacugacaauuucuu

SEQ ID NO: 2006388 - RNA, 19 nt, Artificial Sequence
  Description of Artificial Sequence: Synthetic oligonucleotide
  Sense strand starting at position 865 of SEQ ID NO: 1880950
ucaguacuugccgaggaga

SEQ ID NO: 2006389 - RNA, 19 nt, Artificial Sequence
  Description of Artificial Sequence: Synthetic oligonucleotide
  Antisense strand to SEQ ID NO: 2006388
ucuccucggcaaguacuga

SEQ ID NO: 2006390 - RNA, 19 nt, Artificial Sequence
  Description of Artificial Sequence: Synthetic oligonucleotide
  Sense strand starting at position 868 of SEQ ID NO: 1880950
guacuugccgaggagaauu

SEQ ID NO: 2006391 - RNA, 19 nt, Artificial Sequence
  Description of Artificial Sequence: Synthetic oligonucleotide
  Antisense strand to SEQ ID NO: 2006390
aauucuccucggcaaguac

SEQ ID NO: 2006392 - RNA, 19 nt, Artificial Sequence
  Description of Artificial Sequence: Synthetic oligonucleotide
  Sense strand starting at position 1058 of SEQ ID NO: 1880950
gggaauuagaguuagcugu

SEQ ID NO: 2006393 - RNA, 19 nt, Artificial Sequence
  Description of Artificial Sequence: Synthetic oligonucleotide
  Antisense strand to SEQ ID NO: 2006392
acagcuaacucuaauuccc

SEQ ID NO: 2006394 - RNA, 19 nt, Artificial Sequence
  Description of Artificial Sequence: Synthetic oligonucleotide
  Sense strand starting at position 1116 of SEQ ID NO: 1880950
auauuauaugacugagagu

SEQ ID NO: 2006395 - RNA, 19 nt, Artificial Sequence
  Description of Artificial Sequence: Synthetic oligonucleotide
  Antisense strand to SEQ ID NO: 2006394
acucucagucauauaauau

SEQ ID NO: 2006396 - RNA, 19 nt, Artificial Sequence
  Description of Artificial Sequence: Synthetic oligonucleotide
  Sense strand starting at position 1132 of SEQ ID NO: 1880950
agucuugaauugucaaaga

SEQ ID NO: 2006397 - RNA, 19 nt, Artificial Sequence
  Description of Artificial Sequence: Synthetic oligonucleotide
  Antisense strand to SEQ ID NO: 2006396
ucuuugacaauucaagacu

SEQ ID NO: 2006398 - RNA, 19 nt, Artificial Sequence
  Description of Artificial Sequence: Synthetic oligonucleotide
  Sense strand starting at position 1270 of SEQ ID NO: 1880950
gcccucuuugaagacagau

SEQ ID NO: 2006399 - RNA, 19 nt, Artificial Sequence
  Description of Artificial Sequence: Synthetic oligonucleotide
  Antisense strand to SEQ ID NO: 2006398
aucugucuucaaagagggc

SEQ ID NO: 2006400 - RNA, 19 nt, Artificial Sequence
  Description of Artificial Sequence: Synthetic oligonucleotide
  Sense strand starting at position 1397 of SEQ ID NO: 1880950
auuggcuggguuuacuaaa

SEQ ID NO: 2006401 - RNA, 19 nt, Artificial Sequence
  Description of Artificial Sequence: Synthetic oligonucleotide
  Antisense strand to SEQ ID NO: 2006400
uuuaguaaacccagccaau

SEQ ID NO: 2006402 - RNA, 19 nt, Artificial Sequence
  Description of Artificial Sequence: Synthetic oligonucleotide
  Sense strand starting at position 1436 of SEQ ID NO: 1880950
agcagucucccucaauaag

SEQ ID NO: 2006403 - RNA, 19 nt, Artificial Sequence
  Description of Artificial Sequence: Synthetic oligonucleotide
  Antisense strand to SEQ ID NO: 2006402
cuuauugagggagacugcu

SEQ ID NO: 2006404 - RNA, 19 nt, Artificial Sequence
  Description of Artificial Sequence: Synthetic oligonucleotide
  Sense strand starting at position 1457 of SEQ ID NO: 1880950
guacuuuagggugacuuaa

SEQ ID NO: 2006405 - RNA, 19 nt, Artificial Sequence
  Description of Artificial Sequence: Synthetic oligonucleotide
  Antisense strand to SEQ ID NO: 2006404
uuaagucacccuaaaguac

SEQ ID NO: 2006406 - RNA, 19 nt, Artificial Sequence
  Description of Artificial Sequence: Synthetic oligonucleotide
  Sense strand starting at position 1459 of SEQ ID NO: 1880950
acuuuagggugacuuaaca

SEQ ID NO: 2006407 - RNA, 19 nt, Artificial Sequence
  Description of Artificial Sequence: Synthetic oligonucleotide
  Antisense strand to SEQ ID NO: 2006406
uguuaagucacccuaaagu

SEQ ID NO: 2006408 - RNA, 19 nt, Artificial Sequence
  Description of Artificial Sequence: Synthetic oligonucleotide
  Sense strand starting at position 1502 of SEQ ID NO: 1880950
gaauauuugugggaaggag

SEQ ID NO: 2006409 - RNA, 19 nt, Artificial Sequence
  Description of Artificial Sequence: Synthetic oligonucleotide
  Antisense strand to SEQ ID NO: 2006408
cuccuucccacaaauauuc

SEQ ID NO: 2006410 - RNA, 19 nt, Artificial Sequence
  Description of Artificial Sequence: Synthetic oligonucleotide
  Sense strand starting at position 1663 of SEQ ID NO: 1880950
cugguuauuccugaguuac

SEQ ID NO: 2006411 - RNA, 19 nt, Artificial Sequence
  Description of Artificial Sequence: Synthetic oligonucleotide
  Antisense strand to SEQ ID NO: 2006410
guaacucaggaauaaccag

SEQ ID NO: 2006412 - RNA, 19 nt, Artificial Sequence
  Description of Artificial Sequence: Synthetic oligonucleotide
  Sense strand starting at position 1694 of SEQ ID NO: 1880950
ggaugacagccuuauguau

SEQ ID NO: 2006413 - RNA, 19 nt, Artificial Sequence
  Description of Artificial Sequence: Synthetic oligonucleotide
  Antisense strand to SEQ ID NO: 2006412
auacauaaggcugucaucc

SEQ ID NO: 2006414 - RNA, 19 nt, Artificial Sequence
  Description of Artificial Sequence: Synthetic oligonucleotide
  Sense strand starting at position 1720 of SEQ ID NO: 1880950
guggcucaucuugaacuaa

SEQ ID NO: 2006415 - RNA, 19 nt, Artificial Sequence
  Description of Artificial Sequence: Synthetic oligonucleotide
  Antisense strand to SEQ ID NO: 2006414
uuaguucaagaugagccac

SEQ ID NO: 2006416 - RNA, 19 nt, Artificial Sequence
  Description of Artificial Sequence: Synthetic oligonucleotide
  Sense strand starting at position 1750 of SEQ ID NO: 1880950
cuuaaucagccaggagaua

SEQ ID NO: 2006417 - RNA, 19 nt, Artificial Sequence
  Description of Artificial Sequence: Synthetic oligonucleotide
  Antisense strand to SEQ ID NO: 2006416
uaucuccuggcugauuaag

SEQ ID NO: 2006418 - RNA, 19 nt, Artificial Sequence
  Description of Artificial Sequence: Synthetic oligonucleotide
  Sense strand starting at position 1764 of SEQ ID NO: 1880950
agauaugggcucugaggau

SEQ ID NO: 2006419 - RNA, 19 nt, Artificial Sequence
  Description of Artificial Sequence: Synthetic oligonucleotide
  Antisense strand to SEQ ID NO: 2006418
auccucagagcccauaucu

SEQ ID NO: 2006420 - RNA, 19 nt, Artificial Sequence
  Description of Artificial Sequence: Synthetic oligonucleotide
  Sense strand starting at position 1818 of SEQ ID NO: 1880950
ucucauguuccuugaggaa

SEQ ID NO: 2006421 - RNA, 19 nt, Artificial Sequence
  Description of Artificial Sequence: Synthetic oligonucleotide
  Antisense strand to SEQ ID NO: 2006420
uuccucaaggaacaugaga

SEQ ID NO: 2006422 - RNA, 19 nt, Artificial Sequence
  Description of Artificial Sequence: Synthetic oligonucleotide
  Sense strand starting at position 1869 of SEQ ID NO: 1880950
uuuacuuaugcuuaaagga

SEQ ID NO: 2006423 - RNA, 19 nt, Artificial Sequence
  Description of Artificial Sequence: Synthetic oligonucleotide
  Antisense strand to SEQ ID NO: 2006422
uccuuuaagcauaaguaaa

SEQ ID NO: 2006424 - RNA, 19 nt, Artificial Sequence
  Description of Artificial Sequence: Synthetic oligonucleotide
  Sense strand starting at position 1985 of SEQ ID NO: 1880950
auggucuggccagaauauc

SEQ ID NO: 2006425 - RNA, 19 nt, Artificial Sequence
  Description of Artificial Sequence: Synthetic oligonucleotide
  Antisense strand to SEQ ID NO: 2006424
gauauucuggccagaccau

SEQ ID NO: 2006426 - RNA, 19 nt, Artificial Sequence
  Description of Artificial Sequence: Synthetic oligonucleotide
  Sense strand starting at position 2050 of SEQ ID NO: 1880950
cuaguuuagucaucaugaa

SEQ ID NO: 2006427 - RNA, 19 nt, Artificial Sequence
  Description of Artificial Sequence: Synthetic oligonucleotide
  Antisense strand to SEQ ID NO: 2006426
uucaugaugacuaaacuag

SEQ ID NO: 2006428 - RNA, 19 nt, Artificial Sequence
  Description of Artificial Sequence: Synthetic oligonucleotide
  Sense strand starting at position 2173 of SEQ ID NO: 1880950
ggcugaguauaggugaaac

SEQ ID NO: 2006429 - RNA, 19 nt, Artificial Sequence
  Description of Artificial Sequence: Synthetic oligonucleotide
  Antisense strand to SEQ ID NO: 2006428
guuucaccuauacucagcc

SEQ ID NO: 2006430 - RNA, 19 nt, Artificial Sequence
  Description of Artificial Sequence: Synthetic oligonucleotide
  Sense strand starting at position 2175 of SEQ ID NO: 1880950
cugaguauaggugaaacgu

SEQ ID NO: 2006431 - RNA, 19 nt, Artificial Sequence
  Description of Artificial Sequence: Synthetic oligonucleotide
  Antisense strand to SEQ ID NO: 2006430
acguuucaccuauacucag

SEQ ID NO: 2006432 - RNA, 19 nt, Artificial Sequence
  Description of Artificial Sequence: Synthetic oligonucleotide
  Sense strand starting at position 2193 of SEQ ID NO: 1880950
uggucugagccugaacacu

SEQ ID NO: 2006433 - RNA, 19 nt, Artificial Sequence
  Description of Artificial Sequence: Synthetic oligonucleotide
  Antisense strand to SEQ ID NO: 2006432
aguguucaggcucagacca

SEQ ID NO: 2006434 - RNA, 19 nt, Artificial Sequence
  Description of Artificial Sequence: Synthetic oligonucleotide
  Sense strand starting at position 2212 of SEQ ID NO: 1880950
guguauccagucuagagaa

SEQ ID NO: 2006435 - RNA, 19 nt, Artificial Sequence
  Description of Artificial Sequence: Synthetic oligonucleotide
  Antisense strand to SEQ ID NO: 2006434
uucucuagacuggauacac

SEQ ID NO: 2006436 - RNA, 19 nt, Artificial Sequence
  Description of Artificial Sequence: Synthetic oligonucleotide
  Sense strand starting at position 2259 of SEQ ID NO: 1880950
gucuauugucgaguugcau

SEQ ID NO: 2006437 - RNA, 19 nt, Artificial Sequence
  Description of Artificial Sequence: Synthetic oligonucleotide
  Antisense strand to SEQ ID NO: 2006436
augcaacucgacaauagac

SEQ ID NO: 2006438 - RNA, 19 nt, Artificial Sequence
  Description of Artificial Sequence: Synthetic oligonucleotide
  Sense strand starting at position 2442 of SEQ ID NO: 1880950
cguauuuaguccuuaccuu

SEQ ID NO: 2006439 - RNA, 19 nt, Artificial Sequence
  Description of Artificial Sequence: Synthetic oligonucleotide
  Antisense strand to SEQ ID NO: 2006438
aagguaaggacuaaauacg

SEQ ID NO: 2006440 - RNA, 19 nt, Artificial Sequence
  Description of Artificial Sequence: Synthetic oligonucleotide
  Sense strand starting at position 2488 of SEQ ID NO: 1880950
caaacuuugguagacguaa

SEQ ID NO: 2006441 - RNA, 19 nt, Artificial Sequence
  Description of Artificial Sequence: Synthetic oligonucleotide
  Antisense strand to SEQ ID NO: 2006440
uuacgucuaccaaaguuug

SEQ ID NO: 2006442 - RNA, 19 nt, Artificial Sequence
  Description of Artificial Sequence: Synthetic oligonucleotide
  Sense strand starting at position 2858 of SEQ ID NO: 1880950
caggaauguuaggucucaa

SEQ ID NO: 2006443 - RNA, 19 nt, Artificial Sequence
  Description of Artificial Sequence: Synthetic oligonucleotide
  Antisense strand to SEQ ID NO: 2006442
uugagaccuaacauuccug

SEQ ID NO: 2006444 - RNA, 19 nt, Artificial Sequence
  Description of Artificial Sequence: Synthetic oligonucleotide
  Sense strand starting at position 2877 of SEQ ID NO: 1880950
ugaaauccuuguguuaaag

SEQ ID NO: 2006445 - RNA, 19 nt, Artificial Sequence
  Description of Artificial Sequence: Synthetic oligonucleotide
  Antisense strand to SEQ ID NO: 2006444
cuuuaacacaaggauuuca

SEQ ID NO: 2006446 - RNA, 19 nt, Artificial Sequence
  Description of Artificial Sequence: Synthetic oligonucleotide
  Sense strand starting at position 3110 of SEQ ID NO: 1880950
uuuagauacucaucuguca

SEQ ID NO: 2006447 - RNA, 19 nt, Artificial Sequence
  Description of Artificial Sequence: Synthetic oligonucleotide
  Antisense strand to SEQ ID NO: 2006446
ugacagaugaguaucuaaa

SEQ ID NO: 2006448 - RNA, 19 nt, Artificial Sequence
  Description of Artificial Sequence: Synthetic oligonucleotide
  Sense strand starting at position 3113 of SEQ ID NO: 1880950
agauacucaucugucaaug

SEQ ID NO: 2006449 - RNA, 19 nt, Artificial Sequence
  Description of Artificial Sequence: Synthetic oligonucleotide
  Antisense strand to SEQ ID NO: 2006448
cauugacagaugaguaucu

SEQ ID NO: 2006450 - RNA, 19 nt, Artificial Sequence
  Description of Artificial Sequence: Synthetic oligonucleotide
  Sense strand starting at position 3406 of SEQ ID NO: 1880950
auuguugucacuggaaaug

SEQ ID NO: 2006451 - RNA, 19 nt, Artificial Sequence
  Description of Artificial Sequence: Synthetic oligonucleotide
  Antisense strand to SEQ ID NO: 2006450
cauuuccagugacaacaau

SEQ ID NO: 2006452 - RNA, 19 nt, Artificial Sequence
  Description of Artificial Sequence: Synthetic oligonucleotide
  Sense strand starting at position 3616 of SEQ ID NO: 1880950
aaugcuagaguuuagcaua

SEQ ID NO: 2006453 - RNA, 19 nt, Artificial Sequence
  Description of Artificial Sequence: Synthetic oligonucleotide
  Antisense strand to SEQ ID NO: 2006452
uaugcuaaacucuagcauu

SEQ ID NO: 2006454 - RNA, 19 nt, Artificial Sequence
  Description of Artificial Sequence: Synthetic oligonucleotide
  Sense strand starting at position 23 of SEQ ID NO: 1880951
guaucaugacaguauaauu

SEQ ID NO: 2006455 - RNA, 19 nt, Artificial Sequence
  Description of Artificial Sequence: Synthetic oligonucleotide
  Antisense strand to SEQ ID NO: 2006454
aauuauacugucaugauac

SEQ ID NO: 2006456 - RNA, 19 nt, Artificial Sequence
  Description of Artificial Sequence: Synthetic oligonucleotide
  Sense strand starting at position 33 of SEQ ID NO: 1880951
aguauaauuguugaccuuu

SEQ ID NO: 2006457 - RNA, 19 nt, Artificial Sequence
  Description of Artificial Sequence: Synthetic oligonucleotide
  Antisense strand to SEQ ID NO: 2006456
aaaggucaacaauuauacu

SEQ ID NO: 2006458 - RNA, 19 nt, Artificial Sequence
  Description of Artificial Sequence: Synthetic oligonucleotide
  Sense strand starting at position 174 of SEQ ID NO: 1880951
ugcgauaccaaugaguuaa

SEQ ID NO: 2006459 - RNA, 19 nt, Artificial Sequence
  Description of Artificial Sequence: Synthetic oligonucleotide
  Antisense strand to SEQ ID NO: 2006458
uuaacucauugguaucgca

SEQ ID NO: 2006460 - RNA, 19 nt, Artificial Sequence
  Description of Artificial Sequence: Synthetic oligonucleotide
  Sense strand starting at position 185 of SEQ ID NO: 1880951
ugaguuaaucauggcauau

SEQ ID NO: 2006461 - RNA, 19 nt, Artificial Sequence
  Description of Artificial Sequence: Synthetic oligonucleotide
  Antisense strand to SEQ ID NO: 2006460
auaugccaugauuaacuca

SEQ ID NO: 2006462 - RNA, 19 nt, Artificial Sequence
  Description of Artificial Sequence: Synthetic oligonucleotide
  Sense strand starting at position 436 of SEQ ID NO: 1880951
augguuagcauagaugcaa

SEQ ID NO: 2006463 - RNA, 19 nt, Artificial Sequence
  Description of Artificial Sequence: Synthetic oligonucleotide
  Antisense strand to SEQ ID NO: 2006462
uugcaucuaugcuaaccau

SEQ ID NO: 2006464 - RNA, 19 nt, Artificial Sequence
  Description of Artificial Sequence: Synthetic oligonucleotide
  Sense strand starting at position 631 of SEQ ID NO: 1880951
cuggaagauuuacaaccau

SEQ ID NO: 2006465 - RNA, 19 nt, Artificial Sequence
  Description of Artificial Sequence: Synthetic oligonucleotide
  Antisense strand to SEQ ID NO: 2006464
augguuguaaaucuuccag

SEQ ID NO: 2006466 - RNA, 19 nt, Artificial Sequence
  Description of Artificial Sequence: Synthetic oligonucleotide
  Sense strand starting at position 660 of SEQ ID NO: 1880951
ugauuacucagauggcaga

SEQ ID NO: 2006467 - RNA, 19 nt, Artificial Sequence
  Description of Artificial Sequence: Synthetic oligonucleotide
  Antisense strand to SEQ ID NO: 2006466
ucugccaucugaguaauca

SEQ ID NO: 2006468 - RNA, 19 nt, Artificial Sequence
  Description of Artificial Sequence: Synthetic oligonucleotide
  Sense strand starting at position 674 of SEQ ID NO: 1880951
gcagacagauauucucagu

SEQ ID NO: 2006469 - RNA, 19 nt, Artificial Sequence
  Description of Artificial Sequence: Synthetic oligonucleotide
  Antisense strand to SEQ ID NO: 2006468
acugagaauaucugucugc

SEQ ID NO: 2006470 - RNA, 19 nt, Artificial Sequence
  Description of Artificial Sequence: Synthetic oligonucleotide
  Sense strand starting at position 771 of SEQ ID NO: 1880951
gagagcucuguuuaaccua

SEQ ID NO: 2006471 - RNA, 19 nt, Artificial Sequence
  Description of Artificial Sequence: Synthetic oligonucleotide
  Antisense strand to SEQ ID NO: 2006470
uagguuaaacagagcucuc

SEQ ID NO: 2006472 - RNA, 19 nt, Artificial Sequence
  Description of Artificial Sequence: Synthetic oligonucleotide
  Sense strand starting at position 887 of SEQ ID NO: 1880951
guuacauucugauuacaag

SEQ ID NO: 2006473 - RNA, 19 nt, Artificial Sequence
  Description of Artificial Sequence: Synthetic oligonucleotide
  Antisense strand to SEQ ID NO: 2006472
cuuguaaucagaauguaac

SEQ ID NO: 2006474 - RNA, 19 nt, Artificial Sequence
  Description of Artificial Sequence: Synthetic oligonucleotide
  Sense strand starting at position 929 of SEQ ID NO: 1880951
aguucuuugugauccagaa

SEQ ID NO: 2006475 - RNA, 19 nt, Artificial Sequence
  Description of Artificial Sequence: Synthetic oligonucleotide
  Antisense strand to SEQ ID NO: 2006474
uucuggaucacaaagaacu

SEQ ID NO: 2006476 - RNA, 19 nt, Artificial Sequence
  Description of Artificial Sequence: Synthetic oligonucleotide
  Sense strand starting at position 1079 of SEQ ID NO: 1880951
aagagaggguauuaagaaa

SEQ ID NO: 2006477 - RNA, 19 nt, Artificial Sequence
  Description of Artificial Sequence: Synthetic oligonucleotide
  Antisense strand to SEQ ID NO: 2006476
uuucuuaauacccucucuu

SEQ ID NO: 2006478 - RNA, 19 nt, Artificial Sequence
  Description of Artificial Sequence: Synthetic oligonucleotide
  Sense strand starting at position 1255 of SEQ ID NO: 1880951
gguggcaacucaguagaaa

SEQ ID NO: 2006479 - RNA, 19 nt, Artificial Sequence
  Description of Artificial Sequence: Synthetic oligonucleotide
  Antisense strand to SEQ ID NO: 2006478
uuucuacugaguugccacc

SEQ ID NO: 2006480 - RNA, 19 nt, Artificial Sequence
  Description of Artificial Sequence: Synthetic oligonucleotide
  Sense strand starting at position 1341 of SEQ ID NO: 1880951
uguaguaauguauauacac

SEQ ID NO: 2006481 - RNA, 19 nt, Artificial Sequence
  Description of Artificial Sequence: Synthetic oligonucleotide
  Antisense strand to SEQ ID NO: 2006480
guguauauacauuacuaca

SEQ ID NO: 2006482 - RNA, 19 nt, Artificial Sequence
  Description of Artificial Sequence: Synthetic oligonucleotide
  Sense strand starting at position 1372 of SEQ ID NO: 1880951
cgcgguguguagauccaua

SEQ ID NO: 2006483 - RNA, 19 nt, Artificial Sequence
  Description of Artificial Sequence: Synthetic oligonucleotide
  Antisense strand to SEQ ID NO: 2006482
uauggaucuacacaccgcg

SEQ ID NO: 2006484 - RNA, 19 nt, Artificial Sequence
  Description of Artificial Sequence: Synthetic oligonucleotide
  Sense strand starting at position 1458 of SEQ ID NO: 1880951
agugauucucaguaaauua

SEQ ID NO: 2006485 - RNA, 19 nt, Artificial Sequence
  Description of Artificial Sequence: Synthetic oligonucleotide
  Antisense strand to SEQ ID NO: 2006484
uaauuuacugagaaucacu

SEQ ID NO: 2006486 - RNA, 19 nt, Artificial Sequence
  Description of Artificial Sequence: Synthetic oligonucleotide
  Sense strand starting at position 1748 of SEQ ID NO: 1880951
ucguacucaaagugaauga

SEQ ID NO: 2006487 - RNA, 19 nt, Artificial Sequence
  Description of Artificial Sequence: Synthetic oligonucleotide
  Antisense strand to SEQ ID NO: 2006486
ucauucacuuugaguacga

SEQ ID NO: 2006488 - RNA, 19 nt, Artificial Sequence
  Description of Artificial Sequence: Synthetic oligonucleotide
  Sense strand starting at position 1749 of SEQ ID NO: 1880951
cguacucaaagugaaugau

SEQ ID NO: 2006489 - RNA, 19 nt, Artificial Sequence
  Description of Artificial Sequence: Synthetic oligonucleotide
  Antisense strand to SEQ ID NO: 2006488
aucauucacuuugaguacg

SEQ ID NO: 2006490 - RNA, 19 nt, Artificial Sequence
  Description of Artificial Sequence: Synthetic oligonucleotide
  Sense strand starting at position 1859 of SEQ ID NO: 1880951
ucauuugcuugucugaagu

SEQ ID NO: 2006491 - RNA, 19 nt, Artificial Sequence
  Description of Artificial Sequence: Synthetic oligonucleotide
  Antisense strand to SEQ ID NO: 2006490
acuucagacaagcaaauga

SEQ ID NO: 2006492 - RNA, 19 nt, Artificial Sequence
  Description of Artificial Sequence: Synthetic oligonucleotide
  Sense strand starting at position 1965 of SEQ ID NO: 1880951
ccagaaguggugcauauua

SEQ ID NO: 2006493 - RNA, 19 nt, Artificial Sequence
  Description of Artificial Sequence: Synthetic oligonucleotide
  Antisense strand to SEQ ID NO: 2006492
uaauaugcaccacuucugg

SEQ ID NO: 2006494 - RNA, 19 nt, Artificial Sequence
  Description of Artificial Sequence: Synthetic oligonucleotide
  Sense strand starting at position 1967 of SEQ ID NO: 1880951
agaaguggugcauauuacu

SEQ ID NO: 2006495 - RNA, 19 nt, Artificial Sequence
  Description of Artificial Sequence: Synthetic oligonucleotide
  Antisense strand to SEQ ID NO: 2006494
aguaauaugcaccacuucu

SEQ ID NO: 2006496 - RNA, 19 nt, Artificial Sequence
  Description of Artificial Sequence: Synthetic oligonucleotide
  Sense strand starting at position 2109 of SEQ ID NO: 1880951
cgugcuauccaagcuucuu

SEQ ID NO: 2006497 - RNA, 19 nt, Artificial Sequence
  Description of Artificial Sequence: Synthetic oligonucleotide
  Antisense strand to SEQ ID NO: 2006496
aagaagcuuggauagcacg

SEQ ID NO: 2006498 - RNA, 19 nt, Artificial Sequence
  Description of Artificial Sequence: Synthetic oligonucleotide
  Sense strand starting at position 2157 of SEQ ID NO: 1880951
uuuagaaacuguuugaacu

SEQ ID NO: 2006499 - RNA, 19 nt, Artificial Sequence
  Description of Artificial Sequence: Synthetic oligonucleotide
  Antisense strand to SEQ ID NO: 2006498
aguucaaacaguuucuaaa

SEQ ID NO: 2006500 - RNA, 19 nt, Artificial Sequence
  Description of Artificial Sequence: Synthetic oligonucleotide
  Sense strand starting at position 2158 of SEQ ID NO: 1880951
uuagaaacuguuugaacuu

SEQ ID NO: 2006501 - RNA, 19 nt, Artificial Sequence
  Description of Artificial Sequence: Synthetic oligonucleotide
  Antisense strand to SEQ ID NO: 2006500
aaguucaaacaguuucuaa

SEQ ID NO: 2006502 - RNA, 19 nt, Artificial Sequence
  Description of Artificial Sequence: Synthetic oligonucleotide
  Sense strand starting at position 2471 of SEQ ID NO: 1880951
caguuagcacaucagaguu

SEQ ID NO: 2006503 - RNA, 19 nt, Artificial Sequence
  Description of Artificial Sequence: Synthetic oligonucleotide
  Antisense strand to SEQ ID NO: 2006502
aacucugaugugcuaacug

SEQ ID NO: 2006504 - RNA, 19 nt, Artificial Sequence
  Description of Artificial Sequence: Synthetic oligonucleotide
  Sense strand starting at position 2619 of SEQ ID NO: 1880951
cuucuaucaucauugaugu

SEQ ID NO: 2006505 - RNA, 19 nt, Artificial Sequence
  Description of Artificial Sequence: Synthetic oligonucleotide
  Antisense strand to SEQ ID NO: 2006504
acaucaaugaugauagaag

SEQ ID NO: 2006506 - RNA, 19 nt, Artificial Sequence
  Description of Artificial Sequence: Synthetic oligonucleotide
  Sense strand starting at position 2736 of SEQ ID NO: 1880951
aaguucugugagggagaua

SEQ ID NO: 2006507 - RNA, 19 nt, Artificial Sequence
  Description of Artificial Sequence: Synthetic oligonucleotide
  Antisense strand to SEQ ID NO: 2006506
uaucucccucacagaacuu

SEQ ID NO: 2006508 - RNA, 19 nt, Artificial Sequence
  Description of Artificial Sequence: Synthetic oligonucleotide
  Sense strand starting at position 2876 of SEQ ID NO: 1880951
acauuaucucuugaagugu

SEQ ID NO: 2006509 - RNA, 19 nt, Artificial Sequence
  Description of Artificial Sequence: Synthetic oligonucleotide
  Antisense strand to SEQ ID NO: 2006508
acacuucaagagauaaugu

SEQ ID NO: 2006510 - RNA, 19 nt, Artificial Sequence
  Description of Artificial Sequence: Synthetic oligonucleotide
  Sense strand starting at position 2882 of SEQ ID NO: 1880951
ucucuugaaguguaaaucu

SEQ ID NO: 2006511 - RNA, 19 nt, Artificial Sequence
  Description of Artificial Sequence: Synthetic oligonucleotide
  Antisense strand to SEQ ID NO: 2006510
agauuuacacuucaagaga

SEQ ID NO: 2006512 - RNA, 19 nt, Artificial Sequence
  Description of Artificial Sequence: Synthetic oligonucleotide
  Sense strand starting at position 2929 of SEQ ID NO: 1880951
cuaaguugggcccagaaau

SEQ ID NO: 2006513 - RNA, 19 nt, Artificial Sequence
  Description of Artificial Sequence: Synthetic oligonucleotide
  Antisense strand to SEQ ID NO: 2006512
auuucugggcccaacuuag

SEQ ID NO: 2006514 - RNA, 19 nt, Artificial Sequence
  Description of Artificial Sequence: Synthetic oligonucleotide
  Sense strand starting at position 3109 of SEQ ID NO: 1880951
gcagaaagaugaguaauua

SEQ ID NO: 2006515 - RNA, 19 nt, Artificial Sequence
  Description of Artificial Sequence: Synthetic oligonucleotide
  Antisense strand to SEQ ID NO: 2006514
uaauuacucaucuuucugc

SEQ ID NO: 2006516 - RNA, 19 nt, Artificial Sequence
  Description of Artificial Sequence: Synthetic oligonucleotide
  Sense strand starting at position 3162 of SEQ ID NO: 1880951
ucaagauaaugucugugaa

SEQ ID NO: 2006517 - RNA, 19 nt, Artificial Sequence
  Description of Artificial Sequence: Synthetic oligonucleotide
  Antisense strand to SEQ ID NO: 2006516
uucacagacauuaucuuga

SEQ ID NO: 2006518 - RNA, 19 nt, Artificial Sequence
  Description of Artificial Sequence: Synthetic oligonucleotide
  Sense strand starting at position 3163 of SEQ ID NO: 1880951
caagauaaugucugugaag

SEQ ID NO: 2006519 - RNA, 19 nt, Artificial Sequence
  Description of Artificial Sequence: Synthetic oligonucleotide
  Antisense strand to SEQ ID NO: 2006518
cuucacagacauuaucuug

SEQ ID NO: 2006520 - RNA, 19 nt, Artificial Sequence
  Description of Artificial Sequence: Synthetic oligonucleotide
  Sense strand starting at position 3164 of SEQ ID NO: 1880951
aagauaaugucugugaagg

SEQ ID NO: 2006521 - RNA, 19 nt, Artificial Sequence
  Description of Artificial Sequence: Synthetic oligonucleotide
  Antisense strand to SEQ ID NO: 2006520
ccuucacagacauuaucuu

SEQ ID NO: 2006522 - RNA, 19 nt, Artificial Sequence
  Description of Artificial Sequence: Synthetic oligonucleotide
  Sense strand starting at position 3165 of SEQ ID NO: 1880951
agauaaugucugugaagga

SEQ ID NO: 2006523 - RNA, 19 nt, Artificial Sequence
  Description of Artificial Sequence: Synthetic oligonucleotide
  Antisense strand to SEQ ID NO: 2006522
uccuucacagacauuaucu

SEQ ID NO: 2006524 - RNA, 19 nt, Artificial Sequence
  Description of Artificial Sequence: Synthetic oligonucleotide
  Sense strand starting at position 3278 of SEQ ID NO: 1880951
uauguacuagagugagaua

SEQ ID NO: 2006525 - RNA, 19 nt, Artificial Sequence
  Description of Artificial Sequence: Synthetic oligonucleotide
  Antisense strand to SEQ ID NO: 2006524
uaucucacucuaguacaua

SEQ ID NO: 2006526 - RNA, 19 nt, Artificial Sequence
  Description of Artificial Sequence: Synthetic oligonucleotide
  Sense strand starting at position 3390 of SEQ ID NO: 1880951
aaauguaguuaacuaugga

SEQ ID NO: 2006527 - RNA, 19 nt, Artificial Sequence
  Description of Artificial Sequence: Synthetic oligonucleotide
  Antisense strand to SEQ ID NO: 2006526
uccauaguuaacuacauuu

SEQ ID NO: 2006528 - RNA, 19 nt, Artificial Sequence
  Description of Artificial Sequence: Synthetic oligonucleotide
  Sense strand starting at position 3721 of SEQ ID NO: 1880951
gccuuucugcgcuugacuu

SEQ ID NO: 2006529 - RNA, 19 nt, Artificial Sequence
  Description of Artificial Sequence: Synthetic oligonucleotide
  Antisense strand to SEQ ID NO: 2006528
aagucaagcgcagaaaggc

SEQ ID NO: 2006530 - RNA, 19 nt, Artificial Sequence
  Description of Artificial Sequence: Synthetic oligonucleotide
  Sense strand starting at position 3814 of SEQ ID NO: 1880951
ugaacaguauguguauaua

SEQ ID NO: 2006531 - RNA, 19 nt, Artificial Sequence
  Description of Artificial Sequence: Synthetic oligonucleotide
  Antisense strand to SEQ ID NO: 2006530
uauauacacauacuguuca

SEQ ID NO: 2006532 - RNA, 19 nt, Artificial Sequence
  Description of Artificial Sequence: Synthetic oligonucleotide
  Sense strand starting at position 3869 of SEQ ID NO: 1880951
guggacucuuagguuaauu

SEQ ID NO: 2006533 - RNA, 19 nt, Artificial Sequence
  Description of Artificial Sequence: Synthetic oligonucleotide
  Antisense strand to SEQ ID NO: 2006532
aauuaaccuaagaguccac

SEQ ID NO: 2006534 - RNA, 19 nt, Artificial Sequence
  Description of Artificial Sequence: Synthetic oligonucleotide
  Sense strand starting at position 5 of SEQ ID NO: 1880952
aggugaacuagccauuguu

SEQ ID NO: 2006535 - RNA, 19 nt, Artificial Sequence
  Description of Artificial Sequence: Synthetic oligonucleotide
  Antisense strand to SEQ ID NO: 2006534
aacaauggcuaguucaccu

SEQ ID NO: 2006536 - RNA, 19 nt, Artificial Sequence
  Description of Artificial Sequence: Synthetic oligonucleotide
  Sense strand starting at position 8 of SEQ ID NO: 1880952
ugaacuagccauuguuuga

SEQ ID NO: 2006537 - RNA, 19 nt, Artificial Sequence
  Description of Artificial Sequence: Synthetic oligonucleotide
  Antisense strand to SEQ ID NO: 2006536
ucaaacaauggcuaguuca

SEQ ID NO: 2006538 - RNA, 19 nt, Artificial Sequence
  Description of Artificial Sequence: Synthetic oligonucleotide
  Sense strand starting at position 21 of SEQ ID NO: 1880952
guuugaaaggcugagguuu

SEQ ID NO: 2006539 - RNA, 19 nt, Artificial Sequence
  Description of Artificial Sequence: Synthetic oligonucleotide
  Antisense strand to SEQ ID NO: 2006538
aaaccucagccuuucaaac

SEQ ID NO: 2006540 - RNA, 19 nt, Artificial Sequence
  Description of Artificial Sequence: Synthetic oligonucleotide
  Sense strand starting at position 67 of SEQ ID NO: 1880952
ggcugucugauauguucca

SEQ ID NO: 2006541 - RNA, 19 nt, Artificial Sequence
  Description of Artificial Sequence: Synthetic oligonucleotide
  Antisense strand to SEQ ID NO: 2006540
uggaacauaucagacagcc

SEQ ID NO: 2006542 - RNA, 19 nt, Artificial Sequence
  Description of Artificial Sequence: Synthetic oligonucleotide
  Sense strand starting at position 248 of SEQ ID NO: 1880952
cucugacaggucuagcuau

SEQ ID NO: 2006543 - RNA, 19 nt, Artificial Sequence
  Description of Artificial Sequence: Synthetic oligonucleotide
  Antisense strand to SEQ ID NO: 2006542
auagcuagaccugucagag

SEQ ID NO: 2006544 - RNA, 19 nt, Artificial Sequence
  Description of Artificial Sequence: Synthetic oligonucleotide
  Sense strand starting at position 401 of SEQ ID NO: 1880952
auguguacggacugucauu

SEQ ID NO: 2006545 - RNA, 19 nt, Artificial Sequence
  Description of Artificial Sequence: Synthetic oligonucleotide
  Antisense strand to SEQ ID NO: 2006544
aaugacaguccguacacau

SEQ ID NO: 2006546 - RNA, 19 nt, Artificial Sequence
  Description of Artificial Sequence: Synthetic oligonucleotide
  Sense strand starting at position 458 of SEQ ID NO: 1880952
gaagcaaugugucccaagu

SEQ ID NO: 2006547 - RNA, 19 nt, Artificial Sequence
  Description of Artificial Sequence: Synthetic oligonucleotide
  Antisense strand to SEQ ID NO: 2006546
acuugggacacauugcuuc

SEQ ID NO: 2006548 - RNA, 19 nt, Artificial Sequence
  Description of Artificial Sequence: Synthetic oligonucleotide
  Sense strand starting at position 537 of SEQ ID NO: 1880952
ucuccauuacguuggaaag

SEQ ID NO: 2006549 - RNA, 19 nt, Artificial Sequence
  Description of Artificial Sequence: Synthetic oligonucleotide
  Antisense strand to SEQ ID NO: 2006548
cuuuccaacguaauggaga

SEQ ID NO: 2006550 - RNA, 19 nt, Artificial Sequence
  Description of Artificial Sequence: Synthetic oligonucleotide
  Sense strand starting at position 538 of SEQ ID NO: 1880952
cuccauuacguuggaaaga

SEQ ID NO: 2006551 - RNA, 19 nt, Artificial Sequence
  Description of Artificial Sequence: Synthetic oligonucleotide
  Antisense strand to SEQ ID NO: 2006550
ucuuuccaacguaauggag

SEQ ID NO: 2006552 - RNA, 19 nt, Artificial Sequence
  Description of Artificial Sequence: Synthetic oligonucleotide
  Sense strand starting at position 539 of SEQ ID NO: 1880952
uccauuacguuggaaagau

SEQ ID NO: 2006553 - RNA, 19 nt, Artificial Sequence
  Description of Artificial Sequence: Synthetic oligonucleotide
  Antisense strand to SEQ ID NO: 2006552
aucuuuccaacguaaugga

SEQ ID NO: 2006554 - RNA, 19 nt, Artificial Sequence
  Description of Artificial Sequence: Synthetic oligonucleotide
  Sense strand starting at position 587 of SEQ ID NO: 1880952
gcuguuaaacgacagcaaa

SEQ ID NO: 2006555 - RNA, 19 nt, Artificial Sequence
  Description of Artificial Sequence: Synthetic oligonucleotide
  Antisense strand to SEQ ID NO: 2006554
uuugcugucguuuaacagc

SEQ ID NO: 2006556 - RNA, 19 nt, Artificial Sequence
  Description of Artificial Sequence: Synthetic oligonucleotide
  Sense strand starting at position 615 of SEQ ID NO: 1880952
uuccgaauauggcaauuaa

SEQ ID NO: 2006557 - RNA, 19 nt, Artificial Sequence
  Description of Artificial Sequence: Synthetic oligonucleotide
  Antisense strand to SEQ ID NO: 2006556
uuaauugccauauucggaa

SEQ ID NO: 2006558 - RNA, 19 nt, Artificial Sequence
  Description of Artificial Sequence: Synthetic oligonucleotide
  Sense strand starting at position 625 of SEQ ID NO: 1880952
ggcaauuaauaggcuagua

SEQ ID NO: 2006559 - RNA, 19 nt, Artificial Sequence
  Description of Artificial Sequence: Synthetic oligonucleotide
  Antisense strand to SEQ ID NO: 2006558
uacuagccuauuaauugcc

SEQ ID NO: 2006560 - RNA, 19 nt, Artificial Sequence
  Description of Artificial Sequence: Synthetic oligonucleotide
  Sense strand starting at position 705 of SEQ ID NO: 1880952
agaccagucucacucugua

SEQ ID NO: 2006561 - RNA, 19 nt, Artificial Sequence
  Description of Artificial Sequence: Synthetic oligonucleotide
  Antisense strand to SEQ ID NO: 2006560
uacagagugagacuggucu

SEQ ID NO: 2006562 - RNA, 19 nt, Artificial Sequence
  Description of Artificial Sequence: Synthetic oligonucleotide
  Sense strand starting at position 995 of SEQ ID NO: 1880952
ggcccacccuuaguuagaa

SEQ ID NO: 2006563 - RNA, 19 nt, Artificial Sequence
  Description of Artificial Sequence: Synthetic oligonucleotide
  Antisense strand to SEQ ID NO: 2006562
uucuaacuaagggugggcc

SEQ ID NO: 2006564 - RNA, 19 nt, Artificial Sequence
  Description of Artificial Sequence: Synthetic oligonucleotide
  Sense strand starting at position 996 of SEQ ID NO: 1880952
gcccacccuuaguuagaaa

SEQ ID NO: 2006565 - RNA, 19 nt, Artificial Sequence
  Description of Artificial Sequence: Synthetic oligonucleotide
  Antisense strand to SEQ ID NO: 2006564
uuucuaacuaagggugggc

SEQ ID NO: 2006566 - RNA, 19 nt, Artificial Sequence
  Description of Artificial Sequence: Synthetic oligonucleotide
  Sense strand starting at position 1732 of SEQ ID NO: 1880952
gagucugucugacucagaa

SEQ ID NO: 2006567 - RNA, 19 nt, Artificial Sequence
  Description of Artificial Sequence: Synthetic oligonucleotide
  Antisense strand to SEQ ID NO: 2006566
uucugagucagacagacuc

SEQ ID NO: 2006568 - RNA, 19 nt, Artificial Sequence
  Description of Artificial Sequence: Synthetic oligonucleotide
  Sense strand starting at position 1736 of SEQ ID NO: 1880952
cugucugacucagaaucga

SEQ ID NO: 2006569 - RNA, 19 nt, Artificial Sequence
  Description of Artificial Sequence: Synthetic oligonucleotide
  Antisense strand to SEQ ID NO: 2006568
ucgauucugagucagacag

SEQ ID NO: 2006570 - RNA, 19 nt, Artificial Sequence
  Description of Artificial Sequence: Synthetic oligonucleotide
  Sense strand starting at position 2037 of SEQ ID NO: 1880952
gcagcugucuuuccuuauu

SEQ ID NO: 2006571 - RNA, 19 nt, Artificial Sequence
  Description of Artificial Sequence: Synthetic oligonucleotide
  Antisense strand to SEQ ID NO: 2006570
aauaaggaaagacagcugc

SEQ ID NO: 2006572 - RNA, 19 nt, Artificial Sequence
  Description of Artificial Sequence: Synthetic oligonucleotide
  Sense strand starting at position 2293 of SEQ ID NO: 1880952
auaaaugucucgcggccaa

SEQ ID NO: 2006573 - RNA, 19 nt, Artificial Sequence
  Description of Artificial Sequence: Synthetic oligonucleotide
  Antisense strand to SEQ ID NO: 2006572
uuggccgcgagacauuuau

SEQ ID NO: 2006574 - RNA, 19 nt, Artificial Sequence
  Description of Artificial Sequence: Synthetic oligonucleotide
  Sense strand starting at position 2413 of SEQ ID NO: 1880952
cccuuauucuuccggacaa

SEQ ID NO: 2006575 - RNA, 19 nt, Artificial Sequence
  Description of Artificial Sequence: Synthetic oligonucleotide
  Antisense strand to SEQ ID NO: 2006574
uuguccggaagaauaaggg

SEQ ID NO: 2006576 - RNA, 19 nt, Artificial Sequence
  Description of Artificial Sequence: Synthetic oligonucleotide
  Sense strand starting at position 2414 of SEQ ID NO: 1880952
ccuuauucuuccggacaac

SEQ ID NO: 2006577 - RNA, 19 nt, Artificial Sequence
  Description of Artificial Sequence: Synthetic oligonucleotide
  Antisense strand to SEQ ID NO: 2006576
guuguccggaagaauaagg

SEQ ID NO: 2006578 - RNA, 19 nt, Artificial Sequence
  Description of Artificial Sequence: Synthetic oligonucleotide
  Sense strand starting at position 2415 of SEQ ID NO: 1880952
cuuauucuuccggacaacu

SEQ ID NO: 2006579 - RNA, 19 nt, Artificial Sequence
  Description of Artificial Sequence: Synthetic oligonucleotide
  Antisense strand to SEQ ID NO: 2006578
aguuguccggaagaauaag

SEQ ID NO: 2006580 - RNA, 19 nt, Artificial Sequence
  Description of Artificial Sequence: Synthetic oligonucleotide
  Sense strand starting at position 2488 of SEQ ID NO: 1880952
gcucgauuuauccaacgcu

SEQ ID NO: 2006581 - RNA, 19 nt, Artificial Sequence
  Description of Artificial Sequence: Synthetic oligonucleotide
  Antisense strand to SEQ ID NO: 2006580
agcguuggauaaaucgagc

SEQ ID NO: 2006582 - RNA, 19 nt, Artificial Sequence
  Description of Artificial Sequence: Synthetic oligonucleotide
  Sense strand starting at position 2491 of SEQ ID NO: 1880952
cgauuuauccaacgcugau

SEQ ID NO: 2006583 - RNA, 19 nt, Artificial Sequence
  Description of Artificial Sequence: Synthetic oligonucleotide
  Antisense strand to SEQ ID NO: 2006582
aucagcguuggauaaaucg

SEQ ID NO: 2006584 - RNA, 19 nt, Artificial Sequence
  Description of Artificial Sequence: Synthetic oligonucleotide
  Sense strand starting at position 2501 of SEQ ID NO: 1880952
aacgcugaucagugaaaga

SEQ ID NO: 2006585 - RNA, 19 nt, Artificial Sequence
  Description of Artificial Sequence: Synthetic oligonucleotide
  Antisense strand to SEQ ID NO: 2006584
ucuuucacugaucagcguu

SEQ ID NO: 2006586 - RNA, 19 nt, Artificial Sequence
  Description of Artificial Sequence: Synthetic oligonucleotide
  Sense strand starting at position 2620 of SEQ ID NO: 1880952
cuuggaaugcccugacuca

SEQ ID NO: 2006587 - RNA, 19 nt, Artificial Sequence
  Description of Artificial Sequence: Synthetic oligonucleotide
  Antisense strand to SEQ ID NO: 2006586
ugagucagggcauuccaag

SEQ ID NO: 2006588 - RNA, 19 nt, Artificial Sequence
  Description of Artificial Sequence: Synthetic oligonucleotide
  Sense strand starting at position 2621 of SEQ ID NO: 1880952
uuggaaugcccugacucau

SEQ ID NO: 2006589 - RNA, 19 nt, Artificial Sequence
  Description of Artificial Sequence: Synthetic oligonucleotide
  Antisense strand to SEQ ID NO: 2006588
augagucagggcauuccaa

SEQ ID NO: 2006590 - RNA, 19 nt, Artificial Sequence
  Description of Artificial Sequence: Synthetic oligonucleotide
  Sense strand starting at position 3216 of SEQ ID NO: 1880952
gcagcaaaguccucagggu

SEQ ID NO: 2006591 - RNA, 19 nt, Artificial Sequence
  Description of Artificial Sequence: Synthetic oligonucleotide
  Antisense strand to SEQ ID NO: 2006590
acccugaggacuuugcugc

SEQ ID NO: 2006592 - RNA, 19 nt, Artificial Sequence
  Description of Artificial Sequence: Synthetic oligonucleotide
  Sense strand starting at position 3223 of SEQ ID NO: 1880952
aguccucagggucaaguua

SEQ ID NO: 2006593 - RNA, 19 nt, Artificial Sequence
  Description of Artificial Sequence: Synthetic oligonucleotide
  Antisense strand to SEQ ID NO: 2006592
uaacuugacccugaggacu

SEQ ID NO: 2006594 - RNA, 19 nt, Artificial Sequence
  Description of Artificial Sequence: Synthetic oligonucleotide
  Sense strand starting at position 3382 of SEQ ID NO: 1880952
agucuucuuuccugcauga

SEQ ID NO: 2006595 - RNA, 19 nt, Artificial Sequence
  Description of Artificial Sequence: Synthetic oligonucleotide
  Antisense strand to SEQ ID NO: 2006594
ucaugcaggaaagaagacu

SEQ ID NO: 2006596 - RNA, 19 nt, Artificial Sequence
  Description of Artificial Sequence: Synthetic oligonucleotide
  Sense strand starting at position 3399 of SEQ ID NO: 1880952
gaacuagaguguccugaua

SEQ ID NO: 2006597 - RNA, 19 nt, Artificial Sequence
  Description of Artificial Sequence: Synthetic oligonucleotide
  Antisense strand to SEQ ID NO: 2006596
uaucaggacacucuaguuc

SEQ ID NO: 2006598 - RNA, 19 nt, Artificial Sequence
  Description of Artificial Sequence: Synthetic oligonucleotide
  Sense strand starting at position 3401 of SEQ ID NO: 1880952
acuagaguguccugauaac

SEQ ID NO: 2006599 - RNA, 19 nt, Artificial Sequence
  Description of Artificial Sequence: Synthetic oligonucleotide
  Antisense strand to SEQ ID NO: 2006598
guuaucaggacacucuagu

SEQ ID NO: 2006600 - RNA, 19 nt, Artificial Sequence
  Description of Artificial Sequence: Synthetic oligonucleotide
  Sense strand starting at position 3434 of SEQ ID NO: 1880952
ggcugaagucaagauauuc

SEQ ID NO: 2006601 - RNA, 19 nt, Artificial Sequence
  Description of Artificial Sequence: Synthetic oligonucleotide
  Antisense strand to SEQ ID NO: 2006600
gaauaucuugacuucagcc

SEQ ID NO: 2006602 - RNA, 19 nt, Artificial Sequence
  Description of Artificial Sequence: Synthetic oligonucleotide
  Sense strand starting at position 3765 of SEQ ID NO: 1880952
uuuggaggugcucaggaaa

SEQ ID NO: 2006603 - RNA, 19 nt, Artificial Sequence
  Description of Artificial Sequence: Synthetic oligonucleotide
  Antisense strand to SEQ ID NO: 2006602
uuuccugagcaccuccaaa

SEQ ID NO: 2006604 - RNA, 19 nt, Artificial Sequence
  Description of Artificial Sequence: Synthetic oligonucleotide
  Sense strand starting at position 3788 of SEQ ID NO: 1880952
agcucagagcuaugaugga

SEQ ID NO: 2006605 - RNA, 19 nt, Artificial Sequence
  Description of Artificial Sequence: Synthetic oligonucleotide
  Antisense strand to SEQ ID NO: 2006604
uccaucauagcucugagcu

SEQ ID NO: 2006606 - RNA, 19 nt, Artificial Sequence
  Description of Artificial Sequence: Synthetic oligonucleotide
  Sense strand starting at position 3795 of SEQ ID NO: 1880952
agcuaugauggaugaagca

SEQ ID NO: 2006607 - RNA, 19 nt, Artificial Sequence
  Description of Artificial Sequence: Synthetic oligonucleotide
  Antisense strand to SEQ ID NO: 2006606
ugcuucauccaucauagcu

SEQ ID NO: 2006608 - RNA, 19 nt, Artificial Sequence
  Description of Artificial Sequence: Synthetic oligonucleotide
  Sense strand starting at position 3871 of SEQ ID NO: 1880952
uguugucuuggccaaccaa

SEQ ID NO: 2006609 - RNA, 19 nt, Artificial Sequence
  Description of Artificial Sequence: Synthetic oligonucleotide
  Antisense strand to SEQ ID NO: 2006608
uugguuggccaagacaaca

SEQ ID NO: 2006610 - RNA, 19 nt, Artificial Sequence
  Description of Artificial Sequence: Synthetic oligonucleotide
  Sense strand starting at position 3909 of SEQ ID NO: 1880952
uggucaacuccuggaacga

SEQ ID NO: 2006611 - RNA, 19 nt, Artificial Sequence
  Description of Artificial Sequence: Synthetic oligonucleotide
  Antisense strand to SEQ ID NO: 2006610
ucguuccaggaguugacca

SEQ ID NO: 2006612 - RNA, 19 nt, Artificial Sequence
  Description of Artificial Sequence: Synthetic oligonucleotide
  Sense strand starting at position 40 of SEQ ID NO: 1880953
caggacuggcugugacaua

SEQ ID NO: 2006613 - RNA, 19 nt, Artificial Sequence
  Description of Artificial Sequence: Synthetic oligonucleotide
  Antisense strand to SEQ ID NO: 2006612
uaugucacagccaguccug

SEQ ID NO: 2006614 - RNA, 19 nt, Artificial Sequence
  Description of Artificial Sequence: Synthetic oligonucleotide
  Sense strand starting at position 53 of SEQ ID NO: 1880953
gacauagugcugugaggcu

SEQ ID NO: 2006615 - RNA, 19 nt, Artificial Sequence
  Description of Artificial Sequence: Synthetic oligonucleotide
  Antisense strand to SEQ ID NO: 2006614
agccucacagcacuauguc

SEQ ID NO: 2006616 - RNA, 19 nt, Artificial Sequence
  Description of Artificial Sequence: Synthetic oligonucleotide
  Sense strand starting at position 92 of SEQ ID NO: 1880953
aaggaagucugggaacaga

SEQ ID NO: 2006617 - RNA, 19 nt, Artificial Sequence
  Description of Artificial Sequence: Synthetic oligonucleotide
  Antisense strand to SEQ ID NO: 2006616
ucuguucccagacuuccuu

SEQ ID NO: 2006618 - RNA, 19 nt, Artificial Sequence
  Description of Artificial Sequence: Synthetic oligonucleotide
  Sense strand starting at position 181 of SEQ ID NO: 1880953
ggaagauuccagcaucuuc

SEQ ID NO: 2006619 - RNA, 19 nt, Artificial Sequence
  Description of Artificial Sequence: Synthetic oligonucleotide
  Antisense strand to SEQ ID NO: 2006618
gaagaugcuggaaucuucc

SEQ ID NO: 2006620 - RNA, 19 nt, Artificial Sequence
  Description of Artificial Sequence: Synthetic oligonucleotide
  Sense strand starting at position 567 of SEQ ID NO: 1880953
agguguuccagcugaggaa

SEQ ID NO: 2006621 - RNA, 19 nt, Artificial Sequence
  Description of Artificial Sequence: Synthetic oligonucleotide
  Antisense strand to SEQ ID NO: 2006620
uuccucagcuggaacaccu

SEQ ID NO: 2006622 - RNA, 19 nt, Artificial Sequence
  Description of Artificial Sequence: Synthetic oligonucleotide
  Sense strand starting at position 762 of SEQ ID NO: 1880953
guagcuuucuuucugaaga

SEQ ID NO: 2006623 - RNA, 19 nt, Artificial Sequence
  Description of Artificial Sequence: Synthetic oligonucleotide
  Antisense strand to SEQ ID NO: 2006622
ucuucagaaagaaagcuac

SEQ ID NO: 2006624 - RNA, 19 nt, Artificial Sequence
  Description of Artificial Sequence: Synthetic oligonucleotide
  Sense strand starting at position 960 of SEQ ID NO: 1880953
ccuacaguaucuucggaau

SEQ ID NO: 2006625 - RNA, 19 nt, Artificial Sequence
  Description of Artificial Sequence: Synthetic oligonucleotide
  Antisense strand to SEQ ID NO: 2006624
auuccgaagauacuguagg

SEQ ID NO: 2006626 - RNA, 19 nt, Artificial Sequence
  Description of Artificial Sequence: Synthetic oligonucleotide
  Sense strand starting at position 1094 of SEQ ID NO: 1880953
uuggaucuucucgguaaga

SEQ ID NO: 2006627 - RNA, 19 nt, Artificial Sequence
  Description of Artificial Sequence: Synthetic oligonucleotide
  Antisense strand to SEQ ID NO: 2006626
ucuuaccgagaagauccaa

SEQ ID NO: 2006628 - RNA, 19 nt, Artificial Sequence
  Description of Artificial Sequence: Synthetic oligonucleotide
  Sense strand starting at position 1095 of SEQ ID NO: 1880953
uggaucuucucgguaagaa

SEQ ID NO: 2006629 - RNA, 19 nt, Artificial Sequence
  Description of Artificial Sequence: Synthetic oligonucleotide
  Antisense strand to SEQ ID NO: 2006628
uucuuaccgagaagaucca

SEQ ID NO: 2006630 - RNA, 19 nt, Artificial Sequence
  Description of Artificial Sequence: Synthetic oligonucleotide
  Sense strand starting at position 1157 of SEQ ID NO: 1880953
gaagaaagguuguuucuug

SEQ ID NO: 2006631 - RNA, 19 nt, Artificial Sequence
  Description of Artificial Sequence: Synthetic oligonucleotide
  Antisense strand to SEQ ID NO: 2006630
caagaaacaaccuuucuuc

SEQ ID NO: 2006632 - RNA, 19 nt, Artificial Sequence
  Description of Artificial Sequence: Synthetic oligonucleotide
  Sense strand starting at position 1207 of SEQ ID NO: 1880953
uuaagaugacuaugcuguu

SEQ ID NO: 2006633 - RNA, 19 nt, Artificial Sequence
  Description of Artificial Sequence: Synthetic oligonucleotide
  Antisense strand to SEQ ID NO: 2006632
aacagcauagucaucuuaa

SEQ ID NO: 2006634 - RNA, 19 nt, Artificial Sequence
  Description of Artificial Sequence: Synthetic oligonucleotide
  Sense strand starting at position 1219 of SEQ ID NO: 1880953
ugcuguuguucuuccaaua

SEQ ID NO: 2006635 - RNA, 19 nt, Artificial Sequence
  Description of Artificial Sequence: Synthetic oligonucleotide
  Antisense strand to SEQ ID NO: 2006634
uauuggaagaacaacagca

SEQ ID NO: 2006636 - RNA, 19 nt, Artificial Sequence
  Description of Artificial Sequence: Synthetic oligonucleotide
  Sense strand starting at position 1241 of SEQ ID NO: 1880953
gggccucuccuaugacauu

SEQ ID NO: 2006637 - RNA, 19 nt, Artificial Sequence
  Description of Artificial Sequence: Synthetic oligonucleotide
  Antisense strand to SEQ ID NO: 2006636
aaugucauaggagaggccc

SEQ ID NO: 2006638 - RNA, 19 nt, Artificial Sequence
  Description of Artificial Sequence: Synthetic oligonucleotide
  Sense strand starting at position 1282 of SEQ ID NO: 1880953
gccgguuaggcccagauuu

SEQ ID NO: 2006639 - RNA, 19 nt, Artificial Sequence
  Description of Artificial Sequence: Synthetic oligonucleotide
  Antisense strand to SEQ ID NO: 2006638
aaaucugggccuaaccggc

SEQ ID NO: 2006640 - RNA, 19 nt, Artificial Sequence
  Description of Artificial Sequence: Synthetic oligonucleotide
  Sense strand starting at position 1322 of SEQ ID NO: 1880953
guugcagcucucuguaaga

SEQ ID NO: 2006641 - RNA, 19 nt, Artificial Sequence
  Description of Artificial Sequence: Synthetic oligonucleotide
  Antisense strand to SEQ ID NO: 2006640
ucuuacagagagcugcaac

SEQ ID NO: 2006642 - RNA, 19 nt, Artificial Sequence
  Description of Artificial Sequence: Synthetic oligonucleotide
  Sense strand starting at position 1335 of SEQ ID NO: 1880953
guaagagccuuucugagcu

SEQ ID NO: 2006643 - RNA, 19 nt, Artificial Sequence
  Description of Artificial Sequence: Synthetic oligonucleotide
  Antisense strand to SEQ ID NO: 2006642
agcucagaaaggcucuuac

SEQ ID NO: 2006644 - RNA, 19 nt, Artificial Sequence
  Description of Artificial Sequence: Synthetic oligonucleotide
  Sense strand starting at position 1447 of SEQ ID NO: 1880953
aaacaagaguucuggaaag

SEQ ID NO: 2006645 - RNA, 19 nt, Artificial Sequence
  Description of Artificial Sequence: Synthetic oligonucleotide
  Antisense strand to SEQ ID NO: 2006644
cuuuccagaacucuuguuu

SEQ ID NO: 2006646 - RNA, 19 nt, Artificial Sequence
  Description of Artificial Sequence: Synthetic oligonucleotide
  Sense strand starting at position 1800 of SEQ ID NO: 1880953
ggacucuuccaagguuaca

SEQ ID NO: 2006647 - RNA, 19 nt, Artificial Sequence
  Description of Artificial Sequence: Synthetic oligonucleotide
  Antisense strand to SEQ ID NO: 2006646
uguaaccuuggaagagucc

SEQ ID NO: 2006648 - RNA, 19 nt, Artificial Sequence
  Description of Artificial Sequence: Synthetic oligonucleotide
  Sense strand starting at position 1838 of SEQ ID NO: 1880953
ggaaguccuguccaagaug

SEQ ID NO: 2006649 - RNA, 19 nt, Artificial Sequence
  Description of Artificial Sequence: Synthetic oligonucleotide
  Antisense strand to SEQ ID NO: 2006648
caucuuggacaggacuucc

SEQ ID NO: 2006650 - RNA, 19 nt, Artificial Sequence
  Description of Artificial Sequence: Synthetic oligonucleotide
  Sense strand starting at position 1841 of SEQ ID NO: 1880953
aguccuguccaagaugaua

SEQ ID NO: 2006651 - RNA, 19 nt, Artificial Sequence
  Description of Artificial Sequence: Synthetic oligonucleotide
  Antisense strand to SEQ ID NO: 2006650
uaucaucuuggacaggacu

SEQ ID NO: 2006652 - RNA, 19 nt, Artificial Sequence
  Description of Artificial Sequence: Synthetic oligonucleotide
  Sense strand starting at position 1878 of SEQ ID NO: 1880953
cuagaaucuuggccucuga

SEQ ID NO: 2006653 - RNA, 19 nt, Artificial Sequence
  Description of Artificial Sequence: Synthetic oligonucleotide
  Antisense strand to SEQ ID NO: 2006652
ucagaggccaagauucuag

SEQ ID NO: 2006654 - RNA, 19 nt, Artificial Sequence
  Description of Artificial Sequence: Synthetic oligonucleotide
  Sense strand starting at position 1914 of SEQ ID NO: 1880953
cuaccugcuacgugagaau

SEQ ID NO: 2006655 - RNA, 19 nt, Artificial Sequence
  Description of Artificial Sequence: Synthetic oligonucleotide
  Antisense strand to SEQ ID NO: 2006654
auucucacguagcagguag

SEQ ID NO: 2006656 - RNA, 19 nt, Artificial Sequence
  Description of Artificial Sequence: Synthetic oligonucleotide
  Sense strand starting at position 2026 of SEQ ID NO: 1880953
ugauauggguucccacuga

SEQ ID NO: 2006657 - RNA, 19 nt, Artificial Sequence
  Description of Artificial Sequence: Synthetic oligonucleotide
  Antisense strand to SEQ ID NO: 2006656
ucagugggaacccauauca

SEQ ID NO: 2006658 - RNA, 19 nt, Artificial Sequence
  Description of Artificial Sequence: Synthetic oligonucleotide
  Sense strand starting at position 2030 of SEQ ID NO: 1880953
auggguucccacugauauc

SEQ ID NO: 2006659 - RNA, 19 nt, Artificial Sequence
  Description of Artificial Sequence: Synthetic oligonucleotide
  Antisense strand to SEQ ID NO: 2006658
gauaucagugggaacccau

SEQ ID NO: 2006660 - RNA, 19 nt, Artificial Sequence
  Description of Artificial Sequence: Synthetic oligonucleotide
  Sense strand starting at position 2142 of SEQ ID NO: 1880953
cagcguuguccugccucua

SEQ ID NO: 2006661 - RNA, 19 nt, Artificial Sequence
  Description of Artificial Sequence: Synthetic oligonucleotide
  Antisense strand to SEQ ID NO: 2006660
uagaggcaggacaacgcug

SEQ ID NO: 2006662 - RNA, 19 nt, Artificial Sequence
  Description of Artificial Sequence: Synthetic oligonucleotide
  Sense strand starting at position 2143 of SEQ ID NO: 1880953
agcguuguccugccucuaa

SEQ ID NO: 2006663 - RNA, 19 nt, Artificial Sequence
  Description of Artificial Sequence: Synthetic oligonucleotide
  Antisense strand to SEQ ID NO: 2006662
uuagaggcaggacaacgcu

SEQ ID NO: 2006664 - RNA, 19 nt, Artificial Sequence
  Description of Artificial Sequence: Synthetic oligonucleotide
  Sense strand starting at position 2677 of SEQ ID NO: 1880953
aggcuuguuucuuccacaa

SEQ ID NO: 2006665 - RNA, 19 nt, Artificial Sequence
  Description of Artificial Sequence: Synthetic oligonucleotide
  Antisense strand to SEQ ID NO: 2006664
uuguggaagaaacaagccu

SEQ ID NO: 2006666 - RNA, 19 nt, Artificial Sequence
  Description of Artificial Sequence: Synthetic oligonucleotide
  Sense strand starting at position 2800 of SEQ ID NO: 1880953
cccagagaguaugucuauu

SEQ ID NO: 2006667 - RNA, 19 nt, Artificial Sequence
  Description of Artificial Sequence: Synthetic oligonucleotide
  Antisense strand to SEQ ID NO: 2006666
aauagacauacucucuggg

SEQ ID NO: 2006668 - RNA, 19 nt, Artificial Sequence
  Description of Artificial Sequence: Synthetic oligonucleotide
  Sense strand starting at position 2885 of SEQ ID NO: 1880953
agugaagaaucggcccuuu

SEQ ID NO: 2006669 - RNA, 19 nt, Artificial Sequence
  Description of Artificial Sequence: Synthetic oligonucleotide
  Antisense strand to SEQ ID NO: 2006668
aaagggccgauucuucacu

SEQ ID NO: 2006670 - RNA, 19 nt, Artificial Sequence
  Description of Artificial Sequence: Synthetic oligonucleotide
  Sense strand starting at position 2999 of SEQ ID NO: 1880953
ggucaaguguggguucuga

SEQ ID NO: 2006671 - RNA, 19 nt, Artificial Sequence
  Description of Artificial Sequence: Synthetic oligonucleotide
  Antisense strand to SEQ ID NO: 2006670
ucagaacccacacuugacc

SEQ ID NO: 2006672 - RNA, 19 nt, Artificial Sequence
  Description of Artificial Sequence: Synthetic oligonucleotide
  Sense strand starting at position 3031 of SEQ ID NO: 1880953
ggguaaagccugggauucu

SEQ ID NO: 2006673 - RNA, 19 nt, Artificial Sequence
  Description of Artificial Sequence: Synthetic oligonucleotide
  Antisense strand to SEQ ID NO: 2006672
agaaucccaggcuuuaccc

SEQ ID NO: 2006674 - RNA, 19 nt, Artificial Sequence
  Description of Artificial Sequence: Synthetic oligonucleotide
  Sense strand starting at position 3120 of SEQ ID NO: 1880953
agagcauauuuaggaguca

SEQ ID NO: 2006675 - RNA, 19 nt, Artificial Sequence
  Description of Artificial Sequence: Synthetic oligonucleotide
  Antisense strand to SEQ ID NO: 2006674
ugacuccuaaauaugcucu

SEQ ID NO: 2006676 - RNA, 19 nt, Artificial Sequence
  Description of Artificial Sequence: Synthetic oligonucleotide
  Sense strand starting at position 3423 of SEQ ID NO: 1880953
ggcagaguuuaccuucugu

SEQ ID NO: 2006677 - RNA, 19 nt, Artificial Sequence
  Description of Artificial Sequence: Synthetic oligonucleotide
  Antisense strand to SEQ ID NO: 2006676
acagaagguaaacucugcc

SEQ ID NO: 2006678 - RNA, 19 nt, Artificial Sequence
  Description of Artificial Sequence: Synthetic oligonucleotide
  Sense strand starting at position 3482 of SEQ ID NO: 1880953
uuggcuuagggcuggagaa

SEQ ID NO: 2006679 - RNA, 19 nt, Artificial Sequence
  Description of Artificial Sequence: Synthetic oligonucleotide
  Antisense strand to SEQ ID NO: 2006678
uucuccagcccuaagccaa

SEQ ID NO: 2006680 - RNA, 19 nt, Artificial Sequence
  Description of Artificial Sequence: Synthetic oligonucleotide
  Sense strand starting at position 3483 of SEQ ID NO: 1880953
uggcuuagggcuggagaaa

SEQ ID NO: 2006681 - RNA, 19 nt, Artificial Sequence
  Description of Artificial Sequence: Synthetic oligonucleotide
  Antisense strand to SEQ ID NO: 2006680
uuucuccagcccuaagcca

SEQ ID NO: 2006682 - RNA, 19 nt, Artificial Sequence
  Description of Artificial Sequence: Synthetic oligonucleotide
  Sense strand starting at position 3810 of SEQ ID NO: 1880953
caggaauggugggcaaaga

SEQ ID NO: 2006683 - RNA, 19 nt, Artificial Sequence
  Description of Artificial Sequence: Synthetic oligonucleotide
  Antisense strand to SEQ ID NO: 2006682
ucuuugcccaccauuccug

SEQ ID NO: 2006684 - RNA, 19 nt, Artificial Sequence
  Description of Artificial Sequence: Synthetic oligonucleotide
  Sense strand starting at position 3868 of SEQ ID NO: 1880953
cuuugcucuggcugacauu

SEQ ID NO: 2006685 - RNA, 19 nt, Artificial Sequence
  Description of Artificial Sequence: Synthetic oligonucleotide
  Antisense strand to SEQ ID NO: 2006684
aaugucagccagagcaaag

SEQ ID NO: 2006686 - RNA, 19 nt, Artificial Sequence
  Description of Artificial Sequence: Synthetic oligonucleotide
  Sense strand starting at position 3877 of SEQ ID NO: 1880953
ggcugacauucgcccugaa

SEQ ID NO: 2006687 - RNA, 19 nt, Artificial Sequence
  Description of Artificial Sequence: Synthetic oligonucleotide
  Antisense strand to SEQ ID NO: 2006686
uucagggcgaaugucagcc

SEQ ID NO: 2006688 - RNA, 19 nt, Artificial Sequence
  Description of Artificial Sequence: Synthetic oligonucleotide
  Sense strand starting at position 3880 of SEQ ID NO: 1880953
ugacauucgcccugaaugu

SEQ ID NO: 2006689 - RNA, 19 nt, Artificial Sequence
  Description of Artificial Sequence: Synthetic oligonucleotide
  Antisense strand to SEQ ID NO: 2006688
acauucagggcgaauguca

SEQ ID NO: 2006690 - RNA, 19 nt, Artificial Sequence
  Description of Artificial Sequence: Synthetic oligonucleotide
  Sense strand starting at position 3889 of SEQ ID NO: 1880953
cccugaauguccuucuagu

SEQ ID NO: 2006691 - RNA, 19 nt, Artificial Sequence
  Description of Artificial Sequence: Synthetic oligonucleotide
  Antisense strand to SEQ ID NO: 2006690
acuagaaggacauucaggg

SEQ ID NO: 2006692 - RNA, 19 nt, Artificial Sequence
  Description of Artificial Sequence: Synthetic oligonucleotide
  Sense strand starting at position 121 of SEQ ID NO: 1880954
uagaccuguuaggcuaaga

SEQ ID NO: 2006693 - RNA, 19 nt, Artificial Sequence
  Description of Artificial Sequence: Synthetic oligonucleotide
  Antisense strand to SEQ ID NO: 2006692
ucuuagccuaacaggucua

SEQ ID NO: 2006694 - RNA, 19 nt, Artificial Sequence
  Description of Artificial Sequence: Synthetic oligonucleotide
  Sense strand starting at position 258 of SEQ ID NO: 1880954
gaaguacaccuuuggacuu

SEQ ID NO: 2006695 - RNA, 19 nt, Artificial Sequence
  Description of Artificial Sequence: Synthetic oligonucleotide
  Antisense strand to SEQ ID NO: 2006694
aaguccaaagguguacuuc

SEQ ID NO: 2006696 - RNA, 19 nt, Artificial Sequence
  Description of Artificial Sequence: Synthetic oligonucleotide
  Sense strand starting at position 290 of SEQ ID NO: 1880954
cccaaagcuugugcaucau

SEQ ID NO: 2006697 - RNA, 19 nt, Artificial Sequence
  Description of Artificial Sequence: Synthetic oligonucleotide
  Antisense strand to SEQ ID NO: 2006696
augaugcacaagcuuuggg

SEQ ID NO: 2006698 - RNA, 19 nt, Artificial Sequence
  Description of Artificial Sequence: Synthetic oligonucleotide
  Sense strand starting at position 300 of SEQ ID NO: 1880954
gugcaucauugucugggau

SEQ ID NO: 2006699 - RNA, 19 nt, Artificial Sequence
  Description of Artificial Sequence: Synthetic oligonucleotide
  Antisense strand to SEQ ID NO: 2006698
aucccagacaaugaugcac

SEQ ID NO: 2006700 - RNA, 19 nt, Artificial Sequence
  Description of Artificial Sequence: Synthetic oligonucleotide
  Sense strand starting at position 303 of SEQ ID NO: 1880954
caucauugucugggauaac

SEQ ID NO: 2006701 - RNA, 19 nt, Artificial Sequence
  Description of Artificial Sequence: Synthetic oligonucleotide
  Antisense strand to SEQ ID NO: 2006700
guuaucccagacaaugaug

SEQ ID NO: 2006702 - RNA, 19 nt, Artificial Sequence
  Description of Artificial Sequence: Synthetic oligonucleotide
  Sense strand starting at position 356 of SEQ ID NO: 1880954
caguguguucuagguaaga

SEQ ID NO: 2006703 - RNA, 19 nt, Artificial Sequence
  Description of Artificial Sequence: Synthetic oligonucleotide
  Antisense strand to SEQ ID NO: 2006702
ucuuaccuagaacacacug

SEQ ID NO: 2006704 - RNA, 19 nt, Artificial Sequence
  Description of Artificial Sequence: Synthetic oligonucleotide
  Sense strand starting at position 358 of SEQ ID NO: 1880954
guguguucuagguaagagc

SEQ ID NO: 2006705 - RNA, 19 nt, Artificial Sequence
  Description of Artificial Sequence: Synthetic oligonucleotide
  Antisense strand to SEQ ID NO: 2006704
gcucuuaccuagaacacac

SEQ ID NO: 2006706 - RNA, 19 nt, Artificial Sequence
  Description of Artificial Sequence: Synthetic oligonucleotide
  Sense strand starting at position 442 of SEQ ID NO: 1880954
gggugaucaugcaggugaa

SEQ ID NO: 2006707 - RNA, 19 nt, Artificial Sequence
  Description of Artificial Sequence: Synthetic oligonucleotide
  Antisense strand to SEQ ID NO: 2006706
uucaccugcaugaucaccc

SEQ ID NO: 2006708 - RNA, 19 nt, Artificial Sequence
  Description of Artificial Sequence: Synthetic oligonucleotide
  Sense strand starting at position 443 of SEQ ID NO: 1880954
ggugaucaugcaggugaaa

SEQ ID NO: 2006709 - RNA, 19 nt, Artificial Sequence
  Description of Artificial Sequence: Synthetic oligonucleotide
  Antisense strand to SEQ ID NO: 2006708
uuucaccugcaugaucacc

SEQ ID NO: 2006710 - RNA, 19 nt, Artificial Sequence
  Description of Artificial Sequence: Synthetic oligonucleotide
  Sense strand starting at position 445 of SEQ ID NO: 1880954
ugaucaugcaggugaaaug

SEQ ID NO: 2006711 - RNA, 19 nt, Artificial Sequence
  Description of Artificial Sequence: Synthetic oligonucleotide
  Antisense strand to SEQ ID NO: 2006710
cauuucaccugcaugauca

SEQ ID NO: 2006712 - RNA, 19 nt, Artificial Sequence
  Description of Artificial Sequence: Synthetic oligonucleotide
  Sense strand starting at position 556 of SEQ ID NO: 1880954
aucuguugaugacaaugaa

SEQ ID NO: 2006713 - RNA, 19 nt, Artificial Sequence
  Description of Artificial Sequence: Synthetic oligonucleotide
  Antisense strand to SEQ ID NO: 2006712
uucauugucaucaacagau

SEQ ID NO: 2006714 - RNA, 19 nt, Artificial Sequence
  Description of Artificial Sequence: Synthetic oligonucleotide
  Sense strand starting at position 594 of SEQ ID NO: 1880954
cuuuguucucuuuggguca

SEQ ID NO: 2006715 - RNA, 19 nt, Artificial Sequence
  Description of Artificial Sequence: Synthetic oligonucleotide
  Antisense strand to SEQ ID NO: 2006714
ugacccaaagagaacaaag

SEQ ID NO: 2006716 - RNA, 19 nt, Artificial Sequence
  Description of Artificial Sequence: Synthetic oligonucleotide
  Sense strand starting at position 599 of SEQ ID NO: 1880954
uucucuuugggucacuuau

SEQ ID NO: 2006717 - RNA, 19 nt, Artificial Sequence
  Description of Artificial Sequence: Synthetic oligonucleotide
  Antisense strand to SEQ ID NO: 2006716
auaagugacccaaagagaa

SEQ ID NO: 2006718 - RNA, 19 nt, Artificial Sequence
  Description of Artificial Sequence: Synthetic oligonucleotide
  Sense strand starting at position 689 of SEQ ID NO: 1880954
cuacuugagucaccaguuu

SEQ ID NO: 2006719 - RNA, 19 nt, Artificial Sequence
  Description of Artificial Sequence: Synthetic oligonucleotide
  Antisense strand to SEQ ID NO: 2006718
aaacuggugacucaaguag

SEQ ID NO: 2006720 - RNA, 19 nt, Artificial Sequence
  Description of Artificial Sequence: Synthetic oligonucleotide
  Sense strand starting at position 715 of SEQ ID NO: 1880954
gcuucuugugguuugcuaa

SEQ ID NO: 2006721 - RNA, 19 nt, Artificial Sequence
  Description of Artificial Sequence: Synthetic oligonucleotide
  Antisense strand to SEQ ID NO: 2006720
uuagcaaaccacaagaagc

SEQ ID NO: 2006722 - RNA, 19 nt, Artificial Sequence
  Description of Artificial Sequence: Synthetic oligonucleotide
  Sense strand starting at position 766 of SEQ ID NO: 1880954
cuuugaugguuuguaggga

SEQ ID NO: 2006723 - RNA, 19 nt, Artificial Sequence
  Description of Artificial Sequence: Synthetic oligonucleotide
  Antisense strand to SEQ ID NO: 2006722
ucccuacaaaccaucaaag

SEQ ID NO: 2006724 - RNA, 19 nt, Artificial Sequence
  Description of Artificial Sequence: Synthetic oligonucleotide
  Sense strand starting at position 821 of SEQ ID NO: 1880954
gaggacuuugaaugucagu

SEQ ID NO: 2006725 - RNA, 19 nt, Artificial Sequence
  Description of Artificial Sequence: Synthetic oligonucleotide
  Antisense strand to SEQ ID NO: 2006724
acugacauucaaaguccuc

SEQ ID NO: 2006726 - RNA, 19 nt, Artificial Sequence
  Description of Artificial Sequence: Synthetic oligonucleotide
  Sense strand starting at position 826 of SEQ ID NO: 1880954
cuuugaaugucaguguaag

SEQ ID NO: 2006727 - RNA, 19 nt, Artificial Sequence
  Description of Artificial Sequence: Synthetic oligonucleotide
  Antisense strand to SEQ ID NO: 2006726
cuuacacugacauucaaag

SEQ ID NO: 2006728 - RNA, 19 nt, Artificial Sequence
  Description of Artificial Sequence: Synthetic oligonucleotide
  Sense strand starting at position 827 of SEQ ID NO: 1880954
uuugaaugucaguguaagg

SEQ ID NO: 2006729 - RNA, 19 nt, Artificial Sequence
  Description of Artificial Sequence: Synthetic oligonucleotide
  Antisense strand to SEQ ID NO: 2006728
ccuuacacugacauucaaa

SEQ ID NO: 2006730 - RNA, 19 nt, Artificial Sequence
  Description of Artificial Sequence: Synthetic oligonucleotide
  Sense strand starting at position 983 of SEQ ID NO: 1880954
ucacauauguggcuuaaca

SEQ ID NO: 2006731 - RNA, 19 nt, Artificial Sequence
  Description of Artificial Sequence: Synthetic oligonucleotide
  Antisense strand to SEQ ID NO: 2006730
uguuaagccacauauguga

SEQ ID NO: 2006732 - RNA, 19 nt, Artificial Sequence
  Description of Artificial Sequence: Synthetic oligonucleotide
  Sense strand starting at position 985 of SEQ ID NO: 1880954
acauauguggcuuaacaca

SEQ ID NO: 2006733 - RNA, 19 nt, Artificial Sequence
  Description of Artificial Sequence: Synthetic oligonucleotide
  Antisense strand to SEQ ID NO: 2006732
uguguuaagccacauaugu

SEQ ID NO: 2006734 - RNA, 19 nt, Artificial Sequence
  Description of Artificial Sequence: Synthetic oligonucleotide
  Sense strand starting at position 1061 of SEQ ID NO: 1880954
cuauucuaccagcgaagau

SEQ ID NO: 2006735 - RNA, 19 nt, Artificial Sequence
  Description of Artificial Sequence: Synthetic oligonucleotide
  Antisense strand to SEQ ID NO: 2006734
aucuucgcugguagaauag

SEQ ID NO: 2006736 - RNA, 19 nt, Artificial Sequence
  Description of Artificial Sequence: Synthetic oligonucleotide
  Sense strand starting at position 1476 of SEQ ID NO: 1880954
guggaucugcgcgcucaaa

SEQ ID NO: 2006737 - RNA, 19 nt, Artificial Sequence
  Description of Artificial Sequence: Synthetic oligonucleotide
  Antisense strand to SEQ ID NO: 2006736
uuugagcgcgcagauccac

SEQ ID NO: 2006738 - RNA, 19 nt, Artificial Sequence
  Description of Artificial Sequence: Synthetic oligonucleotide
  Sense strand starting at position 1707 of SEQ ID NO: 1880954
gcugcuaguccugagacca

SEQ ID NO: 2006739 - RNA, 19 nt, Artificial Sequence
  Description of Artificial Sequence: Synthetic oligonucleotide
  Antisense strand to SEQ ID NO: 2006738
uggucucaggacuagcagc

SEQ ID NO: 2006740 - RNA, 19 nt, Artificial Sequence
  Description of Artificial Sequence: Synthetic oligonucleotide
  Sense strand starting at position 1871 of SEQ ID NO: 1880954
ccaagugcggaguguugaa

SEQ ID NO: 2006741 - RNA, 19 nt, Artificial Sequence
  Description of Artificial Sequence: Synthetic oligonucleotide
  Antisense strand to SEQ ID NO: 2006740
uucaacacuccgcacuugg

SEQ ID NO: 2006742 - RNA, 19 nt, Artificial Sequence
  Description of Artificial Sequence: Synthetic oligonucleotide
  Sense strand starting at position 2081 of SEQ ID NO: 1880954
gaagaaugguugccuugga

SEQ ID NO: 2006743 - RNA, 19 nt, Artificial Sequence
  Description of Artificial Sequence: Synthetic oligonucleotide
  Antisense strand to SEQ ID NO: 2006742
uccaaggcaaccauucuuc

SEQ ID NO: 2006744 - RNA, 19 nt, Artificial Sequence
  Description of Artificial Sequence: Synthetic oligonucleotide
  Sense strand starting at position 2326 of SEQ ID NO: 1880954
gcaugccacuugcuugaaa

SEQ ID NO: 2006745 - RNA, 19 nt, Artificial Sequence
  Description of Artificial Sequence: Synthetic oligonucleotide
  Antisense strand to SEQ ID NO: 2006744
uuucaagcaaguggcaugc

SEQ ID NO: 2006746 - RNA, 19 nt, Artificial Sequence
  Description of Artificial Sequence: Synthetic oligonucleotide
  Sense strand starting at position 2328 of SEQ ID NO: 1880954
augccacuugcuugaaaca

SEQ ID NO: 2006747 - RNA, 19 nt, Artificial Sequence
  Description of Artificial Sequence: Synthetic oligonucleotide
  Antisense strand to SEQ ID NO: 2006746
uguuucaagcaaguggcau

SEQ ID NO: 2006748 - RNA, 19 nt, Artificial Sequence
  Description of Artificial Sequence: Synthetic oligonucleotide
  Sense strand starting at position 2641 of SEQ ID NO: 1880954
gagcuuggaugagcagaaa

SEQ ID NO: 2006749 - RNA, 19 nt, Artificial Sequence
  Description of Artificial Sequence: Synthetic oligonucleotide
  Antisense strand to SEQ ID NO: 2006748
uuucugcucauccaagcuc

SEQ ID NO: 2006750 - RNA, 19 nt, Artificial Sequence
  Description of Artificial Sequence: Synthetic oligonucleotide
  Sense strand starting at position 2922 of SEQ ID NO: 1880954
aaggcuugaggccaagauu

SEQ ID NO: 2006751 - RNA, 19 nt, Artificial Sequence
  Description of Artificial Sequence: Synthetic oligonucleotide
  Antisense strand to SEQ ID NO: 2006750
aaucuuggccucaagccuu

SEQ ID NO: 2006752 - RNA, 19 nt, Artificial Sequence
  Description of Artificial Sequence: Synthetic oligonucleotide
  Sense strand starting at position 2925 of SEQ ID NO: 1880954
gcuugaggccaagauugau

SEQ ID NO: 2006753 - RNA, 19 nt, Artificial Sequence
  Description of Artificial Sequence: Synthetic oligonucleotide
  Antisense strand to SEQ ID NO: 2006752
aucaaucuuggccucaagc

SEQ ID NO: 2006754 - RNA, 19 nt, Artificial Sequence
  Description of Artificial Sequence: Synthetic oligonucleotide
  Sense strand starting at position 2934 of SEQ ID NO: 1880954
caagauugauguguucuaa

SEQ ID NO: 2006755 - RNA, 19 nt, Artificial Sequence
  Description of Artificial Sequence: Synthetic oligonucleotide
  Antisense strand to SEQ ID NO: 2006754
uuagaacacaucaaucuug

SEQ ID NO: 2006756 - RNA, 19 nt, Artificial Sequence
  Description of Artificial Sequence: Synthetic oligonucleotide
  Sense strand starting at position 3133 of SEQ ID NO: 1880954
ucacuccucaggugaggau

SEQ ID NO: 2006757 - RNA, 19 nt, Artificial Sequence
  Description of Artificial Sequence: Synthetic oligonucleotide
  Antisense strand to SEQ ID NO: 2006756
auccucaccugaggaguga

SEQ ID NO: 2006758 - RNA, 19 nt, Artificial Sequence
  Description of Artificial Sequence: Synthetic oligonucleotide
  Sense strand starting at position 3322 of SEQ ID NO: 1880954
agguuaagguagcucuaaa

SEQ ID NO: 2006759 - RNA, 19 nt, Artificial Sequence
  Description of Artificial Sequence: Synthetic oligonucleotide
  Antisense strand to SEQ ID NO: 2006758
uuuagagcuaccuuaaccu

SEQ ID NO: 2006760 - RNA, 19 nt, Artificial Sequence
  Description of Artificial Sequence: Synthetic oligonucleotide
  Sense strand starting at position 3357 of SEQ ID NO: 1880954
agucauagaucugccuacu

SEQ ID NO: 2006761 - RNA, 19 nt, Artificial Sequence
  Description of Artificial Sequence: Synthetic oligonucleotide
  Antisense strand to SEQ ID NO: 2006760
aguaggcagaucuaugacu

SEQ ID NO: 2006762 - RNA, 19 nt, Artificial Sequence
  Description of Artificial Sequence: Synthetic oligonucleotide
  Sense strand starting at position 3728 of SEQ ID NO: 1880954
ccagaauggccucagcuua

SEQ ID NO: 2006763 - RNA, 19 nt, Artificial Sequence
  Description of Artificial Sequence: Synthetic oligonucleotide
  Antisense strand to SEQ ID NO: 2006762
uaagcugaggccauucugg

SEQ ID NO: 2006764 - RNA, 19 nt, Artificial Sequence
  Description of Artificial Sequence: Synthetic oligonucleotide
  Sense strand starting at position 3735 of SEQ ID NO: 1880954
ggccucagcuuagugaauu

SEQ ID NO: 2006765 - RNA, 19 nt, Artificial Sequence
  Description of Artificial Sequence: Synthetic oligonucleotide
  Antisense strand to SEQ ID NO: 2006764
aauucacuaagcugaggcc

SEQ ID NO: 2006766 - RNA, 19 nt, Artificial Sequence
  Description of Artificial Sequence: Synthetic oligonucleotide
  Sense strand starting at position 3747 of SEQ ID NO: 1880954
gugaauuacagcugcaaag

SEQ ID NO: 2006767 - RNA, 19 nt, Artificial Sequence
  Description of Artificial Sequence: Synthetic oligonucleotide
  Antisense strand to SEQ ID NO: 2006766
cuuugcagcuguaauucac

SEQ ID NO: 2006768 - RNA, 19 nt, Artificial Sequence
  Description of Artificial Sequence: Synthetic oligonucleotide
  Sense strand starting at position 3863 of SEQ ID NO: 1880954
ggaaggugucaccgugaag

SEQ ID NO: 2006769 - RNA, 19 nt, Artificial Sequence
  Description of Artificial Sequence: Synthetic oligonucleotide
  Antisense strand to SEQ ID NO: 2006768
cuucacggugacaccuucc

SEQ ID NO: 2006770 - RNA, 19 nt, Artificial Sequence
  Description of Artificial Sequence: Synthetic oligonucleotide
  Sense strand starting at position 3962 of SEQ ID NO: 1880954
augaaacaugccugcccua

SEQ ID NO: 2006771 - RNA, 19 nt, Artificial Sequence
  Description of Artificial Sequence: Synthetic oligonucleotide
  Antisense strand to SEQ ID NO: 2006770
uagggcaggcauguuucau

SEQ ID NO: 2006772 - RNA, 19 nt, Artificial Sequence
  Description of Artificial Sequence: Synthetic oligonucleotide
  Sense strand starting at position 15 of SEQ ID NO: 1880955
cgcaauauacuggaacauu

SEQ ID NO: 2006773 - RNA, 19 nt, Artificial Sequence
  Description of Artificial Sequence: Synthetic oligonucleotide
  Antisense strand to SEQ ID NO: 2006772
aauguuccaguauauugcg

SEQ ID NO: 2006774 - RNA, 19 nt, Artificial Sequence
  Description of Artificial Sequence: Synthetic oligonucleotide
  Sense strand starting at position 36 of SEQ ID NO: 1880955
auguuaugagucugaauac

SEQ ID NO: 2006775 - RNA, 19 nt, Artificial Sequence
  Description of Artificial Sequence: Synthetic oligonucleotide
  Antisense strand to SEQ ID NO: 2006774
guauucagacucauaacau

SEQ ID NO: 2006776 - RNA, 19 nt, Artificial Sequence
  Description of Artificial Sequence: Synthetic oligonucleotide
  Sense strand starting at position 105 of SEQ ID NO: 1880955
ucugcagaaguuugaggaa

SEQ ID NO: 2006777 - RNA, 19 nt, Artificial Sequence
  Description of Artificial Sequence: Synthetic oligonucleotide
  Antisense strand to SEQ ID NO: 2006776
uuccucaaacuucugcaga

SEQ ID NO: 2006778 - RNA, 19 nt, Artificial Sequence
  Description of Artificial Sequence: Synthetic oligonucleotide
  Sense strand starting at position 715 of SEQ ID NO: 1880955
ggagcaucgauaugacuac

SEQ ID NO: 2006779 - RNA, 19 nt, Artificial Sequence
  Description of Artificial Sequence: Synthetic oligonucleotide
  Antisense strand to SEQ ID NO: 2006778
guagucauaucgaugcucc

SEQ ID NO: 2006780 - RNA, 19 nt, Artificial Sequence
  Description of Artificial Sequence: Synthetic oligonucleotide
  Sense strand starting at position 752 of SEQ ID NO: 1880955
uaguaacugcuugagcaaa

SEQ ID NO: 2006781 - RNA, 19 nt, Artificial Sequence
  Description of Artificial Sequence: Synthetic oligonucleotide
  Antisense strand to SEQ ID NO: 2006780
uuugcucaagcaguuacua

SEQ ID NO: 2006782 - RNA, 19 nt, Artificial Sequence
  Description of Artificial Sequence: Synthetic oligonucleotide
  Sense strand starting at position 754 of SEQ ID NO: 1880955
guaacugcuugagcaaaga

SEQ ID NO: 2006783 - RNA, 19 nt, Artificial Sequence
  Description of Artificial Sequence: Synthetic oligonucleotide
  Antisense strand to SEQ ID NO: 2006782
ucuuugcucaagcaguuac

SEQ ID NO: 2006784 - RNA, 19 nt, Artificial Sequence
  Description of Artificial Sequence: Synthetic oligonucleotide
  Sense strand starting at position 823 of SEQ ID NO: 1880955
uuuauacgugcauaucaga

SEQ ID NO: 2006785 - RNA, 19 nt, Artificial Sequence
  Description of Artificial Sequence: Synthetic oligonucleotide
  Antisense strand to SEQ ID NO: 2006784
ucugauaugcacguauaaa

SEQ ID NO: 2006786 - RNA, 19 nt, Artificial Sequence
  Description of Artificial Sequence: Synthetic oligonucleotide
  Sense strand starting at position 1000 of SEQ ID NO: 1880955
cugggaaaggucugauuag

SEQ ID NO: 2006787 - RNA, 19 nt, Artificial Sequence
  Description of Artificial Sequence: Synthetic oligonucleotide
  Antisense strand to SEQ ID NO: 2006786
cuaaucagaccuuucccag

SEQ ID NO: 2006788 - RNA, 19 nt, Artificial Sequence
  Description of Artificial Sequence: Synthetic oligonucleotide
  Sense strand starting at position 1010 of SEQ ID NO: 1880955
ucugauuaggaaugcgaaa

SEQ ID NO: 2006789 - RNA, 19 nt, Artificial Sequence
  Description of Artificial Sequence: Synthetic oligonucleotide
  Antisense strand to SEQ ID NO: 2006788
uuucgcauuccuaaucaga

SEQ ID NO: 2006790 - RNA, 19 nt, Artificial Sequence
  Description of Artificial Sequence: Synthetic oligonucleotide
  Sense strand starting at position 1012 of SEQ ID NO: 1880955
ugauuaggaaugcgaaauu

SEQ ID NO: 2006791 - RNA, 19 nt, Artificial Sequence
  Description of Artificial Sequence: Synthetic oligonucleotide
  Antisense strand to SEQ ID NO: 2006790
aauuucgcauuccuaauca

SEQ ID NO: 2006792 - RNA, 19 nt, Artificial Sequence
  Description of Artificial Sequence: Synthetic oligonucleotide
  Sense strand starting at position 1155 of SEQ ID NO: 1880955
ggugaaacgucaccaagaa

SEQ ID NO: 2006793 - RNA, 19 nt, Artificial Sequence
  Description of Artificial Sequence: Synthetic oligonucleotide
  Antisense strand to SEQ ID NO: 2006792
uucuuggugacguuucacc

SEQ ID NO: 2006794 - RNA, 19 nt, Artificial Sequence
  Description of Artificial Sequence: Synthetic oligonucleotide
  Sense strand starting at position 1346 of SEQ ID NO: 1880955
caaacuugcgagugaugaa

SEQ ID NO: 2006795 - RNA, 19 nt, Artificial Sequence
  Description of Artificial Sequence: Synthetic oligonucleotide
  Antisense strand to SEQ ID NO: 2006794
uucaucacucgcaaguuug

SEQ ID NO: 2006796 - RNA, 19 nt, Artificial Sequence
  Description of Artificial Sequence: Synthetic oligonucleotide
  Sense strand starting at position 1347 of SEQ ID NO: 1880955
aaacuugcgagugaugaag

SEQ ID NO: 2006797 - RNA, 19 nt, Artificial Sequence
  Description of Artificial Sequence: Synthetic oligonucleotide
  Antisense strand to SEQ ID NO: 2006796
cuucaucacucgcaaguuu

SEQ ID NO: 2006798 - RNA, 19 nt, Artificial Sequence
  Description of Artificial Sequence: Synthetic oligonucleotide
  Sense strand starting at position 1586 of SEQ ID NO: 1880955
cuaacugucucgucauuuc

SEQ ID NO: 2006799 - RNA, 19 nt, Artificial Sequence
  Description of Artificial Sequence: Synthetic oligonucleotide
  Antisense strand to SEQ ID NO: 2006798
gaaaugacgagacaguuag

SEQ ID NO: 2006800 - RNA, 19 nt, Artificial Sequence
  Description of Artificial Sequence: Synthetic oligonucleotide
  Sense strand starting at position 1630 of SEQ ID NO: 1880955
ccuccucauccugagguaa

SEQ ID NO: 2006801 - RNA, 19 nt, Artificial Sequence
  Description of Artificial Sequence: Synthetic oligonucleotide
  Antisense strand to SEQ ID NO: 2006800
uuaccucaggaugaggagg

SEQ ID NO: 2006802 - RNA, 19 nt, Artificial Sequence
  Description of Artificial Sequence: Synthetic oligonucleotide
  Sense strand starting at position 1681 of SEQ ID NO: 1880955
uaaugcuagucauuaagug

SEQ ID NO: 2006803 - RNA, 19 nt, Artificial Sequence
  Description of Artificial Sequence: Synthetic oligonucleotide
  Antisense strand to SEQ ID NO: 2006802
cacuuaaugacuagcauua

SEQ ID NO: 2006804 - RNA, 19 nt, Artificial Sequence
  Description of Artificial Sequence: Synthetic oligonucleotide
  Sense strand starting at position 1682 of SEQ ID NO: 1880955
aaugcuagucauuaaguga

SEQ ID NO: 2006805 - RNA, 19 nt, Artificial Sequence
  Description of Artificial Sequence: Synthetic oligonucleotide
  Antisense strand to SEQ ID NO: 2006804
ucacuuaaugacuagcauu

SEQ ID NO: 2006806 - RNA, 19 nt, Artificial Sequence
  Description of Artificial Sequence: Synthetic oligonucleotide
  Sense strand starting at position 1744 of SEQ ID NO: 1880955
ucgaucuucuacccgagaa

SEQ ID NO: 2006807 - RNA, 19 nt, Artificial Sequence
  Description of Artificial Sequence: Synthetic oligonucleotide
  Antisense strand to SEQ ID NO: 2006806
uucucggguagaagaucga

SEQ ID NO: 2006808 - RNA, 19 nt, Artificial Sequence
  Description of Artificial Sequence: Synthetic oligonucleotide
  Sense strand starting at position 1745 of SEQ ID NO: 1880955
cgaucuucuacccgagaac

SEQ ID NO: 2006809 - RNA, 19 nt, Artificial Sequence
  Description of Artificial Sequence: Synthetic oligonucleotide
  Antisense strand to SEQ ID NO: 2006808
guucucggguagaagaucg

SEQ ID NO: 2006810 - RNA, 19 nt, Artificial Sequence
  Description of Artificial Sequence: Synthetic oligonucleotide
  Sense strand starting at position 1792 of SEQ ID NO: 1880955
uugggaacguucuccagua

SEQ ID NO: 2006811 - RNA, 19 nt, Artificial Sequence
  Description of Artificial Sequence: Synthetic oligonucleotide
  Antisense strand to SEQ ID NO: 2006810
uacuggagaacguucccaa

SEQ ID NO: 2006812 - RNA, 19 nt, Artificial Sequence
  Description of Artificial Sequence: Synthetic oligonucleotide
  Sense strand starting at position 1793 of SEQ ID NO: 1880955
ugggaacguucuccaguaa

SEQ ID NO: 2006813 - RNA, 19 nt, Artificial Sequence
  Description of Artificial Sequence: Synthetic oligonucleotide
  Antisense strand to SEQ ID NO: 2006812
uuacuggagaacguuccca

SEQ ID NO: 2006814 - RNA, 19 nt, Artificial Sequence
  Description of Artificial Sequence: Synthetic oligonucleotide
  Sense strand starting at position 1794 of SEQ ID NO: 1880955
gggaacguucuccaguaaa

SEQ ID NO: 2006815 - RNA, 19 nt, Artificial Sequence
  Description of Artificial Sequence: Synthetic oligonucleotide
  Antisense strand to SEQ ID NO: 2006814
uuuacuggagaacguuccc

SEQ ID NO: 2006816 - RNA, 19 nt, Artificial Sequence
  Description of Artificial Sequence: Synthetic oligonucleotide
  Sense strand starting at position 1797 of SEQ ID NO: 1880955
aacguucuccaguaaagac

SEQ ID NO: 2006817 - RNA, 19 nt, Artificial Sequence
  Description of Artificial Sequence: Synthetic oligonucleotide
  Antisense strand to SEQ ID NO: 2006816
gucuuuacuggagaacguu

SEQ ID NO: 2006818 - RNA, 19 nt, Artificial Sequence
  Description of Artificial Sequence: Synthetic oligonucleotide
  Sense strand starting at position 1988 of SEQ ID NO: 1880955
gcgcuacgccaauuggaua

SEQ ID NO: 2006819 - RNA, 19 nt, Artificial Sequence
  Description of Artificial Sequence: Synthetic oligonucleotide
  Antisense strand to SEQ ID NO: 2006818
uauccaauuggcguagcgc

SEQ ID NO: 2006820 - RNA, 19 nt, Artificial Sequence
  Description of Artificial Sequence: Synthetic oligonucleotide
  Sense strand starting at position 2175 of SEQ ID NO: 1880955
cccggcuuaugagucuaaa

SEQ ID NO: 2006821 - RNA, 19 nt, Artificial Sequence
  Description of Artificial Sequence: Synthetic oligonucleotide
  Antisense strand to SEQ ID NO: 2006820
uuuagacucauaagccggg

SEQ ID NO: 2006822 - RNA, 19 nt, Artificial Sequence
  Description of Artificial Sequence: Synthetic oligonucleotide
  Sense strand starting at position 2178 of SEQ ID NO: 1880955
ggcuuaugagucuaaagcu

SEQ ID NO: 2006823 - RNA, 19 nt, Artificial Sequence
  Description of Artificial Sequence: Synthetic oligonucleotide
  Antisense strand to SEQ ID NO: 2006822
agcuuuagacucauaagcc

SEQ ID NO: 2006824 - RNA, 19 nt, Artificial Sequence
  Description of Artificial Sequence: Synthetic oligonucleotide
  Sense strand starting at position 2338 of SEQ ID NO: 1880955
guaaguuacagacauugua

SEQ ID NO: 2006825 - RNA, 19 nt, Artificial Sequence
  Description of Artificial Sequence: Synthetic oligonucleotide
  Antisense strand to SEQ ID NO: 2006824
uacaaugucuguaacuuac

SEQ ID NO: 2006826 - RNA, 19 nt, Artificial Sequence
  Description of Artificial Sequence: Synthetic oligonucleotide
  Sense strand starting at position 2341 of SEQ ID NO: 1880955
aguuacagacauuguaaca

SEQ ID NO: 2006827 - RNA, 19 nt, Artificial Sequence
  Description of Artificial Sequence: Synthetic oligonucleotide
  Antisense strand to SEQ ID NO: 2006826
uguuacaaugucuguaacu

SEQ ID NO: 2006828 - RNA, 19 nt, Artificial Sequence
  Description of Artificial Sequence: Synthetic oligonucleotide
  Sense strand starting at position 2425 of SEQ ID NO: 1880955
aagaauagauguucugcua

SEQ ID NO: 2006829 - RNA, 19 nt, Artificial Sequence
  Description of Artificial Sequence: Synthetic oligonucleotide
  Antisense strand to SEQ ID NO: 2006828
uagcagaacaucuauucuu

SEQ ID NO: 2006830 - RNA, 19 nt, Artificial Sequence
  Description of Artificial Sequence: Synthetic oligonucleotide
  Sense strand starting at position 2638 of SEQ ID NO: 1880955
gcaagagccgaucaaggau

SEQ ID NO: 2006831 - RNA, 19 nt, Artificial Sequence
  Description of Artificial Sequence: Synthetic oligonucleotide
  Antisense strand to SEQ ID NO: 2006830
auccuugaucggcucuugc

SEQ ID NO: 2006832 - RNA, 19 nt, Artificial Sequence
  Description of Artificial Sequence: Synthetic oligonucleotide
  Sense strand starting at position 2669 of SEQ ID NO: 1880955
uugguuguuaaguaucuuu

SEQ ID NO: 2006833 - RNA, 19 nt, Artificial Sequence
  Description of Artificial Sequence: Synthetic oligonucleotide
  Antisense strand to SEQ ID NO: 2006832
aaagauacuuaacaaccaa

SEQ ID NO: 2006834 - RNA, 19 nt, Artificial Sequence
  Description of Artificial Sequence: Synthetic oligonucleotide
  Sense strand starting at position 2815 of SEQ ID NO: 1880955
gugacaauuccaugauaca

SEQ ID NO: 2006835 - RNA, 19 nt, Artificial Sequence
  Description of Artificial Sequence: Synthetic oligonucleotide
  Antisense strand to SEQ ID NO: 2006834
uguaucauggaauugucac

SEQ ID NO: 2006836 - RNA, 19 nt, Artificial Sequence
  Description of Artificial Sequence: Synthetic oligonucleotide
  Sense strand starting at position 2838 of SEQ ID NO: 1880955
uguggaauacgccaguaua

SEQ ID NO: 2006837 - RNA, 19 nt, Artificial Sequence
  Description of Artificial Sequence: Synthetic oligonucleotide
  Antisense strand to SEQ ID NO: 2006836
uauacuggcguauuccaca

SEQ ID NO: 2006838 - RNA, 19 nt, Artificial Sequence
  Description of Artificial Sequence: Synthetic oligonucleotide
  Sense strand starting at position 3105 of SEQ ID NO: 1880955
ucuguuuaugauugaauag

SEQ ID NO: 2006839 - RNA, 19 nt, Artificial Sequence
  Description of Artificial Sequence: Synthetic oligonucleotide
  Antisense strand to SEQ ID NO: 2006838
cuauucaaucauaaacaga

SEQ ID NO: 2006840 - RNA, 19 nt, Artificial Sequence
  Description of Artificial Sequence: Synthetic oligonucleotide
  Sense strand starting at position 3223 of SEQ ID NO: 1880955
uguagugaacacugaugua

SEQ ID NO: 2006841 - RNA, 19 nt, Artificial Sequence
  Description of Artificial Sequence: Synthetic oligonucleotide
  Antisense strand to SEQ ID NO: 2006840
uacaucaguguucacuaca

SEQ ID NO: 2006842 - RNA, 19 nt, Artificial Sequence
  Description of Artificial Sequence: Synthetic oligonucleotide
  Sense strand starting at position 3500 of SEQ ID NO: 1880955
ccuacauugguacgaacau

SEQ ID NO: 2006843 - RNA, 19 nt, Artificial Sequence
  Description of Artificial Sequence: Synthetic oligonucleotide
  Antisense strand to SEQ ID NO: 2006842
auguucguaccaauguagg

SEQ ID NO: 2006844 - RNA, 19 nt, Artificial Sequence
  Description of Artificial Sequence: Synthetic oligonucleotide
  Sense strand starting at position 3760 of SEQ ID NO: 1880955
augugaaucugcuuaauuc

SEQ ID NO: 2006845 - RNA, 19 nt, Artificial Sequence
  Description of Artificial Sequence: Synthetic oligonucleotide
  Antisense strand to SEQ ID NO: 2006844
gaauuaagcagauucacau

SEQ ID NO: 2006846 - RNA, 19 nt, Artificial Sequence
  Description of Artificial Sequence: Synthetic oligonucleotide
  Sense strand starting at position 3806 of SEQ ID NO: 1880955
aggagaacguccuuaacuu

SEQ ID NO: 2006847 - RNA, 19 nt, Artificial Sequence
  Description of Artificial Sequence: Synthetic oligonucleotide
  Antisense strand to SEQ ID NO: 2006846
aaguuaaggacguucuccu

SEQ ID NO: 2006848 - RNA, 19 nt, Artificial Sequence
  Description of Artificial Sequence: Synthetic oligonucleotide
  Sense strand starting at position 3807 of SEQ ID NO: 1880955
ggagaacguccuuaacuug

SEQ ID NO: 2006849 - RNA, 19 nt, Artificial Sequence
  Description of Artificial Sequence: Synthetic oligonucleotide
  Antisense strand to SEQ ID NO: 2006848
caaguuaaggacguucucc

SEQ ID NO: 2006850 - RNA, 19 nt, Artificial Sequence
  Description of Artificial Sequence: Synthetic oligonucleotide
  Sense strand starting at position 3810 of SEQ ID NO: 1880955
gaacguccuuaacuugaua

SEQ ID NO: 2006851 - RNA, 19 nt, Artificial Sequence
  Description of Artificial Sequence: Synthetic oligonucleotide
  Antisense strand to SEQ ID NO: 2006850
uaucaaguuaaggacguuc

SEQ ID NO: 2006852 - RNA, 19 nt, Artificial Sequence
  Description of Artificial Sequence: Synthetic oligonucleotide
  Sense strand starting at position 5 of SEQ ID NO: 1880956
aaggcugagaaguguuagu

SEQ ID NO: 2006853 - RNA, 19 nt, Artificial Sequence
  Description of Artificial Sequence: Synthetic oligonucleotide
  Antisense strand to SEQ ID NO: 2006852
acuaacacuucucagccuu

SEQ ID NO: 2006854 - RNA, 19 nt, Artificial Sequence
  Description of Artificial Sequence: Synthetic oligonucleotide
  Sense strand starting at position 12 of SEQ ID NO: 1880956
agaaguguuaguggcagua

SEQ ID NO: 2006855 - RNA, 19 nt, Artificial Sequence
  Description of Artificial Sequence: Synthetic oligonucleotide
  Antisense strand to SEQ ID NO: 2006854
uacugccacuaacacuucu

SEQ ID NO: 2006856 - RNA, 19 nt, Artificial Sequence
  Description of Artificial Sequence: Synthetic oligonucleotide
  Sense strand starting at position 118 of SEQ ID NO: 1880956
cuaguugggagcugauaag

SEQ ID NO: 2006857 - RNA, 19 nt, Artificial Sequence
  Description of Artificial Sequence: Synthetic oligonucleotide
  Antisense strand to SEQ ID NO: 2006856
cuuaucagcucccaacuag

SEQ ID NO: 2006858 - RNA, 19 nt, Artificial Sequence
  Description of Artificial Sequence: Synthetic oligonucleotide
  Sense strand starting at position 368 of SEQ ID NO: 1880956
gggucuuauuaggaggcaa

SEQ ID NO: 2006859 - RNA, 19 nt, Artificial Sequence
  Description of Artificial Sequence: Synthetic oligonucleotide
  Antisense strand to SEQ ID NO: 2006858
uugccuccuaauaagaccc

SEQ ID NO: 2006860 - RNA, 19 nt, Artificial Sequence
  Description of Artificial Sequence: Synthetic oligonucleotide
  Sense strand starting at position 587 of SEQ ID NO: 1880956
cauggagagugauccgcaa

SEQ ID NO: 2006861 - RNA, 19 nt, Artificial Sequence
  Description of Artificial Sequence: Synthetic oligonucleotide
  Antisense strand to SEQ ID NO: 2006860
uugcggaucacucuccaug

SEQ ID NO: 2006862 - RNA, 19 nt, Artificial Sequence
  Description of Artificial Sequence: Synthetic oligonucleotide
  Sense strand starting at position 589 of SEQ ID NO: 1880956
uggagagugauccgcaauc

SEQ ID NO: 2006863 - RNA, 19 nt, Artificial Sequence
  Description of Artificial Sequence: Synthetic oligonucleotide
  Antisense strand to SEQ ID NO: 2006862
gauugcggaucacucucca

SEQ ID NO: 2006864 - RNA, 19 nt, Artificial Sequence
  Description of Artificial Sequence: Synthetic oligonucleotide
  Sense strand starting at position 591 of SEQ ID NO: 1880956
gagagugauccgcaaucaa

SEQ ID NO: 2006865 - RNA, 19 nt, Artificial Sequence
  Description of Artificial Sequence: Synthetic oligonucleotide
  Antisense strand to SEQ ID NO: 2006864
uugauugcggaucacucuc

SEQ ID NO: 2006866 - RNA, 19 nt, Artificial Sequence
  Description of Artificial Sequence: Synthetic oligonucleotide
  Sense strand starting at position 610 of SEQ ID NO: 1880956
ucucacuacucagaaguga

SEQ ID NO: 2006867 - RNA, 19 nt, Artificial Sequence
  Description of Artificial Sequence: Synthetic oligonucleotide
  Antisense strand to SEQ ID NO: 2006866
ucacuucugaguagugaga

SEQ ID NO: 2006868 - RNA, 19 nt, Artificial Sequence
  Description of Artificial Sequence: Synthetic oligonucleotide
  Sense strand starting at position 718 of SEQ ID NO: 1880956
cccuuuaugucucugcaca

SEQ ID NO: 2006869 - RNA, 19 nt, Artificial Sequence
  Description of Artificial Sequence: Synthetic oligonucleotide
  Antisense strand to SEQ ID NO: 2006868
ugugcagagacauaaaggg

SEQ ID NO: 2006870 - RNA, 19 nt, Artificial Sequence
  Description of Artificial Sequence: Synthetic oligonucleotide
  Sense strand starting at position 843 of SEQ ID NO: 1880956
ucaggcaucuuaugcaaga

SEQ ID NO: 2006871 - RNA, 19 nt, Artificial Sequence
  Description of Artificial Sequence: Synthetic oligonucleotide
  Antisense strand to SEQ ID NO: 2006870
ucuugcauaagaugccuga

SEQ ID NO: 2006872 - RNA, 19 nt, Artificial Sequence
  Description of Artificial Sequence: Synthetic oligonucleotide
  Sense strand starting at position 975 of SEQ ID NO: 1880956
ucacuagauuguggacaca

SEQ ID NO: 2006873 - RNA, 19 nt, Artificial Sequence
  Description of Artificial Sequence: Synthetic oligonucleotide
  Antisense strand to SEQ ID NO: 2006872
uguguccacaaucuaguga

SEQ ID NO: 2006874 - RNA, 19 nt, Artificial Sequence
  Description of Artificial Sequence: Synthetic oligonucleotide
  Sense strand starting at position 996 of SEQ ID NO: 1880956
aagcgcuggugcugucaaa

SEQ ID NO: 2006875 - RNA, 19 nt, Artificial Sequence
  Description of Artificial Sequence: Synthetic oligonucleotide
  Antisense strand to SEQ ID NO: 2006874
uuugacagcaccagcgcuu

SEQ ID NO: 2006876 - RNA, 19 nt, Artificial Sequence
  Description of Artificial Sequence: Synthetic oligonucleotide
  Sense strand starting at position 1109 of SEQ ID NO: 1880956
agacuaaucuggccuacau

SEQ ID NO: 2006877 - RNA, 19 nt, Artificial Sequence
  Description of Artificial Sequence: Synthetic oligonucleotide
  Antisense strand to SEQ ID NO: 2006876
auguaggccagauuagucu

SEQ ID NO: 2006878 - RNA, 19 nt, Artificial Sequence
  Description of Artificial Sequence: Synthetic oligonucleotide
  Sense strand starting at position 1465 of SEQ ID NO: 1880956
guccucagauucguagaca

SEQ ID NO: 2006879 - RNA, 19 nt, Artificial Sequence
  Description of Artificial Sequence: Synthetic oligonucleotide
  Antisense strand to SEQ ID NO: 2006878
ugucuacgaaucugaggac

SEQ ID NO: 2006880 - RNA, 19 nt, Artificial Sequence
  Description of Artificial Sequence: Synthetic oligonucleotide
  Sense strand starting at position 1595 of SEQ ID NO: 1880956
aaaggaugcgccgacugau

SEQ ID NO: 2006881 - RNA, 19 nt, Artificial Sequence
  Description of Artificial Sequence: Synthetic oligonucleotide
  Antisense strand to SEQ ID NO: 2006880
aucagucggcgcauccuuu

SEQ ID NO: 2006882 - RNA, 19 nt, Artificial Sequence
  Description of Artificial Sequence: Synthetic oligonucleotide
  Sense strand starting at position 1603 of SEQ ID NO: 1880956
cgccgacugauugguugau

SEQ ID NO: 2006883 - RNA, 19 nt, Artificial Sequence
  Description of Artificial Sequence: Synthetic oligonucleotide
  Antisense strand to SEQ ID NO: 2006882
aucaaccaaucagucggcg

SEQ ID NO: 2006884 - RNA, 19 nt, Artificial Sequence
  Description of Artificial Sequence: Synthetic oligonucleotide
  Sense strand starting at position 1609 of SEQ ID NO: 1880956
cugauugguugauggugau

SEQ ID NO: 2006885 - RNA, 19 nt, Artificial Sequence
  Description of Artificial Sequence: Synthetic oligonucleotide
  Antisense strand to SEQ ID NO: 2006884
aucaccaucaaccaaucag

SEQ ID NO: 2006886 - RNA, 19 nt, Artificial Sequence
  Description of Artificial Sequence: Synthetic oligonucleotide
  Sense strand starting at position 1615 of SEQ ID NO: 1880956
gguugauggugaugucaua

SEQ ID NO: 2006887 - RNA, 19 nt, Artificial Sequence
  Description of Artificial Sequence: Synthetic oligonucleotide
  Antisense strand to SEQ ID NO: 2006886
uaugacaucaccaucaacc

SEQ ID NO: 2006888 - RNA, 19 nt, Artificial Sequence
  Description of Artificial Sequence: Synthetic oligonucleotide
  Sense strand starting at position 1667 of SEQ ID NO: 1880956
aggaguuccucgccuguua

SEQ ID NO: 2006889 - RNA, 19 nt, Artificial Sequence
  Description of Artificial Sequence: Synthetic oligonucleotide
  Antisense strand to SEQ ID NO: 2006888
uaacaggcgaggaacuccu

SEQ ID NO: 2006890 - RNA, 19 nt, Artificial Sequence
  Description of Artificial Sequence: Synthetic oligonucleotide
  Sense strand starting at position 1669 of SEQ ID NO: 1880956
gaguuccucgccuguuaga

SEQ ID NO: 2006891 - RNA, 19 nt, Artificial Sequence
  Description of Artificial Sequence: Synthetic oligonucleotide
  Antisense strand to SEQ ID NO: 2006890
ucuaacaggcgaggaacuc

SEQ ID NO: 2006892 - RNA, 19 nt, Artificial Sequence
  Description of Artificial Sequence: Synthetic oligonucleotide
  Sense strand starting at position 1793 of SEQ ID NO: 1880956
gcugcagcucguuaucgau

SEQ ID NO: 2006893 - RNA, 19 nt, Artificial Sequence
  Description of Artificial Sequence: Synthetic oligonucleotide
  Antisense strand to SEQ ID NO: 2006892
aucgauaacgagcugcagc

SEQ ID NO: 2006894 - RNA, 19 nt, Artificial Sequence
  Description of Artificial Sequence: Synthetic oligonucleotide
  Sense strand starting at position 1924 of SEQ ID NO: 1880956
cucccauugugccaauaga

SEQ ID NO: 2006895 - RNA, 19 nt, Artificial Sequence
  Description of Artificial Sequence: Synthetic oligonucleotide
  Antisense strand to SEQ ID NO: 2006894
ucuauuggcacaaugggag

SEQ ID NO: 2006896 - RNA, 19 nt, Artificial Sequence
  Description of Artificial Sequence: Synthetic oligonucleotide
  Sense strand starting at position 2098 of SEQ ID NO: 1880956
gacugaguuucugugucag

SEQ ID NO: 2006897 - RNA, 19 nt, Artificial Sequence
  Description of Artificial Sequence: Synthetic oligonucleotide
  Antisense strand to SEQ ID NO: 2006896
cugacacagaaacucaguc

SEQ ID NO: 2006898 - RNA, 19 nt, Artificial Sequence
  Description of Artificial Sequence: Synthetic oligonucleotide
  Sense strand starting at position 2388 of SEQ ID NO: 1880956
agguggucgcgacauguuu

SEQ ID NO: 2006899 - RNA, 19 nt, Artificial Sequence
  Description of Artificial Sequence: Synthetic oligonucleotide
  Antisense strand to SEQ ID NO: 2006898
aaacaugucgcgaccaccu

SEQ ID NO: 2006900 - RNA, 19 nt, Artificial Sequence
  Description of Artificial Sequence: Synthetic oligonucleotide
  Sense strand starting at position 2514 of SEQ ID NO: 1880956
cucccagagcuaugagaac

SEQ ID NO: 2006901 - RNA, 19 nt, Artificial Sequence
  Description of Artificial Sequence: Synthetic oligonucleotide
  Antisense strand to SEQ ID NO: 2006900
guucucauagcucugggag

SEQ ID NO: 2006902 - RNA, 19 nt, Artificial Sequence
  Description of Artificial Sequence: Synthetic oligonucleotide
  Sense strand starting at position 2520 of SEQ ID NO: 1880956
gagcuaugagaacgcucau

SEQ ID NO: 2006903 - RNA, 19 nt, Artificial Sequence
  Description of Artificial Sequence: Synthetic oligonucleotide
  Antisense strand to SEQ ID NO: 2006902
augagcguucucauagcuc

SEQ ID NO: 2006904 - RNA, 19 nt, Artificial Sequence
  Description of Artificial Sequence: Synthetic oligonucleotide
  Sense strand starting at position 2577 of SEQ ID NO: 1880956
cagaacuaguggucaggaa

SEQ ID NO: 2006905 - RNA, 19 nt, Artificial Sequence
  Description of Artificial Sequence: Synthetic oligonucleotide
  Antisense strand to SEQ ID NO: 2006904
uuccugaccacuaguucug

SEQ ID NO: 2006906 - RNA, 19 nt, Artificial Sequence
  Description of Artificial Sequence: Synthetic oligonucleotide
  Sense strand starting at position 2751 of SEQ ID NO: 1880956
acgcucacguccucaauaa

SEQ ID NO: 2006907 - RNA, 19 nt, Artificial Sequence
  Description of Artificial Sequence: Synthetic oligonucleotide
  Antisense strand to SEQ ID NO: 2006906
uuauugaggacgugagcgu

SEQ ID NO: 2006908 - RNA, 19 nt, Artificial Sequence
  Description of Artificial Sequence: Synthetic oligonucleotide
  Sense strand starting at position 2752 of SEQ ID NO: 1880956
cgcucacguccucaauaaa

SEQ ID NO: 2006909 - RNA, 19 nt, Artificial Sequence
  Description of Artificial Sequence: Synthetic oligonucleotide
  Antisense strand to SEQ ID NO: 2006908
uuuauugaggacgugagcg

SEQ ID NO: 2006910 - RNA, 19 nt, Artificial Sequence
  Description of Artificial Sequence: Synthetic oligonucleotide
  Sense strand starting at position 2755 of SEQ ID NO: 1880956
ucacguccucaauaaagau

SEQ ID NO: 2006911 - RNA, 19 nt, Artificial Sequence
  Description of Artificial Sequence: Synthetic oligonucleotide
  Antisense strand to SEQ ID NO: 2006910
aucuuuauugaggacguga

SEQ ID NO: 2006912 - RNA, 19 nt, Artificial Sequence
  Description of Artificial Sequence: Synthetic oligonucleotide
  Sense strand starting at position 3318 of SEQ ID NO: 1880956
gcucuuuguccggagucuu

SEQ ID NO: 2006913 - RNA, 19 nt, Artificial Sequence
  Description of Artificial Sequence: Synthetic oligonucleotide
  Antisense strand to SEQ ID NO: 2006912
aagacuccggacaaagagc

SEQ ID NO: 2006914 - RNA, 19 nt, Artificial Sequence
  Description of Artificial Sequence: Synthetic oligonucleotide
  Sense strand starting at position 3515 of SEQ ID NO: 1880956
gggaccagggucuguguua

SEQ ID NO: 2006915 - RNA, 19 nt, Artificial Sequence
  Description of Artificial Sequence: Synthetic oligonucleotide
  Antisense strand to SEQ ID NO: 2006914
uaacacagacccugguccc

SEQ ID NO: 2006916 - RNA, 19 nt, Artificial Sequence
  Description of Artificial Sequence: Synthetic oligonucleotide
  Sense strand starting at position 3516 of SEQ ID NO: 1880956
ggaccagggucuguguuau

SEQ ID NO: 2006917 - RNA, 19 nt, Artificial Sequence
  Description of Artificial Sequence: Synthetic oligonucleotide
  Antisense strand to SEQ ID NO: 2006916
auaacacagacccuggucc

SEQ ID NO: 2006918 - RNA, 19 nt, Artificial Sequence
  Description of Artificial Sequence: Synthetic oligonucleotide
  Sense strand starting at position 3685 of SEQ ID NO: 1880956
cgguguccucccagcggaa

SEQ ID NO: 2006919 - RNA, 19 nt, Artificial Sequence
  Description of Artificial Sequence: Synthetic oligonucleotide
  Antisense strand to SEQ ID NO: 2006918
uuccgcugggaggacaccg

SEQ ID NO: 2006920 - RNA, 19 nt, Artificial Sequence
  Description of Artificial Sequence: Synthetic oligonucleotide
  Sense strand starting at position 73 of SEQ ID NO: 1880957
ugguauauaggaggaagua

SEQ ID NO: 2006921 - RNA, 19 nt, Artificial Sequence
  Description of Artificial Sequence: Synthetic oligonucleotide
  Antisense strand to SEQ ID NO: 2006920
uacuuccuccuauauacca

SEQ ID NO: 2006922 - RNA, 19 nt, Artificial Sequence
  Description of Artificial Sequence: Synthetic oligonucleotide
  Sense strand starting at position 120 of SEQ ID NO: 1880957
ugucuaaauccaugagaug

SEQ ID NO: 2006923 - RNA, 19 nt, Artificial Sequence
  Description of Artificial Sequence: Synthetic oligonucleotide
  Antisense strand to SEQ ID NO: 2006922
caucucauggauuuagaca

SEQ ID NO: 2006924 - RNA, 19 nt, Artificial Sequence
  Description of Artificial Sequence: Synthetic oligonucleotide
  Sense strand starting at position 309 of SEQ ID NO: 1880957
aggaaauguuuagcauuag

SEQ ID NO: 2006925 - RNA, 19 nt, Artificial Sequence
  Description of Artificial Sequence: Synthetic oligonucleotide
  Antisense strand to SEQ ID NO: 2006924
cuaaugcuaaacauuuccu

SEQ ID NO: 2006926 - RNA, 19 nt, Artificial Sequence
  Description of Artificial Sequence: Synthetic oligonucleotide
  Sense strand starting at position 401 of SEQ ID NO: 1880957
ggagaaguaugacuugguc

SEQ ID NO: 2006927 - RNA, 19 nt, Artificial Sequence
  Description of Artificial Sequence: Synthetic oligonucleotide
  Antisense strand to SEQ ID NO: 2006926
gaccaagucauacuucucc

SEQ ID NO: 2006928 - RNA, 19 nt, Artificial Sequence
  Description of Artificial Sequence: Synthetic oligonucleotide
  Sense strand starting at position 403 of SEQ ID NO: 1880957
agaaguaugacuugguccu

SEQ ID NO: 2006929 - RNA, 19 nt, Artificial Sequence
  Description of Artificial Sequence: Synthetic oligonucleotide
  Antisense strand to SEQ ID NO: 2006928
aggaccaagucauacuucu

SEQ ID NO: 2006930 - RNA, 19 nt, Artificial Sequence
  Description of Artificial Sequence: Synthetic oligonucleotide
  Sense strand starting at position 404 of SEQ ID NO: 1880957
gaaguaugacuugguccua

SEQ ID NO: 2006931 - RNA, 19 nt, Artificial Sequence
  Description of Artificial Sequence: Synthetic oligonucleotide
  Antisense strand to SEQ ID NO: 2006930
uaggaccaagucauacuuc

SEQ ID NO: 2006932 - RNA, 19 nt, Artificial Sequence
  Description of Artificial Sequence: Synthetic oligonucleotide
  Sense strand starting at position 434 of SEQ ID NO: 1880957
guuuaauagguaggcagaa

SEQ ID NO: 2006933 - RNA, 19 nt, Artificial Sequence
  Description of Artificial Sequence: Synthetic oligonucleotide
  Antisense strand to SEQ ID NO: 2006932
uucugccuaccuauuaaac

SEQ ID NO: 2006934 - RNA, 19 nt, Artificial Sequence
  Description of Artificial Sequence: Synthetic oligonucleotide
  Sense strand starting at position 604 of SEQ ID NO: 1880957
ggccuagacuucucagaac

SEQ ID NO: 2006935 - RNA, 19 nt, Artificial Sequence
  Description of Artificial Sequence: Synthetic oligonucleotide
  Antisense strand to SEQ ID NO: 2006934
guucugagaagucuaggcc

SEQ ID NO: 2006936 - RNA, 19 nt, Artificial Sequence
  Description of Artificial Sequence: Synthetic oligonucleotide
  Sense strand starting at position 634 of SEQ ID NO: 1880957
ggaagcuagauaugaguca

SEQ ID NO: 2006937 - RNA, 19 nt, Artificial Sequence
  Description of Artificial Sequence: Synthetic oligonucleotide
  Antisense strand to SEQ ID NO: 2006936
ugacucauaucuagcuucc

SEQ ID NO: 2006938 - RNA, 19 nt, Artificial Sequence
  Description of Artificial Sequence: Synthetic oligonucleotide
  Sense strand starting at position 739 of SEQ ID NO: 1880957
ccauaaauggcugaggcuu

SEQ ID NO: 2006939 - RNA, 19 nt, Artificial Sequence
  Description of Artificial Sequence: Synthetic oligonucleotide
  Antisense strand to SEQ ID NO: 2006938
aagccucagccauuuaugg

SEQ ID NO: 2006940 - RNA, 19 nt, Artificial Sequence
  Description of Artificial Sequence: Synthetic oligonucleotide
  Sense strand starting at position 830 of SEQ ID NO: 1880957
aucaucaguuucucuagau

SEQ ID NO: 2006941 - RNA, 19 nt, Artificial Sequence
  Description of Artificial Sequence: Synthetic oligonucleotide
  Antisense strand to SEQ ID NO: 2006940
aucuagagaaacugaugau

SEQ ID NO: 2006942 - RNA, 19 nt, Artificial Sequence
  Description of Artificial Sequence: Synthetic oligonucleotide
  Sense strand starting at position 863 of SEQ ID NO: 1880957
aauguagaccucuagagca

SEQ ID NO: 2006943 - RNA, 19 nt, Artificial Sequence
  Description of Artificial Sequence: Synthetic oligonucleotide
  Antisense strand to SEQ ID NO: 2006942
ugcucuagaggucuacauu

SEQ ID NO: 2006944 - RNA, 19 nt, Artificial Sequence
  Description of Artificial Sequence: Synthetic oligonucleotide
  Sense strand starting at position 923 of SEQ ID NO: 1880957
uauggaacaucagucugua

SEQ ID NO: 2006945 - RNA, 19 nt, Artificial Sequence
  Description of Artificial Sequence: Synthetic oligonucleotide
  Antisense strand to SEQ ID NO: 2006944
uacagacugauguuccaua

SEQ ID NO: 2006946 - RNA, 19 nt, Artificial Sequence
  Description of Artificial Sequence: Synthetic oligonucleotide
  Sense strand starting at position 927 of SEQ ID NO: 1880957
gaacaucagucuguacaga

SEQ ID NO: 2006947 - RNA, 19 nt, Artificial Sequence
  Description of Artificial Sequence: Synthetic oligonucleotide
  Antisense strand to SEQ ID NO: 2006946
ucuguacagacugauguuc

SEQ ID NO: 2006948 - RNA, 19 nt, Artificial Sequence
  Description of Artificial Sequence: Synthetic oligonucleotide
  Sense strand starting at position 1004 of SEQ ID NO: 1880957
ggugauucccagcaaauac

SEQ ID NO: 2006949 - RNA, 19 nt, Artificial Sequence
  Description of Artificial Sequence: Synthetic oligonucleotide
  Antisense strand to SEQ ID NO: 2006948
guauuugcugggaaucacc

SEQ ID NO: 2006950 - RNA, 19 nt, Artificial Sequence
  Description of Artificial Sequence: Synthetic oligonucleotide
  Sense strand starting at position 1145 of SEQ ID NO: 1880957
uuagaaugcugacugggua

SEQ ID NO: 2006951 - RNA, 19 nt, Artificial Sequence
  Description of Artificial Sequence: Synthetic oligonucleotide
  Antisense strand to SEQ ID NO: 2006950
uacccagucagcauucuaa

SEQ ID NO: 2006952 - RNA, 19 nt, Artificial Sequence
  Description of Artificial Sequence: Synthetic oligonucleotide
  Sense strand starting at position 1227 of SEQ ID NO: 1880957
aauagucagggcuaucauu

SEQ ID NO: 2006953 - RNA, 19 nt, Artificial Sequence
  Description of Artificial Sequence: Synthetic oligonucleotide
  Antisense strand to SEQ ID NO: 2006952
aaugauagcccugacuauu

SEQ ID NO: 2006954 - RNA, 19 nt, Artificial Sequence
  Description of Artificial Sequence: Synthetic oligonucleotide
  Sense strand starting at position 1287 of SEQ ID NO: 1880957
guucuaggagaaugaggua

SEQ ID NO: 2006955 - RNA, 19 nt, Artificial Sequence
  Description of Artificial Sequence: Synthetic oligonucleotide
  Antisense strand to SEQ ID NO: 2006954
uaccucauucuccuagaac

SEQ ID NO: 2006956 - RNA, 19 nt, Artificial Sequence
  Description of Artificial Sequence: Synthetic oligonucleotide
  Sense strand starting at position 1336 of SEQ ID NO: 1880957
ugauaaauguaccuaguuc

SEQ ID NO: 2006957 - RNA, 19 nt, Artificial Sequence
  Description of Artificial Sequence: Synthetic oligonucleotide
  Antisense strand to SEQ ID NO: 2006956
gaacuagguacauuuauca

SEQ ID NO: 2006958 - RNA, 19 nt, Artificial Sequence
  Description of Artificial Sequence: Synthetic oligonucleotide
  Sense strand starting at position 1538 of SEQ ID NO: 1880957
agaugauuauccuuguuug

SEQ ID NO: 2006959 - RNA, 19 nt, Artificial Sequence
  Description of Artificial Sequence: Synthetic oligonucleotide
  Antisense strand to SEQ ID NO: 2006958
caaacaaggauaaucaucu

SEQ ID NO: 2006960 - RNA, 19 nt, Artificial Sequence
  Description of Artificial Sequence: Synthetic oligonucleotide
  Sense strand starting at position 1539 of SEQ ID NO: 1880957
gaugauuauccuuguuuga

SEQ ID NO: 2006961 - RNA, 19 nt, Artificial Sequence
  Description of Artificial Sequence: Synthetic oligonucleotide
  Antisense strand to SEQ ID NO: 2006960
ucaaacaaggauaaucauc

SEQ ID NO: 2006962 - RNA, 19 nt, Artificial Sequence
  Description of Artificial Sequence: Synthetic oligonucleotide
  Sense strand starting at position 1541 of SEQ ID NO: 1880957
ugauuauccuuguuugaaa

SEQ ID NO: 2006963 - RNA, 19 nt, Artificial Sequence
  Description of Artificial Sequence: Synthetic oligonucleotide
  Antisense strand to SEQ ID NO: 2006962
uuucaaacaaggauaauca

SEQ ID NO: 2006964 - RNA, 19 nt, Artificial Sequence
  Description of Artificial Sequence: Synthetic oligonucleotide
  Sense strand starting at position 1562 of SEQ ID NO: 1880957
ggauacuauuaugcuauaa

SEQ ID NO: 2006965 - RNA, 19 nt, Artificial Sequence
  Description of Artificial Sequence: Synthetic oligonucleotide
  Antisense strand to SEQ ID NO: 2006964
uuauagcauaauaguaucc

SEQ ID NO: 2006966 - RNA, 19 nt, Artificial Sequence
  Description of Artificial Sequence: Synthetic oligonucleotide
  Sense strand starting at position 2100 of SEQ ID NO: 1880957
cuguaugagggugaaguua

SEQ ID NO: 2006967 - RNA, 19 nt, Artificial Sequence
  Description of Artificial Sequence: Synthetic oligonucleotide
  Antisense strand to SEQ ID NO: 2006966
uaacuucacccucauacag

SEQ ID NO: 2006968 - RNA, 19 nt, Artificial Sequence
  Description of Artificial Sequence: Synthetic oligonucleotide
  Sense strand starting at position 2188 of SEQ ID NO: 1880957
agacuuguagcucacccaa

SEQ ID NO: 2006969 - RNA, 19 nt, Artificial Sequence
  Description of Artificial Sequence: Synthetic oligonucleotide
  Antisense strand to SEQ ID NO: 2006968
uugggugagcuacaagucu

SEQ ID NO: 2006970 - RNA, 19 nt, Artificial Sequence
  Description of Artificial Sequence: Synthetic oligonucleotide
  Sense strand starting at position 2296 of SEQ ID NO: 1880957
ugugguaaauauuugcauu

SEQ ID NO: 2006971 - RNA, 19 nt, Artificial Sequence
  Description of Artificial Sequence: Synthetic oligonucleotide
  Antisense strand to SEQ ID NO: 2006970
aaugcaaauauuuaccaca

SEQ ID NO: 2006972 - RNA, 19 nt, Artificial Sequence
  Description of Artificial Sequence: Synthetic oligonucleotide
  Sense strand starting at position 2498 of SEQ ID NO: 1880957
ugcugaacauuuguuaguu

SEQ ID NO: 2006973 - RNA, 19 nt, Artificial Sequence
  Description of Artificial Sequence: Synthetic oligonucleotide
  Antisense strand to SEQ ID NO: 2006972
aacuaacaaauguucagca

SEQ ID NO: 2006974 - RNA, 19 nt, Artificial Sequence
  Description of Artificial Sequence: Synthetic oligonucleotide
  Sense strand starting at position 2499 of SEQ ID NO: 1880957
gcugaacauuuguuaguua

SEQ ID NO: 2006975 - RNA, 19 nt, Artificial Sequence
  Description of Artificial Sequence: Synthetic oligonucleotide
  Antisense strand to SEQ ID NO: 2006974
uaacuaacaaauguucagc

SEQ ID NO: 2006976 - RNA, 19 nt, Artificial Sequence
  Description of Artificial Sequence: Synthetic oligonucleotide
  Sense strand starting at position 2554 of SEQ ID NO: 1880957
aggugaacugauggaguuu

SEQ ID NO: 2006977 - RNA, 19 nt, Artificial Sequence
  Description of Artificial Sequence: Synthetic oligonucleotide
  Antisense strand to SEQ ID NO: 2006976
aaacuccaucaguucaccu

SEQ ID NO: 2006978 - RNA, 19 nt, Artificial Sequence
  Description of Artificial Sequence: Synthetic oligonucleotide
  Sense strand starting at position 2667 of SEQ ID NO: 1880957
ggaacauugcuccagcauc

SEQ ID NO: 2006979 - RNA, 19 nt, Artificial Sequence
  Description of Artificial Sequence: Synthetic oligonucleotide
  Antisense strand to SEQ ID NO: 2006978
gaugcuggagcaauguucc

SEQ ID NO: 2006980 - RNA, 19 nt, Artificial Sequence
  Description of Artificial Sequence: Synthetic oligonucleotide
  Sense strand starting at position 3409 of SEQ ID NO: 1880957
caggcuaaucuaugggaca

SEQ ID NO: 2006981 - RNA, 19 nt, Artificial Sequence
  Description of Artificial Sequence: Synthetic oligonucleotide
  Antisense strand to SEQ ID NO: 2006980
ugucccauagauuagccug

SEQ ID NO: 2006982 - RNA, 19 nt, Artificial Sequence
  Description of Artificial Sequence: Synthetic oligonucleotide
  Sense strand starting at position 3420 of SEQ ID NO: 1880957
augggacagucuucccaga

SEQ ID NO: 2006983 - RNA, 19 nt, Artificial Sequence
  Description of Artificial Sequence: Synthetic oligonucleotide
  Antisense strand to SEQ ID NO: 2006982
ucugggaagacugucccau

SEQ ID NO: 2006984 - RNA, 19 nt, Artificial Sequence
  Description of Artificial Sequence: Synthetic oligonucleotide
  Sense strand starting at position 3494 of SEQ ID NO: 1880957
gccagaacuguccagaaug

SEQ ID NO: 2006985 - RNA, 19 nt, Artificial Sequence
  Description of Artificial Sequence: Synthetic oligonucleotide
  Antisense strand to SEQ ID NO: 2006984
cauucuggacaguucuggc

SEQ ID NO: 2006986 - RNA, 19 nt, Artificial Sequence
  Description of Artificial Sequence: Synthetic oligonucleotide
  Sense strand starting at position 3587 of SEQ ID NO: 1880957
uuccuauaguauucuagac

SEQ ID NO: 2006987 - RNA, 19 nt, Artificial Sequence
  Description of Artificial Sequence: Synthetic oligonucleotide
  Antisense strand to SEQ ID NO: 2006986
gucuagaauacuauaggaa

SEQ ID NO: 2006988 - RNA, 19 nt, Artificial Sequence
  Description of Artificial Sequence: Synthetic oligonucleotide
  Sense strand starting at position 3729 of SEQ ID NO: 1880957
gagauaguaaagugugaaa

SEQ ID NO: 2006989 - RNA, 19 nt, Artificial Sequence
  Description of Artificial Sequence: Synthetic oligonucleotide
  Antisense strand to SEQ ID NO: 2006988
uuucacacuuuacuaucuc

SEQ ID NO: 2006990 - RNA, 19 nt, Artificial Sequence
  Description of Artificial Sequence: Synthetic oligonucleotide
  Sense strand starting at position 3731 of SEQ ID NO: 1880957
gauaguaaagugugaaaua

SEQ ID NO: 2006991 - RNA, 19 nt, Artificial Sequence
  Description of Artificial Sequence: Synthetic oligonucleotide
  Antisense strand to SEQ ID NO: 2006990
uauuucacacuuuacuauc

SEQ ID NO: 2006992 - RNA, 19 nt, Artificial Sequence
  Description of Artificial Sequence: Synthetic oligonucleotide
  Sense strand starting at position 3780 of SEQ ID NO: 1880957
uggagacuuuaucuacauc

SEQ ID NO: 2006993 - RNA, 19 nt, Artificial Sequence
  Description of Artificial Sequence: Synthetic oligonucleotide
  Antisense strand to SEQ ID NO: 2006992
gauguagauaaagucucca

SEQ ID NO: 2006994 - RNA, 19 nt, Artificial Sequence
  Description of Artificial Sequence: Synthetic oligonucleotide
  Sense strand starting at position 3818 of SEQ ID NO: 1880957
gagauagugcuugagucau

SEQ ID NO: 2006995 - RNA, 19 nt, Artificial Sequence
  Description of Artificial Sequence: Synthetic oligonucleotide
  Antisense strand to SEQ ID NO: 2006994
augacucaagcacuaucuc

SEQ ID NO: 2006996 - RNA, 19 nt, Artificial Sequence
  Description of Artificial Sequence: Synthetic oligonucleotide
  Sense strand starting at position 3828 of SEQ ID NO: 1880957
uugagucauuaagcaagaa

SEQ ID NO: 2006997 - RNA, 19 nt, Artificial Sequence
  Description of Artificial Sequence: Synthetic oligonucleotide
  Antisense strand to SEQ ID NO: 2006996
uucuugcuuaaugacucaa

SEQ ID NO: 2006998 - RNA, 19 nt, Artificial Sequence
  Description of Artificial Sequence: Synthetic oligonucleotide
  Sense strand starting at position 3832 of SEQ ID NO: 1880957
gucauuaagcaagaaggua

SEQ ID NO: 2006999 - RNA, 19 nt, Artificial Sequence
  Description of Artificial Sequence: Synthetic oligonucleotide
  Antisense strand to SEQ ID NO: 2006998
uaccuucuugcuuaaugac

SEQ ID NO: 2007000 - RNA, 19 nt, Artificial Sequence
  Description of Artificial Sequence: Synthetic oligonucleotide
  Sense strand starting at position 92 of SEQ ID NO: 1880958
auaaguauaguaugugcaa

SEQ ID NO: 2007001 - RNA, 19 nt, Artificial Sequence
  Description of Artificial Sequence: Synthetic oligonucleotide
  Antisense strand to SEQ ID NO: 2007000
uugcacauacuauacuuau

SEQ ID NO: 2007002 - RNA, 19 nt, Artificial Sequence
  Description of Artificial Sequence: Synthetic oligonucleotide
  Sense strand starting at position 93 of SEQ ID NO: 1880958
uaaguauaguaugugcaaa

SEQ ID NO: 2007003 - RNA, 19 nt, Artificial Sequence
  Description of Artificial Sequence: Synthetic oligonucleotide
  Antisense strand to SEQ ID NO: 2007002
uuugcacauacuauacuua

SEQ ID NO: 2007004 - RNA, 19 nt, Artificial Sequence
  Description of Artificial Sequence: Synthetic oligonucleotide
  Sense strand starting at position 155 of SEQ ID NO: 1880958
guguacuuaucagcagaua

SEQ ID NO: 2007005 - RNA, 19 nt, Artificial Sequence
  Description of Artificial Sequence: Synthetic oligonucleotide
  Antisense strand to SEQ ID NO: 2007004
uaucugcugauaaguacac

SEQ ID NO: 2007006 - RNA, 19 nt, Artificial Sequence
  Description of Artificial Sequence: Synthetic oligonucleotide
  Sense strand starting at position 156 of SEQ ID NO: 1880958
uguacuuaucagcagauag

SEQ ID NO: 2007007 - RNA, 19 nt, Artificial Sequence
  Description of Artificial Sequence: Synthetic oligonucleotide
  Antisense strand to SEQ ID NO: 2007006
cuaucugcugauaaguaca

SEQ ID NO: 2007008 - RNA, 19 nt, Artificial Sequence
  Description of Artificial Sequence: Synthetic oligonucleotide
  Sense strand starting at position 158 of SEQ ID NO: 1880958
uacuuaucagcagauaggu

SEQ ID NO: 2007009 - RNA, 19 nt, Artificial Sequence
  Description of Artificial Sequence: Synthetic oligonucleotide
  Antisense strand to SEQ ID NO: 2007008
accuaucugcugauaagua

SEQ ID NO: 2007010 - RNA, 19 nt, Artificial Sequence
  Description of Artificial Sequence: Synthetic oligonucleotide
  Sense strand starting at position 216 of SEQ ID NO: 1880958
auagccguuucuuugaaga

SEQ ID NO: 2007011 - RNA, 19 nt, Artificial Sequence
  Description of Artificial Sequence: Synthetic oligonucleotide
  Antisense strand to SEQ ID NO: 2007010
ucuucaaagaaacggcuau

SEQ ID NO: 2007012 - RNA, 19 nt, Artificial Sequence
  Description of Artificial Sequence: Synthetic oligonucleotide
  Sense strand starting at position 241 of SEQ ID NO: 1880958
uccguaagucuacaugcaa

SEQ ID NO: 2007013 - RNA, 19 nt, Artificial Sequence
  Description of Artificial Sequence: Synthetic oligonucleotide
  Antisense strand to SEQ ID NO: 2007012
uugcauguagacuuacgga

SEQ ID NO: 2007014 - RNA, 19 nt, Artificial Sequence
  Description of Artificial Sequence: Synthetic oligonucleotide
  Sense strand starting at position 248 of SEQ ID NO: 1880958
gucuacaugcaacagauaa

SEQ ID NO: 2007015 - RNA, 19 nt, Artificial Sequence
  Description of Artificial Sequence: Synthetic oligonucleotide
  Antisense strand to SEQ ID NO: 2007014
uuaucuguugcauguagac

SEQ ID NO: 2007016 - RNA, 19 nt, Artificial Sequence
  Description of Artificial Sequence: Synthetic oligonucleotide
  Sense strand starting at position 263 of SEQ ID NO: 1880958
auaacaaucugggaaacau

SEQ ID NO: 2007017 - RNA, 19 nt, Artificial Sequence
  Description of Artificial Sequence: Synthetic oligonucleotide
  Antisense strand to SEQ ID NO: 2007016
auguuucccagauuguuau

SEQ ID NO: 2007018 - RNA, 19 nt, Artificial Sequence
  Description of Artificial Sequence: Synthetic oligonucleotide
  Sense strand starting at position 295 of SEQ ID NO: 1880958
uagucuugugcugcaguga

SEQ ID NO: 2007019 - RNA, 19 nt, Artificial Sequence
  Description of Artificial Sequence: Synthetic oligonucleotide
  Antisense strand to SEQ ID NO: 2007018
ucacugcagcacaagacua

SEQ ID NO: 2007020 - RNA, 19 nt, Artificial Sequence
  Description of Artificial Sequence: Synthetic oligonucleotide
  Sense strand starting at position 422 of SEQ ID NO: 1880958
ggagcuugcaaggaaugau

SEQ ID NO: 2007021 - RNA, 19 nt, Artificial Sequence
  Description of Artificial Sequence: Synthetic oligonucleotide
  Antisense strand to SEQ ID NO: 2007020
aucauuccuugcaagcucc

SEQ ID NO: 2007022 - RNA, 19 nt, Artificial Sequence
  Description of Artificial Sequence: Synthetic oligonucleotide
  Sense strand starting at position 425 of SEQ ID NO: 1880958
gcuugcaaggaaugauuau

SEQ ID NO: 2007023 - RNA, 19 nt, Artificial Sequence
  Description of Artificial Sequence: Synthetic oligonucleotide
  Antisense strand to SEQ ID NO: 2007022
auaaucauuccuugcaagc

SEQ ID NO: 2007024 - RNA, 19 nt, Artificial Sequence
  Description of Artificial Sequence: Synthetic oligonucleotide
  Sense strand starting at position 449 of SEQ ID NO: 1880958
acguucugccauuacuaaa

SEQ ID NO: 2007025 - RNA, 19 nt, Artificial Sequence
  Description of Artificial Sequence: Synthetic oligonucleotide
  Antisense strand to SEQ ID NO: 2007024
uuuaguaauggcagaacgu

SEQ ID NO: 2007026 - RNA, 19 nt, Artificial Sequence
  Description of Artificial Sequence: Synthetic oligonucleotide
  Sense strand starting at position 499 of SEQ ID NO: 1880958
aauggaaagccaggguaua

SEQ ID NO: 2007027 - RNA, 19 nt, Artificial Sequence
  Description of Artificial Sequence: Synthetic oligonucleotide
  Antisense strand to SEQ ID NO: 2007026
uauacccuggcuuuccauu

SEQ ID NO: 2007028 - RNA, 19 nt, Artificial Sequence
  Description of Artificial Sequence: Synthetic oligonucleotide
  Sense strand starting at position 526 of SEQ ID NO: 1880958
cuguaaccacguuaaauua

SEQ ID NO: 2007029 - RNA, 19 nt, Artificial Sequence
  Description of Artificial Sequence: Synthetic oligonucleotide
  Antisense strand to SEQ ID NO: 2007028
uaauuuaacgugguuacag

SEQ ID NO: 2007030 - RNA, 19 nt, Artificial Sequence
  Description of Artificial Sequence: Synthetic oligonucleotide
  Sense strand starting at position 600 of SEQ ID NO: 1880958
gcaacaucugcaggugaaa

SEQ ID NO: 2007031 - RNA, 19 nt, Artificial Sequence
  Description of Artificial Sequence: Synthetic oligonucleotide
  Antisense strand to SEQ ID NO: 2007030
uuucaccugcagauguugc

SEQ ID NO: 2007032 - RNA, 19 nt, Artificial Sequence
  Description of Artificial Sequence: Synthetic oligonucleotide
  Sense strand starting at position 803 of SEQ ID NO: 1880958
uggacugugcaguacaaau

SEQ ID NO: 2007033 - RNA, 19 nt, Artificial Sequence
  Description of Artificial Sequence: Synthetic oligonucleotide
  Antisense strand to SEQ ID NO: 2007032
auuuguacugcacagucca

SEQ ID NO: 2007034 - RNA, 19 nt, Artificial Sequence
  Description of Artificial Sequence: Synthetic oligonucleotide
  Sense strand starting at position 805 of SEQ ID NO: 1880958
gacugugcaguacaaauau

SEQ ID NO: 2007035 - RNA, 19 nt, Artificial Sequence
  Description of Artificial Sequence: Synthetic oligonucleotide
  Antisense strand to SEQ ID NO: 2007034
auauuuguacugcacaguc

SEQ ID NO: 2007036 - RNA, 19 nt, Artificial Sequence
  Description of Artificial Sequence: Synthetic oligonucleotide
  Sense strand starting at position 1018 of SEQ ID NO: 1880958
gguguuaaauuacuuguau

SEQ ID NO: 2007037 - RNA, 19 nt, Artificial Sequence
  Description of Artificial Sequence: Synthetic oligonucleotide
  Antisense strand to SEQ ID NO: 2007036
auacaaguaauuuaacacc

SEQ ID NO: 2007038 - RNA, 19 nt, Artificial Sequence
  Description of Artificial Sequence: Synthetic oligonucleotide
  Sense strand starting at position 1019 of SEQ ID NO: 1880958
guguuaaauuacuuguauc

SEQ ID NO: 2007039 - RNA, 19 nt, Artificial Sequence
  Description of Artificial Sequence: Synthetic oligonucleotide
  Antisense strand to SEQ ID NO: 2007038
gauacaaguaauuuaacac

SEQ ID NO: 2007040 - RNA, 19 nt, Artificial Sequence
  Description of Artificial Sequence: Synthetic oligonucleotide
  Sense strand starting at position 1032 of SEQ ID NO: 1880958
uguaucaucucauuccagu

SEQ ID NO: 2007041 - RNA, 19 nt, Artificial Sequence
  Description of Artificial Sequence: Synthetic oligonucleotide
  Antisense strand to SEQ ID NO: 2007040
acuggaaugagaugauaca

SEQ ID NO: 2007042 - RNA, 19 nt, Artificial Sequence
  Description of Artificial Sequence: Synthetic oligonucleotide
  Sense strand starting at position 1063 of SEQ ID NO: 1880958
caguauagaggguaucgau

SEQ ID NO: 2007043 - RNA, 19 nt, Artificial Sequence
  Description of Artificial Sequence: Synthetic oligonucleotide
  Antisense strand to SEQ ID NO: 2007042
aucgauacccucuauacug

SEQ ID NO: 2007044 - RNA, 19 nt, Artificial Sequence
  Description of Artificial Sequence: Synthetic oligonucleotide
  Sense strand starting at position 1076 of SEQ ID NO: 1880958
aucgauaaucuccguauua

SEQ ID NO: 2007045 - RNA, 19 nt, Artificial Sequence
  Description of Artificial Sequence: Synthetic oligonucleotide
  Antisense strand to SEQ ID NO: 2007044
uaauacggagauuaucgau

SEQ ID NO: 2007046 - RNA, 19 nt, Artificial Sequence
  Description of Artificial Sequence: Synthetic oligonucleotide
  Sense strand starting at position 1078 of SEQ ID NO: 1880958
cgauaaucuccguauuauu

SEQ ID NO: 2007047 - RNA, 19 nt, Artificial Sequence
  Description of Artificial Sequence: Synthetic oligonucleotide
  Antisense strand to SEQ ID NO: 2007046
aauaauacggagauuaucg

SEQ ID NO: 2007048 - RNA, 19 nt, Artificial Sequence
  Description of Artificial Sequence: Synthetic oligonucleotide
  Sense strand starting at position 1083 of SEQ ID NO: 1880958
aucuccguauuauugagaa

SEQ ID NO: 2007049 - RNA, 19 nt, Artificial Sequence
  Description of Artificial Sequence: Synthetic oligonucleotide
  Antisense strand to SEQ ID NO: 2007048
uucucaauaauacggagau

SEQ ID NO: 2007050 - RNA, 19 nt, Artificial Sequence
  Description of Artificial Sequence: Synthetic oligonucleotide
  Sense strand starting at position 1085 of SEQ ID NO: 1880958
cuccguauuauugagaaag

SEQ ID NO: 2007051 - RNA, 19 nt, Artificial Sequence
  Description of Artificial Sequence: Synthetic oligonucleotide
  Antisense strand to SEQ ID NO: 2007050
cuuucucaauaauacggag

SEQ ID NO: 2007052 - RNA, 19 nt, Artificial Sequence
  Description of Artificial Sequence: Synthetic oligonucleotide
  Sense strand starting at position 2024 of SEQ ID NO: 1880958
cuagaauccucuccugaga

SEQ ID NO: 2007053 - RNA, 19 nt, Artificial Sequence
  Description of Artificial Sequence: Synthetic oligonucleotide
  Antisense strand to SEQ ID NO: 2007052
ucucaggagaggauucuag

SEQ ID NO: 2007054 - RNA, 19 nt, Artificial Sequence
  Description of Artificial Sequence: Synthetic oligonucleotide
  Sense strand starting at position 2208 of SEQ ID NO: 1880958
cuggaauccuccucagaga

SEQ ID NO: 2007055 - RNA, 19 nt, Artificial Sequence
  Description of Artificial Sequence: Synthetic oligonucleotide
  Antisense strand to SEQ ID NO: 2007054
ucucugaggaggauuccag

SEQ ID NO: 2007056 - RNA, 19 nt, Artificial Sequence
  Description of Artificial Sequence: Synthetic oligonucleotide
  Sense strand starting at position 3155 of SEQ ID NO: 1880958
cccauugcugcgucuuaga

SEQ ID NO: 2007057 - RNA, 19 nt, Artificial Sequence
  Description of Artificial Sequence: Synthetic oligonucleotide
  Antisense strand to SEQ ID NO: 2007056
ucuaagacgcagcaauggg

SEQ ID NO: 2007058 - RNA, 19 nt, Artificial Sequence
  Description of Artificial Sequence: Synthetic oligonucleotide
  Sense strand starting at position 3177 of SEQ ID NO: 1880958
guguggugccauguacgua

SEQ ID NO: 2007059 - RNA, 19 nt, Artificial Sequence
  Description of Artificial Sequence: Synthetic oligonucleotide
  Antisense strand to SEQ ID NO: 2007058
uacguacauggcaccacac

SEQ ID NO: 2007060 - RNA, 19 nt, Artificial Sequence
  Description of Artificial Sequence: Synthetic oligonucleotide
  Sense strand starting at position 3452 of SEQ ID NO: 1880958
caguucugaugccuuauga

SEQ ID NO: 2007061 - RNA, 19 nt, Artificial Sequence
  Description of Artificial Sequence: Synthetic oligonucleotide
  Antisense strand to SEQ ID NO: 2007060
ucauaaggcaucagaacug

SEQ ID NO: 2007062 - RNA, 19 nt, Artificial Sequence
  Description of Artificial Sequence: Synthetic oligonucleotide
  Sense strand starting at position 3680 of SEQ ID NO: 1880958
ccacuaaggcugugagauu

SEQ ID NO: 2007063 - RNA, 19 nt, Artificial Sequence
  Description of Artificial Sequence: Synthetic oligonucleotide
  Antisense strand to SEQ ID NO: 2007062
aaucucacagccuuagugg

SEQ ID NO: 2007064 - RNA, 19 nt, Artificial Sequence
  Description of Artificial Sequence: Synthetic oligonucleotide
  Sense strand starting at position 3687 of SEQ ID NO: 1880958
ggcugugagauugaccuua

SEQ ID NO: 2007065 - RNA, 19 nt, Artificial Sequence
  Description of Artificial Sequence: Synthetic oligonucleotide
  Antisense strand to SEQ ID NO: 2007064
uaaggucaaucucacagcc

SEQ ID NO: 2007066 - RNA, 19 nt, Artificial Sequence
  Description of Artificial Sequence: Synthetic oligonucleotide
  Sense strand starting at position 3689 of SEQ ID NO: 1880958
cugugagauugaccuuaca

SEQ ID NO: 2007067 - RNA, 19 nt, Artificial Sequence
  Description of Artificial Sequence: Synthetic oligonucleotide
  Antisense strand to SEQ ID NO: 2007066
uguaaggucaaucucacag

SEQ ID NO: 2007068 - RNA, 19 nt, Artificial Sequence
  Description of Artificial Sequence: Synthetic oligonucleotide
  Sense strand starting at position 3762 of SEQ ID NO: 1880958
cagagcuacccucagaguu

SEQ ID NO: 2007069 - RNA, 19 nt, Artificial Sequence
  Description of Artificial Sequence: Synthetic oligonucleotide
  Antisense strand to SEQ ID NO: 2007068
aacucugaggguagcucug

SEQ ID NO: 2007070 - RNA, 19 nt, Artificial Sequence
  Description of Artificial Sequence: Synthetic oligonucleotide
  Sense strand starting at position 3772 of SEQ ID NO: 1880958
cucagaguuggaugagcua

SEQ ID NO: 2007071 - RNA, 19 nt, Artificial Sequence
  Description of Artificial Sequence: Synthetic oligonucleotide
  Antisense strand to SEQ ID NO: 2007070
uagcucauccaacucugag

SEQ ID NO: 2007072 - RNA, 19 nt, Artificial Sequence
  Description of Artificial Sequence: Synthetic oligonucleotide
  Sense strand starting at position 3783 of SEQ ID NO: 1880958
augagcuauccucagaguu

SEQ ID NO: 2007073 - RNA, 19 nt, Artificial Sequence
  Description of Artificial Sequence: Synthetic oligonucleotide
  Antisense strand to SEQ ID NO: 2007072
aacucugaggauagcucau

SEQ ID NO: 2007074 - RNA, 19 nt, Artificial Sequence
  Description of Artificial Sequence: Synthetic oligonucleotide
  Sense strand starting at position 3839 of SEQ ID NO: 1880958
ucaugauucugccucagaa

SEQ ID NO: 2007075 - RNA, 19 nt, Artificial Sequence
  Description of Artificial Sequence: Synthetic oligonucleotide
  Antisense strand to SEQ ID NO: 2007074
uucugaggcagaaucauga

SEQ ID NO: 2007076 - RNA, 19 nt, Artificial Sequence
  Description of Artificial Sequence: Synthetic oligonucleotide
  Sense strand starting at position 3950 of SEQ ID NO: 1880958
ugggcacaguucuuaccaa

SEQ ID NO: 2007077 - RNA, 19 nt, Artificial Sequence
  Description of Artificial Sequence: Synthetic oligonucleotide
  Antisense strand to SEQ ID NO: 2007076
uugguaagaacugugccca

SEQ ID NO: 2007078 - RNA, 19 nt, Artificial Sequence
  Description of Artificial Sequence: Synthetic oligonucleotide
  Sense strand starting at position 3965 of SEQ ID NO: 1880958
ccaacugccuuggcaaauu

SEQ ID NO: 2007079 - RNA, 19 nt, Artificial Sequence
  Description of Artificial Sequence: Synthetic oligonucleotide
  Antisense strand to SEQ ID NO: 2007078
aauuugccaaggcaguugg

SEQ ID NO: 2007080 - RNA, 19 nt, Artificial Sequence
  Description of Artificial Sequence: Synthetic oligonucleotide
  Sense strand starting at position 150 of SEQ ID NO: 1880959
gcaugcuaacuacaaugau

SEQ ID NO: 2007081 - RNA, 19 nt, Artificial Sequence
  Description of Artificial Sequence: Synthetic oligonucleotide
  Antisense strand to SEQ ID NO: 2007080
aucauuguaguuagcaugc

SEQ ID NO: 2007082 - RNA, 19 nt, Artificial Sequence
  Description of Artificial Sequence: Synthetic oligonucleotide
  Sense strand starting at position 192 of SEQ ID NO: 1880959
aagauaagauuuggaaaug

SEQ ID NO: 2007083 - RNA, 19 nt, Artificial Sequence
  Description of Artificial Sequence: Synthetic oligonucleotide
  Antisense strand to SEQ ID NO: 2007082
cauuuccaaaucuuaucuu

SEQ ID NO: 2007084 - RNA, 19 nt, Artificial Sequence
  Description of Artificial Sequence: Synthetic oligonucleotide
  Sense strand starting at position 213 of SEQ ID NO: 1880959
auuaacuugugagucauca

SEQ ID NO: 2007085 - RNA, 19 nt, Artificial Sequence
  Description of Artificial Sequence: Synthetic oligonucleotide
  Antisense strand to SEQ ID NO: 2007084
ugaugacucacaaguuaau

SEQ ID NO: 2007086 - RNA, 19 nt, Artificial Sequence
  Description of Artificial Sequence: Synthetic oligonucleotide
  Sense strand starting at position 221 of SEQ ID NO: 1880959
gugagucaucaucacaaau

SEQ ID NO: 2007087 - RNA, 19 nt, Artificial Sequence
  Description of Artificial Sequence: Synthetic oligonucleotide
  Antisense strand to SEQ ID NO: 2007086
auuugugaugaugacucac

SEQ ID NO: 2007088 - RNA, 19 nt, Artificial Sequence
  Description of Artificial Sequence: Synthetic oligonucleotide
  Sense strand starting at position 266 of SEQ ID NO: 1880959
uguuaugaaaucgaguuua

SEQ ID NO: 2007089 - RNA, 19 nt, Artificial Sequence
  Description of Artificial Sequence: Synthetic oligonucleotide
  Antisense strand to SEQ ID NO: 2007088
uaaacucgauuucauaaca

SEQ ID NO: 2007090 - RNA, 19 nt, Artificial Sequence
  Description of Artificial Sequence: Synthetic oligonucleotide
  Sense strand starting at position 271 of SEQ ID NO: 1880959
ugaaaucgaguuuaacacu

SEQ ID NO: 2007091 - RNA, 19 nt, Artificial Sequence
  Description of Artificial Sequence: Synthetic oligonucleotide
  Antisense strand to SEQ ID NO: 2007090
aguguuaaacucgauuuca

SEQ ID NO: 2007092 - RNA, 19 nt, Artificial Sequence
  Description of Artificial Sequence: Synthetic oligonucleotide
  Sense strand starting at position 280 of SEQ ID NO: 1880959
guuuaacacuggucaacaa

SEQ ID NO: 2007093 - RNA, 19 nt, Artificial Sequence
  Description of Artificial Sequence: Synthetic oligonucleotide
  Antisense strand to SEQ ID NO: 2007092
uuguugaccaguguuaaac

SEQ ID NO: 2007094 - RNA, 19 nt, Artificial Sequence
  Description of Artificial Sequence: Synthetic oligonucleotide
  Sense strand starting at position 292 of SEQ ID NO: 1880959
ucaacaauuuagggaagau

SEQ ID NO: 2007095 - RNA, 19 nt, Artificial Sequence
  Description of Artificial Sequence: Synthetic oligonucleotide
  Antisense strand to SEQ ID NO: 2007094
aucuucccuaaauuguuga

SEQ ID NO: 2007096 - RNA, 19 nt, Artificial Sequence
  Description of Artificial Sequence: Synthetic oligonucleotide
  Sense strand starting at position 327 of SEQ ID NO: 1880959
guuguaauacauuaccgaa

SEQ ID NO: 2007097 - RNA, 19 nt, Artificial Sequence
  Description of Artificial Sequence: Synthetic oligonucleotide
  Antisense strand to SEQ ID NO: 2007096
uucgguaauguauuacaac

SEQ ID NO: 2007098 - RNA, 19 nt, Artificial Sequence
  Description of Artificial Sequence: Synthetic oligonucleotide
  Sense strand starting at position 540 of SEQ ID NO: 1880959
uggucuugugaagaaagca

SEQ ID NO: 2007099 - RNA, 19 nt, Artificial Sequence
  Description of Artificial Sequence: Synthetic oligonucleotide
  Antisense strand to SEQ ID NO: 2007098
ugcuuucuucacaagacca

SEQ ID NO: 2007100 - RNA, 19 nt, Artificial Sequence
  Description of Artificial Sequence: Synthetic oligonucleotide
  Sense strand starting at position 559 of SEQ ID NO: 1880959
ucaugaacgccuuauucua

SEQ ID NO: 2007101 - RNA, 19 nt, Artificial Sequence
  Description of Artificial Sequence: Synthetic oligonucleotide
  Antisense strand to SEQ ID NO: 2007100
uagaauaaggcguucauga

SEQ ID NO: 2007102 - RNA, 19 nt, Artificial Sequence
  Description of Artificial Sequence: Synthetic oligonucleotide
  Sense strand starting at position 628 of SEQ ID NO: 1880959
accagaaauccgcaaagcu

SEQ ID NO: 2007103 - RNA, 19 nt, Artificial Sequence
  Description of Artificial Sequence: Synthetic oligonucleotide
  Antisense strand to SEQ ID NO: 2007102
agcuuugcggauuucuggu

SEQ ID NO: 2007104 - RNA, 19 nt, Artificial Sequence
  Description of Artificial Sequence: Synthetic oligonucleotide
  Sense strand starting at position 636 of SEQ ID NO: 1880959
uccgcaaagcuaggauuua

SEQ ID NO: 2007105 - RNA, 19 nt, Artificial Sequence
  Description of Artificial Sequence: Synthetic oligonucleotide
  Antisense strand to SEQ ID NO: 2007104
uaaauccuagcuuugcgga

SEQ ID NO: 2007106 - RNA, 19 nt, Artificial Sequence
  Description of Artificial Sequence: Synthetic oligonucleotide
  Sense strand starting at position 648 of SEQ ID NO: 1880959
ggauuuauguaugaggauc

SEQ ID NO: 2007107 - RNA, 19 nt, Artificial Sequence
  Description of Artificial Sequence: Synthetic oligonucleotide
  Antisense strand to SEQ ID NO: 2007106
gauccucauacauaaaucc

SEQ ID NO: 2007108 - RNA, 19 nt, Artificial Sequence
  Description of Artificial Sequence: Synthetic oligonucleotide
  Sense strand starting at position 656 of SEQ ID NO: 1880959
guaugaggaucuuuggacu

SEQ ID NO: 2007109 - RNA, 19 nt, Artificial Sequence
  Description of Artificial Sequence: Synthetic oligonucleotide
  Antisense strand to SEQ ID NO: 2007108
aguccaaagauccucauac

SEQ ID NO: 2007110 - RNA, 19 nt, Artificial Sequence
  Description of Artificial Sequence: Synthetic oligonucleotide
  Sense strand starting at position 699 of SEQ ID NO: 1880959
acauaucucgguuaaaugu

SEQ ID NO: 2007111 - RNA, 19 nt, Artificial Sequence
  Description of Artificial Sequence: Synthetic oligonucleotide
  Antisense strand to SEQ ID NO: 2007110
acauuuaaccgagauaugu

SEQ ID NO: 2007112 - RNA, 19 nt, Artificial Sequence
  Description of Artificial Sequence: Synthetic oligonucleotide
  Sense strand starting at position 777 of SEQ ID NO: 1880959
uuaauuauucuagggucau

SEQ ID NO: 2007113 - RNA, 19 nt, Artificial Sequence
  Description of Artificial Sequence: Synthetic oligonucleotide
  Antisense strand to SEQ ID NO: 2007112
augacccuagaauaauuaa

SEQ ID NO: 2007114 - RNA, 19 nt, Artificial Sequence
  Description of Artificial Sequence: Synthetic oligonucleotide
  Sense strand starting at position 864 of SEQ ID NO: 1880959
aguauauuggccuaccuaa

SEQ ID NO: 2007115 - RNA, 19 nt, Artificial Sequence
  Description of Artificial Sequence: Synthetic oligonucleotide
  Antisense strand to SEQ ID NO: 2007114
uuagguaggccaauauacu

SEQ ID NO: 2007116 - RNA, 19 nt, Artificial Sequence
  Description of Artificial Sequence: Synthetic oligonucleotide
  Sense strand starting at position 913 of SEQ ID NO: 1880959
guaauaggccuccaacauu

SEQ ID NO: 2007117 - RNA, 19 nt, Artificial Sequence
  Description of Artificial Sequence: Synthetic oligonucleotide
  Antisense strand to SEQ ID NO: 2007116
aauguuggaggccuauuac

SEQ ID NO: 2007118 - RNA, 19 nt, Artificial Sequence
  Description of Artificial Sequence: Synthetic oligonucleotide
  Sense strand starting at position 1187 of SEQ ID NO: 1880959
acaaguuuaagauguggaa

SEQ ID NO: 2007119 - RNA, 19 nt, Artificial Sequence
  Description of Artificial Sequence: Synthetic oligonucleotide
  Antisense strand to SEQ ID NO: 2007118
uuccacaucuuaaacuugu

SEQ ID NO: 2007120 - RNA, 19 nt, Artificial Sequence
  Description of Artificial Sequence: Synthetic oligonucleotide
  Sense strand starting at position 1288 of SEQ ID NO: 1880959
cuacuacauugucuugaua

SEQ ID NO: 2007121 - RNA, 19 nt, Artificial Sequence
  Description of Artificial Sequence: Synthetic oligonucleotide
  Antisense strand to SEQ ID NO: 2007120
uaucaagacaauguaguag

SEQ ID NO: 2007122 - RNA, 19 nt, Artificial Sequence
  Description of Artificial Sequence: Synthetic oligonucleotide
  Sense strand starting at position 1397 of SEQ ID NO: 1880959
agauaauauaguugguuag

SEQ ID NO: 2007123 - RNA, 19 nt, Artificial Sequence
  Description of Artificial Sequence: Synthetic oligonucleotide
  Antisense strand to SEQ ID NO: 2007122
cuaaccaacuauauuaucu

SEQ ID NO: 2007124 - RNA, 19 nt, Artificial Sequence
  Description of Artificial Sequence: Synthetic oligonucleotide
  Sense strand starting at position 1398 of SEQ ID NO: 1880959
gauaauauaguugguuaga

SEQ ID NO: 2007125 - RNA, 19 nt, Artificial Sequence
  Description of Artificial Sequence: Synthetic oligonucleotide
  Antisense strand to SEQ ID NO: 2007124
ucuaaccaacuauauuauc

SEQ ID NO: 2007126 - RNA, 19 nt, Artificial Sequence
  Description of Artificial Sequence: Synthetic oligonucleotide
  Sense strand starting at position 1411 of SEQ ID NO: 1880959
guuagauaucaguaauacu

SEQ ID NO: 2007127 - RNA, 19 nt, Artificial Sequence
  Description of Artificial Sequence: Synthetic oligonucleotide
  Antisense strand to SEQ ID NO: 2007126
aguauuacugauaucuaac

SEQ ID NO: 2007128 - RNA, 19 nt, Artificial Sequence
  Description of Artificial Sequence: Synthetic oligonucleotide
  Sense strand starting at position 1419 of SEQ ID NO: 1880959
ucaguaauacuguguauuu

SEQ ID NO: 2007129 - RNA, 19 nt, Artificial Sequence
  Description of Artificial Sequence: Synthetic oligonucleotide
  Antisense strand to SEQ ID NO: 2007128
aaauacacaguauuacuga

SEQ ID NO: 2007130 - RNA, 19 nt, Artificial Sequence
  Description of Artificial Sequence: Synthetic oligonucleotide
  Sense strand starting at position 1440 of SEQ ID NO: 1880959
cagucaguuccucagagaa

SEQ ID NO: 2007131 - RNA, 19 nt, Artificial Sequence
  Description of Artificial Sequence: Synthetic oligonucleotide
  Antisense strand to SEQ ID NO: 2007130
uucucugaggaacugacug

SEQ ID NO: 2007132 - RNA, 19 nt, Artificial Sequence
  Description of Artificial Sequence: Synthetic oligonucleotide
  Sense strand starting at position 2061 of SEQ ID NO: 1880959
uuggucuuugaggagcaaa

SEQ ID NO: 2007133 - RNA, 19 nt, Artificial Sequence
  Description of Artificial Sequence: Synthetic oligonucleotide
  Antisense strand to SEQ ID NO: 2007132
uuugcuccucaaagaccaa

SEQ ID NO: 2007134 - RNA, 19 nt, Artificial Sequence
  Description of Artificial Sequence: Synthetic oligonucleotide
  Sense strand starting at position 2222 of SEQ ID NO: 1880959
gccagugaaguuuaagaac

SEQ ID NO: 2007135 - RNA, 19 nt, Artificial Sequence
  Description of Artificial Sequence: Synthetic oligonucleotide
  Antisense strand to SEQ ID NO: 2007134
guucuuaaacuucacuggc

SEQ ID NO: 2007136 - RNA, 19 nt, Artificial Sequence
  Description of Artificial Sequence: Synthetic oligonucleotide
  Sense strand starting at position 2285 of SEQ ID NO: 1880959
ggaguuagacuccagguuu

SEQ ID NO: 2007137 - RNA, 19 nt, Artificial Sequence
  Description of Artificial Sequence: Synthetic oligonucleotide
  Antisense strand to SEQ ID NO: 2007136
aaaccuggagucuaacucc

SEQ ID NO: 2007138 - RNA, 19 nt, Artificial Sequence
  Description of Artificial Sequence: Synthetic oligonucleotide
  Sense strand starting at position 2625 of SEQ ID NO: 1880959
uauuaagucggucaugacu

SEQ ID NO: 2007139 - RNA, 19 nt, Artificial Sequence
  Description of Artificial Sequence: Synthetic oligonucleotide
  Antisense strand to SEQ ID NO: 2007138
agucaugaccgacuuaaua

SEQ ID NO: 2007140 - RNA, 19 nt, Artificial Sequence
  Description of Artificial Sequence: Synthetic oligonucleotide
  Sense strand starting at position 2634 of SEQ ID NO: 1880959
ggucaugacucacucauau

SEQ ID NO: 2007141 - RNA, 19 nt, Artificial Sequence
  Description of Artificial Sequence: Synthetic oligonucleotide
  Antisense strand to SEQ ID NO: 2007140
auaugagugagucaugacc

SEQ ID NO: 2007142 - RNA, 19 nt, Artificial Sequence
  Description of Artificial Sequence: Synthetic oligonucleotide
  Sense strand starting at position 2724 of SEQ ID NO: 1880959
guuaaauaccuguaucagg

SEQ ID NO: 2007143 - RNA, 19 nt, Artificial Sequence
  Description of Artificial Sequence: Synthetic oligonucleotide
  Antisense strand to SEQ ID NO: 2007142
ccugauacagguauuuaac

SEQ ID NO: 2007144 - RNA, 19 nt, Artificial Sequence
  Description of Artificial Sequence: Synthetic oligonucleotide
  Sense strand starting at position 2883 of SEQ ID NO: 1880959
gcaggaacaucuuuaauua

SEQ ID NO: 2007145 - RNA, 19 nt, Artificial Sequence
  Description of Artificial Sequence: Synthetic oligonucleotide
  Antisense strand to SEQ ID NO: 2007144
uaauuaaagauguuccugc

SEQ ID NO: 2007146 - RNA, 19 nt, Artificial Sequence
  Description of Artificial Sequence: Synthetic oligonucleotide
  Sense strand starting at position 2913 of SEQ ID NO: 1880959
aaucgcauccaagauaguu

SEQ ID NO: 2007147 - RNA, 19 nt, Artificial Sequence
  Description of Artificial Sequence: Synthetic oligonucleotide
  Antisense strand to SEQ ID NO: 2007146
aacuaucuuggaugcgauu

SEQ ID NO: 2007148 - RNA, 19 nt, Artificial Sequence
  Description of Artificial Sequence: Synthetic oligonucleotide
  Sense strand starting at position 3048 of SEQ ID NO: 1880959
aguagauaacaauguauug

SEQ ID NO: 2007149 - RNA, 19 nt, Artificial Sequence
  Description of Artificial Sequence: Synthetic oligonucleotide
  Antisense strand to SEQ ID NO: 2007148
caauacauuguuaucuacu

SEQ ID NO: 2007150 - RNA, 19 nt, Artificial Sequence
  Description of Artificial Sequence: Synthetic oligonucleotide
  Sense strand starting at position 3319 of SEQ ID NO: 1880959
ccuugcuugggucauagau

SEQ ID NO: 2007151 - RNA, 19 nt, Artificial Sequence
  Description of Artificial Sequence: Synthetic oligonucleotide
  Antisense strand to SEQ ID NO: 2007150
aucuaugacccaagcaagg

SEQ ID NO: 2007152 - RNA, 19 nt, Artificial Sequence
  Description of Artificial Sequence: Synthetic oligonucleotide
  Sense strand starting at position 3596 of SEQ ID NO: 1880959
agagauuauuugggaaaug

SEQ ID NO: 2007153 - RNA, 19 nt, Artificial Sequence
  Description of Artificial Sequence: Synthetic oligonucleotide
  Antisense strand to SEQ ID NO: 2007152
cauuucccaaauaaucucu

SEQ ID NO: 2007154 - RNA, 19 nt, Artificial Sequence
  Description of Artificial Sequence: Synthetic oligonucleotide
  Sense strand starting at position 3597 of SEQ ID NO: 1880959
gagauuauuugggaaaugu

SEQ ID NO: 2007155 - RNA, 19 nt, Artificial Sequence
  Description of Artificial Sequence: Synthetic oligonucleotide
  Antisense strand to SEQ ID NO: 2007154
acauuucccaaauaaucuc

SEQ ID NO: 2007156 - RNA, 19 nt, Artificial Sequence
  Description of Artificial Sequence: Synthetic oligonucleotide
  Sense strand starting at position 3673 of SEQ ID NO: 1880959
uggguucccagguacuaaa

SEQ ID NO: 2007157 - RNA, 19 nt, Artificial Sequence
  Description of Artificial Sequence: Synthetic oligonucleotide
  Antisense strand to SEQ ID NO: 2007156
uuuaguaccugggaaccca

SEQ ID NO: 2007158 - RNA, 19 nt, Artificial Sequence
  Description of Artificial Sequence: Synthetic oligonucleotide
  Sense strand starting at position 3836 of SEQ ID NO: 1880959
acuuauugucagcagagac

SEQ ID NO: 2007159 - RNA, 19 nt, Artificial Sequence
  Description of Artificial Sequence: Synthetic oligonucleotide
  Antisense strand to SEQ ID NO: 2007158
gucucugcugacaauaagu

SEQ ID NO: 2007160 - RNA, 19 nt, Artificial Sequence
  Description of Artificial Sequence: Synthetic oligonucleotide
  Sense strand starting at position 23 of SEQ ID NO: 1880960
gcuccauagggauggcaga

SEQ ID NO: 2007161 - RNA, 19 nt, Artificial Sequence
  Description of Artificial Sequence: Synthetic oligonucleotide
  Antisense strand to SEQ ID NO: 2007160
ucugccaucccuauggagc

SEQ ID NO: 2007162 - RNA, 19 nt, Artificial Sequence
  Description of Artificial Sequence: Synthetic oligonucleotide
  Sense strand starting at position 181 of SEQ ID NO: 1880960
gggauagaauguguguaaa

SEQ ID NO: 2007163 - RNA, 19 nt, Artificial Sequence
  Description of Artificial Sequence: Synthetic oligonucleotide
  Antisense strand to SEQ ID NO: 2007162
uuuacacacauucuauccc

SEQ ID NO: 2007164 - RNA, 19 nt, Artificial Sequence
  Description of Artificial Sequence: Synthetic oligonucleotide
  Sense strand starting at position 204 of SEQ ID NO: 1880960
gguucucgaacuugaagaa

SEQ ID NO: 2007165 - RNA, 19 nt, Artificial Sequence
  Description of Artificial Sequence: Synthetic oligonucleotide
  Antisense strand to SEQ ID NO: 2007164
uucuucaaguucgagaacc

SEQ ID NO: 2007166 - RNA, 19 nt, Artificial Sequence
  Description of Artificial Sequence: Synthetic oligonucleotide
  Sense strand starting at position 205 of SEQ ID NO: 1880960
guucucgaacuugaagaau

SEQ ID NO: 2007167 - RNA, 19 nt, Artificial Sequence
  Description of Artificial Sequence: Synthetic oligonucleotide
  Antisense strand to SEQ ID NO: 2007166
auucuucaaguucgagaac

SEQ ID NO: 2007168 - RNA, 19 nt, Artificial Sequence
  Description of Artificial Sequence: Synthetic oligonucleotide
  Sense strand starting at position 270 of SEQ ID NO: 1880960
auggaacucugguuugaga

SEQ ID NO: 2007169 - RNA, 19 nt, Artificial Sequence
  Description of Artificial Sequence: Synthetic oligonucleotide
  Antisense strand to SEQ ID NO: 2007168
ucucaaaccagaguuccau

SEQ ID NO: 2007170 - RNA, 19 nt, Artificial Sequence
  Description of Artificial Sequence: Synthetic oligonucleotide
  Sense strand starting at position 283 of SEQ ID NO: 1880960
uugagagguaccgaguuua

SEQ ID NO: 2007171 - RNA, 19 nt, Artificial Sequence
  Description of Artificial Sequence: Synthetic oligonucleotide
  Antisense strand to SEQ ID NO: 2007170
uaaacucgguaccucucaa

SEQ ID NO: 2007172 - RNA, 19 nt, Artificial Sequence
  Description of Artificial Sequence: Synthetic oligonucleotide
  Sense strand starting at position 322 of SEQ ID NO: 1880960
gucauuuaggccugguaca

SEQ ID NO: 2007173 - RNA, 19 nt, Artificial Sequence
  Description of Artificial Sequence: Synthetic oligonucleotide
  Antisense strand to SEQ ID NO: 2007172
uguaccaggccuaaaugac

SEQ ID NO: 2007174 - RNA, 19 nt, Artificial Sequence
  Description of Artificial Sequence: Synthetic oligonucleotide
  Sense strand starting at position 586 of SEQ ID NO: 1880960
cacagauauugaguguuua

SEQ ID NO: 2007175 - RNA, 19 nt, Artificial Sequence
  Description of Artificial Sequence: Synthetic oligonucleotide
  Antisense strand to SEQ ID NO: 2007174
uaaacacucaauaucugug

SEQ ID NO: 2007176 - RNA, 19 nt, Artificial Sequence
  Description of Artificial Sequence: Synthetic oligonucleotide
  Sense strand starting at position 587 of SEQ ID NO: 1880960
acagauauugaguguuuag

SEQ ID NO: 2007177 - RNA, 19 nt, Artificial Sequence
  Description of Artificial Sequence: Synthetic oligonucleotide
  Antisense strand to SEQ ID NO: 2007176
cuaaacacucaauaucugu

SEQ ID NO: 2007178 - RNA, 19 nt, Artificial Sequence
  Description of Artificial Sequence: Synthetic oligonucleotide
  Sense strand starting at position 590 of SEQ ID NO: 1880960
gauauugaguguuuagaaa

SEQ ID NO: 2007179 - RNA, 19 nt, Artificial Sequence
  Description of Artificial Sequence: Synthetic oligonucleotide
  Antisense strand to SEQ ID NO: 2007178
uuucuaaacacucaauauc

SEQ ID NO: 2007180 - RNA, 19 nt, Artificial Sequence
  Description of Artificial Sequence: Synthetic oligonucleotide
  Sense strand starting at position 731 of SEQ ID NO: 1880960
ugauuacacugccuggaaa

SEQ ID NO: 2007181 - RNA, 19 nt, Artificial Sequence
  Description of Artificial Sequence: Synthetic oligonucleotide
  Antisense strand to SEQ ID NO: 2007180
uuuccaggcaguguaauca

SEQ ID NO: 2007182 - RNA, 19 nt, Artificial Sequence
  Description of Artificial Sequence: Synthetic oligonucleotide
  Sense strand starting at position 750 of SEQ ID NO: 1880960
agucuugaauuaucguaga

SEQ ID NO: 2007183 - RNA, 19 nt, Artificial Sequence
  Description of Artificial Sequence: Synthetic oligonucleotide
  Antisense strand to SEQ ID NO: 2007182
ucuacgauaauucaagacu

SEQ ID NO: 2007184 - RNA, 19 nt, Artificial Sequence
  Description of Artificial Sequence: Synthetic oligonucleotide
  Sense strand starting at position 758 of SEQ ID NO: 1880960
auuaucguagacugaacaa

SEQ ID NO: 2007185 - RNA, 19 nt, Artificial Sequence
  Description of Artificial Sequence: Synthetic oligonucleotide
  Antisense strand to SEQ ID NO: 2007184
uuguucagucuacgauaau

SEQ ID NO: 2007186 - RNA, 19 nt, Artificial Sequence
  Description of Artificial Sequence: Synthetic oligonucleotide
  Sense strand starting at position 1333 of SEQ ID NO: 1880960
acugcaaugaaguauguga

SEQ ID NO: 2007187 - RNA, 19 nt, Artificial Sequence
  Description of Artificial Sequence: Synthetic oligonucleotide
  Antisense strand to SEQ ID NO: 2007186
ucacauacuucauugcagu

SEQ ID NO: 2007188 - RNA, 19 nt, Artificial Sequence
  Description of Artificial Sequence: Synthetic oligonucleotide
  Sense strand starting at position 1352 of SEQ ID NO: 1880960
ggaaguugccuccacccua

SEQ ID NO: 2007189 - RNA, 19 nt, Artificial Sequence
  Description of Artificial Sequence: Synthetic oligonucleotide
  Antisense strand to SEQ ID NO: 2007188
uaggguggaggcaacuucc

SEQ ID NO: 2007190 - RNA, 19 nt, Artificial Sequence
  Description of Artificial Sequence: Synthetic oligonucleotide
  Sense strand starting at position 1413 of SEQ ID NO: 1880960
aguguuacagauugcaaag

SEQ ID NO: 2007191 - RNA, 19 nt, Artificial Sequence
  Description of Artificial Sequence: Synthetic oligonucleotide
  Antisense strand to SEQ ID NO: 2007190
cuuugcaaucuguaacacu

SEQ ID NO: 2007192 - RNA, 19 nt, Artificial Sequence
  Description of Artificial Sequence: Synthetic oligonucleotide
  Sense strand starting at position 1451 of SEQ ID NO: 1880960
ucagcuaaccauuggaaca

SEQ ID NO: 2007193 - RNA, 19 nt, Artificial Sequence
  Description of Artificial Sequence: Synthetic oligonucleotide
  Antisense strand to SEQ ID NO: 2007192
uguuccaaugguuagcuga

SEQ ID NO: 2007194 - RNA, 19 nt, Artificial Sequence
  Description of Artificial Sequence: Synthetic oligonucleotide
  Sense strand starting at position 1967 of SEQ ID NO: 1880960
gcggaucaugucuacgaag

SEQ ID NO: 2007195 - RNA, 19 nt, Artificial Sequence
  Description of Artificial Sequence: Synthetic oligonucleotide
  Antisense strand to SEQ ID NO: 2007194
cuucguagacaugauccgc

SEQ ID NO: 2007196 - RNA, 19 nt, Artificial Sequence
  Description of Artificial Sequence: Synthetic oligonucleotide
  Sense strand starting at position 1969 of SEQ ID NO: 1880960
ggaucaugucuacgaagag

SEQ ID NO: 2007197 - RNA, 19 nt, Artificial Sequence
  Description of Artificial Sequence: Synthetic oligonucleotide
  Antisense strand to SEQ ID NO: 2007196
cucuucguagacaugaucc

SEQ ID NO: 2007198 - RNA, 19 nt, Artificial Sequence
  Description of Artificial Sequence: Synthetic oligonucleotide
  Sense strand starting at position 1973 of SEQ ID NO: 1880960
caugucuacgaagagugau

SEQ ID NO: 2007199 - RNA, 19 nt, Artificial Sequence
  Description of Artificial Sequence: Synthetic oligonucleotide
  Antisense strand to SEQ ID NO: 2007198
aucacucuucguagacaug

SEQ ID NO: 2007200 - RNA, 19 nt, Artificial Sequence
  Description of Artificial Sequence: Synthetic oligonucleotide
  Sense strand starting at position 1985 of SEQ ID NO: 1880960
gagugauaacgauggguag

SEQ ID NO: 2007201 - RNA, 19 nt, Artificial Sequence
  Description of Artificial Sequence: Synthetic oligonucleotide
  Antisense strand to SEQ ID NO: 2007200
cuacccaucguuaucacuc

SEQ ID NO: 2007202 - RNA, 19 nt, Artificial Sequence
  Description of Artificial Sequence: Synthetic oligonucleotide
  Sense strand starting at position 1987 of SEQ ID NO: 1880960
gugauaacgauggguagga

SEQ ID NO: 2007203 - RNA, 19 nt, Artificial Sequence
  Description of Artificial Sequence: Synthetic oligonucleotide
  Antisense strand to SEQ ID NO: 2007202
uccuacccaucguuaucac

SEQ ID NO: 2007204 - RNA, 19 nt, Artificial Sequence
  Description of Artificial Sequence: Synthetic oligonucleotide
  Sense strand starting at position 2018 of SEQ ID NO: 1880960
agauguuggagucaagcaa

SEQ ID NO: 2007205 - RNA, 19 nt, Artificial Sequence
  Description of Artificial Sequence: Synthetic oligonucleotide
  Antisense strand to SEQ ID NO: 2007204
uugcuugacuccaacaucu

SEQ ID NO: 2007206 - RNA, 19 nt, Artificial Sequence
  Description of Artificial Sequence: Synthetic oligonucleotide
  Sense strand starting at position 2022 of SEQ ID NO: 1880960
guuggagucaagcaacagu

SEQ ID NO: 2007207 - RNA, 19 nt, Artificial Sequence
  Description of Artificial Sequence: Synthetic oligonucleotide
  Antisense strand to SEQ ID NO: 2007206
acuguugcuugacuccaac

SEQ ID NO: 2007208 - RNA, 19 nt, Artificial Sequence
  Description of Artificial Sequence: Synthetic oligonucleotide
  Sense strand starting at position 2329 of SEQ ID NO: 1880960
ggcuucucggugaguaagu

SEQ ID NO: 2007209 - RNA, 19 nt, Artificial Sequence
  Description of Artificial Sequence: Synthetic oligonucleotide
  Antisense strand to SEQ ID NO: 2007208
acuuacucaccgagaagcc

SEQ ID NO: 2007210 - RNA, 19 nt, Artificial Sequence
  Description of Artificial Sequence: Synthetic oligonucleotide
  Sense strand starting at position 2464 of SEQ ID NO: 1880960
ugcccugagaugggauaau

SEQ ID NO: 2007211 - RNA, 19 nt, Artificial Sequence
  Description of Artificial Sequence: Synthetic oligonucleotide
  Antisense strand to SEQ ID NO: 2007210
auuaucccaucucagggca

SEQ ID NO: 2007212 - RNA, 19 nt, Artificial Sequence
  Description of Artificial Sequence: Synthetic oligonucleotide
  Sense strand starting at position 2543 of SEQ ID NO: 1880960
ccgcuucccgaugaacuaa

SEQ ID NO: 2007213 - RNA, 19 nt, Artificial Sequence
  Description of Artificial Sequence: Synthetic oligonucleotide
  Antisense strand to SEQ ID NO: 2007212
uuaguucaucgggaagcgg

SEQ ID NO: 2007214 - RNA, 19 nt, Artificial Sequence
  Description of Artificial Sequence: Synthetic oligonucleotide
  Sense strand starting at position 2696 of SEQ ID NO: 1880960
aaugguuauccguauuaac

SEQ ID NO: 2007215 - RNA, 19 nt, Artificial Sequence
  Description of Artificial Sequence: Synthetic oligonucleotide
  Antisense strand to SEQ ID NO: 2007214
guuaauacggauaaccauu

SEQ ID NO: 2007216 - RNA, 19 nt, Artificial Sequence
  Description of Artificial Sequence: Synthetic oligonucleotide
  Sense strand starting at position 2712 of SEQ ID NO: 1880960
aaccgaagcggcgauaaau

SEQ ID NO: 2007217 - RNA, 19 nt, Artificial Sequence
  Description of Artificial Sequence: Synthetic oligonucleotide
  Antisense strand to SEQ ID NO: 2007216
auuuaucgccgcuucgguu

SEQ ID NO: 2007218 - RNA, 19 nt, Artificial Sequence
  Description of Artificial Sequence: Synthetic oligonucleotide
  Sense strand starting at position 2759 of SEQ ID NO: 1880960
cguaaauguuaaccauuau

SEQ ID NO: 2007219 - RNA, 19 nt, Artificial Sequence
  Description of Artificial Sequence: Synthetic oligonucleotide
  Antisense strand to SEQ ID NO: 2007218
auaaugguuaacauuuacg

SEQ ID NO: 2007220 - RNA, 19 nt, Artificial Sequence
  Description of Artificial Sequence: Synthetic oligonucleotide
  Sense strand starting at position 2765 of SEQ ID NO: 1880960
uguuaaccauuauuagaag

SEQ ID NO: 2007221 - RNA, 19 nt, Artificial Sequence
  Description of Artificial Sequence: Synthetic oligonucleotide
  Antisense strand to SEQ ID NO: 2007220
cuucuaauaaugguuaaca

SEQ ID NO: 2007222 - RNA, 19 nt, Artificial Sequence
  Description of Artificial Sequence: Synthetic oligonucleotide
  Sense strand starting at position 2865 of SEQ ID NO: 1880960
gcccgugaugaugagaaua

SEQ ID NO: 2007223 - RNA, 19 nt, Artificial Sequence
  Description of Artificial Sequence: Synthetic oligonucleotide
  Antisense strand to SEQ ID NO: 2007222
uauucucaucaucacgggc

SEQ ID NO: 2007224 - RNA, 19 nt, Artificial Sequence
  Description of Artificial Sequence: Synthetic oligonucleotide
  Sense strand starting at position 3194 of SEQ ID NO: 1880960
augacauucgauugaaugu

SEQ ID NO: 2007225 - RNA, 19 nt, Artificial Sequence
  Description of Artificial Sequence: Synthetic oligonucleotide
  Antisense strand to SEQ ID NO: 2007224
acauucaaucgaaugucau

SEQ ID NO: 2007226 - RNA, 19 nt, Artificial Sequence
  Description of Artificial Sequence: Synthetic oligonucleotide
  Sense strand starting at position 3195 of SEQ ID NO: 1880960
ugacauucgauugaauguu

SEQ ID NO: 2007227 - RNA, 19 nt, Artificial Sequence
  Description of Artificial Sequence: Synthetic oligonucleotide
  Antisense strand to SEQ ID NO: 2007226
aacauucaaucgaauguca

SEQ ID NO: 2007228 - RNA, 19 nt, Artificial Sequence
  Description of Artificial Sequence: Synthetic oligonucleotide
  Sense strand starting at position 3201 of SEQ ID NO: 1880960
ucgauugaauguuuagauc

SEQ ID NO: 2007229 - RNA, 19 nt, Artificial Sequence
  Description of Artificial Sequence: Synthetic oligonucleotide
  Antisense strand to SEQ ID NO: 2007228
gaucuaaacauucaaucga

SEQ ID NO: 2007230 - RNA, 19 nt, Artificial Sequence
  Description of Artificial Sequence: Synthetic oligonucleotide
  Sense strand starting at position 3297 of SEQ ID NO: 1880960
gguucugauuuacaagauu

SEQ ID NO: 2007231 - RNA, 19 nt, Artificial Sequence
  Description of Artificial Sequence: Synthetic oligonucleotide
  Antisense strand to SEQ ID NO: 2007230
aaucuuguaaaucagaacc

SEQ ID NO: 2007232 - RNA, 19 nt, Artificial Sequence
  Description of Artificial Sequence: Synthetic oligonucleotide
  Sense strand starting at position 3349 of SEQ ID NO: 1880960
ucugcugucugauuucuaa

SEQ ID NO: 2007233 - RNA, 19 nt, Artificial Sequence
  Description of Artificial Sequence: Synthetic oligonucleotide
  Antisense strand to SEQ ID NO: 2007232
uuagaaaucagacagcaga

SEQ ID NO: 2007234 - RNA, 19 nt, Artificial Sequence
  Description of Artificial Sequence: Synthetic oligonucleotide
  Sense strand starting at position 3394 of SEQ ID NO: 1880960
guaucuauuugccuggacu

SEQ ID NO: 2007235 - RNA, 19 nt, Artificial Sequence
  Description of Artificial Sequence: Synthetic oligonucleotide
  Antisense strand to SEQ ID NO: 2007234
aguccaggcaaauagauac

SEQ ID NO: 2007236 - RNA, 19 nt, Artificial Sequence
  Description of Artificial Sequence: Synthetic oligonucleotide
  Sense strand starting at position 3936 of SEQ ID NO: 1880960
caaggagauugucccuaag

SEQ ID NO: 2007237 - RNA, 19 nt, Artificial Sequence
  Description of Artificial Sequence: Synthetic oligonucleotide
  Antisense strand to SEQ ID NO: 2007236
cuuagggacaaucuccuug

SEQ ID NO: 2007238 - RNA, 19 nt, Artificial Sequence
  Description of Artificial Sequence: Synthetic oligonucleotide
  Sense strand starting at position 3952 of SEQ ID NO: 1880960
aagaaaugguccuugcuuc

SEQ ID NO: 2007239 - RNA, 19 nt, Artificial Sequence
  Description of Artificial Sequence: Synthetic oligonucleotide
  Antisense strand to SEQ ID NO: 2007238
gaagcaaggaccauuucuu

SEQ ID NO: 2007240 - RNA, 19 nt, Artificial Sequence
  Description of Artificial Sequence: Synthetic oligonucleotide
  Sense strand starting at position 109 of SEQ ID NO: 1880961
gugacucacgguuaaauca

SEQ ID NO: 2007241 - RNA, 19 nt, Artificial Sequence
  Description of Artificial Sequence: Synthetic oligonucleotide
  Antisense strand to SEQ ID NO: 2007240
ugauuuaaccgugagucac

SEQ ID NO: 2007242 - RNA, 19 nt, Artificial Sequence
  Description of Artificial Sequence: Synthetic oligonucleotide
  Sense strand starting at position 116 of SEQ ID NO: 1880961
acgguuaaaucaucucucu

SEQ ID NO: 2007243 - RNA, 19 nt, Artificial Sequence
  Description of Artificial Sequence: Synthetic oligonucleotide
  Antisense strand to SEQ ID NO: 2007242
agagagaugauuuaaccgu

SEQ ID NO: 2007244 - RNA, 19 nt, Artificial Sequence
  Description of Artificial Sequence: Synthetic oligonucleotide
  Sense strand starting at position 378 of SEQ ID NO: 1880961
gaagguugguguccaauga

SEQ ID NO: 2007245 - RNA, 19 nt, Artificial Sequence
  Description of Artificial Sequence: Synthetic oligonucleotide
  Antisense strand to SEQ ID NO: 2007244
ucauuggacaccaaccuuc

SEQ ID NO: 2007246 - RNA, 19 nt, Artificial Sequence
  Description of Artificial Sequence: Synthetic oligonucleotide
  Sense strand starting at position 434 of SEQ ID NO: 1880961
auagaccagcacugaaauu

SEQ ID NO: 2007247 - RNA, 19 nt, Artificial Sequence
  Description of Artificial Sequence: Synthetic oligonucleotide
  Antisense strand to SEQ ID NO: 2007246
aauuucagugcuggucuau

SEQ ID NO: 2007248 - RNA, 19 nt, Artificial Sequence
  Description of Artificial Sequence: Synthetic oligonucleotide
  Sense strand starting at position 570 of SEQ ID NO: 1880961
accuccuuuccugaagagu

SEQ ID NO: 2007249 - RNA, 19 nt, Artificial Sequence
  Description of Artificial Sequence: Synthetic oligonucleotide
  Antisense strand to SEQ ID NO: 2007248
acucuucaggaaaggaggu

SEQ ID NO: 2007250 - RNA, 19 nt, Artificial Sequence
  Description of Artificial Sequence: Synthetic oligonucleotide
  Sense strand starting at position 573 of SEQ ID NO: 1880961
uccuuuccugaagagugau

SEQ ID NO: 2007251 - RNA, 19 nt, Artificial Sequence
  Description of Artificial Sequence: Synthetic oligonucleotide
  Antisense strand to SEQ ID NO: 2007250
aucacucuucaggaaagga

SEQ ID NO: 2007252 - RNA, 19 nt, Artificial Sequence
  Description of Artificial Sequence: Synthetic oligonucleotide
  Sense strand starting at position 619 of SEQ ID NO: 1880961
ucauaagguuguuccaaac

SEQ ID NO: 2007253 - RNA, 19 nt, Artificial Sequence
  Description of Artificial Sequence: Synthetic oligonucleotide
  Antisense strand to SEQ ID NO: 2007252
guuuggaacaaccuuauga

SEQ ID NO: 2007254 - RNA, 19 nt, Artificial Sequence
  Description of Artificial Sequence: Synthetic oligonucleotide
  Sense strand starting at position 671 of SEQ ID NO: 1880961
uguguuguaagagauauaa

SEQ ID NO: 2007255 - RNA, 19 nt, Artificial Sequence
  Description of Artificial Sequence: Synthetic oligonucleotide
  Antisense strand to SEQ ID NO: 2007254
uuauaucucuuacaacaca

SEQ ID NO: 2007256 - RNA, 19 nt, Artificial Sequence
  Description of Artificial Sequence: Synthetic oligonucleotide
  Sense strand starting at position 992 of SEQ ID NO: 1880961
aaggucuuagcaggaauaa

SEQ ID NO: 2007257 - RNA, 19 nt, Artificial Sequence
  Description of Artificial Sequence: Synthetic oligonucleotide
  Antisense strand to SEQ ID NO: 2007256
uuauuccugcuaagaccuu

SEQ ID NO: 2007258 - RNA, 19 nt, Artificial Sequence
  Description of Artificial Sequence: Synthetic oligonucleotide
  Sense strand starting at position 1051 of SEQ ID NO: 1880961
guggcaaccugguuaaaua

SEQ ID NO: 2007259 - RNA, 19 nt, Artificial Sequence
  Description of Artificial Sequence: Synthetic oligonucleotide
  Antisense strand to SEQ ID NO: 2007258
uauuuaaccagguugccac

SEQ ID NO: 2007260 - RNA, 19 nt, Artificial Sequence
  Description of Artificial Sequence: Synthetic oligonucleotide
  Sense strand starting at position 1404 of SEQ ID NO: 1880961
cugggaagagucugccuaa

SEQ ID NO: 2007261 - RNA, 19 nt, Artificial Sequence
  Description of Artificial Sequence: Synthetic oligonucleotide
  Antisense strand to SEQ ID NO: 2007260
uuaggcagacucuucccag

SEQ ID NO: 2007262 - RNA, 19 nt, Artificial Sequence
  Description of Artificial Sequence: Synthetic oligonucleotide
  Sense strand starting at position 1407 of SEQ ID NO: 1880961
ggaagagucugccuaaagc

SEQ ID NO: 2007263 - RNA, 19 nt, Artificial Sequence
  Description of Artificial Sequence: Synthetic oligonucleotide
  Antisense strand to SEQ ID NO: 2007262
gcuuuaggcagacucuucc

SEQ ID NO: 2007264 - RNA, 19 nt, Artificial Sequence
  Description of Artificial Sequence: Synthetic oligonucleotide
  Sense strand starting at position 1602 of SEQ ID NO: 1880961
ggcuuugauccacaacggu

SEQ ID NO: 2007265 - RNA, 19 nt, Artificial Sequence
  Description of Artificial Sequence: Synthetic oligonucleotide
  Antisense strand to SEQ ID NO: 2007264
accguuguggaucaaagcc

SEQ ID NO: 2007266 - RNA, 19 nt, Artificial Sequence
  Description of Artificial Sequence: Synthetic oligonucleotide
  Sense strand starting at position 2085 of SEQ ID NO: 1880961
gucugauugggugaguuga

SEQ ID NO: 2007267 - RNA, 19 nt, Artificial Sequence
  Description of Artificial Sequence: Synthetic oligonucleotide
  Antisense strand to SEQ ID NO: 2007266
ucaacucacccaaucagac

SEQ ID NO: 2007268 - RNA, 19 nt, Artificial Sequence
  Description of Artificial Sequence: Synthetic oligonucleotide
  Sense strand starting at position 2087 of SEQ ID NO: 1880961
cugauugggugaguugaaa

SEQ ID NO: 2007269 - RNA, 19 nt, Artificial Sequence
  Description of Artificial Sequence: Synthetic oligonucleotide
  Antisense strand to SEQ ID NO: 2007268
uuucaacucacccaaucag

SEQ ID NO: 2007270 - RNA, 19 nt, Artificial Sequence
  Description of Artificial Sequence: Synthetic oligonucleotide
  Sense strand starting at position 2120 of SEQ ID NO: 1880961
cuugaaucugaugguacau

SEQ ID NO: 2007271 - RNA, 19 nt, Artificial Sequence
  Description of Artificial Sequence: Synthetic oligonucleotide
  Antisense strand to SEQ ID NO: 2007270
auguaccaucagauucaag

SEQ ID NO: 2007272 - RNA, 19 nt, Artificial Sequence
  Description of Artificial Sequence: Synthetic oligonucleotide
  Sense strand starting at position 2122 of SEQ ID NO: 1880961
ugaaucugaugguacauuu

SEQ ID NO: 2007273 - RNA, 19 nt, Artificial Sequence
  Description of Artificial Sequence: Synthetic oligonucleotide
  Antisense strand to SEQ ID NO: 2007272
aaauguaccaucagauuca

SEQ ID NO: 2007274 - RNA, 19 nt, Artificial Sequence
  Description of Artificial Sequence: Synthetic oligonucleotide
  Sense strand starting at position 2314 of SEQ ID NO: 1880961
uugguccuacacgaauauu

SEQ ID NO: 2007275 - RNA, 19 nt, Artificial Sequence
  Description of Artificial Sequence: Synthetic oligonucleotide
  Antisense strand to SEQ ID NO: 2007274
aauauucguguaggaccaa

SEQ ID NO: 2007276 - RNA, 19 nt, Artificial Sequence
  Description of Artificial Sequence: Synthetic oligonucleotide
  Sense strand starting at position 2317 of SEQ ID NO: 1880961
guccuacacgaauauuaag

SEQ ID NO: 2007277 - RNA, 19 nt, Artificial Sequence
  Description of Artificial Sequence: Synthetic oligonucleotide
  Antisense strand to SEQ ID NO: 2007276
cuuaauauucguguaggac

SEQ ID NO: 2007278 - RNA, 19 nt, Artificial Sequence
  Description of Artificial Sequence: Synthetic oligonucleotide
  Sense strand starting at position 2327 of SEQ ID NO: 1880961
aauauuaagugcucuggau

SEQ ID NO: 2007279 - RNA, 19 nt, Artificial Sequence
  Description of Artificial Sequence: Synthetic oligonucleotide
  Antisense strand to SEQ ID NO: 2007278
auccagagcacuuaauauu

SEQ ID NO: 2007280 - RNA, 19 nt, Artificial Sequence
  Description of Artificial Sequence: Synthetic oligonucleotide
  Sense strand starting at position 2329 of SEQ ID NO: 1880961
uauuaagugcucuggauca

SEQ ID NO: 2007281 - RNA, 19 nt, Artificial Sequence
  Description of Artificial Sequence: Synthetic oligonucleotide
  Antisense strand to SEQ ID NO: 2007280
ugauccagagcacuuaaua

SEQ ID NO: 2007282 - RNA, 19 nt, Artificial Sequence
  Description of Artificial Sequence: Synthetic oligonucleotide
  Sense strand starting at position 2331 of SEQ ID NO: 1880961
uuaagugcucuggaucaac

SEQ ID NO: 2007283 - RNA, 19 nt, Artificial Sequence
  Description of Artificial Sequence: Synthetic oligonucleotide
  Antisense strand to SEQ ID NO: 2007282
guugauccagagcacuuaa

SEQ ID NO: 2007284 - RNA, 19 nt, Artificial Sequence
  Description of Artificial Sequence: Synthetic oligonucleotide
  Sense strand starting at position 2379 of SEQ ID NO: 1880961
cucccagauccaugguuua

SEQ ID NO: 2007285 - RNA, 19 nt, Artificial Sequence
  Description of Artificial Sequence: Synthetic oligonucleotide
  Antisense strand to SEQ ID NO: 2007284
uaaaccauggaucugggag

SEQ ID NO: 2007286 - RNA, 19 nt, Artificial Sequence
  Description of Artificial Sequence: Synthetic oligonucleotide
  Sense strand starting at position 2382 of SEQ ID NO: 1880961
ccagauccaugguuuauac

SEQ ID NO: 2007287 - RNA, 19 nt, Artificial Sequence
  Description of Artificial Sequence: Synthetic oligonucleotide
  Antisense strand to SEQ ID NO: 2007286
guauaaaccauggaucugg

SEQ ID NO: 2007288 - RNA, 19 nt, Artificial Sequence
  Description of Artificial Sequence: Synthetic oligonucleotide
  Sense strand starting at position 2462 of SEQ ID NO: 1880961
aggagcagauaucuagauu

SEQ ID NO: 2007289 - RNA, 19 nt, Artificial Sequence
  Description of Artificial Sequence: Synthetic oligonucleotide
  Antisense strand to SEQ ID NO: 2007288
aaucuagauaucugcuccu

SEQ ID NO: 2007290 - RNA, 19 nt, Artificial Sequence
  Description of Artificial Sequence: Synthetic oligonucleotide
  Sense strand starting at position 2593 of SEQ ID NO: 1880961
gagggaugguggucagaua

SEQ ID NO: 2007291 - RNA, 19 nt, Artificial Sequence
  Description of Artificial Sequence: Synthetic oligonucleotide
  Antisense strand to SEQ ID NO: 2007290
uaucugaccaccaucccuc

SEQ ID NO: 2007292 - RNA, 19 nt, Artificial Sequence
  Description of Artificial Sequence: Synthetic oligonucleotide
  Sense strand starting at position 2655 of SEQ ID NO: 1880961
aagguaaucuguuugggag

SEQ ID NO: 2007293 - RNA, 19 nt, Artificial Sequence
  Description of Artificial Sequence: Synthetic oligonucleotide
  Antisense strand to SEQ ID NO: 2007292
cucccaaacagauuaccuu

SEQ ID NO: 2007294 - RNA, 19 nt, Artificial Sequence
  Description of Artificial Sequence: Synthetic oligonucleotide
  Sense strand starting at position 2656 of SEQ ID NO: 1880961
agguaaucuguuugggaga

SEQ ID NO: 2007295 - RNA, 19 nt, Artificial Sequence
  Description of Artificial Sequence: Synthetic oligonucleotide
  Antisense strand to SEQ ID NO: 2007294
ucucccaaacagauuaccu

SEQ ID NO: 2007296 - RNA, 19 nt, Artificial Sequence
  Description of Artificial Sequence: Synthetic oligonucleotide
  Sense strand starting at position 2724 of SEQ ID NO: 1880961
cggucaagaccuggaaacu

SEQ ID NO: 2007297 - RNA, 19 nt, Artificial Sequence
  Description of Artificial Sequence: Synthetic oligonucleotide
  Antisense strand to SEQ ID NO: 2007296
aguuuccaggucuugaccg

SEQ ID NO: 2007298 - RNA, 19 nt, Artificial Sequence
  Description of Artificial Sequence: Synthetic oligonucleotide
  Sense strand starting at position 2857 of SEQ ID NO: 1880961
gugugaagugucuagugaa

SEQ ID NO: 2007299 - RNA, 19 nt, Artificial Sequence
  Description of Artificial Sequence: Synthetic oligonucleotide
  Antisense strand to SEQ ID NO: 2007298
uucacuagacacuucacac

SEQ ID NO: 2007300 - RNA, 19 nt, Artificial Sequence
  Description of Artificial Sequence: Synthetic oligonucleotide
  Sense strand starting at position 2905 of SEQ ID NO: 1880961
agcucugaccuacaaaguu

SEQ ID NO: 2007301 - RNA, 19 nt, Artificial Sequence
  Description of Artificial Sequence: Synthetic oligonucleotide
  Antisense strand to SEQ ID NO: 2007300
aacuuuguaggucagagcu

SEQ ID NO: 2007302 - RNA, 19 nt, Artificial Sequence
  Description of Artificial Sequence: Synthetic oligonucleotide
  Sense strand starting at position 2935 of SEQ ID NO: 1880961
agaacuuaugucuggcaac

SEQ ID NO: 2007303 - RNA, 19 nt, Artificial Sequence
  Description of Artificial Sequence: Synthetic oligonucleotide
  Antisense strand to SEQ ID NO: 2007302
guugccagacauaaguucu

SEQ ID NO: 2007304 - RNA, 19 nt, Artificial Sequence
  Description of Artificial Sequence: Synthetic oligonucleotide
  Sense strand starting at position 3311 of SEQ ID NO: 1880961
ggcagacuagcccauuauu

SEQ ID NO: 2007305 - RNA, 19 nt, Artificial Sequence
  Description of Artificial Sequence: Synthetic oligonucleotide
  Antisense strand to SEQ ID NO: 2007304
aauaaugggcuagucugcc

SEQ ID NO: 2007306 - RNA, 19 nt, Artificial Sequence
  Description of Artificial Sequence: Synthetic oligonucleotide
  Sense strand starting at position 3314 of SEQ ID NO: 1880961
agacuagcccauuauuagu

SEQ ID NO: 2007307 - RNA, 19 nt, Artificial Sequence
  Description of Artificial Sequence: Synthetic oligonucleotide
  Antisense strand to SEQ ID NO: 2007306
acuaauaaugggcuagucu

SEQ ID NO: 2007308 - RNA, 19 nt, Artificial Sequence
  Description of Artificial Sequence: Synthetic oligonucleotide
  Sense strand starting at position 3320 of SEQ ID NO: 1880961
gcccauuauuaguuacaca

SEQ ID NO: 2007309 - RNA, 19 nt, Artificial Sequence
  Description of Artificial Sequence: Synthetic oligonucleotide
  Antisense strand to SEQ ID NO: 2007308
uguguaacuaauaaugggc

SEQ ID NO: 2007310 - RNA, 19 nt, Artificial Sequence
  Description of Artificial Sequence: Synthetic oligonucleotide
  Sense strand starting at position 3334 of SEQ ID NO: 1880961
acacauauugaguguuuga

SEQ ID NO: 2007311 - RNA, 19 nt, Artificial Sequence
  Description of Artificial Sequence: Synthetic oligonucleotide
  Antisense strand to SEQ ID NO: 2007310
ucaaacacucaauaugugu

SEQ ID NO: 2007312 - RNA, 19 nt, Artificial Sequence
  Description of Artificial Sequence: Synthetic oligonucleotide
  Sense strand starting at position 3337 of SEQ ID NO: 1880961
cauauugaguguuugaaga

SEQ ID NO: 2007313 - RNA, 19 nt, Artificial Sequence
  Description of Artificial Sequence: Synthetic oligonucleotide
  Antisense strand to SEQ ID NO: 2007312
ucuucaaacacucaauaug

SEQ ID NO: 2007314 - RNA, 19 nt, Artificial Sequence
  Description of Artificial Sequence: Synthetic oligonucleotide
  Sense strand starting at position 3538 of SEQ ID NO: 1880961
gagguauagacucggagua

SEQ ID NO: 2007315 - RNA, 19 nt, Artificial Sequence
  Description of Artificial Sequence: Synthetic oligonucleotide
  Antisense strand to SEQ ID NO: 2007314
uacuccgagucuauaccuc

SEQ ID NO: 2007316 - RNA, 19 nt, Artificial Sequence
  Description of Artificial Sequence: Synthetic oligonucleotide
  Sense strand starting at position 3845 of SEQ ID NO: 1880961
uuagaauaauugcuagaac

SEQ ID NO: 2007317 - RNA, 19 nt, Artificial Sequence
  Description of Artificial Sequence: Synthetic oligonucleotide
  Antisense strand to SEQ ID NO: 2007316
guucuagcaauuauucuaa

SEQ ID NO: 2007318 - RNA, 19 nt, Artificial Sequence
  Description of Artificial Sequence: Synthetic oligonucleotide
  Sense strand starting at position 3921 of SEQ ID NO: 1880961
uuagaauaaucgcuaucau

SEQ ID NO: 2007319 - RNA, 19 nt, Artificial Sequence
  Description of Artificial Sequence: Synthetic oligonucleotide
  Antisense strand to SEQ ID NO: 2007318
augauagcgauuauucuaa

SEQ ID NO: 2007320 - RNA, 19 nt, Artificial Sequence
  Description of Artificial Sequence: Synthetic oligonucleotide
  Sense strand starting at position 30 of SEQ ID NO: 1880962
auucuagaaugaguucuau

SEQ ID NO: 2007321 - RNA, 19 nt, Artificial Sequence
  Description of Artificial Sequence: Synthetic oligonucleotide
  Antisense strand to SEQ ID NO: 2007320
auagaacucauucuagaau

SEQ ID NO: 2007322 - RNA, 19 nt, Artificial Sequence
  Description of Artificial Sequence: Synthetic oligonucleotide
  Sense strand starting at position 99 of SEQ ID NO: 1880962
gcgagcugugagagaaguu

SEQ ID NO: 2007323 - RNA, 19 nt, Artificial Sequence
  Description of Artificial Sequence: Synthetic oligonucleotide
  Antisense strand to SEQ ID NO: 2007322
aacuucucucacagcucgc

SEQ ID NO: 2007324 - RNA, 19 nt, Artificial Sequence
  Description of Artificial Sequence: Synthetic oligonucleotide
  Sense strand starting at position 100 of SEQ ID NO: 1880962
cgagcugugagagaaguuu

SEQ ID NO: 2007325 - RNA, 19 nt, Artificial Sequence
  Description of Artificial Sequence: Synthetic oligonucleotide
  Antisense strand to SEQ ID NO: 2007324
aaacuucucucacagcucg

SEQ ID NO: 2007326 - RNA, 19 nt, Artificial Sequence
  Description of Artificial Sequence: Synthetic oligonucleotide
  Sense strand starting at position 106 of SEQ ID NO: 1880962
gugagagaaguuuaccagu

SEQ ID NO: 2007327 - RNA, 19 nt, Artificial Sequence
  Description of Artificial Sequence: Synthetic oligonucleotide
  Antisense strand to SEQ ID NO: 2007326
acugguaaacuucucucac

SEQ ID NO: 2007328 - RNA, 19 nt, Artificial Sequence
  Description of Artificial Sequence: Synthetic oligonucleotide
  Sense strand starting at position 108 of SEQ ID NO: 1880962
gagagaaguuuaccaguac

SEQ ID NO: 2007329 - RNA, 19 nt, Artificial Sequence
  Description of Artificial Sequence: Synthetic oligonucleotide
  Antisense strand to SEQ ID NO: 2007328
guacugguaaacuucucuc

SEQ ID NO: 2007330 - RNA, 19 nt, Artificial Sequence
  Description of Artificial Sequence: Synthetic oligonucleotide
  Sense strand starting at position 237 of SEQ ID NO: 1880962
augcuuaaagguggaucaa

SEQ ID NO: 2007331 - RNA, 19 nt, Artificial Sequence
  Description of Artificial Sequence: Synthetic oligonucleotide
  Antisense strand to SEQ ID NO: 2007330
uugauccaccuuuaagcau

SEQ ID NO: 2007332 - RNA, 19 nt, Artificial Sequence
  Description of Artificial Sequence: Synthetic oligonucleotide
  Sense strand starting at position 371 of SEQ ID NO: 1880962
cuguuacuccuagacgaac

SEQ ID NO: 2007333 - RNA, 19 nt, Artificial Sequence
  Description of Artificial Sequence: Synthetic oligonucleotide
  Antisense strand to SEQ ID NO: 2007332
guucgucuaggaguaacag

SEQ ID NO: 2007334 - RNA, 19 nt, Artificial Sequence
  Description of Artificial Sequence: Synthetic oligonucleotide
  Sense strand starting at position 754 of SEQ ID NO: 1880962
auuaacuuuguaggucaga

SEQ ID NO: 2007335 - RNA, 19 nt, Artificial Sequence
  Description of Artificial Sequence: Synthetic oligonucleotide
  Antisense strand to SEQ ID NO: 2007334
ucugaccuacaaaguuaau

SEQ ID NO: 2007336 - RNA, 19 nt, Artificial Sequence
  Description of Artificial Sequence: Synthetic oligonucleotide
  Sense strand starting at position 778 of SEQ ID NO: 1880962
ggacaauaacauggcauau

SEQ ID NO: 2007337 - RNA, 19 nt, Artificial Sequence
  Description of Artificial Sequence: Synthetic oligonucleotide
  Antisense strand to SEQ ID NO: 2007336
auaugccauguuauugucc

SEQ ID NO: 2007338 - RNA, 19 nt, Artificial Sequence
  Description of Artificial Sequence: Synthetic oligonucleotide
  Sense strand starting at position 1015 of SEQ ID NO: 1880962
cagauuaccuuugcugaga

SEQ ID NO: 2007339 - RNA, 19 nt, Artificial Sequence
  Description of Artificial Sequence: Synthetic oligonucleotide
  Antisense strand to SEQ ID NO: 2007338
ucucagcaaagguaaucug

SEQ ID NO: 2007340 - RNA, 19 nt, Artificial Sequence
  Description of Artificial Sequence: Synthetic oligonucleotide
  Sense strand starting at position 1026 of SEQ ID NO: 1880962
ugcugagaccugugcauuu

SEQ ID NO: 2007341 - RNA, 19 nt, Artificial Sequence
  Description of Artificial Sequence: Synthetic oligonucleotide
  Antisense strand to SEQ ID NO: 2007340
aaaugcacaggucucagca

SEQ ID NO: 2007342 - RNA, 19 nt, Artificial Sequence
  Description of Artificial Sequence: Synthetic oligonucleotide
  Sense strand starting at position 1110 of SEQ ID NO: 1880962
uuuacagauccugguauuc

SEQ ID NO: 2007343 - RNA, 19 nt, Artificial Sequence
  Description of Artificial Sequence: Synthetic oligonucleotide
  Antisense strand to SEQ ID NO: 2007342
gaauaccaggaucuguaaa

SEQ ID NO: 2007344 - RNA, 19 nt, Artificial Sequence
  Description of Artificial Sequence: Synthetic oligonucleotide
  Sense strand starting at position 1120 of SEQ ID NO: 1880962
cugguauuccuuggaccca

SEQ ID NO: 2007345 - RNA, 19 nt, Artificial Sequence
  Description of Artificial Sequence: Synthetic oligonucleotide
  Antisense strand to SEQ ID NO: 2007344
uggguccaaggaauaccag

SEQ ID NO: 2007346 - RNA, 19 nt, Artificial Sequence
  Description of Artificial Sequence: Synthetic oligonucleotide
  Sense strand starting at position 1278 of SEQ ID NO: 1880962
agguauaaaccauggaucu

SEQ ID NO: 2007347 - RNA, 19 nt, Artificial Sequence
  Description of Artificial Sequence: Synthetic oligonucleotide
  Antisense strand to SEQ ID NO: 2007346
agauccaugguuuauaccu

SEQ ID NO: 2007348 - RNA, 19 nt, Artificial Sequence
  Description of Artificial Sequence: Synthetic oligonucleotide
  Sense strand starting at position 1279 of SEQ ID NO: 1880962
gguauaaaccauggaucug

SEQ ID NO: 2007349 - RNA, 19 nt, Artificial Sequence
  Description of Artificial Sequence: Synthetic oligonucleotide
  Antisense strand to SEQ ID NO: 2007348
cagauccaugguuuauacc

SEQ ID NO: 2007350 - RNA, 19 nt, Artificial Sequence
  Description of Artificial Sequence: Synthetic oligonucleotide
  Sense strand starting at position 1328 of SEQ ID NO: 1880962
augguugauccagagcacu

SEQ ID NO: 2007351 - RNA, 19 nt, Artificial Sequence
  Description of Artificial Sequence: Synthetic oligonucleotide
  Antisense strand to SEQ ID NO: 2007350
agugcucuggaucaaccau

SEQ ID NO: 2007352 - RNA, 19 nt, Artificial Sequence
  Description of Artificial Sequence: Synthetic oligonucleotide
  Sense strand starting at position 1348 of SEQ ID NO: 1880962
aauauucguguaggaccaa

SEQ ID NO: 2007353 - RNA, 19 nt, Artificial Sequence
  Description of Artificial Sequence: Synthetic oligonucleotide
  Antisense strand to SEQ ID NO: 2007352
uugguccuacacgaauauu

SEQ ID NO: 2007354 - RNA, 19 nt, Artificial Sequence
  Description of Artificial Sequence: Synthetic oligonucleotide
  Sense strand starting at position 1360 of SEQ ID NO: 1880962
ggaccaaauucuguuuaau

SEQ ID NO: 2007355 - RNA, 19 nt, Artificial Sequence
  Description of Artificial Sequence: Synthetic oligonucleotide
  Antisense strand to SEQ ID NO: 2007354
auuaaacagaauuuggucc

SEQ ID NO: 2007356 - RNA, 19 nt, Artificial Sequence
  Description of Artificial Sequence: Synthetic oligonucleotide
  Sense strand starting at position 2134 of SEQ ID NO: 1880962
acaaguuuaugggugaaau

SEQ ID NO: 2007357 - RNA, 19 nt, Artificial Sequence
  Description of Artificial Sequence: Synthetic oligonucleotide
  Antisense strand to SEQ ID NO: 2007356
auuucacccauaaacuugu

SEQ ID NO: 2007358 - RNA, 19 nt, Artificial Sequence
  Description of Artificial Sequence: Synthetic oligonucleotide
  Sense strand starting at position 2135 of SEQ ID NO: 1880962
caaguuuaugggugaaaug

SEQ ID NO: 2007359 - RNA, 19 nt, Artificial Sequence
  Description of Artificial Sequence: Synthetic oligonucleotide
  Antisense strand to SEQ ID NO: 2007358
cauuucacccauaaacuug

SEQ ID NO: 2007360 - RNA, 19 nt, Artificial Sequence
  Description of Artificial Sequence: Synthetic oligonucleotide
  Sense strand starting at position 2332 of SEQ ID NO: 1880962
aucggugugaaccauauga

SEQ ID NO: 2007361 - RNA, 19 nt, Artificial Sequence
  Description of Artificial Sequence: Synthetic oligonucleotide
  Antisense strand to SEQ ID NO: 2007360
ucauaugguucacaccgau

SEQ ID NO: 2007362 - RNA, 19 nt, Artificial Sequence
  Description of Artificial Sequence: Synthetic oligonucleotide
  Sense strand starting at position 2334 of SEQ ID NO: 1880962
cggugugaaccauaugaaa

SEQ ID NO: 2007363 - RNA, 19 nt, Artificial Sequence
  Description of Artificial Sequence: Synthetic oligonucleotide
  Antisense strand to SEQ ID NO: 2007362
uuucauaugguucacaccg

SEQ ID NO: 2007364 - RNA, 19 nt, Artificial Sequence
  Description of Artificial Sequence: Synthetic oligonucleotide
  Sense strand starting at position 2454 of SEQ ID NO: 1880962
uuggaaauauuggcaauua

SEQ ID NO: 2007365 - RNA, 19 nt, Artificial Sequence
  Description of Artificial Sequence: Synthetic oligonucleotide
  Antisense strand to SEQ ID NO: 2007364
uaauugccaauauuuccaa

SEQ ID NO: 2007366 - RNA, 19 nt, Artificial Sequence
  Description of Artificial Sequence: Synthetic oligonucleotide
  Sense strand starting at position 2547 of SEQ ID NO: 1880962
agcuguaaagaaugaucuu

SEQ ID NO: 2007367 - RNA, 19 nt, Artificial Sequence
  Description of Artificial Sequence: Synthetic oligonucleotide
  Antisense strand to SEQ ID NO: 2007366
aagaucauucuuuacagcu

SEQ ID NO: 2007368 - RNA, 19 nt, Artificial Sequence
  Description of Artificial Sequence: Synthetic oligonucleotide
  Sense strand starting at position 2597 of SEQ ID NO: 1880962
ggucaugggcuccguauuu

SEQ ID NO: 2007369 - RNA, 19 nt, Artificial Sequence
  Description of Artificial Sequence: Synthetic oligonucleotide
  Antisense strand to SEQ ID NO: 2007368
aaauacggagcccaugacc

SEQ ID NO: 2007370 - RNA, 19 nt, Artificial Sequence
  Description of Artificial Sequence: Synthetic oligonucleotide
  Sense strand starting at position 2764 of SEQ ID NO: 1880962
cugugcuaacugggaaaga

SEQ ID NO: 2007371 - RNA, 19 nt, Artificial Sequence
  Description of Artificial Sequence: Synthetic oligonucleotide
  Antisense strand to SEQ ID NO: 2007370
ucuuucccaguuagcacag

SEQ ID NO: 2007372 - RNA, 19 nt, Artificial Sequence
  Description of Artificial Sequence: Synthetic oligonucleotide
  Sense strand starting at position 2816 of SEQ ID NO: 1880962
cugauugaccugcaaauca

SEQ ID NO: 2007373 - RNA, 19 nt, Artificial Sequence
  Description of Artificial Sequence: Synthetic oligonucleotide
  Antisense strand to SEQ ID NO: 2007372
ugauuugcaggucaaucag

SEQ ID NO: 2007374 - RNA, 19 nt, Artificial Sequence
  Description of Artificial Sequence: Synthetic oligonucleotide
  Sense strand starting at position 2874 of SEQ ID NO: 1880962
gugaaauggaaguguaauc

SEQ ID NO: 2007375 - RNA, 19 nt, Artificial Sequence
  Description of Artificial Sequence: Synthetic oligonucleotide
  Antisense strand to SEQ ID NO: 2007374
gauuacacuuccauuucac

SEQ ID NO: 2007376 - RNA, 19 nt, Artificial Sequence
  Description of Artificial Sequence: Synthetic oligonucleotide
  Sense strand starting at position 2881 of SEQ ID NO: 1880962
ggaaguguaauccacagua

SEQ ID NO: 2007377 - RNA, 19 nt, Artificial Sequence
  Description of Artificial Sequence: Synthetic oligonucleotide
  Antisense strand to SEQ ID NO: 2007376
uacuguggauuacacuucc

SEQ ID NO: 2007378 - RNA, 19 nt, Artificial Sequence
  Description of Artificial Sequence: Synthetic oligonucleotide
  Sense strand starting at position 2950 of SEQ ID NO: 1880962
auaggcaacucauuaaaug

SEQ ID NO: 2007379 - RNA, 19 nt, Artificial Sequence
  Description of Artificial Sequence: Synthetic oligonucleotide
  Antisense strand to SEQ ID NO: 2007378
cauuuaaugaguugccuau

SEQ ID NO: 2007380 - RNA, 19 nt, Artificial Sequence
  Description of Artificial Sequence: Synthetic oligonucleotide
  Sense strand starting at position 3164 of SEQ ID NO: 1880962
uuucuaguauagguagaag

SEQ ID NO: 2007381 - RNA, 19 nt, Artificial Sequence
  Description of Artificial Sequence: Synthetic oligonucleotide
  Antisense strand to SEQ ID NO: 2007380
cuucuaccuauacuagaaa

SEQ ID NO: 2007382 - RNA, 19 nt, Artificial Sequence
  Description of Artificial Sequence: Synthetic oligonucleotide
  Sense strand starting at position 3210 of SEQ ID NO: 1880962
auaugcagugccuaauuaa

SEQ ID NO: 2007383 - RNA, 19 nt, Artificial Sequence
  Description of Artificial Sequence: Synthetic oligonucleotide
  Antisense strand to SEQ ID NO: 2007382
uuaauuaggcacugcauau

SEQ ID NO: 2007384 - RNA, 19 nt, Artificial Sequence
  Description of Artificial Sequence: Synthetic oligonucleotide
  Sense strand starting at position 3310 of SEQ ID NO: 1880962
auagguuacuaagugauau

SEQ ID NO: 2007385 - RNA, 19 nt, Artificial Sequence
  Description of Artificial Sequence: Synthetic oligonucleotide
  Antisense strand to SEQ ID NO: 2007384
auaucacuuaguaaccuau

SEQ ID NO: 2007386 - RNA, 19 nt, Artificial Sequence
  Description of Artificial Sequence: Synthetic oligonucleotide
  Sense strand starting at position 3354 of SEQ ID NO: 1880962
uuccaagaauugguuguua

SEQ ID NO: 2007387 - RNA, 19 nt, Artificial Sequence
  Description of Artificial Sequence: Synthetic oligonucleotide
  Antisense strand to SEQ ID NO: 2007386
uaacaaccaauucuuggaa

SEQ ID NO: 2007388 - RNA, 19 nt, Artificial Sequence
  Description of Artificial Sequence: Synthetic oligonucleotide
  Sense strand starting at position 3441 of SEQ ID NO: 1880962
gcuguuagaguugcuuagu

SEQ ID NO: 2007389 - RNA, 19 nt, Artificial Sequence
  Description of Artificial Sequence: Synthetic oligonucleotide
  Antisense strand to SEQ ID NO: 2007388
acuaagcaacucuaacagc

SEQ ID NO: 2007390 - RNA, 19 nt, Artificial Sequence
  Description of Artificial Sequence: Synthetic oligonucleotide
  Sense strand starting at position 3587 of SEQ ID NO: 1880962
gaguaaagcuucucacaga

SEQ ID NO: 2007391 - RNA, 19 nt, Artificial Sequence
  Description of Artificial Sequence: Synthetic oligonucleotide
  Antisense strand to SEQ ID NO: 2007390
ucugugagaagcuuuacuc

SEQ ID NO: 2007392 - RNA, 19 nt, Artificial Sequence
  Description of Artificial Sequence: Synthetic oligonucleotide
  Sense strand starting at position 3623 of SEQ ID NO: 1880962
ggagaagguacuggugaau

SEQ ID NO: 2007393 - RNA, 19 nt, Artificial Sequence
  Description of Artificial Sequence: Synthetic oligonucleotide
  Antisense strand to SEQ ID NO: 2007392
auucaccaguaccuucucc

SEQ ID NO: 2007394 - RNA, 19 nt, Artificial Sequence
  Description of Artificial Sequence: Synthetic oligonucleotide
  Sense strand starting at position 3686 of SEQ ID NO: 1880962
uuacucaugccauaggaca

SEQ ID NO: 2007395 - RNA, 19 nt, Artificial Sequence
  Description of Artificial Sequence: Synthetic oligonucleotide
  Antisense strand to SEQ ID NO: 2007394
uguccuauggcaugaguaa

SEQ ID NO: 2007396 - RNA, 19 nt, Artificial Sequence
  Description of Artificial Sequence: Synthetic oligonucleotide
  Sense strand starting at position 3846 of SEQ ID NO: 1880962
ccugucuaaggaugaaguu

SEQ ID NO: 2007397 - RNA, 19 nt, Artificial Sequence
  Description of Artificial Sequence: Synthetic oligonucleotide
  Antisense strand to SEQ ID NO: 2007396
aacuucauccuuagacagg

SEQ ID NO: 2007398 - RNA, 19 nt, Artificial Sequence
  Description of Artificial Sequence: Synthetic oligonucleotide
  Sense strand starting at position 3855 of SEQ ID NO: 1880962
ggaugaaguuguucuaauu

SEQ ID NO: 2007399 - RNA, 19 nt, Artificial Sequence
  Description of Artificial Sequence: Synthetic oligonucleotide
  Antisense strand to SEQ ID NO: 2007398
aauuagaacaacuucaucc

SEQ ID NO: 2007400 - RNA, 19 nt, Artificial Sequence
  Description of Artificial Sequence: Synthetic oligonucleotide
  Sense strand starting at position 104 of SEQ ID NO: 1880963
gcuauauuggacuaaagua

SEQ ID NO: 2007401 - RNA, 19 nt, Artificial Sequence
  Description of Artificial Sequence: Synthetic oligonucleotide
  Antisense strand to SEQ ID NO: 2007400
uacuuuaguccaauauagc

SEQ ID NO: 2007402 - RNA, 19 nt, Artificial Sequence
  Description of Artificial Sequence: Synthetic oligonucleotide
  Sense strand starting at position 332 of SEQ ID NO: 1880963
ccgagaaccauguaaguau

SEQ ID NO: 2007403 - RNA, 19 nt, Artificial Sequence
  Description of Artificial Sequence: Synthetic oligonucleotide
  Antisense strand to SEQ ID NO: 2007402
auacuuacaugguucucgg

SEQ ID NO: 2007404 - RNA, 19 nt, Artificial Sequence
  Description of Artificial Sequence: Synthetic oligonucleotide
  Sense strand starting at position 335 of SEQ ID NO: 1880963
agaaccauguaaguauuau

SEQ ID NO: 2007405 - RNA, 19 nt, Artificial Sequence
  Description of Artificial Sequence: Synthetic oligonucleotide
  Antisense strand to SEQ ID NO: 2007404
auaauacuuacaugguucu

SEQ ID NO: 2007406 - RNA, 19 nt, Artificial Sequence
  Description of Artificial Sequence: Synthetic oligonucleotide
  Sense strand starting at position 354 of SEQ ID NO: 1880963
aacugagggccaugaguua

SEQ ID NO: 2007407 - RNA, 19 nt, Artificial Sequence
  Description of Artificial Sequence: Synthetic oligonucleotide
  Antisense strand to SEQ ID NO: 2007406
uaacucauggcccucaguu

SEQ ID NO: 2007408 - RNA, 19 nt, Artificial Sequence
  Description of Artificial Sequence: Synthetic oligonucleotide
  Sense strand starting at position 488 of SEQ ID NO: 1880963
guguuaucauuucuguuug

SEQ ID NO: 2007409 - RNA, 19 nt, Artificial Sequence
  Description of Artificial Sequence: Synthetic oligonucleotide
  Antisense strand to SEQ ID NO: 2007408
caaacagaaaugauaacac

SEQ ID NO: 2007410 - RNA, 19 nt, Artificial Sequence
  Description of Artificial Sequence: Synthetic oligonucleotide
  Sense strand starting at position 524 of SEQ ID NO: 1880963
guaacuaacucuccugaga

SEQ ID NO: 2007411 - RNA, 19 nt, Artificial Sequence
  Description of Artificial Sequence: Synthetic oligonucleotide
  Antisense strand to SEQ ID NO: 2007410
ucucaggagaguuaguuac

SEQ ID NO: 2007412 - RNA, 19 nt, Artificial Sequence
  Description of Artificial Sequence: Synthetic oligonucleotide
  Sense strand starting at position 548 of SEQ ID NO: 1880963
cagucaggacgugaucaaa

SEQ ID NO: 2007413 - RNA, 19 nt, Artificial Sequence
  Description of Artificial Sequence: Synthetic oligonucleotide
  Antisense strand to SEQ ID NO: 2007412
uuugaucacguccugacug

SEQ ID NO: 2007414 - RNA, 19 nt, Artificial Sequence
  Description of Artificial Sequence: Synthetic oligonucleotide
  Sense strand starting at position 558 of SEQ ID NO: 1880963
gugaucaaaucagaauuug

SEQ ID NO: 2007415 - RNA, 19 nt, Artificial Sequence
  Description of Artificial Sequence: Synthetic oligonucleotide
  Antisense strand to SEQ ID NO: 2007414
caaauucugauuugaucac

SEQ ID NO: 2007416 - RNA, 19 nt, Artificial Sequence
  Description of Artificial Sequence: Synthetic oligonucleotide
  Sense strand starting at position 904 of SEQ ID NO: 1880963
cuacucauaggaugucuua

SEQ ID NO: 2007417 - RNA, 19 nt, Artificial Sequence
  Description of Artificial Sequence: Synthetic oligonucleotide
  Antisense strand to SEQ ID NO: 2007416
uaagacauccuaugaguag

SEQ ID NO: 2007418 - RNA, 19 nt, Artificial Sequence
  Description of Artificial Sequence: Synthetic oligonucleotide
  Sense strand starting at position 940 of SEQ ID NO: 1880963
uuauuuacgugaguguuua

SEQ ID NO: 2007419 - RNA, 19 nt, Artificial Sequence
  Description of Artificial Sequence: Synthetic oligonucleotide
  Antisense strand to SEQ ID NO: 2007418
uaaacacucacguaaauaa

SEQ ID NO: 2007420 - RNA, 19 nt, Artificial Sequence
  Description of Artificial Sequence: Synthetic oligonucleotide
  Sense strand starting at position 941 of SEQ ID NO: 1880963
uauuuacgugaguguuuaa

SEQ ID NO: 2007421 - RNA, 19 nt, Artificial Sequence
  Description of Artificial Sequence: Synthetic oligonucleotide
  Antisense strand to SEQ ID NO: 2007420
uuaaacacucacguaaaua

SEQ ID NO: 2007422 - RNA, 19 nt, Artificial Sequence
  Description of Artificial Sequence: Synthetic oligonucleotide
  Sense strand starting at position 944 of SEQ ID NO: 1880963
uuacgugaguguuuaauuu

SEQ ID NO: 2007423 - RNA, 19 nt, Artificial Sequence
  Description of Artificial Sequence: Synthetic oligonucleotide
  Antisense strand to SEQ ID NO: 2007422
aaauuaaacacucacguaa

SEQ ID NO: 2007424 - RNA, 19 nt, Artificial Sequence
  Description of Artificial Sequence: Synthetic oligonucleotide
  Sense strand starting at position 964 of SEQ ID NO: 1880963
cugucugucaccuaaggga

SEQ ID NO: 2007425 - RNA, 19 nt, Artificial Sequence
  Description of Artificial Sequence: Synthetic oligonucleotide
  Antisense strand to SEQ ID NO: 2007424
ucccuuaggugacagacag

SEQ ID NO: 2007426 - RNA, 19 nt, Artificial Sequence
  Description of Artificial Sequence: Synthetic oligonucleotide
  Sense strand starting at position 979 of SEQ ID NO: 1880963
gggaaagagcuaugucuau

SEQ ID NO: 2007427 - RNA, 19 nt, Artificial Sequence
  Description of Artificial Sequence: Synthetic oligonucleotide
  Antisense strand to SEQ ID NO: 2007426
auagacauagcucuuuccc

SEQ ID NO: 2007428 - RNA, 19 nt, Artificial Sequence
  Description of Artificial Sequence: Synthetic oligonucleotide
  Sense strand starting at position 1070 of SEQ ID NO: 1880963
cgauucuuccugcaagaua

SEQ ID NO: 2007429 - RNA, 19 nt, Artificial Sequence
  Description of Artificial Sequence: Synthetic oligonucleotide
  Antisense strand to SEQ ID NO: 2007428
uaucuugcaggaagaaucg

SEQ ID NO: 2007430 - RNA, 19 nt, Artificial Sequence
  Description of Artificial Sequence: Synthetic oligonucleotide
  Sense strand starting at position 1073 of SEQ ID NO: 1880963
uucuuccugcaagauagau

SEQ ID NO: 2007431 - RNA, 19 nt, Artificial Sequence
  Description of Artificial Sequence: Synthetic oligonucleotide
  Antisense strand to SEQ ID NO: 2007430
aucuaucuugcaggaagaa

SEQ ID NO: 2007432 - RNA, 19 nt, Artificial Sequence
  Description of Artificial Sequence: Synthetic oligonucleotide
  Sense strand starting at position 1168 of SEQ ID NO: 1880963
aguggauagagcugaaauu

SEQ ID NO: 2007433 - RNA, 19 nt, Artificial Sequence
  Description of Artificial Sequence: Synthetic oligonucleotide
  Antisense strand to SEQ ID NO: 2007432
aauuucagcucuauccacu

SEQ ID NO: 2007434 - RNA, 19 nt, Artificial Sequence
  Description of Artificial Sequence: Synthetic oligonucleotide
  Sense strand starting at position 1282 of SEQ ID NO: 1880963
ugaggagaccugugcaaca

SEQ ID NO: 2007435 - RNA, 19 nt, Artificial Sequence
  Description of Artificial Sequence: Synthetic oligonucleotide
  Antisense strand to SEQ ID NO: 2007434
uguugcacaggucuccuca

SEQ ID NO: 2007436 - RNA, 19 nt, Artificial Sequence
  Description of Artificial Sequence: Synthetic oligonucleotide
  Sense strand starting at position 1669 of SEQ ID NO: 1880963
uuauacuuaccuugagaag

SEQ ID NO: 2007437 - RNA, 19 nt, Artificial Sequence
  Description of Artificial Sequence: Synthetic oligonucleotide
  Antisense strand to SEQ ID NO: 2007436
cuucucaagguaaguauaa

SEQ ID NO: 2007438 - RNA, 19 nt, Artificial Sequence
  Description of Artificial Sequence: Synthetic oligonucleotide
  Sense strand starting at position 1809 of SEQ ID NO: 1880963
guuuauuguguucagagag

SEQ ID NO: 2007439 - RNA, 19 nt, Artificial Sequence
  Description of Artificial Sequence: Synthetic oligonucleotide
  Antisense strand to SEQ ID NO: 2007438
cucucugaacacaauaaac

SEQ ID NO: 2007440 - RNA, 19 nt, Artificial Sequence
  Description of Artificial Sequence: Synthetic oligonucleotide
  Sense strand starting at position 2042 of SEQ ID NO: 1880963
guggcauguccugcaagca

SEQ ID NO: 2007441 - RNA, 19 nt, Artificial Sequence
  Description of Artificial Sequence: Synthetic oligonucleotide
  Antisense strand to SEQ ID NO: 2007440
ugcuugcaggacaugccac

SEQ ID NO: 2007442 - RNA, 19 nt, Artificial Sequence
  Description of Artificial Sequence: Synthetic oligonucleotide
  Sense strand starting at position 2256 of SEQ ID NO: 1880963
cuggcauuugcuggaaagu

SEQ ID NO: 2007443 - RNA, 19 nt, Artificial Sequence
  Description of Artificial Sequence: Synthetic oligonucleotide
  Antisense strand to SEQ ID NO: 2007442
acuuuccagcaaaugccag

SEQ ID NO: 2007444 - RNA, 19 nt, Artificial Sequence
  Description of Artificial Sequence: Synthetic oligonucleotide
  Sense strand starting at position 2335 of SEQ ID NO: 1880963
ccuggaacauaugugugaa

SEQ ID NO: 2007445 - RNA, 19 nt, Artificial Sequence
  Description of Artificial Sequence: Synthetic oligonucleotide
  Antisense strand to SEQ ID NO: 2007444
uucacacauauguuccagg

SEQ ID NO: 2007446 - RNA, 19 nt, Artificial Sequence
  Description of Artificial Sequence: Synthetic oligonucleotide
  Sense strand starting at position 2336 of SEQ ID NO: 1880963
cuggaacauaugugugaau

SEQ ID NO: 2007447 - RNA, 19 nt, Artificial Sequence
  Description of Artificial Sequence: Synthetic oligonucleotide
  Antisense strand to SEQ ID NO: 2007446
auucacacauauguuccag

SEQ ID NO: 2007448 - RNA, 19 nt, Artificial Sequence
  Description of Artificial Sequence: Synthetic oligonucleotide
  Sense strand starting at position 2338 of SEQ ID NO: 1880963
ggaacauaugugugaauga

SEQ ID NO: 2007449 - RNA, 19 nt, Artificial Sequence
  Description of Artificial Sequence: Synthetic oligonucleotide
  Antisense strand to SEQ ID NO: 2007448
ucauucacacauauguucc

SEQ ID NO: 2007450 - RNA, 19 nt, Artificial Sequence
  Description of Artificial Sequence: Synthetic oligonucleotide
  Sense strand starting at position 2347 of SEQ ID NO: 1880963
gugugaaugaauugaguga

SEQ ID NO: 2007451 - RNA, 19 nt, Artificial Sequence
  Description of Artificial Sequence: Synthetic oligonucleotide
  Antisense strand to SEQ ID NO: 2007450
ucacucaauucauucacac

SEQ ID NO: 2007452 - RNA, 19 nt, Artificial Sequence
  Description of Artificial Sequence: Synthetic oligonucleotide
  Sense strand starting at position 2400 of SEQ ID NO: 1880963
cccugagauagccauaggu

SEQ ID NO: 2007453 - RNA, 19 nt, Artificial Sequence
  Description of Artificial Sequence: Synthetic oligonucleotide
  Antisense strand to SEQ ID NO: 2007452
accuauggcuaucucaggg

SEQ ID NO: 2007454 - RNA, 19 nt, Artificial Sequence
  Description of Artificial Sequence: Synthetic oligonucleotide
  Sense strand starting at position 2402 of SEQ ID NO: 1880963
cugagauagccauagguac

SEQ ID NO: 2007455 - RNA, 19 nt, Artificial Sequence
  Description of Artificial Sequence: Synthetic oligonucleotide
  Antisense strand to SEQ ID NO: 2007454
guaccuauggcuaucucag

SEQ ID NO: 2007456 - RNA, 19 nt, Artificial Sequence
  Description of Artificial Sequence: Synthetic oligonucleotide
  Sense strand starting at position 2578 of SEQ ID NO: 1880963
uggaguuucugauuccaug

SEQ ID NO: 2007457 - RNA, 19 nt, Artificial Sequence
  Description of Artificial Sequence: Synthetic oligonucleotide
  Antisense strand to SEQ ID NO: 2007456
cauggaaucagaaacucca

SEQ ID NO: 2007458 - RNA, 19 nt, Artificial Sequence
  Description of Artificial Sequence: Synthetic oligonucleotide
  Sense strand starting at position 2692 of SEQ ID NO: 1880963
aggcauccugcugaaagaa

SEQ ID NO: 2007459 - RNA, 19 nt, Artificial Sequence
  Description of Artificial Sequence: Synthetic oligonucleotide
  Antisense strand to SEQ ID NO: 2007458
uucuuucagcaggaugccu

SEQ ID NO: 2007460 - RNA, 19 nt, Artificial Sequence
  Description of Artificial Sequence: Synthetic oligonucleotide
  Sense strand starting at position 2823 of SEQ ID NO: 1880963
aagggucugaggugaacau

SEQ ID NO: 2007461 - RNA, 19 nt, Artificial Sequence
  Description of Artificial Sequence: Synthetic oligonucleotide
  Antisense strand to SEQ ID NO: 2007460
auguucaccucagacccuu

SEQ ID NO: 2007462 - RNA, 19 nt, Artificial Sequence
  Description of Artificial Sequence: Synthetic oligonucleotide
  Sense strand starting at position 3229 of SEQ ID NO: 1880963
cuuccaugugcucagaaca

SEQ ID NO: 2007463 - RNA, 19 nt, Artificial Sequence
  Description of Artificial Sequence: Synthetic oligonucleotide
  Antisense strand to SEQ ID NO: 2007462
uguucugagcacauggaag

SEQ ID NO: 2007464 - RNA, 19 nt, Artificial Sequence
  Description of Artificial Sequence: Synthetic oligonucleotide
  Sense strand starting at position 3432 of SEQ ID NO: 1880963
auuauaagucagggaucau

SEQ ID NO: 2007465 - RNA, 19 nt, Artificial Sequence
  Description of Artificial Sequence: Synthetic oligonucleotide
  Antisense strand to SEQ ID NO: 2007464
augaucccugacuuauaau

SEQ ID NO: 2007466 - RNA, 19 nt, Artificial Sequence
  Description of Artificial Sequence: Synthetic oligonucleotide
  Sense strand starting at position 3441 of SEQ ID NO: 1880963
cagggaucaucuguacaug

SEQ ID NO: 2007467 - RNA, 19 nt, Artificial Sequence
  Description of Artificial Sequence: Synthetic oligonucleotide
  Antisense strand to SEQ ID NO: 2007466
cauguacagaugaucccug

SEQ ID NO: 2007468 - RNA, 19 nt, Artificial Sequence
  Description of Artificial Sequence: Synthetic oligonucleotide
  Sense strand starting at position 3668 of SEQ ID NO: 1880963
gauuaaauccugggugcaa

SEQ ID NO: 2007469 - RNA, 19 nt, Artificial Sequence
  Description of Artificial Sequence: Synthetic oligonucleotide
  Antisense strand to SEQ ID NO: 2007468
uugcacccaggauuuaauc

SEQ ID NO: 2007470 - RNA, 19 nt, Artificial Sequence
  Description of Artificial Sequence: Synthetic oligonucleotide
  Sense strand starting at position 3669 of SEQ ID NO: 1880963
auuaaauccugggugcaaa

SEQ ID NO: 2007471 - RNA, 19 nt, Artificial Sequence
  Description of Artificial Sequence: Synthetic oligonucleotide
  Antisense strand to SEQ ID NO: 2007470
uuugcacccaggauuuaau

SEQ ID NO: 2007472 - RNA, 19 nt, Artificial Sequence
  Description of Artificial Sequence: Synthetic oligonucleotide
  Sense strand starting at position 3693 of SEQ ID NO: 1880963
ucuugauuuccaugcucga

SEQ ID NO: 2007473 - RNA, 19 nt, Artificial Sequence
  Description of Artificial Sequence: Synthetic oligonucleotide
  Antisense strand to SEQ ID NO: 2007472
ucgagcauggaaaucaaga

SEQ ID NO: 2007474 - RNA, 19 nt, Artificial Sequence
  Description of Artificial Sequence: Synthetic oligonucleotide
  Sense strand starting at position 3887 of SEQ ID NO: 1880963
gugcuuucugagcugucau

SEQ ID NO: 2007475 - RNA, 19 nt, Artificial Sequence
  Description of Artificial Sequence: Synthetic oligonucleotide
  Antisense strand to SEQ ID NO: 2007474
augacagcucagaaagcac

SEQ ID NO: 2007476 - RNA, 19 nt, Artificial Sequence
  Description of Artificial Sequence: Synthetic oligonucleotide
  Sense strand starting at position 3960 of SEQ ID NO: 1880963
ggcaaccuccugggaagau

SEQ ID NO: 2007477 - RNA, 19 nt, Artificial Sequence
  Description of Artificial Sequence: Synthetic oligonucleotide
  Antisense strand to SEQ ID NO: 2007476
aucuucccaggagguugcc

SEQ ID NO: 2007478 - RNA, 19 nt, Artificial Sequence
  Description of Artificial Sequence: Synthetic oligonucleotide
  Sense strand starting at position 3981 of SEQ ID NO: 1880963
ugaauagauuugcaaauga

SEQ ID NO: 2007479 - RNA, 19 nt, Artificial Sequence
  Description of Artificial Sequence: Synthetic oligonucleotide
  Antisense strand to SEQ ID NO: 2007478
ucauuugcaaaucuauuca

SEQ ID NO: 2007480 - RNA, 19 nt, Artificial Sequence
  Description of Artificial Sequence: Synthetic oligonucleotide
  Sense strand starting at position 184 of SEQ ID NO: 1880964
gccugucuccuccaacaga

SEQ ID NO: 2007481 - RNA, 19 nt, Artificial Sequence
  Description of Artificial Sequence: Synthetic oligonucleotide
  Antisense strand to SEQ ID NO: 2007480
ucuguuggaggagacaggc

SEQ ID NO: 2007482 - RNA, 19 nt, Artificial Sequence
  Description of Artificial Sequence: Synthetic oligonucleotide
  Sense strand starting at position 252 of SEQ ID NO: 1880964
acacucaaucuuugcgaau

SEQ ID NO: 2007483 - RNA, 19 nt, Artificial Sequence
  Description of Artificial Sequence: Synthetic oligonucleotide
  Antisense strand to SEQ ID NO: 2007482
auucgcaaagauugagugu

SEQ ID NO: 2007484 - RNA, 19 nt, Artificial Sequence
  Description of Artificial Sequence: Synthetic oligonucleotide
  Sense strand starting at position 284 of SEQ ID NO: 1880964
aguagaaggcuuuaugacu

SEQ ID NO: 2007485 - RNA, 19 nt, Artificial Sequence
  Description of Artificial Sequence: Synthetic oligonucleotide
  Antisense strand to SEQ ID NO: 2007484
agucauaaagccuucuacu

SEQ ID NO: 2007486 - RNA, 19 nt, Artificial Sequence
  Description of Artificial Sequence: Synthetic oligonucleotide
  Sense strand starting at position 289 of SEQ ID NO: 1880964
aaggcuuuaugacugagga

SEQ ID NO: 2007487 - RNA, 19 nt, Artificial Sequence
  Description of Artificial Sequence: Synthetic oligonucleotide
  Antisense strand to SEQ ID NO: 2007486
uccucagucauaaagccuu

SEQ ID NO: 2007488 - RNA, 19 nt, Artificial Sequence
  Description of Artificial Sequence: Synthetic oligonucleotide
  Sense strand starting at position 290 of SEQ ID NO: 1880964
aggcuuuaugacugaggau

SEQ ID NO: 2007489 - RNA, 19 nt, Artificial Sequence
  Description of Artificial Sequence: Synthetic oligonucleotide
  Antisense strand to SEQ ID NO: 2007488
auccucagucauaaagccu

SEQ ID NO: 2007490 - RNA, 19 nt, Artificial Sequence
  Description of Artificial Sequence: Synthetic oligonucleotide
  Sense strand starting at position 291 of SEQ ID NO: 1880964
ggcuuuaugacugaggauu

SEQ ID NO: 2007491 - RNA, 19 nt, Artificial Sequence
  Description of Artificial Sequence: Synthetic oligonucleotide
  Antisense strand to SEQ ID NO: 2007490
aauccucagucauaaagcc

SEQ ID NO: 2007492 - RNA, 19 nt, Artificial Sequence
  Description of Artificial Sequence: Synthetic oligonucleotide
  Sense strand starting at position 293 of SEQ ID NO: 1880964
cuuuaugacugaggauuug

SEQ ID NO: 2007493 - RNA, 19 nt, Artificial Sequence
  Description of Artificial Sequence: Synthetic oligonucleotide
  Antisense strand to SEQ ID NO: 2007492
caaauccucagucauaaag

SEQ ID NO: 2007494 - RNA, 19 nt, Artificial Sequence
  Description of Artificial Sequence: Synthetic oligonucleotide
  Sense strand starting at position 369 of SEQ ID NO: 1880964
gcaaguaggaaugguaaau

SEQ ID NO: 2007495 - RNA, 19 nt, Artificial Sequence
  Description of Artificial Sequence: Synthetic oligonucleotide
  Antisense strand to SEQ ID NO: 2007494
auuuaccauuccuacuugc

SEQ ID NO: 2007496 - RNA, 19 nt, Artificial Sequence
  Description of Artificial Sequence: Synthetic oligonucleotide
  Sense strand starting at position 563 of SEQ ID NO: 1880964
agaggccuucccugaacaa

SEQ ID NO: 2007497 - RNA, 19 nt, Artificial Sequence
  Description of Artificial Sequence: Synthetic oligonucleotide
  Antisense strand to SEQ ID NO: 2007496
uuguucagggaaggccucu

SEQ ID NO: 2007498 - RNA, 19 nt, Artificial Sequence
  Description of Artificial Sequence: Synthetic oligonucleotide
  Sense strand starting at position 705 of SEQ ID NO: 1880964
uggcuuaauuuccaaguga

SEQ ID NO: 2007499 - RNA, 19 nt, Artificial Sequence
  Description of Artificial Sequence: Synthetic oligonucleotide
  Antisense strand to SEQ ID NO: 2007498
ucacuuggaaauuaagcca

SEQ ID NO: 2007500 - RNA, 19 nt, Artificial Sequence
  Description of Artificial Sequence: Synthetic oligonucleotide
  Sense strand starting at position 735 of SEQ ID NO: 1880964
caguuauugugaccagaac

SEQ ID NO: 2007501 - RNA, 19 nt, Artificial Sequence
  Description of Artificial Sequence: Synthetic oligonucleotide
  Antisense strand to SEQ ID NO: 2007500
guucuggucacaauaacug

SEQ ID NO: 2007502 - RNA, 19 nt, Artificial Sequence
  Description of Artificial Sequence: Synthetic oligonucleotide
  Sense strand starting at position 997 of SEQ ID NO: 1880964
uuaaguaauuucgaggaac

SEQ ID NO: 2007503 - RNA, 19 nt, Artificial Sequence
  Description of Artificial Sequence: Synthetic oligonucleotide
  Antisense strand to SEQ ID NO: 2007502
guuccucgaaauuacuuaa

SEQ ID NO: 2007504 - RNA, 19 nt, Artificial Sequence
  Description of Artificial Sequence: Synthetic oligonucleotide
  Sense strand starting at position 1096 of SEQ ID NO: 1880964
agugguuuacuuugagagg

SEQ ID NO: 2007505 - RNA, 19 nt, Artificial Sequence
  Description of Artificial Sequence: Synthetic oligonucleotide
  Antisense strand to SEQ ID NO: 2007504
ccucucaaaguaaaccacu

SEQ ID NO: 2007506 - RNA, 19 nt, Artificial Sequence
  Description of Artificial Sequence: Synthetic oligonucleotide
  Sense strand starting at position 1291 of SEQ ID NO: 1880964
ucagccacgcgauauuaua

SEQ ID NO: 2007507 - RNA, 19 nt, Artificial Sequence
  Description of Artificial Sequence: Synthetic oligonucleotide
  Antisense strand to SEQ ID NO: 2007506
uauaauaucgcguggcuga

SEQ ID NO: 2007508 - RNA, 19 nt, Artificial Sequence
  Description of Artificial Sequence: Synthetic oligonucleotide
  Sense strand starting at position 1298 of SEQ ID NO: 1880964
cgcgauauuauaggcagau

SEQ ID NO: 2007509 - RNA, 19 nt, Artificial Sequence
  Description of Artificial Sequence: Synthetic oligonucleotide
  Antisense strand to SEQ ID NO: 2007508
aucugccuauaauaucgcg

SEQ ID NO: 2007510 - RNA, 19 nt, Artificial Sequence
  Description of Artificial Sequence: Synthetic oligonucleotide
  Sense strand starting at position 1299 of SEQ ID NO: 1880964
gcgauauuauaggcagaug

SEQ ID NO: 2007511 - RNA, 19 nt, Artificial Sequence
  Description of Artificial Sequence: Synthetic oligonucleotide
  Antisense strand to SEQ ID NO: 2007510
caucugccuauaauaucgc

SEQ ID NO: 2007512 - RNA, 19 nt, Artificial Sequence
  Description of Artificial Sequence: Synthetic oligonucleotide
  Sense strand starting at position 1300 of SEQ ID NO: 1880964
cgauauuauaggcagaugu

SEQ ID NO: 2007513 - RNA, 19 nt, Artificial Sequence
  Description of Artificial Sequence: Synthetic oligonucleotide
  Antisense strand to SEQ ID NO: 2007512
acaucugccuauaauaucg

SEQ ID NO: 2007514 - RNA, 19 nt, Artificial Sequence
  Description of Artificial Sequence: Synthetic oligonucleotide
  Sense strand starting at position 1302 of SEQ ID NO: 1880964
auauuauaggcagaugugu

SEQ ID NO: 2007515 - RNA, 19 nt, Artificial Sequence
  Description of Artificial Sequence: Synthetic oligonucleotide
  Antisense strand to SEQ ID NO: 2007514
acacaucugccuauaauau

SEQ ID NO: 2007516 - RNA, 19 nt, Artificial Sequence
  Description of Artificial Sequence: Synthetic oligonucleotide
  Sense strand starting at position 1327 of SEQ ID NO: 1880964
gggugacuuucucuugucu

SEQ ID NO: 2007517 - RNA, 19 nt, Artificial Sequence
  Description of Artificial Sequence: Synthetic oligonucleotide
  Antisense strand to SEQ ID NO: 2007516
agacaagagaaagucaccc

SEQ ID NO: 2007518 - RNA, 19 nt, Artificial Sequence
  Description of Artificial Sequence: Synthetic oligonucleotide
  Sense strand starting at position 2117 of SEQ ID NO: 1880964
cgcgucuguccuuugcuua

SEQ ID NO: 2007519 - RNA, 19 nt, Artificial Sequence
  Description of Artificial Sequence: Synthetic oligonucleotide
  Antisense strand to SEQ ID NO: 2007518
uaagcaaaggacagacgcg

SEQ ID NO: 2007520 - RNA, 19 nt, Artificial Sequence
  Description of Artificial Sequence: Synthetic oligonucleotide
  Sense strand starting at position 2166 of SEQ ID NO: 1880964
uuugucccucaauguuaca

SEQ ID NO: 2007521 - RNA, 19 nt, Artificial Sequence
  Description of Artificial Sequence: Synthetic oligonucleotide
  Antisense strand to SEQ ID NO: 2007520
uguaacauugagggacaaa

SEQ ID NO: 2007522 - RNA, 19 nt, Artificial Sequence
  Description of Artificial Sequence: Synthetic oligonucleotide
  Sense strand starting at position 2288 of SEQ ID NO: 1880964
uguugaggauucccguuua

SEQ ID NO: 2007523 - RNA, 19 nt, Artificial Sequence
  Description of Artificial Sequence: Synthetic oligonucleotide
  Antisense strand to SEQ ID NO: 2007522
uaaacgggaauccucaaca

SEQ ID NO: 2007524 - RNA, 19 nt, Artificial Sequence
  Description of Artificial Sequence: Synthetic oligonucleotide
  Sense strand starting at position 2426 of SEQ ID NO: 1880964
cuauguuacguugaucaca

SEQ ID NO: 2007525 - RNA, 19 nt, Artificial Sequence
  Description of Artificial Sequence: Synthetic oligonucleotide
  Antisense strand to SEQ ID NO: 2007524
ugugaucaacguaacauag

SEQ ID NO: 2007526 - RNA, 19 nt, Artificial Sequence
  Description of Artificial Sequence: Synthetic oligonucleotide
  Sense strand starting at position 2466 of SEQ ID NO: 1880964
gcgcacuauuacucacuaa

SEQ ID NO: 2007527 - RNA, 19 nt, Artificial Sequence
  Description of Artificial Sequence: Synthetic oligonucleotide
  Antisense strand to SEQ ID NO: 2007526
uuagugaguaauagugcgc

SEQ ID NO: 2007528 - RNA, 19 nt, Artificial Sequence
  Description of Artificial Sequence: Synthetic oligonucleotide
  Sense strand starting at position 2661 of SEQ ID NO: 1880964
aguuacuccucagauauuu

SEQ ID NO: 2007529 - RNA, 19 nt, Artificial Sequence
  Description of Artificial Sequence: Synthetic oligonucleotide
  Antisense strand to SEQ ID NO: 2007528
aaauaucugaggaguaacu

SEQ ID NO: 2007530 - RNA, 19 nt, Artificial Sequence
  Description of Artificial Sequence: Synthetic oligonucleotide
  Sense strand starting at position 2670 of SEQ ID NO: 1880964
ucagauauuugguggaaug

SEQ ID NO: 2007531 - RNA, 19 nt, Artificial Sequence
  Description of Artificial Sequence: Synthetic oligonucleotide
  Antisense strand to SEQ ID NO: 2007530
cauuccaccaaauaucuga

SEQ ID NO: 2007532 - RNA, 19 nt, Artificial Sequence
  Description of Artificial Sequence: Synthetic oligonucleotide
  Sense strand starting at position 2680 of SEQ ID NO: 1880964
gguggaaugugccucaauu

SEQ ID NO: 2007533 - RNA, 19 nt, Artificial Sequence
  Description of Artificial Sequence: Synthetic oligonucleotide
  Antisense strand to SEQ ID NO: 2007532
aauugaggcacauuccacc

SEQ ID NO: 2007534 - RNA, 19 nt, Artificial Sequence
  Description of Artificial Sequence: Synthetic oligonucleotide
  Sense strand starting at position 2772 of SEQ ID NO: 1880964
ggcuguucucaucacauag

SEQ ID NO: 2007535 - RNA, 19 nt, Artificial Sequence
  Description of Artificial Sequence: Synthetic oligonucleotide
  Antisense strand to SEQ ID NO: 2007534
cuaugugaugagaacagcc

SEQ ID NO: 2007536 - RNA, 19 nt, Artificial Sequence
  Description of Artificial Sequence: Synthetic oligonucleotide
  Sense strand starting at position 2824 of SEQ ID NO: 1880964
ugaucauguuaaccuugau

SEQ ID NO: 2007537 - RNA, 19 nt, Artificial Sequence
  Description of Artificial Sequence: Synthetic oligonucleotide
  Antisense strand to SEQ ID NO: 2007536
aucaagguuaacaugauca

SEQ ID NO: 2007538 - RNA, 19 nt, Artificial Sequence
  Description of Artificial Sequence: Synthetic oligonucleotide
  Sense strand starting at position 2838 of SEQ ID NO: 1880964
uugauuaccucucuaaggu

SEQ ID NO: 2007539 - RNA, 19 nt, Artificial Sequence
  Description of Artificial Sequence: Synthetic oligonucleotide
  Antisense strand to SEQ ID NO: 2007538
accuuagagagguaaucaa

SEQ ID NO: 2007540 - RNA, 19 nt, Artificial Sequence
  Description of Artificial Sequence: Synthetic oligonucleotide
  Sense strand starting at position 2839 of SEQ ID NO: 1880964
ugauuaccucucuaaggua

SEQ ID NO: 2007541 - RNA, 19 nt, Artificial Sequence
  Description of Artificial Sequence: Synthetic oligonucleotide
  Antisense strand to SEQ ID NO: 2007540
uaccuuagagagguaauca

SEQ ID NO: 2007542 - RNA, 19 nt, Artificial Sequence
  Description of Artificial Sequence: Synthetic oligonucleotide
  Sense strand starting at position 3045 of SEQ ID NO: 1880964
agcuauuuauaucaguaug

SEQ ID NO: 2007543 - RNA, 19 nt, Artificial Sequence
  Description of Artificial Sequence: Synthetic oligonucleotide
  Antisense strand to SEQ ID NO: 2007542
cauacugauauaaauagcu

SEQ ID NO: 2007544 - RNA, 19 nt, Artificial Sequence
  Description of Artificial Sequence: Synthetic oligonucleotide
  Sense strand starting at position 3133 of SEQ ID NO: 1880964
agcuuuguuaauugggaga

SEQ ID NO: 2007545 - RNA, 19 nt, Artificial Sequence
  Description of Artificial Sequence: Synthetic oligonucleotide
  Antisense strand to SEQ ID NO: 2007544
ucucccaauuaacaaagcu

SEQ ID NO: 2007546 - RNA, 19 nt, Artificial Sequence
  Description of Artificial Sequence: Synthetic oligonucleotide
  Sense strand starting at position 3136 of SEQ ID NO: 1880964
uuuguuaauugggagauuu

SEQ ID NO: 2007547 - RNA, 19 nt, Artificial Sequence
  Description of Artificial Sequence: Synthetic oligonucleotide
  Antisense strand to SEQ ID NO: 2007546
aaaucucccaauuaacaaa

SEQ ID NO: 2007548 - RNA, 19 nt, Artificial Sequence
  Description of Artificial Sequence: Synthetic oligonucleotide
  Sense strand starting at position 3584 of SEQ ID NO: 1880964
gaaucauaaguacagugua

SEQ ID NO: 2007549 - RNA, 19 nt, Artificial Sequence
  Description of Artificial Sequence: Synthetic oligonucleotide
  Antisense strand to SEQ ID NO: 2007548
uacacuguacuuaugauuc

SEQ ID NO: 2007550 - RNA, 19 nt, Artificial Sequence
  Description of Artificial Sequence: Synthetic oligonucleotide
  Sense strand starting at position 3653 of SEQ ID NO: 1880964
ggcagagcuuuacccauau

SEQ ID NO: 2007551 - RNA, 19 nt, Artificial Sequence
  Description of Artificial Sequence: Synthetic oligonucleotide
  Antisense strand to SEQ ID NO: 2007550
auauggguaaagcucugcc

SEQ ID NO: 2007552 - RNA, 19 nt, Artificial Sequence
  Description of Artificial Sequence: Synthetic oligonucleotide
  Sense strand starting at position 3838 of SEQ ID NO: 1880964
gacauuguugaaugaaguu

SEQ ID NO: 2007553 - RNA, 19 nt, Artificial Sequence
  Description of Artificial Sequence: Synthetic oligonucleotide
  Antisense strand to SEQ ID NO: 2007552
aacuucauucaacaauguc

SEQ ID NO: 2007554 - RNA, 19 nt, Artificial Sequence
  Description of Artificial Sequence: Synthetic oligonucleotide
  Sense strand starting at position 3853 of SEQ ID NO: 1880964
aguuguauuuguuucucau

SEQ ID NO: 2007555 - RNA, 19 nt, Artificial Sequence
  Description of Artificial Sequence: Synthetic oligonucleotide
  Antisense strand to SEQ ID NO: 2007554
augagaaacaaauacaacu

SEQ ID NO: 2007556 - RNA, 19 nt, Artificial Sequence
  Description of Artificial Sequence: Synthetic oligonucleotide
  Sense strand starting at position 3966 of SEQ ID NO: 1880964
gggccaauaugauuacucu

SEQ ID NO: 2007557 - RNA, 19 nt, Artificial Sequence
  Description of Artificial Sequence: Synthetic oligonucleotide
  Antisense strand to SEQ ID NO: 2007556
agaguaaucauauuggccc

SEQ ID NO: 2007558 - RNA, 19 nt, Artificial Sequence
  Description of Artificial Sequence: Synthetic oligonucleotide
  Sense strand starting at position 3967 of SEQ ID NO: 1880964
ggccaauaugauuacucua

SEQ ID NO: 2007559 - RNA, 19 nt, Artificial Sequence
  Description of Artificial Sequence: Synthetic oligonucleotide
  Antisense strand to SEQ ID NO: 2007558
uagaguaaucauauuggcc

SEQ ID NO: 2007560 - RNA, 19 nt, Artificial Sequence
  Description of Artificial Sequence: Synthetic oligonucleotide
  Sense strand starting at position 75 of SEQ ID NO: 1880965
agaagucuuugaccaauug

SEQ ID NO: 2007561 - RNA, 19 nt, Artificial Sequence
  Description of Artificial Sequence: Synthetic oligonucleotide
  Antisense strand to SEQ ID NO: 2007560
caauuggucaaagacuucu

SEQ ID NO: 2007562 - RNA, 19 nt, Artificial Sequence
  Description of Artificial Sequence: Synthetic oligonucleotide
  Sense strand starting at position 118 of SEQ ID NO: 1880965
ccuggauuaguugagucua

SEQ ID NO: 2007563 - RNA, 19 nt, Artificial Sequence
  Description of Artificial Sequence: Synthetic oligonucleotide
  Antisense strand to SEQ ID NO: 2007562
uagacucaacuaauccagg

SEQ ID NO: 2007564 - RNA, 19 nt, Artificial Sequence
  Description of Artificial Sequence: Synthetic oligonucleotide
  Sense strand starting at position 120 of SEQ ID NO: 1880965
uggauuaguugagucuaac

SEQ ID NO: 2007565 - RNA, 19 nt, Artificial Sequence
  Description of Artificial Sequence: Synthetic oligonucleotide
  Antisense strand to SEQ ID NO: 2007564
guuagacucaacuaaucca

SEQ ID NO: 2007566 - RNA, 19 nt, Artificial Sequence
  Description of Artificial Sequence: Synthetic oligonucleotide
  Sense strand starting at position 123 of SEQ ID NO: 1880965
auuaguugagucuaacuga

SEQ ID NO: 2007567 - RNA, 19 nt, Artificial Sequence
  Description of Artificial Sequence: Synthetic oligonucleotide
  Antisense strand to SEQ ID NO: 2007566
ucaguuagacucaacuaau

SEQ ID NO: 2007568 - RNA, 19 nt, Artificial Sequence
  Description of Artificial Sequence: Synthetic oligonucleotide
  Sense strand starting at position 126 of SEQ ID NO: 1880965
aguugagucuaacugaauu

SEQ ID NO: 2007569 - RNA, 19 nt, Artificial Sequence
  Description of Artificial Sequence: Synthetic oligonucleotide
  Antisense strand to SEQ ID NO: 2007568
aauucaguuagacucaacu

SEQ ID NO: 2007570 - RNA, 19 nt, Artificial Sequence
  Description of Artificial Sequence: Synthetic oligonucleotide
  Sense strand starting at position 257 of SEQ ID NO: 1880965
uggguaacuugagcaaaca

SEQ ID NO: 2007571 - RNA, 19 nt, Artificial Sequence
  Description of Artificial Sequence: Synthetic oligonucleotide
  Antisense strand to SEQ ID NO: 2007570
uguuugcucaaguuaccca

SEQ ID NO: 2007572 - RNA, 19 nt, Artificial Sequence
  Description of Artificial Sequence: Synthetic oligonucleotide
  Sense strand starting at position 478 of SEQ ID NO: 1880965
cugggaaagugaucaguuc

SEQ ID NO: 2007573 - RNA, 19 nt, Artificial Sequence
  Description of Artificial Sequence: Synthetic oligonucleotide
  Antisense strand to SEQ ID NO: 2007572
gaacugaucacuuucccag

SEQ ID NO: 2007574 - RNA, 19 nt, Artificial Sequence
  Description of Artificial Sequence: Synthetic oligonucleotide
  Sense strand starting at position 584 of SEQ ID NO: 1880965
gaagaaaugcuggguuggu

SEQ ID NO: 2007575 - RNA, 19 nt, Artificial Sequence
  Description of Artificial Sequence: Synthetic oligonucleotide
  Antisense strand to SEQ ID NO: 2007574
accaacccagcauuucuuc

SEQ ID NO: 2007576 - RNA, 19 nt, Artificial Sequence
  Description of Artificial Sequence: Synthetic oligonucleotide
  Sense strand starting at position 585 of SEQ ID NO: 1880965
aagaaaugcuggguuggua

SEQ ID NO: 2007577 - RNA, 19 nt, Artificial Sequence
  Description of Artificial Sequence: Synthetic oligonucleotide
  Antisense strand to SEQ ID NO: 2007576
uaccaacccagcauuucuu

SEQ ID NO: 2007578 - RNA, 19 nt, Artificial Sequence
  Description of Artificial Sequence: Synthetic oligonucleotide
  Sense strand starting at position 663 of SEQ ID NO: 1880965
aguaauacacucgagugga

SEQ ID NO: 2007579 - RNA, 19 nt, Artificial Sequence
  Description of Artificial Sequence: Synthetic oligonucleotide
  Antisense strand to SEQ ID NO: 2007578
uccacucgaguguauuacu

SEQ ID NO: 2007580 - RNA, 19 nt, Artificial Sequence
  Description of Artificial Sequence: Synthetic oligonucleotide
  Sense strand starting at position 671 of SEQ ID NO: 1880965
acucgaguggaaugacuau

SEQ ID NO: 2007581 - RNA, 19 nt, Artificial Sequence
  Description of Artificial Sequence: Synthetic oligonucleotide
  Antisense strand to SEQ ID NO: 2007580
auagucauuccacucgagu

SEQ ID NO: 2007582 - RNA, 19 nt, Artificial Sequence
  Description of Artificial Sequence: Synthetic oligonucleotide
  Sense strand starting at position 677 of SEQ ID NO: 1880965
guggaaugacuauauugcu

SEQ ID NO: 2007583 - RNA, 19 nt, Artificial Sequence
  Description of Artificial Sequence: Synthetic oligonucleotide
  Antisense strand to SEQ ID NO: 2007582
agcaauauagucauuccac

SEQ ID NO: 2007584 - RNA, 19 nt, Artificial Sequence
  Description of Artificial Sequence: Synthetic oligonucleotide
  Sense strand starting at position 733 of SEQ ID NO: 1880965
auuugcuuugcuuguuuaa

SEQ ID NO: 2007585 - RNA, 19 nt, Artificial Sequence
  Description of Artificial Sequence: Synthetic oligonucleotide
  Antisense strand to SEQ ID NO: 2007584
uuaaacaagcaaagcaaau

SEQ ID NO: 2007586 - RNA, 19 nt, Artificial Sequence
  Description of Artificial Sequence: Synthetic oligonucleotide
  Sense strand starting at position 805 of SEQ ID NO: 1880965
auuuaacuguaugaaagga

SEQ ID NO: 2007587 - RNA, 19 nt, Artificial Sequence
  Description of Artificial Sequence: Synthetic oligonucleotide
  Antisense strand to SEQ ID NO: 2007586
uccuuucauacaguuaaau

SEQ ID NO: 2007588 - RNA, 19 nt, Artificial Sequence
  Description of Artificial Sequence: Synthetic oligonucleotide
  Sense strand starting at position 981 of SEQ ID NO: 1880965
guagaaggugcauagacuu

SEQ ID NO: 2007589 - RNA, 19 nt, Artificial Sequence
  Description of Artificial Sequence: Synthetic oligonucleotide
  Antisense strand to SEQ ID NO: 2007588
aagucuaugcaccuucuac

SEQ ID NO: 2007590 - RNA, 19 nt, Artificial Sequence
  Description of Artificial Sequence: Synthetic oligonucleotide
  Sense strand starting at position 1007 of SEQ ID NO: 1880965
aagaaagaaugauuguguu

SEQ ID NO: 2007591 - RNA, 19 nt, Artificial Sequence
  Description of Artificial Sequence: Synthetic oligonucleotide
  Antisense strand to SEQ ID NO: 2007590
aacacaaucauucuuucuu

SEQ ID NO: 2007592 - RNA, 19 nt, Artificial Sequence
  Description of Artificial Sequence: Synthetic oligonucleotide
  Sense strand starting at position 1011 of SEQ ID NO: 1880965
aagaaugauuguguuauuc

SEQ ID NO: 2007593 - RNA, 19 nt, Artificial Sequence
  Description of Artificial Sequence: Synthetic oligonucleotide
  Antisense strand to SEQ ID NO: 2007592
gaauaacacaaucauucuu

SEQ ID NO: 2007594 - RNA, 19 nt, Artificial Sequence
  Description of Artificial Sequence: Synthetic oligonucleotide
  Sense strand starting at position 1049 of SEQ ID NO: 1880965
uguuuauauccaggaggca

SEQ ID NO: 2007595 - RNA, 19 nt, Artificial Sequence
  Description of Artificial Sequence: Synthetic oligonucleotide
  Antisense strand to SEQ ID NO: 2007594
ugccuccuggauauaaaca

SEQ ID NO: 2007596 - RNA, 19 nt, Artificial Sequence
  Description of Artificial Sequence: Synthetic oligonucleotide
  Sense strand starting at position 1050 of SEQ ID NO: 1880965
guuuauauccaggaggcaa

SEQ ID NO: 2007597 - RNA, 19 nt, Artificial Sequence
  Description of Artificial Sequence: Synthetic oligonucleotide
  Antisense strand to SEQ ID NO: 2007596
uugccuccuggauauaaac

SEQ ID NO: 2007598 - RNA, 19 nt, Artificial Sequence
  Description of Artificial Sequence: Synthetic oligonucleotide
  Sense strand starting at position 1119 of SEQ ID NO: 1880965
cuacaaauaugcgcaaaga

SEQ ID NO: 2007599 - RNA, 19 nt, Artificial Sequence
  Description of Artificial Sequence: Synthetic oligonucleotide
  Antisense strand to SEQ ID NO: 2007598
ucuuugcgcauauuuguag

SEQ ID NO: 2007600 - RNA, 19 nt, Artificial Sequence
  Description of Artificial Sequence: Synthetic oligonucleotide
  Sense strand starting at position 1287 of SEQ ID NO: 1880965
ucaagaagugacuguuauu

SEQ ID NO: 2007601 - RNA, 19 nt, Artificial Sequence
  Description of Artificial Sequence: Synthetic oligonucleotide
  Antisense strand to SEQ ID NO: 2007600
aauaacagucacuucuuga

SEQ ID NO: 2007602 - RNA, 19 nt, Artificial Sequence
  Description of Artificial Sequence: Synthetic oligonucleotide
  Sense strand starting at position 1358 of SEQ ID NO: 1880965
accauagugcuuugaaagg

SEQ ID NO: 2007603 - RNA, 19 nt, Artificial Sequence
  Description of Artificial Sequence: Synthetic oligonucleotide
  Antisense strand to SEQ ID NO: 2007602
ccuuucaaagcacuauggu

SEQ ID NO: 2007604 - RNA, 19 nt, Artificial Sequence
  Description of Artificial Sequence: Synthetic oligonucleotide
  Sense strand starting at position 1569 of SEQ ID NO: 1880965
cucuccaaacagugaugau

SEQ ID NO: 2007605 - RNA, 19 nt, Artificial Sequence
  Description of Artificial Sequence: Synthetic oligonucleotide
  Antisense strand to SEQ ID NO: 2007604
aucaucacuguuuggagag

SEQ ID NO: 2007606 - RNA, 19 nt, Artificial Sequence
  Description of Artificial Sequence: Synthetic oligonucleotide
  Sense strand starting at position 1650 of SEQ ID NO: 1880965
ggaugcuucuuaucaccaa

SEQ ID NO: 2007607 - RNA, 19 nt, Artificial Sequence
  Description of Artificial Sequence: Synthetic oligonucleotide
  Antisense strand to SEQ ID NO: 2007606
uuggugauaagaagcaucc

SEQ ID NO: 2007608 - RNA, 19 nt, Artificial Sequence
  Description of Artificial Sequence: Synthetic oligonucleotide
  Sense strand starting at position 1944 of SEQ ID NO: 1880965
uggugucuuccgccuuaua

SEQ ID NO: 2007609 - RNA, 19 nt, Artificial Sequence
  Description of Artificial Sequence: Synthetic oligonucleotide
  Antisense strand to SEQ ID NO: 2007608
uauaaggcggaagacacca

SEQ ID NO: 2007610 - RNA, 19 nt, Artificial Sequence
  Description of Artificial Sequence: Synthetic oligonucleotide
  Sense strand starting at position 1946 of SEQ ID NO: 1880965
gugucuuccgccuuauagu

SEQ ID NO: 2007611 - RNA, 19 nt, Artificial Sequence
  Description of Artificial Sequence: Synthetic oligonucleotide
  Antisense strand to SEQ ID NO: 2007610
acuauaaggcggaagacac

SEQ ID NO: 2007612 - RNA, 19 nt, Artificial Sequence
  Description of Artificial Sequence: Synthetic oligonucleotide
  Sense strand starting at position 2298 of SEQ ID NO: 1880965
gguagauuagcagagcucu

SEQ ID NO: 2007613 - RNA, 19 nt, Artificial Sequence
  Description of Artificial Sequence: Synthetic oligonucleotide
  Antisense strand to SEQ ID NO: 2007612
agagcucugcuaaucuacc

SEQ ID NO: 2007614 - RNA, 19 nt, Artificial Sequence
  Description of Artificial Sequence: Synthetic oligonucleotide
  Sense strand starting at position 2357 of SEQ ID NO: 1880965
aggucaaccauaugaucga

SEQ ID NO: 2007615 - RNA, 19 nt, Artificial Sequence
  Description of Artificial Sequence: Synthetic oligonucleotide
  Antisense strand to SEQ ID NO: 2007614
ucgaucauaugguugaccu

SEQ ID NO: 2007616 - RNA, 19 nt, Artificial Sequence
  Description of Artificial Sequence: Synthetic oligonucleotide
  Sense strand starting at position 2366 of SEQ ID NO: 1880965
auaugaucgaucugaaagu

SEQ ID NO: 2007617 - RNA, 19 nt, Artificial Sequence
  Description of Artificial Sequence: Synthetic oligonucleotide
  Antisense strand to SEQ ID NO: 2007616
acuuucagaucgaucauau

SEQ ID NO: 2007618 - RNA, 19 nt, Artificial Sequence
  Description of Artificial Sequence: Synthetic oligonucleotide
  Sense strand starting at position 2511 of SEQ ID NO: 1880965
auauauguccuaggacuuu

SEQ ID NO: 2007619 - RNA, 19 nt, Artificial Sequence
  Description of Artificial Sequence: Synthetic oligonucleotide
  Antisense strand to SEQ ID NO: 2007618
aaaguccuaggacauauau

SEQ ID NO: 2007620 - RNA, 19 nt, Artificial Sequence
  Description of Artificial Sequence: Synthetic oligonucleotide
  Sense strand starting at position 3076 of SEQ ID NO: 1880965
ggaacuagacucugaaguu

SEQ ID NO: 2007621 - RNA, 19 nt, Artificial Sequence
  Description of Artificial Sequence: Synthetic oligonucleotide
  Antisense strand to SEQ ID NO: 2007620
aacuucagagucuaguucc

SEQ ID NO: 2007622 - RNA, 19 nt, Artificial Sequence
  Description of Artificial Sequence: Synthetic oligonucleotide
  Sense strand starting at position 3323 of SEQ ID NO: 1880965
agaagaaugauguggcauu

SEQ ID NO: 2007623 - RNA, 19 nt, Artificial Sequence
  Description of Artificial Sequence: Synthetic oligonucleotide
  Antisense strand to SEQ ID NO: 2007622
aaugccacaucauucuucu

SEQ ID NO: 2007624 - RNA, 19 nt, Artificial Sequence
  Description of Artificial Sequence: Synthetic oligonucleotide
  Sense strand starting at position 3420 of SEQ ID NO: 1880965
guaaacagugauuaugcuu

SEQ ID NO: 2007625 - RNA, 19 nt, Artificial Sequence
  Description of Artificial Sequence: Synthetic oligonucleotide
  Antisense strand to SEQ ID NO: 2007624
aagcauaaucacuguuuac

SEQ ID NO: 2007626 - RNA, 19 nt, Artificial Sequence
  Description of Artificial Sequence: Synthetic oligonucleotide
  Sense strand starting at position 3474 of SEQ ID NO: 1880965
cgauuuaguuaccauuuau

SEQ ID NO: 2007627 - RNA, 19 nt, Artificial Sequence
  Description of Artificial Sequence: Synthetic oligonucleotide
  Antisense strand to SEQ ID NO: 2007626
auaaaugguaacuaaaucg

SEQ ID NO: 2007628 - RNA, 19 nt, Artificial Sequence
  Description of Artificial Sequence: Synthetic oligonucleotide
  Sense strand starting at position 3548 of SEQ ID NO: 1880965
ucacacaguugaucagaga

SEQ ID NO: 2007629 - RNA, 19 nt, Artificial Sequence
  Description of Artificial Sequence: Synthetic oligonucleotide
  Antisense strand to SEQ ID NO: 2007628
ucucugaucaacuguguga

SEQ ID NO: 2007630 - RNA, 19 nt, Artificial Sequence
  Description of Artificial Sequence: Synthetic oligonucleotide
  Sense strand starting at position 3618 of SEQ ID NO: 1880965
auuagaugucucuaucugu

SEQ ID NO: 2007631 - RNA, 19 nt, Artificial Sequence
  Description of Artificial Sequence: Synthetic oligonucleotide
  Antisense strand to SEQ ID NO: 2007630
acagauagagacaucuaau

SEQ ID NO: 2007632 - RNA, 19 nt, Artificial Sequence
  Description of Artificial Sequence: Synthetic oligonucleotide
  Sense strand starting at position 3621 of SEQ ID NO: 1880965
agaugucucuaucuguaaa

SEQ ID NO: 2007633 - RNA, 19 nt, Artificial Sequence
  Description of Artificial Sequence: Synthetic oligonucleotide
  Antisense strand to SEQ ID NO: 2007632
uuuacagauagagacaucu

SEQ ID NO: 2007634 - RNA, 19 nt, Artificial Sequence
  Description of Artificial Sequence: Synthetic oligonucleotide
  Sense strand starting at position 3623 of SEQ ID NO: 1880965
augucucuaucuguaaaua

SEQ ID NO: 2007635 - RNA, 19 nt, Artificial Sequence
  Description of Artificial Sequence: Synthetic oligonucleotide
  Antisense strand to SEQ ID NO: 2007634
uauuuacagauagagacau

SEQ ID NO: 2007636 - RNA, 19 nt, Artificial Sequence
  Description of Artificial Sequence: Synthetic oligonucleotide
  Sense strand starting at position 3624 of SEQ ID NO: 1880965
ugucucuaucuguaaauag

SEQ ID NO: 2007637 - RNA, 19 nt, Artificial Sequence
  Description of Artificial Sequence: Synthetic oligonucleotide
  Antisense strand to SEQ ID NO: 2007636
cuauuuacagauagagaca

SEQ ID NO: 2007638 - RNA, 19 nt, Artificial Sequence
  Description of Artificial Sequence: Synthetic oligonucleotide
  Sense strand starting at position 3687 of SEQ ID NO: 1880965
uagauacgguucccauaua

SEQ ID NO: 2007639 - RNA, 19 nt, Artificial Sequence
  Description of Artificial Sequence: Synthetic oligonucleotide
  Antisense strand to SEQ ID NO: 2007638
uauaugggaaccguaucua

SEQ ID NO: 2007640 - RNA, 19 nt, Artificial Sequence
  Description of Artificial Sequence: Synthetic oligonucleotide
  Sense strand starting at position 578 of SEQ ID NO: 1880966
aggcauauaaugugagauc

SEQ ID NO: 2007641 - RNA, 19 nt, Artificial Sequence
  Description of Artificial Sequence: Synthetic oligonucleotide
  Antisense strand to SEQ ID NO: 2007640
gaucucacauuauaugccu

SEQ ID NO: 2007642 - RNA, 19 nt, Artificial Sequence
  Description of Artificial Sequence: Synthetic oligonucleotide
  Sense strand starting at position 699 of SEQ ID NO: 1880966
ucuacucuccucugaagga

SEQ ID NO: 2007643 - RNA, 19 nt, Artificial Sequence
  Description of Artificial Sequence: Synthetic oligonucleotide
  Antisense strand to SEQ ID NO: 2007642
uccuucagaggagaguaga

SEQ ID NO: 2007644 - RNA, 19 nt, Artificial Sequence
  Description of Artificial Sequence: Synthetic oligonucleotide
  Sense strand starting at position 1009 of SEQ ID NO: 1880966
gucuuauucuauuugugca

SEQ ID NO: 2007645 - RNA, 19 nt, Artificial Sequence
  Description of Artificial Sequence: Synthetic oligonucleotide
  Antisense strand to SEQ ID NO: 2007644
ugcacaaauagaauaagac

SEQ ID NO: 2007646 - RNA, 19 nt, Artificial Sequence
  Description of Artificial Sequence: Synthetic oligonucleotide
  Sense strand starting at position 1053 of SEQ ID NO: 1880966
uauucugguggcuaaugaa

SEQ ID NO: 2007647 - RNA, 19 nt, Artificial Sequence
  Description of Artificial Sequence: Synthetic oligonucleotide
  Antisense strand to SEQ ID NO: 2007646
uucauuagccaccagaaua

SEQ ID NO: 2007648 - RNA, 19 nt, Artificial Sequence
  Description of Artificial Sequence: Synthetic oligonucleotide
  Sense strand starting at position 1313 of SEQ ID NO: 1880966
gagccuagaucaucaaugu

SEQ ID NO: 2007649 - RNA, 19 nt, Artificial Sequence
  Description of Artificial Sequence: Synthetic oligonucleotide
  Antisense strand to SEQ ID NO: 2007648
acauugaugaucuaggcuc

SEQ ID NO: 2007650 - RNA, 19 nt, Artificial Sequence
  Description of Artificial Sequence: Synthetic oligonucleotide
  Sense strand starting at position 1396 of SEQ ID NO: 1880966
gcauguugugugcuaggca

SEQ ID NO: 2007651 - RNA, 19 nt, Artificial Sequence
  Description of Artificial Sequence: Synthetic oligonucleotide
  Antisense strand to SEQ ID NO: 2007650
ugccuagcacacaacaugc

SEQ ID NO: 2007652 - RNA, 19 nt, Artificial Sequence
  Description of Artificial Sequence: Synthetic oligonucleotide
  Sense strand starting at position 1417 of SEQ ID NO: 1880966
gcacccuguucuuuauuua

SEQ ID NO: 2007653 - RNA, 19 nt, Artificial Sequence
  Description of Artificial Sequence: Synthetic oligonucleotide
  Antisense strand to SEQ ID NO: 2007652
uaaauaaagaacagggugc

SEQ ID NO: 2007654 - RNA, 19 nt, Artificial Sequence
  Description of Artificial Sequence: Synthetic oligonucleotide
  Sense strand starting at position 1488 of SEQ ID NO: 1880966
agaguuaaaugauugccca

SEQ ID NO: 2007655 - RNA, 19 nt, Artificial Sequence
  Description of Artificial Sequence: Synthetic oligonucleotide
  Antisense strand to SEQ ID NO: 2007654
ugggcaaucauuuaacucu

SEQ ID NO: 2007656 - RNA, 19 nt, Artificial Sequence
  Description of Artificial Sequence: Synthetic oligonucleotide
  Sense strand starting at position 1491 of SEQ ID NO: 1880966
guuaaaugauugcccagga

SEQ ID NO: 2007657 - RNA, 19 nt, Artificial Sequence
  Description of Artificial Sequence: Synthetic oligonucleotide
  Antisense strand to SEQ ID NO: 2007656
uccugggcaaucauuuaac

SEQ ID NO: 2007658 - RNA, 19 nt, Artificial Sequence
  Description of Artificial Sequence: Synthetic oligonucleotide
  Sense strand starting at position 1492 of SEQ ID NO: 1880966
uuaaaugauugcccaggau

SEQ ID NO: 2007659 - RNA, 19 nt, Artificial Sequence
  Description of Artificial Sequence: Synthetic oligonucleotide
  Antisense strand to SEQ ID NO: 2007658
auccugggcaaucauuuaa

SEQ ID NO: 2007660 - RNA, 19 nt, Artificial Sequence
  Description of Artificial Sequence: Synthetic oligonucleotide
  Sense strand starting at position 1506 of SEQ ID NO: 1880966
aggauuauguuguuacaag

SEQ ID NO: 2007661 - RNA, 19 nt, Artificial Sequence
  Description of Artificial Sequence: Synthetic oligonucleotide
  Antisense strand to SEQ ID NO: 2007660
cuuguaacaacauaauccu

SEQ ID NO: 2007662 - RNA, 19 nt, Artificial Sequence
  Description of Artificial Sequence: Synthetic oligonucleotide
  Sense strand starting at position 1523 of SEQ ID NO: 1880966
agugcagaaucaguaauca

SEQ ID NO: 2007663 - RNA, 19 nt, Artificial Sequence
  Description of Artificial Sequence: Synthetic oligonucleotide
  Antisense strand to SEQ ID NO: 2007662
ugauuacugauucugcacu

SEQ ID NO: 2007664 - RNA, 19 nt, Artificial Sequence
  Description of Artificial Sequence: Synthetic oligonucleotide
  Sense strand starting at position 1587 of SEQ ID NO: 1880966
ugagccauuaaagguaaga

SEQ ID NO: 2007665 - RNA, 19 nt, Artificial Sequence
  Description of Artificial Sequence: Synthetic oligonucleotide
  Antisense strand to SEQ ID NO: 2007664
ucuuaccuuuaauggcuca

SEQ ID NO: 2007666 - RNA, 19 nt, Artificial Sequence
  Description of Artificial Sequence: Synthetic oligonucleotide
  Sense strand starting at position 1600 of SEQ ID NO: 1880966
guaagaugcuaauuaaagg

SEQ ID NO: 2007667 - RNA, 19 nt, Artificial Sequence
  Description of Artificial Sequence: Synthetic oligonucleotide
  Antisense strand to SEQ ID NO: 2007666
ccuuuaauuagcaucuuac

SEQ ID NO: 2007668 - RNA, 19 nt, Artificial Sequence
  Description of Artificial Sequence: Synthetic oligonucleotide
  Sense strand starting at position 1643 of SEQ ID NO: 1880966
aacacaaguuuggugaaau

SEQ ID NO: 2007669 - RNA, 19 nt, Artificial Sequence
  Description of Artificial Sequence: Synthetic oligonucleotide
  Antisense strand to SEQ ID NO: 2007668
auuucaccaaacuuguguu

SEQ ID NO: 2007670 - RNA, 19 nt, Artificial Sequence
  Description of Artificial Sequence: Synthetic oligonucleotide
  Sense strand starting at position 1768 of SEQ ID NO: 1880966
cuggguuuacagcaauauu

SEQ ID NO: 2007671 - RNA, 19 nt, Artificial Sequence
  Description of Artificial Sequence: Synthetic oligonucleotide
  Antisense strand to SEQ ID NO: 2007670
aauauugcuguaaacccag

SEQ ID NO: 2007672 - RNA, 19 nt, Artificial Sequence
  Description of Artificial Sequence: Synthetic oligonucleotide
  Sense strand starting at position 2020 of SEQ ID NO: 1880966
cuggauucugaagguucua

SEQ ID NO: 2007673 - RNA, 19 nt, Artificial Sequence
  Description of Artificial Sequence: Synthetic oligonucleotide
  Antisense strand to SEQ ID NO: 2007672
uagaaccuucagaauccag

SEQ ID NO: 2007674 - RNA, 19 nt, Artificial Sequence
  Description of Artificial Sequence: Synthetic oligonucleotide
  Sense strand starting at position 2039 of SEQ ID NO: 1880966
gcuuccagccuugaaauua

SEQ ID NO: 2007675 - RNA, 19 nt, Artificial Sequence
  Description of Artificial Sequence: Synthetic oligonucleotide
  Antisense strand to SEQ ID NO: 2007674
uaauuucaaggcuggaagc

SEQ ID NO: 2007676 - RNA, 19 nt, Artificial Sequence
  Description of Artificial Sequence: Synthetic oligonucleotide
  Sense strand starting at position 2063 of SEQ ID NO: 1880966
cuacuuguaggucaguaaa

SEQ ID NO: 2007677 - RNA, 19 nt, Artificial Sequence
  Description of Artificial Sequence: Synthetic oligonucleotide
  Antisense strand to SEQ ID NO: 2007676
uuuacugaccuacaaguag

SEQ ID NO: 2007678 - RNA, 19 nt, Artificial Sequence
  Description of Artificial Sequence: Synthetic oligonucleotide
  Sense strand starting at position 2088 of SEQ ID NO: 1880966
guuucuuuacuugaaaguu

SEQ ID NO: 2007679 - RNA, 19 nt, Artificial Sequence
  Description of Artificial Sequence: Synthetic oligonucleotide
  Antisense strand to SEQ ID NO: 2007678
aacuuucaaguaaagaaac

SEQ ID NO: 2007680 - RNA, 19 nt, Artificial Sequence
  Description of Artificial Sequence: Synthetic oligonucleotide
  Sense strand starting at position 2114 of SEQ ID NO: 1880966
gacaguugccaugauaaau

SEQ ID NO: 2007681 - RNA, 19 nt, Artificial Sequence
  Description of Artificial Sequence: Synthetic oligonucleotide
  Antisense strand to SEQ ID NO: 2007680
auuuaucauggcaacuguc

SEQ ID NO: 2007682 - RNA, 19 nt, Artificial Sequence
  Description of Artificial Sequence: Synthetic oligonucleotide
  Sense strand starting at position 2219 of SEQ ID NO: 1880966
agugaagaauuguucuuau

SEQ ID NO: 2007683 - RNA, 19 nt, Artificial Sequence
  Description of Artificial Sequence: Synthetic oligonucleotide
  Antisense strand to SEQ ID NO: 2007682
auaagaacaauucuucacu

SEQ ID NO: 2007684 - RNA, 19 nt, Artificial Sequence
  Description of Artificial Sequence: Synthetic oligonucleotide
  Sense strand starting at position 2230 of SEQ ID NO: 1880966
guucuuauuguggaagaau

SEQ ID NO: 2007685 - RNA, 19 nt, Artificial Sequence
  Description of Artificial Sequence: Synthetic oligonucleotide
  Antisense strand to SEQ ID NO: 2007684
auucuuccacaauaagaac

SEQ ID NO: 2007686 - RNA, 19 nt, Artificial Sequence
  Description of Artificial Sequence: Synthetic oligonucleotide
  Sense strand starting at position 2239 of SEQ ID NO: 1880966
guggaagaaucaucaaccu

SEQ ID NO: 2007687 - RNA, 19 nt, Artificial Sequence
  Description of Artificial Sequence: Synthetic oligonucleotide
  Antisense strand to SEQ ID NO: 2007686
agguugaugauucuuccac

SEQ ID NO: 2007688 - RNA, 19 nt, Artificial Sequence
  Description of Artificial Sequence: Synthetic oligonucleotide
  Sense strand starting at position 2301 of SEQ ID NO: 1880966
ggaucauugagaggguuac

SEQ ID NO: 2007689 - RNA, 19 nt, Artificial Sequence
  Description of Artificial Sequence: Synthetic oligonucleotide
  Antisense strand to SEQ ID NO: 2007688
guaacccucucaaugaucc

SEQ ID NO: 2007690 - RNA, 19 nt, Artificial Sequence
  Description of Artificial Sequence: Synthetic oligonucleotide
  Sense strand starting at position 2305 of SEQ ID NO: 1880966
cauugagaggguuacaugu

SEQ ID NO: 2007691 - RNA, 19 nt, Artificial Sequence
  Description of Artificial Sequence: Synthetic oligonucleotide
  Antisense strand to SEQ ID NO: 2007690
acauguaacccucucaaug

SEQ ID NO: 2007692 - RNA, 19 nt, Artificial Sequence
  Description of Artificial Sequence: Synthetic oligonucleotide
  Sense strand starting at position 2373 of SEQ ID NO: 1880966
acggauuaccgaggauaug

SEQ ID NO: 2007693 - RNA, 19 nt, Artificial Sequence
  Description of Artificial Sequence: Synthetic oligonucleotide
  Antisense strand to SEQ ID NO: 2007692
cauauccucgguaauccgu

SEQ ID NO: 2007694 - RNA, 19 nt, Artificial Sequence
  Description of Artificial Sequence: Synthetic oligonucleotide
  Sense strand starting at position 2533 of SEQ ID NO: 1880966
ggaauuguaucugucaaag

SEQ ID NO: 2007695 - RNA, 19 nt, Artificial Sequence
  Description of Artificial Sequence: Synthetic oligonucleotide
  Antisense strand to SEQ ID NO: 2007694
cuuugacagauacaauucc

SEQ ID NO: 2007696 - RNA, 19 nt, Artificial Sequence
  Description of Artificial Sequence: Synthetic oligonucleotide
  Sense strand starting at position 2590 of SEQ ID NO: 1880966
cagaauuucucaggaggga

SEQ ID NO: 2007697 - RNA, 19 nt, Artificial Sequence
  Description of Artificial Sequence: Synthetic oligonucleotide
  Antisense strand to SEQ ID NO: 2007696
ucccuccugagaaauucug

SEQ ID NO: 2007698 - RNA, 19 nt, Artificial Sequence
  Description of Artificial Sequence: Synthetic oligonucleotide
  Sense strand starting at position 2782 of SEQ ID NO: 1880966
guggucucaacagaguaga

SEQ ID NO: 2007699 - RNA, 19 nt, Artificial Sequence
  Description of Artificial Sequence: Synthetic oligonucleotide
  Antisense strand to SEQ ID NO: 2007698
ucuacucuguugagaccac

SEQ ID NO: 2007700 - RNA, 19 nt, Artificial Sequence
  Description of Artificial Sequence: Synthetic oligonucleotide
  Sense strand starting at position 2926 of SEQ ID NO: 1880966
gagaguuugugacccacaa

SEQ ID NO: 2007701 - RNA, 19 nt, Artificial Sequence
  Description of Artificial Sequence: Synthetic oligonucleotide
  Antisense strand to SEQ ID NO: 2007700
uugugggucacaaacucuc

SEQ ID NO: 2007702 - RNA, 19 nt, Artificial Sequence
  Description of Artificial Sequence: Synthetic oligonucleotide
  Sense strand starting at position 2930 of SEQ ID NO: 1880966
guuugugacccacaacuaa

SEQ ID NO: 2007703 - RNA, 19 nt, Artificial Sequence
  Description of Artificial Sequence: Synthetic oligonucleotide
  Antisense strand to SEQ ID NO: 2007702
uuaguugugggucacaaac

SEQ ID NO: 2007704 - RNA, 19 nt, Artificial Sequence
  Description of Artificial Sequence: Synthetic oligonucleotide
  Sense strand starting at position 2977 of SEQ ID NO: 1880966
auuaguucugguggcauuu

SEQ ID NO: 2007705 - RNA, 19 nt, Artificial Sequence
  Description of Artificial Sequence: Synthetic oligonucleotide
  Antisense strand to SEQ ID NO: 2007704
aaaugccaccagaacuaau

SEQ ID NO: 2007706 - RNA, 19 nt, Artificial Sequence
  Description of Artificial Sequence: Synthetic oligonucleotide
  Sense strand starting at position 3206 of SEQ ID NO: 1880966
uaguaagaggcuuggaaau

SEQ ID NO: 2007707 - RNA, 19 nt, Artificial Sequence
  Description of Artificial Sequence: Synthetic oligonucleotide
  Antisense strand to SEQ ID NO: 2007706
auuuccaagccucuuacua

SEQ ID NO: 2007708 - RNA, 19 nt, Artificial Sequence
  Description of Artificial Sequence: Synthetic oligonucleotide
  Sense strand starting at position 3250 of SEQ ID NO: 1880966
caaggugagaucgagcuuu

SEQ ID NO: 2007709 - RNA, 19 nt, Artificial Sequence
  Description of Artificial Sequence: Synthetic oligonucleotide
  Antisense strand to SEQ ID NO: 2007708
aaagcucgaucucaccuug

SEQ ID NO: 2007710 - RNA, 19 nt, Artificial Sequence
  Description of Artificial Sequence: Synthetic oligonucleotide
  Sense strand starting at position 3534 of SEQ ID NO: 1880966
aggguuucuccuuaucuac

SEQ ID NO: 2007711 - RNA, 19 nt, Artificial Sequence
  Description of Artificial Sequence: Synthetic oligonucleotide
  Antisense strand to SEQ ID NO: 2007710
guagauaaggagaaacccu

SEQ ID NO: 2007712 - RNA, 19 nt, Artificial Sequence
  Description of Artificial Sequence: Synthetic oligonucleotide
  Sense strand starting at position 3616 of SEQ ID NO: 1880966
uaaguaauuugacaaaggu

SEQ ID NO: 2007713 - RNA, 19 nt, Artificial Sequence
  Description of Artificial Sequence: Synthetic oligonucleotide
  Antisense strand to SEQ ID NO: 2007712
accuuugucaaauuacuua

SEQ ID NO: 2007714 - RNA, 19 nt, Artificial Sequence
  Description of Artificial Sequence: Synthetic oligonucleotide
  Sense strand starting at position 3632 of SEQ ID NO: 1880966
ggucauaugggcuagcaua

SEQ ID NO: 2007715 - RNA, 19 nt, Artificial Sequence
  Description of Artificial Sequence: Synthetic oligonucleotide
  Antisense strand to SEQ ID NO: 2007714
uaugcuagcccauaugacc

SEQ ID NO: 2007716 - RNA, 19 nt, Artificial Sequence
  Description of Artificial Sequence: Synthetic oligonucleotide
  Sense strand starting at position 3691 of SEQ ID NO: 1880966
cuggaaucauucuuaguuu

SEQ ID NO: 2007717 - RNA, 19 nt, Artificial Sequence
  Description of Artificial Sequence: Synthetic oligonucleotide
  Antisense strand to SEQ ID NO: 2007716
aaacuaagaaugauuccag

SEQ ID NO: 2007718 - RNA, 19 nt, Artificial Sequence
  Description of Artificial Sequence: Synthetic oligonucleotide
  Sense strand starting at position 3717 of SEQ ID NO: 1880966
uuaaaugaaguuggcauua

SEQ ID NO: 2007719 - RNA, 19 nt, Artificial Sequence
  Description of Artificial Sequence: Synthetic oligonucleotide
  Antisense strand to SEQ ID NO: 2007718
uaaugccaacuucauuuaa

SEQ ID NO: 2007720 - RNA, 19 nt, Artificial Sequence
  Description of Artificial Sequence: Synthetic oligonucleotide
  Sense strand starting at position 26 of SEQ ID NO: 1880967
uucugacauuuguaggaca

SEQ ID NO: 2007721 - RNA, 19 nt, Artificial Sequence
  Description of Artificial Sequence: Synthetic oligonucleotide
  Antisense strand to SEQ ID NO: 2007720
uguccuacaaaugucagaa

SEQ ID NO: 2007722 - RNA, 19 nt, Artificial Sequence
  Description of Artificial Sequence: Synthetic oligonucleotide
  Sense strand starting at position 254 of SEQ ID NO: 1880967
agugcuuaacauuggacaa

SEQ ID NO: 2007723 - RNA, 19 nt, Artificial Sequence
  Description of Artificial Sequence: Synthetic oligonucleotide
  Antisense strand to SEQ ID NO: 2007722
uuguccaauguuaagcacu

SEQ ID NO: 2007724 - RNA, 19 nt, Artificial Sequence
  Description of Artificial Sequence: Synthetic oligonucleotide
  Sense strand starting at position 302 of SEQ ID NO: 1880967
ggaggugguacuggacauu

SEQ ID NO: 2007725 - RNA, 19 nt, Artificial Sequence
  Description of Artificial Sequence: Synthetic oligonucleotide
  Antisense strand to SEQ ID NO: 2007724
aauguccaguaccaccucc

SEQ ID NO: 2007726 - RNA, 19 nt, Artificial Sequence
  Description of Artificial Sequence: Synthetic oligonucleotide
  Sense strand starting at position 424 of SEQ ID NO: 1880967
ugucaaugcuauuugcaua

SEQ ID NO: 2007727 - RNA, 19 nt, Artificial Sequence
  Description of Artificial Sequence: Synthetic oligonucleotide
  Antisense strand to SEQ ID NO: 2007726
uaugcaaauagcauugaca

SEQ ID NO: 2007728 - RNA, 19 nt, Artificial Sequence
  Description of Artificial Sequence: Synthetic oligonucleotide
  Sense strand starting at position 445 of SEQ ID NO: 1880967
cuagcaacaguuggaaauu

SEQ ID NO: 2007729 - RNA, 19 nt, Artificial Sequence
  Description of Artificial Sequence: Synthetic oligonucleotide
  Antisense strand to SEQ ID NO: 2007728
aauuuccaacuguugcuag

SEQ ID NO: 2007730 - RNA, 19 nt, Artificial Sequence
  Description of Artificial Sequence: Synthetic oligonucleotide
  Sense strand starting at position 468 of SEQ ID NO: 1880967
uuaaauaagcgauaccauu

SEQ ID NO: 2007731 - RNA, 19 nt, Artificial Sequence
  Description of Artificial Sequence: Synthetic oligonucleotide
  Antisense strand to SEQ ID NO: 2007730
aaugguaucgcuuauuuaa

SEQ ID NO: 2007732 - RNA, 19 nt, Artificial Sequence
  Description of Artificial Sequence: Synthetic oligonucleotide
  Sense strand starting at position 606 of SEQ ID NO: 1880967
agaaauugacgaugcucau

SEQ ID NO: 2007733 - RNA, 19 nt, Artificial Sequence
  Description of Artificial Sequence: Synthetic oligonucleotide
  Antisense strand to SEQ ID NO: 2007732
augagcaucgucaauuucu

SEQ ID NO: 2007734 - RNA, 19 nt, Artificial Sequence
  Description of Artificial Sequence: Synthetic oligonucleotide
  Sense strand starting at position 700 of SEQ ID NO: 1880967
gucucacugucuccuauuu

SEQ ID NO: 2007735 - RNA, 19 nt, Artificial Sequence
  Description of Artificial Sequence: Synthetic oligonucleotide
  Antisense strand to SEQ ID NO: 2007734
aaauaggagacagugagac

SEQ ID NO: 2007736 - RNA, 19 nt, Artificial Sequence
  Description of Artificial Sequence: Synthetic oligonucleotide
  Sense strand starting at position 709 of SEQ ID NO: 1880967
ucuccuauuuggcuuugua

SEQ ID NO: 2007737 - RNA, 19 nt, Artificial Sequence
  Description of Artificial Sequence: Synthetic oligonucleotide
  Antisense strand to SEQ ID NO: 2007736
uacaaagccaaauaggaga

SEQ ID NO: 2007738 - RNA, 19 nt, Artificial Sequence
  Description of Artificial Sequence: Synthetic oligonucleotide
  Sense strand starting at position 892 of SEQ ID NO: 1880967
ggaauucuauaagcuguga

SEQ ID NO: 2007739 - RNA, 19 nt, Artificial Sequence
  Description of Artificial Sequence: Synthetic oligonucleotide
  Antisense strand to SEQ ID NO: 2007738
ucacagcuuauagaauucc

SEQ ID NO: 2007740 - RNA, 19 nt, Artificial Sequence
  Description of Artificial Sequence: Synthetic oligonucleotide
  Sense strand starting at position 922 of SEQ ID NO: 1880967
accgaaguccugugaggag

SEQ ID NO: 2007741 - RNA, 19 nt, Artificial Sequence
  Description of Artificial Sequence: Synthetic oligonucleotide
  Antisense strand to SEQ ID NO: 2007740
cuccucacaggacuucggu

SEQ ID NO: 2007742 - RNA, 19 nt, Artificial Sequence
  Description of Artificial Sequence: Synthetic oligonucleotide
  Sense strand starting at position 926 of SEQ ID NO: 1880967
aaguccugugaggaguaaa

SEQ ID NO: 2007743 - RNA, 19 nt, Artificial Sequence
  Description of Artificial Sequence: Synthetic oligonucleotide
  Antisense strand to SEQ ID NO: 2007742
uuuacuccucacaggacuu

SEQ ID NO: 2007744 - RNA, 19 nt, Artificial Sequence
  Description of Artificial Sequence: Synthetic oligonucleotide
  Sense strand starting at position 1130 of SEQ ID NO: 1880967
cugggaucaaagugguaaa

SEQ ID NO: 2007745 - RNA, 19 nt, Artificial Sequence
  Description of Artificial Sequence: Synthetic oligonucleotide
  Antisense strand to SEQ ID NO: 2007744
uuuaccacuuugaucccag

SEQ ID NO: 2007746 - RNA, 19 nt, Artificial Sequence
  Description of Artificial Sequence: Synthetic oligonucleotide
  Sense strand starting at position 1255 of SEQ ID NO: 1880967
augagaccguuguuauuaa

SEQ ID NO: 2007747 - RNA, 19 nt, Artificial Sequence
  Description of Artificial Sequence: Synthetic oligonucleotide
  Antisense strand to SEQ ID NO: 2007746
uuaauaacaacggucucau

SEQ ID NO: 2007748 - RNA, 19 nt, Artificial Sequence
  Description of Artificial Sequence: Synthetic oligonucleotide
  Sense strand starting at position 1536 of SEQ ID NO: 1880967
guguuucuuauagauggaa

SEQ ID NO: 2007749 - RNA, 19 nt, Artificial Sequence
  Description of Artificial Sequence: Synthetic oligonucleotide
  Antisense strand to SEQ ID NO: 2007748
uuccaucuauaagaaacac

SEQ ID NO: 2007750 - RNA, 19 nt, Artificial Sequence
  Description of Artificial Sequence: Synthetic oligonucleotide
  Sense strand starting at position 1581 of SEQ ID NO: 1880967
uucuuugacucagcaugaa

SEQ ID NO: 2007751 - RNA, 19 nt, Artificial Sequence
  Description of Artificial Sequence: Synthetic oligonucleotide
  Antisense strand to SEQ ID NO: 2007750
uucaugcugagucaaagaa

SEQ ID NO: 2007752 - RNA, 19 nt, Artificial Sequence
  Description of Artificial Sequence: Synthetic oligonucleotide
  Sense strand starting at position 1603 of SEQ ID NO: 1880967
gguggugcccaucacuaau

SEQ ID NO: 2007753 - RNA, 19 nt, Artificial Sequence
  Description of Artificial Sequence: Synthetic oligonucleotide
  Antisense strand to SEQ ID NO: 2007752
auuagugaugggcaccacc

SEQ ID NO: 2007754 - RNA, 19 nt, Artificial Sequence
  Description of Artificial Sequence: Synthetic oligonucleotide
  Sense strand starting at position 1727 of SEQ ID NO: 1880967
guaaguacaaguggaaaua

SEQ ID NO: 2007755 - RNA, 19 nt, Artificial Sequence
  Description of Artificial Sequence: Synthetic oligonucleotide
  Antisense strand to SEQ ID NO: 2007754
uauuuccacuuguacuuac

SEQ ID NO: 2007756 - RNA, 19 nt, Artificial Sequence
  Description of Artificial Sequence: Synthetic oligonucleotide
  Sense strand starting at position 1739 of SEQ ID NO: 1880967
ggaaauacauuaccuuguu

SEQ ID NO: 2007757 - RNA, 19 nt, Artificial Sequence
  Description of Artificial Sequence: Synthetic oligonucleotide
  Antisense strand to SEQ ID NO: 2007756
aacaagguaauguauuucc

SEQ ID NO: 2007758 - RNA, 19 nt, Artificial Sequence
  Description of Artificial Sequence: Synthetic oligonucleotide
  Sense strand starting at position 1798 of SEQ ID NO: 1880967
gggcuauagggucaugauu

SEQ ID NO: 2007759 - RNA, 19 nt, Artificial Sequence
  Description of Artificial Sequence: Synthetic oligonucleotide
  Antisense strand to SEQ ID NO: 2007758
aaucaugacccuauagccc

SEQ ID NO: 2007760 - RNA, 19 nt, Artificial Sequence
  Description of Artificial Sequence: Synthetic oligonucleotide
  Sense strand starting at position 1838 of SEQ ID NO: 1880967
aaauaaauguuagcgaaga

SEQ ID NO: 2007761 - RNA, 19 nt, Artificial Sequence
  Description of Artificial Sequence: Synthetic oligonucleotide
  Antisense strand to SEQ ID NO: 2007760
ucuucgcuaacauuuauuu

SEQ ID NO: 2007762 - RNA, 19 nt, Artificial Sequence
  Description of Artificial Sequence: Synthetic oligonucleotide
  Sense strand starting at position 1840 of SEQ ID NO: 1880967
auaaauguuagcgaagagu

SEQ ID NO: 2007763 - RNA, 19 nt, Artificial Sequence
  Description of Artificial Sequence: Synthetic oligonucleotide
  Antisense strand to SEQ ID NO: 2007762
acucuucgcuaacauuuau

SEQ ID NO: 2007764 - RNA, 19 nt, Artificial Sequence
  Description of Artificial Sequence: Synthetic oligonucleotide
  Sense strand starting at position 1849 of SEQ ID NO: 1880967
agcgaagagugacucuaaa

SEQ ID NO: 2007765 - RNA, 19 nt, Artificial Sequence
  Description of Artificial Sequence: Synthetic oligonucleotide
  Antisense strand to SEQ ID NO: 2007764
uuuagagucacucuucgcu

SEQ ID NO: 2007766 - RNA, 19 nt, Artificial Sequence
  Description of Artificial Sequence: Synthetic oligonucleotide
  Sense strand starting at position 2910 of SEQ ID NO: 1880967
gcagguguuagauaugggu

SEQ ID NO: 2007767 - RNA, 19 nt, Artificial Sequence
  Description of Artificial Sequence: Synthetic oligonucleotide
  Antisense strand to SEQ ID NO: 2007766
acccauaucuaacaccugc

SEQ ID NO: 2007768 - RNA, 19 nt, Artificial Sequence
  Description of Artificial Sequence: Synthetic oligonucleotide
  Sense strand starting at position 2916 of SEQ ID NO: 1880967
guuagauauggguaguuag

SEQ ID NO: 2007769 - RNA, 19 nt, Artificial Sequence
  Description of Artificial Sequence: Synthetic oligonucleotide
  Antisense strand to SEQ ID NO: 2007768
cuaacuacccauaucuaac

SEQ ID NO: 2007770 - RNA, 19 nt, Artificial Sequence
  Description of Artificial Sequence: Synthetic oligonucleotide
  Sense strand starting at position 2976 of SEQ ID NO: 1880967
cgggaaauggccugugaua

SEQ ID NO: 2007771 - RNA, 19 nt, Artificial Sequence
  Description of Artificial Sequence: Synthetic oligonucleotide
  Antisense strand to SEQ ID NO: 2007770
uaucacaggccauuucccg

SEQ ID NO: 2007772 - RNA, 19 nt, Artificial Sequence
  Description of Artificial Sequence: Synthetic oligonucleotide
  Sense strand starting at position 2978 of SEQ ID NO: 1880967
ggaaauggccugugauaua

SEQ ID NO: 2007773 - RNA, 19 nt, Artificial Sequence
  Description of Artificial Sequence: Synthetic oligonucleotide
  Antisense strand to SEQ ID NO: 2007772
uauaucacaggccauuucc

SEQ ID NO: 2007774 - RNA, 19 nt, Artificial Sequence
  Description of Artificial Sequence: Synthetic oligonucleotide
  Sense strand starting at position 3109 of SEQ ID NO: 1880967
auguguucuuaggccauuu

SEQ ID NO: 2007775 - RNA, 19 nt, Artificial Sequence
  Description of Artificial Sequence: Synthetic oligonucleotide
  Antisense strand to SEQ ID NO: 2007774
aaauggccuaagaacacau

SEQ ID NO: 2007776 - RNA, 19 nt, Artificial Sequence
  Description of Artificial Sequence: Synthetic oligonucleotide
  Sense strand starting at position 3146 of SEQ ID NO: 1880967
guagaaagcgcuuacacaa

SEQ ID NO: 2007777 - RNA, 19 nt, Artificial Sequence
  Description of Artificial Sequence: Synthetic oligonucleotide
  Antisense strand to SEQ ID NO: 2007776
uuguguaagcgcuuucuac

SEQ ID NO: 2007778 - RNA, 19 nt, Artificial Sequence
  Description of Artificial Sequence: Synthetic oligonucleotide
  Sense strand starting at position 3238 of SEQ ID NO: 1880967
cagcguguugcuguacuca

SEQ ID NO: 2007779 - RNA, 19 nt, Artificial Sequence
  Description of Artificial Sequence: Synthetic oligonucleotide
  Antisense strand to SEQ ID NO: 2007778
ugaguacagcaacacgcug

SEQ ID NO: 2007780 - RNA, 19 nt, Artificial Sequence
  Description of Artificial Sequence: Synthetic oligonucleotide
  Sense strand starting at position 3416 of SEQ ID NO: 1880967
gugaguaguggugagugaa

SEQ ID NO: 2007781 - RNA, 19 nt, Artificial Sequence
  Description of Artificial Sequence: Synthetic oligonucleotide
  Antisense strand to SEQ ID NO: 2007780
uucacucaccacuacucac

SEQ ID NO: 2007782 - RNA, 19 nt, Artificial Sequence
  Description of Artificial Sequence: Synthetic oligonucleotide
  Sense strand starting at position 3460 of SEQ ID NO: 1880967
ucuacucuuguagacuuua

SEQ ID NO: 2007783 - RNA, 19 nt, Artificial Sequence
  Description of Artificial Sequence: Synthetic oligonucleotide
  Antisense strand to SEQ ID NO: 2007782
uaaagucuacaagaguaga

SEQ ID NO: 2007784 - RNA, 19 nt, Artificial Sequence
  Description of Artificial Sequence: Synthetic oligonucleotide
  Sense strand starting at position 3740 of SEQ ID NO: 1880967
ccucgucaggaucaucaau

SEQ ID NO: 2007785 - RNA, 19 nt, Artificial Sequence
  Description of Artificial Sequence: Synthetic oligonucleotide
  Antisense strand to SEQ ID NO: 2007784
auugaugauccugacgagg

SEQ ID NO: 2007786 - RNA, 19 nt, Artificial Sequence
  Description of Artificial Sequence: Synthetic oligonucleotide
  Sense strand starting at position 3742 of SEQ ID NO: 1880967
ucgucaggaucaucaauau

SEQ ID NO: 2007787 - RNA, 19 nt, Artificial Sequence
  Description of Artificial Sequence: Synthetic oligonucleotide
  Antisense strand to SEQ ID NO: 2007786
auauugaugauccugacga

SEQ ID NO: 2007788 - RNA, 19 nt, Artificial Sequence
  Description of Artificial Sequence: Synthetic oligonucleotide
  Sense strand starting at position 3793 of SEQ ID NO: 1880967
ggaggucuucaggagcaau

SEQ ID NO: 2007789 - RNA, 19 nt, Artificial Sequence
  Description of Artificial Sequence: Synthetic oligonucleotide
  Antisense strand to SEQ ID NO: 2007788
auugcuccugaagaccucc

SEQ ID NO: 2007790 - RNA, 19 nt, Artificial Sequence
  Description of Artificial Sequence: Synthetic oligonucleotide
  Sense strand starting at position 3863 of SEQ ID NO: 1880967
uccugaaggacaugucaga

SEQ ID NO: 2007791 - RNA, 19 nt, Artificial Sequence
  Description of Artificial Sequence: Synthetic oligonucleotide
  Antisense strand to SEQ ID NO: 2007790
ucugacauguccuucagga

SEQ ID NO: 2007792 - RNA, 19 nt, Artificial Sequence
  Description of Artificial Sequence: Synthetic oligonucleotide
  Sense strand starting at position 3870 of SEQ ID NO: 1880967
ggacaugucagagacuguu

SEQ ID NO: 2007793 - RNA, 19 nt, Artificial Sequence
  Description of Artificial Sequence: Synthetic oligonucleotide
  Antisense strand to SEQ ID NO: 2007792
aacagucucugacaugucc

SEQ ID NO: 2007794 - RNA, 19 nt, Artificial Sequence
  Description of Artificial Sequence: Synthetic oligonucleotide
  Sense strand starting at position 3958 of SEQ ID NO: 1880967
ccaguaacauaguuguuga

SEQ ID NO: 2007795 - RNA, 19 nt, Artificial Sequence
  Description of Artificial Sequence: Synthetic oligonucleotide
  Antisense strand to SEQ ID NO: 2007794
ucaacaacuauguuacugg

SEQ ID NO: 2007796 - RNA, 19 nt, Artificial Sequence
  Description of Artificial Sequence: Synthetic oligonucleotide
  Sense strand starting at position 3966 of SEQ ID NO: 1880967
auaguuguugauuaucaag

SEQ ID NO: 2007797 - RNA, 19 nt, Artificial Sequence
  Description of Artificial Sequence: Synthetic oligonucleotide
  Antisense strand to SEQ ID NO: 2007796
cuugauaaucaacaacuau

SEQ ID NO: 2007798 - RNA, 19 nt, Artificial Sequence
  Description of Artificial Sequence: Synthetic oligonucleotide
  Sense strand starting at position 3968 of SEQ ID NO: 1880967
aguuguugauuaucaagua

SEQ ID NO: 2007799 - RNA, 19 nt, Artificial Sequence
  Description of Artificial Sequence: Synthetic oligonucleotide
  Antisense strand to SEQ ID NO: 2007798
uacuugauaaucaacaacu

SEQ ID NO: 2007800 - RNA, 19 nt, Artificial Sequence
  Description of Artificial Sequence: Synthetic oligonucleotide
  Sense strand starting at position 7 of SEQ ID NO: 1880968
agguuaaucgaugguacca

SEQ ID NO: 2007801 - RNA, 19 nt, Artificial Sequence
  Description of Artificial Sequence: Synthetic oligonucleotide
  Antisense strand to SEQ ID NO: 2007800
ugguaccaucgauuaaccu

SEQ ID NO: 2007802 - RNA, 19 nt, Artificial Sequence
  Description of Artificial Sequence: Synthetic oligonucleotide
  Sense strand starting at position 109 of SEQ ID NO: 1880968
cagaguggguaccuaauaa

SEQ ID NO: 2007803 - RNA, 19 nt, Artificial Sequence
  Description of Artificial Sequence: Synthetic oligonucleotide
  Antisense strand to SEQ ID NO: 2007802
uuauuagguacccacucug

SEQ ID NO: 2007804 - RNA, 19 nt, Artificial Sequence
  Description of Artificial Sequence: Synthetic oligonucleotide
  Sense strand starting at position 139 of SEQ ID NO: 1880968
gugagugaaucagcaaaug

SEQ ID NO: 2007805 - RNA, 19 nt, Artificial Sequence
  Description of Artificial Sequence: Synthetic oligonucleotide
  Antisense strand to SEQ ID NO: 2007804
cauuugcugauucacucac

SEQ ID NO: 2007806 - RNA, 19 nt, Artificial Sequence
  Description of Artificial Sequence: Synthetic oligonucleotide
  Sense strand starting at position 169 of SEQ ID NO: 1880968
ucugaaucugaauguaaau

SEQ ID NO: 2007807 - RNA, 19 nt, Artificial Sequence
  Description of Artificial Sequence: Synthetic oligonucleotide
  Antisense strand to SEQ ID NO: 2007806
auuuacauucagauucaga

SEQ ID NO: 2007808 - RNA, 19 nt, Artificial Sequence
  Description of Artificial Sequence: Synthetic oligonucleotide
  Sense strand starting at position 302 of SEQ ID NO: 1880968
cuucuagaccaucauguga

SEQ ID NO: 2007809 - RNA, 19 nt, Artificial Sequence
  Description of Artificial Sequence: Synthetic oligonucleotide
  Antisense strand to SEQ ID NO: 2007808
ucacaugauggucuagaag

SEQ ID NO: 2007810 - RNA, 19 nt, Artificial Sequence
  Description of Artificial Sequence: Synthetic oligonucleotide
  Sense strand starting at position 344 of SEQ ID NO: 1880968
uacagagucagcgaggauu

SEQ ID NO: 2007811 - RNA, 19 nt, Artificial Sequence
  Description of Artificial Sequence: Synthetic oligonucleotide
  Antisense strand to SEQ ID NO: 2007810
aauccucgcugacucugua

SEQ ID NO: 2007812 - RNA, 19 nt, Artificial Sequence
  Description of Artificial Sequence: Synthetic oligonucleotide
  Sense strand starting at position 414 of SEQ ID NO: 1880968
cacucauuagcauggaagu

SEQ ID NO: 2007813 - RNA, 19 nt, Artificial Sequence
  Description of Artificial Sequence: Synthetic oligonucleotide
  Antisense strand to SEQ ID NO: 2007812
acuuccaugcuaaugagug

SEQ ID NO: 2007814 - RNA, 19 nt, Artificial Sequence
  Description of Artificial Sequence: Synthetic oligonucleotide
  Sense strand starting at position 415 of SEQ ID NO: 1880968
acucauuagcauggaaguu

SEQ ID NO: 2007815 - RNA, 19 nt, Artificial Sequence
  Description of Artificial Sequence: Synthetic oligonucleotide
  Antisense strand to SEQ ID NO: 2007814
aacuuccaugcuaaugagu

SEQ ID NO: 2007816 - RNA, 19 nt, Artificial Sequence
  Description of Artificial Sequence: Synthetic oligonucleotide
  Sense strand starting at position 424 of SEQ ID NO: 1880968
cauggaaguuuggcuauua

SEQ ID NO: 2007817 - RNA, 19 nt, Artificial Sequence
  Description of Artificial Sequence: Synthetic oligonucleotide
  Antisense strand to SEQ ID NO: 2007816
uaauagccaaacuuccaug

SEQ ID NO: 2007818 - RNA, 19 nt, Artificial Sequence
  Description of Artificial Sequence: Synthetic oligonucleotide
  Sense strand starting at position 425 of SEQ ID NO: 1880968
auggaaguuuggcuauuaa

SEQ ID NO: 2007819 - RNA, 19 nt, Artificial Sequence
  Description of Artificial Sequence: Synthetic oligonucleotide
  Antisense strand to SEQ ID NO: 2007818
uuaauagccaaacuuccau

SEQ ID NO: 2007820 - RNA, 19 nt, Artificial Sequence
  Description of Artificial Sequence: Synthetic oligonucleotide
  Sense strand starting at position 499 of SEQ ID NO: 1880968
aagaaaugcgauugaaaua

SEQ ID NO: 2007821 - RNA, 19 nt, Artificial Sequence
  Description of Artificial Sequence: Synthetic oligonucleotide
  Antisense strand to SEQ ID NO: 2007820
uauuucaaucgcauuucuu

SEQ ID NO: 2007822 - RNA, 19 nt, Artificial Sequence
  Description of Artificial Sequence: Synthetic oligonucleotide
  Sense strand starting at position 504 of SEQ ID NO: 1880968
augcgauugaaauaaguau

SEQ ID NO: 2007823 - RNA, 19 nt, Artificial Sequence
  Description of Artificial Sequence: Synthetic oligonucleotide
  Antisense strand to SEQ ID NO: 2007822
auacuuauuucaaucgcau

SEQ ID NO: 2007824 - RNA, 19 nt, Artificial Sequence
  Description of Artificial Sequence: Synthetic oligonucleotide
  Sense strand starting at position 535 of SEQ ID NO: 1880968
agaaacugcuauccaguuu

SEQ ID NO: 2007825 - RNA, 19 nt, Artificial Sequence
  Description of Artificial Sequence: Synthetic oligonucleotide
  Antisense strand to SEQ ID NO: 2007824
aaacuggauagcaguuucu

SEQ ID NO: 2007826 - RNA, 19 nt, Artificial Sequence
  Description of Artificial Sequence: Synthetic oligonucleotide
  Sense strand starting at position 679 of SEQ ID NO: 1880968
uauguucccugguuugaag

SEQ ID NO: 2007827 - RNA, 19 nt, Artificial Sequence
  Description of Artificial Sequence: Synthetic oligonucleotide
  Antisense strand to SEQ ID NO: 2007826
cuucaaaccagggaacaua

SEQ ID NO: 2007828 - RNA, 19 nt, Artificial Sequence
  Description of Artificial Sequence: Synthetic oligonucleotide
  Sense strand starting at position 681 of SEQ ID NO: 1880968
uguucccugguuugaagaa

SEQ ID NO: 2007829 - RNA, 19 nt, Artificial Sequence
  Description of Artificial Sequence: Synthetic oligonucleotide
  Antisense strand to SEQ ID NO: 2007828
uucuucaaaccagggaaca

SEQ ID NO: 2007830 - RNA, 19 nt, Artificial Sequence
  Description of Artificial Sequence: Synthetic oligonucleotide
  Sense strand starting at position 902 of SEQ ID NO: 1880968
gagaauauaucggcuagca

SEQ ID NO: 2007831 - RNA, 19 nt, Artificial Sequence
  Description of Artificial Sequence: Synthetic oligonucleotide
  Antisense strand to SEQ ID NO: 2007830
ugcuagccgauauauucuc

SEQ ID NO: 2007832 - RNA, 19 nt, Artificial Sequence
  Description of Artificial Sequence: Synthetic oligonucleotide
  Sense strand starting at position 904 of SEQ ID NO: 1880968
gaauauaucggcuagcaag

SEQ ID NO: 2007833 - RNA, 19 nt, Artificial Sequence
  Description of Artificial Sequence: Synthetic oligonucleotide
  Antisense strand to SEQ ID NO: 2007832
cuugcuagccgauauauuc

SEQ ID NO: 2007834 - RNA, 19 nt, Artificial Sequence
  Description of Artificial Sequence: Synthetic oligonucleotide
  Sense strand starting at position 964 of SEQ ID NO: 1880968
agaguaauuugauagguau

SEQ ID NO: 2007835 - RNA, 19 nt, Artificial Sequence
  Description of Artificial Sequence: Synthetic oligonucleotide
  Antisense strand to SEQ ID NO: 2007834
auaccuaucaaauuacucu

SEQ ID NO: 2007836 - RNA, 19 nt, Artificial Sequence
  Description of Artificial Sequence: Synthetic oligonucleotide
  Sense strand starting at position 991 of SEQ ID NO: 1880968
uggucauugugguuaggaa

SEQ ID NO: 2007837 - RNA, 19 nt, Artificial Sequence
  Description of Artificial Sequence: Synthetic oligonucleotide
  Antisense strand to SEQ ID NO: 2007836
uuccuaaccacaaugacca

SEQ ID NO: 2007838 - RNA, 19 nt, Artificial Sequence
  Description of Artificial Sequence: Synthetic oligonucleotide
  Sense strand starting at position 992 of SEQ ID NO: 1880968
ggucauugugguuaggaaa

SEQ ID NO: 2007839 - RNA, 19 nt, Artificial Sequence
  Description of Artificial Sequence: Synthetic oligonucleotide
  Antisense strand to SEQ ID NO: 2007838
uuuccuaaccacaaugacc

SEQ ID NO: 2007840 - RNA, 19 nt, Artificial Sequence
  Description of Artificial Sequence: Synthetic oligonucleotide
  Sense strand starting at position 1021 of SEQ ID NO: 1880968
ggauucuuagauuguagaa

SEQ ID NO: 2007841 - RNA, 19 nt, Artificial Sequence
  Description of Artificial Sequence: Synthetic oligonucleotide
  Antisense strand to SEQ ID NO: 2007840
uucuacaaucuaagaaucc

SEQ ID NO: 2007842 - RNA, 19 nt, Artificial Sequence
  Description of Artificial Sequence: Synthetic oligonucleotide
  Sense strand starting at position 1069 of SEQ ID NO: 1880968
ucuccaauccuggacaguu

SEQ ID NO: 2007843 - RNA, 19 nt, Artificial Sequence
  Description of Artificial Sequence: Synthetic oligonucleotide
  Antisense strand to SEQ ID NO: 2007842
aacuguccaggauuggaga

SEQ ID NO: 2007844 - RNA, 19 nt, Artificial Sequence
  Description of Artificial Sequence: Synthetic oligonucleotide
  Sense strand starting at position 1144 of SEQ ID NO: 1880968
acuuuaguguucucacaua

SEQ ID NO: 2007845 - RNA, 19 nt, Artificial Sequence
  Description of Artificial Sequence: Synthetic oligonucleotide
  Antisense strand to SEQ ID NO: 2007844
uaugugagaacacuaaagu

SEQ ID NO: 2007846 - RNA, 19 nt, Artificial Sequence
  Description of Artificial Sequence: Synthetic oligonucleotide
  Sense strand starting at position 1255 of SEQ ID NO: 1880968
ggccuuaauagcuagguga

SEQ ID NO: 2007847 - RNA, 19 nt, Artificial Sequence
  Description of Artificial Sequence: Synthetic oligonucleotide
  Antisense strand to SEQ ID NO: 2007846
ucaccuagcuauuaaggcc

SEQ ID NO: 2007848 - RNA, 19 nt, Artificial Sequence
  Description of Artificial Sequence: Synthetic oligonucleotide
  Sense strand starting at position 1257 of SEQ ID NO: 1880968
ccuuaauagcuaggugaug

SEQ ID NO: 2007849 - RNA, 19 nt, Artificial Sequence
  Description of Artificial Sequence: Synthetic oligonucleotide
  Antisense strand to SEQ ID NO: 2007848
caucaccuagcuauuaagg

SEQ ID NO: 2007850 - RNA, 19 nt, Artificial Sequence
  Description of Artificial Sequence: Synthetic oligonucleotide
  Sense strand starting at position 1526 of SEQ ID NO: 1880968
gcuguuaacuaauucuuga

SEQ ID NO: 2007851 - RNA, 19 nt, Artificial Sequence
  Description of Artificial Sequence: Synthetic oligonucleotide
  Antisense strand to SEQ ID NO: 2007850
ucaagaauuaguuaacagc

SEQ ID NO: 2007852 - RNA, 19 nt, Artificial Sequence
  Description of Artificial Sequence: Synthetic oligonucleotide
  Sense strand starting at position 1591 of SEQ ID NO: 1880968
gguacauugagaugcaugu

SEQ ID NO: 2007853 - RNA, 19 nt, Artificial Sequence
  Description of Artificial Sequence: Synthetic oligonucleotide
  Antisense strand to SEQ ID NO: 2007852
acaugcaucucaauguacc

SEQ ID NO: 2007854 - RNA, 19 nt, Artificial Sequence
  Description of Artificial Sequence: Synthetic oligonucleotide
  Sense strand starting at position 1832 of SEQ ID NO: 1880968
acuccauagcuauguugaa

SEQ ID NO: 2007855 - RNA, 19 nt, Artificial Sequence
  Description of Artificial Sequence: Synthetic oligonucleotide
  Antisense strand to SEQ ID NO: 2007854
uucaacauagcuauggagu

SEQ ID NO: 2007856 - RNA, 19 nt, Artificial Sequence
  Description of Artificial Sequence: Synthetic oligonucleotide
  Sense strand starting at position 1836 of SEQ ID NO: 1880968
cauagcuauguugaagagu

SEQ ID NO: 2007857 - RNA, 19 nt, Artificial Sequence
  Description of Artificial Sequence: Synthetic oligonucleotide
  Antisense strand to SEQ ID NO: 2007856
acucuucaacauagcuaug

SEQ ID NO: 2007858 - RNA, 19 nt, Artificial Sequence
  Description of Artificial Sequence: Synthetic oligonucleotide
  Sense strand starting at position 1839 of SEQ ID NO: 1880968
agcuauguugaagaguuau

SEQ ID NO: 2007859 - RNA, 19 nt, Artificial Sequence
  Description of Artificial Sequence: Synthetic oligonucleotide
  Antisense strand to SEQ ID NO: 2007858
auaacucuucaacauagcu

SEQ ID NO: 2007860 - RNA, 19 nt, Artificial Sequence
  Description of Artificial Sequence: Synthetic oligonucleotide
  Sense strand starting at position 2418 of SEQ ID NO: 1880968
agucuuucuccucaccuga

SEQ ID NO: 2007861 - RNA, 19 nt, Artificial Sequence
  Description of Artificial Sequence: Synthetic oligonucleotide
  Antisense strand to SEQ ID NO: 2007860
ucaggugaggagaaagacu

SEQ ID NO: 2007862 - RNA, 19 nt, Artificial Sequence
  Description of Artificial Sequence: Synthetic oligonucleotide
  Sense strand starting at position 2709 of SEQ ID NO: 1880968
gcaucucugauggguugau

SEQ ID NO: 2007863 - RNA, 19 nt, Artificial Sequence
  Description of Artificial Sequence: Synthetic oligonucleotide
  Antisense strand to SEQ ID NO: 2007862
aucaacccaucagagaugc

SEQ ID NO: 2007864 - RNA, 19 nt, Artificial Sequence
  Description of Artificial Sequence: Synthetic oligonucleotide
  Sense strand starting at position 2710 of SEQ ID NO: 1880968
caucucugauggguugauu

SEQ ID NO: 2007865 - RNA, 19 nt, Artificial Sequence
  Description of Artificial Sequence: Synthetic oligonucleotide
  Antisense strand to SEQ ID NO: 2007864
aaucaacccaucagagaug

SEQ ID NO: 2007866 - RNA, 19 nt, Artificial Sequence
  Description of Artificial Sequence: Synthetic oligonucleotide
  Sense strand starting at position 2713 of SEQ ID NO: 1880968
cucugauggguugauugua

SEQ ID NO: 2007867 - RNA, 19 nt, Artificial Sequence
  Description of Artificial Sequence: Synthetic oligonucleotide
  Antisense strand to SEQ ID NO: 2007866
uacaaucaacccaucagag

SEQ ID NO: 2007868 - RNA, 19 nt, Artificial Sequence
  Description of Artificial Sequence: Synthetic oligonucleotide
  Sense strand starting at position 2846 of SEQ ID NO: 1880968
guugucuuccaccaaauca

SEQ ID NO: 2007869 - RNA, 19 nt, Artificial Sequence
  Description of Artificial Sequence: Synthetic oligonucleotide
  Antisense strand to SEQ ID NO: 2007868
ugauuugguggaagacaac

SEQ ID NO: 2007870 - RNA, 19 nt, Artificial Sequence
  Description of Artificial Sequence: Synthetic oligonucleotide
  Sense strand starting at position 2918 of SEQ ID NO: 1880968
guggucugauuucucugua

SEQ ID NO: 2007871 - RNA, 19 nt, Artificial Sequence
  Description of Artificial Sequence: Synthetic oligonucleotide
  Antisense strand to SEQ ID NO: 2007870
uacagagaaaucagaccac

SEQ ID NO: 2007872 - RNA, 19 nt, Artificial Sequence
  Description of Artificial Sequence: Synthetic oligonucleotide
  Sense strand starting at position 2919 of SEQ ID NO: 1880968
uggucugauuucucuguau

SEQ ID NO: 2007873 - RNA, 19 nt, Artificial Sequence
  Description of Artificial Sequence: Synthetic oligonucleotide
  Antisense strand to SEQ ID NO: 2007872
auacagagaaaucagacca

SEQ ID NO: 2007874 - RNA, 19 nt, Artificial Sequence
  Description of Artificial Sequence: Synthetic oligonucleotide
  Sense strand starting at position 2921 of SEQ ID NO: 1880968
gucugauuucucuguaugu

SEQ ID NO: 2007875 - RNA, 19 nt, Artificial Sequence
  Description of Artificial Sequence: Synthetic oligonucleotide
  Antisense strand to SEQ ID NO: 2007874
acauacagagaaaucagac

SEQ ID NO: 2007876 - RNA, 19 nt, Artificial Sequence
  Description of Artificial Sequence: Synthetic oligonucleotide
  Sense strand starting at position 2922 of SEQ ID NO: 1880968
ucugauuucucuguauguu

SEQ ID NO: 2007877 - RNA, 19 nt, Artificial Sequence
  Description of Artificial Sequence: Synthetic oligonucleotide
  Antisense strand to SEQ ID NO: 2007876
aacauacagagaaaucaga

SEQ ID NO: 2007878 - RNA, 19 nt, Artificial Sequence
  Description of Artificial Sequence: Synthetic oligonucleotide
  Sense strand starting at position 2928 of SEQ ID NO: 1880968
uucucuguauguuuagaaa

SEQ ID NO: 2007879 - RNA, 19 nt, Artificial Sequence
  Description of Artificial Sequence: Synthetic oligonucleotide
  Antisense strand to SEQ ID NO: 2007878
uuucuaaacauacagagaa

SEQ ID NO: 2007880 - RNA, 19 nt, Artificial Sequence
  Description of Artificial Sequence: Synthetic oligonucleotide
  Sense strand starting at position 262 of SEQ ID NO: 1880969
cuagcagguucccuaucaa

SEQ ID NO: 2007881 - RNA, 19 nt, Artificial Sequence
  Description of Artificial Sequence: Synthetic oligonucleotide
  Antisense strand to SEQ ID NO: 2007880
uugauagggaaccugcuag

SEQ ID NO: 2007882 - RNA, 19 nt, Artificial Sequence
  Description of Artificial Sequence: Synthetic oligonucleotide
  Sense strand starting at position 294 of SEQ ID NO: 1880969
gcacccacccauugaagaa

SEQ ID NO: 2007883 - RNA, 19 nt, Artificial Sequence
  Description of Artificial Sequence: Synthetic oligonucleotide
  Antisense strand to SEQ ID NO: 2007882
uucuucaaugggugggugc

SEQ ID NO: 2007884 - RNA, 19 nt, Artificial Sequence
  Description of Artificial Sequence: Synthetic oligonucleotide
  Sense strand starting at position 363 of SEQ ID NO: 1880969
guaagucagcaguggauuu

SEQ ID NO: 2007885 - RNA, 19 nt, Artificial Sequence
  Description of Artificial Sequence: Synthetic oligonucleotide
  Antisense strand to SEQ ID NO: 2007884
aaauccacugcugacuuac

SEQ ID NO: 2007886 - RNA, 19 nt, Artificial Sequence
  Description of Artificial Sequence: Synthetic oligonucleotide
  Sense strand starting at position 470 of SEQ ID NO: 1880969
gguucucagcagugaugaa

SEQ ID NO: 2007887 - RNA, 19 nt, Artificial Sequence
  Description of Artificial Sequence: Synthetic oligonucleotide
  Antisense strand to SEQ ID NO: 2007886
uucaucacugcugagaacc

SEQ ID NO: 2007888 - RNA, 19 nt, Artificial Sequence
  Description of Artificial Sequence: Synthetic oligonucleotide
  Sense strand starting at position 495 of SEQ ID NO: 1880969
gccucaucugaaggaguua

SEQ ID NO: 2007889 - RNA, 19 nt, Artificial Sequence
  Description of Artificial Sequence: Synthetic oligonucleotide
  Antisense strand to SEQ ID NO: 2007888
uaacuccuucagaugaggc

SEQ ID NO: 2007890 - RNA, 19 nt, Artificial Sequence
  Description of Artificial Sequence: Synthetic oligonucleotide
  Sense strand starting at position 524 of SEQ ID NO: 1880969
ugggaauuaucuucucuac

SEQ ID NO: 2007891 - RNA, 19 nt, Artificial Sequence
  Description of Artificial Sequence: Synthetic oligonucleotide
  Antisense strand to SEQ ID NO: 2007890
guagagaagauaauuccca

SEQ ID NO: 2007892 - RNA, 19 nt, Artificial Sequence
  Description of Artificial Sequence: Synthetic oligonucleotide
  Sense strand starting at position 589 of SEQ ID NO: 1880969
auuguagcacuguaaacuu

SEQ ID NO: 2007893 - RNA, 19 nt, Artificial Sequence
  Description of Artificial Sequence: Synthetic oligonucleotide
  Antisense strand to SEQ ID NO: 2007892
aaguuuacagugcuacaau

SEQ ID NO: 2007894 - RNA, 19 nt, Artificial Sequence
  Description of Artificial Sequence: Synthetic oligonucleotide
  Sense strand starting at position 628 of SEQ ID NO: 1880969
aaucuugcagugugaauuu

SEQ ID NO: 2007895 - RNA, 19 nt, Artificial Sequence
  Description of Artificial Sequence: Synthetic oligonucleotide
  Antisense strand to SEQ ID NO: 2007894
aaauucacacugcaagauu

SEQ ID NO: 2007896 - RNA, 19 nt, Artificial Sequence
  Description of Artificial Sequence: Synthetic oligonucleotide
  Sense strand starting at position 708 of SEQ ID NO: 1880969
cugacacccugaguuaaca

SEQ ID NO: 2007897 - RNA, 19 nt, Artificial Sequence
  Description of Artificial Sequence: Synthetic oligonucleotide
  Antisense strand to SEQ ID NO: 2007896
uguuaacucagggugucag

SEQ ID NO: 2007898 - RNA, 19 nt, Artificial Sequence
  Description of Artificial Sequence: Synthetic oligonucleotide
  Sense strand starting at position 771 of SEQ ID NO: 1880969
aaaugugauguaugaagca

SEQ ID NO: 2007899 - RNA, 19 nt, Artificial Sequence
  Description of Artificial Sequence: Synthetic oligonucleotide
  Antisense strand to SEQ ID NO: 2007898
ugcuucauacaucacauuu

SEQ ID NO: 2007900 - RNA, 19 nt, Artificial Sequence
  Description of Artificial Sequence: Synthetic oligonucleotide
  Sense strand starting at position 865 of SEQ ID NO: 1880969
ccuccagcacuuugaaaga

SEQ ID NO: 2007901 - RNA, 19 nt, Artificial Sequence
  Description of Artificial Sequence: Synthetic oligonucleotide
  Antisense strand to SEQ ID NO: 2007900
ucuuucaaagugcuggagg

SEQ ID NO: 2007902 - RNA, 19 nt, Artificial Sequence
  Description of Artificial Sequence: Synthetic oligonucleotide
  Sense strand starting at position 892 of SEQ ID NO: 1880969
uggagacuugcacacagua

SEQ ID NO: 2007903 - RNA, 19 nt, Artificial Sequence
  Description of Artificial Sequence: Synthetic oligonucleotide
  Antisense strand to SEQ ID NO: 2007902
uacugugugcaagucucca
